United States Patent Application Publication US 2007/0042381 A1 - sequence listing, part 40

SEQ ID NO: 1786116 - RNA, 19 nt, Human
gcuucaguggcagcugcuu

SEQ ID NO: 1786117 - RNA, 20 nt, Human
gcuucaguggcagcugcuuu

SEQ ID NO: 1786118 - RNA, 17 nt, Human
gcuucauggcagaaggc

SEQ ID NO: 1786119 - RNA, 17 nt, Human
gcuucauguggcuuccc

SEQ ID NO: 1786120 - RNA, 17 nt, Human
gcugacgaacuuccaug

SEQ ID NO: 1786121 - RNA, 19 nt, Human
gcugacgaacuuccauggc

SEQ ID NO: 1786122 - RNA, 15 nt, Human
gcugacgaacuucca

SEQ ID NO: 1786123 - RNA, 20 nt, Human
gcugacagacacaggcccgg

SEQ ID NO: 1786124 - RNA, 18 nt, Human
gcugacagacacaggccc

SEQ ID NO: 1786125 - RNA, 19 nt, Human
gcugacagacacaggcccg

SEQ ID NO: 1786126 - RNA, 13 nt, Human
gcugccaaaugcg

SEQ ID NO: 1786127 - RNA, 22 nt, Human
gcugcaaaggguaucaggugcu

SEQ ID NO: 1786128 - RNA, 23 nt, Human
gcugcaaaggguaucaggugcug

SEQ ID NO: 1786129 - RNA, 12 nt, Human
gcugccuuagcu

SEQ ID NO: 1786130 - RNA, 14 nt, Human
gcugccuuagcuuc

SEQ ID NO: 1786131 - RNA, 20 nt, Human
gcugccuuagcuucaggaac

SEQ ID NO: 1786132 - RNA, 20 nt, Human
gcugccuguucagcuccagc

SEQ ID NO: 1786133 - RNA, 22 nt, Human
gcugccuguucagcuccagcuc

SEQ ID NO: 1786134 - RNA, 18 nt, Human
gcugccuguucagcucca

SEQ ID NO: 1786135 - RNA, 19 nt, Human
gcugccuguucagcuccag

SEQ ID NO: 1786136 - RNA, 14 nt, Human
gcugcgguccaccc

SEQ ID NO: 1786137 - RNA, 15 nt, Human
gcugcgguccaccca

SEQ ID NO: 1786138 - RNA, 22 nt, Human
gcugcgguccacccaggagccc

SEQ ID NO: 1786139 - RNA, 17 nt, Human
gcugcggcguacaggcu

SEQ ID NO: 1786140 - RNA, 18 nt, Human
gcugcggcguacaggcug

SEQ ID NO: 1786141 - RNA, 16 nt, Human
gcugcgguccacccag

SEQ ID NO: 1786142 - RNA, 21 nt, Human
gcugcgguccacccaggagcc

SEQ ID NO: 1786143 - RNA, 22 nt, Human
gcugcuuuugucuaugggacuc

SEQ ID NO: 1786144 - RNA, 12 nt, Human
gcuggaagccca

SEQ ID NO: 1786145 - RNA, 13 nt, Human
gcuggaagcccag

SEQ ID NO: 1786146 - RNA, 14 nt, Human
gcuggaagcccagc

SEQ ID NO: 1786147 - RNA, 22 nt, Human
gcuggaagcccagccccuacug

SEQ ID NO: 1786148 - RNA, 23 nt, Human
gcuggccaucugguuaggauggc

SEQ ID NO: 1786149 - RNA, 16 nt, Human
gcuggaccuugaacug

SEQ ID NO: 1786150 - RNA, 15 nt, Human
gcuggaccuugaacu

SEQ ID NO: 1786151 - RNA, 19 nt, Human
gcuggccaaauagcaaaga

SEQ ID NO: 1786152 - RNA, 21 nt, Human
gcuggcaugauccaagcaaga

SEQ ID NO: 1786153 - RNA, 16 nt, Human
gcgccugcugcaugcc

SEQ ID NO: 1786154 - RNA, 13 nt, Human
gcgccccuagccg

SEQ ID NO: 1786155 - RNA, 22 nt, Human
gcgccccuagccgguuccuguc

SEQ ID NO: 1786156 - RNA, 12 nt, Human
gcgccccuagcc

SEQ ID NO: 1786157 - RNA, 23 nt, Human
gcgcccaguuggguggaugccug

SEQ ID NO: 1786158 - RNA, 14 nt, Human
gcgcagugccuugc

SEQ ID NO: 1786159 - RNA, 13 nt, Human
gcgccacaggacc

SEQ ID NO: 1786160 - RNA, 14 nt, Human
gcgccacaggaccc

SEQ ID NO: 1786161 - RNA, 19 nt, Human
gcggagacggagucccacc

SEQ ID NO: 1786162 - RNA, 14 nt, Human
gcggggacagcucc

SEQ ID NO: 1786163 - RNA, 18 nt, Human
gcggggacagcuccuucu

SEQ ID NO: 1786164 - RNA, 19 nt, Human
gcgcauucuaaccuggagg

SEQ ID NO: 1786165 - RNA, 15 nt, Human
gcggggacagcuccu

SEQ ID NO: 1786166 - RNA, 17 nt, Human
gcggggacagcuccuuc

SEQ ID NO: 1786167 - RNA, 19 nt, Human
gcggugagaggggaacaga

SEQ ID NO: 1786168 - RNA, 15 nt, Human
gcggugccaugucug

SEQ ID NO: 1786169 - RNA, 21 nt, Human
gcggugccaugucugcagugu

SEQ ID NO: 1786170 - RNA, 13 nt, Human
gcgguccacccag

SEQ ID NO: 1786171 - RNA, 14 nt, Human
gcgguccacccagg

SEQ ID NO: 1786172 - RNA, 20 nt, Human
gccuuaaaccuaccucccac

SEQ ID NO: 1786173 - RNA, 19 nt, Human
gccuuaauaaaaaaugaaa

SEQ ID NO: 1786174 - RNA, 13 nt, Human
gccuuccuccugg

SEQ ID NO: 1786175 - RNA, 14 nt, Human
gccuuccuccuggg

SEQ ID NO: 1786176 - RNA, 16 nt, Human
gccuuccuccugggcc

SEQ ID NO: 1786177 - RNA, 17 nt, Human
gccuuccuccugggccc

SEQ ID NO: 1786178 - RNA, 22 nt, Human
gccuuccuccugggcccucucu

SEQ ID NO: 1786179 - RNA, 15 nt, Human
gccuuguugaugugg

SEQ ID NO: 1786180 - RNA, 17 nt, Human
gccuugucccagaggcu

SEQ ID NO: 1786181 - RNA, 14 nt, Human
gccuuuccucaaaa

SEQ ID NO: 1786182 - RNA, 20 nt, Human
gccuuuccucaaaacuggag

SEQ ID NO: 1786183 - RNA, 21 nt, Human
gccuuuccucaaaacuggagu

SEQ ID NO: 1786184 - RNA, 13 nt, Human
gccuuuccucucu

SEQ ID NO: 1786185 - RNA, 13 nt, Human
gccuuuaaaauuu

SEQ ID NO: 1786186 - RNA, 14 nt, Human
gccuuuccucucua

SEQ ID NO: 1786187 - RNA, 15 nt, Human
gccuuucgaggccug

SEQ ID NO: 1786188 - RNA, 16 nt, Human
gccuuucgaggccuga

SEQ ID NO: 1786189 - RNA, 19 nt, Human
gccuuucgaggccugaagc

SEQ ID NO: 1786190 - RNA, 23 nt, Human
gccuuuccuuuucgccuuuccuc

SEQ ID NO: 1786191 - RNA, 16 nt, Human
gccuggccccaugguc

SEQ ID NO: 1786192 - RNA, 20 nt, Human
gccuggccagaugcaccagc

SEQ ID NO: 1786193 - RNA, 21 nt, Human
gccuggccagaugcaccagcc

SEQ ID NO: 1786194 - RNA, 22 nt, Human
gccuggccagaugcaccagccc

SEQ ID NO: 1786195 - RNA, 13 nt, Human
gccugucugcccc

SEQ ID NO: 1786196 - RNA, 15 nt, Human
gccugucugccccag

SEQ ID NO: 1786197 - RNA, 21 nt, Human
gccugucugccccagcccaga

SEQ ID NO: 1786198 - RNA, 22 nt, Human
gccuggguuuuguucccuauuu

SEQ ID NO: 1786199 - RNA, 22 nt, Human
gccugggccguaucuccggcuc

SEQ ID NO: 1786200 - RNA, 14 nt, Human
gccugcugcaugcc

SEQ ID NO: 1786201 - RNA, 18 nt, Human
gccugcugcaugcccucu

SEQ ID NO: 1786202 - RNA, 21 nt, Human
gccugcugcaugcccucucag

SEQ ID NO: 1786203 - RNA, 22 nt, Human
gccugcugcaugcccucucagg

SEQ ID NO: 1786204 - RNA, 16 nt, Human
gccugcauguaaacac

SEQ ID NO: 1786205 - RNA, 17 nt, Human
gccugagccuggccagc

SEQ ID NO: 1786206 - RNA, 16 nt, Human
gccugagccuggccag

SEQ ID NO: 1786207 - RNA, 10 nt, Human
gccugaggga

SEQ ID NO: 1786208 - RNA, 22 nt, Human
gccugcaggaccugccuguagc

SEQ ID NO: 1786209 - RNA, 19 nt, Human
gcccaguuggguggaugcc

SEQ ID NO: 1786210 - RNA, 21 nt, Human
gcccaguuggguggaugccug

SEQ ID NO: 1786211 - RNA, 22 nt, Human
gcccaguuggguggaugccugg

SEQ ID NO: 1786212 - RNA, 16 nt, Human
gccugaagucacacag

SEQ ID NO: 1786213 - RNA, 17 nt, Human
gccugaagucacacagu

SEQ ID NO: 1786214 - RNA, 18 nt, Human
gccugaagucacacagug

SEQ ID NO: 1786215 - RNA, 24 nt, Human
gcuccgcuuucuacccagcgagcc

SEQ ID NO: 1786216 - RNA, 14 nt, Human
gcuccuuccuggag

SEQ ID NO: 1786217 - RNA, 23 nt, Human
gcuccuuccuggagacugcccag

SEQ ID NO: 1786218 - RNA, 12 nt, Human
gcuccugugucu

SEQ ID NO: 1786219 - RNA, 13 nt, Human
gcuccugugucuu

SEQ ID NO: 1786220 - RNA, 15 nt, Human
gcuccuucuguccua

SEQ ID NO: 1786221 - RNA, 14 nt, Human
gcuccuugggcccu

SEQ ID NO: 1786222 - RNA, 17 nt, Human
gcuccuugggcccuuug

SEQ ID NO: 1786223 - RNA, 19 nt, Human
gcuccuugggcccuuugag

SEQ ID NO: 1786224 - RNA, 13 nt, Human
gcuccuucugucc

SEQ ID NO: 1786225 - RNA, 17 nt, Human
gcuccuuuagcgcccag

SEQ ID NO: 1786226 - RNA, 13 nt, Human
gcuccuuugugug

SEQ ID NO: 1786227 - RNA, 12 nt, Human
gcuccaggcucc

SEQ ID NO: 1786228 - RNA, 19 nt, Human
gcuccagggaugauucaag

SEQ ID NO: 1786229 - RNA, 23 nt, Human
gcuccagggaugauucaagccau

SEQ ID NO: 1786230 - RNA, 13 nt, Human
gcuccgcaggacu

SEQ ID NO: 1786231 - RNA, 14 nt, Human
gcuccgcaggacuu

SEQ ID NO: 1786232 - RNA, 17 nt, Human
gcuccgcaggacuuccc

SEQ ID NO: 1786233 - RNA, 16 nt, Human
gcuccgcaggacuucc

SEQ ID NO: 1786234 - RNA, 18 nt, Human
gcuccgcuuucuacccag

SEQ ID NO: 1786235 - RNA, 21 nt, Human
gcuccgcuuucuacccagcga

SEQ ID NO: 1786236 - RNA, 22 nt, Human
gcuccgcuuucuacccagcgag

SEQ ID NO: 1786237 - RNA, 23 nt, Human
gcuccgcuuucuacccagcgagc

SEQ ID NO: 1786238 - RNA, 18 nt, Human
gcucaaguccucuuuucu

SEQ ID NO: 1786239 - RNA, 17 nt, Human
gcucaaggaaaggccug

SEQ ID NO: 1786240 - RNA, 19 nt, Human
gcucaaguccucuuuucug

SEQ ID NO: 1786241 - RNA, 22 nt, Human
gcucaaguccucuuuucugaga

SEQ ID NO: 1786242 - RNA, 19 nt, Human
gcucaaggaaaggccugaa

SEQ ID NO: 1786243 - RNA, 20 nt, Human
gcucaaggaaaggccugaaa

SEQ ID NO: 1786244 - RNA, 16 nt, Human
gcucaaucaagaaaau

SEQ ID NO: 1786245 - RNA, 15 nt, Human
gcuauaacuaagcau

SEQ ID NO: 1786246 - RNA, 17 nt, Human
gcuauaccugugccucg

SEQ ID NO: 1786247 - RNA, 15 nt, Human
gcuauaccugugccu

SEQ ID NO: 1786248 - RNA, 16 nt, Human
gcuauaccugugccuc

SEQ ID NO: 1786249 - RNA, 20 nt, Human
gcuauccugccaaaaucauu

SEQ ID NO: 1786250 - RNA, 21 nt, Human
gcuaguugggcuuccucauag

SEQ ID NO: 1786251 - RNA, 16 nt, Human
gcucacauaucuguca

SEQ ID NO: 1786252 - RNA, 12 nt, Human
gcucaccagccc

SEQ ID NO: 1786253 - RNA, 13 nt, Human
gcucaccagcccc

SEQ ID NO: 1786254 - RNA, 14 nt, Human
gcucaccagcccca

SEQ ID NO: 1786255 - RNA, 15 nt, Human
gcucaccagccccag

SEQ ID NO: 1786256 - RNA, 18 nt, Human
gcucaccagccccagugc

SEQ ID NO: 1786257 - RNA, 17 nt, Human
gcucagcggggacagcu

SEQ ID NO: 1786258 - RNA, 18 nt, Human
gcucagcggggacagcuc

SEQ ID NO: 1786259 - RNA, 19 nt, Human
gcucagcggggacagcucc

SEQ ID NO: 1786260 - RNA, 23 nt, Human
gcucagcggggacagcuccuucu

SEQ ID NO: 1786261 - RNA, 16 nt, Human
gcucaucauucucugu

SEQ ID NO: 1786262 - RNA, 18 nt, Human
gcucaucauucucugucu

SEQ ID NO: 1786263 - RNA, 19 nt, Human
gcucaucauucucugucuc

SEQ ID NO: 1786264 - RNA, 20 nt, Human
gcucaucauucucugucuca

SEQ ID NO: 1786265 - RNA, 20 nt, Human
ucacucuuauugcccacgcu

SEQ ID NO: 1786266 - RNA, 17 nt, Human
ucacucuuauugcccac

SEQ ID NO: 1786267 - RNA, 13 nt, Human
ucaccagccccag

SEQ ID NO: 1786268 - RNA, 16 nt, Human
ucaccagccccagugc

SEQ ID NO: 1786269 - RNA, 14 nt, Human
ucagaaacaggacc

SEQ ID NO: 1786270 - RNA, 22 nt, Human
ucagaauuuguguugaaggaac

SEQ ID NO: 1786271 - RNA, 13 nt, Human
ucagacaaaaugg

SEQ ID NO: 1786272 - RNA, 14 nt, Human
ucagacaaaaugga

SEQ ID NO: 1786273 - RNA, 21 nt, Human
ucagacaaaauggauacauaa

SEQ ID NO: 1786274 - RNA, 22 nt, Human
ucagacaaaauggauacauaaa

SEQ ID NO: 1786275 - RNA, 16 nt, Human
ucagacgccugaggaa

SEQ ID NO: 1786276 - RNA, 17 nt, Human
ucagacgccugaggaac

SEQ ID NO: 1786277 - RNA, 15 nt, Human
ucagacuuuggaaaa

SEQ ID NO: 1786278 - RNA, 20 nt, Human
ucagacuuuggaaaaugcau

SEQ ID NO: 1786279 - RNA, 16 nt, Human
ucagacuuuggaaaau

SEQ ID NO: 1786280 - RNA, 19 nt, Human
ucagacuuuggaaaaugca

SEQ ID NO: 1786281 - RNA, 21 nt, Human
ucagacuuuggaaaaugcauu

SEQ ID NO: 1786282 - RNA, 20 nt, Human
ucagccucccgaguagcugg

SEQ ID NO: 1786283 - RNA, 18 nt, Human
ucagccucccgaguagcu

SEQ ID NO: 1786284 - RNA, 21 nt, Human
ucagccucccgaauagcuggg

SEQ ID NO: 1786285 - RNA, 22 nt, Human
ucagccucccgaauagcuggga

SEQ ID NO: 1786286 - RNA, 14 nt, Human
ucagccucccaaag

SEQ ID NO: 1786287 - RNA, 19 nt, Human
ucagccucccaaagugcug

SEQ ID NO: 1786288 - RNA, 21 nt, Human
ucagccucccaaagugcuggg

SEQ ID NO: 1786289 - RNA, 21 nt, Human
ucagccucccgaguagcuggg

SEQ ID NO: 1786290 - RNA, 22 nt, Human
ucagccucccgaguagcuggga

SEQ ID NO: 1786291 - RNA, 20 nt, Human
ucagggauuuuuuuuuuaaa

SEQ ID NO: 1786292 - RNA, 12 nt, Human
ucaggcaccagu

SEQ ID NO: 1786293 - RNA, 18 nt, Human
ucaggcaccagucccugu

SEQ ID NO: 1786294 - RNA, 19 nt, Human
ucaggcaccagucccuguc

SEQ ID NO: 1786295 - RNA, 13 nt, Human
ucauuuccugugu

SEQ ID NO: 1786296 - RNA, 16 nt, Human
ucauuuccugugucuu

SEQ ID NO: 1786297 - RNA, 13 nt, Human
ucauuucuauuuc

SEQ ID NO: 1786298 - RNA, 18 nt, Human
ucauuccagaucccaggc

SEQ ID NO: 1786299 - RNA, 13 nt, Human
ucaggugcugcca

SEQ ID NO: 1786300 - RNA, 14 nt, Human
ucaggugcugccau

SEQ ID NO: 1786301 - RNA, 15 nt, Human
ucaggugcugccauc

SEQ ID NO: 1786302 - RNA, 14 nt, Human
ucagggcuccuggg

SEQ ID NO: 1786303 - RNA, 16 nt, Human
ucaucuucuucaccau

SEQ ID NO: 1786304 - RNA, 12 nt, Human
ucaucuuccugu

SEQ ID NO: 1786305 - RNA, 13 nt, Human
ucaucuuccugug

SEQ ID NO: 1786306 - RNA, 14 nt, Human
ucaucuuccugugu

SEQ ID NO: 1786307 - RNA, 15 nt, Human
ucaucuuccuguguc

SEQ ID NO: 1786308 - RNA, 16 nt, Human
ucaucuuccugugucc

SEQ ID NO: 1786309 - RNA, 19 nt, Human
ucaucuuccuguguccuga

SEQ ID NO: 1786310 - RNA, 15 nt, Human
ucaucagagccuuuc

SEQ ID NO: 1786311 - RNA, 13 nt, Human
uccaggugcccag

SEQ ID NO: 1786312 - RNA, 15 nt, Human
uccagguucagcuug

SEQ ID NO: 1786313 - RNA, 16 nt, Human
uccagguucagcuugu

SEQ ID NO: 1786314 - RNA, 18 nt, Human
uccagcucaccagcccca

SEQ ID NO: 1786315 - RNA, 15 nt, Human
uccagccaucucaug

SEQ ID NO: 1786316 - RNA, 16 nt, Human
uccagcucaccagccc

SEQ ID NO: 1786317 - RNA, 17 nt, Human
uccagcucaccagcccc

SEQ ID NO: 1786318 - RNA, 14 nt, Human
uccagcuucccgag

SEQ ID NO: 1786319 - RNA, 20 nt, Human
uccagccacuggcugcuaac

SEQ ID NO: 1786320 - RNA, 12 nt, Human
uccacccugcuc

SEQ ID NO: 1786321 - RNA, 17 nt, Human
ucauuucuauuucuccu

SEQ ID NO: 1786322 - RNA, 21 nt, Human
ucauuucuauuucuccuccau

SEQ ID NO: 1786323 - RNA, 11 nt, Human
uccaauucuau

SEQ ID NO: 1786324 - RNA, 17 nt, Human
uauuaauaguaauuugu

SEQ ID NO: 1786325 - RNA, 18 nt, Human
uauuaauaguaauuugua

SEQ ID NO: 1786326 - RNA, 20 nt, Human
uauuaauaguaauuuguaaa

SEQ ID NO: 1786327 - RNA, 13 nt, Human
uauguugcccagg

SEQ ID NO: 1786328 - RNA, 16 nt, Human
uauguugcccaggcag

SEQ ID NO: 1786329 - RNA, 19 nt, Human
uauguugcccaggcagguc

SEQ ID NO: 1786330 - RNA, 20 nt, Human
uauguugcccaggcaggucu

SEQ ID NO: 1786331 - RNA, 22 nt, Human
uauguauuuaccaaaaauuuug

SEQ ID NO: 1786332 - RNA, 16 nt, Human
uauguaacaauuguuu

SEQ ID NO: 1786333 - RNA, 21 nt, Human
uauguaaaaggccaaaccucu

SEQ ID NO: 1786334 - RNA, 22 nt, Human
uauguaaaaggccaaaccucug

SEQ ID NO: 1786335 - RNA, 23 nt, Human
uauguaaaaggccaaaccucugu

SEQ ID NO: 1786336 - RNA, 20 nt, Human
uauguacuccucuuuacacu

SEQ ID NO: 1786337 - RNA, 11 nt, Human
uauguaacaug

SEQ ID NO: 1786338 - RNA, 12 nt, Human
uauguaacaugu

SEQ ID NO: 1786339 - RNA, 21 nt, Human
uauguacuccucuuuacacug

SEQ ID NO: 1786340 - RNA, 15 nt, Human
uauguagcaaaauac

SEQ ID NO: 1786341 - RNA, 19 nt, Human
uauguagccuucacacaga

SEQ ID NO: 1786342 - RNA, 23 nt, Human
uauguagccuucacacagauaga

SEQ ID NO: 1786343 - RNA, 21 nt, Human
uauucccuagaaacuuccaaa

SEQ ID NO: 1786344 - RNA, 17 nt, Human
uauuccaagcuuccaua

SEQ ID NO: 1786345 - RNA, 11 nt, Human
uauugccuucu

SEQ ID NO: 1786346 - RNA, 16 nt, Human
uauugccuucucacca

SEQ ID NO: 1786347 - RNA, 17 nt, Human
uauugccuucucaccag

SEQ ID NO: 1786348 - RNA, 19 nt, Human
uauugccuucucaccagcu

SEQ ID NO: 1786349 - RNA, 20 nt, Human
uauugccuucucaccagcug

SEQ ID NO: 1786350 - RNA, 21 nt, Human
uauugccuucucaccagcugc

SEQ ID NO: 1786351 - RNA, 22 nt, Human
uauugccuucucaccagcugca

SEQ ID NO: 1786352 - RNA, 16 nt, Human
uauuguguuugucauu

SEQ ID NO: 1786353 - RNA, 14 nt, Human
uauuguguuuguca

SEQ ID NO: 1786354 - RNA, 18 nt, Human
uauuguguuugucauuag

SEQ ID NO: 1786355 - RNA, 17 nt, Human
uauuguguuugucauua

SEQ ID NO: 1786356 - RNA, 21 nt, Human
uauuguguuugucauuagccu

SEQ ID NO: 1786357 - RNA, 18 nt, Human
ucacauuuauucugcuca

SEQ ID NO: 1786358 - RNA, 19 nt, Human
ucacauuuauucugcucac

SEQ ID NO: 1786359 - RNA, 17 nt, Human
ucacauuuauucugcuc

SEQ ID NO: 1786360 - RNA, 16 nt, Human
ucaccacaugugcaca

SEQ ID NO: 1786361 - RNA, 15 nt, Human
ucaccaaaagacacu

SEQ ID NO: 1786362 - RNA, 16 nt, Human
ucaccaaaagacacug

SEQ ID NO: 1786363 - RNA, 18 nt, Human
ucaccaaaagacacugca

SEQ ID NO: 1786364 - RNA, 16 nt, Human
ucacaggcagguccag

SEQ ID NO: 1786365 - RNA, 17 nt, Human
ucacaggcagguccagg

SEQ ID NO: 1786366 - RNA, 18 nt, Human
ucacaggcagguccaggg

SEQ ID NO: 1786367 - RNA, 19 nt, Human
ucacaggcagguccagggu

SEQ ID NO: 1786368 - RNA, 22 nt, Human
ucaauaaaguauuuaauuagug

SEQ ID NO: 1786369 - RNA, 20 nt, Human
ucaauaaaguauuuaauuag

SEQ ID NO: 1786370 - RNA, 18 nt, Human
ucaauaaaguauuuaauu

SEQ ID NO: 1786371 - RNA, 17 nt, Human
ucaauaaaguauuuaau

SEQ ID NO: 1786372 - RNA, 16 nt, Human
ucaauaaaguauuuaa

SEQ ID NO: 1786373 - RNA, 15 nt, Human
ucaauaaaguauuua

SEQ ID NO: 1786374 - RNA, 14 nt, Human
ucaauaaaguauuu

SEQ ID NO: 1786375 - RNA, 11 nt, Human
ucaauaaagua

SEQ ID NO: 1786376 - RNA, 18 nt, Human
ucaaccugggcaaagccu

SEQ ID NO: 1786377 - RNA, 16 nt, Human
ucaacccuucuggaaa

SEQ ID NO: 1786378 - RNA, 20 nt, Human
ucaagugauucuccugccuc

SEQ ID NO: 1786379 - RNA, 18 nt, Human
ucaagugauucuccugcc

SEQ ID NO: 1786380 - RNA, 21 nt, Human
ucaagugauucuccugccuca

SEQ ID NO: 1786381 - RNA, 18 nt, Human
ucaauaaagcacugagca

SEQ ID NO: 1786382 - RNA, 11 nt, Human
uauuuuccagg

SEQ ID NO: 1786383 - RNA, 22 nt, Human
uauuuuccaaaaguggccucuu

SEQ ID NO: 1786384 - RNA, 23 nt, Human
ucaaccccuucgcuccugugucu

SEQ ID NO: 1786385 - RNA, 21 nt, Human
ucaaauuccuauuuuuaaaua

SEQ ID NO: 1786386 - RNA, 18 nt, Human
ucugccauauucuguugg

SEQ ID NO: 1786387 - RNA, 14 nt, Human
ucugccugcccagg

SEQ ID NO: 1786388 - RNA, 13 nt, Human
ucugccugcccag

SEQ ID NO: 1786389 - RNA, 16 nt, Human
ucucuggggcuguguu

SEQ ID NO: 1786390 - RNA, 15 nt, Human
ucugccugcccaggc

SEQ ID NO: 1786391 - RNA, 16 nt, Human
ucugccugcccaggcc

SEQ ID NO: 1786392 - RNA, 18 nt, Human
ucugcuccucuccccagc

SEQ ID NO: 1786393 - RNA, 21 nt, Human
ucugcuccucuccccagcaag

SEQ ID NO: 1786394 - RNA, 18 nt, Human
ucugcugacagacacagg

SEQ ID NO: 1786395 - RNA, 17 nt, Human
ucugcugacagacacag

SEQ ID NO: 1786396 - RNA, 21 nt, Human
ucuggacaggcauguucucug

SEQ ID NO: 1786397 - RNA, 16 nt, Human
ucuggaaugcaguggu

SEQ ID NO: 1786398 - RNA, 14 nt, Human
ucuggacaggcaug

SEQ ID NO: 1786399 - RNA, 15 nt, Human
ucuggaaugcagugg

SEQ ID NO: 1786400 - RNA, 19 nt, Human
ucugcugacagacacaggc

SEQ ID NO: 1786401 - RNA, 20 nt, Human
ucugcugacagacacaggcc

SEQ ID NO: 1786402 - RNA, 21 nt, Human
ucugcugacagacacaggccc

SEQ ID NO: 1786403 - RNA, 22 nt, Human
ucugcugacagacacaggcccg

SEQ ID NO: 1786404 - RNA, 14 nt, Human
ucuguccuacucug

SEQ ID NO: 1786405 - RNA, 17 nt, Human
ucugguuaggauggcag

SEQ ID NO: 1786406 - RNA, 13 nt, Human
ucugggagaaaau

SEQ ID NO: 1786407 - RNA, 20 nt, Human
ucugggagaaaaucaucaag

SEQ ID NO: 1786408 - RNA, 22 nt, Human
ucugggagaaaaucaucaagaa

SEQ ID NO: 1786409 - RNA, 23 nt, Human
ucugggagaaaaucaucaagaag

SEQ ID NO: 1786410 - RNA, 16 nt, Human
ucugucgcccagucug

SEQ ID NO: 1786411 - RNA, 14 nt, Human
ucugucgcccaguc

SEQ ID NO: 1786412 - RNA, 21 nt, Human
ucuguccugggagugagcugg

SEQ ID NO: 1786413 - RNA, 20 nt, Human
ucuguccuacucugugucag

SEQ ID NO: 1786414 - RNA, 15 nt, Human
ucuguccuacucugu

SEQ ID NO: 1786415 - RNA, 19 nt, Human
ucuguccuacucuguguca

SEQ ID NO: 1786416 - RNA, 14 nt, Human
ucugggacacaguu

SEQ ID NO: 1786417 - RNA, 15 nt, Human
ucugucuucaccuga

SEQ ID NO: 1786418 - RNA, 12 nt, Human
ucuucuccacca

SEQ ID NO: 1786419 - RNA, 13 nt, Human
ucuuccugugucc

SEQ ID NO: 1786420 - RNA, 14 nt, Human
ucuuccuguguccu

SEQ ID NO: 1786421 - RNA, 15 nt, Human
ucuuccuguguccug

SEQ ID NO: 1786422 - RNA, 16 nt, Human
ucuuccuguguccuga

SEQ ID NO: 1786423 - RNA, 12 nt, Human
ucuugaacuccu

SEQ ID NO: 1786424 - RNA, 18 nt, Human
ucuucaucuaauaugaua

SEQ ID NO: 1786425 - RNA, 22 nt, Human
ucuucagccucuuucugucccu

SEQ ID NO: 1786426 - RNA, 9 nt, Human
ucugaaaca

SEQ ID NO: 1786427 - RNA, 23 nt, Human
ucugaaacccuggaccagugguc

SEQ ID NO: 1786428 - RNA, 15 nt, Human
ucugaaaccaguguu

SEQ ID NO: 1786429 - RNA, 20 nt, Human
ucugaaaccaguguuaggga

SEQ ID NO: 1786430 - RNA, 10 nt, Human
ucugaaacag

SEQ ID NO: 1786431 - RNA, 11 nt, Human
ucugaaacagc

SEQ ID NO: 1786432 - RNA, 12 nt, Human
ucugaaacagcu

SEQ ID NO: 1786433 - RNA, 13 nt, Human
ucugaaacagcug

SEQ ID NO: 1786434 - RNA, 14 nt, Human
ucugaaacagcugc

SEQ ID NO: 1786435 - RNA, 15 nt, Human
ucugaaacagcugcc

SEQ ID NO: 1786436 - RNA, 17 nt, Human
ucugaaacagcugccuu

SEQ ID NO: 1786437 - RNA, 18 nt, Human
ucugaaacagcugccuua

SEQ ID NO: 1786438 - RNA, 22 nt, Human
ucugaaacagcugccuuagcuu

SEQ ID NO: 1786439 - RNA, 16 nt, Human
ucugacacacagcucu

SEQ ID NO: 1786440 - RNA, 17 nt, Human
ucugacacacagcucug

SEQ ID NO: 1786441 - RNA, 18 nt, Human
ucugacacacagcucugu

SEQ ID NO: 1786442 - RNA, 19 nt, Human
ucugacacacagcucuguc

SEQ ID NO: 1786443 - RNA, 12 nt, Human
ucugacaggcaa

SEQ ID NO: 1786444 - RNA, 21 nt, Human
ucugacaggcaaugcuggcug

SEQ ID NO: 1786445 - RNA, 22 nt, Human
ucugacaggcaaugcuggcugu

SEQ ID NO: 1786446 - RNA, 13 nt, Human
ucugacccacugc

SEQ ID NO: 1786447 - RNA, 14 nt, Human
ucugacccacugcu

SEQ ID NO: 1786448 - RNA, 15 nt, Human
ucugacccacugcuu

SEQ ID NO: 1786449 - RNA, 23 nt, Human
ucugaggaauccagacccggcug

SEQ ID NO: 1786450 - RNA, 13 nt, Human
ucugccaccccua

SEQ ID NO: 1786451 - RNA, 22 nt, Human
ucugccaccccuaaacuccagg

SEQ ID NO: 1786452 - RNA, 21 nt, Human
ucugcauccagagauucauuu

SEQ ID NO: 1786453 - RNA, 22 nt, Human
ucugcauccagagauucauuuu

SEQ ID NO: 1786454 - RNA, 23 nt, Human
ucugcauccagagauucauuuuc

SEQ ID NO: 1786455 - RNA, 17 nt, Human
ucucugaggacacuaac

SEQ ID NO: 1786456 - RNA, 13 nt, Human
ucucugggagaaa

SEQ ID NO: 1786457 - RNA, 14 nt, Human
ucucugggagaaaa

SEQ ID NO: 1786458 - RNA, 16 nt, Human
ucucugggagaaaauc

SEQ ID NO: 1786459 - RNA, 17 nt, Human
ucucugggagaaaauca

SEQ ID NO: 1786460 - RNA, 18 nt, Human
ucucugggagaaaaucau

SEQ ID NO: 1786461 - RNA, 19 nt, Human
ucucugggagaaaaucauc

SEQ ID NO: 1786462 - RNA, 22 nt, Human
ucucugggagaaaaucaucaag

SEQ ID NO: 1786463 - RNA, 12 nt, Human
ucucugucucau

SEQ ID NO: 1786464 - RNA, 14 nt, Human
ucucugucucaucc

SEQ ID NO: 1786465 - RNA, 15 nt, Human
ucucugucucaucca

SEQ ID NO: 1786466 - RNA, 16 nt, Human
ucucugucucauccau

SEQ ID NO: 1786467 - RNA, 21 nt, Human
ucucugucucauccaucauca

SEQ ID NO: 1786468 - RNA, 23 nt, Human
ucucugucucauccaucaucaug

SEQ ID NO: 1786469 - RNA, 19 nt, Human
ucuccugccucagccuccc

SEQ ID NO: 1786470 - RNA, 17 nt, Human
ucuccugccucagccuc

SEQ ID NO: 1786471 - RNA, 15 nt, Human
ucuccugccucagcc

SEQ ID NO: 1786472 - RNA, 21 nt, Human
ucucaagaugggggcagggcu

SEQ ID NO: 1786473 - RNA, 22 nt, Human
ucucaagaugggggcagggcug

SEQ ID NO: 1786474 - RNA, 13 nt, Human
ucucaaugcucau

SEQ ID NO: 1786475 - RNA, 18 nt, Human
ucuaugcuuuccaaaccu

SEQ ID NO: 1786476 - RNA, 13 nt, Human
ucuaugcuuucca

SEQ ID NO: 1786477 - RNA, 17 nt, Human
ucuaugcuuuccaaacc

SEQ ID NO: 1786478 - RNA, 14 nt, Human
ucuaauauguaaca

SEQ ID NO: 1786479 - RNA, 12 nt, Human
ucuacuuugaag

SEQ ID NO: 1786480 - RNA, 20 nt, Human
ucuacuuugaagucauacca

SEQ ID NO: 1786481 - RNA, 22 nt, Human
ucgugagcucuugugaggaaag

SEQ ID NO: 1786482 - RNA, 16 nt, Human
ucgugagcucuuguga

SEQ ID NO: 1786483 - RNA, 15 nt, Human
ucgugagcucuugug

SEQ ID NO: 1786484 - RNA, 12 nt, Human
ucgaguacugug

SEQ ID NO: 1786485 - RNA, 13 nt, Human
ucgaguacugugg

SEQ ID NO: 1786486 - RNA, 14 nt, Human
ucgaguacuguggg

SEQ ID NO: 1786487 - RNA, 16 nt, Human
ucgaguacugugggca

SEQ ID NO: 1786488 - RNA, 17 nt, Human
ucgaguacugugggcaa

SEQ ID NO: 1786489 - RNA, 20 nt, Human
ucgaguacugugggcaauuu

SEQ ID NO: 1786490 - RNA, 23 nt, Human
ucgaguacugugggcaauuuaga

SEQ ID NO: 1786491 - RNA, 18 nt, Human
ucgugcggaaucagcuuc

SEQ ID NO: 1786492 - RNA, 13 nt, Human
uccuguccucccu

SEQ ID NO: 1786493 - RNA, 15 nt, Human
uccuguccucccuca

SEQ ID NO: 1786494 - RNA, 17 nt, Human
uccuguccucccucacc

SEQ ID NO: 1786495 - RNA, 10 nt, Human
uccuguccuc

SEQ ID NO: 1786496 - RNA, 13 nt, Human
uccuggcacugga

SEQ ID NO: 1786497 - RNA, 18 nt, Human
uccuggcacuggacccca

SEQ ID NO: 1786498 - RNA, 19 nt, Human
uccuggcacuggaccccag

SEQ ID NO: 1786499 - RNA, 21 nt, Human
uccuggcacuggaccccagca

SEQ ID NO: 1786500 - RNA, 20 nt, Human
uccuggcacccggccccugc

SEQ ID NO: 1786501 - RNA, 21 nt, Human
uccuggcacccggccccugcu

SEQ ID NO: 1786502 - RNA, 22 nt, Human
uccuggcacccggccccugcug

SEQ ID NO: 1786503 - RNA, 17 nt, Human
uccugccucagccuccc

SEQ ID NO: 1786504 - RNA, 16 nt, Human
uccugccucagccucc

SEQ ID NO: 1786505 - RNA, 13 nt, Human
uccugccucagcc

SEQ ID NO: 1786506 - RNA, 15 nt, Human
uccugccucagccuc

SEQ ID NO: 1786507 - RNA, 14 nt, Human
uccuggcacccggc

SEQ ID NO: 1786508 - RNA, 16 nt, Human
uccuggcacccggccc

SEQ ID NO: 1786509 - RNA, 19 nt, Human
uccuggcacccggccccug

SEQ ID NO: 1786510 - RNA, 14 nt, Human
uccugccucagccu

SEQ ID NO: 1786511 - RNA, 20 nt, Human
ucgaggccugaagccagcug

SEQ ID NO: 1786512 - RNA, 15 nt, Human
uccuuuguucccggc

SEQ ID NO: 1786513 - RNA, 21 nt, Human
uccuuggcaguggacucagaa

SEQ ID NO: 1786514 - RNA, 20 nt, Human
uccuugaccugcauuguaaa

SEQ ID NO: 1786515 - RNA, 22 nt, Human
uccuugaccugcauuguaaaua

SEQ ID NO: 1786516 - RNA, 18 nt, Human
uccuaauaaaguucugua

SEQ ID NO: 1786517 - RNA, 13 nt, Human
uccgaccagacac

SEQ ID NO: 1786518 - RNA, 17 nt, Human
uccgaccagacaccuug

SEQ ID NO: 1786519 - RNA, 18 nt, Human
uccuacccacccuccuuu

SEQ ID NO: 1786520 - RNA, 21 nt, Human
uccuauucuuucgaaagaaga

SEQ ID NO: 1786521 - RNA, 18 nt, Human
uccuauguuuuuguucaa

SEQ ID NO: 1786522 - RNA, 23 nt, Human
uccuaugugauuuuaacucuguc

SEQ ID NO: 1786523 - RNA, 22 nt, Human
uccuaugugauuuuaacucugu

SEQ ID NO: 1786524 - RNA, 19 nt, Human
uccuauguuuuuguucaaa

SEQ ID NO: 1786525 - RNA, 17 nt, Human
uccuauucaaauuccua

SEQ ID NO: 1786526 - RNA, 18 nt, Human
uccuauacgcagcgugcu

SEQ ID NO: 1786527 - RNA, 19 nt, Human
uccuauacgcagcgugcuu

SEQ ID NO: 1786528 - RNA, 17 nt, Human
uccuauaaggaagauuu

SEQ ID NO: 1786529 - RNA, 21 nt, Human
uccuauaaggaagauuuggaa

SEQ ID NO: 1786530 - RNA, 23 nt, Human
uccuaguucuguagaaaugguug

SEQ ID NO: 1786531 - RNA, 16 nt, Human
uccuaguuuuccuacu

SEQ ID NO: 1786532 - RNA, 17 nt, Human
uccuaguuuuccuacuu

SEQ ID NO: 1786533 - RNA, 17 nt, Human
uccuaguucuguagaaa

SEQ ID NO: 1786534 - RNA, 16 nt, Human
uccuaguucuguagaa

SEQ ID NO: 1786535 - RNA, 19 nt, Human
uccuaguucuguagaaaug

SEQ ID NO: 1786536 - RNA, 18 nt, Human
uccuaguucuguagaaau

SEQ ID NO: 1786537 - RNA, 17 nt, Human
uccucauuaaauuaccu

SEQ ID NO: 1786538 - RNA, 16 nt, Human
uccuccuuuccuccuc

SEQ ID NO: 1786539 - RNA, 17 nt, Human
uccuccuuuccuccucu

SEQ ID NO: 1786540 - RNA, 19 nt, Human
uccucuacuaacaaucagc

SEQ ID NO: 1786541 - RNA, 17 nt, Human
uccucuacuaacaauca

SEQ ID NO: 1786542 - RNA, 18 nt, Human
uccucuacuaacaaucag

SEQ ID NO: 1786543 - RNA, 22 nt, Human
uccuccacguucugcucaucau

SEQ ID NO: 1786544 - RNA, 23 nt, Human
uccuccacguucugcucaucauu

SEQ ID NO: 1786545 - RNA, 21 nt, Human
uccuccacguucugcucauca

SEQ ID NO: 1786546 - RNA, 20 nt, Human
uccucaugucuucucacaag

SEQ ID NO: 1786547 - RNA, 23 nt, Human
uccucaugucuucucacaagcca

SEQ ID NO: 1786548 - RNA, 20 nt, Human
uccuccugggcccucucugc

SEQ ID NO: 1786549 - RNA, 22 nt, Human
uccuccugggcccucucugcuc

SEQ ID NO: 1786550 - RNA, 15 nt, Human
ucccugcgccuuucc

SEQ ID NO: 1786551 - RNA, 16 nt, Human
ucccugcgccuuuccu

SEQ ID NO: 1786552 - RNA, 13 nt, Human
ucccugcacuugc

SEQ ID NO: 1786553 - RNA, 14 nt, Human
ucccugcacuugca

SEQ ID NO: 1786554 - RNA, 18 nt, Human
uccgaaccuccucuguga

SEQ ID NO: 1786555 - RNA, 22 nt, Human
uccgaaccuccucugugaagca

SEQ ID NO: 1786556 - RNA, 19 nt, Human
uccgaaccuccucugugaa

SEQ ID NO: 1786557 - RNA, 20 nt, Human
uccgaccacuaauugccaag

SEQ ID NO: 1786558 - RNA, 15 nt, Human
ucccgggacgcagca

SEQ ID NO: 1786559 - RNA, 15 nt, Human
ucccgggccagggcu

SEQ ID NO: 1786560 - RNA, 16 nt, Human
ucccgggccagggcug

SEQ ID NO: 1786561 - RNA, 21 nt, Human
ucccgggccagggcugccccu

SEQ ID NO: 1786562 - RNA, 17 nt, Human
ucccgggccccacagac

SEQ ID NO: 1786563 - RNA, 19 nt, Human
ucccucgcugcacaaauac

SEQ ID NO: 1786564 - RNA, 22 nt, Human
ucccucgcugcacaaauacucc

SEQ ID NO: 1786565 - RNA, 21 nt, Human
ucccucuacagagcuucccug

SEQ ID NO: 1786566 - RNA, 22 nt, Human
ucccucuacagagcuucccuga

SEQ ID NO: 1786567 - RNA, 16 nt, Human
uggugucaccugaaga

SEQ ID NO: 1786568 - RNA, 14 nt, Human
ugguucccuuccua

SEQ ID NO: 1786569 - RNA, 18 nt, Human
ugguugaugaucuuugca

SEQ ID NO: 1786570 - RNA, 12 nt, Human
ugguugaggaaa

SEQ ID NO: 1786571 - RNA, 16 nt, Human
ugguggguccaugggc

SEQ ID NO: 1786572 - RNA, 17 nt, Human
ugguggguccaugggca

SEQ ID NO: 1786573 - RNA, 18 nt, Human
ugguggguccaugggcag

SEQ ID NO: 1786574 - RNA, 13 nt, Human
ugguggcuggguu

SEQ ID NO: 1786575 - RNA, 20 nt, Human
ugguggcagugggagcugcc

SEQ ID NO: 1786576 - RNA, 13 nt, Human
ugguggcaguggg

SEQ ID NO: 1786577 - RNA, 18 nt, Human
ugguggcagugggagcug

SEQ ID NO: 1786578 - RNA, 20 nt, Human
uggguacuuguggacacagc

SEQ ID NO: 1786579 - RNA, 23 nt, Human
uggguacuuguggacacagcucu

SEQ ID NO: 1786580 - RNA, 21 nt, Human
uguaaaaggccaaaccucugu

SEQ ID NO: 1786581 - RNA, 22 nt, Human
uguaaaaggccaaaccucuguu

SEQ ID NO: 1786582 - RNA, 23 nt, Human
uguaaaaggccaaaccucuguuc

SEQ ID NO: 1786583 - RNA, 23 nt, Human
uguaaaaucuuucuuucuuagaa

SEQ ID NO: 1786584 - RNA, 22 nt, Human
uguaaaaucuuucuuucuuaga

SEQ ID NO: 1786585 - RNA, 13 nt, Human
uguaaaaucuuuc

SEQ ID NO: 1786586 - RNA, 21 nt, Human
uguaaaaucuuucuuucuuag

SEQ ID NO: 1786587 - RNA, 14 nt, Human
uguaaaaucuuucu

SEQ ID NO: 1786588 - RNA, 16 nt, Human
ugguuuuuacuuaacu

SEQ ID NO: 1786589 - RNA, 16 nt, Human
ugguuguauuagaugu

SEQ ID NO: 1786590 - RNA, 14 nt, Human
ugguuguauuagau

SEQ ID NO: 1786591 - RNA, 12 nt, Human
ugguuguauuag

SEQ ID NO: 1786592 - RNA, 24 nt, Human
ugguugguuuugacuucagauuga

SEQ ID NO: 1786593 - RNA, 18 nt, Human
ugguuguauuagauguuc

SEQ ID NO: 1786594 - RNA, 12 nt, Human
ugguuggauaag

SEQ ID NO: 1786595 - RNA, 14 nt, Human
uguaacaagccacc

SEQ ID NO: 1786596 - RNA, 14 nt, Human
uguaaacugugcac

SEQ ID NO: 1786597 - RNA, 15 nt, Human
uguaaacugugcacc

SEQ ID NO: 1786598 - RNA, 17 nt, Human
uguaacaagccacccca

SEQ ID NO: 1786599 - RNA, 11 nt, Human
uguaacaugua

SEQ ID NO: 1786600 - RNA, 15 nt, Human
uguacagaauauuuc

SEQ ID NO: 1786601 - RNA, 23 nt, Human
uguacagaauauuucuauugaau

SEQ ID NO: 1786602 - RNA, 15 nt, Human
ugucacaggcagguc

SEQ ID NO: 1786603 - RNA, 16 nt, Human
ugucacaggcaggucc

SEQ ID NO: 1786604 - RNA, 17 nt, Human
ugucacaggcaggucca

SEQ ID NO: 1786605 - RNA, 21 nt, Human
ugucacaggcagguccagggu

SEQ ID NO: 1786606 - RNA, 17 nt, Human
ugucaauuuaugaauau

SEQ ID NO: 1786607 - RNA, 19 nt, Human
ugucaauuuaugaauauaa

SEQ ID NO: 1786608 - RNA, 13 nt, Human
ugucacacacuuu

SEQ ID NO: 1786609 - RNA, 14 nt, Human
ugucacaggcaggu

SEQ ID NO: 1786610 - RNA, 21 nt, Human
uguauguaacaauuguuuguu

SEQ ID NO: 1786611 - RNA, 16 nt, Human
uguauaaaaucagcca

SEQ ID NO: 1786612 - RNA, 14 nt, Human
uguauaaaaucagc

SEQ ID NO: 1786613 - RNA, 21 nt, Human
uguaggaaccgugguaugucu

SEQ ID NO: 1786614 - RNA, 22 nt, Human
uguaggaaccgugguaugucug

SEQ ID NO: 1786615 - RNA, 12 nt, Human
uguccccuccca

SEQ ID NO: 1786616 - RNA, 15 nt, Human
uguccuccaggagcu

SEQ ID NO: 1786617 - RNA, 16 nt, Human
uguccuccaggagcuu

SEQ ID NO: 1786618 - RNA, 21 nt, Human
uguccuccaggagcuucuugu

SEQ ID NO: 1786619 - RNA, 18 nt, Human
uguccucccagcuccuca

SEQ ID NO: 1786620 - RNA, 10 nt, Human
uguccugccu

SEQ ID NO: 1786621 - RNA, 14 nt, Human
uguccugccugucu

SEQ ID NO: 1786622 - RNA, 15 nt, Human
uguccugccugucug

SEQ ID NO: 1786623 - RNA, 16 nt, Human
uguccugccugucugc

SEQ ID NO: 1786624 - RNA, 17 nt, Human
uguccugccugucugcc

SEQ ID NO: 1786625 - RNA, 19 nt, Human
uguccugccugucugcccc

SEQ ID NO: 1786626 - RNA, 21 nt, Human
uguccugccugucugccccag

SEQ ID NO: 1786627 - RNA, 12 nt, Human
uguccugggagu

SEQ ID NO: 1786628 - RNA, 19 nt, Human
uguccugggagugagcugg

SEQ ID NO: 1786629 - RNA, 20 nt, Human
uguccugggagugagcuggu

SEQ ID NO: 1786630 - RNA, 14 nt, Human
ugucuaugggacuc

SEQ ID NO: 1786631 - RNA, 15 nt, Human
ugucuaugggacuca

SEQ ID NO: 1786632 - RNA, 16 nt, Human
ugucuaugggacucaa

SEQ ID NO: 1786633 - RNA, 22 nt, Human
ugucuuaaugaaguuugaaugu

SEQ ID NO: 1786634 - RNA, 21 nt, Human
ugucuuaaugaaguuugaaug

SEQ ID NO: 1786635 - RNA, 20 nt, Human
ugucuuaaugaaguuugaau

SEQ ID NO: 1786636 - RNA, 19 nt, Human
ugucuuaaugaaguuugaa

SEQ ID NO: 1786637 - RNA, 18 nt, Human
ugucuuaaugaaguuuga

SEQ ID NO: 1786638 - RNA, 15 nt, Human
ugucuuaaugaaguu

SEQ ID NO: 1786639 - RNA, 14 nt, Human
ugucuuaaugaagu

SEQ ID NO: 1786640 - RNA, 14 nt, Human
uggccccugcccgg

SEQ ID NO: 1786641 - RNA, 17 nt, Human
uggcagcugcgguccac

SEQ ID NO: 1786642 - RNA, 19 nt, Human
uggcagcugcgguccaccc

SEQ ID NO: 1786643 - RNA, 18 nt, Human
uggccucaagugauucuc

SEQ ID NO: 1786644 - RNA, 23 nt, Human
uggccucaagugauucuccugcc

SEQ ID NO: 1786645 - RNA, 22 nt, Human
uggcuuccuaaaauucagugga

SEQ ID NO: 1786646 - RNA, 10 nt, Human
uggcugggca

SEQ ID NO: 1786647 - RNA, 20 nt, Human
uggcugggcagagcugcauc

SEQ ID NO: 1786648 - RNA, 19 nt, Human
uggcucccgcggugccaug

SEQ ID NO: 1786649 - RNA, 22 nt, Human
ugggcuucaguggcagcugcuu

SEQ ID NO: 1786650 - RNA, 21 nt, Human
ugggcuucaguggcagcugcu

SEQ ID NO: 1786651 - RNA, 19 nt, Human
ugggccugccgggcugagg

SEQ ID NO: 1786652 - RNA, 20 nt, Human
ugggccugccgggcugaggg

SEQ ID NO: 1786653 - RNA, 13 nt, Human
uggggcagcuuga

SEQ ID NO: 1786654 - RNA, 16 nt, Human
ugggggccucagugcc

SEQ ID NO: 1786655 - RNA, 13 nt, Human
ugggggcagggcu

SEQ ID NO: 1786656 - RNA, 14 nt, Human
ugggggcagggcug

SEQ ID NO: 1786657 - RNA, 15 nt, Human
ugggggcagggcugu

SEQ ID NO: 1786658 - RNA, 19 nt, Human
ugggguggguauaaaagau

SEQ ID NO: 1786659 - RNA, 15 nt, Human
ugggguggguauaaa

SEQ ID NO: 1786660 - RNA, 18 nt, Human
ugggaugguggagggcca

SEQ ID NO: 1786661 - RNA, 16 nt, Human
ugggaugguggagggc

SEQ ID NO: 1786662 - RNA, 17 nt, Human
ugggaugguggagggcc

SEQ ID NO: 1786663 - RNA, 13 nt, Human
ugggcccuuugag

SEQ ID NO: 1786664 - RNA, 21 nt, Human
ugggccguaucuccggcuccc

SEQ ID NO: 1786665 - RNA, 20 nt, Human
ugggccguaucuccggcucc

SEQ ID NO: 1786666 - RNA, 19 nt, Human
ugggaugagaguuuuggau

SEQ ID NO: 1786667 - RNA, 12 nt, Human
ugggauagagaa

SEQ ID NO: 1786668 - RNA, 17 nt, Human
ugggauagagaauguuc

SEQ ID NO: 1786669 - RNA, 22 nt, Human
ugggaguugaucgccuuuccca

SEQ ID NO: 1786670 - RNA, 15 nt, Human
uggaugcagugcucg

SEQ ID NO: 1786671 - RNA, 14 nt, Human
uggaugcagugcuc

SEQ ID NO: 1786672 - RNA, 16 nt, Human
uggcacuggaccccag

SEQ ID NO: 1786673 - RNA, 18 nt, Human
uggcacuggaccccagca

SEQ ID NO: 1786674 - RNA, 23 nt, Human
uggacuaaaagauauaagugcug

SEQ ID NO: 1786675 - RNA, 22 nt, Human
uggacuaaaagauauaagugcu

SEQ ID NO: 1786676 - RNA, 21 nt, Human
uggacuaaaagauauaagugc

SEQ ID NO: 1786677 - RNA, 15 nt, Human
uggacuaaaagauau

SEQ ID NO: 1786678 - RNA, 14 nt, Human
uggacuaaaagaua

SEQ ID NO: 1786679 - RNA, 13 nt, Human
uggacuaaaagau

SEQ ID NO: 1786680 - RNA, 18 nt, Human
uggacaggcauguucucu

SEQ ID NO: 1786681 - RNA, 22 nt, Human
uggacaggcauguucucugagg

SEQ ID NO: 1786682 - RNA, 23 nt, Human
uggacaggcauguucucugagga

SEQ ID NO: 1786683 - RNA, 18 nt, Human
ugcuuucgaacugcuagu

SEQ ID NO: 1786684 - RNA, 21 nt, Human
ugcuucuccaaaaaucugccu

SEQ ID NO: 1786685 - RNA, 22 nt, Human
ugcuucuccaaaaaucugccug

SEQ ID NO: 1786686 - RNA, 24 nt, Human
ugcuucuccaaaaaucugccuggg

SEQ ID NO: 1786687 - RNA, 13 nt, Human
ugcuucgggcccu

SEQ ID NO: 1786688 - RNA, 21 nt, Human
ugauccacccaccucagccuc

SEQ ID NO: 1786689 - RNA, 22 nt, Human
ugauccacccaccucagccucc

SEQ ID NO: 1786690 - RNA, 13 nt, Human
ugaucauccacug

SEQ ID NO: 1786691 - RNA, 24 nt, Human
ugaucauccacugugccaugugcc

SEQ ID NO: 1786692 - RNA, 21 nt, Human
ugauccaagcuggucccacuc

SEQ ID NO: 1786693 - RNA, 15 nt, Human
ugauccacccaccuc

SEQ ID NO: 1786694 - RNA, 16 nt, Human
ugauccacccaccuca

SEQ ID NO: 1786695 - RNA, 20 nt, Human
ugauccacccaccucagccu

SEQ ID NO: 1786696 - RNA, 22 nt, Human
ugaucacggcucacugcagccu

SEQ ID NO: 1786697 - RNA, 21 nt, Human
ugaucagagccgugguccuuu

SEQ ID NO: 1786698 - RNA, 22 nt, Human
ugaucagagccgugguccuuug

SEQ ID NO: 1786699 - RNA, 23 nt, Human
ugaucagagccgugguccuuugg

SEQ ID NO: 1786700 - RNA, 16 nt, Human
ugauauaaucuuucaa

SEQ ID NO: 1786701 - RNA, 14 nt, Human
ugaugcccugcccu

SEQ ID NO: 1786702 - RNA, 22 nt, Human
ugauguaaucuugaauuguaac

SEQ ID NO: 1786703 - RNA, 18 nt, Human
ugauguaccaugaaacaa

SEQ ID NO: 1786704 - RNA, 20 nt, Human
ugauguaccaugaaacaaag

SEQ ID NO: 1786705 - RNA, 21 nt, Human
ugaucuuugcagacaggcaag

SEQ ID NO: 1786706 - RNA, 23 nt, Human
ugaucuuugcagacaggcaagca

SEQ ID NO: 1786707 - RNA, 19 nt, Human
ugaucuuugcagacaggca

SEQ ID NO: 1786708 - RNA, 20 nt, Human
ugaucuuugcagacaggcaa

SEQ ID NO: 1786709 - RNA, 22 nt, Human
ugaugaucuuugcagacaggca

SEQ ID NO: 1786710 - RNA, 23 nt, Human
ugaugaucuuugcagacaggcaa

SEQ ID NO: 1786711 - RNA, 20 nt, Human
ugaugaugaaaugaggucag

SEQ ID NO: 1786712 - RNA, 23 nt, Human
ugagcucuugugaggaaagucau

SEQ ID NO: 1786713 - RNA, 14 nt, Human
ugagucgaggacag

SEQ ID NO: 1786714 - RNA, 16 nt, Human
ugaguccuagagcuac

SEQ ID NO: 1786715 - RNA, 15 nt, Human
ugagucgaggacagg

SEQ ID NO: 1786716 - RNA, 16 nt, Human
ugagucgaggacaggg

SEQ ID NO: 1786717 - RNA, 18 nt, Human
ugagucgaggacagggag

SEQ ID NO: 1786718 - RNA, 12 nt, Human
ugaguuuaaaaa

SEQ ID NO: 1786719 - RNA, 16 nt, Human
ugaguuuaaaaaucaa

SEQ ID NO: 1786720 - RNA, 18 nt, Human
ugaguuuaaaaaucaacu

SEQ ID NO: 1786721 - RNA, 19 nt, Human
ugaguuuaaaaaucaacuu

SEQ ID NO: 1786722 - RNA, 20 nt, Human
ugaguuuaaaaaucaacuuu

SEQ ID NO: 1786723 - RNA, 14 nt, Human
ugaguuuaaagcaa

SEQ ID NO: 1786724 - RNA, 16 nt, Human
ugauaaaaccauguag

SEQ ID NO: 1786725 - RNA, 15 nt, Human
ugauaaaucagucaa

SEQ ID NO: 1786726 - RNA, 17 nt, Human
ugauaaaucagucaagc

SEQ ID NO: 1786727 - RNA, 13 nt, Human
ugagccucagcau

SEQ ID NO: 1786728 - RNA, 15 nt, Human
ugagccucagcaucc

SEQ ID NO: 1786729 - RNA, 20 nt, Human
ugagcccucagaacccuugg

SEQ ID NO: 1786730 - RNA, 12 nt, Human
ugagcccucaga

SEQ ID NO: 1786731 - RNA, 14 nt, Human
ugagcccucagaac

SEQ ID NO: 1786732 - RNA, 17 nt, Human
ugagcccucagaacccu

SEQ ID NO: 1786733 - RNA, 13 nt, Human
ugagcucuuguga

SEQ ID NO: 1786734 - RNA, 22 nt, Human
ugagcucuugugaggaaaguca

SEQ ID NO: 1786735 - RNA, 18 nt, Human
ugagcucuugugaggaaa

SEQ ID NO: 1786736 - RNA, 21 nt, Human
ugagcucccaggugcagccag

SEQ ID NO: 1786737 - RNA, 23 nt, Human
ugagcucccaggugcagccagag

SEQ ID NO: 1786738 - RNA, 12 nt, Human
ugagacucuguc

SEQ ID NO: 1786739 - RNA, 13 nt, Human
ugagacucugucu

SEQ ID NO: 1786740 - RNA, 14 nt, Human
ugagacucugucuc

SEQ ID NO: 1786741 - RNA, 16 nt, Human
ugagagucagcucucu

SEQ ID NO: 1786742 - RNA, 19 nt, Human
ugacgaacuuccauggccc

SEQ ID NO: 1786743 - RNA, 19 nt, Human
ugacgggacucaggcggga

SEQ ID NO: 1786744 - RNA, 11 nt, Human
ugacucugggu

SEQ ID NO: 1786745 - RNA, 13 nt, Human
ugacucugggucc

SEQ ID NO: 1786746 - RNA, 15 nt, Human
ugacucuggguccuu

SEQ ID NO: 1786747 - RNA, 17 nt, Human
ugacucuggguccuucc

SEQ ID NO: 1786748 - RNA, 18 nt, Human
ugacucuggguccuuccu

SEQ ID NO: 1786749 - RNA, 19 nt, Human
ugacucuggguccuuccug

SEQ ID NO: 1786750 - RNA, 20 nt, Human
ugacucuggguccuuccuga

SEQ ID NO: 1786751 - RNA, 21 nt, Human
ugacucuggguccuuccugaa

SEQ ID NO: 1786752 - RNA, 23 nt, Human
ugacugguguuaucaccgugggc

SEQ ID NO: 1786753 - RNA, 22 nt, Human
ugaccucaggugauccacccac

SEQ ID NO: 1786754 - RNA, 12 nt, Human
ugaccucugccu

SEQ ID NO: 1786755 - RNA, 18 nt, Human
ucuugaauacucugcccu

SEQ ID NO: 1786756 - RNA, 20 nt, Human
ucuugaauacucugcccucu

SEQ ID NO: 1786757 - RNA, 15 nt, Human
ucuugaacuccuggc

SEQ ID NO: 1786758 - RNA, 18 nt, Human
ugcacugacauuguuggc

SEQ ID NO: 1786759 - RNA, 21 nt, Human
ugcacugacauuguuggccaa

SEQ ID NO: 1786760 - RNA, 13 nt, Human
ugcacuguucccc

SEQ ID NO: 1786761 - RNA, 14 nt, Human
ugcacuguuccccc

SEQ ID NO: 1786762 - RNA, 19 nt, Human
ugcacuguucccccugugc

SEQ ID NO: 1786763 - RNA, 20 nt, Human
ugcacuguucccccugugca

SEQ ID NO: 1786764 - RNA, 21 nt, Human
ugcacuguucccccugugcag

SEQ ID NO: 1786765 - RNA, 23 nt, Human
ugcacuguucccccugugcagcc

SEQ ID NO: 1786766 - RNA, 14 nt, Human
ugcaauuucuacua

SEQ ID NO: 1786767 - RNA, 13 nt, Human
ugcaauggcagcc

SEQ ID NO: 1786768 - RNA, 14 nt, Human
ugcaauggcagccu

SEQ ID NO: 1786769 - RNA, 15 nt, Human
ugcaauggcagccuu

SEQ ID NO: 1786770 - RNA, 16 nt, Human
ugcaauggcagccuug

SEQ ID NO: 1786771 - RNA, 22 nt, Human
ugcaagaccccaagaggaaguu

SEQ ID NO: 1786772 - RNA, 22 nt, Human
ugcaaccucgcuggacucucag

SEQ ID NO: 1786773 - RNA, 14 nt, Human
ugcaaccucgcugg

SEQ ID NO: 1786774 - RNA, 19 nt, Human
ugcaaccucgcuggacucu

SEQ ID NO: 1786775 - RNA, 20 nt, Human
ugcaaccucgcuggacucuc

SEQ ID NO: 1786776 - RNA, 18 nt, Human
ugcaaccuccgccucuug

SEQ ID NO: 1786777 - RNA, 20 nt, Human
ugcaaccuccgccucuuggg

SEQ ID NO: 1786778 - RNA, 21 nt, Human
ugcaaccuccgccucuugggu

SEQ ID NO: 1786779 - RNA, 13 nt, Human
ugcaaccuccgcc

SEQ ID NO: 1786780 - RNA, 14 nt, Human
ugcaaccuccgccu

SEQ ID NO: 1786781 - RNA, 19 nt, Human
ugcaacaggcugggcuuca

SEQ ID NO: 1786782 - RNA, 20 nt, Human
ugcaacaggcugggcuucag

SEQ ID NO: 1786783 - RNA, 14 nt, Human
ugcaacaggcuggg

SEQ ID NO: 1786784 - RNA, 15 nt, Human
ugcaacaggcugggc

SEQ ID NO: 1786785 - RNA, 16 nt, Human
ugcaacaggcugggcu

SEQ ID NO: 1786786 - RNA, 17 nt, Human
ugcaacaggcugggcuu

SEQ ID NO: 1786787 - RNA, 22 nt, Human
ugcaaaaggacucucaggacca

SEQ ID NO: 1786788 - RNA, 22 nt, Human
ugcaaaagguucacuaaagcag

SEQ ID NO: 1786789 - RNA, 23 nt, Human
ugcaaaagguucacuaaagcagu

SEQ ID NO: 1786790 - RNA, 14 nt, Human
ugauuuuaacucug

SEQ ID NO: 1786791 - RNA, 15 nt, Human
ugauuuuaacucugu

SEQ ID NO: 1786792 - RNA, 17 nt, Human
ugauuuuaacucugucu

SEQ ID NO: 1786793 - RNA, 19 nt, Human
ugcaaaaggacucucagga

SEQ ID NO: 1786794 - RNA, 13 nt, Human
ugccucuucuggg

SEQ ID NO: 1786795 - RNA, 13 nt, Human
ugccugcccaggc

SEQ ID NO: 1786796 - RNA, 17 nt, Human
ugccugguggcagcugc

SEQ ID NO: 1786797 - RNA, 18 nt, Human
ugccugguggcagcugcg

SEQ ID NO: 1786798 - RNA, 19 nt, Human
ugccugguggcagcugcgg

SEQ ID NO: 1786799 - RNA, 13 nt, Human
ugccuguaaacau

SEQ ID NO: 1786800 - RNA, 12 nt, Human
ugccucccuuga

SEQ ID NO: 1786801 - RNA, 18 nt, Human
ugcccggggaaaggcaag

SEQ ID NO: 1786802 - RNA, 21 nt, Human
ugcccggggaaaggcaagguc

SEQ ID NO: 1786803 - RNA, 20 nt, Human
ugcccguaaacacgccugca

SEQ ID NO: 1786804 - RNA, 23 nt, Human
ugcccguaaacacgccugcaaac

SEQ ID NO: 1786805 - RNA, 20 nt, Human
ugccgguaaacacgccugca

SEQ ID NO: 1786806 - RNA, 13 nt, Human
ugcccuaaacccu

SEQ ID NO: 1786807 - RNA, 14 nt, Human
ugccaugugccagg

SEQ ID NO: 1786808 - RNA, 15 nt, Human
ugccaugugccaggu

SEQ ID NO: 1786809 - RNA, 22 nt, Human
ugccaugucugcagugugcccc

SEQ ID NO: 1786810 - RNA, 18 nt, Human
ugcccacgcuggagugca

SEQ ID NO: 1786811 - RNA, 15 nt, Human
ugccauguugccccu

SEQ ID NO: 1786812 - RNA, 21 nt, Human
ugccauguugccccuuucucu

SEQ ID NO: 1786813 - RNA, 12 nt, Human
ugccauguuggc

SEQ ID NO: 1786814 - RNA, 15 nt, Human
ugccauguuggccag

SEQ ID NO: 1786815 - RNA, 16 nt, Human
ugccauguuggccagg

SEQ ID NO: 1786816 - RNA, 16 nt, Human
ugccaccaacuuacaa

SEQ ID NO: 1786817 - RNA, 19 nt, Human
ugccaccaacuuacaaaaa

SEQ ID NO: 1786818 - RNA, 17 nt, Human
ugccagguuuuuggucu

SEQ ID NO: 1786819 - RNA, 15 nt, Human
ugccagggcagggcc

SEQ ID NO: 1786820 - RNA, 16 nt, Human
ugccagggcagggccc

SEQ ID NO: 1786821 - RNA, 15 nt, Human
ugccauccagguuca

SEQ ID NO: 1786822 - RNA, 20 nt, Human
ugccauccagguucagcuug

SEQ ID NO: 1786823 - RNA, 12 nt, Human
ugccauccaggu

SEQ ID NO: 1786824 - RNA, 22 nt, Human
ugcauuuuguuugguauuguau

SEQ ID NO: 1786825 - RNA, 18 nt, Human
ugcauuuuguuugguauu

SEQ ID NO: 1786826 - RNA, 20 nt, Human
ugcauguaaacacgccugca

SEQ ID NO: 1786827 - RNA, 23 nt, Human
ugcauguuuguuguauacuuccu

SEQ ID NO: 1786828 - RNA, 14 nt, Human
uuuguugccccaga

SEQ ID NO: 1786829 - RNA, 19 nt, Human
uuuguuggaguguuucuaa

SEQ ID NO: 1786830 - RNA, 15 nt, Human
uuuguuauuuugcaa

SEQ ID NO: 1786831 - RNA, 11 nt, Human
uuuguguccuc

SEQ ID NO: 1786832 - RNA, 12 nt, Human
uuuguguccucc

SEQ ID NO: 1786833 - RNA, 16 nt, Human
uuuguguccuccagga

SEQ ID NO: 1786834 - RNA, 18 nt, Human
uuuguguccuccaggagc

SEQ ID NO: 1786835 - RNA, 19 nt, Human
uuuguguccuccaggagcu

SEQ ID NO: 1786836 - RNA, 15 nt, Human
uuuguguguguguca

SEQ ID NO: 1786837 - RNA, 14 nt, Human
uuuguauucucuga

SEQ ID NO: 1786838 - RNA, 16 nt, Human
uuuguauucucugagc

SEQ ID NO: 1786839 - RNA, 21 nt, Human
uuuguauuguuucaauugcau

SEQ ID NO: 1786840 - RNA, 14 nt, Human
uuugguauuguauu

SEQ ID NO: 1786841 - RNA, 13 nt, Human
uuugguauuguau

SEQ ID NO: 1786842 - RNA, 16 nt, Human
uuugcauaacaauucc

SEQ ID NO: 1786843 - RNA, 17 nt, Human
uuugcauaacaauuccu

SEQ ID NO: 1786844 - RNA, 18 nt, Human
uuugcauaacaauuccuc

SEQ ID NO: 1786845 - RNA, 20 nt, Human
uuugcauaacaauuccucua

SEQ ID NO: 1786846 - RNA, 22 nt, Human
uuugcauaacaauuccucuacu

SEQ ID NO: 1786847 - RNA, 15 nt, Human
uuuggaaaaugcauu

SEQ ID NO: 1786848 - RNA, 13 nt, Human
uuugagugcucug

SEQ ID NO: 1786849 - RNA, 14 nt, Human
uuugagugcucuga

SEQ ID NO: 1786850 - RNA, 17 nt, Human
uuuugaaauuaaccucu

SEQ ID NO: 1786851 - RNA, 20 nt, Human
uuuuccuaauaaaguucugu

SEQ ID NO: 1786852 - RNA, 15 nt, Human
uuuuccccuuuccug

SEQ ID NO: 1786853 - RNA, 16 nt, Human
uuuuccccuuuccugu

SEQ ID NO: 1786854 - RNA, 17 nt, Human
uuuuccccuuuccuguc

SEQ ID NO: 1786855 - RNA, 15 nt, Human
uuuucccauaagaca

SEQ ID NO: 1786856 - RNA, 16 nt, Human
uuuucccauaagacaa

SEQ ID NO: 1786857 - RNA, 14 nt, Human
uuuucaaaagauaa

SEQ ID NO: 1786858 - RNA, 15 nt, Human
uuuucaaaagauaau

SEQ ID NO: 1786859 - RNA, 18 nt, Human
uuuucaaaagauaauauu

SEQ ID NO: 1786860 - RNA, 12 nt, Human
uuuucaaagcaa

SEQ ID NO: 1786861 - RNA, 13 nt, Human
uuuucaaagcaau

SEQ ID NO: 1786862 - RNA, 18 nt, Human
uuuuauuuuuagacagag

SEQ ID NO: 1786863 - RNA, 14 nt, Human
uuuuaccugcugcu

SEQ ID NO: 1786864 - RNA, 15 nt, Human
uuuuaccugcugcuu

SEQ ID NO: 1786865 - RNA, 21 nt, Human
uuuuaaaguaacccuacaaaa

SEQ ID NO: 1786866 - RNA, 10 nt, Human
uuuuucaugu

SEQ ID NO: 1786867 - RNA, 11 nt, Human
uuuuucauguu

SEQ ID NO: 1786868 - RNA, 18 nt, Human
uuuuucauguuuuaacaa

SEQ ID NO: 1786869 - RNA, 20 nt, Human
uuuuucauguuuuaacaaaa

SEQ ID NO: 1786870 - RNA, 13 nt, Human
uuuuuuuccaauu

SEQ ID NO: 1786871 - RNA, 15 nt, Human
uuuuuucccauaaga

SEQ ID NO: 1786872 - RNA, 20 nt, Human
uuuuuucauguuuuaacaaa

SEQ ID NO: 1786873 - RNA, 18 nt, Human
uuuuucccauaagacaau

SEQ ID NO: 1786874 - RNA, 11 nt, Human
uuuuuuuucau

SEQ ID NO: 1786875 - RNA, 11 nt, Human
uuuuuuuucca

SEQ ID NO: 1786876 - RNA, 17 nt, Human
uuguaaauagcucaggu

SEQ ID NO: 1786877 - RNA, 13 nt, Human
uuggucuguguga

SEQ ID NO: 1786878 - RNA, 21 nt, Human
uugguauuguauuuauucaau

SEQ ID NO: 1786879 - RNA, 14 nt, Human
uugguauuguauuu

SEQ ID NO: 1786880 - RNA, 13 nt, Human
uugguauuguauu

SEQ ID NO: 1786881 - RNA, 12 nt, Human
uugguauuguau

SEQ ID NO: 1786882 - RNA, 17 nt, Human
uugguacuauaaaagcu

SEQ ID NO: 1786883 - RNA, 22 nt, Human
uuggguucaagcgauucuucug

SEQ ID NO: 1786884 - RNA, 17 nt, Human
uugucucaaugcucaua

SEQ ID NO: 1786885 - RNA, 16 nt, Human
uugucucaaugcucau

SEQ ID NO: 1786886 - RNA, 18 nt, Human
uugucucaaugcucauaa

SEQ ID NO: 1786887 - RNA, 17 nt, Human
uugucuaaaacaauaaa

SEQ ID NO: 1786888 - RNA, 18 nt, Human
uugucuaaaacaauaaaa

SEQ ID NO: 1786889 - RNA, 22 nt, Human
uugugccaaccuauuuugaagu

SEQ ID NO: 1786890 - RNA, 23 nt, Human
uugugcuucuuucuuugggaaua

SEQ ID NO: 1786891 - RNA, 17 nt, Human
uuguggacacagcucuu

SEQ ID NO: 1786892 - RNA, 13 nt, Human
uuguggaauguug

SEQ ID NO: 1786893 - RNA, 18 nt, Human
uuguggaauguuggauaa

SEQ ID NO: 1786894 - RNA, 19 nt, Human
uuguggaauguuggauaag

SEQ ID NO: 1786895 - RNA, 16 nt, Human
uuguggacacagcucu

SEQ ID NO: 1786896 - RNA, 22 nt, Human
uuguggacuaaaagauauaagu

SEQ ID NO: 1786897 - RNA, 18 nt, Human
uuguggacuaaaagauau

SEQ ID NO: 1786898 - RNA, 16 nt, Human
uuguggacuaaaagau

SEQ ID NO: 1786899 - RNA, 13 nt, Human
uuguggacuaaaa

SEQ ID NO: 1786900 - RNA, 17 nt, Human
uuguguugaaggaacuu

SEQ ID NO: 1786901 - RNA, 14 nt, Human
uuguguuugucauu

SEQ ID NO: 1786902 - RNA, 20 nt, Human
uuguguuugucauuagccug

SEQ ID NO: 1786903 - RNA, 15 nt, Human
uuguguuugucauua

SEQ ID NO: 1786904 - RNA, 17 nt, Human
uuguuuccuuuuuuccc

SEQ ID NO: 1786905 - RNA, 16 nt, Human
uuguuucaauugcauc

SEQ ID NO: 1786906 - RNA, 18 nt, Human
uuuaagaaaaaauaacac

SEQ ID NO: 1786907 - RNA, 22 nt, Human
uuuaagaaaaaauaacacacau

SEQ ID NO: 1786908 - RNA, 22 nt, Human
uuuaagacagucccaucaaaac

SEQ ID NO: 1786909 - RNA, 15 nt, Human
uuuaauaauauacuu

SEQ ID NO: 1786910 - RNA, 15 nt, Human
uuuaacaaaaaccaa

SEQ ID NO: 1786911 - RNA, 18 nt, Human
uuuaacaaaaagugcuuc

SEQ ID NO: 1786912 - RNA, 19 nt, Human
uuuaacaaaaagugcuuca

SEQ ID NO: 1786913 - RNA, 19 nt, Human
uuuaacucuauaauguguu

SEQ ID NO: 1786914 - RNA, 18 nt, Human
uuuaacucuagaauuugg

SEQ ID NO: 1786915 - RNA, 12 nt, Human
uuuaacucuguc

SEQ ID NO: 1786916 - RNA, 13 nt, Human
uuuaacucugucu

SEQ ID NO: 1786917 - RNA, 14 nt, Human
uuuaacucugucuu

SEQ ID NO: 1786918 - RNA, 17 nt, Human
uuuaacucugucuucac

SEQ ID NO: 1786919 - RNA, 12 nt, Human
uuuagacagagu

SEQ ID NO: 1786920 - RNA, 22 nt, Human
uuuagaaagcauuugaaugcau

SEQ ID NO: 1786921 - RNA, 19 nt, Human
uuuagaaagcauuugaaug

SEQ ID NO: 1786922 - RNA, 18 nt, Human
uuuagaaagcauuugaau

SEQ ID NO: 1786923 - RNA, 16 nt, Human
uuuagaaagcauuuga

SEQ ID NO: 1786924 - RNA, 14 nt, Human
uuuagaaagcauuu

SEQ ID NO: 1786925 - RNA, 13 nt, Human
uuuagaaagcauu

SEQ ID NO: 1786926 - RNA, 17 nt, Human
uuuaauaauauacuugu

SEQ ID NO: 1786927 - RNA, 14 nt, Human
uuuaccaaaaauuu

SEQ ID NO: 1786928 - RNA, 14 nt, Human
uuucagcagacuga

SEQ ID NO: 1786929 - RNA, 16 nt, Human
uuucagauuguggaau

SEQ ID NO: 1786930 - RNA, 21 nt, Human
uuucagauuguggaauguugg

SEQ ID NO: 1786931 - RNA, 21 nt, Human
uuucaguggggcagucauuau

SEQ ID NO: 1786932 - RNA, 16 nt, Human
uuucaguguuaccugu

SEQ ID NO: 1786933 - RNA, 17 nt, Human
uuucaguguuaccugug

SEQ ID NO: 1786934 - RNA, 13 nt, Human
uuucaacuuugaa

SEQ ID NO: 1786935 - RNA, 12 nt, Human
uuuauaagaaaa

SEQ ID NO: 1786936 - RNA, 14 nt, Human
uuuauaagaaaaac

SEQ ID NO: 1786937 - RNA, 17 nt, Human
uuuauaagaaaaacuuu

SEQ ID NO: 1786938 - RNA, 18 nt, Human
uuuauaagaaaaacuuuu

SEQ ID NO: 1786939 - RNA, 16 nt, Human
uucucuccaauuuaac

SEQ ID NO: 1786940 - RNA, 16 nt, Human
uucucugagcugugca

SEQ ID NO: 1786941 - RNA, 17 nt, Human
uucucugagcugugcag

SEQ ID NO: 1786942 - RNA, 18 nt, Human
uucucugagcugugcagg

SEQ ID NO: 1786943 - RNA, 14 nt, Human
uucucugaggacac

SEQ ID NO: 1786944 - RNA, 20 nt, Human
uucucugaggacacuaacca

SEQ ID NO: 1786945 - RNA, 16 nt, Human
uucuccacccugcucu

SEQ ID NO: 1786946 - RNA, 18 nt, Human
uucuccaaaaaucugccu

SEQ ID NO: 1786947 - RNA, 13 nt, Human
uucuaucuuuugu

SEQ ID NO: 1786948 - RNA, 20 nt, Human
uucuaucuuuuguuuccuuu

SEQ ID NO: 1786949 - RNA, 19 nt, Human
uucugcucacauaucuguc

SEQ ID NO: 1786950 - RNA, 13 nt, Human
uucugcucaucau

SEQ ID NO: 1786951 - RNA, 14 nt, Human
uucugcucaucauu

SEQ ID NO: 1786952 - RNA, 19 nt, Human
uucugcucaucauucucug

SEQ ID NO: 1786953 - RNA, 20 nt, Human
uucugcucaucauucucugu

SEQ ID NO: 1786954 - RNA, 21 nt, Human
uucugcucaucauucucuguc

SEQ ID NO: 1786955 - RNA, 15 nt, Human
uucugagugccuucu

SEQ ID NO: 1786956 - RNA, 16 nt, Human
uucugagugccuucug

SEQ ID NO: 1786957 - RNA, 18 nt, Human
uucugagugccuucugug

SEQ ID NO: 1786958 - RNA, 22 nt, Human
uucugagugccuucugugggga

SEQ ID NO: 1786959 - RNA, 19 nt, Human
uucugagauucaauauuga

SEQ ID NO: 1786960 - RNA, 21 nt, Human
uucugagauucaauauugaau

SEQ ID NO: 1786961 - RNA, 20 nt, Human
uucuacccagcgagcccugg

SEQ ID NO: 1786962 - RNA, 21 nt, Human
uucuacccagcgagcccuggu

SEQ ID NO: 1786963 - RNA, 20 nt, Human
uucgugcggaaucagcuucu

SEQ ID NO: 1786964 - RNA, 13 nt, Human
uucggugugcacc

SEQ ID NO: 1786965 - RNA, 12 nt, Human
uucuacccagcg

SEQ ID NO: 1786966 - RNA, 19 nt, Human
uucuacccagcgagcccug

SEQ ID NO: 1786967 - RNA, 17 nt, Human
uuccauggcccucauua

SEQ ID NO: 1786968 - RNA, 21 nt, Human
uuccauggugugaucgucuga

SEQ ID NO: 1786969 - RNA, 16 nt, Human
uuccauggcccucauu

SEQ ID NO: 1786970 - RNA, 15 nt, Human
uuccauggcccucau

SEQ ID NO: 1786971 - RNA, 20 nt, Human
uuccauguccccucccagag

SEQ ID NO: 1786972 - RNA, 18 nt, Human
uucggugagcuacaaaug

SEQ ID NO: 1786973 - RNA, 20 nt, Human
uuccuuguagcgacuaaacu

SEQ ID NO: 1786974 - RNA, 18 nt, Human
uucuggauggugugccuu

SEQ ID NO: 1786975 - RNA, 20 nt, Human
uucuggauggugugccuucc

SEQ ID NO: 1786976 - RNA, 23 nt, Human
uucuggauggugugccuuccaga

SEQ ID NO: 1786977 - RNA, 15 nt, Human
uucugucccucacag

SEQ ID NO: 1786978 - RNA, 14 nt, Human
uucugucccuucug

SEQ ID NO: 1786979 - RNA, 11 nt, Human
uucugucucca

SEQ ID NO: 1786980 - RNA, 13 nt, Human
uucugucuccagc

SEQ ID NO: 1786981 - RNA, 16 nt, Human
uucuguccccucuucc

SEQ ID NO: 1786982 - RNA, 19 nt, Human
uucuggaggaaagggagga

SEQ ID NO: 1786983 - RNA, 14 nt, Human
uucugcuucagccu

SEQ ID NO: 1786984 - RNA, 15 nt, Human
uucugcuucagccuc

SEQ ID NO: 1786985 - RNA, 16 nt, Human
uucugcuucagccucc

SEQ ID NO: 1786986 - RNA, 19 nt, Human
uucugcuucagccucccga

SEQ ID NO: 1786987 - RNA, 16 nt, Human
uugaaaaccugacaaa

SEQ ID NO: 1786988 - RNA, 22 nt, Human
uugaaaaaauagagccugaggg

SEQ ID NO: 1786989 - RNA, 20 nt, Human
uugaaaaaauagagccugag

SEQ ID NO: 1786990 - RNA, 15 nt, Human
uugaacuccuggccu

SEQ ID NO: 1786991 - RNA, 16 nt, Human
uugaacuccuggccuc

SEQ ID NO: 1786992 - RNA, 14 nt, Human
uucuuguuuccuug

SEQ ID NO: 1786993 - RNA, 15 nt, Human
uucuuguuuccuugu

SEQ ID NO: 1786994 - RNA, 16 nt, Human
uucuuguuuccuuguu

SEQ ID NO: 1786995 - RNA, 19 nt, Human
uucuuccaggugcccagcu

SEQ ID NO: 1786996 - RNA, 20 nt, Human
uucuuccaggugcccagcua

SEQ ID NO: 1786997 - RNA, 12 nt, Human
uugcaaauaguc

SEQ ID NO: 1786998 - RNA, 13 nt, Human
uugcaaaguacug

SEQ ID NO: 1786999 - RNA, 14 nt, Human
uugcaaaguacugu

SEQ ID NO: 1787000 - RNA, 15 nt, Human
uugcaaaguacugua

SEQ ID NO: 1787001 - RNA, 16 nt, Human
uugaugaucuuugcag

SEQ ID NO: 1787002 - RNA, 16 nt, Human
uugaggguugggcugg

SEQ ID NO: 1787003 - RNA, 13 nt, Human
uugaggguugggc

SEQ ID NO: 1787004 - RNA, 21 nt, Human
uugacucuggguccuuccuga

SEQ ID NO: 1787005 - RNA, 18 nt, Human
uugauagcugucccaucu

SEQ ID NO: 1787006 - RNA, 18 nt, Human
uugacucuggguccuucc

SEQ ID NO: 1787007 - RNA, 19 nt, Human
uugacucuggguccuuccu

SEQ ID NO: 1787008 - RNA, 12 nt, Human
uugacucugggu

SEQ ID NO: 1787009 - RNA, 13 nt, Human
uugacucuggguc

SEQ ID NO: 1787010 - RNA, 21 nt, Human
uugaccucaggugauccaccc

SEQ ID NO: 1787011 - RNA, 18 nt, Human
uugacaaggucaaauuua

SEQ ID NO: 1787012 - RNA, 12 nt, Human
uugacaauaaaa

SEQ ID NO: 1787013 - RNA, 13 nt, Human
uugacaauaaaau

SEQ ID NO: 1787014 - RNA, 14 nt, Human
uugacaauaaaaua

SEQ ID NO: 1787015 - RNA, 15 nt, Human
uugacaauaaaauau

SEQ ID NO: 1787016 - RNA, 16 nt, Human
uugacaauaaaauauu

SEQ ID NO: 1787017 - RNA, 19 nt, Human
uugacaauaaaauauuauu

SEQ ID NO: 1787018 - RNA, 18 nt, Human
uugaacuggguacuugug

SEQ ID NO: 1787019 - RNA, 20 nt, Human
uugaauuuuguucucuggga

SEQ ID NO: 1787020 - RNA, 22 nt, Human
uugaauuuuguucucugggaga

SEQ ID NO: 1787021 - RNA, 13 nt, Human
uugaauuuuuccu

SEQ ID NO: 1787022 - RNA, 16 nt, Human
uugaauuuuuccuaug

SEQ ID NO: 1787023 - RNA, 17 nt, Human
uugaauuuuuccuaugc

SEQ ID NO: 1787024 - RNA, 18 nt, Human
uugacaaaggcaagcacu

SEQ ID NO: 1787025 - RNA, 22 nt, Human
uucaaauuccuauuuuuaaaua

SEQ ID NO: 1787026 - RNA, 16 nt, Human
uucaauauugaauuuu

SEQ ID NO: 1787027 - RNA, 19 nt, Human
uucaauauugaauuuuucc

SEQ ID NO: 1787028 - RNA, 12 nt, Human
uuauuuugcaac

SEQ ID NO: 1787029 - RNA, 12 nt, Human
uuauuugucaaa

SEQ ID NO: 1787030 - RNA, 18 nt, Human
uuauuugguucccuuccu

SEQ ID NO: 1787031 - RNA, 11 nt, Human
uuauuugcaua

SEQ ID NO: 1787032 - RNA, 20 nt, Human
uuauuaguaaaugcuuauca

SEQ ID NO: 1787033 - RNA, 21 nt, Human
uuauuagagauuaccuccuga

SEQ ID NO: 1787034 - RNA, 17 nt, Human
uuauuagagugucuuuc

SEQ ID NO: 1787035 - RNA, 22 nt, Human
uucagcuuguaaauagcucagg

SEQ ID NO: 1787036 - RNA, 14 nt, Human
uucaguggcagcug

SEQ ID NO: 1787037 - RNA, 22 nt, Human
uucagcuccagcucaccagccc

SEQ ID NO: 1787038 - RNA, 12 nt, Human
uucagcuccagc

SEQ ID NO: 1787039 - RNA, 15 nt, Human
uucagcuccagcuca

SEQ ID NO: 1787040 - RNA, 13 nt, Human
uucaguguaaaua

SEQ ID NO: 1787041 - RNA, 17 nt, Human
uucaguggcagcugcuu

SEQ ID NO: 1787042 - RNA, 14 nt, Human
uucaguggggcagu

SEQ ID NO: 1787043 - RNA, 15 nt, Human
uucaguggcagcugc

SEQ ID NO: 1787044 - RNA, 16 nt, Human
uucaguggcagcugcu

SEQ ID NO: 1787045 - RNA, 15 nt, Human
uucauaaccuagccu

SEQ ID NO: 1787046 - RNA, 23 nt, Human
uucaguuauuauauuuacaaaug

SEQ ID NO: 1787047 - RNA, 12 nt, Human
uucaguguuaaa

SEQ ID NO: 1787048 - RNA, 18 nt, Human
uucaguguuaaaugugau

SEQ ID NO: 1787049 - RNA, 22 nt, Human
uucaguguuaaaugugaugaau

SEQ ID NO: 1787050 - RNA, 18 nt, Human
uucaguguuaccugugug

SEQ ID NO: 1787051 - RNA, 22 nt, Human
uucaguguuaccugugugcuug

SEQ ID NO: 1787052 - RNA, 11 nt, Human
uuccagaaucc

SEQ ID NO: 1787053 - RNA, 22 nt, Human
uuccagacauucucgcuucccu

SEQ ID NO: 1787054 - RNA, 15 nt, Human
uuccauauccuggug

SEQ ID NO: 1787055 - RNA, 15 nt, Human
uuccagaucccaggc

SEQ ID NO: 1787056 - RNA, 22 nt, Human
uuccagaucccaggccccugga

SEQ ID NO: 1787057 - RNA, 15 nt, Human
uuccagauccucucu

SEQ ID NO: 1787058 - RNA, 16 nt, Human
uuccagauccucucug

SEQ ID NO: 1787059 - RNA, 18 nt, Human
uuccagauccucucuggg

SEQ ID NO: 1787060 - RNA, 15 nt, Human
uuccaaauaaaaugu

SEQ ID NO: 1787061 - RNA, 17 nt, Human
uuccaaauaaaauguuc

SEQ ID NO: 1787062 - RNA, 11 nt, Human
uuccaaagcaa

SEQ ID NO: 1787063 - RNA, 12 nt, Human
uuccaaagcaaa

SEQ ID NO: 1787064 - RNA, 22 nt, Human
uuccaaaaguggccucuuuguc

SEQ ID NO: 1787065 - RNA, 16 nt, Human
uuccaaaaguggccuc

SEQ ID NO: 1787066 - RNA, 17 nt, Human
uuccaaaaguggccucu

SEQ ID NO: 1787067 - RNA, 18 nt, Human
uuccaaaaguggccucuu

SEQ ID NO: 1787068 - RNA, 21 nt, Human
uuccaaaaguggccucuuugu

SEQ ID NO: 1787069 - RNA, 23 nt, Human
uucauuuuugauagcugucccau

SEQ ID NO: 1787070 - RNA, 14 nt, Human
uuauaauuuuccua

SEQ ID NO: 1787071 - RNA, 16 nt, Human
uuauaauuuuccuaau

SEQ ID NO: 1787072 - RNA, 15 nt, Human
uuauacaauaucauc

SEQ ID NO: 1787073 - RNA, 20 nt, Human
uuauauuaauaguaauuugu

SEQ ID NO: 1787074 - RNA, 12 nt, Human
uuauaauuuaaa

SEQ ID NO: 1787075 - RNA, 15 nt, Human
uuagugcuaagugug

SEQ ID NO: 1787076 - RNA, 12 nt, Human
uuagugcuaagu

SEQ ID NO: 1787077 - RNA, 14 nt, Human
uuauaagaaaaacu

SEQ ID NO: 1787078 - RNA, 16 nt, Human
uuauaagaaaaacuuu

SEQ ID NO: 1787079 - RNA, 17 nt, Human
uuauaagaaaaacuuuu

SEQ ID NO: 1787080 - RNA, 21 nt, Human
uuagugcuaagugugaacugg

SEQ ID NO: 1787081 - RNA, 20 nt, Human
uuagugcuaagugugaacug

SEQ ID NO: 1787082 - RNA, 19 nt, Human
uuagugcuaagugugaacu

SEQ ID NO: 1787083 - RNA, 17 nt, Human
uuagugcuaagugugaa

SEQ ID NO: 1787084 - RNA, 16 nt, Human
uuagugcuaaguguga

SEQ ID NO: 1787085 - RNA, 11 nt, Human
uuauuaaauag

SEQ ID NO: 1787086 - RNA, 16 nt, Human
uuauauuuacaaaugg

SEQ ID NO: 1787087 - RNA, 19 nt, Human
uuauccuaaaacaaauagu

SEQ ID NO: 1787088 - RNA, 20 nt, Human
uuauccucuuuagaguuaga

SEQ ID NO: 1787089 - RNA, 18 nt, Human
uuauccucuuuagaguua

SEQ ID NO: 1787090 - RNA, 17 nt, Human
uuauccucuuuagaguu

SEQ ID NO: 1787091 - RNA, 15 nt, Human
uuauccucuuuagag

SEQ ID NO: 1787092 - RNA, 14 nt, Human
uuauccucuuuaga

SEQ ID NO: 1787093 - RNA, 21 nt, Human
uuaucuccacaaccucuuccc

SEQ ID NO: 1787094 - RNA, 15 nt, Human
caaaauguaggguua

SEQ ID NO: 1787095 - RNA, 14 nt, Human
caaaauaaaacuuu

SEQ ID NO: 1787096 - RNA, 12 nt, Human
caaaauaaaacu

SEQ ID NO: 1787097 - RNA, 16 nt, Human
caaaauuguuacaaau

SEQ ID NO: 1787098 - RNA, 15 nt, Human
caaacacauacagga

SEQ ID NO: 1787099 - RNA, 20 nt, Human
caaacccuucagugccaaaa

SEQ ID NO: 1787100 - RNA, 15 nt, Human
caaagcuaggccugg

SEQ ID NO: 1787101 - RNA, 19 nt, Human
caaagcuaggccuggccag

SEQ ID NO: 1787102 - RNA, 14 nt, Human
caaagcuaggccug

SEQ ID NO: 1787103 - RNA, 13 nt, Human
caaagcuaggccu

SEQ ID NO: 1787104 - RNA, 12 nt, Human
caaaggaagcac

SEQ ID NO: 1787105 - RNA, 13 nt, Human
caaaggaagcaca

SEQ ID NO: 1787106 - RNA, 18 nt, Human
caaaggguaucaggugcu

SEQ ID NO: 1787107 - RNA, 16 nt, Human
caaaggguaucaggug

SEQ ID NO: 1787108 - RNA, 23 nt, Human
caaaggccuaauucuaugccugu

SEQ ID NO: 1787109 - RNA, 14 nt, Human
caaaggaagcacau

SEQ ID NO: 1787110 - RNA, 17 nt, Human
caaacucaccugccccu

SEQ ID NO: 1787111 - RNA, 17 nt, Human
caaagccuccuccagcc

SEQ ID NO: 1787112 - RNA, 18 nt, Human
caaagccuccuccagccg

SEQ ID NO: 1787113 - RNA, 11 nt, Human
caaauuucuaa

SEQ ID NO: 1787114 - RNA, 14 nt, Human
caaauuucuaaauc

SEQ ID NO: 1787115 - RNA, 12 nt, Human
caaauuucuaaa

SEQ ID NO: 1787116 - RNA, 21 nt, Human
caaauuguaagcaugcacaaa

SEQ ID NO: 1787117 - RNA, 19 nt, Human
caaaggguaucaggugcug

SEQ ID NO: 1787118 - RNA, 19 nt, Human
caaagugcugggauuacag

SEQ ID NO: 1787119 - RNA, 23 nt, Human
caaagugcugggauuacaggugu

SEQ ID NO: 1787120 - RNA, 20 nt, Human
caaagugcugggauuacagg

SEQ ID NO: 1787121 - RNA, 23 nt, Human
caaaacucuccucugcugcuggc

SEQ ID NO: 1787122 - RNA, 22 nt, Human
caaaacucuccucugcugcugg

SEQ ID NO: 1787123 - RNA, 20 nt, Human
caaaacucuccucugcugcu

SEQ ID NO: 1787124 - RNA, 21 nt, Human
caaaacucuccucugcugcug

SEQ ID NO: 1787125 - RNA, 17 nt, Human
caaaauaaaaaugaggu

SEQ ID NO: 1787126 - RNA, 23 nt, Human
caaaacuucagacauagaauuaa

SEQ ID NO: 1787127 - RNA, 22 nt, Human
caaaacaaaggccuaauucuau

SEQ ID NO: 1787128 - RNA, 16 nt, Human
caaaacaaaggccuaa

SEQ ID NO: 1787129 - RNA, 15 nt, Human
caaaacaaaggccua

SEQ ID NO: 1787130 - RNA, 12 nt, Human
caaaacaaaggc

SEQ ID NO: 1787131 - RNA, 20 nt, Human
caaaaacauggccuuugcuu

SEQ ID NO: 1787132 - RNA, 13 nt, Human
caaaaaggcagga

SEQ ID NO: 1787133 - RNA, 21 nt, Human
auuuugggguacccacugcuc

SEQ ID NO: 1787134 - RNA, 23 nt, Human
auuuugggguacccacugcucug

SEQ ID NO: 1787135 - RNA, 22 nt, Human
auuuugggguacccacugcucu

SEQ ID NO: 1787136 - RNA, 16 nt, Human
caaaaaaugcuugcuu

SEQ ID NO: 1787137 - RNA, 17 nt, Human
caagugagagcugggug

SEQ ID NO: 1787138 - RNA, 15 nt, Human
caagugagagcuggg

SEQ ID NO: 1787139 - RNA, 14 nt, Human
caagugagagcugg

SEQ ID NO: 1787140 - RNA, 21 nt, Human
caaguccucuuuucugagagg

SEQ ID NO: 1787141 - RNA, 18 nt, Human
caagugagagcugggugu

SEQ ID NO: 1787142 - RNA, 17 nt, Human
caagugauucucaugcc

SEQ ID NO: 1787143 - RNA, 18 nt, Human
caagugauucucaugccu

SEQ ID NO: 1787144 - RNA, 20 nt, Human
caagugauucucaugccuca

SEQ ID NO: 1787145 - RNA, 21 nt, Human
caagugauucucaugccucag

SEQ ID NO: 1787146 - RNA, 19 nt, Human
caaguggcucccacacccu

SEQ ID NO: 1787147 - RNA, 14 nt, Human
caaguuaaauaaau

SEQ ID NO: 1787148 - RNA, 14 nt, Human
caaguccucuuuuc

SEQ ID NO: 1787149 - RNA, 18 nt, Human
caaggguagggugggccu

SEQ ID NO: 1787150 - RNA, 20 nt, Human
caaggucauuuuuuuuaaga

SEQ ID NO: 1787151 - RNA, 14 nt, Human
caaggucauuuuuu

SEQ ID NO: 1787152 - RNA, 18 nt, Human
caaggggcccaaauucuu

SEQ ID NO: 1787153 - RNA, 17 nt, Human
caaggggcccaaauucu

SEQ ID NO: 1787154 - RNA, 12 nt, Human
caaggcugcagu

SEQ ID NO: 1787155 - RNA, 15 nt, Human
caaggcugcagugag

SEQ ID NO: 1787156 - RNA, 23 nt, Human
caaggcugucaauuacaggaagu

SEQ ID NO: 1787157 - RNA, 14 nt, Human
caagccagcuggag

SEQ ID NO: 1787158 - RNA, 18 nt, Human
caagcaggacauggacaa

SEQ ID NO: 1787159 - RNA, 14 nt, Human
caagcaggacaugg

SEQ ID NO: 1787160 - RNA, 22 nt, Human
caagcgauucuucugcuucagc

SEQ ID NO: 1787161 - RNA, 20 nt, Human
caagcgauucuucugcuuca

SEQ ID NO: 1787162 - RNA, 14 nt, Human
caagccuggcaagg

SEQ ID NO: 1787163 - RNA, 19 nt, Human
caagcgauucuucugcuuc

SEQ ID NO: 1787164 - RNA, 18 nt, Human
caagccguggcuucccgc

SEQ ID NO: 1787165 - RNA, 17 nt, Human
caaggcugauuaaacca

SEQ ID NO: 1787166 - RNA, 14 nt, Human
caaggagccaaaca

SEQ ID NO: 1787167 - RNA, 22 nt, Human
caaggacugcagggacugccag

SEQ ID NO: 1787168 - RNA, 19 nt, Human
caagcuggucccacucagu

SEQ ID NO: 1787169 - RNA, 17 nt, Human
caagcuggucccacuca

SEQ ID NO: 1787170 - RNA, 18 nt, Human
caaggacagccccuccuc

SEQ ID NO: 1787171 - RNA, 15 nt, Human
caaggacugcaggga

SEQ ID NO: 1787172 - RNA, 17 nt, Human
caagcaccuccugccuc

SEQ ID NO: 1787173 - RNA, 16 nt, Human
caagcaccuccugccu

SEQ ID NO: 1787174 - RNA, 15 nt, Human
caagcaccuccugcc

SEQ ID NO: 1787175 - RNA, 14 nt, Human
caagagggcacugg

SEQ ID NO: 1787176 - RNA, 15 nt, Human
caagagggcacuggu

SEQ ID NO: 1787177 - RNA, 13 nt, Human
caagagggcacug

SEQ ID NO: 1787178 - RNA, 16 nt, Human
caagagcccaggccuc

SEQ ID NO: 1787179 - RNA, 17 nt, Human
caagagcccaggccucc

SEQ ID NO: 1787180 - RNA, 19 nt, Human
caagacgcugugcugcccu

SEQ ID NO: 1787181 - RNA, 18 nt, Human
caagacgcugugcugccc

SEQ ID NO: 1787182 - RNA, 23 nt, Human
caagacgcugugcugcccugccc

SEQ ID NO: 1787183 - RNA, 14 nt, Human
caagagcccaggcc

SEQ ID NO: 1787184 - RNA, 15 nt, Human
caagagcccaggccu

SEQ ID NO: 1787185 - RNA, 18 nt, Human
caagacucuuuggacacu

SEQ ID NO: 1787186 - RNA, 19 nt, Human
caacugaccagccuccaug

SEQ ID NO: 1787187 - RNA, 20 nt, Human
caagaacuuuccaggaaggc

SEQ ID NO: 1787188 - RNA, 14 nt, Human
caagaccuucuccu

SEQ ID NO: 1787189 - RNA, 16 nt, Human
caagaccuucuccuuc

SEQ ID NO: 1787190 - RNA, 17 nt, Human
caagaccuucuccuuca

SEQ ID NO: 1787191 - RNA, 18 nt, Human
caagaccuucuccuucac

SEQ ID NO: 1787192 - RNA, 16 nt, Human
caagacgcugugcugc

SEQ ID NO: 1787193 - RNA, 17 nt, Human
caagacgcugugcugcc

SEQ ID NO: 1787194 - RNA, 22 nt, Human
caacacucacauuuauucugcu

SEQ ID NO: 1787195 - RNA, 18 nt, Human
caacacucauugaccuga

SEQ ID NO: 1787196 - RNA, 20 nt, Human
caacacucauugaccugagg

SEQ ID NO: 1787197 - RNA, 22 nt, Human
caacacucauugaccugaggcc

SEQ ID NO: 1787198 - RNA, 22 nt, Human
caaccccuucgcuccugugucu

SEQ ID NO: 1787199 - RNA, 17 nt, Human
caacccuggcacccagg

SEQ ID NO: 1787200 - RNA, 13 nt, Human
caacccucagagc

SEQ ID NO: 1787201 - RNA, 15 nt, Human
caacugaccagccuc

SEQ ID NO: 1787202 - RNA, 17 nt, Human
caacugaccagccucca

SEQ ID NO: 1787203 - RNA, 13 nt, Human
caacgucugugcc

SEQ ID NO: 1787204 - RNA, 14 nt, Human
caacgucugugcca

SEQ ID NO: 1787205 - RNA, 20 nt, Human
caaccuguucugcuuuccuc

SEQ ID NO: 1787206 - RNA, 19 nt, Human
caaccuucgccaccugggu

SEQ ID NO: 1787207 - RNA, 14 nt, Human
caaccuccugggcu

SEQ ID NO: 1787208 - RNA, 15 nt, Human
caaccuccugggcua

SEQ ID NO: 1787209 - RNA, 12 nt, Human
caauaggaaaaa

SEQ ID NO: 1787210 - RNA, 13 nt, Human
caauaggaaaaac

SEQ ID NO: 1787211 - RNA, 17 nt, Human
caauauucgcuguguca

SEQ ID NO: 1787212 - RNA, 15 nt, Human
caauauuguacaguu

SEQ ID NO: 1787213 - RNA, 14 nt, Human
caauauuguacagu

SEQ ID NO: 1787214 - RNA, 23 nt, Human
caaugaccuuucaauaggaaaaa

SEQ ID NO: 1787215 - RNA, 18 nt, Human
caaugacuuacuguacau

SEQ ID NO: 1787216 - RNA, 17 nt, Human
caaugacuuacuguaca

SEQ ID NO: 1787217 - RNA, 15 nt, Human
caaugacuuacugua

SEQ ID NO: 1787218 - RNA, 23 nt, Human
caauucucauuugucacacacuu

SEQ ID NO: 1787219 - RNA, 13 nt, Human
caauucuccugcc

SEQ ID NO: 1787220 - RNA, 16 nt, Human
caauuacaggaaguac

SEQ ID NO: 1787221 - RNA, 14 nt, Human
caauucuccugccu

SEQ ID NO: 1787222 - RNA, 15 nt, Human
caauucuccugccuc

SEQ ID NO: 1787223 - RNA, 16 nt, Human
caauucuccugccuca

SEQ ID NO: 1787224 - RNA, 15 nt, Human
caaugugauaaaacc

SEQ ID NO: 1787225 - RNA, 17 nt, Human
caaugugauaaaacccc

SEQ ID NO: 1787226 - RNA, 17 nt, Human
caaugcacuuuguucug

SEQ ID NO: 1787227 - RNA, 22 nt, Human
caaugcacuuuguucuggcucu

SEQ ID NO: 1787228 - RNA, 20 nt, Human
caaugcacuuuguucuggcu

SEQ ID NO: 1787229 - RNA, 21 nt, Human
caaugcacuuuguucuggcuc

SEQ ID NO: 1787230 - RNA, 14 nt, Human
caauguucucucuu

SEQ ID NO: 1787231 - RNA, 14 nt, Human
caauaggaaaaacu

SEQ ID NO: 1787232 - RNA, 21 nt, Human
cacauagugaugguuccccug

SEQ ID NO: 1787233 - RNA, 22 nt, Human
cacagcuucauuuccugugucu

SEQ ID NO: 1787234 - RNA, 21 nt, Human
cacagcuucauuuccuguguc

SEQ ID NO: 1787235 - RNA, 22 nt, Human
cacagcugggguggggaccuca

SEQ ID NO: 1787236 - RNA, 23 nt, Human
cacagcugggguggggaccucag

SEQ ID NO: 1787237 - RNA, 15 nt, Human
cacaggcagguccag

SEQ ID NO: 1787238 - RNA, 14 nt, Human
cacaggcaggucca

SEQ ID NO: 1787239 - RNA, 11 nt, Human
cacaggcaggu

SEQ ID NO: 1787240 - RNA, 19 nt, Human
cacaggagggagggggaag

SEQ ID NO: 1787241 - RNA, 21 nt, Human
cacaggagggagggggaaggc

SEQ ID NO: 1787242 - RNA, 14 nt, Human
cacaggagggaggg

SEQ ID NO: 1787243 - RNA, 17 nt, Human
cacagugcaucucagcc

SEQ ID NO: 1787244 - RNA, 14 nt, Human
cacaguucucuccu

SEQ ID NO: 1787245 - RNA, 15 nt, Human
cacaguucucuccuu

SEQ ID NO: 1787246 - RNA, 22 nt, Human
cacagugagucgaggacaggga

SEQ ID NO: 1787247 - RNA, 19 nt, Human
cacaggcagguccaggguu

SEQ ID NO: 1787248 - RNA, 14 nt, Human
cacagugcaucuca

SEQ ID NO: 1787249 - RNA, 13 nt, Human
cacaguccuuacc

SEQ ID NO: 1787250 - RNA, 15 nt, Human
cacaguccuuaccag

SEQ ID NO: 1787251 - RNA, 21 nt, Human
cacaguccuuaccagcagagc

SEQ ID NO: 1787252 - RNA, 22 nt, Human
cacaguccuuaccagcagagca

SEQ ID NO: 1787253 - RNA, 22 nt, Human
uuuuuagacagagucucacugu

SEQ ID NO: 1787254 - RNA, 11 nt, Human
uuuuuacuaau

SEQ ID NO: 1787255 - RNA, 12 nt, Human
uuuuuaucaugu

SEQ ID NO: 1787256 - RNA, 20 nt, Human
uuuuuaucgucacugcuuaa

SEQ ID NO: 1787257 - RNA, 12 nt, Human
uuuuuauggcuu

SEQ ID NO: 1787258 - RNA, 23 nt, Human
uuuuuauacauaaacaagaccac

SEQ ID NO: 1787259 - RNA, 15 nt, Human
uuuuguuccacaagu

SEQ ID NO: 1787260 - RNA, 21 nt, Human
uuuuguuccacaaguuaaaua

SEQ ID NO: 1787261 - RNA, 19 nt, Human
uuuuguuucauauugaugu

SEQ ID NO: 1787262 - RNA, 12 nt, Human
uuuuguuucaua

SEQ ID NO: 1787263 - RNA, 14 nt, Human
uuuugcuguagaag

SEQ ID NO: 1787264 - RNA, 13 nt, Human
uuuugcuguagaa

SEQ ID NO: 1787265 - RNA, 21 nt, Human
uuuugugaugucccaacuugu

SEQ ID NO: 1787266 - RNA, 20 nt, Human
uuuugugcauuaucuagaua

SEQ ID NO: 1787267 - RNA, 17 nt, Human
uuuugugcauuaucuag

SEQ ID NO: 1787268 - RNA, 23 nt, Human
uuuugugcauuaucuagauacug

SEQ ID NO: 1787269 - RNA, 17 nt, Human
uuuugauccaagcuggu

SEQ ID NO: 1787270 - RNA, 17 nt, Human
uuuugagugccuuacac

SEQ ID NO: 1787271 - RNA, 23 nt, Human
uuuugccauguuggccaggcugg

SEQ ID NO: 1787272 - RNA, 18 nt, Human
uuuugauguaaagauguu

SEQ ID NO: 1787273 - RNA, 16 nt, Human
uuuugauguaaagaug

SEQ ID NO: 1787274 - RNA, 19 nt, Human
uuuuugugaaaagcuccau

SEQ ID NO: 1787275 - RNA, 20 nt, Human
uuuuuguagagccagggucu

SEQ ID NO: 1787276 - RNA, 19 nt, Human
uuuuuguagagccaggguc

SEQ ID NO: 1787277 - RNA, 22 nt, Human
uuuuuauggcuuuugugcauua

SEQ ID NO: 1787278 - RNA, 21 nt, Human
uuuuuauggcuuuugugcauu

SEQ ID NO: 1787279 - RNA, 20 nt, Human
uuuuuauggcuuuugugcau

SEQ ID NO: 1787280 - RNA, 20 nt, Human
auuaaguuguuaauaaaagu

SEQ ID NO: 1787281 - RNA, 19 nt, Human
auuaaguuguuaauaaaag

SEQ ID NO: 1787282 - RNA, 14 nt, Human
auuaaguacuaugu

SEQ ID NO: 1787283 - RNA, 14 nt, Human
auuaaguuguuaau

SEQ ID NO: 1787284 - RNA, 16 nt, Human
auuaaguacuauguau

SEQ ID NO: 1787285 - RNA, 17 nt, Human
auguuuaguaaucauau

SEQ ID NO: 1787286 - RNA, 23 nt, Human
auuaaaacacaacaucuuuuucu

SEQ ID NO: 1787287 - RNA, 22 nt, Human
auuaaaaaucucaaauuucuaa

SEQ ID NO: 1787288 - RNA, 20 nt, Human
auuaaaaaucucaaauuucu

SEQ ID NO: 1787289 - RNA, 19 nt, Human
auuaaaaaucucaaauuuc

SEQ ID NO: 1787290 - RNA, 15 nt, Human
auuaaaaaucucaaa

SEQ ID NO: 1787291 - RNA, 14 nt, Human
uuuucaguuuucag

SEQ ID NO: 1787292 - RNA, 12 nt, Human
uuuucaguuuuc

SEQ ID NO: 1787293 - RNA, 11 nt, Human
uuuuauuuuau

SEQ ID NO: 1787294 - RNA, 20 nt, Human
uuuuaggccaaaaaaaugua

SEQ ID NO: 1787295 - RNA, 13 nt, Human
uuuuauuaugcau

SEQ ID NO: 1787296 - RNA, 20 nt, Human
uuuucauuuaggugaggaag

SEQ ID NO: 1787297 - RNA, 21 nt, Human
auguuaaacuuacuuaguguu

SEQ ID NO: 1787298 - RNA, 12 nt, Human
auguugcccagg

SEQ ID NO: 1787299 - RNA, 17 nt, Human
auguugcccaggcaggu

SEQ ID NO: 1787300 - RNA, 17 nt, Human
auguugcauagaauaaa

SEQ ID NO: 1787301 - RNA, 18 nt, Human
auguugcauagaauaaaa

SEQ ID NO: 1787302 - RNA, 18 nt, Human
auguucaucaaugaauga

SEQ ID NO: 1787303 - RNA, 20 nt, Human
auguugcccaggcaggucuu

SEQ ID NO: 1787304 - RNA, 20 nt, Human
auguugcccuguugcugccu

SEQ ID NO: 1787305 - RNA, 22 nt, Human
augugccagguuuuuggucuga

SEQ ID NO: 1787306 - RNA, 14 nt, Human
uuuuaauaaacacu

SEQ ID NO: 1787307 - RNA, 20 nt, Human
auggggcccugccuccuuug

SEQ ID NO: 1787308 - RNA, 12 nt, Human
augugugugugc

SEQ ID NO: 1787309 - RNA, 23 nt, Human
auguguguuuuaaaaugagaaau

SEQ ID NO: 1787310 - RNA, 24 nt, Human
auguggaguucaucuugaauugua

SEQ ID NO: 1787311 - RNA, 20 nt, Human
auguggaguucaucuugaau

SEQ ID NO: 1787312 - RNA, 15 nt, Human
auucccaagcucugc

SEQ ID NO: 1787313 - RNA, 14 nt, Human
auucccaagcucug

SEQ ID NO: 1787314 - RNA, 16 nt, Human
auucccaagcucugcu

SEQ ID NO: 1787315 - RNA, 15 nt, Human
auucaguaauaacuc

SEQ ID NO: 1787316 - RNA, 19 nt, Human
auucaguaauaacucuacc

SEQ ID NO: 1787317 - RNA, 20 nt, Human
auucaggaagcucagggccu

SEQ ID NO: 1787318 - RNA, 17 nt, Human
auucaggaagcucaggg

SEQ ID NO: 1787319 - RNA, 19 nt, Human
auucaggaagcucagggcc

SEQ ID NO: 1787320 - RNA, 17 nt, Human
auucagaguugaugguu

SEQ ID NO: 1787321 - RNA, 14 nt, Human
auucaggaagcuca

SEQ ID NO: 1787322 - RNA, 13 nt, Human
auucuccugccuc

SEQ ID NO: 1787323 - RNA, 14 nt, Human
auucuccugccuca

SEQ ID NO: 1787324 - RNA, 11 nt, Human
auucuccugcc

SEQ ID NO: 1787325 - RNA, 12 nt, Human
auucuccugccu

SEQ ID NO: 1787326 - RNA, 21 nt, Human
auucuccaccugccagggaca

SEQ ID NO: 1787327 - RNA, 17 nt, Human
auucuccugccucagcc

SEQ ID NO: 1787328 - RNA, 15 nt, Human
auucuccugccucag

SEQ ID NO: 1787329 - RNA, 19 nt, Human
auucuccugccucagccuc

SEQ ID NO: 1787330 - RNA, 20 nt, Human
auucuccugccucagccucc

SEQ ID NO: 1787331 - RNA, 18 nt, Human
auucuccugccucagccu

SEQ ID NO: 1787332 - RNA, 16 nt, Human
auucuccuuguguuac

SEQ ID NO: 1787333 - RNA, 14 nt, Human
auucucaugccuca

SEQ ID NO: 1787334 - RNA, 15 nt, Human
auucucaugccucag

SEQ ID NO: 1787335 - RNA, 19 nt, Human
auucuccaccugccaggga

SEQ ID NO: 1787336 - RNA, 20 nt, Human
auucuccaccugccagggac

SEQ ID NO: 1787337 - RNA, 12 nt, Human
auugaaaucuuu

SEQ ID NO: 1787338 - RNA, 20 nt, Human
auuuccagugaaaucaguua

SEQ ID NO: 1787339 - RNA, 22 nt, Human
auuucauuugugccagaaugcu

SEQ ID NO: 1787340 - RNA, 17 nt, Human
auuuccagccaaagccu

SEQ ID NO: 1787341 - RNA, 16 nt, Human
auuucaaacggccuca

SEQ ID NO: 1787342 - RNA, 14 nt, Human
auuugaaaauuuug

SEQ ID NO: 1787343 - RNA, 15 nt, Human
auuugaaaauuuuga

SEQ ID NO: 1787344 - RNA, 16 nt, Human
auuuccguuaaaauac

SEQ ID NO: 1787345 - RNA, 15 nt, Human
auuuccguuaaaaua

SEQ ID NO: 1787346 - RNA, 13 nt, Human
auuuauucugcuc

SEQ ID NO: 1787347 - RNA, 17 nt, Human
auuuauaaaaauaaaaa

SEQ ID NO: 1787348 - RNA, 22 nt, Human
auuuauaaaaauaaaaaacacu

SEQ ID NO: 1787349 - RNA, 13 nt, Human
auuuaguguucau

SEQ ID NO: 1787350 - RNA, 20 nt, Human
auuuaguaucuuuuuauuca

SEQ ID NO: 1787351 - RNA, 12 nt, Human
auuuaacagaaa

SEQ ID NO: 1787352 - RNA, 14 nt, Human
auuuaacagaaaug

SEQ ID NO: 1787353 - RNA, 17 nt, Human
auuuacuucuuauacau

SEQ ID NO: 1787354 - RNA, 14 nt, Human
auuuacuucuuaua

SEQ ID NO: 1787355 - RNA, 16 nt, Human
auuuacuucuuauaca

SEQ ID NO: 1787356 - RNA, 15 nt, Human
auuuagaaauauaau

SEQ ID NO: 1787357 - RNA, 14 nt, Human
auuuauucugcuca

SEQ ID NO: 1787358 - RNA, 18 nt, Human
auugugucucuugguccu

SEQ ID NO: 1787359 - RNA, 14 nt, Human
auugugucucuugg

SEQ ID NO: 1787360 - RNA, 13 nt, Human
auuguauucagag

SEQ ID NO: 1787361 - RNA, 19 nt, Human
auugguguaagguacuuuc

SEQ ID NO: 1787362 - RNA, 17 nt, Human
auuguccccgacccuug

SEQ ID NO: 1787363 - RNA, 19 nt, Human
auuguccccgacccuugcc

SEQ ID NO: 1787364 - RNA, 20 nt, Human
auuguccccgacccuugccg

SEQ ID NO: 1787365 - RNA, 17 nt, Human
auucuccuuguguuacu

SEQ ID NO: 1787366 - RNA, 24 nt, Human
auucugucucuggauuauauuaug

SEQ ID NO: 1787367 - RNA, 22 nt, Human
auucuuccucccucccucuuuc

SEQ ID NO: 1787368 - RNA, 13 nt, Human
auucuucuccacu

SEQ ID NO: 1787369 - RNA, 13 nt, Human
auucuuauuuaau

SEQ ID NO: 1787370 - RNA, 14 nt, Human
auucuuauuuaaug

SEQ ID NO: 1787371 - RNA, 18 nt, Human
auucuuauuuaaugaaag

SEQ ID NO: 1787372 - RNA, 18 nt, Human
auugacccacaagaaaug

SEQ ID NO: 1787373 - RNA, 21 nt, Human
auuuuauuuuuuucugaauua

SEQ ID NO: 1787374 - RNA, 18 nt, Human
auuuucaacgcagcccug

SEQ ID NO: 1787375 - RNA, 20 nt, Human
auuuucaacgcagcccugcu

SEQ ID NO: 1787376 - RNA, 22 nt, Human
auuuucaguuauuauauuuaca

SEQ ID NO: 1787377 - RNA, 16 nt, Human
auuuuacuuuuuccug

SEQ ID NO: 1787378 - RNA, 17 nt, Human
auuuuacuuuuuccugg

SEQ ID NO: 1787379 - RNA, 17 nt, Human
auuuuaccuuugacaaa

SEQ ID NO: 1787380 - RNA, 15 nt, Human
auuuuaauucaguug

SEQ ID NO: 1787381 - RNA, 15 nt, Human
auuuuaaacagagga

SEQ ID NO: 1787382 - RNA, 23 nt, Human
auuugugaagguggaaauaaacu

SEQ ID NO: 1787383 - RNA, 14 nt, Human
auuugugauacaau

SEQ ID NO: 1787384 - RNA, 17 nt, Human
uugcugauggugcaaug

SEQ ID NO: 1787385 - RNA, 18 nt, Human
uugcugauggugcaauga

SEQ ID NO: 1787386 - RNA, 19 nt, Human
uugcugauggugcaaugac

SEQ ID NO: 1787387 - RNA, 17 nt, Human
uuggaaagaguaggaag

SEQ ID NO: 1787388 - RNA, 16 nt, Human
uugcuuuuaaaaucca

SEQ ID NO: 1787389 - RNA, 19 nt, Human
uugcugaauacagaggcaa

SEQ ID NO: 1787390 - RNA, 20 nt, Human
uugcuaagugaggaugaaaa

SEQ ID NO: 1787391 - RNA, 14 nt, Human
augaaaugagguca

SEQ ID NO: 1787392 - RNA, 19 nt, Human
augaaagauggcugugccu

SEQ ID NO: 1787393 - RNA, 20 nt, Human
augaaagauggcugugccuc

SEQ ID NO: 1787394 - RNA, 23 nt, Human
augaaagauggcugugccucugc

SEQ ID NO: 1787395 - RNA, 20 nt, Human
augaaagacuguacaaagua

SEQ ID NO: 1787396 - RNA, 22 nt, Human
uuggcgcugccccuggcagccc

SEQ ID NO: 1787397 - RNA, 16 nt, Human
uuggcugcugaaggcu

SEQ ID NO: 1787398 - RNA, 13 nt, Human
aucuuucugcaga

SEQ ID NO: 1787399 - RNA, 14 nt, Human
uuggcugcagggag

SEQ ID NO: 1787400 - RNA, 23 nt, Human
uuggcuauuagagaucaaccccu

SEQ ID NO: 1787401 - RNA, 11 nt, Human
uuggcugcuga

SEQ ID NO: 1787402 - RNA, 15 nt, Human
uuggcugcugaaggc

SEQ ID NO: 1787403 - RNA, 22 nt, Human
uuggcuaggaccccuccaugug

SEQ ID NO: 1787404 - RNA, 22 nt, Human
uuggcuagagguucaaagauau

SEQ ID NO: 1787405 - RNA, 21 nt, Human
uuggcuagagguucaaagaua

SEQ ID NO: 1787406 - RNA, 18 nt, Human
uuggaaagaguaggaaga

SEQ ID NO: 1787407 - RNA, 23 nt, Human
uuggaaagaguaggaagacuuug

SEQ ID NO: 1787408 - RNA, 15 nt, Human
augacaggccugucc

SEQ ID NO: 1787409 - RNA, 20 nt, Human
augacacgaauauugcugau

SEQ ID NO: 1787410 - RNA, 19 nt, Human
augacacgaauauugcuga

SEQ ID NO: 1787411 - RNA, 13 nt, Human
uuguaaugaaaac

SEQ ID NO: 1787412 - RNA, 20 nt, Human
uuguaaggaaugauuaauua

SEQ ID NO: 1787413 - RNA, 22 nt, Human
uugggguacccacugcucuggu

SEQ ID NO: 1787414 - RNA, 19 nt, Human
uugguuaggcauuguggga

SEQ ID NO: 1787415 - RNA, 21 nt, Human
uuguaacuaaaauaauuuugu

SEQ ID NO: 1787416 - RNA, 18 nt, Human
uuguaacuaaaauaauuu

SEQ ID NO: 1787417 - RNA, 17 nt, Human
uuguaacuaaaauaauu

SEQ ID NO: 1787418 - RNA, 23 nt, Human
uuguaacuaaaauaauuuuguaa

SEQ ID NO: 1787419 - RNA, 22 nt, Human
uuguaacuaaaauaauuuugua

SEQ ID NO: 1787420 - RNA, 14 nt, Human
uuguaaggaaugau

SEQ ID NO: 1787421 - RNA, 13 nt, Human
augaaccacaucu

SEQ ID NO: 1787422 - RNA, 20 nt, Human
augaaccacaucuugcucug

SEQ ID NO: 1787423 - RNA, 17 nt, Human
uugggguacccacugcu

SEQ ID NO: 1787424 - RNA, 19 nt, Human
uuggggaagaacgaagcca

SEQ ID NO: 1787425 - RNA, 15 nt, Human
augaucacggcucac

SEQ ID NO: 1787426 - RNA, 19 nt, Human
augaucacggcucacugca

SEQ ID NO: 1787427 - RNA, 18 nt, Human
augaucacggcucacugc

SEQ ID NO: 1787428 - RNA, 23 nt, Human
augaucacggcucacugcagccu

SEQ ID NO: 1787429 - RNA, 16 nt, Human
augauccuaggcauuu

SEQ ID NO: 1787430 - RNA, 15 nt, Human
augaucuaggaagac

SEQ ID NO: 1787431 - RNA, 15 nt, Human
augauccuaaugaau

SEQ ID NO: 1787432 - RNA, 14 nt, Human
augaucuucuuuau

SEQ ID NO: 1787433 - RNA, 17 nt, Human
uugugaagguggaaaua

SEQ ID NO: 1787434 - RNA, 18 nt, Human
uugugaagguggaaauaa

SEQ ID NO: 1787435 - RNA, 18 nt, Human
uuguuuuuuuuuuccacu

SEQ ID NO: 1787436 - RNA, 19 nt, Human
augcaccuggaauauauaa

SEQ ID NO: 1787437 - RNA, 17 nt, Human
uuuaaaaaauuaaucug

SEQ ID NO: 1787438 - RNA, 19 nt, Human
uuguuuuuuuuuuccacuu

SEQ ID NO: 1787439 - RNA, 22 nt, Human
augcaaggucauuuuuuuuaag

SEQ ID NO: 1787440 - RNA, 14 nt, Human
augcaccuggaaua

SEQ ID NO: 1787441 - RNA, 16 nt, Human
augcaccuggaauaua

SEQ ID NO: 1787442 - RNA, 22 nt, Human
augcaaacuuuauuuuguguuu

SEQ ID NO: 1787443 - RNA, 16 nt, Human
augcaaggucauuuuu

SEQ ID NO: 1787444 - RNA, 14 nt, Human
augcaaggucauuu

SEQ ID NO: 1787445 - RNA, 15 nt, Human
augaucuucuuuaua

SEQ ID NO: 1787446 - RNA, 18 nt, Human
augaucuucuuuauaauu

SEQ ID NO: 1787447 - RNA, 16 nt, Human
augcaaaccaucauug

SEQ ID NO: 1787448 - RNA, 18 nt, Human
augcaaaccaucauugaa

SEQ ID NO: 1787449 - RNA, 19 nt, Human
augcaaaccaucauugaaa

SEQ ID NO: 1787450 - RNA, 20 nt, Human
augcaaaccaucauugaaau

SEQ ID NO: 1787451 - RNA, 21 nt, Human
augcaaaccaucauugaaauc

SEQ ID NO: 1787452 - RNA, 22 nt, Human
augcaaaccaucauugaaaucu

SEQ ID NO: 1787453 - RNA, 13 nt, Human
uugugaaauuauu

SEQ ID NO: 1787454 - RNA, 18 nt, Human
uugucacacacuuuggcu

SEQ ID NO: 1787455 - RNA, 15 nt, Human
augauaaaacacaaa

SEQ ID NO: 1787456 - RNA, 19 nt, Human
augagccucagcauccugg

SEQ ID NO: 1787457 - RNA, 18 nt, Human
augagccucagcauccug

SEQ ID NO: 1787458 - RNA, 17 nt, Human
augagccucagcauccu

SEQ ID NO: 1787459 - RNA, 12 nt, Human
augagaggaaau

SEQ ID NO: 1787460 - RNA, 13 nt, Human
augagaggaaauc

SEQ ID NO: 1787461 - RNA, 16 nt, Human
augagaggaaaucacc

SEQ ID NO: 1787462 - RNA, 14 nt, Human
augagaggaaauca

SEQ ID NO: 1787463 - RNA, 15 nt, Human
augagaggaaaucac

SEQ ID NO: 1787464 - RNA, 16 nt, Human
augagccucagcaucc

SEQ ID NO: 1787465 - RNA, 15 nt, Human
augagccucagcauc

SEQ ID NO: 1787466 - RNA, 12 nt, Human
augagccucagc

SEQ ID NO: 1787467 - RNA, 21 nt, Human
augagccaccgcgcccagccu

SEQ ID NO: 1787468 - RNA, 18 nt, Human
augagccaccgcgcccag

SEQ ID NO: 1787469 - RNA, 22 nt, Human
augagcaucaggccaggcccuc

SEQ ID NO: 1787470 - RNA, 15 nt, Human
augagcaucaggcca

SEQ ID NO: 1787471 - RNA, 16 nt, Human
augagcaucaggccag

SEQ ID NO: 1787472 - RNA, 17 nt, Human
augagcaucaggccagg

SEQ ID NO: 1787473 - RNA, 18 nt, Human
augagcaucaggccaggc

SEQ ID NO: 1787474 - RNA, 19 nt, Human
augagcaucaggccaggcc

SEQ ID NO: 1787475 - RNA, 20 nt, Human
augagcaucaggccaggccc

SEQ ID NO: 1787476 - RNA, 21 nt, Human
augagcaucaggccaggcccu

SEQ ID NO: 1787477 - RNA, 22 nt, Human
uuucucauuugccaauaauaau

SEQ ID NO: 1787478 - RNA, 14 nt, Human
uuucugccgcagcc

SEQ ID NO: 1787479 - RNA, 16 nt, Human
uuucugccgcagcccu

SEQ ID NO: 1787480 - RNA, 16 nt, Human
uuucucaaagaaauuu

SEQ ID NO: 1787481 - RNA, 15 nt, Human
uuucucaaagaaauu

SEQ ID NO: 1787482 - RNA, 14 nt, Human
uuucucaaagaaau

SEQ ID NO: 1787483 - RNA, 21 nt, Human
uuucuaugacacaugcaaggu

SEQ ID NO: 1787484 - RNA, 15 nt, Human
uuucuaugacacaug

SEQ ID NO: 1787485 - RNA, 13 nt, Human
uuucuuuguggcu

SEQ ID NO: 1787486 - RNA, 21 nt, Human
uuucuuuaguuuuugugaagu

SEQ ID NO: 1787487 - RNA, 22 nt, Human
uuugaaaccccuguaggccuca

SEQ ID NO: 1787488 - RNA, 17 nt, Human
uuugaaacacuuugcau

SEQ ID NO: 1787489 - RNA, 19 nt, Human
uuugaaacacuuugcauaa

SEQ ID NO: 1787490 - RNA, 17 nt, Human
auggggaggacaaaaug

SEQ ID NO: 1787491 - RNA, 13 nt, Human
auggggaggacaa

SEQ ID NO: 1787492 - RNA, 14 nt, Human
auggggcccugccu

SEQ ID NO: 1787493 - RNA, 13 nt, Human
auggggcccugcc

SEQ ID NO: 1787494 - RNA, 16 nt, Human
uuugaaauauggucuu

SEQ ID NO: 1787495 - RNA, 23 nt, Human
augggcuggguucuacccaggug

SEQ ID NO: 1787496 - RNA, 15 nt, Human
augggccuccugugu

SEQ ID NO: 1787497 - RNA, 15 nt, Human
augggcagagcagag

SEQ ID NO: 1787498 - RNA, 13 nt, Human
augggcagagcag

SEQ ID NO: 1787499 - RNA, 14 nt, Human
augggcagagcaga

SEQ ID NO: 1787500 - RNA, 21 nt, Human
augggcaacccccagccugcu

SEQ ID NO: 1787501 - RNA, 19 nt, Human
augggcaacccccagccug

SEQ ID NO: 1787502 - RNA, 13 nt, Human
augggagcucaug

SEQ ID NO: 1787503 - RNA, 15 nt, Human
augggacuggccucu

SEQ ID NO: 1787504 - RNA, 21 nt, Human
auggacccaauauuuaccaga

SEQ ID NO: 1787505 - RNA, 18 nt, Human
auggccucuucagaucuc

SEQ ID NO: 1787506 - RNA, 18 nt, Human
uuucgcaggauucuuccu

SEQ ID NO: 1787507 - RNA, 22 nt, Human
uuucgcaggauucuuccucccu

SEQ ID NO: 1787508 - RNA, 21 nt, Human
uuuccuuuuaaaacacuucca

SEQ ID NO: 1787509 - RNA, 23 nt, Human
uuuccuucauucaacccaccugc

SEQ ID NO: 1787510 - RNA, 18 nt, Human
uuuccuucagugccuuau

SEQ ID NO: 1787511 - RNA, 21 nt, Human
uuuccuucagugccuuaugga

SEQ ID NO: 1787512 - RNA, 22 nt, Human
uuuccuucagugccuuauggaa

SEQ ID NO: 1787513 - RNA, 21 nt, Human
uuuccuucauucaacccaccu

SEQ ID NO: 1787514 - RNA, 12 nt, Human
uuuccugugucu

SEQ ID NO: 1787515 - RNA, 17 nt, Human
augggccuccugugugu

SEQ ID NO: 1787516 - RNA, 19 nt, Human
uuuccuuaaauuaucuaaa

SEQ ID NO: 1787517 - RNA, 11 nt, Human
uuuccuucagu

SEQ ID NO: 1787518 - RNA, 12 nt, Human
uuuccuucagug

SEQ ID NO: 1787519 - RNA, 15 nt, Human
uuuccuucagugccu

SEQ ID NO: 1787520 - RNA, 13 nt, Human
uuuagauaauaca

SEQ ID NO: 1787521 - RNA, 18 nt, Human
uuuagaguugauacuaca

SEQ ID NO: 1787522 - RNA, 15 nt, Human
uuuagauaauacacc

SEQ ID NO: 1787523 - RNA, 19 nt, Human
uuuauuaaauguagaaagu

SEQ ID NO: 1787524 - RNA, 19 nt, Human
uuuauuaaaugcccagccc

SEQ ID NO: 1787525 - RNA, 14 nt, Human
uuuaugugaaacau

SEQ ID NO: 1787526 - RNA, 15 nt, Human
uuuaugugaaacaug

SEQ ID NO: 1787527 - RNA, 18 nt, Human
augcuacacacugcaugu

SEQ ID NO: 1787528 - RNA, 17 nt, Human
augcuacacacugcaug

SEQ ID NO: 1787529 - RNA, 20 nt, Human
uuuaccuuuuuuauacauaa

SEQ ID NO: 1787530 - RNA, 19 nt, Human
uuuaccuuuuuuauacaua

SEQ ID NO: 1787531 - RNA, 14 nt, Human
uuuaccuuuuuuau

SEQ ID NO: 1787532 - RNA, 18 nt, Human
uuuacuaauagacaauuu

SEQ ID NO: 1787533 - RNA, 17 nt, Human
uuuacuaauagacaauu

SEQ ID NO: 1787534 - RNA, 14 nt, Human
uuuacuaauagaca

SEQ ID NO: 1787535 - RNA, 21 nt, Human
uuuaccuuuuuuauacauaaa

SEQ ID NO: 1787536 - RNA, 13 nt, Human
augcuaagugaaa

SEQ ID NO: 1787537 - RNA, 23 nt, Human
augcgcaggcuggcccugcccug

SEQ ID NO: 1787538 - RNA, 17 nt, Human
uuuaaagaaaaguuuug

SEQ ID NO: 1787539 - RNA, 15 nt, Human
uuuaaagaaaaguuu

SEQ ID NO: 1787540 - RNA, 13 nt, Human
uuuaaagaaaagu

SEQ ID NO: 1787541 - RNA, 21 nt, Human
uuuaaagaaaaguuuuguaaa

SEQ ID NO: 1787542 - RNA, 18 nt, Human
auggaacacucugagacu

SEQ ID NO: 1787543 - RNA, 17 nt, Human
auggaacacucugagac

SEQ ID NO: 1787544 - RNA, 21 nt, Human
auggaaguacuauaauuuacc

SEQ ID NO: 1787545 - RNA, 14 nt, Human
auggaauaacaugu

SEQ ID NO: 1787546 - RNA, 15 nt, Human
auggaauaacaugua

SEQ ID NO: 1787547 - RNA, 13 nt, Human
uuuauuuuuuggg

SEQ ID NO: 1787548 - RNA, 22 nt, Human
augcuggcuguuggcugggggc

SEQ ID NO: 1787549 - RNA, 19 nt, Human
augcugugcccuaaagugu

SEQ ID NO: 1787550 - RNA, 14 nt, Human
augcuguauauguu

SEQ ID NO: 1787551 - RNA, 19 nt, Human
uuuccagguuuaagcuguu

SEQ ID NO: 1787552 - RNA, 24 nt, Human
uuucacucuuauugcccacgcugg

SEQ ID NO: 1787553 - RNA, 15 nt, Human
uuucacucuccuugg

SEQ ID NO: 1787554 - RNA, 24 nt, Human
uuucacugcuggcugccuuagaac

SEQ ID NO: 1787555 - RNA, 15 nt, Human
uuucaguuuucagga

SEQ ID NO: 1787556 - RNA, 12 nt, Human
uuucauaaagca

SEQ ID NO: 1787557 - RNA, 16 nt, Human
uuuauuuuuugggaaa

SEQ ID NO: 1787558 - RNA, 17 nt, Human
uuuauuuuuuucugaau

SEQ ID NO: 1787559 - RNA, 14 nt, Human
uuucacucuccuug

SEQ ID NO: 1787560 - RNA, 20 nt, Human
uucauaucuauuuauuaaau

SEQ ID NO: 1787561 - RNA, 22 nt, Human
uucauauuuuaaacagaggaua

SEQ ID NO: 1787562 - RNA, 14 nt, Human
uucaguaagccgug

SEQ ID NO: 1787563 - RNA, 17 nt, Human
uucagguaacaggcaga

SEQ ID NO: 1787564 - RNA, 13 nt, Human
auauaugcuaagu

SEQ ID NO: 1787565 - RNA, 15 nt, Human
uucaucaaugaauga

SEQ ID NO: 1787566 - RNA, 22 nt, Human
auauauguuuuaagaggcaggg

SEQ ID NO: 1787567 - RNA, 21 nt, Human
auauauguuuuaagaggcagg

SEQ ID NO: 1787568 - RNA, 15 nt, Human
auauauuuuaagacg

SEQ ID NO: 1787569 - RNA, 16 nt, Human
uucagaaauguguuau

SEQ ID NO: 1787570 - RNA, 22 nt, Human
uucagauauaaaagacugacca

SEQ ID NO: 1787571 - RNA, 14 nt, Human
uucagccaagaauu

SEQ ID NO: 1787572 - RNA, 16 nt, Human
uucagguaacaggcag

SEQ ID NO: 1787573 - RNA, 15 nt, Human
uucagguaacaggca

SEQ ID NO: 1787574 - RNA, 22 nt, Human
uucaggguuggccccugcccgg

SEQ ID NO: 1787575 - RNA, 19 nt, Human
uucaggguuggccccugcc

SEQ ID NO: 1787576 - RNA, 17 nt, Human
uucaggguuggccccug

SEQ ID NO: 1787577 - RNA, 16 nt, Human
uucaggguuggccccu

SEQ ID NO: 1787578 - RNA, 14 nt, Human
uucaggguuggccc

SEQ ID NO: 1787579 - RNA, 22 nt, Human
uuccaauuuacauacucugcuu

SEQ ID NO: 1787580 - RNA, 22 nt, Human
uuccacagaggacacagagaag

SEQ ID NO: 1787581 - RNA, 14 nt, Human
uuccacagaggaca

SEQ ID NO: 1787582 - RNA, 21 nt, Human
uuccacaagagcccaggccuc

SEQ ID NO: 1787583 - RNA, 15 nt, Human
uuccaccuucccaug

SEQ ID NO: 1787584 - RNA, 18 nt, Human
uuccaccaucaagccacc

SEQ ID NO: 1787585 - RNA, 13 nt, Human
uuccaggcuggga

SEQ ID NO: 1787586 - RNA, 15 nt, Human
uuccaggcugggaga

SEQ ID NO: 1787587 - RNA, 17 nt, Human
uuccaggcugggagagc

SEQ ID NO: 1787588 - RNA, 18 nt, Human
uuccagguuuaagcuguu

SEQ ID NO: 1787589 - RNA, 17 nt, Human
uuccagguuuaagcugu

SEQ ID NO: 1787590 - RNA, 20 nt, Human
auauguggaguucaucuuga

SEQ ID NO: 1787591 - RNA, 21 nt, Human
auauguggaguucaucuugaa

SEQ ID NO: 1787592 - RNA, 23 nt, Human
auauguaccuaacgaaguauccu

SEQ ID NO: 1787593 - RNA, 15 nt, Human
uucccuuuuuuuaag

SEQ ID NO: 1787594 - RNA, 13 nt, Human
uucccuacuuccu

SEQ ID NO: 1787595 - RNA, 14 nt, Human
uucccgcucagccc

SEQ ID NO: 1787596 - RNA, 15 nt, Human
uucccgcucagcccu

SEQ ID NO: 1787597 - RNA, 12 nt, Human
uucccgcucagc

SEQ ID NO: 1787598 - RNA, 17 nt, Human
uuccuguugucaagaau

SEQ ID NO: 1787599 - RNA, 20 nt, Human
uuccuggcacugcuuccagu

SEQ ID NO: 1787600 - RNA, 22 nt, Human
uuccuggcacugcuuccaguga

SEQ ID NO: 1787601 - RNA, 22 nt, Human
uuccucuuuuuauuuaguuccu

SEQ ID NO: 1787602 - RNA, 19 nt, Human
uuccuggcacugcuuccag

SEQ ID NO: 1787603 - RNA, 13 nt, Human
uuccucugagccu

SEQ ID NO: 1787604 - RNA, 19 nt, Human
uuccucuccacugccuucg

SEQ ID NO: 1787605 - RNA, 18 nt, Human
uuccucuccacugccuuc

SEQ ID NO: 1787606 - RNA, 21 nt, Human
uuccuaaauauauuuuaagac

SEQ ID NO: 1787607 - RNA, 16 nt, Human
aucaauucauaucuau

SEQ ID NO: 1787608 - RNA, 13 nt, Human
aucaauuuaaaaa

SEQ ID NO: 1787609 - RNA, 17 nt, Human
aucacgccacugcacua

SEQ ID NO: 1787610 - RNA, 15 nt, Human
aucacgccacugcac

SEQ ID NO: 1787611 - RNA, 21 nt, Human
aucaacugcaucaagauguga

SEQ ID NO: 1787612 - RNA, 13 nt, Human
auauuuacaaaug

SEQ ID NO: 1787613 - RNA, 14 nt, Human
auauuguacaguuu

SEQ ID NO: 1787614 - RNA, 13 nt, Human
auauuguacaguu

SEQ ID NO: 1787615 - RNA, 13 nt, Human
auauuguuuucag

SEQ ID NO: 1787616 - RNA, 17 nt, Human
auauuguuuucagugua

SEQ ID NO: 1787617 - RNA, 15 nt, Human
auauugauaugcuua

SEQ ID NO: 1787618 - RNA, 21 nt, Human
auauuccugcauuugugaaau

SEQ ID NO: 1787619 - RNA, 19 nt, Human
auauuaccacagacauacu

SEQ ID NO: 1787620 - RNA, 12 nt, Human
auauuguacagu

SEQ ID NO: 1787621 - RNA, 22 nt, Human
auauugcugauggugcaaugac

SEQ ID NO: 1787622 - RNA, 16 nt, Human
auauguucugacauaa

SEQ ID NO: 1787623 - RNA, 22 nt, Human
uuccagugaaaucaguuacucu

SEQ ID NO: 1787624 - RNA, 15 nt, Human
uuccagugaggcucu

SEQ ID NO: 1787625 - RNA, 16 nt, Human
uuccagugaggcucug

SEQ ID NO: 1787626 - RNA, 16 nt, Human
auauuaagaaagacua

SEQ ID NO: 1787627 - RNA, 15 nt, Human
auauuaagaaagacu

SEQ ID NO: 1787628 - RNA, 17 nt, Human
auauuaagaaagacuau

SEQ ID NO: 1787629 - RNA, 22 nt, Human
auauuaagaaagacuaucuaaa

SEQ ID NO: 1787630 - RNA, 17 nt, Human
auauuaccacagacaua

SEQ ID NO: 1787631 - RNA, 12 nt, Human
aucguaaaauua

SEQ ID NO: 1787632 - RNA, 13 nt, Human
aucguaaaauuaa

SEQ ID NO: 1787633 - RNA, 14 nt, Human
aucguaaaauuaag

SEQ ID NO: 1787634 - RNA, 17 nt, Human
aucguaaaauuaagaaa

SEQ ID NO: 1787635 - RNA, 23 nt, Human
auccuggcacccggccccugcug

SEQ ID NO: 1787636 - RNA, 22 nt, Human
auccuggcacccggccccugcu

SEQ ID NO: 1787637 - RNA, 21 nt, Human
auccuggcacccggccccugc

SEQ ID NO: 1787638 - RNA, 20 nt, Human
auccuggcacccggccccug

SEQ ID NO: 1787639 - RNA, 19 nt, Human
auccuggcacccggccccu

SEQ ID NO: 1787640 - RNA, 17 nt, Human
auccuggcacccggccc

SEQ ID NO: 1787641 - RNA, 21 nt, Human
auccugcuucugauaugcagu

SEQ ID NO: 1787642 - RNA, 19 nt, Human
auccugcuucugauaugca

SEQ ID NO: 1787643 - RNA, 15 nt, Human
auccuggaguucugg

SEQ ID NO: 1787644 - RNA, 18 nt, Human
auccucuguacagagccc

SEQ ID NO: 1787645 - RNA, 20 nt, Human
auccucuguacagagcccac

SEQ ID NO: 1787646 - RNA, 20 nt, Human
uucuuuugccguuauuaaaa

SEQ ID NO: 1787647 - RNA, 17 nt, Human
auccucuuugagugaag

SEQ ID NO: 1787648 - RNA, 11 nt, Human
auccugagcca

SEQ ID NO: 1787649 - RNA, 12 nt, Human
auccugagccag

SEQ ID NO: 1787650 - RNA, 13 nt, Human
auccugagccaga

SEQ ID NO: 1787651 - RNA, 14 nt, Human
auccugagccagau

SEQ ID NO: 1787652 - RNA, 15 nt, Human
auccugagccagauu

SEQ ID NO: 1787653 - RNA, 17 nt, Human
auccugagccagauuuc

SEQ ID NO: 1787654 - RNA, 21 nt, Human
auccugagccagauuucacuc

SEQ ID NO: 1787655 - RNA, 18 nt, Human
auccugaggcuccacuug

SEQ ID NO: 1787656 - RNA, 16 nt, Human
auccugaggcuccacu

SEQ ID NO: 1787657 - RNA, 13 nt, Human
auccugaggcucc

SEQ ID NO: 1787658 - RNA, 11 nt, Human
auccugaggcu

SEQ ID NO: 1787659 - RNA, 13 nt, Human
auccugccccuga

SEQ ID NO: 1787660 - RNA, 22 nt, Human
auccugaggcuccacuuggucu

SEQ ID NO: 1787661 - RNA, 16 nt, Human
auccugcaauuccacu

SEQ ID NO: 1787662 - RNA, 17 nt, Human
uugacacuuaaaaaugg

SEQ ID NO: 1787663 - RNA, 15 nt, Human
aucuaaauguugaaa

SEQ ID NO: 1787664 - RNA, 15 nt, Human
aucuaaacugccccc

SEQ ID NO: 1787665 - RNA, 19 nt, Human
aucuaaauggaaccacucu

SEQ ID NO: 1787666 - RNA, 15 nt, Human
aucgugacaacacuu

SEQ ID NO: 1787667 - RNA, 14 nt, Human
aucgugacaacacu

SEQ ID NO: 1787668 - RNA, 14 nt, Human
aucgucacugcuua

SEQ ID NO: 1787669 - RNA, 18 nt, Human
aucgucacugcuuaacuu

SEQ ID NO: 1787670 - RNA, 12 nt, Human
uugauaaaguaa

SEQ ID NO: 1787671 - RNA, 15 nt, Human
uugaggucuguucuu

SEQ ID NO: 1787672 - RNA, 16 nt, Human
uugaggucuguucuuu

SEQ ID NO: 1787673 - RNA, 18 nt, Human
uugaccauucuccaccug

SEQ ID NO: 1787674 - RNA, 19 nt, Human
uugaccauucuccaccugc

SEQ ID NO: 1787675 - RNA, 13 nt, Human
uugacaucaacug

SEQ ID NO: 1787676 - RNA, 19 nt, Human
uugacacuuaaaaaugguu

SEQ ID NO: 1787677 - RNA, 24 nt, Human
uugaccauucuccaccugccaggg

SEQ ID NO: 1787678 - RNA, 23 nt, Human
aucauccacugugccaugugcca

SEQ ID NO: 1787679 - RNA, 21 nt, Human
aucauccacugugccaugugc

SEQ ID NO: 1787680 - RNA, 16 nt, Human
aucauuaggugugacu

SEQ ID NO: 1787681 - RNA, 15 nt, Human
aucauaaaacuugau

SEQ ID NO: 1787682 - RNA, 19 nt, Human
aucagucugauucccaagc

SEQ ID NO: 1787683 - RNA, 17 nt, Human
aucagugcccuccagga

SEQ ID NO: 1787684 - RNA, 13 nt, Human
aucagugcccucc

SEQ ID NO: 1787685 - RNA, 15 nt, Human
aucagugcccuccag

SEQ ID NO: 1787686 - RNA, 15 nt, Human
aucaggugcugccau

SEQ ID NO: 1787687 - RNA, 23 nt, Human
aucacuugaacccgggaggcaga

SEQ ID NO: 1787688 - RNA, 19 nt, Human
aucaggugcugccauccag

SEQ ID NO: 1787689 - RNA, 17 nt, Human
aucaggugcugccaucc

SEQ ID NO: 1787690 - RNA, 21 nt, Human
uucucuaguuugauuaaauuc

SEQ ID NO: 1787691 - RNA, 18 nt, Human
uucuccuuucacaaccuu

SEQ ID NO: 1787692 - RNA, 22 nt, Human
uucuccuuucacaaccuucugu

SEQ ID NO: 1787693 - RNA, 12 nt, Human
aucauugaaauc

SEQ ID NO: 1787694 - RNA, 13 nt, Human
aucauugaaaucu

SEQ ID NO: 1787695 - RNA, 13 nt, Human
aucauugugaaau

SEQ ID NO: 1787696 - RNA, 15 nt, Human
aucauugugaaauua

SEQ ID NO: 1787697 - RNA, 19 nt, Human
aucauugugaaauuauuca

SEQ ID NO: 1787698 - RNA, 18 nt, Human
auccaagcaaaugugaau

SEQ ID NO: 1787699 - RNA, 16 nt, Human
auccaagcaaauguga

SEQ ID NO: 1787700 - RNA, 16 nt, Human
uucugccugcccaggc

SEQ ID NO: 1787701 - RNA, 15 nt, Human
uucugccugcccagg

SEQ ID NO: 1787702 - RNA, 17 nt, Human
auccagguucagcuugu

SEQ ID NO: 1787703 - RNA, 13 nt, Human
auccaauuggaua

SEQ ID NO: 1787704 - RNA, 15 nt, Human
auccaguaucuugaa

SEQ ID NO: 1787705 - RNA, 14 nt, Human
auccaguaucuuga

SEQ ID NO: 1787706 - RNA, 18 nt, Human
aucccaugagccucagca

SEQ ID NO: 1787707 - RNA, 17 nt, Human
aucccaugagccucagc

SEQ ID NO: 1787708 - RNA, 22 nt, Human
aucccugaaggccccgcccagg

SEQ ID NO: 1787709 - RNA, 17 nt, Human
aucccugaaggccccgc

SEQ ID NO: 1787710 - RNA, 16 nt, Human
aucccaugagccucag

SEQ ID NO: 1787711 - RNA, 12 nt, Human
aucccagcccca

SEQ ID NO: 1787712 - RNA, 11 nt, Human
aucccagcccc

SEQ ID NO: 1787713 - RNA, 22 nt, Human
uucuuaaccagaucauugugaa

SEQ ID NO: 1787714 - RNA, 23 nt, Human
uucuuaaccagaucauugugaaa

SEQ ID NO: 1787715 - RNA, 18 nt, Human
uucuguuuagauaauaca

SEQ ID NO: 1787716 - RNA, 13 nt, Human
uucuguuuagaua

SEQ ID NO: 1787717 - RNA, 12 nt, Human
uucuuucuggcu

SEQ ID NO: 1787718 - RNA, 20 nt, Human
uucuuucuggcuaugcauuu

SEQ ID NO: 1787719 - RNA, 17 nt, Human
uucuuucuggcuaugca

SEQ ID NO: 1787720 - RNA, 22 nt, Human
uucuucuccacuuucuagccag

SEQ ID NO: 1787721 - RNA, 11 nt, Human
uucuucucccu

SEQ ID NO: 1787722 - RNA, 20 nt, Human
aggcuggcgugcaguggugc

SEQ ID NO: 1787723 - RNA, 18 nt, Human
aggcuggcgugcaguggu

SEQ ID NO: 1787724 - RNA, 22 nt, Human
uggcuagagguucaaagauauu

SEQ ID NO: 1787725 - RNA, 14 nt, Human
aggcugggagagcc

SEQ ID NO: 1787726 - RNA, 22 nt, Human
uggcuauuagagaucaaccccu

SEQ ID NO: 1787727 - RNA, 19 nt, Human
uggcuaugcauuugaaaau

SEQ ID NO: 1787728 - RNA, 14 nt, Human
uggcuaugcauuug

SEQ ID NO: 1787729 - RNA, 17 nt, Human
uggcuaugcauuugaaa

SEQ ID NO: 1787730 - RNA, 15 nt, Human
uggcuaugcauuuga

SEQ ID NO: 1787731 - RNA, 18 nt, Human
uggcucaaguccucuuuu

SEQ ID NO: 1787732 - RNA, 19 nt, Human
uggcucuuccaggcuggga

SEQ ID NO: 1787733 - RNA, 20 nt, Human
uggcucuuccaggcugggag

SEQ ID NO: 1787734 - RNA, 21 nt, Human
uggcucuuccaggcugggaga

SEQ ID NO: 1787735 - RNA, 12 nt, Human
uggcugcaaagg

SEQ ID NO: 1787736 - RNA, 14 nt, Human
uggcugcagggagu

SEQ ID NO: 1787737 - RNA, 13 nt, Human
uggcugcagggag

SEQ ID NO: 1787738 - RNA, 15 nt, Human
uggcugcagggaguc

SEQ ID NO: 1787739 - RNA, 18 nt, Human
uggcugccaaugggagcu

SEQ ID NO: 1787740 - RNA, 20 nt, Human
uggcugccaaugggagcuca

SEQ ID NO: 1787741 - RNA, 11 nt, Human
uggcugcugaa

SEQ ID NO: 1787742 - RNA, 17 nt, Human
uggcuuaaaacaacacu

SEQ ID NO: 1787743 - RNA, 15 nt, Human
uggcuguuggcuggg

SEQ ID NO: 1787744 - RNA, 13 nt, Human
uggcuguuggcug

SEQ ID NO: 1787745 - RNA, 14 nt, Human
uggcugugucuccc

SEQ ID NO: 1787746 - RNA, 23 nt, Human
uggcuucacggaagagccuugcg

SEQ ID NO: 1787747 - RNA, 13 nt, Human
ugggaacuagacu

SEQ ID NO: 1787748 - RNA, 17 nt, Human
uggcuucccgcucagcc

SEQ ID NO: 1787749 - RNA, 15 nt, Human
uggcuucccgcucag

SEQ ID NO: 1787750 - RNA, 16 nt, Human
uggcuucccgcucagc

SEQ ID NO: 1787751 - RNA, 16 nt, Human
ugggaaaggggaaguu

SEQ ID NO: 1787752 - RNA, 17 nt, Human
aggcuggcgugcagugg

SEQ ID NO: 1787753 - RNA, 13 nt, Human
aggcuggcgugca

SEQ ID NO: 1787754 - RNA, 19 nt, Human
aggcuggcccugcccuggu

SEQ ID NO: 1787755 - RNA, 15 nt, Human
aggcuggcccugccc

SEQ ID NO: 1787756 - RNA, 16 nt, Human
aggcuggcccugcccu

SEQ ID NO: 1787757 - RNA, 17 nt, Human
aggcuggcccugcccug

SEQ ID NO: 1787758 - RNA, 18 nt, Human
aggcuggcccugcccugg

SEQ ID NO: 1787759 - RNA, 12 nt, Human
aggcuggcccug

SEQ ID NO: 1787760 - RNA, 14 nt, Human
aggcuggcccugcc

SEQ ID NO: 1787761 - RNA, 18 nt, Human
aggcucuggagcccacug

SEQ ID NO: 1787762 - RNA, 19 nt, Human
aggcucuggagcccacugu

SEQ ID NO: 1787763 - RNA, 14 nt, Human
aggcucuggagccc

SEQ ID NO: 1787764 - RNA, 15 nt, Human
aggcucuggagccca

SEQ ID NO: 1787765 - RNA, 13 nt, Human
aggcucuggagcc

SEQ ID NO: 1787766 - RNA, 16 nt, Human
aggcucugcccuuggu

SEQ ID NO: 1787767 - RNA, 23 nt, Human
aggcugcucuugaacuccugacc

SEQ ID NO: 1787768 - RNA, 19 nt, Human
aggcuccuuuagcgcccag

SEQ ID NO: 1787769 - RNA, 12 nt, Human
aggcucgagcau

SEQ ID NO: 1787770 - RNA, 20 nt, Human
aggcuccugccaccacgccc

SEQ ID NO: 1787771 - RNA, 14 nt, Human
aggcuccugccacc

SEQ ID NO: 1787772 - RNA, 21 nt, Human
aggcucgagcaugccuggaug

SEQ ID NO: 1787773 - RNA, 15 nt, Human
aggcucgagcaugcc

SEQ ID NO: 1787774 - RNA, 17 nt, Human
aggcucgagcaugccug

SEQ ID NO: 1787775 - RNA, 18 nt, Human
aggcucgagcaugccugg

SEQ ID NO: 1787776 - RNA, 19 nt, Human
aggcucgagcaugccugga

SEQ ID NO: 1787777 - RNA, 21 nt, Human
aggcucucaggccagcugcuu

SEQ ID NO: 1787778 - RNA, 11 nt, Human
aggcucugccc

SEQ ID NO: 1787779 - RNA, 12 nt, Human
aggcucugcccu

SEQ ID NO: 1787780 - RNA, 13 nt, Human
aggcucugcccuu

SEQ ID NO: 1787781 - RNA, 14 nt, Human
aggcucugcccuug

SEQ ID NO: 1787782 - RNA, 15 nt, Human
aggcucugcccuugg

SEQ ID NO: 1787783 - RNA, 11 nt, Human
aggcucucagg

SEQ ID NO: 1787784 - RNA, 12 nt, Human
aggcucucaggc

SEQ ID NO: 1787785 - RNA, 14 nt, Human
aggcucucaggcca

SEQ ID NO: 1787786 - RNA, 15 nt, Human
aggcucucaggccag

SEQ ID NO: 1787787 - RNA, 16 nt, Human
aggcucucaggccagc

SEQ ID NO: 1787788 - RNA, 18 nt, Human
aggcucucaggccagcug

SEQ ID NO: 1787789 - RNA, 19 nt, Human
aggcucucaggccagcugc

SEQ ID NO: 1787790 - RNA, 20 nt, Human
aggcucucaggccagcugcu

SEQ ID NO: 1787791 - RNA, 18 nt, Human
uggacgagaaaacaauaa

SEQ ID NO: 1787792 - RNA, 13 nt, Human
aggccaaaaaaau

SEQ ID NO: 1787793 - RNA, 16 nt, Human
aggccaaacucaccug

SEQ ID NO: 1787794 - RNA, 18 nt, Human
aggcauuuguuugaacug

SEQ ID NO: 1787795 - RNA, 20 nt, Human
aggccaaacucaccugcccc

SEQ ID NO: 1787796 - RNA, 14 nt, Human
aggccaaaggaagc

SEQ ID NO: 1787797 - RNA, 15 nt, Human
aggccaaaggaagca

SEQ ID NO: 1787798 - RNA, 23 nt, Human
aggccaaaggaagcacaugccuc

SEQ ID NO: 1787799 - RNA, 22 nt, Human
aggccaacccaaaauaagcagg

SEQ ID NO: 1787800 - RNA, 18 nt, Human
aggccaaggugggaggau

SEQ ID NO: 1787801 - RNA, 19 nt, Human
uggaugccugguggcagcu

SEQ ID NO: 1787802 - RNA, 18 nt, Human
uggaugccugguggcagc

SEQ ID NO: 1787803 - RNA, 20 nt, Human
uggaugccugguggcagcug

SEQ ID NO: 1787804 - RNA, 16 nt, Human
uggaguucaucuugaa

SEQ ID NO: 1787805 - RNA, 17 nt, Human
uggaguucaucuugaau

SEQ ID NO: 1787806 - RNA, 20 nt, Human
uggaguucaucuugaauugu

SEQ ID NO: 1787807 - RNA, 19 nt, Human
uggagucagacagaugugg

SEQ ID NO: 1787808 - RNA, 15 nt, Human
aggccacaagacccu

SEQ ID NO: 1787809 - RNA, 12 nt, Human
uggauguucuga

SEQ ID NO: 1787810 - RNA, 22 nt, Human
uggauuaaacuuaaucuaaaug

SEQ ID NO: 1787811 - RNA, 20 nt, Human
uggcacaucagcacgauuuc

SEQ ID NO: 1787812 - RNA, 18 nt, Human
uggcaccagcagccugga

SEQ ID NO: 1787813 - RNA, 22 nt, Human
uggcagaguugaagacagagcu

SEQ ID NO: 1787814 - RNA, 16 nt, Human
uggcacccggccccug

SEQ ID NO: 1787815 - RNA, 21 nt, Human
uggcagaguugaagacagagc

SEQ ID NO: 1787816 - RNA, 15 nt, Human
uggcacccggccccu

SEQ ID NO: 1787817 - RNA, 21 nt, Human
uggcacaucagcacgauuucu

SEQ ID NO: 1787818 - RNA, 13 nt, Human
uggcagccuuggc

SEQ ID NO: 1787819 - RNA, 12 nt, Human
aggccagagaca

SEQ ID NO: 1787820 - RNA, 23 nt, Human
uggcagccgugccuucagcucua

SEQ ID NO: 1787821 - RNA, 15 nt, Human
uggcagccucuucaa

SEQ ID NO: 1787822 - RNA, 16 nt, Human
uggcagccucuucaaa

SEQ ID NO: 1787823 - RNA, 20 nt, Human
aggccacaagacccuugugg

SEQ ID NO: 1787824 - RNA, 16 nt, Human
uggcagccgugccuuc

SEQ ID NO: 1787825 - RNA, 12 nt, Human
uggcagccccug

SEQ ID NO: 1787826 - RNA, 21 nt, Human
uggccccugcccggcugcgga

SEQ ID NO: 1787827 - RNA, 18 nt, Human
uggcccgacagccuggca

SEQ ID NO: 1787828 - RNA, 19 nt, Human
uggcccgacagccuggcac

SEQ ID NO: 1787829 - RNA, 14 nt, Human
uggcccgacagccu

SEQ ID NO: 1787830 - RNA, 15 nt, Human
uggcccgacagccug

SEQ ID NO: 1787831 - RNA, 16 nt, Human
uggcccgacagccugg

SEQ ID NO: 1787832 - RNA, 17 nt, Human
uggcccgacagccuggc

SEQ ID NO: 1787833 - RNA, 15 nt, Human
uggccgggaccccga

SEQ ID NO: 1787834 - RNA, 17 nt, Human
uggccgggaccccgagc

SEQ ID NO: 1787835 - RNA, 23 nt, Human
uggccgggaccccgagccuggcu

SEQ ID NO: 1787836 - RNA, 15 nt, Human
uggccgggagccuga

SEQ ID NO: 1787837 - RNA, 21 nt, Human
aggccuggccagaugcaccag

SEQ ID NO: 1787838 - RNA, 17 nt, Human
aggccuggccagaugca

SEQ ID NO: 1787839 - RNA, 16 nt, Human
aggccuggccagaugc

SEQ ID NO: 1787840 - RNA, 15 nt, Human
aggccuggccagaug

SEQ ID NO: 1787841 - RNA, 23 nt, Human
aggccuggccagaugcaccagcc

SEQ ID NO: 1787842 - RNA, 22 nt, Human
aggccuggccagaugcaccagc

SEQ ID NO: 1787843 - RNA, 12 nt, Human
uggccuggcccc

SEQ ID NO: 1787844 - RNA, 23 nt, Human
aggccugggggcugggcagagga

SEQ ID NO: 1787845 - RNA, 14 nt, Human
uggccucugcacuc

SEQ ID NO: 1787846 - RNA, 15 nt, Human
uggccucugcacucc

SEQ ID NO: 1787847 - RNA, 17 nt, Human
uggccucugcacucccc

SEQ ID NO: 1787848 - RNA, 18 nt, Human
uggccucugcacuccccu

SEQ ID NO: 1787849 - RNA, 15 nt, Human
aggcccucugcccac

SEQ ID NO: 1787850 - RNA, 13 nt, Human
aggcccucugccc

SEQ ID NO: 1787851 - RNA, 14 nt, Human
aggcccucugccca

SEQ ID NO: 1787852 - RNA, 17 nt, Human
uggccaggcuggucuca

SEQ ID NO: 1787853 - RNA, 15 nt, Human
uggccaggcuggucu

SEQ ID NO: 1787854 - RNA, 16 nt, Human
uggccaaguucuuagu

SEQ ID NO: 1787855 - RNA, 20 nt, Human
uggccaggcuggucucgaac

SEQ ID NO: 1787856 - RNA, 12 nt, Human
uggcaugggaau

SEQ ID NO: 1787857 - RNA, 15 nt, Human
uggcaugggaaugaa

SEQ ID NO: 1787858 - RNA, 13 nt, Human
aggccugccuguu

SEQ ID NO: 1787859 - RNA, 13 nt, Human
ugcuuauacacuu

SEQ ID NO: 1787860 - RNA, 14 nt, Human
ugcuucagccuccc

SEQ ID NO: 1787861 - RNA, 13 nt, Human
ugcuucagccucc

SEQ ID NO: 1787862 - RNA, 16 nt, Human
ugcuucaaggauccug

SEQ ID NO: 1787863 - RNA, 18 nt, Human
ugcuucaaggauccugag

SEQ ID NO: 1787864 - RNA, 19 nt, Human
ugcuucaaggauccugagc

SEQ ID NO: 1787865 - RNA, 19 nt, Human
aggacacuaaccacgcugg

SEQ ID NO: 1787866 - RNA, 23 nt, Human
aggacacuaaccacgcuggaccu

SEQ ID NO: 1787867 - RNA, 14 nt, Human
ugcuucaucccuuu

SEQ ID NO: 1787868 - RNA, 22 nt, Human
aggacagggaggugaccccagg

SEQ ID NO: 1787869 - RNA, 18 nt, Human
ugcuggcuguuggcuggg

SEQ ID NO: 1787870 - RNA, 16 nt, Human
ugcuggcugguuagag

SEQ ID NO: 1787871 - RNA, 15 nt, Human
ugcuggcugccuuag

SEQ ID NO: 1787872 - RNA, 14 nt, Human
ugcuggcugccuua

SEQ ID NO: 1787873 - RNA, 21 nt, Human
ugcuggcugccuuagaaccuu

SEQ ID NO: 1787874 - RNA, 12 nt, Human
ugcugcccugug

SEQ ID NO: 1787875 - RNA, 13 nt, Human
ugcugcccuguga

SEQ ID NO: 1787876 - RNA, 14 nt, Human
ugcugcccugugag

SEQ ID NO: 1787877 - RNA, 20 nt, Human
aggaauuuuauuuuuuucug

SEQ ID NO: 1787878 - RNA, 15 nt, Human
ugcugcccugugagu

SEQ ID NO: 1787879 - RNA, 14 nt, Human
ugcuggagcucugc

SEQ ID NO: 1787880 - RNA, 13 nt, Human
ugcuggagcucug

SEQ ID NO: 1787881 - RNA, 11 nt, Human
aggaauuuaaa

SEQ ID NO: 1787882 - RNA, 23 nt, Human
aggaauugacccacaagaaauga

SEQ ID NO: 1787883 - RNA, 23 nt, Human
aggaauuguguuuauaauuuuaa

SEQ ID NO: 1787884 - RNA, 19 nt, Human
aggaaggaaacccagcucu

SEQ ID NO: 1787885 - RNA, 15 nt, Human
aggaaggagaggaga

SEQ ID NO: 1787886 - RNA, 18 nt, Human
aggaaggaaacccagcuc

SEQ ID NO: 1787887 - RNA, 17 nt, Human
aggaagccagcaggcuc

SEQ ID NO: 1787888 - RNA, 18 nt, Human
aggaagccagcaggcucu

SEQ ID NO: 1787889 - RNA, 14 nt, Human
aggaagccagcagg

SEQ ID NO: 1787890 - RNA, 15 nt, Human
aggaagccagcaggc

SEQ ID NO: 1787891 - RNA, 13 nt, Human
aggaagacuuugg

SEQ ID NO: 1787892 - RNA, 14 nt, Human
aggaagacuuugga

SEQ ID NO: 1787893 - RNA, 23 nt, Human
aggaagcacaugccucucucagg

SEQ ID NO: 1787894 - RNA, 24 nt, Human
aggaagcacaugccucucucaggc

SEQ ID NO: 1787895 - RNA, 16 nt, Human
ugcugagucugaaggc

SEQ ID NO: 1787896 - RNA, 17 nt, Human
ugcugagucugaaggcu

SEQ ID NO: 1787897 - RNA, 18 nt, Human
ugcugagucugaaggcug

SEQ ID NO: 1787898 - RNA, 21 nt, Human
ugcugagucugaaggcugggu

SEQ ID NO: 1787899 - RNA, 22 nt, Human
ugcugagucugaaggcuggguu

SEQ ID NO: 1787900 - RNA, 23 nt, Human
ugcugagucugaaggcuggguuc

SEQ ID NO: 1787901 - RNA, 13 nt, Human
aggaagacuucau

SEQ ID NO: 1787902 - RNA, 19 nt, Human
aggaagacuucaucccucu

SEQ ID NO: 1787903 - RNA, 18 nt, Human
agcugggacuacaggcac

SEQ ID NO: 1787904 - RNA, 16 nt, Human
agcugggacuacaggc

SEQ ID NO: 1787905 - RNA, 19 nt, Human
agcugggacuacaggcacc

SEQ ID NO: 1787906 - RNA, 16 nt, Human
ugcuccagcuguucag

SEQ ID NO: 1787907 - RNA, 19 nt, Human
ugcuccagcuguucagcug

SEQ ID NO: 1787908 - RNA, 20 nt, Human
ugcuccagcuguucagcugg

SEQ ID NO: 1787909 - RNA, 14 nt, Human
ugcugacuguacuc

SEQ ID NO: 1787910 - RNA, 15 nt, Human
ugcugagucugaagg

SEQ ID NO: 1787911 - RNA, 14 nt, Human
ugcugagucugaag

SEQ ID NO: 1787912 - RNA, 22 nt, Human
ugcucugcugacagacacaggc

SEQ ID NO: 1787913 - RNA, 21 nt, Human
ugcucugcugacagacacagg

SEQ ID NO: 1787914 - RNA, 19 nt, Human
aggauuuugauccaagcug

SEQ ID NO: 1787915 - RNA, 17 nt, Human
aggaugccccguccccc

SEQ ID NO: 1787916 - RNA, 19 nt, Human
aggaugcccaaagaugcag

SEQ ID NO: 1787917 - RNA, 20 nt, Human
aggaugaucuaggaagacuu

SEQ ID NO: 1787918 - RNA, 14 nt, Human
aggaugcccaaaga

SEQ ID NO: 1787919 - RNA, 17 nt, Human
aggcaacucaucuuagg

SEQ ID NO: 1787920 - RNA, 19 nt, Human
aggcaacugcauuggcuuu

SEQ ID NO: 1787921 - RNA, 14 nt, Human
uggacccugaggcc

SEQ ID NO: 1787922 - RNA, 12 nt, Human
uggacccugagg

SEQ ID NO: 1787923 - RNA, 13 nt, Human
uggacccugaggc

SEQ ID NO: 1787924 - RNA, 21 nt, Human
uggacacagcucuucuccagg

SEQ ID NO: 1787925 - RNA, 18 nt, Human
uggacacagcucuucucc

SEQ ID NO: 1787926 - RNA, 16 nt, Human
uggacacagcucuucu

SEQ ID NO: 1787927 - RNA, 15 nt, Human
uggacacagcucuuc

SEQ ID NO: 1787928 - RNA, 16 nt, Human
aggaugaucuaggaag

SEQ ID NO: 1787929 - RNA, 17 nt, Human
aggaugaucuaggaaga

SEQ ID NO: 1787930 - RNA, 17 nt, Human
aggauccugagccagau

SEQ ID NO: 1787931 - RNA, 18 nt, Human
aggauccugagccagauu

SEQ ID NO: 1787932 - RNA, 21 nt, Human
aggaucucuugagccugggag

SEQ ID NO: 1787933 - RNA, 22 nt, Human
aggaucucuugagccugggagg

SEQ ID NO: 1787934 - RNA, 21 nt, Human
aggauacaaaagcaugugaga

SEQ ID NO: 1787935 - RNA, 15 nt, Human
aggauccugagccag

SEQ ID NO: 1787936 - RNA, 16 nt, Human
aggauccugagccaga

SEQ ID NO: 1787937 - RNA, 14 nt, Human
aggagggaggggga

SEQ ID NO: 1787938 - RNA, 21 nt, Human
aggagggagcaucagugcccu

SEQ ID NO: 1787939 - RNA, 20 nt, Human
uggaaauauuaagaaagacu

SEQ ID NO: 1787940 - RNA, 23 nt, Human
uggaaaugggcagagcagagacc

SEQ ID NO: 1787941 - RNA, 23 nt, Human
aggacuuuucuuuguggcuuccu

SEQ ID NO: 1787942 - RNA, 11 nt, Human
aggagaaacug

SEQ ID NO: 1787943 - RNA, 17 nt, Human
aggagauuggaaggaac

SEQ ID NO: 1787944 - RNA, 17 nt, Human
aggagaaacuggaacuc

SEQ ID NO: 1787945 - RNA, 22 nt, Human
aggagccccgaggccuucucug

SEQ ID NO: 1787946 - RNA, 18 nt, Human
aggagcccugggaggcuc

SEQ ID NO: 1787947 - RNA, 14 nt, Human
aggagcagccacau

SEQ ID NO: 1787948 - RNA, 18 nt, Human
aggacauugcggacagcc

SEQ ID NO: 1787949 - RNA, 17 nt, Human
aggacauugcggacagc

SEQ ID NO: 1787950 - RNA, 15 nt, Human
aggacauugcggaca

SEQ ID NO: 1787951 - RNA, 23 nt, Human
aggacauugcggacagccacggc

SEQ ID NO: 1787952 - RNA, 19 nt, Human
aggacauugcggacagcca

SEQ ID NO: 1787953 - RNA, 19 nt, Human
aggacucugccuccucuuc

SEQ ID NO: 1787954 - RNA, 18 nt, Human
ugcuuugggcugcccugg

SEQ ID NO: 1787955 - RNA, 19 nt, Human
ugcuuugggcugcccuggu

SEQ ID NO: 1787956 - RNA, 20 nt, Human
ugcuuugggcugcccuggug

SEQ ID NO: 1787957 - RNA, 21 nt, Human
ugcuuugggcugcccuggugc

SEQ ID NO: 1787958 - RNA, 19 nt, Human
ugcuugggcuucauccucc

SEQ ID NO: 1787959 - RNA, 15 nt, Human
uggaaauauuaagaa

SEQ ID NO: 1787960 - RNA, 21 nt, Human
ugcuuggaggaaggaaaccca

SEQ ID NO: 1787961 - RNA, 12 nt, Human
ugcuugggcuuc

SEQ ID NO: 1787962 - RNA, 16 nt, Human
ugcuugggcuucaucc

SEQ ID NO: 1787963 - RNA, 19 nt, Human
aggagcccugggaggcucu

SEQ ID NO: 1787964 - RNA, 22 nt, Human
agcgcuggccgggaccccgagc

SEQ ID NO: 1787965 - RNA, 16 nt, Human
agcgcuggccgggacc

SEQ ID NO: 1787966 - RNA, 18 nt, Human
ugcauuugaggucuguuc

SEQ ID NO: 1787967 - RNA, 19 nt, Human
ugcauuugaggucuguucu

SEQ ID NO: 1787968 - RNA, 20 nt, Human
ugcauuuaaaagauacaguu

SEQ ID NO: 1787969 - RNA, 18 nt, Human
agccuuccagggguggga

SEQ ID NO: 1787970 - RNA, 15 nt, Human
agccuugaacuuuga

SEQ ID NO: 1787971 - RNA, 22 nt, Human
agcgauucuucugcuucagccu

SEQ ID NO: 1787972 - RNA, 23 nt, Human
agccuugaccauucuccaccugc

SEQ ID NO: 1787973 - RNA, 22 nt, Human
agccuugaacuuugaccucugc

SEQ ID NO: 1787974 - RNA, 16 nt, Human
agccuugaacuuugac

SEQ ID NO: 1787975 - RNA, 23 nt, Human
agccuugaacuuugaccucugca

SEQ ID NO: 1787976 - RNA, 22 nt, Human
agccuugaccauucuccaccug

SEQ ID NO: 1787977 - RNA, 20 nt, Human
agcggggacagcuccuucug

SEQ ID NO: 1787978 - RNA, 19 nt, Human
agcggggacagcuccuucu

SEQ ID NO: 1787979 - RNA, 23 nt, Human
agcggcuggcagcccaccccuca

SEQ ID NO: 1787980 - RNA, 22 nt, Human
agcggggacagcuccuucuguc

SEQ ID NO: 1787981 - RNA, 13 nt, Human
agcggcuggcagc

SEQ ID NO: 1787982 - RNA, 18 nt, Human
ugccagcuuaucucaggg

SEQ ID NO: 1787983 - RNA, 20 nt, Human
ugccagucccccugccccag

SEQ ID NO: 1787984 - RNA, 18 nt, Human
ugccacugccucuuccuc

SEQ ID NO: 1787985 - RNA, 19 nt, Human
ugccacugccucuuccucc

SEQ ID NO: 1787986 - RNA, 20 nt, Human
ugccacugccucuuccuccc

SEQ ID NO: 1787987 - RNA, 13 nt, Human
ugccacugccucu

SEQ ID NO: 1787988 - RNA, 17 nt, Human
ugccacugccucuuccu

SEQ ID NO: 1787989 - RNA, 21 nt, Human
ugcauuugaggucuguucuuu

SEQ ID NO: 1787990 - RNA, 20 nt, Human
ugcauuugaggucuguucuu

SEQ ID NO: 1787991 - RNA, 14 nt, Human
ugcccccucugccc

SEQ ID NO: 1787992 - RNA, 15 nt, Human
ugcccccucugcccu

SEQ ID NO: 1787993 - RNA, 16 nt, Human
ugcccccucugcccug

SEQ ID NO: 1787994 - RNA, 17 nt, Human
ugcccccucugcccugc

SEQ ID NO: 1787995 - RNA, 18 nt, Human
ugcccccucugcccugcg

SEQ ID NO: 1787996 - RNA, 20 nt, Human
ugcccuaaaguguauuuuuu

SEQ ID NO: 1787997 - RNA, 23 nt, Human
ugccccgaacauguuuuucuucu

SEQ ID NO: 1787998 - RNA, 18 nt, Human
ugcccaggccccugccac

SEQ ID NO: 1787999 - RNA, 17 nt, Human
ugcccaggccccugcca

SEQ ID NO: 1788000 - RNA, 15 nt, Human
ugcccaggccccugc

SEQ ID NO: 1788001 - RNA, 17 nt, Human
ugcccaaagaugcagcc

SEQ ID NO: 1788002 - RNA, 20 nt, Human
ugcccaaagaugcagccggu

SEQ ID NO: 1788003 - RNA, 13 nt, Human
ugcccagccccuu

SEQ ID NO: 1788004 - RNA, 12 nt, Human
ugcccagccccu

SEQ ID NO: 1788005 - RNA, 16 nt, Human
ugcccagccccuucug

SEQ ID NO: 1788006 - RNA, 17 nt, Human
ugcccagccccuucuga

SEQ ID NO: 1788007 - RNA, 17 nt, Human
agcucaggugucccugc

SEQ ID NO: 1788008 - RNA, 15 nt, Human
agcuccaagcuccca

SEQ ID NO: 1788009 - RNA, 16 nt, Human
agcuccaagcucccag

SEQ ID NO: 1788010 - RNA, 20 nt, Human
agcucagggccuggcucagg

SEQ ID NO: 1788011 - RNA, 14 nt, Human
agcucagggccugg

SEQ ID NO: 1788012 - RNA, 19 nt, Human
agcucagggccuggcucag

SEQ ID NO: 1788013 - RNA, 19 nt, Human
agcuauucaguaauaacuc

SEQ ID NO: 1788014 - RNA, 12 nt, Human
agcucagggccu

SEQ ID NO: 1788015 - RNA, 13 nt, Human
agcucagggccug

SEQ ID NO: 1788016 - RNA, 13 nt, Human
agcgugagccacu

SEQ ID NO: 1788017 - RNA, 21 nt, Human
agcuaggccuggccagaugca

SEQ ID NO: 1788018 - RNA, 17 nt, Human
agcuaucguaaaauuaa

SEQ ID NO: 1788019 - RNA, 19 nt, Human
agcuccagcucaccagccc

SEQ ID NO: 1788020 - RNA, 18 nt, Human
agcuccagcucaccagcc

SEQ ID NO: 1788021 - RNA, 21 nt, Human
agcuccagcucaccagcccca

SEQ ID NO: 1788022 - RNA, 21 nt, Human
agcuccaucuccacuccagau

SEQ ID NO: 1788023 - RNA, 23 nt, Human
agcuccuucuguccuacucugug

SEQ ID NO: 1788024 - RNA, 22 nt, Human
agcuccuucuguccuacucugu

SEQ ID NO: 1788025 - RNA, 21 nt, Human
agcucugcagagcaggaaaca

SEQ ID NO: 1788026 - RNA, 23 nt, Human
agcucugcccauccugccccuga

SEQ ID NO: 1788027 - RNA, 23 nt, Human
ugcccuaaugcgcaggcuggccc

SEQ ID NO: 1788028 - RNA, 20 nt, Human
ugcccuaaugcgcaggcugg

SEQ ID NO: 1788029 - RNA, 17 nt, Human
agcuccagcucaccagc

SEQ ID NO: 1788030 - RNA, 13 nt, Human
agcuccagcucac

SEQ ID NO: 1788031 - RNA, 14 nt, Human
ugcccugcccaccu

SEQ ID NO: 1788032 - RNA, 17 nt, Human
agcuccaagcucccagg

SEQ ID NO: 1788033 - RNA, 18 nt, Human
agcuccaagcucccaggc

SEQ ID NO: 1788034 - RNA, 19 nt, Human
agcuccaagcucccaggca

SEQ ID NO: 1788035 - RNA, 22 nt, Human
ugccucccaucacccgcuaaga

SEQ ID NO: 1788036 - RNA, 17 nt, Human
ugccucagccuccugag

SEQ ID NO: 1788037 - RNA, 15 nt, Human
ugccucagccuccug

SEQ ID NO: 1788038 - RNA, 15 nt, Human
ugccucagccucccg

SEQ ID NO: 1788039 - RNA, 11 nt, Human
ugccucucugc

SEQ ID NO: 1788040 - RNA, 12 nt, Human
ugccucucugca

SEQ ID NO: 1788041 - RNA, 17 nt, Human
ugccucucucaggccaa

SEQ ID NO: 1788042 - RNA, 20 nt, Human
ugccgcagcccugcagaggg

SEQ ID NO: 1788043 - RNA, 15 nt, Human
ugccucaccccuugc

SEQ ID NO: 1788044 - RNA, 17 nt, Human
agcucuucuccaggcug

SEQ ID NO: 1788045 - RNA, 16 nt, Human
agcucuucuccaggcu

SEQ ID NO: 1788046 - RNA, 15 nt, Human
agcucuucuccaggc

SEQ ID NO: 1788047 - RNA, 15 nt, Human
ugcccugugggcccc

SEQ ID NO: 1788048 - RNA, 18 nt, Human
ugcccugugggcccccaa

SEQ ID NO: 1788049 - RNA, 22 nt, Human
ugcccuuaccugccaggaagcc

SEQ ID NO: 1788050 - RNA, 22 nt, Human
agcugcuuuugucuaugggacu

SEQ ID NO: 1788051 - RNA, 13 nt, Human
agcugccuguuca

SEQ ID NO: 1788052 - RNA, 24 nt, Human
agcugcuuuugucuaugggacuca

SEQ ID NO: 1788053 - RNA, 23 nt, Human
agcugcuuuugucuaugggacuc

SEQ ID NO: 1788054 - RNA, 19 nt, Human
ugccugcccaggccccugc

SEQ ID NO: 1788055 - RNA, 18 nt, Human
ugccugcccaggccccug

SEQ ID NO: 1788056 - RNA, 17 nt, Human
ugccugcccaggccccu

SEQ ID NO: 1788057 - RNA, 12 nt, Human
ugccucugccuc

SEQ ID NO: 1788058 - RNA, 11 nt, Human
ugccucugccu

SEQ ID NO: 1788059 - RNA, 21 nt, Human
ugccucucugcaggucccuaa

SEQ ID NO: 1788060 - RNA, 16 nt, Human
ugccucugacacacag

SEQ ID NO: 1788061 - RNA, 14 nt, Human
ugccucugacacac

SEQ ID NO: 1788062 - RNA, 15 nt, Human
ugccucucugcaggu

SEQ ID NO: 1788063 - RNA, 23 nt, Human
ugccucucugcaggucccuaaua

SEQ ID NO: 1788064 - RNA, 21 nt, Human
ugcaaaccaucauugaaaucu

SEQ ID NO: 1788065 - RNA, 22 nt, Human
agccccauucugccugcccagg

SEQ ID NO: 1788066 - RNA, 21 nt, Human
agccccauucugccugcccag

SEQ ID NO: 1788067 - RNA, 18 nt, Human
agccccaaaacucuccuc

SEQ ID NO: 1788068 - RNA, 16 nt, Human
agccccaaaacucucc

SEQ ID NO: 1788069 - RNA, 17 nt, Human
agccccaaaacucuccu

SEQ ID NO: 1788070 - RNA, 23 nt, Human
agccccauucugccugcccaggc

SEQ ID NO: 1788071 - RNA, 16 nt, Human
agcccugguggcagug

SEQ ID NO: 1788072 - RNA, 15 nt, Human
agcccugguggcagu

SEQ ID NO: 1788073 - RNA, 14 nt, Human
agcccugguggcag

SEQ ID NO: 1788074 - RNA, 18 nt, Human
ugcacacaccagagccca

SEQ ID NO: 1788075 - RNA, 17 nt, Human
ugcacacaccagagccc

SEQ ID NO: 1788076 - RNA, 21 nt, Human
ugcacacaccagagcccaccu

SEQ ID NO: 1788077 - RNA, 22 nt, Human
ugcacacaccagagcccaccuu

SEQ ID NO: 1788078 - RNA, 19 nt, Human
agcccugcuuugggcugcc

SEQ ID NO: 1788079 - RNA, 20 nt, Human
agcccugcuuugggcugccc

SEQ ID NO: 1788080 - RNA, 17 nt, Human
agcccugcuuugggcug

SEQ ID NO: 1788081 - RNA, 22 nt, Human
ugcagacaggcaagcaccuccu

SEQ ID NO: 1788082 - RNA, 15 nt, Human
ugcagaagacaguau

SEQ ID NO: 1788083 - RNA, 14 nt, Human
ugcagaagacagua

SEQ ID NO: 1788084 - RNA, 19 nt, Human
ugcacuccccugcugggug

SEQ ID NO: 1788085 - RNA, 16 nt, Human
ugcacuccccugcugg

SEQ ID NO: 1788086 - RNA, 17 nt, Human
ugcacuccccugcuggg

SEQ ID NO: 1788087 - RNA, 15 nt, Human
ugcacacauuuuuua

SEQ ID NO: 1788088 - RNA, 13 nt, Human
ugcacacauuuuu

SEQ ID NO: 1788089 - RNA, 12 nt, Human
ugcacacauuuu

SEQ ID NO: 1788090 - RNA, 11 nt, Human
ugcacacauuu

SEQ ID NO: 1788091 - RNA, 17 nt, Human
agccgagaucacgccac

SEQ ID NO: 1788092 - RNA, 21 nt, Human
agccgagauagccaaggccaa

SEQ ID NO: 1788093 - RNA, 20 nt, Human
agccgagauagccaaggcca

SEQ ID NO: 1788094 - RNA, 21 nt, Human
agcccuuagcagggaaacagc

SEQ ID NO: 1788095 - RNA, 16 nt, Human
agcccuuagcagggaa

SEQ ID NO: 1788096 - RNA, 17 nt, Human
ugcagacucuacagagg

SEQ ID NO: 1788097 - RNA, 16 nt, Human
ugcagacucuacagag

SEQ ID NO: 1788098 - RNA, 18 nt, Human
ugcagacucuacagaggc

SEQ ID NO: 1788099 - RNA, 23 nt, Human
agccucugaaaaccaauguucuc

SEQ ID NO: 1788100 - RNA, 17 nt, Human
agccuccaugcugccuc

SEQ ID NO: 1788101 - RNA, 14 nt, Human
agccuccaauuuuu

SEQ ID NO: 1788102 - RNA, 21 nt, Human
agccuccaagcuccaucucca

SEQ ID NO: 1788103 - RNA, 23 nt, Human
ugcagccucaaccuccugggcua

SEQ ID NO: 1788104 - RNA, 22 nt, Human
ugcagccucaaccuccugggcu

SEQ ID NO: 1788105 - RNA, 21 nt, Human
ugcagccucaaccuccugggc

SEQ ID NO: 1788106 - RNA, 20 nt, Human
ugcagccucaaccuccuggg

SEQ ID NO: 1788107 - RNA, 18 nt, Human
agccgagaucacgccacu

SEQ ID NO: 1788108 - RNA, 19 nt, Human
agccucaaccuccugggcu

SEQ ID NO: 1788109 - RNA, 20 nt, Human
agccucaaccuccugggcua

SEQ ID NO: 1788110 - RNA, 17 nt, Human
agccucacaguccuuac

SEQ ID NO: 1788111 - RNA, 18 nt, Human
agccucacaguccuuacc

SEQ ID NO: 1788112 - RNA, 22 nt, Human
agccucagucucccucccuugg

SEQ ID NO: 1788113 - RNA, 13 nt, Human
agccucagucucc

SEQ ID NO: 1788114 - RNA, 16 nt, Human
agccucagucucccuc

SEQ ID NO: 1788115 - RNA, 19 nt, Human
agccucagucucccucccu

SEQ ID NO: 1788116 - RNA, 20 nt, Human
agccucagucucccucccuu

SEQ ID NO: 1788117 - RNA, 23 nt, Human
agcccagcuugaaaccuucacuu

SEQ ID NO: 1788118 - RNA, 14 nt, Human
agcccaggaaaggc

SEQ ID NO: 1788119 - RNA, 21 nt, Human
ugauucauaaugacuuaagca

SEQ ID NO: 1788120 - RNA, 18 nt, Human
agcccaggaaaggcucca

SEQ ID NO: 1788121 - RNA, 16 nt, Human
ugauucauaaugacuu

SEQ ID NO: 1788122 - RNA, 13 nt, Human
ugauucuccugcc

SEQ ID NO: 1788123 - RNA, 16 nt, Human
ugauucucaugccuca

SEQ ID NO: 1788124 - RNA, 13 nt, Human
ugauucucaugcc

SEQ ID NO: 1788125 - RNA, 14 nt, Human
ugauucucaugccu

SEQ ID NO: 1788126 - RNA, 15 nt, Human
ugauucucaugccuc

SEQ ID NO: 1788127 - RNA, 23 nt, Human
ugauucccaagcucugcuccucu

SEQ ID NO: 1788128 - RNA, 22 nt, Human
ugauucccaagcucugcuccuc

SEQ ID NO: 1788129 - RNA, 17 nt, Human
ugauuuggggauauuuu

SEQ ID NO: 1788130 - RNA, 21 nt, Human
ugauuucagcaccuacagugu

SEQ ID NO: 1788131 - RNA, 17 nt, Human
ugauuucagcucacugc

SEQ ID NO: 1788132 - RNA, 22 nt, Human
ugauuuccguuaaaauaccagc

SEQ ID NO: 1788133 - RNA, 21 nt, Human
agccaguaaaugggggugcau

SEQ ID NO: 1788134 - RNA, 22 nt, Human
agccaguaaaugggggugcauu

SEQ ID NO: 1788135 - RNA, 18 nt, Human
agccagguuccacagagg

SEQ ID NO: 1788136 - RNA, 13 nt, Human
agccaguaaaugg

SEQ ID NO: 1788137 - RNA, 15 nt, Human
agcccacuucugcca

SEQ ID NO: 1788138 - RNA, 14 nt, Human
agcccacuucugcc

SEQ ID NO: 1788139 - RNA, 13 nt, Human
agcccacuucugc

SEQ ID NO: 1788140 - RNA, 14 nt, Human
agcccacuguacuu

SEQ ID NO: 1788141 - RNA, 16 nt, Human
agcccacuguacuugc

SEQ ID NO: 1788142 - RNA, 21 nt, Human
ugauccucccaccucagccuc

SEQ ID NO: 1788143 - RNA, 16 nt, Human
ugauccucccaccuca

SEQ ID NO: 1788144 - RNA, 22 nt, Human
ugauccucccaccucagccucc

SEQ ID NO: 1788145 - RNA, 15 nt, Human
ugauccucccaccuc

SEQ ID NO: 1788146 - RNA, 22 nt, Human
ugauccuaaugaaugcauaaaa

SEQ ID NO: 1788147 - RNA, 16 nt, Human
ugauccuaguuccacc

SEQ ID NO: 1788148 - RNA, 13 nt, Human
ugaugagaggaaa

SEQ ID NO: 1788149 - RNA, 14 nt, Human
ugaugagaggaaau

SEQ ID NO: 1788150 - RNA, 15 nt, Human
ugaugagaggaaauc

SEQ ID NO: 1788151 - RNA, 16 nt, Human
ugaugagaggaaauca

SEQ ID NO: 1788152 - RNA, 23 nt, Human
ugaugcuucuucagagacuccug

SEQ ID NO: 1788153 - RNA, 14 nt, Human
ugauggggcccugc

SEQ ID NO: 1788154 - RNA, 15 nt, Human
ugauggggcccugcc

SEQ ID NO: 1788155 - RNA, 16 nt, Human
ugauggggcccugccu

SEQ ID NO: 1788156 - RNA, 19 nt, Human
ugauggggcccugccuccu

SEQ ID NO: 1788157 - RNA, 14 nt, Human
ugaugggauuuggu

SEQ ID NO: 1788158 - RNA, 16 nt, Human
agccacugcaccgggc

SEQ ID NO: 1788159 - RNA, 17 nt, Human
ugauuaauggaaauguu

SEQ ID NO: 1788160 - RNA, 15 nt, Human
agccacgguguucug

SEQ ID NO: 1788161 - RNA, 20 nt, Human
ugauuaaccacuucagcuga

SEQ ID NO: 1788162 - RNA, 19 nt, Human
ugauuaaauucuugcaaag

SEQ ID NO: 1788163 - RNA, 15 nt, Human
ugauggugcaaugac

SEQ ID NO: 1788164 - RNA, 15 nt, Human
ugauggugaugaaau

SEQ ID NO: 1788165 - RNA, 16 nt, Human
ugauggugaugaaaug

SEQ ID NO: 1788166 - RNA, 13 nt, Human
ugauggugcaaug

SEQ ID NO: 1788167 - RNA, 17 nt, Human
ugauggugaugaaaugu

SEQ ID NO: 1788168 - RNA, 20 nt, Human
ugauuaaauucuugcaaagu

SEQ ID NO: 1788169 - RNA, 19 nt, Human
ugauuaaccacuucagcug

SEQ ID NO: 1788170 - RNA, 10 nt, Human
agccagagga

SEQ ID NO: 1788171 - RNA, 11 nt, Human
agccagaggag

SEQ ID NO: 1788172 - RNA, 19 nt, Human
agccacugcaccgggccac

SEQ ID NO: 1788173 - RNA, 18 nt, Human
agccacugcaccgggcca

SEQ ID NO: 1788174 - RNA, 20 nt, Human
agccacugcaccgggccaca

SEQ ID NO: 1788175 - RNA, 14 nt, Human
agccagcaucggaa

SEQ ID NO: 1788176 - RNA, 22 nt, Human
aguugcauagguuuaauaauuu

SEQ ID NO: 1788177 - RNA, 20 nt, Human
aguugccagucaccccggcc

SEQ ID NO: 1788178 - RNA, 17 nt, Human
uuaaaacaacacucaca

SEQ ID NO: 1788179 - RNA, 20 nt, Human
uuaaaaaugguuuaaauggu

SEQ ID NO: 1788180 - RNA, 18 nt, Human
uuaaaaaguggaaaaaua

SEQ ID NO: 1788181 - RNA, 22 nt, Human
uuaaauaaugugaaacuggauu

SEQ ID NO: 1788182 - RNA, 19 nt, Human
uuaaauaaugugaaacugg

SEQ ID NO: 1788183 - RNA, 21 nt, Human
uuaaauaaugugaaacuggau

SEQ ID NO: 1788184 - RNA, 20 nt, Human
uuaaauaaugugaaacugga

SEQ ID NO: 1788185 - RNA, 13 nt, Human
uuaaauaaaucau

SEQ ID NO: 1788186 - RNA, 15 nt, Human
uuaaauaaaucauaa

SEQ ID NO: 1788187 - RNA, 12 nt, Human
uuaaaauauaau

SEQ ID NO: 1788188 - RNA, 16 nt, Human
uuaaaauauuccugca

SEQ ID NO: 1788189 - RNA, 19 nt, Human
uuaaaauauuccugcauuu

SEQ ID NO: 1788190 - RNA, 17 nt, Human
uuaaaccgccaaggcug

SEQ ID NO: 1788191 - RNA, 22 nt, Human
aguuuucacucuuauugcccac

SEQ ID NO: 1788192 - RNA, 15 nt, Human
aguuucguuuucaaa

SEQ ID NO: 1788193 - RNA, 16 nt, Human
aguuucguuuucaaaa

SEQ ID NO: 1788194 - RNA, 16 nt, Human
aguuucucagcuccca

SEQ ID NO: 1788195 - RNA, 21 nt, Human
aguuucuccaagcaggacaug

SEQ ID NO: 1788196 - RNA, 13 nt, Human
aguuucuccaagc

SEQ ID NO: 1788197 - RNA, 15 nt, Human
aguuucuccaagcag

SEQ ID NO: 1788198 - RNA, 16 nt, Human
uuaaauucuugcaaag

SEQ ID NO: 1788199 - RNA, 13 nt, Human
uuaaauucuugca

SEQ ID NO: 1788200 - RNA, 14 nt, Human
uguugucagcugaa

SEQ ID NO: 1788201 - RNA, 16 nt, Human
uguuugccucugccuc

SEQ ID NO: 1788202 - RNA, 14 nt, Human
uguuugccucugcc

SEQ ID NO: 1788203 - RNA, 15 nt, Human
uguuugcaucugaaa

SEQ ID NO: 1788204 - RNA, 15 nt, Human
uguuuggggaugaga

SEQ ID NO: 1788205 - RNA, 19 nt, Human
uguuuggggaugagaaagg

SEQ ID NO: 1788206 - RNA, 15 nt, Human
uguuuucaguguaca

SEQ ID NO: 1788207 - RNA, 17 nt, Human
uguuuucaguguacaug

SEQ ID NO: 1788208 - RNA, 15 nt, Human
uguuuucucuugaga

SEQ ID NO: 1788209 - RNA, 16 nt, Human
aguucucuccuucuuc

SEQ ID NO: 1788210 - RNA, 13 nt, Human
aguucucuccuuc

SEQ ID NO: 1788211 - RNA, 12 nt, Human
aguucucuccuu

SEQ ID NO: 1788212 - RNA, 22 nt, Human
aguugauagcacagacccugcc

SEQ ID NO: 1788213 - RNA, 23 nt, Human
aguugauagcacagacccugccc

SEQ ID NO: 1788214 - RNA, 13 nt, Human
aguugauucagcu

SEQ ID NO: 1788215 - RNA, 19 nt, Human
aguugcaacuuuguauaaa

SEQ ID NO: 1788216 - RNA, 23 nt, Human
aguugauucagcucugcaagaau

SEQ ID NO: 1788217 - RNA, 14 nt, Human
aguugauucagcuc

SEQ ID NO: 1788218 - RNA, 15 nt, Human
aguugauucagcucu

SEQ ID NO: 1788219 - RNA, 17 nt, Human
aguugauucagcucugc

SEQ ID NO: 1788220 - RNA, 18 nt, Human
aguugauucagcucugca

SEQ ID NO: 1788221 - RNA, 15 nt, Human
aguugauagcacaga

SEQ ID NO: 1788222 - RNA, 19 nt, Human
aguugauagcacagacccu

SEQ ID NO: 1788223 - RNA, 20 nt, Human
aguugauagcacagacccug

SEQ ID NO: 1788224 - RNA, 21 nt, Human
aguugauagcacagacccugc

SEQ ID NO: 1788225 - RNA, 16 nt, Human
uguucccauucuugca

SEQ ID NO: 1788226 - RNA, 17 nt, Human
aguguacagucuuguau

SEQ ID NO: 1788227 - RNA, 23 nt, Human
aguguacauggaauaacauguaa

SEQ ID NO: 1788228 - RNA, 13 nt, Human
uguucugggacac

SEQ ID NO: 1788229 - RNA, 15 nt, Human
uguucugggacacag

SEQ ID NO: 1788230 - RNA, 14 nt, Human
uguucugggacaca

SEQ ID NO: 1788231 - RNA, 16 nt, Human
uguucuuaauucuuag

SEQ ID NO: 1788232 - RNA, 14 nt, Human
uguucuuaauucuu

SEQ ID NO: 1788233 - RNA, 16 nt, Human
uguucuuaagacguga

SEQ ID NO: 1788234 - RNA, 18 nt, Human
uguucuugguuuguaaau

SEQ ID NO: 1788235 - RNA, 17 nt, Human
uguucuugguuuguaaa

SEQ ID NO: 1788236 - RNA, 14 nt, Human
uguucuuuccaaag

SEQ ID NO: 1788237 - RNA, 13 nt, Human
uguucuuuccaaa

SEQ ID NO: 1788238 - RNA, 19 nt, Human
uguucuugguuuguaaauu

SEQ ID NO: 1788239 - RNA, 16 nt, Human
aguggugcgaucuggg

SEQ ID NO: 1788240 - RNA, 21 nt, Human
agugguuccuaauccucuagg

SEQ ID NO: 1788241 - RNA, 19 nt, Human
agugggugaauaauacagu

SEQ ID NO: 1788242 - RNA, 16 nt, Human
aguguacagucuugua

SEQ ID NO: 1788243 - RNA, 15 nt, Human
aguguacagucuugu

SEQ ID NO: 1788244 - RNA, 13 nt, Human
aguguacagucuu

SEQ ID NO: 1788245 - RNA, 21 nt, Human
aguguacauggaauaacaugu

SEQ ID NO: 1788246 - RNA, 22 nt, Human
aguguacauggaauaacaugua

SEQ ID NO: 1788247 - RNA, 13 nt, Human
aguggcagcugcu

SEQ ID NO: 1788248 - RNA, 12 nt, Human
aguggcagcugc

SEQ ID NO: 1788249 - RNA, 20 nt, Human
aguggcagcugcuuuugucu

SEQ ID NO: 1788250 - RNA, 14 nt, Human
aguggcagcugcuu

SEQ ID NO: 1788251 - RNA, 18 nt, Human
agugggggaucacagccu

SEQ ID NO: 1788252 - RNA, 13 nt, Human
agugggugaauaa

SEQ ID NO: 1788253 - RNA, 18 nt, Human
agugggugaauaauacag

SEQ ID NO: 1788254 - RNA, 19 nt, Human
agugggggaguggccacag

SEQ ID NO: 1788255 - RNA, 20 nt, Human
agugggggaguggccacaga

SEQ ID NO: 1788256 - RNA, 20 nt, Human
aguuauuauauuuacaaaug

SEQ ID NO: 1788257 - RNA, 16 nt, Human
aguuaccagugccuua

SEQ ID NO: 1788258 - RNA, 15 nt, Human
aguuaccagugccuu

SEQ ID NO: 1788259 - RNA, 20 nt, Human
uguucuuuccaaaguacacu

SEQ ID NO: 1788260 - RNA, 18 nt, Human
uguucuuuccaaaguaca

SEQ ID NO: 1788261 - RNA, 19 nt, Human
aguuaguuccacugagacc

SEQ ID NO: 1788262 - RNA, 17 nt, Human
aguuaguuccacugaga

SEQ ID NO: 1788263 - RNA, 15 nt, Human
aguuaguuccacuga

SEQ ID NO: 1788264 - RNA, 21 nt, Human
aguuauuuuuauuuauuuaaa

SEQ ID NO: 1788265 - RNA, 17 nt, Human
aguucccuacuuccugu

SEQ ID NO: 1788266 - RNA, 13 nt, Human
uguugggccagga

SEQ ID NO: 1788267 - RNA, 16 nt, Human
uguugggccaggagcc

SEQ ID NO: 1788268 - RNA, 20 nt, Human
uguugucaagaauagcauug

SEQ ID NO: 1788269 - RNA, 16 nt, Human
uguugucaagaauagc

SEQ ID NO: 1788270 - RNA, 11 nt, Human
uguugucaaga

SEQ ID NO: 1788271 - RNA, 13 nt, Human
uguugucagcuga

SEQ ID NO: 1788272 - RNA, 14 nt, Human
uguuguauucauug

SEQ ID NO: 1788273 - RNA, 17 nt, Human
uuaucaugugaaaucau

SEQ ID NO: 1788274 - RNA, 18 nt, Human
uuaucaugugaaaucauu

SEQ ID NO: 1788275 - RNA, 20 nt, Human
uuaucaugugaaaucauuca

SEQ ID NO: 1788276 - RNA, 22 nt, Human
uuaucaugugaaaucauucauu

SEQ ID NO: 1788277 - RNA, 19 nt, Human
auaccagccaguaaauggg

SEQ ID NO: 1788278 - RNA, 21 nt, Human
auacuaaccagcagaaaugcc

SEQ ID NO: 1788279 - RNA, 20 nt, Human
auacuacaguuuguuaguau

SEQ ID NO: 1788280 - RNA, 16 nt, Human
auacuacaguuuguua

SEQ ID NO: 1788281 - RNA, 15 nt, Human
auacuacaguuuguu

SEQ ID NO: 1788282 - RNA, 13 nt, Human
auacuacaguuug

SEQ ID NO: 1788283 - RNA, 21 nt, Human
auacaguucggugagcuacaa

SEQ ID NO: 1788284 - RNA, 22 nt, Human
auacaggaaaagcugcugacag

SEQ ID NO: 1788285 - RNA, 20 nt, Human
auacaggaaaagcugcugac

SEQ ID NO: 1788286 - RNA, 19 nt, Human
auacaggaaaagcugcuga

SEQ ID NO: 1788287 - RNA, 14 nt, Human
auacaggaaaagcu

SEQ ID NO: 1788288 - RNA, 20 nt, Human
auacauaaacaagaccacgu

SEQ ID NO: 1788289 - RNA, 21 nt, Human
auacauuuaaaacauuaaaau

SEQ ID NO: 1788290 - RNA, 16 nt, Human
auacauuuaaaacauu

SEQ ID NO: 1788291 - RNA, 16 nt, Human
auacauuugauaaagu

SEQ ID NO: 1788292 - RNA, 16 nt, Human
uuagcaguuugcuuug

SEQ ID NO: 1788293 - RNA, 14 nt, Human
uuagccccauaauu

SEQ ID NO: 1788294 - RNA, 18 nt, Human
uuauacccccugcaaagc

SEQ ID NO: 1788295 - RNA, 15 nt, Human
auacaaaagcaugug

SEQ ID NO: 1788296 - RNA, 13 nt, Human
auacaaaagcaug

SEQ ID NO: 1788297 - RNA, 12 nt, Human
auacaaaagcau

SEQ ID NO: 1788298 - RNA, 22 nt, Human
auacaaaaaaaaaaaaaaauua

SEQ ID NO: 1788299 - RNA, 23 nt, Human
auaauuuuguaauguaucaaaua

SEQ ID NO: 1788300 - RNA, 13 nt, Human
auaauuuuguaau

SEQ ID NO: 1788301 - RNA, 12 nt, Human
auaauuuuguaa

SEQ ID NO: 1788302 - RNA, 16 nt, Human
auaaacuuuaccuuuu

SEQ ID NO: 1788303 - RNA, 15 nt, Human
auaaacuuuaccuuu

SEQ ID NO: 1788304 - RNA, 13 nt, Human
auaaacuuuaccu

SEQ ID NO: 1788305 - RNA, 23 nt, Human
auaaacacucuugaaaaaugcau

SEQ ID NO: 1788306 - RNA, 20 nt, Human
auaaccaaagcccaaagugg

SEQ ID NO: 1788307 - RNA, 20 nt, Human
auaaccaguguuguggauuu

SEQ ID NO: 1788308 - RNA, 19 nt, Human
auaacaugugaaaagaaua

SEQ ID NO: 1788309 - RNA, 12 nt, Human
auaaauaacuuu

SEQ ID NO: 1788310 - RNA, 13 nt, Human
auaaauaaaguuu

SEQ ID NO: 1788311 - RNA, 19 nt, Human
auaaauaaaguuuguugaa

SEQ ID NO: 1788312 - RNA, 23 nt, Human
uuaccauuuugggguacccacug

SEQ ID NO: 1788313 - RNA, 18 nt, Human
uuacaggaaguacuggag

SEQ ID NO: 1788314 - RNA, 22 nt, Human
uuacaggaaguacuggagaaaa

SEQ ID NO: 1788315 - RNA, 15 nt, Human
uuacaggaaguacug

SEQ ID NO: 1788316 - RNA, 16 nt, Human
uuacaggaaguacugg

SEQ ID NO: 1788317 - RNA, 14 nt, Human
auaaugaauacuuu

SEQ ID NO: 1788318 - RNA, 14 nt, Human
auaauucuacuuug

SEQ ID NO: 1788319 - RNA, 19 nt, Human
auaauacaguaucucaggg

SEQ ID NO: 1788320 - RNA, 16 nt, Human
uuagauguaauuuugu

SEQ ID NO: 1788321 - RNA, 22 nt, Human
auaaguuaacuuccaauuuaca

SEQ ID NO: 1788322 - RNA, 21 nt, Human
auaauacaccacuacauucug

SEQ ID NO: 1788323 - RNA, 23 nt, Human
auaauacaccacuacauucuguu

SEQ ID NO: 1788324 - RNA, 22 nt, Human
auaagaaccuuuugagugccuu

SEQ ID NO: 1788325 - RNA, 23 nt, Human
auaagaaccuuuugagugccuua

SEQ ID NO: 1788326 - RNA, 17 nt, Human
auaaguuaacuuccaau

SEQ ID NO: 1788327 - RNA, 23 nt, Human
uggguggaugccugguggcagcu

SEQ ID NO: 1788328 - RNA, 14 nt, Human
uggguggaugccug

SEQ ID NO: 1788329 - RNA, 22 nt, Human
ugggucuuguuuuuuuuuucca

SEQ ID NO: 1788330 - RNA, 15 nt, Human
ugguccauagagagc

SEQ ID NO: 1788331 - RNA, 16 nt, Human
ugguccauagagagca

SEQ ID NO: 1788332 - RNA, 22 nt, Human
ugguaauuuaagauuccagaga

SEQ ID NO: 1788333 - RNA, 23 nt, Human
uggucaccaaaucagcugcuacu

SEQ ID NO: 1788334 - RNA, 21 nt, Human
uggucaccaaaucagcugcua

SEQ ID NO: 1788335 - RNA, 16 nt, Human
aggguaucaggugcug

SEQ ID NO: 1788336 - RNA, 12 nt, Human
aggguagggugg

SEQ ID NO: 1788337 - RNA, 18 nt, Human
aggguaucaggugcugcc

SEQ ID NO: 1788338 - RNA, 19 nt, Human
aggguacuaaggaaucuuu

SEQ ID NO: 1788339 - RNA, 12 nt, Human
aggguaaguauu

SEQ ID NO: 1788340 - RNA, 16 nt, Human
aggggauagagagaga

SEQ ID NO: 1788341 - RNA, 15 nt, Human
agggggaaggcaggg

SEQ ID NO: 1788342 - RNA, 13 nt, Human
agggggcugggac

SEQ ID NO: 1788343 - RNA, 15 nt, Human
aggucagugcaaaua

SEQ ID NO: 1788344 - RNA, 21 nt, Human
aggucaaggcugcagugagcc

SEQ ID NO: 1788345 - RNA, 23 nt, Human
aggucauuuuuuuuaagaaaaag

SEQ ID NO: 1788346 - RNA, 22 nt, Human
aggucauuuuuuuuaagaaaaa

SEQ ID NO: 1788347 - RNA, 21 nt, Human
aggucuugaacuccuggccuc

SEQ ID NO: 1788348 - RNA, 20 nt, Human
aggucuugaacuccuggccu

SEQ ID NO: 1788349 - RNA, 17 nt, Human
agguccacaacacacag

SEQ ID NO: 1788350 - RNA, 22 nt, Human
aggucuugaacuccuggccuca

SEQ ID NO: 1788351 - RNA, 22 nt, Human
aggugaaacuccagaugccaca

SEQ ID NO: 1788352 - RNA, 21 nt, Human
aggugaaacuccagaugccac

SEQ ID NO: 1788353 - RNA, 20 nt, Human
aggugaaacuccagaugcca

SEQ ID NO: 1788354 - RNA, 19 nt, Human
aggugaaacuccagaugcc

SEQ ID NO: 1788355 - RNA, 17 nt, Human
agguaugcaaucaaauc

SEQ ID NO: 1788356 - RNA, 20 nt, Human
aggguuuauguuuaggaugu

SEQ ID NO: 1788357 - RNA, 17 nt, Human
aggguugggcugguguc

SEQ ID NO: 1788358 - RNA, 14 nt, Human
uggucuuuugguua

SEQ ID NO: 1788359 - RNA, 20 nt, Human
uggugaacauugcaauagaa

SEQ ID NO: 1788360 - RNA, 15 nt, Human
uggugaacauugcaa

SEQ ID NO: 1788361 - RNA, 19 nt, Human
uggugaacagaacaaaagg

SEQ ID NO: 1788362 - RNA, 21 nt, Human
aggguggugaccucugccuga

SEQ ID NO: 1788363 - RNA, 19 nt, Human
aggguggugaccucugccu

SEQ ID NO: 1788364 - RNA, 18 nt, Human
aggguggugaccucugcc

SEQ ID NO: 1788365 - RNA, 17 nt, Human
aggguggugaccucugc

SEQ ID NO: 1788366 - RNA, 15 nt, Human
aggguugggcuggug

SEQ ID NO: 1788367 - RNA, 17 nt, Human
aggguuggccccugccc

SEQ ID NO: 1788368 - RNA, 14 nt, Human
aggguuggccccug

SEQ ID NO: 1788369 - RNA, 13 nt, Human
aggguuggccccu

SEQ ID NO: 1788370 - RNA, 22 nt, Human
ugguccaugggccauaugaaaa

SEQ ID NO: 1788371 - RNA, 19 nt, Human
ugguccauagagagcaaga

SEQ ID NO: 1788372 - RNA, 20 nt, Human
uggucucgaacuccugaccu

SEQ ID NO: 1788373 - RNA, 21 nt, Human
uggucucgaacuccugaccuu

SEQ ID NO: 1788374 - RNA, 15 nt, Human
uggucucgaacuccu

SEQ ID NO: 1788375 - RNA, 19 nt, Human
uggucucgaacuccugacc

SEQ ID NO: 1788376 - RNA, 13 nt, Human
uggucccacccca

SEQ ID NO: 1788377 - RNA, 12 nt, Human
uggucuguguga

SEQ ID NO: 1788378 - RNA, 22 nt, Human
uggucugugagaugcuagaacu

SEQ ID NO: 1788379 - RNA, 16 nt, Human
uggucuuauuuguaaa

SEQ ID NO: 1788380 - RNA, 18 nt, Human
uggucugacccacugcuu

SEQ ID NO: 1788381 - RNA, 16 nt, Human
uguaaaggaauuuaaa

SEQ ID NO: 1788382 - RNA, 15 nt, Human
ugguuuucuguucuu

SEQ ID NO: 1788383 - RNA, 13 nt, Human
ugguuuucuguuc

SEQ ID NO: 1788384 - RNA, 23 nt, Human
aggugauccacccaccucagccu

SEQ ID NO: 1788385 - RNA, 21 nt, Human
aggugauccacccaccucagc

SEQ ID NO: 1788386 - RNA, 18 nt, Human
ugguuuuaguugcaacuu

SEQ ID NO: 1788387 - RNA, 12 nt, Human
ugguuuucuguu

SEQ ID NO: 1788388 - RNA, 21 nt, Human
ugguuuguaaauuaacuuuua

SEQ ID NO: 1788389 - RNA, 15 nt, Human
ugguuucagaaaugu

SEQ ID NO: 1788390 - RNA, 14 nt, Human
ugguuucagaaaug

SEQ ID NO: 1788391 - RNA, 15 nt, Human
ugguguuuccuggca

SEQ ID NO: 1788392 - RNA, 17 nt, Human
ugguguuuccuggcacu

SEQ ID NO: 1788393 - RNA, 23 nt, Human
ugguucaggguuggccccugccc

SEQ ID NO: 1788394 - RNA, 22 nt, Human
ugguucaggguuggccccugcc

SEQ ID NO: 1788395 - RNA, 20 nt, Human
ugguucaggguuggccccug

SEQ ID NO: 1788396 - RNA, 12 nt, Human
ugguggcagcug

SEQ ID NO: 1788397 - RNA, 15 nt, Human
ugguguguguaugcg

SEQ ID NO: 1788398 - RNA, 21 nt, Human
aggugaacauugguucuuuca

SEQ ID NO: 1788399 - RNA, 14 nt, Human
aggugaacauuggu

SEQ ID NO: 1788400 - RNA, 15 nt, Human
ugguggcagagugga

SEQ ID NO: 1788401 - RNA, 12 nt, Human
ugguggcagcuc

SEQ ID NO: 1788402 - RNA, 16 nt, Human
ugguggcagcucaccu

SEQ ID NO: 1788403 - RNA, 19 nt, Human
ugguggcagcucaccucuc

SEQ ID NO: 1788404 - RNA, 20 nt, Human
ugguggcagcucaccucucc

SEQ ID NO: 1788405 - RNA, 23 nt, Human
ugguggcagcucaccucucccuu

SEQ ID NO: 1788406 - RNA, 19 nt, Human
uguacuugcucuugaugcc

SEQ ID NO: 1788407 - RNA, 15 nt, Human
uguacuugcucuuga

SEQ ID NO: 1788408 - RNA, 20 nt, Human
uguacaugaaaacacauuuu

SEQ ID NO: 1788409 - RNA, 19 nt, Human
uguacaugaaaacacauuu

SEQ ID NO: 1788410 - RNA, 18 nt, Human
uguacaugaaaacacauu

SEQ ID NO: 1788411 - RNA, 17 nt, Human
uguacaugaaaacacau

SEQ ID NO: 1788412 - RNA, 15 nt, Human
uguaaggcaaucaug

SEQ ID NO: 1788413 - RNA, 16 nt, Human
uguaauuugugauaca

SEQ ID NO: 1788414 - RNA, 18 nt, Human
uguaaggaaugauuaauu

SEQ ID NO: 1788415 - RNA, 21 nt, Human
uguaauuugugauacaaugcu

SEQ ID NO: 1788416 - RNA, 17 nt, Human
uguaauuugugauacaa

SEQ ID NO: 1788417 - RNA, 19 nt, Human
uguacaaaguagaagucuu

SEQ ID NO: 1788418 - RNA, 23 nt, Human
uguacaaaguagaagucuuagau

SEQ ID NO: 1788419 - RNA, 20 nt, Human
aggugugagucaccaagccc

SEQ ID NO: 1788420 - RNA, 14 nt, Human
aggugugagucacc

SEQ ID NO: 1788421 - RNA, 20 nt, Human
aggugugagccaccacgccc

SEQ ID NO: 1788422 - RNA, 20 nt, Human
aggugugacugaauuucuuu

SEQ ID NO: 1788423 - RNA, 22 nt, Human
aggugugaaccaccacacccag

SEQ ID NO: 1788424 - RNA, 23 nt, Human
aggugugaaccaccacacccagc

SEQ ID NO: 1788425 - RNA, 18 nt, Human
aggugugacugaauuucu

SEQ ID NO: 1788426 - RNA, 13 nt, Human
agguggggcagcu

SEQ ID NO: 1788427 - RNA, 22 nt, Human
aggugauccacucgccuucauc

SEQ ID NO: 1788428 - RNA, 14 nt, Human
agguggggcagcuu

SEQ ID NO: 1788429 - RNA, 23 nt, Human
agguggggucacucuggcagcuc

SEQ ID NO: 1788430 - RNA, 16 nt, Human
agguggggcagcuuga

SEQ ID NO: 1788431 - RNA, 16 nt, Human
agguugucugaaguca

SEQ ID NO: 1788432 - RNA, 20 nt, Human
agguugucugaagucacugc

SEQ ID NO: 1788433 - RNA, 13 nt, Human
uguaaggaaugau

SEQ ID NO: 1788434 - RNA, 14 nt, Human
uguaaggaaugauu

SEQ ID NO: 1788435 - RNA, 15 nt, Human
uguaaggaaugauua

SEQ ID NO: 1788436 - RNA, 17 nt, Human
uguaagaaauacagacu

SEQ ID NO: 1788437 - RNA, 15 nt, Human
uguaagaaauacaga

SEQ ID NO: 1788438 - RNA, 22 nt, Human
uguaagcucuacugaggugcua

SEQ ID NO: 1788439 - RNA, 17 nt, Human
agugaaagaaaauaaca

SEQ ID NO: 1788440 - RNA, 14 nt, Human
agugagacagcucu

SEQ ID NO: 1788441 - RNA, 16 nt, Human
agugaaaacuuuguag

SEQ ID NO: 1788442 - RNA, 15 nt, Human
agugaaaacuuugua

SEQ ID NO: 1788443 - RNA, 14 nt, Human
agugaaaauauagc

SEQ ID NO: 1788444 - RNA, 13 nt, Human
agugagacucugu

SEQ ID NO: 1788445 - RNA, 21 nt, Human
agugagacccugucucaaaaa

SEQ ID NO: 1788446 - RNA, 13 nt, Human
agugagacagacu

SEQ ID NO: 1788447 - RNA, 17 nt, Human
agugagacccugucuca

SEQ ID NO: 1788448 - RNA, 17 nt, Human
agugagacucugucuca

SEQ ID NO: 1788449 - RNA, 16 nt, Human
agugagacucugucuc

SEQ ID NO: 1788450 - RNA, 22 nt, Human
agugagacucugucucaaaaaa

SEQ ID NO: 1788451 - RNA, 14 nt, Human
agugagagcugggu

SEQ ID NO: 1788452 - RNA, 16 nt, Human
agugagccgagauugu

SEQ ID NO: 1788453 - RNA, 15 nt, Human
ugugauggggcccug

SEQ ID NO: 1788454 - RNA, 16 nt, Human
ugugauggggcccugc

SEQ ID NO: 1788455 - RNA, 17 nt, Human
ugugauggggcccugcc

SEQ ID NO: 1788456 - RNA, 18 nt, Human
ugugauggggcccugccu

SEQ ID NO: 1788457 - RNA, 19 nt, Human
agucuccaaagucucugga

SEQ ID NO: 1788458 - RNA, 14 nt, Human
agucucccucccuu

SEQ ID NO: 1788459 - RNA, 18 nt, Human
agucucccucccuugggg

SEQ ID NO: 1788460 - RNA, 14 nt, Human
ugugaacugaacuc

SEQ ID NO: 1788461 - RNA, 23 nt, Human
ugugaacugaacucugacaacag

SEQ ID NO: 1788462 - RNA, 22 nt, Human
ugugagaugcuagaacucccuu

SEQ ID NO: 1788463 - RNA, 19 nt, Human
ugugagcacaaagguagcu

SEQ ID NO: 1788464 - RNA, 13 nt, Human
agucuuuuccaug

SEQ ID NO: 1788465 - RNA, 15 nt, Human
agucuuuuccaugaa

SEQ ID NO: 1788466 - RNA, 11 nt, Human
agugaaaaagg

SEQ ID NO: 1788467 - RNA, 17 nt, Human
agugaaaaaggaggaag

SEQ ID NO: 1788468 - RNA, 20 nt, Human
agugaaaaaggaggaagaga

SEQ ID NO: 1788469 - RNA, 23 nt, Human
agugaaaaaggaggaagagaaaa

SEQ ID NO: 1788470 - RNA, 21 nt, Human
ugucuugcaauggcagccuug

SEQ ID NO: 1788471 - RNA, 20 nt, Human
ugucuugcaauggcagccuu

SEQ ID NO: 1788472 - RNA, 18 nt, Human
ugucuugcaauggcagcc

SEQ ID NO: 1788473 - RNA, 17 nt, Human
ugucuugcaauggcagc

SEQ ID NO: 1788474 - RNA, 15 nt, Human
ugucuugcaauggca

SEQ ID NO: 1788475 - RNA, 23 nt, Human
ugugaaccaccacacccagccca

SEQ ID NO: 1788476 - RNA, 22 nt, Human
ugugaaccaccacacccagccc

SEQ ID NO: 1788477 - RNA, 17 nt, Human
ugugaaccaccacaccc

SEQ ID NO: 1788478 - RNA, 16 nt, Human
ugugaaccaccacacc

SEQ ID NO: 1788479 - RNA, 15 nt, Human
ugugaaccaccacac

SEQ ID NO: 1788480 - RNA, 23 nt, Human
aguccccuguuuguuucugaaag

SEQ ID NO: 1788481 - RNA, 13 nt, Human
agucccugccaau

SEQ ID NO: 1788482 - RNA, 14 nt, Human
agucccugccaaug

SEQ ID NO: 1788483 - RNA, 16 nt, Human
agucccugccaaugga

SEQ ID NO: 1788484 - RNA, 22 nt, Human
ugucucuggauuauauuaugaa

SEQ ID NO: 1788485 - RNA, 13 nt, Human
ugucucugagagu

SEQ ID NO: 1788486 - RNA, 20 nt, Human
ugucucgugguaggacugua

SEQ ID NO: 1788487 - RNA, 19 nt, Human
ugucucgugguaggacugu

SEQ ID NO: 1788488 - RNA, 18 nt, Human
ugucucgugguaggacug

SEQ ID NO: 1788489 - RNA, 21 nt, Human
ugucucgugguaggacuguag

SEQ ID NO: 1788490 - RNA, 17 nt, Human
ugucucuacuaaaaaua

SEQ ID NO: 1788491 - RNA, 21 nt, Human
ugucucuuuaaugucacaggc

SEQ ID NO: 1788492 - RNA, 22 nt, Human
ugucucuugguccugcugcagu

SEQ ID NO: 1788493 - RNA, 22 nt, Human
ugucucuuuaaugucacaggca

SEQ ID NO: 1788494 - RNA, 18 nt, Human
ugucuuaauuuucuuuca

SEQ ID NO: 1788495 - RNA, 18 nt, Human
ugucucuugguccugcug

SEQ ID NO: 1788496 - RNA, 19 nt, Human
ugucucuugguccugcugc

SEQ ID NO: 1788497 - RNA, 20 nt, Human
ugucucuugguccugcugca

SEQ ID NO: 1788498 - RNA, 21 nt, Human
ugucucuugguccugcugcag

SEQ ID NO: 1788499 - RNA, 15 nt, Human
uguagagccaggguc

SEQ ID NO: 1788500 - RNA, 12 nt, Human
uguagagccagg

SEQ ID NO: 1788501 - RNA, 16 nt, Human
uguaucccaugagccu

SEQ ID NO: 1788502 - RNA, 15 nt, Human
uguaucccaugagcc

SEQ ID NO: 1788503 - RNA, 14 nt, Human
uguauguguaagua

SEQ ID NO: 1788504 - RNA, 15 nt, Human
uguauuagucacaga

SEQ ID NO: 1788505 - RNA, 21 nt, Human
uguauuaaguuguuaauaaaa

SEQ ID NO: 1788506 - RNA, 11 nt, Human
uguauuaugug

SEQ ID NO: 1788507 - RNA, 14 nt, Human
ugucaaagugguga

SEQ ID NO: 1788508 - RNA, 15 nt, Human
ugucaaaguggugag

SEQ ID NO: 1788509 - RNA, 19 nt, Human
ugucaaauauuuagaugua

SEQ ID NO: 1788510 - RNA, 16 nt, Human
ugucaaaguggugaga

SEQ ID NO: 1788511 - RNA, 19 nt, Human
ugucaaaguggugagaggc

SEQ ID NO: 1788512 - RNA, 14 nt, Human
aguagcugggacua

SEQ ID NO: 1788513 - RNA, 13 nt, Human
aguagcugggacu

SEQ ID NO: 1788514 - RNA, 21 nt, Human
aguagcugggacuacaggcac

SEQ ID NO: 1788515 - RNA, 19 nt, Human
aguagcugggacuacaggc

SEQ ID NO: 1788516 - RNA, 22 nt, Human
aguagcugggacuacaggcacc

SEQ ID NO: 1788517 - RNA, 17 nt, Human
aguagcuggauuacagg

SEQ ID NO: 1788518 - RNA, 14 nt, Human
aguauuauaccuuu

SEQ ID NO: 1788519 - RNA, 15 nt, Human
aguauuauaccuuuu

SEQ ID NO: 1788520 - RNA, 22 nt, Human
agucacagagauaauucuagcu

SEQ ID NO: 1788521 - RNA, 21 nt, Human
aguauuuaauucauguugccu

SEQ ID NO: 1788522 - RNA, 15 nt, Human
agucacugagacagc

SEQ ID NO: 1788523 - RNA, 16 nt, Human
agucacugagacagcc

SEQ ID NO: 1788524 - RNA, 17 nt, Human
agucacugagacagccc

SEQ ID NO: 1788525 - RNA, 15 nt, Human
ugucagcauagaagu

SEQ ID NO: 1788526 - RNA, 20 nt, Human
agucacauuccaagccucau

SEQ ID NO: 1788527 - RNA, 23 nt, Human
agucccaccuuggcugcagggag

SEQ ID NO: 1788528 - RNA, 21 nt, Human
agucccaccuuggcugcaggg

SEQ ID NO: 1788529 - RNA, 14 nt, Human
aguccccuguuugu

SEQ ID NO: 1788530 - RNA, 19 nt, Human
aguccccuguuuguuucug

SEQ ID NO: 1788531 - RNA, 20 nt, Human
agucccaggcugagccucag

SEQ ID NO: 1788532 - RNA, 19 nt, Human
agucagggguucccuuuuu

SEQ ID NO: 1788533 - RNA, 20 nt, Human
ugucccuaccgagucucuuc

SEQ ID NO: 1788534 - RNA, 21 nt, Human
ugucccuaccgagucucuucu

SEQ ID NO: 1788535 - RNA, 22 nt, Human
ugucccuaccgagucucuucuc

SEQ ID NO: 1788536 - RNA, 20 nt, Human
uguccaggcacugcugccca

SEQ ID NO: 1788537 - RNA, 21 nt, Human
uguccaggcacugcugcccag

SEQ ID NO: 1788538 - RNA, 19 nt, Human
uguccaggcacugcugccc

SEQ ID NO: 1788539 - RNA, 16 nt, Human
ugucagccauuccugu

SEQ ID NO: 1788540 - RNA, 14 nt, Human
ugucccugcacuug

SEQ ID NO: 1788541 - RNA, 17 nt, Human
ugucccuuuuccuuuuu

SEQ ID NO: 1788542 - RNA, 12 nt, Human
ugucccuuuucc

SEQ ID NO: 1788543 - RNA, 13 nt, Human
ugaaagaaaauaa

SEQ ID NO: 1788544 - RNA, 18 nt, Human
ugaaacuggauuaaacuu

SEQ ID NO: 1788545 - RNA, 17 nt, Human
ugaaacuggauuaaacu

SEQ ID NO: 1788546 - RNA, 14 nt, Human
ugaaaauuaacaug

SEQ ID NO: 1788547 - RNA, 23 nt, Human
ucuuuuuuuuuuuuuaaagacag

SEQ ID NO: 1788548 - RNA, 14 nt, Human
ucuuuuuuugugau

SEQ ID NO: 1788549 - RNA, 16 nt, Human
ucuuuuuuugugaugu

SEQ ID NO: 1788550 - RNA, 13 nt, Human
ugaaaacacauuu

SEQ ID NO: 1788551 - RNA, 12 nt, Human
ugaaaacacauu

SEQ ID NO: 1788552 - RNA, 14 nt, Human
ugaaaacacauuuu

SEQ ID NO: 1788553 - RNA, 20 nt, Human
ugaaaacacauuuuucuuag

SEQ ID NO: 1788554 - RNA, 19 nt, Human
ugaaaacacauuuuucuua

SEQ ID NO: 1788555 - RNA, 17 nt, Human
ugaaaacacauuuuucu

SEQ ID NO: 1788556 - RNA, 15 nt, Human
ugaaaacacauuuuu

SEQ ID NO: 1788557 - RNA, 15 nt, Human
agagacuccugcagg

SEQ ID NO: 1788558 - RNA, 12 nt, Human
agagacuccugc

SEQ ID NO: 1788559 - RNA, 13 nt, Human
agagacuccugca

SEQ ID NO: 1788560 - RNA, 14 nt, Human
agagacuccugcag

SEQ ID NO: 1788561 - RNA, 17 nt, Human
agagaguggcuccuccc

SEQ ID NO: 1788562 - RNA, 22 nt, Human
agagaccaucccugaaggcccc

SEQ ID NO: 1788563 - RNA, 23 nt, Human
agagaccaucccugaaggccccg

SEQ ID NO: 1788564 - RNA, 19 nt, Human
agagaccaucccugaaggc

SEQ ID NO: 1788565 - RNA, 21 nt, Human
agagaccaucccugaaggccc

SEQ ID NO: 1788566 - RNA, 18 nt, Human
ugaaagaggaaugaagua

SEQ ID NO: 1788567 - RNA, 18 nt, Human
ugaaagacuguacaaagu

SEQ ID NO: 1788568 - RNA, 19 nt, Human
ugaaagacuguacaaagua

SEQ ID NO: 1788569 - RNA, 22 nt, Human
ugaaagacuguacaaaguagaa

SEQ ID NO: 1788570 - RNA, 17 nt, Human
ugaaagaggaaugaagu

SEQ ID NO: 1788571 - RNA, 16 nt, Human
ugaaagacuguacaaa

SEQ ID NO: 1788572 - RNA, 22 nt, Human
ugaaagaaaauaccaaggaaca

SEQ ID NO: 1788573 - RNA, 14 nt, Human
ucuuuguggcuucc

SEQ ID NO: 1788574 - RNA, 21 nt, Human
ucuuuuuucuaaaguaaaaac

SEQ ID NO: 1788575 - RNA, 22 nt, Human
ucuuuuuucuaaaguaaaaaca

SEQ ID NO: 1788576 - RNA, 16 nt, Human
ucuuuguaaugaaaac

SEQ ID NO: 1788577 - RNA, 14 nt, Human
ucuuuguacagaca

SEQ ID NO: 1788578 - RNA, 15 nt, Human
ucuuuguacagacaa

SEQ ID NO: 1788579 - RNA, 20 nt, Human
ucuuuguacagacaacaaac

SEQ ID NO: 1788580 - RNA, 15 nt, Human
agagacagaaagcag

SEQ ID NO: 1788581 - RNA, 14 nt, Human
agagacagaaagca

SEQ ID NO: 1788582 - RNA, 20 nt, Human
agacugguuccauggccucu

SEQ ID NO: 1788583 - RNA, 14 nt, Human
agacuguacaaagu

SEQ ID NO: 1788584 - RNA, 17 nt, Human
agacuuuggaaagacuu

SEQ ID NO: 1788585 - RNA, 15 nt, Human
agacuuuggaaagag

SEQ ID NO: 1788586 - RNA, 15 nt, Human
agacuuuuaugauac

SEQ ID NO: 1788587 - RNA, 15 nt, Human
agacuuuuccaaccc

SEQ ID NO: 1788588 - RNA, 12 nt, Human
agacuuuuauga

SEQ ID NO: 1788589 - RNA, 19 nt, Human
agacuuuggaaagaguagg

SEQ ID NO: 1788590 - RNA, 19 nt, Human
agacuuuucuuucagccaa

SEQ ID NO: 1788591 - RNA, 16 nt, Human
agagacacaagccuuc

SEQ ID NO: 1788592 - RNA, 19 nt, Human
agagacacaagccuucggc

SEQ ID NO: 1788593 - RNA, 13 nt, Human
agacucugucuca

SEQ ID NO: 1788594 - RNA, 16 nt, Human
agacucccaagcugga

SEQ ID NO: 1788595 - RNA, 21 nt, Human
agacuccagcuggguuggaaa

SEQ ID NO: 1788596 - RNA, 13 nt, Human
agacuccugcagg

SEQ ID NO: 1788597 - RNA, 15 nt, Human
ucuuuaaugucacag

SEQ ID NO: 1788598 - RNA, 22 nt, Human
agacaggcaagcaccuccugcc

SEQ ID NO: 1788599 - RNA, 20 nt, Human
agacaggcaagcaccuccug

SEQ ID NO: 1788600 - RNA, 19 nt, Human
ucuuuaaugucacaggcag

SEQ ID NO: 1788601 - RNA, 18 nt, Human
ucuuuaaugucacaggca

SEQ ID NO: 1788602 - RNA, 12 nt, Human
ucuuuccugagg

SEQ ID NO: 1788603 - RNA, 15 nt, Human
ugaaguaagcaaaga

SEQ ID NO: 1788604 - RNA, 17 nt, Human
ugaaguacucauacaug

SEQ ID NO: 1788605 - RNA, 13 nt, Human
ugaagucacacag

SEQ ID NO: 1788606 - RNA, 12 nt, Human
ugaauaauacag

SEQ ID NO: 1788607 - RNA, 23 nt, Human
ugaauaauguaagacaaauaugu

SEQ ID NO: 1788608 - RNA, 13 nt, Human
ugaauaauacagu

SEQ ID NO: 1788609 - RNA, 18 nt, Human
ugaauauuuaguguucau

SEQ ID NO: 1788610 - RNA, 22 nt, Human
ugaaguaauaugcacacauuuu

SEQ ID NO: 1788611 - RNA, 21 nt, Human
ugaaguaauaugcacacauuu

SEQ ID NO: 1788612 - RNA, 20 nt, Human
ugaaguaauaugcacacauu

SEQ ID NO: 1788613 - RNA, 16 nt, Human
ugaaguaauaugcaca

SEQ ID NO: 1788614 - RNA, 13 nt, Human
ugaaguaagcaaa

SEQ ID NO: 1788615 - RNA, 14 nt, Human
ugaaguaagcaaag

SEQ ID NO: 1788616 - RNA, 15 nt, Human
ugaaguaauaugcac

SEQ ID NO: 1788617 - RNA, 22 nt, Human
agaguaauccaagcaaauguga

SEQ ID NO: 1788618 - RNA, 20 nt, Human
agaguaauccaagcaaaugu

SEQ ID NO: 1788619 - RNA, 18 nt, Human
agaguaauccaagcaaau

SEQ ID NO: 1788620 - RNA, 20 nt, Human
agagguucaaagauauuuug

SEQ ID NO: 1788621 - RNA, 19 nt, Human
agagguucaaagauauuuu

SEQ ID NO: 1788622 - RNA, 16 nt, Human
agagguucaaagauau

SEQ ID NO: 1788623 - RNA, 15 nt, Human
agagggagugacaga

SEQ ID NO: 1788624 - RNA, 15 nt, Human
agagggagguaagga

SEQ ID NO: 1788625 - RNA, 20 nt, Human
agagggagugacagaggcag

SEQ ID NO: 1788626 - RNA, 13 nt, Human
agagguucaaaga

SEQ ID NO: 1788627 - RNA, 22 nt, Human
agaggcugccucucccaucacu

SEQ ID NO: 1788628 - RNA, 23 nt, Human
agaggcagccccauucugccugc

SEQ ID NO: 1788629 - RNA, 21 nt, Human
agaggcagggucucacucugu

SEQ ID NO: 1788630 - RNA, 22 nt, Human
agaggcagccccauucugccug

SEQ ID NO: 1788631 - RNA, 21 nt, Human
agaggcagccccauucugccu

SEQ ID NO: 1788632 - RNA, 24 nt, Human
agaggcagccccauucugccugcc

SEQ ID NO: 1788633 - RNA, 16 nt, Human
agagauugugguuuca

SEQ ID NO: 1788634 - RNA, 17 nt, Human
ugaaauaacauggccuu

SEQ ID NO: 1788635 - RNA, 16 nt, Human
ugaaauaacauggccu

SEQ ID NO: 1788636 - RNA, 14 nt, Human
ugaaauaagccaga

SEQ ID NO: 1788637 - RNA, 23 nt, Human
ugaaauagacccacaagaggcag

SEQ ID NO: 1788638 - RNA, 20 nt, Human
ugaaauuuuuauuaaauuau

SEQ ID NO: 1788639 - RNA, 19 nt, Human
ugaaauuuuuauuaaauua

SEQ ID NO: 1788640 - RNA, 18 nt, Human
ugaacccgggaggcagag

SEQ ID NO: 1788641 - RNA, 22 nt, Human
ugaacccauauuuguacaccaa

SEQ ID NO: 1788642 - RNA, 22 nt, Human
ugaaccaccacacccagcccac

SEQ ID NO: 1788643 - RNA, 18 nt, Human
ugaacaaauuuacagaga

SEQ ID NO: 1788644 - RNA, 21 nt, Human
ugaaccaccacacccagccca

SEQ ID NO: 1788645 - RNA, 13 nt, Human
ugaacaaauuuac

SEQ ID NO: 1788646 - RNA, 11 nt, Human
ugaacuccugg

SEQ ID NO: 1788647 - RNA, 15 nt, Human
ugaacuccugaccuc

SEQ ID NO: 1788648 - RNA, 13 nt, Human
ugaagacagagcu

SEQ ID NO: 1788649 - RNA, 23 nt, Human
ugaagacaaugacuuacuguaca

SEQ ID NO: 1788650 - RNA, 22 nt, Human
ugaagacaaugacuuacuguac

SEQ ID NO: 1788651 - RNA, 21 nt, Human
ugagacagaguuuucacucuu

SEQ ID NO: 1788652 - RNA, 13 nt, Human
ugagacagcccgg

SEQ ID NO: 1788653 - RNA, 11 nt, Human
ugagacagagu

SEQ ID NO: 1788654 - RNA, 20 nt, Human
ugagacagaaucucgcucug

SEQ ID NO: 1788655 - RNA, 20 nt, Human
ugagacucugucucaaaaaa

SEQ ID NO: 1788656 - RNA, 20 nt, Human
ugagacucugucucagucca

SEQ ID NO: 1788657 - RNA, 22 nt, Human
ugagacagcccgggcucugccu

SEQ ID NO: 1788658 - RNA, 12 nt, Human
ugagacagcucu

SEQ ID NO: 1788659 - RNA, 17 nt, Human
ugagacagcccgggcuc

SEQ ID NO: 1788660 - RNA, 18 nt, Human
ugagacagcccgggcucu

SEQ ID NO: 1788661 - RNA, 19 nt, Human
ugagacagcccgggcucug

SEQ ID NO: 1788662 - RNA, 20 nt, Human
ugagacagcccgggcucugc

SEQ ID NO: 1788663 - RNA, 14 nt, Human
ugagagcugggugu

SEQ ID NO: 1788664 - RNA, 10 nt, Human
ugagaggaaa

SEQ ID NO: 1788665 - RNA, 11 nt, Human
ugagaggaaau

SEQ ID NO: 1788666 - RNA, 12 nt, Human
ugagaggaaauc

SEQ ID NO: 1788667 - RNA, 13 nt, Human
ugagaggaaauca

SEQ ID NO: 1788668 - RNA, 14 nt, Human
ugagaggaaaucac

SEQ ID NO: 1788669 - RNA, 23 nt, Human
ugagaggacuuuucuuuguggcu

SEQ ID NO: 1788670 - RNA, 17 nt, Human
ugagaggaaaucaccga

SEQ ID NO: 1788671 - RNA, 23 nt, Human
ugagauguagccccucuccugga

SEQ ID NO: 1788672 - RNA, 14 nt, Human
ugagauguguucac

SEQ ID NO: 1788673 - RNA, 16 nt, Human
agcaagugagagcugg

SEQ ID NO: 1788674 - RNA, 15 nt, Human
agcaagugagagcug

SEQ ID NO: 1788675 - RNA, 16 nt, Human
agcaagugagacccug

SEQ ID NO: 1788676 - RNA, 15 nt, Human
agcaagucagaauag

SEQ ID NO: 1788677 - RNA, 14 nt, Human
agcaaggagauuua

SEQ ID NO: 1788678 - RNA, 19 nt, Human
agcaaggagauuuacaacu

SEQ ID NO: 1788679 - RNA, 17 nt, Human
agcaaggagauuuacaa

SEQ ID NO: 1788680 - RNA, 13 nt, Human
ugagccacugcac

SEQ ID NO: 1788681 - RNA, 12 nt, Human
ugagccacugca

SEQ ID NO: 1788682 - RNA, 16 nt, Human
ugagcauuagauuucu

SEQ ID NO: 1788683 - RNA, 14 nt, Human
ugagcauuagauuu

SEQ ID NO: 1788684 - RNA, 15 nt, Human
ugagcaaauguggcu

SEQ ID NO: 1788685 - RNA, 14 nt, Human
ugagccacugcacc

SEQ ID NO: 1788686 - RNA, 18 nt, Human
ugagccagauuucacucu

SEQ ID NO: 1788687 - RNA, 19 nt, Human
ugagccagauuucacucuc

SEQ ID NO: 1788688 - RNA, 20 nt, Human
ugagccagauuucacucucc

SEQ ID NO: 1788689 - RNA, 21 nt, Human
ugagccagauuucacucuccu

SEQ ID NO: 1788690 - RNA, 17 nt, Human
agcaagugagagcuggg

SEQ ID NO: 1788691 - RNA, 21 nt, Human
agcacagcuucauuuccugug

SEQ ID NO: 1788692 - RNA, 18 nt, Human
agcacaugccucucucag

SEQ ID NO: 1788693 - RNA, 19 nt, Human
agcacaugccucucucagg

SEQ ID NO: 1788694 - RNA, 20 nt, Human
agcacaugccucucucaggc

SEQ ID NO: 1788695 - RNA, 21 nt, Human
agcacaugccucucucaggcc

SEQ ID NO: 1788696 - RNA, 22 nt, Human
agcacaugccucucucaggcca

SEQ ID NO: 1788697 - RNA, 16 nt, Human
agcaccaucucuccuc

SEQ ID NO: 1788698 - RNA, 22 nt, Human
agcaccaaaagcuuaccaaggg

SEQ ID NO: 1788699 - RNA, 23 nt, Human
agcacaugccucucucaggccaa

SEQ ID NO: 1788700 - RNA, 16 nt, Human
agcaccuccugccucg

SEQ ID NO: 1788701 - RNA, 14 nt, Human
agcaccuccugccu

SEQ ID NO: 1788702 - RNA, 13 nt, Human
agcaccuccugcc

SEQ ID NO: 1788703 - RNA, 21 nt, Human
agcaccuacaguguacagucu

SEQ ID NO: 1788704 - RNA, 19 nt, Human
agcaccuacaguguacagu

SEQ ID NO: 1788705 - RNA, 15 nt, Human
agcaccuacagugua

SEQ ID NO: 1788706 - RNA, 14 nt, Human
agcaccuacagugu

SEQ ID NO: 1788707 - RNA, 22 nt, Human
agcaccuacaguguacagucuu

SEQ ID NO: 1788708 - RNA, 17 nt, Human
agcaccuagccucgcuc

SEQ ID NO: 1788709 - RNA, 22 nt, Human
ugacagggcacaccgggcacuc

SEQ ID NO: 1788710 - RNA, 19 nt, Human
ugacaggcaaugcuggcug

SEQ ID NO: 1788711 - RNA, 17 nt, Human
ugacaggcaaugcuggc

SEQ ID NO: 1788712 - RNA, 16 nt, Human
ugacacgaauauugcu

SEQ ID NO: 1788713 - RNA, 22 nt, Human
ugacagagugagacucugucuc

SEQ ID NO: 1788714 - RNA, 15 nt, Human
ugacacuuaaaaaug

SEQ ID NO: 1788715 - RNA, 19 nt, Human
ugacacgaauauugcugau

SEQ ID NO: 1788716 - RNA, 19 nt, Human
agaugcuagaacucccuuu

SEQ ID NO: 1788717 - RNA, 21 nt, Human
agauguagccccucuccugga

SEQ ID NO: 1788718 - RNA, 22 nt, Human
agauguagccccucuccuggaa

SEQ ID NO: 1788719 - RNA, 22 nt, Human
agaugcuagaacucccuuucaa

SEQ ID NO: 1788720 - RNA, 21 nt, Human
agaugcuagaacucccuuuca

SEQ ID NO: 1788721 - RNA, 16 nt, Human
agaucguucucugccu

SEQ ID NO: 1788722 - RNA, 18 nt, Human
agaucucuaacuucacca

SEQ ID NO: 1788723 - RNA, 18 nt, Human
agauccccaagccuggca

SEQ ID NO: 1788724 - RNA, 15 nt, Human
agauuaagaaauaga

SEQ ID NO: 1788725 - RNA, 14 nt, Human
agauuaagaaauag

SEQ ID NO: 1788726 - RNA, 17 nt, Human
ugacuuauuuauauaaa

SEQ ID NO: 1788727 - RNA, 20 nt, Human
ugacuuacuguacaugaaaa

SEQ ID NO: 1788728 - RNA, 12 nt, Human
ugacuuacugua

SEQ ID NO: 1788729 - RNA, 13 nt, Human
agauucauauuua

SEQ ID NO: 1788730 - RNA, 16 nt, Human
agauucauauuuacuu

SEQ ID NO: 1788731 - RNA, 22 nt, Human
agauuccagagaguggcuccuc

SEQ ID NO: 1788732 - RNA, 21 nt, Human
agauuccagagaguggcuccu

SEQ ID NO: 1788733 - RNA, 19 nt, Human
agauucauauuuacuucuu

SEQ ID NO: 1788734 - RNA, 19 nt, Human
agauuucacucuccuuggu

SEQ ID NO: 1788735 - RNA, 17 nt, Human
agauuucacucuccuug

SEQ ID NO: 1788736 - RNA, 16 nt, Human
ugaccugccaggcaca

SEQ ID NO: 1788737 - RNA, 19 nt, Human
ugaccugccaggcacacug

SEQ ID NO: 1788738 - RNA, 15 nt, Human
ugaccuuuaagagaa

SEQ ID NO: 1788739 - RNA, 21 nt, Human
ugacuguuuucucuugagagg

SEQ ID NO: 1788740 - RNA, 19 nt, Human
ugacuauuuuucagaaucu

SEQ ID NO: 1788741 - RNA, 21 nt, Human
ugacucguauaugucucaggu

SEQ ID NO: 1788742 - RNA, 12 nt, Human
ugaccuuucaau

SEQ ID NO: 1788743 - RNA, 13 nt, Human
ugaccuuucaaua

SEQ ID NO: 1788744 - RNA, 23 nt, Human
ucucacuauguugcccaggcagg

SEQ ID NO: 1788745 - RNA, 22 nt, Human
ucucacuauguugcccaggcag

SEQ ID NO: 1788746 - RNA, 21 nt, Human
ucucacuauguugcccaggca

SEQ ID NO: 1788747 - RNA, 20 nt, Human
ucucacuauguugcccaggc

SEQ ID NO: 1788748 - RNA, 22 nt, Human
acuugcagacucuacagaggcc

SEQ ID NO: 1788749 - RNA, 19 nt, Human
acuugcagacucuacagag

SEQ ID NO: 1788750 - RNA, 23 nt, Human
acuugcagacucuacagaggcca

SEQ ID NO: 1788751 - RNA, 16 nt, Human
acuugcucuugaugcc

SEQ ID NO: 1788752 - RNA, 17 nt, Human
acuugcucuugaugccu

SEQ ID NO: 1788753 - RNA, 18 nt, Human
acuugcucuugaugccug

SEQ ID NO: 1788754 - RNA, 20 nt, Human
acuugcucuugaugccuggc

SEQ ID NO: 1788755 - RNA, 22 nt, Human
acuuguggacacagcucuucuc

SEQ ID NO: 1788756 - RNA, 19 nt, Human
acuuguggacacagcucuu

SEQ ID NO: 1788757 - RNA, 20 nt, Human
acuugucuuuggacccugag

SEQ ID NO: 1788758 - RNA, 18 nt, Human
acuugucuuuggacccug

SEQ ID NO: 1788759 - RNA, 21 nt, Human
acuugucuuuggacccugagg

SEQ ID NO: 1788760 - RNA, 14 nt, Human
acuugcuuuuaaaa

SEQ ID NO: 1788761 - RNA, 18 nt, Human
acuuguauuauguguguu

SEQ ID NO: 1788762 - RNA, 19 nt, Human
acuuguauuauguguguuu

SEQ ID NO: 1788763 - RNA, 12 nt, Human
ucucaggccaaa

SEQ ID NO: 1788764 - RNA, 12 nt, Human
ucucaggccagc

SEQ ID NO: 1788765 - RNA, 13 nt, Human
ucucaggccagcu

SEQ ID NO: 1788766 - RNA, 10 nt, Human
ucucaggcca

SEQ ID NO: 1788767 - RNA, 14 nt, Human
ucucauuugucaca

SEQ ID NO: 1788768 - RNA, 19 nt, Human
ucucauuugccaauaauaa

SEQ ID NO: 1788769 - RNA, 16 nt, Human
ucucauuugucacaca

SEQ ID NO: 1788770 - RNA, 13 nt, Human
ucuccaaaauaaa

SEQ ID NO: 1788771 - RNA, 15 nt, Human
ucuccaagcaggaca

SEQ ID NO: 1788772 - RNA, 16 nt, Human
ucuccaagcaggacau

SEQ ID NO: 1788773 - RNA, 20 nt, Human
ucucaugccucagccuccug

SEQ ID NO: 1788774 - RNA, 21 nt, Human
ucucaggccagcugcuugggc

SEQ ID NO: 1788775 - RNA, 17 nt, Human
ucucaggccagcugcuu

SEQ ID NO: 1788776 - RNA, 18 nt, Human
ucucaggccagcugcuug

SEQ ID NO: 1788777 - RNA, 21 nt, Human
ucucaugccucagccuccuga

SEQ ID NO: 1788778 - RNA, 17 nt, Human
agaaaaaauauuuuccc

SEQ ID NO: 1788779 - RNA, 14 nt, Human
ucuccuucaccuuu

SEQ ID NO: 1788780 - RNA, 15 nt, Human
ucuccuucaccuuug

SEQ ID NO: 1788781 - RNA, 21 nt, Human
ucuccuuguguuacuaaguuu

SEQ ID NO: 1788782 - RNA, 13 nt, Human
ucuccuuguguua

SEQ ID NO: 1788783 - RNA, 16 nt, Human
ucuccuucaccuuugu

SEQ ID NO: 1788784 - RNA, 18 nt, Human
ucuccuucaccuuugucc

SEQ ID NO: 1788785 - RNA, 23 nt, Human
acuuuuguucuugguuuguaaau

SEQ ID NO: 1788786 - RNA, 15 nt, Human
acuuuuguucuuggu

SEQ ID NO: 1788787 - RNA, 13 nt, Human
acuuuuguucuug

SEQ ID NO: 1788788 - RNA, 12 nt, Human
acuuuuguucuu

SEQ ID NO: 1788789 - RNA, 21 nt, Human
acuuuguuaguuucuccaagc

SEQ ID NO: 1788790 - RNA, 14 nt, Human
acuuuguucuggcu

SEQ ID NO: 1788791 - RNA, 20 nt, Human
acuuuguuaguuucuccaag

SEQ ID NO: 1788792 - RNA, 13 nt, Human
acuuugaccucug

SEQ ID NO: 1788793 - RNA, 12 nt, Human
acuuugaccucu

SEQ ID NO: 1788794 - RNA, 23 nt, Human
ucuccgaccagacaccuugacag

SEQ ID NO: 1788795 - RNA, 17 nt, Human
ucuccgaccagacaccu

SEQ ID NO: 1788796 - RNA, 15 nt, Human
ucucccuuuuccaug

SEQ ID NO: 1788797 - RNA, 12 nt, Human
ucuccacccugc

SEQ ID NO: 1788798 - RNA, 23 nt, Human
ucuccccagcaagugagagcugg

SEQ ID NO: 1788799 - RNA, 18 nt, Human
ucuccaagcaggacaugg

SEQ ID NO: 1788800 - RNA, 19 nt, Human
ucuccaagcaggacaugga

SEQ ID NO: 1788801 - RNA, 17 nt, Human
ucuccucugcugcuggc

SEQ ID NO: 1788802 - RNA, 18 nt, Human
ucuccucugcugcuggcu

SEQ ID NO: 1788803 - RNA, 15 nt, Human
ucuccuccagaguca

SEQ ID NO: 1788804 - RNA, 15 nt, Human
ucuccucugcugcug

SEQ ID NO: 1788805 - RNA, 16 nt, Human
ucuccucugcugcugg

SEQ ID NO: 1788806 - RNA, 12 nt, Human
acuuuaccuuuu

SEQ ID NO: 1788807 - RNA, 14 nt, Human
acuuucugaaauaa

SEQ ID NO: 1788808 - RNA, 20 nt, Human
acuuucugaaauaacauggc

SEQ ID NO: 1788809 - RNA, 15 nt, Human
acuuagguguggggg

SEQ ID NO: 1788810 - RNA, 14 nt, Human
acuuagcugggaga

SEQ ID NO: 1788811 - RNA, 22 nt, Human
acuuacuguacaugaaaacaca

SEQ ID NO: 1788812 - RNA, 21 nt, Human
acuuacuguacaugaaaacac

SEQ ID NO: 1788813 - RNA, 17 nt, Human
acuuacacuuuaugcac

SEQ ID NO: 1788814 - RNA, 20 nt, Human
acuuaaauaaugugaaacug

SEQ ID NO: 1788815 - RNA, 16 nt, Human
acuuacacuuuaugca

SEQ ID NO: 1788816 - RNA, 22 nt, Human
acuuaaucuaaauggaaccacu

SEQ ID NO: 1788817 - RNA, 19 nt, Human
acuuaaucuaaauggaacc

SEQ ID NO: 1788818 - RNA, 17 nt, Human
acuuaaucuaaauggaa

SEQ ID NO: 1788819 - RNA, 13 nt, Human
acuuaagcacacu

SEQ ID NO: 1788820 - RNA, 16 nt, Human
acuguucucugcccuc

SEQ ID NO: 1788821 - RNA, 17 nt, Human
acuguucucugcccucc

SEQ ID NO: 1788822 - RNA, 19 nt, Human
acuguucucugcccuccaa

SEQ ID NO: 1788823 - RNA, 18 nt, Human
acuguucucugcccucca

SEQ ID NO: 1788824 - RNA, 21 nt, Human
ucuacccuggcacuauaaugu

SEQ ID NO: 1788825 - RNA, 20 nt, Human
ucuacccagcgagcccuggu

SEQ ID NO: 1788826 - RNA, 14 nt, Human
ucuacccaggugcu

SEQ ID NO: 1788827 - RNA, 19 nt, Human
ucuacccuggcacuauaau

SEQ ID NO: 1788828 - RNA, 14 nt, Human
ucuacccuggcacu

SEQ ID NO: 1788829 - RNA, 18 nt, Human
uccugggagugagcuggu

SEQ ID NO: 1788830 - RNA, 21 nt, Human
ucuacagaggccaugggccuc

SEQ ID NO: 1788831 - RNA, 19 nt, Human
ucuacccagcgagcccugg

SEQ ID NO: 1788832 - RNA, 23 nt, Human
ucuacagcuaaucagcauucuca

SEQ ID NO: 1788833 - RNA, 20 nt, Human
ucuacagcuaaucagcauuc

SEQ ID NO: 1788834 - RNA, 13 nt, Human
ucuagauacugua

SEQ ID NO: 1788835 - RNA, 18 nt, Human
ucuagcauggcugccaau

SEQ ID NO: 1788836 - RNA, 16 nt, Human
acuucaucccucuggg

SEQ ID NO: 1788837 - RNA, 13 nt, Human
acuuccccuuccu

SEQ ID NO: 1788838 - RNA, 19 nt, Human
acuuccccuuccuaauucc

SEQ ID NO: 1788839 - RNA, 23 nt, Human
ucuaguuguuugauucagacagc

SEQ ID NO: 1788840 - RNA, 21 nt, Human
ucuaguuugauuaaauucuug

SEQ ID NO: 1788841 - RNA, 22 nt, Human
ucuaguuugauuaaauucuugc

SEQ ID NO: 1788842 - RNA, 22 nt, Human
ucuaguuguuugauucagacag

SEQ ID NO: 1788843 - RNA, 12 nt, Human
ucuaggaagacu

SEQ ID NO: 1788844 - RNA, 13 nt, Human
ucuagccagagga

SEQ ID NO: 1788845 - RNA, 23 nt, Human
ucuaugggacucaaugcacugac

SEQ ID NO: 1788846 - RNA, 19 nt, Human
ucucacuauguugcccagg

SEQ ID NO: 1788847 - RNA, 17 nt, Human
ucucacuauguugccca

SEQ ID NO: 1788848 - RNA, 15 nt, Human
agaauuaacacauga

SEQ ID NO: 1788849 - RNA, 23 nt, Human
agaauuaacacaugauccugcaa

SEQ ID NO: 1788850 - RNA, 12 nt, Human
ucugcuuuccuc

SEQ ID NO: 1788851 - RNA, 13 nt, Human
ucugcuuuccucu

SEQ ID NO: 1788852 - RNA, 18 nt, Human
ucugcuuuccucuuccug

SEQ ID NO: 1788853 - RNA, 20 nt, Human
agaaguggggacagagcaga

SEQ ID NO: 1788854 - RNA, 21 nt, Human
agaaguuucugccgcagcccu

SEQ ID NO: 1788855 - RNA, 22 nt, Human
agaaguuucugccgcagcccug

SEQ ID NO: 1788856 - RNA, 23 nt, Human
agaaguuucugccgcagcccugc

SEQ ID NO: 1788857 - RNA, 16 nt, Human
agaauagaugcugacu

SEQ ID NO: 1788858 - RNA, 12 nt, Human
agaauaaaauuu

SEQ ID NO: 1788859 - RNA, 14 nt, Human
agaauaaaauuuuu

SEQ ID NO: 1788860 - RNA, 17 nt, Human
agaauaaaauuuuuaau

SEQ ID NO: 1788861 - RNA, 17 nt, Human
ucuguuggccaguguga

SEQ ID NO: 1788862 - RNA, 12 nt, Human
ucuguuggccag

SEQ ID NO: 1788863 - RNA, 16 nt, Human
ucuguugcccaggcug

SEQ ID NO: 1788864 - RNA, 15 nt, Human
ucuguugcugccuca

SEQ ID NO: 1788865 - RNA, 22 nt, Human
ucuguucuuuccaaaguacacu

SEQ ID NO: 1788866 - RNA, 13 nt, Human
ucuguucuuucca

SEQ ID NO: 1788867 - RNA, 16 nt, Human
ucuguuguauucauug

SEQ ID NO: 1788868 - RNA, 13 nt, Human
ucuguuuagauaa

SEQ ID NO: 1788869 - RNA, 14 nt, Human
ucugggccagaauu

SEQ ID NO: 1788870 - RNA, 15 nt, Human
ucugggccagaauuu

SEQ ID NO: 1788871 - RNA, 22 nt, Human
ucugugagaugcuagaacuccc

SEQ ID NO: 1788872 - RNA, 17 nt, Human
ucugugagaugcuagaa

SEQ ID NO: 1788873 - RNA, 23 nt, Human
ucugugagaugcuagaacucccu

SEQ ID NO: 1788874 - RNA, 14 nt, Human
ucugugagaugcua

SEQ ID NO: 1788875 - RNA, 16 nt, Human
agacacaggcccggcu

SEQ ID NO: 1788876 - RNA, 13 nt, Human
agacacaggcccg

SEQ ID NO: 1788877 - RNA, 12 nt, Human
agacacaggccc

SEQ ID NO: 1788878 - RNA, 17 nt, Human
agacaccuugacagggc

SEQ ID NO: 1788879 - RNA, 18 nt, Human
agacaccuugacagggca

SEQ ID NO: 1788880 - RNA, 16 nt, Human
agacacauguccaaga

SEQ ID NO: 1788881 - RNA, 20 nt, Human
agacacauguccaagaagcc

SEQ ID NO: 1788882 - RNA, 13 nt, Human
agacagagcuaca

SEQ ID NO: 1788883 - RNA, 21 nt, Human
ucugaucauccacugugccau

SEQ ID NO: 1788884 - RNA, 17 nt, Human
ucugaucauccacugug

SEQ ID NO: 1788885 - RNA, 16 nt, Human
ucugaugcaagcaaga

SEQ ID NO: 1788886 - RNA, 22 nt, Human
ucugagacucgcgacaaugcaa

SEQ ID NO: 1788887 - RNA, 21 nt, Human
ucugagacucgcgacaaugca

SEQ ID NO: 1788888 - RNA, 15 nt, Human
agaaauguacagcaa

SEQ ID NO: 1788889 - RNA, 14 nt, Human
agaaauguacagca

SEQ ID NO: 1788890 - RNA, 14 nt, Human
ucugcaggucccua

SEQ ID NO: 1788891 - RNA, 13 nt, Human
ucugcaggucccu

SEQ ID NO: 1788892 - RNA, 11 nt, Human
ucugcaggucc

SEQ ID NO: 1788893 - RNA, 12 nt, Human
ucugcagguccc

SEQ ID NO: 1788894 - RNA, 21 nt, Human
ucugaugcaagcaagaaacac

SEQ ID NO: 1788895 - RNA, 17 nt, Human
ucugcacuccccugcug

SEQ ID NO: 1788896 - RNA, 16 nt, Human
ucugcacuccccugcu

SEQ ID NO: 1788897 - RNA, 14 nt, Human
ucugcacuccccug

SEQ ID NO: 1788898 - RNA, 15 nt, Human
ucugcacuccccugc

SEQ ID NO: 1788899 - RNA, 17 nt, Human
ucugcagcaauaaagca

SEQ ID NO: 1788900 - RNA, 15 nt, Human
ucugcagauaaacag

SEQ ID NO: 1788901 - RNA, 18 nt, Human
ucugcagauaaacaguag

SEQ ID NO: 1788902 - RNA, 21 nt, Human
ucugaaggacauugcggacag

SEQ ID NO: 1788903 - RNA, 22 nt, Human
ucugaaggacauugcggacagc

SEQ ID NO: 1788904 - RNA, 10 nt, Human
ucugaauuau

SEQ ID NO: 1788905 - RNA, 15 nt, Human
ucugacacacagcuc

SEQ ID NO: 1788906 - RNA, 14 nt, Human
ucugacacacagcu

SEQ ID NO: 1788907 - RNA, 13 nt, Human
ucugacacacagc

SEQ ID NO: 1788908 - RNA, 15 nt, Human
ucugaauuauuuucu

SEQ ID NO: 1788909 - RNA, 16 nt, Human
ucuccuuucacaaccu

SEQ ID NO: 1788910 - RNA, 20 nt, Human
agaaagcccuuaggaagaau

SEQ ID NO: 1788911 - RNA, 22 nt, Human
agaaagcccuuaggaagaauuu

SEQ ID NO: 1788912 - RNA, 17 nt, Human
agaaauugcauuuccug

SEQ ID NO: 1788913 - RNA, 20 nt, Human
agaaauugcauuuccugaca

SEQ ID NO: 1788914 - RNA, 12 nt, Human
agaagcccagga

SEQ ID NO: 1788915 - RNA, 16 nt, Human
agaagcccaggaaagg

SEQ ID NO: 1788916 - RNA, 18 nt, Human
agaagcccaggaaaggcu

SEQ ID NO: 1788917 - RNA, 20 nt, Human
agaagcccaggaaaggcucc

SEQ ID NO: 1788918 - RNA, 21 nt, Human
agaagcccaggaaaggcucca

SEQ ID NO: 1788919 - RNA, 22 nt, Human
agaagcccaggaaaggcuccag

SEQ ID NO: 1788920 - RNA, 17 nt, Human
ucugcccacucccugca

SEQ ID NO: 1788921 - RNA, 18 nt, Human
agaagauuuugaaauuuu

SEQ ID NO: 1788922 - RNA, 13 nt, Human
ucugcuucagccu

SEQ ID NO: 1788923 - RNA, 15 nt, Human
ucugcuucagccucc

SEQ ID NO: 1788924 - RNA, 14 nt, Human
ucugcuucagccuc

SEQ ID NO: 1788925 - RNA, 20 nt, Human
ucugcucacauaucugucau

SEQ ID NO: 1788926 - RNA, 19 nt, Human
ucugcucacauaucuguca

SEQ ID NO: 1788927 - RNA, 22 nt, Human
ucugccugcccaggccccugcc

SEQ ID NO: 1788928 - RNA, 21 nt, Human
ucugccugcccaggccccugc

SEQ ID NO: 1788929 - RNA, 23 nt, Human
ucugccgcagcccugcagagggc

SEQ ID NO: 1788930 - RNA, 22 nt, Human
ucugccgcagcccugcagaggg

SEQ ID NO: 1788931 - RNA, 10 nt, Human
ucugcccugc

SEQ ID NO: 1788932 - RNA, 11 nt, Human
ucugcccugcg

SEQ ID NO: 1788933 - RNA, 12 nt, Human
ucugcccugcgg

SEQ ID NO: 1788934 - RNA, 14 nt, Human
ucugccgcagcccu

SEQ ID NO: 1788935 - RNA, 15 nt, Human
ucugccgcagcccug

SEQ ID NO: 1788936 - RNA, 18 nt, Human
ucugcccacucccugcaa

SEQ ID NO: 1788937 - RNA, 21 nt, Human
ucugcccacucccugcaaccu

SEQ ID NO: 1788938 - RNA, 19 nt, Human
ucugcccuccaagaccuuc

SEQ ID NO: 1788939 - RNA, 18 nt, Human
acuccagaccccuggcuu

SEQ ID NO: 1788940 - RNA, 19 nt, Human
acuccagaccccuggcuuu

SEQ ID NO: 1788941 - RNA, 21 nt, Human
acuccagaccccuggcuuuuc

SEQ ID NO: 1788942 - RNA, 19 nt, Human
acuccagugagacagcucu

SEQ ID NO: 1788943 - RNA, 13 nt, Human
acucaccccagcc

SEQ ID NO: 1788944 - RNA, 13 nt, Human
acuccagaccccu

SEQ ID NO: 1788945 - RNA, 15 nt, Human
acuccagaccccugg

SEQ ID NO: 1788946 - RNA, 16 nt, Human
acucaccccagcccca

SEQ ID NO: 1788947 - RNA, 14 nt, Human
acucaccccagccc

SEQ ID NO: 1788948 - RNA, 15 nt, Human
acucaccccagcccc

SEQ ID NO: 1788949 - RNA, 11 nt, Human
acuccuggccu

SEQ ID NO: 1788950 - RNA, 16 nt, Human
ucccugguggcagcuc

SEQ ID NO: 1788951 - RNA, 17 nt, Human
ucccugguggcagcuca

SEQ ID NO: 1788952 - RNA, 18 nt, Human
ucccugguggcagcucac

SEQ ID NO: 1788953 - RNA, 19 nt, Human
ucccugguggcagcucacc

SEQ ID NO: 1788954 - RNA, 20 nt, Human
ucccugguggcagcucaccu

SEQ ID NO: 1788955 - RNA, 21 nt, Human
ucccugguggcagcucaccuc

SEQ ID NO: 1788956 - RNA, 22 nt, Human
acuccugcaggcagccaggcca

SEQ ID NO: 1788957 - RNA, 15 nt, Human
acuccugcaggcagc

SEQ ID NO: 1788958 - RNA, 16 nt, Human
acuccugcaggcagcc

SEQ ID NO: 1788959 - RNA, 12 nt, Human
acuccucccagg

SEQ ID NO: 1788960 - RNA, 12 nt, Human
acuccugcaggc

SEQ ID NO: 1788961 - RNA, 14 nt, Human
acuccugcaggcag

SEQ ID NO: 1788962 - RNA, 14 nt, Human
acuccuggccucaa

SEQ ID NO: 1788963 - RNA, 13 nt, Human
acuccuggccuca

SEQ ID NO: 1788964 - RNA, 12 nt, Human
acuccuggccuc

SEQ ID NO: 1788965 - RNA, 13 nt, Human
uccuaggcauuug

SEQ ID NO: 1788966 - RNA, 15 nt, Human
uccuacucuguguca

SEQ ID NO: 1788967 - RNA, 14 nt, Human
uccuacucuguguc

SEQ ID NO: 1788968 - RNA, 13 nt, Human
uccuacucugugu

SEQ ID NO: 1788969 - RNA, 18 nt, Human
uccgguguuuaagacauu

SEQ ID NO: 1788970 - RNA, 16 nt, Human
ucccuuuuuuuaagua

SEQ ID NO: 1788971 - RNA, 21 nt, Human
ucccuuuuuuuaaguaaggaa

SEQ ID NO: 1788972 - RNA, 16 nt, Human
ucccuuugacgccauc

SEQ ID NO: 1788973 - RNA, 18 nt, Human
ucccuuugacgccauccc

SEQ ID NO: 1788974 - RNA, 22 nt, Human
ucccugguggcagcucaccucu

SEQ ID NO: 1788975 - RNA, 23 nt, Human
ucccugguggcagcucaccucuc

SEQ ID NO: 1788976 - RNA, 19 nt, Human
ucccuuggauuguccccga

SEQ ID NO: 1788977 - RNA, 20 nt, Human
ucccuuggauuguccccgac

SEQ ID NO: 1788978 - RNA, 13 nt, Human
ucccuuuuuuuaa

SEQ ID NO: 1788979 - RNA, 23 nt, Human
ucccuuuuuuggcugcugaaggc

SEQ ID NO: 1788980 - RNA, 20 nt, Human
ucccuuuuuuggcugcugaa

SEQ ID NO: 1788981 - RNA, 22 nt, Human
ucccuuuuuuggcugcugaagg

SEQ ID NO: 1788982 - RNA, 21 nt, Human
ucccuuugacgccaucccagc

SEQ ID NO: 1788983 - RNA, 19 nt, Human
ucccuuugacgccauccca

SEQ ID NO: 1788984 - RNA, 17 nt, Human
ucccuuuuuuggcugcu

SEQ ID NO: 1788985 - RNA, 19 nt, Human
ucccuuuuuuggcugcuga

SEQ ID NO: 1788986 - RNA, 14 nt, Human
acucuugaccucag

SEQ ID NO: 1788987 - RNA, 16 nt, Human
acucuugaccucaggu

SEQ ID NO: 1788988 - RNA, 15 nt, Human
acucuugaccucagg

SEQ ID NO: 1788989 - RNA, 22 nt, Human
uccucauaguaugguggcuggg

SEQ ID NO: 1788990 - RNA, 13 nt, Human
uccucccaggcgc

SEQ ID NO: 1788991 - RNA, 19 nt, Human
uccucccaggcgccccuuc

SEQ ID NO: 1788992 - RNA, 21 nt, Human
uccucccaggcgccccuuccc

SEQ ID NO: 1788993 - RNA, 23 nt, Human
uccucauacccacccccacccaa

SEQ ID NO: 1788994 - RNA, 23 nt, Human
acuccuugaaaacacuguucucu

SEQ ID NO: 1788995 - RNA, 24 nt, Human
acuccuugaaaacacuguucucug

SEQ ID NO: 1788996 - RNA, 14 nt, Human
acucuccuccagag

SEQ ID NO: 1788997 - RNA, 17 nt, Human
acucuccuccagaguca

SEQ ID NO: 1788998 - RNA, 12 nt, Human
acucuccucugc

SEQ ID NO: 1788999 - RNA, 13 nt, Human
acucuccucugcu

SEQ ID NO: 1789000 - RNA, 14 nt, Human
acucuccucugcug

SEQ ID NO: 1789001 - RNA, 16 nt, Human
acucuccucugcugcu

SEQ ID NO: 1789002 - RNA, 18 nt, Human
acucuccuggaaauauua

SEQ ID NO: 1789003 - RNA, 15 nt, Human
acucuccuugguguc

SEQ ID NO: 1789004 - RNA, 12 nt, Human
acucugccuccu

SEQ ID NO: 1789005 - RNA, 16 nt, Human
acucugccuccucuuc

SEQ ID NO: 1789006 - RNA, 13 nt, Human
acucuggcagcuc

SEQ ID NO: 1789007 - RNA, 15 nt, Human
acucuggcagcucag

SEQ ID NO: 1789008 - RNA, 16 nt, Human
acucuccuuggugucg

SEQ ID NO: 1789009 - RNA, 23 nt, Human
acucuccuuggugucgggcauga

SEQ ID NO: 1789010 - RNA, 11 nt, Human
acucugagacu

SEQ ID NO: 1789011 - RNA, 22 nt, Human
acucugagacucgcgacaaugc

SEQ ID NO: 1789012 - RNA, 22 nt, Human
acugagacagcccgggcucugc

SEQ ID NO: 1789013 - RNA, 23 nt, Human
acugagacagcccgggcucugcc

SEQ ID NO: 1789014 - RNA, 18 nt, Human
acugagagugaacaaauu

SEQ ID NO: 1789015 - RNA, 12 nt, Human
acugagaaauuu

SEQ ID NO: 1789016 - RNA, 17 nt, Human
acugagaaauuuauaaa

SEQ ID NO: 1789017 - RNA, 21 nt, Human
acugagaaauuuauaaacuuu

SEQ ID NO: 1789018 - RNA, 15 nt, Human
acugagacagcccgg

SEQ ID NO: 1789019 - RNA, 18 nt, Human
acugagacagcccgggcu

SEQ ID NO: 1789020 - RNA, 21 nt, Human
acugagacagcccgggcucug

SEQ ID NO: 1789021 - RNA, 22 nt, Human
uccucuuuggucuacacugugc

SEQ ID NO: 1789022 - RNA, 21 nt, Human
uccugaauuuuauuuuuuggg

SEQ ID NO: 1789023 - RNA, 19 nt, Human
uccucuuuccaucuacccu

SEQ ID NO: 1789024 - RNA, 19 nt, Human
uccucuuuggucuacacug

SEQ ID NO: 1789025 - RNA, 21 nt, Human
uccucuuuggucuacacugug

SEQ ID NO: 1789026 - RNA, 11 nt, Human
uccucccuccc

SEQ ID NO: 1789027 - RNA, 14 nt, Human
uccucccucccucu

SEQ ID NO: 1789028 - RNA, 11 nt, Human
uccucuuucca

SEQ ID NO: 1789029 - RNA, 12 nt, Human
uccucuuuccau

SEQ ID NO: 1789030 - RNA, 19 nt, Human
acucuuucuauuguuucuu

SEQ ID NO: 1789031 - RNA, 15 nt, Human
acucuuguuuccuua

SEQ ID NO: 1789032 - RNA, 16 nt, Human
acugaacauuccagag

SEQ ID NO: 1789033 - RNA, 13 nt, Human
acugaacauucca

SEQ ID NO: 1789034 - RNA, 20 nt, Human
acugaacucugacaacagac

SEQ ID NO: 1789035 - RNA, 14 nt, Human
acugcaccgggcca

SEQ ID NO: 1789036 - RNA, 20 nt, Human
acugcacuauagccuaggug

SEQ ID NO: 1789037 - RNA, 16 nt, Human
acugcaccgggccaca

SEQ ID NO: 1789038 - RNA, 23 nt, Human
acugcacagugcaucucagccca

SEQ ID NO: 1789039 - RNA, 22 nt, Human
acugcacagugcaucucagccc

SEQ ID NO: 1789040 - RNA, 14 nt, Human
acugcaacuucugc

SEQ ID NO: 1789041 - RNA, 16 nt, Human
acugcaacuucugccu

SEQ ID NO: 1789042 - RNA, 20 nt, Human
acugcaacuuguaaaugugg

SEQ ID NO: 1789043 - RNA, 21 nt, Human
acugauaaagaugagugagca

SEQ ID NO: 1789044 - RNA, 13 nt, Human
acugauaaagaug

SEQ ID NO: 1789045 - RNA, 14 nt, Human
uccugcacacgcuc

SEQ ID NO: 1789046 - RNA, 21 nt, Human
uccugcacacgcuccuuccuc

SEQ ID NO: 1789047 - RNA, 22 nt, Human
uccugcacacgcuccuuccucu

SEQ ID NO: 1789048 - RNA, 19 nt, Human
uccugaugcuucuucagag

SEQ ID NO: 1789049 - RNA, 20 nt, Human
uccugaugcuucuucagaga

SEQ ID NO: 1789050 - RNA, 21 nt, Human
uccugaugcuucuucagagac

SEQ ID NO: 1789051 - RNA, 21 nt, Human
acugcacuauagccuagguga

SEQ ID NO: 1789052 - RNA, 14 nt, Human
acugcacuccagcc

SEQ ID NO: 1789053 - RNA, 17 nt, Human
acugcacuccagccugg

SEQ ID NO: 1789054 - RNA, 18 nt, Human
acugcacuccagccuggg

SEQ ID NO: 1789055 - RNA, 19 nt, Human
acugcacuccagccugggu

SEQ ID NO: 1789056 - RNA, 20 nt, Human
acugcacuccagccugggug

SEQ ID NO: 1789057 - RNA, 15 nt, Human
uccuggaaauauuaa

SEQ ID NO: 1789058 - RNA, 23 nt, Human
uccuggaagugcuaauuuugaaa

SEQ ID NO: 1789059 - RNA, 17 nt, Human
uccugggagugagcugg

SEQ ID NO: 1789060 - RNA, 14 nt, Human
uccugggagugagc

SEQ ID NO: 1789061 - RNA, 12 nt, Human
uccugggaguga

SEQ ID NO: 1789062 - RNA, 21 nt, Human
uccugcugcaguugccaguca

SEQ ID NO: 1789063 - RNA, 12 nt, Human
uccugcaggcag

SEQ ID NO: 1789064 - RNA, 13 nt, Human
uccugcaggcagc

SEQ ID NO: 1789065 - RNA, 14 nt, Human
uccugcaggcagcc

SEQ ID NO: 1789066 - RNA, 15 nt, Human
uccugcaggcagcca

SEQ ID NO: 1789067 - RNA, 15 nt, Human
acuaauuuuaaaaug

SEQ ID NO: 1789068 - RNA, 22 nt, Human
acguuucuaaaggcuaccuuug

SEQ ID NO: 1789069 - RNA, 18 nt, Human
ucccagauacuugggggg

SEQ ID NO: 1789070 - RNA, 16 nt, Human
ucccagauacuugggg

SEQ ID NO: 1789071 - RNA, 19 nt, Human
uccauccugaggcuccacu

SEQ ID NO: 1789072 - RNA, 15 nt, Human
uccauccugaggcuc

SEQ ID NO: 1789073 - RNA, 12 nt, Human
uccauccugagg

SEQ ID NO: 1789074 - RNA, 18 nt, Human
acguaaagcuagaaauga

SEQ ID NO: 1789075 - RNA, 17 nt, Human
acguaaagcuagaaaug

SEQ ID NO: 1789076 - RNA, 15 nt, Human
acguuaccaggcagg

SEQ ID NO: 1789077 - RNA, 13 nt, Human
acguugugcauuu

SEQ ID NO: 1789078 - RNA, 15 nt, Human
acguugugcauuugg

SEQ ID NO: 1789079 - RNA, 14 nt, Human
acguugugcauuug

SEQ ID NO: 1789080 - RNA, 16 nt, Human
acguuucuaaaggcua

SEQ ID NO: 1789081 - RNA, 15 nt, Human
acguuucuaaaggcu

SEQ ID NO: 1789082 - RNA, 19 nt, Human
acguggcugcuucaaggau

SEQ ID NO: 1789083 - RNA, 21 nt, Human
acguggcugcuucaaggaucc

SEQ ID NO: 1789084 - RNA, 18 nt, Human
acguggcugcuucaagga

SEQ ID NO: 1789085 - RNA, 16 nt, Human
acucaaugcacugaca

SEQ ID NO: 1789086 - RNA, 14 nt, Human
acuauguugcccag

SEQ ID NO: 1789087 - RNA, 22 nt, Human
acuauggcccuggccuagcaua

SEQ ID NO: 1789088 - RNA, 16 nt, Human
acuauguugcccaggc

SEQ ID NO: 1789089 - RNA, 15 nt, Human
acuauguugcccagg

SEQ ID NO: 1789090 - RNA, 17 nt, Human
acuauguugcccaggca

SEQ ID NO: 1789091 - RNA, 16 nt, Human
acuaucuaaauguuga

SEQ ID NO: 1789092 - RNA, 21 nt, Human
acuaucuaaauguugaaagau

SEQ ID NO: 1789093 - RNA, 22 nt, Human
acuauagccuaggugacagagu

SEQ ID NO: 1789094 - RNA, 20 nt, Human
acuauagccuaggugacaga

SEQ ID NO: 1789095 - RNA, 23 nt, Human
uccccacccugaaagcccugagc

SEQ ID NO: 1789096 - RNA, 15 nt, Human
uccccaccgcagaca

SEQ ID NO: 1789097 - RNA, 16 nt, Human
uccccaccgcagacag

SEQ ID NO: 1789098 - RNA, 18 nt, Human
uccccaggaggccagccu

SEQ ID NO: 1789099 - RNA, 12 nt, Human
uccccacccuga

SEQ ID NO: 1789100 - RNA, 19 nt, Human
acuagacucccaagcugga

SEQ ID NO: 1789101 - RNA, 16 nt, Human
ucccccagccccaucc

SEQ ID NO: 1789102 - RNA, 13 nt, Human
ucccccagcccca

SEQ ID NO: 1789103 - RNA, 15 nt, Human
ucccccagccccauc

SEQ ID NO: 1789104 - RNA, 11 nt, Human
ucccccagccc

SEQ ID NO: 1789105 - RNA, 20 nt, Human
uccccaggaggccagccuug

SEQ ID NO: 1789106 - RNA, 21 nt, Human
uccccaggaggccagccuuga

SEQ ID NO: 1789107 - RNA, 12 nt, Human
acggccaggcca

SEQ ID NO: 1789108 - RNA, 18 nt, Human
acggcucacugcagccuc

SEQ ID NO: 1789109 - RNA, 17 nt, Human
acggcucacugcagccu

SEQ ID NO: 1789110 - RNA, 16 nt, Human
acggcucacugcagcc

SEQ ID NO: 1789111 - RNA, 13 nt, Human
acggccaggccag

SEQ ID NO: 1789112 - RNA, 18 nt, Human
acggcuuuuacuuaaacc

SEQ ID NO: 1789113 - RNA, 14 nt, Human
uccaguaucuugaa

SEQ ID NO: 1789114 - RNA, 15 nt, Human
uccaguaucuugaag

SEQ ID NO: 1789115 - RNA, 22 nt, Human
uccagugaggcucugcccuugg

SEQ ID NO: 1789116 - RNA, 23 nt, Human
uccagugaggcucugcccuuggu

SEQ ID NO: 1789117 - RNA, 16 nt, Human
uccagugaggcucugc

SEQ ID NO: 1789118 - RNA, 15 nt, Human
uccagugaggcucug

SEQ ID NO: 1789119 - RNA, 18 nt, Human
uccagugagacagcucug

SEQ ID NO: 1789120 - RNA, 16 nt, Human
uccaguaucuugaaga

SEQ ID NO: 1789121 - RNA, 18 nt, Human
uccaguaucuugaagacu

SEQ ID NO: 1789122 - RNA, 13 nt, Human
acgcuggaccuug

SEQ ID NO: 1789123 - RNA, 14 nt, Human
acgcucucuggccu

SEQ ID NO: 1789124 - RNA, 11 nt, Human
acgcucucugg

SEQ ID NO: 1789125 - RNA, 14 nt, Human
acgcuccuuccucu

SEQ ID NO: 1789126 - RNA, 15 nt, Human
acgcuccuuccucug

SEQ ID NO: 1789127 - RNA, 16 nt, Human
acgcuggagugcagug

SEQ ID NO: 1789128 - RNA, 15 nt, Human
acgcuggagugcagu

SEQ ID NO: 1789129 - RNA, 23 nt, Human
acgcuggaccuugaacuggguac

SEQ ID NO: 1789130 - RNA, 20 nt, Human
acgcuggaccuugaacuggg

SEQ ID NO: 1789131 - RNA, 18 nt, Human
acgcuggagugcagugag

SEQ ID NO: 1789132 - RNA, 17 nt, Human
acgcuggagugcaguga

SEQ ID NO: 1789133 - RNA, 23 nt, Human
acggagucccaccuuggcugcag

SEQ ID NO: 1789134 - RNA, 21 nt, Human
acgaauauugcugauggugca

SEQ ID NO: 1789135 - RNA, 20 nt, Human
acgcgugcacacaccagagc

SEQ ID NO: 1789136 - RNA, 21 nt, Human
acgcuacccgggaagggggcu

SEQ ID NO: 1789137 - RNA, 21 nt, Human
uccacugugccaugugccagg

SEQ ID NO: 1789138 - RNA, 18 nt, Human
uccagaauggucuuucua

SEQ ID NO: 1789139 - RNA, 22 nt, Human
uccacugguucuucuuggucuc

SEQ ID NO: 1789140 - RNA, 13 nt, Human
accuuuuuuauac

SEQ ID NO: 1789141 - RNA, 20 nt, Human
accuugaacuggguacuugu

SEQ ID NO: 1789142 - RNA, 19 nt, Human
accuugaaaacuuuaugcu

SEQ ID NO: 1789143 - RNA, 22 nt, Human
accuuuguuugcaucugaaaau

SEQ ID NO: 1789144 - RNA, 18 nt, Human
accuuuguccccaccgca

SEQ ID NO: 1789145 - RNA, 17 nt, Human
accuuugacaaagguaa

SEQ ID NO: 1789146 - RNA, 18 nt, Human
accuuugacaaagguaaa

SEQ ID NO: 1789147 - RNA, 17 nt, Human
accuuuguccccaccgc

SEQ ID NO: 1789148 - RNA, 22 nt, Human
uccaggcuccuuuagcgcccag

SEQ ID NO: 1789149 - RNA, 12 nt, Human
uccaggcuccuu

SEQ ID NO: 1789150 - RNA, 20 nt, Human
uccaggcugggagagccuuc

SEQ ID NO: 1789151 - RNA, 21 nt, Human
uccaggcugggagagccuucc

SEQ ID NO: 1789152 - RNA, 10 nt, Human
uccaggcucc

SEQ ID NO: 1789153 - RNA, 23 nt, Human
uccaggcugggagagccuuccag

SEQ ID NO: 1789154 - RNA, 15 nt, Human
acgaauauugcugau

SEQ ID NO: 1789155 - RNA, 18 nt, Human
acgaauauugcugauggu

SEQ ID NO: 1789156 - RNA, 14 nt, Human
uccagaauuuccca

SEQ ID NO: 1789157 - RNA, 15 nt, Human
uccagaauuucccaa

SEQ ID NO: 1789158 - RNA, 13 nt, Human
uccagaccccugg

SEQ ID NO: 1789159 - RNA, 20 nt, Human
uccagccugcugccugcuuu

SEQ ID NO: 1789160 - RNA, 11 nt, Human
uccagccuggg

SEQ ID NO: 1789161 - RNA, 15 nt, Human
ucauauuuacuucuu

SEQ ID NO: 1789162 - RNA, 23 nt, Human
ucauauuuacuucuuauacauuu

SEQ ID NO: 1789163 - RNA, 16 nt, Human
accgagucucuucucc

SEQ ID NO: 1789164 - RNA, 17 nt, Human
accgagucucuucucca

SEQ ID NO: 1789165 - RNA, 16 nt, Human
ucauauuuacuucuua

SEQ ID NO: 1789166 - RNA, 20 nt, Human
ucauauuuuaaacagaggau

SEQ ID NO: 1789167 - RNA, 21 nt, Human
ucauaguaugguggcuggguu

SEQ ID NO: 1789168 - RNA, 18 nt, Human
ucauauaagauucauauu

SEQ ID NO: 1789169 - RNA, 19 nt, Human
ucauaguaugguggcuggg

SEQ ID NO: 1789170 - RNA, 18 nt, Human
ucauaguaugguggcugg

SEQ ID NO: 1789171 - RNA, 15 nt, Human
ucauaguaugguggc

SEQ ID NO: 1789172 - RNA, 14 nt, Human
ucauaaccuagccu

SEQ ID NO: 1789173 - RNA, 17 nt, Human
ucaguuuuugugaaaag

SEQ ID NO: 1789174 - RNA, 16 nt, Human
ucaguuuucaggagug

SEQ ID NO: 1789175 - RNA, 15 nt, Human
ucaguuuuugugaaa

SEQ ID NO: 1789176 - RNA, 11 nt, Human
ucaguggcagc

SEQ ID NO: 1789177 - RNA, 16 nt, Human
ucagugccuuauggaa

SEQ ID NO: 1789178 - RNA, 18 nt, Human
ucagugccuuauggaaca

SEQ ID NO: 1789179 - RNA, 13 nt, Human
ucaguggcagcug

SEQ ID NO: 1789180 - RNA, 12 nt, Human
ucaguggcagcu

SEQ ID NO: 1789181 - RNA, 16 nt, Human
ucaguggggaggggcu

SEQ ID NO: 1789182 - RNA, 12 nt, Human
ucagugccacua

SEQ ID NO: 1789183 - RNA, 16 nt, Human
ucagugccaaaaacaa

SEQ ID NO: 1789184 - RNA, 17 nt, Human
accgaaaacguggcugc

SEQ ID NO: 1789185 - RNA, 19 nt, Human
accgaaaacguggcugcuu

SEQ ID NO: 1789186 - RNA, 20 nt, Human
ucagugcccuccaggauaga

SEQ ID NO: 1789187 - RNA, 9 nt, Human
ucagugccu

SEQ ID NO: 1789188 - RNA, 10 nt, Human
ucagugccuu

SEQ ID NO: 1789189 - RNA, 11 nt, Human
ucagugccuua

SEQ ID NO: 1789190 - RNA, 12 nt, Human
ucagugccuuau

SEQ ID NO: 1789191 - RNA, 14 nt, Human
ucagugccuuaugg

SEQ ID NO: 1789192 - RNA, 15 nt, Human
ucagugccuuaugga

SEQ ID NO: 1789193 - RNA, 17 nt, Human
accgcagacaggaccag

SEQ ID NO: 1789194 - RNA, 12 nt, Human
accgcagacagg

SEQ ID NO: 1789195 - RNA, 16 nt, Human
accgcagacaggacca

SEQ ID NO: 1789196 - RNA, 20 nt, Human
accucccacaaaggagagcu

SEQ ID NO: 1789197 - RNA, 11 nt, Human
ucaugauuuuu

SEQ ID NO: 1789198 - RNA, 14 nt, Human
ucaugcaaacuuua

SEQ ID NO: 1789199 - RNA, 13 nt, Human
ucaucuaggauuu

SEQ ID NO: 1789200 - RNA, 13 nt, Human
ucauccauccagg

SEQ ID NO: 1789201 - RNA, 17 nt, Human
ucaugugaaaucauuca

SEQ ID NO: 1789202 - RNA, 16 nt, Human
ucaugugaaaucauuc

SEQ ID NO: 1789203 - RNA, 23 nt, Human
ucaugcaaacuuuauuuuguguu

SEQ ID NO: 1789204 - RNA, 15 nt, Human
ucagcaaaagaugcu

SEQ ID NO: 1789205 - RNA, 18 nt, Human
accaguguuguggauuua

SEQ ID NO: 1789206 - RNA, 21 nt, Human
ucagauuugaacucuucaauc

SEQ ID NO: 1789207 - RNA, 12 nt, Human
ucagauuugaac

SEQ ID NO: 1789208 - RNA, 22 nt, Human
accccagccccaaaacucuccu

SEQ ID NO: 1789209 - RNA, 13 nt, Human
accccagccccaa

SEQ ID NO: 1789210 - RNA, 17 nt, Human
accccacacacgccaga

SEQ ID NO: 1789211 - RNA, 23 nt, Human
acccaggagccccgaggccuucu

SEQ ID NO: 1789212 - RNA, 19 nt, Human
acccaggagccccgaggcc

SEQ ID NO: 1789213 - RNA, 17 nt, Human
ucagcccucccugcccc

SEQ ID NO: 1789214 - RNA, 13 nt, Human
ucagcccucccug

SEQ ID NO: 1789215 - RNA, 14 nt, Human
ucagcccucccugc

SEQ ID NO: 1789216 - RNA, 15 nt, Human
ucagcccucccugcc

SEQ ID NO: 1789217 - RNA, 16 nt, Human
ucagcccucccugccc

SEQ ID NO: 1789218 - RNA, 15 nt, Human
accccugagcuugca

SEQ ID NO: 1789219 - RNA, 18 nt, Human
accccaucucuacaaaaa

SEQ ID NO: 1789220 - RNA, 23 nt, Human
ucagcggggacagcuccuucugu

SEQ ID NO: 1789221 - RNA, 21 nt, Human
ucagcggggacagcuccuucu

SEQ ID NO: 1789222 - RNA, 20 nt, Human
ucagcggggacagcuccuuc

SEQ ID NO: 1789223 - RNA, 19 nt, Human
ucagcggggacagcuccuu

SEQ ID NO: 1789224 - RNA, 12 nt, Human
ucagcuccagcu

SEQ ID NO: 1789225 - RNA, 18 nt, Human
accccuggcuuuucacug

SEQ ID NO: 1789226 - RNA, 19 nt, Human
accccuggcuuuucacugc

SEQ ID NO: 1789227 - RNA, 20 nt, Human
accccuggcuuuucacugcu

SEQ ID NO: 1789228 - RNA, 21 nt, Human
accccuggcuuuucacugcug

SEQ ID NO: 1789229 - RNA, 17 nt, Human
acccgggaggcagaggu

SEQ ID NO: 1789230 - RNA, 12 nt, Human
acccgggaaggg

SEQ ID NO: 1789231 - RNA, 13 nt, Human
acccgggaagggg

SEQ ID NO: 1789232 - RNA, 20 nt, Human
acccggccccugcugguuca

SEQ ID NO: 1789233 - RNA, 17 nt, Human
acccggccccugcuggu

SEQ ID NO: 1789234 - RNA, 22 nt, Human
acccggccccugcugguucagg

SEQ ID NO: 1789235 - RNA, 16 nt, Human
acccggccccugcugg

SEQ ID NO: 1789236 - RNA, 15 nt, Human
acccggccccugcug

SEQ ID NO: 1789237 - RNA, 14 nt, Human
acccggccccugcu

SEQ ID NO: 1789238 - RNA, 18 nt, Human
acccggaggggccuggca

SEQ ID NO: 1789239 - RNA, 21 nt, Human
acccggaggggccuggcagcc

SEQ ID NO: 1789240 - RNA, 22 nt, Human
ucagguaacaggcagauacagg

SEQ ID NO: 1789241 - RNA, 21 nt, Human
ucagguaacaggcagauacag

SEQ ID NO: 1789242 - RNA, 23 nt, Human
ucagguaacaggcagauacagga

SEQ ID NO: 1789243 - RNA, 16 nt, Human
ucaggguuggccccug

SEQ ID NO: 1789244 - RNA, 19 nt, Human
ucagggucccugguggcag

SEQ ID NO: 1789245 - RNA, 23 nt, Human
ucaggccaggcccucugcccacu

SEQ ID NO: 1789246 - RNA, 22 nt, Human
ucagcuuguaaauagcucaggu

SEQ ID NO: 1789247 - RNA, 21 nt, Human
ucagcuuguaaauagcucagg

SEQ ID NO: 1789248 - RNA, 15 nt, Human
ucagcuccagcucac

SEQ ID NO: 1789249 - RNA, 14 nt, Human
ucagcuccagcuca

SEQ ID NO: 1789250 - RNA, 21 nt, Human
ucaggccaggcccucugccca

SEQ ID NO: 1789251 - RNA, 22 nt, Human
ucaggccaggcccucugcccac

SEQ ID NO: 1789252 - RNA, 20 nt, Human
ucaggccaggcccucugccc

SEQ ID NO: 1789253 - RNA, 12 nt, Human
acccuucuuuuc

SEQ ID NO: 1789254 - RNA, 17 nt, Human
acccugcccugugggcc

SEQ ID NO: 1789255 - RNA, 22 nt, Human
acccugcccugugggcccccaa

SEQ ID NO: 1789256 - RNA, 15 nt, Human
acccugaggcccaga

SEQ ID NO: 1789257 - RNA, 16 nt, Human
acccugaggcccagag

SEQ ID NO: 1789258 - RNA, 17 nt, Human
acccugaggcccagagg

SEQ ID NO: 1789259 - RNA, 15 nt, Human
acccugcccuguggg

SEQ ID NO: 1789260 - RNA, 15 nt, Human
accgaaaacguggcu

SEQ ID NO: 1789261 - RNA, 17 nt, Human
acccuugccgucuaccu

SEQ ID NO: 1789262 - RNA, 20 nt, Human
acccuuguggucccacccca

SEQ ID NO: 1789263 - RNA, 23 nt, Human
acccuuguggucccaccccacac

SEQ ID NO: 1789264 - RNA, 19 nt, Human
acccucgaggcggaucuuu

SEQ ID NO: 1789265 - RNA, 16 nt, Human
acccugaaagcccuga

SEQ ID NO: 1789266 - RNA, 18 nt, Human
acccugaaagcccugagc

SEQ ID NO: 1789267 - RNA, 14 nt, Human
acccugaggcccag

SEQ ID NO: 1789268 - RNA, 14 nt, Human
ucaaauuucuaaau

SEQ ID NO: 1789269 - RNA, 13 nt, Human
ucaaauuucuaaa

SEQ ID NO: 1789270 - RNA, 20 nt, Human
ucaacugcaucaagauguga

SEQ ID NO: 1789271 - RNA, 15 nt, Human
ucaaccauuccccau

SEQ ID NO: 1789272 - RNA, 18 nt, Human
ucaaccauuccccauggg

SEQ ID NO: 1789273 - RNA, 14 nt, Human
ucaaccagcagaug

SEQ ID NO: 1789274 - RNA, 14 nt, Human
acauuccugaugcu

SEQ ID NO: 1789275 - RNA, 23 nt, Human
acauguaauuaaguacuauguau

SEQ ID NO: 1789276 - RNA, 15 nt, Human
acauguccaagaagc

SEQ ID NO: 1789277 - RNA, 19 nt, Human
acauguccaagaagcccag

SEQ ID NO: 1789278 - RNA, 14 nt, Human
acauggaaguacua

SEQ ID NO: 1789279 - RNA, 15 nt, Human
acauguaauuaagua

SEQ ID NO: 1789280 - RNA, 17 nt, Human
acauguaauuaaguacu

SEQ ID NO: 1789281 - RNA, 19 nt, Human
acauguaauuaaguacuau

SEQ ID NO: 1789282 - RNA, 21 nt, Human
acauguaauuaaguacuaugu

SEQ ID NO: 1789283 - RNA, 22 nt, Human
acauguaauuaaguacuaugua

SEQ ID NO: 1789284 - RNA, 20 nt, Human
acaugaauauuuaguguuca

SEQ ID NO: 1789285 - RNA, 12 nt, Human
acagucccugcc

SEQ ID NO: 1789286 - RNA, 20 nt, Human
acaugagguacugagaguga

SEQ ID NO: 1789287 - RNA, 21 nt, Human
acaugcuacacacugcauguu

SEQ ID NO: 1789288 - RNA, 15 nt, Human
acaugcuacacacug

SEQ ID NO: 1789289 - RNA, 23 nt, Human
acaugagguacugagagugaaca

SEQ ID NO: 1789290 - RNA, 22 nt, Human
ucaaguccucuuuucugagagg

SEQ ID NO: 1789291 - RNA, 22 nt, Human
ucaauaucuuuuuuuuaauaaa

SEQ ID NO: 1789292 - RNA, 23 nt, Human
ucaaugaaugaaugaauggcuaa

SEQ ID NO: 1789293 - RNA, 21 nt, Human
acauuuuuuaaaugcaccugg

SEQ ID NO: 1789294 - RNA, 17 nt, Human
acauuuuuuaaaugcac

SEQ ID NO: 1789295 - RNA, 16 nt, Human
acauuuuuuaaaugca

SEQ ID NO: 1789296 - RNA, 14 nt, Human
acauuuuuuaaaug

SEQ ID NO: 1789297 - RNA, 11 nt, Human
acauuuuguau

SEQ ID NO: 1789298 - RNA, 23 nt, Human
acauuuuuaagugcugcauuuaa

SEQ ID NO: 1789299 - RNA, 22 nt, Human
acauuuuuaagugcugcauuua

SEQ ID NO: 1789300 - RNA, 21 nt, Human
acauuuuuaagugcugcauuu

SEQ ID NO: 1789301 - RNA, 14 nt, Human
acauugcaauagaa

SEQ ID NO: 1789302 - RNA, 16 nt, Human
acauugcaauagaaau

SEQ ID NO: 1789303 - RNA, 15 nt, Human
acauugcaauagaaa

SEQ ID NO: 1789304 - RNA, 20 nt, Human
acauuuuauuuuauuaugca

SEQ ID NO: 1789305 - RNA, 19 nt, Human
acauuuuauuuuauuaugc

SEQ ID NO: 1789306 - RNA, 14 nt, Human
acauuuuauuuuau

SEQ ID NO: 1789307 - RNA, 18 nt, Human
acauuuuauuuuauuaug

SEQ ID NO: 1789308 - RNA, 23 nt, Human
ucacuguugcccaggcuggcgug

SEQ ID NO: 1789309 - RNA, 13 nt, Human
ucacugcauccuc

SEQ ID NO: 1789310 - RNA, 15 nt, Human
ucacugcagccucaa

SEQ ID NO: 1789311 - RNA, 14 nt, Human
ucacugcagccuca

SEQ ID NO: 1789312 - RNA, 22 nt, Human
ucacugagacagcccgggcucu

SEQ ID NO: 1789313 - RNA, 17 nt, Human
ucacugagacagcccgg

SEQ ID NO: 1789314 - RNA, 21 nt, Human
ucacugagacagcccgggcuc

SEQ ID NO: 1789315 - RNA, 17 nt, Human
ucacuauguugcccagg

SEQ ID NO: 1789316 - RNA, 16 nt, Human
ucacugagacagcccg

SEQ ID NO: 1789317 - RNA, 19 nt, Human
ucacuaucccggcugcccu

SEQ ID NO: 1789318 - RNA, 20 nt, Human
ucacuaucccggcugcccuu

SEQ ID NO: 1789319 - RNA, 17 nt, Human
accaguguuguggauuu

SEQ ID NO: 1789320 - RNA, 15 nt, Human
accaguguuguggau

SEQ ID NO: 1789321 - RNA, 10 nt, Human
ucacuugagu

SEQ ID NO: 1789322 - RNA, 23 nt, Human
ucacuugaacccgggaggcagag

SEQ ID NO: 1789323 - RNA, 18 nt, Human
ucacguaaagcuagaaau

SEQ ID NO: 1789324 - RNA, 16 nt, Human
ucacuaggcuucuggu

SEQ ID NO: 1789325 - RNA, 20 nt, Human
ucacguaaagcuagaaauga

SEQ ID NO: 1789326 - RNA, 19 nt, Human
ucacguaaagcuagaaaug

SEQ ID NO: 1789327 - RNA, 22 nt, Human
accagcgugugacuacuccccc

SEQ ID NO: 1789328 - RNA, 15 nt, Human
accacuacauucugu

SEQ ID NO: 1789329 - RNA, 16 nt, Human
accacuacauucuguu

SEQ ID NO: 1789330 - RNA, 17 nt, Human
accacuacauucuguua

SEQ ID NO: 1789331 - RNA, 17 nt, Human
ucacaaaggaugcccaa

SEQ ID NO: 1789332 - RNA, 16 nt, Human
ucaauucuugccaaau

SEQ ID NO: 1789333 - RNA, 14 nt, Human
ucacaaccuucugu

SEQ ID NO: 1789334 - RNA, 20 nt, Human
ucacagaugggugcuuggag

SEQ ID NO: 1789335 - RNA, 23 nt, Human
ucacagaugugugauucacagug

SEQ ID NO: 1789336 - RNA, 21 nt, Human
ucacagaugugugauucacag

SEQ ID NO: 1789337 - RNA, 13 nt, Human
ucacagccucuga

SEQ ID NO: 1789338 - RNA, 16 nt, Human
ucacaguucucuccuu

SEQ ID NO: 1789339 - RNA, 20 nt, Human
ucacaguucucuccuucuuc

SEQ ID NO: 1789340 - RNA, 21 nt, Human
ucaccauguuggccaggcugg

SEQ ID NO: 1789341 - RNA, 22 nt, Human
ucaccauguuggccaggcuggu

SEQ ID NO: 1789342 - RNA, 15 nt, Human
ucaccauguuggcca

SEQ ID NO: 1789343 - RNA, 19 nt, Human
accacaucuugcucugcug

SEQ ID NO: 1789344 - RNA, 18 nt, Human
accacaucuugcucugcu

SEQ ID NO: 1789345 - RNA, 17 nt, Human
accacaucuugcucugc

SEQ ID NO: 1789346 - RNA, 18 nt, Human
accacaugugcacaugca

SEQ ID NO: 1789347 - RNA, 19 nt, Human
accaccaacuacuaccugu

SEQ ID NO: 1789348 - RNA, 24 nt, Human
accacauuggagauguuuaguaau

SEQ ID NO: 1789349 - RNA, 20 nt, Human
accaccacacccagcccacu

SEQ ID NO: 1789350 - RNA, 15 nt, Human
accaccacacccagc

SEQ ID NO: 1789351 - RNA, 20 nt, Human
uaacgauaaaagacagugaa

SEQ ID NO: 1789352 - RNA, 18 nt, Human
uaacauggugugcuucuu

SEQ ID NO: 1789353 - RNA, 20 nt, Human
uaacuagaacugaauuuugu

SEQ ID NO: 1789354 - RNA, 17 nt, Human
uaacuagaacugaauuu

SEQ ID NO: 1789355 - RNA, 14 nt, Human
uaacuagaacugaa

SEQ ID NO: 1789356 - RNA, 12 nt, Human
uaacuagaacug

SEQ ID NO: 1789357 - RNA, 14 nt, Human
uaacuucaccauau

SEQ ID NO: 1789358 - RNA, 17 nt, Human
uaacuuccaauuuacau

SEQ ID NO: 1789359 - RNA, 21 nt, Human
uaacuucacauauugauuucc

SEQ ID NO: 1789360 - RNA, 18 nt, Human
uaagaagugaaaaucuac

SEQ ID NO: 1789361 - RNA, 13 nt, Human
uaagacaaauaug

SEQ ID NO: 1789362 - RNA, 16 nt, Human
uaacuuucugaaauaa

SEQ ID NO: 1789363 - RNA, 23 nt, Human
uaacauggacaugaucuucuuua

SEQ ID NO: 1789364 - RNA, 17 nt, Human
uaacauguaauuaagua

SEQ ID NO: 1789365 - RNA, 18 nt, Human
uaacauggacaugaucuu

SEQ ID NO: 1789366 - RNA, 18 nt, Human
aauauauuuuaagacgaa

SEQ ID NO: 1789367 - RNA, 17 nt, Human
uaacaguggacaaaguu

SEQ ID NO: 1789368 - RNA, 13 nt, Human
aauaguuggcuag

SEQ ID NO: 1789369 - RNA, 14 nt, Human
aauaguuguugauu

SEQ ID NO: 1789370 - RNA, 14 nt, Human
aauauauuuuaaga

SEQ ID NO: 1789371 - RNA, 15 nt, Human
aauauauuuuaagac

SEQ ID NO: 1789372 - RNA, 22 nt, Human
aauaguggugugauuuggggau

SEQ ID NO: 1789373 - RNA, 16 nt, Human
aauaguggugugauuu

SEQ ID NO: 1789374 - RNA, 14 nt, Human
uaagauuccagaga

SEQ ID NO: 1789375 - RNA, 21 nt, Human
uaagauuccagagaguggcuc

SEQ ID NO: 1789376 - RNA, 22 nt, Human
uaagcuguuacugucuucagua

SEQ ID NO: 1789377 - RNA, 18 nt, Human
uaagcacacuugacauca

SEQ ID NO: 1789378 - RNA, 12 nt, Human
aauauuccagag

SEQ ID NO: 1789379 - RNA, 15 nt, Human
aauauuccugcauuu

SEQ ID NO: 1789380 - RNA, 15 nt, Human
uaagagaaaugagcu

SEQ ID NO: 1789381 - RNA, 17 nt, Human
aauaugcacacauuuuu

SEQ ID NO: 1789382 - RNA, 16 nt, Human
aauaugcacacauuuu

SEQ ID NO: 1789383 - RNA, 22 nt, Human
aauaugcacacauuuuuuaaau

SEQ ID NO: 1789384 - RNA, 12 nt, Human
aauauuuagugu

SEQ ID NO: 1789385 - RNA, 17 nt, Human
aauauugauaugcuuau

SEQ ID NO: 1789386 - RNA, 23 nt, Human
aauauuguacaguuuuuauugcu

SEQ ID NO: 1789387 - RNA, 17 nt, Human
aauauuguacaguuuuu

SEQ ID NO: 1789388 - RNA, 15 nt, Human
aauauuguacaguuu

SEQ ID NO: 1789389 - RNA, 14 nt, Human
aauccuggggaaca

SEQ ID NO: 1789390 - RNA, 21 nt, Human
aauccuggggaacauagaacu

SEQ ID NO: 1789391 - RNA, 15 nt, Human
aaucgaccugccucg

SEQ ID NO: 1789392 - RNA, 12 nt, Human
aauccgcccauc

SEQ ID NO: 1789393 - RNA, 23 nt, Human
aaucauuaggugugacugaauuu

SEQ ID NO: 1789394 - RNA, 17 nt, Human
aaucauuaggugugacu

SEQ ID NO: 1789395 - RNA, 15 nt, Human
aaucauuagguguga

SEQ ID NO: 1789396 - RNA, 19 nt, Human
aaucuuauaauuuaaaaua

SEQ ID NO: 1789397 - RNA, 19 nt, Human
aaucuacacuccagugaga

SEQ ID NO: 1789398 - RNA, 16 nt, Human
aaucugggccagaauu

SEQ ID NO: 1789399 - RNA, 17 nt, Human
aaucugggccagaauuu

SEQ ID NO: 1789400 - RNA, 12 nt, Human
uaauaaacacuc

SEQ ID NO: 1789401 - RNA, 18 nt, Human
uaauaaacacucuugaaa

SEQ ID NO: 1789402 - RNA, 13 nt, Human
uaaguacuaugua

SEQ ID NO: 1789403 - RNA, 16 nt, Human
uaaguacuauguauca

SEQ ID NO: 1789404 - RNA, 17 nt, Human
uaaguacuauguaucaa

SEQ ID NO: 1789405 - RNA, 19 nt, Human
uaaguacuauguaucaaug

SEQ ID NO: 1789406 - RNA, 20 nt, Human
uaaguauucuuauuuaauga

SEQ ID NO: 1789407 - RNA, 19 nt, Human
uaaguauucuuauuuaaug

SEQ ID NO: 1789408 - RNA, 18 nt, Human
uaaugucacaggcagguc

SEQ ID NO: 1789409 - RNA, 19 nt, Human
uaauguaucaaauacauuu

SEQ ID NO: 1789410 - RNA, 13 nt, Human
uaauguacugcau

SEQ ID NO: 1789411 - RNA, 15 nt, Human
uaaugaaugcauaaa

SEQ ID NO: 1789412 - RNA, 15 nt, Human
aaucuuuaauuuuac

SEQ ID NO: 1789413 - RNA, 16 nt, Human
aaucuuuaauuuuaca

SEQ ID NO: 1789414 - RNA, 22 nt, Human
aaugaaugucagugugacugau

SEQ ID NO: 1789415 - RNA, 13 nt, Human
aaugacacagucu

SEQ ID NO: 1789416 - RNA, 17 nt, Human
aaugaaugcauaaaaug

SEQ ID NO: 1789417 - RNA, 22 nt, Human
aaugaauggcuaagcaaaaugu

SEQ ID NO: 1789418 - RNA, 13 nt, Human
aaugaaugucagu

SEQ ID NO: 1789419 - RNA, 13 nt, Human
aaucuuucugcag

SEQ ID NO: 1789420 - RNA, 17 nt, Human
aaugaaacauuuuguca

SEQ ID NO: 1789421 - RNA, 16 nt, Human
aaugaaagacuguaca

SEQ ID NO: 1789422 - RNA, 17 nt, Human
aaugaaagacuguacaa

SEQ ID NO: 1789423 - RNA, 17 nt, Human
aaugaaaccugugucuc

SEQ ID NO: 1789424 - RNA, 17 nt, Human
uaaugaaugaaacauuu

SEQ ID NO: 1789425 - RNA, 16 nt, Human
uaauagacaauuuauu

SEQ ID NO: 1789426 - RNA, 14 nt, Human
uaauagacaauuua

SEQ ID NO: 1789427 - RNA, 19 nt, Human
uaauacaccacuacauucu

SEQ ID NO: 1789428 - RNA, 18 nt, Human
uaauacaccacuacauuc

SEQ ID NO: 1789429 - RNA, 16 nt, Human
uaauacaccacuacau

SEQ ID NO: 1789430 - RNA, 19 nt, Human
uaauagcgucauaacuaga

SEQ ID NO: 1789431 - RNA, 22 nt, Human
uaauagacaauuuauuauggca

SEQ ID NO: 1789432 - RNA, 18 nt, Human
uaauagacaauuuauuau

SEQ ID NO: 1789433 - RNA, 15 nt, Human
aauuagccaagugug

SEQ ID NO: 1789434 - RNA, 11 nt, Human
aauuacaggaa

SEQ ID NO: 1789435 - RNA, 23 nt, Human
uaccugccaggaagccagcaggc

SEQ ID NO: 1789436 - RNA, 18 nt, Human
uaccugccaggaagccag

SEQ ID NO: 1789437 - RNA, 20 nt, Human
uaccugccaggaagccagca

SEQ ID NO: 1789438 - RNA, 10 nt, Human
uaccuguccc

SEQ ID NO: 1789439 - RNA, 13 nt, Human
uaccugucccccu

SEQ ID NO: 1789440 - RNA, 14 nt, Human
uaccugucccccug

SEQ ID NO: 1789441 - RNA, 16 nt, Human
uaccugucccccugac

SEQ ID NO: 1789442 - RNA, 17 nt, Human
uaccugucccccugaca

SEQ ID NO: 1789443 - RNA, 18 nt, Human
aauuccaagugauugaaa

SEQ ID NO: 1789444 - RNA, 22 nt, Human
aauuccacuuauaggaauugac

SEQ ID NO: 1789445 - RNA, 12 nt, Human
aauuccccagau

SEQ ID NO: 1789446 - RNA, 14 nt, Human
aauuccccacccug

SEQ ID NO: 1789447 - RNA, 16 nt, Human
aauuauuauuuggccc

SEQ ID NO: 1789448 - RNA, 12 nt, Human
uacucuguguca

SEQ ID NO: 1789449 - RNA, 21 nt, Human
uacucugugucagguggggca

SEQ ID NO: 1789450 - RNA, 16 nt, Human
uacuggagaaaaugga

SEQ ID NO: 1789451 - RNA, 19 nt, Human
uacuguaaggcaaucaugg

SEQ ID NO: 1789452 - RNA, 18 nt, Human
uacuguaauuugugauac

SEQ ID NO: 1789453 - RNA, 20 nt, Human
uacuguaauuugugauacaa

SEQ ID NO: 1789454 - RNA, 19 nt, Human
uacuguaauuugugauaca

SEQ ID NO: 1789455 - RNA, 18 nt, Human
uacuguaaggcaaucaug

SEQ ID NO: 1789456 - RNA, 23 nt, Human
uacuguaauuugugauacaaugc

SEQ ID NO: 1789457 - RNA, 21 nt, Human
uacuguacaugaaaacacauu

SEQ ID NO: 1789458 - RNA, 22 nt, Human
uacuguacaugaaaacacauuu

SEQ ID NO: 1789459 - RNA, 21 nt, Human
aauugacccacaagaaaugaa

SEQ ID NO: 1789460 - RNA, 14 nt, Human
aauugacuuauuua

SEQ ID NO: 1789461 - RNA, 22 nt, Human
aauugacccacaagaaaugaaa

SEQ ID NO: 1789462 - RNA, 19 nt, Human
aauugaugggauuugguca

SEQ ID NO: 1789463 - RNA, 12 nt, Human
aauugcauuucc

SEQ ID NO: 1789464 - RNA, 22 nt, Human
uacgccaggggaaaaucagccu

SEQ ID NO: 1789465 - RNA, 18 nt, Human
uacgggaggguaaggcug

SEQ ID NO: 1789466 - RNA, 12 nt, Human
uacguacacauu

SEQ ID NO: 1789467 - RNA, 16 nt, Human
uacguugugcauuugg

SEQ ID NO: 1789468 - RNA, 15 nt, Human
uacguugugcauuug

SEQ ID NO: 1789469 - RNA, 14 nt, Human
uacguacacauuuu

SEQ ID NO: 1789470 - RNA, 13 nt, Human
uacguacacauuu

SEQ ID NO: 1789471 - RNA, 14 nt, Human
uacuauguaucaau

SEQ ID NO: 1789472 - RNA, 22 nt, Human
uacucuccuggaaauauuaaga

SEQ ID NO: 1789473 - RNA, 23 nt, Human
uacucuccuggaaauauuaagaa

SEQ ID NO: 1789474 - RNA, 23 nt, Human
uacuauggcccuggccuagcaua

SEQ ID NO: 1789475 - RNA, 12 nt, Human
uacuauguauca

SEQ ID NO: 1789476 - RNA, 13 nt, Human
uacuauguaucaa

SEQ ID NO: 1789477 - RNA, 13 nt, Human
uacuacuccugua

SEQ ID NO: 1789478 - RNA, 17 nt, Human
uacuacuccuguaggaa

SEQ ID NO: 1789479 - RNA, 20 nt, Human
uacuaucaugucaaacguga

SEQ ID NO: 1789480 - RNA, 12 nt, Human
aauggcagccuu

SEQ ID NO: 1789481 - RNA, 16 nt, Human
aauggcagccuuggca

SEQ ID NO: 1789482 - RNA, 23 nt, Human
aauggcacaaucucggcucacug

SEQ ID NO: 1789483 - RNA, 20 nt, Human
uacagauccccaagccuggc

SEQ ID NO: 1789484 - RNA, 22 nt, Human
uacagacaacaaaccuguuucu

SEQ ID NO: 1789485 - RNA, 19 nt, Human
uacacauuuuauuuuauua

SEQ ID NO: 1789486 - RNA, 22 nt, Human
uacacauuuuauuuuauuaugc

SEQ ID NO: 1789487 - RNA, 21 nt, Human
uacacauuuuauuuuauuaug

SEQ ID NO: 1789488 - RNA, 23 nt, Human
uacacauuuuauuuuauuaugca

SEQ ID NO: 1789489 - RNA, 15 nt, Human
uacacuaaaagguga

SEQ ID NO: 1789490 - RNA, 22 nt, Human
aaugcuguauuagucacagaga

SEQ ID NO: 1789491 - RNA, 13 nt, Human
aaugcccagcccc

SEQ ID NO: 1789492 - RNA, 11 nt, Human
aaugcccagcc

SEQ ID NO: 1789493 - RNA, 12 nt, Human
aaugcccagccc

SEQ ID NO: 1789494 - RNA, 16 nt, Human
aaugcuucaucccuuu

SEQ ID NO: 1789495 - RNA, 20 nt, Human
aauggaaaugggcagagcag

SEQ ID NO: 1789496 - RNA, 21 nt, Human
aauggaaaugggcagagcaga

SEQ ID NO: 1789497 - RNA, 14 nt, Human
aauggaaccacucu

SEQ ID NO: 1789498 - RNA, 23 nt, Human
aauggacguguuaugacuccaga

SEQ ID NO: 1789499 - RNA, 20 nt, Human
aauggacuaacuugucuuug

SEQ ID NO: 1789500 - RNA, 22 nt, Human
aaugcacuuuguucuggcucuu

SEQ ID NO: 1789501 - RNA, 21 nt, Human
uacaaugcugugcccuaaagu

SEQ ID NO: 1789502 - RNA, 18 nt, Human
aaugaccuuucaauagga

SEQ ID NO: 1789503 - RNA, 16 nt, Human
aaugaccuuucaauag

SEQ ID NO: 1789504 - RNA, 17 nt, Human
aaugaccuuucaauagg

SEQ ID NO: 1789505 - RNA, 20 nt, Human
aaugaccuuucaauaggaaa

SEQ ID NO: 1789506 - RNA, 21 nt, Human
aaugcacuuuguucuggcucu

SEQ ID NO: 1789507 - RNA, 21 nt, Human
aauuaagaaaggauaaaguug

SEQ ID NO: 1789508 - RNA, 22 nt, Human
aauuaaucugggccagaauuuc

SEQ ID NO: 1789509 - RNA, 13 nt, Human
uacauucuguuaa

SEQ ID NO: 1789510 - RNA, 11 nt, Human
aauuaacuuuu

SEQ ID NO: 1789511 - RNA, 16 nt, Human
uacaggugugagucac

SEQ ID NO: 1789512 - RNA, 24 nt, Human
uacauaaugcgugcauaccacuuu

SEQ ID NO: 1789513 - RNA, 23 nt, Human
uacauaaugcgugcauaccacuu

SEQ ID NO: 1789514 - RNA, 22 nt, Human
uacauauaagugauugcugguu

SEQ ID NO: 1789515 - RNA, 15 nt, Human
aaugugaaacuggau

SEQ ID NO: 1789516 - RNA, 14 nt, Human
aaugugaaacugga

SEQ ID NO: 1789517 - RNA, 19 nt, Human
aaugugaaaagaaaaauga

SEQ ID NO: 1789518 - RNA, 11 nt, Human
aaugugugugu

SEQ ID NO: 1789519 - RNA, 19 nt, Human
aauguauguguaaguauuc

SEQ ID NO: 1789520 - RNA, 18 nt, Human
aauguaucaaauacauuu

SEQ ID NO: 1789521 - RNA, 20 nt, Human
aauguauguguaaguauucu

SEQ ID NO: 1789522 - RNA, 23 nt, Human
acaggcugggcuucaguggcagc

SEQ ID NO: 1789523 - RNA, 22 nt, Human
acaggcugggcuucaguggcag

SEQ ID NO: 1789524 - RNA, 12 nt, Human
acaggcugggcu

SEQ ID NO: 1789525 - RNA, 13 nt, Human
acaggcuccugcc

SEQ ID NO: 1789526 - RNA, 15 nt, Human
acaggcuccugccac

SEQ ID NO: 1789527 - RNA, 21 nt, Human
acaggcuccugccaccacgcc

SEQ ID NO: 1789528 - RNA, 22 nt, Human
acaggcuccugccaccacgccc

SEQ ID NO: 1789529 - RNA, 21 nt, Human
acagggaggacgcucucuggc

SEQ ID NO: 1789530 - RNA, 20 nt, Human
acagggaggacgcucucugg

SEQ ID NO: 1789531 - RNA, 20 nt, Human
acagggcacaccgggcacuc

SEQ ID NO: 1789532 - RNA, 12 nt, Human
acagggcacacc

SEQ ID NO: 1789533 - RNA, 21 nt, Human
uauucagcucauggacuucug

SEQ ID NO: 1789534 - RNA, 22 nt, Human
acaggcgugagccaccgugccu

SEQ ID NO: 1789535 - RNA, 14 nt, Human
uauucauaauuauu

SEQ ID NO: 1789536 - RNA, 12 nt, Human
acaggcuccugc

SEQ ID NO: 1789537 - RNA, 16 nt, Human
uauucaggaagcucag

SEQ ID NO: 1789538 - RNA, 14 nt, Human
uauucaggaagcuc

SEQ ID NO: 1789539 - RNA, 20 nt, Human
uauucaguaauaacucuacc

SEQ ID NO: 1789540 - RNA, 13 nt, Human
uauuacuucugcu

SEQ ID NO: 1789541 - RNA, 14 nt, Human
uauuacuucugcua

SEQ ID NO: 1789542 - RNA, 21 nt, Human
uauuagugaccucagcuuuga

SEQ ID NO: 1789543 - RNA, 19 nt, Human
uauuagugaccucagcuuu

SEQ ID NO: 1789544 - RNA, 20 nt, Human
acaggcauguucucugagga

SEQ ID NO: 1789545 - RNA, 19 nt, Human
acaggcauguucucugagg

SEQ ID NO: 1789546 - RNA, 18 nt, Human
acaggcauguucucugag

SEQ ID NO: 1789547 - RNA, 15 nt, Human
acaggcauguucucu

SEQ ID NO: 1789548 - RNA, 22 nt, Human
acaggcauguucucugaggaca

SEQ ID NO: 1789549 - RNA, 14 nt, Human
uaugugaaacaugu

SEQ ID NO: 1789550 - RNA, 17 nt, Human
uaugugaaacauguuuc

SEQ ID NO: 1789551 - RNA, 23 nt, Human
uaugugccagauuuaugcauauu

SEQ ID NO: 1789552 - RNA, 20 nt, Human
uauguggaguucaucuugaa

SEQ ID NO: 1789553 - RNA, 18 nt, Human
acaggaaaagcugcugac

SEQ ID NO: 1789554 - RNA, 17 nt, Human
acaggaaaagcugcuga

SEQ ID NO: 1789555 - RNA, 16 nt, Human
acaggaaaagcugcug

SEQ ID NO: 1789556 - RNA, 15 nt, Human
acaggaaaagcugcu

SEQ ID NO: 1789557 - RNA, 13 nt, Human
acaggaaguacug

SEQ ID NO: 1789558 - RNA, 17 nt, Human
acaggaaguagaggagg

SEQ ID NO: 1789559 - RNA, 11 nt, Human
acagccuggca

SEQ ID NO: 1789560 - RNA, 13 nt, Human
acagcuaacaugg

SEQ ID NO: 1789561 - RNA, 14 nt, Human
acaggaucagucug

SEQ ID NO: 1789562 - RNA, 16 nt, Human
acaggagugagcacua

SEQ ID NO: 1789563 - RNA, 16 nt, Human
acaggcagguccaggg

SEQ ID NO: 1789564 - RNA, 14 nt, Human
acaggcagguccag

SEQ ID NO: 1789565 - RNA, 14 nt, Human
acaggcauguucuc

SEQ ID NO: 1789566 - RNA, 14 nt, Human
acaggacucugccu

SEQ ID NO: 1789567 - RNA, 23 nt, Human
acaggaccagggauuuccaugau

SEQ ID NO: 1789568 - RNA, 13 nt, Human
acagacccugccc

SEQ ID NO: 1789569 - RNA, 14 nt, Human
acagacccugcccu

SEQ ID NO: 1789570 - RNA, 15 nt, Human
acagacccugcccug

SEQ ID NO: 1789571 - RNA, 16 nt, Human
uauauuuaguaucuuu

SEQ ID NO: 1789572 - RNA, 17 nt, Human
uauaaguguguguuuuu

SEQ ID NO: 1789573 - RNA, 23 nt, Human
uauaaguguguguuuuucauaaa

SEQ ID NO: 1789574 - RNA, 17 nt, Human
acagaaauguacagcaa

SEQ ID NO: 1789575 - RNA, 16 nt, Human
acagaaauguacagca

SEQ ID NO: 1789576 - RNA, 14 nt, Human
acagaaauguacag

SEQ ID NO: 1789577 - RNA, 20 nt, Human
acagaaaauggaagacagcu

SEQ ID NO: 1789578 - RNA, 17 nt, Human
acagaaaauucuucucc

SEQ ID NO: 1789579 - RNA, 18 nt, Human
acagaaaauucuucucca

SEQ ID NO: 1789580 - RNA, 18 nt, Human
uaucaaguauuauaccuu

SEQ ID NO: 1789581 - RNA, 18 nt, Human
acagagaaaguacuucuc

SEQ ID NO: 1789582 - RNA, 11 nt, Human
acagagaaagu

SEQ ID NO: 1789583 - RNA, 13 nt, Human
uaucucccccagc

SEQ ID NO: 1789584 - RNA, 16 nt, Human
uaucucccccagcccc

SEQ ID NO: 1789585 - RNA, 14 nt, Human
uaucucccccagcc

SEQ ID NO: 1789586 - RNA, 12 nt, Human
acagccuggcac

SEQ ID NO: 1789587 - RNA, 23 nt, Human
uauggcuuuugugcauuaucuag

SEQ ID NO: 1789588 - RNA, 15 nt, Human
uaugcuuauacacuu

SEQ ID NO: 1789589 - RNA, 17 nt, Human
uauggcuuuugugcauu

SEQ ID NO: 1789590 - RNA, 21 nt, Human
uauggcuuuugugcauuaucu

SEQ ID NO: 1789591 - RNA, 18 nt, Human
uauggcuuuugugcauua

SEQ ID NO: 1789592 - RNA, 17 nt, Human
uaugccugggcagaagg

SEQ ID NO: 1789593 - RNA, 24 nt, Human
uaugcauuugaaaauuuugauguu

SEQ ID NO: 1789594 - RNA, 23 nt, Human
uaugcauuugaaaauuuugaugu

SEQ ID NO: 1789595 - RNA, 11 nt, Human
uaugcauuuga

SEQ ID NO: 1789596 - RNA, 18 nt, Human
acagccguuuguucccca

SEQ ID NO: 1789597 - RNA, 18 nt, Human
acagcccgggcucugccu

SEQ ID NO: 1789598 - RNA, 19 nt, Human
acagcccgggcucugccuc

SEQ ID NO: 1789599 - RNA, 20 nt, Human
acagcccgggcucugccucc

SEQ ID NO: 1789600 - RNA, 21 nt, Human
acagcaaggagauuuacaacu

SEQ ID NO: 1789601 - RNA, 17 nt, Human
acagcccgggcucugcc

SEQ ID NO: 1789602 - RNA, 22 nt, Human
acagaucucugcuuuggaaauc

SEQ ID NO: 1789603 - RNA, 18 nt, Human
acagauccccaagccugg

SEQ ID NO: 1789604 - RNA, 17 nt, Human
acagauccccaagccug

SEQ ID NO: 1789605 - RNA, 15 nt, Human
acagagcccacgccc

SEQ ID NO: 1789606 - RNA, 18 nt, Human
acagagcccacgccccca

SEQ ID NO: 1789607 - RNA, 19 nt, Human
acagagcccacgcccccac

SEQ ID NO: 1789608 - RNA, 14 nt, Human
acagauuugagcuc

SEQ ID NO: 1789609 - RNA, 15 nt, Human
acagauuugagcuca

SEQ ID NO: 1789610 - RNA, 17 nt, Human
acagcaaggagauuuac

SEQ ID NO: 1789611 - RNA, 21 nt, Human
uagugaaucacguaaagcuag

SEQ ID NO: 1789612 - RNA, 18 nt, Human
acacaguauuacuucugc

SEQ ID NO: 1789613 - RNA, 22 nt, Human
acacaguauuacuucugcuaca

SEQ ID NO: 1789614 - RNA, 19 nt, Human
acacaguauuacuucugcu

SEQ ID NO: 1789615 - RNA, 19 nt, Human
acaaugugaaaagaaaaau

SEQ ID NO: 1789616 - RNA, 17 nt, Human
acaaugugaaaagaaaa

SEQ ID NO: 1789617 - RNA, 19 nt, Human
acaauggauaggcacagga

SEQ ID NO: 1789618 - RNA, 24 nt, Human
acaaugcugugcccuaaaguguau

SEQ ID NO: 1789619 - RNA, 23 nt, Human
acaaugcugugcccuaaagugua

SEQ ID NO: 1789620 - RNA, 22 nt, Human
acaaugcugugcccuaaagugu

SEQ ID NO: 1789621 - RNA, 21 nt, Human
acaaugcugugcccuaaagug

SEQ ID NO: 1789622 - RNA, 21 nt, Human
acacacgcgugcacacaccag

SEQ ID NO: 1789623 - RNA, 20 nt, Human
acacaccagagcccaccuug

SEQ ID NO: 1789624 - RNA, 15 nt, Human
acacaccagagccca

SEQ ID NO: 1789625 - RNA, 14 nt, Human
acacaccagagccc

SEQ ID NO: 1789626 - RNA, 21 nt, Human
acacacugcauguuugugauu

SEQ ID NO: 1789627 - RNA, 22 nt, Human
acacacacgcgugcacacacca

SEQ ID NO: 1789628 - RNA, 14 nt, Human
acacacagcucugu

SEQ ID NO: 1789629 - RNA, 13 nt, Human
acacacagcucug

SEQ ID NO: 1789630 - RNA, 17 nt, Human
acacacagcucuguccu

SEQ ID NO: 1789631 - RNA, 19 nt, Human
acacacagcucuguccugg

SEQ ID NO: 1789632 - RNA, 15 nt, Human
uaguuccacugagac

SEQ ID NO: 1789633 - RNA, 14 nt, Human
uaguuccacugaga

SEQ ID NO: 1789634 - RNA, 20 nt, Human
uaguuccaccaucaagccac

SEQ ID NO: 1789635 - RNA, 19 nt, Human
uauaaaagccuguuuaaga

SEQ ID NO: 1789636 - RNA, 22 nt, Human
uauaaaagggacugagaaauuu

SEQ ID NO: 1789637 - RNA, 19 nt, Human
uauaaaaauaaaaaacacu

SEQ ID NO: 1789638 - RNA, 20 nt, Human
uauaaaagccuguuuaagag

SEQ ID NO: 1789639 - RNA, 20 nt, Human
acacauuuuauuuuauuaug

SEQ ID NO: 1789640 - RNA, 19 nt, Human
acacauuuuauuuuauuau

SEQ ID NO: 1789641 - RNA, 14 nt, Human
acacauuuuauuuu

SEQ ID NO: 1789642 - RNA, 21 nt, Human
acacaugagcaucaggccagg

SEQ ID NO: 1789643 - RNA, 18 nt, Human
acacaugauccugcaauu

SEQ ID NO: 1789644 - RNA, 22 nt, Human
acacucacauuuauucugcuca

SEQ ID NO: 1789645 - RNA, 20 nt, Human
acacucacauuuauucugcu

SEQ ID NO: 1789646 - RNA, 15 nt, Human
uauaaguguguguuu

SEQ ID NO: 1789647 - RNA, 15 nt, Human
acacucaaaagcugg

SEQ ID NO: 1789648 - RNA, 16 nt, Human
acaccgggcacucaga

SEQ ID NO: 1789649 - RNA, 14 nt, Human
acaccgggccugga

SEQ ID NO: 1789650 - RNA, 21 nt, Human
acaccucugcacaagcugcac

SEQ ID NO: 1789651 - RNA, 20 nt, Human
acacuaaccacgcuggaccu

SEQ ID NO: 1789652 - RNA, 21 nt, Human
acaccuuagccugcccuccuu

SEQ ID NO: 1789653 - RNA, 22 nt, Human
acaaggacagccccuccuccau

SEQ ID NO: 1789654 - RNA, 21 nt, Human
acaaggacagccccuccucca

SEQ ID NO: 1789655 - RNA, 18 nt, Human
acaaggacuaggguccug

SEQ ID NO: 1789656 - RNA, 19 nt, Human
acaaggacuaggguccugg

SEQ ID NO: 1789657 - RNA, 12 nt, Human
acaaugacuuac

SEQ ID NO: 1789658 - RNA, 19 nt, Human
acaaugacuuacuguacau

SEQ ID NO: 1789659 - RNA, 19 nt, Human
uagcuaauaacaugugaaa

SEQ ID NO: 1789660 - RNA, 18 nt, Human
acaaugacuuacuguaca

SEQ ID NO: 1789661 - RNA, 17 nt, Human
acaaugacuuacuguac

SEQ ID NO: 1789662 - RNA, 14 nt, Human
uaggcauuguggga

SEQ ID NO: 1789663 - RNA, 16 nt, Human
uaggcauuugcugaau

SEQ ID NO: 1789664 - RNA, 20 nt, Human
uaggcauuugcugaauacag

SEQ ID NO: 1789665 - RNA, 14 nt, Human
uaggacuguagaaa

SEQ ID NO: 1789666 - RNA, 13 nt, Human
uaggacuguagaa

SEQ ID NO: 1789667 - RNA, 21 nt, Human
uagcuuacaagccagcuggag

SEQ ID NO: 1789668 - RNA, 16 nt, Human
uaggaaauccagggug

SEQ ID NO: 1789669 - RNA, 19 nt, Human
uagcauggcugccaauggg

SEQ ID NO: 1789670 - RNA, 23 nt, Human
uagaugcugacuguacuccuccc

SEQ ID NO: 1789671 - RNA, 14 nt, Human
uagaugcugacugu

SEQ ID NO: 1789672 - RNA, 21 nt, Human
uagccaaggccaaaggaagca

SEQ ID NO: 1789673 - RNA, 22 nt, Human
uagcauuuugcuaaaugugaau

SEQ ID NO: 1789674 - RNA, 16 nt, Human
uagcauuuugcuaaau

SEQ ID NO: 1789675 - RNA, 18 nt, Human
acaaauuuacagagacag

SEQ ID NO: 1789676 - RNA, 19 nt, Human
acaaauuuacagagacaga

SEQ ID NO: 1789677 - RNA, 11 nt, Human
uagccagagga

SEQ ID NO: 1789678 - RNA, 15 nt, Human
uagccagaggagaga

SEQ ID NO: 1789679 - RNA, 23 nt, Human
acaacacucauugaccugaggcc

SEQ ID NO: 1789680 - RNA, 21 nt, Human
acaacacucauugaccugagg

SEQ ID NO: 1789681 - RNA, 19 nt, Human
acaagaccacguuucuaaa

SEQ ID NO: 1789682 - RNA, 19 nt, Human
acaagacccuugugguccc

SEQ ID NO: 1789683 - RNA, 20 nt, Human
acaagacccaaaaggcagaa

SEQ ID NO: 1789684 - RNA, 18 nt, Human
acaaaaggauaaugaaua

SEQ ID NO: 1789685 - RNA, 22 nt, Human
acaaaagcaugugagacugguu

SEQ ID NO: 1789686 - RNA, 11 nt, Human
acaaaagcaug

SEQ ID NO: 1789687 - RNA, 21 nt, Human
aauuguguuuauaauuuuaaa

SEQ ID NO: 1789688 - RNA, 20 nt, Human
aauuguguuuauaauuuuaa

SEQ ID NO: 1789689 - RNA, 16 nt, Human
aauuguuacaaauugu

SEQ ID NO: 1789690 - RNA, 22 nt, Human
acaaaggaugcccaaagaugca

SEQ ID NO: 1789691 - RNA, 19 nt, Human
uagaggagaaacuggaacu

SEQ ID NO: 1789692 - RNA, 15 nt, Human
uagauauaugcucug

SEQ ID NO: 1789693 - RNA, 22 nt, Human
uagaggagaaacuggaacucuc

SEQ ID NO: 1789694 - RNA, 19 nt, Human
uagauauaugcucugcaug

SEQ ID NO: 1789695 - RNA, 21 nt, Human
gugcauuuggugguuucagaa

SEQ ID NO: 1789696 - RNA, 23 nt, Human
gugccaaaaacaacaacaaaaug

SEQ ID NO: 1789697 - RNA, 19 nt, Human
gugcauuugaggucuguuc

SEQ ID NO: 1789698 - RNA, 17 nt, Human
gugcauuugaggucugu

SEQ ID NO: 1789699 - RNA, 21 nt, Human
gugcacaugcacgugugugca

SEQ ID NO: 1789700 - RNA, 23 nt, Human
gugcacaagcuccaagcucccag

SEQ ID NO: 1789701 - RNA, 22 nt, Human
gugcaaugaccuuucaauagga

SEQ ID NO: 1789702 - RNA, 18 nt, Human
gugcaaugaccuuucaau

SEQ ID NO: 1789703 - RNA, 13 nt, Human
gugcacaagcucc

SEQ ID NO: 1789704 - RNA, 16 nt, Human
gugcacaagcuccaag

SEQ ID NO: 1789705 - RNA, 21 nt, Human
gugcacaagcuccaagcuccc

SEQ ID NO: 1789706 - RNA, 23 nt, Human
gugaugguuccccuguucacucu

SEQ ID NO: 1789707 - RNA, 17 nt, Human
gugauuaccagggacug

SEQ ID NO: 1789708 - RNA, 16 nt, Human
gugauuaccagggacu

SEQ ID NO: 1789709 - RNA, 11 nt, Human
gugauuaccag

SEQ ID NO: 1789710 - RNA, 22 nt, Human
aacuucaccauauuaccacaga

SEQ ID NO: 1789711 - RNA, 22 nt, Human
aacuucacauauugauuuccgu

SEQ ID NO: 1789712 - RNA, 14 nt, Human
aacuucacauauug

SEQ ID NO: 1789713 - RNA, 18 nt, Human
aacugcccccucugcccu

SEQ ID NO: 1789714 - RNA, 19 nt, Human
aacugcccccucugcccug

SEQ ID NO: 1789715 - RNA, 20 nt, Human
aacugcccccucugcccugc

SEQ ID NO: 1789716 - RNA, 21 nt, Human
aacugcccccucugcccugcg

SEQ ID NO: 1789717 - RNA, 16 nt, Human
aacugcccccucugcc

SEQ ID NO: 1789718 - RNA, 17 nt, Human
aacugcccccucugccc

SEQ ID NO: 1789719 - RNA, 22 nt, Human
aacuucuccccugguagaaaga

SEQ ID NO: 1789720 - RNA, 13 nt, Human
aacuucagacaua

SEQ ID NO: 1789721 - RNA, 22 nt, Human
aagaaaauaguggugugauuug

SEQ ID NO: 1789722 - RNA, 21 nt, Human
aagaaaauaguggugugauuu

SEQ ID NO: 1789723 - RNA, 15 nt, Human
aagaaaauaguggug

SEQ ID NO: 1789724 - RNA, 19 nt, Human
aagaaagcccuuaggaaga

SEQ ID NO: 1789725 - RNA, 16 nt, Human
aagaaagaaaaucagg

SEQ ID NO: 1789726 - RNA, 14 nt, Human
aagaaagaaaauca

SEQ ID NO: 1789727 - RNA, 17 nt, Human
aagaaaaaugagccugg

SEQ ID NO: 1789728 - RNA, 18 nt, Human
aagaaaaaugagccuggc

SEQ ID NO: 1789729 - RNA, 19 nt, Human
aagaaaaaauauuuucccu

SEQ ID NO: 1789730 - RNA, 13 nt, Human
aagaaaaagaaaa

SEQ ID NO: 1789731 - RNA, 18 nt, Human
aagaaaaagaaaaagaaa

SEQ ID NO: 1789732 - RNA, 19 nt, Human
gugccagauuuaugcauau

SEQ ID NO: 1789733 - RNA, 23 nt, Human
aacuuuaccuuuuuuauacauaa

SEQ ID NO: 1789734 - RNA, 22 nt, Human
aacuuuaccuuuuuuauacaua

SEQ ID NO: 1789735 - RNA, 21 nt, Human
aacuuuaccuuuuuuauacau

SEQ ID NO: 1789736 - RNA, 17 nt, Human
gugcuaggaacacuccu

SEQ ID NO: 1789737 - RNA, 15 nt, Human
gugcuaucuccccca

SEQ ID NO: 1789738 - RNA, 18 nt, Human
gugcuaucucccccagcc

SEQ ID NO: 1789739 - RNA, 14 nt, Human
gugcucuggacagg

SEQ ID NO: 1789740 - RNA, 13 nt, Human
gugcucuggacag

SEQ ID NO: 1789741 - RNA, 16 nt, Human
gugcucugaucaucca

SEQ ID NO: 1789742 - RNA, 12 nt, Human
gugcugcccugc

SEQ ID NO: 1789743 - RNA, 13 nt, Human
gugcugcccugcc

SEQ ID NO: 1789744 - RNA, 14 nt, Human
gugcugcccugccc

SEQ ID NO: 1789745 - RNA, 15 nt, Human
gugcugcccugccca

SEQ ID NO: 1789746 - RNA, 19 nt, Human
gugcucaggagcccuggga

SEQ ID NO: 1789747 - RNA, 18 nt, Human
gugcucaggagcccuggg

SEQ ID NO: 1789748 - RNA, 19 nt, Human
gugcuaucucccccagccc

SEQ ID NO: 1789749 - RNA, 16 nt, Human
gugcucaggagcccug

SEQ ID NO: 1789750 - RNA, 12 nt, Human
aacuauggccug

SEQ ID NO: 1789751 - RNA, 15 nt, Human
aacuauguugauaaa

SEQ ID NO: 1789752 - RNA, 12 nt, Human
aacguggcugcu

SEQ ID NO: 1789753 - RNA, 13 nt, Human
aacguggcugcuu

SEQ ID NO: 1789754 - RNA, 17 nt, Human
aacguuuuuccuguucu

SEQ ID NO: 1789755 - RNA, 21 nt, Human
aacuaggugcauauuuauaaa

SEQ ID NO: 1789756 - RNA, 17 nt, Human
aacuagggaagauaaua

SEQ ID NO: 1789757 - RNA, 17 nt, Human
aacuaaaauaauuuugu

SEQ ID NO: 1789758 - RNA, 19 nt, Human
aacuaaaauaauuuuguaa

SEQ ID NO: 1789759 - RNA, 15 nt, Human
aacuaaaauaauuuu

SEQ ID NO: 1789760 - RNA, 23 nt, Human
aaccuggucacaggacucugccu

SEQ ID NO: 1789761 - RNA, 12 nt, Human
aacgugaaaaug

SEQ ID NO: 1789762 - RNA, 21 nt, Human
aaccuucgccaccuggguucc

SEQ ID NO: 1789763 - RNA, 20 nt, Human
gucuuguguuucuuuaguuu

SEQ ID NO: 1789764 - RNA, 22 nt, Human
gucuuguuuuuuuuuuccacuu

SEQ ID NO: 1789765 - RNA, 16 nt, Human
gucuggaaugcagugg

SEQ ID NO: 1789766 - RNA, 15 nt, Human
gucuggaaugcagug

SEQ ID NO: 1789767 - RNA, 18 nt, Human
gucuggaaugcaguggua

SEQ ID NO: 1789768 - RNA, 14 nt, Human
gucugacaggcaau

SEQ ID NO: 1789769 - RNA, 13 nt, Human
gucugacaggcaa

SEQ ID NO: 1789770 - RNA, 12 nt, Human
gucugacaggca

SEQ ID NO: 1789771 - RNA, 18 nt, Human
gucugacaggcaaugcug

SEQ ID NO: 1789772 - RNA, 15 nt, Human
gucugacaggcaaug

SEQ ID NO: 1789773 - RNA, 20 nt, Human
gucugacaggcaaugcuggc

SEQ ID NO: 1789774 - RNA, 14 nt, Human
gucucaaaaaaaca

SEQ ID NO: 1789775 - RNA, 17 nt, Human
gucucaaaaaaagaaaa

SEQ ID NO: 1789776 - RNA, 19 nt, Human
gucucaaaaaaagaaaaag

SEQ ID NO: 1789777 - RNA, 16 nt, Human
gugagacucugucuca

SEQ ID NO: 1789778 - RNA, 14 nt, Human
gugagacucugucu

SEQ ID NO: 1789779 - RNA, 16 nt, Human
gugagaccugccccuc

SEQ ID NO: 1789780 - RNA, 23 nt, Human
gugagaccugccccuccucucug

SEQ ID NO: 1789781 - RNA, 22 nt, Human
gugagacccugucucaaaaaaa

SEQ ID NO: 1789782 - RNA, 13 nt, Human
gugagaccugccc

SEQ ID NO: 1789783 - RNA, 14 nt, Human
gugagaccugcccc

SEQ ID NO: 1789784 - RNA, 15 nt, Human
gugagaccugccccu

SEQ ID NO: 1789785 - RNA, 22 nt, Human
gugacauguguuggcagccucu

SEQ ID NO: 1789786 - RNA, 19 nt, Human
gugacaugucuuuucuugc

SEQ ID NO: 1789787 - RNA, 16 nt, Human
gugacuucagcucugu

SEQ ID NO: 1789788 - RNA, 12 nt, Human
aacuccugaccu

SEQ ID NO: 1789789 - RNA, 14 nt, Human
aacuccugaccuca

SEQ ID NO: 1789790 - RNA, 19 nt, Human
gugaaguuuaauugacuua

SEQ ID NO: 1789791 - RNA, 23 nt, Human
gugaauaauacaguaucucaggg

SEQ ID NO: 1789792 - RNA, 22 nt, Human
gugacagagugagacucugucu

SEQ ID NO: 1789793 - RNA, 20 nt, Human
gugacagagugagacucugu

SEQ ID NO: 1789794 - RNA, 23 nt, Human
gugacagaggcagccccauucug

SEQ ID NO: 1789795 - RNA, 20 nt, Human
aacugauuuuuuuuuccuuc

SEQ ID NO: 1789796 - RNA, 21 nt, Human
aacugauuuuuuuuuccuuca

SEQ ID NO: 1789797 - RNA, 22 nt, Human
aacugauuuuuuuuuccuucag

SEQ ID NO: 1789798 - RNA, 23 nt, Human
aacugauuuuuuuuuccuucagu

SEQ ID NO: 1789799 - RNA, 16 nt, Human
aacugcauuggcuuug

SEQ ID NO: 1789800 - RNA, 16 nt, Human
aacucugacaacagac

SEQ ID NO: 1789801 - RNA, 22 nt, Human
aacucuccucugcugcuggcug

SEQ ID NO: 1789802 - RNA, 23 nt, Human
aacucuccucugcugcuggcugg

SEQ ID NO: 1789803 - RNA, 18 nt, Human
gugagacucugucucaaa

SEQ ID NO: 1789804 - RNA, 12 nt, Human
gugaggcucugc

SEQ ID NO: 1789805 - RNA, 13 nt, Human
gugaggcucugcc

SEQ ID NO: 1789806 - RNA, 14 nt, Human
gugaggcucugccc

SEQ ID NO: 1789807 - RNA, 15 nt, Human
gugaggcucugcccu

SEQ ID NO: 1789808 - RNA, 16 nt, Human
gugaggcucugcccuu

SEQ ID NO: 1789809 - RNA, 17 nt, Human
gugaggcucugcccuug

SEQ ID NO: 1789810 - RNA, 19 nt, Human
gugagucaccaagcccagu

SEQ ID NO: 1789811 - RNA, 19 nt, Human
aacucuccucugcugcugg

SEQ ID NO: 1789812 - RNA, 21 nt, Human
aacucuccucugcugcuggcu

SEQ ID NO: 1789813 - RNA, 17 nt, Human
gugagucaccaagccca

SEQ ID NO: 1789814 - RNA, 23 nt, Human
gugaguacuacaguccucccauc

SEQ ID NO: 1789815 - RNA, 18 nt, Human
gugaggcucugcccuugg

SEQ ID NO: 1789816 - RNA, 17 nt, Human
aaauuccaagugauuga

SEQ ID NO: 1789817 - RNA, 16 nt, Human
aaauuccccacccuga

SEQ ID NO: 1789818 - RNA, 17 nt, Human
aaauuguauuacaaauc

SEQ ID NO: 1789819 - RNA, 18 nt, Human
aaauugucagaugcugug

SEQ ID NO: 1789820 - RNA, 18 nt, Human
aaauuaggauuucaugau

SEQ ID NO: 1789821 - RNA, 19 nt, Human
aaauuaggauuucaugauu

SEQ ID NO: 1789822 - RNA, 23 nt, Human
aaauuaugugccagauuuaugca

SEQ ID NO: 1789823 - RNA, 15 nt, Human
aaauguggcuccugg

SEQ ID NO: 1789824 - RNA, 14 nt, Human
aaauuaaucugggc

SEQ ID NO: 1789825 - RNA, 21 nt, Human
aaaugucucuuuaaugucaca

SEQ ID NO: 1789826 - RNA, 14 nt, Human
aaaugucuuccugg

SEQ ID NO: 1789827 - RNA, 11 nt, Human
guauuuauuca

SEQ ID NO: 1789828 - RNA, 16 nt, Human
aaaucauucauuuucu

SEQ ID NO: 1789829 - RNA, 21 nt, Human
guauucucuccuguaccucuu

SEQ ID NO: 1789830 - RNA, 18 nt, Human
guauucucuccuguaccu

SEQ ID NO: 1789831 - RNA, 12 nt, Human
gucacaggcagg

SEQ ID NO: 1789832 - RNA, 19 nt, Human
gucacaggacucugccucc

SEQ ID NO: 1789833 - RNA, 16 nt, Human
gucacaggagggaggg

SEQ ID NO: 1789834 - RNA, 17 nt, Human
gucacaggacucugccu

SEQ ID NO: 1789835 - RNA, 18 nt, Human
gucacaggacucugccuc

SEQ ID NO: 1789836 - RNA, 20 nt, Human
gucacaggaaguagaggagg

SEQ ID NO: 1789837 - RNA, 22 nt, Human
gucaccaaaucagcugcuacua

SEQ ID NO: 1789838 - RNA, 21 nt, Human
gucaauuuuguuauguauauu

SEQ ID NO: 1789839 - RNA, 15 nt, Human
gucacaggaaguaga

SEQ ID NO: 1789840 - RNA, 13 nt, Human
gucacaggaagua

SEQ ID NO: 1789841 - RNA, 22 nt, Human
gucaauuacaggaaguacugga

SEQ ID NO: 1789842 - RNA, 23 nt, Human
gucacucuggcagcucagagagg

SEQ ID NO: 1789843 - RNA, 15 nt, Human
gucaccaagcccagu

SEQ ID NO: 1789844 - RNA, 12 nt, Human
gucaccaagccc

SEQ ID NO: 1789845 - RNA, 14 nt, Human
gucacugagacagc

SEQ ID NO: 1789846 - RNA, 15 nt, Human
gucacugagacagcc

SEQ ID NO: 1789847 - RNA, 16 nt, Human
gucacugagacagccc

SEQ ID NO: 1789848 - RNA, 20 nt, Human
gucacugcacagugcaucuc

SEQ ID NO: 1789849 - RNA, 23 nt, Human
gucacugcacagugcaucucagc

SEQ ID NO: 1789850 - RNA, 10 nt, Human
gucacugcuu

SEQ ID NO: 1789851 - RNA, 17 nt, Human
gucacugagacagcccg

SEQ ID NO: 1789852 - RNA, 18 nt, Human
gucacugagacagcccgg

SEQ ID NO: 1789853 - RNA, 21 nt, Human
gucacugagacagcccgggcu

SEQ ID NO: 1789854 - RNA, 23 nt, Human
gucacugagacagcccgggcucu

SEQ ID NO: 1789855 - RNA, 23 nt, Human
gucagaaguuucugccgcagccc

SEQ ID NO: 1789856 - RNA, 21 nt, Human
gucagaaguuucugccgcagc

SEQ ID NO: 1789857 - RNA, 17 nt, Human
gucacuuuguuuuacug

SEQ ID NO: 1789858 - RNA, 21 nt, Human
gucacugcuuaacuucacaua

SEQ ID NO: 1789859 - RNA, 15 nt, Human
gucacugcuuaacuu

SEQ ID NO: 1789860 - RNA, 22 nt, Human
gucagguggggcagcuugaggg

SEQ ID NO: 1789861 - RNA, 18 nt, Human
gucagguggggcagcuug

SEQ ID NO: 1789862 - RNA, 17 nt, Human
gucagguggggcagcuu

SEQ ID NO: 1789863 - RNA, 16 nt, Human
gucagguggggcagcu

SEQ ID NO: 1789864 - RNA, 15 nt, Human
gucagugugacugau

SEQ ID NO: 1789865 - RNA, 12 nt, Human
aaauuucuaaau

SEQ ID NO: 1789866 - RNA, 15 nt, Human
aaauuucuaaaucuc

SEQ ID NO: 1789867 - RNA, 13 nt, Human
aaauuucuaaauc

SEQ ID NO: 1789868 - RNA, 16 nt, Human
aacacuguucucugcc

SEQ ID NO: 1789869 - RNA, 17 nt, Human
aacacuguucucugccc

SEQ ID NO: 1789870 - RNA, 18 nt, Human
aacacuguucucugcccu

SEQ ID NO: 1789871 - RNA, 17 nt, Human
gucauuugagcagggcu

SEQ ID NO: 1789872 - RNA, 19 nt, Human
aacacuguucucugcccuc

SEQ ID NO: 1789873 - RNA, 21 nt, Human
aacacucacauuuauucugcu

SEQ ID NO: 1789874 - RNA, 21 nt, Human
aacacugggagaaaugaaaaa

SEQ ID NO: 1789875 - RNA, 17 nt, Human
aacacucauugaccuga

SEQ ID NO: 1789876 - RNA, 19 nt, Human
aacacaaacgggcucagca

SEQ ID NO: 1789877 - RNA, 17 nt, Human
aaauuucucuacugucu

SEQ ID NO: 1789878 - RNA, 19 nt, Human
aaauuucuaaaucuccaaa

SEQ ID NO: 1789879 - RNA, 23 nt, Human
guccaugaagauguagaggagaa

SEQ ID NO: 1789880 - RNA, 22 nt, Human
guccaugaagauguagaggaga

SEQ ID NO: 1789881 - RNA, 19 nt, Human
gucauuugagcagggcuca

SEQ ID NO: 1789882 - RNA, 15 nt, Human
gucccaccccacaca

SEQ ID NO: 1789883 - RNA, 22 nt, Human
guccccaccgcagacaggacca

SEQ ID NO: 1789884 - RNA, 20 nt, Human
gucccaccccacacacgcca

SEQ ID NO: 1789885 - RNA, 18 nt, Human
guccccaccgcagacagg

SEQ ID NO: 1789886 - RNA, 19 nt, Human
gucccugguggcagcucac

SEQ ID NO: 1789887 - RNA, 15 nt, Human
gucccuaauaaagcu

SEQ ID NO: 1789888 - RNA, 18 nt, Human
gucccugguggcagcuca

SEQ ID NO: 1789889 - RNA, 18 nt, Human
gucccuuacgugaguccu

SEQ ID NO: 1789890 - RNA, 19 nt, Human
gucccuuacgugaguccug

SEQ ID NO: 1789891 - RNA, 12 nt, Human
gucccuaauaaa

SEQ ID NO: 1789892 - RNA, 22 nt, Human
guccccuguuuguuucugaaag

SEQ ID NO: 1789893 - RNA, 18 nt, Human
guccccuguuuguuucug

SEQ ID NO: 1789894 - RNA, 14 nt, Human
aacauuguagccuc

SEQ ID NO: 1789895 - RNA, 17 nt, Human
aacaugugaaaagaaua

SEQ ID NO: 1789896 - RNA, 18 nt, Human
aacaguccauugaaaggg

SEQ ID NO: 1789897 - RNA, 22 nt, Human
gucuaugggacucaaugcacug

SEQ ID NO: 1789898 - RNA, 23 nt, Human
gucuaggcaggaccuguggccaa

SEQ ID NO: 1789899 - RNA, 12 nt, Human
gucgccucugca

SEQ ID NO: 1789900 - RNA, 14 nt, Human
gucuaccugagggg

SEQ ID NO: 1789901 - RNA, 13 nt, Human
gucuaccugaggg

SEQ ID NO: 1789902 - RNA, 15 nt, Human
gucuaccugaggggc

SEQ ID NO: 1789903 - RNA, 16 nt, Human
gucuaccugaggggcc

SEQ ID NO: 1789904 - RNA, 14 nt, Human
guccucuuuucuga

SEQ ID NO: 1789905 - RNA, 19 nt, Human
guccugcugcaguugccag

SEQ ID NO: 1789906 - RNA, 16 nt, Human
guccuggcaugggaau

SEQ ID NO: 1789907 - RNA, 12 nt, Human
gucgaggcagga

SEQ ID NO: 1789908 - RNA, 16 nt, Human
gucgaggacagggagg

SEQ ID NO: 1789909 - RNA, 22 nt, Human
uaaaaagcuccaaaugcagcuu

SEQ ID NO: 1789910 - RNA, 21 nt, Human
uaaaaaaaaaccugagcccca

SEQ ID NO: 1789911 - RNA, 22 nt, Human
uaaaaaugagguacucuccugg

SEQ ID NO: 1789912 - RNA, 15 nt, Human
uaaaaaugagguacu

SEQ ID NO: 1789913 - RNA, 23 nt, Human
uaaaaaucucaaauuucuaaauc

SEQ ID NO: 1789914 - RNA, 13 nt, Human
uaaaacccaagug

SEQ ID NO: 1789915 - RNA, 15 nt, Human
uaaaacuuuuuaaaa

SEQ ID NO: 1789916 - RNA, 12 nt, Human
uaaaacuuuuua

SEQ ID NO: 1789917 - RNA, 23 nt, Human
aagugauccucccaccucagccu

SEQ ID NO: 1789918 - RNA, 13 nt, Human
aagugauucucau

SEQ ID NO: 1789919 - RNA, 16 nt, Human
aagugauucucaugcc

SEQ ID NO: 1789920 - RNA, 19 nt, Human
aagugauucucaugccuca

SEQ ID NO: 1789921 - RNA, 21 nt, Human
aagugauucuccugccucagc

SEQ ID NO: 1789922 - RNA, 17 nt, Human
aagugauucucaugccu

SEQ ID NO: 1789923 - RNA, 20 nt, Human
aagugauccucccaccucag

SEQ ID NO: 1789924 - RNA, 19 nt, Human
aagugauccucccaccuca

SEQ ID NO: 1789925 - RNA, 13 nt, Human
aagugauccuccc

SEQ ID NO: 1789926 - RNA, 21 nt, Human
uaaaauaccagccaguaaaug

SEQ ID NO: 1789927 - RNA, 13 nt, Human
uaaaagucuugug

SEQ ID NO: 1789928 - RNA, 20 nt, Human
uaaaaguacauguuaaacuu

SEQ ID NO: 1789929 - RNA, 20 nt, Human
aaguuugagaucagccuggg

SEQ ID NO: 1789930 - RNA, 9 nt, Human
uaaaauggu

SEQ ID NO: 1789931 - RNA, 19 nt, Human
aaguuucugccgcagcccu

SEQ ID NO: 1789932 - RNA, 21 nt, Human
aaguuucugccgcagcccugc

SEQ ID NO: 1789933 - RNA, 14 nt, Human
aaguucccuacuuc

SEQ ID NO: 1789934 - RNA, 17 nt, Human
aaguucccuacuuccug

SEQ ID NO: 1789935 - RNA, 20 nt, Human
aaguucccuacuuccuguga

SEQ ID NO: 1789936 - RNA, 23 nt, Human
aaguguauuuuuuuacuaauaga

SEQ ID NO: 1789937 - RNA, 12 nt, Human
aaguguguguuu

SEQ ID NO: 1789938 - RNA, 13 nt, Human
aagugugguagag

SEQ ID NO: 1789939 - RNA, 14 nt, Human
aaguuacacauuuu

SEQ ID NO: 1789940 - RNA, 23 nt, Human
aaguuaagaauguucuuauguug

SEQ ID NO: 1789941 - RNA, 11 nt, Human
aaguuaagaau

SEQ ID NO: 1789942 - RNA, 16 nt, Human
aaguguguguuuuuca

SEQ ID NO: 1789943 - RNA, 21 nt, Human
aaguguguguuuuucauaaag

SEQ ID NO: 1789944 - RNA, 19 nt, Human
aaguuaguuccacugagac

SEQ ID NO: 1789945 - RNA, 18 nt, Human
aaguuaguuccacugaga

SEQ ID NO: 1789946 - RNA, 16 nt, Human
aaggcugggggaagaa

SEQ ID NO: 1789947 - RNA, 14 nt, Human
aaggcugggggaag

SEQ ID NO: 1789948 - RNA, 13 nt, Human
guuucagaaaugu

SEQ ID NO: 1789949 - RNA, 11 nt, Human
guuucagaaau

SEQ ID NO: 1789950 - RNA, 19 nt, Human
aaggcugggggaagaagcu

SEQ ID NO: 1789951 - RNA, 22 nt, Human
aaggcugggggaagaagcucuc

SEQ ID NO: 1789952 - RNA, 20 nt, Human
aaggcugucaauuacaggaa

SEQ ID NO: 1789953 - RNA, 13 nt, Human
aaggggagaguaa

SEQ ID NO: 1789954 - RNA, 12 nt, Human
aagggggcuggg

SEQ ID NO: 1789955 - RNA, 23 nt, Human
aagggggcugggacaugggaaag

SEQ ID NO: 1789956 - RNA, 23 nt, Human
aagguuucagaaagaagugggga

SEQ ID NO: 1789957 - RNA, 14 nt, Human
guuuaugauuccac

SEQ ID NO: 1789958 - RNA, 21 nt, Human
guuuaagugacugauggcuaa

SEQ ID NO: 1789959 - RNA, 17 nt, Human
aaggaaacccagcucug

SEQ ID NO: 1789960 - RNA, 22 nt, Human
aaggaaacccagcucuggucca

SEQ ID NO: 1789961 - RNA, 23 nt, Human
guuguuugauucagacagcugcc

SEQ ID NO: 1789962 - RNA, 22 nt, Human
aagucacugcacagugcaucuc

SEQ ID NO: 1789963 - RNA, 21 nt, Human
aaguauucuuauuuaaugaaa

SEQ ID NO: 1789964 - RNA, 19 nt, Human
aaguauuauaccuuuuuua

SEQ ID NO: 1789965 - RNA, 16 nt, Human
aaguauuauaccuuuu

SEQ ID NO: 1789966 - RNA, 15 nt, Human
aaguauuuuccuguu

SEQ ID NO: 1789967 - RNA, 23 nt, Human
aaguauucuuauuuaaugaaaga

SEQ ID NO: 1789968 - RNA, 20 nt, Human
aaguacuucuccacccugcu

SEQ ID NO: 1789969 - RNA, 19 nt, Human
aaguacuucuccacccugc

SEQ ID NO: 1789970 - RNA, 18 nt, Human
aaguacuucuccacccug

SEQ ID NO: 1789971 - RNA, 15 nt, Human
aaguauuauaccuuu

SEQ ID NO: 1789972 - RNA, 14 nt, Human
aaguacuauaauuu

SEQ ID NO: 1789973 - RNA, 17 nt, Human
aaguacuauaauuuacc

SEQ ID NO: 1789974 - RNA, 13 nt, Human
aaguacuauguau

SEQ ID NO: 1789975 - RNA, 22 nt, Human
guuuuaaggaugcuuguacaua

SEQ ID NO: 1789976 - RNA, 19 nt, Human
guuuucuguucuuucuggc

SEQ ID NO: 1789977 - RNA, 16 nt, Human
guuuucuguucuuucu

SEQ ID NO: 1789978 - RNA, 15 nt, Human
guuuucuguucuuuc

SEQ ID NO: 1789979 - RNA, 14 nt, Human
guuuucuguucuuu

SEQ ID NO: 1789980 - RNA, 20 nt, Human
aaguaauaugcacacauuuu

SEQ ID NO: 1789981 - RNA, 18 nt, Human
aaguaauaugcacacauu

SEQ ID NO: 1789982 - RNA, 17 nt, Human
aaguaauaugcacacau

SEQ ID NO: 1789983 - RNA, 21 nt, Human
aaguaauaugcacacauuuuu

SEQ ID NO: 1789984 - RNA, 20 nt, Human
guuugcuuuguaugcacuuu

SEQ ID NO: 1789985 - RNA, 13 nt, Human
guuuggagacaga

SEQ ID NO: 1789986 - RNA, 14 nt, Human
guucuugguuugua

SEQ ID NO: 1789987 - RNA, 18 nt, Human
guucuugguuuguaaauu

SEQ ID NO: 1789988 - RNA, 15 nt, Human
guucuugguuuguaa

SEQ ID NO: 1789989 - RNA, 14 nt, Human
guugauagcacaga

SEQ ID NO: 1789990 - RNA, 19 nt, Human
guugauagcacagacccug

SEQ ID NO: 1789991 - RNA, 16 nt, Human
guucuuaagacgugau

SEQ ID NO: 1789992 - RNA, 13 nt, Human
guucuuaauucuu

SEQ ID NO: 1789993 - RNA, 17 nt, Human
guucucugcccuccaag

SEQ ID NO: 1789994 - RNA, 18 nt, Human
guucucugcccuccaaga

SEQ ID NO: 1789995 - RNA, 17 nt, Human
guucuuaauucuuagcu

SEQ ID NO: 1789996 - RNA, 14 nt, Human
guucuuaauucuua

SEQ ID NO: 1789997 - RNA, 14 nt, Human
guucucugaggaca

SEQ ID NO: 1789998 - RNA, 15 nt, Human
guucucugcccucca

SEQ ID NO: 1789999 - RNA, 12 nt, Human
guucucugagga

SEQ ID NO: 1790000 - RNA, 15 nt, Human
guucucucuucucca

SEQ ID NO: 1790001 - RNA, 19 nt, Human
guucuagcauggcugccaa

SEQ ID NO: 1790002 - RNA, 17 nt, Human
aagcucugcuccucucc

SEQ ID NO: 1790003 - RNA, 18 nt, Human
guucccccuguuucagag

SEQ ID NO: 1790004 - RNA, 15 nt, Human
guuccccaagacauu

SEQ ID NO: 1790005 - RNA, 19 nt, Human
aagcuuuuaugugaaacau

SEQ ID NO: 1790006 - RNA, 21 nt, Human
aagcuuuuaugugaaacaugu

SEQ ID NO: 1790007 - RNA, 21 nt, Human
guucccuuuuuuggcugcuga

SEQ ID NO: 1790008 - RNA, 22 nt, Human
guucccuuuuuuggcugcugaa

SEQ ID NO: 1790009 - RNA, 20 nt, Human
guuauuauauuuacaaaugg

SEQ ID NO: 1790010 - RNA, 22 nt, Human
guuauugguguaagguacuuuc

SEQ ID NO: 1790011 - RNA, 19 nt, Human
guuauuauauuuacaaaug

SEQ ID NO: 1790012 - RNA, 19 nt, Human
guuagagguucccuuugac

SEQ ID NO: 1790013 - RNA, 13 nt, Human
aagcccagcuuga

SEQ ID NO: 1790014 - RNA, 23 nt, Human
guuacucuucaguuaagccuuug

SEQ ID NO: 1790015 - RNA, 19 nt, Human
guuaauauuuauaggucac

SEQ ID NO: 1790016 - RNA, 18 nt, Human
guuaaucauuagguguga

SEQ ID NO: 1790017 - RNA, 16 nt, Human
aagccucccacgacug

SEQ ID NO: 1790018 - RNA, 15 nt, Human
aagccuccuccagcc

SEQ ID NO: 1790019 - RNA, 15 nt, Human
aagccuguuuaagag

SEQ ID NO: 1790020 - RNA, 18 nt, Human
aagccuguuuaagagaca

SEQ ID NO: 1790021 - RNA, 23 nt, Human
guucagcuuguaaauagcucagg

SEQ ID NO: 1790022 - RNA, 18 nt, Human
guuauuuugauguaaaga

SEQ ID NO: 1790023 - RNA, 22 nt, Human
guucaggguuggccccugcccg

SEQ ID NO: 1790024 - RNA, 21 nt, Human
guucaggguuggccccugccc

SEQ ID NO: 1790025 - RNA, 20 nt, Human
guucaggguuggccccugcc

SEQ ID NO: 1790026 - RNA, 21 nt, Human
aagccgugauuuucauugcug

SEQ ID NO: 1790027 - RNA, 13 nt, Human
aagccguggcuuc

SEQ ID NO: 1790028 - RNA, 14 nt, Human
aagccguggcuucc

SEQ ID NO: 1790029 - RNA, 15 nt, Human
aagccguggcuuccc

SEQ ID NO: 1790030 - RNA, 18 nt, Human
guucagguaacaggcaga

SEQ ID NO: 1790031 - RNA, 17 nt, Human
guucagguaacaggcag

SEQ ID NO: 1790032 - RNA, 16 nt, Human
aagcacuaaacaaaga

SEQ ID NO: 1790033 - RNA, 17 nt, Human
aagcaccuccugccucg

SEQ ID NO: 1790034 - RNA, 16 nt, Human
aagcaccuccugccuc

SEQ ID NO: 1790035 - RNA, 15 nt, Human
aagcaccuccugccu

SEQ ID NO: 1790036 - RNA, 14 nt, Human
aagcaccuccugcc

SEQ ID NO: 1790037 - RNA, 13 nt, Human
aagcaccuccugc

SEQ ID NO: 1790038 - RNA, 21 nt, Human
aagcacaugccucucucaggc

SEQ ID NO: 1790039 - RNA, 16 nt, Human
guguuucuuuaguuuu

SEQ ID NO: 1790040 - RNA, 13 nt, Human
guguuucuuuagu

SEQ ID NO: 1790041 - RNA, 16 nt, Human
aagcacacuugacauc

SEQ ID NO: 1790042 - RNA, 14 nt, Human
aagcacaugccucu

SEQ ID NO: 1790043 - RNA, 15 nt, Human
aagcacaugccucuc

SEQ ID NO: 1790044 - RNA, 16 nt, Human
aagcacaugccucucu

SEQ ID NO: 1790045 - RNA, 19 nt, Human
aagcacaugccucucucag

SEQ ID NO: 1790046 - RNA, 20 nt, Human
aagcacaugccucucucagg

SEQ ID NO: 1790047 - RNA, 13 nt, Human
aagcauuuuguaa

SEQ ID NO: 1790048 - RNA, 12 nt, Human
aagcauuuugua

SEQ ID NO: 1790049 - RNA, 20 nt, Human
aagccaaagcuaggccuggc

SEQ ID NO: 1790050 - RNA, 18 nt, Human
aagccaaagcuaggccug

SEQ ID NO: 1790051 - RNA, 17 nt, Human
aagccaaagcuaggccu

SEQ ID NO: 1790052 - RNA, 23 nt, Human
aagcaugcacaaauucugucucu

SEQ ID NO: 1790053 - RNA, 12 nt, Human
aagcaugugaga

SEQ ID NO: 1790054 - RNA, 23 nt, Human
gugcugcccugcccaccuggccu

SEQ ID NO: 1790055 - RNA, 15 nt, Human
gugguuucagaaaug

SEQ ID NO: 1790056 - RNA, 21 nt, Human
aagagggagggagggcuccag

SEQ ID NO: 1790057 - RNA, 22 nt, Human
aagagggagggagggcuccaga

SEQ ID NO: 1790058 - RNA, 14 nt, Human
aagaggcagggucu

SEQ ID NO: 1790059 - RNA, 11 nt, Human
aagaggcaggg

SEQ ID NO: 1790060 - RNA, 18 nt, Human
guguaagaaauacagacu

SEQ ID NO: 1790061 - RNA, 20 nt, Human
aagcaaaugugaaucauuuu

SEQ ID NO: 1790062 - RNA, 17 nt, Human
aagcaacccaaauguuc

SEQ ID NO: 1790063 - RNA, 23 nt, Human
aagauggcacuuauaaccaaagc

SEQ ID NO: 1790064 - RNA, 16 nt, Human
aagauggcugugccuc

SEQ ID NO: 1790065 - RNA, 23 nt, Human
aagaucaaaagguuaauaaagua

SEQ ID NO: 1790066 - RNA, 20 nt, Human
aagaucaaaagguuaauaaa

SEQ ID NO: 1790067 - RNA, 19 nt, Human
gugucagguggggcagcuu

SEQ ID NO: 1790068 - RNA, 20 nt, Human
gugucagguggggcagcuug

SEQ ID NO: 1790069 - RNA, 23 nt, Human
gugugaaccaccacacccagccc

SEQ ID NO: 1790070 - RNA, 18 nt, Human
gugucagguggggcagcu

SEQ ID NO: 1790071 - RNA, 14 nt, Human
gugucagguggggc

SEQ ID NO: 1790072 - RNA, 22 nt, Human
gugucaccugaagacucauucu

SEQ ID NO: 1790073 - RNA, 14 nt, Human
gugucaccugaaga

SEQ ID NO: 1790074 - RNA, 21 nt, Human
gcccugugggcccccaaaugg

SEQ ID NO: 1790075 - RNA, 23 nt, Human
gcccuuaccugccaggaagccag

SEQ ID NO: 1790076 - RNA, 19 nt, Human
gcccuuagcagggaaacag

SEQ ID NO: 1790077 - RNA, 16 nt, Human
gcccugugggccccca

SEQ ID NO: 1790078 - RNA, 17 nt, Human
gcccugugggcccccaa

SEQ ID NO: 1790079 - RNA, 21 nt, Human
gcccuuaccugccaggaagcc

SEQ ID NO: 1790080 - RNA, 22 nt, Human
gcccuuaccugccaggaagcca

SEQ ID NO: 1790081 - RNA, 20 nt, Human
gcccugcgggucacaggagg

SEQ ID NO: 1790082 - RNA, 14 nt, Human
gcccugcccaccug

SEQ ID NO: 1790083 - RNA, 15 nt, Human
gcccugcccaccugg

SEQ ID NO: 1790084 - RNA, 16 nt, Human
gccuacaggagugagc

SEQ ID NO: 1790085 - RNA, 14 nt, Human
gcccuuccucucca

SEQ ID NO: 1790086 - RNA, 15 nt, Human
gcccuuccucuccac

SEQ ID NO: 1790087 - RNA, 22 nt, Human
gcccuuccaugucgccucugca

SEQ ID NO: 1790088 - RNA, 12 nt, Human
gcccuuccucuc

SEQ ID NO: 1790089 - RNA, 12 nt, Human
gcccuuccaugu

SEQ ID NO: 1790090 - RNA, 21 nt, Human
gcccuuccaugucgccucugc

SEQ ID NO: 1790091 - RNA, 21 nt, Human
gccccugcugguucaggguug

SEQ ID NO: 1790092 - RNA, 16 nt, Human
gccccuggcagccccu

SEQ ID NO: 1790093 - RNA, 17 nt, Human
gccccuggcagccccug

SEQ ID NO: 1790094 - RNA, 17 nt, Human
gccuacaggagugagca

SEQ ID NO: 1790095 - RNA, 19 nt, Human
gccuagcauacguacacau

SEQ ID NO: 1790096 - RNA, 12 nt, Human
gccuagcauacg

SEQ ID NO: 1790097 - RNA, 13 nt, Human
gccucgaacuggc

SEQ ID NO: 1790098 - RNA, 22 nt, Human
gccuccuuugugaggaagccgc

SEQ ID NO: 1790099 - RNA, 16 nt, Human
gccucgaacuggcugc

SEQ ID NO: 1790100 - RNA, 19 nt, Human
gccuccugaguagcuggga

SEQ ID NO: 1790101 - RNA, 18 nt, Human
gccuccugcccuuaccug

SEQ ID NO: 1790102 - RNA, 15 nt, Human
gccuccauccugagg

SEQ ID NO: 1790103 - RNA, 14 nt, Human
gccuccauccugag

SEQ ID NO: 1790104 - RNA, 13 nt, Human
gccuccauccuga

SEQ ID NO: 1790105 - RNA, 19 nt, Human
gccucaugcuaagacucag

SEQ ID NO: 1790106 - RNA, 19 nt, Human
gccucaugucaaauauuua

SEQ ID NO: 1790107 - RNA, 22 nt, Human
gccucauguccacugguucuuc

SEQ ID NO: 1790108 - RNA, 16 nt, Human
gccccugcugguucag

SEQ ID NO: 1790109 - RNA, 15 nt, Human
gccccugcugguuca

SEQ ID NO: 1790110 - RNA, 12 nt, Human
gccccuggcagc

SEQ ID NO: 1790111 - RNA, 15 nt, Human
gccccuggcagcccc

SEQ ID NO: 1790112 - RNA, 12 nt, Human
gccccugcuggu

SEQ ID NO: 1790113 - RNA, 17 nt, Human
gcccccucugcccugcg

SEQ ID NO: 1790114 - RNA, 15 nt, Human
gcccccucugcccug

SEQ ID NO: 1790115 - RNA, 16 nt, Human
gcccccucugcccugc

SEQ ID NO: 1790116 - RNA, 21 nt, Human
gccccaaaacucuccucugcu

SEQ ID NO: 1790117 - RNA, 11 nt, Human
gccccaaaagg

SEQ ID NO: 1790118 - RNA, 20 nt, Human
gccccaaaacucuccucugc

SEQ ID NO: 1790119 - RNA, 18 nt, Human
gcauuuacuuuguguuca

SEQ ID NO: 1790120 - RNA, 19 nt, Human
gcauuuaggccaugggaca

SEQ ID NO: 1790121 - RNA, 17 nt, Human
gccauugacuucuuccc

SEQ ID NO: 1790122 - RNA, 15 nt, Human
gcccacgcccccacu

SEQ ID NO: 1790123 - RNA, 16 nt, Human
gcccacgcccccacug

SEQ ID NO: 1790124 - RNA, 17 nt, Human
gcccacgcccccacugg

SEQ ID NO: 1790125 - RNA, 21 nt, Human
gcccacgcccccacuggugac

SEQ ID NO: 1790126 - RNA, 13 nt, Human
gcccacuucugcc

SEQ ID NO: 1790127 - RNA, 24 nt, Human
gcccaggaaaggcuccaggagcag

SEQ ID NO: 1790128 - RNA, 22 nt, Human
gcccaggaaaggcuccaggagc

SEQ ID NO: 1790129 - RNA, 23 nt, Human
gcccaggaaaggcuccaggagca

SEQ ID NO: 1790130 - RNA, 21 nt, Human
gcccacgcuggagugcaguga

SEQ ID NO: 1790131 - RNA, 19 nt, Human
gcccacgcuggagugcagu

SEQ ID NO: 1790132 - RNA, 23 nt, Human
gcccacgcuggagugcagugagc

SEQ ID NO: 1790133 - RNA, 15 nt, Human
gcccacuguacuugc

SEQ ID NO: 1790134 - RNA, 20 nt, Human
gcccacuguacuugcucuug

SEQ ID NO: 1790135 - RNA, 22 nt, Human
gcccacuguacuugcucuugau

SEQ ID NO: 1790136 - RNA, 22 nt, Human
gcccaggccccugccacccugg

SEQ ID NO: 1790137 - RNA, 21 nt, Human
gcccaggccccugccacccug

SEQ ID NO: 1790138 - RNA, 20 nt, Human
gcccaggccccugccacccu

SEQ ID NO: 1790139 - RNA, 12 nt, Human
gcccaggccccu

SEQ ID NO: 1790140 - RNA, 11 nt, Human
gcccaggcccc

SEQ ID NO: 1790141 - RNA, 11 nt, Human
gcccaggcagg

SEQ ID NO: 1790142 - RNA, 12 nt, Human
gcccaggcaggu

SEQ ID NO: 1790143 - RNA, 23 nt, Human
gccugggaucccucauccucaua

SEQ ID NO: 1790144 - RNA, 11 nt, Human
gccugggcaga

SEQ ID NO: 1790145 - RNA, 19 nt, Human
gccugugccucugggacug

SEQ ID NO: 1790146 - RNA, 17 nt, Human
gccuguucagcuccagc

SEQ ID NO: 1790147 - RNA, 16 nt, Human
gccuguucagcuccag

SEQ ID NO: 1790148 - RNA, 15 nt, Human
gccuguucagcucca

SEQ ID NO: 1790149 - RNA, 16 nt, Human
gccuucucugaaggac

SEQ ID NO: 1790150 - RNA, 15 nt, Human
gccuucucugaagga

SEQ ID NO: 1790151 - RNA, 14 nt, Human
gccuugaacuuuga

SEQ ID NO: 1790152 - RNA, 22 nt, Human
gcgauucuucugcuucagccuc

SEQ ID NO: 1790153 - RNA, 23 nt, Human
gccuugaccauucuccaccugcc

SEQ ID NO: 1790154 - RNA, 23 nt, Human
gccuugaacuuugaccucugcag

SEQ ID NO: 1790155 - RNA, 16 nt, Human
gccuugaccauucucc

SEQ ID NO: 1790156 - RNA, 22 nt, Human
gccuugaccauucuccaccugc

SEQ ID NO: 1790157 - RNA, 23 nt, Human
gcgauucuucugcuucagccucc

SEQ ID NO: 1790158 - RNA, 14 nt, Human
gcgcaggcuggccc

SEQ ID NO: 1790159 - RNA, 21 nt, Human
gcgcagcauauucaggaagcu

SEQ ID NO: 1790160 - RNA, 15 nt, Human
gcgcaggcuggcccu

SEQ ID NO: 1790161 - RNA, 16 nt, Human
gcgcaggcuggcccug

SEQ ID NO: 1790162 - RNA, 15 nt, Human
gcggcuggcagccca

SEQ ID NO: 1790163 - RNA, 16 nt, Human
gcggccuuuggcuuca

SEQ ID NO: 1790164 - RNA, 22 nt, Human
gcuaagugauccucccaccuca

SEQ ID NO: 1790165 - RNA, 18 nt, Human
gcuaagugauccucccac

SEQ ID NO: 1790166 - RNA, 16 nt, Human
gcuaguugggcuuccu

SEQ ID NO: 1790167 - RNA, 14 nt, Human
gcuaguugggcuuc

SEQ ID NO: 1790168 - RNA, 18 nt, Human
gcuauucaguaauaacuc

SEQ ID NO: 1790169 - RNA, 20 nt, Human
gcuaggaccccuccaugugg

SEQ ID NO: 1790170 - RNA, 22 nt, Human
gcuaggaccccuccaugugggc

SEQ ID NO: 1790171 - RNA, 21 nt, Human
gcuaggaauuguguuuauaau

SEQ ID NO: 1790172 - RNA, 16 nt, Human
gcucagagcaguguuu

SEQ ID NO: 1790173 - RNA, 22 nt, Human
gcucaggagcccugggaggcuc

SEQ ID NO: 1790174 - RNA, 23 nt, Human
gcucaggagcccugggaggcucu

SEQ ID NO: 1790175 - RNA, 13 nt, Human
gcucaggaguuug

SEQ ID NO: 1790176 - RNA, 18 nt, Human
gcucagggccuggcucag

SEQ ID NO: 1790177 - RNA, 19 nt, Human
gcucagggccuggcucagg

SEQ ID NO: 1790178 - RNA, 20 nt, Human
gcucagggccuggcucaggu

SEQ ID NO: 1790179 - RNA, 18 nt, Human
ggaagccgcuggggccag

SEQ ID NO: 1790180 - RNA, 22 nt, Human
ggaagccagcaggcucucaggc

SEQ ID NO: 1790181 - RNA, 23 nt, Human
ggaagccagcaggcucucaggcc

SEQ ID NO: 1790182 - RNA, 21 nt, Human
ggaagccagcaggcucucagg

SEQ ID NO: 1790183 - RNA, 16 nt, Human
ggaaauccaggguggu

SEQ ID NO: 1790184 - RNA, 23 nt, Human
ggaaaucaccgaaaacguggcug

SEQ ID NO: 1790185 - RNA, 16 nt, Human
ggaauauauaaccagu

SEQ ID NO: 1790186 - RNA, 16 nt, Human
ggaauaccuguccccc

SEQ ID NO: 1790187 - RNA, 19 nt, Human
ggaauaccugucccccuga

SEQ ID NO: 1790188 - RNA, 22 nt, Human
ggaagcucagggccuggcucag

SEQ ID NO: 1790189 - RNA, 21 nt, Human
ggaagcucagggccuggcuca

SEQ ID NO: 1790190 - RNA, 15 nt, Human
ggaauaccugucccc

SEQ ID NO: 1790191 - RNA, 16 nt, Human
ggaagcucagggccug

SEQ ID NO: 1790192 - RNA, 17 nt, Human
ggaagcucagggccugg

SEQ ID NO: 1790193 - RNA, 12 nt, Human
ggacacagcucu

SEQ ID NO: 1790194 - RNA, 14 nt, Human
ggaaugauuaauua

SEQ ID NO: 1790195 - RNA, 19 nt, Human
ggaaugaaugucaguguga

SEQ ID NO: 1790196 - RNA, 13 nt, Human
ggacacagcucuu

SEQ ID NO: 1790197 - RNA, 14 nt, Human
ggacacagcucuuc

SEQ ID NO: 1790198 - RNA, 12 nt, Human
ggacacccugug

SEQ ID NO: 1790199 - RNA, 17 nt, Human
ggacagggaggugaccc

SEQ ID NO: 1790200 - RNA, 13 nt, Human
ggacacccuguga

SEQ ID NO: 1790201 - RNA, 23 nt, Human
ggacacccugugauggggcccug

SEQ ID NO: 1790202 - RNA, 22 nt, Human
ggacagggcauggccagguggc

SEQ ID NO: 1790203 - RNA, 15 nt, Human
ggacagggcauggcc

SEQ ID NO: 1790204 - RNA, 13 nt, Human
ggacauggacaag

SEQ ID NO: 1790205 - RNA, 14 nt, Human
ggacauggacaagg

SEQ ID NO: 1790206 - RNA, 16 nt, Human
gcuuaacuucacauau

SEQ ID NO: 1790207 - RNA, 16 nt, Human
gcuucuucagagacuc

SEQ ID NO: 1790208 - RNA, 17 nt, Human
gcuuaacuucacauauu

SEQ ID NO: 1790209 - RNA, 19 nt, Human
gcuucuucagagacuccug

SEQ ID NO: 1790210 - RNA, 21 nt, Human
gcuucuucagagacuccugca

SEQ ID NO: 1790211 - RNA, 23 nt, Human
gcuucuucagagacuccugcagg

SEQ ID NO: 1790212 - RNA, 17 nt, Human
gcuugaccgugaggcca

SEQ ID NO: 1790213 - RNA, 18 nt, Human
gcuugaccgugaggccag

SEQ ID NO: 1790214 - RNA, 19 nt, Human
gcuugaccgugaggccaga

SEQ ID NO: 1790215 - RNA, 23 nt, Human
gcuugggcuucauccuccucaga

SEQ ID NO: 1790216 - RNA, 16 nt, Human
gcuuggggaccagagc

SEQ ID NO: 1790217 - RNA, 23 nt, Human
gcuuucuacccagcgagcccugg

SEQ ID NO: 1790218 - RNA, 22 nt, Human
gcuuucuacccagcgagcccug

SEQ ID NO: 1790219 - RNA, 19 nt, Human
gcuuucuacccagcgagcc

SEQ ID NO: 1790220 - RNA, 13 nt, Human
gcuuucuacccag

SEQ ID NO: 1790221 - RNA, 22 nt, Human
gcuuggggaccagagcugccac

SEQ ID NO: 1790222 - RNA, 17 nt, Human
gcuuggggaccagagcu

SEQ ID NO: 1790223 - RNA, 18 nt, Human
gcuuggggaccagagcug

SEQ ID NO: 1790224 - RNA, 20 nt, Human
gcuuggggaccagagcugcc

SEQ ID NO: 1790225 - RNA, 21 nt, Human
gcuuggggaccagagcugcca

SEQ ID NO: 1790226 - RNA, 14 nt, Human
gcuuuggaaguuuu

SEQ ID NO: 1790227 - RNA, 16 nt, Human
ggaaaaaauaacaaug

SEQ ID NO: 1790228 - RNA, 19 nt, Human
gcuuuugugcauuaucuag

SEQ ID NO: 1790229 - RNA, 13 nt, Human
gcuuuugugcauu

SEQ ID NO: 1790230 - RNA, 15 nt, Human
gcuuuuuaauauuga

SEQ ID NO: 1790231 - RNA, 20 nt, Human
ggaaacagcuaaugggacac

SEQ ID NO: 1790232 - RNA, 15 nt, Human
ggaaacccagcucug

SEQ ID NO: 1790233 - RNA, 21 nt, Human
ggaaacuaggugcauauuuau

SEQ ID NO: 1790234 - RNA, 19 nt, Human
ggaaagcaaaggagauugg

SEQ ID NO: 1790235 - RNA, 16 nt, Human
ggaaagaguaggaaga

SEQ ID NO: 1790236 - RNA, 17 nt, Human
ggaaagaguaggaagac

SEQ ID NO: 1790237 - RNA, 20 nt, Human
ggaaagacuuuuccaacccu

SEQ ID NO: 1790238 - RNA, 14 nt, Human
ggaaagaggcucug

SEQ ID NO: 1790239 - RNA, 20 nt, Human
gcuuuucccuuuuuuuaagu

SEQ ID NO: 1790240 - RNA, 21 nt, Human
gcuuuucccuuuuuuuaagua

SEQ ID NO: 1790241 - RNA, 13 nt, Human
gcugccucaugcu

SEQ ID NO: 1790242 - RNA, 16 nt, Human
gcugccucucccauca

SEQ ID NO: 1790243 - RNA, 20 nt, Human
gcugccugggaucccucauc

SEQ ID NO: 1790244 - RNA, 13 nt, Human
gcugccuguucag

SEQ ID NO: 1790245 - RNA, 12 nt, Human
gcugccuguuca

SEQ ID NO: 1790246 - RNA, 17 nt, Human
gcugccuguucagcucc

SEQ ID NO: 1790247 - RNA, 23 nt, Human
gcugcucuugaacuccugaccuc

SEQ ID NO: 1790248 - RNA, 21 nt, Human
gcugccugggaucccucaucc

SEQ ID NO: 1790249 - RNA, 20 nt, Human
gcugccccuggcagccccug

SEQ ID NO: 1790250 - RNA, 18 nt, Human
gcugccccuggcagcccc

SEQ ID NO: 1790251 - RNA, 19 nt, Human
gcugccccuggcagccccu

SEQ ID NO: 1790252 - RNA, 18 nt, Human
gcugcacccucaggcagg

SEQ ID NO: 1790253 - RNA, 19 nt, Human
gcugcacccucaggcaggu

SEQ ID NO: 1790254 - RNA, 13 nt, Human
gcugcaccggcug

SEQ ID NO: 1790255 - RNA, 14 nt, Human
gcugcaccggcugg

SEQ ID NO: 1790256 - RNA, 23 nt, Human
gcugagggugagugggugaauaa

SEQ ID NO: 1790257 - RNA, 14 nt, Human
gcugaggugggagg

SEQ ID NO: 1790258 - RNA, 16 nt, Human
gcugagaggagagaga

SEQ ID NO: 1790259 - RNA, 15 nt, Human
gcugaggugggagga

SEQ ID NO: 1790260 - RNA, 23 nt, Human
gcuggcuguuggcugggggccuc

SEQ ID NO: 1790261 - RNA, 20 nt, Human
gcuggcuguuggcugggggc

SEQ ID NO: 1790262 - RNA, 12 nt, Human
gcugggccccug

SEQ ID NO: 1790263 - RNA, 13 nt, Human
gcugggccccugc

SEQ ID NO: 1790264 - RNA, 14 nt, Human
gcugggccccugcc

SEQ ID NO: 1790265 - RNA, 18 nt, Human
gcugggccccugccucuc

SEQ ID NO: 1790266 - RNA, 20 nt, Human
gcugggccccugccucucug

SEQ ID NO: 1790267 - RNA, 17 nt, Human
gcugggguggggaccuc

SEQ ID NO: 1790268 - RNA, 19 nt, Human
gcugggguggggaccucag

SEQ ID NO: 1790269 - RNA, 22 nt, Human
gcugggguggggaccucaggcc

SEQ ID NO: 1790270 - RNA, 23 nt, Human
gcugggguggggaccucaggccu

SEQ ID NO: 1790271 - RNA, 18 nt, Human
gcuggguucuacccaggu

SEQ ID NO: 1790272 - RNA, 17 nt, Human
gcuggguucuacccagg

SEQ ID NO: 1790273 - RNA, 20 nt, Human
gcuggguucuacccaggugc

SEQ ID NO: 1790274 - RNA, 21 nt, Human
gcuggguucuacccaggugcu

SEQ ID NO: 1790275 - RNA, 14 nt, Human
gcuggcgugcagug

SEQ ID NO: 1790276 - RNA, 19 nt, Human
gcuggcuguuggcuggggg

SEQ ID NO: 1790277 - RNA, 18 nt, Human
gcuggcuguuggcugggg

SEQ ID NO: 1790278 - RNA, 14 nt, Human
gcuggcugccuuag

SEQ ID NO: 1790279 - RNA, 20 nt, Human
gcuggcugccuuagaaccuu

SEQ ID NO: 1790280 - RNA, 11 nt, Human
gcuggcugccu

SEQ ID NO: 1790281 - RNA, 18 nt, Human
gcuggcgugcaguggugc

SEQ ID NO: 1790282 - RNA, 15 nt, Human
gcuggcgugcagugg

SEQ ID NO: 1790283 - RNA, 12 nt, Human
gcugcugaaggc

SEQ ID NO: 1790284 - RNA, 20 nt, Human
gcuguuggcugggggccuca

SEQ ID NO: 1790285 - RNA, 16 nt, Human
gcuguuggcugggggc

SEQ ID NO: 1790286 - RNA, 15 nt, Human
gcuguuggcuggggg

SEQ ID NO: 1790287 - RNA, 17 nt, Human
gcugugcugcccugccc

SEQ ID NO: 1790288 - RNA, 15 nt, Human
gcugugcugcccugc

SEQ ID NO: 1790289 - RNA, 16 nt, Human
gcugugcugcccugcc

SEQ ID NO: 1790290 - RNA, 13 nt, Human
gcugugcucugga

SEQ ID NO: 1790291 - RNA, 14 nt, Human
gcugugccucugcc

SEQ ID NO: 1790292 - RNA, 15 nt, Human
gcugugccucugccu

SEQ ID NO: 1790293 - RNA, 16 nt, Human
gcugugccucugccug

SEQ ID NO: 1790294 - RNA, 16 nt, Human
gcugugcucuggacag

SEQ ID NO: 1790295 - RNA, 15 nt, Human
gcugugcucuggaca

SEQ ID NO: 1790296 - RNA, 18 nt, Human
gcugugcucuggacaggc

SEQ ID NO: 1790297 - RNA, 14 nt, Human
gcugugcugcccug

SEQ ID NO: 1790298 - RNA, 19 nt, Human
gcuguaucccaugagccuc

SEQ ID NO: 1790299 - RNA, 17 nt, Human
gcuguaucccaugagcc

SEQ ID NO: 1790300 - RNA, 15 nt, Human
aaagcagcguuucua

SEQ ID NO: 1790301 - RNA, 16 nt, Human
aaagcuaggccuggcc

SEQ ID NO: 1790302 - RNA, 14 nt, Human
aaagcuaggccugg

SEQ ID NO: 1790303 - RNA, 13 nt, Human
aaagcagugcaug

SEQ ID NO: 1790304 - RNA, 14 nt, Human
aaagcuagaaauga

SEQ ID NO: 1790305 - RNA, 16 nt, Human
aaagcagugcaugcug

SEQ ID NO: 1790306 - RNA, 17 nt, Human
aaagcuaggccuggcca

SEQ ID NO: 1790307 - RNA, 12 nt, Human
aaagcugccagc

SEQ ID NO: 1790308 - RNA, 13 nt, Human
aaagcugccagcc

SEQ ID NO: 1790309 - RNA, 22 nt, Human
aaagcugccagccgagauagcc

SEQ ID NO: 1790310 - RNA, 14 nt, Human
aaagcuguguggca

SEQ ID NO: 1790311 - RNA, 14 nt, Human
gguggcaccagcag

SEQ ID NO: 1790312 - RNA, 20 nt, Human
gguggcaccagcagccugga

SEQ ID NO: 1790313 - RNA, 16 nt, Human
aaagcagaacagugau

SEQ ID NO: 1790314 - RNA, 19 nt, Human
aaacuuuaugcuaagugaa

SEQ ID NO: 1790315 - RNA, 12 nt, Human
aaacuuuaugcu

SEQ ID NO: 1790316 - RNA, 20 nt, Human
aaagggcccagagagggugg

SEQ ID NO: 1790317 - RNA, 18 nt, Human
aaagguucaugcaaacuu

SEQ ID NO: 1790318 - RNA, 12 nt, Human
gguggcuggguu

SEQ ID NO: 1790319 - RNA, 18 nt, Human
gguggcuggguuggaggg

SEQ ID NO: 1790320 - RNA, 21 nt, Human
aaaguaaaaacaaagaaauua

SEQ ID NO: 1790321 - RNA, 19 nt, Human
gguggggaccucaggccug

SEQ ID NO: 1790322 - RNA, 13 nt, Human
ggugggacacccu

SEQ ID NO: 1790323 - RNA, 16 nt, Human
ggugggacacccugug

SEQ ID NO: 1790324 - RNA, 17 nt, Human
ggugggacacccuguga

SEQ ID NO: 1790325 - RNA, 20 nt, Human
ggugggaggaucucuugagc

SEQ ID NO: 1790326 - RNA, 22 nt, Human
gguucccuuuuuuggcugcuga

SEQ ID NO: 1790327 - RNA, 23 nt, Human
gguucccuuugacgccaucccag

SEQ ID NO: 1790328 - RNA, 17 nt, Human
gguucccauuugcuccu

SEQ ID NO: 1790329 - RNA, 19 nt, Human
gguguuuccuggcacugcu

SEQ ID NO: 1790330 - RNA, 17 nt, Human
gguguuuccuggcacug

SEQ ID NO: 1790331 - RNA, 11 nt, Human
gguguggggga

SEQ ID NO: 1790332 - RNA, 13 nt, Human
ggugugggggaag

SEQ ID NO: 1790333 - RNA, 13 nt, Human
ggugggggccucg

SEQ ID NO: 1790334 - RNA, 14 nt, Human
gguguggagaagcg

SEQ ID NO: 1790335 - RNA, 23 nt, Human
gguguggagaagcggcuggcagc

SEQ ID NO: 1790336 - RNA, 12 nt, Human
gguguggagaag

SEQ ID NO: 1790337 - RNA, 20 nt, Human
gguuuguaaauuaacuuuua

SEQ ID NO: 1790338 - RNA, 22 nt, Human
gguuucuaaagcugccagccga

SEQ ID NO: 1790339 - RNA, 16 nt, Human
gguuuccugcccuggg

SEQ ID NO: 1790340 - RNA, 19 nt, Human
gguuuccugcccugggagg

SEQ ID NO: 1790341 - RNA, 16 nt, Human
gguuucuaaagcugcc

SEQ ID NO: 1790342 - RNA, 12 nt, Human
gguuuccugccc

SEQ ID NO: 1790343 - RNA, 13 nt, Human
gguuuccugcccu

SEQ ID NO: 1790344 - RNA, 15 nt, Human
gguuuccugcccugg

SEQ ID NO: 1790345 - RNA, 21 nt, Human
aaaguaucccuacuguaauuu

SEQ ID NO: 1790346 - RNA, 20 nt, Human
aaaguagaagucuuagaugu

SEQ ID NO: 1790347 - RNA, 22 nt, Human
aaaguagaagucuuagauguau

SEQ ID NO: 1790348 - RNA, 18 nt, Human
aaaguacacuguuucaaa

SEQ ID NO: 1790349 - RNA, 19 nt, Human
aaaguacacuguuucaaac

SEQ ID NO: 1790350 - RNA, 20 nt, Human
aaagugguauagaaaugcug

SEQ ID NO: 1790351 - RNA, 17 nt, Human
aaagugguauagaaaug

SEQ ID NO: 1790352 - RNA, 16 nt, Human
aaagugguauagaaau

SEQ ID NO: 1790353 - RNA, 21 nt, Human
aaaguguauuuuuuuacuaau

SEQ ID NO: 1790354 - RNA, 14 nt, Human
aaaguguauuuuuu

SEQ ID NO: 1790355 - RNA, 21 nt, Human
aaaguauccugcuucugauau

SEQ ID NO: 1790356 - RNA, 16 nt, Human
guacacacacauacac

SEQ ID NO: 1790357 - RNA, 19 nt, Human
aaauaccagccaguaaaug

SEQ ID NO: 1790358 - RNA, 21 nt, Human
aaauaccagccaguaaauggg

SEQ ID NO: 1790359 - RNA, 20 nt, Human
aaauaccagccaguaaaugg

SEQ ID NO: 1790360 - RNA, 15 nt, Human
aaauauaggaacuua

SEQ ID NO: 1790361 - RNA, 18 nt, Human
aaauauaugcuaagucuu

SEQ ID NO: 1790362 - RNA, 14 nt, Human
aaauauauaucaaa

SEQ ID NO: 1790363 - RNA, 16 nt, Human
aaauauauuuuaagac

SEQ ID NO: 1790364 - RNA, 22 nt, Human
aaauauauuuuaagacgaaaca

SEQ ID NO: 1790365 - RNA, 20 nt, Human
aaauauuccugcauuuguga

SEQ ID NO: 1790366 - RNA, 19 nt, Human
aaauauuaagaaagacuau

SEQ ID NO: 1790367 - RNA, 19 nt, Human
aaaucagccugcuccagcu

SEQ ID NO: 1790368 - RNA, 21 nt, Human
aaaucagccugcuccagcugu

SEQ ID NO: 1790369 - RNA, 23 nt, Human
aaaucagccugcuccagcuguuc

SEQ ID NO: 1790370 - RNA, 19 nt, Human
aaauauggucuuuugguua

SEQ ID NO: 1790371 - RNA, 12 nt, Human
aaauaucugaaa

SEQ ID NO: 1790372 - RNA, 14 nt, Human
aaauaucugaaaau

SEQ ID NO: 1790373 - RNA, 17 nt, Human
aaauaucugaaaaugua

SEQ ID NO: 1790374 - RNA, 18 nt, Human
aaauaucugaaaauguau

SEQ ID NO: 1790375 - RNA, 19 nt, Human
aaauaucugaaaauguaug

SEQ ID NO: 1790376 - RNA, 21 nt, Human
aaauaucugaaaauguaugug

SEQ ID NO: 1790377 - RNA, 22 nt, Human
aaauaucugaaaauguaugugu

SEQ ID NO: 1790378 - RNA, 23 nt, Human
aaauaucugaaaauguaugugua

SEQ ID NO: 1790379 - RNA, 22 nt, Human
guaacuaaaauaauuuuguaau

SEQ ID NO: 1790380 - RNA, 20 nt, Human
guaacuaaaauaauuuugua

SEQ ID NO: 1790381 - RNA, 15 nt, Human
guaacuaaaauaauu

SEQ ID NO: 1790382 - RNA, 13 nt, Human
guaacuaaaauaa

SEQ ID NO: 1790383 - RNA, 16 nt, Human
guaauaauaaagaaua

SEQ ID NO: 1790384 - RNA, 12 nt, Human
guaauaauaaag

SEQ ID NO: 1790385 - RNA, 22 nt, Human
guacaaccuguucugcuuuccu

SEQ ID NO: 1790386 - RNA, 21 nt, Human
guaauuuuuuuaucgucacug

SEQ ID NO: 1790387 - RNA, 22 nt, Human
guaauuugugauacaaugcugu

SEQ ID NO: 1790388 - RNA, 20 nt, Human
guaauuugugauacaaugcu

SEQ ID NO: 1790389 - RNA, 17 nt, Human
guaauuugugauacaau

SEQ ID NO: 1790390 - RNA, 17 nt, Human
guaaucgaccugccucg

SEQ ID NO: 1790391 - RNA, 15 nt, Human
guaauuugugauaca

SEQ ID NO: 1790392 - RNA, 23 nt, Human
guaauccuagcacuuugggaggc

SEQ ID NO: 1790393 - RNA, 15 nt, Human
guaaucgaccugccu

SEQ ID NO: 1790394 - RNA, 14 nt, Human
aaauaaugugaaac

SEQ ID NO: 1790395 - RNA, 22 nt, Human
aaauaaugugaaacuggauuaa

SEQ ID NO: 1790396 - RNA, 22 nt, Human
aaaguguauuuuuuuacuaaua

SEQ ID NO: 1790397 - RNA, 13 nt, Human
guaaaccuuuuau

SEQ ID NO: 1790398 - RNA, 20 nt, Human
guaacaggaaaauuuuaaaa

SEQ ID NO: 1790399 - RNA, 16 nt, Human
guaacaagccacccca

SEQ ID NO: 1790400 - RNA, 19 nt, Human
guaacaggaaaauuuuaaa

SEQ ID NO: 1790401 - RNA, 15 nt, Human
guaaagcuagaaaug

SEQ ID NO: 1790402 - RNA, 16 nt, Human
guaaagcuagaaauga

SEQ ID NO: 1790403 - RNA, 23 nt, Human
ggguuuugccauguuggccaggc

SEQ ID NO: 1790404 - RNA, 20 nt, Human
ggguuuugccauguuggcca

SEQ ID NO: 1790405 - RNA, 15 nt, Human
gggugguggugauag

SEQ ID NO: 1790406 - RNA, 19 nt, Human
gggugggacacccugugau

SEQ ID NO: 1790407 - RNA, 13 nt, Human
gguaacaggcaga

SEQ ID NO: 1790408 - RNA, 22 nt, Human
gguaaaucagacuaugaaguuu

SEQ ID NO: 1790409 - RNA, 14 nt, Human
aaacuuaaucuaaa

SEQ ID NO: 1790410 - RNA, 19 nt, Human
aaacuuaaucuaaauggaa

SEQ ID NO: 1790411 - RNA, 15 nt, Human
gggugggacacccug

SEQ ID NO: 1790412 - RNA, 18 nt, Human
gggugggacacccuguga

SEQ ID NO: 1790413 - RNA, 21 nt, Human
aaacguggcugcuucaaggau

SEQ ID NO: 1790414 - RNA, 14 nt, Human
gguaucaggugcug

SEQ ID NO: 1790415 - RNA, 13 nt, Human
gguauagaaaugc

SEQ ID NO: 1790416 - RNA, 11 nt, Human
gguaggguggg

SEQ ID NO: 1790417 - RNA, 23 nt, Human
gguagggugggccuucagggagu

SEQ ID NO: 1790418 - RNA, 20 nt, Human
gguaggguaagugagagagg

SEQ ID NO: 1790419 - RNA, 20 nt, Human
gguaaggaauaccugucccc

SEQ ID NO: 1790420 - RNA, 22 nt, Human
aaacuugauguguuaucucuua

SEQ ID NO: 1790421 - RNA, 14 nt, Human
ggucagugcaaaua

SEQ ID NO: 1790422 - RNA, 19 nt, Human
gguaucaggugcugccauc

SEQ ID NO: 1790423 - RNA, 19 nt, Human
aaacauuuugucauauaag

SEQ ID NO: 1790424 - RNA, 22 nt, Human
gggucacucuggcagcucagag

SEQ ID NO: 1790425 - RNA, 14 nt, Human
gggucacucuggca

SEQ ID NO: 1790426 - RNA, 20 nt, Human
gggucacucuggcagcucag

SEQ ID NO: 1790427 - RNA, 17 nt, Human
aaaccuucacuuaggaa

SEQ ID NO: 1790428 - RNA, 22 nt, Human
aaaccugugucucugagaguag

SEQ ID NO: 1790429 - RNA, 14 nt, Human
ggggaccagagcug

SEQ ID NO: 1790430 - RNA, 15 nt, Human
ggggaccagagcugc

SEQ ID NO: 1790431 - RNA, 18 nt, Human
aaaauguauguguaagua

SEQ ID NO: 1790432 - RNA, 12 nt, Human
ggggaccagagc

SEQ ID NO: 1790433 - RNA, 13 nt, Human
ggggaccagagcu

SEQ ID NO: 1790434 - RNA, 21 nt, Human
ggggucacucuggcagcucag

SEQ ID NO: 1790435 - RNA, 13 nt, Human
ggggguggccucc

SEQ ID NO: 1790436 - RNA, 15 nt, Human
gggggcugggcagag

SEQ ID NO: 1790437 - RNA, 11 nt, Human
gggggcuggga

SEQ ID NO: 1790438 - RNA, 17 nt, Human
gggggaucacagccucu

SEQ ID NO: 1790439 - RNA, 15 nt, Human
ggggcccugccuccu

SEQ ID NO: 1790440 - RNA, 20 nt, Human
aaaauggaagacagcucuua

SEQ ID NO: 1790441 - RNA, 23 nt, Human
aaaaugcuguauuagucacagag

SEQ ID NO: 1790442 - RNA, 21 nt, Human
aaaaugcuguauuagucacag

SEQ ID NO: 1790443 - RNA, 11 nt, Human
aaaaugagaaa

SEQ ID NO: 1790444 - RNA, 12 nt, Human
aaaaugagaaau

SEQ ID NO: 1790445 - RNA, 15 nt, Human
aaaaucugcuaggga

SEQ ID NO: 1790446 - RNA, 16 nt, Human
aaaauauuuuccugcc

SEQ ID NO: 1790447 - RNA, 22 nt, Human
aaaauaugaccacacuccagcu

SEQ ID NO: 1790448 - RNA, 15 nt, Human
aaaauauuccugcau

SEQ ID NO: 1790449 - RNA, 13 nt, Human
aaaauaccaagga

SEQ ID NO: 1790450 - RNA, 14 nt, Human
aaaauaauuuugua

SEQ ID NO: 1790451 - RNA, 13 nt, Human
aaaauaauuuugu

SEQ ID NO: 1790452 - RNA, 11 nt, Human
aaaaggcagga

SEQ ID NO: 1790453 - RNA, 17 nt, Human
aaaagguuaauaaagua

SEQ ID NO: 1790454 - RNA, 16 nt, Human
aaaagguuaauaaagu

SEQ ID NO: 1790455 - RNA, 22 nt, Human
aaaaggagccaauuuaaagaaa

SEQ ID NO: 1790456 - RNA, 13 nt, Human
aaaaggaugcaca

SEQ ID NO: 1790457 - RNA, 22 nt, Human
aaaaggaugcacagaguuguua

SEQ ID NO: 1790458 - RNA, 19 nt, Human
aaaaggaugcacagaguug

SEQ ID NO: 1790459 - RNA, 15 nt, Human
aaaaggaugcacaga

SEQ ID NO: 1790460 - RNA, 14 nt, Human
aaaaggaugcacag

SEQ ID NO: 1790461 - RNA, 17 nt, Human
gggcuggguucuaccca

SEQ ID NO: 1790462 - RNA, 18 nt, Human
aaaaugguuuaaaugguc

SEQ ID NO: 1790463 - RNA, 16 nt, Human
aaaaugguuuaaaugg

SEQ ID NO: 1790464 - RNA, 20 nt, Human
gggcugcaccggcuggccug

SEQ ID NO: 1790465 - RNA, 21 nt, Human
gggcugcaccggcuggccugg

SEQ ID NO: 1790466 - RNA, 15 nt, Human
gggcugggcagagga

SEQ ID NO: 1790467 - RNA, 19 nt, Human
gggcucagcggggacagcu

SEQ ID NO: 1790468 - RNA, 17 nt, Human
gggcucagcggggacag

SEQ ID NO: 1790469 - RNA, 18 nt, Human
gggcuaguugggcuuccu

SEQ ID NO: 1790470 - RNA, 22 nt, Human
gggcucagcaaaagaugcuucu

SEQ ID NO: 1790471 - RNA, 15 nt, Human
gggcuaguugggcuu

SEQ ID NO: 1790472 - RNA, 20 nt, Human
gggcuaggaaauccagggug

SEQ ID NO: 1790473 - RNA, 21 nt, Human
gggcucagcggggacagcucc

SEQ ID NO: 1790474 - RNA, 10 nt, Human
gggcuccaga

SEQ ID NO: 1790475 - RNA, 13 nt, Human
gggcuccagacac

SEQ ID NO: 1790476 - RNA, 17 nt, Human
gggcugcaccggcuggc

SEQ ID NO: 1790477 - RNA, 19 nt, Human
gggcugcaccggcuggccu

SEQ ID NO: 1790478 - RNA, 15 nt, Human
gggcgugguggugag

SEQ ID NO: 1790479 - RNA, 21 nt, Human
gggcggugagaggggaacaga

SEQ ID NO: 1790480 - RNA, 18 nt, Human
gggcgugagaccugcccc

SEQ ID NO: 1790481 - RNA, 19 nt, Human
gggcgugagaccugccccu

SEQ ID NO: 1790482 - RNA, 19 nt, Human
gggccucuuaugggcuggg

SEQ ID NO: 1790483 - RNA, 18 nt, Human
gggccucuuaugggcugg

SEQ ID NO: 1790484 - RNA, 22 nt, Human
gggccucgguguggagaagcgg

SEQ ID NO: 1790485 - RNA, 14 nt, Human
gggccucagugcca

SEQ ID NO: 1790486 - RNA, 13 nt, Human
gggccucagugcc

SEQ ID NO: 1790487 - RNA, 15 nt, Human
gggccucagugccac

SEQ ID NO: 1790488 - RNA, 12 nt, Human
gggccaggagcc

SEQ ID NO: 1790489 - RNA, 13 nt, Human
gggccaggagccu

SEQ ID NO: 1790490 - RNA, 14 nt, Human
gggccaggagccuc

SEQ ID NO: 1790491 - RNA, 13 nt, Human
ggcucccuuccca

SEQ ID NO: 1790492 - RNA, 15 nt, Human
ggcucuuccaggcug

SEQ ID NO: 1790493 - RNA, 17 nt, Human
ggcucuuccaggcuggg

SEQ ID NO: 1790494 - RNA, 18 nt, Human
ggcucuuccaggcuggga

SEQ ID NO: 1790495 - RNA, 12 nt, Human
ggcugcccuggu

SEQ ID NO: 1790496 - RNA, 10 nt, Human
ggcugcccuu

SEQ ID NO: 1790497 - RNA, 11 nt, Human
ggcugcccuuu

SEQ ID NO: 1790498 - RNA, 14 nt, Human
ggcugcccuuucug

SEQ ID NO: 1790499 - RNA, 18 nt, Human
ggcugcccuuucugggca

SEQ ID NO: 1790500 - RNA, 15 nt, Human
ggcucacugcagccu

SEQ ID NO: 1790501 - RNA, 14 nt, Human
ggcucacugcagcc

SEQ ID NO: 1790502 - RNA, 13 nt, Human
ggcucacugcagc

SEQ ID NO: 1790503 - RNA, 13 nt, Human
aaaaauacaaaaa

SEQ ID NO: 1790504 - RNA, 14 nt, Human
ggcuggguuggagg

SEQ ID NO: 1790505 - RNA, 22 nt, Human
ggcuggguucuacccaggugcu

SEQ ID NO: 1790506 - RNA, 14 nt, Human
aaaaauaaaaaaca

SEQ ID NO: 1790507 - RNA, 21 nt, Human
aaaaaggaugcacagaguugu

SEQ ID NO: 1790508 - RNA, 12 nt, Human
aaaaaggcagga

SEQ ID NO: 1790509 - RNA, 14 nt, Human
aaaaaggaggaaga

SEQ ID NO: 1790510 - RNA, 22 nt, Human
aaaaaacugcugacuguuuucu

SEQ ID NO: 1790511 - RNA, 17 nt, Human
ggcuggcccugcccugg

SEQ ID NO: 1790512 - RNA, 13 nt, Human
ggcuggccuggcc

SEQ ID NO: 1790513 - RNA, 14 nt, Human
ggcuggccuggccc

SEQ ID NO: 1790514 - RNA, 15 nt, Human
ggcuggccuggcccc

SEQ ID NO: 1790515 - RNA, 13 nt, Human
ggccucagugcca

SEQ ID NO: 1790516 - RNA, 17 nt, Human
ggccucccaacucaccc

SEQ ID NO: 1790517 - RNA, 18 nt, Human
ggccucccaacucacccc

SEQ ID NO: 1790518 - RNA, 19 nt, Human
ggccucccaacucacccca

SEQ ID NO: 1790519 - RNA, 23 nt, Human
ggccucccaacucaccccagccc

SEQ ID NO: 1790520 - RNA, 20 nt, Human
ggccucccaacucaccccag

SEQ ID NO: 1790521 - RNA, 22 nt, Human
ggccucccaacucaccccagcc

SEQ ID NO: 1790522 - RNA, 16 nt, Human
ggccagaugcaccagc

SEQ ID NO: 1790523 - RNA, 15 nt, Human
ggccagaugcaccag

SEQ ID NO: 1790524 - RNA, 22 nt, Human
ggccagagggagugacagaggc

SEQ ID NO: 1790525 - RNA, 17 nt, Human
ggccagaugcaccagcc

SEQ ID NO: 1790526 - RNA, 21 nt, Human
ggccccugccucucugcaggu

SEQ ID NO: 1790527 - RNA, 13 nt, Human
ggccccugccucu

SEQ ID NO: 1790528 - RNA, 17 nt, Human
ggccccugccucucugc

SEQ ID NO: 1790529 - RNA, 18 nt, Human
ggccccugccucucugca

SEQ ID NO: 1790530 - RNA, 19 nt, Human
ggccccugccucucugcag

SEQ ID NO: 1790531 - RNA, 20 nt, Human
ggcuaagcuucacuguaaaa

SEQ ID NO: 1790532 - RNA, 14 nt, Human
ggcgugagaccugc

SEQ ID NO: 1790533 - RNA, 16 nt, Human
ggcgugagaccugccc

SEQ ID NO: 1790534 - RNA, 17 nt, Human
ggcgugagaccugcccc

SEQ ID NO: 1790535 - RNA, 18 nt, Human
ggcgugagaccugccccu

SEQ ID NO: 1790536 - RNA, 16 nt, Human
ggccuucggccuccau

SEQ ID NO: 1790537 - RNA, 22 nt, Human
ggccuucggccuccauccugag

SEQ ID NO: 1790538 - RNA, 18 nt, Human
ggccuucggccuccaucc

SEQ ID NO: 1790539 - RNA, 20 nt, Human
ggcuaagugauccucccacc

SEQ ID NO: 1790540 - RNA, 16 nt, Human
ggcuaauguacugcau

SEQ ID NO: 1790541 - RNA, 18 nt, Human
ggcuaauuuuuguuuugu

SEQ ID NO: 1790542 - RNA, 23 nt, Human
ggcuacaccuuagccugcccucc

SEQ ID NO: 1790543 - RNA, 22 nt, Human
ggcuacaccuuagccugcccuc

SEQ ID NO: 1790544 - RNA, 13 nt, Human
ggcuaccuuugua

SEQ ID NO: 1790545 - RNA, 14 nt, Human
ggcuaccuuuguau

SEQ ID NO: 1790546 - RNA, 16 nt, Human
ggcuagagguucaaag

SEQ ID NO: 1790547 - RNA, 11 nt, Human
ggccugccugu

SEQ ID NO: 1790548 - RNA, 15 nt, Human
ggccuggccagaugc

SEQ ID NO: 1790549 - RNA, 12 nt, Human
ggccuggccaga

SEQ ID NO: 1790550 - RNA, 14 nt, Human
ggccuggcagccgu

SEQ ID NO: 1790551 - RNA, 15 nt, Human
ggccuggcagccgug

SEQ ID NO: 1790552 - RNA, 16 nt, Human
ggccuggccagaugca

SEQ ID NO: 1790553 - RNA, 17 nt, Human
ggccuucagggagugag

SEQ ID NO: 1790554 - RNA, 16 nt, Human
ggccugcaagggagug

SEQ ID NO: 1790555 - RNA, 21 nt, Human
ggcagccccauucugccugcc

SEQ ID NO: 1790556 - RNA, 20 nt, Human
ggcagccccauucugccugc

SEQ ID NO: 1790557 - RNA, 16 nt, Human
ggcagccccauucugc

SEQ ID NO: 1790558 - RNA, 22 nt, Human
ggcagccccauucugccugccc

SEQ ID NO: 1790559 - RNA, 16 nt, Human
ggcagccucuucaaaa

SEQ ID NO: 1790560 - RNA, 22 nt, Human
ggcacugcuuccagugaggcuc

SEQ ID NO: 1790561 - RNA, 20 nt, Human
ggcacugcuuccagugaggc

SEQ ID NO: 1790562 - RNA, 14 nt, Human
ggcagccaggccac

SEQ ID NO: 1790563 - RNA, 13 nt, Human
ggcagccaggcca

SEQ ID NO: 1790564 - RNA, 19 nt, Human
ggcagggagggccugggcc

SEQ ID NO: 1790565 - RNA, 20 nt, Human
ggcagggagggccugggccc

SEQ ID NO: 1790566 - RNA, 17 nt, Human
ggcagggagggccuggg

SEQ ID NO: 1790567 - RNA, 18 nt, Human
ggcagggagggccugggc

SEQ ID NO: 1790568 - RNA, 10 nt, Human
ggcagggagg

SEQ ID NO: 1790569 - RNA, 18 nt, Human
ggcaggaggaucacuuga

SEQ ID NO: 1790570 - RNA, 18 nt, Human
ggcacaccgggcacucag

SEQ ID NO: 1790571 - RNA, 18 nt, Human
ggcacaucagcacgauuu

SEQ ID NO: 1790572 - RNA, 16 nt, Human
ggcacugcuuccagug

SEQ ID NO: 1790573 - RNA, 16 nt, Human
ggauuuuugucuugug

SEQ ID NO: 1790574 - RNA, 14 nt, Human
ggauuuuugucuug

SEQ ID NO: 1790575 - RNA, 15 nt, Human
ggcaaaaaggcagga

SEQ ID NO: 1790576 - RNA, 19 nt, Human
ggccagagggagugacaga

SEQ ID NO: 1790577 - RNA, 17 nt, Human
ggccagagggagugaca

SEQ ID NO: 1790578 - RNA, 18 nt, Human
ggccagagacacaagccu

SEQ ID NO: 1790579 - RNA, 17 nt, Human
ggccagagacacaagcc

SEQ ID NO: 1790580 - RNA, 17 nt, Human
ggcauuuguuugaacug

SEQ ID NO: 1790581 - RNA, 14 nt, Human
ggccaaaggaagca

SEQ ID NO: 1790582 - RNA, 16 nt, Human
ggccaaaggaagcaca

SEQ ID NO: 1790583 - RNA, 23 nt, Human
ggcauuuguuucuuucucugagg

SEQ ID NO: 1790584 - RNA, 17 nt, Human
ggcauuuguuucuuucu

SEQ ID NO: 1790585 - RNA, 19 nt, Human
ggccaaaggaagcacaugc

SEQ ID NO: 1790586 - RNA, 20 nt, Human
ggcaucgcaauguaagacuc

SEQ ID NO: 1790587 - RNA, 14 nt, Human
ggcauuugcugaau

SEQ ID NO: 1790588 - RNA, 13 nt, Human
ggaggggggaggu

SEQ ID NO: 1790589 - RNA, 14 nt, Human
ggaggggggaggug

SEQ ID NO: 1790590 - RNA, 15 nt, Human
ggaggcucuggagcc

SEQ ID NO: 1790591 - RNA, 22 nt, Human
ggaggugggauccuccaggugc

SEQ ID NO: 1790592 - RNA, 23 nt, Human
ggaggugggauccuccaggugca

SEQ ID NO: 1790593 - RNA, 22 nt, Human
ggagguaaggaauaccuguccc

SEQ ID NO: 1790594 - RNA, 21 nt, Human
ggagggugacgggggugaacu

SEQ ID NO: 1790595 - RNA, 18 nt, Human
ggaucucuugagccuggg

SEQ ID NO: 1790596 - RNA, 21 nt, Human
ggaucuuuggacagaagcagc

SEQ ID NO: 1790597 - RNA, 16 nt, Human
ggaguucaucuugaau

SEQ ID NO: 1790598 - RNA, 15 nt, Human
ggauccugagccaga

SEQ ID NO: 1790599 - RNA, 16 nt, Human
ggauccugagccagau

SEQ ID NO: 1790600 - RNA, 18 nt, Human
ggauccugagccagauuu

SEQ ID NO: 1790601 - RNA, 19 nt, Human
ggauccugagccagauuuc

SEQ ID NO: 1790602 - RNA, 20 nt, Human
ggauccugagccagauuuca

SEQ ID NO: 1790603 - RNA, 23 nt, Human
ggauccugagccagauuucacuc

SEQ ID NO: 1790604 - RNA, 12 nt, Human
ggauuuaacaga

SEQ ID NO: 1790605 - RNA, 16 nt, Human
ggauuguccccgaccc

SEQ ID NO: 1790606 - RNA, 20 nt, Human
ggauuguccccgacccuugc

SEQ ID NO: 1790607 - RNA, 17 nt, Human
ggauuuaacagaaaugu

SEQ ID NO: 1790608 - RNA, 16 nt, Human
ggauuuaacagaaaug

SEQ ID NO: 1790609 - RNA, 22 nt, Human
ggauuuaacagaaauguacagc

SEQ ID NO: 1790610 - RNA, 14 nt, Human
ggauuguaguccca

SEQ ID NO: 1790611 - RNA, 13 nt, Human
ggauuguccccga

SEQ ID NO: 1790612 - RNA, 22 nt, Human
ggaucuuuggacagaagcagcu

SEQ ID NO: 1790613 - RNA, 14 nt, Human
ggaugaaaaaauaa

SEQ ID NO: 1790614 - RNA, 15 nt, Human
ggaguggccacagaa

SEQ ID NO: 1790615 - RNA, 16 nt, Human
ggaguggccacagaaa

SEQ ID NO: 1790616 - RNA, 12 nt, Human
ggagugggccca

SEQ ID NO: 1790617 - RNA, 22 nt, Human
ggagugggcccaaugcacuuug

SEQ ID NO: 1790618 - RNA, 19 nt, Human
gauccaagcuggucccacu

SEQ ID NO: 1790619 - RNA, 17 nt, Human
gauccaagcugguccca

SEQ ID NO: 1790620 - RNA, 16 nt, Human
gauccaagcugguccc

SEQ ID NO: 1790621 - RNA, 12 nt, Human
gauccaagcugg

SEQ ID NO: 1790622 - RNA, 19 nt, Human
gauccacccaccucagccu

SEQ ID NO: 1790623 - RNA, 18 nt, Human
gauccacccaccucagcc

SEQ ID NO: 1790624 - RNA, 21 nt, Human
gauccaagcuggucccacuca

SEQ ID NO: 1790625 - RNA, 21 nt, Human
gauccacccaccucagccucc

SEQ ID NO: 1790626 - RNA, 20 nt, Human
gauccacccaccucagccuc

SEQ ID NO: 1790627 - RNA, 22 nt, Human
gauccacccaccucagccuccc

SEQ ID NO: 1790628 - RNA, 18 nt, Human
gauacuuugauauuuuca

SEQ ID NO: 1790629 - RNA, 19 nt, Human
gauauuuucaacgcagccc

SEQ ID NO: 1790630 - RNA, 21 nt, Human
gauauuuucaacgcagcccug

SEQ ID NO: 1790631 - RNA, 22 nt, Human
gauauuuucaacgcagcccugc

SEQ ID NO: 1790632 - RNA, 23 nt, Human
gauauuuucaacgcagcccugcu

SEQ ID NO: 1790633 - RNA, 15 nt, Human
gauauuuugcuuugu

SEQ ID NO: 1790634 - RNA, 17 nt, Human
gauauuuuuuucuuuuc

SEQ ID NO: 1790635 - RNA, 20 nt, Human
gaucaaaagguuaauaaagu

SEQ ID NO: 1790636 - RNA, 23 nt, Human
gaucaaaagguuaauaaaguaau

SEQ ID NO: 1790637 - RNA, 22 nt, Human
gaucaaaccccgaccaccugcc

SEQ ID NO: 1790638 - RNA, 23 nt, Human
gauacaguuacucagaauucucu

SEQ ID NO: 1790639 - RNA, 19 nt, Human
gauacaguuacucagaauu

SEQ ID NO: 1790640 - RNA, 16 nt, Human
gauacaguuacucaga

SEQ ID NO: 1790641 - RNA, 21 nt, Human
gauacuguaucaugacaaaga

SEQ ID NO: 1790642 - RNA, 17 nt, Human
gauacuguaucaugaca

SEQ ID NO: 1790643 - RNA, 18 nt, Human
gaucucuugagccuggga

SEQ ID NO: 1790644 - RNA, 19 nt, Human
gaucucuugagccugggag

SEQ ID NO: 1790645 - RNA, 17 nt, Human
gaucugaugcaagcaag

SEQ ID NO: 1790646 - RNA, 22 nt, Human
gaugauuggaggggggaggugg

SEQ ID NO: 1790647 - RNA, 13 nt, Human
gaugauccuaggc

SEQ ID NO: 1790648 - RNA, 14 nt, Human
gaugauccuaggca

SEQ ID NO: 1790649 - RNA, 21 nt, Human
gaugcuucuucagagacuccu

SEQ ID NO: 1790650 - RNA, 17 nt, Human
gaugcuucuucagagac

SEQ ID NO: 1790651 - RNA, 20 nt, Human
gaugcuucuucagagacucc

SEQ ID NO: 1790652 - RNA, 11 nt, Human
gauuucacucu

SEQ ID NO: 1790653 - RNA, 16 nt, Human
gauuuaauuugaaaua

SEQ ID NO: 1790654 - RNA, 16 nt, Human
gauuuuuuuuuccuuc

SEQ ID NO: 1790655 - RNA, 12 nt, Human
gauuucacucuc

SEQ ID NO: 1790656 - RNA, 17 nt, Human
gauuuuuuuuuccuuca

SEQ ID NO: 1790657 - RNA, 18 nt, Human
gauuuuuuuuuccuucag

SEQ ID NO: 1790658 - RNA, 17 nt, Human
gcaaaagaugcuucuca

SEQ ID NO: 1790659 - RNA, 22 nt, Human
gcaaaagaugcuucucacugcc

SEQ ID NO: 1790660 - RNA, 14 nt, Human
gcaaaaaggcagga

SEQ ID NO: 1790661 - RNA, 21 nt, Human
gauuuuuuuuuccuucagugc

SEQ ID NO: 1790662 - RNA, 20 nt, Human
gauucuucugcuucagccuc

SEQ ID NO: 1790663 - RNA, 16 nt, Human
gauuuaacagaaaugu

SEQ ID NO: 1790664 - RNA, 18 nt, Human
gauuuaacagaaauguac

SEQ ID NO: 1790665 - RNA, 17 nt, Human
gauuuaacagaaaugua

SEQ ID NO: 1790666 - RNA, 19 nt, Human
gauuuaacagaaauguaca

SEQ ID NO: 1790667 - RNA, 15 nt, Human
gauucuucugcuuca

SEQ ID NO: 1790668 - RNA, 13 nt, Human
gauucuucugcuu

SEQ ID NO: 1790669 - RNA, 15 nt, Human
gcaagugagagcugg

SEQ ID NO: 1790670 - RNA, 16 nt, Human
gcaagugagagcuggg

SEQ ID NO: 1790671 - RNA, 13 nt, Human
gcaacaggcuggg

SEQ ID NO: 1790672 - RNA, 15 nt, Human
gcaacaggcugggcu

SEQ ID NO: 1790673 - RNA, 14 nt, Human
gcaacaggcugggc

SEQ ID NO: 1790674 - RNA, 19 nt, Human
gcaacaggcugggcuucag

SEQ ID NO: 1790675 - RNA, 16 nt, Human
gcaacaggcugggcuu

SEQ ID NO: 1790676 - RNA, 13 nt, Human
gcaaccaccacca

SEQ ID NO: 1790677 - RNA, 16 nt, Human
gcaaccaccaccaacc

SEQ ID NO: 1790678 - RNA, 18 nt, Human
gcaaccaccaccaaccac

SEQ ID NO: 1790679 - RNA, 19 nt, Human
gcaaccuccgccucuuggg

SEQ ID NO: 1790680 - RNA, 17 nt, Human
gcaacccccagccugcu

SEQ ID NO: 1790681 - RNA, 16 nt, Human
gcaacccccagccugc

SEQ ID NO: 1790682 - RNA, 15 nt, Human
gcaacccccagccug

SEQ ID NO: 1790683 - RNA, 14 nt, Human
gcaacccccagccu

SEQ ID NO: 1790684 - RNA, 14 nt, Human
gcaaccauuugaaa

SEQ ID NO: 1790685 - RNA, 20 nt, Human
gcaaccuccgccucuugggu

SEQ ID NO: 1790686 - RNA, 20 nt, Human
gcaaccuucgccaccugggu

SEQ ID NO: 1790687 - RNA, 18 nt, Human
gcagcccaccccucaaca

SEQ ID NO: 1790688 - RNA, 15 nt, Human
gcagccacauuccug

SEQ ID NO: 1790689 - RNA, 22 nt, Human
gcagaacagugauuaccaggga

SEQ ID NO: 1790690 - RNA, 18 nt, Human
gcagaacagugauuacca

SEQ ID NO: 1790691 - RNA, 21 nt, Human
gcagaggaaagcaaaggagau

SEQ ID NO: 1790692 - RNA, 13 nt, Human
gcagaggaaagca

SEQ ID NO: 1790693 - RNA, 14 nt, Human
gcagaggaaagcaa

SEQ ID NO: 1790694 - RNA, 18 nt, Human
gcagaggaaagcaaagga

SEQ ID NO: 1790695 - RNA, 20 nt, Human
gcagaggaaagcaaaggaga

SEQ ID NO: 1790696 - RNA, 17 nt, Human
gcagcauauucaggaag

SEQ ID NO: 1790697 - RNA, 18 nt, Human
gcagcauauucaggaagc

SEQ ID NO: 1790698 - RNA, 19 nt, Human
gcagcauauucaggaagcu

SEQ ID NO: 1790699 - RNA, 23 nt, Human
gcagcauauucaggaagcucagg

SEQ ID NO: 1790700 - RNA, 14 nt, Human
gcagagggcacaga

SEQ ID NO: 1790701 - RNA, 13 nt, Human
gcagaacagugau

SEQ ID NO: 1790702 - RNA, 12 nt, Human
gcagaacaguga

SEQ ID NO: 1790703 - RNA, 22 nt, Human
gcacuuuguucuggcucuucca

SEQ ID NO: 1790704 - RNA, 15 nt, Human
gcacuccccugcugg

SEQ ID NO: 1790705 - RNA, 16 nt, Human
gcacuccccugcuggg

SEQ ID NO: 1790706 - RNA, 18 nt, Human
gcacuuuguucuggcucu

SEQ ID NO: 1790707 - RNA, 19 nt, Human
gcacuuuguucuggcucuu

SEQ ID NO: 1790708 - RNA, 13 nt, Human
gcacuccccugcu

SEQ ID NO: 1790709 - RNA, 14 nt, Human
gcacuccccugcug

SEQ ID NO: 1790710 - RNA, 14 nt, Human
gcacuccagccugg

SEQ ID NO: 1790711 - RNA, 15 nt, Human
gcacuccagccuggg

SEQ ID NO: 1790712 - RNA, 20 nt, Human
gcacucagaagacacugaug

SEQ ID NO: 1790713 - RNA, 19 nt, Human
gcaagugagagcugggugu

SEQ ID NO: 1790714 - RNA, 18 nt, Human
gcaagugagagcugggug

SEQ ID NO: 1790715 - RNA, 18 nt, Human
gcauacguacacauuuua

SEQ ID NO: 1790716 - RNA, 17 nt, Human
gcauacguacacauuuu

SEQ ID NO: 1790717 - RNA, 16 nt, Human
gcauacguacacauuu

SEQ ID NO: 1790718 - RNA, 15 nt, Human
gcauacguacacauu

SEQ ID NO: 1790719 - RNA, 20 nt, Human
gcaucuagcaugucgucaaa

SEQ ID NO: 1790720 - RNA, 13 nt, Human
gcauccuggcacc

SEQ ID NO: 1790721 - RNA, 17 nt, Human
gcauccuccgccucccg

SEQ ID NO: 1790722 - RNA, 14 nt, Human
gcauccuggcaccc

SEQ ID NO: 1790723 - RNA, 21 nt, Human
gcauggcugccaaugggagcu

SEQ ID NO: 1790724 - RNA, 15 nt, Human
gcauuuacuuugugu

SEQ ID NO: 1790725 - RNA, 22 nt, Human
gcauuuaaaagauacaguuacu

SEQ ID NO: 1790726 - RNA, 18 nt, Human
gcauuuaaaagauacagu

SEQ ID NO: 1790727 - RNA, 17 nt, Human
gcauuuaaaagauacag

SEQ ID NO: 1790728 - RNA, 16 nt, Human
gcauuuaaaagauaca

SEQ ID NO: 1790729 - RNA, 16 nt, Human
gcauugugggaagggg

SEQ ID NO: 1790730 - RNA, 18 nt, Human
gcauugugggaaggggag

SEQ ID NO: 1790731 - RNA, 19 nt, Human
gcaugugaugagaggaaau

SEQ ID NO: 1790732 - RNA, 18 nt, Human
gcaugugaugagaggaaa

SEQ ID NO: 1790733 - RNA, 21 nt, Human
gcaugugaugagaggaaauca

SEQ ID NO: 1790734 - RNA, 13 nt, Human
gcauugugggaag

SEQ ID NO: 1790735 - RNA, 15 nt, Human
gcauugugggaaggg

SEQ ID NO: 1790736 - RNA, 18 nt, Human
gcauccaguaucuugaag

SEQ ID NO: 1790737 - RNA, 14 nt, Human
gcauccaguaucuu

SEQ ID NO: 1790738 - RNA, 17 nt, Human
gcauccaguaucuugaa

SEQ ID NO: 1790739 - RNA, 23 nt, Human
gacauugcggacagccacggcca

SEQ ID NO: 1790740 - RNA, 17 nt, Human
gacauugcggacagcca

SEQ ID NO: 1790741 - RNA, 19 nt, Human
gacauuguagagcuucugg

SEQ ID NO: 1790742 - RNA, 19 nt, Human
gacagcuccuucuguccua

SEQ ID NO: 1790743 - RNA, 12 nt, Human
gacagcucugca

SEQ ID NO: 1790744 - RNA, 10 nt, Human
gacagcucuu

SEQ ID NO: 1790745 - RNA, 12 nt, Human
gacagucccugc

SEQ ID NO: 1790746 - RNA, 11 nt, Human
gacagcucuua

SEQ ID NO: 1790747 - RNA, 14 nt, Human
gacagucccugcca

SEQ ID NO: 1790748 - RNA, 15 nt, Human
gacagucccugccaa

SEQ ID NO: 1790749 - RNA, 16 nt, Human
gacagucccugccaau

SEQ ID NO: 1790750 - RNA, 20 nt, Human
gacagucccugccaauggac

SEQ ID NO: 1790751 - RNA, 18 nt, Human
gacagcuccuucuguccu

SEQ ID NO: 1790752 - RNA, 17 nt, Human
gacagcuccuucugucc

SEQ ID NO: 1790753 - RNA, 16 nt, Human
gacagcccgggcucug

SEQ ID NO: 1790754 - RNA, 14 nt, Human
gacagcccgggcuc

SEQ ID NO: 1790755 - RNA, 21 nt, Human
gaccucaggugauccacccac

SEQ ID NO: 1790756 - RNA, 20 nt, Human
gaccucaggugauccaccca

SEQ ID NO: 1790757 - RNA, 19 nt, Human
gaccucaggugauccaccc

SEQ ID NO: 1790758 - RNA, 21 nt, Human
gaccucaggugagaagcagag

SEQ ID NO: 1790759 - RNA, 22 nt, Human
gaccucagguaaucgaccugcc

SEQ ID NO: 1790760 - RNA, 23 nt, Human
gaccucagguaaucgaccugccu

SEQ ID NO: 1790761 - RNA, 19 nt, Human
gaccucaggccugggggcu

SEQ ID NO: 1790762 - RNA, 18 nt, Human
gaccucaggugagaagca

SEQ ID NO: 1790763 - RNA, 19 nt, Human
gaccucaggugagaagcag

SEQ ID NO: 1790764 - RNA, 10 nt, Human
gacccugagg

SEQ ID NO: 1790765 - RNA, 14 nt, Human
gaccucaggccugg

SEQ ID NO: 1790766 - RNA, 18 nt, Human
gacccggaggggccuggc

SEQ ID NO: 1790767 - RNA, 19 nt, Human
gacccggaggggccuggca

SEQ ID NO: 1790768 - RNA, 20 nt, Human
gacccggaggggccuggcag

SEQ ID NO: 1790769 - RNA, 16 nt, Human
gaccccugagcuugca

SEQ ID NO: 1790770 - RNA, 17 nt, Human
gacccggaggggccugg

SEQ ID NO: 1790771 - RNA, 13 nt, Human
gaccucugccuga

SEQ ID NO: 1790772 - RNA, 12 nt, Human
gacgccauccca

SEQ ID NO: 1790773 - RNA, 13 nt, Human
gacgccaucccag

SEQ ID NO: 1790774 - RNA, 15 nt, Human
gacgccaucccagcc

SEQ ID NO: 1790775 - RNA, 21 nt, Human
gacgccaucccagccccaaug

SEQ ID NO: 1790776 - RNA, 22 nt, Human
gaccucugcagcaauaaagcag

SEQ ID NO: 1790777 - RNA, 18 nt, Human
gaccucugcagcaauaaa

SEQ ID NO: 1790778 - RNA, 16 nt, Human
gaccucugcagcaaua

SEQ ID NO: 1790779 - RNA, 18 nt, Human
gacgcugugcugcccugc

SEQ ID NO: 1790780 - RNA, 16 nt, Human
gacgcugugcugcccu

SEQ ID NO: 1790781 - RNA, 17 nt, Human
gacgcugugcugcccug

SEQ ID NO: 1790782 - RNA, 22 nt, Human
gacgcuacccgggaagggggcu

SEQ ID NO: 1790783 - RNA, 23 nt, Human
gacgcuacccgggaagggggcug

SEQ ID NO: 1790784 - RNA, 14 nt, Human
gacgcucucuggcc

SEQ ID NO: 1790785 - RNA, 11 nt, Human
gaauauugcug

SEQ ID NO: 1790786 - RNA, 12 nt, Human
gaauauugcuga

SEQ ID NO: 1790787 - RNA, 13 nt, Human
gaauauugcugau

SEQ ID NO: 1790788 - RNA, 15 nt, Human
gaauauauaaccagu

SEQ ID NO: 1790789 - RNA, 22 nt, Human
gaauauugcugauggugcaaug

SEQ ID NO: 1790790 - RNA, 23 nt, Human
gaauauugcugauggugcaauga

SEQ ID NO: 1790791 - RNA, 19 nt, Human
gaauauugccauuaugcuu

SEQ ID NO: 1790792 - RNA, 24 nt, Human
gaauauugcugauggugcaaugac

SEQ ID NO: 1790793 - RNA, 14 nt, Human
gaaugaauggcuaa

SEQ ID NO: 1790794 - RNA, 18 nt, Human
gaaugcacaaacagaggc

SEQ ID NO: 1790795 - RNA, 17 nt, Human
gaauguuugccucugcc

SEQ ID NO: 1790796 - RNA, 16 nt, Human
gaauguuugccucugc

SEQ ID NO: 1790797 - RNA, 19 nt, Human
gaaugcacaaacagaggcc

SEQ ID NO: 1790798 - RNA, 20 nt, Human
gaaugaauggcuaagcaaaa

SEQ ID NO: 1790799 - RNA, 15 nt, Human
gaaugaauggcuaag

SEQ ID NO: 1790800 - RNA, 20 nt, Human
gaaugaugauccuaggcauu

SEQ ID NO: 1790801 - RNA, 14 nt, Human
gaaugaugccauga

SEQ ID NO: 1790802 - RNA, 14 nt, Human
gaaugauuaauuaa

SEQ ID NO: 1790803 - RNA, 19 nt, Human
gaauguuugccucugccuc

SEQ ID NO: 1790804 - RNA, 18 nt, Human
gaauguuugccucugccu

SEQ ID NO: 1790805 - RNA, 15 nt, Human
gaauuaacacaugau

SEQ ID NO: 1790806 - RNA, 14 nt, Human
gaauuaacacauga

SEQ ID NO: 1790807 - RNA, 20 nt, Human
gacacagcucuucuccaggc

SEQ ID NO: 1790808 - RNA, 19 nt, Human
gacacagcucuucuccagg

SEQ ID NO: 1790809 - RNA, 12 nt, Human
gacacagcucuu

SEQ ID NO: 1790810 - RNA, 21 nt, Human
gacacagcucuucuccaggcu

SEQ ID NO: 1790811 - RNA, 23 nt, Human
gaggacuuuucuuuguggcuucc

SEQ ID NO: 1790812 - RNA, 20 nt, Human
gaggacuuuucuuuguggcu

SEQ ID NO: 1790813 - RNA, 16 nt, Human
gaggacuuuucuuugu

SEQ ID NO: 1790814 - RNA, 20 nt, Human
gaggacgcucucuggccuuc

SEQ ID NO: 1790815 - RNA, 21 nt, Human
gaggacgcucucuggccuucg

SEQ ID NO: 1790816 - RNA, 14 nt, Human
gaggagaaacugga

SEQ ID NO: 1790817 - RNA, 12 nt, Human
gaggagaaacug

SEQ ID NO: 1790818 - RNA, 12 nt, Human
gaggagagagga

SEQ ID NO: 1790819 - RNA, 14 nt, Human
gaggagagaggacc

SEQ ID NO: 1790820 - RNA, 15 nt, Human
gaggagagaggaccc

SEQ ID NO: 1790821 - RNA, 18 nt, Human
gaggcagggucucacucu

SEQ ID NO: 1790822 - RNA, 20 nt, Human
gaggcagggucucacucugu

SEQ ID NO: 1790823 - RNA, 19 nt, Human
gaggcagggucucacucug

SEQ ID NO: 1790824 - RNA, 22 nt, Human
gaggcagggucucacucugucg

SEQ ID NO: 1790825 - RNA, 12 nt, Human
gagggccugggc

SEQ ID NO: 1790826 - RNA, 14 nt, Human
gagggccugcaagg

SEQ ID NO: 1790827 - RNA, 17 nt, Human
gagggccugcaagggag

SEQ ID NO: 1790828 - RNA, 21 nt, Human
gagggccugcaagggagugag

SEQ ID NO: 1790829 - RNA, 19 nt, Human
gaggcauuuguuugaacug

SEQ ID NO: 1790830 - RNA, 22 nt, Human
gaggcaugugaugagaggaaau

SEQ ID NO: 1790831 - RNA, 20 nt, Human
gaggcaugugaugagaggaa

SEQ ID NO: 1790832 - RNA, 21 nt, Human
gaggcaugugaugagaggaaa

SEQ ID NO: 1790833 - RNA, 21 nt, Human
gaggcauuuguuugaacugau

SEQ ID NO: 1790834 - RNA, 15 nt, Human
gaggcuccacuuggu

SEQ ID NO: 1790835 - RNA, 18 nt, Human
gaggcuccacuuggucug

SEQ ID NO: 1790836 - RNA, 17 nt, Human
gaggcuccacuuggucu

SEQ ID NO: 1790837 - RNA, 20 nt, Human
gaggcucuggagcccacugu

SEQ ID NO: 1790838 - RNA, 18 nt, Human
gaggcugagaugggagaa

SEQ ID NO: 1790839 - RNA, 14 nt, Human
gagcccugguggca

SEQ ID NO: 1790840 - RNA, 13 nt, Human
gagcccugguggc

SEQ ID NO: 1790841 - RNA, 17 nt, Human
gagccccgaggccuucu

SEQ ID NO: 1790842 - RNA, 14 nt, Human
gagccccgaggccu

SEQ ID NO: 1790843 - RNA, 13 nt, Human
gagccccgaggcc

SEQ ID NO: 1790844 - RNA, 12 nt, Human
gagcccugggag

SEQ ID NO: 1790845 - RNA, 16 nt, Human
gagcccugggaggcuc

SEQ ID NO: 1790846 - RNA, 18 nt, Human
gagcccugggaggcucug

SEQ ID NO: 1790847 - RNA, 19 nt, Human
gagcccugggaggcucugg

SEQ ID NO: 1790848 - RNA, 20 nt, Human
gagcccugggaggcucugga

SEQ ID NO: 1790849 - RNA, 21 nt, Human
gagcaugccuggauggggcug

SEQ ID NO: 1790850 - RNA, 13 nt, Human
gagcaugccugga

SEQ ID NO: 1790851 - RNA, 15 nt, Human
gagcaucaggccagg

SEQ ID NO: 1790852 - RNA, 16 nt, Human
gagcaucaggccaggc

SEQ ID NO: 1790853 - RNA, 14 nt, Human
gagcaucaggccag

SEQ ID NO: 1790854 - RNA, 20 nt, Human
gagagcugggugucaagagg

SEQ ID NO: 1790855 - RNA, 22 nt, Human
gagagcuucuguugcugccuca

SEQ ID NO: 1790856 - RNA, 12 nt, Human
gagaggaaauca

SEQ ID NO: 1790857 - RNA, 15 nt, Human
gagaggacccccuga

SEQ ID NO: 1790858 - RNA, 13 nt, Human
gagagcugggugu

SEQ ID NO: 1790859 - RNA, 15 nt, Human
gagagcuagcagcag

SEQ ID NO: 1790860 - RNA, 21 nt, Human
gagagcuagcagcagggaggg

SEQ ID NO: 1790861 - RNA, 18 nt, Human
gagagccuuccaggggug

SEQ ID NO: 1790862 - RNA, 20 nt, Human
gagagccuuccagggguggg

SEQ ID NO: 1790863 - RNA, 13 nt, Human
gagacuccugcag

SEQ ID NO: 1790864 - RNA, 14 nt, Human
gagacuccugcagg

SEQ ID NO: 1790865 - RNA, 15 nt, Human
gagagccuuccaggg

SEQ ID NO: 1790866 - RNA, 16 nt, Human
gagagccuuccagggg

SEQ ID NO: 1790867 - RNA, 15 nt, Human
gagauuauguucuuu

SEQ ID NO: 1790868 - RNA, 16 nt, Human
gagaugcuagaacucc

SEQ ID NO: 1790869 - RNA, 20 nt, Human
gagaugcuagaacucccuuu

SEQ ID NO: 1790870 - RNA, 14 nt, Human
gagauuggaaggaa

SEQ ID NO: 1790871 - RNA, 21 nt, Human
gagauugugccccugcacucc

SEQ ID NO: 1790872 - RNA, 23 nt, Human
gagaaugaaagggcccagagagg

SEQ ID NO: 1790873 - RNA, 15 nt, Human
gagaaugaaagggcc

SEQ ID NO: 1790874 - RNA, 14 nt, Human
gagacggaguccca

SEQ ID NO: 1790875 - RNA, 19 nt, Human
gagacggagucccaccuug

SEQ ID NO: 1790876 - RNA, 16 nt, Human
gagacggagucccacc

SEQ ID NO: 1790877 - RNA, 18 nt, Human
gagacgggggcagagagg

SEQ ID NO: 1790878 - RNA, 20 nt, Human
gacuuuuccaacccucauca

SEQ ID NO: 1790879 - RNA, 18 nt, Human
gacuuuuauuuccaguga

SEQ ID NO: 1790880 - RNA, 14 nt, Human
gacuuuuccaaccc

SEQ ID NO: 1790881 - RNA, 19 nt, Human
gacuuuuccaacccucauc

SEQ ID NO: 1790882 - RNA, 14 nt, Human
gaaaauuaacauga

SEQ ID NO: 1790883 - RNA, 18 nt, Human
gaaaauuaggauuucaug

SEQ ID NO: 1790884 - RNA, 22 nt, Human
gaaaauuaggauuucaugauuu

SEQ ID NO: 1790885 - RNA, 19 nt, Human
gaaaacugcaacuuguaaa

SEQ ID NO: 1790886 - RNA, 18 nt, Human
gaaaacuuguauuaugug

SEQ ID NO: 1790887 - RNA, 18 nt, Human
gaaaauuuugauguuuua

SEQ ID NO: 1790888 - RNA, 14 nt, Human
gaaaauuuuaaaaa

SEQ ID NO: 1790889 - RNA, 18 nt, Human
cuuuugugcauuaucuag

SEQ ID NO: 1790890 - RNA, 14 nt, Human
cuuuugugcauuau

SEQ ID NO: 1790891 - RNA, 14 nt, Human
cuuuuuuuuaaguu

SEQ ID NO: 1790892 - RNA, 14 nt, Human
gaaaaaauauauau

SEQ ID NO: 1790893 - RNA, 19 nt, Human
gaaaaaauauuuuccugcc

SEQ ID NO: 1790894 - RNA, 21 nt, Human
cuuuuuuuuuuuuuuugacaa

SEQ ID NO: 1790895 - RNA, 17 nt, Human
cuuuugucuaugggacu

SEQ ID NO: 1790896 - RNA, 16 nt, Human
cuuuuggucuguguga

SEQ ID NO: 1790897 - RNA, 15 nt, Human
cuuuuggucugugug

SEQ ID NO: 1790898 - RNA, 18 nt, Human
cuuuugccguuauuaaaa

SEQ ID NO: 1790899 - RNA, 19 nt, Human
cuuuuaugugaaacauguu

SEQ ID NO: 1790900 - RNA, 23 nt, Human
gaacaaauuuacagagacagaaa

SEQ ID NO: 1790901 - RNA, 19 nt, Human
gaaauuuuuauuaaauuau

SEQ ID NO: 1790902 - RNA, 18 nt, Human
gaacaaauuuacagagac

SEQ ID NO: 1790903 - RNA, 17 nt, Human
gaacaaauuuacagaga

SEQ ID NO: 1790904 - RNA, 17 nt, Human
gaaaucaccgaaaacgu

SEQ ID NO: 1790905 - RNA, 18 nt, Human
gaaauuuuuauuaaauua

SEQ ID NO: 1790906 - RNA, 18 nt, Human
gaaaugaaagcagggacu

SEQ ID NO: 1790907 - RNA, 21 nt, Human
gaaaguacuucuccacccugc

SEQ ID NO: 1790908 - RNA, 22 nt, Human
gaaaguacuucuccacccugcu

SEQ ID NO: 1790909 - RNA, 20 nt, Human
gaaaggcuccaggagcagcc

SEQ ID NO: 1790910 - RNA, 19 nt, Human
gaaaggcuccaggagcagc

SEQ ID NO: 1790911 - RNA, 17 nt, Human
gaaaggcuccaggagca

SEQ ID NO: 1790912 - RNA, 18 nt, Human
gaaaggcuccaggagcag

SEQ ID NO: 1790913 - RNA, 18 nt, Human
gaaagacuaucuaaaugu

SEQ ID NO: 1790914 - RNA, 18 nt, Human
gaaagaaguggggacaga

SEQ ID NO: 1790915 - RNA, 21 nt, Human
gaacaaggcaaggcugucaau

SEQ ID NO: 1790916 - RNA, 14 nt, Human
gaacaaggcaaggc

SEQ ID NO: 1790917 - RNA, 15 nt, Human
gaacaaggcaaggcu

SEQ ID NO: 1790918 - RNA, 17 nt, Human
gaacaaggcaaggcugu

SEQ ID NO: 1790919 - RNA, 18 nt, Human
gaacaaggcaaggcuguc

SEQ ID NO: 1790920 - RNA, 19 nt, Human
cuugauucauaaugacuua

SEQ ID NO: 1790921 - RNA, 19 nt, Human
cuugccgucuaccugaggg

SEQ ID NO: 1790922 - RNA, 18 nt, Human
cuugccgucuaccugagg

SEQ ID NO: 1790923 - RNA, 15 nt, Human
cuugauguguuaucu

SEQ ID NO: 1790924 - RNA, 21 nt, Human
cuuggcgcugccccuggcagc

SEQ ID NO: 1790925 - RNA, 22 nt, Human
cuuggcgcugccccuggcagcc

SEQ ID NO: 1790926 - RNA, 23 nt, Human
cuuggcgcugccccuggcagccc

SEQ ID NO: 1790927 - RNA, 22 nt, Human
cuuggauuguccccgacccuug

SEQ ID NO: 1790928 - RNA, 18 nt, Human
cuuggauuguccccgacc

SEQ ID NO: 1790929 - RNA, 20 nt, Human
cuuggauuguccccgacccu

SEQ ID NO: 1790930 - RNA, 15 nt, Human
cuuggauuguccccg

SEQ ID NO: 1790931 - RNA, 20 nt, Human
cuuuaaugucacaggcaggu

SEQ ID NO: 1790932 - RNA, 19 nt, Human
cuuuaaugucacaggcagg

SEQ ID NO: 1790933 - RNA, 18 nt, Human
cuuuaaugucacaggcag

SEQ ID NO: 1790934 - RNA, 17 nt, Human
cuuuaaugucacaggca

SEQ ID NO: 1790935 - RNA, 22 nt, Human
cuuuaaugucacaggcaggucc

SEQ ID NO: 1790936 - RNA, 14 nt, Human
cuuucaauaggaaa

SEQ ID NO: 1790937 - RNA, 15 nt, Human
cuuucaauaggaaaa

SEQ ID NO: 1790938 - RNA, 22 nt, Human
cuuuaaugauaugcuuguaacu

SEQ ID NO: 1790939 - RNA, 21 nt, Human
cuuuaaugauaugcuuguaac

SEQ ID NO: 1790940 - RNA, 16 nt, Human
cuuuaaugauaugcuu

SEQ ID NO: 1790941 - RNA, 21 nt, Human
cuugucuuuggacccugaggc

SEQ ID NO: 1790942 - RNA, 22 nt, Human
cuugucuuuggacccugaggcc

SEQ ID NO: 1790943 - RNA, 17 nt, Human
cuuucaauaggaaaaac

SEQ ID NO: 1790944 - RNA, 18 nt, Human
cuuucaauaggaaaaacu

SEQ ID NO: 1790945 - RNA, 13 nt, Human
cuugucuguagau

SEQ ID NO: 1790946 - RNA, 20 nt, Human
cuugucuuuggacccugagg

SEQ ID NO: 1790947 - RNA, 22 nt, Human
cuugguccugcugcaguugcca

SEQ ID NO: 1790948 - RNA, 23 nt, Human
cuuggucucagugucaaugcagc

SEQ ID NO: 1790949 - RNA, 20 nt, Human
cuugguucccauuugcuccu

SEQ ID NO: 1790950 - RNA, 16 nt, Human
cuugguucccauuugc

SEQ ID NO: 1790951 - RNA, 15 nt, Human
cuugguccugcugca

SEQ ID NO: 1790952 - RNA, 16 nt, Human
cuugguccugcugcag

SEQ ID NO: 1790953 - RNA, 17 nt, Human
cuugguccugcugcagu

SEQ ID NO: 1790954 - RNA, 18 nt, Human
cuugguccugcugcaguu

SEQ ID NO: 1790955 - RNA, 20 nt, Human
cuugguccugcugcaguugc

SEQ ID NO: 1790956 - RNA, 20 nt, Human
cuuacauuagcaguuugcuu

SEQ ID NO: 1790957 - RNA, 23 nt, Human
cuucugaacuuggcgcugccccu

SEQ ID NO: 1790958 - RNA, 18 nt, Human
cuucugacccaugcugcc

SEQ ID NO: 1790959 - RNA, 16 nt, Human
cuucugacccaugcug

SEQ ID NO: 1790960 - RNA, 17 nt, Human
cuucugacccaugcugc

SEQ ID NO: 1790961 - RNA, 13 nt, Human
cuucuuauacauu

SEQ ID NO: 1790962 - RNA, 16 nt, Human
cuucuuauacauuuga

SEQ ID NO: 1790963 - RNA, 12 nt, Human
cuuccucccucc

SEQ ID NO: 1790964 - RNA, 13 nt, Human
cuuccucccuccc

SEQ ID NO: 1790965 - RNA, 14 nt, Human
cuuccucccucccu

SEQ ID NO: 1790966 - RNA, 18 nt, Human
cuuccucccucccucuuu

SEQ ID NO: 1790967 - RNA, 16 nt, Human
cuuccucuccacugcc

SEQ ID NO: 1790968 - RNA, 17 nt, Human
cuuccucuccacugccu

SEQ ID NO: 1790969 - RNA, 19 nt, Human
cuuccucuccacugccuuc

SEQ ID NO: 1790970 - RNA, 21 nt, Human
cuuccucuccacugccuucga

SEQ ID NO: 1790971 - RNA, 11 nt, Human
cuuccucugcu

SEQ ID NO: 1790972 - RNA, 12 nt, Human
cuuccucugcug

SEQ ID NO: 1790973 - RNA, 13 nt, Human
cuuccucugcuga

SEQ ID NO: 1790974 - RNA, 19 nt, Human
cuucugaacuuggcgcugc

SEQ ID NO: 1790975 - RNA, 15 nt, Human
cuucugacccaugcu

SEQ ID NO: 1790976 - RNA, 22 nt, Human
cuucugaacuuggcgcugcccc

SEQ ID NO: 1790977 - RNA, 21 nt, Human
cuggucucgaacuccugaccu

SEQ ID NO: 1790978 - RNA, 18 nt, Human
cuggucuuauuuguaaag

SEQ ID NO: 1790979 - RNA, 12 nt, Human
cuggugccucac

SEQ ID NO: 1790980 - RNA, 16 nt, Human
cuguacuugcucuuga

SEQ ID NO: 1790981 - RNA, 19 nt, Human
cuguacuugcucuugaugc

SEQ ID NO: 1790982 - RNA, 20 nt, Human
cuguacuugcucuugaugcc

SEQ ID NO: 1790983 - RNA, 21 nt, Human
cuguacuugcucuugaugccu

SEQ ID NO: 1790984 - RNA, 15 nt, Human
cuguagagugggagc

SEQ ID NO: 1790985 - RNA, 16 nt, Human
cugguuuuucaguuuu

SEQ ID NO: 1790986 - RNA, 15 nt, Human
cugguuuuucaguuu

SEQ ID NO: 1790987 - RNA, 14 nt, Human
cugguuuuucaguu

SEQ ID NO: 1790988 - RNA, 18 nt, Human
cuguaggaagguuaaugu

SEQ ID NO: 1790989 - RNA, 20 nt, Human
cuguccugggagugagcugg

SEQ ID NO: 1790990 - RNA, 14 nt, Human
cuguccugggagug

SEQ ID NO: 1790991 - RNA, 13 nt, Human
cuguccugggagu

SEQ ID NO: 1790992 - RNA, 14 nt, Human
cugucauuugagca

SEQ ID NO: 1790993 - RNA, 15 nt, Human
cugucguuaaaaaca

SEQ ID NO: 1790994 - RNA, 22 nt, Human
cugucuaaugaaaccugugucu

SEQ ID NO: 1790995 - RNA, 19 nt, Human
cugugcucuggacaggcau

SEQ ID NO: 1790996 - RNA, 18 nt, Human
cugugcucuggacaggca

SEQ ID NO: 1790997 - RNA, 22 nt, Human
cugugucagguggggcagcuug

SEQ ID NO: 1790998 - RNA, 17 nt, Human
cuguuacugucuucagu

SEQ ID NO: 1790999 - RNA, 15 nt, Human
cuguucagcuccagc

SEQ ID NO: 1791000 - RNA, 13 nt, Human
cuguucacucuac

SEQ ID NO: 1791001 - RNA, 22 nt, Human
cuguucagcuccagcucaccag

SEQ ID NO: 1791002 - RNA, 19 nt, Human
cuguucagcuccagcucac

SEQ ID NO: 1791003 - RNA, 18 nt, Human
cuguucagcuccagcuca

SEQ ID NO: 1791004 - RNA, 16 nt, Human
cuguucagcuccagcu

SEQ ID NO: 1791005 - RNA, 12 nt, Human
cuguucagcugg

SEQ ID NO: 1791006 - RNA, 18 nt, Human
cuguucagcugguugagg

SEQ ID NO: 1791007 - RNA, 17 nt, Human
cugugcucuggacaggc

SEQ ID NO: 1791008 - RNA, 23 nt, Human
cugugagaugcuagaacucccuu

SEQ ID NO: 1791009 - RNA, 13 nt, Human
cugugaacugaac

SEQ ID NO: 1791010 - RNA, 15 nt, Human
cugugaacugaacuc

SEQ ID NO: 1791011 - RNA, 16 nt, Human
cugugaacugaacucu

SEQ ID NO: 1791012 - RNA, 15 nt, Human
cuguuggccagugug

SEQ ID NO: 1791013 - RNA, 12 nt, Human
cuguuggccagu

SEQ ID NO: 1791014 - RNA, 20 nt, Human
cuuaaaaaugguuuaaaugg

SEQ ID NO: 1791015 - RNA, 13 nt, Human
cuuaaaaaugguu

SEQ ID NO: 1791016 - RNA, 19 nt, Human
cuuaaauaaugugaaacug

SEQ ID NO: 1791017 - RNA, 16 nt, Human
cuuaaauaaugugaaa

SEQ ID NO: 1791018 - RNA, 14 nt, Human
cuuaaauaauguga

SEQ ID NO: 1791019 - RNA, 13 nt, Human
cuuaaauaaugug

SEQ ID NO: 1791020 - RNA, 17 nt, Human
cuggcagccgugccuuc

SEQ ID NO: 1791021 - RNA, 18 nt, Human
cuggcagccgugccuuca

SEQ ID NO: 1791022 - RNA, 16 nt, Human
cuggcagcucagagag

SEQ ID NO: 1791023 - RNA, 17 nt, Human
cuggcagcucagagagg

SEQ ID NO: 1791024 - RNA, 19 nt, Human
cuggcagcucagagagggu

SEQ ID NO: 1791025 - RNA, 19 nt, Human
cuggcucccacaggcccuu

SEQ ID NO: 1791026 - RNA, 18 nt, Human
cuggcucccacaggcccu

SEQ ID NO: 1791027 - RNA, 22 nt, Human
cuggcucccacaggcccuuccu

SEQ ID NO: 1791028 - RNA, 17 nt, Human
cugggacuacaggugug

SEQ ID NO: 1791029 - RNA, 21 nt, Human
cugggacuacaggcacccacc

SEQ ID NO: 1791030 - RNA, 17 nt, Human
cugggacuacaggcacc

SEQ ID NO: 1791031 - RNA, 13 nt, Human
cuggcucuuccag

SEQ ID NO: 1791032 - RNA, 14 nt, Human
cuggcucuuccagg

SEQ ID NO: 1791033 - RNA, 15 nt, Human
cuggcucuuccaggc

SEQ ID NO: 1791034 - RNA, 20 nt, Human
cuggcagaguugaagacaga

SEQ ID NO: 1791035 - RNA, 21 nt, Human
cuggcagaguugaagacagag

SEQ ID NO: 1791036 - RNA, 13 nt, Human
cuggcagccgugc

SEQ ID NO: 1791037 - RNA, 23 nt, Human
cuggcagccccuguucuggcaga

SEQ ID NO: 1791038 - RNA, 22 nt, Human
cuggcagaguugaagacagagc

SEQ ID NO: 1791039 - RNA, 14 nt, Human
cuggagaacuagag

SEQ ID NO: 1791040 - RNA, 15 nt, Human
cuggagaacuagaga

SEQ ID NO: 1791041 - RNA, 17 nt, Human
cuggauccaucaggcca

SEQ ID NO: 1791042 - RNA, 21 nt, Human
cuggagaaaauggacguguua

SEQ ID NO: 1791043 - RNA, 23 nt, Human
cuggacucuaaagucuguugauu

SEQ ID NO: 1791044 - RNA, 22 nt, Human
cuggacuccucuguccaggcac

SEQ ID NO: 1791045 - RNA, 23 nt, Human
cuggacuccucuguccaggcacu

SEQ ID NO: 1791046 - RNA, 14 nt, Human
cugcuuccagugag

SEQ ID NO: 1791047 - RNA, 14 nt, Human
cugcuucaaggauc

SEQ ID NO: 1791048 - RNA, 16 nt, Human
cugcuucaaggauccu

SEQ ID NO: 1791049 - RNA, 19 nt, Human
cugcuucaaggauccugag

SEQ ID NO: 1791050 - RNA, 20 nt, Human
cugcuucaaggauccugagc

SEQ ID NO: 1791051 - RNA, 18 nt, Human
cuggaugcagccucacag

SEQ ID NO: 1791052 - RNA, 19 nt, Human
cuggauccaucaggccacu

SEQ ID NO: 1791053 - RNA, 20 nt, Human
cuggaucuccauucucucag

SEQ ID NO: 1791054 - RNA, 16 nt, Human
cuggaugcagccucac

SEQ ID NO: 1791055 - RNA, 17 nt, Human
cuggaugcagccucaca

SEQ ID NO: 1791056 - RNA, 14 nt, Human
cugccuccuuugug

SEQ ID NO: 1791057 - RNA, 14 nt, Human
cugccucgaacugg

SEQ ID NO: 1791058 - RNA, 23 nt, Human
cugccuccuuugugaggaagccg

SEQ ID NO: 1791059 - RNA, 17 nt, Human
cugccuccuuugugagg

SEQ ID NO: 1791060 - RNA, 21 nt, Human
cugccuccuuugugaggaagc

SEQ ID NO: 1791061 - RNA, 20 nt, Human
cugccucgaacuggcugcaa

SEQ ID NO: 1791062 - RNA, 17 nt, Human
cugcuaucaaagagguu

SEQ ID NO: 1791063 - RNA, 24 nt, Human
cugcugaaggcucgagcaugccug

SEQ ID NO: 1791064 - RNA, 23 nt, Human
cugcugaaggcucgagcaugccu

SEQ ID NO: 1791065 - RNA, 18 nt, Human
cugcugaaggcucgagca

SEQ ID NO: 1791066 - RNA, 23 nt, Human
cugccuguucagcuccagcucac

SEQ ID NO: 1791067 - RNA, 20 nt, Human
cugccuguucagcuccagcu

SEQ ID NO: 1791068 - RNA, 15 nt, Human
cugccuguucccauu

SEQ ID NO: 1791069 - RNA, 19 nt, Human
cugccuguucccauucuug

SEQ ID NO: 1791070 - RNA, 11 nt, Human
cugcccugugg

SEQ ID NO: 1791071 - RNA, 12 nt, Human
cugcccuguggg

SEQ ID NO: 1791072 - RNA, 20 nt, Human
cugcccugguuuccugcccu

SEQ ID NO: 1791073 - RNA, 14 nt, Human
cugcccugugggcc

SEQ ID NO: 1791074 - RNA, 19 nt, Human
cugcccuuaccugccagga

SEQ ID NO: 1791075 - RNA, 22 nt, Human
cugcccuuaccugccaggaagc

SEQ ID NO: 1791076 - RNA, 23 nt, Human
cugcccuuaccugccaggaagcc

SEQ ID NO: 1791077 - RNA, 12 nt, Human
cugcccuggugc

SEQ ID NO: 1791078 - RNA, 13 nt, Human
cugcccuggugcu

SEQ ID NO: 1791079 - RNA, 14 nt, Human
cugcccuggugcug

SEQ ID NO: 1791080 - RNA, 15 nt, Human
cugcccuggugcugc

SEQ ID NO: 1791081 - RNA, 23 nt, Human
cugcccuggugcugccacacuuc

SEQ ID NO: 1791082 - RNA, 17 nt, Human
cugcccugguuuccugc

SEQ ID NO: 1791083 - RNA, 18 nt, Human
cugcccugguuuccugcc

SEQ ID NO: 1791084 - RNA, 19 nt, Human
cugcccugguuuccugccc

SEQ ID NO: 1791085 - RNA, 21 nt, Human
cugcccugguuuccugcccug

SEQ ID NO: 1791086 - RNA, 24 nt, Human
cugcccugugaguacuacaguccu

SEQ ID NO: 1791087 - RNA, 16 nt, Human
ccaacucaccccagcc

SEQ ID NO: 1791088 - RNA, 17 nt, Human
ccaacucaccccagccc

SEQ ID NO: 1791089 - RNA, 18 nt, Human
ccaacucaccccagcccc

SEQ ID NO: 1791090 - RNA, 18 nt, Human
ccaaauguucaucaauga

SEQ ID NO: 1791091 - RNA, 23 nt, Human
ccaaauggaaaugggcagagcag

SEQ ID NO: 1791092 - RNA, 14 nt, Human
ccaacucaccccag

SEQ ID NO: 1791093 - RNA, 17 nt, Human
ccaaauguucaucaaug

SEQ ID NO: 1791094 - RNA, 13 nt, Human
ccaagcucugcuc

SEQ ID NO: 1791095 - RNA, 17 nt, Human
ccaagcucugcuccucu

SEQ ID NO: 1791096 - RNA, 12 nt, Human
ccaagcucugcu

SEQ ID NO: 1791097 - RNA, 18 nt, Human
ccaagcucugcuccucuc

SEQ ID NO: 1791098 - RNA, 14 nt, Human
ccaaugcacuuugu

SEQ ID NO: 1791099 - RNA, 15 nt, Human
ccaaugauggucacc

SEQ ID NO: 1791100 - RNA, 17 nt, Human
ccaauauuuaccagacc

SEQ ID NO: 1791101 - RNA, 17 nt, Human
ccaaugggagcucaugg

SEQ ID NO: 1791102 - RNA, 22 nt, Human
cauuuuuuuuaagaaaaaggau

SEQ ID NO: 1791103 - RNA, 20 nt, Human
ccaaaacucuccucugcugc

SEQ ID NO: 1791104 - RNA, 21 nt, Human
ccaaaacucuccucugcugcu

SEQ ID NO: 1791105 - RNA, 21 nt, Human
ccaccuuugaagaaguaagga

SEQ ID NO: 1791106 - RNA, 13 nt, Human
ccaccgcagacag

SEQ ID NO: 1791107 - RNA, 22 nt, Human
ccaccgcagacaggaccaggga

SEQ ID NO: 1791108 - RNA, 16 nt, Human
ccacgcccccacuggu

SEQ ID NO: 1791109 - RNA, 17 nt, Human
ccacgcccccacuggug

SEQ ID NO: 1791110 - RNA, 13 nt, Human
ccacgcccggcua

SEQ ID NO: 1791111 - RNA, 18 nt, Human
ccacgcccccacugguga

SEQ ID NO: 1791112 - RNA, 19 nt, Human
ccacgcccccacuggugac

SEQ ID NO: 1791113 - RNA, 23 nt, Human
ccacagcgcuggccgggaccccg

SEQ ID NO: 1791114 - RNA, 15 nt, Human
ccaccaucaagccac

SEQ ID NO: 1791115 - RNA, 17 nt, Human
ccaccacacccagccca

SEQ ID NO: 1791116 - RNA, 14 nt, Human
ccacagcugcucaa

SEQ ID NO: 1791117 - RNA, 13 nt, Human
ccaccaucaagcc

SEQ ID NO: 1791118 - RNA, 14 nt, Human
ccaccaucaagcca

SEQ ID NO: 1791119 - RNA, 17 nt, Human
ccacucccugcaaccug

SEQ ID NO: 1791120 - RNA, 18 nt, Human
cauauucuguuggccagu

SEQ ID NO: 1791121 - RNA, 17 nt, Human
cauauucuguuggccag

SEQ ID NO: 1791122 - RNA, 16 nt, Human
cauauuaccacagaca

SEQ ID NO: 1791123 - RNA, 22 nt, Human
caguggugguuuucuguucuuu

SEQ ID NO: 1791124 - RNA, 21 nt, Human
caguggugguuuucuguucuu

SEQ ID NO: 1791125 - RNA, 20 nt, Human
caguggugguuuucuguucu

SEQ ID NO: 1791126 - RNA, 19 nt, Human
caguggugguuuucuguuc

SEQ ID NO: 1791127 - RNA, 15 nt, Human
cauccuggcacccgg

SEQ ID NO: 1791128 - RNA, 12 nt, Human
caucacuucccu

SEQ ID NO: 1791129 - RNA, 14 nt, Human
caucacuucccuac

SEQ ID NO: 1791130 - RNA, 22 nt, Human
cauccuggcacccggccccugc

SEQ ID NO: 1791131 - RNA, 23 nt, Human
cauccuggcacccggccccugcu

SEQ ID NO: 1791132 - RNA, 13 nt, Human
caugauguuuucc

SEQ ID NO: 1791133 - RNA, 23 nt, Human
caugcuacacacugcauguuugu

SEQ ID NO: 1791134 - RNA, 20 nt, Human
caugcuacacacugcauguu

SEQ ID NO: 1791135 - RNA, 14 nt, Human
caugcuacacacug

SEQ ID NO: 1791136 - RNA, 17 nt, Human
cauggcugccaauggga

SEQ ID NO: 1791137 - RNA, 14 nt, Human
caugggaaugaaug

SEQ ID NO: 1791138 - RNA, 15 nt, Human
caugggaaugaaugu

SEQ ID NO: 1791139 - RNA, 16 nt, Human
caugggaaugaauguc

SEQ ID NO: 1791140 - RNA, 17 nt, Human
caugggaaugaauguca

SEQ ID NO: 1791141 - RNA, 13 nt, Human
cauucuccaccug

SEQ ID NO: 1791142 - RNA, 14 nt, Human
cauucuccaccugc

SEQ ID NO: 1791143 - RNA, 16 nt, Human
cauucuccaccugcca

SEQ ID NO: 1791144 - RNA, 16 nt, Human
caugucccuaccgagu

SEQ ID NO: 1791145 - RNA, 22 nt, Human
caugucccuaccgagucucuuc

SEQ ID NO: 1791146 - RNA, 14 nt, Human
caugucaaacguga

SEQ ID NO: 1791147 - RNA, 19 nt, Human
caugucaaacgugaaaaug

SEQ ID NO: 1791148 - RNA, 23 nt, Human
caugucccuaccgagucucuucu

SEQ ID NO: 1791149 - RNA, 15 nt, Human
cauguuggccaggcu

SEQ ID NO: 1791150 - RNA, 14 nt, Human
cauguuggccaggc

SEQ ID NO: 1791151 - RNA, 16 nt, Human
cauguuggccaggcug

SEQ ID NO: 1791152 - RNA, 19 nt, Human
cagauccccaagccuggca

SEQ ID NO: 1791153 - RNA, 15 nt, Human
cagauccccaagccu

SEQ ID NO: 1791154 - RNA, 22 nt, Human
cagaggggguggccucccaacu

SEQ ID NO: 1791155 - RNA, 23 nt, Human
cagaggggguggccucccaacuc

SEQ ID NO: 1791156 - RNA, 21 nt, Human
cagaguaauccaagcaaaugu

SEQ ID NO: 1791157 - RNA, 15 nt, Human
cagagguccacaaca

SEQ ID NO: 1791158 - RNA, 20 nt, Human
cagagguccacaacacacag

SEQ ID NO: 1791159 - RNA, 16 nt, Human
cagagguugcagugag

SEQ ID NO: 1791160 - RNA, 17 nt, Human
cagagguugcagugagc

SEQ ID NO: 1791161 - RNA, 15 nt, Human
cagauucuuuccuga

SEQ ID NO: 1791162 - RNA, 17 nt, Human
cagauucuuuccugagg

SEQ ID NO: 1791163 - RNA, 18 nt, Human
cagauucuuuccugaggc

SEQ ID NO: 1791164 - RNA, 19 nt, Human
cagauucuuuccugaggcu

SEQ ID NO: 1791165 - RNA, 13 nt, Human
cagcauaauacuu

SEQ ID NO: 1791166 - RNA, 17 nt, Human
cagcauagaaguaacuu

SEQ ID NO: 1791167 - RNA, 17 nt, Human
cagauugcaacaggcug

SEQ ID NO: 1791168 - RNA, 20 nt, Human
cagauucuuuccugaggcug

SEQ ID NO: 1791169 - RNA, 22 nt, Human
cagauucuuuccugaggcuggg

SEQ ID NO: 1791170 - RNA, 20 nt, Human
cagcacgauuucuguuuaga

SEQ ID NO: 1791171 - RNA, 19 nt, Human
cagcacgauuucuguuuag

SEQ ID NO: 1791172 - RNA, 18 nt, Human
cagcacgauuucuguuua

SEQ ID NO: 1791173 - RNA, 16 nt, Human
cagcacgauuucuguu

SEQ ID NO: 1791174 - RNA, 20 nt, Human
cagcaucauggagguuugaa

SEQ ID NO: 1791175 - RNA, 13 nt, Human
cagccaguaaaug

SEQ ID NO: 1791176 - RNA, 20 nt, Human
cagcugugcucuggacaggc

SEQ ID NO: 1791177 - RNA, 15 nt, Human
cagcugccugggauc

SEQ ID NO: 1791178 - RNA, 24 nt, Human
cagcugugcucuggacaggcaugu

SEQ ID NO: 1791179 - RNA, 21 nt, Human
cagcuguuuaugcauagauaa

SEQ ID NO: 1791180 - RNA, 19 nt, Human
cagcugagggugagugggu

SEQ ID NO: 1791181 - RNA, 12 nt, Human
cagcugccuggg

SEQ ID NO: 1791182 - RNA, 12 nt, Human
cagcugccugca

SEQ ID NO: 1791183 - RNA, 13 nt, Human
cagcugccuggga

SEQ ID NO: 1791184 - RNA, 14 nt, Human
cagcugccugggau

SEQ ID NO: 1791185 - RNA, 16 nt, Human
caggaaaagcugcuga

SEQ ID NO: 1791186 - RNA, 15 nt, Human
caggaaaagcugcug

SEQ ID NO: 1791187 - RNA, 18 nt, Human
caggaaaagcugcugaca

SEQ ID NO: 1791188 - RNA, 21 nt, Human
cagcggggacagcuccuucug

SEQ ID NO: 1791189 - RNA, 19 nt, Human
cagcggggacagcuccuuc

SEQ ID NO: 1791190 - RNA, 18 nt, Human
cagcggggacagcuccuu

SEQ ID NO: 1791191 - RNA, 12 nt, Human
cagccugcucca

SEQ ID NO: 1791192 - RNA, 15 nt, Human
cagccugcuccagcu

SEQ ID NO: 1791193 - RNA, 19 nt, Human
cagccugcuaauuccccag

SEQ ID NO: 1791194 - RNA, 17 nt, Human
cagccucugaaaaccaa

SEQ ID NO: 1791195 - RNA, 19 nt, Human
cagccgagauagccaaggc

SEQ ID NO: 1791196 - RNA, 20 nt, Human
cagccgagauagccaaggcc

SEQ ID NO: 1791197 - RNA, 22 nt, Human
caggugcacaagcuccaagcuc

SEQ ID NO: 1791198 - RNA, 21 nt, Human
caggugcacaagcuccaagcu

SEQ ID NO: 1791199 - RNA, 22 nt, Human
cagguugucugaagucacugca

SEQ ID NO: 1791200 - RNA, 23 nt, Human
cagguugucugaagucacugcac

SEQ ID NO: 1791201 - RNA, 23 nt, Human
caguaaagaacaucccuccuggg

SEQ ID NO: 1791202 - RNA, 14 nt, Human
cagguuuaagcugu

SEQ ID NO: 1791203 - RNA, 12 nt, Human
cagguuuuccug

SEQ ID NO: 1791204 - RNA, 16 nt, Human
cagguuuuccugaaga

SEQ ID NO: 1791205 - RNA, 23 nt, Human
caggugauccacccaccucagcc

SEQ ID NO: 1791206 - RNA, 22 nt, Human
caggugauccacccaccucagc

SEQ ID NO: 1791207 - RNA, 15 nt, Human
caggugcacaagcuc

SEQ ID NO: 1791208 - RNA, 17 nt, Human
caggugcacaagcucca

SEQ ID NO: 1791209 - RNA, 18 nt, Human
caggugcacaagcuccaa

SEQ ID NO: 1791210 - RNA, 19 nt, Human
caggugcacaagcuccaag

SEQ ID NO: 1791211 - RNA, 20 nt, Human
caggugcacaagcuccaagc

SEQ ID NO: 1791212 - RNA, 21 nt, Human
caggugauccacccaccucag

SEQ ID NO: 1791213 - RNA, 15 nt, Human
cagucacauuccaag

SEQ ID NO: 1791214 - RNA, 12 nt, Human
cagugcaucuca

SEQ ID NO: 1791215 - RNA, 17 nt, Human
cagucuggaaugcagug

SEQ ID NO: 1791216 - RNA, 15 nt, Human
cagucuggaaugcag

SEQ ID NO: 1791217 - RNA, 15 nt, Human
cagugcaucucagcc

SEQ ID NO: 1791218 - RNA, 16 nt, Human
cagugcaucucagccc

SEQ ID NO: 1791219 - RNA, 17 nt, Human
cagugcaucucagccca

SEQ ID NO: 1791220 - RNA, 18 nt, Human
cagugcaucucagcccac

SEQ ID NO: 1791221 - RNA, 13 nt, Human
cagugcaugcugu

SEQ ID NO: 1791222 - RNA, 14 nt, Human
cagugcaugcuguc

SEQ ID NO: 1791223 - RNA, 18 nt, Human
cagugcccacaggaucag

SEQ ID NO: 1791224 - RNA, 23 nt, Human
cagugggagcugccuguucagcu

SEQ ID NO: 1791225 - RNA, 20 nt, Human
cagugggagcugccuguuca

SEQ ID NO: 1791226 - RNA, 17 nt, Human
cagugcccacaggauca

SEQ ID NO: 1791227 - RNA, 15 nt, Human
cagugcccacaggau

SEQ ID NO: 1791228 - RNA, 13 nt, Human
cagugcccacagg

SEQ ID NO: 1791229 - RNA, 16 nt, Human
cagugcaugcuguccc

SEQ ID NO: 1791230 - RNA, 17 nt, Human
cagugcaugcugucccu

SEQ ID NO: 1791231 - RNA, 21 nt, Human
caguggugcgaucuggguuca

SEQ ID NO: 1791232 - RNA, 18 nt, Human
caguggugguuuucuguu

SEQ ID NO: 1791233 - RNA, 20 nt, Human
caguggggaggggcuguggg

SEQ ID NO: 1791234 - RNA, 20 nt, Human
caggcugggcuucaguggca

SEQ ID NO: 1791235 - RNA, 15 nt, Human
caggcugggagagcc

SEQ ID NO: 1791236 - RNA, 12 nt, Human
caggcugggaga

SEQ ID NO: 1791237 - RNA, 14 nt, Human
caggcugggagagc

SEQ ID NO: 1791238 - RNA, 22 nt, Human
caggcugggcuucaguggcagc

SEQ ID NO: 1791239 - RNA, 21 nt, Human
caggcugggcuucaguggcag

SEQ ID NO: 1791240 - RNA, 23 nt, Human
cagggcucagcggggacagcucc

SEQ ID NO: 1791241 - RNA, 21 nt, Human
cagggcucagcggggacagcu

SEQ ID NO: 1791242 - RNA, 20 nt, Human
caggggaaaaucagccugcu

SEQ ID NO: 1791243 - RNA, 19 nt, Human
caggggaaaaucagccugc

SEQ ID NO: 1791244 - RNA, 16 nt, Human
caggccagagggagug

SEQ ID NO: 1791245 - RNA, 20 nt, Human
caggccaggcccucugccca

SEQ ID NO: 1791246 - RNA, 19 nt, Human
caggccaggcccucugccc

SEQ ID NO: 1791247 - RNA, 17 nt, Human
caggccaggcccucugc

SEQ ID NO: 1791248 - RNA, 18 nt, Human
caggccaggcccucugcc

SEQ ID NO: 1791249 - RNA, 17 nt, Human
caggccagcugcuuggg

SEQ ID NO: 1791250 - RNA, 19 nt, Human
caggccagcugcuugggcu

SEQ ID NO: 1791251 - RNA, 21 nt, Human
caggccagcugcuugggcuuc

SEQ ID NO: 1791252 - RNA, 23 nt, Human
caggccagcugcuugggcuucau

SEQ ID NO: 1791253 - RNA, 15 nt, Human
caggccagagggagu

SEQ ID NO: 1791254 - RNA, 13 nt, Human
caggccagaggga

SEQ ID NO: 1791255 - RNA, 18 nt, Human
caggcagauacaggaaaa

SEQ ID NO: 1791256 - RNA, 15 nt, Human
caggccacuugauga

SEQ ID NO: 1791257 - RNA, 17 nt, Human
cacuguugcccaggcug

SEQ ID NO: 1791258 - RNA, 19 nt, Human
cacuguuucaaacuuuacu

SEQ ID NO: 1791259 - RNA, 17 nt, Human
cacuuagaaauugcauu

SEQ ID NO: 1791260 - RNA, 19 nt, Human
cacuuagaaauugcauuuc

SEQ ID NO: 1791261 - RNA, 20 nt, Human
cacuuagaaauugcauuucc

SEQ ID NO: 1791262 - RNA, 20 nt, Human
cacuuggucugugagaugcu

SEQ ID NO: 1791263 - RNA, 17 nt, Human
cacuuggucugugagau

SEQ ID NO: 1791264 - RNA, 16 nt, Human
cacuguugcccaggcu

SEQ ID NO: 1791265 - RNA, 15 nt, Human
cacuguugcccaggc

SEQ ID NO: 1791266 - RNA, 13 nt, Human
cacugguggcccg

SEQ ID NO: 1791267 - RNA, 21 nt, Human
cacugguggcccgacagccug

SEQ ID NO: 1791268 - RNA, 22 nt, Human
cacugguggcccgacagccugg

SEQ ID NO: 1791269 - RNA, 17 nt, Human
cacuggugacaugucuu

SEQ ID NO: 1791270 - RNA, 23 nt, Human
cacugggcuuggggaccagagcu

SEQ ID NO: 1791271 - RNA, 22 nt, Human
cacugggcuuggggaccagagc

SEQ ID NO: 1791272 - RNA, 23 nt, Human
cagaaguuucugccgcagcccug

SEQ ID NO: 1791273 - RNA, 22 nt, Human
cagaaguuucugccgcagcccu

SEQ ID NO: 1791274 - RNA, 20 nt, Human
cagaaguuucugccgcagcc

SEQ ID NO: 1791275 - RNA, 21 nt, Human
cagaaguuucugccgcagccc

SEQ ID NO: 1791276 - RNA, 22 nt, Human
cagaauauuagugaccucagcu

SEQ ID NO: 1791277 - RNA, 17 nt, Human
cagaaauguguuaucac

SEQ ID NO: 1791278 - RNA, 15 nt, Human
cagaacacauaauuc

SEQ ID NO: 1791279 - RNA, 23 nt, Human
cacuacggaauaguuggcuagga

SEQ ID NO: 1791280 - RNA, 20 nt, Human
cacggagggugacgggggug

SEQ ID NO: 1791281 - RNA, 16 nt, Human
cacggccaggccagag

SEQ ID NO: 1791282 - RNA, 15 nt, Human
cacggccaggccaga

SEQ ID NO: 1791283 - RNA, 14 nt, Human
cacggccaggccag

SEQ ID NO: 1791284 - RNA, 19 nt, Human
cacucuuauugcccacgcu

SEQ ID NO: 1791285 - RNA, 18 nt, Human
cacucuuauugcccacgc

SEQ ID NO: 1791286 - RNA, 17 nt, Human
cacucuuauugcccacg

SEQ ID NO: 1791287 - RNA, 17 nt, Human
cacucuugaaaaaugca

SEQ ID NO: 1791288 - RNA, 21 nt, Human
caccuacaugagguacugaga

SEQ ID NO: 1791289 - RNA, 14 nt, Human
caccugccagggac

SEQ ID NO: 1791290 - RNA, 16 nt, Human
caccugccagggacag

SEQ ID NO: 1791291 - RNA, 20 nt, Human
caccuaccaccacgcccggc

SEQ ID NO: 1791292 - RNA, 13 nt, Human
caccuuggcucaa

SEQ ID NO: 1791293 - RNA, 14 nt, Human
caccuuggcucaag

SEQ ID NO: 1791294 - RNA, 19 nt, Human
caccuugacagggcacacc

SEQ ID NO: 1791295 - RNA, 17 nt, Human
caccugccagggacaga

SEQ ID NO: 1791296 - RNA, 14 nt, Human
caccuuuauucugg

SEQ ID NO: 1791297 - RNA, 14 nt, Human
caccuuugaagaag

SEQ ID NO: 1791298 - RNA, 17 nt, Human
caccuuuguccccaccg

SEQ ID NO: 1791299 - RNA, 14 nt, Human
caccuuugucccca

SEQ ID NO: 1791300 - RNA, 15 nt, Human
caccuuuguccccac

SEQ ID NO: 1791301 - RNA, 13 nt, Human
caaguauuauacc

SEQ ID NO: 1791302 - RNA, 22 nt, Human
caaguaauccaccugccucggc

SEQ ID NO: 1791303 - RNA, 12 nt, Human
caauuuaaaaaa

SEQ ID NO: 1791304 - RNA, 14 nt, Human
cacaagacccuugu

SEQ ID NO: 1791305 - RNA, 16 nt, Human
cacaagacccuugugg

SEQ ID NO: 1791306 - RNA, 14 nt, Human
cacaagccuucggc

SEQ ID NO: 1791307 - RNA, 23 nt, Human
caaugcuggcuguuggcuggggg

SEQ ID NO: 1791308 - RNA, 22 nt, Human
caaugcuggcuguuggcugggg

SEQ ID NO: 1791309 - RNA, 19 nt, Human
caauucuccugccucagcc

SEQ ID NO: 1791310 - RNA, 17 nt, Human
caauucuccugccucag

SEQ ID NO: 1791311 - RNA, 22 nt, Human
caaugcugugcccuaaagugua

SEQ ID NO: 1791312 - RNA, 17 nt, Human
cacaucuugcucugcug

SEQ ID NO: 1791313 - RNA, 16 nt, Human
cacaucuugcucugcu

SEQ ID NO: 1791314 - RNA, 22 nt, Human
cacaucagcacgauuucuguuu

SEQ ID NO: 1791315 - RNA, 21 nt, Human
cacaucagcacgauuucuguu

SEQ ID NO: 1791316 - RNA, 20 nt, Human
cacaucagcacgauuucugu

SEQ ID NO: 1791317 - RNA, 18 nt, Human
cacaucuugcucugcuga

SEQ ID NO: 1791318 - RNA, 19 nt, Human
cacaucuugcucugcugac

SEQ ID NO: 1791319 - RNA, 14 nt, Human
cacauuuuucagau

SEQ ID NO: 1791320 - RNA, 15 nt, Human
cacauuuuauuuuau

SEQ ID NO: 1791321 - RNA, 21 nt, Human
cacauuuuuuaaaugcaccug

SEQ ID NO: 1791322 - RNA, 17 nt, Human
cacauuuuuuaaaugca

SEQ ID NO: 1791323 - RNA, 14 nt, Human
cacauuuuucuuag

SEQ ID NO: 1791324 - RNA, 13 nt, Human
cacauuuuucuua

SEQ ID NO: 1791325 - RNA, 18 nt, Human
cacauuuuucagauauaa

SEQ ID NO: 1791326 - RNA, 20 nt, Human
caccaacauacucccaucug

SEQ ID NO: 1791327 - RNA, 21 nt, Human
caccaacauacucccaucugu

SEQ ID NO: 1791328 - RNA, 23 nt, Human
cacccaggagccccgaggccuuc

SEQ ID NO: 1791329 - RNA, 20 nt, Human
cacccaggagccccgaggcc

SEQ ID NO: 1791330 - RNA, 19 nt, Human
cacccagcccacuucugcc

SEQ ID NO: 1791331 - RNA, 24 nt, Human
cacccaggagccccgaggccuucu

SEQ ID NO: 1791332 - RNA, 21 nt, Human
caccagcccuuagcagggaaa

SEQ ID NO: 1791333 - RNA, 15 nt, Human
caccagcagccugga

SEQ ID NO: 1791334 - RNA, 23 nt, Human
caccaacauacucccaucuguga

SEQ ID NO: 1791335 - RNA, 14 nt, Human
caccagcagccugg

SEQ ID NO: 1791336 - RNA, 12 nt, Human
caccagcagccu

SEQ ID NO: 1791337 - RNA, 17 nt, Human
cacccagcccacuucug

SEQ ID NO: 1791338 - RNA, 16 nt, Human
cacccagcccacuucu

SEQ ID NO: 1791339 - RNA, 19 nt, Human
cacaguauuacuucugcua

SEQ ID NO: 1791340 - RNA, 18 nt, Human
cacaguauuacuucugcu

SEQ ID NO: 1791341 - RNA, 16 nt, Human
cacaguauuacuucug

SEQ ID NO: 1791342 - RNA, 10 nt, Human
cacagcucuu

SEQ ID NO: 1791343 - RNA, 23 nt, Human
cacagcucuguccugggagugag

SEQ ID NO: 1791344 - RNA, 20 nt, Human
cacagcucuguccugggagu

SEQ ID NO: 1791345 - RNA, 22 nt, Human
cacagcuaacauggaaguacua

SEQ ID NO: 1791346 - RNA, 19 nt, Human
cacagacccugcccugugg

SEQ ID NO: 1791347 - RNA, 20 nt, Human
cacagacccugcccuguggg

SEQ ID NO: 1791348 - RNA, 21 nt, Human
cacagacccugcccugugggc

SEQ ID NO: 1791349 - RNA, 18 nt, Human
cacagacauacuaaccag

SEQ ID NO: 1791350 - RNA, 22 nt, Human
cacagacccugcccugugggcc

SEQ ID NO: 1791351 - RNA, 15 nt, Human
cacagcuaacaugga

SEQ ID NO: 1791352 - RNA, 16 nt, Human
cacagcuaacauggaa

SEQ ID NO: 1791353 - RNA, 18 nt, Human
auuuugauccaagcuggu

SEQ ID NO: 1791354 - RNA, 16 nt, Human
auuuguuugaacugau

SEQ ID NO: 1791355 - RNA, 14 nt, Human
auuuguuugaacug

SEQ ID NO: 1791356 - RNA, 20 nt, Human
auuuguuugaacugauaaag

SEQ ID NO: 1791357 - RNA, 20 nt, Human
auuuguuucuuucucugagg

SEQ ID NO: 1791358 - RNA, 13 nt, Human
auuuguuugaacu

SEQ ID NO: 1791359 - RNA, 20 nt, Human
auuuuuaaagaaaaguuuug

SEQ ID NO: 1791360 - RNA, 17 nt, Human
auuuuuuuuuccuucag

SEQ ID NO: 1791361 - RNA, 12 nt, Human
auuuuuuuuucc

SEQ ID NO: 1791362 - RNA, 13 nt, Human
auuuuuuuuuccu

SEQ ID NO: 1791363 - RNA, 16 nt, Human
auuuuuuuuuccuuca

SEQ ID NO: 1791364 - RNA, 13 nt, Human
auuuuuaagugcu

SEQ ID NO: 1791365 - RNA, 19 nt, Human
caaaagcugggcagguugg

SEQ ID NO: 1791366 - RNA, 15 nt, Human
caaaagcugggcagg

SEQ ID NO: 1791367 - RNA, 17 nt, Human
caacccccagccugcua

SEQ ID NO: 1791368 - RNA, 16 nt, Human
caacccccagccugcu

SEQ ID NO: 1791369 - RNA, 15 nt, Human
caacccccagccugc

SEQ ID NO: 1791370 - RNA, 18 nt, Human
caacuaugauuuggaaaa

SEQ ID NO: 1791371 - RNA, 19 nt, Human
caacuaugauuuggaaaau

SEQ ID NO: 1791372 - RNA, 22 nt, Human
caacuaugauuuggaaaauaaa

SEQ ID NO: 1791373 - RNA, 17 nt, Human
caacuaugauuuggaaa

SEQ ID NO: 1791374 - RNA, 14 nt, Human
caaccauuugaaac

SEQ ID NO: 1791375 - RNA, 14 nt, Human
caaccauuccccau

SEQ ID NO: 1791376 - RNA, 19 nt, Human
caacccaaauguucaucaa

SEQ ID NO: 1791377 - RNA, 17 nt, Human
caacucaccccagcccc

SEQ ID NO: 1791378 - RNA, 16 nt, Human
caacucaccccagccc

SEQ ID NO: 1791379 - RNA, 13 nt, Human
caacucaccccag

SEQ ID NO: 1791380 - RNA, 15 nt, Human
caacucaccccagcc

SEQ ID NO: 1791381 - RNA, 22 nt, Human
caagacccuuguggucccaccc

SEQ ID NO: 1791382 - RNA, 18 nt, Human
caagacccuugugguccc

SEQ ID NO: 1791383 - RNA, 19 nt, Human
caagacccuugugguccca

SEQ ID NO: 1791384 - RNA, 13 nt, Human
caagacacaguga

SEQ ID NO: 1791385 - RNA, 18 nt, Human
caaccacugcgaccacaa

SEQ ID NO: 1791386 - RNA, 23 nt, Human
caacaaaccuguuucugcagcca

SEQ ID NO: 1791387 - RNA, 13 nt, Human
caaaugcagcuuu

SEQ ID NO: 1791388 - RNA, 21 nt, Human
caaaucugcuuuuuaaagaau

SEQ ID NO: 1791389 - RNA, 22 nt, Human
caaauccagccugcugccugcu

SEQ ID NO: 1791390 - RNA, 17 nt, Human
caaaucagcugcuacua

SEQ ID NO: 1791391 - RNA, 13 nt, Human
caaagaugcagcc

SEQ ID NO: 1791392 - RNA, 14 nt, Human
caaagaugcagccg

SEQ ID NO: 1791393 - RNA, 20 nt, Human
caaaguacacuguuucaaac

SEQ ID NO: 1791394 - RNA, 16 nt, Human
caaaguacacuguuuc

SEQ ID NO: 1791395 - RNA, 21 nt, Human
caaaguacacuguuucaaacu

SEQ ID NO: 1791396 - RNA, 13 nt, Human
caacacaaagauu

SEQ ID NO: 1791397 - RNA, 22 nt, Human
caacaccucugcacaagcugca

SEQ ID NO: 1791398 - RNA, 20 nt, Human
caacaccuuguuucccucuc

SEQ ID NO: 1791399 - RNA, 18 nt, Human
auucacaagacccaaaag

SEQ ID NO: 1791400 - RNA, 18 nt, Human
auuaaauucuugcaaagu

SEQ ID NO: 1791401 - RNA, 14 nt, Human
auuaaauucuugca

SEQ ID NO: 1791402 - RNA, 20 nt, Human
auuaaauucuugcaaaguau

SEQ ID NO: 1791403 - RNA, 20 nt, Human
auuauguguguuuuaaaaug

SEQ ID NO: 1791404 - RNA, 21 nt, Human
auuauguguguuuuaaaauga

SEQ ID NO: 1791405 - RNA, 15 nt, Human
auuauguguguuuua

SEQ ID NO: 1791406 - RNA, 20 nt, Human
auucauauuuacuucuuaua

SEQ ID NO: 1791407 - RNA, 18 nt, Human
auucauauuuacuucuua

SEQ ID NO: 1791408 - RNA, 19 nt, Human
auucauauuuacuucuuau

SEQ ID NO: 1791409 - RNA, 17 nt, Human
auucuugccaaauauaa

SEQ ID NO: 1791410 - RNA, 18 nt, Human
auucugaccuuaaaugca

SEQ ID NO: 1791411 - RNA, 21 nt, Human
auucucuccuguaccucuuga

SEQ ID NO: 1791412 - RNA, 19 nt, Human
auucucuccuguaccucuu

SEQ ID NO: 1791413 - RNA, 21 nt, Human
auuccugaugcuucuucagag

SEQ ID NO: 1791414 - RNA, 17 nt, Human
auucuuuccugaggcug

SEQ ID NO: 1791415 - RNA, 22 nt, Human
auucuuuccugaggcugggcuc

SEQ ID NO: 1791416 - RNA, 16 nt, Human
auugauccagaaagaa

SEQ ID NO: 1791417 - RNA, 17 nt, Human
auugauccagaaagaaa

SEQ ID NO: 1791418 - RNA, 23 nt, Human
auuguaauaggcguaacuaauuu

SEQ ID NO: 1791419 - RNA, 16 nt, Human
auuguaaggaaugauu

SEQ ID NO: 1791420 - RNA, 18 nt, Human
auuguaagcaugcacaaa

SEQ ID NO: 1791421 - RNA, 15 nt, Human
auuguaaggaaugau

SEQ ID NO: 1791422 - RNA, 18 nt, Human
auugauccagaaagaaaa

SEQ ID NO: 1791423 - RNA, 19 nt, Human
auugauccagaaagaaaac

SEQ ID NO: 1791424 - RNA, 22 nt, Human
auugauccagaaagaaaacuug

SEQ ID NO: 1791425 - RNA, 23 nt, Human
auuguaaaagcauuuuguaauaa

SEQ ID NO: 1791426 - RNA, 21 nt, Human
auuguaaaagcauuuuguaau

SEQ ID NO: 1791427 - RNA, 20 nt, Human
auuguaaaagcauuuuguaa

SEQ ID NO: 1791428 - RNA, 19 nt, Human
auuguaaaagcauuuugua

SEQ ID NO: 1791429 - RNA, 13 nt, Human
auuguaaaauggu

SEQ ID NO: 1791430 - RNA, 13 nt, Human
auuguaaaagcau

SEQ ID NO: 1791431 - RNA, 18 nt, Human
auugaugggauuugguca

SEQ ID NO: 1791432 - RNA, 19 nt, Human
auuguucuuaguuugcagu

SEQ ID NO: 1791433 - RNA, 13 nt, Human
auuguacaguuuu

SEQ ID NO: 1791434 - RNA, 16 nt, Human
auuucagcagcugcag

SEQ ID NO: 1791435 - RNA, 15 nt, Human
auuucagauuuguga

SEQ ID NO: 1791436 - RNA, 17 nt, Human
auuuaauggggaggaca

SEQ ID NO: 1791437 - RNA, 14 nt, Human
auuuaaugaaagac

SEQ ID NO: 1791438 - RNA, 16 nt, Human
auuucuguuuagauaa

SEQ ID NO: 1791439 - RNA, 14 nt, Human
auuucuguuuagau

SEQ ID NO: 1791440 - RNA, 12 nt, Human
auuucuguuuag

SEQ ID NO: 1791441 - RNA, 20 nt, Human
ccauaauuuuuuuuuuccuu

SEQ ID NO: 1791442 - RNA, 23 nt, Human
ccaucccaaacccuucagugcca

SEQ ID NO: 1791443 - RNA, 12 nt, Human
ccaucccagccc

SEQ ID NO: 1791444 - RNA, 13 nt, Human
ccaugggccuccu

SEQ ID NO: 1791445 - RNA, 16 nt, Human
ccaugaguccccuguu

SEQ ID NO: 1791446 - RNA, 14 nt, Human
ccaugaguccccug

SEQ ID NO: 1791447 - RNA, 15 nt, Human
ccaugaguccccugu

SEQ ID NO: 1791448 - RNA, 19 nt, Human
ccaugagccucagcauccu

SEQ ID NO: 1791449 - RNA, 13 nt, Human
ccaugaguccccu

SEQ ID NO: 1791450 - RNA, 18 nt, Human
ccaugagccucagcaucc

SEQ ID NO: 1791451 - RNA, 14 nt, Human
ccaugagccucagc

SEQ ID NO: 1791452 - RNA, 16 nt, Human
ccauccccuguagagu

SEQ ID NO: 1791453 - RNA, 22 nt, Human
ccauccccuguagagugggagc

SEQ ID NO: 1791454 - RNA, 20 nt, Human
ccauuuaauggggaggacaa

SEQ ID NO: 1791455 - RNA, 15 nt, Human
ccaugggccuccugu

SEQ ID NO: 1791456 - RNA, 14 nt, Human
ccaugggccuccug

SEQ ID NO: 1791457 - RNA, 17 nt, Human
ccaugggccuccugugu

SEQ ID NO: 1791458 - RNA, 12 nt, Human
ccagucaccccg

SEQ ID NO: 1791459 - RNA, 13 nt, Human
ccagucaccccgg

SEQ ID NO: 1791460 - RNA, 20 nt, Human
ccagucaccccggccaccug

SEQ ID NO: 1791461 - RNA, 21 nt, Human
ccagucaccccggccaccugc

SEQ ID NO: 1791462 - RNA, 14 nt, Human
ccagucccccugcc

SEQ ID NO: 1791463 - RNA, 17 nt, Human
ccaggcaacuugggaac

SEQ ID NO: 1791464 - RNA, 13 nt, Human
ccaggcugggaga

SEQ ID NO: 1791465 - RNA, 14 nt, Human
ccaggcugggagag

SEQ ID NO: 1791466 - RNA, 22 nt, Human
ccaggauguacaaggacagccc

SEQ ID NO: 1791467 - RNA, 15 nt, Human
ccaggcugggagagc

SEQ ID NO: 1791468 - RNA, 17 nt, Human
ccaggcugggagagccu

SEQ ID NO: 1791469 - RNA, 18 nt, Human
ccaggcugggagagccuu

SEQ ID NO: 1791470 - RNA, 21 nt, Human
ccaggcugggagagccuucca

SEQ ID NO: 1791471 - RNA, 22 nt, Human
ccaggcugggagagccuuccag

SEQ ID NO: 1791472 - RNA, 18 nt, Human
ccagcuugaaaccuucac

SEQ ID NO: 1791473 - RNA, 20 nt, Human
ccagcuugaaaccuucacuu

SEQ ID NO: 1791474 - RNA, 21 nt, Human
ccaggaaaggcuccaggagca

SEQ ID NO: 1791475 - RNA, 22 nt, Human
ccaggaaaggcuccaggagcag

SEQ ID NO: 1791476 - RNA, 23 nt, Human
ccaggaaaggcuccaggagcagc

SEQ ID NO: 1791477 - RNA, 19 nt, Human
ccagcagccuggacccugu

SEQ ID NO: 1791478 - RNA, 20 nt, Human
ccagcagccuggacccugug

SEQ ID NO: 1791479 - RNA, 15 nt, Human
ccagcagccuggacc

SEQ ID NO: 1791480 - RNA, 14 nt, Human
ccagcagccuggac

SEQ ID NO: 1791481 - RNA, 10 nt, Human
ccagccccuu

SEQ ID NO: 1791482 - RNA, 21 nt, Human
ccagccccuggaugcagccuc

SEQ ID NO: 1791483 - RNA, 23 nt, Human
ccagcagagcaccuuagacaguc

SEQ ID NO: 1791484 - RNA, 19 nt, Human
ccagcagagcaccuuagac

SEQ ID NO: 1791485 - RNA, 23 nt, Human
cccagcugugcucuggacaggca

SEQ ID NO: 1791486 - RNA, 21 nt, Human
cccagcugugcucuggacagg

SEQ ID NO: 1791487 - RNA, 11 nt, Human
cccagcuguuu

SEQ ID NO: 1791488 - RNA, 22 nt, Human
cccagcuuaaaggggcuagagu

SEQ ID NO: 1791489 - RNA, 19 nt, Human
cccaggaaaggcuccagga

SEQ ID NO: 1791490 - RNA, 23 nt, Human
cccaggaaaggcuccaggagcag

SEQ ID NO: 1791491 - RNA, 21 nt, Human
cccaggaaaggcuccaggagc

SEQ ID NO: 1791492 - RNA, 22 nt, Human
cccaggaaaggcuccaggagca

SEQ ID NO: 1791493 - RNA, 15 nt, Human
cccaggcuuagucac

SEQ ID NO: 1791494 - RNA, 20 nt, Human
cccaggcuuagucacugaga

SEQ ID NO: 1791495 - RNA, 21 nt, Human
cccaggcuggcgugcaguggu

SEQ ID NO: 1791496 - RNA, 14 nt, Human
cccagcccacuucu

SEQ ID NO: 1791497 - RNA, 17 nt, Human
cccagcccacuucugcc

SEQ ID NO: 1791498 - RNA, 22 nt, Human
cccauucugccugcccaggccc

SEQ ID NO: 1791499 - RNA, 21 nt, Human
cccauucugccugcccaggcc

SEQ ID NO: 1791500 - RNA, 20 nt, Human
cccauucugccugcccaggc

SEQ ID NO: 1791501 - RNA, 21 nt, Human
ccccagcaagugagagcuggg

SEQ ID NO: 1791502 - RNA, 17 nt, Human
ccccauccucuguacag

SEQ ID NO: 1791503 - RNA, 20 nt, Human
ccccagcaagugagagcugg

SEQ ID NO: 1791504 - RNA, 19 nt, Human
ccccagcaagugagagcug

SEQ ID NO: 1791505 - RNA, 22 nt, Human
ccccauccucuguacagagccc

SEQ ID NO: 1791506 - RNA, 19 nt, Human
ccccauccucuguacagag

SEQ ID NO: 1791507 - RNA, 21 nt, Human
ccccauccucuguacagagcc

SEQ ID NO: 1791508 - RNA, 17 nt, Human
ccccagcaagugagagc

SEQ ID NO: 1791509 - RNA, 23 nt, Human
ccccagauugcaacaggcugggc

SEQ ID NO: 1791510 - RNA, 22 nt, Human
ccccagauugcaacaggcuggg

SEQ ID NO: 1791511 - RNA, 21 nt, Human
ccccagauugcaacaggcugg

SEQ ID NO: 1791512 - RNA, 23 nt, Human
cccauucugccugcccaggcccc

SEQ ID NO: 1791513 - RNA, 22 nt, Human
cccauaauuuuuuuuuuccuuu

SEQ ID NO: 1791514 - RNA, 23 nt, Human
cccauaauuuuuuuuuuccuuuu

SEQ ID NO: 1791515 - RNA, 13 nt, Human
cccaguuguauuu

SEQ ID NO: 1791516 - RNA, 17 nt, Human
ccccuucgcuccugugu

SEQ ID NO: 1791517 - RNA, 15 nt, Human
ccccuucgcuccugu

SEQ ID NO: 1791518 - RNA, 14 nt, Human
ccccuucgcuccug

SEQ ID NO: 1791519 - RNA, 19 nt, Human
ccccuucgcuccugugucu

SEQ ID NO: 1791520 - RNA, 15 nt, Human
ccccugcaaagccca

SEQ ID NO: 1791521 - RNA, 16 nt, Human
ccccugcaaagcccag

SEQ ID NO: 1791522 - RNA, 17 nt, Human
ccccugcaaagcccagc

SEQ ID NO: 1791523 - RNA, 18 nt, Human
ccccugcacuccagccug

SEQ ID NO: 1791524 - RNA, 14 nt, Human
ccccauucugccug

SEQ ID NO: 1791525 - RNA, 13 nt, Human
ccccauucugccu

SEQ ID NO: 1791526 - RNA, 15 nt, Human
ccccauucugccugc

SEQ ID NO: 1791527 - RNA, 12 nt, Human
cccggcugcgga

SEQ ID NO: 1791528 - RNA, 12 nt, Human
cccggcugcccu

SEQ ID NO: 1791529 - RNA, 13 nt, Human
cccggcugcccuu

SEQ ID NO: 1791530 - RNA, 12 nt, Human
cccgggaagggg

SEQ ID NO: 1791531 - RNA, 22 nt, Human
cccuauccuacuuccccuuccu

SEQ ID NO: 1791532 - RNA, 17 nt, Human
ccccuucugacccaugc

SEQ ID NO: 1791533 - RNA, 13 nt, Human
cccucagagccac

SEQ ID NO: 1791534 - RNA, 14 nt, Human
ccucaaaacaaagg

SEQ ID NO: 1791535 - RNA, 17 nt, Human
ccucccaccucagccuc

SEQ ID NO: 1791536 - RNA, 15 nt, Human
ccucccaccucagcc

SEQ ID NO: 1791537 - RNA, 23 nt, Human
ccucauuuuugaauacaggcaua

SEQ ID NO: 1791538 - RNA, 16 nt, Human
ccucccaucucacaca

SEQ ID NO: 1791539 - RNA, 13 nt, Human
ccucccaucucac

SEQ ID NO: 1791540 - RNA, 14 nt, Human
ccggccccugcugg

SEQ ID NO: 1791541 - RNA, 15 nt, Human
cccuucgcuccugug

SEQ ID NO: 1791542 - RNA, 14 nt, Human
cccuucgcuccugu

SEQ ID NO: 1791543 - RNA, 21 nt, Human
cccuucucuccagccccugga

SEQ ID NO: 1791544 - RNA, 22 nt, Human
cccuucucuccagccccuggau

SEQ ID NO: 1791545 - RNA, 23 nt, Human
ccgcaggauuugggcucuuggaa

SEQ ID NO: 1791546 - RNA, 13 nt, Human
ccggccccugcug

SEQ ID NO: 1791547 - RNA, 13 nt, Human
cccuucgcuccug

SEQ ID NO: 1791548 - RNA, 20 nt, Human
cccugugauggggcccugcc

SEQ ID NO: 1791549 - RNA, 18 nt, Human
cccugugauggggcccug

SEQ ID NO: 1791550 - RNA, 19 nt, Human
cccugugauggggcccugc

SEQ ID NO: 1791551 - RNA, 17 nt, Human
cccugugauggggcccu

SEQ ID NO: 1791552 - RNA, 16 nt, Human
cccugucuaaugaaac

SEQ ID NO: 1791553 - RNA, 20 nt, Human
cccugucucaaaaaaagaaa

SEQ ID NO: 1791554 - RNA, 23 nt, Human
cccugucucaaaaaaagaaaaag

SEQ ID NO: 1791555 - RNA, 15 nt, Human
ccugucuaaugaaac

SEQ ID NO: 1791556 - RNA, 22 nt, Human
ccugucuaaugaaaccuguguc

SEQ ID NO: 1791557 - RNA, 16 nt, Human
ccugugaacugaacuc

SEQ ID NO: 1791558 - RNA, 17 nt, Human
ccugugaacugaacucu

SEQ ID NO: 1791559 - RNA, 18 nt, Human
ccugugacuucagcucug

SEQ ID NO: 1791560 - RNA, 21 nt, Human
ccugguggcagugggagcugc

SEQ ID NO: 1791561 - RNA, 18 nt, Human
ccugggggcugggcagag

SEQ ID NO: 1791562 - RNA, 13 nt, Human
ccugguuuccugc

SEQ ID NO: 1791563 - RNA, 14 nt, Human
ccugguuuccugcc

SEQ ID NO: 1791564 - RNA, 15 nt, Human
ccugguuuccugccc

SEQ ID NO: 1791565 - RNA, 19 nt, Human
ccuguccugccuaaggcug

SEQ ID NO: 1791566 - RNA, 17 nt, Human
ccuguccugccuaaggc

SEQ ID NO: 1791567 - RNA, 15 nt, Human
ccuguaaucacagcu

SEQ ID NO: 1791568 - RNA, 20 nt, Human
ccugggccccaguuguauuu

SEQ ID NO: 1791569 - RNA, 22 nt, Human
ccuggccucugcacuccccugc

SEQ ID NO: 1791570 - RNA, 22 nt, Human
ccuggccucaagugauucuccu

SEQ ID NO: 1791571 - RNA, 22 nt, Human
ccuggccuagcauacguacaca

SEQ ID NO: 1791572 - RNA, 20 nt, Human
ccuggccucugcacuccccu

SEQ ID NO: 1791573 - RNA, 21 nt, Human
ccuggccucugcacuccccug

SEQ ID NO: 1791574 - RNA, 19 nt, Human
ccugcacuugcagacucua

SEQ ID NO: 1791575 - RNA, 18 nt, Human
ccugcacuugcagacucu

SEQ ID NO: 1791576 - RNA, 17 nt, Human
ccugcacuugcagacuc

SEQ ID NO: 1791577 - RNA, 16 nt, Human
ccugcacuugcagacu

SEQ ID NO: 1791578 - RNA, 21 nt, Human
ccugaguagcugggauuacag

SEQ ID NO: 1791579 - RNA, 16 nt, Human
ccucuuucccucccuu

SEQ ID NO: 1791580 - RNA, 13 nt, Human
ccucuuucccucc

SEQ ID NO: 1791581 - RNA, 17 nt, Human
ccugccccagggcuccc

SEQ ID NO: 1791582 - RNA, 13 nt, Human
ccugcccaggccc

SEQ ID NO: 1791583 - RNA, 12 nt, Human
ccugcccaccug

SEQ ID NO: 1791584 - RNA, 13 nt, Human
ccugcccaccugg

SEQ ID NO: 1791585 - RNA, 14 nt, Human
ccugcccaccuggc

SEQ ID NO: 1791586 - RNA, 20 nt, Human
ccugcccaccuggccucugc

SEQ ID NO: 1791587 - RNA, 21 nt, Human
ccugcugcaguugccagucac

SEQ ID NO: 1791588 - RNA, 20 nt, Human
ccugcugcaguugccaguca

SEQ ID NO: 1791589 - RNA, 23 nt, Human
ccugccucgaacuggcugcaaag

SEQ ID NO: 1791590 - RNA, 21 nt, Human
ccugccucgaacuggcugcaa

SEQ ID NO: 1791591 - RNA, 17 nt, Human
ccugcugcaguugccag

SEQ ID NO: 1791592 - RNA, 19 nt, Human
ccugcugcaguugccaguc

SEQ ID NO: 1791593 - RNA, 19 nt, Human
ccugccucgaacuggcugc

SEQ ID NO: 1791594 - RNA, 11 nt, Human
ccucuuucccu

SEQ ID NO: 1791595 - RNA, 23 nt, Human
cuagcauacguacacauuuuauu

SEQ ID NO: 1791596 - RNA, 21 nt, Human
cuagcauacguacacauuuua

SEQ ID NO: 1791597 - RNA, 22 nt, Human
cuagaagauuuugaaauuuuua

SEQ ID NO: 1791598 - RNA, 13 nt, Human
cuagaacucccuu

SEQ ID NO: 1791599 - RNA, 12 nt, Human
cuagaacucccu

SEQ ID NO: 1791600 - RNA, 17 nt, Human
cuaccuuuguauucucu

SEQ ID NO: 1791601 - RNA, 17 nt, Human
cuacguuaccaggcagg

SEQ ID NO: 1791602 - RNA, 18 nt, Human
cuacaugagguacugaga

SEQ ID NO: 1791603 - RNA, 20 nt, Human
cuacaugagguacugagagu

SEQ ID NO: 1791604 - RNA, 20 nt, Human
cuacaguccucccaucucac

SEQ ID NO: 1791605 - RNA, 21 nt, Human
cuacaguugaaaaacagcuga

SEQ ID NO: 1791606 - RNA, 14 nt, Human
cuacaguguacagu

SEQ ID NO: 1791607 - RNA, 13 nt, Human
cuacaguguacag

SEQ ID NO: 1791608 - RNA, 22 nt, Human
cuacaguugaaaaacagcugag

SEQ ID NO: 1791609 - RNA, 19 nt, Human
cuacaguccucccaucuca

SEQ ID NO: 1791610 - RNA, 23 nt, Human
cuaagugauccucccaccucagc

SEQ ID NO: 1791611 - RNA, 20 nt, Human
cuaaguuuuuauggcuuuug

SEQ ID NO: 1791612 - RNA, 21 nt, Human
cuaagugguacuaacuuuccu

SEQ ID NO: 1791613 - RNA, 15 nt, Human
cuaauucuaugccug

SEQ ID NO: 1791614 - RNA, 23 nt, Human
cuaaguuuuuauggcuuuugugc

SEQ ID NO: 1791615 - RNA, 11 nt, Human
cgugugugugu

SEQ ID NO: 1791616 - RNA, 20 nt, Human
cucaaacucuugaccucagg

SEQ ID NO: 1791617 - RNA, 13 nt, Human
cucaaacuccuga

SEQ ID NO: 1791618 - RNA, 14 nt, Human
cucaaacuccugac

SEQ ID NO: 1791619 - RNA, 14 nt, Human
cucaauaaaguaca

SEQ ID NO: 1791620 - RNA, 15 nt, Human
cucaaugcacugaca

SEQ ID NO: 1791621 - RNA, 13 nt, Human
cucaaugcacuga

SEQ ID NO: 1791622 - RNA, 11 nt, Human
cucacaaaaga

SEQ ID NO: 1791623 - RNA, 18 nt, Human
cuaucucccccagcccca

SEQ ID NO: 1791624 - RNA, 16 nt, Human
cuaucucccccagccc

SEQ ID NO: 1791625 - RNA, 17 nt, Human
cuaucucccccagcccc

SEQ ID NO: 1791626 - RNA, 18 nt, Human
cucaaaagcugggcaggu

SEQ ID NO: 1791627 - RNA, 17 nt, Human
cucaaaaaaagaaaaag

SEQ ID NO: 1791628 - RNA, 18 nt, Human
cuaucguaaaauuaagaa

SEQ ID NO: 1791629 - RNA, 17 nt, Human
cuaucguaaaauuaaga

SEQ ID NO: 1791630 - RNA, 14 nt, Human
cuaucuaaauguug

SEQ ID NO: 1791631 - RNA, 15 nt, Human
cuaucucccccagcc

SEQ ID NO: 1791632 - RNA, 18 nt, Human
cuaucaugucaaacguga

SEQ ID NO: 1791633 - RNA, 21 nt, Human
cuaguuugauuaaauucuugc

SEQ ID NO: 1791634 - RNA, 22 nt, Human
cuaguuugauuaaauucuugca

SEQ ID NO: 1791635 - RNA, 15 nt, Human
cuaguuugauuaaau

SEQ ID NO: 1791636 - RNA, 13 nt, Human
cuaguuugauuaa

SEQ ID NO: 1791637 - RNA, 22 nt, Human
cuaguuguuugauucagacagc

SEQ ID NO: 1791638 - RNA, 23 nt, Human
cuaguuguuugauucagacagcu

SEQ ID NO: 1791639 - RNA, 12 nt, Human
cuagccagagga

SEQ ID NO: 1791640 - RNA, 13 nt, Human
cuagccagaggag

SEQ ID NO: 1791641 - RNA, 15 nt, Human
cuagccagaggagag

SEQ ID NO: 1791642 - RNA, 21 nt, Human
ccuuucaauaggaaaaacuga

SEQ ID NO: 1791643 - RNA, 15 nt, Human
ccuuucacaaccuuc

SEQ ID NO: 1791644 - RNA, 15 nt, Human
ccuuuugagugccuu

SEQ ID NO: 1791645 - RNA, 17 nt, Human
ccuuuugagugccuuac

SEQ ID NO: 1791646 - RNA, 16 nt, Human
ccuugccgucuaccug

SEQ ID NO: 1791647 - RNA, 21 nt, Human
ccuuuuuuagaguugauacua

SEQ ID NO: 1791648 - RNA, 12 nt, Human
cgacagccuggc

SEQ ID NO: 1791649 - RNA, 13 nt, Human
cgacagccuggca

SEQ ID NO: 1791650 - RNA, 14 nt, Human
cgacagccuggcac

SEQ ID NO: 1791651 - RNA, 13 nt, Human
cgacaaugcaaac

SEQ ID NO: 1791652 - RNA, 12 nt, Human
cgacaaugcaaa

SEQ ID NO: 1791653 - RNA, 19 nt, Human
cgacccuugccgucuaccu

SEQ ID NO: 1791654 - RNA, 20 nt, Human
cgacccuugccgucuaccug

SEQ ID NO: 1791655 - RNA, 17 nt, Human
cgacugccaucuuggac

SEQ ID NO: 1791656 - RNA, 17 nt, Human
cgacugcccggcagggu

SEQ ID NO: 1791657 - RNA, 17 nt, Human
cgccagauucuuuccug

SEQ ID NO: 1791658 - RNA, 13 nt, Human
cgccucugcauuc

SEQ ID NO: 1791659 - RNA, 22 nt, Human
cgcaggauucuuccucccuccc

SEQ ID NO: 1791660 - RNA, 13 nt, Human
cgcaggcuggccc

SEQ ID NO: 1791661 - RNA, 14 nt, Human
cgauagugguggug

SEQ ID NO: 1791662 - RNA, 14 nt, Human
cgugcacacaccag

SEQ ID NO: 1791663 - RNA, 18 nt, Human
cgugauuuugcuguagaa

SEQ ID NO: 1791664 - RNA, 20 nt, Human
cguguaaccauggacccaau

SEQ ID NO: 1791665 - RNA, 17 nt, Human
cgugaguccuggcaugg

SEQ ID NO: 1791666 - RNA, 17 nt, Human
cgugaggccagagacac

SEQ ID NO: 1791667 - RNA, 16 nt, Human
cgugaguccuggcaug

SEQ ID NO: 1791668 - RNA, 16 nt, Human
cguaaagcuagaaaug

SEQ ID NO: 1791669 - RNA, 14 nt, Human
cguaaaauuaagaa

SEQ ID NO: 1791670 - RNA, 23 nt, Human
cgguguuuaagacauuuuuggaa

SEQ ID NO: 1791671 - RNA, 16 nt, Human
cgguuuuacugcagcu

SEQ ID NO: 1791672 - RNA, 12 nt, Human
cggcuccaggcu

SEQ ID NO: 1791673 - RNA, 17 nt, Human
cggcucacugcagccuc

SEQ ID NO: 1791674 - RNA, 16 nt, Human
cggcucacugcagccu

SEQ ID NO: 1791675 - RNA, 14 nt, Human
cggcucacugcagc

SEQ ID NO: 1791676 - RNA, 15 nt, Human
cggcucacugcagcc

SEQ ID NO: 1791677 - RNA, 20 nt, Human
cggagucccaccuuggcugc

SEQ ID NO: 1791678 - RNA, 18 nt, Human
cggagucccaccuuggcu

SEQ ID NO: 1791679 - RNA, 16 nt, Human
cggcuccaggcuccuu

SEQ ID NO: 1791680 - RNA, 15 nt, Human
cggcuccaggcuccu

SEQ ID NO: 1791681 - RNA, 14 nt, Human
cggcuccaggcucc

SEQ ID NO: 1791682 - RNA, 13 nt, Human
cggcuccaggcuc

SEQ ID NO: 1791683 - RNA, 14 nt, Human
cgggccacagagaa

SEQ ID NO: 1791684 - RNA, 12 nt, Human
cgggccacagag

SEQ ID NO: 1791685 - RNA, 17 nt, Human
cgggccacagagaaagu

SEQ ID NO: 1791686 - RNA, 11 nt, Human
cgggcucagca

SEQ ID NO: 1791687 - RNA, 15 nt, Human
cgggcucagcaaaag

SEQ ID NO: 1791688 - RNA, 14 nt, Human
cgggcucugccucc

SEQ ID NO: 1791689 - RNA, 16 nt, Human
cgggcucugccuccca

SEQ ID NO: 1791690 - RNA, 15 nt, Human
cggggacagcuccuu

SEQ ID NO: 1791691 - RNA, 18 nt, Human
cgguguggagaagcggcu

SEQ ID NO: 1791692 - RNA, 17 nt, Human
cgggcucugccucccau

SEQ ID NO: 1791693 - RNA, 14 nt, Human
cggggacagcuccu

SEQ ID NO: 1791694 - RNA, 16 nt, Human
cggagucccaccuugg

SEQ ID NO: 1791695 - RNA, 15 nt, Human
cucugguuaucuaau

SEQ ID NO: 1791696 - RNA, 12 nt, Human
cucuguccaggc

SEQ ID NO: 1791697 - RNA, 16 nt, Human
cucugcugacagacac

SEQ ID NO: 1791698 - RNA, 14 nt, Human
cucugcugacagac

SEQ ID NO: 1791699 - RNA, 13 nt, Human
cucugcugacaga

SEQ ID NO: 1791700 - RNA, 14 nt, Human
cucugguccauaga

SEQ ID NO: 1791701 - RNA, 20 nt, Human
cucugcuccucuccccagca

SEQ ID NO: 1791702 - RNA, 18 nt, Human
cucugcuccucuccccag

SEQ ID NO: 1791703 - RNA, 13 nt, Human
cucugcuccucuc

SEQ ID NO: 1791704 - RNA, 14 nt, Human
cucugcaggucccu

SEQ ID NO: 1791705 - RNA, 15 nt, Human
cucugcaggucccua

SEQ ID NO: 1791706 - RNA, 16 nt, Human
cucugcaggucccuaa

SEQ ID NO: 1791707 - RNA, 17 nt, Human
cucugcaggucccuaau

SEQ ID NO: 1791708 - RNA, 13 nt, Human
cucugcagcaaua

SEQ ID NO: 1791709 - RNA, 21 nt, Human
cucugcacuccccugcugggu

SEQ ID NO: 1791710 - RNA, 20 nt, Human
cucugcacuccccugcuggg

SEQ ID NO: 1791711 - RNA, 13 nt, Human
cucuuauugccca

SEQ ID NO: 1791712 - RNA, 20 nt, Human
cucuuauugcccacgcugga

SEQ ID NO: 1791713 - RNA, 19 nt, Human
cucuuauugcccacgcugg

SEQ ID NO: 1791714 - RNA, 15 nt, Human
cucuuauugcccacg

SEQ ID NO: 1791715 - RNA, 14 nt, Human
cucuuauugcccac

SEQ ID NO: 1791716 - RNA, 14 nt, Human
cucuucaaucucuu

SEQ ID NO: 1791717 - RNA, 19 nt, Human
cucuucagaucucuaacuu

SEQ ID NO: 1791718 - RNA, 18 nt, Human
cucuucagaucucuaacu

SEQ ID NO: 1791719 - RNA, 16 nt, Human
cucuucaacugaccag

SEQ ID NO: 1791720 - RNA, 17 nt, Human
cucuucaacugaccagc

SEQ ID NO: 1791721 - RNA, 20 nt, Human
cucuucaacugaccagccuc

SEQ ID NO: 1791722 - RNA, 22 nt, Human
cugacaacacucauugaccuga

SEQ ID NO: 1791723 - RNA, 23 nt, Human
cugacaacacucauugaccugag

SEQ ID NO: 1791724 - RNA, 19 nt, Human
cugaaggccccgcccaggc

SEQ ID NO: 1791725 - RNA, 17 nt, Human
cugaaggcuggguucug

SEQ ID NO: 1791726 - RNA, 21 nt, Human
cugaaggccccgcccaggcuu

SEQ ID NO: 1791727 - RNA, 23 nt, Human
cugaaggacauugcggacagcca

SEQ ID NO: 1791728 - RNA, 21 nt, Human
cugaagcuaucguaaaauuaa

SEQ ID NO: 1791729 - RNA, 22 nt, Human
cugaagcuaucguaaaauuaag

SEQ ID NO: 1791730 - RNA, 22 nt, Human
cugaaaauugaugggauuuggu

SEQ ID NO: 1791731 - RNA, 13 nt, Human
cucuugaugccug

SEQ ID NO: 1791732 - RNA, 15 nt, Human
cucuugaugccuggc

SEQ ID NO: 1791733 - RNA, 16 nt, Human
cucuugaugccuggcg

SEQ ID NO: 1791734 - RNA, 21 nt, Human
cucuugaugccuggcggggug

SEQ ID NO: 1791735 - RNA, 23 nt, Human
cucuugagccuugaacuuugacc

SEQ ID NO: 1791736 - RNA, 18 nt, Human
cucuugagccuugaacuu

SEQ ID NO: 1791737 - RNA, 17 nt, Human
cucuugagccuugaacu

SEQ ID NO: 1791738 - RNA, 16 nt, Human
cucuugagccuugaac

SEQ ID NO: 1791739 - RNA, 20 nt, Human
cugaggaauccagacccggc

SEQ ID NO: 1791740 - RNA, 17 nt, Human
cugaggaauccagaccc

SEQ ID NO: 1791741 - RNA, 20 nt, Human
cugaggacacuaaccacgcu

SEQ ID NO: 1791742 - RNA, 21 nt, Human
cugaggaauccagacccggcu

SEQ ID NO: 1791743 - RNA, 23 nt, Human
cugaggacacuaaccacgcugga

SEQ ID NO: 1791744 - RNA, 23 nt, Human
cugaggacaagagaaaaaagcca

SEQ ID NO: 1791745 - RNA, 21 nt, Human
cugagaucaaaacgguuuuac

SEQ ID NO: 1791746 - RNA, 14 nt, Human
cugagcuuucugcu

SEQ ID NO: 1791747 - RNA, 15 nt, Human
cugagcuuucugcua

SEQ ID NO: 1791748 - RNA, 19 nt, Human
cugaguagcuggauuacag

SEQ ID NO: 1791749 - RNA, 21 nt, Human
cugaguacguugugcauuugg

SEQ ID NO: 1791750 - RNA, 12 nt, Human
cugaggugggag

SEQ ID NO: 1791751 - RNA, 20 nt, Human
cugaguacguugugcauuug

SEQ ID NO: 1791752 - RNA, 19 nt, Human
cugaguacguugugcauuu

SEQ ID NO: 1791753 - RNA, 17 nt, Human
cugaguacguugugcau

SEQ ID NO: 1791754 - RNA, 18 nt, Human
cugaguacguugugcauu

SEQ ID NO: 1791755 - RNA, 22 nt, Human
cugaggacuuaaaauauuccug

SEQ ID NO: 1791756 - RNA, 14 nt, Human
cugaggaccagcca

SEQ ID NO: 1791757 - RNA, 20 nt, Human
cugaguagcuggauuacagg

SEQ ID NO: 1791758 - RNA, 14 nt, Human
cugaguagcuggga

SEQ ID NO: 1791759 - RNA, 15 nt, Human
cugaguagcugggau

SEQ ID NO: 1791760 - RNA, 20 nt, Human
cugaguagcugggauuacag

SEQ ID NO: 1791761 - RNA, 22 nt, Human
cugagaggacuuuucuuugugg

SEQ ID NO: 1791762 - RNA, 21 nt, Human
cugagaggacuuuucuuugug

SEQ ID NO: 1791763 - RNA, 14 nt, Human
cugagaggcugucu

SEQ ID NO: 1791764 - RNA, 17 nt, Human
cugagaguagagucacu

SEQ ID NO: 1791765 - RNA, 22 nt, Human
cugagacucgcgacaaugcaaa

SEQ ID NO: 1791766 - RNA, 23 nt, Human
cugagacagcccgggcucugccu

SEQ ID NO: 1791767 - RNA, 21 nt, Human
cugagacucgcgacaaugcaa

SEQ ID NO: 1791768 - RNA, 21 nt, Human
cugacccaugcugcccuguga

SEQ ID NO: 1791769 - RNA, 22 nt, Human
cugacccaugcugcccugugag

SEQ ID NO: 1791770 - RNA, 15 nt, Human
cugacaacagacuuc

SEQ ID NO: 1791771 - RNA, 18 nt, Human
cugacaacagacuucuga

SEQ ID NO: 1791772 - RNA, 19 nt, Human
cugacaacagacuucugaa

SEQ ID NO: 1791773 - RNA, 20 nt, Human
cuccacuuucuagccagagg

SEQ ID NO: 1791774 - RNA, 16 nt, Human
cuccacuuucuagcca

SEQ ID NO: 1791775 - RNA, 19 nt, Human
cuccacuuucuagccagag

SEQ ID NO: 1791776 - RNA, 23 nt, Human
cuccacuuggucugugagaugcu

SEQ ID NO: 1791777 - RNA, 16 nt, Human
cucaugccucagccuc

SEQ ID NO: 1791778 - RNA, 12 nt, Human
cucaugccucag

SEQ ID NO: 1791779 - RNA, 15 nt, Human
cuccaagaccuucuc

SEQ ID NO: 1791780 - RNA, 22 nt, Human
cuccaagaccuucuccuucacc

SEQ ID NO: 1791781 - RNA, 13 nt, Human
cuccaagcaggac

SEQ ID NO: 1791782 - RNA, 14 nt, Human
cuccaagcaggaca

SEQ ID NO: 1791783 - RNA, 22 nt, Human
cuccaagcaggacauggacaag

SEQ ID NO: 1791784 - RNA, 24 nt, Human
cuccaagcaggacauggacaagga

SEQ ID NO: 1791785 - RNA, 18 nt, Human
cuccaagcuccaucucca

SEQ ID NO: 1791786 - RNA, 19 nt, Human
cuccaagcuccaucuccac

SEQ ID NO: 1791787 - RNA, 14 nt, Human
cuccaagcuccauc

SEQ ID NO: 1791788 - RNA, 13 nt, Human
cuccaagcuccca

SEQ ID NO: 1791789 - RNA, 14 nt, Human
cuccaagcucccag

SEQ ID NO: 1791790 - RNA, 15 nt, Human
cuccaagcucccagg

SEQ ID NO: 1791791 - RNA, 16 nt, Human
cuccaagcucccaggc

SEQ ID NO: 1791792 - RNA, 22 nt, Human
cuccacuuggucugugagaugc

SEQ ID NO: 1791793 - RNA, 21 nt, Human
cuccacuuggucugugagaug

SEQ ID NO: 1791794 - RNA, 17 nt, Human
cuccacuuggucuguga

SEQ ID NO: 1791795 - RNA, 16 nt, Human
cuccacuuggucugug

SEQ ID NO: 1791796 - RNA, 16 nt, Human
cuccacuggauggagg

SEQ ID NO: 1791797 - RNA, 17 nt, Human
cuccaagcucccaggca

SEQ ID NO: 1791798 - RNA, 15 nt, Human
cuccacuuggucugu

SEQ ID NO: 1791799 - RNA, 13 nt, Human
cuccacuuggucu

SEQ ID NO: 1791800 - RNA, 15 nt, Human
cucagucucccuccc

SEQ ID NO: 1791801 - RNA, 16 nt, Human
cucagucucccucccu

SEQ ID NO: 1791802 - RNA, 17 nt, Human
cucagucucccucccuu

SEQ ID NO: 1791803 - RNA, 13 nt, Human
cucagucucccuc

SEQ ID NO: 1791804 - RNA, 18 nt, Human
cuccucuucaacugacca

SEQ ID NO: 1791805 - RNA, 23 nt, Human
cuccucuucaacugaccagccuc

SEQ ID NO: 1791806 - RNA, 15 nt, Human
cuccuggacuccugc

SEQ ID NO: 1791807 - RNA, 16 nt, Human
cuccuggcccacugca

SEQ ID NO: 1791808 - RNA, 18 nt, Human
cuccuggcccacugcauc

SEQ ID NO: 1791809 - RNA, 19 nt, Human
cuccucucugcccuaaugc

SEQ ID NO: 1791810 - RNA, 16 nt, Human
cuccucugcugcuggc

SEQ ID NO: 1791811 - RNA, 18 nt, Human
cuccucugcugcuggcug

SEQ ID NO: 1791812 - RNA, 13 nt, Human
cuccucucugccc

SEQ ID NO: 1791813 - RNA, 14 nt, Human
cuccucucugcccu

SEQ ID NO: 1791814 - RNA, 15 nt, Human
cuccucucugcccua

SEQ ID NO: 1791815 - RNA, 13 nt, Human
cucccccaucucu

SEQ ID NO: 1791816 - RNA, 22 nt, Human
cucccccagccccauccucugu

SEQ ID NO: 1791817 - RNA, 15 nt, Human
cucccccagccccau

SEQ ID NO: 1791818 - RNA, 20 nt, Human
cucccccagccccauccucu

SEQ ID NO: 1791819 - RNA, 16 nt, Human
cucgaacuggcugcaa

SEQ ID NO: 1791820 - RNA, 15 nt, Human
cucgaacuggcugca

SEQ ID NO: 1791821 - RNA, 14 nt, Human
cucgaacuggcugc

SEQ ID NO: 1791822 - RNA, 13 nt, Human
cucgaacuggcug

SEQ ID NO: 1791823 - RNA, 23 nt, Human
cuccuggggguucuuucuuccuc

SEQ ID NO: 1791824 - RNA, 18 nt, Human
cuccuggggguucuuucu

SEQ ID NO: 1791825 - RNA, 20 nt, Human
cuccuggggguucuuucuuc

SEQ ID NO: 1791826 - RNA, 22 nt, Human
cuccuggggguucuuucuuccu

SEQ ID NO: 1791827 - RNA, 15 nt, Human
cucuaucaccaagga

SEQ ID NO: 1791828 - RNA, 21 nt, Human
cucgugguaggacuguagaaa

SEQ ID NO: 1791829 - RNA, 21 nt, Human
agcuggucccacucaguccau

SEQ ID NO: 1791830 - RNA, 22 nt, Human
agcugggugucaagagggucug

SEQ ID NO: 1791831 - RNA, 17 nt, Human
agcugggugucaagagg

SEQ ID NO: 1791832 - RNA, 20 nt, Human
agcuucuguugcugccucau

SEQ ID NO: 1791833 - RNA, 21 nt, Human
agcuucuguugcugccucaug

SEQ ID NO: 1791834 - RNA, 22 nt, Human
agcuucuguugcugccucaugc

SEQ ID NO: 1791835 - RNA, 15 nt, Human
aggaaauccagggug

SEQ ID NO: 1791836 - RNA, 17 nt, Human
aggaaauccaggguggu

SEQ ID NO: 1791837 - RNA, 22 nt, Human
aggaacguaaucguguccccua

SEQ ID NO: 1791838 - RNA, 23 nt, Human
agcuucuguugcugccucaugcu

SEQ ID NO: 1791839 - RNA, 13 nt, Human
agcuuuucccuuc

SEQ ID NO: 1791840 - RNA, 21 nt, Human
agcuuuuaugugaaacauguu

SEQ ID NO: 1791841 - RNA, 16 nt, Human
agcuuuucccuucuuu

SEQ ID NO: 1791842 - RNA, 15 nt, Human
agcuuuucccuuuuu

SEQ ID NO: 1791843 - RNA, 13 nt, Human
aggaaaaacugau

SEQ ID NO: 1791844 - RNA, 15 nt, Human
aggaaaaacugauuu

SEQ ID NO: 1791845 - RNA, 20 nt, Human
aggauguucugggacacagu

SEQ ID NO: 1791846 - RNA, 14 nt, Human
aggauguugaaaaa

SEQ ID NO: 1791847 - RNA, 17 nt, Human
aggauguugaaaaaguu

SEQ ID NO: 1791848 - RNA, 17 nt, Human
aggaggggauagagaga

SEQ ID NO: 1791849 - RNA, 16 nt, Human
aggauucuuccucccu

SEQ ID NO: 1791850 - RNA, 12 nt, Human
aggauucuuccu

SEQ ID NO: 1791851 - RNA, 14 nt, Human
aggcacugcugccc

SEQ ID NO: 1791852 - RNA, 16 nt, Human
aggcacugcugcccag

SEQ ID NO: 1791853 - RNA, 22 nt, Human
aggcacugcugcccagccucca

SEQ ID NO: 1791854 - RNA, 17 nt, Human
aggacccggaggggccu

SEQ ID NO: 1791855 - RNA, 14 nt, Human
aggaccucagguga

SEQ ID NO: 1791856 - RNA, 20 nt, Human
aggaccucaggugagaagca

SEQ ID NO: 1791857 - RNA, 15 nt, Human
aggagagcuagcagc

SEQ ID NO: 1791858 - RNA, 15 nt, Human
aggagaggagagggg

SEQ ID NO: 1791859 - RNA, 16 nt, Human
aggagaggggcacagg

SEQ ID NO: 1791860 - RNA, 18 nt, Human
aggagaggggcacagggu

SEQ ID NO: 1791861 - RNA, 20 nt, Human
aggaccccuccaugugggcu

SEQ ID NO: 1791862 - RNA, 15 nt, Human
aggaacuacugagga

SEQ ID NO: 1791863 - RNA, 18 nt, Human
aggcugccucucccauca

SEQ ID NO: 1791864 - RNA, 16 nt, Human
aggcugucuguuguau

SEQ ID NO: 1791865 - RNA, 20 nt, Human
agggacucaucauuuccauu

SEQ ID NO: 1791866 - RNA, 21 nt, Human
agggacgcuacccgggaaggg

SEQ ID NO: 1791867 - RNA, 12 nt, Human
agggacagaggg

SEQ ID NO: 1791868 - RNA, 13 nt, Human
agggacagagggg

SEQ ID NO: 1791869 - RNA, 20 nt, Human
agggacagaggggguggccu

SEQ ID NO: 1791870 - RNA, 23 nt, Human
aggcuagugugguguuuccuggc

SEQ ID NO: 1791871 - RNA, 20 nt, Human
aggcugaacuuguuuucugg

SEQ ID NO: 1791872 - RNA, 21 nt, Human
aggcugaacuuguuuucuggg

SEQ ID NO: 1791873 - RNA, 14 nt, Human
aggcucuucuccuu

SEQ ID NO: 1791874 - RNA, 21 nt, Human
agggcacaccgggcacucaga

SEQ ID NO: 1791875 - RNA, 20 nt, Human
agggcacaccgggcacucag

SEQ ID NO: 1791876 - RNA, 22 nt, Human
agggcacagaaaauggaagaca

SEQ ID NO: 1791877 - RNA, 15 nt, Human
agggccuggccugag

SEQ ID NO: 1791878 - RNA, 16 nt, Human
agggccuggccugagc

SEQ ID NO: 1791879 - RNA, 17 nt, Human
agggccuggccugagcu

SEQ ID NO: 1791880 - RNA, 17 nt, Human
agggcacaccgggcacu

SEQ ID NO: 1791881 - RNA, 19 nt, Human
agggcgggaggauguucug

SEQ ID NO: 1791882 - RNA, 18 nt, Human
agggccuggccugagcug

SEQ ID NO: 1791883 - RNA, 21 nt, Human
aggggauagagagagaccacu

SEQ ID NO: 1791884 - RNA, 15 nt, Human
aggggcacagggucu

SEQ ID NO: 1791885 - RNA, 13 nt, Human
agguucagcuugu

SEQ ID NO: 1791886 - RNA, 17 nt, Human
agguucaugcaaacuuu

SEQ ID NO: 1791887 - RNA, 18 nt, Human
agguuccacagaggacac

SEQ ID NO: 1791888 - RNA, 17 nt, Human
agguucaaagauauuuu

SEQ ID NO: 1791889 - RNA, 14 nt, Human
agguuaauguucau

SEQ ID NO: 1791890 - RNA, 15 nt, Human
agguuaauaaaguaa

SEQ ID NO: 1791891 - RNA, 17 nt, Human
aggugcugccauccagg

SEQ ID NO: 1791892 - RNA, 16 nt, Human
aggugcugccauccag

SEQ ID NO: 1791893 - RNA, 20 nt, Human
aggucgcuugggaauuuuau

SEQ ID NO: 1791894 - RNA, 14 nt, Human
aggucgaggcagga

SEQ ID NO: 1791895 - RNA, 15 nt, Human
agguggaaauaaacu

SEQ ID NO: 1791896 - RNA, 17 nt, Human
aggucccuaauaaagcu

SEQ ID NO: 1791897 - RNA, 18 nt, Human
aggucccuaauaaagcug

SEQ ID NO: 1791898 - RNA, 19 nt, Human
aggucccuaauaaagcugu

SEQ ID NO: 1791899 - RNA, 20 nt, Human
aggucccuaauaaagcugug

SEQ ID NO: 1791900 - RNA, 22 nt, Human
agguacgaaaagaggggaagag

SEQ ID NO: 1791901 - RNA, 18 nt, Human
agguaaucgaccugccuc

SEQ ID NO: 1791902 - RNA, 17 nt, Human
agguaaucgaccugccu

SEQ ID NO: 1791903 - RNA, 17 nt, Human
agguaaggaauaccugu

SEQ ID NO: 1791904 - RNA, 19 nt, Human
agcacuaaggugugcucug

SEQ ID NO: 1791905 - RNA, 20 nt, Human
agcacuaaggugugcucuga

SEQ ID NO: 1791906 - RNA, 21 nt, Human
agcagccacauuccugaugcu

SEQ ID NO: 1791907 - RNA, 19 nt, Human
agauguaauuuuguguaag

SEQ ID NO: 1791908 - RNA, 17 nt, Human
agauguaauuuugugua

SEQ ID NO: 1791909 - RNA, 15 nt, Human
agauguaauuuugug

SEQ ID NO: 1791910 - RNA, 14 nt, Human
agauguaauuuugu

SEQ ID NO: 1791911 - RNA, 14 nt, Human
agauguagaggaga

SEQ ID NO: 1791912 - RNA, 21 nt, Human
agaugggagaaucacuugaac

SEQ ID NO: 1791913 - RNA, 13 nt, Human
agauguaauuuug

SEQ ID NO: 1791914 - RNA, 23 nt, Human
agccaaagcuaggccuggccaga

SEQ ID NO: 1791915 - RNA, 20 nt, Human
agccaaagcuaggccuggcc

SEQ ID NO: 1791916 - RNA, 19 nt, Human
agccaaagcuaggccuggc

SEQ ID NO: 1791917 - RNA, 20 nt, Human
agcaugccuggauggggcug

SEQ ID NO: 1791918 - RNA, 20 nt, Human
agcaugagagggaugaggca

SEQ ID NO: 1791919 - RNA, 14 nt, Human
agcaugcacaaauu

SEQ ID NO: 1791920 - RNA, 12 nt, Human
agcaugccugga

SEQ ID NO: 1791921 - RNA, 20 nt, Human
agccagaggagagaggaccc

SEQ ID NO: 1791922 - RNA, 22 nt, Human
agccaaggccaaaggaagcaca

SEQ ID NO: 1791923 - RNA, 23 nt, Human
agccaaggccaaaggaagcacau

SEQ ID NO: 1791924 - RNA, 22 nt, Human
agccucccgaguagcugggacu

SEQ ID NO: 1791925 - RNA, 11 nt, Human
agccuccugag

SEQ ID NO: 1791926 - RNA, 17 nt, Human
agccucccgaguagcug

SEQ ID NO: 1791927 - RNA, 22 nt, Human
agccucccgaauagcugggacu

SEQ ID NO: 1791928 - RNA, 20 nt, Human
agccucccgaauagcuggga

SEQ ID NO: 1791929 - RNA, 19 nt, Human
agccucccgaauagcuggg

SEQ ID NO: 1791930 - RNA, 18 nt, Human
agccucccgaauagcugg

SEQ ID NO: 1791931 - RNA, 20 nt, Human
agccucccaaagugcuggga

SEQ ID NO: 1791932 - RNA, 21 nt, Human
agccgagaucacgccacugca

SEQ ID NO: 1791933 - RNA, 19 nt, Human
agccgagauugcaccacug

SEQ ID NO: 1791934 - RNA, 20 nt, Human
agccgagauugcaccacugc

SEQ ID NO: 1791935 - RNA, 14 nt, Human
agccgcuggggcca

SEQ ID NO: 1791936 - RNA, 22 nt, Human
agccgcuggggccaguuggucc

SEQ ID NO: 1791937 - RNA, 19 nt, Human
agccucccaaagugcuggg

SEQ ID NO: 1791938 - RNA, 18 nt, Human
agccucccaaagugcugg

SEQ ID NO: 1791939 - RNA, 19 nt, Human
agccuccugaguagcugga

SEQ ID NO: 1791940 - RNA, 20 nt, Human
agccgagaucacgccacugc

SEQ ID NO: 1791941 - RNA, 19 nt, Human
agccgagaucacgccacug

SEQ ID NO: 1791942 - RNA, 15 nt, Human
agcccugagcuuucu

SEQ ID NO: 1791943 - RNA, 16 nt, Human
agccccagugcccaca

SEQ ID NO: 1791944 - RNA, 23 nt, Human
agccccauaauuuuuuuuuuccu

SEQ ID NO: 1791945 - RNA, 20 nt, Human
agccccaucccaaacccuuc

SEQ ID NO: 1791946 - RNA, 11 nt, Human
agccccauccu

SEQ ID NO: 1791947 - RNA, 23 nt, Human
agcccaaagugguauagaaaugc

SEQ ID NO: 1791948 - RNA, 20 nt, Human
agcccaaagugguauagaaa

SEQ ID NO: 1791949 - RNA, 21 nt, Human
agauaggucagugcaaauacu

SEQ ID NO: 1791950 - RNA, 15 nt, Human
agauagccaaggcca

SEQ ID NO: 1791951 - RNA, 16 nt, Human
agauagccaaggccaa

SEQ ID NO: 1791952 - RNA, 14 nt, Human
agaucuucuguggg

SEQ ID NO: 1791953 - RNA, 23 nt, Human
agauggcugugccucugccuguc

SEQ ID NO: 1791954 - RNA, 13 nt, Human
agauagccaaggc

SEQ ID NO: 1791955 - RNA, 22 nt, Human
agauacuuggggggcugaggug

SEQ ID NO: 1791956 - RNA, 22 nt, Human
agaggggaacagacuggaagca

SEQ ID NO: 1791957 - RNA, 16 nt, Human
agaggggaagagacuu

SEQ ID NO: 1791958 - RNA, 13 nt, Human
agaggagaggggc

SEQ ID NO: 1791959 - RNA, 18 nt, Human
agagaaaguacuucucca

SEQ ID NO: 1791960 - RNA, 10 nt, Human
agagaagaga

SEQ ID NO: 1791961 - RNA, 21 nt, Human
agagaagagauugugguuuca

SEQ ID NO: 1791962 - RNA, 20 nt, Human
agagagcuucuguugcugcc

SEQ ID NO: 1791963 - RNA, 23 nt, Human
agagagcuucuguugcugccuca

SEQ ID NO: 1791964 - RNA, 16 nt, Human
agagagcuucuguugc

SEQ ID NO: 1791965 - RNA, 23 nt, Human
agagaggguggugaccucugccu

SEQ ID NO: 1791966 - RNA, 14 nt, Human
agagaguggcuccu

SEQ ID NO: 1791967 - RNA, 16 nt, Human
agagaguggcuccucc

SEQ ID NO: 1791968 - RNA, 23 nt, Human
agacugaguacguugugcauuug

SEQ ID NO: 1791969 - RNA, 13 nt, Human
agaccaucccuga

SEQ ID NO: 1791970 - RNA, 14 nt, Human
agaccaucccugaa

SEQ ID NO: 1791971 - RNA, 17 nt, Human
agaccaucccugaaggc

SEQ ID NO: 1791972 - RNA, 18 nt, Human
agaccaucccugaaggcc

SEQ ID NO: 1791973 - RNA, 21 nt, Human
agaccaucccugaaggccccg

SEQ ID NO: 1791974 - RNA, 18 nt, Human
agacagcccgggcucugc

SEQ ID NO: 1791975 - RNA, 20 nt, Human
agacagcccgggcucugccu

SEQ ID NO: 1791976 - RNA, 17 nt, Human
agacagcccgggcucug

SEQ ID NO: 1791977 - RNA, 19 nt, Human
agacggagucccaccuugg

SEQ ID NO: 1791978 - RNA, 18 nt, Human
agacgggggcagagaggg

SEQ ID NO: 1791979 - RNA, 21 nt, Human
agacaauuuauuauggcacau

SEQ ID NO: 1791980 - RNA, 15 nt, Human
agacaauuuauuaug

SEQ ID NO: 1791981 - RNA, 19 nt, Human
agacaaugacuuacuguac

SEQ ID NO: 1791982 - RNA, 17 nt, Human
agacaaugacuuacugu

SEQ ID NO: 1791983 - RNA, 13 nt, Human
agacaaugacuua

SEQ ID NO: 1791984 - RNA, 14 nt, Human
auccuccucagauc

SEQ ID NO: 1791985 - RNA, 13 nt, Human
aucgaugcagugc

SEQ ID NO: 1791986 - RNA, 23 nt, Human
auccucauacccacccccaccca

SEQ ID NO: 1791987 - RNA, 11 nt, Human
auccuccucag

SEQ ID NO: 1791988 - RNA, 13 nt, Human
auccuccaggugc

SEQ ID NO: 1791989 - RNA, 14 nt, Human
auccuccaggugca

SEQ ID NO: 1791990 - RNA, 19 nt, Human
auccuccaggugcacaagc

SEQ ID NO: 1791991 - RNA, 22 nt, Human
auccuccaggugcacaagcucc

SEQ ID NO: 1791992 - RNA, 20 nt, Human
auccacccaccucagccucc

SEQ ID NO: 1791993 - RNA, 18 nt, Human
auccacccaccucagccu

SEQ ID NO: 1791994 - RNA, 14 nt, Human
aucccggcugcccu

SEQ ID NO: 1791995 - RNA, 15 nt, Human
aucccuacuguaauu

SEQ ID NO: 1791996 - RNA, 18 nt, Human
auccucauacccaccccc

SEQ ID NO: 1791997 - RNA, 19 nt, Human
auccucauacccaccccca

SEQ ID NO: 1791998 - RNA, 22 nt, Human
auccucauacccacccccaccc

SEQ ID NO: 1791999 - RNA, 12 nt, Human
aucaccugcccu

SEQ ID NO: 1792000 - RNA, 13 nt, Human
aucaccugcccug

SEQ ID NO: 1792001 - RNA, 11 nt, Human
aucagccuggg

SEQ ID NO: 1792002 - RNA, 20 nt, Human
aucagccugggcaaugugau

SEQ ID NO: 1792003 - RNA, 21 nt, Human
aucagccugggcaaugugaua

SEQ ID NO: 1792004 - RNA, 12 nt, Human
aucagcugcuac

SEQ ID NO: 1792005 - RNA, 13 nt, Human
aucagcugcuacu

SEQ ID NO: 1792006 - RNA, 23 nt, Human
aucagcugcuacuacuccuguag

SEQ ID NO: 1792007 - RNA, 23 nt, Human
augaaaaaauauauaucaaauau

SEQ ID NO: 1792008 - RNA, 22 nt, Human
augaaaaaauauauaucaaaua

SEQ ID NO: 1792009 - RNA, 14 nt, Human
augaaaaaauauau

SEQ ID NO: 1792010 - RNA, 17 nt, Human
augaaaaaauauauauc

SEQ ID NO: 1792011 - RNA, 17 nt, Human
augacuccagaauuucc

SEQ ID NO: 1792012 - RNA, 12 nt, Human
augacuccagaa

SEQ ID NO: 1792013 - RNA, 16 nt, Human
augacuccagaauuuc

SEQ ID NO: 1792014 - RNA, 18 nt, Human
augaagcuuuuaugugaa

SEQ ID NO: 1792015 - RNA, 19 nt, Human
augaagcuuuuaugugaaa

SEQ ID NO: 1792016 - RNA, 20 nt, Human
augaagcuuuuaugugaaac

SEQ ID NO: 1792017 - RNA, 21 nt, Human
augaagcuuuuaugugaaaca

SEQ ID NO: 1792018 - RNA, 12 nt, Human
augacccagugg

SEQ ID NO: 1792019 - RNA, 13 nt, Human
augagccuggcaa

SEQ ID NO: 1792020 - RNA, 14 nt, Human
augagccuggcaag

SEQ ID NO: 1792021 - RNA, 22 nt, Human
aucuuauaauuuaaaauaugcu

SEQ ID NO: 1792022 - RNA, 17 nt, Human
aucugggccagaauuuc

SEQ ID NO: 1792023 - RNA, 15 nt, Human
aucugggccagaauu

SEQ ID NO: 1792024 - RNA, 19 nt, Human
aucuuccaacucaaacucu

SEQ ID NO: 1792025 - RNA, 15 nt, Human
aucucucuucuuuuc

SEQ ID NO: 1792026 - RNA, 22 nt, Human
aucucucgugauugauaagaac

SEQ ID NO: 1792027 - RNA, 17 nt, Human
aucuugaagacuuuucu

SEQ ID NO: 1792028 - RNA, 22 nt, Human
aucuucugaacuuggcgcugcc

SEQ ID NO: 1792029 - RNA, 17 nt, Human
aucuucuuuauaauucu

SEQ ID NO: 1792030 - RNA, 18 nt, Human
auguuuuaagaggcaggg

SEQ ID NO: 1792031 - RNA, 16 nt, Human
auguuuuaagaggcag

SEQ ID NO: 1792032 - RNA, 14 nt, Human
auuaaaugcccagc

SEQ ID NO: 1792033 - RNA, 15 nt, Human
auuaaaugcccagcc

SEQ ID NO: 1792034 - RNA, 16 nt, Human
auuaaaugcccagccc

SEQ ID NO: 1792035 - RNA, 13 nt, Human
auuaaauucuugc

SEQ ID NO: 1792036 - RNA, 18 nt, Human
auguucucugaggacacu

SEQ ID NO: 1792037 - RNA, 18 nt, Human
auguuucuuuguaaugaa

SEQ ID NO: 1792038 - RNA, 20 nt, Human
auguucuuucacccuuuucu

SEQ ID NO: 1792039 - RNA, 15 nt, Human
auguucuuaauucuu

SEQ ID NO: 1792040 - RNA, 20 nt, Human
auguucuuaguggauguucu

SEQ ID NO: 1792041 - RNA, 22 nt, Human
auguucugacccugcuucaaau

SEQ ID NO: 1792042 - RNA, 14 nt, Human
auguguaaguauuc

SEQ ID NO: 1792043 - RNA, 17 nt, Human
auguacauguacugauu

SEQ ID NO: 1792044 - RNA, 23 nt, Human
augucaaauauuuagauguaauu

SEQ ID NO: 1792045 - RNA, 19 nt, Human
augucaaauauuuagaugu

SEQ ID NO: 1792046 - RNA, 17 nt, Human
augucacaggcaggucc

SEQ ID NO: 1792047 - RNA, 16 nt, Human
augucacaggcagguc

SEQ ID NO: 1792048 - RNA, 14 nt, Human
augucacaggcagg

SEQ ID NO: 1792049 - RNA, 15 nt, Human
augucacaggcaggu

SEQ ID NO: 1792050 - RNA, 17 nt, Human
auguaagcucuacugag

SEQ ID NO: 1792051 - RNA, 17 nt, Human
augccugguggcagcug

SEQ ID NO: 1792052 - RNA, 16 nt, Human
augccugguggcagcu

SEQ ID NO: 1792053 - RNA, 15 nt, Human
augccugguggcagc

SEQ ID NO: 1792054 - RNA, 21 nt, Human
augccuggauggggcugcacc

SEQ ID NO: 1792055 - RNA, 23 nt, Human
augccuggauggggcugcaccgg

SEQ ID NO: 1792056 - RNA, 17 nt, Human
augccugggcagaagga

SEQ ID NO: 1792057 - RNA, 20 nt, Human
augcaugaaguaauaugcac

SEQ ID NO: 1792058 - RNA, 23 nt, Human
augcaugaaguaauaugcacaca

SEQ ID NO: 1792059 - RNA, 18 nt, Human
augcauuugaaaauuuug

SEQ ID NO: 1792060 - RNA, 12 nt, Human
augcauuugaaa

SEQ ID NO: 1792061 - RNA, 10 nt, Human
augcauuuga

SEQ ID NO: 1792062 - RNA, 21 nt, Human
augcacagcuaacauggaagu

SEQ ID NO: 1792063 - RNA, 23 nt, Human
augcacacauuuuuuaaaugcac

SEQ ID NO: 1792064 - RNA, 14 nt, Human
augcacagcuaaca

SEQ ID NO: 1792065 - RNA, 22 nt, Human
augcacacauuuuuuaaaugca

SEQ ID NO: 1792066 - RNA, 19 nt, Human
augcacacauuuuuuaaau

SEQ ID NO: 1792067 - RNA, 17 nt, Human
augcacacauuuuuuaa

SEQ ID NO: 1792068 - RNA, 16 nt, Human
augaugugugaaaacu

SEQ ID NO: 1792069 - RNA, 23 nt, Human
augauguauguugaagccuuugu

SEQ ID NO: 1792070 - RNA, 21 nt, Human
augccuuuguacuuuagggaa

SEQ ID NO: 1792071 - RNA, 23 nt, Human
auggcugccaaugggagcucaug

SEQ ID NO: 1792072 - RNA, 21 nt, Human
augggaaugaaugucagugug

SEQ ID NO: 1792073 - RNA, 15 nt, Human
augggaaugaauguc

SEQ ID NO: 1792074 - RNA, 13 nt, Human
auggaaauguuua

SEQ ID NO: 1792075 - RNA, 19 nt, Human
auggaaaugggcagagcag

SEQ ID NO: 1792076 - RNA, 20 nt, Human
auggaaaugggcagagcaga

SEQ ID NO: 1792077 - RNA, 18 nt, Human
auaaugugaaacuggauu

SEQ ID NO: 1792078 - RNA, 19 nt, Human
auaaguguguguuuuucau

SEQ ID NO: 1792079 - RNA, 22 nt, Human
auaaguguguguuuuucauaaa

SEQ ID NO: 1792080 - RNA, 21 nt, Human
auaaugugaaacuggauuaaa

SEQ ID NO: 1792081 - RNA, 19 nt, Human
auaaugugaaacuggauua

SEQ ID NO: 1792082 - RNA, 19 nt, Human
auaaguauuuaauucaugu

SEQ ID NO: 1792083 - RNA, 15 nt, Human
auaaguggugugugu

SEQ ID NO: 1792084 - RNA, 22 nt, Human
auacccccugcaaagcccagcu

SEQ ID NO: 1792085 - RNA, 14 nt, Human
auaauuacuauguc

SEQ ID NO: 1792086 - RNA, 13 nt, Human
auaccuguccccc

SEQ ID NO: 1792087 - RNA, 12 nt, Human
auaccugucccc

SEQ ID NO: 1792088 - RNA, 16 nt, Human
auauaggaacuuaaau

SEQ ID NO: 1792089 - RNA, 15 nt, Human
auaguaugguggcug

SEQ ID NO: 1792090 - RNA, 19 nt, Human
auacuugaaaauuaacaug

SEQ ID NO: 1792091 - RNA, 15 nt, Human
auacuugaaaauuaa

SEQ ID NO: 1792092 - RNA, 16 nt, Human
auacuugaaaauuaac

SEQ ID NO: 1792093 - RNA, 16 nt, Human
auaguaugguggcugg

SEQ ID NO: 1792094 - RNA, 15 nt, Human
auauaagugauugcu

SEQ ID NO: 1792095 - RNA, 15 nt, Human
auauaaguguguguu

SEQ ID NO: 1792096 - RNA, 17 nt, Human
auaugcaguuuuccuua

SEQ ID NO: 1792097 - RNA, 22 nt, Human
auaugccugggcagaaggaaga

SEQ ID NO: 1792098 - RNA, 19 nt, Human
auaugcuuguaacuaaaau

SEQ ID NO: 1792099 - RNA, 21 nt, Human
auaugcuuauacacuuacacu

SEQ ID NO: 1792100 - RNA, 14 nt, Human
auaugcuuauacac

SEQ ID NO: 1792101 - RNA, 16 nt, Human
auaugcuuauacacuu

SEQ ID NO: 1792102 - RNA, 19 nt, Human
auaugcuuauacacuuaca

SEQ ID NO: 1792103 - RNA, 20 nt, Human
auauuuagauguaauuuugu

SEQ ID NO: 1792104 - RNA, 22 nt, Human
auauuuagauguaauuuugugu

SEQ ID NO: 1792105 - RNA, 17 nt, Human
auauucaggaagcucag

SEQ ID NO: 1792106 - RNA, 14 nt, Human
auauucaggaagcu

SEQ ID NO: 1792107 - RNA, 16 nt, Human
auauucaggaagcuca

SEQ ID NO: 1792108 - RNA, 13 nt, Human
auauucaggaagc

SEQ ID NO: 1792109 - RNA, 18 nt, Human
auauuuaguguucauaaa

SEQ ID NO: 1792110 - RNA, 16 nt, Human
auauuuauaaaaauaa

SEQ ID NO: 1792111 - RNA, 18 nt, Human
agugauucucaugccuca

SEQ ID NO: 1792112 - RNA, 19 nt, Human
agugauucucaugccucag

SEQ ID NO: 1792113 - RNA, 15 nt, Human
agugauuaccaggga

SEQ ID NO: 1792114 - RNA, 18 nt, Human
agugauuaccagggacug

SEQ ID NO: 1792115 - RNA, 23 nt, Human
agugugacaaggauugcuacugu

SEQ ID NO: 1792116 - RNA, 15 nt, Human
aguuguuacauuuuu

SEQ ID NO: 1792117 - RNA, 13 nt, Human
aguuguuacauuu

SEQ ID NO: 1792118 - RNA, 23 nt, Human
aguuguuaauaaaaguacauguu

SEQ ID NO: 1792119 - RNA, 16 nt, Human
aguuguuacauuuuua

SEQ ID NO: 1792120 - RNA, 18 nt, Human
aguuacagacaaagcgug

SEQ ID NO: 1792121 - RNA, 19 nt, Human
aguuguaccgcaaugugac

SEQ ID NO: 1792122 - RNA, 18 nt, Human
aguuguaccgcaauguga

SEQ ID NO: 1792123 - RNA, 18 nt, Human
agucaaggguaggguggg

SEQ ID NO: 1792124 - RNA, 16 nt, Human
agucaagugaaaaagg

SEQ ID NO: 1792125 - RNA, 20 nt, Human
agucaagugaaaaaggagga

SEQ ID NO: 1792126 - RNA, 13 nt, Human
agugauccuccca

SEQ ID NO: 1792127 - RNA, 16 nt, Human
aguccacaguggaacc

SEQ ID NO: 1792128 - RNA, 22 nt, Human
accccuaaagagauacuuugau

SEQ ID NO: 1792129 - RNA, 15 nt, Human
accccggccaccugc

SEQ ID NO: 1792130 - RNA, 18 nt, Human
accccgaccaccugccca

SEQ ID NO: 1792131 - RNA, 13 nt, Human
acccaagggccug

SEQ ID NO: 1792132 - RNA, 16 nt, Human
acccaagggccuggcc

SEQ ID NO: 1792133 - RNA, 15 nt, Human
acccacaagaaauga

SEQ ID NO: 1792134 - RNA, 17 nt, Human
acccaugcugcccugug

SEQ ID NO: 1792135 - RNA, 18 nt, Human
acccaugcugcccuguga

SEQ ID NO: 1792136 - RNA, 19 nt, Human
acccaugcugcccugugag

SEQ ID NO: 1792137 - RNA, 17 nt, Human
accaucaugucuggcua

SEQ ID NO: 1792138 - RNA, 16 nt, Human
accaucaugucuggcu

SEQ ID NO: 1792139 - RNA, 12 nt, Human
accaucauugaa

SEQ ID NO: 1792140 - RNA, 18 nt, Human
accaucccugaaggcccc

SEQ ID NO: 1792141 - RNA, 21 nt, Human
accaucccugaaggccccgcc

SEQ ID NO: 1792142 - RNA, 22 nt, Human
accaucccugaaggccccgccc

SEQ ID NO: 1792143 - RNA, 14 nt, Human
accaucaugucugg

SEQ ID NO: 1792144 - RNA, 20 nt, Human
accccucaacaccucugcac

SEQ ID NO: 1792145 - RNA, 22 nt, Human
acaucagcacgauuucuguuua

SEQ ID NO: 1792146 - RNA, 21 nt, Human
acaucagcacgauuucuguuu

SEQ ID NO: 1792147 - RNA, 20 nt, Human
acaucagcacgauuucuguu

SEQ ID NO: 1792148 - RNA, 23 nt, Human
acauaaacaagaccacguuucua

SEQ ID NO: 1792149 - RNA, 19 nt, Human
acaugcaaggucauuuuuu

SEQ ID NO: 1792150 - RNA, 20 nt, Human
acaugcacagcuaacaugga

SEQ ID NO: 1792151 - RNA, 23 nt, Human
acaugcacagcuaacauggaagu

SEQ ID NO: 1792152 - RNA, 21 nt, Human
acauguuuuucuucucccuca

SEQ ID NO: 1792153 - RNA, 13 nt, Human
acauguuacaaca

SEQ ID NO: 1792154 - RNA, 20 nt, Human
accacgcccggcuaauuuuu

SEQ ID NO: 1792155 - RNA, 14 nt, Human
accacgcccggcua

SEQ ID NO: 1792156 - RNA, 14 nt, Human
accacuacauucug

SEQ ID NO: 1792157 - RNA, 19 nt, Human
accacguuucuaaaggcua

SEQ ID NO: 1792158 - RNA, 15 nt, Human
accacguuucuaaag

SEQ ID NO: 1792159 - RNA, 14 nt, Human
accagcagccugga

SEQ ID NO: 1792160 - RNA, 17 nt, Human
accagcagccuggaccc

SEQ ID NO: 1792161 - RNA, 23 nt, Human
acagagucucacuguugcccagg

SEQ ID NO: 1792162 - RNA, 19 nt, Human
acagagucucacuguugcc

SEQ ID NO: 1792163 - RNA, 17 nt, Human
acagagucucacuguug

SEQ ID NO: 1792164 - RNA, 14 nt, Human
acagagucucacug

SEQ ID NO: 1792165 - RNA, 12 nt, Human
acagagucucac

SEQ ID NO: 1792166 - RNA, 22 nt, Human
acagaggggguggccucccaac

SEQ ID NO: 1792167 - RNA, 19 nt, Human
acagccacggccaggccag

SEQ ID NO: 1792168 - RNA, 15 nt, Human
acagccaugauucuu

SEQ ID NO: 1792169 - RNA, 12 nt, Human
acagaagcagcu

SEQ ID NO: 1792170 - RNA, 13 nt, Human
acagaagcagcuc

SEQ ID NO: 1792171 - RNA, 14 nt, Human
acagaagcagcucu

SEQ ID NO: 1792172 - RNA, 15 nt, Human
acagaagcagcucuu

SEQ ID NO: 1792173 - RNA, 21 nt, Human
acagaacacauaauucaggaa

SEQ ID NO: 1792174 - RNA, 16 nt, Human
acaggcaagcaccucc

SEQ ID NO: 1792175 - RNA, 15 nt, Human
acaggcaagcaccuc

SEQ ID NO: 1792176 - RNA, 18 nt, Human
acaggcaagcaccuccug

SEQ ID NO: 1792177 - RNA, 19 nt, Human
acaggcaagcaccuccugc

SEQ ID NO: 1792178 - RNA, 21 nt, Human
acagcugcucaauaaaguaca

SEQ ID NO: 1792179 - RNA, 23 nt, Human
acaggugugaaccaccacaccca

SEQ ID NO: 1792180 - RNA, 20 nt, Human
acaggugugaaccaccacac

SEQ ID NO: 1792181 - RNA, 22 nt, Human
acaggugugagccaccacgccc

SEQ ID NO: 1792182 - RNA, 21 nt, Human
acaggugugagccaccacgcc

SEQ ID NO: 1792183 - RNA, 15 nt, Human
acagcuccuucuguc

SEQ ID NO: 1792184 - RNA, 20 nt, Human
acagcucugcauacucauua

SEQ ID NO: 1792185 - RNA, 13 nt, Human
acagcucuguccu

SEQ ID NO: 1792186 - RNA, 14 nt, Human
acagcugccuggga

SEQ ID NO: 1792187 - RNA, 23 nt, Human
acagcugccugggaucccucauc

SEQ ID NO: 1792188 - RNA, 14 nt, Human
acagcuccuucugu

SEQ ID NO: 1792189 - RNA, 13 nt, Human
acagcuccuucug

SEQ ID NO: 1792190 - RNA, 12 nt, Human
acagcuccuucu

SEQ ID NO: 1792191 - RNA, 13 nt, Human
acaaagacugagu

SEQ ID NO: 1792192 - RNA, 18 nt, Human
acaacuaugauuuggaaa

SEQ ID NO: 1792193 - RNA, 21 nt, Human
acaaaccuguuucugcagcca

SEQ ID NO: 1792194 - RNA, 15 nt, Human
acaaacgggcucagc

SEQ ID NO: 1792195 - RNA, 20 nt, Human
acaaaauguaggguuauaau

SEQ ID NO: 1792196 - RNA, 12 nt, Human
aauuuucuuuca

SEQ ID NO: 1792197 - RNA, 13 nt, Human
aauuuugaaaaac

SEQ ID NO: 1792198 - RNA, 24 nt, Human
acaacuugcacguauuuuaauagc

SEQ ID NO: 1792199 - RNA, 21 nt, Human
acaaguaugaauaaagacacc

SEQ ID NO: 1792200 - RNA, 23 nt, Human
acaaguaugaauaaagacaccua

SEQ ID NO: 1792201 - RNA, 12 nt, Human
acaccagagccc

SEQ ID NO: 1792202 - RNA, 17 nt, Human
acacgcuccuuccucug

SEQ ID NO: 1792203 - RNA, 19 nt, Human
acacgcuccuuccucugag

SEQ ID NO: 1792204 - RNA, 14 nt, Human
acaccacuacauuc

SEQ ID NO: 1792205 - RNA, 12 nt, Human
acacagcucugu

SEQ ID NO: 1792206 - RNA, 11 nt, Human
acacagcucug

SEQ ID NO: 1792207 - RNA, 14 nt, Human
acacagcucugucc

SEQ ID NO: 1792208 - RNA, 15 nt, Human
acacuaaccacgcug

SEQ ID NO: 1792209 - RNA, 14 nt, Human
acacuaaccacgcu

SEQ ID NO: 1792210 - RNA, 15 nt, Human
acacggacacucaaa

SEQ ID NO: 1792211 - RNA, 15 nt, Human
acaauuuauuauggc

SEQ ID NO: 1792212 - RNA, 16 nt, Human
acaauuuauuauggca

SEQ ID NO: 1792213 - RNA, 18 nt, Human
acacaaacgggcucagca

SEQ ID NO: 1792214 - RNA, 14 nt, Human
agaaaauaacaaua

SEQ ID NO: 1792215 - RNA, 23 nt, Human
agaaaauggaagacagcucuuau

SEQ ID NO: 1792216 - RNA, 15 nt, Human
agaaaauggacgugu

SEQ ID NO: 1792217 - RNA, 20 nt, Human
agaaaauggacguguuauga

SEQ ID NO: 1792218 - RNA, 22 nt, Human
agaaaauggacguguuaugacu

SEQ ID NO: 1792219 - RNA, 23 nt, Human
agaaaauggacguguuaugacuc

SEQ ID NO: 1792220 - RNA, 20 nt, Human
agaaaagggaacugaacauu

SEQ ID NO: 1792221 - RNA, 22 nt, Human
acuuuuauaaacuuuaccuuuu

SEQ ID NO: 1792222 - RNA, 19 nt, Human
acuuuuauaaacuuuaccu

SEQ ID NO: 1792223 - RNA, 15 nt, Human
acuuuuauaaacuuu

SEQ ID NO: 1792224 - RNA, 16 nt, Human
acuuucuagccagagg

SEQ ID NO: 1792225 - RNA, 23 nt, Human
acuuuguucuggcucuuccaggc

SEQ ID NO: 1792226 - RNA, 23 nt, Human
acuuuccuucauucaacccaccu

SEQ ID NO: 1792227 - RNA, 22 nt, Human
acuuucauauuuuaaacagagg

SEQ ID NO: 1792228 - RNA, 23 nt, Human
acuuuagggaaguacuuuuggca

SEQ ID NO: 1792229 - RNA, 23 nt, Human
agaaaggaggggauagagagaga

SEQ ID NO: 1792230 - RNA, 20 nt, Human
agaaaggaggggauagagag

SEQ ID NO: 1792231 - RNA, 15 nt, Human
agaaauaaaguuucu

SEQ ID NO: 1792232 - RNA, 18 nt, Human
agaaauaaaguuucuguu

SEQ ID NO: 1792233 - RNA, 14 nt, Human
acuggagaaaaugg

SEQ ID NO: 1792234 - RNA, 14 nt, Human
acuggaagcacagc

SEQ ID NO: 1792235 - RNA, 15 nt, Human
acuggaagcacagcu

SEQ ID NO: 1792236 - RNA, 16 nt, Human
acuggaagcacagcuu

SEQ ID NO: 1792237 - RNA, 19 nt, Human
acugcccccucugcccugc

SEQ ID NO: 1792238 - RNA, 18 nt, Human
acugcccccucugcccug

SEQ ID NO: 1792239 - RNA, 20 nt, Human
acugcccccucugcccugcg

SEQ ID NO: 1792240 - RNA, 16 nt, Human
acugugccaugugcca

SEQ ID NO: 1792241 - RNA, 12 nt, Human
acugucuucagu

SEQ ID NO: 1792242 - RNA, 23 nt, Human
acugguggcccgacagccuggca

SEQ ID NO: 1792243 - RNA, 21 nt, Human
acugguggcccgacagccugg

SEQ ID NO: 1792244 - RNA, 22 nt, Human
acugguggcccgacagccuggc

SEQ ID NO: 1792245 - RNA, 20 nt, Human
acugguggcccgacagccug

SEQ ID NO: 1792246 - RNA, 19 nt, Human
acugucucaagagggcacu

SEQ ID NO: 1792247 - RNA, 13 nt, Human
acuguuucaaacu

SEQ ID NO: 1792248 - RNA, 15 nt, Human
acuuauuuauauaaa

SEQ ID NO: 1792249 - RNA, 19 nt, Human
acuucacauauugauuucc

SEQ ID NO: 1792250 - RNA, 19 nt, Human
acuuguaaaggaauuuaaa

SEQ ID NO: 1792251 - RNA, 20 nt, Human
acuuguaaaggaauuuaaaa

SEQ ID NO: 1792252 - RNA, 15 nt, Human
acuuggucugugaga

SEQ ID NO: 1792253 - RNA, 14 nt, Human
acuuggucugugag

SEQ ID NO: 1792254 - RNA, 19 nt, Human
acuucugccauauucuguu

SEQ ID NO: 1792255 - RNA, 18 nt, Human
acuucugccauauucugu

SEQ ID NO: 1792256 - RNA, 22 nt, Human
acuucugccagcauaauacuug

SEQ ID NO: 1792257 - RNA, 23 nt, Human
acuucacauauugauuuccguua

SEQ ID NO: 1792258 - RNA, 20 nt, Human
acuuguaaaugugguaaaga

SEQ ID NO: 1792259 - RNA, 18 nt, Human
acuuguaaaugugguaaa

SEQ ID NO: 1792260 - RNA, 21 nt, Human
acuuggucugugagaugcuag

SEQ ID NO: 1792261 - RNA, 14 nt, Human
acuagcuauggugu

SEQ ID NO: 1792262 - RNA, 15 nt, Human
acuaggguccugggg

SEQ ID NO: 1792263 - RNA, 16 nt, Human
acuaggguccugggga

SEQ ID NO: 1792264 - RNA, 14 nt, Human
acucaguggggagg

SEQ ID NO: 1792265 - RNA, 12 nt, Human
acuccccuccuu

SEQ ID NO: 1792266 - RNA, 13 nt, Human
acuccccugcugg

SEQ ID NO: 1792267 - RNA, 17 nt, Human
acuccccugcugggugu

SEQ ID NO: 1792268 - RNA, 14 nt, Human
acucccccaggugg

SEQ ID NO: 1792269 - RNA, 11 nt, Human
acuauaaugua

SEQ ID NO: 1792270 - RNA, 17 nt, Human
acucaaacucuuaaaac

SEQ ID NO: 1792271 - RNA, 16 nt, Human
acucaaacucuuaaaa

SEQ ID NO: 1792272 - RNA, 13 nt, Human
acucccuuucaac

SEQ ID NO: 1792273 - RNA, 12 nt, Human
acucccuuucaa

SEQ ID NO: 1792274 - RNA, 14 nt, Human
acucuaucaaguau

SEQ ID NO: 1792275 - RNA, 21 nt, Human
acucuaucaaguauuauaccu

SEQ ID NO: 1792276 - RNA, 16 nt, Human
acucuaucaaguauua

SEQ ID NO: 1792277 - RNA, 16 nt, Human
acucugugucaggugg

SEQ ID NO: 1792278 - RNA, 11 nt, Human
acucuuaaaac

SEQ ID NO: 1792279 - RNA, 18 nt, Human
acucuuaaaacccaagug

SEQ ID NO: 1792280 - RNA, 21 nt, Human
acucuacccucuuagaaaaac

SEQ ID NO: 1792281 - RNA, 13 nt, Human
acucuacccucuu

SEQ ID NO: 1792282 - RNA, 18 nt, Human
acucuacccucuuagaaa

SEQ ID NO: 1792283 - RNA, 17 nt, Human
acguggcugcuucaagg

SEQ ID NO: 1792284 - RNA, 13 nt, Human
acguggcugcuuc

SEQ ID NO: 1792285 - RNA, 14 nt, Human
acguggcugcuuca

SEQ ID NO: 1792286 - RNA, 15 nt, Human
acguggcugcuucaa

SEQ ID NO: 1792287 - RNA, 15 nt, Human
acgcugugcugcccu

SEQ ID NO: 1792288 - RNA, 16 nt, Human
acgcugugcugcccug

SEQ ID NO: 1792289 - RNA, 17 nt, Human
acgcugugcugcccugc

SEQ ID NO: 1792290 - RNA, 18 nt, Human
acgcugugcugcccugcc

SEQ ID NO: 1792291 - RNA, 19 nt, Human
acgugauuuugcuguagaa

SEQ ID NO: 1792292 - RNA, 22 nt, Human
acuaaguuuuuauggcuuuugu

SEQ ID NO: 1792293 - RNA, 15 nt, Human
acuaaguuuuuaugg

SEQ ID NO: 1792294 - RNA, 18 nt, Human
acgccacugcacuauagc

SEQ ID NO: 1792295 - RNA, 17 nt, Human
acgauuucuguuuagau

SEQ ID NO: 1792296 - RNA, 14 nt, Human
acgauuucuguuua

SEQ ID NO: 1792297 - RNA, 13 nt, Human
acgauuucuguuu

SEQ ID NO: 1792298 - RNA, 12 nt, Human
acgauuucuguu

SEQ ID NO: 1792299 - RNA, 14 nt, Human
accuuggcugcagg

SEQ ID NO: 1792300 - RNA, 12 nt, Human
accuuuauucug

SEQ ID NO: 1792301 - RNA, 13 nt, Human
accuuuauucugg

SEQ ID NO: 1792302 - RNA, 16 nt, Human
accuuucaauaggaaa

SEQ ID NO: 1792303 - RNA, 12 nt, Human
accuuggcugca

SEQ ID NO: 1792304 - RNA, 14 nt, Human
accuuggcucaagu

SEQ ID NO: 1792305 - RNA, 20 nt, Human
accuguaaugacaggccugu

SEQ ID NO: 1792306 - RNA, 15 nt, Human
accuguaaugacagg

SEQ ID NO: 1792307 - RNA, 20 nt, Human
accugccccuccucucugcc

SEQ ID NO: 1792308 - RNA, 22 nt, Human
accugccccuccucucugcccu

SEQ ID NO: 1792309 - RNA, 17 nt, Human
accuuucaauaggaaaa

SEQ ID NO: 1792310 - RNA, 21 nt, Human
accuuucaauaggaaaaacug

SEQ ID NO: 1792311 - RNA, 23 nt, Human
accuuucaauaggaaaaacugau

SEQ ID NO: 1792312 - RNA, 21 nt, Human
accucugcacaagcugcaccc

SEQ ID NO: 1792313 - RNA, 16 nt, Human
accucugcacaagcug

SEQ ID NO: 1792314 - RNA, 18 nt, Human
accucugcacaagcugca

SEQ ID NO: 1792315 - RNA, 14 nt, Human
accugccccuccuc

SEQ ID NO: 1792316 - RNA, 18 nt, Human
accugccccuccucucug

SEQ ID NO: 1792317 - RNA, 23 nt, Human
accugccccucaacucuccucca

SEQ ID NO: 1792318 - RNA, 21 nt, Human
accugcccaaccugcucuccu

SEQ ID NO: 1792319 - RNA, 13 nt, Human
aacaugauuuggg

SEQ ID NO: 1792320 - RNA, 13 nt, Human
aacagcucgacuu

SEQ ID NO: 1792321 - RNA, 17 nt, Human
aaccaguguuguggauu

SEQ ID NO: 1792322 - RNA, 22 nt, Human
aaccacucuaucaaguauuaua

SEQ ID NO: 1792323 - RNA, 23 nt, Human
aacauguaauuaaguacuaugua

SEQ ID NO: 1792324 - RNA, 14 nt, Human
aacauguaauuaag

SEQ ID NO: 1792325 - RNA, 21 nt, Human
aacauguaauuaaguacuaug

SEQ ID NO: 1792326 - RNA, 14 nt, Human
aaccagaucauugu

SEQ ID NO: 1792327 - RNA, 12 nt, Human
aaccagaucauu

SEQ ID NO: 1792328 - RNA, 14 nt, Human
aacccuggugacca

SEQ ID NO: 1792329 - RNA, 19 nt, Human
aacacauuuuucuuaggga

SEQ ID NO: 1792330 - RNA, 18 nt, Human
aaauugcauuuccugaca

SEQ ID NO: 1792331 - RNA, 15 nt, Human
aacaaagaaauuaug

SEQ ID NO: 1792332 - RNA, 17 nt, Human
aacaaagaaauuaugug

SEQ ID NO: 1792333 - RNA, 19 nt, Human
aacugauuuuuuuuuccuu

SEQ ID NO: 1792334 - RNA, 17 nt, Human
aacugauuuuuuuuucc

SEQ ID NO: 1792335 - RNA, 14 nt, Human
aacugaccagccuc

SEQ ID NO: 1792336 - RNA, 19 nt, Human
aacugaccagccuccaugc

SEQ ID NO: 1792337 - RNA, 15 nt, Human
aacugaauuuugucu

SEQ ID NO: 1792338 - RNA, 19 nt, Human
aacuuaaauaaugugaaac

SEQ ID NO: 1792339 - RNA, 17 nt, Human
aacuuaaauaaugugaa

SEQ ID NO: 1792340 - RNA, 23 nt, Human
aacugaacucugacaacagacuu

SEQ ID NO: 1792341 - RNA, 14 nt, Human
aacugaauuuuguc

SEQ ID NO: 1792342 - RNA, 19 nt, Human
aacugaacucugacaacag

SEQ ID NO: 1792343 - RNA, 20 nt, Human
aacugaacucugacaacaga

SEQ ID NO: 1792344 - RNA, 16 nt, Human
aacugaacucugacaa

SEQ ID NO: 1792345 - RNA, 12 nt, Human
aacucaccccag

SEQ ID NO: 1792346 - RNA, 15 nt, Human
aacucaccccagccc

SEQ ID NO: 1792347 - RNA, 15 nt, Human
aacucaccugccccu

SEQ ID NO: 1792348 - RNA, 16 nt, Human
aacucaccugccccuc

SEQ ID NO: 1792349 - RNA, 13 nt, Human
aacuucacauauu

SEQ ID NO: 1792350 - RNA, 14 nt, Human
aacuuuuuuuuaag

SEQ ID NO: 1792351 - RNA, 20 nt, Human
aacuuuuuuuuaaguuacac

SEQ ID NO: 1792352 - RNA, 19 nt, Human
aacuuuuauaaacuuuacc

SEQ ID NO: 1792353 - RNA, 16 nt, Human
aacuuuuauaaacuuu

SEQ ID NO: 1792354 - RNA, 20 nt, Human
aacuuugaccucugcagcaa

SEQ ID NO: 1792355 - RNA, 19 nt, Human
aacuuugaccucugcagca

SEQ ID NO: 1792356 - RNA, 15 nt, Human
aacuuuuauaaacuu

SEQ ID NO: 1792357 - RNA, 12 nt, Human
aacuuuuauaaa

SEQ ID NO: 1792358 - RNA, 17 nt, Human
aacuuugaccucugcag

SEQ ID NO: 1792359 - RNA, 14 nt, Human
aacuuugaccucug

SEQ ID NO: 1792360 - RNA, 13 nt, Human
aacuuugaccucu

SEQ ID NO: 1792361 - RNA, 17 nt, Human
aaacagauuuggaaaga

SEQ ID NO: 1792362 - RNA, 19 nt, Human
aaacacuguucucugcccu

SEQ ID NO: 1792363 - RNA, 22 nt, Human
aaacacuguucucugcccucca

SEQ ID NO: 1792364 - RNA, 13 nt, Human
aaacacucuugaa

SEQ ID NO: 1792365 - RNA, 14 nt, Human
aaacacucuugaaa

SEQ ID NO: 1792366 - RNA, 17 nt, Human
aaacacucuugaaaaau

SEQ ID NO: 1792367 - RNA, 18 nt, Human
aaacacuguucucugccc

SEQ ID NO: 1792368 - RNA, 13 nt, Human
aaaauucagugga

SEQ ID NO: 1792369 - RNA, 15 nt, Human
aaaacacauuuuucu

SEQ ID NO: 1792370 - RNA, 13 nt, Human
aaaacacauuuuu

SEQ ID NO: 1792371 - RNA, 17 nt, Human
aaagaguacucuuguuu

SEQ ID NO: 1792372 - RNA, 12 nt, Human
aaagaguacucu

SEQ ID NO: 1792373 - RNA, 11 nt, Human
aaagaacaucc

SEQ ID NO: 1792374 - RNA, 15 nt, Human
aaagaaauuaugugc

SEQ ID NO: 1792375 - RNA, 13 nt, Human
aaagaaauuaugu

SEQ ID NO: 1792376 - RNA, 12 nt, Human
aaagaaaacuug

SEQ ID NO: 1792377 - RNA, 20 nt, Human
aaagaaaacuuguauuaugu

SEQ ID NO: 1792378 - RNA, 12 nt, Human
aaauaacaauga

SEQ ID NO: 1792379 - RNA, 22 nt, Human
aaauaaaauuaaagcugaaaac

SEQ ID NO: 1792380 - RNA, 14 nt, Human
aaagugcugggauu

SEQ ID NO: 1792381 - RNA, 12 nt, Human
aaagugcuggga

SEQ ID NO: 1792382 - RNA, 11 nt, Human
aaagugcuggg

SEQ ID NO: 1792383 - RNA, 23 nt, Human
aaagugagacuuugaggguguau

SEQ ID NO: 1792384 - RNA, 20 nt, Human
aaagucuguugauuaaagau

SEQ ID NO: 1792385 - RNA, 19 nt, Human
aaagucuguugauuaaaga

SEQ ID NO: 1792386 - RNA, 18 nt, Human
aaagucuguugauuaaag

SEQ ID NO: 1792387 - RNA, 20 nt, Human
aaagucucuggaauuugaaa

SEQ ID NO: 1792388 - RNA, 22 nt, Human
aaagucucuggaauuugaaaca

SEQ ID NO: 1792389 - RNA, 19 nt, Human
aaagucucuggaauuugaa

SEQ ID NO: 1792390 - RNA, 16 nt, Human
aaagggacugagaaau

SEQ ID NO: 1792391 - RNA, 21 nt, Human
aaagggaacugaacauuccag

SEQ ID NO: 1792392 - RNA, 16 nt, Human
aaagggaacugaacau

SEQ ID NO: 1792393 - RNA, 16 nt, Human
aaauggaaaugggcag

SEQ ID NO: 1792394 - RNA, 18 nt, Human
aaauggaagacagcucuu

SEQ ID NO: 1792395 - RNA, 20 nt, Human
aaauggacguguuaugacuc

SEQ ID NO: 1792396 - RNA, 21 nt, Human
aaauggacguguuaugacucc

SEQ ID NO: 1792397 - RNA, 22 nt, Human
aaauggacguguuaugacucca

SEQ ID NO: 1792398 - RNA, 22 nt, Human
aaauacuguuuuuaacaacuau

SEQ ID NO: 1792399 - RNA, 14 nt, Human
aaauauaauugaca

SEQ ID NO: 1792400 - RNA, 13 nt, Human
aaauaguaaaaau

SEQ ID NO: 1792401 - RNA, 16 nt, Human
aaauaguaaaaauaaa

SEQ ID NO: 1792402 - RNA, 17 nt, Human
aaauagacagcaugaga

SEQ ID NO: 1792403 - RNA, 11 nt, Human
aagcugggcag

SEQ ID NO: 1792404 - RNA, 18 nt, Human
aaggacauugcggacagc

SEQ ID NO: 1792405 - RNA, 15 nt, Human
aagcugggcagguug

SEQ ID NO: 1792406 - RNA, 13 nt, Human
aagcugggcaggu

SEQ ID NO: 1792407 - RNA, 18 nt, Human
aaggacccggaggggccu

SEQ ID NO: 1792408 - RNA, 15 nt, Human
aaggacuaggguccu

SEQ ID NO: 1792409 - RNA, 21 nt, Human
aaggacccggaggggccuggc

SEQ ID NO: 1792410 - RNA, 18 nt, Human
aaggacuaggguccuggg

SEQ ID NO: 1792411 - RNA, 20 nt, Human
aaggacuaggguccugggga

SEQ ID NO: 1792412 - RNA, 22 nt, Human
aagcugcacccucaggcaggug

SEQ ID NO: 1792413 - RNA, 17 nt, Human
aagcuaagguuuagaua

SEQ ID NO: 1792414 - RNA, 21 nt, Human
aagcugcacccucaggcaggu

SEQ ID NO: 1792415 - RNA, 20 nt, Human
aagcugcacccucaggcagg

SEQ ID NO: 1792416 - RNA, 12 nt, Human
aagcguggugga

SEQ ID NO: 1792417 - RNA, 17 nt, Human
aaggcaaggcugucaau

SEQ ID NO: 1792418 - RNA, 18 nt, Human
aaggcaaggcugucaauu

SEQ ID NO: 1792419 - RNA, 21 nt, Human
aagaaauuuccacucaggucu

SEQ ID NO: 1792420 - RNA, 13 nt, Human
aagaaauuaugug

SEQ ID NO: 1792421 - RNA, 22 nt, Human
aagaaauuaugugccagauuua

SEQ ID NO: 1792422 - RNA, 11 nt, Human
aagcagcucuu

SEQ ID NO: 1792423 - RNA, 21 nt, Human
aagcagaggaaggagaggaga

SEQ ID NO: 1792424 - RNA, 14 nt, Human
aagcagaggaagga

SEQ ID NO: 1792425 - RNA, 18 nt, Human
aagccauaauuguucuua

SEQ ID NO: 1792426 - RNA, 21 nt, Human
aauaauccuaaacauaugaau

SEQ ID NO: 1792427 - RNA, 20 nt, Human
aauaauaaagaauagcuuua

SEQ ID NO: 1792428 - RNA, 12 nt, Human
aauaauaaagaa

SEQ ID NO: 1792429 - RNA, 12 nt, Human
aauaauguaaga

SEQ ID NO: 1792430 - RNA, 19 nt, Human
aauaauguaagacaaauau

SEQ ID NO: 1792431 - RNA, 16 nt, Human
aauaaugugaaacugg

SEQ ID NO: 1792432 - RNA, 17 nt, Human
aagugguauagaaaugc

SEQ ID NO: 1792433 - RNA, 13 nt, Human
aagugguauagaa

SEQ ID NO: 1792434 - RNA, 15 nt, Human
aaguuguuaauaaaa

SEQ ID NO: 1792435 - RNA, 19 nt, Human
aauaaacuauuuguaaagu

SEQ ID NO: 1792436 - RNA, 23 nt, Human
aauaaaauuaaagcugaaaacug

SEQ ID NO: 1792437 - RNA, 11 nt, Human
aaguacuucuu

SEQ ID NO: 1792438 - RNA, 14 nt, Human
aaguacuuuuggca

SEQ ID NO: 1792439 - RNA, 15 nt, Human
aaguacuuuuggcau

SEQ ID NO: 1792440 - RNA, 23 nt, Human
aaguccaggcuuuuuuaucaugu

SEQ ID NO: 1792441 - RNA, 16 nt, Human
aaguaucccuacugua

SEQ ID NO: 1792442 - RNA, 20 nt, Human
aagguuaauguucaucaucc

SEQ ID NO: 1792443 - RNA, 15 nt, Human
aagguuaauaaagua

SEQ ID NO: 1792444 - RNA, 16 nt, Human
aagguuaauaaaguaa

SEQ ID NO: 1792445 - RNA, 11 nt, Human
aaggugggagg

SEQ ID NO: 1792446 - RNA, 19 nt, Human
aagucucuggaauuugaaa

SEQ ID NO: 1792447 - RNA, 16 nt, Human
aagucuuagauguaua

SEQ ID NO: 1792448 - RNA, 21 nt, Human
aaugaugauccuaggcauuug

SEQ ID NO: 1792449 - RNA, 22 nt, Human
aaucugcuuuuuaaagaaugcu

SEQ ID NO: 1792450 - RNA, 23 nt, Human
aaugaaccacaucuugcucugcu

SEQ ID NO: 1792451 - RNA, 17 nt, Human
aaugaaccacaucuugc

SEQ ID NO: 1792452 - RNA, 16 nt, Human
aaugaaccacaucuug

SEQ ID NO: 1792453 - RNA, 18 nt, Human
aauccaggguggugguga

SEQ ID NO: 1792454 - RNA, 18 nt, Human
aaucuccaaaauaaaacu

SEQ ID NO: 1792455 - RNA, 14 nt, Human
aaucuccaaaauaa

SEQ ID NO: 1792456 - RNA, 13 nt, Human
aaucuccaaaaua

SEQ ID NO: 1792457 - RNA, 19 nt, Human
aaugaugccaugaggaaca

SEQ ID NO: 1792458 - RNA, 18 nt, Human
aauauggucuuuugguua

SEQ ID NO: 1792459 - RNA, 18 nt, Human
aauauaggaacuuaaaua

SEQ ID NO: 1792460 - RNA, 21 nt, Human
aauauaggaacuuaaauaaug

SEQ ID NO: 1792461 - RNA, 20 nt, Human
aauauaggaacuuaaauaau

SEQ ID NO: 1792462 - RNA, 20 nt, Human
aaugucucuuuaaugucaca

SEQ ID NO: 1792463 - RNA, 22 nt, Human
aaugucuaguuguaacaccaug

SEQ ID NO: 1792464 - RNA, 17 nt, Human
aaugucagugugacuga

SEQ ID NO: 1792465 - RNA, 21 nt, Human
aaugucagugugacugaucuc

SEQ ID NO: 1792466 - RNA, 22 nt, Human
aauggucuuucuaaugugugaa

SEQ ID NO: 1792467 - RNA, 15 nt, Human
aaugucagugugacu

SEQ ID NO: 1792468 - RNA, 16 nt, Human
aaugucagugugacug

SEQ ID NO: 1792469 - RNA, 13 nt, Human
aaugucaguguga

SEQ ID NO: 1792470 - RNA, 20 nt, Human
aaugguacuccacauauuuc

SEQ ID NO: 1792471 - RNA, 15 nt, Human
aaugggcagagcaga

SEQ ID NO: 1792472 - RNA, 13 nt, Human
aaugggcagagca

SEQ ID NO: 1792473 - RNA, 19 nt, Human
aauguuugccucugccucu

SEQ ID NO: 1792474 - RNA, 18 nt, Human
aauguuugccucugccuc

SEQ ID NO: 1792475 - RNA, 18 nt, Human
aauuaaaacacaacaucu

SEQ ID NO: 1792476 - RNA, 18 nt, Human
aauuaguggcacuugcuu

SEQ ID NO: 1792477 - RNA, 12 nt, Human
aaaacacauuuu

SEQ ID NO: 1792478 - RNA, 15 nt, Human
aaaaacugauuuuuu

SEQ ID NO: 1792479 - RNA, 14 nt, Human
aaaaacauggccuu

SEQ ID NO: 1792480 - RNA, 13 nt, Human
aaaaacugauuuu

SEQ ID NO: 1792481 - RNA, 12 nt, Human
aaaaagaggcua

SEQ ID NO: 1792482 - RNA, 14 nt, Human
aaaaacacaaaagu

SEQ ID NO: 1792483 - RNA, 14 nt, Human
uuaucuugaauaau

SEQ ID NO: 1792484 - RNA, 16 nt, Human
uuaucuugaauaaugu

SEQ ID NO: 1792485 - RNA, 14 nt, Human
uuaucuagauacug

SEQ ID NO: 1792486 - RNA, 16 nt, Human
uuauauuuacaaaugg

SEQ ID NO: 1792487 - RNA, 23 nt, Human
uuauuaaaaaucucaaauuucua

SEQ ID NO: 1792488 - RNA, 19 nt, Human
uuauuaaaugcccagcccc

SEQ ID NO: 1792489 - RNA, 21 nt, Human
uuauuaaaugcccagccccuu

SEQ ID NO: 1792490 - RNA, 19 nt, Human
uuaugauuuuuaaagaaaa

SEQ ID NO: 1792491 - RNA, 16 nt, Human
uuaugauuuuuaaaga

SEQ ID NO: 1792492 - RNA, 17 nt, Human
uuauggaacacucugag

SEQ ID NO: 1792493 - RNA, 21 nt, Human
uuauggacaaugacccagugg

SEQ ID NO: 1792494 - RNA, 18 nt, Human
uuauggaacacucugaga

SEQ ID NO: 1792495 - RNA, 20 nt, Human
uuauggaacacucugagacu

SEQ ID NO: 1792496 - RNA, 17 nt, Human
uuauggcuuuugugcau

SEQ ID NO: 1792497 - RNA, 18 nt, Human
uuauggcuuuugugcauu

SEQ ID NO: 1792498 - RNA, 17 nt, Human
uuauguugcauagaaua

SEQ ID NO: 1792499 - RNA, 14 nt, Human
uuauggcacaucag

SEQ ID NO: 1792500 - RNA, 16 nt, Human
uuauggcuuuugugca

SEQ ID NO: 1792501 - RNA, 19 nt, Human
uuagugaccucagcuuuga

SEQ ID NO: 1792502 - RNA, 21 nt, Human
ugugaaaagaaaaaugagccu

SEQ ID NO: 1792503 - RNA, 17 nt, Human
ugugaaaagaaaaauga

SEQ ID NO: 1792504 - RNA, 13 nt, Human
ugugaaaagaaaa

SEQ ID NO: 1792505 - RNA, 15 nt, Human
ugugaaaagaaaaau

SEQ ID NO: 1792506 - RNA, 12 nt, Human
uuauaauuuaaa

SEQ ID NO: 1792507 - RNA, 12 nt, Human
uuauaauuuuaa

SEQ ID NO: 1792508 - RNA, 17 nt, Human
uuauaauuuuaaauguu

SEQ ID NO: 1792509 - RNA, 21 nt, Human
uuauaauuuuaaauguuuuuu

SEQ ID NO: 1792510 - RNA, 15 nt, Human
uuauaaugaaugaaa

SEQ ID NO: 1792511 - RNA, 18 nt, Human
uuauaauaauguuaacau

SEQ ID NO: 1792512 - RNA, 15 nt, Human
uuauaauaauguuaa

SEQ ID NO: 1792513 - RNA, 16 nt, Human
uuauauuaugaagcuu

SEQ ID NO: 1792514 - RNA, 13 nt, Human
uuauacauaaaca

SEQ ID NO: 1792515 - RNA, 11 nt, Human
uuauacauaaa

SEQ ID NO: 1792516 - RNA, 13 nt, Human
uuccaaaguacac

SEQ ID NO: 1792517 - RNA, 16 nt, Human
uuccaaaguacacugu

SEQ ID NO: 1792518 - RNA, 14 nt, Human
uuccauggacuuug

SEQ ID NO: 1792519 - RNA, 15 nt, Human
uuccauggacuuugu

SEQ ID NO: 1792520 - RNA, 13 nt, Human
uuccagagccuca

SEQ ID NO: 1792521 - RNA, 19 nt, Human
uuccaacccucaucaccaa

SEQ ID NO: 1792522 - RNA, 23 nt, Human
uucaguuauuauauuuacaaaug

SEQ ID NO: 1792523 - RNA, 20 nt, Human
uucauaaauaaaguuuguug

SEQ ID NO: 1792524 - RNA, 15 nt, Human
uucauaaccuagccu

SEQ ID NO: 1792525 - RNA, 15 nt, Human
uucauccuccucaga

SEQ ID NO: 1792526 - RNA, 19 nt, Human
uucauccuccucagaucuu

SEQ ID NO: 1792527 - RNA, 16 nt, Human
uucaguggcagcugcu

SEQ ID NO: 1792528 - RNA, 15 nt, Human
uucaguggcagcugc

SEQ ID NO: 1792529 - RNA, 17 nt, Human
uucaguggcagcugcuu

SEQ ID NO: 1792530 - RNA, 12 nt, Human
uucaguguacau

SEQ ID NO: 1792531 - RNA, 13 nt, Human
uucaguguacaug

SEQ ID NO: 1792532 - RNA, 15 nt, Human
uucagcuccagcuca

SEQ ID NO: 1792533 - RNA, 12 nt, Human
uucagcuccagc

SEQ ID NO: 1792534 - RNA, 22 nt, Human
uucagcuccagcucaccagccc

SEQ ID NO: 1792535 - RNA, 14 nt, Human
uucaguggcagcug

SEQ ID NO: 1792536 - RNA, 22 nt, Human
uucagcuuguaaauagcucagg

SEQ ID NO: 1792537 - RNA, 18 nt, Human
uuauuuuauuaugcauga

SEQ ID NO: 1792538 - RNA, 17 nt, Human
uuauuuuaauucaguug

SEQ ID NO: 1792539 - RNA, 22 nt, Human
uuauuuuggaaaauaaauuauu

SEQ ID NO: 1792540 - RNA, 18 nt, Human
uucaaaugcuguaacuuu

SEQ ID NO: 1792541 - RNA, 15 nt, Human
uucaaccauucccca

SEQ ID NO: 1792542 - RNA, 21 nt, Human
uucaauaggaaaaacugauuu

SEQ ID NO: 1792543 - RNA, 22 nt, Human
uucaauaggaaaaacugauuuu

SEQ ID NO: 1792544 - RNA, 14 nt, Human
uucaccuuuguccc

SEQ ID NO: 1792545 - RNA, 19 nt, Human
uucaccuuuguccccaccg

SEQ ID NO: 1792546 - RNA, 20 nt, Human
uucaccuuuguccccaccgc

SEQ ID NO: 1792547 - RNA, 13 nt, Human
uucacccuuuucu

SEQ ID NO: 1792548 - RNA, 21 nt, Human
uucacaaccuucuguggcuca

SEQ ID NO: 1792549 - RNA, 22 nt, Human
uucacaagacccaaaaggcaga

SEQ ID NO: 1792550 - RNA, 13 nt, Human
uucacggaagagc

SEQ ID NO: 1792551 - RNA, 22 nt, Human
uucaccuuuguccccaccgcag

SEQ ID NO: 1792552 - RNA, 17 nt, Human
uucacggaagagccuug

SEQ ID NO: 1792553 - RNA, 14 nt, Human
uucagacagcugcc

SEQ ID NO: 1792554 - RNA, 15 nt, Human
uucagacagcugccu

SEQ ID NO: 1792555 - RNA, 16 nt, Human
uucagacagcugccug

SEQ ID NO: 1792556 - RNA, 17 nt, Human
uucagacagcugccugg

SEQ ID NO: 1792557 - RNA, 15 nt, Human
uucagauauaaaaga

SEQ ID NO: 1792558 - RNA, 14 nt, Human
uucagauauaaaag

SEQ ID NO: 1792559 - RNA, 19 nt, Human
uucagauauaaaagacuga

SEQ ID NO: 1792560 - RNA, 14 nt, Human
uucagcucacugca

SEQ ID NO: 1792561 - RNA, 12 nt, Human
uucagauauaaa

SEQ ID NO: 1792562 - RNA, 18 nt, Human
uugaacuggguacuugug

SEQ ID NO: 1792563 - RNA, 17 nt, Human
uugaacuccugaccuca

SEQ ID NO: 1792564 - RNA, 13 nt, Human
uugaacuuugacc

SEQ ID NO: 1792565 - RNA, 14 nt, Human
uugaauuguaagga

SEQ ID NO: 1792566 - RNA, 14 nt, Human
uugacccacaagaa

SEQ ID NO: 1792567 - RNA, 17 nt, Human
uugaccgugaggccaga

SEQ ID NO: 1792568 - RNA, 17 nt, Human
uugacccacaagaaaug

SEQ ID NO: 1792569 - RNA, 21 nt, Human
uugaccucaggugauccaccc

SEQ ID NO: 1792570 - RNA, 15 nt, Human
uugaccucugcagca

SEQ ID NO: 1792571 - RNA, 14 nt, Human
uugaccucugcagc

SEQ ID NO: 1792572 - RNA, 20 nt, Human
uugacgccaucccagcccca

SEQ ID NO: 1792573 - RNA, 16 nt, Human
uugaccucugcagcaa

SEQ ID NO: 1792574 - RNA, 17 nt, Human
uugacgccaucccagcc

SEQ ID NO: 1792575 - RNA, 18 nt, Human
uugacgccaucccagccc

SEQ ID NO: 1792576 - RNA, 19 nt, Human
uugacgccaucccagcccc

SEQ ID NO: 1792577 - RNA, 23 nt, Human
uugauauccucuuugagugaagc

SEQ ID NO: 1792578 - RNA, 11 nt, Human
uugagccuggg

SEQ ID NO: 1792579 - RNA, 13 nt, Human
uugaggguugggc

SEQ ID NO: 1792580 - RNA, 14 nt, Human
uugagccugggagg

SEQ ID NO: 1792581 - RNA, 16 nt, Human
uugaggguugggcugg

SEQ ID NO: 1792582 - RNA, 16 nt, Human
uugaugaucuuugcag

SEQ ID NO: 1792583 - RNA, 17 nt, Human
uugaugacccccaacca

SEQ ID NO: 1792584 - RNA, 21 nt, Human
uugcaaaguaucccuacugua

SEQ ID NO: 1792585 - RNA, 21 nt, Human
uucuuccacaagagcccaggc

SEQ ID NO: 1792586 - RNA, 21 nt, Human
uucuuauacauuugauaaagu

SEQ ID NO: 1792587 - RNA, 21 nt, Human
uucuuguguguuuauugucaa

SEQ ID NO: 1792588 - RNA, 13 nt, Human
uucuuccucccuc

SEQ ID NO: 1792589 - RNA, 14 nt, Human
uucuuuccaaagua

SEQ ID NO: 1792590 - RNA, 12 nt, Human
uucuuucagcca

SEQ ID NO: 1792591 - RNA, 16 nt, Human
uugaacuccuggccuc

SEQ ID NO: 1792592 - RNA, 15 nt, Human
uugaacuccuggccu

SEQ ID NO: 1792593 - RNA, 20 nt, Human
uugaaaaaccauuuugcugu

SEQ ID NO: 1792594 - RNA, 21 nt, Human
uucuuuccaaaguacacuguu

SEQ ID NO: 1792595 - RNA, 23 nt, Human
uugaaaacacuguucucugcccu

SEQ ID NO: 1792596 - RNA, 19 nt, Human
uucugcuucagccucccga

SEQ ID NO: 1792597 - RNA, 16 nt, Human
uucugcuucagccucc

SEQ ID NO: 1792598 - RNA, 15 nt, Human
uucugcuucagccuc

SEQ ID NO: 1792599 - RNA, 14 nt, Human
uucugcuucagccu

SEQ ID NO: 1792600 - RNA, 18 nt, Human
uucugcuuuccucuuccu

SEQ ID NO: 1792601 - RNA, 18 nt, Human
uucuguauuuuguuuuug

SEQ ID NO: 1792602 - RNA, 23 nt, Human
uucuuaguugcuguaugucucgu

SEQ ID NO: 1792603 - RNA, 15 nt, Human
uucuuaguugcugua

SEQ ID NO: 1792604 - RNA, 14 nt, Human
uucuuaguugcugu

SEQ ID NO: 1792605 - RNA, 18 nt, Human
uucggugagcuacaaaug

SEQ ID NO: 1792606 - RNA, 21 nt, Human
uuccuugaguugauucagcuc

SEQ ID NO: 1792607 - RNA, 16 nt, Human
uuccaugucgccucug

SEQ ID NO: 1792608 - RNA, 12 nt, Human
uuccauggccuc

SEQ ID NO: 1792609 - RNA, 16 nt, Human
uuccauggccucuuca

SEQ ID NO: 1792610 - RNA, 20 nt, Human
uuccugaggcugggcucccu

SEQ ID NO: 1792611 - RNA, 15 nt, Human
uuccugaggcugggc

SEQ ID NO: 1792612 - RNA, 19 nt, Human
uucuacccagcgagcccug

SEQ ID NO: 1792613 - RNA, 12 nt, Human
uucuacccagcg

SEQ ID NO: 1792614 - RNA, 23 nt, Human
uucuaaugugugaaucagagcac

SEQ ID NO: 1792615 - RNA, 21 nt, Human
uucuacccagcgagcccuggu

SEQ ID NO: 1792616 - RNA, 20 nt, Human
uucuacccagcgagcccugg

SEQ ID NO: 1792617 - RNA, 14 nt, Human
uucuacccaggugc

SEQ ID NO: 1792618 - RNA, 13 nt, Human
uucuacuauuuau

SEQ ID NO: 1792619 - RNA, 13 nt, Human
uucuacgccaggg

SEQ ID NO: 1792620 - RNA, 14 nt, Human
uucuauagcuuuuc

SEQ ID NO: 1792621 - RNA, 22 nt, Human
uucuacucgaguuacagacaaa

SEQ ID NO: 1792622 - RNA, 16 nt, Human
uucucugcccuccaag

SEQ ID NO: 1792623 - RNA, 17 nt, Human
uucucugcccuccaaga

SEQ ID NO: 1792624 - RNA, 23 nt, Human
uucugacccaugcugcccuguga

SEQ ID NO: 1792625 - RNA, 22 nt, Human
uucugacccaugcugcccugug

SEQ ID NO: 1792626 - RNA, 18 nt, Human
uucugacccugcuucaaa

SEQ ID NO: 1792627 - RNA, 21 nt, Human
uucugacccugcuucaaauau

SEQ ID NO: 1792628 - RNA, 19 nt, Human
uucugcucacauaucuguc

SEQ ID NO: 1792629 - RNA, 22 nt, Human
uucugauaugcaguuuuccuua

SEQ ID NO: 1792630 - RNA, 19 nt, Human
uucugauccuaguuccacc

SEQ ID NO: 1792631 - RNA, 16 nt, Human
uucuccacccugcucu

SEQ ID NO: 1792632 - RNA, 20 nt, Human
uucucauuugccaauaauaa

SEQ ID NO: 1792633 - RNA, 12 nt, Human
uucuccacugga

SEQ ID NO: 1792634 - RNA, 20 nt, Human
uucuccaccugccagggaca

SEQ ID NO: 1792635 - RNA, 16 nt, Human
uucuccaccugccagg

SEQ ID NO: 1792636 - RNA, 18 nt, Human
uucuccaccugccaggga

SEQ ID NO: 1792637 - RNA, 21 nt, Human
uucuccaccucccacaaagga

SEQ ID NO: 1792638 - RNA, 12 nt, Human
uucuccaccugc

SEQ ID NO: 1792639 - RNA, 14 nt, Human
uucuccaccugcca

SEQ ID NO: 1792640 - RNA, 15 nt, Human
uucuccaccugccag

SEQ ID NO: 1792641 - RNA, 20 nt, Human
uucucugaggacacuaacca

SEQ ID NO: 1792642 - RNA, 14 nt, Human
uucucugaggacac

SEQ ID NO: 1792643 - RNA, 11 nt, Human
uucucugcccu

SEQ ID NO: 1792644 - RNA, 12 nt, Human
uucucugcccuc

SEQ ID NO: 1792645 - RNA, 13 nt, Human
uucucugaggaca

SEQ ID NO: 1792646 - RNA, 20 nt, Human
uucucugaggacaagagaaa

SEQ ID NO: 1792647 - RNA, 16 nt, Human
uucucugaggacaaga

SEQ ID NO: 1792648 - RNA, 19 nt, Human
uucucuccuguaccucuug

SEQ ID NO: 1792649 - RNA, 22 nt, Human
uucucuccuguaccucuugagc

SEQ ID NO: 1792650 - RNA, 13 nt, Human
uucucuccagccc

SEQ ID NO: 1792651 - RNA, 14 nt, Human
uucucuccagcccc

SEQ ID NO: 1792652 - RNA, 18 nt, Human
uucucuccuguaccucuu

SEQ ID NO: 1792653 - RNA, 14 nt, Human
uucucuccuguacc

SEQ ID NO: 1792654 - RNA, 15 nt, Human
uucucuccagccccu

SEQ ID NO: 1792655 - RNA, 16 nt, Human
uucucuccagccccug

SEQ ID NO: 1792656 - RNA, 13 nt, Human
uuuauuauggcac

SEQ ID NO: 1792657 - RNA, 13 nt, Human
uuuauuaugcaug

SEQ ID NO: 1792658 - RNA, 16 nt, Human
uuuauggcuuuugugc

SEQ ID NO: 1792659 - RNA, 14 nt, Human
uuuauggcuuuugu

SEQ ID NO: 1792660 - RNA, 21 nt, Human
uuucaacgcagcccugcuuug

SEQ ID NO: 1792661 - RNA, 15 nt, Human
uuucaacgcagcccu

SEQ ID NO: 1792662 - RNA, 16 nt, Human
uuucaacgcagcccug

SEQ ID NO: 1792663 - RNA, 20 nt, Human
uuucaacgcagcccugcuuu

SEQ ID NO: 1792664 - RNA, 19 nt, Human
uuuauuuaguuccuugagu

SEQ ID NO: 1792665 - RNA, 11 nt, Human
uuucagugagg

SEQ ID NO: 1792666 - RNA, 13 nt, Human
uuucaguguacau

SEQ ID NO: 1792667 - RNA, 14 nt, Human
uuucaguguacaug

SEQ ID NO: 1792668 - RNA, 23 nt, Human
uuucagcaccuacaguguacagu

SEQ ID NO: 1792669 - RNA, 14 nt, Human
uuucauuuagguga

SEQ ID NO: 1792670 - RNA, 18 nt, Human
uuucauuuaggugaggaa

SEQ ID NO: 1792671 - RNA, 12 nt, Human
uuucaauaggaa

SEQ ID NO: 1792672 - RNA, 14 nt, Human
uuucaauaggaaaa

SEQ ID NO: 1792673 - RNA, 17 nt, Human
uuucaauaggaaaaacu

SEQ ID NO: 1792674 - RNA, 19 nt, Human
uuucaauaggaaaaacuga

SEQ ID NO: 1792675 - RNA, 22 nt, Human
uuucacaaccuucuguggcuca

SEQ ID NO: 1792676 - RNA, 16 nt, Human
uuucacaaccuucugu

SEQ ID NO: 1792677 - RNA, 18 nt, Human
uuucagauauaaaagacu

SEQ ID NO: 1792678 - RNA, 16 nt, Human
uuucagauauaaaaga

SEQ ID NO: 1792679 - RNA, 14 nt, Human
uuucagauauaaaa

SEQ ID NO: 1792680 - RNA, 15 nt, Human
uuuacagcugccugc

SEQ ID NO: 1792681 - RNA, 16 nt, Human
uuuacagcugccugca

SEQ ID NO: 1792682 - RNA, 21 nt, Human
uuuaauagcgucauaacuaga

SEQ ID NO: 1792683 - RNA, 22 nt, Human
uuuaauagcgucauaacuagaa

SEQ ID NO: 1792684 - RNA, 14 nt, Human
uuuagaaauauaau

SEQ ID NO: 1792685 - RNA, 19 nt, Human
uuuacuucuuauacauuug

SEQ ID NO: 1792686 - RNA, 22 nt, Human
uuuacuucuuauacauuugaua

SEQ ID NO: 1792687 - RNA, 12 nt, Human
uuuagacagagu

SEQ ID NO: 1792688 - RNA, 21 nt, Human
uuuauaaaaauaaaaaacacu

SEQ ID NO: 1792689 - RNA, 23 nt, Human
uuuauaaaaauaaaaaacacugg

SEQ ID NO: 1792690 - RNA, 19 nt, Human
uuuaacucuauaauguguu

SEQ ID NO: 1792691 - RNA, 23 nt, Human
uuuaacaacuaugauuuggaaaa

SEQ ID NO: 1792692 - RNA, 18 nt, Human
uuguuuggagacagaguc

SEQ ID NO: 1792693 - RNA, 18 nt, Human
uuuaacagaaauguacag

SEQ ID NO: 1792694 - RNA, 18 nt, Human
uuuaaguuacacauuuuu

SEQ ID NO: 1792695 - RNA, 20 nt, Human
uuuaagacgaaacauuuguu

SEQ ID NO: 1792696 - RNA, 19 nt, Human
uuuaagacauuuuuggaag

SEQ ID NO: 1792697 - RNA, 22 nt, Human
uuuaagaaaaaggaugcacaga

SEQ ID NO: 1792698 - RNA, 18 nt, Human
uuuaagaaaaaggaugca

SEQ ID NO: 1792699 - RNA, 20 nt, Human
uuguuucuuucucugaggac

SEQ ID NO: 1792700 - RNA, 22 nt, Human
uuguuaguaugaggcauuuguu

SEQ ID NO: 1792701 - RNA, 20 nt, Human
uuguuagugugucuuagugu

SEQ ID NO: 1792702 - RNA, 19 nt, Human
uuguguuucuuuaguuuuu

SEQ ID NO: 1792703 - RNA, 19 nt, Human
uuguuaauaaaaguacaug

SEQ ID NO: 1792704 - RNA, 14 nt, Human
uuguuaauaaaagu

SEQ ID NO: 1792705 - RNA, 21 nt, Human
uuguuaauaaaaguacauguu

SEQ ID NO: 1792706 - RNA, 14 nt, Human
uuguuacauuuuua

SEQ ID NO: 1792707 - RNA, 21 nt, Human
uuguuaguaugaggcauuugu

SEQ ID NO: 1792708 - RNA, 19 nt, Human
uuguuaguaugaggcauuu

SEQ ID NO: 1792709 - RNA, 21 nt, Human
uuguguuuauauauaagccaa

SEQ ID NO: 1792710 - RNA, 23 nt, Human
uuguggauuuaacagaaauguac

SEQ ID NO: 1792711 - RNA, 22 nt, Human
uuguggauuuaacagaaaugua

SEQ ID NO: 1792712 - RNA, 21 nt, Human
uuguggauuuaacagaaaugu

SEQ ID NO: 1792713 - RNA, 20 nt, Human
uuguggauuuaacagaaaug

SEQ ID NO: 1792714 - RNA, 16 nt, Human
uuguggacacagcucu

SEQ ID NO: 1792715 - RNA, 21 nt, Human
uuguggaaaaugaaaauuagg

SEQ ID NO: 1792716 - RNA, 17 nt, Human
uuguggacacagcucuu

SEQ ID NO: 1792717 - RNA, 16 nt, Human
uugugccagaaugcuu

SEQ ID NO: 1792718 - RNA, 21 nt, Human
uugugccagaaugcuuuagga

SEQ ID NO: 1792719 - RNA, 12 nt, Human
uugugccccugc

SEQ ID NO: 1792720 - RNA, 12 nt, Human
uugugcauuugg

SEQ ID NO: 1792721 - RNA, 23 nt, Human
uugugcauuaucuagauacugua

SEQ ID NO: 1792722 - RNA, 22 nt, Human
uugugcauuaucuagauacugu

SEQ ID NO: 1792723 - RNA, 17 nt, Human
uugugcauuaucuagau

SEQ ID NO: 1792724 - RNA, 19 nt, Human
uuguauucucuccuguacc

SEQ ID NO: 1792725 - RNA, 16 nt, Human
uuguauucucuccugu

SEQ ID NO: 1792726 - RNA, 15 nt, Human
uuguauucucuccug

SEQ ID NO: 1792727 - RNA, 21 nt, Human
uuguauucagaguugaugguu

SEQ ID NO: 1792728 - RNA, 21 nt, Human
uugucugaagucacugcacag

SEQ ID NO: 1792729 - RNA, 15 nt, Human
uugucuuaaaaagug

SEQ ID NO: 1792730 - RNA, 20 nt, Human
uugucugaagucacugcaca

SEQ ID NO: 1792731 - RNA, 14 nt, Human
uugugaaaugaugg

SEQ ID NO: 1792732 - RNA, 12 nt, Human
uugugauuuuug

SEQ ID NO: 1792733 - RNA, 17 nt, Human
uugugauuuuuguaauu

SEQ ID NO: 1792734 - RNA, 16 nt, Human
uugugauuuuuguaau

SEQ ID NO: 1792735 - RNA, 20 nt, Human
uugugaaaggaaagaggcuc

SEQ ID NO: 1792736 - RNA, 22 nt, Human
uugucuuaaaaaguggaaaaau

SEQ ID NO: 1792737 - RNA, 22 nt, Human
uuggguucaagcgauucuucug

SEQ ID NO: 1792738 - RNA, 19 nt, Human
uugcacguauuuuaauagc

SEQ ID NO: 1792739 - RNA, 13 nt, Human
uuggucuguguga

SEQ ID NO: 1792740 - RNA, 16 nt, Human
uuggucugugagaugc

SEQ ID NO: 1792741 - RNA, 22 nt, Human
uuguaaaaauuaaaaguuaugg

SEQ ID NO: 1792742 - RNA, 21 nt, Human
uuggugaacauugcaauagaa

SEQ ID NO: 1792743 - RNA, 17 nt, Human
uuguaaauagcucaggu

SEQ ID NO: 1792744 - RNA, 16 nt, Human
uuguaaaugugguaaa

SEQ ID NO: 1792745 - RNA, 21 nt, Human
uuguaaaugugguaaagaguu

SEQ ID NO: 1792746 - RNA, 20 nt, Human
uuguaaaagcauuuuguaau

SEQ ID NO: 1792747 - RNA, 19 nt, Human
uuguaaaagcauuuuguaa

SEQ ID NO: 1792748 - RNA, 18 nt, Human
uuguaaaagcauuuugua

SEQ ID NO: 1792749 - RNA, 17 nt, Human
uuguaaaagcauuuugu

SEQ ID NO: 1792750 - RNA, 18 nt, Human
uuguacauaaugcgugca

SEQ ID NO: 1792751 - RNA, 23 nt, Human
uuguaaauuaacuuuuauaaacu

SEQ ID NO: 1792752 - RNA, 18 nt, Human
uuguaaauuaacuuuuau

SEQ ID NO: 1792753 - RNA, 16 nt, Human
uuguaaauuaacuuuu

SEQ ID NO: 1792754 - RNA, 15 nt, Human
uuguaaauuaacuuu

SEQ ID NO: 1792755 - RNA, 13 nt, Human
uuuuuuuugacaa

SEQ ID NO: 1792756 - RNA, 11 nt, Human
uuuuuuuacua

SEQ ID NO: 1792757 - RNA, 13 nt, Human
uuuuuuccacuua

SEQ ID NO: 1792758 - RNA, 12 nt, Human
uuuuuuuuaaga

SEQ ID NO: 1792759 - RNA, 15 nt, Human
uuuuucaguuuucag

SEQ ID NO: 1792760 - RNA, 12 nt, Human
uuuuucaguuuu

SEQ ID NO: 1792761 - RNA, 20 nt, Human
uuuuuaauaaagacaggguu

SEQ ID NO: 1792762 - RNA, 17 nt, Human
uuuuuaauaaagacagg

SEQ ID NO: 1792763 - RNA, 18 nt, Human
uuuuuaaguuacacauuu

SEQ ID NO: 1792764 - RNA, 13 nt, Human
uuuuuaaucuuua

SEQ ID NO: 1792765 - RNA, 23 nt, Human
uuuuuaagugcugcauuuaaaag

SEQ ID NO: 1792766 - RNA, 22 nt, Human
uuuuuaagugcugcauuuaaaa

SEQ ID NO: 1792767 - RNA, 19 nt, Human
uuuuuaagugcugcauuua

SEQ ID NO: 1792768 - RNA, 18 nt, Human
uuuuuaagugcugcauuu

SEQ ID NO: 1792769 - RNA, 17 nt, Human
uuuuuaagugcugcauu

SEQ ID NO: 1792770 - RNA, 16 nt, Human
uuuuuaagugcugcau

SEQ ID NO: 1792771 - RNA, 23 nt, Human
uuuuuaagaaaaaggaugcacag

SEQ ID NO: 1792772 - RNA, 12 nt, Human
uuuuuaagaaaa

SEQ ID NO: 1792773 - RNA, 21 nt, Human
uuuuaaaguaacccuacaaaa

SEQ ID NO: 1792774 - RNA, 19 nt, Human
uuuuacaaaaaagaaaaga

SEQ ID NO: 1792775 - RNA, 17 nt, Human
uuuuacaauaaaaucuu

SEQ ID NO: 1792776 - RNA, 19 nt, Human
uuuuacguccaucucuugu

SEQ ID NO: 1792777 - RNA, 15 nt, Human
uuuuacuaauagaca

SEQ ID NO: 1792778 - RNA, 18 nt, Human
uuuuauuuuuagacagag

SEQ ID NO: 1792779 - RNA, 17 nt, Human
uuuucaaaauaaaaaug

SEQ ID NO: 1792780 - RNA, 21 nt, Human
uuuuauacauaaacaagacca

SEQ ID NO: 1792781 - RNA, 13 nt, Human
uuuuauacauaaa

SEQ ID NO: 1792782 - RNA, 21 nt, Human
uuuucaaaauuguuacaaauu

SEQ ID NO: 1792783 - RNA, 18 nt, Human
uuuucccuauuagagaag

SEQ ID NO: 1792784 - RNA, 22 nt, Human
uuuucccuauuagagaagagau

SEQ ID NO: 1792785 - RNA, 17 nt, Human
uuuucagauauaaaaga

SEQ ID NO: 1792786 - RNA, 15 nt, Human
uuuucagauauaaaa

SEQ ID NO: 1792787 - RNA, 13 nt, Human
uuuucuacucgag

SEQ ID NO: 1792788 - RNA, 20 nt, Human
uuuucuacucgaguuacaga

SEQ ID NO: 1792789 - RNA, 22 nt, Human
uuuucuacucgaguuacagaca

SEQ ID NO: 1792790 - RNA, 23 nt, Human
uuuucuacucgaguuacagacaa

SEQ ID NO: 1792791 - RNA, 16 nt, Human
uuuucuuucagccaag

SEQ ID NO: 1792792 - RNA, 22 nt, Human
uuuucuuguguguuuauuguca

SEQ ID NO: 1792793 - RNA, 13 nt, Human
uuuucuucucccu

SEQ ID NO: 1792794 - RNA, 21 nt, Human
uuugagugccuuacacaaugg

SEQ ID NO: 1792795 - RNA, 17 nt, Human
uuuccguuaaaauacca

SEQ ID NO: 1792796 - RNA, 15 nt, Human
uuuccguuaaaauac

SEQ ID NO: 1792797 - RNA, 12 nt, Human
uuuggaaaauaa

SEQ ID NO: 1792798 - RNA, 16 nt, Human
uuuggaaagacuggac

SEQ ID NO: 1792799 - RNA, 13 nt, Human
uuuggacccugag

SEQ ID NO: 1792800 - RNA, 18 nt, Human
uuugcauaacguauaaaa

SEQ ID NO: 1792801 - RNA, 15 nt, Human
uuuggucaacacuaa

SEQ ID NO: 1792802 - RNA, 17 nt, Human
uuuggucuacacugugc

SEQ ID NO: 1792803 - RNA, 14 nt, Human
uuuguauuuuuagu

SEQ ID NO: 1792804 - RNA, 15 nt, Human
uuuguugucagcuga

SEQ ID NO: 1792805 - RNA, 22 nt, Human
uuuguuaguaugaggcauuugu

SEQ ID NO: 1792806 - RNA, 20 nt, Human
uuuuaaacccuauugguaaa

SEQ ID NO: 1792807 - RNA, 23 nt, Human
uuuuaaaauccacuuuaucuuga

SEQ ID NO: 1792808 - RNA, 14 nt, Human
uuuuaaaauccacu

SEQ ID NO: 1792809 - RNA, 16 nt, Human
uuuguugucagcugaa

SEQ ID NO: 1792810 - RNA, 15 nt, Human
ugcauguuugugauu

SEQ ID NO: 1792811 - RNA, 17 nt, Human
ugcaugguuuagaaagc

SEQ ID NO: 1792812 - RNA, 15 nt, Human
ugcauccuccgccuc

SEQ ID NO: 1792813 - RNA, 19 nt, Human
ugcagauaaacaguaguga

SEQ ID NO: 1792814 - RNA, 14 nt, Human
ugcauccuccgccu

SEQ ID NO: 1792815 - RNA, 15 nt, Human
ugccaccacgcccgg

SEQ ID NO: 1792816 - RNA, 18 nt, Human
ugcauuaucuagauacug

SEQ ID NO: 1792817 - RNA, 17 nt, Human
ugcauuaucuagauacu

SEQ ID NO: 1792818 - RNA, 12 nt, Human
ugcauuaucuag

SEQ ID NO: 1792819 - RNA, 12 nt, Human
ugccauccaggu

SEQ ID NO: 1792820 - RNA, 20 nt, Human
ugccauccagguucagcuug

SEQ ID NO: 1792821 - RNA, 15 nt, Human
ugccauccagguuca

SEQ ID NO: 1792822 - RNA, 17 nt, Human
ugccagguuuuuggucu

SEQ ID NO: 1792823 - RNA, 12 nt, Human
ugccaggaagcc

SEQ ID NO: 1792824 - RNA, 16 nt, Human
ugccaggaagccagca

SEQ ID NO: 1792825 - RNA, 18 nt, Human
ugccaggaagccagcagg

SEQ ID NO: 1792826 - RNA, 19 nt, Human
ugccaggaagccagcaggc

SEQ ID NO: 1792827 - RNA, 16 nt, Human
ugccauguuggccagg

SEQ ID NO: 1792828 - RNA, 20 nt, Human
ugcccaccuggccucugcac

SEQ ID NO: 1792829 - RNA, 15 nt, Human
ugccauguuggccag

SEQ ID NO: 1792830 - RNA, 12 nt, Human
ugccauguuggc

SEQ ID NO: 1792831 - RNA, 18 nt, Human
ugcccacgcuggagugca

SEQ ID NO: 1792832 - RNA, 13 nt, Human
ugcccacucccug

SEQ ID NO: 1792833 - RNA, 15 nt, Human
ugccaugugccaggu

SEQ ID NO: 1792834 - RNA, 14 nt, Human
ugccaugugccagg

SEQ ID NO: 1792835 - RNA, 23 nt, Human
ugccaugaggaacaaggcaaggc

SEQ ID NO: 1792836 - RNA, 20 nt, Human
ugccaugaggaacaaggcaa

SEQ ID NO: 1792837 - RNA, 18 nt, Human
ugcccuggauccaucagg

SEQ ID NO: 1792838 - RNA, 21 nt, Human
ugcccuggugcugccacacuu

SEQ ID NO: 1792839 - RNA, 20 nt, Human
ugcccuggugcugccacacu

SEQ ID NO: 1792840 - RNA, 18 nt, Human
ugcccuggugcugccaca

SEQ ID NO: 1792841 - RNA, 15 nt, Human
ugcccugguuuccug

SEQ ID NO: 1792842 - RNA, 15 nt, Human
ugccgucuaccugag

SEQ ID NO: 1792843 - RNA, 16 nt, Human
ugccgucuaccugagg

SEQ ID NO: 1792844 - RNA, 17 nt, Human
ugccgucuaccugaggg

SEQ ID NO: 1792845 - RNA, 19 nt, Human
ugccgucuaccugaggggc

SEQ ID NO: 1792846 - RNA, 19 nt, Human
ugcccugcgggucacagga

SEQ ID NO: 1792847 - RNA, 18 nt, Human
ugcccugcugagucccag

SEQ ID NO: 1792848 - RNA, 22 nt, Human
ugcccugcugagucccaggcug

SEQ ID NO: 1792849 - RNA, 23 nt, Human
ugcccugcugagucccaggcuga

SEQ ID NO: 1792850 - RNA, 21 nt, Human
ugcccugcccaccuggccucu

SEQ ID NO: 1792851 - RNA, 19 nt, Human
ugcccuaaaguguauuuuu

SEQ ID NO: 1792852 - RNA, 17 nt, Human
ugcccuaaaguguauuu

SEQ ID NO: 1792853 - RNA, 22 nt, Human
ugcccugcccaccuggccucug

SEQ ID NO: 1792854 - RNA, 23 nt, Human
ugcccugcccaccuggccucugc

SEQ ID NO: 1792855 - RNA, 22 nt, Human
ugccuccuuugugaggaagccg

SEQ ID NO: 1792856 - RNA, 21 nt, Human
ugccuccuuugugaggaagcc

SEQ ID NO: 1792857 - RNA, 20 nt, Human
ugccuccuuugugaggaagc

SEQ ID NO: 1792858 - RNA, 13 nt, Human
ugccucugccugu

SEQ ID NO: 1792859 - RNA, 14 nt, Human
ugccucugccuguc

SEQ ID NO: 1792860 - RNA, 18 nt, Human
ugccucugccugucuccc

SEQ ID NO: 1792861 - RNA, 13 nt, Human
ugccucugggacu

SEQ ID NO: 1792862 - RNA, 19 nt, Human
ugccugguggcagcugcgg

SEQ ID NO: 1792863 - RNA, 18 nt, Human
ugccugguggcagcugcg

SEQ ID NO: 1792864 - RNA, 17 nt, Human
ugccugguggcagcugc

SEQ ID NO: 1792865 - RNA, 13 nt, Human
ugccugcccaggc

SEQ ID NO: 1792866 - RNA, 21 nt, Human
ugccucuucucuacucuaggg

SEQ ID NO: 1792867 - RNA, 13 nt, Human
ugccucuuccucc

SEQ ID NO: 1792868 - RNA, 22 nt, Human
ugauuuuuuuuuccuucagugc

SEQ ID NO: 1792869 - RNA, 23 nt, Human
ugauuuuuuuuuccuucagugcc

SEQ ID NO: 1792870 - RNA, 16 nt, Human
ugauuuuuuuuuuuca

SEQ ID NO: 1792871 - RNA, 13 nt, Human
ugauuuuuuucca

SEQ ID NO: 1792872 - RNA, 16 nt, Human
ugauuuuuuuuuccuu

SEQ ID NO: 1792873 - RNA, 17 nt, Human
ugauuuuuuuuuccuuc

SEQ ID NO: 1792874 - RNA, 19 nt, Human
ugauuuuuuuuuccuucag

SEQ ID NO: 1792875 - RNA, 20 nt, Human
ugauuuuuuuuuccuucagu

SEQ ID NO: 1792876 - RNA, 16 nt, Human
ugauuuugcuguagaa

SEQ ID NO: 1792877 - RNA, 14 nt, Human
ugauuuugcuguag

SEQ ID NO: 1792878 - RNA, 19 nt, Human
ugauuuugcuguagaagau

SEQ ID NO: 1792879 - RNA, 17 nt, Human
ugauuuugcuguagaag

SEQ ID NO: 1792880 - RNA, 19 nt, Human
ugauuuuuaaagaaaaguu

SEQ ID NO: 1792881 - RNA, 15 nt, Human
ugauuuucauugcug

SEQ ID NO: 1792882 - RNA, 13 nt, Human
ugauuuucauugc

SEQ ID NO: 1792883 - RNA, 17 nt, Human
ugcaacaggcugggcuu

SEQ ID NO: 1792884 - RNA, 16 nt, Human
ugcaacaggcugggcu

SEQ ID NO: 1792885 - RNA, 15 nt, Human
ugcaacaggcugggc

SEQ ID NO: 1792886 - RNA, 14 nt, Human
ugcaacaggcuggg

SEQ ID NO: 1792887 - RNA, 20 nt, Human
ugcaacaggcugggcuucag

SEQ ID NO: 1792888 - RNA, 19 nt, Human
ugcaacaggcugggcuuca

SEQ ID NO: 1792889 - RNA, 14 nt, Human
ugcaaccuccgccu

SEQ ID NO: 1792890 - RNA, 13 nt, Human
ugcaaccuccgcc

SEQ ID NO: 1792891 - RNA, 16 nt, Human
ugcaaccauuugaaac

SEQ ID NO: 1792892 - RNA, 21 nt, Human
ugcaaccuccgccucuugggu

SEQ ID NO: 1792893 - RNA, 20 nt, Human
ugcaaccuccgccucuuggg

SEQ ID NO: 1792894 - RNA, 18 nt, Human
ugcaaccuccgccucuug

SEQ ID NO: 1792895 - RNA, 19 nt, Human
ugcaaccugauugugucuc

SEQ ID NO: 1792896 - RNA, 20 nt, Human
ugcaaccugauugugucucu

SEQ ID NO: 1792897 - RNA, 14 nt, Human
ugcaacuucugccu

SEQ ID NO: 1792898 - RNA, 13 nt, Human
ugcaacuucugcc

SEQ ID NO: 1792899 - RNA, 16 nt, Human
ugcaacuuguaaaugu

SEQ ID NO: 1792900 - RNA, 18 nt, Human
ugcaacuuguaaaugugg

SEQ ID NO: 1792901 - RNA, 18 nt, Human
ugcaacuuuguauaaaag

SEQ ID NO: 1792902 - RNA, 18 nt, Human
ugcaaccuucgccaccug

SEQ ID NO: 1792903 - RNA, 21 nt, Human
ugcaaccuucgccaccugggu

SEQ ID NO: 1792904 - RNA, 22 nt, Human
ugcaaccugauugugucucuug

SEQ ID NO: 1792905 - RNA, 21 nt, Human
ugcaaugacacagucuuggcu

SEQ ID NO: 1792906 - RNA, 13 nt, Human
ugcaaugaccuuu

SEQ ID NO: 1792907 - RNA, 16 nt, Human
ugcaaugaccuuucaa

SEQ ID NO: 1792908 - RNA, 17 nt, Human
ugcaaugaccuuucaau

SEQ ID NO: 1792909 - RNA, 19 nt, Human
ugcaaugaccuuucaauag

SEQ ID NO: 1792910 - RNA, 22 nt, Human
ugcaaugaccuuucaauaggaa

SEQ ID NO: 1792911 - RNA, 23 nt, Human
ugcaaugaccuuucaauaggaaa

SEQ ID NO: 1792912 - RNA, 16 nt, Human
ugcaauggcagccuug

SEQ ID NO: 1792913 - RNA, 15 nt, Human
ugcaauggcagccuu

SEQ ID NO: 1792914 - RNA, 14 nt, Human
ugcaauggcagccu

SEQ ID NO: 1792915 - RNA, 13 nt, Human
ugcaauggcagcc

SEQ ID NO: 1792916 - RNA, 15 nt, Human
ugcacaaacagaggc

SEQ ID NO: 1792917 - RNA, 16 nt, Human
ugcacaaacagaggcc

SEQ ID NO: 1792918 - RNA, 19 nt, Human
ugcacagaguuguuacauu

SEQ ID NO: 1792919 - RNA, 18 nt, Human
ugcacagaguuguuacau

SEQ ID NO: 1792920 - RNA, 15 nt, Human
ugcacaaagcccuuc

SEQ ID NO: 1792921 - RNA, 17 nt, Human
ugcacaaagcccuucca

SEQ ID NO: 1792922 - RNA, 17 nt, Human
ugcacagaguuguuaca

SEQ ID NO: 1792923 - RNA, 20 nt, Human
ugcacaaacagaggccgcca

SEQ ID NO: 1792924 - RNA, 17 nt, Human
ugcacaaacagaggccg

SEQ ID NO: 1792925 - RNA, 19 nt, Human
ugcacaaacagaggccgcc

SEQ ID NO: 1792926 - RNA, 19 nt, Human
ugcagagguccacaacaca

SEQ ID NO: 1792927 - RNA, 21 nt, Human
ugcacugacauuguuggccaa

SEQ ID NO: 1792928 - RNA, 18 nt, Human
ugcacugacauuguuggc

SEQ ID NO: 1792929 - RNA, 15 nt, Human
ugcacagugcaucuc

SEQ ID NO: 1792930 - RNA, 20 nt, Human
ugcacagaguuguuacauuu

SEQ ID NO: 1792931 - RNA, 16 nt, Human
ugcacagugcaucuca

SEQ ID NO: 1792932 - RNA, 17 nt, Human
ugcacagugcaucucag

SEQ ID NO: 1792933 - RNA, 18 nt, Human
ugcaccggcuggccuggc

SEQ ID NO: 1792934 - RNA, 19 nt, Human
ugcaccggcuggccuggcc

SEQ ID NO: 1792935 - RNA, 20 nt, Human
ugcaccggcuggccuggccc

SEQ ID NO: 1792936 - RNA, 22 nt, Human
ugcaccuggaauauauaaccag

SEQ ID NO: 1792937 - RNA, 20 nt, Human
ugcaccuggaauauauaacc

SEQ ID NO: 1792938 - RNA, 17 nt, Human
ugcaccuggaauauaua

SEQ ID NO: 1792939 - RNA, 21 nt, Human
ugcaccggcuggccuggcccc

SEQ ID NO: 1792940 - RNA, 15 nt, Human
ucuugaacuccuggc

SEQ ID NO: 1792941 - RNA, 16 nt, Human
ucuugaauaauguaag

SEQ ID NO: 1792942 - RNA, 17 nt, Human
ucuugaauuguaaggaa

SEQ ID NO: 1792943 - RNA, 20 nt, Human
ugaccauucuccaccugcca

SEQ ID NO: 1792944 - RNA, 21 nt, Human
ugaccauucuccaccugccag

SEQ ID NO: 1792945 - RNA, 22 nt, Human
ugaccauucuccaccugccagg

SEQ ID NO: 1792946 - RNA, 23 nt, Human
ugaccauucuccaccugccaggg

SEQ ID NO: 1792947 - RNA, 12 nt, Human
ugaccucugccu

SEQ ID NO: 1792948 - RNA, 23 nt, Human
ugaccucugcagcaauaaagcag

SEQ ID NO: 1792949 - RNA, 21 nt, Human
ugaccucugcagcaauaaagc

SEQ ID NO: 1792950 - RNA, 18 nt, Human
ugaccucugcagcaauaa

SEQ ID NO: 1792951 - RNA, 14 nt, Human
ugaccuuucaauag

SEQ ID NO: 1792952 - RNA, 15 nt, Human
ugaccuuucaauagg

SEQ ID NO: 1792953 - RNA, 16 nt, Human
ugaccuuucaauagga

SEQ ID NO: 1792954 - RNA, 22 nt, Human
ugaccucaggugauccacccac

SEQ ID NO: 1792955 - RNA, 16 nt, Human
ugaccucugcagcaau

SEQ ID NO: 1792956 - RNA, 13 nt, Human
ugaccucugcagc

SEQ ID NO: 1792957 - RNA, 15 nt, Human
ugacugaauuucuuu

SEQ ID NO: 1792958 - RNA, 14 nt, Human
ugacugaauuucuu

SEQ ID NO: 1792959 - RNA, 13 nt, Human
ugacugaauuucu

SEQ ID NO: 1792960 - RNA, 17 nt, Human
ugacgccaucccagccc

SEQ ID NO: 1792961 - RNA, 18 nt, Human
ugacgccaucccagcccc

SEQ ID NO: 1792962 - RNA, 19 nt, Human
ugacgccaucccagcccca

SEQ ID NO: 1792963 - RNA, 20 nt, Human
ugacgccaucccagccccaa

SEQ ID NO: 1792964 - RNA, 18 nt, Human
ugaccuuucaauaggaaa

SEQ ID NO: 1792965 - RNA, 22 nt, Human
ugaccuuucaauaggaaaaacu

SEQ ID NO: 1792966 - RNA, 13 nt, Human
ugacgccauccca

SEQ ID NO: 1792967 - RNA, 14 nt, Human
ugacgccaucccag

SEQ ID NO: 1792968 - RNA, 15 nt, Human
ugacgccaucccagc

SEQ ID NO: 1792969 - RNA, 16 nt, Human
ugacgccaucccagcc

SEQ ID NO: 1792970 - RNA, 17 nt, Human
ugagaguagagucacug

SEQ ID NO: 1792971 - RNA, 14 nt, Human
ugagacucugucuc

SEQ ID NO: 1792972 - RNA, 13 nt, Human
ugagacucugucu

SEQ ID NO: 1792973 - RNA, 12 nt, Human
ugagacucuguc

SEQ ID NO: 1792974 - RNA, 23 nt, Human
ugagaggcauccaguaucuugaa

SEQ ID NO: 1792975 - RNA, 22 nt, Human
ugagaggcauccaguaucuuga

SEQ ID NO: 1792976 - RNA, 17 nt, Human
ugagaaaucuaaaaaac

SEQ ID NO: 1792977 - RNA, 13 nt, Human
ugagaaaucuaaa

SEQ ID NO: 1792978 - RNA, 16 nt, Human
ugacuguacuccuccc

SEQ ID NO: 1792979 - RNA, 17 nt, Human
ugacuguacuccuccca

SEQ ID NO: 1792980 - RNA, 18 nt, Human
ugacuguacuccucccag

SEQ ID NO: 1792981 - RNA, 22 nt, Human
ugacuguacuccucccaggcgc

SEQ ID NO: 1792982 - RNA, 12 nt, Human
ugagacccuguc

SEQ ID NO: 1792983 - RNA, 16 nt, Human
ugagacagcucugcau

SEQ ID NO: 1792984 - RNA, 14 nt, Human
ugagacagcucugc

SEQ ID NO: 1792985 - RNA, 15 nt, Human
ugagccucagcaucc

SEQ ID NO: 1792986 - RNA, 13 nt, Human
ugagccucagcau

SEQ ID NO: 1792987 - RNA, 20 nt, Human
ugagaugcuagaacucccuu

SEQ ID NO: 1792988 - RNA, 16 nt, Human
ugagaugcuagaacuc

SEQ ID NO: 1792989 - RNA, 14 nt, Human
ugagaugcuagaac

SEQ ID NO: 1792990 - RNA, 13 nt, Human
ugagcaucaggcc

SEQ ID NO: 1792991 - RNA, 13 nt, Human
ugagccccaaaag

SEQ ID NO: 1792992 - RNA, 14 nt, Human
ugagcaucaggcca

SEQ ID NO: 1792993 - RNA, 15 nt, Human
ugagcaucaggccag

SEQ ID NO: 1792994 - RNA, 16 nt, Human
ugagcaucaggccagg

SEQ ID NO: 1792995 - RNA, 15 nt, Human
ugauagcacagaccc

SEQ ID NO: 1792996 - RNA, 16 nt, Human
ugauagcacagacccu

SEQ ID NO: 1792997 - RNA, 17 nt, Human
ugauagcacagacccug

SEQ ID NO: 1792998 - RNA, 18 nt, Human
ugauagcacagacccugc

SEQ ID NO: 1792999 - RNA, 20 nt, Human
ugauagcacagacccugccc

SEQ ID NO: 1793000 - RNA, 21 nt, Human
ugauagcacagacccugcccu

SEQ ID NO: 1793001 - RNA, 22 nt, Human
ugauagguuauuuugauguaaa

SEQ ID NO: 1793002 - RNA, 18 nt, Human
ugauagguauaaguggug

SEQ ID NO: 1793003 - RNA, 22 nt, Human
ugauagcacagacccugcccug

SEQ ID NO: 1793004 - RNA, 23 nt, Human
ugauagcacagacccugcccugu

SEQ ID NO: 1793005 - RNA, 18 nt, Human
ugagucgaggacagggag

SEQ ID NO: 1793006 - RNA, 16 nt, Human
ugaguugauucagcuc

SEQ ID NO: 1793007 - RNA, 19 nt, Human
ugaguugauucagcucugc

SEQ ID NO: 1793008 - RNA, 16 nt, Human
ugagucgaggacaggg

SEQ ID NO: 1793009 - RNA, 15 nt, Human
ugagucgaggacagg

SEQ ID NO: 1793010 - RNA, 21 nt, Human
ugaguugauagcacagacccu

SEQ ID NO: 1793011 - RNA, 23 nt, Human
ugaguugauagcacagacccugc

SEQ ID NO: 1793012 - RNA, 11 nt, Human
ugaguccuggc

SEQ ID NO: 1793013 - RNA, 18 nt, Human
ugaguccuggcaugggaa

SEQ ID NO: 1793014 - RNA, 14 nt, Human
ugagucgaggacag

SEQ ID NO: 1793015 - RNA, 19 nt, Human
ugaguccuggcaugggaau

SEQ ID NO: 1793016 - RNA, 22 nt, Human
ugaguccuggcaugggaaugaa

SEQ ID NO: 1793017 - RNA, 19 nt, Human
ugagguuucaaaccucccu

SEQ ID NO: 1793018 - RNA, 21 nt, Human
ugaguccccuguuuguuucug

SEQ ID NO: 1793019 - RNA, 16 nt, Human
ugaggugcuauguucu

SEQ ID NO: 1793020 - RNA, 15 nt, Human
ugaggugcuauguuc

SEQ ID NO: 1793021 - RNA, 23 nt, Human
ugaggacuuaaaauauuccugca

SEQ ID NO: 1793022 - RNA, 11 nt, Human
ugaggcugggc

SEQ ID NO: 1793023 - RNA, 15 nt, Human
ugaggucuguucuuu

SEQ ID NO: 1793024 - RNA, 14 nt, Human
ugaggucuguucuu

SEQ ID NO: 1793025 - RNA, 20 nt, Human
ugaggucuguucuuuccaaa

SEQ ID NO: 1793026 - RNA, 20 nt, Human
ugaugaugaaaugaggucag

SEQ ID NO: 1793027 - RNA, 23 nt, Human
ugaugaucuuugcagacaggcaa

SEQ ID NO: 1793028 - RNA, 22 nt, Human
ugaugaucuuugcagacaggca

SEQ ID NO: 1793029 - RNA, 14 nt, Human
ugaugccaugagga

SEQ ID NO: 1793030 - RNA, 20 nt, Human
ugaucuuugcagacaggcaa

SEQ ID NO: 1793031 - RNA, 19 nt, Human
ugaucuuugcagacaggca

SEQ ID NO: 1793032 - RNA, 21 nt, Human
ugaucugaugcaagcaagaaa

SEQ ID NO: 1793033 - RNA, 23 nt, Human
ugaucuuugcagacaggcaagca

SEQ ID NO: 1793034 - RNA, 21 nt, Human
ugaucuuugcagacaggcaag

SEQ ID NO: 1793035 - RNA, 13 nt, Human
ugauguacaugua

SEQ ID NO: 1793036 - RNA, 19 nt, Human
ugaugcuucuucagagacu

SEQ ID NO: 1793037 - RNA, 21 nt, Human
ugaugcuucuucagagacucc

SEQ ID NO: 1793038 - RNA, 22 nt, Human
ugaugcuucuucagagacuccu

SEQ ID NO: 1793039 - RNA, 17 nt, Human
ugauauaaguguguguu

SEQ ID NO: 1793040 - RNA, 23 nt, Human
ugauauaaguguguguuuuucau

SEQ ID NO: 1793041 - RNA, 24 nt, Human
ugauaguuguaccgcaaugugacu

SEQ ID NO: 1793042 - RNA, 22 nt, Human
ugaucacggcucacugcagccu

SEQ ID NO: 1793043 - RNA, 19 nt, Human
ugauaugcaguuuuccuua

SEQ ID NO: 1793044 - RNA, 20 nt, Human
ugauccacccaccucagccu

SEQ ID NO: 1793045 - RNA, 16 nt, Human
ugauccacccaccuca

SEQ ID NO: 1793046 - RNA, 15 nt, Human
ugauccacccaccuc

SEQ ID NO: 1793047 - RNA, 21 nt, Human
ugauccaagcuggucccacuc

SEQ ID NO: 1793048 - RNA, 24 nt, Human
ugaucauccacugugccaugugcc

SEQ ID NO: 1793049 - RNA, 13 nt, Human
ugaucauccacug

SEQ ID NO: 1793050 - RNA, 22 nt, Human
ugauccacccaccucagccucc

SEQ ID NO: 1793051 - RNA, 21 nt, Human
ugauccacccaccucagccuc

SEQ ID NO: 1793052 - RNA, 19 nt, Human
ugaucuaggaagacuuugg

SEQ ID NO: 1793053 - RNA, 21 nt, Human
ugaucuaggaagacuuuggaa

SEQ ID NO: 1793054 - RNA, 20 nt, Human
ugaucugaugcaagcaagaa

SEQ ID NO: 1793055 - RNA, 22 nt, Human
ugcuuccagugaggcucugccc

SEQ ID NO: 1793056 - RNA, 23 nt, Human
ugcuuccagugaggcucugcccu

SEQ ID NO: 1793057 - RNA, 18 nt, Human
ugcuuaacuucacauauu

SEQ ID NO: 1793058 - RNA, 17 nt, Human
ugcuuaacuucacauau

SEQ ID NO: 1793059 - RNA, 14 nt, Human
ugcuuaacuucaca

SEQ ID NO: 1793060 - RNA, 13 nt, Human
ugcuuaacuucac

SEQ ID NO: 1793061 - RNA, 19 nt, Human
ugcuuaacuucacauauug

SEQ ID NO: 1793062 - RNA, 13 nt, Human
ugcuuuggaaauc

SEQ ID NO: 1793063 - RNA, 17 nt, Human
ugcuuuggaaaacccag

SEQ ID NO: 1793064 - RNA, 18 nt, Human
ugcuugugaaaggaaaga

SEQ ID NO: 1793065 - RNA, 13 nt, Human
ugcuucuucagag

SEQ ID NO: 1793066 - RNA, 16 nt, Human
ugcuuguuaacugagu

SEQ ID NO: 1793067 - RNA, 14 nt, Human
ugcuuguuaacuga

SEQ ID NO: 1793068 - RNA, 15 nt, Human
uggaacacucugaga

SEQ ID NO: 1793069 - RNA, 17 nt, Human
uggaacacucugagacu

SEQ ID NO: 1793070 - RNA, 23 nt, Human
uggacaggcauguucucugagga

SEQ ID NO: 1793071 - RNA, 22 nt, Human
uggacaggcauguucucugagg

SEQ ID NO: 1793072 - RNA, 18 nt, Human
uggacaggcauguucucu

SEQ ID NO: 1793073 - RNA, 19 nt, Human
uggacuaacuugucuuugg

SEQ ID NO: 1793074 - RNA, 20 nt, Human
uggacuaacuugucuuugga

SEQ ID NO: 1793075 - RNA, 19 nt, Human
uggacguguuaugacucca

SEQ ID NO: 1793076 - RNA, 23 nt, Human
uggacguguuaugacuccagaau

SEQ ID NO: 1793077 - RNA, 22 nt, Human
uggcacugcuuccagugaggcu

SEQ ID NO: 1793078 - RNA, 19 nt, Human
uggcacugcuuccagugag

SEQ ID NO: 1793079 - RNA, 22 nt, Human
uggcacuauaauguaagcucua

SEQ ID NO: 1793080 - RNA, 15 nt, Human
uggauuuaacagaaa

SEQ ID NO: 1793081 - RNA, 17 nt, Human
uggauuuaacagaaaug

SEQ ID NO: 1793082 - RNA, 21 nt, Human
uggcacuauaauguaagcucu

SEQ ID NO: 1793083 - RNA, 22 nt, Human
uggaugcagccucacaguccuu

SEQ ID NO: 1793084 - RNA, 13 nt, Human
uggaugcagccuc

SEQ ID NO: 1793085 - RNA, 21 nt, Human
uggaugcagccucacaguccu

SEQ ID NO: 1793086 - RNA, 19 nt, Human
uggaucaaauccagccugc

SEQ ID NO: 1793087 - RNA, 23 nt, Human
uggaggggggaggugggauccuc

SEQ ID NO: 1793088 - RNA, 18 nt, Human
ugggaggaucucuugagc

SEQ ID NO: 1793089 - RNA, 18 nt, Human
ugggaugauuggaggggg

SEQ ID NO: 1793090 - RNA, 16 nt, Human
ugggaaugaaugucag

SEQ ID NO: 1793091 - RNA, 21 nt, Human
ugggaaugaaugucaguguga

SEQ ID NO: 1793092 - RNA, 14 nt, Human
ugggacacccugug

SEQ ID NO: 1793093 - RNA, 15 nt, Human
ugggacacccuguga

SEQ ID NO: 1793094 - RNA, 16 nt, Human
ugggaggaucucuuga

SEQ ID NO: 1793095 - RNA, 14 nt, Human
ugggacagggagga

SEQ ID NO: 1793096 - RNA, 14 nt, Human
ugggcagagcagag

SEQ ID NO: 1793097 - RNA, 15 nt, Human
ugggcagagcagaga

SEQ ID NO: 1793098 - RNA, 17 nt, Human
ugggcagagcagagacc

SEQ ID NO: 1793099 - RNA, 18 nt, Human
ugggcagagcagagacca

SEQ ID NO: 1793100 - RNA, 19 nt, Human
uggggggcugaggugggag

SEQ ID NO: 1793101 - RNA, 16 nt, Human
ugggggccucagugcc

SEQ ID NO: 1793102 - RNA, 17 nt, Human
uggggccaggcuggguc

SEQ ID NO: 1793103 - RNA, 13 nt, Human
uggggcagcuuga

SEQ ID NO: 1793104 - RNA, 23 nt, Human
ugggcuuggggaccagagcugcc

SEQ ID NO: 1793105 - RNA, 17 nt, Human
ugggcuugucuguagau

SEQ ID NO: 1793106 - RNA, 21 nt, Human
ugggcuugucuguagauuuua

SEQ ID NO: 1793107 - RNA, 21 nt, Human
ugggcuucaguggcagcugcu

SEQ ID NO: 1793108 - RNA, 22 nt, Human
ugggcuucaguggcagcugcuu

SEQ ID NO: 1793109 - RNA, 22 nt, Human
ugggcuucauccuccucagauc

SEQ ID NO: 1793110 - RNA, 15 nt, Human
ugggcuucauccucc

SEQ ID NO: 1793111 - RNA, 13 nt, Human
uggcugcugaagg

SEQ ID NO: 1793112 - RNA, 14 nt, Human
uggcugcugaaggc

SEQ ID NO: 1793113 - RNA, 16 nt, Human
uggcugcugaaggcuc

SEQ ID NO: 1793114 - RNA, 17 nt, Human
uggcuccagcuggccgg

SEQ ID NO: 1793115 - RNA, 22 nt, Human
uggccuucggccuccauccuga

SEQ ID NO: 1793116 - RNA, 13 nt, Human
uggccucugcacu

SEQ ID NO: 1793117 - RNA, 23 nt, Human
uggccuucggccuccauccugag

SEQ ID NO: 1793118 - RNA, 22 nt, Human
uggcuuccuaaaauucagugga

SEQ ID NO: 1793119 - RNA, 22 nt, Human
uggcuucccgcucagcccuccc

SEQ ID NO: 1793120 - RNA, 18 nt, Human
uggcuucccgcucagccc

SEQ ID NO: 1793121 - RNA, 19 nt, Human
uggcuucccgcucagcccu

SEQ ID NO: 1793122 - RNA, 20 nt, Human
uggcuucccgcucagcccuc

SEQ ID NO: 1793123 - RNA, 21 nt, Human
uggcuucccgcucagcccucc

SEQ ID NO: 1793124 - RNA, 16 nt, Human
uggcuuuucacugcug

SEQ ID NO: 1793125 - RNA, 18 nt, Human
uggcuuuucacugcuggc

SEQ ID NO: 1793126 - RNA, 19 nt, Human
uggcuuuucacugcuggcu

SEQ ID NO: 1793127 - RNA, 21 nt, Human
uggcuuuucacugcuggcugc

SEQ ID NO: 1793128 - RNA, 22 nt, Human
uggcuuuucacugcuggcugcc

SEQ ID NO: 1793129 - RNA, 14 nt, Human
ugggaaugaagcaa

SEQ ID NO: 1793130 - RNA, 23 nt, Human
uggccucaagugauucuccugcc

SEQ ID NO: 1793131 - RNA, 18 nt, Human
uggccucaagugauucuc

SEQ ID NO: 1793132 - RNA, 23 nt, Human
uggccuagcauacguacacauuu

SEQ ID NO: 1793133 - RNA, 23 nt, Human
uggccuccaaguccacaguggaa

SEQ ID NO: 1793134 - RNA, 13 nt, Human
uggccuccaaguc

SEQ ID NO: 1793135 - RNA, 11 nt, Human
uggccucccaa

SEQ ID NO: 1793136 - RNA, 14 nt, Human
uggccucccaacuc

SEQ ID NO: 1793137 - RNA, 19 nt, Human
uggccucccaacucacccc

SEQ ID NO: 1793138 - RNA, 20 nt, Human
uggccucccaacucacccca

SEQ ID NO: 1793139 - RNA, 21 nt, Human
uggccucccaacucaccccag

SEQ ID NO: 1793140 - RNA, 22 nt, Human
uggccucccaacucaccccagc

SEQ ID NO: 1793141 - RNA, 19 nt, Human
uggcagcugcgguccaccc

SEQ ID NO: 1793142 - RNA, 17 nt, Human
uggcagcugcgguccac

SEQ ID NO: 1793143 - RNA, 13 nt, Human
uggccccucaggg

SEQ ID NO: 1793144 - RNA, 20 nt, Human
uggccccucagggucccugg

SEQ ID NO: 1793145 - RNA, 20 nt, Human
uggccuagcauacguacaca

SEQ ID NO: 1793146 - RNA, 21 nt, Human
uggccccucagggucccuggu

SEQ ID NO: 1793147 - RNA, 22 nt, Human
uggccccucagggucccuggug

SEQ ID NO: 1793148 - RNA, 16 nt, Human
ugucuguuguauucau

SEQ ID NO: 1793149 - RNA, 16 nt, Human
ugucuuuucuugcaug

SEQ ID NO: 1793150 - RNA, 23 nt, Human
ugucuuuggacccugaggcccag

SEQ ID NO: 1793151 - RNA, 16 nt, Human
ugucuaugggacucaa

SEQ ID NO: 1793152 - RNA, 15 nt, Human
ugucuaugggacuca

SEQ ID NO: 1793153 - RNA, 14 nt, Human
ugucuaugggacuc

SEQ ID NO: 1793154 - RNA, 19 nt, Human
ugucuaggcaggaccugug

SEQ ID NO: 1793155 - RNA, 17 nt, Human
ugucuaggcaggaccug

SEQ ID NO: 1793156 - RNA, 15 nt, Human
ugucuaguuguuuga

SEQ ID NO: 1793157 - RNA, 23 nt, Human
ugucuaguuguuugauucagaca

SEQ ID NO: 1793158 - RNA, 17 nt, Human
ugucucaagagggcacu

SEQ ID NO: 1793159 - RNA, 18 nt, Human
ugucucaagagggcacug

SEQ ID NO: 1793160 - RNA, 21 nt, Human
ugucucaaaaaaagaaaaaga

SEQ ID NO: 1793161 - RNA, 19 nt, Human
ugucucaagagggcacugg

SEQ ID NO: 1793162 - RNA, 20 nt, Human
uguccugggagugagcuggu

SEQ ID NO: 1793163 - RNA, 19 nt, Human
uguccugggagugagcugg

SEQ ID NO: 1793164 - RNA, 12 nt, Human
uguccugggagu

SEQ ID NO: 1793165 - RNA, 22 nt, Human
uguccugccuaaggcugaacuu

SEQ ID NO: 1793166 - RNA, 14 nt, Human
ugucuaaugaaacc

SEQ ID NO: 1793167 - RNA, 13 nt, Human
uguccccuauccu

SEQ ID NO: 1793168 - RNA, 13 nt, Human
ugucaucucagcu

SEQ ID NO: 1793169 - RNA, 17 nt, Human
uguccccgcacugggcu

SEQ ID NO: 1793170 - RNA, 19 nt, Human
uguccccgcacugggcuug

SEQ ID NO: 1793171 - RNA, 22 nt, Human
uguacagcaaggagauuuacaa

SEQ ID NO: 1793172 - RNA, 13 nt, Human
uguacagagccca

SEQ ID NO: 1793173 - RNA, 21 nt, Human
uguacagagcccacgccccca

SEQ ID NO: 1793174 - RNA, 12 nt, Human
uguacagagccc

SEQ ID NO: 1793175 - RNA, 23 nt, Human
uguacagcaaggagauuuacaac

SEQ ID NO: 1793176 - RNA, 22 nt, Human
uguaugaaagauggcugugccu

SEQ ID NO: 1793177 - RNA, 13 nt, Human
uguaucugagcag

SEQ ID NO: 1793178 - RNA, 19 nt, Human
uguauuuuacuaauaaaau

SEQ ID NO: 1793179 - RNA, 14 nt, Human
ugucacaggcaggu

SEQ ID NO: 1793180 - RNA, 13 nt, Human
ugucacacacuuu

SEQ ID NO: 1793181 - RNA, 21 nt, Human
ugucaauuacaggaaguacug

SEQ ID NO: 1793182 - RNA, 13 nt, Human
uguaugcgugugu

SEQ ID NO: 1793183 - RNA, 21 nt, Human
ugucacaggcagguccagggu

SEQ ID NO: 1793184 - RNA, 17 nt, Human
ugucacaggcaggucca

SEQ ID NO: 1793185 - RNA, 16 nt, Human
ugucacaggcaggucc

SEQ ID NO: 1793186 - RNA, 15 nt, Human
ugucacaggcagguc

SEQ ID NO: 1793187 - RNA, 16 nt, Human
ugucagugugacugau

SEQ ID NO: 1793188 - RNA, 19 nt, Human
ugucagugugacugaucuc

SEQ ID NO: 1793189 - RNA, 15 nt, Human
ugucagugugacuga

SEQ ID NO: 1793190 - RNA, 14 nt, Human
ugucagugugacug

SEQ ID NO: 1793191 - RNA, 14 nt, Human
uguacagacaacaa

SEQ ID NO: 1793192 - RNA, 11 nt, Human
uguacagagcc

SEQ ID NO: 1793193 - RNA, 19 nt, Human
uguaauaauaaagaauagc

SEQ ID NO: 1793194 - RNA, 11 nt, Human
uguaaugaaaa

SEQ ID NO: 1793195 - RNA, 12 nt, Human
uguaaugaaaac

SEQ ID NO: 1793196 - RNA, 13 nt, Human
uguaaugaaaacc

SEQ ID NO: 1793197 - RNA, 17 nt, Human
uguaaugaaaaccacau

SEQ ID NO: 1793198 - RNA, 17 nt, Human
uguaacaagccacccca

SEQ ID NO: 1793199 - RNA, 14 nt, Human
uguaacaagccacc

SEQ ID NO: 1793200 - RNA, 13 nt, Human
ugguugcauccua

SEQ ID NO: 1793201 - RNA, 16 nt, Human
ugguuuucuguucuuu

SEQ ID NO: 1793202 - RNA, 20 nt, Human
ugguuguacauauaagugau

SEQ ID NO: 1793203 - RNA, 23 nt, Human
ugguuuuuaaaaaacugcugacu

SEQ ID NO: 1793204 - RNA, 16 nt, Human
ugguuuuucaguuuuc

SEQ ID NO: 1793205 - RNA, 19 nt, Human
ugguuuucuuguguguuua

SEQ ID NO: 1793206 - RNA, 21 nt, Human
ugguuuuuaaaaaacugcuga

SEQ ID NO: 1793207 - RNA, 11 nt, Human
uguaaaauggu

SEQ ID NO: 1793208 - RNA, 12 nt, Human
uguaaaauggug

SEQ ID NO: 1793209 - RNA, 19 nt, Human
uguaaaagcauuuuguaau

SEQ ID NO: 1793210 - RNA, 18 nt, Human
uguaaaagcauuuuguaa

SEQ ID NO: 1793211 - RNA, 17 nt, Human
uguaaaagcauuuugua

SEQ ID NO: 1793212 - RNA, 23 nt, Human
uggguacuuguggacacagcucu

SEQ ID NO: 1793213 - RNA, 20 nt, Human
uggguacuuguggacacagc

SEQ ID NO: 1793214 - RNA, 14 nt, Human
uggugagaggcauc

SEQ ID NO: 1793215 - RNA, 18 nt, Human
ugguggcagugggagcug

SEQ ID NO: 1793216 - RNA, 13 nt, Human
ugguggcaguggg

SEQ ID NO: 1793217 - RNA, 20 nt, Human
ugguggcagugggagcugcc

SEQ ID NO: 1793218 - RNA, 19 nt, Human
ugguggcccgacagccugg

SEQ ID NO: 1793219 - RNA, 14 nt, Human
uggugcaaugaccu

SEQ ID NO: 1793220 - RNA, 19 nt, Human
uggugcaaugaccuuucaa

SEQ ID NO: 1793221 - RNA, 20 nt, Human
uggugcaaugaccuuucaau

SEQ ID NO: 1793222 - RNA, 13 nt, Human
ugguggcuggguu

SEQ ID NO: 1793223 - RNA, 21 nt, Human
ugguggcccgacagccuggca

SEQ ID NO: 1793224 - RNA, 16 nt, Human
uggugggggccucggu

SEQ ID NO: 1793225 - RNA, 18 nt, Human
uggugggggccucggugu

SEQ ID NO: 1793226 - RNA, 20 nt, Human
ugguggggcugccaggggag

SEQ ID NO: 1793227 - RNA, 18 nt, Human
uggugguuucagaaaugu

SEQ ID NO: 1793228 - RNA, 17 nt, Human
uggugguuucagaaaug

SEQ ID NO: 1793229 - RNA, 18 nt, Human
ugguguaagguacuuuca

SEQ ID NO: 1793230 - RNA, 19 nt, Human
uggugguuuucuguucuuu

SEQ ID NO: 1793231 - RNA, 18 nt, Human
ugguugaugaucuuugca

SEQ ID NO: 1793232 - RNA, 12 nt, Human
ugguuccucccc

SEQ ID NO: 1793233 - RNA, 18 nt, Human
ugguuccuccccuccucc

SEQ ID NO: 1793234 - RNA, 23 nt, Human
ugguuccuccccuccuccuggac

SEQ ID NO: 1793235 - RNA, 23 nt, Human
ugguuccccuguucacucuacuu

SEQ ID NO: 1793236 - RNA, 16 nt, Human
uggugucaccugaaga

SEQ ID NO: 1793237 - RNA, 15 nt, Human
uggugucgggcauga

SEQ ID NO: 1793238 - RNA, 11 nt, Human
ugguuccccug

SEQ ID NO: 1793239 - RNA, 18 nt, Human
ugguuccccuguucacuc

SEQ ID NO: 1793240 - RNA, 19 nt, Human
ugguuccccuguucacucu

SEQ ID NO: 1793241 - RNA, 20 nt, Human
ugguuccccuguucacucua

SEQ ID NO: 1793242 - RNA, 18 nt, Human
uggugucgggcaugacac

SEQ ID NO: 1793243 - RNA, 19 nt, Human
uggugucgggcaugacacg

SEQ ID NO: 1793244 - RNA, 11 nt, Human
ucccuccuggg

SEQ ID NO: 1793245 - RNA, 19 nt, Human
ucccuccugggaaugaagc

SEQ ID NO: 1793246 - RNA, 16 nt, Human
ucccuauuagagaaga

SEQ ID NO: 1793247 - RNA, 16 nt, Human
ucccuaauaaagcugu

SEQ ID NO: 1793248 - RNA, 13 nt, Human
uccccuucacucc

SEQ ID NO: 1793249 - RNA, 21 nt, Human
uccccuguuuguuucugaaag

SEQ ID NO: 1793250 - RNA, 17 nt, Human
uccagguuuaagcuguu

SEQ ID NO: 1793251 - RNA, 18 nt, Human
uccagguuuaagcuguua

SEQ ID NO: 1793252 - RNA, 20 nt, Human
uccccuguuuguuucugaaa

SEQ ID NO: 1793253 - RNA, 23 nt, Human
ucccguggaacguuuuuccuguu

SEQ ID NO: 1793254 - RNA, 22 nt, Human
ucccguggaacguuuuuccugu

SEQ ID NO: 1793255 - RNA, 16 nt, Human
ucccguggaacguuuu

SEQ ID NO: 1793256 - RNA, 14 nt, Human
ucccuaauaaagcu

SEQ ID NO: 1793257 - RNA, 15 nt, Human
ucccuaauaaagcug

SEQ ID NO: 1793258 - RNA, 14 nt, Human
ucccuucccaccuc

SEQ ID NO: 1793259 - RNA, 13 nt, Human
ucccuucccaccu

SEQ ID NO: 1793260 - RNA, 14 nt, Human
ucccugcacuugca

SEQ ID NO: 1793261 - RNA, 19 nt, Human
ucccugccccucccuucaa

SEQ ID NO: 1793262 - RNA, 13 nt, Human
ucccugcacuugc

SEQ ID NO: 1793263 - RNA, 20 nt, Human
ucccugccccucccuucaac

SEQ ID NO: 1793264 - RNA, 14 nt, Human
uccucuaggagguc

SEQ ID NO: 1793265 - RNA, 19 nt, Human
uccuccuuuucacaguucu

SEQ ID NO: 1793266 - RNA, 21 nt, Human
uccucuuccugaauuuuauuu

SEQ ID NO: 1793267 - RNA, 16 nt, Human
uccucuguacagagcc

SEQ ID NO: 1793268 - RNA, 17 nt, Human
uccucuguacagagccc

SEQ ID NO: 1793269 - RNA, 18 nt, Human
uccucuguacagagccca

SEQ ID NO: 1793270 - RNA, 19 nt, Human
uccucuguacagagcccac

SEQ ID NO: 1793271 - RNA, 17 nt, Human
uccucuaggaggucucu

SEQ ID NO: 1793272 - RNA, 14 nt, Human
uccucugcugcugg

SEQ ID NO: 1793273 - RNA, 15 nt, Human
uccucugcugcuggc

SEQ ID NO: 1793274 - RNA, 16 nt, Human
uccucugcugcuggcu

SEQ ID NO: 1793275 - RNA, 17 nt, Human
uccucugcugcuggcug

SEQ ID NO: 1793276 - RNA, 18 nt, Human
uccuauauuguuuucagu

SEQ ID NO: 1793277 - RNA, 21 nt, Human
uccuauauuguuuucagugua

SEQ ID NO: 1793278 - RNA, 17 nt, Human
uccucauuagcauuuug

SEQ ID NO: 1793279 - RNA, 18 nt, Human
uccuacccacccuccuuu

SEQ ID NO: 1793280 - RNA, 15 nt, Human
uccuacaagacacag

SEQ ID NO: 1793281 - RNA, 22 nt, Human
uccuaaugaaugcauaaaaugu

SEQ ID NO: 1793282 - RNA, 15 nt, Human
uccuaauuccacagc

SEQ ID NO: 1793283 - RNA, 16 nt, Human
uccuaauuccacagcu

SEQ ID NO: 1793284 - RNA, 17 nt, Human
uccuaauuccacagcug

SEQ ID NO: 1793285 - RNA, 18 nt, Human
uccuaauuccacagcugc

SEQ ID NO: 1793286 - RNA, 17 nt, Human
uccgaccagacaccuug

SEQ ID NO: 1793287 - RNA, 13 nt, Human
uccgaccagacac

SEQ ID NO: 1793288 - RNA, 16 nt, Human
uccuaaucuucugaac

SEQ ID NO: 1793289 - RNA, 21 nt, Human
uccuucaccuuuguccccacc

SEQ ID NO: 1793290 - RNA, 22 nt, Human
uccuucaccuuuguccccaccg

SEQ ID NO: 1793291 - RNA, 16 nt, Human
uccuuaccagcagagc

SEQ ID NO: 1793292 - RNA, 17 nt, Human
uccuuaccagcagagca

SEQ ID NO: 1793293 - RNA, 18 nt, Human
uccuuaccagcagagcac

SEQ ID NO: 1793294 - RNA, 18 nt, Human
uccuucacagaugggugc

SEQ ID NO: 1793295 - RNA, 19 nt, Human
uccuucacagaugggugcu

SEQ ID NO: 1793296 - RNA, 20 nt, Human
uccuuaccagcagagcaccu

SEQ ID NO: 1793297 - RNA, 18 nt, Human
uccuucaccuuugucccc

SEQ ID NO: 1793298 - RNA, 20 nt, Human
uccuucaccuuuguccccac

SEQ ID NO: 1793299 - RNA, 19 nt, Human
uccuuuuaaaacacuucca

SEQ ID NO: 1793300 - RNA, 23 nt, Human
uccuuuucacaguucucuccuuc

SEQ ID NO: 1793301 - RNA, 17 nt, Human
ucgaggcggaucuuugg

SEQ ID NO: 1793302 - RNA, 22 nt, Human
ucgaggcggaucuuuggacaga

SEQ ID NO: 1793303 - RNA, 15 nt, Human
ucgaacuccugaccu

SEQ ID NO: 1793304 - RNA, 18 nt, Human
uccuuuucgcaggauucu

SEQ ID NO: 1793305 - RNA, 14 nt, Human
uccugccucagccu

SEQ ID NO: 1793306 - RNA, 14 nt, Human
uccugagccagauu

SEQ ID NO: 1793307 - RNA, 20 nt, Human
uccugccuaagugcagcccc

SEQ ID NO: 1793308 - RNA, 13 nt, Human
uccugagccagau

SEQ ID NO: 1793309 - RNA, 19 nt, Human
uccuggcacccggccccug

SEQ ID NO: 1793310 - RNA, 16 nt, Human
uccuggcacccggccc

SEQ ID NO: 1793311 - RNA, 14 nt, Human
uccuggcacccggc

SEQ ID NO: 1793312 - RNA, 15 nt, Human
uccugccucagccuc

SEQ ID NO: 1793313 - RNA, 13 nt, Human
uccugccucagcc

SEQ ID NO: 1793314 - RNA, 16 nt, Human
uccugccucagccucc

SEQ ID NO: 1793315 - RNA, 17 nt, Human
uccugccucagccuccc

SEQ ID NO: 1793316 - RNA, 22 nt, Human
uccuggcacccggccccugcug

SEQ ID NO: 1793317 - RNA, 17 nt, Human
uccuggcacugcuucca

SEQ ID NO: 1793318 - RNA, 21 nt, Human
uccuggcacccggccccugcu

SEQ ID NO: 1793319 - RNA, 20 nt, Human
uccuggcacccggccccugc

SEQ ID NO: 1793320 - RNA, 18 nt, Human
uccuggcacugcuuccag

SEQ ID NO: 1793321 - RNA, 22 nt, Human
uccuggcacugcuuccagugag

SEQ ID NO: 1793322 - RNA, 20 nt, Human
uccuguaccucuugagccuu

SEQ ID NO: 1793323 - RNA, 22 nt, Human
uccuguaccucuugagccuuga

SEQ ID NO: 1793324 - RNA, 18 nt, Human
ucggccuccauccugagg

SEQ ID NO: 1793325 - RNA, 22 nt, Human
ucgagguuucucaaagaaauuu

SEQ ID NO: 1793326 - RNA, 16 nt, Human
ucgagguuucucaaag

SEQ ID NO: 1793327 - RNA, 16 nt, Human
ucgugauugauaagaa

SEQ ID NO: 1793328 - RNA, 22 nt, Human
ucggccucccaaagugcuggga

SEQ ID NO: 1793329 - RNA, 21 nt, Human
ucuaaaucuccaaaauaaaac

SEQ ID NO: 1793330 - RNA, 22 nt, Human
ucuaaaucuccaaaauaaaacu

SEQ ID NO: 1793331 - RNA, 14 nt, Human
ucuaauauguaaca

SEQ ID NO: 1793332 - RNA, 14 nt, Human
ucuaaugugugaau

SEQ ID NO: 1793333 - RNA, 18 nt, Human
ucuaggaggucucuaaga

SEQ ID NO: 1793334 - RNA, 13 nt, Human
ucuaugccugucu

SEQ ID NO: 1793335 - RNA, 22 nt, Human
ucucaaagaaauuuccacucag

SEQ ID NO: 1793336 - RNA, 21 nt, Human
ucucaaagaaauuuccacuca

SEQ ID NO: 1793337 - RNA, 17 nt, Human
ucucaaauaacuaaaag

SEQ ID NO: 1793338 - RNA, 15 nt, Human
ucuaucaaguauuau

SEQ ID NO: 1793339 - RNA, 22 nt, Human
ucuaucaaguauuauaccuuuu

SEQ ID NO: 1793340 - RNA, 21 nt, Human
ucuaucaaguauuauaccuuu

SEQ ID NO: 1793341 - RNA, 12 nt, Human
ucuccugccuca

SEQ ID NO: 1793342 - RNA, 19 nt, Human
ucucaagagggcacuggug

SEQ ID NO: 1793343 - RNA, 17 nt, Human
ucucaagagggcacugg

SEQ ID NO: 1793344 - RNA, 18 nt, Human
ucucaagagggcacuggu

SEQ ID NO: 1793345 - RNA, 15 nt, Human
ucuccugccucagcc

SEQ ID NO: 1793346 - RNA, 17 nt, Human
ucuccugccucagccuc

SEQ ID NO: 1793347 - RNA, 19 nt, Human
ucuccugccucagccuccc

SEQ ID NO: 1793348 - RNA, 21 nt, Human
ucuccuggaagugcuaauuuu

SEQ ID NO: 1793349 - RNA, 21 nt, Human
ucuccuggaaauauuaagaaa

SEQ ID NO: 1793350 - RNA, 15 nt, Human
ucuccuguaccucuu

SEQ ID NO: 1793351 - RNA, 17 nt, Human
ucuccuguaccucuuga

SEQ ID NO: 1793352 - RNA, 16 nt, Human
ucuccuguaccucuug

SEQ ID NO: 1793353 - RNA, 19 nt, Human
ucuccuguaccucuugagc

SEQ ID NO: 1793354 - RNA, 21 nt, Human
ucucgugguaggacuguagaa

SEQ ID NO: 1793355 - RNA, 19 nt, Human
ucucgugguaggacuguag

SEQ ID NO: 1793356 - RNA, 14 nt, Human
ucucgugauugaua

SEQ ID NO: 1793357 - RNA, 22 nt, Human
ucucgugauugauaagaaccuu

SEQ ID NO: 1793358 - RNA, 14 nt, Human
ucucuaacagugga

SEQ ID NO: 1793359 - RNA, 20 nt, Human
ucucuaacaguggacaaagu

SEQ ID NO: 1793360 - RNA, 12 nt, Human
ucucuaacuuca

SEQ ID NO: 1793361 - RNA, 19 nt, Human
ucucuaacuucaccauauu

SEQ ID NO: 1793362 - RNA, 15 nt, Human
ucucugcaggucccu

SEQ ID NO: 1793363 - RNA, 16 nt, Human
ucucugcaggucccua

SEQ ID NO: 1793364 - RNA, 18 nt, Human
ucucugcaggucccuaau

SEQ ID NO: 1793365 - RNA, 17 nt, Human
ucucugaggacacuaac

SEQ ID NO: 1793366 - RNA, 13 nt, Human
ucucugcaggucc

SEQ ID NO: 1793367 - RNA, 14 nt, Human
ucucugcagguccc

SEQ ID NO: 1793368 - RNA, 15 nt, Human
ucucuaguuugauua

SEQ ID NO: 1793369 - RNA, 16 nt, Human
ucucuaguuugauuaa

SEQ ID NO: 1793370 - RNA, 17 nt, Human
ucugcauucaggaucaa

SEQ ID NO: 1793371 - RNA, 23 nt, Human
ucugaggaauccagacccggcug

SEQ ID NO: 1793372 - RNA, 15 nt, Human
ucugacccacugcuu

SEQ ID NO: 1793373 - RNA, 14 nt, Human
ucugacccacugcu

SEQ ID NO: 1793374 - RNA, 11 nt, Human
ucugaggcuga

SEQ ID NO: 1793375 - RNA, 23 nt, Human
ucugaggcugaaauucagaauau

SEQ ID NO: 1793376 - RNA, 14 nt, Human
ucugcacacagcac

SEQ ID NO: 1793377 - RNA, 20 nt, Human
ucugcaagaauugaagcagg

SEQ ID NO: 1793378 - RNA, 21 nt, Human
ucugcaagaauugaagcagga

SEQ ID NO: 1793379 - RNA, 13 nt, Human
ucugacccacugc

SEQ ID NO: 1793380 - RNA, 15 nt, Human
ucugacauaaguauu

SEQ ID NO: 1793381 - RNA, 22 nt, Human
ucugacaggcaaugcuggcugu

SEQ ID NO: 1793382 - RNA, 21 nt, Human
ucugacaggcaaugcuggcug

SEQ ID NO: 1793383 - RNA, 12 nt, Human
ucugacaggcaa

SEQ ID NO: 1793384 - RNA, 19 nt, Human
ucugacacacagcucuguc

SEQ ID NO: 1793385 - RNA, 18 nt, Human
ucugacacacagcucugu

SEQ ID NO: 1793386 - RNA, 17 nt, Human
ucugacacacagcucug

SEQ ID NO: 1793387 - RNA, 16 nt, Human
ucugacacacagcucu

SEQ ID NO: 1793388 - RNA, 14 nt, Human
ucugaaaauguaug

SEQ ID NO: 1793389 - RNA, 22 nt, Human
ucugaaaauugaugggauuugg

SEQ ID NO: 1793390 - RNA, 14 nt, Human
ucugaaaauugaug

SEQ ID NO: 1793391 - RNA, 13 nt, Human
ucugaaaauguau

SEQ ID NO: 1793392 - RNA, 17 nt, Human
ucuuccuggauuauuca

SEQ ID NO: 1793393 - RNA, 23 nt, Human
ucuucagaucucuaacuucacca

SEQ ID NO: 1793394 - RNA, 18 nt, Human
ucuucagaucucuaacuu

SEQ ID NO: 1793395 - RNA, 12 nt, Human
ucuugaacuccu

SEQ ID NO: 1793396 - RNA, 17 nt, Human
ucuugaacuccugaccu

SEQ ID NO: 1793397 - RNA, 19 nt, Human
ucuugaacuccugaccuca

SEQ ID NO: 1793398 - RNA, 13 nt, Human
ucuugaaaaaugc

SEQ ID NO: 1793399 - RNA, 19 nt, Human
ucuucuuuuugcuucaaaa

SEQ ID NO: 1793400 - RNA, 16 nt, Human
ucuucuuuuuuuguga

SEQ ID NO: 1793401 - RNA, 17 nt, Human
ucuucuuuuuuugugau

SEQ ID NO: 1793402 - RNA, 18 nt, Human
ucuucuuuuuuugugaug

SEQ ID NO: 1793403 - RNA, 14 nt, Human
ucuucuccuuucac

SEQ ID NO: 1793404 - RNA, 13 nt, Human
ucuucuccuuuca

SEQ ID NO: 1793405 - RNA, 12 nt, Human
ucuucuccacug

SEQ ID NO: 1793406 - RNA, 13 nt, Human
ucuuaaaaagugg

SEQ ID NO: 1793407 - RNA, 22 nt, Human
ucuuaaccagaucauugugaaa

SEQ ID NO: 1793408 - RNA, 16 nt, Human
ucuuaaccagaucauu

SEQ ID NO: 1793409 - RNA, 17 nt, Human
ucuuaaccagaucauug

SEQ ID NO: 1793410 - RNA, 22 nt, Human
ucuuaaauauguggaguucauc

SEQ ID NO: 1793411 - RNA, 14 nt, Human
ucugggacacaguu

SEQ ID NO: 1793412 - RNA, 23 nt, Human
ucuggugacuuuccucuuugguc

SEQ ID NO: 1793413 - RNA, 18 nt, Human
ucuggcucuuccaggcug

SEQ ID NO: 1793414 - RNA, 23 nt, Human
ucuggcucuuccaggcugggaga

SEQ ID NO: 1793415 - RNA, 15 nt, Human
ucuggcuccagcugg

SEQ ID NO: 1793416 - RNA, 22 nt, Human
ucuggcuaugcauuugaaaauu

SEQ ID NO: 1793417 - RNA, 19 nt, Human
ucuggcuaugcauuugaaa

SEQ ID NO: 1793418 - RNA, 23 nt, Human
ucuggccuucggccuccauccug

SEQ ID NO: 1793419 - RNA, 18 nt, Human
ucuggccuucggccucca

SEQ ID NO: 1793420 - RNA, 17 nt, Human
ucuggccuucggccucc

SEQ ID NO: 1793421 - RNA, 19 nt, Human
ucuguccuacucuguguca

SEQ ID NO: 1793422 - RNA, 15 nt, Human
ucuguccuacucugu

SEQ ID NO: 1793423 - RNA, 20 nt, Human
ucuguccuacucugugucag

SEQ ID NO: 1793424 - RNA, 21 nt, Human
ucuguccugggagugagcugg

SEQ ID NO: 1793425 - RNA, 14 nt, Human
ucugucgcccaguc

SEQ ID NO: 1793426 - RNA, 16 nt, Human
ucugucgcccagucug

SEQ ID NO: 1793427 - RNA, 22 nt, Human
ucugucucuggauuauauuaug

SEQ ID NO: 1793428 - RNA, 13 nt, Human
ucugguuccuccc

SEQ ID NO: 1793429 - RNA, 14 nt, Human
ucuguccuacucug

SEQ ID NO: 1793430 - RNA, 20 nt, Human
ucugguuccuccccuccucc

SEQ ID NO: 1793431 - RNA, 21 nt, Human
ucugguuccuccccuccuccu

SEQ ID NO: 1793432 - RNA, 22 nt, Human
ucugcugacagacacaggcccg

SEQ ID NO: 1793433 - RNA, 21 nt, Human
ucugcugacagacacaggccc

SEQ ID NO: 1793434 - RNA, 20 nt, Human
ucugcugacagacacaggcc

SEQ ID NO: 1793435 - RNA, 19 nt, Human
ucugcugacagacacaggc

SEQ ID NO: 1793436 - RNA, 22 nt, Human
ucugcugauccucccaggcuuc

SEQ ID NO: 1793437 - RNA, 15 nt, Human
ucuggaaugcagugg

SEQ ID NO: 1793438 - RNA, 19 nt, Human
ucuggaauaaggagaauga

SEQ ID NO: 1793439 - RNA, 14 nt, Human
ucuggacaggcaug

SEQ ID NO: 1793440 - RNA, 16 nt, Human
ucuggaaugcaguggu

SEQ ID NO: 1793441 - RNA, 21 nt, Human
ucuggacaggcauguucucug

SEQ ID NO: 1793442 - RNA, 17 nt, Human
ucugcugacagacacag

SEQ ID NO: 1793443 - RNA, 18 nt, Human
ucugcugacagacacagg

SEQ ID NO: 1793444 - RNA, 21 nt, Human
ucugcuccucuccccagcaag

SEQ ID NO: 1793445 - RNA, 18 nt, Human
ucugcuccucuccccagc

SEQ ID NO: 1793446 - RNA, 16 nt, Human
ucugccugcccaggcc

SEQ ID NO: 1793447 - RNA, 15 nt, Human
ucugccugcccaggc

SEQ ID NO: 1793448 - RNA, 22 nt, Human
ucugcuccccuaaagccucaaa

SEQ ID NO: 1793449 - RNA, 13 nt, Human
ucugccugcccag

SEQ ID NO: 1793450 - RNA, 14 nt, Human
ucugccugcccagg

SEQ ID NO: 1793451 - RNA, 18 nt, Human
ucugccauauucuguugg

SEQ ID NO: 1793452 - RNA, 17 nt, Human
ucaaauuguaagcaugc

SEQ ID NO: 1793453 - RNA, 20 nt, Human
ucaaauuguaagcaugcaca

SEQ ID NO: 1793454 - RNA, 23 nt, Human
ucaaccccuucgcuccugugucu

SEQ ID NO: 1793455 - RNA, 15 nt, Human
ucaaaugagaaaaug

SEQ ID NO: 1793456 - RNA, 20 nt, Human
ucaaagaaauuuccacucag

SEQ ID NO: 1793457 - RNA, 19 nt, Human
ucaaagaaauuuccacuca

SEQ ID NO: 1793458 - RNA, 13 nt, Human
ucaaagaaauuuc

SEQ ID NO: 1793459 - RNA, 12 nt, Human
ucaaagaaauuu

SEQ ID NO: 1793460 - RNA, 16 nt, Human
ucaaaacaaaggccua

SEQ ID NO: 1793461 - RNA, 21 nt, Human
ucaaauauauucagccuggcu

SEQ ID NO: 1793462 - RNA, 22 nt, Human
ucaaauauauucagccuggcuu

SEQ ID NO: 1793463 - RNA, 23 nt, Human
ucaaauauauucagccuggcuuc

SEQ ID NO: 1793464 - RNA, 19 nt, Human
uauuuucaacgcagcccug

SEQ ID NO: 1793465 - RNA, 17 nt, Human
uauuuuauuaugcauga

SEQ ID NO: 1793466 - RNA, 14 nt, Human
uauuuuauuaugca

SEQ ID NO: 1793467 - RNA, 17 nt, Human
uauuuuauguugcauag

SEQ ID NO: 1793468 - RNA, 13 nt, Human
uauuuauauaaau

SEQ ID NO: 1793469 - RNA, 22 nt, Human
uauuuucccuauuagagaagag

SEQ ID NO: 1793470 - RNA, 17 nt, Human
uauuuuuuucuuuucuu

SEQ ID NO: 1793471 - RNA, 14 nt, Human
uauuuuuuuacuaa

SEQ ID NO: 1793472 - RNA, 14 nt, Human
ucaaaaaaagaaaa

SEQ ID NO: 1793473 - RNA, 15 nt, Human
ucaaaaaaagaaaaa

SEQ ID NO: 1793474 - RNA, 21 nt, Human
ucaagugauucuccugccuca

SEQ ID NO: 1793475 - RNA, 19 nt, Human
ucaagugauucuccugccu

SEQ ID NO: 1793476 - RNA, 18 nt, Human
ucaagugauucuccugcc

SEQ ID NO: 1793477 - RNA, 20 nt, Human
ucaagugauucuccugccuc

SEQ ID NO: 1793478 - RNA, 14 nt, Human
ucaacgcagcccug

SEQ ID NO: 1793479 - RNA, 15 nt, Human
ucaacgcagcccugc

SEQ ID NO: 1793480 - RNA, 18 nt, Human
ucaacgcagcccugcuuu

SEQ ID NO: 1793481 - RNA, 13 nt, Human
ucaaugcagcccc

SEQ ID NO: 1793482 - RNA, 21 nt, Human
ucaauuacaggaaguacugga

SEQ ID NO: 1793483 - RNA, 23 nt, Human
ucaauuacaggaaguacuggaga

SEQ ID NO: 1793484 - RNA, 19 nt, Human
ucacaggcagguccagggu

SEQ ID NO: 1793485 - RNA, 18 nt, Human
ucacaggcagguccaggg

SEQ ID NO: 1793486 - RNA, 17 nt, Human
ucacaggcagguccagg

SEQ ID NO: 1793487 - RNA, 16 nt, Human
ucacaggcagguccag

SEQ ID NO: 1793488 - RNA, 22 nt, Human
ucacaguccuuaccagcagagc

SEQ ID NO: 1793489 - RNA, 23 nt, Human
ucacaguccuuaccagcagagca

SEQ ID NO: 1793490 - RNA, 19 nt, Human
ucacaguccuuaccagcag

SEQ ID NO: 1793491 - RNA, 16 nt, Human
ucacagucacauucca

SEQ ID NO: 1793492 - RNA, 18 nt, Human
ucacaagacccaaaaggc

SEQ ID NO: 1793493 - RNA, 17 nt, Human
ucacaagacccaaaagg

SEQ ID NO: 1793494 - RNA, 13 nt, Human
ucacaagacccaa

SEQ ID NO: 1793495 - RNA, 14 nt, Human
ucaccaaggcugau

SEQ ID NO: 1793496 - RNA, 19 nt, Human
ucaccaaaucagcugcuac

SEQ ID NO: 1793497 - RNA, 20 nt, Human
ucaccaaaucagcugcuacu

SEQ ID NO: 1793498 - RNA, 16 nt, Human
ucaccacaugugcaca

SEQ ID NO: 1793499 - RNA, 17 nt, Human
ucacauuuauucugcuc

SEQ ID NO: 1793500 - RNA, 19 nt, Human
ucacauuuauucugcucac

SEQ ID NO: 1793501 - RNA, 18 nt, Human
ucacauuuauucugcuca

SEQ ID NO: 1793502 - RNA, 19 nt, Human
uauugcuuguuggauuuuu

SEQ ID NO: 1793503 - RNA, 22 nt, Human
uauuggaaauuuguuauaauga

SEQ ID NO: 1793504 - RNA, 17 nt, Human
uauugcugauggugcaa

SEQ ID NO: 1793505 - RNA, 17 nt, Human
uauucucuccuguaccu

SEQ ID NO: 1793506 - RNA, 18 nt, Human
uauucucuccuguaccuc

SEQ ID NO: 1793507 - RNA, 21 nt, Human
uauugauaugcuuauacacuu

SEQ ID NO: 1793508 - RNA, 24 nt, Human
uauuuauaaaaauaaaaaacacug

SEQ ID NO: 1793509 - RNA, 22 nt, Human
uauuguuuucaguguacaugga

SEQ ID NO: 1793510 - RNA, 18 nt, Human
uauuguuuucaguguaca

SEQ ID NO: 1793511 - RNA, 20 nt, Human
uauuguuuucaguguacaug

SEQ ID NO: 1793512 - RNA, 12 nt, Human
uauuguuuucag

SEQ ID NO: 1793513 - RNA, 17 nt, Human
uauuccugcauuuguga

SEQ ID NO: 1793514 - RNA, 19 nt, Human
uauuccugcauuugugaaa

SEQ ID NO: 1793515 - RNA, 20 nt, Human
uauuccugcauuugugaaau

SEQ ID NO: 1793516 - RNA, 21 nt, Human
uauuccugcauuugugaaaug

SEQ ID NO: 1793517 - RNA, 21 nt, Human
uauguaaaugguaugucauuc

SEQ ID NO: 1793518 - RNA, 20 nt, Human
uauguaaaugguaugucauu

SEQ ID NO: 1793519 - RNA, 13 nt, Human
gggaguggccaca

SEQ ID NO: 1793520 - RNA, 15 nt, Human
gggaguggccacaga

SEQ ID NO: 1793521 - RNA, 14 nt, Human
uauguugauaaaag

SEQ ID NO: 1793522 - RNA, 12 nt, Human
uauguugcauag

SEQ ID NO: 1793523 - RNA, 20 nt, Human
uauguugcccaggcaggucu

SEQ ID NO: 1793524 - RNA, 19 nt, Human
uauguugcccaggcagguc

SEQ ID NO: 1793525 - RNA, 16 nt, Human
uauguugcccaggcag

SEQ ID NO: 1793526 - RNA, 13 nt, Human
uauguugcccagg

SEQ ID NO: 1793527 - RNA, 16 nt, Human
uauguugcauagaaua

SEQ ID NO: 1793528 - RNA, 12 nt, Human
uauuaaauuaug

SEQ ID NO: 1793529 - RNA, 17 nt, Human
uccaauuuacauacucu

SEQ ID NO: 1793530 - RNA, 18 nt, Human
uccaauuuacauacucug

SEQ ID NO: 1793531 - RNA, 18 nt, Human
uccaaaauaaaacuuuuu

SEQ ID NO: 1793532 - RNA, 20 nt, Human
uccaaaauaaaacuuuuuaa

SEQ ID NO: 1793533 - RNA, 17 nt, Human
uccacaaguuaaauaaa

SEQ ID NO: 1793534 - RNA, 18 nt, Human
uccacaaguuaaauaaau

SEQ ID NO: 1793535 - RNA, 16 nt, Human
uccacaagagcccagg

SEQ ID NO: 1793536 - RNA, 17 nt, Human
uccacaagagcccaggc

SEQ ID NO: 1793537 - RNA, 18 nt, Human
uccacaagagcccaggcc

SEQ ID NO: 1793538 - RNA, 12 nt, Human
uccacccugcuc

SEQ ID NO: 1793539 - RNA, 19 nt, Human
uccacagaggacacagaga

SEQ ID NO: 1793540 - RNA, 17 nt, Human
uccacagaggacacaga

SEQ ID NO: 1793541 - RNA, 15 nt, Human
uccacagaggacaca

SEQ ID NO: 1793542 - RNA, 18 nt, Human
uccaccugccagggacag

SEQ ID NO: 1793543 - RNA, 21 nt, Human
uccaccugccagggacagagg

SEQ ID NO: 1793544 - RNA, 17 nt, Human
uccaccugccagggaca

SEQ ID NO: 1793545 - RNA, 15 nt, Human
uccaccugccaggga

SEQ ID NO: 1793546 - RNA, 17 nt, Human
uccacuuggucugugag

SEQ ID NO: 1793547 - RNA, 15 nt, Human
uccaccuucccaugc

SEQ ID NO: 1793548 - RNA, 16 nt, Human
uccacuuggucuguga

SEQ ID NO: 1793549 - RNA, 15 nt, Human
uccacuuggucugug

SEQ ID NO: 1793550 - RNA, 17 nt, Human
uccagcuguucagcugg

SEQ ID NO: 1793551 - RNA, 16 nt, Human
uccaggagcagccaca

SEQ ID NO: 1793552 - RNA, 17 nt, Human
uccagcucaccagcccc

SEQ ID NO: 1793553 - RNA, 16 nt, Human
uccagcucaccagccc

SEQ ID NO: 1793554 - RNA, 18 nt, Human
uccagcucaccagcccca

SEQ ID NO: 1793555 - RNA, 16 nt, Human
uccagguucagcuugu

SEQ ID NO: 1793556 - RNA, 15 nt, Human
uccagguucagcuug

SEQ ID NO: 1793557 - RNA, 11 nt, Human
uccaggguggu

SEQ ID NO: 1793558 - RNA, 18 nt, Human
uccaggugcacaagcucc

SEQ ID NO: 1793559 - RNA, 20 nt, Human
uccaggugcacaagcuccaa

SEQ ID NO: 1793560 - RNA, 21 nt, Human
uccaggugcacaagcuccaag

SEQ ID NO: 1793561 - RNA, 22 nt, Human
uccaggugcacaagcuccaagc

SEQ ID NO: 1793562 - RNA, 15 nt, Human
uccaggugcacaagc

SEQ ID NO: 1793563 - RNA, 23 nt, Human
uccaggggugggacacccuguga

SEQ ID NO: 1793564 - RNA, 22 nt, Human
uccaggagcagccacauuccug

SEQ ID NO: 1793565 - RNA, 17 nt, Human
uccaggagcagccacau

SEQ ID NO: 1793566 - RNA, 18 nt, Human
uccaggagcagccacauu

SEQ ID NO: 1793567 - RNA, 23 nt, Human
ucaucuuagguuggcaaaaaggc

SEQ ID NO: 1793568 - RNA, 19 nt, Human
ucaucuugaauuguaagga

SEQ ID NO: 1793569 - RNA, 15 nt, Human
ucaggugcugccauc

SEQ ID NO: 1793570 - RNA, 14 nt, Human
ucaggugcugccau

SEQ ID NO: 1793571 - RNA, 13 nt, Human
ucaggugcugcca

SEQ ID NO: 1793572 - RNA, 23 nt, Human
ucaggugccucaagagaaggcaa

SEQ ID NO: 1793573 - RNA, 21 nt, Human
ucaggugagaagcagaggaag

SEQ ID NO: 1793574 - RNA, 21 nt, Human
ucauagcccucacccuggggc

SEQ ID NO: 1793575 - RNA, 15 nt, Human
ucauacucaccucac

SEQ ID NO: 1793576 - RNA, 19 nt, Human
ucaucaccaacgucugugc

SEQ ID NO: 1793577 - RNA, 20 nt, Human
ucaucaccaacgucugugcc

SEQ ID NO: 1793578 - RNA, 21 nt, Human
ucaucaccaacgucugugcca

SEQ ID NO: 1793579 - RNA, 23 nt, Human
ucauuccaccuucccaugcccug

SEQ ID NO: 1793580 - RNA, 21 nt, Human
ucauucaacccaccugcgucu

SEQ ID NO: 1793581 - RNA, 16 nt, Human
ucauuuccugugucuu

SEQ ID NO: 1793582 - RNA, 13 nt, Human
ucauuuccugugu

SEQ ID NO: 1793583 - RNA, 12 nt, Human
ucauugugaaau

SEQ ID NO: 1793584 - RNA, 15 nt, Human
ucauugugaaauuau

SEQ ID NO: 1793585 - RNA, 17 nt, Human
ucauugugaaauuauuc

SEQ ID NO: 1793586 - RNA, 18 nt, Human
ucauugugaaauuauuca

SEQ ID NO: 1793587 - RNA, 19 nt, Human
ucaggagcccugggaggcu

SEQ ID NO: 1793588 - RNA, 18 nt, Human
ucaggagcccugggaggc

SEQ ID NO: 1793589 - RNA, 20 nt, Human
ucaggagcccugggaggcuc

SEQ ID NO: 1793590 - RNA, 23 nt, Human
ucaggagcccugggaggcucugg

SEQ ID NO: 1793591 - RNA, 21 nt, Human
ucagggagugggcuaagcacg

SEQ ID NO: 1793592 - RNA, 14 nt, Human
ucagggccuggcuc

SEQ ID NO: 1793593 - RNA, 16 nt, Human
ucagggccuggcucag

SEQ ID NO: 1793594 - RNA, 15 nt, Human
ucaggugagaagcag

SEQ ID NO: 1793595 - RNA, 16 nt, Human
ucaggugagaagcaga

SEQ ID NO: 1793596 - RNA, 22 nt, Human
ucagccucccgaguagcuggga

SEQ ID NO: 1793597 - RNA, 21 nt, Human
ucagccucccgaguagcuggg

SEQ ID NO: 1793598 - RNA, 20 nt, Human
ucagccuccugaguagcugg

SEQ ID NO: 1793599 - RNA, 21 nt, Human
ucagccuccugaguagcugga

SEQ ID NO: 1793600 - RNA, 13 nt, Human
ucagccuccugag

SEQ ID NO: 1793601 - RNA, 22 nt, Human
ucagccuccugaguagcuggga

SEQ ID NO: 1793602 - RNA, 18 nt, Human
ucagccugcuccagcugu

SEQ ID NO: 1793603 - RNA, 19 nt, Human
ucagccugcuccagcuguu

SEQ ID NO: 1793604 - RNA, 15 nt, Human
ucagcugaaccuggg

SEQ ID NO: 1793605 - RNA, 16 nt, Human
ucagcugaaccugggu

SEQ ID NO: 1793606 - RNA, 21 nt, Human
ucagccucccaaagugcuggg

SEQ ID NO: 1793607 - RNA, 19 nt, Human
ucagccucccaaagugcug

SEQ ID NO: 1793608 - RNA, 14 nt, Human
ucagccucccaaag

SEQ ID NO: 1793609 - RNA, 23 nt, Human
ucagcauucucacuccuaccugg

SEQ ID NO: 1793610 - RNA, 22 nt, Human
ucagccucccgaauagcuggga

SEQ ID NO: 1793611 - RNA, 21 nt, Human
ucagccucccgaauagcuggg

SEQ ID NO: 1793612 - RNA, 18 nt, Human
ucagccucccgaguagcu

SEQ ID NO: 1793613 - RNA, 20 nt, Human
ucagccucccgaguagcugg

SEQ ID NO: 1793614 - RNA, 17 nt, Human
ucagauauaaaagacug

SEQ ID NO: 1793615 - RNA, 14 nt, Human
ucagauauaaaaga

SEQ ID NO: 1793616 - RNA, 20 nt, Human
ucagauauaaaagacugacc

SEQ ID NO: 1793617 - RNA, 18 nt, Human
ucagauauaaaagacuga

SEQ ID NO: 1793618 - RNA, 17 nt, Human
ucagcauucucacuccu

SEQ ID NO: 1793619 - RNA, 20 nt, Human
ucagcauucucacuccuacc

SEQ ID NO: 1793620 - RNA, 21 nt, Human
ucagaguaauccaagcaaaug

SEQ ID NO: 1793621 - RNA, 22 nt, Human
ucagaguaauccaagcaaaugu

SEQ ID NO: 1793622 - RNA, 13 nt, Human
ucagacagcugcc

SEQ ID NO: 1793623 - RNA, 14 nt, Human
ucagacagcugccu

SEQ ID NO: 1793624 - RNA, 16 nt, Human
ucagaauucucuaguu

SEQ ID NO: 1793625 - RNA, 23 nt, Human
ucagaauucucuaguuugauuaa

SEQ ID NO: 1793626 - RNA, 15 nt, Human
ucagaaauguguuau

SEQ ID NO: 1793627 - RNA, 10 nt, Human
ucagaaaugu

SEQ ID NO: 1793628 - RNA, 16 nt, Human
ucaccagccccagugc

SEQ ID NO: 1793629 - RNA, 13 nt, Human
ucaccagccccag

SEQ ID NO: 1793630 - RNA, 17 nt, Human
ucacucuuauugcccac

SEQ ID NO: 1793631 - RNA, 20 nt, Human
ucacucuuauugcccacgcu

SEQ ID NO: 1793632 - RNA, 18 nt, Human
ucacugcauccuccgccu

SEQ ID NO: 1793633 - RNA, 19 nt, Human
ucacugcauccuccgccuc

SEQ ID NO: 1793634 - RNA, 18 nt, Human
ucacugccaugccagcuu

SEQ ID NO: 1793635 - RNA, 13 nt, Human
ucacugcuggcug

SEQ ID NO: 1793636 - RNA, 14 nt, Human
ucacugcuggcugc

SEQ ID NO: 1793637 - RNA, 15 nt, Human
ucacugcuggcugcc

SEQ ID NO: 1793638 - RNA, 16 nt, Human
ucacugcuggcugccu

SEQ ID NO: 1793639 - RNA, 12 nt, Human
ucacugcuggcu

SEQ ID NO: 1793640 - RNA, 17 nt, Human
ucacugcuggcugccuu

SEQ ID NO: 1793641 - RNA, 18 nt, Human
ucacugcuggcugccuua

SEQ ID NO: 1793642 - RNA, 22 nt, Human
ucacugcuggcugccuuagaac

SEQ ID NO: 1793643 - RNA, 14 nt, Human
ucacugcuuaacuu

SEQ ID NO: 1793644 - RNA, 18 nt, Human
gcucauggacuucugcca

SEQ ID NO: 1793645 - RNA, 19 nt, Human
gcucagcugucaaggcuca

SEQ ID NO: 1793646 - RNA, 23 nt, Human
gcucagcggggacagcuccuucu

SEQ ID NO: 1793647 - RNA, 19 nt, Human
gcucagcggggacagcucc

SEQ ID NO: 1793648 - RNA, 18 nt, Human
gcucagcggggacagcuc

SEQ ID NO: 1793649 - RNA, 17 nt, Human
gcucagcggggacagcu

SEQ ID NO: 1793650 - RNA, 17 nt, Human
gcucagcccucccugcc

SEQ ID NO: 1793651 - RNA, 18 nt, Human
gcucagcccucccugccc

SEQ ID NO: 1793652 - RNA, 19 nt, Human
gcucagcccucccugcccc

SEQ ID NO: 1793653 - RNA, 21 nt, Human
gcucagcccucccugccccuc

SEQ ID NO: 1793654 - RNA, 18 nt, Human
gcucaccagccccagugc

SEQ ID NO: 1793655 - RNA, 15 nt, Human
gcucaccagccccag

SEQ ID NO: 1793656 - RNA, 14 nt, Human
gcucaccagcccca

SEQ ID NO: 1793657 - RNA, 13 nt, Human
gcucaccagcccc

SEQ ID NO: 1793658 - RNA, 12 nt, Human
gcucaccagccc

SEQ ID NO: 1793659 - RNA, 16 nt, Human
gcucacauaucuguca

SEQ ID NO: 1793660 - RNA, 22 nt, Human
gcucacagaacccuuggagcca

SEQ ID NO: 1793661 - RNA, 15 nt, Human
gcucagcccucccug

SEQ ID NO: 1793662 - RNA, 16 nt, Human
gcucagcccucccugc

SEQ ID NO: 1793663 - RNA, 12 nt, Human
gcucagcccucc

SEQ ID NO: 1793664 - RNA, 14 nt, Human
gcucaccucucccu

SEQ ID NO: 1793665 - RNA, 16 nt, Human
gcucaccucucccuug

SEQ ID NO: 1793666 - RNA, 17 nt, Human
gcucaccucucccuugg

SEQ ID NO: 1793667 - RNA, 18 nt, Human
gcucaccucucccuugga

SEQ ID NO: 1793668 - RNA, 21 nt, Human
gcuaguugggcuuccucauag

SEQ ID NO: 1793669 - RNA, 19 nt, Human
gcggugcuaucucccccag

SEQ ID NO: 1793670 - RNA, 22 nt, Human
gcggugcuaucucccccagccc

SEQ ID NO: 1793671 - RNA, 20 nt, Human
gcuauaacuauguugauaaa

SEQ ID NO: 1793672 - RNA, 22 nt, Human
gcucaaguccucuuuucugaga

SEQ ID NO: 1793673 - RNA, 19 nt, Human
gcucaaguccucuuuucug

SEQ ID NO: 1793674 - RNA, 18 nt, Human
gcucaaguccucuuuucu

SEQ ID NO: 1793675 - RNA, 14 nt, Human
gcuaucucccccag

SEQ ID NO: 1793676 - RNA, 15 nt, Human
gcuaucucccccagc

SEQ ID NO: 1793677 - RNA, 15 nt, Human
gcuaucguaaaauua

SEQ ID NO: 1793678 - RNA, 16 nt, Human
gcuaucguaaaauuaa

SEQ ID NO: 1793679 - RNA, 17 nt, Human
gcuaucguaaaauuaag

SEQ ID NO: 1793680 - RNA, 13 nt, Human
gcuaucuccccca

SEQ ID NO: 1793681 - RNA, 23 nt, Human
gcuccgcuuucuacccagcgagc

SEQ ID NO: 1793682 - RNA, 22 nt, Human
gcuccgcuuucuacccagcgag

SEQ ID NO: 1793683 - RNA, 21 nt, Human
gcuccgcuuucuacccagcga

SEQ ID NO: 1793684 - RNA, 18 nt, Human
gcuccgcuuucuacccag

SEQ ID NO: 1793685 - RNA, 20 nt, Human
gcucccuucccaccucucuc

SEQ ID NO: 1793686 - RNA, 15 nt, Human
gcucccacaggcccu

SEQ ID NO: 1793687 - RNA, 12 nt, Human
gcuccaggcucc

SEQ ID NO: 1793688 - RNA, 15 nt, Human
gcuccaggagcagcc

SEQ ID NO: 1793689 - RNA, 16 nt, Human
gcuccaggagcagcca

SEQ ID NO: 1793690 - RNA, 17 nt, Human
gcuccaggagcagccac

SEQ ID NO: 1793691 - RNA, 18 nt, Human
gcuccaggagcagccaca

SEQ ID NO: 1793692 - RNA, 11 nt, Human
gcuccaggagc

SEQ ID NO: 1793693 - RNA, 12 nt, Human
gcuccaggagca

SEQ ID NO: 1793694 - RNA, 14 nt, Human
gcuccaggagcagc

SEQ ID NO: 1793695 - RNA, 13 nt, Human
gcuccaaacccuc

SEQ ID NO: 1793696 - RNA, 21 nt, Human
gcuccagcuguucagcugguu

SEQ ID NO: 1793697 - RNA, 21 nt, Human
gcucgagcaugccuggauggg

SEQ ID NO: 1793698 - RNA, 19 nt, Human
gcucgagcaugccuggaug

SEQ ID NO: 1793699 - RNA, 17 nt, Human
gcuccuuuagcgcccag

SEQ ID NO: 1793700 - RNA, 13 nt, Human
gcuccuucugucc

SEQ ID NO: 1793701 - RNA, 13 nt, Human
gcuccugugucuu

SEQ ID NO: 1793702 - RNA, 12 nt, Human
gcuccugugucu

SEQ ID NO: 1793703 - RNA, 20 nt, Human
gcuccuuccucugaggcuga

SEQ ID NO: 1793704 - RNA, 22 nt, Human
gcuccuuccucugaggcugaaa

SEQ ID NO: 1793705 - RNA, 18 nt, Human
gcuccuuccucugaggcu

SEQ ID NO: 1793706 - RNA, 24 nt, Human
gcuccgcuuucuacccagcgagcc

SEQ ID NO: 1793707 - RNA, 23 nt, Human
gcuccuggggguucuuucuuccu

SEQ ID NO: 1793708 - RNA, 14 nt, Human
gcuccucccggugc

SEQ ID NO: 1793709 - RNA, 18 nt, Human
gccugaagucacacagug

SEQ ID NO: 1793710 - RNA, 17 nt, Human
gccugaagucacacagu

SEQ ID NO: 1793711 - RNA, 20 nt, Human
gccugagcgacagugagacu

SEQ ID NO: 1793712 - RNA, 17 nt, Human
gccugagcgacagugag

SEQ ID NO: 1793713 - RNA, 16 nt, Human
gccugaagucacacag

SEQ ID NO: 1793714 - RNA, 22 nt, Human
gcccaguuggguggaugccugg

SEQ ID NO: 1793715 - RNA, 21 nt, Human
gcccaguuggguggaugccug

SEQ ID NO: 1793716 - RNA, 19 nt, Human
gcccaguuggguggaugcc

SEQ ID NO: 1793717 - RNA, 12 nt, Human
gccugagcuggg

SEQ ID NO: 1793718 - RNA, 16 nt, Human
gccuggauggggcugc

SEQ ID NO: 1793719 - RNA, 18 nt, Human
gccuggauggggcugcac

SEQ ID NO: 1793720 - RNA, 13 nt, Human
gccuggcacaggg

SEQ ID NO: 1793721 - RNA, 14 nt, Human
gccuggcacagggc

SEQ ID NO: 1793722 - RNA, 20 nt, Human
gccuggauggggcugcaccg

SEQ ID NO: 1793723 - RNA, 20 nt, Human
gccuguaauccuagcacuuu

SEQ ID NO: 1793724 - RNA, 15 nt, Human
gccuguaauccuagc

SEQ ID NO: 1793725 - RNA, 22 nt, Human
gccuggccagaugcaccagccc

SEQ ID NO: 1793726 - RNA, 21 nt, Human
gccuggccagaugcaccagcc

SEQ ID NO: 1793727 - RNA, 20 nt, Human
gccuggccagaugcaccagc

SEQ ID NO: 1793728 - RNA, 22 nt, Human
gccuggcagccgugccuucagc

SEQ ID NO: 1793729 - RNA, 18 nt, Human
gccuggcacagggcagug

SEQ ID NO: 1793730 - RNA, 19 nt, Human
gccuggcacagggcagugg

SEQ ID NO: 1793731 - RNA, 12 nt, Human
gccuggcagccg

SEQ ID NO: 1793732 - RNA, 20 nt, Human
gccuggcagccgugccuuca

SEQ ID NO: 1793733 - RNA, 21 nt, Human
gccuggcagccgugccuucag

SEQ ID NO: 1793734 - RNA, 13 nt, Human
gccuggccccuca

SEQ ID NO: 1793735 - RNA, 14 nt, Human
gccuggccccucag

SEQ ID NO: 1793736 - RNA, 18 nt, Human
gcgcaggcuggcccugcc

SEQ ID NO: 1793737 - RNA, 19 nt, Human
gcgcaggcuggcccugccc

SEQ ID NO: 1793738 - RNA, 17 nt, Human
gcgcaggcuggcccugc

SEQ ID NO: 1793739 - RNA, 20 nt, Human
gcgcaggcuggcccugcccu

SEQ ID NO: 1793740 - RNA, 21 nt, Human
gcgcaggcuggcccugcccug

SEQ ID NO: 1793741 - RNA, 22 nt, Human
gcgcaggcuggcccugcccugg

SEQ ID NO: 1793742 - RNA, 12 nt, Human
gcgacaaugcaa

SEQ ID NO: 1793743 - RNA, 13 nt, Human
gcgacaaugcaaa

SEQ ID NO: 1793744 - RNA, 20 nt, Human
gcgacaaugcaaaccaucau

SEQ ID NO: 1793745 - RNA, 21 nt, Human
gcgacaaugcaaaccaucauu

SEQ ID NO: 1793746 - RNA, 16 nt, Human
gccuuacacaaugguu

SEQ ID NO: 1793747 - RNA, 15 nt, Human
gccuuacacaauggu

SEQ ID NO: 1793748 - RNA, 17 nt, Human
gccugucuuaauuuucu

SEQ ID NO: 1793749 - RNA, 16 nt, Human
gccugucuuaauuuuc

SEQ ID NO: 1793750 - RNA, 14 nt, Human
gcgguccacccagg

SEQ ID NO: 1793751 - RNA, 13 nt, Human
gcgguccacccag

SEQ ID NO: 1793752 - RNA, 19 nt, Human
gcggugagaggggaacaga

SEQ ID NO: 1793753 - RNA, 17 nt, Human
gcggggacagcuccuuc

SEQ ID NO: 1793754 - RNA, 15 nt, Human
gcggggacagcuccu

SEQ ID NO: 1793755 - RNA, 18 nt, Human
gcggggacagcuccuucu

SEQ ID NO: 1793756 - RNA, 14 nt, Human
gcggggacagcucc

SEQ ID NO: 1793757 - RNA, 19 nt, Human
gcggagacggagucccacc

SEQ ID NO: 1793758 - RNA, 16 nt, Human
gcggagaaaggaaggg

SEQ ID NO: 1793759 - RNA, 18 nt, Human
gcgcugccccuggcagcc

SEQ ID NO: 1793760 - RNA, 21 nt, Human
gcgcugccccuggcagccccu

SEQ ID NO: 1793761 - RNA, 23 nt, Human
gcgcccaguuggguggaugccug

SEQ ID NO: 1793762 - RNA, 13 nt, Human
gcgccccuucccc

SEQ ID NO: 1793763 - RNA, 21 nt, Human
gcgccuuaaggauguucuagc

SEQ ID NO: 1793764 - RNA, 15 nt, Human
gcuggaccuugaacu

SEQ ID NO: 1793765 - RNA, 16 nt, Human
gcuggaccuugaacug

SEQ ID NO: 1793766 - RNA, 14 nt, Human
gcuggcccugcccu

SEQ ID NO: 1793767 - RNA, 15 nt, Human
gcuggcccugcccug

SEQ ID NO: 1793768 - RNA, 16 nt, Human
gcuggcccugcccugg

SEQ ID NO: 1793769 - RNA, 19 nt, Human
gcuggcccuggcucccaca

SEQ ID NO: 1793770 - RNA, 23 nt, Human
gcuggaaugauuucagcucacug

SEQ ID NO: 1793771 - RNA, 22 nt, Human
gcugcuuuugucuaugggacuc

SEQ ID NO: 1793772 - RNA, 21 nt, Human
gcugcgguccacccaggagcc

SEQ ID NO: 1793773 - RNA, 16 nt, Human
gcugcgguccacccag

SEQ ID NO: 1793774 - RNA, 22 nt, Human
gcugcgguccacccaggagccc

SEQ ID NO: 1793775 - RNA, 15 nt, Human
gcugcgguccaccca

SEQ ID NO: 1793776 - RNA, 14 nt, Human
gcugcgguccaccc

SEQ ID NO: 1793777 - RNA, 19 nt, Human
gcugccuguucagcuccag

SEQ ID NO: 1793778 - RNA, 18 nt, Human
gcugccuguucagcucca

SEQ ID NO: 1793779 - RNA, 12 nt, Human
gcugcccuggug

SEQ ID NO: 1793780 - RNA, 13 nt, Human
gcugcccuggugc

SEQ ID NO: 1793781 - RNA, 14 nt, Human
gcugcccuggugcu

SEQ ID NO: 1793782 - RNA, 15 nt, Human
gcugcccuggugcug

SEQ ID NO: 1793783 - RNA, 22 nt, Human
gcugccuguucagcuccagcuc

SEQ ID NO: 1793784 - RNA, 20 nt, Human
gcugccuguucagcuccagc

SEQ ID NO: 1793785 - RNA, 20 nt, Human
gcugccuuagaaccuuucuu

SEQ ID NO: 1793786 - RNA, 17 nt, Human
gcugcccuggugcugcc

SEQ ID NO: 1793787 - RNA, 15 nt, Human
gcugccuuagaaccu

SEQ ID NO: 1793788 - RNA, 16 nt, Human
gcugcccugcccaccu

SEQ ID NO: 1793789 - RNA, 18 nt, Human
gcugcccugcccaccugg

SEQ ID NO: 1793790 - RNA, 20 nt, Human
gcugcccugcccaccuggcc

SEQ ID NO: 1793791 - RNA, 21 nt, Human
gcugcccugcccaccuggccu

SEQ ID NO: 1793792 - RNA, 22 nt, Human
gcugcccugcccaccuggccuc

SEQ ID NO: 1793793 - RNA, 23 nt, Human
gcugcccugcccaccuggccucu

SEQ ID NO: 1793794 - RNA, 24 nt, Human
gcugcccugcccaccuggccucug

SEQ ID NO: 1793795 - RNA, 13 nt, Human
gcugcccugccca

SEQ ID NO: 1793796 - RNA, 14 nt, Human
gcugcccugcccac

SEQ ID NO: 1793797 - RNA, 12 nt, Human
gcugcccugccc

SEQ ID NO: 1793798 - RNA, 23 nt, Human
gcugcaaaggguaucaggugcug

SEQ ID NO: 1793799 - RNA, 22 nt, Human
gcugcaaaggguaucaggugcu

SEQ ID NO: 1793800 - RNA, 21 nt, Human
gcugauuaaaccaaggcuaga

SEQ ID NO: 1793801 - RNA, 19 nt, Human
gcugcauuuaaaagauaca

SEQ ID NO: 1793802 - RNA, 18 nt, Human
gcugcauuuaaaagauac

SEQ ID NO: 1793803 - RNA, 17 nt, Human
gcugcaguugccaguca

SEQ ID NO: 1793804 - RNA, 13 nt, Human
gcugcaguugcca

SEQ ID NO: 1793805 - RNA, 14 nt, Human
gcugcaguugccag

SEQ ID NO: 1793806 - RNA, 15 nt, Human
gcugccacacuucag

SEQ ID NO: 1793807 - RNA, 17 nt, Human
gcugccacacuucaggc

SEQ ID NO: 1793808 - RNA, 18 nt, Human
gcugccacacuucaggcu

SEQ ID NO: 1793809 - RNA, 21 nt, Human
gcugccacacuucaggcucuu

SEQ ID NO: 1793810 - RNA, 22 nt, Human
gcugccacacuucaggcucuuc

SEQ ID NO: 1793811 - RNA, 23 nt, Human
gcugccacacuucaggcucuucu

SEQ ID NO: 1793812 - RNA, 12 nt, Human
gcugccaccugc

SEQ ID NO: 1793813 - RNA, 13 nt, Human
gcugccaccugcc

SEQ ID NO: 1793814 - RNA, 19 nt, Human
gcugacagacacaggcccg

SEQ ID NO: 1793815 - RNA, 18 nt, Human
gcugacagacacaggccc

SEQ ID NO: 1793816 - RNA, 17 nt, Human
gcugacagacacaggcc

SEQ ID NO: 1793817 - RNA, 20 nt, Human
gcugacagacacaggcccgg

SEQ ID NO: 1793818 - RNA, 22 nt, Human
gcugacuguuuucucuugagag

SEQ ID NO: 1793819 - RNA, 19 nt, Human
gcucuuggcagguacucag

SEQ ID NO: 1793820 - RNA, 19 nt, Human
gcucuugaugccuggcggg

SEQ ID NO: 1793821 - RNA, 14 nt, Human
gcucuugaacuccu

SEQ ID NO: 1793822 - RNA, 16 nt, Human
gcucuugaacuccuga

SEQ ID NO: 1793823 - RNA, 19 nt, Human
gcucuugaacuccugaccu

SEQ ID NO: 1793824 - RNA, 21 nt, Human
gcucuugaacuccugaccuca

SEQ ID NO: 1793825 - RNA, 21 nt, Human
gcucucaggccagcugcuugg

SEQ ID NO: 1793826 - RNA, 20 nt, Human
gcuucaguggcagcugcuuu

SEQ ID NO: 1793827 - RNA, 13 nt, Human
gcuuaucucaggg

SEQ ID NO: 1793828 - RNA, 19 nt, Human
gcuucaguggcagcugcuu

SEQ ID NO: 1793829 - RNA, 22 nt, Human
gcuucucacugccaugccagcu

SEQ ID NO: 1793830 - RNA, 18 nt, Human
gcuucauuuccugugucu

SEQ ID NO: 1793831 - RNA, 17 nt, Human
gcuucuguugcugccuc

SEQ ID NO: 1793832 - RNA, 18 nt, Human
gcuucuguugcugccuca

SEQ ID NO: 1793833 - RNA, 19 nt, Human
gcuucuguugcugccucau

SEQ ID NO: 1793834 - RNA, 18 nt, Human
gcuuugggcugcccuggu

SEQ ID NO: 1793835 - RNA, 19 nt, Human
gcuuugggcugcccuggug

SEQ ID NO: 1793836 - RNA, 13 nt, Human
gcuuuuaugugaa

SEQ ID NO: 1793837 - RNA, 15 nt, Human
gcuuuuaugugaaac

SEQ ID NO: 1793838 - RNA, 14 nt, Human
gcuuguuggauuuu

SEQ ID NO: 1793839 - RNA, 15 nt, Human
gcuggugucaccuga

SEQ ID NO: 1793840 - RNA, 14 nt, Human
gcuggugucaccug

SEQ ID NO: 1793841 - RNA, 13 nt, Human
gcugucaucucag

SEQ ID NO: 1793842 - RNA, 17 nt, Human
gcugucagccauuccug

SEQ ID NO: 1793843 - RNA, 23 nt, Human
gcugucccuuacgugaguccugg

SEQ ID NO: 1793844 - RNA, 16 nt, Human
gcugucccuuuuccuu

SEQ ID NO: 1793845 - RNA, 23 nt, Human
gcuguuagggguuauugguguaa

SEQ ID NO: 1793846 - RNA, 16 nt, Human
gcuguguggcagucug

SEQ ID NO: 1793847 - RNA, 15 nt, Human
gcugugucucccuuc

SEQ ID NO: 1793848 - RNA, 14 nt, Human
gcuggucccacuca

SEQ ID NO: 1793849 - RNA, 19 nt, Human
gcuggucucaaacuccuga

SEQ ID NO: 1793850 - RNA, 20 nt, Human
gcuggucucaaacuccugac

SEQ ID NO: 1793851 - RNA, 19 nt, Human
gcuggucucgaacuccuga

SEQ ID NO: 1793852 - RNA, 22 nt, Human
gcuggucucgaacuccugaccu

SEQ ID NO: 1793853 - RNA, 23 nt, Human
gcuggucucgaacuccugaccuu

SEQ ID NO: 1793854 - RNA, 18 nt, Human
gcugggggccucagugcc

SEQ ID NO: 1793855 - RNA, 15 nt, Human
gcugggggccucagu

SEQ ID NO: 1793856 - RNA, 14 nt, Human
gcugggggccucag

SEQ ID NO: 1793857 - RNA, 20 nt, Human
gcugggcuucaguggcagcu

SEQ ID NO: 1793858 - RNA, 22 nt, Human
gcugggcuucaguggcagcugc

SEQ ID NO: 1793859 - RNA, 21 nt, Human
gcugggcuucaguggcagcug

SEQ ID NO: 1793860 - RNA, 19 nt, Human
gcugggaugauuggagggg

SEQ ID NO: 1793861 - RNA, 21 nt, Human
gcugggcucccuucccaccuc

SEQ ID NO: 1793862 - RNA, 13 nt, Human
gcuggccuggccc

SEQ ID NO: 1793863 - RNA, 12 nt, Human
gcuggccuggcc

SEQ ID NO: 1793864 - RNA, 14 nt, Human
gcuggccuggcccc

SEQ ID NO: 1793865 - RNA, 15 nt, Human
gcuggccuggccccu

SEQ ID NO: 1793866 - RNA, 13 nt, Human
ggcuuuucacugc

SEQ ID NO: 1793867 - RNA, 21 nt, Human
gggaauguuugccucugccuc

SEQ ID NO: 1793868 - RNA, 19 nt, Human
gggaauguuugccucugcc

SEQ ID NO: 1793869 - RNA, 14 nt, Human
gggacacccuguga

SEQ ID NO: 1793870 - RNA, 23 nt, Human
gggacucaaugcacugacauugu

SEQ ID NO: 1793871 - RNA, 15 nt, Human
gggacugagaaauuu

SEQ ID NO: 1793872 - RNA, 21 nt, Human
gggacugaggggaggggagca

SEQ ID NO: 1793873 - RNA, 23 nt, Human
gggacugccagucccccugcccc

SEQ ID NO: 1793874 - RNA, 19 nt, Human
gggacucaaugcacugaca

SEQ ID NO: 1793875 - RNA, 17 nt, Human
gggacucaaugcacuga

SEQ ID NO: 1793876 - RNA, 16 nt, Human
gggaccccgagccugg

SEQ ID NO: 1793877 - RNA, 22 nt, Human
gggaggauguucugggacacag

SEQ ID NO: 1793878 - RNA, 21 nt, Human
gggaggauugcuugagcucag

SEQ ID NO: 1793879 - RNA, 23 nt, Human
gggaggaucucuugagccuggga

SEQ ID NO: 1793880 - RNA, 20 nt, Human
gggaggacgcucucuggccu

SEQ ID NO: 1793881 - RNA, 17 nt, Human
gggaggacgcucucugg

SEQ ID NO: 1793882 - RNA, 17 nt, Human
gggagugacagaggcag

SEQ ID NO: 1793883 - RNA, 21 nt, Human
gggagugaguugauagcacag

SEQ ID NO: 1793884 - RNA, 23 nt, Human
gggaggauugcuugagcucagga

SEQ ID NO: 1793885 - RNA, 20 nt, Human
gggaggugggauccuccagg

SEQ ID NO: 1793886 - RNA, 22 nt, Human
gggagcugccuguucagcucca

SEQ ID NO: 1793887 - RNA, 21 nt, Human
gggagcugccuguucagcucc

SEQ ID NO: 1793888 - RNA, 13 nt, Human
gggagcugccugu

SEQ ID NO: 1793889 - RNA, 12 nt, Human
gggagcucugca

SEQ ID NO: 1793890 - RNA, 21 nt, Human
gggagccugaucaccugcccu

SEQ ID NO: 1793891 - RNA, 15 nt, Human
ggcuuaaaacaacac

SEQ ID NO: 1793892 - RNA, 20 nt, Human
ggcuguuggcugggggccuc

SEQ ID NO: 1793893 - RNA, 16 nt, Human
ggcuguuggcuggggg

SEQ ID NO: 1793894 - RNA, 15 nt, Human
ggcuguuggcugggg

SEQ ID NO: 1793895 - RNA, 14 nt, Human
ggcuguuggcuggg

SEQ ID NO: 1793896 - RNA, 17 nt, Human
ggcugucuguuguauuc

SEQ ID NO: 1793897 - RNA, 13 nt, Human
ggcugugccucug

SEQ ID NO: 1793898 - RNA, 16 nt, Human
ggcugugccucugccu

SEQ ID NO: 1793899 - RNA, 11 nt, Human
ggcuugcugcc

SEQ ID NO: 1793900 - RNA, 17 nt, Human
ggcuuggggaccagagc

SEQ ID NO: 1793901 - RNA, 18 nt, Human
ggcuuggggaccagagcu

SEQ ID NO: 1793902 - RNA, 19 nt, Human
ggcuuggggaccagagcug

SEQ ID NO: 1793903 - RNA, 14 nt, Human
ggcuuagucacuga

SEQ ID NO: 1793904 - RNA, 15 nt, Human
ggcuuagucacugag

SEQ ID NO: 1793905 - RNA, 20 nt, Human
ggcuucacggaagagccuug

SEQ ID NO: 1793906 - RNA, 21 nt, Human
ggcuucacggaagagccuugc

SEQ ID NO: 1793907 - RNA, 12 nt, Human
ggcuucacagau

SEQ ID NO: 1793908 - RNA, 21 nt, Human
ggcugcuucaaggauccugag

SEQ ID NO: 1793909 - RNA, 20 nt, Human
ggcugcuucaaggauccuga

SEQ ID NO: 1793910 - RNA, 23 nt, Human
ggcucuggagcccacuguacuug

SEQ ID NO: 1793911 - RNA, 15 nt, Human
ggcugcuucaaggau

SEQ ID NO: 1793912 - RNA, 19 nt, Human
ggcugcuucaaggauccug

SEQ ID NO: 1793913 - RNA, 14 nt, Human
ggcugggggccuca

SEQ ID NO: 1793914 - RNA, 16 nt, Human
ggcugggggaagaagc

SEQ ID NO: 1793915 - RNA, 22 nt, Human
ggcugggcuucaguggcagcug

SEQ ID NO: 1793916 - RNA, 21 nt, Human
ggcugggcuucaguggcagcu

SEQ ID NO: 1793917 - RNA, 11 nt, Human
ggcugggcuuc

SEQ ID NO: 1793918 - RNA, 20 nt, Human
ggcugggcucccuucccacc

SEQ ID NO: 1793919 - RNA, 21 nt, Human
ggcugggcucccuucccaccu

SEQ ID NO: 1793920 - RNA, 15 nt, Human
ggcugggagcucugc

SEQ ID NO: 1793921 - RNA, 9 nt, Human
ggcuccaga

SEQ ID NO: 1793922 - RNA, 16 nt, Human
ggcuccacuuggucug

SEQ ID NO: 1793923 - RNA, 14 nt, Human
ggcuaugcauuuga

SEQ ID NO: 1793924 - RNA, 13 nt, Human
ggcuaugcauuug

SEQ ID NO: 1793925 - RNA, 12 nt, Human
ggcuaugcauuu

SEQ ID NO: 1793926 - RNA, 13 nt, Human
ggcuccaggcucc

SEQ ID NO: 1793927 - RNA, 12 nt, Human
ggcuccaggcuc

SEQ ID NO: 1793928 - RNA, 18 nt, Human
ggcuccaggagcagccac

SEQ ID NO: 1793929 - RNA, 17 nt, Human
ggcuccaggagcagcca

SEQ ID NO: 1793930 - RNA, 10 nt, Human
ggcuccagac

SEQ ID NO: 1793931 - RNA, 14 nt, Human
ggcuccaggagcag

SEQ ID NO: 1793932 - RNA, 16 nt, Human
ggcuccaggagcagcc

SEQ ID NO: 1793933 - RNA, 17 nt, Human
ggcgcugccccuggcag

SEQ ID NO: 1793934 - RNA, 11 nt, Human
ggcgcugcccc

SEQ ID NO: 1793935 - RNA, 15 nt, Human
ggcgcgguggcucac

SEQ ID NO: 1793936 - RNA, 20 nt, Human
ggcuaguaucaaaagaaaga

SEQ ID NO: 1793937 - RNA, 14 nt, Human
ggcuccaggcuccu

SEQ ID NO: 1793938 - RNA, 15 nt, Human
ggcuccaggcuccuu

SEQ ID NO: 1793939 - RNA, 15 nt, Human
ggcucucaggccagc

SEQ ID NO: 1793940 - RNA, 16 nt, Human
ggcucucaggccagcu

SEQ ID NO: 1793941 - RNA, 17 nt, Human
ggcucucaggccagcug

SEQ ID NO: 1793942 - RNA, 18 nt, Human
ggcucucaggccagcugc

SEQ ID NO: 1793943 - RNA, 19 nt, Human
ggcucucaggccagcugcu

SEQ ID NO: 1793944 - RNA, 20 nt, Human
ggcucucaggccagcugcuu

SEQ ID NO: 1793945 - RNA, 17 nt, Human
ggcucuggagcccacug

SEQ ID NO: 1793946 - RNA, 19 nt, Human
ggcucuggagcccacugua

SEQ ID NO: 1793947 - RNA, 16 nt, Human
ggcucuggagcccacu

SEQ ID NO: 1793948 - RNA, 16 nt, Human
ggcucugccucccauc

SEQ ID NO: 1793949 - RNA, 14 nt, Human
ggcucugcccuugg

SEQ ID NO: 1793950 - RNA, 15 nt, Human
ggcucugcccuuggu

SEQ ID NO: 1793951 - RNA, 13 nt, Human
ggcucugccuccc

SEQ ID NO: 1793952 - RNA, 15 nt, Human
ggcucugccucccau

SEQ ID NO: 1793953 - RNA, 12 nt, Human
ggcucugcccuu

SEQ ID NO: 1793954 - RNA, 11 nt, Human
ggccugggccc

SEQ ID NO: 1793955 - RNA, 23 nt, Human
ggccugggggcugggcagaggaa

SEQ ID NO: 1793956 - RNA, 15 nt, Human
ggccuggccugagcu

SEQ ID NO: 1793957 - RNA, 16 nt, Human
ggccuggccugagcug

SEQ ID NO: 1793958 - RNA, 23 nt, Human
ggcgcagcauauucaggaagcuc

SEQ ID NO: 1793959 - RNA, 24 nt, Human
ggcgcagcauauucaggaagcuca

SEQ ID NO: 1793960 - RNA, 12 nt, Human
ggccugagcugg

SEQ ID NO: 1793961 - RNA, 13 nt, Human
ggccuggccccuc

SEQ ID NO: 1793962 - RNA, 22 nt, Human
ggccucugcacuccccugcugg

SEQ ID NO: 1793963 - RNA, 18 nt, Human
ggccucugcacuccccug

SEQ ID NO: 1793964 - RNA, 19 nt, Human
ggccucugcacuccccugc

SEQ ID NO: 1793965 - RNA, 14 nt, Human
ggccuggccccuca

SEQ ID NO: 1793966 - RNA, 15 nt, Human
ggccuggccccucag

SEQ ID NO: 1793967 - RNA, 17 nt, Human
ggccuggccccucaggg

SEQ ID NO: 1793968 - RNA, 18 nt, Human
ggccuggccccucagggu

SEQ ID NO: 1793969 - RNA, 23 nt, Human
ggccuggccccucagggucccug

SEQ ID NO: 1793970 - RNA, 10 nt, Human
ggccuggccu

SEQ ID NO: 1793971 - RNA, 13 nt, Human
ggccuggccugag

SEQ ID NO: 1793972 - RNA, 14 nt, Human
ggccuggccugagc

SEQ ID NO: 1793973 - RNA, 14 nt, Human
ggccuccugugugu

SEQ ID NO: 1793974 - RNA, 23 nt, Human
ggccucaagugauucuccugccu

SEQ ID NO: 1793975 - RNA, 22 nt, Human
ggccucaagugauucuccugcc

SEQ ID NO: 1793976 - RNA, 14 nt, Human
ggccucaagugauu

SEQ ID NO: 1793977 - RNA, 22 nt, Human
ggccuagcauacguacacauuu

SEQ ID NO: 1793978 - RNA, 20 nt, Human
ggccuagcauacguacacau

SEQ ID NO: 1793979 - RNA, 20 nt, Human
ggcccagagggccugcaagg

SEQ ID NO: 1793980 - RNA, 17 nt, Human
ggcccagagggccugca

SEQ ID NO: 1793981 - RNA, 19 nt, Human
ggcccagagggccugcaag

SEQ ID NO: 1793982 - RNA, 14 nt, Human
ggcccagagggccu

SEQ ID NO: 1793983 - RNA, 22 nt, Human
ggccgggaccccgagccuggcu

SEQ ID NO: 1793984 - RNA, 23 nt, Human
ggccgggaccccgagccuggcuc

SEQ ID NO: 1793985 - RNA, 15 nt, Human
ggccgggagccugau

SEQ ID NO: 1793986 - RNA, 17 nt, Human
ggcaagcaccuccugcc

SEQ ID NO: 1793987 - RNA, 21 nt, Human
ggauucuuccucccucccucu

SEQ ID NO: 1793988 - RNA, 19 nt, Human
ggcaagcaccuccugccuc

SEQ ID NO: 1793989 - RNA, 18 nt, Human
ggcaagcaccuccugccu

SEQ ID NO: 1793990 - RNA, 17 nt, Human
ggcaccagcagccugga

SEQ ID NO: 1793991 - RNA, 21 nt, Human
ggcagagguugcagugagccg

SEQ ID NO: 1793992 - RNA, 22 nt, Human
ggcagagcagagaccaucccug

SEQ ID NO: 1793993 - RNA, 20 nt, Human
ggcacucagaagacacugau

SEQ ID NO: 1793994 - RNA, 19 nt, Human
ggcacucagaagacacuga

SEQ ID NO: 1793995 - RNA, 18 nt, Human
ggcacucagaagacacug

SEQ ID NO: 1793996 - RNA, 20 nt, Human
ggcacccggccccugcuggu

SEQ ID NO: 1793997 - RNA, 19 nt, Human
ggcacccggccccugcugg

SEQ ID NO: 1793998 - RNA, 18 nt, Human
ggcacccggccccugcug

SEQ ID NO: 1793999 - RNA, 20 nt, Human
ggcacccaccaucaugucug

SEQ ID NO: 1794000 - RNA, 23 nt, Human
ggagucccaccuuggcugcaggg

SEQ ID NO: 1794001 - RNA, 16 nt, Human
ggaugaucuaggaaga

SEQ ID NO: 1794002 - RNA, 18 nt, Human
ggaugaucuaggaagacu

SEQ ID NO: 1794003 - RNA, 22 nt, Human
ggaugaucuaggaagacuuugg

SEQ ID NO: 1794004 - RNA, 17 nt, Human
ggaugccugguggcagc

SEQ ID NO: 1794005 - RNA, 13 nt, Human
ggaugccuggugg

SEQ ID NO: 1794006 - RNA, 17 nt, Human
ggaugccccgucccccu

SEQ ID NO: 1794007 - RNA, 19 nt, Human
ggaugcccaaagaugcagc

SEQ ID NO: 1794008 - RNA, 18 nt, Human
ggaugaugacuauggaaa

SEQ ID NO: 1794009 - RNA, 18 nt, Human
ggaugcccaaagaugcag

SEQ ID NO: 1794010 - RNA, 21 nt, Human
ggaugccugguggcagcugcg

SEQ ID NO: 1794011 - RNA, 20 nt, Human
ggaugccugguggcagcugc

SEQ ID NO: 1794012 - RNA, 19 nt, Human
ggaugccugguggcagcug

SEQ ID NO: 1794013 - RNA, 18 nt, Human
ggaugccugguggcagcu

SEQ ID NO: 1794014 - RNA, 12 nt, Human
ggauuauauuau

SEQ ID NO: 1794015 - RNA, 21 nt, Human
ggcagcugcgguccacccagg

SEQ ID NO: 1794016 - RNA, 17 nt, Human
ggcagaguugaagacag

SEQ ID NO: 1794017 - RNA, 19 nt, Human
ggcagaguugaagacagag

SEQ ID NO: 1794018 - RNA, 21 nt, Human
ggcagaguugaagacagagcu

SEQ ID NO: 1794019 - RNA, 24 nt, Human
ggcagcugcgguccacccaggagc

SEQ ID NO: 1794020 - RNA, 23 nt, Human
ggcagcugcgguccacccaggag

SEQ ID NO: 1794021 - RNA, 12 nt, Human
ggcaggguccua

SEQ ID NO: 1794022 - RNA, 18 nt, Human
ggcagggucucacucugu

SEQ ID NO: 1794023 - RNA, 17 nt, Human
ggcagggucucacucug

SEQ ID NO: 1794024 - RNA, 17 nt, Human
ggcagguuggugggggc

SEQ ID NO: 1794025 - RNA, 18 nt, Human
ggcaugugaugagaggaa

SEQ ID NO: 1794026 - RNA, 23 nt, Human
ggcaugugaugagaggaaaucac

SEQ ID NO: 1794027 - RNA, 22 nt, Human
ggcaugacacgaauauugcuga

SEQ ID NO: 1794028 - RNA, 20 nt, Human
ggcauguucucugaggacac

SEQ ID NO: 1794029 - RNA, 22 nt, Human
ggccacagaaaauucuucucca

SEQ ID NO: 1794030 - RNA, 20 nt, Human
ggccacugugaagagaacca

SEQ ID NO: 1794031 - RNA, 11 nt, Human
ggccaggagcc

SEQ ID NO: 1794032 - RNA, 13 nt, Human
ggccaggagccuc

SEQ ID NO: 1794033 - RNA, 14 nt, Human
ggccaggcccucug

SEQ ID NO: 1794034 - RNA, 17 nt, Human
ggccaggcccucugccc

SEQ ID NO: 1794035 - RNA, 15 nt, Human
ggccaggcccucugc

SEQ ID NO: 1794036 - RNA, 16 nt, Human
ggccaggcccucugcc

SEQ ID NO: 1794037 - RNA, 21 nt, Human
ggaggauguucugggacacag

SEQ ID NO: 1794038 - RNA, 18 nt, Human
ggaggauguucugggaca

SEQ ID NO: 1794039 - RNA, 16 nt, Human
ggaggacgcucucugg

SEQ ID NO: 1794040 - RNA, 17 nt, Human
ggaggcaggaguuucgu

SEQ ID NO: 1794041 - RNA, 17 nt, Human
ggagggagggcuccaga

SEQ ID NO: 1794042 - RNA, 13 nt, Human
ggagggagggcuc

SEQ ID NO: 1794043 - RNA, 16 nt, Human
ggagggagggcuccag

SEQ ID NO: 1794044 - RNA, 13 nt, Human
ggagggccugggc

SEQ ID NO: 1794045 - RNA, 19 nt, Human
ggaggggagcaugggaagu

SEQ ID NO: 1794046 - RNA, 13 nt, Human
ggaggggccuggc

SEQ ID NO: 1794047 - RNA, 22 nt, Human
ggagucccaccuuggcugcagg

SEQ ID NO: 1794048 - RNA, 14 nt, Human
ggaggggccuggca

SEQ ID NO: 1794049 - RNA, 18 nt, Human
ggaggggccuggcagccg

SEQ ID NO: 1794050 - RNA, 21 nt, Human
ggaggggccuggcagccgugc

SEQ ID NO: 1794051 - RNA, 16 nt, Human
ggagcccugggaggcu

SEQ ID NO: 1794052 - RNA, 19 nt, Human
ggagcccugggaggcucug

SEQ ID NO: 1794053 - RNA, 14 nt, Human
ggagccuccugccc

SEQ ID NO: 1794054 - RNA, 20 nt, Human
ggagcccugggaggcucugg

SEQ ID NO: 1794055 - RNA, 15 nt, Human
ggagccuccugcccu

SEQ ID NO: 1794056 - RNA, 18 nt, Human
ggacugagaaauuuauaa

SEQ ID NO: 1794057 - RNA, 19 nt, Human
ggacgcucucuggccuucg

SEQ ID NO: 1794058 - RNA, 16 nt, Human
ggacgcucucuggccu

SEQ ID NO: 1794059 - RNA, 14 nt, Human
ggacugagaaauuu

SEQ ID NO: 1794060 - RNA, 18 nt, Human
ggaccuugaacuggguac

SEQ ID NO: 1794061 - RNA, 19 nt, Human
ggaccagagcugccaccug

SEQ ID NO: 1794062 - RNA, 14 nt, Human
ggaccagagcugcc

SEQ ID NO: 1794063 - RNA, 17 nt, Human
ggacagcuccuucuguc

SEQ ID NO: 1794064 - RNA, 16 nt, Human
ggacagcuccuucugu

SEQ ID NO: 1794065 - RNA, 15 nt, Human
ggacagcuccuucug

SEQ ID NO: 1794066 - RNA, 11 nt, Human
ggacagcuccu

SEQ ID NO: 1794067 - RNA, 15 nt, Human
ggacagccccuccuc

SEQ ID NO: 1794068 - RNA, 16 nt, Human
ggacagccccuccucc

SEQ ID NO: 1794069 - RNA, 20 nt, Human
ggacagaggggguggccucc

SEQ ID NO: 1794070 - RNA, 12 nt, Human
gcuuuucacugc

SEQ ID NO: 1794071 - RNA, 19 nt, Human
gcuuuuaugugaaacaugu

SEQ ID NO: 1794072 - RNA, 20 nt, Human
gcuuuuaugugaaacauguu

SEQ ID NO: 1794073 - RNA, 21 nt, Human
gcuuuuaugugaaacauguuu

SEQ ID NO: 1794074 - RNA, 15 nt, Human
ggacagaagcagcuc

SEQ ID NO: 1794075 - RNA, 16 nt, Human
ggacagaagcagcucu

SEQ ID NO: 1794076 - RNA, 17 nt, Human
ggacagaagcagcucuu

SEQ ID NO: 1794077 - RNA, 14 nt, Human
ggacagaagcagcu

SEQ ID NO: 1794078 - RNA, 16 nt, Human
ggacagaggggguggc

SEQ ID NO: 1794079 - RNA, 20 nt, Human
gccacagagaaaguacuucu

SEQ ID NO: 1794080 - RNA, 14 nt, Human
gccacagagaaagu

SEQ ID NO: 1794081 - RNA, 13 nt, Human
gccacagagaaag

SEQ ID NO: 1794082 - RNA, 23 nt, Human
gccacacuucaggcucuucuccu

SEQ ID NO: 1794083 - RNA, 20 nt, Human
gccacacuucaggcucuucu

SEQ ID NO: 1794084 - RNA, 22 nt, Human
gccacacuucaggcucuucucc

SEQ ID NO: 1794085 - RNA, 23 nt, Human
gccacagagaaaguacuucucca

SEQ ID NO: 1794086 - RNA, 16 nt, Human
gccacaagacccuugu

SEQ ID NO: 1794087 - RNA, 22 nt, Human
gccacaagacccuugugguccc

SEQ ID NO: 1794088 - RNA, 14 nt, Human
gccaaggugggagg

SEQ ID NO: 1794089 - RNA, 15 nt, Human
gccaaggugggagga

SEQ ID NO: 1794090 - RNA, 23 nt, Human
gccaaggugggaggauugcuuga

SEQ ID NO: 1794091 - RNA, 23 nt, Human
gcauuuggugguuucagaaaugu

SEQ ID NO: 1794092 - RNA, 22 nt, Human
gcauuuggugguuucagaaaug

SEQ ID NO: 1794093 - RNA, 20 nt, Human
gcauuugaggucuguucuuu

SEQ ID NO: 1794094 - RNA, 19 nt, Human
gcauuugaggucuguucuu

SEQ ID NO: 1794095 - RNA, 21 nt, Human
gcauuugaggucuguucuuuc

SEQ ID NO: 1794096 - RNA, 12 nt, Human
gcauuugugaaa

SEQ ID NO: 1794097 - RNA, 21 nt, Human
gccaaggcugggggaagaagc

SEQ ID NO: 1794098 - RNA, 16 nt, Human
gccaauggagacuguc

SEQ ID NO: 1794099 - RNA, 19 nt, Human
gccaauggagacugucuca

SEQ ID NO: 1794100 - RNA, 21 nt, Human
gccaauggagacugucucaag

SEQ ID NO: 1794101 - RNA, 12 nt, Human
gccaaguucuua

SEQ ID NO: 1794102 - RNA, 20 nt, Human
gccaauaauaauaccucccu

SEQ ID NO: 1794103 - RNA, 20 nt, Human
gccacuauuguuagucucuu

SEQ ID NO: 1794104 - RNA, 20 nt, Human
gccagagacacaagccuucg

SEQ ID NO: 1794105 - RNA, 10 nt, Human
gccagaggag

SEQ ID NO: 1794106 - RNA, 17 nt, Human
gccagagacacaagccu

SEQ ID NO: 1794107 - RNA, 19 nt, Human
gccagagacacaagccuuc

SEQ ID NO: 1794108 - RNA, 16 nt, Human
gccagagacacaagcc

SEQ ID NO: 1794109 - RNA, 18 nt, Human
gccagaugcaccagcccu

SEQ ID NO: 1794110 - RNA, 17 nt, Human
gccagaugcaccagccc

SEQ ID NO: 1794111 - RNA, 16 nt, Human
gccagaugcaccagcc

SEQ ID NO: 1794112 - RNA, 23 nt, Human
gccagagggagugacagaggcag

SEQ ID NO: 1794113 - RNA, 22 nt, Human
gccagagggagugacagaggca

SEQ ID NO: 1794114 - RNA, 21 nt, Human
gccagagggagugacagaggc

SEQ ID NO: 1794115 - RNA, 19 nt, Human
gccagaggagagaggaccc

SEQ ID NO: 1794116 - RNA, 22 nt, Human
gccagaggagagaggacccccu

SEQ ID NO: 1794117 - RNA, 12 nt, Human
gccagaggagag

SEQ ID NO: 1794118 - RNA, 13 nt, Human
gccagaggagaga

SEQ ID NO: 1794119 - RNA, 15 nt, Human
gccagaggagagagg

SEQ ID NO: 1794120 - RNA, 17 nt, Human
gccagaggagagaggac

SEQ ID NO: 1794121 - RNA, 17 nt, Human
gccaccugccuguuggg

SEQ ID NO: 1794122 - RNA, 17 nt, Human
gccaccgcgcccagccu

SEQ ID NO: 1794123 - RNA, 17 nt, Human
gccaccgugccuggcca

SEQ ID NO: 1794124 - RNA, 22 nt, Human
gccaccgugccuggccacgccc

SEQ ID NO: 1794125 - RNA, 17 nt, Human
gccacggccaggccaga

SEQ ID NO: 1794126 - RNA, 18 nt, Human
gccacggccaggccagag

SEQ ID NO: 1794127 - RNA, 20 nt, Human
gccacgcccaacuaauuuuu

SEQ ID NO: 1794128 - RNA, 19 nt, Human
gccacggccaggccagagg

SEQ ID NO: 1794129 - RNA, 11 nt, Human
gccaccugggu

SEQ ID NO: 1794130 - RNA, 22 nt, Human
gccaccugcggugcuaucuccc

SEQ ID NO: 1794131 - RNA, 14 nt, Human
gccaccugcggugc

SEQ ID NO: 1794132 - RNA, 20 nt, Human
gccaccugcggugcuaucuc

SEQ ID NO: 1794133 - RNA, 22 nt, Human
gccaugggacagggaggacgcu

SEQ ID NO: 1794134 - RNA, 23 nt, Human
gccaugggacagggaggacgcuc

SEQ ID NO: 1794135 - RNA, 14 nt, Human
gcccaaccugcucu

SEQ ID NO: 1794136 - RNA, 19 nt, Human
gccaugccagcuuaucuca

SEQ ID NO: 1794137 - RNA, 13 nt, Human
gccaugccagcuu

SEQ ID NO: 1794138 - RNA, 18 nt, Human
gccaugccagcuuaucuc

SEQ ID NO: 1794139 - RNA, 18 nt, Human
gccaugaggaacaaggca

SEQ ID NO: 1794140 - RNA, 20 nt, Human
gccaugaggaacaaggcaag

SEQ ID NO: 1794141 - RNA, 23 nt, Human
gccagggacagaggggguggccu

SEQ ID NO: 1794142 - RNA, 22 nt, Human
gccaggcuggucucgaacuccu

SEQ ID NO: 1794143 - RNA, 13 nt, Human
gccagggacagag

SEQ ID NO: 1794144 - RNA, 16 nt, Human
gccagggacagagggg

SEQ ID NO: 1794145 - RNA, 18 nt, Human
gccagggacagagggggu

SEQ ID NO: 1794146 - RNA, 16 nt, Human
gccagauuucacucuc

SEQ ID NO: 1794147 - RNA, 18 nt, Human
gccagauuucacucuccu

SEQ ID NO: 1794148 - RNA, 21 nt, Human
gccagauuucacucuccuugg

SEQ ID NO: 1794149 - RNA, 22 nt, Human
gccaggcugcucuugaacuccu

SEQ ID NO: 1794150 - RNA, 13 nt, Human
gccaggcuggguc

SEQ ID NO: 1794151 - RNA, 13 nt, Human
gccaggcugcucu

SEQ ID NO: 1794152 - RNA, 14 nt, Human
gccaggcugcucuu

SEQ ID NO: 1794153 - RNA, 17 nt, Human
gccagguuuuuggucug

SEQ ID NO: 1794154 - RNA, 12 nt, Human
gccaguaaaugg

SEQ ID NO: 1794155 - RNA, 21 nt, Human
gccagucaccccggccaccug

SEQ ID NO: 1794156 - RNA, 20 nt, Human
gccagucaccccggccaccu

SEQ ID NO: 1794157 - RNA, 17 nt, Human
gccagucaccccggcca

SEQ ID NO: 1794158 - RNA, 18 nt, Human
gccagucaccccggccac

SEQ ID NO: 1794159 - RNA, 15 nt, Human
gcccaguugggugga

SEQ ID NO: 1794160 - RNA, 20 nt, Human
gcccagucuggaaugcagug

SEQ ID NO: 1794161 - RNA, 19 nt, Human
gcccagucuggaaugcagu

SEQ ID NO: 1794162 - RNA, 23 nt, Human
gcccaggcuuagucacugagaca

SEQ ID NO: 1794163 - RNA, 19 nt, Human
gcccaggcuuagucacuga

SEQ ID NO: 1794164 - RNA, 21 nt, Human
gcccaggcuuagucacugaga

SEQ ID NO: 1794165 - RNA, 20 nt, Human
gcccaggcuggcgugcagug

SEQ ID NO: 1794166 - RNA, 19 nt, Human
gcccaggcuggcgugcagu

SEQ ID NO: 1794167 - RNA, 22 nt, Human
gcccaggcuggcgugcaguggu

SEQ ID NO: 1794168 - RNA, 18 nt, Human
gcccaggaaaggcuccag

SEQ ID NO: 1794169 - RNA, 19 nt, Human
gcccaggaaaggcuccagg

SEQ ID NO: 1794170 - RNA, 20 nt, Human
gcccaggaaaggcuccagga

SEQ ID NO: 1794171 - RNA, 21 nt, Human
gcccaggaaaggcuccaggag

SEQ ID NO: 1794172 - RNA, 21 nt, Human
gcccagcuugaaaccuucacu

SEQ ID NO: 1794173 - RNA, 20 nt, Human
gcccagccccuucugaccca

SEQ ID NO: 1794174 - RNA, 24 nt, Human
gcccagccccuucugacccaugcu

SEQ ID NO: 1794175 - RNA, 13 nt, Human
gcccagccccuuc

SEQ ID NO: 1794176 - RNA, 14 nt, Human
gcccagccccuucu

SEQ ID NO: 1794177 - RNA, 16 nt, Human
gcccagccccuucuga

SEQ ID NO: 1794178 - RNA, 17 nt, Human
gcccagccccuucugac

SEQ ID NO: 1794179 - RNA, 12 nt, Human
gcccagccccuu

SEQ ID NO: 1794180 - RNA, 11 nt, Human
gcccagccccu

SEQ ID NO: 1794181 - RNA, 9 nt, Human
gcccagccc

SEQ ID NO: 1794182 - RNA, 22 nt, Human
gcccagagggccugcaagggag

SEQ ID NO: 1794183 - RNA, 20 nt, Human
gcccagagggccugcaaggg

SEQ ID NO: 1794184 - RNA, 21 nt, Human
gcccagagggccugcaaggga

SEQ ID NO: 1794185 - RNA, 15 nt, Human
gcccagagagggugg

SEQ ID NO: 1794186 - RNA, 21 nt, Human
gcccaaugcacuuuguucugg

SEQ ID NO: 1794187 - RNA, 12 nt, Human
gcccagagggcc

SEQ ID NO: 1794188 - RNA, 14 nt, Human
gcccagagggccug

SEQ ID NO: 1794189 - RNA, 15 nt, Human
gcccagagggccugc

SEQ ID NO: 1794190 - RNA, 18 nt, Human
gcccagagggccugcaag

SEQ ID NO: 1794191 - RNA, 19 nt, Human
gcccagagggccugcaagg

SEQ ID NO: 1794192 - RNA, 15 nt, Human
gcaucucagcccaca

SEQ ID NO: 1794193 - RNA, 20 nt, Human
gcaugaaguaauaugcacac

SEQ ID NO: 1794194 - RNA, 22 nt, Human
gcaugaaguaauaugcacacau

SEQ ID NO: 1794195 - RNA, 21 nt, Human
gcaugaaguaauaugcacaca

SEQ ID NO: 1794196 - RNA, 23 nt, Human
gcaugaaguaauaugcacacauu

SEQ ID NO: 1794197 - RNA, 21 nt, Human
gcaugacacgaauauugcuga

SEQ ID NO: 1794198 - RNA, 22 nt, Human
gcaugacacgaauauugcugau

SEQ ID NO: 1794199 - RNA, 13 nt, Human
gcaucucagccca

SEQ ID NO: 1794200 - RNA, 14 nt, Human
gcaucucagcccac

SEQ ID NO: 1794201 - RNA, 12 nt, Human
gcaucucagccc

SEQ ID NO: 1794202 - RNA, 23 nt, Human
gcaucagugcccuccaggauaga

SEQ ID NO: 1794203 - RNA, 15 nt, Human
gcaucagugcccucc

SEQ ID NO: 1794204 - RNA, 23 nt, Human
gcaucaggccaggcccucugccc

SEQ ID NO: 1794205 - RNA, 18 nt, Human
gcaucaggccaggcccuc

SEQ ID NO: 1794206 - RNA, 12 nt, Human
gcaucaggccag

SEQ ID NO: 1794207 - RNA, 14 nt, Human
gcaugccuggaugg

SEQ ID NO: 1794208 - RNA, 14 nt, Human
gcauguucucugag

SEQ ID NO: 1794209 - RNA, 13 nt, Human
gcauguuacauaa

SEQ ID NO: 1794210 - RNA, 15 nt, Human
gcaugccuggauggg

SEQ ID NO: 1794211 - RNA, 24 nt, Human
gcauuaucuagauacuguaucaug

SEQ ID NO: 1794212 - RNA, 22 nt, Human
gcauuaucuagauacuguauca

SEQ ID NO: 1794213 - RNA, 19 nt, Human
gcauuaucuagauacugua

SEQ ID NO: 1794214 - RNA, 18 nt, Human
gcauuugaggucuguucu

SEQ ID NO: 1794215 - RNA, 22 nt, Human
gcauuccccaggaggccagccu

SEQ ID NO: 1794216 - RNA, 14 nt, Human
gcauuccccaggag

SEQ ID NO: 1794217 - RNA, 15 nt, Human
gcauuccccaggagg

SEQ ID NO: 1794218 - RNA, 16 nt, Human
gcauuccccaggaggc

SEQ ID NO: 1794219 - RNA, 17 nt, Human
gcauuccccaggaggcc

SEQ ID NO: 1794220 - RNA, 18 nt, Human
gcauuccccaggaggcca

SEQ ID NO: 1794221 - RNA, 19 nt, Human
gcauuccccaggaggccag

SEQ ID NO: 1794222 - RNA, 20 nt, Human
gcauuccccaggaggccagc

SEQ ID NO: 1794223 - RNA, 21 nt, Human
gcauuccccaggaggccagcc

SEQ ID NO: 1794224 - RNA, 21 nt, Human
gcaguggugcgaucuggguuc

SEQ ID NO: 1794225 - RNA, 20 nt, Human
gcaguggugcgaucuggguu

SEQ ID NO: 1794226 - RNA, 22 nt, Human
gcaguggugcgaucuggguuca

SEQ ID NO: 1794227 - RNA, 19 nt, Human
gcaguggugguuuucuguu

SEQ ID NO: 1794228 - RNA, 21 nt, Human
gcaguggugguuuucuguucu

SEQ ID NO: 1794229 - RNA, 20 nt, Human
gcaguggugguuuucuguuc

SEQ ID NO: 1794230 - RNA, 19 nt, Human
gcauacguacacauuuuau

SEQ ID NO: 1794231 - RNA, 19 nt, Human
gcaguggugcgaucugggu

SEQ ID NO: 1794232 - RNA, 18 nt, Human
gcaguggugcgaucuggg

SEQ ID NO: 1794233 - RNA, 12 nt, Human
gcagugggagcu

SEQ ID NO: 1794234 - RNA, 11 nt, Human
gcagugggagc

SEQ ID NO: 1794235 - RNA, 21 nt, Human
gcagugggacagggcauggcc

SEQ ID NO: 1794236 - RNA, 16 nt, Human
gcaggucccuaauaaa

SEQ ID NO: 1794237 - RNA, 17 nt, Human
gcaggucccuaauaaag

SEQ ID NO: 1794238 - RNA, 18 nt, Human
gcaggucccuaauaaagc

SEQ ID NO: 1794239 - RNA, 19 nt, Human
gcaggucccuaauaaagcu

SEQ ID NO: 1794240 - RNA, 20 nt, Human
gcaggucccuaauaaagcug

SEQ ID NO: 1794241 - RNA, 21 nt, Human
gcaggucccuaauaaagcugu

SEQ ID NO: 1794242 - RNA, 23 nt, Human
gcaggucccuaauaaagcugugu

SEQ ID NO: 1794243 - RNA, 22 nt, Human
gcaggggaggguagagcggaga

SEQ ID NO: 1794244 - RNA, 16 nt, Human
gcagggucucacucug

SEQ ID NO: 1794245 - RNA, 19 nt, Human
gcaggguccuagaaauucc

SEQ ID NO: 1794246 - RNA, 14 nt, Human
gcaggucccuaaua

SEQ ID NO: 1794247 - RNA, 15 nt, Human
gcaggucccuaauaa

SEQ ID NO: 1794248 - RNA, 18 nt, Human
gcaggcagccaggccaca

SEQ ID NO: 1794249 - RNA, 17 nt, Human
gcaggcagccaggccac

SEQ ID NO: 1794250 - RNA, 19 nt, Human
gcacuguuuuauuuuaauu

SEQ ID NO: 1794251 - RNA, 14 nt, Human
gcacugggcuuggg

SEQ ID NO: 1794252 - RNA, 12 nt, Human
gcacugggcuug

SEQ ID NO: 1794253 - RNA, 22 nt, Human
gcacuauaauguaagcucuacu

SEQ ID NO: 1794254 - RNA, 20 nt, Human
gcacuauaauguaagcucua

SEQ ID NO: 1794255 - RNA, 14 nt, Human
gcacuauaauguaa

SEQ ID NO: 1794256 - RNA, 15 nt, Human
gcacuauaauguaag

SEQ ID NO: 1794257 - RNA, 12 nt, Human
gcacugcuucca

SEQ ID NO: 1794258 - RNA, 13 nt, Human
gcacugcuuccag

SEQ ID NO: 1794259 - RNA, 14 nt, Human
gcacugcuuccagu

SEQ ID NO: 1794260 - RNA, 15 nt, Human
gcacugcuuccagug

SEQ ID NO: 1794261 - RNA, 20 nt, Human
gcacuaaggugugcucugau

SEQ ID NO: 1794262 - RNA, 14 nt, Human
gcacgugugugcac

SEQ ID NO: 1794263 - RNA, 16 nt, Human
gcacccucaggcaggu

SEQ ID NO: 1794264 - RNA, 19 nt, Human
gcacccucaggcagguggg

SEQ ID NO: 1794265 - RNA, 21 nt, Human
gcacagcuucauuuccugugu

SEQ ID NO: 1794266 - RNA, 23 nt, Human
gcacagcuucauuuccugugucu

SEQ ID NO: 1794267 - RNA, 16 nt, Human
gcacagggcaguggga

SEQ ID NO: 1794268 - RNA, 20 nt, Human
gauugugucucuugguccug

SEQ ID NO: 1794269 - RNA, 17 nt, Human
gcaccaucucuccuccu

SEQ ID NO: 1794270 - RNA, 14 nt, Human
gcaccagcagccug

SEQ ID NO: 1794271 - RNA, 13 nt, Human
gcaccagcagccu

SEQ ID NO: 1794272 - RNA, 14 nt, Human
gcaccaucucuccu

SEQ ID NO: 1794273 - RNA, 15 nt, Human
gcaccaucucuccuc

SEQ ID NO: 1794274 - RNA, 16 nt, Human
gcacuugcagacucua

SEQ ID NO: 1794275 - RNA, 14 nt, Human
gcacuugcagacuc

SEQ ID NO: 1794276 - RNA, 22 nt, Human
gcacuucgggaggucgaggcag

SEQ ID NO: 1794277 - RNA, 22 nt, Human
gcagacucuacagaggccaugg

SEQ ID NO: 1794278 - RNA, 19 nt, Human
gcagacucuacagaggcca

SEQ ID NO: 1794279 - RNA, 18 nt, Human
gcagacucuacagaggcc

SEQ ID NO: 1794280 - RNA, 17 nt, Human
gcagacucuacagaggc

SEQ ID NO: 1794281 - RNA, 22 nt, Human
gcagagaccaucccugaaggcc

SEQ ID NO: 1794282 - RNA, 20 nt, Human
gcagagaccaucccugaagg

SEQ ID NO: 1794283 - RNA, 21 nt, Human
gcagagaccaucccugaaggc

SEQ ID NO: 1794284 - RNA, 18 nt, Human
gcagauggagaccccuug

SEQ ID NO: 1794285 - RNA, 18 nt, Human
gcagauguccuugaugcu

SEQ ID NO: 1794286 - RNA, 21 nt, Human
gcagagguccacaacacacag

SEQ ID NO: 1794287 - RNA, 18 nt, Human
gcagagguugcagugagc

SEQ ID NO: 1794288 - RNA, 23 nt, Human
gcagagguugcagugagccgaga

SEQ ID NO: 1794289 - RNA, 15 nt, Human
gcagccucacagucc

SEQ ID NO: 1794290 - RNA, 17 nt, Human
gcagccucacaguccuu

SEQ ID NO: 1794291 - RNA, 19 nt, Human
gcagccucacaguccuuac

SEQ ID NO: 1794292 - RNA, 24 nt, Human
gcagcccugcuuugggcugcccug

SEQ ID NO: 1794293 - RNA, 14 nt, Human
gcagcccugcuuug

SEQ ID NO: 1794294 - RNA, 20 nt, Human
gcagcagggagggcuucugc

SEQ ID NO: 1794295 - RNA, 18 nt, Human
gcagcagggagggcuucu

SEQ ID NO: 1794296 - RNA, 19 nt, Human
gcagcagggagggcuucug

SEQ ID NO: 1794297 - RNA, 18 nt, Human
gcagcucagagagggugg

SEQ ID NO: 1794298 - RNA, 19 nt, Human
gcagcucagagaggguggg

SEQ ID NO: 1794299 - RNA, 16 nt, Human
gcagcucaccucuccc

SEQ ID NO: 1794300 - RNA, 17 nt, Human
gcagcucaccucucccu

SEQ ID NO: 1794301 - RNA, 20 nt, Human
gcagcucaccucucccuugg

SEQ ID NO: 1794302 - RNA, 21 nt, Human
gcagcucaccucucccuugga

SEQ ID NO: 1794303 - RNA, 14 nt, Human
gcagcucagagagg

SEQ ID NO: 1794304 - RNA, 22 nt, Human
gaugggcaacccccagccugcu

SEQ ID NO: 1794305 - RNA, 21 nt, Human
gauggcacuuauaaccaaagc

SEQ ID NO: 1794306 - RNA, 21 nt, Human
gaugccuggcgggguggggug

SEQ ID NO: 1794307 - RNA, 22 nt, Human
gaugagaaagguugaagcacca

SEQ ID NO: 1794308 - RNA, 11 nt, Human
gaugagaaagg

SEQ ID NO: 1794309 - RNA, 14 nt, Human
gaugacuauggaaa

SEQ ID NO: 1794310 - RNA, 16 nt, Human
gaucuuugcagacagg

SEQ ID NO: 1794311 - RNA, 17 nt, Human
gaucuuugcagacaggc

SEQ ID NO: 1794312 - RNA, 15 nt, Human
gaugaaaaaauaaca

SEQ ID NO: 1794313 - RNA, 15 nt, Human
gauccuuuuggaguc

SEQ ID NO: 1794314 - RNA, 17 nt, Human
gauccuuuuggagucag

SEQ ID NO: 1794315 - RNA, 21 nt, Human
gauccucccaccucagccucc

SEQ ID NO: 1794316 - RNA, 20 nt, Human
gauccucccaccucagccuc

SEQ ID NO: 1794317 - RNA, 19 nt, Human
gauccucccaccucagccu

SEQ ID NO: 1794318 - RNA, 12 nt, Human
gauccuccaggu

SEQ ID NO: 1794319 - RNA, 13 nt, Human
gauccugagccag

SEQ ID NO: 1794320 - RNA, 14 nt, Human
gauccugagccaga

SEQ ID NO: 1794321 - RNA, 15 nt, Human
gauccugagccagau

SEQ ID NO: 1794322 - RNA, 19 nt, Human
gauccugagccagauuuca

SEQ ID NO: 1794323 - RNA, 14 nt, Human
gaucacgccacugc

SEQ ID NO: 1794324 - RNA, 13 nt, Human
gaucacgccacug

SEQ ID NO: 1794325 - RNA, 23 nt, Human
gaucaaccccuucgcuccugugu

SEQ ID NO: 1794326 - RNA, 15 nt, Human
gaucacgccacugca

SEQ ID NO: 1794327 - RNA, 18 nt, Human
gauccuaguuccaccauc

SEQ ID NO: 1794328 - RNA, 11 nt, Human
gauccuccagg

SEQ ID NO: 1794329 - RNA, 13 nt, Human
gauugugccccug

SEQ ID NO: 1794330 - RNA, 20 nt, Human
gauuguccccgacccuugcc

SEQ ID NO: 1794331 - RNA, 23 nt, Human
gauuguaauauguaaaugguaug

SEQ ID NO: 1794332 - RNA, 15 nt, Human
gauuguccccgaccc

SEQ ID NO: 1794333 - RNA, 23 nt, Human
gauugacgggacuguugguauug

SEQ ID NO: 1794334 - RNA, 22 nt, Human
gauucccaagcucugcuccucu

SEQ ID NO: 1794335 - RNA, 12 nt, Human
gauucagacagc

SEQ ID NO: 1794336 - RNA, 16 nt, Human
gauguucugggacaca

SEQ ID NO: 1794337 - RNA, 20 nt, Human
gaugugcuuguuaacugagu

SEQ ID NO: 1794338 - RNA, 23 nt, Human
gauggugcaaugaccuuucaaua

SEQ ID NO: 1794339 - RNA, 19 nt, Human
gaugugcuuguuaacugag

SEQ ID NO: 1794340 - RNA, 20 nt, Human
gauggugcaaugaccuuuca

SEQ ID NO: 1794341 - RNA, 19 nt, Human
gauucaacagguuuuccug

SEQ ID NO: 1794342 - RNA, 18 nt, Human
gauuaaccacuucagcug

SEQ ID NO: 1794343 - RNA, 19 nt, Human
gauuaaccacuucagcuga

SEQ ID NO: 1794344 - RNA, 21 nt, Human
gauuaaccacuucagcugacu

SEQ ID NO: 1794345 - RNA, 19 nt, Human
gauuaaauucuugcaaagu

SEQ ID NO: 1794346 - RNA, 12 nt, Human
gauuaaauucuu

SEQ ID NO: 1794347 - RNA, 15 nt, Human
gauguuuuccaugag

SEQ ID NO: 1794348 - RNA, 23 nt, Human
gauguuuuccaugaguccccugu

SEQ ID NO: 1794349 - RNA, 14 nt, Human
gauguuuuccauga

SEQ ID NO: 1794350 - RNA, 21 nt, Human
gauguucuuucacccuuuucu

SEQ ID NO: 1794351 - RNA, 19 nt, Human
gauguugaaaaaguucugc

SEQ ID NO: 1794352 - RNA, 21 nt, Human
gaguugaaaaucuuauaauuu

SEQ ID NO: 1794353 - RNA, 14 nt, Human
gaguugaagacaga

SEQ ID NO: 1794354 - RNA, 17 nt, Human
gagugugccugaagucc

SEQ ID NO: 1794355 - RNA, 23 nt, Human
gaguucaucuugaauuguaagga

SEQ ID NO: 1794356 - RNA, 23 nt, Human
gagugaacaaauuuacagagaca

SEQ ID NO: 1794357 - RNA, 22 nt, Human
gagugaacaaauuuacagagac

SEQ ID NO: 1794358 - RNA, 19 nt, Human
gagugaacaaauuuacaga

SEQ ID NO: 1794359 - RNA, 12 nt, Human
gagugggcccaa

SEQ ID NO: 1794360 - RNA, 23 nt, Human
gagugggggaucacagccucuga

SEQ ID NO: 1794361 - RNA, 13 nt, Human
gaguggcuccucc

SEQ ID NO: 1794362 - RNA, 15 nt, Human
gaguggcuccucccg

SEQ ID NO: 1794363 - RNA, 17 nt, Human
gauagcacagacccugc

SEQ ID NO: 1794364 - RNA, 18 nt, Human
gauagcacagacccugcc

SEQ ID NO: 1794365 - RNA, 18 nt, Human
gauacaaugcugugcccu

SEQ ID NO: 1794366 - RNA, 13 nt, Human
gauacaaugcugu

SEQ ID NO: 1794367 - RNA, 22 nt, Human
gaucaaccccuucgcuccugug

SEQ ID NO: 1794368 - RNA, 21 nt, Human
gaucaaccccuucgcuccugu

SEQ ID NO: 1794369 - RNA, 23 nt, Human
gauauaugcucugcauguuacau

SEQ ID NO: 1794370 - RNA, 17 nt, Human
gauauaaguguguguuu

SEQ ID NO: 1794371 - RNA, 21 nt, Human
gauauaaguguguguuuuuca

SEQ ID NO: 1794372 - RNA, 13 nt, Human
gauagccaaggcc

SEQ ID NO: 1794373 - RNA, 14 nt, Human
gauagccaaggcca

SEQ ID NO: 1794374 - RNA, 12 nt, Human
gauagccaaggc

SEQ ID NO: 1794375 - RNA, 19 nt, Human
gauagcacagacccugccc

SEQ ID NO: 1794376 - RNA, 20 nt, Human
gauagcacagacccugcccu

SEQ ID NO: 1794377 - RNA, 14 nt, Human
gaguagcugggacu

SEQ ID NO: 1794378 - RNA, 12 nt, Human
gaguagcuggga

SEQ ID NO: 1794379 - RNA, 14 nt, Human
gaguccccuguuug

SEQ ID NO: 1794380 - RNA, 23 nt, Human
gaguccccuguuuguuucugaaa

SEQ ID NO: 1794381 - RNA, 18 nt, Human
gagucccaggcugagccu

SEQ ID NO: 1794382 - RNA, 19 nt, Human
gagucccaggcugagccuc

SEQ ID NO: 1794383 - RNA, 12 nt, Human
gaguccccuguu

SEQ ID NO: 1794384 - RNA, 17 nt, Human
gagucgaggacagggag

SEQ ID NO: 1794385 - RNA, 21 nt, Human
gagucucacuguugcccaggc

SEQ ID NO: 1794386 - RNA, 20 nt, Human
gagucucacuguugcccagg

SEQ ID NO: 1794387 - RNA, 19 nt, Human
gagucucacuguugcccag

SEQ ID NO: 1794388 - RNA, 23 nt, Human
gagucucacuguugcccaggcug

SEQ ID NO: 1794389 - RNA, 22 nt, Human
gagucucacuguugcccaggcu

SEQ ID NO: 1794390 - RNA, 23 nt, Human
gagucucgcuauugucaccaggg

SEQ ID NO: 1794391 - RNA, 12 nt, Human
gagucucuucuc

SEQ ID NO: 1794392 - RNA, 14 nt, Human
gagucucuucucca

SEQ ID NO: 1794393 - RNA, 15 nt, Human
gagucucuucuccac

SEQ ID NO: 1794394 - RNA, 16 nt, Human
gagucucuucuccacu

SEQ ID NO: 1794395 - RNA, 17 nt, Human
gagucucuucuccacug

SEQ ID NO: 1794396 - RNA, 18 nt, Human
gagucucuucuccacugg

SEQ ID NO: 1794397 - RNA, 21 nt, Human
gagucugaaggcuggguucug

SEQ ID NO: 1794398 - RNA, 16 nt, Human
gaguacguugugcauu

SEQ ID NO: 1794399 - RNA, 19 nt, Human
gagguuuuaaaaaaauccc

SEQ ID NO: 1794400 - RNA, 19 nt, Human
gagguucaaagauauuuug

SEQ ID NO: 1794401 - RNA, 14 nt, Human
gagguucccuuuga

SEQ ID NO: 1794402 - RNA, 20 nt, Human
gaguacguugugcauuuggu

SEQ ID NO: 1794403 - RNA, 15 nt, Human
gaguacuacaguccu

SEQ ID NO: 1794404 - RNA, 18 nt, Human
gaguacguugugcauuug

SEQ ID NO: 1794405 - RNA, 17 nt, Human
gaguacguugugcauuu

SEQ ID NO: 1794406 - RNA, 12 nt, Human
gaguagcuggau

SEQ ID NO: 1794407 - RNA, 18 nt, Human
gaguacuacaguccuccc

SEQ ID NO: 1794408 - RNA, 19 nt, Human
gaguacuacaguccuccca

SEQ ID NO: 1794409 - RNA, 22 nt, Human
gaggggggaggugggauccucc

SEQ ID NO: 1794410 - RNA, 18 nt, Human
gagguccacaacacacag

SEQ ID NO: 1794411 - RNA, 15 nt, Human
gaggggguggccucc

SEQ ID NO: 1794412 - RNA, 15 nt, Human
gaggggggagguggg

SEQ ID NO: 1794413 - RNA, 21 nt, Human
gaggugggauccuccaggugc

SEQ ID NO: 1794414 - RNA, 22 nt, Human
gaggugggauccuccaggugca

SEQ ID NO: 1794415 - RNA, 18 nt, Human
gaggugggauccuccagg

SEQ ID NO: 1794416 - RNA, 18 nt, Human
gagcagccacauuccuga

SEQ ID NO: 1794417 - RNA, 13 nt, Human
gagccacugcacc

SEQ ID NO: 1794418 - RNA, 20 nt, Human
gagccaccgugccuggccac

SEQ ID NO: 1794419 - RNA, 18 nt, Human
gagccaccgcgcccagcc

SEQ ID NO: 1794420 - RNA, 14 nt, Human
gagccaccgugccu

SEQ ID NO: 1794421 - RNA, 13 nt, Human
gagcccaggccuc

SEQ ID NO: 1794422 - RNA, 14 nt, Human
gagcccaggccucc

SEQ ID NO: 1794423 - RNA, 12 nt, Human
gagcccacgccc

SEQ ID NO: 1794424 - RNA, 15 nt, Human
gagcccacgccccca

SEQ ID NO: 1794425 - RNA, 16 nt, Human
gagcccacgcccccac

SEQ ID NO: 1794426 - RNA, 12 nt, Human
gagcccaggccu

SEQ ID NO: 1794427 - RNA, 22 nt, Human
gagccacugcaccgggccacag

SEQ ID NO: 1794428 - RNA, 13 nt, Human
gagccagauuuca

SEQ ID NO: 1794429 - RNA, 11 nt, Human
gagcccacgcc

SEQ ID NO: 1794430 - RNA, 19 nt, Human
gagcaccuuagacaguccc

SEQ ID NO: 1794431 - RNA, 17 nt, Human
gagcaccuuagacaguc

SEQ ID NO: 1794432 - RNA, 21 nt, Human
gagcaagacgcugugcugccc

SEQ ID NO: 1794433 - RNA, 18 nt, Human
gagcaagacgcugugcug

SEQ ID NO: 1794434 - RNA, 22 nt, Human
gagcaagacgcugugcugcccu

SEQ ID NO: 1794435 - RNA, 23 nt, Human
gagcaagacgcugugcugcccug

SEQ ID NO: 1794436 - RNA, 19 nt, Human
gagcaaaaucgaugcagug

SEQ ID NO: 1794437 - RNA, 20 nt, Human
gagaucaaccccuucgcucc

SEQ ID NO: 1794438 - RNA, 13 nt, Human
gagaucagccugg

SEQ ID NO: 1794439 - RNA, 14 nt, Human
gagaucagccuggg

SEQ ID NO: 1794440 - RNA, 16 nt, Human
gagaucagccugggca

SEQ ID NO: 1794441 - RNA, 14 nt, Human
gagcuacaaaugca

SEQ ID NO: 1794442 - RNA, 23 nt, Human
gagcuacacaggggaaaagagga

SEQ ID NO: 1794443 - RNA, 14 nt, Human
gagcuucuggcacu

SEQ ID NO: 1794444 - RNA, 18 nt, Human
gagcuucuguugcugccu

SEQ ID NO: 1794445 - RNA, 15 nt, Human
gagcuuaacagugug

SEQ ID NO: 1794446 - RNA, 16 nt, Human
gagcucugcagagcag

SEQ ID NO: 1794447 - RNA, 13 nt, Human
gagcugccaccug

SEQ ID NO: 1794448 - RNA, 15 nt, Human
gagcugccaccugcc

SEQ ID NO: 1794449 - RNA, 16 nt, Human
gagcugccaccugccu

SEQ ID NO: 1794450 - RNA, 12 nt, Human
gagcuacaaaug

SEQ ID NO: 1794451 - RNA, 13 nt, Human
gagcuacaaaugc

SEQ ID NO: 1794452 - RNA, 15 nt, Human
gagccuggcaagaau

SEQ ID NO: 1794453 - RNA, 10 nt, Human
gagccuggca

SEQ ID NO: 1794454 - RNA, 13 nt, Human
gagccugggaggu

SEQ ID NO: 1794455 - RNA, 21 nt, Human
gagccugggaggucaaggcug

SEQ ID NO: 1794456 - RNA, 20 nt, Human
gagccuccugcccuuaccug

SEQ ID NO: 1794457 - RNA, 22 nt, Human
gagccuccugcccuuaccugcc

SEQ ID NO: 1794458 - RNA, 17 nt, Human
gagcccugguggcagug

SEQ ID NO: 1794459 - RNA, 19 nt, Human
gagccucagcauccuggca

SEQ ID NO: 1794460 - RNA, 16 nt, Human
gagcccugguggcagu

SEQ ID NO: 1794461 - RNA, 15 nt, Human
gagcccugguggcag

SEQ ID NO: 1794462 - RNA, 21 nt, Human
gagccucagcauccuggcacc

SEQ ID NO: 1794463 - RNA, 20 nt, Human
gagccucagcauccuggcac

SEQ ID NO: 1794464 - RNA, 18 nt, Human
gagccucagucucccucc

SEQ ID NO: 1794465 - RNA, 14 nt, Human
gagccuccugcccu

SEQ ID NO: 1794466 - RNA, 15 nt, Human
gaggaauccagaccc

SEQ ID NO: 1794467 - RNA, 13 nt, Human
gaggacacagaga

SEQ ID NO: 1794468 - RNA, 18 nt, Human
gaggacaagagaaaaaag

SEQ ID NO: 1794469 - RNA, 14 nt, Human
gaggaauccagacc

SEQ ID NO: 1794470 - RNA, 21 nt, Human
gagcuucuguugcugccucau

SEQ ID NO: 1794471 - RNA, 22 nt, Human
gaggaaggaaacccagcucugg

SEQ ID NO: 1794472 - RNA, 23 nt, Human
gaggacagggaggugaccccagg

SEQ ID NO: 1794473 - RNA, 22 nt, Human
gaggacagggaggugaccccag

SEQ ID NO: 1794474 - RNA, 13 nt, Human
gaggacagggagg

SEQ ID NO: 1794475 - RNA, 13 nt, Human
gaggccagccuug

SEQ ID NO: 1794476 - RNA, 12 nt, Human
gaggccagccuu

SEQ ID NO: 1794477 - RNA, 22 nt, Human
gaggcagccccauucugccugc

SEQ ID NO: 1794478 - RNA, 18 nt, Human
gaggcagccccauucugc

SEQ ID NO: 1794479 - RNA, 23 nt, Human
gaggcagccccauucugccugcc

SEQ ID NO: 1794480 - RNA, 13 nt, Human
gaggcagccccau

SEQ ID NO: 1794481 - RNA, 23 nt, Human
gaggaguuugggguaugggagag

SEQ ID NO: 1794482 - RNA, 16 nt, Human
gaggauugcuugagcu

SEQ ID NO: 1794483 - RNA, 20 nt, Human
gaggauguucugggacacag

SEQ ID NO: 1794484 - RNA, 17 nt, Human
gaggauguucugggaca

SEQ ID NO: 1794485 - RNA, 12 nt, Human
gaggauguucug

SEQ ID NO: 1794486 - RNA, 13 nt, Human
gaggcccggccuc

SEQ ID NO: 1794487 - RNA, 24 nt, Human
gaggcccuucucuccagccccugg

SEQ ID NO: 1794488 - RNA, 14 nt, Human
gaggcccuucucuc

SEQ ID NO: 1794489 - RNA, 23 nt, Human
gaggcccuucucuccagccccug

SEQ ID NO: 1794490 - RNA, 14 nt, Human
gaggccuucucuga

SEQ ID NO: 1794491 - RNA, 19 nt, Human
gaggcggaucuuuggacag

SEQ ID NO: 1794492 - RNA, 20 nt, Human
gaggcggccccggccggggu

SEQ ID NO: 1794493 - RNA, 13 nt, Human
gaggcugggcucc

SEQ ID NO: 1794494 - RNA, 14 nt, Human
gaggcugggcuccc

SEQ ID NO: 1794495 - RNA, 15 nt, Human
gaggcugggcucccu

SEQ ID NO: 1794496 - RNA, 16 nt, Human
gagggagugacagagg

SEQ ID NO: 1794497 - RNA, 16 nt, Human
gagggagggcuccaga

SEQ ID NO: 1794498 - RNA, 14 nt, Human
gagggagugacaga

SEQ ID NO: 1794499 - RNA, 13 nt, Human
gagggagugacag

SEQ ID NO: 1794500 - RNA, 14 nt, Human
gagggagguaagga

SEQ ID NO: 1794501 - RNA, 12 nt, Human
gagggcacuggu

SEQ ID NO: 1794502 - RNA, 23 nt, Human
gagggcacagaaaauggaagaca

SEQ ID NO: 1794503 - RNA, 14 nt, Human
gagggcacagaaaa

SEQ ID NO: 1794504 - RNA, 22 nt, Human
gagggcacagaaaauggaagac

SEQ ID NO: 1794505 - RNA, 13 nt, Human
gaggggccuggca

SEQ ID NO: 1794506 - RNA, 14 nt, Human
gaggggccuggcag

SEQ ID NO: 1794507 - RNA, 18 nt, Human
gaggggccuggcagccgu

SEQ ID NO: 1794508 - RNA, 20 nt, Human
gaggggccuggcagccgugc

SEQ ID NO: 1794509 - RNA, 22 nt, Human
gaggggccucuuaugggcuggg

SEQ ID NO: 1794510 - RNA, 16 nt, Human
gagggcacugguggcc

SEQ ID NO: 1794511 - RNA, 18 nt, Human
gagggcacugguggcccg

SEQ ID NO: 1794512 - RNA, 14 nt, Human
gagggagggagggc

SEQ ID NO: 1794513 - RNA, 15 nt, Human
gagggagggagggcu

SEQ ID NO: 1794514 - RNA, 15 nt, Human
gagggagggcuccag

SEQ ID NO: 1794515 - RNA, 14 nt, Human
cucacugcagccuc

SEQ ID NO: 1794516 - RNA, 13 nt, Human
cucacugcagccu

SEQ ID NO: 1794517 - RNA, 12 nt, Human
cucacugcagcc

SEQ ID NO: 1794518 - RNA, 21 nt, Human
cucacucugucgcccagucug

SEQ ID NO: 1794519 - RNA, 13 nt, Human
cucacucugucgc

SEQ ID NO: 1794520 - RNA, 22 nt, Human
cucacucugucgcccagucugg

SEQ ID NO: 1794521 - RNA, 12 nt, Human
cucacucugucg

SEQ ID NO: 1794522 - RNA, 11 nt, Human
cucacucuguc

SEQ ID NO: 1794523 - RNA, 16 nt, Human
cucacuccuaccuggu

SEQ ID NO: 1794524 - RNA, 17 nt, Human
cucacuccuaccuggua

SEQ ID NO: 1794525 - RNA, 19 nt, Human
cucacuccuaccugguaau

SEQ ID NO: 1794526 - RNA, 13 nt, Human
cucacuccuugaa

SEQ ID NO: 1794527 - RNA, 22 nt, Human
cucacuauguugcccaggcagg

SEQ ID NO: 1794528 - RNA, 21 nt, Human
cucacuauguugcccaggcag

SEQ ID NO: 1794529 - RNA, 23 nt, Human
cucacuauguugcccaggcaggu

SEQ ID NO: 1794530 - RNA, 13 nt, Human
cucacuccuaccu

SEQ ID NO: 1794531 - RNA, 15 nt, Human
cucacuccuaccugg

SEQ ID NO: 1794532 - RNA, 20 nt, Human
cucacuauguugcccaggca

SEQ ID NO: 1794533 - RNA, 19 nt, Human
cucacuauguugcccaggc

SEQ ID NO: 1794534 - RNA, 15 nt, Human
cucaccccagcccca

SEQ ID NO: 1794535 - RNA, 17 nt, Human
cucagcauccuggcacc

SEQ ID NO: 1794536 - RNA, 16 nt, Human
cucagcauccuggcac

SEQ ID NO: 1794537 - RNA, 15 nt, Human
cucagaucuucugug

SEQ ID NO: 1794538 - RNA, 22 nt, Human
cucagauuguaauauguaaaug

SEQ ID NO: 1794539 - RNA, 15 nt, Human
cucagauuguaauau

SEQ ID NO: 1794540 - RNA, 20 nt, Human
cucacuguugcccaggcugg

SEQ ID NO: 1794541 - RNA, 19 nt, Human
cucacugccaugccagcuu

SEQ ID NO: 1794542 - RNA, 22 nt, Human
cucacugccaugccagcuuauc

SEQ ID NO: 1794543 - RNA, 22 nt, Human
cucacuguugcccaggcuggcg

SEQ ID NO: 1794544 - RNA, 21 nt, Human
cucacuguugcccaggcuggc

SEQ ID NO: 1794545 - RNA, 18 nt, Human
cucagagagggugggagu

SEQ ID NO: 1794546 - RNA, 14 nt, Human
cucagagagggugg

SEQ ID NO: 1794547 - RNA, 17 nt, Human
cucaaccuccugggcua

SEQ ID NO: 1794548 - RNA, 15 nt, Human
cucaaccuccugggc

SEQ ID NO: 1794549 - RNA, 13 nt, Human
cucaaccuccugg

SEQ ID NO: 1794550 - RNA, 21 nt, Human
cucaacaccucugcacaagcu

SEQ ID NO: 1794551 - RNA, 22 nt, Human
cuauuuaugugauccuuuugga

SEQ ID NO: 1794552 - RNA, 19 nt, Human
cuauugucaccagggcugg

SEQ ID NO: 1794553 - RNA, 18 nt, Human
cuauuguuagucucuuga

SEQ ID NO: 1794554 - RNA, 19 nt, Human
cucacauuuauucugcuca

SEQ ID NO: 1794555 - RNA, 15 nt, Human
cucacauuuauucug

SEQ ID NO: 1794556 - RNA, 22 nt, Human
cucacauuuauucugcucacau

SEQ ID NO: 1794557 - RNA, 17 nt, Human
cucacaguccuuaccag

SEQ ID NO: 1794558 - RNA, 19 nt, Human
cucacaguccuuaccagca

SEQ ID NO: 1794559 - RNA, 22 nt, Human
cucacaguccuuaccagcagag

SEQ ID NO: 1794560 - RNA, 23 nt, Human
cucacaguccuuaccagcagagc

SEQ ID NO: 1794561 - RNA, 15 nt, Human
cucaccagccccagu

SEQ ID NO: 1794562 - RNA, 14 nt, Human
cucaccagccccag

SEQ ID NO: 1794563 - RNA, 13 nt, Human
cucaccagcccca

SEQ ID NO: 1794564 - RNA, 18 nt, Human
cucaccagccccagugcc

SEQ ID NO: 1794565 - RNA, 17 nt, Human
cucaccagccccagugc

SEQ ID NO: 1794566 - RNA, 21 nt, Human
cucaaguccucuuuucugaga

SEQ ID NO: 1794567 - RNA, 16 nt, Human
cucaagacuuccagag

SEQ ID NO: 1794568 - RNA, 17 nt, Human
cucaagugauucuccug

SEQ ID NO: 1794569 - RNA, 14 nt, Human
cucaagacuuccag

SEQ ID NO: 1794570 - RNA, 22 nt, Human
cucacacaugagcaucaggcca

SEQ ID NO: 1794571 - RNA, 24 nt, Human
cucacacaugagcaucaggccagg

SEQ ID NO: 1794572 - RNA, 15 nt, Human
cucacaguccuuacc

SEQ ID NO: 1794573 - RNA, 24 nt, Human
cuaggugacagagugagacucugu

SEQ ID NO: 1794574 - RNA, 18 nt, Human
cuaggugacagagugaga

SEQ ID NO: 1794575 - RNA, 14 nt, Human
cuaggugacagagu

SEQ ID NO: 1794576 - RNA, 22 nt, Human
cgcccaguuggguggaugccug

SEQ ID NO: 1794577 - RNA, 20 nt, Human
cgccaucccagccccaauga

SEQ ID NO: 1794578 - RNA, 15 nt, Human
cgccaugcuccuggc

SEQ ID NO: 1794579 - RNA, 23 nt, Human
cgcccaguuggguggaugccugg

SEQ ID NO: 1794580 - RNA, 22 nt, Human
cuagguaaauuacaguuccuag

SEQ ID NO: 1794581 - RNA, 17 nt, Human
cuauagccuaggugaca

SEQ ID NO: 1794582 - RNA, 16 nt, Human
cuauaauguaagcucu

SEQ ID NO: 1794583 - RNA, 21 nt, Human
cuauaauguaagcucuacuga

SEQ ID NO: 1794584 - RNA, 22 nt, Human
cuauaauuuaccugaagucuuu

SEQ ID NO: 1794585 - RNA, 13 nt, Human
cuauggccugugg

SEQ ID NO: 1794586 - RNA, 20 nt, Human
cuaugcagagguccacaaca

SEQ ID NO: 1794587 - RNA, 15 nt, Human
cuauuagagaagaga

SEQ ID NO: 1794588 - RNA, 23 nt, Human
cuaugggacucaaugcacugaca

SEQ ID NO: 1794589 - RNA, 22 nt, Human
cuaugggacucaaugcacugac

SEQ ID NO: 1794590 - RNA, 18 nt, Human
cuaugggacucaaugcac

SEQ ID NO: 1794591 - RNA, 18 nt, Human
cucauuugucacacacuu

SEQ ID NO: 1794592 - RNA, 16 nt, Human
cuccaaaauaaaacuu

SEQ ID NO: 1794593 - RNA, 15 nt, Human
cuccaaaauaaaacu

SEQ ID NO: 1794594 - RNA, 18 nt, Human
cuccaaaauaaaacuuuu

SEQ ID NO: 1794595 - RNA, 17 nt, Human
cucauuugucacacacu

SEQ ID NO: 1794596 - RNA, 13 nt, Human
cucauuaaaaaaa

SEQ ID NO: 1794597 - RNA, 23 nt, Human
cuccaauuuuuuaagugaaaaua

SEQ ID NO: 1794598 - RNA, 15 nt, Human
cuccaauuuuuuaag

SEQ ID NO: 1794599 - RNA, 22 nt, Human
cuccaaucccaccaacccucag

SEQ ID NO: 1794600 - RNA, 23 nt, Human
cuccaaguccacaguggaaccag

SEQ ID NO: 1794601 - RNA, 13 nt, Human
cuccacccugcuc

SEQ ID NO: 1794602 - RNA, 15 nt, Human
cuccacccugcucuc

SEQ ID NO: 1794603 - RNA, 12 nt, Human
cuccauccugag

SEQ ID NO: 1794604 - RNA, 18 nt, Human
cuccaggagcagccacau

SEQ ID NO: 1794605 - RNA, 23 nt, Human
cuccaggagcagccacauuccug

SEQ ID NO: 1794606 - RNA, 11 nt, Human
cuccaggagca

SEQ ID NO: 1794607 - RNA, 13 nt, Human
cuccaggagcagc

SEQ ID NO: 1794608 - RNA, 14 nt, Human
cuccaggagcagcc

SEQ ID NO: 1794609 - RNA, 15 nt, Human
cuccaggagcagcca

SEQ ID NO: 1794610 - RNA, 16 nt, Human
cuccaggagcagccac

SEQ ID NO: 1794611 - RNA, 17 nt, Human
cuccaggagcagccaca

SEQ ID NO: 1794612 - RNA, 14 nt, Human
cuccagcucaccag

SEQ ID NO: 1794613 - RNA, 12 nt, Human
cuccagccuggg

SEQ ID NO: 1794614 - RNA, 20 nt, Human
cuccagccccuggaugcagc

SEQ ID NO: 1794615 - RNA, 16 nt, Human
cuccagccccuggaug

SEQ ID NO: 1794616 - RNA, 17 nt, Human
cuccagccccuggaugc

SEQ ID NO: 1794617 - RNA, 15 nt, Human
cuccagccccuggau

SEQ ID NO: 1794618 - RNA, 14 nt, Human
cuccaccugccagg

SEQ ID NO: 1794619 - RNA, 12 nt, Human
cuccaccugcca

SEQ ID NO: 1794620 - RNA, 13 nt, Human
cuccaccugccag

SEQ ID NO: 1794621 - RNA, 15 nt, Human
cucagggucccuggu

SEQ ID NO: 1794622 - RNA, 16 nt, Human
cucagggucccuggug

SEQ ID NO: 1794623 - RNA, 17 nt, Human
cucagggucccuggugg

SEQ ID NO: 1794624 - RNA, 18 nt, Human
cucagggucccugguggc

SEQ ID NO: 1794625 - RNA, 16 nt, Human
cucaggugagaagcag

SEQ ID NO: 1794626 - RNA, 19 nt, Human
cucaggugagaagcagagg

SEQ ID NO: 1794627 - RNA, 20 nt, Human
cucaggugagaagcagagga

SEQ ID NO: 1794628 - RNA, 16 nt, Human
cucagggccuggcuca

SEQ ID NO: 1794629 - RNA, 15 nt, Human
cucagggccuggucg

SEQ ID NO: 1794630 - RNA, 14 nt, Human
cucagggccuggcu

SEQ ID NO: 1794631 - RNA, 15 nt, Human
cucagggccuggcuc

SEQ ID NO: 1794632 - RNA, 13 nt, Human
cucagggccuggc

SEQ ID NO: 1794633 - RNA, 18 nt, Human
cucagcauccuggcaccc

SEQ ID NO: 1794634 - RNA, 19 nt, Human
cucagcccacauagugaug

SEQ ID NO: 1794635 - RNA, 21 nt, Human
cucagcccacauagugauggu

SEQ ID NO: 1794636 - RNA, 18 nt, Human
cucaggaguuugagacca

SEQ ID NO: 1794637 - RNA, 23 nt, Human
cucaggaguuugagaccaaccug

SEQ ID NO: 1794638 - RNA, 15 nt, Human
cucauccucauaccc

SEQ ID NO: 1794639 - RNA, 23 nt, Human
cucauaguaugguggcuggguug

SEQ ID NO: 1794640 - RNA, 21 nt, Human
cucaucaccaacgucugugcc

SEQ ID NO: 1794641 - RNA, 22 nt, Human
cucaucaccaacgucugugcca

SEQ ID NO: 1794642 - RNA, 19 nt, Human
cucaggugauccacccacc

SEQ ID NO: 1794643 - RNA, 18 nt, Human
cucaggugauccacccac

SEQ ID NO: 1794644 - RNA, 20 nt, Human
cucaggugauccacccaccu

SEQ ID NO: 1794645 - RNA, 22 nt, Human
cucaggugauccacccaccuca

SEQ ID NO: 1794646 - RNA, 16 nt, Human
cucauacccaccccca

SEQ ID NO: 1794647 - RNA, 18 nt, Human
cucauacccacccccacc

SEQ ID NO: 1794648 - RNA, 19 nt, Human
cucauacccacccccaccc

SEQ ID NO: 1794649 - RNA, 21 nt, Human
cucauacccacccccacccaa

SEQ ID NO: 1794650 - RNA, 21 nt, Human
cucauaguaugguggcugggu

SEQ ID NO: 1794651 - RNA, 20 nt, Human
cucauagcccucacccuggg

SEQ ID NO: 1794652 - RNA, 21 nt, Human
cucauagcccucacccugggg

SEQ ID NO: 1794653 - RNA, 13 nt, Human
cucauagcccuca

SEQ ID NO: 1794654 - RNA, 17 nt, Human
cucauagcccucacccu

SEQ ID NO: 1794655 - RNA, 22 nt, Human
cucauacucaccucaccccacu

SEQ ID NO: 1794656 - RNA, 14 nt, Human
cucauacucaccuc

SEQ ID NO: 1794657 - RNA, 15 nt, Human
cucauacccaccccc

SEQ ID NO: 1794658 - RNA, 23 nt, Human
cuccccagcaagugagagcuggg

SEQ ID NO: 1794659 - RNA, 22 nt, Human
cuccccagcaagugagagcugg

SEQ ID NO: 1794660 - RNA, 13 nt, Human
cuccauccugagg

SEQ ID NO: 1794661 - RNA, 14 nt, Human
cuccauccugaggc

SEQ ID NO: 1794662 - RNA, 12 nt, Human
cuccccuccucc

SEQ ID NO: 1794663 - RNA, 20 nt, Human
cuccccuccuccuggacucc

SEQ ID NO: 1794664 - RNA, 20 nt, Human
cucccgaguagcugggacua

SEQ ID NO: 1794665 - RNA, 19 nt, Human
cucccgaguagcugggacu

SEQ ID NO: 1794666 - RNA, 15 nt, Human
cucccggugcccaag

SEQ ID NO: 1794667 - RNA, 21 nt, Human
cucccggugcccaagaauaga

SEQ ID NO: 1794668 - RNA, 17 nt, Human
cucccugccccccagcc

SEQ ID NO: 1794669 - RNA, 23 nt, Human
cucccugccccccagcccuccuu

SEQ ID NO: 1794670 - RNA, 13 nt, Human
cucccugccccuc

SEQ ID NO: 1794671 - RNA, 14 nt, Human
cucccugccccucc

SEQ ID NO: 1794672 - RNA, 17 nt, Human
cucccugccccucccuu

SEQ ID NO: 1794673 - RNA, 18 nt, Human
cucccugccccucccuuc

SEQ ID NO: 1794674 - RNA, 20 nt, Human
cucccugccccucccuucaa

SEQ ID NO: 1794675 - RNA, 21 nt, Human
cucccugccccucccuucaac

SEQ ID NO: 1794676 - RNA, 19 nt, Human
cucccuuggggccuaugca

SEQ ID NO: 1794677 - RNA, 12 nt, Human
cucccuuucaac

SEQ ID NO: 1794678 - RNA, 18 nt, Human
cuccucagaucuucugug

SEQ ID NO: 1794679 - RNA, 17 nt, Human
cuccucccaggcgcccc

SEQ ID NO: 1794680 - RNA, 22 nt, Human
cuccucccaggcgccccuuccc

SEQ ID NO: 1794681 - RNA, 23 nt, Human
cuccucccaggcgccccuucccc

SEQ ID NO: 1794682 - RNA, 14 nt, Human
cuccuccuggacuc

SEQ ID NO: 1794683 - RNA, 15 nt, Human
cuccuccuggacucc

SEQ ID NO: 1794684 - RNA, 19 nt, Human
cuccuccuggacuccugca

SEQ ID NO: 1794685 - RNA, 22 nt, Human
cuccuccagccgccaugcuccu

SEQ ID NO: 1794686 - RNA, 15 nt, Human
cuccuccagccgcca

SEQ ID NO: 1794687 - RNA, 13 nt, Human
cuccuccagaguc

SEQ ID NO: 1794688 - RNA, 15 nt, Human
cuccuccagagucag

SEQ ID NO: 1794689 - RNA, 21 nt, Human
cuccugccucgaacuggcugc

SEQ ID NO: 1794690 - RNA, 20 nt, Human
cuccugccucgaacuggcug

SEQ ID NO: 1794691 - RNA, 18 nt, Human
cuccugccucgaacuggc

SEQ ID NO: 1794692 - RNA, 21 nt, Human
cuccugccucagccuccugag

SEQ ID NO: 1794693 - RNA, 19 nt, Human
cuccugccucagccucccg

SEQ ID NO: 1794694 - RNA, 22 nt, Human
cuccugccucgaacuggcugca

SEQ ID NO: 1794695 - RNA, 15 nt, Human
cuccucuccccagca

SEQ ID NO: 1794696 - RNA, 13 nt, Human
cuccucuccccag

SEQ ID NO: 1794697 - RNA, 11 nt, Human
cuccugccuca

SEQ ID NO: 1794698 - RNA, 12 nt, Human
cuccugccucag

SEQ ID NO: 1794699 - RNA, 17 nt, Human
cuccugccucagccucc

SEQ ID NO: 1794700 - RNA, 24 nt, Human
cuccugugugugcgccuacaggag

SEQ ID NO: 1794701 - RNA, 23 nt, Human
cuccugugugugcgccuacagga

SEQ ID NO: 1794702 - RNA, 21 nt, Human
cuccugugugugcgccuacag

SEQ ID NO: 1794703 - RNA, 11 nt, Human
cuccuggacuc

SEQ ID NO: 1794704 - RNA, 14 nt, Human
cuccuggaaauauu

SEQ ID NO: 1794705 - RNA, 20 nt, Human
cuccuuagaaguggaaguag

SEQ ID NO: 1794706 - RNA, 17 nt, Human
cuccuuagaaguggaag

SEQ ID NO: 1794707 - RNA, 13 nt, Human
cuccuuagaagug

SEQ ID NO: 1794708 - RNA, 12 nt, Human
cuccuggacucc

SEQ ID NO: 1794709 - RNA, 17 nt, Human
cuccuuaucaaaggaca

SEQ ID NO: 1794710 - RNA, 22 nt, Human
cuccuuaucaaaggacaccauu

SEQ ID NO: 1794711 - RNA, 23 nt, Human
cuccuuggugucgggcaugacac

SEQ ID NO: 1794712 - RNA, 13 nt, Human
cucgagcaugccu

SEQ ID NO: 1794713 - RNA, 15 nt, Human
cucgagcaugccugg

SEQ ID NO: 1794714 - RNA, 16 nt, Human
cucgagcaugccugga

SEQ ID NO: 1794715 - RNA, 19 nt, Human
cucgagcaugccuggaugg

SEQ ID NO: 1794716 - RNA, 23 nt, Human
cucgcucugucgcccaggcugga

SEQ ID NO: 1794717 - RNA, 15 nt, Human
cucgccuucaucucc

SEQ ID NO: 1794718 - RNA, 22 nt, Human
cucgagcaugccuggauggggc

SEQ ID NO: 1794719 - RNA, 15 nt, Human
cugagccagauuuca

SEQ ID NO: 1794720 - RNA, 13 nt, Human
cugagccagauuu

SEQ ID NO: 1794721 - RNA, 14 nt, Human
cugagccagauuuc

SEQ ID NO: 1794722 - RNA, 23 nt, Human
cugagauuauaggcaccuaccac

SEQ ID NO: 1794723 - RNA, 15 nt, Human
cugagcaaauguggc

SEQ ID NO: 1794724 - RNA, 17 nt, Human
cugagcaaauguggcuc

SEQ ID NO: 1794725 - RNA, 20 nt, Human
cugagcaaauguggcuccug

SEQ ID NO: 1794726 - RNA, 21 nt, Human
cugagcaaauguggcuccugg

SEQ ID NO: 1794727 - RNA, 20 nt, Human
cugagacagcccgggcucug

SEQ ID NO: 1794728 - RNA, 19 nt, Human
cugagacagcccgggcucu

SEQ ID NO: 1794729 - RNA, 21 nt, Human
cugagacagcccgggcucugc

SEQ ID NO: 1794730 - RNA, 22 nt, Human
cugagacagcccgggcucugcc

SEQ ID NO: 1794731 - RNA, 17 nt, Human
cugacuguacuccuccc

SEQ ID NO: 1794732 - RNA, 18 nt, Human
cugacagacacaggcccg

SEQ ID NO: 1794733 - RNA, 17 nt, Human
cugacagacacaggccc

SEQ ID NO: 1794734 - RNA, 17 nt, Human
cugaccagccuccaugc

SEQ ID NO: 1794735 - RNA, 16 nt, Human
cugacagacacaggcc

SEQ ID NO: 1794736 - RNA, 14 nt, Human
cugaauuucuuuug

SEQ ID NO: 1794737 - RNA, 21 nt, Human
cugaccagccuccaugcugcc

SEQ ID NO: 1794738 - RNA, 23 nt, Human
cugaccagccuccaugcugccuc

SEQ ID NO: 1794739 - RNA, 19 nt, Human
cugaaugguuuucaaaaua

SEQ ID NO: 1794740 - RNA, 20 nt, Human
cugaaugguuuucaaaauaa

SEQ ID NO: 1794741 - RNA, 12 nt, Human
cugaauuauuuu

SEQ ID NO: 1794742 - RNA, 12 nt, Human
cugaauuucuuu

SEQ ID NO: 1794743 - RNA, 17 nt, Human
cugaagucacacaguga

SEQ ID NO: 1794744 - RNA, 19 nt, Human
cugaagucacacagugagu

SEQ ID NO: 1794745 - RNA, 18 nt, Human
cugaagucacacagugag

SEQ ID NO: 1794746 - RNA, 21 nt, Human
cugaagucacacagugagucg

SEQ ID NO: 1794747 - RNA, 13 nt, Human
cugaagucacugc

SEQ ID NO: 1794748 - RNA, 14 nt, Human
cugaagucacugca

SEQ ID NO: 1794749 - RNA, 15 nt, Human
cugaagucacugcac

SEQ ID NO: 1794750 - RNA, 17 nt, Human
cugaaguucagcugcau

SEQ ID NO: 1794751 - RNA, 22 nt, Human
cugaagucccagauacuugggg

SEQ ID NO: 1794752 - RNA, 17 nt, Human
cugaagucuuuguacag

SEQ ID NO: 1794753 - RNA, 20 nt, Human
cugaagucuuuguacagaca

SEQ ID NO: 1794754 - RNA, 20 nt, Human
cucuuuguucuaaagaugga

SEQ ID NO: 1794755 - RNA, 14 nt, Human
cucuuuucaaaaca

SEQ ID NO: 1794756 - RNA, 23 nt, Human
cugaaagggacgcuacccgggaa

SEQ ID NO: 1794757 - RNA, 16 nt, Human
cucuucuccaggcugu

SEQ ID NO: 1794758 - RNA, 22 nt, Human
cucuuuggucuacacugugcug

SEQ ID NO: 1794759 - RNA, 23 nt, Human
cucuuuggucuacacugugcuga

SEQ ID NO: 1794760 - RNA, 15 nt, Human
cugaacauuccagag

SEQ ID NO: 1794761 - RNA, 22 nt, Human
cucugaaggacauugcggacag

SEQ ID NO: 1794762 - RNA, 16 nt, Human
cucugacaacagacuu

SEQ ID NO: 1794763 - RNA, 19 nt, Human
cucugacacacagcucugu

SEQ ID NO: 1794764 - RNA, 23 nt, Human
cucugacagaagaaccccagggu

SEQ ID NO: 1794765 - RNA, 18 nt, Human
cucugacacacagcucug

SEQ ID NO: 1794766 - RNA, 17 nt, Human
cucugacacacagcucu

SEQ ID NO: 1794767 - RNA, 16 nt, Human
cucugacacacagcuc

SEQ ID NO: 1794768 - RNA, 15 nt, Human
cucugacacacagcu

SEQ ID NO: 1794769 - RNA, 14 nt, Human
cucugacacacagc

SEQ ID NO: 1794770 - RNA, 21 nt, Human
cucugacaacagacuucugaa

SEQ ID NO: 1794771 - RNA, 22 nt, Human
cucugacaacagacuucugaaa

SEQ ID NO: 1794772 - RNA, 21 nt, Human
cucugagacucgcgacaaugc

SEQ ID NO: 1794773 - RNA, 14 nt, Human
cucugaggacacua

SEQ ID NO: 1794774 - RNA, 12 nt, Human
cucugaggacac

SEQ ID NO: 1794775 - RNA, 16 nt, Human
cucugaggacacuaac

SEQ ID NO: 1794776 - RNA, 12 nt, Human
cucugaggacaa

SEQ ID NO: 1794777 - RNA, 23 nt, Human
cucugagacucgcgacaaugcaa

SEQ ID NO: 1794778 - RNA, 13 nt, Human
cucugcacaagcu

SEQ ID NO: 1794779 - RNA, 19 nt, Human
cucugcaggucccuaauaa

SEQ ID NO: 1794780 - RNA, 20 nt, Human
cucugcaggucccuaauaaa

SEQ ID NO: 1794781 - RNA, 14 nt, Human
cucugcacaagcug

SEQ ID NO: 1794782 - RNA, 15 nt, Human
cucugcacaagcugc

SEQ ID NO: 1794783 - RNA, 21 nt, Human
cucugcaggucccuaauaaag

SEQ ID NO: 1794784 - RNA, 22 nt, Human
cucugcaggucccuaauaaagc

SEQ ID NO: 1794785 - RNA, 18 nt, Human
cucugcaggucccuaaua

SEQ ID NO: 1794786 - RNA, 18 nt, Human
cucugcccacucccugca

SEQ ID NO: 1794787 - RNA, 20 nt, Human
cucugcccacucccugcaac

SEQ ID NO: 1794788 - RNA, 13 nt, Human
cucugcccacucc

SEQ ID NO: 1794789 - RNA, 15 nt, Human
cucugcccacucccu

SEQ ID NO: 1794790 - RNA, 16 nt, Human
cucugcccacucccug

SEQ ID NO: 1794791 - RNA, 17 nt, Human
cucugcccacucccugc

SEQ ID NO: 1794792 - RNA, 22 nt, Human
cucugcccuaaugcgcaggcug

SEQ ID NO: 1794793 - RNA, 20 nt, Human
cucugcccuaaugcgcaggc

SEQ ID NO: 1794794 - RNA, 13 nt, Human
cucugccucccau

SEQ ID NO: 1794795 - RNA, 14 nt, Human
cucugccucccauc

SEQ ID NO: 1794796 - RNA, 16 nt, Human
cucugccucccaucac

SEQ ID NO: 1794797 - RNA, 17 nt, Human
cucugccucccaucacc

SEQ ID NO: 1794798 - RNA, 22 nt, Human
cucuguugcccaggcuggagug

SEQ ID NO: 1794799 - RNA, 20 nt, Human
cucuguugcccaggcuggag

SEQ ID NO: 1794800 - RNA, 23 nt, Human
cucugugucagguggggcagcuu

SEQ ID NO: 1794801 - RNA, 22 nt, Human
cucugugucagguggggcagcu

SEQ ID NO: 1794802 - RNA, 21 nt, Human
cucugugucagguggggcagc

SEQ ID NO: 1794803 - RNA, 20 nt, Human
cucugugucagguggggcag

SEQ ID NO: 1794804 - RNA, 13 nt, Human
cucuucuccaggc

SEQ ID NO: 1794805 - RNA, 15 nt, Human
cucuucuccaggcug

SEQ ID NO: 1794806 - RNA, 12 nt, Human
cucuucuccacu

SEQ ID NO: 1794807 - RNA, 13 nt, Human
cucuucuccacug

SEQ ID NO: 1794808 - RNA, 20 nt, Human
cucugccucugacacacagc

SEQ ID NO: 1794809 - RNA, 19 nt, Human
cucugccucugacacacag

SEQ ID NO: 1794810 - RNA, 21 nt, Human
cucugccucccaucacccgcu

SEQ ID NO: 1794811 - RNA, 10 nt, Human
cucugccuga

SEQ ID NO: 1794812 - RNA, 19 nt, Human
cucuggauuauauuaugaa

SEQ ID NO: 1794813 - RNA, 20 nt, Human
cucuggauuauauuaugaag

SEQ ID NO: 1794814 - RNA, 23 nt, Human
cucuggcagcucagagagggugg

SEQ ID NO: 1794815 - RNA, 22 nt, Human
cucuggccuucggccuccaucc

SEQ ID NO: 1794816 - RNA, 21 nt, Human
cucuggccuucggccuccauc

SEQ ID NO: 1794817 - RNA, 22 nt, Human
cucuguccugggagugagcugg

SEQ ID NO: 1794818 - RNA, 15 nt, Human
cucuguccugggagu

SEQ ID NO: 1794819 - RNA, 14 nt, Human
cucuguccugggag

SEQ ID NO: 1794820 - RNA, 13 nt, Human
cucugucgcccag

SEQ ID NO: 1794821 - RNA, 15 nt, Human
cucugucgcccaggc

SEQ ID NO: 1794822 - RNA, 17 nt, Human
cucugucgcccagucug

SEQ ID NO: 1794823 - RNA, 18 nt, Human
cucugucgcccaggcugg

SEQ ID NO: 1794824 - RNA, 22 nt, Human
cucugucgcccaggcuggagug

SEQ ID NO: 1794825 - RNA, 19 nt, Human
cucugucgcccagucugga

SEQ ID NO: 1794826 - RNA, 18 nt, Human
cucugucgcccagucugg

SEQ ID NO: 1794827 - RNA, 18 nt, Human
cugcgguccacccaggag

SEQ ID NO: 1794828 - RNA, 20 nt, Human
cugcgguccacccaggagcc

SEQ ID NO: 1794829 - RNA, 19 nt, Human
cugcgguccacccaggagc

SEQ ID NO: 1794830 - RNA, 22 nt, Human
cugccugcccaggccccugcca

SEQ ID NO: 1794831 - RNA, 21 nt, Human
cugccugcccaggccccugcc

SEQ ID NO: 1794832 - RNA, 21 nt, Human
cugccucugacacacagcucu

SEQ ID NO: 1794833 - RNA, 18 nt, Human
cugccucugacacacagc

SEQ ID NO: 1794834 - RNA, 17 nt, Human
cugccucugacacacag

SEQ ID NO: 1794835 - RNA, 19 nt, Human
cugccucucugcagguccc

SEQ ID NO: 1794836 - RNA, 20 nt, Human
cugccccuccucucugcccu

SEQ ID NO: 1794837 - RNA, 21 nt, Human
cugccccuccucucugcccua

SEQ ID NO: 1794838 - RNA, 12 nt, Human
cugccgcagccc

SEQ ID NO: 1794839 - RNA, 13 nt, Human
cugccgcagcccu

SEQ ID NO: 1794840 - RNA, 23 nt, Human
cugccgcagcccugcagagggca

SEQ ID NO: 1794841 - RNA, 19 nt, Human
cugccgcagcccugcagag

SEQ ID NO: 1794842 - RNA, 20 nt, Human
cugccgcagcccugcagagg

SEQ ID NO: 1794843 - RNA, 21 nt, Human
cugccgcagcccugcagaggg

SEQ ID NO: 1794844 - RNA, 22 nt, Human
cugccgcagcccugcagagggc

SEQ ID NO: 1794845 - RNA, 19 nt, Human
cugccucagccucccaaag

SEQ ID NO: 1794846 - RNA, 17 nt, Human
cugccucagccucccga

SEQ ID NO: 1794847 - RNA, 15 nt, Human
cugccucagccuccc

SEQ ID NO: 1794848 - RNA, 15 nt, Human
cugccucucugcagg

SEQ ID NO: 1794849 - RNA, 16 nt, Human
cugccucucugcaggu

SEQ ID NO: 1794850 - RNA, 17 nt, Human
cugccucucugcagguc

SEQ ID NO: 1794851 - RNA, 18 nt, Human
cugccucucugcaggucc

SEQ ID NO: 1794852 - RNA, 14 nt, Human
cugccuccagaaug

SEQ ID NO: 1794853 - RNA, 22 nt, Human
cugccuccagaauggucuuucu

SEQ ID NO: 1794854 - RNA, 23 nt, Human
cugcacuugcagacucuacagag

SEQ ID NO: 1794855 - RNA, 19 nt, Human
cugcaguugccagucaccc

SEQ ID NO: 1794856 - RNA, 17 nt, Human
cugcaguugccagucac

SEQ ID NO: 1794857 - RNA, 21 nt, Human
cugcaguugccagucaccccg

SEQ ID NO: 1794858 - RNA, 22 nt, Human
cugcaguugccagucaccccgg

SEQ ID NO: 1794859 - RNA, 22 nt, Human
cugcaucguuucaucuuccaac

SEQ ID NO: 1794860 - RNA, 19 nt, Human
cugcauccuccgccucccg

SEQ ID NO: 1794861 - RNA, 20 nt, Human
cugcauccuccgccucccgg

SEQ ID NO: 1794862 - RNA, 16 nt, Human
cugcaucguuucaucu

SEQ ID NO: 1794863 - RNA, 18 nt, Human
cugcaugcgggcuuccuc

SEQ ID NO: 1794864 - RNA, 22 nt, Human
cugcaugcgggcuuccuccugg

SEQ ID NO: 1794865 - RNA, 18 nt, Human
cugccaaugggagcucau

SEQ ID NO: 1794866 - RNA, 19 nt, Human
cugccaaugggagcucaug

SEQ ID NO: 1794867 - RNA, 17 nt, Human
cugcccagccuccaagc

SEQ ID NO: 1794868 - RNA, 18 nt, Human
cugcccacucccugcaac

SEQ ID NO: 1794869 - RNA, 17 nt, Human
cugcccaccuggccucu

SEQ ID NO: 1794870 - RNA, 18 nt, Human
cugcccaccuggccucug

SEQ ID NO: 1794871 - RNA, 19 nt, Human
cugcccaccuggccucugc

SEQ ID NO: 1794872 - RNA, 20 nt, Human
cugcccaccuggccucugca

SEQ ID NO: 1794873 - RNA, 22 nt, Human
cugcccaccuggccucugcacu

SEQ ID NO: 1794874 - RNA, 14 nt, Human
cugcccacucccug

SEQ ID NO: 1794875 - RNA, 15 nt, Human
cugcccacucccugc

SEQ ID NO: 1794876 - RNA, 16 nt, Human
cugcccacucccugca

SEQ ID NO: 1794877 - RNA, 11 nt, Human
cugccaggcau

SEQ ID NO: 1794878 - RNA, 13 nt, Human
cugccaggcaugg

SEQ ID NO: 1794879 - RNA, 14 nt, Human
cugccaugccagcu

SEQ ID NO: 1794880 - RNA, 15 nt, Human
cugccaugccagcuu

SEQ ID NO: 1794881 - RNA, 13 nt, Human
cugcccaccuggc

SEQ ID NO: 1794882 - RNA, 14 nt, Human
cugcccaccuggcc

SEQ ID NO: 1794883 - RNA, 15 nt, Human
cugcccaccuggccu

SEQ ID NO: 1794884 - RNA, 12 nt, Human
cugcaccgggcc

SEQ ID NO: 1794885 - RNA, 23 nt, Human
cugcaccggcuggccuggccccu

SEQ ID NO: 1794886 - RNA, 15 nt, Human
cugcacuccccugcu

SEQ ID NO: 1794887 - RNA, 13 nt, Human
cugcacccucagg

SEQ ID NO: 1794888 - RNA, 14 nt, Human
cugcacccucaggc

SEQ ID NO: 1794889 - RNA, 16 nt, Human
cugcacccucaggcag

SEQ ID NO: 1794890 - RNA, 22 nt, Human
cugcaccggcuggccuggcccc

SEQ ID NO: 1794891 - RNA, 18 nt, Human
cugcacuugcagacucua

SEQ ID NO: 1794892 - RNA, 16 nt, Human
cugcacuccccugcug

SEQ ID NO: 1794893 - RNA, 17 nt, Human
cugcacuccccugcugg

SEQ ID NO: 1794894 - RNA, 18 nt, Human
cugcacuccccugcuggg

SEQ ID NO: 1794895 - RNA, 14 nt, Human
cugcacacagcacg

SEQ ID NO: 1794896 - RNA, 20 nt, Human
cugcacacgcuccuuccucu

SEQ ID NO: 1794897 - RNA, 22 nt, Human
cugcacacgcuccuuccucuga

SEQ ID NO: 1794898 - RNA, 17 nt, Human
cugcaaagcccagcuug

SEQ ID NO: 1794899 - RNA, 18 nt, Human
cugcaauaaggggagagu

SEQ ID NO: 1794900 - RNA, 13 nt, Human
cugcacacagcac

SEQ ID NO: 1794901 - RNA, 22 nt, Human
cugcacaagcugcacccucagg

SEQ ID NO: 1794902 - RNA, 21 nt, Human
cugauugugucucuugguccu

SEQ ID NO: 1794903 - RNA, 17 nt, Human
cugauugugucucuugg

SEQ ID NO: 1794904 - RNA, 17 nt, Human
cugauggugcaaugacc

SEQ ID NO: 1794905 - RNA, 19 nt, Human
cugauggugcaaugaccuu

SEQ ID NO: 1794906 - RNA, 20 nt, Human
cugauggugcaaugaccuuu

SEQ ID NO: 1794907 - RNA, 21 nt, Human
cugauggugcaaugaccuuuc

SEQ ID NO: 1794908 - RNA, 13 nt, Human
cugcaaagcccag

SEQ ID NO: 1794909 - RNA, 15 nt, Human
cugcaaagcccagcu

SEQ ID NO: 1794910 - RNA, 23 nt, Human
cugauuuuuuuuuccuucagugc

SEQ ID NO: 1794911 - RNA, 21 nt, Human
cugauuuuuuuuuccuucagu

SEQ ID NO: 1794912 - RNA, 22 nt, Human
cugauuuuuuuuuccuucagug

SEQ ID NO: 1794913 - RNA, 16 nt, Human
cugauuuuuuuuuccu

SEQ ID NO: 1794914 - RNA, 18 nt, Human
cugauuuuuuuuuccuuc

SEQ ID NO: 1794915 - RNA, 19 nt, Human
cugauuuuuuuuuccuuca

SEQ ID NO: 1794916 - RNA, 20 nt, Human
cugauuuuuuuuuccuucag

SEQ ID NO: 1794917 - RNA, 20 nt, Human
cugauccuaguuccaccauc

SEQ ID NO: 1794918 - RNA, 21 nt, Human
cugauccuaguuccaccauca

SEQ ID NO: 1794919 - RNA, 14 nt, Human
cugauggugcaaug

SEQ ID NO: 1794920 - RNA, 15 nt, Human
cugauggugcaauga

SEQ ID NO: 1794921 - RNA, 16 nt, Human
cugauggugcaaugac

SEQ ID NO: 1794922 - RNA, 15 nt, Human
cugaucaccugcccu

SEQ ID NO: 1794923 - RNA, 20 nt, Human
cugagucccaggcugagccu

SEQ ID NO: 1794924 - RNA, 18 nt, Human
cugagucugaaggcuggg

SEQ ID NO: 1794925 - RNA, 19 nt, Human
cugagucugaaggcugggu

SEQ ID NO: 1794926 - RNA, 13 nt, Human
cugaggcugggcu

SEQ ID NO: 1794927 - RNA, 15 nt, Human
cugaggcugggcucc

SEQ ID NO: 1794928 - RNA, 16 nt, Human
cugaggcugggcuccc

SEQ ID NO: 1794929 - RNA, 17 nt, Human
cugaggcugggcucccu

SEQ ID NO: 1794930 - RNA, 22 nt, Human
cugaggcugggcucccuuccca

SEQ ID NO: 1794931 - RNA, 24 nt, Human
cugaggcccuucucuccagccccu

SEQ ID NO: 1794932 - RNA, 21 nt, Human
cugaggcuccacuuggucugu

SEQ ID NO: 1794933 - RNA, 15 nt, Human
cugaggcuccacuug

SEQ ID NO: 1794934 - RNA, 21 nt, Human
gaacuuguaaaggaauuuaaa

SEQ ID NO: 1794935 - RNA, 23 nt, Human
gaacuugguucccauuugcuccu

SEQ ID NO: 1794936 - RNA, 13 nt, Human
gaacuuggcgcug

SEQ ID NO: 1794937 - RNA, 15 nt, Human
gaacuuggcgcugcc

SEQ ID NO: 1794938 - RNA, 16 nt, Human
gaacuuggcgcugccc

SEQ ID NO: 1794939 - RNA, 22 nt, Human
gaacuggguacuuguggacaca

SEQ ID NO: 1794940 - RNA, 15 nt, Human
gaacucccuuucaac

SEQ ID NO: 1794941 - RNA, 14 nt, Human
gaacucccuuucaa

SEQ ID NO: 1794942 - RNA, 17 nt, Human
gaaccaccacacccagc

SEQ ID NO: 1794943 - RNA, 16 nt, Human
gaaccaccacacccag

SEQ ID NO: 1794944 - RNA, 12 nt, Human
gaaccugacccc

SEQ ID NO: 1794945 - RNA, 11 nt, Human
gaaccugaccc

SEQ ID NO: 1794946 - RNA, 21 nt, Human
gaaccacaucuugcucugcug

SEQ ID NO: 1794947 - RNA, 19 nt, Human
gaacagacuggaagcacag

SEQ ID NO: 1794948 - RNA, 16 nt, Human
gaacagacuggaagca

SEQ ID NO: 1794949 - RNA, 15 nt, Human
gaacagacuggaagc

SEQ ID NO: 1794950 - RNA, 18 nt, Human
gaaauagacagcaugaga

SEQ ID NO: 1794951 - RNA, 17 nt, Human
gaaauacagacuggaug

SEQ ID NO: 1794952 - RNA, 21 nt, Human
gaaauaucugaaaauguaugu

SEQ ID NO: 1794953 - RNA, 13 nt, Human
gaaauauaauuga

SEQ ID NO: 1794954 - RNA, 20 nt, Human
gaaacaugacucguauaugu

SEQ ID NO: 1794955 - RNA, 23 nt, Human
gaaaugcugguuuuucaguuuuc

SEQ ID NO: 1794956 - RNA, 14 nt, Human
gaaaugggcagagc

SEQ ID NO: 1794957 - RNA, 20 nt, Human
gaaaugggcagagcagagac

SEQ ID NO: 1794958 - RNA, 19 nt, Human
gaaauugcauuuccugaca

SEQ ID NO: 1794959 - RNA, 17 nt, Human
gaaauuuguuauaauga

SEQ ID NO: 1794960 - RNA, 20 nt, Human
gaauaauccuaaacauauga

SEQ ID NO: 1794961 - RNA, 15 nt, Human
gaauaaauugcuccu

SEQ ID NO: 1794962 - RNA, 14 nt, Human
gaauaacauguaau

SEQ ID NO: 1794963 - RNA, 14 nt, Human
gaauacuuuauaaa

SEQ ID NO: 1794964 - RNA, 24 nt, Human
gaauacuuugcagcacagcugaga

SEQ ID NO: 1794965 - RNA, 17 nt, Human
gaauagaagcuaagguu

SEQ ID NO: 1794966 - RNA, 14 nt, Human
gaauaaagacaccu

SEQ ID NO: 1794967 - RNA, 12 nt, Human
gaauaaaauuuu

SEQ ID NO: 1794968 - RNA, 12 nt, Human
gaaguuucugcc

SEQ ID NO: 1794969 - RNA, 16 nt, Human
gaaucucaaauaacua

SEQ ID NO: 1794970 - RNA, 19 nt, Human
gaaugaaagggcccagaga

SEQ ID NO: 1794971 - RNA, 14 nt, Human
gaaugaaagggccc

SEQ ID NO: 1794972 - RNA, 14 nt, Human
gaauagcugggacu

SEQ ID NO: 1794973 - RNA, 18 nt, Human
gaauagaagcuaagguuu

SEQ ID NO: 1794974 - RNA, 15 nt, Human
gaauagaugcugacu

SEQ ID NO: 1794975 - RNA, 15 nt, Human
gaauagcugggacua

SEQ ID NO: 1794976 - RNA, 19 nt, Human
gaaggauacaaaagcaugu

SEQ ID NO: 1794977 - RNA, 12 nt, Human
gaaggauacaaa

SEQ ID NO: 1794978 - RNA, 21 nt, Human
gaaggauacaaaagcauguga

SEQ ID NO: 1794979 - RNA, 14 nt, Human
gaaggaaacccagc

SEQ ID NO: 1794980 - RNA, 17 nt, Human
gaaggaaacccagcucu

SEQ ID NO: 1794981 - RNA, 23 nt, Human
gaaggacccggaggggccuggca

SEQ ID NO: 1794982 - RNA, 18 nt, Human
gaaggaaacccagcucug

SEQ ID NO: 1794983 - RNA, 13 nt, Human
gaaggcagggagg

SEQ ID NO: 1794984 - RNA, 14 nt, Human
gaaggcagggaggg

SEQ ID NO: 1794985 - RNA, 16 nt, Human
gaaggccccgcccagg

SEQ ID NO: 1794986 - RNA, 14 nt, Human
gaaggccccgccca

SEQ ID NO: 1794987 - RNA, 15 nt, Human
gaaggccccgcccag

SEQ ID NO: 1794988 - RNA, 21 nt, Human
gaagacucauucuucuguacg

SEQ ID NO: 1794989 - RNA, 19 nt, Human
gaagacucauucuucugua

SEQ ID NO: 1794990 - RNA, 14 nt, Human
gaagaagcucucuc

SEQ ID NO: 1794991 - RNA, 22 nt, Human
gaagccacgguguucugugaua

SEQ ID NO: 1794992 - RNA, 15 nt, Human
gaagccagcaggcuc

SEQ ID NO: 1794993 - RNA, 16 nt, Human
gaagccagcaggcucu

SEQ ID NO: 1794994 - RNA, 19 nt, Human
gaagccagcaggcucucag

SEQ ID NO: 1794995 - RNA, 23 nt, Human
gaagccagcaggcucucaggcca

SEQ ID NO: 1794996 - RNA, 18 nt, Human
gaagcuuuuaugugaaac

SEQ ID NO: 1794997 - RNA, 10 nt, Human
gaagccuuug

SEQ ID NO: 1794998 - RNA, 11 nt, Human
gaagccuuugu

SEQ ID NO: 1794999 - RNA, 14 nt, Human
gaagcggcuggcag

SEQ ID NO: 1795000 - RNA, 20 nt, Human
gaagcccaggaaaggcucca

SEQ ID NO: 1795001 - RNA, 21 nt, Human
gaagcccaggaaaggcuccag

SEQ ID NO: 1795002 - RNA, 22 nt, Human
gaagcccaggaaaggcuccagg

SEQ ID NO: 1795003 - RNA, 23 nt, Human
gaagcccaggaaaggcuccagga

SEQ ID NO: 1795004 - RNA, 22 nt, Human
gaaaacaauaacgauaaaagac

SEQ ID NO: 1795005 - RNA, 13 nt, Human
gaaaacacauuuu

SEQ ID NO: 1795006 - RNA, 14 nt, Human
gaaaacacauuuuu

SEQ ID NO: 1795007 - RNA, 12 nt, Human
gaaaacaugcua

SEQ ID NO: 1795008 - RNA, 15 nt, Human
gaaaacaugcuacac

SEQ ID NO: 1795009 - RNA, 14 nt, Human
gaaaacaugcuaca

SEQ ID NO: 1795010 - RNA, 19 nt, Human
gaaaacguggcugcuucaa

SEQ ID NO: 1795011 - RNA, 18 nt, Human
gaaaacguggcugcuuca

SEQ ID NO: 1795012 - RNA, 15 nt, Human
gaaaacguggcugcu

SEQ ID NO: 1795013 - RNA, 16 nt, Human
gaaaacguggcugcuu

SEQ ID NO: 1795014 - RNA, 21 nt, Human
gaaaaccaagccguggcuucc

SEQ ID NO: 1795015 - RNA, 18 nt, Human
gaaaaccaagccguggcu

SEQ ID NO: 1795016 - RNA, 19 nt, Human
gaaaaccaagccguggcuu

SEQ ID NO: 1795017 - RNA, 15 nt, Human
cuuuuuucacuacau

SEQ ID NO: 1795018 - RNA, 14 nt, Human
cuuuuuucuaaagu

SEQ ID NO: 1795019 - RNA, 16 nt, Human
cuuuugagcauuuaga

SEQ ID NO: 1795020 - RNA, 21 nt, Human
cuuuugagugccuuacacaau

SEQ ID NO: 1795021 - RNA, 17 nt, Human
gaaaaaggaugcacaga

SEQ ID NO: 1795022 - RNA, 23 nt, Human
gaaaaaggaugcacagaguuguu

SEQ ID NO: 1795023 - RNA, 14 nt, Human
cuuuuuuggcugcu

SEQ ID NO: 1795024 - RNA, 15 nt, Human
cuuuuuuggcugcug

SEQ ID NO: 1795025 - RNA, 19 nt, Human
gaaaaucuuauaauuuaaa

SEQ ID NO: 1795026 - RNA, 16 nt, Human
gaaaaucagccugcuc

SEQ ID NO: 1795027 - RNA, 18 nt, Human
gaaaaucagccugcucca

SEQ ID NO: 1795028 - RNA, 14 nt, Human
gaaaaucagccugc

SEQ ID NO: 1795029 - RNA, 19 nt, Human
gaaaauaacgauaaaagac

SEQ ID NO: 1795030 - RNA, 17 nt, Human
gaaaagcugcugacagu

SEQ ID NO: 1795031 - RNA, 13 nt, Human
gaaaagcugcuga

SEQ ID NO: 1795032 - RNA, 20 nt, Human
gaaaaucuuauaauuuaaaa

SEQ ID NO: 1795033 - RNA, 22 nt, Human
gaaacacugggcuucuagaacc

SEQ ID NO: 1795034 - RNA, 18 nt, Human
gaaacagcuaaugggaca

SEQ ID NO: 1795035 - RNA, 20 nt, Human
gaaacagcucgacuuuaaaa

SEQ ID NO: 1795036 - RNA, 15 nt, Human
gaaacagcucgacuu

SEQ ID NO: 1795037 - RNA, 16 nt, Human
gaaacacuuugcauaa

SEQ ID NO: 1795038 - RNA, 16 nt, Human
cuuuucuuucagccaa

SEQ ID NO: 1795039 - RNA, 18 nt, Human
cuuuucuugcaugaggcu

SEQ ID NO: 1795040 - RNA, 23 nt, Human
cuuuucuugcaugaggcuagugu

SEQ ID NO: 1795041 - RNA, 18 nt, Human
cuuuucuguccgagcuuu

SEQ ID NO: 1795042 - RNA, 23 nt, Human
cuuuucuguccgagcuuugaaaa

SEQ ID NO: 1795043 - RNA, 20 nt, Human
cuuuucauaaccuagccuua

SEQ ID NO: 1795044 - RNA, 18 nt, Human
cuuuucacugcuggcugc

SEQ ID NO: 1795045 - RNA, 20 nt, Human
cuuuucacugcuggcugccu

SEQ ID NO: 1795046 - RNA, 17 nt, Human
cuuuucacugcuggcug

SEQ ID NO: 1795047 - RNA, 22 nt, Human
cuuuucauaaccuagccuuaga

SEQ ID NO: 1795048 - RNA, 18 nt, Human
cuuuguuuguugucagcu

SEQ ID NO: 1795049 - RNA, 20 nt, Human
cuuuguuuguugucagcuga

SEQ ID NO: 1795050 - RNA, 20 nt, Human
cuuuuacguccaucucuugu

SEQ ID NO: 1795051 - RNA, 18 nt, Human
cuuuguucuaaagaugga

SEQ ID NO: 1795052 - RNA, 14 nt, Human
cuuuguucuggcuc

SEQ ID NO: 1795053 - RNA, 15 nt, Human
cuuuguucuggcucu

SEQ ID NO: 1795054 - RNA, 19 nt, Human
cuuugugauuuuuguaauu

SEQ ID NO: 1795055 - RNA, 18 nt, Human
cuuugugauuuuuguaau

SEQ ID NO: 1795056 - RNA, 17 nt, Human
cuuugugauuuuuguaa

SEQ ID NO: 1795057 - RNA, 13 nt, Human
cuuugggaggcca

SEQ ID NO: 1795058 - RNA, 18 nt, Human
cuuuguccccaccgcaga

SEQ ID NO: 1795059 - RNA, 22 nt, Human
cuuuguccccaccgcagacagg

SEQ ID NO: 1795060 - RNA, 14 nt, Human
cuuugugauuuuug

SEQ ID NO: 1795061 - RNA, 16 nt, Human
cuuucccaucuuccaa

SEQ ID NO: 1795062 - RNA, 19 nt, Human
cuuuggacccugaggccca

SEQ ID NO: 1795063 - RNA, 17 nt, Human
cuuuggacccugaggcc

SEQ ID NO: 1795064 - RNA, 18 nt, Human
cuuuggacccugaggccc

SEQ ID NO: 1795065 - RNA, 18 nt, Human
cuuuggacagaagcagcu

SEQ ID NO: 1795066 - RNA, 19 nt, Human
cuuuggacagaagcagcuc

SEQ ID NO: 1795067 - RNA, 20 nt, Human
cuuuggacagaagcagcucu

SEQ ID NO: 1795068 - RNA, 21 nt, Human
cuuuggacagaagcagcucuu

SEQ ID NO: 1795069 - RNA, 15 nt, Human
cuuuggacccugagg

SEQ ID NO: 1795070 - RNA, 16 nt, Human
cuuuggacccugaggc

SEQ ID NO: 1795071 - RNA, 19 nt, Human
cuuguaaaggaauuuaaaa

SEQ ID NO: 1795072 - RNA, 16 nt, Human
cuuggggggcugaggu

SEQ ID NO: 1795073 - RNA, 22 nt, Human
cuuggggggcugaggugggagg

SEQ ID NO: 1795074 - RNA, 16 nt, Human
cuuggggaccagagcu

SEQ ID NO: 1795075 - RNA, 22 nt, Human
cuuggggaccagagcugccacc

SEQ ID NO: 1795076 - RNA, 15 nt, Human
cuuggggggcugagg

SEQ ID NO: 1795077 - RNA, 18 nt, Human
cuugggccacugugaaga

SEQ ID NO: 1795078 - RNA, 13 nt, Human
cuugggcuucauc

SEQ ID NO: 1795079 - RNA, 14 nt, Human
cuugggccacugug

SEQ ID NO: 1795080 - RNA, 20 nt, Human
cuuggggaccagagcugcca

SEQ ID NO: 1795081 - RNA, 21 nt, Human
cuuggggaccagagcugccac

SEQ ID NO: 1795082 - RNA, 22 nt, Human
cuugggcuucauccuccucaga

SEQ ID NO: 1795083 - RNA, 17 nt, Human
cuuggcugcagggaguc

SEQ ID NO: 1795084 - RNA, 13 nt, Human
cuugggaauuuua

SEQ ID NO: 1795085 - RNA, 16 nt, Human
cuuggcugcagggagu

SEQ ID NO: 1795086 - RNA, 22 nt, Human
cuuggaggaaggaaacccagcu

SEQ ID NO: 1795087 - RNA, 23 nt, Human
cuuggagggcaugaagacagaua

SEQ ID NO: 1795088 - RNA, 12 nt, Human
cuuggagggcau

SEQ ID NO: 1795089 - RNA, 14 nt, Human
cuugccacugccuc

SEQ ID NO: 1795090 - RNA, 15 nt, Human
cuugccacugccucu

SEQ ID NO: 1795091 - RNA, 21 nt, Human
cuucuccacccugcucuccga

SEQ ID NO: 1795092 - RNA, 18 nt, Human
cuucuccacccugcucuc

SEQ ID NO: 1795093 - RNA, 17 nt, Human
cuucuccacccugcucu

SEQ ID NO: 1795094 - RNA, 14 nt, Human
cuugcucugcugac

SEQ ID NO: 1795095 - RNA, 13 nt, Human
cuuggaagcuccg

SEQ ID NO: 1795096 - RNA, 13 nt, Human
cuuggaggaagga

SEQ ID NO: 1795097 - RNA, 16 nt, Human
cuuggaaaugggagac

SEQ ID NO: 1795098 - RNA, 17 nt, Human
cuugcucugcugacaga

SEQ ID NO: 1795099 - RNA, 16 nt, Human
cuugcucugcugacag

SEQ ID NO: 1795100 - RNA, 20 nt, Human
cuugcuucaaccccaugaga

SEQ ID NO: 1795101 - RNA, 21 nt, Human
cuuuauuuucuauaauuuaaa

SEQ ID NO: 1795102 - RNA, 17 nt, Human
cuuuauuaaauguagaa

SEQ ID NO: 1795103 - RNA, 20 nt, Human
cuuuauucuggcagaggagg

SEQ ID NO: 1795104 - RNA, 15 nt, Human
cuuuaguuuuuguga

SEQ ID NO: 1795105 - RNA, 13 nt, Human
cuuuaguuuuugu

SEQ ID NO: 1795106 - RNA, 18 nt, Human
cuuucauuugcuuuggaa

SEQ ID NO: 1795107 - RNA, 14 nt, Human
cuuucauuugcuuu

SEQ ID NO: 1795108 - RNA, 23 nt, Human
cuuucauauuuuaaacagaggau

SEQ ID NO: 1795109 - RNA, 19 nt, Human
cuuucauauuuuaaacaga

SEQ ID NO: 1795110 - RNA, 16 nt, Human
cuuucauauuuuaaac

SEQ ID NO: 1795111 - RNA, 18 nt, Human
cuuuccaaaugcccagcu

SEQ ID NO: 1795112 - RNA, 19 nt, Human
cuuuccaaaugcccagcuu

SEQ ID NO: 1795113 - RNA, 22 nt, Human
cuuuccaaaugcccagcuuaaa

SEQ ID NO: 1795114 - RNA, 14 nt, Human
cuuguuuucuggga

SEQ ID NO: 1795115 - RNA, 19 nt, Human
cuuguuuuuuuuuuccacu

SEQ ID NO: 1795116 - RNA, 20 nt, Human
cuuguuuuuuuuuuccacuu

SEQ ID NO: 1795117 - RNA, 21 nt, Human
cuuguuuuuuuuuuccacuua

SEQ ID NO: 1795118 - RNA, 20 nt, Human
cuuguguguuuauugucaaa

SEQ ID NO: 1795119 - RNA, 23 nt, Human
cuuguuggauuuuugucuugugu

SEQ ID NO: 1795120 - RNA, 21 nt, Human
cuuguuggauuuuugucuugu

SEQ ID NO: 1795121 - RNA, 21 nt, Human
cuuguguuucuuuaguuuuug

SEQ ID NO: 1795122 - RNA, 21 nt, Human
cuuguguguuuauugucaaag

SEQ ID NO: 1795123 - RNA, 16 nt, Human
cuguuucagaggcuca

SEQ ID NO: 1795124 - RNA, 17 nt, Human
cuguuugcuaagugagg

SEQ ID NO: 1795125 - RNA, 19 nt, Human
cuguuugcuaagugaggau

SEQ ID NO: 1795126 - RNA, 18 nt, Human
cuguuuagauaauacacc

SEQ ID NO: 1795127 - RNA, 17 nt, Human
cuguuucaaacuuuacu

SEQ ID NO: 1795128 - RNA, 15 nt, Human
cuguuucaaacuuua

SEQ ID NO: 1795129 - RNA, 17 nt, Human
cuguugcccaggcuggc

SEQ ID NO: 1795130 - RNA, 18 nt, Human
cuguugcccaggcuggcg

SEQ ID NO: 1795131 - RNA, 17 nt, Human
cuguuuagauaauacac

SEQ ID NO: 1795132 - RNA, 14 nt, Human
cuguuuagauaaua

SEQ ID NO: 1795133 - RNA, 22 nt, Human
cuguuuuacaaaaaagaaaaga

SEQ ID NO: 1795134 - RNA, 16 nt, Human
cuuaaaaaguggaaaa

SEQ ID NO: 1795135 - RNA, 17 nt, Human
cuuaaaaaguggaaaaa

SEQ ID NO: 1795136 - RNA, 13 nt, Human
cuguuuucucuug

SEQ ID NO: 1795137 - RNA, 16 nt, Human
cuguuaauaguucagg

SEQ ID NO: 1795138 - RNA, 18 nt, Human
cuguucuuaagacgugau

SEQ ID NO: 1795139 - RNA, 21 nt, Human
cuguucuuucuggcuaugcau

SEQ ID NO: 1795140 - RNA, 14 nt, Human
cuguucuuucuggc

SEQ ID NO: 1795141 - RNA, 13 nt, Human
cuguucuuucugg

SEQ ID NO: 1795142 - RNA, 21 nt, Human
cuguucuuuccaaaguacacu

SEQ ID NO: 1795143 - RNA, 19 nt, Human
cuguucuuuccaaaguaca

SEQ ID NO: 1795144 - RNA, 16 nt, Human
cuguucuuuccaaagu

SEQ ID NO: 1795145 - RNA, 15 nt, Human
cuguucuuuccaaag

SEQ ID NO: 1795146 - RNA, 16 nt, Human
cuguugcccaggcugg

SEQ ID NO: 1795147 - RNA, 15 nt, Human
cuguugcccaggcug

SEQ ID NO: 1795148 - RNA, 14 nt, Human
cuguugcccaggcu

SEQ ID NO: 1795149 - RNA, 13 nt, Human
cuguugcccaggc

SEQ ID NO: 1795150 - RNA, 12 nt, Human
cuguugcccagg

SEQ ID NO: 1795151 - RNA, 23 nt, Human
cuguucuuucuggcuaugcauuu

SEQ ID NO: 1795152 - RNA, 20 nt, Human
cuuaauucuuagcucauucu

SEQ ID NO: 1795153 - RNA, 17 nt, Human
cuuaaccagaucauugu

SEQ ID NO: 1795154 - RNA, 18 nt, Human
cuuaagaauuuugagcag

SEQ ID NO: 1795155 - RNA, 12 nt, Human
cuuaaaaauggu

SEQ ID NO: 1795156 - RNA, 20 nt, Human
cuuagaagucacacaguauu

SEQ ID NO: 1795157 - RNA, 17 nt, Human
cuuagaagucacacagu

SEQ ID NO: 1795158 - RNA, 16 nt, Human
cuuagaaguggaagua

SEQ ID NO: 1795159 - RNA, 16 nt, Human
cuuagaaauugcauuu

SEQ ID NO: 1795160 - RNA, 13 nt, Human
cuuacuguacaug

SEQ ID NO: 1795161 - RNA, 20 nt, Human
cuuagaaaaaccaccaccau

SEQ ID NO: 1795162 - RNA, 20 nt, Human
cuuaccugccaggaagccag

SEQ ID NO: 1795163 - RNA, 14 nt, Human
cuuagucacugaga

SEQ ID NO: 1795164 - RNA, 23 nt, Human
cuuagguuggcaaaaaggcagga

SEQ ID NO: 1795165 - RNA, 21 nt, Human
cuuagguuggcaaaaaggcag

SEQ ID NO: 1795166 - RNA, 18 nt, Human
cuuagaaguuuguuguga

SEQ ID NO: 1795167 - RNA, 19 nt, Human
cuuagaauuaguggcacuu

SEQ ID NO: 1795168 - RNA, 11 nt, Human
cuuagacaguc

SEQ ID NO: 1795169 - RNA, 15 nt, Human
cuucaguaagccgug

SEQ ID NO: 1795170 - RNA, 14 nt, Human
cuucagugccaaaa

SEQ ID NO: 1795171 - RNA, 13 nt, Human
cuuccacaagagc

SEQ ID NO: 1795172 - RNA, 14 nt, Human
cuuccacaagagcc

SEQ ID NO: 1795173 - RNA, 15 nt, Human
cuuccacaagagccc

SEQ ID NO: 1795174 - RNA, 14 nt, Human
cuucagccucccga

SEQ ID NO: 1795175 - RNA, 15 nt, Human
cuucagccugaaaga

SEQ ID NO: 1795176 - RNA, 20 nt, Human
cuucagccucccgaguagcu

SEQ ID NO: 1795177 - RNA, 16 nt, Human
cuucagccucccgagu

SEQ ID NO: 1795178 - RNA, 14 nt, Human
cuucaguaagccgu

SEQ ID NO: 1795179 - RNA, 15 nt, Human
cuucagcugacuuuu

SEQ ID NO: 1795180 - RNA, 19 nt, Human
cuucagcugacuuuucugu

SEQ ID NO: 1795181 - RNA, 23 nt, Human
cuucacauauugauuuccguuaa

SEQ ID NO: 1795182 - RNA, 14 nt, Human
cuucacauauugau

SEQ ID NO: 1795183 - RNA, 21 nt, Human
cuucaaggauccugagccaga

SEQ ID NO: 1795184 - RNA, 22 nt, Human
cuucaaggauccugagccagau

SEQ ID NO: 1795185 - RNA, 23 nt, Human
cuucaaggauccugagccagauu

SEQ ID NO: 1795186 - RNA, 15 nt, Human
cuucaaauauuuccc

SEQ ID NO: 1795187 - RNA, 21 nt, Human
cuuagucacugagacagcccg

SEQ ID NO: 1795188 - RNA, 20 nt, Human
cuuagucacugagacagccc

SEQ ID NO: 1795189 - RNA, 22 nt, Human
cuuagucacugagacagcccgg

SEQ ID NO: 1795190 - RNA, 17 nt, Human
cuucaaggauccugagc

SEQ ID NO: 1795191 - RNA, 18 nt, Human
cuucaaggauccugagcc

SEQ ID NO: 1795192 - RNA, 19 nt, Human
cuucaaggauccugagcca

SEQ ID NO: 1795193 - RNA, 20 nt, Human
cuucaaggauccugagccag

SEQ ID NO: 1795194 - RNA, 20 nt, Human
cuucaacugaccagccucca

SEQ ID NO: 1795195 - RNA, 23 nt, Human
cuucaacugaccagccuccaugc

SEQ ID NO: 1795196 - RNA, 17 nt, Human
cuucaacugaccagccu

SEQ ID NO: 1795197 - RNA, 16 nt, Human
cuucucacugccaugc

SEQ ID NO: 1795198 - RNA, 21 nt, Human
cuucucacugccaugccagcu

SEQ ID NO: 1795199 - RNA, 19 nt, Human
cuucgggaggucgaggcag

SEQ ID NO: 1795200 - RNA, 20 nt, Human
cuucggccuccauccugagg

SEQ ID NO: 1795201 - RNA, 17 nt, Human
cuucgcuccugugucuu

SEQ ID NO: 1795202 - RNA, 15 nt, Human
cuucgccaccugggu

SEQ ID NO: 1795203 - RNA, 14 nt, Human
cuucgccaccuggg

SEQ ID NO: 1795204 - RNA, 21 nt, Human
cuucgauacaccgggccugga

SEQ ID NO: 1795205 - RNA, 16 nt, Human
cuucgauacaccgggc

SEQ ID NO: 1795206 - RNA, 16 nt, Human
cuuccacaagagccca

SEQ ID NO: 1795207 - RNA, 12 nt, Human
cuucccccucca

SEQ ID NO: 1795208 - RNA, 15 nt, Human
cuucccccuccaauc

SEQ ID NO: 1795209 - RNA, 16 nt, Human
cuuccugugacuucag

SEQ ID NO: 1795210 - RNA, 13 nt, Human
cuuccugugacuu

SEQ ID NO: 1795211 - RNA, 21 nt, Human
cugucuuuuuucuaaaguaaa

SEQ ID NO: 1795212 - RNA, 15 nt, Human
cugugaaaggaaaga

SEQ ID NO: 1795213 - RNA, 14 nt, Human
cugucuuaauuuuc

SEQ ID NO: 1795214 - RNA, 18 nt, Human
cugucuucaguaagccgu

SEQ ID NO: 1795215 - RNA, 19 nt, Human
cugucuguuguauucauug

SEQ ID NO: 1795216 - RNA, 18 nt, Human
cugucuguuguauucauu

SEQ ID NO: 1795217 - RNA, 22 nt, Human
cugucauuugagcagggcucag

SEQ ID NO: 1795218 - RNA, 21 nt, Human
cugucauuugagcagggcuca

SEQ ID NO: 1795219 - RNA, 18 nt, Human
cugucaauuacaggaagu

SEQ ID NO: 1795220 - RNA, 23 nt, Human
cugucauuugagcagggcucagc

SEQ ID NO: 1795221 - RNA, 16 nt, Human
cugugaaaggaaagag

SEQ ID NO: 1795222 - RNA, 22 nt, Human
cugugaaaggaaagagggaggu

SEQ ID NO: 1795223 - RNA, 15 nt, Human
cugugauggggcccu

SEQ ID NO: 1795224 - RNA, 23 nt, Human
cugugauggggcccugccuccuu

SEQ ID NO: 1795225 - RNA, 16 nt, Human
cugugauggggcccug

SEQ ID NO: 1795226 - RNA, 21 nt, Human
cugugauggggcccugccucc

SEQ ID NO: 1795227 - RNA, 15 nt, Human
cugugccaugugcca

SEQ ID NO: 1795228 - RNA, 19 nt, Human
cugugcccuaaaguguauu

SEQ ID NO: 1795229 - RNA, 14 nt, Human
cugugccaugugcc

SEQ ID NO: 1795230 - RNA, 22 nt, Human
cuguggguuucuaaagcugcca

SEQ ID NO: 1795231 - RNA, 21 nt, Human
cuguggguuucuaaagcugcc

SEQ ID NO: 1795232 - RNA, 12 nt, Human
cugugccucugc

SEQ ID NO: 1795233 - RNA, 13 nt, Human
cugugccucugcc

SEQ ID NO: 1795234 - RNA, 14 nt, Human
cugugccucugccu

SEQ ID NO: 1795235 - RNA, 15 nt, Human
cugugccucugccug

SEQ ID NO: 1795236 - RNA, 16 nt, Human
cugugccucugccugu

SEQ ID NO: 1795237 - RNA, 17 nt, Human
cugugccucugccuguc

SEQ ID NO: 1795238 - RNA, 14 nt, Human
cuguggaucaaauc

SEQ ID NO: 1795239 - RNA, 24 nt, Human
cuguggaucaaauccagccugcug

SEQ ID NO: 1795240 - RNA, 18 nt, Human
cugugugugcgccuacag

SEQ ID NO: 1795241 - RNA, 20 nt, Human
cugugucuuuuuucacuaca

SEQ ID NO: 1795242 - RNA, 14 nt, Human
cugugugcucagga

SEQ ID NO: 1795243 - RNA, 21 nt, Human
cugggauuacaagcgugagcc

SEQ ID NO: 1795244 - RNA, 18 nt, Human
cugggauuacaggcguga

SEQ ID NO: 1795245 - RNA, 19 nt, Human
cugggccccugccucucug

SEQ ID NO: 1795246 - RNA, 20 nt, Human
cugggccccugccucucugc

SEQ ID NO: 1795247 - RNA, 23 nt, Human
cugggccccugccucucugcagg

SEQ ID NO: 1795248 - RNA, 13 nt, Human
cugggucgcccug

SEQ ID NO: 1795249 - RNA, 20 nt, Human
cuggggguucuuucuuccuc

SEQ ID NO: 1795250 - RNA, 23 nt, Human
cuggggguucuuucuuccucugc

SEQ ID NO: 1795251 - RNA, 15 nt, Human
cugggucgcccugga

SEQ ID NO: 1795252 - RNA, 16 nt, Human
cugggucgcccuggac

SEQ ID NO: 1795253 - RNA, 15 nt, Human
cugggcuucaguggc

SEQ ID NO: 1795254 - RNA, 22 nt, Human
cugggcuuggggaccagagcug

SEQ ID NO: 1795255 - RNA, 18 nt, Human
cugggcuugucuguagau

SEQ ID NO: 1795256 - RNA, 18 nt, Human
cugggggcugggcagagg

SEQ ID NO: 1795257 - RNA, 14 nt, Human
cugggggcugggca

SEQ ID NO: 1795258 - RNA, 16 nt, Human
cugggggccucuucug

SEQ ID NO: 1795259 - RNA, 19 nt, Human
cuguaauccuagcacuuug

SEQ ID NO: 1795260 - RNA, 22 nt, Human
cugguuagagguucccuuugac

SEQ ID NO: 1795261 - RNA, 21 nt, Human
cugguuagagguucccuuuga

SEQ ID NO: 1795262 - RNA, 15 nt, Human
cuguaauuugugaua

SEQ ID NO: 1795263 - RNA, 14 nt, Human
cuguaauuugugau

SEQ ID NO: 1795264 - RNA, 14 nt, Human
cuguacagagccca

SEQ ID NO: 1795265 - RNA, 15 nt, Human
cuguacagagcccac

SEQ ID NO: 1795266 - RNA, 18 nt, Human
cuguacagagcccacgcc

SEQ ID NO: 1795267 - RNA, 22 nt, Human
cuguacagagcccacgccccca

SEQ ID NO: 1795268 - RNA, 21 nt, Human
cugguggcagcucaccucucc

SEQ ID NO: 1795269 - RNA, 18 nt, Human
cugguggcagugggagcu

SEQ ID NO: 1795270 - RNA, 14 nt, Human
cugguggcaguggg

SEQ ID NO: 1795271 - RNA, 15 nt, Human
cugguggcagcugcg

SEQ ID NO: 1795272 - RNA, 20 nt, Human
cugguggcagcucaccucuc

SEQ ID NO: 1795273 - RNA, 17 nt, Human
cugguggcagcucaccu

SEQ ID NO: 1795274 - RNA, 18 nt, Human
cugguggcagcucaccuc

SEQ ID NO: 1795275 - RNA, 18 nt, Human
cuguacgucugacaggca

SEQ ID NO: 1795276 - RNA, 16 nt, Human
cuguacgucugacagg

SEQ ID NO: 1795277 - RNA, 15 nt, Human
cuguacgucugacag

SEQ ID NO: 1795278 - RNA, 14 nt, Human
cuguacgucugaca

SEQ ID NO: 1795279 - RNA, 21 nt, Human
cuguacaugaaaacacauuuu

SEQ ID NO: 1795280 - RNA, 20 nt, Human
cuguacaugaaaacacauuu

SEQ ID NO: 1795281 - RNA, 17 nt, Human
cuguacaugaaaacaca

SEQ ID NO: 1795282 - RNA, 20 nt, Human
cuguacgucugacaggcaau

SEQ ID NO: 1795283 - RNA, 19 nt, Human
cuguacgucugacaggcaa

SEQ ID NO: 1795284 - RNA, 14 nt, Human
cuguacuccuccca

SEQ ID NO: 1795285 - RNA, 15 nt, Human
cuguacuccucccag

SEQ ID NO: 1795286 - RNA, 16 nt, Human
cuguacuccucccagg

SEQ ID NO: 1795287 - RNA, 19 nt, Human
cuguacuccucccaggcgc

SEQ ID NO: 1795288 - RNA, 21 nt, Human
cuguacuccucccaggcgccc

SEQ ID NO: 1795289 - RNA, 20 nt, Human
cuguauuuuguuuuugucuu

SEQ ID NO: 1795290 - RNA, 15 nt, Human
cugucaauuacagga

SEQ ID NO: 1795291 - RNA, 16 nt, Human
cugucaauuacaggaa

SEQ ID NO: 1795292 - RNA, 20 nt, Human
cuguaucccaugagccucag

SEQ ID NO: 1795293 - RNA, 22 nt, Human
cuguaucccaugagccucagca

SEQ ID NO: 1795294 - RNA, 21 nt, Human
cuguaucccaugagccucagc

SEQ ID NO: 1795295 - RNA, 17 nt, Human
cuguauuagucacagag

SEQ ID NO: 1795296 - RNA, 19 nt, Human
cuguauuagucacagagau

SEQ ID NO: 1795297 - RNA, 18 nt, Human
ccuauauuguuuucagug

SEQ ID NO: 1795298 - RNA, 22 nt, Human
ccuauauuguuuucaguguaca

SEQ ID NO: 1795299 - RNA, 13 nt, Human
ccuaguuccacca

SEQ ID NO: 1795300 - RNA, 21 nt, Human
ccuaguuccaccaucaagcca

SEQ ID NO: 1795301 - RNA, 23 nt, Human
ccuaguuccaccaucaagccacc

SEQ ID NO: 1795302 - RNA, 13 nt, Human
ccuacuuccugug

SEQ ID NO: 1795303 - RNA, 21 nt, Human
ccuacuuccccuuccuaauuc

SEQ ID NO: 1795304 - RNA, 15 nt, Human
ccuacuuccugugac

SEQ ID NO: 1795305 - RNA, 22 nt, Human
ccuaccgagucucuucuccacu

SEQ ID NO: 1795306 - RNA, 23 nt, Human
ccuaccgagucucuucuccacug

SEQ ID NO: 1795307 - RNA, 15 nt, Human
ccuaaaauucagugg

SEQ ID NO: 1795308 - RNA, 16 nt, Human
ccuaaauauauuuuaa

SEQ ID NO: 1795309 - RNA, 18 nt, Human
ccuaaauauauuuuaaga

SEQ ID NO: 1795310 - RNA, 15 nt, Human
ccuacaagacacagu

SEQ ID NO: 1795311 - RNA, 18 nt, Human
ccgggaccccgagccugg

SEQ ID NO: 1795312 - RNA, 20 nt, Human
ccgggcgcgguggcucacgc

SEQ ID NO: 1795313 - RNA, 16 nt, Human
ccgggcguggugguga

SEQ ID NO: 1795314 - RNA, 13 nt, Human
ccgggcugggagc

SEQ ID NO: 1795315 - RNA, 18 nt, Human
ccgggcugggagcucugc

SEQ ID NO: 1795316 - RNA, 19 nt, Human
ccgggcugggagcucugca

SEQ ID NO: 1795317 - RNA, 22 nt, Human
ccgggcucugccucccaucacc

SEQ ID NO: 1795318 - RNA, 13 nt, Human
ccgggcucugccu

SEQ ID NO: 1795319 - RNA, 12 nt, Human
ccgcuuucuacc

SEQ ID NO: 1795320 - RNA, 15 nt, Human
ccgcucagcccuccc

SEQ ID NO: 1795321 - RNA, 19 nt, Human
ccgcucagcccucccugcc

SEQ ID NO: 1795322 - RNA, 21 nt, Human
ccgcucagcccucccugcccc

SEQ ID NO: 1795323 - RNA, 22 nt, Human
ccgcucagcccucccugccccu

SEQ ID NO: 1795324 - RNA, 23 nt, Human
ccgcuuucuacccagcgagcccu

SEQ ID NO: 1795325 - RNA, 15 nt, Human
ccggcuggccuggcc

SEQ ID NO: 1795326 - RNA, 19 nt, Human
ccgcuuucuacccagcgag

SEQ ID NO: 1795327 - RNA, 17 nt, Human
ccggcuggccuggcccc

SEQ ID NO: 1795328 - RNA, 18 nt, Human
ccggcuggccuggccccu

SEQ ID NO: 1795329 - RNA, 20 nt, Human
ccgggaagggggcugggaca

SEQ ID NO: 1795330 - RNA, 17 nt, Human
ccgggaccccgagccug

SEQ ID NO: 1795331 - RNA, 14 nt, Human
ccgcacugggcuug

SEQ ID NO: 1795332 - RNA, 19 nt, Human
ccgcacugggcuuggggac

SEQ ID NO: 1795333 - RNA, 21 nt, Human
ccgcuaagagggagggagggc

SEQ ID NO: 1795334 - RNA, 11 nt, Human
ccgcucagccc

SEQ ID NO: 1795335 - RNA, 12 nt, Human
ccgcucagcccu

SEQ ID NO: 1795336 - RNA, 13 nt, Human
ccgcucagcccuc

SEQ ID NO: 1795337 - RNA, 23 nt, Human
ccgcuaagagggagggagggcuc

SEQ ID NO: 1795338 - RNA, 17 nt, Human
ccgaguagcugggacua

SEQ ID NO: 1795339 - RNA, 17 nt, Human
ccgaggccuucucugaa

SEQ ID NO: 1795340 - RNA, 20 nt, Human
ccgaguagcugggacuacag

SEQ ID NO: 1795341 - RNA, 14 nt, Human
ccgaggccuucucu

SEQ ID NO: 1795342 - RNA, 18 nt, Human
cccugguuuccugcccug

SEQ ID NO: 1795343 - RNA, 19 nt, Human
cccugguuuccugcccugg

SEQ ID NO: 1795344 - RNA, 20 nt, Human
cccugguggcagcucaccuc

SEQ ID NO: 1795345 - RNA, 16 nt, Human
cccugguuuccugccc

SEQ ID NO: 1795346 - RNA, 17 nt, Human
cccugguuuccugcccu

SEQ ID NO: 1795347 - RNA, 16 nt, Human
ccucccaaagugcugg

SEQ ID NO: 1795348 - RNA, 15 nt, Human
ccucccaaagugcug

SEQ ID NO: 1795349 - RNA, 15 nt, Human
ccuccaugcugccuc

SEQ ID NO: 1795350 - RNA, 23 nt, Human
ccuccaugugggcuaguugggcu

SEQ ID NO: 1795351 - RNA, 14 nt, Human
ccuccaugcugccu

SEQ ID NO: 1795352 - RNA, 18 nt, Human
ccuccaucuaaacugccc

SEQ ID NO: 1795353 - RNA, 22 nt, Human
ccuccaggugcacaagcuccaa

SEQ ID NO: 1795354 - RNA, 19 nt, Human
ccuccaggugcacaagcuc

SEQ ID NO: 1795355 - RNA, 21 nt, Human
ccuccaggugcacaagcucca

SEQ ID NO: 1795356 - RNA, 22 nt, Human
ccucauaguaugguggcugggu

SEQ ID NO: 1795357 - RNA, 21 nt, Human
ccucauaguaugguggcuggg

SEQ ID NO: 1795358 - RNA, 13 nt, Human
ccucaucaccaac

SEQ ID NO: 1795359 - RNA, 14 nt, Human
ccucaucaccaacg

SEQ ID NO: 1795360 - RNA, 20 nt, Human
ccucauaguaugguggcugg

SEQ ID NO: 1795361 - RNA, 21 nt, Human
ccucauagcccucacccuggg

SEQ ID NO: 1795362 - RNA, 22 nt, Human
ccucauagcccucacccugggg

SEQ ID NO: 1795363 - RNA, 17 nt, Human
ccucauagcccucaccc

SEQ ID NO: 1795364 - RNA, 18 nt, Human
ccucauagcccucacccu

SEQ ID NO: 1795365 - RNA, 13 nt, Human
ccucauacccacc

SEQ ID NO: 1795366 - RNA, 11 nt, Human
ccucagugcca

SEQ ID NO: 1795367 - RNA, 20 nt, Human
ccucagucuggcccuuccuu

SEQ ID NO: 1795368 - RNA, 19 nt, Human
ccucagucuggcccuuccu

SEQ ID NO: 1795369 - RNA, 19 nt, Human
ccuaugcagagguccacaa

SEQ ID NO: 1795370 - RNA, 21 nt, Human
ccucaucuccccaucauuggu

SEQ ID NO: 1795371 - RNA, 13 nt, Human
ccucauccucaua

SEQ ID NO: 1795372 - RNA, 20 nt, Human
ccucauccucauacccaccc

SEQ ID NO: 1795373 - RNA, 23 nt, Human
ccuccaaucccaccaacccucag

SEQ ID NO: 1795374 - RNA, 21 nt, Human
ccucccgaguagcugggacua

SEQ ID NO: 1795375 - RNA, 20 nt, Human
ccucccgaguagcugggacu

SEQ ID NO: 1795376 - RNA, 22 nt, Human
ccucccugccccucccuucaac

SEQ ID NO: 1795377 - RNA, 24 nt, Human
ccucccugccccucccuucaacca

SEQ ID NO: 1795378 - RNA, 14 nt, Human
ccuccucagaucuu

SEQ ID NO: 1795379 - RNA, 18 nt, Human
ccucccugccccucccuu

SEQ ID NO: 1795380 - RNA, 21 nt, Human
ccucccugccccucccuucaa

SEQ ID NO: 1795381 - RNA, 10 nt, Human
ccucccuccc

SEQ ID NO: 1795382 - RNA, 14 nt, Human
ccuccugggcuaag

SEQ ID NO: 1795383 - RNA, 23 nt, Human
ccuccugccucgaacuggcugca

SEQ ID NO: 1795384 - RNA, 18 nt, Human
ccucgguguggagaagcg

SEQ ID NO: 1795385 - RNA, 16 nt, Human
ccucggugccuuccuc

SEQ ID NO: 1795386 - RNA, 14 nt, Human
ccucgguguggaga

SEQ ID NO: 1795387 - RNA, 16 nt, Human
ccucuaggaggucucu

SEQ ID NO: 1795388 - RNA, 17 nt, Human
ccucccgaauagcuggg

SEQ ID NO: 1795389 - RNA, 20 nt, Human
cccugcuuugggcugcccug

SEQ ID NO: 1795390 - RNA, 22 nt, Human
cccugcuuugggcugcccuggu

SEQ ID NO: 1795391 - RNA, 18 nt, Human
cccugcuuugggcugccc

SEQ ID NO: 1795392 - RNA, 19 nt, Human
cccugcuuugggcugcccu

SEQ ID NO: 1795393 - RNA, 17 nt, Human
cccugcuuugggcugcc

SEQ ID NO: 1795394 - RNA, 22 nt, Human
cccugcuggguguggcgcagca

SEQ ID NO: 1795395 - RNA, 18 nt, Human
cccugcccaccuggccuc

SEQ ID NO: 1795396 - RNA, 16 nt, Human
cccugcuggguguggc

SEQ ID NO: 1795397 - RNA, 21 nt, Human
cccugcuggguguggcgcagc

SEQ ID NO: 1795398 - RNA, 13 nt, Human
cccugcccaccug

SEQ ID NO: 1795399 - RNA, 14 nt, Human
cccugcccaccugg

SEQ ID NO: 1795400 - RNA, 17 nt, Human
cccugcccaccuggccu

SEQ ID NO: 1795401 - RNA, 19 nt, Human
cccuggcuuuucacugcug

SEQ ID NO: 1795402 - RNA, 22 nt, Human
cccuggcuuuucacugcuggcu

SEQ ID NO: 1795403 - RNA, 18 nt, Human
cccugggaggcagugaug

SEQ ID NO: 1795404 - RNA, 18 nt, Human
cccuggcuuuucacugcu

SEQ ID NO: 1795405 - RNA, 15 nt, Human
cccuggacugugugc

SEQ ID NO: 1795406 - RNA, 15 nt, Human
cccugggaggcucug

SEQ ID NO: 1795407 - RNA, 15 nt, Human
cccugguggcagcuc

SEQ ID NO: 1795408 - RNA, 16 nt, Human
cccugguggcagcuca

SEQ ID NO: 1795409 - RNA, 17 nt, Human
cccugguggcagcucac

SEQ ID NO: 1795410 - RNA, 16 nt, Human
cccucuggggcuguuc

SEQ ID NO: 1795411 - RNA, 15 nt, Human
cccugaaagcccuga

SEQ ID NO: 1795412 - RNA, 13 nt, Human
cccugaggcccag

SEQ ID NO: 1795413 - RNA, 16 nt, Human
cccugaaagcccugag

SEQ ID NO: 1795414 - RNA, 14 nt, Human
cccugaggcccaga

SEQ ID NO: 1795415 - RNA, 15 nt, Human
cccugaggcccagag

SEQ ID NO: 1795416 - RNA, 16 nt, Human
cccugaggcccagagg

SEQ ID NO: 1795417 - RNA, 17 nt, Human
cccugaggcccagaggg

SEQ ID NO: 1795418 - RNA, 18 nt, Human
cccugaggcccagagggc

SEQ ID NO: 1795419 - RNA, 19 nt, Human
cccugaggcccagagggcc

SEQ ID NO: 1795420 - RNA, 20 nt, Human
cccugaggcccagagggccu

SEQ ID NO: 1795421 - RNA, 23 nt, Human
cccugaggcccagagggccugca

SEQ ID NO: 1795422 - RNA, 12 nt, Human
cccugcacuugc

SEQ ID NO: 1795423 - RNA, 19 nt, Human
cccugcacuugcagacucu

SEQ ID NO: 1795424 - RNA, 22 nt, Human
cccugcacuugcagacucuaca

SEQ ID NO: 1795425 - RNA, 16 nt, Human
cccugcaaagcccagc

SEQ ID NO: 1795426 - RNA, 17 nt, Human
cccugcaaagcccagcu

SEQ ID NO: 1795427 - RNA, 19 nt, Human
cccugcaaagcccagcuug

SEQ ID NO: 1795428 - RNA, 20 nt, Human
cccugcaaagcccagcuuga

SEQ ID NO: 1795429 - RNA, 23 nt, Human
cccugcacaaagcccuuccaugu

SEQ ID NO: 1795430 - RNA, 15 nt, Human
cccugcaaagcccag

SEQ ID NO: 1795431 - RNA, 18 nt, Human
cccggugcccaagaauag

SEQ ID NO: 1795432 - RNA, 16 nt, Human
cccgggcucugccucc

SEQ ID NO: 1795433 - RNA, 17 nt, Human
cccgucgacguagaacc

SEQ ID NO: 1795434 - RNA, 22 nt, Human
cccgucucugguuccuccccuc

SEQ ID NO: 1795435 - RNA, 15 nt, Human
cccgugggguuccuc

SEQ ID NO: 1795436 - RNA, 21 nt, Human
cccuaccgagucucuucucca

SEQ ID NO: 1795437 - RNA, 18 nt, Human
cccuaccgagucucuucu

SEQ ID NO: 1795438 - RNA, 21 nt, Human
cccuaaugcgcaggcuggccc

SEQ ID NO: 1795439 - RNA, 22 nt, Human
cccuaaugcgcaggcuggcccu

SEQ ID NO: 1795440 - RNA, 17 nt, Human
cccuaaugcgcaggcug

SEQ ID NO: 1795441 - RNA, 23 nt, Human
cccuaaugcgcaggcuggcccug

SEQ ID NO: 1795442 - RNA, 20 nt, Human
cccuacaguugaaaaacagc

SEQ ID NO: 1795443 - RNA, 22 nt, Human
cccgaguagcugggacuacagg

SEQ ID NO: 1795444 - RNA, 19 nt, Human
cccgcugucagccauuccu

SEQ ID NO: 1795445 - RNA, 20 nt, Human
cccgcugucagccauuccug

SEQ ID NO: 1795446 - RNA, 12 nt, Human
cccgggcucugc

SEQ ID NO: 1795447 - RNA, 14 nt, Human
cccgggcucugccu

SEQ ID NO: 1795448 - RNA, 15 nt, Human
cccgggcucugccuc

SEQ ID NO: 1795449 - RNA, 21 nt, Human
cccgaguagcugggacuacag

SEQ ID NO: 1795450 - RNA, 18 nt, Human
cccgaguagcugggacua

SEQ ID NO: 1795451 - RNA, 17 nt, Human
cccgaguagcugggacu

SEQ ID NO: 1795452 - RNA, 16 nt, Human
cccgaguagcugggac

SEQ ID NO: 1795453 - RNA, 15 nt, Human
cccgaguagcuggga

SEQ ID NO: 1795454 - RNA, 14 nt, Human
cccgaguagcuggg

SEQ ID NO: 1795455 - RNA, 13 nt, Human
cccgaguagcugg

SEQ ID NO: 1795456 - RNA, 21 nt, Human
cccgaggccuucucugaagga

SEQ ID NO: 1795457 - RNA, 15 nt, Human
cccagagggccugca

SEQ ID NO: 1795458 - RNA, 14 nt, Human
cccagagggccugc

SEQ ID NO: 1795459 - RNA, 20 nt, Human
cccacaagaaaugaaagcag

SEQ ID NO: 1795460 - RNA, 16 nt, Human
cccaaugcacuuuguu

SEQ ID NO: 1795461 - RNA, 20 nt, Human
cccaaugcacuuuguucugg

SEQ ID NO: 1795462 - RNA, 23 nt, Human
cccaaugcacuuuguucuggcuc

SEQ ID NO: 1795463 - RNA, 13 nt, Human
cccacaagaaaug

SEQ ID NO: 1795464 - RNA, 19 nt, Human
cccacagcgcuggccggga

SEQ ID NO: 1795465 - RNA, 17 nt, Human
cccaccuggccucugca

SEQ ID NO: 1795466 - RNA, 19 nt, Human
cccaccuggccucugcacu

SEQ ID NO: 1795467 - RNA, 21 nt, Human
cccaccuggccucugcacucc

SEQ ID NO: 1795468 - RNA, 20 nt, Human
cccacgacugcccggcaggg

SEQ ID NO: 1795469 - RNA, 21 nt, Human
cccacgacugcccggcagggu

SEQ ID NO: 1795470 - RNA, 16 nt, Human
cccaccuggccucugc

SEQ ID NO: 1795471 - RNA, 12 nt, Human
cccacuucugcc

SEQ ID NO: 1795472 - RNA, 23 nt, Human
cccacuugagaauuacccuuuug

SEQ ID NO: 1795473 - RNA, 21 nt, Human
cccacgcuggagugcagugag

SEQ ID NO: 1795474 - RNA, 20 nt, Human
cccacgcuggagugcaguga

SEQ ID NO: 1795475 - RNA, 19 nt, Human
cccacgcuggagugcagug

SEQ ID NO: 1795476 - RNA, 18 nt, Human
cccaccaucaugucuggc

SEQ ID NO: 1795477 - RNA, 19 nt, Human
cccaccgcagacaggacca

SEQ ID NO: 1795478 - RNA, 20 nt, Human
cccaccgcagacaggaccag

SEQ ID NO: 1795479 - RNA, 23 nt, Human
cccaccgggcugggagcucugca

SEQ ID NO: 1795480 - RNA, 22 nt, Human
cccaccucucucacuccuugaa

SEQ ID NO: 1795481 - RNA, 14 nt, Human
cgaauagcugggac

SEQ ID NO: 1795482 - RNA, 13 nt, Human
cgaauagcuggga

SEQ ID NO: 1795483 - RNA, 17 nt, Human
cgagaucacgccacugc

SEQ ID NO: 1795484 - RNA, 18 nt, Human
cgagauagccaaggccaa

SEQ ID NO: 1795485 - RNA, 20 nt, Human
cgagauugcaccacugcacu

SEQ ID NO: 1795486 - RNA, 20 nt, Human
cgagaucacgccacugcacu

SEQ ID NO: 1795487 - RNA, 18 nt, Human
cgagaucacgccacugca

SEQ ID NO: 1795488 - RNA, 14 nt, Human
cgagcaugccugga

SEQ ID NO: 1795489 - RNA, 13 nt, Human
cgagcaugccugg

SEQ ID NO: 1795490 - RNA, 16 nt, Human
cgagcaugccuggaug

SEQ ID NO: 1795491 - RNA, 17 nt, Human
cgagcaugccuggaugg

SEQ ID NO: 1795492 - RNA, 20 nt, Human
cgagcaggcuucuucccccc

SEQ ID NO: 1795493 - RNA, 23 nt, Human
ccuuugacgccaucccagcccca

SEQ ID NO: 1795494 - RNA, 22 nt, Human
ccuuugacgccaucccagcccc

SEQ ID NO: 1795495 - RNA, 20 nt, Human
ccuuugacgccaucccagcc

SEQ ID NO: 1795496 - RNA, 21 nt, Human
ccuuugacgccaucccagccc

SEQ ID NO: 1795497 - RNA, 15 nt, Human
cgaaaacguggcugc

SEQ ID NO: 1795498 - RNA, 18 nt, Human
cgaaaacguggcugcuuc

SEQ ID NO: 1795499 - RNA, 19 nt, Human
cgaaaacguggcugcuuca

SEQ ID NO: 1795500 - RNA, 20 nt, Human
cgaaaacguggcugcuucaa

SEQ ID NO: 1795501 - RNA, 14 nt, Human
cgaacuggcugcaa

SEQ ID NO: 1795502 - RNA, 12 nt, Human
cgaacuggcugc

SEQ ID NO: 1795503 - RNA, 14 nt, Human
cgaacuccugaccu

SEQ ID NO: 1795504 - RNA, 19 nt, Human
cgaaagggacuuggaagcu

SEQ ID NO: 1795505 - RNA, 20 nt, Human
cgaaaggaugaaagugacca

SEQ ID NO: 1795506 - RNA, 22 nt, Human
cgaaagggacuuggaagcuccg

SEQ ID NO: 1795507 - RNA, 21 nt, Human
cgaaagaacaguccauugaaa

SEQ ID NO: 1795508 - RNA, 12 nt, Human
cgaaagaacagu

SEQ ID NO: 1795509 - RNA, 10 nt, Human
cgcagcccug

SEQ ID NO: 1795510 - RNA, 14 nt, Human
cgcagcccugcaga

SEQ ID NO: 1795511 - RNA, 15 nt, Human
cgcagacaggaccag

SEQ ID NO: 1795512 - RNA, 16 nt, Human
cgcagacaggaccagg

SEQ ID NO: 1795513 - RNA, 22 nt, Human
cgccaggggaaaaucagccugc

SEQ ID NO: 1795514 - RNA, 19 nt, Human
cgccagauucuuuccugag

SEQ ID NO: 1795515 - RNA, 20 nt, Human
cgccagauucuuuccugagg

SEQ ID NO: 1795516 - RNA, 21 nt, Human
cgccagauucuuuccugaggc

SEQ ID NO: 1795517 - RNA, 16 nt, Human
cgagcccugguggcag

SEQ ID NO: 1795518 - RNA, 15 nt, Human
cgagcccugguggca

SEQ ID NO: 1795519 - RNA, 18 nt, Human
cgagcaugccuggauggg

SEQ ID NO: 1795520 - RNA, 18 nt, Human
cgagcccugguggcagug

SEQ ID NO: 1795521 - RNA, 20 nt, Human
cgauuucuguuuagauaaua

SEQ ID NO: 1795522 - RNA, 17 nt, Human
cgccaugcuccuggccc

SEQ ID NO: 1795523 - RNA, 13 nt, Human
ccuugacucuuuc

SEQ ID NO: 1795524 - RNA, 23 nt, Human
ccuugaccauucuccaccugcca

SEQ ID NO: 1795525 - RNA, 20 nt, Human
ccuugaguugauucagcucu

SEQ ID NO: 1795526 - RNA, 13 nt, Human
ccuugaacuagga

SEQ ID NO: 1795527 - RNA, 20 nt, Human
ccuugaaaacuuuaugcuaa

SEQ ID NO: 1795528 - RNA, 16 nt, Human
ccuucggccuccaucc

SEQ ID NO: 1795529 - RNA, 15 nt, Human
ccuucggcgccuuaa

SEQ ID NO: 1795530 - RNA, 15 nt, Human
ccuucuccuucaccu

SEQ ID NO: 1795531 - RNA, 19 nt, Human
ccuucuccuucaccuuugu

SEQ ID NO: 1795532 - RNA, 21 nt, Human
ccuucuguggcucacagaacc

SEQ ID NO: 1795533 - RNA, 14 nt, Human
ccuucuguggcuca

SEQ ID NO: 1795534 - RNA, 16 nt, Human
ccuuugacgccauccc

SEQ ID NO: 1795535 - RNA, 17 nt, Human
ccuuugacgccauccca

SEQ ID NO: 1795536 - RNA, 18 nt, Human
ccuuugacgccaucccag

SEQ ID NO: 1795537 - RNA, 12 nt, Human
ccuugggacccc

SEQ ID NO: 1795538 - RNA, 22 nt, Human
ccuuggugucgggcaugacacg

SEQ ID NO: 1795539 - RNA, 21 nt, Human
ccuugguuaggcauuguggga

SEQ ID NO: 1795540 - RNA, 22 nt, Human
ccuugguuaggcauugugggaa

SEQ ID NO: 1795541 - RNA, 15 nt, Human
ccuuccucugagccu

SEQ ID NO: 1795542 - RNA, 16 nt, Human
ccuuccucugagccuu

SEQ ID NO: 1795543 - RNA, 21 nt, Human
ccuuccucuccacugccuucg

SEQ ID NO: 1795544 - RNA, 20 nt, Human
ccuuccucugagccuuggga

SEQ ID NO: 1795545 - RNA, 13 nt, Human
ccuuccucugagg

SEQ ID NO: 1795546 - RNA, 14 nt, Human
ccuuccucugaggc

SEQ ID NO: 1795547 - RNA, 22 nt, Human
ccuucauuuggcauuccccacu

SEQ ID NO: 1795548 - RNA, 20 nt, Human
ccuucggccuccauccugag

SEQ ID NO: 1795549 - RNA, 19 nt, Human
ccuucggccuccauccuga

SEQ ID NO: 1795550 - RNA, 14 nt, Human
ccuucggccuccau

SEQ ID NO: 1795551 - RNA, 14 nt, Human
ccuucacuuaggaa

SEQ ID NO: 1795552 - RNA, 21 nt, Human
ccuucaccuuuguccccaccg

SEQ ID NO: 1795553 - RNA, 14 nt, Human
ccuuagacaguccc

SEQ ID NO: 1795554 - RNA, 17 nt, Human
ccuucacagaugggugc

SEQ ID NO: 1795555 - RNA, 19 nt, Human
ccuucaccuuuguccccac

SEQ ID NO: 1795556 - RNA, 20 nt, Human
ccuucaccuuuguccccacc

SEQ ID NO: 1795557 - RNA, 11 nt, Human
ccuucagugcc

SEQ ID NO: 1795558 - RNA, 19 nt, Human
ccuucauuuggcauucccc

SEQ ID NO: 1795559 - RNA, 14 nt, Human
ccuucagugccaaa

SEQ ID NO: 1795560 - RNA, 12 nt, Human
ccuucagccuga

SEQ ID NO: 1795561 - RNA, 23 nt, Human
ccuguugggccaggagccuccug

SEQ ID NO: 1795562 - RNA, 12 nt, Human
ccuguuuaagag

SEQ ID NO: 1795563 - RNA, 15 nt, Human
ccuguuuaagagaca

SEQ ID NO: 1795564 - RNA, 14 nt, Human
ccuguuuguuucug

SEQ ID NO: 1795565 - RNA, 18 nt, Human
ccuguuuguuucugaaag

SEQ ID NO: 1795566 - RNA, 16 nt, Human
ccuguuucugcagcca

SEQ ID NO: 1795567 - RNA, 18 nt, Human
ccuguuucagaggcucag

SEQ ID NO: 1795568 - RNA, 21 nt, Human
ccugugucuugcaauggcagc

SEQ ID NO: 1795569 - RNA, 19 nt, Human
ccugugucuugcaauggca

SEQ ID NO: 1795570 - RNA, 17 nt, Human
ccugugucuugcaaugg

SEQ ID NO: 1795571 - RNA, 22 nt, Human
ccugugucuugcaauggcagcc

SEQ ID NO: 1795572 - RNA, 21 nt, Human
ccugugugugcgccuacagga

SEQ ID NO: 1795573 - RNA, 20 nt, Human
ccugugugugcgccuacagg

SEQ ID NO: 1795574 - RNA, 14 nt, Human
ccuuacacaauggu

SEQ ID NO: 1795575 - RNA, 20 nt, Human
ccuuacacaaugguuuucuu

SEQ ID NO: 1795576 - RNA, 17 nt, Human
ccuuaccacugcucuga

SEQ ID NO: 1795577 - RNA, 13 nt, Human
ccuuaccagcaga

SEQ ID NO: 1795578 - RNA, 15 nt, Human
ccuuacccucauguu

SEQ ID NO: 1795579 - RNA, 20 nt, Human
ccuuaccacugcucugauga

SEQ ID NO: 1795580 - RNA, 20 nt, Human
ccuuaccagcagagcaccuu

SEQ ID NO: 1795581 - RNA, 18 nt, Human
ccuuagaagucacacagu

SEQ ID NO: 1795582 - RNA, 14 nt, Human
ccuuagaaguggaa

SEQ ID NO: 1795583 - RNA, 17 nt, Human
ccuuagaagucacacag

SEQ ID NO: 1795584 - RNA, 19 nt, Human
ccuuacccucauguucuua

SEQ ID NO: 1795585 - RNA, 19 nt, Human
ccuuaccugccaggaagcc

SEQ ID NO: 1795586 - RNA, 12 nt, Human
ccuucagugccu

SEQ ID NO: 1795587 - RNA, 18 nt, Human
ccugcgggucacaggagg

SEQ ID NO: 1795588 - RNA, 22 nt, Human
ccugcgggucacaggagggagg

SEQ ID NO: 1795589 - RNA, 16 nt, Human
ccugcggugcuaucuc

SEQ ID NO: 1795590 - RNA, 17 nt, Human
ccugcggugcuaucucc

SEQ ID NO: 1795591 - RNA, 22 nt, Human
ccugccccucaacucuccucca

SEQ ID NO: 1795592 - RNA, 11 nt, Human
ccugccucagc

SEQ ID NO: 1795593 - RNA, 23 nt, Human
ccugccuguugggccaggagccu

SEQ ID NO: 1795594 - RNA, 20 nt, Human
ccugcuuugggcugcccugg

SEQ ID NO: 1795595 - RNA, 19 nt, Human
ccugcuuugggcugcccug

SEQ ID NO: 1795596 - RNA, 21 nt, Human
ccugcuuugggcugcccuggu

SEQ ID NO: 1795597 - RNA, 22 nt, Human
ccugcuuugggcugcccuggug

SEQ ID NO: 1795598 - RNA, 23 nt, Human
ccugcuuugggcugcccuggugc

SEQ ID NO: 1795599 - RNA, 15 nt, Human
ccugcugagucccag

SEQ ID NO: 1795600 - RNA, 14 nt, Human
ccugcuucaaauau

SEQ ID NO: 1795601 - RNA, 22 nt, Human
ccugcucuccgaccagacaccu

SEQ ID NO: 1795602 - RNA, 16 nt, Human
ccugcucuccucuugc

SEQ ID NO: 1795603 - RNA, 18 nt, Human
ccugcucuccucuugcca

SEQ ID NO: 1795604 - RNA, 19 nt, Human
ccugcucuccucuugccac

SEQ ID NO: 1795605 - RNA, 21 nt, Human
ccugcucuccucuugccacug

SEQ ID NO: 1795606 - RNA, 22 nt, Human
ccugcucuccucuugccacugc

SEQ ID NO: 1795607 - RNA, 21 nt, Human
ccugcucuccgaccagacacc

SEQ ID NO: 1795608 - RNA, 22 nt, Human
ccugcggugcuaucucccccag

SEQ ID NO: 1795609 - RNA, 22 nt, Human
ccuggucacaggacucugccuc

SEQ ID NO: 1795610 - RNA, 23 nt, Human
ccuggucacaggacucugccucc

SEQ ID NO: 1795611 - RNA, 21 nt, Human
ccuggucacaggacucugccu

SEQ ID NO: 1795612 - RNA, 18 nt, Human
ccuggggguucuuucuuc

SEQ ID NO: 1795613 - RNA, 21 nt, Human
ccuggggguucuuucuuccuc

SEQ ID NO: 1795614 - RNA, 22 nt, Human
ccuggggguucuuucuuccucu

SEQ ID NO: 1795615 - RNA, 23 nt, Human
ccuggggguucuuucuuccucug

SEQ ID NO: 1795616 - RNA, 20 nt, Human
ccuggcuuuucacugcuggc

SEQ ID NO: 1795617 - RNA, 18 nt, Human
ccuggcuuuucacugcug

SEQ ID NO: 1795618 - RNA, 21 nt, Human
ccuggcuuuucacugcuggcu

SEQ ID NO: 1795619 - RNA, 22 nt, Human
ccuggcuuuucacugcuggcug

SEQ ID NO: 1795620 - RNA, 23 nt, Human
ccuggcuuuucacugcuggcugc

SEQ ID NO: 1795621 - RNA, 24 nt, Human
ccuggcuuuucacugcuggcugcc

SEQ ID NO: 1795622 - RNA, 15 nt, Human
ccuggccagaugcac

SEQ ID NO: 1795623 - RNA, 21 nt, Human
ccuggcagccgugccuucagc

SEQ ID NO: 1795624 - RNA, 22 nt, Human
ccuggcagccgugccuucagcu

SEQ ID NO: 1795625 - RNA, 23 nt, Human
ccuggcucccacaggcccuuccu

SEQ ID NO: 1795626 - RNA, 17 nt, Human
ccuggcucccacaggcc

SEQ ID NO: 1795627 - RNA, 22 nt, Human
ccuggcuccaaacccucgaggc

SEQ ID NO: 1795628 - RNA, 23 nt, Human
ccuggcacccggccccugcuggu

SEQ ID NO: 1795629 - RNA, 22 nt, Human
ccuggcacuauaauguaagcuc

SEQ ID NO: 1795630 - RNA, 22 nt, Human
ccuggcacccggccccugcugg

SEQ ID NO: 1795631 - RNA, 12 nt, Human
ccuggcagcccc

SEQ ID NO: 1795632 - RNA, 14 nt, Human
ccuggcagccccug

SEQ ID NO: 1795633 - RNA, 13 nt, Human
ccuggcagccccu

SEQ ID NO: 1795634 - RNA, 18 nt, Human
ccuggaauauauaaccag

SEQ ID NO: 1795635 - RNA, 16 nt, Human
ccugacagaaggacuc

SEQ ID NO: 1795636 - RNA, 16 nt, Human
ccugagcuuucugcua

SEQ ID NO: 1795637 - RNA, 21 nt, Human
ccugaggcccagagggccugc

SEQ ID NO: 1795638 - RNA, 12 nt, Human
ccugagccagau

SEQ ID NO: 1795639 - RNA, 14 nt, Human
ccugagcuuucugc

SEQ ID NO: 1795640 - RNA, 11 nt, Human
ccugagcccca

SEQ ID NO: 1795641 - RNA, 22 nt, Human
ccugcaaccugauugugucucu

SEQ ID NO: 1795642 - RNA, 21 nt, Human
ccugcaaccugauugugucuc

SEQ ID NO: 1795643 - RNA, 17 nt, Human
ccugauugugucucuug

SEQ ID NO: 1795644 - RNA, 19 nt, Human
ccugauugugucucuuggu

SEQ ID NO: 1795645 - RNA, 11 nt, Human
ccugaggcccu

SEQ ID NO: 1795646 - RNA, 12 nt, Human
ccugaggcccuu

SEQ ID NO: 1795647 - RNA, 19 nt, Human
ccugaugcuucuucagaga

SEQ ID NO: 1795648 - RNA, 20 nt, Human
ccugaugcuucuucagagac

SEQ ID NO: 1795649 - RNA, 21 nt, Human
ccugaugcuucuucagagacu

SEQ ID NO: 1795650 - RNA, 22 nt, Human
ccugaugcuucuucagagacuc

SEQ ID NO: 1795651 - RNA, 14 nt, Human
ccugaggcccuucu

SEQ ID NO: 1795652 - RNA, 15 nt, Human
ccugauugugucucu

SEQ ID NO: 1795653 - RNA, 15 nt, Human
ccugcagggccaagc

SEQ ID NO: 1795654 - RNA, 18 nt, Human
ccugcaguacuuuaccuc

SEQ ID NO: 1795655 - RNA, 20 nt, Human
ccugcaguacuuuaccuccu

SEQ ID NO: 1795656 - RNA, 14 nt, Human
ccugcaagaacaag

SEQ ID NO: 1795657 - RNA, 13 nt, Human
ccugccaggaagc

SEQ ID NO: 1795658 - RNA, 14 nt, Human
ccugccaggaagcc

SEQ ID NO: 1795659 - RNA, 15 nt, Human
ccugccaggaagcca

SEQ ID NO: 1795660 - RNA, 17 nt, Human
ccugccaggaagccagc

SEQ ID NO: 1795661 - RNA, 22 nt, Human
ccugccagggacagagggggug

SEQ ID NO: 1795662 - RNA, 16 nt, Human
ccugccagggacagag

SEQ ID NO: 1795663 - RNA, 12 nt, Human
ccugccagggac

SEQ ID NO: 1795664 - RNA, 13 nt, Human
ccugccagggaca

SEQ ID NO: 1795665 - RNA, 14 nt, Human
ccugccagggacag

SEQ ID NO: 1795666 - RNA, 15 nt, Human
ccugccagggacaga

SEQ ID NO: 1795667 - RNA, 23 nt, Human
ccugccaggaagccagcaggcuc

SEQ ID NO: 1795668 - RNA, 16 nt, Human
ccugccaggcauggug

SEQ ID NO: 1795669 - RNA, 11 nt, Human
ccugccaggga

SEQ ID NO: 1795670 - RNA, 18 nt, Human
ccugccaggaagccagca

SEQ ID NO: 1795671 - RNA, 19 nt, Human
ccugccaggaagccagcag

SEQ ID NO: 1795672 - RNA, 21 nt, Human
ccugccaggaagccagcaggc

SEQ ID NO: 1795673 - RNA, 22 nt, Human
ccugccaggaagccagcaggcu

SEQ ID NO: 1795674 - RNA, 11 nt, Human
ccacugcucug

SEQ ID NO: 1795675 - RNA, 11 nt, Human
ccacugccucu

SEQ ID NO: 1795676 - RNA, 16 nt, Human
ccacugcgaccacaag

SEQ ID NO: 1795677 - RNA, 23 nt, Human
ccacugcacuccagccuggguga

SEQ ID NO: 1795678 - RNA, 15 nt, Human
ccacucccugcaacc

SEQ ID NO: 1795679 - RNA, 19 nt, Human
ccacugcacuccagccugg

SEQ ID NO: 1795680 - RNA, 20 nt, Human
ccacugcacuccagccuggg

SEQ ID NO: 1795681 - RNA, 22 nt, Human
ccacuacggaauaguuggcuag

SEQ ID NO: 1795682 - RNA, 18 nt, Human
ccacuacauucuguuaau

SEQ ID NO: 1795683 - RNA, 23 nt, Human
ccacuacggaauaguuggcuagg

SEQ ID NO: 1795684 - RNA, 17 nt, Human
ccacuccagaccccugg

SEQ ID NO: 1795685 - RNA, 19 nt, Human
ccacuccagaccccuggcu

SEQ ID NO: 1795686 - RNA, 12 nt, Human
ccacucccugca

SEQ ID NO: 1795687 - RNA, 13 nt, Human
ccacucccugcaa

SEQ ID NO: 1795688 - RNA, 13 nt, Human
ccacguuucuaaa

SEQ ID NO: 1795689 - RNA, 17 nt, Human
ccaccugccuguugggc

SEQ ID NO: 1795690 - RNA, 20 nt, Human
ccaccugccuguugggccag

SEQ ID NO: 1795691 - RNA, 14 nt, Human
ccaccugcccaacc

SEQ ID NO: 1795692 - RNA, 12 nt, Human
ccaccugccagg

SEQ ID NO: 1795693 - RNA, 17 nt, Human
ccaccucccacaaagga

SEQ ID NO: 1795694 - RNA, 15 nt, Human
ccacggccaggccag

SEQ ID NO: 1795695 - RNA, 14 nt, Human
ccacggccaggcca

SEQ ID NO: 1795696 - RNA, 13 nt, Human
ccacggccaggcc

SEQ ID NO: 1795697 - RNA, 12 nt, Human
ccacggccaggc

SEQ ID NO: 1795698 - RNA, 17 nt, Human
ccaccuggccucugcac

SEQ ID NO: 1795699 - RNA, 22 nt, Human
ccaccugcggugcuaucucccc

SEQ ID NO: 1795700 - RNA, 15 nt, Human
ccaccuggccucugc

SEQ ID NO: 1795701 - RNA, 16 nt, Human
ccaccuggccucugca

SEQ ID NO: 1795702 - RNA, 14 nt, Human
ccacccaggagccc

SEQ ID NO: 1795703 - RNA, 12 nt, Human
ccacccaggagc

SEQ ID NO: 1795704 - RNA, 15 nt, Human
ccaccucagccuccc

SEQ ID NO: 1795705 - RNA, 14 nt, Human
ccaccucagccucc

SEQ ID NO: 1795706 - RNA, 13 nt, Human
ccaccucagccuc

SEQ ID NO: 1795707 - RNA, 12 nt, Human
ccaccucagccu

SEQ ID NO: 1795708 - RNA, 18 nt, Human
ccacccugaaagcccuga

SEQ ID NO: 1795709 - RNA, 16 nt, Human
ccacccugaaagcccu

SEQ ID NO: 1795710 - RNA, 17 nt, Human
ccacccugaaagcccug

SEQ ID NO: 1795711 - RNA, 19 nt, Human
ccaccccucaacaccucug

SEQ ID NO: 1795712 - RNA, 21 nt, Human
ccacccaggagccccgaggcc

SEQ ID NO: 1795713 - RNA, 23 nt, Human
ccacaucuugcucugcugacaga

SEQ ID NO: 1795714 - RNA, 22 nt, Human
ccacaucuugcucugcugacag

SEQ ID NO: 1795715 - RNA, 16 nt, Human
ccacaucuugcucugc

SEQ ID NO: 1795716 - RNA, 14 nt, Human
ccaccaacauacuc

SEQ ID NO: 1795717 - RNA, 18 nt, Human
ccaccaacauacucccau

SEQ ID NO: 1795718 - RNA, 14 nt, Human
ccacaucuugcucu

SEQ ID NO: 1795719 - RNA, 23 nt, Human
ccacauagugaugguuccccugu

SEQ ID NO: 1795720 - RNA, 19 nt, Human
ccacauagugaugguuccc

SEQ ID NO: 1795721 - RNA, 21 nt, Human
ccacauagugaugguuccccu

SEQ ID NO: 1795722 - RNA, 22 nt, Human
ccacauagugaugguuccccug

SEQ ID NO: 1795723 - RNA, 13 nt, Human
ccacccaccucag

SEQ ID NO: 1795724 - RNA, 22 nt, Human
ccacccaagggccuggccugag

SEQ ID NO: 1795725 - RNA, 20 nt, Human
ccacccaagggccuggccug

SEQ ID NO: 1795726 - RNA, 21 nt, Human
ccacccaagggccuggccuga

SEQ ID NO: 1795727 - RNA, 15 nt, Human
ccacccaccucagcc

SEQ ID NO: 1795728 - RNA, 14 nt, Human
ccacccaccucagc

SEQ ID NO: 1795729 - RNA, 16 nt, Human
ccacccaccucagccu

SEQ ID NO: 1795730 - RNA, 16 nt, Human
ccaccacacccagccc

SEQ ID NO: 1795731 - RNA, 14 nt, Human
ccaccacacccagc

SEQ ID NO: 1795732 - RNA, 20 nt, Human
ccaccaacauacucccaucu

SEQ ID NO: 1795733 - RNA, 16 nt, Human
ccacccaagggccugg

SEQ ID NO: 1795734 - RNA, 17 nt, Human
ccacccaagggccuggc

SEQ ID NO: 1795735 - RNA, 19 nt, Human
ccacccaagggccuggccu

SEQ ID NO: 1795736 - RNA, 14 nt, Human
ccacacccagccca

SEQ ID NO: 1795737 - RNA, 13 nt, Human
ccacacccagccc

SEQ ID NO: 1795738 - RNA, 14 nt, Human
ccacacuccagcug

SEQ ID NO: 1795739 - RNA, 17 nt, Human
ccacacuccagcuggga

SEQ ID NO: 1795740 - RNA, 13 nt, Human
ccacacuccagcu

SEQ ID NO: 1795741 - RNA, 12 nt, Human
ccacacccagcc

SEQ ID NO: 1795742 - RNA, 17 nt, Human
ccacuguacuugcucuu

SEQ ID NO: 1795743 - RNA, 18 nt, Human
ccacuguacuugcucuug

SEQ ID NO: 1795744 - RNA, 19 nt, Human
ccacuguacuugcucuuga

SEQ ID NO: 1795745 - RNA, 19 nt, Human
ccagacaccuugacagggc

SEQ ID NO: 1795746 - RNA, 17 nt, Human
ccagacaccuugacagg

SEQ ID NO: 1795747 - RNA, 20 nt, Human
ccacuguacuugcucuugau

SEQ ID NO: 1795748 - RNA, 14 nt, Human
ccagagaggguggu

SEQ ID NO: 1795749 - RNA, 23 nt, Human
ccagagaggguggugaccucugc

SEQ ID NO: 1795750 - RNA, 21 nt, Human
ccagagaggguggugaccucu

SEQ ID NO: 1795751 - RNA, 20 nt, Human
ccagacaccuugacagggca

SEQ ID NO: 1795752 - RNA, 22 nt, Human
ccagaggagagaggacccccug

SEQ ID NO: 1795753 - RNA, 21 nt, Human
ccagaggagagaggacccccu

SEQ ID NO: 1795754 - RNA, 21 nt, Human
ccagagggagugacagaggca

SEQ ID NO: 1795755 - RNA, 20 nt, Human
ccagagggagugacagaggc

SEQ ID NO: 1795756 - RNA, 19 nt, Human
ccagagggagugacagagg

SEQ ID NO: 1795757 - RNA, 18 nt, Human
ccagagggagugacagag

SEQ ID NO: 1795758 - RNA, 17 nt, Human
ccagagggagugacaga

SEQ ID NO: 1795759 - RNA, 16 nt, Human
ccagagggagugacag

SEQ ID NO: 1795760 - RNA, 14 nt, Human
ccagagcugccacc

SEQ ID NO: 1795761 - RNA, 15 nt, Human
ccagagcugccaccu

SEQ ID NO: 1795762 - RNA, 16 nt, Human
ccagagcugccaccug

SEQ ID NO: 1795763 - RNA, 19 nt, Human
ccagagcugccaccugccu

SEQ ID NO: 1795764 - RNA, 11 nt, Human
ccagagcugcc

SEQ ID NO: 1795765 - RNA, 12 nt, Human
ccagagcugcca

SEQ ID NO: 1795766 - RNA, 13 nt, Human
ccagagcugccac

SEQ ID NO: 1795767 - RNA, 23 nt, Human
ccagagggagugacagaggcagc

SEQ ID NO: 1795768 - RNA, 22 nt, Human
ccagagggagugacagaggcag

SEQ ID NO: 1795769 - RNA, 13 nt, Human
ccagagggccugc

SEQ ID NO: 1795770 - RNA, 15 nt, Human
ccagagggccugcaa

SEQ ID NO: 1795771 - RNA, 16 nt, Human
ccagagggccugcaag

SEQ ID NO: 1795772 - RNA, 18 nt, Human
ccagauucuuuccugagg

SEQ ID NO: 1795773 - RNA, 19 nt, Human
ccagauucuuuccugaggc

SEQ ID NO: 1795774 - RNA, 20 nt, Human
ccagauucuuuccugaggcu

SEQ ID NO: 1795775 - RNA, 21 nt, Human
ccagauucuuuccugaggcug

SEQ ID NO: 1795776 - RNA, 22 nt, Human
ccagauucuuuccugaggcugg

SEQ ID NO: 1795777 - RNA, 20 nt, Human
ccagauugcaacaggcuggg

SEQ ID NO: 1795778 - RNA, 19 nt, Human
ccagauugcaacaggcugg

SEQ ID NO: 1795779 - RNA, 23 nt, Human
ccagauucuuuccugaggcuggg

SEQ ID NO: 1795780 - RNA, 21 nt, Human
ccagauugcaacaggcugggc

SEQ ID NO: 1795781 - RNA, 13 nt, Human
ccagauuuaugca

SEQ ID NO: 1795782 - RNA, 22 nt, Human
ccagauuuaugcauauuauuuu

SEQ ID NO: 1795783 - RNA, 12 nt, Human
ccagauuucacu

SEQ ID NO: 1795784 - RNA, 23 nt, Human
ccagcauaauacuugcuuuggaa

SEQ ID NO: 1795785 - RNA, 15 nt, Human
ccagccaaagccucc

SEQ ID NO: 1795786 - RNA, 18 nt, Human
ccagccaaagccuccucc

SEQ ID NO: 1795787 - RNA, 19 nt, Human
ccagccaaagccuccucca

SEQ ID NO: 1795788 - RNA, 15 nt, Human
ccagccccagugccc

SEQ ID NO: 1795789 - RNA, 13 nt, Human
ccagccccagugc

SEQ ID NO: 1795790 - RNA, 23 nt, Human
ccagccccaaaacucuccucugc

SEQ ID NO: 1795791 - RNA, 17 nt, Human
ccagcccuuagcaggga

SEQ ID NO: 1795792 - RNA, 16 nt, Human
ccagcccuuagcaggg

SEQ ID NO: 1795793 - RNA, 21 nt, Human
ccagcccuccuuaucaaagga

SEQ ID NO: 1795794 - RNA, 16 nt, Human
ccagccccagugccca

SEQ ID NO: 1795795 - RNA, 19 nt, Human
ccagccucaucucuuuguu

SEQ ID NO: 1795796 - RNA, 21 nt, Human
ccagccuccaagcuccaucuc

SEQ ID NO: 1795797 - RNA, 14 nt, Human
ccagccgccaugcu

SEQ ID NO: 1795798 - RNA, 18 nt, Human
ccagccgccaugcuccug

SEQ ID NO: 1795799 - RNA, 19 nt, Human
ccagccgccaugcuccugg

SEQ ID NO: 1795800 - RNA, 15 nt, Human
ccagcaagugagagc

SEQ ID NO: 1795801 - RNA, 14 nt, Human
ccagauuucacucu

SEQ ID NO: 1795802 - RNA, 22 nt, Human
ccagcaagugagagcugggugu

SEQ ID NO: 1795803 - RNA, 21 nt, Human
ccagcaagugagagcugggug

SEQ ID NO: 1795804 - RNA, 20 nt, Human
ccagcaagugagagcugggu

SEQ ID NO: 1795805 - RNA, 16 nt, Human
ccagcaagugagagcu

SEQ ID NO: 1795806 - RNA, 19 nt, Human
ccagcaauucuccugccuc

SEQ ID NO: 1795807 - RNA, 20 nt, Human
ccagcaauucuccugccuca

SEQ ID NO: 1795808 - RNA, 21 nt, Human
ccagcaauucuccugccucag

SEQ ID NO: 1795809 - RNA, 16 nt, Human
ccagcaauucuccugc

SEQ ID NO: 1795810 - RNA, 18 nt, Human
ccagcaauucuccugccu

SEQ ID NO: 1795811 - RNA, 19 nt, Human
ccauucuccaccugccagg

SEQ ID NO: 1795812 - RNA, 20 nt, Human
ccauucuccaccugccaggg

SEQ ID NO: 1795813 - RNA, 14 nt, Human
ccauuuguguuuau

SEQ ID NO: 1795814 - RNA, 15 nt, Human
cccaaagugcuggga

SEQ ID NO: 1795815 - RNA, 13 nt, Human
cccaaagugcugg

SEQ ID NO: 1795816 - RNA, 20 nt, Human
cccaaaacucuccucugcug

SEQ ID NO: 1795817 - RNA, 16 nt, Human
cccaaaacucuccucu

SEQ ID NO: 1795818 - RNA, 18 nt, Human
cccaaaacucuccucugc

SEQ ID NO: 1795819 - RNA, 16 nt, Human
cccaaagugcugggau

SEQ ID NO: 1795820 - RNA, 20 nt, Human
cccaaagugguauagaaaug

SEQ ID NO: 1795821 - RNA, 21 nt, Human
cccaaagugguauagaaaugc

SEQ ID NO: 1795822 - RNA, 23 nt, Human
cccaaauggaaaugggcagagca

SEQ ID NO: 1795823 - RNA, 18 nt, Human
cccaaauggaaaugggca

SEQ ID NO: 1795824 - RNA, 22 nt, Human
cccaaauggaaaugggcagagc

SEQ ID NO: 1795825 - RNA, 17 nt, Human
cccaaggcucugagcaa

SEQ ID NO: 1795826 - RNA, 15 nt, Human
cccaacccuggcacc

SEQ ID NO: 1795827 - RNA, 16 nt, Human
ccauguuggccaggcu

SEQ ID NO: 1795828 - RNA, 17 nt, Human
ccauguuggccaggcug

SEQ ID NO: 1795829 - RNA, 18 nt, Human
ccauguuggccaggcugc

SEQ ID NO: 1795830 - RNA, 21 nt, Human
ccauguuggccaggcugcucu

SEQ ID NO: 1795831 - RNA, 19 nt, Human
ccaugggacagggaggacg

SEQ ID NO: 1795832 - RNA, 16 nt, Human
ccaugggacagggagg

SEQ ID NO: 1795833 - RNA, 14 nt, Human
ccaucuaaacugcc

SEQ ID NO: 1795834 - RNA, 21 nt, Human
ccaugggaaaugucaacaagu

SEQ ID NO: 1795835 - RNA, 15 nt, Human
ccaucuaaacugccc

SEQ ID NO: 1795836 - RNA, 16 nt, Human
ccaucuaaacugcccc

SEQ ID NO: 1795837 - RNA, 23 nt, Human
ccauauucuguuggccaguguga

SEQ ID NO: 1795838 - RNA, 21 nt, Human
ccauaguaugggacuggccuc

SEQ ID NO: 1795839 - RNA, 12 nt, Human
ccauaggucacc

SEQ ID NO: 1795840 - RNA, 22 nt, Human
ccaguguuguggauuuaacaga

SEQ ID NO: 1795841 - RNA, 16 nt, Human
ccagugaggcucugcc

SEQ ID NO: 1795842 - RNA, 14 nt, Human
ccagugaggcucug

SEQ ID NO: 1795843 - RNA, 15 nt, Human
ccagugaggcucugc

SEQ ID NO: 1795844 - RNA, 22 nt, Human
ccagugguuccuaauccucuag

SEQ ID NO: 1795845 - RNA, 20 nt, Human
ccagugccgagaaggaagcc

SEQ ID NO: 1795846 - RNA, 17 nt, Human
ccagugaggcucugccc

SEQ ID NO: 1795847 - RNA, 13 nt, Human
ccaucuacccucc

SEQ ID NO: 1795848 - RNA, 24 nt, Human
ccaggcuguaucccaugagccuca

SEQ ID NO: 1795849 - RNA, 17 nt, Human
ccaggcuuagucacuga

SEQ ID NO: 1795850 - RNA, 18 nt, Human
ccaggcgccccuuccccc

SEQ ID NO: 1795851 - RNA, 19 nt, Human
ccaggcgccccuucccccu

SEQ ID NO: 1795852 - RNA, 22 nt, Human
ccaggcccucugcccacucccu

SEQ ID NO: 1795853 - RNA, 23 nt, Human
ccaggcccucugcccacucccug

SEQ ID NO: 1795854 - RNA, 20 nt, Human
ccaggcccucugcccacucc

SEQ ID NO: 1795855 - RNA, 21 nt, Human
ccaggcccucugcccacuccc

SEQ ID NO: 1795856 - RNA, 20 nt, Human
ccaggagccccgaggccuuc

SEQ ID NO: 1795857 - RNA, 12 nt, Human
ccaggagccucc

SEQ ID NO: 1795858 - RNA, 19 nt, Human
ccaggagccccgaggccuu

SEQ ID NO: 1795859 - RNA, 16 nt, Human
ccaggagccccgaggc

SEQ ID NO: 1795860 - RNA, 18 nt, Human
ccaggcauuccccaggag

SEQ ID NO: 1795861 - RNA, 19 nt, Human
ccaggcauuccccaggagg

SEQ ID NO: 1795862 - RNA, 21 nt, Human
ccaggcauuccccaggaggcc

SEQ ID NO: 1795863 - RNA, 15 nt, Human
ccagccuccaugcug

SEQ ID NO: 1795864 - RNA, 16 nt, Human
ccagccuccaugcugc

SEQ ID NO: 1795865 - RNA, 20 nt, Human
ccaggcuuagucacugagac

SEQ ID NO: 1795866 - RNA, 14 nt, Human
ccagggacagaggg

SEQ ID NO: 1795867 - RNA, 15 nt, Human
ccagggacagagggg

SEQ ID NO: 1795868 - RNA, 21 nt, Human
ccagggacagaggggguggcc

SEQ ID NO: 1795869 - RNA, 22 nt, Human
ccagggacagaggggguggccu

SEQ ID NO: 1795870 - RNA, 19 nt, Human
ccaggugcacaagcuccaa

SEQ ID NO: 1795871 - RNA, 20 nt, Human
ccaggugcacaagcuccaag

SEQ ID NO: 1795872 - RNA, 18 nt, Human
ccaggugcacaagcucca

SEQ ID NO: 1795873 - RNA, 21 nt, Human
ccagggcuggaaugauuucag

SEQ ID NO: 1795874 - RNA, 20 nt, Human
ccagucuggaaugcaguggu

SEQ ID NO: 1795875 - RNA, 19 nt, Human
ccagucuggaaugcagugg

SEQ ID NO: 1795876 - RNA, 18 nt, Human
ccagucuggaaugcagug

SEQ ID NO: 1795877 - RNA, 17 nt, Human
ccagguuuuuggucuga

SEQ ID NO: 1795878 - RNA, 18 nt, Human
ccagguuccacagaggac

SEQ ID NO: 1795879 - RNA, 15 nt, Human
ccagguuccacagag

SEQ ID NO: 1795880 - RNA, 24 nt, Human
ccaggugcacaagcuccaagcucc

SEQ ID NO: 1795881 - RNA, 23 nt, Human
cauuccugaugcuucuucagaga

SEQ ID NO: 1795882 - RNA, 14 nt, Human
cauuccugaugcuu

SEQ ID NO: 1795883 - RNA, 16 nt, Human
cauuccugaugcuucu

SEQ ID NO: 1795884 - RNA, 19 nt, Human
cauuccugaugcuucuuca

SEQ ID NO: 1795885 - RNA, 22 nt, Human
cauuccugaugcuucuucagag

SEQ ID NO: 1795886 - RNA, 13 nt, Human
cauucuggaauaa

SEQ ID NO: 1795887 - RNA, 17 nt, Human
cauucuguuaaucauua

SEQ ID NO: 1795888 - RNA, 20 nt, Human
cauucugccugcccaggccc

SEQ ID NO: 1795889 - RNA, 19 nt, Human
cauucugccugcccaggcc

SEQ ID NO: 1795890 - RNA, 18 nt, Human
cauucugccugcccaggc

SEQ ID NO: 1795891 - RNA, 17 nt, Human
cauucugccugcccagg

SEQ ID NO: 1795892 - RNA, 16 nt, Human
cauucugccugcccag

SEQ ID NO: 1795893 - RNA, 15 nt, Human
cauucugccugccca

SEQ ID NO: 1795894 - RNA, 13 nt, Human
cauucugccugcc

SEQ ID NO: 1795895 - RNA, 12 nt, Human
cauucugccugc

SEQ ID NO: 1795896 - RNA, 23 nt, Human
cauucuucuguacgucugacagg

SEQ ID NO: 1795897 - RNA, 19 nt, Human
cauucauuuucuggguguu

SEQ ID NO: 1795898 - RNA, 22 nt, Human
cauuccaccuucccaugcccug

SEQ ID NO: 1795899 - RNA, 17 nt, Human
cauuccaccuucccaug

SEQ ID NO: 1795900 - RNA, 13 nt, Human
cauuccccaggag

SEQ ID NO: 1795901 - RNA, 15 nt, Human
cauuccccaggaggc

SEQ ID NO: 1795902 - RNA, 17 nt, Human
cauuccccaggaggcca

SEQ ID NO: 1795903 - RNA, 17 nt, Human
cauuccccgucucuggu

SEQ ID NO: 1795904 - RNA, 13 nt, Human
cauuccccauggg

SEQ ID NO: 1795905 - RNA, 20 nt, Human
cauuccccaggaggccagcc

SEQ ID NO: 1795906 - RNA, 18 nt, Human
cauuccccaggaggccag

SEQ ID NO: 1795907 - RNA, 19 nt, Human
cauuccccaggaggccagc

SEQ ID NO: 1795908 - RNA, 21 nt, Human
cauuuuuaagugcugcauuua

SEQ ID NO: 1795909 - RNA, 17 nt, Human
cauuuuuaguagagaca

SEQ ID NO: 1795910 - RNA, 16 nt, Human
ccaaacccuucagugc

SEQ ID NO: 1795911 - RNA, 15 nt, Human
cauuugcuuuggaag

SEQ ID NO: 1795912 - RNA, 14 nt, Human
cauuugcuuuggaa

SEQ ID NO: 1795913 - RNA, 22 nt, Human
cauuuuacuuuuuccuggcuca

SEQ ID NO: 1795914 - RNA, 20 nt, Human
cauuuuacuuuuuccuggcu

SEQ ID NO: 1795915 - RNA, 17 nt, Human
cauuuuacuuuuuccug

SEQ ID NO: 1795916 - RNA, 23 nt, Human
cauuuuauuuuauuaugcaugaa

SEQ ID NO: 1795917 - RNA, 23 nt, Human
cauuuuaccuuugacaaagguaa

SEQ ID NO: 1795918 - RNA, 19 nt, Human
cauuuaaaacauuaaaaua

SEQ ID NO: 1795919 - RNA, 15 nt, Human
cauuuaaaaaaaauc

SEQ ID NO: 1795920 - RNA, 15 nt, Human
cauugugggaagggg

SEQ ID NO: 1795921 - RNA, 13 nt, Human
cauugugggaagg

SEQ ID NO: 1795922 - RNA, 14 nt, Human
cauugaccugaggc

SEQ ID NO: 1795923 - RNA, 15 nt, Human
cauugaccugaggcc

SEQ ID NO: 1795924 - RNA, 17 nt, Human
cauugaccugaggcccu

SEQ ID NO: 1795925 - RNA, 18 nt, Human
cauugaccugaggcccuu

SEQ ID NO: 1795926 - RNA, 22 nt, Human
cauuuacccuucuuuucugacu

SEQ ID NO: 1795927 - RNA, 19 nt, Human
cauuugaaaauuuugaugu

SEQ ID NO: 1795928 - RNA, 17 nt, Human
cauuugaaaauuuugau

SEQ ID NO: 1795929 - RNA, 14 nt, Human
caugcagcaucuaa

SEQ ID NO: 1795930 - RNA, 17 nt, Human
caugcugucccuuacgu

SEQ ID NO: 1795931 - RNA, 13 nt, Human
caugcugucccuu

SEQ ID NO: 1795932 - RNA, 15 nt, Human
caugcugucccuuac

SEQ ID NO: 1795933 - RNA, 17 nt, Human
caugcgggcuuccuccu

SEQ ID NO: 1795934 - RNA, 22 nt, Human
cauggacuucugccagcauaau

SEQ ID NO: 1795935 - RNA, 15 nt, Human
cauggacuuccacug

SEQ ID NO: 1795936 - RNA, 18 nt, Human
caugggccuccugugugu

SEQ ID NO: 1795937 - RNA, 23 nt, Human
caugggacagggaggacgcucuc

SEQ ID NO: 1795938 - RNA, 23 nt, Human
cauggucggaaaacaugcuacac

SEQ ID NO: 1795939 - RNA, 19 nt, Human
cauggucggaaaacaugcu

SEQ ID NO: 1795940 - RNA, 17 nt, Human
cauggucggaaaacaug

SEQ ID NO: 1795941 - RNA, 14 nt, Human
cauguguuccaagg

SEQ ID NO: 1795942 - RNA, 18 nt, Human
cauguguuggcagccucu

SEQ ID NO: 1795943 - RNA, 14 nt, Human
caugugcacaugca

SEQ ID NO: 1795944 - RNA, 15 nt, Human
caugugaugagagga

SEQ ID NO: 1795945 - RNA, 16 nt, Human
caugugaugagaggaa

SEQ ID NO: 1795946 - RNA, 17 nt, Human
caugugaugagaggaaa

SEQ ID NO: 1795947 - RNA, 18 nt, Human
caugugaugagaggaaau

SEQ ID NO: 1795948 - RNA, 20 nt, Human
caugugaugagaggaaauca

SEQ ID NO: 1795949 - RNA, 21 nt, Human
caugugaugagaggaaaucac

SEQ ID NO: 1795950 - RNA, 12 nt, Human
caugucuggcua

SEQ ID NO: 1795951 - RNA, 14 nt, Human
caugucucgacuca

SEQ ID NO: 1795952 - RNA, 14 nt, Human
cauuaaaauauaau

SEQ ID NO: 1795953 - RNA, 11 nt, Human
cauuaaaauau

SEQ ID NO: 1795954 - RNA, 20 nt, Human
cauguuucuuuguaaugaaa

SEQ ID NO: 1795955 - RNA, 14 nt, Human
cauguuugugauug

SEQ ID NO: 1795956 - RNA, 12 nt, Human
cauguuugugau

SEQ ID NO: 1795957 - RNA, 19 nt, Human
cauguuuuucuucucccuc

SEQ ID NO: 1795958 - RNA, 20 nt, Human
cauguuuuucuucucccuca

SEQ ID NO: 1795959 - RNA, 22 nt, Human
cauuaaaaaaaaaaaaaaaagu

SEQ ID NO: 1795960 - RNA, 15 nt, Human
cauguuugugauuga

SEQ ID NO: 1795961 - RNA, 23 nt, Human
cauccacugugccaugugccagg

SEQ ID NO: 1795962 - RNA, 17 nt, Human
cauccacugugccaugu

SEQ ID NO: 1795963 - RNA, 14 nt, Human
cauccacugugcca

SEQ ID NO: 1795964 - RNA, 12 nt, Human
cauccauccagg

SEQ ID NO: 1795965 - RNA, 17 nt, Human
cauccagguucagcuug

SEQ ID NO: 1795966 - RNA, 15 nt, Human
caucccucuggggcu

SEQ ID NO: 1795967 - RNA, 13 nt, Human
caucccuccuggg

SEQ ID NO: 1795968 - RNA, 20 nt, Human
caucaccaacgucugugcca

SEQ ID NO: 1795969 - RNA, 12 nt, Human
caucacccgcua

SEQ ID NO: 1795970 - RNA, 15 nt, Human
caucaugucuggcua

SEQ ID NO: 1795971 - RNA, 14 nt, Human
caucaugucuggcu

SEQ ID NO: 1795972 - RNA, 13 nt, Human
caucaugucuggc

SEQ ID NO: 1795973 - RNA, 16 nt, Human
caucauccuaagcuau

SEQ ID NO: 1795974 - RNA, 18 nt, Human
cauagugaugguuccccu

SEQ ID NO: 1795975 - RNA, 19 nt, Human
cauagugaugguuccccug

SEQ ID NO: 1795976 - RNA, 16 nt, Human
cauauaagugauugcu

SEQ ID NO: 1795977 - RNA, 23 nt, Human
cauauaagauucauauuuacuuc

SEQ ID NO: 1795978 - RNA, 15 nt, Human
cauaguaugguggcu

SEQ ID NO: 1795979 - RNA, 17 nt, Human
cauaguaugguggcugg

SEQ ID NO: 1795980 - RNA, 16 nt, Human
cauaguaugguggcug

SEQ ID NO: 1795981 - RNA, 22 nt, Human
cauauucuguuggccaguguga

SEQ ID NO: 1795982 - RNA, 17 nt, Human
cauauugauuuccguua

SEQ ID NO: 1795983 - RNA, 21 nt, Human
cauauugauuuccguuaaaau

SEQ ID NO: 1795984 - RNA, 13 nt, Human
cauauuguuacug

SEQ ID NO: 1795985 - RNA, 19 nt, Human
cauauuguuacugguacca

SEQ ID NO: 1795986 - RNA, 17 nt, Human
cauauuuuaaacagagg

SEQ ID NO: 1795987 - RNA, 16 nt, Human
cauauuuuaaacagag

SEQ ID NO: 1795988 - RNA, 14 nt, Human
caucaacaucuugg

SEQ ID NO: 1795989 - RNA, 18 nt, Human
cauauuuuaaacagagga

SEQ ID NO: 1795990 - RNA, 12 nt, Human
caugaagacaga

SEQ ID NO: 1795991 - RNA, 21 nt, Human
caugaaaacacauuuuucuua

SEQ ID NO: 1795992 - RNA, 19 nt, Human
caugaaaacacauuuuucu

SEQ ID NO: 1795993 - RNA, 17 nt, Human
caugaaaacacauuuuu

SEQ ID NO: 1795994 - RNA, 16 nt, Human
caugaaaacacauuuu

SEQ ID NO: 1795995 - RNA, 15 nt, Human
caugaaaacacauuu

SEQ ID NO: 1795996 - RNA, 14 nt, Human
caugaaaacacauu

SEQ ID NO: 1795997 - RNA, 13 nt, Human
caugaaaacacau

SEQ ID NO: 1795998 - RNA, 19 nt, Human
caugaagauguagaggaga

SEQ ID NO: 1795999 - RNA, 18 nt, Human
caugaagauguagaggag

SEQ ID NO: 1796000 - RNA, 23 nt, Human
caugacucguauaugucucaggu

SEQ ID NO: 1796001 - RNA, 20 nt, Human
caugacucguauaugucuca

SEQ ID NO: 1796002 - RNA, 13 nt, Human
caugagcaucagg

SEQ ID NO: 1796003 - RNA, 21 nt, Human
caugagccucagcauccuggc

SEQ ID NO: 1796004 - RNA, 20 nt, Human
caugagccucagcauccugg

SEQ ID NO: 1796005 - RNA, 19 nt, Human
caugagccucagcauccug

SEQ ID NO: 1796006 - RNA, 18 nt, Human
caugagccucagcauccu

SEQ ID NO: 1796007 - RNA, 17 nt, Human
caugagccucagcaucc

SEQ ID NO: 1796008 - RNA, 15 nt, Human
caugagccucagcau

SEQ ID NO: 1796009 - RNA, 12 nt, Human
caugagccucag

SEQ ID NO: 1796010 - RNA, 15 nt, Human
caugagcaucaggcc

SEQ ID NO: 1796011 - RNA, 16 nt, Human
caugagcaucaggcca

SEQ ID NO: 1796012 - RNA, 17 nt, Human
caugagcaucaggccag

SEQ ID NO: 1796013 - RNA, 18 nt, Human
caugagcaucaggccagg

SEQ ID NO: 1796014 - RNA, 20 nt, Human
caugagcaucaggccaggcc

SEQ ID NO: 1796015 - RNA, 21 nt, Human
caugagcaucaggccaggccc

SEQ ID NO: 1796016 - RNA, 22 nt, Human
caugagcaucaggccaggcccu

SEQ ID NO: 1796017 - RNA, 23 nt, Human
caugagcaucaggccaggcccuc

SEQ ID NO: 1796018 - RNA, 23 nt, Human
caugaguccccuguuuguuucug

SEQ ID NO: 1796019 - RNA, 14 nt, Human
caugaguccccugu

SEQ ID NO: 1796020 - RNA, 15 nt, Human
caugaguccccuguu

SEQ ID NO: 1796021 - RNA, 13 nt, Human
caugaguccccug

SEQ ID NO: 1796022 - RNA, 19 nt, Human
caugagguacugagaguga

SEQ ID NO: 1796023 - RNA, 16 nt, Human
caugagguacugagag

SEQ ID NO: 1796024 - RNA, 23 nt, Human
caugaggaacaaggcaaggcugu

SEQ ID NO: 1796025 - RNA, 23 nt, Human
caugagccucagcauccuggcac

SEQ ID NO: 1796026 - RNA, 22 nt, Human
caugagccucagcauccuggca

SEQ ID NO: 1796027 - RNA, 16 nt, Human
caugaggaacaaggca

SEQ ID NO: 1796028 - RNA, 17 nt, Human
caugaggaacaaggcaa

SEQ ID NO: 1796029 - RNA, 20 nt, Human
caugaggaacaaggcaaggc

SEQ ID NO: 1796030 - RNA, 21 nt, Human
caugaggaacaaggcaaggcu

SEQ ID NO: 1796031 - RNA, 15 nt, Human
caucucuccuccuuu

SEQ ID NO: 1796032 - RNA, 16 nt, Human
caucucuacaaaaagc

SEQ ID NO: 1796033 - RNA, 17 nt, Human
caucucccuuuuccaug

SEQ ID NO: 1796034 - RNA, 18 nt, Human
cauccuacaagacacagu

SEQ ID NO: 1796035 - RNA, 19 nt, Human
cauccuacaagacacagug

SEQ ID NO: 1796036 - RNA, 16 nt, Human
caucuugaauuguaag

SEQ ID NO: 1796037 - RNA, 21 nt, Human
caucuugaauuguaaggaaug

SEQ ID NO: 1796038 - RNA, 17 nt, Human
caucuugcucugcugac

SEQ ID NO: 1796039 - RNA, 16 nt, Human
caucuugcucugcuga

SEQ ID NO: 1796040 - RNA, 19 nt, Human
caucuugcucugcugacag

SEQ ID NO: 1796041 - RNA, 22 nt, Human
cagggaaacagcuaaugggaca

SEQ ID NO: 1796042 - RNA, 15 nt, Human
cagggaaggggacaa

SEQ ID NO: 1796043 - RNA, 17 nt, Human
cagggaaggggacaagg

SEQ ID NO: 1796044 - RNA, 13 nt, Human
cagggacagaggg

SEQ ID NO: 1796045 - RNA, 14 nt, Human
cagggacagagggg

SEQ ID NO: 1796046 - RNA, 20 nt, Human
cagggacagaggggguggcc

SEQ ID NO: 1796047 - RNA, 20 nt, Human
cagggcauggccagguggcc

SEQ ID NO: 1796048 - RNA, 14 nt, Human
cagggcacaccggg

SEQ ID NO: 1796049 - RNA, 23 nt, Human
cagggacagaggggguggccucc

SEQ ID NO: 1796050 - RNA, 21 nt, Human
cagggcacaccgggcacucag

SEQ ID NO: 1796051 - RNA, 19 nt, Human
cagggcacaccgggcacuc

SEQ ID NO: 1796052 - RNA, 17 nt, Human
cagggcacaccgggcac

SEQ ID NO: 1796053 - RNA, 15 nt, Human
cagggcacaccgggc

SEQ ID NO: 1796054 - RNA, 23 nt, Human
cagggcacaccgggcacucagaa

SEQ ID NO: 1796055 - RNA, 22 nt, Human
cagggcacaccgggcacucaga

SEQ ID NO: 1796056 - RNA, 19 nt, Human
caggggaggguagagcgga

SEQ ID NO: 1796057 - RNA, 16 nt, Human
cagggccuggcucagg

SEQ ID NO: 1796058 - RNA, 19 nt, Human
cagggccuggcucaggugg

SEQ ID NO: 1796059 - RNA, 13 nt, Human
cagggccuggcuc

SEQ ID NO: 1796060 - RNA, 14 nt, Human
cagggccuggcuca

SEQ ID NO: 1796061 - RNA, 15 nt, Human
cagggccuggcucag

SEQ ID NO: 1796062 - RNA, 20 nt, Human
caggcuccuuuagcgcccag

SEQ ID NO: 1796063 - RNA, 19 nt, Human
caggcuccuuuagcgccca

SEQ ID NO: 1796064 - RNA, 14 nt, Human
caggcuccuuuagc

SEQ ID NO: 1796065 - RNA, 18 nt, Human
caggcuccugccaccacg

SEQ ID NO: 1796066 - RNA, 13 nt, Human
caggcuccugcca

SEQ ID NO: 1796067 - RNA, 14 nt, Human
caggcuccugccac

SEQ ID NO: 1796068 - RNA, 15 nt, Human
caggcuccugccacc

SEQ ID NO: 1796069 - RNA, 16 nt, Human
caggcuccugccacca

SEQ ID NO: 1796070 - RNA, 21 nt, Human
caggcuccuuuagcgcccagu

SEQ ID NO: 1796071 - RNA, 20 nt, Human
caggcucgggcuccccagcc

SEQ ID NO: 1796072 - RNA, 12 nt, Human
caggcucucagg

SEQ ID NO: 1796073 - RNA, 13 nt, Human
caggcucucaggc

SEQ ID NO: 1796074 - RNA, 14 nt, Human
caggcucucaggcc

SEQ ID NO: 1796075 - RNA, 15 nt, Human
caggcucucaggcca

SEQ ID NO: 1796076 - RNA, 16 nt, Human
caggcucucaggccag

SEQ ID NO: 1796077 - RNA, 21 nt, Human
caggcucucaggccagcugcu

SEQ ID NO: 1796078 - RNA, 23 nt, Human
caggcucucaggccagcugcuug

SEQ ID NO: 1796079 - RNA, 17 nt, Human
caggcucucaggccagc

SEQ ID NO: 1796080 - RNA, 18 nt, Human
caggcucucaggccagcu

SEQ ID NO: 1796081 - RNA, 19 nt, Human
caggcucucaggccagcug

SEQ ID NO: 1796082 - RNA, 20 nt, Human
caggcucucaggccagcugc

SEQ ID NO: 1796083 - RNA, 19 nt, Human
caggcccggcuccaggcuc

SEQ ID NO: 1796084 - RNA, 18 nt, Human
caggcccggcuccaggcu

SEQ ID NO: 1796085 - RNA, 17 nt, Human
caggcccggcuccaggc

SEQ ID NO: 1796086 - RNA, 21 nt, Human
caggcccggcuccaggcuccu

SEQ ID NO: 1796087 - RNA, 20 nt, Human
caggcccggcuccaggcucc

SEQ ID NO: 1796088 - RNA, 22 nt, Human
caggcccggcuccaggcuccuu

SEQ ID NO: 1796089 - RNA, 13 nt, Human
caggcccucugcc

SEQ ID NO: 1796090 - RNA, 14 nt, Human
caggcccucugccc

SEQ ID NO: 1796091 - RNA, 15 nt, Human
caggcccucugccca

SEQ ID NO: 1796092 - RNA, 19 nt, Human
caggcccuuccucuccacu

SEQ ID NO: 1796093 - RNA, 20 nt, Human
caggcccuuccucuccacug

SEQ ID NO: 1796094 - RNA, 21 nt, Human
caggcccuuccucuccacugc

SEQ ID NO: 1796095 - RNA, 23 nt, Human
caggcccuuccucuccacugccu

SEQ ID NO: 1796096 - RNA, 16 nt, Human
caggcccuuccucucc

SEQ ID NO: 1796097 - RNA, 17 nt, Human
caggcccuuccucucca

SEQ ID NO: 1796098 - RNA, 15 nt, Human
caggcccuuccucuc

SEQ ID NO: 1796099 - RNA, 16 nt, Human
caggcccucugcccac

SEQ ID NO: 1796100 - RNA, 17 nt, Human
caggcccucugcccacu

SEQ ID NO: 1796101 - RNA, 19 nt, Human
caggcccucugcccacucc

SEQ ID NO: 1796102 - RNA, 20 nt, Human
caggcccucugcccacuccc

SEQ ID NO: 1796103 - RNA, 21 nt, Human
caggcccucugcccacucccu

SEQ ID NO: 1796104 - RNA, 22 nt, Human
caggcccucugcccacucccug

SEQ ID NO: 1796105 - RNA, 16 nt, Human
cagggaaacagcuaau

SEQ ID NO: 1796106 - RNA, 23 nt, Human
caggcuuuuuuaucaugugaaau

SEQ ID NO: 1796107 - RNA, 22 nt, Human
caggcuuagucacugagacagc

SEQ ID NO: 1796108 - RNA, 23 nt, Human
caggcuuagucacugagacagcc

SEQ ID NO: 1796109 - RNA, 21 nt, Human
caggcuguaucccaugagccu

SEQ ID NO: 1796110 - RNA, 20 nt, Human
caggcuguaucccaugagcc

SEQ ID NO: 1796111 - RNA, 14 nt, Human
caggcuguauccca

SEQ ID NO: 1796112 - RNA, 23 nt, Human
caggcuggucucgaacuccugac

SEQ ID NO: 1796113 - RNA, 19 nt, Human
caggcuggucucaaacucu

SEQ ID NO: 1796114 - RNA, 20 nt, Human
caggcuggucucgaacuccu

SEQ ID NO: 1796115 - RNA, 22 nt, Human
caggcuggucucgaacuccuga

SEQ ID NO: 1796116 - RNA, 12 nt, Human
caggcuggucuc

SEQ ID NO: 1796117 - RNA, 23 nt, Human
caggcuggucucaaacuccugac

SEQ ID NO: 1796118 - RNA, 23 nt, Human
caggcuguaucccaugagccuca

SEQ ID NO: 1796119 - RNA, 22 nt, Human
caggcuguaucccaugagccuc

SEQ ID NO: 1796120 - RNA, 14 nt, Human
caggcugugaguuu

SEQ ID NO: 1796121 - RNA, 16 nt, Human
caggcuuagucacuga

SEQ ID NO: 1796122 - RNA, 17 nt, Human
caggcuuagucacugag

SEQ ID NO: 1796123 - RNA, 20 nt, Human
caggcuuagucacugagaca

SEQ ID NO: 1796124 - RNA, 21 nt, Human
caggcuuagucacugagacag

SEQ ID NO: 1796125 - RNA, 23 nt, Human
caggcugggcuucaguggcagcu

SEQ ID NO: 1796126 - RNA, 21 nt, Human
caggcugggucgcccuggacu

SEQ ID NO: 1796127 - RNA, 23 nt, Human
caggcugggucgcccuggacugu

SEQ ID NO: 1796128 - RNA, 12 nt, Human
caggcuggcccu

SEQ ID NO: 1796129 - RNA, 14 nt, Human
caggcuggcccugc

SEQ ID NO: 1796130 - RNA, 15 nt, Human
caggcuggcccugcc

SEQ ID NO: 1796131 - RNA, 16 nt, Human
caggcuggcccugccc

SEQ ID NO: 1796132 - RNA, 23 nt, Human
caggcugcucuugaacuccugac

SEQ ID NO: 1796133 - RNA, 12 nt, Human
caggcugcucuu

SEQ ID NO: 1796134 - RNA, 20 nt, Human
caggcugcucuugaacuccu

SEQ ID NO: 1796135 - RNA, 12 nt, Human
caggcugagccu

SEQ ID NO: 1796136 - RNA, 18 nt, Human
caggcucuucuccuuuca

SEQ ID NO: 1796137 - RNA, 22 nt, Human
caggcucuucuccuuucacaac

SEQ ID NO: 1796138 - RNA, 14 nt, Human
caggcucuucuccu

SEQ ID NO: 1796139 - RNA, 15 nt, Human
caggcucuucuccuu

SEQ ID NO: 1796140 - RNA, 12 nt, Human
caggcucuucuc

SEQ ID NO: 1796141 - RNA, 13 nt, Human
caggcugagccuc

SEQ ID NO: 1796142 - RNA, 14 nt, Human
caggcugagccuca

SEQ ID NO: 1796143 - RNA, 15 nt, Human
caggcugagccucag

SEQ ID NO: 1796144 - RNA, 16 nt, Human
caggcugagccucagu

SEQ ID NO: 1796145 - RNA, 17 nt, Human
caggcugagccucaguc

SEQ ID NO: 1796146 - RNA, 21 nt, Human
caggcugagccucagucuccc

SEQ ID NO: 1796147 - RNA, 14 nt, Human
caggaucagucuga

SEQ ID NO: 1796148 - RNA, 13 nt, Human
caggaucagucug

SEQ ID NO: 1796149 - RNA, 18 nt, Human
caggaugaugacuaugga

SEQ ID NO: 1796150 - RNA, 20 nt, Human
caggaugaugacuauggaaa

SEQ ID NO: 1796151 - RNA, 22 nt, Human
caggaugaugacuauggaaaga

SEQ ID NO: 1796152 - RNA, 23 nt, Human
caggauggccgggcgcgguggcu

SEQ ID NO: 1796153 - RNA, 19 nt, Human
caggauguacaaggacagc

SEQ ID NO: 1796154 - RNA, 17 nt, Human
caggauucuuccucccu

SEQ ID NO: 1796155 - RNA, 18 nt, Human
caggauucuuccucccuc

SEQ ID NO: 1796156 - RNA, 20 nt, Human
caggauucuuccucccuccc

SEQ ID NO: 1796157 - RNA, 21 nt, Human
caggcaagcaccuccugccuc

SEQ ID NO: 1796158 - RNA, 16 nt, Human
caggcaagcaccuccu

SEQ ID NO: 1796159 - RNA, 15 nt, Human
caggcaagcaccucc

SEQ ID NO: 1796160 - RNA, 14 nt, Human
caggcaagcaccuc

SEQ ID NO: 1796161 - RNA, 14 nt, Human
caggcagccaggcc

SEQ ID NO: 1796162 - RNA, 15 nt, Human
caggcagccaggcca

SEQ ID NO: 1796163 - RNA, 13 nt, Human
caggcagguccag

SEQ ID NO: 1796164 - RNA, 20 nt, Human
caggcaggaaggcugagagg

SEQ ID NO: 1796165 - RNA, 16 nt, Human
caggcagccaggccac

SEQ ID NO: 1796166 - RNA, 17 nt, Human
caggcagccaggccaca

SEQ ID NO: 1796167 - RNA, 20 nt, Human
caggcauguucucugaggac

SEQ ID NO: 1796168 - RNA, 19 nt, Human
caggcauguucucugagga

SEQ ID NO: 1796169 - RNA, 18 nt, Human
caggcauguucucugagg

SEQ ID NO: 1796170 - RNA, 15 nt, Human
caggcauguucucug

SEQ ID NO: 1796171 - RNA, 13 nt, Human
caggcauucccca

SEQ ID NO: 1796172 - RNA, 15 nt, Human
caggcauuccccagg

SEQ ID NO: 1796173 - RNA, 16 nt, Human
caggcauuccccagga

SEQ ID NO: 1796174 - RNA, 17 nt, Human
caggcauuccccaggag

SEQ ID NO: 1796175 - RNA, 24 nt, Human
caggcauuccccaggaggccagcc

SEQ ID NO: 1796176 - RNA, 22 nt, Human
caggcauuccccaggaggccag

SEQ ID NO: 1796177 - RNA, 23 nt, Human
caggcauuccccaggaggccagc

SEQ ID NO: 1796178 - RNA, 18 nt, Human
caggcauuccccaggagg

SEQ ID NO: 1796179 - RNA, 19 nt, Human
caggcauuccccaggaggc

SEQ ID NO: 1796180 - RNA, 20 nt, Human
caggcauuccccaggaggcc

SEQ ID NO: 1796181 - RNA, 21 nt, Human
caggcauuccccaggaggcca

SEQ ID NO: 1796182 - RNA, 23 nt, Human
caggcaggucuugaacuccuggc

SEQ ID NO: 1796183 - RNA, 15 nt, Human
caggcaggugggaug

SEQ ID NO: 1796184 - RNA, 22 nt, Human
caggcaggucuugaacuccugg

SEQ ID NO: 1796185 - RNA, 13 nt, Human
caggcaggucuug

SEQ ID NO: 1796186 - RNA, 12 nt, Human
caggcaggucuu

SEQ ID NO: 1796187 - RNA, 19 nt, Human
caggcagguccaggguuug

SEQ ID NO: 1796188 - RNA, 15 nt, Human
caggcagguccaggg

SEQ ID NO: 1796189 - RNA, 14 nt, Human
caggcagguccagg

SEQ ID NO: 1796190 - RNA, 17 nt, Human
caggcaugguggcccac

SEQ ID NO: 1796191 - RNA, 13 nt, Human
caggccccugcca

SEQ ID NO: 1796192 - RNA, 21 nt, Human
caggccauuccccgucucugg

SEQ ID NO: 1796193 - RNA, 18 nt, Human
caggccaaacucaccugc

SEQ ID NO: 1796194 - RNA, 23 nt, Human
caggccaaacucaccugccccuc

SEQ ID NO: 1796195 - RNA, 13 nt, Human
caggccacaagac

SEQ ID NO: 1796196 - RNA, 17 nt, Human
caggccacaagacccuu

SEQ ID NO: 1796197 - RNA, 18 nt, Human
caggccacaagacccuug

SEQ ID NO: 1796198 - RNA, 18 nt, Human
caggccauuccccgucuc

SEQ ID NO: 1796199 - RNA, 20 nt, Human
caggccacaagacccuugug

SEQ ID NO: 1796200 - RNA, 21 nt, Human
caggccaggcccucugcccac

SEQ ID NO: 1796201 - RNA, 22 nt, Human
caggccaggcccucugcccacu

SEQ ID NO: 1796202 - RNA, 16 nt, Human
caggcccggcuccagg

SEQ ID NO: 1796203 - RNA, 20 nt, Human
caggccccugccacccuggg

SEQ ID NO: 1796204 - RNA, 19 nt, Human
caggccccugccacccugg

SEQ ID NO: 1796205 - RNA, 17 nt, Human
caggccccugccacccu

SEQ ID NO: 1796206 - RNA, 15 nt, Human
caggccccugccacc

SEQ ID NO: 1796207 - RNA, 15 nt, Human
caggcccggcuccag

SEQ ID NO: 1796208 - RNA, 14 nt, Human
caggcccggcucca

SEQ ID NO: 1796209 - RNA, 13 nt, Human
caggcccggcucc

SEQ ID NO: 1796210 - RNA, 12 nt, Human
caggacucugcc

SEQ ID NO: 1796211 - RNA, 13 nt, Human
caggacucugccu

SEQ ID NO: 1796212 - RNA, 15 nt, Human
caggacucugccucc

SEQ ID NO: 1796213 - RNA, 16 nt, Human
caggacucugccuccu

SEQ ID NO: 1796214 - RNA, 12 nt, Human
caggagugagca

SEQ ID NO: 1796215 - RNA, 20 nt, Human
caggagccuccugcccuuac

SEQ ID NO: 1796216 - RNA, 14 nt, Human
caggagccuccugc

SEQ ID NO: 1796217 - RNA, 17 nt, Human
caggagccuccugcccu

SEQ ID NO: 1796218 - RNA, 21 nt, Human
caggagcccugggaggcucug

SEQ ID NO: 1796219 - RNA, 18 nt, Human
caggagccccgaggccuu

SEQ ID NO: 1796220 - RNA, 16 nt, Human
caggagccccgaggcc

SEQ ID NO: 1796221 - RNA, 15 nt, Human
caggagccccgaggc

SEQ ID NO: 1796222 - RNA, 12 nt, Human
caggagcagcca

SEQ ID NO: 1796223 - RNA, 13 nt, Human
caggagcagccac

SEQ ID NO: 1796224 - RNA, 14 nt, Human
caggagcagccaca

SEQ ID NO: 1796225 - RNA, 19 nt, Human
caggagcagccacauuccu

SEQ ID NO: 1796226 - RNA, 22 nt, Human
caggagccccgaggccuucucu

SEQ ID NO: 1796227 - RNA, 20 nt, Human
caggagccccgaggccuucu

SEQ ID NO: 1796228 - RNA, 23 nt, Human
caggagccccgaggccuucucug

SEQ ID NO: 1796229 - RNA, 11 nt, Human
caggagcccug

SEQ ID NO: 1796230 - RNA, 14 nt, Human
caggagcccuggga

SEQ ID NO: 1796231 - RNA, 16 nt, Human
caggagcccugggagg

SEQ ID NO: 1796232 - RNA, 18 nt, Human
caggagcccugggaggcu

SEQ ID NO: 1796233 - RNA, 19 nt, Human
caggagcccugggaggcuc

SEQ ID NO: 1796234 - RNA, 17 nt, Human
caggaguggguugauuu

SEQ ID NO: 1796235 - RNA, 16 nt, Human
caggaguuggaagugu

SEQ ID NO: 1796236 - RNA, 19 nt, Human
caggaguuucguuuucaaa

SEQ ID NO: 1796237 - RNA, 21 nt, Human
caggaguuugagaccaaccug

SEQ ID NO: 1796238 - RNA, 13 nt, Human
caggauagacuuu

SEQ ID NO: 1796239 - RNA, 22 nt, Human
caggaguuugagaccaaccugg

SEQ ID NO: 1796240 - RNA, 23 nt, Human
caggaguuugagaccaaccuggg

SEQ ID NO: 1796241 - RNA, 23 nt, Human
caguaccauuuaauggggaggac

SEQ ID NO: 1796242 - RNA, 12 nt, Human
caguaauaacuc

SEQ ID NO: 1796243 - RNA, 13 nt, Human
caguaauaacucu

SEQ ID NO: 1796244 - RNA, 13 nt, Human
cagguucagcuug

SEQ ID NO: 1796245 - RNA, 15 nt, Human
cagguuccacagagg

SEQ ID NO: 1796246 - RNA, 19 nt, Human
cagguuccacagaggacac

SEQ ID NO: 1796247 - RNA, 12 nt, Human
cagguucagcuu

SEQ ID NO: 1796248 - RNA, 21 nt, Human
caguaaaugggggugcauuug

SEQ ID NO: 1796249 - RNA, 22 nt, Human
caguaaaugggggugcauuuga

SEQ ID NO: 1796250 - RNA, 12 nt, Human
caggugugaacc

SEQ ID NO: 1796251 - RNA, 19 nt, Human
caggugucccugcacuugc

SEQ ID NO: 1796252 - RNA, 18 nt, Human
caggugucccugcacuug

SEQ ID NO: 1796253 - RNA, 16 nt, Human
caggugucccugcacu

SEQ ID NO: 1796254 - RNA, 15 nt, Human
caggugucccugcac

SEQ ID NO: 1796255 - RNA, 23 nt, Human
caggugugaaccaccacacccag

SEQ ID NO: 1796256 - RNA, 22 nt, Human
caggugugaaccaccacaccca

SEQ ID NO: 1796257 - RNA, 19 nt, Human
caggugugaaccaccacac

SEQ ID NO: 1796258 - RNA, 16 nt, Human
caggugugaaccacca

SEQ ID NO: 1796259 - RNA, 21 nt, Human
caggugugagucaccaagccc

SEQ ID NO: 1796260 - RNA, 20 nt, Human
caggugugagucaccaagcc

SEQ ID NO: 1796261 - RNA, 16 nt, Human
caggugugagucacca

SEQ ID NO: 1796262 - RNA, 18 nt, Human
caggugugagccaccacg

SEQ ID NO: 1796263 - RNA, 23 nt, Human
caggugugagucaccaagcccag

SEQ ID NO: 1796264 - RNA, 22 nt, Human
caggugugagucaccaagccca

SEQ ID NO: 1796265 - RNA, 21 nt, Human
caggugugagccaccacgccc

SEQ ID NO: 1796266 - RNA, 14 nt, Human
caggugucccugca

SEQ ID NO: 1796267 - RNA, 11 nt, Human
caggugucccu

SEQ ID NO: 1796268 - RNA, 20 nt, Human
caggugguuauggagagggu

SEQ ID NO: 1796269 - RNA, 18 nt, Human
caggugguuauggagagg

SEQ ID NO: 1796270 - RNA, 23 nt, Human
cagguggggucacucuggcagcu

SEQ ID NO: 1796271 - RNA, 19 nt, Human
cagguggggucacucuggc

SEQ ID NO: 1796272 - RNA, 20 nt, Human
cagguggggucacucuggca

SEQ ID NO: 1796273 - RNA, 21 nt, Human
cagguggggucacucuggcag

SEQ ID NO: 1796274 - RNA, 22 nt, Human
cagguggggucacucuggcagc

SEQ ID NO: 1796275 - RNA, 17 nt, Human
cagguggggcagcuuga

SEQ ID NO: 1796276 - RNA, 18 nt, Human
cagguggggucacucugg

SEQ ID NO: 1796277 - RNA, 16 nt, Human
cagguggggcagcuug

SEQ ID NO: 1796278 - RNA, 15 nt, Human
cagguggggcagcuu

SEQ ID NO: 1796279 - RNA, 14 nt, Human
cagguggggcagcu

SEQ ID NO: 1796280 - RNA, 13 nt, Human
cagguggggcagc

SEQ ID NO: 1796281 - RNA, 21 nt, Human
caggguauuccagagugggga

SEQ ID NO: 1796282 - RNA, 20 nt, Human
caggguauuccagagugggg

SEQ ID NO: 1796283 - RNA, 12 nt, Human
cagggucccugg

SEQ ID NO: 1796284 - RNA, 14 nt, Human
cagggucccuggug

SEQ ID NO: 1796285 - RNA, 15 nt, Human
cagggucccuggugg

SEQ ID NO: 1796286 - RNA, 18 nt, Human
cagggucccugguggcag

SEQ ID NO: 1796287 - RNA, 19 nt, Human
cagggucccugguggcagc

SEQ ID NO: 1796288 - RNA, 22 nt, Human
cagggucccugguggcagcuca

SEQ ID NO: 1796289 - RNA, 15 nt, Human
cagggucucacucug

SEQ ID NO: 1796290 - RNA, 23 nt, Human
cagggucucacuauguugcccag

SEQ ID NO: 1796291 - RNA, 22 nt, Human
cagggucucacuauguugccca

SEQ ID NO: 1796292 - RNA, 21 nt, Human
cagggucucacuauguugccc

SEQ ID NO: 1796293 - RNA, 23 nt, Human
cagggucccugguggcagcucac

SEQ ID NO: 1796294 - RNA, 18 nt, Human
caggguccuguagcccua

SEQ ID NO: 1796295 - RNA, 17 nt, Human
cagguaacaggcagaua

SEQ ID NO: 1796296 - RNA, 16 nt, Human
cagguaacaggcagau

SEQ ID NO: 1796297 - RNA, 15 nt, Human
cagguaacaggcaga

SEQ ID NO: 1796298 - RNA, 14 nt, Human
cagguaacaggcag

SEQ ID NO: 1796299 - RNA, 16 nt, Human
cagggucucacucugu

SEQ ID NO: 1796300 - RNA, 17 nt, Human
cagggucucacucuguc

SEQ ID NO: 1796301 - RNA, 16 nt, Human
caggguuuugccaugu

SEQ ID NO: 1796302 - RNA, 14 nt, Human
caggggugggacac

SEQ ID NO: 1796303 - RNA, 15 nt, Human
caggggugggacacc

SEQ ID NO: 1796304 - RNA, 20 nt, Human
caggggugggacacccugug

SEQ ID NO: 1796305 - RNA, 21 nt, Human
caggggugggacacccuguga

SEQ ID NO: 1796306 - RNA, 11 nt, Human
caggucccuaa

SEQ ID NO: 1796307 - RNA, 12 nt, Human
caggucccuaau

SEQ ID NO: 1796308 - RNA, 13 nt, Human
caggucccuaaua

SEQ ID NO: 1796309 - RNA, 14 nt, Human
caggucccuaauaa

SEQ ID NO: 1796310 - RNA, 15 nt, Human
caggucccuaauaaa

SEQ ID NO: 1796311 - RNA, 16 nt, Human
caggucccuaauaaag

SEQ ID NO: 1796312 - RNA, 17 nt, Human
caggucccuaauaaagc

SEQ ID NO: 1796313 - RNA, 18 nt, Human
caggucccuaauaaagcu

SEQ ID NO: 1796314 - RNA, 21 nt, Human
cagguaacaggcagauacagg

SEQ ID NO: 1796315 - RNA, 20 nt, Human
cagguaacaggcagauacag

SEQ ID NO: 1796316 - RNA, 17 nt, Human
cagguaaucgaccugcc

SEQ ID NO: 1796317 - RNA, 18 nt, Human
cagguaaucgaccugccu

SEQ ID NO: 1796318 - RNA, 19 nt, Human
cagguaaucgaccugccuc

SEQ ID NO: 1796319 - RNA, 20 nt, Human
cagguaaucgaccugccucg

SEQ ID NO: 1796320 - RNA, 21 nt, Human
caggugagaagcagaggaagg

SEQ ID NO: 1796321 - RNA, 13 nt, Human
caggugagaagca

SEQ ID NO: 1796322 - RNA, 20 nt, Human
caggugagaagcagaggaag

SEQ ID NO: 1796323 - RNA, 15 nt, Human
cagguggccacucca

SEQ ID NO: 1796324 - RNA, 16 nt, Human
cagguggccacuccag

SEQ ID NO: 1796325 - RNA, 19 nt, Human
cagguggccacuccagacc

SEQ ID NO: 1796326 - RNA, 21 nt, Human
cagguggccacuccagacccc

SEQ ID NO: 1796327 - RNA, 23 nt, Human
caggucuugaacuccuggccuca

SEQ ID NO: 1796328 - RNA, 22 nt, Human
caggucuugaacuccuggccuc

SEQ ID NO: 1796329 - RNA, 21 nt, Human
caggucuugaacuccuggccu

SEQ ID NO: 1796330 - RNA, 20 nt, Human
caggucuugaacuccuggcc

SEQ ID NO: 1796331 - RNA, 19 nt, Human
caggucuugaacuccuggc

SEQ ID NO: 1796332 - RNA, 18 nt, Human
caggucuugaacuccugg

SEQ ID NO: 1796333 - RNA, 19 nt, Human
caggucccuaauaaagcug

SEQ ID NO: 1796334 - RNA, 20 nt, Human
caggucccuaauaaagcugu

SEQ ID NO: 1796335 - RNA, 21 nt, Human
caggucccuaauaaagcugug

SEQ ID NO: 1796336 - RNA, 22 nt, Human
caggucccuaauaaagcugugu

SEQ ID NO: 1796337 - RNA, 16 nt, Human
cagugaaagaaaauaa

SEQ ID NO: 1796338 - RNA, 20 nt, Human
cagugaaagaaaauaacaau

SEQ ID NO: 1796339 - RNA, 17 nt, Human
cagucuuguauuaaguu

SEQ ID NO: 1796340 - RNA, 16 nt, Human
cagucuuggcucacug

SEQ ID NO: 1796341 - RNA, 19 nt, Human
cagucuggaaugcaguggu

SEQ ID NO: 1796342 - RNA, 16 nt, Human
caguccucccaucuca

SEQ ID NO: 1796343 - RNA, 17 nt, Human
caguccucccaucucac

SEQ ID NO: 1796344 - RNA, 15 nt, Human
caguccuuaccagca

SEQ ID NO: 1796345 - RNA, 18 nt, Human
caguccuuaccagcagag

SEQ ID NO: 1796346 - RNA, 19 nt, Human
caguccuuaccagcagagc

SEQ ID NO: 1796347 - RNA, 20 nt, Human
caguccuuaccagcagagca

SEQ ID NO: 1796348 - RNA, 21 nt, Human
caguccuuaccagcagagcac

SEQ ID NO: 1796349 - RNA, 18 nt, Human
cagucuggaaugcagugg

SEQ ID NO: 1796350 - RNA, 15 nt, Human
cagugagacagcucu

SEQ ID NO: 1796351 - RNA, 18 nt, Human
cagugagucgaggacagg

SEQ ID NO: 1796352 - RNA, 17 nt, Human
cagugagucgaggacag

SEQ ID NO: 1796353 - RNA, 23 nt, Human
cagugaggguaaguauuuuccug

SEQ ID NO: 1796354 - RNA, 21 nt, Human
cagugaggcucugcccuuggu

SEQ ID NO: 1796355 - RNA, 17 nt, Human
cagugaggcucugcccu

SEQ ID NO: 1796356 - RNA, 18 nt, Human
cagugaggcucugcccuu

SEQ ID NO: 1796357 - RNA, 19 nt, Human
cagugaggcucugcccuug

SEQ ID NO: 1796358 - RNA, 20 nt, Human
cagugaggcucugcccuugg

SEQ ID NO: 1796359 - RNA, 24 nt, Human
cagugagccgagauugcaccacug

SEQ ID NO: 1796360 - RNA, 12 nt, Human
cagugaggcucu

SEQ ID NO: 1796361 - RNA, 13 nt, Human
cagugaggcucug

SEQ ID NO: 1796362 - RNA, 14 nt, Human
cagugaggcucugc

SEQ ID NO: 1796363 - RNA, 15 nt, Human
cagugaggcucugcc

SEQ ID NO: 1796364 - RNA, 16 nt, Human
cagugaggcucugccc

SEQ ID NO: 1796365 - RNA, 18 nt, Human
cagugauuaccagggacu

SEQ ID NO: 1796366 - RNA, 17 nt, Human
cagugauuaccagggac

SEQ ID NO: 1796367 - RNA, 15 nt, Human
cagugcccuccagga

SEQ ID NO: 1796368 - RNA, 23 nt, Human
cagugagucgaggacagggaggu

SEQ ID NO: 1796369 - RNA, 22 nt, Human
cagugagucgaggacagggagg

SEQ ID NO: 1796370 - RNA, 20 nt, Human
cagugagucgaggacaggga

SEQ ID NO: 1796371 - RNA, 19 nt, Human
cagugagucgaggacaggg

SEQ ID NO: 1796372 - RNA, 15 nt, Human
cagugccgagaagga

SEQ ID NO: 1796373 - RNA, 18 nt, Human
cagugccgagaaggaagc

SEQ ID NO: 1796374 - RNA, 11 nt, Human
cagugccuuau

SEQ ID NO: 1796375 - RNA, 13 nt, Human
cagugccuuaugg

SEQ ID NO: 1796376 - RNA, 15 nt, Human
cagugccuuauggaa

SEQ ID NO: 1796377 - RNA, 16 nt, Human
cagugccuuauggaac

SEQ ID NO: 1796378 - RNA, 17 nt, Human
cagugccuuauggaaca

SEQ ID NO: 1796379 - RNA, 18 nt, Human
cagugccuuauggaacac

SEQ ID NO: 1796380 - RNA, 19 nt, Human
cagugccuuauggaacacu

SEQ ID NO: 1796381 - RNA, 20 nt, Human
cagugccuuauggaacacuc

SEQ ID NO: 1796382 - RNA, 21 nt, Human
cagugccuuauggaacacucu

SEQ ID NO: 1796383 - RNA, 22 nt, Human
cagugccuuauggaacacucug

SEQ ID NO: 1796384 - RNA, 23 nt, Human
cagugccuuauggaacacucuga

SEQ ID NO: 1796385 - RNA, 13 nt, Human
caguaucucaggg

SEQ ID NO: 1796386 - RNA, 15 nt, Human
caguaucucagggcc

SEQ ID NO: 1796387 - RNA, 12 nt, Human
caguaucuugaa

SEQ ID NO: 1796388 - RNA, 18 nt, Human
caguaucuugaagacuuu

SEQ ID NO: 1796389 - RNA, 21 nt, Human
caguaucuugaagacuuuucu

SEQ ID NO: 1796390 - RNA, 12 nt, Human
caguauggcagc

SEQ ID NO: 1796391 - RNA, 12 nt, Human
caguagugauag

SEQ ID NO: 1796392 - RNA, 19 nt, Human
caguauuacuucugcuaca

SEQ ID NO: 1796393 - RNA, 18 nt, Human
caguauuacuucugcuac

SEQ ID NO: 1796394 - RNA, 16 nt, Human
caguauuacuucugcu

SEQ ID NO: 1796395 - RNA, 16 nt, Human
caguccauagcagaga

SEQ ID NO: 1796396 - RNA, 14 nt, Human
caguccauugaaag

SEQ ID NO: 1796397 - RNA, 13 nt, Human
caguccaugaaga

SEQ ID NO: 1796398 - RNA, 23 nt, Human
caguccccgugaaggagagcccu

SEQ ID NO: 1796399 - RNA, 16 nt, Human
cagucccccugcccca

SEQ ID NO: 1796400 - RNA, 17 nt, Human
cagucccccugccccag

SEQ ID NO: 1796401 - RNA, 17 nt, Human
cagucccugccaaugga

SEQ ID NO: 1796402 - RNA, 12 nt, Human
caguccucccau

SEQ ID NO: 1796403 - RNA, 13 nt, Human
caguccucccauc

SEQ ID NO: 1796404 - RNA, 14 nt, Human
caguccucccaucu

SEQ ID NO: 1796405 - RNA, 15 nt, Human
caguccucccaucuc

SEQ ID NO: 1796406 - RNA, 12 nt, Human
cagucccugcca

SEQ ID NO: 1796407 - RNA, 13 nt, Human
cagucccugccaa

SEQ ID NO: 1796408 - RNA, 14 nt, Human
cagucccugccaau

SEQ ID NO: 1796409 - RNA, 15 nt, Human
cagucccugccaaug

SEQ ID NO: 1796410 - RNA, 16 nt, Human
cagucccugccaaugg

SEQ ID NO: 1796411 - RNA, 20 nt, Human
cagcuuguaaauagcucagg

SEQ ID NO: 1796412 - RNA, 19 nt, Human
cagcuuguaaauagcucag

SEQ ID NO: 1796413 - RNA, 18 nt, Human
cagcuuguaaauagcuca

SEQ ID NO: 1796414 - RNA, 22 nt, Human
cagcuuguaaauagcucaggug

SEQ ID NO: 1796415 - RNA, 21 nt, Human
cagcuuguaaauagcucaggu

SEQ ID NO: 1796416 - RNA, 22 nt, Human
cagcuuuaaaaaauuaaucugg

SEQ ID NO: 1796417 - RNA, 23 nt, Human
cagcuuuccccaugucucgacuc

SEQ ID NO: 1796418 - RNA, 23 nt, Human
cagcuuuccucaaaacuucagac

SEQ ID NO: 1796419 - RNA, 12 nt, Human
cagcuuuguuug

SEQ ID NO: 1796420 - RNA, 21 nt, Human
cagcuuuguuuguugucagcu

SEQ ID NO: 1796421 - RNA, 22 nt, Human
cagcuuuguuuguugucagcug

SEQ ID NO: 1796422 - RNA, 23 nt, Human
cagcuuuguuuguugucagcuga

SEQ ID NO: 1796423 - RNA, 14 nt, Human
cagcuuugauauuu

SEQ ID NO: 1796424 - RNA, 21 nt, Human
cagcuucauuuccugugucuu

SEQ ID NO: 1796425 - RNA, 20 nt, Human
cagcuucauuuccugugucu

SEQ ID NO: 1796426 - RNA, 15 nt, Human
cagcuugaggguugg

SEQ ID NO: 1796427 - RNA, 14 nt, Human
cagcuugaggguug

SEQ ID NO: 1796428 - RNA, 18 nt, Human
cagcuugaccgugaggcc

SEQ ID NO: 1796429 - RNA, 19 nt, Human
cagcuugaccgugaggcca

SEQ ID NO: 1796430 - RNA, 20 nt, Human
cagcuugaccgugaggccag

SEQ ID NO: 1796431 - RNA, 21 nt, Human
cagcuugaccgugaggccaga

SEQ ID NO: 1796432 - RNA, 21 nt, Human
cagcuugaggguugggcuggu

SEQ ID NO: 1796433 - RNA, 20 nt, Human
cagcuugaggguugggcugg

SEQ ID NO: 1796434 - RNA, 19 nt, Human
cagcuugaggguugggcug

SEQ ID NO: 1796435 - RNA, 18 nt, Human
cagcuugaggguugggcu

SEQ ID NO: 1796436 - RNA, 14 nt, Human
caggaagcagcuuu

SEQ ID NO: 1796437 - RNA, 22 nt, Human
caggaagccagcaggcucucag

SEQ ID NO: 1796438 - RNA, 19 nt, Human
caggaagccagcaggcucu

SEQ ID NO: 1796439 - RNA, 21 nt, Human
caggaagccagcaggcucuca

SEQ ID NO: 1796440 - RNA, 14 nt, Human
caggaagccagcag

SEQ ID NO: 1796441 - RNA, 16 nt, Human
caggaagccagcaggc

SEQ ID NO: 1796442 - RNA, 17 nt, Human
caggaagccagcaggcu

SEQ ID NO: 1796443 - RNA, 18 nt, Human
caggaagccagcaggcuc

SEQ ID NO: 1796444 - RNA, 23 nt, Human
caggaagcucagggccuggcuca

SEQ ID NO: 1796445 - RNA, 20 nt, Human
caggaagcucagggccuggc

SEQ ID NO: 1796446 - RNA, 21 nt, Human
caggaagcucagggccuggcu

SEQ ID NO: 1796447 - RNA, 13 nt, Human
caggaagcucagg

SEQ ID NO: 1796448 - RNA, 14 nt, Human
caggaagcucaggg

SEQ ID NO: 1796449 - RNA, 15 nt, Human
caggaagcucagggc

SEQ ID NO: 1796450 - RNA, 16 nt, Human
caggaagcucagggcc

SEQ ID NO: 1796451 - RNA, 17 nt, Human
caggaagcucagggccu

SEQ ID NO: 1796452 - RNA, 18 nt, Human
caggaagcucagggccug

SEQ ID NO: 1796453 - RNA, 19 nt, Human
caggaagcucagggccugg

SEQ ID NO: 1796454 - RNA, 17 nt, Human
caggaccuguggccaag

SEQ ID NO: 1796455 - RNA, 16 nt, Human
caggaaguagaggagg

SEQ ID NO: 1796456 - RNA, 17 nt, Human
caggaaguacuggagaa

SEQ ID NO: 1796457 - RNA, 18 nt, Human
caggaaguacuggagaaa

SEQ ID NO: 1796458 - RNA, 20 nt, Human
caggaaguacuggagaaaau

SEQ ID NO: 1796459 - RNA, 15 nt, Human
caggaaguagaggag

SEQ ID NO: 1796460 - RNA, 12 nt, Human
caggaaguacug

SEQ ID NO: 1796461 - RNA, 14 nt, Human
caggaaguacugga

SEQ ID NO: 1796462 - RNA, 16 nt, Human
caggaaguacuggaga

SEQ ID NO: 1796463 - RNA, 19 nt, Human
caggaaggcugagaggaga

SEQ ID NO: 1796464 - RNA, 15 nt, Human
caggaaggcuaaagg

SEQ ID NO: 1796465 - RNA, 22 nt, Human
cagcugcuuuugucuaugggac

SEQ ID NO: 1796466 - RNA, 23 nt, Human
cagcugcuuuugucuaugggacu

SEQ ID NO: 1796467 - RNA, 19 nt, Human
cagcuggccgggagccuga

SEQ ID NO: 1796468 - RNA, 18 nt, Human
cagcuggagaaauauggu

SEQ ID NO: 1796469 - RNA, 23 nt, Human
cagcugggaucacauguggacuu

SEQ ID NO: 1796470 - RNA, 18 nt, Human
cagcuggggccaggcugg

SEQ ID NO: 1796471 - RNA, 19 nt, Human
cagcuggggccaggcuggg

SEQ ID NO: 1796472 - RNA, 20 nt, Human
cagcuggggccaggcugggu

SEQ ID NO: 1796473 - RNA, 21 nt, Human
cagcuggggccaggcuggguc

SEQ ID NO: 1796474 - RNA, 22 nt, Human
cagcuggggccaggcugggucg

SEQ ID NO: 1796475 - RNA, 21 nt, Human
cagcugggguggggaccucag

SEQ ID NO: 1796476 - RNA, 22 nt, Human
cagcugggguggggaccucagg

SEQ ID NO: 1796477 - RNA, 23 nt, Human
cagcugggguggggaccucaggc

SEQ ID NO: 1796478 - RNA, 18 nt, Human
cagcugguugagguuuca

SEQ ID NO: 1796479 - RNA, 16 nt, Human
cagcuggguuggaaaa

SEQ ID NO: 1796480 - RNA, 17 nt, Human
cagcuggguuggaaaac

SEQ ID NO: 1796481 - RNA, 24 nt, Human
cagcugcgguccacccaggagccc

SEQ ID NO: 1796482 - RNA, 23 nt, Human
cagcugcgguccacccaggagcc

SEQ ID NO: 1796483 - RNA, 22 nt, Human
cagcugcgguccacccaggagc

SEQ ID NO: 1796484 - RNA, 21 nt, Human
cagcugcgguccacccaggag

SEQ ID NO: 1796485 - RNA, 20 nt, Human
cagcugcgguccacccagga

SEQ ID NO: 1796486 - RNA, 19 nt, Human
cagcugcgguccacccagg

SEQ ID NO: 1796487 - RNA, 18 nt, Human
cagcugcgguccacccag

SEQ ID NO: 1796488 - RNA, 18 nt, Human
cagcugccugggaucccu

SEQ ID NO: 1796489 - RNA, 23 nt, Human
cagcugccugggaucccucaucc

SEQ ID NO: 1796490 - RNA, 13 nt, Human
cagcugcuugggc

SEQ ID NO: 1796491 - RNA, 14 nt, Human
cagcugcuugggcu

SEQ ID NO: 1796492 - RNA, 15 nt, Human
cagcugcuugggcuu

SEQ ID NO: 1796493 - RNA, 16 nt, Human
cagcugcuugggcuuc

SEQ ID NO: 1796494 - RNA, 18 nt, Human
cagcugcuugggcuucau

SEQ ID NO: 1796495 - RNA, 19 nt, Human
cagcugcuugggcuucauc

SEQ ID NO: 1796496 - RNA, 21 nt, Human
cagcugcuugggcuucauccu

SEQ ID NO: 1796497 - RNA, 22 nt, Human
cagcugcuugggcuucauccuc

SEQ ID NO: 1796498 - RNA, 21 nt, Human
cagcugcucaauaaaguacaa

SEQ ID NO: 1796499 - RNA, 17 nt, Human
cagcugcuacuacuccu

SEQ ID NO: 1796500 - RNA, 15 nt, Human
cagcucugcaagaau

SEQ ID NO: 1796501 - RNA, 16 nt, Human
cagcucugcaagaauu

SEQ ID NO: 1796502 - RNA, 21 nt, Human
cagcucugcaagaauugaagc

SEQ ID NO: 1796503 - RNA, 20 nt, Human
cagcucugcauacucauuag

SEQ ID NO: 1796504 - RNA, 23 nt, Human
cagcuccuucuguccuacucugu

SEQ ID NO: 1796505 - RNA, 21 nt, Human
cagcuccuucuguccuacucu

SEQ ID NO: 1796506 - RNA, 17 nt, Human
cagcuccuucuguccua

SEQ ID NO: 1796507 - RNA, 16 nt, Human
cagcuccuucuguccu

SEQ ID NO: 1796508 - RNA, 13 nt, Human
cagcucagagagg

SEQ ID NO: 1796509 - RNA, 17 nt, Human
cagcucagagagggugg

SEQ ID NO: 1796510 - RNA, 19 nt, Human
cagcucagagaggguggga

SEQ ID NO: 1796511 - RNA, 20 nt, Human
cagcucagagagggugggag

SEQ ID NO: 1796512 - RNA, 23 nt, Human
cagcucuucuccaggcuguaucc

SEQ ID NO: 1796513 - RNA, 19 nt, Human
cagcucuucuccaggcugu

SEQ ID NO: 1796514 - RNA, 18 nt, Human
cagcucuucuccaggcug

SEQ ID NO: 1796515 - RNA, 17 nt, Human
cagcucuucuccaggcu

SEQ ID NO: 1796516 - RNA, 16 nt, Human
cagcucuucuccaggc

SEQ ID NO: 1796517 - RNA, 15 nt, Human
cagcucuucuccagg

SEQ ID NO: 1796518 - RNA, 14 nt, Human
cagcucuucuccag

SEQ ID NO: 1796519 - RNA, 13 nt, Human
cagcucuucucca

SEQ ID NO: 1796520 - RNA, 23 nt, Human
cagcucuguccugggagugagcu

SEQ ID NO: 1796521 - RNA, 10 nt, Human
cagcucuuau

SEQ ID NO: 1796522 - RNA, 21 nt, Human
cagcucuuauauugccauuuc

SEQ ID NO: 1796523 - RNA, 18 nt, Human
cagcucuguccugggagu

SEQ ID NO: 1796524 - RNA, 17 nt, Human
cagcucuguccugggag

SEQ ID NO: 1796525 - RNA, 16 nt, Human
cagcucuguccuggga

SEQ ID NO: 1796526 - RNA, 14 nt, Human
cagcucuguccugg

SEQ ID NO: 1796527 - RNA, 13 nt, Human
cagcucuguccug

SEQ ID NO: 1796528 - RNA, 12 nt, Human
cagcucuguccu

SEQ ID NO: 1796529 - RNA, 22 nt, Human
cagcucugguccauagagagca

SEQ ID NO: 1796530 - RNA, 23 nt, Human
cagcucugguccauagagagcaa

SEQ ID NO: 1796531 - RNA, 10 nt, Human
cagcucuggu

SEQ ID NO: 1796532 - RNA, 13 nt, Human
cagcucuggucca

SEQ ID NO: 1796533 - RNA, 16 nt, Human
cagcucugguccauag

SEQ ID NO: 1796534 - RNA, 17 nt, Human
cagcucugguccauaga

SEQ ID NO: 1796535 - RNA, 18 nt, Human
cagcucugguccauagag

SEQ ID NO: 1796536 - RNA, 21 nt, Human
cagcucugguccauagagagc

SEQ ID NO: 1796537 - RNA, 22 nt, Human
caggaagcucagggccuggcuc

SEQ ID NO: 1796538 - RNA, 23 nt, Human
cagccucccgaguagcugggacu

SEQ ID NO: 1796539 - RNA, 22 nt, Human
cagccucccgaguagcugggac

SEQ ID NO: 1796540 - RNA, 21 nt, Human
cagccucccgaguagcuggga

SEQ ID NO: 1796541 - RNA, 20 nt, Human
cagccucccgaguagcuggg

SEQ ID NO: 1796542 - RNA, 19 nt, Human
cagccucccgaguagcugg

SEQ ID NO: 1796543 - RNA, 23 nt, Human
cagccucccgaauagcugggacu

SEQ ID NO: 1796544 - RNA, 20 nt, Human
cagccuccugaguagcugga

SEQ ID NO: 1796545 - RNA, 15 nt, Human
cagccuccugaguag

SEQ ID NO: 1796546 - RNA, 20 nt, Human
cagccugcuccagcuguuca

SEQ ID NO: 1796547 - RNA, 13 nt, Human
cagccuggcacag

SEQ ID NO: 1796548 - RNA, 20 nt, Human
cagccuggcacagggcagug

SEQ ID NO: 1796549 - RNA, 21 nt, Human
cagccuggcacagggcagugg

SEQ ID NO: 1796550 - RNA, 10 nt, Human
cagccuggca

SEQ ID NO: 1796551 - RNA, 15 nt, Human
cagccuggacccugu

SEQ ID NO: 1796552 - RNA, 19 nt, Human
cagccuggacccuguggau

SEQ ID NO: 1796553 - RNA, 22 nt, Human
cagccuugaccauucuccaccu

SEQ ID NO: 1796554 - RNA, 23 nt, Human
cagccuugaccauucuccaccug

SEQ ID NO: 1796555 - RNA, 24 nt, Human
cagccuugaccauucuccaccugc

SEQ ID NO: 1796556 - RNA, 17 nt, Human
cagccuugaccauucuc

SEQ ID NO: 1796557 - RNA, 20 nt, Human
cagccuugaccauucuccac

SEQ ID NO: 1796558 - RNA, 21 nt, Human
cagccuugaccauucuccacc

SEQ ID NO: 1796559 - RNA, 16 nt, Human
cagccugggcaaugug

SEQ ID NO: 1796560 - RNA, 19 nt, Human
cagccugggcaaugugaua

SEQ ID NO: 1796561 - RNA, 16 nt, Human
cagcuaaugggacacu

SEQ ID NO: 1796562 - RNA, 15 nt, Human
cagcuaaugggacac

SEQ ID NO: 1796563 - RNA, 19 nt, Human
cagcuaaucagcauucuca

SEQ ID NO: 1796564 - RNA, 20 nt, Human
cagcuaacauggaaguacua

SEQ ID NO: 1796565 - RNA, 19 nt, Human
cagcuacuugggaggcuga

SEQ ID NO: 1796566 - RNA, 20 nt, Human
cagcgagcccugguggcagu

SEQ ID NO: 1796567 - RNA, 19 nt, Human
cagcgagcccugguggcag

SEQ ID NO: 1796568 - RNA, 17 nt, Human
cagcgagcccugguggc

SEQ ID NO: 1796569 - RNA, 16 nt, Human
cagcgagcccuggugg

SEQ ID NO: 1796570 - RNA, 13 nt, Human
cagcgagcccugg

SEQ ID NO: 1796571 - RNA, 21 nt, Human
cagcgagcccugguggcagug

SEQ ID NO: 1796572 - RNA, 19 nt, Human
cagcuaacauggaaguacu

SEQ ID NO: 1796573 - RNA, 18 nt, Human
cagcuaacauggaaguac

SEQ ID NO: 1796574 - RNA, 19 nt, Human
cagcucaccagccccagug

SEQ ID NO: 1796575 - RNA, 17 nt, Human
cagcucaccagccccag

SEQ ID NO: 1796576 - RNA, 16 nt, Human
cagcucaccagcccca

SEQ ID NO: 1796577 - RNA, 15 nt, Human
cagcucaccagcccc

SEQ ID NO: 1796578 - RNA, 13 nt, Human
cagcucaccagcc

SEQ ID NO: 1796579 - RNA, 21 nt, Human
cagcucaccagccccagugcc

SEQ ID NO: 1796580 - RNA, 20 nt, Human
cagcucaccagccccagugc

SEQ ID NO: 1796581 - RNA, 22 nt, Human
cagcucaccagccccagugccc

SEQ ID NO: 1796582 - RNA, 13 nt, Human
cagcucaccucuc

SEQ ID NO: 1796583 - RNA, 15 nt, Human
cagcucaccucuccc

SEQ ID NO: 1796584 - RNA, 16 nt, Human
cagcucaccucucccu

SEQ ID NO: 1796585 - RNA, 17 nt, Human
cagcucaccucucccuu

SEQ ID NO: 1796586 - RNA, 21 nt, Human
cagcucacugcaaccuucgcc

SEQ ID NO: 1796587 - RNA, 15 nt, Human
cagcucacugcaacc

SEQ ID NO: 1796588 - RNA, 12 nt, Human
cagcucagagag

SEQ ID NO: 1796589 - RNA, 12 nt, Human
cagcucacugca

SEQ ID NO: 1796590 - RNA, 14 nt, Human
cagcucacugcaac

SEQ ID NO: 1796591 - RNA, 19 nt, Human
cagcucaccucucccuugg

SEQ ID NO: 1796592 - RNA, 20 nt, Human
cagcucaccucucccuugga

SEQ ID NO: 1796593 - RNA, 18 nt, Human
cagccucaaccuccuggg

SEQ ID NO: 1796594 - RNA, 17 nt, Human
cagccucaaccuccugg

SEQ ID NO: 1796595 - RNA, 21 nt, Human
cagccucaaccuccugggcua

SEQ ID NO: 1796596 - RNA, 20 nt, Human
cagccucaaccuccugggcu

SEQ ID NO: 1796597 - RNA, 19 nt, Human
cagccucaaccuccugggc

SEQ ID NO: 1796598 - RNA, 14 nt, Human
cagccuccaagcuc

SEQ ID NO: 1796599 - RNA, 20 nt, Human
cagccuccaagcuccaucuc

SEQ ID NO: 1796600 - RNA, 14 nt, Human
cagccucacagucc

SEQ ID NO: 1796601 - RNA, 15 nt, Human
cagccucacaguccu

SEQ ID NO: 1796602 - RNA, 20 nt, Human
cagccucacaguccuuacca

SEQ ID NO: 1796603 - RNA, 22 nt, Human
cagccucccgaauagcugggac

SEQ ID NO: 1796604 - RNA, 21 nt, Human
cagccucccgaauagcuggga

SEQ ID NO: 1796605 - RNA, 20 nt, Human
cagccucccgaauagcuggg

SEQ ID NO: 1796606 - RNA, 23 nt, Human
cagccucccaaagugcugggauu

SEQ ID NO: 1796607 - RNA, 21 nt, Human
cagccucccaaagugcuggga

SEQ ID NO: 1796608 - RNA, 20 nt, Human
cagccucccaaagugcuggg

SEQ ID NO: 1796609 - RNA, 19 nt, Human
cagccucccaaagugcugg

SEQ ID NO: 1796610 - RNA, 15 nt, Human
cagccuccaugcugc

SEQ ID NO: 1796611 - RNA, 17 nt, Human
cagccuccaugcugccu

SEQ ID NO: 1796612 - RNA, 20 nt, Human
cagccuccaugcugccucca

SEQ ID NO: 1796613 - RNA, 14 nt, Human
cagccuccaugcug

SEQ ID NO: 1796614 - RNA, 16 nt, Human
cagcccucccugcccc

SEQ ID NO: 1796615 - RNA, 17 nt, Human
cagcccucccugccccu

SEQ ID NO: 1796616 - RNA, 18 nt, Human
cagcccucccugccccuc

SEQ ID NO: 1796617 - RNA, 22 nt, Human
cagcccucccugccccucccuu

SEQ ID NO: 1796618 - RNA, 18 nt, Human
cagcccugcagagggcac

SEQ ID NO: 1796619 - RNA, 20 nt, Human
cagcccugcagagggcacag

SEQ ID NO: 1796620 - RNA, 13 nt, Human
cagcccugcagag

SEQ ID NO: 1796621 - RNA, 14 nt, Human
cagcccugcagagg

SEQ ID NO: 1796622 - RNA, 15 nt, Human
cagcccugcagaggg

SEQ ID NO: 1796623 - RNA, 16 nt, Human
cagcccugcagagggc

SEQ ID NO: 1796624 - RNA, 11 nt, Human
cagcccugcuu

SEQ ID NO: 1796625 - RNA, 13 nt, Human
cagcccugcuuug

SEQ ID NO: 1796626 - RNA, 19 nt, Human
cagcccugcuuugggcugc

SEQ ID NO: 1796627 - RNA, 20 nt, Human
cagcccugcuuugggcugcc

SEQ ID NO: 1796628 - RNA, 21 nt, Human
cagcccugcuuugggcugccc

SEQ ID NO: 1796629 - RNA, 22 nt, Human
cagcccugcuuugggcugcccu

SEQ ID NO: 1796630 - RNA, 23 nt, Human
cagcccugcuuugggcugcccug

SEQ ID NO: 1796631 - RNA, 9 nt, Human
cagccgugc

SEQ ID NO: 1796632 - RNA, 14 nt, Human
cagccgugccuuca

SEQ ID NO: 1796633 - RNA, 16 nt, Human
cagccgugccuucagc

SEQ ID NO: 1796634 - RNA, 18 nt, Human
cagccgugccuucagcuc

SEQ ID NO: 1796635 - RNA, 20 nt, Human
cagccgugccuucagcucua

SEQ ID NO: 1796636 - RNA, 21 nt, Human
cagccguguaaccauggaccc

SEQ ID NO: 1796637 - RNA, 14 nt, Human
cagccccauucugc

SEQ ID NO: 1796638 - RNA, 13 nt, Human
cagccccauucug

SEQ ID NO: 1796639 - RNA, 16 nt, Human
cagccccauccucugu

SEQ ID NO: 1796640 - RNA, 22 nt, Human
cagccccauccucuguacagag

SEQ ID NO: 1796641 - RNA, 22 nt, Human
cagccccaucccaaacccuuca

SEQ ID NO: 1796642 - RNA, 12 nt, Human
cagccccauccu

SEQ ID NO: 1796643 - RNA, 13 nt, Human
cagccccauccuc

SEQ ID NO: 1796644 - RNA, 14 nt, Human
cagccccauccucu

SEQ ID NO: 1796645 - RNA, 18 nt, Human
cagccccauucugccugc

SEQ ID NO: 1796646 - RNA, 23 nt, Human
cagccccuggaugcagccucaca

SEQ ID NO: 1796647 - RNA, 17 nt, Human
cagccccauucugccug

SEQ ID NO: 1796648 - RNA, 16 nt, Human
cagccccauucugccu

SEQ ID NO: 1796649 - RNA, 20 nt, Human
cagccccuguucuggcagag

SEQ ID NO: 1796650 - RNA, 21 nt, Human
cagccccuguucuggcagagu

SEQ ID NO: 1796651 - RNA, 18 nt, Human
cagccccagugcccacag

SEQ ID NO: 1796652 - RNA, 17 nt, Human
cagccccagugcccaca

SEQ ID NO: 1796653 - RNA, 11 nt, Human
cagccccaucc

SEQ ID NO: 1796654 - RNA, 21 nt, Human
cagccccaucccaaacccuuc

SEQ ID NO: 1796655 - RNA, 16 nt, Human
cagccccagugcccac

SEQ ID NO: 1796656 - RNA, 15 nt, Human
cagccccagugccca

SEQ ID NO: 1796657 - RNA, 14 nt, Human
cagccccagugccc

SEQ ID NO: 1796658 - RNA, 13 nt, Human
cagccccagugcc

SEQ ID NO: 1796659 - RNA, 22 nt, Human
cagcccuccaucuaaacugccc

SEQ ID NO: 1796660 - RNA, 23 nt, Human
cagcccuccaucuaaacugcccc

SEQ ID NO: 1796661 - RNA, 13 nt, Human
cagcccucccugc

SEQ ID NO: 1796662 - RNA, 15 nt, Human
cagcccucccugccc

SEQ ID NO: 1796663 - RNA, 21 nt, Human
cagcccgggcucugccuccca

SEQ ID NO: 1796664 - RNA, 22 nt, Human
cagcccgggcucugccucccau

SEQ ID NO: 1796665 - RNA, 17 nt, Human
cagcccgggcucugccu

SEQ ID NO: 1796666 - RNA, 18 nt, Human
cagcccgggcucugccuc

SEQ ID NO: 1796667 - RNA, 19 nt, Human
cagcccgggcucugccucc

SEQ ID NO: 1796668 - RNA, 20 nt, Human
cagcccgggcucugccuccc

SEQ ID NO: 1796669 - RNA, 24 nt, Human
cagccccuucugacccaugcugcc

SEQ ID NO: 1796670 - RNA, 22 nt, Human
cagccccuucugacccaugcug

SEQ ID NO: 1796671 - RNA, 23 nt, Human
cagccccuucugacccaugcugc

SEQ ID NO: 1796672 - RNA, 16 nt, Human
cagccccuucugaccc

SEQ ID NO: 1796673 - RNA, 17 nt, Human
cagccccuucugaccca

SEQ ID NO: 1796674 - RNA, 19 nt, Human
cagccccuucugacccaug

SEQ ID NO: 1796675 - RNA, 21 nt, Human
cagccccuucugacccaugcu

SEQ ID NO: 1796676 - RNA, 13 nt, Human
cagcccgggcucu

SEQ ID NO: 1796677 - RNA, 14 nt, Human
cagcccgggcucug

SEQ ID NO: 1796678 - RNA, 15 nt, Human
cagcccgggcucugc

SEQ ID NO: 1796679 - RNA, 16 nt, Human
cagcccgggcucugcc

SEQ ID NO: 1796680 - RNA, 20 nt, Human
cagcauccuggcacccggcc

SEQ ID NO: 1796681 - RNA, 19 nt, Human
cagcauccuggcacccggc

SEQ ID NO: 1796682 - RNA, 21 nt, Human
cagcauccuggcacccggccc

SEQ ID NO: 1796683 - RNA, 15 nt, Human
cagcauucucacucc

SEQ ID NO: 1796684 - RNA, 14 nt, Human
cagcauucucacuc

SEQ ID NO: 1796685 - RNA, 15 nt, Human
cagccaaagccuccu

SEQ ID NO: 1796686 - RNA, 16 nt, Human
cagccaaagccuccuc

SEQ ID NO: 1796687 - RNA, 18 nt, Human
cagccaaagccuccucca

SEQ ID NO: 1796688 - RNA, 21 nt, Human
cagccaaagccuccuccagcc

SEQ ID NO: 1796689 - RNA, 18 nt, Human
cagccaacuauggccugu

SEQ ID NO: 1796690 - RNA, 12 nt, Human
cagcaggcucuc

SEQ ID NO: 1796691 - RNA, 14 nt, Human
cagcaggcucucag

SEQ ID NO: 1796692 - RNA, 15 nt, Human
cagcaggcucucagg

SEQ ID NO: 1796693 - RNA, 19 nt, Human
cagcagccuggacccugug

SEQ ID NO: 1796694 - RNA, 22 nt, Human
cagcagccuggacccuguggau

SEQ ID NO: 1796695 - RNA, 12 nt, Human
cagcagccugga

SEQ ID NO: 1796696 - RNA, 14 nt, Human
cagcagccuggacc

SEQ ID NO: 1796697 - RNA, 15 nt, Human
cagcagccuggaccc

SEQ ID NO: 1796698 - RNA, 18 nt, Human
cagcagccuggacccugu

SEQ ID NO: 1796699 - RNA, 17 nt, Human
cagcauccuggcacccg

SEQ ID NO: 1796700 - RNA, 16 nt, Human
cagcauccuggcaccc

SEQ ID NO: 1796701 - RNA, 15 nt, Human
cagcauccuggcacc

SEQ ID NO: 1796702 - RNA, 14 nt, Human
cagcauccuggcac

SEQ ID NO: 1796703 - RNA, 20 nt, Human
cagcagggagggcuucugcc

SEQ ID NO: 1796704 - RNA, 16 nt, Human
cagcaggcucucaggc

SEQ ID NO: 1796705 - RNA, 17 nt, Human
cagcaggcucucaggcc

SEQ ID NO: 1796706 - RNA, 18 nt, Human
cagcaggcucucaggcca

SEQ ID NO: 1796707 - RNA, 19 nt, Human
cagcaggcucucaggccag

SEQ ID NO: 1796708 - RNA, 20 nt, Human
cagcaggcucucaggccagc

SEQ ID NO: 1796709 - RNA, 22 nt, Human
cagcaggcucucaggccagcug

SEQ ID NO: 1796710 - RNA, 18 nt, Human
cagcagggagggcuucug

SEQ ID NO: 1796711 - RNA, 19 nt, Human
cagccacauuccugaugcu

SEQ ID NO: 1796712 - RNA, 15 nt, Human
cagccacauuccuga

SEQ ID NO: 1796713 - RNA, 17 nt, Human
cagccacauuccugaug

SEQ ID NO: 1796714 - RNA, 14 nt, Human
cagccacauuccug

SEQ ID NO: 1796715 - RNA, 22 nt, Human
cagccacggccaggccagaggg

SEQ ID NO: 1796716 - RNA, 21 nt, Human
cagccacggccaggccagagg

SEQ ID NO: 1796717 - RNA, 19 nt, Human
cagccacggccaggccaga

SEQ ID NO: 1796718 - RNA, 18 nt, Human
cagccacggccaggccag

SEQ ID NO: 1796719 - RNA, 17 nt, Human
cagccacggccaggcca

SEQ ID NO: 1796720 - RNA, 16 nt, Human
cagccacggccaggcc

SEQ ID NO: 1796721 - RNA, 15 nt, Human
cagccacggccaggc

SEQ ID NO: 1796722 - RNA, 14 nt, Human
cagccacggccagg

SEQ ID NO: 1796723 - RNA, 23 nt, Human
cagccacggccaggccagaggga

SEQ ID NO: 1796724 - RNA, 22 nt, Human
cagccaguaaaugggggugcau

SEQ ID NO: 1796725 - RNA, 18 nt, Human
cagcccacuucugccaua

SEQ ID NO: 1796726 - RNA, 22 nt, Human
cagccccaaaacucuccucugc

SEQ ID NO: 1796727 - RNA, 20 nt, Human
cagccccaaaacucuccucu

SEQ ID NO: 1796728 - RNA, 21 nt, Human
cagccccaaaacucuccucug

SEQ ID NO: 1796729 - RNA, 15 nt, Human
cagcccacuucugcc

SEQ ID NO: 1796730 - RNA, 19 nt, Human
cagcccacauagugauggu

SEQ ID NO: 1796731 - RNA, 15 nt, Human
cagcccaccccucaa

SEQ ID NO: 1796732 - RNA, 19 nt, Human
cagauuuuuuacagcugcc

SEQ ID NO: 1796733 - RNA, 22 nt, Human
cagauuuuuuacagcugccugc

SEQ ID NO: 1796734 - RNA, 14 nt, Human
cagauucuuuccug

SEQ ID NO: 1796735 - RNA, 18 nt, Human
cagcaaaagaugcuucuc

SEQ ID NO: 1796736 - RNA, 23 nt, Human
cagaugggugcuuggaggaagga

SEQ ID NO: 1796737 - RNA, 15 nt, Human
cagaugcugugcaaa

SEQ ID NO: 1796738 - RNA, 18 nt, Human
cagaugggugcuuggagg

SEQ ID NO: 1796739 - RNA, 13 nt, Human
cagcagccccugc

SEQ ID NO: 1796740 - RNA, 16 nt, Human
cagcagccccugcaca

SEQ ID NO: 1796741 - RNA, 23 nt, Human
cagcagccccugcacaaagcccu

SEQ ID NO: 1796742 - RNA, 11 nt, Human
cagcagagcac

SEQ ID NO: 1796743 - RNA, 13 nt, Human
cagcagagcaccu

SEQ ID NO: 1796744 - RNA, 22 nt, Human
cagcagaaaugccuuacccuca

SEQ ID NO: 1796745 - RNA, 19 nt, Human
cagcagaaaugccuuaccc

SEQ ID NO: 1796746 - RNA, 17 nt, Human
cagcagaaaugccuuac

SEQ ID NO: 1796747 - RNA, 15 nt, Human
cagcagaaaugccuu

SEQ ID NO: 1796748 - RNA, 17 nt, Human
cagcaaggagauuuaca

SEQ ID NO: 1796749 - RNA, 18 nt, Human
cagcaaggagauuuacaa

SEQ ID NO: 1796750 - RNA, 12 nt, Human
cagcaagugaga

SEQ ID NO: 1796751 - RNA, 17 nt, Human
cagcaagugagagcugg

SEQ ID NO: 1796752 - RNA, 16 nt, Human
cagcaagugagagcug

SEQ ID NO: 1796753 - RNA, 15 nt, Human
cagcaagugagagcu

SEQ ID NO: 1796754 - RNA, 14 nt, Human
cagcaagugagagc

SEQ ID NO: 1796755 - RNA, 21 nt, Human
cagcaagugagagcugggugu

SEQ ID NO: 1796756 - RNA, 19 nt, Human
cagcaagugagagcugggu

SEQ ID NO: 1796757 - RNA, 21 nt, Human
cagcaauaaagcagcguuucu

SEQ ID NO: 1796758 - RNA, 13 nt, Human
cagcaauaaagca

SEQ ID NO: 1796759 - RNA, 22 nt, Human
cagcaauaaagcagcguuucua

SEQ ID NO: 1796760 - RNA, 15 nt, Human
cagcaauucuccugc

SEQ ID NO: 1796761 - RNA, 16 nt, Human
cagcaauucuccugcc

SEQ ID NO: 1796762 - RNA, 17 nt, Human
cagcaauucuccugccu

SEQ ID NO: 1796763 - RNA, 18 nt, Human
cagcaauucuccugccuc

SEQ ID NO: 1796764 - RNA, 19 nt, Human
cagcaauucuccugccuca

SEQ ID NO: 1796765 - RNA, 20 nt, Human
cagcaauucuccugccucag

SEQ ID NO: 1796766 - RNA, 14 nt, Human
cagcucaccagccc

SEQ ID NO: 1796767 - RNA, 18 nt, Human
cagccuccaugcugccuc

SEQ ID NO: 1796768 - RNA, 14 nt, Human
cagacccggcugcg

SEQ ID NO: 1796769 - RNA, 12 nt, Human
cagacccggcug

SEQ ID NO: 1796770 - RNA, 21 nt, Human
cagaccccuggcuuuucacug

SEQ ID NO: 1796771 - RNA, 22 nt, Human
cagaccccuggcuuuucacugc

SEQ ID NO: 1796772 - RNA, 23 nt, Human
cagaccccuggcuuuucacugcu

SEQ ID NO: 1796773 - RNA, 16 nt, Human
cagacccggcugcgug

SEQ ID NO: 1796774 - RNA, 12 nt, Human
cagacccugccc

SEQ ID NO: 1796775 - RNA, 13 nt, Human
cagacccugcccu

SEQ ID NO: 1796776 - RNA, 14 nt, Human
cagacccugcccug

SEQ ID NO: 1796777 - RNA, 22 nt, Human
cagacccugcccugugggcccc

SEQ ID NO: 1796778 - RNA, 15 nt, Human
cagacccugcccugu

SEQ ID NO: 1796779 - RNA, 16 nt, Human
cagacccugcccugug

SEQ ID NO: 1796780 - RNA, 17 nt, Human
cagacccugcccugugg

SEQ ID NO: 1796781 - RNA, 21 nt, Human
cagacccugcccugugggccc

SEQ ID NO: 1796782 - RNA, 13 nt, Human
cagaccccuggcu

SEQ ID NO: 1796783 - RNA, 14 nt, Human
cagaccccuggcuu

SEQ ID NO: 1796784 - RNA, 15 nt, Human
cagaccccuggcuuu

SEQ ID NO: 1796785 - RNA, 16 nt, Human
cagaccccuggcuuuu

SEQ ID NO: 1796786 - RNA, 18 nt, Human
cagaccccuggcuuuuca

SEQ ID NO: 1796787 - RNA, 14 nt, Human
cagaccacaaaacu

SEQ ID NO: 1796788 - RNA, 20 nt, Human
cagaccacaaaacuuuucua

SEQ ID NO: 1796789 - RNA, 23 nt, Human
cagagaaaguacuucuccacccu

SEQ ID NO: 1796790 - RNA, 19 nt, Human
cagagaaaguacuucucca

SEQ ID NO: 1796791 - RNA, 20 nt, Human
cagacuuuuuuuaaauagua

SEQ ID NO: 1796792 - RNA, 22 nt, Human
cagacaccuugacagggcacac

SEQ ID NO: 1796793 - RNA, 20 nt, Human
cagacaccuugacagggcac

SEQ ID NO: 1796794 - RNA, 19 nt, Human
cagacaccuugacagggca

SEQ ID NO: 1796795 - RNA, 20 nt, Human
cagacaguuaagagaaauga

SEQ ID NO: 1796796 - RNA, 19 nt, Human
cagacauacuaaccagcag

SEQ ID NO: 1796797 - RNA, 19 nt, Human
cagacauagaauuaacaca

SEQ ID NO: 1796798 - RNA, 17 nt, Human
cagacauagaauuaaca

SEQ ID NO: 1796799 - RNA, 23 nt, Human
cagacacaggcccggcuccaggc

SEQ ID NO: 1796800 - RNA, 22 nt, Human
cagacacaggcccggcuccagg

SEQ ID NO: 1796801 - RNA, 21 nt, Human
cagacacaggcccggcuccag

SEQ ID NO: 1796802 - RNA, 18 nt, Human
cagacacaggcccggcuc

SEQ ID NO: 1796803 - RNA, 17 nt, Human
cagacacaggcccggcu

SEQ ID NO: 1796804 - RNA, 15 nt, Human
cagacacaggcccgg

SEQ ID NO: 1796805 - RNA, 14 nt, Human
cagacacaggcccg

SEQ ID NO: 1796806 - RNA, 13 nt, Human
cagacacaggccc

SEQ ID NO: 1796807 - RNA, 14 nt, Human
cagacacaugucca

SEQ ID NO: 1796808 - RNA, 17 nt, Human
cagacacauguccaaga

SEQ ID NO: 1796809 - RNA, 21 nt, Human
cagacacauguccaagaagcc

SEQ ID NO: 1796810 - RNA, 22 nt, Human
cagacacauguccaagaagccc

SEQ ID NO: 1796811 - RNA, 23 nt, Human
cagacacauguccaagaagccca

SEQ ID NO: 1796812 - RNA, 22 nt, Human
cagacaaagcgugguggacaug

SEQ ID NO: 1796813 - RNA, 20 nt, Human
cagacaacaaaccuguuucu

SEQ ID NO: 1796814 - RNA, 24 nt, Human
cagaauuucccaaagcagugcaug

SEQ ID NO: 1796815 - RNA, 12 nt, Human
cagacaaagcgu

SEQ ID NO: 1796816 - RNA, 17 nt, Human
cagaauuucccaaagca

SEQ ID NO: 1796817 - RNA, 18 nt, Human
cagaauuucccaaagcag

SEQ ID NO: 1796818 - RNA, 19 nt, Human
cagaauuucccaaagcagu

SEQ ID NO: 1796819 - RNA, 20 nt, Human
cagaauuucccaaagcagug

SEQ ID NO: 1796820 - RNA, 15 nt, Human
cagaaucucgcucug

SEQ ID NO: 1796821 - RNA, 14 nt, Human
cagaauuucccaaa

SEQ ID NO: 1796822 - RNA, 11 nt, Human
cagaauucuca

SEQ ID NO: 1796823 - RNA, 18 nt, Human
cagaauucucuaguuuga

SEQ ID NO: 1796824 - RNA, 15 nt, Human
cagaauucucuaguu

SEQ ID NO: 1796825 - RNA, 22 nt, Human
cagaacccuuggagccaaugga

SEQ ID NO: 1796826 - RNA, 21 nt, Human
cagaagacacugaugggcaac

SEQ ID NO: 1796827 - RNA, 14 nt, Human
cagaagcagcucuu

SEQ ID NO: 1796828 - RNA, 13 nt, Human
cagaagcagcucu

SEQ ID NO: 1796829 - RNA, 20 nt, Human
cagaagcaacccaaauguuc

SEQ ID NO: 1796830 - RNA, 19 nt, Human
cagaagcaacccaaauguu

SEQ ID NO: 1796831 - RNA, 19 nt, Human
cagaaggaagacuucaucc

SEQ ID NO: 1796832 - RNA, 16 nt, Human
cagaaggaagacuuca

SEQ ID NO: 1796833 - RNA, 17 nt, Human
cagaaggaagacuucau

SEQ ID NO: 1796834 - RNA, 18 nt, Human
cagaaggaagacuucauc

SEQ ID NO: 1796835 - RNA, 17 nt, Human
cagaaucucaaauaacu

SEQ ID NO: 1796836 - RNA, 18 nt, Human
cagaaucucaaauaacua

SEQ ID NO: 1796837 - RNA, 14 nt, Human
cacuuuuguucuug

SEQ ID NO: 1796838 - RNA, 22 nt, Human
cacuuuuguucuugguuuguaa

SEQ ID NO: 1796839 - RNA, 18 nt, Human
cacuuuuauuuagcacca

SEQ ID NO: 1796840 - RNA, 12 nt, Human
cacuuugcauaa

SEQ ID NO: 1796841 - RNA, 22 nt, Human
cacuuucuagccagaggagaga

SEQ ID NO: 1796842 - RNA, 16 nt, Human
cacuuugggaggccaa

SEQ ID NO: 1796843 - RNA, 12 nt, Human
cacuuugggagg

SEQ ID NO: 1796844 - RNA, 13 nt, Human
cacuuugggaggc

SEQ ID NO: 1796845 - RNA, 13 nt, Human
cacuuuguucugg

SEQ ID NO: 1796846 - RNA, 14 nt, Human
cacuuuguucuggc

SEQ ID NO: 1796847 - RNA, 16 nt, Human
cacuuuguucuggcuc

SEQ ID NO: 1796848 - RNA, 23 nt, Human
cacuuuguucuggcucuuccagg

SEQ ID NO: 1796849 - RNA, 24 nt, Human
cagaaagaaguggggacagagcag

SEQ ID NO: 1796850 - RNA, 18 nt, Human
cagaaagcagaacaguga

SEQ ID NO: 1796851 - RNA, 19 nt, Human
cagaaagcagaacagugau

SEQ ID NO: 1796852 - RNA, 23 nt, Human
cagaacagugauuaccagggacu

SEQ ID NO: 1796853 - RNA, 16 nt, Human
cagaaaauggaagaca

SEQ ID NO: 1796854 - RNA, 20 nt, Human
cagaaaauggaagacagcuc

SEQ ID NO: 1796855 - RNA, 21 nt, Human
cagaaaauggaagacagcucu

SEQ ID NO: 1796856 - RNA, 22 nt, Human
cagaaaauggaagacagcucuu

SEQ ID NO: 1796857 - RNA, 23 nt, Human
cagaaaauggaagacagcucuua

SEQ ID NO: 1796858 - RNA, 16 nt, Human
cagacaacaaaccugu

SEQ ID NO: 1796859 - RNA, 16 nt, Human
cagaugcaccagcccu

SEQ ID NO: 1796860 - RNA, 14 nt, Human
cagaugcaccagcc

SEQ ID NO: 1796861 - RNA, 13 nt, Human
cagaugcaccagc

SEQ ID NO: 1796862 - RNA, 22 nt, Human
cagaugcaccagcccuuagcag

SEQ ID NO: 1796863 - RNA, 17 nt, Human
cagaugcaccagcccuu

SEQ ID NO: 1796864 - RNA, 22 nt, Human
cagauacaggaaaagcugcuga

SEQ ID NO: 1796865 - RNA, 21 nt, Human
cagauacaggaaaagcugcug

SEQ ID NO: 1796866 - RNA, 20 nt, Human
cagauacaggaaaagcugcu

SEQ ID NO: 1796867 - RNA, 20 nt, Human
cagaucucuaacuucaccau

SEQ ID NO: 1796868 - RNA, 19 nt, Human
cagaguuguuacauuuuua

SEQ ID NO: 1796869 - RNA, 18 nt, Human
cagaguuguuacauuuuu

SEQ ID NO: 1796870 - RNA, 15 nt, Human
cagaguuguuacauu

SEQ ID NO: 1796871 - RNA, 14 nt, Human
cagauaaacaguag

SEQ ID NO: 1796872 - RNA, 22 nt, Human
cagauaaagguucaugcaaacu

SEQ ID NO: 1796873 - RNA, 23 nt, Human
cagauaaauaguuuaugauucca

SEQ ID NO: 1796874 - RNA, 22 nt, Human
cagaguugaagacagagcuaca

SEQ ID NO: 1796875 - RNA, 14 nt, Human
cagaguuguuacau

SEQ ID NO: 1796876 - RNA, 17 nt, Human
cagaguugaagacagag

SEQ ID NO: 1796877 - RNA, 18 nt, Human
cagaguugaagacagagc

SEQ ID NO: 1796878 - RNA, 19 nt, Human
cagaguugaagacagagcu

SEQ ID NO: 1796879 - RNA, 20 nt, Human
cagaguugaagacagagcua

SEQ ID NO: 1796880 - RNA, 14 nt, Human
cagaguugaagaca

SEQ ID NO: 1796881 - RNA, 15 nt, Human
cagaguugaagacag

SEQ ID NO: 1796882 - RNA, 16 nt, Human
cagaguugaagacaga

SEQ ID NO: 1796883 - RNA, 20 nt, Human
cagagugagacucugucuca

SEQ ID NO: 1796884 - RNA, 19 nt, Human
cagagugagacucugucuc

SEQ ID NO: 1796885 - RNA, 18 nt, Human
cagagugagacucugucu

SEQ ID NO: 1796886 - RNA, 17 nt, Human
cagagugagacucuguc

SEQ ID NO: 1796887 - RNA, 16 nt, Human
cagagugagacucugu

SEQ ID NO: 1796888 - RNA, 23 nt, Human
cagagucucacuguugcccaggc

SEQ ID NO: 1796889 - RNA, 22 nt, Human
cagagucucacuguugcccagg

SEQ ID NO: 1796890 - RNA, 23 nt, Human
cagagucucgcucuguugcccag

SEQ ID NO: 1796891 - RNA, 23 nt, Human
cagagggagugacagaggcagcc

SEQ ID NO: 1796892 - RNA, 22 nt, Human
cagagggagugacagaggcagc

SEQ ID NO: 1796893 - RNA, 21 nt, Human
cagagggagugacagaggcag

SEQ ID NO: 1796894 - RNA, 20 nt, Human
cagagggagugacagaggca

SEQ ID NO: 1796895 - RNA, 15 nt, Human
cagagggccugcaag

SEQ ID NO: 1796896 - RNA, 19 nt, Human
cagagggccugcaagggag

SEQ ID NO: 1796897 - RNA, 21 nt, Human
cagagucucacuguugcccag

SEQ ID NO: 1796898 - RNA, 20 nt, Human
cagagucucacuguugccca

SEQ ID NO: 1796899 - RNA, 19 nt, Human
cagagucucacuguugccc

SEQ ID NO: 1796900 - RNA, 17 nt, Human
cagagucucacuguugc

SEQ ID NO: 1796901 - RNA, 13 nt, Human
cagagucucacug

SEQ ID NO: 1796902 - RNA, 22 nt, Human
cagaggcagccccauucugccu

SEQ ID NO: 1796903 - RNA, 20 nt, Human
cagaggcagccccauucugc

SEQ ID NO: 1796904 - RNA, 19 nt, Human
cagaggcagccccauucug

SEQ ID NO: 1796905 - RNA, 18 nt, Human
cagaggcagccccauucu

SEQ ID NO: 1796906 - RNA, 15 nt, Human
cagaggcagccccau

SEQ ID NO: 1796907 - RNA, 14 nt, Human
cagaggcagcccca

SEQ ID NO: 1796908 - RNA, 13 nt, Human
cagaggcagcccc

SEQ ID NO: 1796909 - RNA, 12 nt, Human
cagaggcagccc

SEQ ID NO: 1796910 - RNA, 21 nt, Human
cagaggccaugggccuccugu

SEQ ID NO: 1796911 - RNA, 20 nt, Human
cagaggccaugggccuccug

SEQ ID NO: 1796912 - RNA, 16 nt, Human
cagaggccaugggccu

SEQ ID NO: 1796913 - RNA, 19 nt, Human
cagaggccaugggccuccu

SEQ ID NO: 1796914 - RNA, 23 nt, Human
cagaggcagccccauucugccug

SEQ ID NO: 1796915 - RNA, 19 nt, Human
cagagggagugacagaggc

SEQ ID NO: 1796916 - RNA, 18 nt, Human
cagagggagugacagagg

SEQ ID NO: 1796917 - RNA, 16 nt, Human
cagagggagugacaga

SEQ ID NO: 1796918 - RNA, 14 nt, Human
cagagggagugaca

SEQ ID NO: 1796919 - RNA, 23 nt, Human
cagaggcugccucucccaucacu

SEQ ID NO: 1796920 - RNA, 23 nt, Human
cagaggcgcaugaauuugugaag

SEQ ID NO: 1796921 - RNA, 21 nt, Human
cagaggcucagauuguaauau

SEQ ID NO: 1796922 - RNA, 13 nt, Human
cagaggcugccuc

SEQ ID NO: 1796923 - RNA, 13 nt, Human
cagagaguggcuc

SEQ ID NO: 1796924 - RNA, 14 nt, Human
cagagaguggcucc

SEQ ID NO: 1796925 - RNA, 15 nt, Human
cagagaguggcuccu

SEQ ID NO: 1796926 - RNA, 18 nt, Human
cagagaguggcuccuccc

SEQ ID NO: 1796927 - RNA, 18 nt, Human
cagagcacagcagccccu

SEQ ID NO: 1796928 - RNA, 16 nt, Human
cagagcaccuuagaca

SEQ ID NO: 1796929 - RNA, 14 nt, Human
cagagcaagugaga

SEQ ID NO: 1796930 - RNA, 20 nt, Human
cagagcaagugagacccugu

SEQ ID NO: 1796931 - RNA, 21 nt, Human
cagagaccaucccugaaggcc

SEQ ID NO: 1796932 - RNA, 17 nt, Human
cagagaccaucccugaa

SEQ ID NO: 1796933 - RNA, 18 nt, Human
cagagaccaucccugaag

SEQ ID NO: 1796934 - RNA, 19 nt, Human
cagagaccaucccugaagg

SEQ ID NO: 1796935 - RNA, 20 nt, Human
cagagaccaucccugaaggc

SEQ ID NO: 1796936 - RNA, 13 nt, Human
cagagacuccugc

SEQ ID NO: 1796937 - RNA, 14 nt, Human
cagagacuccugca

SEQ ID NO: 1796938 - RNA, 15 nt, Human
cagagacuccugcag

SEQ ID NO: 1796939 - RNA, 16 nt, Human
cagagacuccugcagg

SEQ ID NO: 1796940 - RNA, 17 nt, Human
cagagacuccugcaggc

SEQ ID NO: 1796941 - RNA, 18 nt, Human
cagagacuccugcaggca

SEQ ID NO: 1796942 - RNA, 19 nt, Human
cagagacuccugcaggcag

SEQ ID NO: 1796943 - RNA, 21 nt, Human
cagagaaugaaagggcccaga

SEQ ID NO: 1796944 - RNA, 20 nt, Human
cagagaaugaaagggcccag

SEQ ID NO: 1796945 - RNA, 15 nt, Human
cagagaauucucuua

SEQ ID NO: 1796946 - RNA, 19 nt, Human
cagagaaugaaagggccca

SEQ ID NO: 1796947 - RNA, 16 nt, Human
cagagacacaagccuu

SEQ ID NO: 1796948 - RNA, 17 nt, Human
cagagacacaagccuuc

SEQ ID NO: 1796949 - RNA, 14 nt, Human
cagagacacaagcc

SEQ ID NO: 1796950 - RNA, 15 nt, Human
cagagacacaagccu

SEQ ID NO: 1796951 - RNA, 13 nt, Human
cagagaccauccc

SEQ ID NO: 1796952 - RNA, 14 nt, Human
cagagaccaucccu

SEQ ID NO: 1796953 - RNA, 16 nt, Human
cagagaccaucccuga

SEQ ID NO: 1796954 - RNA, 13 nt, Human
cagaggagagagg

SEQ ID NO: 1796955 - RNA, 15 nt, Human
cagaggagagaggac

SEQ ID NO: 1796956 - RNA, 19 nt, Human
cagaggagagaggaccccc

SEQ ID NO: 1796957 - RNA, 17 nt, Human
cagaggacacagagaag

SEQ ID NO: 1796958 - RNA, 15 nt, Human
cagaggacacagaga

SEQ ID NO: 1796959 - RNA, 11 nt, Human
cagaggcagcc

SEQ ID NO: 1796960 - RNA, 20 nt, Human
cagaggagagaggacccccu

SEQ ID NO: 1796961 - RNA, 13 nt, Human
cagagccugcagu

SEQ ID NO: 1796962 - RNA, 13 nt, Human
cagaggaaggaga

SEQ ID NO: 1796963 - RNA, 12 nt, Human
cagagccugcag

SEQ ID NO: 1796964 - RNA, 23 nt, Human
cagagcccacgcccccacuggug

SEQ ID NO: 1796965 - RNA, 17 nt, Human
cagagcccacgccccca

SEQ ID NO: 1796966 - RNA, 19 nt, Human
cagagcccacgcccccacu

SEQ ID NO: 1796967 - RNA, 20 nt, Human
cagagcccacgcccccacug

SEQ ID NO: 1796968 - RNA, 21 nt, Human
cagagcccacgcccccacugg

SEQ ID NO: 1796969 - RNA, 20 nt, Human
cagagcccaccuuggcucaa

SEQ ID NO: 1796970 - RNA, 16 nt, Human
cagagcccacgccccc

SEQ ID NO: 1796971 - RNA, 19 nt, Human
cagagcccaccuuggcuca

SEQ ID NO: 1796972 - RNA, 17 nt, Human
cagagcccaccuuggcu

SEQ ID NO: 1796973 - RNA, 15 nt, Human
cagagcccaccuugg

SEQ ID NO: 1796974 - RNA, 22 nt, Human
cagagccaccccuaaagagaua

SEQ ID NO: 1796975 - RNA, 23 nt, Human
cagagcaccuuagacagucccug

SEQ ID NO: 1796976 - RNA, 11 nt, Human
cagagcagaga

SEQ ID NO: 1796977 - RNA, 12 nt, Human
cagagcagagac

SEQ ID NO: 1796978 - RNA, 18 nt, Human
cagagcaccuuagacagu

SEQ ID NO: 1796979 - RNA, 19 nt, Human
cagagcaccuuagacaguc

SEQ ID NO: 1796980 - RNA, 21 nt, Human
cagagcaccuuagacaguccc

SEQ ID NO: 1796981 - RNA, 22 nt, Human
cagagcaccuuagacagucccu

SEQ ID NO: 1796982 - RNA, 13 nt, Human
cagagcagagacc

SEQ ID NO: 1796983 - RNA, 14 nt, Human
cagagcagagacca

SEQ ID NO: 1796984 - RNA, 15 nt, Human
cagagcagagaccau

SEQ ID NO: 1796985 - RNA, 17 nt, Human
cagagcagagaccaucc

SEQ ID NO: 1796986 - RNA, 18 nt, Human
cagagcagagaccauccc

SEQ ID NO: 1796987 - RNA, 19 nt, Human
cagagcagagaccaucccu

SEQ ID NO: 1796988 - RNA, 21 nt, Human
cagagcagagaccaucccuga

SEQ ID NO: 1796989 - RNA, 14 nt, Human
caccggcuggccug

SEQ ID NO: 1796990 - RNA, 15 nt, Human
caccggcuggccugg

SEQ ID NO: 1796991 - RNA, 16 nt, Human
caccggcuggccuggc

SEQ ID NO: 1796992 - RNA, 14 nt, Human
caccgggcacucag

SEQ ID NO: 1796993 - RNA, 20 nt, Human
caccggcuggccuggccccu

SEQ ID NO: 1796994 - RNA, 17 nt, Human
caccggcuggccuggcc

SEQ ID NO: 1796995 - RNA, 18 nt, Human
caccggcuggccuggccc

SEQ ID NO: 1796996 - RNA, 21 nt, Human
caccgcagacaggaccaggga

SEQ ID NO: 1796997 - RNA, 18 nt, Human
caccgggccacagagaaa

SEQ ID NO: 1796998 - RNA, 15 nt, Human
caccgggccacagag

SEQ ID NO: 1796999 - RNA, 22 nt, Human
caccgggcacucagaagacacu

SEQ ID NO: 1797000 - RNA, 15 nt, Human
caccgggcacucaga

SEQ ID NO: 1797001 - RNA, 15 nt, Human
caccggggccucgga

SEQ ID NO: 1797002 - RNA, 13 nt, Human
caccgggccugga

SEQ ID NO: 1797003 - RNA, 15 nt, Human
caccgugccuggcca

SEQ ID NO: 1797004 - RNA, 20 nt, Human
caccgugccuggccacgccc

SEQ ID NO: 1797005 - RNA, 14 nt, Human
caccucccccaucu

SEQ ID NO: 1797006 - RNA, 21 nt, Human
caccucccccaucucuucugg

SEQ ID NO: 1797007 - RNA, 11 nt, Human
caccuccugcc

SEQ ID NO: 1797008 - RNA, 13 nt, Human
caccuccugccuc

SEQ ID NO: 1797009 - RNA, 14 nt, Human
caccuccugccucg

SEQ ID NO: 1797010 - RNA, 13 nt, Human
caccucucccuug

SEQ ID NO: 1797011 - RNA, 14 nt, Human
caccucucccuugg

SEQ ID NO: 1797012 - RNA, 17 nt, Human
caccucucccuuggauu

SEQ ID NO: 1797013 - RNA, 15 nt, Human
caccugaagacucau

SEQ ID NO: 1797014 - RNA, 14 nt, Human
caccugaagacuca

SEQ ID NO: 1797015 - RNA, 23 nt, Human
caccugaagacucauucuucugu

SEQ ID NO: 1797016 - RNA, 15 nt, Human
caccucucucacucc

SEQ ID NO: 1797017 - RNA, 17 nt, Human
caccucucucacuccuu

SEQ ID NO: 1797018 - RNA, 18 nt, Human
caccucucucacuccuug

SEQ ID NO: 1797019 - RNA, 19 nt, Human
caccucucucacuccuuga

SEQ ID NO: 1797020 - RNA, 18 nt, Human
caccucugcacaagcugc

SEQ ID NO: 1797021 - RNA, 19 nt, Human
caccucugcacaagcugca

SEQ ID NO: 1797022 - RNA, 23 nt, Human
caccugcggugcuaucuccccca

SEQ ID NO: 1797023 - RNA, 20 nt, Human
caccuggaauauauaaccag

SEQ ID NO: 1797024 - RNA, 23 nt, Human
caccuggccucugcacuccccug

SEQ ID NO: 1797025 - RNA, 17 nt, Human
caccuggccucugcacu

SEQ ID NO: 1797026 - RNA, 18 nt, Human
caccuggccucugcacuc

SEQ ID NO: 1797027 - RNA, 19 nt, Human
caccuggccucugcacucc

SEQ ID NO: 1797028 - RNA, 20 nt, Human
caccuggccucugcacuccc

SEQ ID NO: 1797029 - RNA, 12 nt, Human
caccuggccucu

SEQ ID NO: 1797030 - RNA, 13 nt, Human
caccuggccucug

SEQ ID NO: 1797031 - RNA, 14 nt, Human
caccuggccucugc

SEQ ID NO: 1797032 - RNA, 15 nt, Human
caccuggccucugca

SEQ ID NO: 1797033 - RNA, 13 nt, Human
cacauauugauuu

SEQ ID NO: 1797034 - RNA, 20 nt, Human
caccccucaacaccucugca

SEQ ID NO: 1797035 - RNA, 21 nt, Human
cacccggccccugcugguuca

SEQ ID NO: 1797036 - RNA, 18 nt, Human
cacccggccccugcuggu

SEQ ID NO: 1797037 - RNA, 17 nt, Human
cacccggccccugcugg

SEQ ID NO: 1797038 - RNA, 16 nt, Human
cacccggccccugcug

SEQ ID NO: 1797039 - RNA, 14 nt, Human
cacccggccccugc

SEQ ID NO: 1797040 - RNA, 13 nt, Human
cacccggccccug

SEQ ID NO: 1797041 - RNA, 12 nt, Human
cacccggccccu

SEQ ID NO: 1797042 - RNA, 19 nt, Human
cacccgcuaagagggaggg

SEQ ID NO: 1797043 - RNA, 22 nt, Human
caccgaaaacguggcugcuuca

SEQ ID NO: 1797044 - RNA, 19 nt, Human
caccgaaaacguggcugcu

SEQ ID NO: 1797045 - RNA, 21 nt, Human
caccgaaaacguggcugcuuc

SEQ ID NO: 1797046 - RNA, 15 nt, Human
caccgaaaacguggc

SEQ ID NO: 1797047 - RNA, 18 nt, Human
caccgaaaacguggcugc

SEQ ID NO: 1797048 - RNA, 12 nt, Human
caccgcagacag

SEQ ID NO: 1797049 - RNA, 13 nt, Human
caccgcagacagg

SEQ ID NO: 1797050 - RNA, 14 nt, Human
caccgcagacagga

SEQ ID NO: 1797051 - RNA, 15 nt, Human
caccgcagacaggac

SEQ ID NO: 1797052 - RNA, 17 nt, Human
caccgcagacaggacca

SEQ ID NO: 1797053 - RNA, 18 nt, Human
caccgcagacaggaccag

SEQ ID NO: 1797054 - RNA, 11 nt, Human
cacccugugau

SEQ ID NO: 1797055 - RNA, 12 nt, Human
cacccugugaug

SEQ ID NO: 1797056 - RNA, 15 nt, Human
cacccugugaugggg

SEQ ID NO: 1797057 - RNA, 18 nt, Human
cacccugugauggggccc

SEQ ID NO: 1797058 - RNA, 20 nt, Human
cacccugugauggggcccug

SEQ ID NO: 1797059 - RNA, 21 nt, Human
cacccugugauggggcccugc

SEQ ID NO: 1797060 - RNA, 22 nt, Human
cacccugugauggggcccugcc

SEQ ID NO: 1797061 - RNA, 23 nt, Human
cacccugugauggggcccugccu

SEQ ID NO: 1797062 - RNA, 20 nt, Human
cacauauugauuuccguuaa

SEQ ID NO: 1797063 - RNA, 16 nt, Human
cacgccagauucuuuc

SEQ ID NO: 1797064 - RNA, 14 nt, Human
cacucuacuuagca

SEQ ID NO: 1797065 - RNA, 12 nt, Human
cacucuggcagc

SEQ ID NO: 1797066 - RNA, 13 nt, Human
cacucuggcagcu

SEQ ID NO: 1797067 - RNA, 14 nt, Human
cacucuggcagcuc

SEQ ID NO: 1797068 - RNA, 12 nt, Human
cacucuccuugg

SEQ ID NO: 1797069 - RNA, 12 nt, Human
cacucugagacu

SEQ ID NO: 1797070 - RNA, 23 nt, Human
cacucugagacucgcgacaaugc

SEQ ID NO: 1797071 - RNA, 14 nt, Human
cacuccuucacaga

SEQ ID NO: 1797072 - RNA, 21 nt, Human
cacuccuucacagaugggugc

SEQ ID NO: 1797073 - RNA, 17 nt, Human
cacucccugcaaccuga

SEQ ID NO: 1797074 - RNA, 13 nt, Human
cacuccuaccugg

SEQ ID NO: 1797075 - RNA, 14 nt, Human
cacuccuaccuggu

SEQ ID NO: 1797076 - RNA, 16 nt, Human
cacucaguccauagca

SEQ ID NO: 1797077 - RNA, 16 nt, Human
cacucaggucuguuuu

SEQ ID NO: 1797078 - RNA, 15 nt, Human
cacucauugaccuga

SEQ ID NO: 1797079 - RNA, 18 nt, Human
cacucauugaccugaggc

SEQ ID NO: 1797080 - RNA, 19 nt, Human
cacucauugaccugaggcc

SEQ ID NO: 1797081 - RNA, 20 nt, Human
cacucauugaccugaggccc

SEQ ID NO: 1797082 - RNA, 22 nt, Human
cacucauugaccugaggcccuu

SEQ ID NO: 1797083 - RNA, 12 nt, Human
cacucccugcaa

SEQ ID NO: 1797084 - RNA, 13 nt, Human
cacucccugcaac

SEQ ID NO: 1797085 - RNA, 16 nt, Human
cacucccugcaaccug

SEQ ID NO: 1797086 - RNA, 18 nt, Human
cacuaaccacgcuggacc

SEQ ID NO: 1797087 - RNA, 18 nt, Human
cacuaaggugugcucuga

SEQ ID NO: 1797088 - RNA, 17 nt, Human
cacuaaggugugcucug

SEQ ID NO: 1797089 - RNA, 16 nt, Human
cacuaaccacgcugga

SEQ ID NO: 1797090 - RNA, 15 nt, Human
cacuaaccacgcugg

SEQ ID NO: 1797091 - RNA, 14 nt, Human
cacuaaccacgcug

SEQ ID NO: 1797092 - RNA, 16 nt, Human
cacuaacaugauuugg

SEQ ID NO: 1797093 - RNA, 21 nt, Human
cacuaaauugacacuuaaaaa

SEQ ID NO: 1797094 - RNA, 21 nt, Human
cacuauagccuaggugacaga

SEQ ID NO: 1797095 - RNA, 14 nt, Human
cacuauagccuagg

SEQ ID NO: 1797096 - RNA, 18 nt, Human
cacuauaauguaagcucu

SEQ ID NO: 1797097 - RNA, 14 nt, Human
cacuauaauguaag

SEQ ID NO: 1797098 - RNA, 19 nt, Human
cacuauguugcccaggcag

SEQ ID NO: 1797099 - RNA, 18 nt, Human
cacuauguugcccaggca

SEQ ID NO: 1797100 - RNA, 17 nt, Human
cacuauguugcccaggc

SEQ ID NO: 1797101 - RNA, 16 nt, Human
cacuauguugcccagg

SEQ ID NO: 1797102 - RNA, 15 nt, Human
cacuauguugcccag

SEQ ID NO: 1797103 - RNA, 18 nt, Human
cacuaucccggcugcccu

SEQ ID NO: 1797104 - RNA, 19 nt, Human
cacuaucccggcugcccuu

SEQ ID NO: 1797105 - RNA, 21 nt, Human
cacuauguugcccaggcaggu

SEQ ID NO: 1797106 - RNA, 20 nt, Human
cacuauguugcccaggcagg

SEQ ID NO: 1797107 - RNA, 15 nt, Human
cacucaaaagcuggg

SEQ ID NO: 1797108 - RNA, 17 nt, Human
cacucaaaagcugggca

SEQ ID NO: 1797109 - RNA, 18 nt, Human
cacucaaaagcugggcag

SEQ ID NO: 1797110 - RNA, 19 nt, Human
cacucaaaagcugggcagg

SEQ ID NO: 1797111 - RNA, 20 nt, Human
cacucaaaagcugggcaggu

SEQ ID NO: 1797112 - RNA, 17 nt, Human
cacucagaagacacuga

SEQ ID NO: 1797113 - RNA, 16 nt, Human
cacucagaagacacug

SEQ ID NO: 1797114 - RNA, 12 nt, Human
cacucagaagac

SEQ ID NO: 1797115 - RNA, 20 nt, Human
cacucacauuuauucugcuc

SEQ ID NO: 1797116 - RNA, 19 nt, Human
cacucacauuuauucugcu

SEQ ID NO: 1797117 - RNA, 19 nt, Human
cacucagaagacacugaug

SEQ ID NO: 1797118 - RNA, 18 nt, Human
cacucagaagacacugau

SEQ ID NO: 1797119 - RNA, 22 nt, Human
cacucagaagacacugaugggc

SEQ ID NO: 1797120 - RNA, 13 nt, Human
cacuaaacaaaga

SEQ ID NO: 1797121 - RNA, 23 nt, Human
cacguuucuaaaggcuaccuuug

SEQ ID NO: 1797122 - RNA, 14 nt, Human
cacguuucuaaagg

SEQ ID NO: 1797123 - RNA, 12 nt, Human
cacguuucuaaa

SEQ ID NO: 1797124 - RNA, 22 nt, Human
cacguucuuacuaguuucccuu

SEQ ID NO: 1797125 - RNA, 16 nt, Human
cacgugguccuaaucu

SEQ ID NO: 1797126 - RNA, 19 nt, Human
cacgugguccuaaucuucu

SEQ ID NO: 1797127 - RNA, 14 nt, Human
cacguacacacaca

SEQ ID NO: 1797128 - RNA, 19 nt, Human
cacguacacacacauacac

SEQ ID NO: 1797129 - RNA, 18 nt, Human
cacguacacacacauaca

SEQ ID NO: 1797130 - RNA, 13 nt, Human
cacgugacagccg

SEQ ID NO: 1797131 - RNA, 20 nt, Human
cacggcucacugcagccuca

SEQ ID NO: 1797132 - RNA, 19 nt, Human
cacggcucacugcagccuc

SEQ ID NO: 1797133 - RNA, 17 nt, Human
cacggcucacugcagcc

SEQ ID NO: 1797134 - RNA, 16 nt, Human
cacggcucacugcagc

SEQ ID NO: 1797135 - RNA, 17 nt, Human
cacgcuggaccuugaac

SEQ ID NO: 1797136 - RNA, 14 nt, Human
cacgcuccuuccuc

SEQ ID NO: 1797137 - RNA, 20 nt, Human
cacgcuggaccuugaacugg

SEQ ID NO: 1797138 - RNA, 15 nt, Human
cacgggggccaagga

SEQ ID NO: 1797139 - RNA, 21 nt, Human
cacgcgugcacacaccagagc

SEQ ID NO: 1797140 - RNA, 16 nt, Human
cacgcgugcacacacc

SEQ ID NO: 1797141 - RNA, 15 nt, Human
cacgcgugcacacac

SEQ ID NO: 1797142 - RNA, 23 nt, Human
cacgcgugcacacaccagagccc

SEQ ID NO: 1797143 - RNA, 19 nt, Human
cacgccuguaauccuagca

SEQ ID NO: 1797144 - RNA, 20 nt, Human
cacgccuguaauccuagcac

SEQ ID NO: 1797145 - RNA, 14 nt, Human
caccuuagacaguc

SEQ ID NO: 1797146 - RNA, 16 nt, Human
caccuuagacaguccc

SEQ ID NO: 1797147 - RNA, 18 nt, Human
caccuuagacagucccug

SEQ ID NO: 1797148 - RNA, 19 nt, Human
caccuuagacagucccugc

SEQ ID NO: 1797149 - RNA, 22 nt, Human
caccuuagccugcccuccuuuc

SEQ ID NO: 1797150 - RNA, 21 nt, Human
caccuuagacagucccugcca

SEQ ID NO: 1797151 - RNA, 23 nt, Human
caccuuagacagucccugccaau

SEQ ID NO: 1797152 - RNA, 17 nt, Human
cacgacugcccggcagg

SEQ ID NO: 1797153 - RNA, 16 nt, Human
cacgacugcccggcag

SEQ ID NO: 1797154 - RNA, 16 nt, Human
cacgaauauugcugau

SEQ ID NO: 1797155 - RNA, 19 nt, Human
cacgaauauugcugauggu

SEQ ID NO: 1797156 - RNA, 22 nt, Human
cacgaauauugcugauggugca

SEQ ID NO: 1797157 - RNA, 13 nt, Human
caccuugacaggg

SEQ ID NO: 1797158 - RNA, 13 nt, Human
caccuucccaugc

SEQ ID NO: 1797159 - RNA, 14 nt, Human
caccuucccaugcc

SEQ ID NO: 1797160 - RNA, 16 nt, Human
caccuugacagggcac

SEQ ID NO: 1797161 - RNA, 15 nt, Human
caccuugacagggca

SEQ ID NO: 1797162 - RNA, 18 nt, Human
caccuugacagggcacac

SEQ ID NO: 1797163 - RNA, 17 nt, Human
cacgcacuucgggaggu

SEQ ID NO: 1797164 - RNA, 16 nt, Human
cacgauuucuguuuag

SEQ ID NO: 1797165 - RNA, 14 nt, Human
cacgauuucuguuu

SEQ ID NO: 1797166 - RNA, 12 nt, Human
cacgauuucugu

SEQ ID NO: 1797167 - RNA, 15 nt, Human
cacgccacugcacua

SEQ ID NO: 1797168 - RNA, 19 nt, Human
cacgccagauucuuuccug

SEQ ID NO: 1797169 - RNA, 20 nt, Human
cacgccagauucuuuccuga

SEQ ID NO: 1797170 - RNA, 22 nt, Human
cacgccagauucuuuccugagg

SEQ ID NO: 1797171 - RNA, 13 nt, Human
cacgccacugcac

SEQ ID NO: 1797172 - RNA, 23 nt, Human
cacgccagauucuuuccugaggc

SEQ ID NO: 1797173 - RNA, 13 nt, Human
cacgcccccacug

SEQ ID NO: 1797174 - RNA, 15 nt, Human
cacgcccccacuggu

SEQ ID NO: 1797175 - RNA, 17 nt, Human
cacgcccccacugguga

SEQ ID NO: 1797176 - RNA, 18 nt, Human
cacgcccccacuggugac

SEQ ID NO: 1797177 - RNA, 14 nt, Human
cacuguugcccagg

SEQ ID NO: 1797178 - RNA, 23 nt, Human
cacuucaggcucuucuccuuuca

SEQ ID NO: 1797179 - RNA, 14 nt, Human
cacuucaggcucuu

SEQ ID NO: 1797180 - RNA, 15 nt, Human
cacuucaggcucuuc

SEQ ID NO: 1797181 - RNA, 16 nt, Human
cacuucaggcucuucu

SEQ ID NO: 1797182 - RNA, 20 nt, Human
cacuucaggcucuucuccuu

SEQ ID NO: 1797183 - RNA, 12 nt, Human
cacuucagcuga

SEQ ID NO: 1797184 - RNA, 21 nt, Human
cacuucagcugacuuuucugu

SEQ ID NO: 1797185 - RNA, 21 nt, Human
cacuucgggaggucgaggcag

SEQ ID NO: 1797186 - RNA, 23 nt, Human
cacuucgggaggucgaggcagga

SEQ ID NO: 1797187 - RNA, 22 nt, Human
cacuucugccauauucuguugg

SEQ ID NO: 1797188 - RNA, 20 nt, Human
cacuuccauaaucuggacuc

SEQ ID NO: 1797189 - RNA, 16 nt, Human
cacuucccuacaugga

SEQ ID NO: 1797190 - RNA, 22 nt, Human
cacuugcagacucuacagaggc

SEQ ID NO: 1797191 - RNA, 19 nt, Human
cacuugcagacucuacaga

SEQ ID NO: 1797192 - RNA, 18 nt, Human
cacuugcagacucuacag

SEQ ID NO: 1797193 - RNA, 14 nt, Human
cacuugcagacucu

SEQ ID NO: 1797194 - RNA, 24 nt, Human
cacuugcagacucuacagaggcca

SEQ ID NO: 1797195 - RNA, 19 nt, Human
cacuuucuagccagaggag

SEQ ID NO: 1797196 - RNA, 20 nt, Human
cacuuucuagccagaggaga

SEQ ID NO: 1797197 - RNA, 15 nt, Human
cacuuggucugugag

SEQ ID NO: 1797198 - RNA, 13 nt, Human
cacuugcagacuc

SEQ ID NO: 1797199 - RNA, 19 nt, Human
cacuugaugacccccaacc

SEQ ID NO: 1797200 - RNA, 13 nt, Human
cacuugaguccag

SEQ ID NO: 1797201 - RNA, 19 nt, Human
cacuugacaucaacugcau

SEQ ID NO: 1797202 - RNA, 17 nt, Human
cacuugagaauuacccu

SEQ ID NO: 1797203 - RNA, 20 nt, Human
cacuugagaauuacccuuuu

SEQ ID NO: 1797204 - RNA, 16 nt, Human
cacuugacaucaacug

SEQ ID NO: 1797205 - RNA, 23 nt, Human
cacuugaacccgggaggcagagg

SEQ ID NO: 1797206 - RNA, 21 nt, Human
cacuugaacccgggaggcaga

SEQ ID NO: 1797207 - RNA, 20 nt, Human
cacuugaacccgggaggcag

SEQ ID NO: 1797208 - RNA, 16 nt, Human
cacugugccaugugcc

SEQ ID NO: 1797209 - RNA, 15 nt, Human
cacugugccaugugc

SEQ ID NO: 1797210 - RNA, 18 nt, Human
cacugugccaugugccag

SEQ ID NO: 1797211 - RNA, 13 nt, Human
cacugugcugagu

SEQ ID NO: 1797212 - RNA, 15 nt, Human
cacugugcugagucu

SEQ ID NO: 1797213 - RNA, 17 nt, Human
cacugugcugagucuga

SEQ ID NO: 1797214 - RNA, 20 nt, Human
cacugugcugagucugaagg

SEQ ID NO: 1797215 - RNA, 21 nt, Human
cacugugcugagucugaaggc

SEQ ID NO: 1797216 - RNA, 22 nt, Human
cacugugcugagucugaaggcu

SEQ ID NO: 1797217 - RNA, 13 nt, Human
cacuguucucugc

SEQ ID NO: 1797218 - RNA, 14 nt, Human
cacuguucucugcc

SEQ ID NO: 1797219 - RNA, 15 nt, Human
cacuguucucugccc

SEQ ID NO: 1797220 - RNA, 16 nt, Human
cacuguucucugcccu

SEQ ID NO: 1797221 - RNA, 17 nt, Human
cacuguucucugcccuc

SEQ ID NO: 1797222 - RNA, 19 nt, Human
cacuguucucugcccucca

SEQ ID NO: 1797223 - RNA, 21 nt, Human
cacuguucucugcccuccaag

SEQ ID NO: 1797224 - RNA, 22 nt, Human
cacuguucucugcccuccaaga

SEQ ID NO: 1797225 - RNA, 14 nt, Human
cacugugccaugug

SEQ ID NO: 1797226 - RNA, 13 nt, Human
cacugugaagaga

SEQ ID NO: 1797227 - RNA, 15 nt, Human
cacuguacuugcucu

SEQ ID NO: 1797228 - RNA, 18 nt, Human
cacuguacuugcucuuga

SEQ ID NO: 1797229 - RNA, 19 nt, Human
cacuguacuugcucuugau

SEQ ID NO: 1797230 - RNA, 23 nt, Human
cacugagaccccaggcuguuagg

SEQ ID NO: 1797231 - RNA, 23 nt, Human
cacugagacagcccgggcucugc

SEQ ID NO: 1797232 - RNA, 24 nt, Human
cacugaugggcaacccccagccug

SEQ ID NO: 1797233 - RNA, 18 nt, Human
cacugaugggcaaccccc

SEQ ID NO: 1797234 - RNA, 14 nt, Human
cacugaugggcaac

SEQ ID NO: 1797235 - RNA, 13 nt, Human
cacugcaaccucc

SEQ ID NO: 1797236 - RNA, 16 nt, Human
cacugcaaccuccgcc

SEQ ID NO: 1797237 - RNA, 14 nt, Human
cacugcaaccuccg

SEQ ID NO: 1797238 - RNA, 23 nt, Human
cacugcaaccuccgccucuuggg

SEQ ID NO: 1797239 - RNA, 17 nt, Human
cacugcaacuucugccu

SEQ ID NO: 1797240 - RNA, 14 nt, Human
cacugcaaccuucg

SEQ ID NO: 1797241 - RNA, 22 nt, Human
cacugcaaccuucgccaccugg

SEQ ID NO: 1797242 - RNA, 16 nt, Human
cacugcaacuucugcc

SEQ ID NO: 1797243 - RNA, 23 nt, Human
cacugcaaccuucgccaccuggg

SEQ ID NO: 1797244 - RNA, 18 nt, Human
cacugcacagugcaucuc

SEQ ID NO: 1797245 - RNA, 19 nt, Human
cacugcacagugcaucuca

SEQ ID NO: 1797246 - RNA, 21 nt, Human
cacugcacagugcaucucagc

SEQ ID NO: 1797247 - RNA, 22 nt, Human
cacugcacagugcaucucagcc

SEQ ID NO: 1797248 - RNA, 20 nt, Human
cacucugucgcccagucugg

SEQ ID NO: 1797249 - RNA, 23 nt, Human
cacugacauuguuggccaaagcc

SEQ ID NO: 1797250 - RNA, 19 nt, Human
cacucugucgcccagucug

SEQ ID NO: 1797251 - RNA, 16 nt, Human
cacucugucgcccagu

SEQ ID NO: 1797252 - RNA, 15 nt, Human
cacucugucgcccag

SEQ ID NO: 1797253 - RNA, 23 nt, Human
cacucuggcagcucagagagggu

SEQ ID NO: 1797254 - RNA, 20 nt, Human
cacucuggcagcucagagag

SEQ ID NO: 1797255 - RNA, 21 nt, Human
cacucuggcagcucagagagg

SEQ ID NO: 1797256 - RNA, 15 nt, Human
cacucuggcagcuca

SEQ ID NO: 1797257 - RNA, 16 nt, Human
cacucuggcagcucag

SEQ ID NO: 1797258 - RNA, 17 nt, Human
cacucuggcagcucaga

SEQ ID NO: 1797259 - RNA, 19 nt, Human
cacucuggcagcucagaga

SEQ ID NO: 1797260 - RNA, 14 nt, Human
cacugagacagccc

SEQ ID NO: 1797261 - RNA, 17 nt, Human
cacugagacagcccggg

SEQ ID NO: 1797262 - RNA, 19 nt, Human
cacugagacagcccgggcu

SEQ ID NO: 1797263 - RNA, 22 nt, Human
cacugagacagcccgggcucug

SEQ ID NO: 1797264 - RNA, 12 nt, Human
cacugagacagc

SEQ ID NO: 1797265 - RNA, 13 nt, Human
cacugagacagcc

SEQ ID NO: 1797266 - RNA, 12 nt, Human
cacugcucuggu

SEQ ID NO: 1797267 - RNA, 20 nt, Human
cacugcucugaugaagagga

SEQ ID NO: 1797268 - RNA, 15 nt, Human
cacugcugcccagcc

SEQ ID NO: 1797269 - RNA, 17 nt, Human
cacugcugcccagccuc

SEQ ID NO: 1797270 - RNA, 20 nt, Human
cacugccuucgauacaccgg

SEQ ID NO: 1797271 - RNA, 22 nt, Human
cacugccuucgauacaccgggc

SEQ ID NO: 1797272 - RNA, 18 nt, Human
cacugcacuauagccuag

SEQ ID NO: 1797273 - RNA, 19 nt, Human
cacugcaccgggccacaga

SEQ ID NO: 1797274 - RNA, 18 nt, Human
cacugcaccgggccacag

SEQ ID NO: 1797275 - RNA, 16 nt, Human
cacugcaccgggccac

SEQ ID NO: 1797276 - RNA, 15 nt, Human
cacugcaccgggcca

SEQ ID NO: 1797277 - RNA, 14 nt, Human
cacugcaccgggcc

SEQ ID NO: 1797278 - RNA, 23 nt, Human
cacugcacagugcaucucagccc

SEQ ID NO: 1797279 - RNA, 16 nt, Human
cacugccucuuccucc

SEQ ID NO: 1797280 - RNA, 20 nt, Human
cacugcuuuuggucugugug

SEQ ID NO: 1797281 - RNA, 22 nt, Human
cacugcuuccagugaggcucug

SEQ ID NO: 1797282 - RNA, 18 nt, Human
cacugcuuccagugaggc

SEQ ID NO: 1797283 - RNA, 19 nt, Human
cacugcuuccagugaggcu

SEQ ID NO: 1797284 - RNA, 20 nt, Human
cacugcuuccagugaggcuc

SEQ ID NO: 1797285 - RNA, 21 nt, Human
cacugcuuccagugaggcucu

SEQ ID NO: 1797286 - RNA, 12 nt, Human
cacugcuggcug

SEQ ID NO: 1797287 - RNA, 13 nt, Human
cacugcuggcugc

SEQ ID NO: 1797288 - RNA, 14 nt, Human
cacugcuggcugcc

SEQ ID NO: 1797289 - RNA, 15 nt, Human
cacugcuggcugccu

SEQ ID NO: 1797290 - RNA, 16 nt, Human
cacugcuggcugccuu

SEQ ID NO: 1797291 - RNA, 21 nt, Human
cacugcuggcugccuuagaac

SEQ ID NO: 1797292 - RNA, 13 nt, Human
cacugcuuaacuu

SEQ ID NO: 1797293 - RNA, 14 nt, Human
cacugcuuccagug

SEQ ID NO: 1797294 - RNA, 15 nt, Human
cacugcuuccaguga

SEQ ID NO: 1797295 - RNA, 16 nt, Human
cacugcuuccagugag

SEQ ID NO: 1797296 - RNA, 21 nt, Human
cacugcuuuuggucuguguga

SEQ ID NO: 1797297 - RNA, 17 nt, Human
cacuggaacacuaauga

SEQ ID NO: 1797298 - RNA, 15 nt, Human
cacuggacucaccuc

SEQ ID NO: 1797299 - RNA, 18 nt, Human
cacuggacucaccucccc

SEQ ID NO: 1797300 - RNA, 17 nt, Human
caagugauucuccugcc

SEQ ID NO: 1797301 - RNA, 16 nt, Human
caagugauucuccugc

SEQ ID NO: 1797302 - RNA, 22 nt, Human
caagugauucucaugccucagc

SEQ ID NO: 1797303 - RNA, 19 nt, Human
caagugaaaaaggaggaag

SEQ ID NO: 1797304 - RNA, 22 nt, Human
caagugauucuccugccucagc

SEQ ID NO: 1797305 - RNA, 21 nt, Human
caagugauucuccugccucag

SEQ ID NO: 1797306 - RNA, 14 nt, Human
caagugauucuccu

SEQ ID NO: 1797307 - RNA, 22 nt, Human
caagugugguagagugugccug

SEQ ID NO: 1797308 - RNA, 19 nt, Human
caaggauugcuacuguccu

SEQ ID NO: 1797309 - RNA, 15 nt, Human
caaggauugcuacug

SEQ ID NO: 1797310 - RNA, 19 nt, Human
caagggccuggccugagcu

SEQ ID NO: 1797311 - RNA, 12 nt, Human
caaggugggagg

SEQ ID NO: 1797312 - RNA, 23 nt, Human
caaggugggaggauugcuugagc

SEQ ID NO: 1797313 - RNA, 17 nt, Human
caagcacuaaacaaaga

SEQ ID NO: 1797314 - RNA, 18 nt, Human
caagcaccuccugccucg

SEQ ID NO: 1797315 - RNA, 16 nt, Human
caagcgugagccacug

SEQ ID NO: 1797316 - RNA, 17 nt, Human
caagccguggcuucccg

SEQ ID NO: 1797317 - RNA, 14 nt, Human
caagccguggcuuc

SEQ ID NO: 1797318 - RNA, 15 nt, Human
caagccguggcuucc

SEQ ID NO: 1797319 - RNA, 16 nt, Human
caagccguggcuuccc

SEQ ID NO: 1797320 - RNA, 21 nt, Human
caagccaccaacauacuccca

SEQ ID NO: 1797321 - RNA, 18 nt, Human
caagcgugagccacugca

SEQ ID NO: 1797322 - RNA, 17 nt, Human
caagcgugagccacugc

SEQ ID NO: 1797323 - RNA, 14 nt, Human
caaggacuaggguc

SEQ ID NO: 1797324 - RNA, 13 nt, Human
caaggauccugag

SEQ ID NO: 1797325 - RNA, 19 nt, Human
caaggaugccccguccccc

SEQ ID NO: 1797326 - RNA, 21 nt, Human
caaggaugaucuaggaagacu

SEQ ID NO: 1797327 - RNA, 14 nt, Human
caaauuuacagaga

SEQ ID NO: 1797328 - RNA, 15 nt, Human
caaauucugucucug

SEQ ID NO: 1797329 - RNA, 18 nt, Human
caaauucugucucuggau

SEQ ID NO: 1797330 - RNA, 24 nt, Human
caacaggcugggcuucaguggcag

SEQ ID NO: 1797331 - RNA, 23 nt, Human
caacaggcugggcuucaguggca

SEQ ID NO: 1797332 - RNA, 15 nt, Human
caaauuuacagagac

SEQ ID NO: 1797333 - RNA, 22 nt, Human
caacaucuuggucagauuugaa

SEQ ID NO: 1797334 - RNA, 19 nt, Human
caacagguuuuccugaaga

SEQ ID NO: 1797335 - RNA, 18 nt, Human
caacaggguuuuuuucca

SEQ ID NO: 1797336 - RNA, 15 nt, Human
caacagguuuuccug

SEQ ID NO: 1797337 - RNA, 19 nt, Human
caaccccuucgcuccugug

SEQ ID NO: 1797338 - RNA, 18 nt, Human
caaccccuucgcuccugu

SEQ ID NO: 1797339 - RNA, 21 nt, Human
caaccccuucgcuccuguguc

SEQ ID NO: 1797340 - RNA, 21 nt, Human
caacccucagagccaccccua

SEQ ID NO: 1797341 - RNA, 18 nt, Human
caacccucagagccaccc

SEQ ID NO: 1797342 - RNA, 16 nt, Human
caacauuguagccuca

SEQ ID NO: 1797343 - RNA, 11 nt, Human
caacuuuguau

SEQ ID NO: 1797344 - RNA, 12 nt, Human
caacuuuguaua

SEQ ID NO: 1797345 - RNA, 20 nt, Human
caacucuccuccagagucag

SEQ ID NO: 1797346 - RNA, 12 nt, Human
caacccucauca

SEQ ID NO: 1797347 - RNA, 15 nt, Human
caacccucaucacca

SEQ ID NO: 1797348 - RNA, 12 nt, Human
caacgcagcccu

SEQ ID NO: 1797349 - RNA, 13 nt, Human
caacgcagcccug

SEQ ID NO: 1797350 - RNA, 15 nt, Human
caacgcagcccugcu

SEQ ID NO: 1797351 - RNA, 18 nt, Human
caacgcagcccugcuuug

SEQ ID NO: 1797352 - RNA, 19 nt, Human
caacucuccuccagaguca

SEQ ID NO: 1797353 - RNA, 16 nt, Human
caaccugauugugucu

SEQ ID NO: 1797354 - RNA, 22 nt, Human
caagccaccaacauacucccau

SEQ ID NO: 1797355 - RNA, 18 nt, Human
auuuuuuuacuaauagac

SEQ ID NO: 1797356 - RNA, 18 nt, Human
caaagcuaggccuggcca

SEQ ID NO: 1797357 - RNA, 17 nt, Human
caaagcuaggccuggcc

SEQ ID NO: 1797358 - RNA, 16 nt, Human
caaagcuaggccuggc

SEQ ID NO: 1797359 - RNA, 22 nt, Human
caaagccaaagcuaggccuggc

SEQ ID NO: 1797360 - RNA, 21 nt, Human
caaagccaaagcuaggccugg

SEQ ID NO: 1797361 - RNA, 20 nt, Human
caaagccaaagcuaggccug

SEQ ID NO: 1797362 - RNA, 16 nt, Human
caaagcuuguuaagau

SEQ ID NO: 1797363 - RNA, 22 nt, Human
caaauucugcuugcuugcuuuu

SEQ ID NO: 1797364 - RNA, 14 nt, Human
caaauguggcuccu

SEQ ID NO: 1797365 - RNA, 20 nt, Human
caaauguucaucaaugaaug

SEQ ID NO: 1797366 - RNA, 21 nt, Human
caaauguucaucaaugaauga

SEQ ID NO: 1797367 - RNA, 13 nt, Human
caaaucagcugcu

SEQ ID NO: 1797368 - RNA, 15 nt, Human
caaaugucuuccugg

SEQ ID NO: 1797369 - RNA, 18 nt, Human
caaaugucuuccuggauu

SEQ ID NO: 1797370 - RNA, 16 nt, Human
caaaucagcugcuacu

SEQ ID NO: 1797371 - RNA, 21 nt, Human
caaaggaugcccaaagaugca

SEQ ID NO: 1797372 - RNA, 12 nt, Human
caaauauauuca

SEQ ID NO: 1797373 - RNA, 19 nt, Human
caaauacauuuaaaacauu

SEQ ID NO: 1797374 - RNA, 17 nt, Human
cacaccgggcacucaga

SEQ ID NO: 1797375 - RNA, 14 nt, Human
cacacccuguuuua

SEQ ID NO: 1797376 - RNA, 13 nt, Human
cacaccagagccc

SEQ ID NO: 1797377 - RNA, 12 nt, Human
cacaccagagcc

SEQ ID NO: 1797378 - RNA, 15 nt, Human
cacaccagagcccac

SEQ ID NO: 1797379 - RNA, 13 nt, Human
cacacccagccca

SEQ ID NO: 1797380 - RNA, 14 nt, Human
cacacaccagagcc

SEQ ID NO: 1797381 - RNA, 12 nt, Human
cacacagcucug

SEQ ID NO: 1797382 - RNA, 19 nt, Human
cacacagaggcugccucuc

SEQ ID NO: 1797383 - RNA, 12 nt, Human
cacagagaaagu

SEQ ID NO: 1797384 - RNA, 17 nt, Human
cacagaguuguuacauu

SEQ ID NO: 1797385 - RNA, 16 nt, Human
cacagaguuguuacau

SEQ ID NO: 1797386 - RNA, 21 nt, Human
cacacuugacaucaacugcau

SEQ ID NO: 1797387 - RNA, 18 nt, Human
cacacuucaggcucuucu

SEQ ID NO: 1797388 - RNA, 20 nt, Human
cacacuucaggcucuucucc

SEQ ID NO: 1797389 - RNA, 21 nt, Human
cacacuucaggcucuucuccu

SEQ ID NO: 1797390 - RNA, 22 nt, Human
cacacuucaggcucuucuccuu

SEQ ID NO: 1797391 - RNA, 14 nt, Human
cacacuucaggcuc

SEQ ID NO: 1797392 - RNA, 17 nt, Human
cacacuucaggcucuuc

SEQ ID NO: 1797393 - RNA, 18 nt, Human
cacaaaaguuucucuuuu

SEQ ID NO: 1797394 - RNA, 16 nt, Human
cacaaaaguuucucuu

SEQ ID NO: 1797395 - RNA, 17 nt, Human
cacaaccuucuguggcu

SEQ ID NO: 1797396 - RNA, 18 nt, Human
cacaaccuucuguggcuc

SEQ ID NO: 1797397 - RNA, 19 nt, Human
cacaaccuucuguggcuca

SEQ ID NO: 1797398 - RNA, 23 nt, Human
cacaaccuucuguggcucacaga

SEQ ID NO: 1797399 - RNA, 22 nt, Human
cacaacacacagauuugagcuc

SEQ ID NO: 1797400 - RNA, 21 nt, Human
cacaaauucugucucuggauu

SEQ ID NO: 1797401 - RNA, 21 nt, Human
caauaggaaaaacugauuuuu

SEQ ID NO: 1797402 - RNA, 20 nt, Human
caauaggaaaaacugauuuu

SEQ ID NO: 1797403 - RNA, 23 nt, Human
caaugcacuuuguucuggcucuu

SEQ ID NO: 1797404 - RNA, 19 nt, Human
caaugcaaaccaucauuga

SEQ ID NO: 1797405 - RNA, 20 nt, Human
caaugcaaaccaucauugaa

SEQ ID NO: 1797406 - RNA, 17 nt, Human
caaugcaaaccaucauu

SEQ ID NO: 1797407 - RNA, 18 nt, Human
caaugcaaaccaucauug

SEQ ID NO: 1797408 - RNA, 13 nt, Human
caaugaccuuuca

SEQ ID NO: 1797409 - RNA, 21 nt, Human
caaugacacagucuuggcuca

SEQ ID NO: 1797410 - RNA, 19 nt, Human
caaugacacagucuuggcu

SEQ ID NO: 1797411 - RNA, 14 nt, Human
caaugacacagucu

SEQ ID NO: 1797412 - RNA, 22 nt, Human
caaugaaugaaugaauggcuaa

SEQ ID NO: 1797413 - RNA, 19 nt, Human
caaugugaaaagaaaaaug

SEQ ID NO: 1797414 - RNA, 16 nt, Human
cacagcagccccugca

SEQ ID NO: 1797415 - RNA, 20 nt, Human
cacagcacgggggccaagga

SEQ ID NO: 1797416 - RNA, 20 nt, Human
cacagaugggugcuuggagg

SEQ ID NO: 1797417 - RNA, 21 nt, Human
cacagaguuguuacauuuuua

SEQ ID NO: 1797418 - RNA, 20 nt, Human
cacagaguuguuacauuuuu

SEQ ID NO: 1797419 - RNA, 14 nt, Human
cacagaugggugcu

SEQ ID NO: 1797420 - RNA, 18 nt, Human
cacagaugggugcuugga

SEQ ID NO: 1797421 - RNA, 15 nt, Human
cacaggaaguagagg

SEQ ID NO: 1797422 - RNA, 16 nt, Human
cacaggaucagucuga

SEQ ID NO: 1797423 - RNA, 15 nt, Human
cacaggaucagucug

SEQ ID NO: 1797424 - RNA, 12 nt, Human
cacaggaucagu

SEQ ID NO: 1797425 - RNA, 19 nt, Human
cacaggcccggcuccaggc

SEQ ID NO: 1797426 - RNA, 18 nt, Human
cacaggcccggcuccagg

SEQ ID NO: 1797427 - RNA, 17 nt, Human
cacaggcccggcuccag

SEQ ID NO: 1797428 - RNA, 16 nt, Human
cacaggcccggcucca

SEQ ID NO: 1797429 - RNA, 10 nt, Human
cacaggcagg

SEQ ID NO: 1797430 - RNA, 17 nt, Human
cacauacacacacacgc

SEQ ID NO: 1797431 - RNA, 22 nt, Human
cacauaauucaggaagcagcuu

SEQ ID NO: 1797432 - RNA, 23 nt, Human
cacaggcccggcuccaggcuccu

SEQ ID NO: 1797433 - RNA, 20 nt, Human
cacaggcccggcuccaggcu

SEQ ID NO: 1797434 - RNA, 18 nt, Human
cacagugagucgaggaca

SEQ ID NO: 1797435 - RNA, 15 nt, Human
cacaggcccuuccuc

SEQ ID NO: 1797436 - RNA, 20 nt, Human
cacagugagucgaggacagg

SEQ ID NO: 1797437 - RNA, 19 nt, Human
cacagugagucgaggacag

SEQ ID NO: 1797438 - RNA, 21 nt, Human
cacagugagucgaggacaggg

SEQ ID NO: 1797439 - RNA, 15 nt, Human
caccaagcccaguua

SEQ ID NO: 1797440 - RNA, 18 nt, Human
cacauuggagauguuuag

SEQ ID NO: 1797441 - RNA, 17 nt, Human
caccacacccagcccac

SEQ ID NO: 1797442 - RNA, 15 nt, Human
caccacacccagccc

SEQ ID NO: 1797443 - RNA, 13 nt, Human
caccacacccagc

SEQ ID NO: 1797444 - RNA, 20 nt, Human
caccacuacauucuguuaau

SEQ ID NO: 1797445 - RNA, 19 nt, Human
caccacuacauucuguuaa

SEQ ID NO: 1797446 - RNA, 18 nt, Human
caccacuacauucuguua

SEQ ID NO: 1797447 - RNA, 17 nt, Human
caccacuacauucuguu

SEQ ID NO: 1797448 - RNA, 16 nt, Human
caccacuacauucugu

SEQ ID NO: 1797449 - RNA, 14 nt, Human
caccaccucuuugg

SEQ ID NO: 1797450 - RNA, 18 nt, Human
caccacaugugcacaugc

SEQ ID NO: 1797451 - RNA, 15 nt, Human
caccacaugugcaca

SEQ ID NO: 1797452 - RNA, 19 nt, Human
caccacaugugcacaugca

SEQ ID NO: 1797453 - RNA, 14 nt, Human
cacauaucugucau

SEQ ID NO: 1797454 - RNA, 12 nt, Human
cacauaucuguc

SEQ ID NO: 1797455 - RNA, 17 nt, Human
cacauauuucagugagg

SEQ ID NO: 1797456 - RNA, 18 nt, Human
cacaucagcacgauuucu

SEQ ID NO: 1797457 - RNA, 19 nt, Human
cacaucagcacgauuucug

SEQ ID NO: 1797458 - RNA, 13 nt, Human
cacaugccucucu

SEQ ID NO: 1797459 - RNA, 17 nt, Human
cacaugccucucucagg

SEQ ID NO: 1797460 - RNA, 18 nt, Human
cacaugccucucucaggc

SEQ ID NO: 1797461 - RNA, 19 nt, Human
cacaugccucucucaggcc

SEQ ID NO: 1797462 - RNA, 15 nt, Human
cacaugugcacaugc

SEQ ID NO: 1797463 - RNA, 14 nt, Human
cacaugugcacaug

SEQ ID NO: 1797464 - RNA, 17 nt, Human
cacaugugcacaugcac

SEQ ID NO: 1797465 - RNA, 13 nt, Human
cacauguggacuu

SEQ ID NO: 1797466 - RNA, 16 nt, Human
cacauuccugaugcuu

SEQ ID NO: 1797467 - RNA, 22 nt, Human
cacccaccaucaugucuggcua

SEQ ID NO: 1797468 - RNA, 20 nt, Human
cacccaccaucaugucuggc

SEQ ID NO: 1797469 - RNA, 16 nt, Human
cacccaccucagccuc

SEQ ID NO: 1797470 - RNA, 14 nt, Human
cacccaccucagcc

SEQ ID NO: 1797471 - RNA, 13 nt, Human
cacccaccucagc

SEQ ID NO: 1797472 - RNA, 12 nt, Human
cacccaccucag

SEQ ID NO: 1797473 - RNA, 12 nt, Human
caccccagcccc

SEQ ID NO: 1797474 - RNA, 13 nt, Human
caccccagcccca

SEQ ID NO: 1797475 - RNA, 19 nt, Human
cacccaagggccuggccug

SEQ ID NO: 1797476 - RNA, 20 nt, Human
cacccaagggccuggccuga

SEQ ID NO: 1797477 - RNA, 21 nt, Human
cacccaagggccuggccugag

SEQ ID NO: 1797478 - RNA, 23 nt, Human
cacccaagggccuggccugagcu

SEQ ID NO: 1797479 - RNA, 16 nt, Human
cacccaagggccuggc

SEQ ID NO: 1797480 - RNA, 17 nt, Human
cacccaagggccuggcc

SEQ ID NO: 1797481 - RNA, 18 nt, Human
cacccaagggccuggccu

SEQ ID NO: 1797482 - RNA, 22 nt, Human
cacccccacccaagggccuggc

SEQ ID NO: 1797483 - RNA, 14 nt, Human
caccccuaaagaga

SEQ ID NO: 1797484 - RNA, 14 nt, Human
caccccggccaccu

SEQ ID NO: 1797485 - RNA, 15 nt, Human
caccccggccaccug

SEQ ID NO: 1797486 - RNA, 16 nt, Human
caccccggccaccugc

SEQ ID NO: 1797487 - RNA, 17 nt, Human
caccccggccaccugcg

SEQ ID NO: 1797488 - RNA, 15 nt, Human
caccccuaaagagau

SEQ ID NO: 1797489 - RNA, 12 nt, Human
aguccuguaaug

SEQ ID NO: 1797490 - RNA, 17 nt, Human
agucugaaggcuggguu

SEQ ID NO: 1797491 - RNA, 16 nt, Human
agucugaaggcugggu

SEQ ID NO: 1797492 - RNA, 13 nt, Human
agucugaaggcug

SEQ ID NO: 1797493 - RNA, 15 nt, Human
agucugaaggcuggg

SEQ ID NO: 1797494 - RNA, 22 nt, Human
aguccuggcaugggaaugaaug

SEQ ID NO: 1797495 - RNA, 20 nt, Human
aguccuggcaugggaaugaa

SEQ ID NO: 1797496 - RNA, 21 nt, Human
aguccuggcaugggaaugaau

SEQ ID NO: 1797497 - RNA, 18 nt, Human
agucuggaaugcaguggu

SEQ ID NO: 1797498 - RNA, 20 nt, Human
agugaacuugggccacugug

SEQ ID NO: 1797499 - RNA, 17 nt, Human
agucuggaaugcagugg

SEQ ID NO: 1797500 - RNA, 18 nt, Human
agucugauucccaagcuc

SEQ ID NO: 1797501 - RNA, 16 nt, Human
agucugauucccaagc

SEQ ID NO: 1797502 - RNA, 20 nt, Human
agucugauucccaagcucug

SEQ ID NO: 1797503 - RNA, 16 nt, Human
agugaagacaaugacu

SEQ ID NO: 1797504 - RNA, 14 nt, Human
agugaagacaauga

SEQ ID NO: 1797505 - RNA, 18 nt, Human
agugaccauacuaauuau

SEQ ID NO: 1797506 - RNA, 14 nt, Human
aguaugguggcugg

SEQ ID NO: 1797507 - RNA, 17 nt, Human
aguaugggacuggccuc

SEQ ID NO: 1797508 - RNA, 20 nt, Human
aguaugggacuggccucugc

SEQ ID NO: 1797509 - RNA, 16 nt, Human
aguaugaggcauuugu

SEQ ID NO: 1797510 - RNA, 15 nt, Human
aguaugaggcauuug

SEQ ID NO: 1797511 - RNA, 16 nt, Human
aguaugaauaaagaca

SEQ ID NO: 1797512 - RNA, 16 nt, Human
aguaucuuuuuauuca

SEQ ID NO: 1797513 - RNA, 11 nt, Human
aguaucuugaa

SEQ ID NO: 1797514 - RNA, 12 nt, Human
aguaucuugaag

SEQ ID NO: 1797515 - RNA, 15 nt, Human
aguaucuugaagacu

SEQ ID NO: 1797516 - RNA, 14 nt, Human
agugggagcugccu

SEQ ID NO: 1797517 - RNA, 15 nt, Human
agugggagcugccug

SEQ ID NO: 1797518 - RNA, 16 nt, Human
agugggagcugccugu

SEQ ID NO: 1797519 - RNA, 18 nt, Human
aguguauuuuuuuacuaa

SEQ ID NO: 1797520 - RNA, 17 nt, Human
aguguauuuuuuuacua

SEQ ID NO: 1797521 - RNA, 23 nt, Human
aguggcuuaaaacaacacucaca

SEQ ID NO: 1797522 - RNA, 13 nt, Human
aguggcuccuccc

SEQ ID NO: 1797523 - RNA, 17 nt, Human
aguggcuccucccggug

SEQ ID NO: 1797524 - RNA, 21 nt, Human
aguggcuccucccggugccca

SEQ ID NO: 1797525 - RNA, 22 nt, Human
aguugaaaaucuuauaauuuaa

SEQ ID NO: 1797526 - RNA, 19 nt, Human
aguucagguaacaggcaga

SEQ ID NO: 1797527 - RNA, 17 nt, Human
aguuacagacaaagcgu

SEQ ID NO: 1797528 - RNA, 20 nt, Human
aguucagguaacaggcagau

SEQ ID NO: 1797529 - RNA, 13 nt, Human
aguuaagccuuug

SEQ ID NO: 1797530 - RNA, 12 nt, Human
aguuaaauaaau

SEQ ID NO: 1797531 - RNA, 14 nt, Human
aguuaagccuuugg

SEQ ID NO: 1797532 - RNA, 14 nt, Human
aguuacagacaaag

SEQ ID NO: 1797533 - RNA, 16 nt, Human
aguuacagacaaagcg

SEQ ID NO: 1797534 - RNA, 23 nt, Human
aguugaaaaucuuauaauuuaaa

SEQ ID NO: 1797535 - RNA, 14 nt, Human
aguugaagacagag

SEQ ID NO: 1797536 - RNA, 20 nt, Human
aguuguuugauucagacagc

SEQ ID NO: 1797537 - RNA, 16 nt, Human
aguuguuaauaaaagu

SEQ ID NO: 1797538 - RNA, 18 nt, Human
auaaaggauuaaugucaa

SEQ ID NO: 1797539 - RNA, 22 nt, Human
auaaauuuuuuuuguuucauau

SEQ ID NO: 1797540 - RNA, 19 nt, Human
auaaauuuuuuuuguuuca

SEQ ID NO: 1797541 - RNA, 12 nt, Human
auaaagacaccu

SEQ ID NO: 1797542 - RNA, 11 nt, Human
auaaagacagg

SEQ ID NO: 1797543 - RNA, 13 nt, Human
auaaagcagcguu

SEQ ID NO: 1797544 - RNA, 20 nt, Human
auaaagcagcguuucuauga

SEQ ID NO: 1797545 - RNA, 19 nt, Human
auaaagcagcguuucuaug

SEQ ID NO: 1797546 - RNA, 18 nt, Human
auaaagcagcguuucuau

SEQ ID NO: 1797547 - RNA, 14 nt, Human
auaaagcagcguuu

SEQ ID NO: 1797548 - RNA, 15 nt, Human
auaaagcaggcagaa

SEQ ID NO: 1797549 - RNA, 18 nt, Human
auaaagcuguguggcagu

SEQ ID NO: 1797550 - RNA, 11 nt, Human
auaaaacuuuu

SEQ ID NO: 1797551 - RNA, 15 nt, Human
auaaaacuuuuuaaa

SEQ ID NO: 1797552 - RNA, 20 nt, Human
auaaacuuuuuucuuacugu

SEQ ID NO: 1797553 - RNA, 24 nt, Human
auaaacuuuaccuuuuuuauacau

SEQ ID NO: 1797554 - RNA, 21 nt, Human
auaaacuuuaccuuuuuuaua

SEQ ID NO: 1797555 - RNA, 17 nt, Human
auaaaacuuuuuaaaau

SEQ ID NO: 1797556 - RNA, 11 nt, Human
auacccacccc

SEQ ID NO: 1797557 - RNA, 12 nt, Human
auacccaccccc

SEQ ID NO: 1797558 - RNA, 18 nt, Human
auaccugucccccugaca

SEQ ID NO: 1797559 - RNA, 15 nt, Human
auaauguaagcucua

SEQ ID NO: 1797560 - RNA, 20 nt, Human
auacaccacuacauucuguu

SEQ ID NO: 1797561 - RNA, 19 nt, Human
auacaccacuacauucugu

SEQ ID NO: 1797562 - RNA, 23 nt, Human
auaccauuauauguucccccugu

SEQ ID NO: 1797563 - RNA, 21 nt, Human
auacaccacuacauucuguua

SEQ ID NO: 1797564 - RNA, 18 nt, Human
auacaccacuacauucug

SEQ ID NO: 1797565 - RNA, 21 nt, Human
auaaugcgugcauaccacuuu

SEQ ID NO: 1797566 - RNA, 20 nt, Human
auaaugcgugcauaccacuu

SEQ ID NO: 1797567 - RNA, 15 nt, Human
auagguuuaauaauu

SEQ ID NO: 1797568 - RNA, 12 nt, Human
auagguuauuuu

SEQ ID NO: 1797569 - RNA, 18 nt, Human
auaguaugguggcugggu

SEQ ID NO: 1797570 - RNA, 17 nt, Human
auaguaugguggcuggg

SEQ ID NO: 1797571 - RNA, 21 nt, Human
auagguauaaguggugugugu

SEQ ID NO: 1797572 - RNA, 15 nt, Human
auagccaaggccaaa

SEQ ID NO: 1797573 - RNA, 21 nt, Human
auagccaaggccaaaggaagc

SEQ ID NO: 1797574 - RNA, 19 nt, Human
auauuuacuucuuauacau

SEQ ID NO: 1797575 - RNA, 14 nt, Human
auauuauuuuaugu

SEQ ID NO: 1797576 - RNA, 23 nt, Human
auauuaugaagcuuuuaugugaa

SEQ ID NO: 1797577 - RNA, 22 nt, Human
auauuaccacagacauacuaac

SEQ ID NO: 1797578 - RNA, 16 nt, Human
auaucaaauauauuca

SEQ ID NO: 1797579 - RNA, 15 nt, Human
auaucaauuuaaaaa

SEQ ID NO: 1797580 - RNA, 15 nt, Human
aucaugugaaaucau

SEQ ID NO: 1797581 - RNA, 14 nt, Human
aucaugugaaauca

SEQ ID NO: 1797582 - RNA, 16 nt, Human
aucaugugaaaucauu

SEQ ID NO: 1797583 - RNA, 20 nt, Human
aucagccugcuccagcuguu

SEQ ID NO: 1797584 - RNA, 19 nt, Human
aucagccugcuccagcugu

SEQ ID NO: 1797585 - RNA, 17 nt, Human
aucagccugcuccagcu

SEQ ID NO: 1797586 - RNA, 18 nt, Human
aucagccugcuccagcug

SEQ ID NO: 1797587 - RNA, 23 nt, Human
aucagcacgauuucuguuuagau

SEQ ID NO: 1797588 - RNA, 20 nt, Human
aucagcacgauuucuguuua

SEQ ID NO: 1797589 - RNA, 19 nt, Human
aucagcacgauuucuguuu

SEQ ID NO: 1797590 - RNA, 14 nt, Human
aucaccgaaaacgu

SEQ ID NO: 1797591 - RNA, 19 nt, Human
aucaccgaaaacguggcug

SEQ ID NO: 1797592 - RNA, 21 nt, Human
aucaccgaaaacguggcugcu

SEQ ID NO: 1797593 - RNA, 21 nt, Human
aucacagccucugaaaaccaa

SEQ ID NO: 1797594 - RNA, 15 nt, Human
aucacauguggacuu

SEQ ID NO: 1797595 - RNA, 18 nt, Human
aucaccaacgucugugcc

SEQ ID NO: 1797596 - RNA, 19 nt, Human
aucaccaacgucugugcca

SEQ ID NO: 1797597 - RNA, 19 nt, Human
auccucccaccucagccuc

SEQ ID NO: 1797598 - RNA, 18 nt, Human
auccucccaccucagccu

SEQ ID NO: 1797599 - RNA, 20 nt, Human
auccucccaccucagccucc

SEQ ID NO: 1797600 - RNA, 12 nt, Human
auccucccaggc

SEQ ID NO: 1797601 - RNA, 15 nt, Human
aucggcauuuguuuc

SEQ ID NO: 1797602 - RNA, 15 nt, Human
auccucccaccucag

SEQ ID NO: 1797603 - RNA, 23 nt, Human
auccuccaggugcacaagcucca

SEQ ID NO: 1797604 - RNA, 11 nt, Human
auccuccaggu

SEQ ID NO: 1797605 - RNA, 16 nt, Human
auccccaagccuggca

SEQ ID NO: 1797606 - RNA, 15 nt, Human
auccccuguagagug

SEQ ID NO: 1797607 - RNA, 14 nt, Human
aucccauuuaaaaa

SEQ ID NO: 1797608 - RNA, 13 nt, Human
auccccaagccug

SEQ ID NO: 1797609 - RNA, 15 nt, Human
aucccauuuaaaaaa

SEQ ID NO: 1797610 - RNA, 15 nt, Human
auccagacccggcug

SEQ ID NO: 1797611 - RNA, 18 nt, Human
auccagaaagaaaacuug

SEQ ID NO: 1797612 - RNA, 16 nt, Human
auccagaaagaaaacu

SEQ ID NO: 1797613 - RNA, 18 nt, Human
aucuugaagacuuuucuu

SEQ ID NO: 1797614 - RNA, 14 nt, Human
aucuucuuuauaau

SEQ ID NO: 1797615 - RNA, 18 nt, Human
aucuugaauaauguaaga

SEQ ID NO: 1797616 - RNA, 17 nt, Human
aucuugaauuguaagga

SEQ ID NO: 1797617 - RNA, 16 nt, Human
aucucggcucacugca

SEQ ID NO: 1797618 - RNA, 14 nt, Human
aucucggcucacug

SEQ ID NO: 1797619 - RNA, 15 nt, Human
aucucggcucacugc

SEQ ID NO: 1797620 - RNA, 17 nt, Human
aucucugcuuuggaaau

SEQ ID NO: 1797621 - RNA, 15 nt, Human
aucuggacuccucug

SEQ ID NO: 1797622 - RNA, 16 nt, Human
aucuggacuccucugu

SEQ ID NO: 1797623 - RNA, 17 nt, Human
aucuggacuccucuguc

SEQ ID NO: 1797624 - RNA, 18 nt, Human
aucuggacuccucugucc

SEQ ID NO: 1797625 - RNA, 19 nt, Human
aucuggacuccucugucca

SEQ ID NO: 1797626 - RNA, 22 nt, Human
aucugcuuuuuaaagaaugcuc

SEQ ID NO: 1797627 - RNA, 13 nt, Human
augaaagacugua

SEQ ID NO: 1797628 - RNA, 16 nt, Human
augaaagacuguacaa

SEQ ID NO: 1797629 - RNA, 17 nt, Human
augaaagacuguacaaa

SEQ ID NO: 1797630 - RNA, 19 nt, Human
augaaagacuguacaaagu

SEQ ID NO: 1797631 - RNA, 19 nt, Human
augaaguuuuuuuuauaca

SEQ ID NO: 1797632 - RNA, 22 nt, Human
augaagcuuuuaugugaaacau

SEQ ID NO: 1797633 - RNA, 23 nt, Human
augaaguuuuuuuuauacaggau

SEQ ID NO: 1797634 - RNA, 21 nt, Human
augaccuuucaauaggaaaaa

SEQ ID NO: 1797635 - RNA, 22 nt, Human
augaccuuucaauaggaaaaac

SEQ ID NO: 1797636 - RNA, 23 nt, Human
augaccuuucaauaggaaaaacu

SEQ ID NO: 1797637 - RNA, 11 nt, Human
augcugcccug

SEQ ID NO: 1797638 - RNA, 16 nt, Human
augcucuuuacuucau

SEQ ID NO: 1797639 - RNA, 22 nt, Human
auggaggaaaaccaagccgugg

SEQ ID NO: 1797640 - RNA, 16 nt, Human
auggaggaaaaccaag

SEQ ID NO: 1797641 - RNA, 15 nt, Human
auggauuuccagcca

SEQ ID NO: 1797642 - RNA, 18 nt, Human
auggcugugccucugccu

SEQ ID NO: 1797643 - RNA, 14 nt, Human
augcuuguacauaa

SEQ ID NO: 1797644 - RNA, 13 nt, Human
augcuuguacaua

SEQ ID NO: 1797645 - RNA, 12 nt, Human
augcuuguacau

SEQ ID NO: 1797646 - RNA, 12 nt, Human
augcugcccugu

SEQ ID NO: 1797647 - RNA, 19 nt, Human
auggcugugccucugccug

SEQ ID NO: 1797648 - RNA, 20 nt, Human
auggcugugccucugccugu

SEQ ID NO: 1797649 - RNA, 24 nt, Human
augauguuuuccaugaguccccug

SEQ ID NO: 1797650 - RNA, 15 nt, Human
augcacaaacagagg

SEQ ID NO: 1797651 - RNA, 16 nt, Human
augaugccaugaggaa

SEQ ID NO: 1797652 - RNA, 17 nt, Human
augaugccaugaggaac

SEQ ID NO: 1797653 - RNA, 16 nt, Human
augcauauuauuuuau

SEQ ID NO: 1797654 - RNA, 20 nt, Human
augcauauuauuuuauguug

SEQ ID NO: 1797655 - RNA, 16 nt, Human
augcaugaaguaauau

SEQ ID NO: 1797656 - RNA, 19 nt, Human
augccucucucaggccaaa

SEQ ID NO: 1797657 - RNA, 16 nt, Human
augcacagaguuguua

SEQ ID NO: 1797658 - RNA, 16 nt, Human
augcacaaacagaggc

SEQ ID NO: 1797659 - RNA, 17 nt, Human
augcacaaacagaggcc

SEQ ID NO: 1797660 - RNA, 18 nt, Human
augcacagaguuguuaca

SEQ ID NO: 1797661 - RNA, 17 nt, Human
augcacagaguuguuac

SEQ ID NO: 1797662 - RNA, 23 nt, Human
auguaauuaaguacuauguauca

SEQ ID NO: 1797663 - RNA, 15 nt, Human
auggucggaaaacau

SEQ ID NO: 1797664 - RNA, 15 nt, Human
auguaauuaaguacu

SEQ ID NO: 1797665 - RNA, 17 nt, Human
auguaauuaaguacuau

SEQ ID NO: 1797666 - RNA, 19 nt, Human
auggucaccaaaucagcug

SEQ ID NO: 1797667 - RNA, 13 nt, Human
augucuuccugga

SEQ ID NO: 1797668 - RNA, 14 nt, Human
augucuuuucuugc

SEQ ID NO: 1797669 - RNA, 15 nt, Human
augugaaacauguuu

SEQ ID NO: 1797670 - RNA, 14 nt, Human
augugaaaucauuc

SEQ ID NO: 1797671 - RNA, 22 nt, Human
augugaaacuggauuaaacuua

SEQ ID NO: 1797672 - RNA, 20 nt, Human
augugggcuaguugggcuuc

SEQ ID NO: 1797673 - RNA, 17 nt, Human
auguucuaagaagugaa

SEQ ID NO: 1797674 - RNA, 12 nt, Human
auguucugggac

SEQ ID NO: 1797675 - RNA, 11 nt, Human
auguucuggga

SEQ ID NO: 1797676 - RNA, 13 nt, Human
auguucugggaca

SEQ ID NO: 1797677 - RNA, 19 nt, Human
auguuugccucugccucug

SEQ ID NO: 1797678 - RNA, 22 nt, Human
auguuugccucugccucugaca

SEQ ID NO: 1797679 - RNA, 15 nt, Human
agguucaaagauauu

SEQ ID NO: 1797680 - RNA, 14 nt, Human
agguucaaagauau

SEQ ID NO: 1797681 - RNA, 22 nt, Human
agguucccuuugacgccauccc

SEQ ID NO: 1797682 - RNA, 13 nt, Human
agguucccuuuga

SEQ ID NO: 1797683 - RNA, 23 nt, Human
agguucccuuugacgccauccca

SEQ ID NO: 1797684 - RNA, 23 nt, Human
aggugcuaggaacacuccuucac

SEQ ID NO: 1797685 - RNA, 19 nt, Human
aggugcuaggaacacuccu

SEQ ID NO: 1797686 - RNA, 22 nt, Human
aggugcuaggaacacuccuuca

SEQ ID NO: 1797687 - RNA, 20 nt, Human
agguaaaagcaucacaugaa

SEQ ID NO: 1797688 - RNA, 18 nt, Human
agguaaaucagacuauga

SEQ ID NO: 1797689 - RNA, 19 nt, Human
agguaaucgaccugccucg

SEQ ID NO: 1797690 - RNA, 21 nt, Human
agguaaucgaccugccucggc

SEQ ID NO: 1797691 - RNA, 23 nt, Human
agguaaaucagacuaugaaguuu

SEQ ID NO: 1797692 - RNA, 17 nt, Human
agguacaaccuguucug

SEQ ID NO: 1797693 - RNA, 12 nt, Human
aggucccuaaua

SEQ ID NO: 1797694 - RNA, 11 nt, Human
aggucccuaau

SEQ ID NO: 1797695 - RNA, 13 nt, Human
aggucccuaauaa

SEQ ID NO: 1797696 - RNA, 15 nt, Human
aggucccuaauaaag

SEQ ID NO: 1797697 - RNA, 16 nt, Human
aggucccuaauaaagc

SEQ ID NO: 1797698 - RNA, 18 nt, Human
aggucuguucuuuccaaa

SEQ ID NO: 1797699 - RNA, 23 nt, Human
aggucuguucuuuccaaaguaca

SEQ ID NO: 1797700 - RNA, 22 nt, Human
aggucuguucuuuccaaaguac

SEQ ID NO: 1797701 - RNA, 11 nt, Human
agggucccugg

SEQ ID NO: 1797702 - RNA, 12 nt, Human
aggguccugggg

SEQ ID NO: 1797703 - RNA, 15 nt, Human
aggguccuggggaac

SEQ ID NO: 1797704 - RNA, 21 nt, Human
aggguccuggggaaccugacc

SEQ ID NO: 1797705 - RNA, 23 nt, Human
aggguccuggggaaccugacccc

SEQ ID NO: 1797706 - RNA, 21 nt, Human
aggguaucaggugcugccauc

SEQ ID NO: 1797707 - RNA, 15 nt, Human
aggguaucuggugac

SEQ ID NO: 1797708 - RNA, 19 nt, Human
aggguaucaggugcugcca

SEQ ID NO: 1797709 - RNA, 19 nt, Human
aggggccucuuaugggcug

SEQ ID NO: 1797710 - RNA, 20 nt, Human
aggggccucuuaugggcugg

SEQ ID NO: 1797711 - RNA, 21 nt, Human
aggggccucuuaugggcuggg

SEQ ID NO: 1797712 - RNA, 21 nt, Human
aggcgugagccaccgugccug

SEQ ID NO: 1797713 - RNA, 23 nt, Human
aggcuacuguaaggcaaucaugg

SEQ ID NO: 1797714 - RNA, 21 nt, Human
aggcuagaaccaccugccuau

SEQ ID NO: 1797715 - RNA, 19 nt, Human
aggcccuuccucuccacug

SEQ ID NO: 1797716 - RNA, 22 nt, Human
aggcccuucucuccagccccug

SEQ ID NO: 1797717 - RNA, 23 nt, Human
aggcccuucucuccagccccugg

SEQ ID NO: 1797718 - RNA, 13 nt, Human
aggcccuuccucu

SEQ ID NO: 1797719 - RNA, 15 nt, Human
aggcccuuccucucc

SEQ ID NO: 1797720 - RNA, 17 nt, Human
aggcccuuccucuccac

SEQ ID NO: 1797721 - RNA, 18 nt, Human
aggcccuuccucuccacu

SEQ ID NO: 1797722 - RNA, 20 nt, Human
aggcccuucucuccagcccc

SEQ ID NO: 1797723 - RNA, 21 nt, Human
aggcccuucucuccagccccu

SEQ ID NO: 1797724 - RNA, 18 nt, Human
aggcuguaucccaugagc

SEQ ID NO: 1797725 - RNA, 13 nt, Human
aggcuguauccca

SEQ ID NO: 1797726 - RNA, 20 nt, Human
aggcugucaauuacaggaag

SEQ ID NO: 1797727 - RNA, 21 nt, Human
aggcugucaauuacaggaagu

SEQ ID NO: 1797728 - RNA, 22 nt, Human
agggacagaggggguggccucc

SEQ ID NO: 1797729 - RNA, 23 nt, Human
agggacagaggggguggccuccc

SEQ ID NO: 1797730 - RNA, 17 nt, Human
agggacgcuacccggga

SEQ ID NO: 1797731 - RNA, 23 nt, Human
agcugcgguccacccaggagccc

SEQ ID NO: 1797732 - RNA, 19 nt, Human
agcuucuguugcugccuca

SEQ ID NO: 1797733 - RNA, 23 nt, Human
agcuccgcuuucuacccagcgag

SEQ ID NO: 1797734 - RNA, 21 nt, Human
agcuccgcuuucuacccagcg

SEQ ID NO: 1797735 - RNA, 20 nt, Human
agcuccgcuuucuacccagc

SEQ ID NO: 1797736 - RNA, 13 nt, Human
agcuccuucuguc

SEQ ID NO: 1797737 - RNA, 12 nt, Human
agcuccuucugu

SEQ ID NO: 1797738 - RNA, 23 nt, Human
agcugagauuauaggcaccuacc

SEQ ID NO: 1797739 - RNA, 16 nt, Human
aggauguucugggaca

SEQ ID NO: 1797740 - RNA, 15 nt, Human
aggauguucugggac

SEQ ID NO: 1797741 - RNA, 22 nt, Human
aggauguacaaggacagccccu

SEQ ID NO: 1797742 - RNA, 22 nt, Human
aggauguucuagcauggcugcc

SEQ ID NO: 1797743 - RNA, 18 nt, Human
aggauguucugggacaca

SEQ ID NO: 1797744 - RNA, 14 nt, Human
aggauuaaauaaug

SEQ ID NO: 1797745 - RNA, 20 nt, Human
aggauuaaauaauguaaaua

SEQ ID NO: 1797746 - RNA, 14 nt, Human
aggauuauuggaaa

SEQ ID NO: 1797747 - RNA, 23 nt, Human
aggaugcuuguacauaaugcgug

SEQ ID NO: 1797748 - RNA, 21 nt, Human
aggaugcuuguacauaaugcg

SEQ ID NO: 1797749 - RNA, 18 nt, Human
aggaguggguugauuuca

SEQ ID NO: 1797750 - RNA, 13 nt, Human
aggaccucaggug

SEQ ID NO: 1797751 - RNA, 17 nt, Human
aggaauccagacccggc

SEQ ID NO: 1797752 - RNA, 21 nt, Human
aggaaucaugugccaagcaga

SEQ ID NO: 1797753 - RNA, 20 nt, Human
aggaauccagacccggcugc

SEQ ID NO: 1797754 - RNA, 21 nt, Human
agcuuuucccuuuuuuuaagu

SEQ ID NO: 1797755 - RNA, 23 nt, Human
agcauccuggcacccggccccug

SEQ ID NO: 1797756 - RNA, 22 nt, Human
agcauccuggcacccggccccu

SEQ ID NO: 1797757 - RNA, 23 nt, Human
agccaagugugguagagugugcc

SEQ ID NO: 1797758 - RNA, 23 nt, Human
agcaugccuggauggggcugcac

SEQ ID NO: 1797759 - RNA, 19 nt, Human
agcagugcaugcugucccu

SEQ ID NO: 1797760 - RNA, 20 nt, Human
agcagugcaugcugucccuu

SEQ ID NO: 1797761 - RNA, 18 nt, Human
agcagcguuucuaugaca

SEQ ID NO: 1797762 - RNA, 13 nt, Human
agcagcguuucua

SEQ ID NO: 1797763 - RNA, 20 nt, Human
agcacagacccugcccugug

SEQ ID NO: 1797764 - RNA, 18 nt, Human
agcacagacccugcccug

SEQ ID NO: 1797765 - RNA, 19 nt, Human
agcacagacccugcccugu

SEQ ID NO: 1797766 - RNA, 23 nt, Human
agcacacuugacaucaacugcau

SEQ ID NO: 1797767 - RNA, 17 nt, Human
agcacagacccugcccu

SEQ ID NO: 1797768 - RNA, 21 nt, Human
agccucccaaagugcugggau

SEQ ID NO: 1797769 - RNA, 17 nt, Human
agccgugccuucagcuc

SEQ ID NO: 1797770 - RNA, 22 nt, Human
agccucccacgacugcccggca

SEQ ID NO: 1797771 - RNA, 15 nt, Human
agccgugccuucagc

SEQ ID NO: 1797772 - RNA, 16 nt, Human
agccgugccuucagcu

SEQ ID NO: 1797773 - RNA, 21 nt, Human
agccgggcgugguggugagug

SEQ ID NO: 1797774 - RNA, 19 nt, Human
agccucccgaguagcuggg

SEQ ID NO: 1797775 - RNA, 18 nt, Human
agccucccgaguagcugg

SEQ ID NO: 1797776 - RNA, 20 nt, Human
agccucccgaguagcuggga

SEQ ID NO: 1797777 - RNA, 14 nt, Human
agccuccuccagcc

SEQ ID NO: 1797778 - RNA, 21 nt, Human
agccgccaugcuccuggccca

SEQ ID NO: 1797779 - RNA, 13 nt, Human
agccgcuggggcc

SEQ ID NO: 1797780 - RNA, 16 nt, Human
agccccauucugccug

SEQ ID NO: 1797781 - RNA, 13 nt, Human
agccccauucugc

SEQ ID NO: 1797782 - RNA, 17 nt, Human
agcccucacccuggggc

SEQ ID NO: 1797783 - RNA, 15 nt, Human
agccccagugcccac

SEQ ID NO: 1797784 - RNA, 14 nt, Human
agccccagugccca

SEQ ID NO: 1797785 - RNA, 13 nt, Human
agccccagugccc

SEQ ID NO: 1797786 - RNA, 18 nt, Human
agccagcaggcucucagg

SEQ ID NO: 1797787 - RNA, 19 nt, Human
agccagcaggcucucaggc

SEQ ID NO: 1797788 - RNA, 20 nt, Human
agccagcaggcucucaggcc

SEQ ID NO: 1797789 - RNA, 16 nt, Human
agacuggaagcacagc

SEQ ID NO: 1797790 - RNA, 17 nt, Human
agacuggaagcacagcu

SEQ ID NO: 1797791 - RNA, 19 nt, Human
agacuggaagcacagcuuc

SEQ ID NO: 1797792 - RNA, 21 nt, Human
agagaggguggugaccucugc

SEQ ID NO: 1797793 - RNA, 20 nt, Human
agagaggguggugaccucug

SEQ ID NO: 1797794 - RNA, 22 nt, Human
agagaggguggugaccucugcc

SEQ ID NO: 1797795 - RNA, 19 nt, Human
agagcccaccuuggcucaa

SEQ ID NO: 1797796 - RNA, 13 nt, Human
agagcccacgccc

SEQ ID NO: 1797797 - RNA, 17 nt, Human
agagcccacgcccccac

SEQ ID NO: 1797798 - RNA, 16 nt, Human
agagcccacgccccca

SEQ ID NO: 1797799 - RNA, 21 nt, Human
agacgcugugcugcccugccc

SEQ ID NO: 1797800 - RNA, 12 nt, Human
agacagcugccu

SEQ ID NO: 1797801 - RNA, 11 nt, Human
agacagcucuu

SEQ ID NO: 1797802 - RNA, 12 nt, Human
agacagcucuua

SEQ ID NO: 1797803 - RNA, 18 nt, Human
agacggagucccaccuug

SEQ ID NO: 1797804 - RNA, 22 nt, Human
agacgcugugcugcccugccca

SEQ ID NO: 1797805 - RNA, 17 nt, Human
agacgugauuuugcugu

SEQ ID NO: 1797806 - RNA, 15 nt, Human
agacagauacuccuc

SEQ ID NO: 1797807 - RNA, 21 nt, Human
agacagauacuccuccaaggu

SEQ ID NO: 1797808 - RNA, 16 nt, Human
agacagcccgggcucu

SEQ ID NO: 1797809 - RNA, 14 nt, Human
agacagcccgggcu

SEQ ID NO: 1797810 - RNA, 15 nt, Human
agacagcccgggcuc

SEQ ID NO: 1797811 - RNA, 19 nt, Human
agauauaugcucugcaugu

SEQ ID NO: 1797812 - RNA, 14 nt, Human
agauggcugugccu

SEQ ID NO: 1797813 - RNA, 14 nt, Human
agagugugccugaa

SEQ ID NO: 1797814 - RNA, 23 nt, Human
agaggguggugaccucugccuga

SEQ ID NO: 1797815 - RNA, 19 nt, Human
agaguggcuccucccggug

SEQ ID NO: 1797816 - RNA, 11 nt, Human
agagugggagc

SEQ ID NO: 1797817 - RNA, 23 nt, Human
agaguggcuccucccggugccca

SEQ ID NO: 1797818 - RNA, 19 nt, Human
agaguggggauaugauuua

SEQ ID NO: 1797819 - RNA, 19 nt, Human
agaggguggugaccucugc

SEQ ID NO: 1797820 - RNA, 22 nt, Human
agaggguggugaccucugccug

SEQ ID NO: 1797821 - RNA, 20 nt, Human
agaggguggugaccucugcc

SEQ ID NO: 1797822 - RNA, 12 nt, Human
agagggcacaga

SEQ ID NO: 1797823 - RNA, 14 nt, Human
agaggacuuuucuu

SEQ ID NO: 1797824 - RNA, 15 nt, Human
agaggagagaggacc

SEQ ID NO: 1797825 - RNA, 16 nt, Human
agaggagagaggaccc

SEQ ID NO: 1797826 - RNA, 16 nt, Human
agaggaaggagaggag

SEQ ID NO: 1797827 - RNA, 15 nt, Human
agagcccaggccucc

SEQ ID NO: 1797828 - RNA, 13 nt, Human
agagcccaggccu

SEQ ID NO: 1797829 - RNA, 14 nt, Human
agagcccaggccuc

SEQ ID NO: 1797830 - RNA, 15 nt, Human
aauccaaugaaauga

SEQ ID NO: 1797831 - RNA, 17 nt, Human
aauccagacccggcugc

SEQ ID NO: 1797832 - RNA, 19 nt, Human
aauccagacccggcugcgu

SEQ ID NO: 1797833 - RNA, 13 nt, Human
aauccagccugcu

SEQ ID NO: 1797834 - RNA, 15 nt, Human
aaucucaaauuucua

SEQ ID NO: 1797835 - RNA, 16 nt, Human
aaucucaaauuucuaa

SEQ ID NO: 1797836 - RNA, 16 nt, Human
aaucucuccauucccg

SEQ ID NO: 1797837 - RNA, 18 nt, Human
aaucucaaauuucuaaau

SEQ ID NO: 1797838 - RNA, 17 nt, Human
aaucucaaauuucuaaa

SEQ ID NO: 1797839 - RNA, 16 nt, Human
aaugauccccagcugu

SEQ ID NO: 1797840 - RNA, 20 nt, Human
aaugauccccagcuguuuau

SEQ ID NO: 1797841 - RNA, 19 nt, Human
aaugauccccagcuguuua

SEQ ID NO: 1797842 - RNA, 22 nt, Human
aaugauccccagcuguuuaugc

SEQ ID NO: 1797843 - RNA, 17 nt, Human
aauccaagcaaauguga

SEQ ID NO: 1797844 - RNA, 18 nt, Human
aauccaagcaaaugugaa

SEQ ID NO: 1797845 - RNA, 16 nt, Human
aauauauaucaaauau

SEQ ID NO: 1797846 - RNA, 13 nt, Human
aauagacaauuua

SEQ ID NO: 1797847 - RNA, 15 nt, Human
aaucaccgaaaacgu

SEQ ID NO: 1797848 - RNA, 19 nt, Human
aaucacauucgaguguuuc

SEQ ID NO: 1797849 - RNA, 14 nt, Human
aaucaccgaaaacg

SEQ ID NO: 1797850 - RNA, 21 nt, Human
aauauuagugaccucagcuuu

SEQ ID NO: 1797851 - RNA, 23 nt, Human
aauacuuugcagcacagcugaga

SEQ ID NO: 1797852 - RNA, 20 nt, Human
aauacucuacccucuuagaa

SEQ ID NO: 1797853 - RNA, 22 nt, Human
aauacucuacccucuuagaaaa

SEQ ID NO: 1797854 - RNA, 17 nt, Human
aaugugaaaagaaaaau

SEQ ID NO: 1797855 - RNA, 15 nt, Human
aaugugaaaagaaaa

SEQ ID NO: 1797856 - RNA, 16 nt, Human
aauguuugccucugcc

SEQ ID NO: 1797857 - RNA, 15 nt, Human
aauguuugccucugc

SEQ ID NO: 1797858 - RNA, 13 nt, Human
aauguuuccuuua

SEQ ID NO: 1797859 - RNA, 22 nt, Human
aauguuuacagauccccaagcc

SEQ ID NO: 1797860 - RNA, 12 nt, Human
aauguuuccuuu

SEQ ID NO: 1797861 - RNA, 23 nt, Human
aaugcuauaacuauguugauaaa

SEQ ID NO: 1797862 - RNA, 23 nt, Human
aaugccuuacccucauguucuua

SEQ ID NO: 1797863 - RNA, 22 nt, Human
aaugcgcaggcuggcccugccc

SEQ ID NO: 1797864 - RNA, 21 nt, Human
aaugcgcaggcuggcccugcc

SEQ ID NO: 1797865 - RNA, 18 nt, Human
aaugcgugcauaccacuu

SEQ ID NO: 1797866 - RNA, 19 nt, Human
aaugcgugcauaccacuuu

SEQ ID NO: 1797867 - RNA, 15 nt, Human
aauguuuuuuuuuaa

SEQ ID NO: 1797868 - RNA, 20 nt, Human
aauguuuuuuuuuaaagacu

SEQ ID NO: 1797869 - RNA, 22 nt, Human
aauguuuuuuuuuaaagacuuu

SEQ ID NO: 1797870 - RNA, 18 nt, Human
aagggacgcuacccggga

SEQ ID NO: 1797871 - RNA, 19 nt, Human
aaggucauuuuuuuuaaga

SEQ ID NO: 1797872 - RNA, 18 nt, Human
aaggucauuuuuuuuaag

SEQ ID NO: 1797873 - RNA, 22 nt, Human
aaguccucuuuucugagaggac

SEQ ID NO: 1797874 - RNA, 14 nt, Human
aagucuccaaaguc

SEQ ID NO: 1797875 - RNA, 18 nt, Human
aaguccucuuuucugaga

SEQ ID NO: 1797876 - RNA, 19 nt, Human
aaguccacaguggaaccag

SEQ ID NO: 1797877 - RNA, 14 nt, Human
aaguccacagugga

SEQ ID NO: 1797878 - RNA, 18 nt, Human
aaguauccugcuucugau

SEQ ID NO: 1797879 - RNA, 19 nt, Human
aaguagaagucuuagaugu

SEQ ID NO: 1797880 - RNA, 20 nt, Human
aaguagaagucuuagaugua

SEQ ID NO: 1797881 - RNA, 20 nt, Human
aaggugaggagcuugaaacc

SEQ ID NO: 1797882 - RNA, 15 nt, Human
aaguaguggagcccc

SEQ ID NO: 1797883 - RNA, 17 nt, Human
aaguaucccuacuguaa

SEQ ID NO: 1797884 - RNA, 23 nt, Human
aaguaucccuacuguaauuugug

SEQ ID NO: 1797885 - RNA, 18 nt, Human
aaguaucccuacuguaau

SEQ ID NO: 1797886 - RNA, 21 nt, Human
aaguagaagucuuagauguau

SEQ ID NO: 1797887 - RNA, 15 nt, Human
aagucuccaaagucu

SEQ ID NO: 1797888 - RNA, 20 nt, Human
aagucuguugauuaaagaug

SEQ ID NO: 1797889 - RNA, 21 nt, Human
aaguggaaaaauagccugccu

SEQ ID NO: 1797890 - RNA, 19 nt, Human
aaguggaaaaauagccugc

SEQ ID NO: 1797891 - RNA, 20 nt, Human
aagauguucuggauaccauu

SEQ ID NO: 1797892 - RNA, 15 nt, Human
aagauguucuggaua

SEQ ID NO: 1797893 - RNA, 12 nt, Human
aagauaaaugug

SEQ ID NO: 1797894 - RNA, 13 nt, Human
aagauaaaugugc

SEQ ID NO: 1797895 - RNA, 14 nt, Human
aagauaaaugugcu

SEQ ID NO: 1797896 - RNA, 20 nt, Human
aagccagcaggcucucaggc

SEQ ID NO: 1797897 - RNA, 23 nt, Human
aagccagcaggcucucaggccag

SEQ ID NO: 1797898 - RNA, 22 nt, Human
aagcagcguuucuaugacacau

SEQ ID NO: 1797899 - RNA, 21 nt, Human
aagcagcguuucuaugacaca

SEQ ID NO: 1797900 - RNA, 20 nt, Human
aagcagcguuucuaugacac

SEQ ID NO: 1797901 - RNA, 17 nt, Human
aagcagcguuucuauga

SEQ ID NO: 1797902 - RNA, 14 nt, Human
aagcagcguuucua

SEQ ID NO: 1797903 - RNA, 21 nt, Human
aagcuggucccacucagucca

SEQ ID NO: 1797904 - RNA, 18 nt, Human
aagcuggucccacucagu

SEQ ID NO: 1797905 - RNA, 18 nt, Human
aagcuguguggcagucug

SEQ ID NO: 1797906 - RNA, 13 nt, Human
aaggacacuagaa

SEQ ID NO: 1797907 - RNA, 13 nt, Human
aaggacagccccu

SEQ ID NO: 1797908 - RNA, 19 nt, Human
aaggacagccccuccucca

SEQ ID NO: 1797909 - RNA, 15 nt, Human
aaggauugcuacugu

SEQ ID NO: 1797910 - RNA, 15 nt, Human
aaggauguucuagca

SEQ ID NO: 1797911 - RNA, 12 nt, Human
aaggcagggagg

SEQ ID NO: 1797912 - RNA, 21 nt, Human
aagcgauucuucugcuucagc

SEQ ID NO: 1797913 - RNA, 17 nt, Human
aaaucuuauaauuuaaa

SEQ ID NO: 1797914 - RNA, 15 nt, Human
aaaugccuuuguacu

SEQ ID NO: 1797915 - RNA, 19 nt, Human
aaauugacacuuaaaaaug

SEQ ID NO: 1797916 - RNA, 13 nt, Human
aaauugcuccuug

SEQ ID NO: 1797917 - RNA, 14 nt, Human
aaauugcuccuuga

SEQ ID NO: 1797918 - RNA, 13 nt, Human
aaauuaaagcuga

SEQ ID NO: 1797919 - RNA, 17 nt, Human
aaauuaaagcugaaaac

SEQ ID NO: 1797920 - RNA, 21 nt, Human
aaauucuugcaaaguaucccu

SEQ ID NO: 1797921 - RNA, 18 nt, Human
aaauuuuuuuuguuucau

SEQ ID NO: 1797922 - RNA, 17 nt, Human
aaauuuuuuuuguuuca

SEQ ID NO: 1797923 - RNA, 18 nt, Human
aacaaauuuacagagaca

SEQ ID NO: 1797924 - RNA, 22 nt, Human
aaccacuggaaaguuuaugguu

SEQ ID NO: 1797925 - RNA, 15 nt, Human
aaccacuucagcuga

SEQ ID NO: 1797926 - RNA, 13 nt, Human
aaccacgcuggac

SEQ ID NO: 1797927 - RNA, 15 nt, Human
aacaucccuccuggg

SEQ ID NO: 1797928 - RNA, 15 nt, Human
aacccuauugguaaa

SEQ ID NO: 1797929 - RNA, 21 nt, Human
aacccuuggagccaauggaga

SEQ ID NO: 1797930 - RNA, 11 nt, Human
aacgcagcccu

SEQ ID NO: 1797931 - RNA, 15 nt, Human
aacgcugauuuaaag

SEQ ID NO: 1797932 - RNA, 14 nt, Human
aacugauaaagaug

SEQ ID NO: 1797933 - RNA, 16 nt, Human
aacugagugccuuuug

SEQ ID NO: 1797934 - RNA, 18 nt, Human
aacuuaaucuaaauggaa

SEQ ID NO: 1797935 - RNA, 16 nt, Human
aacuuaaucuaaaugg

SEQ ID NO: 1797936 - RNA, 15 nt, Human
aacuuaaucuaaaug

SEQ ID NO: 1797937 - RNA, 20 nt, Human
aacuuuaugcuaagugaaau

SEQ ID NO: 1797938 - RNA, 21 nt, Human
aacuuuaugcuaagugaaaua

SEQ ID NO: 1797939 - RNA, 19 nt, Human
aaauaguggugugauuugg

SEQ ID NO: 1797940 - RNA, 24 nt, Human
aaauagcucaggugucccugcacu

SEQ ID NO: 1797941 - RNA, 19 nt, Human
aaaucaaugcuauaacuau

SEQ ID NO: 1797942 - RNA, 16 nt, Human
aaauaaaacuuuuuaa

SEQ ID NO: 1797943 - RNA, 13 nt, Human
aaauaaaacuuuu

SEQ ID NO: 1797944 - RNA, 19 nt, Human
aaauaaaacuuuuuaaaau

SEQ ID NO: 1797945 - RNA, 13 nt, Human
aaaguggaaaaau

SEQ ID NO: 1797946 - RNA, 19 nt, Human
aaaggcuccaggagcagcc

SEQ ID NO: 1797947 - RNA, 20 nt, Human
aaaggcuccaggagcagcca

SEQ ID NO: 1797948 - RNA, 14 nt, Human
aaaggcagaagcaa

SEQ ID NO: 1797949 - RNA, 21 nt, Human
aaaggccuaauucuaugccug

SEQ ID NO: 1797950 - RNA, 15 nt, Human
aaaggcuccaggagc

SEQ ID NO: 1797951 - RNA, 16 nt, Human
aaaggcuccaggagca

SEQ ID NO: 1797952 - RNA, 22 nt, Human
aaagcccuuccaugucgccucu

SEQ ID NO: 1797953 - RNA, 23 nt, Human
aaagcccuuccaugucgccucug

SEQ ID NO: 1797954 - RNA, 16 nt, Human
aaagccuccuccagcc

SEQ ID NO: 1797955 - RNA, 19 nt, Human
aaagcccuuaggaagaauu

SEQ ID NO: 1797956 - RNA, 18 nt, Human
aaaccccuguaggccuca

SEQ ID NO: 1797957 - RNA, 16 nt, Human
aaacccuauugguaaa

SEQ ID NO: 1797958 - RNA, 13 nt, Human
aaacccucgaggc

SEQ ID NO: 1797959 - RNA, 24 nt, Human
aaacccucgaggcggaucuuugga

SEQ ID NO: 1797960 - RNA, 18 nt, Human
aaacucuccucugcugcu

SEQ ID NO: 1797961 - RNA, 18 nt, Human
aaaccaucauugaaaucu

SEQ ID NO: 1797962 - RNA, 15 nt, Human
aaagaaauauaccua

SEQ ID NO: 1797963 - RNA, 17 nt, Human
aaagaaauauaccuaaa

SEQ ID NO: 1797964 - RNA, 20 nt, Human
aaagaagguuucagaaagaa

SEQ ID NO: 1797965 - RNA, 14 nt, Human
aaagaguaggaaga

SEQ ID NO: 1797966 - RNA, 16 nt, Human
aaagauauuuugcuuu

SEQ ID NO: 1797967 - RNA, 12 nt, Human
aaagauauuuug

SEQ ID NO: 1797968 - RNA, 20 nt, Human
aaagauauuuugcuuuguga

SEQ ID NO: 1797969 - RNA, 17 nt, Human
aaagauauuuugcuuug

SEQ ID NO: 1797970 - RNA, 21 nt, Human
aaaauugaugggauuugguca

SEQ ID NO: 1797971 - RNA, 22 nt, Human
aaaaucucaaauuucuaaaucu

SEQ ID NO: 1797972 - RNA, 19 nt, Human
aaaaucucaaauuucuaaa

SEQ ID NO: 1797973 - RNA, 16 nt, Human
aaacacuguucucugc

SEQ ID NO: 1797974 - RNA, 22 nt, Human
aaacacugggagaaaugaaaaa

SEQ ID NO: 1797975 - RNA, 21 nt, Human
aaacacugggagaaaugaaaa

SEQ ID NO: 1797976 - RNA, 15 nt, Human
aaaaagaaaggaggg

SEQ ID NO: 1797977 - RNA, 21 nt, Human
aaaaucuacacuccagugaga

SEQ ID NO: 1797978 - RNA, 22 nt, Human
aaaaucccuuaccucggugccu

SEQ ID NO: 1797979 - RNA, 19 nt, Human
aaaauaaaauuaaagcuga

SEQ ID NO: 1797980 - RNA, 17 nt, Human
aaaauaaaacuuuuuaa

SEQ ID NO: 1797981 - RNA, 18 nt, Human
aaaaguucugcagauaaa

SEQ ID NO: 1797982 - RNA, 22 nt, Human
acccccugcaaagcccagcuug

SEQ ID NO: 1797983 - RNA, 18 nt, Human
acccccugcaaagcccag

SEQ ID NO: 1797984 - RNA, 20 nt, Human
acccccugcaaagcccagcu

SEQ ID NO: 1797985 - RNA, 14 nt, Human
acccccugcaaagc

SEQ ID NO: 1797986 - RNA, 17 nt, Human
acccccugcaaagccca

SEQ ID NO: 1797987 - RNA, 11 nt, Human
acccccugaau

SEQ ID NO: 1797988 - RNA, 16 nt, Human
acccaccucagccucc

SEQ ID NO: 1797989 - RNA, 15 nt, Human
acccaccucagccuc

SEQ ID NO: 1797990 - RNA, 14 nt, Human
acccaccucagccu

SEQ ID NO: 1797991 - RNA, 13 nt, Human
acccaccucagcc

SEQ ID NO: 1797992 - RNA, 23 nt, Human
acccaagggccuggccugagcug

SEQ ID NO: 1797993 - RNA, 17 nt, Human
acccacaagaaaugaaa

SEQ ID NO: 1797994 - RNA, 21 nt, Human
acccacaagaaaugaaagcag

SEQ ID NO: 1797995 - RNA, 20 nt, Human
accauauuaccacagacaua

SEQ ID NO: 1797996 - RNA, 18 nt, Human
acccaagggccuggccug

SEQ ID NO: 1797997 - RNA, 19 nt, Human
acccaagggccuggccuga

SEQ ID NO: 1797998 - RNA, 22 nt, Human
acccaagggccuggccugagcu

SEQ ID NO: 1797999 - RNA, 16 nt, Human
accauauuaccacaga

SEQ ID NO: 1798000 - RNA, 14 nt, Human
accauauuaccaca

SEQ ID NO: 1798001 - RNA, 19 nt, Human
accccuccaugugggcuag

SEQ ID NO: 1798002 - RNA, 16 nt, Human
accccuccaugugggc

SEQ ID NO: 1798003 - RNA, 17 nt, Human
accccucauagcccuca

SEQ ID NO: 1798004 - RNA, 18 nt, Human
acaugugcacaugcacgu

SEQ ID NO: 1798005 - RNA, 16 nt, Human
acaugugcacaugcac

SEQ ID NO: 1798006 - RNA, 19 nt, Human
acaugaucuucuuuauaau

SEQ ID NO: 1798007 - RNA, 19 nt, Human
acaucagcacgauuucugu

SEQ ID NO: 1798008 - RNA, 18 nt, Human
acaucagcacgauuucug

SEQ ID NO: 1798009 - RNA, 17 nt, Human
acaucagcacgauuucu

SEQ ID NO: 1798010 - RNA, 15 nt, Human
acaucagcacgauuu

SEQ ID NO: 1798011 - RNA, 23 nt, Human
acauguuucuuuguaaugaaaac

SEQ ID NO: 1798012 - RNA, 19 nt, Human
acauguuucuuuguaauga

SEQ ID NO: 1798013 - RNA, 22 nt, Human
acauguuucuuuguaaugaaaa

SEQ ID NO: 1798014 - RNA, 19 nt, Human
acaggguuuugccauguug

SEQ ID NO: 1798015 - RNA, 23 nt, Human
acaggcaaugcuggcuguuggcu

SEQ ID NO: 1798016 - RNA, 19 nt, Human
acaggcaaugcuggcuguu

SEQ ID NO: 1798017 - RNA, 21 nt, Human
acauaaugcgugcauaccacu

SEQ ID NO: 1798018 - RNA, 22 nt, Human
acauaaugcgugcauaccacuu

SEQ ID NO: 1798019 - RNA, 23 nt, Human
acauaaugcgugcauaccacuuu

SEQ ID NO: 1798020 - RNA, 15 nt, Human
acauuuauucugcuc

SEQ ID NO: 1798021 - RNA, 19 nt, Human
acauuuguucuauagcuuu

SEQ ID NO: 1798022 - RNA, 12 nt, Human
accaagcccagu

SEQ ID NO: 1798023 - RNA, 14 nt, Human
accaauauuguaca

SEQ ID NO: 1798024 - RNA, 13 nt, Human
accagaucauugu

SEQ ID NO: 1798025 - RNA, 19 nt, Human
accagagcugccaccugcc

SEQ ID NO: 1798026 - RNA, 13 nt, Human
accagcagaaaug

SEQ ID NO: 1798027 - RNA, 15 nt, Human
accagcccagacccu

SEQ ID NO: 1798028 - RNA, 17 nt, Human
accagccaguaaauggg

SEQ ID NO: 1798029 - RNA, 17 nt, Human
acaaggauugcuacugu

SEQ ID NO: 1798030 - RNA, 13 nt, Human
acaagaaaugaaa

SEQ ID NO: 1798031 - RNA, 12 nt, Human
acaaggcaaggc

SEQ ID NO: 1798032 - RNA, 14 nt, Human
acaaggcaaggcug

SEQ ID NO: 1798033 - RNA, 22 nt, Human
acaaaauguaggguuauaauaa

SEQ ID NO: 1798034 - RNA, 15 nt, Human
acaaggcaaggcugu

SEQ ID NO: 1798035 - RNA, 22 nt, Human
aauuuuguguaagaaauacaga

SEQ ID NO: 1798036 - RNA, 18 nt, Human
aauuuuguguaagaaaua

SEQ ID NO: 1798037 - RNA, 17 nt, Human
aauuuuguguaagaaau

SEQ ID NO: 1798038 - RNA, 15 nt, Human
aauuuuguguaagaa

SEQ ID NO: 1798039 - RNA, 14 nt, Human
aauuuuguguaaga

SEQ ID NO: 1798040 - RNA, 18 nt, Human
aauuuuguaauguaucaa

SEQ ID NO: 1798041 - RNA, 17 nt, Human
acacgcgugcacacacc

SEQ ID NO: 1798042 - RNA, 15 nt, Human
acacgcgugcacaca

SEQ ID NO: 1798043 - RNA, 16 nt, Human
acacgcuccuuccucu

SEQ ID NO: 1798044 - RNA, 14 nt, Human
acacgcuccuuccu

SEQ ID NO: 1798045 - RNA, 13 nt, Human
acacagcucuucu

SEQ ID NO: 1798046 - RNA, 11 nt, Human
acacagcucuu

SEQ ID NO: 1798047 - RNA, 22 nt, Human
acacauuuuauuuuauuaugca

SEQ ID NO: 1798048 - RNA, 21 nt, Human
acacauuuuauuuuauuaugc

SEQ ID NO: 1798049 - RNA, 22 nt, Human
acacauuuuuuaaaugcaccug

SEQ ID NO: 1798050 - RNA, 20 nt, Human
acacauuuuuuaaaugcacc

SEQ ID NO: 1798051 - RNA, 14 nt, Human
acacauuuuucaga

SEQ ID NO: 1798052 - RNA, 12 nt, Human
acacauuuuucu

SEQ ID NO: 1798053 - RNA, 19 nt, Human
acacagaggcugccucucc

SEQ ID NO: 1798054 - RNA, 20 nt, Human
acacagcucuguccugggag

SEQ ID NO: 1798055 - RNA, 17 nt, Human
acacagauuugagcuca

SEQ ID NO: 1798056 - RNA, 19 nt, Human
acagagugagacucugucu

SEQ ID NO: 1798057 - RNA, 15 nt, Human
acagagugagacucu

SEQ ID NO: 1798058 - RNA, 14 nt, Human
acagaggggguggc

SEQ ID NO: 1798059 - RNA, 19 nt, Human
acagccaacuauggccugu

SEQ ID NO: 1798060 - RNA, 17 nt, Human
acagccaacuauggccu

SEQ ID NO: 1798061 - RNA, 15 nt, Human
acagaggcagcccca

SEQ ID NO: 1798062 - RNA, 14 nt, Human
acagaggcagcccc

SEQ ID NO: 1798063 - RNA, 14 nt, Human
acagacacaggccc

SEQ ID NO: 1798064 - RNA, 13 nt, Human
acagacacaggcc

SEQ ID NO: 1798065 - RNA, 23 nt, Human
acagaggcagccccauucugccu

SEQ ID NO: 1798066 - RNA, 19 nt, Human
acagaggcagccccauucu

SEQ ID NO: 1798067 - RNA, 15 nt, Human
acagacacaggcccg

SEQ ID NO: 1798068 - RNA, 11 nt, Human
acagacacagg

SEQ ID NO: 1798069 - RNA, 13 nt, Human
acagacaaagcgu

SEQ ID NO: 1798070 - RNA, 15 nt, Human
acacuguacugcaau

SEQ ID NO: 1798071 - RNA, 15 nt, Human
acacugcauguuugu

SEQ ID NO: 1798072 - RNA, 14 nt, Human
acacugcauguuug

SEQ ID NO: 1798073 - RNA, 17 nt, Human
acagccacggccaggcc

SEQ ID NO: 1798074 - RNA, 16 nt, Human
acagccacggccaggc

SEQ ID NO: 1798075 - RNA, 15 nt, Human
acagccacggccagg

SEQ ID NO: 1798076 - RNA, 18 nt, Human
acagccacggccaggcca

SEQ ID NO: 1798077 - RNA, 18 nt, Human
acagcucuucuccaggcu

SEQ ID NO: 1798078 - RNA, 15 nt, Human
acaggaucagucuga

SEQ ID NO: 1798079 - RNA, 17 nt, Human
acagcucuucuccaggc

SEQ ID NO: 1798080 - RNA, 16 nt, Human
acagcucuucuccagg

SEQ ID NO: 1798081 - RNA, 12 nt, Human
acaggcaagcac

SEQ ID NO: 1798082 - RNA, 18 nt, Human
acaggcaaugcuggcugu

SEQ ID NO: 1798083 - RNA, 21 nt, Human
acaggaugaugacuauggaaa

SEQ ID NO: 1798084 - RNA, 19 nt, Human
acucaguccauagcagaga

SEQ ID NO: 1798085 - RNA, 18 nt, Human
acuauuuuucagaaucuc

SEQ ID NO: 1798086 - RNA, 13 nt, Human
acucaaaagcugg

SEQ ID NO: 1798087 - RNA, 18 nt, Human
acucaaaagcugggcagg

SEQ ID NO: 1798088 - RNA, 19 nt, Human
acucugucgcccagucugg

SEQ ID NO: 1798089 - RNA, 23 nt, Human
acucuaucaaguauuauaccuuu

SEQ ID NO: 1798090 - RNA, 17 nt, Human
acucuauguucuaagaa

SEQ ID NO: 1798091 - RNA, 15 nt, Human
acucuagggaaaaac

SEQ ID NO: 1798092 - RNA, 17 nt, Human
acucuagggaaaaacca

SEQ ID NO: 1798093 - RNA, 15 nt, Human
acgucugacaggcaa

SEQ ID NO: 1798094 - RNA, 14 nt, Human
acgucugacaggca

SEQ ID NO: 1798095 - RNA, 13 nt, Human
acgucugacaggc

SEQ ID NO: 1798096 - RNA, 11 nt, Human
acgcugugcug

SEQ ID NO: 1798097 - RNA, 12 nt, Human
acgcugugcugc

SEQ ID NO: 1798098 - RNA, 14 nt, Human
acgcugugcugccc

SEQ ID NO: 1798099 - RNA, 11 nt, Human
acgugaguccu

SEQ ID NO: 1798100 - RNA, 18 nt, Human
accuuggcugcagggagu

SEQ ID NO: 1798101 - RNA, 17 nt, Human
accuuggcugcagggag

SEQ ID NO: 1798102 - RNA, 13 nt, Human
accuuucccaucu

SEQ ID NO: 1798103 - RNA, 18 nt, Human
accuuucccaucuuccaa

SEQ ID NO: 1798104 - RNA, 15 nt, Human
accuuuaagagaaau

SEQ ID NO: 1798105 - RNA, 16 nt, Human
accugucccccugaca

SEQ ID NO: 1798106 - RNA, 12 nt, Human
accugucccccu

SEQ ID NO: 1798107 - RNA, 15 nt, Human
accugucccccugac

SEQ ID NO: 1798108 - RNA, 20 nt, Human
accugcccugcugaguccca

SEQ ID NO: 1798109 - RNA, 15 nt, Human
accucugcagcaaua

SEQ ID NO: 1798110 - RNA, 20 nt, Human
accucugcagcaauaaagca

SEQ ID NO: 1798111 - RNA, 18 nt, Human
accucugcagcaauaaag

SEQ ID NO: 1798112 - RNA, 21 nt, Human
accucugcagcaauaaagcag

SEQ ID NO: 1798113 - RNA, 16 nt, Human
agaaaggauaaaguug

SEQ ID NO: 1798114 - RNA, 22 nt, Human
agaaaguacuucuccacccugc

SEQ ID NO: 1798115 - RNA, 23 nt, Human
agaaaguacuucuccacccugcu

SEQ ID NO: 1798116 - RNA, 22 nt, Human
acuuuauuuucuauaauuuaaa

SEQ ID NO: 1798117 - RNA, 16 nt, Human
acuuuguucuggcucu

SEQ ID NO: 1798118 - RNA, 17 nt, Human
acuuuguucuggcucuu

SEQ ID NO: 1798119 - RNA, 22 nt, Human
acuuuaucuugaauaauguaag

SEQ ID NO: 1798120 - RNA, 20 nt, Human
acuuuguucuggcucuucca

SEQ ID NO: 1798121 - RNA, 19 nt, Human
acuuuguucuggcucuucc

SEQ ID NO: 1798122 - RNA, 12 nt, Human
acuuuuaugaua

SEQ ID NO: 1798123 - RNA, 16 nt, Human
acuuuuaugauacuug

SEQ ID NO: 1798124 - RNA, 13 nt, Human
acuuuuauaaacu

SEQ ID NO: 1798125 - RNA, 16 nt, Human
agaaaaucaggcuggc

SEQ ID NO: 1798126 - RNA, 19 nt, Human
agaaaauaguggugugauu

SEQ ID NO: 1798127 - RNA, 15 nt, Human
agaaaauaccaagga

SEQ ID NO: 1798128 - RNA, 14 nt, Human
acuuuucuuugugg

SEQ ID NO: 1798129 - RNA, 20 nt, Human
acuuuucauaaccuagccuu

SEQ ID NO: 1798130 - RNA, 23 nt, Human
acuuuuaugauacuugaaaauua

SEQ ID NO: 1798131 - RNA, 23 nt, Human
acuuuuauuuccagugaaaucag

SEQ ID NO: 1798132 - RNA, 16 nt, Human
acuuuucuuucagcca

SEQ ID NO: 1798133 - RNA, 18 nt, Human
acuuguaaaggaauuuaa

SEQ ID NO: 1798134 - RNA, 16 nt, Human
acuugguuuuuaaaaa

SEQ ID NO: 1798135 - RNA, 14 nt, Human
acuugggccacugu

SEQ ID NO: 1798136 - RNA, 15 nt, Human
acuugggccacugug

SEQ ID NO: 1798137 - RNA, 12 nt, Human
acuucagacaua

SEQ ID NO: 1798138 - RNA, 22 nt, Human
acugugcugagucugaaggcug

SEQ ID NO: 1798139 - RNA, 20 nt, Human
acugugcugagucugaaggc

SEQ ID NO: 1798140 - RNA, 18 nt, Human
acugguuccauggccucu

SEQ ID NO: 1798141 - RNA, 20 nt, Human
acugucucaagagggcacug

SEQ ID NO: 1798142 - RNA, 21 nt, Human
acugucucaagagggcacugg

SEQ ID NO: 1798143 - RNA, 23 nt, Human
acugucucaagagggcacuggug

SEQ ID NO: 1798144 - RNA, 17 nt, Human
acuggaagcacagcuuc

SEQ ID NO: 1798145 - RNA, 16 nt, Human
acugcccccucugccc

SEQ ID NO: 1798146 - RNA, 17 nt, Human
acugcccccucugcccu

SEQ ID NO: 1798147 - RNA, 19 nt, Human
acuggaagcacagcuucau

SEQ ID NO: 1798148 - RNA, 14 nt, Human
acugcccccucugc

SEQ ID NO: 1798149 - RNA, 15 nt, Human
acugcccccucugcc

SEQ ID NO: 1798150 - RNA, 18 nt, Human
acugguaggaaacuaggu

SEQ ID NO: 1798151 - RNA, 15 nt, Human
acuggagaaaaugga

SEQ ID NO: 1798152 - RNA, 20 nt, Human
acucugucucaguccaugaa

SEQ ID NO: 1798153 - RNA, 18 nt, Human
acucugucucaguccaug

SEQ ID NO: 1798154 - RNA, 15 nt, Human
aaaaaauauuuuccu

SEQ ID NO: 1798155 - RNA, 18 nt, Human
aaaaacagauuuggaaag

SEQ ID NO: 1798156 - RNA, 20 nt, Human
auuucuugagguaaaagcau

SEQ ID NO: 1798157 - RNA, 16 nt, Human
auuugaaaauuuugau

SEQ ID NO: 1798158 - RNA, 18 nt, Human
auuugaaacacuuugcau

SEQ ID NO: 1798159 - RNA, 20 nt, Human
auuucuuccacaagagccca

SEQ ID NO: 1798160 - RNA, 23 nt, Human
auuucuuccacaagagcccaggc

SEQ ID NO: 1798161 - RNA, 12 nt, Human
auuuauuuaaau

SEQ ID NO: 1798162 - RNA, 14 nt, Human
auuuauuuaaauuu

SEQ ID NO: 1798163 - RNA, 19 nt, Human
auuucccaacacaaagauu

SEQ ID NO: 1798164 - RNA, 22 nt, Human
auuuccacucaggucuguuuuc

SEQ ID NO: 1798165 - RNA, 18 nt, Human
auuucccaacacaaagau

SEQ ID NO: 1798166 - RNA, 16 nt, Human
auuuccacucaggucu

SEQ ID NO: 1798167 - RNA, 19 nt, Human
auuucccaaagcagugcau

SEQ ID NO: 1798168 - RNA, 13 nt, Human
auuugucaacaaa

SEQ ID NO: 1798169 - RNA, 15 nt, Human
auuugucaacaaagu

SEQ ID NO: 1798170 - RNA, 18 nt, Human
auuugugaagguggaaau

SEQ ID NO: 1798171 - RNA, 21 nt, Human
auuugugaagguggaaauaaa

SEQ ID NO: 1798172 - RNA, 23 nt, Human
auuugugaaaugauggugaaagu

SEQ ID NO: 1798173 - RNA, 22 nt, Human
auuuuaaaaauacagauagaua

SEQ ID NO: 1798174 - RNA, 19 nt, Human
auuggacaguaaaauccac

SEQ ID NO: 1798175 - RNA, 21 nt, Human
auugauuuccguuaaaauacc

SEQ ID NO: 1798176 - RNA, 16 nt, Human
auuggauuugucuuug

SEQ ID NO: 1798177 - RNA, 18 nt, Human
auugguaaagaauggaag

SEQ ID NO: 1798178 - RNA, 21 nt, Human
auuguuuggggaugagaaagg

SEQ ID NO: 1798179 - RNA, 13 nt, Human
auuuaaaagauac

SEQ ID NO: 1798180 - RNA, 17 nt, Human
auuuaaaagauacaguu

SEQ ID NO: 1798181 - RNA, 16 nt, Human
auuuaaaagauacagu

SEQ ID NO: 1798182 - RNA, 14 nt, Human
auuuaaaagauaca

SEQ ID NO: 1798183 - RNA, 21 nt, Human
auuguacaguuuuuauugcuu

SEQ ID NO: 1798184 - RNA, 15 nt, Human
auuguacaguuuuua

SEQ ID NO: 1798185 - RNA, 14 nt, Human
auuguacaguuuuu

SEQ ID NO: 1798186 - RNA, 23 nt, Human
auugucaaaguggugagaggcau

SEQ ID NO: 1798187 - RNA, 16 nt, Human
auugucaaagugguga

SEQ ID NO: 1798188 - RNA, 14 nt, Human
auugugggaagggg

SEQ ID NO: 1798189 - RNA, 13 nt, Human
auugugggaaggg

SEQ ID NO: 1798190 - RNA, 14 nt, Human
auuuucuauaauuu

SEQ ID NO: 1798191 - RNA, 15 nt, Human
auuuucuauaauuua

SEQ ID NO: 1798192 - RNA, 16 nt, Human
auuuuccugccaggca

SEQ ID NO: 1798193 - RNA, 19 nt, Human
auuuucccuauuagagaag

SEQ ID NO: 1798194 - RNA, 15 nt, Human
auuuuaauaaacacu

SEQ ID NO: 1798195 - RNA, 16 nt, Human
auuuuaauaaacacuc

SEQ ID NO: 1798196 - RNA, 17 nt, Human
auuuuaauaaacacucu

SEQ ID NO: 1798197 - RNA, 19 nt, Human
auuuugauccaagcugguc

SEQ ID NO: 1798198 - RNA, 19 nt, Human
auuuuccuguugucaagaa

SEQ ID NO: 1798199 - RNA, 17 nt, Human
auuuugauguuuuaagg

SEQ ID NO: 1798200 - RNA, 18 nt, Human
auuuugauguaaagaugu

SEQ ID NO: 1798201 - RNA, 17 nt, Human
auuuugauguaaagaug

SEQ ID NO: 1798202 - RNA, 15 nt, Human
auuuugauguuuuaa

SEQ ID NO: 1798203 - RNA, 18 nt, Human
auuuugccagugggaacu

SEQ ID NO: 1798204 - RNA, 21 nt, Human
auuuugcugucccuuuuccuu

SEQ ID NO: 1798205 - RNA, 20 nt, Human
auuuugcuaaaugugaauga

SEQ ID NO: 1798206 - RNA, 17 nt, Human
auuuuguguuuaggaac

SEQ ID NO: 1798207 - RNA, 23 nt, Human
auuuugucauauaagauucauau

SEQ ID NO: 1798208 - RNA, 12 nt, Human
auuuugucuuua

SEQ ID NO: 1798209 - RNA, 19 nt, Human
auuuugugcccccauguaa

SEQ ID NO: 1798210 - RNA, 20 nt, Human
auuuuguguaagaaauacag

SEQ ID NO: 1798211 - RNA, 18 nt, Human
auuuuguguaagaaauac

SEQ ID NO: 1798212 - RNA, 17 nt, Human
auuuuguguaagaaaua

SEQ ID NO: 1798213 - RNA, 16 nt, Human
auuuuguguaagaaau

SEQ ID NO: 1798214 - RNA, 18 nt, Human
auuuuguauauuuguauu

SEQ ID NO: 1798215 - RNA, 23 nt, Human
auuuuguaauguaucaaauacau

SEQ ID NO: 1798216 - RNA, 20 nt, Human
auuuuguaauguaucaaaua

SEQ ID NO: 1798217 - RNA, 22 nt, Human
auuuuguaauaauaaagaauag

SEQ ID NO: 1798218 - RNA, 19 nt, Human
auuuuguaauaauaaagaa

SEQ ID NO: 1798219 - RNA, 14 nt, Human
auuuuguaauaaua

SEQ ID NO: 1798220 - RNA, 20 nt, Human
auuuugcuuugugauuuuug

SEQ ID NO: 1798221 - RNA, 18 nt, Human
auuuugcuuugugauuuu

SEQ ID NO: 1798222 - RNA, 20 nt, Human
auuuugcuguagaagauggc

SEQ ID NO: 1798223 - RNA, 12 nt, Human
auuuugcuuugu

SEQ ID NO: 1798224 - RNA, 14 nt, Human
auuuuggaaaauaa

SEQ ID NO: 1798225 - RNA, 19 nt, Human
auuuuggaaaauaaauuau

SEQ ID NO: 1798226 - RNA, 20 nt, Human
auuuuggaaaauaaauuauu

SEQ ID NO: 1798227 - RNA, 22 nt, Human
auuuuugugauuuugugauuga

SEQ ID NO: 1798228 - RNA, 14 nt, Human
auuuuugucuugug

SEQ ID NO: 1798229 - RNA, 19 nt, Human
auuuuuguagagccagggu

SEQ ID NO: 1798230 - RNA, 12 nt, Human
auuuuuguaauu

SEQ ID NO: 1798231 - RNA, 18 nt, Human
auuuuuuaaauugaauuc

SEQ ID NO: 1798232 - RNA, 14 nt, Human
auuuuuuaaaugca

SEQ ID NO: 1798233 - RNA, 13 nt, Human
auuuuuuaaaugc

SEQ ID NO: 1798234 - RNA, 18 nt, Human
auuuuuuguuaaaugauu

SEQ ID NO: 1798235 - RNA, 21 nt, Human
auuuuuuaagugaaaauauag

SEQ ID NO: 1798236 - RNA, 19 nt, Human
auuuuuuacagcugccugc

SEQ ID NO: 1798237 - RNA, 21 nt, Human
auuuuguuuuugucuuaaaaa

SEQ ID NO: 1798238 - RNA, 21 nt, Human
auuuuucuuagggaaggauac

SEQ ID NO: 1798239 - RNA, 16 nt, Human
auuuuucagauauaaa

SEQ ID NO: 1798240 - RNA, 22 nt, Human
auuuuucuuagggaaggauaca

SEQ ID NO: 1798241 - RNA, 15 nt, Human
auuauauuuacaaau

SEQ ID NO: 1798242 - RNA, 14 nt, Human
auuauauuaugaag

SEQ ID NO: 1798243 - RNA, 19 nt, Human
auuauacccccugcaaagc

SEQ ID NO: 1798244 - RNA, 11 nt, Human
uuuguggaaaa

SEQ ID NO: 1798245 - RNA, 19 nt, Human
auucagacagcugccuggg

SEQ ID NO: 1798246 - RNA, 15 nt, Human
auuauuauuuggccc

SEQ ID NO: 1798247 - RNA, 18 nt, Human
auuaucuagauacuguau

SEQ ID NO: 1798248 - RNA, 14 nt, Human
auuaucuagauacu

SEQ ID NO: 1798249 - RNA, 19 nt, Human
auuaucuaaaaucugcuag

SEQ ID NO: 1798250 - RNA, 11 nt, Human
auucagacagc

SEQ ID NO: 1798251 - RNA, 12 nt, Human
auucagacagcu

SEQ ID NO: 1798252 - RNA, 13 nt, Human
auucagacagcug

SEQ ID NO: 1798253 - RNA, 13 nt, Human
auucacauuguau

SEQ ID NO: 1798254 - RNA, 20 nt, Human
auucacauuguauucagagu

SEQ ID NO: 1798255 - RNA, 18 nt, Human
auucagacagcugccugg

SEQ ID NO: 1798256 - RNA, 22 nt, Human
auucaggaagcagcuuucccca

SEQ ID NO: 1798257 - RNA, 12 nt, Human
auucaggaagcu

SEQ ID NO: 1798258 - RNA, 14 nt, Human
auucagacagcugc

SEQ ID NO: 1798259 - RNA, 15 nt, Human
auucagacagcugcc

SEQ ID NO: 1798260 - RNA, 16 nt, Human
auucagacagcugccu

SEQ ID NO: 1798261 - RNA, 17 nt, Human
auucagacagcugccug

SEQ ID NO: 1798262 - RNA, 23 nt, Human
auuccccgucucugguuccuccc

SEQ ID NO: 1798263 - RNA, 22 nt, Human
auuccccacccugaaagcccug

SEQ ID NO: 1798264 - RNA, 19 nt, Human
auuccagagcguguaguga

SEQ ID NO: 1798265 - RNA, 21 nt, Human
auuccagagaguggcuccucc

SEQ ID NO: 1798266 - RNA, 19 nt, Human
auuccagagaguggcuccu

SEQ ID NO: 1798267 - RNA, 13 nt, Human
auucaggaagcuc

SEQ ID NO: 1798268 - RNA, 14 nt, Human
auucuguuggccag

SEQ ID NO: 1798269 - RNA, 21 nt, Human
auucuguuggccagugugaca

SEQ ID NO: 1798270 - RNA, 19 nt, Human
auucuguuggccaguguga

SEQ ID NO: 1798271 - RNA, 22 nt, Human
auucugcucacauaucugucau

SEQ ID NO: 1798272 - RNA, 21 nt, Human
auucugcucacauaucuguca

SEQ ID NO: 1798273 - RNA, 20 nt, Human
auucugcucacauaucuguc

SEQ ID NO: 1798274 - RNA, 19 nt, Human
auucugcucacauaucugu

SEQ ID NO: 1798275 - RNA, 21 nt, Human
auucugccugcccaggccccu

SEQ ID NO: 1798276 - RNA, 20 nt, Human
auucugccugcccaggcccc

SEQ ID NO: 1798277 - RNA, 18 nt, Human
auucugcucacauaucug

SEQ ID NO: 1798278 - RNA, 21 nt, Human
auucucaugccucagccuccu

SEQ ID NO: 1798279 - RNA, 15 nt, Human
auucuagcuuugagc

SEQ ID NO: 1798280 - RNA, 17 nt, Human
auucucauuugucacac

SEQ ID NO: 1798281 - RNA, 22 nt, Human
auucucaugccucagccuccug

SEQ ID NO: 1798282 - RNA, 19 nt, Human
auucugccugcccaggccc

SEQ ID NO: 1798283 - RNA, 18 nt, Human
auucugccugcccaggcc

SEQ ID NO: 1798284 - RNA, 17 nt, Human
auucugccugcccaggc

SEQ ID NO: 1798285 - RNA, 16 nt, Human
auucugccugcccagg

SEQ ID NO: 1798286 - RNA, 15 nt, Human
auucugccugcccag

SEQ ID NO: 1798287 - RNA, 14 nt, Human
auucugccugccca

SEQ ID NO: 1798288 - RNA, 13 nt, Human
auucugccugccc

SEQ ID NO: 1798289 - RNA, 11 nt, Human
auucugccugc

SEQ ID NO: 1798290 - RNA, 17 nt, Human
auugacacuuaaaaaug

SEQ ID NO: 1798291 - RNA, 15 nt, Human
auugacacuuaaaaa

SEQ ID NO: 1798292 - RNA, 11 nt, Human
auugacuucuu

SEQ ID NO: 1798293 - RNA, 18 nt, Human
auugacacaguaccauuu

SEQ ID NO: 1798294 - RNA, 19 nt, Human
auugacacuuaaaaauggu

SEQ ID NO: 1798295 - RNA, 15 nt, Human
auugaaaaaccauuu

SEQ ID NO: 1798296 - RNA, 20 nt, Human
auugaaaucuuuuugcuuug

SEQ ID NO: 1798297 - RNA, 17 nt, Human
auugaaaucuuuuugcu

SEQ ID NO: 1798298 - RNA, 18 nt, Human
auugaaaucuuuuugcuu

SEQ ID NO: 1798299 - RNA, 13 nt, Human
auucuuccucccu

SEQ ID NO: 1798300 - RNA, 14 nt, Human
auucuuaaauaugu

SEQ ID NO: 1798301 - RNA, 20 nt, Human
augggcuggguucuacccag

SEQ ID NO: 1798302 - RNA, 18 nt, Human
augggccuccugugugug

SEQ ID NO: 1798303 - RNA, 17 nt, Human
augggggcacugaggac

SEQ ID NO: 1798304 - RNA, 14 nt, Human
augggggugcauuu

SEQ ID NO: 1798305 - RNA, 24 nt, Human
auggggcugcaccggcuggccugg

SEQ ID NO: 1798306 - RNA, 12 nt, Human
auggggcugcac

SEQ ID NO: 1798307 - RNA, 15 nt, Human
augggggugcauuug

SEQ ID NO: 1798308 - RNA, 15 nt, Human
augggauccuggagu

SEQ ID NO: 1798309 - RNA, 18 nt, Human
augggcaacccccagccu

SEQ ID NO: 1798310 - RNA, 19 nt, Human
uuucuggcuaugcauuuga

SEQ ID NO: 1798311 - RNA, 18 nt, Human
uuucuggcuaugcauuug

SEQ ID NO: 1798312 - RNA, 16 nt, Human
uuucuggcuaugcauu

SEQ ID NO: 1798313 - RNA, 15 nt, Human
uuucuggcuaugcau

SEQ ID NO: 1798314 - RNA, 19 nt, Human
uuucugcagccacuauugu

SEQ ID NO: 1798315 - RNA, 14 nt, Human
uuucugcagaaaca

SEQ ID NO: 1798316 - RNA, 23 nt, Human
uuucugggcaccggggccucgga

SEQ ID NO: 1798317 - RNA, 21 nt, Human
uuucugcagccacuauuguua

SEQ ID NO: 1798318 - RNA, 17 nt, Human
augguggcuggguugga

SEQ ID NO: 1798319 - RNA, 15 nt, Human
augguggcuggguug

SEQ ID NO: 1798320 - RNA, 13 nt, Human
augguggcugggu

SEQ ID NO: 1798321 - RNA, 12 nt, Human
augguggcuggg

SEQ ID NO: 1798322 - RNA, 16 nt, Human
auggugaugaaaugua

SEQ ID NO: 1798323 - RNA, 17 nt, Human
auggugaugaaauguaa

SEQ ID NO: 1798324 - RNA, 14 nt, Human
auggugaugaaaug

SEQ ID NO: 1798325 - RNA, 15 nt, Human
augggugcuuggagg

SEQ ID NO: 1798326 - RNA, 20 nt, Human
auggugagggauacccaucc

SEQ ID NO: 1798327 - RNA, 12 nt, Human
auggugcaauga

SEQ ID NO: 1798328 - RNA, 13 nt, Human
auggugcaaugac

SEQ ID NO: 1798329 - RNA, 15 nt, Human
auggugcaaugaccu

SEQ ID NO: 1798330 - RNA, 19 nt, Human
auggugcaaugaccuuuca

SEQ ID NO: 1798331 - RNA, 16 nt, Human
auggugcaaugaccuu

SEQ ID NO: 1798332 - RNA, 17 nt, Human
auggugcaaugaccuuu

SEQ ID NO: 1798333 - RNA, 17 nt, Human
auguaaaagacuuuuuu

SEQ ID NO: 1798334 - RNA, 13 nt, Human
augguuguacaua

SEQ ID NO: 1798335 - RNA, 19 nt, Human
augguuccccuguucacuc

SEQ ID NO: 1798336 - RNA, 20 nt, Human
augguuccccuguucacucu

SEQ ID NO: 1798337 - RNA, 16 nt, Human
augguuuucaaaauaa

SEQ ID NO: 1798338 - RNA, 14 nt, Human
augguuuucuugug

SEQ ID NO: 1798339 - RNA, 14 nt, Human
augguuuucaaaau

SEQ ID NO: 1798340 - RNA, 15 nt, Human
augguuuucaaaaua

SEQ ID NO: 1798341 - RNA, 13 nt, Human
auguagaggagaa

SEQ ID NO: 1798342 - RNA, 12 nt, Human
auguagaggaga

SEQ ID NO: 1798343 - RNA, 19 nt, Human
auguagaggagaaacugga

SEQ ID NO: 1798344 - RNA, 17 nt, Human
auguagaggagaaacug

SEQ ID NO: 1798345 - RNA, 19 nt, Human
auguagccccucuccugga

SEQ ID NO: 1798346 - RNA, 12 nt, Human
uuugaccucugc

SEQ ID NO: 1798347 - RNA, 15 nt, Human
uuugccguuauuaaa

SEQ ID NO: 1798348 - RNA, 22 nt, Human
uuugauucagacagcugccugg

SEQ ID NO: 1798349 - RNA, 13 nt, Human
uuugccucugccu

SEQ ID NO: 1798350 - RNA, 20 nt, Human
uuugauguaaagauguucug

SEQ ID NO: 1798351 - RNA, 20 nt, Human
uuugacgccaucccagcccc

SEQ ID NO: 1798352 - RNA, 13 nt, Human
uuugacgccaucc

SEQ ID NO: 1798353 - RNA, 14 nt, Human
uuugacgccauccc

SEQ ID NO: 1798354 - RNA, 16 nt, Human
uuugacgccaucccag

SEQ ID NO: 1798355 - RNA, 19 nt, Human
uuugacgccaucccagccc

SEQ ID NO: 1798356 - RNA, 23 nt, Human
uuugauuaaauucuugcaaagua

SEQ ID NO: 1798357 - RNA, 21 nt, Human
uuugauucagacagcugccug

SEQ ID NO: 1798358 - RNA, 21 nt, Human
uuugauuaaauucuugcaaag

SEQ ID NO: 1798359 - RNA, 18 nt, Human
uuugauuaaauucuugca

SEQ ID NO: 1798360 - RNA, 13 nt, Human
uuugauuaaauuc

SEQ ID NO: 1798361 - RNA, 22 nt, Human
uuugauguucuuucacccuuuu

SEQ ID NO: 1798362 - RNA, 19 nt, Human
auguaugaggaauuucugu

SEQ ID NO: 1798363 - RNA, 18 nt, Human
auguaugagguacaaccu

SEQ ID NO: 1798364 - RNA, 15 nt, Human
auguauguguaagua

SEQ ID NO: 1798365 - RNA, 16 nt, Human
auguauguguaaguau

SEQ ID NO: 1798366 - RNA, 12 nt, Human
augucaguguga

SEQ ID NO: 1798367 - RNA, 13 nt, Human
augucagugugac

SEQ ID NO: 1798368 - RNA, 17 nt, Human
auguccacugguucuuc

SEQ ID NO: 1798369 - RNA, 19 nt, Human
augucucgugguaggacug

SEQ ID NO: 1798370 - RNA, 17 nt, Human
augucucugagcauuag

SEQ ID NO: 1798371 - RNA, 16 nt, Human
augucucgugguagga

SEQ ID NO: 1798372 - RNA, 15 nt, Human
augucucgugguagg

SEQ ID NO: 1798373 - RNA, 13 nt, Human
augucgccucugc

SEQ ID NO: 1798374 - RNA, 14 nt, Human
augucgccucugca

SEQ ID NO: 1798375 - RNA, 17 nt, Human
augucucaggucccugc

SEQ ID NO: 1798376 - RNA, 22 nt, Human
augucucaggucccugcagggc

SEQ ID NO: 1798377 - RNA, 15 nt, Human
augucgccucugcau

SEQ ID NO: 1798378 - RNA, 20 nt, Human
uuugugaagguggaaauaaa

SEQ ID NO: 1798379 - RNA, 19 nt, Human
uuugucuuuggugaacauu

SEQ ID NO: 1798380 - RNA, 21 nt, Human
uuugucuuguguuucuuuagu

SEQ ID NO: 1798381 - RNA, 22 nt, Human
uuugugaaaugauggugaaagu

SEQ ID NO: 1798382 - RNA, 21 nt, Human
uuuguaauaauaaagaauagc

SEQ ID NO: 1798383 - RNA, 13 nt, Human
uuuguaaugaaaa

SEQ ID NO: 1798384 - RNA, 14 nt, Human
uuuguaaugaaaac

SEQ ID NO: 1798385 - RNA, 12 nt, Human
uuuguauaaaag

SEQ ID NO: 1798386 - RNA, 23 nt, Human
augugcacaugcacgugugugca

SEQ ID NO: 1798387 - RNA, 19 nt, Human
uuuguaauaauaaagaaua

SEQ ID NO: 1798388 - RNA, 23 nt, Human
augucucuuuaaugucacaggca

SEQ ID NO: 1798389 - RNA, 16 nt, Human
augugaugagaggaaa

SEQ ID NO: 1798390 - RNA, 17 nt, Human
augugaugagaggaaau

SEQ ID NO: 1798391 - RNA, 19 nt, Human
augugaugagaggaaauca

SEQ ID NO: 1798392 - RNA, 18 nt, Human
uuuaaauauaugcuaagu

SEQ ID NO: 1798393 - RNA, 12 nt, Human
uuuaauucaguu

SEQ ID NO: 1798394 - RNA, 19 nt, Human
uuuaauuuuuuugagacag

SEQ ID NO: 1798395 - RNA, 16 nt, Human
uuuaauuugaaauaug

SEQ ID NO: 1798396 - RNA, 17 nt, Human
augcagcaucuaaguaa

SEQ ID NO: 1798397 - RNA, 18 nt, Human
augcagccucacaguccu

SEQ ID NO: 1798398 - RNA, 23 nt, Human
augcagugguaugaucacggcuc

SEQ ID NO: 1798399 - RNA, 13 nt, Human
augcagugcuucc

SEQ ID NO: 1798400 - RNA, 16 nt, Human
augccucagccuccug

SEQ ID NO: 1798401 - RNA, 14 nt, Human
augcccuggaucca

SEQ ID NO: 1798402 - RNA, 12 nt, Human
augcccagcccc

SEQ ID NO: 1798403 - RNA, 13 nt, Human
augcccagccccu

SEQ ID NO: 1798404 - RNA, 14 nt, Human
augcccagccccuu

SEQ ID NO: 1798405 - RNA, 15 nt, Human
augcccagccccuuc

SEQ ID NO: 1798406 - RNA, 20 nt, Human
augcgugcauaccacuuuug

SEQ ID NO: 1798407 - RNA, 13 nt, Human
uuguguucaccuu

SEQ ID NO: 1798408 - RNA, 21 nt, Human
uuguuccacaaguuaaauaaa

SEQ ID NO: 1798409 - RNA, 20 nt, Human
uuguguuacuaaguuuuuau

SEQ ID NO: 1798410 - RNA, 15 nt, Human
uuguguuacuaaguu

SEQ ID NO: 1798411 - RNA, 13 nt, Human
uuguguuacuaag

SEQ ID NO: 1798412 - RNA, 23 nt, Human
augauaugcuuguaacuaaaaua

SEQ ID NO: 1798413 - RNA, 17 nt, Human
augauaugcuuguaacu

SEQ ID NO: 1798414 - RNA, 21 nt, Human
augauacuugaaaauuaacau

SEQ ID NO: 1798415 - RNA, 17 nt, Human
augauacuugaaaauua

SEQ ID NO: 1798416 - RNA, 17 nt, Human
augaucuaggaagacuu

SEQ ID NO: 1798417 - RNA, 20 nt, Human
augaucuaggaagacuuugg

SEQ ID NO: 1798418 - RNA, 13 nt, Human
uuuaaagaaugcu

SEQ ID NO: 1798419 - RNA, 22 nt, Human
augcaccagcccuuagcaggga

SEQ ID NO: 1798420 - RNA, 13 nt, Human
augcaccuggaau

SEQ ID NO: 1798421 - RNA, 17 nt, Human
augcacuuuguucuggc

SEQ ID NO: 1798422 - RNA, 19 nt, Human
augcacuuuguucuggcuc

SEQ ID NO: 1798423 - RNA, 20 nt, Human
augcacuuuguucuggcucu

SEQ ID NO: 1798424 - RNA, 15 nt, Human
augcaaccauuugaa

SEQ ID NO: 1798425 - RNA, 22 nt, Human
augcuagaacucccuuucaaca

SEQ ID NO: 1798426 - RNA, 21 nt, Human
augcuagaacucccuuucaac

SEQ ID NO: 1798427 - RNA, 20 nt, Human
augcuagaacucccuuucaa

SEQ ID NO: 1798428 - RNA, 17 nt, Human
uuuaucaugugaaauca

SEQ ID NO: 1798429 - RNA, 18 nt, Human
uuuaucaugugaaaucau

SEQ ID NO: 1798430 - RNA, 16 nt, Human
augcuaagacucagug

SEQ ID NO: 1798431 - RNA, 16 nt, Human
uuuauuuuguguuuag

SEQ ID NO: 1798432 - RNA, 20 nt, Human
uuuauuuuguguuuaggaac

SEQ ID NO: 1798433 - RNA, 22 nt, Human
uuucaaacuuuacuauggcccu

SEQ ID NO: 1798434 - RNA, 16 nt, Human
uuucaaacuuuacuau

SEQ ID NO: 1798435 - RNA, 22 nt, Human
uuucaaaauuguuacaaauugu

SEQ ID NO: 1798436 - RNA, 22 nt, Human
augcugugcccuaaaguguauu

SEQ ID NO: 1798437 - RNA, 13 nt, Human
augcuucucacug

SEQ ID NO: 1798438 - RNA, 17 nt, Human
uuuccaugaguccccug

SEQ ID NO: 1798439 - RNA, 18 nt, Human
uuuccaugaguccccugu

SEQ ID NO: 1798440 - RNA, 19 nt, Human
auggacuaacuugucuuug

SEQ ID NO: 1798441 - RNA, 11 nt, Human
auggacuuugu

SEQ ID NO: 1798442 - RNA, 12 nt, Human
auggacuuuguu

SEQ ID NO: 1798443 - RNA, 19 nt, Human
augggagagaagagaaugc

SEQ ID NO: 1798444 - RNA, 15 nt, Human
augggagagaagaga

SEQ ID NO: 1798445 - RNA, 18 nt, Human
auggcuaauguacugcau

SEQ ID NO: 1798446 - RNA, 19 nt, Human
auggcuaagcaaaauguga

SEQ ID NO: 1798447 - RNA, 18 nt, Human
auggagacugucucaaga

SEQ ID NO: 1798448 - RNA, 16 nt, Human
auccacccaccucagc

SEQ ID NO: 1798449 - RNA, 16 nt, Human
auccaguaucuugaag

SEQ ID NO: 1798450 - RNA, 15 nt, Human
auccacccaccucag

SEQ ID NO: 1798451 - RNA, 13 nt, Human
auccacccaccuc

SEQ ID NO: 1798452 - RNA, 21 nt, Human
auccaagcuggucccacucag

SEQ ID NO: 1798453 - RNA, 18 nt, Human
auccaagcuggucccacu

SEQ ID NO: 1798454 - RNA, 20 nt, Human
aucauuuuaccuuugacaaa

SEQ ID NO: 1798455 - RNA, 13 nt, Human
auccaucaggcca

SEQ ID NO: 1798456 - RNA, 21 nt, Human
auccaguaucuugaagacuuu

SEQ ID NO: 1798457 - RNA, 18 nt, Human
aucccauaugccugggca

SEQ ID NO: 1798458 - RNA, 19 nt, Human
aucccaaacccuucagugc

SEQ ID NO: 1798459 - RNA, 20 nt, Human
aucccaaacccuucagugcc

SEQ ID NO: 1798460 - RNA, 14 nt, Human
aucaggugcugcca

SEQ ID NO: 1798461 - RNA, 18 nt, Human
aucaguagccagcaucug

SEQ ID NO: 1798462 - RNA, 21 nt, Human
uucuccuuguguuacuaaguu

SEQ ID NO: 1798463 - RNA, 20 nt, Human
uucucuaguuugauuaaauu

SEQ ID NO: 1798464 - RNA, 17 nt, Human
uucucuaguuugauuaa

SEQ ID NO: 1798465 - RNA, 15 nt, Human
uucucuaguuugauu

SEQ ID NO: 1798466 - RNA, 17 nt, Human
uucuccuuucacaaccu

SEQ ID NO: 1798467 - RNA, 16 nt, Human
uucuggcucuuccagg

SEQ ID NO: 1798468 - RNA, 17 nt, Human
uucuggcucuuccaggc

SEQ ID NO: 1798469 - RNA, 18 nt, Human
uucugccugcccaggccc

SEQ ID NO: 1798470 - RNA, 17 nt, Human
uucugccugcccaggcc

SEQ ID NO: 1798471 - RNA, 21 nt, Human
uucugccugcccaggccccug

SEQ ID NO: 1798472 - RNA, 15 nt, Human
uucugccauauucug

SEQ ID NO: 1798473 - RNA, 23 nt, Human
uucugaacuuggcgcugccccug

SEQ ID NO: 1798474 - RNA, 19 nt, Human
uucugaacuuggcgcugcc

SEQ ID NO: 1798475 - RNA, 22 nt, Human
uucugaacuuggcgcugccccu

SEQ ID NO: 1798476 - RNA, 17 nt, Human
uugaaauuguauuacaa

SEQ ID NO: 1798477 - RNA, 19 nt, Human
uugaacccgggaggcagag

SEQ ID NO: 1798478 - RNA, 21 nt, Human
auccuaagcuauucaguaaua

SEQ ID NO: 1798479 - RNA, 18 nt, Human
auccuacaagacacagug

SEQ ID NO: 1798480 - RNA, 19 nt, Human
auccuacaagacacaguga

SEQ ID NO: 1798481 - RNA, 12 nt, Human
auccuaagcuau

SEQ ID NO: 1798482 - RNA, 16 nt, Human
auccuccucagaucuu

SEQ ID NO: 1798483 - RNA, 16 nt, Human
auccuaggcauuugcu

SEQ ID NO: 1798484 - RNA, 13 nt, Human
aucccucauccuc

SEQ ID NO: 1798485 - RNA, 21 nt, Human
aucccucauccucauacccac

SEQ ID NO: 1798486 - RNA, 23 nt, Human
aucccucauccucauacccaccc

SEQ ID NO: 1798487 - RNA, 13 nt, Human
aucccaugagccu

SEQ ID NO: 1798488 - RNA, 14 nt, Human
aucccucauccuca

SEQ ID NO: 1798489 - RNA, 24 nt, Human
aucccauaugccugggcagaagga

SEQ ID NO: 1798490 - RNA, 15 nt, Human
uucuucugcuucagc

SEQ ID NO: 1798491 - RNA, 13 nt, Human
uucuucugcuuca

SEQ ID NO: 1798492 - RNA, 14 nt, Human
uucuucucccucag

SEQ ID NO: 1798493 - RNA, 23 nt, Human
uucuuaagacgugauuuugcugu

SEQ ID NO: 1798494 - RNA, 21 nt, Human
uucuuaagacgugauuuugcu

SEQ ID NO: 1798495 - RNA, 13 nt, Human
uucuucucccuca

SEQ ID NO: 1798496 - RNA, 20 nt, Human
uucuucugcuucagccuccc

SEQ ID NO: 1798497 - RNA, 21 nt, Human
uucuucuuuuugcuucaaaaa

SEQ ID NO: 1798498 - RNA, 17 nt, Human
uucuucuuuuugcuuca

SEQ ID NO: 1798499 - RNA, 15 nt, Human
uucuuuguaaugaaa

SEQ ID NO: 1798500 - RNA, 16 nt, Human
uucuuuguaaugaaaa

SEQ ID NO: 1798501 - RNA, 14 nt, Human
uucuuuuuuuguga

SEQ ID NO: 1798502 - RNA, 19 nt, Human
uuccguagguuauuuucag

SEQ ID NO: 1798503 - RNA, 16 nt, Human
uuccguuaaaauacca

SEQ ID NO: 1798504 - RNA, 14 nt, Human
uuccguuaaaauac

SEQ ID NO: 1798505 - RNA, 23 nt, Human
uucccguggaacguuuuuccugu

SEQ ID NO: 1798506 - RNA, 15 nt, Human
uucccuauuagagaa

SEQ ID NO: 1798507 - RNA, 20 nt, Human
uucccucaccuuucccaucu

SEQ ID NO: 1798508 - RNA, 16 nt, Human
uucccgcucagcccuc

SEQ ID NO: 1798509 - RNA, 18 nt, Human
uucccgcucagcccuccc

SEQ ID NO: 1798510 - RNA, 21 nt, Human
uucccgcucagcccucccugc

SEQ ID NO: 1798511 - RNA, 22 nt, Human
uucccgcucagcccucccugcc

SEQ ID NO: 1798512 - RNA, 20 nt, Human
uuccuaaauauauuuuaaga

SEQ ID NO: 1798513 - RNA, 16 nt, Human
uuccuaauuccacagc

SEQ ID NO: 1798514 - RNA, 17 nt, Human
uuccuaauuccacagcu

SEQ ID NO: 1798515 - RNA, 18 nt, Human
uuccuaauuccacagcug

SEQ ID NO: 1798516 - RNA, 14 nt, Human
uuccucugagccuu

SEQ ID NO: 1798517 - RNA, 17 nt, Human
uuccucugagccuuggg

SEQ ID NO: 1798518 - RNA, 21 nt, Human
uuccucugaggcugaaauuca

SEQ ID NO: 1798519 - RNA, 14 nt, Human
uuccugaaccgaug

SEQ ID NO: 1798520 - RNA, 18 nt, Human
uuccugaagaauugaaaa

SEQ ID NO: 1798521 - RNA, 13 nt, Human
uuccucuuuccau

SEQ ID NO: 1798522 - RNA, 17 nt, Human
uuccucuuuccaucuac

SEQ ID NO: 1798523 - RNA, 22 nt, Human
uuccucuuuccaucuacccucc

SEQ ID NO: 1798524 - RNA, 11 nt, Human
uuccugugucu

SEQ ID NO: 1798525 - RNA, 14 nt, Human
aucaacagauaaau

SEQ ID NO: 1798526 - RNA, 18 nt, Human
auauuuuuuguuaaauga

SEQ ID NO: 1798527 - RNA, 20 nt, Human
auauuuuuuguuaaaugauu

SEQ ID NO: 1798528 - RNA, 14 nt, Human
aucaaugaguaaca

SEQ ID NO: 1798529 - RNA, 15 nt, Human
aucacggcucacugc

SEQ ID NO: 1798530 - RNA, 14 nt, Human
aucacgccacugca

SEQ ID NO: 1798531 - RNA, 13 nt, Human
aucacgccacugc

SEQ ID NO: 1798532 - RNA, 19 nt, Human
aucacggcucacugcagcc

SEQ ID NO: 1798533 - RNA, 18 nt, Human
aucacggcucacugcagc

SEQ ID NO: 1798534 - RNA, 20 nt, Human
aucaggccaggcccucugcc

SEQ ID NO: 1798535 - RNA, 12 nt, Human
aucagaauucuc

SEQ ID NO: 1798536 - RNA, 13 nt, Human
aucagcacgauuu

SEQ ID NO: 1798537 - RNA, 15 nt, Human
aucaggccaggcccu

SEQ ID NO: 1798538 - RNA, 16 nt, Human
aucaggccaggcccuc

SEQ ID NO: 1798539 - RNA, 18 nt, Human
aucaggccaggcccucug

SEQ ID NO: 1798540 - RNA, 16 nt, Human
uucucacuccuaccug

SEQ ID NO: 1798541 - RNA, 18 nt, Human
uucucacuccuaccuggu

SEQ ID NO: 1798542 - RNA, 18 nt, Human
aucagaaguuucucagcu

SEQ ID NO: 1798543 - RNA, 11 nt, Human
aucagaauucu

SEQ ID NO: 1798544 - RNA, 14 nt, Human
uucggccuccaucc

SEQ ID NO: 1798545 - RNA, 19 nt, Human
uucgcuccugugucuugca

SEQ ID NO: 1798546 - RNA, 15 nt, Human
uucgcuccugugucu

SEQ ID NO: 1798547 - RNA, 13 nt, Human
uucuaaaguaaaa

SEQ ID NO: 1798548 - RNA, 21 nt, Human
uucuaaaucuccaaaauaaaa

SEQ ID NO: 1798549 - RNA, 21 nt, Human
uucuaaaggcuaccuuuguau

SEQ ID NO: 1798550 - RNA, 20 nt, Human
uucuaaaggcuaccuuugua

SEQ ID NO: 1798551 - RNA, 19 nt, Human
uucuaaaggcuaccuuugu

SEQ ID NO: 1798552 - RNA, 15 nt, Human
uucggccuccauccu

SEQ ID NO: 1798553 - RNA, 16 nt, Human
uucuagcauggcugcc

SEQ ID NO: 1798554 - RNA, 13 nt, Human
uucuaagaaguga

SEQ ID NO: 1798555 - RNA, 23 nt, Human
uucuaagaagugaaaaucuacac

SEQ ID NO: 1798556 - RNA, 15 nt, Human
aucucccccagcccc

SEQ ID NO: 1798557 - RNA, 16 nt, Human
aucucccccagcccca

SEQ ID NO: 1798558 - RNA, 17 nt, Human
aucucccccagccccau

SEQ ID NO: 1798559 - RNA, 21 nt, Human
aucucccccagccccauccuc

SEQ ID NO: 1798560 - RNA, 21 nt, Human
aucucuucuggguuccuuccu

SEQ ID NO: 1798561 - RNA, 16 nt, Human
aucugaaaauguaugu

SEQ ID NO: 1798562 - RNA, 19 nt, Human
aucugaaaauguaugugua

SEQ ID NO: 1798563 - RNA, 20 nt, Human
aucugaaaauguauguguaa

SEQ ID NO: 1798564 - RNA, 22 nt, Human
aucugaaaauguauguguaagu

SEQ ID NO: 1798565 - RNA, 18 nt, Human
aucucuugagccugggag

SEQ ID NO: 1798566 - RNA, 14 nt, Human
aucugaaaauguau

SEQ ID NO: 1798567 - RNA, 15 nt, Human
aucucuugagccugg

SEQ ID NO: 1798568 - RNA, 14 nt, Human
aucuccaaaauaaa

SEQ ID NO: 1798569 - RNA, 21 nt, Human
aucuccaaaauaaaacuuuuu

SEQ ID NO: 1798570 - RNA, 20 nt, Human
aucuccaaaauaaaacuuuu

SEQ ID NO: 1798571 - RNA, 17 nt, Human
aucuccaaaauaaaacu

SEQ ID NO: 1798572 - RNA, 16 nt, Human
aucucagggccugguc

SEQ ID NO: 1798573 - RNA, 19 nt, Human
uugcaauggcagccuuggc

SEQ ID NO: 1798574 - RNA, 17 nt, Human
uugcaauggcagccuug

SEQ ID NO: 1798575 - RNA, 16 nt, Human
uugcaauggcagccuu

SEQ ID NO: 1798576 - RNA, 15 nt, Human
uugcaccacugcacu

SEQ ID NO: 1798577 - RNA, 16 nt, Human
uugcaccacugcacuc

SEQ ID NO: 1798578 - RNA, 18 nt, Human
uugcaccacugcacucca

SEQ ID NO: 1798579 - RNA, 14 nt, Human
uugauuaaagauga

SEQ ID NO: 1798580 - RNA, 14 nt, Human
uugauuaaauucuu

SEQ ID NO: 1798581 - RNA, 23 nt, Human
uugauguuuuaaggaugcuugua

SEQ ID NO: 1798582 - RNA, 13 nt, Human
uugauuaaagaug

SEQ ID NO: 1798583 - RNA, 13 nt, Human
uugauuaaauucu

SEQ ID NO: 1798584 - RNA, 23 nt, Human
aucugaaaauguauguguaagua

SEQ ID NO: 1798585 - RNA, 17 nt, Human
uugaagggaaauuucag

SEQ ID NO: 1798586 - RNA, 13 nt, Human
uugaagccuuugu

SEQ ID NO: 1798587 - RNA, 13 nt, Human
uugaaucacagua

SEQ ID NO: 1798588 - RNA, 16 nt, Human
auccucuguacagagc

SEQ ID NO: 1798589 - RNA, 17 nt, Human
auccucuguacagagcc

SEQ ID NO: 1798590 - RNA, 14 nt, Human
aucguucucugccu

SEQ ID NO: 1798591 - RNA, 13 nt, Human
aucuaaauggaac

SEQ ID NO: 1798592 - RNA, 18 nt, Human
aucuaaauggaaccacuc

SEQ ID NO: 1798593 - RNA, 17 nt, Human
aucuaaauggaaccacu

SEQ ID NO: 1798594 - RNA, 20 nt, Human
aucuaauauguaacaagcca

SEQ ID NO: 1798595 - RNA, 18 nt, Human
aucuacacuccagugaga

SEQ ID NO: 1798596 - RNA, 19 nt, Human
aucuacacuccagugagac

SEQ ID NO: 1798597 - RNA, 18 nt, Human
aucuaauauguaacaagc

SEQ ID NO: 1798598 - RNA, 15 nt, Human
uugauacuacaguuu

SEQ ID NO: 1798599 - RNA, 20 nt, Human
uugaguugauucagcucugc

SEQ ID NO: 1798600 - RNA, 20 nt, Human
uugagugaagcugggagaac

SEQ ID NO: 1798601 - RNA, 16 nt, Human
uugagauguguucaca

SEQ ID NO: 1798602 - RNA, 15 nt, Human
uugagaucagccugg

SEQ ID NO: 1798603 - RNA, 16 nt, Human
uugagaucagccuggg

SEQ ID NO: 1798604 - RNA, 12 nt, Human
uugagacagagu

SEQ ID NO: 1798605 - RNA, 19 nt, Human
augaaagggcccagagagg

SEQ ID NO: 1798606 - RNA, 18 nt, Human
augaacuuguaaaggaau

SEQ ID NO: 1798607 - RNA, 16 nt, Human
augaauauuuaguguu

SEQ ID NO: 1798608 - RNA, 11 nt, Human
augaagaggag

SEQ ID NO: 1798609 - RNA, 18 nt, Human
uuggggaccagagcugcc

SEQ ID NO: 1798610 - RNA, 21 nt, Human
augaauauuuaguguucauaa

SEQ ID NO: 1798611 - RNA, 23 nt, Human
augaauggcuaagcaaaauguga

SEQ ID NO: 1798612 - RNA, 18 nt, Human
uuggccccugcccggcug

SEQ ID NO: 1798613 - RNA, 16 nt, Human
uuggagggugucccaa

SEQ ID NO: 1798614 - RNA, 14 nt, Human
uugcuugaaagaaa

SEQ ID NO: 1798615 - RNA, 11 nt, Human
uuggagacaga

SEQ ID NO: 1798616 - RNA, 18 nt, Human
augaaagggcccagagag

SEQ ID NO: 1798617 - RNA, 17 nt, Human
aucuuugcagacaggca

SEQ ID NO: 1798618 - RNA, 18 nt, Human
aucuuugcagacaggcaa

SEQ ID NO: 1798619 - RNA, 22 nt, Human
aucuuuucauuuaggugaggaa

SEQ ID NO: 1798620 - RNA, 12 nt, Human
uugcuccuugac

SEQ ID NO: 1798621 - RNA, 14 nt, Human
aucuuauaauuuaa

SEQ ID NO: 1798622 - RNA, 13 nt, Human
aucuugcucugcu

SEQ ID NO: 1798623 - RNA, 20 nt, Human
aucuuggucagauuugaacu

SEQ ID NO: 1798624 - RNA, 23 nt, Human
aucugugaaaggaaagagggagg

SEQ ID NO: 1798625 - RNA, 18 nt, Human
aucugugaaaggaaagag

SEQ ID NO: 1798626 - RNA, 20 nt, Human
aucugcuagggaauaucaau

SEQ ID NO: 1798627 - RNA, 10 nt, Human
aucuggugac

SEQ ID NO: 1798628 - RNA, 16 nt, Human
aucuggugacuuuccu

SEQ ID NO: 1798629 - RNA, 17 nt, Human
aucuggugacuuuccuc

SEQ ID NO: 1798630 - RNA, 17 nt, Human
aucugugaaaggaaaga

SEQ ID NO: 1798631 - RNA, 13 nt, Human
uuaguagagacag

SEQ ID NO: 1798632 - RNA, 19 nt, Human
uuaguacuccccuccuuga

SEQ ID NO: 1798633 - RNA, 14 nt, Human
uuaguagagacagg

SEQ ID NO: 1798634 - RNA, 18 nt, Human
uuaguuuuugugaaguuu

SEQ ID NO: 1798635 - RNA, 21 nt, Human
uuaguuuuugugaaguuuaau

SEQ ID NO: 1798636 - RNA, 15 nt, Human
uuauaaaaauaaaaa

SEQ ID NO: 1798637 - RNA, 13 nt, Human
uuauaaacuuuac

SEQ ID NO: 1798638 - RNA, 21 nt, Human
uuauaaaaauaaaaaacacug

SEQ ID NO: 1798639 - RNA, 22 nt, Human
uuauaaaaauaaaaaacacugg

SEQ ID NO: 1798640 - RNA, 19 nt, Human
uuagauuaagaaauagaca

SEQ ID NO: 1798641 - RNA, 15 nt, Human
uuagauuaagaaaua

SEQ ID NO: 1798642 - RNA, 19 nt, Human
uuaggugugggggaagcac

SEQ ID NO: 1798643 - RNA, 15 nt, Human
uuaggugaggaagca

SEQ ID NO: 1798644 - RNA, 14 nt, Human
uuaguaaucauauu

SEQ ID NO: 1798645 - RNA, 13 nt, Human
uuaguaaucauau

SEQ ID NO: 1798646 - RNA, 18 nt, Human
uuagguuggcaaaaaggc

SEQ ID NO: 1798647 - RNA, 14 nt, Human
auaagccagacauc

SEQ ID NO: 1798648 - RNA, 21 nt, Human
auaagauucauauuuacuucu

SEQ ID NO: 1798649 - RNA, 22 nt, Human
auaagccaaaaaaugcuugcuu

SEQ ID NO: 1798650 - RNA, 22 nt, Human
auaaucuggacuccucugucca

SEQ ID NO: 1798651 - RNA, 23 nt, Human
auaauucacauuguauucagagu

SEQ ID NO: 1798652 - RNA, 20 nt, Human
auaauucaggaagcagcuuu

SEQ ID NO: 1798653 - RNA, 14 nt, Human
auaauuuuaaaugu

SEQ ID NO: 1798654 - RNA, 12 nt, Human
auaauuuuaaau

SEQ ID NO: 1798655 - RNA, 13 nt, Human
auaauuuuaaaug

SEQ ID NO: 1798656 - RNA, 15 nt, Human
uuacugcagcuuugu

SEQ ID NO: 1798657 - RNA, 18 nt, Human
uuaccagugccuuaaacu

SEQ ID NO: 1798658 - RNA, 23 nt, Human
uuacuguacagacagaaaaaacu

SEQ ID NO: 1798659 - RNA, 12 nt, Human
uuacuguacaug

SEQ ID NO: 1798660 - RNA, 23 nt, Human
uuacuguacaugaaaacacauuu

SEQ ID NO: 1798661 - RNA, 22 nt, Human
uuacuguacaugaaaacacauu

SEQ ID NO: 1798662 - RNA, 14 nt, Human
uuacuguacaugaa

SEQ ID NO: 1798663 - RNA, 13 nt, Human
uuacuguacauga

SEQ ID NO: 1798664 - RNA, 18 nt, Human
auaacuuuuuuuuaaguu

SEQ ID NO: 1798665 - RNA, 14 nt, Human
auaagauucauauu

SEQ ID NO: 1798666 - RNA, 16 nt, Human
uuagaagucacacagu

SEQ ID NO: 1798667 - RNA, 18 nt, Human
auaaauugcuccuugaca

SEQ ID NO: 1798668 - RNA, 15 nt, Human
auaacuauguugaua

SEQ ID NO: 1798669 - RNA, 14 nt, Human
uuacaggugugaac

SEQ ID NO: 1798670 - RNA, 20 nt, Human
uuacagggaugagccaccgc

SEQ ID NO: 1798671 - RNA, 19 nt, Human
uuaccagcagagcaccuua

SEQ ID NO: 1798672 - RNA, 13 nt, Human
auaaauugcuccu

SEQ ID NO: 1798673 - RNA, 16 nt, Human
auaaauugcuccuuga

SEQ ID NO: 1798674 - RNA, 15 nt, Human
uuaaucuaaauggaa

SEQ ID NO: 1798675 - RNA, 16 nt, Human
uuaauaaaaguacaug

SEQ ID NO: 1798676 - RNA, 22 nt, Human
uuaagacgaaacauuuguucua

SEQ ID NO: 1798677 - RNA, 15 nt, Human
uuaauuugaaauaug

SEQ ID NO: 1798678 - RNA, 13 nt, Human
uuaauuugaaaua

SEQ ID NO: 1798679 - RNA, 13 nt, Human
uuaaucuuuaauu

SEQ ID NO: 1798680 - RNA, 17 nt, Human
uuaaucuuuaauuuuac

SEQ ID NO: 1798681 - RNA, 19 nt, Human
uuaagaaaaaggaugcaca

SEQ ID NO: 1798682 - RNA, 19 nt, Human
uuaagacgaaacauuuguu

SEQ ID NO: 1798683 - RNA, 23 nt, Human
uuaagacauuuuuggaaggggac

SEQ ID NO: 1798684 - RNA, 18 nt, Human
uuaagacauuuuuggaag

SEQ ID NO: 1798685 - RNA, 19 nt, Human
auaaaagccuguuuaagag

SEQ ID NO: 1798686 - RNA, 20 nt, Human
auaaaagccuguuuaagaga

SEQ ID NO: 1798687 - RNA, 22 nt, Human
auaaaagggacugagaaauuua

SEQ ID NO: 1798688 - RNA, 22 nt, Human
uuaacuuuuauaaacuuuaccu

SEQ ID NO: 1798689 - RNA, 23 nt, Human
uuaacuuuuauaaacuuuaccuu

SEQ ID NO: 1798690 - RNA, 15 nt, Human
aguuuuuuuuauaca

SEQ ID NO: 1798691 - RNA, 17 nt, Human
aguuuaaauuguaauag

SEQ ID NO: 1798692 - RNA, 20 nt, Human
aguuuaaauuguaauaggcg

SEQ ID NO: 1798693 - RNA, 20 nt, Human
uuaaaaaucucaaauuucua

SEQ ID NO: 1798694 - RNA, 19 nt, Human
uuaaaaaucucaaauuucu

SEQ ID NO: 1798695 - RNA, 12 nt, Human
uuaaaaugagaa

SEQ ID NO: 1798696 - RNA, 19 nt, Human
uuaaaaugagaaaucuaaa

SEQ ID NO: 1798697 - RNA, 14 nt, Human
aguuucucuuuuca

SEQ ID NO: 1798698 - RNA, 13 nt, Human
aguuucucagcuc

SEQ ID NO: 1798699 - RNA, 15 nt, Human
aguuucucagcuccc

SEQ ID NO: 1798700 - RNA, 15 nt, Human
aguuucugccgcagc

SEQ ID NO: 1798701 - RNA, 15 nt, Human
aguuuguugaaacac

SEQ ID NO: 1798702 - RNA, 22 nt, Human
aguuuguuaguaugaggcauuu

SEQ ID NO: 1798703 - RNA, 19 nt, Human
aguuucugccgcagcccug

SEQ ID NO: 1798704 - RNA, 16 nt, Human
uuaacagaaauguaca

SEQ ID NO: 1798705 - RNA, 14 nt, Human
uuaacagaaaugua

SEQ ID NO: 1798706 - RNA, 13 nt, Human
uuaacagaaaugu

SEQ ID NO: 1798707 - RNA, 12 nt, Human
uuaacagaaaug

SEQ ID NO: 1798708 - RNA, 16 nt, Human
auacagaggcaacugc

SEQ ID NO: 1798709 - RNA, 17 nt, Human
auacagaggcaacugca

SEQ ID NO: 1798710 - RNA, 22 nt, Human
uuauaaacuuuuuucuuacugu

SEQ ID NO: 1798711 - RNA, 12 nt, Human
uuauaaacuuuu

SEQ ID NO: 1798712 - RNA, 16 nt, Human
uuauaaacuuuuuucu

SEQ ID NO: 1798713 - RNA, 18 nt, Human
uuauaaacuuuaccuuuu

SEQ ID NO: 1798714 - RNA, 17 nt, Human
uuauaaacuuuaccuuu

SEQ ID NO: 1798715 - RNA, 20 nt, Human
auacaguuacucagaauucu

SEQ ID NO: 1798716 - RNA, 23 nt, Human
auacaggaaaagcugcugacagu

SEQ ID NO: 1798717 - RNA, 23 nt, Human
auacagauagauauaugcucugc

SEQ ID NO: 1798718 - RNA, 18 nt, Human
auacaguuacucagaauu

SEQ ID NO: 1798719 - RNA, 21 nt, Human
auacaggaugaugacuaugga

SEQ ID NO: 1798720 - RNA, 13 nt, Human
auacguacacauu

SEQ ID NO: 1798721 - RNA, 13 nt, Human
auacgauaaauaa

SEQ ID NO: 1798722 - RNA, 16 nt, Human
auacguacacauuuua

SEQ ID NO: 1798723 - RNA, 15 nt, Human
auacguacacauuuu

SEQ ID NO: 1798724 - RNA, 14 nt, Human
auacguacacauuu

SEQ ID NO: 1798725 - RNA, 14 nt, Human
auaccuuuuuuaga

SEQ ID NO: 1798726 - RNA, 17 nt, Human
auaccagccaguaaaug

SEQ ID NO: 1798727 - RNA, 18 nt, Human
auaccacuuuuguucuug

SEQ ID NO: 1798728 - RNA, 17 nt, Human
auaccacuuuuguucuu

SEQ ID NO: 1798729 - RNA, 20 nt, Human
auacuaaccagcagaaaugc

SEQ ID NO: 1798730 - RNA, 19 nt, Human
auacuaaccagcagaaaug

SEQ ID NO: 1798731 - RNA, 13 nt, Human
auacuaaccagca

SEQ ID NO: 1798732 - RNA, 22 nt, Human
uuaugggcuggguucuacccag

SEQ ID NO: 1798733 - RNA, 13 nt, Human
uuaugggcugggu

SEQ ID NO: 1798734 - RNA, 19 nt, Human
uuauggcuuuugugcauua

SEQ ID NO: 1798735 - RNA, 13 nt, Human
uuaugugaaacau

SEQ ID NO: 1798736 - RNA, 15 nt, Human
uuaugugaaacaugu

SEQ ID NO: 1798737 - RNA, 22 nt, Human
uuaugugccagauuuaugcaua

SEQ ID NO: 1798738 - RNA, 11 nt, Human
uuaugacucca

SEQ ID NO: 1798739 - RNA, 22 nt, Human
uuaugauagcaaauggccucau

SEQ ID NO: 1798740 - RNA, 20 nt, Human
uuaugauacuugaaaauuaa

SEQ ID NO: 1798741 - RNA, 20 nt, Human
uuaugaagcuuuuaugugaa

SEQ ID NO: 1798742 - RNA, 21 nt, Human
uuaucacccagaagaaaauag

SEQ ID NO: 1798743 - RNA, 19 nt, Human
uuaucacccagaagaaaau

SEQ ID NO: 1798744 - RNA, 18 nt, Human
uuaucacccagaagaaaa

SEQ ID NO: 1798745 - RNA, 17 nt, Human
uuaucacccagaagaaa

SEQ ID NO: 1798746 - RNA, 11 nt, Human
auacucccauc

SEQ ID NO: 1798747 - RNA, 16 nt, Human
auacucauuaggaugg

SEQ ID NO: 1798748 - RNA, 18 nt, Human
auacucuuauagacaaca

SEQ ID NO: 1798749 - RNA, 16 nt, Human
auacucugcuuagaau

SEQ ID NO: 1798750 - RNA, 17 nt, Human
auacuccuccaagguua

SEQ ID NO: 1798751 - RNA, 14 nt, Human
auacucccaucugu

SEQ ID NO: 1798752 - RNA, 12 nt, Human
uuauucauaauu

SEQ ID NO: 1798753 - RNA, 20 nt, Human
uuauucacuuuuauuuagca

SEQ ID NO: 1798754 - RNA, 13 nt, Human
uuauuaugcauga

SEQ ID NO: 1798755 - RNA, 14 nt, Human
uuauuauauuuaca

SEQ ID NO: 1798756 - RNA, 15 nt, Human
uuauuauauuuacaa

SEQ ID NO: 1798757 - RNA, 12 nt, Human
uuauuaugcaug

SEQ ID NO: 1798758 - RNA, 13 nt, Human
auagaaguaaaaa

SEQ ID NO: 1798759 - RNA, 13 nt, Human
auagaaaugcugg

SEQ ID NO: 1798760 - RNA, 19 nt, Human
auagaaaugcugguuuuuc

SEQ ID NO: 1798761 - RNA, 22 nt, Human
auagaaaugcugguuuuucagu

SEQ ID NO: 1798762 - RNA, 14 nt, Human
auagaauaaaauuu

SEQ ID NO: 1798763 - RNA, 19 nt, Human
auagaauaaaauuuuuaau

SEQ ID NO: 1798764 - RNA, 22 nt, Human
auagaauaaaauuuuuaaucuu

SEQ ID NO: 1798765 - RNA, 17 nt, Human
auagaauuaacacauga

SEQ ID NO: 1798766 - RNA, 15 nt, Human
auagacagcaugaga

SEQ ID NO: 1798767 - RNA, 23 nt, Human
auagacaauuuauuauggcacau

SEQ ID NO: 1798768 - RNA, 22 nt, Human
auagacaauuuauuauggcaca

SEQ ID NO: 1798769 - RNA, 16 nt, Human
auagacaauuuauuau

SEQ ID NO: 1798770 - RNA, 18 nt, Human
auagacccacaagaggca

SEQ ID NO: 1798771 - RNA, 14 nt, Human
auagagagagacca

SEQ ID NO: 1798772 - RNA, 18 nt, Human
auagauaggucagugcaa

SEQ ID NO: 1798773 - RNA, 17 nt, Human
agugcagugagccgaga

SEQ ID NO: 1798774 - RNA, 16 nt, Human
agugcaugcugucccu

SEQ ID NO: 1798775 - RNA, 14 nt, Human
agugcaugcugucc

SEQ ID NO: 1798776 - RNA, 14 nt, Human
agugccaaaaacaa

SEQ ID NO: 1798777 - RNA, 16 nt, Human
agugaggaugaaaaaa

SEQ ID NO: 1798778 - RNA, 12 nt, Human
agugaggcucug

SEQ ID NO: 1798779 - RNA, 13 nt, Human
agugaggcucugc

SEQ ID NO: 1798780 - RNA, 23 nt, Human
agugagcugguuuuuagcggaga

SEQ ID NO: 1798781 - RNA, 22 nt, Human
uguggauuuaacagaaauguac

SEQ ID NO: 1798782 - RNA, 20 nt, Human
uguggauuuaacagaaaugu

SEQ ID NO: 1798783 - RNA, 19 nt, Human
uguggauuuaacagaaaug

SEQ ID NO: 1798784 - RNA, 14 nt, Human
uguggaugauaaaa

SEQ ID NO: 1798785 - RNA, 21 nt, Human
uguggaucaaauccagccugc

SEQ ID NO: 1798786 - RNA, 18 nt, Human
ugugcugcccugcccacc

SEQ ID NO: 1798787 - RNA, 19 nt, Human
ugugcugcccugcccaccu

SEQ ID NO: 1798788 - RNA, 20 nt, Human
ugugcugcccugcccaccug

SEQ ID NO: 1798789 - RNA, 21 nt, Human
ugugcugcccugcccaccugg

SEQ ID NO: 1798790 - RNA, 12 nt, Human
ugugcucugauc

SEQ ID NO: 1798791 - RNA, 21 nt, Human
ugugcucaggagcccugggag

SEQ ID NO: 1798792 - RNA, 18 nt, Human
ugugcugagucugaaggc

SEQ ID NO: 1798793 - RNA, 19 nt, Human
ugugcugagucugaaggcu

SEQ ID NO: 1798794 - RNA, 12 nt, Human
ugugcugcccug

SEQ ID NO: 1798795 - RNA, 18 nt, Human
agucuuucacauuuaaau

SEQ ID NO: 1798796 - RNA, 21 nt, Human
agugaacaaauuuacagagac

SEQ ID NO: 1798797 - RNA, 16 nt, Human
agucuuucacauuuaa

SEQ ID NO: 1798798 - RNA, 21 nt, Human
agugacugauggcuaauguac

SEQ ID NO: 1798799 - RNA, 16 nt, Human
agugaacuugggccac

SEQ ID NO: 1798800 - RNA, 23 nt, Human
agugaacaaauuuacagagacag

SEQ ID NO: 1798801 - RNA, 22 nt, Human
agugaacaaauuuacagagaca

SEQ ID NO: 1798802 - RNA, 12 nt, Human
agugagcugguu

SEQ ID NO: 1798803 - RNA, 22 nt, Human
ugugaugaugaaaugaggucag

SEQ ID NO: 1798804 - RNA, 19 nt, Human
ugugaugagaggaaaucac

SEQ ID NO: 1798805 - RNA, 22 nt, Human
agugagcacuaaggugugcucu

SEQ ID NO: 1798806 - RNA, 14 nt, Human
agugagcacuaagg

SEQ ID NO: 1798807 - RNA, 11 nt, Human
ugugaggaagc

SEQ ID NO: 1798808 - RNA, 12 nt, Human
ugugaggaagcc

SEQ ID NO: 1798809 - RNA, 16 nt, Human
ugugacugaucucucg

SEQ ID NO: 1798810 - RNA, 18 nt, Human
ugugacuucagcucuguu

SEQ ID NO: 1798811 - RNA, 19 nt, Human
ugugacuucagcucuguuu

SEQ ID NO: 1798812 - RNA, 19 nt, Human
agucucgcucuguugccca

SEQ ID NO: 1798813 - RNA, 19 nt, Human
agucucuucuccacuggau

SEQ ID NO: 1798814 - RNA, 21 nt, Human
agucucuucuccacuggaugg

SEQ ID NO: 1798815 - RNA, 16 nt, Human
agucucuugauucaua

SEQ ID NO: 1798816 - RNA, 17 nt, Human
agucucuugauucauaa

SEQ ID NO: 1798817 - RNA, 12 nt, Human
agucugaaggcu

SEQ ID NO: 1798818 - RNA, 13 nt, Human
agucuuagaugua

SEQ ID NO: 1798819 - RNA, 14 nt, Human
agucuuagauguau

SEQ ID NO: 1798820 - RNA, 16 nt, Human
agucuuagauguauau

SEQ ID NO: 1798821 - RNA, 23 nt, Human
agucuuagauguauauauuuccu

SEQ ID NO: 1798822 - RNA, 18 nt, Human
agugguauagaaaugcug

SEQ ID NO: 1798823 - RNA, 16 nt, Human
agugguauagaaaugc

SEQ ID NO: 1798824 - RNA, 15 nt, Human
agugguauagaaaug

SEQ ID NO: 1798825 - RNA, 14 nt, Human
agugguauagaaau

SEQ ID NO: 1798826 - RNA, 20 nt, Human
agugugacugaucucucgug

SEQ ID NO: 1798827 - RNA, 21 nt, Human
agugugccugaagucccagau

SEQ ID NO: 1798828 - RNA, 19 nt, Human
uguuccacaaguuaaauaa

SEQ ID NO: 1798829 - RNA, 13 nt, Human
uguuaugacucca

SEQ ID NO: 1798830 - RNA, 17 nt, Human
uguuaugacuccagaau

SEQ ID NO: 1798831 - RNA, 22 nt, Human
agugugguguuuccuggcacug

SEQ ID NO: 1798832 - RNA, 20 nt, Human
uguugcccaggcuggcgugc

SEQ ID NO: 1798833 - RNA, 23 nt, Human
uguugcccaggcuggcgugcagu

SEQ ID NO: 1798834 - RNA, 15 nt, Human
uguugcauagaauaa

SEQ ID NO: 1798835 - RNA, 15 nt, Human
uguucuaagaaguga

SEQ ID NO: 1798836 - RNA, 23 nt, Human
aguuacuaucaugucaaacguga

SEQ ID NO: 1798837 - RNA, 13 nt, Human
aguuacucagaau

SEQ ID NO: 1798838 - RNA, 20 nt, Human
aguguuguggauuuaacaga

SEQ ID NO: 1798839 - RNA, 19 nt, Human
aguguuguggauuuaacag

SEQ ID NO: 1798840 - RNA, 18 nt, Human
aguguguguuuuucauaa

SEQ ID NO: 1798841 - RNA, 16 nt, Human
aguguuguggauuuaa

SEQ ID NO: 1798842 - RNA, 16 nt, Human
agugcccuccaggaua

SEQ ID NO: 1798843 - RNA, 20 nt, Human
ugugucuugcaauggcagcc

SEQ ID NO: 1798844 - RNA, 11 nt, Human
uguguguuuau

SEQ ID NO: 1798845 - RNA, 22 nt, Human
uguguuaucacccagaagaaaa

SEQ ID NO: 1798846 - RNA, 23 nt, Human
uguguuaucacccagaagaaaau

SEQ ID NO: 1798847 - RNA, 16 nt, Human
uguuaacugagugccu

SEQ ID NO: 1798848 - RNA, 22 nt, Human
uguuaacugagugccuuuuggu

SEQ ID NO: 1798849 - RNA, 22 nt, Human
uguuaaguugauggugaugaaa

SEQ ID NO: 1798850 - RNA, 18 nt, Human
uguuaauaaaaguacaug

SEQ ID NO: 1798851 - RNA, 13 nt, Human
uguuaauaaaagu

SEQ ID NO: 1798852 - RNA, 19 nt, Human
uguuaauaaaaguacaugu

SEQ ID NO: 1798853 - RNA, 17 nt, Human
uguuacaaauuguagaa

SEQ ID NO: 1798854 - RNA, 18 nt, Human
uguuacaaauuguagaag

SEQ ID NO: 1798855 - RNA, 18 nt, Human
uguuacacuuuuuggaag

SEQ ID NO: 1798856 - RNA, 19 nt, Human
uguuacauaagauaaaugu

SEQ ID NO: 1798857 - RNA, 11 nt, Human
aguggcagcug

SEQ ID NO: 1798858 - RNA, 22 nt, Human
agugggcccaaugcacuuuguu

SEQ ID NO: 1798859 - RNA, 15 nt, Human
aguggggacagagca

SEQ ID NO: 1798860 - RNA, 14 nt, Human
aguggggaggggcu

SEQ ID NO: 1798861 - RNA, 17 nt, Human
aguggauggaaggggcu

SEQ ID NO: 1798862 - RNA, 23 nt, Human
aguacacuguuucaaacuuuacu

SEQ ID NO: 1798863 - RNA, 21 nt, Human
aguacacuguuucaaacuuua

SEQ ID NO: 1798864 - RNA, 16 nt, Human
aguaaaaacaaagaaa

SEQ ID NO: 1798865 - RNA, 23 nt, Human
aguaaaaacaaagaaauuaugug

SEQ ID NO: 1798866 - RNA, 21 nt, Human
uguacauggaauaacauguaa

SEQ ID NO: 1798867 - RNA, 18 nt, Human
uguauauauuuccuauau

SEQ ID NO: 1798868 - RNA, 22 nt, Human
uguauauauuuccuauauuguu

SEQ ID NO: 1798869 - RNA, 16 nt, Human
uguaggguuauaauaa

SEQ ID NO: 1798870 - RNA, 17 nt, Human
uguaggguuauaauaau

SEQ ID NO: 1798871 - RNA, 22 nt, Human
uguagugaaucacguaaagcua

SEQ ID NO: 1798872 - RNA, 20 nt, Human
agguuggcaaaaaggcagga

SEQ ID NO: 1798873 - RNA, 16 nt, Human
agguuucucaaagaaa

SEQ ID NO: 1798874 - RNA, 19 nt, Human
agguuucucaaagaaauuu

SEQ ID NO: 1798875 - RNA, 19 nt, Human
uguaauuaaguacuaugua

SEQ ID NO: 1798876 - RNA, 21 nt, Human
uguaauuaaguacuauguauc

SEQ ID NO: 1798877 - RNA, 18 nt, Human
uguaauuaaguacuaugu

SEQ ID NO: 1798878 - RNA, 20 nt, Human
uguacauaaugcgugcauac

SEQ ID NO: 1798879 - RNA, 19 nt, Human
uguacauaaugcgugcaua

SEQ ID NO: 1798880 - RNA, 12 nt, Human
uguacaguuuuu

SEQ ID NO: 1798881 - RNA, 20 nt, Human
uguaauuuuguguaagaaau

SEQ ID NO: 1798882 - RNA, 16 nt, Human
uguaauuuuguguaag

SEQ ID NO: 1798883 - RNA, 15 nt, Human
uguaauuuuguguaa

SEQ ID NO: 1798884 - RNA, 20 nt, Human
uguaauuuuuuuaucgucac

SEQ ID NO: 1798885 - RNA, 14 nt, Human
uguacaugaaaaca

SEQ ID NO: 1798886 - RNA, 16 nt, Human
uguacaugaaaacaca

SEQ ID NO: 1798887 - RNA, 14 nt, Human
uguacauauaagug

SEQ ID NO: 1798888 - RNA, 14 nt, Human
agguugaagcacca

SEQ ID NO: 1798889 - RNA, 14 nt, Human
agguugcagugagc

SEQ ID NO: 1798890 - RNA, 12 nt, Human
aggugugcucug

SEQ ID NO: 1798891 - RNA, 22 nt, Human
aggugugagucaccaagcccag

SEQ ID NO: 1798892 - RNA, 21 nt, Human
aggugugagucaccaagccca

SEQ ID NO: 1798893 - RNA, 20 nt, Human
aggugucccugcacuugcag

SEQ ID NO: 1798894 - RNA, 16 nt, Human
aggugucccugcacuu

SEQ ID NO: 1798895 - RNA, 13 nt, Human
ugggcugcccugg

SEQ ID NO: 1798896 - RNA, 14 nt, Human
ugggcugcccuggu

SEQ ID NO: 1798897 - RNA, 15 nt, Human
ugggcugcccuggug

SEQ ID NO: 1798898 - RNA, 16 nt, Human
ugggcugcccuggugc

SEQ ID NO: 1798899 - RNA, 12 nt, Human
aggugggaggau

SEQ ID NO: 1798900 - RNA, 23 nt, Human
agucucacuguugcccaggcugg

SEQ ID NO: 1798901 - RNA, 16 nt, Human
agucccccugccccag

SEQ ID NO: 1798902 - RNA, 14 nt, Human
aguccucccaucuc

SEQ ID NO: 1798903 - RNA, 16 nt, Human
aguccucccaucucac

SEQ ID NO: 1798904 - RNA, 22 nt, Human
agucagaaguuucugccgcagc

SEQ ID NO: 1798905 - RNA, 19 nt, Human
ugucccuuacgugaguccu

SEQ ID NO: 1798906 - RNA, 23 nt, Human
ugucccuuacgugaguccuggca

SEQ ID NO: 1798907 - RNA, 14 nt, Human
ugucgccucugcau

SEQ ID NO: 1798908 - RNA, 16 nt, Human
agucccaccuuggcug

SEQ ID NO: 1798909 - RNA, 15 nt, Human
agucccaccuuggcu

SEQ ID NO: 1798910 - RNA, 20 nt, Human
agucccaccuuggcugcagg

SEQ ID NO: 1798911 - RNA, 19 nt, Human
agucccaccuuggcugcag

SEQ ID NO: 1798912 - RNA, 18 nt, Human
agucccaccuuggcugca

SEQ ID NO: 1798913 - RNA, 17 nt, Human
agucccaggcugagccu

SEQ ID NO: 1798914 - RNA, 18 nt, Human
agucccaggcugagccuc

SEQ ID NO: 1798915 - RNA, 19 nt, Human
agucccaggcugagccuca

SEQ ID NO: 1798916 - RNA, 19 nt, Human
aguauucuuauuuaaugaa

SEQ ID NO: 1798917 - RNA, 15 nt, Human
agucaccaagcccag

SEQ ID NO: 1798918 - RNA, 21 nt, Human
aguauuuuccuguugucaaga

SEQ ID NO: 1798919 - RNA, 17 nt, Human
agucaccccggccaccu

SEQ ID NO: 1798920 - RNA, 23 nt, Human
ugucccugcacuugcagacucua

SEQ ID NO: 1798921 - RNA, 22 nt, Human
ugucccugcacuugcagacucu

SEQ ID NO: 1798922 - RNA, 20 nt, Human
ugucccugcacuugcagacu

SEQ ID NO: 1798923 - RNA, 16 nt, Human
uguccaagaagcccag

SEQ ID NO: 1798924 - RNA, 17 nt, Human
uguccaagaagcccagg

SEQ ID NO: 1798925 - RNA, 18 nt, Human
uguccaagaagcccagga

SEQ ID NO: 1798926 - RNA, 22 nt, Human
uguccaagaagcccaggaaagg

SEQ ID NO: 1798927 - RNA, 22 nt, Human
ugucauuugagcagggcucagc

SEQ ID NO: 1798928 - RNA, 21 nt, Human
ugucauuugagcagggcucag

SEQ ID NO: 1798929 - RNA, 20 nt, Human
ugucauuugagcagggcuca

SEQ ID NO: 1798930 - RNA, 20 nt, Human
ugucagguggggcagcuuga

SEQ ID NO: 1798931 - RNA, 18 nt, Human
ugucagguggggcagcuu

SEQ ID NO: 1798932 - RNA, 17 nt, Human
ugucagguggggcagcu

SEQ ID NO: 1798933 - RNA, 14 nt, Human
uguccaagaagccc

SEQ ID NO: 1798934 - RNA, 15 nt, Human
uguccaagaagccca

SEQ ID NO: 1798935 - RNA, 13 nt, Human
agggaaauuucag

SEQ ID NO: 1798936 - RNA, 15 nt, Human
agggacuuggaagcu

SEQ ID NO: 1798937 - RNA, 19 nt, Human
agggacuuggaagcuccgc

SEQ ID NO: 1798938 - RNA, 18 nt, Human
agggacuuggaagcuccg

SEQ ID NO: 1798939 - RNA, 20 nt, Human
agggacuuggaagcuccgcu

SEQ ID NO: 1798940 - RNA, 16 nt, Human
ugggacuacaggugug

SEQ ID NO: 1798941 - RNA, 18 nt, Human
ugggacucaaugcacuga

SEQ ID NO: 1798942 - RNA, 13 nt, Human
ugggacuggccuc

SEQ ID NO: 1798943 - RNA, 15 nt, Human
ugggagaaaugaaaa

SEQ ID NO: 1798944 - RNA, 14 nt, Human
ugggacuggccucu

SEQ ID NO: 1798945 - RNA, 16 nt, Human
ugggacuggccucugc

SEQ ID NO: 1798946 - RNA, 18 nt, Human
ugggacuacaggcaccca

SEQ ID NO: 1798947 - RNA, 18 nt, Human
agggagcaucagugcccu

SEQ ID NO: 1798948 - RNA, 14 nt, Human
ugggaggcucugga

SEQ ID NO: 1798949 - RNA, 17 nt, Human
ugggaggcucuggagcc

SEQ ID NO: 1798950 - RNA, 23 nt, Human
ugggaggcucuggagcccacugu

SEQ ID NO: 1798951 - RNA, 19 nt, Human
ugggaggcugagaugggag

SEQ ID NO: 1798952 - RNA, 22 nt, Human
ugggaggauugcuugagcucag

SEQ ID NO: 1798953 - RNA, 18 nt, Human
ugggaggauugcuugagc

SEQ ID NO: 1798954 - RNA, 21 nt, Human
ugggaggauugcuugagcuca

SEQ ID NO: 1798955 - RNA, 16 nt, Human
ugggagaaaugaaaaa

SEQ ID NO: 1798956 - RNA, 21 nt, Human
ugggagaaccaaaaagaggcu

SEQ ID NO: 1798957 - RNA, 22 nt, Human
ugggagaaccaaaaagaggcua

SEQ ID NO: 1798958 - RNA, 16 nt, Human
ugggauuuggucaaca

SEQ ID NO: 1798959 - RNA, 13 nt, Human
ugggcagaaggaa

SEQ ID NO: 1798960 - RNA, 23 nt, Human
ugggcagaaggaagacuucaucc

SEQ ID NO: 1798961 - RNA, 16 nt, Human
ugggcagaaggaagac

SEQ ID NO: 1798962 - RNA, 20 nt, Human
ugggcagaaggaagacuuca

SEQ ID NO: 1798963 - RNA, 15 nt, Human
ugggcucccuuccca

SEQ ID NO: 1798964 - RNA, 14 nt, Human
ugggcucccuuccc

SEQ ID NO: 1798965 - RNA, 18 nt, Human
agggcccagagagggugg

SEQ ID NO: 1798966 - RNA, 14 nt, Human
agggcccagagagg

SEQ ID NO: 1798967 - RNA, 20 nt, Human
agggcuccagacacaugucc

SEQ ID NO: 1798968 - RNA, 17 nt, Human
agggcacugguggcccg

SEQ ID NO: 1798969 - RNA, 13 nt, Human
agggcccagagag

SEQ ID NO: 1798970 - RNA, 12 nt, Human
agggcccagaga

SEQ ID NO: 1798971 - RNA, 17 nt, Human
agggcauggccaggugg

SEQ ID NO: 1798972 - RNA, 20 nt, Human
agggagugacagaggcagcc

SEQ ID NO: 1798973 - RNA, 20 nt, Human
agggagugaguugauagcac

SEQ ID NO: 1798974 - RNA, 23 nt, Human
agggaguccgaaagggacuugga

SEQ ID NO: 1798975 - RNA, 20 nt, Human
agggaguccgaaagggacuu

SEQ ID NO: 1798976 - RNA, 22 nt, Human
agggagggcuccagacacaugu

SEQ ID NO: 1798977 - RNA, 13 nt, Human
agggagggccugg

SEQ ID NO: 1798978 - RNA, 15 nt, Human
agggagggccugggc

SEQ ID NO: 1798979 - RNA, 12 nt, Human
agggagggcucc

SEQ ID NO: 1798980 - RNA, 13 nt, Human
agggagggcucca

SEQ ID NO: 1798981 - RNA, 17 nt, Human
agggagggcuccagaca

SEQ ID NO: 1798982 - RNA, 19 nt, Human
agggagggcuccagacaca

SEQ ID NO: 1798983 - RNA, 18 nt, Human
ugggaaacaaaaggauaa

SEQ ID NO: 1798984 - RNA, 21 nt, Human
uggcuuuugugcauuaucuag

SEQ ID NO: 1798985 - RNA, 16 nt, Human
uggcuuuugugcauua

SEQ ID NO: 1798986 - RNA, 22 nt, Human
uggcuucacggaagagccuugc

SEQ ID NO: 1798987 - RNA, 15 nt, Human
uggcuuuugugcauu

SEQ ID NO: 1798988 - RNA, 17 nt, Human
uggcuucacggaagagc

SEQ ID NO: 1798989 - RNA, 20 nt, Human
uggcuucacggaagagccuu

SEQ ID NO: 1798990 - RNA, 20 nt, Human
ugggaacaccauaggucacc

SEQ ID NO: 1798991 - RNA, 23 nt, Human
uggcugcaaaggguaucaggugc

SEQ ID NO: 1798992 - RNA, 14 nt, Human
uggcugugccucug

SEQ ID NO: 1798993 - RNA, 15 nt, Human
uggcugugccucugc

SEQ ID NO: 1798994 - RNA, 16 nt, Human
uggcugugccucugcc

SEQ ID NO: 1798995 - RNA, 17 nt, Human
uggcugugccucugccu

SEQ ID NO: 1798996 - RNA, 23 nt, Human
uggcuguuggcugggggccucag

SEQ ID NO: 1798997 - RNA, 14 nt, Human
uggcuucacggaag

SEQ ID NO: 1798998 - RNA, 18 nt, Human
uggcuguuggcugggggc

SEQ ID NO: 1798999 - RNA, 16 nt, Human
uggcuguuggcugggg

SEQ ID NO: 1799000 - RNA, 22 nt, Human
uggcugugccucugccugucuc

SEQ ID NO: 1799001 - RNA, 18 nt, Human
uggcugugccucugccug

SEQ ID NO: 1799002 - RNA, 19 nt, Human
uggcugugccucugccugu

SEQ ID NO: 1799003 - RNA, 13 nt, Human
aggcuccugccac

SEQ ID NO: 1799004 - RNA, 18 nt, Human
uggcuaagcaaaauguga

SEQ ID NO: 1799005 - RNA, 14 nt, Human
uggcuaaauucaug

SEQ ID NO: 1799006 - RNA, 17 nt, Human
aggcuccaggagcagcc

SEQ ID NO: 1799007 - RNA, 18 nt, Human
aggcuccaggagcagcca

SEQ ID NO: 1799008 - RNA, 19 nt, Human
aggcuccaggagcagccac

SEQ ID NO: 1799009 - RNA, 23 nt, Human
aggcuccaggagcagccacauuc

SEQ ID NO: 1799010 - RNA, 17 nt, Human
uggcuaauguacugcau

SEQ ID NO: 1799011 - RNA, 19 nt, Human
uggcuaauguacugcauau

SEQ ID NO: 1799012 - RNA, 21 nt, Human
uggcucacugcaacuucugcc

SEQ ID NO: 1799013 - RNA, 13 nt, Human
uggcucacgccug

SEQ ID NO: 1799014 - RNA, 15 nt, Human
aggcuuuuuuaucau

SEQ ID NO: 1799015 - RNA, 18 nt, Human
aggcuuuuuuaucaugug

SEQ ID NO: 1799016 - RNA, 21 nt, Human
aggcuuuuuuaucaugugaaa

SEQ ID NO: 1799017 - RNA, 23 nt, Human
aggcuuagucacugagacagccc

SEQ ID NO: 1799018 - RNA, 22 nt, Human
aggcuuagucacugagacagcc

SEQ ID NO: 1799019 - RNA, 21 nt, Human
aggcuuagucacugagacagc

SEQ ID NO: 1799020 - RNA, 23 nt, Human
aggcuucugguugaugccuguga

SEQ ID NO: 1799021 - RNA, 14 nt, Human
aggcugggcuucag

SEQ ID NO: 1799022 - RNA, 21 nt, Human
aggcugggcucccuucccacc

SEQ ID NO: 1799023 - RNA, 23 nt, Human
aggcugggcucccuucccaccuc

SEQ ID NO: 1799024 - RNA, 13 nt, Human
aggcugggcuccc

SEQ ID NO: 1799025 - RNA, 14 nt, Human
aggcugggcucccu

SEQ ID NO: 1799026 - RNA, 18 nt, Human
aggcugggcucccuuccc

SEQ ID NO: 1799027 - RNA, 22 nt, Human
aggcugggagagccuuccaggg

SEQ ID NO: 1799028 - RNA, 20 nt, Human
aggcugggagagccuuccag

SEQ ID NO: 1799029 - RNA, 21 nt, Human
aggcugggagagccuuccagg

SEQ ID NO: 1799030 - RNA, 19 nt, Human
aggcugggagagccuucca

SEQ ID NO: 1799031 - RNA, 16 nt, Human
aggcugggagagccuu

SEQ ID NO: 1799032 - RNA, 23 nt, Human
aggcugggcuucaguggcagcug

SEQ ID NO: 1799033 - RNA, 22 nt, Human
aggcugggcuucaguggcagcu

SEQ ID NO: 1799034 - RNA, 17 nt, Human
aggcugggggaagaagc

SEQ ID NO: 1799035 - RNA, 21 nt, Human
aggcugggcuucaguggcagc

SEQ ID NO: 1799036 - RNA, 20 nt, Human
aggcugggcuucaguggcag

SEQ ID NO: 1799037 - RNA, 19 nt, Human
aggcugggcuucaguggca

SEQ ID NO: 1799038 - RNA, 18 nt, Human
aggcugggcuucaguggc

SEQ ID NO: 1799039 - RNA, 20 nt, Human
aggcugggucgcccuggacu

SEQ ID NO: 1799040 - RNA, 21 nt, Human
aggcugggucgcccuggacug

SEQ ID NO: 1799041 - RNA, 14 nt, Human
aggcuggguucuga

SEQ ID NO: 1799042 - RNA, 17 nt, Human
aggcuggguucugaucc

SEQ ID NO: 1799043 - RNA, 15 nt, Human
aggcugggucgcccu

SEQ ID NO: 1799044 - RNA, 18 nt, Human
aggcugggucgcccugga

SEQ ID NO: 1799045 - RNA, 10 nt, Human
aggcuggguc

SEQ ID NO: 1799046 - RNA, 22 nt, Human
aggcugggggaagaagcucucu

SEQ ID NO: 1799047 - RNA, 15 nt, Human
uggacaccggaaaca

SEQ ID NO: 1799048 - RNA, 14 nt, Human
aggcaagcaccucc

SEQ ID NO: 1799049 - RNA, 16 nt, Human
aggcaacuugggaacu

SEQ ID NO: 1799050 - RNA, 14 nt, Human
uggaauuugaaaca

SEQ ID NO: 1799051 - RNA, 22 nt, Human
aggauugcuacuguccuaccca

SEQ ID NO: 1799052 - RNA, 18 nt, Human
aggaugcuuguacauaau

SEQ ID NO: 1799053 - RNA, 12 nt, Human
aggaucagucug

SEQ ID NO: 1799054 - RNA, 21 nt, Human
aggauccugagccagauuuca

SEQ ID NO: 1799055 - RNA, 16 nt, Human
aggaugcuuguacaua

SEQ ID NO: 1799056 - RNA, 15 nt, Human
aggaugcuuguacau

SEQ ID NO: 1799057 - RNA, 12 nt, Human
aggaucucuuga

SEQ ID NO: 1799058 - RNA, 10 nt, Human
ugcugcccug

SEQ ID NO: 1799059 - RNA, 12 nt, Human
ugcugcccugcc

SEQ ID NO: 1799060 - RNA, 13 nt, Human
uggaagcuccgcu

SEQ ID NO: 1799061 - RNA, 14 nt, Human
uggaacacucugag

SEQ ID NO: 1799062 - RNA, 12 nt, Human
uggaacacucug

SEQ ID NO: 1799063 - RNA, 20 nt, Human
uggaaguacuauaauuuacc

SEQ ID NO: 1799064 - RNA, 14 nt, Human
uggaaguaguggag

SEQ ID NO: 1799065 - RNA, 17 nt, Human
uggaaguaguggagccc

SEQ ID NO: 1799066 - RNA, 19 nt, Human
aggaguuucguuuucaaaa

SEQ ID NO: 1799067 - RNA, 21 nt, Human
aggaguuugagaccaaccugg

SEQ ID NO: 1799068 - RNA, 15 nt, Human
aggaggccagccuug

SEQ ID NO: 1799069 - RNA, 19 nt, Human
uggaagugaaaacuuugua

SEQ ID NO: 1799070 - RNA, 18 nt, Human
uggaagugaaaacuuugu

SEQ ID NO: 1799071 - RNA, 14 nt, Human
uggaagugcuaauu

SEQ ID NO: 1799072 - RNA, 16 nt, Human
aggcaaugcuggcugu

SEQ ID NO: 1799073 - RNA, 15 nt, Human
aggcaaugcuggcug

SEQ ID NO: 1799074 - RNA, 21 nt, Human
uggaggaaaaccaagccgugg

SEQ ID NO: 1799075 - RNA, 23 nt, Human
uggaggaaaaccaagccguggcu

SEQ ID NO: 1799076 - RNA, 22 nt, Human
uggacuuuguuaguuucuccaa

SEQ ID NO: 1799077 - RNA, 11 nt, Human
uggacuuuguu

SEQ ID NO: 1799078 - RNA, 19 nt, Human
uggagcccacuguacuugc

SEQ ID NO: 1799079 - RNA, 23 nt, Human
uggagcccacuguacuugcucuu

SEQ ID NO: 1799080 - RNA, 16 nt, Human
uggagcccacuguacu

SEQ ID NO: 1799081 - RNA, 24 nt, Human
uggacuuuguuaguuucuccaagc

SEQ ID NO: 1799082 - RNA, 22 nt, Human
aggcagccccauucugccugcc

SEQ ID NO: 1799083 - RNA, 21 nt, Human
aggcagccccauucugccugc

SEQ ID NO: 1799084 - RNA, 20 nt, Human
aggcagccccauucugccug

SEQ ID NO: 1799085 - RNA, 19 nt, Human
aggcagccccauucugccu

SEQ ID NO: 1799086 - RNA, 15 nt, Human
aggcacccaccauca

SEQ ID NO: 1799087 - RNA, 20 nt, Human
aggcaggaguuucguuuuca

SEQ ID NO: 1799088 - RNA, 12 nt, Human
aggcaggauggc

SEQ ID NO: 1799089 - RNA, 16 nt, Human
aggcagggagggccug

SEQ ID NO: 1799090 - RNA, 21 nt, Human
aggcagggucucacucugucg

SEQ ID NO: 1799091 - RNA, 20 nt, Human
aggcagggucucacucuguc

SEQ ID NO: 1799092 - RNA, 18 nt, Human
aggcagggucucacucug

SEQ ID NO: 1799093 - RNA, 19 nt, Human
aggcagggucucacucugu

SEQ ID NO: 1799094 - RNA, 14 nt, Human
aggcagguccaggg

SEQ ID NO: 1799095 - RNA, 22 nt, Human
aggcagggucucacucugucgc

SEQ ID NO: 1799096 - RNA, 21 nt, Human
aggcaggucuugaacuccugg

SEQ ID NO: 1799097 - RNA, 13 nt, Human
aggcuccaggagc

SEQ ID NO: 1799098 - RNA, 14 nt, Human
aggcuccaggagca

SEQ ID NO: 1799099 - RNA, 16 nt, Human
aggcuccaggagcagc

SEQ ID NO: 1799100 - RNA, 22 nt, Human
aggcuccacuuggucugugaga

SEQ ID NO: 1799101 - RNA, 21 nt, Human
aggcuccacuuggucugugag

SEQ ID NO: 1799102 - RNA, 17 nt, Human
aggcuccacuuggucug

SEQ ID NO: 1799103 - RNA, 11 nt, Human
aggcuccacuu

SEQ ID NO: 1799104 - RNA, 18 nt, Human
aggccuucucugaaggac

SEQ ID NO: 1799105 - RNA, 17 nt, Human
aggccuucucugaagga

SEQ ID NO: 1799106 - RNA, 14 nt, Human
aggcgccccuuccc

SEQ ID NO: 1799107 - RNA, 22 nt, Human
uggcaugggaaugaaugucagu

SEQ ID NO: 1799108 - RNA, 19 nt, Human
uggcccacgcacuucggga

SEQ ID NO: 1799109 - RNA, 13 nt, Human
uggcccacugcau

SEQ ID NO: 1799110 - RNA, 14 nt, Human
uggcccacugcauc

SEQ ID NO: 1799111 - RNA, 12 nt, Human
uggcccugcccu

SEQ ID NO: 1799112 - RNA, 13 nt, Human
uggcccugcccug

SEQ ID NO: 1799113 - RNA, 21 nt, Human
uggccucugcugauccuccca

SEQ ID NO: 1799114 - RNA, 20 nt, Human
uggccucugcacuccccugc

SEQ ID NO: 1799115 - RNA, 19 nt, Human
uggccucugcacuccccug

SEQ ID NO: 1799116 - RNA, 18 nt, Human
aggccaugggccuccugu

SEQ ID NO: 1799117 - RNA, 22 nt, Human
uggcagccgugccuucagcucu

SEQ ID NO: 1799118 - RNA, 23 nt, Human
aggccagagacacaagccuucgg

SEQ ID NO: 1799119 - RNA, 20 nt, Human
aggccauuccccgucucugg

SEQ ID NO: 1799120 - RNA, 15 nt, Human
aggcccagagggccu

SEQ ID NO: 1799121 - RNA, 16 nt, Human
aggcccagagggccug

SEQ ID NO: 1799122 - RNA, 18 nt, Human
uggcagccgugccuucag

SEQ ID NO: 1799123 - RNA, 19 nt, Human
uggcagccgugccuucagc

SEQ ID NO: 1799124 - RNA, 20 nt, Human
uggcagccgugccuucagcu

SEQ ID NO: 1799125 - RNA, 21 nt, Human
uggcagccgugccuucagcuc

SEQ ID NO: 1799126 - RNA, 14 nt, Human
uggcagcucagaga

SEQ ID NO: 1799127 - RNA, 15 nt, Human
uggcagcucagagag

SEQ ID NO: 1799128 - RNA, 16 nt, Human
uggcagcucagagagg

SEQ ID NO: 1799129 - RNA, 18 nt, Human
uggcagcucagagagggu

SEQ ID NO: 1799130 - RNA, 13 nt, Human
aggccagagacac

SEQ ID NO: 1799131 - RNA, 18 nt, Human
aggccagagacacaagcc

SEQ ID NO: 1799132 - RNA, 17 nt, Human
uggcagccgugccuuca

SEQ ID NO: 1799133 - RNA, 16 nt, Human
uggcaccagcagccug

SEQ ID NO: 1799134 - RNA, 17 nt, Human
uggcaccagcagccugg

SEQ ID NO: 1799135 - RNA, 16 nt, Human
uggcacagggcagugg

SEQ ID NO: 1799136 - RNA, 15 nt, Human
uggcacagggcagug

SEQ ID NO: 1799137 - RNA, 21 nt, Human
aggccccugccacccugggga

SEQ ID NO: 1799138 - RNA, 18 nt, Human
aggccccugccacccugg

SEQ ID NO: 1799139 - RNA, 17 nt, Human
aggccccugccacccug

SEQ ID NO: 1799140 - RNA, 15 nt, Human
aggccccugccaccc

SEQ ID NO: 1799141 - RNA, 13 nt, Human
aggccccugccac

SEQ ID NO: 1799142 - RNA, 19 nt, Human
aggcccagagggccugcaa

SEQ ID NO: 1799143 - RNA, 20 nt, Human
aggcccagagggccugcaag

SEQ ID NO: 1799144 - RNA, 16 nt, Human
aggcccggcuccaggc

SEQ ID NO: 1799145 - RNA, 15 nt, Human
aggcccggcuccagg

SEQ ID NO: 1799146 - RNA, 14 nt, Human
aggcccggcuccag

SEQ ID NO: 1799147 - RNA, 17 nt, Human
aggcccggcuccaggcu

SEQ ID NO: 1799148 - RNA, 12 nt, Human
aggccuggccag

SEQ ID NO: 1799149 - RNA, 13 nt, Human
aggccuggccaga

SEQ ID NO: 1799150 - RNA, 22 nt, Human
aggccuaauucuaugccugucu

SEQ ID NO: 1799151 - RNA, 19 nt, Human
aggccuaauucuaugccug

SEQ ID NO: 1799152 - RNA, 17 nt, Human
ugcugacuguuuucucu

SEQ ID NO: 1799153 - RNA, 17 nt, Human
ugcucuggacaggcaug

SEQ ID NO: 1799154 - RNA, 15 nt, Human
ugcucugcauguuac

SEQ ID NO: 1799155 - RNA, 18 nt, Human
ugcucugcauguuacaua

SEQ ID NO: 1799156 - RNA, 22 nt, Human
ugcucugaucauccacugugcc

SEQ ID NO: 1799157 - RNA, 18 nt, Human
ugcucugaugaagaggag

SEQ ID NO: 1799158 - RNA, 19 nt, Human
ugcucugaugaagaggagu

SEQ ID NO: 1799159 - RNA, 21 nt, Human
ugcugacuguuuucucuugag

SEQ ID NO: 1799160 - RNA, 24 nt, Human
ugcugacuguuuucucuugagagg

SEQ ID NO: 1799161 - RNA, 15 nt, Human
ugcugagucccaggc

SEQ ID NO: 1799162 - RNA, 18 nt, Human
ugcugagucccaggcuga

SEQ ID NO: 1799163 - RNA, 22 nt, Human
ugcugagucccaggcugagccu

SEQ ID NO: 1799164 - RNA, 18 nt, Human
aggaaaggcuccaggagc

SEQ ID NO: 1799165 - RNA, 20 nt, Human
aggaaaggcuccaggagcag

SEQ ID NO: 1799166 - RNA, 22 nt, Human
aggaaaggcuccaggagcagcc

SEQ ID NO: 1799167 - RNA, 23 nt, Human
aggaaaggcuccaggagcagcca

SEQ ID NO: 1799168 - RNA, 23 nt, Human
aggaauccagacccggcugcgug

SEQ ID NO: 1799169 - RNA, 19 nt, Human
aggaauugacccacaagaa

SEQ ID NO: 1799170 - RNA, 17 nt, Human
aggaagcucagggccug

SEQ ID NO: 1799171 - RNA, 18 nt, Human
aggaagcucagggccugg

SEQ ID NO: 1799172 - RNA, 22 nt, Human
aggaagcucagggccuggcuca

SEQ ID NO: 1799173 - RNA, 14 nt, Human
aggaagagaaaaaa

SEQ ID NO: 1799174 - RNA, 15 nt, Human
aggaagacuuuggaa

SEQ ID NO: 1799175 - RNA, 15 nt, Human
ugcugccauccaggu

SEQ ID NO: 1799176 - RNA, 14 nt, Human
ugcugccauccagg

SEQ ID NO: 1799177 - RNA, 13 nt, Human
ugcugccauccag

SEQ ID NO: 1799178 - RNA, 12 nt, Human
ugcugccaucca

SEQ ID NO: 1799179 - RNA, 22 nt, Human
ugcugccauccagguucagcuu

SEQ ID NO: 1799180 - RNA, 21 nt, Human
ugcugccauccagguucagcu

SEQ ID NO: 1799181 - RNA, 14 nt, Human
ugcugcccagccuc

SEQ ID NO: 1799182 - RNA, 16 nt, Human
ugcugcccagccucca

SEQ ID NO: 1799183 - RNA, 11 nt, Human
ugcugccaucc

SEQ ID NO: 1799184 - RNA, 22 nt, Human
ugcugccacacuucaggcucuu

SEQ ID NO: 1799185 - RNA, 15 nt, Human
ugcugccacacuuca

SEQ ID NO: 1799186 - RNA, 16 nt, Human
ugcugccacacuucag

SEQ ID NO: 1799187 - RNA, 19 nt, Human
ugcugccacacuucaggcu

SEQ ID NO: 1799188 - RNA, 22 nt, Human
aggaauuuuauuuuuuucugaa

SEQ ID NO: 1799189 - RNA, 21 nt, Human
agcuuguaaauagcucaggug

SEQ ID NO: 1799190 - RNA, 20 nt, Human
agcuuguaaauagcucaggu

SEQ ID NO: 1799191 - RNA, 19 nt, Human
agcuuguaaauagcucagg

SEQ ID NO: 1799192 - RNA, 21 nt, Human
ugcggacagccacggccaggc

SEQ ID NO: 1799193 - RNA, 20 nt, Human
ugcggacagccacggccagg

SEQ ID NO: 1799194 - RNA, 20 nt, Human
agcuuaaaggggcuagagug

SEQ ID NO: 1799195 - RNA, 12 nt, Human
agcuuaucucag

SEQ ID NO: 1799196 - RNA, 14 nt, Human
agcuuaucucaggg

SEQ ID NO: 1799197 - RNA, 15 nt, Human
agcuuaucucagggg

SEQ ID NO: 1799198 - RNA, 12 nt, Human
aggaaagaggcu

SEQ ID NO: 1799199 - RNA, 13 nt, Human
aggaaagaggcuc

SEQ ID NO: 1799200 - RNA, 16 nt, Human
aggaaagaggcucugg

SEQ ID NO: 1799201 - RNA, 17 nt, Human
aggaaagcaaaggagau

SEQ ID NO: 1799202 - RNA, 19 nt, Human
aggaaagcaaaggagauug

SEQ ID NO: 1799203 - RNA, 21 nt, Human
ugcuauaacuauguugauaaa

SEQ ID NO: 1799204 - RNA, 21 nt, Human
aggaaacccagcucuggucca

SEQ ID NO: 1799205 - RNA, 18 nt, Human
aggaaacccagcucuggu

SEQ ID NO: 1799206 - RNA, 20 nt, Human
aggaaacccagcucuggucc

SEQ ID NO: 1799207 - RNA, 15 nt, Human
aggaaacccagcucu

SEQ ID NO: 1799208 - RNA, 16 nt, Human
aggaaacccagcucug

SEQ ID NO: 1799209 - RNA, 17 nt, Human
aggaaacccagcucugg

SEQ ID NO: 1799210 - RNA, 12 nt, Human
agcuuugaaaau

SEQ ID NO: 1799211 - RNA, 16 nt, Human
agcuuugaaaauucag

SEQ ID NO: 1799212 - RNA, 18 nt, Human
agcuuugaaaauucagug

SEQ ID NO: 1799213 - RNA, 19 nt, Human
agcuuugaaaauucagugg

SEQ ID NO: 1799214 - RNA, 13 nt, Human
ugcgaaaggauga

SEQ ID NO: 1799215 - RNA, 18 nt, Human
ugcggacagccacggcca

SEQ ID NO: 1799216 - RNA, 19 nt, Human
ugcgaaaggaugaaaguga

SEQ ID NO: 1799217 - RNA, 17 nt, Human
ugccuguucagcuccag

SEQ ID NO: 1799218 - RNA, 16 nt, Human
ugccuguucagcucca

SEQ ID NO: 1799219 - RNA, 15 nt, Human
ugccuguucagcucc

SEQ ID NO: 1799220 - RNA, 21 nt, Human
ugccuuagaaccuuucuuaca

SEQ ID NO: 1799221 - RNA, 14 nt, Human
ugccuuagaaccuu

SEQ ID NO: 1799222 - RNA, 17 nt, Human
ugccuuagaaccuuucu

SEQ ID NO: 1799223 - RNA, 20 nt, Human
agcuggggccaggcuggguc

SEQ ID NO: 1799224 - RNA, 10 nt, Human
agcugccugu

SEQ ID NO: 1799225 - RNA, 17 nt, Human
agcuggagaaauauggu

SEQ ID NO: 1799226 - RNA, 21 nt, Human
agcugccugggaucccucauc

SEQ ID NO: 1799227 - RNA, 13 nt, Human
agcugccugggau

SEQ ID NO: 1799228 - RNA, 19 nt, Human
agcugccugggaucccuca

SEQ ID NO: 1799229 - RNA, 22 nt, Human
ugccucugacacacagcucugu

SEQ ID NO: 1799230 - RNA, 19 nt, Human
agcugggacuacaggugug

SEQ ID NO: 1799231 - RNA, 17 nt, Human
agcugggacuacaggug

SEQ ID NO: 1799232 - RNA, 22 nt, Human
agcugggaucacauguggacuu

SEQ ID NO: 1799233 - RNA, 18 nt, Human
agcugggauuacaggcuc

SEQ ID NO: 1799234 - RNA, 21 nt, Human
agcugggauuacaggcuccug

SEQ ID NO: 1799235 - RNA, 23 nt, Human
agcugggaugauuggagggggga

SEQ ID NO: 1799236 - RNA, 17 nt, Human
agcuggggccaggcugg

SEQ ID NO: 1799237 - RNA, 22 nt, Human
agcugggauuacaggcuccugc

SEQ ID NO: 1799238 - RNA, 23 nt, Human
agcugggauuacaggcuccugcc

SEQ ID NO: 1799239 - RNA, 14 nt, Human
agcugggcagguug

SEQ ID NO: 1799240 - RNA, 14 nt, Human
agcucuguccuggg

SEQ ID NO: 1799241 - RNA, 12 nt, Human
agcucuguccug

SEQ ID NO: 1799242 - RNA, 18 nt, Human
agcucuucuccaggcugu

SEQ ID NO: 1799243 - RNA, 13 nt, Human
agcugcacccuca

SEQ ID NO: 1799244 - RNA, 17 nt, Human
agcugcacccucaggca

SEQ ID NO: 1799245 - RNA, 18 nt, Human
agcugcacccucaggcag

SEQ ID NO: 1799246 - RNA, 19 nt, Human
agcugcacccucaggcagg

SEQ ID NO: 1799247 - RNA, 20 nt, Human
agcugcacccucaggcaggu

SEQ ID NO: 1799248 - RNA, 22 nt, Human
agcugcacccucaggcaggugg

SEQ ID NO: 1799249 - RNA, 12 nt, Human
agcucugcuccu

SEQ ID NO: 1799250 - RNA, 22 nt, Human
agcucugcuccucuccccagca

SEQ ID NO: 1799251 - RNA, 20 nt, Human
agcucugguccauagagagc

SEQ ID NO: 1799252 - RNA, 16 nt, Human
agcucucuccucccuu

SEQ ID NO: 1799253 - RNA, 22 nt, Human
agcucuaucaccaaggagccaa

SEQ ID NO: 1799254 - RNA, 17 nt, Human
agcucuaucaccaagga

SEQ ID NO: 1799255 - RNA, 22 nt, Human
ugcccuccaagaccuucuccuu

SEQ ID NO: 1799256 - RNA, 19 nt, Human
ugcccuccaagaccuucuc

SEQ ID NO: 1799257 - RNA, 20 nt, Human
ugcccuccaagaccuucucc

SEQ ID NO: 1799258 - RNA, 14 nt, Human
agcugccagccgag

SEQ ID NO: 1799259 - RNA, 13 nt, Human
agcugccaccugc

SEQ ID NO: 1799260 - RNA, 18 nt, Human
agcugcauacaguuugca

SEQ ID NO: 1799261 - RNA, 15 nt, Human
ugcccuuucugggca

SEQ ID NO: 1799262 - RNA, 21 nt, Human
ugccucugacacacagcucug

SEQ ID NO: 1799263 - RNA, 20 nt, Human
ugccucugacacacagcucu

SEQ ID NO: 1799264 - RNA, 19 nt, Human
ugccucucugcaggucccu

SEQ ID NO: 1799265 - RNA, 20 nt, Human
ugccucucugcaggucccua

SEQ ID NO: 1799266 - RNA, 16 nt, Human
ugccucucugcagguc

SEQ ID NO: 1799267 - RNA, 18 nt, Human
ugccucucugcagguccc

SEQ ID NO: 1799268 - RNA, 16 nt, Human
ugccucucucaggcca

SEQ ID NO: 1799269 - RNA, 15 nt, Human
ugccucucucaggcc

SEQ ID NO: 1799270 - RNA, 13 nt, Human
ugccucccaucac

SEQ ID NO: 1799271 - RNA, 14 nt, Human
ugccucccaucacc

SEQ ID NO: 1799272 - RNA, 19 nt, Human
ugccucccaucacccgcua

SEQ ID NO: 1799273 - RNA, 13 nt, Human
ugccucucucagg

SEQ ID NO: 1799274 - RNA, 14 nt, Human
ugccucucucaggc

SEQ ID NO: 1799275 - RNA, 14 nt, Human
ugcauuuccugaca

SEQ ID NO: 1799276 - RNA, 13 nt, Human
ugcauuuccugac

SEQ ID NO: 1799277 - RNA, 23 nt, Human
ugcauuugaaaauuuugauguuu

SEQ ID NO: 1799278 - RNA, 19 nt, Human
ugcauuugaaaauuuugau

SEQ ID NO: 1799279 - RNA, 22 nt, Human
agcgcccaguuggguggaugcc

SEQ ID NO: 1799280 - RNA, 14 nt, Human
agcgcccaguuggg

SEQ ID NO: 1799281 - RNA, 14 nt, Human
agccugcuccagcu

SEQ ID NO: 1799282 - RNA, 20 nt, Human
agcgcccacuagacccacug

SEQ ID NO: 1799283 - RNA, 17 nt, Human
agcgugagccacugcac

SEQ ID NO: 1799284 - RNA, 16 nt, Human
agcgugagccacugca

SEQ ID NO: 1799285 - RNA, 20 nt, Human
agcgugguggacaugcacag

SEQ ID NO: 1799286 - RNA, 23 nt, Human
agcgugguggacaugcacagcua

SEQ ID NO: 1799287 - RNA, 21 nt, Human
ugccauauucuguuggccagu

SEQ ID NO: 1799288 - RNA, 20 nt, Human
ugccauauucuguuggccag

SEQ ID NO: 1799289 - RNA, 15 nt, Human
agcggggacagcucc

SEQ ID NO: 1799290 - RNA, 17 nt, Human
agcggggacagcuccuu

SEQ ID NO: 1799291 - RNA, 16 nt, Human
agcggggacagcuccu

SEQ ID NO: 1799292 - RNA, 15 nt, Human
agcgugagccacugc

SEQ ID NO: 1799293 - RNA, 17 nt, Human
ugccauauucuguuggc

SEQ ID NO: 1799294 - RNA, 16 nt, Human
ugccauauucuguugg

SEQ ID NO: 1799295 - RNA, 15 nt, Human
ugccauauucuguug

SEQ ID NO: 1799296 - RNA, 19 nt, Human
ugccagucccccugcccca

SEQ ID NO: 1799297 - RNA, 17 nt, Human
ugccagucccccugccc

SEQ ID NO: 1799298 - RNA, 22 nt, Human
ugccagucaccccggccaccug

SEQ ID NO: 1799299 - RNA, 23 nt, Human
ugccagucaccccggccaccugc

SEQ ID NO: 1799300 - RNA, 23 nt, Human
ugccacugccucuuccucccuca

SEQ ID NO: 1799301 - RNA, 12 nt, Human
ugccacacuuca

SEQ ID NO: 1799302 - RNA, 15 nt, Human
ugccagucaccccgg

SEQ ID NO: 1799303 - RNA, 16 nt, Human
ugccagucaccccggc

SEQ ID NO: 1799304 - RNA, 18 nt, Human
ugccagucaccccggcca

SEQ ID NO: 1799305 - RNA, 20 nt, Human
ugccagucaccccggccacc

SEQ ID NO: 1799306 - RNA, 19 nt, Human
agcuauggugucauaggcu

SEQ ID NO: 1799307 - RNA, 19 nt, Human
ugccauguuggccaggcug

SEQ ID NO: 1799308 - RNA, 18 nt, Human
ugccauguuggccaggcu

SEQ ID NO: 1799309 - RNA, 17 nt, Human
ugccauguuggccaggc

SEQ ID NO: 1799310 - RNA, 17 nt, Human
agcucagggccuggcuc

SEQ ID NO: 1799311 - RNA, 15 nt, Human
agcucagggccuggc

SEQ ID NO: 1799312 - RNA, 16 nt, Human
agcucagggccuggcu

SEQ ID NO: 1799313 - RNA, 21 nt, Human
ugccauguuggccaggcuggu

SEQ ID NO: 1799314 - RNA, 20 nt, Human
ugccauguuggccaggcugg

SEQ ID NO: 1799315 - RNA, 18 nt, Human
agcucagggccuggcuca

SEQ ID NO: 1799316 - RNA, 23 nt, Human
ugcccaaccugcucuccucuugc

SEQ ID NO: 1799317 - RNA, 24 nt, Human
ugcccaaccugcucuccucuugcc

SEQ ID NO: 1799318 - RNA, 18 nt, Human
ugcccaaccugcucuccu

SEQ ID NO: 1799319 - RNA, 22 nt, Human
ugcccaaccugcucuccucuug

SEQ ID NO: 1799320 - RNA, 11 nt, Human
ugcccaggccc

SEQ ID NO: 1799321 - RNA, 20 nt, Human
ugcccaggcaggucuugaac

SEQ ID NO: 1799322 - RNA, 17 nt, Human
ugcccaggcaggucuug

SEQ ID NO: 1799323 - RNA, 16 nt, Human
ugcccaggcaggucuu

SEQ ID NO: 1799324 - RNA, 15 nt, Human
ugcccaggcaggucu

SEQ ID NO: 1799325 - RNA, 14 nt, Human
ugcccacaggauca

SEQ ID NO: 1799326 - RNA, 22 nt, Human
ugcccaggccccugccacccug

SEQ ID NO: 1799327 - RNA, 20 nt, Human
ugcccaggccccugccaccc

SEQ ID NO: 1799328 - RNA, 14 nt, Human
ugcccaggccccug

SEQ ID NO: 1799329 - RNA, 12 nt, Human
ugcccaggcccc

SEQ ID NO: 1799330 - RNA, 15 nt, Human
ugcccaggccugccu

SEQ ID NO: 1799331 - RNA, 17 nt, Human
ugcccaggccugccugu

SEQ ID NO: 1799332 - RNA, 12 nt, Human
ugccccccagcc

SEQ ID NO: 1799333 - RNA, 19 nt, Human
ugccccucaacucuccucc

SEQ ID NO: 1799334 - RNA, 16 nt, Human
ugccccgucccccucu

SEQ ID NO: 1799335 - RNA, 18 nt, Human
ugccccgucccccucugg

SEQ ID NO: 1799336 - RNA, 20 nt, Human
ugcagacucuacagaggcca

SEQ ID NO: 1799337 - RNA, 19 nt, Human
ugcagacucuacagaggcc

SEQ ID NO: 1799338 - RNA, 15 nt, Human
ugcacuccccugcug

SEQ ID NO: 1799339 - RNA, 22 nt, Human
ugcagacucuacagaggccaug

SEQ ID NO: 1799340 - RNA, 19 nt, Human
agcccuuccaugucgccuc

SEQ ID NO: 1799341 - RNA, 22 nt, Human
agcccuuccaugucgccucugc

SEQ ID NO: 1799342 - RNA, 23 nt, Human
agcccuuccaugucgccucugca

SEQ ID NO: 1799343 - RNA, 13 nt, Human
agcccuucauuug

SEQ ID NO: 1799344 - RNA, 14 nt, Human
agcccuucauuugg

SEQ ID NO: 1799345 - RNA, 15 nt, Human
agccucaaccuccug

SEQ ID NO: 1799346 - RNA, 20 nt, Human
agccucaaaacaaaggccua

SEQ ID NO: 1799347 - RNA, 18 nt, Human
agccucaaaacaaaggcc

SEQ ID NO: 1799348 - RNA, 17 nt, Human
agccuaggugacagagu

SEQ ID NO: 1799349 - RNA, 15 nt, Human
agccuaggugacaga

SEQ ID NO: 1799350 - RNA, 23 nt, Human
agccguuuguuccccaagacauu

SEQ ID NO: 1799351 - RNA, 22 nt, Human
ugcacuauagccuaggugacag

SEQ ID NO: 1799352 - RNA, 12 nt, Human
ugcacuccccug

SEQ ID NO: 1799353 - RNA, 13 nt, Human
ugcacuccccugc

SEQ ID NO: 1799354 - RNA, 14 nt, Human
ugcaccacugcacu

SEQ ID NO: 1799355 - RNA, 17 nt, Human
ugcacguauuuuaauag

SEQ ID NO: 1799356 - RNA, 15 nt, Human
ugcaccacugcacuc

SEQ ID NO: 1799357 - RNA, 15 nt, Human
ugcacacaccagagc

SEQ ID NO: 1799358 - RNA, 14 nt, Human
ugcacaagcugcac

SEQ ID NO: 1799359 - RNA, 15 nt, Human
ugcacaagcuccaag

SEQ ID NO: 1799360 - RNA, 16 nt, Human
ugcacaagcuccaagc

SEQ ID NO: 1799361 - RNA, 18 nt, Human
ugcacaagcuccaagcuc

SEQ ID NO: 1799362 - RNA, 20 nt, Human
ugcacaagcuccaagcuccc

SEQ ID NO: 1799363 - RNA, 22 nt, Human
ugcacaagcuccaagcucccag

SEQ ID NO: 1799364 - RNA, 23 nt, Human
ugcacaagcuccaagcucccagg

SEQ ID NO: 1799365 - RNA, 22 nt, Human
ugcauaccacuuuuguucuugg

SEQ ID NO: 1799366 - RNA, 21 nt, Human
ugcauaccacuuuuguucuug

SEQ ID NO: 1799367 - RNA, 13 nt, Human
ugcaugcuguccc

SEQ ID NO: 1799368 - RNA, 14 nt, Human
ugcaugcugucccu

SEQ ID NO: 1799369 - RNA, 15 nt, Human
ugcaugcugucccuu

SEQ ID NO: 1799370 - RNA, 20 nt, Human
ugcaugaaguaauaugcaca

SEQ ID NO: 1799371 - RNA, 22 nt, Human
ugcaugaaguaauaugcacaca

SEQ ID NO: 1799372 - RNA, 21 nt, Human
ugcaugaggcuaguguggugu

SEQ ID NO: 1799373 - RNA, 23 nt, Human
agccugcaguuauuaacacuaac

SEQ ID NO: 1799374 - RNA, 12 nt, Human
agccugcccucc

SEQ ID NO: 1799375 - RNA, 16 nt, Human
agccugccucuucucu

SEQ ID NO: 1799376 - RNA, 19 nt, Human
agccugccucuucucuacu

SEQ ID NO: 1799377 - RNA, 18 nt, Human
agccugaucaccugcccu

SEQ ID NO: 1799378 - RNA, 16 nt, Human
ugcaugcugucccuua

SEQ ID NO: 1799379 - RNA, 19 nt, Human
agccugaucaccugcccug

SEQ ID NO: 1799380 - RNA, 19 nt, Human
agccugagcgacagugaga

SEQ ID NO: 1799381 - RNA, 19 nt, Human
ugcagccucaaccuccugg

SEQ ID NO: 1799382 - RNA, 18 nt, Human
ugcagccucaaccuccug

SEQ ID NO: 1799383 - RNA, 18 nt, Human
agccugagcgacagugag

SEQ ID NO: 1799384 - RNA, 15 nt, Human
agccucagcauccug

SEQ ID NO: 1799385 - RNA, 16 nt, Human
agccucagcauccugg

SEQ ID NO: 1799386 - RNA, 14 nt, Human
agccucagcauccu

SEQ ID NO: 1799387 - RNA, 13 nt, Human
agccucagcaucc

SEQ ID NO: 1799388 - RNA, 18 nt, Human
agccucaaccuccugggc

SEQ ID NO: 1799389 - RNA, 17 nt, Human
agccucaaccuccuggg

SEQ ID NO: 1799390 - RNA, 21 nt, Human
ugcaggucccuaauaaagcug

SEQ ID NO: 1799391 - RNA, 17 nt, Human
ugcaggucccuaauaaa

SEQ ID NO: 1799392 - RNA, 14 nt, Human
ugcagugagccgag

SEQ ID NO: 1799393 - RNA, 18 nt, Human
ugcaggucccuaauaaag

SEQ ID NO: 1799394 - RNA, 19 nt, Human
ugcaggucccuaauaaagc

SEQ ID NO: 1799395 - RNA, 20 nt, Human
ugcaggucccuaauaaagcu

SEQ ID NO: 1799396 - RNA, 15 nt, Human
ugcauaauggucaga

SEQ ID NO: 1799397 - RNA, 11 nt, Human
ugcauaaaaug

SEQ ID NO: 1799398 - RNA, 12 nt, Human
ugcaguuuuccu

SEQ ID NO: 1799399 - RNA, 19 nt, Human
ugcagugagccgagauugu

SEQ ID NO: 1799400 - RNA, 18 nt, Human
agaagcuaagguuuagau

SEQ ID NO: 1799401 - RNA, 15 nt, Human
agaagcggcuggcag

SEQ ID NO: 1799402 - RNA, 16 nt, Human
agaagcggcuggcagc

SEQ ID NO: 1799403 - RNA, 16 nt, Human
ucuggcagcucagaga

SEQ ID NO: 1799404 - RNA, 12 nt, Human
ucuggauuauau

SEQ ID NO: 1799405 - RNA, 18 nt, Human
ucuggauuauauuaugaa

SEQ ID NO: 1799406 - RNA, 14 nt, Human
ucuggcagcucaga

SEQ ID NO: 1799407 - RNA, 15 nt, Human
ucuggcagcucagag

SEQ ID NO: 1799408 - RNA, 14 nt, Human
ucugcccuccaaga

SEQ ID NO: 1799409 - RNA, 18 nt, Human
ucugcccuccaagaccuu

SEQ ID NO: 1799410 - RNA, 16 nt, Human
ucugcucacauaucug

SEQ ID NO: 1799411 - RNA, 17 nt, Human
ucugcucacauaucugu

SEQ ID NO: 1799412 - RNA, 15 nt, Human
agaacucccuuucaa

SEQ ID NO: 1799413 - RNA, 14 nt, Human
agaacucccuuuca

SEQ ID NO: 1799414 - RNA, 21 nt, Human
agaacucaugacggaagaguu

SEQ ID NO: 1799415 - RNA, 15 nt, Human
ucugcagaaacagaa

SEQ ID NO: 1799416 - RNA, 16 nt, Human
agaaauguacagcaag

SEQ ID NO: 1799417 - RNA, 17 nt, Human
agaaauguacagcaagg

SEQ ID NO: 1799418 - RNA, 11 nt, Human
agaaauguguu

SEQ ID NO: 1799419 - RNA, 12 nt, Human
ucugcagagcag

SEQ ID NO: 1799420 - RNA, 19 nt, Human
ucugacccugcuucaaaua

SEQ ID NO: 1799421 - RNA, 21 nt, Human
ucugauucccaagcucugcuc

SEQ ID NO: 1799422 - RNA, 20 nt, Human
ucugauucccaagcucugcu

SEQ ID NO: 1799423 - RNA, 19 nt, Human
ucugauucccaagcucugc

SEQ ID NO: 1799424 - RNA, 22 nt, Human
ucucuuuaaugucacaggcagg

SEQ ID NO: 1799425 - RNA, 13 nt, Human
ucucuugagccug

SEQ ID NO: 1799426 - RNA, 14 nt, Human
ucucuugagccugg

SEQ ID NO: 1799427 - RNA, 15 nt, Human
ucucuugagccuggg

SEQ ID NO: 1799428 - RNA, 17 nt, Human
ucucuugagccugggag

SEQ ID NO: 1799429 - RNA, 19 nt, Human
agaaaaauaugaccacacu

SEQ ID NO: 1799430 - RNA, 17 nt, Human
agaaaaaugagccuggc

SEQ ID NO: 1799431 - RNA, 15 nt, Human
agaaagaagaugaau

SEQ ID NO: 1799432 - RNA, 15 nt, Human
agaaacuggaacucu

SEQ ID NO: 1799433 - RNA, 13 nt, Human
agaaacuggaacu

SEQ ID NO: 1799434 - RNA, 22 nt, Human
ucucugcccuaaugcgcaggcu

SEQ ID NO: 1799435 - RNA, 11 nt, Human
ucucugcccua

SEQ ID NO: 1799436 - RNA, 17 nt, Human
ucucuggccuucggccu

SEQ ID NO: 1799437 - RNA, 16 nt, Human
ucucuggccuucggcc

SEQ ID NO: 1799438 - RNA, 13 nt, Human
ucucuggccuucg

SEQ ID NO: 1799439 - RNA, 18 nt, Human
ucucuucuggguuccuuc

SEQ ID NO: 1799440 - RNA, 19 nt, Human
ucucuucuggguuccuucc

SEQ ID NO: 1799441 - RNA, 20 nt, Human
ucucuucuggguuccuuccu

SEQ ID NO: 1799442 - RNA, 21 nt, Human
ucucuucuggguuccuuccuc

SEQ ID NO: 1799443 - RNA, 14 nt, Human
ucucuugagagggu

SEQ ID NO: 1799444 - RNA, 20 nt, Human
ucuccuucaccuuugucccc

SEQ ID NO: 1799445 - RNA, 13 nt, Human
ucucuccagcccc

SEQ ID NO: 1799446 - RNA, 14 nt, Human
ucucuccagccccu

SEQ ID NO: 1799447 - RNA, 22 nt, Human
ucucuccuguaccucuugagcc

SEQ ID NO: 1799448 - RNA, 20 nt, Human
ucucuccuguaccucuugag

SEQ ID NO: 1799449 - RNA, 15 nt, Human
ucucuccagccccug

SEQ ID NO: 1799450 - RNA, 19 nt, Human
acuuguugauuaauggaaa

SEQ ID NO: 1799451 - RNA, 21 nt, Human
acuuguugauuaauggaaaug

SEQ ID NO: 1799452 - RNA, 13 nt, Human
ucuccucugcugc

SEQ ID NO: 1799453 - RNA, 14 nt, Human
ucuccucugcugcu

SEQ ID NO: 1799454 - RNA, 12 nt, Human
ucuccucugcug

SEQ ID NO: 1799455 - RNA, 19 nt, Human
ucucccuuggauugucccc

SEQ ID NO: 1799456 - RNA, 21 nt, Human
ucucccuuggauuguccccga

SEQ ID NO: 1799457 - RNA, 18 nt, Human
ucucccaaagugcuggga

SEQ ID NO: 1799458 - RNA, 11 nt, Human
ucucccuugga

SEQ ID NO: 1799459 - RNA, 18 nt, Human
ucucccuuggauuguccc

SEQ ID NO: 1799460 - RNA, 14 nt, Human
acuuuuggcauuuu

SEQ ID NO: 1799461 - RNA, 15 nt, Human
acuuuuuuuuaaguu

SEQ ID NO: 1799462 - RNA, 22 nt, Human
acuuuuuuuuuuuaagaguaaa

SEQ ID NO: 1799463 - RNA, 23 nt, Human
acuuuggaaagacuuuuccaacc

SEQ ID NO: 1799464 - RNA, 17 nt, Human
acuuuggaaagacuuuu

SEQ ID NO: 1799465 - RNA, 19 nt, Human
acuuugaggguguauauuu

SEQ ID NO: 1799466 - RNA, 13 nt, Human
acuuuggaaagac

SEQ ID NO: 1799467 - RNA, 14 nt, Human
acuuuggaaagacu

SEQ ID NO: 1799468 - RNA, 23 nt, Human
acuuugaccucugcagcaauaaa

SEQ ID NO: 1799469 - RNA, 19 nt, Human
acuuugaccucugcagcaa

SEQ ID NO: 1799470 - RNA, 23 nt, Human
acuuuaccuuuuuuauacauaaa

SEQ ID NO: 1799471 - RNA, 22 nt, Human
acuuuaccuuuuuuauacauaa

SEQ ID NO: 1799472 - RNA, 19 nt, Human
acuuuaccuuuuuuauaca

SEQ ID NO: 1799473 - RNA, 18 nt, Human
acuuuaccuuuuuuauac

SEQ ID NO: 1799474 - RNA, 22 nt, Human
ucuuccaggcugggagagccuu

SEQ ID NO: 1799475 - RNA, 17 nt, Human
ucuucaaaaugagcccu

SEQ ID NO: 1799476 - RNA, 22 nt, Human
ucuuauugcccacgcuggagug

SEQ ID NO: 1799477 - RNA, 18 nt, Human
ucuuauugcccacgcugg

SEQ ID NO: 1799478 - RNA, 14 nt, Human
ucuuauugcccacg

SEQ ID NO: 1799479 - RNA, 18 nt, Human
ucuuaugggcuggguucu

SEQ ID NO: 1799480 - RNA, 15 nt, Human
ucuuaugggcugggu

SEQ ID NO: 1799481 - RNA, 16 nt, Human
ucuuaugggcuggguu

SEQ ID NO: 1799482 - RNA, 14 nt, Human
ucuuaugggcuggg

SEQ ID NO: 1799483 - RNA, 23 nt, Human
agacaggcaagcaccuccugccu

SEQ ID NO: 1799484 - RNA, 15 nt, Human
agacaggaccaggga

SEQ ID NO: 1799485 - RNA, 16 nt, Human
agacaggaccagggau

SEQ ID NO: 1799486 - RNA, 21 nt, Human
agacaggguuuugccauguug

SEQ ID NO: 1799487 - RNA, 19 nt, Human
agacaggguuucaccaugu

SEQ ID NO: 1799488 - RNA, 19 nt, Human
agacagucccugccaaugg

SEQ ID NO: 1799489 - RNA, 15 nt, Human
agacagucccugcca

SEQ ID NO: 1799490 - RNA, 16 nt, Human
agacagucccugccaa

SEQ ID NO: 1799491 - RNA, 17 nt, Human
agacagucccugccaau

SEQ ID NO: 1799492 - RNA, 14 nt, Human
agacagacuagaag

SEQ ID NO: 1799493 - RNA, 18 nt, Human
agacagaaucucgcucug

SEQ ID NO: 1799494 - RNA, 22 nt, Human
agacagaaucucgcucugucgc

SEQ ID NO: 1799495 - RNA, 20 nt, Human
ucuguuggccagugugacaa

SEQ ID NO: 1799496 - RNA, 19 nt, Human
ucuguuggccagugugaca

SEQ ID NO: 1799497 - RNA, 18 nt, Human
ucuguuggccagugugac

SEQ ID NO: 1799498 - RNA, 22 nt, Human
ucugugaaaggaaagagggagg

SEQ ID NO: 1799499 - RNA, 24 nt, Human
ucuguccaggcacugcugcccagc

SEQ ID NO: 1799500 - RNA, 15 nt, Human
ucugugaaaggaaag

SEQ ID NO: 1799501 - RNA, 21 nt, Human
ucugugaaaggaaagagggag

SEQ ID NO: 1799502 - RNA, 23 nt, Human
agaauuucccaaagcagugcaug

SEQ ID NO: 1799503 - RNA, 17 nt, Human
agaauuucccaaagcag

SEQ ID NO: 1799504 - RNA, 18 nt, Human
agaauuucccaaagcagu

SEQ ID NO: 1799505 - RNA, 15 nt, Human
ucugucauuugagca

SEQ ID NO: 1799506 - RNA, 23 nt, Human
ucugucauuugagcagggcucag

SEQ ID NO: 1799507 - RNA, 20 nt, Human
ucugucauuugagcagggcu

SEQ ID NO: 1799508 - RNA, 16 nt, Human
ucuggguucacugcaa

SEQ ID NO: 1799509 - RNA, 14 nt, Human
ucuggguucacugc

SEQ ID NO: 1799510 - RNA, 11 nt, Human
ucuggggcugu

SEQ ID NO: 1799511 - RNA, 16 nt, Human
ucuggguuccuuccuc

SEQ ID NO: 1799512 - RNA, 18 nt, Human
ucugguccauagagagca

SEQ ID NO: 1799513 - RNA, 15 nt, Human
ucuuuacuucaugga

SEQ ID NO: 1799514 - RNA, 17 nt, Human
agacucuacagaggcca

SEQ ID NO: 1799515 - RNA, 21 nt, Human
agacucgcgacaaugcaaacc

SEQ ID NO: 1799516 - RNA, 19 nt, Human
agacucuacagaggccaug

SEQ ID NO: 1799517 - RNA, 18 nt, Human
agacuccugcaggcagcc

SEQ ID NO: 1799518 - RNA, 19 nt, Human
agacuccugcaggcagcca

SEQ ID NO: 1799519 - RNA, 20 nt, Human
agacuccugcaggcagccag

SEQ ID NO: 1799520 - RNA, 23 nt, Human
agacuccugcaggcagccaggcc

SEQ ID NO: 1799521 - RNA, 13 nt, Human
ucuuuccugaggc

SEQ ID NO: 1799522 - RNA, 14 nt, Human
ucuuuccugaggcu

SEQ ID NO: 1799523 - RNA, 15 nt, Human
ucuuuccugaggcug

SEQ ID NO: 1799524 - RNA, 16 nt, Human
ucuuuccugaggcugg

SEQ ID NO: 1799525 - RNA, 14 nt, Human
agacuccugcaggc

SEQ ID NO: 1799526 - RNA, 15 nt, Human
agacuccugcaggca

SEQ ID NO: 1799527 - RNA, 16 nt, Human
agacuccugcaggcag

SEQ ID NO: 1799528 - RNA, 17 nt, Human
agacuccugcaggcagc

SEQ ID NO: 1799529 - RNA, 15 nt, Human
agacuuuggaaagac

SEQ ID NO: 1799530 - RNA, 18 nt, Human
agagaaugaaagggccca

SEQ ID NO: 1799531 - RNA, 14 nt, Human
agacuuuggaaaga

SEQ ID NO: 1799532 - RNA, 12 nt, Human
agacuuuggaaa

SEQ ID NO: 1799533 - RNA, 18 nt, Human
agagaccaucccugaagg

SEQ ID NO: 1799534 - RNA, 15 nt, Human
agagaccaucccuga

SEQ ID NO: 1799535 - RNA, 13 nt, Human
agagaccaucccu

SEQ ID NO: 1799536 - RNA, 14 nt, Human
agagaccaucccug

SEQ ID NO: 1799537 - RNA, 14 nt, Human
agacuucaucccuc

SEQ ID NO: 1799538 - RNA, 17 nt, Human
agacuucaucccucugg

SEQ ID NO: 1799539 - RNA, 18 nt, Human
agacucauucuucuguac

SEQ ID NO: 1799540 - RNA, 17 nt, Human
agacucauucuucugua

SEQ ID NO: 1799541 - RNA, 12 nt, Human
agaccugccccu

SEQ ID NO: 1799542 - RNA, 19 nt, Human
agacuaucuaaauguugaa

SEQ ID NO: 1799543 - RNA, 17 nt, Human
agacuaucuaaauguug

SEQ ID NO: 1799544 - RNA, 18 nt, Human
agacuaucuaaauguuga

SEQ ID NO: 1799545 - RNA, 20 nt, Human
ucuugaugccuggcggggug

SEQ ID NO: 1799546 - RNA, 14 nt, Human
ucuugaugccuggc

SEQ ID NO: 1799547 - RNA, 16 nt, Human
ucuugcaauggcagcc

SEQ ID NO: 1799548 - RNA, 13 nt, Human
ucuugcaauggca

SEQ ID NO: 1799549 - RNA, 17 nt, Human
ucuugcaauggcagccu

SEQ ID NO: 1799550 - RNA, 12 nt, Human
agacccugcccu

SEQ ID NO: 1799551 - RNA, 13 nt, Human
agacccugcccug

SEQ ID NO: 1799552 - RNA, 14 nt, Human
agacccugcccugu

SEQ ID NO: 1799553 - RNA, 19 nt, Human
agaccuaacgagaaauaga

SEQ ID NO: 1799554 - RNA, 19 nt, Human
agacccuuguggucccacc

SEQ ID NO: 1799555 - RNA, 20 nt, Human
agacccuuguggucccaccc

SEQ ID NO: 1799556 - RNA, 22 nt, Human
agacccuuguggucccacccca

SEQ ID NO: 1799557 - RNA, 23 nt, Human
agacccuuguggucccaccccac

SEQ ID NO: 1799558 - RNA, 13 nt, Human
agacccuuguggu

SEQ ID NO: 1799559 - RNA, 15 nt, Human
agacccuuguggucc

SEQ ID NO: 1799560 - RNA, 16 nt, Human
agacccugcccugugg

SEQ ID NO: 1799561 - RNA, 19 nt, Human
agacccugcccugugggcc

SEQ ID NO: 1799562 - RNA, 21 nt, Human
agacccugcccugugggcccc

SEQ ID NO: 1799563 - RNA, 23 nt, Human
agacccugcccugugggccccca

SEQ ID NO: 1799564 - RNA, 19 nt, Human
agagugagacucugucuca

SEQ ID NO: 1799565 - RNA, 19 nt, Human
agauaaggguaucugguga

SEQ ID NO: 1799566 - RNA, 18 nt, Human
agauaauucuagcuuuga

SEQ ID NO: 1799567 - RNA, 18 nt, Human
agauaauacaccacuaca

SEQ ID NO: 1799568 - RNA, 19 nt, Human
agauacaggaaaagcugcu

SEQ ID NO: 1799569 - RNA, 22 nt, Human
agauauuuugcuuugugauuuu

SEQ ID NO: 1799570 - RNA, 19 nt, Human
agaucaaccccuucgcucc

SEQ ID NO: 1799571 - RNA, 14 nt, Human
agaucaaccccuuc

SEQ ID NO: 1799572 - RNA, 21 nt, Human
agaucaaccccuucgcuccug

SEQ ID NO: 1799573 - RNA, 22 nt, Human
agagucucacuguugcccaggc

SEQ ID NO: 1799574 - RNA, 14 nt, Human
agagugaacaaauu

SEQ ID NO: 1799575 - RNA, 20 nt, Human
agagucucacuguugcccag

SEQ ID NO: 1799576 - RNA, 16 nt, Human
agagugagacucuguc

SEQ ID NO: 1799577 - RNA, 15 nt, Human
agagugagacucugu

SEQ ID NO: 1799578 - RNA, 22 nt, Human
agagugaacaaauuuacagaga

SEQ ID NO: 1799579 - RNA, 14 nt, Human
ugaaugucagugug

SEQ ID NO: 1799580 - RNA, 15 nt, Human
ugaaugucaguguga

SEQ ID NO: 1799581 - RNA, 18 nt, Human
ugaaugucagugugacug

SEQ ID NO: 1799582 - RNA, 18 nt, Human
ugaagguggaaauaaacu

SEQ ID NO: 1799583 - RNA, 15 nt, Human
ugaaugcauaaaaug

SEQ ID NO: 1799584 - RNA, 16 nt, Human
ugaaugcauaaaaugu

SEQ ID NO: 1799585 - RNA, 18 nt, Human
ugaagauguagaggagaa

SEQ ID NO: 1799586 - RNA, 17 nt, Human
ugaagauguagaggaga

SEQ ID NO: 1799587 - RNA, 22 nt, Human
agagggagggagggcuccagac

SEQ ID NO: 1799588 - RNA, 21 nt, Human
agagggagggagggcuccaga

SEQ ID NO: 1799589 - RNA, 21 nt, Human
agaggcgcaugaauuugugaa

SEQ ID NO: 1799590 - RNA, 19 nt, Human
agagcugggugucaagagg

SEQ ID NO: 1799591 - RNA, 21 nt, Human
ugaagacaaugacuuacugua

SEQ ID NO: 1799592 - RNA, 15 nt, Human
agagcuucuggcacu

SEQ ID NO: 1799593 - RNA, 19 nt, Human
agagcuucuguugcugccu

SEQ ID NO: 1799594 - RNA, 20 nt, Human
agagcuucuguugcugccuc

SEQ ID NO: 1799595 - RNA, 21 nt, Human
agagcuucuguugcugccuca

SEQ ID NO: 1799596 - RNA, 12 nt, Human
agaggaaagcaa

SEQ ID NO: 1799597 - RNA, 16 nt, Human
agaggaaagcaaagga

SEQ ID NO: 1799598 - RNA, 18 nt, Human
agaggaaagcaaaggaga

SEQ ID NO: 1799599 - RNA, 19 nt, Human
agaggaaagcaaaggagau

SEQ ID NO: 1799600 - RNA, 11 nt, Human
agaggaaauca

SEQ ID NO: 1799601 - RNA, 12 nt, Human
agaggaaaucac

SEQ ID NO: 1799602 - RNA, 21 nt, Human
agaggaaaucaccgaaaacgu

SEQ ID NO: 1799603 - RNA, 18 nt, Human
agaggcaacugcauuggc

SEQ ID NO: 1799604 - RNA, 13 nt, Human
ucuuuguaaugaa

SEQ ID NO: 1799605 - RNA, 15 nt, Human
ucuuuguaaugaaaa

SEQ ID NO: 1799606 - RNA, 11 nt, Human
ugaacuuugac

SEQ ID NO: 1799607 - RNA, 12 nt, Human
ucuuuguaauga

SEQ ID NO: 1799608 - RNA, 14 nt, Human
ucuuuggucuacac

SEQ ID NO: 1799609 - RNA, 21 nt, Human
ucuuuggucuacacugugcug

SEQ ID NO: 1799610 - RNA, 17 nt, Human
ugaacuuugaccucugc

SEQ ID NO: 1799611 - RNA, 16 nt, Human
ugaacuuugaccucug

SEQ ID NO: 1799612 - RNA, 17 nt, Human
ugaagacaaugacuuac

SEQ ID NO: 1799613 - RNA, 13 nt, Human
ugaagacaaugac

SEQ ID NO: 1799614 - RNA, 11 nt, Human
ugaagacaaug

SEQ ID NO: 1799615 - RNA, 18 nt, Human
agaugcuucucacugcca

SEQ ID NO: 1799616 - RNA, 16 nt, Human
agaugcuucucacugc

SEQ ID NO: 1799617 - RNA, 23 nt, Human
agaugcuagaacucccuuucaac

SEQ ID NO: 1799618 - RNA, 14 nt, Human
ugaccucugccuga

SEQ ID NO: 1799619 - RNA, 23 nt, Human
ugaccccucauagcccucacccu

SEQ ID NO: 1799620 - RNA, 12 nt, Human
ugaccugaggcc

SEQ ID NO: 1799621 - RNA, 13 nt, Human
ugaccucugccug

SEQ ID NO: 1799622 - RNA, 19 nt, Human
ugaccccucauagcccuca

SEQ ID NO: 1799623 - RNA, 20 nt, Human
ugaccccucauagcccucac

SEQ ID NO: 1799624 - RNA, 17 nt, Human
ugaccccucauagcccu

SEQ ID NO: 1799625 - RNA, 22 nt, Human
ugacccccaaccaaguggcucc

SEQ ID NO: 1799626 - RNA, 15 nt, Human
agauguguucacaau

SEQ ID NO: 1799627 - RNA, 18 nt, Human
agauguguucacaaugga

SEQ ID NO: 1799628 - RNA, 12 nt, Human
ugacccaugcug

SEQ ID NO: 1799629 - RNA, 18 nt, Human
ugacauuguagagcuucu

SEQ ID NO: 1799630 - RNA, 12 nt, Human
ugaccacacucc

SEQ ID NO: 1799631 - RNA, 17 nt, Human
ugaccacacuccagcug

SEQ ID NO: 1799632 - RNA, 19 nt, Human
ugaccacacuccagcuggg

SEQ ID NO: 1799633 - RNA, 20 nt, Human
ugaccacacuccagcuggga

SEQ ID NO: 1799634 - RNA, 21 nt, Human
agaucauugugaaauuauuca

SEQ ID NO: 1799635 - RNA, 16 nt, Human
agauucaaucccagga

SEQ ID NO: 1799636 - RNA, 20 nt, Human
agauuauaggcaccuaccac

SEQ ID NO: 1799637 - RNA, 17 nt, Human
ugacuccagaauuuccc

SEQ ID NO: 1799638 - RNA, 19 nt, Human
ugacuccagaauuucccaa

SEQ ID NO: 1799639 - RNA, 17 nt, Human
ugaccugaggcccuucu

SEQ ID NO: 1799640 - RNA, 14 nt, Human
ugaccugaggcccu

SEQ ID NO: 1799641 - RNA, 15 nt, Human
ugaccugaggcccuu

SEQ ID NO: 1799642 - RNA, 20 nt, Human
ugacuccagaauuucccaaa

SEQ ID NO: 1799643 - RNA, 23 nt, Human
ugacuccagaauuucccaaagca

SEQ ID NO: 1799644 - RNA, 21 nt, Human
ugacuuauuuauauaaauuuu

SEQ ID NO: 1799645 - RNA, 20 nt, Human
ugacuuauuuauauaaauuu

SEQ ID NO: 1799646 - RNA, 21 nt, Human
ugacugugguagccagcaucg

SEQ ID NO: 1799647 - RNA, 21 nt, Human
agauugugccccugcacucca

SEQ ID NO: 1799648 - RNA, 16 nt, Human
agauugugccccugca

SEQ ID NO: 1799649 - RNA, 14 nt, Human
agauuuaugcauau

SEQ ID NO: 1799650 - RNA, 13 nt, Human
agauuucacucuc

SEQ ID NO: 1799651 - RNA, 14 nt, Human
agauuucacucucc

SEQ ID NO: 1799652 - RNA, 21 nt, Human
agcaaaaccaaauauuccaga

SEQ ID NO: 1799653 - RNA, 23 nt, Human
ugagccacugcaccgggccacag

SEQ ID NO: 1799654 - RNA, 13 nt, Human
ugagccagauuuc

SEQ ID NO: 1799655 - RNA, 14 nt, Human
ugagccagauuuca

SEQ ID NO: 1799656 - RNA, 16 nt, Human
ugagccagauuucacu

SEQ ID NO: 1799657 - RNA, 18 nt, Human
ugagccacugcaccgggc

SEQ ID NO: 1799658 - RNA, 21 nt, Human
ugagccacugcaccgggccac

SEQ ID NO: 1799659 - RNA, 18 nt, Human
ugagccaccgugccuggc

SEQ ID NO: 1799660 - RNA, 19 nt, Human
ugagccaccgugccuggcc

SEQ ID NO: 1799661 - RNA, 20 nt, Human
ugagccaccgugccuggcca

SEQ ID NO: 1799662 - RNA, 21 nt, Human
ugagccaccgugccuggccac

SEQ ID NO: 1799663 - RNA, 15 nt, Human
ugagccaccacgccc

SEQ ID NO: 1799664 - RNA, 14 nt, Human
ugagccaccgugcc

SEQ ID NO: 1799665 - RNA, 22 nt, Human
ugagcaucaggccaggcccucu

SEQ ID NO: 1799666 - RNA, 24 nt, Human
ugagcaucaggccaggcccucugc

SEQ ID NO: 1799667 - RNA, 21 nt, Human
ugagcaucaggccaggcccuc

SEQ ID NO: 1799668 - RNA, 23 nt, Human
ugagcacuaaggugugcucugau

SEQ ID NO: 1799669 - RNA, 22 nt, Human
ugagcacuaaggugugcucuga

SEQ ID NO: 1799670 - RNA, 21 nt, Human
ugagcacuaaggugugcucug

SEQ ID NO: 1799671 - RNA, 20 nt, Human
ugagcacuaaggugugcucu

SEQ ID NO: 1799672 - RNA, 16 nt, Human
ugagcaaauguggcuc

SEQ ID NO: 1799673 - RNA, 18 nt, Human
ugagcaaauguggcuccu

SEQ ID NO: 1799674 - RNA, 19 nt, Human
ugagcaaauguggcuccug

SEQ ID NO: 1799675 - RNA, 15 nt, Human
ugagcaauccugcaa

SEQ ID NO: 1799676 - RNA, 16 nt, Human
agcacagcuucauuuc

SEQ ID NO: 1799677 - RNA, 13 nt, Human
agcacaugccucu

SEQ ID NO: 1799678 - RNA, 14 nt, Human
agcacaugccucuc

SEQ ID NO: 1799679 - RNA, 16 nt, Human
agcacaugccucucuc

SEQ ID NO: 1799680 - RNA, 13 nt, Human
agcaagugagagc

SEQ ID NO: 1799681 - RNA, 20 nt, Human
agcaagugagacccugucuc

SEQ ID NO: 1799682 - RNA, 17 nt, Human
ugagccagauuucacuc

SEQ ID NO: 1799683 - RNA, 22 nt, Human
ugagccagauuucacucuccuu

SEQ ID NO: 1799684 - RNA, 14 nt, Human
agcaagugagagcu

SEQ ID NO: 1799685 - RNA, 18 nt, Human
agcaagugagagcugggu

SEQ ID NO: 1799686 - RNA, 22 nt, Human
agcaagugagagcuggguguca

SEQ ID NO: 1799687 - RNA, 21 nt, Human
agcacagcagccccugcacaa

SEQ ID NO: 1799688 - RNA, 22 nt, Human
agcacuuugggaggccaaggug

SEQ ID NO: 1799689 - RNA, 23 nt, Human
agcacuuugggaggccaaggugg

SEQ ID NO: 1799690 - RNA, 13 nt, Human
agcagaaaugccu

SEQ ID NO: 1799691 - RNA, 12 nt, Human
agcagaaaugcc

SEQ ID NO: 1799692 - RNA, 19 nt, Human
agcagaaaugccuuacccu

SEQ ID NO: 1799693 - RNA, 14 nt, Human
agcagaacagugau

SEQ ID NO: 1799694 - RNA, 23 nt, Human
agcaccuuagacagucccugcca

SEQ ID NO: 1799695 - RNA, 13 nt, Human
agcacgauuucug

SEQ ID NO: 1799696 - RNA, 15 nt, Human
agcacgauuucuguu

SEQ ID NO: 1799697 - RNA, 14 nt, Human
agcacgauuucugu

SEQ ID NO: 1799698 - RNA, 16 nt, Human
agcacgauuucuguuu

SEQ ID NO: 1799699 - RNA, 10 nt, Human
agcaccaggg

SEQ ID NO: 1799700 - RNA, 12 nt, Human
agcaccagggaa

SEQ ID NO: 1799701 - RNA, 13 nt, Human
agcaccagggaag

SEQ ID NO: 1799702 - RNA, 19 nt, Human
agcaccuuagacagucccu

SEQ ID NO: 1799703 - RNA, 20 nt, Human
agcaccuuagacagucccug

SEQ ID NO: 1799704 - RNA, 21 nt, Human
agcaccuuagacagucccugc

SEQ ID NO: 1799705 - RNA, 22 nt, Human
agcaccuuagacagucccugcc

SEQ ID NO: 1799706 - RNA, 14 nt, Human
ugagccugggaggu

SEQ ID NO: 1799707 - RNA, 11 nt, Human
ugagccuggca

SEQ ID NO: 1799708 - RNA, 16 nt, Human
ugagccuggcaagaau

SEQ ID NO: 1799709 - RNA, 19 nt, Human
ugagccugggaggucaagg

SEQ ID NO: 1799710 - RNA, 22 nt, Human
ugagccugggaggucaaggcug

SEQ ID NO: 1799711 - RNA, 14 nt, Human
ugagccuugaacuu

SEQ ID NO: 1799712 - RNA, 19 nt, Human
ugagccuugaacuuugacc

SEQ ID NO: 1799713 - RNA, 18 nt, Human
ugagccuugaacuuugac

SEQ ID NO: 1799714 - RNA, 17 nt, Human
ugagccuugaacuuuga

SEQ ID NO: 1799715 - RNA, 15 nt, Human
ugagccuugaacuuu

SEQ ID NO: 1799716 - RNA, 20 nt, Human
ugagcgacagugagacucug

SEQ ID NO: 1799717 - RNA, 16 nt, Human
ugagcgacagugagac

SEQ ID NO: 1799718 - RNA, 14 nt, Human
ugagcgacagugag

SEQ ID NO: 1799719 - RNA, 13 nt, Human
ugagcgacaguga

SEQ ID NO: 1799720 - RNA, 23 nt, Human
agcagagaaugaaagggcccaga

SEQ ID NO: 1799721 - RNA, 22 nt, Human
agcagagaaugaaagggcccag

SEQ ID NO: 1799722 - RNA, 14 nt, Human
agcagagaauucuc

SEQ ID NO: 1799723 - RNA, 21 nt, Human
agcagagaauucucuuaucca

SEQ ID NO: 1799724 - RNA, 15 nt, Human
agcagagaccauccc

SEQ ID NO: 1799725 - RNA, 16 nt, Human
agcagagaccaucccu

SEQ ID NO: 1799726 - RNA, 10 nt, Human
ugagccuggc

SEQ ID NO: 1799727 - RNA, 21 nt, Human
agcagagaaugaaagggccca

SEQ ID NO: 1799728 - RNA, 15 nt, Human
ugaggaagcaaaagc

SEQ ID NO: 1799729 - RNA, 22 nt, Human
ugaggaagcaaaagcaucuaug

SEQ ID NO: 1799730 - RNA, 14 nt, Human
ugaggaagccgcug

SEQ ID NO: 1799731 - RNA, 17 nt, Human
ugaggaagccgcugggg

SEQ ID NO: 1799732 - RNA, 18 nt, Human
ugaggaagccgcuggggc

SEQ ID NO: 1799733 - RNA, 19 nt, Human
ugaggaagccgcuggggcc

SEQ ID NO: 1799734 - RNA, 21 nt, Human
ugaggaagccgcuggggccag

SEQ ID NO: 1799735 - RNA, 13 nt, Human
ugagcuacaaaug

SEQ ID NO: 1799736 - RNA, 14 nt, Human
ugagcuacaaaugc

SEQ ID NO: 1799737 - RNA, 16 nt, Human
ugagcuacaaaugcau

SEQ ID NO: 1799738 - RNA, 14 nt, Human
ugagcuaggaauug

SEQ ID NO: 1799739 - RNA, 22 nt, Human
ugaggaauccagacccggcugc

SEQ ID NO: 1799740 - RNA, 21 nt, Human
ugaggaauccagacccggcug

SEQ ID NO: 1799741 - RNA, 22 nt, Human
ugaggacaagagaaaaaagcca

SEQ ID NO: 1799742 - RNA, 13 nt, Human
ugaggacaagaga

SEQ ID NO: 1799743 - RNA, 21 nt, Human
ugaggacacuaaccacgcugg

SEQ ID NO: 1799744 - RNA, 12 nt, Human
ugaggccagaga

SEQ ID NO: 1799745 - RNA, 12 nt, Human
ugaggcccagag

SEQ ID NO: 1799746 - RNA, 13 nt, Human
ugaggcccagagg

SEQ ID NO: 1799747 - RNA, 20 nt, Human
ugaggccagagacacaagcc

SEQ ID NO: 1799748 - RNA, 14 nt, Human
ugaggccagagaca

SEQ ID NO: 1799749 - RNA, 16 nt, Human
ugaggccagagacaca

SEQ ID NO: 1799750 - RNA, 23 nt, Human
ugaggcccagagggccugcaagg

SEQ ID NO: 1799751 - RNA, 21 nt, Human
ugaggcccagagggccugcaa

SEQ ID NO: 1799752 - RNA, 22 nt, Human
ugaggcccagagggccugcaag

SEQ ID NO: 1799753 - RNA, 15 nt, Human
ugaggcccagagggc

SEQ ID NO: 1799754 - RNA, 17 nt, Human
ugaggcccagagggccu

SEQ ID NO: 1799755 - RNA, 18 nt, Human
ugaggcccagagggccug

SEQ ID NO: 1799756 - RNA, 20 nt, Human
ugaggcccagagggccugca

SEQ ID NO: 1799757 - RNA, 17 nt, Human
agcagaggaaggagagg

SEQ ID NO: 1799758 - RNA, 19 nt, Human
agcagauggagaccccuug

SEQ ID NO: 1799759 - RNA, 20 nt, Human
ugaggguugggcugguguca

SEQ ID NO: 1799760 - RNA, 17 nt, Human
ugagguacugagaguga

SEQ ID NO: 1799761 - RNA, 13 nt, Human
ugaggucagagcc

SEQ ID NO: 1799762 - RNA, 22 nt, Human
ugagguacugagagugaacaaa

SEQ ID NO: 1799763 - RNA, 16 nt, Human
ugaggucagagccugc

SEQ ID NO: 1799764 - RNA, 14 nt, Human
ugaggucagagccu

SEQ ID NO: 1799765 - RNA, 17 nt, Human
ugaggucagagccugca

SEQ ID NO: 1799766 - RNA, 17 nt, Human
agcagagaccaucccug

SEQ ID NO: 1799767 - RNA, 18 nt, Human
agcagagaccaucccuga

SEQ ID NO: 1799768 - RNA, 19 nt, Human
agcagagaccaucccugaa

SEQ ID NO: 1799769 - RNA, 19 nt, Human
ugagguacaaccuguucug

SEQ ID NO: 1799770 - RNA, 20 nt, Human
agcagagaccaucccugaag

SEQ ID NO: 1799771 - RNA, 20 nt, Human
agcagagcaccuuagacagu

SEQ ID NO: 1799772 - RNA, 13 nt, Human
ugaggggccucuu

SEQ ID NO: 1799773 - RNA, 14 nt, Human
ugaggguaaguauu

SEQ ID NO: 1799774 - RNA, 12 nt, Human
ugaggggccucu

SEQ ID NO: 1799775 - RNA, 15 nt, Human
ugagggauuaucuuu

SEQ ID NO: 1799776 - RNA, 19 nt, Human
ugagggauacccaucccau

SEQ ID NO: 1799777 - RNA, 16 nt, Human
ugaggcccuucucucc

SEQ ID NO: 1799778 - RNA, 18 nt, Human
ugaggcccuucucuccag

SEQ ID NO: 1799779 - RNA, 19 nt, Human
ugaggcccuucucuccagc

SEQ ID NO: 1799780 - RNA, 20 nt, Human
ugaggcccuucucuccagcc

SEQ ID NO: 1799781 - RNA, 22 nt, Human
ugaggcccuucucuccagcccc

SEQ ID NO: 1799782 - RNA, 23 nt, Human
ugaggcccuucucuccagccccu

SEQ ID NO: 1799783 - RNA, 24 nt, Human
ugaggcccuucucuccagccccug

SEQ ID NO: 1799784 - RNA, 14 nt, Human
accacaucuugcuc

SEQ ID NO: 1799785 - RNA, 22 nt, Human
accacagacauacuaaccagca

SEQ ID NO: 1799786 - RNA, 21 nt, Human
accacagacauacuaaccagc

SEQ ID NO: 1799787 - RNA, 24 nt, Human
accacaucuugcucugcugacaga

SEQ ID NO: 1799788 - RNA, 21 nt, Human
accacaucuugcucugcugac

SEQ ID NO: 1799789 - RNA, 20 nt, Human
accacaucuugcucugcuga

SEQ ID NO: 1799790 - RNA, 16 nt, Human
accacaucuugcucug

SEQ ID NO: 1799791 - RNA, 20 nt, Human
accacucuaucaaguauuau

SEQ ID NO: 1799792 - RNA, 15 nt, Human
accacuucagcugac

SEQ ID NO: 1799793 - RNA, 13 nt, Human
accacuucagcug

SEQ ID NO: 1799794 - RNA, 14 nt, Human
accacuucagcuga

SEQ ID NO: 1799795 - RNA, 19 nt, Human
accacugcagaagacagua

SEQ ID NO: 1799796 - RNA, 14 nt, Human
accacugcagaaga

SEQ ID NO: 1799797 - RNA, 13 nt, Human
accacugcagaag

SEQ ID NO: 1799798 - RNA, 17 nt, Human
accagacaccuugacag

SEQ ID NO: 1799799 - RNA, 12 nt, Human
accacuuuuguu

SEQ ID NO: 1799800 - RNA, 23 nt, Human
accagacaccuugacagggcaca

SEQ ID NO: 1799801 - RNA, 22 nt, Human
accagacaccuugacagggcac

SEQ ID NO: 1799802 - RNA, 11 nt, Human
accagacaggu

SEQ ID NO: 1799803 - RNA, 22 nt, Human
accagagcccaccuuggcucaa

SEQ ID NO: 1799804 - RNA, 19 nt, Human
accagagcccaccuuggcu

SEQ ID NO: 1799805 - RNA, 23 nt, Human
ucaccugaagacucauucuucug

SEQ ID NO: 1799806 - RNA, 19 nt, Human
ucaccugaagacucauucu

SEQ ID NO: 1799807 - RNA, 13 nt, Human
ucaccucccccau

SEQ ID NO: 1799808 - RNA, 15 nt, Human
ucaccucccccaucu

SEQ ID NO: 1799809 - RNA, 19 nt, Human
accaggcaacuugggaacu

SEQ ID NO: 1799810 - RNA, 21 nt, Human
accaguguuguggauuuaaca

SEQ ID NO: 1799811 - RNA, 12 nt, Human
accagugccuua

SEQ ID NO: 1799812 - RNA, 18 nt, Human
ucacuguugcccaggcug

SEQ ID NO: 1799813 - RNA, 17 nt, Human
ucacuguugcccaggcu

SEQ ID NO: 1799814 - RNA, 19 nt, Human
ucacuguugcccaggcugg

SEQ ID NO: 1799815 - RNA, 12 nt, Human
ucacugcagccu

SEQ ID NO: 1799816 - RNA, 13 nt, Human
ucacugcagccuc

SEQ ID NO: 1799817 - RNA, 20 nt, Human
ucacugcacagugcaucuca

SEQ ID NO: 1799818 - RNA, 22 nt, Human
ucacugcacagugcaucucagc

SEQ ID NO: 1799819 - RNA, 24 nt, Human
ucacugcacagugcaucucagccc

SEQ ID NO: 1799820 - RNA, 16 nt, Human
ucacuguugcccaggc

SEQ ID NO: 1799821 - RNA, 16 nt, Human
ucaccugccccucaac

SEQ ID NO: 1799822 - RNA, 13 nt, Human
ucacugagacagc

SEQ ID NO: 1799823 - RNA, 14 nt, Human
ucacugagacagcc

SEQ ID NO: 1799824 - RNA, 15 nt, Human
ucacugagacagccc

SEQ ID NO: 1799825 - RNA, 23 nt, Human
accauuuugggguacccacugcu

SEQ ID NO: 1799826 - RNA, 15 nt, Human
acccaaaaggcagaa

SEQ ID NO: 1799827 - RNA, 13 nt, Human
acccaaaaggcag

SEQ ID NO: 1799828 - RNA, 15 nt, Human
accauuccccauggg

SEQ ID NO: 1799829 - RNA, 12 nt, Human
accauuccccau

SEQ ID NO: 1799830 - RNA, 23 nt, Human
accaugauuaaccacuucagcug

SEQ ID NO: 1799831 - RNA, 22 nt, Human
accaugauuaaccacuucagcu

SEQ ID NO: 1799832 - RNA, 13 nt, Human
accauucuccacc

SEQ ID NO: 1799833 - RNA, 16 nt, Human
accauucuccaccugc

SEQ ID NO: 1799834 - RNA, 18 nt, Human
accauucuccaccugcca

SEQ ID NO: 1799835 - RNA, 19 nt, Human
acccacuugcuuuuaaaau

SEQ ID NO: 1799836 - RNA, 16 nt, Human
acccagaagaaaauag

SEQ ID NO: 1799837 - RNA, 18 nt, Human
acccaaaaggcagaagca

SEQ ID NO: 1799838 - RNA, 21 nt, Human
acccaaauguucaucaaugaa

SEQ ID NO: 1799839 - RNA, 18 nt, Human
acccagcccacuucugcc

SEQ ID NO: 1799840 - RNA, 17 nt, Human
acccagcccacuucugc

SEQ ID NO: 1799841 - RNA, 16 nt, Human
acccagcccacuucug

SEQ ID NO: 1799842 - RNA, 18 nt, Human
ucagcggggacagcuccu

SEQ ID NO: 1799843 - RNA, 17 nt, Human
ucagcggggacagcucc

SEQ ID NO: 1799844 - RNA, 16 nt, Human
ucagcggggacagcuc

SEQ ID NO: 1799845 - RNA, 15 nt, Human
ucagcggggacagcu

SEQ ID NO: 1799846 - RNA, 20 nt, Human
ucaggccaaacucaccugcc

SEQ ID NO: 1799847 - RNA, 23 nt, Human
ucaggccaaacucaccugccccu

SEQ ID NO: 1799848 - RNA, 16 nt, Human
ucaggaagcucagggc

SEQ ID NO: 1799849 - RNA, 17 nt, Human
ucaggaagcucagggcc

SEQ ID NO: 1799850 - RNA, 19 nt, Human
ucaggaagcucagggccug

SEQ ID NO: 1799851 - RNA, 20 nt, Human
ucaggaagcucagggccugg

SEQ ID NO: 1799852 - RNA, 19 nt, Human
accccuucgcuccuguguc

SEQ ID NO: 1799853 - RNA, 16 nt, Human
ucagguaacaggcaga

SEQ ID NO: 1799854 - RNA, 15 nt, Human
ucagguaacaggcag

SEQ ID NO: 1799855 - RNA, 13 nt, Human
ucagguaacaggc

SEQ ID NO: 1799856 - RNA, 13 nt, Human
ucagggucccugg

SEQ ID NO: 1799857 - RNA, 14 nt, Human
ucagggucccuggu

SEQ ID NO: 1799858 - RNA, 18 nt, Human
ucagggucccugguggca

SEQ ID NO: 1799859 - RNA, 15 nt, Human
ucaggccagcugcuu

SEQ ID NO: 1799860 - RNA, 20 nt, Human
ucaggccagcugcuugggcu

SEQ ID NO: 1799861 - RNA, 11 nt, Human
ucaggccaggc

SEQ ID NO: 1799862 - RNA, 12 nt, Human
ucaggccaggcc

SEQ ID NO: 1799863 - RNA, 14 nt, Human
acccucuuagaaaa

SEQ ID NO: 1799864 - RNA, 14 nt, Human
acccugcccugugg

SEQ ID NO: 1799865 - RNA, 13 nt, Human
acccugcccugug

SEQ ID NO: 1799866 - RNA, 11 nt, Human
acccugcccug

SEQ ID NO: 1799867 - RNA, 12 nt, Human
acccugcccugu

SEQ ID NO: 1799868 - RNA, 16 nt, Human
acccuuguggucccac

SEQ ID NO: 1799869 - RNA, 17 nt, Human
acccuuguggucccacc

SEQ ID NO: 1799870 - RNA, 19 nt, Human
acccuuguggucccacccc

SEQ ID NO: 1799871 - RNA, 20 nt, Human
accccuucgcuccugugucu

SEQ ID NO: 1799872 - RNA, 13 nt, Human
ucagaagacacug

SEQ ID NO: 1799873 - RNA, 13 nt, Human
ucagaucuucugu

SEQ ID NO: 1799874 - RNA, 13 nt, Human
acccagcucuggu

SEQ ID NO: 1799875 - RNA, 15 nt, Human
acccagcucuggucc

SEQ ID NO: 1799876 - RNA, 18 nt, Human
ucagcccucccugccccu

SEQ ID NO: 1799877 - RNA, 19 nt, Human
ucagcccucccugccccuc

SEQ ID NO: 1799878 - RNA, 15 nt, Human
acccccagccugcua

SEQ ID NO: 1799879 - RNA, 16 nt, Human
acccccaaauuuucuu

SEQ ID NO: 1799880 - RNA, 14 nt, Human
acccccagccugcu

SEQ ID NO: 1799881 - RNA, 15 nt, Human
accccuggcuuuuca

SEQ ID NO: 1799882 - RNA, 17 nt, Human
accccuggcuuuucacu

SEQ ID NO: 1799883 - RNA, 19 nt, Human
ucagccuggcuucaaauug

SEQ ID NO: 1799884 - RNA, 10 nt, Human
ucagccuggg

SEQ ID NO: 1799885 - RNA, 12 nt, Human
ucagccugggca

SEQ ID NO: 1799886 - RNA, 12 nt, Human
accccuggcuuu

SEQ ID NO: 1799887 - RNA, 13 nt, Human
accuagccuuaga

SEQ ID NO: 1799888 - RNA, 20 nt, Human
accuccgccucuuggguuca

SEQ ID NO: 1799889 - RNA, 10 nt, Human
acccuuuucu

SEQ ID NO: 1799890 - RNA, 20 nt, Human
ucauauuuacuucuuauaca

SEQ ID NO: 1799891 - RNA, 21 nt, Human
ucauauuuacuucuuauacau

SEQ ID NO: 1799892 - RNA, 22 nt, Human
ucauauuuacuucuuauacauu

SEQ ID NO: 1799893 - RNA, 18 nt, Human
accgagucucuucuccac

SEQ ID NO: 1799894 - RNA, 17 nt, Human
accgccaaggcuggggg

SEQ ID NO: 1799895 - RNA, 20 nt, Human
accgagucucuucuccacug

SEQ ID NO: 1799896 - RNA, 21 nt, Human
accgagucucuucuccacugg

SEQ ID NO: 1799897 - RNA, 24 nt, Human
accgagucucuucuccacuggaug

SEQ ID NO: 1799898 - RNA, 20 nt, Human
accgcagacaggaccaggga

SEQ ID NO: 1799899 - RNA, 13 nt, Human
accucucccuugg

SEQ ID NO: 1799900 - RNA, 14 nt, Human
accucucccuugga

SEQ ID NO: 1799901 - RNA, 15 nt, Human
accucucccuuggau

SEQ ID NO: 1799902 - RNA, 12 nt, Human
accucugcacaa

SEQ ID NO: 1799903 - RNA, 23 nt, Human
accucucccuuggauuguccccg

SEQ ID NO: 1799904 - RNA, 14 nt, Human
accucucucacucc

SEQ ID NO: 1799905 - RNA, 19 nt, Human
accucucucacuccuugaa

SEQ ID NO: 1799906 - RNA, 17 nt, Human
accucggugccuuccuc

SEQ ID NO: 1799907 - RNA, 23 nt, Human
ucauucgcuacuaugauuuaauu

SEQ ID NO: 1799908 - RNA, 21 nt, Human
ucauucuccuuguguuacuaa

SEQ ID NO: 1799909 - RNA, 22 nt, Human
ucauugaccugaggcccuucuc

SEQ ID NO: 1799910 - RNA, 13 nt, Human
ucaugucuggcua

SEQ ID NO: 1799911 - RNA, 14 nt, Human
ucaugugaaaucau

SEQ ID NO: 1799912 - RNA, 17 nt, Human
ucauguucuuaauucuu

SEQ ID NO: 1799913 - RNA, 11 nt, Human
ucauguucuua

SEQ ID NO: 1799914 - RNA, 23 nt, Human
ucauccacugugccaugugccag

SEQ ID NO: 1799915 - RNA, 21 nt, Human
ucauccacugugccaugugcc

SEQ ID NO: 1799916 - RNA, 19 nt, Human
ucauccacugugccaugug

SEQ ID NO: 1799917 - RNA, 19 nt, Human
ucaugacaaagacugagua

SEQ ID NO: 1799918 - RNA, 12 nt, Human
accuucuccuuc

SEQ ID NO: 1799919 - RNA, 14 nt, Human
accuugacagggca

SEQ ID NO: 1799920 - RNA, 15 nt, Human
accuugaaugaugcc

SEQ ID NO: 1799921 - RNA, 15 nt, Human
accuugacagggcac

SEQ ID NO: 1799922 - RNA, 16 nt, Human
accuugacagggcaca

SEQ ID NO: 1799923 - RNA, 13 nt, Human
accuucuguggcu

SEQ ID NO: 1799924 - RNA, 15 nt, Human
accuucuguggcuca

SEQ ID NO: 1799925 - RNA, 16 nt, Human
accuucuguggcucac

SEQ ID NO: 1799926 - RNA, 12 nt, Human
accuucuguggc

SEQ ID NO: 1799927 - RNA, 13 nt, Human
accuucuccuuca

SEQ ID NO: 1799928 - RNA, 22 nt, Human
accuggucacaggacucugccu

SEQ ID NO: 1799929 - RNA, 23 nt, Human
accuggucacaggacucugccuc

SEQ ID NO: 1799930 - RNA, 15 nt, Human
uccaccaucaagcca

SEQ ID NO: 1799931 - RNA, 14 nt, Human
accuuagccugccc

SEQ ID NO: 1799932 - RNA, 17 nt, Human
accuuagacagucccug

SEQ ID NO: 1799933 - RNA, 14 nt, Human
uccagacccggcug

SEQ ID NO: 1799934 - RNA, 15 nt, Human
uccagccccuggaug

SEQ ID NO: 1799935 - RNA, 15 nt, Human
uccagaccccuggcu

SEQ ID NO: 1799936 - RNA, 16 nt, Human
uccagaccccuggcuu

SEQ ID NO: 1799937 - RNA, 17 nt, Human
uccagaccccuggcuuu

SEQ ID NO: 1799938 - RNA, 18 nt, Human
uccagaccccuggcuuuu

SEQ ID NO: 1799939 - RNA, 16 nt, Human
uccagccccuggaugc

SEQ ID NO: 1799940 - RNA, 17 nt, Human
uccagccccuggaugca

SEQ ID NO: 1799941 - RNA, 19 nt, Human
uccagccccuggaugcagc

SEQ ID NO: 1799942 - RNA, 21 nt, Human
uccagccccuggaugcagccu

SEQ ID NO: 1799943 - RNA, 23 nt, Human
uccagaccccuggcuuuucacug

SEQ ID NO: 1799944 - RNA, 22 nt, Human
uccagccccuggaugcagccuc

SEQ ID NO: 1799945 - RNA, 20 nt, Human
uccagccugagcgacaguga

SEQ ID NO: 1799946 - RNA, 21 nt, Human
uccagccugagcgacagugag

SEQ ID NO: 1799947 - RNA, 19 nt, Human
accuuuguauucucuccug

SEQ ID NO: 1799948 - RNA, 15 nt, Human
accuuuguauucucu

SEQ ID NO: 1799949 - RNA, 23 nt, Human
accuuuguauucucuccuguacc

SEQ ID NO: 1799950 - RNA, 22 nt, Human
uccagaaguuugagaucagccu

SEQ ID NO: 1799951 - RNA, 19 nt, Human
ucauuugagcagggcucag

SEQ ID NO: 1799952 - RNA, 17 nt, Human
accuggaauauauaacc

SEQ ID NO: 1799953 - RNA, 14 nt, Human
accuggaauauaua

SEQ ID NO: 1799954 - RNA, 19 nt, Human
accugcucuccucuugcca

SEQ ID NO: 1799955 - RNA, 18 nt, Human
accugcucuccucuugcc

SEQ ID NO: 1799956 - RNA, 17 nt, Human
accugcucuccucuugc

SEQ ID NO: 1799957 - RNA, 23 nt, Human
accugcggugcuaucucccccag

SEQ ID NO: 1799958 - RNA, 19 nt, Human
accugcggugcuaucuccc

SEQ ID NO: 1799959 - RNA, 22 nt, Human
accugcggugcuaucuccccca

SEQ ID NO: 1799960 - RNA, 15 nt, Human
accugaagucuuugu

SEQ ID NO: 1799961 - RNA, 22 nt, Human
accugaagucuuuguacagaca

SEQ ID NO: 1799962 - RNA, 18 nt, Human
accugcggugcuaucucc

SEQ ID NO: 1799963 - RNA, 21 nt, Human
ucauuugagcagggcucagcg

SEQ ID NO: 1799964 - RNA, 18 nt, Human
ucauuugugccagaaugc

SEQ ID NO: 1799965 - RNA, 14 nt, Human
ucauuugcuuugga

SEQ ID NO: 1799966 - RNA, 23 nt, Human
uccaaagucucuggaauuugaaa

SEQ ID NO: 1799967 - RNA, 13 nt, Human
ucauuuuuuuuaa

SEQ ID NO: 1799968 - RNA, 20 nt, Human
uccacaguggaaccagccca

SEQ ID NO: 1799969 - RNA, 16 nt, Human
uccacaguggaaccag

SEQ ID NO: 1799970 - RNA, 11 nt, Human
uccaagcuggu

SEQ ID NO: 1799971 - RNA, 14 nt, Human
uccacagugacucc

SEQ ID NO: 1799972 - RNA, 14 nt, Human
uccaaaugcagcuu

SEQ ID NO: 1799973 - RNA, 15 nt, Human
uccaaaugcagcuuu

SEQ ID NO: 1799974 - RNA, 18 nt, Human
uccaagcuccaucuccac

SEQ ID NO: 1799975 - RNA, 16 nt, Human
uccaagcucccaggca

SEQ ID NO: 1799976 - RNA, 14 nt, Human
uccaagcucccagg

SEQ ID NO: 1799977 - RNA, 15 nt, Human
uccaagcucccaggc

SEQ ID NO: 1799978 - RNA, 12 nt, Human
uccaagcuccca

SEQ ID NO: 1799979 - RNA, 13 nt, Human
uccaagcucccag

SEQ ID NO: 1799980 - RNA, 18 nt, Human
uccugugacuucagcucu

SEQ ID NO: 1799981 - RNA, 13 nt, Human
uccugcugcaguu

SEQ ID NO: 1799982 - RNA, 21 nt, Human
uccuggggguucuuucuuccu

SEQ ID NO: 1799983 - RNA, 22 nt, Human
uccuggggguucuuucuuccuc

SEQ ID NO: 1799984 - RNA, 23 nt, Human
uccuggggguucuuucuuccucu

SEQ ID NO: 1799985 - RNA, 18 nt, Human
uccuggggaaccugaccc

SEQ ID NO: 1799986 - RNA, 19 nt, Human
uccuggggaaccugacccc

SEQ ID NO: 1799987 - RNA, 22 nt, Human
acugcagccucaaccuccuggg

SEQ ID NO: 1799988 - RNA, 21 nt, Human
acugcagccucaaccuccugg

SEQ ID NO: 1799989 - RNA, 19 nt, Human
acugcagccucaaccuccu

SEQ ID NO: 1799990 - RNA, 13 nt, Human
acugcacuguuuu

SEQ ID NO: 1799991 - RNA, 23 nt, Human
acugcagccucaaccuccugggc

SEQ ID NO: 1799992 - RNA, 16 nt, Human
acugcagggacugcca

SEQ ID NO: 1799993 - RNA, 17 nt, Human
acugcagggacugccag

SEQ ID NO: 1799994 - RNA, 18 nt, Human
acugcagggacugccagu

SEQ ID NO: 1799995 - RNA, 24 nt, Human
uccugugucuugcaauggcagccu

SEQ ID NO: 1799996 - RNA, 23 nt, Human
uccugugucuugcaauggcagcc

SEQ ID NO: 1799997 - RNA, 14 nt, Human
uccugugugugcgc

SEQ ID NO: 1799998 - RNA, 13 nt, Human
uccugugugugcg

SEQ ID NO: 1799999 - RNA, 18 nt, Human
uccugugugugcgccuac

SEQ ID NO: 1800000 - RNA, 17 nt, Human
uccuguugucaagaaua

SEQ ID NO: 1800001 - RNA, 19 nt, Human
uccuguucuuaagacguga

SEQ ID NO: 1800002 - RNA, 19 nt, Human
uccuguucccaugagauga

SEQ ID NO: 1800003 - RNA, 20 nt, Human
uccugccucgaacuggcugc

SEQ ID NO: 1800004 - RNA, 21 nt, Human
uccugccucgaacuggcugca

SEQ ID NO: 1800005 - RNA, 19 nt, Human
uccugccucagccucccaa

SEQ ID NO: 1800006 - RNA, 22 nt, Human
uccugcaggcagccaggccaca

SEQ ID NO: 1800007 - RNA, 16 nt, Human
uccugcaggcagccag

SEQ ID NO: 1800008 - RNA, 17 nt, Human
uccugcaggcagccagg

SEQ ID NO: 1800009 - RNA, 19 nt, Human
uccugcaggcagccaggcc

SEQ ID NO: 1800010 - RNA, 20 nt, Human
uccugcaggcagccaggcca

SEQ ID NO: 1800011 - RNA, 19 nt, Human
uccugaguagcuggauuac

SEQ ID NO: 1800012 - RNA, 20 nt, Human
uccugaguagcugggauuac

SEQ ID NO: 1800013 - RNA, 16 nt, Human
acugcacagugcaucu

SEQ ID NO: 1800014 - RNA, 18 nt, Human
acugcacagugcaucuca

SEQ ID NO: 1800015 - RNA, 22 nt, Human
acugaggggaggggagcauggg

SEQ ID NO: 1800016 - RNA, 17 nt, Human
acugaggggaggggagc

SEQ ID NO: 1800017 - RNA, 15 nt, Human
acugaggaccagcca

SEQ ID NO: 1800018 - RNA, 14 nt, Human
acugaggaucagag

SEQ ID NO: 1800019 - RNA, 15 nt, Human
uccucuccccagcaa

SEQ ID NO: 1800020 - RNA, 18 nt, Human
acugaguacguugugcau

SEQ ID NO: 1800021 - RNA, 21 nt, Human
acugaguacguugugcauuug

SEQ ID NO: 1800022 - RNA, 19 nt, Human
acugaguacguugugcauu

SEQ ID NO: 1800023 - RNA, 16 nt, Human
acugagugccuuuugg

SEQ ID NO: 1800024 - RNA, 23 nt, Human
acugaguacguugugcauuuggu

SEQ ID NO: 1800025 - RNA, 22 nt, Human
acugaguacguugugcauuugg

SEQ ID NO: 1800026 - RNA, 14 nt, Human
acugcaaccuccgc

SEQ ID NO: 1800027 - RNA, 13 nt, Human
acugcaaccuccg

SEQ ID NO: 1800028 - RNA, 22 nt, Human
acugcaaccuccgccucuuggg

SEQ ID NO: 1800029 - RNA, 16 nt, Human
acugcaaccuccgccu

SEQ ID NO: 1800030 - RNA, 20 nt, Human
acugcaaccuucgccaccug

SEQ ID NO: 1800031 - RNA, 23 nt, Human
acugcaaccuucgccaccugggu

SEQ ID NO: 1800032 - RNA, 20 nt, Human
acuguacagacagaaaaaac

SEQ ID NO: 1800033 - RNA, 14 nt, Human
acuguacaaaguag

SEQ ID NO: 1800034 - RNA, 15 nt, Human
acuguacaaaguaga

SEQ ID NO: 1800035 - RNA, 19 nt, Human
acuguaauuugugauacaa

SEQ ID NO: 1800036 - RNA, 13 nt, Human
acuguacaaagua

SEQ ID NO: 1800037 - RNA, 13 nt, Human
acuguacuccucc

SEQ ID NO: 1800038 - RNA, 14 nt, Human
acuguacuccuccc

SEQ ID NO: 1800039 - RNA, 23 nt, Human
acuguagaaaagggaacugaaca

SEQ ID NO: 1800040 - RNA, 15 nt, Human
acuguacuccuccca

SEQ ID NO: 1800041 - RNA, 14 nt, Human
acuguacaugaaaa

SEQ ID NO: 1800042 - RNA, 13 nt, Human
acuguacaugaaa

SEQ ID NO: 1800043 - RNA, 23 nt, Human
acuguacaugaaaacacauuuuu

SEQ ID NO: 1800044 - RNA, 13 nt, Human
ucgcuccuguguc

SEQ ID NO: 1800045 - RNA, 17 nt, Human
acugggagaaaugaaaa

SEQ ID NO: 1800046 - RNA, 12 nt, Human
ucgcuccugugu

SEQ ID NO: 1800047 - RNA, 19 nt, Human
acuggguacuuguggacac

SEQ ID NO: 1800048 - RNA, 23 nt, Human
acuggguacuuguggacacagcu

SEQ ID NO: 1800049 - RNA, 20 nt, Human
acuggguacuuguggacaca

SEQ ID NO: 1800050 - RNA, 16 nt, Human
acuguaaggcaaucau

SEQ ID NO: 1800051 - RNA, 15 nt, Human
ucgaacuggcugcaa

SEQ ID NO: 1800052 - RNA, 13 nt, Human
ucgaacuggcugc

SEQ ID NO: 1800053 - RNA, 14 nt, Human
ucgaacuggcugca

SEQ ID NO: 1800054 - RNA, 15 nt, Human
uccuuucaccacaug

SEQ ID NO: 1800055 - RNA, 20 nt, Human
uccuuucacaaccuucugug

SEQ ID NO: 1800056 - RNA, 16 nt, Human
uccuuucacaaccuuc

SEQ ID NO: 1800057 - RNA, 18 nt, Human
uccuuucacaaccuucug

SEQ ID NO: 1800058 - RNA, 19 nt, Human
uccuuucacaaccuucugu

SEQ ID NO: 1800059 - RNA, 14 nt, Human
ucgcgacaaugcaa

SEQ ID NO: 1800060 - RNA, 13 nt, Human
ucgcgacaaugca

SEQ ID NO: 1800061 - RNA, 17 nt, Human
ucgaggacagggaggug

SEQ ID NO: 1800062 - RNA, 14 nt, Human
ucgaggacagggag

SEQ ID NO: 1800063 - RNA, 13 nt, Human
ucgaccugccucg

SEQ ID NO: 1800064 - RNA, 14 nt, Human
ucgagcaugccugg

SEQ ID NO: 1800065 - RNA, 15 nt, Human
ucgagcaugccugga

SEQ ID NO: 1800066 - RNA, 13 nt, Human
acugcuggcugcc

SEQ ID NO: 1800067 - RNA, 22 nt, Human
acuggauuaaacuuaaucuaaa

SEQ ID NO: 1800068 - RNA, 21 nt, Human
acugcuugugaaaggaaagag

SEQ ID NO: 1800069 - RNA, 12 nt, Human
acugcuggcugc

SEQ ID NO: 1800070 - RNA, 16 nt, Human
acugcugcccagccuc

SEQ ID NO: 1800071 - RNA, 18 nt, Human
acugcugcccagccucca

SEQ ID NO: 1800072 - RNA, 21 nt, Human
acugcugcccagccuccaagc

SEQ ID NO: 1800073 - RNA, 18 nt, Human
acugcuuccagugaggcu

SEQ ID NO: 1800074 - RNA, 21 nt, Human
acugcuuccagugaggcucug

SEQ ID NO: 1800075 - RNA, 22 nt, Human
acugcuuccagugaggcucugc

SEQ ID NO: 1800076 - RNA, 23 nt, Human
acugcuuccagugaggcucugcc

SEQ ID NO: 1800077 - RNA, 12 nt, Human
acugcucugaug

SEQ ID NO: 1800078 - RNA, 22 nt, Human
uccuucagugccuuauggaaca

SEQ ID NO: 1800079 - RNA, 13 nt, Human
uccuucagugccu

SEQ ID NO: 1800080 - RNA, 20 nt, Human
uccuucagugccuuauggaa

SEQ ID NO: 1800081 - RNA, 12 nt, Human
uccuucagugcc

SEQ ID NO: 1800082 - RNA, 11 nt, Human
uccuucagugc

SEQ ID NO: 1800083 - RNA, 13 nt, Human
uccuucagccuga

SEQ ID NO: 1800084 - RNA, 17 nt, Human
uccuuccucugagccuu

SEQ ID NO: 1800085 - RNA, 16 nt, Human
uccuuccucugaggcu

SEQ ID NO: 1800086 - RNA, 16 nt, Human
uccuuccucugagccu

SEQ ID NO: 1800087 - RNA, 23 nt, Human
acuggccucugcugauccuccca

SEQ ID NO: 1800088 - RNA, 22 nt, Human
acuggcugcaaaggguaucagg

SEQ ID NO: 1800089 - RNA, 14 nt, Human
acuaaaauaauuuu

SEQ ID NO: 1800090 - RNA, 19 nt, Human
acuaaaauaauuuuguaau

SEQ ID NO: 1800091 - RNA, 17 nt, Human
acuaaaauaauuuugua

SEQ ID NO: 1800092 - RNA, 16 nt, Human
acuaaaauaauuuugu

SEQ ID NO: 1800093 - RNA, 15 nt, Human
acuaaaauaauuuug

SEQ ID NO: 1800094 - RNA, 20 nt, Human
acuaaaauaauuuuguaaug

SEQ ID NO: 1800095 - RNA, 23 nt, Human
acuacaggugugagucaccaagc

SEQ ID NO: 1800096 - RNA, 17 nt, Human
acuaaccagcagaaaug

SEQ ID NO: 1800097 - RNA, 15 nt, Human
acuacaguccuccca

SEQ ID NO: 1800098 - RNA, 13 nt, Human
acuaaccacgcug

SEQ ID NO: 1800099 - RNA, 16 nt, Human
acuaaccagcagaaau

SEQ ID NO: 1800100 - RNA, 14 nt, Human
uccagcucaccagc

SEQ ID NO: 1800101 - RNA, 15 nt, Human
uccagcucaccagcc

SEQ ID NO: 1800102 - RNA, 12 nt, Human
acguuucuaaag

SEQ ID NO: 1800103 - RNA, 13 nt, Human
uccagccugggug

SEQ ID NO: 1800104 - RNA, 24 nt, Human
uccagccugggugacagagcaagu

SEQ ID NO: 1800105 - RNA, 13 nt, Human
acuaaaaauacaa

SEQ ID NO: 1800106 - RNA, 14 nt, Human
acguuucuaaaggc

SEQ ID NO: 1800107 - RNA, 19 nt, Human
ucccagugccgagaaggaa

SEQ ID NO: 1800108 - RNA, 22 nt, Human
ucccagugccgagaaggaagcc

SEQ ID NO: 1800109 - RNA, 17 nt, Human
acuacaguccucccauc

SEQ ID NO: 1800110 - RNA, 16 nt, Human
acuacaguccucccau

SEQ ID NO: 1800111 - RNA, 16 nt, Human
ucccauaugccugggc

SEQ ID NO: 1800112 - RNA, 15 nt, Human
ucccauaugccuggg

SEQ ID NO: 1800113 - RNA, 13 nt, Human
ucccaucucacac

SEQ ID NO: 1800114 - RNA, 14 nt, Human
ucccaucucacaca

SEQ ID NO: 1800115 - RNA, 19 nt, Human
ucccaucucacacaugagc

SEQ ID NO: 1800116 - RNA, 15 nt, Human
uccccaagccuggca

SEQ ID NO: 1800117 - RNA, 18 nt, Human
acuauagccuaggugaca

SEQ ID NO: 1800118 - RNA, 17 nt, Human
acuauagccuaggugac

SEQ ID NO: 1800119 - RNA, 23 nt, Human
acuauaauuuaccugaagucuuu

SEQ ID NO: 1800120 - RNA, 23 nt, Human
uccccaggaggccagccuugacc

SEQ ID NO: 1800121 - RNA, 24 nt, Human
uccccaccgcagacaggaccaggg

SEQ ID NO: 1800122 - RNA, 18 nt, Human
acuauguugcccaggcag

SEQ ID NO: 1800123 - RNA, 22 nt, Human
acuaugaaguuuuuuuuauaca

SEQ ID NO: 1800124 - RNA, 22 nt, Human
acuaucaugucaaacgugaaaa

SEQ ID NO: 1800125 - RNA, 16 nt, Human
acuaucccggcugccc

SEQ ID NO: 1800126 - RNA, 17 nt, Human
acuaucccggcugcccu

SEQ ID NO: 1800127 - RNA, 18 nt, Human
acuaucccggcugcccuu

SEQ ID NO: 1800128 - RNA, 23 nt, Human
acuauguugcccaggcaggucuu

SEQ ID NO: 1800129 - RNA, 20 nt, Human
acuauguugcccaggcaggu

SEQ ID NO: 1800130 - RNA, 19 nt, Human
acuauguugcccaggcagg

SEQ ID NO: 1800131 - RNA, 18 nt, Human
ucccuauuagagaagaga

SEQ ID NO: 1800132 - RNA, 18 nt, Human
ucccgaauagcugggacu

SEQ ID NO: 1800133 - RNA, 20 nt, Human
ucccgaguagcugggacuac

SEQ ID NO: 1800134 - RNA, 13 nt, Human
ucccgcucagccc

SEQ ID NO: 1800135 - RNA, 14 nt, Human
ucccgcucagcccu

SEQ ID NO: 1800136 - RNA, 15 nt, Human
ucccgcucagcccuc

SEQ ID NO: 1800137 - RNA, 16 nt, Human
ucccgcucagcccucc

SEQ ID NO: 1800138 - RNA, 20 nt, Human
ucccgcucagcccucccugc

SEQ ID NO: 1800139 - RNA, 16 nt, Human
ucccgaauagcuggga

SEQ ID NO: 1800140 - RNA, 15 nt, Human
ucccgaauagcuggg

SEQ ID NO: 1800141 - RNA, 20 nt, Human
acucaagacuuccagagccu

SEQ ID NO: 1800142 - RNA, 17 nt, Human
acucaagacuuccagag

SEQ ID NO: 1800143 - RNA, 22 nt, Human
ucccucauccucauacccaccc

SEQ ID NO: 1800144 - RNA, 21 nt, Human
ucccucagucuggcccuuccu

SEQ ID NO: 1800145 - RNA, 23 nt, Human
ucccucauuccaccuucccaugc

SEQ ID NO: 1800146 - RNA, 16 nt, Human
acucaucuagguaaau

SEQ ID NO: 1800147 - RNA, 18 nt, Human
acucaucuagguaaauua

SEQ ID NO: 1800148 - RNA, 14 nt, Human
acuccuaccuggua

SEQ ID NO: 1800149 - RNA, 20 nt, Human
acuccagcuggguuggaaaa

SEQ ID NO: 1800150 - RNA, 20 nt, Human
uccuagcacuuugggaggcc

SEQ ID NO: 1800151 - RNA, 14 nt, Human
uccuaggcauuugc

SEQ ID NO: 1800152 - RNA, 22 nt, Human
ucccuuugacgccaucccagcc

SEQ ID NO: 1800153 - RNA, 23 nt, Human
ucccuuugacgccaucccagccc

SEQ ID NO: 1800154 - RNA, 23 nt, Human
acuccugcacacgcuccuuccuc

SEQ ID NO: 1800155 - RNA, 22 nt, Human
ucccuuuccaaaugcccagcuu

SEQ ID NO: 1800156 - RNA, 11 nt, Human
ucccuucaacc

SEQ ID NO: 1800157 - RNA, 21 nt, Human
ucccuucaaccauuccccaug

SEQ ID NO: 1800158 - RNA, 18 nt, Human
ucccuuacgugaguccug

SEQ ID NO: 1800159 - RNA, 22 nt, Human
ucccuuacgugaguccuggcau

SEQ ID NO: 1800160 - RNA, 17 nt, Human
acucuccucugcugcug

SEQ ID NO: 1800161 - RNA, 20 nt, Human
acucgcgacaaugcaaacca

SEQ ID NO: 1800162 - RNA, 23 nt, Human
acucgcgacaaugcaaaccauca

SEQ ID NO: 1800163 - RNA, 19 nt, Human
uccuaggcauuugcugaau

SEQ ID NO: 1800164 - RNA, 18 nt, Human
acucgcgacaaugcaaac

SEQ ID NO: 1800165 - RNA, 21 nt, Human
acucuccucugcugcuggcug

SEQ ID NO: 1800166 - RNA, 18 nt, Human
acucuccucugcugcugg

SEQ ID NO: 1800167 - RNA, 19 nt, Human
acucuccucugcugcuggc

SEQ ID NO: 1800168 - RNA, 19 nt, Human
uccucccucccucuuuccc

SEQ ID NO: 1800169 - RNA, 17 nt, Human
uccucccucccucuuuc

SEQ ID NO: 1800170 - RNA, 15 nt, Human
uccucccucccucuu

SEQ ID NO: 1800171 - RNA, 12 nt, Human
uccucuccccag

SEQ ID NO: 1800172 - RNA, 15 nt, Human
uccucuccacugccu

SEQ ID NO: 1800173 - RNA, 16 nt, Human
uccucuccacugccuu

SEQ ID NO: 1800174 - RNA, 12 nt, Human
uccucuccacug

SEQ ID NO: 1800175 - RNA, 13 nt, Human
uccucuccacugc

SEQ ID NO: 1800176 - RNA, 14 nt, Human
uccucuccacugcc

SEQ ID NO: 1800177 - RNA, 22 nt, Human
uccuccccuccuccuggacucc

SEQ ID NO: 1800178 - RNA, 18 nt, Human
uccuccccuccuccugga

SEQ ID NO: 1800179 - RNA, 20 nt, Human
uccuccccuccuccuggacu

SEQ ID NO: 1800180 - RNA, 16 nt, Human
uccuccccuccuccug

SEQ ID NO: 1800181 - RNA, 22 nt, Human
uccucauacccacccccaccca

SEQ ID NO: 1800182 - RNA, 14 nt, Human
uccucauacccacc

SEQ ID NO: 1800183 - RNA, 18 nt, Human
uccucauacccaccccca

SEQ ID NO: 1800184 - RNA, 19 nt, Human
acucuuauugcccacgcug

SEQ ID NO: 1800185 - RNA, 16 nt, Human
acucuuauugcccacg

SEQ ID NO: 1800186 - RNA, 20 nt, Human
uccucagaucuucugugggu

SEQ ID NO: 1800187 - RNA, 19 nt, Human
uaugcucugcauguuacau

SEQ ID NO: 1800188 - RNA, 22 nt, Human
uauggccugugagcuaggaauu

SEQ ID NO: 1800189 - RNA, 14 nt, Human
uauggccuguggau

SEQ ID NO: 1800190 - RNA, 18 nt, Human
uaugcucugcauguuaca

SEQ ID NO: 1800191 - RNA, 20 nt, Human
acagcuaaucagcauucuca

SEQ ID NO: 1800192 - RNA, 17 nt, Human
acagcuaacauggaagu

SEQ ID NO: 1800193 - RNA, 14 nt, Human
acagcuaacaugga

SEQ ID NO: 1800194 - RNA, 15 nt, Human
acagcuaacauggaa

SEQ ID NO: 1800195 - RNA, 14 nt, Human
acagccuggcacag

SEQ ID NO: 1800196 - RNA, 15 nt, Human
acagccuggcacagg

SEQ ID NO: 1800197 - RNA, 16 nt, Human
uauggcuuuugugcau

SEQ ID NO: 1800198 - RNA, 14 nt, Human
uaugaucacggcuc

SEQ ID NO: 1800199 - RNA, 23 nt, Human
uaugaucacggcucacugcagcc

SEQ ID NO: 1800200 - RNA, 21 nt, Human
uaugaucacggcucacugcag

SEQ ID NO: 1800201 - RNA, 13 nt, Human
uaugaggcauuug

SEQ ID NO: 1800202 - RNA, 15 nt, Human
uaucuugaauaaugu

SEQ ID NO: 1800203 - RNA, 15 nt, Human
uaucuugaagacuuu

SEQ ID NO: 1800204 - RNA, 18 nt, Human
acagaguuuucacucuua

SEQ ID NO: 1800205 - RNA, 15 nt, Human
acagaguuguuacau

SEQ ID NO: 1800206 - RNA, 20 nt, Human
acagaguuuucacucuuauu

SEQ ID NO: 1800207 - RNA, 18 nt, Human
acagcagccccugcacaa

SEQ ID NO: 1800208 - RNA, 18 nt, Human
uaucucccccagccccau

SEQ ID NO: 1800209 - RNA, 17 nt, Human
uaucucccccagcccca

SEQ ID NO: 1800210 - RNA, 19 nt, Human
uaucuagauacuguaucau

SEQ ID NO: 1800211 - RNA, 16 nt, Human
uaucuagauacuguau

SEQ ID NO: 1800212 - RNA, 15 nt, Human
uaucuagauacugua

SEQ ID NO: 1800213 - RNA, 10 nt, Human
uaucagaauu

SEQ ID NO: 1800214 - RNA, 21 nt, Human
acagagugagacucugucuca

SEQ ID NO: 1800215 - RNA, 18 nt, Human
acagagcuacacagggga

SEQ ID NO: 1800216 - RNA, 16 nt, Human
acagagcuacacaggg

SEQ ID NO: 1800217 - RNA, 20 nt, Human
acagagcccacgcccccacu

SEQ ID NO: 1800218 - RNA, 20 nt, Human
acagacuggauguaccacca

SEQ ID NO: 1800219 - RNA, 13 nt, Human
acagacuucugaa

SEQ ID NO: 1800220 - RNA, 14 nt, Human
acagacuucugaaa

SEQ ID NO: 1800221 - RNA, 15 nt, Human
uauauuuacaaaugg

SEQ ID NO: 1800222 - RNA, 21 nt, Human
uaucaaguauuauaccuuuuu

SEQ ID NO: 1800223 - RNA, 14 nt, Human
uauauuuacaaaug

SEQ ID NO: 1800224 - RNA, 18 nt, Human
uaucacccagaagaaaau

SEQ ID NO: 1800225 - RNA, 23 nt, Human
acagacacaggcccggcuccagg

SEQ ID NO: 1800226 - RNA, 13 nt, Human
acacuccuucaca

SEQ ID NO: 1800227 - RNA, 11 nt, Human
acacuccuuca

SEQ ID NO: 1800228 - RNA, 13 nt, Human
acagacagcccuc

SEQ ID NO: 1800229 - RNA, 15 nt, Human
acagacagcccucca

SEQ ID NO: 1800230 - RNA, 17 nt, Human
acagacccugcccugug

SEQ ID NO: 1800231 - RNA, 16 nt, Human
acagacccugcccugu

SEQ ID NO: 1800232 - RNA, 18 nt, Human
acagacccugcccugugg

SEQ ID NO: 1800233 - RNA, 20 nt, Human
acagacccugcccugugggc

SEQ ID NO: 1800234 - RNA, 14 nt, Human
acagacuggaagca

SEQ ID NO: 1800235 - RNA, 16 nt, Human
uauauugauccagaaa

SEQ ID NO: 1800236 - RNA, 21 nt, Human
uagucaggugccucaagagaa

SEQ ID NO: 1800237 - RNA, 19 nt, Human
acaagcugcacccucaggc

SEQ ID NO: 1800238 - RNA, 21 nt, Human
acaagcugcacccucaggcag

SEQ ID NO: 1800239 - RNA, 22 nt, Human
acaagcugcacccucaggcagg

SEQ ID NO: 1800240 - RNA, 23 nt, Human
acaagcugcacccucaggcaggu

SEQ ID NO: 1800241 - RNA, 20 nt, Human
uaguuccucauuagcauuuu

SEQ ID NO: 1800242 - RNA, 12 nt, Human
uauaaaagccug

SEQ ID NO: 1800243 - RNA, 14 nt, Human
uauaaaagccuguu

SEQ ID NO: 1800244 - RNA, 17 nt, Human
uauaaaagccuguuuaa

SEQ ID NO: 1800245 - RNA, 18 nt, Human
acacaugcaaggucauuu

SEQ ID NO: 1800246 - RNA, 20 nt, Human
acacaugcaaggucauuuuu

SEQ ID NO: 1800247 - RNA, 19 nt, Human
acacaugcaaggucauuuu

SEQ ID NO: 1800248 - RNA, 21 nt, Human
acacccagcccacuucugcca

SEQ ID NO: 1800249 - RNA, 20 nt, Human
acacccagcccacuucugcc

SEQ ID NO: 1800250 - RNA, 19 nt, Human
acacccagcccacuucugc

SEQ ID NO: 1800251 - RNA, 21 nt, Human
acacaugcaaggucauuuuuu

SEQ ID NO: 1800252 - RNA, 11 nt, Human
acacccuguga

SEQ ID NO: 1800253 - RNA, 12 nt, Human
acacccugugau

SEQ ID NO: 1800254 - RNA, 18 nt, Human
acacccugugauggggcc

SEQ ID NO: 1800255 - RNA, 19 nt, Human
acacccugugauggggccc

SEQ ID NO: 1800256 - RNA, 16 nt, Human
acaccgggccuggaga

SEQ ID NO: 1800257 - RNA, 20 nt, Human
uauagccuaggugacagagu

SEQ ID NO: 1800258 - RNA, 19 nt, Human
uauaggaauugacccacaa

SEQ ID NO: 1800259 - RNA, 14 nt, Human
uauaggaauugacc

SEQ ID NO: 1800260 - RNA, 13 nt, Human
uauaggaauugac

SEQ ID NO: 1800261 - RNA, 21 nt, Human
acacucauugaccugaggccc

SEQ ID NO: 1800262 - RNA, 23 nt, Human
acacucauugaccugaggcccuu

SEQ ID NO: 1800263 - RNA, 13 nt, Human
uauauaucaaaua

SEQ ID NO: 1800264 - RNA, 14 nt, Human
uauacauuugauaa

SEQ ID NO: 1800265 - RNA, 14 nt, Human
uauacauaaacaag

SEQ ID NO: 1800266 - RNA, 13 nt, Human
uauacauaaacaa

SEQ ID NO: 1800267 - RNA, 21 nt, Human
uauacacuuacacuuuaugca

SEQ ID NO: 1800268 - RNA, 20 nt, Human
uauaaccaguguuguggauu

SEQ ID NO: 1800269 - RNA, 23 nt, Human
acaguucggugagcuacaaaugc

SEQ ID NO: 1800270 - RNA, 16 nt, Human
acaguucucuccuucu

SEQ ID NO: 1800271 - RNA, 19 nt, Human
acaguucggugagcuacaa

SEQ ID NO: 1800272 - RNA, 22 nt, Human
acaguucggugagcuacaaaug

SEQ ID NO: 1800273 - RNA, 20 nt, Human
acaguucaauucucauuugu

SEQ ID NO: 1800274 - RNA, 20 nt, Human
acaguuacucagaauucucu

SEQ ID NO: 1800275 - RNA, 13 nt, Human
acaguuacucaga

SEQ ID NO: 1800276 - RNA, 16 nt, Human
uauucuguuggccagu

SEQ ID NO: 1800277 - RNA, 15 nt, Human
uauucuuauuuaaug

SEQ ID NO: 1800278 - RNA, 24 nt, Human
uauucucuccuguaccucuugagc

SEQ ID NO: 1800279 - RNA, 20 nt, Human
uauucucuccuguaccucuu

SEQ ID NO: 1800280 - RNA, 17 nt, Human
acaguucucuccuucuu

SEQ ID NO: 1800281 - RNA, 17 nt, Human
uauugguguaagguacu

SEQ ID NO: 1800282 - RNA, 20 nt, Human
uauuuagcaccagggaaggg

SEQ ID NO: 1800283 - RNA, 18 nt, Human
uauuuacuucuuauacau

SEQ ID NO: 1800284 - RNA, 23 nt, Human
uauuuaauuuuuuugagacagag

SEQ ID NO: 1800285 - RNA, 14 nt, Human
uauuuaauucaugu

SEQ ID NO: 1800286 - RNA, 19 nt, Human
uauuuaguguucauaaaua

SEQ ID NO: 1800287 - RNA, 13 nt, Human
uauuuauuuaaau

SEQ ID NO: 1800288 - RNA, 14 nt, Human
uauuuauuuaguau

SEQ ID NO: 1800289 - RNA, 14 nt, Human
uauuuauuuaaauu

SEQ ID NO: 1800290 - RNA, 13 nt, Human
uauugucaaagug

SEQ ID NO: 1800291 - RNA, 17 nt, Human
uauugucaaagugguga

SEQ ID NO: 1800292 - RNA, 17 nt, Human
uauuguacaguuuuuau

SEQ ID NO: 1800293 - RNA, 15 nt, Human
uauuguacaguuuuu

SEQ ID NO: 1800294 - RNA, 14 nt, Human
uauuguacaguuuu

SEQ ID NO: 1800295 - RNA, 13 nt, Human
uauuguacaguuu

SEQ ID NO: 1800296 - RNA, 12 nt, Human
uauuguacaguu

SEQ ID NO: 1800297 - RNA, 11 nt, Human
uauuguacagu

SEQ ID NO: 1800298 - RNA, 15 nt, Human
uauuuaaugaaagac

SEQ ID NO: 1800299 - RNA, 21 nt, Human
uauuuaaugaaagacuguaca

SEQ ID NO: 1800300 - RNA, 20 nt, Human
acagugaaagaaaauaacaa

SEQ ID NO: 1800301 - RNA, 22 nt, Human
acagucuuguauuaaguuguua

SEQ ID NO: 1800302 - RNA, 18 nt, Human
acagucuuguauuaaguu

SEQ ID NO: 1800303 - RNA, 15 nt, Human
acagucuuguauuaa

SEQ ID NO: 1800304 - RNA, 14 nt, Human
acagucuuguauua

SEQ ID NO: 1800305 - RNA, 21 nt, Human
acaguccuuaccagcagagca

SEQ ID NO: 1800306 - RNA, 22 nt, Human
acaguccuuaccagcagagcac

SEQ ID NO: 1800307 - RNA, 15 nt, Human
acaguuaagagaaau

SEQ ID NO: 1800308 - RNA, 18 nt, Human
acagugagacucugucuc

SEQ ID NO: 1800309 - RNA, 14 nt, Human
acagugagacucug

SEQ ID NO: 1800310 - RNA, 22 nt, Human
acagggcacaccgggcacucag

SEQ ID NO: 1800311 - RNA, 22 nt, Human
acagguuuuccugaagaauuga

SEQ ID NO: 1800312 - RNA, 17 nt, Human
acaggcugggcuucagu

SEQ ID NO: 1800313 - RNA, 14 nt, Human
acaggcugggcuuc

SEQ ID NO: 1800314 - RNA, 21 nt, Human
acaggcugggcuucaguggca

SEQ ID NO: 1800315 - RNA, 21 nt, Human
acaguauggcagcuuuccuca

SEQ ID NO: 1800316 - RNA, 19 nt, Human
acaguauuacuucugcuac

SEQ ID NO: 1800317 - RNA, 17 nt, Human
acaguauuacuucugcu

SEQ ID NO: 1800318 - RNA, 16 nt, Human
acaguauuacuucugc

SEQ ID NO: 1800319 - RNA, 15 nt, Human
acaguauuacuucug

SEQ ID NO: 1800320 - RNA, 13 nt, Human
acagucccugcca

SEQ ID NO: 1800321 - RNA, 17 nt, Human
acaguccucccaucuca

SEQ ID NO: 1800322 - RNA, 18 nt, Human
acaguccuuaccagcaga

SEQ ID NO: 1800323 - RNA, 20 nt, Human
acaguccuuaccagcagagc

SEQ ID NO: 1800324 - RNA, 15 nt, Human
acagucccugccaau

SEQ ID NO: 1800325 - RNA, 13 nt, Human
acaguccucccau

SEQ ID NO: 1800326 - RNA, 14 nt, Human
acaguccucccauc

SEQ ID NO: 1800327 - RNA, 15 nt, Human
acaguccucccaucu

SEQ ID NO: 1800328 - RNA, 15 nt, Human
uauucagcucaugga

SEQ ID NO: 1800329 - RNA, 18 nt, Human
uauucaggaagcucaggg

SEQ ID NO: 1800330 - RNA, 22 nt, Human
uauucaggaagcucagggccug

SEQ ID NO: 1800331 - RNA, 23 nt, Human
uauucauagcagcuuauucacaa

SEQ ID NO: 1800332 - RNA, 12 nt, Human
uauuagagaaga

SEQ ID NO: 1800333 - RNA, 16 nt, Human
uauuaccacagacaua

SEQ ID NO: 1800334 - RNA, 23 nt, Human
uauuaaaaaucucaaauuucuaa

SEQ ID NO: 1800335 - RNA, 19 nt, Human
uauguuuuaagaggcaggg

SEQ ID NO: 1800336 - RNA, 17 nt, Human
uauguuuuaagaggcag

SEQ ID NO: 1800337 - RNA, 22 nt, Human
uauuaaaaaucucaaauuucua

SEQ ID NO: 1800338 - RNA, 20 nt, Human
uauuaaaaaucucaaauuuc

SEQ ID NO: 1800339 - RNA, 18 nt, Human
uauuaaaaaucucaaauu

SEQ ID NO: 1800340 - RNA, 16 nt, Human
uauuaaaaaucucaaa

SEQ ID NO: 1800341 - RNA, 22 nt, Human
aauuguuuggggaugagaaagg

SEQ ID NO: 1800342 - RNA, 12 nt, Human
aauugcuccuug

SEQ ID NO: 1800343 - RNA, 13 nt, Human
aauuuaaaagucu

SEQ ID NO: 1800344 - RNA, 19 nt, Human
aauuuacauacucugcuua

SEQ ID NO: 1800345 - RNA, 16 nt, Human
aauuucucuacugucu

SEQ ID NO: 1800346 - RNA, 20 nt, Human
aauuugaaacacuuugcaua

SEQ ID NO: 1800347 - RNA, 21 nt, Human
aauuucuaaaucuccaaaaua

SEQ ID NO: 1800348 - RNA, 13 nt, Human
aauuucuaaaucu

SEQ ID NO: 1800349 - RNA, 17 nt, Human
aauuuagaaauauaauu

SEQ ID NO: 1800350 - RNA, 15 nt, Human
aauuuaccugaaguc

SEQ ID NO: 1800351 - RNA, 21 nt, Human
aauucuugccaaauauaaaua

SEQ ID NO: 1800352 - RNA, 20 nt, Human
aauucuugcaaaguaucccu

SEQ ID NO: 1800353 - RNA, 14 nt, Human
aauucuugcaaagu

SEQ ID NO: 1800354 - RNA, 22 nt, Human
aauucuucuccacuuucuagcc

SEQ ID NO: 1800355 - RNA, 15 nt, Human
uacguacacauuuua

SEQ ID NO: 1800356 - RNA, 19 nt, Human
aauugacccacaagaaaug

SEQ ID NO: 1800357 - RNA, 16 nt, Human
aauugacccacaagaa

SEQ ID NO: 1800358 - RNA, 13 nt, Human
aauugacccacaa

SEQ ID NO: 1800359 - RNA, 14 nt, Human
uacgucugacaggc

SEQ ID NO: 1800360 - RNA, 14 nt, Human
uacguuaccaggca

SEQ ID NO: 1800361 - RNA, 14 nt, Human
uacguugugcauuu

SEQ ID NO: 1800362 - RNA, 13 nt, Human
uacguugugcauu

SEQ ID NO: 1800363 - RNA, 16 nt, Human
uacuauaauuuaccug

SEQ ID NO: 1800364 - RNA, 16 nt, Human
uacuauguaucaauga

SEQ ID NO: 1800365 - RNA, 18 nt, Human
uacucuuauagacaacau

SEQ ID NO: 1800366 - RNA, 22 nt, Human
uacucuucaguuaagccuuugg

SEQ ID NO: 1800367 - RNA, 18 nt, Human
acaagcacuaaacaaaga

SEQ ID NO: 1800368 - RNA, 17 nt, Human
acaagagcccaggccuc

SEQ ID NO: 1800369 - RNA, 18 nt, Human
acaagagcccaggccucc

SEQ ID NO: 1800370 - RNA, 21 nt, Human
acaagcgugagccacugcacc

SEQ ID NO: 1800371 - RNA, 20 nt, Human
acaagcgugagccacugcac

SEQ ID NO: 1800372 - RNA, 13 nt, Human
acaagcugcaccc

SEQ ID NO: 1800373 - RNA, 12 nt, Human
acaagccacccc

SEQ ID NO: 1800374 - RNA, 15 nt, Human
acaagccagcuggag

SEQ ID NO: 1800375 - RNA, 13 nt, Human
acaagccagcugg

SEQ ID NO: 1800376 - RNA, 12 nt, Human
acaacacucaca

SEQ ID NO: 1800377 - RNA, 15 nt, Human
acaacaaccugguca

SEQ ID NO: 1800378 - RNA, 18 nt, Human
acaaauucugucucugga

SEQ ID NO: 1800379 - RNA, 15 nt, Human
acaacaacaaaauga

SEQ ID NO: 1800380 - RNA, 19 nt, Human
uagcauuguaaaagcauuu

SEQ ID NO: 1800381 - RNA, 18 nt, Human
uagcauuguaaaagcauu

SEQ ID NO: 1800382 - RNA, 21 nt, Human
uagcaugucgucaaagcugaa

SEQ ID NO: 1800383 - RNA, 18 nt, Human
uagcaugucgucaaagcu

SEQ ID NO: 1800384 - RNA, 16 nt, Human
uagcaccagggaaggg

SEQ ID NO: 1800385 - RNA, 13 nt, Human
uagcaccagggaa

SEQ ID NO: 1800386 - RNA, 14 nt, Human
uagcaccagggaag

SEQ ID NO: 1800387 - RNA, 22 nt, Human
uagauuuuagacccuauugcug

SEQ ID NO: 1800388 - RNA, 16 nt, Human
uagcacagacccugcc

SEQ ID NO: 1800389 - RNA, 17 nt, Human
uagcacagacccugccc

SEQ ID NO: 1800390 - RNA, 18 nt, Human
uagcacagacccugcccu

SEQ ID NO: 1800391 - RNA, 19 nt, Human
uagcacagacccugcccug

SEQ ID NO: 1800392 - RNA, 15 nt, Human
uagagcuucuggcac

SEQ ID NO: 1800393 - RNA, 16 nt, Human
acaaaaagcauaaaaa

SEQ ID NO: 1800394 - RNA, 17 nt, Human
aauuuuuuugagacaga

SEQ ID NO: 1800395 - RNA, 13 nt, Human
acaaaaacauggc

SEQ ID NO: 1800396 - RNA, 14 nt, Human
aauuuuuguauuuu

SEQ ID NO: 1800397 - RNA, 21 nt, Human
aauuuuuuaagugaaaauaua

SEQ ID NO: 1800398 - RNA, 12 nt, Human
uagacagucccu

SEQ ID NO: 1800399 - RNA, 14 nt, Human
uagacagucccugc

SEQ ID NO: 1800400 - RNA, 17 nt, Human
aauuuuuauuaaauuau

SEQ ID NO: 1800401 - RNA, 18 nt, Human
aauuuuuauuaaauuaug

SEQ ID NO: 1800402 - RNA, 15 nt, Human
uagaagucacacagu

SEQ ID NO: 1800403 - RNA, 18 nt, Human
uagaagauggcacuuaua

SEQ ID NO: 1800404 - RNA, 22 nt, Human
uagaacugaauuuugucuuuau

SEQ ID NO: 1800405 - RNA, 17 nt, Human
uagaacugaauuuuguc

SEQ ID NO: 1800406 - RNA, 13 nt, Human
uagaacugaauuu

SEQ ID NO: 1800407 - RNA, 22 nt, Human
uacuucaaaaguuuguuugcuu

SEQ ID NO: 1800408 - RNA, 17 nt, Human
uacuucaaaaguuuguu

SEQ ID NO: 1800409 - RNA, 15 nt, Human
uagaacucccuuuca

SEQ ID NO: 1800410 - RNA, 14 nt, Human
uagacagcaugaga

SEQ ID NO: 1800411 - RNA, 16 nt, Human
uagacaauuuauuaug

SEQ ID NO: 1800412 - RNA, 20 nt, Human
uagaagucuuagauguauau

SEQ ID NO: 1800413 - RNA, 18 nt, Human
uagaagucuuagauguau

SEQ ID NO: 1800414 - RNA, 19 nt, Human
uagaagucuuagauguaua

SEQ ID NO: 1800415 - RNA, 16 nt, Human
uagaagucacacagua

SEQ ID NO: 1800416 - RNA, 16 nt, Human
uagaagucuuagaugu

SEQ ID NO: 1800417 - RNA, 17 nt, Human
uagaagucuuagaugua

SEQ ID NO: 1800418 - RNA, 20 nt, Human
aauacaguaucucagggccu

SEQ ID NO: 1800419 - RNA, 23 nt, Human
uaauacaccacuacauucuguua

SEQ ID NO: 1800420 - RNA, 21 nt, Human
uaauacaccacuacauucugu

SEQ ID NO: 1800421 - RNA, 22 nt, Human
uaauacaccacuacauucuguu

SEQ ID NO: 1800422 - RNA, 18 nt, Human
uaauacuugcuuuggaaa

SEQ ID NO: 1800423 - RNA, 13 nt, Human
uaauaccucccuu

SEQ ID NO: 1800424 - RNA, 17 nt, Human
uaaucuuuaauuuuaca

SEQ ID NO: 1800425 - RNA, 22 nt, Human
uaauccaagcaaaugugaauca

SEQ ID NO: 1800426 - RNA, 21 nt, Human
uaauauugauaugcuuauaca

SEQ ID NO: 1800427 - RNA, 15 nt, Human
aaugaaugucagugu

SEQ ID NO: 1800428 - RNA, 14 nt, Human
aaugaaugucagug

SEQ ID NO: 1800429 - RNA, 14 nt, Human
aaugaaugaaacau

SEQ ID NO: 1800430 - RNA, 15 nt, Human
aaugaaugaaugaau

SEQ ID NO: 1800431 - RNA, 23 nt, Human
aaucuucugaacuuggcgcugcc

SEQ ID NO: 1800432 - RNA, 13 nt, Human
aaucuugaaaaug

SEQ ID NO: 1800433 - RNA, 15 nt, Human
uaaugucacaggcag

SEQ ID NO: 1800434 - RNA, 17 nt, Human
uaaugucacaggcaggu

SEQ ID NO: 1800435 - RNA, 16 nt, Human
uaaugucacaggcagg

SEQ ID NO: 1800436 - RNA, 23 nt, Human
uaaugugaaacuggauuaaacuu

SEQ ID NO: 1800437 - RNA, 22 nt, Human
uaaugugaaacuggauuaaacu

SEQ ID NO: 1800438 - RNA, 20 nt, Human
uaaugugaaacuggauuaaa

SEQ ID NO: 1800439 - RNA, 12 nt, Human
uaaugugaaacu

SEQ ID NO: 1800440 - RNA, 15 nt, Human
uaauguaagacaaau

SEQ ID NO: 1800441 - RNA, 16 nt, Human
uaauguaagcucuacu

SEQ ID NO: 1800442 - RNA, 17 nt, Human
uaauguaagcucuacug

SEQ ID NO: 1800443 - RNA, 21 nt, Human
uacaagcgugagccacugcac

SEQ ID NO: 1800444 - RNA, 20 nt, Human
uacaauaaaaucuugaaaau

SEQ ID NO: 1800445 - RNA, 20 nt, Human
uacaagcgugagccacugca

SEQ ID NO: 1800446 - RNA, 19 nt, Human
uacaagcgugagccacugc

SEQ ID NO: 1800447 - RNA, 18 nt, Human
uacaagcgugagccacug

SEQ ID NO: 1800448 - RNA, 16 nt, Human
uacaagcgugagccac

SEQ ID NO: 1800449 - RNA, 16 nt, Human
uacaaaaacauggccu

SEQ ID NO: 1800450 - RNA, 18 nt, Human
uacaagccagcuggagaa

SEQ ID NO: 1800451 - RNA, 15 nt, Human
uacaaaaagcauaaa

SEQ ID NO: 1800452 - RNA, 13 nt, Human
uaauucauguugc

SEQ ID NO: 1800453 - RNA, 17 nt, Human
uaauuuaccugaagucu

SEQ ID NO: 1800454 - RNA, 18 nt, Human
uaauuuaccugaagucuu

SEQ ID NO: 1800455 - RNA, 13 nt, Human
uaauuuuuuacua

SEQ ID NO: 1800456 - RNA, 22 nt, Human
uaauuuuuguguuuuuaauaaa

SEQ ID NO: 1800457 - RNA, 21 nt, Human
uaauuuuuguauuuuuaguag

SEQ ID NO: 1800458 - RNA, 20 nt, Human
uaauuauacccccugcaaag

SEQ ID NO: 1800459 - RNA, 23 nt, Human
uaauuaguuccucauuagcauuu

SEQ ID NO: 1800460 - RNA, 19 nt, Human
aaugcacuuuguucuggcu

SEQ ID NO: 1800461 - RNA, 20 nt, Human
aaugcacuuuguucuggcuc

SEQ ID NO: 1800462 - RNA, 19 nt, Human
aaugcacaaacagaggccg

SEQ ID NO: 1800463 - RNA, 20 nt, Human
aaugcacaaacagaggccgc

SEQ ID NO: 1800464 - RNA, 13 nt, Human
aaugcacuuuguu

SEQ ID NO: 1800465 - RNA, 16 nt, Human
aaugcacuuuguucug

SEQ ID NO: 1800466 - RNA, 18 nt, Human
aaugcaaccauuugaaac

SEQ ID NO: 1800467 - RNA, 17 nt, Human
aaugcaaccauuugaaa

SEQ ID NO: 1800468 - RNA, 13 nt, Human
aaugcaaccauuu

SEQ ID NO: 1800469 - RNA, 18 nt, Human
aaugcacaaacagaggcc

SEQ ID NO: 1800470 - RNA, 22 nt, Human
aaugcaaaccaucauugaaauc

SEQ ID NO: 1800471 - RNA, 23 nt, Human
aaugcaaaccaucauugaaaucu

SEQ ID NO: 1800472 - RNA, 20 nt, Human
aaugaaugucagugugacug

SEQ ID NO: 1800473 - RNA, 21 nt, Human
aaugaaugucagugugacuga

SEQ ID NO: 1800474 - RNA, 13 nt, Human
aaugaccuuucaa

SEQ ID NO: 1800475 - RNA, 14 nt, Human
aaugaccuuucaau

SEQ ID NO: 1800476 - RNA, 15 nt, Human
aaugaccuuucaaua

SEQ ID NO: 1800477 - RNA, 16 nt, Human
aaugcaaaccaucauu

SEQ ID NO: 1800478 - RNA, 12 nt, Human
uacagucuugua

SEQ ID NO: 1800479 - RNA, 13 nt, Human
uacagucuuguau

SEQ ID NO: 1800480 - RNA, 15 nt, Human
uacauaaugcgugca

SEQ ID NO: 1800481 - RNA, 18 nt, Human
uacaguaucucagggccu

SEQ ID NO: 1800482 - RNA, 12 nt, Human
uacaguccuccc

SEQ ID NO: 1800483 - RNA, 15 nt, Human
uacaguccucccauc

SEQ ID NO: 1800484 - RNA, 17 nt, Human
uacaguccucccaucuc

SEQ ID NO: 1800485 - RNA, 18 nt, Human
uacaguccucccaucuca

SEQ ID NO: 1800486 - RNA, 13 nt, Human
aaugucacaggca

SEQ ID NO: 1800487 - RNA, 14 nt, Human
aauguauuuuuccu

SEQ ID NO: 1800488 - RNA, 14 nt, Human
aaugucacaggcag

SEQ ID NO: 1800489 - RNA, 22 nt, Human
aaugugaaacuggauuaaacuu

SEQ ID NO: 1800490 - RNA, 23 nt, Human
aauguacagcaaggagauuuaca

SEQ ID NO: 1800491 - RNA, 21 nt, Human
aauguacagcaaggagauuua

SEQ ID NO: 1800492 - RNA, 22 nt, Human
uacagcaaggagauuuacaacu

SEQ ID NO: 1800493 - RNA, 19 nt, Human
uacagacuggauguaccac

SEQ ID NO: 1800494 - RNA, 16 nt, Human
aaugguuuaaaugguc

SEQ ID NO: 1800495 - RNA, 13 nt, Human
aauguaagacaaa

SEQ ID NO: 1800496 - RNA, 13 nt, Human
aauguaagcucua

SEQ ID NO: 1800497 - RNA, 15 nt, Human
aauguaagcucuacu

SEQ ID NO: 1800498 - RNA, 17 nt, Human
aaugguuuucuugugug

SEQ ID NO: 1800499 - RNA, 18 nt, Human
aaugguuuucuugugugu

SEQ ID NO: 1800500 - RNA, 22 nt, Human
aaugguuuucuuguguguuuau

SEQ ID NO: 1800501 - RNA, 17 nt, Human
uacauguacugauuacu

SEQ ID NO: 1800502 - RNA, 13 nt, Human
aauuaaguacuau

SEQ ID NO: 1800503 - RNA, 19 nt, Human
uacauuagcaguuugcuuu

SEQ ID NO: 1800504 - RNA, 20 nt, Human
uacauuagcaguuugcuuug

SEQ ID NO: 1800505 - RNA, 19 nt, Human
aauuaacaugaauauuuag

SEQ ID NO: 1800506 - RNA, 20 nt, Human
aauuaagaaaggauaaaguu

SEQ ID NO: 1800507 - RNA, 22 nt, Human
aauuaacuuuuauaaacuuuac

SEQ ID NO: 1800508 - RNA, 20 nt, Human
aauuaacuuuuauaaacuuu

SEQ ID NO: 1800509 - RNA, 18 nt, Human
aauuaacuuuuauaaacu

SEQ ID NO: 1800510 - RNA, 15 nt, Human
aaugucacaggcagg

SEQ ID NO: 1800511 - RNA, 17 nt, Human
uaccauccccuguagag

SEQ ID NO: 1800512 - RNA, 20 nt, Human
uacauuuaaaacauuaaaau

SEQ ID NO: 1800513 - RNA, 19 nt, Human
uacauuuaaaacauuaaaa

SEQ ID NO: 1800514 - RNA, 16 nt, Human
uacauuuaaaacauua

SEQ ID NO: 1800515 - RNA, 15 nt, Human
uacauuuaaaacauu

SEQ ID NO: 1800516 - RNA, 17 nt, Human
uaccacuuuuguucuug

SEQ ID NO: 1800517 - RNA, 20 nt, Human
uacccuggcacuauaaugua

SEQ ID NO: 1800518 - RNA, 22 nt, Human
uacccuggcacuauaauguaag

SEQ ID NO: 1800519 - RNA, 20 nt, Human
uacccgggaagggggcuggg

SEQ ID NO: 1800520 - RNA, 16 nt, Human
uacccucauguucuua

SEQ ID NO: 1800521 - RNA, 18 nt, Human
guuccccuguucacucua

SEQ ID NO: 1800522 - RNA, 16 nt, Human
guucucugaggacacu

SEQ ID NO: 1800523 - RNA, 11 nt, Human
guucucugccc

SEQ ID NO: 1800524 - RNA, 13 nt, Human
guucucugcccuc

SEQ ID NO: 1800525 - RNA, 12 nt, Human
guucucugcccu

SEQ ID NO: 1800526 - RNA, 23 nt, Human
guugauagcacagacccugcccu

SEQ ID NO: 1800527 - RNA, 22 nt, Human
guugauagcacagacccugccc

SEQ ID NO: 1800528 - RNA, 22 nt, Human
guguuuaagacauuuuuggaag

SEQ ID NO: 1800529 - RNA, 11 nt, Human
aagcucccagg

SEQ ID NO: 1800530 - RNA, 13 nt, Human
guguuuauuguca

SEQ ID NO: 1800531 - RNA, 23 nt, Human
aagcucccaggcauuccccagga

SEQ ID NO: 1800532 - RNA, 12 nt, Human
aagcucccaggc

SEQ ID NO: 1800533 - RNA, 22 nt, Human
aagcucccaggcauuccccagg

SEQ ID NO: 1800534 - RNA, 16 nt, Human
aaggaaaaaauaacaa

SEQ ID NO: 1800535 - RNA, 19 nt, Human
aaggaaaaaauaacaauga

SEQ ID NO: 1800536 - RNA, 15 nt, Human
guuccccuguucacu

SEQ ID NO: 1800537 - RNA, 17 nt, Human
guuccccuguucacucu

SEQ ID NO: 1800538 - RNA, 16 nt, Human
aagcuuuuaugugaaa

SEQ ID NO: 1800539 - RNA, 13 nt, Human
aagcucugcuccu

SEQ ID NO: 1800540 - RNA, 18 nt, Human
aagcuguuacugucuuca

SEQ ID NO: 1800541 - RNA, 13 nt, Human
aaggauaaugaau

SEQ ID NO: 1800542 - RNA, 23 nt, Human
aaggauaaaguugguaaaccuuu

SEQ ID NO: 1800543 - RNA, 21 nt, Human
aaggauaaaguugguaaaccu

SEQ ID NO: 1800544 - RNA, 20 nt, Human
aaggaggaagagaaaaaaua

SEQ ID NO: 1800545 - RNA, 11 nt, Human
aaggauaaagu

SEQ ID NO: 1800546 - RNA, 11 nt, Human
aaggauccuga

SEQ ID NO: 1800547 - RNA, 12 nt, Human
aaggauccugag

SEQ ID NO: 1800548 - RNA, 13 nt, Human
aaggauccugagc

SEQ ID NO: 1800549 - RNA, 20 nt, Human
aaggauccugagccagauuu

SEQ ID NO: 1800550 - RNA, 22 nt, Human
aaggauccugagccagauuuca

SEQ ID NO: 1800551 - RNA, 22 nt, Human
aaggagcaagucagaauagaaa

SEQ ID NO: 1800552 - RNA, 18 nt, Human
aaggagauuuacaacugg

SEQ ID NO: 1800553 - RNA, 16 nt, Human
aaggaaacccagcucu

SEQ ID NO: 1800554 - RNA, 15 nt, Human
aaggaaacccagcuc

SEQ ID NO: 1800555 - RNA, 17 nt, Human
guugggcuggugucacc

SEQ ID NO: 1800556 - RNA, 17 nt, Human
guugcccaggcuggcgu

SEQ ID NO: 1800557 - RNA, 16 nt, Human
guugcccaggcuggcg

SEQ ID NO: 1800558 - RNA, 15 nt, Human
guugcccaggcuggc

SEQ ID NO: 1800559 - RNA, 12 nt, Human
guugcugccuca

SEQ ID NO: 1800560 - RNA, 14 nt, Human
guugcccaggcugg

SEQ ID NO: 1800561 - RNA, 15 nt, Human
aaggcuaccuuugua

SEQ ID NO: 1800562 - RNA, 13 nt, Human
aaggcuaccuuug

SEQ ID NO: 1800563 - RNA, 19 nt, Human
aaggccccgcccaggcuua

SEQ ID NO: 1800564 - RNA, 14 nt, Human
aaggccccgcccag

SEQ ID NO: 1800565 - RNA, 16 nt, Human
aaggccccgcccaggc

SEQ ID NO: 1800566 - RNA, 24 nt, Human
aaggaugcacagaguuguuacauu

SEQ ID NO: 1800567 - RNA, 14 nt, Human
aaggaugcccaaag

SEQ ID NO: 1800568 - RNA, 19 nt, Human
aaggaugcccaaagaugca

SEQ ID NO: 1800569 - RNA, 22 nt, Human
aagucuuauauauuguagauaa

SEQ ID NO: 1800570 - RNA, 18 nt, Human
aagucuuagauguauaua

SEQ ID NO: 1800571 - RNA, 19 nt, Human
aagucuuagauguauauau

SEQ ID NO: 1800572 - RNA, 17 nt, Human
aagucuuagauguauau

SEQ ID NO: 1800573 - RNA, 18 nt, Human
guuuuucuaggccugggg

SEQ ID NO: 1800574 - RNA, 15 nt, Human
guuuuuuuuuaaaga

SEQ ID NO: 1800575 - RNA, 16 nt, Human
guuuuugucuuaaaaa

SEQ ID NO: 1800576 - RNA, 18 nt, Human
aaguauucuuauuuaaug

SEQ ID NO: 1800577 - RNA, 19 nt, Human
aaguauucuuauuuaauga

SEQ ID NO: 1800578 - RNA, 24 nt, Human
aagucacacaguauuacuucugcu

SEQ ID NO: 1800579 - RNA, 19 nt, Human
aagucaaggguaggguggg

SEQ ID NO: 1800580 - RNA, 21 nt, Human
aagucaagugaaaaaggagga

SEQ ID NO: 1800581 - RNA, 13 nt, Human
aagucacacagug

SEQ ID NO: 1800582 - RNA, 14 nt, Human
aagucacugcacag

SEQ ID NO: 1800583 - RNA, 12 nt, Human
aagucacugcac

SEQ ID NO: 1800584 - RNA, 23 nt, Human
aaguacuucuccacccugcucuc

SEQ ID NO: 1800585 - RNA, 22 nt, Human
aaguacuucuccacccugcucu

SEQ ID NO: 1800586 - RNA, 21 nt, Human
aaguacuucuccacccugcuc

SEQ ID NO: 1800587 - RNA, 15 nt, Human
aaguacuggagaaaa

SEQ ID NO: 1800588 - RNA, 16 nt, Human
aaguacuauguaucaa

SEQ ID NO: 1800589 - RNA, 15 nt, Human
aaguacuauguauca

SEQ ID NO: 1800590 - RNA, 17 nt, Human
guuugccucugccucug

SEQ ID NO: 1800591 - RNA, 19 nt, Human
guuugcaucugaaaauuga

SEQ ID NO: 1800592 - RNA, 13 nt, Human
guuugcuaaguga

SEQ ID NO: 1800593 - RNA, 14 nt, Human
guuucucagcuccc

SEQ ID NO: 1800594 - RNA, 22 nt, Human
guuucuaugacacaugcaaggu

SEQ ID NO: 1800595 - RNA, 22 nt, Human
guuucugccgcagcccugcaga

SEQ ID NO: 1800596 - RNA, 16 nt, Human
guuuuaagaggcaggg

SEQ ID NO: 1800597 - RNA, 18 nt, Human
guuuuaaggaugcuugua

SEQ ID NO: 1800598 - RNA, 14 nt, Human
guuuuaagaggcag

SEQ ID NO: 1800599 - RNA, 16 nt, Human
guuuuacugcagcuuu

SEQ ID NO: 1800600 - RNA, 18 nt, Human
guuuuacugcagcuuugu

SEQ ID NO: 1800601 - RNA, 13 nt, Human
aagggcccagaga

SEQ ID NO: 1800602 - RNA, 15 nt, Human
aagggcccagagagg

SEQ ID NO: 1800603 - RNA, 19 nt, Human
aaggcugagaggagagaga

SEQ ID NO: 1800604 - RNA, 19 nt, Human
aaggguaucaggugcugcc

SEQ ID NO: 1800605 - RNA, 16 nt, Human
aaggguaucuggugac

SEQ ID NO: 1800606 - RNA, 17 nt, Human
aaggggcaguggugguu

SEQ ID NO: 1800607 - RNA, 14 nt, Human
aaggggcaguggug

SEQ ID NO: 1800608 - RNA, 19 nt, Human
uaaaauuuuuaaucuuuaa

SEQ ID NO: 1800609 - RNA, 19 nt, Human
uaaaccaaggcuagaacca

SEQ ID NO: 1800610 - RNA, 17 nt, Human
uaaaauuuuuaaucuuu

SEQ ID NO: 1800611 - RNA, 16 nt, Human
uaaaauuaaagcugaa

SEQ ID NO: 1800612 - RNA, 18 nt, Human
uaaaauuaaagcugaaaa

SEQ ID NO: 1800613 - RNA, 19 nt, Human
uaaaauuaaagcugaaaac

SEQ ID NO: 1800614 - RNA, 17 nt, Human
guuuuuuuuuaaagacu

SEQ ID NO: 1800615 - RNA, 17 nt, Human
aaguuacacauuuuuca

SEQ ID NO: 1800616 - RNA, 12 nt, Human
aaguuaaauaaa

SEQ ID NO: 1800617 - RNA, 14 nt, Human
aaguuaaauaaauc

SEQ ID NO: 1800618 - RNA, 17 nt, Human
aaguucugcagauaaac

SEQ ID NO: 1800619 - RNA, 14 nt, Human
aaguuuaauugacu

SEQ ID NO: 1800620 - RNA, 14 nt, Human
uaaagaagguuuca

SEQ ID NO: 1800621 - RNA, 16 nt, Human
uaaagacuuuuaugau

SEQ ID NO: 1800622 - RNA, 10 nt, Human
uaaagacaga

SEQ ID NO: 1800623 - RNA, 9 nt, Human
uaaagacag

SEQ ID NO: 1800624 - RNA, 15 nt, Human
uaaagacaccuacug

SEQ ID NO: 1800625 - RNA, 18 nt, Human
uaaagaguuaguuugagu

SEQ ID NO: 1800626 - RNA, 13 nt, Human
uaaagauggaaaa

SEQ ID NO: 1800627 - RNA, 19 nt, Human
uaaagaugagcuuugucua

SEQ ID NO: 1800628 - RNA, 19 nt, Human
uaaaggcuaccuuuguauu

SEQ ID NO: 1800629 - RNA, 21 nt, Human
uaaaggcuaccuuuguauucu

SEQ ID NO: 1800630 - RNA, 16 nt, Human
uaaaccgccaaggcug

SEQ ID NO: 1800631 - RNA, 18 nt, Human
uaaaccgccaaggcuggg

SEQ ID NO: 1800632 - RNA, 19 nt, Human
uaaacccaguaguggugac

SEQ ID NO: 1800633 - RNA, 12 nt, Human
uaaacugccccc

SEQ ID NO: 1800634 - RNA, 13 nt, Human
uaaauaacuuuuu

SEQ ID NO: 1800635 - RNA, 21 nt, Human
aauacaccacuacauucuguu

SEQ ID NO: 1800636 - RNA, 20 nt, Human
aauacaccacuacauucugu

SEQ ID NO: 1800637 - RNA, 18 nt, Human
aauacaccacuacauucu

SEQ ID NO: 1800638 - RNA, 16 nt, Human
aauacaccacuacauu

SEQ ID NO: 1800639 - RNA, 15 nt, Human
aauacaccacuacau

SEQ ID NO: 1800640 - RNA, 19 nt, Human
uaaaucuccaaaauaaaac

SEQ ID NO: 1800641 - RNA, 19 nt, Human
uaaauaguaaaaauaaaau

SEQ ID NO: 1800642 - RNA, 20 nt, Human
uaaauaguaaaaauaaaauu

SEQ ID NO: 1800643 - RNA, 13 nt, Human
uaacaagccaccc

SEQ ID NO: 1800644 - RNA, 16 nt, Human
uaacaacuaugauuug

SEQ ID NO: 1800645 - RNA, 21 nt, Human
uaacaacuaugauuuggaaaa

SEQ ID NO: 1800646 - RNA, 22 nt, Human
uaacaacuaugauuuggaaaau

SEQ ID NO: 1800647 - RNA, 19 nt, Human
uaaauuuuuuuuguuucau

SEQ ID NO: 1800648 - RNA, 22 nt, Human
uaaaucuccaaaauaaaacuuu

SEQ ID NO: 1800649 - RNA, 21 nt, Human
uaaaucuccaaaauaaaacuu

SEQ ID NO: 1800650 - RNA, 20 nt, Human
uaaaucuccaaaauaaaacu

SEQ ID NO: 1800651 - RNA, 17 nt, Human
uaaaugauuucauucaa

SEQ ID NO: 1800652 - RNA, 20 nt, Human
uaaauguuuuuuuuuaaaga

SEQ ID NO: 1800653 - RNA, 23 nt, Human
uaaauguuuuuuuuuaaagacuu

SEQ ID NO: 1800654 - RNA, 15 nt, Human
aauaacaauaaaaga

SEQ ID NO: 1800655 - RNA, 12 nt, Human
aauaacauguaa

SEQ ID NO: 1800656 - RNA, 19 nt, Human
aauaacauguaauuaagua

SEQ ID NO: 1800657 - RNA, 22 nt, Human
aauaacauguaauuaaguacua

SEQ ID NO: 1800658 - RNA, 12 nt, Human
aauaaauuauuu

SEQ ID NO: 1800659 - RNA, 15 nt, Human
aauaacuaaaaggua

SEQ ID NO: 1800660 - RNA, 12 nt, Human
aauaaaaauaau

SEQ ID NO: 1800661 - RNA, 16 nt, Human
aauaaaguacaagagc

SEQ ID NO: 1800662 - RNA, 14 nt, Human
aauaaaguaauuau

SEQ ID NO: 1800663 - RNA, 16 nt, Human
aauaaaaucuugaaaa

SEQ ID NO: 1800664 - RNA, 20 nt, Human
uaaaguguauuuuuuuacua

SEQ ID NO: 1800665 - RNA, 19 nt, Human
uaaaguguauuuuuuuacu

SEQ ID NO: 1800666 - RNA, 15 nt, Human
uaaaguguauuuuuu

SEQ ID NO: 1800667 - RNA, 14 nt, Human
uaaaguguauuuuu

SEQ ID NO: 1800668 - RNA, 22 nt, Human
uaaagucuguugauuaaagaug

SEQ ID NO: 1800669 - RNA, 21 nt, Human
uaaagucuguugauuaaagau

SEQ ID NO: 1800670 - RNA, 13 nt, Human
uaaagucaggggu

SEQ ID NO: 1800671 - RNA, 13 nt, Human
aagacccaaaagg

SEQ ID NO: 1800672 - RNA, 17 nt, Human
guggcagcugcggucca

SEQ ID NO: 1800673 - RNA, 14 nt, Human
guggcagcugcggu

SEQ ID NO: 1800674 - RNA, 22 nt, Human
guggcagcucaccucucccuug

SEQ ID NO: 1800675 - RNA, 18 nt, Human
guggcaccagcagccugg

SEQ ID NO: 1800676 - RNA, 13 nt, Human
guggcaccagcag

SEQ ID NO: 1800677 - RNA, 14 nt, Human
guggcaccagcagc

SEQ ID NO: 1800678 - RNA, 23 nt, Human
guggauuuaacagaaauguacag

SEQ ID NO: 1800679 - RNA, 21 nt, Human
guggauuuaacagaaauguac

SEQ ID NO: 1800680 - RNA, 19 nt, Human
gugcugggccccugccucu

SEQ ID NO: 1800681 - RNA, 16 nt, Human
gugcugggccccugcc

SEQ ID NO: 1800682 - RNA, 23 nt, Human
aagaagguuucagaaagaagugg

SEQ ID NO: 1800683 - RNA, 18 nt, Human
gugcugcccugcccaccu

SEQ ID NO: 1800684 - RNA, 21 nt, Human
gugcugcccugcccaccuggc

SEQ ID NO: 1800685 - RNA, 19 nt, Human
gugcugcccugcccaccug

SEQ ID NO: 1800686 - RNA, 20 nt, Human
gugcugcccugcccaccugg

SEQ ID NO: 1800687 - RNA, 24 nt, Human
guggacacagcucuucuccaggcu

SEQ ID NO: 1800688 - RNA, 17 nt, Human
guggacacagcucuucu

SEQ ID NO: 1800689 - RNA, 15 nt, Human
guggacacagcucuu

SEQ ID NO: 1800690 - RNA, 14 nt, Human
guggacacagcucu

SEQ ID NO: 1800691 - RNA, 16 nt, Human
aagaaaauaccaagga

SEQ ID NO: 1800692 - RNA, 15 nt, Human
aagaagcucucuccu

SEQ ID NO: 1800693 - RNA, 14 nt, Human
aagaagcucucucc

SEQ ID NO: 1800694 - RNA, 16 nt, Human
aagaagcccaggaaag

SEQ ID NO: 1800695 - RNA, 17 nt, Human
aagaagcccaggaaagg

SEQ ID NO: 1800696 - RNA, 22 nt, Human
aagaaaaguuuuguaaauuucu

SEQ ID NO: 1800697 - RNA, 21 nt, Human
aagaaaaguuuuguaaauuuc

SEQ ID NO: 1800698 - RNA, 16 nt, Human
aagaaaaguuuuguaa

SEQ ID NO: 1800699 - RNA, 15 nt, Human
aagaaaaguuuugua

SEQ ID NO: 1800700 - RNA, 20 nt, Human
aagaaaaaggaugcacagag

SEQ ID NO: 1800701 - RNA, 19 nt, Human
aagaaaaaggaugcacaga

SEQ ID NO: 1800702 - RNA, 22 nt, Human
aagaaaaaggaugcacagaguu

SEQ ID NO: 1800703 - RNA, 13 nt, Human
aacuuguuuucug

SEQ ID NO: 1800704 - RNA, 14 nt, Human
aacuuggcgcugcc

SEQ ID NO: 1800705 - RNA, 14 nt, Human
aacuuggaaauagu

SEQ ID NO: 1800706 - RNA, 15 nt, Human
aacuuguaaaugugg

SEQ ID NO: 1800707 - RNA, 17 nt, Human
aacuuggcgcugccccu

SEQ ID NO: 1800708 - RNA, 23 nt, Human
aacuugguucccauuugcuccuu

SEQ ID NO: 1800709 - RNA, 16 nt, Human
gugccuggccacgccc

SEQ ID NO: 1800710 - RNA, 15 nt, Human
gugccucugggacug

SEQ ID NO: 1800711 - RNA, 17 nt, Human
gugcacacaccagagcc

SEQ ID NO: 1800712 - RNA, 18 nt, Human
gugcacguacacacacau

SEQ ID NO: 1800713 - RNA, 14 nt, Human
gugcacacaccaga

SEQ ID NO: 1800714 - RNA, 12 nt, Human
gugcacacacca

SEQ ID NO: 1800715 - RNA, 20 nt, Human
gugcauuugaggucuguucu

SEQ ID NO: 1800716 - RNA, 22 nt, Human
gugcauuugaggucuguucuuu

SEQ ID NO: 1800717 - RNA, 21 nt, Human
gugcauuugaggucuguucuu

SEQ ID NO: 1800718 - RNA, 15 nt, Human
gugcauuuggugguu

SEQ ID NO: 1800719 - RNA, 14 nt, Human
gugccaagcagagg

SEQ ID NO: 1800720 - RNA, 12 nt, Human
aagcaaaugucu

SEQ ID NO: 1800721 - RNA, 13 nt, Human
aagcaaaugugaa

SEQ ID NO: 1800722 - RNA, 14 nt, Human
aagcaaaugugaau

SEQ ID NO: 1800723 - RNA, 16 nt, Human
aagcaagauuucagau

SEQ ID NO: 1800724 - RNA, 22 nt, Human
aagauguagaggagaaacugga

SEQ ID NO: 1800725 - RNA, 13 nt, Human
aagcaaaauguga

SEQ ID NO: 1800726 - RNA, 19 nt, Human
aagauguagaggagaaacu

SEQ ID NO: 1800727 - RNA, 16 nt, Human
aagaguaggaagacuu

SEQ ID NO: 1800728 - RNA, 18 nt, Human
aagaguaggaagacuuug

SEQ ID NO: 1800729 - RNA, 19 nt, Human
aagaguaggaagacuuugg

SEQ ID NO: 1800730 - RNA, 15 nt, Human
aagauauuuugcuuu

SEQ ID NO: 1800731 - RNA, 19 nt, Human
gugguguuuccuggcacug

SEQ ID NO: 1800732 - RNA, 18 nt, Human
gugguuauggagagggug

SEQ ID NO: 1800733 - RNA, 22 nt, Human
aagauauuuugcuuugugauuu

SEQ ID NO: 1800734 - RNA, 20 nt, Human
aagaguaggaagacuuugga

SEQ ID NO: 1800735 - RNA, 20 nt, Human
aagauauuuugcuuugugau

SEQ ID NO: 1800736 - RNA, 17 nt, Human
aagauauuuugcuuugu

SEQ ID NO: 1800737 - RNA, 19 nt, Human
guguguguaugcgugugug

SEQ ID NO: 1800738 - RNA, 19 nt, Human
gugugguguuuccuggcac

SEQ ID NO: 1800739 - RNA, 13 nt, Human
guguuuaagacau

SEQ ID NO: 1800740 - RNA, 14 nt, Human
guguuuaagacauu

SEQ ID NO: 1800741 - RNA, 20 nt, Human
gugucccaaaaagaaaggag

SEQ ID NO: 1800742 - RNA, 19 nt, Human
gugucuugcaauggcagcc

SEQ ID NO: 1800743 - RNA, 21 nt, Human
gugucuugcaauggcagccuu

SEQ ID NO: 1800744 - RNA, 18 nt, Human
gugugagucaccaagccc

SEQ ID NO: 1800745 - RNA, 13 nt, Human
gugugagucacca

SEQ ID NO: 1800746 - RNA, 15 nt, Human
gugugguguuuccug

SEQ ID NO: 1800747 - RNA, 12 nt, Human
aagaccagucca

SEQ ID NO: 1800748 - RNA, 23 nt, Human
aagaccccuuaccacugcucuga

SEQ ID NO: 1800749 - RNA, 21 nt, Human
aagacgcugugcugcccugcc

SEQ ID NO: 1800750 - RNA, 22 nt, Human
aagacgcugugcugcccugccc

SEQ ID NO: 1800751 - RNA, 23 nt, Human
aagacgcugugcugcccugccca

SEQ ID NO: 1800752 - RNA, 17 nt, Human
aagacucauucuucugu

SEQ ID NO: 1800753 - RNA, 16 nt, Human
aagagcccaggccucc

SEQ ID NO: 1800754 - RNA, 12 nt, Human
aagagcccaggc

SEQ ID NO: 1800755 - RNA, 14 nt, Human
aagagcccaggccu

SEQ ID NO: 1800756 - RNA, 16 nt, Human
aagacuguacaaagua

SEQ ID NO: 1800757 - RNA, 16 nt, Human
aagagauugugguuuc

SEQ ID NO: 1800758 - RNA, 19 nt, Human
aagagauugugguuucauu

SEQ ID NO: 1800759 - RNA, 16 nt, Human
guggcccgacagccug

SEQ ID NO: 1800760 - RNA, 21 nt, Human
guggcuucccgcucagcccuc

SEQ ID NO: 1800761 - RNA, 15 nt, Human
guggccucccaacuc

SEQ ID NO: 1800762 - RNA, 17 nt, Human
guggcccgacagccugg

SEQ ID NO: 1800763 - RNA, 13 nt, Human
guggccucccaac

SEQ ID NO: 1800764 - RNA, 14 nt, Human
guggccucccaacu

SEQ ID NO: 1800765 - RNA, 15 nt, Human
gugggauccuccagg

SEQ ID NO: 1800766 - RNA, 18 nt, Human
gugggauccuccaggugc

SEQ ID NO: 1800767 - RNA, 12 nt, Human
gugggagcugag

SEQ ID NO: 1800768 - RNA, 15 nt, Human
gugguguuuccuggc

SEQ ID NO: 1800769 - RNA, 16 nt, Human
gugguguuuccuggca

SEQ ID NO: 1800770 - RNA, 18 nt, Human
guggggggggugcugggc

SEQ ID NO: 1800771 - RNA, 19 nt, Human
aacagguuuuccugaagaa

SEQ ID NO: 1800772 - RNA, 20 nt, Human
aacagacuggaagcacagcu

SEQ ID NO: 1800773 - RNA, 13 nt, Human
guccuacccaccc

SEQ ID NO: 1800774 - RNA, 12 nt, Human
aacagaggauau

SEQ ID NO: 1800775 - RNA, 14 nt, Human
aacaucaacaucuu

SEQ ID NO: 1800776 - RNA, 22 nt, Human
aacauguuuuucuucucccuca

SEQ ID NO: 1800777 - RNA, 18 nt, Human
aacauacucccaucugug

SEQ ID NO: 1800778 - RNA, 16 nt, Human
aacauacucccaucug

SEQ ID NO: 1800779 - RNA, 20 nt, Human
aacauacucccaucugugaa

SEQ ID NO: 1800780 - RNA, 23 nt, Human
guccccuguuuguuucugaaagg

SEQ ID NO: 1800781 - RNA, 18 nt, Human
gucccccugacaacacuc

SEQ ID NO: 1800782 - RNA, 13 nt, Human
gucccccugacaa

SEQ ID NO: 1800783 - RNA, 15 nt, Human
guccccgcacugggc

SEQ ID NO: 1800784 - RNA, 16 nt, Human
guccccgcacugggcu

SEQ ID NO: 1800785 - RNA, 21 nt, Human
guccgaaagggacuuggaagc

SEQ ID NO: 1800786 - RNA, 13 nt, Human
gucccuuuuccuu

SEQ ID NO: 1800787 - RNA, 22 nt, Human
guccgaaagggacuuggaagcu

SEQ ID NO: 1800788 - RNA, 18 nt, Human
gucccaccuuggcugcag

SEQ ID NO: 1800789 - RNA, 17 nt, Human
gucccaccuuggcugca

SEQ ID NO: 1800790 - RNA, 20 nt, Human
gucccaccuuggcugcaggg

SEQ ID NO: 1800791 - RNA, 19 nt, Human
gucccaccuuggcugcagg

SEQ ID NO: 1800792 - RNA, 12 nt, Human
gucccccucugg

SEQ ID NO: 1800793 - RNA, 14 nt, Human
gucccccucuggcu

SEQ ID NO: 1800794 - RNA, 22 nt, Human
guagccucaaucgagugagaca

SEQ ID NO: 1800795 - RNA, 22 nt, Human
guagcucuaggagggcuggcaa

SEQ ID NO: 1800796 - RNA, 15 nt, Human
gucucaggucccugc

SEQ ID NO: 1800797 - RNA, 16 nt, Human
gucucaggucccugca

SEQ ID NO: 1800798 - RNA, 23 nt, Human
gucucaguccaugaagauguaga

SEQ ID NO: 1800799 - RNA, 15 nt, Human
gucuaugggacucaa

SEQ ID NO: 1800800 - RNA, 14 nt, Human
gucuaugggacuca

SEQ ID NO: 1800801 - RNA, 22 nt, Human
gucucaaacucuugaccucagg

SEQ ID NO: 1800802 - RNA, 16 nt, Human
gucucaaacuccugac

SEQ ID NO: 1800803 - RNA, 20 nt, Human
gucucaagagggcacuggug

SEQ ID NO: 1800804 - RNA, 22 nt, Human
gucucaagagggcacugguggc

SEQ ID NO: 1800805 - RNA, 15 nt, Human
gucucaagagggcac

SEQ ID NO: 1800806 - RNA, 17 nt, Human
gucucaagagggcacug

SEQ ID NO: 1800807 - RNA, 22 nt, Human
aacauuuguucuauagcuuuuc

SEQ ID NO: 1800808 - RNA, 16 nt, Human
aacauuuugucauaua

SEQ ID NO: 1800809 - RNA, 13 nt, Human
gucuccauguuug

SEQ ID NO: 1800810 - RNA, 13 nt, Human
aaccacaucuugc

SEQ ID NO: 1800811 - RNA, 16 nt, Human
aaccaaauauuccaga

SEQ ID NO: 1800812 - RNA, 17 nt, Human
guccugcugcaguugcc

SEQ ID NO: 1800813 - RNA, 13 nt, Human
guccugcugcagu

SEQ ID NO: 1800814 - RNA, 16 nt, Human
guccugcugcaguugc

SEQ ID NO: 1800815 - RNA, 13 nt, Human
aacauuaaaauau

SEQ ID NO: 1800816 - RNA, 14 nt, Human
gucgaggacaggga

SEQ ID NO: 1800817 - RNA, 14 nt, Human
gucgcccagucugg

SEQ ID NO: 1800818 - RNA, 13 nt, Human
gucgcccagucug

SEQ ID NO: 1800819 - RNA, 15 nt, Human
gucgcccaggcugga

SEQ ID NO: 1800820 - RNA, 20 nt, Human
gucgcccaggcuggagugca

SEQ ID NO: 1800821 - RNA, 14 nt, Human
gucgcccaggcugg

SEQ ID NO: 1800822 - RNA, 23 nt, Human
gucgcccagucuggaaugcagug

SEQ ID NO: 1800823 - RNA, 14 nt, Human
gucgcccuggacug

SEQ ID NO: 1800824 - RNA, 18 nt, Human
gucgcccuggacugugug

SEQ ID NO: 1800825 - RNA, 20 nt, Human
gucuaccugaggggccucuu

SEQ ID NO: 1800826 - RNA, 23 nt, Human
aacguggcugcuucaaggauccu

SEQ ID NO: 1800827 - RNA, 17 nt, Human
aacuagaacugaauuuu

SEQ ID NO: 1800828 - RNA, 16 nt, Human
gucuucaguaagccgu

SEQ ID NO: 1800829 - RNA, 15 nt, Human
gucuuuguacagaca

SEQ ID NO: 1800830 - RNA, 16 nt, Human
gucuuuguacagacaa

SEQ ID NO: 1800831 - RNA, 13 nt, Human
aaccuguucugcu

SEQ ID NO: 1800832 - RNA, 17 nt, Human
aaccuguucugcuuucc

SEQ ID NO: 1800833 - RNA, 19 nt, Human
aaccugauugugucucuug

SEQ ID NO: 1800834 - RNA, 18 nt, Human
aaccugauugugucucuu

SEQ ID NO: 1800835 - RNA, 23 nt, Human
gucugacaggcaaugcuggcugu

SEQ ID NO: 1800836 - RNA, 22 nt, Human
gucugacaggcaaugcuggcug

SEQ ID NO: 1800837 - RNA, 21 nt, Human
gucugacaggcaaugcuggcu

SEQ ID NO: 1800838 - RNA, 17 nt, Human
gucugaagucacugcac

SEQ ID NO: 1800839 - RNA, 19 nt, Human
gucugaagucacugcacag

SEQ ID NO: 1800840 - RNA, 20 nt, Human
gucucuugguccugcugcag

SEQ ID NO: 1800841 - RNA, 18 nt, Human
gucucuugguccugcugc

SEQ ID NO: 1800842 - RNA, 19 nt, Human
gucucuugguccugcugca

SEQ ID NO: 1800843 - RNA, 17 nt, Human
gucucuugguccugcug

SEQ ID NO: 1800844 - RNA, 23 nt, Human
gucucuuuaaugucacaggcagg

SEQ ID NO: 1800845 - RNA, 22 nt, Human
gucucuuuaaugucacaggcag

SEQ ID NO: 1800846 - RNA, 16 nt, Human
gucugaagucacugca

SEQ ID NO: 1800847 - RNA, 14 nt, Human
gucugaaggcuggg

SEQ ID NO: 1800848 - RNA, 19 nt, Human
gucugaaggcuggguucug

SEQ ID NO: 1800849 - RNA, 20 nt, Human
gucucuuuaaugucacaggc

SEQ ID NO: 1800850 - RNA, 19 nt, Human
gucucuuuaaugucacagg

SEQ ID NO: 1800851 - RNA, 18 nt, Human
gucucuuuaaugucacag

SEQ ID NO: 1800852 - RNA, 16 nt, Human
aacucuguuacacuuu

SEQ ID NO: 1800853 - RNA, 15 nt, Human
aacugaacauuccag

SEQ ID NO: 1800854 - RNA, 14 nt, Human
aacugaacucugac

SEQ ID NO: 1800855 - RNA, 17 nt, Human
gugaguccuggcauggg

SEQ ID NO: 1800856 - RNA, 19 nt, Human
gugaguacuacaguccucc

SEQ ID NO: 1800857 - RNA, 21 nt, Human
gugaguacuacaguccuccca

SEQ ID NO: 1800858 - RNA, 15 nt, Human
gugagucgaggacag

SEQ ID NO: 1800859 - RNA, 20 nt, Human
gugaguccuggcaugggaau

SEQ ID NO: 1800860 - RNA, 16 nt, Human
gugagaggggaacaga

SEQ ID NO: 1800861 - RNA, 13 nt, Human
gugagagcugggu

SEQ ID NO: 1800862 - RNA, 12 nt, Human
gugagacagacu

SEQ ID NO: 1800863 - RNA, 21 nt, Human
gugagcacuaaggugugcucu

SEQ ID NO: 1800864 - RNA, 15 nt, Human
gugagcaggcuguga

SEQ ID NO: 1800865 - RNA, 17 nt, Human
gugaguacuacaguccu

SEQ ID NO: 1800866 - RNA, 12 nt, Human
gugaccccaggu

SEQ ID NO: 1800867 - RNA, 12 nt, Human
gugagagcuggg

SEQ ID NO: 1800868 - RNA, 23 nt, Human
gugaagacaaugacuuacuguac

SEQ ID NO: 1800869 - RNA, 14 nt, Human
gugaagugaagaca

SEQ ID NO: 1800870 - RNA, 19 nt, Human
gugacagaggcagccccau

SEQ ID NO: 1800871 - RNA, 18 nt, Human
gugacagaggcagcccca

SEQ ID NO: 1800872 - RNA, 16 nt, Human
gugacagaggcagccc

SEQ ID NO: 1800873 - RNA, 14 nt, Human
gugacaugucuuuu

SEQ ID NO: 1800874 - RNA, 17 nt, Human
gugaccaaugaugguca

SEQ ID NO: 1800875 - RNA, 18 nt, Human
gugaccauguuuuguuua

SEQ ID NO: 1800876 - RNA, 18 nt, Human
gugaccagcaccaucucu

SEQ ID NO: 1800877 - RNA, 21 nt, Human
gugaccagcaccaucucuccu

SEQ ID NO: 1800878 - RNA, 19 nt, Human
cugccuguucagcuccagc

SEQ ID NO: 1800879 - RNA, 20 nt, Human
cugccuguugggccaggagc

SEQ ID NO: 1800880 - RNA, 18 nt, Human
cugccuguucagcuccag

SEQ ID NO: 1800881 - RNA, 17 nt, Human
cugccuguucagcucca

SEQ ID NO: 1800882 - RNA, 13 nt, Human
cugccuccucuuc

SEQ ID NO: 1800883 - RNA, 14 nt, Human
cugccuccucuuca

SEQ ID NO: 1800884 - RNA, 15 nt, Human
cugccuccucuucaa

SEQ ID NO: 1800885 - RNA, 24 nt, Human
cugccuccucuucaacugaccagc

SEQ ID NO: 1800886 - RNA, 23 nt, Human
cugccucucccaucacuucccua

SEQ ID NO: 1800887 - RNA, 15 nt, Human
cugccucucccauca

SEQ ID NO: 1800888 - RNA, 22 nt, Human
cugccucucccaucacuucccu

SEQ ID NO: 1800889 - RNA, 20 nt, Human
cugaucugaugcaagcaaga

SEQ ID NO: 1800890 - RNA, 18 nt, Human
cugcugacuguuuucucu

SEQ ID NO: 1800891 - RNA, 21 nt, Human
cugcugacuguuuucucuuga

SEQ ID NO: 1800892 - RNA, 23 nt, Human
cugccuguugggccaggagccuc

SEQ ID NO: 1800893 - RNA, 21 nt, Human
cugccuguugggccaggagcc

SEQ ID NO: 1800894 - RNA, 22 nt, Human
cugccuguugggccaggagccu

SEQ ID NO: 1800895 - RNA, 20 nt, Human
cugcuuuugucuaugggacu

SEQ ID NO: 1800896 - RNA, 22 nt, Human
cugcuucaaggauccugagcca

SEQ ID NO: 1800897 - RNA, 23 nt, Human
cugcuucaaggauccugagccag

SEQ ID NO: 1800898 - RNA, 19 nt, Human
cugcuucaaauauuucccu

SEQ ID NO: 1800899 - RNA, 12 nt, Human
cugcuucaagga

SEQ ID NO: 1800900 - RNA, 13 nt, Human
cugcuucaaggau

SEQ ID NO: 1800901 - RNA, 21 nt, Human
cugcuucaaggauccugagcc

SEQ ID NO: 1800902 - RNA, 14 nt, Human
cugcuucaaauauu

SEQ ID NO: 1800903 - RNA, 21 nt, Human
cugcuuuugucuaugggacuc

SEQ ID NO: 1800904 - RNA, 19 nt, Human
cugcuuuuuaaagaaugcu

SEQ ID NO: 1800905 - RNA, 14 nt, Human
cuggaagcacagcu

SEQ ID NO: 1800906 - RNA, 14 nt, Human
cuggagaaaaugga

SEQ ID NO: 1800907 - RNA, 20 nt, Human
cuggguucacugcaaccucc

SEQ ID NO: 1800908 - RNA, 18 nt, Human
cuggguucacugcaaccu

SEQ ID NO: 1800909 - RNA, 15 nt, Human
cuggguucacugcaa

SEQ ID NO: 1800910 - RNA, 15 nt, Human
cuggggccaggcugg

SEQ ID NO: 1800911 - RNA, 12 nt, Human
cugggccagaau

SEQ ID NO: 1800912 - RNA, 14 nt, Human
cugggccagaauuu

SEQ ID NO: 1800913 - RNA, 20 nt, Human
cugggcaccggggccucgga

SEQ ID NO: 1800914 - RNA, 12 nt, Human
cugggcagaagg

SEQ ID NO: 1800915 - RNA, 15 nt, Human
cugggcagaaggaag

SEQ ID NO: 1800916 - RNA, 14 nt, Human
cuggccuagcauac

SEQ ID NO: 1800917 - RNA, 15 nt, Human
cuggcccugcccugg

SEQ ID NO: 1800918 - RNA, 16 nt, Human
cuggccgggagccuga

SEQ ID NO: 1800919 - RNA, 22 nt, Human
cuggccgggaccccgagccugg

SEQ ID NO: 1800920 - RNA, 11 nt, Human
cuggcccugcc

SEQ ID NO: 1800921 - RNA, 13 nt, Human
cuggcccugcccu

SEQ ID NO: 1800922 - RNA, 14 nt, Human
cuggcccugcccug

SEQ ID NO: 1800923 - RNA, 22 nt, Human
cuggccccucagggucccuggu

SEQ ID NO: 1800924 - RNA, 11 nt, Human
cugggacacag

SEQ ID NO: 1800925 - RNA, 17 nt, Human
cuggcagaguugaagac

SEQ ID NO: 1800926 - RNA, 18 nt, Human
cuggcagaguugaagaca

SEQ ID NO: 1800927 - RNA, 14 nt, Human
cuggcagaggaggg

SEQ ID NO: 1800928 - RNA, 19 nt, Human
cuggcagaguugaagacag

SEQ ID NO: 1800929 - RNA, 11 nt, Human
cuggcagccca

SEQ ID NO: 1800930 - RNA, 12 nt, Human
cuggcagccccu

SEQ ID NO: 1800931 - RNA, 21 nt, Human
cuggcagccgugccuucagcu

SEQ ID NO: 1800932 - RNA, 22 nt, Human
cuggcagccgugccuucagcuc

SEQ ID NO: 1800933 - RNA, 19 nt, Human
cuggcagccgugccuucag

SEQ ID NO: 1800934 - RNA, 20 nt, Human
cuggcagccgugccuucagc

SEQ ID NO: 1800935 - RNA, 13 nt, Human
cuggcagccccug

SEQ ID NO: 1800936 - RNA, 14 nt, Human
cuuaaaacaacacu

SEQ ID NO: 1800937 - RNA, 17 nt, Human
cuuacaagccagcugga

SEQ ID NO: 1800938 - RNA, 16 nt, Human
cuuacaagccagcugg

SEQ ID NO: 1800939 - RNA, 21 nt, Human
cuuacauuagcaguuugcuuu

SEQ ID NO: 1800940 - RNA, 22 nt, Human
cuuacauuagcaguuugcuuug

SEQ ID NO: 1800941 - RNA, 20 nt, Human
cuuacauuuuacuuuuuccu

SEQ ID NO: 1800942 - RNA, 15 nt, Human
cuuaccagcagagca

SEQ ID NO: 1800943 - RNA, 22 nt, Human
cuguuggcugggggccucagug

SEQ ID NO: 1800944 - RNA, 19 nt, Human
cuguuggcugggggccuca

SEQ ID NO: 1800945 - RNA, 14 nt, Human
cuguuggcuggggg

SEQ ID NO: 1800946 - RNA, 12 nt, Human
cuguuuaagaga

SEQ ID NO: 1800947 - RNA, 14 nt, Human
cuguuuaagagaca

SEQ ID NO: 1800948 - RNA, 21 nt, Human
cuuaaaaaugguuuaaauggu

SEQ ID NO: 1800949 - RNA, 22 nt, Human
cuuagcucauucuccuuguguu

SEQ ID NO: 1800950 - RNA, 16 nt, Human
cuuaccagcagagcac

SEQ ID NO: 1800951 - RNA, 13 nt, Human
cuuagcugggaga

SEQ ID NO: 1800952 - RNA, 23 nt, Human
cuuagcucauucuccuuguguua

SEQ ID NO: 1800953 - RNA, 15 nt, Human
cuuaggaagaauuuu

SEQ ID NO: 1800954 - RNA, 19 nt, Human
cuuagggaaggauacaaaa

SEQ ID NO: 1800955 - RNA, 21 nt, Human
cuuagggaaggauacaaaagc

SEQ ID NO: 1800956 - RNA, 21 nt, Human
cugugcugcccugcccaccug

SEQ ID NO: 1800957 - RNA, 17 nt, Human
cugugucagcauagaag

SEQ ID NO: 1800958 - RNA, 19 nt, Human
cugugucagcauagaagua

SEQ ID NO: 1800959 - RNA, 15 nt, Human
cugugcugcccugcc

SEQ ID NO: 1800960 - RNA, 17 nt, Human
cugugcugcccugccca

SEQ ID NO: 1800961 - RNA, 18 nt, Human
cugugcugcccugcccac

SEQ ID NO: 1800962 - RNA, 19 nt, Human
cugugcugcccugcccacc

SEQ ID NO: 1800963 - RNA, 12 nt, Human
cugugcugcccu

SEQ ID NO: 1800964 - RNA, 13 nt, Human
cugugcugcccug

SEQ ID NO: 1800965 - RNA, 14 nt, Human
cugugcugcccugc

SEQ ID NO: 1800966 - RNA, 16 nt, Human
cugucgcccagucugg

SEQ ID NO: 1800967 - RNA, 15 nt, Human
cugucgcccagucug

SEQ ID NO: 1800968 - RNA, 19 nt, Human
cugucaauuacaggaagua

SEQ ID NO: 1800969 - RNA, 20 nt, Human
cugucaauuacaggaaguac

SEQ ID NO: 1800970 - RNA, 23 nt, Human
cugucaauuacaggaaguacugg

SEQ ID NO: 1800971 - RNA, 21 nt, Human
cuguccugggagugagcuggu

SEQ ID NO: 1800972 - RNA, 13 nt, Human
cuguagaguggga

SEQ ID NO: 1800973 - RNA, 19 nt, Human
cuguagaaaagggaacuga

SEQ ID NO: 1800974 - RNA, 22 nt, Human
cuggugacaugucuuuucuugc

SEQ ID NO: 1800975 - RNA, 13 nt, Human
cugguuuccugcc

SEQ ID NO: 1800976 - RNA, 14 nt, Human
cugguuuccugccc

SEQ ID NO: 1800977 - RNA, 16 nt, Human
cugguuuccugcccug

SEQ ID NO: 1800978 - RNA, 16 nt, Human
cuuucuacccagcgag

SEQ ID NO: 1800979 - RNA, 15 nt, Human
cuuucuacccagcga

SEQ ID NO: 1800980 - RNA, 18 nt, Human
cuuugacgccaucccagc

SEQ ID NO: 1800981 - RNA, 16 nt, Human
cuuugacgccauccca

SEQ ID NO: 1800982 - RNA, 17 nt, Human
cuuugacgccaucccag

SEQ ID NO: 1800983 - RNA, 22 nt, Human
cuuuguauucucuccuguaccu

SEQ ID NO: 1800984 - RNA, 21 nt, Human
cuuuuauaaacuuuaccuuuu

SEQ ID NO: 1800985 - RNA, 20 nt, Human
cuuuuauaaacuuuaccuuu

SEQ ID NO: 1800986 - RNA, 14 nt, Human
cuuuguaaugaaaa

SEQ ID NO: 1800987 - RNA, 15 nt, Human
cuuuguaaugaaaac

SEQ ID NO: 1800988 - RNA, 16 nt, Human
cuuuguaaugaaaacc

SEQ ID NO: 1800989 - RNA, 12 nt, Human
cuuuguaugcac

SEQ ID NO: 1800990 - RNA, 17 nt, Human
cuuuguauucucuccug

SEQ ID NO: 1800991 - RNA, 14 nt, Human
cuuucacccuuuuc

SEQ ID NO: 1800992 - RNA, 15 nt, Human
cuuucacccuuuucu

SEQ ID NO: 1800993 - RNA, 20 nt, Human
cuuucacccuuuucuguuug

SEQ ID NO: 1800994 - RNA, 23 nt, Human
cuuuaaugucacaggcaggucca

SEQ ID NO: 1800995 - RNA, 19 nt, Human
cuuggugucgggcaugaca

SEQ ID NO: 1800996 - RNA, 20 nt, Human
cuuggugucgggcaugacac

SEQ ID NO: 1800997 - RNA, 13 nt, Human
cuugucuuuggac

SEQ ID NO: 1800998 - RNA, 15 nt, Human
cuugucuuuggaccc

SEQ ID NO: 1800999 - RNA, 18 nt, Human
cuugucuuuggacccuga

SEQ ID NO: 1801000 - RNA, 19 nt, Human
cuugucuuuggacccugag

SEQ ID NO: 1801001 - RNA, 23 nt, Human
cuuggguucaagugauucuccug

SEQ ID NO: 1801002 - RNA, 22 nt, Human
cuugguagaagcccuucuaccu

SEQ ID NO: 1801003 - RNA, 14 nt, Human
cuugguccugcugc

SEQ ID NO: 1801004 - RNA, 16 nt, Human
cuuggucugugagaug

SEQ ID NO: 1801005 - RNA, 19 nt, Human
cuuggucugugagaugcua

SEQ ID NO: 1801006 - RNA, 13 nt, Human
cuucucacauuua

SEQ ID NO: 1801007 - RNA, 20 nt, Human
cuucucacauuuauauuuuu

SEQ ID NO: 1801008 - RNA, 22 nt, Human
cuuccucugaggcugaaauuca

SEQ ID NO: 1801009 - RNA, 22 nt, Human
cuuccucuuuccaucuacccuc

SEQ ID NO: 1801010 - RNA, 16 nt, Human
cuuccucugaggcuga

SEQ ID NO: 1801011 - RNA, 21 nt, Human
cuuccucuuuccaucuacccu

SEQ ID NO: 1801012 - RNA, 13 nt, Human
cuuccucuccacu

SEQ ID NO: 1801013 - RNA, 14 nt, Human
cuuccucuccacug

SEQ ID NO: 1801014 - RNA, 15 nt, Human
cuuccucuccacugc

SEQ ID NO: 1801015 - RNA, 14 nt, Human
cuuccucugagccu

SEQ ID NO: 1801016 - RNA, 15 nt, Human
cuuccucugagccuu

SEQ ID NO: 1801017 - RNA, 13 nt, Human
cuuccuccuggug

SEQ ID NO: 1801018 - RNA, 13 nt, Human
cuucuucagagac

SEQ ID NO: 1801019 - RNA, 14 nt, Human
cuucuucagagacu

SEQ ID NO: 1801020 - RNA, 18 nt, Human
cuucuucagagacuccug

SEQ ID NO: 1801021 - RNA, 23 nt, Human
cuuggauuguccccgacccuugc

SEQ ID NO: 1801022 - RNA, 24 nt, Human
cuuggauuguccccgacccuugcc

SEQ ID NO: 1801023 - RNA, 12 nt, Human
cuugcaaaguau

SEQ ID NO: 1801024 - RNA, 12 nt, Human
cuugauucauaa

SEQ ID NO: 1801025 - RNA, 18 nt, Human
cuugaauuguaaggaaug

SEQ ID NO: 1801026 - RNA, 16 nt, Human
cuugacaucaacugca

SEQ ID NO: 1801027 - RNA, 22 nt, Human
cuugauauccucuuugagugaa

SEQ ID NO: 1801028 - RNA, 17 nt, Human
cuugauauccucuuuga

SEQ ID NO: 1801029 - RNA, 18 nt, Human
cuugauguguuaucucuu

SEQ ID NO: 1801030 - RNA, 12 nt, Human
gaaaaugugugu

SEQ ID NO: 1801031 - RNA, 15 nt, Human
gaaaaugugugugug

SEQ ID NO: 1801032 - RNA, 14 nt, Human
gaaaagaauagaag

SEQ ID NO: 1801033 - RNA, 19 nt, Human
gaaaacuuguauuaugugu

SEQ ID NO: 1801034 - RNA, 22 nt, Human
gaaaacuuguauuauguguguu

SEQ ID NO: 1801035 - RNA, 23 nt, Human
gaaaagaaaaaugagccuggcaa

SEQ ID NO: 1801036 - RNA, 21 nt, Human
gaaaacuuuaugcuaagugaa

SEQ ID NO: 1801037 - RNA, 13 nt, Human
gaaagggcccaga

SEQ ID NO: 1801038 - RNA, 20 nt, Human
gaaagaacgcugauuuaaag

SEQ ID NO: 1801039 - RNA, 16 nt, Human
gaaaggcuccaggagc

SEQ ID NO: 1801040 - RNA, 13 nt, Human
gaaaggcuccagg

SEQ ID NO: 1801041 - RNA, 14 nt, Human
gaaaggcuccagga

SEQ ID NO: 1801042 - RNA, 15 nt, Human
gaaaggcuccaggag

SEQ ID NO: 1801043 - RNA, 17 nt, Human
gaaacuggauuaaacuu

SEQ ID NO: 1801044 - RNA, 13 nt, Human
gaaacuggauuaa

SEQ ID NO: 1801045 - RNA, 18 nt, Human
gaaagaaaaucaggcugg

SEQ ID NO: 1801046 - RNA, 16 nt, Human
gaaagggcccagagag

SEQ ID NO: 1801047 - RNA, 15 nt, Human
gaaagggcccagaga

SEQ ID NO: 1801048 - RNA, 17 nt, Human
gaaaugaaagcagggac

SEQ ID NO: 1801049 - RNA, 11 nt, Human
gaaaugaaaaa

SEQ ID NO: 1801050 - RNA, 17 nt, Human
gaacacauaauucagga

SEQ ID NO: 1801051 - RNA, 20 nt, Human
gaacacauaauucaggaagc

SEQ ID NO: 1801052 - RNA, 16 nt, Human
gaagacucauucuucu

SEQ ID NO: 1801053 - RNA, 18 nt, Human
gaagacucauucuucugu

SEQ ID NO: 1801054 - RNA, 17 nt, Human
gaagacucauucuucug

SEQ ID NO: 1801055 - RNA, 14 nt, Human
gaagcacagcuuca

SEQ ID NO: 1801056 - RNA, 13 nt, Human
gaagcacagcuuc

SEQ ID NO: 1801057 - RNA, 14 nt, Human
gaagcacaugccuc

SEQ ID NO: 1801058 - RNA, 22 nt, Human
gaagcacaugccucucucaggc

SEQ ID NO: 1801059 - RNA, 16 nt, Human
gaagcaccauaacuuu

SEQ ID NO: 1801060 - RNA, 12 nt, Human
gaagcagcucuu

SEQ ID NO: 1801061 - RNA, 14 nt, Human
gaagacagcucuua

SEQ ID NO: 1801062 - RNA, 15 nt, Human
gaagacagcucuuau

SEQ ID NO: 1801063 - RNA, 16 nt, Human
gaagacacugaugggc

SEQ ID NO: 1801064 - RNA, 21 nt, Human
gaagacacugaugggcaaccc

SEQ ID NO: 1801065 - RNA, 13 nt, Human
gaagacagagcua

SEQ ID NO: 1801066 - RNA, 15 nt, Human
gaagacagagcuaca

SEQ ID NO: 1801067 - RNA, 12 nt, Human
gaagacagcucu

SEQ ID NO: 1801068 - RNA, 13 nt, Human
gaagacagcucuu

SEQ ID NO: 1801069 - RNA, 13 nt, Human
gaacuccuggccu

SEQ ID NO: 1801070 - RNA, 14 nt, Human
gaacuccugaccuc

SEQ ID NO: 1801071 - RNA, 19 nt, Human
gaacccgggaggcagaggu

SEQ ID NO: 1801072 - RNA, 17 nt, Human
gaacccgggaggcagag

SEQ ID NO: 1801073 - RNA, 14 nt, Human
gaacuccuggccuc

SEQ ID NO: 1801074 - RNA, 15 nt, Human
gaacuccuggccuca

SEQ ID NO: 1801075 - RNA, 23 nt, Human
gaaccaccacacccagcccacuu

SEQ ID NO: 1801076 - RNA, 22 nt, Human
gaaccauggucggaaaacaugc

SEQ ID NO: 1801077 - RNA, 22 nt, Human
gaaccaccacacccagcccacu

SEQ ID NO: 1801078 - RNA, 21 nt, Human
gaaccaccacacccagcccac

SEQ ID NO: 1801079 - RNA, 20 nt, Human
gaaccaccacacccagccca

SEQ ID NO: 1801080 - RNA, 18 nt, Human
gaaccaccacacccagcc

SEQ ID NO: 1801081 - RNA, 12 nt, Human
gacgcugugcug

SEQ ID NO: 1801082 - RNA, 13 nt, Human
gacgcugugcugc

SEQ ID NO: 1801083 - RNA, 15 nt, Human
gacgcugugcugccc

SEQ ID NO: 1801084 - RNA, 22 nt, Human
gacugucucaagagggcacugg

SEQ ID NO: 1801085 - RNA, 23 nt, Human
gacugucucaagagggcacuggu

SEQ ID NO: 1801086 - RNA, 21 nt, Human
gacugucucaagagggcacug

SEQ ID NO: 1801087 - RNA, 14 nt, Human
gacugugugcucag

SEQ ID NO: 1801088 - RNA, 16 nt, Human
gacugugugcucagga

SEQ ID NO: 1801089 - RNA, 17 nt, Human
gacugugugcucaggag

SEQ ID NO: 1801090 - RNA, 20 nt, Human
gacugugugcucaggagccc

SEQ ID NO: 1801091 - RNA, 16 nt, Human
gacuguacuccuccca

SEQ ID NO: 1801092 - RNA, 17 nt, Human
gacuguacuccucccag

SEQ ID NO: 1801093 - RNA, 22 nt, Human
gacuguacaaaguagaagucuu

SEQ ID NO: 1801094 - RNA, 17 nt, Human
gacucaaugcacugaca

SEQ ID NO: 1801095 - RNA, 14 nt, Human
gacucaaugcacug

SEQ ID NO: 1801096 - RNA, 22 nt, Human
gacuuuguuaguuucuccaagc

SEQ ID NO: 1801097 - RNA, 23 nt, Human
gacuuuucuguccgagcuuugaa

SEQ ID NO: 1801098 - RNA, 21 nt, Human
gacuuuucuguccgagcuuug

SEQ ID NO: 1801099 - RNA, 16 nt, Human
gacuguuuucucuuga

SEQ ID NO: 1801100 - RNA, 18 nt, Human
gacuguuuucucuugaga

SEQ ID NO: 1801101 - RNA, 14 nt, Human
gacuuuggaaagac

SEQ ID NO: 1801102 - RNA, 14 nt, Human
gacuuuggaaagag

SEQ ID NO: 1801103 - RNA, 17 nt, Human
gagaagcggcuggcagc

SEQ ID NO: 1801104 - RNA, 13 nt, Human
gacccggcugcgu

SEQ ID NO: 1801105 - RNA, 12 nt, Human
gacccggcugcg

SEQ ID NO: 1801106 - RNA, 21 nt, Human
gaccccuggcuuuucacugcu

SEQ ID NO: 1801107 - RNA, 22 nt, Human
gaccccuggcuuuucacugcug

SEQ ID NO: 1801108 - RNA, 16 nt, Human
gacccuauugcugcuu

SEQ ID NO: 1801109 - RNA, 16 nt, Human
gaccaucccugaaggc

SEQ ID NO: 1801110 - RNA, 17 nt, Human
gaccaucccugaaggcc

SEQ ID NO: 1801111 - RNA, 16 nt, Human
gaccauucuccaccug

SEQ ID NO: 1801112 - RNA, 13 nt, Human
gaccccuggcuuu

SEQ ID NO: 1801113 - RNA, 17 nt, Human
gaccauucuccaccugc

SEQ ID NO: 1801114 - RNA, 14 nt, Human
gaccaucccugaag

SEQ ID NO: 1801115 - RNA, 15 nt, Human
gaccaucccugaagg

SEQ ID NO: 1801116 - RNA, 20 nt, Human
gacaguauggcagcuuuccu

SEQ ID NO: 1801117 - RNA, 17 nt, Human
gacaggguuucaccaug

SEQ ID NO: 1801118 - RNA, 14 nt, Human
gacagaaagcagaa

SEQ ID NO: 1801119 - RNA, 20 nt, Human
gacagaaagcagaacaguga

SEQ ID NO: 1801120 - RNA, 15 nt, Human
gacagcuccuucugu

SEQ ID NO: 1801121 - RNA, 14 nt, Human
gacagcuccuucug

SEQ ID NO: 1801122 - RNA, 13 nt, Human
gacagcuccuucu

SEQ ID NO: 1801123 - RNA, 11 nt, Human
gacagccuggc

SEQ ID NO: 1801124 - RNA, 12 nt, Human
gacagccuggca

SEQ ID NO: 1801125 - RNA, 16 nt, Human
gacagcuccuucuguc

SEQ ID NO: 1801126 - RNA, 14 nt, Human
gaggcugccucucc

SEQ ID NO: 1801127 - RNA, 12 nt, Human
gaggggaacaga

SEQ ID NO: 1801128 - RNA, 12 nt, Human
gagggcuccaga

SEQ ID NO: 1801129 - RNA, 13 nt, Human
gagggcuccagac

SEQ ID NO: 1801130 - RNA, 14 nt, Human
gagggcuccagaca

SEQ ID NO: 1801131 - RNA, 15 nt, Human
gagggcuccagacac

SEQ ID NO: 1801132 - RNA, 12 nt, Human
gaggcucugccc

SEQ ID NO: 1801133 - RNA, 13 nt, Human
gaggcucugcccu

SEQ ID NO: 1801134 - RNA, 14 nt, Human
gaggcucugcccuu

SEQ ID NO: 1801135 - RNA, 14 nt, Human
gaggcucuggagcc

SEQ ID NO: 1801136 - RNA, 19 nt, Human
gaggcucuggagcccacug

SEQ ID NO: 1801137 - RNA, 15 nt, Human
gaggcucugcccuug

SEQ ID NO: 1801138 - RNA, 17 nt, Human
gaggcucugcccuuggu

SEQ ID NO: 1801139 - RNA, 20 nt, Human
gaggccagagacacaagccu

SEQ ID NO: 1801140 - RNA, 18 nt, Human
gagugcagugagccgaga

SEQ ID NO: 1801141 - RNA, 13 nt, Human
gagugcagugagc

SEQ ID NO: 1801142 - RNA, 22 nt, Human
gaguugauacuacaguuuguua

SEQ ID NO: 1801143 - RNA, 21 nt, Human
gaguugauagcacagacccug

SEQ ID NO: 1801144 - RNA, 19 nt, Human
gaguugauacuacaguuug

SEQ ID NO: 1801145 - RNA, 18 nt, Human
gagugccuuacacaaugg

SEQ ID NO: 1801146 - RNA, 18 nt, Human
gagugagacucugucuca

SEQ ID NO: 1801147 - RNA, 14 nt, Human
gagugagacucugu

SEQ ID NO: 1801148 - RNA, 14 nt, Human
gagugagacagacu

SEQ ID NO: 1801149 - RNA, 18 nt, Human
gagucagaaguuucugcc

SEQ ID NO: 1801150 - RNA, 17 nt, Human
gaggugggauccuccag

SEQ ID NO: 1801151 - RNA, 14 nt, Human
gagucacuggaaca

SEQ ID NO: 1801152 - RNA, 21 nt, Human
gagucacuggaacacuaauga

SEQ ID NO: 1801153 - RNA, 15 nt, Human
gaggugggauccucc

SEQ ID NO: 1801154 - RNA, 16 nt, Human
gaggugggauccucca

SEQ ID NO: 1801155 - RNA, 13 nt, Human
gaggugggauccu

SEQ ID NO: 1801156 - RNA, 17 nt, Human
gagcaucaggccaggcc

SEQ ID NO: 1801157 - RNA, 12 nt, Human
gagccuuccagg

SEQ ID NO: 1801158 - RNA, 13 nt, Human
gagccuuccaggg

SEQ ID NO: 1801159 - RNA, 15 nt, Human
gagcgacagugagac

SEQ ID NO: 1801160 - RNA, 13 nt, Human
gagcgacagugag

SEQ ID NO: 1801161 - RNA, 19 nt, Human
gagcugccuguucagcucc

SEQ ID NO: 1801162 - RNA, 16 nt, Human
gagcugccuguucagc

SEQ ID NO: 1801163 - RNA, 15 nt, Human
gagcugccuguucag

SEQ ID NO: 1801164 - RNA, 17 nt, Human
gagcggagaaaggaagg

SEQ ID NO: 1801165 - RNA, 20 nt, Human
gagcugccuguucagcucca

SEQ ID NO: 1801166 - RNA, 20 nt, Human
gagcaucaggccaggcccuc

SEQ ID NO: 1801167 - RNA, 22 nt, Human
gagcaucaggccaggcccucug

SEQ ID NO: 1801168 - RNA, 19 nt, Human
gauguaauuuuguguaaga

SEQ ID NO: 1801169 - RNA, 13 nt, Human
gauguaauuuugu

SEQ ID NO: 1801170 - RNA, 18 nt, Human
gaugucccaacuuguaaa

SEQ ID NO: 1801171 - RNA, 17 nt, Human
gaugucccaacuuguaa

SEQ ID NO: 1801172 - RNA, 13 nt, Human
gauguaaagaugu

SEQ ID NO: 1801173 - RNA, 14 nt, Human
gauguaaagauguu

SEQ ID NO: 1801174 - RNA, 22 nt, Human
gauggaaaaaccacccccaaau

SEQ ID NO: 1801175 - RNA, 23 nt, Human
gauggaggaaaaccaagccgugg

SEQ ID NO: 1801176 - RNA, 16 nt, Human
gaugcuuguacauaau

SEQ ID NO: 1801177 - RNA, 14 nt, Human
gaugcuuguacaua

SEQ ID NO: 1801178 - RNA, 23 nt, Human
gaugcuucucacugccaugccag

SEQ ID NO: 1801179 - RNA, 14 nt, Human
gaugaugacuaugg

SEQ ID NO: 1801180 - RNA, 13 nt, Human
gaugaggcaaccc

SEQ ID NO: 1801181 - RNA, 18 nt, Human
gaucuggguucacugcaa

SEQ ID NO: 1801182 - RNA, 22 nt, Human
gaguugauagcacagacccugc

SEQ ID NO: 1801183 - RNA, 20 nt, Human
gaucuggguucacugcaacc

SEQ ID NO: 1801184 - RNA, 13 nt, Human
gauuucacucucc

SEQ ID NO: 1801185 - RNA, 16 nt, Human
gauuucacucuccuug

SEQ ID NO: 1801186 - RNA, 15 nt, Human
gauuucagcucacug

SEQ ID NO: 1801187 - RNA, 17 nt, Human
gauuucagcucacugca

SEQ ID NO: 1801188 - RNA, 20 nt, Human
gauuucagcucacugcaacc

SEQ ID NO: 1801189 - RNA, 17 nt, Human
gauuucacucuccuugg

SEQ ID NO: 1801190 - RNA, 18 nt, Human
gauuucacucuccuuggu

SEQ ID NO: 1801191 - RNA, 22 nt, Human
gauuuuuuuuuccuucagugcc

SEQ ID NO: 1801192 - RNA, 23 nt, Human
gauuuuuuuuuccuucagugccu

SEQ ID NO: 1801193 - RNA, 21 nt, Human
gauucuccugccucagccucc

SEQ ID NO: 1801194 - RNA, 20 nt, Human
gauucuccugccucagccuc

SEQ ID NO: 1801195 - RNA, 19 nt, Human
gauucuccugccucagccu

SEQ ID NO: 1801196 - RNA, 21 nt, Human
gauucuucugcuucagccucc

SEQ ID NO: 1801197 - RNA, 23 nt, Human
gauucuuauggacaaugacccag

SEQ ID NO: 1801198 - RNA, 23 nt, Human
gauuuaacagaaauguacagcaa

SEQ ID NO: 1801199 - RNA, 20 nt, Human
gauuuaacagaaauguacag

SEQ ID NO: 1801200 - RNA, 18 nt, Human
gcaacccccagccugcua

SEQ ID NO: 1801201 - RNA, 16 nt, Human
gcaaaagaugcuucuc

SEQ ID NO: 1801202 - RNA, 15 nt, Human
gcaaaagaugcuucu

SEQ ID NO: 1801203 - RNA, 18 nt, Human
gcaaccuccgccucuugg

SEQ ID NO: 1801204 - RNA, 22 nt, Human
gcaacccuggugaccagcacca

SEQ ID NO: 1801205 - RNA, 19 nt, Human
gcacacaccagagcccacc

SEQ ID NO: 1801206 - RNA, 18 nt, Human
gcacacaccagagcccac

SEQ ID NO: 1801207 - RNA, 17 nt, Human
gcacacaccagagccca

SEQ ID NO: 1801208 - RNA, 16 nt, Human
gcacacaccagagccc

SEQ ID NO: 1801209 - RNA, 15 nt, Human
gcacacaccagagcc

SEQ ID NO: 1801210 - RNA, 14 nt, Human
gcacacaccagagc

SEQ ID NO: 1801211 - RNA, 12 nt, Human
gcacacaccaga

SEQ ID NO: 1801212 - RNA, 21 nt, Human
gcaauaaagcagcguuucuau

SEQ ID NO: 1801213 - RNA, 11 nt, Human
gcaauaaagca

SEQ ID NO: 1801214 - RNA, 23 nt, Human
gcacacagcacgggggccaagga

SEQ ID NO: 1801215 - RNA, 11 nt, Human
gcacacagcac

SEQ ID NO: 1801216 - RNA, 20 nt, Human
gcacacaccagagcccaccu

SEQ ID NO: 1801217 - RNA, 11 nt, Human
gcacacauuuu

SEQ ID NO: 1801218 - RNA, 12 nt, Human
gcacacauuuuu

SEQ ID NO: 1801219 - RNA, 17 nt, Human
gcaccuaccaccacgcc

SEQ ID NO: 1801220 - RNA, 18 nt, Human
gcaccuaccaccacgccc

SEQ ID NO: 1801221 - RNA, 21 nt, Human
gcaccuacaguguacagucuu

SEQ ID NO: 1801222 - RNA, 19 nt, Human
gcaccuacaguguacaguc

SEQ ID NO: 1801223 - RNA, 18 nt, Human
gcaccuacaguguacagu

SEQ ID NO: 1801224 - RNA, 18 nt, Human
gcaccggcuggccuggcc

SEQ ID NO: 1801225 - RNA, 17 nt, Human
gcaccggcuggccuggc

SEQ ID NO: 1801226 - RNA, 15 nt, Human
gcaccggcuggccug

SEQ ID NO: 1801227 - RNA, 16 nt, Human
gcaccggcuggccugg

SEQ ID NO: 1801228 - RNA, 12 nt, Human
gcaccuccugcc

SEQ ID NO: 1801229 - RNA, 22 nt, Human
gcacuauagccuaggugacaga

SEQ ID NO: 1801230 - RNA, 17 nt, Human
gcacuccagccugggug

SEQ ID NO: 1801231 - RNA, 12 nt, Human
gcacuccccugc

SEQ ID NO: 1801232 - RNA, 16 nt, Human
gcauuugaaaauuuug

SEQ ID NO: 1801233 - RNA, 14 nt, Human
gcauuugaaaauuu

SEQ ID NO: 1801234 - RNA, 15 nt, Human
gcauuuaaaagauac

SEQ ID NO: 1801235 - RNA, 12 nt, Human
gcauuuaaaaga

SEQ ID NO: 1801236 - RNA, 14 nt, Human
gccaacuauggccu

SEQ ID NO: 1801237 - RNA, 15 nt, Human
gccaacuauggccug

SEQ ID NO: 1801238 - RNA, 19 nt, Human
gccaacuauggccugugga

SEQ ID NO: 1801239 - RNA, 21 nt, Human
gccaacuuuccccacguuaaa

SEQ ID NO: 1801240 - RNA, 14 nt, Human
gccaagaauucuua

SEQ ID NO: 1801241 - RNA, 18 nt, Human
gccaagaauucuuaaaua

SEQ ID NO: 1801242 - RNA, 20 nt, Human
gcauuguaaaagcauuuugu

SEQ ID NO: 1801243 - RNA, 17 nt, Human
gcaugugaugagaggaa

SEQ ID NO: 1801244 - RNA, 23 nt, Human
gcaugucccuaccgagucucuuc

SEQ ID NO: 1801245 - RNA, 19 nt, Human
gcaugggaaugaaugucag

SEQ ID NO: 1801246 - RNA, 13 nt, Human
gcaugggaaugaa

SEQ ID NO: 1801247 - RNA, 16 nt, Human
gcaugggaaugaaugu

SEQ ID NO: 1801248 - RNA, 14 nt, Human
gcauggccaggugg

SEQ ID NO: 1801249 - RNA, 17 nt, Human
gcauggccagguggcca

SEQ ID NO: 1801250 - RNA, 13 nt, Human
gcauggccaggug

SEQ ID NO: 1801251 - RNA, 23 nt, Human
gcauccuggcacccggccccugc

SEQ ID NO: 1801252 - RNA, 22 nt, Human
gcauccuggcacccggccccug

SEQ ID NO: 1801253 - RNA, 13 nt, Human
gcaucgcaaugua

SEQ ID NO: 1801254 - RNA, 21 nt, Human
gcauccuggcacccggccccu

SEQ ID NO: 1801255 - RNA, 17 nt, Human
gcauccuggcacccggc

SEQ ID NO: 1801256 - RNA, 19 nt, Human
gccaaggccaaaggaagca

SEQ ID NO: 1801257 - RNA, 17 nt, Human
gccaaggccaaaggaag

SEQ ID NO: 1801258 - RNA, 11 nt, Human
gccaaggccaa

SEQ ID NO: 1801259 - RNA, 22 nt, Human
gccaagcaccuagccucgcucu

SEQ ID NO: 1801260 - RNA, 15 nt, Human
gcauaaaaauuagcc

SEQ ID NO: 1801261 - RNA, 14 nt, Human
gcaguugccaguca

SEQ ID NO: 1801262 - RNA, 23 nt, Human
gcaguugccagucaccccggcca

SEQ ID NO: 1801263 - RNA, 16 nt, Human
gcauaccacuuuuguu

SEQ ID NO: 1801264 - RNA, 15 nt, Human
gcauaccacuuuugu

SEQ ID NO: 1801265 - RNA, 21 nt, Human
gcagcuugaggguugggcugg

SEQ ID NO: 1801266 - RNA, 19 nt, Human
gcagcuugaggguugggcu

SEQ ID NO: 1801267 - RNA, 22 nt, Human
gcaggcucgggcuccccagccc

SEQ ID NO: 1801268 - RNA, 12 nt, Human
gcaggcucucag

SEQ ID NO: 1801269 - RNA, 13 nt, Human
gcaggcucucagg

SEQ ID NO: 1801270 - RNA, 14 nt, Human
gcaggcucucaggc

SEQ ID NO: 1801271 - RNA, 15 nt, Human
gcaggcucucaggcc

SEQ ID NO: 1801272 - RNA, 16 nt, Human
gcaggcucucaggcca

SEQ ID NO: 1801273 - RNA, 22 nt, Human
gcagggaaacagcuaaugggac

SEQ ID NO: 1801274 - RNA, 13 nt, Human
gcaggcuggcccu

SEQ ID NO: 1801275 - RNA, 18 nt, Human
gcaggcucucaggccagc

SEQ ID NO: 1801276 - RNA, 17 nt, Human
gcaggcucucaggccag

SEQ ID NO: 1801277 - RNA, 16 nt, Human
gcagcuugaggguugg

SEQ ID NO: 1801278 - RNA, 15 nt, Human
gcagcuuauucacaa

SEQ ID NO: 1801279 - RNA, 20 nt, Human
gcagcugcuuuugucuaugg

SEQ ID NO: 1801280 - RNA, 13 nt, Human
gcagcugcuuuug

SEQ ID NO: 1801281 - RNA, 23 nt, Human
gcagcugcgguccacccaggagc

SEQ ID NO: 1801282 - RNA, 22 nt, Human
gcagcugcgguccacccaggag

SEQ ID NO: 1801283 - RNA, 16 nt, Human
gcacuuuguucuggcu

SEQ ID NO: 1801284 - RNA, 17 nt, Human
gcucugaucauccacug

SEQ ID NO: 1801285 - RNA, 23 nt, Human
gcucugaucauccacugugccau

SEQ ID NO: 1801286 - RNA, 23 nt, Human
gcucugcaagaauugaagcagga

SEQ ID NO: 1801287 - RNA, 11 nt, Human
gcucugcccuu

SEQ ID NO: 1801288 - RNA, 18 nt, Human
gcuccagcucaccagccc

SEQ ID NO: 1801289 - RNA, 19 nt, Human
gcuccacuuggucugugag

SEQ ID NO: 1801290 - RNA, 18 nt, Human
gcuccacuuggucuguga

SEQ ID NO: 1801291 - RNA, 21 nt, Human
gcuccagcucaccagccccag

SEQ ID NO: 1801292 - RNA, 20 nt, Human
gcuccagcucaccagcccca

SEQ ID NO: 1801293 - RNA, 16 nt, Human
gcucccacaggcccuu

SEQ ID NO: 1801294 - RNA, 17 nt, Human
gcucccacaggcccuuc

SEQ ID NO: 1801295 - RNA, 20 nt, Human
gcucccacaggcccuuccuc

SEQ ID NO: 1801296 - RNA, 21 nt, Human
gcucccacaggcccuuccucu

SEQ ID NO: 1801297 - RNA, 22 nt, Human
gcucccacaggcccuuccucuc

SEQ ID NO: 1801298 - RNA, 17 nt, Human
gcucccaggcauucccc

SEQ ID NO: 1801299 - RNA, 12 nt, Human
gcuccugccacc

SEQ ID NO: 1801300 - RNA, 18 nt, Human
gcuccugccaccacgccc

SEQ ID NO: 1801301 - RNA, 21 nt, Human
gcuccugccaccacgcccggc

SEQ ID NO: 1801302 - RNA, 14 nt, Human
gcuccuggcccacu

SEQ ID NO: 1801303 - RNA, 15 nt, Human
gcuccuggcccacug

SEQ ID NO: 1801304 - RNA, 20 nt, Human
gcuccuggcccacugcaucg

SEQ ID NO: 1801305 - RNA, 18 nt, Human
gcuccuggcccacugcau

SEQ ID NO: 1801306 - RNA, 19 nt, Human
gcuccuggcccacugcauc

SEQ ID NO: 1801307 - RNA, 15 nt, Human
gcuccacuuggucug

SEQ ID NO: 1801308 - RNA, 13 nt, Human
gcuaaugggacac

SEQ ID NO: 1801309 - RNA, 15 nt, Human
gcuaaugggacacua

SEQ ID NO: 1801310 - RNA, 23 nt, Human
gcuaagugauccucccaccucag

SEQ ID NO: 1801311 - RNA, 16 nt, Human
gcuaaucagcauucuc

SEQ ID NO: 1801312 - RNA, 17 nt, Human
gcuaaucagcauucuca

SEQ ID NO: 1801313 - RNA, 22 nt, Human
gcuaaucagcauucucacuccu

SEQ ID NO: 1801314 - RNA, 14 nt, Human
gcuaaucagcauuc

SEQ ID NO: 1801315 - RNA, 23 nt, Human
gcgugcacacaccagagcccacc

SEQ ID NO: 1801316 - RNA, 18 nt, Human
gcguuucuaugacacaug

SEQ ID NO: 1801317 - RNA, 20 nt, Human
gcgugcacacaccagagccc

SEQ ID NO: 1801318 - RNA, 22 nt, Human
gcgggaggauguucugggacac

SEQ ID NO: 1801319 - RNA, 21 nt, Human
gcgggaggauguucugggaca

SEQ ID NO: 1801320 - RNA, 20 nt, Human
gcgggaggauguucugggac

SEQ ID NO: 1801321 - RNA, 18 nt, Human
gcuagaacucccuuucaa

SEQ ID NO: 1801322 - RNA, 16 nt, Human
gcuagaacucccuuuc

SEQ ID NO: 1801323 - RNA, 15 nt, Human
gcuagaacucccuuu

SEQ ID NO: 1801324 - RNA, 14 nt, Human
gcuagaacucccuu

SEQ ID NO: 1801325 - RNA, 13 nt, Human
gcuagaacucccu

SEQ ID NO: 1801326 - RNA, 12 nt, Human
gcuagaacuccc

SEQ ID NO: 1801327 - RNA, 20 nt, Human
gcuauucaguaauaacucua

SEQ ID NO: 1801328 - RNA, 14 nt, Human
gcucacugcagccu

SEQ ID NO: 1801329 - RNA, 13 nt, Human
gcucacugcagcc

SEQ ID NO: 1801330 - RNA, 12 nt, Human
gcucacugcagc

SEQ ID NO: 1801331 - RNA, 11 nt, Human
gcucacugcag

SEQ ID NO: 1801332 - RNA, 16 nt, Human
gcucacugcagccuca

SEQ ID NO: 1801333 - RNA, 15 nt, Human
gcucacugcagccuc

SEQ ID NO: 1801334 - RNA, 17 nt, Human
gcucacugcagccucaa

SEQ ID NO: 1801335 - RNA, 16 nt, Human
gcucacugcauccucc

SEQ ID NO: 1801336 - RNA, 17 nt, Human
gcucaggugucccugca

SEQ ID NO: 1801337 - RNA, 16 nt, Human
gcucaggugucccugc

SEQ ID NO: 1801338 - RNA, 14 nt, Human
gcucaggugucccu

SEQ ID NO: 1801339 - RNA, 23 nt, Human
gcucagguggggucacucuggca

SEQ ID NO: 1801340 - RNA, 14 nt, Human
gcucagagagggug

SEQ ID NO: 1801341 - RNA, 20 nt, Human
gcucacugcauccuccgccu

SEQ ID NO: 1801342 - RNA, 13 nt, Human
gcucagagagggu

SEQ ID NO: 1801343 - RNA, 23 nt, Human
gcuaggccuggccagaugcacca

SEQ ID NO: 1801344 - RNA, 17 nt, Human
gcuaggccuggccagau

SEQ ID NO: 1801345 - RNA, 16 nt, Human
gcuaggccuggccaga

SEQ ID NO: 1801346 - RNA, 13 nt, Human
gcuaugcauuuga

SEQ ID NO: 1801347 - RNA, 19 nt, Human
gcuauucaguaauaacucu

SEQ ID NO: 1801348 - RNA, 12 nt, Human
gcuaugcauuug

SEQ ID NO: 1801349 - RNA, 21 nt, Human
gcuagugugguguuuccuggc

SEQ ID NO: 1801350 - RNA, 22 nt, Human
gcuagugugguguuuccuggca

SEQ ID NO: 1801351 - RNA, 15 nt, Human
gccugcccaggcccc

SEQ ID NO: 1801352 - RNA, 22 nt, Human
gccugcccaggccccugccacc

SEQ ID NO: 1801353 - RNA, 22 nt, Human
gccucgaacuggcugcaaaggg

SEQ ID NO: 1801354 - RNA, 20 nt, Human
gccucgaacuggcugcaaag

SEQ ID NO: 1801355 - RNA, 17 nt, Human
gccucuuaugggcuggg

SEQ ID NO: 1801356 - RNA, 18 nt, Human
gccucuuaugggcugggu

SEQ ID NO: 1801357 - RNA, 16 nt, Human
gccucuuaugggcugg

SEQ ID NO: 1801358 - RNA, 14 nt, Human
gccugcccaggccc

SEQ ID NO: 1801359 - RNA, 13 nt, Human
gccugcccaggcc

SEQ ID NO: 1801360 - RNA, 14 nt, Human
gccucuuggguuca

SEQ ID NO: 1801361 - RNA, 21 nt, Human
gccucuuaugggcuggguucu

SEQ ID NO: 1801362 - RNA, 17 nt, Human
gccucccaaagugcugg

SEQ ID NO: 1801363 - RNA, 16 nt, Human
gccucccaaagugcug

SEQ ID NO: 1801364 - RNA, 23 nt, Human
gccuccugugugugcgccuacag

SEQ ID NO: 1801365 - RNA, 19 nt, Human
gccuccugugugugcgccu

SEQ ID NO: 1801366 - RNA, 17 nt, Human
gccucgaacuggcugca

SEQ ID NO: 1801367 - RNA, 12 nt, Human
gccuccauccug

SEQ ID NO: 1801368 - RNA, 15 nt, Human
gcgagcccugguggc

SEQ ID NO: 1801369 - RNA, 17 nt, Human
gcgagcccugguggcag

SEQ ID NO: 1801370 - RNA, 17 nt, Human
gccuugaccauucucca

SEQ ID NO: 1801371 - RNA, 19 nt, Human
gccuugaccauucuccacc

SEQ ID NO: 1801372 - RNA, 20 nt, Human
gccuugaccauucuccaccu

SEQ ID NO: 1801373 - RNA, 21 nt, Human
gccuugaccauucuccaccug

SEQ ID NO: 1801374 - RNA, 21 nt, Human
gccuguugggccaggagccuc

SEQ ID NO: 1801375 - RNA, 20 nt, Human
gccuucggccuccauccuga

SEQ ID NO: 1801376 - RNA, 23 nt, Human
gccuucggccuccauccugaggc

SEQ ID NO: 1801377 - RNA, 21 nt, Human
gccuucggccuccauccugag

SEQ ID NO: 1801378 - RNA, 22 nt, Human
gcgaucuggguucacugcaacc

SEQ ID NO: 1801379 - RNA, 20 nt, Human
gcgcagcauauucaggaagc

SEQ ID NO: 1801380 - RNA, 20 nt, Human
gccuggccugagcugggaug

SEQ ID NO: 1801381 - RNA, 14 nt, Human
gccuggccugagcu

SEQ ID NO: 1801382 - RNA, 18 nt, Human
gccuggccugagcuggga

SEQ ID NO: 1801383 - RNA, 13 nt, Human
gccuggccugagc

SEQ ID NO: 1801384 - RNA, 18 nt, Human
gccugugccucugggacu

SEQ ID NO: 1801385 - RNA, 23 nt, Human
gccuggcuccaaacccucgaggc

SEQ ID NO: 1801386 - RNA, 13 nt, Human
gccuggcucaggu

SEQ ID NO: 1801387 - RNA, 16 nt, Human
gccugugccucuggga

SEQ ID NO: 1801388 - RNA, 17 nt, Human
gccugugccucugggac

SEQ ID NO: 1801389 - RNA, 19 nt, Human
gccuguucccauucuugca

SEQ ID NO: 1801390 - RNA, 23 nt, Human
gccuguucccauucuugcauggc

SEQ ID NO: 1801391 - RNA, 14 nt, Human
gccuguugggccag

SEQ ID NO: 1801392 - RNA, 15 nt, Human
gccuguugggccagg

SEQ ID NO: 1801393 - RNA, 16 nt, Human
gccuguugggccagga

SEQ ID NO: 1801394 - RNA, 18 nt, Human
gccuguugggccaggagc

SEQ ID NO: 1801395 - RNA, 20 nt, Human
gccuguugggccaggagccu

SEQ ID NO: 1801396 - RNA, 16 nt, Human
gcccuaaugcgcaggc

SEQ ID NO: 1801397 - RNA, 17 nt, Human
gcccuaaugcgcaggcu

SEQ ID NO: 1801398 - RNA, 19 nt, Human
gcccuaaugcgcaggcugg

SEQ ID NO: 1801399 - RNA, 20 nt, Human
gcccuaaugcgcaggcuggc

SEQ ID NO: 1801400 - RNA, 23 nt, Human
gcccuaaugcgcaggcuggcccu

SEQ ID NO: 1801401 - RNA, 15 nt, Human
gcccucacccugggg

SEQ ID NO: 1801402 - RNA, 15 nt, Human
gccccugcucuggug

SEQ ID NO: 1801403 - RNA, 20 nt, Human
gccccugccucucugcaggu

SEQ ID NO: 1801404 - RNA, 23 nt, Human
gccccugccucucugcagguccc

SEQ ID NO: 1801405 - RNA, 23 nt, Human
gcccgggcucugccucccaucac

SEQ ID NO: 1801406 - RNA, 16 nt, Human
gccccugccacccugg

SEQ ID NO: 1801407 - RNA, 17 nt, Human
gccccugccacccuggg

SEQ ID NO: 1801408 - RNA, 12 nt, Human
gcccccacuggu

SEQ ID NO: 1801409 - RNA, 20 nt, Human
gcccuuagcagggaaacagc

SEQ ID NO: 1801410 - RNA, 22 nt, Human
gcccuguccugccuaaggcuga

SEQ ID NO: 1801411 - RNA, 18 nt, Human
gcccugcccugguuuccu

SEQ ID NO: 1801412 - RNA, 14 nt, Human
gcccugccuccuuu

SEQ ID NO: 1801413 - RNA, 12 nt, Human
gcccugccuccu

SEQ ID NO: 1801414 - RNA, 13 nt, Human
gcccugccuccuu

SEQ ID NO: 1801415 - RNA, 22 nt, Human
gcccuuagcagggaaacagcua

SEQ ID NO: 1801416 - RNA, 20 nt, Human
gccgcagcccugcagagggc

SEQ ID NO: 1801417 - RNA, 18 nt, Human
gcccugcagagggcacag

SEQ ID NO: 1801418 - RNA, 11 nt, Human
gcccugcccug

SEQ ID NO: 1801419 - RNA, 12 nt, Human
gcccugcccugg

SEQ ID NO: 1801420 - RNA, 16 nt, Human
gcccugcccugguuuc

SEQ ID NO: 1801421 - RNA, 11 nt, Human
gcccugccucc

SEQ ID NO: 1801422 - RNA, 17 nt, Human
gcccugcccaccuggcc

SEQ ID NO: 1801423 - RNA, 20 nt, Human
gcccugcccaccuggccucu

SEQ ID NO: 1801424 - RNA, 21 nt, Human
gcccugcccaccuggccucug

SEQ ID NO: 1801425 - RNA, 22 nt, Human
gcccugcccaccuggccucugc

SEQ ID NO: 1801426 - RNA, 15 nt, Human
gccuaggugacagag

SEQ ID NO: 1801427 - RNA, 14 nt, Human
gccuaggugacaga

SEQ ID NO: 1801428 - RNA, 13 nt, Human
gccuaggugacag

SEQ ID NO: 1801429 - RNA, 23 nt, Human
gccuagcauacguacacauuuua

SEQ ID NO: 1801430 - RNA, 22 nt, Human
gccuagcauacguacacauuuu

SEQ ID NO: 1801431 - RNA, 21 nt, Human
gccuagcauacguacacauuu

SEQ ID NO: 1801432 - RNA, 20 nt, Human
gccuagcauacguacacauu

SEQ ID NO: 1801433 - RNA, 20 nt, Human
gccuaggugacagagugaga

SEQ ID NO: 1801434 - RNA, 20 nt, Human
ggacagcuccuucuguccua

SEQ ID NO: 1801435 - RNA, 19 nt, Human
ggacagcuccuucuguccu

SEQ ID NO: 1801436 - RNA, 22 nt, Human
ggacacuaaccacgcuggaccu

SEQ ID NO: 1801437 - RNA, 17 nt, Human
ggacacuaaccacgcug

SEQ ID NO: 1801438 - RNA, 18 nt, Human
ggacacagcucuucucca

SEQ ID NO: 1801439 - RNA, 15 nt, Human
ggacacagcucuucu

SEQ ID NO: 1801440 - RNA, 21 nt, Human
ggacacagcucuucuccaggc

SEQ ID NO: 1801441 - RNA, 19 nt, Human
ggacaaggacuaggguccu

SEQ ID NO: 1801442 - RNA, 16 nt, Human
ggaauccagacccggc

SEQ ID NO: 1801443 - RNA, 18 nt, Human
ggaauaacauguaauuaa

SEQ ID NO: 1801444 - RNA, 18 nt, Human
ggaaugaagcaaugcuuc

SEQ ID NO: 1801445 - RNA, 13 nt, Human
ggacaagagcagg

SEQ ID NO: 1801446 - RNA, 22 nt, Human
ggacaaggaugaucuaggaaga

SEQ ID NO: 1801447 - RNA, 23 nt, Human
ggacaaggaugaucuaggaagac

SEQ ID NO: 1801448 - RNA, 19 nt, Human
ggaaggaaacccagcucug

SEQ ID NO: 1801449 - RNA, 20 nt, Human
ggaaggaaacccagcucugg

SEQ ID NO: 1801450 - RNA, 16 nt, Human
ggaaggaaacccagcu

SEQ ID NO: 1801451 - RNA, 11 nt, Human
ggaagcuccgc

SEQ ID NO: 1801452 - RNA, 15 nt, Human
ggaagcucagggccu

SEQ ID NO: 1801453 - RNA, 23 nt, Human
ggaagcucagggccuggcucagg

SEQ ID NO: 1801454 - RNA, 15 nt, Human
ggaagccgcuggggc

SEQ ID NO: 1801455 - RNA, 13 nt, Human
ggaagacagcucu

SEQ ID NO: 1801456 - RNA, 14 nt, Human
ggaagacagcucuu

SEQ ID NO: 1801457 - RNA, 13 nt, Human
ggaagacuuugga

SEQ ID NO: 1801458 - RNA, 17 nt, Human
ggaagacuuuggaaaga

SEQ ID NO: 1801459 - RNA, 12 nt, Human
ggaagacuuugg

SEQ ID NO: 1801460 - RNA, 15 nt, Human
ggaagagaaaaaaua

SEQ ID NO: 1801461 - RNA, 18 nt, Human
ggaagacuuuggaaagag

SEQ ID NO: 1801462 - RNA, 13 nt, Human
ggaagagaaaaaa

SEQ ID NO: 1801463 - RNA, 15 nt, Human
ggaacacucugagac

SEQ ID NO: 1801464 - RNA, 16 nt, Human
ggaacacucugagacu

SEQ ID NO: 1801465 - RNA, 12 nt, Human
ggaacacucuga

SEQ ID NO: 1801466 - RNA, 14 nt, Human
ggaacacucugaga

SEQ ID NO: 1801467 - RNA, 23 nt, Human
ggacaggcauguucucugaggac

SEQ ID NO: 1801468 - RNA, 14 nt, Human
ggacuuggaagcuc

SEQ ID NO: 1801469 - RNA, 9 nt, Human
ggacuuugu

SEQ ID NO: 1801470 - RNA, 16 nt, Human
ggagaaaggaagggcu

SEQ ID NO: 1801471 - RNA, 13 nt, Human
ggagaaacuggaa

SEQ ID NO: 1801472 - RNA, 18 nt, Human
ggacucaaugcacugaca

SEQ ID NO: 1801473 - RNA, 16 nt, Human
ggacucaaugcacuga

SEQ ID NO: 1801474 - RNA, 20 nt, Human
ggacuaacuugucuuuggac

SEQ ID NO: 1801475 - RNA, 14 nt, Human
ggacuacaggugug

SEQ ID NO: 1801476 - RNA, 24 nt, Human
ggacuaacuugucuuuggacccug

SEQ ID NO: 1801477 - RNA, 15 nt, Human
ggacucaaugcacug

SEQ ID NO: 1801478 - RNA, 20 nt, Human
ggacguguuaugacuccaga

SEQ ID NO: 1801479 - RNA, 20 nt, Human
ggaccucaggccugggggcu

SEQ ID NO: 1801480 - RNA, 14 nt, Human
ggaccucaggccug

SEQ ID NO: 1801481 - RNA, 15 nt, Human
ggaccucaggccugg

SEQ ID NO: 1801482 - RNA, 13 nt, Human
ggaccucaggccu

SEQ ID NO: 1801483 - RNA, 12 nt, Human
ggacccugaggc

SEQ ID NO: 1801484 - RNA, 13 nt, Human
ggacccugaggcc

SEQ ID NO: 1801485 - RNA, 18 nt, Human
ggaccccgagccuggcuc

SEQ ID NO: 1801486 - RNA, 11 nt, Human
ggacccugagg

SEQ ID NO: 1801487 - RNA, 15 nt, Human
ggaccccgagccugg

SEQ ID NO: 1801488 - RNA, 12 nt, Human
ggacccccugaa

SEQ ID NO: 1801489 - RNA, 13 nt, Human
gcugcuggcuggu

SEQ ID NO: 1801490 - RNA, 18 nt, Human
gcugcugaaggcucgagc

SEQ ID NO: 1801491 - RNA, 13 nt, Human
gcucugcccuugg

SEQ ID NO: 1801492 - RNA, 15 nt, Human
gcucugguccauaga

SEQ ID NO: 1801493 - RNA, 16 nt, Human
gcucugguccauagag

SEQ ID NO: 1801494 - RNA, 23 nt, Human
gcucugguccauagagagcaaga

SEQ ID NO: 1801495 - RNA, 13 nt, Human
gcugcugaaggcu

SEQ ID NO: 1801496 - RNA, 14 nt, Human
gcugcugaaggcuc

SEQ ID NO: 1801497 - RNA, 15 nt, Human
gcugcugaaggcucg

SEQ ID NO: 1801498 - RNA, 22 nt, Human
gcuggagugcagugagccgaga

SEQ ID NO: 1801499 - RNA, 20 nt, Human
gcuggccuggccccucaggg

SEQ ID NO: 1801500 - RNA, 17 nt, Human
gcuggagugcagugagc

SEQ ID NO: 1801501 - RNA, 18 nt, Human
gcuggagugcagugagcc

SEQ ID NO: 1801502 - RNA, 20 nt, Human
gcuggcgugcaguggugcga

SEQ ID NO: 1801503 - RNA, 23 nt, Human
gcugggccccugccucucugcag

SEQ ID NO: 1801504 - RNA, 21 nt, Human
gcugggccccugccucucugc

SEQ ID NO: 1801505 - RNA, 22 nt, Human
gcugggccccugccucucugca

SEQ ID NO: 1801506 - RNA, 12 nt, Human
gcugggucgccc

SEQ ID NO: 1801507 - RNA, 17 nt, Human
gcuggcuguuggcuggg

SEQ ID NO: 1801508 - RNA, 16 nt, Human
gcuggcuguuggcugg

SEQ ID NO: 1801509 - RNA, 15 nt, Human
gcuggcuguuggcug

SEQ ID NO: 1801510 - RNA, 21 nt, Human
gcuggguggcaccagcagccu

SEQ ID NO: 1801511 - RNA, 22 nt, Human
gcuggguggcaccagcagccug

SEQ ID NO: 1801512 - RNA, 23 nt, Human
gcuggguggcaccagcagccugg

SEQ ID NO: 1801513 - RNA, 20 nt, Human
gcuuguaaauagcucaggug

SEQ ID NO: 1801514 - RNA, 14 nt, Human
gcuugagcucagga

SEQ ID NO: 1801515 - RNA, 23 nt, Human
gcuuguaacuaaaauaauuuugu

SEQ ID NO: 1801516 - RNA, 22 nt, Human
gcuuguaacuaaaauaauuuug

SEQ ID NO: 1801517 - RNA, 17 nt, Human
gcuuguaacuaaaauaa

SEQ ID NO: 1801518 - RNA, 12 nt, Human
gcuuguacauaa

SEQ ID NO: 1801519 - RNA, 22 nt, Human
gcuuccucauaguaugguggcu

SEQ ID NO: 1801520 - RNA, 12 nt, Human
gcuucagccucc

SEQ ID NO: 1801521 - RNA, 19 nt, Human
gcuucacggaagagccuug

SEQ ID NO: 1801522 - RNA, 18 nt, Human
gcuucacggaagagccuu

SEQ ID NO: 1801523 - RNA, 19 nt, Human
gcuucaaggauccugagcc

SEQ ID NO: 1801524 - RNA, 20 nt, Human
gcuucaaggauccugagcca

SEQ ID NO: 1801525 - RNA, 21 nt, Human
gcuucaaggauccugagccag

SEQ ID NO: 1801526 - RNA, 17 nt, Human
gcuucacggaagagccu

SEQ ID NO: 1801527 - RNA, 15 nt, Human
gcuucacggaagagc

SEQ ID NO: 1801528 - RNA, 16 nt, Human
guacuggagaaaaugg

SEQ ID NO: 1801529 - RNA, 14 nt, Human
guacccacugcucu

SEQ ID NO: 1801530 - RNA, 13 nt, Human
guacccacugcuc

SEQ ID NO: 1801531 - RNA, 18 nt, Human
guacuacaguccucccau

SEQ ID NO: 1801532 - RNA, 19 nt, Human
guacuacaguccucccauc

SEQ ID NO: 1801533 - RNA, 13 nt, Human
guacuauguauca

SEQ ID NO: 1801534 - RNA, 14 nt, Human
guacucauuaaaaa

SEQ ID NO: 1801535 - RNA, 15 nt, Human
guacuauguaucaau

SEQ ID NO: 1801536 - RNA, 17 nt, Human
guacuauguaucaauga

SEQ ID NO: 1801537 - RNA, 19 nt, Human
guacuccacauauuucagu

SEQ ID NO: 1801538 - RNA, 14 nt, Human
guacuccucccagg

SEQ ID NO: 1801539 - RNA, 20 nt, Human
guagaaauaucugaaaaugu

SEQ ID NO: 1801540 - RNA, 21 nt, Human
guagaaauaucugaaaaugua

SEQ ID NO: 1801541 - RNA, 23 nt, Human
guagaaauaucugaaaauguaug

SEQ ID NO: 1801542 - RNA, 21 nt, Human
guagaagucuuagauguauau

SEQ ID NO: 1801543 - RNA, 12 nt, Human
guagaagauggc

SEQ ID NO: 1801544 - RNA, 18 nt, Human
guagaagcccuucuaccu

SEQ ID NO: 1801545 - RNA, 11 nt, Human
guagagccagg

SEQ ID NO: 1801546 - RNA, 10 nt, Human
guagagccag

SEQ ID NO: 1801547 - RNA, 13 nt, Human
guagagacagggu

SEQ ID NO: 1801548 - RNA, 18 nt, Human
guagagccagggucucac

SEQ ID NO: 1801549 - RNA, 15 nt, Human
guagagccagggucu

SEQ ID NO: 1801550 - RNA, 21 nt, Human
guagccucaaucgagugagac

SEQ ID NO: 1801551 - RNA, 12 nt, Human
guagagacaggg

SEQ ID NO: 1801552 - RNA, 11 nt, Human
guagagacagg

SEQ ID NO: 1801553 - RNA, 20 nt, Human
guaccaagacuacuagggaa

SEQ ID NO: 1801554 - RNA, 23 nt, Human
guaccaagacuacuagggaaaug

SEQ ID NO: 1801555 - RNA, 12 nt, Human
guacccacugcu

SEQ ID NO: 1801556 - RNA, 23 nt, Human
guaccauuuaauggggaggacaa

SEQ ID NO: 1801557 - RNA, 22 nt, Human
guaccauuuaauggggaggaca

SEQ ID NO: 1801558 - RNA, 19 nt, Human
guacauggaauaacaugua

SEQ ID NO: 1801559 - RNA, 20 nt, Human
guacaugaaaacacauuuuu

SEQ ID NO: 1801560 - RNA, 19 nt, Human
guacaugaaaacacauuuu

SEQ ID NO: 1801561 - RNA, 18 nt, Human
guacaugaaaacacauuu

SEQ ID NO: 1801562 - RNA, 17 nt, Human
guacaugaaaacacauu

SEQ ID NO: 1801563 - RNA, 16 nt, Human
guacaugaaaacacau

SEQ ID NO: 1801564 - RNA, 15 nt, Human
guacaugaaaacaca

SEQ ID NO: 1801565 - RNA, 14 nt, Human
guacaugaaaacac

SEQ ID NO: 1801566 - RNA, 15 nt, Human
aaauccacuuuaucu

SEQ ID NO: 1801567 - RNA, 19 nt, Human
aaaucagccguguaaccau

SEQ ID NO: 1801568 - RNA, 12 nt, Human
aaaucagccugc

SEQ ID NO: 1801569 - RNA, 16 nt, Human
aaaucagcugcuacua

SEQ ID NO: 1801570 - RNA, 18 nt, Human
aaaucagccugcuccagc

SEQ ID NO: 1801571 - RNA, 15 nt, Human
aaauauuccugcauu

SEQ ID NO: 1801572 - RNA, 14 nt, Human
aaaucagacuauga

SEQ ID NO: 1801573 - RNA, 21 nt, Human
aaaucagacuaugaaguuuuu

SEQ ID NO: 1801574 - RNA, 15 nt, Human
guaauccaccugccu

SEQ ID NO: 1801575 - RNA, 21 nt, Human
guaauccaagcaaaugugaau

SEQ ID NO: 1801576 - RNA, 18 nt, Human
guaauaugcacacauuuu

SEQ ID NO: 1801577 - RNA, 17 nt, Human
guaauaugcacacauuu

SEQ ID NO: 1801578 - RNA, 16 nt, Human
guaauaugcacacauu

SEQ ID NO: 1801579 - RNA, 14 nt, Human
guaauaugcacaca

SEQ ID NO: 1801580 - RNA, 20 nt, Human
guaauaggcguaacuaauuu

SEQ ID NO: 1801581 - RNA, 15 nt, Human
aaauacagacuggau

SEQ ID NO: 1801582 - RNA, 17 nt, Human
aaauacagauagauaua

SEQ ID NO: 1801583 - RNA, 17 nt, Human
aaauacauuuaaaacau

SEQ ID NO: 1801584 - RNA, 18 nt, Human
aaauaccagccaguaaau

SEQ ID NO: 1801585 - RNA, 20 nt, Human
guaauuuuguguaagaaaua

SEQ ID NO: 1801586 - RNA, 16 nt, Human
guaauuuuguguaaga

SEQ ID NO: 1801587 - RNA, 14 nt, Human
guaauuuuguguaa

SEQ ID NO: 1801588 - RNA, 16 nt, Human
aaaguugguaaaccuu

SEQ ID NO: 1801589 - RNA, 17 nt, Human
aaaguugguaaaccuuu

SEQ ID NO: 1801590 - RNA, 14 nt, Human
aaauaauuuuguaa

SEQ ID NO: 1801591 - RNA, 13 nt, Human
aaauaauuuugua

SEQ ID NO: 1801592 - RNA, 12 nt, Human
aaauaauuuugu

SEQ ID NO: 1801593 - RNA, 23 nt, Human
aaaguucugcagauaaacaguag

SEQ ID NO: 1801594 - RNA, 22 nt, Human
aaaguuaccagugccuuaaacu

SEQ ID NO: 1801595 - RNA, 16 nt, Human
aaaguuaccagugccu

SEQ ID NO: 1801596 - RNA, 21 nt, Human
aaaguacuucuccacccugcu

SEQ ID NO: 1801597 - RNA, 20 nt, Human
aaaguacuucuccacccugc

SEQ ID NO: 1801598 - RNA, 23 nt, Human
aaaguacuucuccacccugcucu

SEQ ID NO: 1801599 - RNA, 18 nt, Human
aaaguaucccuacuguaa

SEQ ID NO: 1801600 - RNA, 19 nt, Human
aaaguacuucuccacccug

SEQ ID NO: 1801601 - RNA, 16 nt, Human
aaaguacauguuaaac

SEQ ID NO: 1801602 - RNA, 20 nt, Human
aaaguacacuguuucaaacu

SEQ ID NO: 1801603 - RNA, 20 nt, Human
aaagguauuuuaaucaccaa

SEQ ID NO: 1801604 - RNA, 13 nt, Human
gggaugagaaagg

SEQ ID NO: 1801605 - RNA, 19 nt, Human
aaaauuuagaaauauaauu

SEQ ID NO: 1801606 - RNA, 15 nt, Human
aaaauuuuuaaucuu

SEQ ID NO: 1801607 - RNA, 20 nt, Human
aaacaaaggccuaauucuau

SEQ ID NO: 1801608 - RNA, 20 nt, Human
aaaauuuugauguuuuaagg

SEQ ID NO: 1801609 - RNA, 19 nt, Human
aaacacaaacgggcucagc

SEQ ID NO: 1801610 - RNA, 11 nt, Human
aaacacauuuu

SEQ ID NO: 1801611 - RNA, 12 nt, Human
aaacacauuuuu

SEQ ID NO: 1801612 - RNA, 22 nt, Human
ggggaauguuugccucugccuc

SEQ ID NO: 1801613 - RNA, 18 nt, Human
ggggaauguuugccucug

SEQ ID NO: 1801614 - RNA, 13 nt, Human
ggggaaggcaggg

SEQ ID NO: 1801615 - RNA, 16 nt, Human
ggggaccagagcugcc

SEQ ID NO: 1801616 - RNA, 14 nt, Human
aaacaguagugaua

SEQ ID NO: 1801617 - RNA, 16 nt, Human
aaacauggccuuugcu

SEQ ID NO: 1801618 - RNA, 17 nt, Human
aaacauggccuuugcuu

SEQ ID NO: 1801619 - RNA, 11 nt, Human
ggggagaaagu

SEQ ID NO: 1801620 - RNA, 18 nt, Human
gggggccucagugccacu

SEQ ID NO: 1801621 - RNA, 17 nt, Human
gggggccucagugccac

SEQ ID NO: 1801622 - RNA, 15 nt, Human
gggggccucagugcc

SEQ ID NO: 1801623 - RNA, 12 nt, Human
gggggccucagu

SEQ ID NO: 1801624 - RNA, 15 nt, Human
ggggccucagugcca

SEQ ID NO: 1801625 - RNA, 22 nt, Human
aaacugcccccucugcccugcg

SEQ ID NO: 1801626 - RNA, 13 nt, Human
aaacucuccucug

SEQ ID NO: 1801627 - RNA, 19 nt, Human
aaacuguuaauaguucagg

SEQ ID NO: 1801628 - RNA, 16 nt, Human
aaacuuaaucuaaaug

SEQ ID NO: 1801629 - RNA, 18 nt, Human
aaacuuaaucuaaaugga

SEQ ID NO: 1801630 - RNA, 17 nt, Human
aaacuuaaucuaaaugg

SEQ ID NO: 1801631 - RNA, 22 nt, Human
aaacuaggugcauauuuauaaa

SEQ ID NO: 1801632 - RNA, 18 nt, Human
aaacuaggugcauauuua

SEQ ID NO: 1801633 - RNA, 15 nt, Human
aaacgggcucagcaa

SEQ ID NO: 1801634 - RNA, 18 nt, Human
aaaccuuuguuugcaucu

SEQ ID NO: 1801635 - RNA, 18 nt, Human
aaaccuuuuauauuuagu

SEQ ID NO: 1801636 - RNA, 23 nt, Human
aaaccaagucaagugaaaaagga

SEQ ID NO: 1801637 - RNA, 15 nt, Human
aaacauuaugaugug

SEQ ID NO: 1801638 - RNA, 13 nt, Human
gggucgcccugga

SEQ ID NO: 1801639 - RNA, 15 nt, Human
gggucgcccuggacu

SEQ ID NO: 1801640 - RNA, 19 nt, Human
gggggugcugggccccugc

SEQ ID NO: 1801641 - RNA, 13 nt, Human
aaagacagugaaa

SEQ ID NO: 1801642 - RNA, 9 nt, Human
aaagacaga

SEQ ID NO: 1801643 - RNA, 19 nt, Human
aaagacugaccaauauugu

SEQ ID NO: 1801644 - RNA, 12 nt, Human
aaacuuuguagu

SEQ ID NO: 1801645 - RNA, 16 nt, Human
aaacuuguauuaugug

SEQ ID NO: 1801646 - RNA, 14 nt, Human
ggguggccucccaa

SEQ ID NO: 1801647 - RNA, 15 nt, Human
ggguggggggggugc

SEQ ID NO: 1801648 - RNA, 19 nt, Human
aaacuucagacauagaauu

SEQ ID NO: 1801649 - RNA, 11 nt, Human
gguccugcugc

SEQ ID NO: 1801650 - RNA, 12 nt, Human
gguccugcugca

SEQ ID NO: 1801651 - RNA, 14 nt, Human
gguccugcugcagu

SEQ ID NO: 1801652 - RNA, 23 nt, Human
aaagauggcugugccucugccug

SEQ ID NO: 1801653 - RNA, 21 nt, Human
aaagauggcugugccucugcc

SEQ ID NO: 1801654 - RNA, 22 nt, Human
aaagauggcugugccucugccu

SEQ ID NO: 1801655 - RNA, 14 nt, Human
aaagacuguacaaa

SEQ ID NO: 1801656 - RNA, 23 nt, Human
aaagacugaguacguugugcauu

SEQ ID NO: 1801657 - RNA, 13 nt, Human
aaagacuguacaa

SEQ ID NO: 1801658 - RNA, 19 nt, Human
aaagaugcuucucacugcc

SEQ ID NO: 1801659 - RNA, 17 nt, Human
aaagaugcuucucacug

SEQ ID NO: 1801660 - RNA, 14 nt, Human
aaagaugcuucuca

SEQ ID NO: 1801661 - RNA, 15 nt, Human
aaagaggaaugaagu

SEQ ID NO: 1801662 - RNA, 22 nt, Human
aaagggacuuggaagcuccgcu

SEQ ID NO: 1801663 - RNA, 20 nt, Human
aaagggacugagaaauuuau

SEQ ID NO: 1801664 - RNA, 14 nt, Human
aaagguaaaucaga

SEQ ID NO: 1801665 - RNA, 17 nt, Human
aaaggagauuggaagga

SEQ ID NO: 1801666 - RNA, 21 nt, Human
aaaggagagcuagcagcaggg

SEQ ID NO: 1801667 - RNA, 22 nt, Human
aaaggaaagagggagguaagga

SEQ ID NO: 1801668 - RNA, 15 nt, Human
aaagcuuguuaagau

SEQ ID NO: 1801669 - RNA, 13 nt, Human
aaagcugcugaca

SEQ ID NO: 1801670 - RNA, 12 nt, Human
aaagcugaaaac

SEQ ID NO: 1801671 - RNA, 15 nt, Human
aaagcugaaaacugc

SEQ ID NO: 1801672 - RNA, 15 nt, Human
aaagcucacuuuacu

SEQ ID NO: 1801673 - RNA, 13 nt, Human
ggucgaggcagga

SEQ ID NO: 1801674 - RNA, 14 nt, Human
ggucgcccuggacu

SEQ ID NO: 1801675 - RNA, 13 nt, Human
ggugaacagaaca

SEQ ID NO: 1801676 - RNA, 20 nt, Human
ggucgcccuggacugugugc

SEQ ID NO: 1801677 - RNA, 24 nt, Human
ggugauccacccaccucagccucc

SEQ ID NO: 1801678 - RNA, 23 nt, Human
ggugauccacccaccucagccuc

SEQ ID NO: 1801679 - RNA, 18 nt, Human
ggugauccacccaccuca

SEQ ID NO: 1801680 - RNA, 12 nt, Human
ggugcaaugacc

SEQ ID NO: 1801681 - RNA, 18 nt, Human
ggugcaaaguucccuacu

SEQ ID NO: 1801682 - RNA, 13 nt, Human
ggugcaaugaccu

SEQ ID NO: 1801683 - RNA, 16 nt, Human
ggugcaaugaccuuuc

SEQ ID NO: 1801684 - RNA, 21 nt, Human
ggugcauauuuauaaaaauaa

SEQ ID NO: 1801685 - RNA, 21 nt, Human
ggugcauuugaggucuguucu

SEQ ID NO: 1801686 - RNA, 11 nt, Human
ggugcugggcc

SEQ ID NO: 1801687 - RNA, 13 nt, Human
ggugcugggcccc

SEQ ID NO: 1801688 - RNA, 15 nt, Human
ggugcugggccccug

SEQ ID NO: 1801689 - RNA, 16 nt, Human
ggugcugggccccugc

SEQ ID NO: 1801690 - RNA, 13 nt, Human
gguggaugccugg

SEQ ID NO: 1801691 - RNA, 20 nt, Human
ggcccuucucuccagccccu

SEQ ID NO: 1801692 - RNA, 21 nt, Human
ggcccuucucuccagccccug

SEQ ID NO: 1801693 - RNA, 15 nt, Human
ggcccggcuccaggc

SEQ ID NO: 1801694 - RNA, 14 nt, Human
ggccccugcugguu

SEQ ID NO: 1801695 - RNA, 13 nt, Human
ggccccugcuggu

SEQ ID NO: 1801696 - RNA, 13 nt, Human
ggcccggcuccag

SEQ ID NO: 1801697 - RNA, 23 nt, Human
ggccccugcugguucaggguugg

SEQ ID NO: 1801698 - RNA, 22 nt, Human
ggcccuucucuccagccccugg

SEQ ID NO: 1801699 - RNA, 23 nt, Human
ggcccuucucuccagccccugga

SEQ ID NO: 1801700 - RNA, 19 nt, Human
ggccucacuaggcuucugg

SEQ ID NO: 1801701 - RNA, 16 nt, Human
ggccuccauccugagg

SEQ ID NO: 1801702 - RNA, 15 nt, Human
ggccuccauccugag

SEQ ID NO: 1801703 - RNA, 14 nt, Human
ggccuccauccuga

SEQ ID NO: 1801704 - RNA, 20 nt, Human
ggccagugugacaaggauug

SEQ ID NO: 1801705 - RNA, 14 nt, Human
ggccaguugguccc

SEQ ID NO: 1801706 - RNA, 17 nt, Human
ggccaguuggucccccu

SEQ ID NO: 1801707 - RNA, 22 nt, Human
ggcagccccuguucuggcagag

SEQ ID NO: 1801708 - RNA, 21 nt, Human
ggcaguggugguuuucuguuc

SEQ ID NO: 1801709 - RNA, 20 nt, Human
ggcaguggugguuuucuguu

SEQ ID NO: 1801710 - RNA, 22 nt, Human
ggagacugcugagucaacccaa

SEQ ID NO: 1801711 - RNA, 16 nt, Human
ggagagaagagaaugc

SEQ ID NO: 1801712 - RNA, 11 nt, Human
ggcagccccug

SEQ ID NO: 1801713 - RNA, 23 nt, Human
ggcagccccauucugccugccca

SEQ ID NO: 1801714 - RNA, 15 nt, Human
ggcacugguggcccg

SEQ ID NO: 1801715 - RNA, 23 nt, Human
ggcacucagaagacacugauggg

SEQ ID NO: 1801716 - RNA, 13 nt, Human
ggcacaucagcac

SEQ ID NO: 1801717 - RNA, 23 nt, Human
ggcacagaaaauggaagacagcu

SEQ ID NO: 1801718 - RNA, 20 nt, Human
ggcacagaaaauggaagaca

SEQ ID NO: 1801719 - RNA, 21 nt, Human
ggcacagaaaauggaagacag

SEQ ID NO: 1801720 - RNA, 19 nt, Human
ggcacagaaaauggaagac

SEQ ID NO: 1801721 - RNA, 14 nt, Human
aaaaauaacaauga

SEQ ID NO: 1801722 - RNA, 19 nt, Human
ggcugggggccucagugcc

SEQ ID NO: 1801723 - RNA, 17 nt, Human
ggcugggggccucagug

SEQ ID NO: 1801724 - RNA, 16 nt, Human
ggcugggggccucagu

SEQ ID NO: 1801725 - RNA, 15 nt, Human
ggcugggggccucag

SEQ ID NO: 1801726 - RNA, 14 nt, Human
ggcugggucgcccu

SEQ ID NO: 1801727 - RNA, 17 nt, Human
ggcugggucgcccugga

SEQ ID NO: 1801728 - RNA, 20 nt, Human
ggcugggucgcccuggacug

SEQ ID NO: 1801729 - RNA, 19 nt, Human
ggcuggguggcaccagcag

SEQ ID NO: 1801730 - RNA, 19 nt, Human
ggcuggguucuacccaggu

SEQ ID NO: 1801731 - RNA, 21 nt, Human
ggcuggguucuacccaggugc

SEQ ID NO: 1801732 - RNA, 18 nt, Human
ggcuguaucccaugagcc

SEQ ID NO: 1801733 - RNA, 20 nt, Human
ggcuucaguggcagcugcuu

SEQ ID NO: 1801734 - RNA, 19 nt, Human
ggcuucaguggcagcugcu

SEQ ID NO: 1801735 - RNA, 17 nt, Human
ggcuucaguggcagcug

SEQ ID NO: 1801736 - RNA, 18 nt, Human
ggcuucaguggcagcugc

SEQ ID NO: 1801737 - RNA, 16 nt, Human
ggcuuccucauaguau

SEQ ID NO: 1801738 - RNA, 19 nt, Human
ggcuucccgcucagcccuc

SEQ ID NO: 1801739 - RNA, 21 nt, Human
ggcuucccgcucagcccuccc

SEQ ID NO: 1801740 - RNA, 15 nt, Human
ggcuucccgcucagc

SEQ ID NO: 1801741 - RNA, 16 nt, Human
ggcuucccgcucagcc

SEQ ID NO: 1801742 - RNA, 17 nt, Human
ggcuucccgcucagccc

SEQ ID NO: 1801743 - RNA, 18 nt, Human
ggcuucccgcucagcccu

SEQ ID NO: 1801744 - RNA, 14 nt, Human
ggcuucccgcucag

SEQ ID NO: 1801745 - RNA, 22 nt, Human
ggcuucauccuccucagaucuu

SEQ ID NO: 1801746 - RNA, 18 nt, Human
ggcuucauccuccucaga

SEQ ID NO: 1801747 - RNA, 15 nt, Human
gggacagcuccuucu

SEQ ID NO: 1801748 - RNA, 13 nt, Human
gggacagcuccuu

SEQ ID NO: 1801749 - RNA, 12 nt, Human
gggacagcuccu

SEQ ID NO: 1801750 - RNA, 13 nt, Human
gggacagagcaga

SEQ ID NO: 1801751 - RNA, 13 nt, Human
gggaagagacuug

SEQ ID NO: 1801752 - RNA, 13 nt, Human
gggaaccugaccc

SEQ ID NO: 1801753 - RNA, 18 nt, Human
gggaagaagcucucuccu

SEQ ID NO: 1801754 - RNA, 22 nt, Human
ggcuucccgcucagcccucccu

SEQ ID NO: 1801755 - RNA, 21 nt, Human
ggcuuccuccugguguggaag

SEQ ID NO: 1801756 - RNA, 18 nt, Human
aaaacucuccucugcugc

SEQ ID NO: 1801757 - RNA, 15 nt, Human
aaaacuucagacaua

SEQ ID NO: 1801758 - RNA, 22 nt, Human
aaaacuugauguguuaucucuu

SEQ ID NO: 1801759 - RNA, 14 nt, Human
aaaacaugcuacac

SEQ ID NO: 1801760 - RNA, 13 nt, Human
aaaacaugcuaca

SEQ ID NO: 1801761 - RNA, 12 nt, Human
aaaacccaagug

SEQ ID NO: 1801762 - RNA, 14 nt, Human
gggaccagagcugc

SEQ ID NO: 1801763 - RNA, 20 nt, Human
gggaccagagcugccaccug

SEQ ID NO: 1801764 - RNA, 17 nt, Human
aaaaaugguuuaaaugg

SEQ ID NO: 1801765 - RNA, 23 nt, Human
gggacuuggaagcuccgcuuucu

SEQ ID NO: 1801766 - RNA, 18 nt, Human
gggacuuggaagcuccgc

SEQ ID NO: 1801767 - RNA, 17 nt, Human
gggacuuggaagcuccg

SEQ ID NO: 1801768 - RNA, 15 nt, Human
gggacuuggaagcuc

SEQ ID NO: 1801769 - RNA, 21 nt, Human
gggagaaccaaaaagaggcua

SEQ ID NO: 1801770 - RNA, 15 nt, Human
aaaagcauuuuguaa

SEQ ID NO: 1801771 - RNA, 14 nt, Human
aaaagcauuuugua

SEQ ID NO: 1801772 - RNA, 16 nt, Human
aaaagcauuuuguaau

SEQ ID NO: 1801773 - RNA, 23 nt, Human
aaaagccagguuccacagaggac

SEQ ID NO: 1801774 - RNA, 15 nt, Human
gggaggucgaggcag

SEQ ID NO: 1801775 - RNA, 18 nt, Human
gggaggucaaggcugcag

SEQ ID NO: 1801776 - RNA, 15 nt, Human
gggagggagggcucc

SEQ ID NO: 1801777 - RNA, 16 nt, Human
gggagggagggcucca

SEQ ID NO: 1801778 - RNA, 23 nt, Human
gggagcaggcucgggcuccccag

SEQ ID NO: 1801779 - RNA, 15 nt, Human
gggagagccuuccag

SEQ ID NO: 1801780 - RNA, 19 nt, Human
gggagagccuuccaggggu

SEQ ID NO: 1801781 - RNA, 16 nt, Human
ggcucuucuccuuuca

SEQ ID NO: 1801782 - RNA, 22 nt, Human
ggcugacagacagcccuccauc

SEQ ID NO: 1801783 - RNA, 14 nt, Human
ggcucuucuccuuu

SEQ ID NO: 1801784 - RNA, 15 nt, Human
ggcucuucuccuuuc

SEQ ID NO: 1801785 - RNA, 23 nt, Human
ggcucuucuccuuucacaaccuu

SEQ ID NO: 1801786 - RNA, 19 nt, Human
ggcugccaaugggagcuca

SEQ ID NO: 1801787 - RNA, 20 nt, Human
ggcugccaaugggagcucau

SEQ ID NO: 1801788 - RNA, 22 nt, Human
ggcugcggaaugaaccacaucu

SEQ ID NO: 1801789 - RNA, 16 nt, Human
ggcugccuuagaaccu

SEQ ID NO: 1801790 - RNA, 22 nt, Human
ggcugcccuggugcugccacac

SEQ ID NO: 1801791 - RNA, 14 nt, Human
ggcugcccuggugc

SEQ ID NO: 1801792 - RNA, 15 nt, Human
ggcugcccuggugcu

SEQ ID NO: 1801793 - RNA, 16 nt, Human
ggcugcccuggugcug

SEQ ID NO: 1801794 - RNA, 19 nt, Human
ggcugcccuggugcugcca

SEQ ID NO: 1801795 - RNA, 13 nt, Human
ggcugcccuggug

SEQ ID NO: 1801796 - RNA, 21 nt, Human
ggcugccaaugggagcucaug

SEQ ID NO: 1801797 - RNA, 14 nt, Human
ggcucucaggccag

SEQ ID NO: 1801798 - RNA, 13 nt, Human
ggcucucaggcca

SEQ ID NO: 1801799 - RNA, 14 nt, Human
ggcucuuccaggcu

SEQ ID NO: 1801800 - RNA, 12 nt, Human
ggcucuucuccu

SEQ ID NO: 1801801 - RNA, 13 nt, Human
ggcucuucuccuu

SEQ ID NO: 1801802 - RNA, 12 nt, Human
ggcucuuccagg

SEQ ID NO: 1801803 - RNA, 11 nt, Human
ggcucucaggc

SEQ ID NO: 1801804 - RNA, 13 nt, Human
ggcugcugaaggc

SEQ ID NO: 1801805 - RNA, 14 nt, Human
ggcugggagagccu

SEQ ID NO: 1801806 - RNA, 15 nt, Human
ggcugggagagccuu

SEQ ID NO: 1801807 - RNA, 16 nt, Human
ggcugggagagccuuc

SEQ ID NO: 1801808 - RNA, 18 nt, Human
ggcugggagagccuucca

SEQ ID NO: 1801809 - RNA, 20 nt, Human
ggcucagcggggacagcucc

SEQ ID NO: 1801810 - RNA, 19 nt, Human
ggcucagcggggacagcuc

SEQ ID NO: 1801811 - RNA, 16 nt, Human
ggcucagauuguaaua

SEQ ID NO: 1801812 - RNA, 19 nt, Human
ggcucagguggggucacuc

SEQ ID NO: 1801813 - RNA, 20 nt, Human
ggcucagguggggucacucu

SEQ ID NO: 1801814 - RNA, 18 nt, Human
ggcucagcggggacagcu

SEQ ID NO: 1801815 - RNA, 19 nt, Human
ggcucagcaaaagaugcuu

SEQ ID NO: 1801816 - RNA, 17 nt, Human
ggcuccaaacccucgag

SEQ ID NO: 1801817 - RNA, 14 nt, Human
ggcuccacuugguc

SEQ ID NO: 1801818 - RNA, 20 nt, Human
caauaaaaucuugaaaaugc

SEQ ID NO: 1801819 - RNA, 15 nt, Human
caaggcucugagcaa

SEQ ID NO: 1801820 - RNA, 12 nt, Human
caagauuucaga

SEQ ID NO: 1801821 - RNA, 17 nt, Human
caaggcaaggcugucaa

SEQ ID NO: 1801822 - RNA, 16 nt, Human
caaggcaaggcuguca

SEQ ID NO: 1801823 - RNA, 18 nt, Human
caaggcaaggcugucaau

SEQ ID NO: 1801824 - RNA, 21 nt, Human
caaggccaaaggaagcacaug

SEQ ID NO: 1801825 - RNA, 19 nt, Human
caaggccaaaggaagcaca

SEQ ID NO: 1801826 - RNA, 20 nt, Human
caaggccaaaggaagcacau

SEQ ID NO: 1801827 - RNA, 21 nt, Human
caaugcuggcuguuggcuggg

SEQ ID NO: 1801828 - RNA, 20 nt, Human
caaugcuggcuguuggcugg

SEQ ID NO: 1801829 - RNA, 13 nt, Human
caaugcuggcugu

SEQ ID NO: 1801830 - RNA, 23 nt, Human
caaucccaccaacccucagagcc

SEQ ID NO: 1801831 - RNA, 16 nt, Human
caaucccaccaacccu

SEQ ID NO: 1801832 - RNA, 17 nt, Human
caaucccaccaacccuc

SEQ ID NO: 1801833 - RNA, 22 nt, Human
caaucccaccaacccucagagc

SEQ ID NO: 1801834 - RNA, 18 nt, Human
cacaagagcccaggccuc

SEQ ID NO: 1801835 - RNA, 19 nt, Human
cacaagagcccaggccucc

SEQ ID NO: 1801836 - RNA, 20 nt, Human
cacaagagcccaggccuccu

SEQ ID NO: 1801837 - RNA, 18 nt, Human
cacaagcuccaagcuccc

SEQ ID NO: 1801838 - RNA, 19 nt, Human
cacaagcuccaagcuccca

SEQ ID NO: 1801839 - RNA, 15 nt, Human
caaugggagcucaug

SEQ ID NO: 1801840 - RNA, 20 nt, Human
cacaagcuccaagcucccag

SEQ ID NO: 1801841 - RNA, 21 nt, Human
cacaagcuccaagcucccagg

SEQ ID NO: 1801842 - RNA, 14 nt, Human
cacagacccugccc

SEQ ID NO: 1801843 - RNA, 16 nt, Human
cacagacccugcccug

SEQ ID NO: 1801844 - RNA, 17 nt, Human
cacagacccugcccugu

SEQ ID NO: 1801845 - RNA, 14 nt, Human
cacagcucuguccu

SEQ ID NO: 1801846 - RNA, 11 nt, Human
cacagcucugu

SEQ ID NO: 1801847 - RNA, 18 nt, Human
cacagacccugcccugug

SEQ ID NO: 1801848 - RNA, 19 nt, Human
cacagcucuguccugggag

SEQ ID NO: 1801849 - RNA, 18 nt, Human
cacagcucuguccuggga

SEQ ID NO: 1801850 - RNA, 16 nt, Human
cacagcucuguccugg

SEQ ID NO: 1801851 - RNA, 15 nt, Human
cacagcucuguccug

SEQ ID NO: 1801852 - RNA, 15 nt, Human
cacagcucuucucca

SEQ ID NO: 1801853 - RNA, 14 nt, Human
cacagcucuucucc

SEQ ID NO: 1801854 - RNA, 17 nt, Human
cacagcucuucuccagg

SEQ ID NO: 1801855 - RNA, 13 nt, Human
cacagaacccuug

SEQ ID NO: 1801856 - RNA, 11 nt, Human
cacacauuuuu

SEQ ID NO: 1801857 - RNA, 10 nt, Human
cacacauuuu

SEQ ID NO: 1801858 - RNA, 20 nt, Human
cacacauuuuuuaaaugcac

SEQ ID NO: 1801859 - RNA, 19 nt, Human
cacacauuuuuuaaaugca

SEQ ID NO: 1801860 - RNA, 16 nt, Human
cacacauuuuuuaaau

SEQ ID NO: 1801861 - RNA, 12 nt, Human
cacacauuuuuu

SEQ ID NO: 1801862 - RNA, 16 nt, Human
cacccaggagccccga

SEQ ID NO: 1801863 - RNA, 18 nt, Human
cacccaccucagccuccc

SEQ ID NO: 1801864 - RNA, 16 nt, Human
caccagccccagugcc

SEQ ID NO: 1801865 - RNA, 13 nt, Human
caccagccccagu

SEQ ID NO: 1801866 - RNA, 17 nt, Human
cacccaccucagccucc

SEQ ID NO: 1801867 - RNA, 18 nt, Human
caccagggaaggggacaa

SEQ ID NO: 1801868 - RNA, 21 nt, Human
caccagggaaggggacaagga

SEQ ID NO: 1801869 - RNA, 13 nt, Human
caccagggaaggg

SEQ ID NO: 1801870 - RNA, 17 nt, Human
cacauuuuauuuuauua

SEQ ID NO: 1801871 - RNA, 21 nt, Human
cacauuuuauuuuauuaugca

SEQ ID NO: 1801872 - RNA, 20 nt, Human
cacauuuuauuuuauuaugc

SEQ ID NO: 1801873 - RNA, 19 nt, Human
cacauuuuauuuuauuaug

SEQ ID NO: 1801874 - RNA, 17 nt, Human
caccaacauacucccau

SEQ ID NO: 1801875 - RNA, 16 nt, Human
caccaacgucugugcc

SEQ ID NO: 1801876 - RNA, 13 nt, Human
caccaacccucag

SEQ ID NO: 1801877 - RNA, 14 nt, Human
caccaacgucugug

SEQ ID NO: 1801878 - RNA, 23 nt, Human
cacuguugcccaggcuggcgugc

SEQ ID NO: 1801879 - RNA, 19 nt, Human
cacuguugcccaggcuggc

SEQ ID NO: 1801880 - RNA, 18 nt, Human
cacuguugcccaggcugg

SEQ ID NO: 1801881 - RNA, 15 nt, Human
cacuuaaaaaugguu

SEQ ID NO: 1801882 - RNA, 13 nt, Human
cacugggcuucua

SEQ ID NO: 1801883 - RNA, 20 nt, Human
cacugggcuuggggaccaga

SEQ ID NO: 1801884 - RNA, 19 nt, Human
cacugggagaaaugaaaaa

SEQ ID NO: 1801885 - RNA, 14 nt, Human
cacugcagccucaa

SEQ ID NO: 1801886 - RNA, 19 nt, Human
cacugcagccucaaccucc

SEQ ID NO: 1801887 - RNA, 23 nt, Human
cacugcagccucaaccuccuggg

SEQ ID NO: 1801888 - RNA, 22 nt, Human
cacugcagccucaaccuccugg

SEQ ID NO: 1801889 - RNA, 21 nt, Human
cacugcagccucaaccuccug

SEQ ID NO: 1801890 - RNA, 20 nt, Human
cacugcagccucaaccuccu

SEQ ID NO: 1801891 - RNA, 17 nt, Human
cacugccaugccagcuu

SEQ ID NO: 1801892 - RNA, 18 nt, Human
cacuuguguuaugaagca

SEQ ID NO: 1801893 - RNA, 19 nt, Human
cacuuguugauuaauggaa

SEQ ID NO: 1801894 - RNA, 22 nt, Human
cacuuaaguuaguuccacugag

SEQ ID NO: 1801895 - RNA, 20 nt, Human
cacuuaaguuaguuccacug

SEQ ID NO: 1801896 - RNA, 18 nt, Human
cacuuucuagccagagga

SEQ ID NO: 1801897 - RNA, 16 nt, Human
cacuuucuagccagag

SEQ ID NO: 1801898 - RNA, 17 nt, Human
cacuuucuagccagagg

SEQ ID NO: 1801899 - RNA, 13 nt, Human
cacuuucuagcca

SEQ ID NO: 1801900 - RNA, 11 nt, Human
cagaacaguga

SEQ ID NO: 1801901 - RNA, 17 nt, Human
cagaacagugauuacca

SEQ ID NO: 1801902 - RNA, 12 nt, Human
cagaacagugau

SEQ ID NO: 1801903 - RNA, 14 nt, Human
cagaaguuucugcc

SEQ ID NO: 1801904 - RNA, 16 nt, Human
cagaaguuucugccgc

SEQ ID NO: 1801905 - RNA, 15 nt, Human
cagaaguuucucagc

SEQ ID NO: 1801906 - RNA, 19 nt, Human
cagaaguuucucagcuccc

SEQ ID NO: 1801907 - RNA, 18 nt, Human
cagaacagugauuaccag

SEQ ID NO: 1801908 - RNA, 16 nt, Human
cagaaauguacagcaa

SEQ ID NO: 1801909 - RNA, 20 nt, Human
cagaaagguuuucuucuuuu

SEQ ID NO: 1801910 - RNA, 22 nt, Human
cacucuuauugcccacgcugga

SEQ ID NO: 1801911 - RNA, 21 nt, Human
cacucuuauugcccacgcugg

SEQ ID NO: 1801912 - RNA, 20 nt, Human
cacucuuauugcccacgcug

SEQ ID NO: 1801913 - RNA, 21 nt, Human
cacuacauuauaaaugucucu

SEQ ID NO: 1801914 - RNA, 17 nt, Human
cacuacauucuguuaau

SEQ ID NO: 1801915 - RNA, 16 nt, Human
cacuacauucuguuaa

SEQ ID NO: 1801916 - RNA, 21 nt, Human
cacuacauucuguuaaucauu

SEQ ID NO: 1801917 - RNA, 12 nt, Human
cacuccagccug

SEQ ID NO: 1801918 - RNA, 13 nt, Human
cacuccagccuga

SEQ ID NO: 1801919 - RNA, 13 nt, Human
cacuccagccugg

SEQ ID NO: 1801920 - RNA, 14 nt, Human
cacuccagccuggg

SEQ ID NO: 1801921 - RNA, 23 nt, Human
cacuccagccugagcgacaguga

SEQ ID NO: 1801922 - RNA, 13 nt, Human
cacggccaggcca

SEQ ID NO: 1801923 - RNA, 12 nt, Human
cacggccaggcc

SEQ ID NO: 1801924 - RNA, 17 nt, Human
cacggccaggccagagg

SEQ ID NO: 1801925 - RNA, 14 nt, Human
cacggcucacugca

SEQ ID NO: 1801926 - RNA, 15 nt, Human
cacggcucacugcag

SEQ ID NO: 1801927 - RNA, 14 nt, Human
caccuuucccaucu

SEQ ID NO: 1801928 - RNA, 16 nt, Human
caccuuggcugcaggg

SEQ ID NO: 1801929 - RNA, 15 nt, Human
caccuuggcugcagg

SEQ ID NO: 1801930 - RNA, 18 nt, Human
caccuuggcugcagggag

SEQ ID NO: 1801931 - RNA, 23 nt, Human
caccuuuauucuggcagaggagg

SEQ ID NO: 1801932 - RNA, 18 nt, Human
caccugcccaaccugcuc

SEQ ID NO: 1801933 - RNA, 19 nt, Human
caccugcccaaccugcucu

SEQ ID NO: 1801934 - RNA, 13 nt, Human
caccugcccaacc

SEQ ID NO: 1801935 - RNA, 12 nt, Human
caccucagccuc

SEQ ID NO: 1801936 - RNA, 12 nt, Human
caccuacugagu

SEQ ID NO: 1801937 - RNA, 22 nt, Human
caaaugagaaaaugucuuuauu

SEQ ID NO: 1801938 - RNA, 23 nt, Human
caaaugcuguaacuuucugaaau

SEQ ID NO: 1801939 - RNA, 18 nt, Human
caaagauauuuugcuuug

SEQ ID NO: 1801940 - RNA, 22 nt, Human
caaagcagugcaugcugucccu

SEQ ID NO: 1801941 - RNA, 16 nt, Human
caaagauauuuugcuu

SEQ ID NO: 1801942 - RNA, 14 nt, Human
caaagauauuuugc

SEQ ID NO: 1801943 - RNA, 18 nt, Human
caaagcagugcaugcugu

SEQ ID NO: 1801944 - RNA, 21 nt, Human
caaagcagugcaugcuguccc

SEQ ID NO: 1801945 - RNA, 14 nt, Human
caaagguaaaucag

SEQ ID NO: 1801946 - RNA, 22 nt, Human
caaagguaaaucagacuaugaa

SEQ ID NO: 1801947 - RNA, 22 nt, Human
caaaguagaagucuuagaugua

SEQ ID NO: 1801948 - RNA, 21 nt, Human
caaaguaucccuacuguaauu

SEQ ID NO: 1801949 - RNA, 19 nt, Human
caaaguaucccuacuguaa

SEQ ID NO: 1801950 - RNA, 21 nt, Human
caacacacagauuugagcuca

SEQ ID NO: 1801951 - RNA, 22 nt, Human
caacacacagauuugagcucag

SEQ ID NO: 1801952 - RNA, 19 nt, Human
caagacccaaaaggcagaa

SEQ ID NO: 1801953 - RNA, 18 nt, Human
caagaccacguuucuaaa

SEQ ID NO: 1801954 - RNA, 17 nt, Human
caagaccacguuucuaa

SEQ ID NO: 1801955 - RNA, 14 nt, Human
caacucuccuccag

SEQ ID NO: 1801956 - RNA, 22 nt, Human
caagaauugaagcaggacuaaa

SEQ ID NO: 1801957 - RNA, 19 nt, Human
caacuacuaccuguaauga

SEQ ID NO: 1801958 - RNA, 18 nt, Human
caacuaauuuuuguauuu

SEQ ID NO: 1801959 - RNA, 18 nt, Human
caacucaccccagcccca

SEQ ID NO: 1801960 - RNA, 21 nt, Human
caaaaggauaaugaauacuuu

SEQ ID NO: 1801961 - RNA, 18 nt, Human
caaaccccgaccaccugc

SEQ ID NO: 1801962 - RNA, 21 nt, Human
caaaccccgaccaccugccca

SEQ ID NO: 1801963 - RNA, 14 nt, Human
caaacccuucagug

SEQ ID NO: 1801964 - RNA, 16 nt, Human
auuuuuuugagacaga

SEQ ID NO: 1801965 - RNA, 18 nt, Human
auuuuuuuuuccuucagu

SEQ ID NO: 1801966 - RNA, 20 nt, Human
auuuuuuuuuccuucagugc

SEQ ID NO: 1801967 - RNA, 22 nt, Human
auuuuuuuuuccuucagugccu

SEQ ID NO: 1801968 - RNA, 23 nt, Human
auuuuuuuuuccuucagugccuu

SEQ ID NO: 1801969 - RNA, 14 nt, Human
auuuuuagacagag

SEQ ID NO: 1801970 - RNA, 19 nt, Human
auuuuuaagugcugcauuu

SEQ ID NO: 1801971 - RNA, 18 nt, Human
auuuuuaagugcugcauu

SEQ ID NO: 1801972 - RNA, 16 nt, Human
auuuuuaagugcugca

SEQ ID NO: 1801973 - RNA, 21 nt, Human
auuuuauaucaauuuaaaaaa

SEQ ID NO: 1801974 - RNA, 18 nt, Human
auucaacagguuuuccug

SEQ ID NO: 1801975 - RNA, 20 nt, Human
auuaguacuccccuccuuga

SEQ ID NO: 1801976 - RNA, 11 nt, Human
auuaaauuaug

SEQ ID NO: 1801977 - RNA, 14 nt, Human
auuaggauuucaug

SEQ ID NO: 1801978 - RNA, 16 nt, Human
auuaggauuucaugau

SEQ ID NO: 1801979 - RNA, 17 nt, Human
auuaaaugcccagcccc

SEQ ID NO: 1801980 - RNA, 19 nt, Human
auuaaaugcccagccccuu

SEQ ID NO: 1801981 - RNA, 14 nt, Human
auucuugcaaagua

SEQ ID NO: 1801982 - RNA, 16 nt, Human
auucuugcaaaguauc

SEQ ID NO: 1801983 - RNA, 15 nt, Human
auucuugcaaaguau

SEQ ID NO: 1801984 - RNA, 22 nt, Human
auucuucuguacgucugacagg

SEQ ID NO: 1801985 - RNA, 20 nt, Human
auucuucugcuucagccucc

SEQ ID NO: 1801986 - RNA, 19 nt, Human
auucuucugcuucagccuc

SEQ ID NO: 1801987 - RNA, 19 nt, Human
auucucuaguuugauuaaa

SEQ ID NO: 1801988 - RNA, 18 nt, Human
auucucuaguuugauuaa

SEQ ID NO: 1801989 - RNA, 17 nt, Human
auucucuaguuugauua

SEQ ID NO: 1801990 - RNA, 22 nt, Human
auucuccuuguguuacuaaguu

SEQ ID NO: 1801991 - RNA, 21 nt, Human
auucuccuuguguuacuaagu

SEQ ID NO: 1801992 - RNA, 19 nt, Human
auucuccuuguguuacuaa

SEQ ID NO: 1801993 - RNA, 18 nt, Human
auucuccuuguguuacua

SEQ ID NO: 1801994 - RNA, 18 nt, Human
auuccugcauuugugaaa

SEQ ID NO: 1801995 - RNA, 15 nt, Human
auuccugcauuugug

SEQ ID NO: 1801996 - RNA, 16 nt, Human
auugcuuguuggauuu

SEQ ID NO: 1801997 - RNA, 14 nt, Human
auugcuugcacaaa

SEQ ID NO: 1801998 - RNA, 16 nt, Human
auuuaaugaaagacug

SEQ ID NO: 1801999 - RNA, 15 nt, Human
auuuaaugaaagacu

SEQ ID NO: 1802000 - RNA, 20 nt, Human
auuuaaugaaagacuguaca

SEQ ID NO: 1802001 - RNA, 21 nt, Human
auuuaaugaaagacuguacaa

SEQ ID NO: 1802002 - RNA, 16 nt, Human
auuuaugcauauuauu

SEQ ID NO: 1802003 - RNA, 22 nt, Human
auuuaugcauauuauuuuaugu

SEQ ID NO: 1802004 - RNA, 15 nt, Human
cagugccaaaaacaa

SEQ ID NO: 1802005 - RNA, 12 nt, Human
cagugcccacag

SEQ ID NO: 1802006 - RNA, 19 nt, Human
cagugggacagggcauggc

SEQ ID NO: 1802007 - RNA, 16 nt, Human
cagugggacagggcau

SEQ ID NO: 1802008 - RNA, 11 nt, Human
cagugggagcu

SEQ ID NO: 1802009 - RNA, 20 nt, Human
cagucugauucccaagcucu

SEQ ID NO: 1802010 - RNA, 19 nt, Human
cagucugauucccaagcuc

SEQ ID NO: 1802011 - RNA, 19 nt, Human
cagugcaugcugucccuua

SEQ ID NO: 1802012 - RNA, 22 nt, Human
cagugcaugcugucccuuacgu

SEQ ID NO: 1802013 - RNA, 23 nt, Human
cagugcaugcugucccuuacgug

SEQ ID NO: 1802014 - RNA, 14 nt, Human
cagucucccucccu

SEQ ID NO: 1802015 - RNA, 20 nt, Human
cagucaccccggccaccugc

SEQ ID NO: 1802016 - RNA, 19 nt, Human
cagucaccccggccaccug

SEQ ID NO: 1802017 - RNA, 22 nt, Human
cagucaccccggccaccugcgg

SEQ ID NO: 1802018 - RNA, 21 nt, Human
cagguuggugggggccucggu

SEQ ID NO: 1802019 - RNA, 16 nt, Human
cagguuuaagcuguua

SEQ ID NO: 1802020 - RNA, 18 nt, Human
cagguuuaagcuguuacu

SEQ ID NO: 1802021 - RNA, 18 nt, Human
cagggucucacucugucg

SEQ ID NO: 1802022 - RNA, 21 nt, Human
cagggucucacucugucgccc

SEQ ID NO: 1802023 - RNA, 22 nt, Human
cagggucucacucugucgccca

SEQ ID NO: 1802024 - RNA, 17 nt, Human
caggugauccacccacc

SEQ ID NO: 1802025 - RNA, 16 nt, Human
caggugauccacccac

SEQ ID NO: 1802026 - RNA, 12 nt, Human
caggguuggccc

SEQ ID NO: 1802027 - RNA, 14 nt, Human
caggguuggccccu

SEQ ID NO: 1802028 - RNA, 20 nt, Human
caggugauccacccaccuca

SEQ ID NO: 1802029 - RNA, 14 nt, Human
cagguugguggggg

SEQ ID NO: 1802030 - RNA, 14 nt, Human
caggugcgaaagga

SEQ ID NO: 1802031 - RNA, 18 nt, Human
caggugcuaggaacacuc

SEQ ID NO: 1802032 - RNA, 20 nt, Human
caggugcuaggaacacuccu

SEQ ID NO: 1802033 - RNA, 19 nt, Human
caggcugggcuucaguggc

SEQ ID NO: 1802034 - RNA, 17 nt, Human
caggcugggcuucagug

SEQ ID NO: 1802035 - RNA, 18 nt, Human
cagggaggacgcucucug

SEQ ID NO: 1802036 - RNA, 17 nt, Human
cagggaggacgcucucu

SEQ ID NO: 1802037 - RNA, 12 nt, Human
cagggagggccu

SEQ ID NO: 1802038 - RNA, 13 nt, Human
cagggagggccug

SEQ ID NO: 1802039 - RNA, 19 nt, Human
cagggaggacgcucucugg

SEQ ID NO: 1802040 - RNA, 16 nt, Human
caggcugggcuucagu

SEQ ID NO: 1802041 - RNA, 15 nt, Human
caggcuggcgugcag

SEQ ID NO: 1802042 - RNA, 20 nt, Human
caggcuggcccugcccuggu

SEQ ID NO: 1802043 - RNA, 17 nt, Human
caggcgccccuuccccc

SEQ ID NO: 1802044 - RNA, 17 nt, Human
caggcuggcccugcccu

SEQ ID NO: 1802045 - RNA, 18 nt, Human
caggcuggcccugcccug

SEQ ID NO: 1802046 - RNA, 19 nt, Human
caggcuggcccugcccugg

SEQ ID NO: 1802047 - RNA, 20 nt, Human
caggccugccuguucccauu

SEQ ID NO: 1802048 - RNA, 15 nt, Human
caggcgccccuuccc

SEQ ID NO: 1802049 - RNA, 18 nt, Human
cagggaggugaccccagg

SEQ ID NO: 1802050 - RNA, 14 nt, Human
cagggagggccugg

SEQ ID NO: 1802051 - RNA, 16 nt, Human
cagggagggccugggc

SEQ ID NO: 1802052 - RNA, 22 nt, Human
cagggaguccgaaagggacuug

SEQ ID NO: 1802053 - RNA, 23 nt, Human
caggagggagggggaaggcaggg

SEQ ID NO: 1802054 - RNA, 17 nt, Human
caggaggccagccuuga

SEQ ID NO: 1802055 - RNA, 15 nt, Human
caggagggaggggga

SEQ ID NO: 1802056 - RNA, 23 nt, Human
caggcacccaccaucaugucugg

SEQ ID NO: 1802057 - RNA, 22 nt, Human
caggcacccaccaucaugucug

SEQ ID NO: 1802058 - RNA, 18 nt, Human
caggcacccaccaucaug

SEQ ID NO: 1802059 - RNA, 14 nt, Human
caggaggccagccu

SEQ ID NO: 1802060 - RNA, 15 nt, Human
caggaggccagccuu

SEQ ID NO: 1802061 - RNA, 16 nt, Human
caggaggccagccuug

SEQ ID NO: 1802062 - RNA, 21 nt, Human
caggccagagggagugacaga

SEQ ID NO: 1802063 - RNA, 19 nt, Human
caggccagagggagugaca

SEQ ID NO: 1802064 - RNA, 23 nt, Human
caggccagagggagugacagagg

SEQ ID NO: 1802065 - RNA, 21 nt, Human
cagccgagauagccaaggcca

SEQ ID NO: 1802066 - RNA, 21 nt, Human
cagcccuuagcagggaaacag

SEQ ID NO: 1802067 - RNA, 16 nt, Human
cagcccuuagcaggga

SEQ ID NO: 1802068 - RNA, 22 nt, Human
cagccccuggaugcagccucac

SEQ ID NO: 1802069 - RNA, 15 nt, Human
cagcccuuagcaggg

SEQ ID NO: 1802070 - RNA, 17 nt, Human
cagccccuggaugcagc

SEQ ID NO: 1802071 - RNA, 18 nt, Human
cagccccuggaugcagcc

SEQ ID NO: 1802072 - RNA, 19 nt, Human
cagccccuggaugcagccu

SEQ ID NO: 1802073 - RNA, 21 nt, Human
cagccccuggaugcagccuca

SEQ ID NO: 1802074 - RNA, 12 nt, Human
cagccccuggau

SEQ ID NO: 1802075 - RNA, 13 nt, Human
cagccccuggaug

SEQ ID NO: 1802076 - RNA, 14 nt, Human
cagccccuggaugc

SEQ ID NO: 1802077 - RNA, 18 nt, Human
cagccugagcgacaguga

SEQ ID NO: 1802078 - RNA, 22 nt, Human
cagccugagcgacagugagacu

SEQ ID NO: 1802079 - RNA, 19 nt, Human
cagccugagcgacagugag

SEQ ID NO: 1802080 - RNA, 17 nt, Human
cagcggggacagcuccu

SEQ ID NO: 1802081 - RNA, 16 nt, Human
cagcggggacagcucc

SEQ ID NO: 1802082 - RNA, 15 nt, Human
cagcggggacagcuc

SEQ ID NO: 1802083 - RNA, 14 nt, Human
caggaaaggcucca

SEQ ID NO: 1802084 - RNA, 15 nt, Human
caggaaaggcuccag

SEQ ID NO: 1802085 - RNA, 19 nt, Human
cagcuucauuuccuguguc

SEQ ID NO: 1802086 - RNA, 18 nt, Human
cagcuucauuuccugugu

SEQ ID NO: 1802087 - RNA, 15 nt, Human
cagcuucauuuccug

SEQ ID NO: 1802088 - RNA, 18 nt, Human
cagcugugcucuggacag

SEQ ID NO: 1802089 - RNA, 19 nt, Human
cagcugugcucuggacagg

SEQ ID NO: 1802090 - RNA, 20 nt, Human
cagcuccagcucaccagccc

SEQ ID NO: 1802091 - RNA, 18 nt, Human
cagcuccagcucaccagc

SEQ ID NO: 1802092 - RNA, 17 nt, Human
cagcuccagcucaccag

SEQ ID NO: 1802093 - RNA, 16 nt, Human
cagcuccagcucacca

SEQ ID NO: 1802094 - RNA, 22 nt, Human
cagcuccagcucaccagcccca

SEQ ID NO: 1802095 - RNA, 21 nt, Human
cagcucccaaggcucugagca

SEQ ID NO: 1802096 - RNA, 15 nt, Human
cagcuccagcucacc

SEQ ID NO: 1802097 - RNA, 14 nt, Human
cagcuccagcucac

SEQ ID NO: 1802098 - RNA, 13 nt, Human
cagcuccagcuca

SEQ ID NO: 1802099 - RNA, 20 nt, Human
cagcaccuacaguguacagu

SEQ ID NO: 1802100 - RNA, 15 nt, Human
cagcaccuacagugu

SEQ ID NO: 1802101 - RNA, 22 nt, Human
cagccaggccacaagacccuug

SEQ ID NO: 1802102 - RNA, 12 nt, Human
cagccaggccac

SEQ ID NO: 1802103 - RNA, 13 nt, Human
cagccaggccaca

SEQ ID NO: 1802104 - RNA, 19 nt, Human
cagcauauucaggaagcuc

SEQ ID NO: 1802105 - RNA, 22 nt, Human
cagcauauucaggaagcucagg

SEQ ID NO: 1802106 - RNA, 23 nt, Human
cagcauauucaggaagcucaggg

SEQ ID NO: 1802107 - RNA, 22 nt, Human
cagagggccugcaagggaguga

SEQ ID NO: 1802108 - RNA, 19 nt, Human
cagaaguuucugccgcagc

SEQ ID NO: 1802109 - RNA, 20 nt, Human
cagaaguuugagaucagccu

SEQ ID NO: 1802110 - RNA, 22 nt, Human
cagaaguuugagaucagccugg

SEQ ID NO: 1802111 - RNA, 23 nt, Human
cagaaguuugagaucagccuggg

SEQ ID NO: 1802112 - RNA, 16 nt, Human
cagagcugccaccugc

SEQ ID NO: 1802113 - RNA, 18 nt, Human
cagagcugccaccugccu

SEQ ID NO: 1802114 - RNA, 20 nt, Human
cagagucagaaguuucugcc

SEQ ID NO: 1802115 - RNA, 18 nt, Human
cagaggggguggccuccc

SEQ ID NO: 1802116 - RNA, 17 nt, Human
cagaggggguggccucc

SEQ ID NO: 1802117 - RNA, 19 nt, Human
cagaggggguggccuccca

SEQ ID NO: 1802118 - RNA, 20 nt, Human
cagaggggguggccucccaa

SEQ ID NO: 1802119 - RNA, 12 nt, Human
cauuccuguucc

SEQ ID NO: 1802120 - RNA, 22 nt, Human
cauucgcuacuaugauuuaauu

SEQ ID NO: 1802121 - RNA, 13 nt, Human
cauucucacuccu

SEQ ID NO: 1802122 - RNA, 18 nt, Human
cauucuagguuugcaaga

SEQ ID NO: 1802123 - RNA, 14 nt, Human
cauucucacuccua

SEQ ID NO: 1802124 - RNA, 22 nt, Human
cauuaggugugacugaauuucu

SEQ ID NO: 1802125 - RNA, 23 nt, Human
cauuaucuagauacuguaucaug

SEQ ID NO: 1802126 - RNA, 13 nt, Human
cauguuggccagg

SEQ ID NO: 1802127 - RNA, 12 nt, Human
cauguuggccag

SEQ ID NO: 1802128 - RNA, 18 nt, Human
cauguccaagaagcccag

SEQ ID NO: 1802129 - RNA, 19 nt, Human
cauguccaagaagcccagg

SEQ ID NO: 1802130 - RNA, 20 nt, Human
cauguccaagaagcccagga

SEQ ID NO: 1802131 - RNA, 16 nt, Human
caugcacgugugugca

SEQ ID NO: 1802132 - RNA, 13 nt, Human
caugcuccuggcc

SEQ ID NO: 1802133 - RNA, 12 nt, Human
caugcugcccug

SEQ ID NO: 1802134 - RNA, 13 nt, Human
caugcugcccugu

SEQ ID NO: 1802135 - RNA, 22 nt, Human
caugauuaaccacuucagcuga

SEQ ID NO: 1802136 - RNA, 23 nt, Human
caugauuaaccacuucagcugac

SEQ ID NO: 1802137 - RNA, 12 nt, Human
caugcacaaauu

SEQ ID NO: 1802138 - RNA, 24 nt, Human
caugauuaaccacuucagcugacu

SEQ ID NO: 1802139 - RNA, 21 nt, Human
caugacacgaauauugcugau

SEQ ID NO: 1802140 - RNA, 23 nt, Human
caugacacgaauauugcugaugg

SEQ ID NO: 1802141 - RNA, 23 nt, Human
caugaaguaauaugcacacauuu

SEQ ID NO: 1802142 - RNA, 22 nt, Human
caugaaguaauaugcacacauu

SEQ ID NO: 1802143 - RNA, 19 nt, Human
caugaaguaauaugcacac

SEQ ID NO: 1802144 - RNA, 15 nt, Human
caugaaguaauaugc

SEQ ID NO: 1802145 - RNA, 14 nt, Human
cauggccagguggc

SEQ ID NO: 1802146 - RNA, 13 nt, Human
cauggccaggugg

SEQ ID NO: 1802147 - RNA, 14 nt, Human
caugcugcccugug

SEQ ID NO: 1802148 - RNA, 15 nt, Human
caugcugcccuguga

SEQ ID NO: 1802149 - RNA, 15 nt, Human
cagugggagcugccu

SEQ ID NO: 1802150 - RNA, 22 nt, Human
cauagcagagaaugaaagggcc

SEQ ID NO: 1802151 - RNA, 19 nt, Human
cauagcagagaaugaaagg

SEQ ID NO: 1802152 - RNA, 22 nt, Human
cauagcaccuaacaacauugua

SEQ ID NO: 1802153 - RNA, 22 nt, Human
cauagcuuacaagccagcugga

SEQ ID NO: 1802154 - RNA, 22 nt, Human
cauaugccugggcagaaggaag

SEQ ID NO: 1802155 - RNA, 15 nt, Human
cauaugccugggcag

SEQ ID NO: 1802156 - RNA, 20 nt, Human
cauaugccugggcagaagga

SEQ ID NO: 1802157 - RNA, 22 nt, Human
cauauucaggaagcucagggcc

SEQ ID NO: 1802158 - RNA, 20 nt, Human
cauauucaggaagcucaggg

SEQ ID NO: 1802159 - RNA, 14 nt, Human
cauauucaggaagc

SEQ ID NO: 1802160 - RNA, 15 nt, Human
cauauucaggaagcu

SEQ ID NO: 1802161 - RNA, 21 nt, Human
cauccccuguagagugggagc

SEQ ID NO: 1802162 - RNA, 14 nt, Human
cauccccuguagag

SEQ ID NO: 1802163 - RNA, 19 nt, Human
caucccauaugccugggca

SEQ ID NO: 1802164 - RNA, 20 nt, Human
caucaggccaggcccucugc

SEQ ID NO: 1802165 - RNA, 16 nt, Human
caucaggccaggcccu

SEQ ID NO: 1802166 - RNA, 19 nt, Human
caucaggccaggcccucug

SEQ ID NO: 1802167 - RNA, 15 nt, Human
caucaggccaggccc

SEQ ID NO: 1802168 - RNA, 15 nt, Human
cauuuggauuggaug

SEQ ID NO: 1802169 - RNA, 17 nt, Human
cauuugucacacacuuu

SEQ ID NO: 1802170 - RNA, 14 nt, Human
cauuugugaaauga

SEQ ID NO: 1802171 - RNA, 16 nt, Human
cauuugugaaaugaug

SEQ ID NO: 1802172 - RNA, 15 nt, Human
cauuuauucugcuca

SEQ ID NO: 1802173 - RNA, 14 nt, Human
cauuuauucugcuc

SEQ ID NO: 1802174 - RNA, 23 nt, Human
cauuguaaaagcauuuuguaaua

SEQ ID NO: 1802175 - RNA, 22 nt, Human
cauuguaaaagcauuuuguaau

SEQ ID NO: 1802176 - RNA, 21 nt, Human
cauuguaaaagcauuuuguaa

SEQ ID NO: 1802177 - RNA, 20 nt, Human
cauuguaaaagcauuuugua

SEQ ID NO: 1802178 - RNA, 15 nt, Human
cauuguaaaagcauu

SEQ ID NO: 1802179 - RNA, 16 nt, Human
cauuuuuuaaaugcac

SEQ ID NO: 1802180 - RNA, 15 nt, Human
cauuuuuuaaaugca

SEQ ID NO: 1802181 - RNA, 19 nt, Human
cauuuuuuaaaugcaccug

SEQ ID NO: 1802182 - RNA, 16 nt, Human
ccaaggccaaaggaag

SEQ ID NO: 1802183 - RNA, 13 nt, Human
ccaaaugcagcuu

SEQ ID NO: 1802184 - RNA, 15 nt, Human
ccaaaugcagcuuua

SEQ ID NO: 1802185 - RNA, 18 nt, Human
ccaaaugcagcuuuaaaa

SEQ ID NO: 1802186 - RNA, 12 nt, Human
ccaaaugcagcu

SEQ ID NO: 1802187 - RNA, 13 nt, Human
ccaagaagcccag

SEQ ID NO: 1802188 - RNA, 16 nt, Human
ccaacgucugugccau

SEQ ID NO: 1802189 - RNA, 22 nt, Human
ccaaauggaaaugggcagagca

SEQ ID NO: 1802190 - RNA, 13 nt, Human
ccaacgucugugc

SEQ ID NO: 1802191 - RNA, 15 nt, Human
ccaacgucugugcca

SEQ ID NO: 1802192 - RNA, 19 nt, Human
ccaagcuggucccacucag

SEQ ID NO: 1802193 - RNA, 12 nt, Human
ccaagcuggucc

SEQ ID NO: 1802194 - RNA, 14 nt, Human
ccaagaagcccagg

SEQ ID NO: 1802195 - RNA, 20 nt, Human
ccaagcuggucccacucagu

SEQ ID NO: 1802196 - RNA, 18 nt, Human
ccaaggaugccccguccc

SEQ ID NO: 1802197 - RNA, 15 nt, Human
ccaaggccaaaggaa

SEQ ID NO: 1802198 - RNA, 22 nt, Human
ccacagagaaaguacuucucca

SEQ ID NO: 1802199 - RNA, 13 nt, Human
ccacagaggacac

SEQ ID NO: 1802200 - RNA, 15 nt, Human
ccaccacgcccggcu

SEQ ID NO: 1802201 - RNA, 16 nt, Human
ccacacuucaggcucu

SEQ ID NO: 1802202 - RNA, 20 nt, Human
ccacacuucaggcucuucuc

SEQ ID NO: 1802203 - RNA, 21 nt, Human
ccacacuucaggcucuucucc

SEQ ID NO: 1802204 - RNA, 19 nt, Human
ccaccuuggcugcagggag

SEQ ID NO: 1802205 - RNA, 18 nt, Human
ccaccuuggcugcaggga

SEQ ID NO: 1802206 - RNA, 13 nt, Human
ccacgcccccacu

SEQ ID NO: 1802207 - RNA, 18 nt, Human
ccacgcuggaccuugaac

SEQ ID NO: 1802208 - RNA, 13 nt, Human
ccacgcuggagug

SEQ ID NO: 1802209 - RNA, 16 nt, Human
ccaccuuggcugcagg

SEQ ID NO: 1802210 - RNA, 15 nt, Human
ccaccuuggcugcag

SEQ ID NO: 1802211 - RNA, 14 nt, Human
ccaccuuggcugca

SEQ ID NO: 1802212 - RNA, 12 nt, Human
ccaccuuggcug

SEQ ID NO: 1802213 - RNA, 22 nt, Human
ccaccgggcugggagcucugca

SEQ ID NO: 1802214 - RNA, 19 nt, Human
ccaccaucaugucuggcua

SEQ ID NO: 1802215 - RNA, 18 nt, Human
ccaccaucaugucuggcu

SEQ ID NO: 1802216 - RNA, 19 nt, Human
ccaccgggcugggagcucu

SEQ ID NO: 1802217 - RNA, 15 nt, Human
ccuggggagaaagua

SEQ ID NO: 1802218 - RNA, 18 nt, Human
ccuggggaaccugacccc

SEQ ID NO: 1802219 - RNA, 19 nt, Human
ccugguggcagugggagcu

SEQ ID NO: 1802220 - RNA, 18 nt, Human
ccugguggcagugggagc

SEQ ID NO: 1802221 - RNA, 20 nt, Human
ccugguggcagugggagcug

SEQ ID NO: 1802222 - RNA, 18 nt, Human
ccugguuuccugcccugg

SEQ ID NO: 1802223 - RNA, 19 nt, Human
ccugguuuccugcccuggg

SEQ ID NO: 1802224 - RNA, 20 nt, Human
ccugguuuccugcccuggga

SEQ ID NO: 1802225 - RNA, 21 nt, Human
ccugguuuccugcccugggag

SEQ ID NO: 1802226 - RNA, 16 nt, Human
ccugguuuccugcccu

SEQ ID NO: 1802227 - RNA, 13 nt, Human
ccugguguggaag

SEQ ID NO: 1802228 - RNA, 20 nt, Human
ccuggccccucagggucccu

SEQ ID NO: 1802229 - RNA, 21 nt, Human
ccuggccccucagggucccug

SEQ ID NO: 1802230 - RNA, 18 nt, Human
ccuggccccucagggucc

SEQ ID NO: 1802231 - RNA, 17 nt, Human
ccuggauggggcugcac

SEQ ID NO: 1802232 - RNA, 18 nt, Human
ccuggauggggcugcacc

SEQ ID NO: 1802233 - RNA, 15 nt, Human
ccuggauggggcugc

SEQ ID NO: 1802234 - RNA, 17 nt, Human
ccugucucuacuaaaaa

SEQ ID NO: 1802235 - RNA, 22 nt, Human
ccugguuuccugcccugggagg

SEQ ID NO: 1802236 - RNA, 14 nt, Human
ccugcaggcagcca

SEQ ID NO: 1802237 - RNA, 12 nt, Human
ccugcaggcagc

SEQ ID NO: 1802238 - RNA, 13 nt, Human
ccugcaggcagcc

SEQ ID NO: 1802239 - RNA, 18 nt, Human
ccugaccccucauagccc

SEQ ID NO: 1802240 - RNA, 23 nt, Human
ccucuugccacugccucuuccuc

SEQ ID NO: 1802241 - RNA, 22 nt, Human
ccucuugccacugccucuuccu

SEQ ID NO: 1802242 - RNA, 14 nt, Human
ccucuugccacugc

SEQ ID NO: 1802243 - RNA, 15 nt, Human
ccucuuugagugaag

SEQ ID NO: 1802244 - RNA, 19 nt, Human
ccucuuucccucccuuccu

SEQ ID NO: 1802245 - RNA, 15 nt, Human
ccugcccaccuggcc

SEQ ID NO: 1802246 - RNA, 17 nt, Human
ccugcccaccuggccuc

SEQ ID NO: 1802247 - RNA, 19 nt, Human
ccugcccaggccccugcca

SEQ ID NO: 1802248 - RNA, 18 nt, Human
ccugcccaccuggccucu

SEQ ID NO: 1802249 - RNA, 19 nt, Human
ccugcccaccuggccucug

SEQ ID NO: 1802250 - RNA, 22 nt, Human
ccugcccaggccccugccaccc

SEQ ID NO: 1802251 - RNA, 21 nt, Human
ccugcccaggccccugccacc

SEQ ID NO: 1802252 - RNA, 15 nt, Human
ccugccucagccucc

SEQ ID NO: 1802253 - RNA, 16 nt, Human
ccugccucagccuccc

SEQ ID NO: 1802254 - RNA, 17 nt, Human
ccugccucagccucccg

SEQ ID NO: 1802255 - RNA, 13 nt, Human
ccugccucucugc

SEQ ID NO: 1802256 - RNA, 18 nt, Human
ccugcugagucccaggcu

SEQ ID NO: 1802257 - RNA, 19 nt, Human
ccugcugagucccaggcug

SEQ ID NO: 1802258 - RNA, 20 nt, Human
ccugcugagucccaggcuga

SEQ ID NO: 1802259 - RNA, 14 nt, Human
ccugccucucugca

SEQ ID NO: 1802260 - RNA, 15 nt, Human
ccugccucucugcag

SEQ ID NO: 1802261 - RNA, 20 nt, Human
ccucccuuggggccuaugca

SEQ ID NO: 1802262 - RNA, 16 nt, Human
ccucccuucucuucac

SEQ ID NO: 1802263 - RNA, 14 nt, Human
ccuccgccucuugg

SEQ ID NO: 1802264 - RNA, 13 nt, Human
ccuccgccucuug

SEQ ID NO: 1802265 - RNA, 19 nt, Human
ccucggacuuagcugggag

SEQ ID NO: 1802266 - RNA, 20 nt, Human
ccucggacuuagcugggaga

SEQ ID NO: 1802267 - RNA, 21 nt, Human
ccucgagguuucucaaagaaa

SEQ ID NO: 1802268 - RNA, 18 nt, Human
ccuccuuuucacaguucu

SEQ ID NO: 1802269 - RNA, 19 nt, Human
ccuccuaucagaaguuucu

SEQ ID NO: 1802270 - RNA, 23 nt, Human
ccuccuuugugaggaagccgcug

SEQ ID NO: 1802271 - RNA, 17 nt, Human
ccucccaucacccgcua

SEQ ID NO: 1802272 - RNA, 20 nt, Human
ccuccaagaccuucuccuuc

SEQ ID NO: 1802273 - RNA, 12 nt, Human
ccucccaucacc

SEQ ID NO: 1802274 - RNA, 16 nt, Human
ccuccaagaccuucuc

SEQ ID NO: 1802275 - RNA, 17 nt, Human
ccuccaagaccuucucc

SEQ ID NO: 1802276 - RNA, 19 nt, Human
ccuccaagaccuucuccuu

SEQ ID NO: 1802277 - RNA, 20 nt, Human
ccucaagugauucuccugcc

SEQ ID NO: 1802278 - RNA, 16 nt, Human
ccucaaccuccugggc

SEQ ID NO: 1802279 - RNA, 23 nt, Human
ccucaagugauucuccugccuca

SEQ ID NO: 1802280 - RNA, 21 nt, Human
ccucauuccaccuucccaugc

SEQ ID NO: 1802281 - RNA, 10 nt, Human
ccucaggccu

SEQ ID NO: 1802282 - RNA, 12 nt, Human
ccucaggcaggu

SEQ ID NO: 1802283 - RNA, 18 nt, Human
ccucaggcaggugggaug

SEQ ID NO: 1802284 - RNA, 15 nt, Human
ccucaaccuccuggg

SEQ ID NO: 1802285 - RNA, 19 nt, Human
ccucaacucuccuccagag

SEQ ID NO: 1802286 - RNA, 21 nt, Human
ccucaacucuccuccagaguc

SEQ ID NO: 1802287 - RNA, 23 nt, Human
ccucaacucuccuccagagucag

SEQ ID NO: 1802288 - RNA, 16 nt, Human
ccucaacaccucugca

SEQ ID NO: 1802289 - RNA, 14 nt, Human
ccucaaaugagaaa

SEQ ID NO: 1802290 - RNA, 15 nt, Human
ccgacagccuggcac

SEQ ID NO: 1802291 - RNA, 22 nt, Human
ccgacagccuggcacagggcag

SEQ ID NO: 1802292 - RNA, 13 nt, Human
ccgacagccuggc

SEQ ID NO: 1802293 - RNA, 14 nt, Human
ccgacagccuggca

SEQ ID NO: 1802294 - RNA, 12 nt, Human
ccgacagccugg

SEQ ID NO: 1802295 - RNA, 14 nt, Human
cccuucucuccagc

SEQ ID NO: 1802296 - RNA, 19 nt, Human
cccuucucuccagccccug

SEQ ID NO: 1802297 - RNA, 21 nt, Human
cccuuuuuuggcugcugaagg

SEQ ID NO: 1802298 - RNA, 22 nt, Human
cccuuuuuuggcugcugaaggc

SEQ ID NO: 1802299 - RNA, 23 nt, Human
cccuuuuuuggcugcugaaggcu

SEQ ID NO: 1802300 - RNA, 14 nt, Human
cccuccuuucacca

SEQ ID NO: 1802301 - RNA, 21 nt, Human
cccugugaguacuacaguccu

SEQ ID NO: 1802302 - RNA, 23 nt, Human
cccugugaguacuacaguccucc

SEQ ID NO: 1802303 - RNA, 15 nt, Human
cccugugauggggcc

SEQ ID NO: 1802304 - RNA, 15 nt, Human
cccugugggccccca

SEQ ID NO: 1802305 - RNA, 14 nt, Human
ccgcagcccugcag

SEQ ID NO: 1802306 - RNA, 18 nt, Human
ccgcagcccugcagaggg

SEQ ID NO: 1802307 - RNA, 23 nt, Human
ccgcagcccugcagagggcacag

SEQ ID NO: 1802308 - RNA, 17 nt, Human
ccggccaccugcggugc

SEQ ID NO: 1802309 - RNA, 18 nt, Human
ccggccaccugcggugcu

SEQ ID NO: 1802310 - RNA, 14 nt, Human
ccgucccccucugg

SEQ ID NO: 1802311 - RNA, 19 nt, Human
ccuagccuuagaagucaca

SEQ ID NO: 1802312 - RNA, 23 nt, Human
ccuagccugugccucugggacug

SEQ ID NO: 1802313 - RNA, 22 nt, Human
ccuagccuuagaagucacacag

SEQ ID NO: 1802314 - RNA, 12 nt, Human
ccuaauaaagcu

SEQ ID NO: 1802315 - RNA, 13 nt, Human
ccuaauaaagcug

SEQ ID NO: 1802316 - RNA, 21 nt, Human
ccuaaugcgcaggcuggcccu

SEQ ID NO: 1802317 - RNA, 23 nt, Human
ccaguuggguggaugccuggugg

SEQ ID NO: 1802318 - RNA, 13 nt, Human
ccaguuggucccc

SEQ ID NO: 1802319 - RNA, 19 nt, Human
ccauccagguucagcuugu

SEQ ID NO: 1802320 - RNA, 18 nt, Human
ccauccagguucagcuug

SEQ ID NO: 1802321 - RNA, 14 nt, Human
ccauaaucuggacu

SEQ ID NO: 1802322 - RNA, 21 nt, Human
ccauaaucuggacuccucugu

SEQ ID NO: 1802323 - RNA, 18 nt, Human
ccaguuggucccccuucc

SEQ ID NO: 1802324 - RNA, 20 nt, Human
ccaguuggucccccuuccau

SEQ ID NO: 1802325 - RNA, 20 nt, Human
ccaucccaaacccuucagug

SEQ ID NO: 1802326 - RNA, 19 nt, Human
ccaucccauaugccugggc

SEQ ID NO: 1802327 - RNA, 20 nt, Human
ccaucccauaugccugggca

SEQ ID NO: 1802328 - RNA, 21 nt, Human
ccaucccauaugccugggcag

SEQ ID NO: 1802329 - RNA, 12 nt, Human
ccaugucgccuc

SEQ ID NO: 1802330 - RNA, 15 nt, Human
ccaugucgccucugc

SEQ ID NO: 1802331 - RNA, 16 nt, Human
ccaugucgccucugca

SEQ ID NO: 1802332 - RNA, 17 nt, Human
ccaugucgccucugcau

SEQ ID NO: 1802333 - RNA, 19 nt, Human
ccaugucgccucugcauuc

SEQ ID NO: 1802334 - RNA, 18 nt, Human
ccaugaguccccuguuug

SEQ ID NO: 1802335 - RNA, 23 nt, Human
ccaugaggaacaaggcaaggcug

SEQ ID NO: 1802336 - RNA, 20 nt, Human
ccaugaggaacaaggcaagg

SEQ ID NO: 1802337 - RNA, 17 nt, Human
cccaacucaccccagcc

SEQ ID NO: 1802338 - RNA, 20 nt, Human
cccaacucaccccagcccca

SEQ ID NO: 1802339 - RNA, 20 nt, Human
cccaacuaauuuuuguauuu

SEQ ID NO: 1802340 - RNA, 15 nt, Human
cccaagcucugcucc

SEQ ID NO: 1802341 - RNA, 12 nt, Human
cccaagcucugc

SEQ ID NO: 1802342 - RNA, 14 nt, Human
cccaagcucugcuc

SEQ ID NO: 1802343 - RNA, 13 nt, Human
cccaagcucugcu

SEQ ID NO: 1802344 - RNA, 23 nt, Human
cccacugcuuuuggucuguguga

SEQ ID NO: 1802345 - RNA, 12 nt, Human
cccacccccacc

SEQ ID NO: 1802346 - RNA, 13 nt, Human
cccacucccugca

SEQ ID NO: 1802347 - RNA, 12 nt, Human
cccacucccugc

SEQ ID NO: 1802348 - RNA, 21 nt, Human
ccauuucauuugugccagaau

SEQ ID NO: 1802349 - RNA, 22 nt, Human
ccauuucauuugugccagaaug

SEQ ID NO: 1802350 - RNA, 15 nt, Human
cccaacucaccccag

SEQ ID NO: 1802351 - RNA, 16 nt, Human
cccaacucaccccagc

SEQ ID NO: 1802352 - RNA, 17 nt, Human
ccagccccagugcccac

SEQ ID NO: 1802353 - RNA, 14 nt, Human
ccagcagagcaccu

SEQ ID NO: 1802354 - RNA, 12 nt, Human
ccagcagagcac

SEQ ID NO: 1802355 - RNA, 13 nt, Human
ccagcagagcacc

SEQ ID NO: 1802356 - RNA, 18 nt, Human
ccagccccauccucugua

SEQ ID NO: 1802357 - RNA, 15 nt, Human
ccagccccauccucu

SEQ ID NO: 1802358 - RNA, 17 nt, Human
ccagccccauccucugu

SEQ ID NO: 1802359 - RNA, 12 nt, Human
ccagcagaaaug

SEQ ID NO: 1802360 - RNA, 23 nt, Human
ccagccccuucugacccaugcug

SEQ ID NO: 1802361 - RNA, 24 nt, Human
ccagccccuucugacccaugcugc

SEQ ID NO: 1802362 - RNA, 16 nt, Human
ccaggcuggcgugcag

SEQ ID NO: 1802363 - RNA, 12 nt, Human
ccaggcuggcgu

SEQ ID NO: 1802364 - RNA, 21 nt, Human
ccaggggaaaaucagccugcu

SEQ ID NO: 1802365 - RNA, 14 nt, Human
ccaggcaggucuug

SEQ ID NO: 1802366 - RNA, 12 nt, Human
ccaggcaggucu

SEQ ID NO: 1802367 - RNA, 23 nt, Human
ccaggcaggucuugaacuccugg

SEQ ID NO: 1802368 - RNA, 21 nt, Human
ccaggcugcucuugaacuccu

SEQ ID NO: 1802369 - RNA, 18 nt, Human
ccagucccccugccccag

SEQ ID NO: 1802370 - RNA, 16 nt, Human
ccccucuggcuccagc

SEQ ID NO: 1802371 - RNA, 18 nt, Human
ccccucuggcuccagcug

SEQ ID NO: 1802372 - RNA, 15 nt, Human
ccccugacaacacuc

SEQ ID NO: 1802373 - RNA, 18 nt, Human
ccccugcaaagcccagcu

SEQ ID NO: 1802374 - RNA, 20 nt, Human
ccccugcaaagcccagcuug

SEQ ID NO: 1802375 - RNA, 21 nt, Human
ccccugcaaagcccagcuuga

SEQ ID NO: 1802376 - RNA, 13 nt, Human
ccccugcacucca

SEQ ID NO: 1802377 - RNA, 16 nt, Human
ccccugccacccuggg

SEQ ID NO: 1802378 - RNA, 14 nt, Human
ccccugccacccug

SEQ ID NO: 1802379 - RNA, 15 nt, Human
ccccucugcccugcg

SEQ ID NO: 1802380 - RNA, 20 nt, Human
ccccucugcccugcggguca

SEQ ID NO: 1802381 - RNA, 23 nt, Human
ccccucugcccugcgggucacag

SEQ ID NO: 1802382 - RNA, 16 nt, Human
cccggccccugcuggu

SEQ ID NO: 1802383 - RNA, 15 nt, Human
cccggccccugcugg

SEQ ID NO: 1802384 - RNA, 20 nt, Human
cccggcuaauuuuuguauuu

SEQ ID NO: 1802385 - RNA, 15 nt, Human
cccgggaagggggcu

SEQ ID NO: 1802386 - RNA, 22 nt, Human
cccgaauagcugggacuacagg

SEQ ID NO: 1802387 - RNA, 18 nt, Human
cccgaauagcugggacua

SEQ ID NO: 1802388 - RNA, 17 nt, Human
cccgaauagcugggacu

SEQ ID NO: 1802389 - RNA, 16 nt, Human
cccgaauagcugggac

SEQ ID NO: 1802390 - RNA, 13 nt, Human
ccccuucugaccc

SEQ ID NO: 1802391 - RNA, 14 nt, Human
ccccuucugaccca

SEQ ID NO: 1802392 - RNA, 16 nt, Human
ccccuucugacccaug

SEQ ID NO: 1802393 - RNA, 15 nt, Human
cccucacccuggggc

SEQ ID NO: 1802394 - RNA, 16 nt, Human
cccucacccuggggcu

SEQ ID NO: 1802395 - RNA, 20 nt, Human
cccucaacucuccuccagag

SEQ ID NO: 1802396 - RNA, 16 nt, Human
cccucaacucuccucc

SEQ ID NO: 1802397 - RNA, 22 nt, Human
cccgggaagggggcugggacau

SEQ ID NO: 1802398 - RNA, 16 nt, Human
cccucaacaccucugc

SEQ ID NO: 1802399 - RNA, 18 nt, Human
cccgggaagggggcuggg

SEQ ID NO: 1802400 - RNA, 21 nt, Human
cccgggaagggggcugggaca

SEQ ID NO: 1802401 - RNA, 16 nt, Human
cccuccucucugcccu

SEQ ID NO: 1802402 - RNA, 15 nt, Human
cccuccucucugccc

SEQ ID NO: 1802403 - RNA, 15 nt, Human
cccauucugccugcc

SEQ ID NO: 1802404 - RNA, 14 nt, Human
cccauucugccugc

SEQ ID NO: 1802405 - RNA, 19 nt, Human
cccauucugccugcccagg

SEQ ID NO: 1802406 - RNA, 15 nt, Human
cccauuugcuccuuu

SEQ ID NO: 1802407 - RNA, 20 nt, Human
ccccagauugcaacaggcug

SEQ ID NO: 1802408 - RNA, 15 nt, Human
ccccagauugcaaca

SEQ ID NO: 1802409 - RNA, 17 nt, Human
ccccagaggcuggguga

SEQ ID NO: 1802410 - RNA, 14 nt, Human
ccccgcacugggcu

SEQ ID NO: 1802411 - RNA, 13 nt, Human
cccaggcuggagu

SEQ ID NO: 1802412 - RNA, 18 nt, Human
cccaggcugagccucagu

SEQ ID NO: 1802413 - RNA, 20 nt, Human
cccaggcuggagugcaauga

SEQ ID NO: 1802414 - RNA, 22 nt, Human
cccaggcuuagucacugagaca

SEQ ID NO: 1802415 - RNA, 15 nt, Human
cccaggcugagccuc

SEQ ID NO: 1802416 - RNA, 16 nt, Human
cccaggcugagccuca

SEQ ID NO: 1802417 - RNA, 17 nt, Human
cccaggcugagccucag

SEQ ID NO: 1802418 - RNA, 17 nt, Human
cccaggaaaggcuccag

SEQ ID NO: 1802419 - RNA, 18 nt, Human
cccaggaaaggcuccagg

SEQ ID NO: 1802420 - RNA, 16 nt, Human
cccacuggacucaccu

SEQ ID NO: 1802421 - RNA, 15 nt, Human
cccaggaaaggcucc

SEQ ID NO: 1802422 - RNA, 16 nt, Human
cccaggaaaggcucca

SEQ ID NO: 1802423 - RNA, 21 nt, Human
cccauccucuguacagagccc

SEQ ID NO: 1802424 - RNA, 22 nt, Human
cccauccucuguacagagccca

SEQ ID NO: 1802425 - RNA, 19 nt, Human
cgaguagcugagauuauag

SEQ ID NO: 1802426 - RNA, 18 nt, Human
cgauacaccgggccugga

SEQ ID NO: 1802427 - RNA, 20 nt, Human
cgauacaccgggccuggaga

SEQ ID NO: 1802428 - RNA, 21 nt, Human
cgauacaccgggccuggagaa

SEQ ID NO: 1802429 - RNA, 21 nt, Human
cgagguuucucaaagaaauuu

SEQ ID NO: 1802430 - RNA, 13 nt, Human
cgcugccccuggc

SEQ ID NO: 1802431 - RNA, 16 nt, Human
cgcugccccuggcagc

SEQ ID NO: 1802432 - RNA, 17 nt, Human
cgcugccccuggcagcc

SEQ ID NO: 1802433 - RNA, 23 nt, Human
cgcuggaccuugaacuggguacu

SEQ ID NO: 1802434 - RNA, 19 nt, Human
cgcuggaccuugaacuggg

SEQ ID NO: 1802435 - RNA, 18 nt, Human
cgcugccccuggcagccc

SEQ ID NO: 1802436 - RNA, 16 nt, Human
cgccuuaaggauguuc

SEQ ID NO: 1802437 - RNA, 18 nt, Human
cgcuggccgggaccccga

SEQ ID NO: 1802438 - RNA, 23 nt, Human
cgcuggccgggaccccgagccug

SEQ ID NO: 1802439 - RNA, 17 nt, Human
cgcuggggccaguuggu

SEQ ID NO: 1802440 - RNA, 20 nt, Human
cgcuggggccaguugguccc

SEQ ID NO: 1802441 - RNA, 22 nt, Human
cguguccccuauccuacuuccc

SEQ ID NO: 1802442 - RNA, 21 nt, Human
cguuaaaaacagauuuggaaa

SEQ ID NO: 1802443 - RNA, 14 nt, Human
cguuaaaaacagau

SEQ ID NO: 1802444 - RNA, 13 nt, Human
cguuaaaauacca

SEQ ID NO: 1802445 - RNA, 14 nt, Human
cguuaccaggcagg

SEQ ID NO: 1802446 - RNA, 15 nt, Human
cuaaagcugccagcc

SEQ ID NO: 1802447 - RNA, 16 nt, Human
cuaaaggcuaccuuug

SEQ ID NO: 1802448 - RNA, 15 nt, Human
cuaaaggcuaccuuu

SEQ ID NO: 1802449 - RNA, 21 nt, Human
cuaaagaagguuucagaaaga

SEQ ID NO: 1802450 - RNA, 14 nt, Human
cuaaagcugccagc

SEQ ID NO: 1802451 - RNA, 19 nt, Human
cuaaaggcuaccuuuguau

SEQ ID NO: 1802452 - RNA, 17 nt, Human
cuaaaggcuaccuuugu

SEQ ID NO: 1802453 - RNA, 22 nt, Human
cuaaaguguauuuuuuuacuaa

SEQ ID NO: 1802454 - RNA, 13 nt, Human
cgguguggagaag

SEQ ID NO: 1802455 - RNA, 16 nt, Human
cguacacauuuuauuu

SEQ ID NO: 1802456 - RNA, 13 nt, Human
cguacacauuuua

SEQ ID NO: 1802457 - RNA, 15 nt, Human
cggagacggaguccc

SEQ ID NO: 1802458 - RNA, 19 nt, Human
cuaguuugauuaaauucuu

SEQ ID NO: 1802459 - RNA, 17 nt, Human
cuaguuugauuaaauuc

SEQ ID NO: 1802460 - RNA, 13 nt, Human
cuaggguccuggg

SEQ ID NO: 1802461 - RNA, 14 nt, Human
cuaggguccugggg

SEQ ID NO: 1802462 - RNA, 15 nt, Human
cuaggguccugggga

SEQ ID NO: 1802463 - RNA, 14 nt, Human
cuagggaagauaau

SEQ ID NO: 1802464 - RNA, 20 nt, Human
cuaguuugauuaaauucuug

SEQ ID NO: 1802465 - RNA, 13 nt, Human
cuaggccuggcca

SEQ ID NO: 1802466 - RNA, 19 nt, Human
cuagccagaggagagagga

SEQ ID NO: 1802467 - RNA, 17 nt, Human
cuagccagaggagagag

SEQ ID NO: 1802468 - RNA, 19 nt, Human
cuaggccuggccagaugca

SEQ ID NO: 1802469 - RNA, 18 nt, Human
cuaggccuggccagaugc

SEQ ID NO: 1802470 - RNA, 15 nt, Human
cuaggccuggccaga

SEQ ID NO: 1802471 - RNA, 14 nt, Human
cuaggccuggccag

SEQ ID NO: 1802472 - RNA, 12 nt, Human
cuaggccugggg

SEQ ID NO: 1802473 - RNA, 13 nt, Human
cuaggccugggga

SEQ ID NO: 1802474 - RNA, 21 nt, Human
cuagacccacuggacucaccu

SEQ ID NO: 1802475 - RNA, 20 nt, Human
cuagcauacguacacauuuu

SEQ ID NO: 1802476 - RNA, 19 nt, Human
cuagcauacguacacauuu

SEQ ID NO: 1802477 - RNA, 18 nt, Human
cuagcauacguacacauu

SEQ ID NO: 1802478 - RNA, 16 nt, Human
cuagcauacguacaca

SEQ ID NO: 1802479 - RNA, 18 nt, Human
cuaccuuccaguuccuca

SEQ ID NO: 1802480 - RNA, 17 nt, Human
cuacuaccuguaaugac

SEQ ID NO: 1802481 - RNA, 16 nt, Human
cuaccugaggggccuc

SEQ ID NO: 1802482 - RNA, 19 nt, Human
cuaccugaggggccucuua

SEQ ID NO: 1802483 - RNA, 23 nt, Human
cuaccugaggggccucuuauggg

SEQ ID NO: 1802484 - RNA, 20 nt, Human
cuacuagggaaaugccuuug

SEQ ID NO: 1802485 - RNA, 13 nt, Human
cucaccugccccu

SEQ ID NO: 1802486 - RNA, 18 nt, Human
cucaccugccccucaacu

SEQ ID NO: 1802487 - RNA, 14 nt, Human
cucaccugccccuc

SEQ ID NO: 1802488 - RNA, 16 nt, Human
cucaccugccccucaa

SEQ ID NO: 1802489 - RNA, 16 nt, Human
cucaccucccccaucu

SEQ ID NO: 1802490 - RNA, 13 nt, Human
cucaccucucccu

SEQ ID NO: 1802491 - RNA, 14 nt, Human
cucaccucucccuu

SEQ ID NO: 1802492 - RNA, 15 nt, Human
cucaccucucccuug

SEQ ID NO: 1802493 - RNA, 16 nt, Human
cucaccucucccuugg

SEQ ID NO: 1802494 - RNA, 17 nt, Human
cucaccucucccuugga

SEQ ID NO: 1802495 - RNA, 14 nt, Human
cucacccuggggcu

SEQ ID NO: 1802496 - RNA, 23 nt, Human
cuaugucauuugcuggagcucug

SEQ ID NO: 1802497 - RNA, 15 nt, Human
cuauguugcccaggc

SEQ ID NO: 1802498 - RNA, 22 nt, Human
cuauguguagggcgggaggaug

SEQ ID NO: 1802499 - RNA, 19 nt, Human
cuauguaucaaugaguaac

SEQ ID NO: 1802500 - RNA, 20 nt, Human
cuaucucccccagccccauc

SEQ ID NO: 1802501 - RNA, 17 nt, Human
cuauguugcccaggcag

SEQ ID NO: 1802502 - RNA, 16 nt, Human
cuauguugcccaggca

SEQ ID NO: 1802503 - RNA, 14 nt, Human
cuauuuuucagaau

SEQ ID NO: 1802504 - RNA, 13 nt, Human
cucaaaacaaagg

SEQ ID NO: 1802505 - RNA, 18 nt, Human
cucaaaaaaagaaaaaga

SEQ ID NO: 1802506 - RNA, 22 nt, Human
cucaaagaaauuuccacucagg

SEQ ID NO: 1802507 - RNA, 14 nt, Human
cucaaaacaaaggc

SEQ ID NO: 1802508 - RNA, 14 nt, Human
cucacaaaggaugc

SEQ ID NO: 1802509 - RNA, 12 nt, Human
cucaaauaacua

SEQ ID NO: 1802510 - RNA, 14 nt, Human
cucacacaugagca

SEQ ID NO: 1802511 - RNA, 21 nt, Human
cucacacaugagcaucaggcc

SEQ ID NO: 1802512 - RNA, 23 nt, Human
cugaggaauccagacccggcugc

SEQ ID NO: 1802513 - RNA, 14 nt, Human
cugaggggccucuu

SEQ ID NO: 1802514 - RNA, 13 nt, Human
cugaggugggagg

SEQ ID NO: 1802515 - RNA, 22 nt, Human
cugaggugggaggaucucuuga

SEQ ID NO: 1802516 - RNA, 14 nt, Human
cugaggaauccaga

SEQ ID NO: 1802517 - RNA, 22 nt, Human
cugagcuugcagagaugaggcc

SEQ ID NO: 1802518 - RNA, 22 nt, Human
cugagcugggaugauuggaggg

SEQ ID NO: 1802519 - RNA, 12 nt, Human
cugagcugggau

SEQ ID NO: 1802520 - RNA, 19 nt, Human
cugacccugcuucaaauau

SEQ ID NO: 1802521 - RNA, 17 nt, Human
cugaucucucgugauug

SEQ ID NO: 1802522 - RNA, 18 nt, Human
cugaucucucgugauuga

SEQ ID NO: 1802523 - RNA, 23 nt, Human
cugacacacagcucuguccuggg

SEQ ID NO: 1802524 - RNA, 22 nt, Human
cugacacacagcucuguccugg

SEQ ID NO: 1802525 - RNA, 21 nt, Human
cugacacacagcucuguccug

SEQ ID NO: 1802526 - RNA, 20 nt, Human
cugacacacagcucuguccu

SEQ ID NO: 1802527 - RNA, 19 nt, Human
cugacacacagcucugucc

SEQ ID NO: 1802528 - RNA, 18 nt, Human
cugacacacagcucuguc

SEQ ID NO: 1802529 - RNA, 17 nt, Human
cugacacacagcucugu

SEQ ID NO: 1802530 - RNA, 16 nt, Human
cugacacacagcucug

SEQ ID NO: 1802531 - RNA, 15 nt, Human
cugacacacagcucu

SEQ ID NO: 1802532 - RNA, 13 nt, Human
cugacacacagcu

SEQ ID NO: 1802533 - RNA, 14 nt, Human
cugaaaauguaugu

SEQ ID NO: 1802534 - RNA, 17 nt, Human
cugaccccucauagccc

SEQ ID NO: 1802535 - RNA, 20 nt, Human
cugaccccucauagcccuca

SEQ ID NO: 1802536 - RNA, 21 nt, Human
cugaccccucauagcccucac

SEQ ID NO: 1802537 - RNA, 13 nt, Human
cucuugagccugg

SEQ ID NO: 1802538 - RNA, 14 nt, Human
cucuugagccuggg

SEQ ID NO: 1802539 - RNA, 15 nt, Human
cucuugagccuggga

SEQ ID NO: 1802540 - RNA, 16 nt, Human
cucuugagccugggag

SEQ ID NO: 1802541 - RNA, 22 nt, Human
cucuugauucauaaugacuuaa

SEQ ID NO: 1802542 - RNA, 24 nt, Human
cucuugauucauaaugacuuaagc

SEQ ID NO: 1802543 - RNA, 22 nt, Human
cucuugccacugccucuuccuc

SEQ ID NO: 1802544 - RNA, 17 nt, Human
cugaaagaggaaugaag

SEQ ID NO: 1802545 - RNA, 13 nt, Human
cugaaagaggaau

SEQ ID NO: 1802546 - RNA, 19 nt, Human
cucugcacaagcugcaccc

SEQ ID NO: 1802547 - RNA, 17 nt, Human
cucugcacaagcugcac

SEQ ID NO: 1802548 - RNA, 18 nt, Human
cucugcacaagcugcacc

SEQ ID NO: 1802549 - RNA, 17 nt, Human
cucccaccucagccucc

SEQ ID NO: 1802550 - RNA, 16 nt, Human
cucccaccucagccuc

SEQ ID NO: 1802551 - RNA, 14 nt, Human
cucccaccucagcc

SEQ ID NO: 1802552 - RNA, 22 nt, Human
cuccaggugcacaagcuccaag

SEQ ID NO: 1802553 - RNA, 18 nt, Human
cuccaggugcacaagcuc

SEQ ID NO: 1802554 - RNA, 19 nt, Human
cuccaggugcacaagcucc

SEQ ID NO: 1802555 - RNA, 20 nt, Human
cuccaggugcacaagcucca

SEQ ID NO: 1802556 - RNA, 23 nt, Human
cuccaggcuguaucccaugagcc

SEQ ID NO: 1802557 - RNA, 16 nt, Human
cuccagacacaugucc

SEQ ID NO: 1802558 - RNA, 22 nt, Human
cuccagaauuucccaaagcagu

SEQ ID NO: 1802559 - RNA, 11 nt, Human
cuccagacaca

SEQ ID NO: 1802560 - RNA, 16 nt, Human
cucagaaucucaaaua

SEQ ID NO: 1802561 - RNA, 17 nt, Human
cucagaaucucaaauaa

SEQ ID NO: 1802562 - RNA, 21 nt, Human
cuccagaauuucccaaagcag

SEQ ID NO: 1802563 - RNA, 16 nt, Human
cucccucccucuuucc

SEQ ID NO: 1802564 - RNA, 15 nt, Human
cucccucuuucccuc

SEQ ID NO: 1802565 - RNA, 19 nt, Human
cucccucuuucccucccuu

SEQ ID NO: 1802566 - RNA, 20 nt, Human
cuccgcuuucuacccagcga

SEQ ID NO: 1802567 - RNA, 21 nt, Human
cuccgcuuucuacccagcgag

SEQ ID NO: 1802568 - RNA, 22 nt, Human
cuccgcuuucuacccagcgagc

SEQ ID NO: 1802569 - RNA, 23 nt, Human
cuccgcuuucuacccagcgagcc

SEQ ID NO: 1802570 - RNA, 10 nt, Human
cucuccucug

SEQ ID NO: 1802571 - RNA, 17 nt, Human
cucucuggccuucggcc

SEQ ID NO: 1802572 - RNA, 22 nt, Human
cucucuggccuucggccuccau

SEQ ID NO: 1802573 - RNA, 19 nt, Human
cucucuggccuucggccuc

SEQ ID NO: 1802574 - RNA, 16 nt, Human
cucuccgaccagacac

SEQ ID NO: 1802575 - RNA, 21 nt, Human
cucuccgaccagacaccuuga

SEQ ID NO: 1802576 - RNA, 13 nt, Human
cucuccuccuuuu

SEQ ID NO: 1802577 - RNA, 20 nt, Human
cucuccuccuuuucacaguu

SEQ ID NO: 1802578 - RNA, 17 nt, Human
cucgugguaggacugua

SEQ ID NO: 1802579 - RNA, 16 nt, Human
cucgugguaggacugu

SEQ ID NO: 1802580 - RNA, 15 nt, Human
cucgugguaggacug

SEQ ID NO: 1802581 - RNA, 13 nt, Human
cucucccuuggau

SEQ ID NO: 1802582 - RNA, 16 nt, Human
cucugcacaagcugca

SEQ ID NO: 1802583 - RNA, 22 nt, Human
cuccuuuagcgcccaguugggu

SEQ ID NO: 1802584 - RNA, 17 nt, Human
cuccuuuagcgcccagu

SEQ ID NO: 1802585 - RNA, 16 nt, Human
cuccuuuagcgcccag

SEQ ID NO: 1802586 - RNA, 22 nt, Human
cuccuagccugugccucuggga

SEQ ID NO: 1802587 - RNA, 24 nt, Human
cuccuuuucacaguucucuccuuc

SEQ ID NO: 1802588 - RNA, 13 nt, Human
cucgaacuccuga

SEQ ID NO: 1802589 - RNA, 16 nt, Human
cucgaacuccugaccu

SEQ ID NO: 1802590 - RNA, 17 nt, Human
cucgaacuccugaccuu

SEQ ID NO: 1802591 - RNA, 11 nt, Human
cucggugccuu

SEQ ID NO: 1802592 - RNA, 18 nt, Human
cucguauaugucucaggu

SEQ ID NO: 1802593 - RNA, 20 nt, Human
cucguauaugucucaggucc

SEQ ID NO: 1802594 - RNA, 21 nt, Human
uugaaaaucuuauaauuuaaa

SEQ ID NO: 1802595 - RNA, 21 nt, Human
uucuuuccugaggcugggcuc

SEQ ID NO: 1802596 - RNA, 18 nt, Human
uugaaaauuaacaugaau

SEQ ID NO: 1802597 - RNA, 15 nt, Human
uugaacuuugaccuc

SEQ ID NO: 1802598 - RNA, 12 nt, Human
uugaaugaugcc

SEQ ID NO: 1802599 - RNA, 16 nt, Human
uugaaugaugccauga

SEQ ID NO: 1802600 - RNA, 18 nt, Human
uugaacuuugaccucugc

SEQ ID NO: 1802601 - RNA, 17 nt, Human
uugaacuuugaccucug

SEQ ID NO: 1802602 - RNA, 20 nt, Human
uugaacuuugaccucugcag

SEQ ID NO: 1802603 - RNA, 13 nt, Human
uucugugcagcca

SEQ ID NO: 1802604 - RNA, 15 nt, Human
uucuggcagaggagg

SEQ ID NO: 1802605 - RNA, 20 nt, Human
uucuggcagaguugaagaca

SEQ ID NO: 1802606 - RNA, 16 nt, Human
uucuggcuaugcauuu

SEQ ID NO: 1802607 - RNA, 17 nt, Human
uucuuauguugcccagu

SEQ ID NO: 1802608 - RNA, 13 nt, Human
uucuucagagacu

SEQ ID NO: 1802609 - RNA, 17 nt, Human
uucuuagggaaggauac

SEQ ID NO: 1802610 - RNA, 14 nt, Human
uucuuguguguuua

SEQ ID NO: 1802611 - RNA, 22 nt, Human
uugauauuuucaacgcagcccu

SEQ ID NO: 1802612 - RNA, 16 nt, Human
uugauaugcuuauaca

SEQ ID NO: 1802613 - RNA, 17 nt, Human
uugauccagaaagaaaa

SEQ ID NO: 1802614 - RNA, 17 nt, Human
uugauucagacagcugc

SEQ ID NO: 1802615 - RNA, 21 nt, Human
uugauucagacagcugccugg

SEQ ID NO: 1802616 - RNA, 23 nt, Human
uugauucagacagcugccuggga

SEQ ID NO: 1802617 - RNA, 16 nt, Human
uugauucagcucugca

SEQ ID NO: 1802618 - RNA, 19 nt, Human
uugagccuugaacuuugac

SEQ ID NO: 1802619 - RNA, 13 nt, Human
uugagcucagccc

SEQ ID NO: 1802620 - RNA, 16 nt, Human
uugagccuugaacuuu

SEQ ID NO: 1802621 - RNA, 15 nt, Human
uugagccuugaacuu

SEQ ID NO: 1802622 - RNA, 14 nt, Human
uugagccuugaacu

SEQ ID NO: 1802623 - RNA, 19 nt, Human
uugccauguuggccaggcu

SEQ ID NO: 1802624 - RNA, 18 nt, Human
uugccauguuggccaggc

SEQ ID NO: 1802625 - RNA, 17 nt, Human
uugccauguuggccagg

SEQ ID NO: 1802626 - RNA, 16 nt, Human
uugccauguuggccag

SEQ ID NO: 1802627 - RNA, 13 nt, Human
uugccagucaccc

SEQ ID NO: 1802628 - RNA, 16 nt, Human
uugcauaacguauaaa

SEQ ID NO: 1802629 - RNA, 23 nt, Human
uugcagacaggcaagcaccuccu

SEQ ID NO: 1802630 - RNA, 17 nt, Human
uugcagcacagcugaga

SEQ ID NO: 1802631 - RNA, 18 nt, Human
uugcagcgauuaauaaca

SEQ ID NO: 1802632 - RNA, 19 nt, Human
uugcagcgauuaauaacag

SEQ ID NO: 1802633 - RNA, 13 nt, Human
uugauucauaaug

SEQ ID NO: 1802634 - RNA, 17 nt, Human
uugauucauaaugacuu

SEQ ID NO: 1802635 - RNA, 16 nt, Human
uuggacagaagcagcu

SEQ ID NO: 1802636 - RNA, 19 nt, Human
uuggacagaagcagcucuu

SEQ ID NO: 1802637 - RNA, 19 nt, Human
uuggaagcuccgcuuucua

SEQ ID NO: 1802638 - RNA, 15 nt, Human
uuggauuguccccga

SEQ ID NO: 1802639 - RNA, 15 nt, Human
uuggacccugaggcc

SEQ ID NO: 1802640 - RNA, 18 nt, Human
uuggacccugaggcccag

SEQ ID NO: 1802641 - RNA, 19 nt, Human
uuggacccugaggcccaga

SEQ ID NO: 1802642 - RNA, 21 nt, Human
uuggacccugaggcccagagg

SEQ ID NO: 1802643 - RNA, 21 nt, Human
uugccauguuggccaggcugg

SEQ ID NO: 1802644 - RNA, 20 nt, Human
uugccauguuggccaggcug

SEQ ID NO: 1802645 - RNA, 14 nt, Human
uugcugcuugaggc

SEQ ID NO: 1802646 - RNA, 16 nt, Human
uugcugcuugaggcaa

SEQ ID NO: 1802647 - RNA, 16 nt, Human
uugcugucccuuuucc

SEQ ID NO: 1802648 - RNA, 18 nt, Human
uugcugucccuuuuccuu

SEQ ID NO: 1802649 - RNA, 20 nt, Human
uuggucugacccacugcuuu

SEQ ID NO: 1802650 - RNA, 13 nt, Human
uuguaaaauggug

SEQ ID NO: 1802651 - RNA, 12 nt, Human
uuguaaaauggu

SEQ ID NO: 1802652 - RNA, 15 nt, Human
uuggucugugagaug

SEQ ID NO: 1802653 - RNA, 23 nt, Human
uuggcuucacggaagagccuugc

SEQ ID NO: 1802654 - RNA, 14 nt, Human
uugggaauuuuauu

SEQ ID NO: 1802655 - RNA, 16 nt, Human
uuguaccgcaauguga

SEQ ID NO: 1802656 - RNA, 20 nt, Human
uuguaaaauggugugaccac

SEQ ID NO: 1802657 - RNA, 18 nt, Human
uuguacuuuagggaagua

SEQ ID NO: 1802658 - RNA, 14 nt, Human
uugucuaugggacu

SEQ ID NO: 1802659 - RNA, 22 nt, Human
uugucaaaguggugagaggcau

SEQ ID NO: 1802660 - RNA, 22 nt, Human
uuguaugaaagauggcugugcc

SEQ ID NO: 1802661 - RNA, 20 nt, Human
uuguaugauccuaaugaaug

SEQ ID NO: 1802662 - RNA, 20 nt, Human
uugucuaugggacucaaugc

SEQ ID NO: 1802663 - RNA, 22 nt, Human
uugucaagaauagcauuguaaa

SEQ ID NO: 1802664 - RNA, 17 nt, Human
uugucugaagucacugc

SEQ ID NO: 1802665 - RNA, 18 nt, Human
uugucugaagucacugca

SEQ ID NO: 1802666 - RNA, 12 nt, Human
uuuaaaaugucu

SEQ ID NO: 1802667 - RNA, 16 nt, Human
uuuaaaaugagaaauc

SEQ ID NO: 1802668 - RNA, 13 nt, Human
uuuaacagaaaug

SEQ ID NO: 1802669 - RNA, 13 nt, Human
uuuaaaagauaca

SEQ ID NO: 1802670 - RNA, 20 nt, Human
uuguuuggggaugagaaagg

SEQ ID NO: 1802671 - RNA, 19 nt, Human
uuguuucuuucucugagga

SEQ ID NO: 1802672 - RNA, 16 nt, Human
uuguuucuuucucuga

SEQ ID NO: 1802673 - RNA, 19 nt, Human
uugucuuuggugaacauug

SEQ ID NO: 1802674 - RNA, 20 nt, Human
uugucuuuggacccugaggc

SEQ ID NO: 1802675 - RNA, 24 nt, Human
uugucuuuggacccugaggcccag

SEQ ID NO: 1802676 - RNA, 15 nt, Human
uugucuuuggacccu

SEQ ID NO: 1802677 - RNA, 13 nt, Human
uuuacagcugccu

SEQ ID NO: 1802678 - RNA, 13 nt, Human
uuuacagagacag

SEQ ID NO: 1802679 - RNA, 22 nt, Human
uuuaauaaacacucuugaaaaa

SEQ ID NO: 1802680 - RNA, 13 nt, Human
uuuaauaaaccau

SEQ ID NO: 1802681 - RNA, 14 nt, Human
uuuaauaaacacuc

SEQ ID NO: 1802682 - RNA, 15 nt, Human
uuuaauaaacacucu

SEQ ID NO: 1802683 - RNA, 15 nt, Human
uuuaacagaaaugua

SEQ ID NO: 1802684 - RNA, 14 nt, Human
uuuaacagaaaugu

SEQ ID NO: 1802685 - RNA, 19 nt, Human
uuuagacccuauugcugcu

SEQ ID NO: 1802686 - RNA, 17 nt, Human
uuuaguugcaacuuugu

SEQ ID NO: 1802687 - RNA, 18 nt, Human
uuuaguugcaacuuugua

SEQ ID NO: 1802688 - RNA, 22 nt, Human
uuuagacccuauugcugcuuga

SEQ ID NO: 1802689 - RNA, 18 nt, Human
uuuauaaacuuuaccuuu

SEQ ID NO: 1802690 - RNA, 20 nt, Human
uuuauacauaaacaagacca

SEQ ID NO: 1802691 - RNA, 12 nt, Human
uuuauacauaaa

SEQ ID NO: 1802692 - RNA, 20 nt, Human
uuuccuaaauauauuuuaag

SEQ ID NO: 1802693 - RNA, 17 nt, Human
uuuccacucaggucugu

SEQ ID NO: 1802694 - RNA, 17 nt, Human
uuucagccaagaauucu

SEQ ID NO: 1802695 - RNA, 22 nt, Human
uuuaugauacuugaaaauuaac

SEQ ID NO: 1802696 - RNA, 14 nt, Human
uuucugaaauaaca

SEQ ID NO: 1802697 - RNA, 18 nt, Human
uuucuacccagcgagccc

SEQ ID NO: 1802698 - RNA, 15 nt, Human
uuucuacccagcgag

SEQ ID NO: 1802699 - RNA, 22 nt, Human
uuucuacccagcgagcccuggu

SEQ ID NO: 1802700 - RNA, 17 nt, Human
uuucuaaaguaaaaaca

SEQ ID NO: 1802701 - RNA, 22 nt, Human
uuucuaaaguaaaaacaaagaa

SEQ ID NO: 1802702 - RNA, 19 nt, Human
uuucuaaaucuccaaaaua

SEQ ID NO: 1802703 - RNA, 19 nt, Human
uuuccuggcacugcuucca

SEQ ID NO: 1802704 - RNA, 22 nt, Human
uuuccucuuagucgagccaagu

SEQ ID NO: 1802705 - RNA, 23 nt, Human
uuuccuggcacugcuuccaguga

SEQ ID NO: 1802706 - RNA, 16 nt, Human
uuugcuugaaagaaaa

SEQ ID NO: 1802707 - RNA, 14 nt, Human
uuugcuugaaagaa

SEQ ID NO: 1802708 - RNA, 15 nt, Human
uuuggacccugaggc

SEQ ID NO: 1802709 - RNA, 19 nt, Human
uuuggacccugaggcccag

SEQ ID NO: 1802710 - RNA, 14 nt, Human
uuugauccaagcug

SEQ ID NO: 1802711 - RNA, 16 nt, Human
uuuguaugcacuuugu

SEQ ID NO: 1802712 - RNA, 15 nt, Human
uuuguauucucuccu

SEQ ID NO: 1802713 - RNA, 21 nt, Human
uuugaaauuguauuacaaauc

SEQ ID NO: 1802714 - RNA, 19 nt, Human
uuucuuguguguuuauugu

SEQ ID NO: 1802715 - RNA, 23 nt, Human
uuucugaucugaugcaagcaaga

SEQ ID NO: 1802716 - RNA, 18 nt, Human
uuucuuaaccagaucauu

SEQ ID NO: 1802717 - RNA, 16 nt, Human
uuugagaucagccugg

SEQ ID NO: 1802718 - RNA, 17 nt, Human
uuugagaucagccuggg

SEQ ID NO: 1802719 - RNA, 21 nt, Human
uuugaggguguauauuuucug

SEQ ID NO: 1802720 - RNA, 15 nt, Human
uucacgugguccuaa

SEQ ID NO: 1802721 - RNA, 18 nt, Human
uucacggaagagccuugc

SEQ ID NO: 1802722 - RNA, 13 nt, Human
uucaauaggaaaa

SEQ ID NO: 1802723 - RNA, 15 nt, Human
uucaauaggaaaaac

SEQ ID NO: 1802724 - RNA, 18 nt, Human
uucaauaggaaaaacuga

SEQ ID NO: 1802725 - RNA, 20 nt, Human
uucaauaggaaaaacugauu

SEQ ID NO: 1802726 - RNA, 21 nt, Human
uucagaguugaugguuguaca

SEQ ID NO: 1802727 - RNA, 22 nt, Human
uucagaguugaugguuguacau

SEQ ID NO: 1802728 - RNA, 19 nt, Human
uucagagacuccugcaggc

SEQ ID NO: 1802729 - RNA, 20 nt, Human
uucagacauagaauuaacac

SEQ ID NO: 1802730 - RNA, 21 nt, Human
uucagacagcugccugggauc

SEQ ID NO: 1802731 - RNA, 16 nt, Human
uucagacauagaauua

SEQ ID NO: 1802732 - RNA, 13 nt, Human
uucacucuccuug

SEQ ID NO: 1802733 - RNA, 17 nt, Human
uuauugucaaaguggug

SEQ ID NO: 1802734 - RNA, 18 nt, Human
uuauugucaaagugguga

SEQ ID NO: 1802735 - RNA, 20 nt, Human
uuauuuuauguugcauagaa

SEQ ID NO: 1802736 - RNA, 17 nt, Human
uucaacugaccagccuc

SEQ ID NO: 1802737 - RNA, 20 nt, Human
uucaacgcagcccugcuuug

SEQ ID NO: 1802738 - RNA, 16 nt, Human
uucaacgcagcccugc

SEQ ID NO: 1802739 - RNA, 19 nt, Human
uucaacgcagcccugcuuu

SEQ ID NO: 1802740 - RNA, 16 nt, Human
uuauggaacacucuga

SEQ ID NO: 1802741 - RNA, 22 nt, Human
uuaugcaugaaguaauaugcac

SEQ ID NO: 1802742 - RNA, 14 nt, Human
uuaugcauagauaa

SEQ ID NO: 1802743 - RNA, 16 nt, Human
uuaugcaugaaguaau

SEQ ID NO: 1802744 - RNA, 17 nt, Human
uuaucuagauacuguau

SEQ ID NO: 1802745 - RNA, 20 nt, Human
uuaucuugaauaauguaaga

SEQ ID NO: 1802746 - RNA, 15 nt, Human
uuaguugcuguaugu

SEQ ID NO: 1802747 - RNA, 13 nt, Human
uuaguugcuguau

SEQ ID NO: 1802748 - RNA, 20 nt, Human
uuaguugcaacuuuguauaa

SEQ ID NO: 1802749 - RNA, 16 nt, Human
uuaucuagauacugua

SEQ ID NO: 1802750 - RNA, 16 nt, Human
uuaguuccucauuagc

SEQ ID NO: 1802751 - RNA, 14 nt, Human
uuaguuccuugagu

SEQ ID NO: 1802752 - RNA, 13 nt, Human
uuaguugcaacuu

SEQ ID NO: 1802753 - RNA, 15 nt, Human
uuauugcccacgcug

SEQ ID NO: 1802754 - RNA, 19 nt, Human
uuauugcagcgauuaauaa

SEQ ID NO: 1802755 - RNA, 11 nt, Human
uuauucugcuc

SEQ ID NO: 1802756 - RNA, 20 nt, Human
uuccagcaauucuccugccu

SEQ ID NO: 1802757 - RNA, 21 nt, Human
uuccagcaauucuccugccuc

SEQ ID NO: 1802758 - RNA, 22 nt, Human
uuccagcaauucuccugccuca

SEQ ID NO: 1802759 - RNA, 23 nt, Human
uuccagcaauucuccugccucag

SEQ ID NO: 1802760 - RNA, 16 nt, Human
uucccauuugcuccuu

SEQ ID NO: 1802761 - RNA, 15 nt, Human
uuccccaggaggcca

SEQ ID NO: 1802762 - RNA, 16 nt, Human
uuccccaggaggccag

SEQ ID NO: 1802763 - RNA, 14 nt, Human
uucccauucuugca

SEQ ID NO: 1802764 - RNA, 11 nt, Human
uucccucccuu

SEQ ID NO: 1802765 - RNA, 17 nt, Human
uucccucccuuccucuu

SEQ ID NO: 1802766 - RNA, 20 nt, Human
uucccucccuuccucuuucc

SEQ ID NO: 1802767 - RNA, 19 nt, Human
uuccccaugucucgacuca

SEQ ID NO: 1802768 - RNA, 11 nt, Human
uuccccauggg

SEQ ID NO: 1802769 - RNA, 21 nt, Human
uuccccaggaggccagccuug

SEQ ID NO: 1802770 - RNA, 17 nt, Human
uuccccaggaggccagc

SEQ ID NO: 1802771 - RNA, 18 nt, Human
uuccccaggaggccagcc

SEQ ID NO: 1802772 - RNA, 19 nt, Human
uuccccaggaggccagccu

SEQ ID NO: 1802773 - RNA, 20 nt, Human
uuccccaggaggccagccuu

SEQ ID NO: 1802774 - RNA, 16 nt, Human
uucauuugcuuuggaa

SEQ ID NO: 1802775 - RNA, 15 nt, Human
uuccaaauucugcuu

SEQ ID NO: 1802776 - RNA, 18 nt, Human
uuccacucaggucuguuu

SEQ ID NO: 1802777 - RNA, 17 nt, Human
uuccagagaguggcucc

SEQ ID NO: 1802778 - RNA, 18 nt, Human
uuccagagaguggcuccu

SEQ ID NO: 1802779 - RNA, 19 nt, Human
uuccagagaguggcuccuc

SEQ ID NO: 1802780 - RNA, 20 nt, Human
uuccagagaguggcuccucc

SEQ ID NO: 1802781 - RNA, 21 nt, Human
uuccagagaguggcuccuccc

SEQ ID NO: 1802782 - RNA, 16 nt, Human
uucauuuccugugucu

SEQ ID NO: 1802783 - RNA, 15 nt, Human
uucauuuccuguguc

SEQ ID NO: 1802784 - RNA, 12 nt, Human
uucauuugcuuu

SEQ ID NO: 1802785 - RNA, 17 nt, Human
uucaugcaaacuuuauu

SEQ ID NO: 1802786 - RNA, 21 nt, Human
uucaucuugaauuguaaggaa

SEQ ID NO: 1802787 - RNA, 11 nt, Human
uucaggaagcu

SEQ ID NO: 1802788 - RNA, 13 nt, Human
uucaggaagcuca

SEQ ID NO: 1802789 - RNA, 20 nt, Human
uuccuugaguugauucagcu

SEQ ID NO: 1802790 - RNA, 14 nt, Human
uuccuggcacugcu

SEQ ID NO: 1802791 - RNA, 17 nt, Human
uuccugccaggcauggu

SEQ ID NO: 1802792 - RNA, 16 nt, Human
uuccugcauuugugaa

SEQ ID NO: 1802793 - RNA, 18 nt, Human
uuccugcauuugugaaau

SEQ ID NO: 1802794 - RNA, 23 nt, Human
uuccugaugcuucuucagagacu

SEQ ID NO: 1802795 - RNA, 15 nt, Human
uuccugcauuuguga

SEQ ID NO: 1802796 - RNA, 18 nt, Human
uuccugaugcuucuucag

SEQ ID NO: 1802797 - RNA, 19 nt, Human
uuccugaugcuucuucaga

SEQ ID NO: 1802798 - RNA, 15 nt, Human
uuccugaugcuucuu

SEQ ID NO: 1802799 - RNA, 15 nt, Human
uucuaaagauggaaa

SEQ ID NO: 1802800 - RNA, 13 nt, Human
uucuaaagcugcc

SEQ ID NO: 1802801 - RNA, 17 nt, Human
uucuaaagcugccagcc

SEQ ID NO: 1802802 - RNA, 20 nt, Human
uucgggaggucgaggcagga

SEQ ID NO: 1802803 - RNA, 21 nt, Human
uucccuuugacgccaucccag

SEQ ID NO: 1802804 - RNA, 22 nt, Human
uucccuuugacgccaucccagc

SEQ ID NO: 1802805 - RNA, 20 nt, Human
uucccuuugacgccauccca

SEQ ID NO: 1802806 - RNA, 13 nt, Human
uuccucauuagca

SEQ ID NO: 1802807 - RNA, 19 nt, Human
uucccccuccaaucccacc

SEQ ID NO: 1802808 - RNA, 18 nt, Human
uuacuuagguguggggga

SEQ ID NO: 1802809 - RNA, 12 nt, Human
uuacuucugcua

SEQ ID NO: 1802810 - RNA, 23 nt, Human
uuacuucuuauacauuugauaaa

SEQ ID NO: 1802811 - RNA, 11 nt, Human
uuacuucugcu

SEQ ID NO: 1802812 - RNA, 19 nt, Human
uuacuauggcccuggccua

SEQ ID NO: 1802813 - RNA, 19 nt, Human
uuacugucuuuuuucuaaa

SEQ ID NO: 1802814 - RNA, 17 nt, Human
uuacugucuuuuuucua

SEQ ID NO: 1802815 - RNA, 21 nt, Human
uuacuuaaaccgccaaggcug

SEQ ID NO: 1802816 - RNA, 21 nt, Human
uuacuaucaugucaaacguga

SEQ ID NO: 1802817 - RNA, 19 nt, Human
uuacuaucaugucaaacgu

SEQ ID NO: 1802818 - RNA, 17 nt, Human
uuacuaguuucccuugc

SEQ ID NO: 1802819 - RNA, 16 nt, Human
uuacuaauagacaauu

SEQ ID NO: 1802820 - RNA, 14 nt, Human
uuacuaaguuuuua

SEQ ID NO: 1802821 - RNA, 13 nt, Human
uuacuaaguuuuu

SEQ ID NO: 1802822 - RNA, 16 nt, Human
uuagacagucccugcc

SEQ ID NO: 1802823 - RNA, 17 nt, Human
uuagacagucccugcca

SEQ ID NO: 1802824 - RNA, 18 nt, Human
uuagacagucccugccaa

SEQ ID NO: 1802825 - RNA, 15 nt, Human
uuagacagucccugc

SEQ ID NO: 1802826 - RNA, 14 nt, Human
uuacuuuguguuca

SEQ ID NO: 1802827 - RNA, 18 nt, Human
uuacuuuaaaaggagcca

SEQ ID NO: 1802828 - RNA, 17 nt, Human
uuacuuuaaaaggagcc

SEQ ID NO: 1802829 - RNA, 16 nt, Human
uuaguaugaggcauuu

SEQ ID NO: 1802830 - RNA, 18 nt, Human
uuaguaugaggcauuugu

SEQ ID NO: 1802831 - RNA, 16 nt, Human
uuaguuccacugagac

SEQ ID NO: 1802832 - RNA, 15 nt, Human
uuaguuccacugaga

SEQ ID NO: 1802833 - RNA, 14 nt, Human
uuaguguucauaaa

SEQ ID NO: 1802834 - RNA, 18 nt, Human
uuaggauguugaaaaagu

SEQ ID NO: 1802835 - RNA, 22 nt, Human
uuaggccaaaaaaauguaagau

SEQ ID NO: 1802836 - RNA, 17 nt, Human
uuaguagagacaggguu

SEQ ID NO: 1802837 - RNA, 12 nt, Human
uuagcugggaga

SEQ ID NO: 1802838 - RNA, 15 nt, Human
uuagauaaauauuga

SEQ ID NO: 1802839 - RNA, 22 nt, Human
uuagauaauacaccacuacauu

SEQ ID NO: 1802840 - RNA, 14 nt, Human
uuagaguugauacu

SEQ ID NO: 1802841 - RNA, 21 nt, Human
uguuucagaggcucagauugu

SEQ ID NO: 1802842 - RNA, 20 nt, Human
uguuucauauugaugugugu

SEQ ID NO: 1802843 - RNA, 15 nt, Human
uguuucaaacuuuac

SEQ ID NO: 1802844 - RNA, 16 nt, Human
uguuuagauaauacac

SEQ ID NO: 1802845 - RNA, 20 nt, Human
uguuuuaagaggcagggucu

SEQ ID NO: 1802846 - RNA, 13 nt, Human
uguuugugauuga

SEQ ID NO: 1802847 - RNA, 18 nt, Human
uguuuuuuuuuuccacuu

SEQ ID NO: 1802848 - RNA, 19 nt, Human
uguuuuuuuuuuccacuua

SEQ ID NO: 1802849 - RNA, 18 nt, Human
uguuuuuuuuuaaagacu

SEQ ID NO: 1802850 - RNA, 17 nt, Human
uuaaaagauacaguuac

SEQ ID NO: 1802851 - RNA, 14 nt, Human
uuaaaagauacagu

SEQ ID NO: 1802852 - RNA, 19 nt, Human
uguuuuaaggaugcuugua

SEQ ID NO: 1802853 - RNA, 22 nt, Human
uguuuuaagaggcagggucuca

SEQ ID NO: 1802854 - RNA, 18 nt, Human
uguuuuaaggaugcuugu

SEQ ID NO: 1802855 - RNA, 17 nt, Human
uguuuuguuuggagaca

SEQ ID NO: 1802856 - RNA, 21 nt, Human
uuaaaauaccagccaguaaau

SEQ ID NO: 1802857 - RNA, 21 nt, Human
uuaaauguuuuuuuuuaaaga

SEQ ID NO: 1802858 - RNA, 23 nt, Human
uuaaauguuuuuuuuuaaagacu

SEQ ID NO: 1802859 - RNA, 12 nt, Human
uuaaagacagag

SEQ ID NO: 1802860 - RNA, 11 nt, Human
uuaaagacaga

SEQ ID NO: 1802861 - RNA, 17 nt, Human
uuaaccacuucagcuga

SEQ ID NO: 1802862 - RNA, 16 nt, Human
uuaacuucacauauug

SEQ ID NO: 1802863 - RNA, 15 nt, Human
uuaacuuuuauaaac

SEQ ID NO: 1802864 - RNA, 17 nt, Human
uuaacuuuuauaaacuu

SEQ ID NO: 1802865 - RNA, 16 nt, Human
uuaacuuuuauaaacu

SEQ ID NO: 1802866 - RNA, 18 nt, Human
uuaacuuuuauaaacuuu

SEQ ID NO: 1802867 - RNA, 20 nt, Human
uuacaagcgugagccacugc

SEQ ID NO: 1802868 - RNA, 21 nt, Human
uuacaagcgugagccacugca

SEQ ID NO: 1802869 - RNA, 17 nt, Human
uuaagcuguuacugucu

SEQ ID NO: 1802870 - RNA, 15 nt, Human
uuaagccuuuggaaa

SEQ ID NO: 1802871 - RNA, 16 nt, Human
uuaagccuuuggaaac

SEQ ID NO: 1802872 - RNA, 21 nt, Human
uuaaugauaugcuuguaacua

SEQ ID NO: 1802873 - RNA, 18 nt, Human
uuaauauugauaugcuua

SEQ ID NO: 1802874 - RNA, 22 nt, Human
uuaauauugauaugcuuauaca

SEQ ID NO: 1802875 - RNA, 13 nt, Human
uggacuccucugu

SEQ ID NO: 1802876 - RNA, 14 nt, Human
uggacuccucuguc

SEQ ID NO: 1802877 - RNA, 21 nt, Human
uggagaagcucccugaaguaa

SEQ ID NO: 1802878 - RNA, 14 nt, Human
uggagacugucuca

SEQ ID NO: 1802879 - RNA, 21 nt, Human
uggaggaaggaaacccagcuc

SEQ ID NO: 1802880 - RNA, 23 nt, Human
uggaggaaggaaacccagcucug

SEQ ID NO: 1802881 - RNA, 16 nt, Human
uggcaaaaaggcagga

SEQ ID NO: 1802882 - RNA, 17 nt, Human
uggauuuuugucuugug

SEQ ID NO: 1802883 - RNA, 12 nt, Human
uggcaaaaaggc

SEQ ID NO: 1802884 - RNA, 15 nt, Human
uggcacuauaaugua

SEQ ID NO: 1802885 - RNA, 16 nt, Human
uggcacuauaauguaa

SEQ ID NO: 1802886 - RNA, 18 nt, Human
uggccagaugcaccagcc

SEQ ID NO: 1802887 - RNA, 17 nt, Human
uggccagaugcaccagc

SEQ ID NO: 1802888 - RNA, 17 nt, Human
uggcagaguugaagaca

SEQ ID NO: 1802889 - RNA, 19 nt, Human
uggcagaguugaagacaga

SEQ ID NO: 1802890 - RNA, 21 nt, Human
uggcagaguggauucuugaac

SEQ ID NO: 1802891 - RNA, 12 nt, Human
uggcagaggagg

SEQ ID NO: 1802892 - RNA, 15 nt, Human
uggcagaguugaaga

SEQ ID NO: 1802893 - RNA, 19 nt, Human
uggccagaugcaccagccc

SEQ ID NO: 1802894 - RNA, 16 nt, Human
uggccaggcugcucuu

SEQ ID NO: 1802895 - RNA, 17 nt, Human
uggccaggcugcucuug

SEQ ID NO: 1802896 - RNA, 13 nt, Human
uggccaggcuggu

SEQ ID NO: 1802897 - RNA, 20 nt, Human
uggccaggcugcucuugaac

SEQ ID NO: 1802898 - RNA, 16 nt, Human
uggccccugcccggcu

SEQ ID NO: 1802899 - RNA, 15 nt, Human
uggccccugcccggc

SEQ ID NO: 1802900 - RNA, 14 nt, Human
uggccccugcccgg

SEQ ID NO: 1802901 - RNA, 20 nt, Human
uggccccugcccggcugcgg

SEQ ID NO: 1802902 - RNA, 18 nt, Human
uggcuccucccggugccc

SEQ ID NO: 1802903 - RNA, 19 nt, Human
uggcuccucccggugccca

SEQ ID NO: 1802904 - RNA, 14 nt, Human
uggcuccucccggu

SEQ ID NO: 1802905 - RNA, 16 nt, Human
uggcuccucccggugc

SEQ ID NO: 1802906 - RNA, 11 nt, Human
uggcugcuuca

SEQ ID NO: 1802907 - RNA, 15 nt, Human
uggcugcuucaagga

SEQ ID NO: 1802908 - RNA, 16 nt, Human
uggcugcuucaaggau

SEQ ID NO: 1802909 - RNA, 14 nt, Human
uggcucccacaggc

SEQ ID NO: 1802910 - RNA, 17 nt, Human
uggcucccacaggcccu

SEQ ID NO: 1802911 - RNA, 20 nt, Human
uggcucccacaggcccuucc

SEQ ID NO: 1802912 - RNA, 15 nt, Human
uggcgggguggggug

SEQ ID NO: 1802913 - RNA, 23 nt, Human
uggccucccaacucaccccagcc

SEQ ID NO: 1802914 - RNA, 22 nt, Human
uggcgcagcauauucaggaagc

SEQ ID NO: 1802915 - RNA, 23 nt, Human
uggcgcagcauauucaggaagcu

SEQ ID NO: 1802916 - RNA, 16 nt, Human
uggcgcugccccuggc

SEQ ID NO: 1802917 - RNA, 23 nt, Human
uggcgcugccccuggcagccccu

SEQ ID NO: 1802918 - RNA, 15 nt, Human
uggucccccuuccau

SEQ ID NO: 1802919 - RNA, 16 nt, Human
uggucccccuuccaug

SEQ ID NO: 1802920 - RNA, 18 nt, Human
uggucccccuuccaugga

SEQ ID NO: 1802921 - RNA, 23 nt, Human
uggucccccuuccauggacuuug

SEQ ID NO: 1802922 - RNA, 17 nt, Human
ugguccuaaucuucuga

SEQ ID NO: 1802923 - RNA, 19 nt, Human
ugguccuaaucuucugaac

SEQ ID NO: 1802924 - RNA, 13 nt, Human
ugguccugcugca

SEQ ID NO: 1802925 - RNA, 15 nt, Human
ugguccugcugcagu

SEQ ID NO: 1802926 - RNA, 23 nt, Human
ugguccugcugcaguugccaguc

SEQ ID NO: 1802927 - RNA, 14 nt, Human
uggucccccuucca

SEQ ID NO: 1802928 - RNA, 19 nt, Human
uggucacaggacucugccu

SEQ ID NO: 1802929 - RNA, 18 nt, Human
uggucacaggacucugcc

SEQ ID NO: 1802930 - RNA, 22 nt, Human
uggucacaggaaguagaggagg

SEQ ID NO: 1802931 - RNA, 22 nt, Human
uggugaccucugccugaaguca

SEQ ID NO: 1802932 - RNA, 17 nt, Human
uggugaccucugccuga

SEQ ID NO: 1802933 - RNA, 16 nt, Human
uggugaccucugccug

SEQ ID NO: 1802934 - RNA, 15 nt, Human
uggugaccucugccu

SEQ ID NO: 1802935 - RNA, 19 nt, Human
uggugacuuuccucuuugg

SEQ ID NO: 1802936 - RNA, 21 nt, Human
uggugcaaugaccuuucaaua

SEQ ID NO: 1802937 - RNA, 14 nt, Human
uggugaccucugcc

SEQ ID NO: 1802938 - RNA, 13 nt, Human
uggugaccucugc

SEQ ID NO: 1802939 - RNA, 19 nt, Human
uggucuacacugugcugag

SEQ ID NO: 1802940 - RNA, 15 nt, Human
uggucuacacugugc

SEQ ID NO: 1802941 - RNA, 16 nt, Human
uggucuacacugugcu

SEQ ID NO: 1802942 - RNA, 17 nt, Human
uggucuacacugugcug

SEQ ID NO: 1802943 - RNA, 18 nt, Human
uggucuacacugugcuga

SEQ ID NO: 1802944 - RNA, 17 nt, Human
uggucggaaaacaugcu

SEQ ID NO: 1802945 - RNA, 14 nt, Human
uggucggaaaacau

SEQ ID NO: 1802946 - RNA, 23 nt, Human
ugggcagagcagagaccaucccu

SEQ ID NO: 1802947 - RNA, 21 nt, Human
ugggccccugccucucugcag

SEQ ID NO: 1802948 - RNA, 23 nt, Human
ugggccccugccucucugcaggu

SEQ ID NO: 1802949 - RNA, 11 nt, Human
ugggccuucag

SEQ ID NO: 1802950 - RNA, 14 nt, Human
ugggccuggcuccc

SEQ ID NO: 1802951 - RNA, 20 nt, Human
uggcugggggccucagugcc

SEQ ID NO: 1802952 - RNA, 17 nt, Human
uggcugggggccucagu

SEQ ID NO: 1802953 - RNA, 16 nt, Human
uggcugggggccucag

SEQ ID NO: 1802954 - RNA, 19 nt, Human
ugggaucacauguggacuu

SEQ ID NO: 1802955 - RNA, 14 nt, Human
ugggagugggccca

SEQ ID NO: 1802956 - RNA, 16 nt, Human
ugggagugggcccaau

SEQ ID NO: 1802957 - RNA, 22 nt, Human
ugggauuacaagcgugagccac

SEQ ID NO: 1802958 - RNA, 17 nt, Human
ugggauuacaggcguga

SEQ ID NO: 1802959 - RNA, 22 nt, Human
ugggcagagcagagaccauccc

SEQ ID NO: 1802960 - RNA, 14 nt, Human
ugggauccuccagg

SEQ ID NO: 1802961 - RNA, 12 nt, Human
ugggauccucca

SEQ ID NO: 1802962 - RNA, 13 nt, Human
ugggauccuccag

SEQ ID NO: 1802963 - RNA, 18 nt, Human
uggguacuuguggacaca

SEQ ID NO: 1802964 - RNA, 17 nt, Human
uggguacuuguggacac

SEQ ID NO: 1802965 - RNA, 15 nt, Human
uggggguucuuucuu

SEQ ID NO: 1802966 - RNA, 19 nt, Human
uggggguucuuucuuccuc

SEQ ID NO: 1802967 - RNA, 20 nt, Human
uggggguucuuucuuccucu

SEQ ID NO: 1802968 - RNA, 22 nt, Human
uggggguucuuucuuccucugc

SEQ ID NO: 1802969 - RNA, 13 nt, Human
uggggggggugcu

SEQ ID NO: 1802970 - RNA, 16 nt, Human
ugggggaguggccaca

SEQ ID NO: 1802971 - RNA, 23 nt, Human
uggggaugagaaagguugaagca

SEQ ID NO: 1802972 - RNA, 20 nt, Human
uggggccaggcugggucgcc

SEQ ID NO: 1802973 - RNA, 15 nt, Human
uggggaugagaaagg

SEQ ID NO: 1802974 - RNA, 21 nt, Human
uggggccaggcugggucgccc

SEQ ID NO: 1802975 - RNA, 22 nt, Human
uggggccaggcugggucgcccu

SEQ ID NO: 1802976 - RNA, 20 nt, Human
uggggccaguuggucccccu

SEQ ID NO: 1802977 - RNA, 15 nt, Human
ugggccuucagggag

SEQ ID NO: 1802978 - RNA, 12 nt, Human
ugggccuucagg

SEQ ID NO: 1802979 - RNA, 15 nt, Human
ugccucaagagaagg

SEQ ID NO: 1802980 - RNA, 14 nt, Human
ugccucaagagaag

SEQ ID NO: 1802981 - RNA, 14 nt, Human
ugccuccucuucaa

SEQ ID NO: 1802982 - RNA, 16 nt, Human
ugccuccucuucaacu

SEQ ID NO: 1802983 - RNA, 13 nt, Human
ugcccugggaggc

SEQ ID NO: 1802984 - RNA, 15 nt, Human
ugcccugggaggcag

SEQ ID NO: 1802985 - RNA, 17 nt, Human
ugcccugggaggcagug

SEQ ID NO: 1802986 - RNA, 18 nt, Human
ugcccugggaggcaguga

SEQ ID NO: 1802987 - RNA, 15 nt, Human
ugcccugcccaccug

SEQ ID NO: 1802988 - RNA, 16 nt, Human
ugcccugcccaccugg

SEQ ID NO: 1802989 - RNA, 20 nt, Human
ugcccugcccaccuggccuc

SEQ ID NO: 1802990 - RNA, 12 nt, Human
ugcccuggugcu

SEQ ID NO: 1802991 - RNA, 14 nt, Human
ugcccuggugcugc

SEQ ID NO: 1802992 - RNA, 16 nt, Human
ugcccuggugcugcca

SEQ ID NO: 1802993 - RNA, 17 nt, Human
ugcccuggugcugccac

SEQ ID NO: 1802994 - RNA, 17 nt, Human
ugcccugguuuccugcc

SEQ ID NO: 1802995 - RNA, 18 nt, Human
ugcccugguuuccugccc

SEQ ID NO: 1802996 - RNA, 19 nt, Human
ugcccugguuuccugcccu

SEQ ID NO: 1802997 - RNA, 20 nt, Human
ugcccugguuuccugcccug

SEQ ID NO: 1802998 - RNA, 23 nt, Human
ugcccugguuuccugcccuggga

SEQ ID NO: 1802999 - RNA, 23 nt, Human
ugcccugugaguacuacaguccu

SEQ ID NO: 1803000 - RNA, 15 nt, Human
ugccccucccuucaa

SEQ ID NO: 1803001 - RNA, 16 nt, Human
ugccccucccuucaac

SEQ ID NO: 1803002 - RNA, 17 nt, Human
ugccccuccucucugcc

SEQ ID NO: 1803003 - RNA, 18 nt, Human
ugccccuccucucugccc

SEQ ID NO: 1803004 - RNA, 19 nt, Human
ugccccuccucucugcccu

SEQ ID NO: 1803005 - RNA, 20 nt, Human
ugccccuccucucugcccua

SEQ ID NO: 1803006 - RNA, 16 nt, Human
ugccccuggcagcccc

SEQ ID NO: 1803007 - RNA, 14 nt, Human
ugcccggcugcgga

SEQ ID NO: 1803008 - RNA, 12 nt, Human
ugcccggcugcg

SEQ ID NO: 1803009 - RNA, 20 nt, Human
ugcccaggcuggcgugcagu

SEQ ID NO: 1803010 - RNA, 19 nt, Human
ugcccaggcuggcgugcag

SEQ ID NO: 1803011 - RNA, 18 nt, Human
ugcccaggcuggcgugca

SEQ ID NO: 1803012 - RNA, 21 nt, Human
ugcaguggugcgaucuggguu

SEQ ID NO: 1803013 - RNA, 21 nt, Human
ugcaguuacacuaaaagguga

SEQ ID NO: 1803014 - RNA, 13 nt, Human
ugcagggaguccg

SEQ ID NO: 1803015 - RNA, 15 nt, Human
ugauuuaauuugaaa

SEQ ID NO: 1803016 - RNA, 16 nt, Human
ugcaguugccagucac

SEQ ID NO: 1803017 - RNA, 18 nt, Human
ugcauauuauuuuauguu

SEQ ID NO: 1803018 - RNA, 16 nt, Human
ugccacuaaauugaca

SEQ ID NO: 1803019 - RNA, 20 nt, Human
ugccaggaagccagcaggcu

SEQ ID NO: 1803020 - RNA, 22 nt, Human
ugccaggaagccagcaggcucu

SEQ ID NO: 1803021 - RNA, 14 nt, Human
ugccaggcauggug

SEQ ID NO: 1803022 - RNA, 23 nt, Human
ugcauuuggugguuucagaaaug

SEQ ID NO: 1803023 - RNA, 21 nt, Human
ugcauuuggugguuucagaaa

SEQ ID NO: 1803024 - RNA, 23 nt, Human
ugcucuccgaccagacaccuuga

SEQ ID NO: 1803025 - RNA, 12 nt, Human
ugcucuccucuu

SEQ ID NO: 1803026 - RNA, 14 nt, Human
ugcucuccucuugc

SEQ ID NO: 1803027 - RNA, 17 nt, Human
ugcucuugaugccuggc

SEQ ID NO: 1803028 - RNA, 15 nt, Human
ugcucaggagcccug

SEQ ID NO: 1803029 - RNA, 17 nt, Human
ugcucacauaucuguca

SEQ ID NO: 1803030 - RNA, 18 nt, Human
ugcucaggagcccuggga

SEQ ID NO: 1803031 - RNA, 19 nt, Human
ugcucaggagcccugggag

SEQ ID NO: 1803032 - RNA, 20 nt, Human
ugcucaggagcccugggagg

SEQ ID NO: 1803033 - RNA, 17 nt, Human
ugcuagaacucccuuuc

SEQ ID NO: 1803034 - RNA, 15 nt, Human
ugcuagaacucccuu

SEQ ID NO: 1803035 - RNA, 14 nt, Human
ugcuagaacucccu

SEQ ID NO: 1803036 - RNA, 13 nt, Human
ugcuagaacuccc

SEQ ID NO: 1803037 - RNA, 22 nt, Human
ugcuaggaacacuccuucacag

SEQ ID NO: 1803038 - RNA, 21 nt, Human
ugcuaggaacacuccuucaca

SEQ ID NO: 1803039 - RNA, 20 nt, Human
ugcuaggaacacuccuucac

SEQ ID NO: 1803040 - RNA, 17 nt, Human
ugcggacagccacggcc

SEQ ID NO: 1803041 - RNA, 22 nt, Human
ugcuacuguccuacccacccuc

SEQ ID NO: 1803042 - RNA, 21 nt, Human
ugcuacuguccuacccacccu

SEQ ID NO: 1803043 - RNA, 22 nt, Human
ugcuaagacucaguggggaggg

SEQ ID NO: 1803044 - RNA, 20 nt, Human
ugccuugcauaauggucaga

SEQ ID NO: 1803045 - RNA, 21 nt, Human
ugcgcaggcuggcccugcccu

SEQ ID NO: 1803046 - RNA, 22 nt, Human
ugcgcaggcuggcccugcccug

SEQ ID NO: 1803047 - RNA, 23 nt, Human
ugcgcaggcuggcccugcccugg

SEQ ID NO: 1803048 - RNA, 20 nt, Human
ugcugggauuacagguguga

SEQ ID NO: 1803049 - RNA, 19 nt, Human
ugcugcuugaggcaacuca

SEQ ID NO: 1803050 - RNA, 14 nt, Human
ugcugggccccugc

SEQ ID NO: 1803051 - RNA, 12 nt, Human
ugcugcuugagg

SEQ ID NO: 1803052 - RNA, 16 nt, Human
ugcugggccccugccu

SEQ ID NO: 1803053 - RNA, 17 nt, Human
ugcugggccccugccuc

SEQ ID NO: 1803054 - RNA, 18 nt, Human
ugcugggccccugccucu

SEQ ID NO: 1803055 - RNA, 19 nt, Human
ugcugggccccugccucuc

SEQ ID NO: 1803056 - RNA, 21 nt, Human
ugcugggccccugccucucug

SEQ ID NO: 1803057 - RNA, 22 nt, Human
ugcugggccccugccucucugc

SEQ ID NO: 1803058 - RNA, 23 nt, Human
ugcugggccccugccucucugca

SEQ ID NO: 1803059 - RNA, 24 nt, Human
ugcugggccccugccucucugcag

SEQ ID NO: 1803060 - RNA, 15 nt, Human
ugcugccugcuuuuu

SEQ ID NO: 1803061 - RNA, 17 nt, Human
ugcugccugcuuuuuau

SEQ ID NO: 1803062 - RNA, 23 nt, Human
ugcugcauuuaaaagauacaguu

SEQ ID NO: 1803063 - RNA, 19 nt, Human
ugcugcauuuaaaagauac

SEQ ID NO: 1803064 - RNA, 18 nt, Human
ugcugcauuuaaaagaua

SEQ ID NO: 1803065 - RNA, 17 nt, Human
ugcugcauuuaaaagau

SEQ ID NO: 1803066 - RNA, 18 nt, Human
ugcuguaacuuucugaaa

SEQ ID NO: 1803067 - RNA, 18 nt, Human
ugcugguuuuucaguuuu

SEQ ID NO: 1803068 - RNA, 16 nt, Human
ugcugguuuuucaguu

SEQ ID NO: 1803069 - RNA, 15 nt, Human
ugcugguuuuucagu

SEQ ID NO: 1803070 - RNA, 12 nt, Human
ugcugguuuuuc

SEQ ID NO: 1803071 - RNA, 13 nt, Human
ugcugguuuuagu

SEQ ID NO: 1803072 - RNA, 17 nt, Human
ugcugggcuugucugua

SEQ ID NO: 1803073 - RNA, 20 nt, Human
ugcugggggggauuguaaaa

SEQ ID NO: 1803074 - RNA, 13 nt, Human
ugcuggguguggc

SEQ ID NO: 1803075 - RNA, 20 nt, Human
ugauucaacagguuuuccug

SEQ ID NO: 1803076 - RNA, 13 nt, Human
ugauucagacagc

SEQ ID NO: 1803077 - RNA, 14 nt, Human
ugauucagacagcu

SEQ ID NO: 1803078 - RNA, 15 nt, Human
ugauucagacagcug

SEQ ID NO: 1803079 - RNA, 16 nt, Human
ugauucagacagcugc

SEQ ID NO: 1803080 - RNA, 12 nt, Human
ugauucacagug

SEQ ID NO: 1803081 - RNA, 13 nt, Human
ugauuauauguca

SEQ ID NO: 1803082 - RNA, 20 nt, Human
ugauguucuuucacccuuuu

SEQ ID NO: 1803083 - RNA, 16 nt, Human
ugauuaccagggacug

SEQ ID NO: 1803084 - RNA, 21 nt, Human
ugauucuccugccucagccuc

SEQ ID NO: 1803085 - RNA, 23 nt, Human
ugauucagacagcugccugggau

SEQ ID NO: 1803086 - RNA, 18 nt, Human
ugauucagacagcugccu

SEQ ID NO: 1803087 - RNA, 19 nt, Human
ugauucagacagcugccug

SEQ ID NO: 1803088 - RNA, 20 nt, Human
ugauucagacagcugccugg

SEQ ID NO: 1803089 - RNA, 21 nt, Human
ugauucagacagcugccuggg

SEQ ID NO: 1803090 - RNA, 16 nt, Human
ugauugugucucuugg

SEQ ID NO: 1803091 - RNA, 20 nt, Human
ugauuggcaggaguuggaag

SEQ ID NO: 1803092 - RNA, 13 nt, Human
ugauuggaggggg

SEQ ID NO: 1803093 - RNA, 21 nt, Human
ugauuggaggggggagguggg

SEQ ID NO: 1803094 - RNA, 23 nt, Human
ugaugcuacaggauuugaaauug

SEQ ID NO: 1803095 - RNA, 21 nt, Human
ugaugccugugaacugaacuc

SEQ ID NO: 1803096 - RNA, 20 nt, Human
ugaugcuacaggauuugaaa

SEQ ID NO: 1803097 - RNA, 15 nt, Human
ugaugccugugaacu

SEQ ID NO: 1803098 - RNA, 20 nt, Human
ugaugccugugaacugaacu

SEQ ID NO: 1803099 - RNA, 11 nt, Human
ugaugccuggc

SEQ ID NO: 1803100 - RNA, 16 nt, Human
ugaucuuugcagacag

SEQ ID NO: 1803101 - RNA, 18 nt, Human
ugaucuuugcagacaggc

SEQ ID NO: 1803102 - RNA, 14 nt, Human
ugaugguuccccug

SEQ ID NO: 1803103 - RNA, 13 nt, Human
ugaugguuguaca

SEQ ID NO: 1803104 - RNA, 14 nt, Human
ugaugguuguacau

SEQ ID NO: 1803105 - RNA, 21 nt, Human
ugaugguuguacauauaagug

SEQ ID NO: 1803106 - RNA, 16 nt, Human
ugaugcuucuucagag

SEQ ID NO: 1803107 - RNA, 17 nt, Human
ugaugcuucuucagaga

SEQ ID NO: 1803108 - RNA, 18 nt, Human
ugaugcuucuucagagac

SEQ ID NO: 1803109 - RNA, 19 nt, Human
ugaugucccaacuuguaaa

SEQ ID NO: 1803110 - RNA, 16 nt, Human
ugauguguuaucucuu

SEQ ID NO: 1803111 - RNA, 19 nt, Human
ugauccacccaccucagcc

SEQ ID NO: 1803112 - RNA, 18 nt, Human
ugauccacccaccucagc

SEQ ID NO: 1803113 - RNA, 17 nt, Human
ugauccacccaccucag

SEQ ID NO: 1803114 - RNA, 17 nt, Human
ugaucucucgugauuga

SEQ ID NO: 1803115 - RNA, 15 nt, Human
ugaucugugggcaca

SEQ ID NO: 1803116 - RNA, 20 nt, Human
ugaucuucuuuauaauucua

SEQ ID NO: 1803117 - RNA, 13 nt, Human
ugauagcacagac

SEQ ID NO: 1803118 - RNA, 14 nt, Human
ugauagcacagacc

SEQ ID NO: 1803119 - RNA, 18 nt, Human
ugauagcaaauggccuca

SEQ ID NO: 1803120 - RNA, 17 nt, Human
ugauccaagcugguccc

SEQ ID NO: 1803121 - RNA, 15 nt, Human
ugauccaagcugguc

SEQ ID NO: 1803122 - RNA, 14 nt, Human
ugauccaagcuggu

SEQ ID NO: 1803123 - RNA, 13 nt, Human
ugauccaagcugg

SEQ ID NO: 1803124 - RNA, 17 nt, Human
ugagcagggcucagcgg

SEQ ID NO: 1803125 - RNA, 16 nt, Human
ugagcagggcucagcg

SEQ ID NO: 1803126 - RNA, 19 nt, Human
ugagcagggcucagcgggg

SEQ ID NO: 1803127 - RNA, 18 nt, Human
ugagcaucaggccaggcc

SEQ ID NO: 1803128 - RNA, 19 nt, Human
ugagcaucaggccaggccc

SEQ ID NO: 1803129 - RNA, 20 nt, Human
ugagcaucaggccaggcccu

SEQ ID NO: 1803130 - RNA, 21 nt, Human
ugagccucagcauccuggcac

SEQ ID NO: 1803131 - RNA, 18 nt, Human
ugagccucagcauccugg

SEQ ID NO: 1803132 - RNA, 22 nt, Human
ugagccucagcauccuggcacc

SEQ ID NO: 1803133 - RNA, 14 nt, Human
ugagccucagucuc

SEQ ID NO: 1803134 - RNA, 17 nt, Human
ugagccucagcauccug

SEQ ID NO: 1803135 - RNA, 21 nt, Human
ugagccgagaucacgccacug

SEQ ID NO: 1803136 - RNA, 19 nt, Human
ugagccgagaucacgccac

SEQ ID NO: 1803137 - RNA, 18 nt, Human
ugagcccuguccugccua

SEQ ID NO: 1803138 - RNA, 16 nt, Human
ugagagugaacaaauu

SEQ ID NO: 1803139 - RNA, 20 nt, Human
ugagacucgcgacaaugcaa

SEQ ID NO: 1803140 - RNA, 21 nt, Human
ugagacucgcgacaaugcaaa

SEQ ID NO: 1803141 - RNA, 22 nt, Human
ugagacucgcgacaaugcaaac

SEQ ID NO: 1803142 - RNA, 23 nt, Human
ugagacucgcgacaaugcaaacc

SEQ ID NO: 1803143 - RNA, 15 nt, Human
ugagcagggcucagc

SEQ ID NO: 1803144 - RNA, 14 nt, Human
ugagcagggcucag

SEQ ID NO: 1803145 - RNA, 13 nt, Human
ugagcagggcuca

SEQ ID NO: 1803146 - RNA, 12 nt, Human
ugagcagggcuc

SEQ ID NO: 1803147 - RNA, 15 nt, Human
ugagaucaaaacggu

SEQ ID NO: 1803148 - RNA, 14 nt, Human
ugagaucagccugg

SEQ ID NO: 1803149 - RNA, 15 nt, Human
ugagaucagccuggg

SEQ ID NO: 1803150 - RNA, 19 nt, Human
ugagacucgcgacaaugca

SEQ ID NO: 1803151 - RNA, 21 nt, Human
ugaccucaggugauccaccca

SEQ ID NO: 1803152 - RNA, 20 nt, Human
ugaccucaggugauccaccc

SEQ ID NO: 1803153 - RNA, 22 nt, Human
ugaccucagcuuugauauuuca

SEQ ID NO: 1803154 - RNA, 16 nt, Human
ugaccucagcuuugau

SEQ ID NO: 1803155 - RNA, 17 nt, Human
ugagaaauuuauaaacu

SEQ ID NO: 1803156 - RNA, 17 nt, Human
ugagggaacagagaggu

SEQ ID NO: 1803157 - RNA, 13 nt, Human
ugaggcucugccc

SEQ ID NO: 1803158 - RNA, 14 nt, Human
ugaggcucugcccu

SEQ ID NO: 1803159 - RNA, 20 nt, Human
ugaggcuccacuuggucugu

SEQ ID NO: 1803160 - RNA, 18 nt, Human
ugaggcuccacuuggucu

SEQ ID NO: 1803161 - RNA, 12 nt, Human
ugaggugggagg

SEQ ID NO: 1803162 - RNA, 13 nt, Human
ugaggugggagga

SEQ ID NO: 1803163 - RNA, 16 nt, Human
ugaggagcuugaaacc

SEQ ID NO: 1803164 - RNA, 13 nt, Human
ugagcugggauga

SEQ ID NO: 1803165 - RNA, 23 nt, Human
ugaggcauuuguuugaacugaua

SEQ ID NO: 1803166 - RNA, 23 nt, Human
ugaggcuagugugguguuuccug

SEQ ID NO: 1803167 - RNA, 21 nt, Human
ugaggcauuuguuugaacuga

SEQ ID NO: 1803168 - RNA, 17 nt, Human
ugaggcuaguguggugu

SEQ ID NO: 1803169 - RNA, 20 nt, Human
ugaggcauuuguuugaacug

SEQ ID NO: 1803170 - RNA, 19 nt, Human
ugaggcauuuguuugaacu

SEQ ID NO: 1803171 - RNA, 23 nt, Human
ugaggcaucgcaauguaagacuc

SEQ ID NO: 1803172 - RNA, 12 nt, Human
ugaggcauuugu

SEQ ID NO: 1803173 - RNA, 22 nt, Human
ugaguuugggccccagaggcug

SEQ ID NO: 1803174 - RNA, 23 nt, Human
ugaguuugggccccagaggcugg

SEQ ID NO: 1803175 - RNA, 14 nt, Human
ugagugagcaugcc

SEQ ID NO: 1803176 - RNA, 16 nt, Human
ugaguugauagcacag

SEQ ID NO: 1803177 - RNA, 20 nt, Human
ugaguugauagcacagaccc

SEQ ID NO: 1803178 - RNA, 13 nt, Human
ugagucugaaggc

SEQ ID NO: 1803179 - RNA, 15 nt, Human
ugagucugaaggcug

SEQ ID NO: 1803180 - RNA, 17 nt, Human
ugagucugaaggcuggg

SEQ ID NO: 1803181 - RNA, 18 nt, Human
ugagucugaaggcugggu

SEQ ID NO: 1803182 - RNA, 19 nt, Human
ugagucgaggacagggagg

SEQ ID NO: 1803183 - RNA, 19 nt, Human
ugagucccaggcugagccu

SEQ ID NO: 1803184 - RNA, 15 nt, Human
ugagucccaggcuga

SEQ ID NO: 1803185 - RNA, 21 nt, Human
ugaggugggaggaucucuuga

SEQ ID NO: 1803186 - RNA, 19 nt, Human
ugaguccagaaguuugaga

SEQ ID NO: 1803187 - RNA, 20 nt, Human
ugaaaagcuccauuuuuagu

SEQ ID NO: 1803188 - RNA, 13 nt, Human
ugaaaauuuugau

SEQ ID NO: 1803189 - RNA, 21 nt, Human
ugaaaauuuugauguuuuaag

SEQ ID NO: 1803190 - RNA, 19 nt, Human
ugaaaauuuugauguuuua

SEQ ID NO: 1803191 - RNA, 14 nt, Human
ugaaacauuuuguc

SEQ ID NO: 1803192 - RNA, 13 nt, Human
ugaaagggcccag

SEQ ID NO: 1803193 - RNA, 23 nt, Human
ugaaagggaguauuacaaaaaca

SEQ ID NO: 1803194 - RNA, 20 nt, Human
ugaaaccccuguaggccuca

SEQ ID NO: 1803195 - RNA, 19 nt, Human
ugaaagauggcugugccuc

SEQ ID NO: 1803196 - RNA, 18 nt, Human
ugaaagauggcugugccu

SEQ ID NO: 1803197 - RNA, 18 nt, Human
ugaaagcccugagcuuuc

SEQ ID NO: 1803198 - RNA, 12 nt, Human
ugaaauuauuca

SEQ ID NO: 1803199 - RNA, 16 nt, Human
ugaaaucaguuacucu

SEQ ID NO: 1803200 - RNA, 17 nt, Human
ugaaaucaguuacucuu

SEQ ID NO: 1803201 - RNA, 16 nt, Human
ugaacuccuggccuca

SEQ ID NO: 1803202 - RNA, 20 nt, Human
ugaaccaccacacccagccc

SEQ ID NO: 1803203 - RNA, 17 nt, Human
ugaaccaccacacccag

SEQ ID NO: 1803204 - RNA, 23 nt, Human
ugaaccacaucuugcucugcuga

SEQ ID NO: 1803205 - RNA, 19 nt, Human
ugaaccacaucuugcucug

SEQ ID NO: 1803206 - RNA, 22 nt, Human
ugaaccaagaacuuuccaggaa

SEQ ID NO: 1803207 - RNA, 20 nt, Human
ugaacauugguucuuucauu

SEQ ID NO: 1803208 - RNA, 12 nt, Human
ucuuugccaagu

SEQ ID NO: 1803209 - RNA, 21 nt, Human
ucuuuggacagaagcagcucu

SEQ ID NO: 1803210 - RNA, 22 nt, Human
ucuuuggacagaagcagcucuu

SEQ ID NO: 1803211 - RNA, 19 nt, Human
ucuuuggacagaagcagcu

SEQ ID NO: 1803212 - RNA, 17 nt, Human
ucuuuggacacucacac

SEQ ID NO: 1803213 - RNA, 21 nt, Human
ucuuucauuugcuuuggaagu

SEQ ID NO: 1803214 - RNA, 17 nt, Human
ucuuuccaaaguacacu

SEQ ID NO: 1803215 - RNA, 14 nt, Human
ucuuuccaaaguac

SEQ ID NO: 1803216 - RNA, 13 nt, Human
ucuuuccaaagua

SEQ ID NO: 1803217 - RNA, 16 nt, Human
ucuuucagccaagaau

SEQ ID NO: 1803218 - RNA, 19 nt, Human
ucuuucagccaagaauucu

SEQ ID NO: 1803219 - RNA, 20 nt, Human
ucuuucagccaagaauucuu

SEQ ID NO: 1803220 - RNA, 21 nt, Human
ucuuucagccaagaauucuua

SEQ ID NO: 1803221 - RNA, 15 nt, Human
ucuugcaugaggcua

SEQ ID NO: 1803222 - RNA, 13 nt, Human
ucuccucuugcca

SEQ ID NO: 1803223 - RNA, 16 nt, Human
ucuccucuugccacug

SEQ ID NO: 1803224 - RNA, 16 nt, Human
ucucccuucauccuuc

SEQ ID NO: 1803225 - RNA, 20 nt, Human
ucuccucugcugcuggcugg

SEQ ID NO: 1803226 - RNA, 22 nt, Human
ucuccucuugccacugccucuu

SEQ ID NO: 1803227 - RNA, 17 nt, Human
ucuccucuugccacugc

SEQ ID NO: 1803228 - RNA, 23 nt, Human
ucuuucacccuuuucuguuugcu

SEQ ID NO: 1803229 - RNA, 16 nt, Human
ucuuguguguuuauug

SEQ ID NO: 1803230 - RNA, 12 nt, Human
ucuuguguuucu

SEQ ID NO: 1803231 - RNA, 21 nt, Human
ucuuguguguuuauugucaaa

SEQ ID NO: 1803232 - RNA, 18 nt, Human
ugacaaggauugcuacug

SEQ ID NO: 1803233 - RNA, 19 nt, Human
ugacagagugagacucugu

SEQ ID NO: 1803234 - RNA, 23 nt, Human
ugacauaaguauuuaauucaugu

SEQ ID NO: 1803235 - RNA, 17 nt, Human
ugacagagugagacucu

SEQ ID NO: 1803236 - RNA, 14 nt, Human
ugacagagugagac

SEQ ID NO: 1803237 - RNA, 23 nt, Human
ugacagaggcagccccauucugc

SEQ ID NO: 1803238 - RNA, 18 nt, Human
ugacagaggcagccccau

SEQ ID NO: 1803239 - RNA, 17 nt, Human
ugacagaggcagcccca

SEQ ID NO: 1803240 - RNA, 16 nt, Human
ugacagaggcagcccc

SEQ ID NO: 1803241 - RNA, 15 nt, Human
ugacagaggcagccc

SEQ ID NO: 1803242 - RNA, 14 nt, Human
ugacagaggcagcc

SEQ ID NO: 1803243 - RNA, 23 nt, Human
ugacagacacaggcccggcucca

SEQ ID NO: 1803244 - RNA, 20 nt, Human
ugacagacacaggcccggcu

SEQ ID NO: 1803245 - RNA, 13 nt, Human
ugacagaggcagc

SEQ ID NO: 1803246 - RNA, 16 nt, Human
ugacagacagcccucc

SEQ ID NO: 1803247 - RNA, 13 nt, Human
ugacaugucuuuu

SEQ ID NO: 1803248 - RNA, 15 nt, Human
ugacaugucuuuucu

SEQ ID NO: 1803249 - RNA, 19 nt, Human
ugaccagcaccaucucucc

SEQ ID NO: 1803250 - RNA, 20 nt, Human
ugaccacugcagaagacagu

SEQ ID NO: 1803251 - RNA, 20 nt, Human
ugaccagcaccaucucuccu

SEQ ID NO: 1803252 - RNA, 16 nt, Human
ugaccauucuccaccu

SEQ ID NO: 1803253 - RNA, 17 nt, Human
ugaccauucuccaccug

SEQ ID NO: 1803254 - RNA, 18 nt, Human
ugaccauucuccaccugc

SEQ ID NO: 1803255 - RNA, 19 nt, Human
ugaccauucuccaccugcc

SEQ ID NO: 1803256 - RNA, 13 nt, Human
ugaccgugaggcc

SEQ ID NO: 1803257 - RNA, 14 nt, Human
ugaccgugaggcca

SEQ ID NO: 1803258 - RNA, 16 nt, Human
ugaccgugaggccaga

SEQ ID NO: 1803259 - RNA, 20 nt, Human
ugaccgugaggccagagaca

SEQ ID NO: 1803260 - RNA, 17 nt, Human
ugaaggccccgcccagg

SEQ ID NO: 1803261 - RNA, 20 nt, Human
ugaaggacauugcggacagc

SEQ ID NO: 1803262 - RNA, 19 nt, Human
ugaaggacauugcggacag

SEQ ID NO: 1803263 - RNA, 22 nt, Human
ugaaggacauugcggacagcca

SEQ ID NO: 1803264 - RNA, 20 nt, Human
ugaaggagagcccuucauuu

SEQ ID NO: 1803265 - RNA, 16 nt, Human
ugaaggagagcccuuc

SEQ ID NO: 1803266 - RNA, 15 nt, Human
ugaaggccccgccca

SEQ ID NO: 1803267 - RNA, 16 nt, Human
ugaaggccccgcccag

SEQ ID NO: 1803268 - RNA, 17 nt, Human
ugaacuccuggccucaa

SEQ ID NO: 1803269 - RNA, 16 nt, Human
ugaacucugacaacag

SEQ ID NO: 1803270 - RNA, 20 nt, Human
ugaaggaauaaauugcuccu

SEQ ID NO: 1803271 - RNA, 16 nt, Human
ugaauuauuuucucuc

SEQ ID NO: 1803272 - RNA, 23 nt, Human
ugaaugaugauccuaggcauuug

SEQ ID NO: 1803273 - RNA, 14 nt, Human
ugaauaaagacacc

SEQ ID NO: 1803274 - RNA, 15 nt, Human
ugaauaaagacaccu

SEQ ID NO: 1803275 - RNA, 22 nt, Human
ugaaucauuuuaccuuugacaa

SEQ ID NO: 1803276 - RNA, 23 nt, Human
ugaaucauuuuaccuuugacaaa

SEQ ID NO: 1803277 - RNA, 13 nt, Human
ucgugacaacacu

SEQ ID NO: 1803278 - RNA, 14 nt, Human
uccuuagaagugga

SEQ ID NO: 1803279 - RNA, 18 nt, Human
ucggacuuagcugggaga

SEQ ID NO: 1803280 - RNA, 20 nt, Human
ucgugguaggacuguagaaa

SEQ ID NO: 1803281 - RNA, 15 nt, Human
ucgugguaggacugu

SEQ ID NO: 1803282 - RNA, 14 nt, Human
ucgugguaggacug

SEQ ID NO: 1803283 - RNA, 16 nt, Human
ucguguccccuauccu

SEQ ID NO: 1803284 - RNA, 20 nt, Human
ucuaaaggcuaccuuuguau

SEQ ID NO: 1803285 - RNA, 19 nt, Human
ucuaaaggcuaccuuugua

SEQ ID NO: 1803286 - RNA, 17 nt, Human
ucuaaaggcuaccuuug

SEQ ID NO: 1803287 - RNA, 18 nt, Human
ucuaaaggcuaccuuugu

SEQ ID NO: 1803288 - RNA, 14 nt, Human
ucuaucaccaagga

SEQ ID NO: 1803289 - RNA, 17 nt, Human
ucuaugacacaugcaag

SEQ ID NO: 1803290 - RNA, 14 nt, Human
ucuaugacacaugc

SEQ ID NO: 1803291 - RNA, 15 nt, Human
ucuaggaagacuuug

SEQ ID NO: 1803292 - RNA, 16 nt, Human
ucuaggaagacuuugg

SEQ ID NO: 1803293 - RNA, 19 nt, Human
ucuaggaagacuuuggaaa

SEQ ID NO: 1803294 - RNA, 21 nt, Human
ucuaggaagacuuuggaaaga

SEQ ID NO: 1803295 - RNA, 16 nt, Human
ucuacagaggccaugg

SEQ ID NO: 1803296 - RNA, 15 nt, Human
ucuacagaggccaug

SEQ ID NO: 1803297 - RNA, 14 nt, Human
ucuaccuuccugca

SEQ ID NO: 1803298 - RNA, 23 nt, Human
ucucaguccaugaagauguagag

SEQ ID NO: 1803299 - RNA, 13 nt, Human
ucuaugggacuca

SEQ ID NO: 1803300 - RNA, 12 nt, Human
ucuaugggacuc

SEQ ID NO: 1803301 - RNA, 19 nt, Human
ucuaugggacucaaugcac

SEQ ID NO: 1803302 - RNA, 16 nt, Human
ucucauacucaccuca

SEQ ID NO: 1803303 - RNA, 18 nt, Human
ucucauacucaccucacc

SEQ ID NO: 1803304 - RNA, 16 nt, Human
ucuccacccugcucuc

SEQ ID NO: 1803305 - RNA, 14 nt, Human
ucuccacccugcuc

SEQ ID NO: 1803306 - RNA, 17 nt, Human
ucuccacccugcucucc

SEQ ID NO: 1803307 - RNA, 13 nt, Human
ucuccacccugcu

SEQ ID NO: 1803308 - RNA, 16 nt, Human
ucucaugccucagccu

SEQ ID NO: 1803309 - RNA, 19 nt, Human
ucucaugccucagccuccu

SEQ ID NO: 1803310 - RNA, 13 nt, Human
ucucaugccucag

SEQ ID NO: 1803311 - RNA, 13 nt, Human
ucuccacuccaga

SEQ ID NO: 1803312 - RNA, 22 nt, Human
ucuccaccugccagggacagag

SEQ ID NO: 1803313 - RNA, 17 nt, Human
ucuccaccugccaggga

SEQ ID NO: 1803314 - RNA, 19 nt, Human
ucuccaccugccagggaca

SEQ ID NO: 1803315 - RNA, 14 nt, Human
ucuccaccugccag

SEQ ID NO: 1803316 - RNA, 15 nt, Human
ucuccaccugccagg

SEQ ID NO: 1803317 - RNA, 16 nt, Human
ucuccaccugccaggg

SEQ ID NO: 1803318 - RNA, 13 nt, Human
ucucccccagccc

SEQ ID NO: 1803319 - RNA, 12 nt, Human
ucucccccagcc

SEQ ID NO: 1803320 - RNA, 11 nt, Human
ucuccaggcug

SEQ ID NO: 1803321 - RNA, 18 nt, Human
ucucccucagucuggccc

SEQ ID NO: 1803322 - RNA, 23 nt, Human
ucucccucagucuggcccuuccu

SEQ ID NO: 1803323 - RNA, 14 nt, Human
ucucccucccuugg

SEQ ID NO: 1803324 - RNA, 22 nt, Human
ucuccagccccuggaugcagcc

SEQ ID NO: 1803325 - RNA, 16 nt, Human
ucuccagccccuggau

SEQ ID NO: 1803326 - RNA, 18 nt, Human
ucuccagccccuggaugc

SEQ ID NO: 1803327 - RNA, 14 nt, Human
ucuccacugccuuc

SEQ ID NO: 1803328 - RNA, 12 nt, Human
ucuccagccccu

SEQ ID NO: 1803329 - RNA, 13 nt, Human
ucuccagccccug

SEQ ID NO: 1803330 - RNA, 14 nt, Human
ucuccagccccugg

SEQ ID NO: 1803331 - RNA, 15 nt, Human
ucuccagccccugga

SEQ ID NO: 1803332 - RNA, 12 nt, Human
uccuaguuccac

SEQ ID NO: 1803333 - RNA, 23 nt, Human
uccuauauuguuuucaguguaca

SEQ ID NO: 1803334 - RNA, 17 nt, Human
uccuaucagaaguuucu

SEQ ID NO: 1803335 - RNA, 18 nt, Human
uccucauuagcauuuugc

SEQ ID NO: 1803336 - RNA, 10 nt, Human
uccuccaggu

SEQ ID NO: 1803337 - RNA, 13 nt, Human
uccucccaccuca

SEQ ID NO: 1803338 - RNA, 12 nt, Human
uccucccaccuc

SEQ ID NO: 1803339 - RNA, 16 nt, Human
uccgcuuucuacccag

SEQ ID NO: 1803340 - RNA, 20 nt, Human
uccgcuuucuacccagcgag

SEQ ID NO: 1803341 - RNA, 18 nt, Human
uccgcuuucuacccagcg

SEQ ID NO: 1803342 - RNA, 20 nt, Human
uccuaagcuauucaguaaua

SEQ ID NO: 1803343 - RNA, 21 nt, Human
uccuaagcuauucaguaauaa

SEQ ID NO: 1803344 - RNA, 14 nt, Human
uccgccucuugggu

SEQ ID NO: 1803345 - RNA, 15 nt, Human
ucccuuccucuuucc

SEQ ID NO: 1803346 - RNA, 16 nt, Human
ucccuuccucuuucca

SEQ ID NO: 1803347 - RNA, 22 nt, Human
ucccuucaaccauuccccaugg

SEQ ID NO: 1803348 - RNA, 21 nt, Human
ucccccuguuucagaggcuca

SEQ ID NO: 1803349 - RNA, 15 nt, Human
ucccccuuccaugga

SEQ ID NO: 1803350 - RNA, 23 nt, Human
uccuggcacccggccccugcugg

SEQ ID NO: 1803351 - RNA, 13 nt, Human
uccuggcacugcu

SEQ ID NO: 1803352 - RNA, 16 nt, Human
uccuggcacugcuucc

SEQ ID NO: 1803353 - RNA, 12 nt, Human
uccuggccucaa

SEQ ID NO: 1803354 - RNA, 11 nt, Human
uccuguagccc

SEQ ID NO: 1803355 - RNA, 13 nt, Human
uccuguagcccua

SEQ ID NO: 1803356 - RNA, 16 nt, Human
uccugccuaaggcuga

SEQ ID NO: 1803357 - RNA, 19 nt, Human
uccugccuaaggcugaacu

SEQ ID NO: 1803358 - RNA, 14 nt, Human
uccuggaguucugg

SEQ ID NO: 1803359 - RNA, 20 nt, Human
uccugcccuuaccugccagg

SEQ ID NO: 1803360 - RNA, 11 nt, Human
uccugcccugg

SEQ ID NO: 1803361 - RNA, 12 nt, Human
uccugcccuggg

SEQ ID NO: 1803362 - RNA, 14 nt, Human
uccugcccugggag

SEQ ID NO: 1803363 - RNA, 15 nt, Human
uccugcccugggagg

SEQ ID NO: 1803364 - RNA, 21 nt, Human
uccugcccugggaggcaguga

SEQ ID NO: 1803365 - RNA, 17 nt, Human
uccugcccuuaccugcc

SEQ ID NO: 1803366 - RNA, 16 nt, Human
uccugcauuugugaaa

SEQ ID NO: 1803367 - RNA, 21 nt, Human
uccugaggcuccacuuggucu

SEQ ID NO: 1803368 - RNA, 20 nt, Human
uccugaggcuccacuugguc

SEQ ID NO: 1803369 - RNA, 19 nt, Human
uccugaggcuccacuuggu

SEQ ID NO: 1803370 - RNA, 11 nt, Human
uccugccacca

SEQ ID NO: 1803371 - RNA, 16 nt, Human
uccugccaccacgccc

SEQ ID NO: 1803372 - RNA, 13 nt, Human
uccugccaggcau

SEQ ID NO: 1803373 - RNA, 14 nt, Human
uccugccaggcaug

SEQ ID NO: 1803374 - RNA, 10 nt, Human
uccugcccug

SEQ ID NO: 1803375 - RNA, 18 nt, Human
uccugccccugagcccau

SEQ ID NO: 1803376 - RNA, 17 nt, Human
uccugccccugagccca

SEQ ID NO: 1803377 - RNA, 14 nt, Human
uccaucaggccacu

SEQ ID NO: 1803378 - RNA, 14 nt, Human
uccauagagagcaa

SEQ ID NO: 1803379 - RNA, 15 nt, Human
uccauagagagcaag

SEQ ID NO: 1803380 - RNA, 21 nt, Human
uccauaaucuggacuccucug

SEQ ID NO: 1803381 - RNA, 20 nt, Human
uccaugggccauaugaaaag

SEQ ID NO: 1803382 - RNA, 14 nt, Human
uccaugcugccucc

SEQ ID NO: 1803383 - RNA, 15 nt, Human
uccaugcugccucca

SEQ ID NO: 1803384 - RNA, 13 nt, Human
uccauggacuuug

SEQ ID NO: 1803385 - RNA, 22 nt, Human
uccauaaucuggacuccucugu

SEQ ID NO: 1803386 - RNA, 20 nt, Human
uccagguuuaagcuguuacu

SEQ ID NO: 1803387 - RNA, 22 nt, Human
uccaggggugggacacccugug

SEQ ID NO: 1803388 - RNA, 22 nt, Human
uccagcaauucuccugccucag

SEQ ID NO: 1803389 - RNA, 19 nt, Human
uccaggggugggacacccu

SEQ ID NO: 1803390 - RNA, 20 nt, Human
uccaggggugggacacccug

SEQ ID NO: 1803391 - RNA, 12 nt, Human
uccaggagcagc

SEQ ID NO: 1803392 - RNA, 13 nt, Human
uccaggagcagcc

SEQ ID NO: 1803393 - RNA, 14 nt, Human
uccaggagcagcca

SEQ ID NO: 1803394 - RNA, 15 nt, Human
uccaggagcagccac

SEQ ID NO: 1803395 - RNA, 23 nt, Human
uccagaaagaaaacuuguauuau

SEQ ID NO: 1803396 - RNA, 20 nt, Human
uccacuuucuagccagagga

SEQ ID NO: 1803397 - RNA, 21 nt, Human
uccacuuucuagccagaggag

SEQ ID NO: 1803398 - RNA, 23 nt, Human
uccacuuggucugugagaugcua

SEQ ID NO: 1803399 - RNA, 19 nt, Human
uccacuuucuagccagagg

SEQ ID NO: 1803400 - RNA, 16 nt, Human
uccaaaguacacuguu

SEQ ID NO: 1803401 - RNA, 14 nt, Human
uccaaaguacacug

SEQ ID NO: 1803402 - RNA, 21 nt, Human
uccacuuggucugugagaugc

SEQ ID NO: 1803403 - RNA, 18 nt, Human
uccccagauugcaacagg

SEQ ID NO: 1803404 - RNA, 13 nt, Human
uccccagauugca

SEQ ID NO: 1803405 - RNA, 20 nt, Human
ucccaugagccucagcaucc

SEQ ID NO: 1803406 - RNA, 22 nt, Human
uccccagcaagugagagcuggg

SEQ ID NO: 1803407 - RNA, 21 nt, Human
uccccagcaagugagagcugg

SEQ ID NO: 1803408 - RNA, 20 nt, Human
uccccagcaagugagagcug

SEQ ID NO: 1803409 - RNA, 23 nt, Human
uccccagauugcaacaggcuggg

SEQ ID NO: 1803410 - RNA, 22 nt, Human
uccccagauugcaacaggcugg

SEQ ID NO: 1803411 - RNA, 20 nt, Human
uccccagauugcaacaggcu

SEQ ID NO: 1803412 - RNA, 19 nt, Human
uccccagauugcaacaggc

SEQ ID NO: 1803413 - RNA, 22 nt, Human
ucccccagccccauccucugua

SEQ ID NO: 1803414 - RNA, 20 nt, Human
ucccccagccccauccucug

SEQ ID NO: 1803415 - RNA, 21 nt, Human
ucccccagccccauccucugu

SEQ ID NO: 1803416 - RNA, 15 nt, Human
uccccaggaggccag

SEQ ID NO: 1803417 - RNA, 16 nt, Human
uccccaggaggccagc

SEQ ID NO: 1803418 - RNA, 17 nt, Human
ucccccagccccauccu

SEQ ID NO: 1803419 - RNA, 17 nt, Human
uccccaggaggccagcc

SEQ ID NO: 1803420 - RNA, 14 nt, Human
uccccaggaggcca

SEQ ID NO: 1803421 - RNA, 18 nt, Human
ucccaccuuggcugcagg

SEQ ID NO: 1803422 - RNA, 20 nt, Human
ucccagcugugcucuggaca

SEQ ID NO: 1803423 - RNA, 17 nt, Human
ucccaccuuggcugcag

SEQ ID NO: 1803424 - RNA, 16 nt, Human
ucccaccuuggcugca

SEQ ID NO: 1803425 - RNA, 13 nt, Human
ucccaccuuggcu

SEQ ID NO: 1803426 - RNA, 20 nt, Human
uccaugugggcuaguugggc

SEQ ID NO: 1803427 - RNA, 22 nt, Human
ucccaccucucucacuccuuga

SEQ ID NO: 1803428 - RNA, 19 nt, Human
ucccaugagccucagcauc

SEQ ID NO: 1803429 - RNA, 18 nt, Human
ucccaugagccucagcau

SEQ ID NO: 1803430 - RNA, 16 nt, Human
ucccaggcgccccuuc

SEQ ID NO: 1803431 - RNA, 15 nt, Human
ucccaucuuccaagg

SEQ ID NO: 1803432 - RNA, 22 nt, Human
ucccagcugugcucuggacagg

SEQ ID NO: 1803433 - RNA, 21 nt, Human
ucccagcugugcucuggacag

SEQ ID NO: 1803434 - RNA, 23 nt, Human
ucccagcugugcucuggacaggc

SEQ ID NO: 1803435 - RNA, 24 nt, Human
ucccaggcauuccccaggaggcca

SEQ ID NO: 1803436 - RNA, 21 nt, Human
ucaggccugggggcugggcag

SEQ ID NO: 1803437 - RNA, 15 nt, Human
ucaggcucuucuccu

SEQ ID NO: 1803438 - RNA, 20 nt, Human
ucaggaucaaaccccgacca

SEQ ID NO: 1803439 - RNA, 11 nt, Human
ucaggagcccu

SEQ ID NO: 1803440 - RNA, 12 nt, Human
ucaggagcccug

SEQ ID NO: 1803441 - RNA, 14 nt, Human
ucaggagcccuggg

SEQ ID NO: 1803442 - RNA, 15 nt, Human
ucaggagcccuggga

SEQ ID NO: 1803443 - RNA, 24 nt, Human
ucagcuccagcucaccagccccag

SEQ ID NO: 1803444 - RNA, 23 nt, Human
ucagcuccagcucaccagcccca

SEQ ID NO: 1803445 - RNA, 23 nt, Human
ucagcucugcaagaauugaagca

SEQ ID NO: 1803446 - RNA, 23 nt, Human
ucaggaagcucagggccuggcuc

SEQ ID NO: 1803447 - RNA, 20 nt, Human
ucagguggggcagcuugagg

SEQ ID NO: 1803448 - RNA, 16 nt, Human
ucagucucccucccuu

SEQ ID NO: 1803449 - RNA, 23 nt, Human
ucagucugauucccaagcucugc

SEQ ID NO: 1803450 - RNA, 22 nt, Human
ucagucugauucccaagcucug

SEQ ID NO: 1803451 - RNA, 21 nt, Human
ucagucugauucccaagcucu

SEQ ID NO: 1803452 - RNA, 19 nt, Human
ucagguggggcagcuugag

SEQ ID NO: 1803453 - RNA, 18 nt, Human
ucagguggggcagcuuga

SEQ ID NO: 1803454 - RNA, 23 nt, Human
ucaggugauccacccaccucagc

SEQ ID NO: 1803455 - RNA, 16 nt, Human
ucaggugauccaccca

SEQ ID NO: 1803456 - RNA, 23 nt, Human
ucaggugagaagcagaggaagga

SEQ ID NO: 1803457 - RNA, 21 nt, Human
ucaggugaaacuccagaugcc

SEQ ID NO: 1803458 - RNA, 12 nt, Human
ucaggucccugc

SEQ ID NO: 1803459 - RNA, 16 nt, Human
ucaggcucuucuccuu

SEQ ID NO: 1803460 - RNA, 21 nt, Human
ucaggcucuucuccuuucaca

SEQ ID NO: 1803461 - RNA, 13 nt, Human
uccaaaguacacu

SEQ ID NO: 1803462 - RNA, 16 nt, Human
ucauuaggauggcuag

SEQ ID NO: 1803463 - RNA, 14 nt, Human
ucauggugcucaga

SEQ ID NO: 1803464 - RNA, 17 nt, Human
ucaucaaugaaugaaug

SEQ ID NO: 1803465 - RNA, 12 nt, Human
ucauagcagcuu

SEQ ID NO: 1803466 - RNA, 11 nt, Human
ucauagcagcu

SEQ ID NO: 1803467 - RNA, 20 nt, Human
ucaguguacauggaauaaca

SEQ ID NO: 1803468 - RNA, 17 nt, Human
ucauccacugugccaug

SEQ ID NO: 1803469 - RNA, 14 nt, Human
ucauccacugugcc

SEQ ID NO: 1803470 - RNA, 18 nt, Human
ucauccacugugccaugu

SEQ ID NO: 1803471 - RNA, 16 nt, Human
ucaucuccccaucauu

SEQ ID NO: 1803472 - RNA, 17 nt, Human
uauuauauuuacaaaug

SEQ ID NO: 1803473 - RNA, 14 nt, Human
uauuauaccuuuuu

SEQ ID NO: 1803474 - RNA, 13 nt, Human
uauuauaccuuuu

SEQ ID NO: 1803475 - RNA, 12 nt, Human
uauuauaccuuu

SEQ ID NO: 1803476 - RNA, 15 nt, Human
uauuaaguuguuaau

SEQ ID NO: 1803477 - RNA, 14 nt, Human
uauuaaggaagaca

SEQ ID NO: 1803478 - RNA, 24 nt, Human
uauuaagaaagacuaucuaaaugu

SEQ ID NO: 1803479 - RNA, 20 nt, Human
uauuauggaggcaggaguuu

SEQ ID NO: 1803480 - RNA, 14 nt, Human
uauggaggcaggag

SEQ ID NO: 1803481 - RNA, 13 nt, Human
uauguguguuuua

SEQ ID NO: 1803482 - RNA, 21 nt, Human
uauguugcccaggcaggucuu

SEQ ID NO: 1803483 - RNA, 17 nt, Human
uauguugaagccuuugu

SEQ ID NO: 1803484 - RNA, 18 nt, Human
uauguugguagauucuaa

SEQ ID NO: 1803485 - RNA, 22 nt, Human
uauguucuuaguggauguucug

SEQ ID NO: 1803486 - RNA, 17 nt, Human
uauguucuaagaaguga

SEQ ID NO: 1803487 - RNA, 16 nt, Human
uauuaagaaagacuau

SEQ ID NO: 1803488 - RNA, 15 nt, Human
uauuaaaugcccagc

SEQ ID NO: 1803489 - RNA, 17 nt, Human
uauuaaaugcccagccc

SEQ ID NO: 1803490 - RNA, 19 nt, Human
uauuaaaugcccagccccu

SEQ ID NO: 1803491 - RNA, 22 nt, Human
uauugcagcgauuaauaacagg

SEQ ID NO: 1803492 - RNA, 18 nt, Human
uauucauuguggucauag

SEQ ID NO: 1803493 - RNA, 20 nt, Human
uauugauaugcuuauacacu

SEQ ID NO: 1803494 - RNA, 15 nt, Human
uauugcccacgcugg

SEQ ID NO: 1803495 - RNA, 14 nt, Human
uauugcccacgcug

SEQ ID NO: 1803496 - RNA, 13 nt, Human
uauugcccacgcu

SEQ ID NO: 1803497 - RNA, 15 nt, Human
uauugcuugcacaaa

SEQ ID NO: 1803498 - RNA, 21 nt, Human
uauugcuugcacaaaccaauu

SEQ ID NO: 1803499 - RNA, 23 nt, Human
uauugcugauggugcaaugaccu

SEQ ID NO: 1803500 - RNA, 22 nt, Human
uauugcugauggugcaaugacc

SEQ ID NO: 1803501 - RNA, 22 nt, Human
uauuuauuaaaugcccagcccc

SEQ ID NO: 1803502 - RNA, 17 nt, Human
uauuuaugggauccugg

SEQ ID NO: 1803503 - RNA, 12 nt, Human
ucacauuuaaau

SEQ ID NO: 1803504 - RNA, 22 nt, Human
ucacauuguauucagaguugau

SEQ ID NO: 1803505 - RNA, 14 nt, Human
ucacauuuauucug

SEQ ID NO: 1803506 - RNA, 21 nt, Human
ucaccaaaucagcugcuacua

SEQ ID NO: 1803507 - RNA, 17 nt, Human
ucaccaacgucugugcc

SEQ ID NO: 1803508 - RNA, 18 nt, Human
ucaccaacgucugugcca

SEQ ID NO: 1803509 - RNA, 13 nt, Human
ucaccaagcccag

SEQ ID NO: 1803510 - RNA, 18 nt, Human
ucacccgcuaagagggag

SEQ ID NO: 1803511 - RNA, 22 nt, Human
ucaccgaaaacguggcugcuuc

SEQ ID NO: 1803512 - RNA, 23 nt, Human
ucaccgaaaacguggcugcuuca

SEQ ID NO: 1803513 - RNA, 15 nt, Human
ucaccgaaaacgugg

SEQ ID NO: 1803514 - RNA, 19 nt, Human
ucaccgaaaacguggcugc

SEQ ID NO: 1803515 - RNA, 20 nt, Human
ucaccgaaaacguggcugcu

SEQ ID NO: 1803516 - RNA, 21 nt, Human
ucaccgaaaacguggcugcuu

SEQ ID NO: 1803517 - RNA, 19 nt, Human
ucacccgcuaagagggagg

SEQ ID NO: 1803518 - RNA, 20 nt, Human
ucacccuggggcuaggaaau

SEQ ID NO: 1803519 - RNA, 12 nt, Human
ucacccuuuucu

SEQ ID NO: 1803520 - RNA, 14 nt, Human
ucaccgaaaacgug

SEQ ID NO: 1803521 - RNA, 22 nt, Human
ucacaagacccaaaaggcagaa

SEQ ID NO: 1803522 - RNA, 15 nt, Human
ucacacacuuuggcu

SEQ ID NO: 1803523 - RNA, 22 nt, Human
ucacacaugagcaucaggccag

SEQ ID NO: 1803524 - RNA, 23 nt, Human
ucacacaugagcaucaggccagg

SEQ ID NO: 1803525 - RNA, 17 nt, Human
ucacaggacucugccuc

SEQ ID NO: 1803526 - RNA, 18 nt, Human
ucacaggacucugccucc

SEQ ID NO: 1803527 - RNA, 16 nt, Human
ucacaggacucugccu

SEQ ID NO: 1803528 - RNA, 19 nt, Human
ucacaggacucugccuccu

SEQ ID NO: 1803529 - RNA, 23 nt, Human
ucacaggacucugccuccucuuc

SEQ ID NO: 1803530 - RNA, 19 nt, Human
ucacaggagggagggggaa

SEQ ID NO: 1803531 - RNA, 23 nt, Human
ucaaaccccgaccaccugcccaa

SEQ ID NO: 1803532 - RNA, 19 nt, Human
ucaaaccccgaccaccugc

SEQ ID NO: 1803533 - RNA, 20 nt, Human
ucaaaccccgaccaccugcc

SEQ ID NO: 1803534 - RNA, 12 nt, Human
ucaaagagguuu

SEQ ID NO: 1803535 - RNA, 23 nt, Human
ucaaagagguuuuaaaaaaaucc

SEQ ID NO: 1803536 - RNA, 19 nt, Human
ucaaccccuucgcuccugu

SEQ ID NO: 1803537 - RNA, 18 nt, Human
ucaaccccuucgcuccug

SEQ ID NO: 1803538 - RNA, 15 nt, Human
ucaaccuccugggcu

SEQ ID NO: 1803539 - RNA, 20 nt, Human
ucaaccccuucgcuccugug

SEQ ID NO: 1803540 - RNA, 16 nt, Human
ucaaccuccugggcua

SEQ ID NO: 1803541 - RNA, 20 nt, Human
ucaacucuccuccagaguca

SEQ ID NO: 1803542 - RNA, 24 nt, Human
ucaacugaccagccuccaugcugc

SEQ ID NO: 1803543 - RNA, 18 nt, Human
ucaacugaccagccucca

SEQ ID NO: 1803544 - RNA, 14 nt, Human
ucaacucccugccc

SEQ ID NO: 1803545 - RNA, 15 nt, Human
ucaacucccugcccc

SEQ ID NO: 1803546 - RNA, 21 nt, Human
ucaacucccugccccccagcc

SEQ ID NO: 1803547 - RNA, 22 nt, Human
ucaacucccugccccccagccc

SEQ ID NO: 1803548 - RNA, 19 nt, Human
ucaagcgauucuucugcuu

SEQ ID NO: 1803549 - RNA, 18 nt, Human
ucaagcgauucuucugcu

SEQ ID NO: 1803550 - RNA, 21 nt, Human
ucaagcgauucuucugcuuca

SEQ ID NO: 1803551 - RNA, 12 nt, Human
ucaagccaccaa

SEQ ID NO: 1803552 - RNA, 20 nt, Human
ucaagccaccaacauacucc

SEQ ID NO: 1803553 - RNA, 13 nt, Human
ucaaggauccuga

SEQ ID NO: 1803554 - RNA, 14 nt, Human
ucaaggauccugag

SEQ ID NO: 1803555 - RNA, 15 nt, Human
ucaaggauccugagc

SEQ ID NO: 1803556 - RNA, 16 nt, Human
ucaaggauccugagcc

SEQ ID NO: 1803557 - RNA, 17 nt, Human
ucaaggauccugagcca

SEQ ID NO: 1803558 - RNA, 16 nt, Human
uaggucagugcaaaua

SEQ ID NO: 1803559 - RNA, 15 nt, Human
uaggucucaauaccu

SEQ ID NO: 1803560 - RNA, 16 nt, Human
uagguaaauuacaguu

SEQ ID NO: 1803561 - RNA, 20 nt, Human
uagguauaaguggugugugu

SEQ ID NO: 1803562 - RNA, 19 nt, Human
uagggaaaaaccagcgugu

SEQ ID NO: 1803563 - RNA, 20 nt, Human
uagggaaaaaccagcgugug

SEQ ID NO: 1803564 - RNA, 21 nt, Human
uagggaaaaaccagcguguga

SEQ ID NO: 1803565 - RNA, 12 nt, Human
uaggaauugacc

SEQ ID NO: 1803566 - RNA, 16 nt, Human
uaggaauuguguuuau

SEQ ID NO: 1803567 - RNA, 18 nt, Human
uaggccaugggacaggga

SEQ ID NO: 1803568 - RNA, 16 nt, Human
uaggccaugggacagg

SEQ ID NO: 1803569 - RNA, 18 nt, Human
uaggccuggccagaugca

SEQ ID NO: 1803570 - RNA, 15 nt, Human
uaggccuggccagau

SEQ ID NO: 1803571 - RNA, 13 nt, Human
uaguguucauaaa

SEQ ID NO: 1803572 - RNA, 20 nt, Human
uaguugcaacuuuguauaaa

SEQ ID NO: 1803573 - RNA, 23 nt, Human
uaggugacagagugagacucugu

SEQ ID NO: 1803574 - RNA, 21 nt, Human
uaggugauccacucgccuuca

SEQ ID NO: 1803575 - RNA, 13 nt, Human
uaguaucaaaaga

SEQ ID NO: 1803576 - RNA, 21 nt, Human
uauaugcucugcauguuacau

SEQ ID NO: 1803577 - RNA, 23 nt, Human
uauauaaauuuuuuuuguuucau

SEQ ID NO: 1803578 - RNA, 18 nt, Human
uauacgauaaauaacuuu

SEQ ID NO: 1803579 - RNA, 15 nt, Human
uauaauucacauugu

SEQ ID NO: 1803580 - RNA, 16 nt, Human
uaugacuccagaauuu

SEQ ID NO: 1803581 - RNA, 17 nt, Human
uaugacuccagaauuuc

SEQ ID NO: 1803582 - RNA, 23 nt, Human
uaugacuccagaauuucccaaag

SEQ ID NO: 1803583 - RNA, 18 nt, Human
uaugauuuaauuugaaau

SEQ ID NO: 1803584 - RNA, 17 nt, Human
uaugauuuaauuugaaa

SEQ ID NO: 1803585 - RNA, 15 nt, Human
uaugauuuggaaaau

SEQ ID NO: 1803586 - RNA, 17 nt, Human
uaugauuuggaaaauaa

SEQ ID NO: 1803587 - RNA, 12 nt, Human
uaugauuuuuaa

SEQ ID NO: 1803588 - RNA, 18 nt, Human
uaugauuuggaaaauaaa

SEQ ID NO: 1803589 - RNA, 23 nt, Human
uaugauuuuuaaagaaaaguuuu

SEQ ID NO: 1803590 - RNA, 14 nt, Human
uaugcacacauuuu

SEQ ID NO: 1803591 - RNA, 13 nt, Human
uaugcacacauuu

SEQ ID NO: 1803592 - RNA, 18 nt, Human
uaugcaaucaaaucugcu

SEQ ID NO: 1803593 - RNA, 18 nt, Human
uaugcagagguccacaac

SEQ ID NO: 1803594 - RNA, 20 nt, Human
uaugcauauuauuuuauguu

SEQ ID NO: 1803595 - RNA, 18 nt, Human
uaugcaugaaguaauaug

SEQ ID NO: 1803596 - RNA, 13 nt, Human
uaugcaugaagua

SEQ ID NO: 1803597 - RNA, 22 nt, Human
uaugcuuauacacuuacacuuu

SEQ ID NO: 1803598 - RNA, 20 nt, Human
uaugcuuguaacuaaaauaa

SEQ ID NO: 1803599 - RNA, 18 nt, Human
uaugcuuguaacuaaaau

SEQ ID NO: 1803600 - RNA, 13 nt, Human
uauggaacacucu

SEQ ID NO: 1803601 - RNA, 16 nt, Human
uauggaacacucugag

SEQ ID NO: 1803602 - RNA, 17 nt, Human
uauggaacacucugaga

SEQ ID NO: 1803603 - RNA, 18 nt, Human
uauggaacacucugagac

SEQ ID NO: 1803604 - RNA, 17 nt, Human
uauggacaaugacccag

SEQ ID NO: 1803605 - RNA, 19 nt, Human
uauggaacacucugagacu

SEQ ID NO: 1803606 - RNA, 23 nt, Human
uaucugucauuugagcagggcuc

SEQ ID NO: 1803607 - RNA, 21 nt, Human
uaucugucauuugagcagggc

SEQ ID NO: 1803608 - RNA, 20 nt, Human
uaucugucauuugagcaggg

SEQ ID NO: 1803609 - RNA, 20 nt, Human
uaugaaguuuuuuuuauaca

SEQ ID NO: 1803610 - RNA, 18 nt, Human
uaugaauaaagacaccua

SEQ ID NO: 1803611 - RNA, 14 nt, Human
uaucuugaagacuu

SEQ ID NO: 1803612 - RNA, 15 nt, Human
uaugaauacuuugca

SEQ ID NO: 1803613 - RNA, 13 nt, Human
uaugaauacuuug

SEQ ID NO: 1803614 - RNA, 12 nt, Human
uaugaauaacau

SEQ ID NO: 1803615 - RNA, 14 nt, Human
uaugaccacacucc

SEQ ID NO: 1803616 - RNA, 19 nt, Human
uaugaccacacuccagcug

SEQ ID NO: 1803617 - RNA, 12 nt, Human
uaugacacaugc

SEQ ID NO: 1803618 - RNA, 22 nt, Human
uaugacacaugcaaggucauuu

SEQ ID NO: 1803619 - RNA, 21 nt, Human
uaucuaauauguaacaagcca

SEQ ID NO: 1803620 - RNA, 16 nt, Human
uaucgucacugcuuaa

SEQ ID NO: 1803621 - RNA, 14 nt, Human
uauccuucagccug

SEQ ID NO: 1803622 - RNA, 15 nt, Human
uauccuucagccuga

SEQ ID NO: 1803623 - RNA, 15 nt, Human
uaucguaaaauuaag

SEQ ID NO: 1803624 - RNA, 18 nt, Human
uaucguaaaauuaagaaa

SEQ ID NO: 1803625 - RNA, 16 nt, Human
uaucuaaauguugaaa

SEQ ID NO: 1803626 - RNA, 19 nt, Human
uauauguuuuaagaggcag

SEQ ID NO: 1803627 - RNA, 22 nt, Human
gugcugccauccagguucagcu

SEQ ID NO: 1803628 - RNA, 21 nt, Human
gugcugccacacuucaggcuc

SEQ ID NO: 1803629 - RNA, 11 nt, Human
gugcugcccug

SEQ ID NO: 1803630 - RNA, 12 nt, Human
gugcuuggagga

SEQ ID NO: 1803631 - RNA, 13 nt, Human
gugcuuggaggaa

SEQ ID NO: 1803632 - RNA, 15 nt, Human
gugcuuggaggaagg

SEQ ID NO: 1803633 - RNA, 18 nt, Human
gugcuuauguaugaggua

SEQ ID NO: 1803634 - RNA, 18 nt, Human
guggaaaaauagccugcc

SEQ ID NO: 1803635 - RNA, 16 nt, Human
gugcucuggacaggca

SEQ ID NO: 1803636 - RNA, 15 nt, Human
gugcucuggacaggc

SEQ ID NO: 1803637 - RNA, 22 nt, Human
gugccgagaaggaagccuccca

SEQ ID NO: 1803638 - RNA, 21 nt, Human
gugccuuggggacaagagcag

SEQ ID NO: 1803639 - RNA, 18 nt, Human
gugcucuggacaggcaug

SEQ ID NO: 1803640 - RNA, 17 nt, Human
gugcucuggacaggcau

SEQ ID NO: 1803641 - RNA, 23 nt, Human
gugcugaaugguuuucaaaauaa

SEQ ID NO: 1803642 - RNA, 19 nt, Human
gugcugaaugguuuucaaa

SEQ ID NO: 1803643 - RNA, 20 nt, Human
gugcugaaugguuuucaaaa

SEQ ID NO: 1803644 - RNA, 19 nt, Human
gugcugccauccagguuca

SEQ ID NO: 1803645 - RNA, 18 nt, Human
gugcugccauccagguuc

SEQ ID NO: 1803646 - RNA, 15 nt, Human
gugcugccauccagg

SEQ ID NO: 1803647 - RNA, 12 nt, Human
gugcugccacac

SEQ ID NO: 1803648 - RNA, 20 nt, Human
gugcugcauuuaaaagauac

SEQ ID NO: 1803649 - RNA, 19 nt, Human
gugcugcauuuaaaagaua

SEQ ID NO: 1803650 - RNA, 12 nt, Human
gugcugcauuua

SEQ ID NO: 1803651 - RNA, 12 nt, Human
gugcugagucug

SEQ ID NO: 1803652 - RNA, 16 nt, Human
gugcugagucugaagg

SEQ ID NO: 1803653 - RNA, 17 nt, Human
gugcugagucugaaggc

SEQ ID NO: 1803654 - RNA, 18 nt, Human
gugcugagucugaaggcu

SEQ ID NO: 1803655 - RNA, 19 nt, Human
gugcugagucugaaggcug

SEQ ID NO: 1803656 - RNA, 18 nt, Human
guggaugccugguggcag

SEQ ID NO: 1803657 - RNA, 16 nt, Human
guggaugccugguggc

SEQ ID NO: 1803658 - RNA, 17 nt, Human
guggaguucaucuugaa

SEQ ID NO: 1803659 - RNA, 22 nt, Human
guggaacguuuuuccuguucuu

SEQ ID NO: 1803660 - RNA, 13 nt, Human
guggacuuuuauu

SEQ ID NO: 1803661 - RNA, 20 nt, Human
guggagaagcggcuggcagc

SEQ ID NO: 1803662 - RNA, 18 nt, Human
guggagaggcccggccuc

SEQ ID NO: 1803663 - RNA, 19 nt, Human
guggcagcugcuuuugucu

SEQ ID NO: 1803664 - RNA, 13 nt, Human
guggcagcugcuu

SEQ ID NO: 1803665 - RNA, 12 nt, Human
guggcagcugcu

SEQ ID NO: 1803666 - RNA, 23 nt, Human
guggcagcugcgguccacccagg

SEQ ID NO: 1803667 - RNA, 22 nt, Human
guggcagcugcgguccacccag

SEQ ID NO: 1803668 - RNA, 21 nt, Human
guggcagcugcgguccaccca

SEQ ID NO: 1803669 - RNA, 20 nt, Human
guggaugccugguggcagcu

SEQ ID NO: 1803670 - RNA, 19 nt, Human
guggcagcugcgguccacc

SEQ ID NO: 1803671 - RNA, 17 nt, Human
guggcagugggagcugc

SEQ ID NO: 1803672 - RNA, 16 nt, Human
guggcagugggagcug

SEQ ID NO: 1803673 - RNA, 15 nt, Human
guggcagugggagcu

SEQ ID NO: 1803674 - RNA, 11 nt, Human
guggcagucug

SEQ ID NO: 1803675 - RNA, 21 nt, Human
guggcagugggagcugccugu

SEQ ID NO: 1803676 - RNA, 19 nt, Human
guggcagugggagcugccu

SEQ ID NO: 1803677 - RNA, 14 nt, Human
guggccaaguucuu

SEQ ID NO: 1803678 - RNA, 21 nt, Human
guggccacuccagaccccugg

SEQ ID NO: 1803679 - RNA, 14 nt, Human
gugagcuacaaaug

SEQ ID NO: 1803680 - RNA, 14 nt, Human
gugagccacugcac

SEQ ID NO: 1803681 - RNA, 22 nt, Human
gugagccaccgugccuggccac

SEQ ID NO: 1803682 - RNA, 16 nt, Human
gugagcuccuaagcca

SEQ ID NO: 1803683 - RNA, 11 nt, Human
gugaggaagcc

SEQ ID NO: 1803684 - RNA, 16 nt, Human
gugaggaagccgcugg

SEQ ID NO: 1803685 - RNA, 19 nt, Human
gugaggaagccgcuggggc

SEQ ID NO: 1803686 - RNA, 13 nt, Human
gugagccacugca

SEQ ID NO: 1803687 - RNA, 17 nt, Human
gugagccaccgugccug

SEQ ID NO: 1803688 - RNA, 21 nt, Human
gugagccaccgugccuggcca

SEQ ID NO: 1803689 - RNA, 16 nt, Human
gugagccaccacgccc

SEQ ID NO: 1803690 - RNA, 15 nt, Human
gugagccaccgugcc

SEQ ID NO: 1803691 - RNA, 15 nt, Human
gugagccaccacgcc

SEQ ID NO: 1803692 - RNA, 17 nt, Human
gugacugaucucucgug

SEQ ID NO: 1803693 - RNA, 17 nt, Human
gugagcaggcugugagu

SEQ ID NO: 1803694 - RNA, 16 nt, Human
gugacaacacuugugu

SEQ ID NO: 1803695 - RNA, 16 nt, Human
gugaccucagcuuuga

SEQ ID NO: 1803696 - RNA, 15 nt, Human
gugacugaauuucuu

SEQ ID NO: 1803697 - RNA, 18 nt, Human
gugacugaauuucuuuug

SEQ ID NO: 1803698 - RNA, 16 nt, Human
gugacugaauuucuuu

SEQ ID NO: 1803699 - RNA, 19 nt, Human
gugaaagaaaauaacaaua

SEQ ID NO: 1803700 - RNA, 12 nt, Human
gugaaacuggau

SEQ ID NO: 1803701 - RNA, 16 nt, Human
gugaaaaugugugugu

SEQ ID NO: 1803702 - RNA, 12 nt, Human
gugaaaagaaua

SEQ ID NO: 1803703 - RNA, 14 nt, Human
gugaaaagaaaaau

SEQ ID NO: 1803704 - RNA, 23 nt, Human
gugaaaagaaaaaugagccuggc

SEQ ID NO: 1803705 - RNA, 18 nt, Human
gugaaauuauucauaauu

SEQ ID NO: 1803706 - RNA, 20 nt, Human
gugaaauuauucauaauuau

SEQ ID NO: 1803707 - RNA, 13 nt, Human
gugaaaucauuca

SEQ ID NO: 1803708 - RNA, 19 nt, Human
gugaaaggaaagagggagg

SEQ ID NO: 1803709 - RNA, 16 nt, Human
gugaaucacguaaagc

SEQ ID NO: 1803710 - RNA, 18 nt, Human
gugaaucacguaaagcua

SEQ ID NO: 1803711 - RNA, 14 nt, Human
gugaaucagagcac

SEQ ID NO: 1803712 - RNA, 19 nt, Human
gugcauaaguuaacuucca

SEQ ID NO: 1803713 - RNA, 22 nt, Human
gugcaaaguucccuacuuccug

SEQ ID NO: 1803714 - RNA, 22 nt, Human
gugccagguuuuuggucugacc

SEQ ID NO: 1803715 - RNA, 20 nt, Human
gugccagguuuuuggucuga

SEQ ID NO: 1803716 - RNA, 18 nt, Human
gugcaugcagcaucuaag

SEQ ID NO: 1803717 - RNA, 18 nt, Human
gugcaucucagcccacau

SEQ ID NO: 1803718 - RNA, 15 nt, Human
gugcaucucagccca

SEQ ID NO: 1803719 - RNA, 21 nt, Human
gugcauaccacuuuuguucuu

SEQ ID NO: 1803720 - RNA, 14 nt, Human
gugcauaccacuuu

SEQ ID NO: 1803721 - RNA, 13 nt, Human
gugcauaccacuu

SEQ ID NO: 1803722 - RNA, 20 nt, Human
gugcccacaggaucagucug

SEQ ID NO: 1803723 - RNA, 23 nt, Human
gugcccaagaauagaugcugacu

SEQ ID NO: 1803724 - RNA, 20 nt, Human
gugauccacccaccucagcc

SEQ ID NO: 1803725 - RNA, 18 nt, Human
gugauccacccaccucag

SEQ ID NO: 1803726 - RNA, 15 nt, Human
gugauccacccaccu

SEQ ID NO: 1803727 - RNA, 13 nt, Human
gugaggccagaga

SEQ ID NO: 1803728 - RNA, 23 nt, Human
gugaggauuaaauaauguaaaua

SEQ ID NO: 1803729 - RNA, 11 nt, Human
gugaggccaga

SEQ ID NO: 1803730 - RNA, 18 nt, Human
gugauccucccaccucag

SEQ ID NO: 1803731 - RNA, 15 nt, Human
gugauccucccaccu

SEQ ID NO: 1803732 - RNA, 14 nt, Human
gugauccucccacc

SEQ ID NO: 1803733 - RNA, 14 nt, Human
gugauccacucgcc

SEQ ID NO: 1803734 - RNA, 22 nt, Human
gugauccucccaccucagccuc

SEQ ID NO: 1803735 - RNA, 20 nt, Human
gugauccucccaccucagcc

SEQ ID NO: 1803736 - RNA, 23 nt, Human
gugauccucccaccucagccucc

SEQ ID NO: 1803737 - RNA, 20 nt, Human
gugauucacagugugaaucu

SEQ ID NO: 1803738 - RNA, 23 nt, Human
gugauucuccugccucagccucc

SEQ ID NO: 1803739 - RNA, 13 nt, Human
gugauucuccugc

SEQ ID NO: 1803740 - RNA, 16 nt, Human
gugauuuugcuguaga

SEQ ID NO: 1803741 - RNA, 22 nt, Human
gugauucuccugccucagccuc

SEQ ID NO: 1803742 - RNA, 20 nt, Human
gugauucuccugccucagcc

SEQ ID NO: 1803743 - RNA, 19 nt, Human
gugauucuccugccucagc

SEQ ID NO: 1803744 - RNA, 18 nt, Human
gugauucuccugccucag

SEQ ID NO: 1803745 - RNA, 17 nt, Human
gugauucuccugccuca

SEQ ID NO: 1803746 - RNA, 16 nt, Human
gugauucuccugccuc

SEQ ID NO: 1803747 - RNA, 14 nt, Human
gugauucuccugcc

SEQ ID NO: 1803748 - RNA, 20 nt, Human
gugauucucaugccucagcc

SEQ ID NO: 1803749 - RNA, 23 nt, Human
gucguuaaaaacagauuuggaaa

SEQ ID NO: 1803750 - RNA, 15 nt, Human
guccuuaccagcaga

SEQ ID NO: 1803751 - RNA, 16 nt, Human
guccuuaccagcagag

SEQ ID NO: 1803752 - RNA, 17 nt, Human
guccuuaccagcagagc

SEQ ID NO: 1803753 - RNA, 15 nt, Human
gucuacacugugcug

SEQ ID NO: 1803754 - RNA, 23 nt, Human
gucucacuguugcccaggcuggc

SEQ ID NO: 1803755 - RNA, 22 nt, Human
gucucacuguugcccaggcugg

SEQ ID NO: 1803756 - RNA, 21 nt, Human
gucucacuguugcccaggcug

SEQ ID NO: 1803757 - RNA, 20 nt, Human
gucucacuguugcccaggcu

SEQ ID NO: 1803758 - RNA, 19 nt, Human
gucucacuguugcccaggc

SEQ ID NO: 1803759 - RNA, 18 nt, Human
gucucacuguugcccagg

SEQ ID NO: 1803760 - RNA, 17 nt, Human
gucucacuguugcccag

SEQ ID NO: 1803761 - RNA, 16 nt, Human
gucucacuguugccca

SEQ ID NO: 1803762 - RNA, 23 nt, Human
gucucacuauguugcccaggcag

SEQ ID NO: 1803763 - RNA, 13 nt, Human
gucucacuguugc

SEQ ID NO: 1803764 - RNA, 21 nt, Human
gucucacuauguugcccaggc

SEQ ID NO: 1803765 - RNA, 20 nt, Human
gucucacuauguugcccagg

SEQ ID NO: 1803766 - RNA, 21 nt, Human
gucugaggaauccagacccgg

SEQ ID NO: 1803767 - RNA, 19 nt, Human
gucugauucccaagcucug

SEQ ID NO: 1803768 - RNA, 18 nt, Human
gucugauucccaagcucu

SEQ ID NO: 1803769 - RNA, 17 nt, Human
gucugauucccaagcuc

SEQ ID NO: 1803770 - RNA, 21 nt, Human
gucugauucccaagcucugcu

SEQ ID NO: 1803771 - RNA, 20 nt, Human
gucugauucccaagcucugc

SEQ ID NO: 1803772 - RNA, 19 nt, Human
gucugaggaauccagaccc

SEQ ID NO: 1803773 - RNA, 18 nt, Human
gucugaggaauccagacc

SEQ ID NO: 1803774 - RNA, 15 nt, Human
gucugacccacugcu

SEQ ID NO: 1803775 - RNA, 17 nt, Human
gucucuucuccacugga

SEQ ID NO: 1803776 - RNA, 14 nt, Human
gucugacccacugc

SEQ ID NO: 1803777 - RNA, 13 nt, Human
gucugacccacug

SEQ ID NO: 1803778 - RNA, 15 nt, Human
gucucuucuccacug

SEQ ID NO: 1803779 - RNA, 16 nt, Human
gucucuucuccacugg

SEQ ID NO: 1803780 - RNA, 14 nt, Human
gucucuucuccacu

SEQ ID NO: 1803781 - RNA, 13 nt, Human
gucucgugguagg

SEQ ID NO: 1803782 - RNA, 12 nt, Human
gucccagugccg

SEQ ID NO: 1803783 - RNA, 13 nt, Human
guccuacucugug

SEQ ID NO: 1803784 - RNA, 17 nt, Human
gucccugguggcagcuc

SEQ ID NO: 1803785 - RNA, 16 nt, Human
gucccugguggcagcu

SEQ ID NO: 1803786 - RNA, 23 nt, Human
guccuacucugugucaggugggg

SEQ ID NO: 1803787 - RNA, 15 nt, Human
guccuacucuguguc

SEQ ID NO: 1803788 - RNA, 23 nt, Human
guccuagaaauuccccacccuga

SEQ ID NO: 1803789 - RNA, 18 nt, Human
guccugggagugagcugg

SEQ ID NO: 1803790 - RNA, 17 nt, Human
guccugggagugagcug

SEQ ID NO: 1803791 - RNA, 19 nt, Human
guccugggagugagcuggu

SEQ ID NO: 1803792 - RNA, 19 nt, Human
guccuggggaaccugaccc

SEQ ID NO: 1803793 - RNA, 20 nt, Human
guccuggggaaccugacccc

SEQ ID NO: 1803794 - RNA, 17 nt, Human
guccuggcaugggaaug

SEQ ID NO: 1803795 - RNA, 16 nt, Human
guccugggagugagcu

SEQ ID NO: 1803796 - RNA, 15 nt, Human
guccugggagugagc

SEQ ID NO: 1803797 - RNA, 23 nt, Human
guccucccaucucacacaugagc

SEQ ID NO: 1803798 - RNA, 12 nt, Human
guccucccaucu

SEQ ID NO: 1803799 - RNA, 13 nt, Human
guccucccaucuc

SEQ ID NO: 1803800 - RNA, 14 nt, Human
guccucccaucuca

SEQ ID NO: 1803801 - RNA, 21 nt, Human
gucaagaauagcauuguaaaa

SEQ ID NO: 1803802 - RNA, 19 nt, Human
gucaagugaaaaaggagga

SEQ ID NO: 1803803 - RNA, 16 nt, Human
gucaagugaaaaagga

SEQ ID NO: 1803804 - RNA, 18 nt, Human
gucaagugaaaaaggagg

SEQ ID NO: 1803805 - RNA, 19 nt, Human
gucaagagggucugaggaa

SEQ ID NO: 1803806 - RNA, 18 nt, Human
gucaagagggucugagga

SEQ ID NO: 1803807 - RNA, 20 nt, Human
gucaccugaagacucauucu

SEQ ID NO: 1803808 - RNA, 13 nt, Human
gucaccccggcca

SEQ ID NO: 1803809 - RNA, 15 nt, Human
gucaccccggccacc

SEQ ID NO: 1803810 - RNA, 16 nt, Human
gucaauuacaggaagu

SEQ ID NO: 1803811 - RNA, 13 nt, Human
gucaauuacagga

SEQ ID NO: 1803812 - RNA, 15 nt, Human
gucaauuacaggaag

SEQ ID NO: 1803813 - RNA, 19 nt, Human
guauuuauuuaguauuuau

SEQ ID NO: 1803814 - RNA, 14 nt, Human
guauuauaccuuuu

SEQ ID NO: 1803815 - RNA, 15 nt, Human
guauuauguguguuu

SEQ ID NO: 1803816 - RNA, 15 nt, Human
guauuacuucugcua

SEQ ID NO: 1803817 - RNA, 14 nt, Human
guauuacuucugcu

SEQ ID NO: 1803818 - RNA, 13 nt, Human
guauuacuucugc

SEQ ID NO: 1803819 - RNA, 15 nt, Human
guagagugggagcug

SEQ ID NO: 1803820 - RNA, 13 nt, Human
guagagugggagc

SEQ ID NO: 1803821 - RNA, 15 nt, Human
gucccacucagucca

SEQ ID NO: 1803822 - RNA, 14 nt, Human
gucccacucagucc

SEQ ID NO: 1803823 - RNA, 17 nt, Human
gucccagauacuugggg

SEQ ID NO: 1803824 - RNA, 16 nt, Human
guccacccaggagccc

SEQ ID NO: 1803825 - RNA, 15 nt, Human
guccacccaggagcc

SEQ ID NO: 1803826 - RNA, 14 nt, Human
guccacccaggagc

SEQ ID NO: 1803827 - RNA, 21 nt, Human
gucauauaagauucauauuua

SEQ ID NO: 1803828 - RNA, 16 nt, Human
gucaucucagcuggau

SEQ ID NO: 1803829 - RNA, 22 nt, Human
gucauaacuagaacugaauuuu

SEQ ID NO: 1803830 - RNA, 17 nt, Human
gucauaacuagaacuga

SEQ ID NO: 1803831 - RNA, 17 nt, Human
ggggaucacagccucug

SEQ ID NO: 1803832 - RNA, 22 nt, Human
gggcuuggggaccagagcugcc

SEQ ID NO: 1803833 - RNA, 21 nt, Human
gggcuuggggaccagagcugc

SEQ ID NO: 1803834 - RNA, 13 nt, Human
ggggaguggccac

SEQ ID NO: 1803835 - RNA, 18 nt, Human
gggcuucaguggcagcug

SEQ ID NO: 1803836 - RNA, 17 nt, Human
gggcuucaguggcagcu

SEQ ID NO: 1803837 - RNA, 16 nt, Human
gggcuucaguggcagc

SEQ ID NO: 1803838 - RNA, 15 nt, Human
gggcuucaguggcag

SEQ ID NO: 1803839 - RNA, 20 nt, Human
gggcuucaguggcagcugcu

SEQ ID NO: 1803840 - RNA, 19 nt, Human
gggcuucaguggcagcugc

SEQ ID NO: 1803841 - RNA, 19 nt, Human
gggcuucauccuccucaga

SEQ ID NO: 1803842 - RNA, 20 nt, Human
gggcuucauccuccucagau

SEQ ID NO: 1803843 - RNA, 20 nt, Human
gggcuuggggaccagagcug

SEQ ID NO: 1803844 - RNA, 23 nt, Human
ggguacuuguggacacagcucuu

SEQ ID NO: 1803845 - RNA, 23 nt, Human
ggguagagcggagaaaggaaggg

SEQ ID NO: 1803846 - RNA, 22 nt, Human
ggguacuuguggacacagcucu

SEQ ID NO: 1803847 - RNA, 19 nt, Human
ggguacuuguggacacagc

SEQ ID NO: 1803848 - RNA, 15 nt, Human
ggguacccacugcuc

SEQ ID NO: 1803849 - RNA, 13 nt, Human
ggguacccacugc

SEQ ID NO: 1803850 - RNA, 18 nt, Human
ggguacccacugcucugg

SEQ ID NO: 1803851 - RNA, 20 nt, Human
gggguucuuucuuccucugc

SEQ ID NO: 1803852 - RNA, 22 nt, Human
gggguucuuucuuccucugcug

SEQ ID NO: 1803853 - RNA, 23 nt, Human
gggguucccuuuuuuggcugcug

SEQ ID NO: 1803854 - RNA, 13 nt, Human
ggggcugggacau

SEQ ID NO: 1803855 - RNA, 16 nt, Human
ggggcugggcagagga

SEQ ID NO: 1803856 - RNA, 17 nt, Human
ggggcugggcagaggaa

SEQ ID NO: 1803857 - RNA, 14 nt, Human
ggggcugccagggg

SEQ ID NO: 1803858 - RNA, 20 nt, Human
ggcucccacaggcccuuccu

SEQ ID NO: 1803859 - RNA, 21 nt, Human
ggcucccacaggcccuuccuc

SEQ ID NO: 1803860 - RNA, 12 nt, Human
gggccuggcuca

SEQ ID NO: 1803861 - RNA, 10 nt, Human
gggccuggca

SEQ ID NO: 1803862 - RNA, 22 nt, Human
gggccuggcagccgugccuuca

SEQ ID NO: 1803863 - RNA, 12 nt, Human
gggccuggccug

SEQ ID NO: 1803864 - RNA, 18 nt, Human
gggccuggucguuuucaa

SEQ ID NO: 1803865 - RNA, 14 nt, Human
gggccuggcucagg

SEQ ID NO: 1803866 - RNA, 16 nt, Human
gggccuggcucaggug

SEQ ID NO: 1803867 - RNA, 13 nt, Human
gggcucccuuccc

SEQ ID NO: 1803868 - RNA, 16 nt, Human
gggcgcgguggcucac

SEQ ID NO: 1803869 - RNA, 14 nt, Human
gggcucccuuccca

SEQ ID NO: 1803870 - RNA, 17 nt, Human
gggcucccuucccaccu

SEQ ID NO: 1803871 - RNA, 18 nt, Human
gggcucccuucccaccuc

SEQ ID NO: 1803872 - RNA, 23 nt, Human
gggcucccuucccaccucucuca

SEQ ID NO: 1803873 - RNA, 16 nt, Human
gggcugaggugggagg

SEQ ID NO: 1803874 - RNA, 14 nt, Human
gggcugcaccggcu

SEQ ID NO: 1803875 - RNA, 14 nt, Human
gggcuucaguggca

SEQ ID NO: 1803876 - RNA, 13 nt, Human
gggcucugccucc

SEQ ID NO: 1803877 - RNA, 15 nt, Human
gggcucugccuccca

SEQ ID NO: 1803878 - RNA, 16 nt, Human
gggcucugccucccau

SEQ ID NO: 1803879 - RNA, 17 nt, Human
gggcucugccucccauc

SEQ ID NO: 1803880 - RNA, 20 nt, Human
gggcucugccucccaucacc

SEQ ID NO: 1803881 - RNA, 21 nt, Human
gguacuuguggacacagcucu

SEQ ID NO: 1803882 - RNA, 22 nt, Human
gguacuuguggacacagcucuu

SEQ ID NO: 1803883 - RNA, 15 nt, Human
ggguugggcuggugu

SEQ ID NO: 1803884 - RNA, 17 nt, Human
gguacccacugcucugg

SEQ ID NO: 1803885 - RNA, 20 nt, Human
ggguuucaccauguuggcca

SEQ ID NO: 1803886 - RNA, 19 nt, Human
ggguuggccccugcccggc

SEQ ID NO: 1803887 - RNA, 14 nt, Human
ggguucuuucuucc

SEQ ID NO: 1803888 - RNA, 16 nt, Human
ggguuggccccugccc

SEQ ID NO: 1803889 - RNA, 23 nt, Human
ggguucccuuuuuuggcugcuga

SEQ ID NO: 1803890 - RNA, 22 nt, Human
ggguucuacccaggugcuagga

SEQ ID NO: 1803891 - RNA, 17 nt, Human
ggguucuacccaggugc

SEQ ID NO: 1803892 - RNA, 22 nt, Human
ggguuccagcaauucuccugcc

SEQ ID NO: 1803893 - RNA, 19 nt, Human
gggugcugggccccugccu

SEQ ID NO: 1803894 - RNA, 16 nt, Human
ggucagagccugcagu

SEQ ID NO: 1803895 - RNA, 15 nt, Human
ggucagagccugcag

SEQ ID NO: 1803896 - RNA, 14 nt, Human
ggucagagccugca

SEQ ID NO: 1803897 - RNA, 13 nt, Human
ggucagagccugc

SEQ ID NO: 1803898 - RNA, 12 nt, Human
ggucagagccug

SEQ ID NO: 1803899 - RNA, 22 nt, Human
ggucacucuggcagcucagaga

SEQ ID NO: 1803900 - RNA, 16 nt, Human
ggucacucuggcagcu

SEQ ID NO: 1803901 - RNA, 20 nt, Human
ggucacucuggcagcucaga

SEQ ID NO: 1803902 - RNA, 13 nt, Human
ggucccccuucca

SEQ ID NO: 1803903 - RNA, 18 nt, Human
ggucccccuuccauggac

SEQ ID NO: 1803904 - RNA, 23 nt, Human
ggucccccuuccauggacuuugu

SEQ ID NO: 1803905 - RNA, 14 nt, Human
ggucccacucaguc

SEQ ID NO: 1803906 - RNA, 12 nt, Human
ggucccacucag

SEQ ID NO: 1803907 - RNA, 22 nt, Human
ggucccacucaguccauagcag

SEQ ID NO: 1803908 - RNA, 22 nt, Human
ggucccaccccacacacgccag

SEQ ID NO: 1803909 - RNA, 13 nt, Human
gguggcagcugcg

SEQ ID NO: 1803910 - RNA, 12 nt, Human
gguggcagcugc

SEQ ID NO: 1803911 - RNA, 11 nt, Human
gguggcagcug

SEQ ID NO: 1803912 - RNA, 13 nt, Human
gguggcagcucac

SEQ ID NO: 1803913 - RNA, 23 nt, Human
gguggcagcugcgguccacccag

SEQ ID NO: 1803914 - RNA, 15 nt, Human
gguggcagcugcggu

SEQ ID NO: 1803915 - RNA, 16 nt, Human
gguggcagugggagcu

SEQ ID NO: 1803916 - RNA, 23 nt, Human
ggugcuaucucccccagccccau

SEQ ID NO: 1803917 - RNA, 22 nt, Human
ggugcuaucucccccagcccca

SEQ ID NO: 1803918 - RNA, 22 nt, Human
ggugauagguauaaguggugug

SEQ ID NO: 1803919 - RNA, 21 nt, Human
ggugaccucugccugaaguca

SEQ ID NO: 1803920 - RNA, 16 nt, Human
ggugaccucugccuga

SEQ ID NO: 1803921 - RNA, 14 nt, Human
ggugaccucugccu

SEQ ID NO: 1803922 - RNA, 21 nt, Human
ggugacagagugagacucugu

SEQ ID NO: 1803923 - RNA, 18 nt, Human
ggugaagugaagacaaug

SEQ ID NO: 1803924 - RNA, 19 nt, Human
ggucugaggaauccagacc

SEQ ID NO: 1803925 - RNA, 14 nt, Human
ggugaacauugcaa

SEQ ID NO: 1803926 - RNA, 16 nt, Human
ggugaacuugguuccc

SEQ ID NO: 1803927 - RNA, 16 nt, Human
ggucugacccacugcu

SEQ ID NO: 1803928 - RNA, 15 nt, Human
ggucugacccacugc

SEQ ID NO: 1803929 - RNA, 19 nt, Human
ggucucgaacuccugaccu

SEQ ID NO: 1803930 - RNA, 20 nt, Human
ggucucgaacuccugaccuu

SEQ ID NO: 1803931 - RNA, 16 nt, Human
ggucucacucugucgc

SEQ ID NO: 1803932 - RNA, 12 nt, Human
ggucucacucug

SEQ ID NO: 1803933 - RNA, 22 nt, Human
ggucucacuauguugcccaggc

SEQ ID NO: 1803934 - RNA, 23 nt, Human
gguccuagaaauuccccacccug

SEQ ID NO: 1803935 - RNA, 22 nt, Human
ggucccugguggcagcucaccu

SEQ ID NO: 1803936 - RNA, 18 nt, Human
ggucccuaauaaagcugu

SEQ ID NO: 1803937 - RNA, 14 nt, Human
ggucccugguggca

SEQ ID NO: 1803938 - RNA, 12 nt, Human
ggucccuaauaa

SEQ ID NO: 1803939 - RNA, 13 nt, Human
ggucccuaauaaa

SEQ ID NO: 1803940 - RNA, 16 nt, Human
ggucccuaauaaagcu

SEQ ID NO: 1803941 - RNA, 17 nt, Human
ggucccuaauaaagcug

SEQ ID NO: 1803942 - RNA, 23 nt, Human
gguuuugccauguuggccaggcu

SEQ ID NO: 1803943 - RNA, 15 nt, Human
gguuuucuguucuuu

SEQ ID NO: 1803944 - RNA, 13 nt, Human
gguuuucuguucu

SEQ ID NO: 1803945 - RNA, 12 nt, Human
gguuuucuguuc

SEQ ID NO: 1803946 - RNA, 13 nt, Human
guaaaaauaaaau

SEQ ID NO: 1803947 - RNA, 14 nt, Human
guaaaaauaaaauu

SEQ ID NO: 1803948 - RNA, 18 nt, Human
guaaaaacaaagaaauua

SEQ ID NO: 1803949 - RNA, 20 nt, Human
guaaaaacaaagaaauuaug

SEQ ID NO: 1803950 - RNA, 15 nt, Human
guaaaagacuuuuuu

SEQ ID NO: 1803951 - RNA, 21 nt, Human
gguucaagcgauucuucugcu

SEQ ID NO: 1803952 - RNA, 17 nt, Human
gguggccucccaacuca

SEQ ID NO: 1803953 - RNA, 13 nt, Human
gguggccucccaa

SEQ ID NO: 1803954 - RNA, 16 nt, Human
gguggcccgacagccu

SEQ ID NO: 1803955 - RNA, 17 nt, Human
gguggcccgacagccug

SEQ ID NO: 1803956 - RNA, 18 nt, Human
gguggcccgacagccugg

SEQ ID NO: 1803957 - RNA, 19 nt, Human
gguggcccgacagccuggc

SEQ ID NO: 1803958 - RNA, 20 nt, Human
gguggcccgacagccuggca

SEQ ID NO: 1803959 - RNA, 14 nt, Human
gguugaagcaccaa

SEQ ID NO: 1803960 - RNA, 18 nt, Human
gguucuuucuuccucugc

SEQ ID NO: 1803961 - RNA, 12 nt, Human
gguucagcuugu

SEQ ID NO: 1803962 - RNA, 17 nt, Human
gguucuuucuuccucug

SEQ ID NO: 1803963 - RNA, 23 nt, Human
gguucaagcgauucuucugcuuc

SEQ ID NO: 1803964 - RNA, 22 nt, Human
gguucaagcgauucuucugcuu

SEQ ID NO: 1803965 - RNA, 20 nt, Human
gguucacugcaaccuccgcc

SEQ ID NO: 1803966 - RNA, 13 nt, Human
gguuggugggggc

SEQ ID NO: 1803967 - RNA, 13 nt, Human
gguuuaagcuguu

SEQ ID NO: 1803968 - RNA, 18 nt, Human
gguuggcaaaaaggcagg

SEQ ID NO: 1803969 - RNA, 14 nt, Human
gguugggcuggugu

SEQ ID NO: 1803970 - RNA, 16 nt, Human
guaaaagcauuuugua

SEQ ID NO: 1803971 - RNA, 20 nt, Human
guaaaugggggugcauuuga

SEQ ID NO: 1803972 - RNA, 19 nt, Human
guaaaugggggugcauuug

SEQ ID NO: 1803973 - RNA, 18 nt, Human
guaaaugggggugcauuu

SEQ ID NO: 1803974 - RNA, 22 nt, Human
guaaauuaacuuuuauaaacuu

SEQ ID NO: 1803975 - RNA, 21 nt, Human
guaaauuaacuuuuauaaacu

SEQ ID NO: 1803976 - RNA, 17 nt, Human
guaaauuaacuuuuaua

SEQ ID NO: 1803977 - RNA, 16 nt, Human
guaaauuaacuuuuau

SEQ ID NO: 1803978 - RNA, 15 nt, Human
guaaauuaacuuuua

SEQ ID NO: 1803979 - RNA, 16 nt, Human
guaaaugguaugucau

SEQ ID NO: 1803980 - RNA, 18 nt, Human
guaaggaauaccuguccc

SEQ ID NO: 1803981 - RNA, 20 nt, Human
guaaggaauaccuguccccc

SEQ ID NO: 1803982 - RNA, 21 nt, Human
guaaggaauaccugucccccu

SEQ ID NO: 1803983 - RNA, 23 nt, Human
guaaggaauaccugucccccuga

SEQ ID NO: 1803984 - RNA, 13 nt, Human
guaaggaaugauu

SEQ ID NO: 1803985 - RNA, 22 nt, Human
guaaguauucuuauuuaaugaa

SEQ ID NO: 1803986 - RNA, 23 nt, Human
guaaauuaacuuuuauaaacuuu

SEQ ID NO: 1803987 - RNA, 16 nt, Human
guaagaaauacagacu

SEQ ID NO: 1803988 - RNA, 13 nt, Human
guaagaaauacag

SEQ ID NO: 1803989 - RNA, 19 nt, Human
guaagaucguucucugccu

SEQ ID NO: 1803990 - RNA, 15 nt, Human
guacccacugcucug

SEQ ID NO: 1803991 - RNA, 13 nt, Human
guacaguuuuuau

SEQ ID NO: 1803992 - RNA, 12 nt, Human
guacaguuuuua

SEQ ID NO: 1803993 - RNA, 20 nt, Human
guacauaaugcgugcauacc

SEQ ID NO: 1803994 - RNA, 14 nt, Human
guacagucuuguau

SEQ ID NO: 1803995 - RNA, 13 nt, Human
guacagucuugua

SEQ ID NO: 1803996 - RNA, 16 nt, Human
guacagucuuguauua

SEQ ID NO: 1803997 - RNA, 16 nt, Human
guacagacaacaaacc

SEQ ID NO: 1803998 - RNA, 15 nt, Human
guacagacagaaaaa

SEQ ID NO: 1803999 - RNA, 21 nt, Human
guacacuguuucaaacuuuac

SEQ ID NO: 1804000 - RNA, 20 nt, Human
guacacuguuucaaacuuua

SEQ ID NO: 1804001 - RNA, 19 nt, Human
guacacuguuucaaacuuu

SEQ ID NO: 1804002 - RNA, 12 nt, Human
guacagagccca

SEQ ID NO: 1804003 - RNA, 18 nt, Human
guacagagcccacgcccc

SEQ ID NO: 1804004 - RNA, 22 nt, Human
guacagagcccacgcccccacu

SEQ ID NO: 1804005 - RNA, 20 nt, Human
guacagcaaggagauuuaca

SEQ ID NO: 1804006 - RNA, 18 nt, Human
guaaugaugucguuugaa

SEQ ID NO: 1804007 - RNA, 19 nt, Human
guaauguaucaaauacauu

SEQ ID NO: 1804008 - RNA, 15 nt, Human
guaaucguguccccu

SEQ ID NO: 1804009 - RNA, 11 nt, Human
guaaugaaaac

SEQ ID NO: 1804010 - RNA, 13 nt, Human
guaaugaaaacca

SEQ ID NO: 1804011 - RNA, 21 nt, Human
guaauuaaguacuauguauca

SEQ ID NO: 1804012 - RNA, 14 nt, Human
guaauuaaguacua

SEQ ID NO: 1804013 - RNA, 17 nt, Human
guaauuaaguacuaugu

SEQ ID NO: 1804014 - RNA, 20 nt, Human
guaauuaaguacuauguauc

SEQ ID NO: 1804015 - RNA, 18 nt, Human
guacacuguuucaaacuu

SEQ ID NO: 1804016 - RNA, 23 nt, Human
guacuuuauuuucuauaauuuaa

SEQ ID NO: 1804017 - RNA, 21 nt, Human
guacuuguggacacagcucuu

SEQ ID NO: 1804018 - RNA, 22 nt, Human
guacuuucauauuuuaaacaga

SEQ ID NO: 1804019 - RNA, 20 nt, Human
guagaaaagggaacugaaca

SEQ ID NO: 1804020 - RNA, 16 nt, Human
guagagcggagaaagg

SEQ ID NO: 1804021 - RNA, 15 nt, Human
guagaggagaaacug

SEQ ID NO: 1804022 - RNA, 19 nt, Human
guacuucuccacccugcuc

SEQ ID NO: 1804023 - RNA, 18 nt, Human
guacuucuccacccugcu

SEQ ID NO: 1804024 - RNA, 17 nt, Human
guacuucuccacccugc

SEQ ID NO: 1804025 - RNA, 16 nt, Human
guacuucuccacccug

SEQ ID NO: 1804026 - RNA, 21 nt, Human
guacuucuccacccugcucuc

SEQ ID NO: 1804027 - RNA, 20 nt, Human
guacuucuccacccugcucu

SEQ ID NO: 1804028 - RNA, 14 nt, Human
guacuugcucuuga

SEQ ID NO: 1804029 - RNA, 20 nt, Human
guacuuguggacacagcucu

SEQ ID NO: 1804030 - RNA, 16 nt, Human
guacuuguggacacag

SEQ ID NO: 1804031 - RNA, 22 nt, Human
guacuugcucuugaugccuggc

SEQ ID NO: 1804032 - RNA, 15 nt, Human
guacuugcucuugau

SEQ ID NO: 1804033 - RNA, 16 nt, Human
guacuugcucuugaug

SEQ ID NO: 1804034 - RNA, 18 nt, Human
guacuugcucuugaugcc

SEQ ID NO: 1804035 - RNA, 19 nt, Human
guacuugcucuugaugccu

SEQ ID NO: 1804036 - RNA, 15 nt, Human
guaccgcaaugugac

SEQ ID NO: 1804037 - RNA, 16 nt, Human
guacccacugcucugg

SEQ ID NO: 1804038 - RNA, 22 nt, Human
guaccucuugagccuugaacuu

SEQ ID NO: 1804039 - RNA, 21 nt, Human
guaccucuugagccuugaacu

SEQ ID NO: 1804040 - RNA, 13 nt, Human
guaccucuugagc

SEQ ID NO: 1804041 - RNA, 15 nt, Human
guacgucugacaggc

SEQ ID NO: 1804042 - RNA, 14 nt, Human
guacgucugacagg

SEQ ID NO: 1804043 - RNA, 17 nt, Human
guacgucugacaggcaa

SEQ ID NO: 1804044 - RNA, 14 nt, Human
guacguugugcauu

SEQ ID NO: 1804045 - RNA, 16 nt, Human
guacguugugcauuug

SEQ ID NO: 1804046 - RNA, 15 nt, Human
guacguugugcauuu

SEQ ID NO: 1804047 - RNA, 15 nt, Human
guacuucuccacccu

SEQ ID NO: 1804048 - RNA, 14 nt, Human
guacuucuccaccc

SEQ ID NO: 1804049 - RNA, 17 nt, Human
guacuacaguccuccca

SEQ ID NO: 1804050 - RNA, 17 nt, Human
guacguugugcauuugg

SEQ ID NO: 1804051 - RNA, 15 nt, Human
guacuaaggaaucuu

SEQ ID NO: 1804052 - RNA, 23 nt, Human
guacuaaggaaucuuucugcuuu

SEQ ID NO: 1804053 - RNA, 23 nt, Human
gcuaagagggagggagggcucca

SEQ ID NO: 1804054 - RNA, 17 nt, Human
gcuaagcaaaaugugau

SEQ ID NO: 1804055 - RNA, 14 nt, Human
gcuacccgggaagg

SEQ ID NO: 1804056 - RNA, 15 nt, Human
gcuacccgggaaggg

SEQ ID NO: 1804057 - RNA, 21 nt, Human
gcuacccgggaagggggcugg

SEQ ID NO: 1804058 - RNA, 21 nt, Human
gcuagagguucaaagauauuu

SEQ ID NO: 1804059 - RNA, 19 nt, Human
gcuagagguucaaagauau

SEQ ID NO: 1804060 - RNA, 22 nt, Human
gcuacuaugauuuaauuugaaa

SEQ ID NO: 1804061 - RNA, 20 nt, Human
gcuacuaugauuuaauuuga

SEQ ID NO: 1804062 - RNA, 18 nt, Human
gcuagagguucaaagaua

SEQ ID NO: 1804063 - RNA, 16 nt, Human
gcuaucucccccagcc

SEQ ID NO: 1804064 - RNA, 17 nt, Human
gcuaucucccccagccc

SEQ ID NO: 1804065 - RNA, 18 nt, Human
gcuaucucccccagcccc

SEQ ID NO: 1804066 - RNA, 23 nt, Human
gcuaucucccccagccccauccu

SEQ ID NO: 1804067 - RNA, 19 nt, Human
gcuaucucccccagcccca

SEQ ID NO: 1804068 - RNA, 20 nt, Human
gcuaucucccccagccccau

SEQ ID NO: 1804069 - RNA, 21 nt, Human
gcuaucucccccagccccauc

SEQ ID NO: 1804070 - RNA, 22 nt, Human
gcuaucucccccagccccaucc

SEQ ID NO: 1804071 - RNA, 23 nt, Human
gcgugagccacugcaccgggcca

SEQ ID NO: 1804072 - RNA, 18 nt, Human
gcgugagccacugcaccg

SEQ ID NO: 1804073 - RNA, 15 nt, Human
gcgugagaccugccc

SEQ ID NO: 1804074 - RNA, 13 nt, Human
gcuaaaugugaau

SEQ ID NO: 1804075 - RNA, 16 nt, Human
gcuaaaugugaaugau

SEQ ID NO: 1804076 - RNA, 22 nt, Human
gcuaagagggagggagggcucc

SEQ ID NO: 1804077 - RNA, 19 nt, Human
gcgguccacccaggagccc

SEQ ID NO: 1804078 - RNA, 18 nt, Human
gcgguccacccaggagcc

SEQ ID NO: 1804079 - RNA, 20 nt, Human
gcgguccacccaggagcccc

SEQ ID NO: 1804080 - RNA, 16 nt, Human
gcgguccacccaggag

SEQ ID NO: 1804081 - RNA, 13 nt, Human
gcggggacagcuc

SEQ ID NO: 1804082 - RNA, 12 nt, Human
gcggggacagcu

SEQ ID NO: 1804083 - RNA, 15 nt, Human
gcgggcuuccuccug

SEQ ID NO: 1804084 - RNA, 17 nt, Human
gccugugaacugaacuc

SEQ ID NO: 1804085 - RNA, 23 nt, Human
gccugugagcuaggaauuguguu

SEQ ID NO: 1804086 - RNA, 14 nt, Human
gcuccaucuccacu

SEQ ID NO: 1804087 - RNA, 24 nt, Human
gcuccaggcuccuuuagcgcccag

SEQ ID NO: 1804088 - RNA, 20 nt, Human
gcuccagcuguucagcuggu

SEQ ID NO: 1804089 - RNA, 23 nt, Human
gcuccaggcuccuuuagcgccca

SEQ ID NO: 1804090 - RNA, 16 nt, Human
gcuccaggcuccuuua

SEQ ID NO: 1804091 - RNA, 13 nt, Human
gcuccaggcuccu

SEQ ID NO: 1804092 - RNA, 11 nt, Human
gcuccagcugu

SEQ ID NO: 1804093 - RNA, 20 nt, Human
gcuccauuuuuagugaaaua

SEQ ID NO: 1804094 - RNA, 19 nt, Human
gcuccaaacccucgaggcg

SEQ ID NO: 1804095 - RNA, 16 nt, Human
gcuccaaaugcagcuu

SEQ ID NO: 1804096 - RNA, 13 nt, Human
gcuccaagcuccc

SEQ ID NO: 1804097 - RNA, 14 nt, Human
gcuccaagcuccca

SEQ ID NO: 1804098 - RNA, 15 nt, Human
gcuccaagcucccag

SEQ ID NO: 1804099 - RNA, 17 nt, Human
gcuccagcuggccggga

SEQ ID NO: 1804100 - RNA, 23 nt, Human
gcuccagcuggccgggagccuga

SEQ ID NO: 1804101 - RNA, 21 nt, Human
gcuccaagcucccaggcauuc

SEQ ID NO: 1804102 - RNA, 16 nt, Human
gcuccaagcucccagg

SEQ ID NO: 1804103 - RNA, 17 nt, Human
gcuccaagcucccaggc

SEQ ID NO: 1804104 - RNA, 18 nt, Human
gcuccaagcucccaggca

SEQ ID NO: 1804105 - RNA, 19 nt, Human
gcuccaagcucccaggcau

SEQ ID NO: 1804106 - RNA, 18 nt, Human
gcucaggugucccugcac

SEQ ID NO: 1804107 - RNA, 22 nt, Human
gcucagcggggacagcuccuuc

SEQ ID NO: 1804108 - RNA, 21 nt, Human
gcucagcggggacagcuccuu

SEQ ID NO: 1804109 - RNA, 20 nt, Human
gcucagcggggacagcuccu

SEQ ID NO: 1804110 - RNA, 16 nt, Human
gcucagcggggacagc

SEQ ID NO: 1804111 - RNA, 15 nt, Human
gcucagcggggacag

SEQ ID NO: 1804112 - RNA, 19 nt, Human
gcucaggugucccugcacu

SEQ ID NO: 1804113 - RNA, 17 nt, Human
gcuccaaacccucgagg

SEQ ID NO: 1804114 - RNA, 18 nt, Human
gcuccaaacccucgaggc

SEQ ID NO: 1804115 - RNA, 16 nt, Human
gcuccaaacccucgag

SEQ ID NO: 1804116 - RNA, 19 nt, Human
gcucaccagccccagugcc

SEQ ID NO: 1804117 - RNA, 23 nt, Human
gcucaccagccccagugcccaca

SEQ ID NO: 1804118 - RNA, 20 nt, Human
gcucaccagccccagugccc

SEQ ID NO: 1804119 - RNA, 17 nt, Human
gcucagcaaaagaugcu

SEQ ID NO: 1804120 - RNA, 20 nt, Human
gcucagcaaaagaugcuucu

SEQ ID NO: 1804121 - RNA, 22 nt, Human
gcucagcaaaagaugcuucuca

SEQ ID NO: 1804122 - RNA, 23 nt, Human
gcucagcaaaagaugcuucucac

SEQ ID NO: 1804123 - RNA, 17 nt, Human
gcucuccgaccagacac

SEQ ID NO: 1804124 - RNA, 13 nt, Human
gcucuccgaccag

SEQ ID NO: 1804125 - RNA, 19 nt, Human
gcucuccgaccagacaccu

SEQ ID NO: 1804126 - RNA, 19 nt, Human
gcucuccucuugccacugc

SEQ ID NO: 1804127 - RNA, 22 nt, Human
gcucuccucuugccacugccuc

SEQ ID NO: 1804128 - RNA, 15 nt, Human
gcucuccucuugcca

SEQ ID NO: 1804129 - RNA, 13 nt, Human
gcucucuggccuu

SEQ ID NO: 1804130 - RNA, 12 nt, Human
gcucucuggccu

SEQ ID NO: 1804131 - RNA, 11 nt, Human
gcucucuggcc

SEQ ID NO: 1804132 - RNA, 16 nt, Human
gcucgagcaugccugg

SEQ ID NO: 1804133 - RNA, 17 nt, Human
gcucgagcaugccugga

SEQ ID NO: 1804134 - RNA, 21 nt, Human
gcuccuucuguccuacucugu

SEQ ID NO: 1804135 - RNA, 19 nt, Human
gcucccuucccaccucucu

SEQ ID NO: 1804136 - RNA, 15 nt, Human
gcuccuucuguccua

SEQ ID NO: 1804137 - RNA, 15 nt, Human
gcucccuucccaccu

SEQ ID NO: 1804138 - RNA, 16 nt, Human
gcucccuucccaccuc

SEQ ID NO: 1804139 - RNA, 18 nt, Human
gcucccuucccaccucuc

SEQ ID NO: 1804140 - RNA, 14 nt, Human
gcucugcccuuggu

SEQ ID NO: 1804141 - RNA, 23 nt, Human
gcucugcccuugguuaggcauug

SEQ ID NO: 1804142 - RNA, 11 nt, Human
gcucugccucc

SEQ ID NO: 1804143 - RNA, 20 nt, Human
gcucucuggccuucggccuc

SEQ ID NO: 1804144 - RNA, 19 nt, Human
gcucucuggccuucggccu

SEQ ID NO: 1804145 - RNA, 15 nt, Human
gcucucuggccuucg

SEQ ID NO: 1804146 - RNA, 14 nt, Human
gcucucuggccuuc

SEQ ID NO: 1804147 - RNA, 14 nt, Human
gcucugcuccucuc

SEQ ID NO: 1804148 - RNA, 13 nt, Human
gcucugcuccucu

SEQ ID NO: 1804149 - RNA, 13 nt, Human
gcucugccuccca

SEQ ID NO: 1804150 - RNA, 14 nt, Human
gcucugccucccau

SEQ ID NO: 1804151 - RNA, 15 nt, Human
gcucugccucccauc

SEQ ID NO: 1804152 - RNA, 22 nt, Human
gcucugccucccaucacccgcu

SEQ ID NO: 1804153 - RNA, 23 nt, Human
gcucugcugacagacacaggccc

SEQ ID NO: 1804154 - RNA, 20 nt, Human
gcucugcugacagacacagg

SEQ ID NO: 1804155 - RNA, 19 nt, Human
gcucugcugacagacacag

SEQ ID NO: 1804156 - RNA, 18 nt, Human
gcucugcugacagacaca

SEQ ID NO: 1804157 - RNA, 14 nt, Human
gcucugcugacaga

SEQ ID NO: 1804158 - RNA, 13 nt, Human
gcucugcugacag

SEQ ID NO: 1804159 - RNA, 21 nt, Human
gcucugcuccucuccccagca

SEQ ID NO: 1804160 - RNA, 19 nt, Human
gcucugcuccucuccccag

SEQ ID NO: 1804161 - RNA, 22 nt, Human
gcucuggacaggcauguucucu

SEQ ID NO: 1804162 - RNA, 21 nt, Human
gcucuggacaggcauguucuc

SEQ ID NO: 1804163 - RNA, 16 nt, Human
gcucuggacaggcaug

SEQ ID NO: 1804164 - RNA, 15 nt, Human
gcucuggacaggcau

SEQ ID NO: 1804165 - RNA, 14 nt, Human
gcucuggacaggca

SEQ ID NO: 1804166 - RNA, 22 nt, Human
gcucugcuccccuaaagccuca

SEQ ID NO: 1804167 - RNA, 12 nt, Human
gcucuucuccag

SEQ ID NO: 1804168 - RNA, 22 nt, Human
gcucuuccaggcugggagagcc

SEQ ID NO: 1804169 - RNA, 19 nt, Human
gcucuuccaggcugggaga

SEQ ID NO: 1804170 - RNA, 18 nt, Human
gcucuuccaggcugggag

SEQ ID NO: 1804171 - RNA, 16 nt, Human
gcucuucuccaggcug

SEQ ID NO: 1804172 - RNA, 14 nt, Human
gcucuucuccaggc

SEQ ID NO: 1804173 - RNA, 17 nt, Human
gcucuucuccuuucaca

SEQ ID NO: 1804174 - RNA, 21 nt, Human
gcucuucuccuuucacaaccu

SEQ ID NO: 1804175 - RNA, 13 nt, Human
gcucuucuccuuu

SEQ ID NO: 1804176 - RNA, 23 nt, Human
gcucuucuccuuucacaaccuuc

SEQ ID NO: 1804177 - RNA, 14 nt, Human
gcucuugaugccug

SEQ ID NO: 1804178 - RNA, 15 nt, Human
gcucuugaugccugg

SEQ ID NO: 1804179 - RNA, 16 nt, Human
gcucuugaugccuggc

SEQ ID NO: 1804180 - RNA, 21 nt, Human
gcugacagacacaggcccggc

SEQ ID NO: 1804181 - RNA, 17 nt, Human
gcugacagacagcccuc

SEQ ID NO: 1804182 - RNA, 17 nt, Human
gcucuugaugccuggcg

SEQ ID NO: 1804183 - RNA, 18 nt, Human
gcugacuguacuccuccc

SEQ ID NO: 1804184 - RNA, 19 nt, Human
gcugacuguacuccuccca

SEQ ID NO: 1804185 - RNA, 18 nt, Human
gcugauggugcaaugacc

SEQ ID NO: 1804186 - RNA, 21 nt, Human
gcugauggugcaaugaccuuu

SEQ ID NO: 1804187 - RNA, 21 nt, Human
gcugcaguugccagucacccc

SEQ ID NO: 1804188 - RNA, 18 nt, Human
gcugcaguugccagucac

SEQ ID NO: 1804189 - RNA, 20 nt, Human
gcugcaguugccagucaccc

SEQ ID NO: 1804190 - RNA, 17 nt, Human
gcugcauuuaaaagaua

SEQ ID NO: 1804191 - RNA, 15 nt, Human
gcugauggugcaaug

SEQ ID NO: 1804192 - RNA, 16 nt, Human
gcugauggugcaauga

SEQ ID NO: 1804193 - RNA, 22 nt, Human
gcugagugggggaucacagccu

SEQ ID NO: 1804194 - RNA, 23 nt, Human
gcugagugggggaucacagccuc

SEQ ID NO: 1804195 - RNA, 21 nt, Human
gcugacuguacuccucccagg

SEQ ID NO: 1804196 - RNA, 17 nt, Human
gcugagucccaggcuga

SEQ ID NO: 1804197 - RNA, 21 nt, Human
gcugagucccaggcugagccu

SEQ ID NO: 1804198 - RNA, 22 nt, Human
gcugagucccaggcugagccuc

SEQ ID NO: 1804199 - RNA, 15 nt, Human
gcugagucugaaggc

SEQ ID NO: 1804200 - RNA, 16 nt, Human
gcugagucugaaggcu

SEQ ID NO: 1804201 - RNA, 18 nt, Human
gcugagucugaaggcugg

SEQ ID NO: 1804202 - RNA, 19 nt, Human
gcugagucugaaggcuggg

SEQ ID NO: 1804203 - RNA, 15 nt, Human
gccugcuccagcugu

SEQ ID NO: 1804204 - RNA, 16 nt, Human
gccugcuccagcuguu

SEQ ID NO: 1804205 - RNA, 18 nt, Human
gccugcuccagcuguuca

SEQ ID NO: 1804206 - RNA, 18 nt, Human
gccugcuuuuuauggccu

SEQ ID NO: 1804207 - RNA, 19 nt, Human
gccugcuuuuuauggccug

SEQ ID NO: 1804208 - RNA, 22 nt, Human
gccugcuuuuuauggccuguga

SEQ ID NO: 1804209 - RNA, 22 nt, Human
gccugaagucacacagugaguc

SEQ ID NO: 1804210 - RNA, 19 nt, Human
gccucugcugauccuccca

SEQ ID NO: 1804211 - RNA, 18 nt, Human
gccucugcugauccuccc

SEQ ID NO: 1804212 - RNA, 13 nt, Human
gccucugccuguc

SEQ ID NO: 1804213 - RNA, 12 nt, Human
gccucugccugu

SEQ ID NO: 1804214 - RNA, 23 nt, Human
gccucucugcaggucccuaauaa

SEQ ID NO: 1804215 - RNA, 18 nt, Human
gccucucugcaggucccu

SEQ ID NO: 1804216 - RNA, 20 nt, Human
gccucucugcaggucccuaa

SEQ ID NO: 1804217 - RNA, 21 nt, Human
gccucucugcaggucccuaau

SEQ ID NO: 1804218 - RNA, 15 nt, Human
gccuggccagaugca

SEQ ID NO: 1804219 - RNA, 14 nt, Human
gccuggccagaugc

SEQ ID NO: 1804220 - RNA, 16 nt, Human
gccuggccagaugcac

SEQ ID NO: 1804221 - RNA, 15 nt, Human
gccugggcagaagga

SEQ ID NO: 1804222 - RNA, 15 nt, Human
gccuggauggggcug

SEQ ID NO: 1804223 - RNA, 14 nt, Human
gccuggauggggcu

SEQ ID NO: 1804224 - RNA, 13 nt, Human
gccuggccacgcc

SEQ ID NO: 1804225 - RNA, 21 nt, Human
gccugggggcugggcagagga

SEQ ID NO: 1804226 - RNA, 20 nt, Human
gccugggggcugggcagagg

SEQ ID NO: 1804227 - RNA, 18 nt, Human
gccugggcagaaggaaga

SEQ ID NO: 1804228 - RNA, 16 nt, Human
gccugggcagaaggaa

SEQ ID NO: 1804229 - RNA, 17 nt, Human
gccugggcagaaggaag

SEQ ID NO: 1804230 - RNA, 21 nt, Human
gccucaagugauucuccugcc

SEQ ID NO: 1804231 - RNA, 20 nt, Human
gccucaagugauucuccugc

SEQ ID NO: 1804232 - RNA, 19 nt, Human
gccucaagugauucuccug

SEQ ID NO: 1804233 - RNA, 17 nt, Human
gccucaaccuccugggc

SEQ ID NO: 1804234 - RNA, 16 nt, Human
gccucaaccuccuggg

SEQ ID NO: 1804235 - RNA, 14 nt, Human
gccucaaccuccug

SEQ ID NO: 1804236 - RNA, 16 nt, Human
gccuaaggcugaacuu

SEQ ID NO: 1804237 - RNA, 17 nt, Human
gccuaagugcagccccg

SEQ ID NO: 1804238 - RNA, 22 nt, Human
gccuauauuuuuuguuaaauga

SEQ ID NO: 1804239 - RNA, 14 nt, Human
gccucagugccacu

SEQ ID NO: 1804240 - RNA, 12 nt, Human
gccucagugcca

SEQ ID NO: 1804241 - RNA, 15 nt, Human
gccucagucucccuc

SEQ ID NO: 1804242 - RNA, 18 nt, Human
gccucagucucccucccu

SEQ ID NO: 1804243 - RNA, 23 nt, Human
gccucagccucccaaagugcugg

SEQ ID NO: 1804244 - RNA, 18 nt, Human
gccucagccuccugagua

SEQ ID NO: 1804245 - RNA, 16 nt, Human
gccucagccuccugag

SEQ ID NO: 1804246 - RNA, 14 nt, Human
gccucagccucccg

SEQ ID NO: 1804247 - RNA, 21 nt, Human
gccucccacgacugcccggca

SEQ ID NO: 1804248 - RNA, 14 nt, Human
gccucccacgacug

SEQ ID NO: 1804249 - RNA, 21 nt, Human
gccucccgaauagcugggacu

SEQ ID NO: 1804250 - RNA, 15 nt, Human
gccucagugccacua

SEQ ID NO: 1804251 - RNA, 21 nt, Human
gccucccaacucaccccagcc

SEQ ID NO: 1804252 - RNA, 22 nt, Human
gccucccaacucaccccagccc

SEQ ID NO: 1804253 - RNA, 23 nt, Human
gccucccaacucaccccagcccc

SEQ ID NO: 1804254 - RNA, 15 nt, Human
gccucccgaguagcu

SEQ ID NO: 1804255 - RNA, 23 nt, Human
gccucccgaauagcugggacuac

SEQ ID NO: 1804256 - RNA, 17 nt, Human
gccucccgaguagcugg

SEQ ID NO: 1804257 - RNA, 20 nt, Human
gccucggacuuagcugggag

SEQ ID NO: 1804258 - RNA, 21 nt, Human
gccucggacuuagcugggaga

SEQ ID NO: 1804259 - RNA, 19 nt, Human
gccucucugcaggucccua

SEQ ID NO: 1804260 - RNA, 12 nt, Human
gcccucugccca

SEQ ID NO: 1804261 - RNA, 16 nt, Human
gcccugagcuuucugc

SEQ ID NO: 1804262 - RNA, 18 nt, Human
gcccggcuccaggcuccu

SEQ ID NO: 1804263 - RNA, 17 nt, Human
gcccggcuccaggcucc

SEQ ID NO: 1804264 - RNA, 20 nt, Human
gcccugcuuugggcugcccu

SEQ ID NO: 1804265 - RNA, 21 nt, Human
gcccugcuuugggcugcccug

SEQ ID NO: 1804266 - RNA, 19 nt, Human
gcccugcuuugggcugccc

SEQ ID NO: 1804267 - RNA, 22 nt, Human
gcccugcuuugggcugcccugg

SEQ ID NO: 1804268 - RNA, 23 nt, Human
gcccugcuuugggcugcccuggu

SEQ ID NO: 1804269 - RNA, 12 nt, Human
gcccuggacugu

SEQ ID NO: 1804270 - RNA, 16 nt, Human
gcccuggacugugugc

SEQ ID NO: 1804271 - RNA, 22 nt, Human
gcccuggacugugugcucagga

SEQ ID NO: 1804272 - RNA, 16 nt, Human
gcccggcuccaggcuc

SEQ ID NO: 1804273 - RNA, 12 nt, Human
gccccuuccccc

SEQ ID NO: 1804274 - RNA, 16 nt, Human
gcccgacagccuggca

SEQ ID NO: 1804275 - RNA, 17 nt, Human
gcccgacagccuggcac

SEQ ID NO: 1804276 - RNA, 19 nt, Human
gcccgacagccuggcacag

SEQ ID NO: 1804277 - RNA, 15 nt, Human
gccccugccacccug

SEQ ID NO: 1804278 - RNA, 14 nt, Human
gccccugccacccu

SEQ ID NO: 1804279 - RNA, 21 nt, Human
gccccuguucuggcagaguug

SEQ ID NO: 1804280 - RNA, 13 nt, Human
gccccugccaccc

SEQ ID NO: 1804281 - RNA, 15 nt, Human
gcagacucuacagag

SEQ ID NO: 1804282 - RNA, 12 nt, Human
gccccucccuuc

SEQ ID NO: 1804283 - RNA, 14 nt, Human
gccccucccuucaa

SEQ ID NO: 1804284 - RNA, 15 nt, Human
gccccucccuucaac

SEQ ID NO: 1804285 - RNA, 18 nt, Human
gccccuccucucugcccu

SEQ ID NO: 1804286 - RNA, 19 nt, Human
gccccuccucucugcccua

SEQ ID NO: 1804287 - RNA, 20 nt, Human
gcccuuccucuccacugccu

SEQ ID NO: 1804288 - RNA, 23 nt, Human
gcccuucucuccagccccuggau

SEQ ID NO: 1804289 - RNA, 21 nt, Human
gcccuucucuccagccccugg

SEQ ID NO: 1804290 - RNA, 22 nt, Human
gcccuucucuccagccccugga

SEQ ID NO: 1804291 - RNA, 17 nt, Human
gcccuuccucuccacug

SEQ ID NO: 1804292 - RNA, 16 nt, Human
gcccuuccucuccacu

SEQ ID NO: 1804293 - RNA, 18 nt, Human
gcccuuccucuccacugc

SEQ ID NO: 1804294 - RNA, 19 nt, Human
gcccuuccucuccacugcc

SEQ ID NO: 1804295 - RNA, 21 nt, Human
gcccuuccucuccacugccuu

SEQ ID NO: 1804296 - RNA, 19 nt, Human
gcccuucucuccagccccu

SEQ ID NO: 1804297 - RNA, 19 nt, Human
gccgagaucacgccacugc

SEQ ID NO: 1804298 - RNA, 18 nt, Human
gccgagaucacgccacug

SEQ ID NO: 1804299 - RNA, 18 nt, Human
gccgagauugcaccacug

SEQ ID NO: 1804300 - RNA, 17 nt, Human
gccgagauugcaccacu

SEQ ID NO: 1804301 - RNA, 16 nt, Human
gccgagaucacgccac

SEQ ID NO: 1804302 - RNA, 23 nt, Human
gcccugguggcagugggagcugc

SEQ ID NO: 1804303 - RNA, 22 nt, Human
gcccugguggcagugggagcug

SEQ ID NO: 1804304 - RNA, 21 nt, Human
gcccugguggcagugggagcu

SEQ ID NO: 1804305 - RNA, 20 nt, Human
gcccugguggcagugggagc

SEQ ID NO: 1804306 - RNA, 19 nt, Human
gcccugguggcagugggag

SEQ ID NO: 1804307 - RNA, 18 nt, Human
gcccugguggcaguggga

SEQ ID NO: 1804308 - RNA, 17 nt, Human
gcccugguggcaguggg

SEQ ID NO: 1804309 - RNA, 14 nt, Human
gcccugguggcagu

SEQ ID NO: 1804310 - RNA, 17 nt, Human
gcccugguuuccugccc

SEQ ID NO: 1804311 - RNA, 18 nt, Human
gcccugguuuccugcccu

SEQ ID NO: 1804312 - RNA, 19 nt, Human
gcccugguuuccugcccug

SEQ ID NO: 1804313 - RNA, 20 nt, Human
gcccugguuuccugcccugg

SEQ ID NO: 1804314 - RNA, 21 nt, Human
gcccugguuuccugcccuggg

SEQ ID NO: 1804315 - RNA, 23 nt, Human
gcccugguuuccugcccugggag

SEQ ID NO: 1804316 - RNA, 14 nt, Human
gcccugguuuccug

SEQ ID NO: 1804317 - RNA, 15 nt, Human
gcccugguuuccugc

SEQ ID NO: 1804318 - RNA, 15 nt, Human
gcccuggcucccaca

SEQ ID NO: 1804319 - RNA, 19 nt, Human
gcccuggcucccacaggcc

SEQ ID NO: 1804320 - RNA, 20 nt, Human
gcccuggcucccacaggccc

SEQ ID NO: 1804321 - RNA, 11 nt, Human
gcccugggagg

SEQ ID NO: 1804322 - RNA, 14 nt, Human
gcccugggaggcag

SEQ ID NO: 1804323 - RNA, 13 nt, Human
gcccugggaggcu

SEQ ID NO: 1804324 - RNA, 14 nt, Human
gcccugggaggcuc

SEQ ID NO: 1804325 - RNA, 15 nt, Human
gcccugggaggcucu

SEQ ID NO: 1804326 - RNA, 16 nt, Human
gcccugggaggcucug

SEQ ID NO: 1804327 - RNA, 15 nt, Human
gcccuggugcugcca

SEQ ID NO: 1804328 - RNA, 16 nt, Human
gcccuggugcugccac

SEQ ID NO: 1804329 - RNA, 17 nt, Human
gcccuggugcugccaca

SEQ ID NO: 1804330 - RNA, 21 nt, Human
gcccuggugcugccacacuuc

SEQ ID NO: 1804331 - RNA, 16 nt, Human
gcccugggaggcagug

SEQ ID NO: 1804332 - RNA, 23 nt, Human
gcccugggaggcucuggagccca

SEQ ID NO: 1804333 - RNA, 17 nt, Human
gcccugggaggcucugg

SEQ ID NO: 1804334 - RNA, 18 nt, Human
gcccugggaggcucugga

SEQ ID NO: 1804335 - RNA, 19 nt, Human
gcccugggaggcucuggag

SEQ ID NO: 1804336 - RNA, 21 nt, Human
gcccugggaggcucuggagcc

SEQ ID NO: 1804337 - RNA, 18 nt, Human
ggaaguacuggagaaaau

SEQ ID NO: 1804338 - RNA, 12 nt, Human
ggaaguacugga

SEQ ID NO: 1804339 - RNA, 16 nt, Human
ggaaguacuggagaaa

SEQ ID NO: 1804340 - RNA, 18 nt, Human
ggaagugcuaauuuugaa

SEQ ID NO: 1804341 - RNA, 20 nt, Human
ggaagugacgguuuaauggg

SEQ ID NO: 1804342 - RNA, 13 nt, Human
ggaaccugacccc

SEQ ID NO: 1804343 - RNA, 14 nt, Human
ggaaggcagggagg

SEQ ID NO: 1804344 - RNA, 17 nt, Human
ggaaggcugagaggaga

SEQ ID NO: 1804345 - RNA, 23 nt, Human
ggaaggggagauaaggguaucug

SEQ ID NO: 1804346 - RNA, 19 nt, Human
ggaauuuucaucuaggauu

SEQ ID NO: 1804347 - RNA, 12 nt, Human
ggaauuguguuu

SEQ ID NO: 1804348 - RNA, 19 nt, Human
ggaauguuugccucugccu

SEQ ID NO: 1804349 - RNA, 12 nt, Human
ggaaugcagugg

SEQ ID NO: 1804350 - RNA, 24 nt, Human
ggaaugauuaauuaaaacacaaca

SEQ ID NO: 1804351 - RNA, 20 nt, Human
ggacauugcggacagccacg

SEQ ID NO: 1804352 - RNA, 22 nt, Human
ggacagccacggccaggccaga

SEQ ID NO: 1804353 - RNA, 21 nt, Human
ggacagccacggccaggccag

SEQ ID NO: 1804354 - RNA, 20 nt, Human
ggacagccacggccaggcca

SEQ ID NO: 1804355 - RNA, 19 nt, Human
ggacagccacggccaggcc

SEQ ID NO: 1804356 - RNA, 15 nt, Human
ggacagccacggcca

SEQ ID NO: 1804357 - RNA, 17 nt, Human
ggacacucaaaagcugg

SEQ ID NO: 1804358 - RNA, 22 nt, Human
ggacacucaaaagcugggcagg

SEQ ID NO: 1804359 - RNA, 17 nt, Human
ggaccuugaacugggua

SEQ ID NO: 1804360 - RNA, 15 nt, Human
ggaccuugaacuggg

SEQ ID NO: 1804361 - RNA, 17 nt, Human
ggacgcuacccgggaag

SEQ ID NO: 1804362 - RNA, 19 nt, Human
ggacgcuacccgggaaggg

SEQ ID NO: 1804363 - RNA, 20 nt, Human
ggacgcuacccgggaagggg

SEQ ID NO: 1804364 - RNA, 13 nt, Human
ggaccagagcugc

SEQ ID NO: 1804365 - RNA, 19 nt, Human
ggaccucaggugagaagca

SEQ ID NO: 1804366 - RNA, 23 nt, Human
ggaccucaggugagaagcagagg

SEQ ID NO: 1804367 - RNA, 15 nt, Human
ggacgcucucuggcc

SEQ ID NO: 1804368 - RNA, 14 nt, Human
ggacgcucucuggc

SEQ ID NO: 1804369 - RNA, 13 nt, Human
ggacgcucucugg

SEQ ID NO: 1804370 - RNA, 18 nt, Human
ggacuggccucugcugau

SEQ ID NO: 1804371 - RNA, 17 nt, Human
ggagaagcggcuggcag

SEQ ID NO: 1804372 - RNA, 18 nt, Human
ggagaagcggcuggcagc

SEQ ID NO: 1804373 - RNA, 19 nt, Human
ggagaaucacuugaacccg

SEQ ID NO: 1804374 - RNA, 15 nt, Human
ggagaaucacuugaa

SEQ ID NO: 1804375 - RNA, 17 nt, Human
ggacugugugcucagga

SEQ ID NO: 1804376 - RNA, 15 nt, Human
gcuuuguaugcacuu

SEQ ID NO: 1804377 - RNA, 18 nt, Human
gcuuugucuacuucaaaa

SEQ ID NO: 1804378 - RNA, 15 nt, Human
gcuuugugauuuuug

SEQ ID NO: 1804379 - RNA, 20 nt, Human
gcuugaggguugggcuggug

SEQ ID NO: 1804380 - RNA, 18 nt, Human
gcuugaggguugggcugg

SEQ ID NO: 1804381 - RNA, 22 nt, Human
gcuugaggguugggcugguguc

SEQ ID NO: 1804382 - RNA, 13 nt, Human
gcuuuucacugcu

SEQ ID NO: 1804383 - RNA, 14 nt, Human
gcuuuucacugcug

SEQ ID NO: 1804384 - RNA, 18 nt, Human
gcuuuucacugcuggcug

SEQ ID NO: 1804385 - RNA, 21 nt, Human
gcuuuguuuguugucagcuga

SEQ ID NO: 1804386 - RNA, 22 nt, Human
gcuuuucacugcuggcugccuu

SEQ ID NO: 1804387 - RNA, 23 nt, Human
gcuuuucacugcuggcugccuua

SEQ ID NO: 1804388 - RNA, 18 nt, Human
ggaaaacaugcuacacac

SEQ ID NO: 1804389 - RNA, 20 nt, Human
ggaaaagcugcugacagugu

SEQ ID NO: 1804390 - RNA, 18 nt, Human
ggaaaagcugcugacagu

SEQ ID NO: 1804391 - RNA, 14 nt, Human
ggaaaagcugcuga

SEQ ID NO: 1804392 - RNA, 21 nt, Human
ggaaaaccaagccguggcuuc

SEQ ID NO: 1804393 - RNA, 23 nt, Human
ggaaaaucagccugcuccagcug

SEQ ID NO: 1804394 - RNA, 19 nt, Human
ggaaaaucagccugcucca

SEQ ID NO: 1804395 - RNA, 12 nt, Human
ggaaaggcucca

SEQ ID NO: 1804396 - RNA, 13 nt, Human
ggaaaggcuccag

SEQ ID NO: 1804397 - RNA, 14 nt, Human
ggaaaggcuccagg

SEQ ID NO: 1804398 - RNA, 22 nt, Human
ggaaaggcuccaggagcagcca

SEQ ID NO: 1804399 - RNA, 17 nt, Human
ggaaaggcuccaggagc

SEQ ID NO: 1804400 - RNA, 19 nt, Human
ggaaaggcuccaggagcag

SEQ ID NO: 1804401 - RNA, 20 nt, Human
ggaaaggcuccaggagcagc

SEQ ID NO: 1804402 - RNA, 21 nt, Human
ggaaaggcuccaggagcagcc

SEQ ID NO: 1804403 - RNA, 21 nt, Human
ggaaaucaccgaaaacguggc

SEQ ID NO: 1804404 - RNA, 14 nt, Human
ggaaaucaccgaaa

SEQ ID NO: 1804405 - RNA, 16 nt, Human
ggaacaggaaacugau

SEQ ID NO: 1804406 - RNA, 20 nt, Human
gcugccaaugggagcucaug

SEQ ID NO: 1804407 - RNA, 15 nt, Human
gcugccaaugggagc

SEQ ID NO: 1804408 - RNA, 16 nt, Human
gcugccaaugggagcu

SEQ ID NO: 1804409 - RNA, 19 nt, Human
gcugccaaugggagcucau

SEQ ID NO: 1804410 - RNA, 21 nt, Human
gcugugggcgugagaccugcc

SEQ ID NO: 1804411 - RNA, 22 nt, Human
gcugugggcgugagaccugccc

SEQ ID NO: 1804412 - RNA, 20 nt, Human
gcugugggcgugagaccugc

SEQ ID NO: 1804413 - RNA, 14 nt, Human
gcuguucagcuggu

SEQ ID NO: 1804414 - RNA, 21 nt, Human
gcuuagucacugagacagccc

SEQ ID NO: 1804415 - RNA, 19 nt, Human
gcuuagucacugagacagc

SEQ ID NO: 1804416 - RNA, 20 nt, Human
gcuuagucacugagacagcc

SEQ ID NO: 1804417 - RNA, 15 nt, Human
gcuuagucacugaga

SEQ ID NO: 1804418 - RNA, 17 nt, Human
gcuuagucacugagaca

SEQ ID NO: 1804419 - RNA, 16 nt, Human
gcuugaggguugggcu

SEQ ID NO: 1804420 - RNA, 15 nt, Human
gcuuccagugaggcu

SEQ ID NO: 1804421 - RNA, 21 nt, Human
gcuucauccuccucagaucuu

SEQ ID NO: 1804422 - RNA, 17 nt, Human
gcuucauuuccuguguc

SEQ ID NO: 1804423 - RNA, 16 nt, Human
gcuuccagugaggcuc

SEQ ID NO: 1804424 - RNA, 18 nt, Human
gcuuccagugaggcucug

SEQ ID NO: 1804425 - RNA, 16 nt, Human
gcuucauuuccugugu

SEQ ID NO: 1804426 - RNA, 13 nt, Human
gcuucauuuccug

SEQ ID NO: 1804427 - RNA, 12 nt, Human
gcuucauccucc

SEQ ID NO: 1804428 - RNA, 15 nt, Human
gcuucauccuccuca

SEQ ID NO: 1804429 - RNA, 18 nt, Human
gcuucaguggcagcugcu

SEQ ID NO: 1804430 - RNA, 17 nt, Human
gcuucaguggcagcugc

SEQ ID NO: 1804431 - RNA, 16 nt, Human
gcuucaguggcagcug

SEQ ID NO: 1804432 - RNA, 23 nt, Human
gcuuaugauagcaaauggccuca

SEQ ID NO: 1804433 - RNA, 12 nt, Human
gcuuauacacuu

SEQ ID NO: 1804434 - RNA, 20 nt, Human
gcuuauacacuuacacuuua

SEQ ID NO: 1804435 - RNA, 19 nt, Human
gcuuaucucaggggugugc

SEQ ID NO: 1804436 - RNA, 23 nt, Human
ggauuacaagcgugagccacugc

SEQ ID NO: 1804437 - RNA, 19 nt, Human
ggauuacaggcuccugcca

SEQ ID NO: 1804438 - RNA, 16 nt, Human
ggauucuuauggacaa

SEQ ID NO: 1804439 - RNA, 16 nt, Human
ggauucuuccucccuc

SEQ ID NO: 1804440 - RNA, 17 nt, Human
ggcaacccccagccugc

SEQ ID NO: 1804441 - RNA, 16 nt, Human
ggcaacccccagccug

SEQ ID NO: 1804442 - RNA, 15 nt, Human
ggauuguaaaauggu

SEQ ID NO: 1804443 - RNA, 17 nt, Human
ggauugcuacuguccua

SEQ ID NO: 1804444 - RNA, 23 nt, Human
ggcacccaccaucaugucuggcu

SEQ ID NO: 1804445 - RNA, 22 nt, Human
ggcacccggccccugcugguuc

SEQ ID NO: 1804446 - RNA, 18 nt, Human
ggcaccggggccucggac

SEQ ID NO: 1804447 - RNA, 23 nt, Human
ggcaaugcuggcuguuggcuggg

SEQ ID NO: 1804448 - RNA, 15 nt, Human
ggcaaugcuggcugu

SEQ ID NO: 1804449 - RNA, 14 nt, Human
ggcaaugcuggcug

SEQ ID NO: 1804450 - RNA, 18 nt, Human
ggcaacccccagccugcu

SEQ ID NO: 1804451 - RNA, 19 nt, Human
ggcaaucauggugcucaga

SEQ ID NO: 1804452 - RNA, 19 nt, Human
ggauuacaagcgugagcca

SEQ ID NO: 1804453 - RNA, 15 nt, Human
ggaugcuuguacaua

SEQ ID NO: 1804454 - RNA, 19 nt, Human
ggaugcagccucacagucc

SEQ ID NO: 1804455 - RNA, 23 nt, Human
ggaugcacagaguuguuacauuu

SEQ ID NO: 1804456 - RNA, 21 nt, Human
ggaugauuggaggggggaggu

SEQ ID NO: 1804457 - RNA, 16 nt, Human
ggaugcagccucacag

SEQ ID NO: 1804458 - RNA, 17 nt, Human
ggaugcagccucacagu

SEQ ID NO: 1804459 - RNA, 12 nt, Human
ggauccuccagg

SEQ ID NO: 1804460 - RNA, 13 nt, Human
ggauccuccaggu

SEQ ID NO: 1804461 - RNA, 22 nt, Human
ggaucccucauccucauaccca

SEQ ID NO: 1804462 - RNA, 13 nt, Human
ggaucccucaucc

SEQ ID NO: 1804463 - RNA, 17 nt, Human
ggaucccucauccucau

SEQ ID NO: 1804464 - RNA, 22 nt, Human
ggaucaaaccccgaccaccugc

SEQ ID NO: 1804465 - RNA, 18 nt, Human
ggauacaaaagcauguga

SEQ ID NO: 1804466 - RNA, 14 nt, Human
ggagugcagugagc

SEQ ID NO: 1804467 - RNA, 20 nt, Human
ggagugcaaugacacagucu

SEQ ID NO: 1804468 - RNA, 12 nt, Human
ggagugcaguga

SEQ ID NO: 1804469 - RNA, 16 nt, Human
ggcauuccccaggagg

SEQ ID NO: 1804470 - RNA, 18 nt, Human
ggcauuccccaggaggcc

SEQ ID NO: 1804471 - RNA, 19 nt, Human
ggcauuccccaggaggcca

SEQ ID NO: 1804472 - RNA, 22 nt, Human
ggcaugggaaugaaugucagug

SEQ ID NO: 1804473 - RNA, 17 nt, Human
ggcauuccccaggaggc

SEQ ID NO: 1804474 - RNA, 18 nt, Human
ggcaugggaaugaauguc

SEQ ID NO: 1804475 - RNA, 17 nt, Human
ggccacuccagaccccu

SEQ ID NO: 1804476 - RNA, 16 nt, Human
ggccaugggccuccug

SEQ ID NO: 1804477 - RNA, 16 nt, Human
ggccaggcugcucuug

SEQ ID NO: 1804478 - RNA, 14 nt, Human
ggccaggcugcucu

SEQ ID NO: 1804479 - RNA, 15 nt, Human
ggccaggcugcucuu

SEQ ID NO: 1804480 - RNA, 11 nt, Human
ggccaggcugc

SEQ ID NO: 1804481 - RNA, 23 nt, Human
ggccagcugcuugggcuucaucc

SEQ ID NO: 1804482 - RNA, 18 nt, Human
ggccaggcccucugccca

SEQ ID NO: 1804483 - RNA, 20 nt, Human
ggccagccuugaccauucuc

SEQ ID NO: 1804484 - RNA, 22 nt, Human
ggccagccuugaccauucucca

SEQ ID NO: 1804485 - RNA, 17 nt, Human
ggccagcugcuugggcu

SEQ ID NO: 1804486 - RNA, 17 nt, Human
ggcagcuugaggguugg

SEQ ID NO: 1804487 - RNA, 22 nt, Human
ggcagcugcuuuugucuauggg

SEQ ID NO: 1804488 - RNA, 16 nt, Human
ggcagcucaccucucc

SEQ ID NO: 1804489 - RNA, 13 nt, Human
ggcagcucagaga

SEQ ID NO: 1804490 - RNA, 21 nt, Human
ggcagcucagagaggguggga

SEQ ID NO: 1804491 - RNA, 12 nt, Human
ggcagcucaccu

SEQ ID NO: 1804492 - RNA, 14 nt, Human
ggcagcucaccucu

SEQ ID NO: 1804493 - RNA, 16 nt, Human
ggcagugggagcugcc

SEQ ID NO: 1804494 - RNA, 21 nt, Human
ggcagugggacagggcauggc

SEQ ID NO: 1804495 - RNA, 14 nt, Human
ggcagugggagcug

SEQ ID NO: 1804496 - RNA, 13 nt, Human
ggcagugggagcu

SEQ ID NO: 1804497 - RNA, 20 nt, Human
ggcagggucucacucugucg

SEQ ID NO: 1804498 - RNA, 19 nt, Human
ggcagggucucacucuguc

SEQ ID NO: 1804499 - RNA, 17 nt, Human
ggcauggccagguggcc

SEQ ID NO: 1804500 - RNA, 18 nt, Human
ggcauggccagguggcca

SEQ ID NO: 1804501 - RNA, 15 nt, Human
ggcaugaagacagau

SEQ ID NO: 1804502 - RNA, 18 nt, Human
ggcaugacacgaauauug

SEQ ID NO: 1804503 - RNA, 21 nt, Human
ggcccucugcccacucccugc

SEQ ID NO: 1804504 - RNA, 19 nt, Human
ggcccucugcccacucccu

SEQ ID NO: 1804505 - RNA, 20 nt, Human
ggcccucugcccacucccug

SEQ ID NO: 1804506 - RNA, 13 nt, Human
ggcccucugccca

SEQ ID NO: 1804507 - RNA, 15 nt, Human
ggcccucugcccacu

SEQ ID NO: 1804508 - RNA, 16 nt, Human
ggcccucugcccacuc

SEQ ID NO: 1804509 - RNA, 17 nt, Human
ggcccucugcccacucc

SEQ ID NO: 1804510 - RNA, 12 nt, Human
ggcccagagagg

SEQ ID NO: 1804511 - RNA, 11 nt, Human
ggcccagagag

SEQ ID NO: 1804512 - RNA, 22 nt, Human
ggcccugcccugguuuccugcc

SEQ ID NO: 1804513 - RNA, 14 nt, Human
ggcccugccuccuu

SEQ ID NO: 1804514 - RNA, 15 nt, Human
ggcccugccuccuuu

SEQ ID NO: 1804515 - RNA, 13 nt, Human
ggcccuggcuccc

SEQ ID NO: 1804516 - RNA, 22 nt, Human
ggcccuggcucccacaggcccu

SEQ ID NO: 1804517 - RNA, 11 nt, Human
ggcccugcccu

SEQ ID NO: 1804518 - RNA, 12 nt, Human
ggcccugcccug

SEQ ID NO: 1804519 - RNA, 13 nt, Human
ggcccugcccugg

SEQ ID NO: 1804520 - RNA, 20 nt, Human
ggcccugcccugguuuccug

SEQ ID NO: 1804521 - RNA, 13 nt, Human
ggcccugccuccu

SEQ ID NO: 1804522 - RNA, 23 nt, Human
ggccuagcauacguacacauuuu

SEQ ID NO: 1804523 - RNA, 22 nt, Human
ggccucggacuuagcugggaga

SEQ ID NO: 1804524 - RNA, 20 nt, Human
ggccucggacuuagcuggga

SEQ ID NO: 1804525 - RNA, 17 nt, Human
ggccucggacuuagcug

SEQ ID NO: 1804526 - RNA, 18 nt, Human
ggccucuuaugggcuggg

SEQ ID NO: 1804527 - RNA, 20 nt, Human
ggccucgguguggagaagcg

SEQ ID NO: 1804528 - RNA, 17 nt, Human
ggccucuuaugggcugg

SEQ ID NO: 1804529 - RNA, 13 nt, Human
ggccucugcacuc

SEQ ID NO: 1804530 - RNA, 14 nt, Human
ggccucugcacucc

SEQ ID NO: 1804531 - RNA, 15 nt, Human
ggccucugcacuccc

SEQ ID NO: 1804532 - RNA, 16 nt, Human
ggccucugcacucccc

SEQ ID NO: 1804533 - RNA, 16 nt, Human
ggcuccaggcuccuuu

SEQ ID NO: 1804534 - RNA, 17 nt, Human
ggcucccacaggcccuu

SEQ ID NO: 1804535 - RNA, 18 nt, Human
ggcucccacaggcccuuc

SEQ ID NO: 1804536 - RNA, 19 nt, Human
ggcucccacaggcccuucc

SEQ ID NO: 1804537 - RNA, 11 nt, Human
ggcuccaggcu

SEQ ID NO: 1804538 - RNA, 21 nt, Human
ggcucaaguccucuuuucuga

SEQ ID NO: 1804539 - RNA, 15 nt, Human
ggcucaaguccucuu

SEQ ID NO: 1804540 - RNA, 12 nt, Human
ggcuccagcugg

SEQ ID NO: 1804541 - RNA, 12 nt, Human
ggcuccaggagc

SEQ ID NO: 1804542 - RNA, 13 nt, Human
ggcuccaggagca

SEQ ID NO: 1804543 - RNA, 19 nt, Human
ggcuccaggagcagccaca

SEQ ID NO: 1804544 - RNA, 15 nt, Human
ggcuaguugggcuuc

SEQ ID NO: 1804545 - RNA, 23 nt, Human
ggcuagugugguguuuccuggca

SEQ ID NO: 1804546 - RNA, 16 nt, Human
ggcuaguugggcuucc

SEQ ID NO: 1804547 - RNA, 19 nt, Human
ggcuaugggggcacugagg

SEQ ID NO: 1804548 - RNA, 15 nt, Human
ggcuaugcauuugaa

SEQ ID NO: 1804549 - RNA, 16 nt, Human
ggcuaggaccccucca

SEQ ID NO: 1804550 - RNA, 22 nt, Human
ggcuaggaccccuccauguggg

SEQ ID NO: 1804551 - RNA, 22 nt, Human
ggcuagagguucaaagauauuu

SEQ ID NO: 1804552 - RNA, 17 nt, Human
ggcuagagguucaaaga

SEQ ID NO: 1804553 - RNA, 19 nt, Human
ggccuggccugagcuggga

SEQ ID NO: 1804554 - RNA, 18 nt, Human
ggccuguccaacacaucu

SEQ ID NO: 1804555 - RNA, 11 nt, Human
ggccugugagc

SEQ ID NO: 1804556 - RNA, 14 nt, Human
ggccugggggcugg

SEQ ID NO: 1804557 - RNA, 20 nt, Human
ggccugggggcugggcagag

SEQ ID NO: 1804558 - RNA, 22 nt, Human
ggccugggggcugggcagagga

SEQ ID NO: 1804559 - RNA, 18 nt, Human
ggcgcugccccuggcagc

SEQ ID NO: 1804560 - RNA, 19 nt, Human
ggcgcugccccuggcagcc

SEQ ID NO: 1804561 - RNA, 21 nt, Human
ggcgcugccccuggcagcccc

SEQ ID NO: 1804562 - RNA, 23 nt, Human
ggcgcugccccuggcagccccug

SEQ ID NO: 1804563 - RNA, 15 nt, Human
gaguugaagacagag

SEQ ID NO: 1804564 - RNA, 17 nt, Human
gaguugaagacagagcu

SEQ ID NO: 1804565 - RNA, 21 nt, Human
gaguugaagacagagcuacac

SEQ ID NO: 1804566 - RNA, 20 nt, Human
gaguucauacccuguuacca

SEQ ID NO: 1804567 - RNA, 14 nt, Human
gaguucaucuugaa

SEQ ID NO: 1804568 - RNA, 19 nt, Human
gaguucaucuugaauugua

SEQ ID NO: 1804569 - RNA, 20 nt, Human
gaguucaucuugaauuguaa

SEQ ID NO: 1804570 - RNA, 13 nt, Human
gaguuacagacaa

SEQ ID NO: 1804571 - RNA, 15 nt, Human
gaguuacagacaaag

SEQ ID NO: 1804572 - RNA, 12 nt, Human
gaguuacagaca

SEQ ID NO: 1804573 - RNA, 20 nt, Human
gagugugccugaagucccag

SEQ ID NO: 1804574 - RNA, 17 nt, Human
gagugacagaggcagcc

SEQ ID NO: 1804575 - RNA, 15 nt, Human
gaguggguugauuuc

SEQ ID NO: 1804576 - RNA, 13 nt, Human
gagugggugaaua

SEQ ID NO: 1804577 - RNA, 20 nt, Human
gauacaggaaaagcugcuga

SEQ ID NO: 1804578 - RNA, 22 nt, Human
gauaagaaccuuuugagugccu

SEQ ID NO: 1804579 - RNA, 23 nt, Human
gauacaggaaaagcugcugacag

SEQ ID NO: 1804580 - RNA, 21 nt, Human
gauacaggaaaagcugcugac

SEQ ID NO: 1804581 - RNA, 16 nt, Human
gauagcacagacccug

SEQ ID NO: 1804582 - RNA, 15 nt, Human
gauagcacagacccu

SEQ ID NO: 1804583 - RNA, 22 nt, Human
gauagccaaggccaaaggaagc

SEQ ID NO: 1804584 - RNA, 16 nt, Human
gaucacggcucacugc

SEQ ID NO: 1804585 - RNA, 15 nt, Human
gaucacggcucacug

SEQ ID NO: 1804586 - RNA, 18 nt, Human
gaucacggcucacugcag

SEQ ID NO: 1804587 - RNA, 14 nt, Human
gaucacagccucug

SEQ ID NO: 1804588 - RNA, 15 nt, Human
gauauaagugugugu

SEQ ID NO: 1804589 - RNA, 20 nt, Human
gaggucagagccugcaguua

SEQ ID NO: 1804590 - RNA, 17 nt, Human
gaggucagagccugcag

SEQ ID NO: 1804591 - RNA, 15 nt, Human
gagguugggaggcca

SEQ ID NO: 1804592 - RNA, 17 nt, Human
gagguugggaggccauu

SEQ ID NO: 1804593 - RNA, 20 nt, Human
gagguuucucaaagaaauuu

SEQ ID NO: 1804594 - RNA, 16 nt, Human
gagguuucaaaccucc

SEQ ID NO: 1804595 - RNA, 22 nt, Human
gaguagcugggacuacaggcac

SEQ ID NO: 1804596 - RNA, 12 nt, Human
gaguaggaagac

SEQ ID NO: 1804597 - RNA, 13 nt, Human
gaguaggaagacu

SEQ ID NO: 1804598 - RNA, 17 nt, Human
gaguaggaagacuuugg

SEQ ID NO: 1804599 - RNA, 19 nt, Human
gaguagcugggacuacagg

SEQ ID NO: 1804600 - RNA, 21 nt, Human
gaguacuacaguccucccauc

SEQ ID NO: 1804601 - RNA, 23 nt, Human
gaguacuacaguccucccaucuc

SEQ ID NO: 1804602 - RNA, 22 nt, Human
gaguaauccaagcaaaugugaa

SEQ ID NO: 1804603 - RNA, 20 nt, Human
gaguacuacaguccucccau

SEQ ID NO: 1804604 - RNA, 14 nt, Human
gagucgaggacagg

SEQ ID NO: 1804605 - RNA, 19 nt, Human
gaguccgaaagggacuugg

SEQ ID NO: 1804606 - RNA, 16 nt, Human
gagucgaggacaggga

SEQ ID NO: 1804607 - RNA, 15 nt, Human
gagucgaggacaggg

SEQ ID NO: 1804608 - RNA, 18 nt, Human
gaguaggaagacuuugga

SEQ ID NO: 1804609 - RNA, 19 nt, Human
gaguaggaagacuuuggaa

SEQ ID NO: 1804610 - RNA, 11 nt, Human
gaguauauguc

SEQ ID NO: 1804611 - RNA, 16 nt, Human
gagugacagaggcagc

SEQ ID NO: 1804612 - RNA, 15 nt, Human
gagugacagaggcag

SEQ ID NO: 1804613 - RNA, 14 nt, Human
gagugacagaggca

SEQ ID NO: 1804614 - RNA, 17 nt, Human
gagugaagcugggagaa

SEQ ID NO: 1804615 - RNA, 15 nt, Human
gagucugaaggcugg

SEQ ID NO: 1804616 - RNA, 14 nt, Human
gagucugaaggcug

SEQ ID NO: 1804617 - RNA, 12 nt, Human
gagucugaaggc

SEQ ID NO: 1804618 - RNA, 13 nt, Human
gagucugaaggcu

SEQ ID NO: 1804619 - RNA, 19 nt, Human
gaggcagccccauucugcc

SEQ ID NO: 1804620 - RNA, 19 nt, Human
gaggcagagguugcaguga

SEQ ID NO: 1804621 - RNA, 9 nt, Human
gaggcaggg

SEQ ID NO: 1804622 - RNA, 20 nt, Human
gaggcagccccauucugccu

SEQ ID NO: 1804623 - RNA, 21 nt, Human
gaggcagccccauucugccug

SEQ ID NO: 1804624 - RNA, 23 nt, Human
gaggccaugggccuccugugugu

SEQ ID NO: 1804625 - RNA, 21 nt, Human
gaggccaugggccuccugugu

SEQ ID NO: 1804626 - RNA, 20 nt, Human
gaggccaugggccuccugug

SEQ ID NO: 1804627 - RNA, 18 nt, Human
gaggccaugggccuccug

SEQ ID NO: 1804628 - RNA, 17 nt, Human
gaggccaugggccuccu

SEQ ID NO: 1804629 - RNA, 14 nt, Human
gaggccaugggccu

SEQ ID NO: 1804630 - RNA, 13 nt, Human
gaggaucucuuga

SEQ ID NO: 1804631 - RNA, 22 nt, Human
gagcccuguccugccuaaggcu

SEQ ID NO: 1804632 - RNA, 22 nt, Human
gaggaucucuugagccugggag

SEQ ID NO: 1804633 - RNA, 16 nt, Human
gaggaucucuugagcc

SEQ ID NO: 1804634 - RNA, 19 nt, Human
gaggaucucuugagccugg

SEQ ID NO: 1804635 - RNA, 20 nt, Human
gaggauugcuugagcucagg

SEQ ID NO: 1804636 - RNA, 19 nt, Human
gaggccuucucugaaggac

SEQ ID NO: 1804637 - RNA, 18 nt, Human
gaggccuucucugaagga

SEQ ID NO: 1804638 - RNA, 16 nt, Human
gaggccuucucugaag

SEQ ID NO: 1804639 - RNA, 16 nt, Human
gaggcugggcucccuu

SEQ ID NO: 1804640 - RNA, 21 nt, Human
gaggcgcaugaauuugugaag

SEQ ID NO: 1804641 - RNA, 11 nt, Human
gaggcccagag

SEQ ID NO: 1804642 - RNA, 13 nt, Human
gaggcccagaggg

SEQ ID NO: 1804643 - RNA, 14 nt, Human
gaggcccagagggc

SEQ ID NO: 1804644 - RNA, 19 nt, Human
gaggcccagagggccugca

SEQ ID NO: 1804645 - RNA, 15 nt, Human
gaggcccagagggcc

SEQ ID NO: 1804646 - RNA, 16 nt, Human
gaggcccagagggccu

SEQ ID NO: 1804647 - RNA, 22 nt, Human
gaggcccuucucuccagccccu

SEQ ID NO: 1804648 - RNA, 21 nt, Human
gaggcccuucucuccagcccc

SEQ ID NO: 1804649 - RNA, 15 nt, Human
gaggcccuucucucc

SEQ ID NO: 1804650 - RNA, 20 nt, Human
gaggcccuucucuccagccc

SEQ ID NO: 1804651 - RNA, 14 nt, Human
gagggucugaggaa

SEQ ID NO: 1804652 - RNA, 13 nt, Human
gagggucugagga

SEQ ID NO: 1804653 - RNA, 22 nt, Human
gagggugucccaaaaagaaagg

SEQ ID NO: 1804654 - RNA, 21 nt, Human
gaggguggugaccucugccug

SEQ ID NO: 1804655 - RNA, 14 nt, Human
gaggguggugaccu

SEQ ID NO: 1804656 - RNA, 15 nt, Human
gagggugggaguggg

SEQ ID NO: 1804657 - RNA, 12 nt, Human
gaggguggaaua

SEQ ID NO: 1804658 - RNA, 21 nt, Human
gagggugaagugaagacaaug

SEQ ID NO: 1804659 - RNA, 13 nt, Human
gaggucagagccu

SEQ ID NO: 1804660 - RNA, 12 nt, Human
gaggucagagcc

SEQ ID NO: 1804661 - RNA, 17 nt, Human
gaggucaaggcugcagu

SEQ ID NO: 1804662 - RNA, 15 nt, Human
gaggguugggcuggu

SEQ ID NO: 1804663 - RNA, 14 nt, Human
gaggguugggcugg

SEQ ID NO: 1804664 - RNA, 24 nt, Human
gagguaaggaauaccugucccccu

SEQ ID NO: 1804665 - RNA, 21 nt, Human
gagguaaggaauaccuguccc

SEQ ID NO: 1804666 - RNA, 13 nt, Human
gaggguaaggcug

SEQ ID NO: 1804667 - RNA, 17 nt, Human
gaggggguggccuccca

SEQ ID NO: 1804668 - RNA, 17 nt, Human
gaggggcugugggcgug

SEQ ID NO: 1804669 - RNA, 18 nt, Human
gagggagugacagaggca

SEQ ID NO: 1804670 - RNA, 20 nt, Human
gagggagggggaaggcaggg

SEQ ID NO: 1804671 - RNA, 20 nt, Human
gagggagggcuccagacaca

SEQ ID NO: 1804672 - RNA, 22 nt, Human
gagggagugacagaggcagccc

SEQ ID NO: 1804673 - RNA, 21 nt, Human
gagggagugacagaggcagcc

SEQ ID NO: 1804674 - RNA, 19 nt, Human
gagggagggcuccagacac

SEQ ID NO: 1804675 - RNA, 20 nt, Human
gaggcugggcucccuuccca

SEQ ID NO: 1804676 - RNA, 15 nt, Human
gcacagugcaucuca

SEQ ID NO: 1804677 - RNA, 18 nt, Human
gcacagugcaucucagcc

SEQ ID NO: 1804678 - RNA, 13 nt, Human
gcacagugcaucu

SEQ ID NO: 1804679 - RNA, 22 nt, Human
gcacagaguuguuacauuuuua

SEQ ID NO: 1804680 - RNA, 21 nt, Human
gcacagaguuguuacauuuuu

SEQ ID NO: 1804681 - RNA, 19 nt, Human
gcacagaguuguuacauuu

SEQ ID NO: 1804682 - RNA, 18 nt, Human
gcacagaguuguuacauu

SEQ ID NO: 1804683 - RNA, 16 nt, Human
gcacagaguuguuaca

SEQ ID NO: 1804684 - RNA, 22 nt, Human
gcaccccagcuggggccaggcu

SEQ ID NO: 1804685 - RNA, 12 nt, Human
gcaccauaacuu

SEQ ID NO: 1804686 - RNA, 20 nt, Human
gcaccuuagacagucccugc

SEQ ID NO: 1804687 - RNA, 21 nt, Human
gcaccuuagacagucccugcc

SEQ ID NO: 1804688 - RNA, 15 nt, Human
gcacgauuucuguuu

SEQ ID NO: 1804689 - RNA, 13 nt, Human
gcacgauuucugu

SEQ ID NO: 1804690 - RNA, 14 nt, Human
gcagacaggcaagc

SEQ ID NO: 1804691 - RNA, 13 nt, Human
gcagacaggcaag

SEQ ID NO: 1804692 - RNA, 12 nt, Human
gcagacaggcaa

SEQ ID NO: 1804693 - RNA, 14 nt, Human
gcacugcugcccag

SEQ ID NO: 1804694 - RNA, 15 nt, Human
gcacugcugcccagc

SEQ ID NO: 1804695 - RNA, 18 nt, Human
gcacugcugcccagccuc

SEQ ID NO: 1804696 - RNA, 20 nt, Human
gcacugcugcccagccucca

SEQ ID NO: 1804697 - RNA, 16 nt, Human
gcacgauuucuguuua

SEQ ID NO: 1804698 - RNA, 23 nt, Human
gcacugcuuccagugaggcucug

SEQ ID NO: 1804699 - RNA, 14 nt, Human
gcacugguggcccg

SEQ ID NO: 1804700 - RNA, 19 nt, Human
gcacugguggcccgacagc

SEQ ID NO: 1804701 - RNA, 20 nt, Human
gcaauucuccugccucagcc

SEQ ID NO: 1804702 - RNA, 18 nt, Human
gcaauucuccugccucag

SEQ ID NO: 1804703 - RNA, 19 nt, Human
gcaauucuccugccucagc

SEQ ID NO: 1804704 - RNA, 14 nt, Human
gcaauucuccugcc

SEQ ID NO: 1804705 - RNA, 15 nt, Human
gcaauucuccugccu

SEQ ID NO: 1804706 - RNA, 16 nt, Human
gcaauucuccugccuc

SEQ ID NO: 1804707 - RNA, 17 nt, Human
gcaauucuccugccuca

SEQ ID NO: 1804708 - RNA, 15 nt, Human
gcacaaacagaggcc

SEQ ID NO: 1804709 - RNA, 16 nt, Human
gcacaaacagaggccg

SEQ ID NO: 1804710 - RNA, 14 nt, Human
gcacaaacagaggc

SEQ ID NO: 1804711 - RNA, 14 nt, Human
gcaaugugauaaaa

SEQ ID NO: 1804712 - RNA, 15 nt, Human
gcaauggcagccuug

SEQ ID NO: 1804713 - RNA, 14 nt, Human
gcaacucaucuuag

SEQ ID NO: 1804714 - RNA, 23 nt, Human
gcacagaaaauggaagacagcuc

SEQ ID NO: 1804715 - RNA, 21 nt, Human
gcacagaaaauggaagacagc

SEQ ID NO: 1804716 - RNA, 22 nt, Human
gcacagaaaauggaagacagcu

SEQ ID NO: 1804717 - RNA, 14 nt, Human
gcacagacccugcc

SEQ ID NO: 1804718 - RNA, 15 nt, Human
gcacagacccugccc

SEQ ID NO: 1804719 - RNA, 16 nt, Human
gcacagacccugcccu

SEQ ID NO: 1804720 - RNA, 17 nt, Human
gcacagacccugcccug

SEQ ID NO: 1804721 - RNA, 15 nt, Human
gcacagaguuguuac

SEQ ID NO: 1804722 - RNA, 22 nt, Human
gcacagacccugcccugugggc

SEQ ID NO: 1804723 - RNA, 18 nt, Human
gcacagacccugcccugu

SEQ ID NO: 1804724 - RNA, 19 nt, Human
gcacagacccugcccugug

SEQ ID NO: 1804725 - RNA, 20 nt, Human
gcacagacccugcccugugg

SEQ ID NO: 1804726 - RNA, 21 nt, Human
gcacagacccugcccuguggg

SEQ ID NO: 1804727 - RNA, 20 nt, Human
gcacagaaaauggaagacag

SEQ ID NO: 1804728 - RNA, 23 nt, Human
gcacaaauucugucucuggauua

SEQ ID NO: 1804729 - RNA, 21 nt, Human
gcacaagcuccaagcucccag

SEQ ID NO: 1804730 - RNA, 18 nt, Human
gcacaagcuccaagcucc

SEQ ID NO: 1804731 - RNA, 15 nt, Human
gcacaagcuccaagc

SEQ ID NO: 1804732 - RNA, 17 nt, Human
gcacaagcuccaagcuc

SEQ ID NO: 1804733 - RNA, 13 nt, Human
gaugguuccccug

SEQ ID NO: 1804734 - RNA, 18 nt, Human
gaugguuccccuguucac

SEQ ID NO: 1804735 - RNA, 21 nt, Human
gaugguuccccuguucacucu

SEQ ID NO: 1804736 - RNA, 12 nt, Human
gauggugcaaug

SEQ ID NO: 1804737 - RNA, 14 nt, Human
gauggugcaaugac

SEQ ID NO: 1804738 - RNA, 17 nt, Human
gauggugcaaugaccuu

SEQ ID NO: 1804739 - RNA, 15 nt, Human
gauggugcaaugacc

SEQ ID NO: 1804740 - RNA, 16 nt, Human
gauggugcaaugaccu

SEQ ID NO: 1804741 - RNA, 22 nt, Human
gauuacaagcgugagccacugc

SEQ ID NO: 1804742 - RNA, 20 nt, Human
gauuaaagaugagcuuuguc

SEQ ID NO: 1804743 - RNA, 15 nt, Human
gauuaaacuuaaucu

SEQ ID NO: 1804744 - RNA, 23 nt, Human
gauuacaagcgugagccacugca

SEQ ID NO: 1804745 - RNA, 18 nt, Human
gauuacaggcaugugcca

SEQ ID NO: 1804746 - RNA, 20 nt, Human
gauuacaggcgugagccacc

SEQ ID NO: 1804747 - RNA, 17 nt, Human
gauuacaggcuccugcc

SEQ ID NO: 1804748 - RNA, 16 nt, Human
gauguuuaguaaucau

SEQ ID NO: 1804749 - RNA, 21 nt, Human
gaugccccgucccccucuggc

SEQ ID NO: 1804750 - RNA, 17 nt, Human
gaugcugacuguacucc

SEQ ID NO: 1804751 - RNA, 20 nt, Human
gaugcugacuguacuccucc

SEQ ID NO: 1804752 - RNA, 22 nt, Human
gaugcuagaacucccuuucaac

SEQ ID NO: 1804753 - RNA, 20 nt, Human
gaugcuagaacucccuuuca

SEQ ID NO: 1804754 - RNA, 16 nt, Human
gaugccccgucccccu

SEQ ID NO: 1804755 - RNA, 18 nt, Human
gaugcuagaacucccuuu

SEQ ID NO: 1804756 - RNA, 19 nt, Human
gaugcccaaagaugcagcc

SEQ ID NO: 1804757 - RNA, 20 nt, Human
gaugcccaaagaugcagccg

SEQ ID NO: 1804758 - RNA, 21 nt, Human
gaugggcaacccccagccugc

SEQ ID NO: 1804759 - RNA, 24 nt, Human
gauggggcccugccuccuuuguga

SEQ ID NO: 1804760 - RNA, 20 nt, Human
gaugggcaacccccagccug

SEQ ID NO: 1804761 - RNA, 22 nt, Human
gauggccgggcgcgguggcuca

SEQ ID NO: 1804762 - RNA, 13 nt, Human
gauggggcugcac

SEQ ID NO: 1804763 - RNA, 19 nt, Human
gauggggcugcaccggcug

SEQ ID NO: 1804764 - RNA, 15 nt, Human
gauggggcugcaccg

SEQ ID NO: 1804765 - RNA, 19 nt, Human
gaugggugcuuggaggaag

SEQ ID NO: 1804766 - RNA, 15 nt, Human
gauugcaacaggcug

SEQ ID NO: 1804767 - RNA, 14 nt, Human
gauucuccugccuc

SEQ ID NO: 1804768 - RNA, 16 nt, Human
gauucucaugccucag

SEQ ID NO: 1804769 - RNA, 20 nt, Human
gauuacagggaugagccacc

SEQ ID NO: 1804770 - RNA, 18 nt, Human
gauuacagggaugagcca

SEQ ID NO: 1804771 - RNA, 18 nt, Human
gauuacaggcuccugcca

SEQ ID NO: 1804772 - RNA, 21 nt, Human
gauuacaggcuccugccacca

SEQ ID NO: 1804773 - RNA, 12 nt, Human
gauuuaaaucag

SEQ ID NO: 1804774 - RNA, 14 nt, Human
gauuuaacagaaau

SEQ ID NO: 1804775 - RNA, 13 nt, Human
gauuuaacagaaa

SEQ ID NO: 1804776 - RNA, 16 nt, Human
gauuugagcucagccc

SEQ ID NO: 1804777 - RNA, 22 nt, Human
gauuuccguuaaaauaccagcc

SEQ ID NO: 1804778 - RNA, 15 nt, Human
gauuuaacagaaaug

SEQ ID NO: 1804779 - RNA, 15 nt, Human
gcaaaccaucauuga

SEQ ID NO: 1804780 - RNA, 23 nt, Human
gcaaaugugaaucauuuuaccuu

SEQ ID NO: 1804781 - RNA, 15 nt, Human
gcaaauguggcuccu

SEQ ID NO: 1804782 - RNA, 19 nt, Human
gauuuugauccaagcuggu

SEQ ID NO: 1804783 - RNA, 21 nt, Human
gauuuugaaauuuuuauuaaa

SEQ ID NO: 1804784 - RNA, 16 nt, Human
gauuuugcuguagaag

SEQ ID NO: 1804785 - RNA, 12 nt, Human
gcaaaccaucau

SEQ ID NO: 1804786 - RNA, 16 nt, Human
gacaaggaaaaaauaa

SEQ ID NO: 1804787 - RNA, 21 nt, Human
gacaaggauugcuacuguccu

SEQ ID NO: 1804788 - RNA, 19 nt, Human
gacaaggauugcuacuguc

SEQ ID NO: 1804789 - RNA, 18 nt, Human
gacaaggauugcuacugu

SEQ ID NO: 1804790 - RNA, 21 nt, Human
gacaaggaugaucuaggaaga

SEQ ID NO: 1804791 - RNA, 22 nt, Human
gacaaugcaaaccaucauugaa

SEQ ID NO: 1804792 - RNA, 12 nt, Human
gacaaugugaaa

SEQ ID NO: 1804793 - RNA, 18 nt, Human
gacaaugugaaaagaaaa

SEQ ID NO: 1804794 - RNA, 19 nt, Human
gacaaugugaaaagaaaaa

SEQ ID NO: 1804795 - RNA, 20 nt, Human
gacaaugugaaaagaaaaau

SEQ ID NO: 1804796 - RNA, 19 nt, Human
gacacaggcccggcuccag

SEQ ID NO: 1804797 - RNA, 22 nt, Human
gacacaagccuucggcgccuua

SEQ ID NO: 1804798 - RNA, 16 nt, Human
gacacaagccuucggc

SEQ ID NO: 1804799 - RNA, 21 nt, Human
gacacaggcccggcuccaggc

SEQ ID NO: 1804800 - RNA, 20 nt, Human
gacacaggcccggcuccagg

SEQ ID NO: 1804801 - RNA, 14 nt, Human
gacacaugcaaggu

SEQ ID NO: 1804802 - RNA, 19 nt, Human
gacacaugcaaggucauuu

SEQ ID NO: 1804803 - RNA, 15 nt, Human
gacacauguccaaga

SEQ ID NO: 1804804 - RNA, 20 nt, Human
gacacauguccaagaagccc

SEQ ID NO: 1804805 - RNA, 23 nt, Human
gacacauguccaagaagcccagg

SEQ ID NO: 1804806 - RNA, 16 nt, Human
gacaacagacuucuga

SEQ ID NO: 1804807 - RNA, 22 nt, Human
gacaacacucauugaccugagg

SEQ ID NO: 1804808 - RNA, 23 nt, Human
gacaacacucauugaccugaggc

SEQ ID NO: 1804809 - RNA, 15 nt, Human
gaauuguaaggaaug

SEQ ID NO: 1804810 - RNA, 21 nt, Human
gaauuucuucaacucccugcc

SEQ ID NO: 1804811 - RNA, 22 nt, Human
gaauuucuuuugccguuauuaa

SEQ ID NO: 1804812 - RNA, 20 nt, Human
gaauuugugaagguggaaau

SEQ ID NO: 1804813 - RNA, 15 nt, Human
gaaugcuguauaugu

SEQ ID NO: 1804814 - RNA, 21 nt, Human
gaaugcacaaacagaggccgc

SEQ ID NO: 1804815 - RNA, 21 nt, Human
gaaugaaagggcccagagagg

SEQ ID NO: 1804816 - RNA, 20 nt, Human
gaaugcacaaacagaggccg

SEQ ID NO: 1804817 - RNA, 20 nt, Human
gaauccagacccggcugcgu

SEQ ID NO: 1804818 - RNA, 18 nt, Human
gaauccagacccggcugc

SEQ ID NO: 1804819 - RNA, 12 nt, Human
gaaaggcuccag

SEQ ID NO: 1804820 - RNA, 15 nt, Human
gaauguuugccucug

SEQ ID NO: 1804821 - RNA, 21 nt, Human
gaauugacccacaagaaauga

SEQ ID NO: 1804822 - RNA, 16 nt, Human
gaauugacccacaaga

SEQ ID NO: 1804823 - RNA, 13 nt, Human
gaaugucagugug

SEQ ID NO: 1804824 - RNA, 21 nt, Human
gaccagacaccuugacagggc

SEQ ID NO: 1804825 - RNA, 11 nt, Human
gaccagagcug

SEQ ID NO: 1804826 - RNA, 14 nt, Human
gaccacguuucuaa

SEQ ID NO: 1804827 - RNA, 16 nt, Human
gaccacguuucuaaag

SEQ ID NO: 1804828 - RNA, 21 nt, Human
gaccacugcagaagacaguau

SEQ ID NO: 1804829 - RNA, 13 nt, Human
gaccaccugccca

SEQ ID NO: 1804830 - RNA, 14 nt, Human
gaccaccugcccaa

SEQ ID NO: 1804831 - RNA, 18 nt, Human
gacaugggaaaggggaag

SEQ ID NO: 1804832 - RNA, 19 nt, Human
gaccauucuccaccugcca

SEQ ID NO: 1804833 - RNA, 20 nt, Human
gaccauucuccaccugccag

SEQ ID NO: 1804834 - RNA, 21 nt, Human
gaccauucuccaccugccagg

SEQ ID NO: 1804835 - RNA, 22 nt, Human
gaccauucuccaccugccaggg

SEQ ID NO: 1804836 - RNA, 21 nt, Human
gaccagccuccaugcugccuc

SEQ ID NO: 1804837 - RNA, 22 nt, Human
gaccagccuccaugcugccucc

SEQ ID NO: 1804838 - RNA, 20 nt, Human
gaccagccuccaugcugccu

SEQ ID NO: 1804839 - RNA, 18 nt, Human
gaccagagcugccaccug

SEQ ID NO: 1804840 - RNA, 19 nt, Human
gaccagagcugccaccugc

SEQ ID NO: 1804841 - RNA, 13 nt, Human
gaccagagcugcc

SEQ ID NO: 1804842 - RNA, 14 nt, Human
gaccagagcugcca

SEQ ID NO: 1804843 - RNA, 15 nt, Human
gaccagagcugccac

SEQ ID NO: 1804844 - RNA, 17 nt, Human
gaccagagcugccaccu

SEQ ID NO: 1804845 - RNA, 21 nt, Human
gaccccuccaugugggcuagu

SEQ ID NO: 1804846 - RNA, 22 nt, Human
gacccugaggcccagagggccu

SEQ ID NO: 1804847 - RNA, 18 nt, Human
gaccccuccaugugggcu

SEQ ID NO: 1804848 - RNA, 14 nt, Human
gaccccuccaugug

SEQ ID NO: 1804849 - RNA, 23 nt, Human
gacccugaggcccagagggccug

SEQ ID NO: 1804850 - RNA, 12 nt, Human
gacccugcccug

SEQ ID NO: 1804851 - RNA, 12 nt, Human
gacccccaacca

SEQ ID NO: 1804852 - RNA, 21 nt, Human
gacccccaaccaaguggcucc

SEQ ID NO: 1804853 - RNA, 22 nt, Human
gacccacaagaaaugaaagcag

SEQ ID NO: 1804854 - RNA, 15 nt, Human
gacccacaagaaaug

SEQ ID NO: 1804855 - RNA, 16 nt, Human
gacccaaaaggcagaa

SEQ ID NO: 1804856 - RNA, 12 nt, Human
gacccugucuca

SEQ ID NO: 1804857 - RNA, 19 nt, Human
gacccuuguggucccaccc

SEQ ID NO: 1804858 - RNA, 20 nt, Human
gacccuuguggucccacccc

SEQ ID NO: 1804859 - RNA, 21 nt, Human
gacccuuguggucccacccca

SEQ ID NO: 1804860 - RNA, 19 nt, Human
gaccgugaggccagagaca

SEQ ID NO: 1804861 - RNA, 18 nt, Human
gaccgugaggccagagac

SEQ ID NO: 1804862 - RNA, 16 nt, Human
gaccgugaggccagag

SEQ ID NO: 1804863 - RNA, 17 nt, Human
gaccgugaggccagaga

SEQ ID NO: 1804864 - RNA, 16 nt, Human
gacagggaggugaccc

SEQ ID NO: 1804865 - RNA, 18 nt, Human
gacagggaggacgcucuc

SEQ ID NO: 1804866 - RNA, 23 nt, Human
gacagggcacaccgggcacucag

SEQ ID NO: 1804867 - RNA, 24 nt, Human
gacagggcacaccgggcacucaga

SEQ ID NO: 1804868 - RNA, 14 nt, Human
gacaguuaagagaa

SEQ ID NO: 1804869 - RNA, 14 nt, Human
gacaggaccaggga

SEQ ID NO: 1804870 - RNA, 15 nt, Human
gacaggaccagggau

SEQ ID NO: 1804871 - RNA, 23 nt, Human
gacaggaccagggauuuccauga

SEQ ID NO: 1804872 - RNA, 17 nt, Human
gacagggaggacgcucu

SEQ ID NO: 1804873 - RNA, 14 nt, Human
gacaugaucuucuu

SEQ ID NO: 1804874 - RNA, 14 nt, Human
gacaugggaaaggg

SEQ ID NO: 1804875 - RNA, 22 nt, Human
gacaguuaagagaaaugagcuu

SEQ ID NO: 1804876 - RNA, 20 nt, Human
gacauagaauuaacacauga

SEQ ID NO: 1804877 - RNA, 14 nt, Human
gacagagucucacu

SEQ ID NO: 1804878 - RNA, 23 nt, Human
gacagaggggguggccucccaac

SEQ ID NO: 1804879 - RNA, 21 nt, Human
gacagaggggguggccuccca

SEQ ID NO: 1804880 - RNA, 22 nt, Human
gacagaggggguggccucccaa

SEQ ID NO: 1804881 - RNA, 17 nt, Human
gacagaggcagccccau

SEQ ID NO: 1804882 - RNA, 15 nt, Human
gacagaggggguggc

SEQ ID NO: 1804883 - RNA, 18 nt, Human
gacagaggggguggccuc

SEQ ID NO: 1804884 - RNA, 19 nt, Human
gacagaggggguggccucc

SEQ ID NO: 1804885 - RNA, 16 nt, Human
gacagaggcagcccca

SEQ ID NO: 1804886 - RNA, 14 nt, Human
gacagaggcagccc

SEQ ID NO: 1804887 - RNA, 21 nt, Human
gacagagcaagugagacccug

SEQ ID NO: 1804888 - RNA, 19 nt, Human
gacagccacggccaggcca

SEQ ID NO: 1804889 - RNA, 18 nt, Human
gacagccacggccaggcc

SEQ ID NO: 1804890 - RNA, 17 nt, Human
gacagccacggccaggc

SEQ ID NO: 1804891 - RNA, 14 nt, Human
gacagccacggcca

SEQ ID NO: 1804892 - RNA, 22 nt, Human
gacagagugagacucugucuca

SEQ ID NO: 1804893 - RNA, 20 nt, Human
gacagagugagacucugucu

SEQ ID NO: 1804894 - RNA, 21 nt, Human
gacagccacggccaggccaga

SEQ ID NO: 1804895 - RNA, 20 nt, Human
gacagccacggccaggccag

SEQ ID NO: 1804896 - RNA, 16 nt, Human
gacagcugccugggau

SEQ ID NO: 1804897 - RNA, 17 nt, Human
gacagcugccugggauc

SEQ ID NO: 1804898 - RNA, 18 nt, Human
gacagcugccugggaucc

SEQ ID NO: 1804899 - RNA, 21 nt, Human
gacagcugccugggaucccuc

SEQ ID NO: 1804900 - RNA, 13 nt, Human
gacuuggaagcuc

SEQ ID NO: 1804901 - RNA, 19 nt, Human
gacuuaaaauauuccugca

SEQ ID NO: 1804902 - RNA, 19 nt, Human
gacuuaagcacacuugaca

SEQ ID NO: 1804903 - RNA, 16 nt, Human
gagaaagguugaagca

SEQ ID NO: 1804904 - RNA, 22 nt, Human
gagaaaguacuucuccacccug

SEQ ID NO: 1804905 - RNA, 21 nt, Human
gagaaaugaaaaaauauauau

SEQ ID NO: 1804906 - RNA, 14 nt, Human
gagaaaugagcuug

SEQ ID NO: 1804907 - RNA, 14 nt, Human
gagaagagaaugca

SEQ ID NO: 1804908 - RNA, 16 nt, Human
gagaagagaaugcaca

SEQ ID NO: 1804909 - RNA, 16 nt, Human
gagaagcagaggaagg

SEQ ID NO: 1804910 - RNA, 22 nt, Human
gacugaguacguugugcauuug

SEQ ID NO: 1804911 - RNA, 21 nt, Human
gacugaguacguugugcauuu

SEQ ID NO: 1804912 - RNA, 17 nt, Human
gacucgcgacaaugcaa

SEQ ID NO: 1804913 - RNA, 15 nt, Human
gacugcccggcaggg

SEQ ID NO: 1804914 - RNA, 13 nt, Human
gacugcccggcag

SEQ ID NO: 1804915 - RNA, 23 nt, Human
gacugaguacguugugcauuugg

SEQ ID NO: 1804916 - RNA, 18 nt, Human
gacuggaagcacagcuuc

SEQ ID NO: 1804917 - RNA, 16 nt, Human
gacuggaagcacagcu

SEQ ID NO: 1804918 - RNA, 15 nt, Human
gacuggaagcacagc

SEQ ID NO: 1804919 - RNA, 14 nt, Human
gacuggaagcacag

SEQ ID NO: 1804920 - RNA, 11 nt, Human
gacuccucugu

SEQ ID NO: 1804921 - RNA, 14 nt, Human
gacuccucugucca

SEQ ID NO: 1804922 - RNA, 12 nt, Human
gacuccugcagg

SEQ ID NO: 1804923 - RNA, 23 nt, Human
gacuccugcacacgcuccuuccu

SEQ ID NO: 1804924 - RNA, 13 nt, Human
gacuccugcaggc

SEQ ID NO: 1804925 - RNA, 13 nt, Human
gacucgcgacaau

SEQ ID NO: 1804926 - RNA, 13 nt, Human
gacuacaggugug

SEQ ID NO: 1804927 - RNA, 21 nt, Human
gacuacaggugugagucacca

SEQ ID NO: 1804928 - RNA, 18 nt, Human
gacuacaggugugaguca

SEQ ID NO: 1804929 - RNA, 15 nt, Human
gacucauucuucugu

SEQ ID NO: 1804930 - RNA, 14 nt, Human
gacucauucuucug

SEQ ID NO: 1804931 - RNA, 16 nt, Human
gagaguggcuccuccc

SEQ ID NO: 1804932 - RNA, 21 nt, Human
gagaguggcuccucccggugc

SEQ ID NO: 1804933 - RNA, 13 nt, Human
gagaguggcuccu

SEQ ID NO: 1804934 - RNA, 14 nt, Human
gagagggugggagu

SEQ ID NO: 1804935 - RNA, 20 nt, Human
gagagggugggagugggccc

SEQ ID NO: 1804936 - RNA, 16 nt, Human
gagagggugggagugg

SEQ ID NO: 1804937 - RNA, 19 nt, Human
gagaggggaacagacugga

SEQ ID NO: 1804938 - RNA, 13 nt, Human
gagaggggcacag

SEQ ID NO: 1804939 - RNA, 16 nt, Human
gagagcccuucauuug

SEQ ID NO: 1804940 - RNA, 19 nt, Human
gagagagcuucuguugcug

SEQ ID NO: 1804941 - RNA, 22 nt, Human
gagagagcuucuguugcugccu

SEQ ID NO: 1804942 - RNA, 23 nt, Human
gagaaugcacaaacagaggccgc

SEQ ID NO: 1804943 - RNA, 20 nt, Human
gagacagcucugcauacuca

SEQ ID NO: 1804944 - RNA, 22 nt, Human
gagacaggguuuugccauguug

SEQ ID NO: 1804945 - RNA, 14 nt, Human
gagaccaucccuga

SEQ ID NO: 1804946 - RNA, 18 nt, Human
gagaccaucccugaaggc

SEQ ID NO: 1804947 - RNA, 21 nt, Human
gagaccaucccugaaggcccc

SEQ ID NO: 1804948 - RNA, 13 nt, Human
gagacucugucuc

SEQ ID NO: 1804949 - RNA, 20 nt, Human
gagacucgcgacaaugcaaa

SEQ ID NO: 1804950 - RNA, 21 nt, Human
gagacucgcgacaaugcaaac

SEQ ID NO: 1804951 - RNA, 19 nt, Human
gagacuccugcaggcagcc

SEQ ID NO: 1804952 - RNA, 20 nt, Human
gagacuccugcaggcagcca

SEQ ID NO: 1804953 - RNA, 21 nt, Human
gagacuccugcaggcagccag

SEQ ID NO: 1804954 - RNA, 18 nt, Human
gagcccugguggcagugg

SEQ ID NO: 1804955 - RNA, 19 nt, Human
gagccagggucucacuaug

SEQ ID NO: 1804956 - RNA, 23 nt, Human
gagcccacuguacuugcucuuga

SEQ ID NO: 1804957 - RNA, 23 nt, Human
gagccagauuucacucuccuugg

SEQ ID NO: 1804958 - RNA, 14 nt, Human
gagccagggucuca

SEQ ID NO: 1804959 - RNA, 21 nt, Human
gagccagcagccuggcucucc

SEQ ID NO: 1804960 - RNA, 12 nt, Human
gagcagagacca

SEQ ID NO: 1804961 - RNA, 16 nt, Human
gagcagagaauucucu

SEQ ID NO: 1804962 - RNA, 19 nt, Human
gagccaauuuaaagaaaac

SEQ ID NO: 1804963 - RNA, 20 nt, Human
gagccagauuucacucuccu

SEQ ID NO: 1804964 - RNA, 15 nt, Human
gagcauuagauuucu

SEQ ID NO: 1804965 - RNA, 21 nt, Human
gagcauuagauuucucauuug

SEQ ID NO: 1804966 - RNA, 15 nt, Human
gagcacuaaggugug

SEQ ID NO: 1804967 - RNA, 21 nt, Human
gagcaccuuagacagucccug

SEQ ID NO: 1804968 - RNA, 22 nt, Human
gagcaccuuagacagucccugc

SEQ ID NO: 1804969 - RNA, 21 nt, Human
gagcacuaaggugugcucuga

SEQ ID NO: 1804970 - RNA, 20 nt, Human
gagcaccuuagacagucccu

SEQ ID NO: 1804971 - RNA, 23 nt, Human
gagaucaaccccuucgcuccugu

SEQ ID NO: 1804972 - RNA, 16 nt, Human
gagauagccaaggcca

SEQ ID NO: 1804973 - RNA, 14 nt, Human
gagauagccaaggc

SEQ ID NO: 1804974 - RNA, 19 nt, Human
gagaucacgccacugcacu

SEQ ID NO: 1804975 - RNA, 18 nt, Human
gagaucacgccacugcac

SEQ ID NO: 1804976 - RNA, 19 nt, Human
gagauagccaaggccaaag

SEQ ID NO: 1804977 - RNA, 17 nt, Human
gagaugaggccgccaug

SEQ ID NO: 1804978 - RNA, 15 nt, Human
cugccucuucucuac

SEQ ID NO: 1804979 - RNA, 17 nt, Human
cugccugcccaggcccc

SEQ ID NO: 1804980 - RNA, 16 nt, Human
cugccugcccaggccc

SEQ ID NO: 1804981 - RNA, 15 nt, Human
cugccugaagucaca

SEQ ID NO: 1804982 - RNA, 20 nt, Human
cugccugcccaggccccugc

SEQ ID NO: 1804983 - RNA, 21 nt, Human
cugccugggaucccucauccu

SEQ ID NO: 1804984 - RNA, 22 nt, Human
cugccugggaucccucauccuc

SEQ ID NO: 1804985 - RNA, 20 nt, Human
cugccucucugcaggucccu

SEQ ID NO: 1804986 - RNA, 21 nt, Human
cugccucucugcaggucccua

SEQ ID NO: 1804987 - RNA, 23 nt, Human
cugccucugacacacagcucugu

SEQ ID NO: 1804988 - RNA, 22 nt, Human
cugccucugacacacagcucug

SEQ ID NO: 1804989 - RNA, 15 nt, Human
cugccucugacacac

SEQ ID NO: 1804990 - RNA, 22 nt, Human
cugccucucugcaggucccuaa

SEQ ID NO: 1804991 - RNA, 12 nt, Human
cugccucccauc

SEQ ID NO: 1804992 - RNA, 14 nt, Human
cugccucccaucac

SEQ ID NO: 1804993 - RNA, 16 nt, Human
cugccucccaucaccc

SEQ ID NO: 1804994 - RNA, 19 nt, Human
cugccucccaucacccgcu

SEQ ID NO: 1804995 - RNA, 11 nt, Human
cugccucccau

SEQ ID NO: 1804996 - RNA, 22 nt, Human
cugcccugcugagucccaggcu

SEQ ID NO: 1804997 - RNA, 20 nt, Human
cugcccugcgggucacagga

SEQ ID NO: 1804998 - RNA, 12 nt, Human
cugcccuccaag

SEQ ID NO: 1804999 - RNA, 14 nt, Human
cucccuucccaccu

SEQ ID NO: 1805000 - RNA, 15 nt, Human
cucccuucccaccuc

SEQ ID NO: 1805001 - RNA, 16 nt, Human
cucccuucccaccucu

SEQ ID NO: 1805002 - RNA, 17 nt, Human
cucccuucccaccucuc

SEQ ID NO: 1805003 - RNA, 17 nt, Human
cugccgcagcccugcag

SEQ ID NO: 1805004 - RNA, 18 nt, Human
cugccgcagcccugcaga

SEQ ID NO: 1805005 - RNA, 21 nt, Human
cugcccuuucugggcaccggg

SEQ ID NO: 1805006 - RNA, 15 nt, Human
cugccgcagcccugc

SEQ ID NO: 1805007 - RNA, 14 nt, Human
cugccgcagcccug

SEQ ID NO: 1805008 - RNA, 19 nt, Human
cugcgaccacaagaaggau

SEQ ID NO: 1805009 - RNA, 19 nt, Human
cugcuccagcuguucagcu

SEQ ID NO: 1805010 - RNA, 20 nt, Human
cugcuccagcuguucagcug

SEQ ID NO: 1805011 - RNA, 14 nt, Human
cugcucuccucuug

SEQ ID NO: 1805012 - RNA, 20 nt, Human
cugcucuccucuugccacug

SEQ ID NO: 1805013 - RNA, 12 nt, Human
cugcugcccagc

SEQ ID NO: 1805014 - RNA, 15 nt, Human
cugcugcccagccuc

SEQ ID NO: 1805015 - RNA, 22 nt, Human
cugcugcccagccuccaagcuc

SEQ ID NO: 1805016 - RNA, 17 nt, Human
cugcugaaggaauaaau

SEQ ID NO: 1805017 - RNA, 18 nt, Human
cugcugaaggaauaaauu

SEQ ID NO: 1805018 - RNA, 21 nt, Human
cugcucuccucuugccacugc

SEQ ID NO: 1805019 - RNA, 11 nt, Human
cugcugaaggc

SEQ ID NO: 1805020 - RNA, 23 nt, Human
cugcugguucaggguuggccccu

SEQ ID NO: 1805021 - RNA, 15 nt, Human
cugcugguucagggu

SEQ ID NO: 1805022 - RNA, 13 nt, Human
cugcugguucagg

SEQ ID NO: 1805023 - RNA, 12 nt, Human
cugcuggcugcc

SEQ ID NO: 1805024 - RNA, 15 nt, Human
cugcuuccagugagg

SEQ ID NO: 1805025 - RNA, 16 nt, Human
cugcuuccagugaggc

SEQ ID NO: 1805026 - RNA, 18 nt, Human
cugcuuccagugaggcuc

SEQ ID NO: 1805027 - RNA, 19 nt, Human
cugcuuccagugaggcucu

SEQ ID NO: 1805028 - RNA, 20 nt, Human
cugcuuccagugaggcucug

SEQ ID NO: 1805029 - RNA, 21 nt, Human
cugcuuccagugaggcucugc

SEQ ID NO: 1805030 - RNA, 23 nt, Human
cugcuuccagugaggcucugccc

SEQ ID NO: 1805031 - RNA, 15 nt, Human
cugcugcuggcuggu

SEQ ID NO: 1805032 - RNA, 15 nt, Human
cuggcgugcaguggu

SEQ ID NO: 1805033 - RNA, 14 nt, Human
cuggcgugcagugg

SEQ ID NO: 1805034 - RNA, 14 nt, Human
cuggccugugucua

SEQ ID NO: 1805035 - RNA, 23 nt, Human
cuggccuucggccuccauccuga

SEQ ID NO: 1805036 - RNA, 21 nt, Human
cuggcucuuccaggcugggag

SEQ ID NO: 1805037 - RNA, 22 nt, Human
cuggcucuuccaggcugggaga

SEQ ID NO: 1805038 - RNA, 24 nt, Human
cuggcucuuccaggcugggagagc

SEQ ID NO: 1805039 - RNA, 21 nt, Human
cuggccucugcacuccccugc

SEQ ID NO: 1805040 - RNA, 18 nt, Human
cuggccucugcacucccc

SEQ ID NO: 1805041 - RNA, 20 nt, Human
cuggccucugcacuccccug

SEQ ID NO: 1805042 - RNA, 13 nt, Human
cuggccuggcccc

SEQ ID NO: 1805043 - RNA, 24 nt, Human
cuggccuggccccucagggucccu

SEQ ID NO: 1805044 - RNA, 22 nt, Human
cuggccuucggccuccauccug

SEQ ID NO: 1805045 - RNA, 20 nt, Human
cuggagugcagugagccgag

SEQ ID NO: 1805046 - RNA, 19 nt, Human
cuggcacccggccccugcu

SEQ ID NO: 1805047 - RNA, 21 nt, Human
cuggcacccggccccugcugg

SEQ ID NO: 1805048 - RNA, 20 nt, Human
cuggcacccggccccugcug

SEQ ID NO: 1805049 - RNA, 22 nt, Human
cuggcacccggccccugcuggu

SEQ ID NO: 1805050 - RNA, 19 nt, Human
cuggcacugcuuccaguga

SEQ ID NO: 1805051 - RNA, 20 nt, Human
cuggcacugcuuccagugag

SEQ ID NO: 1805052 - RNA, 23 nt, Human
cuggcacugcuuccagugaggcu

SEQ ID NO: 1805053 - RNA, 14 nt, Human
cuggcacuuggaga

SEQ ID NO: 1805054 - RNA, 21 nt, Human
cuggcacuuggagacuuguau

SEQ ID NO: 1805055 - RNA, 15 nt, Human
cuggcccacugcauc

SEQ ID NO: 1805056 - RNA, 19 nt, Human
cuggcaguggaacuaagaa

SEQ ID NO: 1805057 - RNA, 14 nt, Human
cuggccagaugcac

SEQ ID NO: 1805058 - RNA, 17 nt, Human
cuggagugcagugagcc

SEQ ID NO: 1805059 - RNA, 16 nt, Human
cuggagugcagugagc

SEQ ID NO: 1805060 - RNA, 15 nt, Human
cuggagugcagugag

SEQ ID NO: 1805061 - RNA, 14 nt, Human
cuggagugcaguga

SEQ ID NO: 1805062 - RNA, 22 nt, Human
cuggagguacgaaaagagggga

SEQ ID NO: 1805063 - RNA, 17 nt, Human
cuggagguacgaaaaga

SEQ ID NO: 1805064 - RNA, 13 nt, Human
cuggagcucugcc

SEQ ID NO: 1805065 - RNA, 12 nt, Human
cuggagcucugc

SEQ ID NO: 1805066 - RNA, 16 nt, Human
cuggagcucugcccau

SEQ ID NO: 1805067 - RNA, 21 nt, Human
cuggaccuugaacuggguacu

SEQ ID NO: 1805068 - RNA, 20 nt, Human
cuggaccuugaacuggguac

SEQ ID NO: 1805069 - RNA, 17 nt, Human
cuggaccuugaacuggg

SEQ ID NO: 1805070 - RNA, 14 nt, Human
cuggacuccucugu

SEQ ID NO: 1805071 - RNA, 17 nt, Human
cuggacuccucugucca

SEQ ID NO: 1805072 - RNA, 18 nt, Human
cuggacuccucuguccag

SEQ ID NO: 1805073 - RNA, 19 nt, Human
cuggacuccucuguccagg

SEQ ID NO: 1805074 - RNA, 20 nt, Human
cuggacuccucuguccaggc

SEQ ID NO: 1805075 - RNA, 15 nt, Human
cuggacccuguggau

SEQ ID NO: 1805076 - RNA, 16 nt, Human
cuggaccuugaacugg

SEQ ID NO: 1805077 - RNA, 17 nt, Human
cuggacaggcauguucu

SEQ ID NO: 1805078 - RNA, 14 nt, Human
cuggacaggcaugu

SEQ ID NO: 1805079 - RNA, 23 nt, Human
cuggacaggcauguucucugagg

SEQ ID NO: 1805080 - RNA, 13 nt, Human
cuggaauuugaaa

SEQ ID NO: 1805081 - RNA, 11 nt, Human
cugugccucug

SEQ ID NO: 1805082 - RNA, 14 nt, Human
cugugccucuggga

SEQ ID NO: 1805083 - RNA, 16 nt, Human
cugugccucugggacu

SEQ ID NO: 1805084 - RNA, 22 nt, Human
cugugcugcccugcccaccugg

SEQ ID NO: 1805085 - RNA, 17 nt, Human
cugugccucugggacug

SEQ ID NO: 1805086 - RNA, 18 nt, Human
cugugccucugggacugg

SEQ ID NO: 1805087 - RNA, 17 nt, Human
cuguggaugauaaaaca

SEQ ID NO: 1805088 - RNA, 16 nt, Human
cuguggccaaguucuu

SEQ ID NO: 1805089 - RNA, 18 nt, Human
cuguggccaaguucuuag

SEQ ID NO: 1805090 - RNA, 21 nt, Human
cugugggcgugagaccugccc

SEQ ID NO: 1805091 - RNA, 22 nt, Human
cugugggcgugagaccugcccc

SEQ ID NO: 1805092 - RNA, 14 nt, Human
cugugggcccccaa

SEQ ID NO: 1805093 - RNA, 19 nt, Human
cugugauggggcccugccu

SEQ ID NO: 1805094 - RNA, 20 nt, Human
cugugauggggcccugccuc

SEQ ID NO: 1805095 - RNA, 18 nt, Human
cugugccaugugccaggu

SEQ ID NO: 1805096 - RNA, 16 nt, Human
cugugccaugugccag

SEQ ID NO: 1805097 - RNA, 22 nt, Human
cugugccauuuuguauuuuacu

SEQ ID NO: 1805098 - RNA, 14 nt, Human
cugugccauuuugu

SEQ ID NO: 1805099 - RNA, 18 nt, Human
cugugauggggcccugcc

SEQ ID NO: 1805100 - RNA, 17 nt, Human
cugugauggggcccugc

SEQ ID NO: 1805101 - RNA, 23 nt, Human
cugugaguacuacaguccuccca

SEQ ID NO: 1805102 - RNA, 20 nt, Human
cugugaguacuacaguccuc

SEQ ID NO: 1805103 - RNA, 21 nt, Human
cugugaguacuacaguccucc

SEQ ID NO: 1805104 - RNA, 18 nt, Human
cugucuccauguuugaug

SEQ ID NO: 1805105 - RNA, 23 nt, Human
cugucucaagagggcacuggugg

SEQ ID NO: 1805106 - RNA, 20 nt, Human
cugugugugcgccuacagga

SEQ ID NO: 1805107 - RNA, 23 nt, Human
cugugucuugcaauggcagccuu

SEQ ID NO: 1805108 - RNA, 22 nt, Human
cugugucuugcaauggcagccu

SEQ ID NO: 1805109 - RNA, 21 nt, Human
cugugucuugcaauggcagcc

SEQ ID NO: 1805110 - RNA, 23 nt, Human
cugugggcgugagaccugccccu

SEQ ID NO: 1805111 - RNA, 23 nt, Human
cugugugcucaggagcccuggga

SEQ ID NO: 1805112 - RNA, 15 nt, Human
cuguguggcagucug

SEQ ID NO: 1805113 - RNA, 19 nt, Human
cugugugcucaggagcccu

SEQ ID NO: 1805114 - RNA, 16 nt, Human
cugugugcucaggagc

SEQ ID NO: 1805115 - RNA, 20 nt, Human
cugugugcucaggagcccug

SEQ ID NO: 1805116 - RNA, 21 nt, Human
cugugugcucaggagcccugg

SEQ ID NO: 1805117 - RNA, 13 nt, Human
cuguucucugccc

SEQ ID NO: 1805118 - RNA, 20 nt, Human
cuguucucugcccuccaaga

SEQ ID NO: 1805119 - RNA, 18 nt, Human
cuguucucugcccuccaa

SEQ ID NO: 1805120 - RNA, 19 nt, Human
cuguucucugcccuccaag

SEQ ID NO: 1805121 - RNA, 14 nt, Human
cuguucucugcccu

SEQ ID NO: 1805122 - RNA, 15 nt, Human
cuguucucugcccuc

SEQ ID NO: 1805123 - RNA, 16 nt, Human
cuguucucugcccucc

SEQ ID NO: 1805124 - RNA, 17 nt, Human
cuguucucugcccucca

SEQ ID NO: 1805125 - RNA, 18 nt, Human
cuguucccauucuugcau

SEQ ID NO: 1805126 - RNA, 18 nt, Human
cuguuacacuuuuuggaa

SEQ ID NO: 1805127 - RNA, 19 nt, Human
cuguuacacuuuuuggaag

SEQ ID NO: 1805128 - RNA, 13 nt, Human
cuguuacugucuu

SEQ ID NO: 1805129 - RNA, 19 nt, Human
cuguucagcugguugaggu

SEQ ID NO: 1805130 - RNA, 21 nt, Human
cuguucagcugguugagguuu

SEQ ID NO: 1805131 - RNA, 14 nt, Human
cugguggcagcugc

SEQ ID NO: 1805132 - RNA, 13 nt, Human
cugguggcagcug

SEQ ID NO: 1805133 - RNA, 20 nt, Human
cugguggcccgacagccugg

SEQ ID NO: 1805134 - RNA, 21 nt, Human
cugguggcccgacagccuggc

SEQ ID NO: 1805135 - RNA, 22 nt, Human
cugguggcccgacagccuggca

SEQ ID NO: 1805136 - RNA, 23 nt, Human
cugguggcccgacagccuggcac

SEQ ID NO: 1805137 - RNA, 23 nt, Human
cugguggcagcucaccucucccu

SEQ ID NO: 1805138 - RNA, 12 nt, Human
cuggugcugcca

SEQ ID NO: 1805139 - RNA, 13 nt, Human
cuggugcugccac

SEQ ID NO: 1805140 - RNA, 20 nt, Human
cuggugcugccacacuucag

SEQ ID NO: 1805141 - RNA, 22 nt, Human
cuggugcugccacacuucaggc

SEQ ID NO: 1805142 - RNA, 18 nt, Human
cuggucacaggacucugc

SEQ ID NO: 1805143 - RNA, 12 nt, Human
cugguuccuccc

SEQ ID NO: 1805144 - RNA, 16 nt, Human
cugguuccauggccuc

SEQ ID NO: 1805145 - RNA, 13 nt, Human
cugguuccucccc

SEQ ID NO: 1805146 - RNA, 23 nt, Human
cuguaaucacagcuacuugggag

SEQ ID NO: 1805147 - RNA, 20 nt, Human
cuguaauccuagcacuuugg

SEQ ID NO: 1805148 - RNA, 13 nt, Human
cuguacaaaguag

SEQ ID NO: 1805149 - RNA, 15 nt, Human
cuguacaaaguagaa

SEQ ID NO: 1805150 - RNA, 15 nt, Human
cugggggaagaagcu

SEQ ID NO: 1805151 - RNA, 19 nt, Human
cugggggcugggcagagga

SEQ ID NO: 1805152 - RNA, 22 nt, Human
cugggggggauuguaaaauggu

SEQ ID NO: 1805153 - RNA, 13 nt, Human
cugggggaagaag

SEQ ID NO: 1805154 - RNA, 24 nt, Human
cugggcuucaguggcagcugcuuu

SEQ ID NO: 1805155 - RNA, 22 nt, Human
cuggguaacuagggaagauaau

SEQ ID NO: 1805156 - RNA, 20 nt, Human
cuggguaacuagggaagaua

SEQ ID NO: 1805157 - RNA, 14 nt, Human
cuggguucuaccca

SEQ ID NO: 1805158 - RNA, 15 nt, Human
cuggguucuacccag

SEQ ID NO: 1805159 - RNA, 16 nt, Human
cuggguucuacccagg

SEQ ID NO: 1805160 - RNA, 17 nt, Human
cuggguucuacccaggu

SEQ ID NO: 1805161 - RNA, 22 nt, Human
cugucccuuacgugaguccugg

SEQ ID NO: 1805162 - RNA, 15 nt, Human
cuguccgagcuuuga

SEQ ID NO: 1805163 - RNA, 14 nt, Human
cuguccuacccacc

SEQ ID NO: 1805164 - RNA, 23 nt, Human
cugucucaaaaaaacacaaaagu

SEQ ID NO: 1805165 - RNA, 16 nt, Human
cugucucaaaaaaaga

SEQ ID NO: 1805166 - RNA, 22 nt, Human
cugucucaagagggcacuggug

SEQ ID NO: 1805167 - RNA, 18 nt, Human
cugucucaaaaaaagaaa

SEQ ID NO: 1805168 - RNA, 20 nt, Human
cugucccuuacgugaguccu

SEQ ID NO: 1805169 - RNA, 17 nt, Human
cuguccccgcacugggc

SEQ ID NO: 1805170 - RNA, 18 nt, Human
cuguccccgcacugggcu

SEQ ID NO: 1805171 - RNA, 19 nt, Human
cuguccccgcacugggcuu

SEQ ID NO: 1805172 - RNA, 22 nt, Human
cuguccccgcacugggcuuggg

SEQ ID NO: 1805173 - RNA, 23 nt, Human
cuguaucccaugagccucagcau

SEQ ID NO: 1805174 - RNA, 23 nt, Human
cuguccaggcacugcugcccagc

SEQ ID NO: 1805175 - RNA, 17 nt, Human
cuguccaggcacugcug

SEQ ID NO: 1805176 - RNA, 14 nt, Human
cugucaaggcucag

SEQ ID NO: 1805177 - RNA, 13 nt, Human
cugucaaggcuca

SEQ ID NO: 1805178 - RNA, 13 nt, Human
cugucaauuacag

SEQ ID NO: 1805179 - RNA, 13 nt, Human
cuguacagagccc

SEQ ID NO: 1805180 - RNA, 23 nt, Human
cuucacagaugggugcuuggagg

SEQ ID NO: 1805181 - RNA, 16 nt, Human
cuucaaccauucccca

SEQ ID NO: 1805182 - RNA, 20 nt, Human
cuucaaccauuccccauggg

SEQ ID NO: 1805183 - RNA, 16 nt, Human
cuucaacucccugccc

SEQ ID NO: 1805184 - RNA, 10 nt, Human
cuucaaggau

SEQ ID NO: 1805185 - RNA, 13 nt, Human
cuucaaggauccu

SEQ ID NO: 1805186 - RNA, 15 nt, Human
cuucaaggauccuga

SEQ ID NO: 1805187 - RNA, 16 nt, Human
cuucaaggauccugag

SEQ ID NO: 1805188 - RNA, 17 nt, Human
cuuauuuaaugaaagac

SEQ ID NO: 1805189 - RNA, 18 nt, Human
cuuauuuaaugaaagacu

SEQ ID NO: 1805190 - RNA, 17 nt, Human
cuucaaagcaaaugucu

SEQ ID NO: 1805191 - RNA, 21 nt, Human
cuucaaaaguuuguuugcuua

SEQ ID NO: 1805192 - RNA, 16 nt, Human
cuguucugcacacagc

SEQ ID NO: 1805193 - RNA, 16 nt, Human
cuguucuggcagaguu

SEQ ID NO: 1805194 - RNA, 19 nt, Human
cuuagauguauauauuucc

SEQ ID NO: 1805195 - RNA, 16 nt, Human
cuuagucacugagaca

SEQ ID NO: 1805196 - RNA, 13 nt, Human
cuuagauguauau

SEQ ID NO: 1805197 - RNA, 18 nt, Human
cuuagucacugagacagc

SEQ ID NO: 1805198 - RNA, 19 nt, Human
cuuagucacugagacagcc

SEQ ID NO: 1805199 - RNA, 13 nt, Human
cuuauauuaugga

SEQ ID NO: 1805200 - RNA, 14 nt, Human
cuuauagacaacau

SEQ ID NO: 1805201 - RNA, 23 nt, Human
cuucccgcucagcccucccugcc

SEQ ID NO: 1805202 - RNA, 19 nt, Human
cuucccgcucagcccuccc

SEQ ID NO: 1805203 - RNA, 17 nt, Human
cuucccuacaguugaaa

SEQ ID NO: 1805204 - RNA, 13 nt, Human
cuuccucccucau

SEQ ID NO: 1805205 - RNA, 13 nt, Human
cuuccuaauucca

SEQ ID NO: 1805206 - RNA, 17 nt, Human
cuuccuaauuccacagc

SEQ ID NO: 1805207 - RNA, 18 nt, Human
cuuccuaauuccacagcu

SEQ ID NO: 1805208 - RNA, 19 nt, Human
cuuccuaauuccacagcug

SEQ ID NO: 1805209 - RNA, 15 nt, Human
cuuccaggcugggag

SEQ ID NO: 1805210 - RNA, 16 nt, Human
cuuccaggcugggaga

SEQ ID NO: 1805211 - RNA, 19 nt, Human
cuuccaggcugggagagcc

SEQ ID NO: 1805212 - RNA, 14 nt, Human
cuuccagggguggg

SEQ ID NO: 1805213 - RNA, 15 nt, Human
cuuccagggguggga

SEQ ID NO: 1805214 - RNA, 17 nt, Human
cuuccaggggugggaca

SEQ ID NO: 1805215 - RNA, 21 nt, Human
cuuccaggggugggacacccu

SEQ ID NO: 1805216 - RNA, 16 nt, Human
cuucaguggcagcugc

SEQ ID NO: 1805217 - RNA, 15 nt, Human
cuucaguggcagcug

SEQ ID NO: 1805218 - RNA, 14 nt, Human
cuucaguggcagcu

SEQ ID NO: 1805219 - RNA, 13 nt, Human
cuucaguggcagc

SEQ ID NO: 1805220 - RNA, 18 nt, Human
cuucagugccuuauggaa

SEQ ID NO: 1805221 - RNA, 22 nt, Human
cuucagugccuuauggaacacu

SEQ ID NO: 1805222 - RNA, 19 nt, Human
cuucaggcucuucuccuuu

SEQ ID NO: 1805223 - RNA, 22 nt, Human
cuucaggcucuucuccuuucac

SEQ ID NO: 1805224 - RNA, 15 nt, Human
cuucagggagugagg

SEQ ID NO: 1805225 - RNA, 16 nt, Human
cuucaguaagccguga

SEQ ID NO: 1805226 - RNA, 23 nt, Human
cuucaguaagccgugauuuucau

SEQ ID NO: 1805227 - RNA, 17 nt, Human
cuucaguggcagcugcu

SEQ ID NO: 1805228 - RNA, 20 nt, Human
cuucauucaacccaccugcg

SEQ ID NO: 1805229 - RNA, 17 nt, Human
cuuccacaagagcccag

SEQ ID NO: 1805230 - RNA, 19 nt, Human
cuuccacaagagcccaggc

SEQ ID NO: 1805231 - RNA, 21 nt, Human
cuuccacaagagcccaggccu

SEQ ID NO: 1805232 - RNA, 12 nt, Human
cuuccaggcugg

SEQ ID NO: 1805233 - RNA, 14 nt, Human
cuuccaggcuggga

SEQ ID NO: 1805234 - RNA, 15 nt, Human
cuucuguugcugccu

SEQ ID NO: 1805235 - RNA, 13 nt, Human
cuucuguggcuca

SEQ ID NO: 1805236 - RNA, 15 nt, Human
cuucuguggcucaca

SEQ ID NO: 1805237 - RNA, 22 nt, Human
cuucuguggcucacagaacccu

SEQ ID NO: 1805238 - RNA, 13 nt, Human
cuucuguggguuu

SEQ ID NO: 1805239 - RNA, 14 nt, Human
cuucuguggguuuc

SEQ ID NO: 1805240 - RNA, 21 nt, Human
cuucuguggguuucuaaagcu

SEQ ID NO: 1805241 - RNA, 22 nt, Human
cuucuuuauaauucuacuuuga

SEQ ID NO: 1805242 - RNA, 12 nt, Human
cuugaaaaaugc

SEQ ID NO: 1805243 - RNA, 18 nt, Human
cuugaaaaaugcauguug

SEQ ID NO: 1805244 - RNA, 14 nt, Human
cuugaaaacacugu

SEQ ID NO: 1805245 - RNA, 23 nt, Human
cuugaaaacacuguucucugccc

SEQ ID NO: 1805246 - RNA, 12 nt, Human
cuugaaaauuaa

SEQ ID NO: 1805247 - RNA, 13 nt, Human
cuugaaaauuaac

SEQ ID NO: 1805248 - RNA, 18 nt, Human
cuugaaaauuaacaugaa

SEQ ID NO: 1805249 - RNA, 13 nt, Human
cuugaacuccugg

SEQ ID NO: 1805250 - RNA, 13 nt, Human
cuugaacuccuga

SEQ ID NO: 1805251 - RNA, 16 nt, Human
cuugaacuccugaccu

SEQ ID NO: 1805252 - RNA, 18 nt, Human
cuugaacuccugaccuca

SEQ ID NO: 1805253 - RNA, 21 nt, Human
cuugaacuuugaccucugcag

SEQ ID NO: 1805254 - RNA, 17 nt, Human
cuugaacuuugaccucu

SEQ ID NO: 1805255 - RNA, 13 nt, Human
cuugaccucaggu

SEQ ID NO: 1805256 - RNA, 21 nt, Human
cuugaccgugaggccagagac

SEQ ID NO: 1805257 - RNA, 18 nt, Human
cuugaccgugaggccaga

SEQ ID NO: 1805258 - RNA, 20 nt, Human
cuugaccgugaggccagaga

SEQ ID NO: 1805259 - RNA, 16 nt, Human
cuugaagacuuuucuu

SEQ ID NO: 1805260 - RNA, 17 nt, Human
cuugaccgugaggccag

SEQ ID NO: 1805261 - RNA, 22 nt, Human
cuugaccauucuccaccugcca

SEQ ID NO: 1805262 - RNA, 23 nt, Human
cuugaccauucuccaccugccag

SEQ ID NO: 1805263 - RNA, 20 nt, Human
cuugaggguugggcuggugu

SEQ ID NO: 1805264 - RNA, 19 nt, Human
cuugaggguugggcuggug

SEQ ID NO: 1805265 - RNA, 21 nt, Human
cuugaggguugggcugguguc

SEQ ID NO: 1805266 - RNA, 15 nt, Human
cuugagccuugaacu

SEQ ID NO: 1805267 - RNA, 18 nt, Human
cuugagccuugaacuuug

SEQ ID NO: 1805268 - RNA, 17 nt, Human
cuugagccuugaacuuu

SEQ ID NO: 1805269 - RNA, 16 nt, Human
cuugagccugggaggu

SEQ ID NO: 1805270 - RNA, 21 nt, Human
cuucuguccuacucuguguca

SEQ ID NO: 1805271 - RNA, 19 nt, Human
cuucuguccuacucugugu

SEQ ID NO: 1805272 - RNA, 18 nt, Human
cuucuguccuacucugug

SEQ ID NO: 1805273 - RNA, 17 nt, Human
cuucuguccuacucugu

SEQ ID NO: 1805274 - RNA, 16 nt, Human
cuucuguccuacucug

SEQ ID NO: 1805275 - RNA, 20 nt, Human
cuucuguacgucugacaggc

SEQ ID NO: 1805276 - RNA, 18 nt, Human
cuucuguacgucugacag

SEQ ID NO: 1805277 - RNA, 15 nt, Human
cuucuguacgucuga

SEQ ID NO: 1805278 - RNA, 14 nt, Human
cuucuguacgucug

SEQ ID NO: 1805279 - RNA, 21 nt, Human
cuucuguacgucugacaggca

SEQ ID NO: 1805280 - RNA, 13 nt, Human
cuucugcuucagc

SEQ ID NO: 1805281 - RNA, 14 nt, Human
cuucugguugaugc

SEQ ID NO: 1805282 - RNA, 16 nt, Human
cuucuggguuccuucc

SEQ ID NO: 1805283 - RNA, 17 nt, Human
cuucuggguuccuuccu

SEQ ID NO: 1805284 - RNA, 23 nt, Human
cuucuggguuccuuccucugagc

SEQ ID NO: 1805285 - RNA, 15 nt, Human
cuuccucccucauuc

SEQ ID NO: 1805286 - RNA, 14 nt, Human
cuucuccacuggau

SEQ ID NO: 1805287 - RNA, 15 nt, Human
cuucuccacuggaug

SEQ ID NO: 1805288 - RNA, 13 nt, Human
cuucuccacugga

SEQ ID NO: 1805289 - RNA, 11 nt, Human
cuucuccacuu

SEQ ID NO: 1805290 - RNA, 20 nt, Human
cuucuccacuuucuagccag

SEQ ID NO: 1805291 - RNA, 14 nt, Human
cuucuccaggcugu

SEQ ID NO: 1805292 - RNA, 13 nt, Human
cuucuccaggcug

SEQ ID NO: 1805293 - RNA, 12 nt, Human
cuucuccaggcu

SEQ ID NO: 1805294 - RNA, 17 nt, Human
cuucuccacuggaugga

SEQ ID NO: 1805295 - RNA, 13 nt, Human
cuucucugaagga

SEQ ID NO: 1805296 - RNA, 20 nt, Human
cuucuccuuagaaguggaag

SEQ ID NO: 1805297 - RNA, 19 nt, Human
cuucuccuucaccuuuguc

SEQ ID NO: 1805298 - RNA, 12 nt, Human
cuucucuccagc

SEQ ID NO: 1805299 - RNA, 13 nt, Human
cuucucuccagcc

SEQ ID NO: 1805300 - RNA, 15 nt, Human
cuucucuccagcccc

SEQ ID NO: 1805301 - RNA, 17 nt, Human
cuucucuccagccccug

SEQ ID NO: 1805302 - RNA, 19 nt, Human
cuucucuccagccccugga

SEQ ID NO: 1805303 - RNA, 19 nt, Human
cuuuggcuauuagagauca

SEQ ID NO: 1805304 - RNA, 14 nt, Human
cuuuguccccaccg

SEQ ID NO: 1805305 - RNA, 15 nt, Human
cuuugugaggaagcc

SEQ ID NO: 1805306 - RNA, 23 nt, Human
cuuugucuacuucaaaaguuugu

SEQ ID NO: 1805307 - RNA, 15 nt, Human
cuuuguccccaccgc

SEQ ID NO: 1805308 - RNA, 20 nt, Human
cuuugcagacaggcaagcac

SEQ ID NO: 1805309 - RNA, 13 nt, Human
cuuugaccucugc

SEQ ID NO: 1805310 - RNA, 16 nt, Human
cuuugcagacaggcaa

SEQ ID NO: 1805311 - RNA, 22 nt, Human
cuuugcauaacguauaaaagcc

SEQ ID NO: 1805312 - RNA, 24 nt, Human
cuuugaccucugcagcaauaaagc

SEQ ID NO: 1805313 - RNA, 20 nt, Human
cuuugaccucugcagcaaua

SEQ ID NO: 1805314 - RNA, 18 nt, Human
cuuugaccucugcagcaa

SEQ ID NO: 1805315 - RNA, 17 nt, Human
cuuugaccucugcagca

SEQ ID NO: 1805316 - RNA, 12 nt, Human
cuuucuuccucu

SEQ ID NO: 1805317 - RNA, 13 nt, Human
cuuucuuccucug

SEQ ID NO: 1805318 - RNA, 14 nt, Human
cuuucuuccucugc

SEQ ID NO: 1805319 - RNA, 15 nt, Human
cuuucuuccucugcu

SEQ ID NO: 1805320 - RNA, 15 nt, Human
cuuugaccucugcag

SEQ ID NO: 1805321 - RNA, 14 nt, Human
cuuugaccucugca

SEQ ID NO: 1805322 - RNA, 15 nt, Human
cuuuccaucuacccu

SEQ ID NO: 1805323 - RNA, 15 nt, Human
cuuuccaggaaggcu

SEQ ID NO: 1805324 - RNA, 12 nt, Human
cuuuccugaggc

SEQ ID NO: 1805325 - RNA, 11 nt, Human
cuuucccuccc

SEQ ID NO: 1805326 - RNA, 13 nt, Human
cuuucccucccuu

SEQ ID NO: 1805327 - RNA, 14 nt, Human
cuuucccucccuuc

SEQ ID NO: 1805328 - RNA, 16 nt, Human
cuuucccucccuuccu

SEQ ID NO: 1805329 - RNA, 15 nt, Human
cuuucucugaggaca

SEQ ID NO: 1805330 - RNA, 14 nt, Human
cuuucucugaggac

SEQ ID NO: 1805331 - RNA, 12 nt, Human
cuuucucugagg

SEQ ID NO: 1805332 - RNA, 13 nt, Human
cuuuccugaggcu

SEQ ID NO: 1805333 - RNA, 15 nt, Human
cuuuccugaggcugg

SEQ ID NO: 1805334 - RNA, 11 nt, Human
cuuucuuccuc

SEQ ID NO: 1805335 - RNA, 20 nt, Human
cuuucugggcaccggggccu

SEQ ID NO: 1805336 - RNA, 20 nt, Human
cuuucuggcuaugcauuuga

SEQ ID NO: 1805337 - RNA, 19 nt, Human
cuuucuggcuaugcauuug

SEQ ID NO: 1805338 - RNA, 18 nt, Human
cuuucuggcuaugcauuu

SEQ ID NO: 1805339 - RNA, 17 nt, Human
cuuucuggcuaugcauu

SEQ ID NO: 1805340 - RNA, 19 nt, Human
cuugaguuuaaauuguaau

SEQ ID NO: 1805341 - RNA, 23 nt, Human
cuuggggggcugaggugggagga

SEQ ID NO: 1805342 - RNA, 16 nt, Human
cuuguaaauagcucag

SEQ ID NO: 1805343 - RNA, 21 nt, Human
cuuguaaauagcucagguguc

SEQ ID NO: 1805344 - RNA, 22 nt, Human
cuuguacauaaugcgugcauac

SEQ ID NO: 1805345 - RNA, 21 nt, Human
cuuguacauaaugcgugcaua

SEQ ID NO: 1805346 - RNA, 19 nt, Human
cuuguacauaaugcgugca

SEQ ID NO: 1805347 - RNA, 18 nt, Human
cuuguaaauagcucaggu

SEQ ID NO: 1805348 - RNA, 17 nt, Human
cuuguaaauagcucagg

SEQ ID NO: 1805349 - RNA, 12 nt, Human
cuuguacauaau

SEQ ID NO: 1805350 - RNA, 15 nt, Human
cuuguacauaaugcg

SEQ ID NO: 1805351 - RNA, 17 nt, Human
cuuguacuuuauuuucu

SEQ ID NO: 1805352 - RNA, 13 nt, Human
cuuuacuauggcc

SEQ ID NO: 1805353 - RNA, 22 nt, Human
cuuuaccuuuuuuauacauaaa

SEQ ID NO: 1805354 - RNA, 15 nt, Human
cuuuagcgcccaguu

SEQ ID NO: 1805355 - RNA, 14 nt, Human
cuuuagcgcccagu

SEQ ID NO: 1805356 - RNA, 13 nt, Human
cuuuauaauucua

SEQ ID NO: 1805357 - RNA, 19 nt, Human
cuuuauaauucuacuuuga

SEQ ID NO: 1805358 - RNA, 23 nt, Human
cuuuaucuugaauaauguaagac

SEQ ID NO: 1805359 - RNA, 15 nt, Human
cuuuaugcacaaaau

SEQ ID NO: 1805360 - RNA, 18 nt, Human
cuuuaucuugaauaaugu

SEQ ID NO: 1805361 - RNA, 21 nt, Human
cuuuaucuugaauaauguaag

SEQ ID NO: 1805362 - RNA, 17 nt, Human
cuuuuuauggccuguga

SEQ ID NO: 1805363 - RNA, 20 nt, Human
cuuuuguucuugguuuguaa

SEQ ID NO: 1805364 - RNA, 18 nt, Human
cuuuguuaguuucuccaa

SEQ ID NO: 1805365 - RNA, 12 nt, Human
cuuuuguucuug

SEQ ID NO: 1805366 - RNA, 11 nt, Human
cuuuuguucuu

SEQ ID NO: 1805367 - RNA, 18 nt, Human
gaaaacacuguucucugc

SEQ ID NO: 1805368 - RNA, 19 nt, Human
gaaaacacauuuuucuuag

SEQ ID NO: 1805369 - RNA, 18 nt, Human
gaaaacacauuuuucuua

SEQ ID NO: 1805370 - RNA, 12 nt, Human
gaaaaaggagga

SEQ ID NO: 1805371 - RNA, 15 nt, Human
gaaaaaggaggaaga

SEQ ID NO: 1805372 - RNA, 16 nt, Human
cuuuuuuggcugcuga

SEQ ID NO: 1805373 - RNA, 17 nt, Human
cuuuuuuggcugcugaa

SEQ ID NO: 1805374 - RNA, 20 nt, Human
cuuuuuuggcugcugaaggc

SEQ ID NO: 1805375 - RNA, 22 nt, Human
cuuuuuuggcugcugaaggcuc

SEQ ID NO: 1805376 - RNA, 18 nt, Human
gaaaaucuuauaauuuaa

SEQ ID NO: 1805377 - RNA, 22 nt, Human
gaaaaucuacacuccagugaga

SEQ ID NO: 1805378 - RNA, 20 nt, Human
gaaaaucagccugcuccagc

SEQ ID NO: 1805379 - RNA, 22 nt, Human
gaaaaucagccugcuccagcug

SEQ ID NO: 1805380 - RNA, 19 nt, Human
gaaaaguuuuguaaauuuc

SEQ ID NO: 1805381 - RNA, 18 nt, Human
gaaaagggaacugaacau

SEQ ID NO: 1805382 - RNA, 19 nt, Human
gaaaagcugcugacagugu

SEQ ID NO: 1805383 - RNA, 20 nt, Human
gaaaacguggcugcuucaag

SEQ ID NO: 1805384 - RNA, 22 nt, Human
gaaaacguggcugcuucaagga

SEQ ID NO: 1805385 - RNA, 24 nt, Human
gaaaacacuguucucugcccucca

SEQ ID NO: 1805386 - RNA, 22 nt, Human
gaaaacacuguucucugcccuc

SEQ ID NO: 1805387 - RNA, 19 nt, Human
gaaacuaggugcauauuua

SEQ ID NO: 1805388 - RNA, 15 nt, Human
gaaacuccagaugcc

SEQ ID NO: 1805389 - RNA, 14 nt, Human
gaaacccugucucu

SEQ ID NO: 1805390 - RNA, 19 nt, Human
gaaaccccuguaggccuca

SEQ ID NO: 1805391 - RNA, 23 nt, Human
gaaacccagcucugguccauaga

SEQ ID NO: 1805392 - RNA, 13 nt, Human
gaaacccagcucu

SEQ ID NO: 1805393 - RNA, 14 nt, Human
gaaacccagcucug

SEQ ID NO: 1805394 - RNA, 15 nt, Human
gaaacccagcucugg

SEQ ID NO: 1805395 - RNA, 16 nt, Human
gaaacccagcucuggu

SEQ ID NO: 1805396 - RNA, 18 nt, Human
gaaacccagcucuggucc

SEQ ID NO: 1805397 - RNA, 19 nt, Human
gaaacccagcucuggucca

SEQ ID NO: 1805398 - RNA, 17 nt, Human
gaaagcccugagcuuuc

SEQ ID NO: 1805399 - RNA, 21 nt, Human
gaaagcccugagcuuucugcu

SEQ ID NO: 1805400 - RNA, 22 nt, Human
gaaagcccugagcuuucugcua

SEQ ID NO: 1805401 - RNA, 14 nt, Human
gaaagcagggacuu

SEQ ID NO: 1805402 - RNA, 19 nt, Human
gaaagacuuuuccaacccu

SEQ ID NO: 1805403 - RNA, 21 nt, Human
gaaagaggaaugaaguacuca

SEQ ID NO: 1805404 - RNA, 21 nt, Human
gaaagaguacucuuguuuccu

SEQ ID NO: 1805405 - RNA, 15 nt, Human
gaaagaguaggaaga

SEQ ID NO: 1805406 - RNA, 16 nt, Human
gaaagaguaggaagac

SEQ ID NO: 1805407 - RNA, 17 nt, Human
gaaagcagaacagugau

SEQ ID NO: 1805408 - RNA, 22 nt, Human
gaaagcagaacagugauuacca

SEQ ID NO: 1805409 - RNA, 13 nt, Human
ccuguagcccuaa

SEQ ID NO: 1805410 - RNA, 15 nt, Human
ccuguagagugggag

SEQ ID NO: 1805411 - RNA, 16 nt, Human
ccuguagagugggagc

SEQ ID NO: 1805412 - RNA, 14 nt, Human
ccugguggcagugg

SEQ ID NO: 1805413 - RNA, 13 nt, Human
ccugguggcagug

SEQ ID NO: 1805414 - RNA, 15 nt, Human
ccugguggcaguggg

SEQ ID NO: 1805415 - RNA, 12 nt, Human
ccuguaccucuu

SEQ ID NO: 1805416 - RNA, 10 nt, Human
ccuguaccuc

SEQ ID NO: 1805417 - RNA, 12 nt, Human
ccugucccccug

SEQ ID NO: 1805418 - RNA, 13 nt, Human
ccugucccccuga

SEQ ID NO: 1805419 - RNA, 14 nt, Human
ccugucccccugac

SEQ ID NO: 1805420 - RNA, 15 nt, Human
ccugucccccugaca

SEQ ID NO: 1805421 - RNA, 16 nt, Human
ccugucccccugacaa

SEQ ID NO: 1805422 - RNA, 18 nt, Human
ccugguggcagcugcggu

SEQ ID NO: 1805423 - RNA, 17 nt, Human
ccugguggcagcugcgg

SEQ ID NO: 1805424 - RNA, 16 nt, Human
ccugguggcagcugcg

SEQ ID NO: 1805425 - RNA, 15 nt, Human
ccugguggcagcugc

SEQ ID NO: 1805426 - RNA, 14 nt, Human
ccugguggcagcug

SEQ ID NO: 1805427 - RNA, 22 nt, Human
ccugguggcagcucaccucucc

SEQ ID NO: 1805428 - RNA, 19 nt, Human
ccugguggcagcucaccuc

SEQ ID NO: 1805429 - RNA, 21 nt, Human
ccugguggcagcucaccucuc

SEQ ID NO: 1805430 - RNA, 18 nt, Human
ccugggagugagcugguu

SEQ ID NO: 1805431 - RNA, 16 nt, Human
ccugggcagaaggaag

SEQ ID NO: 1805432 - RNA, 16 nt, Human
ccugggagugagcugg

SEQ ID NO: 1805433 - RNA, 22 nt, Human
ccugggaggucaaggcugcagu

SEQ ID NO: 1805434 - RNA, 20 nt, Human
ccugggggcugggcagagga

SEQ ID NO: 1805435 - RNA, 21 nt, Human
ccugggggcugggcagaggaa

SEQ ID NO: 1805436 - RNA, 19 nt, Human
ccugggggcugggcagagg

SEQ ID NO: 1805437 - RNA, 17 nt, Human
ccuggcuuuucacugcu

SEQ ID NO: 1805438 - RNA, 16 nt, Human
ccuggcuuuucacugc

SEQ ID NO: 1805439 - RNA, 16 nt, Human
ccuggcccacugcauc

SEQ ID NO: 1805440 - RNA, 20 nt, Human
ccuggccagaugcaccagcc

SEQ ID NO: 1805441 - RNA, 23 nt, Human
ccuggccagaugcaccagcccuu

SEQ ID NO: 1805442 - RNA, 21 nt, Human
ccuggccagaugcaccagccc

SEQ ID NO: 1805443 - RNA, 13 nt, Human
ccuggccacgccc

SEQ ID NO: 1805444 - RNA, 13 nt, Human
ccuggcccacugc

SEQ ID NO: 1805445 - RNA, 14 nt, Human
ccuggcccacugca

SEQ ID NO: 1805446 - RNA, 13 nt, Human
ccuggcacugcuu

SEQ ID NO: 1805447 - RNA, 16 nt, Human
ccuggcacugcuucca

SEQ ID NO: 1805448 - RNA, 13 nt, Human
ccuggcaugggaa

SEQ ID NO: 1805449 - RNA, 21 nt, Human
ccuggcacccggccccugcug

SEQ ID NO: 1805450 - RNA, 20 nt, Human
ccuggcacccggccccugcu

SEQ ID NO: 1805451 - RNA, 12 nt, Human
ccuggcacugcu

SEQ ID NO: 1805452 - RNA, 19 nt, Human
ccuggcacccggccccugc

SEQ ID NO: 1805453 - RNA, 16 nt, Human
ccuggagaacuagaga

SEQ ID NO: 1805454 - RNA, 12 nt, Human
ccuggagaacua

SEQ ID NO: 1805455 - RNA, 13 nt, Human
ccuggagaacuag

SEQ ID NO: 1805456 - RNA, 21 nt, Human
ccugcuaauuccccagauugc

SEQ ID NO: 1805457 - RNA, 20 nt, Human
ccugccuguugggccaggag

SEQ ID NO: 1805458 - RNA, 18 nt, Human
ccugccuguugggccagg

SEQ ID NO: 1805459 - RNA, 19 nt, Human
ccugccuguugggccagga

SEQ ID NO: 1805460 - RNA, 14 nt, Human
ccuggcaugggaau

SEQ ID NO: 1805461 - RNA, 11 nt, Human
ccucuuccuga

SEQ ID NO: 1805462 - RNA, 13 nt, Human
ccugaaagaggaa

SEQ ID NO: 1805463 - RNA, 13 nt, Human
ccugaaagcccug

SEQ ID NO: 1805464 - RNA, 14 nt, Human
ccugaaagcccuga

SEQ ID NO: 1805465 - RNA, 18 nt, Human
ccugaaagcccugagcuu

SEQ ID NO: 1805466 - RNA, 14 nt, Human
ccugaaggccccgc

SEQ ID NO: 1805467 - RNA, 18 nt, Human
ccugaaggccccgcccag

SEQ ID NO: 1805468 - RNA, 19 nt, Human
ccugaaggccccgcccagg

SEQ ID NO: 1805469 - RNA, 22 nt, Human
ccugaaggccccgcccaggcuu

SEQ ID NO: 1805470 - RNA, 20 nt, Human
ccugaaggccccgcccaggc

SEQ ID NO: 1805471 - RNA, 21 nt, Human
ccugaaggccccgcccaggcu

SEQ ID NO: 1805472 - RNA, 15 nt, Human
ccugagcugggauga

SEQ ID NO: 1805473 - RNA, 17 nt, Human
ccugaggcuccacuugg

SEQ ID NO: 1805474 - RNA, 14 nt, Human
ccugaggcuccacu

SEQ ID NO: 1805475 - RNA, 13 nt, Human
ccugaggcuccac

SEQ ID NO: 1805476 - RNA, 13 nt, Human
ccugaggcugggc

SEQ ID NO: 1805477 - RNA, 14 nt, Human
ccugaggcugggcu

SEQ ID NO: 1805478 - RNA, 15 nt, Human
ccugaggcugggcuc

SEQ ID NO: 1805479 - RNA, 16 nt, Human
ccugaggcugggcucc

SEQ ID NO: 1805480 - RNA, 12 nt, Human
ccugagcuggga

SEQ ID NO: 1805481 - RNA, 15 nt, Human
ccugaggcccagagg

SEQ ID NO: 1805482 - RNA, 16 nt, Human
ccugaggcccagaggg

SEQ ID NO: 1805483 - RNA, 17 nt, Human
ccugaggcccagagggc

SEQ ID NO: 1805484 - RNA, 18 nt, Human
ccugaggcccagagggcc

SEQ ID NO: 1805485 - RNA, 15 nt, Human
ccugagccagauuuc

SEQ ID NO: 1805486 - RNA, 16 nt, Human
ccugagccagauuuca

SEQ ID NO: 1805487 - RNA, 18 nt, Human
ccugagccagauuucacu

SEQ ID NO: 1805488 - RNA, 20 nt, Human
ccugaagucacacagugagu

SEQ ID NO: 1805489 - RNA, 19 nt, Human
ccugaaguaagcaaagacu

SEQ ID NO: 1805490 - RNA, 22 nt, Human
ccugaagucuuuguacagacaa

SEQ ID NO: 1805491 - RNA, 20 nt, Human
ccugagccagauuucacucu

SEQ ID NO: 1805492 - RNA, 15 nt, Human
ccugccaccacgccc

SEQ ID NO: 1805493 - RNA, 19 nt, Human
ccugccaccacgcccggcu

SEQ ID NO: 1805494 - RNA, 19 nt, Human
ccugccaauggacuaacuu

SEQ ID NO: 1805495 - RNA, 23 nt, Human
ccugcauuugugaaaugauggug

SEQ ID NO: 1805496 - RNA, 13 nt, Human
ccugccacccugg

SEQ ID NO: 1805497 - RNA, 12 nt, Human
ccugccacccug

SEQ ID NO: 1805498 - RNA, 14 nt, Human
ccugccacccuggg

SEQ ID NO: 1805499 - RNA, 22 nt, Human
ccugccacccuggggagaaagu

SEQ ID NO: 1805500 - RNA, 16 nt, Human
ccugccacccugggga

SEQ ID NO: 1805501 - RNA, 17 nt, Human
ccugcaaagcccagcuu

SEQ ID NO: 1805502 - RNA, 18 nt, Human
ccugcaaagcccagcuug

SEQ ID NO: 1805503 - RNA, 22 nt, Human
ccugcacaaagcccuuccaugu

SEQ ID NO: 1805504 - RNA, 20 nt, Human
ccugcacaaagcccuuccau

SEQ ID NO: 1805505 - RNA, 15 nt, Human
ccugcaaagcccagc

SEQ ID NO: 1805506 - RNA, 16 nt, Human
ccugcaaagcccagcu

SEQ ID NO: 1805507 - RNA, 14 nt, Human
ccugcaaagcccag

SEQ ID NO: 1805508 - RNA, 23 nt, Human
ccugcacaaagcccuuccauguc

SEQ ID NO: 1805509 - RNA, 21 nt, Human
ccugcacacgcuccuuccucu

SEQ ID NO: 1805510 - RNA, 16 nt, Human
ccugcccggcugcgga

SEQ ID NO: 1805511 - RNA, 14 nt, Human
ccugcccggcugcg

SEQ ID NO: 1805512 - RNA, 15 nt, Human
ccugccccucccuuc

SEQ ID NO: 1805513 - RNA, 16 nt, Human
ccugccccucccuuca

SEQ ID NO: 1805514 - RNA, 18 nt, Human
ccugccccucccuucaac

SEQ ID NO: 1805515 - RNA, 18 nt, Human
ccugccccuccucucugc

SEQ ID NO: 1805516 - RNA, 14 nt, Human
ccugccccucccuu

SEQ ID NO: 1805517 - RNA, 19 nt, Human
ccugccccuccucucugcc

SEQ ID NO: 1805518 - RNA, 20 nt, Human
ccugccccuccucucugccc

SEQ ID NO: 1805519 - RNA, 21 nt, Human
ccugccccuccucucugcccu

SEQ ID NO: 1805520 - RNA, 22 nt, Human
ccugccccuccucucugcccua

SEQ ID NO: 1805521 - RNA, 17 nt, Human
ccugccccugagcccau

SEQ ID NO: 1805522 - RNA, 15 nt, Human
ccugccaggcauggu

SEQ ID NO: 1805523 - RNA, 14 nt, Human
ccugccccccagcc

SEQ ID NO: 1805524 - RNA, 12 nt, Human
ccugccaggcau

SEQ ID NO: 1805525 - RNA, 22 nt, Human
ccugccuguucccauucuugca

SEQ ID NO: 1805526 - RNA, 14 nt, Human
ccugccuguugggc

SEQ ID NO: 1805527 - RNA, 14 nt, Human
ccugccucagccuc

SEQ ID NO: 1805528 - RNA, 13 nt, Human
ccugccucagccu

SEQ ID NO: 1805529 - RNA, 12 nt, Human
ccugccucagcc

SEQ ID NO: 1805530 - RNA, 15 nt, Human
ccugcccugugggcc

SEQ ID NO: 1805531 - RNA, 19 nt, Human
ccugcccuuaccugccagg

SEQ ID NO: 1805532 - RNA, 21 nt, Human
ccugcccuuaccugccaggaa

SEQ ID NO: 1805533 - RNA, 22 nt, Human
ccugcccuuaccugccaggaag

SEQ ID NO: 1805534 - RNA, 10 nt, Human
ccugcccugg

SEQ ID NO: 1805535 - RNA, 12 nt, Human
ccugcccuggga

SEQ ID NO: 1805536 - RNA, 14 nt, Human
ccugcccugggagg

SEQ ID NO: 1805537 - RNA, 15 nt, Human
ccugcccugggaggc

SEQ ID NO: 1805538 - RNA, 20 nt, Human
ccugcccugggaggcaguga

SEQ ID NO: 1805539 - RNA, 22 nt, Human
ccugcccugggaggcagugaug

SEQ ID NO: 1805540 - RNA, 14 nt, Human
ccugcccugguuuc

SEQ ID NO: 1805541 - RNA, 19 nt, Human
ccugcccugguuuccugcc

SEQ ID NO: 1805542 - RNA, 20 nt, Human
ccugcccugguuuccugccc

SEQ ID NO: 1805543 - RNA, 21 nt, Human
ccugcccugguuuccugcccu

SEQ ID NO: 1805544 - RNA, 22 nt, Human
ccugcccugguuuccugcccug

SEQ ID NO: 1805545 - RNA, 23 nt, Human
ccugcccugguuuccugcccugg

SEQ ID NO: 1805546 - RNA, 11 nt, Human
ccugcccugug

SEQ ID NO: 1805547 - RNA, 12 nt, Human
ccugcccugugg

SEQ ID NO: 1805548 - RNA, 14 nt, Human
ccugcccugugggc

SEQ ID NO: 1805549 - RNA, 22 nt, Human
ccugccuguugggccaggagcc

SEQ ID NO: 1805550 - RNA, 15 nt, Human
ccuuuuuuggcugcu

SEQ ID NO: 1805551 - RNA, 15 nt, Human
ccuuugugaggaagc

SEQ ID NO: 1805552 - RNA, 16 nt, Human
ccuuugugaggaagcc

SEQ ID NO: 1805553 - RNA, 17 nt, Human
ccuuugugaggaagccg

SEQ ID NO: 1805554 - RNA, 23 nt, Human
ccuuugugaggaagccgcugggg

SEQ ID NO: 1805555 - RNA, 22 nt, Human
ccuuuguccccaccgcagacag

SEQ ID NO: 1805556 - RNA, 23 nt, Human
ccuuuguccccaccgcagacagg

SEQ ID NO: 1805557 - RNA, 14 nt, Human
ccuuugugaggaag

SEQ ID NO: 1805558 - RNA, 21 nt, Human
ccuuuguaaauugucagaugc

SEQ ID NO: 1805559 - RNA, 23 nt, Human
ccuuuguauucucuccuguaccu

SEQ ID NO: 1805560 - RNA, 22 nt, Human
ccuuuguauucucuccuguacc

SEQ ID NO: 1805561 - RNA, 23 nt, Human
ccuuuguaaauugucagaugcug

SEQ ID NO: 1805562 - RNA, 24 nt, Human
ccuuuguauucucuccuguaccuc

SEQ ID NO: 1805563 - RNA, 16 nt, Human
ccuuuguccccaccgc

SEQ ID NO: 1805564 - RNA, 18 nt, Human
ccuuuguccccaccgcag

SEQ ID NO: 1805565 - RNA, 14 nt, Human
ccuuuguccccacc

SEQ ID NO: 1805566 - RNA, 23 nt, Human
cgaaagggacuuggaagcuccgc

SEQ ID NO: 1805567 - RNA, 17 nt, Human
ccuuuuuuggcugcuga

SEQ ID NO: 1805568 - RNA, 18 nt, Human
ccuuuuuuggcugcugaa

SEQ ID NO: 1805569 - RNA, 20 nt, Human
ccuuuuuuggcugcugaagg

SEQ ID NO: 1805570 - RNA, 22 nt, Human
ccuuuuuuggcugcugaaggcu

SEQ ID NO: 1805571 - RNA, 21 nt, Human
cgaacauguuuuucuucuccc

SEQ ID NO: 1805572 - RNA, 23 nt, Human
cgaacauguuuuucuucucccuc

SEQ ID NO: 1805573 - RNA, 15 nt, Human
cgaauagcugggacu

SEQ ID NO: 1805574 - RNA, 16 nt, Human
cgaauagcugggacua

SEQ ID NO: 1805575 - RNA, 11 nt, Human
cgaauauugcu

SEQ ID NO: 1805576 - RNA, 12 nt, Human
cgaauauugcug

SEQ ID NO: 1805577 - RNA, 14 nt, Human
cgaauauugcugau

SEQ ID NO: 1805578 - RNA, 15 nt, Human
cgaauauugcugaug

SEQ ID NO: 1805579 - RNA, 17 nt, Human
cgaauauugcugauggu

SEQ ID NO: 1805580 - RNA, 18 nt, Human
ccuucggccuccauccug

SEQ ID NO: 1805581 - RNA, 17 nt, Human
ccuucggccuccauccu

SEQ ID NO: 1805582 - RNA, 18 nt, Human
ccuuccaugucgccucug

SEQ ID NO: 1805583 - RNA, 17 nt, Human
ccuuccauggacuuugu

SEQ ID NO: 1805584 - RNA, 13 nt, Human
ccuuccaggggug

SEQ ID NO: 1805585 - RNA, 12 nt, Human
ccuucucuccag

SEQ ID NO: 1805586 - RNA, 13 nt, Human
ccuucucuccagc

SEQ ID NO: 1805587 - RNA, 15 nt, Human
ccuucucuccagccc

SEQ ID NO: 1805588 - RNA, 16 nt, Human
ccuucucuccagcccc

SEQ ID NO: 1805589 - RNA, 20 nt, Human
ccugugccucugggacugga

SEQ ID NO: 1805590 - RNA, 18 nt, Human
ccuguggaucaaauccag

SEQ ID NO: 1805591 - RNA, 20 nt, Human
ccuguggaugauaaaacaca

SEQ ID NO: 1805592 - RNA, 20 nt, Human
ccugugggcccccaaaugga

SEQ ID NO: 1805593 - RNA, 22 nt, Human
ccuuggcucaaguccucuuuuc

SEQ ID NO: 1805594 - RNA, 19 nt, Human
ccuuggauuguccccgacc

SEQ ID NO: 1805595 - RNA, 15 nt, Human
ccuuggauugucccc

SEQ ID NO: 1805596 - RNA, 21 nt, Human
ccuugacagggcacaccgggc

SEQ ID NO: 1805597 - RNA, 18 nt, Human
ccuugacagggcacaccg

SEQ ID NO: 1805598 - RNA, 17 nt, Human
ccuucucuccagccccu

SEQ ID NO: 1805599 - RNA, 18 nt, Human
ccuucucuccagccccug

SEQ ID NO: 1805600 - RNA, 23 nt, Human
ccuugacauuguagagcuucugg

SEQ ID NO: 1805601 - RNA, 16 nt, Human
ccuuggcugcagggag

SEQ ID NO: 1805602 - RNA, 14 nt, Human
ccuuggggagcagg

SEQ ID NO: 1805603 - RNA, 21 nt, Human
ccuuggugucgggcaugacac

SEQ ID NO: 1805604 - RNA, 19 nt, Human
ccuuggugucgggcaugac

SEQ ID NO: 1805605 - RNA, 20 nt, Human
ccuuggugucgggcaugaca

SEQ ID NO: 1805606 - RNA, 19 nt, Human
ccuucucuccagccccugg

SEQ ID NO: 1805607 - RNA, 18 nt, Human
cgcuacccgggaaggggg

SEQ ID NO: 1805608 - RNA, 21 nt, Human
cgcuacccgggaagggggcug

SEQ ID NO: 1805609 - RNA, 24 nt, Human
cgcuacccgggaagggggcuggga

SEQ ID NO: 1805610 - RNA, 15 nt, Human
cgcgacaaugcaaac

SEQ ID NO: 1805611 - RNA, 19 nt, Human
cgcgguggcucacgccugu

SEQ ID NO: 1805612 - RNA, 14 nt, Human
cgcgacaaugcaaa

SEQ ID NO: 1805613 - RNA, 21 nt, Human
cgcccagucuggaaugcagug

SEQ ID NO: 1805614 - RNA, 18 nt, Human
cgcccggcuaauuuuugu

SEQ ID NO: 1805615 - RNA, 19 nt, Human
cgcccagucuggaaugcag

SEQ ID NO: 1805616 - RNA, 13 nt, Human
cgcccagucugga

SEQ ID NO: 1805617 - RNA, 18 nt, Human
cgcccaacuaauuuuugu

SEQ ID NO: 1805618 - RNA, 13 nt, Human
cgcagcccugcuu

SEQ ID NO: 1805619 - RNA, 15 nt, Human
cgcagcccugcuuug

SEQ ID NO: 1805620 - RNA, 24 nt, Human
cgcagcccugcuuugggcugcccu

SEQ ID NO: 1805621 - RNA, 18 nt, Human
cgcagcccugcagagggc

SEQ ID NO: 1805622 - RNA, 19 nt, Human
cgcagcccugcagagggca

SEQ ID NO: 1805623 - RNA, 21 nt, Human
cgcugugcugcccugcccacc

SEQ ID NO: 1805624 - RNA, 23 nt, Human
cgcugugcugcccugcccaccug

SEQ ID NO: 1805625 - RNA, 19 nt, Human
cgcugugcugcccugccca

SEQ ID NO: 1805626 - RNA, 11 nt, Human
cgcugugcugc

SEQ ID NO: 1805627 - RNA, 13 nt, Human
cgcugugcugccc

SEQ ID NO: 1805628 - RNA, 14 nt, Human
cgcugugcugcccu

SEQ ID NO: 1805629 - RNA, 17 nt, Human
cggaauaguuggcuagg

SEQ ID NO: 1805630 - RNA, 16 nt, Human
cggaauaguuggcuag

SEQ ID NO: 1805631 - RNA, 14 nt, Human
cgcuuucuacccag

SEQ ID NO: 1805632 - RNA, 16 nt, Human
cgcuuucuacccagcg

SEQ ID NO: 1805633 - RNA, 22 nt, Human
cggacagccacggccaggccag

SEQ ID NO: 1805634 - RNA, 21 nt, Human
cggacagccacggccaggcca

SEQ ID NO: 1805635 - RNA, 16 nt, Human
cggacuuagcugggag

SEQ ID NO: 1805636 - RNA, 17 nt, Human
cggacuuagcugggaga

SEQ ID NO: 1805637 - RNA, 15 nt, Human
cggagaaaggaaggg

SEQ ID NO: 1805638 - RNA, 17 nt, Human
cggagaaaggaagggcu

SEQ ID NO: 1805639 - RNA, 20 nt, Human
cggccaggccagagggagug

SEQ ID NO: 1805640 - RNA, 12 nt, Human
cggccaggccag

SEQ ID NO: 1805641 - RNA, 11 nt, Human
cggccaggcca

SEQ ID NO: 1805642 - RNA, 14 nt, Human
cggcuggcagccca

SEQ ID NO: 1805643 - RNA, 14 nt, Human
cggcuggccuggcc

SEQ ID NO: 1805644 - RNA, 23 nt, Human
cggcuggcagcccaccccucaac

SEQ ID NO: 1805645 - RNA, 13 nt, Human
cggcuggccuggc

SEQ ID NO: 1805646 - RNA, 18 nt, Human
cgggaauuuucaucuagg

SEQ ID NO: 1805647 - RNA, 16 nt, Human
cgggaagggggcuggg

SEQ ID NO: 1805648 - RNA, 19 nt, Human
cgggaagggggcugggaca

SEQ ID NO: 1805649 - RNA, 20 nt, Human
cgggaagggggcugggacau

SEQ ID NO: 1805650 - RNA, 20 nt, Human
cgggaauuuucaucuaggau

SEQ ID NO: 1805651 - RNA, 16 nt, Human
cgaggacagggaggug

SEQ ID NO: 1805652 - RNA, 19 nt, Human
cgagcccugguggcagugg

SEQ ID NO: 1805653 - RNA, 13 nt, Human
cgagccuggcucc

SEQ ID NO: 1805654 - RNA, 23 nt, Human
cgcacuucgggaggucgaggcag

SEQ ID NO: 1805655 - RNA, 17 nt, Human
cgcacugggcuugggga

SEQ ID NO: 1805656 - RNA, 19 nt, Human
cgcagcauauucaggaagc

SEQ ID NO: 1805657 - RNA, 20 nt, Human
cgcagcauauucaggaagcu

SEQ ID NO: 1805658 - RNA, 15 nt, Human
cgcagcccugcagag

SEQ ID NO: 1805659 - RNA, 17 nt, Human
cgcagcccugcagaggg

SEQ ID NO: 1805660 - RNA, 13 nt, Human
cgcacugggcuug

SEQ ID NO: 1805661 - RNA, 23 nt, Human
cucagcggggacagcuccuucug

SEQ ID NO: 1805662 - RNA, 19 nt, Human
cucagcucccaaggcucug

SEQ ID NO: 1805663 - RNA, 15 nt, Human
cucagcucccaaggc

SEQ ID NO: 1805664 - RNA, 21 nt, Human
cucagcggggacagcuccuuc

SEQ ID NO: 1805665 - RNA, 20 nt, Human
cucagcggggacagcuccuu

SEQ ID NO: 1805666 - RNA, 19 nt, Human
cucagcggggacagcuccu

SEQ ID NO: 1805667 - RNA, 18 nt, Human
cucagcggggacagcucc

SEQ ID NO: 1805668 - RNA, 16 nt, Human
cucagcggggacagcu

SEQ ID NO: 1805669 - RNA, 15 nt, Human
cucagcggggacagc

SEQ ID NO: 1805670 - RNA, 14 nt, Human
cucagcggggacag

SEQ ID NO: 1805671 - RNA, 22 nt, Human
cucagcauccuggcacccggcc

SEQ ID NO: 1805672 - RNA, 21 nt, Human
cucagcauccuggcacccggc

SEQ ID NO: 1805673 - RNA, 13 nt, Human
cucagcauccugg

SEQ ID NO: 1805674 - RNA, 19 nt, Human
cucagcaaaagaugcuucu

SEQ ID NO: 1805675 - RNA, 20 nt, Human
cucagcaaaagaugcuucuc

SEQ ID NO: 1805676 - RNA, 16 nt, Human
cucagcaggggagggu

SEQ ID NO: 1805677 - RNA, 21 nt, Human
cucagcaaaagaugcuucuca

SEQ ID NO: 1805678 - RNA, 15 nt, Human
cucagcauccuggca

SEQ ID NO: 1805679 - RNA, 14 nt, Human
cucagcccucccug

SEQ ID NO: 1805680 - RNA, 19 nt, Human
cucagcccucccugccccu

SEQ ID NO: 1805681 - RNA, 20 nt, Human
cucagcccucccugccccuc

SEQ ID NO: 1805682 - RNA, 21 nt, Human
cucagcccucccugccccucc

SEQ ID NO: 1805683 - RNA, 19 nt, Human
cucacuguugcccaggcug

SEQ ID NO: 1805684 - RNA, 18 nt, Human
cucacuguugcccaggcu

SEQ ID NO: 1805685 - RNA, 17 nt, Human
cucacuguugcccaggc

SEQ ID NO: 1805686 - RNA, 16 nt, Human
cucacuguugcccagg

SEQ ID NO: 1805687 - RNA, 15 nt, Human
cucagagccaccccu

SEQ ID NO: 1805688 - RNA, 23 nt, Human
cucagagagggugggagugggcc

SEQ ID NO: 1805689 - RNA, 19 nt, Human
cucagagagggugggagug

SEQ ID NO: 1805690 - RNA, 16 nt, Human
cucagaucuucugugg

SEQ ID NO: 1805691 - RNA, 16 nt, Human
cucacugcagccucaa

SEQ ID NO: 1805692 - RNA, 15 nt, Human
cucacugcagccuca

SEQ ID NO: 1805693 - RNA, 20 nt, Human
cucacugcauccuccgccuc

SEQ ID NO: 1805694 - RNA, 15 nt, Human
cucacuguugcccag

SEQ ID NO: 1805695 - RNA, 14 nt, Human
cucacuguugccca

SEQ ID NO: 1805696 - RNA, 18 nt, Human
cucagcugucaaggcuca

SEQ ID NO: 1805697 - RNA, 19 nt, Human
cucagcugucaaggcucag

SEQ ID NO: 1805698 - RNA, 12 nt, Human
cucaggagcccu

SEQ ID NO: 1805699 - RNA, 13 nt, Human
cucaggagcccug

SEQ ID NO: 1805700 - RNA, 14 nt, Human
cucaggagcccugg

SEQ ID NO: 1805701 - RNA, 15 nt, Human
cucaggagcccuggg

SEQ ID NO: 1805702 - RNA, 16 nt, Human
cucaggagcccuggga

SEQ ID NO: 1805703 - RNA, 17 nt, Human
cucaggagcccugggag

SEQ ID NO: 1805704 - RNA, 20 nt, Human
cucaggagcccugggaggcu

SEQ ID NO: 1805705 - RNA, 21 nt, Human
cucaggagcccugggaggcuc

SEQ ID NO: 1805706 - RNA, 22 nt, Human
cucaggagcccugggaggcucu

SEQ ID NO: 1805707 - RNA, 23 nt, Human
cucaggagcccugggaggcucug

SEQ ID NO: 1805708 - RNA, 24 nt, Human
cucaggagcccugggaggcucugg

SEQ ID NO: 1805709 - RNA, 15 nt, Human
cucaggcagguggga

SEQ ID NO: 1805710 - RNA, 18 nt, Human
cucaggcaggugggaugg

SEQ ID NO: 1805711 - RNA, 18 nt, Human
cucagggccuggcucagg

SEQ ID NO: 1805712 - RNA, 19 nt, Human
cucagggccuggcucaggu

SEQ ID NO: 1805713 - RNA, 20 nt, Human
cucagggccuggcucaggug

SEQ ID NO: 1805714 - RNA, 23 nt, Human
cucaggugauccacccaccucag

SEQ ID NO: 1805715 - RNA, 19 nt, Human
cucagguggggucacucug

SEQ ID NO: 1805716 - RNA, 20 nt, Human
cucagguggggucacucugg

SEQ ID NO: 1805717 - RNA, 21 nt, Human
cucagguggggucacucuggc

SEQ ID NO: 1805718 - RNA, 20 nt, Human
cucagguaaucgaccugccu

SEQ ID NO: 1805719 - RNA, 22 nt, Human
cucagguaaucgaccugccucg

SEQ ID NO: 1805720 - RNA, 24 nt, Human
cucagguaaucgaccugccucggc

SEQ ID NO: 1805721 - RNA, 24 nt, Human
cucagggucccugguggcagcuca

SEQ ID NO: 1805722 - RNA, 14 nt, Human
cucagggccugguc

SEQ ID NO: 1805723 - RNA, 20 nt, Human
cucagggucccugguggcag

SEQ ID NO: 1805724 - RNA, 21 nt, Human
cucagggucccugguggcagc

SEQ ID NO: 1805725 - RNA, 22 nt, Human
cucagggucccugguggcagcu

SEQ ID NO: 1805726 - RNA, 17 nt, Human
cucccaggcgccccuuc

SEQ ID NO: 1805727 - RNA, 19 nt, Human
cucccaggcgccccuuccc

SEQ ID NO: 1805728 - RNA, 20 nt, Human
cucccaggcgccccuucccc

SEQ ID NO: 1805729 - RNA, 22 nt, Human
cucccaggcgccccuucccccu

SEQ ID NO: 1805730 - RNA, 16 nt, Human
cucccaucacuucccu

SEQ ID NO: 1805731 - RNA, 23 nt, Human
cucccaaagugcugggauuacag

SEQ ID NO: 1805732 - RNA, 16 nt, Human
cucccaaagugcuggg

SEQ ID NO: 1805733 - RNA, 16 nt, Human
cucccaacucacccca

SEQ ID NO: 1805734 - RNA, 15 nt, Human
cucccacaaaggaga

SEQ ID NO: 1805735 - RNA, 14 nt, Human
cucccaacucaccc

SEQ ID NO: 1805736 - RNA, 15 nt, Human
cucccaacucacccc

SEQ ID NO: 1805737 - RNA, 22 nt, Human
cuccagcuggccgggagccuga

SEQ ID NO: 1805738 - RNA, 23 nt, Human
cuccagcuggccgggagccugau

SEQ ID NO: 1805739 - RNA, 13 nt, Human
cuccaugcugccu

SEQ ID NO: 1805740 - RNA, 14 nt, Human
cuccaugcugccuc

SEQ ID NO: 1805741 - RNA, 15 nt, Human
cuccaugcugccucc

SEQ ID NO: 1805742 - RNA, 16 nt, Human
cuccaugcugccucca

SEQ ID NO: 1805743 - RNA, 17 nt, Human
cuccaugcugccuccag

SEQ ID NO: 1805744 - RNA, 23 nt, Human
cucccgaauagcugggacuacag

SEQ ID NO: 1805745 - RNA, 20 nt, Human
cucccgaauagcugggacua

SEQ ID NO: 1805746 - RNA, 21 nt, Human
cucccuucaaccauuccccau

SEQ ID NO: 1805747 - RNA, 22 nt, Human
cucccuucaaccauuccccaug

SEQ ID NO: 1805748 - RNA, 23 nt, Human
cucccuucaaccauuccccaugg

SEQ ID NO: 1805749 - RNA, 15 nt, Human
cucccuucauccuuc

SEQ ID NO: 1805750 - RNA, 18 nt, Human
cucccucagucuggcccu

SEQ ID NO: 1805751 - RNA, 20 nt, Human
cuccccagccccaucccaaa

SEQ ID NO: 1805752 - RNA, 21 nt, Human
cuccccugcuggguguggcgc

SEQ ID NO: 1805753 - RNA, 23 nt, Human
cuccccugcuggguguggcgcag

SEQ ID NO: 1805754 - RNA, 21 nt, Human
cucauuugucacacacuuugg

SEQ ID NO: 1805755 - RNA, 21 nt, Human
cuccaaacccucgaggcggau

SEQ ID NO: 1805756 - RNA, 15 nt, Human
cuccaaacccucgag

SEQ ID NO: 1805757 - RNA, 17 nt, Human
cuccaaacccucgaggc

SEQ ID NO: 1805758 - RNA, 12 nt, Human
cucauucuucug

SEQ ID NO: 1805759 - RNA, 17 nt, Human
cucauugaccugaggcc

SEQ ID NO: 1805760 - RNA, 22 nt, Human
cucauucuccuuguguuacuaa

SEQ ID NO: 1805761 - RNA, 18 nt, Human
cucauucuccuuguguua

SEQ ID NO: 1805762 - RNA, 19 nt, Human
cucauugaccugaggcccu

SEQ ID NO: 1805763 - RNA, 21 nt, Human
cucauugaccugaggcccuuc

SEQ ID NO: 1805764 - RNA, 16 nt, Human
cuccagagucagaagu

SEQ ID NO: 1805765 - RNA, 21 nt, Human
cuccagaccccuggcuuuuca

SEQ ID NO: 1805766 - RNA, 14 nt, Human
cuccacuggaugga

SEQ ID NO: 1805767 - RNA, 18 nt, Human
cuccagcucaccagcccc

SEQ ID NO: 1805768 - RNA, 16 nt, Human
cuccagcucaccagcc

SEQ ID NO: 1805769 - RNA, 15 nt, Human
cuccagcucaccagc

SEQ ID NO: 1805770 - RNA, 11 nt, Human
cuccagccccu

SEQ ID NO: 1805771 - RNA, 13 nt, Human
cuccagccccugg

SEQ ID NO: 1805772 - RNA, 14 nt, Human
cuccagccccugga

SEQ ID NO: 1805773 - RNA, 14 nt, Human
cuccacugccuucg

SEQ ID NO: 1805774 - RNA, 15 nt, Human
cuccacugccuucga

SEQ ID NO: 1805775 - RNA, 16 nt, Human
cuccacugccuucgau

SEQ ID NO: 1805776 - RNA, 13 nt, Human
cuccacuggaugg

SEQ ID NO: 1805777 - RNA, 13 nt, Human
cuccacugccuuc

SEQ ID NO: 1805778 - RNA, 22 nt, Human
cuccaaguccacaguggaacca

SEQ ID NO: 1805779 - RNA, 12 nt, Human
cuauaauuuaaa

SEQ ID NO: 1805780 - RNA, 13 nt, Human
cuauaauuuaaau

SEQ ID NO: 1805781 - RNA, 20 nt, Human
cuaggaacacuccuucacag

SEQ ID NO: 1805782 - RNA, 15 nt, Human
cuaggaagacuuugg

SEQ ID NO: 1805783 - RNA, 17 nt, Human
cuaggaagacuuuggaa

SEQ ID NO: 1805784 - RNA, 21 nt, Human
cuauagccuaggugacagagu

SEQ ID NO: 1805785 - RNA, 20 nt, Human
cuauagccuaggugacagag

SEQ ID NO: 1805786 - RNA, 18 nt, Human
cuauagccuaggugacag

SEQ ID NO: 1805787 - RNA, 19 nt, Human
cuauagccuaggugacaga

SEQ ID NO: 1805788 - RNA, 19 nt, Human
cuaugauuuggaaaauaaa

SEQ ID NO: 1805789 - RNA, 20 nt, Human
cuaugauuuaauuugaaaua

SEQ ID NO: 1805790 - RNA, 19 nt, Human
cuaugauuuaauuugaaau

SEQ ID NO: 1805791 - RNA, 15 nt, Human
cuaugauuuggaaaa

SEQ ID NO: 1805792 - RNA, 22 nt, Human
cuaugaaguuuuuuuuauacag

SEQ ID NO: 1805793 - RNA, 19 nt, Human
cuaugggggcacugaggac

SEQ ID NO: 1805794 - RNA, 13 nt, Human
cuauguaucaaug

SEQ ID NO: 1805795 - RNA, 16 nt, Human
cuauguaucaaugagu

SEQ ID NO: 1805796 - RNA, 17 nt, Human
cuauucaguaauaacuc

SEQ ID NO: 1805797 - RNA, 23 nt, Human
cuauucaguaauaacucuacccu

SEQ ID NO: 1805798 - RNA, 14 nt, Human
cucaacucuccucc

SEQ ID NO: 1805799 - RNA, 17 nt, Human
cucaaauuucuaaaucu

SEQ ID NO: 1805800 - RNA, 15 nt, Human
cucaaauuucuaaau

SEQ ID NO: 1805801 - RNA, 14 nt, Human
cucaaauuucuaaa

SEQ ID NO: 1805802 - RNA, 19 nt, Human
cucaacucuccuccagagu

SEQ ID NO: 1805803 - RNA, 16 nt, Human
cucaacucuccuccag

SEQ ID NO: 1805804 - RNA, 18 nt, Human
cucaacucuccuccagag

SEQ ID NO: 1805805 - RNA, 14 nt, Human
cucaaguccucuuu

SEQ ID NO: 1805806 - RNA, 23 nt, Human
cucacacggacacucaaaagcug

SEQ ID NO: 1805807 - RNA, 17 nt, Human
cucacagaacccuugga

SEQ ID NO: 1805808 - RNA, 11 nt, Human
cuauugguaaa

SEQ ID NO: 1805809 - RNA, 16 nt, Human
cuauugcugcuugagg

SEQ ID NO: 1805810 - RNA, 23 nt, Human
cuagaaaugauccccagcuguuu

SEQ ID NO: 1805811 - RNA, 20 nt, Human
cuacuguccuacccacccuc

SEQ ID NO: 1805812 - RNA, 17 nt, Human
cuacuuagcaugucccu

SEQ ID NO: 1805813 - RNA, 22 nt, Human
cuacuuagcaugucccuaccga

SEQ ID NO: 1805814 - RNA, 21 nt, Human
cuagagguucaaagauauuuu

SEQ ID NO: 1805815 - RNA, 18 nt, Human
cuagagguucaaagauau

SEQ ID NO: 1805816 - RNA, 17 nt, Human
cuagagguucaaagaua

SEQ ID NO: 1805817 - RNA, 15 nt, Human
cuacucgaguuacag

SEQ ID NO: 1805818 - RNA, 16 nt, Human
cuacucgaguuacaga

SEQ ID NO: 1805819 - RNA, 19 nt, Human
cuacucgaguuacagacaa

SEQ ID NO: 1805820 - RNA, 17 nt, Human
cuaccgagucucuucuc

SEQ ID NO: 1805821 - RNA, 19 nt, Human
cuaccgagucucuucucca

SEQ ID NO: 1805822 - RNA, 23 nt, Human
cuaccgagucucuucuccacugg

SEQ ID NO: 1805823 - RNA, 21 nt, Human
cuaccgagucucuucuccacu

SEQ ID NO: 1805824 - RNA, 22 nt, Human
cuaccgagucucuucuccacug

SEQ ID NO: 1805825 - RNA, 19 nt, Human
cuacuguccuacccacccu

SEQ ID NO: 1805826 - RNA, 13 nt, Human
cuacucuguguca

SEQ ID NO: 1805827 - RNA, 12 nt, Human
cuacucuguguc

SEQ ID NO: 1805828 - RNA, 23 nt, Human
cuagccuuagaagucacacagua

SEQ ID NO: 1805829 - RNA, 22 nt, Human
cuagccuuagaagucacacagu

SEQ ID NO: 1805830 - RNA, 21 nt, Human
cuagccuuagaagucacacag

SEQ ID NO: 1805831 - RNA, 22 nt, Human
cuagccugugccucugggacug

SEQ ID NO: 1805832 - RNA, 21 nt, Human
cuagccugugccucugggacu

SEQ ID NO: 1805833 - RNA, 19 nt, Human
cuagccugugccucuggga

SEQ ID NO: 1805834 - RNA, 16 nt, Human
cuagauacuguaucau

SEQ ID NO: 1805835 - RNA, 13 nt, Human
cuagauacuguau

SEQ ID NO: 1805836 - RNA, 24 nt, Human
cuagauacuguaucaugacaaaga

SEQ ID NO: 1805837 - RNA, 22 nt, Human
cuacauuauaaaugucucuuua

SEQ ID NO: 1805838 - RNA, 14 nt, Human
cuacauucuguuaa

SEQ ID NO: 1805839 - RNA, 13 nt, Human
cuacauucuguua

SEQ ID NO: 1805840 - RNA, 17 nt, Human
cuacccagcgagcccug

SEQ ID NO: 1805841 - RNA, 15 nt, Human
cuacccagcgagccc

SEQ ID NO: 1805842 - RNA, 13 nt, Human
cuacccacccucc

SEQ ID NO: 1805843 - RNA, 18 nt, Human
cuacccagcgagcccugg

SEQ ID NO: 1805844 - RNA, 13 nt, Human
cuacccaggugcu

SEQ ID NO: 1805845 - RNA, 17 nt, Human
cuacccucuuagaaaaa

SEQ ID NO: 1805846 - RNA, 20 nt, Human
cuacagaggccaugggccuc

SEQ ID NO: 1805847 - RNA, 18 nt, Human
cuacagaggccaugggcc

SEQ ID NO: 1805848 - RNA, 22 nt, Human
cuacagaggccaugggccuccu

SEQ ID NO: 1805849 - RNA, 13 nt, Human
cuacacugugcug

SEQ ID NO: 1805850 - RNA, 14 nt, Human
cuacacugugcuga

SEQ ID NO: 1805851 - RNA, 17 nt, Human
cuacacugugcugaguc

SEQ ID NO: 1805852 - RNA, 21 nt, Human
cuacagcuaaucagcauucuc

SEQ ID NO: 1805853 - RNA, 22 nt, Human
cuacagcuaaucagcauucuca

SEQ ID NO: 1805854 - RNA, 18 nt, Human
cuacagcuaaucagcauu

SEQ ID NO: 1805855 - RNA, 19 nt, Human
cuacagcuaaucagcauuc

SEQ ID NO: 1805856 - RNA, 23 nt, Human
cuacagcuugaccgugaggccag

SEQ ID NO: 1805857 - RNA, 19 nt, Human
cuacagcuugaccgugagg

SEQ ID NO: 1805858 - RNA, 22 nt, Human
cuacagcuugaccgugaggcca

SEQ ID NO: 1805859 - RNA, 13 nt, Human
cuacaguccuccc

SEQ ID NO: 1805860 - RNA, 18 nt, Human
cuacauggaguauauguc

SEQ ID NO: 1805861 - RNA, 20 nt, Human
cuacauggaguauaugucaa

SEQ ID NO: 1805862 - RNA, 16 nt, Human
cuacaggugugaguca

SEQ ID NO: 1805863 - RNA, 14 nt, Human
cuacaggugugagu

SEQ ID NO: 1805864 - RNA, 16 nt, Human
cuacaggagugagcac

SEQ ID NO: 1805865 - RNA, 15 nt, Human
cuacaggagugagca

SEQ ID NO: 1805866 - RNA, 14 nt, Human
cuacaggagugagc

SEQ ID NO: 1805867 - RNA, 17 nt, Human
cuacaggcacccaccau

SEQ ID NO: 1805868 - RNA, 15 nt, Human
cuacaggcacccacc

SEQ ID NO: 1805869 - RNA, 23 nt, Human
cuacacgagauacagaauuuuau

SEQ ID NO: 1805870 - RNA, 15 nt, Human
cuaauuccacagcug

SEQ ID NO: 1805871 - RNA, 16 nt, Human
cuaauuccacagcugc

SEQ ID NO: 1805872 - RNA, 14 nt, Human
cuaauuccacagcu

SEQ ID NO: 1805873 - RNA, 21 nt, Human
cuacacaggggaaaagaggag

SEQ ID NO: 1805874 - RNA, 18 nt, Human
cuaauauguaacaagcca

SEQ ID NO: 1805875 - RNA, 20 nt, Human
cuaaucagcauucucacucc

SEQ ID NO: 1805876 - RNA, 21 nt, Human
cuaaucagcauucucacuccu

SEQ ID NO: 1805877 - RNA, 15 nt, Human
cuaaugcgcaggcug

SEQ ID NO: 1805878 - RNA, 16 nt, Human
cuaaugcgcaggcugg

SEQ ID NO: 1805879 - RNA, 19 nt, Human
cuaaugcgcaggcuggccc

SEQ ID NO: 1805880 - RNA, 20 nt, Human
cuaaugcgcaggcuggcccu

SEQ ID NO: 1805881 - RNA, 13 nt, Human
cuaaugggacacu

SEQ ID NO: 1805882 - RNA, 12 nt, Human
cuaaugggacac

SEQ ID NO: 1805883 - RNA, 22 nt, Human
cuaaugcgcaggcuggcccugc

SEQ ID NO: 1805884 - RNA, 23 nt, Human
cuaaugcgcaggcuggcccugcc

SEQ ID NO: 1805885 - RNA, 22 nt, Human
cuaauuauacccccugcaaagc

SEQ ID NO: 1805886 - RNA, 21 nt, Human
cuaagcuucacuguaaaauaa

SEQ ID NO: 1805887 - RNA, 22 nt, Human
cuaagcuauucaguaauaacuc

SEQ ID NO: 1805888 - RNA, 17 nt, Human
cuaauaacaugugaaaa

SEQ ID NO: 1805889 - RNA, 14 nt, Human
cuaauaaagcugug

SEQ ID NO: 1805890 - RNA, 23 nt, Human
cuaauagacaauuuauuauggca

SEQ ID NO: 1805891 - RNA, 19 nt, Human
cuaauagacaauuuauuau

SEQ ID NO: 1805892 - RNA, 17 nt, Human
cuaauagacaauuuauu

SEQ ID NO: 1805893 - RNA, 12 nt, Human
cuaaacugcccc

SEQ ID NO: 1805894 - RNA, 13 nt, Human
cuaaacugccccc

SEQ ID NO: 1805895 - RNA, 22 nt, Human
cuaaaugaaaaucgugacaaca

SEQ ID NO: 1805896 - RNA, 17 nt, Human
cuaaauauauuuuaaga

SEQ ID NO: 1805897 - RNA, 21 nt, Human
cuaaaucuccaaaauaaaacu

SEQ ID NO: 1805898 - RNA, 21 nt, Human
cuaaacugcccccucugcccu

SEQ ID NO: 1805899 - RNA, 23 nt, Human
cgggaccccgagccuggcuccaa

SEQ ID NO: 1805900 - RNA, 20 nt, Human
cgggaggcagagguugcagu

SEQ ID NO: 1805901 - RNA, 23 nt, Human
cgggaggauguucugggacacag

SEQ ID NO: 1805902 - RNA, 20 nt, Human
cguuuguuccccaagacauu

SEQ ID NO: 1805903 - RNA, 18 nt, Human
cuaaaauaauuuuguaau

SEQ ID NO: 1805904 - RNA, 17 nt, Human
cuaaaauaauuuuguaa

SEQ ID NO: 1805905 - RNA, 15 nt, Human
cuaaaauaauuuugu

SEQ ID NO: 1805906 - RNA, 14 nt, Human
cuaaccacgcugga

SEQ ID NO: 1805907 - RNA, 12 nt, Human
cuaaccacgcug

SEQ ID NO: 1805908 - RNA, 20 nt, Human
cuaacaacauuguagccuca

SEQ ID NO: 1805909 - RNA, 16 nt, Human
cuaaauucaugcugcu

SEQ ID NO: 1805910 - RNA, 19 nt, Human
cuaaauugacacuuaaaaa

SEQ ID NO: 1805911 - RNA, 13 nt, Human
cuaagagggaggg

SEQ ID NO: 1805912 - RNA, 15 nt, Human
cuaagagggagggag

SEQ ID NO: 1805913 - RNA, 22 nt, Human
cuaagagggagggagggcucca

SEQ ID NO: 1805914 - RNA, 23 nt, Human
cuaagagggagggagggcuccag

SEQ ID NO: 1805915 - RNA, 13 nt, Human
cguuuucaaaauu

SEQ ID NO: 1805916 - RNA, 19 nt, Human
cccuguuuguuucugaaag

SEQ ID NO: 1805917 - RNA, 17 nt, Human
cccuuaccugccaggaa

SEQ ID NO: 1805918 - RNA, 20 nt, Human
cccuuaccugccaggaagcc

SEQ ID NO: 1805919 - RNA, 23 nt, Human
cccuuaccugccaggaagccagc

SEQ ID NO: 1805920 - RNA, 13 nt, Human
cccuguucuggca

SEQ ID NO: 1805921 - RNA, 14 nt, Human
cccuguucuggcag

SEQ ID NO: 1805922 - RNA, 15 nt, Human
cccuguaggccucag

SEQ ID NO: 1805923 - RNA, 14 nt, Human
cccuguaggccuca

SEQ ID NO: 1805924 - RNA, 15 nt, Human
cccuggugcugccac

SEQ ID NO: 1805925 - RNA, 15 nt, Human
cccugguggcagugg

SEQ ID NO: 1805926 - RNA, 14 nt, Human
cccugguggcagug

SEQ ID NO: 1805927 - RNA, 13 nt, Human
cccugguggcagu

SEQ ID NO: 1805928 - RNA, 21 nt, Human
cccugguggcagcucaccucu

SEQ ID NO: 1805929 - RNA, 21 nt, Human
cccuggugaccagcaccaucu

SEQ ID NO: 1805930 - RNA, 13 nt, Human
cccuggugcugcc

SEQ ID NO: 1805931 - RNA, 14 nt, Human
cccuggugcugcca

SEQ ID NO: 1805932 - RNA, 14 nt, Human
cccuuagcagggaa

SEQ ID NO: 1805933 - RNA, 20 nt, Human
cccuuagaaguuuguuguga

SEQ ID NO: 1805934 - RNA, 15 nt, Human
cccuuacgugagucc

SEQ ID NO: 1805935 - RNA, 17 nt, Human
cccuuacgugaguccug

SEQ ID NO: 1805936 - RNA, 23 nt, Human
cccuuagcagggaaacagcuaau

SEQ ID NO: 1805937 - RNA, 20 nt, Human
cccuuccaugucgccucugc

SEQ ID NO: 1805938 - RNA, 12 nt, Human
cccuuccaugga

SEQ ID NO: 1805939 - RNA, 14 nt, Human
cccuucaaccauuc

SEQ ID NO: 1805940 - RNA, 18 nt, Human
cccuucaaccauucccca

SEQ ID NO: 1805941 - RNA, 21 nt, Human
cccugcucuccgaccagacac

SEQ ID NO: 1805942 - RNA, 22 nt, Human
cccugcucuccgaccagacacc

SEQ ID NO: 1805943 - RNA, 21 nt, Human
cccugcugagucccaggcuga

SEQ ID NO: 1805944 - RNA, 23 nt, Human
cccugcugagucccaggcugagc

SEQ ID NO: 1805945 - RNA, 15 nt, Human
cccugccucucugca

SEQ ID NO: 1805946 - RNA, 19 nt, Human
cccugcgggucacaggagg

SEQ ID NO: 1805947 - RNA, 21 nt, Human
cccugcgggucacaggaggga

SEQ ID NO: 1805948 - RNA, 12 nt, Human
cccugaggccca

SEQ ID NO: 1805949 - RNA, 13 nt, Human
cccugccucucug

SEQ ID NO: 1805950 - RNA, 14 nt, Human
cccugccucucugc

SEQ ID NO: 1805951 - RNA, 11 nt, Human
cccugccuccu

SEQ ID NO: 1805952 - RNA, 16 nt, Human
cccuggugcugccaca

SEQ ID NO: 1805953 - RNA, 11 nt, Human
cccucugccca

SEQ ID NO: 1805954 - RNA, 15 nt, Human
cccucugcccacucc

SEQ ID NO: 1805955 - RNA, 18 nt, Human
cccucugcccacucccug

SEQ ID NO: 1805956 - RNA, 19 nt, Human
cccucugcccacucccugc

SEQ ID NO: 1805957 - RNA, 12 nt, Human
cccucugcccug

SEQ ID NO: 1805958 - RNA, 13 nt, Human
cccucugcccugc

SEQ ID NO: 1805959 - RNA, 14 nt, Human
cccucugcccugcg

SEQ ID NO: 1805960 - RNA, 12 nt, Human
cccucuuucccu

SEQ ID NO: 1805961 - RNA, 17 nt, Human
cccucuuucccucccuu

SEQ ID NO: 1805962 - RNA, 20 nt, Human
cccucuuucccucccuuccu

SEQ ID NO: 1805963 - RNA, 12 nt, Human
cccucuggcucc

SEQ ID NO: 1805964 - RNA, 16 nt, Human
cccucuggcuccagcu

SEQ ID NO: 1805965 - RNA, 17 nt, Human
cccucuggcuccagcug

SEQ ID NO: 1805966 - RNA, 22 nt, Human
cccucuggcuccagcuggccgg

SEQ ID NO: 1805967 - RNA, 20 nt, Human
cccucuguucugcacacagc

SEQ ID NO: 1805968 - RNA, 21 nt, Human
cccucuguucugcacacagca

SEQ ID NO: 1805969 - RNA, 12 nt, Human
cccucuggggcu

SEQ ID NO: 1805970 - RNA, 14 nt, Human
cccucccacagcgc

SEQ ID NO: 1805971 - RNA, 12 nt, Human
cccgcucagccc

SEQ ID NO: 1805972 - RNA, 13 nt, Human
cccgcucagcccu

SEQ ID NO: 1805973 - RNA, 12 nt, Human
cccucccacagc

SEQ ID NO: 1805974 - RNA, 14 nt, Human
cccgcucagcccuc

SEQ ID NO: 1805975 - RNA, 23 nt, Human
cccucccucuuucccucccuucc

SEQ ID NO: 1805976 - RNA, 14 nt, Human
cccucccugccccu

SEQ ID NO: 1805977 - RNA, 15 nt, Human
cccgcucagcccucc

SEQ ID NO: 1805978 - RNA, 16 nt, Human
ccuaccgagucucuuc

SEQ ID NO: 1805979 - RNA, 17 nt, Human
ccuaccgagucucuucu

SEQ ID NO: 1805980 - RNA, 20 nt, Human
ccuacaguguacagucuugu

SEQ ID NO: 1805981 - RNA, 16 nt, Human
ccuacaguguacaguc

SEQ ID NO: 1805982 - RNA, 21 nt, Human
ccuacaguugaaaaacagcug

SEQ ID NO: 1805983 - RNA, 21 nt, Human
ccuaccgagucucuucuccac

SEQ ID NO: 1805984 - RNA, 19 nt, Human
ccuaccgagucucuucucc

SEQ ID NO: 1805985 - RNA, 20 nt, Human
ccuaccgagucucuucucca

SEQ ID NO: 1805986 - RNA, 18 nt, Human
ccuaggugacagagugag

SEQ ID NO: 1805987 - RNA, 11 nt, Human
ccguggcuucc

SEQ ID NO: 1805988 - RNA, 15 nt, Human
ccuacaguguacagu

SEQ ID NO: 1805989 - RNA, 18 nt, Human
ccuacaggagugagcacu

SEQ ID NO: 1805990 - RNA, 15 nt, Human
ccuaacgaaguaucc

SEQ ID NO: 1805991 - RNA, 14 nt, Human
ccguggcuucccgc

SEQ ID NO: 1805992 - RNA, 13 nt, Human
ccgggccacagag

SEQ ID NO: 1805993 - RNA, 22 nt, Human
ccgggcacucagaagacacuga

SEQ ID NO: 1805994 - RNA, 21 nt, Human
ccggcuccaggcuccuuuagc

SEQ ID NO: 1805995 - RNA, 16 nt, Human
ccggcuccaggcuccu

SEQ ID NO: 1805996 - RNA, 18 nt, Human
ccgugaggccagagacac

SEQ ID NO: 1805997 - RNA, 18 nt, Human
ccgggcucugccucccau

SEQ ID NO: 1805998 - RNA, 14 nt, Human
ccgggcucugccuc

SEQ ID NO: 1805999 - RNA, 15 nt, Human
ccgggcucugccucc

SEQ ID NO: 1806000 - RNA, 15 nt, Human
ccggaggggccuggc

SEQ ID NO: 1806001 - RNA, 16 nt, Human
ccggaggggccuggca

SEQ ID NO: 1806002 - RNA, 14 nt, Human
ccggaggggccugg

SEQ ID NO: 1806003 - RNA, 14 nt, Human
ccgcuggggccagu

SEQ ID NO: 1806004 - RNA, 11 nt, Human
ccgcuggggcc

SEQ ID NO: 1806005 - RNA, 16 nt, Human
ccgaguagcugggacu

SEQ ID NO: 1806006 - RNA, 14 nt, Human
ccgaguagcuggga

SEQ ID NO: 1806007 - RNA, 20 nt, Human
ccgaguagcugagauuauag

SEQ ID NO: 1806008 - RNA, 14 nt, Human
ccgagucucuucuc

SEQ ID NO: 1806009 - RNA, 16 nt, Human
ccgagucucuucucca

SEQ ID NO: 1806010 - RNA, 18 nt, Human
ccgagucucuucuccacu

SEQ ID NO: 1806011 - RNA, 19 nt, Human
ccgagcuuugaaaauucag

SEQ ID NO: 1806012 - RNA, 15 nt, Human
ccgcagacaggacca

SEQ ID NO: 1806013 - RNA, 19 nt, Human
ccgagucucuucuccacug

SEQ ID NO: 1806014 - RNA, 20 nt, Human
ccgagucucuucuccacugg

SEQ ID NO: 1806015 - RNA, 21 nt, Human
ccgagucucuucuccacugga

SEQ ID NO: 1806016 - RNA, 23 nt, Human
ccgcacugggcuuggggaccaga

SEQ ID NO: 1806017 - RNA, 18 nt, Human
ccgagauagccaaggcca

SEQ ID NO: 1806018 - RNA, 21 nt, Human
ccgagauugcaccacugcacu

SEQ ID NO: 1806019 - RNA, 15 nt, Human
ccgagauugcaccac

SEQ ID NO: 1806020 - RNA, 19 nt, Human
ccgagauugcaccacugca

SEQ ID NO: 1806021 - RNA, 14 nt, Human
cccaugagccucag

SEQ ID NO: 1806022 - RNA, 12 nt, Human
cccaucugugaa

SEQ ID NO: 1806023 - RNA, 19 nt, Human
cccaucucuacaaaaagca

SEQ ID NO: 1806024 - RNA, 14 nt, Human
cccaguugggugga

SEQ ID NO: 1806025 - RNA, 14 nt, Human
cccaucucuucugg

SEQ ID NO: 1806026 - RNA, 15 nt, Human
ccccaccgcagacag

SEQ ID NO: 1806027 - RNA, 19 nt, Human
ccccaccgcagacaggacc

SEQ ID NO: 1806028 - RNA, 21 nt, Human
ccccacccaagggccuggccu

SEQ ID NO: 1806029 - RNA, 15 nt, Human
ccccuccucucugcc

SEQ ID NO: 1806030 - RNA, 17 nt, Human
ccccuccucucugcccu

SEQ ID NO: 1806031 - RNA, 22 nt, Human
ccccuccuccuggacuccugca

SEQ ID NO: 1806032 - RNA, 18 nt, Human
ccccuccuccuggacucc

SEQ ID NO: 1806033 - RNA, 12 nt, Human
ccccuccaugug

SEQ ID NO: 1806034 - RNA, 15 nt, Human
ccccucccuucaacc

SEQ ID NO: 1806035 - RNA, 16 nt, Human
ccccucagggucccug

SEQ ID NO: 1806036 - RNA, 23 nt, Human
ccccuccaaucccaccaacccuc

SEQ ID NO: 1806037 - RNA, 20 nt, Human
ccccucauagcccucacccu

SEQ ID NO: 1806038 - RNA, 21 nt, Human
cccccucuggcuccagcuggc

SEQ ID NO: 1806039 - RNA, 17 nt, Human
cccccugacaacacuca

SEQ ID NO: 1806040 - RNA, 12 nt, Human
cccccucuggcu

SEQ ID NO: 1806041 - RNA, 19 nt, Human
cccccucuggcuccagcug

SEQ ID NO: 1806042 - RNA, 21 nt, Human
cccccugcaaagcccagcuug

SEQ ID NO: 1806043 - RNA, 18 nt, Human
cccccugcaaagcccagc

SEQ ID NO: 1806044 - RNA, 19 nt, Human
cccccugcaaagcccagcu

SEQ ID NO: 1806045 - RNA, 19 nt, Human
cccccugacaacacucauu

SEQ ID NO: 1806046 - RNA, 12 nt, Human
cccccagccugc

SEQ ID NO: 1806047 - RNA, 16 nt, Human
ccccucaacaccucug

SEQ ID NO: 1806048 - RNA, 23 nt, Human
ccccucaacucuccuccagaguc

SEQ ID NO: 1806049 - RNA, 15 nt, Human
ccccucaacaccucu

SEQ ID NO: 1806050 - RNA, 20 nt, Human
ccccagugcccacaggauca

SEQ ID NO: 1806051 - RNA, 16 nt, Human
ccccagugcccacagg

SEQ ID NO: 1806052 - RNA, 15 nt, Human
ccccagugcccacag

SEQ ID NO: 1806053 - RNA, 14 nt, Human
ccccagugcccaca

SEQ ID NO: 1806054 - RNA, 22 nt, Human
ccccauaauuuuuuuuuuccuu

SEQ ID NO: 1806055 - RNA, 15 nt, Human
cccccacuggugaca

SEQ ID NO: 1806056 - RNA, 11 nt, Human
cccccacuggu

SEQ ID NO: 1806057 - RNA, 13 nt, Human
cccccacugguga

SEQ ID NO: 1806058 - RNA, 17 nt, Human
ccccaucauugguaccc

SEQ ID NO: 1806059 - RNA, 14 nt, Human
ccccauccucugua

SEQ ID NO: 1806060 - RNA, 24 nt, Human
cccccacccaagggccuggccuga

SEQ ID NO: 1806061 - RNA, 13 nt, Human
cccccacccaagg

SEQ ID NO: 1806062 - RNA, 18 nt, Human
ccccuggaugcagccuca

SEQ ID NO: 1806063 - RNA, 19 nt, Human
ccccuggaugcagccucac

SEQ ID NO: 1806064 - RNA, 15 nt, Human
ccccuggaugcagcc

SEQ ID NO: 1806065 - RNA, 20 nt, Human
ccccugcugguucaggguug

SEQ ID NO: 1806066 - RNA, 15 nt, Human
ccccugcugguucag

SEQ ID NO: 1806067 - RNA, 13 nt, Human
ccccugcugguuc

SEQ ID NO: 1806068 - RNA, 11 nt, Human
ccccugcuggu

SEQ ID NO: 1806069 - RNA, 14 nt, Human
ccccugcugggugu

SEQ ID NO: 1806070 - RNA, 17 nt, Human
ccccugcuggguguggc

SEQ ID NO: 1806071 - RNA, 19 nt, Human
ccccugcccggcugcggaa

SEQ ID NO: 1806072 - RNA, 17 nt, Human
ccccugcccggcugcgg

SEQ ID NO: 1806073 - RNA, 13 nt, Human
ccccucugcccug

SEQ ID NO: 1806074 - RNA, 14 nt, Human
ccccucugcccugc

SEQ ID NO: 1806075 - RNA, 12 nt, Human
ccccucugcccu

SEQ ID NO: 1806076 - RNA, 14 nt, Human
ccccugccucucug

SEQ ID NO: 1806077 - RNA, 15 nt, Human
ccccugccucucugc

SEQ ID NO: 1806078 - RNA, 16 nt, Human
ccccugccucucugca

SEQ ID NO: 1806079 - RNA, 17 nt, Human
ccccugccucucugcag

SEQ ID NO: 1806080 - RNA, 19 nt, Human
ccccugccucucugcaggu

SEQ ID NO: 1806081 - RNA, 20 nt, Human
cccgcccaggcuuagucacu

SEQ ID NO: 1806082 - RNA, 22 nt, Human
cccgcccaggcuuagucacuga

SEQ ID NO: 1806083 - RNA, 23 nt, Human
cccgcuaagagggagggagggcu

SEQ ID NO: 1806084 - RNA, 13 nt, Human
cccgagccuggcu

SEQ ID NO: 1806085 - RNA, 15 nt, Human
cccgagccuggcucc

SEQ ID NO: 1806086 - RNA, 15 nt, Human
cccgacagccuggca

SEQ ID NO: 1806087 - RNA, 18 nt, Human
cccgacagccuggcacag

SEQ ID NO: 1806088 - RNA, 15 nt, Human
ccccuguucacucua

SEQ ID NO: 1806089 - RNA, 14 nt, Human
cccgacagccuggc

SEQ ID NO: 1806090 - RNA, 13 nt, Human
ccccuuccaugga

SEQ ID NO: 1806091 - RNA, 20 nt, Human
ccccuuccauggacuuuguu

SEQ ID NO: 1806092 - RNA, 20 nt, Human
ccccuggcuuuucacugcug

SEQ ID NO: 1806093 - RNA, 22 nt, Human
ccccuggcuuuucacugcuggc

SEQ ID NO: 1806094 - RNA, 18 nt, Human
ccccuggcuuuucacugc

SEQ ID NO: 1806095 - RNA, 17 nt, Human
ccagcaccaucucuccu

SEQ ID NO: 1806096 - RNA, 18 nt, Human
ccagcaccaucucuccuc

SEQ ID NO: 1806097 - RNA, 16 nt, Human
ccagcaggcucucagg

SEQ ID NO: 1806098 - RNA, 17 nt, Human
ccagcaggcucucaggc

SEQ ID NO: 1806099 - RNA, 18 nt, Human
ccagcaggcucucaggcc

SEQ ID NO: 1806100 - RNA, 19 nt, Human
ccagcaagugagagcuggg

SEQ ID NO: 1806101 - RNA, 18 nt, Human
ccagcaagugagagcugg

SEQ ID NO: 1806102 - RNA, 17 nt, Human
ccagcaagugagagcug

SEQ ID NO: 1806103 - RNA, 24 nt, Human
ccagauuuuuuacagcugccugca

SEQ ID NO: 1806104 - RNA, 22 nt, Human
ccagauugcaacaggcugggcu

SEQ ID NO: 1806105 - RNA, 18 nt, Human
ccagauugcaacaggcug

SEQ ID NO: 1806106 - RNA, 23 nt, Human
ccagauugcaacaggcugggcuu

SEQ ID NO: 1806107 - RNA, 18 nt, Human
ccagauuucacucuccuu

SEQ ID NO: 1806108 - RNA, 19 nt, Human
ccagauuucacucuccuug

SEQ ID NO: 1806109 - RNA, 15 nt, Human
ccagauuucacucuc

SEQ ID NO: 1806110 - RNA, 16 nt, Human
ccagauugcaacaggc

SEQ ID NO: 1806111 - RNA, 14 nt, Human
ccagauugcaacag

SEQ ID NO: 1806112 - RNA, 14 nt, Human
ccagagcccaccuu

SEQ ID NO: 1806113 - RNA, 23 nt, Human
ccagagccucaaaugagaaaaug

SEQ ID NO: 1806114 - RNA, 20 nt, Human
ccagagccucaaaugagaaa

SEQ ID NO: 1806115 - RNA, 19 nt, Human
ccagccugagcgacaguga

SEQ ID NO: 1806116 - RNA, 13 nt, Human
ccagccuggguga

SEQ ID NO: 1806117 - RNA, 13 nt, Human
ccagcgagcccug

SEQ ID NO: 1806118 - RNA, 23 nt, Human
ccagccuugaccauucuccaccu

SEQ ID NO: 1806119 - RNA, 23 nt, Human
ccagccgagauagccaaggccaa

SEQ ID NO: 1806120 - RNA, 17 nt, Human
ccagccgagauagccaa

SEQ ID NO: 1806121 - RNA, 20 nt, Human
ccagccgagauagccaaggc

SEQ ID NO: 1806122 - RNA, 22 nt, Human
ccagccgagauagccaaggcca

SEQ ID NO: 1806123 - RNA, 19 nt, Human
ccagccccaaaacucuccu

SEQ ID NO: 1806124 - RNA, 17 nt, Human
ccagcccacuucugcca

SEQ ID NO: 1806125 - RNA, 16 nt, Human
ccagcccacuucugcc

SEQ ID NO: 1806126 - RNA, 19 nt, Human
ccagcaggcucucaggcca

SEQ ID NO: 1806127 - RNA, 20 nt, Human
ccagcaggcucucaggccag

SEQ ID NO: 1806128 - RNA, 21 nt, Human
ccagcaggcucucaggccagc

SEQ ID NO: 1806129 - RNA, 23 nt, Human
ccagcaggcucucaggccagcug

SEQ ID NO: 1806130 - RNA, 24 nt, Human
ccagaccccuggcuuuucacugcu

SEQ ID NO: 1806131 - RNA, 18 nt, Human
ccagaccccuggcuuuuc

SEQ ID NO: 1806132 - RNA, 14 nt, Human
ccagacaucaacag

SEQ ID NO: 1806133 - RNA, 22 nt, Human
ccagacacauguccaagaagcc

SEQ ID NO: 1806134 - RNA, 17 nt, Human
ccagacacauguccaag

SEQ ID NO: 1806135 - RNA, 20 nt, Human
ccagacacauguccaagaag

SEQ ID NO: 1806136 - RNA, 15 nt, Human
ccagacccggcugcg

SEQ ID NO: 1806137 - RNA, 14 nt, Human
ccagacccggcugc

SEQ ID NO: 1806138 - RNA, 16 nt, Human
ccagacccggcugcgu

SEQ ID NO: 1806139 - RNA, 14 nt, Human
ccagagaguggcuc

SEQ ID NO: 1806140 - RNA, 15 nt, Human
ccagagaguggcucc

SEQ ID NO: 1806141 - RNA, 16 nt, Human
ccagagaguggcuccu

SEQ ID NO: 1806142 - RNA, 18 nt, Human
ccagagaguggcuccucc

SEQ ID NO: 1806143 - RNA, 22 nt, Human
ccagagaguggcuccucccggu

SEQ ID NO: 1806144 - RNA, 15 nt, Human
ccacugcucugguua

SEQ ID NO: 1806145 - RNA, 13 nt, Human
ccacugcucuggu

SEQ ID NO: 1806146 - RNA, 12 nt, Human
ccacugcucugg

SEQ ID NO: 1806147 - RNA, 20 nt, Human
ccacugcuuuuggucugugu

SEQ ID NO: 1806148 - RNA, 21 nt, Human
ccacugccuucgauacaccgg

SEQ ID NO: 1806149 - RNA, 22 nt, Human
ccacugcuuuuggucuguguga

SEQ ID NO: 1806150 - RNA, 14 nt, Human
ccacugugaagaga

SEQ ID NO: 1806151 - RNA, 15 nt, Human
ccacugugaagagaa

SEQ ID NO: 1806152 - RNA, 23 nt, Human
ccacuggugacaugucuuuucuu

SEQ ID NO: 1806153 - RNA, 15 nt, Human
ccacugguucuucuu

SEQ ID NO: 1806154 - RNA, 13 nt, Human
ccacugccucuuc

SEQ ID NO: 1806155 - RNA, 16 nt, Human
ccacugccucuuccuc

SEQ ID NO: 1806156 - RNA, 14 nt, Human
ccaccuucccaugc

SEQ ID NO: 1806157 - RNA, 21 nt, Human
ccacugcaucguuucaucuuc

SEQ ID NO: 1806158 - RNA, 23 nt, Human
ccacugcaucguuucaucuucca

SEQ ID NO: 1806159 - RNA, 16 nt, Human
ccacugugccaugugc

SEQ ID NO: 1806160 - RNA, 15 nt, Human
ccacugugccaugug

SEQ ID NO: 1806161 - RNA, 19 nt, Human
ccacugugccaugugccag

SEQ ID NO: 1806162 - RNA, 18 nt, Human
ccagaaaccuuuguuugc

SEQ ID NO: 1806163 - RNA, 22 nt, Human
ccagaagaaaauagugguguga

SEQ ID NO: 1806164 - RNA, 12 nt, Human
ccacccugcucu

SEQ ID NO: 1806165 - RNA, 11 nt, Human
ccacccugcuc

SEQ ID NO: 1806166 - RNA, 14 nt, Human
ccaccucucucacu

SEQ ID NO: 1806167 - RNA, 16 nt, Human
ccaccucucucacucc

SEQ ID NO: 1806168 - RNA, 19 nt, Human
ccaccucucucacuccuug

SEQ ID NO: 1806169 - RNA, 20 nt, Human
ccaccucucucacuccuuga

SEQ ID NO: 1806170 - RNA, 14 nt, Human
ccaccuggccucug

SEQ ID NO: 1806171 - RNA, 13 nt, Human
ccaccuggccucu

SEQ ID NO: 1806172 - RNA, 18 nt, Human
ccaccuggccucugcacu

SEQ ID NO: 1806173 - RNA, 20 nt, Human
ccaccuggccucugcacucc

SEQ ID NO: 1806174 - RNA, 13 nt, Human
ccaccugccaggg

SEQ ID NO: 1806175 - RNA, 14 nt, Human
ccaccugccaggga

SEQ ID NO: 1806176 - RNA, 15 nt, Human
ccaccugccagggac

SEQ ID NO: 1806177 - RNA, 16 nt, Human
ccaccugccagggaca

SEQ ID NO: 1806178 - RNA, 14 nt, Human
ccacccuccuuuca

SEQ ID NO: 1806179 - RNA, 19 nt, Human
ccacccccacccaagggcc

SEQ ID NO: 1806180 - RNA, 13 nt, Human
ccaccuuggcuca

SEQ ID NO: 1806181 - RNA, 23 nt, Human
ccagugugacaaggauugcuacu

SEQ ID NO: 1806182 - RNA, 14 nt, Human
ccagugugacaagg

SEQ ID NO: 1806183 - RNA, 13 nt, Human
ccauaugccuggg

SEQ ID NO: 1806184 - RNA, 12 nt, Human
ccaucaagccac

SEQ ID NO: 1806185 - RNA, 15 nt, Human
ccauaugccugggca

SEQ ID NO: 1806186 - RNA, 13 nt, Human
ccaucaugucugg

SEQ ID NO: 1806187 - RNA, 12 nt, Human
ccaucauugaaa

SEQ ID NO: 1806188 - RNA, 12 nt, Human
ccaucaugucug

SEQ ID NO: 1806189 - RNA, 19 nt, Human
ccauauuaccacagacaua

SEQ ID NO: 1806190 - RNA, 16 nt, Human
ccaucaagccaccaac

SEQ ID NO: 1806191 - RNA, 13 nt, Human
ccaucaagccacc

SEQ ID NO: 1806192 - RNA, 14 nt, Human
ccaucaagccacca

SEQ ID NO: 1806193 - RNA, 14 nt, Human
ccaucucacacaug

SEQ ID NO: 1806194 - RNA, 15 nt, Human
ccaucucacacauga

SEQ ID NO: 1806195 - RNA, 17 nt, Human
ccaucucacacaugagc

SEQ ID NO: 1806196 - RNA, 18 nt, Human
ccaucucacacaugagca

SEQ ID NO: 1806197 - RNA, 20 nt, Human
ccaucucacacaugagcauc

SEQ ID NO: 1806198 - RNA, 21 nt, Human
ccaucucacacaugagcauca

SEQ ID NO: 1806199 - RNA, 15 nt, Human
ccaucucuccuccuu

SEQ ID NO: 1806200 - RNA, 14 nt, Human
ccaucauugaaauc

SEQ ID NO: 1806201 - RNA, 16 nt, Human
ccaucauugaaaucuu

SEQ ID NO: 1806202 - RNA, 17 nt, Human
ccaucauugaaaucuuu

SEQ ID NO: 1806203 - RNA, 18 nt, Human
ccauccugaggcuccacu

SEQ ID NO: 1806204 - RNA, 20 nt, Human
ccauccugaggcuccacuug

SEQ ID NO: 1806205 - RNA, 23 nt, Human
ccaguaaaugggggugcauuuga

SEQ ID NO: 1806206 - RNA, 13 nt, Human
ccagugaggcucu

SEQ ID NO: 1806207 - RNA, 16 nt, Human
ccagguggccacucca

SEQ ID NO: 1806208 - RNA, 21 nt, Human
ccagguggccacuccagaccc

SEQ ID NO: 1806209 - RNA, 16 nt, Human
ccagguuucuaugugu

SEQ ID NO: 1806210 - RNA, 13 nt, Human
ccagguuuaagcu

SEQ ID NO: 1806211 - RNA, 22 nt, Human
ccaguaaaugggggugcauuug

SEQ ID NO: 1806212 - RNA, 21 nt, Human
ccaguaaaugggggugcauuu

SEQ ID NO: 1806213 - RNA, 20 nt, Human
ccaguaaaugggggugcauu

SEQ ID NO: 1806214 - RNA, 23 nt, Human
ccagugcccacaggaucagucug

SEQ ID NO: 1806215 - RNA, 16 nt, Human
ccaggccccugccacc

SEQ ID NO: 1806216 - RNA, 15 nt, Human
ccaggccccugccac

SEQ ID NO: 1806217 - RNA, 14 nt, Human
ccaggccccugcca

SEQ ID NO: 1806218 - RNA, 12 nt, Human
ccaggccagagg

SEQ ID NO: 1806219 - RNA, 19 nt, Human
ccaggccccugccacccug

SEQ ID NO: 1806220 - RNA, 13 nt, Human
ccaggcccucugc

SEQ ID NO: 1806221 - RNA, 14 nt, Human
ccaggcccucugcc

SEQ ID NO: 1806222 - RNA, 15 nt, Human
ccaggaggccagccu

SEQ ID NO: 1806223 - RNA, 18 nt, Human
ccaggaggccagccuuga

SEQ ID NO: 1806224 - RNA, 20 nt, Human
ccaggaggccagccuugacc

SEQ ID NO: 1806225 - RNA, 14 nt, Human
ccaggcuggucuca

SEQ ID NO: 1806226 - RNA, 21 nt, Human
ccaggcuuagucacugagaca

SEQ ID NO: 1806227 - RNA, 22 nt, Human
ccaggcuuagucacugagacag

SEQ ID NO: 1806228 - RNA, 23 nt, Human
ccaggcuuagucacugagacagc

SEQ ID NO: 1806229 - RNA, 21 nt, Human
ccaggcugggucgcccuggac

SEQ ID NO: 1806230 - RNA, 22 nt, Human
ccaggcugggucgcccuggacu

SEQ ID NO: 1806231 - RNA, 23 nt, Human
ccaggcugggucgcccuggacug

SEQ ID NO: 1806232 - RNA, 24 nt, Human
ccaggcugggucgcccuggacugu

SEQ ID NO: 1806233 - RNA, 12 nt, Human
ccaggcuggguc

SEQ ID NO: 1806234 - RNA, 16 nt, Human
ccaggcugggucgccc

SEQ ID NO: 1806235 - RNA, 15 nt, Human
ccaggcccucugccc

SEQ ID NO: 1806236 - RNA, 16 nt, Human
ccaggcccucugccca

SEQ ID NO: 1806237 - RNA, 23 nt, Human
ccaggcugggagagccuuccagg

SEQ ID NO: 1806238 - RNA, 18 nt, Human
ccauguuuuguuuacggu

SEQ ID NO: 1806239 - RNA, 15 nt, Human
ccauucugccugccc

SEQ ID NO: 1806240 - RNA, 16 nt, Human
ccauucugccugccca

SEQ ID NO: 1806241 - RNA, 13 nt, Human
ccauuugcuccuu

SEQ ID NO: 1806242 - RNA, 14 nt, Human
ccauucuccaccug

SEQ ID NO: 1806243 - RNA, 13 nt, Human
cccacaggaucag

SEQ ID NO: 1806244 - RNA, 17 nt, Human
cccacaggaucagucug

SEQ ID NO: 1806245 - RNA, 13 nt, Human
cccacagcgcugg

SEQ ID NO: 1806246 - RNA, 19 nt, Human
cccacauagugaugguucc

SEQ ID NO: 1806247 - RNA, 16 nt, Human
cccacaggcccuuccu

SEQ ID NO: 1806248 - RNA, 18 nt, Human
cccacaggcccuuccucu

SEQ ID NO: 1806249 - RNA, 17 nt, Human
cccaagggccuggccug

SEQ ID NO: 1806250 - RNA, 16 nt, Human
cccaagggccuggccu

SEQ ID NO: 1806251 - RNA, 20 nt, Human
ccauuuugcugucccuuuuc

SEQ ID NO: 1806252 - RNA, 21 nt, Human
ccauuuuguauuuuacuaaua

SEQ ID NO: 1806253 - RNA, 12 nt, Human
cccaagggccug

SEQ ID NO: 1806254 - RNA, 14 nt, Human
cccaagggccuggc

SEQ ID NO: 1806255 - RNA, 21 nt, Human
cccaccucagccucccaaagu

SEQ ID NO: 1806256 - RNA, 13 nt, Human
cccaccucucuca

SEQ ID NO: 1806257 - RNA, 14 nt, Human
cccaccucucucac

SEQ ID NO: 1806258 - RNA, 17 nt, Human
cccaccucucucacucc

SEQ ID NO: 1806259 - RNA, 12 nt, Human
cccaccuuggcu

SEQ ID NO: 1806260 - RNA, 17 nt, Human
cccaccucagccucccg

SEQ ID NO: 1806261 - RNA, 19 nt, Human
cccaccucucucacuccuu

SEQ ID NO: 1806262 - RNA, 15 nt, Human
cccaccucagccucc

SEQ ID NO: 1806263 - RNA, 14 nt, Human
cccaccucagccuc

SEQ ID NO: 1806264 - RNA, 12 nt, Human
cccaccucagcc

SEQ ID NO: 1806265 - RNA, 15 nt, Human
cccaccuuggcugca

SEQ ID NO: 1806266 - RNA, 14 nt, Human
cccaccuuggcugc

SEQ ID NO: 1806267 - RNA, 22 nt, Human
cccaccuuggcucaaguccucu

SEQ ID NO: 1806268 - RNA, 15 nt, Human
cccaccuuggcucaa

SEQ ID NO: 1806269 - RNA, 16 nt, Human
cccaccuuggcugcag

SEQ ID NO: 1806270 - RNA, 17 nt, Human
cccacgcccccacuggu

SEQ ID NO: 1806271 - RNA, 19 nt, Human
cccacgcccccacugguga

SEQ ID NO: 1806272 - RNA, 14 nt, Human
cccacgcuggagug

SEQ ID NO: 1806273 - RNA, 15 nt, Human
caauaggaaaaacug

SEQ ID NO: 1806274 - RNA, 16 nt, Human
caauaggaaaaacuga

SEQ ID NO: 1806275 - RNA, 17 nt, Human
caauaggaaaaacugau

SEQ ID NO: 1806276 - RNA, 18 nt, Human
caauaauaauaccucccu

SEQ ID NO: 1806277 - RNA, 19 nt, Human
caauagauauuuaccuuuu

SEQ ID NO: 1806278 - RNA, 19 nt, Human
caaggguagggugggccuu

SEQ ID NO: 1806279 - RNA, 18 nt, Human
caaggcugggggaagaag

SEQ ID NO: 1806280 - RNA, 18 nt, Human
caaggaaaaaauaacaau

SEQ ID NO: 1806281 - RNA, 23 nt, Human
caagcuggucccacucaguccau

SEQ ID NO: 1806282 - RNA, 22 nt, Human
caagcuggucccacucagucca

SEQ ID NO: 1806283 - RNA, 20 nt, Human
caaggaaaaaauaacaauga

SEQ ID NO: 1806284 - RNA, 16 nt, Human
caaggagauuuacaac

SEQ ID NO: 1806285 - RNA, 18 nt, Human
caaggauccugagccaga

SEQ ID NO: 1806286 - RNA, 19 nt, Human
caaggauccugagccagau

SEQ ID NO: 1806287 - RNA, 22 nt, Human
caaggauccugagccagauuuc

SEQ ID NO: 1806288 - RNA, 20 nt, Human
caaggauccugagccagauu

SEQ ID NO: 1806289 - RNA, 17 nt, Human
caaggcugcagugagcc

SEQ ID NO: 1806290 - RNA, 22 nt, Human
caaggcugcagugagccgagau

SEQ ID NO: 1806291 - RNA, 18 nt, Human
caagcgauucuucugcuu

SEQ ID NO: 1806292 - RNA, 21 nt, Human
caagcugcacccucaggcagg

SEQ ID NO: 1806293 - RNA, 17 nt, Human
caagcgauucuucugcu

SEQ ID NO: 1806294 - RNA, 15 nt, Human
caagcgauucuucug

SEQ ID NO: 1806295 - RNA, 21 nt, Human
caagcuggucccacucagucc

SEQ ID NO: 1806296 - RNA, 22 nt, Human
caagcugcacccucaggcaggu

SEQ ID NO: 1806297 - RNA, 18 nt, Human
caauaggaaaaacugauu

SEQ ID NO: 1806298 - RNA, 18 nt, Human
caauuacaggaaguacug

SEQ ID NO: 1806299 - RNA, 21 nt, Human
caauuuuuuaagugaaaauau

SEQ ID NO: 1806300 - RNA, 20 nt, Human
caauuuuuuaagugaaaaua

SEQ ID NO: 1806301 - RNA, 13 nt, Human
cacaaacagaggc

SEQ ID NO: 1806302 - RNA, 18 nt, Human
cacaaagcccuuccaugu

SEQ ID NO: 1806303 - RNA, 15 nt, Human
cacaaacagaggccg

SEQ ID NO: 1806304 - RNA, 14 nt, Human
cacaaacagaggcc

SEQ ID NO: 1806305 - RNA, 17 nt, Human
caauuacaggaaguacu

SEQ ID NO: 1806306 - RNA, 21 nt, Human
caauaucuuuuuuuuaauaaa

SEQ ID NO: 1806307 - RNA, 22 nt, Human
caaugugaaaagaaaaaugagc

SEQ ID NO: 1806308 - RNA, 22 nt, Human
caaugugacuuaaugccacuaa

SEQ ID NO: 1806309 - RNA, 18 nt, Human
cacaagaaaugaaagcag

SEQ ID NO: 1806310 - RNA, 13 nt, Human
cacaaaggagagc

SEQ ID NO: 1806311 - RNA, 21 nt, Human
cacaagaaaugaaagcaggga

SEQ ID NO: 1806312 - RNA, 20 nt, Human
cacaagaaaugaaagcaggg

SEQ ID NO: 1806313 - RNA, 17 nt, Human
cacacacgcgugcacac

SEQ ID NO: 1806314 - RNA, 14 nt, Human
cacacuccagcugg

SEQ ID NO: 1806315 - RNA, 21 nt, Human
cacagagaaaguacuucucca

SEQ ID NO: 1806316 - RNA, 20 nt, Human
cacagagaaaguacuucucc

SEQ ID NO: 1806317 - RNA, 19 nt, Human
cacagagaaaguacuucuc

SEQ ID NO: 1806318 - RNA, 23 nt, Human
cacagaugggugcuuggaggaag

SEQ ID NO: 1806319 - RNA, 22 nt, Human
cacagaguuguuacauuuuuaa

SEQ ID NO: 1806320 - RNA, 19 nt, Human
cacagaggacacagagaag

SEQ ID NO: 1806321 - RNA, 15 nt, Human
cacagaggacacaga

SEQ ID NO: 1806322 - RNA, 13 nt, Human
cacagaggcugcc

SEQ ID NO: 1806323 - RNA, 14 nt, Human
cacagcugagaggc

SEQ ID NO: 1806324 - RNA, 16 nt, Human
cacagauuugagcuca

SEQ ID NO: 1806325 - RNA, 17 nt, Human
cacagauuugagcucag

SEQ ID NO: 1806326 - RNA, 18 nt, Human
cacagauuugagcucagc

SEQ ID NO: 1806327 - RNA, 22 nt, Human
cacagauuugagcucagcccug

SEQ ID NO: 1806328 - RNA, 21 nt, Human
caaaaucgaugcagugcuucc

SEQ ID NO: 1806329 - RNA, 20 nt, Human
caaaauaaaacuuuuuaaaa

SEQ ID NO: 1806330 - RNA, 16 nt, Human
caaaauaaaacuuuuu

SEQ ID NO: 1806331 - RNA, 14 nt, Human
caaaaguuucucuu

SEQ ID NO: 1806332 - RNA, 18 nt, Human
caaaaguuuguuugcuua

SEQ ID NO: 1806333 - RNA, 19 nt, Human
caaaacucuccucugcugc

SEQ ID NO: 1806334 - RNA, 15 nt, Human
caaaacucuccucug

SEQ ID NO: 1806335 - RNA, 16 nt, Human
caaaacucuccucugc

SEQ ID NO: 1806336 - RNA, 18 nt, Human
auuuuauuuuauuaugca

SEQ ID NO: 1806337 - RNA, 15 nt, Human
caaaacgguuuuacu

SEQ ID NO: 1806338 - RNA, 21 nt, Human
caaaacgguuuuacugcagcu

SEQ ID NO: 1806339 - RNA, 13 nt, Human
caaacagaggccg

SEQ ID NO: 1806340 - RNA, 15 nt, Human
caaacagaggccgcc

SEQ ID NO: 1806341 - RNA, 21 nt, Human
caaaaugagcccuguccugcc

SEQ ID NO: 1806342 - RNA, 11 nt, Human
caaaaugaaac

SEQ ID NO: 1806343 - RNA, 22 nt, Human
caaaaugaaacgcaaccaccac

SEQ ID NO: 1806344 - RNA, 21 nt, Human
caaacucuugaccucagguga

SEQ ID NO: 1806345 - RNA, 19 nt, Human
caaagaaauuuccacucag

SEQ ID NO: 1806346 - RNA, 18 nt, Human
caaagaaauuuccacuca

SEQ ID NO: 1806347 - RNA, 12 nt, Human
caaagaaauuuc

SEQ ID NO: 1806348 - RNA, 20 nt, Human
caaacucuugaccucaggug

SEQ ID NO: 1806349 - RNA, 19 nt, Human
caaacucuugaccucaggu

SEQ ID NO: 1806350 - RNA, 17 nt, Human
caaacucuugaccucag

SEQ ID NO: 1806351 - RNA, 13 nt, Human
caacaggcugggc

SEQ ID NO: 1806352 - RNA, 12 nt, Human
caacaggcuggg

SEQ ID NO: 1806353 - RNA, 17 nt, Human
caacauacucccaucug

SEQ ID NO: 1806354 - RNA, 19 nt, Human
caacauacucccaucugug

SEQ ID NO: 1806355 - RNA, 20 nt, Human
caacauacucccaucuguga

SEQ ID NO: 1806356 - RNA, 21 nt, Human
caaccugcucuccucuugcca

SEQ ID NO: 1806357 - RNA, 23 nt, Human
caaccugcucuccucuugccacu

SEQ ID NO: 1806358 - RNA, 18 nt, Human
caaccugcucuccucuug

SEQ ID NO: 1806359 - RNA, 17 nt, Human
caaccuucuguggcuca

SEQ ID NO: 1806360 - RNA, 19 nt, Human
caaccuucuguggcucaca

SEQ ID NO: 1806361 - RNA, 20 nt, Human
caaccuucuguggcucacag

SEQ ID NO: 1806362 - RNA, 16 nt, Human
caaccuggucacagga

SEQ ID NO: 1806363 - RNA, 16 nt, Human
caaccuucuguggcuc

SEQ ID NO: 1806364 - RNA, 22 nt, Human
caaauuucuaaaucuccaaaau

SEQ ID NO: 1806365 - RNA, 15 nt, Human
caaauuucuaaaucu

SEQ ID NO: 1806366 - RNA, 23 nt, Human
caaauauauucagccuggcuuca

SEQ ID NO: 1806367 - RNA, 23 nt, Human
caaauggaaaugggcagagcaga

SEQ ID NO: 1806368 - RNA, 14 nt, Human
caaauguucaucaa

SEQ ID NO: 1806369 - RNA, 18 nt, Human
caaauguucaucaaugaa

SEQ ID NO: 1806370 - RNA, 19 nt, Human
caaagugcugggauuacaa

SEQ ID NO: 1806371 - RNA, 13 nt, Human
caaagugcuggga

SEQ ID NO: 1806372 - RNA, 20 nt, Human
caaaguucccuacuuccugu

SEQ ID NO: 1806373 - RNA, 23 nt, Human
caaagugcugggauuacaagcgu

SEQ ID NO: 1806374 - RNA, 18 nt, Human
caaagugcugggauuaca

SEQ ID NO: 1806375 - RNA, 19 nt, Human
caagaaaugaaagcaggga

SEQ ID NO: 1806376 - RNA, 17 nt, Human
caagaaaugaaagcagg

SEQ ID NO: 1806377 - RNA, 14 nt, Human
caagaagcccagga

SEQ ID NO: 1806378 - RNA, 13 nt, Human
caagaagcccagg

SEQ ID NO: 1806379 - RNA, 12 nt, Human
caacuugggaac

SEQ ID NO: 1806380 - RNA, 16 nt, Human
caacuuguaaaugugg

SEQ ID NO: 1806381 - RNA, 17 nt, Human
caagagcuuaacagugu

SEQ ID NO: 1806382 - RNA, 13 nt, Human
caagagcccaggc

SEQ ID NO: 1806383 - RNA, 21 nt, Human
caagaccuucuccuucaccuu

SEQ ID NO: 1806384 - RNA, 23 nt, Human
caagaccuucuccuucaccuuug

SEQ ID NO: 1806385 - RNA, 13 nt, Human
caagacgcugugc

SEQ ID NO: 1806386 - RNA, 15 nt, Human
caagacgcugugcug

SEQ ID NO: 1806387 - RNA, 17 nt, Human
cacaguucaauucucau

SEQ ID NO: 1806388 - RNA, 19 nt, Human
cacaguggaaccagcccag

SEQ ID NO: 1806389 - RNA, 13 nt, Human
cacaguggaacca

SEQ ID NO: 1806390 - RNA, 21 nt, Human
cacaggcccuuccucuccacu

SEQ ID NO: 1806391 - RNA, 22 nt, Human
cacaggcccuuccucuccacug

SEQ ID NO: 1806392 - RNA, 18 nt, Human
cacagugcaucucagccc

SEQ ID NO: 1806393 - RNA, 19 nt, Human
cacagugcaucucagccca

SEQ ID NO: 1806394 - RNA, 16 nt, Human
cacaggcccuuccucu

SEQ ID NO: 1806395 - RNA, 17 nt, Human
cacaggcccuuccucuc

SEQ ID NO: 1806396 - RNA, 18 nt, Human
cacaggcccuuccucucc

SEQ ID NO: 1806397 - RNA, 19 nt, Human
cacaggcccuuccucucca

SEQ ID NO: 1806398 - RNA, 13 nt, Human
cacaggaaaccag

SEQ ID NO: 1806399 - RNA, 22 nt, Human
cacagcugcucaauaaaguaca

SEQ ID NO: 1806400 - RNA, 12 nt, Human
cacagcugcuca

SEQ ID NO: 1806401 - RNA, 23 nt, Human
acgucugacaggcaaugcuggcu

SEQ ID NO: 1806402 - RNA, 15 nt, Human
acuaauagacaauuu

SEQ ID NO: 1806403 - RNA, 11 nt, Human
acguggcugcu

SEQ ID NO: 1806404 - RNA, 15 nt, Human
acggaauaguuggcu

SEQ ID NO: 1806405 - RNA, 19 nt, Human
acggacgaaccuugaaaac

SEQ ID NO: 1806406 - RNA, 15 nt, Human
acggaagagccuugc

SEQ ID NO: 1806407 - RNA, 16 nt, Human
acggaagagccuugcg

SEQ ID NO: 1806408 - RNA, 19 nt, Human
acgcuggagugcagugagc

SEQ ID NO: 1806409 - RNA, 19 nt, Human
accuguggccaaguucuua

SEQ ID NO: 1806410 - RNA, 18 nt, Human
accuguggccaaguucuu

SEQ ID NO: 1806411 - RNA, 11 nt, Human
accugugucuc

SEQ ID NO: 1806412 - RNA, 17 nt, Human
acuauugcuugcacaaa

SEQ ID NO: 1806413 - RNA, 16 nt, Human
acuauuguuagucucu

SEQ ID NO: 1806414 - RNA, 17 nt, Human
acuagggaagauaauau

SEQ ID NO: 1806415 - RNA, 14 nt, Human
acuaaucuuucugc

SEQ ID NO: 1806416 - RNA, 17 nt, Human
acccuguuaccauuuug

SEQ ID NO: 1806417 - RNA, 16 nt, Human
acccaugcugcccugu

SEQ ID NO: 1806418 - RNA, 14 nt, Human
acccaugcugcccu

SEQ ID NO: 1806419 - RNA, 15 nt, Human
acccaugcugcccug

SEQ ID NO: 1806420 - RNA, 22 nt, Human
acccugugauggggcccugccu

SEQ ID NO: 1806421 - RNA, 16 nt, Human
accccacacacgccag

SEQ ID NO: 1806422 - RNA, 19 nt, Human
accgggccacagagaaagu

SEQ ID NO: 1806423 - RNA, 15 nt, Human
accgggccacagaga

SEQ ID NO: 1806424 - RNA, 20 nt, Human
accgggccacagagaaagua

SEQ ID NO: 1806425 - RNA, 14 nt, Human
accgugaggccaga

SEQ ID NO: 1806426 - RNA, 20 nt, Human
accgggcacucagaagacac

SEQ ID NO: 1806427 - RNA, 19 nt, Human
accggcuggccuggccccu

SEQ ID NO: 1806428 - RNA, 17 nt, Human
accggcuggccuggccc

SEQ ID NO: 1806429 - RNA, 18 nt, Human
accggcuggccuggcccc

SEQ ID NO: 1806430 - RNA, 14 nt, Human
accggcuggccugg

SEQ ID NO: 1806431 - RNA, 15 nt, Human
accggcuggccuggc

SEQ ID NO: 1806432 - RNA, 22 nt, Human
accucagguaaucgaccugccu

SEQ ID NO: 1806433 - RNA, 14 nt, Human
accucaggccuggg

SEQ ID NO: 1806434 - RNA, 22 nt, Human
accucaggccugggggcugggc

SEQ ID NO: 1806435 - RNA, 16 nt, Human
accgugaggccagaga

SEQ ID NO: 1806436 - RNA, 17 nt, Human
accgugaggccagagac

SEQ ID NO: 1806437 - RNA, 12 nt, Human
accucaggccug

SEQ ID NO: 1806438 - RNA, 13 nt, Human
accucaggccugg

SEQ ID NO: 1806439 - RNA, 23 nt, Human
accucagguaaucgaccugccuc

SEQ ID NO: 1806440 - RNA, 18 nt, Human
accucaggugagaagcag

SEQ ID NO: 1806441 - RNA, 23 nt, Human
accugccccuccucucugcccua

SEQ ID NO: 1806442 - RNA, 13 nt, Human
accugcccaaccu

SEQ ID NO: 1806443 - RNA, 15 nt, Human
accugccagggacag

SEQ ID NO: 1806444 - RNA, 16 nt, Human
accugccagggacaga

SEQ ID NO: 1806445 - RNA, 18 nt, Human
accugccagggacagagg

SEQ ID NO: 1806446 - RNA, 12 nt, Human
accugccaggga

SEQ ID NO: 1806447 - RNA, 13 nt, Human
accugccagggac

SEQ ID NO: 1806448 - RNA, 11 nt, Human
accugccaggg

SEQ ID NO: 1806449 - RNA, 21 nt, Human
accucuugagccuugaacuuu

SEQ ID NO: 1806450 - RNA, 20 nt, Human
accucuugagccuugaacuu

SEQ ID NO: 1806451 - RNA, 19 nt, Human
accucuugagccuugaacu

SEQ ID NO: 1806452 - RNA, 17 nt, Human
accucuugagccuugaa

SEQ ID NO: 1806453 - RNA, 20 nt, Human
acuucugccauauucuguug

SEQ ID NO: 1806454 - RNA, 13 nt, Human
acuucagcucugu

SEQ ID NO: 1806455 - RNA, 13 nt, Human
acuucugccucuu

SEQ ID NO: 1806456 - RNA, 17 nt, Human
acuucuuauacauuuga

SEQ ID NO: 1806457 - RNA, 18 nt, Human
acuucuuauacauuugau

SEQ ID NO: 1806458 - RNA, 14 nt, Human
acuuaaaaaugguu

SEQ ID NO: 1806459 - RNA, 13 nt, Human
acuuaaaaauggu

SEQ ID NO: 1806460 - RNA, 21 nt, Human
acuuaaaaaugguuuaaaugg

SEQ ID NO: 1806461 - RNA, 22 nt, Human
acuuaaaauauuccugcauuug

SEQ ID NO: 1806462 - RNA, 14 nt, Human
acuuaaauaaugug

SEQ ID NO: 1806463 - RNA, 22 nt, Human
acuugggaggcugagaugggag

SEQ ID NO: 1806464 - RNA, 15 nt, Human
acuuuauuuuguguu

SEQ ID NO: 1806465 - RNA, 17 nt, Human
acuuuaugcuaagugaa

SEQ ID NO: 1806466 - RNA, 12 nt, Human
acuuuaugcuaa

SEQ ID NO: 1806467 - RNA, 22 nt, Human
acuuucaggccacauggcuaaa

SEQ ID NO: 1806468 - RNA, 22 nt, Human
acugaugggcaacccccagccu

SEQ ID NO: 1806469 - RNA, 12 nt, Human
acugaugggcaa

SEQ ID NO: 1806470 - RNA, 22 nt, Human
acugauggcuaauguacugcau

SEQ ID NO: 1806471 - RNA, 23 nt, Human
acugaccagccuccaugcugccu

SEQ ID NO: 1806472 - RNA, 13 nt, Human
acugaucucucgu

SEQ ID NO: 1806473 - RNA, 23 nt, Human
acugacauuguuggccaaagcca

SEQ ID NO: 1806474 - RNA, 22 nt, Human
acugacauuguuggccaaagcc

SEQ ID NO: 1806475 - RNA, 21 nt, Human
acugaccaauauuguacaguu

SEQ ID NO: 1806476 - RNA, 20 nt, Human
acugaccaauauuguacagu

SEQ ID NO: 1806477 - RNA, 22 nt, Human
acugaccaauauuguacaguuu

SEQ ID NO: 1806478 - RNA, 15 nt, Human
acugaccagccucca

SEQ ID NO: 1806479 - RNA, 20 nt, Human
acugaccagccuccaugcug

SEQ ID NO: 1806480 - RNA, 13 nt, Human
acugaccagccuc

SEQ ID NO: 1806481 - RNA, 23 nt, Human
acugauuuuuuuuuccuucagug

SEQ ID NO: 1806482 - RNA, 21 nt, Human
acugauuuuuuuuuccuucag

SEQ ID NO: 1806483 - RNA, 22 nt, Human
acugauuuuuuuuuccuucagu

SEQ ID NO: 1806484 - RNA, 19 nt, Human
acucugugucagguggggc

SEQ ID NO: 1806485 - RNA, 21 nt, Human
acucugugucagguggggcag

SEQ ID NO: 1806486 - RNA, 17 nt, Human
acucugucucaguccau

SEQ ID NO: 1806487 - RNA, 15 nt, Human
acucugucucagucc

SEQ ID NO: 1806488 - RNA, 19 nt, Human
acucugucucaaaaaaaca

SEQ ID NO: 1806489 - RNA, 21 nt, Human
acucuacuuagcaugucccua

SEQ ID NO: 1806490 - RNA, 20 nt, Human
acucuacuuagcaugucccu

SEQ ID NO: 1806491 - RNA, 14 nt, Human
acuauuuuucagaa

SEQ ID NO: 1806492 - RNA, 14 nt, Human
acucuaaagucugu

SEQ ID NO: 1806493 - RNA, 15 nt, Human
acugcuuuuggucug

SEQ ID NO: 1806494 - RNA, 22 nt, Human
acugcccggcaggguccuagaa

SEQ ID NO: 1806495 - RNA, 20 nt, Human
acugcuuuuggucuguguga

SEQ ID NO: 1806496 - RNA, 16 nt, Human
acugcuuuuggucugu

SEQ ID NO: 1806497 - RNA, 19 nt, Human
acugccagucccccugccc

SEQ ID NO: 1806498 - RNA, 18 nt, Human
acugccagucccccugcc

SEQ ID NO: 1806499 - RNA, 15 nt, Human
acugcccggcagggu

SEQ ID NO: 1806500 - RNA, 16 nt, Human
aauuuugugcccccau

SEQ ID NO: 1806501 - RNA, 14 nt, Human
aauuuugauguuuu

SEQ ID NO: 1806502 - RNA, 18 nt, Human
aauuuucaucuaggauuu

SEQ ID NO: 1806503 - RNA, 12 nt, Human
acaaagaaauua

SEQ ID NO: 1806504 - RNA, 14 nt, Human
acaaagaaauuaug

SEQ ID NO: 1806505 - RNA, 16 nt, Human
acaaagaaauuaugug

SEQ ID NO: 1806506 - RNA, 13 nt, Human
acaaaaugaaacg

SEQ ID NO: 1806507 - RNA, 22 nt, Human
acaaaaugaaacgcaaccacca

SEQ ID NO: 1806508 - RNA, 18 nt, Human
acaaccuucuguggcuca

SEQ ID NO: 1806509 - RNA, 16 nt, Human
acaagaaaugaaagca

SEQ ID NO: 1806510 - RNA, 15 nt, Human
acaagaaaugaaagc

SEQ ID NO: 1806511 - RNA, 22 nt, Human
acaagaaaugaaagcagggacu

SEQ ID NO: 1806512 - RNA, 20 nt, Human
aauuuauuuaugggauccug

SEQ ID NO: 1806513 - RNA, 19 nt, Human
aaugucacaggcaggucca

SEQ ID NO: 1806514 - RNA, 16 nt, Human
aaugucacaggcaggu

SEQ ID NO: 1806515 - RNA, 16 nt, Human
aauuguaaggaaugau

SEQ ID NO: 1806516 - RNA, 12 nt, Human
aauuguaaggaa

SEQ ID NO: 1806517 - RNA, 13 nt, Human
acaauuuauuaug

SEQ ID NO: 1806518 - RNA, 14 nt, Human
acaauuuauuaugg

SEQ ID NO: 1806519 - RNA, 16 nt, Human
acaaggauugcuacug

SEQ ID NO: 1806520 - RNA, 20 nt, Human
acaaggaugaucuaggaaga

SEQ ID NO: 1806521 - RNA, 21 nt, Human
acacagcucuucuccaggcug

SEQ ID NO: 1806522 - RNA, 20 nt, Human
acacagcucuucuccaggcu

SEQ ID NO: 1806523 - RNA, 22 nt, Human
acacagcucuucuccaggcugu

SEQ ID NO: 1806524 - RNA, 14 nt, Human
acacauuuuuuaaa

SEQ ID NO: 1806525 - RNA, 19 nt, Human
acacaaaaguuucucuuuu

SEQ ID NO: 1806526 - RNA, 19 nt, Human
acacagcucuucuccaggc

SEQ ID NO: 1806527 - RNA, 20 nt, Human
acaccacuacauucuguuaa

SEQ ID NO: 1806528 - RNA, 17 nt, Human
acaccacuacauucugu

SEQ ID NO: 1806529 - RNA, 12 nt, Human
acacgaauauug

SEQ ID NO: 1806530 - RNA, 14 nt, Human
acacgaauauugcu

SEQ ID NO: 1806531 - RNA, 15 nt, Human
acaccacuacauucu

SEQ ID NO: 1806532 - RNA, 19 nt, Human
acacauuuuuuaaaugcac

SEQ ID NO: 1806533 - RNA, 18 nt, Human
acacauuuuuuaaaugca

SEQ ID NO: 1806534 - RNA, 16 nt, Human
acacauuuuuuaaaug

SEQ ID NO: 1806535 - RNA, 21 nt, Human
acaccacuacauucuguuaau

SEQ ID NO: 1806536 - RNA, 15 nt, Human
acacgaauauugcug

SEQ ID NO: 1806537 - RNA, 21 nt, Human
acacgaauauugcugauggug

SEQ ID NO: 1806538 - RNA, 14 nt, Human
acagacaaagcgug

SEQ ID NO: 1806539 - RNA, 23 nt, Human
acagaggccaugggccuccugug

SEQ ID NO: 1806540 - RNA, 21 nt, Human
acagaggccaugggccuccug

SEQ ID NO: 1806541 - RNA, 17 nt, Human
acagaggccaugggccu

SEQ ID NO: 1806542 - RNA, 13 nt, Human
acagaggcagccc

SEQ ID NO: 1806543 - RNA, 16 nt, Human
acagaggacacagaga

SEQ ID NO: 1806544 - RNA, 22 nt, Human
acacugugcugagucugaaggc

SEQ ID NO: 1806545 - RNA, 17 nt, Human
acacugugcugagucug

SEQ ID NO: 1806546 - RNA, 20 nt, Human
acacugggagaaaugaaaaa

SEQ ID NO: 1806547 - RNA, 15 nt, Human
acauccuacaagaca

SEQ ID NO: 1806548 - RNA, 16 nt, Human
acaugcaaggucauuu

SEQ ID NO: 1806549 - RNA, 17 nt, Human
acaugcaaggucauuuu

SEQ ID NO: 1806550 - RNA, 18 nt, Human
acaugcaaggucauuuuu

SEQ ID NO: 1806551 - RNA, 15 nt, Human
acaugccucucucag

SEQ ID NO: 1806552 - RNA, 16 nt, Human
acaugccucucucagg

SEQ ID NO: 1806553 - RNA, 17 nt, Human
acaugccucucucaggc

SEQ ID NO: 1806554 - RNA, 18 nt, Human
acaugccucucucaggcc

SEQ ID NO: 1806555 - RNA, 16 nt, Human
acauaagauaaaugug

SEQ ID NO: 1806556 - RNA, 20 nt, Human
acauaauucaggaagcagcu

SEQ ID NO: 1806557 - RNA, 23 nt, Human
acagugagucgaggacagggagg

SEQ ID NO: 1806558 - RNA, 20 nt, Human
acagugauuaccagggacug

SEQ ID NO: 1806559 - RNA, 21 nt, Human
acagugauuaccagggacuga

SEQ ID NO: 1806560 - RNA, 13 nt, Human
acaguguacaguc

SEQ ID NO: 1806561 - RNA, 12 nt, Human
acaguguacagu

SEQ ID NO: 1806562 - RNA, 18 nt, Human
acaguguacagucuugua

SEQ ID NO: 1806563 - RNA, 17 nt, Human
acaguguacagucuugu

SEQ ID NO: 1806564 - RNA, 15 nt, Human
acaguguacagucuu

SEQ ID NO: 1806565 - RNA, 14 nt, Human
acaggcaaugcugg

SEQ ID NO: 1806566 - RNA, 23 nt, Human
acaggugugagucaccaagccca

SEQ ID NO: 1806567 - RNA, 22 nt, Human
acaggugugagucaccaagccc

SEQ ID NO: 1806568 - RNA, 19 nt, Human
acaggugugaaccaccaca

SEQ ID NO: 1806569 - RNA, 22 nt, Human
acagugagucgaggacagggag

SEQ ID NO: 1806570 - RNA, 14 nt, Human
acagcucuguccug

SEQ ID NO: 1806571 - RNA, 23 nt, Human
acagcuccuucuguccuacucug

SEQ ID NO: 1806572 - RNA, 18 nt, Human
acagcuccuucuguccua

SEQ ID NO: 1806573 - RNA, 16 nt, Human
acagcuccuucugucc

SEQ ID NO: 1806574 - RNA, 17 nt, Human
acagaggggguggccuc

SEQ ID NO: 1806575 - RNA, 18 nt, Human
acagaggggguggccucc

SEQ ID NO: 1806576 - RNA, 19 nt, Human
acagaggggguggccuccc

SEQ ID NO: 1806577 - RNA, 21 nt, Human
acagaggggguggccucccaa

SEQ ID NO: 1806578 - RNA, 17 nt, Human
acagcucuguccuggga

SEQ ID NO: 1806579 - RNA, 16 nt, Human
acagcucuguccuggg

SEQ ID NO: 1806580 - RNA, 23 nt, Human
acaggcaagcaccuccugccucg

SEQ ID NO: 1806581 - RNA, 20 nt, Human
acaggcaagcaccuccugcc

SEQ ID NO: 1806582 - RNA, 12 nt, Human
acagcugccugc

SEQ ID NO: 1806583 - RNA, 16 nt, Human
acagcugccugcagua

SEQ ID NO: 1806584 - RNA, 13 nt, Human
acagcugccuggg

SEQ ID NO: 1806585 - RNA, 19 nt, Human
accaaggcugauuaaacca

SEQ ID NO: 1806586 - RNA, 20 nt, Human
accaaggcugauuaaaccaa

SEQ ID NO: 1806587 - RNA, 12 nt, Human
accaccugccca

SEQ ID NO: 1806588 - RNA, 20 nt, Human
accagccccagugcccacag

SEQ ID NO: 1806589 - RNA, 19 nt, Human
accagccccagugcccaca

SEQ ID NO: 1806590 - RNA, 18 nt, Human
accagccccagugcccac

SEQ ID NO: 1806591 - RNA, 17 nt, Human
accagccccagugccca

SEQ ID NO: 1806592 - RNA, 16 nt, Human
accagccccagugccc

SEQ ID NO: 1806593 - RNA, 13 nt, Human
accagcagccugg

SEQ ID NO: 1806594 - RNA, 14 nt, Human
accagcagaaaugc

SEQ ID NO: 1806595 - RNA, 12 nt, Human
accagcagagca

SEQ ID NO: 1806596 - RNA, 13 nt, Human
accagcagagcac

SEQ ID NO: 1806597 - RNA, 14 nt, Human
acauuuauucugcu

SEQ ID NO: 1806598 - RNA, 16 nt, Human
acauuuccuaaauaua

SEQ ID NO: 1806599 - RNA, 17 nt, Human
acauuuccuaaauauau

SEQ ID NO: 1806600 - RNA, 18 nt, Human
acaugugaaaagaauaga

SEQ ID NO: 1806601 - RNA, 17 nt, Human
acaugugaaaagaauag

SEQ ID NO: 1806602 - RNA, 14 nt, Human
acaugugaaaagaa

SEQ ID NO: 1806603 - RNA, 23 nt, Human
acaugucuuuucuugcaugaggc

SEQ ID NO: 1806604 - RNA, 19 nt, Human
acaugccucucucaggcca

SEQ ID NO: 1806605 - RNA, 20 nt, Human
acaugccucucucaggccaa

SEQ ID NO: 1806606 - RNA, 15 nt, Human
acccacccuccuuuc

SEQ ID NO: 1806607 - RNA, 13 nt, Human
acccaugcugccc

SEQ ID NO: 1806608 - RNA, 17 nt, Human
acccacccccacccaag

SEQ ID NO: 1806609 - RNA, 15 nt, Human
acccacccccaccca

SEQ ID NO: 1806610 - RNA, 13 nt, Human
accauacuaauua

SEQ ID NO: 1806611 - RNA, 16 nt, Human
accauacuaauuauac

SEQ ID NO: 1806612 - RNA, 21 nt, Human
accauacuaauuauacccccu

SEQ ID NO: 1806613 - RNA, 17 nt, Human
accauaggucaccuuua

SEQ ID NO: 1806614 - RNA, 14 nt, Human
accaucaagccacc

SEQ ID NO: 1806615 - RNA, 15 nt, Human
accaucauugaaauc

SEQ ID NO: 1806616 - RNA, 15 nt, Human
accaucaagccacca

SEQ ID NO: 1806617 - RNA, 16 nt, Human
accaucccugaaggcc

SEQ ID NO: 1806618 - RNA, 23 nt, Human
accaucauugaaaucuuuuugcu

SEQ ID NO: 1806619 - RNA, 20 nt, Human
aagauucauauuuacuucuu

SEQ ID NO: 1806620 - RNA, 17 nt, Human
aagauucaaucccagga

SEQ ID NO: 1806621 - RNA, 19 nt, Human
aagauuuugaaauuuuuau

SEQ ID NO: 1806622 - RNA, 19 nt, Human
aagccaccaacauacuccc

SEQ ID NO: 1806623 - RNA, 15 nt, Human
aagcagggacuugaa

SEQ ID NO: 1806624 - RNA, 23 nt, Human
aagacagugaaagaaaauaacaa

SEQ ID NO: 1806625 - RNA, 16 nt, Human
aagacuuuggaaagag

SEQ ID NO: 1806626 - RNA, 14 nt, Human
aacuuacuuagugu

SEQ ID NO: 1806627 - RNA, 15 nt, Human
aagacuuuuaugaua

SEQ ID NO: 1806628 - RNA, 17 nt, Human
aagacuuuuccaacccu

SEQ ID NO: 1806629 - RNA, 20 nt, Human
aagggacuuggaagcuccgc

SEQ ID NO: 1806630 - RNA, 15 nt, Human
aagggacugagaaau

SEQ ID NO: 1806631 - RNA, 17 nt, Human
aagggacugagaaauuu

SEQ ID NO: 1806632 - RNA, 12 nt, Human
aaguagaggagg

SEQ ID NO: 1806633 - RNA, 22 nt, Human
aaggacccggaggggccuggca

SEQ ID NO: 1806634 - RNA, 12 nt, Human
aaggaauuuuau

SEQ ID NO: 1806635 - RNA, 13 nt, Human
aaggacuaggguc

SEQ ID NO: 1806636 - RNA, 14 nt, Human
aagcugcugacagu

SEQ ID NO: 1806637 - RNA, 22 nt, Human
aagcugccagccgagauagcca

SEQ ID NO: 1806638 - RNA, 11 nt, Human
aagcugccagc

SEQ ID NO: 1806639 - RNA, 12 nt, Human
aagcugccagcc

SEQ ID NO: 1806640 - RNA, 20 nt, Human
aagcgugagccacugcaccg

SEQ ID NO: 1806641 - RNA, 17 nt, Human
aagcgugagccacugca

SEQ ID NO: 1806642 - RNA, 21 nt, Human
aagcgugagccacugcaccgg

SEQ ID NO: 1806643 - RNA, 23 nt, Human
aaggaaugauuaauuaaaacaca

SEQ ID NO: 1806644 - RNA, 16 nt, Human
aagcugcugacagugu

SEQ ID NO: 1806645 - RNA, 17 nt, Human
aagcgauucuucugcuu

SEQ ID NO: 1806646 - RNA, 16 nt, Human
aagcgauucuucugcu

SEQ ID NO: 1806647 - RNA, 14 nt, Human
aagcgauucuucug

SEQ ID NO: 1806648 - RNA, 15 nt, Human
aagcgauucuucugc

SEQ ID NO: 1806649 - RNA, 15 nt, Human
aagccagcaggcucu

SEQ ID NO: 1806650 - RNA, 19 nt, Human
aagccagcaggcucucagg

SEQ ID NO: 1806651 - RNA, 18 nt, Human
aagccagcaggcucucag

SEQ ID NO: 1806652 - RNA, 21 nt, Human
aagccaccaacauacucccau

SEQ ID NO: 1806653 - RNA, 19 nt, Human
aauccaccugccucggccu

SEQ ID NO: 1806654 - RNA, 18 nt, Human
aauccaccugccucggcc

SEQ ID NO: 1806655 - RNA, 15 nt, Human
aaucuggacuccucu

SEQ ID NO: 1806656 - RNA, 16 nt, Human
aaucuggacuccucug

SEQ ID NO: 1806657 - RNA, 17 nt, Human
aaucuggacuccucugu

SEQ ID NO: 1806658 - RNA, 18 nt, Human
aaucuggacuccucuguc

SEQ ID NO: 1806659 - RNA, 20 nt, Human
aaucuggacuccucugucca

SEQ ID NO: 1806660 - RNA, 18 nt, Human
aaucucggcucacugcau

SEQ ID NO: 1806661 - RNA, 23 nt, Human
aaucucgcucugucgcccaggcu

SEQ ID NO: 1806662 - RNA, 15 nt, Human
aaugauagcuacugu

SEQ ID NO: 1806663 - RNA, 17 nt, Human
aaugauaugcuuguaac

SEQ ID NO: 1806664 - RNA, 15 nt, Human
aaugauaugcuugua

SEQ ID NO: 1806665 - RNA, 18 nt, Human
aaugauaugcuuguaacu

SEQ ID NO: 1806666 - RNA, 19 nt, Human
aaugauaugcuuguaacua

SEQ ID NO: 1806667 - RNA, 23 nt, Human
aaugauguauguugaagccuuug

SEQ ID NO: 1806668 - RNA, 16 nt, Human
aaugauuaauuaaaac

SEQ ID NO: 1806669 - RNA, 12 nt, Human
aaugauuaauua

SEQ ID NO: 1806670 - RNA, 13 nt, Human
aaugauuaauuaa

SEQ ID NO: 1806671 - RNA, 23 nt, Human
aaugcucuuuacuucauggacuu

SEQ ID NO: 1806672 - RNA, 13 nt, Human
aaugggacacuaa

SEQ ID NO: 1806673 - RNA, 14 nt, Human
aaugggagcucaug

SEQ ID NO: 1806674 - RNA, 17 nt, Human
aaugggggugcauuuga

SEQ ID NO: 1806675 - RNA, 15 nt, Human
aaugggggugcauuu

SEQ ID NO: 1806676 - RNA, 17 nt, Human
aaugcgcaggcuggccc

SEQ ID NO: 1806677 - RNA, 18 nt, Human
aaugcgcaggcuggcccu

SEQ ID NO: 1806678 - RNA, 19 nt, Human
aaugcgcaggcuggcccug

SEQ ID NO: 1806679 - RNA, 20 nt, Human
aaugcgcaggcuggcccugc

SEQ ID NO: 1806680 - RNA, 15 nt, Human
aaugcgcaggcuggc

SEQ ID NO: 1806681 - RNA, 14 nt, Human
aaugcgcaggcugg

SEQ ID NO: 1806682 - RNA, 23 nt, Human
aaugcgugcauaccacuuuuguu

SEQ ID NO: 1806683 - RNA, 21 nt, Human
aaugcgugcauaccacuuuug

SEQ ID NO: 1806684 - RNA, 16 nt, Human
aauagaaauccaauug

SEQ ID NO: 1806685 - RNA, 17 nt, Human
aauagaaauggggaacu

SEQ ID NO: 1806686 - RNA, 22 nt, Human
aauagaagcuaagguuuagaua

SEQ ID NO: 1806687 - RNA, 16 nt, Human
aauauaggaacuuaaa

SEQ ID NO: 1806688 - RNA, 13 nt, Human
aagugcugcauuu

SEQ ID NO: 1806689 - RNA, 14 nt, Human
aagugcugcauuua

SEQ ID NO: 1806690 - RNA, 15 nt, Human
aaguucuuaguugcu

SEQ ID NO: 1806691 - RNA, 22 nt, Human
aaguucuuaguugcuguauguc

SEQ ID NO: 1806692 - RNA, 15 nt, Human
aaguggggacagagc

SEQ ID NO: 1806693 - RNA, 11 nt, Human
aauaaagcugu

SEQ ID NO: 1806694 - RNA, 19 nt, Human
aauaaagcuguguggcagu

SEQ ID NO: 1806695 - RNA, 10 nt, Human
aauaaaccau

SEQ ID NO: 1806696 - RNA, 12 nt, Human
aauaaaauuuuu

SEQ ID NO: 1806697 - RNA, 18 nt, Human
aaguugauggugaugaaa

SEQ ID NO: 1806698 - RNA, 18 nt, Human
aaaucugcuuuuuaaaga

SEQ ID NO: 1806699 - RNA, 22 nt, Human
aaaucuccaaaauaaaacuuuu

SEQ ID NO: 1806700 - RNA, 15 nt, Human
aaauggacguguuau

SEQ ID NO: 1806701 - RNA, 17 nt, Human
aaauggacguguuauga

SEQ ID NO: 1806702 - RNA, 14 nt, Human
aaauggacguguua

SEQ ID NO: 1806703 - RNA, 22 nt, Human
aacaaaggccuaauucuaugcc

SEQ ID NO: 1806704 - RNA, 22 nt, Human
aacaaaccuguuucugcagcca

SEQ ID NO: 1806705 - RNA, 21 nt, Human
aacacauacaggaagguagaa

SEQ ID NO: 1806706 - RNA, 17 nt, Human
aacacuaacaugauuug

SEQ ID NO: 1806707 - RNA, 19 nt, Human
aacaccucugcacaagcug

SEQ ID NO: 1806708 - RNA, 22 nt, Human
aaauguuuuuuuuuaaagacuu

SEQ ID NO: 1806709 - RNA, 12 nt, Human
aaauuaacuuuu

SEQ ID NO: 1806710 - RNA, 19 nt, Human
aaauuaacuuuuauaaacu

SEQ ID NO: 1806711 - RNA, 22 nt, Human
aaauugacacuuaaaaaugguu

SEQ ID NO: 1806712 - RNA, 14 nt, Human
aaauuaacuuuuau

SEQ ID NO: 1806713 - RNA, 13 nt, Human
aaauuaacuuuua

SEQ ID NO: 1806714 - RNA, 18 nt, Human
aaauugaugggauuuggu

SEQ ID NO: 1806715 - RNA, 18 nt, Human
aaauguuuuuuuuuaaag

SEQ ID NO: 1806716 - RNA, 21 nt, Human
aaauguuuuuuuuuaaagacu

SEQ ID NO: 1806717 - RNA, 20 nt, Human
aaauguucaucaaugaauga

SEQ ID NO: 1806718 - RNA, 13 nt, Human
aacccuucagugc

SEQ ID NO: 1806719 - RNA, 19 nt, Human
aaccaguguuguggauuua

SEQ ID NO: 1806720 - RNA, 15 nt, Human
aacauggaaguacua

SEQ ID NO: 1806721 - RNA, 22 nt, Human
aacaugcuacacacugcauguu

SEQ ID NO: 1806722 - RNA, 16 nt, Human
aacagcuaaugggaca

SEQ ID NO: 1806723 - RNA, 15 nt, Human
aacagauuuggaaag

SEQ ID NO: 1806724 - RNA, 14 nt, Human
aacagauuuggaaa

SEQ ID NO: 1806725 - RNA, 13 nt, Human
aacagauuuggaa

SEQ ID NO: 1806726 - RNA, 15 nt, Human
aacauccuacaagac

SEQ ID NO: 1806727 - RNA, 22 nt, Human
aacauccuacaagacacaguga

SEQ ID NO: 1806728 - RNA, 15 nt, Human
aacguauaaaagccu

SEQ ID NO: 1806729 - RNA, 13 nt, Human
aacgucugugcca

SEQ ID NO: 1806730 - RNA, 17 nt, Human
aacucaaacucuuaaaa

SEQ ID NO: 1806731 - RNA, 16 nt, Human
aacucaccccagcccc

SEQ ID NO: 1806732 - RNA, 17 nt, Human
aacucaccccagcccca

SEQ ID NO: 1806733 - RNA, 18 nt, Human
aacucaccccagccccaa

SEQ ID NO: 1806734 - RNA, 11 nt, Human
aaauaaauuau

SEQ ID NO: 1806735 - RNA, 19 nt, Human
aaaggcagaagcaacccaa

SEQ ID NO: 1806736 - RNA, 18 nt, Human
aaagcccaaagugguaua

SEQ ID NO: 1806737 - RNA, 14 nt, Human
aaaggcuccaggag

SEQ ID NO: 1806738 - RNA, 14 nt, Human
aaaggcuaccuuug

SEQ ID NO: 1806739 - RNA, 17 nt, Human
aaaggcuaccuuuguau

SEQ ID NO: 1806740 - RNA, 22 nt, Human
aaaggcuccaggagcagccaca

SEQ ID NO: 1806741 - RNA, 21 nt, Human
aaaggcuccaggagcagccac

SEQ ID NO: 1806742 - RNA, 15 nt, Human
aaagccaaagcuagg

SEQ ID NO: 1806743 - RNA, 21 nt, Human
aaagcauuuuguaauaauaaa

SEQ ID NO: 1806744 - RNA, 13 nt, Human
aaagcauuuugua

SEQ ID NO: 1806745 - RNA, 15 nt, Human
aaagcauuuuguaau

SEQ ID NO: 1806746 - RNA, 14 nt, Human
aaagcauuuuguaa

SEQ ID NO: 1806747 - RNA, 17 nt, Human
aaacucuugaccucagg

SEQ ID NO: 1806748 - RNA, 14 nt, Human
aaacccuucagugc

SEQ ID NO: 1806749 - RNA, 21 nt, Human
aaacccugucucuacuaaaaa

SEQ ID NO: 1806750 - RNA, 17 nt, Human
aaaccccaucucuacaa

SEQ ID NO: 1806751 - RNA, 20 nt, Human
aaacugauuuuuuuuuccuu

SEQ ID NO: 1806752 - RNA, 13 nt, Human
aaacugauuuuuu

SEQ ID NO: 1806753 - RNA, 19 nt, Human
aaacugauuuuuuuuuccu

SEQ ID NO: 1806754 - RNA, 18 nt, Human
aaagaacgcugauuuaaa

SEQ ID NO: 1806755 - RNA, 15 nt, Human
aaagaacgcugauuu

SEQ ID NO: 1806756 - RNA, 20 nt, Human
aaagaacgcugauuuaaaga

SEQ ID NO: 1806757 - RNA, 15 nt, Human
aaagauacaguuacu

SEQ ID NO: 1806758 - RNA, 18 nt, Human
aaagaggucgcuugggaa

SEQ ID NO: 1806759 - RNA, 11 nt, Human
aaagagguuuu

SEQ ID NO: 1806760 - RNA, 15 nt, Human
aaaauuagccaagug

SEQ ID NO: 1806761 - RNA, 19 nt, Human
aaaauuaggauuucaugau

SEQ ID NO: 1806762 - RNA, 13 nt, Human
aaaauuaagaaag

SEQ ID NO: 1806763 - RNA, 20 nt, Human
aaaauuaagaaaggauaaag

SEQ ID NO: 1806764 - RNA, 23 nt, Human
aaaauuaaucugggccagaauuu

SEQ ID NO: 1806765 - RNA, 22 nt, Human
aaaauuaacaugaauauuuagu

SEQ ID NO: 1806766 - RNA, 12 nt, Human
aaaauuaagaaa

SEQ ID NO: 1806767 - RNA, 21 nt, Human
aaaauccacuuuaucuugaau

SEQ ID NO: 1806768 - RNA, 15 nt, Human
aaaauaaaaaacacu

SEQ ID NO: 1806769 - RNA, 17 nt, Human
aaacagcuaaugggaca

SEQ ID NO: 1806770 - RNA, 18 nt, Human
aggacccggaggggccug

SEQ ID NO: 1806771 - RNA, 20 nt, Human
aggacccggaggggccuggc

SEQ ID NO: 1806772 - RNA, 21 nt, Human
aggacccggaggggccuggca

SEQ ID NO: 1806773 - RNA, 22 nt, Human
aggacccggaggggccuggcag

SEQ ID NO: 1806774 - RNA, 16 nt, Human
aggaccuguggccaag

SEQ ID NO: 1806775 - RNA, 21 nt, Human
aggaccuguggccaaguucuu

SEQ ID NO: 1806776 - RNA, 18 nt, Human
agcuucacuguaaaauaa

SEQ ID NO: 1806777 - RNA, 18 nt, Human
agcuucauuuccuguguc

SEQ ID NO: 1806778 - RNA, 19 nt, Human
agcuucauuuccugugucu

SEQ ID NO: 1806779 - RNA, 16 nt, Human
agcuuuuaaacccuau

SEQ ID NO: 1806780 - RNA, 23 nt, Human
agcuuuguuuguugucagcugaa

SEQ ID NO: 1806781 - RNA, 22 nt, Human
aggaaggcugagaggagagaga

SEQ ID NO: 1806782 - RNA, 23 nt, Human
aggaacuuaaauaaugugaaacu

SEQ ID NO: 1806783 - RNA, 20 nt, Human
aggaauaaauugcuccuuga

SEQ ID NO: 1806784 - RNA, 19 nt, Human
aggaauaaauugcuccuug

SEQ ID NO: 1806785 - RNA, 22 nt, Human
aggaauaccugucccccugaca

SEQ ID NO: 1806786 - RNA, 15 nt, Human
aggaauaccuguccc

SEQ ID NO: 1806787 - RNA, 18 nt, Human
aggaauaccugucccccu

SEQ ID NO: 1806788 - RNA, 21 nt, Human
aggaacuuaaauaaugugaaa

SEQ ID NO: 1806789 - RNA, 20 nt, Human
aggaacaaggcaaggcuguc

SEQ ID NO: 1806790 - RNA, 23 nt, Human
aggaacaaggcaaggcugucaau

SEQ ID NO: 1806791 - RNA, 15 nt, Human
agcuuuuaugugaaa

SEQ ID NO: 1806792 - RNA, 12 nt, Human
aggaacaaggca

SEQ ID NO: 1806793 - RNA, 13 nt, Human
aggaacaaggcaa

SEQ ID NO: 1806794 - RNA, 16 nt, Human
aggaacaaggcaaggc

SEQ ID NO: 1806795 - RNA, 17 nt, Human
aggaacaaggcaaggcu

SEQ ID NO: 1806796 - RNA, 19 nt, Human
aggaacaaggcaaggcugu

SEQ ID NO: 1806797 - RNA, 16 nt, Human
agcucaccagccccag

SEQ ID NO: 1806798 - RNA, 18 nt, Human
agcuaauaacaugugaaa

SEQ ID NO: 1806799 - RNA, 21 nt, Human
agcuaaucagcauucucacuc

SEQ ID NO: 1806800 - RNA, 16 nt, Human
agcuaaucagcauucu

SEQ ID NO: 1806801 - RNA, 20 nt, Human
agcucaccagccccagugcc

SEQ ID NO: 1806802 - RNA, 19 nt, Human
agcucaccagccccagugc

SEQ ID NO: 1806803 - RNA, 12 nt, Human
agcucaccucuc

SEQ ID NO: 1806804 - RNA, 15 nt, Human
agcucaccucucccu

SEQ ID NO: 1806805 - RNA, 18 nt, Human
agcucaccucucccuugg

SEQ ID NO: 1806806 - RNA, 19 nt, Human
agcucaccucucccuugga

SEQ ID NO: 1806807 - RNA, 12 nt, Human
agcucagagagg

SEQ ID NO: 1806808 - RNA, 18 nt, Human
agcucagagaggguggga

SEQ ID NO: 1806809 - RNA, 14 nt, Human
agcucagagagggu

SEQ ID NO: 1806810 - RNA, 19 nt, Human
agcgagcccugguggcagu

SEQ ID NO: 1806811 - RNA, 13 nt, Human
agcgagcccuggu

SEQ ID NO: 1806812 - RNA, 15 nt, Human
agccuuuggaaacag

SEQ ID NO: 1806813 - RNA, 15 nt, Human
agcccucccugcccc

SEQ ID NO: 1806814 - RNA, 16 nt, Human
agcccucccugccccu

SEQ ID NO: 1806815 - RNA, 17 nt, Human
agcccucccugccccuc

SEQ ID NO: 1806816 - RNA, 19 nt, Human
agcccucccugccccuccc

SEQ ID NO: 1806817 - RNA, 13 nt, Human
agccuggcuccaa

SEQ ID NO: 1806818 - RNA, 20 nt, Human
agccuggcuccaaacccucg

SEQ ID NO: 1806819 - RNA, 22 nt, Human
agcccucccugccccucccuuc

SEQ ID NO: 1806820 - RNA, 23 nt, Human
agcccucccugccccucccuuca

SEQ ID NO: 1806821 - RNA, 22 nt, Human
agccuggcuccaaacccucgag

SEQ ID NO: 1806822 - RNA, 17 nt, Human
agccuggcuucaaauug

SEQ ID NO: 1806823 - RNA, 18 nt, Human
agccuggcuucaaauugu

SEQ ID NO: 1806824 - RNA, 12 nt, Human
agccugggaggu

SEQ ID NO: 1806825 - RNA, 20 nt, Human
agccugggaggucaaggcug

SEQ ID NO: 1806826 - RNA, 15 nt, Human
agcugaaccugggua

SEQ ID NO: 1806827 - RNA, 18 nt, Human
agcugcgguccacccagg

SEQ ID NO: 1806828 - RNA, 17 nt, Human
agcugcgguccacccag

SEQ ID NO: 1806829 - RNA, 16 nt, Human
agcugcgguccaccca

SEQ ID NO: 1806830 - RNA, 13 nt, Human
agcugcgguccac

SEQ ID NO: 1806831 - RNA, 20 nt, Human
agcugcgguccacccaggag

SEQ ID NO: 1806832 - RNA, 19 nt, Human
agcugcgguccacccagga

SEQ ID NO: 1806833 - RNA, 12 nt, Human
agcugcugacag

SEQ ID NO: 1806834 - RNA, 21 nt, Human
agcugcgguccacccaggagc

SEQ ID NO: 1806835 - RNA, 17 nt, Human
agcuggucccacucagu

SEQ ID NO: 1806836 - RNA, 16 nt, Human
agcuggucccacucag

SEQ ID NO: 1806837 - RNA, 14 nt, Human
agcugcugacagug

SEQ ID NO: 1806838 - RNA, 13 nt, Human
agcugcugacagu

SEQ ID NO: 1806839 - RNA, 19 nt, Human
agcuggucccacucagucc

SEQ ID NO: 1806840 - RNA, 18 nt, Human
agcuggucccacucaguc

SEQ ID NO: 1806841 - RNA, 22 nt, Human
agcugguuuuuagcggagacgg

SEQ ID NO: 1806842 - RNA, 14 nt, Human
agguaacaggcaga

SEQ ID NO: 1806843 - RNA, 13 nt, Human
agguaacaggcag

SEQ ID NO: 1806844 - RNA, 16 nt, Human
agguaacaggcagaua

SEQ ID NO: 1806845 - RNA, 13 nt, Human
agguacucuccug

SEQ ID NO: 1806846 - RNA, 14 nt, Human
agguacucuccugg

SEQ ID NO: 1806847 - RNA, 23 nt, Human
aggucccuaauaaagcugugugg

SEQ ID NO: 1806848 - RNA, 23 nt, Human
aggguuuugccauguuggccagg

SEQ ID NO: 1806849 - RNA, 22 nt, Human
aggguuuugccauguuggccag

SEQ ID NO: 1806850 - RNA, 20 nt, Human
agggucucacuauguugccc

SEQ ID NO: 1806851 - RNA, 14 nt, Human
agggccugcaaggg

SEQ ID NO: 1806852 - RNA, 15 nt, Human
agggccugcaaggga

SEQ ID NO: 1806853 - RNA, 12 nt, Human
agggccuggccu

SEQ ID NO: 1806854 - RNA, 13 nt, Human
agggccuggccug

SEQ ID NO: 1806855 - RNA, 16 nt, Human
agggauacccauccca

SEQ ID NO: 1806856 - RNA, 12 nt, Human
agggucccuggu

SEQ ID NO: 1806857 - RNA, 14 nt, Human
agggucccuggugg

SEQ ID NO: 1806858 - RNA, 13 nt, Human
aggggccuggcag

SEQ ID NO: 1806859 - RNA, 12 nt, Human
aggggccuggca

SEQ ID NO: 1806860 - RNA, 21 nt, Human
aggguaucuggugacuuuccu

SEQ ID NO: 1806861 - RNA, 13 nt, Human
aggguauuccaga

SEQ ID NO: 1806862 - RNA, 16 nt, Human
agggucccugguggca

SEQ ID NO: 1806863 - RNA, 17 nt, Human
agggucccugguggcag

SEQ ID NO: 1806864 - RNA, 20 nt, Human
agggucccugguggcagcuc

SEQ ID NO: 1806865 - RNA, 22 nt, Human
agggucccugguggcagcucac

SEQ ID NO: 1806866 - RNA, 22 nt, Human
aggggcccaaauucuuucagug

SEQ ID NO: 1806867 - RNA, 14 nt, Human
agggccuggccuga

SEQ ID NO: 1806868 - RNA, 22 nt, Human
aggcccucugcccacucccugc

SEQ ID NO: 1806869 - RNA, 23 nt, Human
aggcccucugcccacucccugca

SEQ ID NO: 1806870 - RNA, 22 nt, Human
aggcccuuccucuccacugccu

SEQ ID NO: 1806871 - RNA, 12 nt, Human
aggcccuucucu

SEQ ID NO: 1806872 - RNA, 15 nt, Human
aggcccuucucucca

SEQ ID NO: 1806873 - RNA, 19 nt, Human
aggcccuucucuccagccc

SEQ ID NO: 1806874 - RNA, 15 nt, Human
aggccaggcccucug

SEQ ID NO: 1806875 - RNA, 19 nt, Human
aggcauuccccaggaggcc

SEQ ID NO: 1806876 - RNA, 20 nt, Human
aggcauuccccaggaggcca

SEQ ID NO: 1806877 - RNA, 13 nt, Human
aggccaggcccuc

SEQ ID NO: 1806878 - RNA, 14 nt, Human
aggccaggcccucu

SEQ ID NO: 1806879 - RNA, 19 nt, Human
aggcauguucucugaggac

SEQ ID NO: 1806880 - RNA, 18 nt, Human
aggcauguucucugagga

SEQ ID NO: 1806881 - RNA, 18 nt, Human
aggcauuccccaggaggc

SEQ ID NO: 1806882 - RNA, 17 nt, Human
aggcauuccccaggagg

SEQ ID NO: 1806883 - RNA, 17 nt, Human
aggcauguucucugagg

SEQ ID NO: 1806884 - RNA, 21 nt, Human
aggcaugugaugagaggaaau

SEQ ID NO: 1806885 - RNA, 19 nt, Human
aggcaugugaugagaggaa

SEQ ID NO: 1806886 - RNA, 20 nt, Human
aggcaugugaugagaggaaa

SEQ ID NO: 1806887 - RNA, 17 nt, Human
aggcaugugaugagagg

SEQ ID NO: 1806888 - RNA, 15 nt, Human
aggcaugguggccca

SEQ ID NO: 1806889 - RNA, 14 nt, Human
aggagaggggcaca

SEQ ID NO: 1806890 - RNA, 22 nt, Human
aggcuguaucccaugagccuca

SEQ ID NO: 1806891 - RNA, 17 nt, Human
aggcuuagucacugaga

SEQ ID NO: 1806892 - RNA, 21 nt, Human
aggcuguaucccaugagccuc

SEQ ID NO: 1806893 - RNA, 20 nt, Human
aggcuguaucccaugagccu

SEQ ID NO: 1806894 - RNA, 22 nt, Human
aggcuggucucaaacuccugac

SEQ ID NO: 1806895 - RNA, 23 nt, Human
aggcuggucucgaacuccugacc

SEQ ID NO: 1806896 - RNA, 18 nt, Human
aggcuuagucacugagac

SEQ ID NO: 1806897 - RNA, 15 nt, Human
agggacccuccacca

SEQ ID NO: 1806898 - RNA, 23 nt, Human
agggacugccagucccccugccc

SEQ ID NO: 1806899 - RNA, 15 nt, Human
agggacugaggggag

SEQ ID NO: 1806900 - RNA, 14 nt, Human
aggcuaccuuugua

SEQ ID NO: 1806901 - RNA, 13 nt, Human
aggcuaccuuugu

SEQ ID NO: 1806902 - RNA, 15 nt, Human
aggcuaccuuuguau

SEQ ID NO: 1806903 - RNA, 18 nt, Human
aggcuggguucugauccu

SEQ ID NO: 1806904 - RNA, 14 nt, Human
agaugagugagcau

SEQ ID NO: 1806905 - RNA, 19 nt, Human
agauguagaggagaaacug

SEQ ID NO: 1806906 - RNA, 16 nt, Human
agauguagaggagaaa

SEQ ID NO: 1806907 - RNA, 23 nt, Human
agaggggguggccucccaacuca

SEQ ID NO: 1806908 - RNA, 18 nt, Human
agcaaaagaugcuucuca

SEQ ID NO: 1806909 - RNA, 21 nt, Human
agauugcaacaggcugggcuu

SEQ ID NO: 1806910 - RNA, 20 nt, Human
agauugcaacaggcugggcu

SEQ ID NO: 1806911 - RNA, 23 nt, Human
agauugcaacaggcugggcuuca

SEQ ID NO: 1806912 - RNA, 20 nt, Human
agauugaaccugaauauugc

SEQ ID NO: 1806913 - RNA, 19 nt, Human
agauucuuuccugaggcug

SEQ ID NO: 1806914 - RNA, 21 nt, Human
agauucuuuccugaggcuggg

SEQ ID NO: 1806915 - RNA, 17 nt, Human
agcaaaugucuuccugg

SEQ ID NO: 1806916 - RNA, 20 nt, Human
agcaaaugucuuccuggauu

SEQ ID NO: 1806917 - RNA, 16 nt, Human
agcaaauguggcuccu

SEQ ID NO: 1806918 - RNA, 20 nt, Human
agcaaauggccucaugucaa

SEQ ID NO: 1806919 - RNA, 15 nt, Human
agcaaauggccucau

SEQ ID NO: 1806920 - RNA, 20 nt, Human
agcaaaggagauuggaagga

SEQ ID NO: 1806921 - RNA, 14 nt, Human
agcacagacccugc

SEQ ID NO: 1806922 - RNA, 15 nt, Human
agcacagacccugcc

SEQ ID NO: 1806923 - RNA, 12 nt, Human
agcacagacccu

SEQ ID NO: 1806924 - RNA, 21 nt, Human
agcacgauuucuguuuagaua

SEQ ID NO: 1806925 - RNA, 19 nt, Human
agcacgauuucuguuuaga

SEQ ID NO: 1806926 - RNA, 17 nt, Human
agcacgauuucuguuua

SEQ ID NO: 1806927 - RNA, 16 nt, Human
agcacagacccugccc

SEQ ID NO: 1806928 - RNA, 18 nt, Human
agcauccuggcacccggc

SEQ ID NO: 1806929 - RNA, 17 nt, Human
agcauccuggcacccgg

SEQ ID NO: 1806930 - RNA, 14 nt, Human
agcauccuggcacc

SEQ ID NO: 1806931 - RNA, 18 nt, Human
agccaaagcuaggccugg

SEQ ID NO: 1806932 - RNA, 16 nt, Human
agccaaagcuaggccu

SEQ ID NO: 1806933 - RNA, 20 nt, Human
agccaaggccaaaggaagca

SEQ ID NO: 1806934 - RNA, 13 nt, Human
agccagaggagag

SEQ ID NO: 1806935 - RNA, 15 nt, Human
agccagaggagagag

SEQ ID NO: 1806936 - RNA, 14 nt, Human
agccagcaggcucu

SEQ ID NO: 1806937 - RNA, 17 nt, Human
agccagaggagagagga

SEQ ID NO: 1806938 - RNA, 18 nt, Human
agccagaggagagaggac

SEQ ID NO: 1806939 - RNA, 23 nt, Human
agcccacgcccccacuggugaca

SEQ ID NO: 1806940 - RNA, 14 nt, Human
agcccacgccccca

SEQ ID NO: 1806941 - RNA, 15 nt, Human
agcccacgcccccac

SEQ ID NO: 1806942 - RNA, 14 nt, Human
agcccaccuuggcu

SEQ ID NO: 1806943 - RNA, 16 nt, Human
agcccaccuuggcuca

SEQ ID NO: 1806944 - RNA, 15 nt, Human
agcccaccccucaac

SEQ ID NO: 1806945 - RNA, 16 nt, Human
agccagcaggcucuca

SEQ ID NO: 1806946 - RNA, 17 nt, Human
agccagcaggcucucag

SEQ ID NO: 1806947 - RNA, 13 nt, Human
agcauccuggcac

SEQ ID NO: 1806948 - RNA, 20 nt, Human
agccccauucugccugccca

SEQ ID NO: 1806949 - RNA, 21 nt, Human
agcccuccaucuaaacugccc

SEQ ID NO: 1806950 - RNA, 23 nt, Human
agcccuccaucuaaacugccccc

SEQ ID NO: 1806951 - RNA, 12 nt, Human
agcccucccugc

SEQ ID NO: 1806952 - RNA, 13 nt, Human
agcccucccugcc

SEQ ID NO: 1806953 - RNA, 17 nt, Human
agcccgggcucugccuc

SEQ ID NO: 1806954 - RNA, 18 nt, Human
agcccgggcucugccucc

SEQ ID NO: 1806955 - RNA, 20 nt, Human
agcccgggcucugccuccca

SEQ ID NO: 1806956 - RNA, 21 nt, Human
agcccgggcucugccucccau

SEQ ID NO: 1806957 - RNA, 19 nt, Human
agccccauucugccugccc

SEQ ID NO: 1806958 - RNA, 18 nt, Human
agccccauucugccugcc

SEQ ID NO: 1806959 - RNA, 17 nt, Human
agccccauucugccugc

SEQ ID NO: 1806960 - RNA, 15 nt, Human
agccccauccucugu

SEQ ID NO: 1806961 - RNA, 17 nt, Human
agccccauccucuguac

SEQ ID NO: 1806962 - RNA, 23 nt, Human
agccccauccucuguacagagcc

SEQ ID NO: 1806963 - RNA, 19 nt, Human
agacccaaaaggcagaagc

SEQ ID NO: 1806964 - RNA, 21 nt, Human
agacagagucucacuguugcc

SEQ ID NO: 1806965 - RNA, 23 nt, Human
agacagagucucacuguugccca

SEQ ID NO: 1806966 - RNA, 22 nt, Human
agacagauacuccuccaagguu

SEQ ID NO: 1806967 - RNA, 22 nt, Human
agacagccaacuauggccugug

SEQ ID NO: 1806968 - RNA, 15 nt, Human
agaccacguuucuaa

SEQ ID NO: 1806969 - RNA, 20 nt, Human
agacagagucucacuguugc

SEQ ID NO: 1806970 - RNA, 19 nt, Human
agacagagucucacuguug

SEQ ID NO: 1806971 - RNA, 11 nt, Human
agacagagucu

SEQ ID NO: 1806972 - RNA, 23 nt, Human
agacaaugacuuacuguacauga

SEQ ID NO: 1806973 - RNA, 15 nt, Human
agacagagcuacaca

SEQ ID NO: 1806974 - RNA, 22 nt, Human
agacaaugacuuacuguacaug

SEQ ID NO: 1806975 - RNA, 21 nt, Human
agacaaugacuuacuguacau

SEQ ID NO: 1806976 - RNA, 20 nt, Human
agacaaugacuuacuguaca

SEQ ID NO: 1806977 - RNA, 18 nt, Human
agaaugaaagggcccaga

SEQ ID NO: 1806978 - RNA, 21 nt, Human
agaagugaaaaucuacacucc

SEQ ID NO: 1806979 - RNA, 19 nt, Human
agaaugcacaaacagaggc

SEQ ID NO: 1806980 - RNA, 22 nt, Human
agaaugcacaaacagaggccgc

SEQ ID NO: 1806981 - RNA, 21 nt, Human
agaagagauugugguuucauu

SEQ ID NO: 1806982 - RNA, 21 nt, Human
acuuuccucuuagucgagcca

SEQ ID NO: 1806983 - RNA, 21 nt, Human
acuuuccucuuuggucuacac

SEQ ID NO: 1806984 - RNA, 21 nt, Human
agaagacacugaugggcaacc

SEQ ID NO: 1806985 - RNA, 13 nt, Human
agaagacacugau

SEQ ID NO: 1806986 - RNA, 18 nt, Human
agaagguuucagaaagaa

SEQ ID NO: 1806987 - RNA, 14 nt, Human
agaaguaacuuacu

SEQ ID NO: 1806988 - RNA, 13 nt, Human
agaggaaugaagu

SEQ ID NO: 1806989 - RNA, 17 nt, Human
agaggggguggccuccc

SEQ ID NO: 1806990 - RNA, 19 nt, Human
agaggggguggccucccaa

SEQ ID NO: 1806991 - RNA, 13 nt, Human
agagggccugcaa

SEQ ID NO: 1806992 - RNA, 16 nt, Human
agagggccugcaaggg

SEQ ID NO: 1806993 - RNA, 23 nt, Human
agaggacuuuucuuuguggcuuc

SEQ ID NO: 1806994 - RNA, 23 nt, Human
agaggagggagcaucagugcccu

SEQ ID NO: 1806995 - RNA, 22 nt, Human
agaggacuuuucuuuguggcuu

SEQ ID NO: 1806996 - RNA, 21 nt, Human
agaggacuuuucuuuguggcu

SEQ ID NO: 1806997 - RNA, 22 nt, Human
agacugaguacguugugcauuu

SEQ ID NO: 1806998 - RNA, 22 nt, Human
agacugaccaauauuguacagu

SEQ ID NO: 1806999 - RNA, 20 nt, Human
agacugaguacguugugcau

SEQ ID NO: 1807000 - RNA, 18 nt, Human
agacucugucucagucca

SEQ ID NO: 1807001 - RNA, 18 nt, Human
agacucugucucaaaaaa

SEQ ID NO: 1807002 - RNA, 16 nt, Human
agacgcugugcugccc

SEQ ID NO: 1807003 - RNA, 16 nt, Human
agagagaccacuuuuc

SEQ ID NO: 1807004 - RNA, 13 nt, Human
agagccagggucu

SEQ ID NO: 1807005 - RNA, 13 nt, Human
agagcccaccuug

SEQ ID NO: 1807006 - RNA, 17 nt, Human
agagccucaaaugagaa

SEQ ID NO: 1807007 - RNA, 14 nt, Human
agagccucaaauga

SEQ ID NO: 1807008 - RNA, 15 nt, Human
agagcccuucauuug

SEQ ID NO: 1807009 - RNA, 21 nt, Human
aguaugaggcauuuguuugaa

SEQ ID NO: 1807010 - RNA, 20 nt, Human
aguaugaggcauuuguuuga

SEQ ID NO: 1807011 - RNA, 15 nt, Human
aguaucucagggccu

SEQ ID NO: 1807012 - RNA, 17 nt, Human
aguaugaggcauuuguu

SEQ ID NO: 1807013 - RNA, 23 nt, Human
aguaugaggcauuuguuugaacu

SEQ ID NO: 1807014 - RNA, 22 nt, Human
agucacacaguauuacuucugc

SEQ ID NO: 1807015 - RNA, 13 nt, Human
aguacucauacau

SEQ ID NO: 1807016 - RNA, 12 nt, Human
aguacuauguau

SEQ ID NO: 1807017 - RNA, 14 nt, Human
aguacuauguauca

SEQ ID NO: 1807018 - RNA, 12 nt, Human
aguacuucuuuu

SEQ ID NO: 1807019 - RNA, 17 nt, Human
aguacuucuccacccug

SEQ ID NO: 1807020 - RNA, 14 nt, Human
aguacuauaauuua

SEQ ID NO: 1807021 - RNA, 19 nt, Human
aguacuacaguccucccau

SEQ ID NO: 1807022 - RNA, 22 nt, Human
aguacuacaguccucccaucuc

SEQ ID NO: 1807023 - RNA, 18 nt, Human
aguacguugugcauuugg

SEQ ID NO: 1807024 - RNA, 17 nt, Human
aguacguugugcauuug

SEQ ID NO: 1807025 - RNA, 16 nt, Human
aguacguugugcauuu

SEQ ID NO: 1807026 - RNA, 14 nt, Human
aguacguugugcau

SEQ ID NO: 1807027 - RNA, 15 nt, Human
aguacguugugcauu

SEQ ID NO: 1807028 - RNA, 16 nt, Human
aggucuguucuuucca

SEQ ID NO: 1807029 - RNA, 15 nt, Human
aggucuguucuuucc

SEQ ID NO: 1807030 - RNA, 13 nt, Human
aggucuguucuuu

SEQ ID NO: 1807031 - RNA, 18 nt, Human
aguaaaugggggugcauu

SEQ ID NO: 1807032 - RNA, 19 nt, Human
aguccuuaccagcagagca

SEQ ID NO: 1807033 - RNA, 16 nt, Human
agucuguugauuaaag

SEQ ID NO: 1807034 - RNA, 17 nt, Human
agugaccucagcuuuga

SEQ ID NO: 1807035 - RNA, 18 nt, Human
agugaccucagcuuugau

SEQ ID NO: 1807036 - RNA, 19 nt, Human
aguccucuuuucugagagg

SEQ ID NO: 1807037 - RNA, 20 nt, Human
aguccuuaccagcagagcac

SEQ ID NO: 1807038 - RNA, 22 nt, Human
aguccucuuuucugagaggacu

SEQ ID NO: 1807039 - RNA, 19 nt, Human
agucaugcguuuaaucaca

SEQ ID NO: 1807040 - RNA, 19 nt, Human
agugucaaugcagccccca

SEQ ID NO: 1807041 - RNA, 19 nt, Human
agugggacagggcauggcc

SEQ ID NO: 1807042 - RNA, 21 nt, Human
agugggacagggcauggccag

SEQ ID NO: 1807043 - RNA, 24 nt, Human
agugauccucccaccucagccucc

SEQ ID NO: 1807044 - RNA, 18 nt, Human
agugauccucccaccuca

SEQ ID NO: 1807045 - RNA, 15 nt, Human
agugauccucccacc

SEQ ID NO: 1807046 - RNA, 14 nt, Human
agugauccucccac

SEQ ID NO: 1807047 - RNA, 17 nt, Human
agugauucuccugccuc

SEQ ID NO: 1807048 - RNA, 15 nt, Human
agugauucuccugcc

SEQ ID NO: 1807049 - RNA, 18 nt, Human
agugccuuacacaauggu

SEQ ID NO: 1807050 - RNA, 14 nt, Human
agugauucuccugc

SEQ ID NO: 1807051 - RNA, 20 nt, Human
agugauggguuaguggaugg

SEQ ID NO: 1807052 - RNA, 21 nt, Human
agugauucucaugccucagcc

SEQ ID NO: 1807053 - RNA, 18 nt, Human
agugccuuauggaacacu

SEQ ID NO: 1807054 - RNA, 16 nt, Human
agugccuuauggaaca

SEQ ID NO: 1807055 - RNA, 15 nt, Human
agugcuaauuuugaa

SEQ ID NO: 1807056 - RNA, 10 nt, Human
agugccuuau

SEQ ID NO: 1807057 - RNA, 13 nt, Human
agugccuuaugga

SEQ ID NO: 1807058 - RNA, 14 nt, Human
agugccuuauggaa

SEQ ID NO: 1807059 - RNA, 15 nt, Human
agugccuuauggaac

SEQ ID NO: 1807060 - RNA, 18 nt, Human
agugcuaauuuugaaaaa

SEQ ID NO: 1807061 - RNA, 20 nt, Human
agugcuaauuuugaaaaacu

SEQ ID NO: 1807062 - RNA, 18 nt, Human
aguucagguaacaggcag

SEQ ID NO: 1807063 - RNA, 13 nt, Human
aguucaucuugaa

SEQ ID NO: 1807064 - RNA, 15 nt, Human
aguucaucuugaauu

SEQ ID NO: 1807065 - RNA, 19 nt, Human
aguucaucuugaauuguaa

SEQ ID NO: 1807066 - RNA, 14 nt, Human
aguugauagcacag

SEQ ID NO: 1807067 - RNA, 16 nt, Human
aguugauacuacaguu

SEQ ID NO: 1807068 - RNA, 22 nt, Human
aguucaucuugaauuguaagga

SEQ ID NO: 1807069 - RNA, 18 nt, Human
auaaggguaucuggugac

SEQ ID NO: 1807070 - RNA, 13 nt, Human
auaauggucagag

SEQ ID NO: 1807071 - RNA, 15 nt, Human
auaauguaaauaaag

SEQ ID NO: 1807072 - RNA, 14 nt, Human
auaauguaagcucu

SEQ ID NO: 1807073 - RNA, 22 nt, Human
auaagccagacaucaacagaua

SEQ ID NO: 1807074 - RNA, 21 nt, Human
auaagccagacaucaacagau

SEQ ID NO: 1807075 - RNA, 17 nt, Human
auacaaugcugugcccu

SEQ ID NO: 1807076 - RNA, 14 nt, Human
auacaaugcugugc

SEQ ID NO: 1807077 - RNA, 13 nt, Human
auacacuuacacu

SEQ ID NO: 1807078 - RNA, 22 nt, Human
auacacuuacacuuuaugcaca

SEQ ID NO: 1807079 - RNA, 13 nt, Human
auacccaccccca

SEQ ID NO: 1807080 - RNA, 14 nt, Human
auacccacccccac

SEQ ID NO: 1807081 - RNA, 16 nt, Human
auacccacccccaccc

SEQ ID NO: 1807082 - RNA, 17 nt, Human
auacccccugcaaagcc

SEQ ID NO: 1807083 - RNA, 19 nt, Human
auacccccugcaaagccca

SEQ ID NO: 1807084 - RNA, 17 nt, Human
auacccacccccaccca

SEQ ID NO: 1807085 - RNA, 21 nt, Human
auacccccugcaaagcccagc

SEQ ID NO: 1807086 - RNA, 14 nt, Human
auaccugucccccu

SEQ ID NO: 1807087 - RNA, 15 nt, Human
auaccugucccccug

SEQ ID NO: 1807088 - RNA, 16 nt, Human
auaccugucccccuga

SEQ ID NO: 1807089 - RNA, 20 nt, Human
auacccccugcaaagcccag

SEQ ID NO: 1807090 - RNA, 17 nt, Human
auaccugucccccugac

SEQ ID NO: 1807091 - RNA, 14 nt, Human
auaacaaugaaagu

SEQ ID NO: 1807092 - RNA, 20 nt, Human
auaacauguaauuaaguacu

SEQ ID NO: 1807093 - RNA, 12 nt, Human
auaacauguaau

SEQ ID NO: 1807094 - RNA, 13 nt, Human
auaacauguaauu

SEQ ID NO: 1807095 - RNA, 18 nt, Human
auaacauguaauuaagua

SEQ ID NO: 1807096 - RNA, 23 nt, Human
aguuugauuaaauucuugcaaag

SEQ ID NO: 1807097 - RNA, 16 nt, Human
aguuugauuaaauucu

SEQ ID NO: 1807098 - RNA, 20 nt, Human
aguuugagaucagccugggc

SEQ ID NO: 1807099 - RNA, 18 nt, Human
aguuugagaucagccugg

SEQ ID NO: 1807100 - RNA, 19 nt, Human
aguuugagaucagccuggg

SEQ ID NO: 1807101 - RNA, 22 nt, Human
aguuugauuaaauucuugcaaa

SEQ ID NO: 1807102 - RNA, 20 nt, Human
aguuugauuaaauucuugca

SEQ ID NO: 1807103 - RNA, 18 nt, Human
aguuugauuaaauucuug

SEQ ID NO: 1807104 - RNA, 17 nt, Human
aguuugauuaaauucuu

SEQ ID NO: 1807105 - RNA, 15 nt, Human
aguuguuagauuaag

SEQ ID NO: 1807106 - RNA, 22 nt, Human
aguuguuacauuuuuaagugcu

SEQ ID NO: 1807107 - RNA, 20 nt, Human
aguuguuacauuuuuaagug

SEQ ID NO: 1807108 - RNA, 19 nt, Human
aguuguuacauuuuuaagu

SEQ ID NO: 1807109 - RNA, 22 nt, Human
auacuuugcagcacagcugaga

SEQ ID NO: 1807110 - RNA, 17 nt, Human
auagcacagacccugcc

SEQ ID NO: 1807111 - RNA, 18 nt, Human
auagcacagacccugccc

SEQ ID NO: 1807112 - RNA, 15 nt, Human
auagcacagacccug

SEQ ID NO: 1807113 - RNA, 15 nt, Human
auagcauuguaaaag

SEQ ID NO: 1807114 - RNA, 15 nt, Human
auagcagcuuauuca

SEQ ID NO: 1807115 - RNA, 18 nt, Human
auagcagcuuauucacaa

SEQ ID NO: 1807116 - RNA, 17 nt, Human
auagccuaggugacaga

SEQ ID NO: 1807117 - RNA, 15 nt, Human
auagccuaggugaca

SEQ ID NO: 1807118 - RNA, 13 nt, Human
auaguaaaaauaa

SEQ ID NO: 1807119 - RNA, 14 nt, Human
auaguaaaaauaaa

SEQ ID NO: 1807120 - RNA, 16 nt, Human
auaugcucugcauguu

SEQ ID NO: 1807121 - RNA, 17 nt, Human
auaugcucugcauguua

SEQ ID NO: 1807122 - RNA, 16 nt, Human
auaugcaguuuuccuu

SEQ ID NO: 1807123 - RNA, 20 nt, Human
auaugcucugcauguuacau

SEQ ID NO: 1807124 - RNA, 19 nt, Human
auauucaggaagcucaggg

SEQ ID NO: 1807125 - RNA, 15 nt, Human
auauuauuuuauguu

SEQ ID NO: 1807126 - RNA, 22 nt, Human
auauuauuuuauguugcauaga

SEQ ID NO: 1807127 - RNA, 17 nt, Human
auccucauacccacccc

SEQ ID NO: 1807128 - RNA, 19 nt, Human
auccucaguuuuugugaaa

SEQ ID NO: 1807129 - RNA, 15 nt, Human
aucccggcugcccuu

SEQ ID NO: 1807130 - RNA, 19 nt, Human
aucccaugagccucagcau

SEQ ID NO: 1807131 - RNA, 18 nt, Human
auccccaagccuggcaag

SEQ ID NO: 1807132 - RNA, 19 nt, Human
auccagacccggcugcgug

SEQ ID NO: 1807133 - RNA, 13 nt, Human
auccacucgccuu

SEQ ID NO: 1807134 - RNA, 14 nt, Human
aucaugucuggcua

SEQ ID NO: 1807135 - RNA, 12 nt, Human
aucaugugaaau

SEQ ID NO: 1807136 - RNA, 23 nt, Human
aucacccgcuaagagggagggag

SEQ ID NO: 1807137 - RNA, 13 nt, Human
aucaccagacagg

SEQ ID NO: 1807138 - RNA, 20 nt, Human
aucaccaacgucugugccau

SEQ ID NO: 1807139 - RNA, 22 nt, Human
aucaaauauauucagccuggcu

SEQ ID NO: 1807140 - RNA, 13 nt, Human
aucacagccucug

SEQ ID NO: 1807141 - RNA, 14 nt, Human
aucaaauauauuca

SEQ ID NO: 1807142 - RNA, 20 nt, Human
aucaaagagguuuuaaaaaa

SEQ ID NO: 1807143 - RNA, 23 nt, Human
aucaaagagguuuuaaaaaaauc

SEQ ID NO: 1807144 - RNA, 21 nt, Human
aucucccuuuuccaugacugu

SEQ ID NO: 1807145 - RNA, 21 nt, Human
aucuauaggaagauugaaccu

SEQ ID NO: 1807146 - RNA, 18 nt, Human
aucugggggccucuucug

SEQ ID NO: 1807147 - RNA, 22 nt, Human
aucuggacuccucuguccaggc

SEQ ID NO: 1807148 - RNA, 16 nt, Human
aucucugcuuuggaaa

SEQ ID NO: 1807149 - RNA, 21 nt, Human
augaaguacucauacauguua

SEQ ID NO: 1807150 - RNA, 18 nt, Human
augaccacacuccagcug

SEQ ID NO: 1807151 - RNA, 15 nt, Human
augaccacacuccag

SEQ ID NO: 1807152 - RNA, 22 nt, Human
augaggcauuuguuugaacuga

SEQ ID NO: 1807153 - RNA, 21 nt, Human
augaggcauuuguuugaacug

SEQ ID NO: 1807154 - RNA, 14 nt, Human
augaggcauuuguu

SEQ ID NO: 1807155 - RNA, 13 nt, Human
augaggcauuugu

SEQ ID NO: 1807156 - RNA, 15 nt, Human
augaaaacacauuuu

SEQ ID NO: 1807157 - RNA, 14 nt, Human
augaaaacacauuu

SEQ ID NO: 1807158 - RNA, 16 nt, Human
augaaaacacauuuuu

SEQ ID NO: 1807159 - RNA, 18 nt, Human
augaugaaaugaggucag

SEQ ID NO: 1807160 - RNA, 23 nt, Human
augaugaaaugaggucagagccu

SEQ ID NO: 1807161 - RNA, 15 nt, Human
augaugauccuaggc

SEQ ID NO: 1807162 - RNA, 18 nt, Human
augcacaaacagaggccg

SEQ ID NO: 1807163 - RNA, 15 nt, Human
augcacaaauucugu

SEQ ID NO: 1807164 - RNA, 22 nt, Human
augcacaaauucugucucugga

SEQ ID NO: 1807165 - RNA, 23 nt, Human
augcacaaauucugucucuggau

SEQ ID NO: 1807166 - RNA, 17 nt, Human
augaucuuugcagacag

SEQ ID NO: 1807167 - RNA, 21 nt, Human
augaucuuugcagacaggcaa

SEQ ID NO: 1807168 - RNA, 19 nt, Human
augaucuuugcagacaggc

SEQ ID NO: 1807169 - RNA, 18 nt, Human
augaucuuugcagacagg

SEQ ID NO: 1807170 - RNA, 19 nt, Human
augccuggauggggcugca

SEQ ID NO: 1807171 - RNA, 20 nt, Human
augccuggauggggcugcac

SEQ ID NO: 1807172 - RNA, 23 nt, Human
augcacagaguuguuacauuuuu

SEQ ID NO: 1807173 - RNA, 22 nt, Human
augcacagaguuguuacauuuu

SEQ ID NO: 1807174 - RNA, 21 nt, Human
augcacagaguuguuacauuu

SEQ ID NO: 1807175 - RNA, 19 nt, Human
augcacagaguuguuacau

SEQ ID NO: 1807176 - RNA, 15 nt, Human
augcacacauuuuuu

SEQ ID NO: 1807177 - RNA, 14 nt, Human
augcacacauuuuu

SEQ ID NO: 1807178 - RNA, 13 nt, Human
augcacacauuuu

SEQ ID NO: 1807179 - RNA, 19 nt, Human
augccugucuuaauuuucu

SEQ ID NO: 1807180 - RNA, 18 nt, Human
auggauaggcacaggaaa

SEQ ID NO: 1807181 - RNA, 17 nt, Human
auggauaggcacaggaa

SEQ ID NO: 1807182 - RNA, 15 nt, Human
auggcugugccucug

SEQ ID NO: 1807183 - RNA, 16 nt, Human
auggcugugccucugc

SEQ ID NO: 1807184 - RNA, 17 nt, Human
auggcugugccucugcc

SEQ ID NO: 1807185 - RNA, 18 nt, Human
augcuuuaggauguacag

SEQ ID NO: 1807186 - RNA, 15 nt, Human
augcuuguacauaau

SEQ ID NO: 1807187 - RNA, 16 nt, Human
augcuuguacauaaug

SEQ ID NO: 1807188 - RNA, 21 nt, Human
augcuuuaggauguacaguua

SEQ ID NO: 1807189 - RNA, 17 nt, Human
auggcuuuugugcauua

SEQ ID NO: 1807190 - RNA, 16 nt, Human
auggcuuuugugcauu

SEQ ID NO: 1807191 - RNA, 18 nt, Human
auggcuuuugugcauuau

SEQ ID NO: 1807192 - RNA, 12 nt, Human
augcugccucca

SEQ ID NO: 1807193 - RNA, 15 nt, Human
augcugccuccagaa

SEQ ID NO: 1807194 - RNA, 16 nt, Human
augcugcccugugagu

SEQ ID NO: 1807195 - RNA, 13 nt, Human
augcugcccugug

SEQ ID NO: 1807196 - RNA, 14 nt, Human
augcugcccuguga

SEQ ID NO: 1807197 - RNA, 15 nt, Human
augcugcccugugag

SEQ ID NO: 1807198 - RNA, 20 nt, Human
augcugacuguacuccuccc

SEQ ID NO: 1807199 - RNA, 21 nt, Human
augcugacuguacuccuccca

SEQ ID NO: 1807200 - RNA, 19 nt, Human
augcugacuguacuccucc

SEQ ID NO: 1807201 - RNA, 13 nt, Human
augucacaggcag

SEQ ID NO: 1807202 - RNA, 23 nt, Human
auguaauuuuguguaagaaauac

SEQ ID NO: 1807203 - RNA, 22 nt, Human
auguaauuuuguguaagaaaua

SEQ ID NO: 1807204 - RNA, 17 nt, Human
auguaauuuuguguaag

SEQ ID NO: 1807205 - RNA, 16 nt, Human
auguaauuuuguguaa

SEQ ID NO: 1807206 - RNA, 15 nt, Human
auguaauuuugugua

SEQ ID NO: 1807207 - RNA, 12 nt, Human
auguaauuuugu

SEQ ID NO: 1807208 - RNA, 17 nt, Human
augugaaaucauucauu

SEQ ID NO: 1807209 - RNA, 18 nt, Human
augugaaaucauucauuu

SEQ ID NO: 1807210 - RNA, 19 nt, Human
augucacaggcagguccag

SEQ ID NO: 1807211 - RNA, 14 nt, Human
augugaaacauguu

SEQ ID NO: 1807212 - RNA, 20 nt, Human
augggugcuuggaggaagga

SEQ ID NO: 1807213 - RNA, 21 nt, Human
augggugcuuggaggaaggaa

SEQ ID NO: 1807214 - RNA, 23 nt, Human
augggugcuuggaggaaggaaac

SEQ ID NO: 1807215 - RNA, 13 nt, Human
auguguaaguauu

SEQ ID NO: 1807216 - RNA, 13 nt, Human
auguucucugagg

SEQ ID NO: 1807217 - RNA, 17 nt, Human
auguucucucuucucca

SEQ ID NO: 1807218 - RNA, 16 nt, Human
auguucucucuucucc

SEQ ID NO: 1807219 - RNA, 14 nt, Human
auguucugggacac

SEQ ID NO: 1807220 - RNA, 17 nt, Human
auguucucugaggacac

SEQ ID NO: 1807221 - RNA, 15 nt, Human
auguucugggacaca

SEQ ID NO: 1807222 - RNA, 14 nt, Human
auguuugccucugc

SEQ ID NO: 1807223 - RNA, 17 nt, Human
auguuugccucugccuc

SEQ ID NO: 1807224 - RNA, 15 nt, Human
auguuugccucugcc

SEQ ID NO: 1807225 - RNA, 14 nt, Human
auguucuuaauucu

SEQ ID NO: 1807226 - RNA, 20 nt, Human
augaaugucagugugacuga

SEQ ID NO: 1807227 - RNA, 13 nt, Human
augaaugaauggc

SEQ ID NO: 1807228 - RNA, 18 nt, Human
augaagauguagaggaga

SEQ ID NO: 1807229 - RNA, 15 nt, Human
augaaagggcccaga

SEQ ID NO: 1807230 - RNA, 22 nt, Human
uuggggggcugaggugggagga

SEQ ID NO: 1807231 - RNA, 18 nt, Human
uugggccccagaggcugg

SEQ ID NO: 1807232 - RNA, 14 nt, Human
uuggggauauuuuu

SEQ ID NO: 1807233 - RNA, 18 nt, Human
uuggcuagagguucaaag

SEQ ID NO: 1807234 - RNA, 23 nt, Human
uuggcgcugccccuggcagcccc

SEQ ID NO: 1807235 - RNA, 15 nt, Human
augaaagcagggacu

SEQ ID NO: 1807236 - RNA, 23 nt, Human
aucuuuggacagaagcagcucuu

SEQ ID NO: 1807237 - RNA, 13 nt, Human
aucuuuuuauuca

SEQ ID NO: 1807238 - RNA, 13 nt, Human
uuggcugcaggga

SEQ ID NO: 1807239 - RNA, 22 nt, Human
aucuuuaauuuuacauuuccua

SEQ ID NO: 1807240 - RNA, 16 nt, Human
aucuuuaauuuuacau

SEQ ID NO: 1807241 - RNA, 21 nt, Human
aucuuuaauuuuacauuuccu

SEQ ID NO: 1807242 - RNA, 22 nt, Human
aucuuuggacagaagcagcucu

SEQ ID NO: 1807243 - RNA, 14 nt, Human
augacuuacuguac

SEQ ID NO: 1807244 - RNA, 22 nt, Human
augacuuaagcacacuugacau

SEQ ID NO: 1807245 - RNA, 18 nt, Human
augacacgaauauugcug

SEQ ID NO: 1807246 - RNA, 17 nt, Human
augacuuacuguacaug

SEQ ID NO: 1807247 - RNA, 16 nt, Human
augacuuacuguacau

SEQ ID NO: 1807248 - RNA, 17 nt, Human
augagaaaaugucuuua

SEQ ID NO: 1807249 - RNA, 22 nt, Human
augagaaagguugaagcaccaa

SEQ ID NO: 1807250 - RNA, 21 nt, Human
augagaaagguugaagcacca

SEQ ID NO: 1807251 - RNA, 15 nt, Human
augagaaaucuaaaa

SEQ ID NO: 1807252 - RNA, 18 nt, Human
augagaaaucuaaaaaac

SEQ ID NO: 1807253 - RNA, 23 nt, Human
augagaaaucuaaaaaacgaaaa

SEQ ID NO: 1807254 - RNA, 22 nt, Human
augacacaugcaaggucauuuu

SEQ ID NO: 1807255 - RNA, 14 nt, Human
augacacaugcaag

SEQ ID NO: 1807256 - RNA, 14 nt, Human
aucucagggccugg

SEQ ID NO: 1807257 - RNA, 11 nt, Human
aucucagccca

SEQ ID NO: 1807258 - RNA, 15 nt, Human
auccuaguuccacca

SEQ ID NO: 1807259 - RNA, 19 nt, Human
auccuaguuccaccaucaa

SEQ ID NO: 1807260 - RNA, 16 nt, Human
aucucacacaugagca

SEQ ID NO: 1807261 - RNA, 15 nt, Human
aucucacacaugagc

SEQ ID NO: 1807262 - RNA, 13 nt, Human
aucuccaaaauaa

SEQ ID NO: 1807263 - RNA, 15 nt, Human
aucuccacuccagau

SEQ ID NO: 1807264 - RNA, 16 nt, Human
aucuccccaucauugg

SEQ ID NO: 1807265 - RNA, 14 nt, Human
aucucccccagccc

SEQ ID NO: 1807266 - RNA, 12 nt, Human
aucucccccagc

SEQ ID NO: 1807267 - RNA, 13 nt, Human
aucucccccagcc

SEQ ID NO: 1807268 - RNA, 19 nt, Human
uugcacaaaccaauuaaac

SEQ ID NO: 1807269 - RNA, 15 nt, Human
uugauucagacagcu

SEQ ID NO: 1807270 - RNA, 16 nt, Human
uugauucagacagcug

SEQ ID NO: 1807271 - RNA, 12 nt, Human
uugcaugaggcu

SEQ ID NO: 1807272 - RNA, 14 nt, Human
uugcaccacugcac

SEQ ID NO: 1807273 - RNA, 14 nt, Human
uugcaucugaaaau

SEQ ID NO: 1807274 - RNA, 19 nt, Human
aucucuucuggguuccuuc

SEQ ID NO: 1807275 - RNA, 12 nt, Human
uugaugccuggc

SEQ ID NO: 1807276 - RNA, 15 nt, Human
uugaugggauuuggu

SEQ ID NO: 1807277 - RNA, 23 nt, Human
uugauguaaagauguucuggaua

SEQ ID NO: 1807278 - RNA, 14 nt, Human
uugauguaaagaug

SEQ ID NO: 1807279 - RNA, 23 nt, Human
uugauggugaugaaauguaaaua

SEQ ID NO: 1807280 - RNA, 14 nt, Human
uugauucagacagc

SEQ ID NO: 1807281 - RNA, 16 nt, Human
uugaugugugucuagg

SEQ ID NO: 1807282 - RNA, 18 nt, Human
aucugaugcaagcaagaa

SEQ ID NO: 1807283 - RNA, 13 nt, Human
uugccgucuaccu

SEQ ID NO: 1807284 - RNA, 14 nt, Human
uugccguuauuaaa

SEQ ID NO: 1807285 - RNA, 19 nt, Human
uugccgucuaccugagggg

SEQ ID NO: 1807286 - RNA, 15 nt, Human
uugccgucuaccuga

SEQ ID NO: 1807287 - RNA, 18 nt, Human
uugccgucuaccugaggg

SEQ ID NO: 1807288 - RNA, 19 nt, Human
aucuggguucacugcaacc

SEQ ID NO: 1807289 - RNA, 17 nt, Human
aucuggguucacugcaa

SEQ ID NO: 1807290 - RNA, 19 nt, Human
aucuugcucugcugacaga

SEQ ID NO: 1807291 - RNA, 17 nt, Human
aucuugcucugcugaca

SEQ ID NO: 1807292 - RNA, 18 nt, Human
aucuugaauuguaaggaa

SEQ ID NO: 1807293 - RNA, 20 nt, Human
uuuauggcuuuugugcauua

SEQ ID NO: 1807294 - RNA, 22 nt, Human
uuuaugggucagaguuccgacu

SEQ ID NO: 1807295 - RNA, 24 nt, Human
uuuauggcuuuugugcauuaucua

SEQ ID NO: 1807296 - RNA, 17 nt, Human
uuuagauguaauuuugu

SEQ ID NO: 1807297 - RNA, 16 nt, Human
uuuaguaucuuuuuau

SEQ ID NO: 1807298 - RNA, 15 nt, Human
uuuaguagagacagg

SEQ ID NO: 1807299 - RNA, 19 nt, Human
augcuagaacucccuuuca

SEQ ID NO: 1807300 - RNA, 16 nt, Human
augcuagaacucccuu

SEQ ID NO: 1807301 - RNA, 15 nt, Human
augcuagaacucccu

SEQ ID NO: 1807302 - RNA, 15 nt, Human
augcucugcauguua

SEQ ID NO: 1807303 - RNA, 13 nt, Human
augcugguuuuuc

SEQ ID NO: 1807304 - RNA, 22 nt, Human
augcuguaacuuucugaaauaa

SEQ ID NO: 1807305 - RNA, 15 nt, Human
auggaagacagcucu

SEQ ID NO: 1807306 - RNA, 16 nt, Human
auggaacacucugaga

SEQ ID NO: 1807307 - RNA, 11 nt, Human
auggaacacuc

SEQ ID NO: 1807308 - RNA, 14 nt, Human
auggaacacucuga

SEQ ID NO: 1807309 - RNA, 15 nt, Human
auggaacacucugag

SEQ ID NO: 1807310 - RNA, 19 nt, Human
augcugucccuuacgugag

SEQ ID NO: 1807311 - RNA, 23 nt, Human
augcugucccuuacgugaguccu

SEQ ID NO: 1807312 - RNA, 19 nt, Human
auggacaugaucuucuuua

SEQ ID NO: 1807313 - RNA, 14 nt, Human
auggacaugaucuu

SEQ ID NO: 1807314 - RNA, 13 nt, Human
uuucagaaaugug

SEQ ID NO: 1807315 - RNA, 20 nt, Human
uuucacugcuggcugccuua

SEQ ID NO: 1807316 - RNA, 22 nt, Human
uuucacugcuggcugccuuaga

SEQ ID NO: 1807317 - RNA, 17 nt, Human
uuucacugcuggcugcc

SEQ ID NO: 1807318 - RNA, 18 nt, Human
uuucacugcuggcugccu

SEQ ID NO: 1807319 - RNA, 14 nt, Human
uuucacugcuggcu

SEQ ID NO: 1807320 - RNA, 16 nt, Human
auggaagacagcucuu

SEQ ID NO: 1807321 - RNA, 17 nt, Human
uuucauauuuuaaacag

SEQ ID NO: 1807322 - RNA, 20 nt, Human
auggccuuugcuugaaagaa

SEQ ID NO: 1807323 - RNA, 20 nt, Human
auggcuaguaucaaaagaaa

SEQ ID NO: 1807324 - RNA, 22 nt, Human
auggccagguggccacuccaga

SEQ ID NO: 1807325 - RNA, 16 nt, Human
auggccagguggccac

SEQ ID NO: 1807326 - RNA, 21 nt, Human
auggccgggcgcgguggcuca

SEQ ID NO: 1807327 - RNA, 23 nt, Human
auggcacaucagcacgauuucug

SEQ ID NO: 1807328 - RNA, 17 nt, Human
auggcacaucagcacga

SEQ ID NO: 1807329 - RNA, 19 nt, Human
auggcaaggacugcaggga

SEQ ID NO: 1807330 - RNA, 22 nt, Human
auggcacaaucucggcucacug

SEQ ID NO: 1807331 - RNA, 19 nt, Human
auggacguguuaugacucc

SEQ ID NO: 1807332 - RNA, 20 nt, Human
auggacguguuaugacucca

SEQ ID NO: 1807333 - RNA, 18 nt, Human
auggauuuccagccaaag

SEQ ID NO: 1807334 - RNA, 23 nt, Human
auggacguguuaugacuccagaa

SEQ ID NO: 1807335 - RNA, 17 nt, Human
augcagccucacagucc

SEQ ID NO: 1807336 - RNA, 14 nt, Human
augcagccucacag

SEQ ID NO: 1807337 - RNA, 15 nt, Human
augcagccucacagu

SEQ ID NO: 1807338 - RNA, 13 nt, Human
augcagccucaca

SEQ ID NO: 1807339 - RNA, 15 nt, Human
augcaguuuuccuua

SEQ ID NO: 1807340 - RNA, 11 nt, Human
augcccagccc

SEQ ID NO: 1807341 - RNA, 17 nt, Human
augccacuaaauugaca

SEQ ID NO: 1807342 - RNA, 15 nt, Human
augccacuaaauuga

SEQ ID NO: 1807343 - RNA, 16 nt, Human
augcacuuuguucugg

SEQ ID NO: 1807344 - RNA, 15 nt, Human
augcacuuuguucug

SEQ ID NO: 1807345 - RNA, 13 nt, Human
uuguuuucagugu

SEQ ID NO: 1807346 - RNA, 16 nt, Human
uuguuuucaguguaca

SEQ ID NO: 1807347 - RNA, 14 nt, Human
uuuaaauguuuuuu

SEQ ID NO: 1807348 - RNA, 15 nt, Human
uuguuuuacugucuu

SEQ ID NO: 1807349 - RNA, 12 nt, Human
uuuaauuuuaca

SEQ ID NO: 1807350 - RNA, 16 nt, Human
uuuaagugcugcauuu

SEQ ID NO: 1807351 - RNA, 15 nt, Human
uuuaagugcugcauu

SEQ ID NO: 1807352 - RNA, 19 nt, Human
uuuaagugcugcauuuaaa

SEQ ID NO: 1807353 - RNA, 17 nt, Human
uuuaagugcugcauuua

SEQ ID NO: 1807354 - RNA, 21 nt, Human
augauucaacagguuuuccug

SEQ ID NO: 1807355 - RNA, 17 nt, Human
augauuucagcucacug

SEQ ID NO: 1807356 - RNA, 20 nt, Human
augauuaaccacuucagcug

SEQ ID NO: 1807357 - RNA, 21 nt, Human
augauuaaccacuucagcuga

SEQ ID NO: 1807358 - RNA, 19 nt, Human
augauuaaccacuucagcu

SEQ ID NO: 1807359 - RNA, 14 nt, Human
augcaccagcccuu

SEQ ID NO: 1807360 - RNA, 12 nt, Human
augcacuuuguu

SEQ ID NO: 1807361 - RNA, 13 nt, Human
augcaccagcccu

SEQ ID NO: 1807362 - RNA, 16 nt, Human
augauuuuuaaagaaa

SEQ ID NO: 1807363 - RNA, 14 nt, Human
augauuuuuaaaga

SEQ ID NO: 1807364 - RNA, 19 nt, Human
augauuucagcucacugca

SEQ ID NO: 1807365 - RNA, 18 nt, Human
uuguguaagaaauacaga

SEQ ID NO: 1807366 - RNA, 14 nt, Human
uuguguaagaaaua

SEQ ID NO: 1807367 - RNA, 13 nt, Human
uugugguuaaucu

SEQ ID NO: 1807368 - RNA, 20 nt, Human
uuguucuggcucuuccaggc

SEQ ID NO: 1807369 - RNA, 22 nt, Human
uuguucuggcucuuccaggcug

SEQ ID NO: 1807370 - RNA, 17 nt, Human
uuguguguuuauuguca

SEQ ID NO: 1807371 - RNA, 19 nt, Human
uuguucuggcucuuccagg

SEQ ID NO: 1807372 - RNA, 21 nt, Human
uugugaggaagccgcuggggc

SEQ ID NO: 1807373 - RNA, 18 nt, Human
uugugauacaaugcugug

SEQ ID NO: 1807374 - RNA, 19 nt, Human
uugugauacaaugcugugc

SEQ ID NO: 1807375 - RNA, 17 nt, Human
uuccccuguucacucua

SEQ ID NO: 1807376 - RNA, 14 nt, Human
uuccccuguucacu

SEQ ID NO: 1807377 - RNA, 22 nt, Human
uuccccuuccuaauuccacagc

SEQ ID NO: 1807378 - RNA, 17 nt, Human
uucccuacuuccuguga

SEQ ID NO: 1807379 - RNA, 14 nt, Human
uucccuacuuccug

SEQ ID NO: 1807380 - RNA, 16 nt, Human
uucccuacuuccugug

SEQ ID NO: 1807381 - RNA, 18 nt, Human
uucccuuuuuuggcugcu

SEQ ID NO: 1807382 - RNA, 19 nt, Human
uucccuuuuuuggcugcug

SEQ ID NO: 1807383 - RNA, 20 nt, Human
uucccuuuuuuggcugcuga

SEQ ID NO: 1807384 - RNA, 22 nt, Human
uucccccuguuucagaggcuca

SEQ ID NO: 1807385 - RNA, 22 nt, Human
aucaaccccuucgcuccugugu

SEQ ID NO: 1807386 - RNA, 20 nt, Human
aucaaccccuucgcuccugu

SEQ ID NO: 1807387 - RNA, 19 nt, Human
aucaaccccuucgcuccug

SEQ ID NO: 1807388 - RNA, 22 nt, Human
aucaaguuggcuucuaaucaaa

SEQ ID NO: 1807389 - RNA, 23 nt, Human
aucaaguuggcuucuaaucaaag

SEQ ID NO: 1807390 - RNA, 20 nt, Human
uuccuucaaagcaaaugucu

SEQ ID NO: 1807391 - RNA, 13 nt, Human
uuccucuccacug

SEQ ID NO: 1807392 - RNA, 14 nt, Human
uuccucuccacugc

SEQ ID NO: 1807393 - RNA, 15 nt, Human
uuccucuccacugcc

SEQ ID NO: 1807394 - RNA, 16 nt, Human
uuccucuccacugccu

SEQ ID NO: 1807395 - RNA, 12 nt, Human
uuccucuccacu

SEQ ID NO: 1807396 - RNA, 13 nt, Human
uucuauaauuuaa

SEQ ID NO: 1807397 - RNA, 14 nt, Human
uucuauaauuuaaa

SEQ ID NO: 1807398 - RNA, 21 nt, Human
uucucacugccaugccagcuu

SEQ ID NO: 1807399 - RNA, 13 nt, Human
aucaggccaggcc

SEQ ID NO: 1807400 - RNA, 14 nt, Human
aucaggccaggccc

SEQ ID NO: 1807401 - RNA, 19 nt, Human
aucagacuaugaaguuuuu

SEQ ID NO: 1807402 - RNA, 13 nt, Human
uucucagcuccca

SEQ ID NO: 1807403 - RNA, 13 nt, Human
uucucagaaucuc

SEQ ID NO: 1807404 - RNA, 20 nt, Human
uucgauacaccgggccugga

SEQ ID NO: 1807405 - RNA, 21 nt, Human
uucgcaggauucuuccucccu

SEQ ID NO: 1807406 - RNA, 19 nt, Human
uucuaaaucuccaaaauaa

SEQ ID NO: 1807407 - RNA, 13 nt, Human
uucgcuccugugu

SEQ ID NO: 1807408 - RNA, 15 nt, Human
uucuaaaguaaaaac

SEQ ID NO: 1807409 - RNA, 12 nt, Human
uucuugcaaagu

SEQ ID NO: 1807410 - RNA, 13 nt, Human
uucuugcaaagua

SEQ ID NO: 1807411 - RNA, 13 nt, Human
uucuuucuuccuc

SEQ ID NO: 1807412 - RNA, 15 nt, Human
uucuuucuuccucug

SEQ ID NO: 1807413 - RNA, 22 nt, Human
uucuuucuggcuaugcauuuga

SEQ ID NO: 1807414 - RNA, 21 nt, Human
uucuguuggccagugugacaa

SEQ ID NO: 1807415 - RNA, 17 nt, Human
uucuguugcugccucau

SEQ ID NO: 1807416 - RNA, 20 nt, Human
uucuguuuuucuaggccugg

SEQ ID NO: 1807417 - RNA, 15 nt, Human
uucuguugcugccuc

SEQ ID NO: 1807418 - RNA, 16 nt, Human
uucuguugcugccuca

SEQ ID NO: 1807419 - RNA, 18 nt, Human
uucuguucuuucuggcua

SEQ ID NO: 1807420 - RNA, 11 nt, Human
uucuuccucug

SEQ ID NO: 1807421 - RNA, 12 nt, Human
uucuuccucugc

SEQ ID NO: 1807422 - RNA, 13 nt, Human
uucuuccucugcu

SEQ ID NO: 1807423 - RNA, 23 nt, Human
uucuuccucccucccucuuuccc

SEQ ID NO: 1807424 - RNA, 13 nt, Human
uucuuaauucuua

SEQ ID NO: 1807425 - RNA, 21 nt, Human
auccuaggcauuugcugaaua

SEQ ID NO: 1807426 - RNA, 13 nt, Human
auccuaguuccac

SEQ ID NO: 1807427 - RNA, 12 nt, Human
auccuaaugaau

SEQ ID NO: 1807428 - RNA, 13 nt, Human
auccuaaugaaug

SEQ ID NO: 1807429 - RNA, 14 nt, Human
auccuacaagacac

SEQ ID NO: 1807430 - RNA, 19 nt, Human
auccuaaugaaugcauaaa

SEQ ID NO: 1807431 - RNA, 18 nt, Human
uugaacccgggaggcaga

SEQ ID NO: 1807432 - RNA, 21 nt, Human
uugaaauuuuuauuaaauuau

SEQ ID NO: 1807433 - RNA, 21 nt, Human
uugaaauauggucuuuugguu

SEQ ID NO: 1807434 - RNA, 11 nt, Human
uugaaaucuuu

SEQ ID NO: 1807435 - RNA, 20 nt, Human
uugaaauauaggaacuuaaa

SEQ ID NO: 1807436 - RNA, 16 nt, Human
uugaaaguuuacagga

SEQ ID NO: 1807437 - RNA, 17 nt, Human
uucucuacucuagggaa

SEQ ID NO: 1807438 - RNA, 16 nt, Human
uucucuuuucaaaaca

SEQ ID NO: 1807439 - RNA, 15 nt, Human
uucugcacacagcac

SEQ ID NO: 1807440 - RNA, 16 nt, Human
uucugacccaugcugc

SEQ ID NO: 1807441 - RNA, 14 nt, Human
uucugacccaugcu

SEQ ID NO: 1807442 - RNA, 19 nt, Human
uucugcagccacuauuguu

SEQ ID NO: 1807443 - RNA, 13 nt, Human
uucugccgcagcc

SEQ ID NO: 1807444 - RNA, 14 nt, Human
uucuccugccucag

SEQ ID NO: 1807445 - RNA, 12 nt, Human
uucuccugccuc

SEQ ID NO: 1807446 - RNA, 13 nt, Human
uucuccugccuca

SEQ ID NO: 1807447 - RNA, 21 nt, Human
aucauugaaaucuuuuugcuu

SEQ ID NO: 1807448 - RNA, 21 nt, Human
aucaggccaggcccucugccc

SEQ ID NO: 1807449 - RNA, 22 nt, Human
aucaggccaggcccucugccca

SEQ ID NO: 1807450 - RNA, 23 nt, Human
aucaggccaggcccucugcccac

SEQ ID NO: 1807451 - RNA, 22 nt, Human
uucugguugaugccugugaacu

SEQ ID NO: 1807452 - RNA, 20 nt, Human
uucuggcuaugcauuugaaa

SEQ ID NO: 1807453 - RNA, 18 nt, Human
uucuggcuaugcauuuga

SEQ ID NO: 1807454 - RNA, 14 nt, Human
uucugccgcagccc

SEQ ID NO: 1807455 - RNA, 15 nt, Human
uucugccgcagcccu

SEQ ID NO: 1807456 - RNA, 16 nt, Human
uucugccgcagcccug

SEQ ID NO: 1807457 - RNA, 15 nt, Human
uucuggcucuuccag

SEQ ID NO: 1807458 - RNA, 15 nt, Human
aucccaccaacccuc

SEQ ID NO: 1807459 - RNA, 17 nt, Human
uuauuuuuuucugaauu

SEQ ID NO: 1807460 - RNA, 13 nt, Human
uuauuuuuuucug

SEQ ID NO: 1807461 - RNA, 17 nt, Human
uuauuuuuagacagagu

SEQ ID NO: 1807462 - RNA, 18 nt, Human
uuauuuuuagacagaguc

SEQ ID NO: 1807463 - RNA, 21 nt, Human
uucaagcgauucuucugcuuc

SEQ ID NO: 1807464 - RNA, 21 nt, Human
uucaaaauuguuacaaauugu

SEQ ID NO: 1807465 - RNA, 20 nt, Human
uucaaaaguuuguuugcuua

SEQ ID NO: 1807466 - RNA, 17 nt, Human
uucaaaauaaaaaugag

SEQ ID NO: 1807467 - RNA, 17 nt, Human
uucaagugauucucaug

SEQ ID NO: 1807468 - RNA, 23 nt, Human
uucacaagacccaaaaggcagaa

SEQ ID NO: 1807469 - RNA, 20 nt, Human
uucacagaugggugcuugga

SEQ ID NO: 1807470 - RNA, 15 nt, Human
uucacaguucucucc

SEQ ID NO: 1807471 - RNA, 20 nt, Human
uucacaguucucuccuucuu

SEQ ID NO: 1807472 - RNA, 17 nt, Human
auaggcguaacuaauuu

SEQ ID NO: 1807473 - RNA, 22 nt, Human
auagcuuuucccuuuuuuuaag

SEQ ID NO: 1807474 - RNA, 12 nt, Human
auaggaaaaacu

SEQ ID NO: 1807475 - RNA, 14 nt, Human
auaggaaaaacuga

SEQ ID NO: 1807476 - RNA, 16 nt, Human
auaggaaaaacugauu

SEQ ID NO: 1807477 - RNA, 17 nt, Human
auaggaaaaacugauuu

SEQ ID NO: 1807478 - RNA, 15 nt, Human
uucacuuacagcacc

SEQ ID NO: 1807479 - RNA, 22 nt, Human
uucacuuaaguuaguuccacug

SEQ ID NO: 1807480 - RNA, 12 nt, Human
auauauaaccag

SEQ ID NO: 1807481 - RNA, 13 nt, Human
auauauaaccagu

SEQ ID NO: 1807482 - RNA, 16 nt, Human
auauaaaagacugacc

SEQ ID NO: 1807483 - RNA, 17 nt, Human
auaguggcuuaaaacaa

SEQ ID NO: 1807484 - RNA, 15 nt, Human
auaguggugugauuu

SEQ ID NO: 1807485 - RNA, 21 nt, Human
auagugaggcaucgcaaugua

SEQ ID NO: 1807486 - RNA, 22 nt, Human
auaguuggcuaggaccccucca

SEQ ID NO: 1807487 - RNA, 20 nt, Human
auaguuguaccgcaauguga

SEQ ID NO: 1807488 - RNA, 22 nt, Human
auaguuaagcgugcauaaguua

SEQ ID NO: 1807489 - RNA, 23 nt, Human
uucccaaagcagugcaugcuguc

SEQ ID NO: 1807490 - RNA, 19 nt, Human
uuccauaaucuggacuccu

SEQ ID NO: 1807491 - RNA, 22 nt, Human
uuccauaaucuggacuccucug

SEQ ID NO: 1807492 - RNA, 23 nt, Human
uuccauaaucuggacuccucugu

SEQ ID NO: 1807493 - RNA, 21 nt, Human
uuccaggggugggacacccug

SEQ ID NO: 1807494 - RNA, 17 nt, Human
uuccagugaggcucugc

SEQ ID NO: 1807495 - RNA, 19 nt, Human
uuccagugaggcucugccc

SEQ ID NO: 1807496 - RNA, 20 nt, Human
uuccagugaggcucugcccu

SEQ ID NO: 1807497 - RNA, 21 nt, Human
uuccagugaggcucugcccuu

SEQ ID NO: 1807498 - RNA, 22 nt, Human
uuccagugaggcucugcccuug

SEQ ID NO: 1807499 - RNA, 15 nt, Human
uucccaacacaaaga

SEQ ID NO: 1807500 - RNA, 13 nt, Human
uucccaacacaaa

SEQ ID NO: 1807501 - RNA, 16 nt, Human
uucccaagcucugcuc

SEQ ID NO: 1807502 - RNA, 15 nt, Human
uucccaagcucugcu

SEQ ID NO: 1807503 - RNA, 14 nt, Human
uucccaagcucugc

SEQ ID NO: 1807504 - RNA, 13 nt, Human
uucccaagcucug

SEQ ID NO: 1807505 - RNA, 18 nt, Human
uucccaagcucugcuccu

SEQ ID NO: 1807506 - RNA, 12 nt, Human
uucccaccucuc

SEQ ID NO: 1807507 - RNA, 22 nt, Human
uucccaccucucucacuccuug

SEQ ID NO: 1807508 - RNA, 22 nt, Human
uuccacaagagcccaggccucc

SEQ ID NO: 1807509 - RNA, 19 nt, Human
uuccaccaucaagccacca

SEQ ID NO: 1807510 - RNA, 17 nt, Human
uuccaggggugggacac

SEQ ID NO: 1807511 - RNA, 13 nt, Human
uuccacagaggac

SEQ ID NO: 1807512 - RNA, 16 nt, Human
auauguggaguucauc

SEQ ID NO: 1807513 - RNA, 15 nt, Human
auauguggaguucau

SEQ ID NO: 1807514 - RNA, 18 nt, Human
uucauuuaggugaggaag

SEQ ID NO: 1807515 - RNA, 15 nt, Human
uuccaaggguacuaa

SEQ ID NO: 1807516 - RNA, 17 nt, Human
uuccaaggguacuaagg

SEQ ID NO: 1807517 - RNA, 22 nt, Human
auaugcacacauuuuuuaaaug

SEQ ID NO: 1807518 - RNA, 16 nt, Human
auaugcacacauuuuu

SEQ ID NO: 1807519 - RNA, 15 nt, Human
auaugcacacauuuu

SEQ ID NO: 1807520 - RNA, 14 nt, Human
auaugcacacauuu

SEQ ID NO: 1807521 - RNA, 16 nt, Human
auauguaacaagccac

SEQ ID NO: 1807522 - RNA, 17 nt, Human
auauguaacaagccacc

SEQ ID NO: 1807523 - RNA, 22 nt, Human
auauguaaaugguaugucauuc

SEQ ID NO: 1807524 - RNA, 16 nt, Human
auaucugaaaauguau

SEQ ID NO: 1807525 - RNA, 17 nt, Human
auaucugaaaauguaug

SEQ ID NO: 1807526 - RNA, 20 nt, Human
auaucugaaaauguaugugu

SEQ ID NO: 1807527 - RNA, 14 nt, Human
auauauuuuaagac

SEQ ID NO: 1807528 - RNA, 12 nt, Human
auauauuuuaag

SEQ ID NO: 1807529 - RNA, 13 nt, Human
auauauuuuaaga

SEQ ID NO: 1807530 - RNA, 21 nt, Human
uucaucccucuggggcuguuc

SEQ ID NO: 1807531 - RNA, 17 nt, Human
uucaucccucuggggcu

SEQ ID NO: 1807532 - RNA, 19 nt, Human
uucauaauuauuauuuggc

SEQ ID NO: 1807533 - RNA, 18 nt, Human
uucagugccuuauggaac

SEQ ID NO: 1807534 - RNA, 16 nt, Human
uucagugccaaaaaca

SEQ ID NO: 1807535 - RNA, 12 nt, Human
uucagugccuua

SEQ ID NO: 1807536 - RNA, 13 nt, Human
uucagugccuuau

SEQ ID NO: 1807537 - RNA, 13 nt, Human
uucagaaaugugu

SEQ ID NO: 1807538 - RNA, 11 nt, Human
uucagaaaugu

SEQ ID NO: 1807539 - RNA, 15 nt, Human
auugcaacaggcugg

SEQ ID NO: 1807540 - RNA, 17 nt, Human
auugaccugaggcccuu

SEQ ID NO: 1807541 - RNA, 13 nt, Human
auugaccugaggc

SEQ ID NO: 1807542 - RNA, 18 nt, Human
auugacaggauuauugga

SEQ ID NO: 1807543 - RNA, 21 nt, Human
auugacccacaagaaaugaaa

SEQ ID NO: 1807544 - RNA, 21 nt, Human
auugcaacaggcugggcuuca

SEQ ID NO: 1807545 - RNA, 16 nt, Human
auugcaacaggcuggg

SEQ ID NO: 1807546 - RNA, 12 nt, Human
auugcaauagaa

SEQ ID NO: 1807547 - RNA, 23 nt, Human
auugccauuucuuccacaagagc

SEQ ID NO: 1807548 - RNA, 17 nt, Human
auugcauuuccugacag

SEQ ID NO: 1807549 - RNA, 21 nt, Human
auugcccacgcuggagugcag

SEQ ID NO: 1807550 - RNA, 17 nt, Human
auugcccacgcuggagu

SEQ ID NO: 1807551 - RNA, 19 nt, Human
auugcggacagccacggcc

SEQ ID NO: 1807552 - RNA, 18 nt, Human
auugcggacagccacggc

SEQ ID NO: 1807553 - RNA, 16 nt, Human
auugcggacagccacg

SEQ ID NO: 1807554 - RNA, 14 nt, Human
auucucagaaucuc

SEQ ID NO: 1807555 - RNA, 13 nt, Human
auucuacuuugag

SEQ ID NO: 1807556 - RNA, 16 nt, Human
auucuacuuugagugc

SEQ ID NO: 1807557 - RNA, 18 nt, Human
auucucagaaucucaaau

SEQ ID NO: 1807558 - RNA, 20 nt, Human
auucucagaaucucaaauaa

SEQ ID NO: 1807559 - RNA, 13 nt, Human
auucuccaccugc

SEQ ID NO: 1807560 - RNA, 16 nt, Human
auucuccaccugccag

SEQ ID NO: 1807561 - RNA, 17 nt, Human
auucuccaccugccagg

SEQ ID NO: 1807562 - RNA, 20 nt, Human
auugacacuuaaaaaugguu

SEQ ID NO: 1807563 - RNA, 18 nt, Human
auucuccaccugccaggg

SEQ ID NO: 1807564 - RNA, 14 nt, Human
auugcuacuguccu

SEQ ID NO: 1807565 - RNA, 21 nt, Human
auuuaaaacauuaaaauauaa

SEQ ID NO: 1807566 - RNA, 20 nt, Human
auuuaaaacauuaaaauaua

SEQ ID NO: 1807567 - RNA, 19 nt, Human
auuuaaaacauuaaaauau

SEQ ID NO: 1807568 - RNA, 16 nt, Human
auuuaacagaaaugua

SEQ ID NO: 1807569 - RNA, 15 nt, Human
auuuaacagaaaugu

SEQ ID NO: 1807570 - RNA, 19 nt, Human
auuuaacagaaauguacag

SEQ ID NO: 1807571 - RNA, 17 nt, Human
auuuaacagaaauguac

SEQ ID NO: 1807572 - RNA, 20 nt, Human
auuuaacagaaauguacagc

SEQ ID NO: 1807573 - RNA, 22 nt, Human
auuuacaacugggggaggguga

SEQ ID NO: 1807574 - RNA, 19 nt, Human
auuuacccuucuuuucuga

SEQ ID NO: 1807575 - RNA, 16 nt, Human
auuuacaaaugggaaa

SEQ ID NO: 1807576 - RNA, 23 nt, Human
auuuaauuuuuuugagacagagu

SEQ ID NO: 1807577 - RNA, 19 nt, Human
auuuaauuuuuuugagaca

SEQ ID NO: 1807578 - RNA, 14 nt, Human
auuguauuacaaau

SEQ ID NO: 1807579 - RNA, 15 nt, Human
auuguauuacaaauc

SEQ ID NO: 1807580 - RNA, 15 nt, Human
auugugaaauuauuc

SEQ ID NO: 1807581 - RNA, 13 nt, Human
auugugccccugc

SEQ ID NO: 1807582 - RNA, 23 nt, Human
auuggcuuuggguugcaggaccu

SEQ ID NO: 1807583 - RNA, 17 nt, Human
auuugagcagggcucag

SEQ ID NO: 1807584 - RNA, 23 nt, Human
auuugaggucuguucuuuccaaa

SEQ ID NO: 1807585 - RNA, 15 nt, Human
auuugaggucuguuc

SEQ ID NO: 1807586 - RNA, 20 nt, Human
auuucuuuugccguuauuaa

SEQ ID NO: 1807587 - RNA, 20 nt, Human
auuuggugguuucagaaaug

SEQ ID NO: 1807588 - RNA, 18 nt, Human
auuuggugguuucagaaa

SEQ ID NO: 1807589 - RNA, 17 nt, Human
auuuggugguuucagaa

SEQ ID NO: 1807590 - RNA, 13 nt, Human
auuuauuauggca

SEQ ID NO: 1807591 - RNA, 22 nt, Human
auuuauuaaaugcccagccccu

SEQ ID NO: 1807592 - RNA, 20 nt, Human
auuuauuaaaugcccagccc

SEQ ID NO: 1807593 - RNA, 14 nt, Human
auuuccugugucuu

SEQ ID NO: 1807594 - RNA, 16 nt, Human
auuuauuauggcacau

SEQ ID NO: 1807595 - RNA, 13 nt, Human
auuucuaaaucuc

SEQ ID NO: 1807596 - RNA, 12 nt, Human
auuucuaaaucu

SEQ ID NO: 1807597 - RNA, 21 nt, Human
auuucuaaaucuccaaaauaa

SEQ ID NO: 1807598 - RNA, 21 nt, Human
auuuuacuuuaaaaggagcca

SEQ ID NO: 1807599 - RNA, 18 nt, Human
auuuuauguugcauagaa

SEQ ID NO: 1807600 - RNA, 21 nt, Human
auuuuauguugcauagaauaa

SEQ ID NO: 1807601 - RNA, 14 nt, Human
auuuuauguugcau

SEQ ID NO: 1807602 - RNA, 13 nt, Human
auuuuauuaugca

SEQ ID NO: 1807603 - RNA, 15 nt, Human
auuuuauuaugcaug

SEQ ID NO: 1807604 - RNA, 14 nt, Human
auuuuauuaugcau

SEQ ID NO: 1807605 - RNA, 17 nt, Human
auuuuauuaugcaugaa

SEQ ID NO: 1807606 - RNA, 22 nt, Human
auuuuacuguacagacagaaaa

SEQ ID NO: 1807607 - RNA, 20 nt, Human
auuuuacuguacagacagaa

SEQ ID NO: 1807608 - RNA, 23 nt, Human
auuucuuuugccguuauuaaaaa

SEQ ID NO: 1807609 - RNA, 22 nt, Human
uuuuuguuccacaaguuaaaua

SEQ ID NO: 1807610 - RNA, 19 nt, Human
auuaccacagacauacuaa

SEQ ID NO: 1807611 - RNA, 22 nt, Human
auuaccugaauuuuggcugugu

SEQ ID NO: 1807612 - RNA, 12 nt, Human
auuaccagggac

SEQ ID NO: 1807613 - RNA, 16 nt, Human
auuauauuuacaaaug

SEQ ID NO: 1807614 - RNA, 17 nt, Human
auuauauuuacaaaugg

SEQ ID NO: 1807615 - RNA, 23 nt, Human
auuauuuauuaaaugcccagccc

SEQ ID NO: 1807616 - RNA, 16 nt, Human
auuauuuuauguugca

SEQ ID NO: 1807617 - RNA, 18 nt, Human
auuauuuuauguugcaua

SEQ ID NO: 1807618 - RNA, 16 nt, Human
auucaaaaugauguau

SEQ ID NO: 1807619 - RNA, 14 nt, Human
auucagcucaugga

SEQ ID NO: 1807620 - RNA, 21 nt, Human
auucaguuguuagugugucuu

SEQ ID NO: 1807621 - RNA, 23 nt, Human
auucaggaagcucagggccuggc

SEQ ID NO: 1807622 - RNA, 16 nt, Human
auucaguuguuagugu

SEQ ID NO: 1807623 - RNA, 14 nt, Human
auucagcucugcaa

SEQ ID NO: 1807624 - RNA, 18 nt, Human
auucagcucugcaagaau

SEQ ID NO: 1807625 - RNA, 21 nt, Human
auucaggaagcucagggccug

SEQ ID NO: 1807626 - RNA, 22 nt, Human
auucaggaagcucagggccugg

SEQ ID NO: 1807627 - RNA, 19 nt, Human
auuccccaggaggccagcc

SEQ ID NO: 1807628 - RNA, 20 nt, Human
auuccccagauugcaacagg

SEQ ID NO: 1807629 - RNA, 16 nt, Human
auuccccaggaggcca

SEQ ID NO: 1807630 - RNA, 20 nt, Human
auuccacuuauaggaauuga

SEQ ID NO: 1807631 - RNA, 22 nt, Human
uuuuaaguuacacauuuuucag

SEQ ID NO: 1807632 - RNA, 21 nt, Human
uuuuaaguuacacauuuuuca

SEQ ID NO: 1807633 - RNA, 21 nt, Human
uuuuaagugcugcauuuaaaa

SEQ ID NO: 1807634 - RNA, 17 nt, Human
uuuuaagugcugcauuu

SEQ ID NO: 1807635 - RNA, 16 nt, Human
uuuuaagugcugcauu

SEQ ID NO: 1807636 - RNA, 21 nt, Human
auguucaucauccuaagcuau

SEQ ID NO: 1807637 - RNA, 19 nt, Human
auguucaucaaugaaugaa

SEQ ID NO: 1807638 - RNA, 16 nt, Human
auguugaagccuuugu

SEQ ID NO: 1807639 - RNA, 15 nt, Human
auguugaagccuuug

SEQ ID NO: 1807640 - RNA, 23 nt, Human
uuuuagaguugauacuacaguuu

SEQ ID NO: 1807641 - RNA, 19 nt, Human
uuuuaguugcaacuuugua

SEQ ID NO: 1807642 - RNA, 13 nt, Human
uuuuauaaacuuu

SEQ ID NO: 1807643 - RNA, 12 nt, Human
uuuuauaaacuu

SEQ ID NO: 1807644 - RNA, 16 nt, Human
auguuggccaggcugg

SEQ ID NO: 1807645 - RNA, 16 nt, Human
auguuggccaggcugc

SEQ ID NO: 1807646 - RNA, 14 nt, Human
auguuggccaggcu

SEQ ID NO: 1807647 - RNA, 15 nt, Human
auguugcauagaaua

SEQ ID NO: 1807648 - RNA, 13 nt, Human
auguuggccaggc

SEQ ID NO: 1807649 - RNA, 17 nt, Human
uuuuauaaacuuuaccu

SEQ ID NO: 1807650 - RNA, 14 nt, Human
uuuuauaaacuuua

SEQ ID NO: 1807651 - RNA, 19 nt, Human
uuuuauaaacuuuaccuuu

SEQ ID NO: 1807652 - RNA, 22 nt, Human
uuuuauguugcauagaauaaaa

SEQ ID NO: 1807653 - RNA, 19 nt, Human
uuuuaugugaaacauguuu

SEQ ID NO: 1807654 - RNA, 18 nt, Human
uuuuaugugaaacauguu

SEQ ID NO: 1807655 - RNA, 19 nt, Human
uuuuccagguuuaagcugu

SEQ ID NO: 1807656 - RNA, 21 nt, Human
uuuucagauauaaaagacuga

SEQ ID NO: 1807657 - RNA, 19 nt, Human
uuuucagauauaaaagacu

SEQ ID NO: 1807658 - RNA, 22 nt, Human
uuuucagauauaaaagacugac

SEQ ID NO: 1807659 - RNA, 21 nt, Human
uuuuauucagcucauggacuu

SEQ ID NO: 1807660 - RNA, 18 nt, Human
auuaaccacuucagcuga

SEQ ID NO: 1807661 - RNA, 20 nt, Human
auuaaccacuucagcugacu

SEQ ID NO: 1807662 - RNA, 17 nt, Human
auuaaccacuucagcug

SEQ ID NO: 1807663 - RNA, 21 nt, Human
auuaaacuuaaucuaaaugga

SEQ ID NO: 1807664 - RNA, 19 nt, Human
auuaaacuuaaucuaaaug

SEQ ID NO: 1807665 - RNA, 16 nt, Human
auuaaacuuaaucuaa

SEQ ID NO: 1807666 - RNA, 17 nt, Human
auuaaacuuaaucuaaa

SEQ ID NO: 1807667 - RNA, 12 nt, Human
auuaacuuuuau

SEQ ID NO: 1807668 - RNA, 20 nt, Human
auuaacuuuuauaaacuuua

SEQ ID NO: 1807669 - RNA, 19 nt, Human
auuaacuuuuauaaacuuu

SEQ ID NO: 1807670 - RNA, 17 nt, Human
auuaacuuuuauaaacu

SEQ ID NO: 1807671 - RNA, 16 nt, Human
auuaacuuuuauaaac

SEQ ID NO: 1807672 - RNA, 23 nt, Human
auuaacuuuuauaaacuuuaccu

SEQ ID NO: 1807673 - RNA, 13 nt, Human
auuaagaaagacu

SEQ ID NO: 1807674 - RNA, 14 nt, Human
auuaagaaagacua

SEQ ID NO: 1807675 - RNA, 12 nt, Human
auuaagaaauag

SEQ ID NO: 1807676 - RNA, 11 nt, Human
auuaagaaaua

SEQ ID NO: 1807677 - RNA, 14 nt, Human
auguuuuccaugag

SEQ ID NO: 1807678 - RNA, 18 nt, Human
auguuuuucuucucccuc

SEQ ID NO: 1807679 - RNA, 17 nt, Human
auguuuuucuucucccu

SEQ ID NO: 1807680 - RNA, 18 nt, Human
auuaaaauauaaucucua

SEQ ID NO: 1807681 - RNA, 13 nt, Human
auuaaaauauaau

SEQ ID NO: 1807682 - RNA, 21 nt, Human
uuugcuguagaagauggcacu

SEQ ID NO: 1807683 - RNA, 15 nt, Human
uuugcuucaaaaaca

SEQ ID NO: 1807684 - RNA, 14 nt, Human
uuuggggauauuuu

SEQ ID NO: 1807685 - RNA, 22 nt, Human
uuugggaggccaaggugggagg

SEQ ID NO: 1807686 - RNA, 22 nt, Human
uuugccauguuggccaggcugg

SEQ ID NO: 1807687 - RNA, 22 nt, Human
uuugggggaaaauuuagaaaua

SEQ ID NO: 1807688 - RNA, 15 nt, Human
auguaucaaugagua

SEQ ID NO: 1807689 - RNA, 15 nt, Human
auguaucugagcagg

SEQ ID NO: 1807690 - RNA, 12 nt, Human
auguauguguaa

SEQ ID NO: 1807691 - RNA, 24 nt, Human
augucccuaccgagucucuucucc

SEQ ID NO: 1807692 - RNA, 16 nt, Human
auguccacugguucuu

SEQ ID NO: 1807693 - RNA, 20 nt, Human
augucccaacuuguaaaaau

SEQ ID NO: 1807694 - RNA, 21 nt, Human
augucagugugacugaucucu

SEQ ID NO: 1807695 - RNA, 15 nt, Human
augucagugugacug

SEQ ID NO: 1807696 - RNA, 16 nt, Human
augucagugugacuga

SEQ ID NO: 1807697 - RNA, 19 nt, Human
auguccaagaagcccagga

SEQ ID NO: 1807698 - RNA, 18 nt, Human
auguccaagaagcccagg

SEQ ID NO: 1807699 - RNA, 23 nt, Human
auguccaagaagcccaggaaagg

SEQ ID NO: 1807700 - RNA, 16 nt, Human
uuugugagcaggcugu

SEQ ID NO: 1807701 - RNA, 14 nt, Human
uuuguuugaacuga

SEQ ID NO: 1807702 - RNA, 13 nt, Human
uuuguuugaacug

SEQ ID NO: 1807703 - RNA, 12 nt, Human
uuuguuugaacu

SEQ ID NO: 1807704 - RNA, 17 nt, Human
uuuguuucuuucucuga

SEQ ID NO: 1807705 - RNA, 18 nt, Human
uuugugaggaagccgcug

SEQ ID NO: 1807706 - RNA, 19 nt, Human
uuugugaggaagccgcugg

SEQ ID NO: 1807707 - RNA, 13 nt, Human
uuuguagagccag

SEQ ID NO: 1807708 - RNA, 13 nt, Human
uuuguaaauuguc

SEQ ID NO: 1807709 - RNA, 22 nt, Human
uuuuaaaacacuuccauaaucu

SEQ ID NO: 1807710 - RNA, 16 nt, Human
uuuuaaaacacuucca

SEQ ID NO: 1807711 - RNA, 18 nt, Human
uuuguuugaacugauaaa

SEQ ID NO: 1807712 - RNA, 15 nt, Human
uuuuaagaggcaggg

SEQ ID NO: 1807713 - RNA, 16 nt, Human
uuuuaagaggcagggu

SEQ ID NO: 1807714 - RNA, 20 nt, Human
uuuuaaggguuuguggaaaa

SEQ ID NO: 1807715 - RNA, 23 nt, Human
uuuuaaggguuuguggaaaauga

SEQ ID NO: 1807716 - RNA, 16 nt, Human
uuuuaaguaaggaauu

SEQ ID NO: 1807717 - RNA, 15 nt, Human
uuuuaagugcugcau

SEQ ID NO: 1807718 - RNA, 14 nt, Human
uuagcggagacgga

SEQ ID NO: 1807719 - RNA, 18 nt, Human
uuagccaagugugguaga

SEQ ID NO: 1807720 - RNA, 18 nt, Human
auaauuuaccugaagucu

SEQ ID NO: 1807721 - RNA, 12 nt, Human
uuagcaccaggg

SEQ ID NO: 1807722 - RNA, 18 nt, Human
uuagcaaauucuguuuuu

SEQ ID NO: 1807723 - RNA, 20 nt, Human
uuagggaaggauacaaaagc

SEQ ID NO: 1807724 - RNA, 16 nt, Human
uuaggugugacugaau

SEQ ID NO: 1807725 - RNA, 16 nt, Human
uuaggugaggaagcaa

SEQ ID NO: 1807726 - RNA, 21 nt, Human
uuaggugugacugaauuucuu

SEQ ID NO: 1807727 - RNA, 15 nt, Human
uuaguuucuccaagc

SEQ ID NO: 1807728 - RNA, 22 nt, Human
uuaguuugcaguuacacuaaaa

SEQ ID NO: 1807729 - RNA, 18 nt, Human
auaauccuaaacauauga

SEQ ID NO: 1807730 - RNA, 18 nt, Human
auaaucucuccauucccg

SEQ ID NO: 1807731 - RNA, 18 nt, Human
auaaucuggacuccucug

SEQ ID NO: 1807732 - RNA, 19 nt, Human
auaaucuggacuccucugu

SEQ ID NO: 1807733 - RNA, 20 nt, Human
auaaucuggacuccucuguc

SEQ ID NO: 1807734 - RNA, 15 nt, Human
auaaugcgugcauac

SEQ ID NO: 1807735 - RNA, 15 nt, Human
auaaugaaugaaaca

SEQ ID NO: 1807736 - RNA, 22 nt, Human
auaauugacaggauuauuggaa

SEQ ID NO: 1807737 - RNA, 14 nt, Human
uuagacagucccug

SEQ ID NO: 1807738 - RNA, 14 nt, Human
auaauaaagaauag

SEQ ID NO: 1807739 - RNA, 13 nt, Human
auaauaaagaaua

SEQ ID NO: 1807740 - RNA, 23 nt, Human
auaauaaagaauagcuuuaauga

SEQ ID NO: 1807741 - RNA, 19 nt, Human
auaauacuugcuuuggaaa

SEQ ID NO: 1807742 - RNA, 20 nt, Human
auaauacaccacuacauucu

SEQ ID NO: 1807743 - RNA, 18 nt, Human
auaauacaccacuacauu

SEQ ID NO: 1807744 - RNA, 12 nt, Human
auaauacaccac

SEQ ID NO: 1807745 - RNA, 19 nt, Human
uuacccucauguucuuaau

SEQ ID NO: 1807746 - RNA, 16 nt, Human
uuacaggcuccugcca

SEQ ID NO: 1807747 - RNA, 18 nt, Human
uuacaggcuccugccacc

SEQ ID NO: 1807748 - RNA, 24 nt, Human
uuacaggcgugagccaccgugccu

SEQ ID NO: 1807749 - RNA, 13 nt, Human
uuaccuuugacaa

SEQ ID NO: 1807750 - RNA, 20 nt, Human
uuaccuuugacaaagguaaa

SEQ ID NO: 1807751 - RNA, 20 nt, Human
uuagacagagucucacuguu

SEQ ID NO: 1807752 - RNA, 13 nt, Human
uuagacagucccu

SEQ ID NO: 1807753 - RNA, 13 nt, Human
uuagacagagucu

SEQ ID NO: 1807754 - RNA, 17 nt, Human
uuagaaauugcauuucc

SEQ ID NO: 1807755 - RNA, 23 nt, Human
uuacucuucaguuaagccuuugg

SEQ ID NO: 1807756 - RNA, 11 nt, Human
auaaauuauuu

SEQ ID NO: 1807757 - RNA, 22 nt, Human
auaacgauaaaagacagugaaa

SEQ ID NO: 1807758 - RNA, 14 nt, Human
auaacguauaaaag

SEQ ID NO: 1807759 - RNA, 16 nt, Human
auaacuaaaagguaug

SEQ ID NO: 1807760 - RNA, 13 nt, Human
auaaauaaaaaua

SEQ ID NO: 1807761 - RNA, 17 nt, Human
auaaagguucaugcaaa

SEQ ID NO: 1807762 - RNA, 15 nt, Human
auaaagguucaugca

SEQ ID NO: 1807763 - RNA, 14 nt, Human
auaaauaaaaauaa

SEQ ID NO: 1807764 - RNA, 15 nt, Human
auaaauaguuuauga

SEQ ID NO: 1807765 - RNA, 17 nt, Human
uuaaaaaucucaaauuu

SEQ ID NO: 1807766 - RNA, 16 nt, Human
uuaaaaaucucaaauu

SEQ ID NO: 1807767 - RNA, 15 nt, Human
uuaaaaaucucaaau

SEQ ID NO: 1807768 - RNA, 14 nt, Human
uuaaaaaucucaaa

SEQ ID NO: 1807769 - RNA, 13 nt, Human
uuaaacagaggau

SEQ ID NO: 1807770 - RNA, 15 nt, Human
uuaaauaaugugaaa

SEQ ID NO: 1807771 - RNA, 18 nt, Human
uuaaauaaugugaaacug

SEQ ID NO: 1807772 - RNA, 16 nt, Human
uuaaauaaugugaaac

SEQ ID NO: 1807773 - RNA, 20 nt, Human
uuaacagaaauguacagcaa

SEQ ID NO: 1807774 - RNA, 19 nt, Human
uuaacagaaauguacagca

SEQ ID NO: 1807775 - RNA, 14 nt, Human
aguuuaaauuguaa

SEQ ID NO: 1807776 - RNA, 17 nt, Human
aguuggucccccuucca

SEQ ID NO: 1807777 - RNA, 11 nt, Human
aguuggucccc

SEQ ID NO: 1807778 - RNA, 13 nt, Human
aguuggucccccu

SEQ ID NO: 1807779 - RNA, 13 nt, Human
uuaaaaaaaaucc

SEQ ID NO: 1807780 - RNA, 18 nt, Human
aguuuaauugacuuauuu

SEQ ID NO: 1807781 - RNA, 15 nt, Human
aguuuaauugacuua

SEQ ID NO: 1807782 - RNA, 14 nt, Human
aguuuaauugacuu

SEQ ID NO: 1807783 - RNA, 13 nt, Human
aguugggcuuccu

SEQ ID NO: 1807784 - RNA, 19 nt, Human
aguugggcuuccucauagu

SEQ ID NO: 1807785 - RNA, 17 nt, Human
aguuggguggaugccug

SEQ ID NO: 1807786 - RNA, 23 nt, Human
aguugccagucaccccggccacc

SEQ ID NO: 1807787 - RNA, 14 nt, Human
uuaagugcugcauu

SEQ ID NO: 1807788 - RNA, 19 nt, Human
uuaagugcugcauuuaaaa

SEQ ID NO: 1807789 - RNA, 16 nt, Human
uuaagugcugcauuua

SEQ ID NO: 1807790 - RNA, 15 nt, Human
uuaagugcugcauuu

SEQ ID NO: 1807791 - RNA, 22 nt, Human
uuaagaaauagacagcaugaga

SEQ ID NO: 1807792 - RNA, 22 nt, Human
uuaagaaagacuaucuaaaugu

SEQ ID NO: 1807793 - RNA, 9 nt, Human
uuaaggugg

SEQ ID NO: 1807794 - RNA, 13 nt, Human
uuaaucauuaggu

SEQ ID NO: 1807795 - RNA, 22 nt, Human
uuaauauuuauaggucacuuug

SEQ ID NO: 1807796 - RNA, 17 nt, Human
uuaaucucuaacagugg

SEQ ID NO: 1807797 - RNA, 21 nt, Human
uuaaucugggccagaauuuca

SEQ ID NO: 1807798 - RNA, 23 nt, Human
uuaaucauuaggugugacugaau

SEQ ID NO: 1807799 - RNA, 22 nt, Human
uuaaucauuaggugugacugaa

SEQ ID NO: 1807800 - RNA, 19 nt, Human
uuaaugaaagacuguacaa

SEQ ID NO: 1807801 - RNA, 21 nt, Human
uuaauugacuuauuuauauaa

SEQ ID NO: 1807802 - RNA, 18 nt, Human
uuaaucucuaacagugga

SEQ ID NO: 1807803 - RNA, 22 nt, Human
uuaaucugguuuauuuuuguuc

SEQ ID NO: 1807804 - RNA, 18 nt, Human
uuaaugaaagacuguaca

SEQ ID NO: 1807805 - RNA, 15 nt, Human
aguuuuguaaauuuc

SEQ ID NO: 1807806 - RNA, 12 nt, Human
aguuuuguaaau

SEQ ID NO: 1807807 - RNA, 23 nt, Human
aguuuuuauggcuuuugugcauu

SEQ ID NO: 1807808 - RNA, 13 nt, Human
auaaaagccuguu

SEQ ID NO: 1807809 - RNA, 20 nt, Human
aguuuuuauugcuuguugga

SEQ ID NO: 1807810 - RNA, 15 nt, Human
aguuuuuauugcuug

SEQ ID NO: 1807811 - RNA, 18 nt, Human
auaaaagccuguuuaaga

SEQ ID NO: 1807812 - RNA, 20 nt, Human
uuaagaaaaaggaugcacag

SEQ ID NO: 1807813 - RNA, 21 nt, Human
uuaagaaaaaggaugcacaga

SEQ ID NO: 1807814 - RNA, 16 nt, Human
aguggaaccagcccag

SEQ ID NO: 1807815 - RNA, 18 nt, Human
uguucuagcauggcugcc

SEQ ID NO: 1807816 - RNA, 18 nt, Human
uguucuuaguuugcaguu

SEQ ID NO: 1807817 - RNA, 21 nt, Human
aguuacucuucaguuaagccu

SEQ ID NO: 1807818 - RNA, 15 nt, Human
uguugcccaggcugg

SEQ ID NO: 1807819 - RNA, 21 nt, Human
uguugcccaggcuggagugca

SEQ ID NO: 1807820 - RNA, 14 nt, Human
uguugcccaggcug

SEQ ID NO: 1807821 - RNA, 13 nt, Human
uguugcccaggcu

SEQ ID NO: 1807822 - RNA, 19 nt, Human
uguucuuucacccuuuucu

SEQ ID NO: 1807823 - RNA, 20 nt, Human
uguucuugguuuguaaauua

SEQ ID NO: 1807824 - RNA, 22 nt, Human
uguucuugguuuguaaauuaac

SEQ ID NO: 1807825 - RNA, 19 nt, Human
aguguguguuuuucauaaa

SEQ ID NO: 1807826 - RNA, 21 nt, Human
aguguucauaaauaaaguuug

SEQ ID NO: 1807827 - RNA, 20 nt, Human
aguucggugagcuacaaaug

SEQ ID NO: 1807828 - RNA, 19 nt, Human
aguucggugagcuacaaau

SEQ ID NO: 1807829 - RNA, 16 nt, Human
aguucaauucucauuu

SEQ ID NO: 1807830 - RNA, 15 nt, Human
aguucccuacuuccu

SEQ ID NO: 1807831 - RNA, 23 nt, Human
aguuccucauuagcauuuugcua

SEQ ID NO: 1807832 - RNA, 20 nt, Human
uguuuagauaauacaccacu

SEQ ID NO: 1807833 - RNA, 13 nt, Human
uguuuaguaauca

SEQ ID NO: 1807834 - RNA, 14 nt, Human
uguuuaguaaucau

SEQ ID NO: 1807835 - RNA, 17 nt, Human
uguuuaguaaucauauu

SEQ ID NO: 1807836 - RNA, 14 nt, Human
uguuuauugucaaa

SEQ ID NO: 1807837 - RNA, 17 nt, Human
uguuuauugucaaagug

SEQ ID NO: 1807838 - RNA, 19 nt, Human
agugcugggauuacaggug

SEQ ID NO: 1807839 - RNA, 17 nt, Human
agugcugggauuacagg

SEQ ID NO: 1807840 - RNA, 20 nt, Human
agugcugggauuacaggcgu

SEQ ID NO: 1807841 - RNA, 20 nt, Human
agugcugggauuacaagcgu

SEQ ID NO: 1807842 - RNA, 22 nt, Human
agugcugcauuuaaaagauaca

SEQ ID NO: 1807843 - RNA, 20 nt, Human
agugcugcauuuaaaagaua

SEQ ID NO: 1807844 - RNA, 17 nt, Human
agugccuuacacaaugg

SEQ ID NO: 1807845 - RNA, 15 nt, Human
agugccuuacacaau

SEQ ID NO: 1807846 - RNA, 21 nt, Human
agugccuguaaucacagcuac

SEQ ID NO: 1807847 - RNA, 16 nt, Human
agugcuuccaaggaug

SEQ ID NO: 1807848 - RNA, 19 nt, Human
ugugucagcauagaaguaa

SEQ ID NO: 1807849 - RNA, 12 nt, Human
ugugguuucauu

SEQ ID NO: 1807850 - RNA, 21 nt, Human
uguuaacauggacaugaucuu

SEQ ID NO: 1807851 - RNA, 19 nt, Human
uguuaaugauagcuacugu

SEQ ID NO: 1807852 - RNA, 11 nt, Human
aguggaaaaau

SEQ ID NO: 1807853 - RNA, 18 nt, Human
aguggaaaaauagccugc

SEQ ID NO: 1807854 - RNA, 19 nt, Human
aguggaaaaauagccugcc

SEQ ID NO: 1807855 - RNA, 19 nt, Human
ugugucagguggggcagcu

SEQ ID NO: 1807856 - RNA, 17 nt, Human
ugugucagguggggcag

SEQ ID NO: 1807857 - RNA, 20 nt, Human
ugugucagguggggcagcuu

SEQ ID NO: 1807858 - RNA, 19 nt, Human
ugugucuaggcaggaccug

SEQ ID NO: 1807859 - RNA, 13 nt, Human
ugugucucuuggu

SEQ ID NO: 1807860 - RNA, 20 nt, Human
ugugucuaggcaggaccugu

SEQ ID NO: 1807861 - RNA, 16 nt, Human
ugugucucuugguccu

SEQ ID NO: 1807862 - RNA, 14 nt, Human
uguguuaugaagca

SEQ ID NO: 1807863 - RNA, 18 nt, Human
agugcaaugacacagucu

SEQ ID NO: 1807864 - RNA, 16 nt, Human
agugcaaugacacagu

SEQ ID NO: 1807865 - RNA, 24 nt, Human
agugauucuccugccucagccucc

SEQ ID NO: 1807866 - RNA, 22 nt, Human
agugauucuccugccucagccu

SEQ ID NO: 1807867 - RNA, 16 nt, Human
agugagucgaggacag

SEQ ID NO: 1807868 - RNA, 14 nt, Human
agugcccacaggau

SEQ ID NO: 1807869 - RNA, 16 nt, Human
agugccaaaaacaaca

SEQ ID NO: 1807870 - RNA, 15 nt, Human
agugcaucucagccc

SEQ ID NO: 1807871 - RNA, 14 nt, Human
agugcaucucagcc

SEQ ID NO: 1807872 - RNA, 16 nt, Human
agugcaucucagccca

SEQ ID NO: 1807873 - RNA, 17 nt, Human
agugcaucucagcccac

SEQ ID NO: 1807874 - RNA, 15 nt, Human
ugugcucuggacagg

SEQ ID NO: 1807875 - RNA, 23 nt, Human
ugugcucugaucauccacugugc

SEQ ID NO: 1807876 - RNA, 22 nt, Human
ugugcucugaucauccacugug

SEQ ID NO: 1807877 - RNA, 12 nt, Human
ugugccucugcc

SEQ ID NO: 1807878 - RNA, 13 nt, Human
ugugccucugccu

SEQ ID NO: 1807879 - RNA, 19 nt, Human
agucucacuguugcccagg

SEQ ID NO: 1807880 - RNA, 18 nt, Human
agucucacuguugcccag

SEQ ID NO: 1807881 - RNA, 20 nt, Human
agucucacuguugcccaggc

SEQ ID NO: 1807882 - RNA, 21 nt, Human
agucucacuguugcccaggcu

SEQ ID NO: 1807883 - RNA, 21 nt, Human
ugugcccuaaaguguauuuuu

SEQ ID NO: 1807884 - RNA, 20 nt, Human
ugugcccuaaaguguauuuu

SEQ ID NO: 1807885 - RNA, 19 nt, Human
ugugcucuggacaggcaug

SEQ ID NO: 1807886 - RNA, 18 nt, Human
ugugcucuggacaggcau

SEQ ID NO: 1807887 - RNA, 16 nt, Human
ugugcucuggacaggc

SEQ ID NO: 1807888 - RNA, 13 nt, Human
ugugcugcccugc

SEQ ID NO: 1807889 - RNA, 14 nt, Human
ugugcugcccugcc

SEQ ID NO: 1807890 - RNA, 15 nt, Human
ugugcugcccugccc

SEQ ID NO: 1807891 - RNA, 19 nt, Human
ugucaagagggucugagga

SEQ ID NO: 1807892 - RNA, 15 nt, Human
ugucaagccauaauu

SEQ ID NO: 1807893 - RNA, 21 nt, Human
ugucaagaauagcauuguaaa

SEQ ID NO: 1807894 - RNA, 16 nt, Human
uguauuuuuuuacuaa

SEQ ID NO: 1807895 - RNA, 14 nt, Human
uguauuuuuuuacu

SEQ ID NO: 1807896 - RNA, 17 nt, Human
aguaggaagacuuugga

SEQ ID NO: 1807897 - RNA, 18 nt, Human
aguaggaagacuuuggaa

SEQ ID NO: 1807898 - RNA, 19 nt, Human
aguaggaagacuuuggaaa

SEQ ID NO: 1807899 - RNA, 22 nt, Human
aguaggaagacuuuggaaagac

SEQ ID NO: 1807900 - RNA, 16 nt, Human
aguaggaagacuuugg

SEQ ID NO: 1807901 - RNA, 23 nt, Human
ugucauuugcuggagcucugccc

SEQ ID NO: 1807902 - RNA, 16 nt, Human
ugucagguggggcagc

SEQ ID NO: 1807903 - RNA, 19 nt, Human
ugucagcugaaccugggua

SEQ ID NO: 1807904 - RNA, 19 nt, Human
agucacugagacagcccgg

SEQ ID NO: 1807905 - RNA, 18 nt, Human
agucacugagacagcccg

SEQ ID NO: 1807906 - RNA, 13 nt, Human
agucacugcacag

SEQ ID NO: 1807907 - RNA, 16 nt, Human
ugucagcugaaccugg

SEQ ID NO: 1807908 - RNA, 14 nt, Human
agucaccaagccca

SEQ ID NO: 1807909 - RNA, 13 nt, Human
agucaccaagccc

SEQ ID NO: 1807910 - RNA, 16 nt, Human
agucagacagaugugg

SEQ ID NO: 1807911 - RNA, 15 nt, Human
ugucgcccagucugg

SEQ ID NO: 1807912 - RNA, 14 nt, Human
ugucgcccagucug

SEQ ID NO: 1807913 - RNA, 13 nt, Human
ugucgccucugca

SEQ ID NO: 1807914 - RNA, 12 nt, Human
ugucgggcauga

SEQ ID NO: 1807915 - RNA, 17 nt, Human
ugucguuaaaaacagau

SEQ ID NO: 1807916 - RNA, 14 nt, Human
ugucgggcaugaca

SEQ ID NO: 1807917 - RNA, 15 nt, Human
ugucgggcaugacac

SEQ ID NO: 1807918 - RNA, 16 nt, Human
uguccuacccacccuc

SEQ ID NO: 1807919 - RNA, 15 nt, Human
ugucgcccaggcugg

SEQ ID NO: 1807920 - RNA, 16 nt, Human
ugucgcccaggcugga

SEQ ID NO: 1807921 - RNA, 13 nt, Human
uguccgagcuuug

SEQ ID NO: 1807922 - RNA, 14 nt, Human
uguccgagcuuuga

SEQ ID NO: 1807923 - RNA, 23 nt, Human
aguccgaaagggacuuggaagcu

SEQ ID NO: 1807924 - RNA, 17 nt, Human
agucucacuguugccca

SEQ ID NO: 1807925 - RNA, 16 nt, Human
agucucacuguugccc

SEQ ID NO: 1807926 - RNA, 12 nt, Human
agucccugccaa

SEQ ID NO: 1807927 - RNA, 22 nt, Human
aguccaggcuuuuuuaucaugu

SEQ ID NO: 1807928 - RNA, 17 nt, Human
aggugguuauggagagg

SEQ ID NO: 1807929 - RNA, 17 nt, Human
uguaacuuucugaaaua

SEQ ID NO: 1807930 - RNA, 14 nt, Human
agguuggugggggc

SEQ ID NO: 1807931 - RNA, 20 nt, Human
uguaagaucguucucugccu

SEQ ID NO: 1807932 - RNA, 19 nt, Human
uguaagaucguucucugcc

SEQ ID NO: 1807933 - RNA, 23 nt, Human
uguaauuaaguacuauguaucaa

SEQ ID NO: 1807934 - RNA, 23 nt, Human
aggucuugaacuccuggccucaa

SEQ ID NO: 1807935 - RNA, 10 nt, Human
aggucccuaa

SEQ ID NO: 1807936 - RNA, 16 nt, Human
aggugcacaagcucca

SEQ ID NO: 1807937 - RNA, 17 nt, Human
aggugcacaagcuccaa

SEQ ID NO: 1807938 - RNA, 18 nt, Human
aggugcacaagcuccaag

SEQ ID NO: 1807939 - RNA, 20 nt, Human
aggugcacaagcuccaagcu

SEQ ID NO: 1807940 - RNA, 15 nt, Human
aggugcacaagcucc

SEQ ID NO: 1807941 - RNA, 21 nt, Human
aggugcacaagcuccaagcuc

SEQ ID NO: 1807942 - RNA, 17 nt, Human
agguggccacuccagac

SEQ ID NO: 1807943 - RNA, 14 nt, Human
agguggccacucca

SEQ ID NO: 1807944 - RNA, 20 nt, Human
aggugggauccuccaggugc

SEQ ID NO: 1807945 - RNA, 12 nt, Human
aguagagacagg

SEQ ID NO: 1807946 - RNA, 17 nt, Human
aguagaagucuuagaug

SEQ ID NO: 1807947 - RNA, 18 nt, Human
uguaggaagguuaauguu

SEQ ID NO: 1807948 - RNA, 20 nt, Human
uguaggaagguuaauguuca

SEQ ID NO: 1807949 - RNA, 14 nt, Human
aguacacuguuuca

SEQ ID NO: 1807950 - RNA, 20 nt, Human
aguacacuguuucaaacuuu

SEQ ID NO: 1807951 - RNA, 16 nt, Human
aguacacuguuucaaa

SEQ ID NO: 1807952 - RNA, 19 nt, Human
aguacuuuuggcauuuuac

SEQ ID NO: 1807953 - RNA, 15 nt, Human
aguaauccaagcaaa

SEQ ID NO: 1807954 - RNA, 14 nt, Human
aguaauccaccugc

SEQ ID NO: 1807955 - RNA, 21 nt, Human
aguaauccaagcaaaugugaa

SEQ ID NO: 1807956 - RNA, 23 nt, Human
aguaaggaauuuuauuuuuuucu

SEQ ID NO: 1807957 - RNA, 20 nt, Human
aguaauaugcacacauuuuu

SEQ ID NO: 1807958 - RNA, 17 nt, Human
aguaauaugcacacauu

SEQ ID NO: 1807959 - RNA, 19 nt, Human
aguaauaugcacacauuuu

SEQ ID NO: 1807960 - RNA, 18 nt, Human
aguaauaugcacacauuu

SEQ ID NO: 1807961 - RNA, 12 nt, Human
aguaaaaauaaa

SEQ ID NO: 1807962 - RNA, 15 nt, Human
aguaaaaauaaaauu

SEQ ID NO: 1807963 - RNA, 20 nt, Human
aguaagccgugauuuucauu

SEQ ID NO: 1807964 - RNA, 11 nt, Human
agguuuuccug

SEQ ID NO: 1807965 - RNA, 14 nt, Human
uguaauuugugaua

SEQ ID NO: 1807966 - RNA, 13 nt, Human
uguagagugggag

SEQ ID NO: 1807967 - RNA, 14 nt, Human
uguagagugggagc

SEQ ID NO: 1807968 - RNA, 18 nt, Human
uguagaggagaaacugga

SEQ ID NO: 1807969 - RNA, 13 nt, Human
aggguugggcugg

SEQ ID NO: 1807970 - RNA, 23 nt, Human
aggguuggccccugcccggcugc

SEQ ID NO: 1807971 - RNA, 18 nt, Human
aggguuggccccugcccg

SEQ ID NO: 1807972 - RNA, 17 nt, Human
agguagaaauaucugaa

SEQ ID NO: 1807973 - RNA, 19 nt, Human
agguagaaauaucugaaaa

SEQ ID NO: 1807974 - RNA, 23 nt, Human
agguacuuucauauuuuaaacag

SEQ ID NO: 1807975 - RNA, 23 nt, Human
agguagaaauaucugaaaaugua

SEQ ID NO: 1807976 - RNA, 19 nt, Human
agguauaaguggugugugu

SEQ ID NO: 1807977 - RNA, 20 nt, Human
agguauaaguggugugugua

SEQ ID NO: 1807978 - RNA, 23 nt, Human
agguauaauucacauuguauuca

SEQ ID NO: 1807979 - RNA, 21 nt, Human
agguaugcaaucaaaucugcu

SEQ ID NO: 1807980 - RNA, 12 nt, Human
aggucagagccu

SEQ ID NO: 1807981 - RNA, 20 nt, Human
aggucauuuuuuuuaagaaa

SEQ ID NO: 1807982 - RNA, 17 nt, Human
aggucauuuuuuuuaag

SEQ ID NO: 1807983 - RNA, 19 nt, Human
aggucaccuuuauucuggc

SEQ ID NO: 1807984 - RNA, 18 nt, Human
aggucaccuuuauucugg

SEQ ID NO: 1807985 - RNA, 13 nt, Human
aggguuauaauaa

SEQ ID NO: 1807986 - RNA, 22 nt, Human
aggguguccggucccuguccca

SEQ ID NO: 1807987 - RNA, 17 nt, Human
uggucugacccacugcu

SEQ ID NO: 1807988 - RNA, 16 nt, Human
uggucugacccacugc

SEQ ID NO: 1807989 - RNA, 14 nt, Human
uggucccaccccac

SEQ ID NO: 1807990 - RNA, 15 nt, Human
uggucccaccccaca

SEQ ID NO: 1807991 - RNA, 18 nt, Human
uggucaccaaaucagcug

SEQ ID NO: 1807992 - RNA, 22 nt, Human
uggucagauuugaacucuucaa

SEQ ID NO: 1807993 - RNA, 20 nt, Human
uggucaccaaaucagcugcu

SEQ ID NO: 1807994 - RNA, 13 nt, Human
uggucccacucag

SEQ ID NO: 1807995 - RNA, 16 nt, Human
uggucccaccccacac

SEQ ID NO: 1807996 - RNA, 16 nt, Human
uggucucaaacucuug

SEQ ID NO: 1807997 - RNA, 19 nt, Human
uggucuaucuuugagcgcc

SEQ ID NO: 1807998 - RNA, 23 nt, Human
uggucucaaacucuugaccucag

SEQ ID NO: 1807999 - RNA, 17 nt, Human
uggucucaaacucuuga

SEQ ID NO: 1808000 - RNA, 18 nt, Human
uggucucaaacuccugac

SEQ ID NO: 1808001 - RNA, 22 nt, Human
agggucucacucugucgcccag

SEQ ID NO: 1808002 - RNA, 21 nt, Human
ugggucgcccuggacugugug

SEQ ID NO: 1808003 - RNA, 15 nt, Human
agggugggagugggc

SEQ ID NO: 1808004 - RNA, 22 nt, Human
ugggugcuuggaggaaggaaac

SEQ ID NO: 1808005 - RNA, 15 nt, Human
ugggugcuuggagga

SEQ ID NO: 1808006 - RNA, 19 nt, Human
ugggugcuuggaggaagga

SEQ ID NO: 1808007 - RNA, 22 nt, Human
uggucacaggacucugccuccu

SEQ ID NO: 1808008 - RNA, 23 nt, Human
uggucacaggacucugccuccuc

SEQ ID NO: 1808009 - RNA, 20 nt, Human
uggucacaggacucugccuc

SEQ ID NO: 1808010 - RNA, 21 nt, Human
ugguagcuuuucccuucuuuu

SEQ ID NO: 1808011 - RNA, 20 nt, Human
ugguagcuuuucccuucuuu

SEQ ID NO: 1808012 - RNA, 17 nt, Human
ugguacucauuaaaaaa

SEQ ID NO: 1808013 - RNA, 16 nt, Human
ugguacuaacuuuccu

SEQ ID NO: 1808014 - RNA, 23 nt, Human
agggucucacuauguugcccagg

SEQ ID NO: 1808015 - RNA, 22 nt, Human
agggucucacuauguugcccag

SEQ ID NO: 1808016 - RNA, 21 nt, Human
agggucucacuauguugccca

SEQ ID NO: 1808017 - RNA, 24 nt, Human
agggguucccuuuuuuggcugcug

SEQ ID NO: 1808018 - RNA, 20 nt, Human
aggggugggacacccuguga

SEQ ID NO: 1808019 - RNA, 22 nt, Human
aggggugggacacccugugaug

SEQ ID NO: 1808020 - RNA, 15 nt, Human
aggggguggccuccc

SEQ ID NO: 1808021 - RNA, 17 nt, Human
aggggguggccucccaa

SEQ ID NO: 1808022 - RNA, 18 nt, Human
aggggguggccucccaac

SEQ ID NO: 1808023 - RNA, 20 nt, Human
uggggucacucuggcagcuc

SEQ ID NO: 1808024 - RNA, 19 nt, Human
uggggucacucuggcagcu

SEQ ID NO: 1808025 - RNA, 18 nt, Human
aggggccuggcagccgug

SEQ ID NO: 1808026 - RNA, 23 nt, Human
aggggccuggcagccgugccuuc

SEQ ID NO: 1808027 - RNA, 15 nt, Human
aggggccuggcagcc

SEQ ID NO: 1808028 - RNA, 23 nt, Human
aggggagcaaaaucgaugcagug

SEQ ID NO: 1808029 - RNA, 16 nt, Human
ugggcaacccccagcc

SEQ ID NO: 1808030 - RNA, 18 nt, Human
ugggaggucaaggcugca

SEQ ID NO: 1808031 - RNA, 19 nt, Human
ugggaggucaaggcugcag

SEQ ID NO: 1808032 - RNA, 20 nt, Human
ugggaggucaaggcugcagu

SEQ ID NO: 1808033 - RNA, 23 nt, Human
ugggaggucaaggcugcagugag

SEQ ID NO: 1808034 - RNA, 17 nt, Human
ugggaggucaaggcugc

SEQ ID NO: 1808035 - RNA, 21 nt, Human
ugggcaacccccagccugcua

SEQ ID NO: 1808036 - RNA, 20 nt, Human
ugggcaacccccagccugcu

SEQ ID NO: 1808037 - RNA, 17 nt, Human
ugggcaacccccagccu

SEQ ID NO: 1808038 - RNA, 17 nt, Human
ugggccagaauuucaaa

SEQ ID NO: 1808039 - RNA, 18 nt, Human
ugggccagaauuucaaac

SEQ ID NO: 1808040 - RNA, 13 nt, Human
ugggccaggagcc

SEQ ID NO: 1808041 - RNA, 20 nt, Human
ugggcccaaugcacuuuguu

SEQ ID NO: 1808042 - RNA, 14 nt, Human
ugggccaggagccu

SEQ ID NO: 1808043 - RNA, 16 nt, Human
ugggccaggagccucc

SEQ ID NO: 1808044 - RNA, 23 nt, Human
agggcccagagaggguggugacc

SEQ ID NO: 1808045 - RNA, 15 nt, Human
agggagggcuucugc

SEQ ID NO: 1808046 - RNA, 19 nt, Human
agggagugacagaggcagc

SEQ ID NO: 1808047 - RNA, 18 nt, Human
agggagugacagaggcag

SEQ ID NO: 1808048 - RNA, 17 nt, Human
agggagugacagaggca

SEQ ID NO: 1808049 - RNA, 17 nt, Human
agggaggugaccccagg

SEQ ID NO: 1808050 - RNA, 23 nt, Human
agggcuucugccauuucugagau

SEQ ID NO: 1808051 - RNA, 18 nt, Human
ugggcucccuucccaccu

SEQ ID NO: 1808052 - RNA, 19 nt, Human
ugggcucccuucccaccuc

SEQ ID NO: 1808053 - RNA, 17 nt, Human
ugggcugcccuggugcu

SEQ ID NO: 1808054 - RNA, 19 nt, Human
ugggcugcccuggugcugc

SEQ ID NO: 1808055 - RNA, 20 nt, Human
ugggcugcccuggugcugcc

SEQ ID NO: 1808056 - RNA, 21 nt, Human
ugggcugcccuggugcugcca

SEQ ID NO: 1808057 - RNA, 20 nt, Human
ugggcucccuucccaccucu

SEQ ID NO: 1808058 - RNA, 21 nt, Human
ugggcucccuucccaccucuc

SEQ ID NO: 1808059 - RNA, 18 nt, Human
ugggcuggguucuaccca

SEQ ID NO: 1808060 - RNA, 19 nt, Human
ugggcuggguucuacccag

SEQ ID NO: 1808061 - RNA, 13 nt, Human
uggggaccucagg

SEQ ID NO: 1808062 - RNA, 17 nt, Human
uggggaccagagcugcc

SEQ ID NO: 1808063 - RNA, 18 nt, Human
uggggaccagagcugcca

SEQ ID NO: 1808064 - RNA, 17 nt, Human
uggggacagagcagaac

SEQ ID NO: 1808065 - RNA, 14 nt, Human
uggggaccagagcu

SEQ ID NO: 1808066 - RNA, 15 nt, Human
uggggaccagagcug

SEQ ID NO: 1808067 - RNA, 14 nt, Human
ugggguacccacug

SEQ ID NO: 1808068 - RNA, 20 nt, Human
uggggcugcaccggcuggcc

SEQ ID NO: 1808069 - RNA, 16 nt, Human
ugggguacccacugcu

SEQ ID NO: 1808070 - RNA, 15 nt, Human
ugggguacccacugc

SEQ ID NO: 1808071 - RNA, 17 nt, Human
uggggucacucuggcag

SEQ ID NO: 1808072 - RNA, 18 nt, Human
uggggucacucuggcagc

SEQ ID NO: 1808073 - RNA, 15 nt, Human
ugggguaugggagag

SEQ ID NO: 1808074 - RNA, 18 nt, Human
uggggcggugagagggga

SEQ ID NO: 1808075 - RNA, 23 nt, Human
uggggcuaggaaauccagggugg

SEQ ID NO: 1808076 - RNA, 15 nt, Human
uggggcccugccucc

SEQ ID NO: 1808077 - RNA, 16 nt, Human
uggggcccugccuccu

SEQ ID NO: 1808078 - RNA, 12 nt, Human
uggggagaaagu

SEQ ID NO: 1808079 - RNA, 23 nt, Human
uggggaccucaggccugggggcu

SEQ ID NO: 1808080 - RNA, 14 nt, Human
uggggcccugccuc

SEQ ID NO: 1808081 - RNA, 22 nt, Human
ugcggacagccacggccaggcc

SEQ ID NO: 1808082 - RNA, 23 nt, Human
ugcggacagccacggccaggcca

SEQ ID NO: 1808083 - RNA, 18 nt, Human
ugcgguccacccaggagc

SEQ ID NO: 1808084 - RNA, 17 nt, Human
ugcggugcuaucucccc

SEQ ID NO: 1808085 - RNA, 21 nt, Human
ugcggugcuaucucccccagc

SEQ ID NO: 1808086 - RNA, 17 nt, Human
ugcgguccacccaggag

SEQ ID NO: 1808087 - RNA, 17 nt, Human
ugcgggucacaggaggg

SEQ ID NO: 1808088 - RNA, 14 nt, Human
ugcgggucacagga

SEQ ID NO: 1808089 - RNA, 16 nt, Human
ugcgggucacaggagg

SEQ ID NO: 1808090 - RNA, 17 nt, Human
ugcggccuuuggcuuca

SEQ ID NO: 1808091 - RNA, 19 nt, Human
ugcggccuuuggcuucacg

SEQ ID NO: 1808092 - RNA, 20 nt, Human
ugcgggcuuccuccuggugu

SEQ ID NO: 1808093 - RNA, 11 nt, Human
ugcuacacacu

SEQ ID NO: 1808094 - RNA, 19 nt, Human
agcuugaccgugaggccag

SEQ ID NO: 1808095 - RNA, 18 nt, Human
agcuuguaaauagcucag

SEQ ID NO: 1808096 - RNA, 22 nt, Human
agcuugaggguugggcuggugu

SEQ ID NO: 1808097 - RNA, 18 nt, Human
agcuugaggguugggcug

SEQ ID NO: 1808098 - RNA, 14 nt, Human
agcuugaggguugg

SEQ ID NO: 1808099 - RNA, 20 nt, Human
agcugccuguucagcuccag

SEQ ID NO: 1808100 - RNA, 14 nt, Human
ugccuggauggggc

SEQ ID NO: 1808101 - RNA, 15 nt, Human
ugccuggauggggcu

SEQ ID NO: 1808102 - RNA, 22 nt, Human
agcugccuguucagcuccagcu

SEQ ID NO: 1808103 - RNA, 21 nt, Human
agcugccuguucagcuccagc

SEQ ID NO: 1808104 - RNA, 21 nt, Human
agcugcuugggcuucauccuc

SEQ ID NO: 1808105 - RNA, 21 nt, Human
agcugcuuuugucuaugggac

SEQ ID NO: 1808106 - RNA, 22 nt, Human
agcuggaucuccauucucucag

SEQ ID NO: 1808107 - RNA, 15 nt, Human
ugccucugccucuga

SEQ ID NO: 1808108 - RNA, 14 nt, Human
ugccucugccucug

SEQ ID NO: 1808109 - RNA, 13 nt, Human
ugccucugccucu

SEQ ID NO: 1808110 - RNA, 14 nt, Human
ugcccaggcagguc

SEQ ID NO: 1808111 - RNA, 13 nt, Human
ugcccaggcaggu

SEQ ID NO: 1808112 - RNA, 12 nt, Human
ugcccaggcagg

SEQ ID NO: 1808113 - RNA, 16 nt, Human
ugccugcccaggcccc

SEQ ID NO: 1808114 - RNA, 15 nt, Human
ugccugcccaggccc

SEQ ID NO: 1808115 - RNA, 14 nt, Human
ugccugcccaggcc

SEQ ID NO: 1808116 - RNA, 15 nt, Human
ugccugcccuauucu

SEQ ID NO: 1808117 - RNA, 20 nt, Human
ugccuguucagcuccagcuc

SEQ ID NO: 1808118 - RNA, 18 nt, Human
ugccuguucagcuccagc

SEQ ID NO: 1808119 - RNA, 13 nt, Human
agcuguucagcug

SEQ ID NO: 1808120 - RNA, 14 nt, Human
agcuguucagcugg

SEQ ID NO: 1808121 - RNA, 14 nt, Human
agcuguuacugucu

SEQ ID NO: 1808122 - RNA, 15 nt, Human
ugccuuauggaacac

SEQ ID NO: 1808123 - RNA, 16 nt, Human
ugccuuauggaacacu

SEQ ID NO: 1808124 - RNA, 21 nt, Human
ugccuguucagcuccagcuca

SEQ ID NO: 1808125 - RNA, 19 nt, Human
ugccuguugggccaggagc

SEQ ID NO: 1808126 - RNA, 20 nt, Human
ugccuguugggccaggagcc

SEQ ID NO: 1808127 - RNA, 15 nt, Human
agcugggacuacagg

SEQ ID NO: 1808128 - RNA, 20 nt, Human
agcugugcucuggacaggca

SEQ ID NO: 1808129 - RNA, 23 nt, Human
agcugugcucuggacaggcaugu

SEQ ID NO: 1808130 - RNA, 21 nt, Human
agcugugcucuggacaggcau

SEQ ID NO: 1808131 - RNA, 14 nt, Human
agcuguguggcagu

SEQ ID NO: 1808132 - RNA, 16 nt, Human
agcuguguggcagucu

SEQ ID NO: 1808133 - RNA, 12 nt, Human
aggaagcucagg

SEQ ID NO: 1808134 - RNA, 23 nt, Human
aggaaggaaacccagcucugguc

SEQ ID NO: 1808135 - RNA, 20 nt, Human
aggaaggaaacccagcucug

SEQ ID NO: 1808136 - RNA, 22 nt, Human
aggaaggaaacccagcucuggu

SEQ ID NO: 1808137 - RNA, 18 nt, Human
aggaagccgcuggggcca

SEQ ID NO: 1808138 - RNA, 19 nt, Human
aggaagccgcuggggccag

SEQ ID NO: 1808139 - RNA, 20 nt, Human
aggaagccgcuggggccagu

SEQ ID NO: 1808140 - RNA, 22 nt, Human
aggaagcacaugccucucucag

SEQ ID NO: 1808141 - RNA, 21 nt, Human
aggaagccagcaggcucucag

SEQ ID NO: 1808142 - RNA, 22 nt, Human
aggaagccagcaggcucucagg

SEQ ID NO: 1808143 - RNA, 23 nt, Human
aggaagccagcaggcucucaggc

SEQ ID NO: 1808144 - RNA, 21 nt, Human
ugcugacuguacuccucccag

SEQ ID NO: 1808145 - RNA, 22 nt, Human
ugcugacuguacuccucccagg

SEQ ID NO: 1808146 - RNA, 16 nt, Human
ugcugacuguuuucuc

SEQ ID NO: 1808147 - RNA, 13 nt, Human
aggaaaggcucca

SEQ ID NO: 1808148 - RNA, 14 nt, Human
aggaaaggcuccag

SEQ ID NO: 1808149 - RNA, 15 nt, Human
aggaaaggcuccagg

SEQ ID NO: 1808150 - RNA, 16 nt, Human
aggaaaggcuccagga

SEQ ID NO: 1808151 - RNA, 14 nt, Human
aggaaauccagggu

SEQ ID NO: 1808152 - RNA, 11 nt, Human
aggaagcacau

SEQ ID NO: 1808153 - RNA, 16 nt, Human
aggaagcacaugccuc

SEQ ID NO: 1808154 - RNA, 17 nt, Human
aggaagcacaugccucu

SEQ ID NO: 1808155 - RNA, 15 nt, Human
aggaaaucaccgaaa

SEQ ID NO: 1808156 - RNA, 19 nt, Human
aggaaaucaccgaaaacgu

SEQ ID NO: 1808157 - RNA, 14 nt, Human
ugcucuggacaggc

SEQ ID NO: 1808158 - RNA, 16 nt, Human
ugcucuggacaggcau

SEQ ID NO: 1808159 - RNA, 15 nt, Human
ugcucuggacaggca

SEQ ID NO: 1808160 - RNA, 16 nt, Human
ugcugacuguacuccu

SEQ ID NO: 1808161 - RNA, 19 nt, Human
ugcugacuguacuccuccc

SEQ ID NO: 1808162 - RNA, 20 nt, Human
ugcuaucucccccagcccca

SEQ ID NO: 1808163 - RNA, 21 nt, Human
agcuuuaaugauaugcuugua

SEQ ID NO: 1808164 - RNA, 19 nt, Human
ugcuaucucccccagcccc

SEQ ID NO: 1808165 - RNA, 13 nt, Human
ugcugcccugccc

SEQ ID NO: 1808166 - RNA, 16 nt, Human
ugcugcccugcccacc

SEQ ID NO: 1808167 - RNA, 17 nt, Human
ugcugcccugcccaccu

SEQ ID NO: 1808168 - RNA, 18 nt, Human
ugcugcccugcccaccug

SEQ ID NO: 1808169 - RNA, 11 nt, Human
ugcugcccugu

SEQ ID NO: 1808170 - RNA, 19 nt, Human
ugcugcccugcccaccugg

SEQ ID NO: 1808171 - RNA, 21 nt, Human
ugcugcccugcccaccuggcc

SEQ ID NO: 1808172 - RNA, 17 nt, Human
ugcugggauuacaggug

SEQ ID NO: 1808173 - RNA, 21 nt, Human
ugcugggauuacaagcgugag

SEQ ID NO: 1808174 - RNA, 21 nt, Human
ugcuggcuguuggcugggggc

SEQ ID NO: 1808175 - RNA, 19 nt, Human
ugcuggcuguuggcugggg

SEQ ID NO: 1808176 - RNA, 19 nt, Human
ugcugggauuacaagcgug

SEQ ID NO: 1808177 - RNA, 13 nt, Human
ugcuggcugccuu

SEQ ID NO: 1808178 - RNA, 17 nt, Human
aggacagccccuccucc

SEQ ID NO: 1808179 - RNA, 18 nt, Human
aggacacuaaccacgcug

SEQ ID NO: 1808180 - RNA, 16 nt, Human
ugcuuccagugaggcu

SEQ ID NO: 1808181 - RNA, 12 nt, Human
ugcuucaaggau

SEQ ID NO: 1808182 - RNA, 20 nt, Human
ugcuucaaggauccugagcc

SEQ ID NO: 1808183 - RNA, 21 nt, Human
ugcuucaaggauccugagcca

SEQ ID NO: 1808184 - RNA, 23 nt, Human
ugcuucaaggauccugagccaga

SEQ ID NO: 1808185 - RNA, 17 nt, Human
ugcugucccuuacguga

SEQ ID NO: 1808186 - RNA, 19 nt, Human
ugcugucccuuacgugagu

SEQ ID NO: 1808187 - RNA, 15 nt, Human
ugcugucccuuuucc

SEQ ID NO: 1808188 - RNA, 13 nt, Human
ugcugugcaaaug

SEQ ID NO: 1808189 - RNA, 17 nt, Human
ugcugucccuuuuccuu

SEQ ID NO: 1808190 - RNA, 21 nt, Human
ugcuucaaaaacauucuuaca

SEQ ID NO: 1808191 - RNA, 13 nt, Human
ugcuucaaaaaca

SEQ ID NO: 1808192 - RNA, 12 nt, Human
aggccccugcca

SEQ ID NO: 1808193 - RNA, 17 nt, Human
aggccccgcccaggcuu

SEQ ID NO: 1808194 - RNA, 23 nt, Human
uggccagugugacaaggauugcu

SEQ ID NO: 1808195 - RNA, 16 nt, Human
uggccagguggccacu

SEQ ID NO: 1808196 - RNA, 17 nt, Human
uggccagguggccacuc

SEQ ID NO: 1808197 - RNA, 19 nt, Human
uggccagguggccacucca

SEQ ID NO: 1808198 - RNA, 23 nt, Human
uggccaaagccaaagcuaggccu

SEQ ID NO: 1808199 - RNA, 21 nt, Human
uggccaaagccaaagcuaggc

SEQ ID NO: 1808200 - RNA, 11 nt, Human
uggccaggugg

SEQ ID NO: 1808201 - RNA, 15 nt, Human
uggccagguggccac

SEQ ID NO: 1808202 - RNA, 14 nt, Human
uggccuucggccuc

SEQ ID NO: 1808203 - RNA, 20 nt, Human
aggccugggggcugggcaga

SEQ ID NO: 1808204 - RNA, 12 nt, Human
aggccuggggac

SEQ ID NO: 1808205 - RNA, 18 nt, Human
aggccugggggcugggca

SEQ ID NO: 1808206 - RNA, 18 nt, Human
uggccuggccccucaggg

SEQ ID NO: 1808207 - RNA, 21 nt, Human
uggccuggccccucagggucc

SEQ ID NO: 1808208 - RNA, 18 nt, Human
uggccugagcugggauga

SEQ ID NO: 1808209 - RNA, 13 nt, Human
uggccucuucaga

SEQ ID NO: 1808210 - RNA, 23 nt, Human
uggccgggcgcgguggcucacgc

SEQ ID NO: 1808211 - RNA, 14 nt, Human
uggcccugcccugg

SEQ ID NO: 1808212 - RNA, 13 nt, Human
uggcccacgcacu

SEQ ID NO: 1808213 - RNA, 18 nt, Human
uggcacagggcaguggga

SEQ ID NO: 1808214 - RNA, 14 nt, Human
aggccagagggagu

SEQ ID NO: 1808215 - RNA, 19 nt, Human
aggccacaagacccuugug

SEQ ID NO: 1808216 - RNA, 17 nt, Human
aggccacaagacccuug

SEQ ID NO: 1808217 - RNA, 18 nt, Human
aggccacaagacccuugu

SEQ ID NO: 1808218 - RNA, 17 nt, Human
uggcagccuuggcaaac

SEQ ID NO: 1808219 - RNA, 15 nt, Human
uggcagcucaccucu

SEQ ID NO: 1808220 - RNA, 16 nt, Human
aggccacaagacccuu

SEQ ID NO: 1808221 - RNA, 19 nt, Human
uggcagcucaccucucccu

SEQ ID NO: 1808222 - RNA, 20 nt, Human
aggccagagggagugacaga

SEQ ID NO: 1808223 - RNA, 21 nt, Human
aggcccagagggccugcaagg

SEQ ID NO: 1808224 - RNA, 16 nt, Human
aggccccgcccaggcu

SEQ ID NO: 1808225 - RNA, 17 nt, Human
aggcagccccauucugc

SEQ ID NO: 1808226 - RNA, 16 nt, Human
aggcagccccauucug

SEQ ID NO: 1808227 - RNA, 16 nt, Human
aggccaaaggaagcac

SEQ ID NO: 1808228 - RNA, 18 nt, Human
aggccaaaggaagcacau

SEQ ID NO: 1808229 - RNA, 19 nt, Human
aggccaaaggaagcacaug

SEQ ID NO: 1808230 - RNA, 20 nt, Human
aggccaaaggaagcacaugc

SEQ ID NO: 1808231 - RNA, 16 nt, Human
aggccaaggugggagg

SEQ ID NO: 1808232 - RNA, 20 nt, Human
uggagguacgaaaagagggg

SEQ ID NO: 1808233 - RNA, 15 nt, Human
uggauggaaggggcu

SEQ ID NO: 1808234 - RNA, 14 nt, Human
uggaguauauguca

SEQ ID NO: 1808235 - RNA, 17 nt, Human
uggauuauauuaugaag

SEQ ID NO: 1808236 - RNA, 13 nt, Human
uggauuggauuug

SEQ ID NO: 1808237 - RNA, 21 nt, Human
uggauuguccccgacccuugc

SEQ ID NO: 1808238 - RNA, 13 nt, Human
uggauuguccccg

SEQ ID NO: 1808239 - RNA, 19 nt, Human
aggaucucuugagccuggg

SEQ ID NO: 1808240 - RNA, 17 nt, Human
aggaucucuugagccug

SEQ ID NO: 1808241 - RNA, 18 nt, Human
aggaucucuugagccugg

SEQ ID NO: 1808242 - RNA, 14 nt, Human
uggacacagcucuu

SEQ ID NO: 1808243 - RNA, 13 nt, Human
uggacacagcucu

SEQ ID NO: 1808244 - RNA, 22 nt, Human
uggacacagcucuucuccaggc

SEQ ID NO: 1808245 - RNA, 15 nt, Human
uggacccugaggccc

SEQ ID NO: 1808246 - RNA, 20 nt, Human
uggaccuugaacuggguacu

SEQ ID NO: 1808247 - RNA, 23 nt, Human
uggacacagcucuucuccaggcu

SEQ ID NO: 1808248 - RNA, 16 nt, Human
uggacccugaggccca

SEQ ID NO: 1808249 - RNA, 18 nt, Human
uggacccugaggcccaga

SEQ ID NO: 1808250 - RNA, 19 nt, Human
uggacccugaggcccagag

SEQ ID NO: 1808251 - RNA, 20 nt, Human
uggacccugaggcccagagg

SEQ ID NO: 1808252 - RNA, 21 nt, Human
uggacccugaggcccagaggg

SEQ ID NO: 1808253 - RNA, 23 nt, Human
uggacccuguggaugauaaaaca

SEQ ID NO: 1808254 - RNA, 13 nt, Human
aggcaaucauggu

SEQ ID NO: 1808255 - RNA, 22 nt, Human
aggcacccaccaucaugucugg

SEQ ID NO: 1808256 - RNA, 21 nt, Human
aggcacccaccaucaugucug

SEQ ID NO: 1808257 - RNA, 20 nt, Human
aggcacccaccaucaugucu

SEQ ID NO: 1808258 - RNA, 14 nt, Human
aggcaaugcuggcu

SEQ ID NO: 1808259 - RNA, 20 nt, Human
aggcaccuaccaccacgccc

SEQ ID NO: 1808260 - RNA, 13 nt, Human
uggagaagcggcu

SEQ ID NO: 1808261 - RNA, 22 nt, Human
uggagaagcggcuggcagccca

SEQ ID NO: 1808262 - RNA, 15 nt, Human
uggacugugugcuca

SEQ ID NO: 1808263 - RNA, 14 nt, Human
uggagaacuagaga

SEQ ID NO: 1808264 - RNA, 16 nt, Human
uggaagcacagcuuca

SEQ ID NO: 1808265 - RNA, 17 nt, Human
uggaaaugggcagagca

SEQ ID NO: 1808266 - RNA, 18 nt, Human
uggaaaugggcagagcag

SEQ ID NO: 1808267 - RNA, 23 nt, Human
uggaaggggacacgugacagccg

SEQ ID NO: 1808268 - RNA, 18 nt, Human
uggaaguacuauaauuua

SEQ ID NO: 1808269 - RNA, 13 nt, Human
aggauccugagcc

SEQ ID NO: 1808270 - RNA, 14 nt, Human
aggauccugagcca

SEQ ID NO: 1808271 - RNA, 21 nt, Human
ugcuugaggcaacucaucuua

SEQ ID NO: 1808272 - RNA, 14 nt, Human
ugcuuggaggaagg

SEQ ID NO: 1808273 - RNA, 15 nt, Human
ugcuuggaggaagga

SEQ ID NO: 1808274 - RNA, 16 nt, Human
ugcuuggaggaaggaa

SEQ ID NO: 1808275 - RNA, 15 nt, Human
ugcuuguaacuaaaa

SEQ ID NO: 1808276 - RNA, 13 nt, Human
ugcuuguacauaa

SEQ ID NO: 1808277 - RNA, 12 nt, Human
ugcuuguacaua

SEQ ID NO: 1808278 - RNA, 17 nt, Human
ugcuuuuggucugugug

SEQ ID NO: 1808279 - RNA, 14 nt, Human
ugcuuuuggucugu

SEQ ID NO: 1808280 - RNA, 16 nt, Human
ugcuuugugauuuuug

SEQ ID NO: 1808281 - RNA, 14 nt, Human
ugcuuugugauuuu

SEQ ID NO: 1808282 - RNA, 12 nt, Human
ugcuuugugauu

SEQ ID NO: 1808283 - RNA, 22 nt, Human
ugcuuguacauaaugcgugcau

SEQ ID NO: 1808284 - RNA, 16 nt, Human
ugcuuguacauaaugc

SEQ ID NO: 1808285 - RNA, 14 nt, Human
ugcuuguacauaau

SEQ ID NO: 1808286 - RNA, 23 nt, Human
ugcacuauagccuaggugacaga

SEQ ID NO: 1808287 - RNA, 23 nt, Human
agcccuucuaccuuccugcaaca

SEQ ID NO: 1808288 - RNA, 19 nt, Human
agccguuuguuccccaaga

SEQ ID NO: 1808289 - RNA, 22 nt, Human
agccguggcuucccgcucagcc

SEQ ID NO: 1808290 - RNA, 23 nt, Human
agccguggcuucccgcucagccc

SEQ ID NO: 1808291 - RNA, 14 nt, Human
agccguggcuuccc

SEQ ID NO: 1808292 - RNA, 21 nt, Human
agccguggcuucccgcucagc

SEQ ID NO: 1808293 - RNA, 13 nt, Human
agccguggcuucc

SEQ ID NO: 1808294 - RNA, 16 nt, Human
agccucccaaagugcu

SEQ ID NO: 1808295 - RNA, 18 nt, Human
agccuccaugcugccucc

SEQ ID NO: 1808296 - RNA, 20 nt, Human
agccuccaugcugccuccag

SEQ ID NO: 1808297 - RNA, 20 nt, Human
agccucauguccacugguuc

SEQ ID NO: 1808298 - RNA, 23 nt, Human
agccucagcauccuggcacccgg

SEQ ID NO: 1808299 - RNA, 22 nt, Human
agccucagcauccuggcacccg

SEQ ID NO: 1808300 - RNA, 12 nt, Human
agccucaucucu

SEQ ID NO: 1808301 - RNA, 15 nt, Human
agccucauguccacu

SEQ ID NO: 1808302 - RNA, 21 nt, Human
agccucagcauccuggcaccc

SEQ ID NO: 1808303 - RNA, 20 nt, Human
agccucagcauccuggcacc

SEQ ID NO: 1808304 - RNA, 19 nt, Human
agccucagcauccuggcac

SEQ ID NO: 1808305 - RNA, 17 nt, Human
agccucagcauccuggc

SEQ ID NO: 1808306 - RNA, 17 nt, Human
agccucccaaagugcug

SEQ ID NO: 1808307 - RNA, 22 nt, Human
agccugaaagaggaaugaagua

SEQ ID NO: 1808308 - RNA, 16 nt, Human
ugcagccucacagucc

SEQ ID NO: 1808309 - RNA, 13 nt, Human
ugcagccucacag

SEQ ID NO: 1808310 - RNA, 15 nt, Human
ugcagccucacaguc

SEQ ID NO: 1808311 - RNA, 22 nt, Human
ugcauaacguauaaaagccugu

SEQ ID NO: 1808312 - RNA, 23 nt, Human
ugcauaacguauaaaagccuguu

SEQ ID NO: 1808313 - RNA, 14 nt, Human
ugcauaaguuaacu

SEQ ID NO: 1808314 - RNA, 17 nt, Human
ugcauaaguuaacuucc

SEQ ID NO: 1808315 - RNA, 18 nt, Human
ugcaguacuuuaccuccu

SEQ ID NO: 1808316 - RNA, 12 nt, Human
ugcaggucccua

SEQ ID NO: 1808317 - RNA, 14 nt, Human
ugcaggucccuaau

SEQ ID NO: 1808318 - RNA, 15 nt, Human
ugcaggucccuaaua

SEQ ID NO: 1808319 - RNA, 16 nt, Human
ugcaggucccuaauaa

SEQ ID NO: 1808320 - RNA, 22 nt, Human
agccccuggaugcagccucaca

SEQ ID NO: 1808321 - RNA, 19 nt, Human
agccccuggaugcagccuc

SEQ ID NO: 1808322 - RNA, 17 nt, Human
agccccuggaugcagcc

SEQ ID NO: 1808323 - RNA, 18 nt, Human
agccccuggaugcagccu

SEQ ID NO: 1808324 - RNA, 16 nt, Human
agccccgaggccuucu

SEQ ID NO: 1808325 - RNA, 22 nt, Human
agccccgaggccuucucugaag

SEQ ID NO: 1808326 - RNA, 17 nt, Human
agccccgaggccuucuc

SEQ ID NO: 1808327 - RNA, 24 nt, Human
agccccaaaacucuccucugcugc

SEQ ID NO: 1808328 - RNA, 21 nt, Human
agccccaaaacucuccucugc

SEQ ID NO: 1808329 - RNA, 22 nt, Human
agccccaaaacucuccucugcu

SEQ ID NO: 1808330 - RNA, 20 nt, Human
agccccaaaacucuccucug

SEQ ID NO: 1808331 - RNA, 18 nt, Human
agcccauggcacucuaug

SEQ ID NO: 1808332 - RNA, 20 nt, Human
ugauucuccugccucagccu

SEQ ID NO: 1808333 - RNA, 19 nt, Human
ugauucuccugccucagcc

SEQ ID NO: 1808334 - RNA, 15 nt, Human
ugauucuccugccuc

SEQ ID NO: 1808335 - RNA, 23 nt, Human
agcccugguggcagugggagcug

SEQ ID NO: 1808336 - RNA, 22 nt, Human
agcccugguggcagugggagcu

SEQ ID NO: 1808337 - RNA, 15 nt, Human
ugcacaagcugcacc

SEQ ID NO: 1808338 - RNA, 12 nt, Human
ugcacacagcac

SEQ ID NO: 1808339 - RNA, 24 nt, Human
ugcacacagcacgggggccaagga

SEQ ID NO: 1808340 - RNA, 18 nt, Human
ugcacaagcugcacccuc

SEQ ID NO: 1808341 - RNA, 21 nt, Human
ugcacaagcugcacccucagg

SEQ ID NO: 1808342 - RNA, 21 nt, Human
agcccugguggcagugggagc

SEQ ID NO: 1808343 - RNA, 22 nt, Human
agcccugcuuugggcugcccug

SEQ ID NO: 1808344 - RNA, 23 nt, Human
agcccugcuuugggcugcccugg

SEQ ID NO: 1808345 - RNA, 21 nt, Human
agcccugcuuugggcugcccu

SEQ ID NO: 1808346 - RNA, 20 nt, Human
agccccuucugacccaugcu

SEQ ID NO: 1808347 - RNA, 24 nt, Human
agccccuucugacccaugcugccc

SEQ ID NO: 1808348 - RNA, 15 nt, Human
ugcacgugugugcac

SEQ ID NO: 1808349 - RNA, 14 nt, Human
ugcacgugugugca

SEQ ID NO: 1808350 - RNA, 16 nt, Human
ugcacccucaggcagg

SEQ ID NO: 1808351 - RNA, 17 nt, Human
ugcacccucaggcaggu

SEQ ID NO: 1808352 - RNA, 20 nt, Human
ugcacacauuuuuuaaaugc

SEQ ID NO: 1808353 - RNA, 10 nt, Human
ugcacacauu

SEQ ID NO: 1808354 - RNA, 16 nt, Human
ugcccacaggaucagu

SEQ ID NO: 1808355 - RNA, 19 nt, Human
ugcccacaggaucagucug

SEQ ID NO: 1808356 - RNA, 20 nt, Human
ugcccacaggaucagucuga

SEQ ID NO: 1808357 - RNA, 21 nt, Human
ugcccagccccuucugaccca

SEQ ID NO: 1808358 - RNA, 20 nt, Human
ugcccagccccuucugaccc

SEQ ID NO: 1808359 - RNA, 22 nt, Human
ugcccaagaauagaugcugacu

SEQ ID NO: 1808360 - RNA, 23 nt, Human
ugcccaagaauagaugcugacug

SEQ ID NO: 1808361 - RNA, 21 nt, Human
ugcccaagaauagaugcugac

SEQ ID NO: 1808362 - RNA, 21 nt, Human
agcucauucuccuuguguuac

SEQ ID NO: 1808363 - RNA, 20 nt, Human
agcucauucuccuuguguua

SEQ ID NO: 1808364 - RNA, 21 nt, Human
agcucaggugucccugcacuu

SEQ ID NO: 1808365 - RNA, 20 nt, Human
agcucaggugucccugcacu

SEQ ID NO: 1808366 - RNA, 22 nt, Human
agcucaggugucccugcacuug

SEQ ID NO: 1808367 - RNA, 18 nt, Human
agcucaggugucccugca

SEQ ID NO: 1808368 - RNA, 15 nt, Human
agcuaggccuggcca

SEQ ID NO: 1808369 - RNA, 14 nt, Human
agcuaggccuggcc

SEQ ID NO: 1808370 - RNA, 16 nt, Human
agcuaggccuggccag

SEQ ID NO: 1808371 - RNA, 12 nt, Human
agcuaggccugg

SEQ ID NO: 1808372 - RNA, 18 nt, Human
agcuaggaauuguguuua

SEQ ID NO: 1808373 - RNA, 19 nt, Human
agcuacuaauuuuaaaaug

SEQ ID NO: 1808374 - RNA, 22 nt, Human
agcgugagccacugcaccgggc

SEQ ID NO: 1808375 - RNA, 15 nt, Human
agcgugcauaaguua

SEQ ID NO: 1808376 - RNA, 19 nt, Human
agcgugagccacugcaccg

SEQ ID NO: 1808377 - RNA, 22 nt, Human
ugccacacuucaggcucuucuc

SEQ ID NO: 1808378 - RNA, 23 nt, Human
ugccacacuucaggcucuucucc

SEQ ID NO: 1808379 - RNA, 18 nt, Human
agcuagacgagcaggcuu

SEQ ID NO: 1808380 - RNA, 12 nt, Human
agcuagaaauga

SEQ ID NO: 1808381 - RNA, 11 nt, Human
agcuagaaaug

SEQ ID NO: 1808382 - RNA, 18 nt, Human
agcuacuugggaggcuga

SEQ ID NO: 1808383 - RNA, 17 nt, Human
agcuacuugggaggcug

SEQ ID NO: 1808384 - RNA, 12 nt, Human
ugcauaccacuu

SEQ ID NO: 1808385 - RNA, 14 nt, Human
ugcauaccacuuuu

SEQ ID NO: 1808386 - RNA, 15 nt, Human
agccugcuccagcug

SEQ ID NO: 1808387 - RNA, 16 nt, Human
agccugcuccagcugu

SEQ ID NO: 1808388 - RNA, 17 nt, Human
agccugcuccagcuguu

SEQ ID NO: 1808389 - RNA, 22 nt, Human
agccugggugacagagcaagug

SEQ ID NO: 1808390 - RNA, 19 nt, Human
agccugcuccagcuguuca

SEQ ID NO: 1808391 - RNA, 22 nt, Human
agccugcuccagcuguucagcu

SEQ ID NO: 1808392 - RNA, 13 nt, Human
agccuguuuaaga

SEQ ID NO: 1808393 - RNA, 21 nt, Human
agccugugccucugggacugg

SEQ ID NO: 1808394 - RNA, 22 nt, Human
ugcauuaucuagauacuguauc

SEQ ID NO: 1808395 - RNA, 21 nt, Human
ugcauuaucuagauacuguau

SEQ ID NO: 1808396 - RNA, 13 nt, Human
ugccacacuucag

SEQ ID NO: 1808397 - RNA, 14 nt, Human
ugccacacuucagg

SEQ ID NO: 1808398 - RNA, 15 nt, Human
ugccacacuucaggc

SEQ ID NO: 1808399 - RNA, 16 nt, Human
ugccacacuucaggcu

SEQ ID NO: 1808400 - RNA, 21 nt, Human
ugccaauaauaauaccucccu

SEQ ID NO: 1808401 - RNA, 22 nt, Human
ugccaauaauaauaccucccuu

SEQ ID NO: 1808402 - RNA, 11 nt, Human
agccuuccagg

SEQ ID NO: 1808403 - RNA, 14 nt, Human
agccuuccaggggu

SEQ ID NO: 1808404 - RNA, 16 nt, Human
agccuuccaggggugg

SEQ ID NO: 1808405 - RNA, 17 nt, Human
agccuuccagggguggg

SEQ ID NO: 1808406 - RNA, 18 nt, Human
agcggagacggaguccca

SEQ ID NO: 1808407 - RNA, 20 nt, Human
agcggagaaaggaagggcug

SEQ ID NO: 1808408 - RNA, 20 nt, Human
ugcauuaucuagauacugua

SEQ ID NO: 1808409 - RNA, 16 nt, Human
agcggagaaaggaagg

SEQ ID NO: 1808410 - RNA, 23 nt, Human
agccaguaaaugggggugcauuu

SEQ ID NO: 1808411 - RNA, 12 nt, Human
agccagggucuc

SEQ ID NO: 1808412 - RNA, 21 nt, Human
agccaggccacaagacccuug

SEQ ID NO: 1808413 - RNA, 22 nt, Human
agccaggccacaagacccuugu

SEQ ID NO: 1808414 - RNA, 12 nt, Human
agccaggccaca

SEQ ID NO: 1808415 - RNA, 14 nt, Human
agccaggccacaag

SEQ ID NO: 1808416 - RNA, 22 nt, Human
agcccacuucugccauauucug

SEQ ID NO: 1808417 - RNA, 19 nt, Human
agcccaggaaaggcuccag

SEQ ID NO: 1808418 - RNA, 20 nt, Human
agcccaggaaaggcuccagg

SEQ ID NO: 1808419 - RNA, 21 nt, Human
agcccaggaaaggcuccagga

SEQ ID NO: 1808420 - RNA, 15 nt, Human
ugauucauaaugacu

SEQ ID NO: 1808421 - RNA, 13 nt, Human
ugauucagcucug

SEQ ID NO: 1808422 - RNA, 14 nt, Human
ugauucagcucugc

SEQ ID NO: 1808423 - RNA, 24 nt, Human
agcccaggaaaggcuccaggagca

SEQ ID NO: 1808424 - RNA, 22 nt, Human
agcccaggaaaggcuccaggag

SEQ ID NO: 1808425 - RNA, 23 nt, Human
agcccaggaaaggcuccaggagc

SEQ ID NO: 1808426 - RNA, 18 nt, Human
ugauucccaagcucugcu

SEQ ID NO: 1808427 - RNA, 16 nt, Human
ugauucccaagcucug

SEQ ID NO: 1808428 - RNA, 15 nt, Human
ugauucccaagcucu

SEQ ID NO: 1808429 - RNA, 21 nt, Human
ugauucccaagcucugcuccu

SEQ ID NO: 1808430 - RNA, 19 nt, Human
ugauucccaagcucugcuc

SEQ ID NO: 1808431 - RNA, 18 nt, Human
ugauguuuuaaggaugcu

SEQ ID NO: 1808432 - RNA, 17 nt, Human
ugauguuuuaaggaugc

SEQ ID NO: 1808433 - RNA, 14 nt, Human
ugaugauccuaggc

SEQ ID NO: 1808434 - RNA, 20 nt, Human
ugaugauccuaggcauuugc

SEQ ID NO: 1808435 - RNA, 17 nt, Human
ugauggugcaaugaccu

SEQ ID NO: 1808436 - RNA, 23 nt, Human
ugauggugcaaugaccuuucaau

SEQ ID NO: 1808437 - RNA, 16 nt, Human
ugauggugcaaugacc

SEQ ID NO: 1808438 - RNA, 22 nt, Human
agccacugcaccgggccacaga

SEQ ID NO: 1808439 - RNA, 21 nt, Human
agccacugcaccgggccacag

SEQ ID NO: 1808440 - RNA, 13 nt, Human
agccacugcaccg

SEQ ID NO: 1808441 - RNA, 22 nt, Human
ugauuaaagaugagcuuugucu

SEQ ID NO: 1808442 - RNA, 15 nt, Human
ugauuaaagaugagc

SEQ ID NO: 1808443 - RNA, 15 nt, Human
ugauuaauuaaaaca

SEQ ID NO: 1808444 - RNA, 12 nt, Human
ugauuaaaccaa

SEQ ID NO: 1808445 - RNA, 14 nt, Human
ugauuaccagggac

SEQ ID NO: 1808446 - RNA, 15 nt, Human
agccacggccaggcc

SEQ ID NO: 1808447 - RNA, 18 nt, Human
ugauccuuuuggagucag

SEQ ID NO: 1808448 - RNA, 13 nt, Human
ugaugaagaggag

SEQ ID NO: 1808449 - RNA, 14 nt, Human
ugaugaagaggagu

SEQ ID NO: 1808450 - RNA, 14 nt, Human
agccacauuccuga

SEQ ID NO: 1808451 - RNA, 18 nt, Human
agccacauuccugaugcu

SEQ ID NO: 1808452 - RNA, 19 nt, Human
agccaccaacauacuccca

SEQ ID NO: 1808453 - RNA, 20 nt, Human
agccaccaacauacucccau

SEQ ID NO: 1808454 - RNA, 23 nt, Human
agccaccaacauacucccaucug

SEQ ID NO: 1808455 - RNA, 14 nt, Human
agccacggccaggc

SEQ ID NO: 1808456 - RNA, 18 nt, Human
agccaccgugccuggcca

SEQ ID NO: 1808457 - RNA, 22 nt, Human
ugaguaacugauuuguaacaag

SEQ ID NO: 1808458 - RNA, 15 nt, Human
ugaguacuacagucc

SEQ ID NO: 1808459 - RNA, 14 nt, Human
agcauauucaggaa

SEQ ID NO: 1808460 - RNA, 13 nt, Human
ugaguagcuggau

SEQ ID NO: 1808461 - RNA, 13 nt, Human
ugaguagcuggga

SEQ ID NO: 1808462 - RNA, 17 nt, Human
ugaguacuacaguccuc

SEQ ID NO: 1808463 - RNA, 21 nt, Human
ugaguacuacaguccucccau

SEQ ID NO: 1808464 - RNA, 22 nt, Human
ugaguacuacaguccucccauc

SEQ ID NO: 1808465 - RNA, 23 nt, Human
ugaguacuacaguccucccaucu

SEQ ID NO: 1808466 - RNA, 12 nt, Human
ugagaauuaccc

SEQ ID NO: 1808467 - RNA, 21 nt, Human
agcauaauacuugcuuuggaa

SEQ ID NO: 1808468 - RNA, 15 nt, Human
agcauacguacacau

SEQ ID NO: 1808469 - RNA, 21 nt, Human
agcauacguacacauuuuauu

SEQ ID NO: 1808470 - RNA, 20 nt, Human
agcauacguacacauuuuau

SEQ ID NO: 1808471 - RNA, 19 nt, Human
agcauacguacacauuuua

SEQ ID NO: 1808472 - RNA, 18 nt, Human
agcauacguacacauuuu

SEQ ID NO: 1808473 - RNA, 17 nt, Human
agcauacguacacauuu

SEQ ID NO: 1808474 - RNA, 16 nt, Human
agcauacguacacauu

SEQ ID NO: 1808475 - RNA, 17 nt, Human
ugaguucauacccuguu

SEQ ID NO: 1808476 - RNA, 20 nt, Human
ugauaagaaccuuuugagug

SEQ ID NO: 1808477 - RNA, 21 nt, Human
ugauacaaugcugugcccuaa

SEQ ID NO: 1808478 - RNA, 20 nt, Human
ugauacaaugcugugcccua

SEQ ID NO: 1808479 - RNA, 17 nt, Human
ugauacuacaguuuguu

SEQ ID NO: 1808480 - RNA, 14 nt, Human
ugauacuacaguuu

SEQ ID NO: 1808481 - RNA, 21 nt, Human
ugagugggugaauaauacagu

SEQ ID NO: 1808482 - RNA, 17 nt, Human
ugagucaccaagcccag

SEQ ID NO: 1808483 - RNA, 16 nt, Human
ugagucaccaagccca

SEQ ID NO: 1808484 - RNA, 17 nt, Human
ugagugccuuacacaau

SEQ ID NO: 1808485 - RNA, 20 nt, Human
ugagugccuuacacaauggu

SEQ ID NO: 1808486 - RNA, 14 nt, Human
ugagucaccaagcc

SEQ ID NO: 1808487 - RNA, 17 nt, Human
agcaugucgucaaagcu

SEQ ID NO: 1808488 - RNA, 20 nt, Human
agcaugucgucaaagcugaa

SEQ ID NO: 1808489 - RNA, 12 nt, Human
agcauggcugcc

SEQ ID NO: 1808490 - RNA, 14 nt, Human
agcaucaggccagg

SEQ ID NO: 1808491 - RNA, 16 nt, Human
agcaucaggccaggcc

SEQ ID NO: 1808492 - RNA, 17 nt, Human
agcaucaggccaggccc

SEQ ID NO: 1808493 - RNA, 18 nt, Human
agcaucaggccaggcccu

SEQ ID NO: 1808494 - RNA, 19 nt, Human
agcaucaggccaggcccuc

SEQ ID NO: 1808495 - RNA, 20 nt, Human
agcaucaggccaggcccucu

SEQ ID NO: 1808496 - RNA, 17 nt, Human
agcauuguaaaagcauu

SEQ ID NO: 1808497 - RNA, 19 nt, Human
ugaucacggcucacugcag

SEQ ID NO: 1808498 - RNA, 20 nt, Human
agcaucacaugaacuuguaa

SEQ ID NO: 1808499 - RNA, 13 nt, Human
agcaucaggccag

SEQ ID NO: 1808500 - RNA, 21 nt, Human
ugaucacggcucacugcagcc

SEQ ID NO: 1808501 - RNA, 20 nt, Human
ugaucacggcucacugcagc

SEQ ID NO: 1808502 - RNA, 22 nt, Human
agcauauucaggaagcucaggg

SEQ ID NO: 1808503 - RNA, 19 nt, Human
ugauauguugguagauucu

SEQ ID NO: 1808504 - RNA, 19 nt, Human
ugauauuuucaacgcagcc

SEQ ID NO: 1808505 - RNA, 21 nt, Human
ugauauuuucaacgcagcccu

SEQ ID NO: 1808506 - RNA, 22 nt, Human
ugauauuuucaacgcagcccug

SEQ ID NO: 1808507 - RNA, 23 nt, Human
ugauauuuucaacgcagcccugc

SEQ ID NO: 1808508 - RNA, 18 nt, Human
ugaccugaggcccuucuc

SEQ ID NO: 1808509 - RNA, 19 nt, Human
ugaccugaggcccuucucu

SEQ ID NO: 1808510 - RNA, 16 nt, Human
ugaccuuaaaugcaac

SEQ ID NO: 1808511 - RNA, 14 nt, Human
ugaccuuaaaugca

SEQ ID NO: 1808512 - RNA, 16 nt, Human
ugacuuacuguacaug

SEQ ID NO: 1808513 - RNA, 15 nt, Human
ugacuuacuguacau

SEQ ID NO: 1808514 - RNA, 13 nt, Human
ugacuuacuguac

SEQ ID NO: 1808515 - RNA, 14 nt, Human
ugacccaugcugcc

SEQ ID NO: 1808516 - RNA, 15 nt, Human
ugacccaugcugccc

SEQ ID NO: 1808517 - RNA, 21 nt, Human
ugacccaugcugcccugugag

SEQ ID NO: 1808518 - RNA, 13 nt, Human
agauuaagaaaua

SEQ ID NO: 1808519 - RNA, 16 nt, Human
ugacccaugcugcccu

SEQ ID NO: 1808520 - RNA, 16 nt, Human
agaugccgcauuugga

SEQ ID NO: 1808521 - RNA, 20 nt, Human
agaugcugacuguacuccuc

SEQ ID NO: 1808522 - RNA, 23 nt, Human
agaugcugacuguacuccuccca

SEQ ID NO: 1808523 - RNA, 16 nt, Human
ugacacuuaaaaaugg

SEQ ID NO: 1808524 - RNA, 17 nt, Human
ugacacuuaaaaauggu

SEQ ID NO: 1808525 - RNA, 21 nt, Human
agauuuugaaauuuuuauuaa

SEQ ID NO: 1808526 - RNA, 17 nt, Human
agauuugaacucuucaa

SEQ ID NO: 1808527 - RNA, 20 nt, Human
agauuucucauuugccaaua

SEQ ID NO: 1808528 - RNA, 18 nt, Human
agauuccagagaguggcu

SEQ ID NO: 1808529 - RNA, 22 nt, Human
agauucauauuuacuucuuaua

SEQ ID NO: 1808530 - RNA, 19 nt, Human
ugacuuacuguacaugaaa

SEQ ID NO: 1808531 - RNA, 19 nt, Human
agauuccagagaguggcuc

SEQ ID NO: 1808532 - RNA, 13 nt, Human
agauuggaaggaa

SEQ ID NO: 1808533 - RNA, 13 nt, Human
agcaagacgcugu

SEQ ID NO: 1808534 - RNA, 16 nt, Human
agcaagacgcugugcu

SEQ ID NO: 1808535 - RNA, 20 nt, Human
ugagaagcagaggaaggaga

SEQ ID NO: 1808536 - RNA, 14 nt, Human
agcaagauuucaga

SEQ ID NO: 1808537 - RNA, 23 nt, Human
agcaagacgcugugcugcccugc

SEQ ID NO: 1808538 - RNA, 17 nt, Human
agcaagacgcugugcug

SEQ ID NO: 1808539 - RNA, 20 nt, Human
agcaagacgcugugcugccc

SEQ ID NO: 1808540 - RNA, 21 nt, Human
agcaagacgcugugcugcccu

SEQ ID NO: 1808541 - RNA, 22 nt, Human
agcaagacgcugugcugcccug

SEQ ID NO: 1808542 - RNA, 23 nt, Human
ugaauuugugaagguggaaauaa

SEQ ID NO: 1808543 - RNA, 23 nt, Human
ugaauuucuuuugccguuauuaa

SEQ ID NO: 1808544 - RNA, 13 nt, Human
ugaauuugugaag

SEQ ID NO: 1808545 - RNA, 21 nt, Human
ugaauuugugaagguggaaau

SEQ ID NO: 1808546 - RNA, 20 nt, Human
ugacacaugcaaggucauuu

SEQ ID NO: 1808547 - RNA, 12 nt, Human
ugacacaugcaa

SEQ ID NO: 1808548 - RNA, 18 nt, Human
ugacacacagcucugucc

SEQ ID NO: 1808549 - RNA, 16 nt, Human
ugacacacagcucugu

SEQ ID NO: 1808550 - RNA, 19 nt, Human
ugacaaagacugaguacgu

SEQ ID NO: 1808551 - RNA, 20 nt, Human
ugacacacagcucuguccug

SEQ ID NO: 1808552 - RNA, 19 nt, Human
ugacacacagcucuguccu

SEQ ID NO: 1808553 - RNA, 23 nt, Human
ugacacagucuuggcucacugca

SEQ ID NO: 1808554 - RNA, 22 nt, Human
ugacacagucuuggcucacugc

SEQ ID NO: 1808555 - RNA, 17 nt, Human
agauaaggguaucuggu

SEQ ID NO: 1808556 - RNA, 20 nt, Human
agaguuguuacauuuuuaag

SEQ ID NO: 1808557 - RNA, 19 nt, Human
agaguuguuacauuuuuaa

SEQ ID NO: 1808558 - RNA, 17 nt, Human
agaguuguuacauuuuu

SEQ ID NO: 1808559 - RNA, 22 nt, Human
agagucagaaguuucugccgca

SEQ ID NO: 1808560 - RNA, 15 nt, Human
agagucacuggaaca

SEQ ID NO: 1808561 - RNA, 22 nt, Human
agauacaguuacucagaauucu

SEQ ID NO: 1808562 - RNA, 11 nt, Human
agauacuguau

SEQ ID NO: 1808563 - RNA, 20 nt, Human
agauacaggaaaagcugcug

SEQ ID NO: 1808564 - RNA, 13 nt, Human
agauacaguuacu

SEQ ID NO: 1808565 - RNA, 18 nt, Human
agauaauauuaaggaaga

SEQ ID NO: 1808566 - RNA, 22 nt, Human
agauaauauuaaggaagacaau

SEQ ID NO: 1808567 - RNA, 16 nt, Human
agauacuguaucauga

SEQ ID NO: 1808568 - RNA, 15 nt, Human
agauacuguaucaug

SEQ ID NO: 1808569 - RNA, 18 nt, Human
agaucaaaagguuaauaa

SEQ ID NO: 1808570 - RNA, 21 nt, Human
agauauuuugcuuugugauuu

SEQ ID NO: 1808571 - RNA, 20 nt, Human
agauauuuugcuuugugauu

SEQ ID NO: 1808572 - RNA, 14 nt, Human
ugaagucacacagu

SEQ ID NO: 1808573 - RNA, 14 nt, Human
ugaagucacugcac

SEQ ID NO: 1808574 - RNA, 15 nt, Human
ugaagucacugcaca

SEQ ID NO: 1808575 - RNA, 16 nt, Human
ugaagucacugcacag

SEQ ID NO: 1808576 - RNA, 21 nt, Human
ugaagucacugcacagugcau

SEQ ID NO: 1808577 - RNA, 16 nt, Human
ugaauaaagacaccua

SEQ ID NO: 1808578 - RNA, 15 nt, Human
ugaauacuuuauaaa

SEQ ID NO: 1808579 - RNA, 18 nt, Human
ugaauauugccauuaugc

SEQ ID NO: 1808580 - RNA, 16 nt, Human
ugaauauugccauuau

SEQ ID NO: 1808581 - RNA, 15 nt, Human
agagguuaagguggg

SEQ ID NO: 1808582 - RNA, 16 nt, Human
agagguggggagcaga

SEQ ID NO: 1808583 - RNA, 20 nt, Human
ugaagcuaucguaaaauuaa

SEQ ID NO: 1808584 - RNA, 12 nt, Human
ugaagccuuugu

SEQ ID NO: 1808585 - RNA, 14 nt, Human
agaggcugucuguu

SEQ ID NO: 1808586 - RNA, 20 nt, Human
agagggagggagggcuccag

SEQ ID NO: 1808587 - RNA, 16 nt, Human
agagggagggagggcu

SEQ ID NO: 1808588 - RNA, 21 nt, Human
ucuuccaggcugggagagccu

SEQ ID NO: 1808589 - RNA, 20 nt, Human
ucuucagagacuccugcagg

SEQ ID NO: 1808590 - RNA, 15 nt, Human
ucuuccaggcuggga

SEQ ID NO: 1808591 - RNA, 17 nt, Human
ucuuccaggcugggaga

SEQ ID NO: 1808592 - RNA, 20 nt, Human
ucuuccaggcugggagagcc

SEQ ID NO: 1808593 - RNA, 17 nt, Human
ucuucagagacuccugc

SEQ ID NO: 1808594 - RNA, 18 nt, Human
ucuucagagacuccugca

SEQ ID NO: 1808595 - RNA, 12 nt, Human
ucuucagagacu

SEQ ID NO: 1808596 - RNA, 16 nt, Human
ucuucaacugaccagc

SEQ ID NO: 1808597 - RNA, 19 nt, Human
ucuucaacugaccagccuc

SEQ ID NO: 1808598 - RNA, 15 nt, Human
ucuucaacucccugc

SEQ ID NO: 1808599 - RNA, 14 nt, Human
agaaucacuugaac

SEQ ID NO: 1808600 - RNA, 11 nt, Human
ucuuccucugc

SEQ ID NO: 1808601 - RNA, 12 nt, Human
ucuuccucugcu

SEQ ID NO: 1808602 - RNA, 14 nt, Human
ucuuccucugcuga

SEQ ID NO: 1808603 - RNA, 15 nt, Human
ucuuccucccucccu

SEQ ID NO: 1808604 - RNA, 14 nt, Human
ucuuccucccuccc

SEQ ID NO: 1808605 - RNA, 19 nt, Human
ucuucccuacaguugaaaa

SEQ ID NO: 1808606 - RNA, 22 nt, Human
ucuucccuacaguugaaaaaca

SEQ ID NO: 1808607 - RNA, 18 nt, Human
agacaucaacagauaaau

SEQ ID NO: 1808608 - RNA, 17 nt, Human
agacaucaacagauaaa

SEQ ID NO: 1808609 - RNA, 19 nt, Human
agacauacuaaccagcaga

SEQ ID NO: 1808610 - RNA, 21 nt, Human
agacauagaauuaacacauga

SEQ ID NO: 1808611 - RNA, 20 nt, Human
ucuucuguacgucugacagg

SEQ ID NO: 1808612 - RNA, 15 nt, Human
ucuucuguacgucug

SEQ ID NO: 1808613 - RNA, 18 nt, Human
ucuucuggguuccuuccu

SEQ ID NO: 1808614 - RNA, 20 nt, Human
ucuucuguggguuucuaaag

SEQ ID NO: 1808615 - RNA, 19 nt, Human
ucuucugcuucagccuccc

SEQ ID NO: 1808616 - RNA, 12 nt, Human
ucuucugcuuca

SEQ ID NO: 1808617 - RNA, 21 nt, Human
ucuucugaacuuggcgcugcc

SEQ ID NO: 1808618 - RNA, 23 nt, Human
ucuugcaauggcagccuuggcaa

SEQ ID NO: 1808619 - RNA, 22 nt, Human
ucuugcaauggcagccuuggca

SEQ ID NO: 1808620 - RNA, 18 nt, Human
ucuugcaauggcagccuu

SEQ ID NO: 1808621 - RNA, 19 nt, Human
ucuugcaauggcagccuug

SEQ ID NO: 1808622 - RNA, 17 nt, Human
ucuuggucagauuugaa

SEQ ID NO: 1808623 - RNA, 14 nt, Human
ucuugguccugcug

SEQ ID NO: 1808624 - RNA, 21 nt, Human
ucuuuauuaaauguagaaagu

SEQ ID NO: 1808625 - RNA, 17 nt, Human
ucuuuauuaaauguaga

SEQ ID NO: 1808626 - RNA, 16 nt, Human
ucuuuaugauuuuuaa

SEQ ID NO: 1808627 - RNA, 18 nt, Human
ucuuucuaaugugugaau

SEQ ID NO: 1808628 - RNA, 15 nt, Human
ucuuucucugaggac

SEQ ID NO: 1808629 - RNA, 13 nt, Human
ucuuucucugagg

SEQ ID NO: 1808630 - RNA, 19 nt, Human
ucuuucuaaugugugaauc

SEQ ID NO: 1808631 - RNA, 17 nt, Human
ucuuuccugaggcuggg

SEQ ID NO: 1808632 - RNA, 15 nt, Human
ucuugguccugcugc

SEQ ID NO: 1808633 - RNA, 17 nt, Human
ucuugguccugcugcag

SEQ ID NO: 1808634 - RNA, 19 nt, Human
ucuugguccugcugcaguu

SEQ ID NO: 1808635 - RNA, 16 nt, Human
ucuugagccuugaacu

SEQ ID NO: 1808636 - RNA, 13 nt, Human
ucuugagccuggg

SEQ ID NO: 1808637 - RNA, 16 nt, Human
ucuugagccugggagg

SEQ ID NO: 1808638 - RNA, 13 nt, Human
ucuugauucauaa

SEQ ID NO: 1808639 - RNA, 21 nt, Human
ucuugaugccuggcggggugg

SEQ ID NO: 1808640 - RNA, 11 nt, Human
agaccuucucc

SEQ ID NO: 1808641 - RNA, 15 nt, Human
agaccuucuccuuca

SEQ ID NO: 1808642 - RNA, 18 nt, Human
agaccuucuccuucaccu

SEQ ID NO: 1808643 - RNA, 21 nt, Human
agaccuucuccuucaccuuug

SEQ ID NO: 1808644 - RNA, 23 nt, Human
agaccuucuccuucaccuuuguc

SEQ ID NO: 1808645 - RNA, 17 nt, Human
ugaaacuccagaugcca

SEQ ID NO: 1808646 - RNA, 19 nt, Human
ugaaacuccagaugccaca

SEQ ID NO: 1808647 - RNA, 18 nt, Human
ugaaacuccagaugccac

SEQ ID NO: 1808648 - RNA, 20 nt, Human
ugaaaaucuuauaauuuaaa

SEQ ID NO: 1808649 - RNA, 19 nt, Human
ugaaaaucgugacaacacu

SEQ ID NO: 1808650 - RNA, 17 nt, Human
ugaaaauguauguguaa

SEQ ID NO: 1808651 - RNA, 16 nt, Human
ugaaacgcaaccacca

SEQ ID NO: 1808652 - RNA, 16 nt, Human
ugaaaaucgugacaac

SEQ ID NO: 1808653 - RNA, 20 nt, Human
ugaaaaaggaggaagagaaa

SEQ ID NO: 1808654 - RNA, 22 nt, Human
ugaaaaaggaggaagagaaaaa

SEQ ID NO: 1808655 - RNA, 22 nt, Human
ugaaaaaguauccugcuucuga

SEQ ID NO: 1808656 - RNA, 22 nt, Human
ugaaaaaguucugcagauaaac

SEQ ID NO: 1808657 - RNA, 23 nt, Human
ugaaaaaauauauaucaaauaua

SEQ ID NO: 1808658 - RNA, 16 nt, Human
ugaaaaaggaggaaga

SEQ ID NO: 1808659 - RNA, 21 nt, Human
ucuuucugcagaaacagaaag

SEQ ID NO: 1808660 - RNA, 21 nt, Human
ucuuucuggcuaugcauuuga

SEQ ID NO: 1808661 - RNA, 20 nt, Human
ucuuucuggcuaugcauuug

SEQ ID NO: 1808662 - RNA, 22 nt, Human
ucuuuggugaacauugcaauag

SEQ ID NO: 1808663 - RNA, 16 nt, Human
ucuuuggugaacauug

SEQ ID NO: 1808664 - RNA, 22 nt, Human
ucuuuggucuacacugugcuga

SEQ ID NO: 1808665 - RNA, 22 nt, Human
agagaucaaccccuucgcuccu

SEQ ID NO: 1808666 - RNA, 23 nt, Human
agagacuccugcaggcagccagg

SEQ ID NO: 1808667 - RNA, 19 nt, Human
agagcaagacgcugugcug

SEQ ID NO: 1808668 - RNA, 23 nt, Human
agagcaagacgcugugcugcccu

SEQ ID NO: 1808669 - RNA, 13 nt, Human
ugaaagacuguac

SEQ ID NO: 1808670 - RNA, 15 nt, Human
ugaaagacuguacaa

SEQ ID NO: 1808671 - RNA, 16 nt, Human
agagacuccagcuggg

SEQ ID NO: 1808672 - RNA, 11 nt, Human
agagacuccug

SEQ ID NO: 1808673 - RNA, 17 nt, Human
agagacuccugcaggca

SEQ ID NO: 1808674 - RNA, 18 nt, Human
agagacuccugcaggcag

SEQ ID NO: 1808675 - RNA, 19 nt, Human
agagacuccugcaggcagc

SEQ ID NO: 1808676 - RNA, 20 nt, Human
agagacuccugcaggcagcc

SEQ ID NO: 1808677 - RNA, 21 nt, Human
agagacuccugcaggcagcca

SEQ ID NO: 1808678 - RNA, 22 nt, Human
agagacuccugcaggcagccag

SEQ ID NO: 1808679 - RNA, 22 nt, Human
agagcaccuuagacagucccug

SEQ ID NO: 1808680 - RNA, 21 nt, Human
agagcaccuuagacagucccu

SEQ ID NO: 1808681 - RNA, 23 nt, Human
agagcaccuuagacagucccugc

SEQ ID NO: 1808682 - RNA, 14 nt, Human
agagcugccaccug

SEQ ID NO: 1808683 - RNA, 20 nt, Human
agagcuagcagcagggaggg

SEQ ID NO: 1808684 - RNA, 13 nt, Human
agagccuuccagg

SEQ ID NO: 1808685 - RNA, 15 nt, Human
agagccuuccagggg

SEQ ID NO: 1808686 - RNA, 17 nt, Human
agagccuuccaggggug

SEQ ID NO: 1808687 - RNA, 22 nt, Human
agagccuuccaggggugggaca

SEQ ID NO: 1808688 - RNA, 21 nt, Human
ucugcaggucccuaauaaagc

SEQ ID NO: 1808689 - RNA, 19 nt, Human
ucugcaggucccuaauaaa

SEQ ID NO: 1808690 - RNA, 22 nt, Human
ucugcaggucccuaauaaagcu

SEQ ID NO: 1808691 - RNA, 23 nt, Human
ucugcaggucccuaauaaagcug

SEQ ID NO: 1808692 - RNA, 12 nt, Human
agaaauuaugug

SEQ ID NO: 1808693 - RNA, 21 nt, Human
agaacugaauuuugucuuuau

SEQ ID NO: 1808694 - RNA, 16 nt, Human
agaacucccuuucaac

SEQ ID NO: 1808695 - RNA, 17 nt, Human
agaacucccuuucaaca

SEQ ID NO: 1808696 - RNA, 19 nt, Human
agaaccuuuugagugccuu

SEQ ID NO: 1808697 - RNA, 23 nt, Human
agaaccuuuugagugccuuacac

SEQ ID NO: 1808698 - RNA, 16 nt, Human
agaacgcugauuuaaa

SEQ ID NO: 1808699 - RNA, 22 nt, Human
ucugcccugcgggucacaggag

SEQ ID NO: 1808700 - RNA, 12 nt, Human
ucugcccuuggu

SEQ ID NO: 1808701 - RNA, 23 nt, Human
ucugcccuugguuaggcauugug

SEQ ID NO: 1808702 - RNA, 23 nt, Human
ucugcccacucccugcaaccuga

SEQ ID NO: 1808703 - RNA, 20 nt, Human
ucugcccauccugccccuga

SEQ ID NO: 1808704 - RNA, 23 nt, Human
agaagcccaggaaaggcuccagg

SEQ ID NO: 1808705 - RNA, 19 nt, Human
agaagcaacccaaauguuc

SEQ ID NO: 1808706 - RNA, 16 nt, Human
agaagcagaggaagga

SEQ ID NO: 1808707 - RNA, 12 nt, Human
agaagcagcucu

SEQ ID NO: 1808708 - RNA, 13 nt, Human
agaagcagcucuu

SEQ ID NO: 1808709 - RNA, 10 nt, Human
ucuggccuuc

SEQ ID NO: 1808710 - RNA, 18 nt, Human
ucuggcagcucagagagg

SEQ ID NO: 1808711 - RNA, 21 nt, Human
ucuggcagcucagagagggug

SEQ ID NO: 1808712 - RNA, 17 nt, Human
ucuggcagcucagagag

SEQ ID NO: 1808713 - RNA, 20 nt, Human
ucuggcagaguugaagacag

SEQ ID NO: 1808714 - RNA, 23 nt, Human
ucuggcagaguugaagacagagc

SEQ ID NO: 1808715 - RNA, 12 nt, Human
ucugccugucuc

SEQ ID NO: 1808716 - RNA, 14 nt, Human
ucugccugucuccc

SEQ ID NO: 1808717 - RNA, 22 nt, Human
ucugcuuugggguuuaucagaa

SEQ ID NO: 1808718 - RNA, 23 nt, Human
ucugcuuuuuaaagaaugcucuu

SEQ ID NO: 1808719 - RNA, 13 nt, Human
agaaguuucuguc

SEQ ID NO: 1808720 - RNA, 22 nt, Human
agaaguuugagaucagccuggg

SEQ ID NO: 1808721 - RNA, 23 nt, Human
agaagcucccugaaguaagcaaa

SEQ ID NO: 1808722 - RNA, 19 nt, Human
ucucugcaggucccuaaua

SEQ ID NO: 1808723 - RNA, 20 nt, Human
ucucugcaggucccuaauaa

SEQ ID NO: 1808724 - RNA, 21 nt, Human
ucucugcaggucccuaauaaa

SEQ ID NO: 1808725 - RNA, 22 nt, Human
ucucugcaggucccuaauaaag

SEQ ID NO: 1808726 - RNA, 16 nt, Human
ucucuugguccugcug

SEQ ID NO: 1808727 - RNA, 17 nt, Human
ucucuugguccugcugc

SEQ ID NO: 1808728 - RNA, 18 nt, Human
ucucuugguccugcugca

SEQ ID NO: 1808729 - RNA, 19 nt, Human
agaaaaaauauuuucccua

SEQ ID NO: 1808730 - RNA, 17 nt, Human
agaaaaaauauuuuccu

SEQ ID NO: 1808731 - RNA, 23 nt, Human
agaaaaaauauuuuccugccagg

SEQ ID NO: 1808732 - RNA, 18 nt, Human
agaaaaaugagccuggca

SEQ ID NO: 1808733 - RNA, 12 nt, Human
agaaaugaaaaa

SEQ ID NO: 1808734 - RNA, 13 nt, Human
agaaaugaaaaaa

SEQ ID NO: 1808735 - RNA, 16 nt, Human
agaaaugaaaaaauau

SEQ ID NO: 1808736 - RNA, 21 nt, Human
agaaaugcugguuuuucaguu

SEQ ID NO: 1808737 - RNA, 20 nt, Human
agaaaugcugguuuuucagu

SEQ ID NO: 1808738 - RNA, 15 nt, Human
agaaaugccuuaccc

SEQ ID NO: 1808739 - RNA, 18 nt, Human
ucugaaggcuggguucug

SEQ ID NO: 1808740 - RNA, 20 nt, Human
agaaagcagaacagugauua

SEQ ID NO: 1808741 - RNA, 18 nt, Human
agaaagcagaacagugau

SEQ ID NO: 1808742 - RNA, 17 nt, Human
agaaagcagaacaguga

SEQ ID NO: 1808743 - RNA, 20 nt, Human
agaaagacuaucuaaauguu

SEQ ID NO: 1808744 - RNA, 22 nt, Human
agaaagacuaucuaaauguuga

SEQ ID NO: 1808745 - RNA, 14 nt, Human
acuuguggacacag

SEQ ID NO: 1808746 - RNA, 16 nt, Human
acuuuaaaaggagcca

SEQ ID NO: 1808747 - RNA, 15 nt, Human
acuuguggacacagc

SEQ ID NO: 1808748 - RNA, 16 nt, Human
acuuguuuucugggaa

SEQ ID NO: 1808749 - RNA, 13 nt, Human
acuuuagggaagu

SEQ ID NO: 1808750 - RNA, 19 nt, Human
acuuuguauaaaagggacu

SEQ ID NO: 1808751 - RNA, 23 nt, Human
acuuuggaaagaguaggaagacu

SEQ ID NO: 1808752 - RNA, 12 nt, Human
acuuuggaaaga

SEQ ID NO: 1808753 - RNA, 13 nt, Human
acuuuggaaagag

SEQ ID NO: 1808754 - RNA, 14 nt, Human
acuuuggaaagagu

SEQ ID NO: 1808755 - RNA, 22 nt, Human
acuuugcagcacagcugagagg

SEQ ID NO: 1808756 - RNA, 23 nt, Human
acuuugaggguguauauuuucug

SEQ ID NO: 1808757 - RNA, 16 nt, Human
acuuuguguucaccuu

SEQ ID NO: 1808758 - RNA, 18 nt, Human
acuuuguguucaccuugu

SEQ ID NO: 1808759 - RNA, 21 nt, Human
ucuccuuagaaguggaaguag

SEQ ID NO: 1808760 - RNA, 15 nt, Human
ucuccuuagaagugg

SEQ ID NO: 1808761 - RNA, 21 nt, Human
ucuccuuggugucgggcauga

SEQ ID NO: 1808762 - RNA, 23 nt, Human
ucuccuuggugucgggcaugaca

SEQ ID NO: 1808763 - RNA, 17 nt, Human
ucucgcucuguugccca

SEQ ID NO: 1808764 - RNA, 20 nt, Human
ucucgcuauugucaccaggg

SEQ ID NO: 1808765 - RNA, 17 nt, Human
ucucgaacuccugaccu

SEQ ID NO: 1808766 - RNA, 15 nt, Human
ucucggcucacugca

SEQ ID NO: 1808767 - RNA, 12 nt, Human
ucucucaggcca

SEQ ID NO: 1808768 - RNA, 14 nt, Human
ucucuccauucccg

SEQ ID NO: 1808769 - RNA, 21 nt, Human
ucucucaggccaaacucaccu

SEQ ID NO: 1808770 - RNA, 23 nt, Human
ucgucacugcuuaacuucacaua

SEQ ID NO: 1808771 - RNA, 13 nt, Human
ucguucucugccu

SEQ ID NO: 1808772 - RNA, 19 nt, Human
ucggggagaggcugaggac

SEQ ID NO: 1808773 - RNA, 21 nt, Human
acuguuaauaguucagguaac

SEQ ID NO: 1808774 - RNA, 17 nt, Human
acuguuaauaguucagg

SEQ ID NO: 1808775 - RNA, 21 nt, Human
ucuacccucuuagaaaaacca

SEQ ID NO: 1808776 - RNA, 13 nt, Human
ucuaaacugcccc

SEQ ID NO: 1808777 - RNA, 16 nt, Human
ucuaaacugcccccuc

SEQ ID NO: 1808778 - RNA, 22 nt, Human
ucuaaacugcccccucugcccu

SEQ ID NO: 1808779 - RNA, 23 nt, Human
ucuaaacugcccccucugcccug

SEQ ID NO: 1808780 - RNA, 17 nt, Human
ucuaaagcugccagccg

SEQ ID NO: 1808781 - RNA, 16 nt, Human
ucuaaaggcuaccuuu

SEQ ID NO: 1808782 - RNA, 13 nt, Human
ucuaaaggcuacc

SEQ ID NO: 1808783 - RNA, 20 nt, Human
acuguaucaugacaaagacu

SEQ ID NO: 1808784 - RNA, 16 nt, Human
acuguaucaugacaaa

SEQ ID NO: 1808785 - RNA, 18 nt, Human
acuggguacuuguggaca

SEQ ID NO: 1808786 - RNA, 17 nt, Human
acuggguacuuguggac

SEQ ID NO: 1808787 - RNA, 16 nt, Human
acuguacaaaguagaa

SEQ ID NO: 1808788 - RNA, 22 nt, Human
acuguacaaaguagaagucuua

SEQ ID NO: 1808789 - RNA, 18 nt, Human
acuguacagacagaaaaa

SEQ ID NO: 1808790 - RNA, 16 nt, Human
acuguacaugaaaaca

SEQ ID NO: 1808791 - RNA, 19 nt, Human
acuguacaugaaaacacau

SEQ ID NO: 1808792 - RNA, 23 nt, Human
acuguacuugcucuugaugccug

SEQ ID NO: 1808793 - RNA, 14 nt, Human
acuguaucaugaca

SEQ ID NO: 1808794 - RNA, 20 nt, Human
acuguacuccucccaggcgc

SEQ ID NO: 1808795 - RNA, 15 nt, Human
acuguacuugcucuu

SEQ ID NO: 1808796 - RNA, 21 nt, Human
acuguacaugaaaacacauuu

SEQ ID NO: 1808797 - RNA, 20 nt, Human
acuguacaugaaaacacauu

SEQ ID NO: 1808798 - RNA, 23 nt, Human
ucgcugugucagcauagaaguaa

SEQ ID NO: 1808799 - RNA, 21 nt, Human
ucgcucuguugcccaggcugg

SEQ ID NO: 1808800 - RNA, 21 nt, Human
acugggcuuggggaccagagc

SEQ ID NO: 1808801 - RNA, 22 nt, Human
acugggcuuggggaccagagcu

SEQ ID NO: 1808802 - RNA, 15 nt, Human
acuggguacuugugg

SEQ ID NO: 1808803 - RNA, 14 nt, Human
ucgcuccugugucu

SEQ ID NO: 1808804 - RNA, 18 nt, Human
ucgcccuggacugugugc

SEQ ID NO: 1808805 - RNA, 16 nt, Human
acuucaggcucuucuc

SEQ ID NO: 1808806 - RNA, 16 nt, Human
acuuacuguacaugaa

SEQ ID NO: 1808807 - RNA, 12 nt, Human
ucuaccugaggg

SEQ ID NO: 1808808 - RNA, 19 nt, Human
ucuaccugaggggccucuu

SEQ ID NO: 1808809 - RNA, 15 nt, Human
acuuacuguacauga

SEQ ID NO: 1808810 - RNA, 20 nt, Human
acuuagagguggggagcaga

SEQ ID NO: 1808811 - RNA, 14 nt, Human
acuuacuguacaug

SEQ ID NO: 1808812 - RNA, 13 nt, Human
acuuacuguacau

SEQ ID NO: 1808813 - RNA, 17 nt, Human
acuucaggcucuucucc

SEQ ID NO: 1808814 - RNA, 18 nt, Human
acuucaggcucuucuccu

SEQ ID NO: 1808815 - RNA, 20 nt, Human
acuucaggcucuucuccuuu

SEQ ID NO: 1808816 - RNA, 17 nt, Human
acuuccauaaucuggac

SEQ ID NO: 1808817 - RNA, 18 nt, Human
acuuccaauuuacauacu

SEQ ID NO: 1808818 - RNA, 17 nt, Human
acuuccacugccauccu

SEQ ID NO: 1808819 - RNA, 13 nt, Human
ucuauaauuuaaa

SEQ ID NO: 1808820 - RNA, 23 nt, Human
ucuaguuugauuaaauucuugca

SEQ ID NO: 1808821 - RNA, 24 nt, Human
ucuagauacuguaucaugacaaag

SEQ ID NO: 1808822 - RNA, 19 nt, Human
acuugagaauuacccuuuu

SEQ ID NO: 1808823 - RNA, 17 nt, Human
acuugaaaauuaacaug

SEQ ID NO: 1808824 - RNA, 18 nt, Human
acuugaaaauuaacauga

SEQ ID NO: 1808825 - RNA, 23 nt, Human
acuugaacccgggaggcagaggu

SEQ ID NO: 1808826 - RNA, 14 nt, Human
acuuggaagcuccg

SEQ ID NO: 1808827 - RNA, 14 nt, Human
acuuguaugaaaga

SEQ ID NO: 1808828 - RNA, 13 nt, Human
acuuguauuaugu

SEQ ID NO: 1808829 - RNA, 14 nt, Human
acuuguauuaugug

SEQ ID NO: 1808830 - RNA, 15 nt, Human
acuuguauuaugugu

SEQ ID NO: 1808831 - RNA, 14 nt, Human
acuugucuuuggac

SEQ ID NO: 1808832 - RNA, 22 nt, Human
acuucgggaggucgaggcagga

SEQ ID NO: 1808833 - RNA, 17 nt, Human
acuucgggaggucgagg

SEQ ID NO: 1808834 - RNA, 20 nt, Human
acuucgggaggucgaggcag

SEQ ID NO: 1808835 - RNA, 16 nt, Human
ucucacuccuaccugg

SEQ ID NO: 1808836 - RNA, 17 nt, Human
ucucacuccuaccuggu

SEQ ID NO: 1808837 - RNA, 18 nt, Human
ucucacuccuaccuggua

SEQ ID NO: 1808838 - RNA, 13 nt, Human
ucucacuccuacc

SEQ ID NO: 1808839 - RNA, 16 nt, Human
ucuauuguuucuuuca

SEQ ID NO: 1808840 - RNA, 16 nt, Human
ucucaaaaaaagaaaa

SEQ ID NO: 1808841 - RNA, 21 nt, Human
ucacuauguugcccaggcagg

SEQ ID NO: 1808842 - RNA, 22 nt, Human
ucaccagccccagugcccacag

SEQ ID NO: 1808843 - RNA, 23 nt, Human
ucacugagacagcccgggcucug

SEQ ID NO: 1808844 - RNA, 18 nt, Human
ucacugcaaccuccgccu

SEQ ID NO: 1808845 - RNA, 21 nt, Human
ucacugcaaccuucgccaccu

SEQ ID NO: 1808846 - RNA, 14 nt, Human
ucacuguugcccag

SEQ ID NO: 1808847 - RNA, 18 nt, Human
ucacugcaacuucugccu

SEQ ID NO: 1808848 - RNA, 17 nt, Human
ucacugcaacuucugcc

SEQ ID NO: 1808849 - RNA, 15 nt, Human
ucacugcacagugca

SEQ ID NO: 1808850 - RNA, 15 nt, Human
ucacuguugcccagg

SEQ ID NO: 1808851 - RNA, 22 nt, Human
ucacuuaaguuaguuccacuga

SEQ ID NO: 1808852 - RNA, 22 nt, Human
accauuuugggguacccacugc

SEQ ID NO: 1808853 - RNA, 20 nt, Human
acccaaauguucaucaauga

SEQ ID NO: 1808854 - RNA, 16 nt, Human
acccaaauguucauca

SEQ ID NO: 1808855 - RNA, 20 nt, Human
acccacugcuuuuggucugu

SEQ ID NO: 1808856 - RNA, 14 nt, Human
acccacuggacuca

SEQ ID NO: 1808857 - RNA, 17 nt, Human
acccacuggacucaccu

SEQ ID NO: 1808858 - RNA, 21 nt, Human
acccacuggacucaccucccc

SEQ ID NO: 1808859 - RNA, 21 nt, Human
acccagauaaagguucaugca

SEQ ID NO: 1808860 - RNA, 21 nt, Human
accauuuugggguacccacug

SEQ ID NO: 1808861 - RNA, 23 nt, Human
accauuuugcugucccuuuuccu

SEQ ID NO: 1808862 - RNA, 22 nt, Human
accauuuugcugucccuuuucc

SEQ ID NO: 1808863 - RNA, 18 nt, Human
accauguuggccaggcug

SEQ ID NO: 1808864 - RNA, 19 nt, Human
accauucuccaccugccag

SEQ ID NO: 1808865 - RNA, 20 nt, Human
accauucuccaccugccagg

SEQ ID NO: 1808866 - RNA, 21 nt, Human
accauucuccaccugccaggg

SEQ ID NO: 1808867 - RNA, 17 nt, Human
acccagcgagcccuggu

SEQ ID NO: 1808868 - RNA, 16 nt, Human
acccagcgagcccugg

SEQ ID NO: 1808869 - RNA, 13 nt, Human
acccagcgagccc

SEQ ID NO: 1808870 - RNA, 15 nt, Human
acccaggagccccga

SEQ ID NO: 1808871 - RNA, 13 nt, Human
acccaggagcccc

SEQ ID NO: 1808872 - RNA, 11 nt, Human
acccaggugcu

SEQ ID NO: 1808873 - RNA, 23 nt, Human
acccaggugcuaggaacacuccu

SEQ ID NO: 1808874 - RNA, 19 nt, Human
accccagcuggggccaggc

SEQ ID NO: 1808875 - RNA, 22 nt, Human
accccagcuggggccaggcugg

SEQ ID NO: 1808876 - RNA, 13 nt, Human
accccagguuucu

SEQ ID NO: 1808877 - RNA, 16 nt, Human
ucagaucucuaacuuc

SEQ ID NO: 1808878 - RNA, 21 nt, Human
ucagaugcugugcaaauguua

SEQ ID NO: 1808879 - RNA, 21 nt, Human
ucagagccaccccuaaagaga

SEQ ID NO: 1808880 - RNA, 16 nt, Human
ucagagacuccugcag

SEQ ID NO: 1808881 - RNA, 23 nt, Human
ucagagacuccugcaggcagcca

SEQ ID NO: 1808882 - RNA, 15 nt, Human
acccagcccacuucu

SEQ ID NO: 1808883 - RNA, 23 nt, Human
ucagaaguuucugccgcagcccu

SEQ ID NO: 1808884 - RNA, 16 nt, Human
ucagaauagaaauuag

SEQ ID NO: 1808885 - RNA, 22 nt, Human
ucagagacuccugcaggcagcc

SEQ ID NO: 1808886 - RNA, 20 nt, Human
ucagaauucucagaaucuca

SEQ ID NO: 1808887 - RNA, 10 nt, Human
ucagaauucu

SEQ ID NO: 1808888 - RNA, 12 nt, Human
ucagaauucuca

SEQ ID NO: 1808889 - RNA, 15 nt, Human
ucagugcuucgcaga

SEQ ID NO: 1808890 - RNA, 16 nt, Human
ucaguggcagcugcuu

SEQ ID NO: 1808891 - RNA, 15 nt, Human
ucaguggcagcugcu

SEQ ID NO: 1808892 - RNA, 14 nt, Human
ucaguggcagcugc

SEQ ID NO: 1808893 - RNA, 19 nt, Human
ucagugccuuauggaacac

SEQ ID NO: 1808894 - RNA, 20 nt, Human
ucagugccuuauggaacacu

SEQ ID NO: 1808895 - RNA, 22 nt, Human
ucagugccuuauggaacacucu

SEQ ID NO: 1808896 - RNA, 23 nt, Human
ucagugccuuauggaacacucug

SEQ ID NO: 1808897 - RNA, 15 nt, Human
ucauaacuagaacug

SEQ ID NO: 1808898 - RNA, 24 nt, Human
ucauaaagcaggcagaacucaucu

SEQ ID NO: 1808899 - RNA, 13 nt, Human
ucauaacuagaac

SEQ ID NO: 1808900 - RNA, 18 nt, Human
ucauaaauaaaguuuguu

SEQ ID NO: 1808901 - RNA, 19 nt, Human
ucaguuguuagugugucuu

SEQ ID NO: 1808902 - RNA, 22 nt, Human
ucaggugucccugcacuugcag

SEQ ID NO: 1808903 - RNA, 22 nt, Human
ucagguugucugaagucacugc

SEQ ID NO: 1808904 - RNA, 13 nt, Human
ucaguaauaacuc

SEQ ID NO: 1808905 - RNA, 13 nt, Human
ucaguaagccgug

SEQ ID NO: 1808906 - RNA, 20 nt, Human
accgaaaacguggcugcuuc

SEQ ID NO: 1808907 - RNA, 15 nt, Human
acccuugugguccca

SEQ ID NO: 1808908 - RNA, 20 nt, Human
acccuugccgucuaccugag

SEQ ID NO: 1808909 - RNA, 18 nt, Human
ucaggugucccugcacuu

SEQ ID NO: 1808910 - RNA, 17 nt, Human
ucaggugucccugcacu

SEQ ID NO: 1808911 - RNA, 15 nt, Human
ucaggugucccugca

SEQ ID NO: 1808912 - RNA, 23 nt, Human
ucagguggggucacucuggcagc

SEQ ID NO: 1808913 - RNA, 22 nt, Human
ucagguggggucacucuggcag

SEQ ID NO: 1808914 - RNA, 21 nt, Human
accgaaaacguggcugcuuca

SEQ ID NO: 1808915 - RNA, 22 nt, Human
accgaaaacguggcugcuucaa

SEQ ID NO: 1808916 - RNA, 21 nt, Human
acccuccuuucaccacaugug

SEQ ID NO: 1808917 - RNA, 15 nt, Human
acccgggaggcagag

SEQ ID NO: 1808918 - RNA, 17 nt, Human
acccucauguucuuaau

SEQ ID NO: 1808919 - RNA, 15 nt, Human
acccucauguucuua

SEQ ID NO: 1808920 - RNA, 14 nt, Human
acccucauguucuu

SEQ ID NO: 1808921 - RNA, 22 nt, Human
acccgggaagggggcugggaca

SEQ ID NO: 1808922 - RNA, 15 nt, Human
acccggaggggccug

SEQ ID NO: 1808923 - RNA, 19 nt, Human
acccgggaagggggcuggg

SEQ ID NO: 1808924 - RNA, 20 nt, Human
acccgggaagggggcuggga

SEQ ID NO: 1808925 - RNA, 14 nt, Human
acccucgaggcgga

SEQ ID NO: 1808926 - RNA, 18 nt, Human
acccucgaggcggaucuu

SEQ ID NO: 1808927 - RNA, 11 nt, Human
acccugaggcc

SEQ ID NO: 1808928 - RNA, 13 nt, Human
acccugaggccca

SEQ ID NO: 1808929 - RNA, 19 nt, Human
acccugaggcccagagggc

SEQ ID NO: 1808930 - RNA, 21 nt, Human
acccugaggcccagagggccu

SEQ ID NO: 1808931 - RNA, 23 nt, Human
acccugaggcccagagggccugc

SEQ ID NO: 1808932 - RNA, 13 nt, Human
acccccagccugc

SEQ ID NO: 1808933 - RNA, 12 nt, Human
acccccagccug

SEQ ID NO: 1808934 - RNA, 17 nt, Human
ucaggcaggugggaugg

SEQ ID NO: 1808935 - RNA, 18 nt, Human
ucaggcaggugggaugga

SEQ ID NO: 1808936 - RNA, 13 nt, Human
ucaggccacuuga

SEQ ID NO: 1808937 - RNA, 13 nt, Human
ucaggccagcugc

SEQ ID NO: 1808938 - RNA, 14 nt, Human
ucaggccagcugcu

SEQ ID NO: 1808939 - RNA, 13 nt, Human
ucaggccaggccc

SEQ ID NO: 1808940 - RNA, 14 nt, Human
ucaggccaggcccu

SEQ ID NO: 1808941 - RNA, 15 nt, Human
ucaggccaggcccuc

SEQ ID NO: 1808942 - RNA, 16 nt, Human
ucaggccaggcccucu

SEQ ID NO: 1808943 - RNA, 19 nt, Human
ucaggguuggccccugccc

SEQ ID NO: 1808944 - RNA, 18 nt, Human
ucaggguuggccccugcc

SEQ ID NO: 1808945 - RNA, 23 nt, Human
ucaggguuggccccugcccggcu

SEQ ID NO: 1808946 - RNA, 18 nt, Human
ucagguaaucgaccugcc

SEQ ID NO: 1808947 - RNA, 19 nt, Human
ucagguaaucgaccugccu

SEQ ID NO: 1808948 - RNA, 20 nt, Human
ucagguaaucgaccugccuc

SEQ ID NO: 1808949 - RNA, 21 nt, Human
ucagguaaucgaccugccucg

SEQ ID NO: 1808950 - RNA, 19 nt, Human
acccgcuaagagggaggga

SEQ ID NO: 1808951 - RNA, 19 nt, Human
ucaggccaggcccucugcc

SEQ ID NO: 1808952 - RNA, 17 nt, Human
ucaggccaggcccucug

SEQ ID NO: 1808953 - RNA, 18 nt, Human
ucaggccaggcccucugc

SEQ ID NO: 1808954 - RNA, 12 nt, Human
ucaggggugugc

SEQ ID NO: 1808955 - RNA, 19 nt, Human
ucaggggugugcggccuuu

SEQ ID NO: 1808956 - RNA, 23 nt, Human
ucaggggugugcggccuuuggcu

SEQ ID NO: 1808957 - RNA, 17 nt, Human
ucaggguuggccccugc

SEQ ID NO: 1808958 - RNA, 17 nt, Human
ucaagagggucugagga

SEQ ID NO: 1808959 - RNA, 20 nt, Human
ucaagagggcacugguggcc

SEQ ID NO: 1808960 - RNA, 21 nt, Human
ucaagagggcacugguggccc

SEQ ID NO: 1808961 - RNA, 17 nt, Human
ucaagcaagauuucaga

SEQ ID NO: 1808962 - RNA, 11 nt, Human
ucaaggcucag

SEQ ID NO: 1808963 - RNA, 22 nt, Human
ucaauaggaaaaacugauuuuu

SEQ ID NO: 1808964 - RNA, 17 nt, Human
ucaagugauucuccugc

SEQ ID NO: 1808965 - RNA, 18 nt, Human
ucaauaggaaaaacugau

SEQ ID NO: 1808966 - RNA, 19 nt, Human
ucaauaggaaaaacugauu

SEQ ID NO: 1808967 - RNA, 16 nt, Human
ucaagugauucuccug

SEQ ID NO: 1808968 - RNA, 21 nt, Human
ucaagugauucucaugccuca

SEQ ID NO: 1808969 - RNA, 22 nt, Human
ucaagugauucucaugccucag

SEQ ID NO: 1808970 - RNA, 19 nt, Human
ucaaguaauccaccugccu

SEQ ID NO: 1808971 - RNA, 23 nt, Human
acauuuuucuuagggaaggauac

SEQ ID NO: 1808972 - RNA, 13 nt, Human
acauuuuucuuag

SEQ ID NO: 1808973 - RNA, 21 nt, Human
acauuuuucagauauaaaaga

SEQ ID NO: 1808974 - RNA, 19 nt, Human
acauuuuuaagugcugcau

SEQ ID NO: 1808975 - RNA, 18 nt, Human
acauuuuuaagugcugca

SEQ ID NO: 1808976 - RNA, 15 nt, Human
acauuuuuaagugcu

SEQ ID NO: 1808977 - RNA, 22 nt, Human
acauuuaaaacauuaaaauaua

SEQ ID NO: 1808978 - RNA, 18 nt, Human
acauuuuacuuuuuccug

SEQ ID NO: 1808979 - RNA, 22 nt, Human
acauugcggacagccacggcca

SEQ ID NO: 1808980 - RNA, 21 nt, Human
acauugcggacagccacggcc

SEQ ID NO: 1808981 - RNA, 18 nt, Human
acauuuaaaacauuaaaa

SEQ ID NO: 1808982 - RNA, 14 nt, Human
acauuuaaaacauu

SEQ ID NO: 1808983 - RNA, 22 nt, Human
acauugguucuuucauuugcuu

SEQ ID NO: 1808984 - RNA, 20 nt, Human
accaaccacugcgaccacaa

SEQ ID NO: 1808985 - RNA, 17 nt, Human
accaacauacucccauc

SEQ ID NO: 1808986 - RNA, 16 nt, Human
accaacauacucccau

SEQ ID NO: 1808987 - RNA, 16 nt, Human
accaaaucagcugcua

SEQ ID NO: 1808988 - RNA, 19 nt, Human
accaaaucagcugcuacua

SEQ ID NO: 1808989 - RNA, 15 nt, Human
accaacccucagagc

SEQ ID NO: 1808990 - RNA, 23 nt, Human
accacacccagcccacuucugcc

SEQ ID NO: 1808991 - RNA, 21 nt, Human
accacacccagcccacuucug

SEQ ID NO: 1808992 - RNA, 20 nt, Human
accacacccagcccacuucu

SEQ ID NO: 1808993 - RNA, 16 nt, Human
accacacccagcccac

SEQ ID NO: 1808994 - RNA, 15 nt, Human
accacacccagccca

SEQ ID NO: 1808995 - RNA, 17 nt, Human
accacacagaggcugcc

SEQ ID NO: 1808996 - RNA, 17 nt, Human
ucaccagccccagugcc

SEQ ID NO: 1808997 - RNA, 20 nt, Human
ucacauauugauuuccguua

SEQ ID NO: 1808998 - RNA, 18 nt, Human
ucacauauugauuuccgu

SEQ ID NO: 1808999 - RNA, 16 nt, Human
ucacauauugauuucc

SEQ ID NO: 1809000 - RNA, 15 nt, Human
ucacagaugggugcu

SEQ ID NO: 1809001 - RNA, 14 nt, Human
ucacagaugggugc

SEQ ID NO: 1809002 - RNA, 16 nt, Human
ucacagccacuuggga

SEQ ID NO: 1809003 - RNA, 21 nt, Human
ucacagaacccuuggagccaa

SEQ ID NO: 1809004 - RNA, 13 nt, Human
ucaauuuaaaaaa

SEQ ID NO: 1809005 - RNA, 12 nt, Human
ucaauuuaaaaa

SEQ ID NO: 1809006 - RNA, 13 nt, Human
acaugagcaucag

SEQ ID NO: 1809007 - RNA, 22 nt, Human
acaugaaaacacauuuuucuua

SEQ ID NO: 1809008 - RNA, 23 nt, Human
acaugaaaacacauuuuucuuag

SEQ ID NO: 1809009 - RNA, 13 nt, Human
ucaaauauauuca

SEQ ID NO: 1809010 - RNA, 15 nt, Human
ucaaagcaaaugucu

SEQ ID NO: 1809011 - RNA, 23 nt, Human
ucaaagcaaaugucuuccuggau

SEQ ID NO: 1809012 - RNA, 22 nt, Human
ucaaagauauuuugcuuuguga

SEQ ID NO: 1809013 - RNA, 20 nt, Human
ucaaagauauuuugcuuugu

SEQ ID NO: 1809014 - RNA, 13 nt, Human
ucaaagauauuuu

SEQ ID NO: 1809015 - RNA, 16 nt, Human
ucaaaagcugggcagg

SEQ ID NO: 1809016 - RNA, 21 nt, Human
acaugucuuuucuugcaugag

SEQ ID NO: 1809017 - RNA, 14 nt, Human
acauggccuuugcu

SEQ ID NO: 1809018 - RNA, 15 nt, Human
acauggaguauaugu

SEQ ID NO: 1809019 - RNA, 19 nt, Human
acauggaguauaugucaag

SEQ ID NO: 1809020 - RNA, 23 nt, Human
acaugagcaucaggccaggcccu

SEQ ID NO: 1809021 - RNA, 20 nt, Human
acauggaauaacauguaauu

SEQ ID NO: 1809022 - RNA, 18 nt, Human
acauggaauaacauguaa

SEQ ID NO: 1809023 - RNA, 16 nt, Human
acaugagguacugaga

SEQ ID NO: 1809024 - RNA, 14 nt, Human
uauuuuaagacgaa

SEQ ID NO: 1809025 - RNA, 22 nt, Human
uauuuuaagacgaaacauuugu

SEQ ID NO: 1809026 - RNA, 16 nt, Human
acaugaaaacacauuu

SEQ ID NO: 1809027 - RNA, 15 nt, Human
acaugaaaacacauu

SEQ ID NO: 1809028 - RNA, 16 nt, Human
acaucuugcucugcug

SEQ ID NO: 1809029 - RNA, 15 nt, Human
acaucuugcucugcu

SEQ ID NO: 1809030 - RNA, 14 nt, Human
uaugugccagauuu

SEQ ID NO: 1809031 - RNA, 19 nt, Human
uaugugccagauuuaugca

SEQ ID NO: 1809032 - RNA, 17 nt, Human
acaucuugcucugcuga

SEQ ID NO: 1809033 - RNA, 22 nt, Human
acaucuugcucugcugacagac

SEQ ID NO: 1809034 - RNA, 19 nt, Human
acaucuuggucagauuuga

SEQ ID NO: 1809035 - RNA, 17 nt, Human
uauuuuguguuuaggaa

SEQ ID NO: 1809036 - RNA, 20 nt, Human
uauuuuguguuuaggaacua

SEQ ID NO: 1809037 - RNA, 17 nt, Human
uauuuuuguagagccag

SEQ ID NO: 1809038 - RNA, 17 nt, Human
uauuuugauguaaagau

SEQ ID NO: 1809039 - RNA, 15 nt, Human
uauuuugcuuuguga

SEQ ID NO: 1809040 - RNA, 13 nt, Human
uauuuugcuuugu

SEQ ID NO: 1809041 - RNA, 20 nt, Human
uauuuugcuuugugauuuuu

SEQ ID NO: 1809042 - RNA, 14 nt, Human
uauuuuaauaaaca

SEQ ID NO: 1809043 - RNA, 17 nt, Human
uauuuuaauaaacacuc

SEQ ID NO: 1809044 - RNA, 15 nt, Human
ucccaaagugcuggg

SEQ ID NO: 1809045 - RNA, 16 nt, Human
ucccaaagugcuggga

SEQ ID NO: 1809046 - RNA, 20 nt, Human
ucccaaagugcugggauuac

SEQ ID NO: 1809047 - RNA, 21 nt, Human
ucccaaagugcugggauuaca

SEQ ID NO: 1809048 - RNA, 14 nt, Human
ucccacaaaggaga

SEQ ID NO: 1809049 - RNA, 15 nt, Human
ucccacaggcccuuc

SEQ ID NO: 1809050 - RNA, 17 nt, Human
ucccacaggcccuuccu

SEQ ID NO: 1809051 - RNA, 21 nt, Human
ucccacaggcccuuccucucc

SEQ ID NO: 1809052 - RNA, 22 nt, Human
ucccacaggcccuuccucucca

SEQ ID NO: 1809053 - RNA, 19 nt, Human
ucccaccaacccucagagc

SEQ ID NO: 1809054 - RNA, 11 nt, Human
ucccaccccac

SEQ ID NO: 1809055 - RNA, 14 nt, Human
ucccaccccacaca

SEQ ID NO: 1809056 - RNA, 15 nt, Human
uccaugaguccccug

SEQ ID NO: 1809057 - RNA, 16 nt, Human
uccaugaguccccugu

SEQ ID NO: 1809058 - RNA, 17 nt, Human
uccaugaguccccuguu

SEQ ID NO: 1809059 - RNA, 22 nt, Human
uccaugaagauguagaggagaa

SEQ ID NO: 1809060 - RNA, 20 nt, Human
uccaucucuuguuuaaauuc

SEQ ID NO: 1809061 - RNA, 11 nt, Human
uccauccugag

SEQ ID NO: 1809062 - RNA, 14 nt, Human
acggcucacugcag

SEQ ID NO: 1809063 - RNA, 15 nt, Human
acggcucacugcagc

SEQ ID NO: 1809064 - RNA, 20 nt, Human
uccagugaggcucugcccuu

SEQ ID NO: 1809065 - RNA, 18 nt, Human
uccagugaggcucugccc

SEQ ID NO: 1809066 - RNA, 19 nt, Human
uccagugaggcucugcccu

SEQ ID NO: 1809067 - RNA, 17 nt, Human
uccagugaggcucugcc

SEQ ID NO: 1809068 - RNA, 14 nt, Human
uccagugagacagc

SEQ ID NO: 1809069 - RNA, 23 nt, Human
acgcgugcacacaccagagccca

SEQ ID NO: 1809070 - RNA, 14 nt, Human
acgcccccacuggu

SEQ ID NO: 1809071 - RNA, 18 nt, Human
acgcuacccgggaagggg

SEQ ID NO: 1809072 - RNA, 16 nt, Human
acgcucucuggccuuc

SEQ ID NO: 1809073 - RNA, 15 nt, Human
acgcucucuggccuu

SEQ ID NO: 1809074 - RNA, 13 nt, Human
acgcuacccggga

SEQ ID NO: 1809075 - RNA, 17 nt, Human
acgcuacccgggaaggg

SEQ ID NO: 1809076 - RNA, 21 nt, Human
acggagucccaccuuggcugc

SEQ ID NO: 1809077 - RNA, 16 nt, Human
acggccaggccagagg

SEQ ID NO: 1809078 - RNA, 17 nt, Human
acgcucucuggccuucg

SEQ ID NO: 1809079 - RNA, 19 nt, Human
acggagucccaccuuggcu

SEQ ID NO: 1809080 - RNA, 14 nt, Human
acgaauauugcuga

SEQ ID NO: 1809081 - RNA, 18 nt, Human
uccaggcugggagagccu

SEQ ID NO: 1809082 - RNA, 14 nt, Human
uccaggcugggaga

SEQ ID NO: 1809083 - RNA, 17 nt, Human
uccaggcugggagagcc

SEQ ID NO: 1809084 - RNA, 15 nt, Human
acgacugcccggcag

SEQ ID NO: 1809085 - RNA, 18 nt, Human
acgccaggggaaaaucag

SEQ ID NO: 1809086 - RNA, 23 nt, Human
acgccaggggaaaaucagccugc

SEQ ID NO: 1809087 - RNA, 11 nt, Human
acgccauccca

SEQ ID NO: 1809088 - RNA, 14 nt, Human
acgccaucccagcc

SEQ ID NO: 1809089 - RNA, 15 nt, Human
acgccaucccagccc

SEQ ID NO: 1809090 - RNA, 16 nt, Human
acgccaucccagcccc

SEQ ID NO: 1809091 - RNA, 17 nt, Human
acgccaucccagcccca

SEQ ID NO: 1809092 - RNA, 18 nt, Human
acgccaucccagccccaa

SEQ ID NO: 1809093 - RNA, 16 nt, Human
ucauaauaaguugcau

SEQ ID NO: 1809094 - RNA, 12 nt, Human
ucauaaugacuu

SEQ ID NO: 1809095 - RNA, 18 nt, Human
accugaagacucauucuu

SEQ ID NO: 1809096 - RNA, 19 nt, Human
accugaauuuuggcugugu

SEQ ID NO: 1809097 - RNA, 22 nt, Human
accugaagcuaucguaaaauua

SEQ ID NO: 1809098 - RNA, 17 nt, Human
accugaccccugacccc

SEQ ID NO: 1809099 - RNA, 23 nt, Human
accugaggcccuucucuccagcc

SEQ ID NO: 1809100 - RNA, 17 nt, Human
accugagccccaaaagg

SEQ ID NO: 1809101 - RNA, 12 nt, Human
accugagcccca

SEQ ID NO: 1809102 - RNA, 14 nt, Human
accugauugugucu

SEQ ID NO: 1809103 - RNA, 16 nt, Human
accugaggggccucuu

SEQ ID NO: 1809104 - RNA, 14 nt, Human
accugaggggccuc

SEQ ID NO: 1809105 - RNA, 17 nt, Human
accugccucggccuccc

SEQ ID NO: 1809106 - RNA, 18 nt, Human
accugccaggaagccagc

SEQ ID NO: 1809107 - RNA, 19 nt, Human
accugccaggaagccagca

SEQ ID NO: 1809108 - RNA, 16 nt, Human
accugccaggaagcca

SEQ ID NO: 1809109 - RNA, 17 nt, Human
accugccaggaagccag

SEQ ID NO: 1809110 - RNA, 19 nt, Human
ucauuuuuaguagagacag

SEQ ID NO: 1809111 - RNA, 14 nt, Human
ucauuuuugaauac

SEQ ID NO: 1809112 - RNA, 18 nt, Human
ucauuuuuuuuaagaaaa

SEQ ID NO: 1809113 - RNA, 17 nt, Human
ucauuuuuuuuaagaaa

SEQ ID NO: 1809114 - RNA, 14 nt, Human
ucauuugucacaca

SEQ ID NO: 1809115 - RNA, 16 nt, Human
ucauuugcuuuggaag

SEQ ID NO: 1809116 - RNA, 15 nt, Human
ucauuugcuuuggaa

SEQ ID NO: 1809117 - RNA, 16 nt, Human
ucauuugucacacacu

SEQ ID NO: 1809118 - RNA, 20 nt, Human
accuggaauauauaaccagu

SEQ ID NO: 1809119 - RNA, 12 nt, Human
accugcucuccu

SEQ ID NO: 1809120 - RNA, 23 nt, Human
accugccuguugggccaggagcc

SEQ ID NO: 1809121 - RNA, 16 nt, Human
accugcggugcuaucu

SEQ ID NO: 1809122 - RNA, 21 nt, Human
accugcgucucauacucaccu

SEQ ID NO: 1809123 - RNA, 18 nt, Human
uccaaggguacuaaggaa

SEQ ID NO: 1809124 - RNA, 19 nt, Human
uccaaaugcagcuuuaaaa

SEQ ID NO: 1809125 - RNA, 20 nt, Human
uccacccaggagccccgagg

SEQ ID NO: 1809126 - RNA, 17 nt, Human
uccacccaggagccccg

SEQ ID NO: 1809127 - RNA, 13 nt, Human
uccacccaccuca

SEQ ID NO: 1809128 - RNA, 12 nt, Human
uccacccaccuc

SEQ ID NO: 1809129 - RNA, 18 nt, Human
uccaccaucaagccacca

SEQ ID NO: 1809130 - RNA, 12 nt, Human
accuggccucug

SEQ ID NO: 1809131 - RNA, 13 nt, Human
accuggccucugc

SEQ ID NO: 1809132 - RNA, 18 nt, Human
accuuuuuuauacauaaa

SEQ ID NO: 1809133 - RNA, 17 nt, Human
accuuuuuuauacauaa

SEQ ID NO: 1809134 - RNA, 16 nt, Human
accuuuuuuauacaua

SEQ ID NO: 1809135 - RNA, 14 nt, Human
accuuuguccccac

SEQ ID NO: 1809136 - RNA, 15 nt, Human
accuuuguccccacc

SEQ ID NO: 1809137 - RNA, 16 nt, Human
accuuuguccccaccg

SEQ ID NO: 1809138 - RNA, 14 nt, Human
accuuuuuuauaca

SEQ ID NO: 1809139 - RNA, 14 nt, Human
accuucuccuucac

SEQ ID NO: 1809140 - RNA, 22 nt, Human
accuucuccuucaccuuugucc

SEQ ID NO: 1809141 - RNA, 13 nt, Human
accuuugucccca

SEQ ID NO: 1809142 - RNA, 21 nt, Human
accuggguaacuagggaagau

SEQ ID NO: 1809143 - RNA, 15 nt, Human
accuucgccaccugg

SEQ ID NO: 1809144 - RNA, 17 nt, Human
accuucgccaccugggu

SEQ ID NO: 1809145 - RNA, 17 nt, Human
accuucccaugcccugg

SEQ ID NO: 1809146 - RNA, 13 nt, Human
uccguuaaaauac

SEQ ID NO: 1809147 - RNA, 15 nt, Human
uccguuaaaauacca

SEQ ID NO: 1809148 - RNA, 12 nt, Human
uccuacucugug

SEQ ID NO: 1809149 - RNA, 21 nt, Human
uccuagccugugccucuggga

SEQ ID NO: 1809150 - RNA, 16 nt, Human
acucgaguuacagaca

SEQ ID NO: 1809151 - RNA, 21 nt, Human
acucuuauugcccacgcugga

SEQ ID NO: 1809152 - RNA, 19 nt, Human
acucuggcagcucagagag

SEQ ID NO: 1809153 - RNA, 20 nt, Human
acucuggcagcucagagagg

SEQ ID NO: 1809154 - RNA, 16 nt, Human
acucuggcagcucaga

SEQ ID NO: 1809155 - RNA, 17 nt, Human
acucuggcagcucagag

SEQ ID NO: 1809156 - RNA, 20 nt, Human
acucuucaguuaagccuuug

SEQ ID NO: 1809157 - RNA, 21 nt, Human
acucuucaguuaagccuuugg

SEQ ID NO: 1809158 - RNA, 13 nt, Human
acucuugaaaaau

SEQ ID NO: 1809159 - RNA, 18 nt, Human
acucugacaacagacuuc

SEQ ID NO: 1809160 - RNA, 20 nt, Human
acucugacaacagacuucug

SEQ ID NO: 1809161 - RNA, 22 nt, Human
acucugacaacagacuucugaa

SEQ ID NO: 1809162 - RNA, 23 nt, Human
acucugacaacagacuucugaaa

SEQ ID NO: 1809163 - RNA, 13 nt, Human
acucugacaacag

SEQ ID NO: 1809164 - RNA, 17 nt, Human
acucugacaacagacuu

SEQ ID NO: 1809165 - RNA, 14 nt, Human
acucguauaugucu

SEQ ID NO: 1809166 - RNA, 17 nt, Human
acucgcgacaaugcaaa

SEQ ID NO: 1809167 - RNA, 15 nt, Human
acucgcgacaaugca

SEQ ID NO: 1809168 - RNA, 16 nt, Human
acucgcgacaaugcaa

SEQ ID NO: 1809169 - RNA, 12 nt, Human
uccucucugccc

SEQ ID NO: 1809170 - RNA, 13 nt, Human
uccucucugcccu

SEQ ID NO: 1809171 - RNA, 14 nt, Human
uccucucugcccua

SEQ ID NO: 1809172 - RNA, 15 nt, Human
uccucucugcccuaa

SEQ ID NO: 1809173 - RNA, 12 nt, Human
uccucugagccu

SEQ ID NO: 1809174 - RNA, 13 nt, Human
uccucugagccuu

SEQ ID NO: 1809175 - RNA, 17 nt, Human
uccucugagccuuggga

SEQ ID NO: 1809176 - RNA, 17 nt, Human
uccucuccacugccuuc

SEQ ID NO: 1809177 - RNA, 18 nt, Human
uccucuccacugccuucg

SEQ ID NO: 1809178 - RNA, 21 nt, Human
uccucccaccucagccucccg

SEQ ID NO: 1809179 - RNA, 20 nt, Human
uccucccaccucagccuccc

SEQ ID NO: 1809180 - RNA, 18 nt, Human
uccucccaccucagccuc

SEQ ID NO: 1809181 - RNA, 16 nt, Human
uccucccaccucagcc

SEQ ID NO: 1809182 - RNA, 15 nt, Human
uccucccaccucagc

SEQ ID NO: 1809183 - RNA, 14 nt, Human
uccucccaccucag

SEQ ID NO: 1809184 - RNA, 21 nt, Human
acucuugaaaaaugcauguug

SEQ ID NO: 1809185 - RNA, 14 nt, Human
acucuugaaaaaug

SEQ ID NO: 1809186 - RNA, 19 nt, Human
acucuugaaaaaugcaugu

SEQ ID NO: 1809187 - RNA, 23 nt, Human
uccucuuuggucuacacugugcu

SEQ ID NO: 1809188 - RNA, 14 nt, Human
uccucugaggcuga

SEQ ID NO: 1809189 - RNA, 19 nt, Human
uccucuugccacugccucu

SEQ ID NO: 1809190 - RNA, 12 nt, Human
uccucugcugcu

SEQ ID NO: 1809191 - RNA, 15 nt, Human
uccugaagaauugaa

SEQ ID NO: 1809192 - RNA, 18 nt, Human
acuacggaauaguuggcu

SEQ ID NO: 1809193 - RNA, 22 nt, Human
acuaccuguaaugacaggccug

SEQ ID NO: 1809194 - RNA, 16 nt, Human
acuagaacugaauuuu

SEQ ID NO: 1809195 - RNA, 14 nt, Human
acuacuagggaaau

SEQ ID NO: 1809196 - RNA, 23 nt, Human
acuagaacugaauuuugucuuua

SEQ ID NO: 1809197 - RNA, 19 nt, Human
acuagaacugaauuuuguc

SEQ ID NO: 1809198 - RNA, 18 nt, Human
acuagaacugaauuuugu

SEQ ID NO: 1809199 - RNA, 17 nt, Human
acuagaacugaauuuug

SEQ ID NO: 1809200 - RNA, 13 nt, Human
acguacacacaca

SEQ ID NO: 1809201 - RNA, 12 nt, Human
acguacacauuu

SEQ ID NO: 1809202 - RNA, 14 nt, Human
acguacacauuuua

SEQ ID NO: 1809203 - RNA, 13 nt, Human
acguacacauuuu

SEQ ID NO: 1809204 - RNA, 22 nt, Human
uccccacuugagaauuacccuu

SEQ ID NO: 1809205 - RNA, 15 nt, Human
uccccuaaagccuca

SEQ ID NO: 1809206 - RNA, 22 nt, Human
uccccuaaagccucaaaacaaa

SEQ ID NO: 1809207 - RNA, 14 nt, Human
acucaaugcacuga

SEQ ID NO: 1809208 - RNA, 20 nt, Human
acucacauuuauucugcuca

SEQ ID NO: 1809209 - RNA, 19 nt, Human
acucacauuuauucugcuc

SEQ ID NO: 1809210 - RNA, 21 nt, Human
acucacauuuauucugcucac

SEQ ID NO: 1809211 - RNA, 13 nt, Human
acuauguugauaa

SEQ ID NO: 1809212 - RNA, 12 nt, Human
acuauguaucaa

SEQ ID NO: 1809213 - RNA, 12 nt, Human
acuauaauguaa

SEQ ID NO: 1809214 - RNA, 13 nt, Human
acuauaauguaag

SEQ ID NO: 1809215 - RNA, 14 nt, Human
acuauaauguaagc

SEQ ID NO: 1809216 - RNA, 16 nt, Human
acuaugauuuggaaaa

SEQ ID NO: 1809217 - RNA, 19 nt, Human
acuaugauuuaauuugaaa

SEQ ID NO: 1809218 - RNA, 15 nt, Human
acuaugauuuggaaa

SEQ ID NO: 1809219 - RNA, 21 nt, Human
acuauaauguaagcucuacug

SEQ ID NO: 1809220 - RNA, 14 nt, Human
acucagaauucucu

SEQ ID NO: 1809221 - RNA, 22 nt, Human
acucagaauucucuaguuugau

SEQ ID NO: 1809222 - RNA, 21 nt, Human
acucagaauucucuaguuuga

SEQ ID NO: 1809223 - RNA, 18 nt, Human
acucagaagacacugaug

SEQ ID NO: 1809224 - RNA, 17 nt, Human
acucagaagacacugau

SEQ ID NO: 1809225 - RNA, 16 nt, Human
acucagaagacacuga

SEQ ID NO: 1809226 - RNA, 15 nt, Human
acucagaagacacug

SEQ ID NO: 1809227 - RNA, 14 nt, Human
acucagaagacacu

SEQ ID NO: 1809228 - RNA, 21 nt, Human
acucaccugccccucaacucu

SEQ ID NO: 1809229 - RNA, 14 nt, Human
acucaccugccccu

SEQ ID NO: 1809230 - RNA, 19 nt, Human
acucaccugccccucaacu

SEQ ID NO: 1809231 - RNA, 23 nt, Human
acucaucuagguaaauuacaguu

SEQ ID NO: 1809232 - RNA, 12 nt, Human
acucaucuuagg

SEQ ID NO: 1809233 - RNA, 21 nt, Human
acucaucuagguaaauuacag

SEQ ID NO: 1809234 - RNA, 16 nt, Human
acucauugaccugagg

SEQ ID NO: 1809235 - RNA, 17 nt, Human
acucauugaccugaggc

SEQ ID NO: 1809236 - RNA, 18 nt, Human
acucauugaccugaggcc

SEQ ID NO: 1809237 - RNA, 22 nt, Human
acucauugaccugaggcccuuc

SEQ ID NO: 1809238 - RNA, 18 nt, Human
ucccucagucuggcccuu

SEQ ID NO: 1809239 - RNA, 20 nt, Human
ucccucagucuggcccuucc

SEQ ID NO: 1809240 - RNA, 11 nt, Human
ucccucuuucc

SEQ ID NO: 1809241 - RNA, 13 nt, Human
ucccucuuucccu

SEQ ID NO: 1809242 - RNA, 23 nt, Human
ucccugaaggccccgcccaggcu

SEQ ID NO: 1809243 - RNA, 17 nt, Human
acucaccccagccccaa

SEQ ID NO: 1809244 - RNA, 19 nt, Human
acucaccucccccaucucu

SEQ ID NO: 1809245 - RNA, 20 nt, Human
acucaccucccccaucucuu

SEQ ID NO: 1809246 - RNA, 18 nt, Human
ucccugaaggccccgccc

SEQ ID NO: 1809247 - RNA, 21 nt, Human
ucccugaaggccccgcccagg

SEQ ID NO: 1809248 - RNA, 22 nt, Human
ucccugaaggccccgcccaggc

SEQ ID NO: 1809249 - RNA, 17 nt, Human
uagcgcccaguugggug

SEQ ID NO: 1809250 - RNA, 14 nt, Human
uagcgcccaguugg

SEQ ID NO: 1809251 - RNA, 21 nt, Human
uagccuuagaagucacacagu

SEQ ID NO: 1809252 - RNA, 20 nt, Human
uagccuuagaagucacacag

SEQ ID NO: 1809253 - RNA, 13 nt, Human
uagcuuuucccuu

SEQ ID NO: 1809254 - RNA, 13 nt, Human
uaggaaaaacuga

SEQ ID NO: 1809255 - RNA, 14 nt, Human
uaggaaaaacugau

SEQ ID NO: 1809256 - RNA, 23 nt, Human
uagcuuuaaugauaugcuuguaa

SEQ ID NO: 1809257 - RNA, 19 nt, Human
uagggauggggcugugggg

SEQ ID NO: 1809258 - RNA, 21 nt, Human
uagggaaggauacaaaagcau

SEQ ID NO: 1809259 - RNA, 13 nt, Human
uagggaagauaau

SEQ ID NO: 1809260 - RNA, 16 nt, Human
uaggaaaaacugauuu

SEQ ID NO: 1809261 - RNA, 17 nt, Human
uaggaaaaacugauuuu

SEQ ID NO: 1809262 - RNA, 15 nt, Human
uaggcaggaccugug

SEQ ID NO: 1809263 - RNA, 14 nt, Human
uaggcaggaccugu

SEQ ID NO: 1809264 - RNA, 13 nt, Human
uaggauguugaaa

SEQ ID NO: 1809265 - RNA, 23 nt, Human
acaaugcaaaccaucauugaaau

SEQ ID NO: 1809266 - RNA, 19 nt, Human
acaaugcaaaccaucauug

SEQ ID NO: 1809267 - RNA, 21 nt, Human
acaaugcaaaccaucauugaa

SEQ ID NO: 1809268 - RNA, 15 nt, Human
uagggugggccuuca

SEQ ID NO: 1809269 - RNA, 15 nt, Human
uaggguuauaauaau

SEQ ID NO: 1809270 - RNA, 17 nt, Human
uaggguuauaauaaugu

SEQ ID NO: 1809271 - RNA, 13 nt, Human
uaggguccugggg

SEQ ID NO: 1809272 - RNA, 19 nt, Human
uaggguaagugagagaggg

SEQ ID NO: 1809273 - RNA, 22 nt, Human
acaaugacuuacuguacaugaa

SEQ ID NO: 1809274 - RNA, 20 nt, Human
acaaugacuuacuguacaug

SEQ ID NO: 1809275 - RNA, 11 nt, Human
acaaugcaaac

SEQ ID NO: 1809276 - RNA, 16 nt, Human
acaaugcaaaccauca

SEQ ID NO: 1809277 - RNA, 17 nt, Human
acaaugcaaaccaucau

SEQ ID NO: 1809278 - RNA, 18 nt, Human
acaaugcaaaccaucauu

SEQ ID NO: 1809279 - RNA, 22 nt, Human
acacaggcccggcuccaggcuc

SEQ ID NO: 1809280 - RNA, 21 nt, Human
acacaggcccggcuccaggcu

SEQ ID NO: 1809281 - RNA, 20 nt, Human
acacaggcccggcuccaggc

SEQ ID NO: 1809282 - RNA, 19 nt, Human
acacaggcccggcuccagg

SEQ ID NO: 1809283 - RNA, 24 nt, Human
acacaggcccggcuccaggcuccu

SEQ ID NO: 1809284 - RNA, 23 nt, Human
acacaggcccggcuccaggcucc

SEQ ID NO: 1809285 - RNA, 18 nt, Human
acacaggcccggcuccag

SEQ ID NO: 1809286 - RNA, 17 nt, Human
acacaggcccggcucca

SEQ ID NO: 1809287 - RNA, 16 nt, Human
acacaggcccggcucc

SEQ ID NO: 1809288 - RNA, 23 nt, Human
acacacagauuugagcucagccc

SEQ ID NO: 1809289 - RNA, 16 nt, Human
acacaguauuacuucu

SEQ ID NO: 1809290 - RNA, 19 nt, Human
acacaguaccauuuaaugg

SEQ ID NO: 1809291 - RNA, 13 nt, Human
uaguaaaaauaaa

SEQ ID NO: 1809292 - RNA, 16 nt, Human
uaguaaaaauaaaauu

SEQ ID NO: 1809293 - RNA, 22 nt, Human
uaguagagacaggguuuugcca

SEQ ID NO: 1809294 - RNA, 15 nt, Human
uaguagagacagggu

SEQ ID NO: 1809295 - RNA, 13 nt, Human
uaguagagacggg

SEQ ID NO: 1809296 - RNA, 14 nt, Human
uagucacugagaca

SEQ ID NO: 1809297 - RNA, 14 nt, Human
uaguagagacaggg

SEQ ID NO: 1809298 - RNA, 12 nt, Human
uaguaaucauau

SEQ ID NO: 1809299 - RNA, 21 nt, Human
uagacagagucucacuguugc

SEQ ID NO: 1809300 - RNA, 17 nt, Human
uagacagucccugccaa

SEQ ID NO: 1809301 - RNA, 21 nt, Human
uagacagucccugccaaugga

SEQ ID NO: 1809302 - RNA, 20 nt, Human
aauuugugauacaaugcugu

SEQ ID NO: 1809303 - RNA, 18 nt, Human
aauuugugauacaaugcu

SEQ ID NO: 1809304 - RNA, 17 nt, Human
aauuugugauacaaugc

SEQ ID NO: 1809305 - RNA, 14 nt, Human
aauuugugauacaa

SEQ ID NO: 1809306 - RNA, 18 nt, Human
aauuugggggaaaauuua

SEQ ID NO: 1809307 - RNA, 10 nt, Human
uagacagagu

SEQ ID NO: 1809308 - RNA, 16 nt, Human
uagacagucccugcca

SEQ ID NO: 1809309 - RNA, 18 nt, Human
uagacaauuuauuauggc

SEQ ID NO: 1809310 - RNA, 16 nt, Human
uagaacucccuuucaa

SEQ ID NO: 1809311 - RNA, 18 nt, Human
uagaacucccuuucaaca

SEQ ID NO: 1809312 - RNA, 17 nt, Human
uagaacucccuuucaac

SEQ ID NO: 1809313 - RNA, 12 nt, Human
aauuccacagcu

SEQ ID NO: 1809314 - RNA, 13 nt, Human
aauuccacagcug

SEQ ID NO: 1809315 - RNA, 14 nt, Human
aauuccacagcugc

SEQ ID NO: 1809316 - RNA, 22 nt, Human
uagcacagacccugcccugugg

SEQ ID NO: 1809317 - RNA, 24 nt, Human
uagcacagacccugcccugugggc

SEQ ID NO: 1809318 - RNA, 12 nt, Human
uagccaaggcca

SEQ ID NO: 1809319 - RNA, 14 nt, Human
uagccaaggccaaa

SEQ ID NO: 1809320 - RNA, 13 nt, Human
uagccaaggccaa

SEQ ID NO: 1809321 - RNA, 14 nt, Human
uagcacagacccug

SEQ ID NO: 1809322 - RNA, 20 nt, Human
uagcacagacccugcccugu

SEQ ID NO: 1809323 - RNA, 21 nt, Human
uagcacagacccugcccugug

SEQ ID NO: 1809324 - RNA, 15 nt, Human
uagcacagacccugc

SEQ ID NO: 1809325 - RNA, 14 nt, Human
uagagccagggucu

SEQ ID NO: 1809326 - RNA, 22 nt, Human
uagagcggagaaaggaagggcu

SEQ ID NO: 1809327 - RNA, 12 nt, Human
aauuuuacauuu

SEQ ID NO: 1809328 - RNA, 23 nt, Human
uaugggacucaaugcacugacau

SEQ ID NO: 1809329 - RNA, 16 nt, Human
uaugggacucaaugca

SEQ ID NO: 1809330 - RNA, 10 nt, Human
uaugggagag

SEQ ID NO: 1809331 - RNA, 22 nt, Human
uauggcccuggccuagcauacg

SEQ ID NO: 1809332 - RNA, 21 nt, Human
uauggcccuggccuagcauac

SEQ ID NO: 1809333 - RNA, 20 nt, Human
uauggcccuggccuagcaua

SEQ ID NO: 1809334 - RNA, 22 nt, Human
acagcuaaucagcauucucacu

SEQ ID NO: 1809335 - RNA, 24 nt, Human
uaugauagguuauuuugauguaaa

SEQ ID NO: 1809336 - RNA, 17 nt, Human
uaugauacuugaaaauu

SEQ ID NO: 1809337 - RNA, 22 nt, Human
uaugcaugaaguaauaugcaca

SEQ ID NO: 1809338 - RNA, 14 nt, Human
uaugcucugcaugu

SEQ ID NO: 1809339 - RNA, 21 nt, Human
acagauuuggaaagacuggac

SEQ ID NO: 1809340 - RNA, 15 nt, Human
acagauuuggaaaga

SEQ ID NO: 1809341 - RNA, 14 nt, Human
acagauuuggaaag

SEQ ID NO: 1809342 - RNA, 22 nt, Human
acagauuugagcucagcccugg

SEQ ID NO: 1809343 - RNA, 19 nt, Human
acagcacgggggccaagga

SEQ ID NO: 1809344 - RNA, 17 nt, Human
acagcagccccugcaca

SEQ ID NO: 1809345 - RNA, 14 nt, Human
acagccccuccucc

SEQ ID NO: 1809346 - RNA, 16 nt, Human
acagccccuccuccau

SEQ ID NO: 1809347 - RNA, 15 nt, Human
acagcccgggcucug

SEQ ID NO: 1809348 - RNA, 23 nt, Human
acagcccuccaucuaaacugccc

SEQ ID NO: 1809349 - RNA, 16 nt, Human
acagcccgggcucugc

SEQ ID NO: 1809350 - RNA, 20 nt, Human
uaugaagcuuuuaugugaaa

SEQ ID NO: 1809351 - RNA, 22 nt, Human
uaugaagcuuuuaugugaaaca

SEQ ID NO: 1809352 - RNA, 23 nt, Human
uaugaagcuuuuaugugaaacau

SEQ ID NO: 1809353 - RNA, 23 nt, Human
uaugaggcauuuguuugaacuga

SEQ ID NO: 1809354 - RNA, 21 nt, Human
uaugaggcauuuguuugaacu

SEQ ID NO: 1809355 - RNA, 15 nt, Human
uaugaggcauuuguu

SEQ ID NO: 1809356 - RNA, 14 nt, Human
uaugaggcauuugu

SEQ ID NO: 1809357 - RNA, 19 nt, Human
acagcuaaugggacacuaa

SEQ ID NO: 1809358 - RNA, 17 nt, Human
acagcuaaugggacacu

SEQ ID NO: 1809359 - RNA, 16 nt, Human
acagcuaaugggacac

SEQ ID NO: 1809360 - RNA, 15 nt, Human
acagcuaaugggaca

SEQ ID NO: 1809361 - RNA, 21 nt, Human
acagcuucauuuccugugucu

SEQ ID NO: 1809362 - RNA, 19 nt, Human
acagcuucauuuccugugu

SEQ ID NO: 1809363 - RNA, 17 nt, Human
acagcuucauuuccugu

SEQ ID NO: 1809364 - RNA, 17 nt, Human
acagcuugaccgugagg

SEQ ID NO: 1809365 - RNA, 20 nt, Human
acagcuugaccgugaggcca

SEQ ID NO: 1809366 - RNA, 21 nt, Human
acagcuugaccgugaggccag

SEQ ID NO: 1809367 - RNA, 21 nt, Human
acaggaaaagcugcugacagu

SEQ ID NO: 1809368 - RNA, 20 nt, Human
acaggaaaagcugcugacag

SEQ ID NO: 1809369 - RNA, 19 nt, Human
acaggaaaagcugcugaca

SEQ ID NO: 1809370 - RNA, 22 nt, Human
acagcuugaccgugaggccaga

SEQ ID NO: 1809371 - RNA, 23 nt, Human
acagcuugaccgugaggccagag

SEQ ID NO: 1809372 - RNA, 15 nt, Human
acaggcagauacagg

SEQ ID NO: 1809373 - RNA, 16 nt, Human
acaggacucugccucc

SEQ ID NO: 1809374 - RNA, 15 nt, Human
acaggacucugccuc

SEQ ID NO: 1809375 - RNA, 20 nt, Human
acaggaaaauuuuaaaaaua

SEQ ID NO: 1809376 - RNA, 17 nt, Human
acaggcccggcuccagg

SEQ ID NO: 1809377 - RNA, 16 nt, Human
acaggcccggcuccag

SEQ ID NO: 1809378 - RNA, 13 nt, Human
acaggcaggucca

SEQ ID NO: 1809379 - RNA, 22 nt, Human
acaggcccggcuccaggcuccu

SEQ ID NO: 1809380 - RNA, 21 nt, Human
acaggcccggcuccaggcucc

SEQ ID NO: 1809381 - RNA, 20 nt, Human
acaggcccggcuccaggcuc

SEQ ID NO: 1809382 - RNA, 18 nt, Human
acaggcccggcuccaggc

SEQ ID NO: 1809383 - RNA, 13 nt, Human
acaggcccuuccu

SEQ ID NO: 1809384 - RNA, 15 nt, Human
acaggcccuuccucu

SEQ ID NO: 1809385 - RNA, 22 nt, Human
acaggcccuuccucuccacugc

SEQ ID NO: 1809386 - RNA, 21 nt, Human
uaugucucgugguaggacugu

SEQ ID NO: 1809387 - RNA, 18 nt, Human
uauagccuaggugacaga

SEQ ID NO: 1809388 - RNA, 15 nt, Human
uauaggcaccuacca

SEQ ID NO: 1809389 - RNA, 23 nt, Human
uauaggaacuuaaauaaugugaa

SEQ ID NO: 1809390 - RNA, 12 nt, Human
uauaggaauuga

SEQ ID NO: 1809391 - RNA, 16 nt, Human
acacucauugaccuga

SEQ ID NO: 1809392 - RNA, 18 nt, Human
uauaauuuaccugaaguc

SEQ ID NO: 1809393 - RNA, 21 nt, Human
uauaauuuaccugaagucuuu

SEQ ID NO: 1809394 - RNA, 22 nt, Human
uauacacuuacacuuuaugcac

SEQ ID NO: 1809395 - RNA, 17 nt, Human
uagucacugagacagcc

SEQ ID NO: 1809396 - RNA, 20 nt, Human
uagucacugagacagcccgg

SEQ ID NO: 1809397 - RNA, 15 nt, Human
acacuaaugaggaaa

SEQ ID NO: 1809398 - RNA, 22 nt, Human
acacuaaugaggaaacugcacu

SEQ ID NO: 1809399 - RNA, 21 nt, Human
acacucaaaagcugggcaggu

SEQ ID NO: 1809400 - RNA, 19 nt, Human
uauaagugauugcugguuu

SEQ ID NO: 1809401 - RNA, 13 nt, Human
acagaaauguaca

SEQ ID NO: 1809402 - RNA, 19 nt, Human
acagacauacuaaccagca

SEQ ID NO: 1809403 - RNA, 18 nt, Human
acagacauacuaaccagc

SEQ ID NO: 1809404 - RNA, 16 nt, Human
acagaaagguuuucuu

SEQ ID NO: 1809405 - RNA, 18 nt, Human
acacuuacacuuuaugca

SEQ ID NO: 1809406 - RNA, 21 nt, Human
acacuuacacuuuaugcacaa

SEQ ID NO: 1809407 - RNA, 15 nt, Human
acacuucaggcucuu

SEQ ID NO: 1809408 - RNA, 19 nt, Human
acacuucaggcucuucucc

SEQ ID NO: 1809409 - RNA, 22 nt, Human
acacuucaggcucuucuccuuu

SEQ ID NO: 1809410 - RNA, 14 nt, Human
acacuuccauaauc

SEQ ID NO: 1809411 - RNA, 18 nt, Human
acacuguuucaaacuuua

SEQ ID NO: 1809412 - RNA, 17 nt, Human
acacuguuucaaacuuu

SEQ ID NO: 1809413 - RNA, 17 nt, Human
acacucauugaccugag

SEQ ID NO: 1809414 - RNA, 19 nt, Human
acacucauugaccugaggc

SEQ ID NO: 1809415 - RNA, 20 nt, Human
acacuguuucaaacuuuacu

SEQ ID NO: 1809416 - RNA, 16 nt, Human
acacuuacacuuuaug

SEQ ID NO: 1809417 - RNA, 22 nt, Human
uaucacccagaagaaaauagug

SEQ ID NO: 1809418 - RNA, 19 nt, Human
uaucacccagaagaaaaua

SEQ ID NO: 1809419 - RNA, 23 nt, Human
uaucaaauacauuuaaaacauua

SEQ ID NO: 1809420 - RNA, 17 nt, Human
uaucagaauucucagaa

SEQ ID NO: 1809421 - RNA, 19 nt, Human
uauccaacaucaacaucuu

SEQ ID NO: 1809422 - RNA, 15 nt, Human
uaucccggcugcccu

SEQ ID NO: 1809423 - RNA, 22 nt, Human
aauuaugugccagauuuaugca

SEQ ID NO: 1809424 - RNA, 21 nt, Human
aauuauuuauuaaaugcccag

SEQ ID NO: 1809425 - RNA, 22 nt, Human
aauuauuuauuaaaugcccagc

SEQ ID NO: 1809426 - RNA, 17 nt, Human
aauucaguuguuagugu

SEQ ID NO: 1809427 - RNA, 22 nt, Human
aauucaguuguuagugugucuu

SEQ ID NO: 1809428 - RNA, 11 nt, Human
aauucaguugu

SEQ ID NO: 1809429 - RNA, 16 nt, Human
uaccugaagucuuugu

SEQ ID NO: 1809430 - RNA, 13 nt, Human
uaccugaggggcc

SEQ ID NO: 1809431 - RNA, 15 nt, Human
uaccugaggggccuc

SEQ ID NO: 1809432 - RNA, 23 nt, Human
uaccugaagcuaucguaaaauua

SEQ ID NO: 1809433 - RNA, 13 nt, Human
uaccugaagucuu

SEQ ID NO: 1809434 - RNA, 14 nt, Human
uaccugaagucuuu

SEQ ID NO: 1809435 - RNA, 23 nt, Human
uacccgggaagggggcugggaca

SEQ ID NO: 1809436 - RNA, 23 nt, Human
uaccucuugagccuugaacuuug

SEQ ID NO: 1809437 - RNA, 22 nt, Human
uaccucuugagccuugaacuuu

SEQ ID NO: 1809438 - RNA, 15 nt, Human
uacccucauguucuu

SEQ ID NO: 1809439 - RNA, 17 nt, Human
aauuacaggaaguacug

SEQ ID NO: 1809440 - RNA, 19 nt, Human
aauuacaggaaguacugga

SEQ ID NO: 1809441 - RNA, 20 nt, Human
aauuacaggaaguacuggag

SEQ ID NO: 1809442 - RNA, 16 nt, Human
uaccugaggggccucu

SEQ ID NO: 1809443 - RNA, 16 nt, Human
uaccugccaggaagcc

SEQ ID NO: 1809444 - RNA, 13 nt, Human
aauguucaucaau

SEQ ID NO: 1809445 - RNA, 23 nt, Human
uacagagcccacgcccccacugg

SEQ ID NO: 1809446 - RNA, 21 nt, Human
aaugugcugaaugguuuucaa

SEQ ID NO: 1809447 - RNA, 20 nt, Human
aauguucaucaaugaaugaa

SEQ ID NO: 1809448 - RNA, 16 nt, Human
aauguucaucaaugaa

SEQ ID NO: 1809449 - RNA, 21 nt, Human
aauguucucucuucuccaccu

SEQ ID NO: 1809450 - RNA, 16 nt, Human
aauuaacuuuuauaaa

SEQ ID NO: 1809451 - RNA, 15 nt, Human
aauuaacuuuuauaa

SEQ ID NO: 1809452 - RNA, 16 nt, Human
aauuaaguacuaugua

SEQ ID NO: 1809453 - RNA, 17 nt, Human
aauuaaguacuauguau

SEQ ID NO: 1809454 - RNA, 13 nt, Human
aauuaacuuuuau

SEQ ID NO: 1809455 - RNA, 12 nt, Human
aauuaacuuuua

SEQ ID NO: 1809456 - RNA, 19 nt, Human
uaccagggacugaggggag

SEQ ID NO: 1809457 - RNA, 15 nt, Human
uacccccugcaaagc

SEQ ID NO: 1809458 - RNA, 19 nt, Human
uacccccugcaaagcccag

SEQ ID NO: 1809459 - RNA, 23 nt, Human
uacccccugcaaagcccagcuug

SEQ ID NO: 1809460 - RNA, 18 nt, Human
uaccagccaguaaauggg

SEQ ID NO: 1809461 - RNA, 22 nt, Human
uaccagcagagcaccuuagaca

SEQ ID NO: 1809462 - RNA, 13 nt, Human
uaccagcagagca

SEQ ID NO: 1809463 - RNA, 14 nt, Human
uaccagcagagcac

SEQ ID NO: 1809464 - RNA, 12 nt, Human
uaccagcagagc

SEQ ID NO: 1809465 - RNA, 13 nt, Human
uacauuuccuaaa

SEQ ID NO: 1809466 - RNA, 12 nt, Human
uacauucuguua

SEQ ID NO: 1809467 - RNA, 22 nt, Human
uaauuccguagguuauuuucag

SEQ ID NO: 1809468 - RNA, 14 nt, Human
aaugcaaaccauca

SEQ ID NO: 1809469 - RNA, 12 nt, Human
aaugcaaaccau

SEQ ID NO: 1809470 - RNA, 11 nt, Human
aaugcaaacca

SEQ ID NO: 1809471 - RNA, 16 nt, Human
aaugauuucauucaau

SEQ ID NO: 1809472 - RNA, 13 nt, Human
aaugcaccuggaa

SEQ ID NO: 1809473 - RNA, 12 nt, Human
aaugagaaaucu

SEQ ID NO: 1809474 - RNA, 22 nt, Human
aaugagaaaucuaaaaaacgaa

SEQ ID NO: 1809475 - RNA, 11 nt, Human
aaugagccugg

SEQ ID NO: 1809476 - RNA, 20 nt, Human
aaugagaaaaugucuuuauu

SEQ ID NO: 1809477 - RNA, 21 nt, Human
aaugaccuuucaauaggaaaa

SEQ ID NO: 1809478 - RNA, 18 nt, Human
aaugaggucagagccugc

SEQ ID NO: 1809479 - RNA, 16 nt, Human
aaugaggucagagccu

SEQ ID NO: 1809480 - RNA, 14 nt, Human
aaugagccuggcaa

SEQ ID NO: 1809481 - RNA, 12 nt, Human
aaugagccuggc

SEQ ID NO: 1809482 - RNA, 13 nt, Human
aaugagccuggca

SEQ ID NO: 1809483 - RNA, 24 nt, Human
aaugauuucagcucacugcaaccu

SEQ ID NO: 1809484 - RNA, 15 nt, Human
uacaccgggccugga

SEQ ID NO: 1809485 - RNA, 17 nt, Human
uacaccgggccuggaga

SEQ ID NO: 1809486 - RNA, 13 nt, Human
uacagacaaagcg

SEQ ID NO: 1809487 - RNA, 14 nt, Human
uacagacaaagcgu

SEQ ID NO: 1809488 - RNA, 15 nt, Human
uacagacaaagcgug

SEQ ID NO: 1809489 - RNA, 23 nt, Human
uacagagcagacaguuaagagaa

SEQ ID NO: 1809490 - RNA, 19 nt, Human
uacagagcccacgccccca

SEQ ID NO: 1809491 - RNA, 22 nt, Human
uacagagcccacgcccccacug

SEQ ID NO: 1809492 - RNA, 19 nt, Human
uacagacaaagcguggugg

SEQ ID NO: 1809493 - RNA, 17 nt, Human
uacagagacagaaagca

SEQ ID NO: 1809494 - RNA, 16 nt, Human
aaugguuuucaaaaua

SEQ ID NO: 1809495 - RNA, 16 nt, Human
aaugguuuucuugugu

SEQ ID NO: 1809496 - RNA, 12 nt, Human
aauguaaauaaa

SEQ ID NO: 1809497 - RNA, 14 nt, Human
aaugguuuucaaaa

SEQ ID NO: 1809498 - RNA, 18 nt, Human
aauggaagacagcucuua

SEQ ID NO: 1809499 - RNA, 16 nt, Human
aauggaagacagcucu

SEQ ID NO: 1809500 - RNA, 13 nt, Human
aauggaagacagc

SEQ ID NO: 1809501 - RNA, 18 nt, Human
aaugcugguuuuucaguu

SEQ ID NO: 1809502 - RNA, 22 nt, Human
aaugcuggcuguuggcuggggg

SEQ ID NO: 1809503 - RNA, 21 nt, Human
aaugcuggcuguuggcugggg

SEQ ID NO: 1809504 - RNA, 18 nt, Human
uaauuuuuuugagacaga

SEQ ID NO: 1809505 - RNA, 22 nt, Human
uaauuuuuuuuuuccuuuuaaa

SEQ ID NO: 1809506 - RNA, 21 nt, Human
uacaaaaaaaaaaaaaaauua

SEQ ID NO: 1809507 - RNA, 15 nt, Human
uaauuuuuguauuuu

SEQ ID NO: 1809508 - RNA, 16 nt, Human
uacaaugcugugcccu

SEQ ID NO: 1809509 - RNA, 14 nt, Human
uacaaugcugugcc

SEQ ID NO: 1809510 - RNA, 13 nt, Human
uacaaugcugugc

SEQ ID NO: 1809511 - RNA, 20 nt, Human
aauccucaguuuuugugaaa

SEQ ID NO: 1809512 - RNA, 12 nt, Human
aaucccaggaug

SEQ ID NO: 1809513 - RNA, 17 nt, Human
aaucccauuuaaaaaaa

SEQ ID NO: 1809514 - RNA, 13 nt, Human
aaucucaaauaac

SEQ ID NO: 1809515 - RNA, 18 nt, Human
aaucugggccagaauuuc

SEQ ID NO: 1809516 - RNA, 17 nt, Human
uaaguguguguuuuuca

SEQ ID NO: 1809517 - RNA, 19 nt, Human
uaaguuaguuccacugaga

SEQ ID NO: 1809518 - RNA, 17 nt, Human
uaaguuaguuccacuga

SEQ ID NO: 1809519 - RNA, 21 nt, Human
uaaguuacacauuuuucagau

SEQ ID NO: 1809520 - RNA, 21 nt, Human
uaaguauucuuauuuaaugaa

SEQ ID NO: 1809521 - RNA, 20 nt, Human
uaaguuaguuccacugagac

SEQ ID NO: 1809522 - RNA, 20 nt, Human
aaucacguaaagcuagaaau

SEQ ID NO: 1809523 - RNA, 21 nt, Human
aaucacguaaagcuagaaaug

SEQ ID NO: 1809524 - RNA, 15 nt, Human
aauauuuauagguca

SEQ ID NO: 1809525 - RNA, 11 nt, Human
aaucagccugc

SEQ ID NO: 1809526 - RNA, 18 nt, Human
aaucagcauucucacucc

SEQ ID NO: 1809527 - RNA, 19 nt, Human
aaucagcauucucacuccu

SEQ ID NO: 1809528 - RNA, 19 nt, Human
aaucagccugcuccagcug

SEQ ID NO: 1809529 - RNA, 13 nt, Human
aaucagccugcuc

SEQ ID NO: 1809530 - RNA, 18 nt, Human
aaucagccugcuccagcu

SEQ ID NO: 1809531 - RNA, 22 nt, Human
uaaggaauuuuauuuuuuucug

SEQ ID NO: 1809532 - RNA, 17 nt, Human
uaaggaauaccuguccc

SEQ ID NO: 1809533 - RNA, 18 nt, Human
uaaggaauaccugucccc

SEQ ID NO: 1809534 - RNA, 13 nt, Human
uaaggaagacaau

SEQ ID NO: 1809535 - RNA, 9 nt, Human
uaaggaaua

SEQ ID NO: 1809536 - RNA, 14 nt, Human
uaagauucauauuu

SEQ ID NO: 1809537 - RNA, 14 nt, Human
uaagcaaaauguga

SEQ ID NO: 1809538 - RNA, 21 nt, Human
uaagcaaaaugugauauguac

SEQ ID NO: 1809539 - RNA, 15 nt, Human
uaagcaaaaugugau

SEQ ID NO: 1809540 - RNA, 21 nt, Human
uaagcuauucaguaauaacuc

SEQ ID NO: 1809541 - RNA, 18 nt, Human
aauagcgucauaacuaga

SEQ ID NO: 1809542 - RNA, 15 nt, Human
aauaccugucccccu

SEQ ID NO: 1809543 - RNA, 18 nt, Human
aauaccugucccccugac

SEQ ID NO: 1809544 - RNA, 19 nt, Human
aauaccugucccccugaca

SEQ ID NO: 1809545 - RNA, 21 nt, Human
aauaccugucccccugacaac

SEQ ID NO: 1809546 - RNA, 15 nt, Human
aauacagacuggaug

SEQ ID NO: 1809547 - RNA, 17 nt, Human
aauaccagccaguaaau

SEQ ID NO: 1809548 - RNA, 19 nt, Human
aauaccagccaguaaaugg

SEQ ID NO: 1809549 - RNA, 23 nt, Human
aauacauuuaaaacauuaaaaua

SEQ ID NO: 1809550 - RNA, 22 nt, Human
aauacauuuaaaacauuaaaau

SEQ ID NO: 1809551 - RNA, 21 nt, Human
aauacauuuaaaacauuaaaa

SEQ ID NO: 1809552 - RNA, 20 nt, Human
aauacauuuaaaacauuaaa

SEQ ID NO: 1809553 - RNA, 17 nt, Human
aauacauuuaaaacauu

SEQ ID NO: 1809554 - RNA, 14 nt, Human
aauacauuuaaaac

SEQ ID NO: 1809555 - RNA, 12 nt, Human
aauaccaaggaa

SEQ ID NO: 1809556 - RNA, 13 nt, Human
aauacagaggcaa

SEQ ID NO: 1809557 - RNA, 22 nt, Human
uaaauuaacuuuuauaaacuuu

SEQ ID NO: 1809558 - RNA, 21 nt, Human
uaaauuaacuuuuauaaacuu

SEQ ID NO: 1809559 - RNA, 18 nt, Human
uaaaugaaaaucgugaca

SEQ ID NO: 1809560 - RNA, 21 nt, Human
aaguguauuuuuuuacuaaua

SEQ ID NO: 1809561 - RNA, 18 nt, Human
aaguguauuuuuuuacua

SEQ ID NO: 1809562 - RNA, 13 nt, Human
uaaaugugguaaa

SEQ ID NO: 1809563 - RNA, 20 nt, Human
uaaauuaacuuuuauaaacu

SEQ ID NO: 1809564 - RNA, 19 nt, Human
uaaauuaacuuuuauaaac

SEQ ID NO: 1809565 - RNA, 13 nt, Human
uaacguauaaaag

SEQ ID NO: 1809566 - RNA, 17 nt, Human
uaacguauaaaagccug

SEQ ID NO: 1809567 - RNA, 13 nt, Human
uaacuucacauau

SEQ ID NO: 1809568 - RNA, 16 nt, Human
uaacuugucuuuggac

SEQ ID NO: 1809569 - RNA, 20 nt, Human
uaacuugucuuuggacccug

SEQ ID NO: 1809570 - RNA, 13 nt, Human
uaagaagugaaaa

SEQ ID NO: 1809571 - RNA, 21 nt, Human
aauaguucagguaacaggcag

SEQ ID NO: 1809572 - RNA, 21 nt, Human
aauauauucagccuggcuuca

SEQ ID NO: 1809573 - RNA, 21 nt, Human
aauauauuuuaagacgaaaca

SEQ ID NO: 1809574 - RNA, 19 nt, Human
uaacaugugaaaagaauag

SEQ ID NO: 1809575 - RNA, 20 nt, Human
uaacaugaauauuuaguguu

SEQ ID NO: 1809576 - RNA, 21 nt, Human
uaacaugaauauuuaguguuc

SEQ ID NO: 1809577 - RNA, 14 nt, Human
uaacaugaauauuu

SEQ ID NO: 1809578 - RNA, 19 nt, Human
uaacauguaauuaaguacu

SEQ ID NO: 1809579 - RNA, 19 nt, Human
uaacaugaauauuuagugu

SEQ ID NO: 1809580 - RNA, 15 nt, Human
aagaccuucuccuuc

SEQ ID NO: 1809581 - RNA, 18 nt, Human
aagaccuucuccuucacc

SEQ ID NO: 1809582 - RNA, 19 nt, Human
aagaccuucuccuucaccu

SEQ ID NO: 1809583 - RNA, 13 nt, Human
aagacgcugugcu

SEQ ID NO: 1809584 - RNA, 15 nt, Human
aagacgcugugcugc

SEQ ID NO: 1809585 - RNA, 17 nt, Human
aagacgcugugcugccc

SEQ ID NO: 1809586 - RNA, 18 nt, Human
aagacgcugugcugcccu

SEQ ID NO: 1809587 - RNA, 19 nt, Human
aagacgcugugcugcccug

SEQ ID NO: 1809588 - RNA, 20 nt, Human
aagacgcugugcugcccugc

SEQ ID NO: 1809589 - RNA, 22 nt, Human
aagacgugauuuugcuguagaa

SEQ ID NO: 1809590 - RNA, 16 nt, Human
aagacgugauuuugcu

SEQ ID NO: 1809591 - RNA, 23 nt, Human
aagacgugauuuugcuguagaag

SEQ ID NO: 1809592 - RNA, 23 nt, Human
aagacugaguacguugugcauuu

SEQ ID NO: 1809593 - RNA, 18 nt, Human
aagacuuccagagccuca

SEQ ID NO: 1809594 - RNA, 16 nt, Human
aagacuuccagagccu

SEQ ID NO: 1809595 - RNA, 16 nt, Human
aagacuuuggaaagac

SEQ ID NO: 1809596 - RNA, 21 nt, Human
guggccucccaacucacccca

SEQ ID NO: 1809597 - RNA, 22 nt, Human
guggccucccaacucaccccag

SEQ ID NO: 1809598 - RNA, 23 nt, Human
aagaggaaugaaguacucauaca

SEQ ID NO: 1809599 - RNA, 17 nt, Human
gugggaagggcuacacc

SEQ ID NO: 1809600 - RNA, 23 nt, Human
gugggaggaucucuugagccugg

SEQ ID NO: 1809601 - RNA, 18 nt, Human
gugggagcugccuguuca

SEQ ID NO: 1809602 - RNA, 15 nt, Human
gugggagcugccugu

SEQ ID NO: 1809603 - RNA, 15 nt, Human
guggggucacucugg

SEQ ID NO: 1809604 - RNA, 14 nt, Human
gugggagcugccug

SEQ ID NO: 1809605 - RNA, 15 nt, Human
gugggacacccugug

SEQ ID NO: 1809606 - RNA, 13 nt, Human
gugggacacccug

SEQ ID NO: 1809607 - RNA, 22 nt, Human
guggcgcagcauauucaggaag

SEQ ID NO: 1809608 - RNA, 21 nt, Human
gugugaccacugcagaagaca

SEQ ID NO: 1809609 - RNA, 22 nt, Human
gugugacaaggauugcuacugu

SEQ ID NO: 1809610 - RNA, 16 nt, Human
gugugguagagugugc

SEQ ID NO: 1809611 - RNA, 20 nt, Human
gugugugaaaaugugugugu

SEQ ID NO: 1809612 - RNA, 13 nt, Human
aagauguagagga

SEQ ID NO: 1809613 - RNA, 20 nt, Human
gugucaagagggucugagga

SEQ ID NO: 1809614 - RNA, 23 nt, Human
guguauuuuuuuacuaauagaca

SEQ ID NO: 1809615 - RNA, 17 nt, Human
guguauuuuuuuacuaa

SEQ ID NO: 1809616 - RNA, 16 nt, Human
gugucagcauagaagu

SEQ ID NO: 1809617 - RNA, 17 nt, Human
aagaucguucucugccu

SEQ ID NO: 1809618 - RNA, 16 nt, Human
aagaucguucucugcc

SEQ ID NO: 1809619 - RNA, 13 nt, Human
aagaguaggaaga

SEQ ID NO: 1809620 - RNA, 14 nt, Human
aagaguaggaagac

SEQ ID NO: 1809621 - RNA, 20 nt, Human
aagauggcugugccucugcc

SEQ ID NO: 1809622 - RNA, 21 nt, Human
aagauggcugugccucugccu

SEQ ID NO: 1809623 - RNA, 23 nt, Human
aagauggcugugccucugccugu

SEQ ID NO: 1809624 - RNA, 19 nt, Human
aagaugcuucucacugcca

SEQ ID NO: 1809625 - RNA, 18 nt, Human
aagauggcugugccucug

SEQ ID NO: 1809626 - RNA, 17 nt, Human
aagaugcuucucacugc

SEQ ID NO: 1809627 - RNA, 16 nt, Human
aagaugcuucucacug

SEQ ID NO: 1809628 - RNA, 17 nt, Human
guggggucacucuggca

SEQ ID NO: 1809629 - RNA, 20 nt, Human
guggggucacucuggcagcu

SEQ ID NO: 1809630 - RNA, 21 nt, Human
guggggucacucuggcagcuc

SEQ ID NO: 1809631 - RNA, 22 nt, Human
guggggucacucuggcagcuca

SEQ ID NO: 1809632 - RNA, 22 nt, Human
aagagggucugaggaauccaga

SEQ ID NO: 1809633 - RNA, 12 nt, Human
aagaguaggaag

SEQ ID NO: 1809634 - RNA, 23 nt, Human
aagagggagggagggcuccagac

SEQ ID NO: 1809635 - RNA, 23 nt, Human
guuauuuuuauuuauuuaaauuu

SEQ ID NO: 1809636 - RNA, 20 nt, Human
guuauuuugauguaaagaug

SEQ ID NO: 1809637 - RNA, 20 nt, Human
guucaaagauauuuugcuuu

SEQ ID NO: 1809638 - RNA, 22 nt, Human
guucaaagauauuuugcuuugu

SEQ ID NO: 1809639 - RNA, 21 nt, Human
guucaaagauauuuugcuuug

SEQ ID NO: 1809640 - RNA, 18 nt, Human
guucaagcgauucuucug

SEQ ID NO: 1809641 - RNA, 19 nt, Human
guuaggcauugugggaagg

SEQ ID NO: 1809642 - RNA, 20 nt, Human
guuaggcauugugggaaggg

SEQ ID NO: 1809643 - RNA, 18 nt, Human
guuaagagaaaugagcuu

SEQ ID NO: 1809644 - RNA, 11 nt, Human
guuaagagaaa

SEQ ID NO: 1809645 - RNA, 12 nt, Human
guuaagagaaau

SEQ ID NO: 1809646 - RNA, 16 nt, Human
aagcuaggccuggcca

SEQ ID NO: 1809647 - RNA, 12 nt, Human
aagcuaggccug

SEQ ID NO: 1809648 - RNA, 20 nt, Human
aagccugaguuugcuuucaa

SEQ ID NO: 1809649 - RNA, 13 nt, Human
guucagcuccagc

SEQ ID NO: 1809650 - RNA, 15 nt, Human
guucagcuccagcuc

SEQ ID NO: 1809651 - RNA, 18 nt, Human
aagccucaaaacaaaggc

SEQ ID NO: 1809652 - RNA, 16 nt, Human
aagccucaaaacaaag

SEQ ID NO: 1809653 - RNA, 15 nt, Human
aagccucaaaacaaa

SEQ ID NO: 1809654 - RNA, 12 nt, Human
aagcucagggcc

SEQ ID NO: 1809655 - RNA, 13 nt, Human
aagcucagggccu

SEQ ID NO: 1809656 - RNA, 16 nt, Human
aagcucagggccuggc

SEQ ID NO: 1809657 - RNA, 17 nt, Human
aagcucagggccuggcu

SEQ ID NO: 1809658 - RNA, 20 nt, Human
aagcucagggccuggcucag

SEQ ID NO: 1809659 - RNA, 18 nt, Human
aagcucagggccuggcuc

SEQ ID NO: 1809660 - RNA, 19 nt, Human
aagcucagggccuggcuca

SEQ ID NO: 1809661 - RNA, 17 nt, Human
aagcuccaagcucccag

SEQ ID NO: 1809662 - RNA, 18 nt, Human
aagcuccaagcucccagg

SEQ ID NO: 1809663 - RNA, 21 nt, Human
gugugugcgccuacaggagug

SEQ ID NO: 1809664 - RNA, 12 nt, Human
aagcagugcaug

SEQ ID NO: 1809665 - RNA, 14 nt, Human
aagcagugcaugcu

SEQ ID NO: 1809666 - RNA, 15 nt, Human
aagcagugcaugcug

SEQ ID NO: 1809667 - RNA, 20 nt, Human
aagcagugcaugcugucccu

SEQ ID NO: 1809668 - RNA, 16 nt, Human
aagcauuuacuuugug

SEQ ID NO: 1809669 - RNA, 14 nt, Human
aagcauuuuguaau

SEQ ID NO: 1809670 - RNA, 17 nt, Human
aagcauuuuguaauaau

SEQ ID NO: 1809671 - RNA, 22 nt, Human
aagccaaagcuaggccuggcca

SEQ ID NO: 1809672 - RNA, 14 nt, Human
aagcccaggaaagg

SEQ ID NO: 1809673 - RNA, 17 nt, Human
aagcccaggaaaggcuc

SEQ ID NO: 1809674 - RNA, 19 nt, Human
aagcccaggaaaggcucca

SEQ ID NO: 1809675 - RNA, 22 nt, Human
aagcccaggaaaggcuccagga

SEQ ID NO: 1809676 - RNA, 19 nt, Human
aagcccugagcuuucugcu

SEQ ID NO: 1809677 - RNA, 15 nt, Human
aagcccuuccauguc

SEQ ID NO: 1809678 - RNA, 20 nt, Human
aagcccuuccaugucgccuc

SEQ ID NO: 1809679 - RNA, 23 nt, Human
aagcccuuccaugucgccucugc

SEQ ID NO: 1809680 - RNA, 20 nt, Human
aagccgcuggggccaguugg

SEQ ID NO: 1809681 - RNA, 20 nt, Human
uaaaagacagugaaagaaaa

SEQ ID NO: 1809682 - RNA, 13 nt, Human
uaaaagacuuuuu

SEQ ID NO: 1809683 - RNA, 21 nt, Human
uaaaauaauuuuguaauguau

SEQ ID NO: 1809684 - RNA, 16 nt, Human
uaaaauaauuuuguaa

SEQ ID NO: 1809685 - RNA, 15 nt, Human
uaaaauaauuuugua

SEQ ID NO: 1809686 - RNA, 22 nt, Human
uaaaauaccagccaguaaaugg

SEQ ID NO: 1809687 - RNA, 14 nt, Human
uaaaauaauuuugu

SEQ ID NO: 1809688 - RNA, 13 nt, Human
uaaaauaauuuug

SEQ ID NO: 1809689 - RNA, 18 nt, Human
aagugauucuccugccuc

SEQ ID NO: 1809690 - RNA, 17 nt, Human
aagugauucuccugccu

SEQ ID NO: 1809691 - RNA, 16 nt, Human
aagugauucuccugcc

SEQ ID NO: 1809692 - RNA, 15 nt, Human
aagugauucuccugc

SEQ ID NO: 1809693 - RNA, 19 nt, Human
aagugauucuccugccuca

SEQ ID NO: 1809694 - RNA, 20 nt, Human
aagugauucuccugccucag

SEQ ID NO: 1809695 - RNA, 21 nt, Human
aagugauucucaugccucagc

SEQ ID NO: 1809696 - RNA, 13 nt, Human
uaaaauauuccug

SEQ ID NO: 1809697 - RNA, 22 nt, Human
uaaaauauuccugcauuuguga

SEQ ID NO: 1809698 - RNA, 20 nt, Human
aagugauucucaugccucag

SEQ ID NO: 1809699 - RNA, 16 nt, Human
aagugaggaugaaaaa

SEQ ID NO: 1809700 - RNA, 15 nt, Human
uaaaaaucucaaauu

SEQ ID NO: 1809701 - RNA, 17 nt, Human
uaaaaaucucaaauuuc

SEQ ID NO: 1809702 - RNA, 16 nt, Human
uaaaaaucucaaauuu

SEQ ID NO: 1809703 - RNA, 21 nt, Human
uaaaaauaaaaaacacuggga

SEQ ID NO: 1809704 - RNA, 18 nt, Human
uaaaaauaaaaaacacug

SEQ ID NO: 1809705 - RNA, 19 nt, Human
uaaaaauaaaaaacacugg

SEQ ID NO: 1809706 - RNA, 15 nt, Human
uaaaaaguggaaaaa

SEQ ID NO: 1809707 - RNA, 15 nt, Human
guuuuucuucucccu

SEQ ID NO: 1809708 - RNA, 20 nt, Human
uaaaacuugauguguuaucu

SEQ ID NO: 1809709 - RNA, 22 nt, Human
uaaaacuugauguguuaucucu

SEQ ID NO: 1809710 - RNA, 21 nt, Human
uaaaaaucucaaauuucuaaa

SEQ ID NO: 1809711 - RNA, 20 nt, Human
uaaaaaucucaaauuucuaa

SEQ ID NO: 1809712 - RNA, 19 nt, Human
uaaaaaucucaaauuucua

SEQ ID NO: 1809713 - RNA, 16 nt, Human
aagucuuucacauuua

SEQ ID NO: 1809714 - RNA, 21 nt, Human
aagucaugcguuuaaucacau

SEQ ID NO: 1809715 - RNA, 14 nt, Human
aagugagagcuggg

SEQ ID NO: 1809716 - RNA, 12 nt, Human
aagugagagagg

SEQ ID NO: 1809717 - RNA, 15 nt, Human
aagugagagcugggu

SEQ ID NO: 1809718 - RNA, 15 nt, Human
guuuuucauaaagca

SEQ ID NO: 1809719 - RNA, 19 nt, Human
guuuuuccuguucuuaaga

SEQ ID NO: 1809720 - RNA, 18 nt, Human
aagugagacuuugagggu

SEQ ID NO: 1809721 - RNA, 19 nt, Human
aagugaagacaaugacuua

SEQ ID NO: 1809722 - RNA, 17 nt, Human
aagugaagacaaugacu

SEQ ID NO: 1809723 - RNA, 14 nt, Human
aagugaaaauauag

SEQ ID NO: 1809724 - RNA, 12 nt, Human
aagugaaaauau

SEQ ID NO: 1809725 - RNA, 12 nt, Human
aagugaaaacuu

SEQ ID NO: 1809726 - RNA, 21 nt, Human
aagugaaaaaggaggaagaga

SEQ ID NO: 1809727 - RNA, 20 nt, Human
aaguacacuguuucaaacuu

SEQ ID NO: 1809728 - RNA, 19 nt, Human
aaguacacuguuucaaacu

SEQ ID NO: 1809729 - RNA, 23 nt, Human
aaguacacuguuucaaacuuuac

SEQ ID NO: 1809730 - RNA, 22 nt, Human
guuuugccauguuggccaggcu

SEQ ID NO: 1809731 - RNA, 21 nt, Human
guuuugccauguuggccaggc

SEQ ID NO: 1809732 - RNA, 20 nt, Human
guuuugccauguuggccagg

SEQ ID NO: 1809733 - RNA, 16 nt, Human
guuuugccauguuggc

SEQ ID NO: 1809734 - RNA, 14 nt, Human
guuucugccgcagc

SEQ ID NO: 1809735 - RNA, 18 nt, Human
guuucugccgcagcccug

SEQ ID NO: 1809736 - RNA, 15 nt, Human
guuucugccgcagcc

SEQ ID NO: 1809737 - RNA, 21 nt, Human
aaguaauccaccugccucggc

SEQ ID NO: 1809738 - RNA, 18 nt, Human
aaguacacuguuucaaac

SEQ ID NO: 1809739 - RNA, 13 nt, Human
aaguacacuguuu

SEQ ID NO: 1809740 - RNA, 22 nt, Human
aaggggcccaaauucuuucagu

SEQ ID NO: 1809741 - RNA, 23 nt, Human
aaggcucugagcaaauguggcuc

SEQ ID NO: 1809742 - RNA, 20 nt, Human
aagguagaaauaucugaaaa

SEQ ID NO: 1809743 - RNA, 22 nt, Human
aagguacuuucauauuuuaaac

SEQ ID NO: 1809744 - RNA, 19 nt, Human
aagguacuuucauauuuua

SEQ ID NO: 1809745 - RNA, 18 nt, Human
aagguacuuucauauuuu

SEQ ID NO: 1809746 - RNA, 19 nt, Human
guuucuauguguagggcgg

SEQ ID NO: 1809747 - RNA, 14 nt, Human
guuucucaaagaaa

SEQ ID NO: 1809748 - RNA, 18 nt, Human
guuucucaaagaaauuuc

SEQ ID NO: 1809749 - RNA, 17 nt, Human
guuucucaaagaaauuu

SEQ ID NO: 1809750 - RNA, 18 nt, Human
guuucugaaagggacgcu

SEQ ID NO: 1809751 - RNA, 12 nt, Human
aaggucauuuuu

SEQ ID NO: 1809752 - RNA, 13 nt, Human
aaguaagcaaaga

SEQ ID NO: 1809753 - RNA, 16 nt, Human
aaguaaggaauuuuau

SEQ ID NO: 1809754 - RNA, 15 nt, Human
guugggcugguguca

SEQ ID NO: 1809755 - RNA, 13 nt, Human
guugggcuggugu

SEQ ID NO: 1809756 - RNA, 15 nt, Human
guugggccaggagcc

SEQ ID NO: 1809757 - RNA, 17 nt, Human
guugggccaggagccuc

SEQ ID NO: 1809758 - RNA, 13 nt, Human
guuuauugucaaa

SEQ ID NO: 1809759 - RNA, 22 nt, Human
aaggcucgagcaugccuggaug

SEQ ID NO: 1809760 - RNA, 19 nt, Human
aaggcucgagcaugccugg

SEQ ID NO: 1809761 - RNA, 20 nt, Human
aaggcucgagcaugccugga

SEQ ID NO: 1809762 - RNA, 19 nt, Human
aaggcuccaggagcagcca

SEQ ID NO: 1809763 - RNA, 22 nt, Human
aaggcuccaggagcagccacau

SEQ ID NO: 1809764 - RNA, 16 nt, Human
aaggcucgagcaugcc

SEQ ID NO: 1809765 - RNA, 18 nt, Human
aaggcucgagcaugccug

SEQ ID NO: 1809766 - RNA, 13 nt, Human
guuucaaacuuua

SEQ ID NO: 1809767 - RNA, 16 nt, Human
guuucaaacuuuacua

SEQ ID NO: 1809768 - RNA, 14 nt, Human
guuucaaacuuuac

SEQ ID NO: 1809769 - RNA, 16 nt, Human
aaggcuccaggagcag

SEQ ID NO: 1809770 - RNA, 18 nt, Human
aaggcuccaggagcagcc

SEQ ID NO: 1809771 - RNA, 15 nt, Human
aaggcuccaggagca

SEQ ID NO: 1809772 - RNA, 17 nt, Human
guuucaaacuuuacuau

SEQ ID NO: 1809773 - RNA, 13 nt, Human
guugcccaggcug

SEQ ID NO: 1809774 - RNA, 12 nt, Human
guugcccaggcu

SEQ ID NO: 1809775 - RNA, 23 nt, Human
guugcccaggcaggucuugaacu

SEQ ID NO: 1809776 - RNA, 22 nt, Human
aaggccuaauucuaugccuguc

SEQ ID NO: 1809777 - RNA, 16 nt, Human
aaggccaaaggaagca

SEQ ID NO: 1809778 - RNA, 21 nt, Human
aaggauacaaaagcaugugag

SEQ ID NO: 1809779 - RNA, 13 nt, Human
aaggauacaaaag

SEQ ID NO: 1809780 - RNA, 18 nt, Human
aaggaauaccuguccccc

SEQ ID NO: 1809781 - RNA, 11 nt, Human
aaggagagcua

SEQ ID NO: 1809782 - RNA, 14 nt, Human
aaggagauuuacaa

SEQ ID NO: 1809783 - RNA, 17 nt, Human
aaggagauuuacaacug

SEQ ID NO: 1809784 - RNA, 20 nt, Human
aaggaggggauagagagaga

SEQ ID NO: 1809785 - RNA, 18 nt, Human
aaggaggaagagaaaaaa

SEQ ID NO: 1809786 - RNA, 14 nt, Human
aaggaagacuucau

SEQ ID NO: 1809787 - RNA, 15 nt, Human
aaggaagacuucauc

SEQ ID NO: 1809788 - RNA, 13 nt, Human
aaggaagcacaug

SEQ ID NO: 1809789 - RNA, 16 nt, Human
aaggaagcacaugccu

SEQ ID NO: 1809790 - RNA, 21 nt, Human
aaggaauaaauugcuccuuga

SEQ ID NO: 1809791 - RNA, 17 nt, Human
aaggaauaccugucccc

SEQ ID NO: 1809792 - RNA, 14 nt, Human
aagcuccaucucca

SEQ ID NO: 1809793 - RNA, 20 nt, Human
aagcuccaucuccacuccag

SEQ ID NO: 1809794 - RNA, 15 nt, Human
aaggaaagagggagg

SEQ ID NO: 1809795 - RNA, 16 nt, Human
aacaaggcaaggcugu

SEQ ID NO: 1809796 - RNA, 23 nt, Human
aaauuuugauguuuuaaggaugc

SEQ ID NO: 1809797 - RNA, 18 nt, Human
aaauuuugauguuuuaag

SEQ ID NO: 1809798 - RNA, 12 nt, Human
aacaauaaaaga

SEQ ID NO: 1809799 - RNA, 18 nt, Human
aacaaggcaaggcuguca

SEQ ID NO: 1809800 - RNA, 21 nt, Human
aacaaggcaaggcugucaauu

SEQ ID NO: 1809801 - RNA, 22 nt, Human
gucacacaguauuacuucugcu

SEQ ID NO: 1809802 - RNA, 21 nt, Human
gucacacaguauuacuucugc

SEQ ID NO: 1809803 - RNA, 17 nt, Human
gucagaauagaaauuag

SEQ ID NO: 1809804 - RNA, 13 nt, Human
gucagaauagaaa

SEQ ID NO: 1809805 - RNA, 18 nt, Human
aaauuuguuauaaugaau

SEQ ID NO: 1809806 - RNA, 13 nt, Human
gucauaacuagaa

SEQ ID NO: 1809807 - RNA, 16 nt, Human
gucccaccuuggcugc

SEQ ID NO: 1809808 - RNA, 15 nt, Human
gucccaccuuggcug

SEQ ID NO: 1809809 - RNA, 14 nt, Human
gucccaccuuggcu

SEQ ID NO: 1809810 - RNA, 13 nt, Human
guccauagagagc

SEQ ID NO: 1809811 - RNA, 14 nt, Human
guccauagagagca

SEQ ID NO: 1809812 - RNA, 21 nt, Human
gucccaccccacacacgccag

SEQ ID NO: 1809813 - RNA, 13 nt, Human
guccaagaagccc

SEQ ID NO: 1809814 - RNA, 15 nt, Human
guccaagaagcccag

SEQ ID NO: 1809815 - RNA, 16 nt, Human
guccaagaagcccagg

SEQ ID NO: 1809816 - RNA, 20 nt, Human
guccaagaagcccaggaaag

SEQ ID NO: 1809817 - RNA, 17 nt, Human
guccaagaagcccagga

SEQ ID NO: 1809818 - RNA, 18 nt, Human
guccaagaagcccaggaa

SEQ ID NO: 1809819 - RNA, 21 nt, Human
gucauuuuuuuuaagaaaaag

SEQ ID NO: 1809820 - RNA, 19 nt, Human
gucauuuuuuuuaagaaaa

SEQ ID NO: 1809821 - RNA, 16 nt, Human
aacagauaaauaguuu

SEQ ID NO: 1809822 - RNA, 22 nt, Human
aacagugauuaccagggacuga

SEQ ID NO: 1809823 - RNA, 15 nt, Human
aacagugauuaccag

SEQ ID NO: 1809824 - RNA, 12 nt, Human
guccuacucugu

SEQ ID NO: 1809825 - RNA, 15 nt, Human
guccuacccacccuc

SEQ ID NO: 1809826 - RNA, 16 nt, Human
guccuacccacccucc

SEQ ID NO: 1809827 - RNA, 15 nt, Human
aacagaaauguacag

SEQ ID NO: 1809828 - RNA, 14 nt, Human
aacagaaauguaca

SEQ ID NO: 1809829 - RNA, 13 nt, Human
aacagaaauguac

SEQ ID NO: 1809830 - RNA, 12 nt, Human
aacagaaaugua

SEQ ID NO: 1809831 - RNA, 14 nt, Human
gucccccuuccaug

SEQ ID NO: 1809832 - RNA, 16 nt, Human
gucccccuuccaugga

SEQ ID NO: 1809833 - RNA, 18 nt, Human
gucccccuuccauggacu

SEQ ID NO: 1809834 - RNA, 18 nt, Human
guaucaggugcugccauc

SEQ ID NO: 1809835 - RNA, 16 nt, Human
guaucaggugcugcca

SEQ ID NO: 1809836 - RNA, 14 nt, Human
guaucaaauacauu

SEQ ID NO: 1809837 - RNA, 13 nt, Human
guaucaaauacau

SEQ ID NO: 1809838 - RNA, 22 nt, Human
guauauuuguauuuaaaugaaa

SEQ ID NO: 1809839 - RNA, 16 nt, Human
guauauuuuauaucaa

SEQ ID NO: 1809840 - RNA, 15 nt, Human
guauaaguggugugu

SEQ ID NO: 1809841 - RNA, 14 nt, Human
guaugguggcuggg

SEQ ID NO: 1809842 - RNA, 16 nt, Human
guaugguggcuggguu

SEQ ID NO: 1809843 - RNA, 15 nt, Human
guaugguggcugggu

SEQ ID NO: 1809844 - RNA, 21 nt, Human
guaucccaugagccucagcau

SEQ ID NO: 1809845 - RNA, 15 nt, Human
guaugcgugugugug

SEQ ID NO: 1809846 - RNA, 22 nt, Human
guaucaggugcugccauccagg

SEQ ID NO: 1809847 - RNA, 19 nt, Human
guaucccaugagccucagc

SEQ ID NO: 1809848 - RNA, 12 nt, Human
guaacaggcaga

SEQ ID NO: 1809849 - RNA, 22 nt, Human
guaacaggaaaauuuuaaaaau

SEQ ID NO: 1809850 - RNA, 22 nt, Human
aaauguaagaucguucucugcc

SEQ ID NO: 1809851 - RNA, 14 nt, Human
aaauguaagaucgu

SEQ ID NO: 1809852 - RNA, 19 nt, Human
guauaaaagggacugagaa

SEQ ID NO: 1809853 - RNA, 16 nt, Human
aaauucugucucugga

SEQ ID NO: 1809854 - RNA, 19 nt, Human
aaauuguaagcaugcacaa

SEQ ID NO: 1809855 - RNA, 18 nt, Human
aaauucugucucuggauu

SEQ ID NO: 1809856 - RNA, 20 nt, Human
aaauuguaagcaugcacaaa

SEQ ID NO: 1809857 - RNA, 22 nt, Human
guauuuuguuuuugucuuaaaa

SEQ ID NO: 1809858 - RNA, 15 nt, Human
gucaaacgugaaaau

SEQ ID NO: 1809859 - RNA, 17 nt, Human
gucaaacgugaaaaugc

SEQ ID NO: 1809860 - RNA, 14 nt, Human
gucaaacgugaaaa

SEQ ID NO: 1809861 - RNA, 21 nt, Human
gucaacaaguaugaauaaaga

SEQ ID NO: 1809862 - RNA, 17 nt, Human
gucaacacuaacaugau

SEQ ID NO: 1809863 - RNA, 24 nt, Human
aaaugucuaguuguaacaccauga

SEQ ID NO: 1809864 - RNA, 19 nt, Human
aaaugucuaguuguaacac

SEQ ID NO: 1809865 - RNA, 14 nt, Human
aaauuaagaaagga

SEQ ID NO: 1809866 - RNA, 12 nt, Human
aaaugugugugu

SEQ ID NO: 1809867 - RNA, 20 nt, Human
aacuacuaccuguaaugaca

SEQ ID NO: 1809868 - RNA, 12 nt, Human
aaccugugucuc

SEQ ID NO: 1809869 - RNA, 18 nt, Human
aaccuugaaaacuuuaug

SEQ ID NO: 1809870 - RNA, 23 nt, Human
aacuagacucccaagcuggacua

SEQ ID NO: 1809871 - RNA, 20 nt, Human
aacuagacucccaagcugga

SEQ ID NO: 1809872 - RNA, 16 nt, Human
aacuaugauuuggaaa

SEQ ID NO: 1809873 - RNA, 21 nt, Human
aacuaugauuuggaaaauaaa

SEQ ID NO: 1809874 - RNA, 22 nt, Human
aacucaucuagguaaauuacag

SEQ ID NO: 1809875 - RNA, 12 nt, Human
aacuccuggccu

SEQ ID NO: 1809876 - RNA, 23 nt, Human
gugaaccaccacacccagcccac

SEQ ID NO: 1809877 - RNA, 22 nt, Human
gugaaccaccacacccagccca

SEQ ID NO: 1809878 - RNA, 17 nt, Human
aacucuccucugcugcu

SEQ ID NO: 1809879 - RNA, 16 nt, Human
aacucuccucugcugc

SEQ ID NO: 1809880 - RNA, 15 nt, Human
aacucuccuccagag

SEQ ID NO: 1809881 - RNA, 18 nt, Human
aacucuccuccagaguca

SEQ ID NO: 1809882 - RNA, 16 nt, Human
gucuuucacauuuaaa

SEQ ID NO: 1809883 - RNA, 16 nt, Human
gucuuuggugaacauu

SEQ ID NO: 1809884 - RNA, 16 nt, Human
gucuuuugguuaugaa

SEQ ID NO: 1809885 - RNA, 14 nt, Human
gucuggcccuuccu

SEQ ID NO: 1809886 - RNA, 20 nt, Human
aaccugagccccaaaaggua

SEQ ID NO: 1809887 - RNA, 15 nt, Human
aaccaagucaaguga

SEQ ID NO: 1809888 - RNA, 19 nt, Human
aaccaccacacccagccca

SEQ ID NO: 1809889 - RNA, 20 nt, Human
aaccacauuggagauguuua

SEQ ID NO: 1809890 - RNA, 13 nt, Human
gucucgaacuccu

SEQ ID NO: 1809891 - RNA, 18 nt, Human
gucucgaacuccugaccu

SEQ ID NO: 1809892 - RNA, 19 nt, Human
gucucgaacuccugaccuu

SEQ ID NO: 1809893 - RNA, 16 nt, Human
aaccaagccguggcuu

SEQ ID NO: 1809894 - RNA, 18 nt, Human
aaccaagccguggcuucc

SEQ ID NO: 1809895 - RNA, 21 nt, Human
aaccaccacacccagcccacu

SEQ ID NO: 1809896 - RNA, 12 nt, Human
aaccaucauuga

SEQ ID NO: 1809897 - RNA, 17 nt, Human
aaccaucauugaaaucu

SEQ ID NO: 1809898 - RNA, 18 nt, Human
aaccaucauugaaaucuu

SEQ ID NO: 1809899 - RNA, 13 nt, Human
aacccaauaguug

SEQ ID NO: 1809900 - RNA, 23 nt, Human
aaccauuuugcugucccuuuucc

SEQ ID NO: 1809901 - RNA, 23 nt, Human
aacccaaauguucaucaaugaau

SEQ ID NO: 1809902 - RNA, 19 nt, Human
aaccauuugaaaccccugu

SEQ ID NO: 1809903 - RNA, 22 nt, Human
aaccucgagguuucucaaagaa

SEQ ID NO: 1809904 - RNA, 21 nt, Human
aaccucgagguuucucaaaga

SEQ ID NO: 1809905 - RNA, 11 nt, Human
aaccugacccc

SEQ ID NO: 1809906 - RNA, 18 nt, Human
aaccugagccccaaaagg

SEQ ID NO: 1809907 - RNA, 17 nt, Human
aaccccuguaggccuca

SEQ ID NO: 1809908 - RNA, 16 nt, Human
aacccgggaggcagag

SEQ ID NO: 1809909 - RNA, 14 nt, Human
aacccagauaaagg

SEQ ID NO: 1809910 - RNA, 10 nt, Human
aacccagcuc

SEQ ID NO: 1809911 - RNA, 21 nt, Human
aacuggguacuuguggacaca

SEQ ID NO: 1809912 - RNA, 16 nt, Human
aacuggguacuugugg

SEQ ID NO: 1809913 - RNA, 22 nt, Human
aacugggggagggugaagugaa

SEQ ID NO: 1809914 - RNA, 21 nt, Human
aacugggggagggugaaguga

SEQ ID NO: 1809915 - RNA, 15 nt, Human
aacuggauuaaacuu

SEQ ID NO: 1809916 - RNA, 11 nt, Human
aacuggcugca

SEQ ID NO: 1809917 - RNA, 16 nt, Human
aacuggauuaaacuua

SEQ ID NO: 1809918 - RNA, 23 nt, Human
aacugcugacuguuuucucuuga

SEQ ID NO: 1809919 - RNA, 20 nt, Human
aacugcugacuguuuucucu

SEQ ID NO: 1809920 - RNA, 21 nt, Human
aacugcugacuguuuucucuu

SEQ ID NO: 1809921 - RNA, 15 nt, Human
aacugcugacuguuu

SEQ ID NO: 1809922 - RNA, 17 nt, Human
gugaacuugggccacug

SEQ ID NO: 1809923 - RNA, 19 nt, Human
gugaacuugggccacugug

SEQ ID NO: 1809924 - RNA, 21 nt, Human
gugagaugcuagaacucccuu

SEQ ID NO: 1809925 - RNA, 18 nt, Human
gugaggguaaguauuuuc

SEQ ID NO: 1809926 - RNA, 15 nt, Human
gugagcaauccugca

SEQ ID NO: 1809927 - RNA, 17 nt, Human
gugaggccagagacaca

SEQ ID NO: 1809928 - RNA, 22 nt, Human
gugaggccagagacacaagccu

SEQ ID NO: 1809929 - RNA, 22 nt, Human
gugagucgaggacagggaggug

SEQ ID NO: 1809930 - RNA, 22 nt, Human
aacucugacaacagacuucuga

SEQ ID NO: 1809931 - RNA, 23 nt, Human
aacucugacaacagacuucugaa

SEQ ID NO: 1809932 - RNA, 20 nt, Human
aacucugacaacagacuucu

SEQ ID NO: 1809933 - RNA, 23 nt, Human
aacucuguuacacuuuuuggaag

SEQ ID NO: 1809934 - RNA, 22 nt, Human
aacucuguuacacuuuuuggaa

SEQ ID NO: 1809935 - RNA, 21 nt, Human
aacucuucaaucucuugcacu

SEQ ID NO: 1809936 - RNA, 22 nt, Human
gugcaugcugucccuuacguga

SEQ ID NO: 1809937 - RNA, 21 nt, Human
gugcacacaccagagcccacc

SEQ ID NO: 1809938 - RNA, 22 nt, Human
gugaugguuccccuguucacuc

SEQ ID NO: 1809939 - RNA, 14 nt, Human
gugaugguuccccu

SEQ ID NO: 1809940 - RNA, 16 nt, Human
gugaugguuccccugu

SEQ ID NO: 1809941 - RNA, 19 nt, Human
gugauggggcccugccucc

SEQ ID NO: 1809942 - RNA, 12 nt, Human
gugccucugccu

SEQ ID NO: 1809943 - RNA, 19 nt, Human
gugcauuaucuagauacug

SEQ ID NO: 1809944 - RNA, 15 nt, Human
gugcauuaucuagau

SEQ ID NO: 1809945 - RNA, 19 nt, Human
gugcauguguguucaugca

SEQ ID NO: 1809946 - RNA, 23 nt, Human
gugcauuaucuagauacuguauc

SEQ ID NO: 1809947 - RNA, 13 nt, Human
aacuuccaauuua

SEQ ID NO: 1809948 - RNA, 22 nt, Human
gugaugcgcaugucacggaggg

SEQ ID NO: 1809949 - RNA, 14 nt, Human
gugauggggcccug

SEQ ID NO: 1809950 - RNA, 16 nt, Human
gugauggggcccugcc

SEQ ID NO: 1809951 - RNA, 17 nt, Human
gugauggggcccugccu

SEQ ID NO: 1809952 - RNA, 18 nt, Human
gugauggggcccugccuc

SEQ ID NO: 1809953 - RNA, 16 nt, Human
gugaugagaggaaauc

SEQ ID NO: 1809954 - RNA, 14 nt, Human
gugaugagaggaaa

SEQ ID NO: 1809955 - RNA, 23 nt, Human
cugccauauucuguuggccagug

SEQ ID NO: 1809956 - RNA, 22 nt, Human
cugccauauucuguuggccagu

SEQ ID NO: 1809957 - RNA, 21 nt, Human
cugccauauucuguuggccag

SEQ ID NO: 1809958 - RNA, 20 nt, Human
cugccauauucuguuggcca

SEQ ID NO: 1809959 - RNA, 11 nt, Human
cugccagggac

SEQ ID NO: 1809960 - RNA, 12 nt, Human
cugccagggaca

SEQ ID NO: 1809961 - RNA, 15 nt, Human
cugccagggacagag

SEQ ID NO: 1809962 - RNA, 12 nt, Human
cugccauccagg

SEQ ID NO: 1809963 - RNA, 14 nt, Human
cugcccccucugcc

SEQ ID NO: 1809964 - RNA, 15 nt, Human
cugcccccucugccc

SEQ ID NO: 1809965 - RNA, 19 nt, Human
cugccccagggcucccggc

SEQ ID NO: 1809966 - RNA, 17 nt, Human
cugcccuggugcugcca

SEQ ID NO: 1809967 - RNA, 16 nt, Human
cugcccuggugcugcc

SEQ ID NO: 1809968 - RNA, 18 nt, Human
cugcccuggugcugccac

SEQ ID NO: 1809969 - RNA, 19 nt, Human
cugcccuggugcugccaca

SEQ ID NO: 1809970 - RNA, 16 nt, Human
cugcccccucugcccu

SEQ ID NO: 1809971 - RNA, 17 nt, Human
cugcccccucugcccug

SEQ ID NO: 1809972 - RNA, 18 nt, Human
cugcccccucugcccugc

SEQ ID NO: 1809973 - RNA, 19 nt, Human
cugcccccucugcccugcg

SEQ ID NO: 1809974 - RNA, 14 nt, Human
cugccccucaacuc

SEQ ID NO: 1809975 - RNA, 22 nt, Human
cugccccucaacucuccuccag

SEQ ID NO: 1809976 - RNA, 20 nt, Human
cugcccuggugcugccacac

SEQ ID NO: 1809977 - RNA, 21 nt, Human
cugcccuggugcugccacacu

SEQ ID NO: 1809978 - RNA, 22 nt, Human
cugcccugguuuccugcccugg

SEQ ID NO: 1809979 - RNA, 23 nt, Human
cugcccugguuuccugcccuggg

SEQ ID NO: 1809980 - RNA, 12 nt, Human
cugcccugugag

SEQ ID NO: 1809981 - RNA, 13 nt, Human
cugcccugugagu

SEQ ID NO: 1809982 - RNA, 15 nt, Human
cugcccugugggccc

SEQ ID NO: 1809983 - RNA, 16 nt, Human
cugcccugugggcccc

SEQ ID NO: 1809984 - RNA, 18 nt, Human
cugcccugugggccccca

SEQ ID NO: 1809985 - RNA, 14 nt, Human
cugcauuugugaaa

SEQ ID NO: 1809986 - RNA, 15 nt, Human
cugcauuugugaaau

SEQ ID NO: 1809987 - RNA, 17 nt, Human
cugcauuugugaaauga

SEQ ID NO: 1809988 - RNA, 22 nt, Human
cugcauuugugaaaugauggug

SEQ ID NO: 1809989 - RNA, 15 nt, Human
cugccaaugggagcu

SEQ ID NO: 1809990 - RNA, 17 nt, Human
cugccaaugggagcuca

SEQ ID NO: 1809991 - RNA, 15 nt, Human
cugcauguuugugau

SEQ ID NO: 1809992 - RNA, 13 nt, Human
cugcauguuacau

SEQ ID NO: 1809993 - RNA, 20 nt, Human
cugcauucaggaucaaaccc

SEQ ID NO: 1809994 - RNA, 13 nt, Human
cugcauuugugaa

SEQ ID NO: 1809995 - RNA, 22 nt, Human
cugcauuuaaaagauacaguua

SEQ ID NO: 1809996 - RNA, 20 nt, Human
cugcauuuaaaagauacagu

SEQ ID NO: 1809997 - RNA, 20 nt, Human
cugagacucgcgacaaugca

SEQ ID NO: 1809998 - RNA, 17 nt, Human
cugagacucgcgacaau

SEQ ID NO: 1809999 - RNA, 19 nt, Human
cugagacucgcgacaaugc

SEQ ID NO: 1810000 - RNA, 16 nt, Human
cugcuaauuccccaga

SEQ ID NO: 1810001 - RNA, 16 nt, Human
cugccuguugggccag

SEQ ID NO: 1810002 - RNA, 14 nt, Human
cugccuguugggcc

SEQ ID NO: 1810003 - RNA, 18 nt, Human
cugccuguugggccagga

SEQ ID NO: 1810004 - RNA, 19 nt, Human
cugccuguugggccaggag

SEQ ID NO: 1810005 - RNA, 15 nt, Human
cugcuacagagcaga

SEQ ID NO: 1810006 - RNA, 23 nt, Human
cugccugggaucccucauccuca

SEQ ID NO: 1810007 - RNA, 15 nt, Human
cugccuguucagcuc

SEQ ID NO: 1810008 - RNA, 14 nt, Human
cugccuguucagcu

SEQ ID NO: 1810009 - RNA, 19 nt, Human
cugccucgaacuggcugca

SEQ ID NO: 1810010 - RNA, 18 nt, Human
cugccucgaacuggcugc

SEQ ID NO: 1810011 - RNA, 17 nt, Human
cugccucgaacuggcug

SEQ ID NO: 1810012 - RNA, 15 nt, Human
cugccucgaacuggc

SEQ ID NO: 1810013 - RNA, 11 nt, Human
cugcugacagu

SEQ ID NO: 1810014 - RNA, 23 nt, Human
cugcugacagacacaggcccggc

SEQ ID NO: 1810015 - RNA, 21 nt, Human
cugcugacagacacaggcccg

SEQ ID NO: 1810016 - RNA, 20 nt, Human
cugcugacagacacaggccc

SEQ ID NO: 1810017 - RNA, 19 nt, Human
cugcugacagacacaggcc

SEQ ID NO: 1810018 - RNA, 18 nt, Human
cugcugacagacacaggc

SEQ ID NO: 1810019 - RNA, 15 nt, Human
cugcugacagacaca

SEQ ID NO: 1810020 - RNA, 23 nt, Human
cugcuucagccucccgaguagcu

SEQ ID NO: 1810021 - RNA, 18 nt, Human
cugcuuuuuauggccugu

SEQ ID NO: 1810022 - RNA, 16 nt, Human
cuggaaauauuaagaa

SEQ ID NO: 1810023 - RNA, 17 nt, Human
cuggaacacuaaugagg

SEQ ID NO: 1810024 - RNA, 13 nt, Human
cuggacugugugc

SEQ ID NO: 1810025 - RNA, 13 nt, Human
cugcuucagccuc

SEQ ID NO: 1810026 - RNA, 17 nt, Human
cugcuuaacuucacaua

SEQ ID NO: 1810027 - RNA, 15 nt, Human
cugcuuaacuucaca

SEQ ID NO: 1810028 - RNA, 16 nt, Human
cugcuucagccucccg

SEQ ID NO: 1810029 - RNA, 14 nt, Human
cugcuucagccucc

SEQ ID NO: 1810030 - RNA, 17 nt, Human
cugcuuuuuauggccug

SEQ ID NO: 1810031 - RNA, 22 nt, Human
cugcuuuuuaaagaaugcucuu

SEQ ID NO: 1810032 - RNA, 13 nt, Human
cugcuuaacuuca

SEQ ID NO: 1810033 - RNA, 13 nt, Human
cugucgcccaguc

SEQ ID NO: 1810034 - RNA, 16 nt, Human
cugucgcccaggcugg

SEQ ID NO: 1810035 - RNA, 15 nt, Human
cugugcucuggacag

SEQ ID NO: 1810036 - RNA, 14 nt, Human
cugugcucuggaca

SEQ ID NO: 1810037 - RNA, 21 nt, Human
cugugagaugcuagaacuccc

SEQ ID NO: 1810038 - RNA, 16 nt, Human
cugugagaugcuagaa

SEQ ID NO: 1810039 - RNA, 15 nt, Human
cugugaagagaacca

SEQ ID NO: 1810040 - RNA, 22 nt, Human
cuguaggccucaggugaaacuc

SEQ ID NO: 1810041 - RNA, 13 nt, Human
cuguaggccucag

SEQ ID NO: 1810042 - RNA, 12 nt, Human
cuguaggccuca

SEQ ID NO: 1810043 - RNA, 21 nt, Human
cuguaggaagguuaauguuca

SEQ ID NO: 1810044 - RNA, 22 nt, Human
cuguacuugcucuugaugccug

SEQ ID NO: 1810045 - RNA, 23 nt, Human
cuguacuugcucuugaugccugg

SEQ ID NO: 1810046 - RNA, 16 nt, Human
cugucauuugagcagg

SEQ ID NO: 1810047 - RNA, 18 nt, Human
cugucauuugagcagggc

SEQ ID NO: 1810048 - RNA, 17 nt, Human
cugucauuugagcaggg

SEQ ID NO: 1810049 - RNA, 20 nt, Human
cugucauuugagcagggcuc

SEQ ID NO: 1810050 - RNA, 12 nt, Human
cuguccugccua

SEQ ID NO: 1810051 - RNA, 18 nt, Human
cugucagccauuccuguu

SEQ ID NO: 1810052 - RNA, 18 nt, Human
cugguuuccugcccuggg

SEQ ID NO: 1810053 - RNA, 21 nt, Human
cugguuuccugcccugggagg

SEQ ID NO: 1810054 - RNA, 22 nt, Human
cugguuuccugcccugggaggc

SEQ ID NO: 1810055 - RNA, 13 nt, Human
cugggacacaguu

SEQ ID NO: 1810056 - RNA, 12 nt, Human
cugggacacagu

SEQ ID NO: 1810057 - RNA, 15 nt, Human
cuggcucccacaggc

SEQ ID NO: 1810058 - RNA, 13 nt, Human
cuggcuccagcug

SEQ ID NO: 1810059 - RNA, 14 nt, Human
cuggcuccagcugg

SEQ ID NO: 1810060 - RNA, 18 nt, Human
cuggcuccagcuggccgg

SEQ ID NO: 1810061 - RNA, 20 nt, Human
cuggcuccagcuggccggga

SEQ ID NO: 1810062 - RNA, 13 nt, Human
cuggcucaucucu

SEQ ID NO: 1810063 - RNA, 19 nt, Human
cuggcuccaaacccucgag

SEQ ID NO: 1810064 - RNA, 20 nt, Human
cuggcuccaaacccucgagg

SEQ ID NO: 1810065 - RNA, 17 nt, Human
cuggccccucagggucc

SEQ ID NO: 1810066 - RNA, 18 nt, Human
cuggccccucaggguccc

SEQ ID NO: 1810067 - RNA, 20 nt, Human
cuggccccucagggucccug

SEQ ID NO: 1810068 - RNA, 21 nt, Human
cuggccccucagggucccugg

SEQ ID NO: 1810069 - RNA, 12 nt, Human
cuggcagcucag

SEQ ID NO: 1810070 - RNA, 13 nt, Human
cuggcagcucaga

SEQ ID NO: 1810071 - RNA, 14 nt, Human
cuggcagcucagag

SEQ ID NO: 1810072 - RNA, 16 nt, Human
cuggacugugugcuca

SEQ ID NO: 1810073 - RNA, 13 nt, Human
cuggccccucagg

SEQ ID NO: 1810074 - RNA, 15 nt, Human
cuggcagcucagaga

SEQ ID NO: 1810075 - RNA, 18 nt, Human
cuggggccaggcuggguc

SEQ ID NO: 1810076 - RNA, 16 nt, Human
cuggggccgaaagaac

SEQ ID NO: 1810077 - RNA, 18 nt, Human
cugggcagaaggaagacu

SEQ ID NO: 1810078 - RNA, 16 nt, Human
cugggcagaaggaaga

SEQ ID NO: 1810079 - RNA, 15 nt, Human
cuggggaaccugacc

SEQ ID NO: 1810080 - RNA, 16 nt, Human
cuggggaaccugaccc

SEQ ID NO: 1810081 - RNA, 17 nt, Human
cuggggaaccugacccc

SEQ ID NO: 1810082 - RNA, 17 nt, Human
cugggcagaaggaagac

SEQ ID NO: 1810083 - RNA, 14 nt, Human
cuggguucacugca

SEQ ID NO: 1810084 - RNA, 22 nt, Human
cuggguuccagcaauucuccug

SEQ ID NO: 1810085 - RNA, 18 nt, Human
cuggguuccuuccucuga

SEQ ID NO: 1810086 - RNA, 22 nt, Human
cuggguuccuuccucugagccu

SEQ ID NO: 1810087 - RNA, 23 nt, Human
cuggguuccuuccucugagccuu

SEQ ID NO: 1810088 - RNA, 15 nt, Human
cuggugacuuuccuc

SEQ ID NO: 1810089 - RNA, 20 nt, Human
cuggugacuuuccucuuugg

SEQ ID NO: 1810090 - RNA, 21 nt, Human
cuggugacuuuccucuuuggu

SEQ ID NO: 1810091 - RNA, 23 nt, Human
cuggguggcaccagcagccugga

SEQ ID NO: 1810092 - RNA, 22 nt, Human
cuggguggcaccagcagccugg

SEQ ID NO: 1810093 - RNA, 16 nt, Human
cuggguguggcgcagc

SEQ ID NO: 1810094 - RNA, 17 nt, Human
cuggguguggcgcagca

SEQ ID NO: 1810095 - RNA, 23 nt, Human
cuggugacuuuccucuuuggucu

SEQ ID NO: 1810096 - RNA, 14 nt, Human
cuuucacaaccuuc

SEQ ID NO: 1810097 - RNA, 23 nt, Human
cuuucaauaggaaaaacugauuu

SEQ ID NO: 1810098 - RNA, 16 nt, Human
cuuucacaaccuucug

SEQ ID NO: 1810099 - RNA, 23 nt, Human
cuuucagccaagaauucuuaaau

SEQ ID NO: 1810100 - RNA, 20 nt, Human
cuuucagccaagaauucuua

SEQ ID NO: 1810101 - RNA, 22 nt, Human
cuuuccugaggcugggcucccu

SEQ ID NO: 1810102 - RNA, 14 nt, Human
cuuuuaugugaaac

SEQ ID NO: 1810103 - RNA, 18 nt, Human
cuuuuaugugaaacaugu

SEQ ID NO: 1810104 - RNA, 14 nt, Human
cuuuuauaaacuuu

SEQ ID NO: 1810105 - RNA, 13 nt, Human
cuuuuauaaacuu

SEQ ID NO: 1810106 - RNA, 17 nt, Human
cuuucuacccagcgagc

SEQ ID NO: 1810107 - RNA, 15 nt, Human
cuuucuagccagagg

SEQ ID NO: 1810108 - RNA, 22 nt, Human
cuuugauauuuucaacgcagcc

SEQ ID NO: 1810109 - RNA, 16 nt, Human
cuuucuagccagagga

SEQ ID NO: 1810110 - RNA, 14 nt, Human
cuuugggcugcccu

SEQ ID NO: 1810111 - RNA, 15 nt, Human
cuuugggcugcccug

SEQ ID NO: 1810112 - RNA, 19 nt, Human
cuuugggcugcccuggugc

SEQ ID NO: 1810113 - RNA, 20 nt, Human
cuuugggcugcccuggugcu

SEQ ID NO: 1810114 - RNA, 21 nt, Human
cuuugggcugcccuggugcug

SEQ ID NO: 1810115 - RNA, 15 nt, Human
cuuuguaaauuguca

SEQ ID NO: 1810116 - RNA, 13 nt, Human
cuuuguaaugaaa

SEQ ID NO: 1810117 - RNA, 23 nt, Human
gaaaaugcuguauuagucacaga

SEQ ID NO: 1810118 - RNA, 21 nt, Human
gaaaauggaagacagcucuua

SEQ ID NO: 1810119 - RNA, 18 nt, Human
gaaaagaaaaaugagccu

SEQ ID NO: 1810120 - RNA, 14 nt, Human
gaaaaacugauuuu

SEQ ID NO: 1810121 - RNA, 19 nt, Human
gaaaauggacguguuauga

SEQ ID NO: 1810122 - RNA, 23 nt, Human
gaaaauggacguguuaugacucc

SEQ ID NO: 1810123 - RNA, 15 nt, Human
gaaaauguaugugua

SEQ ID NO: 1810124 - RNA, 20 nt, Human
cuuuuuuuuuuuugagacag

SEQ ID NO: 1810125 - RNA, 13 nt, Human
cuuuugugcauua

SEQ ID NO: 1810126 - RNA, 12 nt, Human
cuuuugugcauu

SEQ ID NO: 1810127 - RNA, 23 nt, Human
cuuuuuuggcugcugaaggcucg

SEQ ID NO: 1810128 - RNA, 23 nt, Human
cuuuuuuuuuuuuuaaagacaga

SEQ ID NO: 1810129 - RNA, 22 nt, Human
cuuuuuuuuuuuuuaaagacag

SEQ ID NO: 1810130 - RNA, 21 nt, Human
cuuuuuuuuuuuugagacaga

SEQ ID NO: 1810131 - RNA, 18 nt, Human
cuuuugucuaugggacuc

SEQ ID NO: 1810132 - RNA, 21 nt, Human
cuuuugguuaugaauacuuug

SEQ ID NO: 1810133 - RNA, 15 nt, Human
cuuuuggcauuuuac

SEQ ID NO: 1810134 - RNA, 23 nt, Human
cuuuugcccacacuugggagcaa

SEQ ID NO: 1810135 - RNA, 16 nt, Human
cuuuugccguuauuaa

SEQ ID NO: 1810136 - RNA, 13 nt, Human
cuuuuggagucag

SEQ ID NO: 1810137 - RNA, 13 nt, Human
cuuuugccauuga

SEQ ID NO: 1810138 - RNA, 22 nt, Human
gaaagggacuuggaagcuccgc

SEQ ID NO: 1810139 - RNA, 19 nt, Human
gaaagggacuuggaagcuc

SEQ ID NO: 1810140 - RNA, 20 nt, Human
gaaagggacgcuacccggga

SEQ ID NO: 1810141 - RNA, 19 nt, Human
gaaaucaccgaaaacgugg

SEQ ID NO: 1810142 - RNA, 21 nt, Human
gaaagaaaauaccaaggaaca

SEQ ID NO: 1810143 - RNA, 20 nt, Human
gaaagacuaucuaaauguug

SEQ ID NO: 1810144 - RNA, 21 nt, Human
gaaaggcuccaggagcagcca

SEQ ID NO: 1810145 - RNA, 22 nt, Human
gaaaggcuccaggagcagccac

SEQ ID NO: 1810146 - RNA, 17 nt, Human
cuuccugcaacaccuug

SEQ ID NO: 1810147 - RNA, 17 nt, Human
cuucuagaaccaggcaa

SEQ ID NO: 1810148 - RNA, 13 nt, Human
cuucuagaaccag

SEQ ID NO: 1810149 - RNA, 17 nt, Human
cuucuguugcugccuca

SEQ ID NO: 1810150 - RNA, 18 nt, Human
cuucuguugcugccucau

SEQ ID NO: 1810151 - RNA, 19 nt, Human
cuucuguugcugccucaug

SEQ ID NO: 1810152 - RNA, 20 nt, Human
cuucuguugcugccucaugc

SEQ ID NO: 1810153 - RNA, 23 nt, Human
cuucuucagagacuccugcaggc

SEQ ID NO: 1810154 - RNA, 21 nt, Human
cuucuguugcugccucaugcu

SEQ ID NO: 1810155 - RNA, 20 nt, Human
cuucugacccaugcugcccu

SEQ ID NO: 1810156 - RNA, 21 nt, Human
cuucugacccaugcugcccug

SEQ ID NO: 1810157 - RNA, 22 nt, Human
cuucugacccaugcugcccugu

SEQ ID NO: 1810158 - RNA, 23 nt, Human
cuucugacccaugcugcccugug

SEQ ID NO: 1810159 - RNA, 20 nt, Human
cuugacagggcacaccgggc

SEQ ID NO: 1810160 - RNA, 13 nt, Human
cuugacagggcac

SEQ ID NO: 1810161 - RNA, 15 nt, Human
cuugacagggcacac

SEQ ID NO: 1810162 - RNA, 14 nt, Human
cuugacagggcaca

SEQ ID NO: 1810163 - RNA, 19 nt, Human
cuugaauuguaaggaauga

SEQ ID NO: 1810164 - RNA, 12 nt, Human
cuugaugccugg

SEQ ID NO: 1810165 - RNA, 13 nt, Human
cuugaugccuggc

SEQ ID NO: 1810166 - RNA, 20 nt, Human
cuuggcgcugccccuggcag

SEQ ID NO: 1810167 - RNA, 12 nt, Human
cuuggcgcugcc

SEQ ID NO: 1810168 - RNA, 14 nt, Human
cuuggcgcugcccc

SEQ ID NO: 1810169 - RNA, 17 nt, Human
cuuggcgcugccccugg

SEQ ID NO: 1810170 - RNA, 17 nt, Human
cuuauggaacacucuga

SEQ ID NO: 1810171 - RNA, 19 nt, Human
cuuauggaacacucugaga

SEQ ID NO: 1810172 - RNA, 20 nt, Human
cuuauggaacacucugagac

SEQ ID NO: 1810173 - RNA, 21 nt, Human
cuuauggaacacucugagacu

SEQ ID NO: 1810174 - RNA, 21 nt, Human
cuucaccuuuguccccaccgc

SEQ ID NO: 1810175 - RNA, 22 nt, Human
cuucaccuuuguccccaccgca

SEQ ID NO: 1810176 - RNA, 15 nt, Human
cuucacggaagagcc

SEQ ID NO: 1810177 - RNA, 19 nt, Human
cuucacggaagagccuugc

SEQ ID NO: 1810178 - RNA, 13 nt, Human
cuuauggaacacu

SEQ ID NO: 1810179 - RNA, 16 nt, Human
cuuauggaacacucug

SEQ ID NO: 1810180 - RNA, 12 nt, Human
cugugcugaguc

SEQ ID NO: 1810181 - RNA, 14 nt, Human
cugugcugagucug

SEQ ID NO: 1810182 - RNA, 19 nt, Human
cugugcugagucugaaggc

SEQ ID NO: 1810183 - RNA, 15 nt, Human
cuucacuguaaaaua

SEQ ID NO: 1810184 - RNA, 17 nt, Human
cuucagagacuccugca

SEQ ID NO: 1810185 - RNA, 20 nt, Human
cuucagagacuccugcaggc

SEQ ID NO: 1810186 - RNA, 18 nt, Human
cuucagagacuccugcag

SEQ ID NO: 1810187 - RNA, 19 nt, Human
cuucagagacuccugcagg

SEQ ID NO: 1810188 - RNA, 21 nt, Human
cuuccagugaggcucugcccu

SEQ ID NO: 1810189 - RNA, 22 nt, Human
cuuccagugaggcucugcccuu

SEQ ID NO: 1810190 - RNA, 23 nt, Human
cuuccagugaggcucugcccuug

SEQ ID NO: 1810191 - RNA, 11 nt, Human
cuucccaccuc

SEQ ID NO: 1810192 - RNA, 11 nt, Human
cuuccauaauc

SEQ ID NO: 1810193 - RNA, 21 nt, Human
cuuccauaaucuggacuccuc

SEQ ID NO: 1810194 - RNA, 21 nt, Human
cuucccaccucucucacuccu

SEQ ID NO: 1810195 - RNA, 23 nt, Human
cuucccaccucucucacuccuug

SEQ ID NO: 1810196 - RNA, 12 nt, Human
gagugagcuggu

SEQ ID NO: 1810197 - RNA, 21 nt, Human
gagucccaccuuggcugcagg

SEQ ID NO: 1810198 - RNA, 24 nt, Human
gagugagcacuaaggugugcucug

SEQ ID NO: 1810199 - RNA, 12 nt, Human
gagugcagugag

SEQ ID NO: 1810200 - RNA, 11 nt, Human
gagugcaguga

SEQ ID NO: 1810201 - RNA, 14 nt, Human
gagucaccaagccc

SEQ ID NO: 1810202 - RNA, 13 nt, Human
gagucaccaagcc

SEQ ID NO: 1810203 - RNA, 15 nt, Human
gagucaccaagccca

SEQ ID NO: 1810204 - RNA, 20 nt, Human
gagucccaccuuggcugcag

SEQ ID NO: 1810205 - RNA, 16 nt, Human
gagucccaccuuggcu

SEQ ID NO: 1810206 - RNA, 14 nt, Human
gaggucuguucuuu

SEQ ID NO: 1810207 - RNA, 13 nt, Human
gaggucuguucuu

SEQ ID NO: 1810208 - RNA, 12 nt, Human
gaggugggaucc

SEQ ID NO: 1810209 - RNA, 11 nt, Human
gaggugggagg

SEQ ID NO: 1810210 - RNA, 20 nt, Human
gaguuguuacauuuuuaagu

SEQ ID NO: 1810211 - RNA, 16 nt, Human
gaguuguuacauuuuu

SEQ ID NO: 1810212 - RNA, 20 nt, Human
gaguuugggguaugggagag

SEQ ID NO: 1810213 - RNA, 20 nt, Human
gauauguaccuaacgaagua

SEQ ID NO: 1810214 - RNA, 16 nt, Human
gauacuugaaaauuaa

SEQ ID NO: 1810215 - RNA, 22 nt, Human
gauaugcuuguaacuaaaauaa

SEQ ID NO: 1810216 - RNA, 12 nt, Human
gauaugcuugua

SEQ ID NO: 1810217 - RNA, 18 nt, Human
gauaugcaguuuuccuua

SEQ ID NO: 1810218 - RNA, 17 nt, Human
gauacuugaaaauuaac

SEQ ID NO: 1810219 - RNA, 17 nt, Human
gauacgacaacuugcac

SEQ ID NO: 1810220 - RNA, 11 nt, Human
gauacuacagu

SEQ ID NO: 1810221 - RNA, 16 nt, Human
gauacuacaguuuguu

SEQ ID NO: 1810222 - RNA, 13 nt, Human
gauacccauccca

SEQ ID NO: 1810223 - RNA, 14 nt, Human
gauacccaucccau

SEQ ID NO: 1810224 - RNA, 14 nt, Human
gaugaucuuugcag

SEQ ID NO: 1810225 - RNA, 21 nt, Human
gaugaucuuugcagacaggca

SEQ ID NO: 1810226 - RNA, 20 nt, Human
gaugaucuuugcagacaggc

SEQ ID NO: 1810227 - RNA, 21 nt, Human
gaugaugaaaugaggucagag

SEQ ID NO: 1810228 - RNA, 15 nt, Human
gaucucuaacuucac

SEQ ID NO: 1810229 - RNA, 15 nt, Human
gauauuuuuuucuuu

SEQ ID NO: 1810230 - RNA, 16 nt, Human
gauauuuugcuuugug

SEQ ID NO: 1810231 - RNA, 12 nt, Human
gaucucuugagc

SEQ ID NO: 1810232 - RNA, 16 nt, Human
gaucucuugagccugg

SEQ ID NO: 1810233 - RNA, 17 nt, Human
gaucucuugagccuggg

SEQ ID NO: 1810234 - RNA, 14 nt, Human
gauuaccagggacu

SEQ ID NO: 1810235 - RNA, 18 nt, Human
gauuacugccuauuuuaa

SEQ ID NO: 1810236 - RNA, 20 nt, Human
gauuacaggugugaaccacc

SEQ ID NO: 1810237 - RNA, 20 nt, Human
gauuacaggugugagccacc

SEQ ID NO: 1810238 - RNA, 16 nt, Human
gcagccaggccacaag

SEQ ID NO: 1810239 - RNA, 13 nt, Human
gcagccaggccac

SEQ ID NO: 1810240 - RNA, 14 nt, Human
gcagccaggccaca

SEQ ID NO: 1810241 - RNA, 12 nt, Human
gcagccaggcca

SEQ ID NO: 1810242 - RNA, 14 nt, Human
gcagccacuauugu

SEQ ID NO: 1810243 - RNA, 16 nt, Human
gcagccacauuccuga

SEQ ID NO: 1810244 - RNA, 13 nt, Human
gcagggaaacagc

SEQ ID NO: 1810245 - RNA, 19 nt, Human
gcagggacuugaacccaua

SEQ ID NO: 1810246 - RNA, 10 nt, Human
gcagggaggg

SEQ ID NO: 1810247 - RNA, 13 nt, Human
gcagggagggccu

SEQ ID NO: 1810248 - RNA, 19 nt, Human
gcagcugcgguccacccag

SEQ ID NO: 1810249 - RNA, 17 nt, Human
gcagcugcgguccaccc

SEQ ID NO: 1810250 - RNA, 20 nt, Human
gcaggcucucaggccagcug

SEQ ID NO: 1810251 - RNA, 22 nt, Human
gcaggcucucaggccagcugcu

SEQ ID NO: 1810252 - RNA, 19 nt, Human
gcaggcuggcccugcccug

SEQ ID NO: 1810253 - RNA, 20 nt, Human
gcaggcuggcccugcccugg

SEQ ID NO: 1810254 - RNA, 21 nt, Human
gcaggcuggcccugcccuggu

SEQ ID NO: 1810255 - RNA, 15 nt, Human
gcaggcuggcccugc

SEQ ID NO: 1810256 - RNA, 16 nt, Human
gcaggcuggcccugcc

SEQ ID NO: 1810257 - RNA, 17 nt, Human
gcaggcuggcccugccc

SEQ ID NO: 1810258 - RNA, 18 nt, Human
gcaggcuggcccugcccu

SEQ ID NO: 1810259 - RNA, 14 nt, Human
gcaggcuggcccug

SEQ ID NO: 1810260 - RNA, 23 nt, Human
gcaggcucucaggccagcugcuu

SEQ ID NO: 1810261 - RNA, 20 nt, Human
gcauaccacuuuuguucuug

SEQ ID NO: 1810262 - RNA, 17 nt, Human
gcauaccacuuuuguuc

SEQ ID NO: 1810263 - RNA, 22 nt, Human
gcauaacguauaaaagccuguu

SEQ ID NO: 1810264 - RNA, 14 nt, Human
gcauacguacacau

SEQ ID NO: 1810265 - RNA, 13 nt, Human
gcacaugccucuc

SEQ ID NO: 1810266 - RNA, 21 nt, Human
gcacaucagcacgauuucugu

SEQ ID NO: 1810267 - RNA, 20 nt, Human
gcacaucagcacgauuucug

SEQ ID NO: 1810268 - RNA, 19 nt, Human
gcacaucagcacgauuucu

SEQ ID NO: 1810269 - RNA, 22 nt, Human
gcacaaucucggcucacugcau

SEQ ID NO: 1810270 - RNA, 21 nt, Human
gcacaaucucggcucacugca

SEQ ID NO: 1810271 - RNA, 22 nt, Human
gcacaugccucucucaggccaa

SEQ ID NO: 1810272 - RNA, 20 nt, Human
gcacaugccucucucaggcc

SEQ ID NO: 1810273 - RNA, 21 nt, Human
gcacaugccucucucaggcca

SEQ ID NO: 1810274 - RNA, 14 nt, Human
gcacaugccucucu

SEQ ID NO: 1810275 - RNA, 17 nt, Human
gcacaugccucucucag

SEQ ID NO: 1810276 - RNA, 18 nt, Human
gcacaugccucucucagg

SEQ ID NO: 1810277 - RNA, 19 nt, Human
gcacaugccucucucaggc

SEQ ID NO: 1810278 - RNA, 21 nt, Human
gcaccggcuggccuggccccu

SEQ ID NO: 1810279 - RNA, 23 nt, Human
gcaccggcuggccuggccccuca

SEQ ID NO: 1810280 - RNA, 19 nt, Human
gcaccggcuggccuggccc

SEQ ID NO: 1810281 - RNA, 13 nt, Human
gcaagugagagcu

SEQ ID NO: 1810282 - RNA, 23 nt, Human
gcaauaaggggagaguaacccug

SEQ ID NO: 1810283 - RNA, 22 nt, Human
gcacaagcuccaagcucccagg

SEQ ID NO: 1810284 - RNA, 23 nt, Human
gcacaagcuccaagcucccaggc

SEQ ID NO: 1810285 - RNA, 14 nt, Human
gcacaagcugcacc

SEQ ID NO: 1810286 - RNA, 21 nt, Human
gauucugaccuuaaaugcaac

SEQ ID NO: 1810287 - RNA, 20 nt, Human
gauucugaccuuaaaugcaa

SEQ ID NO: 1810288 - RNA, 23 nt, Human
gauucugaccuuaaaugcaacca

SEQ ID NO: 1810289 - RNA, 12 nt, Human
gcacugacauug

SEQ ID NO: 1810290 - RNA, 19 nt, Human
gcagagcagagaccauccc

SEQ ID NO: 1810291 - RNA, 20 nt, Human
gcagagcagagaccaucccu

SEQ ID NO: 1810292 - RNA, 24 nt, Human
gcagagcaccuuagacagucccug

SEQ ID NO: 1810293 - RNA, 12 nt, Human
gcagagcagaga

SEQ ID NO: 1810294 - RNA, 14 nt, Human
gcagagcagagacc

SEQ ID NO: 1810295 - RNA, 15 nt, Human
gcagagcagagacca

SEQ ID NO: 1810296 - RNA, 19 nt, Human
gcagagcaccuuagacagu

SEQ ID NO: 1810297 - RNA, 22 nt, Human
gcagagcaccuuagacaguccc

SEQ ID NO: 1810298 - RNA, 23 nt, Human
gcagagcaccuuagacagucccu

SEQ ID NO: 1810299 - RNA, 11 nt, Human
gaaugaauguc

SEQ ID NO: 1810300 - RNA, 14 nt, Human
gaaugaaugucagu

SEQ ID NO: 1810301 - RNA, 18 nt, Human
gaaugaaugucaguguga

SEQ ID NO: 1810302 - RNA, 22 nt, Human
gaaugaaugucagugugacuga

SEQ ID NO: 1810303 - RNA, 16 nt, Human
gaaggcucgagcaugc

SEQ ID NO: 1810304 - RNA, 17 nt, Human
gaaggcucgagcaugcc

SEQ ID NO: 1810305 - RNA, 19 nt, Human
gaaggcucgagcaugccug

SEQ ID NO: 1810306 - RNA, 19 nt, Human
gaagucuuuguacagacaa

SEQ ID NO: 1810307 - RNA, 20 nt, Human
gaagucuuuguacagacaac

SEQ ID NO: 1810308 - RNA, 18 nt, Human
gaagucuuuguacagaca

SEQ ID NO: 1810309 - RNA, 15 nt, Human
gaaguggggacagag

SEQ ID NO: 1810310 - RNA, 14 nt, Human
gaagcucagggccu

SEQ ID NO: 1810311 - RNA, 15 nt, Human
gaagcucagggccug

SEQ ID NO: 1810312 - RNA, 23 nt, Human
gaagcucagggccuggcucaggu

SEQ ID NO: 1810313 - RNA, 20 nt, Human
gaagcucagggccuggcuca

SEQ ID NO: 1810314 - RNA, 21 nt, Human
gaagcucagggccuggcucag

SEQ ID NO: 1810315 - RNA, 16 nt, Human
gaagcucagggccugg

SEQ ID NO: 1810316 - RNA, 17 nt, Human
gaagcucagggccuggc

SEQ ID NO: 1810317 - RNA, 18 nt, Human
gaagcucagggccuggcu

SEQ ID NO: 1810318 - RNA, 19 nt, Human
gaagcucagggccuggcuc

SEQ ID NO: 1810319 - RNA, 13 nt, Human
gaaauccagggug

SEQ ID NO: 1810320 - RNA, 18 nt, Human
gaaauccagggugguggu

SEQ ID NO: 1810321 - RNA, 14 nt, Human
gacacacagcucug

SEQ ID NO: 1810322 - RNA, 19 nt, Human
gacacacagcucuguccug

SEQ ID NO: 1810323 - RNA, 18 nt, Human
gacacacagcucuguccu

SEQ ID NO: 1810324 - RNA, 17 nt, Human
gacacacagcucugucc

SEQ ID NO: 1810325 - RNA, 15 nt, Human
gacacacagcucugu

SEQ ID NO: 1810326 - RNA, 23 nt, Human
gaauuuuggcugugucucccuuc

SEQ ID NO: 1810327 - RNA, 20 nt, Human
gaauuuugugcccccaugua

SEQ ID NO: 1810328 - RNA, 21 nt, Human
gaauuuugugcccccauguaa

SEQ ID NO: 1810329 - RNA, 18 nt, Human
gaauuuuauugacacagu

SEQ ID NO: 1810330 - RNA, 21 nt, Human
gaauuuuauuuuuugggaaaa

SEQ ID NO: 1810331 - RNA, 19 nt, Human
gaauuuuggcugugucucc

SEQ ID NO: 1810332 - RNA, 21 nt, Human
gacacacagcucuguccuggg

SEQ ID NO: 1810333 - RNA, 14 nt, Human
gacagugaaagaaa

SEQ ID NO: 1810334 - RNA, 11 nt, Human
gacagcuccuu

SEQ ID NO: 1810335 - RNA, 13 nt, Human
gacagcccuccau

SEQ ID NO: 1810336 - RNA, 13 nt, Human
gacagccuggcac

SEQ ID NO: 1810337 - RNA, 19 nt, Human
gacagccuggcacagggca

SEQ ID NO: 1810338 - RNA, 22 nt, Human
gacaggguuuugccauguuggc

SEQ ID NO: 1810339 - RNA, 20 nt, Human
gacaggguuuugccauguug

SEQ ID NO: 1810340 - RNA, 12 nt, Human
gacagacacagg

SEQ ID NO: 1810341 - RNA, 21 nt, Human
gacagcccgggcucugccucc

SEQ ID NO: 1810342 - RNA, 22 nt, Human
gacagcccgggcucugccuccc

SEQ ID NO: 1810343 - RNA, 23 nt, Human
gacagcccgggcucugccuccca

SEQ ID NO: 1810344 - RNA, 15 nt, Human
gacacugaugggcaa

SEQ ID NO: 1810345 - RNA, 16 nt, Human
gacacuuaaaaauggu

SEQ ID NO: 1810346 - RNA, 13 nt, Human
gacacugaugggc

SEQ ID NO: 1810347 - RNA, 12 nt, Human
gacucugucuca

SEQ ID NO: 1810348 - RNA, 15 nt, Human
gacuaggguccuggg

SEQ ID NO: 1810349 - RNA, 16 nt, Human
gacuaggguccugggg

SEQ ID NO: 1810350 - RNA, 18 nt, Human
gacuaggguccuggggaa

SEQ ID NO: 1810351 - RNA, 22 nt, Human
gacuaucuaaauguugaaagau

SEQ ID NO: 1810352 - RNA, 15 nt, Human
gagaaucacuugaac

SEQ ID NO: 1810353 - RNA, 14 nt, Human
gagaaucacuugaa

SEQ ID NO: 1810354 - RNA, 21 nt, Human
gagacccugucucaaaaaaag

SEQ ID NO: 1810355 - RNA, 11 nt, Human
gagaccugccc

SEQ ID NO: 1810356 - RNA, 12 nt, Human
gagaccugcccc

SEQ ID NO: 1810357 - RNA, 13 nt, Human
gagaccugccccu

SEQ ID NO: 1810358 - RNA, 22 nt, Human
gagaaggacccggaggggccug

SEQ ID NO: 1810359 - RNA, 23 nt, Human
gagaaggacccggaggggccugg

SEQ ID NO: 1810360 - RNA, 20 nt, Human
gagaaggacccggaggggcc

SEQ ID NO: 1810361 - RNA, 12 nt, Human
gagaaggaagcc

SEQ ID NO: 1810362 - RNA, 16 nt, Human
gagaagcggcuggcag

SEQ ID NO: 1810363 - RNA, 13 nt, Human
gagaagcggcugg

SEQ ID NO: 1810364 - RNA, 15 nt, Human
gagaagcggcuggca

SEQ ID NO: 1810365 - RNA, 11 nt, Human
gacuuuccucu

SEQ ID NO: 1810366 - RNA, 21 nt, Human
gacuuuucuuuguggcuuccu

SEQ ID NO: 1810367 - RNA, 23 nt, Human
gacuuuucuuucagccaagaauu

SEQ ID NO: 1810368 - RNA, 21 nt, Human
gagcagggcucagcggggaca

SEQ ID NO: 1810369 - RNA, 12 nt, Human
gagcaucaggcc

SEQ ID NO: 1810370 - RNA, 13 nt, Human
gagcaucaggcca

SEQ ID NO: 1810371 - RNA, 22 nt, Human
gagcaugccuggauggggcugc

SEQ ID NO: 1810372 - RNA, 14 nt, Human
gagcagggcucagc

SEQ ID NO: 1810373 - RNA, 22 nt, Human
gagcugccuguucagcuccagc

SEQ ID NO: 1810374 - RNA, 21 nt, Human
gagcugccuguucagcuccag

SEQ ID NO: 1810375 - RNA, 18 nt, Human
gagcggagaaaggaaggg

SEQ ID NO: 1810376 - RNA, 21 nt, Human
gagcggagaaaggaagggcug

SEQ ID NO: 1810377 - RNA, 22 nt, Human
gagccuugaacuuugaccucug

SEQ ID NO: 1810378 - RNA, 14 nt, Human
gagccuuccagggg

SEQ ID NO: 1810379 - RNA, 15 nt, Human
gagccuuccaggggu

SEQ ID NO: 1810380 - RNA, 16 nt, Human
gagccuuccaggggug

SEQ ID NO: 1810381 - RNA, 17 nt, Human
gagccuuccaggggugg

SEQ ID NO: 1810382 - RNA, 18 nt, Human
gagcugggugucaagagg

SEQ ID NO: 1810383 - RNA, 21 nt, Human
gagauugcaccacugcacucc

SEQ ID NO: 1810384 - RNA, 18 nt, Human
gagauugcaccacugcac

SEQ ID NO: 1810385 - RNA, 14 nt, Human
gagauguagccccu

SEQ ID NO: 1810386 - RNA, 13 nt, Human
gagauuuacaacu

SEQ ID NO: 1810387 - RNA, 14 nt, Human
gagaggcauccagu

SEQ ID NO: 1810388 - RNA, 17 nt, Human
gagacuccugcaggcag

SEQ ID NO: 1810389 - RNA, 18 nt, Human
gagacuccugcaggcagc

SEQ ID NO: 1810390 - RNA, 15 nt, Human
gagacuccugcaggc

SEQ ID NO: 1810391 - RNA, 16 nt, Human
gagacuccugcaggca

SEQ ID NO: 1810392 - RNA, 21 nt, Human
gagaugaugccaugggcccuc

SEQ ID NO: 1810393 - RNA, 22 nt, Human
gagaggcauccaguaucuugaa

SEQ ID NO: 1810394 - RNA, 23 nt, Human
gccugcuaauuccccagauugca

SEQ ID NO: 1810395 - RNA, 17 nt, Human
gccugcuaauuccccag

SEQ ID NO: 1810396 - RNA, 13 nt, Human
gccucggacuuag

SEQ ID NO: 1810397 - RNA, 13 nt, Human
gccugcuccagcu

SEQ ID NO: 1810398 - RNA, 17 nt, Human
gccuccaagcuccaucu

SEQ ID NO: 1810399 - RNA, 22 nt, Human
gccuccaauuuuuuaagugaaa

SEQ ID NO: 1810400 - RNA, 11 nt, Human
gccuccaugcu

SEQ ID NO: 1810401 - RNA, 19 nt, Human
gccuccuuugugaggaagc

SEQ ID NO: 1810402 - RNA, 20 nt, Human
gccuccuuugugaggaagcc

SEQ ID NO: 1810403 - RNA, 21 nt, Human
gccuccuuugugaggaagccg

SEQ ID NO: 1810404 - RNA, 20 nt, Human
gccuccauccugaggcucca

SEQ ID NO: 1810405 - RNA, 16 nt, Human
gccuccauccugaggc

SEQ ID NO: 1810406 - RNA, 13 nt, Human
gcgauucuucugc

SEQ ID NO: 1810407 - RNA, 14 nt, Human
gcgauucuucugcu

SEQ ID NO: 1810408 - RNA, 17 nt, Human
gcgauucuucugcuuca

SEQ ID NO: 1810409 - RNA, 16 nt, Human
gcuaauuuuucauuuu

SEQ ID NO: 1810410 - RNA, 18 nt, Human
gcuaauuuugaaaaacug

SEQ ID NO: 1810411 - RNA, 17 nt, Human
gcguuucuaugacacau

SEQ ID NO: 1810412 - RNA, 20 nt, Human
gcuacuguccuacccacccu

SEQ ID NO: 1810413 - RNA, 19 nt, Human
gcuacuguccuacccaccc

SEQ ID NO: 1810414 - RNA, 18 nt, Human
gcuacuguaaggcaauca

SEQ ID NO: 1810415 - RNA, 19 nt, Human
gcuacuguaaggcaaucau

SEQ ID NO: 1810416 - RNA, 11 nt, Human
gcuagaaauga

SEQ ID NO: 1810417 - RNA, 17 nt, Human
gcuacuugggaggcuga

SEQ ID NO: 1810418 - RNA, 14 nt, Human
gcgugcacacacca

SEQ ID NO: 1810419 - RNA, 18 nt, Human
gcgugcacacaccagagc

SEQ ID NO: 1810420 - RNA, 19 nt, Human
gcgugcacacaccagagcc

SEQ ID NO: 1810421 - RNA, 20 nt, Human
gcgugguggacaugcacagc

SEQ ID NO: 1810422 - RNA, 22 nt, Human
gccccugcugguucaggguugg

SEQ ID NO: 1810423 - RNA, 17 nt, Human
gccccugccucucugca

SEQ ID NO: 1810424 - RNA, 18 nt, Human
gccccugccucucugcag

SEQ ID NO: 1810425 - RNA, 15 nt, Human
gccccugccucucug

SEQ ID NO: 1810426 - RNA, 16 nt, Human
gccccugccucucugc

SEQ ID NO: 1810427 - RNA, 15 nt, Human
gccccuggaugcagc

SEQ ID NO: 1810428 - RNA, 16 nt, Human
gcccucacccuggggc

SEQ ID NO: 1810429 - RNA, 17 nt, Human
gcccucacccuggggcu

SEQ ID NO: 1810430 - RNA, 14 nt, Human
gccaugugccaggu

SEQ ID NO: 1810431 - RNA, 16 nt, Human
gccauguguuccaagg

SEQ ID NO: 1810432 - RNA, 15 nt, Human
gccauguguuccaag

SEQ ID NO: 1810433 - RNA, 13 nt, Human
gcccaggccccug

SEQ ID NO: 1810434 - RNA, 15 nt, Human
gcccaggccccugcc

SEQ ID NO: 1810435 - RNA, 16 nt, Human
gcccaggcaggucuug

SEQ ID NO: 1810436 - RNA, 14 nt, Human
gcccaggcaggucu

SEQ ID NO: 1810437 - RNA, 13 nt, Human
gcccaggcagguc

SEQ ID NO: 1810438 - RNA, 18 nt, Human
gcccaggccccugccacc

SEQ ID NO: 1810439 - RNA, 17 nt, Human
gcccaggccccugccac

SEQ ID NO: 1810440 - RNA, 22 nt, Human
gccaggccagagggagugacag

SEQ ID NO: 1810441 - RNA, 15 nt, Human
gccaggccagaggga

SEQ ID NO: 1810442 - RNA, 21 nt, Human
gccaggccacaagacccuugu

SEQ ID NO: 1810443 - RNA, 13 nt, Human
gccaggccacaag

SEQ ID NO: 1810444 - RNA, 18 nt, Human
gccaggccacaagacccu

SEQ ID NO: 1810445 - RNA, 15 nt, Human
gccaggcccucugcc

SEQ ID NO: 1810446 - RNA, 13 nt, Human
gccaggcccucug

SEQ ID NO: 1810447 - RNA, 14 nt, Human
gccaggcccucugc

SEQ ID NO: 1810448 - RNA, 16 nt, Human
gccauaugaaaaggcu

SEQ ID NO: 1810449 - RNA, 22 nt, Human
gccaguuggucccccuuccaug

SEQ ID NO: 1810450 - RNA, 23 nt, Human
gccaguuggucccccuuccaugg

SEQ ID NO: 1810451 - RNA, 16 nt, Human
gccaguuggucccccu

SEQ ID NO: 1810452 - RNA, 18 nt, Human
gccaguuggucccccuuc

SEQ ID NO: 1810453 - RNA, 20 nt, Human
gccaguuggucccccuucca

SEQ ID NO: 1810454 - RNA, 21 nt, Human
gccaguuggucccccuuccau

SEQ ID NO: 1810455 - RNA, 13 nt, Human
gccagugugacaa

SEQ ID NO: 1810456 - RNA, 13 nt, Human
gccaguugguccc

SEQ ID NO: 1810457 - RNA, 18 nt, Human
gcuuuugucuaugggacu

SEQ ID NO: 1810458 - RNA, 15 nt, Human
gcuuuuggucugugu

SEQ ID NO: 1810459 - RNA, 18 nt, Human
ggaaaauuuuaaaaauac

SEQ ID NO: 1810460 - RNA, 16 nt, Human
ggaaacccagcucugg

SEQ ID NO: 1810461 - RNA, 15 nt, Human
gcuuuuuuaucaugu

SEQ ID NO: 1810462 - RNA, 18 nt, Human
gcuuuuuuaucaugugaa

SEQ ID NO: 1810463 - RNA, 20 nt, Human
gcuuuuuuaucaugugaaau

SEQ ID NO: 1810464 - RNA, 12 nt, Human
gcuuuugugcau

SEQ ID NO: 1810465 - RNA, 14 nt, Human
gcuuugaucccuuc

SEQ ID NO: 1810466 - RNA, 17 nt, Human
gcuuugaucccuucuua

SEQ ID NO: 1810467 - RNA, 14 nt, Human
ggaaaugggcagag

SEQ ID NO: 1810468 - RNA, 16 nt, Human
ggaaaugggcagagca

SEQ ID NO: 1810469 - RNA, 17 nt, Human
ggaaaugggcagagcag

SEQ ID NO: 1810470 - RNA, 18 nt, Human
ggaaaugggcagagcaga

SEQ ID NO: 1810471 - RNA, 22 nt, Human
ggaaaugggcagagcagagacc

SEQ ID NO: 1810472 - RNA, 17 nt, Human
ggaaaugucaacaagua

SEQ ID NO: 1810473 - RNA, 15 nt, Human
ggaacaaggcaaggc

SEQ ID NO: 1810474 - RNA, 17 nt, Human
ggaacaaggcaaggcug

SEQ ID NO: 1810475 - RNA, 21 nt, Human
ggaacaaggcaaggcugucaa

SEQ ID NO: 1810476 - RNA, 14 nt, Human
ggaagacaauguga

SEQ ID NO: 1810477 - RNA, 16 nt, Human
ggaagacaaugugaaa

SEQ ID NO: 1810478 - RNA, 17 nt, Human
ggaacaccauaggucac

SEQ ID NO: 1810479 - RNA, 13 nt, Human
ggaacaccuccuc

SEQ ID NO: 1810480 - RNA, 23 nt, Human
ggaacaaggcaaggcugucaauu

SEQ ID NO: 1810481 - RNA, 15 nt, Human
ggaacacuccuucac

SEQ ID NO: 1810482 - RNA, 17 nt, Human
ggaacugaacauuccag

SEQ ID NO: 1810483 - RNA, 19 nt, Human
ggaacacuccuucacagau

SEQ ID NO: 1810484 - RNA, 22 nt, Human
ggaagacaaugugaaaagaaaa

SEQ ID NO: 1810485 - RNA, 17 nt, Human
ggaagacuucaucccuc

SEQ ID NO: 1810486 - RNA, 20 nt, Human
ggaagacuucaucccucugg

SEQ ID NO: 1810487 - RNA, 17 nt, Human
gcuuguaaauagcucag

SEQ ID NO: 1810488 - RNA, 16 nt, Human
gcuugaccgugaggcc

SEQ ID NO: 1810489 - RNA, 22 nt, Human
gcuugaccuuuaagagaaauga

SEQ ID NO: 1810490 - RNA, 23 nt, Human
gcuugaccgugaggccagagaca

SEQ ID NO: 1810491 - RNA, 18 nt, Human
gcuugaccuuuaagagaa

SEQ ID NO: 1810492 - RNA, 19 nt, Human
gcuuguaaauagcucaggu

SEQ ID NO: 1810493 - RNA, 18 nt, Human
gcuuguaaauagcucagg

SEQ ID NO: 1810494 - RNA, 22 nt, Human
gcuuuccccaugucucgacuca

SEQ ID NO: 1810495 - RNA, 21 nt, Human
gcuuuccccaugucucgacuc

SEQ ID NO: 1810496 - RNA, 16 nt, Human
gcuuuccucuuccuga

SEQ ID NO: 1810497 - RNA, 20 nt, Human
gcuugaccgugaggccagag

SEQ ID NO: 1810498 - RNA, 15 nt, Human
gcuucuucagagacu

SEQ ID NO: 1810499 - RNA, 12 nt, Human
gcuucuucagag

SEQ ID NO: 1810500 - RNA, 23 nt, Human
gcuuccagugaggcucugcccuu

SEQ ID NO: 1810501 - RNA, 22 nt, Human
gcuuccagugaggcucugcccu

SEQ ID NO: 1810502 - RNA, 12 nt, Human
gcugugccucug

SEQ ID NO: 1810503 - RNA, 14 nt, Human
gcuguuggcugggg

SEQ ID NO: 1810504 - RNA, 13 nt, Human
gcuguuggcuggg

SEQ ID NO: 1810505 - RNA, 22 nt, Human
gcuuacaagccagcuggagaaa

SEQ ID NO: 1810506 - RNA, 19 nt, Human
gcuuacaagccagcuggag

SEQ ID NO: 1810507 - RNA, 13 nt, Human
gcuuacaagccag

SEQ ID NO: 1810508 - RNA, 14 nt, Human
gcuucaguggcagc

SEQ ID NO: 1810509 - RNA, 15 nt, Human
gcuucaguggcagcu

SEQ ID NO: 1810510 - RNA, 16 nt, Human
gcuucaaauuguaagc

SEQ ID NO: 1810511 - RNA, 18 nt, Human
gcuucaaggauccugagc

SEQ ID NO: 1810512 - RNA, 14 nt, Human
gcuucaaggauccu

SEQ ID NO: 1810513 - RNA, 23 nt, Human
gcugguucaggguuggccccugc

SEQ ID NO: 1810514 - RNA, 19 nt, Human
gcuguauuagucacagaga

SEQ ID NO: 1810515 - RNA, 19 nt, Human
gcuccucuccccagcaagu

SEQ ID NO: 1810516 - RNA, 16 nt, Human
gcuccucuccccagca

SEQ ID NO: 1810517 - RNA, 19 nt, Human
gcucuacugaggugcuaug

SEQ ID NO: 1810518 - RNA, 18 nt, Human
gcucucaaguuaucaggg

SEQ ID NO: 1810519 - RNA, 20 nt, Human
gcucucaggccagcugcuug

SEQ ID NO: 1810520 - RNA, 19 nt, Human
gcucucaggccagcugcuu

SEQ ID NO: 1810521 - RNA, 17 nt, Human
gcucucaggccagcugc

SEQ ID NO: 1810522 - RNA, 18 nt, Human
gcucucaggccagcugcu

SEQ ID NO: 1810523 - RNA, 14 nt, Human
gcuccagcucacca

SEQ ID NO: 1810524 - RNA, 13 nt, Human
gcuccagcucacc

SEQ ID NO: 1810525 - RNA, 17 nt, Human
gcuccagcucaccagcc

SEQ ID NO: 1810526 - RNA, 15 nt, Human
gcuccucuccccagc

SEQ ID NO: 1810527 - RNA, 19 nt, Human
gcuccucccggugcccaag

SEQ ID NO: 1810528 - RNA, 16 nt, Human
gcuccucccggugccc

SEQ ID NO: 1810529 - RNA, 23 nt, Human
gcuccagacacauguccaagaag

SEQ ID NO: 1810530 - RNA, 18 nt, Human
gcuccagacacaugucca

SEQ ID NO: 1810531 - RNA, 21 nt, Human
gcuccagacacauguccaaga

SEQ ID NO: 1810532 - RNA, 9 nt, Human
gcuccagac

SEQ ID NO: 1810533 - RNA, 20 nt, Human
gcuccacuuggucugugaga

SEQ ID NO: 1810534 - RNA, 14 nt, Human
gcucuguccuggga

SEQ ID NO: 1810535 - RNA, 23 nt, Human
gcucugucgcccaggcuggagug

SEQ ID NO: 1810536 - RNA, 17 nt, Human
gcucuggagcccacugu

SEQ ID NO: 1810537 - RNA, 13 nt, Human
gcugacagacaca

SEQ ID NO: 1810538 - RNA, 12 nt, Human
gcugagccucag

SEQ ID NO: 1810539 - RNA, 16 nt, Human
gcugagccucagucuc

SEQ ID NO: 1810540 - RNA, 20 nt, Human
gcugaacuuguuuucuggga

SEQ ID NO: 1810541 - RNA, 23 nt, Human
gcugaaggcucgagcaugccugg

SEQ ID NO: 1810542 - RNA, 17 nt, Human
gcugaauacagaggcaa

SEQ ID NO: 1810543 - RNA, 22 nt, Human
gcucugaucauccacugugcca

SEQ ID NO: 1810544 - RNA, 21 nt, Human
gcucugaucauccacugugcc

SEQ ID NO: 1810545 - RNA, 15 nt, Human
gcucugcccauccug

SEQ ID NO: 1810546 - RNA, 15 nt, Human
gcucuggagcccacu

SEQ ID NO: 1810547 - RNA, 16 nt, Human
gcucuggagcccacug

SEQ ID NO: 1810548 - RNA, 21 nt, Human
gcucugcccauccugccccug

SEQ ID NO: 1810549 - RNA, 20 nt, Human
gcucugaucauccacugugc

SEQ ID NO: 1810550 - RNA, 13 nt, Human
gcugccauccagg

SEQ ID NO: 1810551 - RNA, 12 nt, Human
gcugccauccag

SEQ ID NO: 1810552 - RNA, 16 nt, Human
gcugcacccucaggca

SEQ ID NO: 1810553 - RNA, 13 nt, Human
gcugcacccucag

SEQ ID NO: 1810554 - RNA, 15 nt, Human
gcugcacccucaggc

SEQ ID NO: 1810555 - RNA, 12 nt, Human
gcugcugacagu

SEQ ID NO: 1810556 - RNA, 17 nt, Human
gcugccauccagguuca

SEQ ID NO: 1810557 - RNA, 13 nt, Human
gcugccccuggca

SEQ ID NO: 1810558 - RNA, 15 nt, Human
gcugccccuggcagc

SEQ ID NO: 1810559 - RNA, 16 nt, Human
gcugccccuggcagcc

SEQ ID NO: 1810560 - RNA, 17 nt, Human
gcugccccuggcagccc

SEQ ID NO: 1810561 - RNA, 17 nt, Human
ggccaaacucaccugcc

SEQ ID NO: 1810562 - RNA, 21 nt, Human
ggccaaacucaccugccccuc

SEQ ID NO: 1810563 - RNA, 14 nt, Human
ggccaggcuggucu

SEQ ID NO: 1810564 - RNA, 18 nt, Human
ggccaggcuggucucaaa

SEQ ID NO: 1810565 - RNA, 16 nt, Human
ggccaggcuggucuca

SEQ ID NO: 1810566 - RNA, 16 nt, Human
ggccagugugacaagg

SEQ ID NO: 1810567 - RNA, 24 nt, Human
ggcacugcuuccagugaggcucug

SEQ ID NO: 1810568 - RNA, 15 nt, Human
ggcaccagcagccug

SEQ ID NO: 1810569 - RNA, 16 nt, Human
ggcaccagcagccugg

SEQ ID NO: 1810570 - RNA, 17 nt, Human
ggcagugggagcugccu

SEQ ID NO: 1810571 - RNA, 18 nt, Human
ggcauuuuacuguacaga

SEQ ID NO: 1810572 - RNA, 19 nt, Human
ggcagugggagcugccugu

SEQ ID NO: 1810573 - RNA, 18 nt, Human
ggcagugggagcugccug

SEQ ID NO: 1810574 - RNA, 18 nt, Human
ggcauccaguaucuugaa

SEQ ID NO: 1810575 - RNA, 15 nt, Human
ggcccgacagccugg

SEQ ID NO: 1810576 - RNA, 13 nt, Human
ggcccuuccucuc

SEQ ID NO: 1810577 - RNA, 15 nt, Human
ggcccuuccucucca

SEQ ID NO: 1810578 - RNA, 18 nt, Human
ggcccuuccucuccacug

SEQ ID NO: 1810579 - RNA, 16 nt, Human
ggcccuucucuccagc

SEQ ID NO: 1810580 - RNA, 17 nt, Human
ggcccuucucuccagcc

SEQ ID NO: 1810581 - RNA, 17 nt, Human
ggcccuuccucuccacu

SEQ ID NO: 1810582 - RNA, 19 nt, Human
ggcccuucucuccagcccc

SEQ ID NO: 1810583 - RNA, 18 nt, Human
ggcccuucucuccagccc

SEQ ID NO: 1810584 - RNA, 23 nt, Human
ggcucagcggggacagcuccuuc

SEQ ID NO: 1810585 - RNA, 22 nt, Human
ggcucagcggggacagcuccuu

SEQ ID NO: 1810586 - RNA, 21 nt, Human
ggcucagcggggacagcuccu

SEQ ID NO: 1810587 - RNA, 23 nt, Human
ggcucagcaaaagaugcuucuca

SEQ ID NO: 1810588 - RNA, 19 nt, Human
ggcgugcaguggugcgauc

SEQ ID NO: 1810589 - RNA, 14 nt, Human
ggcgugcaguggug

SEQ ID NO: 1810590 - RNA, 16 nt, Human
ggcucacugcagccuc

SEQ ID NO: 1810591 - RNA, 17 nt, Human
ggcucacugcagccuca

SEQ ID NO: 1810592 - RNA, 16 nt, Human
ggcucacugcauccuc

SEQ ID NO: 1810593 - RNA, 19 nt, Human
ggcucacugcauccuccgc

SEQ ID NO: 1810594 - RNA, 12 nt, Human
ggccuucucuga

SEQ ID NO: 1810595 - RNA, 23 nt, Human
ggccuucggccuccauccugagg

SEQ ID NO: 1810596 - RNA, 20 nt, Human
ggccuguggaucaaauccag

SEQ ID NO: 1810597 - RNA, 21 nt, Human
ggccugugucuaguuguuuga

SEQ ID NO: 1810598 - RNA, 21 nt, Human
ggccuggccagaugcaccagc

SEQ ID NO: 1810599 - RNA, 14 nt, Human
ggccuuuggcuuca

SEQ ID NO: 1810600 - RNA, 13 nt, Human
ggccuuuggcuuc

SEQ ID NO: 1810601 - RNA, 16 nt, Human
ggccuucucugaagga

SEQ ID NO: 1810602 - RNA, 15 nt, Human
ggccuucucugaagg

SEQ ID NO: 1810603 - RNA, 23 nt, Human
ggccuccaaguccacaguggaac

SEQ ID NO: 1810604 - RNA, 13 nt, Human
ggccuccauccug

SEQ ID NO: 1810605 - RNA, 15 nt, Human
ggccugagcugggau

SEQ ID NO: 1810606 - RNA, 21 nt, Human
ggagcugccuguucagcucca

SEQ ID NO: 1810607 - RNA, 12 nt, Human
ggagcugccugu

SEQ ID NO: 1810608 - RNA, 22 nt, Human
ggagccccgaggccuucucuga

SEQ ID NO: 1810609 - RNA, 16 nt, Human
ggagccccgaggccuu

SEQ ID NO: 1810610 - RNA, 16 nt, Human
ggagccaauggagacu

SEQ ID NO: 1810611 - RNA, 20 nt, Human
ggaggaaggaaacccagcuc

SEQ ID NO: 1810612 - RNA, 23 nt, Human
ggaggaaggaaacccagcucugg

SEQ ID NO: 1810613 - RNA, 19 nt, Human
ggaggaaggaaacccagcu

SEQ ID NO: 1810614 - RNA, 12 nt, Human
ggaggccagccu

SEQ ID NO: 1810615 - RNA, 11 nt, Human
ggaggccagcc

SEQ ID NO: 1810616 - RNA, 14 nt, Human
ggaggugaccccag

SEQ ID NO: 1810617 - RNA, 14 nt, Human
ggaggucgaggcag

SEQ ID NO: 1810618 - RNA, 20 nt, Human
ggaggucaaggcugcaguga

SEQ ID NO: 1810619 - RNA, 16 nt, Human
ggaggggggagguggg

SEQ ID NO: 1810620 - RNA, 16 nt, Human
ggagcaucagugcccu

SEQ ID NO: 1810621 - RNA, 16 nt, Human
ggcacagggcaguggg

SEQ ID NO: 1810622 - RNA, 22 nt, Human
ggcacaaucucggcucacugca

SEQ ID NO: 1810623 - RNA, 24 nt, Human
ggcacagaaaauggaagacagcuc

SEQ ID NO: 1810624 - RNA, 16 nt, Human
ggauguucugggacac

SEQ ID NO: 1810625 - RNA, 22 nt, Human
ggauguugaaaaaguucugcag

SEQ ID NO: 1810626 - RNA, 15 nt, Human
ggauguucugggaca

SEQ ID NO: 1810627 - RNA, 21 nt, Human
ggaguuggaagugugugaucu

SEQ ID NO: 1810628 - RNA, 15 nt, Human
ggaguucugguuccu

SEQ ID NO: 1810629 - RNA, 14 nt, Human
ggaguggccacaga

SEQ ID NO: 1810630 - RNA, 18 nt, Human
ggauggauuuccagccaa

SEQ ID NO: 1810631 - RNA, 21 nt, Human
ggauguacaaggacagccccu

SEQ ID NO: 1810632 - RNA, 16 nt, Human
ggauggggcugcaccg

SEQ ID NO: 1810633 - RNA, 15 nt, Human
ggauccuccaggugc

SEQ ID NO: 1810634 - RNA, 14 nt, Human
ggauccuccaggug

SEQ ID NO: 1810635 - RNA, 13 nt, Human
ggauccugagcca

SEQ ID NO: 1810636 - RNA, 14 nt, Human
ggauccugagccag

SEQ ID NO: 1810637 - RNA, 15 nt, Human
ggagugcagugagcc

SEQ ID NO: 1810638 - RNA, 13 nt, Human
aaagcaaaugucu

SEQ ID NO: 1810639 - RNA, 21 nt, Human
gguccugcugcaguugccagu

SEQ ID NO: 1810640 - RNA, 23 nt, Human
gguccugcugcaguugccaguca

SEQ ID NO: 1810641 - RNA, 22 nt, Human
aaagauucugaccuuaaaugca

SEQ ID NO: 1810642 - RNA, 13 nt, Human
aaagcaaaggaga

SEQ ID NO: 1810643 - RNA, 13 nt, Human
ggucggaaaacau

SEQ ID NO: 1810644 - RNA, 17 nt, Human
ggucuacacugugcuga

SEQ ID NO: 1810645 - RNA, 18 nt, Human
ggucgcuugggaauuuua

SEQ ID NO: 1810646 - RNA, 14 nt, Human
ggucggaaaacaug

SEQ ID NO: 1810647 - RNA, 21 nt, Human
gguggaugccugguggcagcu

SEQ ID NO: 1810648 - RNA, 14 nt, Human
gguggaugccuggu

SEQ ID NO: 1810649 - RNA, 22 nt, Human
aaagcagcguuucuaugacaca

SEQ ID NO: 1810650 - RNA, 18 nt, Human
aaagcagcguuucuauga

SEQ ID NO: 1810651 - RNA, 16 nt, Human
aaagcagcguuucuau

SEQ ID NO: 1810652 - RNA, 17 nt, Human
aaagcaggcagaacuca

SEQ ID NO: 1810653 - RNA, 19 nt, Human
aaagcaggcagaacucauc

SEQ ID NO: 1810654 - RNA, 17 nt, Human
aaagcagggacuugaac

SEQ ID NO: 1810655 - RNA, 19 nt, Human
ggugcugggccccugccuc

SEQ ID NO: 1810656 - RNA, 20 nt, Human
ggugcugggccccugccucu

SEQ ID NO: 1810657 - RNA, 18 nt, Human
ggugcaaugaccuuucaa

SEQ ID NO: 1810658 - RNA, 19 nt, Human
ggugcaaugaccuuucaau

SEQ ID NO: 1810659 - RNA, 20 nt, Human
ggugcaaugaccuuucaaua

SEQ ID NO: 1810660 - RNA, 20 nt, Human
gguaacaggcagauacagga

SEQ ID NO: 1810661 - RNA, 14 nt, Human
gguaacaggcagau

SEQ ID NO: 1810662 - RNA, 18 nt, Human
gguaacuagggaagauaa

SEQ ID NO: 1810663 - RNA, 17 nt, Human
ggguuucuaaagcugcc

SEQ ID NO: 1810664 - RNA, 14 nt, Human
gguaaucgaccugc

SEQ ID NO: 1810665 - RNA, 17 nt, Human
gguaaucgaccugccuc

SEQ ID NO: 1810666 - RNA, 18 nt, Human
gguaaucgaccugccucg

SEQ ID NO: 1810667 - RNA, 24 nt, Human
gguacaaccuguucugcuuuccuc

SEQ ID NO: 1810668 - RNA, 23 nt, Human
gguacaaccuguucugcuuuccu

SEQ ID NO: 1810669 - RNA, 17 nt, Human
ggguggaugccuggugg

SEQ ID NO: 1810670 - RNA, 15 nt, Human
ggguggcaccagcag

SEQ ID NO: 1810671 - RNA, 13 nt, Human
ggguggaugccug

SEQ ID NO: 1810672 - RNA, 11 nt, Human
ggggccuggca

SEQ ID NO: 1810673 - RNA, 12 nt, Human
ggggccuggcag

SEQ ID NO: 1810674 - RNA, 19 nt, Human
ggguggcaccagcagccug

SEQ ID NO: 1810675 - RNA, 20 nt, Human
ggguggggaccucaggccug

SEQ ID NO: 1810676 - RNA, 17 nt, Human
ggguguggcgcagcaua

SEQ ID NO: 1810677 - RNA, 12 nt, Human
ggguggugaccu

SEQ ID NO: 1810678 - RNA, 18 nt, Human
ggguggggggggugcugg

SEQ ID NO: 1810679 - RNA, 15 nt, Human
gguccauagagagca

SEQ ID NO: 1810680 - RNA, 22 nt, Human
aaacuuuaccuuuuuuauacau

SEQ ID NO: 1810681 - RNA, 17 nt, Human
aaacuuuaccuuuuuua

SEQ ID NO: 1810682 - RNA, 18 nt, Human
aaacuuuacuauggcccu

SEQ ID NO: 1810683 - RNA, 12 nt, Human
aaacuuuacuau

SEQ ID NO: 1810684 - RNA, 18 nt, Human
aaagaaguggggacagag

SEQ ID NO: 1810685 - RNA, 16 nt, Human
aaagaauagaagcuaa

SEQ ID NO: 1810686 - RNA, 13 nt, Human
aaagacaccuacu

SEQ ID NO: 1810687 - RNA, 19 nt, Human
aaagacaccuacugagugg

SEQ ID NO: 1810688 - RNA, 17 nt, Human
aaagacuaucuaaaugu

SEQ ID NO: 1810689 - RNA, 16 nt, Human
gguccacccaggagcc

SEQ ID NO: 1810690 - RNA, 15 nt, Human
gguccacccaggagc

SEQ ID NO: 1810691 - RNA, 13 nt, Human
gguccacccagga

SEQ ID NO: 1810692 - RNA, 12 nt, Human
gguccacccagg

SEQ ID NO: 1810693 - RNA, 17 nt, Human
gguccacccaggagccc

SEQ ID NO: 1810694 - RNA, 22 nt, Human
gguaugaucacggcucacugca

SEQ ID NO: 1810695 - RNA, 14 nt, Human
gguaugcaaucaaa

SEQ ID NO: 1810696 - RNA, 16 nt, Human
gguccacaacacacag

SEQ ID NO: 1810697 - RNA, 14 nt, Human
gguagcuuuucccu

SEQ ID NO: 1810698 - RNA, 16 nt, Human
gguuuagaaagcuugc

SEQ ID NO: 1810699 - RNA, 19 nt, Human
gguuccuuccucugagccu

SEQ ID NO: 1810700 - RNA, 20 nt, Human
gguuccuuccucugagccuu

SEQ ID NO: 1810701 - RNA, 19 nt, Human
gguuucaccauguuggcca

SEQ ID NO: 1810702 - RNA, 13 nt, Human
gguuucagaaaug

SEQ ID NO: 1810703 - RNA, 12 nt, Human
gguuucagaaau

SEQ ID NO: 1810704 - RNA, 15 nt, Human
gguuucagaaaugug

SEQ ID NO: 1810705 - RNA, 14 nt, Human
gguuucagaaaugu

SEQ ID NO: 1810706 - RNA, 21 nt, Human
gguucccuuugacgccauccc

SEQ ID NO: 1810707 - RNA, 16 nt, Human
gguuccuccccuccuc

SEQ ID NO: 1810708 - RNA, 22 nt, Human
gguucccuuugacgccauccca

SEQ ID NO: 1810709 - RNA, 23 nt, Human
gguuccagcaauucuccugccuc

SEQ ID NO: 1810710 - RNA, 15 nt, Human
gguuccccuguucac

SEQ ID NO: 1810711 - RNA, 24 nt, Human
gguuccagcaauucuccugccuca

SEQ ID NO: 1810712 - RNA, 21 nt, Human
gguucaggguuggccccugcc

SEQ ID NO: 1810713 - RNA, 18 nt, Human
gguucaggguuggccccu

SEQ ID NO: 1810714 - RNA, 22 nt, Human
gguucaggguuggccccugccc

SEQ ID NO: 1810715 - RNA, 13 nt, Human
ggugugcucugau

SEQ ID NO: 1810716 - RNA, 21 nt, Human
ggugugcggccuuuggcuuca

SEQ ID NO: 1810717 - RNA, 12 nt, Human
gguguggaagag

SEQ ID NO: 1810718 - RNA, 18 nt, Human
ggugugagucaccaagcc

SEQ ID NO: 1810719 - RNA, 16 nt, Human
ggugugacugaauuuc

SEQ ID NO: 1810720 - RNA, 16 nt, Human
ggugugaccacugcag

SEQ ID NO: 1810721 - RNA, 13 nt, Human
ggugucgggcaug

SEQ ID NO: 1810722 - RNA, 16 nt, Human
ggugucgggcaugaca

SEQ ID NO: 1810723 - RNA, 17 nt, Human
gguggggggggugcugg

SEQ ID NO: 1810724 - RNA, 15 nt, Human
gguggggucacucug

SEQ ID NO: 1810725 - RNA, 23 nt, Human
gguggggucacucuggcagcuca

SEQ ID NO: 1810726 - RNA, 17 nt, Human
gguggggcagcuugagg

SEQ ID NO: 1810727 - RNA, 13 nt, Human
gguggggcagcuu

SEQ ID NO: 1810728 - RNA, 19 nt, Human
ggugggauccuccaggugc

SEQ ID NO: 1810729 - RNA, 16 nt, Human
aaagccuguuuaagag

SEQ ID NO: 1810730 - RNA, 18 nt, Human
aaagccuguuuaagagac

SEQ ID NO: 1810731 - RNA, 20 nt, Human
ggugggaggauugcuugagc

SEQ ID NO: 1810732 - RNA, 14 nt, Human
ggugggauccucca

SEQ ID NO: 1810733 - RNA, 15 nt, Human
ggugggauccuccag

SEQ ID NO: 1810734 - RNA, 12 nt, Human
aaauaaugugaa

SEQ ID NO: 1810735 - RNA, 13 nt, Human
aaauaaugugaaa

SEQ ID NO: 1810736 - RNA, 23 nt, Human
aaaguuucucuuuucaaaacauu

SEQ ID NO: 1810737 - RNA, 21 nt, Human
aaaguuucucuuuucaaaaca

SEQ ID NO: 1810738 - RNA, 14 nt, Human
aaaguuuguuugcu

SEQ ID NO: 1810739 - RNA, 16 nt, Human
aaaguuuguugaaaca

SEQ ID NO: 1810740 - RNA, 23 nt, Human
aaaguucccuacuuccugugacu

SEQ ID NO: 1810741 - RNA, 12 nt, Human
aaaguggugaga

SEQ ID NO: 1810742 - RNA, 21 nt, Human
aaaguucccuacuuccuguga

SEQ ID NO: 1810743 - RNA, 20 nt, Human
ggggacagcuccuucugucc

SEQ ID NO: 1810744 - RNA, 14 nt, Human
ggggacagcuccuu

SEQ ID NO: 1810745 - RNA, 12 nt, Human
ggggacagcucc

SEQ ID NO: 1810746 - RNA, 18 nt, Human
aaacauccuacaagacac

SEQ ID NO: 1810747 - RNA, 22 nt, Human
aaacauccuacaagacacagug

SEQ ID NO: 1810748 - RNA, 20 nt, Human
aaacaagcacuaaacaaaga

SEQ ID NO: 1810749 - RNA, 16 nt, Human
aaacacauuuuucuua

SEQ ID NO: 1810750 - RNA, 20 nt, Human
aaacaagaccacguuucuaa

SEQ ID NO: 1810751 - RNA, 12 nt, Human
aaaaugugugug

SEQ ID NO: 1810752 - RNA, 13 nt, Human
aaaaugucuuuau

SEQ ID NO: 1810753 - RNA, 22 nt, Human
gggcuggguucuacccaggugc

SEQ ID NO: 1810754 - RNA, 15 nt, Human
aaaaugugauaugua

SEQ ID NO: 1810755 - RNA, 21 nt, Human
gggcugcaugcgggcuuccuc

SEQ ID NO: 1810756 - RNA, 18 nt, Human
gggcugcaugcgggcuuc

SEQ ID NO: 1810757 - RNA, 10 nt, Human
gggcucagca

SEQ ID NO: 1810758 - RNA, 22 nt, Human
gggcugcaccggcuggccuggc

SEQ ID NO: 1810759 - RNA, 18 nt, Human
gggcucagcaaaagaugc

SEQ ID NO: 1810760 - RNA, 13 nt, Human
gggcugcccuggu

SEQ ID NO: 1810761 - RNA, 14 nt, Human
gggcugcccuggug

SEQ ID NO: 1810762 - RNA, 15 nt, Human
gggcugcccuggugc

SEQ ID NO: 1810763 - RNA, 21 nt, Human
gggcugcccuggugcugccac

SEQ ID NO: 1810764 - RNA, 16 nt, Human
gggcugggagcucugc

SEQ ID NO: 1810765 - RNA, 18 nt, Human
gggcugggagcucugcag

SEQ ID NO: 1810766 - RNA, 12 nt, Human
gggcugggcaga

SEQ ID NO: 1810767 - RNA, 20 nt, Human
gggcuggguucuacccaggu

SEQ ID NO: 1810768 - RNA, 14 nt, Human
gggccaggcugggu

SEQ ID NO: 1810769 - RNA, 15 nt, Human
gggccaggcuggguc

SEQ ID NO: 1810770 - RNA, 21 nt, Human
gggccaggcugggucgcccug

SEQ ID NO: 1810771 - RNA, 13 nt, Human
gggccaggcuggg

SEQ ID NO: 1810772 - RNA, 11 nt, Human
gggccaggagc

SEQ ID NO: 1810773 - RNA, 14 nt, Human
aaaaugagccuggc

SEQ ID NO: 1810774 - RNA, 21 nt, Human
aaaaugagccuggcaagaaug

SEQ ID NO: 1810775 - RNA, 14 nt, Human
gggccaguuggucc

SEQ ID NO: 1810776 - RNA, 18 nt, Human
gggccaguuggucccccu

SEQ ID NO: 1810777 - RNA, 22 nt, Human
gggccaguuggucccccuucca

SEQ ID NO: 1810778 - RNA, 23 nt, Human
gggccaguuggucccccuuccau

SEQ ID NO: 1810779 - RNA, 20 nt, Human
gggccucuuaugggcugggu

SEQ ID NO: 1810780 - RNA, 13 nt, Human
gggccuccugugu

SEQ ID NO: 1810781 - RNA, 15 nt, Human
gggccuccugugugu

SEQ ID NO: 1810782 - RNA, 22 nt, Human
gggccucggacuuagcugggag

SEQ ID NO: 1810783 - RNA, 15 nt, Human
gggcgggaggauguu

SEQ ID NO: 1810784 - RNA, 23 nt, Human
gggcuacaccuuagccugcccuc

SEQ ID NO: 1810785 - RNA, 22 nt, Human
gggaggcucuggagcccacugu

SEQ ID NO: 1810786 - RNA, 14 nt, Human
gggagggcuccaga

SEQ ID NO: 1810787 - RNA, 15 nt, Human
gggagggcuccagac

SEQ ID NO: 1810788 - RNA, 17 nt, Human
gggagggcuccagacac

SEQ ID NO: 1810789 - RNA, 18 nt, Human
gggagggcuccagacaca

SEQ ID NO: 1810790 - RNA, 17 nt, Human
gggaggucgaggcagga

SEQ ID NO: 1810791 - RNA, 18 nt, Human
gggaggucgaggcaggag

SEQ ID NO: 1810792 - RNA, 19 nt, Human
gggaggucgaggcaggagg

SEQ ID NO: 1810793 - RNA, 16 nt, Human
gggcagagcagagacc

SEQ ID NO: 1810794 - RNA, 18 nt, Human
gggcaacccccagccugc

SEQ ID NO: 1810795 - RNA, 16 nt, Human
gggcaacccccagccu

SEQ ID NO: 1810796 - RNA, 17 nt, Human
gggcagagcagagacca

SEQ ID NO: 1810797 - RNA, 22 nt, Human
gggcagagcagagaccaucccu

SEQ ID NO: 1810798 - RNA, 14 nt, Human
gggcagaggaaagc

SEQ ID NO: 1810799 - RNA, 23 nt, Human
gggcagagcagagaccaucccug

SEQ ID NO: 1810800 - RNA, 17 nt, Human
gggauuguaaaauggug

SEQ ID NO: 1810801 - RNA, 16 nt, Human
gggauuguaaaauggu

SEQ ID NO: 1810802 - RNA, 15 nt, Human
gggauuacaggugug

SEQ ID NO: 1810803 - RNA, 12 nt, Human
gggauuacaggu

SEQ ID NO: 1810804 - RNA, 14 nt, Human
gggauuacaggcgu

SEQ ID NO: 1810805 - RNA, 13 nt, Human
gggauuacaggcu

SEQ ID NO: 1810806 - RNA, 16 nt, Human
gggauuacaggcuccu

SEQ ID NO: 1810807 - RNA, 21 nt, Human
gggauuacaggcuccugccac

SEQ ID NO: 1810808 - RNA, 19 nt, Human
aaaagguaugcaaucaaau

SEQ ID NO: 1810809 - RNA, 19 nt, Human
aaaagggacugagaaauuu

SEQ ID NO: 1810810 - RNA, 17 nt, Human
aaaaaucucaaauuucu

SEQ ID NO: 1810811 - RNA, 14 nt, Human
aaaaaucucaaauu

SEQ ID NO: 1810812 - RNA, 15 nt, Human
aaaacaugcuacaca

SEQ ID NO: 1810813 - RNA, 21 nt, Human
aaaaccaauguucucucuucu

SEQ ID NO: 1810814 - RNA, 15 nt, Human
aaaacccagauaaag

SEQ ID NO: 1810815 - RNA, 22 nt, Human
aaaacugcugacuguuuucucu

SEQ ID NO: 1810816 - RNA, 23 nt, Human
aaaacugcugacuguuuucucuu

SEQ ID NO: 1810817 - RNA, 13 nt, Human
aaaagaugcuucu

SEQ ID NO: 1810818 - RNA, 21 nt, Human
aaaaauaugaccacacuccag

SEQ ID NO: 1810819 - RNA, 23 nt, Human
aaaaauaugaccacacuccagcu

SEQ ID NO: 1810820 - RNA, 21 nt, Human
gggacagcuccuucuguccua

SEQ ID NO: 1810821 - RNA, 16 nt, Human
gggaaggauacaaaag

SEQ ID NO: 1810822 - RNA, 13 nt, Human
gggaaggauacaa

SEQ ID NO: 1810823 - RNA, 13 nt, Human
gggacagaggggg

SEQ ID NO: 1810824 - RNA, 22 nt, Human
gggacagaggggguggccuccc

SEQ ID NO: 1810825 - RNA, 23 nt, Human
gggacagaggggguggccuccca

SEQ ID NO: 1810826 - RNA, 16 nt, Human
gggacagcuccuucug

SEQ ID NO: 1810827 - RNA, 23 nt, Human
cagguuuuuggucugacccacug

SEQ ID NO: 1810828 - RNA, 21 nt, Human
caggguuggccccugcccggc

SEQ ID NO: 1810829 - RNA, 17 nt, Human
caggguuggccccugcc

SEQ ID NO: 1810830 - RNA, 14 nt, Human
caggugcugccauc

SEQ ID NO: 1810831 - RNA, 13 nt, Human
caggugcugccau

SEQ ID NO: 1810832 - RNA, 18 nt, Human
caguaaaugggggugcau

SEQ ID NO: 1810833 - RNA, 20 nt, Human
caguaaaugggggugcauuu

SEQ ID NO: 1810834 - RNA, 19 nt, Human
caguaaaugggggugcauu

SEQ ID NO: 1810835 - RNA, 14 nt, Human
cagucaccccggcc

SEQ ID NO: 1810836 - RNA, 16 nt, Human
cagucaccccggccac

SEQ ID NO: 1810837 - RNA, 17 nt, Human
cagucaccccggccacc

SEQ ID NO: 1810838 - RNA, 23 nt, Human
cagggucucacucugucgcccag

SEQ ID NO: 1810839 - RNA, 16 nt, Human
caggguuggccccugc

SEQ ID NO: 1810840 - RNA, 15 nt, Human
caggguuggccccug

SEQ ID NO: 1810841 - RNA, 21 nt, Human
cagggucucuaccauccccug

SEQ ID NO: 1810842 - RNA, 15 nt, Human
caggcugggcuucag

SEQ ID NO: 1810843 - RNA, 22 nt, Human
cagggaggacgcucucuggccu

SEQ ID NO: 1810844 - RNA, 14 nt, Human
caggcugggcuuca

SEQ ID NO: 1810845 - RNA, 15 nt, Human
cagggcucagcgggg

SEQ ID NO: 1810846 - RNA, 12 nt, Human
cagggcucagcg

SEQ ID NO: 1810847 - RNA, 20 nt, Human
cagggcucagcggggacagc

SEQ ID NO: 1810848 - RNA, 17 nt, Human
cagggagggccugggcc

SEQ ID NO: 1810849 - RNA, 18 nt, Human
cagggagggccugggccc

SEQ ID NO: 1810850 - RNA, 16 nt, Human
cagggagggcuucugc

SEQ ID NO: 1810851 - RNA, 19 nt, Human
caggcuggcgugcaguggu

SEQ ID NO: 1810852 - RNA, 18 nt, Human
caggcuggcgugcagugg

SEQ ID NO: 1810853 - RNA, 17 nt, Human
caggcuggcgugcagug

SEQ ID NO: 1810854 - RNA, 23 nt, Human
caggccugggggcugggcagagg

SEQ ID NO: 1810855 - RNA, 16 nt, Human
caggcugggagagccu

SEQ ID NO: 1810856 - RNA, 18 nt, Human
caggcugggagagccuuc

SEQ ID NO: 1810857 - RNA, 19 nt, Human
caggcugggagagccuucc

SEQ ID NO: 1810858 - RNA, 20 nt, Human
caggcugggagagccuucca

SEQ ID NO: 1810859 - RNA, 20 nt, Human
caggccugggggcugggcag

SEQ ID NO: 1810860 - RNA, 22 nt, Human
caggccugggggcugggcagag

SEQ ID NO: 1810861 - RNA, 13 nt, Human
caggaccucaggu

SEQ ID NO: 1810862 - RNA, 13 nt, Human
caggaccagggau

SEQ ID NO: 1810863 - RNA, 21 nt, Human
caggaccagggauuuccauga

SEQ ID NO: 1810864 - RNA, 20 nt, Human
caggcaaugcuggcuguugg

SEQ ID NO: 1810865 - RNA, 19 nt, Human
caggcaaugcuggcuguug

SEQ ID NO: 1810866 - RNA, 12 nt, Human
caggaggccagc

SEQ ID NO: 1810867 - RNA, 13 nt, Human
caggaggccagcc

SEQ ID NO: 1810868 - RNA, 21 nt, Human
caggcaaugcuggcuguuggc

SEQ ID NO: 1810869 - RNA, 16 nt, Human
caggcacugcugccca

SEQ ID NO: 1810870 - RNA, 17 nt, Human
caggcacugcugcccag

SEQ ID NO: 1810871 - RNA, 23 nt, Human
caggcacugcugcccagccucca

SEQ ID NO: 1810872 - RNA, 13 nt, Human
caggccagcugcu

SEQ ID NO: 1810873 - RNA, 15 nt, Human
caggccagcugcuug

SEQ ID NO: 1810874 - RNA, 13 nt, Human
caggccaggcccu

SEQ ID NO: 1810875 - RNA, 14 nt, Human
caggccaggcccuc

SEQ ID NO: 1810876 - RNA, 15 nt, Human
caggccaggcccucu

SEQ ID NO: 1810877 - RNA, 16 nt, Human
caggccaggcccucug

SEQ ID NO: 1810878 - RNA, 19 nt, Human
cagcuguucagcugguuga

SEQ ID NO: 1810879 - RNA, 16 nt, Human
cagcuguucagcuggu

SEQ ID NO: 1810880 - RNA, 15 nt, Human
cagcuguucagcugg

SEQ ID NO: 1810881 - RNA, 17 nt, Human
cagcuuauucacaagac

SEQ ID NO: 1810882 - RNA, 16 nt, Human
cagcuuauucacaaga

SEQ ID NO: 1810883 - RNA, 20 nt, Human
caggaaaagcugcugacagu

SEQ ID NO: 1810884 - RNA, 19 nt, Human
caggaaaagcugcugacag

SEQ ID NO: 1810885 - RNA, 23 nt, Human
caggaaaggcuccaggagcagcc

SEQ ID NO: 1810886 - RNA, 21 nt, Human
caggaaaggcuccaggagcag

SEQ ID NO: 1810887 - RNA, 22 nt, Human
caggaaaggcuccaggagcagc

SEQ ID NO: 1810888 - RNA, 23 nt, Human
cagauacaggaaaagcugcugac

SEQ ID NO: 1810889 - RNA, 22 nt, Human
cagaucauugugaaauuauuca

SEQ ID NO: 1810890 - RNA, 16 nt, Human
cagaucauugugaaau

SEQ ID NO: 1810891 - RNA, 14 nt, Human
cagagccugcaguu

SEQ ID NO: 1810892 - RNA, 20 nt, Human
cagagagggugggagugggc

SEQ ID NO: 1810893 - RNA, 22 nt, Human
cagagagggugggagugggccc

SEQ ID NO: 1810894 - RNA, 16 nt, Human
cagagagggugggagu

SEQ ID NO: 1810895 - RNA, 17 nt, Human
cagagcuacacagggga

SEQ ID NO: 1810896 - RNA, 22 nt, Human
cagagcuacacaggggaaaaga

SEQ ID NO: 1810897 - RNA, 23 nt, Human
cagagacuccugcaggcagccag

SEQ ID NO: 1810898 - RNA, 21 nt, Human
cagagacuccugcaggcagcc

SEQ ID NO: 1810899 - RNA, 22 nt, Human
cagagacuccugcaggcagcca

SEQ ID NO: 1810900 - RNA, 20 nt, Human
cagagacuccugcaggcagc

SEQ ID NO: 1810901 - RNA, 19 nt, Human
cagccccgugggguuccuc

SEQ ID NO: 1810902 - RNA, 13 nt, Human
cagccccugcaca

SEQ ID NO: 1810903 - RNA, 22 nt, Human
cagccccauucugccugcccag

SEQ ID NO: 1810904 - RNA, 20 nt, Human
cagccccauucugccugccc

SEQ ID NO: 1810905 - RNA, 19 nt, Human
cagccccauucugccugcc

SEQ ID NO: 1810906 - RNA, 24 nt, Human
cagccccauucugccugcccaggc

SEQ ID NO: 1810907 - RNA, 23 nt, Human
cagccccauucugccugcccagg

SEQ ID NO: 1810908 - RNA, 23 nt, Human
cagccgccaugcuccuggcccac

SEQ ID NO: 1810909 - RNA, 13 nt, Human
cagcccuuagcag

SEQ ID NO: 1810910 - RNA, 23 nt, Human
cagccugagcgacagugagacuc

SEQ ID NO: 1810911 - RNA, 14 nt, Human
cagcggggacagcu

SEQ ID NO: 1810912 - RNA, 14 nt, Human
cagcguuucuauga

SEQ ID NO: 1810913 - RNA, 16 nt, Human
cagcguuucuaugaca

SEQ ID NO: 1810914 - RNA, 19 nt, Human
cagcguuucuaugacacau

SEQ ID NO: 1810915 - RNA, 16 nt, Human
cagcauauucaggaag

SEQ ID NO: 1810916 - RNA, 17 nt, Human
cagcauauucaggaagc

SEQ ID NO: 1810917 - RNA, 18 nt, Human
cagcauauucaggaagcu

SEQ ID NO: 1810918 - RNA, 21 nt, Human
cagauugcaacaggcugggcu

SEQ ID NO: 1810919 - RNA, 13 nt, Human
cagauuuggaaag

SEQ ID NO: 1810920 - RNA, 16 nt, Human
cagauuugagcucagc

SEQ ID NO: 1810921 - RNA, 13 nt, Human
cagauuugagcuc

SEQ ID NO: 1810922 - RNA, 14 nt, Human
cagauuugagcuca

SEQ ID NO: 1810923 - RNA, 15 nt, Human
cagauuucacucucc

SEQ ID NO: 1810924 - RNA, 16 nt, Human
cagauuucacucuccu

SEQ ID NO: 1810925 - RNA, 18 nt, Human
cagauuucacucuccuug

SEQ ID NO: 1810926 - RNA, 17 nt, Human
ccaaaacucuccucugc

SEQ ID NO: 1810927 - RNA, 17 nt, Human
ccaaaaaaugcuugcuu

SEQ ID NO: 1810928 - RNA, 18 nt, Human
cauuuuugaauacaggca

SEQ ID NO: 1810929 - RNA, 20 nt, Human
cauuuuugaauacaggcaua

SEQ ID NO: 1810930 - RNA, 23 nt, Human
cauuuggugguuucagaaaugug

SEQ ID NO: 1810931 - RNA, 22 nt, Human
cauuuggugguuucagaaaugu

SEQ ID NO: 1810932 - RNA, 16 nt, Human
cauuuauucugcucac

SEQ ID NO: 1810933 - RNA, 18 nt, Human
cauuucauuugugccaga

SEQ ID NO: 1810934 - RNA, 21 nt, Human
cauugcggacagccacggcca

SEQ ID NO: 1810935 - RNA, 17 nt, Human
cauugcggacagccacg

SEQ ID NO: 1810936 - RNA, 15 nt, Human
cauugcggacagcca

SEQ ID NO: 1810937 - RNA, 14 nt, Human
cauugcggacagcc

SEQ ID NO: 1810938 - RNA, 18 nt, Human
cauugcugggcuugucug

SEQ ID NO: 1810939 - RNA, 17 nt, Human
cauucucacuccuaccu

SEQ ID NO: 1810940 - RNA, 16 nt, Human
cauucucacuccuacc

SEQ ID NO: 1810941 - RNA, 13 nt, Human
cauuaugaugugu

SEQ ID NO: 1810942 - RNA, 18 nt, Human
cauuaucuagauacugua

SEQ ID NO: 1810943 - RNA, 16 nt, Human
cauucuccuuguguua

SEQ ID NO: 1810944 - RNA, 15 nt, Human
cauguucucugagga

SEQ ID NO: 1810945 - RNA, 17 nt, Human
cauuaucuagauacugu

SEQ ID NO: 1810946 - RNA, 16 nt, Human
cauuaucuagauacug

SEQ ID NO: 1810947 - RNA, 12 nt, Human
cauuaucuagau

SEQ ID NO: 1810948 - RNA, 15 nt, Human
cauuaggauggcuag

SEQ ID NO: 1810949 - RNA, 22 nt, Human
cauggcugccaaugggagcuca

SEQ ID NO: 1810950 - RNA, 23 nt, Human
ccaaugcacuuuguucuggcucu

SEQ ID NO: 1810951 - RNA, 20 nt, Human
ccaaugcacuuuguucuggc

SEQ ID NO: 1810952 - RNA, 22 nt, Human
ccaaugcacuuuguucuggcuc

SEQ ID NO: 1810953 - RNA, 20 nt, Human
ccaauguucucucuucucca

SEQ ID NO: 1810954 - RNA, 22 nt, Human
ccaaagugguauagaaaugcug

SEQ ID NO: 1810955 - RNA, 19 nt, Human
ccaaagugguauagaaaug

SEQ ID NO: 1810956 - RNA, 22 nt, Human
ccaaagugcugggauuacaggu

SEQ ID NO: 1810957 - RNA, 11 nt, Human
ccaacuuguaa

SEQ ID NO: 1810958 - RNA, 19 nt, Human
ccaaagugcugggauuaca

SEQ ID NO: 1810959 - RNA, 22 nt, Human
ccaaagugcugggauuacaggg

SEQ ID NO: 1810960 - RNA, 22 nt, Human
ccaaagugcugggauuacaggc

SEQ ID NO: 1810961 - RNA, 13 nt, Human
ccacccugcucuc

SEQ ID NO: 1810962 - RNA, 18 nt, Human
ccaccaucaccagacagg

SEQ ID NO: 1810963 - RNA, 20 nt, Human
ccaccaucaagccaccaaca

SEQ ID NO: 1810964 - RNA, 14 nt, Human
ccaccgcagacagg

SEQ ID NO: 1810965 - RNA, 17 nt, Human
ccaccgcagacaggacc

SEQ ID NO: 1810966 - RNA, 15 nt, Human
ccaccuuggcucaag

SEQ ID NO: 1810967 - RNA, 14 nt, Human
ccaccuuggcucaa

SEQ ID NO: 1810968 - RNA, 23 nt, Human
ccaccgggcugggagcucugcag

SEQ ID NO: 1810969 - RNA, 19 nt, Human
ccaccgcagacaggaccag

SEQ ID NO: 1810970 - RNA, 18 nt, Human
ccaccgcagacaggacca

SEQ ID NO: 1810971 - RNA, 22 nt, Human
ccacacuucaggcucuucuccu

SEQ ID NO: 1810972 - RNA, 16 nt, Human
ccaccaucaagccacc

SEQ ID NO: 1810973 - RNA, 17 nt, Human
ccaccaucaagccacca

SEQ ID NO: 1810974 - RNA, 18 nt, Human
caucugugaaaggaaaga

SEQ ID NO: 1810975 - RNA, 19 nt, Human
caucugugaaaggaaagag

SEQ ID NO: 1810976 - RNA, 12 nt, Human
caucgcaaugua

SEQ ID NO: 1810977 - RNA, 21 nt, Human
caucuuagguuggcaaaaagg

SEQ ID NO: 1810978 - RNA, 22 nt, Human
caucuuagguuggcaaaaaggc

SEQ ID NO: 1810979 - RNA, 17 nt, Human
caucccagccccaauga

SEQ ID NO: 1810980 - RNA, 16 nt, Human
caucccagccccaaug

SEQ ID NO: 1810981 - RNA, 13 nt, Human
caucccagcccca

SEQ ID NO: 1810982 - RNA, 14 nt, Human
caucccagccccaa

SEQ ID NO: 1810983 - RNA, 14 nt, Human
caucaggccaggcc

SEQ ID NO: 1810984 - RNA, 21 nt, Human
caucaggccaggcccucugcc

SEQ ID NO: 1810985 - RNA, 22 nt, Human
caucaggccaggcccucugccc

SEQ ID NO: 1810986 - RNA, 23 nt, Human
caucaggccaggcccucugccca

SEQ ID NO: 1810987 - RNA, 18 nt, Human
caucagcacgauuucugu

SEQ ID NO: 1810988 - RNA, 17 nt, Human
caucagcacgauuucug

SEQ ID NO: 1810989 - RNA, 13 nt, Human
caucaggccaggc

SEQ ID NO: 1810990 - RNA, 19 nt, Human
caucagcacgauuucuguu

SEQ ID NO: 1810991 - RNA, 22 nt, Human
caugcaaggucauuuuuuuuaa

SEQ ID NO: 1810992 - RNA, 18 nt, Human
caugcaaggucauuuuuu

SEQ ID NO: 1810993 - RNA, 17 nt, Human
caugcaaggucauuuuu

SEQ ID NO: 1810994 - RNA, 12 nt, Human
caugcugccucc

SEQ ID NO: 1810995 - RNA, 14 nt, Human
caugcugccuccag

SEQ ID NO: 1810996 - RNA, 22 nt, Human
cauggccuuugcuugaaagaaa

SEQ ID NO: 1810997 - RNA, 19 nt, Human
cauggccuuugcuugaaag

SEQ ID NO: 1810998 - RNA, 16 nt, Human
caugcugcccugugag

SEQ ID NO: 1810999 - RNA, 18 nt, Human
caugcugcccugugagua

SEQ ID NO: 1811000 - RNA, 17 nt, Human
caugacacgaauauugc

SEQ ID NO: 1811001 - RNA, 18 nt, Human
caugacacgaauauugcu

SEQ ID NO: 1811002 - RNA, 14 nt, Human
caugaauuugugaa

SEQ ID NO: 1811003 - RNA, 14 nt, Human
caugacacgaauau

SEQ ID NO: 1811004 - RNA, 22 nt, Human
cauauuaccacagacauacuaa

SEQ ID NO: 1811005 - RNA, 21 nt, Human
cauauuaccacagacauacua

SEQ ID NO: 1811006 - RNA, 20 nt, Human
cauauuaccacagacauacu

SEQ ID NO: 1811007 - RNA, 17 nt, Human
cauauuaccacagacau

SEQ ID NO: 1811008 - RNA, 15 nt, Human
cauagcccucacccu

SEQ ID NO: 1811009 - RNA, 19 nt, Human
cauagcccucacccugggg

SEQ ID NO: 1811010 - RNA, 12 nt, Human
cauagcccucac

SEQ ID NO: 1811011 - RNA, 21 nt, Human
cauaaugcgugcauaccacuu

SEQ ID NO: 1811012 - RNA, 15 nt, Human
cauacaauuccaaac

SEQ ID NO: 1811013 - RNA, 12 nt, Human
caguuugcuuug

SEQ ID NO: 1811014 - RNA, 14 nt, Human
caguuugcuuugua

SEQ ID NO: 1811015 - RNA, 21 nt, Human
caguuugcuuuguaugcacuu

SEQ ID NO: 1811016 - RNA, 23 nt, Human
cauaaucuggacuccucugucca

SEQ ID NO: 1811017 - RNA, 17 nt, Human
cauaaugcgugcauacc

SEQ ID NO: 1811018 - RNA, 14 nt, Human
cauaaugcgugcau

SEQ ID NO: 1811019 - RNA, 21 nt, Human
cauaaucuggacuccucuguc

SEQ ID NO: 1811020 - RNA, 22 nt, Human
cauaaucuggacuccucugucc

SEQ ID NO: 1811021 - RNA, 20 nt, Human
cauaaucuggacuccucugu

SEQ ID NO: 1811022 - RNA, 19 nt, Human
cauaaucuggacuccucug

SEQ ID NO: 1811023 - RNA, 18 nt, Human
cagucaccccggccaccu

SEQ ID NO: 1811024 - RNA, 15 nt, Human
caauucuugccaaau

SEQ ID NO: 1811025 - RNA, 12 nt, Human
caauggcagccu

SEQ ID NO: 1811026 - RNA, 11 nt, Human
caauggcagcc

SEQ ID NO: 1811027 - RNA, 20 nt, Human
caauggagacugucucaaga

SEQ ID NO: 1811028 - RNA, 17 nt, Human
cacaagagcccaggccu

SEQ ID NO: 1811029 - RNA, 17 nt, Human
cacaagcuccaagcucc

SEQ ID NO: 1811030 - RNA, 23 nt, Human
cacaagcuccaagcucccaggca

SEQ ID NO: 1811031 - RNA, 17 nt, Human
cacaagcugcacccuca

SEQ ID NO: 1811032 - RNA, 23 nt, Human
cacaagcugcacccucaggcagg

SEQ ID NO: 1811033 - RNA, 16 nt, Human
cacaagagcccaggcc

SEQ ID NO: 1811034 - RNA, 13 nt, Human
cacaagcuccaag

SEQ ID NO: 1811035 - RNA, 14 nt, Human
cacaagcuccaagc

SEQ ID NO: 1811036 - RNA, 15 nt, Human
cacaagcuccaagcu

SEQ ID NO: 1811037 - RNA, 13 nt, Human
caauuuauuaugg

SEQ ID NO: 1811038 - RNA, 14 nt, Human
cacaagagcccagg

SEQ ID NO: 1811039 - RNA, 20 nt, Human
cacacagcucuguccuggga

SEQ ID NO: 1811040 - RNA, 17 nt, Human
cacacagcucuguccug

SEQ ID NO: 1811041 - RNA, 23 nt, Human
cacacagugagucgaggacaggg

SEQ ID NO: 1811042 - RNA, 21 nt, Human
cacacagugagucgaggacag

SEQ ID NO: 1811043 - RNA, 15 nt, Human
cacacauacacacac

SEQ ID NO: 1811044 - RNA, 20 nt, Human
cacacaugagcaucaggcca

SEQ ID NO: 1811045 - RNA, 23 nt, Human
cacacaguauuacuucugcuaca

SEQ ID NO: 1811046 - RNA, 20 nt, Human
cacacaguauuacuucugcu

SEQ ID NO: 1811047 - RNA, 18 nt, Human
cacacagugagucgagga

SEQ ID NO: 1811048 - RNA, 21 nt, Human
cacagacauacuaaccagcag

SEQ ID NO: 1811049 - RNA, 19 nt, Human
cacagacauacuaaccagc

SEQ ID NO: 1811050 - RNA, 11 nt, Human
cacagccucug

SEQ ID NO: 1811051 - RNA, 13 nt, Human
cacagacccugcc

SEQ ID NO: 1811052 - RNA, 23 nt, Human
cacagaaaauggaagacagcucu

SEQ ID NO: 1811053 - RNA, 19 nt, Human
cacagaaaauucuucucca

SEQ ID NO: 1811054 - RNA, 21 nt, Human
cacacaugagcaucaggccag

SEQ ID NO: 1811055 - RNA, 22 nt, Human
cacacaugagcaucaggccagg

SEQ ID NO: 1811056 - RNA, 18 nt, Human
cacagaaaauggaagaca

SEQ ID NO: 1811057 - RNA, 19 nt, Human
cacagaaaauggaagacag

SEQ ID NO: 1811058 - RNA, 20 nt, Human
cacagaaaauggaagacagc

SEQ ID NO: 1811059 - RNA, 22 nt, Human
cacagaaaauggaagacagcuc

SEQ ID NO: 1811060 - RNA, 21 nt, Human
cacaguauuacuucugcuaca

SEQ ID NO: 1811061 - RNA, 20 nt, Human
cacaguauuacuucugcuac

SEQ ID NO: 1811062 - RNA, 19 nt, Human
cacaggggaaaagaggagu

SEQ ID NO: 1811063 - RNA, 17 nt, Human
cacaggggaaaagagga

SEQ ID NO: 1811064 - RNA, 18 nt, Human
cacaggggaaaagaggag

SEQ ID NO: 1811065 - RNA, 19 nt, Human
cacagcgcuggccgggacc

SEQ ID NO: 1811066 - RNA, 22 nt, Human
cacagcgcuggccgggaccccg

SEQ ID NO: 1811067 - RNA, 23 nt, Human
cacaggcccuuccucuccacugc

SEQ ID NO: 1811068 - RNA, 17 nt, Human
caaguccacaguggaac

SEQ ID NO: 1811069 - RNA, 19 nt, Human
caaguaugaauaaagacac

SEQ ID NO: 1811070 - RNA, 21 nt, Human
caaguaugaauaaagacaccu

SEQ ID NO: 1811071 - RNA, 13 nt, Human
caagucaagugaa

SEQ ID NO: 1811072 - RNA, 17 nt, Human
caagucaagugaaaaag

SEQ ID NO: 1811073 - RNA, 16 nt, Human
caaguaugaauaaaga

SEQ ID NO: 1811074 - RNA, 17 nt, Human
caaggccaaaggaagca

SEQ ID NO: 1811075 - RNA, 18 nt, Human
caaggccaaaggaagcac

SEQ ID NO: 1811076 - RNA, 15 nt, Human
caaggccaaaggaag

SEQ ID NO: 1811077 - RNA, 16 nt, Human
caaggccaaaggaagc

SEQ ID NO: 1811078 - RNA, 14 nt, Human
caagcucugcuccu

SEQ ID NO: 1811079 - RNA, 13 nt, Human
caagcugcacccu

SEQ ID NO: 1811080 - RNA, 14 nt, Human
caagcugcacccuc

SEQ ID NO: 1811081 - RNA, 18 nt, Human
caagcugcacccucaggc

SEQ ID NO: 1811082 - RNA, 20 nt, Human
caagcugcacccucaggcag

SEQ ID NO: 1811083 - RNA, 13 nt, Human
caagcucugcucc

SEQ ID NO: 1811084 - RNA, 19 nt, Human
caagcucuaucaccaagga

SEQ ID NO: 1811085 - RNA, 12 nt, Human
caagcuccaagc

SEQ ID NO: 1811086 - RNA, 19 nt, Human
caauaaagcagcguuucua

SEQ ID NO: 1811087 - RNA, 12 nt, Human
cacugcagccuc

SEQ ID NO: 1811088 - RNA, 21 nt, Human
cacugcagaagacaguauggc

SEQ ID NO: 1811089 - RNA, 20 nt, Human
cacugcacuccagccugggu

SEQ ID NO: 1811090 - RNA, 15 nt, Human
cacugcacuccagcc

SEQ ID NO: 1811091 - RNA, 16 nt, Human
cacugcacuccagccu

SEQ ID NO: 1811092 - RNA, 18 nt, Human
cacugcacuccagccugg

SEQ ID NO: 1811093 - RNA, 19 nt, Human
cacugcacuccagccuggg

SEQ ID NO: 1811094 - RNA, 19 nt, Human
cacugcacuauagccuagg

SEQ ID NO: 1811095 - RNA, 13 nt, Human
cacugcagccuca

SEQ ID NO: 1811096 - RNA, 14 nt, Human
cacugcauccuccg

SEQ ID NO: 1811097 - RNA, 16 nt, Human
cacugcauccuccgcc

SEQ ID NO: 1811098 - RNA, 16 nt, Human
cacugcauguuuguga

SEQ ID NO: 1811099 - RNA, 18 nt, Human
cacugcauccuccgccuc

SEQ ID NO: 1811100 - RNA, 18 nt, Human
cacugggagaaaugaaaa

SEQ ID NO: 1811101 - RNA, 23 nt, Human
cacuuaggaacguaaucgugucc

SEQ ID NO: 1811102 - RNA, 24 nt, Human
cacuuagaaauugcauuuccugac

SEQ ID NO: 1811103 - RNA, 16 nt, Human
cacuuacacuuuaugc

SEQ ID NO: 1811104 - RNA, 18 nt, Human
cacuuacacuuuaugcac

SEQ ID NO: 1811105 - RNA, 23 nt, Human
cacugguggcccgacagccuggc

SEQ ID NO: 1811106 - RNA, 22 nt, Human
cacugguucuucuuggucucag

SEQ ID NO: 1811107 - RNA, 12 nt, Human
cacuccccugcu

SEQ ID NO: 1811108 - RNA, 13 nt, Human
cacuccccugcug

SEQ ID NO: 1811109 - RNA, 14 nt, Human
cacuccccugcugg

SEQ ID NO: 1811110 - RNA, 15 nt, Human
cacuccccugcuggg

SEQ ID NO: 1811111 - RNA, 14 nt, Human
cacuaggcuucugg

SEQ ID NO: 1811112 - RNA, 11 nt, Human
cacuccagcug

SEQ ID NO: 1811113 - RNA, 12 nt, Human
cacuccagcugg

SEQ ID NO: 1811114 - RNA, 15 nt, Human
cacuccagcugggau

SEQ ID NO: 1811115 - RNA, 16 nt, Human
cacuccagccugggug

SEQ ID NO: 1811116 - RNA, 13 nt, Human
caccuuggcugca

SEQ ID NO: 1811117 - RNA, 15 nt, Human
caccuuggcucaagu

SEQ ID NO: 1811118 - RNA, 14 nt, Human
caccuuggcugcag

SEQ ID NO: 1811119 - RNA, 17 nt, Human
caccugccuguugggcc

SEQ ID NO: 1811120 - RNA, 19 nt, Human
caccugccuguugggccag

SEQ ID NO: 1811121 - RNA, 24 nt, Human
caccugccuguugggccaggagcc

SEQ ID NO: 1811122 - RNA, 16 nt, Human
cacccuggggagaaag

SEQ ID NO: 1811123 - RNA, 15 nt, Human
cacccuggggagaaa

SEQ ID NO: 1811124 - RNA, 17 nt, Human
cacccugaaagcccuga

SEQ ID NO: 1811125 - RNA, 14 nt, Human
cacccucaggcagg

SEQ ID NO: 1811126 - RNA, 13 nt, Human
caccucagccucc

SEQ ID NO: 1811127 - RNA, 23 nt, Human
caccuacaguguacagucuugua

SEQ ID NO: 1811128 - RNA, 20 nt, Human
caccuacaguguacagucuu

SEQ ID NO: 1811129 - RNA, 14 nt, Human
caccucagccuccc

SEQ ID NO: 1811130 - RNA, 17 nt, Human
cacccuggggagaaagu

SEQ ID NO: 1811131 - RNA, 17 nt, Human
caccuacaguguacagu

SEQ ID NO: 1811132 - RNA, 16 nt, Human
caccuacaguguacag

SEQ ID NO: 1811133 - RNA, 13 nt, Human
caccuacagugua

SEQ ID NO: 1811134 - RNA, 23 nt, Human
caccugccucggccucccaaagu

SEQ ID NO: 1811135 - RNA, 14 nt, Human
caccugccccucaa

SEQ ID NO: 1811136 - RNA, 15 nt, Human
caccugccccucaac

SEQ ID NO: 1811137 - RNA, 16 nt, Human
caccugccccucaacu

SEQ ID NO: 1811138 - RNA, 11 nt, Human
caccccagccc

SEQ ID NO: 1811139 - RNA, 16 nt, Human
caaaagaugcuucuca

SEQ ID NO: 1811140 - RNA, 20 nt, Human
caaaaaaaaaaaaaaauuag

SEQ ID NO: 1811141 - RNA, 18 nt, Human
caaaagaugcuucucacu

SEQ ID NO: 1811142 - RNA, 15 nt, Human
caaaaggcagaagca

SEQ ID NO: 1811143 - RNA, 21 nt, Human
caaaccaucauugaaaucuuu

SEQ ID NO: 1811144 - RNA, 19 nt, Human
caaaccaucauugaaaucu

SEQ ID NO: 1811145 - RNA, 20 nt, Human
caaagauauuuugcuuugug

SEQ ID NO: 1811146 - RNA, 20 nt, Human
caaauggaaaugggcagagc

SEQ ID NO: 1811147 - RNA, 21 nt, Human
caaauggaaaugggcagagca

SEQ ID NO: 1811148 - RNA, 22 nt, Human
caaauggaaaugggcagagcag

SEQ ID NO: 1811149 - RNA, 20 nt, Human
caacaccucugcacaagcug

SEQ ID NO: 1811150 - RNA, 14 nt, Human
caacacuaacauga

SEQ ID NO: 1811151 - RNA, 23 nt, Human
caaagauauuuugcuuugugauu

SEQ ID NO: 1811152 - RNA, 22 nt, Human
caaagauauuuugcuuugugau

SEQ ID NO: 1811153 - RNA, 21 nt, Human
caaagucucuggaauuugaaa

SEQ ID NO: 1811154 - RNA, 14 nt, Human
caaaguagaagucu

SEQ ID NO: 1811155 - RNA, 21 nt, Human
caaaguagaagucuuagaugu

SEQ ID NO: 1811156 - RNA, 22 nt, Human
caaaguacacuguuucaaacuu

SEQ ID NO: 1811157 - RNA, 15 nt, Human
caaagcagugcaugc

SEQ ID NO: 1811158 - RNA, 17 nt, Human
caaagcagugcaugcug

SEQ ID NO: 1811159 - RNA, 16 nt, Human
auuugccaauaauaau

SEQ ID NO: 1811160 - RNA, 15 nt, Human
auuugccaauaauaa

SEQ ID NO: 1811161 - RNA, 17 nt, Human
auuuuauagcuacuaau

SEQ ID NO: 1811162 - RNA, 19 nt, Human
auuuuauagcuacuaauuu

SEQ ID NO: 1811163 - RNA, 18 nt, Human
auuuguuucuuucucuga

SEQ ID NO: 1811164 - RNA, 23 nt, Human
auuuguuugaacugauaaagaug

SEQ ID NO: 1811165 - RNA, 22 nt, Human
auuuguuugaacugauaaagau

SEQ ID NO: 1811166 - RNA, 13 nt, Human
auuugcuccuuuc

SEQ ID NO: 1811167 - RNA, 13 nt, Human
auuugcuuuggaa

SEQ ID NO: 1811168 - RNA, 15 nt, Human
auuugcuuuggaagu

SEQ ID NO: 1811169 - RNA, 14 nt, Human
auuugcuuuggaag

SEQ ID NO: 1811170 - RNA, 13 nt, Human
auuuggaaaauaa

SEQ ID NO: 1811171 - RNA, 12 nt, Human
auuuggaaaaua

SEQ ID NO: 1811172 - RNA, 14 nt, Human
auuugugccagaau

SEQ ID NO: 1811173 - RNA, 20 nt, Human
auuugugauacaaugcugug

SEQ ID NO: 1811174 - RNA, 17 nt, Human
auuugugauacaaugcu

SEQ ID NO: 1811175 - RNA, 15 nt, Human
auuugugauacaaug

SEQ ID NO: 1811176 - RNA, 23 nt, Human
auuagauuucucauuugccaaua

SEQ ID NO: 1811177 - RNA, 19 nt, Human
auuagcauuugucaacaaa

SEQ ID NO: 1811178 - RNA, 17 nt, Human
auuagcaguuugcuuug

SEQ ID NO: 1811179 - RNA, 17 nt, Human
auuacaggaaguacugg

SEQ ID NO: 1811180 - RNA, 16 nt, Human
auuacaggugugaacc

SEQ ID NO: 1811181 - RNA, 22 nt, Human
auuacaagcgugagccacugca

SEQ ID NO: 1811182 - RNA, 18 nt, Human
auguuugccucugccucu

SEQ ID NO: 1811183 - RNA, 23 nt, Human
auguuugggagacugcugaguca

SEQ ID NO: 1811184 - RNA, 18 nt, Human
auuaggugugacugaauu

SEQ ID NO: 1811185 - RNA, 16 nt, Human
auuaggugugacugaa

SEQ ID NO: 1811186 - RNA, 21 nt, Human
auuaggugugacugaauuucu

SEQ ID NO: 1811187 - RNA, 19 nt, Human
auucacaagacccaaaagg

SEQ ID NO: 1811188 - RNA, 23 nt, Human
auuaugcaugaaguaauaugcac

SEQ ID NO: 1811189 - RNA, 14 nt, Human
auucauaaugacuu

SEQ ID NO: 1811190 - RNA, 15 nt, Human
auucauaaugacuua

SEQ ID NO: 1811191 - RNA, 21 nt, Human
auucauaauuauuauuuggcc

SEQ ID NO: 1811192 - RNA, 19 nt, Human
auucauaaugacuuaagca

SEQ ID NO: 1811193 - RNA, 22 nt, Human
auucauagcagcuuauucacaa

SEQ ID NO: 1811194 - RNA, 19 nt, Human
auucauagcagcuuauuca

SEQ ID NO: 1811195 - RNA, 16 nt, Human
auuguuagucucuuga

SEQ ID NO: 1811196 - RNA, 21 nt, Human
auugugucucuugguccugcu

SEQ ID NO: 1811197 - RNA, 23 nt, Human
auugugucucuugguccugcugc

SEQ ID NO: 1811198 - RNA, 18 nt, Human
auugcuugagcucaggag

SEQ ID NO: 1811199 - RNA, 14 nt, Human
auuguaaaauggug

SEQ ID NO: 1811200 - RNA, 12 nt, Human
auugcugcuuga

SEQ ID NO: 1811201 - RNA, 23 nt, Human
auugcugauggugcaaugaccuu

SEQ ID NO: 1811202 - RNA, 14 nt, Human
auugcuugagcuca

SEQ ID NO: 1811203 - RNA, 12 nt, Human
auugcuccuuga

SEQ ID NO: 1811204 - RNA, 15 nt, Human
auugcugauggugca

SEQ ID NO: 1811205 - RNA, 16 nt, Human
auugcugauggugcaa

SEQ ID NO: 1811206 - RNA, 18 nt, Human
auugcugauggugcaaug

SEQ ID NO: 1811207 - RNA, 19 nt, Human
auugcugauggugcaauga

SEQ ID NO: 1811208 - RNA, 14 nt, Human
auucuucugcuuca

SEQ ID NO: 1811209 - RNA, 11 nt, Human
auucuuuccug

SEQ ID NO: 1811210 - RNA, 12 nt, Human
auucuucugcuu

SEQ ID NO: 1811211 - RNA, 11 nt, Human
auucuucugcu

SEQ ID NO: 1811212 - RNA, 14 nt, Human
auucugaccuuaaa

SEQ ID NO: 1811213 - RNA, 13 nt, Human
auucuuuccugag

SEQ ID NO: 1811214 - RNA, 21 nt, Human
auugauaagaaccuuuugagu

SEQ ID NO: 1811215 - RNA, 15 nt, Human
auugcuacuguccua

SEQ ID NO: 1811216 - RNA, 17 nt, Human
auugauaugcuuauaca

SEQ ID NO: 1811217 - RNA, 22 nt, Human
auugcuacuguccuacccaccc

SEQ ID NO: 1811218 - RNA, 20 nt, Human
auugcuacuguccuacccac

SEQ ID NO: 1811219 - RNA, 16 nt, Human
ccguagguuauuuuca

SEQ ID NO: 1811220 - RNA, 22 nt, Human
ccggcuaugggggcacugagga

SEQ ID NO: 1811221 - RNA, 23 nt, Human
ccggcuaugggggcacugaggac

SEQ ID NO: 1811222 - RNA, 17 nt, Human
ccggcuaugggggcacu

SEQ ID NO: 1811223 - RNA, 19 nt, Human
ccggcuaauuuuuguauuu

SEQ ID NO: 1811224 - RNA, 23 nt, Human
ccuaauaaagcuguguggcaguc

SEQ ID NO: 1811225 - RNA, 14 nt, Human
ccuaauaaagcugu

SEQ ID NO: 1811226 - RNA, 18 nt, Human
ccgucucugguuccuccc

SEQ ID NO: 1811227 - RNA, 23 nt, Human
ccuaggcauuugcugaauacaga

SEQ ID NO: 1811228 - RNA, 22 nt, Human
ccucagccucccgaauagcugg

SEQ ID NO: 1811229 - RNA, 23 nt, Human
ccucagccucccaaagugcuggg

SEQ ID NO: 1811230 - RNA, 13 nt, Human
ccucagccuccug

SEQ ID NO: 1811231 - RNA, 15 nt, Human
ccucauguccacugg

SEQ ID NO: 1811232 - RNA, 13 nt, Human
ccucauguucuua

SEQ ID NO: 1811233 - RNA, 14 nt, Human
ccucagccuccuga

SEQ ID NO: 1811234 - RNA, 20 nt, Human
ccucauguccacugguucuu

SEQ ID NO: 1811235 - RNA, 19 nt, Human
ccucauguucuuaauucuu

SEQ ID NO: 1811236 - RNA, 21 nt, Human
ccuccaagcuccaucuccacu

SEQ ID NO: 1811237 - RNA, 22 nt, Human
ccuccaagcuccaucuccacuc

SEQ ID NO: 1811238 - RNA, 18 nt, Human
ccucauuagcauuuugcu

SEQ ID NO: 1811239 - RNA, 21 nt, Human
ccuccaaguccacaguggaac

SEQ ID NO: 1811240 - RNA, 18 nt, Human
ccuccaaguccacagugg

SEQ ID NO: 1811241 - RNA, 22 nt, Human
ccuccaaucccaccaacccuca

SEQ ID NO: 1811242 - RNA, 22 nt, Human
ccucccaaggggcccaaauucu

SEQ ID NO: 1811243 - RNA, 14 nt, Human
ccucccaggcgccc

SEQ ID NO: 1811244 - RNA, 20 nt, Human
ccucccaggcgccccuuccc

SEQ ID NO: 1811245 - RNA, 22 nt, Human
ccucagccucccaaagugcugg

SEQ ID NO: 1811246 - RNA, 11 nt, Human
ccucagccucc

SEQ ID NO: 1811247 - RNA, 15 nt, Human
ccucaacucuccucc

SEQ ID NO: 1811248 - RNA, 15 nt, Human
ccucaagagaaggca

SEQ ID NO: 1811249 - RNA, 15 nt, Human
ccuauuuuaauaaac

SEQ ID NO: 1811250 - RNA, 14 nt, Human
cccuggcagccccu

SEQ ID NO: 1811251 - RNA, 16 nt, Human
cccuggcagccccugu

SEQ ID NO: 1811252 - RNA, 17 nt, Human
cccuggcucccacaggc

SEQ ID NO: 1811253 - RNA, 19 nt, Human
cccuggcucccacaggccc

SEQ ID NO: 1811254 - RNA, 13 nt, Human
cccuggcuuuuca

SEQ ID NO: 1811255 - RNA, 17 nt, Human
cccuggcuuuucacugc

SEQ ID NO: 1811256 - RNA, 13 nt, Human
cccugcccugugg

SEQ ID NO: 1811257 - RNA, 12 nt, Human
cccugcccugug

SEQ ID NO: 1811258 - RNA, 11 nt, Human
cccugcccugu

SEQ ID NO: 1811259 - RNA, 14 nt, Human
cccugcccuguggg

SEQ ID NO: 1811260 - RNA, 15 nt, Human
cccugcccugugggc

SEQ ID NO: 1811261 - RNA, 16 nt, Human
cccugcccugugggcc

SEQ ID NO: 1811262 - RNA, 20 nt, Human
cccugcccugugggccccca

SEQ ID NO: 1811263 - RNA, 21 nt, Human
cccugcccugugggcccccaa

SEQ ID NO: 1811264 - RNA, 12 nt, Human
cccuggcagccc

SEQ ID NO: 1811265 - RNA, 13 nt, Human
cccuggcagcccc

SEQ ID NO: 1811266 - RNA, 20 nt, Human
ccgaauagcugggacuacag

SEQ ID NO: 1811267 - RNA, 16 nt, Human
ccgacccuugccgucu

SEQ ID NO: 1811268 - RNA, 17 nt, Human
ccgccaaggcuggggga

SEQ ID NO: 1811269 - RNA, 16 nt, Human
ccgccaugcuccuggc

SEQ ID NO: 1811270 - RNA, 20 nt, Human
ccgcccaggcuuagucacug

SEQ ID NO: 1811271 - RNA, 18 nt, Human
cccuucgcuccugugucu

SEQ ID NO: 1811272 - RNA, 16 nt, Human
cccuucgcuccugugu

SEQ ID NO: 1811273 - RNA, 16 nt, Human
cccuucuaccuuccug

SEQ ID NO: 1811274 - RNA, 21 nt, Human
cccuucugacccaugcugccc

SEQ ID NO: 1811275 - RNA, 22 nt, Human
cccuucugacccaugcugcccu

SEQ ID NO: 1811276 - RNA, 23 nt, Human
cccuucugacccaugcugcccug

SEQ ID NO: 1811277 - RNA, 22 nt, Human
ccucugccugaagucacacagu

SEQ ID NO: 1811278 - RNA, 12 nt, Human
ccucugccuguc

SEQ ID NO: 1811279 - RNA, 12 nt, Human
ccucucugcccu

SEQ ID NO: 1811280 - RNA, 23 nt, Human
ccucucugcaggucccuaauaaa

SEQ ID NO: 1811281 - RNA, 21 nt, Human
ccucucugcaggucccuaaua

SEQ ID NO: 1811282 - RNA, 22 nt, Human
ccucucugcaggucccuaauaa

SEQ ID NO: 1811283 - RNA, 15 nt, Human
ccucugcugauccuc

SEQ ID NO: 1811284 - RNA, 18 nt, Human
ccucugcugauccuccca

SEQ ID NO: 1811285 - RNA, 13 nt, Human
ccucugcugcugg

SEQ ID NO: 1811286 - RNA, 14 nt, Human
ccucugcugcuggc

SEQ ID NO: 1811287 - RNA, 15 nt, Human
ccucugcugcuggcu

SEQ ID NO: 1811288 - RNA, 16 nt, Human
ccucugcugcuggcug

SEQ ID NO: 1811289 - RNA, 17 nt, Human
ccucugcugcuggcugg

SEQ ID NO: 1811290 - RNA, 18 nt, Human
ccucugcugcuggcuggu

SEQ ID NO: 1811291 - RNA, 13 nt, Human
ccucucugcaggu

SEQ ID NO: 1811292 - RNA, 15 nt, Human
ccucucugcaggucc

SEQ ID NO: 1811293 - RNA, 20 nt, Human
ccucucugcaggucccuaau

SEQ ID NO: 1811294 - RNA, 14 nt, Human
ccucucucaggcca

SEQ ID NO: 1811295 - RNA, 13 nt, Human
ccucucucacucc

SEQ ID NO: 1811296 - RNA, 14 nt, Human
ccucucucacuccu

SEQ ID NO: 1811297 - RNA, 15 nt, Human
ccucucucacuccuu

SEQ ID NO: 1811298 - RNA, 17 nt, Human
ccucucucacuccuuga

SEQ ID NO: 1811299 - RNA, 12 nt, Human
ccucucucaggc

SEQ ID NO: 1811300 - RNA, 22 nt, Human
ccugcacuugcagacucuacag

SEQ ID NO: 1811301 - RNA, 19 nt, Human
ccugaguagcuggauuaca

SEQ ID NO: 1811302 - RNA, 15 nt, Human
ccugaguagcuggau

SEQ ID NO: 1811303 - RNA, 20 nt, Human
ccugaguagcuggauuacag

SEQ ID NO: 1811304 - RNA, 13 nt, Human
ccucuuggguuca

SEQ ID NO: 1811305 - RNA, 19 nt, Human
ccucuugagccuugaacuu

SEQ ID NO: 1811306 - RNA, 13 nt, Human
ccucuugagccuu

SEQ ID NO: 1811307 - RNA, 18 nt, Human
ccuggcacccggccccug

SEQ ID NO: 1811308 - RNA, 16 nt, Human
ccuggcacagggcagu

SEQ ID NO: 1811309 - RNA, 17 nt, Human
ccuggcacagggcagug

SEQ ID NO: 1811310 - RNA, 18 nt, Human
ccuggcacagggcagugg

SEQ ID NO: 1811311 - RNA, 15 nt, Human
ccuggaguucugguu

SEQ ID NO: 1811312 - RNA, 16 nt, Human
ccuggaguucugguuc

SEQ ID NO: 1811313 - RNA, 17 nt, Human
ccuggaguucugguucc

SEQ ID NO: 1811314 - RNA, 19 nt, Human
ccuggaugcagccucacag

SEQ ID NO: 1811315 - RNA, 14 nt, Human
ccuggaugcagccu

SEQ ID NO: 1811316 - RNA, 17 nt, Human
ccuggaugcagccucac

SEQ ID NO: 1811317 - RNA, 21 nt, Human
ccuggauccaucaggccacuu

SEQ ID NO: 1811318 - RNA, 13 nt, Human
ccuggaugcagcc

SEQ ID NO: 1811319 - RNA, 18 nt, Human
ccugcccaggccccugcc

SEQ ID NO: 1811320 - RNA, 16 nt, Human
ccugcccaggccccug

SEQ ID NO: 1811321 - RNA, 15 nt, Human
ccugcccaggccccu

SEQ ID NO: 1811322 - RNA, 14 nt, Human
ccugcccaggcccc

SEQ ID NO: 1811323 - RNA, 12 nt, Human
ccugcugggugu

SEQ ID NO: 1811324 - RNA, 21 nt, Human
ccugcuggguguggcgcagca

SEQ ID NO: 1811325 - RNA, 14 nt, Human
ccugcugggugugg

SEQ ID NO: 1811326 - RNA, 20 nt, Human
ccugcuggguguggcgcagc

SEQ ID NO: 1811327 - RNA, 12 nt, Human
ccuggccucugc

SEQ ID NO: 1811328 - RNA, 16 nt, Human
ccuggccucugcacuc

SEQ ID NO: 1811329 - RNA, 13 nt, Human
ccuggccugagcu

SEQ ID NO: 1811330 - RNA, 14 nt, Human
ccuggccucugcac

SEQ ID NO: 1811331 - RNA, 15 nt, Human
ccuggccucugcacu

SEQ ID NO: 1811332 - RNA, 22 nt, Human
ccccagcaagugagagcugggu

SEQ ID NO: 1811333 - RNA, 13 nt, Human
ccccagaggcugg

SEQ ID NO: 1811334 - RNA, 23 nt, Human
ccccgacccuugccgucuaccug

SEQ ID NO: 1811335 - RNA, 22 nt, Human
cccccaaauggaaaugggcaga

SEQ ID NO: 1811336 - RNA, 22 nt, Human
ccccaaaacucuccucugcugc

SEQ ID NO: 1811337 - RNA, 23 nt, Human
cccauuguggucacaggaaguag

SEQ ID NO: 1811338 - RNA, 22 nt, Human
cccauuguggucacaggaagua

SEQ ID NO: 1811339 - RNA, 23 nt, Human
ccccaaaacucuccucugcugcu

SEQ ID NO: 1811340 - RNA, 23 nt, Human
ccccgaggccuucucugaaggac

SEQ ID NO: 1811341 - RNA, 17 nt, Human
cccuauugguaaagaau

SEQ ID NO: 1811342 - RNA, 18 nt, Human
cccuauuagagaagagau

SEQ ID NO: 1811343 - RNA, 23 nt, Human
cccgggaggcagagguugcagug

SEQ ID NO: 1811344 - RNA, 17 nt, Human
cccggccaccugcggug

SEQ ID NO: 1811345 - RNA, 16 nt, Human
cccggcuccaggcucc

SEQ ID NO: 1811346 - RNA, 15 nt, Human
cccggcuccaggcuc

SEQ ID NO: 1811347 - RNA, 14 nt, Human
cccggcuccaggcu

SEQ ID NO: 1811348 - RNA, 13 nt, Human
cccggcuccaggc

SEQ ID NO: 1811349 - RNA, 12 nt, Human
cccggcuccagg

SEQ ID NO: 1811350 - RNA, 11 nt, Human
cccggcuccag

SEQ ID NO: 1811351 - RNA, 13 nt, Human
cccggccaccugc

SEQ ID NO: 1811352 - RNA, 14 nt, Human
cccggccaccugcg

SEQ ID NO: 1811353 - RNA, 14 nt, Human
cccgaauagcuggg

SEQ ID NO: 1811354 - RNA, 19 nt, Human
ccccucuggcuccagcugg

SEQ ID NO: 1811355 - RNA, 20 nt, Human
cccauauuuguacaccaaua

SEQ ID NO: 1811356 - RNA, 17 nt, Human
cccaggcuggcgugcag

SEQ ID NO: 1811357 - RNA, 13 nt, Human
cccaggcuggcgu

SEQ ID NO: 1811358 - RNA, 15 nt, Human
cccagcuugaaaccu

SEQ ID NO: 1811359 - RNA, 13 nt, Human
cccauccucugua

SEQ ID NO: 1811360 - RNA, 23 nt, Human
cccagcucugguccauagagagc

SEQ ID NO: 1811361 - RNA, 18 nt, Human
cccacuagacccacugga

SEQ ID NO: 1811362 - RNA, 13 nt, Human
cccacugcucugg

SEQ ID NO: 1811363 - RNA, 12 nt, Human
cccacugcucug

SEQ ID NO: 1811364 - RNA, 19 nt, Human
cccacugcuuuuggucugu

SEQ ID NO: 1811365 - RNA, 22 nt, Human
cccacugcuuuuggucugugug

SEQ ID NO: 1811366 - RNA, 18 nt, Human
cccacccugaaagcccug

SEQ ID NO: 1811367 - RNA, 17 nt, Human
cccacccccacccaagg

SEQ ID NO: 1811368 - RNA, 15 nt, Human
cccacccccacccaa

SEQ ID NO: 1811369 - RNA, 20 nt, Human
cccacccaagggccuggccu

SEQ ID NO: 1811370 - RNA, 21 nt, Human
cccacccaagggccuggccug

SEQ ID NO: 1811371 - RNA, 22 nt, Human
cccacccaagggccuggccuga

SEQ ID NO: 1811372 - RNA, 20 nt, Human
ccauggucggaaaacaugcu

SEQ ID NO: 1811373 - RNA, 23 nt, Human
ccaugagccucagcauccuggca

SEQ ID NO: 1811374 - RNA, 21 nt, Human
ccaugagccucagcauccugg

SEQ ID NO: 1811375 - RNA, 21 nt, Human
ccaguuguuagauuaagaaau

SEQ ID NO: 1811376 - RNA, 23 nt, Human
ccaguuggucccccuuccaugga

SEQ ID NO: 1811377 - RNA, 14 nt, Human
ccaucccagcccca

SEQ ID NO: 1811378 - RNA, 15 nt, Human
ccaucccagccccaa

SEQ ID NO: 1811379 - RNA, 13 nt, Human
ccaucccagcccc

SEQ ID NO: 1811380 - RNA, 14 nt, Human
ccaucccugaaggc

SEQ ID NO: 1811381 - RNA, 15 nt, Human
ccaucccugaaggcc

SEQ ID NO: 1811382 - RNA, 17 nt, Human
ccaucccugaaggcccc

SEQ ID NO: 1811383 - RNA, 20 nt, Human
ccaucccugaaggccccgcc

SEQ ID NO: 1811384 - RNA, 20 nt, Human
ccaguuggguggaugccugg

SEQ ID NO: 1811385 - RNA, 19 nt, Human
ccaguuggguggaugccug

SEQ ID NO: 1811386 - RNA, 17 nt, Human
ccaguuggguggaugcc

SEQ ID NO: 1811387 - RNA, 18 nt, Human
ccaggcuggcgugcagug

SEQ ID NO: 1811388 - RNA, 17 nt, Human
ccaggcuggcgugcagu

SEQ ID NO: 1811389 - RNA, 19 nt, Human
ccaggcuggcgugcagugg

SEQ ID NO: 1811390 - RNA, 21 nt, Human
ccaggcuccuuuagcgcccag

SEQ ID NO: 1811391 - RNA, 20 nt, Human
ccaggcuccuuuagcgccca

SEQ ID NO: 1811392 - RNA, 19 nt, Human
ccaggggaaaaucagccug

SEQ ID NO: 1811393 - RNA, 20 nt, Human
ccaggggaaaaucagccugc

SEQ ID NO: 1811394 - RNA, 13 nt, Human
ccaggggugggac

SEQ ID NO: 1811395 - RNA, 19 nt, Human
ccaggggugggacacccug

SEQ ID NO: 1811396 - RNA, 14 nt, Human
ccaggggugggaca

SEQ ID NO: 1811397 - RNA, 17 nt, Human
ccaggggugggacaccc

SEQ ID NO: 1811398 - RNA, 16 nt, Human
ccaggcacugcugccc

SEQ ID NO: 1811399 - RNA, 18 nt, Human
ccaggcacugcugcccag

SEQ ID NO: 1811400 - RNA, 13 nt, Human
ccagcaggcucuc

SEQ ID NO: 1811401 - RNA, 15 nt, Human
ccagcaggcucucag

SEQ ID NO: 1811402 - RNA, 22 nt, Human
ccagcucaccagccccagugcc

SEQ ID NO: 1811403 - RNA, 16 nt, Human
ccagcuguucagcugg

SEQ ID NO: 1811404 - RNA, 16 nt, Human
ccagcucaccagcccc

SEQ ID NO: 1811405 - RNA, 15 nt, Human
ccagcucaccagccc

SEQ ID NO: 1811406 - RNA, 17 nt, Human
ccagcuguucagcuggu

SEQ ID NO: 1811407 - RNA, 16 nt, Human
ccagcuuaucucaggg

SEQ ID NO: 1811408 - RNA, 19 nt, Human
ccagcuuaaaggggcuaga

SEQ ID NO: 1811409 - RNA, 11 nt, Human
ccagccccugg

SEQ ID NO: 1811410 - RNA, 12 nt, Human
ccagccccugga

SEQ ID NO: 1811411 - RNA, 16 nt, Human
ccaggaaaggcuccag

SEQ ID NO: 1811412 - RNA, 14 nt, Human
ccaggaaaggcucc

SEQ ID NO: 1811413 - RNA, 15 nt, Human
ccaggaaaggcucca

SEQ ID NO: 1811414 - RNA, 12 nt, Human
ccaggaagccag

SEQ ID NO: 1811415 - RNA, 14 nt, Human
ccaggaagccagca

SEQ ID NO: 1811416 - RNA, 13 nt, Human
ccaggaagccagc

SEQ ID NO: 1811417 - RNA, 16 nt, Human
ccaccuuggcucaagu

SEQ ID NO: 1811418 - RNA, 17 nt, Human
ccagagggccugcaagg

SEQ ID NO: 1811419 - RNA, 18 nt, Human
ccagagggccugcaaggg

SEQ ID NO: 1811420 - RNA, 19 nt, Human
ccagagggccugcaaggga

SEQ ID NO: 1811421 - RNA, 20 nt, Human
ccagagggccugcaagggag

SEQ ID NO: 1811422 - RNA, 15 nt, Human
ccagaugcaccagcc

SEQ ID NO: 1811423 - RNA, 17 nt, Human
ccagaugcaccagcccu

SEQ ID NO: 1811424 - RNA, 18 nt, Human
ccagaugcaccagcccuu

SEQ ID NO: 1811425 - RNA, 23 nt, Human
ccagaugcaccagcccuuagcag

SEQ ID NO: 1811426 - RNA, 12 nt, Human
ccuuuuuuauac

SEQ ID NO: 1811427 - RNA, 23 nt, Human
cgaccagacaccuugacagggca

SEQ ID NO: 1811428 - RNA, 12 nt, Human
cgaccaccugcc

SEQ ID NO: 1811429 - RNA, 14 nt, Human
cgaccaccugccca

SEQ ID NO: 1811430 - RNA, 19 nt, Human
ccuuuuuuauacauaaaca

SEQ ID NO: 1811431 - RNA, 18 nt, Human
ccuuuuuuauacauaaac

SEQ ID NO: 1811432 - RNA, 17 nt, Human
ccuuuuuuauacauaaa

SEQ ID NO: 1811433 - RNA, 16 nt, Human
cgacagugagacucug

SEQ ID NO: 1811434 - RNA, 15 nt, Human
cgacagugagacucu

SEQ ID NO: 1811435 - RNA, 20 nt, Human
ccuuuagcgcccaguugggu

SEQ ID NO: 1811436 - RNA, 14 nt, Human
ccuuuagcgcccag

SEQ ID NO: 1811437 - RNA, 17 nt, Human
ccuugccgucuaccuga

SEQ ID NO: 1811438 - RNA, 20 nt, Human
ccuugccgucuaccugaggg

SEQ ID NO: 1811439 - RNA, 20 nt, Human
ccuucugaaaaaguauccug

SEQ ID NO: 1811440 - RNA, 20 nt, Human
ccuggccugagcugggauga

SEQ ID NO: 1811441 - RNA, 14 nt, Human
ccuggccugagcug

SEQ ID NO: 1811442 - RNA, 15 nt, Human
ccuggccugagcugg

SEQ ID NO: 1811443 - RNA, 12 nt, Human
ccuucugaccca

SEQ ID NO: 1811444 - RNA, 16 nt, Human
ccuucugacccaugcu

SEQ ID NO: 1811445 - RNA, 17 nt, Human
ccuucugacccaugcug

SEQ ID NO: 1811446 - RNA, 20 nt, Human
ccuucugacccaugcugccc

SEQ ID NO: 1811447 - RNA, 22 nt, Human
ccuucuggaauaaggagaauga

SEQ ID NO: 1811448 - RNA, 23 nt, Human
ccuucugacccaugcugcccugu

SEQ ID NO: 1811449 - RNA, 21 nt, Human
ccuucugacccaugcugcccu

SEQ ID NO: 1811450 - RNA, 22 nt, Human
ccuucugacccaugcugcccug

SEQ ID NO: 1811451 - RNA, 18 nt, Human
cggcucacugcagccuca

SEQ ID NO: 1811452 - RNA, 19 nt, Human
cggcucacugcagccucaa

SEQ ID NO: 1811453 - RNA, 17 nt, Human
cggcucacugcauccuc

SEQ ID NO: 1811454 - RNA, 21 nt, Human
cggcucacugcauccuccgcc

SEQ ID NO: 1811455 - RNA, 14 nt, Human
cggagucccaccuu

SEQ ID NO: 1811456 - RNA, 16 nt, Human
cggaggggccuggcag

SEQ ID NO: 1811457 - RNA, 18 nt, Human
cggaggggccuggcagcc

SEQ ID NO: 1811458 - RNA, 16 nt, Human
cgaguagcugggacua

SEQ ID NO: 1811459 - RNA, 15 nt, Human
cgaguagcugggacu

SEQ ID NO: 1811460 - RNA, 14 nt, Human
cgaguagcugggac

SEQ ID NO: 1811461 - RNA, 13 nt, Human
cgaguagcuggga

SEQ ID NO: 1811462 - RNA, 17 nt, Human
cgaguuacagacaaagc

SEQ ID NO: 1811463 - RNA, 18 nt, Human
cgaguuacagacaaagcg

SEQ ID NO: 1811464 - RNA, 14 nt, Human
cgccuacaggagug

SEQ ID NO: 1811465 - RNA, 23 nt, Human
cgccaaggcugggggaagaagcu

SEQ ID NO: 1811466 - RNA, 13 nt, Human
cgccaaggcuggg

SEQ ID NO: 1811467 - RNA, 16 nt, Human
cgccaaggcuggggga

SEQ ID NO: 1811468 - RNA, 14 nt, Human
cgcaggcuggcccu

SEQ ID NO: 1811469 - RNA, 15 nt, Human
cgcaggcuggcccug

SEQ ID NO: 1811470 - RNA, 17 nt, Human
cgcaggcuggcccugcc

SEQ ID NO: 1811471 - RNA, 18 nt, Human
cgcaggcuggcccugccc

SEQ ID NO: 1811472 - RNA, 19 nt, Human
cgcaggcuggcccugcccu

SEQ ID NO: 1811473 - RNA, 20 nt, Human
cgcaggcuggcccugcccug

SEQ ID NO: 1811474 - RNA, 12 nt, Human
cgccaaggcugg

SEQ ID NO: 1811475 - RNA, 16 nt, Human
cgaccugccucggccu

SEQ ID NO: 1811476 - RNA, 22 nt, Human
cuaguuccaccaucaagccacc

SEQ ID NO: 1811477 - RNA, 18 nt, Human
cuaguuccaccaucaagc

SEQ ID NO: 1811478 - RNA, 20 nt, Human
cuaguuccaccaucaagcca

SEQ ID NO: 1811479 - RNA, 21 nt, Human
cuagggaaaaaccagcgugug

SEQ ID NO: 1811480 - RNA, 19 nt, Human
cuagggaaaaaccagcgug

SEQ ID NO: 1811481 - RNA, 15 nt, Human
cuaccugaggggccu

SEQ ID NO: 1811482 - RNA, 11 nt, Human
cuaccugaggg

SEQ ID NO: 1811483 - RNA, 14 nt, Human
cuaccugaggggcc

SEQ ID NO: 1811484 - RNA, 19 nt, Human
cuagaaauuccccacccug

SEQ ID NO: 1811485 - RNA, 19 nt, Human
cuagcauuucccaacacaa

SEQ ID NO: 1811486 - RNA, 23 nt, Human
cuagcagcagggagggcuucugc

SEQ ID NO: 1811487 - RNA, 17 nt, Human
cuagcauggcugccaau

SEQ ID NO: 1811488 - RNA, 15 nt, Human
cuagaacugaauuuu

SEQ ID NO: 1811489 - RNA, 22 nt, Human
cuagcagcagggagggcuucug

SEQ ID NO: 1811490 - RNA, 19 nt, Human
cuagaacucccuuucaaca

SEQ ID NO: 1811491 - RNA, 18 nt, Human
cuagaacucccuuucaac

SEQ ID NO: 1811492 - RNA, 17 nt, Human
cuagaacucccuuucaa

SEQ ID NO: 1811493 - RNA, 16 nt, Human
cuagaacucccuuuca

SEQ ID NO: 1811494 - RNA, 22 nt, Human
cuaagugauccucccaccucag

SEQ ID NO: 1811495 - RNA, 20 nt, Human
cuaagugauccucccaccuc

SEQ ID NO: 1811496 - RNA, 18 nt, Human
cuaagugaggaugaaaaa

SEQ ID NO: 1811497 - RNA, 15 nt, Human
cuacaguccucccau

SEQ ID NO: 1811498 - RNA, 16 nt, Human
cuacaguccucccauc

SEQ ID NO: 1811499 - RNA, 17 nt, Human
cuacaguccucccaucu

SEQ ID NO: 1811500 - RNA, 18 nt, Human
cuacaguccucccaucuc

SEQ ID NO: 1811501 - RNA, 17 nt, Human
cuacaguguacagucuu

SEQ ID NO: 1811502 - RNA, 16 nt, Human
cuacaguguacagucu

SEQ ID NO: 1811503 - RNA, 15 nt, Human
cuacaguguacaguc

SEQ ID NO: 1811504 - RNA, 13 nt, Human
cuacaguugaaaa

SEQ ID NO: 1811505 - RNA, 20 nt, Human
cuacaguguacagucuugua

SEQ ID NO: 1811506 - RNA, 19 nt, Human
cuacaguugaaaaacagcu

SEQ ID NO: 1811507 - RNA, 15 nt, Human
cuacaugagguacug

SEQ ID NO: 1811508 - RNA, 18 nt, Human
cuacauacaauuccaaac

SEQ ID NO: 1811509 - RNA, 23 nt, Human
cuaagugaaauaagccagacauc

SEQ ID NO: 1811510 - RNA, 20 nt, Human
cuaagugaaauaagccagac

SEQ ID NO: 1811511 - RNA, 22 nt, Human
cuaaacugcccccucugcccug

SEQ ID NO: 1811512 - RNA, 23 nt, Human
cuaaacugcccccucugcccugc

SEQ ID NO: 1811513 - RNA, 13 nt, Human
cgugagaccugcc

SEQ ID NO: 1811514 - RNA, 14 nt, Human
cgugagaccugccc

SEQ ID NO: 1811515 - RNA, 16 nt, Human
cgugagaccugccccu

SEQ ID NO: 1811516 - RNA, 23 nt, Human
cgugagccaccgugccuggccac

SEQ ID NO: 1811517 - RNA, 17 nt, Human
cggcucuggccuccaag

SEQ ID NO: 1811518 - RNA, 16 nt, Human
cuaacuucaccauauu

SEQ ID NO: 1811519 - RNA, 15 nt, Human
cuaacuucaccauau

SEQ ID NO: 1811520 - RNA, 13 nt, Human
cucagcggggaca

SEQ ID NO: 1811521 - RNA, 14 nt, Human
cucagcgaaugaau

SEQ ID NO: 1811522 - RNA, 13 nt, Human
cucaggccagcug

SEQ ID NO: 1811523 - RNA, 14 nt, Human
cucaggccagcugc

SEQ ID NO: 1811524 - RNA, 15 nt, Human
cucaggccagcugcu

SEQ ID NO: 1811525 - RNA, 21 nt, Human
cucaggccagcugcuugggcu

SEQ ID NO: 1811526 - RNA, 22 nt, Human
cucaggccagcugcuugggcuu

SEQ ID NO: 1811527 - RNA, 22 nt, Human
cucagccuccugaguagcugga

SEQ ID NO: 1811528 - RNA, 14 nt, Human
cucagccuccugag

SEQ ID NO: 1811529 - RNA, 12 nt, Human
cucagccuccug

SEQ ID NO: 1811530 - RNA, 13 nt, Human
cucagccuccuga

SEQ ID NO: 1811531 - RNA, 13 nt, Human
cucagccucccaa

SEQ ID NO: 1811532 - RNA, 15 nt, Human
cuaucccggcugccc

SEQ ID NO: 1811533 - RNA, 16 nt, Human
cuaucccggcugcccu

SEQ ID NO: 1811534 - RNA, 16 nt, Human
cucagccucccaaagu

SEQ ID NO: 1811535 - RNA, 14 nt, Human
cucagccucccaaa

SEQ ID NO: 1811536 - RNA, 21 nt, Human
cucagccucccaaagugcugg

SEQ ID NO: 1811537 - RNA, 17 nt, Human
cuaucccggcugcccuu

SEQ ID NO: 1811538 - RNA, 23 nt, Human
cucagccucccgaauagcuggga

SEQ ID NO: 1811539 - RNA, 13 nt, Human
cucagccucccga

SEQ ID NO: 1811540 - RNA, 22 nt, Human
cucagccucccaaagugcuggg

SEQ ID NO: 1811541 - RNA, 14 nt, Human
cucaggccuggggg

SEQ ID NO: 1811542 - RNA, 20 nt, Human
cucaggccugggggcugggc

SEQ ID NO: 1811543 - RNA, 21 nt, Human
cucaggccugggggcugggca

SEQ ID NO: 1811544 - RNA, 17 nt, Human
cucagucuggcccuucc

SEQ ID NO: 1811545 - RNA, 18 nt, Human
cucagucuggcccuuccu

SEQ ID NO: 1811546 - RNA, 13 nt, Human
cucagugccacua

SEQ ID NO: 1811547 - RNA, 16 nt, Human
cuccaaagucucugga

SEQ ID NO: 1811548 - RNA, 18 nt, Human
cucaugccucagccuccu

SEQ ID NO: 1811549 - RNA, 20 nt, Human
cucaugccucagccuccuga

SEQ ID NO: 1811550 - RNA, 19 nt, Human
cucauguucuuaauucuua

SEQ ID NO: 1811551 - RNA, 18 nt, Human
cucauguucuuaauucuu

SEQ ID NO: 1811552 - RNA, 14 nt, Human
cucauguucuuaau

SEQ ID NO: 1811553 - RNA, 12 nt, Human
cucauguucuua

SEQ ID NO: 1811554 - RNA, 11 nt, Human
cuccaggugca

SEQ ID NO: 1811555 - RNA, 14 nt, Human
cuccagaccccugg

SEQ ID NO: 1811556 - RNA, 16 nt, Human
cuccaagaccuucucc

SEQ ID NO: 1811557 - RNA, 17 nt, Human
cuccaagaccuucuccu

SEQ ID NO: 1811558 - RNA, 18 nt, Human
cuccaagaccuucuccuu

SEQ ID NO: 1811559 - RNA, 21 nt, Human
cuccaagaccuucuccuucac

SEQ ID NO: 1811560 - RNA, 22 nt, Human
cuccacuuucuagccagaggag

SEQ ID NO: 1811561 - RNA, 15 nt, Human
cuccagaauuuccca

SEQ ID NO: 1811562 - RNA, 18 nt, Human
cuccagaauuucccaaag

SEQ ID NO: 1811563 - RNA, 17 nt, Human
cuccagacacaugucca

SEQ ID NO: 1811564 - RNA, 19 nt, Human
cuccagacacauguccaag

SEQ ID NO: 1811565 - RNA, 21 nt, Human
cuccagugagacagcucugca

SEQ ID NO: 1811566 - RNA, 13 nt, Human
cucccaccucagc

SEQ ID NO: 1811567 - RNA, 12 nt, Human
cucccaccucag

SEQ ID NO: 1811568 - RNA, 19 nt, Human
cuccgcuuucuacccagcg

SEQ ID NO: 1811569 - RNA, 15 nt, Human
cuccgccucccgggu

SEQ ID NO: 1811570 - RNA, 15 nt, Human
cucugaaggacauug

SEQ ID NO: 1811571 - RNA, 11 nt, Human
cucucuggccu

SEQ ID NO: 1811572 - RNA, 12 nt, Human
cucucuggccuu

SEQ ID NO: 1811573 - RNA, 15 nt, Human
cucucacuccuugaa

SEQ ID NO: 1811574 - RNA, 19 nt, Human
cucucagauuguaccauug

SEQ ID NO: 1811575 - RNA, 12 nt, Human
cucucacuccuu

SEQ ID NO: 1811576 - RNA, 14 nt, Human
cucucacuccuuga

SEQ ID NO: 1811577 - RNA, 20 nt, Human
cucgggauuaguacacacuu

SEQ ID NO: 1811578 - RNA, 17 nt, Human
cucuguacagagcccac

SEQ ID NO: 1811579 - RNA, 21 nt, Human
cucuguacagagcccacgccc

SEQ ID NO: 1811580 - RNA, 15 nt, Human
cucugguccauagag

SEQ ID NO: 1811581 - RNA, 19 nt, Human
cucugcugacagacacagg

SEQ ID NO: 1811582 - RNA, 18 nt, Human
cucugcugacagacacag

SEQ ID NO: 1811583 - RNA, 17 nt, Human
cucugcugacagacaca

SEQ ID NO: 1811584 - RNA, 14 nt, Human
cucugguuccuccc

SEQ ID NO: 1811585 - RNA, 19 nt, Human
cucugguccauagagagca

SEQ ID NO: 1811586 - RNA, 16 nt, Human
cucugguccauagaga

SEQ ID NO: 1811587 - RNA, 18 nt, Human
cucugguccauagagagc

SEQ ID NO: 1811588 - RNA, 19 nt, Human
cucugcagcaauaaagcag

SEQ ID NO: 1811589 - RNA, 18 nt, Human
cucugcagcaauaaagca

SEQ ID NO: 1811590 - RNA, 23 nt, Human
cucugcagcaauaaagcagcguu

SEQ ID NO: 1811591 - RNA, 14 nt, Human
cucugcacuccccu

SEQ ID NO: 1811592 - RNA, 21 nt, Human
cugaaggacauugcggacagc

SEQ ID NO: 1811593 - RNA, 20 nt, Human
cugaaggacauugcggacag

SEQ ID NO: 1811594 - RNA, 19 nt, Human
cugaaggacauugcggaca

SEQ ID NO: 1811595 - RNA, 13 nt, Human
cugaaggccccgc

SEQ ID NO: 1811596 - RNA, 14 nt, Human
cugaaggccccgcc

SEQ ID NO: 1811597 - RNA, 17 nt, Human
cugaaggccccgcccag

SEQ ID NO: 1811598 - RNA, 18 nt, Human
cugaaggccccgcccagg

SEQ ID NO: 1811599 - RNA, 22 nt, Human
cugaaggaauaaauugcuccuu

SEQ ID NO: 1811600 - RNA, 16 nt, Human
cugaaaauguaugugu

SEQ ID NO: 1811601 - RNA, 16 nt, Human
cucuugccacugccuc

SEQ ID NO: 1811602 - RNA, 17 nt, Human
cucuugccacugccucu

SEQ ID NO: 1811603 - RNA, 18 nt, Human
cucuugccacugccucuu

SEQ ID NO: 1811604 - RNA, 19 nt, Human
cucuugccacugccucuuc

SEQ ID NO: 1811605 - RNA, 20 nt, Human
cucuugccacugccucuucc

SEQ ID NO: 1811606 - RNA, 14 nt, Human
cugacagacacagg

SEQ ID NO: 1811607 - RNA, 12 nt, Human
cugacagacaca

SEQ ID NO: 1811608 - RNA, 15 nt, Human
cugacagacacaggc

SEQ ID NO: 1811609 - RNA, 14 nt, Human
cugacagaaggacu

SEQ ID NO: 1811610 - RNA, 23 nt, Human
cugacccugcuucaaauauuucc

SEQ ID NO: 1811611 - RNA, 18 nt, Human
cugacccaugcugcccug

SEQ ID NO: 1811612 - RNA, 17 nt, Human
cugacccaugcugcccu

SEQ ID NO: 1811613 - RNA, 19 nt, Human
cugacccaugcugcccugu

SEQ ID NO: 1811614 - RNA, 20 nt, Human
cugacccaugcugcccugug

SEQ ID NO: 1811615 - RNA, 19 nt, Human
cugaccuuaaaugcaacca

SEQ ID NO: 1811616 - RNA, 15 nt, Human
cugaccuuaaaugca

SEQ ID NO: 1811617 - RNA, 20 nt, Human
uguuaguaugaggcauuugu

SEQ ID NO: 1811618 - RNA, 19 nt, Human
uguuaguaugaggcauuug

SEQ ID NO: 1811619 - RNA, 17 nt, Human
uguuaguaugaggcauu

SEQ ID NO: 1811620 - RNA, 22 nt, Human
uguucagcuccagcucaccagc

SEQ ID NO: 1811621 - RNA, 21 nt, Human
uguucagcuccagcucaccag

SEQ ID NO: 1811622 - RNA, 20 nt, Human
uguucagcuccagcucacca

SEQ ID NO: 1811623 - RNA, 17 nt, Human
uguucauaaauaaaguu

SEQ ID NO: 1811624 - RNA, 14 nt, Human
uguuacuaaguuuu

SEQ ID NO: 1811625 - RNA, 17 nt, Human
uguuagccccauaauuu

SEQ ID NO: 1811626 - RNA, 19 nt, Human
ugugugcacguacacacac

SEQ ID NO: 1811627 - RNA, 15 nt, Human
ugugugcuuauguau

SEQ ID NO: 1811628 - RNA, 18 nt, Human
uguguaugcgugugugug

SEQ ID NO: 1811629 - RNA, 17 nt, Human
ugugugugaaaaugugu

SEQ ID NO: 1811630 - RNA, 22 nt, Human
ugugugucuaggcaggaccugu

SEQ ID NO: 1811631 - RNA, 20 nt, Human
ugugugugcuuauguaugag

SEQ ID NO: 1811632 - RNA, 19 nt, Human
ugugugugcuuauguauga

SEQ ID NO: 1811633 - RNA, 16 nt, Human
uguguuuauugucaaa

SEQ ID NO: 1811634 - RNA, 15 nt, Human
uguguuuuuaauaaa

SEQ ID NO: 1811635 - RNA, 15 nt, Human
uguguuuuucauaaa

SEQ ID NO: 1811636 - RNA, 20 nt, Human
uguguuuuuaauaaagacag

SEQ ID NO: 1811637 - RNA, 18 nt, Human
uguguuuuucauaaagca

SEQ ID NO: 1811638 - RNA, 15 nt, Human
uguucucucuucucc

SEQ ID NO: 1811639 - RNA, 16 nt, Human
uguucucucuucucca

SEQ ID NO: 1811640 - RNA, 19 nt, Human
uguucaucauccuaagcua

SEQ ID NO: 1811641 - RNA, 13 nt, Human
uguucucugagga

SEQ ID NO: 1811642 - RNA, 12 nt, Human
uguucuggcucu

SEQ ID NO: 1811643 - RNA, 13 nt, Human
uguucuggcucuu

SEQ ID NO: 1811644 - RNA, 16 nt, Human
uguucuggcucuucca

SEQ ID NO: 1811645 - RNA, 13 nt, Human
uguucucugcccu

SEQ ID NO: 1811646 - RNA, 14 nt, Human
uguucucugcccuc

SEQ ID NO: 1811647 - RNA, 15 nt, Human
uguucucugcccucc

SEQ ID NO: 1811648 - RNA, 16 nt, Human
uguucucugcccucca

SEQ ID NO: 1811649 - RNA, 15 nt, Human
uguugaagccuuugu

SEQ ID NO: 1811650 - RNA, 12 nt, Human
uguucugggaca

SEQ ID NO: 1811651 - RNA, 15 nt, Human
uguucugcuuuccuc

SEQ ID NO: 1811652 - RNA, 21 nt, Human
uguucuggcucuuccaggcug

SEQ ID NO: 1811653 - RNA, 17 nt, Human
uguucuggcucuuccag

SEQ ID NO: 1811654 - RNA, 20 nt, Human
uguucuggcucuuccaggcu

SEQ ID NO: 1811655 - RNA, 23 nt, Human
uguucuuucuggcuaugcauuug

SEQ ID NO: 1811656 - RNA, 16 nt, Human
uguuggccaggcuggu

SEQ ID NO: 1811657 - RNA, 15 nt, Human
uguuggccaggcugg

SEQ ID NO: 1811658 - RNA, 15 nt, Human
uguuggccaaagcca

SEQ ID NO: 1811659 - RNA, 14 nt, Human
uguuggcagccucu

SEQ ID NO: 1811660 - RNA, 16 nt, Human
uguugauuaaagauga

SEQ ID NO: 1811661 - RNA, 15 nt, Human
uguugauuaaagaug

SEQ ID NO: 1811662 - RNA, 19 nt, Human
uguuggcugggggccucag

SEQ ID NO: 1811663 - RNA, 17 nt, Human
uguuggcugggggccuc

SEQ ID NO: 1811664 - RNA, 12 nt, Human
uguuuaagagac

SEQ ID NO: 1811665 - RNA, 22 nt, Human
uuaauuaaaacacaacaucuuu

SEQ ID NO: 1811666 - RNA, 15 nt, Human
uuacacauuuuucag

SEQ ID NO: 1811667 - RNA, 17 nt, Human
uuacauuuuuaagugcu

SEQ ID NO: 1811668 - RNA, 12 nt, Human
uuacauuuuuaa

SEQ ID NO: 1811669 - RNA, 23 nt, Human
uuacacauuuuucagauauaaaa

SEQ ID NO: 1811670 - RNA, 17 nt, Human
uuacacauuuuucagau

SEQ ID NO: 1811671 - RNA, 13 nt, Human
uuacacuuuaugc

SEQ ID NO: 1811672 - RNA, 20 nt, Human
uuacacuuuaugcacaaaau

SEQ ID NO: 1811673 - RNA, 16 nt, Human
uuacacuuuuuggaag

SEQ ID NO: 1811674 - RNA, 20 nt, Human
uuaauagcgucauaacuaga

SEQ ID NO: 1811675 - RNA, 13 nt, Human
uuaacuuuuauaa

SEQ ID NO: 1811676 - RNA, 12 nt, Human
uuaacuuuuaua

SEQ ID NO: 1811677 - RNA, 20 nt, Human
uuaaaugcaaccauuugaaa

SEQ ID NO: 1811678 - RNA, 17 nt, Human
uuaaaugcccagccccu

SEQ ID NO: 1811679 - RNA, 15 nt, Human
uuaaauguagaaagu

SEQ ID NO: 1811680 - RNA, 12 nt, Human
uuaagaguaaaa

SEQ ID NO: 1811681 - RNA, 14 nt, Human
uuaacuuuuauaaa

SEQ ID NO: 1811682 - RNA, 15 nt, Human
uguuuccuggcacug

SEQ ID NO: 1811683 - RNA, 16 nt, Human
uguuuuaagaggcagg

SEQ ID NO: 1811684 - RNA, 17 nt, Human
uguuuuaagaggcaggg

SEQ ID NO: 1811685 - RNA, 23 nt, Human
uguuuuaaggaugcuuguacaua

SEQ ID NO: 1811686 - RNA, 22 nt, Human
uguuuuaaggaugcuuguacau

SEQ ID NO: 1811687 - RNA, 22 nt, Human
uuaaaaaaaaaccugagcccca

SEQ ID NO: 1811688 - RNA, 14 nt, Human
uuaaaacccaagug

SEQ ID NO: 1811689 - RNA, 11 nt, Human
uuaaaugcacc

SEQ ID NO: 1811690 - RNA, 14 nt, Human
uuaaaugcccagcc

SEQ ID NO: 1811691 - RNA, 15 nt, Human
uuaaaugcccagccc

SEQ ID NO: 1811692 - RNA, 16 nt, Human
uuaaaugcccagcccc

SEQ ID NO: 1811693 - RNA, 18 nt, Human
uuaaagaaaaguuuugua

SEQ ID NO: 1811694 - RNA, 16 nt, Human
ugucauuugagcaggg

SEQ ID NO: 1811695 - RNA, 19 nt, Human
ugucauuugagcagggcuc

SEQ ID NO: 1811696 - RNA, 16 nt, Human
ugucccaacuuguaaa

SEQ ID NO: 1811697 - RNA, 13 nt, Human
ugucaccugaaga

SEQ ID NO: 1811698 - RNA, 18 nt, Human
uguccccaccgcagacag

SEQ ID NO: 1811699 - RNA, 19 nt, Human
uguccccaccgcagacagg

SEQ ID NO: 1811700 - RNA, 22 nt, Human
uguccccaccgcagacaggacc

SEQ ID NO: 1811701 - RNA, 20 nt, Human
uguccuacccacccuccuuu

SEQ ID NO: 1811702 - RNA, 17 nt, Human
uguccccgacccuugcc

SEQ ID NO: 1811703 - RNA, 16 nt, Human
uguccccgacccuugc

SEQ ID NO: 1811704 - RNA, 17 nt, Human
uguccuacucuguguca

SEQ ID NO: 1811705 - RNA, 12 nt, Human
uguccuacucug

SEQ ID NO: 1811706 - RNA, 22 nt, Human
uguauucucuccuguaccucuu

SEQ ID NO: 1811707 - RNA, 22 nt, Human
uguauaaaagggacugagaaau

SEQ ID NO: 1811708 - RNA, 17 nt, Human
ugucacacacuuuggcu

SEQ ID NO: 1811709 - RNA, 12 nt, Human
ugucacaggcag

SEQ ID NO: 1811710 - RNA, 13 nt, Human
ugucacaggcagg

SEQ ID NO: 1811711 - RNA, 20 nt, Human
uguauuuauuuaguauuuau

SEQ ID NO: 1811712 - RNA, 15 nt, Human
uguauuuaaaugaaa

SEQ ID NO: 1811713 - RNA, 14 nt, Human
uguaaucacagcua

SEQ ID NO: 1811714 - RNA, 17 nt, Human
uggucacaggaaguaga

SEQ ID NO: 1811715 - RNA, 16 nt, Human
uguacaaggacagccc

SEQ ID NO: 1811716 - RNA, 20 nt, Human
uguacaaggacagccccucc

SEQ ID NO: 1811717 - RNA, 23 nt, Human
uguacaaggacagccccuccucc

SEQ ID NO: 1811718 - RNA, 17 nt, Human
uguaauuaaguacuaug

SEQ ID NO: 1811719 - RNA, 16 nt, Human
uguacagagcccacgc

SEQ ID NO: 1811720 - RNA, 17 nt, Human
uguacagagcccacgcc

SEQ ID NO: 1811721 - RNA, 18 nt, Human
uguacagagcccacgccc

SEQ ID NO: 1811722 - RNA, 21 nt, Human
uguacagucuuguauuaaguu

SEQ ID NO: 1811723 - RNA, 16 nt, Human
uguaccgcaaugugac

SEQ ID NO: 1811724 - RNA, 23 nt, Human
uguagccucaaucgagugagaca

SEQ ID NO: 1811725 - RNA, 18 nt, Human
uguagccccucuccugga

SEQ ID NO: 1811726 - RNA, 15 nt, Human
uguacgucugacagg

SEQ ID NO: 1811727 - RNA, 19 nt, Human
uguacugcauaugaaagga

SEQ ID NO: 1811728 - RNA, 19 nt, Human
ugugcgccuacaggaguga

SEQ ID NO: 1811729 - RNA, 14 nt, Human
ugugcgccuacagg

SEQ ID NO: 1811730 - RNA, 14 nt, Human
ugugcuuguuaacu

SEQ ID NO: 1811731 - RNA, 20 nt, Human
ugugcucaggagcccuggga

SEQ ID NO: 1811732 - RNA, 17 nt, Human
ugugcucaggagcccug

SEQ ID NO: 1811733 - RNA, 15 nt, Human
ugugcucaggagccc

SEQ ID NO: 1811734 - RNA, 16 nt, Human
ugugcucaggagcccu

SEQ ID NO: 1811735 - RNA, 14 nt, Human
ugugcacguacaca

SEQ ID NO: 1811736 - RNA, 19 nt, Human
ugugcauuaucuagauacu

SEQ ID NO: 1811737 - RNA, 16 nt, Human
ugugcauuaucuagau

SEQ ID NO: 1811738 - RNA, 14 nt, Human
ugugcauuaucuag

SEQ ID NO: 1811739 - RNA, 23 nt, Human
ugugcauuuggugguuucagaaa

SEQ ID NO: 1811740 - RNA, 23 nt, Human
ugugcauuaucuagauacuguau

SEQ ID NO: 1811741 - RNA, 21 nt, Human
ugugcauuaucuagauacugu

SEQ ID NO: 1811742 - RNA, 20 nt, Human
ugugcauuaucuagauacug

SEQ ID NO: 1811743 - RNA, 12 nt, Human
uguguagggcgg

SEQ ID NO: 1811744 - RNA, 16 nt, Human
uguguagggcgggagg

SEQ ID NO: 1811745 - RNA, 22 nt, Human
ugugggcuaguugggcuuccuc

SEQ ID NO: 1811746 - RNA, 22 nt, Human
ugugggcgugagaccugccccu

SEQ ID NO: 1811747 - RNA, 20 nt, Human
ugugggcgugagaccugccc

SEQ ID NO: 1811748 - RNA, 21 nt, Human
ugugggcgugagaccugcccc

SEQ ID NO: 1811749 - RNA, 23 nt, Human
uguggcgcagcauauucaggaag

SEQ ID NO: 1811750 - RNA, 10 nt, Human
uguggcucac

SEQ ID NO: 1811751 - RNA, 19 nt, Human
uguggacacagcucuucuc

SEQ ID NO: 1811752 - RNA, 18 nt, Human
uguggacacagcucuucu

SEQ ID NO: 1811753 - RNA, 20 nt, Human
ugugaggaagccgcuggggc

SEQ ID NO: 1811754 - RNA, 13 nt, Human
ugugaggaagccg

SEQ ID NO: 1811755 - RNA, 18 nt, Human
ugugaggaagccgcuggg

SEQ ID NO: 1811756 - RNA, 21 nt, Human
ugugagucaccaagcccaguu

SEQ ID NO: 1811757 - RNA, 19 nt, Human
ugugagucaccaagcccag

SEQ ID NO: 1811758 - RNA, 17 nt, Human
ugugagucaccaagccc

SEQ ID NO: 1811759 - RNA, 15 nt, Human
ugugagucaccaagc

SEQ ID NO: 1811760 - RNA, 16 nt, Human
ugugauauaagugugu

SEQ ID NO: 1811761 - RNA, 19 nt, Human
ugucugaagucacugcaca

SEQ ID NO: 1811762 - RNA, 20 nt, Human
ugucugaagucacugcacag

SEQ ID NO: 1811763 - RNA, 17 nt, Human
ugucugaagucacugca

SEQ ID NO: 1811764 - RNA, 18 nt, Human
ugucugaagucacugcac

SEQ ID NO: 1811765 - RNA, 16 nt, Human
ugucugaagucacugc

SEQ ID NO: 1811766 - RNA, 16 nt, Human
ugugaaaaugugugug

SEQ ID NO: 1811767 - RNA, 17 nt, Human
ugugaaaaugugugugu

SEQ ID NO: 1811768 - RNA, 23 nt, Human
ugugaaaagaaaaaugagccugg

SEQ ID NO: 1811769 - RNA, 23 nt, Human
ugucuuuucuugcaugaggcuag

SEQ ID NO: 1811770 - RNA, 14 nt, Human
ugucuuuggacccu

SEQ ID NO: 1811771 - RNA, 16 nt, Human
ugucuuuggacccuga

SEQ ID NO: 1811772 - RNA, 21 nt, Human
ugucuuuucuugcaugaggcu

SEQ ID NO: 1811773 - RNA, 18 nt, Human
ugcuccucuccccagcaa

SEQ ID NO: 1811774 - RNA, 17 nt, Human
ugcuccucuccccagca

SEQ ID NO: 1811775 - RNA, 18 nt, Human
ugcuccuuucuuguuuua

SEQ ID NO: 1811776 - RNA, 16 nt, Human
ugcucuccucuugcca

SEQ ID NO: 1811777 - RNA, 18 nt, Human
ugcucuccucuugccacu

SEQ ID NO: 1811778 - RNA, 21 nt, Human
ugcucuccucuugccacugcc

SEQ ID NO: 1811779 - RNA, 22 nt, Human
ugcucuccucuugccacugccu

SEQ ID NO: 1811780 - RNA, 16 nt, Human
ugcucacauaucuguc

SEQ ID NO: 1811781 - RNA, 15 nt, Human
ugcucacauaucugu

SEQ ID NO: 1811782 - RNA, 17 nt, Human
ugcucagagcaguguuu

SEQ ID NO: 1811783 - RNA, 14 nt, Human
ugcuccucucccca

SEQ ID NO: 1811784 - RNA, 23 nt, Human
ugcugacagacacaggcccggcu

SEQ ID NO: 1811785 - RNA, 22 nt, Human
ugcugacagacacaggcccggc

SEQ ID NO: 1811786 - RNA, 13 nt, Human
ugcugaaggcucg

SEQ ID NO: 1811787 - RNA, 21 nt, Human
ugcugaaggcucgagcaugcc

SEQ ID NO: 1811788 - RNA, 23 nt, Human
ugcugaaggaauaaauugcuccu

SEQ ID NO: 1811789 - RNA, 12 nt, Human
ugcugaaggcuc

SEQ ID NO: 1811790 - RNA, 18 nt, Human
ugcugauggugcaaugac

SEQ ID NO: 1811791 - RNA, 13 nt, Human
ugcugauggugca

SEQ ID NO: 1811792 - RNA, 15 nt, Human
ugcugauggugcaau

SEQ ID NO: 1811793 - RNA, 17 nt, Human
ugcugauggugcaauga

SEQ ID NO: 1811794 - RNA, 23 nt, Human
ugcugcaguugccagucaccccg

SEQ ID NO: 1811795 - RNA, 18 nt, Human
ugcugcaguugccaguca

SEQ ID NO: 1811796 - RNA, 14 nt, Human
ugcugcauuuaaaa

SEQ ID NO: 1811797 - RNA, 13 nt, Human
ugcugcuggcugg

SEQ ID NO: 1811798 - RNA, 16 nt, Human
ugccugguggcagcug

SEQ ID NO: 1811799 - RNA, 18 nt, Human
ugccuguaaucacagcua

SEQ ID NO: 1811800 - RNA, 15 nt, Human
ugccugguggcagcu

SEQ ID NO: 1811801 - RNA, 14 nt, Human
ugccugguggcagc

SEQ ID NO: 1811802 - RNA, 14 nt, Human
ugccugugaacuga

SEQ ID NO: 1811803 - RNA, 21 nt, Human
ugccugggaucccucauccuc

SEQ ID NO: 1811804 - RNA, 18 nt, Human
ugccugggcagaaggaag

SEQ ID NO: 1811805 - RNA, 19 nt, Human
ugccucgaacuggcugcaa

SEQ ID NO: 1811806 - RNA, 18 nt, Human
ugccucgaacuggcugca

SEQ ID NO: 1811807 - RNA, 20 nt, Human
ugccucgaacuggcugcaaa

SEQ ID NO: 1811808 - RNA, 18 nt, Human
ugccccuggcagccccug

SEQ ID NO: 1811809 - RNA, 9 nt, Human
ugccucucu

SEQ ID NO: 1811810 - RNA, 21 nt, Human
ugcgaucuggguucacugcaa

SEQ ID NO: 1811811 - RNA, 20 nt, Human
ugcgaucuggguucacugca

SEQ ID NO: 1811812 - RNA, 19 nt, Human
ugcgaucuggguucacugc

SEQ ID NO: 1811813 - RNA, 15 nt, Human
ugcgaucuggguuca

SEQ ID NO: 1811814 - RNA, 14 nt, Human
ugcgaucuggguuc

SEQ ID NO: 1811815 - RNA, 17 nt, Human
ugccugugaacugaacu

SEQ ID NO: 1811816 - RNA, 18 nt, Human
ugccugugaacugaacuc

SEQ ID NO: 1811817 - RNA, 21 nt, Human
ugccugugaacugaacucuga

SEQ ID NO: 1811818 - RNA, 22 nt, Human
ugcgccuacaggagugagcacu

SEQ ID NO: 1811819 - RNA, 16 nt, Human
ugcgccuacaggagug

SEQ ID NO: 1811820 - RNA, 14 nt, Human
ugcgccuacaggag

SEQ ID NO: 1811821 - RNA, 15 nt, Human
ugcuaaaugugaaug

SEQ ID NO: 1811822 - RNA, 19 nt, Human
ugccaaauauaaauaaaaa

SEQ ID NO: 1811823 - RNA, 22 nt, Human
ugccaaauauaaauaaaaauaa

SEQ ID NO: 1811824 - RNA, 19 nt, Human
ugcaucaagaugugacaug

SEQ ID NO: 1811825 - RNA, 14 nt, Human
ugcaucaagaugug

SEQ ID NO: 1811826 - RNA, 17 nt, Human
ugccaaauauaaauaaa

SEQ ID NO: 1811827 - RNA, 18 nt, Human
ugccaaauauaaauaaaa

SEQ ID NO: 1811828 - RNA, 20 nt, Human
ugcauauuuauaaaaauaaa

SEQ ID NO: 1811829 - RNA, 21 nt, Human
ugcauauuuauaaaaauaaaa

SEQ ID NO: 1811830 - RNA, 20 nt, Human
ugccacccuggggagaaagu

SEQ ID NO: 1811831 - RNA, 22 nt, Human
ugccacuacggaauaguuggcu

SEQ ID NO: 1811832 - RNA, 19 nt, Human
ugccacccuggggagaaag

SEQ ID NO: 1811833 - RNA, 20 nt, Human
ugccacuaaauugacacuua

SEQ ID NO: 1811834 - RNA, 22 nt, Human
ugccagguuuuuggucugaccc

SEQ ID NO: 1811835 - RNA, 19 nt, Human
ugccagguuuuuggucuga

SEQ ID NO: 1811836 - RNA, 18 nt, Human
ugccagguuuuuggucug

SEQ ID NO: 1811837 - RNA, 10 nt, Human
ugccaggcau

SEQ ID NO: 1811838 - RNA, 21 nt, Human
ugccauccagguucagcuugu

SEQ ID NO: 1811839 - RNA, 13 nt, Human
ugcccaccuggcc

SEQ ID NO: 1811840 - RNA, 14 nt, Human
ugcccaccuggccu

SEQ ID NO: 1811841 - RNA, 13 nt, Human
ugcccaggcuggc

SEQ ID NO: 1811842 - RNA, 20 nt, Human
ugcccaggcuggagugcaau

SEQ ID NO: 1811843 - RNA, 18 nt, Human
ugcccaggcuggagugca

SEQ ID NO: 1811844 - RNA, 13 nt, Human
ugcccaggcugga

SEQ ID NO: 1811845 - RNA, 21 nt, Human
ugcccacucccugcaaccuga

SEQ ID NO: 1811846 - RNA, 11 nt, Human
ugcccaggcug

SEQ ID NO: 1811847 - RNA, 16 nt, Human
ugcccacucccugcaa

SEQ ID NO: 1811848 - RNA, 14 nt, Human
ugcccacucccugc

SEQ ID NO: 1811849 - RNA, 15 nt, Human
ugcccacucccugca

SEQ ID NO: 1811850 - RNA, 23 nt, Human
ugccccucaacucuccuccagag

SEQ ID NO: 1811851 - RNA, 15 nt, Human
ugccccagggcuccc

SEQ ID NO: 1811852 - RNA, 13 nt, Human
ugccccucccuuc

SEQ ID NO: 1811853 - RNA, 17 nt, Human
ugccccuggcagccccu

SEQ ID NO: 1811854 - RNA, 15 nt, Human
ugcaguugccaguca

SEQ ID NO: 1811855 - RNA, 13 nt, Human
ugcaguugccagu

SEQ ID NO: 1811856 - RNA, 14 nt, Human
ugcaguugccaguc

SEQ ID NO: 1811857 - RNA, 20 nt, Human
ugcaguggugcgaucugggu

SEQ ID NO: 1811858 - RNA, 22 nt, Human
ugcagugguaugaucacggcuc

SEQ ID NO: 1811859 - RNA, 16 nt, Human
ugcagugcuuccaagg

SEQ ID NO: 1811860 - RNA, 15 nt, Human
ugcaggcagccaggc

SEQ ID NO: 1811861 - RNA, 13 nt, Human
ugcaggcagccag

SEQ ID NO: 1811862 - RNA, 14 nt, Human
ugcaggcagccagg

SEQ ID NO: 1811863 - RNA, 15 nt, Human
ugcaccgggccacag

SEQ ID NO: 1811864 - RNA, 14 nt, Human
ugcaccgggccaca

SEQ ID NO: 1811865 - RNA, 19 nt, Human
ugaguccccuguuuguuuc

SEQ ID NO: 1811866 - RNA, 23 nt, Human
ugcaccggcuggccuggccccuc

SEQ ID NO: 1811867 - RNA, 22 nt, Human
ugcaccgggccacagagaaagu

SEQ ID NO: 1811868 - RNA, 17 nt, Human
ugcaccgggccacagag

SEQ ID NO: 1811869 - RNA, 20 nt, Human
ugaguccccuguuuguuucu

SEQ ID NO: 1811870 - RNA, 21 nt, Human
ugcagagcaggaaacaugacu

SEQ ID NO: 1811871 - RNA, 23 nt, Human
ugcagcacagcugagaggcuguc

SEQ ID NO: 1811872 - RNA, 23 nt, Human
ugcagcaauaaagcagcguuucu

SEQ ID NO: 1811873 - RNA, 20 nt, Human
ugcagcaauaaagcagcguu

SEQ ID NO: 1811874 - RNA, 12 nt, Human
ugcacuuuguuc

SEQ ID NO: 1811875 - RNA, 14 nt, Human
ugcacuuuguucug

SEQ ID NO: 1811876 - RNA, 14 nt, Human
ugggagcugccugu

SEQ ID NO: 1811877 - RNA, 13 nt, Human
ugggagcugccug

SEQ ID NO: 1811878 - RNA, 12 nt, Human
ugggagcugccu

SEQ ID NO: 1811879 - RNA, 13 nt, Human
ugggagcaaaaga

SEQ ID NO: 1811880 - RNA, 13 nt, Human
ugggacacccugu

SEQ ID NO: 1811881 - RNA, 12 nt, Human
ugggacacccug

SEQ ID NO: 1811882 - RNA, 16 nt, Human
ugggauuacaggugug

SEQ ID NO: 1811883 - RNA, 18 nt, Human
ugggauuacaggcuccug

SEQ ID NO: 1811884 - RNA, 18 nt, Human
ugggauccuccaggugca

SEQ ID NO: 1811885 - RNA, 13 nt, Human
ugggauccuggag

SEQ ID NO: 1811886 - RNA, 21 nt, Human
ugggauuacagggaugagcca

SEQ ID NO: 1811887 - RNA, 17 nt, Human
ugggauuacagguguga

SEQ ID NO: 1811888 - RNA, 15 nt, Human
ugggcagaggaaagc

SEQ ID NO: 1811889 - RNA, 22 nt, Human
ugggagcugccuguucagcucc

SEQ ID NO: 1811890 - RNA, 14 nt, Human
ugggaguacaaaag

SEQ ID NO: 1811891 - RNA, 21 nt, Human
ugggagcugccuguucagcuc

SEQ ID NO: 1811892 - RNA, 17 nt, Human
ugggagcugccuguuca

SEQ ID NO: 1811893 - RNA, 15 nt, Human
ugggagugagcuggu

SEQ ID NO: 1811894 - RNA, 15 nt, Human
ugggauccuccaggu

SEQ ID NO: 1811895 - RNA, 21 nt, Human
uggcugggggccucagugcca

SEQ ID NO: 1811896 - RNA, 21 nt, Human
uggcugcuucaaggauccuga

SEQ ID NO: 1811897 - RNA, 21 nt, Human
uggcuugaguuuaaauuguaa

SEQ ID NO: 1811898 - RNA, 14 nt, Human
uggcuuuugugcau

SEQ ID NO: 1811899 - RNA, 17 nt, Human
ugggcuucaguggcagc

SEQ ID NO: 1811900 - RNA, 15 nt, Human
ugggcuucaguggca

SEQ ID NO: 1811901 - RNA, 17 nt, Human
ugggcuggugucaccug

SEQ ID NO: 1811902 - RNA, 23 nt, Human
ugggcuggguucuacccaggugc

SEQ ID NO: 1811903 - RNA, 16 nt, Human
ugggcuaguugggcuu

SEQ ID NO: 1811904 - RNA, 22 nt, Human
ugggcuaagugauccucccacc

SEQ ID NO: 1811905 - RNA, 20 nt, Human
ugggcgugagaccugccccu

SEQ ID NO: 1811906 - RNA, 16 nt, Human
ugggcagaggaaagca

SEQ ID NO: 1811907 - RNA, 15 nt, Human
ugggggugcauuuga

SEQ ID NO: 1811908 - RNA, 12 nt, Human
ugggggugcauu

SEQ ID NO: 1811909 - RNA, 19 nt, Human
ugggggcugggcagaggaa

SEQ ID NO: 1811910 - RNA, 17 nt, Human
ugggggcugggcagagg

SEQ ID NO: 1811911 - RNA, 18 nt, Human
ugggggcugggcagagga

SEQ ID NO: 1811912 - RNA, 21 nt, Human
ugggggaucacagccucugaa

SEQ ID NO: 1811913 - RNA, 20 nt, Human
ugggggaucacagccucuga

SEQ ID NO: 1811914 - RNA, 18 nt, Human
ugguaugaucacggcuca

SEQ ID NO: 1811915 - RNA, 23 nt, Human
ugguauuggcuagagguucaaag

SEQ ID NO: 1811916 - RNA, 13 nt, Human
ugguauagaaaug

SEQ ID NO: 1811917 - RNA, 16 nt, Human
ugguauagaaaugcug

SEQ ID NO: 1811918 - RNA, 14 nt, Human
ugguauagaaaugc

SEQ ID NO: 1811919 - RNA, 22 nt, Human
ugguauagaaaugcugguuuuu

SEQ ID NO: 1811920 - RNA, 21 nt, Human
uggguuucuaaagcugccagc

SEQ ID NO: 1811921 - RNA, 17 nt, Human
uggguuucuaaagcugc

SEQ ID NO: 1811922 - RNA, 18 nt, Human
uggguuucuaaagcugcc

SEQ ID NO: 1811923 - RNA, 16 nt, Human
uggguaacuagggaag

SEQ ID NO: 1811924 - RNA, 19 nt, Human
ugggguuuaucagaauucu

SEQ ID NO: 1811925 - RNA, 14 nt, Human
uggguuaguggaug

SEQ ID NO: 1811926 - RNA, 22 nt, Human
uggguucuacccaggugcuagg

SEQ ID NO: 1811927 - RNA, 15 nt, Human
uggguucuacccagg

SEQ ID NO: 1811928 - RNA, 16 nt, Human
uggguucuacccaggu

SEQ ID NO: 1811929 - RNA, 24 nt, Human
uggauuuaacagaaauguacagca

SEQ ID NO: 1811930 - RNA, 20 nt, Human
uggauuuaacagaaauguac

SEQ ID NO: 1811931 - RNA, 20 nt, Human
uggaggaaggaaacccagcu

SEQ ID NO: 1811932 - RNA, 12 nt, Human
uggaggaaggaa

SEQ ID NO: 1811933 - RNA, 18 nt, Human
uggaggaaggaaacccag

SEQ ID NO: 1811934 - RNA, 15 nt, Human
uggacuccucugucc

SEQ ID NO: 1811935 - RNA, 15 nt, Human
uggacuccugcacac

SEQ ID NO: 1811936 - RNA, 14 nt, Human
uggacucuaaaguc

SEQ ID NO: 1811937 - RNA, 21 nt, Human
uggccagaugcaccagcccuu

SEQ ID NO: 1811938 - RNA, 20 nt, Human
uggccagaugcaccagcccu

SEQ ID NO: 1811939 - RNA, 17 nt, Human
uggccacuccagacccc

SEQ ID NO: 1811940 - RNA, 20 nt, Human
uggccacuccagaccccugg

SEQ ID NO: 1811941 - RNA, 21 nt, Human
uggcacccggccccugcuggu

SEQ ID NO: 1811942 - RNA, 13 nt, Human
uggcagcugcuuu

SEQ ID NO: 1811943 - RNA, 19 nt, Human
uggcaggaguuggaagugu

SEQ ID NO: 1811944 - RNA, 13 nt, Human
uggcagugggagc

SEQ ID NO: 1811945 - RNA, 17 nt, Human
uggaaacagcucgacuu

SEQ ID NO: 1811946 - RNA, 22 nt, Human
uggaaacagcucgacuuuaaaa

SEQ ID NO: 1811947 - RNA, 21 nt, Human
uggaaagacuuuuccaacccu

SEQ ID NO: 1811948 - RNA, 14 nt, Human
uggaaagaguacuc

SEQ ID NO: 1811949 - RNA, 20 nt, Human
uggaaagaguaggaagacuu

SEQ ID NO: 1811950 - RNA, 17 nt, Human
uggaaaaauagccugcc

SEQ ID NO: 1811951 - RNA, 20 nt, Human
uggaaaaauagccugccucu

SEQ ID NO: 1811952 - RNA, 22 nt, Human
uggaauaauccuaaacauauga

SEQ ID NO: 1811953 - RNA, 17 nt, Human
uggaauaaggagaauga

SEQ ID NO: 1811954 - RNA, 16 nt, Human
uggaauauauaaccag

SEQ ID NO: 1811955 - RNA, 15 nt, Human
uggaauauauaacca

SEQ ID NO: 1811956 - RNA, 21 nt, Human
uggaacguuuuuccuguucuu

SEQ ID NO: 1811957 - RNA, 14 nt, Human
uggaauaacaugua

SEQ ID NO: 1811958 - RNA, 15 nt, Human
uggaauaacauguaa

SEQ ID NO: 1811959 - RNA, 19 nt, Human
uggaauaacauguaauuaa

SEQ ID NO: 1811960 - RNA, 13 nt, Human
uggacaugcacag

SEQ ID NO: 1811961 - RNA, 19 nt, Human
uggacaugcacagcuaaca

SEQ ID NO: 1811962 - RNA, 18 nt, Human
uggacucaccucccccau

SEQ ID NO: 1811963 - RNA, 20 nt, Human
uggacucaccucccccaucu

SEQ ID NO: 1811964 - RNA, 17 nt, Human
uggacagaagcagcucu

SEQ ID NO: 1811965 - RNA, 18 nt, Human
uggacagaagcagcucuu

SEQ ID NO: 1811966 - RNA, 15 nt, Human
uggacagaagcagcu

SEQ ID NO: 1811967 - RNA, 16 nt, Human
uggacagaagcagcuc

SEQ ID NO: 1811968 - RNA, 19 nt, Human
ucccuaccgagucucuucu

SEQ ID NO: 1811969 - RNA, 21 nt, Human
ucccuaccgagucucuucucc

SEQ ID NO: 1811970 - RNA, 22 nt, Human
ucccuaccgagucucuucucca

SEQ ID NO: 1811971 - RNA, 23 nt, Human
ucccuaccgagucucuucuccac

SEQ ID NO: 1811972 - RNA, 22 nt, Human
ucccaugagccucagcauccug

SEQ ID NO: 1811973 - RNA, 17 nt, Human
ucccaugagccucagca

SEQ ID NO: 1811974 - RNA, 17 nt, Human
ucccuacuuccugugac

SEQ ID NO: 1811975 - RNA, 18 nt, Human
ucccucccuuccucuuuc

SEQ ID NO: 1811976 - RNA, 13 nt, Human
ucccucccuuggg

SEQ ID NO: 1811977 - RNA, 14 nt, Human
ucccucccuugggg

SEQ ID NO: 1811978 - RNA, 20 nt, Human
ucccugcacuugcagacucu

SEQ ID NO: 1811979 - RNA, 17 nt, Human
ucccucuggggcuguuc

SEQ ID NO: 1811980 - RNA, 13 nt, Human
ucccucuggggcu

SEQ ID NO: 1811981 - RNA, 14 nt, Human
ucccugccaaugga

SEQ ID NO: 1811982 - RNA, 16 nt, Human
ucccugccaauggacu

SEQ ID NO: 1811983 - RNA, 16 nt, Human
ucccugccccccagcc

SEQ ID NO: 1811984 - RNA, 14 nt, Human
ucccugccccuccc

SEQ ID NO: 1811985 - RNA, 18 nt, Human
ucccugccccucccuuca

SEQ ID NO: 1811986 - RNA, 17 nt, Human
ucccuucccaccucucu

SEQ ID NO: 1811987 - RNA, 21 nt, Human
ucccuucccacuggaggcaug

SEQ ID NO: 1811988 - RNA, 16 nt, Human
ucccuucccaccucuc

SEQ ID NO: 1811989 - RNA, 21 nt, Human
uccgcuuucuacccagcgagc

SEQ ID NO: 1811990 - RNA, 21 nt, Human
uccgaaagggacuuggaagcu

SEQ ID NO: 1811991 - RNA, 17 nt, Human
ucccuucuuuuucuucu

SEQ ID NO: 1811992 - RNA, 22 nt, Human
uccgaaagggacuuggaagcuc

SEQ ID NO: 1811993 - RNA, 22 nt, Human
uccuaguuccaccaucaagcca

SEQ ID NO: 1811994 - RNA, 21 nt, Human
uccuaguuccaccaucaagcc

SEQ ID NO: 1811995 - RNA, 16 nt, Human
uccuaagcuauucagu

SEQ ID NO: 1811996 - RNA, 18 nt, Human
uccuaagcuauucaguaa

SEQ ID NO: 1811997 - RNA, 14 nt, Human
uccuaguuccacca

SEQ ID NO: 1811998 - RNA, 17 nt, Human
uccuaguuccaccauca

SEQ ID NO: 1811999 - RNA, 12 nt, Human
uccuccucagau

SEQ ID NO: 1812000 - RNA, 14 nt, Human
uccuccaggugcac

SEQ ID NO: 1812001 - RNA, 18 nt, Human
uccuccaggugcacaagc

SEQ ID NO: 1812002 - RNA, 20 nt, Human
uccuccaggugcacaagcuc

SEQ ID NO: 1812003 - RNA, 22 nt, Human
uccuccaggugcacaagcucca

SEQ ID NO: 1812004 - RNA, 12 nt, Human
uccuccaggugc

SEQ ID NO: 1812005 - RNA, 13 nt, Human
uccuccaggugca

SEQ ID NO: 1812006 - RNA, 20 nt, Human
uccucaaaacuucagacaua

SEQ ID NO: 1812007 - RNA, 21 nt, Human
uccuccuuuucacaguucucu

SEQ ID NO: 1812008 - RNA, 13 nt, Human
uccuccuggacuc

SEQ ID NO: 1812009 - RNA, 21 nt, Human
uccucuaggaggucucuaaga

SEQ ID NO: 1812010 - RNA, 15 nt, Human
uccucuguacagagc

SEQ ID NO: 1812011 - RNA, 13 nt, Human
uccucuguacaga

SEQ ID NO: 1812012 - RNA, 15 nt, Human
uccucuggccugugu

SEQ ID NO: 1812013 - RNA, 15 nt, Human
uccugaggcugggcu

SEQ ID NO: 1812014 - RNA, 16 nt, Human
uccugaggcugggcuc

SEQ ID NO: 1812015 - RNA, 17 nt, Human
uccugaggcugggcucc

SEQ ID NO: 1812016 - RNA, 19 nt, Human
uccugaggcugggcucccu

SEQ ID NO: 1812017 - RNA, 12 nt, Human
uccugaggcugg

SEQ ID NO: 1812018 - RNA, 17 nt, Human
uccugaggcuccacuug

SEQ ID NO: 1812019 - RNA, 16 nt, Human
uccugaggcuccacuu

SEQ ID NO: 1812020 - RNA, 17 nt, Human
uccucuguccaggcacu

SEQ ID NO: 1812021 - RNA, 17 nt, Human
uccugagccagauuuca

SEQ ID NO: 1812022 - RNA, 23 nt, Human
uccucuguacagagcccacgccc

SEQ ID NO: 1812023 - RNA, 18 nt, Human
uccugagccagauuucac

SEQ ID NO: 1812024 - RNA, 19 nt, Human
uccugagccagauuucacu

SEQ ID NO: 1812025 - RNA, 22 nt, Human
uccucuguccaggcacugcugc

SEQ ID NO: 1812026 - RNA, 21 nt, Human
uccugagccagauuucacucu

SEQ ID NO: 1812027 - RNA, 15 nt, Human
uccugaggcuccacu

SEQ ID NO: 1812028 - RNA, 18 nt, Human
uccuuggugucgggcaug

SEQ ID NO: 1812029 - RNA, 21 nt, Human
uccuuggugucgggcaugaca

SEQ ID NO: 1812030 - RNA, 22 nt, Human
uccuuggugucgggcaugacac

SEQ ID NO: 1812031 - RNA, 17 nt, Human
uccuuugugaggaagcc

SEQ ID NO: 1812032 - RNA, 18 nt, Human
uccuuugugaggaagccg

SEQ ID NO: 1812033 - RNA, 22 nt, Human
uccuuugugaggaagccgcugg

SEQ ID NO: 1812034 - RNA, 21 nt, Human
uccuuaccagcagagcaccuu

SEQ ID NO: 1812035 - RNA, 14 nt, Human
uccuuaucaaagga

SEQ ID NO: 1812036 - RNA, 15 nt, Human
uccuuaucaaaggac

SEQ ID NO: 1812037 - RNA, 17 nt, Human
uccuuaucaaaggacac

SEQ ID NO: 1812038 - RNA, 22 nt, Human
uccuugaaaacacuguucucug

SEQ ID NO: 1812039 - RNA, 23 nt, Human
uccuugaaaacacuguucucugc

SEQ ID NO: 1812040 - RNA, 22 nt, Human
uccuuuucgcaggauucuuccu

SEQ ID NO: 1812041 - RNA, 17 nt, Human
ucgcaggauucuuccuc

SEQ ID NO: 1812042 - RNA, 21 nt, Human
ucgcaggauucuuccucccuc

SEQ ID NO: 1812043 - RNA, 23 nt, Human
ucgcaggauucuuccucccuccc

SEQ ID NO: 1812044 - RNA, 17 nt, Human
ucggccuccauccugag

SEQ ID NO: 1812045 - RNA, 16 nt, Human
ucggccuccauccuga

SEQ ID NO: 1812046 - RNA, 15 nt, Human
ucggccuccauccug

SEQ ID NO: 1812047 - RNA, 23 nt, Human
ucgcccagucuggaaugcagugg

SEQ ID NO: 1812048 - RNA, 19 nt, Human
ucgcccagucuggaaugca

SEQ ID NO: 1812049 - RNA, 14 nt, Human
ucgcccagucugga

SEQ ID NO: 1812050 - RNA, 18 nt, Human
ucggaaaacaugcuacac

SEQ ID NO: 1812051 - RNA, 15 nt, Human
ucggaaaacaugcua

SEQ ID NO: 1812052 - RNA, 23 nt, Human
ucucacucugucgcccagucugg

SEQ ID NO: 1812053 - RNA, 21 nt, Human
ucucacacaugagcaucaggc

SEQ ID NO: 1812054 - RNA, 20 nt, Human
ucucacugccaugccagcuu

SEQ ID NO: 1812055 - RNA, 23 nt, Human
ucucacacaugagcaucaggcca

SEQ ID NO: 1812056 - RNA, 16 nt, Human
ucucacacaugagcau

SEQ ID NO: 1812057 - RNA, 18 nt, Human
ucucaaauuucuaaaucu

SEQ ID NO: 1812058 - RNA, 16 nt, Human
ucucaaauuucuaaau

SEQ ID NO: 1812059 - RNA, 14 nt, Human
ucucaaauuucuaa

SEQ ID NO: 1812060 - RNA, 22 nt, Human
ucuaucuuugagcgcccacuag

SEQ ID NO: 1812061 - RNA, 13 nt, Human
ucucaaauuucua

SEQ ID NO: 1812062 - RNA, 15 nt, Human
ucucacuguugccca

SEQ ID NO: 1812063 - RNA, 14 nt, Human
ucucacuguugccc

SEQ ID NO: 1812064 - RNA, 17 nt, Human
ucucacuguugcccagg

SEQ ID NO: 1812065 - RNA, 19 nt, Human
ucuagggaaaaaccagcgu

SEQ ID NO: 1812066 - RNA, 12 nt, Human
ucuagggaaaaa

SEQ ID NO: 1812067 - RNA, 15 nt, Human
ucuagguaaauuaca

SEQ ID NO: 1812068 - RNA, 18 nt, Human
ucuacucuagggaaaaac

SEQ ID NO: 1812069 - RNA, 20 nt, Human
ucuacucgaguuacagacaa

SEQ ID NO: 1812070 - RNA, 21 nt, Human
ucuacucgaguuacagacaaa

SEQ ID NO: 1812071 - RNA, 14 nt, Human
ucuacuauuuaugu

SEQ ID NO: 1812072 - RNA, 19 nt, Human
ucuacuaaaaauacaaaaa

SEQ ID NO: 1812073 - RNA, 15 nt, Human
ucuacuaaaaauaca

SEQ ID NO: 1812074 - RNA, 12 nt, Human
ucuacuaaaaau

SEQ ID NO: 1812075 - RNA, 21 nt, Human
uccacaagagcccaggccucc

SEQ ID NO: 1812076 - RNA, 20 nt, Human
uccacaagagcccaggccuc

SEQ ID NO: 1812077 - RNA, 19 nt, Human
uccacaagagcccaggccu

SEQ ID NO: 1812078 - RNA, 15 nt, Human
uccaagcaaauguga

SEQ ID NO: 1812079 - RNA, 17 nt, Human
uccaagcaaaugugaau

SEQ ID NO: 1812080 - RNA, 14 nt, Human
uccaagcaggacau

SEQ ID NO: 1812081 - RNA, 22 nt, Human
uccaagcaggacauggacaagg

SEQ ID NO: 1812082 - RNA, 19 nt, Human
uccaagaagcccaggaaag

SEQ ID NO: 1812083 - RNA, 20 nt, Human
uccaagaccuucuccuucac

SEQ ID NO: 1812084 - RNA, 23 nt, Human
ucaugucaaauauuuagauguaa

SEQ ID NO: 1812085 - RNA, 14 nt, Human
uccaagaagcccag

SEQ ID NO: 1812086 - RNA, 15 nt, Human
uccaagaagcccagg

SEQ ID NO: 1812087 - RNA, 16 nt, Human
uccaagaagcccagga

SEQ ID NO: 1812088 - RNA, 19 nt, Human
uccagcuggguuggaaaac

SEQ ID NO: 1812089 - RNA, 15 nt, Human
uccagcuggccggga

SEQ ID NO: 1812090 - RNA, 21 nt, Human
uccagcuggccgggagccuga

SEQ ID NO: 1812091 - RNA, 22 nt, Human
uccagcuggccgggagccugau

SEQ ID NO: 1812092 - RNA, 15 nt, Human
uccagaugccacaau

SEQ ID NO: 1812093 - RNA, 22 nt, Human
uccagauuuuuuacagcugccu

SEQ ID NO: 1812094 - RNA, 19 nt, Human
uccagcaauucuccugccu

SEQ ID NO: 1812095 - RNA, 20 nt, Human
uccagcaauucuccugccuc

SEQ ID NO: 1812096 - RNA, 21 nt, Human
uccagcaauucuccugccuca

SEQ ID NO: 1812097 - RNA, 18 nt, Human
uccagcaauucuccugcc

SEQ ID NO: 1812098 - RNA, 14 nt, Human
uccacccugcucuc

SEQ ID NO: 1812099 - RNA, 13 nt, Human
uccacccugcucu

SEQ ID NO: 1812100 - RNA, 21 nt, Human
uccacccugcucuccgaccag

SEQ ID NO: 1812101 - RNA, 22 nt, Human
uccacugugccaugugccaggu

SEQ ID NO: 1812102 - RNA, 21 nt, Human
uccacuuagaaauugcauuuc

SEQ ID NO: 1812103 - RNA, 23 nt, Human
uccacuuagaaauugcauuuccu

SEQ ID NO: 1812104 - RNA, 15 nt, Human
uccacuuuaucuuga

SEQ ID NO: 1812105 - RNA, 22 nt, Human
uccagagaguggcuccucccgg

SEQ ID NO: 1812106 - RNA, 19 nt, Human
uccagagaguggcuccucc

SEQ ID NO: 1812107 - RNA, 17 nt, Human
uccacuuuaucuugaau

SEQ ID NO: 1812108 - RNA, 14 nt, Human
uccacuuucuagcc

SEQ ID NO: 1812109 - RNA, 16 nt, Human
uccaugucgccucugc

SEQ ID NO: 1812110 - RNA, 19 nt, Human
uccaugucgccucugcauu

SEQ ID NO: 1812111 - RNA, 17 nt, Human
uccaugucgccucugca

SEQ ID NO: 1812112 - RNA, 18 nt, Human
uccaugucgccucugcau

SEQ ID NO: 1812113 - RNA, 14 nt, Human
ucccaacuuguaaa

SEQ ID NO: 1812114 - RNA, 19 nt, Human
ucccaacucaccccagccc

SEQ ID NO: 1812115 - RNA, 21 nt, Human
ucccaacucaccccagcccca

SEQ ID NO: 1812116 - RNA, 17 nt, Human
ucccaacucaccccagc

SEQ ID NO: 1812117 - RNA, 18 nt, Human
ucccaacucaccccagcc

SEQ ID NO: 1812118 - RNA, 20 nt, Human
uccauagagagcaagacgcu

SEQ ID NO: 1812119 - RNA, 23 nt, Human
uccauaaucuggacuccucuguc

SEQ ID NO: 1812120 - RNA, 17 nt, Human
uccauagagagcaagac

SEQ ID NO: 1812121 - RNA, 14 nt, Human
ucccacucagucca

SEQ ID NO: 1812122 - RNA, 21 nt, Human
ucccaccuuggcugcagggag

SEQ ID NO: 1812123 - RNA, 19 nt, Human
ucccaccuuggcugcaggg

SEQ ID NO: 1812124 - RNA, 20 nt, Human
ucccaccucucucacuccuu

SEQ ID NO: 1812125 - RNA, 18 nt, Human
ucccaccucagccucccg

SEQ ID NO: 1812126 - RNA, 16 nt, Human
ucccaccucagccucc

SEQ ID NO: 1812127 - RNA, 14 nt, Human
ucccaccucucuca

SEQ ID NO: 1812128 - RNA, 17 nt, Human
ucccaccucucucacuc

SEQ ID NO: 1812129 - RNA, 18 nt, Human
ucccaccucucucacucc

SEQ ID NO: 1812130 - RNA, 16 nt, Human
ucccaugagccucagc

SEQ ID NO: 1812131 - RNA, 15 nt, Human
ucccaugagccucag

SEQ ID NO: 1812132 - RNA, 19 nt, Human
ucccaggcugagccucagu

SEQ ID NO: 1812133 - RNA, 19 nt, Human
ucccaggcauuccccagga

SEQ ID NO: 1812134 - RNA, 17 nt, Human
ucccaggcauuccccag

SEQ ID NO: 1812135 - RNA, 18 nt, Human
ucccaggcauuccccagg

SEQ ID NO: 1812136 - RNA, 16 nt, Human
ucccaggauguacaag

SEQ ID NO: 1812137 - RNA, 15 nt, Human
ucagaucucuaacuu

SEQ ID NO: 1812138 - RNA, 18 nt, Human
ucagcauccuggcacccg

SEQ ID NO: 1812139 - RNA, 17 nt, Human
ucagcauccuggcaccc

SEQ ID NO: 1812140 - RNA, 16 nt, Human
ucagcauccuggcacc

SEQ ID NO: 1812141 - RNA, 15 nt, Human
ucagcauccuggcac

SEQ ID NO: 1812142 - RNA, 13 nt, Human
ucagccucccaaa

SEQ ID NO: 1812143 - RNA, 12 nt, Human
ucagccucccaa

SEQ ID NO: 1812144 - RNA, 17 nt, Human
ucagcacgauuucuguu

SEQ ID NO: 1812145 - RNA, 22 nt, Human
ucagcaccuacaguguacaguc

SEQ ID NO: 1812146 - RNA, 21 nt, Human
ucagcaccuacaguguacagu

SEQ ID NO: 1812147 - RNA, 20 nt, Human
ucagcaccuacaguguacag

SEQ ID NO: 1812148 - RNA, 16 nt, Human
ucagcacgauuucugu

SEQ ID NO: 1812149 - RNA, 15 nt, Human
ucagcacgauuucug

SEQ ID NO: 1812150 - RNA, 15 nt, Human
ucagcugcuacuacu

SEQ ID NO: 1812151 - RNA, 22 nt, Human
ucagcuccagcucaccagcccc

SEQ ID NO: 1812152 - RNA, 21 nt, Human
ucagcuccagcucaccagccc

SEQ ID NO: 1812153 - RNA, 18 nt, Human
ucagcuccagcucaccag

SEQ ID NO: 1812154 - RNA, 20 nt, Human
ucagccucccgaauagcugg

SEQ ID NO: 1812155 - RNA, 12 nt, Human
ucagccucccga

SEQ ID NO: 1812156 - RNA, 22 nt, Human
ucagccucccaaagugcuggga

SEQ ID NO: 1812157 - RNA, 16 nt, Human
ucagccugcuccagcu

SEQ ID NO: 1812158 - RNA, 14 nt, Human
ucaucauccuaagc

SEQ ID NO: 1812159 - RNA, 24 nt, Human
ucauggacuucugccagcauaaua

SEQ ID NO: 1812160 - RNA, 15 nt, Human
ucaguccauagcaga

SEQ ID NO: 1812161 - RNA, 18 nt, Human
ucaguccaugaagaugua

SEQ ID NO: 1812162 - RNA, 18 nt, Human
ucaguccccgugaaggag

SEQ ID NO: 1812163 - RNA, 21 nt, Human
ucagguggggucacucuggca

SEQ ID NO: 1812164 - RNA, 17 nt, Human
ucagguggggucacucu

SEQ ID NO: 1812165 - RNA, 20 nt, Human
ucagguggggucacucuggc

SEQ ID NO: 1812166 - RNA, 17 nt, Human
ucagguggggcagcuug

SEQ ID NO: 1812167 - RNA, 21 nt, Human
ucagguggggcagcuugaggg

SEQ ID NO: 1812168 - RNA, 16 nt, Human
ucagguggggcagcuu

SEQ ID NO: 1812169 - RNA, 15 nt, Human
ucagguggggcagcu

SEQ ID NO: 1812170 - RNA, 20 nt, Human
ucaggugcugccauccaggu

SEQ ID NO: 1812171 - RNA, 18 nt, Human
ucaggugcugccauccag

SEQ ID NO: 1812172 - RNA, 14 nt, Human
ucagguggggcagc

SEQ ID NO: 1812173 - RNA, 19 nt, Human
ucagucugauucccaagcu

SEQ ID NO: 1812174 - RNA, 17 nt, Human
ucagucugauucccaag

SEQ ID NO: 1812175 - RNA, 18 nt, Human
ucagugugacugaucucu

SEQ ID NO: 1812176 - RNA, 16 nt, Human
ucaguuaagccuuugg

SEQ ID NO: 1812177 - RNA, 17 nt, Human
ucaguuaagccuuugga

SEQ ID NO: 1812178 - RNA, 15 nt, Human
ucugccuccucuuca

SEQ ID NO: 1812179 - RNA, 20 nt, Human
ucugccucacauagcuuaca

SEQ ID NO: 1812180 - RNA, 18 nt, Human
ucugccucugacacacag

SEQ ID NO: 1812181 - RNA, 15 nt, Human
ucugccucugacaca

SEQ ID NO: 1812182 - RNA, 16 nt, Human
ucugccucccaucacc

SEQ ID NO: 1812183 - RNA, 17 nt, Human
ucugccucccaucaccc

SEQ ID NO: 1812184 - RNA, 20 nt, Human
ucugccucccaucacccgcu

SEQ ID NO: 1812185 - RNA, 21 nt, Human
ucugccucccaucacccgcua

SEQ ID NO: 1812186 - RNA, 20 nt, Human
ucugccugaagucacacagu

SEQ ID NO: 1812187 - RNA, 19 nt, Human
ucugccugaagucacacag

SEQ ID NO: 1812188 - RNA, 22 nt, Human
ucugccucugacacacagcucu

SEQ ID NO: 1812189 - RNA, 21 nt, Human
ucugccucugacacacagcuc

SEQ ID NO: 1812190 - RNA, 23 nt, Human
ucugccucugacacacagcucug

SEQ ID NO: 1812191 - RNA, 23 nt, Human
ucugccauauucuguuggccagu

SEQ ID NO: 1812192 - RNA, 22 nt, Human
ucugccauauucuguuggccag

SEQ ID NO: 1812193 - RNA, 12 nt, Human
ucugcccacucc

SEQ ID NO: 1812194 - RNA, 13 nt, Human
ucugccucccauc

SEQ ID NO: 1812195 - RNA, 15 nt, Human
ucugccucccaucac

SEQ ID NO: 1812196 - RNA, 12 nt, Human
ucugccucccau

SEQ ID NO: 1812197 - RNA, 13 nt, Human
ucugcccacuccc

SEQ ID NO: 1812198 - RNA, 14 nt, Human
ucugcccacucccu

SEQ ID NO: 1812199 - RNA, 16 nt, Human
ucugcccacucccugc

SEQ ID NO: 1812200 - RNA, 21 nt, Human
ucugaggaauccagacccggc

SEQ ID NO: 1812201 - RNA, 18 nt, Human
ucugaggaauccagaccc

SEQ ID NO: 1812202 - RNA, 22 nt, Human
ucugaggaauccagacccggcu

SEQ ID NO: 1812203 - RNA, 13 nt, Human
ucugcacuccccu

SEQ ID NO: 1812204 - RNA, 19 nt, Human
ucugacccaugcugcccug

SEQ ID NO: 1812205 - RNA, 20 nt, Human
ucugacccaugcugcccugu

SEQ ID NO: 1812206 - RNA, 22 nt, Human
ucugacccaugcugcccuguga

SEQ ID NO: 1812207 - RNA, 23 nt, Human
ucugacccaugcugcccugugag

SEQ ID NO: 1812208 - RNA, 18 nt, Human
ucugagaggacuuuucuu

SEQ ID NO: 1812209 - RNA, 24 nt, Human
ucugagaucaaaacgguuuuacug

SEQ ID NO: 1812210 - RNA, 14 nt, Human
ucugucucagucca

SEQ ID NO: 1812211 - RNA, 13 nt, Human
ucugucuaggaau

SEQ ID NO: 1812212 - RNA, 17 nt, Human
ucugucgcccagucugg

SEQ ID NO: 1812213 - RNA, 12 nt, Human
ucuguccuggga

SEQ ID NO: 1812214 - RNA, 14 nt, Human
ucuguacagagccc

SEQ ID NO: 1812215 - RNA, 15 nt, Human
ucuguacagagccca

SEQ ID NO: 1812216 - RNA, 16 nt, Human
ucuggugacuuuccuc

SEQ ID NO: 1812217 - RNA, 12 nt, Human
ucuggagcccac

SEQ ID NO: 1812218 - RNA, 16 nt, Human
ucuggagcccacugua

SEQ ID NO: 1812219 - RNA, 22 nt, Human
ucuggagcccacuguacuugcu

SEQ ID NO: 1812220 - RNA, 20 nt, Human
ucugccugcccaggccccug

SEQ ID NO: 1812221 - RNA, 18 nt, Human
ucugccugcccaggcccc

SEQ ID NO: 1812222 - RNA, 17 nt, Human
ucugccugcccaggccc

SEQ ID NO: 1812223 - RNA, 13 nt, Human
ucugcugaaggaa

SEQ ID NO: 1812224 - RNA, 11 nt, Human
ucugcugcugg

SEQ ID NO: 1812225 - RNA, 13 nt, Human
ucugcugcuggcu

SEQ ID NO: 1812226 - RNA, 22 nt, Human
ucuggacuccucuguccaggca

SEQ ID NO: 1812227 - RNA, 15 nt, Human
ucuggacuccucugu

SEQ ID NO: 1812228 - RNA, 16 nt, Human
ucuggacuccucuguc

SEQ ID NO: 1812229 - RNA, 18 nt, Human
ucuggacuccucugucca

SEQ ID NO: 1812230 - RNA, 14 nt, Human
ucuggaauuugaaa

SEQ ID NO: 1812231 - RNA, 17 nt, Human
ucugcugcuggcugguu

SEQ ID NO: 1812232 - RNA, 14 nt, Human
ucugcugcuggcug

SEQ ID NO: 1812233 - RNA, 15 nt, Human
ucugcugcuggcugg

SEQ ID NO: 1812234 - RNA, 21 nt, Human
ugaaaacacauuuuucuuagg

SEQ ID NO: 1812235 - RNA, 16 nt, Human
ucuuuuuauacuauua

SEQ ID NO: 1812236 - RNA, 17 nt, Human
ugaaaacacuguucucu

SEQ ID NO: 1812237 - RNA, 20 nt, Human
ugaaaacacuguucucugcc

SEQ ID NO: 1812238 - RNA, 21 nt, Human
ugaaaacacuguucucugccc

SEQ ID NO: 1812239 - RNA, 22 nt, Human
ugaaaacacuguucucugcccu

SEQ ID NO: 1812240 - RNA, 23 nt, Human
ugaaaacacuguucucugcccuc

SEQ ID NO: 1812241 - RNA, 18 nt, Human
ugaaaaccacauuggaga

SEQ ID NO: 1812242 - RNA, 19 nt, Human
ugaaaagaaaaaugagccu

SEQ ID NO: 1812243 - RNA, 20 nt, Human
ugaaaagaaaaaugagccug

SEQ ID NO: 1812244 - RNA, 22 nt, Human
ugaaaagaaaaaugagccuggc

SEQ ID NO: 1812245 - RNA, 20 nt, Human
ugaaaauuaggauuucauga

SEQ ID NO: 1812246 - RNA, 14 nt, Human
ugaaaauucagugg

SEQ ID NO: 1812247 - RNA, 12 nt, Human
ugaaaauuuuga

SEQ ID NO: 1812248 - RNA, 15 nt, Human
ugaaacacuuugcau

SEQ ID NO: 1812249 - RNA, 23 nt, Human
ucuuuccaaaguacacuguuuca

SEQ ID NO: 1812250 - RNA, 13 nt, Human
ucuuguguguuua

SEQ ID NO: 1812251 - RNA, 12 nt, Human
ucuuucccuccc

SEQ ID NO: 1812252 - RNA, 13 nt, Human
ucuuucccucccu

SEQ ID NO: 1812253 - RNA, 23 nt, Human
ucuuucccucccuuccucuuucc

SEQ ID NO: 1812254 - RNA, 13 nt, Human
ucuuuggacccug

SEQ ID NO: 1812255 - RNA, 16 nt, Human
ucuuuggacccugagg

SEQ ID NO: 1812256 - RNA, 14 nt, Human
ucuuuggacccuga

SEQ ID NO: 1812257 - RNA, 15 nt, Human
ucuuuggacccugag

SEQ ID NO: 1812258 - RNA, 13 nt, Human
ucuuugcagacag

SEQ ID NO: 1812259 - RNA, 23 nt, Human
ucuuugagugaagcugggagaac

SEQ ID NO: 1812260 - RNA, 17 nt, Human
ucuuugcagacaggcaa

SEQ ID NO: 1812261 - RNA, 14 nt, Human
ucuuugcagacagg

SEQ ID NO: 1812262 - RNA, 15 nt, Human
ucuucagaucucuaa

SEQ ID NO: 1812263 - RNA, 19 nt, Human
ucuucaguuaagccuuugg

SEQ ID NO: 1812264 - RNA, 20 nt, Human
ucuucaguuaagccuuugga

SEQ ID NO: 1812265 - RNA, 22 nt, Human
ucuucaguuaagccuuuggaaa

SEQ ID NO: 1812266 - RNA, 14 nt, Human
ucuucagaucucua

SEQ ID NO: 1812267 - RNA, 21 nt, Human
ucuucagagacuccugcaggc

SEQ ID NO: 1812268 - RNA, 22 nt, Human
ucuuauccaacaucaacaucuu

SEQ ID NO: 1812269 - RNA, 13 nt, Human
ucuuauaauuuaa

SEQ ID NO: 1812270 - RNA, 14 nt, Human
ucuuauaauuuaaa

SEQ ID NO: 1812271 - RNA, 20 nt, Human
ucuuagguuggcaaaaaggc

SEQ ID NO: 1812272 - RNA, 23 nt, Human
ucuuagguuggcaaaaaggcagg

SEQ ID NO: 1812273 - RNA, 20 nt, Human
ucugugucagguggggcagc

SEQ ID NO: 1812274 - RNA, 17 nt, Human
ucugugucagguggggc

SEQ ID NO: 1812275 - RNA, 22 nt, Human
ucugugucagguggggcagcuu

SEQ ID NO: 1812276 - RNA, 15 nt, Human
ucuuagauguauaua

SEQ ID NO: 1812277 - RNA, 16 nt, Human
ucuucuuggucucagu

SEQ ID NO: 1812278 - RNA, 13 nt, Human
ucuugaagacuuu

SEQ ID NO: 1812279 - RNA, 22 nt, Human
ucuugaagacuuuucuuucagc

SEQ ID NO: 1812280 - RNA, 21 nt, Human
ucuugaaauauaggaacuuaa

SEQ ID NO: 1812281 - RNA, 20 nt, Human
ucuugaaauauaggaacuua

SEQ ID NO: 1812282 - RNA, 19 nt, Human
ucuugccaaauauaaauaa

SEQ ID NO: 1812283 - RNA, 23 nt, Human
ucuugcauggcaaggacugcagg

SEQ ID NO: 1812284 - RNA, 14 nt, Human
ucuugcucugcuga

SEQ ID NO: 1812285 - RNA, 16 nt, Human
ucuugccacugccucu

SEQ ID NO: 1812286 - RNA, 17 nt, Human
ucuugccacugccucuu

SEQ ID NO: 1812287 - RNA, 23 nt, Human
ucuugcucugcugacagacacag

SEQ ID NO: 1812288 - RNA, 15 nt, Human
ucuugcucugcugac

SEQ ID NO: 1812289 - RNA, 22 nt, Human
ugacuuuucuguccgagcuuug

SEQ ID NO: 1812290 - RNA, 15 nt, Human
ugagaaauaaaguuu

SEQ ID NO: 1812291 - RNA, 14 nt, Human
ugagaggggaacag

SEQ ID NO: 1812292 - RNA, 19 nt, Human
ugagaggcugucuguugua

SEQ ID NO: 1812293 - RNA, 18 nt, Human
ugagaggggaacagacug

SEQ ID NO: 1812294 - RNA, 19 nt, Human
ugagaggggaacagacugg

SEQ ID NO: 1812295 - RNA, 13 nt, Human
ugagaccugcccc

SEQ ID NO: 1812296 - RNA, 14 nt, Human
ugagaccugccccu

SEQ ID NO: 1812297 - RNA, 15 nt, Human
ugagaccugccccuc

SEQ ID NO: 1812298 - RNA, 22 nt, Human
ugagaccugccccuccucucug

SEQ ID NO: 1812299 - RNA, 12 nt, Human
ugagaccugccc

SEQ ID NO: 1812300 - RNA, 14 nt, Human
ugagaccaaccugg

SEQ ID NO: 1812301 - RNA, 14 nt, Human
ugaccauucuccac

SEQ ID NO: 1812302 - RNA, 13 nt, Human
ugaccauucucca

SEQ ID NO: 1812303 - RNA, 14 nt, Human
ugacucuuggcaca

SEQ ID NO: 1812304 - RNA, 19 nt, Human
ugacucuuggcacagcaug

SEQ ID NO: 1812305 - RNA, 21 nt, Human
ugacucuuucuauuguuucuu

SEQ ID NO: 1812306 - RNA, 16 nt, Human
ugacuuuccucuuugg

SEQ ID NO: 1812307 - RNA, 20 nt, Human
ugagcucagcccuggugggc

SEQ ID NO: 1812308 - RNA, 11 nt, Human
ugagcucagcc

SEQ ID NO: 1812309 - RNA, 12 nt, Human
ugagcucagccc

SEQ ID NO: 1812310 - RNA, 11 nt, Human
ugagcucagga

SEQ ID NO: 1812311 - RNA, 19 nt, Human
ugagcucaggaguuugaga

SEQ ID NO: 1812312 - RNA, 22 nt, Human
ugagccgagaucacgccacugc

SEQ ID NO: 1812313 - RNA, 23 nt, Human
ugagcagggcucagcggggacag

SEQ ID NO: 1812314 - RNA, 22 nt, Human
ugagcagggcucagcggggaca

SEQ ID NO: 1812315 - RNA, 20 nt, Human
ugagcagggcucagcgggga

SEQ ID NO: 1812316 - RNA, 23 nt, Human
ugagccgagaucacgccacugca

SEQ ID NO: 1812317 - RNA, 13 nt, Human
ugaggaucagagu

SEQ ID NO: 1812318 - RNA, 17 nt, Human
ugaggaucagaguaauc

SEQ ID NO: 1812319 - RNA, 19 nt, Human
ugaggaucagaguaaucca

SEQ ID NO: 1812320 - RNA, 22 nt, Human
ugaggaugaaaaaauaacacug

SEQ ID NO: 1812321 - RNA, 23 nt, Human
ugagcuuaagaauuuugagcagg

SEQ ID NO: 1812322 - RNA, 19 nt, Human
ugaggucagagccugcagu

SEQ ID NO: 1812323 - RNA, 18 nt, Human
ugaggucagagccugcag

SEQ ID NO: 1812324 - RNA, 21 nt, Human
ugaggcugggcucccuuccca

SEQ ID NO: 1812325 - RNA, 20 nt, Human
ugagucccaggcugagccuc

SEQ ID NO: 1812326 - RNA, 21 nt, Human
ugagucccaggcugagccuca

SEQ ID NO: 1812327 - RNA, 16 nt, Human
ugaggcucugcccuug

SEQ ID NO: 1812328 - RNA, 15 nt, Human
ugaggcucugcccuu

SEQ ID NO: 1812329 - RNA, 18 nt, Human
ugaggcucugcccuuggu

SEQ ID NO: 1812330 - RNA, 15 nt, Human
ugaggcugggcuccc

SEQ ID NO: 1812331 - RNA, 16 nt, Human
ugaggcugggcucccu

SEQ ID NO: 1812332 - RNA, 20 nt, Human
ugaagacucauucuucugua

SEQ ID NO: 1812333 - RNA, 19 nt, Human
ugaagacucauucuucugu

SEQ ID NO: 1812334 - RNA, 13 nt, Human
ugaaacauguuuc

SEQ ID NO: 1812335 - RNA, 16 nt, Human
ugaaacacuuugcaua

SEQ ID NO: 1812336 - RNA, 19 nt, Human
ugaaggccccgcccaggcu

SEQ ID NO: 1812337 - RNA, 20 nt, Human
ugaaggccccgcccaggcuu

SEQ ID NO: 1812338 - RNA, 21 nt, Human
ugaagcuuuuaugugaaacau

SEQ ID NO: 1812339 - RNA, 16 nt, Human
ugaagcuuuuauguga

SEQ ID NO: 1812340 - RNA, 18 nt, Human
ugaaggccccgcccaggc

SEQ ID NO: 1812341 - RNA, 20 nt, Human
ugaaugaauggcuaagcaaa

SEQ ID NO: 1812342 - RNA, 15 nt, Human
ugaaugaauggcuaa

SEQ ID NO: 1812343 - RNA, 14 nt, Human
ugaaugcauaaaau

SEQ ID NO: 1812344 - RNA, 16 nt, Human
ugaaucuuggugucua

SEQ ID NO: 1812345 - RNA, 20 nt, Human
ugaaggcuggguucugaucc

SEQ ID NO: 1812346 - RNA, 21 nt, Human
ugaaggcuggguucugauccu

SEQ ID NO: 1812347 - RNA, 23 nt, Human
ugaaucacguaaagcuagaaaug

SEQ ID NO: 1812348 - RNA, 17 nt, Human
ugaaucacguaaagcua

SEQ ID NO: 1812349 - RNA, 18 nt, Human
ugacagacacaggcccgg

SEQ ID NO: 1812350 - RNA, 17 nt, Human
ugacagacacaggcccg

SEQ ID NO: 1812351 - RNA, 22 nt, Human
ugacagagcaagugagacccug

SEQ ID NO: 1812352 - RNA, 23 nt, Human
ugacaucaacugcaucaagaugu

SEQ ID NO: 1812353 - RNA, 15 nt, Human
ugacauauuuuugcu

SEQ ID NO: 1812354 - RNA, 19 nt, Human
ugacauguguuggcagccu

SEQ ID NO: 1812355 - RNA, 21 nt, Human
ugaccagccuccaugcugccu

SEQ ID NO: 1812356 - RNA, 22 nt, Human
ugaccagccuccaugcugccuc

SEQ ID NO: 1812357 - RNA, 23 nt, Human
ugaccagccuccaugcugccucc

SEQ ID NO: 1812358 - RNA, 13 nt, Human
ugacauguuuuau

SEQ ID NO: 1812359 - RNA, 18 nt, Human
ugaccacugcagaagaca

SEQ ID NO: 1812360 - RNA, 17 nt, Human
ugaccacugcagaagac

SEQ ID NO: 1812361 - RNA, 16 nt, Human
ugaccacugcagaaga

SEQ ID NO: 1812362 - RNA, 21 nt, Human
ugaauuguaaggaaugauuaa

SEQ ID NO: 1812363 - RNA, 13 nt, Human
ugaauuguaagga

SEQ ID NO: 1812364 - RNA, 20 nt, Human
ugacaaagguaaaucagacu

SEQ ID NO: 1812365 - RNA, 13 nt, Human
ugacaacacucau

SEQ ID NO: 1812366 - RNA, 18 nt, Human
ugacaacagacuucugaa

SEQ ID NO: 1812367 - RNA, 19 nt, Human
ugacaacagacuucugaaa

SEQ ID NO: 1812368 - RNA, 15 nt, Human
ugacaacagacuucu

SEQ ID NO: 1812369 - RNA, 23 nt, Human
ugacaacacucauugaccugagg

SEQ ID NO: 1812370 - RNA, 23 nt, Human
ugacaaggauugcuacuguccua

SEQ ID NO: 1812371 - RNA, 13 nt, Human
ugacagacacagg

SEQ ID NO: 1812372 - RNA, 16 nt, Human
ugacagacacaggccc

SEQ ID NO: 1812373 - RNA, 14 nt, Human
ugacagacacaggc

SEQ ID NO: 1812374 - RNA, 15 nt, Human
ugacacacagcucug

SEQ ID NO: 1812375 - RNA, 14 nt, Human
ugacacacagcucu

SEQ ID NO: 1812376 - RNA, 23 nt, Human
uacaguucggugagcuacaaaug

SEQ ID NO: 1812377 - RNA, 20 nt, Human
uacaggaugaugacuaugga

SEQ ID NO: 1812378 - RNA, 15 nt, Human
uacaggagugagcac

SEQ ID NO: 1812379 - RNA, 22 nt, Human
uacaggaaguacuggagaaaau

SEQ ID NO: 1812380 - RNA, 14 nt, Human
uacaggaaguacug

SEQ ID NO: 1812381 - RNA, 15 nt, Human
uacaggaaguacugg

SEQ ID NO: 1812382 - RNA, 18 nt, Human
uacaguuuguuaguauga

SEQ ID NO: 1812383 - RNA, 20 nt, Human
uacaguugaaaaacagcuga

SEQ ID NO: 1812384 - RNA, 21 nt, Human
uacagcuugaccgugaggcca

SEQ ID NO: 1812385 - RNA, 17 nt, Human
uacaguugaaaaacagc

SEQ ID NO: 1812386 - RNA, 19 nt, Human
uacaguugaaaaacagcug

SEQ ID NO: 1812387 - RNA, 16 nt, Human
uacagcuaaucagcau

SEQ ID NO: 1812388 - RNA, 18 nt, Human
uacagcuaaucagcauuc

SEQ ID NO: 1812389 - RNA, 22 nt, Human
uacacuguuucaaacuuuacua

SEQ ID NO: 1812390 - RNA, 16 nt, Human
uacacuuacacuuuau

SEQ ID NO: 1812391 - RNA, 20 nt, Human
uacacuguuucaaacuuuac

SEQ ID NO: 1812392 - RNA, 22 nt, Human
uacacugugcugagucugaagg

SEQ ID NO: 1812393 - RNA, 23 nt, Human
uacacugugcugagucugaaggc

SEQ ID NO: 1812394 - RNA, 20 nt, Human
uacagcuugaccgugaggcc

SEQ ID NO: 1812395 - RNA, 18 nt, Human
uacaggaagguagaaaua

SEQ ID NO: 1812396 - RNA, 13 nt, Human
uacaggaaguacu

SEQ ID NO: 1812397 - RNA, 14 nt, Human
uacagcugccugca

SEQ ID NO: 1812398 - RNA, 13 nt, Human
uacagcugccugc

SEQ ID NO: 1812399 - RNA, 16 nt, Human
uacauaaacaaguccu

SEQ ID NO: 1812400 - RNA, 21 nt, Human
uacaguuuguuaguaugaggc

SEQ ID NO: 1812401 - RNA, 19 nt, Human
uacaguuuguuaguaugag

SEQ ID NO: 1812402 - RNA, 23 nt, Human
uacaugaaaacacauuuuucuua

SEQ ID NO: 1812403 - RNA, 19 nt, Human
uacaugaaaacacauuuuu

SEQ ID NO: 1812404 - RNA, 18 nt, Human
uacaugaaaacacauuuu

SEQ ID NO: 1812405 - RNA, 17 nt, Human
uacaugaaaacacauuu

SEQ ID NO: 1812406 - RNA, 16 nt, Human
uacaugaaaacacauu

SEQ ID NO: 1812407 - RNA, 16 nt, Human
uacauaagauaaaugu

SEQ ID NO: 1812408 - RNA, 17 nt, Human
uacauaagauaaaugug

SEQ ID NO: 1812409 - RNA, 14 nt, Human
uacauuuuuaagug

SEQ ID NO: 1812410 - RNA, 22 nt, Human
uacauuuuuaagugcugcauuu

SEQ ID NO: 1812411 - RNA, 19 nt, Human
uacauuuuuaagugcugca

SEQ ID NO: 1812412 - RNA, 14 nt, Human
uacauggaauaaca

SEQ ID NO: 1812413 - RNA, 18 nt, Human
uacauggaauaacaugua

SEQ ID NO: 1812414 - RNA, 19 nt, Human
uacauggaauaacauguaa

SEQ ID NO: 1812415 - RNA, 22 nt, Human
uacauggaauaacauguaauua

SEQ ID NO: 1812416 - RNA, 14 nt, Human
uacaaaguagaagu

SEQ ID NO: 1812417 - RNA, 18 nt, Human
uacaaaguagaagucuua

SEQ ID NO: 1812418 - RNA, 20 nt, Human
uaauuuuguguaagaaauac

SEQ ID NO: 1812419 - RNA, 19 nt, Human
uaauuuuguguaagaaaua

SEQ ID NO: 1812420 - RNA, 13 nt, Human
uaauuuuguguaa

SEQ ID NO: 1812421 - RNA, 15 nt, Human
uaauucuaugccugu

SEQ ID NO: 1812422 - RNA, 11 nt, Human
uacacacacac

SEQ ID NO: 1812423 - RNA, 21 nt, Human
uacacugugcugagucugaag

SEQ ID NO: 1812424 - RNA, 15 nt, Human
uacacacugcauguu

SEQ ID NO: 1812425 - RNA, 16 nt, Human
uacucuacccucuuag

SEQ ID NO: 1812426 - RNA, 21 nt, Human
uacugccuauuuuaauaaaca

SEQ ID NO: 1812427 - RNA, 14 nt, Human
uacugccuauuuua

SEQ ID NO: 1812428 - RNA, 19 nt, Human
uacugcccaggccugccug

SEQ ID NO: 1812429 - RNA, 20 nt, Human
uacugcccaggccugccugu

SEQ ID NO: 1812430 - RNA, 21 nt, Human
uacugcccaggccugccuguu

SEQ ID NO: 1812431 - RNA, 22 nt, Human
uacugcccaggccugccuguuc

SEQ ID NO: 1812432 - RNA, 15 nt, Human
uacuccccuccuuga

SEQ ID NO: 1812433 - RNA, 12 nt, Human
uacuccucccag

SEQ ID NO: 1812434 - RNA, 22 nt, Human
uacucgaguuacagacaaagcg

SEQ ID NO: 1812435 - RNA, 18 nt, Human
uacucgaguuacagacaa

SEQ ID NO: 1812436 - RNA, 14 nt, Human
uacuacaguuuguu

SEQ ID NO: 1812437 - RNA, 13 nt, Human
uacuacaguuugu

SEQ ID NO: 1812438 - RNA, 22 nt, Human
uacuacaguccucccaucucac

SEQ ID NO: 1812439 - RNA, 13 nt, Human
uacuuguggacac

SEQ ID NO: 1812440 - RNA, 20 nt, Human
uacuugcucuugaugccugg

SEQ ID NO: 1812441 - RNA, 13 nt, Human
uacuugcucuuga

SEQ ID NO: 1812442 - RNA, 14 nt, Human
uacuugcucuugau

SEQ ID NO: 1812443 - RNA, 18 nt, Human
uacuugcucuugaugccu

SEQ ID NO: 1812444 - RNA, 19 nt, Human
uacuugcucuugaugccug

SEQ ID NO: 1812445 - RNA, 16 nt, Human
uacuguccuacccacc

SEQ ID NO: 1812446 - RNA, 21 nt, Human
uacugucuucaguaagccgug

SEQ ID NO: 1812447 - RNA, 18 nt, Human
uaccucggugccuuccuc

SEQ ID NO: 1812448 - RNA, 21 nt, Human
uaccucuugagccuugaacuu

SEQ ID NO: 1812449 - RNA, 22 nt, Human
uaccuuuuuuagaguugauacu

SEQ ID NO: 1812450 - RNA, 19 nt, Human
uaccuuuuuuagaguugau

SEQ ID NO: 1812451 - RNA, 13 nt, Human
uaccuuuuuuaga

SEQ ID NO: 1812452 - RNA, 14 nt, Human
uacuaaggaaucuu

SEQ ID NO: 1812453 - RNA, 21 nt, Human
uacuaauagacaauuuauuau

SEQ ID NO: 1812454 - RNA, 20 nt, Human
uacuaauagacaauuuauua

SEQ ID NO: 1812455 - RNA, 17 nt, Human
uaccuuuuuuauacaua

SEQ ID NO: 1812456 - RNA, 16 nt, Human
uaccuuuuuuauacau

SEQ ID NO: 1812457 - RNA, 13 nt, Human
uaccuuuuuuaua

SEQ ID NO: 1812458 - RNA, 18 nt, Human
uacgaaaagaggggaaga

SEQ ID NO: 1812459 - RNA, 21 nt, Human
uacgaaaagaggggaagagac

SEQ ID NO: 1812460 - RNA, 15 nt, Human
uaccuacauacaauu

SEQ ID NO: 1812461 - RNA, 16 nt, Human
uacccagcgagcccug

SEQ ID NO: 1812462 - RNA, 17 nt, Human
uaccgagucucuucucc

SEQ ID NO: 1812463 - RNA, 18 nt, Human
uaccgagucucuucucca

SEQ ID NO: 1812464 - RNA, 21 nt, Human
uaccgagucucuucuccacug

SEQ ID NO: 1812465 - RNA, 22 nt, Human
uaccgagucucuucuccacugg

SEQ ID NO: 1812466 - RNA, 22 nt, Human
uaccuaacgaaguauccuucag

SEQ ID NO: 1812467 - RNA, 15 nt, Human
uacccacugcucugg

SEQ ID NO: 1812468 - RNA, 23 nt, Human
uacauuuuuaagugcugcauuua

SEQ ID NO: 1812469 - RNA, 14 nt, Human
uacuuguggacaca

SEQ ID NO: 1812470 - RNA, 23 nt, Human
uagaauuaguggcacuugcuuuu

SEQ ID NO: 1812471 - RNA, 18 nt, Human
uagaauuaacacaugauc

SEQ ID NO: 1812472 - RNA, 16 nt, Human
uagaauuaacacauga

SEQ ID NO: 1812473 - RNA, 15 nt, Human
uagaauuaacacaug

SEQ ID NO: 1812474 - RNA, 20 nt, Human
uagacccacuggacucaccu

SEQ ID NO: 1812475 - RNA, 17 nt, Human
uagaguugauacuacag

SEQ ID NO: 1812476 - RNA, 14 nt, Human
uagaguugauacua

SEQ ID NO: 1812477 - RNA, 12 nt, Human
uagagugggagc

SEQ ID NO: 1812478 - RNA, 15 nt, Human
uagagguucaaagau

SEQ ID NO: 1812479 - RNA, 14 nt, Human
uagagguucaaaga

SEQ ID NO: 1812480 - RNA, 11 nt, Human
uagagacaggg

SEQ ID NO: 1812481 - RNA, 22 nt, Human
uagagaaggacccggaggggcc

SEQ ID NO: 1812482 - RNA, 13 nt, Human
uagagaaggaccc

SEQ ID NO: 1812483 - RNA, 19 nt, Human
uagcugggacuacaggcac

SEQ ID NO: 1812484 - RNA, 17 nt, Human
uagcugggacuacaggc

SEQ ID NO: 1812485 - RNA, 15 nt, Human
uagcugggacuacag

SEQ ID NO: 1812486 - RNA, 21 nt, Human
uagcucaggugucccugcacu

SEQ ID NO: 1812487 - RNA, 20 nt, Human
uagcucaggugucccugcac

SEQ ID NO: 1812488 - RNA, 12 nt, Human
uagcucauucuc

SEQ ID NO: 1812489 - RNA, 18 nt, Human
uagccugugccucuggga

SEQ ID NO: 1812490 - RNA, 20 nt, Human
uagccugugccucugggacu

SEQ ID NO: 1812491 - RNA, 16 nt, Human
uagccuaggugacaga

SEQ ID NO: 1812492 - RNA, 16 nt, Human
uagccccucuccugga

SEQ ID NO: 1812493 - RNA, 16 nt, Human
uagauacuguaucaug

SEQ ID NO: 1812494 - RNA, 11 nt, Human
uagcagggaaa

SEQ ID NO: 1812495 - RNA, 19 nt, Human
uagcauacguacacauuuu

SEQ ID NO: 1812496 - RNA, 18 nt, Human
uagcauacguacacauuu

SEQ ID NO: 1812497 - RNA, 17 nt, Human
uagcauacguacacauu

SEQ ID NO: 1812498 - RNA, 16 nt, Human
uagcauacguacacau

SEQ ID NO: 1812499 - RNA, 18 nt, Human
uaguaugaggcauuuguu

SEQ ID NO: 1812500 - RNA, 17 nt, Human
uaguaugaggcauuugu

SEQ ID NO: 1812501 - RNA, 23 nt, Human
uaggugugacugaauuucuuuug

SEQ ID NO: 1812502 - RNA, 21 nt, Human
uaggugugacugaauuucuuu

SEQ ID NO: 1812503 - RNA, 19 nt, Human
uaggugugacugaauuucu

SEQ ID NO: 1812504 - RNA, 13 nt, Human
uagguguggggga

SEQ ID NO: 1812505 - RNA, 17 nt, Human
uaggugugggggaagca

SEQ ID NO: 1812506 - RNA, 22 nt, Human
uagguuauuuugauguaaagau

SEQ ID NO: 1812507 - RNA, 16 nt, Human
uaggugacagagugag

SEQ ID NO: 1812508 - RNA, 11 nt, Human
uaggugacaga

SEQ ID NO: 1812509 - RNA, 11 nt, Human
uagggaaaaac

SEQ ID NO: 1812510 - RNA, 22 nt, Human
uagcuggucuuauuuguaaagc

SEQ ID NO: 1812511 - RNA, 20 nt, Human
uaguggcuuaaaacaacacu

SEQ ID NO: 1812512 - RNA, 16 nt, Human
uaguaugguggcuggg

SEQ ID NO: 1812513 - RNA, 15 nt, Human
uaguaugaggcauuu

SEQ ID NO: 1812514 - RNA, 21 nt, Human
uaguuguuugauucagacagc

SEQ ID NO: 1812515 - RNA, 22 nt, Human
uaguuguuugauucagacagcu

SEQ ID NO: 1812516 - RNA, 20 nt, Human
uaguuguuugauucagacag

SEQ ID NO: 1812517 - RNA, 15 nt, Human
uaguuugauuaaauu

SEQ ID NO: 1812518 - RNA, 21 nt, Human
uaguuugauuaaauucuugca

SEQ ID NO: 1812519 - RNA, 16 nt, Human
uaguuugauuaaauuc

SEQ ID NO: 1812520 - RNA, 11 nt, Human
uauaaacuuua

SEQ ID NO: 1812521 - RNA, 14 nt, Human
uauaaacuuuaccu

SEQ ID NO: 1812522 - RNA, 13 nt, Human
uauaaacuuuacc

SEQ ID NO: 1812523 - RNA, 18 nt, Human
uauaaacuuuaccuuuuu

SEQ ID NO: 1812524 - RNA, 17 nt, Human
uauaaacuuuaccuuuu

SEQ ID NO: 1812525 - RNA, 16 nt, Human
uauaaacuuuaccuuu

SEQ ID NO: 1812526 - RNA, 15 nt, Human
uauaaacuuuaccuu

SEQ ID NO: 1812527 - RNA, 21 nt, Human
uauauuuuuuguuaaaugauu

SEQ ID NO: 1812528 - RNA, 19 nt, Human
uaucaggugcugccaucca

SEQ ID NO: 1812529 - RNA, 14 nt, Human
uaucaaaagaaaga

SEQ ID NO: 1812530 - RNA, 20 nt, Human
uaucaggugcugccauccag

SEQ ID NO: 1812531 - RNA, 11 nt, Human
uauagaaaugc

SEQ ID NO: 1812532 - RNA, 11 nt, Human
uaauguuuccu

SEQ ID NO: 1812533 - RNA, 14 nt, Human
uaauuaaguacuau

SEQ ID NO: 1812534 - RNA, 17 nt, Human
uaauuaaguacuaugua

SEQ ID NO: 1812535 - RNA, 20 nt, Human
uaauuaaguacuauguauca

SEQ ID NO: 1812536 - RNA, 15 nt, Human
uaauggggcggugag

SEQ ID NO: 1812537 - RNA, 23 nt, Human
uaaugcgugcauaccacuuuugu

SEQ ID NO: 1812538 - RNA, 22 nt, Human
uaaugcgugcauaccacuuuug

SEQ ID NO: 1812539 - RNA, 19 nt, Human
uaaugcgugcauaccacuu

SEQ ID NO: 1812540 - RNA, 15 nt, Human
uaaugcgugcauacc

SEQ ID NO: 1812541 - RNA, 19 nt, Human
uaauaugcacacauuuuuu

SEQ ID NO: 1812542 - RNA, 18 nt, Human
uaauaugcacacauuuuu

SEQ ID NO: 1812543 - RNA, 17 nt, Human
uaauaugcacacauuuu

SEQ ID NO: 1812544 - RNA, 16 nt, Human
uaauaugcacacauuu

SEQ ID NO: 1812545 - RNA, 15 nt, Human
uaauaugcacacauu

SEQ ID NO: 1812546 - RNA, 20 nt, Human
uaauauuaaggaagacaaug

SEQ ID NO: 1812547 - RNA, 13 nt, Human
uaaucuaaaugga

SEQ ID NO: 1812548 - RNA, 12 nt, Human
uaaucuaaaugg

SEQ ID NO: 1812549 - RNA, 20 nt, Human
uaauccucuaggaggucucu

SEQ ID NO: 1812550 - RNA, 17 nt, Human
uaaucuggacuccucug

SEQ ID NO: 1812551 - RNA, 18 nt, Human
uaaucuggacuccucugu

SEQ ID NO: 1812552 - RNA, 15 nt, Human
uaaucuggacuccuc

SEQ ID NO: 1812553 - RNA, 19 nt, Human
uaaucuggacuccucuguc

SEQ ID NO: 1812554 - RNA, 20 nt, Human
uaaucuggacuccucugucc

SEQ ID NO: 1812555 - RNA, 21 nt, Human
uaaucuggacuccucugucca

SEQ ID NO: 1812556 - RNA, 22 nt, Human
uaaucuggacuccucuguccag

SEQ ID NO: 1812557 - RNA, 18 nt, Human
uaaucugggccagaauuu

SEQ ID NO: 1812558 - RNA, 23 nt, Human
uaaucugggccagaauuucaaac

SEQ ID NO: 1812559 - RNA, 21 nt, Human
uaaguauuuuccuguugucaa

SEQ ID NO: 1812560 - RNA, 20 nt, Human
uaaguauuuuccuguuguca

SEQ ID NO: 1812561 - RNA, 15 nt, Human
uaaggugugcucuga

SEQ ID NO: 1812562 - RNA, 20 nt, Human
uaagguggguacgggagggu

SEQ ID NO: 1812563 - RNA, 17 nt, Human
uaaggguaucuggugac

SEQ ID NO: 1812564 - RNA, 14 nt, Human
uaagcuauucagua

SEQ ID NO: 1812565 - RNA, 16 nt, Human
uaaggauguucuagca

SEQ ID NO: 1812566 - RNA, 14 nt, Human
uaaggcaaucaugg

SEQ ID NO: 1812567 - RNA, 15 nt, Human
uaagaggcagggucu

SEQ ID NO: 1812568 - RNA, 12 nt, Human
uaagaggcaggg

SEQ ID NO: 1812569 - RNA, 15 nt, Human
uaagccaugggagac

SEQ ID NO: 1812570 - RNA, 12 nt, Human
uaauaaagcugu

SEQ ID NO: 1812571 - RNA, 16 nt, Human
uaagugguguguguau

SEQ ID NO: 1812572 - RNA, 15 nt, Human
uaaguggugugugua

SEQ ID NO: 1812573 - RNA, 22 nt, Human
uaagugcugcauuuaaaagaua

SEQ ID NO: 1812574 - RNA, 18 nt, Human
uaagugcugcauuuaaaa

SEQ ID NO: 1812575 - RNA, 16 nt, Human
uaagugcugcauuuaa

SEQ ID NO: 1812576 - RNA, 15 nt, Human
uaagugcugcauuua

SEQ ID NO: 1812577 - RNA, 15 nt, Human
uaagugaaaauauag

SEQ ID NO: 1812578 - RNA, 13 nt, Human
uaagugaaauaag

SEQ ID NO: 1812579 - RNA, 22 nt, Human
uaagugauugcugguuuuaguu

SEQ ID NO: 1812580 - RNA, 12 nt, Human
uaagugagagag

SEQ ID NO: 1812581 - RNA, 23 nt, Human
uaagugaggaugaaaaaauaaca

SEQ ID NO: 1812582 - RNA, 14 nt, Human
uaagugcugcauuu

SEQ ID NO: 1812583 - RNA, 16 nt, Human
uaacuauguugauaaa

SEQ ID NO: 1812584 - RNA, 11 nt, Human
uaacagaaaug

SEQ ID NO: 1812585 - RNA, 12 nt, Human
uaacagaaaugu

SEQ ID NO: 1812586 - RNA, 13 nt, Human
uaaccagaucauu

SEQ ID NO: 1812587 - RNA, 16 nt, Human
uaaccacuucagcuga

SEQ ID NO: 1812588 - RNA, 23 nt, Human
uaaccaguguuguggauuuaaca

SEQ ID NO: 1812589 - RNA, 23 nt, Human
uaagaaaaaggaugcacagaguu

SEQ ID NO: 1812590 - RNA, 19 nt, Human
uaagaaaaaggaugcacag

SEQ ID NO: 1812591 - RNA, 18 nt, Human
uaagaaaaaggaugcaca

SEQ ID NO: 1812592 - RNA, 16 nt, Human
uaagaaaaaggaugca

SEQ ID NO: 1812593 - RNA, 19 nt, Human
uaagaaccuuuugagugcc

SEQ ID NO: 1812594 - RNA, 24 nt, Human
uaagaaagacuaucuaaauguuga

SEQ ID NO: 1812595 - RNA, 11 nt, Human
uaaauuauuuu

SEQ ID NO: 1812596 - RNA, 16 nt, Human
uaaauucuugcaaagu

SEQ ID NO: 1812597 - RNA, 22 nt, Human
uaaauucuugcaaaguaucccu

SEQ ID NO: 1812598 - RNA, 18 nt, Human
uaaauucuugcaaaguau

SEQ ID NO: 1812599 - RNA, 17 nt, Human
uaaauucuugcaaagua

SEQ ID NO: 1812600 - RNA, 23 nt, Human
uaaauugacacuuaaaaaugguu

SEQ ID NO: 1812601 - RNA, 20 nt, Human
uaaauugacacuuaaaaaug

SEQ ID NO: 1812602 - RNA, 18 nt, Human
uaacaccaugauuaacca

SEQ ID NO: 1812603 - RNA, 22 nt, Human
uaaaugucucuuuaaugucaca

SEQ ID NO: 1812604 - RNA, 20 nt, Human
uaaaugucuaguuguaacac

SEQ ID NO: 1812605 - RNA, 15 nt, Human
uaaauguagaaagug

SEQ ID NO: 1812606 - RNA, 17 nt, Human
uaaaugggggugcauuu

SEQ ID NO: 1812607 - RNA, 14 nt, Human
uaaaugggggugca

SEQ ID NO: 1812608 - RNA, 19 nt, Human
uaaaugggggugcauuuga

SEQ ID NO: 1812609 - RNA, 18 nt, Human
uaaaugggggugcauuug

SEQ ID NO: 1812610 - RNA, 17 nt, Human
uaaaguugguaaaccuu

SEQ ID NO: 1812611 - RNA, 16 nt, Human
uaaaguugguaaaccu

SEQ ID NO: 1812612 - RNA, 13 nt, Human
uaaaugcccagcc

SEQ ID NO: 1812613 - RNA, 16 nt, Human
uaaauggaaccacucu

SEQ ID NO: 1812614 - RNA, 14 nt, Human
uaaaugcccagccc

SEQ ID NO: 1812615 - RNA, 15 nt, Human
uaaaugcccagcccc

SEQ ID NO: 1812616 - RNA, 16 nt, Human
uaaaugcccagccccu

SEQ ID NO: 1812617 - RNA, 17 nt, Human
uaaaugcccagccccuu

SEQ ID NO: 1812618 - RNA, 18 nt, Human
uaaacacucuugaaaaau

SEQ ID NO: 1812619 - RNA, 15 nt, Human
uaaacacucuugaaa

SEQ ID NO: 1812620 - RNA, 17 nt, Human
uaaacacucuugaaaaa

SEQ ID NO: 1812621 - RNA, 16 nt, Human
uaaaaucuugaaaaug

SEQ ID NO: 1812622 - RNA, 20 nt, Human
uaaacaagaccacguuucua

SEQ ID NO: 1812623 - RNA, 22 nt, Human
uaaacaagaccacguuucuaaa

SEQ ID NO: 1812624 - RNA, 21 nt, Human
uaaacaagaccacguuucuaa

SEQ ID NO: 1812625 - RNA, 22 nt, Human
uaaacuugguuuuuaaaaaacu

SEQ ID NO: 1812626 - RNA, 14 nt, Human
uaaaguguuugaaa

SEQ ID NO: 1812627 - RNA, 17 nt, Human
uaaaggcuaccuuugua

SEQ ID NO: 1812628 - RNA, 14 nt, Human
uaaagcugaaaacu

SEQ ID NO: 1812629 - RNA, 20 nt, Human
uaaagccugaguuugcuuuc

SEQ ID NO: 1812630 - RNA, 15 nt, Human
uaaaggcuaccuuug

SEQ ID NO: 1812631 - RNA, 11 nt, Human
uaaagccucaa

SEQ ID NO: 1812632 - RNA, 18 nt, Human
uaaagcaggcagaacuca

SEQ ID NO: 1812633 - RNA, 19 nt, Human
uaaagcagcguuucuauga

SEQ ID NO: 1812634 - RNA, 17 nt, Human
uaaagcagcguuucuau

SEQ ID NO: 1812635 - RNA, 16 nt, Human
uaaagcagcguuucua

SEQ ID NO: 1812636 - RNA, 12 nt, Human
uaaagaaaacug

SEQ ID NO: 1812637 - RNA, 22 nt, Human
uaaagaaaaguuuuguaaauuu

SEQ ID NO: 1812638 - RNA, 16 nt, Human
uaaagaaaaguuuugu

SEQ ID NO: 1812639 - RNA, 15 nt, Human
uaaaacaacacucac

SEQ ID NO: 1812640 - RNA, 22 nt, Human
uaaaacaagcacuaaacaaaga

SEQ ID NO: 1812641 - RNA, 17 nt, Human
uaaaacacaacaucuuu

SEQ ID NO: 1812642 - RNA, 22 nt, Human
uaaaacacaacaucuuuuucua

SEQ ID NO: 1812643 - RNA, 23 nt, Human
uaaaacacaacaucuuuuucuac

SEQ ID NO: 1812644 - RNA, 19 nt, Human
uaaaacacuuccauaaucu

SEQ ID NO: 1812645 - RNA, 19 nt, Human
uaaaaaugguuuaaauggu

SEQ ID NO: 1812646 - RNA, 18 nt, Human
uaaaaaugguuuaaaugg

SEQ ID NO: 1812647 - RNA, 22 nt, Human
uaaaaacagauuuggaaagacu

SEQ ID NO: 1812648 - RNA, 20 nt, Human
uaaaaacagauuuggaaaga

SEQ ID NO: 1812649 - RNA, 17 nt, Human
guuuuuaauaaagacag

SEQ ID NO: 1812650 - RNA, 21 nt, Human
guuuuuaaggguuuguggaaa

SEQ ID NO: 1812651 - RNA, 21 nt, Human
uaaaaacaaagaaauuaugug

SEQ ID NO: 1812652 - RNA, 17 nt, Human
uaaaaacaaagaaauua

SEQ ID NO: 1812653 - RNA, 21 nt, Human
uaaaagauacaguuacucaga

SEQ ID NO: 1812654 - RNA, 20 nt, Human
uaaaagauacaguuacucag

SEQ ID NO: 1812655 - RNA, 17 nt, Human
uaaaagauacaguuacu

SEQ ID NO: 1812656 - RNA, 14 nt, Human
uaaaagauacaguu

SEQ ID NO: 1812657 - RNA, 19 nt, Human
uaaaacauuaaaauauaau

SEQ ID NO: 1812658 - RNA, 16 nt, Human
uaaaacauuaaaauau

SEQ ID NO: 1812659 - RNA, 15 nt, Human
uaaaacauuaaaaua

SEQ ID NO: 1812660 - RNA, 12 nt, Human
uaaaacauuaaa

SEQ ID NO: 1812661 - RNA, 21 nt, Human
uaaaagguaugcaaucaaauc

SEQ ID NO: 1812662 - RNA, 12 nt, Human
uaaaaggagcca

SEQ ID NO: 1812663 - RNA, 19 nt, Human
uaaaaggugaccaaugaug

SEQ ID NO: 1812664 - RNA, 12 nt, Human
uaaaaggugacc

SEQ ID NO: 1812665 - RNA, 12 nt, Human
guuuucacucuu

SEQ ID NO: 1812666 - RNA, 11 nt, Human
guuuucacucu

SEQ ID NO: 1812667 - RNA, 24 nt, Human
guuuucaggaguggguugauuuca

SEQ ID NO: 1812668 - RNA, 17 nt, Human
guuuuaaaaugagaaau

SEQ ID NO: 1812669 - RNA, 20 nt, Human
guuuucaaaauuguuacaaa

SEQ ID NO: 1812670 - RNA, 17 nt, Human
guuuucaaaauaaaaau

SEQ ID NO: 1812671 - RNA, 20 nt, Human
guuuguuucugaaagggacg

SEQ ID NO: 1812672 - RNA, 15 nt, Human
guuuuaaaaugagaa

SEQ ID NO: 1812673 - RNA, 16 nt, Human
guuuuaaaaugagaaa

SEQ ID NO: 1812674 - RNA, 14 nt, Human
guuuuguaaauuuc

SEQ ID NO: 1812675 - RNA, 12 nt, Human
guuuuguaaauu

SEQ ID NO: 1812676 - RNA, 13 nt, Human
guuuuccugaaga

SEQ ID NO: 1812677 - RNA, 20 nt, Human
guuuuccagguuuaagcugu

SEQ ID NO: 1812678 - RNA, 19 nt, Human
guuuuccaugaguccccug

SEQ ID NO: 1812679 - RNA, 20 nt, Human
guuuuccaugaguccccugu

SEQ ID NO: 1812680 - RNA, 18 nt, Human
guuuguuucugaaaggga

SEQ ID NO: 1812681 - RNA, 16 nt, Human
guuugauucagacagc

SEQ ID NO: 1812682 - RNA, 20 nt, Human
guuugauucagacagcugcc

SEQ ID NO: 1812683 - RNA, 21 nt, Human
guuugauucagacagcugccu

SEQ ID NO: 1812684 - RNA, 17 nt, Human
guuugagaucagccugg

SEQ ID NO: 1812685 - RNA, 23 nt, Human
guuugauuaaauucuugcaaagu

SEQ ID NO: 1812686 - RNA, 18 nt, Human
guuugagaucagccuggg

SEQ ID NO: 1812687 - RNA, 19 nt, Human
guuucuuuguaaugaaaac

SEQ ID NO: 1812688 - RNA, 16 nt, Human
guuucuuuaguuuuug

SEQ ID NO: 1812689 - RNA, 18 nt, Human
guuucuuuguaaugaaaa

SEQ ID NO: 1812690 - RNA, 12 nt, Human
guuggcuggggg

SEQ ID NO: 1812691 - RNA, 14 nt, Human
guuggccccugccc

SEQ ID NO: 1812692 - RNA, 13 nt, Human
guuggccccugcc

SEQ ID NO: 1812693 - RNA, 20 nt, Human
guuggccccugcccggcugc

SEQ ID NO: 1812694 - RNA, 19 nt, Human
guuggcugggggccucagu

SEQ ID NO: 1812695 - RNA, 23 nt, Human
guuggcugggggccucagugcca

SEQ ID NO: 1812696 - RNA, 18 nt, Human
guugucaagaauagcauu

SEQ ID NO: 1812697 - RNA, 14 nt, Human
guugucaagaauag

SEQ ID NO: 1812698 - RNA, 22 nt, Human
guugucaagaauagcauuguaa

SEQ ID NO: 1812699 - RNA, 12 nt, Human
guugucagcuga

SEQ ID NO: 1812700 - RNA, 15 nt, Human
guuguuaauaaaagu

SEQ ID NO: 1812701 - RNA, 22 nt, Human
guuguggauuuaacagaaaugu

SEQ ID NO: 1812702 - RNA, 14 nt, Human
guugugguuaaucu

SEQ ID NO: 1812703 - RNA, 19 nt, Human
guugucugaagucacugca

SEQ ID NO: 1812704 - RNA, 22 nt, Human
guugucugaagucacugcacag

SEQ ID NO: 1812705 - RNA, 15 nt, Human
guuuagauaauacac

SEQ ID NO: 1812706 - RNA, 14 nt, Human
guuuagauaauaca

SEQ ID NO: 1812707 - RNA, 20 nt, Human
guuguuugauucagacagcu

SEQ ID NO: 1812708 - RNA, 15 nt, Human
guuguuacauuuuua

SEQ ID NO: 1812709 - RNA, 14 nt, Human
guuguuacauuuuu

SEQ ID NO: 1812710 - RNA, 20 nt, Human
guuuaggauguugaaaaagu

SEQ ID NO: 1812711 - RNA, 19 nt, Human
guuuaggaacuacugagga

SEQ ID NO: 1812712 - RNA, 16 nt, Human
guugcaacuuuguaua

SEQ ID NO: 1812713 - RNA, 23 nt, Human
guugauuucagcaccuacagugu

SEQ ID NO: 1812714 - RNA, 14 nt, Human
guugcaacuuugua

SEQ ID NO: 1812715 - RNA, 15 nt, Human
guugcaggaccucag

SEQ ID NO: 1812716 - RNA, 16 nt, Human
guugaagacagagcua

SEQ ID NO: 1812717 - RNA, 13 nt, Human
guugaagccuuug

SEQ ID NO: 1812718 - RNA, 14 nt, Human
guugaagccuuugu

SEQ ID NO: 1812719 - RNA, 14 nt, Human
guugauuaaagaug

SEQ ID NO: 1812720 - RNA, 14 nt, Human
guuggauuuuuguc

SEQ ID NO: 1812721 - RNA, 14 nt, Human
guuggcaaaaaggc

SEQ ID NO: 1812722 - RNA, 20 nt, Human
guuggauuuuugucuugugu

SEQ ID NO: 1812723 - RNA, 18 nt, Human
guuggcaaaaaggcagga

SEQ ID NO: 1812724 - RNA, 23 nt, Human
guuggccaaagccaaagcuaggc

SEQ ID NO: 1812725 - RNA, 14 nt, Human
guuggccaguguga

SEQ ID NO: 1812726 - RNA, 19 nt, Human
guuggccaggcuggucuca

SEQ ID NO: 1812727 - RNA, 17 nt, Human
guuggccaggcuggucu

SEQ ID NO: 1812728 - RNA, 19 nt, Human
guuggccaggcugcucuug

SEQ ID NO: 1812729 - RNA, 18 nt, Human
guuggccaggcuggucuc

SEQ ID NO: 1812730 - RNA, 14 nt, Human
guuggccaggcugg

SEQ ID NO: 1812731 - RNA, 15 nt, Human
guuggccaggcuggu

SEQ ID NO: 1812732 - RNA, 13 nt, Human
guuggccaggcug

SEQ ID NO: 1812733 - RNA, 14 nt, Human
guuggccaggcugc

SEQ ID NO: 1812734 - RNA, 14 nt, Human
guugcccaggcagg

SEQ ID NO: 1812735 - RNA, 15 nt, Human
guugcccaggcaggu

SEQ ID NO: 1812736 - RNA, 12 nt, Human
guugcccaggca

SEQ ID NO: 1812737 - RNA, 13 nt, Human
guugccagucacc

SEQ ID NO: 1812738 - RNA, 14 nt, Human
guugccagucaccc

SEQ ID NO: 1812739 - RNA, 16 nt, Human
guugccagucaccccg

SEQ ID NO: 1812740 - RNA, 17 nt, Human
guugccagucaccccgg

SEQ ID NO: 1812741 - RNA, 18 nt, Human
guugccagucaccccggc

SEQ ID NO: 1812742 - RNA, 23 nt, Human
guugccagucaccccggccaccu

SEQ ID NO: 1812743 - RNA, 15 nt, Human
guucugcacacagca

SEQ ID NO: 1812744 - RNA, 16 nt, Human
guucugcacacagcac

SEQ ID NO: 1812745 - RNA, 19 nt, Human
guucugauccuaguuccac

SEQ ID NO: 1812746 - RNA, 18 nt, Human
guuccuuccucugagccu

SEQ ID NO: 1812747 - RNA, 19 nt, Human
guuccuuccucugagccuu

SEQ ID NO: 1812748 - RNA, 17 nt, Human
guuccuuccucugagcc

SEQ ID NO: 1812749 - RNA, 23 nt, Human
guucuaaagauggaaaaaccacc

SEQ ID NO: 1812750 - RNA, 20 nt, Human
guucuaaagauggaaaaacc

SEQ ID NO: 1812751 - RNA, 17 nt, Human
guucuaaagauggaaaa

SEQ ID NO: 1812752 - RNA, 14 nt, Human
guucuaaagaugga

SEQ ID NO: 1812753 - RNA, 23 nt, Human
guucugggacacaguucaauucu

SEQ ID NO: 1812754 - RNA, 18 nt, Human
guucuuucacccuuuucu

SEQ ID NO: 1812755 - RNA, 16 nt, Human
guucugggacacaguu

SEQ ID NO: 1812756 - RNA, 15 nt, Human
guucugggacacagu

SEQ ID NO: 1812757 - RNA, 14 nt, Human
guucugggacacag

SEQ ID NO: 1812758 - RNA, 12 nt, Human
guucugggacac

SEQ ID NO: 1812759 - RNA, 11 nt, Human
guucugggaca

SEQ ID NO: 1812760 - RNA, 23 nt, Human
guucuggcagaguugaagacaga

SEQ ID NO: 1812761 - RNA, 12 nt, Human
guucuggcucuu

SEQ ID NO: 1812762 - RNA, 16 nt, Human
guucuggcucuuccag

SEQ ID NO: 1812763 - RNA, 20 nt, Human
guucuggcucuuccaggcug

SEQ ID NO: 1812764 - RNA, 16 nt, Human
guucuuucuuccucug

SEQ ID NO: 1812765 - RNA, 17 nt, Human
guucuuucuuccucugc

SEQ ID NO: 1812766 - RNA, 18 nt, Human
guucuuucuuccucugcu

SEQ ID NO: 1812767 - RNA, 19 nt, Human
guucuuucuuccucugcug

SEQ ID NO: 1812768 - RNA, 22 nt, Human
guucuuucauuugcuuuggaag

SEQ ID NO: 1812769 - RNA, 20 nt, Human
guucuuucauuugcuuugga

SEQ ID NO: 1812770 - RNA, 14 nt, Human
guucuuucuuccuc

SEQ ID NO: 1812771 - RNA, 15 nt, Human
guucuuucuuccucu

SEQ ID NO: 1812772 - RNA, 20 nt, Human
guucuuuccaaaguacacug

SEQ ID NO: 1812773 - RNA, 18 nt, Human
guucuuuccaaaguacac

SEQ ID NO: 1812774 - RNA, 14 nt, Human
guucuuuccaaagu

SEQ ID NO: 1812775 - RNA, 13 nt, Human
guucuuuccaaag

SEQ ID NO: 1812776 - RNA, 17 nt, Human
guugaaaaacagcugag

SEQ ID NO: 1812777 - RNA, 23 nt, Human
guuccuccccuccuccuggacuc

SEQ ID NO: 1812778 - RNA, 14 nt, Human
guuccuaauccucu

SEQ ID NO: 1812779 - RNA, 23 nt, Human
guuccuagugauggcuuaugaua

SEQ ID NO: 1812780 - RNA, 22 nt, Human
guuccucauuagcauuuugcua

SEQ ID NO: 1812781 - RNA, 23 nt, Human
guuccagcaauucuccugccuca

SEQ ID NO: 1812782 - RNA, 14 nt, Human
guuccacugagacc

SEQ ID NO: 1812783 - RNA, 20 nt, Human
guuccagcaauucuccugcc

SEQ ID NO: 1812784 - RNA, 21 nt, Human
guuccagcaauucuccugccu

SEQ ID NO: 1812785 - RNA, 13 nt, Human
guuccacugagac

SEQ ID NO: 1812786 - RNA, 12 nt, Human
guuccacugaga

SEQ ID NO: 1812787 - RNA, 14 nt, Human
guuccacagaggac

SEQ ID NO: 1812788 - RNA, 17 nt, Human
guuccaccaucaagcca

SEQ ID NO: 1812789 - RNA, 20 nt, Human
guuccaccaucaagccacca

SEQ ID NO: 1812790 - RNA, 17 nt, Human
guucaucauccuaagcu

SEQ ID NO: 1812791 - RNA, 16 nt, Human
guucaucaaugaauga

SEQ ID NO: 1812792 - RNA, 18 nt, Human
guucaucuugaauuguaa

SEQ ID NO: 1812793 - RNA, 12 nt, Human
guucaucuugaa

SEQ ID NO: 1812794 - RNA, 13 nt, Human
guucaucuugaau

SEQ ID NO: 1812795 - RNA, 19 nt, Human
guucacugcaaccuccgcc

SEQ ID NO: 1812796 - RNA, 24 nt, Human
guucacucuacuuagcaugucccu

SEQ ID NO: 1812797 - RNA, 15 nt, Human
guuacucagaauucu

SEQ ID NO: 1812798 - RNA, 22 nt, Human
guuacuaaguuuuuauggcuuu

SEQ ID NO: 1812799 - RNA, 16 nt, Human
guuaguuccacugaga

SEQ ID NO: 1812800 - RNA, 22 nt, Human
guuaguuucuccaagcaggaca

SEQ ID NO: 1812801 - RNA, 16 nt, Human
guuaguuucuccaagc

SEQ ID NO: 1812802 - RNA, 19 nt, Human
guuaguuucuccaagcagg

SEQ ID NO: 1812803 - RNA, 23 nt, Human
guuaccauuuugggguacccacu

SEQ ID NO: 1812804 - RNA, 21 nt, Human
guuacauuuuuaagugcugca

SEQ ID NO: 1812805 - RNA, 15 nt, Human
guuacagacaaagcg

SEQ ID NO: 1812806 - RNA, 17 nt, Human
guuacagacaaagcgug

SEQ ID NO: 1812807 - RNA, 18 nt, Human
guuacauaagauaaaugu

SEQ ID NO: 1812808 - RNA, 19 nt, Human
guuacauaagauaaaugug

SEQ ID NO: 1812809 - RNA, 17 nt, Human
guuauuauauuuacaaa

SEQ ID NO: 1812810 - RNA, 19 nt, Human
guucaagcgauucuucugc

SEQ ID NO: 1812811 - RNA, 19 nt, Human
guuauuaaaaaucucaaau

SEQ ID NO: 1812812 - RNA, 23 nt, Human
guucaagugauucucaugccuca

SEQ ID NO: 1812813 - RNA, 20 nt, Human
guucaagcgauucuucugcu

SEQ ID NO: 1812814 - RNA, 16 nt, Human
guucaauucucauuug

SEQ ID NO: 1812815 - RNA, 23 nt, Human
guucaauucucauuugucacaca

SEQ ID NO: 1812816 - RNA, 21 nt, Human
guuaugacuccagaauuuccc

SEQ ID NO: 1812817 - RNA, 23 nt, Human
guggguuucuaaagcugccagcc

SEQ ID NO: 1812818 - RNA, 17 nt, Human
guggggcagcuugaggg

SEQ ID NO: 1812819 - RNA, 13 nt, Human
guggggcagcuug

SEQ ID NO: 1812820 - RNA, 15 nt, Human
guggggaccucaggc

SEQ ID NO: 1812821 - RNA, 18 nt, Human
guggggaccucaggccug

SEQ ID NO: 1812822 - RNA, 13 nt, Human
guggggaggggcu

SEQ ID NO: 1812823 - RNA, 15 nt, Human
gugggcuaguugggc

SEQ ID NO: 1812824 - RNA, 12 nt, Human
gugggcuaagca

SEQ ID NO: 1812825 - RNA, 18 nt, Human
gugggcgugagaccugcc

SEQ ID NO: 1812826 - RNA, 21 nt, Human
gugggcgugagaccugccccu

SEQ ID NO: 1812827 - RNA, 22 nt, Human
gugggcgugagaccugccccuc

SEQ ID NO: 1812828 - RNA, 19 nt, Human
gugggccuucagggaguga

SEQ ID NO: 1812829 - RNA, 17 nt, Human
gugggcccaaugcacuu

SEQ ID NO: 1812830 - RNA, 22 nt, Human
guggcuuaaaacaacacucaca

SEQ ID NO: 1812831 - RNA, 18 nt, Human
guggcuucccgcucagcc

SEQ ID NO: 1812832 - RNA, 19 nt, Human
guggcuucccgcucagccc

SEQ ID NO: 1812833 - RNA, 20 nt, Human
guggcuucccgcucagcccu

SEQ ID NO: 1812834 - RNA, 19 nt, Human
guggcuggguuggagggug

SEQ ID NO: 1812835 - RNA, 23 nt, Human
guggcugcuucaaggauccugag

SEQ ID NO: 1812836 - RNA, 15 nt, Human
guggcugcuucaagg

SEQ ID NO: 1812837 - RNA, 16 nt, Human
guggcugcuucaagga

SEQ ID NO: 1812838 - RNA, 19 nt, Human
guggcugcuucaaggaucc

SEQ ID NO: 1812839 - RNA, 22 nt, Human
guggcugcuucaaggauccuga

SEQ ID NO: 1812840 - RNA, 13 nt, Human
guggcuccucccg

SEQ ID NO: 1812841 - RNA, 20 nt, Human
guggcuccucccggugccca

SEQ ID NO: 1812842 - RNA, 12 nt, Human
guggcugcuuca

SEQ ID NO: 1812843 - RNA, 14 nt, Human
guggcugcuucaag

SEQ ID NO: 1812844 - RNA, 13 nt, Human
gugcuaauuuuga

SEQ ID NO: 1812845 - RNA, 15 nt, Human
gugcuaauuuugaaa

SEQ ID NO: 1812846 - RNA, 14 nt, Human
guggcucacgccug

SEQ ID NO: 1812847 - RNA, 18 nt, Human
gugucccugcacuugcag

SEQ ID NO: 1812848 - RNA, 16 nt, Human
gugucccugcacuugc

SEQ ID NO: 1812849 - RNA, 13 nt, Human
gugucccugcacu

SEQ ID NO: 1812850 - RNA, 22 nt, Human
guguacagucuuguauuaaguu

SEQ ID NO: 1812851 - RNA, 16 nt, Human
guguacagucuuguau

SEQ ID NO: 1812852 - RNA, 13 nt, Human
guguacagucuug

SEQ ID NO: 1812853 - RNA, 17 nt, Human
guguacauggaauaaca

SEQ ID NO: 1812854 - RNA, 22 nt, Human
guguacauggaauaacauguaa

SEQ ID NO: 1812855 - RNA, 14 nt, Human
gugguauagaaaug

SEQ ID NO: 1812856 - RNA, 19 nt, Human
gugguaugaucacggcuca

SEQ ID NO: 1812857 - RNA, 17 nt, Human
gugguagagugugccug

SEQ ID NO: 1812858 - RNA, 14 nt, Human
guggucccacccca

SEQ ID NO: 1812859 - RNA, 15 nt, Human
guggucccaccccac

SEQ ID NO: 1812860 - RNA, 16 nt, Human
guggucccaccccaca

SEQ ID NO: 1812861 - RNA, 17 nt, Human
guggucccaccccacac

SEQ ID NO: 1812862 - RNA, 18 nt, Human
gugguccuaaucuucuga

SEQ ID NO: 1812863 - RNA, 17 nt, Human
guggugaccucugccug

SEQ ID NO: 1812864 - RNA, 14 nt, Human
guggugaccucugc

SEQ ID NO: 1812865 - RNA, 21 nt, Human
guggugagaggcauccaguau

SEQ ID NO: 1812866 - RNA, 19 nt, Human
guggugcgaucuggguuca

SEQ ID NO: 1812867 - RNA, 21 nt, Human
guguaaguauucuuauuuaau

SEQ ID NO: 1812868 - RNA, 19 nt, Human
guuaaacuuacuuaguguu

SEQ ID NO: 1812869 - RNA, 18 nt, Human
guuaaaggugaacauugg

SEQ ID NO: 1812870 - RNA, 22 nt, Human
guuaaaauaccagccaguaaau

SEQ ID NO: 1812871 - RNA, 20 nt, Human
guuaaaaacagauuuggaaa

SEQ ID NO: 1812872 - RNA, 18 nt, Human
guuaacugagugccuuuu

SEQ ID NO: 1812873 - RNA, 16 nt, Human
guuacacauuuuucag

SEQ ID NO: 1812874 - RNA, 15 nt, Human
guuacacuaaaaggu

SEQ ID NO: 1812875 - RNA, 16 nt, Human
guuacacuaaaaggug

SEQ ID NO: 1812876 - RNA, 17 nt, Human
guuacacauuuuucaga

SEQ ID NO: 1812877 - RNA, 22 nt, Human
guuacacuuuuuggaagugaaa

SEQ ID NO: 1812878 - RNA, 18 nt, Human
guuacacuuuuuggaagu

SEQ ID NO: 1812879 - RNA, 17 nt, Human
guuacacuuuuuggaag

SEQ ID NO: 1812880 - RNA, 13 nt, Human
guuacagacaaag

SEQ ID NO: 1812881 - RNA, 14 nt, Human
guguuacuaaguuu

SEQ ID NO: 1812882 - RNA, 12 nt, Human
guguuacuaagu

SEQ ID NO: 1812883 - RNA, 18 nt, Human
guguuaugacuccagaau

SEQ ID NO: 1812884 - RNA, 14 nt, Human
guguguuuuucaua

SEQ ID NO: 1812885 - RNA, 13 nt, Human
guguguuuuaaaa

SEQ ID NO: 1812886 - RNA, 16 nt, Human
guguguuuuaaaauga

SEQ ID NO: 1812887 - RNA, 19 nt, Human
guguguuuuaaaaugagaa

SEQ ID NO: 1812888 - RNA, 18 nt, Human
guguuuuucauaaagcag

SEQ ID NO: 1812889 - RNA, 13 nt, Human
guguucugugaua

SEQ ID NO: 1812890 - RNA, 23 nt, Human
gugucccugcacuugcagacucu

SEQ ID NO: 1812891 - RNA, 14 nt, Human
guguccggucccug

SEQ ID NO: 1812892 - RNA, 20 nt, Human
guguccuccugggguucuuu

SEQ ID NO: 1812893 - RNA, 15 nt, Human
gugucgggcaugaca

SEQ ID NO: 1812894 - RNA, 19 nt, Human
gugucuaggcaggaccugu

SEQ ID NO: 1812895 - RNA, 17 nt, Human
gugucucccuucauccu

SEQ ID NO: 1812896 - RNA, 14 nt, Human
gugucucuuggucc

SEQ ID NO: 1812897 - RNA, 20 nt, Human
gugugagucaccaagcccag

SEQ ID NO: 1812898 - RNA, 22 nt, Human
gugucucuugguccugcugcag

SEQ ID NO: 1812899 - RNA, 18 nt, Human
gugucucuugguccugcu

SEQ ID NO: 1812900 - RNA, 19 nt, Human
gugucucuugguccugcug

SEQ ID NO: 1812901 - RNA, 20 nt, Human
gugucucuugguccugcugc

SEQ ID NO: 1812902 - RNA, 21 nt, Human
gugucucuugguccugcugca

SEQ ID NO: 1812903 - RNA, 22 nt, Human
gugugcucugaucauccacugu

SEQ ID NO: 1812904 - RNA, 15 nt, Human
gugugcucugaucau

SEQ ID NO: 1812905 - RNA, 12 nt, Human
gugugcucugau

SEQ ID NO: 1812906 - RNA, 18 nt, Human
gugugcucaggagcccug

SEQ ID NO: 1812907 - RNA, 19 nt, Human
gugugcucaggagcccugg

SEQ ID NO: 1812908 - RNA, 16 nt, Human
gugugcucaggagccc

SEQ ID NO: 1812909 - RNA, 17 nt, Human
gugugcucaggagcccu

SEQ ID NO: 1812910 - RNA, 15 nt, Human
guguguuucugaucu

SEQ ID NO: 1812911 - RNA, 12 nt, Human
guguguuuuaaa

SEQ ID NO: 1812912 - RNA, 21 nt, Human
guguggagaagcggcuggcag

SEQ ID NO: 1812913 - RNA, 13 nt, Human
guguggagaagcg

SEQ ID NO: 1812914 - RNA, 12 nt, Human
gugauuuucauu

SEQ ID NO: 1812915 - RNA, 18 nt, Human
gugauuuuuguaauuuuu

SEQ ID NO: 1812916 - RNA, 13 nt, Human
gugauuuuuguaa

SEQ ID NO: 1812917 - RNA, 24 nt, Human
gugauccacccaccucagccuccc

SEQ ID NO: 1812918 - RNA, 23 nt, Human
gugauccacccaccucagccucc

SEQ ID NO: 1812919 - RNA, 13 nt, Human
gugcaucucagcc

SEQ ID NO: 1812920 - RNA, 14 nt, Human
gugcaucucagccc

SEQ ID NO: 1812921 - RNA, 22 nt, Human
gugcauaccacuuuuguucuug

SEQ ID NO: 1812922 - RNA, 23 nt, Human
gugcaguggugcgaucuggguuc

SEQ ID NO: 1812923 - RNA, 20 nt, Human
gugcaguggugcgaucuggg

SEQ ID NO: 1812924 - RNA, 14 nt, Human
gugcgccuacagga

SEQ ID NO: 1812925 - RNA, 14 nt, Human
gugcggccuuuggc

SEQ ID NO: 1812926 - RNA, 21 nt, Human
gugcgaucuggguucacugca

SEQ ID NO: 1812927 - RNA, 15 nt, Human
gugccuucagcucua

SEQ ID NO: 1812928 - RNA, 16 nt, Human
gugccaugugccaggu

SEQ ID NO: 1812929 - RNA, 14 nt, Human
gugccaugugccag

SEQ ID NO: 1812930 - RNA, 20 nt, Human
gugcccaagaauagaugcug

SEQ ID NO: 1812931 - RNA, 19 nt, Human
gugagccgagaucacgcca

SEQ ID NO: 1812932 - RNA, 18 nt, Human
gugaggagcuugaaaccc

SEQ ID NO: 1812933 - RNA, 17 nt, Human
gugaggaugaaaaaaua

SEQ ID NO: 1812934 - RNA, 20 nt, Human
gugagccacugcaccgggcc

SEQ ID NO: 1812935 - RNA, 15 nt, Human
gugagccacugcacc

SEQ ID NO: 1812936 - RNA, 17 nt, Human
gugauacaaugcugugc

SEQ ID NO: 1812937 - RNA, 15 nt, Human
gugauacaaugcugu

SEQ ID NO: 1812938 - RNA, 17 nt, Human
gugaguugauagcacag

SEQ ID NO: 1812939 - RNA, 19 nt, Human
gugauauaaguguguguuu

SEQ ID NO: 1812940 - RNA, 22 nt, Human
gugauccacccaccucagccuc

SEQ ID NO: 1812941 - RNA, 21 nt, Human
gugaacaaauuuacagagaca

SEQ ID NO: 1812942 - RNA, 20 nt, Human
gugacaaggauugcuacugu

SEQ ID NO: 1812943 - RNA, 21 nt, Human
gugaaugaugauccuaggcau

SEQ ID NO: 1812944 - RNA, 15 nt, Human
gugaccucugccuga

SEQ ID NO: 1812945 - RNA, 14 nt, Human
gugaccucugccug

SEQ ID NO: 1812946 - RNA, 13 nt, Human
gugaccucugccu

SEQ ID NO: 1812947 - RNA, 15 nt, Human
gugacagaggcagcc

SEQ ID NO: 1812948 - RNA, 12 nt, Human
gugaccucugcc

SEQ ID NO: 1812949 - RNA, 14 nt, Human
gugacagaggcagc

SEQ ID NO: 1812950 - RNA, 13 nt, Human
gugacagaggcag

SEQ ID NO: 1812951 - RNA, 12 nt, Human
gugacagaggca

SEQ ID NO: 1812952 - RNA, 19 nt, Human
gucuguugauuaaagauga

SEQ ID NO: 1812953 - RNA, 16 nt, Human
gucuguugauuaaaga

SEQ ID NO: 1812954 - RNA, 13 nt, Human
gucuguugauuaa

SEQ ID NO: 1812955 - RNA, 17 nt, Human
gucuguucuuuccaaag

SEQ ID NO: 1812956 - RNA, 14 nt, Human
gucuguucuuucca

SEQ ID NO: 1812957 - RNA, 21 nt, Human
gucugugagaugcuagaacuc

SEQ ID NO: 1812958 - RNA, 17 nt, Human
gucugugagaugcuaga

SEQ ID NO: 1812959 - RNA, 16 nt, Human
gucugugagaugcuag

SEQ ID NO: 1812960 - RNA, 15 nt, Human
gucugugagaugcua

SEQ ID NO: 1812961 - RNA, 18 nt, Human
gucugugccauuuuguau

SEQ ID NO: 1812962 - RNA, 23 nt, Human
gucugugagaugcuagaacuccc

SEQ ID NO: 1812963 - RNA, 22 nt, Human
gucugugagaugcuagaacucc

SEQ ID NO: 1812964 - RNA, 21 nt, Human
gucuugcaauggcagccuugg

SEQ ID NO: 1812965 - RNA, 20 nt, Human
gucuugcaauggcagccuug

SEQ ID NO: 1812966 - RNA, 23 nt, Human
gucuugcaauggcagccuuggca

SEQ ID NO: 1812967 - RNA, 16 nt, Human
gucuuuuuucacuaca

SEQ ID NO: 1812968 - RNA, 17 nt, Human
gucuugaacuccuggcc

SEQ ID NO: 1812969 - RNA, 16 nt, Human
gucuugaacuccuggc

SEQ ID NO: 1812970 - RNA, 21 nt, Human
gucuuaaaaaguggaaaaaua

SEQ ID NO: 1812971 - RNA, 19 nt, Human
gucuugcaauggcagccuu

SEQ ID NO: 1812972 - RNA, 18 nt, Human
gucuugcaauggcagccu

SEQ ID NO: 1812973 - RNA, 17 nt, Human
gucuugcaauggcagcc

SEQ ID NO: 1812974 - RNA, 16 nt, Human
gucuugcaauggcagc

SEQ ID NO: 1812975 - RNA, 20 nt, Human
gucuugaacuccuggccuca

SEQ ID NO: 1812976 - RNA, 18 nt, Human
gucuugaacuccuggccu

SEQ ID NO: 1812977 - RNA, 21 nt, Human
gucuugaacuccuggccucaa

SEQ ID NO: 1812978 - RNA, 18 nt, Human
gucgucaaagcugaaaug

SEQ ID NO: 1812979 - RNA, 19 nt, Human
gucucacuauguugcccag

SEQ ID NO: 1812980 - RNA, 11 nt, Human
gucucacucug

SEQ ID NO: 1812981 - RNA, 18 nt, Human
gucucacuauguugccca

SEQ ID NO: 1812982 - RNA, 15 nt, Human
gucccugccaaugga

SEQ ID NO: 1812983 - RNA, 11 nt, Human
gucccugccaa

SEQ ID NO: 1812984 - RNA, 14 nt, Human
gucccugccaaugg

SEQ ID NO: 1812985 - RNA, 21 nt, Human
guccuuaccagcagagcaccu

SEQ ID NO: 1812986 - RNA, 18 nt, Human
guccuuaccagcagagca

SEQ ID NO: 1812987 - RNA, 19 nt, Human
guccuuaccagcagagcac

SEQ ID NO: 1812988 - RNA, 21 nt, Human
gucggaaaacaugcuacacac

SEQ ID NO: 1812989 - RNA, 16 nt, Human
gucgggcaugacacga

SEQ ID NO: 1812990 - RNA, 22 nt, Human
gucucacucugucgcccagucu

SEQ ID NO: 1812991 - RNA, 19 nt, Human
gucucacucugucgcccag

SEQ ID NO: 1812992 - RNA, 18 nt, Human
gucucacucugucgccca

SEQ ID NO: 1812993 - RNA, 16 nt, Human
gucucacucugucgcc

SEQ ID NO: 1812994 - RNA, 15 nt, Human
gucucacucugucgc

SEQ ID NO: 1812995 - RNA, 19 nt, Human
gucucgugguaggacugua

SEQ ID NO: 1812996 - RNA, 17 nt, Human
gucucuggaauuugaaa

SEQ ID NO: 1812997 - RNA, 13 nt, Human
gucucugagcauu

SEQ ID NO: 1812998 - RNA, 21 nt, Human
gucucuggauuauauuaugaa

SEQ ID NO: 1812999 - RNA, 18 nt, Human
gucucuucuccacuggau

SEQ ID NO: 1813000 - RNA, 16 nt, Human
gucucugguuccuccc

SEQ ID NO: 1813001 - RNA, 17 nt, Human
gucucugguuccucccc

SEQ ID NO: 1813002 - RNA, 13 nt, Human
gucucuugguccu

SEQ ID NO: 1813003 - RNA, 22 nt, Human
gucagaugcugugcaaauguua

SEQ ID NO: 1813004 - RNA, 14 nt, Human
gucagagccugcag

SEQ ID NO: 1813005 - RNA, 16 nt, Human
gucagagccugcaguu

SEQ ID NO: 1813006 - RNA, 15 nt, Human
gucagagccugcagu

SEQ ID NO: 1813007 - RNA, 22 nt, Human
gucacucuggcagcucagagag

SEQ ID NO: 1813008 - RNA, 17 nt, Human
gucacucuggcagcuca

SEQ ID NO: 1813009 - RNA, 19 nt, Human
gucacucuggcagcucaga

SEQ ID NO: 1813010 - RNA, 12 nt, Human
gucacucuggca

SEQ ID NO: 1813011 - RNA, 13 nt, Human
gucacucuggcag

SEQ ID NO: 1813012 - RNA, 14 nt, Human
gucacucuggcagc

SEQ ID NO: 1813013 - RNA, 16 nt, Human
gucacucuggcagcuc

SEQ ID NO: 1813014 - RNA, 22 nt, Human
gucaccccggccaccugcggug

SEQ ID NO: 1813015 - RNA, 17 nt, Human
gucaccccggccaccug

SEQ ID NO: 1813016 - RNA, 18 nt, Human
gucaccccggccaccugc

SEQ ID NO: 1813017 - RNA, 13 nt, Human
guauuuuaaucac

SEQ ID NO: 1813018 - RNA, 22 nt, Human
guauuaaguuguuaauaaaagu

SEQ ID NO: 1813019 - RNA, 14 nt, Human
guauuuuacuaaua

SEQ ID NO: 1813020 - RNA, 15 nt, Human
gucaaugcagccccc

SEQ ID NO: 1813021 - RNA, 15 nt, Human
gucaagugaaaaagg

SEQ ID NO: 1813022 - RNA, 19 nt, Human
guauuuuguuuuugucuua

SEQ ID NO: 1813023 - RNA, 21 nt, Human
gucauucgcuacuaugauuua

SEQ ID NO: 1813024 - RNA, 21 nt, Human
guccacaguggaaccagccca

SEQ ID NO: 1813025 - RNA, 19 nt, Human
guccacaguggaaccagcc

SEQ ID NO: 1813026 - RNA, 16 nt, Human
guccacaguggaacca

SEQ ID NO: 1813027 - RNA, 21 nt, Human
gucccaccuuggcugcaggga

SEQ ID NO: 1813028 - RNA, 23 nt, Human
guccacccaggagccccgaggcc

SEQ ID NO: 1813029 - RNA, 12 nt, Human
guccacccagga

SEQ ID NO: 1813030 - RNA, 13 nt, Human
guccacccaggag

SEQ ID NO: 1813031 - RNA, 23 nt, Human
gucccaccuuggcugcagggagu

SEQ ID NO: 1813032 - RNA, 15 nt, Human
gucccaggcugagcc

SEQ ID NO: 1813033 - RNA, 16 nt, Human
gucccaggcugagccu

SEQ ID NO: 1813034 - RNA, 17 nt, Human
gucccaggcugagccuc

SEQ ID NO: 1813035 - RNA, 21 nt, Human
gucccaggcugagccucaguc

SEQ ID NO: 1813036 - RNA, 18 nt, Human
gucccaggcugagccuca

SEQ ID NO: 1813037 - RNA, 19 nt, Human
gucccaggcugagccucag

SEQ ID NO: 1813038 - RNA, 16 nt, Human
gucccuaauaaagcug

SEQ ID NO: 1813039 - RNA, 17 nt, Human
gucccuaauaaagcugu

SEQ ID NO: 1813040 - RNA, 17 nt, Human
guccccaccgcagacag

SEQ ID NO: 1813041 - RNA, 21 nt, Human
gucccugcacuugcagacucu

SEQ ID NO: 1813042 - RNA, 19 nt, Human
gucccugcacuugcagacu

SEQ ID NO: 1813043 - RNA, 16 nt, Human
gucccugcacuugcag

SEQ ID NO: 1813044 - RNA, 21 nt, Human
gucccuaccgagucucuucuc

SEQ ID NO: 1813045 - RNA, 22 nt, Human
gucccuaccgagucucuucucc

SEQ ID NO: 1813046 - RNA, 23 nt, Human
gucccuaccgagucucuucucca

SEQ ID NO: 1813047 - RNA, 18 nt, Human
gucccuaauaaagcugug

SEQ ID NO: 1813048 - RNA, 20 nt, Human
gucccuaauaaagcugugug

SEQ ID NO: 1813049 - RNA, 13 nt, Human
guauaugucucag

SEQ ID NO: 1813050 - RNA, 15 nt, Human
guauaugucucaggu

SEQ ID NO: 1813051 - RNA, 21 nt, Human
guauaugucucaggucccugc

SEQ ID NO: 1813052 - RNA, 16 nt, Human
guauauguugggugca

SEQ ID NO: 1813053 - RNA, 22 nt, Human
guauaugucaagccauaauugu

SEQ ID NO: 1813054 - RNA, 23 nt, Human
guauagaaaugcugguuuuucag

SEQ ID NO: 1813055 - RNA, 14 nt, Human
guauagaaaugcug

SEQ ID NO: 1813056 - RNA, 22 nt, Human
guauagaaaugcugguuuuuca

SEQ ID NO: 1813057 - RNA, 15 nt, Human
guauagaaaugcugg

SEQ ID NO: 1813058 - RNA, 15 nt, Human
guaugaggcauuugu

SEQ ID NO: 1813059 - RNA, 13 nt, Human
guaugaggcauuu

SEQ ID NO: 1813060 - RNA, 18 nt, Human
guaugaauaaagacaccu

SEQ ID NO: 1813061 - RNA, 19 nt, Human
guaugaauaaagacaccua

SEQ ID NO: 1813062 - RNA, 12 nt, Human
guaucugagcag

SEQ ID NO: 1813063 - RNA, 12 nt, Human
guaucuggugac

SEQ ID NO: 1813064 - RNA, 19 nt, Human
guaucuggugacuuuccuc

SEQ ID NO: 1813065 - RNA, 22 nt, Human
guaugaaagauggcugugccuc

SEQ ID NO: 1813066 - RNA, 23 nt, Human
guaugaaagauggcugugccucu

SEQ ID NO: 1813067 - RNA, 20 nt, Human
guaugaucacggcucacugc

SEQ ID NO: 1813068 - RNA, 24 nt, Human
guaugauagguuauuuugauguaa

SEQ ID NO: 1813069 - RNA, 20 nt, Human
guaugaggcauuuguuugaa

SEQ ID NO: 1813070 - RNA, 17 nt, Human
guaugaggcauuuguuu

SEQ ID NO: 1813071 - RNA, 21 nt, Human
guaugaucacggcucacugca

SEQ ID NO: 1813072 - RNA, 17 nt, Human
guauguugaagccuuug

SEQ ID NO: 1813073 - RNA, 17 nt, Human
guagggugggccuucag

SEQ ID NO: 1813074 - RNA, 22 nt, Human
guagggugggccuucagggagu

SEQ ID NO: 1813075 - RNA, 16 nt, Human
guaggguuauaauaau

SEQ ID NO: 1813076 - RNA, 14 nt, Human
guagggugggccuu

SEQ ID NO: 1813077 - RNA, 22 nt, Human
guaguaugauagguuauuuuga

SEQ ID NO: 1813078 - RNA, 14 nt, Human
guagucaggugccu

SEQ ID NO: 1813079 - RNA, 17 nt, Human
guauaauucacauugua

SEQ ID NO: 1813080 - RNA, 15 nt, Human
guagagugugccuga

SEQ ID NO: 1813081 - RNA, 16 nt, Human
guagggcgggaggaug

SEQ ID NO: 1813082 - RNA, 22 nt, Human
guagggcgggaggauguucugg

SEQ ID NO: 1813083 - RNA, 21 nt, Human
guagggcgggaggauguucug

SEQ ID NO: 1813084 - RNA, 23 nt, Human
guagggcgggaggauguucuggg

SEQ ID NO: 1813085 - RNA, 17 nt, Human
uuaccacagacauacua

SEQ ID NO: 1813086 - RNA, 14 nt, Human
uuaccacagacaua

SEQ ID NO: 1813087 - RNA, 12 nt, Human
uuuccugcccug

SEQ ID NO: 1813088 - RNA, 13 nt, Human
uuuccugcccugg

SEQ ID NO: 1813089 - RNA, 16 nt, Human
uuuccugaggcugggc

SEQ ID NO: 1813090 - RNA, 23 nt, Human
uuucuacucgaguuacagacaaa

SEQ ID NO: 1813091 - RNA, 12 nt, Human
uuucuaaaguaa

SEQ ID NO: 1813092 - RNA, 14 nt, Human
uuucuaaaguaaaa

SEQ ID NO: 1813093 - RNA, 21 nt, Human
uuucuaaaggcuaccuuugua

SEQ ID NO: 1813094 - RNA, 20 nt, Human
uuucuaaaggcuaccuuugu

SEQ ID NO: 1813095 - RNA, 20 nt, Human
uuucuguucuuucuggcuau

SEQ ID NO: 1813096 - RNA, 18 nt, Human
uuugaaucaucaagucuu

SEQ ID NO: 1813097 - RNA, 22 nt, Human
uuugaagaugccgcauuuggau

SEQ ID NO: 1813098 - RNA, 19 nt, Human
uuugaacugauaaagauga

SEQ ID NO: 1813099 - RNA, 17 nt, Human
uuugaacugauaaagau

SEQ ID NO: 1813100 - RNA, 15 nt, Human
uuugaacugauaaag

SEQ ID NO: 1813101 - RNA, 14 nt, Human
uuugaacucuucaa

SEQ ID NO: 1813102 - RNA, 11 nt, Human
uuucuuccucu

SEQ ID NO: 1813103 - RNA, 13 nt, Human
uuucuuccucugc

SEQ ID NO: 1813104 - RNA, 13 nt, Human
uuucuucucccuc

SEQ ID NO: 1813105 - RNA, 14 nt, Human
uuucuuccucugcu

SEQ ID NO: 1813106 - RNA, 16 nt, Human
uuucuuccucugcuga

SEQ ID NO: 1813107 - RNA, 12 nt, Human
uuucuucucccu

SEQ ID NO: 1813108 - RNA, 23 nt, Human
uuucuuagggaaggauacaaaag

SEQ ID NO: 1813109 - RNA, 18 nt, Human
uuucuuagggaaggauac

SEQ ID NO: 1813110 - RNA, 20 nt, Human
uuuggagucagacagaugug

SEQ ID NO: 1813111 - RNA, 21 nt, Human
uuuggaauuuugugcccccau

SEQ ID NO: 1813112 - RNA, 22 nt, Human
uuuggugaacauugcaauagaa

SEQ ID NO: 1813113 - RNA, 23 nt, Human
uuuggugaacauugcaauagaaa

SEQ ID NO: 1813114 - RNA, 15 nt, Human
uuugcaucugaaaau

SEQ ID NO: 1813115 - RNA, 16 nt, Human
uuugcuuugugauuuu

SEQ ID NO: 1813116 - RNA, 15 nt, Human
uuugcuuugugauuu

SEQ ID NO: 1813117 - RNA, 14 nt, Human
uuuggaauuuugug

SEQ ID NO: 1813118 - RNA, 21 nt, Human
uuuguucuggcucuuccaggc

SEQ ID NO: 1813119 - RNA, 15 nt, Human
uuuuaaagaaaaguu

SEQ ID NO: 1813120 - RNA, 18 nt, Human
uuuuaaagacuuuuauga

SEQ ID NO: 1813121 - RNA, 14 nt, Human
uuuuaaagaaaagu

SEQ ID NO: 1813122 - RNA, 17 nt, Human
uuuuaaagaaugcucuu

SEQ ID NO: 1813123 - RNA, 21 nt, Human
uuuuaaucucuaacaguggac

SEQ ID NO: 1813124 - RNA, 21 nt, Human
uuuuaaaugcaccuggaauau

SEQ ID NO: 1813125 - RNA, 12 nt, Human
uuuuaaaugcac

SEQ ID NO: 1813126 - RNA, 11 nt, Human
uuuuaaaugca

SEQ ID NO: 1813127 - RNA, 11 nt, Human
uuuuuccuuca

SEQ ID NO: 1813128 - RNA, 20 nt, Human
uuuuuaagugaaaauauagc

SEQ ID NO: 1813129 - RNA, 13 nt, Human
uuuuuaagugaaa

SEQ ID NO: 1813130 - RNA, 11 nt, Human
uuuuuaaaugc

SEQ ID NO: 1813131 - RNA, 11 nt, Human
uuuuuccuuuu

SEQ ID NO: 1813132 - RNA, 19 nt, Human
uuuuuccuucagugccuua

SEQ ID NO: 1813133 - RNA, 13 nt, Human
uuuuuuguuucau

SEQ ID NO: 1813134 - RNA, 12 nt, Human
uuuuuuguuuca

SEQ ID NO: 1813135 - RNA, 20 nt, Human
uuuugacaaggggcaguggu

SEQ ID NO: 1813136 - RNA, 15 nt, Human
uuuuggucuguguga

SEQ ID NO: 1813137 - RNA, 14 nt, Human
uuuuggcugcugaa

SEQ ID NO: 1813138 - RNA, 18 nt, Human
uuuucuaaaguaaaaaca

SEQ ID NO: 1813139 - RNA, 19 nt, Human
uuuuguagagccagggucu

SEQ ID NO: 1813140 - RNA, 19 nt, Human
uuuuguaauaauaaagaau

SEQ ID NO: 1813141 - RNA, 17 nt, Human
uuuuguaauaauaaaga

SEQ ID NO: 1813142 - RNA, 16 nt, Human
uuuugucauauaagau

SEQ ID NO: 1813143 - RNA, 13 nt, Human
uuuugucuugugu

SEQ ID NO: 1813144 - RNA, 17 nt, Human
uuuuuaaagacagaguc

SEQ ID NO: 1813145 - RNA, 20 nt, Human
uuuuuaaagaaaaguuuugu

SEQ ID NO: 1813146 - RNA, 12 nt, Human
uuuuuaaagaaa

SEQ ID NO: 1813147 - RNA, 12 nt, Human
uuuuuaaagacu

SEQ ID NO: 1813148 - RNA, 13 nt, Human
uuuuuaaagacuu

SEQ ID NO: 1813149 - RNA, 18 nt, Human
uuuuuaaagacuuuuaug

SEQ ID NO: 1813150 - RNA, 15 nt, Human
gccaggcuggucuca

SEQ ID NO: 1813151 - RNA, 23 nt, Human
gccaguaaaugggggugcauuug

SEQ ID NO: 1813152 - RNA, 13 nt, Human
gccaggcuggucu

SEQ ID NO: 1813153 - RNA, 23 nt, Human
gccaggcugggucgcccuggacu

SEQ ID NO: 1813154 - RNA, 17 nt, Human
gccaggcugggucgccc

SEQ ID NO: 1813155 - RNA, 14 nt, Human
gccauccagguuca

SEQ ID NO: 1813156 - RNA, 14 nt, Human
gccaugcuccuggc

SEQ ID NO: 1813157 - RNA, 16 nt, Human
gccaugggccuccugu

SEQ ID NO: 1813158 - RNA, 15 nt, Human
gccaugggccuccug

SEQ ID NO: 1813159 - RNA, 24 nt, Human
gccaugcuccuggcccacugcauc

SEQ ID NO: 1813160 - RNA, 21 nt, Human
gcccaagaauagaugcugacu

SEQ ID NO: 1813161 - RNA, 22 nt, Human
gcccaagaauagaugcugacug

SEQ ID NO: 1813162 - RNA, 24 nt, Human
gcccaaccugcucuccucuugcca

SEQ ID NO: 1813163 - RNA, 20 nt, Human
gcccacauagugaugguucc

SEQ ID NO: 1813164 - RNA, 17 nt, Human
gcccaccuuggcucaag

SEQ ID NO: 1813165 - RNA, 16 nt, Human
gcccaccuuggcucaa

SEQ ID NO: 1813166 - RNA, 15 nt, Human
gcccaccuuggcuca

SEQ ID NO: 1813167 - RNA, 13 nt, Human
gcccaccuuggcu

SEQ ID NO: 1813168 - RNA, 14 nt, Human
gcccacuucugcca

SEQ ID NO: 1813169 - RNA, 15 nt, Human
gcccaccuggccucu

SEQ ID NO: 1813170 - RNA, 16 nt, Human
gcccaccuggccucug

SEQ ID NO: 1813171 - RNA, 17 nt, Human
gcccaccuggccucugc

SEQ ID NO: 1813172 - RNA, 20 nt, Human
gcccaccuggccucugcacu

SEQ ID NO: 1813173 - RNA, 21 nt, Human
gcccaccuggccucugcacuc

SEQ ID NO: 1813174 - RNA, 24 nt, Human
gcccaccuggccucugcacucccc

SEQ ID NO: 1813175 - RNA, 22 nt, Human
gccacugcaccgggccacagag

SEQ ID NO: 1813176 - RNA, 21 nt, Human
gccagagacacaagccuucgg

SEQ ID NO: 1813177 - RNA, 22 nt, Human
gccagagacacaagccuucggc

SEQ ID NO: 1813178 - RNA, 21 nt, Human
gccacugcaccgggccacaga

SEQ ID NO: 1813179 - RNA, 20 nt, Human
gccacugcaccgggccacag

SEQ ID NO: 1813180 - RNA, 22 nt, Human
gccacuccagaccccuggcuuu

SEQ ID NO: 1813181 - RNA, 20 nt, Human
gccaaggccaaaggaagcac

SEQ ID NO: 1813182 - RNA, 21 nt, Human
gccacuccagaccccuggcuu

SEQ ID NO: 1813183 - RNA, 20 nt, Human
gccacuccagaccccuggcu

SEQ ID NO: 1813184 - RNA, 24 nt, Human
gccaaggccaaaggaagcacaugc

SEQ ID NO: 1813185 - RNA, 15 nt, Human
gccagaugcaccagc

SEQ ID NO: 1813186 - RNA, 20 nt, Human
gccagauucuuuccugaggc

SEQ ID NO: 1813187 - RNA, 24 nt, Human
gccagauucuuuccugaggcuggg

SEQ ID NO: 1813188 - RNA, 13 nt, Human
gccagauuucacu

SEQ ID NO: 1813189 - RNA, 22 nt, Human
gccagccgagauagccaaggcc

SEQ ID NO: 1813190 - RNA, 17 nt, Human
gccagagggagugacag

SEQ ID NO: 1813191 - RNA, 14 nt, Human
gccagaugcaccag

SEQ ID NO: 1813192 - RNA, 17 nt, Human
gccagcugcuugggcuu

SEQ ID NO: 1813193 - RNA, 18 nt, Human
gccagcugcuugggcuuc

SEQ ID NO: 1813194 - RNA, 20 nt, Human
gccagcugcuugggcuucau

SEQ ID NO: 1813195 - RNA, 12 nt, Human
gccaggaagcca

SEQ ID NO: 1813196 - RNA, 13 nt, Human
gccaggaagccag

SEQ ID NO: 1813197 - RNA, 14 nt, Human
gccaggaagccagc

SEQ ID NO: 1813198 - RNA, 13 nt, Human
gccagcuggagaa

SEQ ID NO: 1813199 - RNA, 15 nt, Human
gccaggaagccagca

SEQ ID NO: 1813200 - RNA, 19 nt, Human
gccaggagccuccugcccu

SEQ ID NO: 1813201 - RNA, 20 nt, Human
gccaggagccuccugcccuu

SEQ ID NO: 1813202 - RNA, 14 nt, Human
gccaggagccuccu

SEQ ID NO: 1813203 - RNA, 16 nt, Human
gccaggagccuccugc

SEQ ID NO: 1813204 - RNA, 12 nt, Human
gcccaggcuggc

SEQ ID NO: 1813205 - RNA, 23 nt, Human
gcccaggccccugccacccuggg

SEQ ID NO: 1813206 - RNA, 21 nt, Human
gcccagagaggguggugaccu

SEQ ID NO: 1813207 - RNA, 15 nt, Human
gcccaggcuggagug

SEQ ID NO: 1813208 - RNA, 20 nt, Human
gcccaggcuggagugcaaug

SEQ ID NO: 1813209 - RNA, 13 nt, Human
gcccaggccuccu

SEQ ID NO: 1813210 - RNA, 12 nt, Human
gccccagugccc

SEQ ID NO: 1813211 - RNA, 18 nt, Human
gccccaucccaaacccuu

SEQ ID NO: 1813212 - RNA, 19 nt, Human
gccccaguuguauuuauuu

SEQ ID NO: 1813213 - RNA, 21 nt, Human
gccccauaauuuuuuuuuucc

SEQ ID NO: 1813214 - RNA, 14 nt, Human
gccccagugcccac

SEQ ID NO: 1813215 - RNA, 13 nt, Human
gccccagugccca

SEQ ID NO: 1813216 - RNA, 15 nt, Human
gccccagugcccaca

SEQ ID NO: 1813217 - RNA, 14 nt, Human
gccccauucugccu

SEQ ID NO: 1813218 - RNA, 15 nt, Human
gccccauucugccug

SEQ ID NO: 1813219 - RNA, 13 nt, Human
gccccauccucug

SEQ ID NO: 1813220 - RNA, 14 nt, Human
gccccauccucugu

SEQ ID NO: 1813221 - RNA, 22 nt, Human
gccccauccucuguacagagcc

SEQ ID NO: 1813222 - RNA, 19 nt, Human
gcccuccaagaccuucucc

SEQ ID NO: 1813223 - RNA, 21 nt, Human
gcccuccaagaccuucuccuu

SEQ ID NO: 1813224 - RNA, 20 nt, Human
gcccuccaucuaaacugccc

SEQ ID NO: 1813225 - RNA, 21 nt, Human
gcccuccaucuaaacugcccc

SEQ ID NO: 1813226 - RNA, 22 nt, Human
gcccuccaagaccuucuccuuc

SEQ ID NO: 1813227 - RNA, 23 nt, Human
gcccuccaagaccuucuccuuca

SEQ ID NO: 1813228 - RNA, 21 nt, Human
gcccucccugccccucccuuc

SEQ ID NO: 1813229 - RNA, 13 nt, Human
gcccucugcccac

SEQ ID NO: 1813230 - RNA, 16 nt, Human
gcccucugcccacucc

SEQ ID NO: 1813231 - RNA, 18 nt, Human
gcccucugcccacucccu

SEQ ID NO: 1813232 - RNA, 19 nt, Human
gcccucugcccacucccug

SEQ ID NO: 1813233 - RNA, 14 nt, Human
gcccugagcuuucu

SEQ ID NO: 1813234 - RNA, 16 nt, Human
gcccugcagagggcac

SEQ ID NO: 1813235 - RNA, 15 nt, Human
gcccugcagagggca

SEQ ID NO: 1813236 - RNA, 13 nt, Human
gcccugcagaggg

SEQ ID NO: 1813237 - RNA, 14 nt, Human
gcccugcagagggc

SEQ ID NO: 1813238 - RNA, 22 nt, Human
gccccgaggccuucucugaagg

SEQ ID NO: 1813239 - RNA, 18 nt, Human
gccccgaggccuucucug

SEQ ID NO: 1813240 - RNA, 14 nt, Human
gccccucagggucc

SEQ ID NO: 1813241 - RNA, 15 nt, Human
gccccgaggccuucu

SEQ ID NO: 1813242 - RNA, 16 nt, Human
gccccucagggucccu

SEQ ID NO: 1813243 - RNA, 18 nt, Human
gccccucagggucccugg

SEQ ID NO: 1813244 - RNA, 12 nt, Human
gcccgacagccu

SEQ ID NO: 1813245 - RNA, 14 nt, Human
gcccgacagccugg

SEQ ID NO: 1813246 - RNA, 15 nt, Human
gcccgacagccuggc

SEQ ID NO: 1813247 - RNA, 17 nt, Human
gccccuguucuggcaga

SEQ ID NO: 1813248 - RNA, 21 nt, Human
gccuuccaggggugggacacc

SEQ ID NO: 1813249 - RNA, 15 nt, Human
gccuuccaggggugg

SEQ ID NO: 1813250 - RNA, 16 nt, Human
gccuuccagggguggg

SEQ ID NO: 1813251 - RNA, 23 nt, Human
gccuucgauacaccgggccugga

SEQ ID NO: 1813252 - RNA, 18 nt, Human
gccuucgauacaccgggc

SEQ ID NO: 1813253 - RNA, 22 nt, Human
gccuucgauacaccgggccugg

SEQ ID NO: 1813254 - RNA, 13 nt, Human
gccuucagggagu

SEQ ID NO: 1813255 - RNA, 21 nt, Human
gccuucagggagugagggauu

SEQ ID NO: 1813256 - RNA, 13 nt, Human
gccuucaucuccc

SEQ ID NO: 1813257 - RNA, 12 nt, Human
gccuuccagggg

SEQ ID NO: 1813258 - RNA, 16 nt, Human
gccuuauggaacacuc

SEQ ID NO: 1813259 - RNA, 18 nt, Human
gccuuauggaacacucug

SEQ ID NO: 1813260 - RNA, 19 nt, Human
gccuuauggaacacucuga

SEQ ID NO: 1813261 - RNA, 20 nt, Human
gccuuauggaacacucugag

SEQ ID NO: 1813262 - RNA, 22 nt, Human
gccuuuggaaacagcucgacuu

SEQ ID NO: 1813263 - RNA, 23 nt, Human
gcgacaaugcaaaccaucauuga

SEQ ID NO: 1813264 - RNA, 13 nt, Human
gccuuuggcuuca

SEQ ID NO: 1813265 - RNA, 22 nt, Human
gccugggggcugggcagaggaa

SEQ ID NO: 1813266 - RNA, 21 nt, Human
gccugguggcagcugcggucc

SEQ ID NO: 1813267 - RNA, 19 nt, Human
gccugguggcagcugcggu

SEQ ID NO: 1813268 - RNA, 18 nt, Human
gccugguggcagcugcgg

SEQ ID NO: 1813269 - RNA, 14 nt, Human
gccugguggcagcu

SEQ ID NO: 1813270 - RNA, 13 nt, Human
gccugguggcagc

SEQ ID NO: 1813271 - RNA, 10 nt, Human
gccuuaugga

SEQ ID NO: 1813272 - RNA, 14 nt, Human
gccuuauggaacac

SEQ ID NO: 1813273 - RNA, 18 nt, Human
gccuuagaagucacacag

SEQ ID NO: 1813274 - RNA, 17 nt, Human
gccuuagaagucacaca

SEQ ID NO: 1813275 - RNA, 19 nt, Human
gccuuagaagucacacagu

SEQ ID NO: 1813276 - RNA, 12 nt, Human
gccuguuuaaga

SEQ ID NO: 1813277 - RNA, 13 nt, Human
gccuguuuaagag

SEQ ID NO: 1813278 - RNA, 18 nt, Human
gccuuacccucauguucu

SEQ ID NO: 1813279 - RNA, 21 nt, Human
gccuuacacaaugguuuucuu

SEQ ID NO: 1813280 - RNA, 20 nt, Human
gccuuacacaaugguuuucu

SEQ ID NO: 1813281 - RNA, 13 nt, Human
gcuaagagggagg

SEQ ID NO: 1813282 - RNA, 21 nt, Human
gcuaagagggagggagggcuc

SEQ ID NO: 1813283 - RNA, 20 nt, Human
gcuaagagggagggagggcu

SEQ ID NO: 1813284 - RNA, 20 nt, Human
gcuacacacugcauguuugu

SEQ ID NO: 1813285 - RNA, 13 nt, Human
gcuacacacugca

SEQ ID NO: 1813286 - RNA, 14 nt, Human
gcuacacaggggaa

SEQ ID NO: 1813287 - RNA, 19 nt, Human
gcuaggaaauccagggugg

SEQ ID NO: 1813288 - RNA, 15 nt, Human
gcuaggaacacuccu

SEQ ID NO: 1813289 - RNA, 22 nt, Human
gcuaggaaauccaggguggugg

SEQ ID NO: 1813290 - RNA, 16 nt, Human
gcuaggaacacuccuu

SEQ ID NO: 1813291 - RNA, 20 nt, Human
gcuaccuuuguauucucucc

SEQ ID NO: 1813292 - RNA, 16 nt, Human
gcuaccuuuguauucu

SEQ ID NO: 1813293 - RNA, 19 nt, Human
gcuagaacucccuuucaac

SEQ ID NO: 1813294 - RNA, 12 nt, Human
gcgacagugaga

SEQ ID NO: 1813295 - RNA, 22 nt, Human
gcgacagugagacucugucuca

SEQ ID NO: 1813296 - RNA, 15 nt, Human
gcgccuacaggagug

SEQ ID NO: 1813297 - RNA, 18 nt, Human
gcgccuacaggagugagc

SEQ ID NO: 1813298 - RNA, 13 nt, Human
gcggacagccacg

SEQ ID NO: 1813299 - RNA, 11 nt, Human
gcggacagcca

SEQ ID NO: 1813300 - RNA, 19 nt, Human
gcgucucauacucaccuca

SEQ ID NO: 1813301 - RNA, 19 nt, Human
gcgggucacaggagggagg

SEQ ID NO: 1813302 - RNA, 20 nt, Human
gcgggucacaggagggaggg

SEQ ID NO: 1813303 - RNA, 15 nt, Human
gcggacagccacggc

SEQ ID NO: 1813304 - RNA, 13 nt, Human
gcgggucacagga

SEQ ID NO: 1813305 - RNA, 15 nt, Human
gcgggucacaggagg

SEQ ID NO: 1813306 - RNA, 14 nt, Human
gcccuucucuccag

SEQ ID NO: 1813307 - RNA, 16 nt, Human
gcccuucucuccagcc

SEQ ID NO: 1813308 - RNA, 17 nt, Human
gcccuucucuccagccc

SEQ ID NO: 1813309 - RNA, 18 nt, Human
gcccuucucuccagcccc

SEQ ID NO: 1813310 - RNA, 16 nt, Human
gcccugcuuugggcug

SEQ ID NO: 1813311 - RNA, 18 nt, Human
gcccugcuuugggcugcc

SEQ ID NO: 1813312 - RNA, 20 nt, Human
gccgggcgugguggugagug

SEQ ID NO: 1813313 - RNA, 21 nt, Human
gccgggcgcgguggcucacgc

SEQ ID NO: 1813314 - RNA, 19 nt, Human
gccgggaccccgagccugg

SEQ ID NO: 1813315 - RNA, 23 nt, Human
gccgggaccccgagccuggcucc

SEQ ID NO: 1813316 - RNA, 18 nt, Human
gccgggaccccgagccug

SEQ ID NO: 1813317 - RNA, 21 nt, Human
gccgagaucacgccacugcac

SEQ ID NO: 1813318 - RNA, 20 nt, Human
gccgagaucacgccacugca

SEQ ID NO: 1813319 - RNA, 22 nt, Human
gccgagaucacgccacugcacu

SEQ ID NO: 1813320 - RNA, 11 nt, Human
gccgcagcccu

SEQ ID NO: 1813321 - RNA, 12 nt, Human
gccgcagcccug

SEQ ID NO: 1813322 - RNA, 13 nt, Human
gccgcagcccugc

SEQ ID NO: 1813323 - RNA, 13 nt, Human
gccucacaguccu

SEQ ID NO: 1813324 - RNA, 17 nt, Human
gccucacaguccuuacc

SEQ ID NO: 1813325 - RNA, 19 nt, Human
gccucaaccuccugggcua

SEQ ID NO: 1813326 - RNA, 18 nt, Human
gccucaaccuccugggcu

SEQ ID NO: 1813327 - RNA, 22 nt, Human
gccuaugugcaugcagcaucua

SEQ ID NO: 1813328 - RNA, 19 nt, Human
gccguggcuucccgcucag

SEQ ID NO: 1813329 - RNA, 14 nt, Human
gccgugccuucagc

SEQ ID NO: 1813330 - RNA, 15 nt, Human
gccgugccuucagcu

SEQ ID NO: 1813331 - RNA, 17 nt, Human
gccgugccuucagcucu

SEQ ID NO: 1813332 - RNA, 19 nt, Human
gccgugccuucagcucuac

SEQ ID NO: 1813333 - RNA, 21 nt, Human
gccguggcuucccgcucagcc

SEQ ID NO: 1813334 - RNA, 22 nt, Human
gccguggcuucccgcucagccc

SEQ ID NO: 1813335 - RNA, 20 nt, Human
gccguguaaccauggaccca

SEQ ID NO: 1813336 - RNA, 15 nt, Human
gccgucuaccugagg

SEQ ID NO: 1813337 - RNA, 16 nt, Human
gccgucuaccugaggg

SEQ ID NO: 1813338 - RNA, 17 nt, Human
gccgucuaccugagggg

SEQ ID NO: 1813339 - RNA, 19 nt, Human
gccucccgaguagcuggga

SEQ ID NO: 1813340 - RNA, 18 nt, Human
gccucccgaguagcuggg

SEQ ID NO: 1813341 - RNA, 20 nt, Human
gccucccgaguagcugggac

SEQ ID NO: 1813342 - RNA, 17 nt, Human
gccucccaucacccgcu

SEQ ID NO: 1813343 - RNA, 14 nt, Human
gccucccaucaccc

SEQ ID NO: 1813344 - RNA, 16 nt, Human
gccucccaucacccgc

SEQ ID NO: 1813345 - RNA, 16 nt, Human
gccucccaacucaccc

SEQ ID NO: 1813346 - RNA, 17 nt, Human
gccucccaacucacccc

SEQ ID NO: 1813347 - RNA, 18 nt, Human
gccucccaacucacccca

SEQ ID NO: 1813348 - RNA, 19 nt, Human
gccucccaacucaccccag

SEQ ID NO: 1813349 - RNA, 19 nt, Human
gccucccaaagugcuggga

SEQ ID NO: 1813350 - RNA, 13 nt, Human
gccucccaacuca

SEQ ID NO: 1813351 - RNA, 18 nt, Human
gccucccaaagugcuggg

SEQ ID NO: 1813352 - RNA, 17 nt, Human
gccucagcauccuggca

SEQ ID NO: 1813353 - RNA, 16 nt, Human
gccucagcauccuggc

SEQ ID NO: 1813354 - RNA, 15 nt, Human
gccucagcauccugg

SEQ ID NO: 1813355 - RNA, 21 nt, Human
gccucacaguccuuaccagca

SEQ ID NO: 1813356 - RNA, 18 nt, Human
gccucacaguccuuacca

SEQ ID NO: 1813357 - RNA, 13 nt, Human
gccugcaagggag

SEQ ID NO: 1813358 - RNA, 15 nt, Human
gccugcaagggagug

SEQ ID NO: 1813359 - RNA, 13 nt, Human
gccucugccucug

SEQ ID NO: 1813360 - RNA, 12 nt, Human
gccucugccucu

SEQ ID NO: 1813361 - RNA, 15 nt, Human
gccucugcacucccc

SEQ ID NO: 1813362 - RNA, 18 nt, Human
gccucugccucugacaca

SEQ ID NO: 1813363 - RNA, 21 nt, Human
gccucugacacacagcucugu

SEQ ID NO: 1813364 - RNA, 20 nt, Human
gccucugacacacagcucug

SEQ ID NO: 1813365 - RNA, 19 nt, Human
gccucugacacacagcucu

SEQ ID NO: 1813366 - RNA, 14 nt, Human
gccucugcacuccc

SEQ ID NO: 1813367 - RNA, 18 nt, Human
gccucugacacacagcuc

SEQ ID NO: 1813368 - RNA, 17 nt, Human
gccucugacacacagcu

SEQ ID NO: 1813369 - RNA, 16 nt, Human
gccucucucaggccaa

SEQ ID NO: 1813370 - RNA, 13 nt, Human
gccucucucaggc

SEQ ID NO: 1813371 - RNA, 14 nt, Human
gccucucucaggcc

SEQ ID NO: 1813372 - RNA, 17 nt, Human
gcaagaauugaagcagg

SEQ ID NO: 1813373 - RNA, 23 nt, Human
gcaagacgcugugcugcccugcc

SEQ ID NO: 1813374 - RNA, 14 nt, Human
gcaagacgcugugc

SEQ ID NO: 1813375 - RNA, 20 nt, Human
gcaagacgcugugcugcccu

SEQ ID NO: 1813376 - RNA, 21 nt, Human
gcaagacgcugugcugcccug

SEQ ID NO: 1813377 - RNA, 22 nt, Human
gcaagacgcugugcugcccugc

SEQ ID NO: 1813378 - RNA, 16 nt, Human
gcaaaguaucccuacu

SEQ ID NO: 1813379 - RNA, 15 nt, Human
gauuuuugucuugug

SEQ ID NO: 1813380 - RNA, 21 nt, Human
gcaaagcccagcuugaaaccu

SEQ ID NO: 1813381 - RNA, 13 nt, Human
gcaaagcccagcu

SEQ ID NO: 1813382 - RNA, 18 nt, Human
gcaaggagauuuacaacu

SEQ ID NO: 1813383 - RNA, 13 nt, Human
gcaaggcugucaa

SEQ ID NO: 1813384 - RNA, 11 nt, Human
gcaaggcuguc

SEQ ID NO: 1813385 - RNA, 23 nt, Human
gcaaugcuggcuguuggcugggg

SEQ ID NO: 1813386 - RNA, 22 nt, Human
gcaaugcuggcuguuggcuggg

SEQ ID NO: 1813387 - RNA, 14 nt, Human
gcaaugcuggcugu

SEQ ID NO: 1813388 - RNA, 13 nt, Human
gcaaugcuggcug

SEQ ID NO: 1813389 - RNA, 23 nt, Human
gcaaugaccuuucaauaggaaaa

SEQ ID NO: 1813390 - RNA, 14 nt, Human
gcaaggucauuuuu

SEQ ID NO: 1813391 - RNA, 15 nt, Human
gcaaucaaaucugcu

SEQ ID NO: 1813392 - RNA, 17 nt, Human
gcaaucaaaucugcuuu

SEQ ID NO: 1813393 - RNA, 15 nt, Human
gcaaugaccuuucaa

SEQ ID NO: 1813394 - RNA, 17 nt, Human
gcaaugaccuuucaaua

SEQ ID NO: 1813395 - RNA, 20 nt, Human
gcaaugaccuuucaauagga

SEQ ID NO: 1813396 - RNA, 22 nt, Human
gcaaugaccuuucaauaggaaa

SEQ ID NO: 1813397 - RNA, 19 nt, Human
gauuuguuaaugauagcua

SEQ ID NO: 1813398 - RNA, 22 nt, Human
gauuugucuuuggugaacauug

SEQ ID NO: 1813399 - RNA, 20 nt, Human
gauuugucuuuggugaacau

SEQ ID NO: 1813400 - RNA, 19 nt, Human
gauuucuguuuagauaaua

SEQ ID NO: 1813401 - RNA, 11 nt, Human
gauuucuguuu

SEQ ID NO: 1813402 - RNA, 22 nt, Human
gauuuggucaacacuaacauga

SEQ ID NO: 1813403 - RNA, 18 nt, Human
gauuuccguuaaaauacc

SEQ ID NO: 1813404 - RNA, 15 nt, Human
gauuuccguuaaaau

SEQ ID NO: 1813405 - RNA, 20 nt, Human
gauugcaacaggcugggcuu

SEQ ID NO: 1813406 - RNA, 18 nt, Human
gauucuuuccugaggcug

SEQ ID NO: 1813407 - RNA, 16 nt, Human
gauucuuuccugaggc

SEQ ID NO: 1813408 - RNA, 17 nt, Human
gauucuuuccugaggcu

SEQ ID NO: 1813409 - RNA, 21 nt, Human
gauugcaacaggcugggcuuc

SEQ ID NO: 1813410 - RNA, 16 nt, Human
gauugcaccacugcac

SEQ ID NO: 1813411 - RNA, 23 nt, Human
gauugcaccacugcacuccagcc

SEQ ID NO: 1813412 - RNA, 20 nt, Human
gauucccaagcucugcuccu

SEQ ID NO: 1813413 - RNA, 19 nt, Human
gauucccaagcucugcucc

SEQ ID NO: 1813414 - RNA, 21 nt, Human
gauucccaagcucugcuccuc

SEQ ID NO: 1813415 - RNA, 12 nt, Human
gauucuuuccug

SEQ ID NO: 1813416 - RNA, 23 nt, Human
gauggggcugcaccggcuggccu

SEQ ID NO: 1813417 - RNA, 19 nt, Human
gauucagacagcugccugg

SEQ ID NO: 1813418 - RNA, 13 nt, Human
gauucagcucugc

SEQ ID NO: 1813419 - RNA, 15 nt, Human
gauucagcucugcaa

SEQ ID NO: 1813420 - RNA, 19 nt, Human
gauuccagagaguggcucc

SEQ ID NO: 1813421 - RNA, 20 nt, Human
gauuccagagaguggcuccu

SEQ ID NO: 1813422 - RNA, 22 nt, Human
gauuccagagaguggcuccucc

SEQ ID NO: 1813423 - RNA, 17 nt, Human
gauucauauuuacuucu

SEQ ID NO: 1813424 - RNA, 18 nt, Human
gauucauauuuacuucuu

SEQ ID NO: 1813425 - RNA, 19 nt, Human
gauucauauuuacuucuua

SEQ ID NO: 1813426 - RNA, 23 nt, Human
gauagauaggucagugcaaauac

SEQ ID NO: 1813427 - RNA, 19 nt, Human
gauacaccgggccuggaga

SEQ ID NO: 1813428 - RNA, 22 nt, Human
gauaauacaccacuacauucug

SEQ ID NO: 1813429 - RNA, 21 nt, Human
gauaauacaccacuacauucu

SEQ ID NO: 1813430 - RNA, 18 nt, Human
gauaauacaccacuacau

SEQ ID NO: 1813431 - RNA, 14 nt, Human
gauaauacaccacu

SEQ ID NO: 1813432 - RNA, 19 nt, Human
gauacaggaaaagcugcug

SEQ ID NO: 1813433 - RNA, 18 nt, Human
gauacaggaaaagcugcu

SEQ ID NO: 1813434 - RNA, 21 nt, Human
gauagcacagacccugcccug

SEQ ID NO: 1813435 - RNA, 22 nt, Human
gauagcacagacccugcccugu

SEQ ID NO: 1813436 - RNA, 21 nt, Human
gauaaauaacuuuuuuuuaag

SEQ ID NO: 1813437 - RNA, 16 nt, Human
gauaaauaacuuuuuu

SEQ ID NO: 1813438 - RNA, 22 nt, Human
gauaaauaguuuaugauuccac

SEQ ID NO: 1813439 - RNA, 21 nt, Human
gauaaauauugagcagaucua

SEQ ID NO: 1813440 - RNA, 19 nt, Human
gauaaaguugguaaaccuu

SEQ ID NO: 1813441 - RNA, 13 nt, Human
gaggaaggaaacc

SEQ ID NO: 1813442 - RNA, 19 nt, Human
gaggaaggaaacccagcuc

SEQ ID NO: 1813443 - RNA, 20 nt, Human
gaggaaggaaacccagcucu

SEQ ID NO: 1813444 - RNA, 21 nt, Human
gaggaaggaaacccagcucug

SEQ ID NO: 1813445 - RNA, 18 nt, Human
gaucacgccacugcacua

SEQ ID NO: 1813446 - RNA, 16 nt, Human
gaucacgccacugcac

SEQ ID NO: 1813447 - RNA, 22 nt, Human
gaucagucugauucccaagcuc

SEQ ID NO: 1813448 - RNA, 12 nt, Human
gaucagccuggg

SEQ ID NO: 1813449 - RNA, 15 nt, Human
gaucagccugggcaa

SEQ ID NO: 1813450 - RNA, 12 nt, Human
gaucacggcuca

SEQ ID NO: 1813451 - RNA, 21 nt, Human
gaucauccacugugccaugug

SEQ ID NO: 1813452 - RNA, 19 nt, Human
gaucauccacugugccaug

SEQ ID NO: 1813453 - RNA, 17 nt, Human
gaucauccacugugcca

SEQ ID NO: 1813454 - RNA, 14 nt, Human
gaucauugugaaau

SEQ ID NO: 1813455 - RNA, 20 nt, Human
gaucauugugaaauuauuca

SEQ ID NO: 1813456 - RNA, 20 nt, Human
gauccccaagccuggcaagg

SEQ ID NO: 1813457 - RNA, 13 nt, Human
gaugcaccagccc

SEQ ID NO: 1813458 - RNA, 22 nt, Human
gaugcacagaguuguuacauuu

SEQ ID NO: 1813459 - RNA, 21 nt, Human
gaugcacagaguuguuacauu

SEQ ID NO: 1813460 - RNA, 19 nt, Human
gaugcagccucacaguccu

SEQ ID NO: 1813461 - RNA, 14 nt, Human
gaugcagccucaca

SEQ ID NO: 1813462 - RNA, 12 nt, Human
gaugcagccuca

SEQ ID NO: 1813463 - RNA, 19 nt, Human
gaugccugguggcagcugc

SEQ ID NO: 1813464 - RNA, 18 nt, Human
gaugccugguggcagcug

SEQ ID NO: 1813465 - RNA, 20 nt, Human
gaugccugguggcagcugcg

SEQ ID NO: 1813466 - RNA, 22 nt, Human
gauggauuuccagccaaagccu

SEQ ID NO: 1813467 - RNA, 20 nt, Human
gauggcugugccucugccug

SEQ ID NO: 1813468 - RNA, 13 nt, Human
gauggggcccugc

SEQ ID NO: 1813469 - RNA, 14 nt, Human
gauggggcccugcc

SEQ ID NO: 1813470 - RNA, 22 nt, Human
gauggggcccugccuccuuugu

SEQ ID NO: 1813471 - RNA, 13 nt, Human
gauggcugugccu

SEQ ID NO: 1813472 - RNA, 17 nt, Human
gauggcugugccucugc

SEQ ID NO: 1813473 - RNA, 18 nt, Human
gauggcugugccucugcc

SEQ ID NO: 1813474 - RNA, 19 nt, Human
gauggcugugccucugccu

SEQ ID NO: 1813475 - RNA, 21 nt, Human
gauggcuaguaucaaaagaaa

SEQ ID NO: 1813476 - RNA, 14 nt, Human
gauccccagcuguu

SEQ ID NO: 1813477 - RNA, 15 nt, Human
gaucccucauccuca

SEQ ID NO: 1813478 - RNA, 16 nt, Human
gaucccucauccucau

SEQ ID NO: 1813479 - RNA, 21 nt, Human
gauccugagccagauuucacu

SEQ ID NO: 1813480 - RNA, 22 nt, Human
gauccugagccagauuucacuc

SEQ ID NO: 1813481 - RNA, 18 nt, Human
gaucuuugcagacaggca

SEQ ID NO: 1813482 - RNA, 21 nt, Human
gaucuuuggacagaagcagcu

SEQ ID NO: 1813483 - RNA, 13 nt, Human
gaucuuuggacag

SEQ ID NO: 1813484 - RNA, 17 nt, Human
gcauuaucuagauacug

SEQ ID NO: 1813485 - RNA, 13 nt, Human
gcauuugcugaau

SEQ ID NO: 1813486 - RNA, 16 nt, Human
gcauuuguuugaacug

SEQ ID NO: 1813487 - RNA, 14 nt, Human
gcauuugcugaaua

SEQ ID NO: 1813488 - RNA, 17 nt, Human
gcauuugcugaauacag

SEQ ID NO: 1813489 - RNA, 12 nt, Human
gccaaaggaagc

SEQ ID NO: 1813490 - RNA, 22 nt, Human
gccaaagcuaggccuggccaga

SEQ ID NO: 1813491 - RNA, 16 nt, Human
gccaaagcuaggccug

SEQ ID NO: 1813492 - RNA, 20 nt, Human
gccaaagccaaagcuaggcc

SEQ ID NO: 1813493 - RNA, 13 nt, Human
gccaaagccaaag

SEQ ID NO: 1813494 - RNA, 16 nt, Human
gccaaagccuccucca

SEQ ID NO: 1813495 - RNA, 19 nt, Human
gccaaagccuccuccagcc

SEQ ID NO: 1813496 - RNA, 14 nt, Human
gccaaacucaccug

SEQ ID NO: 1813497 - RNA, 16 nt, Human
gccaaacucaccugcc

SEQ ID NO: 1813498 - RNA, 22 nt, Human
gcauuuguuucuuucucugagg

SEQ ID NO: 1813499 - RNA, 18 nt, Human
gcauuuguuugaacugau

SEQ ID NO: 1813500 - RNA, 22 nt, Human
gcauguucucugaggacacuaa

SEQ ID NO: 1813501 - RNA, 21 nt, Human
gcauguucucugaggacacua

SEQ ID NO: 1813502 - RNA, 15 nt, Human
gcauguucucugagg

SEQ ID NO: 1813503 - RNA, 20 nt, Human
gcauggcaaggacugcaggg

SEQ ID NO: 1813504 - RNA, 18 nt, Human
gcaugcgggcuuccuccu

SEQ ID NO: 1813505 - RNA, 18 nt, Human
gcaugaaguaauaugcac

SEQ ID NO: 1813506 - RNA, 16 nt, Human
gcaucugaaaauugau

SEQ ID NO: 1813507 - RNA, 17 nt, Human
gcaguuauuaacacuaa

SEQ ID NO: 1813508 - RNA, 13 nt, Human
gcauagaaguaaa

SEQ ID NO: 1813509 - RNA, 15 nt, Human
gcagugggagcugcc

SEQ ID NO: 1813510 - RNA, 14 nt, Human
gcagugggagcugc

SEQ ID NO: 1813511 - RNA, 13 nt, Human
gcagugggagcug

SEQ ID NO: 1813512 - RNA, 23 nt, Human
gcaguggugguuuucuguucuuu

SEQ ID NO: 1813513 - RNA, 22 nt, Human
gcaguggugguuuucuguucuu

SEQ ID NO: 1813514 - RNA, 17 nt, Human
gcauagguuuaauaauu

SEQ ID NO: 1813515 - RNA, 21 nt, Human
gcagggcucagcggggacagc

SEQ ID NO: 1813516 - RNA, 19 nt, Human
gcagggcucagcggggaca

SEQ ID NO: 1813517 - RNA, 15 nt, Human
gcaggcagccaggcc

SEQ ID NO: 1813518 - RNA, 16 nt, Human
gcaggcagccaggcca

SEQ ID NO: 1813519 - RNA, 18 nt, Human
gcagggucucacucuguc

SEQ ID NO: 1813520 - RNA, 17 nt, Human
gcagggucucacucugu

SEQ ID NO: 1813521 - RNA, 22 nt, Human
gcagggcucagcggggacagcu

SEQ ID NO: 1813522 - RNA, 20 nt, Human
gcaggucuugaacuccuggc

SEQ ID NO: 1813523 - RNA, 19 nt, Human
gcaggucuugaacuccugg

SEQ ID NO: 1813524 - RNA, 22 nt, Human
gcagguccaggguuugaguuca

SEQ ID NO: 1813525 - RNA, 15 nt, Human
gcagugcaugcuguc

SEQ ID NO: 1813526 - RNA, 16 nt, Human
gcagugcaugcugucc

SEQ ID NO: 1813527 - RNA, 19 nt, Human
gcagacaggcaagcaccuc

SEQ ID NO: 1813528 - RNA, 18 nt, Human
gcagacaggaccagggau

SEQ ID NO: 1813529 - RNA, 23 nt, Human
gcagacaggcaagcaccuccugc

SEQ ID NO: 1813530 - RNA, 12 nt, Human
gcagacaggacc

SEQ ID NO: 1813531 - RNA, 13 nt, Human
gcagacaggacca

SEQ ID NO: 1813532 - RNA, 15 nt, Human
gcagacaggaccagg

SEQ ID NO: 1813533 - RNA, 16 nt, Human
gcacugcuuccaguga

SEQ ID NO: 1813534 - RNA, 18 nt, Human
gcacugcuuccagugagg

SEQ ID NO: 1813535 - RNA, 22 nt, Human
gcacugguggcccgacagccug

SEQ ID NO: 1813536 - RNA, 23 nt, Human
gcacugguggcccgacagccugg

SEQ ID NO: 1813537 - RNA, 24 nt, Human
gcacugguggcccgacagccuggc

SEQ ID NO: 1813538 - RNA, 12 nt, Human
gcacugcugccc

SEQ ID NO: 1813539 - RNA, 22 nt, Human
gcacugcuuccagugaggcucu

SEQ ID NO: 1813540 - RNA, 20 nt, Human
gcacugcuuccagugaggcu

SEQ ID NO: 1813541 - RNA, 15 nt, Human
gcacguauuuuaaua

SEQ ID NO: 1813542 - RNA, 14 nt, Human
gcacguauuuuaau

SEQ ID NO: 1813543 - RNA, 12 nt, Human
gcacgauuucug

SEQ ID NO: 1813544 - RNA, 19 nt, Human
gcaccuuagacagucccug

SEQ ID NO: 1813545 - RNA, 18 nt, Human
gcaccuuagacagucccu

SEQ ID NO: 1813546 - RNA, 15 nt, Human
gcacccucaggcagg

SEQ ID NO: 1813547 - RNA, 21 nt, Human
gcaccuggaauauauaaccag

SEQ ID NO: 1813548 - RNA, 18 nt, Human
gcaccuggaauauauaac

SEQ ID NO: 1813549 - RNA, 22 nt, Human
gcaccuggaauauauaaccagu

SEQ ID NO: 1813550 - RNA, 14 nt, Human
gcaccuuagacagu

SEQ ID NO: 1813551 - RNA, 17 nt, Human
gcaccuuagacaguccc

SEQ ID NO: 1813552 - RNA, 14 nt, Human
gcaauggcagccuu

SEQ ID NO: 1813553 - RNA, 20 nt, Human
gcaccacugcacuccagccu

SEQ ID NO: 1813554 - RNA, 13 nt, Human
gcaauggcagccu

SEQ ID NO: 1813555 - RNA, 12 nt, Human
gcaauggcagcc

SEQ ID NO: 1813556 - RNA, 15 nt, Human
gcaccagcagccugg

SEQ ID NO: 1813557 - RNA, 21 nt, Human
gcaccacugcacuccagccug

SEQ ID NO: 1813558 - RNA, 22 nt, Human
gcaccacugcacuccagccugg

SEQ ID NO: 1813559 - RNA, 19 nt, Human
gcacccggccccugcuggu

SEQ ID NO: 1813560 - RNA, 22 nt, Human
gcacccaccaucaugucuggcu

SEQ ID NO: 1813561 - RNA, 16 nt, Human
gcaccagcagccugga

SEQ ID NO: 1813562 - RNA, 23 nt, Human
gcaggaggaucacuugaguccag

SEQ ID NO: 1813563 - RNA, 20 nt, Human
gcaggaaggcugagaggaga

SEQ ID NO: 1813564 - RNA, 12 nt, Human
gcaggcagccag

SEQ ID NO: 1813565 - RNA, 13 nt, Human
gcaggcagccagg

SEQ ID NO: 1813566 - RNA, 14 nt, Human
gcaggcagccaggc

SEQ ID NO: 1813567 - RNA, 15 nt, Human
gcagccuuggcaaac

SEQ ID NO: 1813568 - RNA, 14 nt, Human
gcagcucaccucuc

SEQ ID NO: 1813569 - RNA, 15 nt, Human
gcagcucaccucucc

SEQ ID NO: 1813570 - RNA, 13 nt, Human
gcagcccugcuuu

SEQ ID NO: 1813571 - RNA, 14 nt, Human
gcagcccugcagag

SEQ ID NO: 1813572 - RNA, 15 nt, Human
gcagcccugcagagg

SEQ ID NO: 1813573 - RNA, 16 nt, Human
gcagcccugcagaggg

SEQ ID NO: 1813574 - RNA, 17 nt, Human
gcagcccugcagagggc

SEQ ID NO: 1813575 - RNA, 24 nt, Human
gcagccccauucugccugcccagg

SEQ ID NO: 1813576 - RNA, 21 nt, Human
gcagccccauucugccugccc

SEQ ID NO: 1813577 - RNA, 19 nt, Human
gcagccccauucugccugc

SEQ ID NO: 1813578 - RNA, 18 nt, Human
gcagccccauucugccug

SEQ ID NO: 1813579 - RNA, 17 nt, Human
gcagccccauucugccu

SEQ ID NO: 1813580 - RNA, 23 nt, Human
gcagcaauaaagcagcguuucua

SEQ ID NO: 1813581 - RNA, 16 nt, Human
gcagcaauaaagcagc

SEQ ID NO: 1813582 - RNA, 13 nt, Human
gcagcccugcaga

SEQ ID NO: 1813583 - RNA, 20 nt, Human
gcagccccuguucuggcaga

SEQ ID NO: 1813584 - RNA, 21 nt, Human
gcagccccuguucuggcagag

SEQ ID NO: 1813585 - RNA, 20 nt, Human
gcagccccgugggguuccuc

SEQ ID NO: 1813586 - RNA, 22 nt, Human
gcagauacaggaaaagcugcug

SEQ ID NO: 1813587 - RNA, 17 nt, Human
gcagacaguuaagagaa

SEQ ID NO: 1813588 - RNA, 21 nt, Human
gcagaguugaagacagagcua

SEQ ID NO: 1813589 - RNA, 18 nt, Human
gcagauaaacaguaguga

SEQ ID NO: 1813590 - RNA, 20 nt, Human
gcagaguugaagacagagcu

SEQ ID NO: 1813591 - RNA, 21 nt, Human
gaccuuucaauaggaaaaacu

SEQ ID NO: 1813592 - RNA, 23 nt, Human
gaccuugaacuggguacuugugg

SEQ ID NO: 1813593 - RNA, 19 nt, Human
gaccugccucggccuccca

SEQ ID NO: 1813594 - RNA, 18 nt, Human
gacggagucccaccuugg

SEQ ID NO: 1813595 - RNA, 14 nt, Human
gacggagucccacc

SEQ ID NO: 1813596 - RNA, 21 nt, Human
gacggagucccaccuuggcug

SEQ ID NO: 1813597 - RNA, 23 nt, Human
gacggagucccaccuuggcugca

SEQ ID NO: 1813598 - RNA, 17 nt, Human
gacgggguuucaccaug

SEQ ID NO: 1813599 - RNA, 17 nt, Human
gacguguuaugacucca

SEQ ID NO: 1813600 - RNA, 20 nt, Human
gacguguuaugacuccagaa

SEQ ID NO: 1813601 - RNA, 15 nt, Human
gacucaguggggagg

SEQ ID NO: 1813602 - RNA, 15 nt, Human
gacucagguugucug

SEQ ID NO: 1813603 - RNA, 14 nt, Human
gacuccugcaggca

SEQ ID NO: 1813604 - RNA, 15 nt, Human
gacuccugcaggcag

SEQ ID NO: 1813605 - RNA, 16 nt, Human
gacuccugcaggcagc

SEQ ID NO: 1813606 - RNA, 12 nt, Human
gacuacaggcac

SEQ ID NO: 1813607 - RNA, 17 nt, Human
gacuacucccccaggug

SEQ ID NO: 1813608 - RNA, 22 nt, Human
gacguguuaugacuccagaauu

SEQ ID NO: 1813609 - RNA, 23 nt, Human
gaccugauuucugagcauuuaau

SEQ ID NO: 1813610 - RNA, 21 nt, Human
gaccugccccuccucucugcc

SEQ ID NO: 1813611 - RNA, 15 nt, Human
gaccugccucggccu

SEQ ID NO: 1813612 - RNA, 18 nt, Human
gaccugaggcccuucucu

SEQ ID NO: 1813613 - RNA, 21 nt, Human
gaccugaggcccuucucucca

SEQ ID NO: 1813614 - RNA, 11 nt, Human
gaccucaggcc

SEQ ID NO: 1813615 - RNA, 12 nt, Human
gaccucaggccu

SEQ ID NO: 1813616 - RNA, 13 nt, Human
gaccucaggccug

SEQ ID NO: 1813617 - RNA, 15 nt, Human
gaccugaggcccuuc

SEQ ID NO: 1813618 - RNA, 14 nt, Human
gaccgugaggccag

SEQ ID NO: 1813619 - RNA, 15 nt, Human
gaccgugaggccaga

SEQ ID NO: 1813620 - RNA, 14 nt, Human
gacccaugcugccc

SEQ ID NO: 1813621 - RNA, 15 nt, Human
gacccaugcugcccu

SEQ ID NO: 1813622 - RNA, 16 nt, Human
gacccaugcugcccug

SEQ ID NO: 1813623 - RNA, 17 nt, Human
gacccaugcugcccugu

SEQ ID NO: 1813624 - RNA, 12 nt, Human
gacccacugcuu

SEQ ID NO: 1813625 - RNA, 11 nt, Human
gacccacugcu

SEQ ID NO: 1813626 - RNA, 13 nt, Human
gaccccuccaugu

SEQ ID NO: 1813627 - RNA, 23 nt, Human
gaccccucauagcccucacccug

SEQ ID NO: 1813628 - RNA, 20 nt, Human
gaccccgagccuggcuccaa

SEQ ID NO: 1813629 - RNA, 22 nt, Human
gaccccucauagcccucacccu

SEQ ID NO: 1813630 - RNA, 19 nt, Human
gacccugaggcccagaggg

SEQ ID NO: 1813631 - RNA, 20 nt, Human
gacccugaggcccagagggc

SEQ ID NO: 1813632 - RNA, 21 nt, Human
gacccugaggcccagagggcc

SEQ ID NO: 1813633 - RNA, 13 nt, Human
gacccugcccugu

SEQ ID NO: 1813634 - RNA, 15 nt, Human
gacccugcccugugg

SEQ ID NO: 1813635 - RNA, 16 nt, Human
gacccugcccuguggg

SEQ ID NO: 1813636 - RNA, 23 nt, Human
gacccugucucaaaaaaagaaaa

SEQ ID NO: 1813637 - RNA, 23 nt, Human
gacauacuaaccagcagaaaugc

SEQ ID NO: 1813638 - RNA, 14 nt, Human
gacaucaacagaua

SEQ ID NO: 1813639 - RNA, 16 nt, Human
gacauacuaaccagca

SEQ ID NO: 1813640 - RNA, 15 nt, Human
gacauacuaaccagc

SEQ ID NO: 1813641 - RNA, 21 nt, Human
gacaugucuuuucuugcauga

SEQ ID NO: 1813642 - RNA, 17 nt, Human
gacaugucuuuucuugc

SEQ ID NO: 1813643 - RNA, 16 nt, Human
gacagacacaggcccg

SEQ ID NO: 1813644 - RNA, 15 nt, Human
gacagacacaggccc

SEQ ID NO: 1813645 - RNA, 19 nt, Human
gacagaucucugcuuugga

SEQ ID NO: 1813646 - RNA, 21 nt, Human
gacagaucucugcuuuggaaa

SEQ ID NO: 1813647 - RNA, 23 nt, Human
gacagaucucugcuuuggaaauc

SEQ ID NO: 1813648 - RNA, 21 nt, Human
gacacuaaccacgcuggaccu

SEQ ID NO: 1813649 - RNA, 20 nt, Human
gacacuaaccacgcuggacc

SEQ ID NO: 1813650 - RNA, 14 nt, Human
gacagacacaggcc

SEQ ID NO: 1813651 - RNA, 13 nt, Human
gacagccacggcc

SEQ ID NO: 1813652 - RNA, 22 nt, Human
gacagccaacuauggccugugg

SEQ ID NO: 1813653 - RNA, 12 nt, Human
gacagcugccug

SEQ ID NO: 1813654 - RNA, 13 nt, Human
gacagcugccugg

SEQ ID NO: 1813655 - RNA, 12 nt, Human
gacagcaugaga

SEQ ID NO: 1813656 - RNA, 19 nt, Human
gacagccaacuauggccug

SEQ ID NO: 1813657 - RNA, 14 nt, Human
gacagcugccuggg

SEQ ID NO: 1813658 - RNA, 15 nt, Human
gacagcugccuggga

SEQ ID NO: 1813659 - RNA, 19 nt, Human
gacaggcauguucucugag

SEQ ID NO: 1813660 - RNA, 18 nt, Human
gacaggcauguucucuga

SEQ ID NO: 1813661 - RNA, 17 nt, Human
gacaggcaaugcuggcu

SEQ ID NO: 1813662 - RNA, 16 nt, Human
gacaggcaaugcuggc

SEQ ID NO: 1813663 - RNA, 14 nt, Human
gacaggcaaugcug

SEQ ID NO: 1813664 - RNA, 22 nt, Human
gacaaggauugcuacuguccua

SEQ ID NO: 1813665 - RNA, 14 nt, Human
gaagucuuuguaca

SEQ ID NO: 1813666 - RNA, 16 nt, Human
gaagucuuuguacaga

SEQ ID NO: 1813667 - RNA, 16 nt, Human
gacaaugacccagugg

SEQ ID NO: 1813668 - RNA, 17 nt, Human
gacacaggcccggcucc

SEQ ID NO: 1813669 - RNA, 15 nt, Human
gacacaggcccggcu

SEQ ID NO: 1813670 - RNA, 13 nt, Human
gacacacagcucu

SEQ ID NO: 1813671 - RNA, 19 nt, Human
gacaauuuauuauggcaca

SEQ ID NO: 1813672 - RNA, 13 nt, Human
gacaauuuauuau

SEQ ID NO: 1813673 - RNA, 12 nt, Human
gacaauuuauua

SEQ ID NO: 1813674 - RNA, 16 nt, Human
gacaaugcaaaccauc

SEQ ID NO: 1813675 - RNA, 18 nt, Human
gacaaugcaaaccaucau

SEQ ID NO: 1813676 - RNA, 21 nt, Human
gacaaugacuuacuguacaug

SEQ ID NO: 1813677 - RNA, 12 nt, Human
gacaaugcaaac

SEQ ID NO: 1813678 - RNA, 20 nt, Human
gacaaugacuuacuguacau

SEQ ID NO: 1813679 - RNA, 17 nt, Human
gacaaugacuuacugua

SEQ ID NO: 1813680 - RNA, 18 nt, Human
gacacuaaccacgcugga

SEQ ID NO: 1813681 - RNA, 17 nt, Human
gacacuaaccacgcugg

SEQ ID NO: 1813682 - RNA, 16 nt, Human
gacacuaaccacgcug

SEQ ID NO: 1813683 - RNA, 15 nt, Human
gacacuaaccacgcu

SEQ ID NO: 1813684 - RNA, 19 nt, Human
gacacgaauauugcugaug

SEQ ID NO: 1813685 - RNA, 17 nt, Human
gacacgaauauugcuga

SEQ ID NO: 1813686 - RNA, 18 nt, Human
gacacgaauauugcugau

SEQ ID NO: 1813687 - RNA, 17 nt, Human
gacaccuugacagggca

SEQ ID NO: 1813688 - RNA, 15 nt, Human
gacaccuugacaggg

SEQ ID NO: 1813689 - RNA, 20 nt, Human
gacaccuugacagggcacac

SEQ ID NO: 1813690 - RNA, 18 nt, Human
gacaccuugacagggcac

SEQ ID NO: 1813691 - RNA, 15 nt, Human
gacacgaauauugcu

SEQ ID NO: 1813692 - RNA, 18 nt, Human
gacacaggcccggcucca

SEQ ID NO: 1813693 - RNA, 17 nt, Human
gacacagugaccauacu

SEQ ID NO: 1813694 - RNA, 12 nt, Human
gacacccuguga

SEQ ID NO: 1813695 - RNA, 13 nt, Human
gacacccugugau

SEQ ID NO: 1813696 - RNA, 17 nt, Human
gacaccuacugaguggc

SEQ ID NO: 1813697 - RNA, 22 nt, Human
gacacccugugauggggcccug

SEQ ID NO: 1813698 - RNA, 23 nt, Human
gacacccugugauggggcccugc

SEQ ID NO: 1813699 - RNA, 17 nt, Human
gagauacagaauuuuau

SEQ ID NO: 1813700 - RNA, 19 nt, Human
gagagugaacaaauuuaca

SEQ ID NO: 1813701 - RNA, 15 nt, Human
gagagugaacaaauu

SEQ ID NO: 1813702 - RNA, 18 nt, Human
gagaggggaacagacugg

SEQ ID NO: 1813703 - RNA, 13 nt, Human
gagaggggaacag

SEQ ID NO: 1813704 - RNA, 21 nt, Human
gagagggugggagugggccca

SEQ ID NO: 1813705 - RNA, 13 nt, Human
gagagccuuccag

SEQ ID NO: 1813706 - RNA, 14 nt, Human
gagagccuuccagg

SEQ ID NO: 1813707 - RNA, 17 nt, Human
gagagaagagaaugcac

SEQ ID NO: 1813708 - RNA, 14 nt, Human
gagacucugucuca

SEQ ID NO: 1813709 - RNA, 22 nt, Human
gagacugucucaagagggcacu

SEQ ID NO: 1813710 - RNA, 23 nt, Human
gagacugucucaagagggcacug

SEQ ID NO: 1813711 - RNA, 13 nt, Human
gagacuuguauga

SEQ ID NO: 1813712 - RNA, 12 nt, Human
gagaccaucccu

SEQ ID NO: 1813713 - RNA, 16 nt, Human
gagacucgcgacaaug

SEQ ID NO: 1813714 - RNA, 18 nt, Human
gagacucgcgacaaugca

SEQ ID NO: 1813715 - RNA, 22 nt, Human
gagacuccugcaggcagccagg

SEQ ID NO: 1813716 - RNA, 14 nt, Human
gagacagcccgggc

SEQ ID NO: 1813717 - RNA, 17 nt, Human
gagacagcccgggcucu

SEQ ID NO: 1813718 - RNA, 18 nt, Human
gagacagcccgggcucug

SEQ ID NO: 1813719 - RNA, 19 nt, Human
gagacagcccgggcucugc

SEQ ID NO: 1813720 - RNA, 20 nt, Human
gagacagcccgggcucugcc

SEQ ID NO: 1813721 - RNA, 21 nt, Human
gagacagcccgggcucugccu

SEQ ID NO: 1813722 - RNA, 22 nt, Human
gagacagcccgggcucugccuc

SEQ ID NO: 1813723 - RNA, 23 nt, Human
gagacagcccgggcucugccucc

SEQ ID NO: 1813724 - RNA, 24 nt, Human
gagacagcccgggcucugccuccc

SEQ ID NO: 1813725 - RNA, 13 nt, Human
gagacagcucugc

SEQ ID NO: 1813726 - RNA, 18 nt, Human
gagacagcucugcauacu

SEQ ID NO: 1813727 - RNA, 15 nt, Human
gagacagcucugcau

SEQ ID NO: 1813728 - RNA, 21 nt, Human
gagaaaauggacguguuauga

SEQ ID NO: 1813729 - RNA, 16 nt, Human
gacuuggaagcuccgc

SEQ ID NO: 1813730 - RNA, 15 nt, Human
gacuuggaagcuccg

SEQ ID NO: 1813731 - RNA, 14 nt, Human
gacuuggaagcucc

SEQ ID NO: 1813732 - RNA, 19 nt, Human
gacucgcgacaaugcaaac

SEQ ID NO: 1813733 - RNA, 17 nt, Human
gacuccugcaggcagcc

SEQ ID NO: 1813734 - RNA, 18 nt, Human
gacucgcgacaaugcaaa

SEQ ID NO: 1813735 - RNA, 23 nt, Human
gagaaaguacuucuccacccugc

SEQ ID NO: 1813736 - RNA, 12 nt, Human
gagaaaugaaaa

SEQ ID NO: 1813737 - RNA, 14 nt, Human
gagaaauuuauaaa

SEQ ID NO: 1813738 - RNA, 19 nt, Human
gagacagaguuuucacucu

SEQ ID NO: 1813739 - RNA, 17 nt, Human
gagacagacuagaaguu

SEQ ID NO: 1813740 - RNA, 16 nt, Human
gagacagccaacuaug

SEQ ID NO: 1813741 - RNA, 12 nt, Human
gagacagcccgg

SEQ ID NO: 1813742 - RNA, 15 nt, Human
gagacagacuagaag

SEQ ID NO: 1813743 - RNA, 15 nt, Human
gagacacaagccuuc

SEQ ID NO: 1813744 - RNA, 17 nt, Human
gagacacaagccuucgg

SEQ ID NO: 1813745 - RNA, 22 nt, Human
gagaaugcacaaacagaggccg

SEQ ID NO: 1813746 - RNA, 20 nt, Human
gagaaugcacaaacagaggc

SEQ ID NO: 1813747 - RNA, 21 nt, Human
gagaaugcacaaacagaggcc

SEQ ID NO: 1813748 - RNA, 14 nt, Human
gaggaacaaggcaa

SEQ ID NO: 1813749 - RNA, 16 nt, Human
gaggaacaaggcaagg

SEQ ID NO: 1813750 - RNA, 17 nt, Human
gaggaagagaaaaaaua

SEQ ID NO: 1813751 - RNA, 13 nt, Human
gaggaagccgcug

SEQ ID NO: 1813752 - RNA, 14 nt, Human
gaggaagccgcugg

SEQ ID NO: 1813753 - RNA, 17 nt, Human
gaggaagccgcuggggc

SEQ ID NO: 1813754 - RNA, 18 nt, Human
gaggaagccgcuggggcc

SEQ ID NO: 1813755 - RNA, 16 nt, Human
gaggaaagcaaaggag

SEQ ID NO: 1813756 - RNA, 17 nt, Human
gaggaaagcaaaggaga

SEQ ID NO: 1813757 - RNA, 20 nt, Human
gaggaaaaccaagccguggc

SEQ ID NO: 1813758 - RNA, 21 nt, Human
gaggaaaaccaagccguggcu

SEQ ID NO: 1813759 - RNA, 23 nt, Human
gaggaaaaccaagccguggcuuc

SEQ ID NO: 1813760 - RNA, 23 nt, Human
gagcuuugucuacuucaaaaguu

SEQ ID NO: 1813761 - RNA, 20 nt, Human
gagcuuugaaaauucagugg

SEQ ID NO: 1813762 - RNA, 22 nt, Human
gagcuuucugcuaucaaagagg

SEQ ID NO: 1813763 - RNA, 22 nt, Human
gagcuugaaacccguggcgcuu

SEQ ID NO: 1813764 - RNA, 15 nt, Human
gagcugaguggggga

SEQ ID NO: 1813765 - RNA, 15 nt, Human
gagcuagcagcaggg

SEQ ID NO: 1813766 - RNA, 17 nt, Human
gagcuagcagcagggag

SEQ ID NO: 1813767 - RNA, 15 nt, Human
gagccugcaguuauu

SEQ ID NO: 1813768 - RNA, 20 nt, Human
gagccgagaucacgccacug

SEQ ID NO: 1813769 - RNA, 19 nt, Human
gagccgagaucacgccacu

SEQ ID NO: 1813770 - RNA, 18 nt, Human
gagcccacuguacuugcu

SEQ ID NO: 1813771 - RNA, 21 nt, Human
gagcccacuguacuugcucuu

SEQ ID NO: 1813772 - RNA, 18 nt, Human
gagcccacgcccccacug

SEQ ID NO: 1813773 - RNA, 22 nt, Human
gagccgagaucacgccacugca

SEQ ID NO: 1813774 - RNA, 21 nt, Human
gagccgagaucacgccacugc

SEQ ID NO: 1813775 - RNA, 15 nt, Human
gagccucagcauccu

SEQ ID NO: 1813776 - RNA, 14 nt, Human
gagccucagcaucc

SEQ ID NO: 1813777 - RNA, 17 nt, Human
gagccucagcauccugg

SEQ ID NO: 1813778 - RNA, 19 nt, Human
gagccucagucucccuccc

SEQ ID NO: 1813779 - RNA, 13 nt, Human
gagccucagcauc

SEQ ID NO: 1813780 - RNA, 12 nt, Human
gagccugcaguu

SEQ ID NO: 1813781 - RNA, 13 nt, Human
gagccuccugccc

SEQ ID NO: 1813782 - RNA, 20 nt, Human
gagauagccaaggccaaagg

SEQ ID NO: 1813783 - RNA, 21 nt, Human
gagauagccaaggccaaagga

SEQ ID NO: 1813784 - RNA, 17 nt, Human
gagcagagaccaucccu

SEQ ID NO: 1813785 - RNA, 18 nt, Human
gagcagagaccaucccug

SEQ ID NO: 1813786 - RNA, 16 nt, Human
gagcagagaccauccc

SEQ ID NO: 1813787 - RNA, 22 nt, Human
gagcagccacauuccugaugcu

SEQ ID NO: 1813788 - RNA, 21 nt, Human
gagcagccacauuccugaugc

SEQ ID NO: 1813789 - RNA, 23 nt, Human
gagcagagaccaucccugaaggc

SEQ ID NO: 1813790 - RNA, 19 nt, Human
gagcagagaccaucccuga

SEQ ID NO: 1813791 - RNA, 21 nt, Human
gagcagagaccaucccugaag

SEQ ID NO: 1813792 - RNA, 20 nt, Human
gagccacugcaccgggccac

SEQ ID NO: 1813793 - RNA, 15 nt, Human
gagccagauuucacu

SEQ ID NO: 1813794 - RNA, 18 nt, Human
gagccagauuucacucuc

SEQ ID NO: 1813795 - RNA, 19 nt, Human
gagccagauuucacucucc

SEQ ID NO: 1813796 - RNA, 19 nt, Human
gagccacugcaccgggcca

SEQ ID NO: 1813797 - RNA, 18 nt, Human
gagccacugcaccgggcc

SEQ ID NO: 1813798 - RNA, 17 nt, Human
gagcccaccuuggcuca

SEQ ID NO: 1813799 - RNA, 15 nt, Human
gagcccaccuuggcu

SEQ ID NO: 1813800 - RNA, 13 nt, Human
gagcccaccuugg

SEQ ID NO: 1813801 - RNA, 11 nt, Human
gaaaggaaaga

SEQ ID NO: 1813802 - RNA, 16 nt, Human
gaaaggaaagaggcuc

SEQ ID NO: 1813803 - RNA, 21 nt, Human
gaaagcuugcccuggugccuc

SEQ ID NO: 1813804 - RNA, 14 nt, Human
gaaaguuuacagga

SEQ ID NO: 1813805 - RNA, 16 nt, Human
gaaaguuuacaggaaa

SEQ ID NO: 1813806 - RNA, 20 nt, Human
gaaacuaggugcauauuuau

SEQ ID NO: 1813807 - RNA, 16 nt, Human
gaaaaaugagccuggc

SEQ ID NO: 1813808 - RNA, 17 nt, Human
gaaagacuguacaaagu

SEQ ID NO: 1813809 - RNA, 22 nt, Human
gaaagauggcugugccucugcc

SEQ ID NO: 1813810 - RNA, 16 nt, Human
gaaagaucaaaagguu

SEQ ID NO: 1813811 - RNA, 23 nt, Human
gaaagauggcugugccucugccu

SEQ ID NO: 1813812 - RNA, 14 nt, Human
gaaagcagaacagu

SEQ ID NO: 1813813 - RNA, 13 nt, Human
gaaagcagaacag

SEQ ID NO: 1813814 - RNA, 20 nt, Human
gaacagacuggaagcacagc

SEQ ID NO: 1813815 - RNA, 17 nt, Human
gaacacuccuucacaga

SEQ ID NO: 1813816 - RNA, 15 nt, Human
gaacacuccuucaca

SEQ ID NO: 1813817 - RNA, 16 nt, Human
gaacacuccuucacag

SEQ ID NO: 1813818 - RNA, 19 nt, Human
gaaauuuccacucaggucu

SEQ ID NO: 1813819 - RNA, 20 nt, Human
gaaauuuccacucaggucug

SEQ ID NO: 1813820 - RNA, 23 nt, Human
gaaauuaguacuccccuccuuga

SEQ ID NO: 1813821 - RNA, 22 nt, Human
gaacagacuggaagcacagcuu

SEQ ID NO: 1813822 - RNA, 20 nt, Human
gaaauaucugaaaauguaug

SEQ ID NO: 1813823 - RNA, 18 nt, Human
gaaauaucugaaaaugua

SEQ ID NO: 1813824 - RNA, 19 nt, Human
gaaauaucugaaaauguau

SEQ ID NO: 1813825 - RNA, 17 nt, Human
gaaauauaggaacuuaa

SEQ ID NO: 1813826 - RNA, 16 nt, Human
gaaaugggcagagcag

SEQ ID NO: 1813827 - RNA, 15 nt, Human
gaaaugggcagagca

SEQ ID NO: 1813828 - RNA, 18 nt, Human
gaaaugaggucagagccu

SEQ ID NO: 1813829 - RNA, 11 nt, Human
gaaaugagcug

SEQ ID NO: 1813830 - RNA, 17 nt, Human
gaaauguacagcaagga

SEQ ID NO: 1813831 - RNA, 17 nt, Human
gaaaugggcagagcaga

SEQ ID NO: 1813832 - RNA, 19 nt, Human
gaaaugggcagagcagaga

SEQ ID NO: 1813833 - RNA, 13 nt, Human
gaagggggcuggg

SEQ ID NO: 1813834 - RNA, 15 nt, Human
gaagggggcugggac

SEQ ID NO: 1813835 - RNA, 20 nt, Human
gaaggcagggagggccuggg

SEQ ID NO: 1813836 - RNA, 22 nt, Human
gaaggcagggagggccugggcc

SEQ ID NO: 1813837 - RNA, 23 nt, Human
gaaggcagggagggccugggccc

SEQ ID NO: 1813838 - RNA, 18 nt, Human
gaaggcagggagggccug

SEQ ID NO: 1813839 - RNA, 13 nt, Human
gaagucacacagu

SEQ ID NO: 1813840 - RNA, 21 nt, Human
gaaguaauaugcacacauuuu

SEQ ID NO: 1813841 - RNA, 20 nt, Human
gaaguaauaugcacacauuu

SEQ ID NO: 1813842 - RNA, 19 nt, Human
gaaguaauaugcacacauu

SEQ ID NO: 1813843 - RNA, 21 nt, Human
gaaggugaggagcuugaaacc

SEQ ID NO: 1813844 - RNA, 15 nt, Human
gaagucacugcacag

SEQ ID NO: 1813845 - RNA, 21 nt, Human
gaagccgcuggggccaguugg

SEQ ID NO: 1813846 - RNA, 18 nt, Human
gaagccgcuggggccagu

SEQ ID NO: 1813847 - RNA, 20 nt, Human
gaagccgcuggggccaguug

SEQ ID NO: 1813848 - RNA, 14 nt, Human
gaagccgcuggggc

SEQ ID NO: 1813849 - RNA, 19 nt, Human
gaaggaaacccagcucugg

SEQ ID NO: 1813850 - RNA, 20 nt, Human
gaaggaaacccagcucuggu

SEQ ID NO: 1813851 - RNA, 21 nt, Human
gaaggacauugcggacagcca

SEQ ID NO: 1813852 - RNA, 20 nt, Human
gaaggacauugcggacagcc

SEQ ID NO: 1813853 - RNA, 19 nt, Human
gaaggacauugcggacagc

SEQ ID NO: 1813854 - RNA, 22 nt, Human
gaaggaauaaauugcuccuuga

SEQ ID NO: 1813855 - RNA, 22 nt, Human
gaaggacccggaggggccuggc

SEQ ID NO: 1813856 - RNA, 19 nt, Human
gaaggaagacuucaucccu

SEQ ID NO: 1813857 - RNA, 21 nt, Human
gaaggaaacccagcucugguc

SEQ ID NO: 1813858 - RNA, 22 nt, Human
gaaggaaacccagcucuggucc

SEQ ID NO: 1813859 - RNA, 15 nt, Human
gaaggaacguccccu

SEQ ID NO: 1813860 - RNA, 23 nt, Human
gaagauuuugaaauuuuuauuaa

SEQ ID NO: 1813861 - RNA, 17 nt, Human
gaagauugagauguguu

SEQ ID NO: 1813862 - RNA, 22 nt, Human
gaagauugagauguguucacaa

SEQ ID NO: 1813863 - RNA, 17 nt, Human
gaagauguagaggagaa

SEQ ID NO: 1813864 - RNA, 15 nt, Human
gaagacuucaucccu

SEQ ID NO: 1813865 - RNA, 16 nt, Human
gaagacuucaucccuc

SEQ ID NO: 1813866 - RNA, 12 nt, Human
gaagagccuugc

SEQ ID NO: 1813867 - RNA, 17 nt, Human
gaagacuucaucccucu

SEQ ID NO: 1813868 - RNA, 19 nt, Human
gaagacuucaucccucugg

SEQ ID NO: 1813869 - RNA, 22 nt, Human
gaacuuguaaaggaauuuaaaa

SEQ ID NO: 1813870 - RNA, 18 nt, Human
gaacuuggcgcugccccu

SEQ ID NO: 1813871 - RNA, 17 nt, Human
gaacuugggccacugug

SEQ ID NO: 1813872 - RNA, 17 nt, Human
gaacuuuccaggaaggc

SEQ ID NO: 1813873 - RNA, 12 nt, Human
gaacuugguucc

SEQ ID NO: 1813874 - RNA, 15 nt, Human
gaacuuguuuucugg

SEQ ID NO: 1813875 - RNA, 22 nt, Human
gaacuuugaccucugcagcaau

SEQ ID NO: 1813876 - RNA, 16 nt, Human
gaacuuugaccucugc

SEQ ID NO: 1813877 - RNA, 18 nt, Human
gaaccacaucuugcucug

SEQ ID NO: 1813878 - RNA, 20 nt, Human
gaaccacaucuugcucugcu

SEQ ID NO: 1813879 - RNA, 16 nt, Human
gaacuccuaaaucaag

SEQ ID NO: 1813880 - RNA, 13 nt, Human
gaacuccugaccu

SEQ ID NO: 1813881 - RNA, 15 nt, Human
gaacuccuaaaucaa

SEQ ID NO: 1813882 - RNA, 16 nt, Human
gaacucccuuucaaca

SEQ ID NO: 1813883 - RNA, 17 nt, Human
gaacuuaaauaauguga

SEQ ID NO: 1813884 - RNA, 14 nt, Human
gaacuuaaauaaug

SEQ ID NO: 1813885 - RNA, 17 nt, Human
gaacuuggcgcugcccc

SEQ ID NO: 1813886 - RNA, 17 nt, Human
cuugccaaauauaaaua

SEQ ID NO: 1813887 - RNA, 13 nt, Human
cuugcuugcuuuu

SEQ ID NO: 1813888 - RNA, 15 nt, Human
cuugcuuuuaaaauc

SEQ ID NO: 1813889 - RNA, 13 nt, Human
cuuggcugcaggg

SEQ ID NO: 1813890 - RNA, 12 nt, Human
cuuggcugcagg

SEQ ID NO: 1813891 - RNA, 23 nt, Human
cuuggcucaaguccucuuuucug

SEQ ID NO: 1813892 - RNA, 24 nt, Human
cuuggcucacugcaacuucugccu

SEQ ID NO: 1813893 - RNA, 13 nt, Human
cuuggauuguccc

SEQ ID NO: 1813894 - RNA, 14 nt, Human
cuuggauugucccc

SEQ ID NO: 1813895 - RNA, 18 nt, Human
cuuguaaaggaauuuaaa

SEQ ID NO: 1813896 - RNA, 18 nt, Human
cuuguaaaaauuaaaagu

SEQ ID NO: 1813897 - RNA, 17 nt, Human
cuuggggaccagagcug

SEQ ID NO: 1813898 - RNA, 18 nt, Human
cuuggggaccagagcugc

SEQ ID NO: 1813899 - RNA, 19 nt, Human
cuuggggaccagagcugcc

SEQ ID NO: 1813900 - RNA, 14 nt, Human
cuuggcugcaggga

SEQ ID NO: 1813901 - RNA, 18 nt, Human
cuuguggacacagcucuu

SEQ ID NO: 1813902 - RNA, 17 nt, Human
cuuguggacacagcucu

SEQ ID NO: 1813903 - RNA, 18 nt, Human
cuuguauuauguguguuu

SEQ ID NO: 1813904 - RNA, 21 nt, Human
cuuguaugaaagauggcugug

SEQ ID NO: 1813905 - RNA, 22 nt, Human
cuuguaacuaaaauaauuuugu

SEQ ID NO: 1813906 - RNA, 17 nt, Human
cuuguaacuaaaauaau

SEQ ID NO: 1813907 - RNA, 16 nt, Human
cuuguaacuaaaauaa

SEQ ID NO: 1813908 - RNA, 14 nt, Human
cuuguaacuaaaau

SEQ ID NO: 1813909 - RNA, 23 nt, Human
cuuguauuaaguuguuaauaaaa

SEQ ID NO: 1813910 - RNA, 22 nt, Human
cuuguauuaaguuguuaauaaa

SEQ ID NO: 1813911 - RNA, 13 nt, Human
cuuguauuaugug

SEQ ID NO: 1813912 - RNA, 17 nt, Human
cuuguauuaaguuguua

SEQ ID NO: 1813913 - RNA, 13 nt, Human
cuuguauuaaguu

SEQ ID NO: 1813914 - RNA, 18 nt, Human
cuugcagacucuacagag

SEQ ID NO: 1813915 - RNA, 20 nt, Human
cuugcagacucuacagaggc

SEQ ID NO: 1813916 - RNA, 21 nt, Human
cuugcaugaggcuaguguggu

SEQ ID NO: 1813917 - RNA, 21 nt, Human
cuugcaugguuuagaaagcuu

SEQ ID NO: 1813918 - RNA, 14 nt, Human
cuugcaauggcagc

SEQ ID NO: 1813919 - RNA, 19 nt, Human
cuugcacguauuuuaauag

SEQ ID NO: 1813920 - RNA, 22 nt, Human
cuugcaaaguaucccuacugua

SEQ ID NO: 1813921 - RNA, 13 nt, Human
cuugagcucagga

SEQ ID NO: 1813922 - RNA, 22 nt, Human
cuugagccuugaacuuugaccu

SEQ ID NO: 1813923 - RNA, 20 nt, Human
cuugagccuugaacuuugac

SEQ ID NO: 1813924 - RNA, 19 nt, Human
cuugagccuugaacuuuga

SEQ ID NO: 1813925 - RNA, 17 nt, Human
cuugaccauucuccacc

SEQ ID NO: 1813926 - RNA, 20 nt, Human
cuugaccauucuccaccugc

SEQ ID NO: 1813927 - RNA, 14 nt, Human
cuugagagggugga

SEQ ID NO: 1813928 - RNA, 21 nt, Human
cuugaccauucuccaccugcc

SEQ ID NO: 1813929 - RNA, 18 nt, Human
cuugaacuccuggccuca

SEQ ID NO: 1813930 - RNA, 17 nt, Human
cuugaacuccuggccuc

SEQ ID NO: 1813931 - RNA, 15 nt, Human
cuugaacuccuggcc

SEQ ID NO: 1813932 - RNA, 14 nt, Human
cuugaacuccuggc

SEQ ID NO: 1813933 - RNA, 20 nt, Human
cuugaacccgggaggcagag

SEQ ID NO: 1813934 - RNA, 19 nt, Human
cuugaacccgggaggcaga

SEQ ID NO: 1813935 - RNA, 14 nt, Human
cuugaacccgggag

SEQ ID NO: 1813936 - RNA, 20 nt, Human
cuugaacuggguacuugugg

SEQ ID NO: 1813937 - RNA, 18 nt, Human
cuugaacuggguacuugu

SEQ ID NO: 1813938 - RNA, 15 nt, Human
cuugaacuuugaccu

SEQ ID NO: 1813939 - RNA, 16 nt, Human
cuugaacuggguacuu

SEQ ID NO: 1813940 - RNA, 19 nt, Human
cuugaacuccuggccucaa

SEQ ID NO: 1813941 - RNA, 17 nt, Human
cuucuuuuuuugugaug

SEQ ID NO: 1813942 - RNA, 19 nt, Human
cuugaaauauaggaacuua

SEQ ID NO: 1813943 - RNA, 14 nt, Human
cuuuucccuucuuu

SEQ ID NO: 1813944 - RNA, 16 nt, Human
cuuuucacugcuggcu

SEQ ID NO: 1813945 - RNA, 20 nt, Human
cuuuucgcaggauucuuccu

SEQ ID NO: 1813946 - RNA, 21 nt, Human
cuuuucgcaggauucuuccuc

SEQ ID NO: 1813947 - RNA, 12 nt, Human
cuuuucacugcu

SEQ ID NO: 1813948 - RNA, 22 nt, Human
cuuuucauuuaggugaggaagc

SEQ ID NO: 1813949 - RNA, 13 nt, Human
cuuuuccaacccu

SEQ ID NO: 1813950 - RNA, 23 nt, Human
cuuuuccaacccucaucaccaac

SEQ ID NO: 1813951 - RNA, 18 nt, Human
cuuuuaaaacacuuccau

SEQ ID NO: 1813952 - RNA, 17 nt, Human
cuuuucuuucagccaag

SEQ ID NO: 1813953 - RNA, 13 nt, Human
cuuuucuuuucuu

SEQ ID NO: 1813954 - RNA, 22 nt, Human
cuuuuuaauauugauaugcuua

SEQ ID NO: 1813955 - RNA, 18 nt, Human
cuuuuuuauacauaaaca

SEQ ID NO: 1813956 - RNA, 19 nt, Human
cuuuuuuaucaugugaaau

SEQ ID NO: 1813957 - RNA, 11 nt, Human
gaaaaagaaaa

SEQ ID NO: 1813958 - RNA, 16 nt, Human
gaaaaagaaaaaauau

SEQ ID NO: 1813959 - RNA, 15 nt, Human
cuuuuuuauacauaa

SEQ ID NO: 1813960 - RNA, 17 nt, Human
cuuuuuuauacauaaac

SEQ ID NO: 1813961 - RNA, 16 nt, Human
cuuuuuuauacauaaa

SEQ ID NO: 1813962 - RNA, 14 nt, Human
cuuuccaggaaggc

SEQ ID NO: 1813963 - RNA, 22 nt, Human
cuuuccaaaguacacuguuuca

SEQ ID NO: 1813964 - RNA, 16 nt, Human
cuuuccaaaugcccag

SEQ ID NO: 1813965 - RNA, 16 nt, Human
cuuuccaaaguacacu

SEQ ID NO: 1813966 - RNA, 15 nt, Human
cuuuccccaugucuc

SEQ ID NO: 1813967 - RNA, 20 nt, Human
cuuuccccaugucucgacuc

SEQ ID NO: 1813968 - RNA, 21 nt, Human
cuuuccccaugucucgacuca

SEQ ID NO: 1813969 - RNA, 21 nt, Human
cuuuccgguguuuaagacauu

SEQ ID NO: 1813970 - RNA, 21 nt, Human
cuuguggacacagcucuucuc

SEQ ID NO: 1813971 - RNA, 19 nt, Human
cuuuauuuuguguuuagga

SEQ ID NO: 1813972 - RNA, 15 nt, Human
cuuugcagacaggca

SEQ ID NO: 1813973 - RNA, 14 nt, Human
cuuugcagacaggc

SEQ ID NO: 1813974 - RNA, 19 nt, Human
cuuuggaaagaguaggaag

SEQ ID NO: 1813975 - RNA, 23 nt, Human
cuuuggaaagaguaggaagacuu

SEQ ID NO: 1813976 - RNA, 17 nt, Human
cuuuccugaggcugggc

SEQ ID NO: 1813977 - RNA, 16 nt, Human
cuuuccugaggcuggg

SEQ ID NO: 1813978 - RNA, 20 nt, Human
cuuuccugaggcugggcucc

SEQ ID NO: 1813979 - RNA, 21 nt, Human
cuuuccugaggcugggcuccc

SEQ ID NO: 1813980 - RNA, 15 nt, Human
cugcaccgggccaca

SEQ ID NO: 1813981 - RNA, 14 nt, Human
cugcaccgggccac

SEQ ID NO: 1813982 - RNA, 15 nt, Human
cugcaccggcuggcc

SEQ ID NO: 1813983 - RNA, 16 nt, Human
cugcaccggcuggccu

SEQ ID NO: 1813984 - RNA, 22 nt, Human
cugaggcccuucucuccagccc

SEQ ID NO: 1813985 - RNA, 23 nt, Human
cugaggcccuucucuccagcccc

SEQ ID NO: 1813986 - RNA, 14 nt, Human
cugcaccggcuggc

SEQ ID NO: 1813987 - RNA, 20 nt, Human
cugcaccgggccacagagaa

SEQ ID NO: 1813988 - RNA, 18 nt, Human
cugcaccgggccacagag

SEQ ID NO: 1813989 - RNA, 20 nt, Human
cugcacuccagccuggguga

SEQ ID NO: 1813990 - RNA, 14 nt, Human
cugcacuccccugc

SEQ ID NO: 1813991 - RNA, 13 nt, Human
cugcacuccccug

SEQ ID NO: 1813992 - RNA, 19 nt, Human
cugcacuccccugcugggu

SEQ ID NO: 1813993 - RNA, 20 nt, Human
cugcacuccccugcugggug

SEQ ID NO: 1813994 - RNA, 10 nt, Human
cugcagaggg

SEQ ID NO: 1813995 - RNA, 16 nt, Human
cugcagcaauaaagca

SEQ ID NO: 1813996 - RNA, 15 nt, Human
cugcagcaauaaagc

SEQ ID NO: 1813997 - RNA, 13 nt, Human
cugcagagggcac

SEQ ID NO: 1813998 - RNA, 21 nt, Human
cugcacuccccugcugggugu

SEQ ID NO: 1813999 - RNA, 13 nt, Human
cugcaguugccag

SEQ ID NO: 1814000 - RNA, 16 nt, Human
cugcaguugccaguca

SEQ ID NO: 1814001 - RNA, 19 nt, Human
cugcaggucccuaauaaag

SEQ ID NO: 1814002 - RNA, 20 nt, Human
cugcaggucccuaauaaagc

SEQ ID NO: 1814003 - RNA, 21 nt, Human
cugcaggucccuaauaaagcu

SEQ ID NO: 1814004 - RNA, 22 nt, Human
cugcaggucccuaauaaagcug

SEQ ID NO: 1814005 - RNA, 23 nt, Human
cugcaggucccuaauaaagcugu

SEQ ID NO: 1814006 - RNA, 11 nt, Human
cugcagguccc

SEQ ID NO: 1814007 - RNA, 12 nt, Human
cugcaggucccu

SEQ ID NO: 1814008 - RNA, 13 nt, Human
cugcaggucccua

SEQ ID NO: 1814009 - RNA, 14 nt, Human
cugcaggucccuaa

SEQ ID NO: 1814010 - RNA, 15 nt, Human
cugcaggucccuaau

SEQ ID NO: 1814011 - RNA, 16 nt, Human
cugcaggucccuaaua

SEQ ID NO: 1814012 - RNA, 17 nt, Human
cugcaggucccuaauaa

SEQ ID NO: 1814013 - RNA, 18 nt, Human
cugcaggucccuaauaaa

SEQ ID NO: 1814014 - RNA, 17 nt, Human
cugcagcaauaaagcag

SEQ ID NO: 1814015 - RNA, 20 nt, Human
cugcaucaagaugugacaug

SEQ ID NO: 1814016 - RNA, 15 nt, Human
cugcauaugaaagga

SEQ ID NO: 1814017 - RNA, 14 nt, Human
cugccacccugggg

SEQ ID NO: 1814018 - RNA, 12 nt, Human
cugccacccugg

SEQ ID NO: 1814019 - RNA, 21 nt, Human
cugccacccuggggagaaagu

SEQ ID NO: 1814020 - RNA, 13 nt, Human
cugccaggaagcc

SEQ ID NO: 1814021 - RNA, 14 nt, Human
cugccaggaagcca

SEQ ID NO: 1814022 - RNA, 20 nt, Human
cugccaggaagccagcaggc

SEQ ID NO: 1814023 - RNA, 21 nt, Human
cugccaggaagccagcaggcu

SEQ ID NO: 1814024 - RNA, 21 nt, Human
cugccauccagguucagcuug

SEQ ID NO: 1814025 - RNA, 15 nt, Human
cugccauccucccaa

SEQ ID NO: 1814026 - RNA, 22 nt, Human
cugccaggaagccagcaggcuc

SEQ ID NO: 1814027 - RNA, 20 nt, Human
cugcccaggccccugccacc

SEQ ID NO: 1814028 - RNA, 19 nt, Human
cugcccaggccccugccac

SEQ ID NO: 1814029 - RNA, 18 nt, Human
cugcccaggccccugcca

SEQ ID NO: 1814030 - RNA, 16 nt, Human
cugcccaggccccugc

SEQ ID NO: 1814031 - RNA, 17 nt, Human
cugcccaggccugccug

SEQ ID NO: 1814032 - RNA, 15 nt, Human
cugcccaggccccug

SEQ ID NO: 1814033 - RNA, 14 nt, Human
cugcccaggccccu

SEQ ID NO: 1814034 - RNA, 12 nt, Human
cugcccaccugg

SEQ ID NO: 1814035 - RNA, 15 nt, Human
cugccauuucugaga

SEQ ID NO: 1814036 - RNA, 18 nt, Human
cugccccuggcagccccu

SEQ ID NO: 1814037 - RNA, 19 nt, Human
cugccccuggcagccccug

SEQ ID NO: 1814038 - RNA, 13 nt, Human
cugcccggcaggg

SEQ ID NO: 1814039 - RNA, 20 nt, Human
cugcccggcaggguccuaga

SEQ ID NO: 1814040 - RNA, 22 nt, Human
cugcccuaaugcgcaggcuggc

SEQ ID NO: 1814041 - RNA, 20 nt, Human
cugcccuaaugcgcaggcug

SEQ ID NO: 1814042 - RNA, 21 nt, Human
cugcccuaaugcgcaggcugg

SEQ ID NO: 1814043 - RNA, 13 nt, Human
cugcuugaggcaa

SEQ ID NO: 1814044 - RNA, 20 nt, Human
cugcuugaggcaacucaucu

SEQ ID NO: 1814045 - RNA, 21 nt, Human
cugcuugaggcaacucaucuu

SEQ ID NO: 1814046 - RNA, 12 nt, Human
cugcugcuggcu

SEQ ID NO: 1814047 - RNA, 13 nt, Human
cugcugcuggcug

SEQ ID NO: 1814048 - RNA, 14 nt, Human
cugcuggcugccuu

SEQ ID NO: 1814049 - RNA, 15 nt, Human
cugcuggcugccuua

SEQ ID NO: 1814050 - RNA, 13 nt, Human
cugcuggcugccu

SEQ ID NO: 1814051 - RNA, 14 nt, Human
cugcugcuggcugg

SEQ ID NO: 1814052 - RNA, 14 nt, Human
cugcuggguguggc

SEQ ID NO: 1814053 - RNA, 15 nt, Human
cugcuggguguggcg

SEQ ID NO: 1814054 - RNA, 17 nt, Human
cugcuggguguggcgca

SEQ ID NO: 1814055 - RNA, 15 nt, Human
cugcuuuuggucugu

SEQ ID NO: 1814056 - RNA, 17 nt, Human
cugcuuugggcugcccu

SEQ ID NO: 1814057 - RNA, 16 nt, Human
cugcuuugggcugccc

SEQ ID NO: 1814058 - RNA, 13 nt, Human
cugcuuuggaaau

SEQ ID NO: 1814059 - RNA, 17 nt, Human
cugcuuuuggucugugu

SEQ ID NO: 1814060 - RNA, 19 nt, Human
cugcuuuugucuaugggac

SEQ ID NO: 1814061 - RNA, 19 nt, Human
cugcuugggcuucauccuc

SEQ ID NO: 1814062 - RNA, 19 nt, Human
cugcuugugaaaggaaaga

SEQ ID NO: 1814063 - RNA, 13 nt, Human
cugcuugggcuuc

SEQ ID NO: 1814064 - RNA, 15 nt, Human
cugcuugggcuucau

SEQ ID NO: 1814065 - RNA, 17 nt, Human
cugcuugggcuucaucc

SEQ ID NO: 1814066 - RNA, 18 nt, Human
cugcuugggcuucauccu

SEQ ID NO: 1814067 - RNA, 22 nt, Human
cugcuugaggcaacucaucuua

SEQ ID NO: 1814068 - RNA, 20 nt, Human
cugcuugcuugcuuuuuaau

SEQ ID NO: 1814069 - RNA, 16 nt, Human
cugccugaagucacac

SEQ ID NO: 1814070 - RNA, 18 nt, Human
cugccugaagucacacag

SEQ ID NO: 1814071 - RNA, 21 nt, Human
cugcccugcccaccuggccuc

SEQ ID NO: 1814072 - RNA, 20 nt, Human
cugcccugcccaccuggccu

SEQ ID NO: 1814073 - RNA, 17 nt, Human
cugcccugcccaccugg

SEQ ID NO: 1814074 - RNA, 19 nt, Human
cugccugaagucacacagu

SEQ ID NO: 1814075 - RNA, 23 nt, Human
cugccugaagucacacagugagu

SEQ ID NO: 1814076 - RNA, 20 nt, Human
cugccugcaguacuuuaccu

SEQ ID NO: 1814077 - RNA, 21 nt, Human
cugccugcaguacuuuaccuc

SEQ ID NO: 1814078 - RNA, 23 nt, Human
cugcgguccacccaggagccccg

SEQ ID NO: 1814079 - RNA, 22 nt, Human
cugcgggucacaggagggaggg

SEQ ID NO: 1814080 - RNA, 23 nt, Human
cugcgggucacaggagggagggg

SEQ ID NO: 1814081 - RNA, 18 nt, Human
cugcggugcuaucucccc

SEQ ID NO: 1814082 - RNA, 19 nt, Human
cugcggugcuaucuccccc

SEQ ID NO: 1814083 - RNA, 15 nt, Human
cugcgggucacagga

SEQ ID NO: 1814084 - RNA, 21 nt, Human
cugcgggucacaggagggagg

SEQ ID NO: 1814085 - RNA, 22 nt, Human
cugccugcuuuuuauggccugu

SEQ ID NO: 1814086 - RNA, 19 nt, Human
cugcucuccgaccagacac

SEQ ID NO: 1814087 - RNA, 15 nt, Human
cugcucuccgaccag

SEQ ID NO: 1814088 - RNA, 20 nt, Human
cugcuccucuccccagcaag

SEQ ID NO: 1814089 - RNA, 19 nt, Human
cugcuccucuccccagcaa

SEQ ID NO: 1814090 - RNA, 23 nt, Human
cugcuccucuccccagcaaguga

SEQ ID NO: 1814091 - RNA, 20 nt, Human
cugcggugcuaucuccccca

SEQ ID NO: 1814092 - RNA, 21 nt, Human
cugcggugcuaucucccccag

SEQ ID NO: 1814093 - RNA, 22 nt, Human
cugcggugcuaucucccccagc

SEQ ID NO: 1814094 - RNA, 23 nt, Human
cugcggugcuaucucccccagcc

SEQ ID NO: 1814095 - RNA, 20 nt, Human
cugcucugaugaagaggagu

SEQ ID NO: 1814096 - RNA, 12 nt, Human
cugcucugguua

SEQ ID NO: 1814097 - RNA, 16 nt, Human
cugcucuugaacuccu

SEQ ID NO: 1814098 - RNA, 18 nt, Human
cugcucuugaacuccuga

SEQ ID NO: 1814099 - RNA, 19 nt, Human
cugcucuugaacuccugac

SEQ ID NO: 1814100 - RNA, 14 nt, Human
cugcugccugcuuu

SEQ ID NO: 1814101 - RNA, 23 nt, Human
cugcugccugcuuuuuauggccu

SEQ ID NO: 1814102 - RNA, 15 nt, Human
cugcugcaguugcca

SEQ ID NO: 1814103 - RNA, 14 nt, Human
cugcugcaguugcc

SEQ ID NO: 1814104 - RNA, 10 nt, Human
cugcugcagu

SEQ ID NO: 1814105 - RNA, 13 nt, Human
cugcugcaguugc

SEQ ID NO: 1814106 - RNA, 18 nt, Human
cuguaucccaugagccuc

SEQ ID NO: 1814107 - RNA, 19 nt, Human
cuguaucccaugagccuca

SEQ ID NO: 1814108 - RNA, 20 nt, Human
cuguaugucucgugguagga

SEQ ID NO: 1814109 - RNA, 15 nt, Human
cuguaucccaugagc

SEQ ID NO: 1814110 - RNA, 14 nt, Human
cuguaucccaugag

SEQ ID NO: 1814111 - RNA, 22 nt, Human
cuguaccucuugagccuugaac

SEQ ID NO: 1814112 - RNA, 22 nt, Human
cugucccagugccgagaaggaa

SEQ ID NO: 1814113 - RNA, 20 nt, Human
cuguccaggcacugcugccc

SEQ ID NO: 1814114 - RNA, 21 nt, Human
cuguccaggcacugcugccca

SEQ ID NO: 1814115 - RNA, 22 nt, Human
cuguccaggcacugcugcccag

SEQ ID NO: 1814116 - RNA, 18 nt, Human
cuguccaggcacugcugc

SEQ ID NO: 1814117 - RNA, 19 nt, Human
cuguccaggcacugcugcc

SEQ ID NO: 1814118 - RNA, 18 nt, Human
cugucucuacuaaaaaua

SEQ ID NO: 1814119 - RNA, 21 nt, Human
cuguccuacucugugucaggu

SEQ ID NO: 1814120 - RNA, 14 nt, Human
cuguccgagcuuug

SEQ ID NO: 1814121 - RNA, 22 nt, Human
cugucucaaaaaaagaaaaaga

SEQ ID NO: 1814122 - RNA, 18 nt, Human
cugucucaagagggcacu

SEQ ID NO: 1814123 - RNA, 19 nt, Human
cugucucaagagggcacug

SEQ ID NO: 1814124 - RNA, 20 nt, Human
cugucucaagagggcacugg

SEQ ID NO: 1814125 - RNA, 21 nt, Human
cugucucaagagggcacuggu

SEQ ID NO: 1814126 - RNA, 20 nt, Human
cuguccuacucugugucagg

SEQ ID NO: 1814127 - RNA, 18 nt, Human
cuguccuacucuguguca

SEQ ID NO: 1814128 - RNA, 17 nt, Human
cuguccuacucuguguc

SEQ ID NO: 1814129 - RNA, 16 nt, Human
cuguccuacucugugu

SEQ ID NO: 1814130 - RNA, 13 nt, Human
cugucccccugac

SEQ ID NO: 1814131 - RNA, 14 nt, Human
cugucccccugaca

SEQ ID NO: 1814132 - RNA, 13 nt, Human
cuggucccacuca

SEQ ID NO: 1814133 - RNA, 14 nt, Human
cuggucccacucag

SEQ ID NO: 1814134 - RNA, 23 nt, Human
cuggucucaaacucuugaccuca

SEQ ID NO: 1814135 - RNA, 19 nt, Human
cuggucacaggacucugcc

SEQ ID NO: 1814136 - RNA, 20 nt, Human
cuggucacaggacucugccu

SEQ ID NO: 1814137 - RNA, 21 nt, Human
cuggucacaggacucugccuc

SEQ ID NO: 1814138 - RNA, 22 nt, Human
cuggucacaggacucugccucc

SEQ ID NO: 1814139 - RNA, 23 nt, Human
cuggucacaggacucugccuccu

SEQ ID NO: 1814140 - RNA, 14 nt, Human
cuggguacuugugg

SEQ ID NO: 1814141 - RNA, 16 nt, Human
cuggguacuuguggac

SEQ ID NO: 1814142 - RNA, 18 nt, Human
cuggguacuuguggacac

SEQ ID NO: 1814143 - RNA, 19 nt, Human
cuggguacuuguggacaca

SEQ ID NO: 1814144 - RNA, 20 nt, Human
cugggcucccuucccaccuc

SEQ ID NO: 1814145 - RNA, 21 nt, Human
cugggcucccuucccaccucu

SEQ ID NO: 1814146 - RNA, 22 nt, Human
cugggcucccuucccaccucuc

SEQ ID NO: 1814147 - RNA, 15 nt, Human
cuggguuggagggug

SEQ ID NO: 1814148 - RNA, 17 nt, Human
cugggucgcccuggacu

SEQ ID NO: 1814149 - RNA, 18 nt, Human
cugggucgcccuggacug

SEQ ID NO: 1814150 - RNA, 22 nt, Human
cugggucgcccuggacugugug

SEQ ID NO: 1814151 - RNA, 23 nt, Human
cuguacaugaaaacacauuuuuc

SEQ ID NO: 1814152 - RNA, 22 nt, Human
cuguacaugaaaacacauuuuu

SEQ ID NO: 1814153 - RNA, 21 nt, Human
cuguaccucuugagccuugaa

SEQ ID NO: 1814154 - RNA, 17 nt, Human
cuguaauuugugauaca

SEQ ID NO: 1814155 - RNA, 18 nt, Human
cuguaauuugugauacaa

SEQ ID NO: 1814156 - RNA, 22 nt, Human
cuguaauuugugauacaaugcu

SEQ ID NO: 1814157 - RNA, 21 nt, Human
cuguaauuugugauacaaugc

SEQ ID NO: 1814158 - RNA, 23 nt, Human
cuguacagagcccacgcccccac

SEQ ID NO: 1814159 - RNA, 16 nt, Human
cugguggcagcucacc

SEQ ID NO: 1814160 - RNA, 13 nt, Human
cugguggcagcuc

SEQ ID NO: 1814161 - RNA, 14 nt, Human
cugguggcagcuca

SEQ ID NO: 1814162 - RNA, 12 nt, Human
cugguggcagcu

SEQ ID NO: 1814163 - RNA, 16 nt, Human
cuggucucgaacuccu

SEQ ID NO: 1814164 - RNA, 20 nt, Human
cugguucaggguuggccccu

SEQ ID NO: 1814165 - RNA, 23 nt, Human
cugguuaauauuuauaggucacu

SEQ ID NO: 1814166 - RNA, 18 nt, Human
cuguaaggcaaucauggu

SEQ ID NO: 1814167 - RNA, 17 nt, Human
cuggcuguuggcugggg

SEQ ID NO: 1814168 - RNA, 16 nt, Human
cuggcuguuggcuggg

SEQ ID NO: 1814169 - RNA, 20 nt, Human
cuggcugguuagagguuccc

SEQ ID NO: 1814170 - RNA, 18 nt, Human
cuggcuguuggcuggggg

SEQ ID NO: 1814171 - RNA, 23 nt, Human
cuggcuuuucacugcuggcugcc

SEQ ID NO: 1814172 - RNA, 17 nt, Human
cugggagagccuuccag

SEQ ID NO: 1814173 - RNA, 18 nt, Human
cugggagagccuuccagg

SEQ ID NO: 1814174 - RNA, 21 nt, Human
cugggagagccuuccaggggu

SEQ ID NO: 1814175 - RNA, 19 nt, Human
cugggagagccuuccaggg

SEQ ID NO: 1814176 - RNA, 20 nt, Human
cugggagagccuuccagggg

SEQ ID NO: 1814177 - RNA, 17 nt, Human
cugggauuacaggugug

SEQ ID NO: 1814178 - RNA, 20 nt, Human
cugggauuacaggugugaac

SEQ ID NO: 1814179 - RNA, 16 nt, Human
cugggauuacaggugu

SEQ ID NO: 1814180 - RNA, 18 nt, Human
cugggauuacagguguga

SEQ ID NO: 1814181 - RNA, 12 nt, Human
cugggagugagc

SEQ ID NO: 1814182 - RNA, 20 nt, Human
cugggaucccucauccucau

SEQ ID NO: 1814183 - RNA, 20 nt, Human
cugggaucacauguggacuu

SEQ ID NO: 1814184 - RNA, 18 nt, Human
cugggaugauuggagggg

SEQ ID NO: 1814185 - RNA, 15 nt, Human
cugggccccaguugu

SEQ ID NO: 1814186 - RNA, 19 nt, Human
cugggccccaguuguauuu

SEQ ID NO: 1814187 - RNA, 18 nt, Human
cugggaggcucuggagcc

SEQ ID NO: 1814188 - RNA, 20 nt, Human
cugggaggcucuggagccca

SEQ ID NO: 1814189 - RNA, 21 nt, Human
cugggaggcucuggagcccac

SEQ ID NO: 1814190 - RNA, 17 nt, Human
cugggaggcucuggagc

SEQ ID NO: 1814191 - RNA, 22 nt, Human
cugggaggcucuggagcccacu

SEQ ID NO: 1814192 - RNA, 19 nt, Human
cugggaggucaaggcugca

SEQ ID NO: 1814193 - RNA, 21 nt, Human
cugggaggucaaggcugcagu

SEQ ID NO: 1814194 - RNA, 23 nt, Human
cuggccucaagugauucuccugc

SEQ ID NO: 1814195 - RNA, 12 nt, Human
cuggccucugca

SEQ ID NO: 1814196 - RNA, 14 nt, Human
cuggccuggccccu

SEQ ID NO: 1814197 - RNA, 18 nt, Human
cuggccugagcugggaug

SEQ ID NO: 1814198 - RNA, 13 nt, Human
cuggccucugcac

SEQ ID NO: 1814199 - RNA, 14 nt, Human
cuggccucugcacu

SEQ ID NO: 1814200 - RNA, 16 nt, Human
cuggccucugcacucc

SEQ ID NO: 1814201 - RNA, 16 nt, Human
cuggccugagcuggga

SEQ ID NO: 1814202 - RNA, 16 nt, Human
cuggccuggccccuca

SEQ ID NO: 1814203 - RNA, 17 nt, Human
cuggccuggccccucag

SEQ ID NO: 1814204 - RNA, 19 nt, Human
cuggccuggccccucaggg

SEQ ID NO: 1814205 - RNA, 15 nt, Human
cuggccuucggccuc

SEQ ID NO: 1814206 - RNA, 21 nt, Human
cuggccuucggccuccauccu

SEQ ID NO: 1814207 - RNA, 18 nt, Human
cuggccuucggccuccau

SEQ ID NO: 1814208 - RNA, 17 nt, Human
cuggccuucggccucca

SEQ ID NO: 1814209 - RNA, 16 nt, Human
cuggccuucggccucc

SEQ ID NO: 1814210 - RNA, 22 nt, Human
cuggcacuauaauguaagcucu

SEQ ID NO: 1814211 - RNA, 15 nt, Human
cuggcacuauaaugu

SEQ ID NO: 1814212 - RNA, 16 nt, Human
cuggcacuauaaugua

SEQ ID NO: 1814213 - RNA, 16 nt, Human
cuggcaugggaaugaa

SEQ ID NO: 1814214 - RNA, 18 nt, Human
cuggcaugggaaugaaug

SEQ ID NO: 1814215 - RNA, 19 nt, Human
cuggcaugggaaugaaugu

SEQ ID NO: 1814216 - RNA, 22 nt, Human
cuggcaugggaaugaaugucag

SEQ ID NO: 1814217 - RNA, 24 nt, Human
cuggcaugggaaugaaugucagug

SEQ ID NO: 1814218 - RNA, 18 nt, Human
cuggcacccggccccugc

SEQ ID NO: 1814219 - RNA, 17 nt, Human
cuggcacccggccccug

SEQ ID NO: 1814220 - RNA, 16 nt, Human
cuggcacccggccccu

SEQ ID NO: 1814221 - RNA, 15 nt, Human
cuggcacagggcagu

SEQ ID NO: 1814222 - RNA, 16 nt, Human
cuggcacagggcagug

SEQ ID NO: 1814223 - RNA, 20 nt, Human
cuggaagugcuaauuuugaa

SEQ ID NO: 1814224 - RNA, 18 nt, Human
cuggaauauauaaccagu

SEQ ID NO: 1814225 - RNA, 14 nt, Human
cuggcaagaaugug

SEQ ID NO: 1814226 - RNA, 19 nt, Human
cucuuggguucaagcgauu

SEQ ID NO: 1814227 - RNA, 15 nt, Human
cucuugaacuccuga

SEQ ID NO: 1814228 - RNA, 21 nt, Human
cucuuggguucaagcgauucu

SEQ ID NO: 1814229 - RNA, 19 nt, Human
cucuuggguucaagugauu

SEQ ID NO: 1814230 - RNA, 22 nt, Human
cucuugaaauauaggaacuuaa

SEQ ID NO: 1814231 - RNA, 23 nt, Human
cucuuuaaugucacaggcagguc

SEQ ID NO: 1814232 - RNA, 22 nt, Human
cucuuuaaugucacaggcaggu

SEQ ID NO: 1814233 - RNA, 21 nt, Human
cucuuuaaugucacaggcagg

SEQ ID NO: 1814234 - RNA, 20 nt, Human
cucuuuaaugucacaggcag

SEQ ID NO: 1814235 - RNA, 17 nt, Human
cucuuucccucccuucc

SEQ ID NO: 1814236 - RNA, 18 nt, Human
cucuuuaaugucacaggc

SEQ ID NO: 1814237 - RNA, 13 nt, Human
cucuugguccugc

SEQ ID NO: 1814238 - RNA, 15 nt, Human
cucuugguccugcug

SEQ ID NO: 1814239 - RNA, 16 nt, Human
cucuugguccugcugc

SEQ ID NO: 1814240 - RNA, 17 nt, Human
cucuugguccugcugca

SEQ ID NO: 1814241 - RNA, 16 nt, Human
cugaacucugacaaca

SEQ ID NO: 1814242 - RNA, 17 nt, Human
cugaacucugacaacag

SEQ ID NO: 1814243 - RNA, 19 nt, Human
cugaagaauugaaaaacca

SEQ ID NO: 1814244 - RNA, 15 nt, Human
cugaaagcccugagc

SEQ ID NO: 1814245 - RNA, 17 nt, Human
cucuuucuauuguuucu

SEQ ID NO: 1814246 - RNA, 22 nt, Human
cugaaauagacccacaagaggc

SEQ ID NO: 1814247 - RNA, 23 nt, Human
cugaaagcccugagcuuucugcu

SEQ ID NO: 1814248 - RNA, 16 nt, Human
cugaaagcccugagcu

SEQ ID NO: 1814249 - RNA, 17 nt, Human
cugaaagcccugagcuu

SEQ ID NO: 1814250 - RNA, 18 nt, Human
cugaaagcccugagcuuu

SEQ ID NO: 1814251 - RNA, 19 nt, Human
cugaaagcccugagcuuuc

SEQ ID NO: 1814252 - RNA, 22 nt, Human
cucuggcuccagcuggccggga

SEQ ID NO: 1814253 - RNA, 13 nt, Human
cucuuccaggcug

SEQ ID NO: 1814254 - RNA, 14 nt, Human
cucuuccaggcugg

SEQ ID NO: 1814255 - RNA, 15 nt, Human
cucuuccaggcuggg

SEQ ID NO: 1814256 - RNA, 13 nt, Human
cucuuagaaaaac

SEQ ID NO: 1814257 - RNA, 15 nt, Human
cucuuagaaaaacca

SEQ ID NO: 1814258 - RNA, 15 nt, Human
cucugugucaggugg

SEQ ID NO: 1814259 - RNA, 19 nt, Human
cucugugucagguggggca

SEQ ID NO: 1814260 - RNA, 22 nt, Human
cucuguuacacuuuuuggaagu

SEQ ID NO: 1814261 - RNA, 12 nt, Human
cucuggcagcuc

SEQ ID NO: 1814262 - RNA, 14 nt, Human
cucuggcagcucag

SEQ ID NO: 1814263 - RNA, 22 nt, Human
cucuggacaggcauguucucug

SEQ ID NO: 1814264 - RNA, 16 nt, Human
cucuggacaggcaugu

SEQ ID NO: 1814265 - RNA, 19 nt, Human
cucuggagcccacuguacu

SEQ ID NO: 1814266 - RNA, 15 nt, Human
cucuggcuccagcug

SEQ ID NO: 1814267 - RNA, 16 nt, Human
cucuggcuccagcugg

SEQ ID NO: 1814268 - RNA, 19 nt, Human
cucuggccuucggccucca

SEQ ID NO: 1814269 - RNA, 15 nt, Human
cucuggcagcucaga

SEQ ID NO: 1814270 - RNA, 16 nt, Human
cucuggcagcucagag

SEQ ID NO: 1814271 - RNA, 12 nt, Human
cucuggccuucg

SEQ ID NO: 1814272 - RNA, 15 nt, Human
cucuggacaggcaug

SEQ ID NO: 1814273 - RNA, 22 nt, Human
cucugccugaagucacacagug

SEQ ID NO: 1814274 - RNA, 21 nt, Human
cucugccugaagucacacagu

SEQ ID NO: 1814275 - RNA, 13 nt, Human
cucucuccucccu

SEQ ID NO: 1814276 - RNA, 22 nt, Human
cugagccucagucucccucccu

SEQ ID NO: 1814277 - RNA, 20 nt, Human
cugagcgacagugagacucu

SEQ ID NO: 1814278 - RNA, 16 nt, Human
cugagcgacagugaga

SEQ ID NO: 1814279 - RNA, 16 nt, Human
cugagccucagucucc

SEQ ID NO: 1814280 - RNA, 21 nt, Human
cugagccucagucucccuccc

SEQ ID NO: 1814281 - RNA, 16 nt, Human
cugagacagcccgggc

SEQ ID NO: 1814282 - RNA, 17 nt, Human
cugagacagcccgggcu

SEQ ID NO: 1814283 - RNA, 18 nt, Human
cugagacagcccgggcuc

SEQ ID NO: 1814284 - RNA, 17 nt, Human
cugagccagauuucacu

SEQ ID NO: 1814285 - RNA, 18 nt, Human
cugagccagauuucacuc

SEQ ID NO: 1814286 - RNA, 19 nt, Human
cugagccagauuucacucu

SEQ ID NO: 1814287 - RNA, 20 nt, Human
cugagccagauuucacucuc

SEQ ID NO: 1814288 - RNA, 21 nt, Human
cugagccagauuucacucucc

SEQ ID NO: 1814289 - RNA, 19 nt, Human
cugaggaucagaguaaucc

SEQ ID NO: 1814290 - RNA, 17 nt, Human
cugaggaucagaguaau

SEQ ID NO: 1814291 - RNA, 12 nt, Human
cugaggcccaga

SEQ ID NO: 1814292 - RNA, 13 nt, Human
cugaggcccagag

SEQ ID NO: 1814293 - RNA, 14 nt, Human
cugaggcccagagg

SEQ ID NO: 1814294 - RNA, 15 nt, Human
cugaggcccagaggg

SEQ ID NO: 1814295 - RNA, 16 nt, Human
cugaggcccagagggc

SEQ ID NO: 1814296 - RNA, 17 nt, Human
cugaggcccagagggcc

SEQ ID NO: 1814297 - RNA, 18 nt, Human
cugaggcccagagggccu

SEQ ID NO: 1814298 - RNA, 19 nt, Human
cugaggcccagagggccug

SEQ ID NO: 1814299 - RNA, 21 nt, Human
cugaggcccagagggccugca

SEQ ID NO: 1814300 - RNA, 23 nt, Human
cugaggcccagagggccugcaag

SEQ ID NO: 1814301 - RNA, 14 nt, Human
cugaggcccuucuc

SEQ ID NO: 1814302 - RNA, 15 nt, Human
cugaggcccuucucu

SEQ ID NO: 1814303 - RNA, 18 nt, Human
cugaggcccuucucucca

SEQ ID NO: 1814304 - RNA, 19 nt, Human
cugaggcccuucucuccag

SEQ ID NO: 1814305 - RNA, 20 nt, Human
cugaggcccuucucuccagc

SEQ ID NO: 1814306 - RNA, 21 nt, Human
cugacaggcaaugcuggcugu

SEQ ID NO: 1814307 - RNA, 19 nt, Human
cugaagacucauucuucug

SEQ ID NO: 1814308 - RNA, 22 nt, Human
cugacauuguuggccaaagcca

SEQ ID NO: 1814309 - RNA, 18 nt, Human
cugaccaauauuguacag

SEQ ID NO: 1814310 - RNA, 15 nt, Human
cugaccaauauugua

SEQ ID NO: 1814311 - RNA, 21 nt, Human
cugaccaauauuguacaguuu

SEQ ID NO: 1814312 - RNA, 20 nt, Human
cugaccaauauuguacaguu

SEQ ID NO: 1814313 - RNA, 19 nt, Human
cugaccaauauuguacagu

SEQ ID NO: 1814314 - RNA, 14 nt, Human
cugacccacugcuu

SEQ ID NO: 1814315 - RNA, 13 nt, Human
cugacccacugcu

SEQ ID NO: 1814316 - RNA, 13 nt, Human
cugacccaugcug

SEQ ID NO: 1814317 - RNA, 16 nt, Human
cugacccaugcugccc

SEQ ID NO: 1814318 - RNA, 14 nt, Human
cugacccaugcugc

SEQ ID NO: 1814319 - RNA, 15 nt, Human
cugacccaugcugcc

SEQ ID NO: 1814320 - RNA, 16 nt, Human
cugacuguuuucucuu

SEQ ID NO: 1814321 - RNA, 18 nt, Human
cugacuguuuucucuuga

SEQ ID NO: 1814322 - RNA, 11 nt, Human
cugagaaauuu

SEQ ID NO: 1814323 - RNA, 14 nt, Human
cugagaaauuuaua

SEQ ID NO: 1814324 - RNA, 14 nt, Human
cugagacagcccgg

SEQ ID NO: 1814325 - RNA, 15 nt, Human
cugagacagcccggg

SEQ ID NO: 1814326 - RNA, 20 nt, Human
cucccggcuaugggggcacu

SEQ ID NO: 1814327 - RNA, 18 nt, Human
cucccgaguagcugggac

SEQ ID NO: 1814328 - RNA, 19 nt, Human
cucccgaauagcugggacu

SEQ ID NO: 1814329 - RNA, 17 nt, Human
cucccgaguagcuggga

SEQ ID NO: 1814330 - RNA, 16 nt, Human
cucccgaguagcuggg

SEQ ID NO: 1814331 - RNA, 18 nt, Human
cucccgaauagcugggac

SEQ ID NO: 1814332 - RNA, 15 nt, Human
cucccgaguagcugg

SEQ ID NO: 1814333 - RNA, 16 nt, Human
cucccgaauagcuggg

SEQ ID NO: 1814334 - RNA, 17 nt, Human
cucccgaauagcuggga

SEQ ID NO: 1814335 - RNA, 13 nt, Human
cuccccugcuggg

SEQ ID NO: 1814336 - RNA, 14 nt, Human
cuccccugcugggu

SEQ ID NO: 1814337 - RNA, 12 nt, Human
cuccccugcugg

SEQ ID NO: 1814338 - RNA, 21 nt, Human
cuccccagcaagugagagcug

SEQ ID NO: 1814339 - RNA, 20 nt, Human
cuccccagcaagugagagcu

SEQ ID NO: 1814340 - RNA, 12 nt, Human
cuccccagcaag

SEQ ID NO: 1814341 - RNA, 18 nt, Human
cucacuauguugcccagg

SEQ ID NO: 1814342 - RNA, 14 nt, Human
cuccaucuccacuc

SEQ ID NO: 1814343 - RNA, 20 nt, Human
cuccauccugaggcuccacu

SEQ ID NO: 1814344 - RNA, 18 nt, Human
cuccauccugaggcucca

SEQ ID NO: 1814345 - RNA, 16 nt, Human
cuccauccugaggcuc

SEQ ID NO: 1814346 - RNA, 11 nt, Human
cuccauccuga

SEQ ID NO: 1814347 - RNA, 13 nt, Human
cuccaugugggcu

SEQ ID NO: 1814348 - RNA, 17 nt, Human
cucccaaagugcuggga

SEQ ID NO: 1814349 - RNA, 13 nt, Human
cuccaugucucug

SEQ ID NO: 1814350 - RNA, 22 nt, Human
cuccaugucucugagcauuaga

SEQ ID NO: 1814351 - RNA, 16 nt, Human
cuccaucuccacucca

SEQ ID NO: 1814352 - RNA, 11 nt, Human
cucccaucugu

SEQ ID NO: 1814353 - RNA, 14 nt, Human
cucccaucugugaa

SEQ ID NO: 1814354 - RNA, 15 nt, Human
cucccaucugugaaa

SEQ ID NO: 1814355 - RNA, 18 nt, Human
cucccaucugugaaagga

SEQ ID NO: 1814356 - RNA, 23 nt, Human
cucccaucugugaaaggaaagag

SEQ ID NO: 1814357 - RNA, 18 nt, Human
cucccaaagugcugggau

SEQ ID NO: 1814358 - RNA, 22 nt, Human
cucccaaagugcugggauuaca

SEQ ID NO: 1814359 - RNA, 17 nt, Human
cucccaacucaccccag

SEQ ID NO: 1814360 - RNA, 22 nt, Human
cucccaacucaccccagcccca

SEQ ID NO: 1814361 - RNA, 15 nt, Human
cuccgaccagacacc

SEQ ID NO: 1814362 - RNA, 13 nt, Human
cucccucauucca

SEQ ID NO: 1814363 - RNA, 22 nt, Human
cuccucuccccagcaagugaga

SEQ ID NO: 1814364 - RNA, 14 nt, Human
cuccucccggugcc

SEQ ID NO: 1814365 - RNA, 15 nt, Human
cuccucccggugccc

SEQ ID NO: 1814366 - RNA, 17 nt, Human
cuccucccggugcccaa

SEQ ID NO: 1814367 - RNA, 14 nt, Human
cuccugccucagcc

SEQ ID NO: 1814368 - RNA, 13 nt, Human
cuccugccucagc

SEQ ID NO: 1814369 - RNA, 11 nt, Human
cuccugcccuu

SEQ ID NO: 1814370 - RNA, 18 nt, Human
cuccugcaggcagccagg

SEQ ID NO: 1814371 - RNA, 20 nt, Human
cuccugcaggcagccaggcc

SEQ ID NO: 1814372 - RNA, 11 nt, Human
cuccugcaggc

SEQ ID NO: 1814373 - RNA, 12 nt, Human
cuccugcaggca

SEQ ID NO: 1814374 - RNA, 16 nt, Human
cuccugcaggcagcca

SEQ ID NO: 1814375 - RNA, 17 nt, Human
cuccugcaggcagccag

SEQ ID NO: 1814376 - RNA, 19 nt, Human
cuccugugugugcgccuac

SEQ ID NO: 1814377 - RNA, 16 nt, Human
cuccugugugugcgcc

SEQ ID NO: 1814378 - RNA, 15 nt, Human
cuccugccucagccu

SEQ ID NO: 1814379 - RNA, 16 nt, Human
cuccugccucagccuc

SEQ ID NO: 1814380 - RNA, 23 nt, Human
cucuagggaaaaaccagcgugug

SEQ ID NO: 1814381 - RNA, 13 nt, Human
cucuacccuggca

SEQ ID NO: 1814382 - RNA, 20 nt, Human
cucuaccauccccuguagag

SEQ ID NO: 1814383 - RNA, 17 nt, Human
cucuacuuagcaugucc

SEQ ID NO: 1814384 - RNA, 19 nt, Human
cucuacuuagcaugucccu

SEQ ID NO: 1814385 - RNA, 20 nt, Human
cucuacuuagcaugucccua

SEQ ID NO: 1814386 - RNA, 16 nt, Human
cucuacuuagcauguc

SEQ ID NO: 1814387 - RNA, 20 nt, Human
cuccugugugugcgccuaca

SEQ ID NO: 1814388 - RNA, 16 nt, Human
cuccuucacagauggg

SEQ ID NO: 1814389 - RNA, 17 nt, Human
cuccuucacagaugggu

SEQ ID NO: 1814390 - RNA, 13 nt, Human
cuccuucaccuuu

SEQ ID NO: 1814391 - RNA, 19 nt, Human
cuccuucacagaugggugc

SEQ ID NO: 1814392 - RNA, 17 nt, Human
cucggcucacugcaucc

SEQ ID NO: 1814393 - RNA, 18 nt, Human
cucggcucacugcauccu

SEQ ID NO: 1814394 - RNA, 14 nt, Human
cucggcucacugca

SEQ ID NO: 1814395 - RNA, 16 nt, Human
cucuacagaggccaug

SEQ ID NO: 1814396 - RNA, 14 nt, Human
cucuacagaggcca

SEQ ID NO: 1814397 - RNA, 19 nt, Human
cucuacagaggccaugggc

SEQ ID NO: 1814398 - RNA, 21 nt, Human
cucuacagcuaaucagcauuc

SEQ ID NO: 1814399 - RNA, 13 nt, Human
cucuacagaggcc

SEQ ID NO: 1814400 - RNA, 13 nt, Human
cucuacaaaaagc

SEQ ID NO: 1814401 - RNA, 24 nt, Human
cucuccccagcaagugagagcugg

SEQ ID NO: 1814402 - RNA, 12 nt, Human
cucuccucugcu

SEQ ID NO: 1814403 - RNA, 22 nt, Human
cucuccccagcaagugagagcu

SEQ ID NO: 1814404 - RNA, 14 nt, Human
cucuccccagcaag

SEQ ID NO: 1814405 - RNA, 15 nt, Human
cucuccacugccuuc

SEQ ID NO: 1814406 - RNA, 19 nt, Human
cucuccagccccuggaugc

SEQ ID NO: 1814407 - RNA, 13 nt, Human
cucuccucugcug

SEQ ID NO: 1814408 - RNA, 14 nt, Human
cucuccucugcugc

SEQ ID NO: 1814409 - RNA, 15 nt, Human
cucuccucugcugcu

SEQ ID NO: 1814410 - RNA, 18 nt, Human
cucuccucugcugcuggc

SEQ ID NO: 1814411 - RNA, 14 nt, Human
cucuccucuugcca

SEQ ID NO: 1814412 - RNA, 15 nt, Human
cucuccucuugccac

SEQ ID NO: 1814413 - RNA, 16 nt, Human
cucuccucuugccacu

SEQ ID NO: 1814414 - RNA, 17 nt, Human
cucuccucuugccacug

SEQ ID NO: 1814415 - RNA, 19 nt, Human
cucuccucuugccacugcc

SEQ ID NO: 1814416 - RNA, 22 nt, Human
cucuccucuugccacugccucu

SEQ ID NO: 1814417 - RNA, 14 nt, Human
cucucucacuccuu

SEQ ID NO: 1814418 - RNA, 13 nt, Human
cucucucaggcca

SEQ ID NO: 1814419 - RNA, 12 nt, Human
cucucucacucc

SEQ ID NO: 1814420 - RNA, 21 nt, Human
cucuaguuugauuaaauucuu

SEQ ID NO: 1814421 - RNA, 20 nt, Human
cucuaguuugauuaaauucu

SEQ ID NO: 1814422 - RNA, 19 nt, Human
cucuaguuugauuaaauuc

SEQ ID NO: 1814423 - RNA, 15 nt, Human
cucuaguuugauuaa

SEQ ID NO: 1814424 - RNA, 12 nt, Human
cucucaggccaa

SEQ ID NO: 1814425 - RNA, 20 nt, Human
cucucaggccaaacucaccu

SEQ ID NO: 1814426 - RNA, 21 nt, Human
cucucaggccaaacucaccug

SEQ ID NO: 1814427 - RNA, 22 nt, Human
cucucaggccaaacucaccugc

SEQ ID NO: 1814428 - RNA, 23 nt, Human
cucucaggccaaacucaccugcc

SEQ ID NO: 1814429 - RNA, 13 nt, Human
cucucaggccagc

SEQ ID NO: 1814430 - RNA, 15 nt, Human
cucucaggccagcug

SEQ ID NO: 1814431 - RNA, 17 nt, Human
cucucaggccagcugcu

SEQ ID NO: 1814432 - RNA, 18 nt, Human
cucucaggccagcugcuu

SEQ ID NO: 1814433 - RNA, 19 nt, Human
cucucaggccagcugcuug

SEQ ID NO: 1814434 - RNA, 21 nt, Human
cucucaggccagcugcuuggg

SEQ ID NO: 1814435 - RNA, 11 nt, Human
cucuccacugc

SEQ ID NO: 1814436 - RNA, 12 nt, Human
cucuccacugcc

SEQ ID NO: 1814437 - RNA, 14 nt, Human
cucuccacugccuu

SEQ ID NO: 1814438 - RNA, 14 nt, Human
cucuccagccccug

SEQ ID NO: 1814439 - RNA, 15 nt, Human
cucuccagccccugg

SEQ ID NO: 1814440 - RNA, 16 nt, Human
cucuccagccccugga

SEQ ID NO: 1814441 - RNA, 17 nt, Human
cucuccagccccuggau

SEQ ID NO: 1814442 - RNA, 18 nt, Human
cucuccagccccuggaug

SEQ ID NO: 1814443 - RNA, 17 nt, Human
cggugagcuacaaaugc

SEQ ID NO: 1814444 - RNA, 21 nt, Human
cggugagaggggaacagacug

SEQ ID NO: 1814445 - RNA, 20 nt, Human
cggugagaggggaacagacu

SEQ ID NO: 1814446 - RNA, 20 nt, Human
cgguccacccaggagccccg

SEQ ID NO: 1814447 - RNA, 16 nt, Human
cgguccacccaggagc

SEQ ID NO: 1814448 - RNA, 15 nt, Human
cgguccacccaggag

SEQ ID NO: 1814449 - RNA, 14 nt, Human
cgguccacccagga

SEQ ID NO: 1814450 - RNA, 19 nt, Human
cgggucacaggagggaggg

SEQ ID NO: 1814451 - RNA, 11 nt, Human
cgggucacagg

SEQ ID NO: 1814452 - RNA, 22 nt, Human
cgggcacucagaagacacugau

SEQ ID NO: 1814453 - RNA, 14 nt, Human
cgggcacucagaag

SEQ ID NO: 1814454 - RNA, 22 nt, Human
cggggacagcuccuucuguccu

SEQ ID NO: 1814455 - RNA, 17 nt, Human
cgggauuaguacacacu

SEQ ID NO: 1814456 - RNA, 18 nt, Human
cgggaggucgaggcagga

SEQ ID NO: 1814457 - RNA, 20 nt, Human
cgggaggucgaggcaggagg

SEQ ID NO: 1814458 - RNA, 23 nt, Human
cggcuggccuggccccucagggu

SEQ ID NO: 1814459 - RNA, 22 nt, Human
cggcuggccuggccccucaggg

SEQ ID NO: 1814460 - RNA, 15 nt, Human
cgggggcagagaggg

SEQ ID NO: 1814461 - RNA, 16 nt, Human
cgggguggauuggauu

SEQ ID NO: 1814462 - RNA, 23 nt, Human
cggggacagcuccuucuguccua

SEQ ID NO: 1814463 - RNA, 14 nt, Human
cggccuccauccug

SEQ ID NO: 1814464 - RNA, 12 nt, Human
cggccuccaucc

SEQ ID NO: 1814465 - RNA, 11 nt, Human
cggcugcccuu

SEQ ID NO: 1814466 - RNA, 12 nt, Human
cggcugcccuuu

SEQ ID NO: 1814467 - RNA, 24 nt, Human
cggccaggccagagggagugacag

SEQ ID NO: 1814468 - RNA, 19 nt, Human
cggccccugcugguucagg

SEQ ID NO: 1814469 - RNA, 18 nt, Human
cggccccugcugguucag

SEQ ID NO: 1814470 - RNA, 13 nt, Human
cggccccugcugg

SEQ ID NO: 1814471 - RNA, 13 nt, Human
cggcauuuguuuc

SEQ ID NO: 1814472 - RNA, 11 nt, Human
cggccaccugc

SEQ ID NO: 1814473 - RNA, 15 nt, Human
cggccaccugcggug

SEQ ID NO: 1814474 - RNA, 16 nt, Human
cggccaccugcggugc

SEQ ID NO: 1814475 - RNA, 17 nt, Human
cggccaccugcggugcu

SEQ ID NO: 1814476 - RNA, 14 nt, Human
cggaauaguuggcu

SEQ ID NO: 1814477 - RNA, 13 nt, Human
cggaagagccuug

SEQ ID NO: 1814478 - RNA, 22 nt, Human
cgcuaagagggagggagggcuc

SEQ ID NO: 1814479 - RNA, 16 nt, Human
cgcuacccgggaaggg

SEQ ID NO: 1814480 - RNA, 16 nt, Human
cgcucagcccucccug

SEQ ID NO: 1814481 - RNA, 21 nt, Human
cgcucagcccucccugccccu

SEQ ID NO: 1814482 - RNA, 12 nt, Human
cgcucagcccuc

SEQ ID NO: 1814483 - RNA, 17 nt, Human
cgcuacccgggaagggg

SEQ ID NO: 1814484 - RNA, 15 nt, Human
cgcucucuggccuuc

SEQ ID NO: 1814485 - RNA, 14 nt, Human
cgcucucuggccuu

SEQ ID NO: 1814486 - RNA, 20 nt, Human
cggaaaacaugcuacacacu

SEQ ID NO: 1814487 - RNA, 15 nt, Human
cggaaaacaugcuac

SEQ ID NO: 1814488 - RNA, 18 nt, Human
cgcugugcugcccugccc

SEQ ID NO: 1814489 - RNA, 15 nt, Human
cgcugugcugcccug

SEQ ID NO: 1814490 - RNA, 16 nt, Human
cgcugugcugcccugc

SEQ ID NO: 1814491 - RNA, 17 nt, Human
cgcugugcugcccugcc

SEQ ID NO: 1814492 - RNA, 22 nt, Human
cgcugucagccauuccuguucc

SEQ ID NO: 1814493 - RNA, 18 nt, Human
cgcucucuggccuucggc

SEQ ID NO: 1814494 - RNA, 17 nt, Human
cgccaucccagccccaa

SEQ ID NO: 1814495 - RNA, 23 nt, Human
cgccaggggaaaaucagccugcu

SEQ ID NO: 1814496 - RNA, 14 nt, Human
cgccaucccagccc

SEQ ID NO: 1814497 - RNA, 16 nt, Human
cgccaucccagcccca

SEQ ID NO: 1814498 - RNA, 22 nt, Human
cgccagauucuuuccugaggcu

SEQ ID NO: 1814499 - RNA, 17 nt, Human
ccucugcccacucccug

SEQ ID NO: 1814500 - RNA, 19 nt, Human
ccucugcccacucccugca

SEQ ID NO: 1814501 - RNA, 20 nt, Human
ccucugcccacucccugcaa

SEQ ID NO: 1814502 - RNA, 22 nt, Human
cgcccaggcuuagucacugaga

SEQ ID NO: 1814503 - RNA, 12 nt, Human
cgcccagucugg

SEQ ID NO: 1814504 - RNA, 19 nt, Human
cgccccucccacagcgcug

SEQ ID NO: 1814505 - RNA, 21 nt, Human
cgccccucccacagcgcuggc

SEQ ID NO: 1814506 - RNA, 13 nt, Human
cgccccuuccccc

SEQ ID NO: 1814507 - RNA, 16 nt, Human
cgcccuggacugugug

SEQ ID NO: 1814508 - RNA, 15 nt, Human
cuaacauggaaguac

SEQ ID NO: 1814509 - RNA, 17 nt, Human
cuaacauggaaguacua

SEQ ID NO: 1814510 - RNA, 15 nt, Human
cuaacaugauuuggg

SEQ ID NO: 1814511 - RNA, 23 nt, Human
cuaaauugacacuuaaaaauggu

SEQ ID NO: 1814512 - RNA, 16 nt, Human
cuaaauguugaaagau

SEQ ID NO: 1814513 - RNA, 20 nt, Human
cuaaaucuccaaaauaaaac

SEQ ID NO: 1814514 - RNA, 15 nt, Human
cuaaauggaaccacu

SEQ ID NO: 1814515 - RNA, 17 nt, Human
cuaaauggaaccacucu

SEQ ID NO: 1814516 - RNA, 16 nt, Human
cuaaauggaaccacuc

SEQ ID NO: 1814517 - RNA, 18 nt, Human
cuaaauggaaccacucua

SEQ ID NO: 1814518 - RNA, 18 nt, Human
cuaaauauauuuuaagac

SEQ ID NO: 1814519 - RNA, 20 nt, Human
cuaaauauauuuuaagacga

SEQ ID NO: 1814520 - RNA, 20 nt, Human
cguggcuucccgcucagccc

SEQ ID NO: 1814521 - RNA, 21 nt, Human
cguggcuucccgcucagcccu

SEQ ID NO: 1814522 - RNA, 18 nt, Human
cguggcuucccgcucagc

SEQ ID NO: 1814523 - RNA, 19 nt, Human
cguggcuucccgcucagcc

SEQ ID NO: 1814524 - RNA, 20 nt, Human
cguggaacguuuuuccuguu

SEQ ID NO: 1814525 - RNA, 15 nt, Human
cguggaacguuuuuc

SEQ ID NO: 1814526 - RNA, 19 nt, Human
cgugcacacaccagagccc

SEQ ID NO: 1814527 - RNA, 18 nt, Human
cgugcacacaccagagcc

SEQ ID NO: 1814528 - RNA, 22 nt, Human
cgugcaguggugcgaucugggu

SEQ ID NO: 1814529 - RNA, 21 nt, Human
cgugcaguggugcgaucuggg

SEQ ID NO: 1814530 - RNA, 23 nt, Human
cgugcauaccacuuuuguucuug

SEQ ID NO: 1814531 - RNA, 22 nt, Human
cgucugacaggcaaugcuggcu

SEQ ID NO: 1814532 - RNA, 21 nt, Human
cgucugacaggcaaugcuggc

SEQ ID NO: 1814533 - RNA, 20 nt, Human
cgucugacaggcaaugcugg

SEQ ID NO: 1814534 - RNA, 16 nt, Human
cgugcacacaccagag

SEQ ID NO: 1814535 - RNA, 16 nt, Human
cgucgacguagaaccu

SEQ ID NO: 1814536 - RNA, 16 nt, Human
cgucucauacucaccu

SEQ ID NO: 1814537 - RNA, 16 nt, Human
cgucuaccugaggggc

SEQ ID NO: 1814538 - RNA, 18 nt, Human
cggugcuaucucccccag

SEQ ID NO: 1814539 - RNA, 20 nt, Human
cggugcuaucucccccagcc

SEQ ID NO: 1814540 - RNA, 21 nt, Human
cggugcuaucucccccagccc

SEQ ID NO: 1814541 - RNA, 22 nt, Human
cggugcuaucucccccagcccc

SEQ ID NO: 1814542 - RNA, 13 nt, Human
cucacauuuauau

SEQ ID NO: 1814543 - RNA, 19 nt, Human
cucaccagccccagugccc

SEQ ID NO: 1814544 - RNA, 20 nt, Human
cucacauagcuuacaagcca

SEQ ID NO: 1814545 - RNA, 21 nt, Human
cucaccagccccagugcccac

SEQ ID NO: 1814546 - RNA, 20 nt, Human
cucaccagccccagugccca

SEQ ID NO: 1814547 - RNA, 20 nt, Human
cucaagugauucuccugccu

SEQ ID NO: 1814548 - RNA, 19 nt, Human
cucaagugauucuccugcc

SEQ ID NO: 1814549 - RNA, 18 nt, Human
cucaagugauucuccugc

SEQ ID NO: 1814550 - RNA, 17 nt, Human
cucacuauguugcccag

SEQ ID NO: 1814551 - RNA, 16 nt, Human
cucacuauguugccca

SEQ ID NO: 1814552 - RNA, 20 nt, Human
cucacuaggcuucugguuga

SEQ ID NO: 1814553 - RNA, 20 nt, Human
cucacuaucccggcugcccu

SEQ ID NO: 1814554 - RNA, 21 nt, Human
cucacuaucccggcugcccuu

SEQ ID NO: 1814555 - RNA, 13 nt, Human
cucacuaggcuuc

SEQ ID NO: 1814556 - RNA, 16 nt, Human
cucacuaggcuucugg

SEQ ID NO: 1814557 - RNA, 17 nt, Human
cucaccccuugccauaa

SEQ ID NO: 1814558 - RNA, 14 nt, Human
cucaccccagcccc

SEQ ID NO: 1814559 - RNA, 12 nt, Human
cucaccccagcc

SEQ ID NO: 1814560 - RNA, 13 nt, Human
cucaccccagccc

SEQ ID NO: 1814561 - RNA, 19 nt, Human
cucaagagggcacuggugg

SEQ ID NO: 1814562 - RNA, 21 nt, Human
cucaagagggcacugguggcc

SEQ ID NO: 1814563 - RNA, 17 nt, Human
cucaagagggcacuggu

SEQ ID NO: 1814564 - RNA, 13 nt, Human
cucaaauuucuaa

SEQ ID NO: 1814565 - RNA, 20 nt, Human
cucaacucuccuccagaguc

SEQ ID NO: 1814566 - RNA, 21 nt, Human
cucaacucuccuccagaguca

SEQ ID NO: 1814567 - RNA, 18 nt, Human
cuauuuuaauaaacacuc

SEQ ID NO: 1814568 - RNA, 22 nt, Human
cuauuuuaauaaacacucuuga

SEQ ID NO: 1814569 - RNA, 14 nt, Human
cuaugcauuugaaa

SEQ ID NO: 1814570 - RNA, 21 nt, Human
cuaugcauuugaaaauuuuga

SEQ ID NO: 1814571 - RNA, 12 nt, Human
cuaugcauuuga

SEQ ID NO: 1814572 - RNA, 11 nt, Human
cuaugcauuug

SEQ ID NO: 1814573 - RNA, 19 nt, Human
cuagugugguguuuccugg

SEQ ID NO: 1814574 - RNA, 21 nt, Human
cuagugugguguuuccuggca

SEQ ID NO: 1814575 - RNA, 22 nt, Human
cuagugugguguuuccuggcac

SEQ ID NO: 1814576 - RNA, 23 nt, Human
cuagugugguguuuccuggcacu

SEQ ID NO: 1814577 - RNA, 16 nt, Human
cuaggcaggaccugug

SEQ ID NO: 1814578 - RNA, 15 nt, Human
cuaggcaggaccugu

SEQ ID NO: 1814579 - RNA, 21 nt, Human
cuaggcauuugcugaauacag

SEQ ID NO: 1814580 - RNA, 23 nt, Human
cuaguaucaaaagaaagaaaauc

SEQ ID NO: 1814581 - RNA, 17 nt, Human
cuaguaucaaaagaaag

SEQ ID NO: 1814582 - RNA, 15 nt, Human
cuaguaucaaaagaa

SEQ ID NO: 1814583 - RNA, 22 nt, Human
cuaggaccccuccaugugggcu

SEQ ID NO: 1814584 - RNA, 17 nt, Human
cuaggaggucucuaaga

SEQ ID NO: 1814585 - RNA, 16 nt, Human
cuaggaaauccagggu

SEQ ID NO: 1814586 - RNA, 17 nt, Human
cuaggaaauccagggug

SEQ ID NO: 1814587 - RNA, 21 nt, Human
cuaggaagacuuuggaaagag

SEQ ID NO: 1814588 - RNA, 13 nt, Human
cuaggaacacucc

SEQ ID NO: 1814589 - RNA, 15 nt, Human
cuaggaacacuccuu

SEQ ID NO: 1814590 - RNA, 12 nt, Human
cuagcagcaggg

SEQ ID NO: 1814591 - RNA, 23 nt, Human
cuauauuguuuucaguguacaug

SEQ ID NO: 1814592 - RNA, 20 nt, Human
cuauauuuuuuguuaaauga

SEQ ID NO: 1814593 - RNA, 22 nt, Human
cuauauuguuuucaguguacau

SEQ ID NO: 1814594 - RNA, 22 nt, Human
cuauauuuuuuguuaaaugauu

SEQ ID NO: 1814595 - RNA, 20 nt, Human
cuaucaaguauuauaccuuu

SEQ ID NO: 1814596 - RNA, 14 nt, Human
cuaugacacaugca

SEQ ID NO: 1814597 - RNA, 14 nt, Human
cuaguuccaccauc

SEQ ID NO: 1814598 - RNA, 15 nt, Human
cuacaagacacagug

SEQ ID NO: 1814599 - RNA, 19 nt, Human
cuaaugaaugcauaaaaug

SEQ ID NO: 1814600 - RNA, 22 nt, Human
cuaaugaaugcauaaaauguua

SEQ ID NO: 1814601 - RNA, 16 nt, Human
cuaauguacugcauau

SEQ ID NO: 1814602 - RNA, 14 nt, Human
cuaauguacugcau

SEQ ID NO: 1814603 - RNA, 16 nt, Human
cuaaggugugcucuga

SEQ ID NO: 1814604 - RNA, 12 nt, Human
cuaauaaagcug

SEQ ID NO: 1814605 - RNA, 21 nt, Human
cuaauaaaauuuaaaagucuu

SEQ ID NO: 1814606 - RNA, 13 nt, Human
cuaauaaagcugu

SEQ ID NO: 1814607 - RNA, 17 nt, Human
cuaaucagcauucucac

SEQ ID NO: 1814608 - RNA, 19 nt, Human
cuaaucagcauucucacuc

SEQ ID NO: 1814609 - RNA, 16 nt, Human
cuaauccucuuuuucu

SEQ ID NO: 1814610 - RNA, 15 nt, Human
cuacagaggccaugg

SEQ ID NO: 1814611 - RNA, 15 nt, Human
cuacacacugcaugu

SEQ ID NO: 1814612 - RNA, 13 nt, Human
cuacacacugcau

SEQ ID NO: 1814613 - RNA, 18 nt, Human
cuacacugugcugagucu

SEQ ID NO: 1814614 - RNA, 17 nt, Human
cuacacuccagugagac

SEQ ID NO: 1814615 - RNA, 21 nt, Human
cuacacacugcauguuuguga

SEQ ID NO: 1814616 - RNA, 16 nt, Human
cuacacuccagugaga

SEQ ID NO: 1814617 - RNA, 19 nt, Human
cuacccagcgagcccuggu

SEQ ID NO: 1814618 - RNA, 20 nt, Human
cuacccagcgagcccuggug

SEQ ID NO: 1814619 - RNA, 12 nt, Human
cuacccaggugc

SEQ ID NO: 1814620 - RNA, 22 nt, Human
cuacccacccuccuuucaccac

SEQ ID NO: 1814621 - RNA, 17 nt, Human
cuacccacccuccuuuc

SEQ ID NO: 1814622 - RNA, 18 nt, Human
cuaccauccccuguagag

SEQ ID NO: 1814623 - RNA, 17 nt, Human
cuacagaggccaugggc

SEQ ID NO: 1814624 - RNA, 17 nt, Human
cuaaccacgcuggaccu

SEQ ID NO: 1814625 - RNA, 16 nt, Human
cuaaccagcagaaaug

SEQ ID NO: 1814626 - RNA, 17 nt, Human
cuaaccagcagaaaugc

SEQ ID NO: 1814627 - RNA, 14 nt, Human
cuaagcaaaaugug

SEQ ID NO: 1814628 - RNA, 23 nt, Human
cuaagcacgggccauaugaauaa

SEQ ID NO: 1814629 - RNA, 20 nt, Human
cuaagcacgggccauaugaa

SEQ ID NO: 1814630 - RNA, 18 nt, Human
cuaagcaaaaugugauau

SEQ ID NO: 1814631 - RNA, 15 nt, Human
cuaagcaaaauguga

SEQ ID NO: 1814632 - RNA, 19 nt, Human
cuaagcuauucaguaauaa

SEQ ID NO: 1814633 - RNA, 21 nt, Human
cuaagcuauucaguaauaacu

SEQ ID NO: 1814634 - RNA, 15 nt, Human
cuaaggugugcucug

SEQ ID NO: 1814635 - RNA, 14 nt, Human
cuaaggcugaacuu

SEQ ID NO: 1814636 - RNA, 21 nt, Human
cuacucugugucagguggggc

SEQ ID NO: 1814637 - RNA, 16 nt, Human
cuacucugugucaggu

SEQ ID NO: 1814638 - RNA, 14 nt, Human
cuacccgggaaggg

SEQ ID NO: 1814639 - RNA, 15 nt, Human
cuacccgggaagggg

SEQ ID NO: 1814640 - RNA, 20 nt, Human
cuacccgggaagggggcugg

SEQ ID NO: 1814641 - RNA, 21 nt, Human
cuacccgggaagggggcuggg

SEQ ID NO: 1814642 - RNA, 21 nt, Human
cuacuguaaggcaaucauggu

SEQ ID NO: 1814643 - RNA, 16 nt, Human
cuacuguaauuuguga

SEQ ID NO: 1814644 - RNA, 17 nt, Human
cuacuguaauuugugau

SEQ ID NO: 1814645 - RNA, 14 nt, Human
cuacugaggugcua

SEQ ID NO: 1814646 - RNA, 20 nt, Human
cuacuuccugugacuucagc

SEQ ID NO: 1814647 - RNA, 14 nt, Human
cuacuuccccuucc

SEQ ID NO: 1814648 - RNA, 15 nt, Human
cuacuuccccuuccu

SEQ ID NO: 1814649 - RNA, 20 nt, Human
cuacuuccccuuccuaauuc

SEQ ID NO: 1814650 - RNA, 19 nt, Human
cuacuugggaggcugagau

SEQ ID NO: 1814651 - RNA, 18 nt, Human
cuacuugggaggcugaga

SEQ ID NO: 1814652 - RNA, 15 nt, Human
cuacuugggaggcug

SEQ ID NO: 1814653 - RNA, 18 nt, Human
cuagacucccaagcugga

SEQ ID NO: 1814654 - RNA, 20 nt, Human
cuagacgagcaggcuucuuc

SEQ ID NO: 1814655 - RNA, 21 nt, Human
cuagacgagcaggcuucuucc

SEQ ID NO: 1814656 - RNA, 17 nt, Human
cuagagugaacuugggc

SEQ ID NO: 1814657 - RNA, 21 nt, Human
cuagagugaacuugggccacu

SEQ ID NO: 1814658 - RNA, 15 nt, Human
cuagagguucaaaga

SEQ ID NO: 1814659 - RNA, 17 nt, Human
cuagcacuuugggaggc

SEQ ID NO: 1814660 - RNA, 21 nt, Human
cuacuguaauuugugauacaa

SEQ ID NO: 1814661 - RNA, 16 nt, Human
ccuaaaauucagugga

SEQ ID NO: 1814662 - RNA, 13 nt, Human
ccuaaacauauga

SEQ ID NO: 1814663 - RNA, 22 nt, Human
ccuaacaacauuguagccucaa

SEQ ID NO: 1814664 - RNA, 21 nt, Human
ccuaacaacauuguagccuca

SEQ ID NO: 1814665 - RNA, 22 nt, Human
ccuacaguugaaaaacagcuga

SEQ ID NO: 1814666 - RNA, 19 nt, Human
ccuacagcuugaccgugag

SEQ ID NO: 1814667 - RNA, 13 nt, Human
ccuacccacccuc

SEQ ID NO: 1814668 - RNA, 18 nt, Human
ccuacccacccuccuuuc

SEQ ID NO: 1814669 - RNA, 19 nt, Human
ccuacuguaauuugugaua

SEQ ID NO: 1814670 - RNA, 21 nt, Human
ccuagaaauuccccacccuga

SEQ ID NO: 1814671 - RNA, 16 nt, Human
ccuacuuccccuuccu

SEQ ID NO: 1814672 - RNA, 13 nt, Human
ccuacuuccccuu

SEQ ID NO: 1814673 - RNA, 13 nt, Human
ccuaggugacaga

SEQ ID NO: 1814674 - RNA, 22 nt, Human
ccuagguauaauucacauugua

SEQ ID NO: 1814675 - RNA, 12 nt, Human
ccguuauuaaaa

SEQ ID NO: 1814676 - RNA, 16 nt, Human
ccgggagccugaucac

SEQ ID NO: 1814677 - RNA, 23 nt, Human
ccgggagccugaucaccugcccu

SEQ ID NO: 1814678 - RNA, 17 nt, Human
ccgggaagggggcuggg

SEQ ID NO: 1814679 - RNA, 17 nt, Human
ccggaggggccuggcag

SEQ ID NO: 1814680 - RNA, 21 nt, Human
ccggaggggccuggcagccgu

SEQ ID NO: 1814681 - RNA, 22 nt, Human
cccuuguggucccaccccacac

SEQ ID NO: 1814682 - RNA, 22 nt, Human
cccuugguuaggcauuguggga

SEQ ID NO: 1814683 - RNA, 23 nt, Human
cccuugguuaggcauugugggaa

SEQ ID NO: 1814684 - RNA, 21 nt, Human
cccuuccuaauuccacagcug

SEQ ID NO: 1814685 - RNA, 11 nt, Human
cccuucuuuuu

SEQ ID NO: 1814686 - RNA, 19 nt, Human
cccuucuuuuucuucuuuu

SEQ ID NO: 1814687 - RNA, 17 nt, Human
cccuuggauuguccccg

SEQ ID NO: 1814688 - RNA, 13 nt, Human
cccuucccaccuc

SEQ ID NO: 1814689 - RNA, 11 nt, Human
cccuucauuug

SEQ ID NO: 1814690 - RNA, 12 nt, Human
cccuucccaccu

SEQ ID NO: 1814691 - RNA, 13 nt, Human
cccuuccuaauuc

SEQ ID NO: 1814692 - RNA, 14 nt, Human
cccuuccuaauucc

SEQ ID NO: 1814693 - RNA, 19 nt, Human
cccuuccuaauuccacagc

SEQ ID NO: 1814694 - RNA, 20 nt, Human
cccuuccuaauuccacagcu

SEQ ID NO: 1814695 - RNA, 14 nt, Human
cccuguucacucua

SEQ ID NO: 1814696 - RNA, 22 nt, Human
cccuguucacucuacuuagcau

SEQ ID NO: 1814697 - RNA, 13 nt, Human
cccuguucacucu

SEQ ID NO: 1814698 - RNA, 15 nt, Human
ccuaggugacagagu

SEQ ID NO: 1814699 - RNA, 24 nt, Human
ccucacaguccuuaccagcagagc

SEQ ID NO: 1814700 - RNA, 23 nt, Human
ccucacaguccuuaccagcagag

SEQ ID NO: 1814701 - RNA, 16 nt, Human
ccuauuagagaagaga

SEQ ID NO: 1814702 - RNA, 17 nt, Human
ccuauuagagaagagau

SEQ ID NO: 1814703 - RNA, 16 nt, Human
ccucagagccaccccu

SEQ ID NO: 1814704 - RNA, 14 nt, Human
ccucacccuggggc

SEQ ID NO: 1814705 - RNA, 16 nt, Human
ccucagaucuucugug

SEQ ID NO: 1814706 - RNA, 16 nt, Human
ccucagggucccuggu

SEQ ID NO: 1814707 - RNA, 17 nt, Human
ccucagggucccuggug

SEQ ID NO: 1814708 - RNA, 20 nt, Human
ccucagggucccugguggca

SEQ ID NO: 1814709 - RNA, 22 nt, Human
ccucagggucccugguggcagc

SEQ ID NO: 1814710 - RNA, 22 nt, Human
ccucaggugagaagcagaggaa

SEQ ID NO: 1814711 - RNA, 19 nt, Human
ccuccaugcugccuccaga

SEQ ID NO: 1814712 - RNA, 16 nt, Human
ccuccaugcugccucc

SEQ ID NO: 1814713 - RNA, 14 nt, Human
ccuccauccugagg

SEQ ID NO: 1814714 - RNA, 13 nt, Human
ccuccauccugag

SEQ ID NO: 1814715 - RNA, 12 nt, Human
ccuccauccuga

SEQ ID NO: 1814716 - RNA, 17 nt, Human
ccucccaaagugcuggg

SEQ ID NO: 1814717 - RNA, 14 nt, Human
ccucccaacucacc

SEQ ID NO: 1814718 - RNA, 15 nt, Human
ccuccaugugggcua

SEQ ID NO: 1814719 - RNA, 12 nt, Human
ccuccauguggg

SEQ ID NO: 1814720 - RNA, 17 nt, Human
ccuccaggugcacaagc

SEQ ID NO: 1814721 - RNA, 11 nt, Human
ccuccaggugc

SEQ ID NO: 1814722 - RNA, 12 nt, Human
ccuccaggugca

SEQ ID NO: 1814723 - RNA, 12 nt, Human
ccucauacccac

SEQ ID NO: 1814724 - RNA, 17 nt, Human
ccucaggugagaagcag

SEQ ID NO: 1814725 - RNA, 18 nt, Human
ccucaggugagaagcaga

SEQ ID NO: 1814726 - RNA, 20 nt, Human
ccucaggugagaagcagagg

SEQ ID NO: 1814727 - RNA, 18 nt, Human
ccucccgaauagcuggga

SEQ ID NO: 1814728 - RNA, 15 nt, Human
ccuccccuccuccug

SEQ ID NO: 1814729 - RNA, 23 nt, Human
ccucccaaagugcugggauuaca

SEQ ID NO: 1814730 - RNA, 15 nt, Human
ccucccaacucaccc

SEQ ID NO: 1814731 - RNA, 20 nt, Human
ccucccgaauagcugggacu

SEQ ID NO: 1814732 - RNA, 19 nt, Human
ccucccgaauagcugggac

SEQ ID NO: 1814733 - RNA, 21 nt, Human
ccucccgaauagcugggacua

SEQ ID NO: 1814734 - RNA, 18 nt, Human
ccucccgaguagcuggga

SEQ ID NO: 1814735 - RNA, 17 nt, Human
ccucccgaguagcuggg

SEQ ID NO: 1814736 - RNA, 19 nt, Human
ccucccgaguagcugggac

SEQ ID NO: 1814737 - RNA, 13 nt, Human
ccucccucuuucc

SEQ ID NO: 1814738 - RNA, 11 nt, Human
ccuccucagau

SEQ ID NO: 1814739 - RNA, 12 nt, Human
ccuccuccagcc

SEQ ID NO: 1814740 - RNA, 20 nt, Human
ccucugacacacagcucugu

SEQ ID NO: 1814741 - RNA, 19 nt, Human
ccucugacacacagcucug

SEQ ID NO: 1814742 - RNA, 14 nt, Human
ccucugacacacag

SEQ ID NO: 1814743 - RNA, 15 nt, Human
ccucugacacacagc

SEQ ID NO: 1814744 - RNA, 13 nt, Human
ccucugacacaca

SEQ ID NO: 1814745 - RNA, 21 nt, Human
ccucugacacacagcucuguc

SEQ ID NO: 1814746 - RNA, 19 nt, Human
ccucugcagcaauaaagca

SEQ ID NO: 1814747 - RNA, 19 nt, Human
ccucugcacuccccugcug

SEQ ID NO: 1814748 - RNA, 13 nt, Human
ccucugcccacuc

SEQ ID NO: 1814749 - RNA, 16 nt, Human
ccucugcccacucccu

SEQ ID NO: 1814750 - RNA, 18 nt, Human
ccucugcagcaauaaagc

SEQ ID NO: 1814751 - RNA, 14 nt, Human
ccucugcagcaaua

SEQ ID NO: 1814752 - RNA, 23 nt, Human
ccucugcacuccccugcugggug

SEQ ID NO: 1814753 - RNA, 18 nt, Human
ccucugcacuccccugcu

SEQ ID NO: 1814754 - RNA, 13 nt, Human
ccucugaggcuga

SEQ ID NO: 1814755 - RNA, 11 nt, Human
ccucugagccu

SEQ ID NO: 1814756 - RNA, 12 nt, Human
ccucugagccuu

SEQ ID NO: 1814757 - RNA, 16 nt, Human
ccucugcacuccccug

SEQ ID NO: 1814758 - RNA, 17 nt, Human
ccucugcacuccccugc

SEQ ID NO: 1814759 - RNA, 15 nt, Human
ccucuccccagcaag

SEQ ID NO: 1814760 - RNA, 20 nt, Human
ccucuccccagcaagugaga

SEQ ID NO: 1814761 - RNA, 13 nt, Human
ccucucccuugga

SEQ ID NO: 1814762 - RNA, 22 nt, Human
ccucucccuuggauuguccccg

SEQ ID NO: 1814763 - RNA, 21 nt, Human
ccuccuccagccgccaugcuc

SEQ ID NO: 1814764 - RNA, 16 nt, Human
ccuccucucugcccua

SEQ ID NO: 1814765 - RNA, 13 nt, Human
ccuccucucugcc

SEQ ID NO: 1814766 - RNA, 15 nt, Human
ccuccucucugcccu

SEQ ID NO: 1814767 - RNA, 19 nt, Human
cccgcucagcccucccugc

SEQ ID NO: 1814768 - RNA, 22 nt, Human
cccgcuaagagggagggagggc

SEQ ID NO: 1814769 - RNA, 23 nt, Human
cccgcucagcccucccugccccu

SEQ ID NO: 1814770 - RNA, 15 nt, Human
cccgaggccuucucu

SEQ ID NO: 1814771 - RNA, 20 nt, Human
cccgaggccuucucugaagg

SEQ ID NO: 1814772 - RNA, 23 nt, Human
ccccuggcuuuucacugcuggcu

SEQ ID NO: 1814773 - RNA, 15 nt, Human
ccccuguaggccuca

SEQ ID NO: 1814774 - RNA, 22 nt, Human
ccccuguccccgcacugggcuu

SEQ ID NO: 1814775 - RNA, 20 nt, Human
ccccuuccuaauuccacagc

SEQ ID NO: 1814776 - RNA, 21 nt, Human
ccccuuccuaauuccacagcu

SEQ ID NO: 1814777 - RNA, 22 nt, Human
ccccuuccuaauuccacagcug

SEQ ID NO: 1814778 - RNA, 12 nt, Human
ccccuucccccu

SEQ ID NO: 1814779 - RNA, 20 nt, Human
ccccuguucuggcagaguug

SEQ ID NO: 1814780 - RNA, 14 nt, Human
ccccuuaccacugc

SEQ ID NO: 1814781 - RNA, 12 nt, Human
ccccaggaggcc

SEQ ID NO: 1814782 - RNA, 15 nt, Human
ccccuggcagccccu

SEQ ID NO: 1814783 - RNA, 12 nt, Human
ccccuggcagcc

SEQ ID NO: 1814784 - RNA, 14 nt, Human
ccccuggcagcccc

SEQ ID NO: 1814785 - RNA, 22 nt, Human
ccccaggugguuauggagaggg

SEQ ID NO: 1814786 - RNA, 19 nt, Human
ccccagcccuccuuaucaa

SEQ ID NO: 1814787 - RNA, 15 nt, Human
ccccagccccauccu

SEQ ID NO: 1814788 - RNA, 16 nt, Human
ccccagccccauccca

SEQ ID NO: 1814789 - RNA, 13 nt, Human
ccccagccugcua

SEQ ID NO: 1814790 - RNA, 21 nt, Human
ccccagcuggggccaggcugg

SEQ ID NO: 1814791 - RNA, 22 nt, Human
ccccagcuggggccaggcuggg

SEQ ID NO: 1814792 - RNA, 17 nt, Human
cccuccaugugggcuag

SEQ ID NO: 1814793 - RNA, 19 nt, Human
cccuccaucuaaacugccc

SEQ ID NO: 1814794 - RNA, 14 nt, Human
cccucccuucaacc

SEQ ID NO: 1814795 - RNA, 13 nt, Human
cccucccucuuuc

SEQ ID NO: 1814796 - RNA, 19 nt, Human
cccucauagcccucacccu

SEQ ID NO: 1814797 - RNA, 22 nt, Human
cccucaucaccaacgucugugc

SEQ ID NO: 1814798 - RNA, 17 nt, Human
cccucauccucauaccc

SEQ ID NO: 1814799 - RNA, 20 nt, Human
cccucauccucauacccacc

SEQ ID NO: 1814800 - RNA, 13 nt, Human
cccucauagcccu

SEQ ID NO: 1814801 - RNA, 15 nt, Human
cccucauagcccuca

SEQ ID NO: 1814802 - RNA, 21 nt, Human
cccucagggucccugguggca

SEQ ID NO: 1814803 - RNA, 20 nt, Human
cccucagucuggcccuuccu

SEQ ID NO: 1814804 - RNA, 22 nt, Human
cccucauuccaccuucccaugc

SEQ ID NO: 1814805 - RNA, 21 nt, Human
cccuccaagaccuucuccuuc

SEQ ID NO: 1814806 - RNA, 22 nt, Human
cccucauccucauacccacccc

SEQ ID NO: 1814807 - RNA, 17 nt, Human
cccggaggggccuggca

SEQ ID NO: 1814808 - RNA, 18 nt, Human
cccggaggggccuggcag

SEQ ID NO: 1814809 - RNA, 16 nt, Human
cccggcaggguccuag

SEQ ID NO: 1814810 - RNA, 13 nt, Human
cccuaaagccuca

SEQ ID NO: 1814811 - RNA, 22 nt, Human
cccuaaaguguauuuuuuuacu

SEQ ID NO: 1814812 - RNA, 17 nt, Human
cccuaaaguguauuuuu

SEQ ID NO: 1814813 - RNA, 15 nt, Human
cccuaauaaagcugu

SEQ ID NO: 1814814 - RNA, 18 nt, Human
cccuaauaaagcugugug

SEQ ID NO: 1814815 - RNA, 12 nt, Human
cccuaauaaagc

SEQ ID NO: 1814816 - RNA, 13 nt, Human
cccuaauaaagcu

SEQ ID NO: 1814817 - RNA, 14 nt, Human
cccuaauaaagcug

SEQ ID NO: 1814818 - RNA, 15 nt, Human
cccucagggucccug

SEQ ID NO: 1814819 - RNA, 16 nt, Human
cccucagggucccugg

SEQ ID NO: 1814820 - RNA, 17 nt, Human
cccucagggucccuggu

SEQ ID NO: 1814821 - RNA, 18 nt, Human
cccucagggucccuggug

SEQ ID NO: 1814822 - RNA, 19 nt, Human
cccucagggucccuggugg

SEQ ID NO: 1814823 - RNA, 22 nt, Human
cccugcaaccugauugugucuc

SEQ ID NO: 1814824 - RNA, 16 nt, Human
cccugcaaccugauug

SEQ ID NO: 1814825 - RNA, 12 nt, Human
cccugcagaggg

SEQ ID NO: 1814826 - RNA, 20 nt, Human
cccugcagagggcacagaaa

SEQ ID NO: 1814827 - RNA, 18 nt, Human
cccugcagagggcacaga

SEQ ID NO: 1814828 - RNA, 15 nt, Human
cccugccacccuggg

SEQ ID NO: 1814829 - RNA, 14 nt, Human
cccugccacccugg

SEQ ID NO: 1814830 - RNA, 12 nt, Human
cccugccacccu

SEQ ID NO: 1814831 - RNA, 18 nt, Human
cccugccacccuggggag

SEQ ID NO: 1814832 - RNA, 17 nt, Human
cccugccacccugggga

SEQ ID NO: 1814833 - RNA, 14 nt, Human
cccugccuccuuug

SEQ ID NO: 1814834 - RNA, 11 nt, Human
cccugccucuc

SEQ ID NO: 1814835 - RNA, 18 nt, Human
cccugccucucugcaggu

SEQ ID NO: 1814836 - RNA, 16 nt, Human
cccugccuccuuugug

SEQ ID NO: 1814837 - RNA, 23 nt, Human
cccugccuccuuugugaggaagc

SEQ ID NO: 1814838 - RNA, 22 nt, Human
cccugguggcagugggagcugc

SEQ ID NO: 1814839 - RNA, 17 nt, Human
cccuggugcugccacac

SEQ ID NO: 1814840 - RNA, 21 nt, Human
cccuggugcugccacacuuca

SEQ ID NO: 1814841 - RNA, 16 nt, Human
cccugggaggcucugg

SEQ ID NO: 1814842 - RNA, 17 nt, Human
cccugggaggcucugga

SEQ ID NO: 1814843 - RNA, 18 nt, Human
cccugggaggcucuggag

SEQ ID NO: 1814844 - RNA, 21 nt, Human
cccuggacugugugcucagga

SEQ ID NO: 1814845 - RNA, 20 nt, Human
cccugcugguucaggguugg

SEQ ID NO: 1814846 - RNA, 19 nt, Human
cccugcugguucaggguug

SEQ ID NO: 1814847 - RNA, 23 nt, Human
cccugcuuugggcugcccuggug

SEQ ID NO: 1814848 - RNA, 13 nt, Human
cccugcugguuca

SEQ ID NO: 1814849 - RNA, 16 nt, Human
cccugccucucugcag

SEQ ID NO: 1814850 - RNA, 21 nt, Human
cccugccucucugcagguccc

SEQ ID NO: 1814851 - RNA, 22 nt, Human
cccugccucucugcaggucccu

SEQ ID NO: 1814852 - RNA, 14 nt, Human
cccugguggcagcu

SEQ ID NO: 1814853 - RNA, 13 nt, Human
ccaugugccaggu

SEQ ID NO: 1814854 - RNA, 23 nt, Human
ccauggcacucuauguucuaaga

SEQ ID NO: 1814855 - RNA, 14 nt, Human
ccauguuggccagg

SEQ ID NO: 1814856 - RNA, 13 nt, Human
ccauguuggccag

SEQ ID NO: 1814857 - RNA, 14 nt, Human
ccaugcugccucca

SEQ ID NO: 1814858 - RNA, 16 nt, Human
ccaugcugcccuguga

SEQ ID NO: 1814859 - RNA, 17 nt, Human
ccaugcugcccugugag

SEQ ID NO: 1814860 - RNA, 15 nt, Human
ccaugcugcccugug

SEQ ID NO: 1814861 - RNA, 15 nt, Human
ccaugcuccuggccc

SEQ ID NO: 1814862 - RNA, 18 nt, Human
ccaugcuccuggcccacu

SEQ ID NO: 1814863 - RNA, 15 nt, Human
cccacgcccccacug

SEQ ID NO: 1814864 - RNA, 13 nt, Human
cccacgcccccac

SEQ ID NO: 1814865 - RNA, 14 nt, Human
cccacgcccccacu

SEQ ID NO: 1814866 - RNA, 20 nt, Human
cccaccuuggcugcagggag

SEQ ID NO: 1814867 - RNA, 19 nt, Human
cccaccuuggcugcaggga

SEQ ID NO: 1814868 - RNA, 17 nt, Human
cccaccuuggcugcagg

SEQ ID NO: 1814869 - RNA, 12 nt, Human
cccaccuggccu

SEQ ID NO: 1814870 - RNA, 15 nt, Human
cccaccuggccucug

SEQ ID NO: 1814871 - RNA, 21 nt, Human
ccauguuggccaggcuggucu

SEQ ID NO: 1814872 - RNA, 19 nt, Human
ccauguuggccaggcuggu

SEQ ID NO: 1814873 - RNA, 15 nt, Human
ccauguuggccaggc

SEQ ID NO: 1814874 - RNA, 18 nt, Human
ccauguuggccaggcugg

SEQ ID NO: 1814875 - RNA, 12 nt, Human
cccagcucuggu

SEQ ID NO: 1814876 - RNA, 13 nt, Human
cccagcucugguc

SEQ ID NO: 1814877 - RNA, 14 nt, Human
cccagcucuggucc

SEQ ID NO: 1814878 - RNA, 15 nt, Human
cccagcucuggucca

SEQ ID NO: 1814879 - RNA, 16 nt, Human
cccagcucugguccau

SEQ ID NO: 1814880 - RNA, 18 nt, Human
cccagcucugguccauag

SEQ ID NO: 1814881 - RNA, 14 nt, Human
cccagcgagcccug

SEQ ID NO: 1814882 - RNA, 18 nt, Human
cccaggagccccgaggcc

SEQ ID NO: 1814883 - RNA, 14 nt, Human
cccaggaggccagc

SEQ ID NO: 1814884 - RNA, 14 nt, Human
cccaggagccccga

SEQ ID NO: 1814885 - RNA, 13 nt, Human
cccaggagccccg

SEQ ID NO: 1814886 - RNA, 23 nt, Human
cccagcccuccuuaucaaaggac

SEQ ID NO: 1814887 - RNA, 18 nt, Human
cccagccuccaagcucca

SEQ ID NO: 1814888 - RNA, 20 nt, Human
cccagccuccaagcuccauc

SEQ ID NO: 1814889 - RNA, 18 nt, Human
cccagccccauccucugu

SEQ ID NO: 1814890 - RNA, 19 nt, Human
cccagccccauccucugua

SEQ ID NO: 1814891 - RNA, 13 nt, Human
cccagccccaucc

SEQ ID NO: 1814892 - RNA, 14 nt, Human
cccagccccauccc

SEQ ID NO: 1814893 - RNA, 14 nt, Human
cccagccccauccu

SEQ ID NO: 1814894 - RNA, 15 nt, Human
cccagccccauccuc

SEQ ID NO: 1814895 - RNA, 13 nt, Human
cccagccccaaug

SEQ ID NO: 1814896 - RNA, 17 nt, Human
cccagccccaaugaaca

SEQ ID NO: 1814897 - RNA, 11 nt, Human
cccagccccau

SEQ ID NO: 1814898 - RNA, 12 nt, Human
cccagccccauc

SEQ ID NO: 1814899 - RNA, 16 nt, Human
cccagaggcuggguga

SEQ ID NO: 1814900 - RNA, 18 nt, Human
cccaggaggccagccuug

SEQ ID NO: 1814901 - RNA, 21 nt, Human
ccccaaauggaaaugggcaga

SEQ ID NO: 1814902 - RNA, 16 nt, Human
cccaugucucgacuca

SEQ ID NO: 1814903 - RNA, 17 nt, Human
cccaugucucgacucau

SEQ ID NO: 1814904 - RNA, 20 nt, Human
cccaugagccucagcauccu

SEQ ID NO: 1814905 - RNA, 16 nt, Human
cccaugagccucagca

SEQ ID NO: 1814906 - RNA, 15 nt, Human
cccaugagccucagc

SEQ ID NO: 1814907 - RNA, 14 nt, Human
cccaugcugcccug

SEQ ID NO: 1814908 - RNA, 12 nt, Human
cccaugcugccc

SEQ ID NO: 1814909 - RNA, 13 nt, Human
cccaugcugcccu

SEQ ID NO: 1814910 - RNA, 20 nt, Human
cccaucugugaaaggaaaga

SEQ ID NO: 1814911 - RNA, 18 nt, Human
cccaucucacacaugagc

SEQ ID NO: 1814912 - RNA, 13 nt, Human
cccaucucacaca

SEQ ID NO: 1814913 - RNA, 19 nt, Human
cccagucuggaaugcagug

SEQ ID NO: 1814914 - RNA, 18 nt, Human
cccagucuggaaugcagu

SEQ ID NO: 1814915 - RNA, 10 nt, Human
cccagucugg

SEQ ID NO: 1814916 - RNA, 21 nt, Human
cccagugcccacaggaucagu

SEQ ID NO: 1814917 - RNA, 15 nt, Human
cccagugccgagaag

SEQ ID NO: 1814918 - RNA, 20 nt, Human
cccagugguuccuaauccuc

SEQ ID NO: 1814919 - RNA, 14 nt, Human
cccaguuagcucuc

SEQ ID NO: 1814920 - RNA, 23 nt, Human
cccaggcaggucuugaacuccug

SEQ ID NO: 1814921 - RNA, 15 nt, Human
cccaggcauucccca

SEQ ID NO: 1814922 - RNA, 15 nt, Human
cccaggaggccagcc

SEQ ID NO: 1814923 - RNA, 16 nt, Human
cccaggaggccagccu

SEQ ID NO: 1814924 - RNA, 19 nt, Human
cccagggugggaagggcua

SEQ ID NO: 1814925 - RNA, 17 nt, Human
cccaggcauuccccagg

SEQ ID NO: 1814926 - RNA, 18 nt, Human
cccaggcauuccccagga

SEQ ID NO: 1814927 - RNA, 13 nt, Human
cccagguuucuau

SEQ ID NO: 1814928 - RNA, 22 nt, Human
cccaugagccucagcauccugg

SEQ ID NO: 1814929 - RNA, 16 nt, Human
ccaucaugucuggcua

SEQ ID NO: 1814930 - RNA, 14 nt, Human
ccaucaugucuggc

SEQ ID NO: 1814931 - RNA, 21 nt, Human
ccauccucuguacagagccca

SEQ ID NO: 1814932 - RNA, 15 nt, Human
ccauccugaggcucc

SEQ ID NO: 1814933 - RNA, 16 nt, Human
ccauccugaggcucca

SEQ ID NO: 1814934 - RNA, 16 nt, Human
ccaucgcugucaucuc

SEQ ID NO: 1814935 - RNA, 19 nt, Human
ccauauucuguuggccagu

SEQ ID NO: 1814936 - RNA, 18 nt, Human
ccauauucuguuggccag

SEQ ID NO: 1814937 - RNA, 15 nt, Human
ccauauucuguuggc

SEQ ID NO: 1814938 - RNA, 23 nt, Human
ccauagagagcaagacgcugugc

SEQ ID NO: 1814939 - RNA, 12 nt, Human
ccaucacccgcu

SEQ ID NO: 1814940 - RNA, 23 nt, Human
ccagggacagaggggguggccuc

SEQ ID NO: 1814941 - RNA, 12 nt, Human
ccaggccugccu

SEQ ID NO: 1814942 - RNA, 23 nt, Human
ccauguuggccaggcuggucuca

SEQ ID NO: 1814943 - RNA, 21 nt, Human
ccagcugugcucuggacaggc

SEQ ID NO: 1814944 - RNA, 20 nt, Human
ccagcugugcucuggacagg

SEQ ID NO: 1814945 - RNA, 18 nt, Human
ccagcugugcucuggaca

SEQ ID NO: 1814946 - RNA, 16 nt, Human
ccagcuggguuggaaa

SEQ ID NO: 1814947 - RNA, 17 nt, Human
ccagcuggguuggaaaa

SEQ ID NO: 1814948 - RNA, 14 nt, Human
ccagcuggccggga

SEQ ID NO: 1814949 - RNA, 20 nt, Human
ccagcuggccgggagccuga

SEQ ID NO: 1814950 - RNA, 12 nt, Human
ccagcuggccgg

SEQ ID NO: 1814951 - RNA, 16 nt, Human
ccagcugcuugggcuu

SEQ ID NO: 1814952 - RNA, 18 nt, Human
ccagcugcuugggcuuca

SEQ ID NO: 1814953 - RNA, 13 nt, Human
ccagcugcuuggg

SEQ ID NO: 1814954 - RNA, 15 nt, Human
ccagcugcuugggcu

SEQ ID NO: 1814955 - RNA, 17 nt, Human
ccaggcccucugcccac

SEQ ID NO: 1814956 - RNA, 18 nt, Human
ccaggcccucugcccacu

SEQ ID NO: 1814957 - RNA, 19 nt, Human
ccaggcccucugcccacuc

SEQ ID NO: 1814958 - RNA, 13 nt, Human
ccaggccuccuac

SEQ ID NO: 1814959 - RNA, 18 nt, Human
ccaggccuccuacagcuu

SEQ ID NO: 1814960 - RNA, 19 nt, Human
ccaggccuccuacagcuug

SEQ ID NO: 1814961 - RNA, 23 nt, Human
ccaggccccugccacccugggga

SEQ ID NO: 1814962 - RNA, 21 nt, Human
ccaggccccugccacccuggg

SEQ ID NO: 1814963 - RNA, 21 nt, Human
ccaggccagagggagugacag

SEQ ID NO: 1814964 - RNA, 14 nt, Human
ccaggccagaggga

SEQ ID NO: 1814965 - RNA, 14 nt, Human
ccaggagcagccac

SEQ ID NO: 1814966 - RNA, 23 nt, Human
ccagcugugcucuggacaggcau

SEQ ID NO: 1814967 - RNA, 22 nt, Human
ccagcugugcucuggacaggca

SEQ ID NO: 1814968 - RNA, 15 nt, Human
ccaggaagccagcag

SEQ ID NO: 1814969 - RNA, 17 nt, Human
ccaggaagccagcaggc

SEQ ID NO: 1814970 - RNA, 19 nt, Human
ccaggaagccagcaggcuc

SEQ ID NO: 1814971 - RNA, 12 nt, Human
ccaggagcagcc

SEQ ID NO: 1814972 - RNA, 13 nt, Human
ccaggagcagcca

SEQ ID NO: 1814973 - RNA, 15 nt, Human
ccaagaccuucuccu

SEQ ID NO: 1814974 - RNA, 18 nt, Human
ccaacccuggcacccagg

SEQ ID NO: 1814975 - RNA, 13 nt, Human
ccaacccucauca

SEQ ID NO: 1814976 - RNA, 15 nt, Human
ccaacccucaucacc

SEQ ID NO: 1814977 - RNA, 16 nt, Human
ccaacaucaacaucuu

SEQ ID NO: 1814978 - RNA, 14 nt, Human
ccaacauacuccca

SEQ ID NO: 1814979 - RNA, 15 nt, Human
ccaaauucuuucagu

SEQ ID NO: 1814980 - RNA, 22 nt, Human
ccaaauucuuucaguggcuacc

SEQ ID NO: 1814981 - RNA, 13 nt, Human
ccaaagaugcagc

SEQ ID NO: 1814982 - RNA, 14 nt, Human
ccaaagaugcagcc

SEQ ID NO: 1814983 - RNA, 23 nt, Human
ccaagcagagguugggaggccau

SEQ ID NO: 1814984 - RNA, 14 nt, Human
ccaagccguggcuu

SEQ ID NO: 1814985 - RNA, 14 nt, Human
ccaagcaggacaug

SEQ ID NO: 1814986 - RNA, 15 nt, Human
ccaagccguggcuuc

SEQ ID NO: 1814987 - RNA, 16 nt, Human
ccaagccguggcuucc

SEQ ID NO: 1814988 - RNA, 17 nt, Human
ccaagccguggcuuccc

SEQ ID NO: 1814989 - RNA, 21 nt, Human
ccaagccguggcuucccgcuc

SEQ ID NO: 1814990 - RNA, 23 nt, Human
ccaagccguggcuucccgcucag

SEQ ID NO: 1814991 - RNA, 12 nt, Human
ccaagcucccag

SEQ ID NO: 1814992 - RNA, 13 nt, Human
ccaagcucccagg

SEQ ID NO: 1814993 - RNA, 14 nt, Human
ccaagcuccaucuc

SEQ ID NO: 1814994 - RNA, 18 nt, Human
ccaaggcuagaaccaccu

SEQ ID NO: 1814995 - RNA, 18 nt, Human
ccacaaaggagagcuagc

SEQ ID NO: 1814996 - RNA, 13 nt, Human
ccacaacacacag

SEQ ID NO: 1814997 - RNA, 16 nt, Human
ccacaagacccuugug

SEQ ID NO: 1814998 - RNA, 13 nt, Human
ccacaagagccca

SEQ ID NO: 1814999 - RNA, 22 nt, Human
ccacaagaaaugaaagcaggga

SEQ ID NO: 1815000 - RNA, 16 nt, Human
ccacaagaaaugaaag

SEQ ID NO: 1815001 - RNA, 23 nt, Human
ccaauuuuuuaagugaaaauaua

SEQ ID NO: 1815002 - RNA, 18 nt, Human
ccaauauuguacaguuuu

SEQ ID NO: 1815003 - RNA, 16 nt, Human
ccaauauuguacaguu

SEQ ID NO: 1815004 - RNA, 15 nt, Human
ccaauauuguacagu

SEQ ID NO: 1815005 - RNA, 14 nt, Human
ccaauauuguacag

SEQ ID NO: 1815006 - RNA, 14 nt, Human
ccaaggcuggggga

SEQ ID NO: 1815007 - RNA, 16 nt, Human
ccaaggcucugagcaa

SEQ ID NO: 1815008 - RNA, 19 nt, Human
ccaaggcugauuaaaccaa

SEQ ID NO: 1815009 - RNA, 13 nt, Human
ccaaguggcuccc

SEQ ID NO: 1815010 - RNA, 16 nt, Human
ccaaguggcucccaca

SEQ ID NO: 1815011 - RNA, 20 nt, Human
ccaauauucauagcagcuua

SEQ ID NO: 1815012 - RNA, 15 nt, Human
ccacaaguuaaauaa

SEQ ID NO: 1815013 - RNA, 20 nt, Human
ccacaaguuaaauaaaucau

SEQ ID NO: 1815014 - RNA, 20 nt, Human
ccacaagagcccaggccucc

SEQ ID NO: 1815015 - RNA, 21 nt, Human
ccacaagagcccaggccuccu

SEQ ID NO: 1815016 - RNA, 16 nt, Human
ccacaagagcccaggc

SEQ ID NO: 1815017 - RNA, 17 nt, Human
ccacaagagcccaggcc

SEQ ID NO: 1815018 - RNA, 18 nt, Human
ccacaagagcccaggccu

SEQ ID NO: 1815019 - RNA, 19 nt, Human
ccacaagagcccaggccuc

SEQ ID NO: 1815020 - RNA, 21 nt, Human
cauuuacuuuguguucaccuu

SEQ ID NO: 1815021 - RNA, 17 nt, Human
cauuuacuuuguguuca

SEQ ID NO: 1815022 - RNA, 18 nt, Human
cauuucccaacacaaaga

SEQ ID NO: 1815023 - RNA, 15 nt, Human
cauugcaauagaaau

SEQ ID NO: 1815024 - RNA, 13 nt, Human
cauugcaauagaa

SEQ ID NO: 1815025 - RNA, 14 nt, Human
cauugcaauagaaa

SEQ ID NO: 1815026 - RNA, 21 nt, Human
cauuuaaaagauacaguuacu

SEQ ID NO: 1815027 - RNA, 21 nt, Human
cauuucuuccacaagagccca

SEQ ID NO: 1815028 - RNA, 13 nt, Human
cauugaccugagg

SEQ ID NO: 1815029 - RNA, 22 nt, Human
cauugaccugaggcccuucucu

SEQ ID NO: 1815030 - RNA, 19 nt, Human
cauugaaaucuuuuugcuu

SEQ ID NO: 1815031 - RNA, 22 nt, Human
cauuuugggguacccacugcuc

SEQ ID NO: 1815032 - RNA, 21 nt, Human
cauuuugggguacccacugcu

SEQ ID NO: 1815033 - RNA, 20 nt, Human
cauuuugggguacccacugc

SEQ ID NO: 1815034 - RNA, 18 nt, Human
cauuuugcuaaaugugaa

SEQ ID NO: 1815035 - RNA, 21 nt, Human
cauuuugcuaaaugugaauga

SEQ ID NO: 1815036 - RNA, 24 nt, Human
cauuuugcuaaaugugaaugauga

SEQ ID NO: 1815037 - RNA, 18 nt, Human
cauuuuuaguagagacag

SEQ ID NO: 1815038 - RNA, 19 nt, Human
cauuuuuaguagagacagg

SEQ ID NO: 1815039 - RNA, 20 nt, Human
cauuuuuaagugcugcauuu

SEQ ID NO: 1815040 - RNA, 15 nt, Human
cauuuuuaagugcug

SEQ ID NO: 1815041 - RNA, 23 nt, Human
cauuuugggguacccacugcucu

SEQ ID NO: 1815042 - RNA, 22 nt, Human
cauuugaggucuguucuuucca

SEQ ID NO: 1815043 - RNA, 21 nt, Human
cauuuuauuuuauuaugcaug

SEQ ID NO: 1815044 - RNA, 22 nt, Human
cauuuuauuuuauuaugcauga

SEQ ID NO: 1815045 - RNA, 19 nt, Human
cauuuuauuuuauuaugca

SEQ ID NO: 1815046 - RNA, 20 nt, Human
cauuuuuaguagagacaggg

SEQ ID NO: 1815047 - RNA, 21 nt, Human
ccaaaauaaaacuuuuuaaaa

SEQ ID NO: 1815048 - RNA, 18 nt, Human
ccaaaauaaaacuuuuua

SEQ ID NO: 1815049 - RNA, 14 nt, Human
cauuugagcagggc

SEQ ID NO: 1815050 - RNA, 16 nt, Human
cauuugagcagggcuc

SEQ ID NO: 1815051 - RNA, 17 nt, Human
cauuugaggucuguucu

SEQ ID NO: 1815052 - RNA, 19 nt, Human
cauuugaggucuguucuuu

SEQ ID NO: 1815053 - RNA, 18 nt, Human
cauuugaggucuguucuu

SEQ ID NO: 1815054 - RNA, 23 nt, Human
cauuucuuccacaagagcccagg

SEQ ID NO: 1815055 - RNA, 17 nt, Human
cauuagcaguuugcuuu

SEQ ID NO: 1815056 - RNA, 18 nt, Human
cauuagcaguuugcuuug

SEQ ID NO: 1815057 - RNA, 21 nt, Human
cauuaaagccugaguuugcuu

SEQ ID NO: 1815058 - RNA, 15 nt, Human
cauguuuuguuuacg

SEQ ID NO: 1815059 - RNA, 18 nt, Human
cauguuuuucuucucccu

SEQ ID NO: 1815060 - RNA, 21 nt, Human
cauguuucuuuguaaugaaaa

SEQ ID NO: 1815061 - RNA, 22 nt, Human
cauguuucuuuguaaugaaaac

SEQ ID NO: 1815062 - RNA, 23 nt, Human
cauguuugauguaucugagcagg

SEQ ID NO: 1815063 - RNA, 22 nt, Human
caugugccagguuuuuggucug

SEQ ID NO: 1815064 - RNA, 21 nt, Human
caugugccagguuuuuggucu

SEQ ID NO: 1815065 - RNA, 15 nt, Human
caugugcacaugcac

SEQ ID NO: 1815066 - RNA, 16 nt, Human
cauggucggaaaacau

SEQ ID NO: 1815067 - RNA, 15 nt, Human
caugugaaaucauuc

SEQ ID NO: 1815068 - RNA, 16 nt, Human
caugugaaaucauuca

SEQ ID NO: 1815069 - RNA, 17 nt, Human
caugugaaaucauucau

SEQ ID NO: 1815070 - RNA, 14 nt, Human
caugucuuuucuug

SEQ ID NO: 1815071 - RNA, 19 nt, Human
caugucuuuucuugcauga

SEQ ID NO: 1815072 - RNA, 21 nt, Human
caugucuuuucuugcaugagg

SEQ ID NO: 1815073 - RNA, 23 nt, Human
caugucuuuucuugcaugaggcu

SEQ ID NO: 1815074 - RNA, 18 nt, Human
caugucgccucugcauuc

SEQ ID NO: 1815075 - RNA, 20 nt, Human
caugucgccucugcauucag

SEQ ID NO: 1815076 - RNA, 14 nt, Human
caugucgccucugc

SEQ ID NO: 1815077 - RNA, 15 nt, Human
caugucgccucugca

SEQ ID NO: 1815078 - RNA, 18 nt, Human
cauguaauuaaguacuau

SEQ ID NO: 1815079 - RNA, 21 nt, Human
cauguaauuaaguacuaugua

SEQ ID NO: 1815080 - RNA, 16 nt, Human
cauggaauaacaugua

SEQ ID NO: 1815081 - RNA, 18 nt, Human
cauggacaugaucuucuu

SEQ ID NO: 1815082 - RNA, 20 nt, Human
cauggaaguacuauaauuua

SEQ ID NO: 1815083 - RNA, 22 nt, Human
cauggaaguacuauaauuuacc

SEQ ID NO: 1815084 - RNA, 23 nt, Human
caugccuggauggggcugcaccg

SEQ ID NO: 1815085 - RNA, 18 nt, Human
caugccuggauggggcug

SEQ ID NO: 1815086 - RNA, 21 nt, Human
caugccuggauggggcugcac

SEQ ID NO: 1815087 - RNA, 22 nt, Human
caugcugucccuuacgugaguc

SEQ ID NO: 1815088 - RNA, 15 nt, Human
caugggccuccugug

SEQ ID NO: 1815089 - RNA, 22 nt, Human
caugggaaugaaugucagugug

SEQ ID NO: 1815090 - RNA, 17 nt, Human
caugggacagggaggac

SEQ ID NO: 1815091 - RNA, 17 nt, Human
caugggccuccugugug

SEQ ID NO: 1815092 - RNA, 16 nt, Human
caugggccuccugugu

SEQ ID NO: 1815093 - RNA, 18 nt, Human
caugggaaugaaugucag

SEQ ID NO: 1815094 - RNA, 16 nt, Human
cauggaguauauguca

SEQ ID NO: 1815095 - RNA, 11 nt, Human
cauggacuuug

SEQ ID NO: 1815096 - RNA, 13 nt, Human
cauggacuuuguu

SEQ ID NO: 1815097 - RNA, 17 nt, Human
cauggagguuugaagau

SEQ ID NO: 1815098 - RNA, 14 nt, Human
caugccucucucag

SEQ ID NO: 1815099 - RNA, 15 nt, Human
caugccucucucagg

SEQ ID NO: 1815100 - RNA, 16 nt, Human
caugccucucucaggc

SEQ ID NO: 1815101 - RNA, 17 nt, Human
caugccucucucaggcc

SEQ ID NO: 1815102 - RNA, 18 nt, Human
caugccucucucaggcca

SEQ ID NO: 1815103 - RNA, 19 nt, Human
caugccucucucaggccaa

SEQ ID NO: 1815104 - RNA, 13 nt, Human
caugccuggaugg

SEQ ID NO: 1815105 - RNA, 19 nt, Human
caugccagcuuaucucagg

SEQ ID NO: 1815106 - RNA, 20 nt, Human
caugccagcuuaucucaggg

SEQ ID NO: 1815107 - RNA, 13 nt, Human
caugccccugaac

SEQ ID NO: 1815108 - RNA, 12 nt, Human
caguugaaaaac

SEQ ID NO: 1815109 - RNA, 18 nt, Human
caguugaaaaacagcuga

SEQ ID NO: 1815110 - RNA, 19 nt, Human
caguugaaaaacagcugag

SEQ ID NO: 1815111 - RNA, 22 nt, Human
caguucggugagcuacaaaugc

SEQ ID NO: 1815112 - RNA, 13 nt, Human
caguucucuccuu

SEQ ID NO: 1815113 - RNA, 14 nt, Human
caguucucuccuuc

SEQ ID NO: 1815114 - RNA, 15 nt, Human
caguucucuccuucu

SEQ ID NO: 1815115 - RNA, 22 nt, Human
caguucucuccuucuucccccc

SEQ ID NO: 1815116 - RNA, 22 nt, Human
caguguuguggauuuaacagaa

SEQ ID NO: 1815117 - RNA, 20 nt, Human
caguguuguggauuuaacag

SEQ ID NO: 1815118 - RNA, 19 nt, Human
caguguuguggauuuaaca

SEQ ID NO: 1815119 - RNA, 20 nt, Human
caguuaagccuuuggaaaca

SEQ ID NO: 1815120 - RNA, 14 nt, Human
caguuaagccuuug

SEQ ID NO: 1815121 - RNA, 15 nt, Human
caguuaagccuuugg

SEQ ID NO: 1815122 - RNA, 17 nt, Human
caguuaagccuuuggaa

SEQ ID NO: 1815123 - RNA, 13 nt, Human
caguuaagagaaa

SEQ ID NO: 1815124 - RNA, 14 nt, Human
caguuaagagaaau

SEQ ID NO: 1815125 - RNA, 14 nt, Human
caguuacucagaau

SEQ ID NO: 1815126 - RNA, 15 nt, Human
caguguacagucuug

SEQ ID NO: 1815127 - RNA, 12 nt, Human
caguguacaguc

SEQ ID NO: 1815128 - RNA, 18 nt, Human
caguguacagucuuguau

SEQ ID NO: 1815129 - RNA, 17 nt, Human
caguguacagucuugua

SEQ ID NO: 1815130 - RNA, 16 nt, Human
caguguacauggaaua

SEQ ID NO: 1815131 - RNA, 20 nt, Human
caguguacauggaauaacau

SEQ ID NO: 1815132 - RNA, 23 nt, Human
caguguacauggaauaacaugua

SEQ ID NO: 1815133 - RNA, 14 nt, Human
cagugucaaugcag

SEQ ID NO: 1815134 - RNA, 14 nt, Human
cagugugacaagga

SEQ ID NO: 1815135 - RNA, 12 nt, Human
cagugugacuga

SEQ ID NO: 1815136 - RNA, 11 nt, Human
cagugggaacu

SEQ ID NO: 1815137 - RNA, 22 nt, Human
cagugguuccuaauccucuagg

SEQ ID NO: 1815138 - RNA, 16 nt, Human
caguggcagcugcuuu

SEQ ID NO: 1815139 - RNA, 15 nt, Human
caguggcagcugcuu

SEQ ID NO: 1815140 - RNA, 14 nt, Human
caguggcagcugcu

SEQ ID NO: 1815141 - RNA, 13 nt, Human
caguggcagcugc

SEQ ID NO: 1815142 - RNA, 12 nt, Human
caguggcagcug

SEQ ID NO: 1815143 - RNA, 16 nt, Human
caguggaaccagccca

SEQ ID NO: 1815144 - RNA, 23 nt, Human
caguugccagucaccccggccac

SEQ ID NO: 1815145 - RNA, 16 nt, Human
caguuggguggaugcc

SEQ ID NO: 1815146 - RNA, 19 nt, Human
caguuggguggaugccugg

SEQ ID NO: 1815147 - RNA, 18 nt, Human
caguuggguggaugccug

SEQ ID NO: 1815148 - RNA, 18 nt, Human
caguuggucccccuucca

SEQ ID NO: 1815149 - RNA, 19 nt, Human
caguuggucccccuuccau

SEQ ID NO: 1815150 - RNA, 20 nt, Human
caguuggucccccuuccaug

SEQ ID NO: 1815151 - RNA, 21 nt, Human
caguuggucccccuuccaugg

SEQ ID NO: 1815152 - RNA, 22 nt, Human
caguuggucccccuuccaugga

SEQ ID NO: 1815153 - RNA, 17 nt, Human
caguuguuagugugucu

SEQ ID NO: 1815154 - RNA, 15 nt, Human
caguuuuuauugcuu

SEQ ID NO: 1815155 - RNA, 19 nt, Human
cauaccacuuuuguucuug

SEQ ID NO: 1815156 - RNA, 11 nt, Human
cauacccaccc

SEQ ID NO: 1815157 - RNA, 12 nt, Human
cauacccacccc

SEQ ID NO: 1815158 - RNA, 18 nt, Human
cauaccacuuuuguucuu

SEQ ID NO: 1815159 - RNA, 15 nt, Human
cauaccacuuuuguu

SEQ ID NO: 1815160 - RNA, 14 nt, Human
cauaccacuuuugu

SEQ ID NO: 1815161 - RNA, 13 nt, Human
cauaccacuuuug

SEQ ID NO: 1815162 - RNA, 15 nt, Human
cauaauacuugcuuu

SEQ ID NO: 1815163 - RNA, 13 nt, Human
cauaacuagaacu

SEQ ID NO: 1815164 - RNA, 14 nt, Human
cauaagauaaaugu

SEQ ID NO: 1815165 - RNA, 16 nt, Human
cauaaccuagccuuag

SEQ ID NO: 1815166 - RNA, 14 nt, Human
cauaaagcaggcag

SEQ ID NO: 1815167 - RNA, 16 nt, Human
cauaaagcaggcagaa

SEQ ID NO: 1815168 - RNA, 21 nt, Human
cauaaacaagaccacguuucu

SEQ ID NO: 1815169 - RNA, 20 nt, Human
cauaaacaagaccacguuuc

SEQ ID NO: 1815170 - RNA, 22 nt, Human
cauaaacaagaccacguuucua

SEQ ID NO: 1815171 - RNA, 21 nt, Human
cauaaaaauuagccaagugug

SEQ ID NO: 1815172 - RNA, 13 nt, Human
cauacguacacau

SEQ ID NO: 1815173 - RNA, 16 nt, Human
cauacguacacauuuu

SEQ ID NO: 1815174 - RNA, 15 nt, Human
cauacguacacauuu

SEQ ID NO: 1815175 - RNA, 21 nt, Human
cauacuaaccagcagaaaugc

SEQ ID NO: 1815176 - RNA, 14 nt, Human
cauacuaaccagca

SEQ ID NO: 1815177 - RNA, 18 nt, Human
cauacguacacauuuuau

SEQ ID NO: 1815178 - RNA, 17 nt, Human
cauacguacacauuuua

SEQ ID NO: 1815179 - RNA, 14 nt, Human
cauacccaccccca

SEQ ID NO: 1815180 - RNA, 17 nt, Human
cauacccacccccaccc

SEQ ID NO: 1815181 - RNA, 18 nt, Human
cauacccacccccaccca

SEQ ID NO: 1815182 - RNA, 21 nt, Human
cauacccacccccacccaagg

SEQ ID NO: 1815183 - RNA, 20 nt, Human
cauacuaauuauacccccug

SEQ ID NO: 1815184 - RNA, 13 nt, Human
caucucagcccac

SEQ ID NO: 1815185 - RNA, 20 nt, Human
caucucacacaugagcauca

SEQ ID NO: 1815186 - RNA, 16 nt, Human
caucucacacaugagc

SEQ ID NO: 1815187 - RNA, 17 nt, Human
caucucacacaugagca

SEQ ID NO: 1815188 - RNA, 15 nt, Human
caucuacccuccgau

SEQ ID NO: 1815189 - RNA, 12 nt, Human
caucuaggauuu

SEQ ID NO: 1815190 - RNA, 17 nt, Human
caucuagguaaauuaca

SEQ ID NO: 1815191 - RNA, 18 nt, Human
caucuagguaaauuacag

SEQ ID NO: 1815192 - RNA, 21 nt, Human
cauccucuguacagagcccac

SEQ ID NO: 1815193 - RNA, 19 nt, Human
cauccucuguacagagccc

SEQ ID NO: 1815194 - RNA, 15 nt, Human
cauccucuguacaga

SEQ ID NO: 1815195 - RNA, 18 nt, Human
cauccucuguacagagcc

SEQ ID NO: 1815196 - RNA, 13 nt, Human
cauccucccaagg

SEQ ID NO: 1815197 - RNA, 17 nt, Human
cauccucauacccaccc

SEQ ID NO: 1815198 - RNA, 18 nt, Human
cauccucauacccacccc

SEQ ID NO: 1815199 - RNA, 21 nt, Human
cauccucauacccacccccac

SEQ ID NO: 1815200 - RNA, 22 nt, Human
cauccucauacccacccccacc

SEQ ID NO: 1815201 - RNA, 20 nt, Human
cauccuccgccucccggguu

SEQ ID NO: 1815202 - RNA, 11 nt, Human
cauccuccuca

SEQ ID NO: 1815203 - RNA, 12 nt, Human
cauccuccucag

SEQ ID NO: 1815204 - RNA, 15 nt, Human
cauccuccucagauc

SEQ ID NO: 1815205 - RNA, 16 nt, Human
cauccuccucagaucu

SEQ ID NO: 1815206 - RNA, 18 nt, Human
cauccuccucagaucuuc

SEQ ID NO: 1815207 - RNA, 19 nt, Human
cauccuccucagaucuucu

SEQ ID NO: 1815208 - RNA, 16 nt, Human
cauccuacaagacaca

SEQ ID NO: 1815209 - RNA, 15 nt, Human
cauccucauacccac

SEQ ID NO: 1815210 - RNA, 16 nt, Human
cauccucauacccacc

SEQ ID NO: 1815211 - RNA, 20 nt, Human
caucuugcucugcugacaga

SEQ ID NO: 1815212 - RNA, 14 nt, Human
caucuugcucugcu

SEQ ID NO: 1815213 - RNA, 15 nt, Human
caucuugcucugcug

SEQ ID NO: 1815214 - RNA, 13 nt, Human
caucuugcucugc

SEQ ID NO: 1815215 - RNA, 22 nt, Human
caucucuucuggguuccuuccu

SEQ ID NO: 1815216 - RNA, 14 nt, Human
caucuccacuccag

SEQ ID NO: 1815217 - RNA, 16 nt, Human
caucucuuguuuaaau

SEQ ID NO: 1815218 - RNA, 22 nt, Human
caucuuccaaggguacuaagga

SEQ ID NO: 1815219 - RNA, 15 nt, Human
cauccagguucagcu

SEQ ID NO: 1815220 - RNA, 11 nt, Human
caucccugaag

SEQ ID NO: 1815221 - RNA, 13 nt, Human
caucccugaaggc

SEQ ID NO: 1815222 - RNA, 19 nt, Human
caucccucuggggcuguuc

SEQ ID NO: 1815223 - RNA, 13 nt, Human
caucauugaaauc

SEQ ID NO: 1815224 - RNA, 15 nt, Human
caucaccaacgucug

SEQ ID NO: 1815225 - RNA, 14 nt, Human
caucauugaaaucu

SEQ ID NO: 1815226 - RNA, 15 nt, Human
caucauugaaaucuu

SEQ ID NO: 1815227 - RNA, 20 nt, Human
caucauugaaaucuuuuugc

SEQ ID NO: 1815228 - RNA, 21 nt, Human
caucauugaaaucuuuuugcu

SEQ ID NO: 1815229 - RNA, 17 nt, Human
cauccuacaagacacag

SEQ ID NO: 1815230 - RNA, 22 nt, Human
caucccugaaggccccgcccag

SEQ ID NO: 1815231 - RNA, 14 nt, Human
cauccuaacuccau

SEQ ID NO: 1815232 - RNA, 21 nt, Human
cauccuaacuccaugucucug

SEQ ID NO: 1815233 - RNA, 17 nt, Human
caucccugaaggccccg

SEQ ID NO: 1815234 - RNA, 18 nt, Human
caucccugaaggccccgc

SEQ ID NO: 1815235 - RNA, 19 nt, Human
caucccugaaggccccgcc

SEQ ID NO: 1815236 - RNA, 21 nt, Human
caucccugaaggccccgccca

SEQ ID NO: 1815237 - RNA, 22 nt, Human
cauaguggcuuaaaacaacacu

SEQ ID NO: 1815238 - RNA, 20 nt, Human
cauaguaugguggcuggguu

SEQ ID NO: 1815239 - RNA, 22 nt, Human
cauagugaugguuccccuguuc

SEQ ID NO: 1815240 - RNA, 19 nt, Human
cauaguaugguggcugggu

SEQ ID NO: 1815241 - RNA, 18 nt, Human
cauaguaugguggcuggg

SEQ ID NO: 1815242 - RNA, 22 nt, Human
cauauauauguuuuaagaggca

SEQ ID NO: 1815243 - RNA, 23 nt, Human
cauauauauguuuuaagaggcag

SEQ ID NO: 1815244 - RNA, 15 nt, Human
cauaugauguacaug

SEQ ID NO: 1815245 - RNA, 17 nt, Human
cauaugauguacaugua

SEQ ID NO: 1815246 - RNA, 21 nt, Human
cauaugauguacauguacuga

SEQ ID NO: 1815247 - RNA, 11 nt, Human
cauacucugcu

SEQ ID NO: 1815248 - RNA, 16 nt, Human
cauacucccaucugug

SEQ ID NO: 1815249 - RNA, 15 nt, Human
cauacucccaucugu

SEQ ID NO: 1815250 - RNA, 18 nt, Human
cauacucccaucugugaa

SEQ ID NO: 1815251 - RNA, 20 nt, Human
cauacucccaucugugaaag

SEQ ID NO: 1815252 - RNA, 14 nt, Human
cauagaauaaaauu

SEQ ID NO: 1815253 - RNA, 20 nt, Human
cauagaauaaaauuuuuaau

SEQ ID NO: 1815254 - RNA, 19 nt, Human
cauagagagcaagacgcug

SEQ ID NO: 1815255 - RNA, 21 nt, Human
cauagagagcaagacgcugug

SEQ ID NO: 1815256 - RNA, 23 nt, Human
cauagagagcaagacgcugugcu

SEQ ID NO: 1815257 - RNA, 22 nt, Human
caucaagucuuucacauuuaaa

SEQ ID NO: 1815258 - RNA, 14 nt, Human
caucaagaugugac

SEQ ID NO: 1815259 - RNA, 18 nt, Human
caucaaugaaugaaugaa

SEQ ID NO: 1815260 - RNA, 13 nt, Human
cauaugccugggc

SEQ ID NO: 1815261 - RNA, 14 nt, Human
cauauuuacuucuu

SEQ ID NO: 1815262 - RNA, 12 nt, Human
cauauuuauaaa

SEQ ID NO: 1815263 - RNA, 20 nt, Human
cauauuuacuucuuauacau

SEQ ID NO: 1815264 - RNA, 16 nt, Human
cauauuuacuucuuau

SEQ ID NO: 1815265 - RNA, 17 nt, Human
cauauuuacuucuuaua

SEQ ID NO: 1815266 - RNA, 17 nt, Human
cauauuuauaaaaauaa

SEQ ID NO: 1815267 - RNA, 21 nt, Human
caaggggaauguuugccucug

SEQ ID NO: 1815268 - RNA, 15 nt, Human
caagggccuggccug

SEQ ID NO: 1815269 - RNA, 13 nt, Human
caagggccuggcc

SEQ ID NO: 1815270 - RNA, 14 nt, Human
caagggccuggccu

SEQ ID NO: 1815271 - RNA, 13 nt, Human
caaggucauuuuu

SEQ ID NO: 1815272 - RNA, 23 nt, Human
caaggggaauguuugccucugcc

SEQ ID NO: 1815273 - RNA, 18 nt, Human
caagugauucuccugccu

SEQ ID NO: 1815274 - RNA, 19 nt, Human
caagugauucuccugccuc

SEQ ID NO: 1815275 - RNA, 15 nt, Human
caagugagacccugu

SEQ ID NO: 1815276 - RNA, 19 nt, Human
caagugagacccugucuca

SEQ ID NO: 1815277 - RNA, 20 nt, Human
caagugauucuccugccuca

SEQ ID NO: 1815278 - RNA, 22 nt, Human
caagugaaaaaggaggaagaga

SEQ ID NO: 1815279 - RNA, 23 nt, Human
caagugaaaaaggaggaagagaa

SEQ ID NO: 1815280 - RNA, 14 nt, Human
caagugagacccug

SEQ ID NO: 1815281 - RNA, 16 nt, Human
caagggccuggccuga

SEQ ID NO: 1815282 - RNA, 13 nt, Human
caagaccuucucc

SEQ ID NO: 1815283 - RNA, 20 nt, Human
caagacgcugugcugcccug

SEQ ID NO: 1815284 - RNA, 21 nt, Human
caagacgcugugcugcccugc

SEQ ID NO: 1815285 - RNA, 22 nt, Human
caagacgcugugcugcccugcc

SEQ ID NO: 1815286 - RNA, 13 nt, Human
caagaaaugaaag

SEQ ID NO: 1815287 - RNA, 15 nt, Human
caagaaaugaaagca

SEQ ID NO: 1815288 - RNA, 23 nt, Human
caagacccuuguggucccacccc

SEQ ID NO: 1815289 - RNA, 17 nt, Human
caagagggucugaggaa

SEQ ID NO: 1815290 - RNA, 16 nt, Human
caagagggucugagga

SEQ ID NO: 1815291 - RNA, 12 nt, Human
caagagggucug

SEQ ID NO: 1815292 - RNA, 17 nt, Human
caagagggcacuggugg

SEQ ID NO: 1815293 - RNA, 18 nt, Human
caagagggcacugguggc

SEQ ID NO: 1815294 - RNA, 19 nt, Human
caagagggcacugguggcc

SEQ ID NO: 1815295 - RNA, 20 nt, Human
caagagggcacugguggccc

SEQ ID NO: 1815296 - RNA, 17 nt, Human
caaggauccugagccag

SEQ ID NO: 1815297 - RNA, 15 nt, Human
caaggauccugagcc

SEQ ID NO: 1815298 - RNA, 16 nt, Human
caaggauccugagcca

SEQ ID NO: 1815299 - RNA, 21 nt, Human
caaggcugggggaagaagcuc

SEQ ID NO: 1815300 - RNA, 13 nt, Human
caaggcugucaau

SEQ ID NO: 1815301 - RNA, 14 nt, Human
caaggcugucaauu

SEQ ID NO: 1815302 - RNA, 23 nt, Human
caagggaauuucuucaacucccu

SEQ ID NO: 1815303 - RNA, 21 nt, Human
caaggcugucaauuacaggaa

SEQ ID NO: 1815304 - RNA, 16 nt, Human
caaggacuaggguccu

SEQ ID NO: 1815305 - RNA, 18 nt, Human
caaggacuaggguccugg

SEQ ID NO: 1815306 - RNA, 19 nt, Human
caaggacuaggguccuggg

SEQ ID NO: 1815307 - RNA, 20 nt, Human
caaggacuaggguccugggg

SEQ ID NO: 1815308 - RNA, 21 nt, Human
caaggacuaggguccugggga

SEQ ID NO: 1815309 - RNA, 14 nt, Human
caaggauccugagc

SEQ ID NO: 1815310 - RNA, 14 nt, Human
caacaggcugggcu

SEQ ID NO: 1815311 - RNA, 23 nt, Human
caaauuuacagagacagaaagca

SEQ ID NO: 1815312 - RNA, 17 nt, Human
caaauuuacagagacag

SEQ ID NO: 1815313 - RNA, 16 nt, Human
caaauuuacagagaca

SEQ ID NO: 1815314 - RNA, 17 nt, Human
caacaggcugggcuuca

SEQ ID NO: 1815315 - RNA, 16 nt, Human
caacauacucccaucu

SEQ ID NO: 1815316 - RNA, 14 nt, Human
caacauacucccau

SEQ ID NO: 1815317 - RNA, 15 nt, Human
caacauacucccauc

SEQ ID NO: 1815318 - RNA, 17 nt, Human
caacugcaucaagaugu

SEQ ID NO: 1815319 - RNA, 20 nt, Human
caacugcaucaagaugugac

SEQ ID NO: 1815320 - RNA, 23 nt, Human
caacugcaucaagaugugacaug

SEQ ID NO: 1815321 - RNA, 16 nt, Human
caacugcauuggcuuu

SEQ ID NO: 1815322 - RNA, 17 nt, Human
caaccugauugugucuc

SEQ ID NO: 1815323 - RNA, 19 nt, Human
caaccugauugugucucuu

SEQ ID NO: 1815324 - RNA, 21 nt, Human
caaccugauugugucucuugg

SEQ ID NO: 1815325 - RNA, 17 nt, Human
caaauuguaagcaugca

SEQ ID NO: 1815326 - RNA, 21 nt, Human
caaauauuuagauguaauuuu

SEQ ID NO: 1815327 - RNA, 13 nt, Human
caaauauuccaga

SEQ ID NO: 1815328 - RNA, 17 nt, Human
caaauauuccagagacu

SEQ ID NO: 1815329 - RNA, 23 nt, Human
caaauauuuagauguaauuuugu

SEQ ID NO: 1815330 - RNA, 22 nt, Human
caaauauuuagauguaauuuug

SEQ ID NO: 1815331 - RNA, 22 nt, Human
caaaguucccuacuuccuguga

SEQ ID NO: 1815332 - RNA, 21 nt, Human
caaaguucccuacuuccugug

SEQ ID NO: 1815333 - RNA, 19 nt, Human
caaaguggugagaggcauc

SEQ ID NO: 1815334 - RNA, 20 nt, Human
caaaggagauuggaaggaac

SEQ ID NO: 1815335 - RNA, 18 nt, Human
caaagcccuuccaugucg

SEQ ID NO: 1815336 - RNA, 14 nt, Human
caaaggagauugga

SEQ ID NO: 1815337 - RNA, 23 nt, Human
caaaggguaucaggugcugccau

SEQ ID NO: 1815338 - RNA, 19 nt, Human
caaagugguauagaaaugc

SEQ ID NO: 1815339 - RNA, 18 nt, Human
caaagugguauagaaaug

SEQ ID NO: 1815340 - RNA, 16 nt, Human
caaaguggugagaggc

SEQ ID NO: 1815341 - RNA, 17 nt, Human
caaaguggugagaggca

SEQ ID NO: 1815342 - RNA, 21 nt, Human
caaaggguaucaggugcugcc

SEQ ID NO: 1815343 - RNA, 20 nt, Human
caaaggguaucaggugcugc

SEQ ID NO: 1815344 - RNA, 13 nt, Human
caaagaaauuaug

SEQ ID NO: 1815345 - RNA, 15 nt, Human
caaagaaauuaugug

SEQ ID NO: 1815346 - RNA, 12 nt, Human
caaagaaauuau

SEQ ID NO: 1815347 - RNA, 17 nt, Human
caaagcccaaaguggua

SEQ ID NO: 1815348 - RNA, 19 nt, Human
caaagcccaaagugguaua

SEQ ID NO: 1815349 - RNA, 13 nt, Human
caaagcccagcuu

SEQ ID NO: 1815350 - RNA, 14 nt, Human
caaagagguuuuaa

SEQ ID NO: 1815351 - RNA, 21 nt, Human
caaagagguuuuaaaaaaauc

SEQ ID NO: 1815352 - RNA, 20 nt, Human
caacaggcugggcuucagug

SEQ ID NO: 1815353 - RNA, 18 nt, Human
caaucucggcucacugca

SEQ ID NO: 1815354 - RNA, 14 nt, Human
caaugcacugacau

SEQ ID NO: 1815355 - RNA, 13 nt, Human
caaugcacuuugu

SEQ ID NO: 1815356 - RNA, 23 nt, Human
caaugcaaaccaucauugaaauc

SEQ ID NO: 1815357 - RNA, 14 nt, Human
caaugauggucacc

SEQ ID NO: 1815358 - RNA, 14 nt, Human
caaugcaaaccauc

SEQ ID NO: 1815359 - RNA, 21 nt, Human
caaugcaaaccaucauugaaa

SEQ ID NO: 1815360 - RNA, 22 nt, Human
caaugcaaaccaucauugaaau

SEQ ID NO: 1815361 - RNA, 14 nt, Human
caaugaccuuucaa

SEQ ID NO: 1815362 - RNA, 21 nt, Human
caaugaccuuucaauaggaaa

SEQ ID NO: 1815363 - RNA, 13 nt, Human
caaugauggucac

SEQ ID NO: 1815364 - RNA, 15 nt, Human
caaugaccuuucaau

SEQ ID NO: 1815365 - RNA, 16 nt, Human
caaugaccuuucaaua

SEQ ID NO: 1815366 - RNA, 14 nt, Human
caaugcacuuuguu

SEQ ID NO: 1815367 - RNA, 18 nt, Human
caaugguuuucuugugug

SEQ ID NO: 1815368 - RNA, 17 nt, Human
cacaaacgggcucagca

SEQ ID NO: 1815369 - RNA, 15 nt, Human
cacaagaaaugaaag

SEQ ID NO: 1815370 - RNA, 13 nt, Human
cacaagaaaugaa

SEQ ID NO: 1815371 - RNA, 17 nt, Human
cacaaagguagcuuuuc

SEQ ID NO: 1815372 - RNA, 19 nt, Human
cacaaucucggcucacugc

SEQ ID NO: 1815373 - RNA, 23 nt, Human
cacaagacccaaaaggcagaagc

SEQ ID NO: 1815374 - RNA, 23 nt, Human
cacaagaaaugaaagcagggacu

SEQ ID NO: 1815375 - RNA, 14 nt, Human
cacacacuuuggcu

SEQ ID NO: 1815376 - RNA, 18 nt, Human
cacacagauuugagcuca

SEQ ID NO: 1815377 - RNA, 20 nt, Human
cacacagauuugagcucagc

SEQ ID NO: 1815378 - RNA, 21 nt, Human
cacacagaggcugccucuccc

SEQ ID NO: 1815379 - RNA, 20 nt, Human
cacacaccagagcccaccuu

SEQ ID NO: 1815380 - RNA, 16 nt, Human
cacacaccagagccca

SEQ ID NO: 1815381 - RNA, 15 nt, Human
cacacaccagagccc

SEQ ID NO: 1815382 - RNA, 20 nt, Human
cacaaucucggcucacugca

SEQ ID NO: 1815383 - RNA, 22 nt, Human
cacaaucucggcucacugcauc

SEQ ID NO: 1815384 - RNA, 23 nt, Human
cacaaucucggcucacugcaucc

SEQ ID NO: 1815385 - RNA, 24 nt, Human
cacaaucucggcucacugcauccu

SEQ ID NO: 1815386 - RNA, 15 nt, Human
cacacagcucugucc

SEQ ID NO: 1815387 - RNA, 14 nt, Human
cacacagcucuguc

SEQ ID NO: 1815388 - RNA, 13 nt, Human
cacacagcucugu

SEQ ID NO: 1815389 - RNA, 22 nt, Human
cacacagauuugagcucagccc

SEQ ID NO: 1815390 - RNA, 22 nt, Human
cacaccagagcccaccuuggcu

SEQ ID NO: 1815391 - RNA, 21 nt, Human
cacaccagagcccaccuuggc

SEQ ID NO: 1815392 - RNA, 16 nt, Human
cacacagcucuguccu

SEQ ID NO: 1815393 - RNA, 20 nt, Human
cacacccagcccacuucugc

SEQ ID NO: 1815394 - RNA, 14 nt, Human
cacacccagcccac

SEQ ID NO: 1815395 - RNA, 13 nt, Human
caccaucaagcca

SEQ ID NO: 1815396 - RNA, 14 nt, Human
caccaucaagccac

SEQ ID NO: 1815397 - RNA, 15 nt, Human
caccaucaagccacc

SEQ ID NO: 1815398 - RNA, 18 nt, Human
caccauaggucaccuuua

SEQ ID NO: 1815399 - RNA, 21 nt, Human
caccauauuaccacagacaua

SEQ ID NO: 1815400 - RNA, 18 nt, Human
caccaucaugucuggcua

SEQ ID NO: 1815401 - RNA, 17 nt, Human
caccaucaugucuggcu

SEQ ID NO: 1815402 - RNA, 15 nt, Human
caccaucaugucugg

SEQ ID NO: 1815403 - RNA, 16 nt, Human
caccaucaagccacca

SEQ ID NO: 1815404 - RNA, 17 nt, Human
caccaucaagccaccaa

SEQ ID NO: 1815405 - RNA, 19 nt, Human
caccaucaagccaccaaca

SEQ ID NO: 1815406 - RNA, 24 nt, Human
caccaucaagccaccaacauacuc

SEQ ID NO: 1815407 - RNA, 19 nt, Human
caccauguuggccaggcug

SEQ ID NO: 1815408 - RNA, 20 nt, Human
caccauguuggccaggcugc

SEQ ID NO: 1815409 - RNA, 20 nt, Human
caccauguuggccaggcugg

SEQ ID NO: 1815410 - RNA, 15 nt, Human
caccagagcccaccu

SEQ ID NO: 1815411 - RNA, 22 nt, Human
caccagagcccaccuuggcuca

SEQ ID NO: 1815412 - RNA, 20 nt, Human
caccagagcccaccuuggcu

SEQ ID NO: 1815413 - RNA, 18 nt, Human
caccagagcccaccuugg

SEQ ID NO: 1815414 - RNA, 17 nt, Human
caccagagcccaccuug

SEQ ID NO: 1815415 - RNA, 19 nt, Human
caccacacccagcccacuu

SEQ ID NO: 1815416 - RNA, 15 nt, Human
caccacgcccggcua

SEQ ID NO: 1815417 - RNA, 14 nt, Human
caccacgcccggcu

SEQ ID NO: 1815418 - RNA, 18 nt, Human
caccaacuacuaccugua

SEQ ID NO: 1815419 - RNA, 23 nt, Human
cacauguccaagaagcccaggaa

SEQ ID NO: 1815420 - RNA, 17 nt, Human
caccaacgucugugcca

SEQ ID NO: 1815421 - RNA, 18 nt, Human
cacauguccaagaagccc

SEQ ID NO: 1815422 - RNA, 19 nt, Human
cacauguccaagaagccca

SEQ ID NO: 1815423 - RNA, 21 nt, Human
cacauguccaagaagcccagg

SEQ ID NO: 1815424 - RNA, 22 nt, Human
cacauguccaagaagcccagga

SEQ ID NO: 1815425 - RNA, 12 nt, Human
caccaagcccag

SEQ ID NO: 1815426 - RNA, 13 nt, Human
caccaagcccagu

SEQ ID NO: 1815427 - RNA, 21 nt, Human
cacaugccucucucaggccaa

SEQ ID NO: 1815428 - RNA, 20 nt, Human
cacaugccucucucaggcca

SEQ ID NO: 1815429 - RNA, 16 nt, Human
cacauguccaagaagc

SEQ ID NO: 1815430 - RNA, 17 nt, Human
cacauguccaagaagcc

SEQ ID NO: 1815431 - RNA, 18 nt, Human
cacaugcacgugugugca

SEQ ID NO: 1815432 - RNA, 20 nt, Human
cacaugcaaggucauuuuuu

SEQ ID NO: 1815433 - RNA, 19 nt, Human
cacaugcaaggucauuuuu

SEQ ID NO: 1815434 - RNA, 17 nt, Human
cacaugcaaggucauuu

SEQ ID NO: 1815435 - RNA, 18 nt, Human
cacaugagcaucaggcca

SEQ ID NO: 1815436 - RNA, 19 nt, Human
cacaugagcaucaggccag

SEQ ID NO: 1815437 - RNA, 20 nt, Human
cacaugagcaucaggccagg

SEQ ID NO: 1815438 - RNA, 21 nt, Human
cacaugagcaucaggccaggc

SEQ ID NO: 1815439 - RNA, 13 nt, Human
cacaugagcauca

SEQ ID NO: 1815440 - RNA, 17 nt, Human
cacaugagcaucaggcc

SEQ ID NO: 1815441 - RNA, 20 nt, Human
cacagcucuucuccaggcug

SEQ ID NO: 1815442 - RNA, 19 nt, Human
cacagcucuucuccaggcu

SEQ ID NO: 1815443 - RNA, 21 nt, Human
cacagcucuucuccaggcugu

SEQ ID NO: 1815444 - RNA, 15 nt, Human
cacaggacucugccu

SEQ ID NO: 1815445 - RNA, 16 nt, Human
cacaggacucugccuc

SEQ ID NO: 1815446 - RNA, 17 nt, Human
cacaggaucagucugau

SEQ ID NO: 1815447 - RNA, 14 nt, Human
cacaggcccggcuc

SEQ ID NO: 1815448 - RNA, 23 nt, Human
cacaguccuuaccagcagagcac

SEQ ID NO: 1815449 - RNA, 18 nt, Human
cacagcucuucuccaggc

SEQ ID NO: 1815450 - RNA, 22 nt, Human
cacacggacacucaaaagcugg

SEQ ID NO: 1815451 - RNA, 13 nt, Human
cacccaagggccu

SEQ ID NO: 1815452 - RNA, 23 nt, Human
aggcuguaucccaugagccucag

SEQ ID NO: 1815453 - RNA, 17 nt, Human
aggcugcagugagccga

SEQ ID NO: 1815454 - RNA, 19 nt, Human
aggcugcagugagccgaga

SEQ ID NO: 1815455 - RNA, 24 nt, Human
aggcuguaucccaugagccucagc

SEQ ID NO: 1815456 - RNA, 19 nt, Human
aggcugucaauuacaggaa

SEQ ID NO: 1815457 - RNA, 12 nt, Human
aggcugucaauu

SEQ ID NO: 1815458 - RNA, 13 nt, Human
aggcucuucuccu

SEQ ID NO: 1815459 - RNA, 11 nt, Human
aggcugagccu

SEQ ID NO: 1815460 - RNA, 13 nt, Human
aggcugagccuca

SEQ ID NO: 1815461 - RNA, 11 nt, Human
aggcugaggac

SEQ ID NO: 1815462 - RNA, 13 nt, Human
aggcugaggacuu

SEQ ID NO: 1815463 - RNA, 22 nt, Human
aggcucuggagcccacuguacu

SEQ ID NO: 1815464 - RNA, 21 nt, Human
aggcccucugcccacucccug

SEQ ID NO: 1815465 - RNA, 19 nt, Human
aggcccucugcccacuccc

SEQ ID NO: 1815466 - RNA, 20 nt, Human
aggcccucugcccacucccu

SEQ ID NO: 1815467 - RNA, 13 nt, Human
agggccuggcuca

SEQ ID NO: 1815468 - RNA, 14 nt, Human
agggccuggcucag

SEQ ID NO: 1815469 - RNA, 18 nt, Human
agggccuggcucaggugg

SEQ ID NO: 1815470 - RNA, 17 nt, Human
agggacugagaaauuua

SEQ ID NO: 1815471 - RNA, 15 nt, Human
agggacugagaaauu

SEQ ID NO: 1815472 - RNA, 13 nt, Human
agggacugagaaa

SEQ ID NO: 1815473 - RNA, 14 nt, Human
agggacugagaaau

SEQ ID NO: 1815474 - RNA, 19 nt, Human
aggaaguacuggagaaaau

SEQ ID NO: 1815475 - RNA, 13 nt, Human
aggaaguagagga

SEQ ID NO: 1815476 - RNA, 16 nt, Human
aggagagcccuucauu

SEQ ID NO: 1815477 - RNA, 14 nt, Human
aggaggucucuaag

SEQ ID NO: 1815478 - RNA, 12 nt, Human
aggagugagcac

SEQ ID NO: 1815479 - RNA, 15 nt, Human
aggaggucucuaaga

SEQ ID NO: 1815480 - RNA, 14 nt, Human
aggagugagcacua

SEQ ID NO: 1815481 - RNA, 18 nt, Human
aggaguuucguuuucaaa

SEQ ID NO: 1815482 - RNA, 23 nt, Human
aggccagcugcuugggcuucauc

SEQ ID NO: 1815483 - RNA, 17 nt, Human
aggccaugggccuccug

SEQ ID NO: 1815484 - RNA, 17 nt, Human
aggcccucugcccacuc

SEQ ID NO: 1815485 - RNA, 16 nt, Human
aggccaugggccuccu

SEQ ID NO: 1815486 - RNA, 14 nt, Human
aggccaugggccuc

SEQ ID NO: 1815487 - RNA, 13 nt, Human
aggccagcugcuu

SEQ ID NO: 1815488 - RNA, 14 nt, Human
aggccagcugcuug

SEQ ID NO: 1815489 - RNA, 16 nt, Human
aggccagcugcuuggg

SEQ ID NO: 1815490 - RNA, 16 nt, Human
aggccaggcccucugc

SEQ ID NO: 1815491 - RNA, 17 nt, Human
aggccaggcccucugcc

SEQ ID NO: 1815492 - RNA, 18 nt, Human
aggccaggcccucugccc

SEQ ID NO: 1815493 - RNA, 19 nt, Human
aggccaggcccucugccca

SEQ ID NO: 1815494 - RNA, 23 nt, Human
aggccaggcccucugcccacucc

SEQ ID NO: 1815495 - RNA, 22 nt, Human
aggcauguucucugaggacacu

SEQ ID NO: 1815496 - RNA, 20 nt, Human
aggcauguucucugaggaca

SEQ ID NO: 1815497 - RNA, 21 nt, Human
aggcauuccccaggaggccag

SEQ ID NO: 1815498 - RNA, 22 nt, Human
aggcauuccccaggaggccagc

SEQ ID NO: 1815499 - RNA, 23 nt, Human
aggcauuccccaggaggccagcc

SEQ ID NO: 1815500 - RNA, 12 nt, Human
aggcauguucuc

SEQ ID NO: 1815501 - RNA, 22 nt, Human
aggcaugugccacccacccaac

SEQ ID NO: 1815502 - RNA, 23 nt, Human
aggcaugugaugagaggaaauca

SEQ ID NO: 1815503 - RNA, 24 nt, Human
aggcaugugaugagaggaaaucac

SEQ ID NO: 1815504 - RNA, 17 nt, Human
aggcaucgcaauguaag

SEQ ID NO: 1815505 - RNA, 18 nt, Human
aggcagccaggccacaag

SEQ ID NO: 1815506 - RNA, 13 nt, Human
aggcagauacagg

SEQ ID NO: 1815507 - RNA, 20 nt, Human
aggcagagguugcagugagc

SEQ ID NO: 1815508 - RNA, 22 nt, Human
aggcagaacucaucuagguaaa

SEQ ID NO: 1815509 - RNA, 14 nt, Human
aggcagccaggcca

SEQ ID NO: 1815510 - RNA, 15 nt, Human
aggcagccaggccac

SEQ ID NO: 1815511 - RNA, 16 nt, Human
aggcagccaggccaca

SEQ ID NO: 1815512 - RNA, 12 nt, Human
agcuacaaaugc

SEQ ID NO: 1815513 - RNA, 15 nt, Human
agcuaaugggacacu

SEQ ID NO: 1815514 - RNA, 14 nt, Human
agcuaaugggacac

SEQ ID NO: 1815515 - RNA, 13 nt, Human
agcuaaugggaca

SEQ ID NO: 1815516 - RNA, 19 nt, Human
agcuaagguuuagauaaau

SEQ ID NO: 1815517 - RNA, 13 nt, Human
agcuacaaaugca

SEQ ID NO: 1815518 - RNA, 21 nt, Human
agcucaccagccccagugccc

SEQ ID NO: 1815519 - RNA, 15 nt, Human
agcucaccagcccca

SEQ ID NO: 1815520 - RNA, 14 nt, Human
agcucaccagcccc

SEQ ID NO: 1815521 - RNA, 13 nt, Human
agcucaccagccc

SEQ ID NO: 1815522 - RNA, 15 nt, Human
agcgauucuucugcu

SEQ ID NO: 1815523 - RNA, 17 nt, Human
agcgacagugagacucu

SEQ ID NO: 1815524 - RNA, 19 nt, Human
agcgauucuucugcuucag

SEQ ID NO: 1815525 - RNA, 17 nt, Human
agcgauucuucugcuuc

SEQ ID NO: 1815526 - RNA, 15 nt, Human
agcgacagugagacu

SEQ ID NO: 1815527 - RNA, 13 nt, Human
agcgacagugaga

SEQ ID NO: 1815528 - RNA, 19 nt, Human
agcuaacauggaaguacua

SEQ ID NO: 1815529 - RNA, 20 nt, Human
agcuaacauggaaguacuau

SEQ ID NO: 1815530 - RNA, 18 nt, Human
agccugggcaaugugaua

SEQ ID NO: 1815531 - RNA, 17 nt, Human
agccugcugccugcuuu

SEQ ID NO: 1815532 - RNA, 20 nt, Human
agccuggcacagggcagugg

SEQ ID NO: 1815533 - RNA, 17 nt, Human
agccuggcacagggcag

SEQ ID NO: 1815534 - RNA, 18 nt, Human
agccuggcacagggcagu

SEQ ID NO: 1815535 - RNA, 14 nt, Human
agccuggacccugu

SEQ ID NO: 1815536 - RNA, 22 nt, Human
agcuuuguuuguugucagcuga

SEQ ID NO: 1815537 - RNA, 21 nt, Human
agcuuuguuuguugucagcug

SEQ ID NO: 1815538 - RNA, 18 nt, Human
aggaaaaaauaacaauga

SEQ ID NO: 1815539 - RNA, 19 nt, Human
aggaaaaccaagccguggc

SEQ ID NO: 1815540 - RNA, 15 nt, Human
aggaacacuccuuca

SEQ ID NO: 1815541 - RNA, 20 nt, Human
aggaaaaccaagccguggcu

SEQ ID NO: 1815542 - RNA, 21 nt, Human
aggaaaaccaagccguggcuu

SEQ ID NO: 1815543 - RNA, 22 nt, Human
aggaaaaccaagccguggcuuc

SEQ ID NO: 1815544 - RNA, 23 nt, Human
aggaaaaccaagccguggcuucc

SEQ ID NO: 1815545 - RNA, 12 nt, Human
aggaacacuccu

SEQ ID NO: 1815546 - RNA, 11 nt, Human
aggaaguacug

SEQ ID NO: 1815547 - RNA, 15 nt, Human
aggaaguacuggaga

SEQ ID NO: 1815548 - RNA, 14 nt, Human
aggaagguagaaau

SEQ ID NO: 1815549 - RNA, 16 nt, Human
agcugucaaggcucag

SEQ ID NO: 1815550 - RNA, 15 nt, Human
agcuggucccacuca

SEQ ID NO: 1815551 - RNA, 20 nt, Human
agcuggguuggaaaacagua

SEQ ID NO: 1815552 - RNA, 16 nt, Human
agcuggguuggaaaac

SEQ ID NO: 1815553 - RNA, 14 nt, Human
agcuggguuggaaa

SEQ ID NO: 1815554 - RNA, 16 nt, Human
agcugguugagguuuc

SEQ ID NO: 1815555 - RNA, 15 nt, Human
agcugacuuuucugu

SEQ ID NO: 1815556 - RNA, 21 nt, Human
agcugacuuuucuguccgagc

SEQ ID NO: 1815557 - RNA, 23 nt, Human
agcucaccagccccagugcccac

SEQ ID NO: 1815558 - RNA, 22 nt, Human
agcucaccagccccagugccca

SEQ ID NO: 1815559 - RNA, 18 nt, Human
agacgaaacauuuguucu

SEQ ID NO: 1815560 - RNA, 17 nt, Human
agacccaaaaggcagaa

SEQ ID NO: 1815561 - RNA, 14 nt, Human
agaccacguuucua

SEQ ID NO: 1815562 - RNA, 23 nt, Human
agaccaucccugaaggccccgcc

SEQ ID NO: 1815563 - RNA, 13 nt, Human
agacagcccucca

SEQ ID NO: 1815564 - RNA, 21 nt, Human
agacagcccgggcucugccuc

SEQ ID NO: 1815565 - RNA, 14 nt, Human
agacaauuuauuau

SEQ ID NO: 1815566 - RNA, 22 nt, Human
agacagcccgggcucugccucc

SEQ ID NO: 1815567 - RNA, 23 nt, Human
agacagcccgggcucugccuccc

SEQ ID NO: 1815568 - RNA, 15 nt, Human
agacuaucuaaaugu

SEQ ID NO: 1815569 - RNA, 17 nt, Human
agacgcugugcugcccu

SEQ ID NO: 1815570 - RNA, 18 nt, Human
agacgcugugcugcccug

SEQ ID NO: 1815571 - RNA, 19 nt, Human
agacgcugugcugcccugc

SEQ ID NO: 1815572 - RNA, 20 nt, Human
agacgcugugcugcccugcc

SEQ ID NO: 1815573 - RNA, 19 nt, Human
agacaaggaaaaaauaaca

SEQ ID NO: 1815574 - RNA, 20 nt, Human
agacaaugugaaaagaaaaa

SEQ ID NO: 1815575 - RNA, 15 nt, Human
agaauuuugagcagg

SEQ ID NO: 1815576 - RNA, 18 nt, Human
agagcccacgcccccacu

SEQ ID NO: 1815577 - RNA, 11 nt, Human
agagagcaaga

SEQ ID NO: 1815578 - RNA, 19 nt, Human
agagagcaagacgcugugc

SEQ ID NO: 1815579 - RNA, 23 nt, Human
agagagcaagacgcugugcugcc

SEQ ID NO: 1815580 - RNA, 12 nt, Human
agacugaccaau

SEQ ID NO: 1815581 - RNA, 21 nt, Human
agacugaccaauauuguacag

SEQ ID NO: 1815582 - RNA, 16 nt, Human
agacucuuuggacacu

SEQ ID NO: 1815583 - RNA, 22 nt, Human
agaacagugauuaccagggacu

SEQ ID NO: 1815584 - RNA, 13 nt, Human
agaacaucccucc

SEQ ID NO: 1815585 - RNA, 17 nt, Human
agaacaucccuccuggg

SEQ ID NO: 1815586 - RNA, 17 nt, Human
agaaccaaaaagaggcu

SEQ ID NO: 1815587 - RNA, 18 nt, Human
agaaccaaaaagaggcua

SEQ ID NO: 1815588 - RNA, 18 nt, Human
agaaugcucuuuacuuca

SEQ ID NO: 1815589 - RNA, 23 nt, Human
agaaugcacaaacagaggccgcc

SEQ ID NO: 1815590 - RNA, 17 nt, Human
agaaucucaaauaacua

SEQ ID NO: 1815591 - RNA, 16 nt, Human
agaaugaaagggccca

SEQ ID NO: 1815592 - RNA, 20 nt, Human
agaaccaggcaacuugggaa

SEQ ID NO: 1815593 - RNA, 17 nt, Human
agaaccaggcaacuugg

SEQ ID NO: 1815594 - RNA, 21 nt, Human
agaaccaaaaagaggcuaugu

SEQ ID NO: 1815595 - RNA, 15 nt, Human
agaagagaaugcaca

SEQ ID NO: 1815596 - RNA, 23 nt, Human
agaagagaaugcacaaacagagg

SEQ ID NO: 1815597 - RNA, 14 nt, Human
agaagucacacagu

SEQ ID NO: 1815598 - RNA, 17 nt, Human
agaagucuuagauguau

SEQ ID NO: 1815599 - RNA, 19 nt, Human
agaagucuuagauguauau

SEQ ID NO: 1815600 - RNA, 19 nt, Human
agaagauggcacuuauaac

SEQ ID NO: 1815601 - RNA, 18 nt, Human
agaagaugaaugagcaaa

SEQ ID NO: 1815602 - RNA, 16 nt, Human
agcaucuaugugagac

SEQ ID NO: 1815603 - RNA, 22 nt, Human
agccagcaggcucucaggccag

SEQ ID NO: 1815604 - RNA, 21 nt, Human
agccagcaggcucucaggcca

SEQ ID NO: 1815605 - RNA, 23 nt, Human
agccagcaggcucucaggccagc

SEQ ID NO: 1815606 - RNA, 13 nt, Human
agcccaccuuggc

SEQ ID NO: 1815607 - RNA, 23 nt, Human
agcccaccccucaacaccucugc

SEQ ID NO: 1815608 - RNA, 17 nt, Human
agcccacgcccccacug

SEQ ID NO: 1815609 - RNA, 18 nt, Human
agcccacgcccccacugg

SEQ ID NO: 1815610 - RNA, 19 nt, Human
agcccacgcccccacuggu

SEQ ID NO: 1815611 - RNA, 20 nt, Human
agcccacgcccccacuggug

SEQ ID NO: 1815612 - RNA, 17 nt, Human
agccaacuauggccugu

SEQ ID NO: 1815613 - RNA, 14 nt, Human
agccagauuucacu

SEQ ID NO: 1815614 - RNA, 17 nt, Human
agccagauuucacucuc

SEQ ID NO: 1815615 - RNA, 20 nt, Human
agccagauuucacucuccuu

SEQ ID NO: 1815616 - RNA, 22 nt, Human
agccagauuucacucuccuugg

SEQ ID NO: 1815617 - RNA, 16 nt, Human
agcagccuggacccug

SEQ ID NO: 1815618 - RNA, 13 nt, Human
agcagugcaugcu

SEQ ID NO: 1815619 - RNA, 16 nt, Human
agcagugcaugcuguc

SEQ ID NO: 1815620 - RNA, 20 nt, Human
agcagccuggacccugugga

SEQ ID NO: 1815621 - RNA, 19 nt, Human
agcagcguuucuaugacac

SEQ ID NO: 1815622 - RNA, 17 nt, Human
agcagugcaugcugucc

SEQ ID NO: 1815623 - RNA, 18 nt, Human
agcagugcaugcuguccc

SEQ ID NO: 1815624 - RNA, 21 nt, Human
agcacagacccugcccugugg

SEQ ID NO: 1815625 - RNA, 17 nt, Human
agcaauucuccugccuc

SEQ ID NO: 1815626 - RNA, 18 nt, Human
agcaauucuccugccuca

SEQ ID NO: 1815627 - RNA, 19 nt, Human
agcaauucuccugccucag

SEQ ID NO: 1815628 - RNA, 20 nt, Human
agcaauucuccugccucagc

SEQ ID NO: 1815629 - RNA, 15 nt, Human
agcaauucuccugcc

SEQ ID NO: 1815630 - RNA, 20 nt, Human
agauagauaggucagugcaa

SEQ ID NO: 1815631 - RNA, 20 nt, Human
agauagccaaggccaaagga

SEQ ID NO: 1815632 - RNA, 15 nt, Human
agauauaaaagacug

SEQ ID NO: 1815633 - RNA, 14 nt, Human
agaguugaagacag

SEQ ID NO: 1815634 - RNA, 15 nt, Human
agaguugaagacaga

SEQ ID NO: 1815635 - RNA, 13 nt, Human
agaguugaagaca

SEQ ID NO: 1815636 - RNA, 20 nt, Human
agagggucugaggaauccag

SEQ ID NO: 1815637 - RNA, 12 nt, Human
agaguggcuccu

SEQ ID NO: 1815638 - RNA, 13 nt, Human
agaguggcuccuc

SEQ ID NO: 1815639 - RNA, 14 nt, Human
agaguggcuccucc

SEQ ID NO: 1815640 - RNA, 15 nt, Human
agaguggcuccuccc

SEQ ID NO: 1815641 - RNA, 19 nt, Human
agcaaauucuguuuuucua

SEQ ID NO: 1815642 - RNA, 19 nt, Human
agauugcaacaggcugggc

SEQ ID NO: 1815643 - RNA, 17 nt, Human
agauugcaacaggcugg

SEQ ID NO: 1815644 - RNA, 16 nt, Human
agauugcaccacugca

SEQ ID NO: 1815645 - RNA, 16 nt, Human
agauugcaacaggcug

SEQ ID NO: 1815646 - RNA, 17 nt, Human
agauugagauguguuca

SEQ ID NO: 1815647 - RNA, 18 nt, Human
agauucuuuccugaggcu

SEQ ID NO: 1815648 - RNA, 15 nt, Human
agauucuuuccugag

SEQ ID NO: 1815649 - RNA, 16 nt, Human
agauucuuuccugagg

SEQ ID NO: 1815650 - RNA, 21 nt, Human
agauggcugugccucugccug

SEQ ID NO: 1815651 - RNA, 22 nt, Human
agauggcugugccucugccugu

SEQ ID NO: 1815652 - RNA, 17 nt, Human
agauggcugugccucug

SEQ ID NO: 1815653 - RNA, 18 nt, Human
agauggcugugccucugc

SEQ ID NO: 1815654 - RNA, 19 nt, Human
agauggcugugccucugcc

SEQ ID NO: 1815655 - RNA, 20 nt, Human
agauggcugugccucugccu

SEQ ID NO: 1815656 - RNA, 18 nt, Human
agaugacaucugucuagg

SEQ ID NO: 1815657 - RNA, 14 nt, Human
agauucuuuccuga

SEQ ID NO: 1815658 - RNA, 20 nt, Human
agaugggugcuuggaggaag

SEQ ID NO: 1815659 - RNA, 22 nt, Human
agaugggugcuuggaggaagga

SEQ ID NO: 1815660 - RNA, 18 nt, Human
agaucucugcuuuggaaa

SEQ ID NO: 1815661 - RNA, 23 nt, Human
agaucucugcuuuggaaaucaca

SEQ ID NO: 1815662 - RNA, 18 nt, Human
aguuacacuaaaagguga

SEQ ID NO: 1815663 - RNA, 14 nt, Human
aguucauacccugu

SEQ ID NO: 1815664 - RNA, 19 nt, Human
aguuacacauuuuucagau

SEQ ID NO: 1815665 - RNA, 16 nt, Human
aguuacacauuuuuca

SEQ ID NO: 1815666 - RNA, 13 nt, Human
aguuacacauuuu

SEQ ID NO: 1815667 - RNA, 18 nt, Human
aguuccaccaucaagcca

SEQ ID NO: 1815668 - RNA, 21 nt, Human
aguuccaccaucaagccacca

SEQ ID NO: 1815669 - RNA, 15 nt, Human
aguuccacugagacc

SEQ ID NO: 1815670 - RNA, 13 nt, Human
aguuccacugaga

SEQ ID NO: 1815671 - RNA, 17 nt, Human
aguugaaaaacagcuga

SEQ ID NO: 1815672 - RNA, 16 nt, Human
aguugaagacagagcu

SEQ ID NO: 1815673 - RNA, 17 nt, Human
aguugaagacagagcua

SEQ ID NO: 1815674 - RNA, 18 nt, Human
aguugaaaaacagcugag

SEQ ID NO: 1815675 - RNA, 20 nt, Human
aguuguuagauuaagaaaua

SEQ ID NO: 1815676 - RNA, 17 nt, Human
aguuguuagugugucuu

SEQ ID NO: 1815677 - RNA, 22 nt, Human
aguuguuagugugucuuagugu

SEQ ID NO: 1815678 - RNA, 16 nt, Human
auaaaagacagugaaa

SEQ ID NO: 1815679 - RNA, 15 nt, Human
auaaaagacagugaa

SEQ ID NO: 1815680 - RNA, 23 nt, Human
aguuucugucguuaaaaacagau

SEQ ID NO: 1815681 - RNA, 22 nt, Human
aguuucugucguuaaaaacaga

SEQ ID NO: 1815682 - RNA, 20 nt, Human
aguuucugucguuaaaaaca

SEQ ID NO: 1815683 - RNA, 14 nt, Human
aguuugauuaaauu

SEQ ID NO: 1815684 - RNA, 11 nt, Human
aguuugcaguu

SEQ ID NO: 1815685 - RNA, 23 nt, Human
auacaaugcugugcccuaaagug

SEQ ID NO: 1815686 - RNA, 12 nt, Human
auaauguuaaca

SEQ ID NO: 1815687 - RNA, 15 nt, Human
auacaccacuacauu

SEQ ID NO: 1815688 - RNA, 21 nt, Human
auaaagaugagugagcaugcc

SEQ ID NO: 1815689 - RNA, 18 nt, Human
auacaccgggccuggaga

SEQ ID NO: 1815690 - RNA, 14 nt, Human
auacaccgggccug

SEQ ID NO: 1815691 - RNA, 17 nt, Human
auacaccacuacauucu

SEQ ID NO: 1815692 - RNA, 22 nt, Human
aguacuucuccacccugcucuc

SEQ ID NO: 1815693 - RNA, 21 nt, Human
aguacuucuccacccugcucu

SEQ ID NO: 1815694 - RNA, 19 nt, Human
aguacuucuccacccugcu

SEQ ID NO: 1815695 - RNA, 20 nt, Human
aguacuucuccacccugcuc

SEQ ID NO: 1815696 - RNA, 22 nt, Human
aguauauugauccagaaagaaa

SEQ ID NO: 1815697 - RNA, 15 nt, Human
aguacuggagaaaau

SEQ ID NO: 1815698 - RNA, 17 nt, Human
aguaacuuacuuaggug

SEQ ID NO: 1815699 - RNA, 20 nt, Human
aguaaaugggggugcauuug

SEQ ID NO: 1815700 - RNA, 19 nt, Human
aguaaaugggggugcauuu

SEQ ID NO: 1815701 - RNA, 21 nt, Human
aguaaaugggggugcauuuga

SEQ ID NO: 1815702 - RNA, 20 nt, Human
agugauucuccugccucagc

SEQ ID NO: 1815703 - RNA, 19 nt, Human
agugauucuccugccucag

SEQ ID NO: 1815704 - RNA, 18 nt, Human
agugauucuccugccuca

SEQ ID NO: 1815705 - RNA, 19 nt, Human
agugccuuauggaacacuc

SEQ ID NO: 1815706 - RNA, 20 nt, Human
agugccuuauggaacacucu

SEQ ID NO: 1815707 - RNA, 21 nt, Human
agugccuuauggaacacucug

SEQ ID NO: 1815708 - RNA, 22 nt, Human
agugccuuauggaacacucuga

SEQ ID NO: 1815709 - RNA, 13 nt, Human
agugauuaccagg

SEQ ID NO: 1815710 - RNA, 23 nt, Human
agugauccucccaccucagccuc

SEQ ID NO: 1815711 - RNA, 22 nt, Human
agugauccucccaccucagccu

SEQ ID NO: 1815712 - RNA, 20 nt, Human
agugauccucccaccucagc

SEQ ID NO: 1815713 - RNA, 19 nt, Human
agugauccucccaccucag

SEQ ID NO: 1815714 - RNA, 14 nt, Human
agugacagaggcag

SEQ ID NO: 1815715 - RNA, 19 nt, Human
agugacagaggcagcccca

SEQ ID NO: 1815716 - RNA, 16 nt, Human
agugacagaggcagcc

SEQ ID NO: 1815717 - RNA, 18 nt, Human
agucuggcccuuccuuuu

SEQ ID NO: 1815718 - RNA, 16 nt, Human
agucgaggacagggag

SEQ ID NO: 1815719 - RNA, 22 nt, Human
agucugauucccaagcucugcu

SEQ ID NO: 1815720 - RNA, 21 nt, Human
agucugauucccaagcucugc

SEQ ID NO: 1815721 - RNA, 14 nt, Human
aguccucuuuucug

SEQ ID NO: 1815722 - RNA, 16 nt, Human
aguccuuaccagcaga

SEQ ID NO: 1815723 - RNA, 18 nt, Human
aguccuuaccagcagagc

SEQ ID NO: 1815724 - RNA, 12 nt, Human
augaauacuuug

SEQ ID NO: 1815725 - RNA, 17 nt, Human
augaauaaagacaccua

SEQ ID NO: 1815726 - RNA, 21 nt, Human
augaaguaauaugcacacauu

SEQ ID NO: 1815727 - RNA, 14 nt, Human
augaaguaauaugc

SEQ ID NO: 1815728 - RNA, 23 nt, Human
augaaguaauaugcacacauuuu

SEQ ID NO: 1815729 - RNA, 13 nt, Human
augaaguacucau

SEQ ID NO: 1815730 - RNA, 23 nt, Human
augaagcauuuacuuuguguuca

SEQ ID NO: 1815731 - RNA, 12 nt, Human
augaaagacugu

SEQ ID NO: 1815732 - RNA, 21 nt, Human
augagcuuugucuacuucaaa

SEQ ID NO: 1815733 - RNA, 21 nt, Human
augagccucagcauccuggca

SEQ ID NO: 1815734 - RNA, 11 nt, Human
augagccuggc

SEQ ID NO: 1815735 - RNA, 12 nt, Human
augagccuggca

SEQ ID NO: 1815736 - RNA, 13 nt, Human
augaccuuucaau

SEQ ID NO: 1815737 - RNA, 15 nt, Human
augaccuuucaauag

SEQ ID NO: 1815738 - RNA, 18 nt, Human
augaccuuucaauaggaa

SEQ ID NO: 1815739 - RNA, 19 nt, Human
aucuaggauuuuaagggaa

SEQ ID NO: 1815740 - RNA, 11 nt, Human
aucuaggauuu

SEQ ID NO: 1815741 - RNA, 23 nt, Human
aucuaggaagacuuuggaaagag

SEQ ID NO: 1815742 - RNA, 24 nt, Human
augcauauuauuuuauguugcaua

SEQ ID NO: 1815743 - RNA, 21 nt, Human
augccugguggcagcugcggu

SEQ ID NO: 1815744 - RNA, 18 nt, Human
augccugguggcagcugc

SEQ ID NO: 1815745 - RNA, 19 nt, Human
augccugguggcagcugcg

SEQ ID NO: 1815746 - RNA, 14 nt, Human
augccugguggcag

SEQ ID NO: 1815747 - RNA, 13 nt, Human
augccugguggca

SEQ ID NO: 1815748 - RNA, 12 nt, Human
augccugguggc

SEQ ID NO: 1815749 - RNA, 11 nt, Human
augccuggugg

SEQ ID NO: 1815750 - RNA, 16 nt, Human
augcuuugaucccuuc

SEQ ID NO: 1815751 - RNA, 14 nt, Human
augcuucuucagag

SEQ ID NO: 1815752 - RNA, 17 nt, Human
augcuucuucagagacu

SEQ ID NO: 1815753 - RNA, 20 nt, Human
augcuucuucagagacuccu

SEQ ID NO: 1815754 - RNA, 22 nt, Human
augcuucuucagagacuccugc

SEQ ID NO: 1815755 - RNA, 18 nt, Human
augcucugcauguuacau

SEQ ID NO: 1815756 - RNA, 19 nt, Human
augcucugcauguuacaua

SEQ ID NO: 1815757 - RNA, 15 nt, Human
augggacagggagga

SEQ ID NO: 1815758 - RNA, 14 nt, Human
aucgaccugccucg

SEQ ID NO: 1815759 - RNA, 22 nt, Human
aucuaggaagacuuuggaaaga

SEQ ID NO: 1815760 - RNA, 21 nt, Human
auccacugugccaugugccag

SEQ ID NO: 1815761 - RNA, 23 nt, Human
auccacuuuaucuugaauaaugu

SEQ ID NO: 1815762 - RNA, 14 nt, Human
aucaaauacauuua

SEQ ID NO: 1815763 - RNA, 13 nt, Human
aucaaauacauuu

SEQ ID NO: 1815764 - RNA, 15 nt, Human
aucauccuaagcuau

SEQ ID NO: 1815765 - RNA, 20 nt, Human
aucaugacaaagacugagua

SEQ ID NO: 1815766 - RNA, 19 nt, Human
aucauggagguuugaagau

SEQ ID NO: 1815767 - RNA, 14 nt, Human
auagcacagacccu

SEQ ID NO: 1815768 - RNA, 24 nt, Human
aucaaaagguuaauaaaguaauua

SEQ ID NO: 1815769 - RNA, 20 nt, Human
aucaaaagguuaauaaagua

SEQ ID NO: 1815770 - RNA, 19 nt, Human
aucaaagagguuuuaaaaa

SEQ ID NO: 1815771 - RNA, 12 nt, Human
aucaaaggacac

SEQ ID NO: 1815772 - RNA, 18 nt, Human
auauuuuuuucuuuucuu

SEQ ID NO: 1815773 - RNA, 14 nt, Human
aucaaaagaaagaa

SEQ ID NO: 1815774 - RNA, 15 nt, Human
acaaguuaaauaaau

SEQ ID NO: 1815775 - RNA, 16 nt, Human
acaaggcaaggcuguc

SEQ ID NO: 1815776 - RNA, 17 nt, Human
acaaggcaaggcuguca

SEQ ID NO: 1815777 - RNA, 19 nt, Human
acaaggcaaggcugucaau

SEQ ID NO: 1815778 - RNA, 20 nt, Human
acaaggcaaggcugucaauu

SEQ ID NO: 1815779 - RNA, 13 nt, Human
acaccagagccca

SEQ ID NO: 1815780 - RNA, 15 nt, Human
acaccaauauucaua

SEQ ID NO: 1815781 - RNA, 23 nt, Human
acaccagagcccaccuuggcuca

SEQ ID NO: 1815782 - RNA, 18 nt, Human
acaccagagcccaccuug

SEQ ID NO: 1815783 - RNA, 18 nt, Human
acacagcucuucuccagg

SEQ ID NO: 1815784 - RNA, 16 nt, Human
acacagcucuucucca

SEQ ID NO: 1815785 - RNA, 14 nt, Human
acacagcucuucuc

SEQ ID NO: 1815786 - RNA, 11 nt, Human
aauuguaauag

SEQ ID NO: 1815787 - RNA, 21 nt, Human
aauuuccacucaggucuguuu

SEQ ID NO: 1815788 - RNA, 15 nt, Human
aauuucccaaagcag

SEQ ID NO: 1815789 - RNA, 17 nt, Human
aauuucccaaagcagug

SEQ ID NO: 1815790 - RNA, 19 nt, Human
aauuauacccccugcaaag

SEQ ID NO: 1815791 - RNA, 19 nt, Human
aauuaugaguuauuuuuau

SEQ ID NO: 1815792 - RNA, 14 nt, Human
aauucuguuuuucu

SEQ ID NO: 1815793 - RNA, 18 nt, Human
aauucuguuuuucuaggc

SEQ ID NO: 1815794 - RNA, 22 nt, Human
aauuggauacgacaacuugcac

SEQ ID NO: 1815795 - RNA, 13 nt, Human
aauucuuaaauau

SEQ ID NO: 1815796 - RNA, 22 nt, Human
aauuguaaggaaugauuaauua

SEQ ID NO: 1815797 - RNA, 21 nt, Human
aauucucauuugucacacacu

SEQ ID NO: 1815798 - RNA, 14 nt, Human
aauucuccugccuc

SEQ ID NO: 1815799 - RNA, 15 nt, Human
aauucuccugccuca

SEQ ID NO: 1815800 - RNA, 16 nt, Human
aauucuccugccucag

SEQ ID NO: 1815801 - RNA, 17 nt, Human
aauucucuaguuugauu

SEQ ID NO: 1815802 - RNA, 15 nt, Human
aauucucuaguuuga

SEQ ID NO: 1815803 - RNA, 15 nt, Human
aauucucuuauccaa

SEQ ID NO: 1815804 - RNA, 22 nt, Human
aauucuagcuuugagcuuaaga

SEQ ID NO: 1815805 - RNA, 14 nt, Human
aauucuacuuugag

SEQ ID NO: 1815806 - RNA, 15 nt, Human
aauucuaugccuguc

SEQ ID NO: 1815807 - RNA, 13 nt, Human
aauucuaugccug

SEQ ID NO: 1815808 - RNA, 19 nt, Human
aauucucagaaucucaaau

SEQ ID NO: 1815809 - RNA, 17 nt, Human
acauguguuggcagccu

SEQ ID NO: 1815810 - RNA, 17 nt, Human
acauguuaaacuuacuu

SEQ ID NO: 1815811 - RNA, 19 nt, Human
acauguuuuucuucucccu

SEQ ID NO: 1815812 - RNA, 16 nt, Human
acauacaauuccaaac

SEQ ID NO: 1815813 - RNA, 20 nt, Human
acauacaggaagguagaaau

SEQ ID NO: 1815814 - RNA, 20 nt, Human
acauaaguauuuaauucaug

SEQ ID NO: 1815815 - RNA, 15 nt, Human
acauaagauaaaugu

SEQ ID NO: 1815816 - RNA, 13 nt, Human
acaugcacgugug

SEQ ID NO: 1815817 - RNA, 14 nt, Human
accaacgucugugc

SEQ ID NO: 1815818 - RNA, 17 nt, Human
accaacgucugugccau

SEQ ID NO: 1815819 - RNA, 16 nt, Human
accacgcuggaccuug

SEQ ID NO: 1815820 - RNA, 14 nt, Human
accacgcuggaccu

SEQ ID NO: 1815821 - RNA, 18 nt, Human
accacgcuggaccuugaa

SEQ ID NO: 1815822 - RNA, 14 nt, Human
accacguuucuaaa

SEQ ID NO: 1815823 - RNA, 13 nt, Human
accacguuucuaa

SEQ ID NO: 1815824 - RNA, 15 nt, Human
accaagccguggcuu

SEQ ID NO: 1815825 - RNA, 16 nt, Human
accaagccguggcuuc

SEQ ID NO: 1815826 - RNA, 17 nt, Human
accaagccguggcuucc

SEQ ID NO: 1815827 - RNA, 18 nt, Human
accaagccguggcuuccc

SEQ ID NO: 1815828 - RNA, 14 nt, Human
accaagccguggcu

SEQ ID NO: 1815829 - RNA, 21 nt, Human
accaacgucugugccauuuug

SEQ ID NO: 1815830 - RNA, 13 nt, Human
accagagcugcca

SEQ ID NO: 1815831 - RNA, 12 nt, Human
accagagcugcc

SEQ ID NO: 1815832 - RNA, 14 nt, Human
accagagcugccac

SEQ ID NO: 1815833 - RNA, 16 nt, Human
accagagcugccaccu

SEQ ID NO: 1815834 - RNA, 23 nt, Human
acaggcacccaccaucaugucug

SEQ ID NO: 1815835 - RNA, 15 nt, Human
acagugcaucucagc

SEQ ID NO: 1815836 - RNA, 17 nt, Human
acagugcaucucagccc

SEQ ID NO: 1815837 - RNA, 18 nt, Human
acagugcaucucagccca

SEQ ID NO: 1815838 - RNA, 13 nt, Human
acagugcaucuca

SEQ ID NO: 1815839 - RNA, 19 nt, Human
acagugauuaccagggacu

SEQ ID NO: 1815840 - RNA, 18 nt, Human
acaguggaaccagcccag

SEQ ID NO: 1815841 - RNA, 17 nt, Human
acaggcaaugcuggcug

SEQ ID NO: 1815842 - RNA, 14 nt, Human
acaggcacccacca

SEQ ID NO: 1815843 - RNA, 16 nt, Human
acaggcaaugcuggcu

SEQ ID NO: 1815844 - RNA, 15 nt, Human
acaggcaaugcuggc

SEQ ID NO: 1815845 - RNA, 14 nt, Human
acaggauuauugga

SEQ ID NO: 1815846 - RNA, 20 nt, Human
acagcucuucuccaggcugu

SEQ ID NO: 1815847 - RNA, 19 nt, Human
acagcucuucuccaggcug

SEQ ID NO: 1815848 - RNA, 19 nt, Human
acggaauaguuggcuagga

SEQ ID NO: 1815849 - RNA, 17 nt, Human
acggacacucaaaagcu

SEQ ID NO: 1815850 - RNA, 19 nt, Human
acggacacucaaaagcugg

SEQ ID NO: 1815851 - RNA, 12 nt, Human
acgucugugcca

SEQ ID NO: 1815852 - RNA, 13 nt, Human
acgucugugccau

SEQ ID NO: 1815853 - RNA, 12 nt, Human
acgcagcccugc

SEQ ID NO: 1815854 - RNA, 22 nt, Human
acgcagcccugcuuugggcugc

SEQ ID NO: 1815855 - RNA, 23 nt, Human
acgcagcccugcuuugggcugcc

SEQ ID NO: 1815856 - RNA, 22 nt, Human
acgcugugcugcccugcccacc

SEQ ID NO: 1815857 - RNA, 19 nt, Human
acgcugugcugcccugccc

SEQ ID NO: 1815858 - RNA, 19 nt, Human
acgauuucuguuuagauaa

SEQ ID NO: 1815859 - RNA, 23 nt, Human
acgauuucuguuuagauaauaca

SEQ ID NO: 1815860 - RNA, 20 nt, Human
acgauuucuguuuagauaau

SEQ ID NO: 1815861 - RNA, 18 nt, Human
acuaauggggcggugaga

SEQ ID NO: 1815862 - RNA, 12 nt, Human
accuuggcucaa

SEQ ID NO: 1815863 - RNA, 23 nt, Human
accucugccugaagucacacagu

SEQ ID NO: 1815864 - RNA, 20 nt, Human
accucugccugaagucacac

SEQ ID NO: 1815865 - RNA, 12 nt, Human
accucugccuga

SEQ ID NO: 1815866 - RNA, 17 nt, Human
accuguggccaaguucu

SEQ ID NO: 1815867 - RNA, 21 nt, Human
accugccaggaagccagcagg

SEQ ID NO: 1815868 - RNA, 22 nt, Human
accugccaggaagccagcaggc

SEQ ID NO: 1815869 - RNA, 23 nt, Human
accugccaggaagccagcaggcu

SEQ ID NO: 1815870 - RNA, 12 nt, Human
accugccccuca

SEQ ID NO: 1815871 - RNA, 15 nt, Human
accugccccucaacu

SEQ ID NO: 1815872 - RNA, 20 nt, Human
accugccccucaacucuccu

SEQ ID NO: 1815873 - RNA, 16 nt, Human
acccuggggagaaagu

SEQ ID NO: 1815874 - RNA, 16 nt, Human
acccugugauggggcc

SEQ ID NO: 1815875 - RNA, 21 nt, Human
acccugucucuacuaaaaaua

SEQ ID NO: 1815876 - RNA, 23 nt, Human
acccucaucaccaacgucugugc

SEQ ID NO: 1815877 - RNA, 18 nt, Human
acccuggcacccagggug

SEQ ID NO: 1815878 - RNA, 23 nt, Human
acccuggcacuauaauguaagcu

SEQ ID NO: 1815879 - RNA, 18 nt, Human
acccucagagccaccccu

SEQ ID NO: 1815880 - RNA, 13 nt, Human
acccucaggcagg

SEQ ID NO: 1815881 - RNA, 14 nt, Human
acccucaggcaggu

SEQ ID NO: 1815882 - RNA, 13 nt, Human
acccucaucacca

SEQ ID NO: 1815883 - RNA, 15 nt, Human
acccucaggcaggug

SEQ ID NO: 1815884 - RNA, 16 nt, Human
acccucaggcaggugg

SEQ ID NO: 1815885 - RNA, 11 nt, Human
acccucagagc

SEQ ID NO: 1815886 - RNA, 14 nt, Human
acccuauugcugcu

SEQ ID NO: 1815887 - RNA, 19 nt, Human
acccuauugcugcuugagg

SEQ ID NO: 1815888 - RNA, 13 nt, Human
acccuauugcugc

SEQ ID NO: 1815889 - RNA, 21 nt, Human
accucaggugauccacccacc

SEQ ID NO: 1815890 - RNA, 20 nt, Human
accucaggugauccacccac

SEQ ID NO: 1815891 - RNA, 11 nt, Human
accucaggccu

SEQ ID NO: 1815892 - RNA, 16 nt, Human
accgggcacucagaag

SEQ ID NO: 1815893 - RNA, 14 nt, Human
accgggcacucaga

SEQ ID NO: 1815894 - RNA, 12 nt, Human
accgggcacuca

SEQ ID NO: 1815895 - RNA, 17 nt, Human
acccugugauggggccc

SEQ ID NO: 1815896 - RNA, 19 nt, Human
acccugugauggggcccug

SEQ ID NO: 1815897 - RNA, 20 nt, Human
acccugugauggggcccugc

SEQ ID NO: 1815898 - RNA, 21 nt, Human
acccugugauggggcccugcc

SEQ ID NO: 1815899 - RNA, 11 nt, Human
accucagccuc

SEQ ID NO: 1815900 - RNA, 12 nt, Human
accucagccucc

SEQ ID NO: 1815901 - RNA, 19 nt, Human
accgugccuggccacgccc

SEQ ID NO: 1815902 - RNA, 23 nt, Human
accgugaggccagagacacaagc

SEQ ID NO: 1815903 - RNA, 21 nt, Human
accgggcugggagcucugcag

SEQ ID NO: 1815904 - RNA, 23 nt, Human
accgggcugggagcucugcagag

SEQ ID NO: 1815905 - RNA, 18 nt, Human
accgugaggccagagaca

SEQ ID NO: 1815906 - RNA, 19 nt, Human
acuguuucaaacuuuacua

SEQ ID NO: 1815907 - RNA, 18 nt, Human
acuguuucaaacuuuacu

SEQ ID NO: 1815908 - RNA, 15 nt, Human
acuguuucaaacuuu

SEQ ID NO: 1815909 - RNA, 22 nt, Human
acuuaaaaaugguuuaaauggu

SEQ ID NO: 1815910 - RNA, 15 nt, Human
acuucaaaaguuugu

SEQ ID NO: 1815911 - RNA, 20 nt, Human
acuuaaaauauuccugcauu

SEQ ID NO: 1815912 - RNA, 21 nt, Human
acuucagacauagaauuaaca

SEQ ID NO: 1815913 - RNA, 12 nt, Human
acuugaaaauua

SEQ ID NO: 1815914 - RNA, 14 nt, Human
acuugaaaauuaac

SEQ ID NO: 1815915 - RNA, 16 nt, Human
acuugaaaauuaacau

SEQ ID NO: 1815916 - RNA, 23 nt, Human
acuuggggggcugaggugggagg

SEQ ID NO: 1815917 - RNA, 13 nt, Human
acuuggucuguga

SEQ ID NO: 1815918 - RNA, 17 nt, Human
acuguaaaauaauaacu

SEQ ID NO: 1815919 - RNA, 12 nt, Human
acugguggcccg

SEQ ID NO: 1815920 - RNA, 15 nt, Human
acugccuauuuuaau

SEQ ID NO: 1815921 - RNA, 12 nt, Human
acuggaacucuc

SEQ ID NO: 1815922 - RNA, 14 nt, Human
acugccaugccagc

SEQ ID NO: 1815923 - RNA, 19 nt, Human
acugcccaggccugccugu

SEQ ID NO: 1815924 - RNA, 18 nt, Human
acugugccaugugccagg

SEQ ID NO: 1815925 - RNA, 17 nt, Human
acugugccaugugccag

SEQ ID NO: 1815926 - RNA, 22 nt, Human
acugucuuuuuucuaaaguaaa

SEQ ID NO: 1815927 - RNA, 23 nt, Human
acugucuuuuuucuaaaguaaaa

SEQ ID NO: 1815928 - RNA, 16 nt, Human
acugugaagagaacca

SEQ ID NO: 1815929 - RNA, 16 nt, Human
acugucuuuuuucuaa

SEQ ID NO: 1815930 - RNA, 18 nt, Human
acugacauuguuggccaa

SEQ ID NO: 1815931 - RNA, 17 nt, Human
acugacauuguuggcca

SEQ ID NO: 1815932 - RNA, 23 nt, Human
acugaauuucuuuugccguuauu

SEQ ID NO: 1815933 - RNA, 12 nt, Human
acugaauuucuu

SEQ ID NO: 1815934 - RNA, 23 nt, Human
acugaugggcaacccccagccug

SEQ ID NO: 1815935 - RNA, 20 nt, Human
acugauguaugaggaauuuc

SEQ ID NO: 1815936 - RNA, 14 nt, Human
acugauuacugccu

SEQ ID NO: 1815937 - RNA, 17 nt, Human
acugauuuuuuuuuccu

SEQ ID NO: 1815938 - RNA, 18 nt, Human
acugauuuuuuuuuccuu

SEQ ID NO: 1815939 - RNA, 19 nt, Human
acugauuuuuuuuuccuuc

SEQ ID NO: 1815940 - RNA, 20 nt, Human
acugauuuuuuuuuccuuca

SEQ ID NO: 1815941 - RNA, 16 nt, Human
acugauuuuuuuuucc

SEQ ID NO: 1815942 - RNA, 15 nt, Human
acucuacagaggcca

SEQ ID NO: 1815943 - RNA, 14 nt, Human
acucccuuucaaca

SEQ ID NO: 1815944 - RNA, 18 nt, Human
acucccugccccccagcc

SEQ ID NO: 1815945 - RNA, 15 nt, Human
acucccaagcuggac

SEQ ID NO: 1815946 - RNA, 22 nt, Human
acucccaucugugaaaggaaag

SEQ ID NO: 1815947 - RNA, 21 nt, Human
aagacaaggaaaaaauaacaa

SEQ ID NO: 1815948 - RNA, 22 nt, Human
aagacaaugacuuacuguacau

SEQ ID NO: 1815949 - RNA, 19 nt, Human
aagacaaugugaaaagaaa

SEQ ID NO: 1815950 - RNA, 20 nt, Human
aagacaaugugaaaagaaaa

SEQ ID NO: 1815951 - RNA, 14 nt, Human
aagaacuagcauaa

SEQ ID NO: 1815952 - RNA, 12 nt, Human
aacgcagcccug

SEQ ID NO: 1815953 - RNA, 16 nt, Human
aacgcagcccugcuuu

SEQ ID NO: 1815954 - RNA, 12 nt, Human
aagacagagucu

SEQ ID NO: 1815955 - RNA, 23 nt, Human
aagacagauacuccuccaagguu

SEQ ID NO: 1815956 - RNA, 17 nt, Human
aagaccacguuucuaaa

SEQ ID NO: 1815957 - RNA, 15 nt, Human
aagaccacguuucua

SEQ ID NO: 1815958 - RNA, 21 nt, Human
aagacuuuuccaacccucauc

SEQ ID NO: 1815959 - RNA, 12 nt, Human
aagacuuuucuu

SEQ ID NO: 1815960 - RNA, 19 nt, Human
aagacuuuucuuucagcca

SEQ ID NO: 1815961 - RNA, 13 nt, Human
aagagaaaaaaua

SEQ ID NO: 1815962 - RNA, 13 nt, Human
aaggcaaggcugu

SEQ ID NO: 1815963 - RNA, 19 nt, Human
aaggcagggagggccuggg

SEQ ID NO: 1815964 - RNA, 22 nt, Human
aaggcagggagggccugggccc

SEQ ID NO: 1815965 - RNA, 16 nt, Human
aaggcaaggcugucaa

SEQ ID NO: 1815966 - RNA, 15 nt, Human
aaggcaaggcuguca

SEQ ID NO: 1815967 - RNA, 22 nt, Human
aagcuagacgagcaggcuucuu

SEQ ID NO: 1815968 - RNA, 13 nt, Human
aagcugcacccuc

SEQ ID NO: 1815969 - RNA, 19 nt, Human
aagcugcacccucaggcag

SEQ ID NO: 1815970 - RNA, 23 nt, Human
aagauacaguuacucagaauucu

SEQ ID NO: 1815971 - RNA, 17 nt, Human
aagauacaguuacucag

SEQ ID NO: 1815972 - RNA, 19 nt, Human
aagauaauauuaaggaaga

SEQ ID NO: 1815973 - RNA, 21 nt, Human
aagauaauauuaaggaagaca

SEQ ID NO: 1815974 - RNA, 23 nt, Human
aagccagguuccacagaggacac

SEQ ID NO: 1815975 - RNA, 21 nt, Human
aagccagguuccacagaggac

SEQ ID NO: 1815976 - RNA, 15 nt, Human
aagcgugagccacug

SEQ ID NO: 1815977 - RNA, 16 nt, Human
aagcgugagccacugc

SEQ ID NO: 1815978 - RNA, 13 nt, Human
aagcuagaaauga

SEQ ID NO: 1815979 - RNA, 14 nt, Human
aagcggcuggcagc

SEQ ID NO: 1815980 - RNA, 10 nt, Human
aagccuuugu

SEQ ID NO: 1815981 - RNA, 20 nt, Human
aaugaauacuuuauaaagga

SEQ ID NO: 1815982 - RNA, 20 nt, Human
aaugauguauguugaagccu

SEQ ID NO: 1815983 - RNA, 20 nt, Human
aaugaugccaugaggaacaa

SEQ ID NO: 1815984 - RNA, 14 nt, Human
aaugaagcaaugcu

SEQ ID NO: 1815985 - RNA, 21 nt, Human
aaugaaagacuguacaaagua

SEQ ID NO: 1815986 - RNA, 18 nt, Human
aaugaaagacuguacaaa

SEQ ID NO: 1815987 - RNA, 20 nt, Human
aaugaaagacuguacaaagu

SEQ ID NO: 1815988 - RNA, 23 nt, Human
aauauguggaguucaucuugaau

SEQ ID NO: 1815989 - RNA, 13 nt, Human
aauauuaagaaag

SEQ ID NO: 1815990 - RNA, 23 nt, Human
aaucaaguuggcuucuaaucaaa

SEQ ID NO: 1815991 - RNA, 15 nt, Human
aaucacguaaagcua

SEQ ID NO: 1815992 - RNA, 23 nt, Human
aaucaccgaaaacguggcugcuu

SEQ ID NO: 1815993 - RNA, 22 nt, Human
aaucaaugcuauaacuauguug

SEQ ID NO: 1815994 - RNA, 21 nt, Human
aaucaccgaaaacguggcugc

SEQ ID NO: 1815995 - RNA, 12 nt, Human
aauaaagacagg

SEQ ID NO: 1815996 - RNA, 11 nt, Human
aauaaagacag

SEQ ID NO: 1815997 - RNA, 22 nt, Human
aauaaugugaaacuggauuaaa

SEQ ID NO: 1815998 - RNA, 17 nt, Human
aauaaugugaaacugga

SEQ ID NO: 1815999 - RNA, 14 nt, Human
aauaaagcagcguu

SEQ ID NO: 1816000 - RNA, 19 nt, Human
aauaauguuaacauggaca

SEQ ID NO: 1816001 - RNA, 12 nt, Human
aagugcugggau

SEQ ID NO: 1816002 - RNA, 22 nt, Human
aagugcugggauuacaggugug

SEQ ID NO: 1816003 - RNA, 22 nt, Human
aagugcugcauuuaaaagauac

SEQ ID NO: 1816004 - RNA, 22 nt, Human
aaguuguaggcauaaagucagg

SEQ ID NO: 1816005 - RNA, 19 nt, Human
aauaaacacucuugaaaaa

SEQ ID NO: 1816006 - RNA, 11 nt, Human
aauaaacacuc

SEQ ID NO: 1816007 - RNA, 16 nt, Human
aauaaacacucuugaa

SEQ ID NO: 1816008 - RNA, 22 nt, Human
aacauggccuuugcuugaaaga

SEQ ID NO: 1816009 - RNA, 11 nt, Human
aacaggcagau

SEQ ID NO: 1816010 - RNA, 18 nt, Human
aaauucuugcaaaguauc

SEQ ID NO: 1816011 - RNA, 15 nt, Human
aaauucuugcaaagu

SEQ ID NO: 1816012 - RNA, 23 nt, Human
aaauucuucuccacuuucuagcc

SEQ ID NO: 1816013 - RNA, 19 nt, Human
aacccucagagccaccccu

SEQ ID NO: 1816014 - RNA, 12 nt, Human
aacccucagagc

SEQ ID NO: 1816015 - RNA, 23 nt, Human
aacauggccuuugcuugaaagaa

SEQ ID NO: 1816016 - RNA, 18 nt, Human
aaccuuuguuugcaucug

SEQ ID NO: 1816017 - RNA, 16 nt, Human
aaccuuuugagugccu

SEQ ID NO: 1816018 - RNA, 23 nt, Human
aaccuuuugagugccuuacacaa

SEQ ID NO: 1816019 - RNA, 14 nt, Human
aaaugaaaaaauau

SEQ ID NO: 1816020 - RNA, 22 nt, Human
aaaugcugguuuuucaguuuuc

SEQ ID NO: 1816021 - RNA, 19 nt, Human
aaaugcuguaacuuucuga

SEQ ID NO: 1816022 - RNA, 19 nt, Human
aaaucuccaaaauaaaacu

SEQ ID NO: 1816023 - RNA, 13 nt, Human
aaaucuuuuugcu

SEQ ID NO: 1816024 - RNA, 14 nt, Human
aaaucuuuuugcuu

SEQ ID NO: 1816025 - RNA, 22 nt, Human
aaauauuuagauguaauuuugu

SEQ ID NO: 1816026 - RNA, 20 nt, Human
aaaggaugcccaaagaugca

SEQ ID NO: 1816027 - RNA, 14 nt, Human
aaaggaugcacaga

SEQ ID NO: 1816028 - RNA, 13 nt, Human
aaauguucaucaa

SEQ ID NO: 1816029 - RNA, 17 nt, Human
aaauguucaucaaugaa

SEQ ID NO: 1816030 - RNA, 18 nt, Human
aaacccagcucuggucca

SEQ ID NO: 1816031 - RNA, 12 nt, Human
aaacccagcucu

SEQ ID NO: 1816032 - RNA, 16 nt, Human
aaacccagcucugguc

SEQ ID NO: 1816033 - RNA, 22 nt, Human
aaacucuguuacacuuuuugga

SEQ ID NO: 1816034 - RNA, 18 nt, Human
aaacucuguuacacuuuu

SEQ ID NO: 1816035 - RNA, 15 nt, Human
aaaccgccaaggcug

SEQ ID NO: 1816036 - RNA, 16 nt, Human
aaaccgccaaggcugg

SEQ ID NO: 1816037 - RNA, 12 nt, Human
aaacucuuaaaa

SEQ ID NO: 1816038 - RNA, 23 nt, Human
aaacucuuaaaacccaagugccu

SEQ ID NO: 1816039 - RNA, 22 nt, Human
aaacugauuuuuuuuuccuuca

SEQ ID NO: 1816040 - RNA, 23 nt, Human
aaacugauuuuuuuuuccuucag

SEQ ID NO: 1816041 - RNA, 18 nt, Human
aaaaucucaaauuucuaa

SEQ ID NO: 1816042 - RNA, 16 nt, Human
aaaaucucaaauuucu

SEQ ID NO: 1816043 - RNA, 15 nt, Human
aaaaucucaaauuuc

SEQ ID NO: 1816044 - RNA, 15 nt, Human
aaagcccaaaguggu

SEQ ID NO: 1816045 - RNA, 16 nt, Human
aaaauaaaacuuuuua

SEQ ID NO: 1816046 - RNA, 13 nt, Human
aaaaucagccugc

SEQ ID NO: 1816047 - RNA, 17 nt, Human
aaaaucagccugcucca

SEQ ID NO: 1816048 - RNA, 21 nt, Human
aaaaucagccugcuccagcug

SEQ ID NO: 1816049 - RNA, 14 nt, Human
aaaauaaaacuuuu

SEQ ID NO: 1816050 - RNA, 20 nt, Human
aaaagacaaggaaaaaauaa

SEQ ID NO: 1816051 - RNA, 16 nt, Human
aaaagaaaagucaagg

SEQ ID NO: 1816052 - RNA, 17 nt, Human
aaaagaaagaaaaucag

SEQ ID NO: 1816053 - RNA, 19 nt, Human
aaaacacuguucucugccc

SEQ ID NO: 1816054 - RNA, 17 nt, Human
aaaacacauuuuucuua

SEQ ID NO: 1816055 - RNA, 11 nt, Human
aaaagaaaaag

SEQ ID NO: 1816056 - RNA, 20 nt, Human
auguuacauaagauaaaugu

SEQ ID NO: 1816057 - RNA, 19 nt, Human
auguuacauaagauaaaug

SEQ ID NO: 1816058 - RNA, 17 nt, Human
uuuuagaguugauacua

SEQ ID NO: 1816059 - RNA, 21 nt, Human
uuuuagacccuauugcugcuu

SEQ ID NO: 1816060 - RNA, 16 nt, Human
auguugcccaggcagg

SEQ ID NO: 1816061 - RNA, 15 nt, Human
auguugcccaggcag

SEQ ID NO: 1816062 - RNA, 14 nt, Human
auguugcccaggca

SEQ ID NO: 1816063 - RNA, 13 nt, Human
auguugcccaggc

SEQ ID NO: 1816064 - RNA, 18 nt, Human
auguugaaagaucaaaag

SEQ ID NO: 1816065 - RNA, 12 nt, Human
auguugaaagau

SEQ ID NO: 1816066 - RNA, 15 nt, Human
auguguguuuuaaaa

SEQ ID NO: 1816067 - RNA, 21 nt, Human
augugccagguuuuuggucug

SEQ ID NO: 1816068 - RNA, 21 nt, Human
uuuuaaaaaacugcugacugu

SEQ ID NO: 1816069 - RNA, 18 nt, Human
uuuuaaaaaacugcugac

SEQ ID NO: 1816070 - RNA, 16 nt, Human
uuuucuauaauuuaaa

SEQ ID NO: 1816071 - RNA, 14 nt, Human
uuuucaguguacau

SEQ ID NO: 1816072 - RNA, 15 nt, Human
uuuuaguagagacag

SEQ ID NO: 1816073 - RNA, 19 nt, Human
uuuuauggcuuuugugcau

SEQ ID NO: 1816074 - RNA, 18 nt, Human
uuuuauggcuuuugugca

SEQ ID NO: 1816075 - RNA, 21 nt, Human
uuuuauggcuuuugugcauua

SEQ ID NO: 1816076 - RNA, 12 nt, Human
uuuuauuaaauu

SEQ ID NO: 1816077 - RNA, 17 nt, Human
auguuggccaggcuggu

SEQ ID NO: 1816078 - RNA, 21 nt, Human
uuuucuuaaccagaucauugu

SEQ ID NO: 1816079 - RNA, 13 nt, Human
uuuucuguucuuu

SEQ ID NO: 1816080 - RNA, 19 nt, Human
auuaaaacacaacaucuuu

SEQ ID NO: 1816081 - RNA, 23 nt, Human
auuaaaaaucucaaauuucuaaa

SEQ ID NO: 1816082 - RNA, 15 nt, Human
auguuuuuuuuuaaa

SEQ ID NO: 1816083 - RNA, 23 nt, Human
augucgucaaagcugaaauggac

SEQ ID NO: 1816084 - RNA, 14 nt, Human
augugagacugguu

SEQ ID NO: 1816085 - RNA, 13 nt, Human
augugagaccauu

SEQ ID NO: 1816086 - RNA, 16 nt, Human
auguccaagaagccca

SEQ ID NO: 1816087 - RNA, 17 nt, Human
auguccaagaagcccag

SEQ ID NO: 1816088 - RNA, 17 nt, Human
auguaucaaauacauuu

SEQ ID NO: 1816089 - RNA, 12 nt, Human
auguaucaauga

SEQ ID NO: 1816090 - RNA, 19 nt, Human
auguauauuuuauaucaau

SEQ ID NO: 1816091 - RNA, 15 nt, Human
augugaugagaggaa

SEQ ID NO: 1816092 - RNA, 18 nt, Human
augugauccuuuuggagu

SEQ ID NO: 1816093 - RNA, 16 nt, Human
uuuguaauuuuuuuau

SEQ ID NO: 1816094 - RNA, 14 nt, Human
uuuguacagacaac

SEQ ID NO: 1816095 - RNA, 14 nt, Human
uuuguuucugaaag

SEQ ID NO: 1816096 - RNA, 16 nt, Human
uuuguuucugaaaggg

SEQ ID NO: 1816097 - RNA, 13 nt, Human
uuuguuucauauu

SEQ ID NO: 1816098 - RNA, 22 nt, Human
uuugugcauuaucuagauacug

SEQ ID NO: 1816099 - RNA, 19 nt, Human
uuugugcauuaucuagaua

SEQ ID NO: 1816100 - RNA, 15 nt, Human
uuugugauacaaugc

SEQ ID NO: 1816101 - RNA, 22 nt, Human
uuugugauacaaugcugugccc

SEQ ID NO: 1816102 - RNA, 16 nt, Human
uuugugauacaaugcu

SEQ ID NO: 1816103 - RNA, 23 nt, Human
uuugucuuaaaaaguggaaaaau

SEQ ID NO: 1816104 - RNA, 13 nt, Human
uuugucuuaaaaa

SEQ ID NO: 1816105 - RNA, 14 nt, Human
uuugucuuaaaaag

SEQ ID NO: 1816106 - RNA, 22 nt, Human
uuugggguacccacugcucugg

SEQ ID NO: 1816107 - RNA, 21 nt, Human
uuugggguacccacugcucug

SEQ ID NO: 1816108 - RNA, 13 nt, Human
uuuggggaagaac

SEQ ID NO: 1816109 - RNA, 14 nt, Human
uuugggcugcccug

SEQ ID NO: 1816110 - RNA, 12 nt, Human
uuuggcugcuga

SEQ ID NO: 1816111 - RNA, 13 nt, Human
uuuggcugcugaa

SEQ ID NO: 1816112 - RNA, 18 nt, Human
uuugauucagacagcugc

SEQ ID NO: 1816113 - RNA, 22 nt, Human
uuugcuggggccgaaagaacag

SEQ ID NO: 1816114 - RNA, 19 nt, Human
uuugcuggggccgaaagaa

SEQ ID NO: 1816115 - RNA, 20 nt, Human
uuugcuggagcucugcccau

SEQ ID NO: 1816116 - RNA, 13 nt, Human
uuugcuguagaag

SEQ ID NO: 1816117 - RNA, 22 nt, Human
uuuggauuggaugaauuccaaa

SEQ ID NO: 1816118 - RNA, 18 nt, Human
uuugaccucugcagcaau

SEQ ID NO: 1816119 - RNA, 13 nt, Human
uuugagacagagu

SEQ ID NO: 1816120 - RNA, 15 nt, Human
uuugauccaagcugg

SEQ ID NO: 1816121 - RNA, 15 nt, Human
uuugauucagacagc

SEQ ID NO: 1816122 - RNA, 18 nt, Human
uuugacaaagguaaauca

SEQ ID NO: 1816123 - RNA, 14 nt, Human
uuugacaaggggca

SEQ ID NO: 1816124 - RNA, 21 nt, Human
uuugaccucugcagcaauaaa

SEQ ID NO: 1816125 - RNA, 19 nt, Human
uuugaccucugcagcaaua

SEQ ID NO: 1816126 - RNA, 23 nt, Human
uuucccucccuuccucuuuccau

SEQ ID NO: 1816127 - RNA, 20 nt, Human
auuauauggcuugaguuuaa

SEQ ID NO: 1816128 - RNA, 17 nt, Human
auuccaagugauugaaa

SEQ ID NO: 1816129 - RNA, 12 nt, Human
auuccacagcug

SEQ ID NO: 1816130 - RNA, 13 nt, Human
auuccacagcugc

SEQ ID NO: 1816131 - RNA, 17 nt, Human
auucccaagcucugcuc

SEQ ID NO: 1816132 - RNA, 18 nt, Human
auuccagagaguggcucc

SEQ ID NO: 1816133 - RNA, 19 nt, Human
auucccaagcucugcuccu

SEQ ID NO: 1816134 - RNA, 18 nt, Human
auucccaagcucugcucc

SEQ ID NO: 1816135 - RNA, 20 nt, Human
auuccccaggaggccagccu

SEQ ID NO: 1816136 - RNA, 22 nt, Human
auuccccaggaggccagccuug

SEQ ID NO: 1816137 - RNA, 14 nt, Human
auucagccuggcuu

SEQ ID NO: 1816138 - RNA, 15 nt, Human
auucagccuggcuuc

SEQ ID NO: 1816139 - RNA, 21 nt, Human
uuuugugaaguuuaauugacu

SEQ ID NO: 1816140 - RNA, 16 nt, Human
uuuuguuuuugucuua

SEQ ID NO: 1816141 - RNA, 15 nt, Human
uuuuugaagcuguau

SEQ ID NO: 1816142 - RNA, 19 nt, Human
uuuuuggaagugaaaacuu

SEQ ID NO: 1816143 - RNA, 15 nt, Human
uuuuuggaagugaaa

SEQ ID NO: 1816144 - RNA, 22 nt, Human
uuuuugggaaaagaaaagucaa

SEQ ID NO: 1816145 - RNA, 11 nt, Human
uuuuuguauuu

SEQ ID NO: 1816146 - RNA, 13 nt, Human
auuaaggaagaca

SEQ ID NO: 1816147 - RNA, 18 nt, Human
auuaaguacuauguauca

SEQ ID NO: 1816148 - RNA, 19 nt, Human
auuaaguacuauguaucaa

SEQ ID NO: 1816149 - RNA, 13 nt, Human
auuacuucugcua

SEQ ID NO: 1816150 - RNA, 12 nt, Human
auuacuucugcu

SEQ ID NO: 1816151 - RNA, 14 nt, Human
auuacuucugcuac

SEQ ID NO: 1816152 - RNA, 13 nt, Human
auuagagaagaga

SEQ ID NO: 1816153 - RNA, 13 nt, Human
auuaaguuguuaa

SEQ ID NO: 1816154 - RNA, 19 nt, Human
auugcaacaggcugggcuu

SEQ ID NO: 1816155 - RNA, 12 nt, Human
auugcaccacug

SEQ ID NO: 1816156 - RNA, 18 nt, Human
auugcaacaggcugggcu

SEQ ID NO: 1816157 - RNA, 17 nt, Human
auugcaacaggcugggc

SEQ ID NO: 1816158 - RNA, 16 nt, Human
auugcauuuccugaca

SEQ ID NO: 1816159 - RNA, 22 nt, Human
auuggcuagagguucaaagaua

SEQ ID NO: 1816160 - RNA, 20 nt, Human
auuggcuagagguucaaaga

SEQ ID NO: 1816161 - RNA, 19 nt, Human
auuggcuagagguucaaag

SEQ ID NO: 1816162 - RNA, 23 nt, Human
auuggcuagagguucaaagauau

SEQ ID NO: 1816163 - RNA, 16 nt, Human
auuuaguguucauaaa

SEQ ID NO: 1816164 - RNA, 19 nt, Human
auuuacuucuuauacauuu

SEQ ID NO: 1816165 - RNA, 20 nt, Human
auuuacuucuuauacauuug

SEQ ID NO: 1816166 - RNA, 17 nt, Human
auuuaguguucauaaau

SEQ ID NO: 1816167 - RNA, 23 nt, Human
auuuauaaaaauaaaaaacacug

SEQ ID NO: 1816168 - RNA, 15 nt, Human
auuuauaaacuuuuu

SEQ ID NO: 1816169 - RNA, 16 nt, Human
auuguaguccuguaau

SEQ ID NO: 1816170 - RNA, 17 nt, Human
auuguuuucaguguaca

SEQ ID NO: 1816171 - RNA, 17 nt, Human
auuuaaaaaaaaaccug

SEQ ID NO: 1816172 - RNA, 18 nt, Human
auuguuuucaguguacau

SEQ ID NO: 1816173 - RNA, 19 nt, Human
auuguuuucaguguacaug

SEQ ID NO: 1816174 - RNA, 14 nt, Human
auuuaaaaaaaauc

SEQ ID NO: 1816175 - RNA, 21 nt, Human
auuuccuaaauauauuuuaag

SEQ ID NO: 1816176 - RNA, 14 nt, Human
auuuccuaaauaua

SEQ ID NO: 1816177 - RNA, 17 nt, Human
auuuccguuaaaauacc

SEQ ID NO: 1816178 - RNA, 14 nt, Human
auuucccaaagcag

SEQ ID NO: 1816179 - RNA, 16 nt, Human
auuucccaaagcagug

SEQ ID NO: 1816180 - RNA, 21 nt, Human
auuuggugguuucagaaaugu

SEQ ID NO: 1816181 - RNA, 22 nt, Human
auuugaggucuguucuuuccaa

SEQ ID NO: 1816182 - RNA, 21 nt, Human
auuugaggucuguucuuucca

SEQ ID NO: 1816183 - RNA, 16 nt, Human
auuugagcagggcuca

SEQ ID NO: 1816184 - RNA, 15 nt, Human
auuugagcagggcuc

SEQ ID NO: 1816185 - RNA, 18 nt, Human
auuugaggucuguucuuu

SEQ ID NO: 1816186 - RNA, 17 nt, Human
auuugaggucuguucuu

SEQ ID NO: 1816187 - RNA, 16 nt, Human
auuucuuccacaagag

SEQ ID NO: 1816188 - RNA, 23 nt, Human
augcacuuuguucuggcucuucc

SEQ ID NO: 1816189 - RNA, 18 nt, Human
uuuaaaaaaauuccaagu

SEQ ID NO: 1816190 - RNA, 17 nt, Human
augcagagguccacaac

SEQ ID NO: 1816191 - RNA, 18 nt, Human
augcagagguccacaaca

SEQ ID NO: 1816192 - RNA, 21 nt, Human
augcacuuuguucuggcucuu

SEQ ID NO: 1816193 - RNA, 13 nt, Human
augauuucauuca

SEQ ID NO: 1816194 - RNA, 17 nt, Human
augauuuaauuugaaau

SEQ ID NO: 1816195 - RNA, 20 nt, Human
uuguucuugguuuguaaauu

SEQ ID NO: 1816196 - RNA, 19 nt, Human
uuguucuugguuuguaaau

SEQ ID NO: 1816197 - RNA, 17 nt, Human
uuguucuugguuuguaa

SEQ ID NO: 1816198 - RNA, 21 nt, Human
uuuaaauauaugcuaagucuu

SEQ ID NO: 1816199 - RNA, 21 nt, Human
uuuaaaugaaagugagacuuu

SEQ ID NO: 1816200 - RNA, 13 nt, Human
uuuaaaugaaagu

SEQ ID NO: 1816201 - RNA, 11 nt, Human
uuuaaaugcac

SEQ ID NO: 1816202 - RNA, 23 nt, Human
uuuaaaaauacagauagauauau

SEQ ID NO: 1816203 - RNA, 21 nt, Human
uuuaaaaaauuaaucugggcc

SEQ ID NO: 1816204 - RNA, 14 nt, Human
uuuaagaggcaggg

SEQ ID NO: 1816205 - RNA, 14 nt, Human
uuuaagagacagcc

SEQ ID NO: 1816206 - RNA, 12 nt, Human
uuuaagagaaau

SEQ ID NO: 1816207 - RNA, 19 nt, Human
uuuaaggaugcuuguacau

SEQ ID NO: 1816208 - RNA, 21 nt, Human
uuuaagcuguuacugucuuca

SEQ ID NO: 1816209 - RNA, 22 nt, Human
uuuaaggaugcuuguacauaau

SEQ ID NO: 1816210 - RNA, 21 nt, Human
uuuaaggaugcuuguacauaa

SEQ ID NO: 1816211 - RNA, 20 nt, Human
uuuaaggaugcuuguacaua

SEQ ID NO: 1816212 - RNA, 17 nt, Human
uuuaaggguuuguggaa

SEQ ID NO: 1816213 - RNA, 20 nt, Human
uuuaaggguuuguggaaaau

SEQ ID NO: 1816214 - RNA, 22 nt, Human
uuuaaggguuuguggaaaauga

SEQ ID NO: 1816215 - RNA, 16 nt, Human
uuuaaugaaagacugu

SEQ ID NO: 1816216 - RNA, 13 nt, Human
augaguccccugu

SEQ ID NO: 1816217 - RNA, 23 nt, Human
augaguccccuguuuguuucuga

SEQ ID NO: 1816218 - RNA, 21 nt, Human
uugucauauaagauucauauu

SEQ ID NO: 1816219 - RNA, 17 nt, Human
uugucacacacuuuggc

SEQ ID NO: 1816220 - RNA, 18 nt, Human
augaggucagagccugca

SEQ ID NO: 1816221 - RNA, 16 nt, Human
augaggucagagccug

SEQ ID NO: 1816222 - RNA, 15 nt, Human
augaggucagagccu

SEQ ID NO: 1816223 - RNA, 21 nt, Human
augagguacaaccuguucugc

SEQ ID NO: 1816224 - RNA, 20 nt, Human
augaggucagagccugcagu

SEQ ID NO: 1816225 - RNA, 19 nt, Human
augaggucagagccugcag

SEQ ID NO: 1816226 - RNA, 22 nt, Human
augaggucagagccugcaguua

SEQ ID NO: 1816227 - RNA, 15 nt, Human
augagguacugagag

SEQ ID NO: 1816228 - RNA, 18 nt, Human
augagguacugagaguga

SEQ ID NO: 1816229 - RNA, 17 nt, Human
augagguacugagagug

SEQ ID NO: 1816230 - RNA, 18 nt, Human
uugugaugucccaacuug

SEQ ID NO: 1816231 - RNA, 22 nt, Human
uugugaugucccaacuuguaaa

SEQ ID NO: 1816232 - RNA, 18 nt, Human
uuguccccaccgcagaca

SEQ ID NO: 1816233 - RNA, 20 nt, Human
uuguccccaccgcagacagg

SEQ ID NO: 1816234 - RNA, 15 nt, Human
uuguccccgacccuu

SEQ ID NO: 1816235 - RNA, 16 nt, Human
uuguccccgacccuug

SEQ ID NO: 1816236 - RNA, 20 nt, Human
uugugauacaaugcugugcc

SEQ ID NO: 1816237 - RNA, 17 nt, Human
uugugaggaagccgcug

SEQ ID NO: 1816238 - RNA, 18 nt, Human
uugugaggaagccgcugg

SEQ ID NO: 1816239 - RNA, 13 nt, Human
uugugaggaagcc

SEQ ID NO: 1816240 - RNA, 16 nt, Human
uuucccuauuagagaa

SEQ ID NO: 1816241 - RNA, 12 nt, Human
uuucagaaaugu

SEQ ID NO: 1816242 - RNA, 11 nt, Human
uuucagaaaug

SEQ ID NO: 1816243 - RNA, 15 nt, Human
uuucaaacuuuacua

SEQ ID NO: 1816244 - RNA, 12 nt, Human
uuucaaacuuua

SEQ ID NO: 1816245 - RNA, 21 nt, Human
uuucagaaagaaguggggaca

SEQ ID NO: 1816246 - RNA, 14 nt, Human
auggaaggggcuga

SEQ ID NO: 1816247 - RNA, 17 nt, Human
auggaagacagcucuua

SEQ ID NO: 1816248 - RNA, 18 nt, Human
auggaagacagcucuuau

SEQ ID NO: 1816249 - RNA, 16 nt, Human
augcuucucacugcca

SEQ ID NO: 1816250 - RNA, 20 nt, Human
augcuucucacugccaugcc

SEQ ID NO: 1816251 - RNA, 20 nt, Human
augcuggcuguuggcugggg

SEQ ID NO: 1816252 - RNA, 19 nt, Human
augcuggcuguuggcuggg

SEQ ID NO: 1816253 - RNA, 18 nt, Human
augcuggcuguuggcugg

SEQ ID NO: 1816254 - RNA, 14 nt, Human
augcuccuggccca

SEQ ID NO: 1816255 - RNA, 19 nt, Human
augcuccuggcccacugca

SEQ ID NO: 1816256 - RNA, 14 nt, Human
uuuaucagaauucu

SEQ ID NO: 1816257 - RNA, 18 nt, Human
augcuacaggauuugaaa

SEQ ID NO: 1816258 - RNA, 12 nt, Human
augcgugugugu

SEQ ID NO: 1816259 - RNA, 22 nt, Human
augcgugcauaccacuuuuguu

SEQ ID NO: 1816260 - RNA, 14 nt, Human
augcgcaggcuggc

SEQ ID NO: 1816261 - RNA, 18 nt, Human
augcgcaggcuggcccug

SEQ ID NO: 1816262 - RNA, 20 nt, Human
augcgcaggcuggcccugcc

SEQ ID NO: 1816263 - RNA, 22 nt, Human
augcgcaggcuggcccugcccu

SEQ ID NO: 1816264 - RNA, 13 nt, Human
augcgcaggcugg

SEQ ID NO: 1816265 - RNA, 17 nt, Human
augccucucucaggcca

SEQ ID NO: 1816266 - RNA, 13 nt, Human
augccucucucag

SEQ ID NO: 1816267 - RNA, 14 nt, Human
augccucucucagg

SEQ ID NO: 1816268 - RNA, 15 nt, Human
augccucucucaggc

SEQ ID NO: 1816269 - RNA, 21 nt, Human
augccaugaggaacaaggcaa

SEQ ID NO: 1816270 - RNA, 16 nt, Human
augcccagccccuucu

SEQ ID NO: 1816271 - RNA, 21 nt, Human
augccccgucccccucuggcu

SEQ ID NO: 1816272 - RNA, 18 nt, Human
augccccgucccccucug

SEQ ID NO: 1816273 - RNA, 17 nt, Human
augcccagccccuucug

SEQ ID NO: 1816274 - RNA, 21 nt, Human
uuuaaugaaagacuguacaaa

SEQ ID NO: 1816275 - RNA, 23 nt, Human
uuuaaugaaagacuguacaaagu

SEQ ID NO: 1816276 - RNA, 13 nt, Human
uuuacuucuuaua

SEQ ID NO: 1816277 - RNA, 14 nt, Human
uuuacuucuuauac

SEQ ID NO: 1816278 - RNA, 15 nt, Human
uuuacuucuuauaca

SEQ ID NO: 1816279 - RNA, 11 nt, Human
uuuacuuaaac

SEQ ID NO: 1816280 - RNA, 16 nt, Human
uuuacugcagcuuugu

SEQ ID NO: 1816281 - RNA, 16 nt, Human
augcgugugugugugu

SEQ ID NO: 1816282 - RNA, 20 nt, Human
uuuacccuucuuuucugacu

SEQ ID NO: 1816283 - RNA, 22 nt, Human
uuuaccugaagucuuuguacag

SEQ ID NO: 1816284 - RNA, 18 nt, Human
uuuaccugaagucuuugu

SEQ ID NO: 1816285 - RNA, 16 nt, Human
aucuuauaauuuaaaa

SEQ ID NO: 1816286 - RNA, 14 nt, Human
aucuugcucugcug

SEQ ID NO: 1816287 - RNA, 15 nt, Human
aucuuauaauuuaaa

SEQ ID NO: 1816288 - RNA, 16 nt, Human
aucuugcucugcugac

SEQ ID NO: 1816289 - RNA, 15 nt, Human
aucuugcucugcuga

SEQ ID NO: 1816290 - RNA, 22 nt, Human
aucugucauuugagcagggcuc

SEQ ID NO: 1816291 - RNA, 17 nt, Human
aucugucauuugagcag

SEQ ID NO: 1816292 - RNA, 12 nt, Human
aucugucauuug

SEQ ID NO: 1816293 - RNA, 12 nt, Human
uuggaaaauaaa

SEQ ID NO: 1816294 - RNA, 15 nt, Human
uuggaaaauaaauca

SEQ ID NO: 1816295 - RNA, 17 nt, Human
uuggaaaauaaauuauu

SEQ ID NO: 1816296 - RNA, 16 nt, Human
uugcuuuguaugcacu

SEQ ID NO: 1816297 - RNA, 20 nt, Human
uugcuuugugauuuuuguaa

SEQ ID NO: 1816298 - RNA, 14 nt, Human
uugcucuugaugcc

SEQ ID NO: 1816299 - RNA, 17 nt, Human
uugcucuugaugccugg

SEQ ID NO: 1816300 - RNA, 18 nt, Human
uugcucuugaugccuggc

SEQ ID NO: 1816301 - RNA, 17 nt, Human
uugcuuuggaaguuuua

SEQ ID NO: 1816302 - RNA, 13 nt, Human
uugcuuuguaugc

SEQ ID NO: 1816303 - RNA, 15 nt, Human
uugcuuugugauuuu

SEQ ID NO: 1816304 - RNA, 22 nt, Human
augaaccacaucuugcucugcu

SEQ ID NO: 1816305 - RNA, 23 nt, Human
augaaccacaucuugcucugcug

SEQ ID NO: 1816306 - RNA, 16 nt, Human
augaaagugagacuuu

SEQ ID NO: 1816307 - RNA, 14 nt, Human
augaagcaaugcuu

SEQ ID NO: 1816308 - RNA, 15 nt, Human
augaagcaaugcuuc

SEQ ID NO: 1816309 - RNA, 17 nt, Human
augaaugaaacauuuug

SEQ ID NO: 1816310 - RNA, 16 nt, Human
augaaugucaguguga

SEQ ID NO: 1816311 - RNA, 18 nt, Human
augaaugucagugugacu

SEQ ID NO: 1816312 - RNA, 19 nt, Human
uuggugguuucagaaaugu

SEQ ID NO: 1816313 - RNA, 18 nt, Human
uuggugguuucagaaaug

SEQ ID NO: 1816314 - RNA, 14 nt, Human
uugguuuguaaauu

SEQ ID NO: 1816315 - RNA, 17 nt, Human
uuggugucgggcaugac

SEQ ID NO: 1816316 - RNA, 18 nt, Human
uuggugucgggcaugaca

SEQ ID NO: 1816317 - RNA, 19 nt, Human
uuggugucgggcaugacac

SEQ ID NO: 1816318 - RNA, 14 nt, Human
uuguaaauuucucu

SEQ ID NO: 1816319 - RNA, 13 nt, Human
uuguaaauuguca

SEQ ID NO: 1816320 - RNA, 15 nt, Human
uuguaauaauaaaga

SEQ ID NO: 1816321 - RNA, 15 nt, Human
uuguaauauguaaau

SEQ ID NO: 1816322 - RNA, 14 nt, Human
uuguaauauguaaa

SEQ ID NO: 1816323 - RNA, 22 nt, Human
uuguaagcaugcacaaauucug

SEQ ID NO: 1816324 - RNA, 12 nt, Human
uuguaaugaaaa

SEQ ID NO: 1816325 - RNA, 12 nt, Human
aucugaaaaugu

SEQ ID NO: 1816326 - RNA, 22 nt, Human
aucucuuuguucuaaagaugga

SEQ ID NO: 1816327 - RNA, 16 nt, Human
aucucuuguuuaaauu

SEQ ID NO: 1816328 - RNA, 17 nt, Human
aucucaaauuucuaaau

SEQ ID NO: 1816329 - RNA, 16 nt, Human
aucucaaauuucuaaa

SEQ ID NO: 1816330 - RNA, 23 nt, Human
aucucacacaugagcaucaggcc

SEQ ID NO: 1816331 - RNA, 21 nt, Human
uugauuaaauucuugcaaagu

SEQ ID NO: 1816332 - RNA, 20 nt, Human
uugauuaaauucuugcaaag

SEQ ID NO: 1816333 - RNA, 16 nt, Human
uugauuaaauucuugc

SEQ ID NO: 1816334 - RNA, 15 nt, Human
uugauuaaauucuug

SEQ ID NO: 1816335 - RNA, 16 nt, Human
uugcaacuuuguauaa

SEQ ID NO: 1816336 - RNA, 17 nt, Human
uugcaacuuuguauaaa

SEQ ID NO: 1816337 - RNA, 18 nt, Human
uugcaacuuuguauaaaa

SEQ ID NO: 1816338 - RNA, 23 nt, Human
uugauguucuuucacccuuuucu

SEQ ID NO: 1816339 - RNA, 23 nt, Human
uugcccaggcuggcgugcagugg

SEQ ID NO: 1816340 - RNA, 14 nt, Human
uugcccaggcuggc

SEQ ID NO: 1816341 - RNA, 12 nt, Human
uugcccaggcug

SEQ ID NO: 1816342 - RNA, 11 nt, Human
uugcccaggcu

SEQ ID NO: 1816343 - RNA, 18 nt, Human
uugcccaggcaggucuug

SEQ ID NO: 1816344 - RNA, 16 nt, Human
uugcccaggcaggucu

SEQ ID NO: 1816345 - RNA, 14 nt, Human
uugcccaggcaggu

SEQ ID NO: 1816346 - RNA, 13 nt, Human
uugcccaggcagg

SEQ ID NO: 1816347 - RNA, 14 nt, Human
uugcaauggcagcc

SEQ ID NO: 1816348 - RNA, 22 nt, Human
uugcaauagaaauccaauugga

SEQ ID NO: 1816349 - RNA, 15 nt, Human
uugcaauagaaaucc

SEQ ID NO: 1816350 - RNA, 21 nt, Human
uugcaccacugcacuccagcc

SEQ ID NO: 1816351 - RNA, 14 nt, Human
uugcaugaggcuag

SEQ ID NO: 1816352 - RNA, 19 nt, Human
uugacagggcacaccgggc

SEQ ID NO: 1816353 - RNA, 16 nt, Human
uugacaucaacugcau

SEQ ID NO: 1816354 - RNA, 12 nt, Human
uugacagggcac

SEQ ID NO: 1816355 - RNA, 10 nt, Human
uugacagggc

SEQ ID NO: 1816356 - RNA, 19 nt, Human
uugacaggauuauuggaaa

SEQ ID NO: 1816357 - RNA, 11 nt, Human
uugagacagag

SEQ ID NO: 1816358 - RNA, 10 nt, Human
uugagacaga

SEQ ID NO: 1816359 - RNA, 12 nt, Human
uugagcagggcu

SEQ ID NO: 1816360 - RNA, 16 nt, Human
uugagcagggcucagc

SEQ ID NO: 1816361 - RNA, 17 nt, Human
uugaccauucuccaccu

SEQ ID NO: 1816362 - RNA, 11 nt, Human
uugagugccuu

SEQ ID NO: 1816363 - RNA, 21 nt, Human
uugagugcugucuccauguuu

SEQ ID NO: 1816364 - RNA, 18 nt, Human
uugauagcacagacccug

SEQ ID NO: 1816365 - RNA, 17 nt, Human
uugauacuacaguuugu

SEQ ID NO: 1816366 - RNA, 23 nt, Human
aucuaauauguaacaagccaccc

SEQ ID NO: 1816367 - RNA, 18 nt, Human
aucuagauacuguaucau

SEQ ID NO: 1816368 - RNA, 19 nt, Human
aucuagauacuguaucaug

SEQ ID NO: 1816369 - RNA, 17 nt, Human
aucuaggaagacuuugg

SEQ ID NO: 1816370 - RNA, 18 nt, Human
aucuaggaagacuuugga

SEQ ID NO: 1816371 - RNA, 19 nt, Human
aucuaggaagacuuuggaa

SEQ ID NO: 1816372 - RNA, 14 nt, Human
aucucaaauuucua

SEQ ID NO: 1816373 - RNA, 23 nt, Human
aucucaaauaacuaaaagguaug

SEQ ID NO: 1816374 - RNA, 14 nt, Human
aucucaaauaacua

SEQ ID NO: 1816375 - RNA, 21 nt, Human
aucucaaauaacuaaaaggua

SEQ ID NO: 1816376 - RNA, 18 nt, Human
auauauucagccuggcuu

SEQ ID NO: 1816377 - RNA, 18 nt, Human
uucaucauccuaagcuau

SEQ ID NO: 1816378 - RNA, 21 nt, Human
uucaucauccuaagcuauuca

SEQ ID NO: 1816379 - RNA, 17 nt, Human
uucauauuuuaaacaga

SEQ ID NO: 1816380 - RNA, 21 nt, Human
uucauauuuuaaacagaggau

SEQ ID NO: 1816381 - RNA, 14 nt, Human
uucaguaauaacuc

SEQ ID NO: 1816382 - RNA, 16 nt, Human
uucauauuuacuucuu

SEQ ID NO: 1816383 - RNA, 21 nt, Human
uucauauuuacuucuuauaca

SEQ ID NO: 1816384 - RNA, 22 nt, Human
auaucugaaaauguauguguaa

SEQ ID NO: 1816385 - RNA, 20 nt, Human
auaugauuuaaaucagccgu

SEQ ID NO: 1816386 - RNA, 14 nt, Human
auaugucaagccau

SEQ ID NO: 1816387 - RNA, 13 nt, Human
auaugcacacauu

SEQ ID NO: 1816388 - RNA, 17 nt, Human
uucagaucucuaacuuc

SEQ ID NO: 1816389 - RNA, 23 nt, Human
uucagcaccuacaguguacaguc

SEQ ID NO: 1816390 - RNA, 22 nt, Human
uucagcaccuacaguguacagu

SEQ ID NO: 1816391 - RNA, 19 nt, Human
uucagccaagaauucuuaa

SEQ ID NO: 1816392 - RNA, 15 nt, Human
uucagaaagaagugg

SEQ ID NO: 1816393 - RNA, 13 nt, Human
uucacugcuggcu

SEQ ID NO: 1816394 - RNA, 15 nt, Human
uucacugcuggcugc

SEQ ID NO: 1816395 - RNA, 16 nt, Human
uucacugcuggcugcc

SEQ ID NO: 1816396 - RNA, 17 nt, Human
uucacugcuggcugccu

SEQ ID NO: 1816397 - RNA, 18 nt, Human
uucacugcuggcugccuu

SEQ ID NO: 1816398 - RNA, 19 nt, Human
uucacugcuggcugccuua

SEQ ID NO: 1816399 - RNA, 22 nt, Human
auauaaauuuuuuuuguuucau

SEQ ID NO: 1816400 - RNA, 17 nt, Human
auauaaauuuuuuuugu

SEQ ID NO: 1816401 - RNA, 16 nt, Human
uucaaaauuguuacaa

SEQ ID NO: 1816402 - RNA, 15 nt, Human
uucaaggauccugag

SEQ ID NO: 1816403 - RNA, 16 nt, Human
uucaaggauccugagc

SEQ ID NO: 1816404 - RNA, 18 nt, Human
uucaaggauccugagcca

SEQ ID NO: 1816405 - RNA, 19 nt, Human
uucaaggauccugagccag

SEQ ID NO: 1816406 - RNA, 21 nt, Human
uucaaggauccugagccagau

SEQ ID NO: 1816407 - RNA, 20 nt, Human
uucaagugauucuccugccu

SEQ ID NO: 1816408 - RNA, 20 nt, Human
uucaagugauucucaugccu

SEQ ID NO: 1816409 - RNA, 22 nt, Human
uucaagugauucucaugccuca

SEQ ID NO: 1816410 - RNA, 22 nt, Human
uucaccauguuggccaggcugc

SEQ ID NO: 1816411 - RNA, 22 nt, Human
uucaccauguuggccaggcugg

SEQ ID NO: 1816412 - RNA, 22 nt, Human
auagcuuacaagccagcuggag

SEQ ID NO: 1816413 - RNA, 19 nt, Human
auaggaacuuaaauaaugu

SEQ ID NO: 1816414 - RNA, 21 nt, Human
auaggaauugacccacaagaa

SEQ ID NO: 1816415 - RNA, 22 nt, Human
auaggcaccuaccaccacgccc

SEQ ID NO: 1816416 - RNA, 17 nt, Human
auaggcacaggaaacca

SEQ ID NO: 1816417 - RNA, 22 nt, Human
auaggaauugacccacaagaaa

SEQ ID NO: 1816418 - RNA, 22 nt, Human
uucaccacaugugcacaugcac

SEQ ID NO: 1816419 - RNA, 19 nt, Human
uucacauuguauucagagu

SEQ ID NO: 1816420 - RNA, 17 nt, Human
uucacauauugauuucc

SEQ ID NO: 1816421 - RNA, 13 nt, Human
uucacaguucucu

SEQ ID NO: 1816422 - RNA, 14 nt, Human
auagcuacuaauuu

SEQ ID NO: 1816423 - RNA, 17 nt, Human
auagcuacuaauuuuaa

SEQ ID NO: 1816424 - RNA, 18 nt, Human
auagcgucauaacuagaa

SEQ ID NO: 1816425 - RNA, 20 nt, Human
auagcgucauaacuagaacu

SEQ ID NO: 1816426 - RNA, 18 nt, Human
auagccugccucuucucu

SEQ ID NO: 1816427 - RNA, 13 nt, Human
auaagauaaaugu

SEQ ID NO: 1816428 - RNA, 17 nt, Human
auaagauaaaugugcug

SEQ ID NO: 1816429 - RNA, 12 nt, Human
auagcugggacu

SEQ ID NO: 1816430 - RNA, 21 nt, Human
auagcucaggugucccugcac

SEQ ID NO: 1816431 - RNA, 20 nt, Human
auagcucaggugucccugca

SEQ ID NO: 1816432 - RNA, 22 nt, Human
auagcucaggugucccugcacu

SEQ ID NO: 1816433 - RNA, 18 nt, Human
auagcuacuaauuuuaaa

SEQ ID NO: 1816434 - RNA, 19 nt, Human
auagcucaggugucccugc

SEQ ID NO: 1816435 - RNA, 17 nt, Human
uuauuuagcaccaggga

SEQ ID NO: 1816436 - RNA, 16 nt, Human
uuauuuaguuccuuga

SEQ ID NO: 1816437 - RNA, 15 nt, Human
uuauuuaguauuuau

SEQ ID NO: 1816438 - RNA, 17 nt, Human
auagcugggacuacagg

SEQ ID NO: 1816439 - RNA, 22 nt, Human
auagcuggucuuauuuguaaag

SEQ ID NO: 1816440 - RNA, 23 nt, Human
auagcuggucuuauuuguaaagc

SEQ ID NO: 1816441 - RNA, 18 nt, Human
uuauuuaaugaaagacug

SEQ ID NO: 1816442 - RNA, 22 nt, Human
uuauuuaaugaaagacuguaca

SEQ ID NO: 1816443 - RNA, 14 nt, Human
uuauuuaaauuuua

SEQ ID NO: 1816444 - RNA, 16 nt, Human
aucccauaugccuggg

SEQ ID NO: 1816445 - RNA, 17 nt, Human
aucccauaugccugggc

SEQ ID NO: 1816446 - RNA, 16 nt, Human
auccagguucagcuug

SEQ ID NO: 1816447 - RNA, 15 nt, Human
auccagguucagcuu

SEQ ID NO: 1816448 - RNA, 17 nt, Human
auccaggguggugguga

SEQ ID NO: 1816449 - RNA, 17 nt, Human
aucccaggauguacaag

SEQ ID NO: 1816450 - RNA, 20 nt, Human
aucauugaaaucuuuuugcu

SEQ ID NO: 1816451 - RNA, 19 nt, Human
aucauugaaaucuuuuugc

SEQ ID NO: 1816452 - RNA, 15 nt, Human
uucugaaagggacgc

SEQ ID NO: 1816453 - RNA, 22 nt, Human
uucugggacacaguucaauucu

SEQ ID NO: 1816454 - RNA, 11 nt, Human
uucugggacac

SEQ ID NO: 1816455 - RNA, 10 nt, Human
uucugggaca

SEQ ID NO: 1816456 - RNA, 23 nt, Human
uucugccgcagcccugcagaggg

SEQ ID NO: 1816457 - RNA, 23 nt, Human
aucauaguggcuuaaaacaacac

SEQ ID NO: 1816458 - RNA, 14 nt, Human
aucauugaaaucuu

SEQ ID NO: 1816459 - RNA, 15 nt, Human
aucauugaaaucuuu

SEQ ID NO: 1816460 - RNA, 22 nt, Human
aucauuaaagccugaguuugcu

SEQ ID NO: 1816461 - RNA, 14 nt, Human
aucauucauuuucu

SEQ ID NO: 1816462 - RNA, 16 nt, Human
aucagcacgauuucug

SEQ ID NO: 1816463 - RNA, 15 nt, Human
aucagcacgauuucu

SEQ ID NO: 1816464 - RNA, 18 nt, Human
aucagcacgauuucuguu

SEQ ID NO: 1816465 - RNA, 17 nt, Human
aucagcacgauuucugu

SEQ ID NO: 1816466 - RNA, 13 nt, Human
uucuaggccuggg

SEQ ID NO: 1816467 - RNA, 23 nt, Human
uucucagaaucucaaauaacuaa

SEQ ID NO: 1816468 - RNA, 19 nt, Human
uucucagaaucucaaauaa

SEQ ID NO: 1816469 - RNA, 22 nt, Human
uucucagaaucucaaauaacua

SEQ ID NO: 1816470 - RNA, 17 nt, Human
auauugccauuaugcuu

SEQ ID NO: 1816471 - RNA, 17 nt, Human
auauugcugauggugca

SEQ ID NO: 1816472 - RNA, 21 nt, Human
auauugcugauggugcaauga

SEQ ID NO: 1816473 - RNA, 20 nt, Human
auauuguuuucaguguacau

SEQ ID NO: 1816474 - RNA, 14 nt, Human
auauuuuaaacaga

SEQ ID NO: 1816475 - RNA, 20 nt, Human
auauuuguauuuaaaugaaa

SEQ ID NO: 1816476 - RNA, 24 nt, Human
auauuaagaaagacuaucuaaaug

SEQ ID NO: 1816477 - RNA, 22 nt, Human
auauuaaggaagacaaugugaa

SEQ ID NO: 1816478 - RNA, 18 nt, Human
auauguuuuaagaggcag

SEQ ID NO: 1816479 - RNA, 20 nt, Human
auauguuuuaagaggcaggg

SEQ ID NO: 1816480 - RNA, 15 nt, Human
auauugauccagaaa

SEQ ID NO: 1816481 - RNA, 22 nt, Human
auauugauccagaaagaaaacu

SEQ ID NO: 1816482 - RNA, 22 nt, Human
auauugauuuccguuaaaauac

SEQ ID NO: 1816483 - RNA, 21 nt, Human
auauugauuuccguuaaaaua

SEQ ID NO: 1816484 - RNA, 13 nt, Human
auauugaugugug

SEQ ID NO: 1816485 - RNA, 19 nt, Human
auauugauuuccguuaaaa

SEQ ID NO: 1816486 - RNA, 16 nt, Human
auauucuguuggccag

SEQ ID NO: 1816487 - RNA, 18 nt, Human
aucaaguauuauaccuuu

SEQ ID NO: 1816488 - RNA, 14 nt, Human
aucaaguauuauac

SEQ ID NO: 1816489 - RNA, 13 nt, Human
aucaaguauuaua

SEQ ID NO: 1816490 - RNA, 21 nt, Human
aucaagaugugacauguuuua

SEQ ID NO: 1816491 - RNA, 22 nt, Human
aucacggcucacugcagccuca

SEQ ID NO: 1816492 - RNA, 21 nt, Human
aucacguaaagcuagaaauga

SEQ ID NO: 1816493 - RNA, 14 nt, Human
aucacguaaagcua

SEQ ID NO: 1816494 - RNA, 21 nt, Human
uuccuuuuaaaacacuuccau

SEQ ID NO: 1816495 - RNA, 22 nt, Human
uuccuuuuaaaacacuuccaua

SEQ ID NO: 1816496 - RNA, 20 nt, Human
uuccuuuuaaaacacuucca

SEQ ID NO: 1816497 - RNA, 14 nt, Human
auauuuuaagacga

SEQ ID NO: 1816498 - RNA, 13 nt, Human
uuccuaauccucu

SEQ ID NO: 1816499 - RNA, 15 nt, Human
uuccuaauccucuag

SEQ ID NO: 1816500 - RNA, 17 nt, Human
uuccuaauccucuagga

SEQ ID NO: 1816501 - RNA, 17 nt, Human
uuccuguucccaugaga

SEQ ID NO: 1816502 - RNA, 11 nt, Human
uuccucuuucc

SEQ ID NO: 1816503 - RNA, 19 nt, Human
auauuuucaacgcagcccu

SEQ ID NO: 1816504 - RNA, 20 nt, Human
auauuuucaacgcagcccug

SEQ ID NO: 1816505 - RNA, 15 nt, Human
uuccuucagugccuu

SEQ ID NO: 1816506 - RNA, 20 nt, Human
uuccuguucuuaagacguga

SEQ ID NO: 1816507 - RNA, 11 nt, Human
uuccuucagug

SEQ ID NO: 1816508 - RNA, 14 nt, Human
uuccuucagugccu

SEQ ID NO: 1816509 - RNA, 15 nt, Human
agugaaagaaaauaa

SEQ ID NO: 1816510 - RNA, 20 nt, Human
agugaacaaauuuacagaga

SEQ ID NO: 1816511 - RNA, 16 nt, Human
agugaacaaauuuaca

SEQ ID NO: 1816512 - RNA, 18 nt, Human
ugugaugagaggaaauca

SEQ ID NO: 1816513 - RNA, 19 nt, Human
ugugauggggcccugccuc

SEQ ID NO: 1816514 - RNA, 20 nt, Human
ugugauggggcccugccucc

SEQ ID NO: 1816515 - RNA, 18 nt, Human
ugugccagauuuaugcau

SEQ ID NO: 1816516 - RNA, 16 nt, Human
ugugccaugugccagg

SEQ ID NO: 1816517 - RNA, 12 nt, Human
ugugccaugugc

SEQ ID NO: 1816518 - RNA, 20 nt, Human
ugugccagguuuuuggucug

SEQ ID NO: 1816519 - RNA, 20 nt, Human
ugugccagauuuaugcauau

SEQ ID NO: 1816520 - RNA, 17 nt, Human
uguggaguucaucuuga

SEQ ID NO: 1816521 - RNA, 21 nt, Human
uguggaguucaucuugaauug

SEQ ID NO: 1816522 - RNA, 21 nt, Human
ugugcccccauguaagcaccc

SEQ ID NO: 1816523 - RNA, 15 nt, Human
agugagucgaggaca

SEQ ID NO: 1816524 - RNA, 21 nt, Human
agugaguugauagcacagacc

SEQ ID NO: 1816525 - RNA, 14 nt, Human
agugagggauuauc

SEQ ID NO: 1816526 - RNA, 21 nt, Human
agugaggcucugcccuugguu

SEQ ID NO: 1816527 - RNA, 19 nt, Human
agugaggcucugcccuugg

SEQ ID NO: 1816528 - RNA, 20 nt, Human
agugaggcucugcccuuggu

SEQ ID NO: 1816529 - RNA, 18 nt, Human
uguggccaaguucuuagu

SEQ ID NO: 1816530 - RNA, 15 nt, Human
agugaggcucugccc

SEQ ID NO: 1816531 - RNA, 14 nt, Human
agugaggcucugcc

SEQ ID NO: 1816532 - RNA, 16 nt, Human
agugaggcucugcccu

SEQ ID NO: 1816533 - RNA, 17 nt, Human
agugaggcucugcccuu

SEQ ID NO: 1816534 - RNA, 21 nt, Human
ugugaaccaccacacccagcc

SEQ ID NO: 1816535 - RNA, 20 nt, Human
ugugaaccaccacacccagc

SEQ ID NO: 1816536 - RNA, 19 nt, Human
ugugaaccaccacacccag

SEQ ID NO: 1816537 - RNA, 14 nt, Human
ugugaagagaacca

SEQ ID NO: 1816538 - RNA, 15 nt, Human
ugucuuguguuucuu

SEQ ID NO: 1816539 - RNA, 18 nt, Human
ugucuuguguuucuuuag

SEQ ID NO: 1816540 - RNA, 12 nt, Human
ugugaaauuauu

SEQ ID NO: 1816541 - RNA, 15 nt, Human
ugugaaaggaaagag

SEQ ID NO: 1816542 - RNA, 18 nt, Human
ugugaaaggaaagaggcu

SEQ ID NO: 1816543 - RNA, 21 nt, Human
ugugaaaggaaagagggaggu

SEQ ID NO: 1816544 - RNA, 15 nt, Human
agucucuucuccacu

SEQ ID NO: 1816545 - RNA, 16 nt, Human
agucucuucuccacug

SEQ ID NO: 1816546 - RNA, 18 nt, Human
agucucuucuccacugga

SEQ ID NO: 1816547 - RNA, 17 nt, Human
agucucuucuccacugg

SEQ ID NO: 1816548 - RNA, 18 nt, Human
agucuuguauuaaguugu

SEQ ID NO: 1816549 - RNA, 16 nt, Human
agucuuguauuaaguu

SEQ ID NO: 1816550 - RNA, 15 nt, Human
agucuuggcucacug

SEQ ID NO: 1816551 - RNA, 22 nt, Human
agucuuguauuaaguuguuaau

SEQ ID NO: 1816552 - RNA, 14 nt, Human
agucuuuguacaga

SEQ ID NO: 1816553 - RNA, 13 nt, Human
agucucuucucca

SEQ ID NO: 1816554 - RNA, 14 nt, Human
agucucuucuccac

SEQ ID NO: 1816555 - RNA, 15 nt, Human
ugugacugaauuucu

SEQ ID NO: 1816556 - RNA, 16 nt, Human
ugugacugaauuucuu

SEQ ID NO: 1816557 - RNA, 19 nt, Human
ugugagaugcuagaacucc

SEQ ID NO: 1816558 - RNA, 15 nt, Human
ugugagaugcuagaa

SEQ ID NO: 1816559 - RNA, 16 nt, Human
uguggucccaccccac

SEQ ID NO: 1816560 - RNA, 13 nt, Human
uguggucccaccc

SEQ ID NO: 1816561 - RNA, 15 nt, Human
uguggucccacccca

SEQ ID NO: 1816562 - RNA, 20 nt, Human
ugugguguuuccuggcacug

SEQ ID NO: 1816563 - RNA, 14 nt, Human
ugugguguuuccug

SEQ ID NO: 1816564 - RNA, 16 nt, Human
ugugguguuuccuggc

SEQ ID NO: 1816565 - RNA, 21 nt, Human
uguggguuucuaaagcugcca

SEQ ID NO: 1816566 - RNA, 23 nt, Human
uguggguuucuaaagcugccagc

SEQ ID NO: 1816567 - RNA, 20 nt, Human
uguggucacaggaaguagag

SEQ ID NO: 1816568 - RNA, 13 nt, Human
agugcugcauuua

SEQ ID NO: 1816569 - RNA, 12 nt, Human
agugcugcauuu

SEQ ID NO: 1816570 - RNA, 22 nt, Human
agugaguugauagcacagaccc

SEQ ID NO: 1816571 - RNA, 23 nt, Human
agugaguugauagcacagacccu

SEQ ID NO: 1816572 - RNA, 21 nt, Human
agugcugggauuacaggugug

SEQ ID NO: 1816573 - RNA, 20 nt, Human
agugcugggauuacaggugu

SEQ ID NO: 1816574 - RNA, 19 nt, Human
agugcugcauuuaaaagau

SEQ ID NO: 1816575 - RNA, 17 nt, Human
agugcugcauuuaaaag

SEQ ID NO: 1816576 - RNA, 16 nt, Human
agugcugcauuuaaaa

SEQ ID NO: 1816577 - RNA, 11 nt, Human
ugugugugugc

SEQ ID NO: 1816578 - RNA, 19 nt, Human
uguguguuuauugucaaag

SEQ ID NO: 1816579 - RNA, 23 nt, Human
uguguguuuauugucaaaguggu

SEQ ID NO: 1816580 - RNA, 21 nt, Human
ugugucuugcaauggcagccu

SEQ ID NO: 1816581 - RNA, 21 nt, Human
ugugucucuugguccugcugc

SEQ ID NO: 1816582 - RNA, 22 nt, Human
ugugucucuugguccugcugca

SEQ ID NO: 1816583 - RNA, 17 nt, Human
ugugucucuugguccug

SEQ ID NO: 1816584 - RNA, 20 nt, Human
ugugucucuugguccugcug

SEQ ID NO: 1816585 - RNA, 17 nt, Human
uguguaagaaauacaga

SEQ ID NO: 1816586 - RNA, 20 nt, Human
uguuccacaaguuaaauaaa

SEQ ID NO: 1816587 - RNA, 20 nt, Human
agugugucuuagugugugca

SEQ ID NO: 1816588 - RNA, 16 nt, Human
uguucugggacacagu

SEQ ID NO: 1816589 - RNA, 18 nt, Human
uguugcccaggcaggucu

SEQ ID NO: 1816590 - RNA, 17 nt, Human
uguugcccaggcagguc

SEQ ID NO: 1816591 - RNA, 16 nt, Human
uguugcccaggcaggu

SEQ ID NO: 1816592 - RNA, 15 nt, Human
uguugcccaggcagg

SEQ ID NO: 1816593 - RNA, 12 nt, Human
uguugcccaggc

SEQ ID NO: 1816594 - RNA, 13 nt, Human
uguugcccaggca

SEQ ID NO: 1816595 - RNA, 15 nt, Human
uguucugugauauaa

SEQ ID NO: 1816596 - RNA, 18 nt, Human
uguucugugauauaagug

SEQ ID NO: 1816597 - RNA, 16 nt, Human
agugugguguuuccug

SEQ ID NO: 1816598 - RNA, 20 nt, Human
agugugccugaagucccaga

SEQ ID NO: 1816599 - RNA, 17 nt, Human
agugugguguuuccugg

SEQ ID NO: 1816600 - RNA, 19 nt, Human
agugugguguuuccuggca

SEQ ID NO: 1816601 - RNA, 20 nt, Human
agugugguguuuccuggcac

SEQ ID NO: 1816602 - RNA, 21 nt, Human
agugguggugaacagaacaaa

SEQ ID NO: 1816603 - RNA, 18 nt, Human
aguggugguuuucuguuc

SEQ ID NO: 1816604 - RNA, 17 nt, Human
aguggugguuuucuguu

SEQ ID NO: 1816605 - RNA, 23 nt, Human
aguggugguuuucuguucuuucu

SEQ ID NO: 1816606 - RNA, 21 nt, Human
aguggugguuuucuguucuuu

SEQ ID NO: 1816607 - RNA, 20 nt, Human
aguggugguuuucuguucuu

SEQ ID NO: 1816608 - RNA, 19 nt, Human
aguggugguuuucuguucu

SEQ ID NO: 1816609 - RNA, 17 nt, Human
aguggugcgaucugggu

SEQ ID NO: 1816610 - RNA, 17 nt, Human
aguggaaguaguggagc

SEQ ID NO: 1816611 - RNA, 14 nt, Human
uguuacaaauugua

SEQ ID NO: 1816612 - RNA, 15 nt, Human
uuaaauuucuaccgc

SEQ ID NO: 1816613 - RNA, 20 nt, Human
uuaaauucuugcaaaguauc

SEQ ID NO: 1816614 - RNA, 13 nt, Human
uuaaauaauguga

SEQ ID NO: 1816615 - RNA, 21 nt, Human
aguuggguggaugccuggugg

SEQ ID NO: 1816616 - RNA, 13 nt, Human
aguuggcuucuaa

SEQ ID NO: 1816617 - RNA, 16 nt, Human
aguuggcuaggacccc

SEQ ID NO: 1816618 - RNA, 21 nt, Human
aguucuuaguugcuguauguc

SEQ ID NO: 1816619 - RNA, 20 nt, Human
aguucuuaguugcuguaugu

SEQ ID NO: 1816620 - RNA, 18 nt, Human
aguuggucccccuuccau

SEQ ID NO: 1816621 - RNA, 21 nt, Human
aguuguuugauucagacagcu

SEQ ID NO: 1816622 - RNA, 23 nt, Human
aguuguuugauucagacagcugc

SEQ ID NO: 1816623 - RNA, 21 nt, Human
uguuucuuucucugaggacaa

SEQ ID NO: 1816624 - RNA, 20 nt, Human
uguuucuuucucugaggaca

SEQ ID NO: 1816625 - RNA, 18 nt, Human
uguuucuuuguaaugaaa

SEQ ID NO: 1816626 - RNA, 19 nt, Human
uguuucuuuguaaugaaaa

SEQ ID NO: 1816627 - RNA, 17 nt, Human
uguuugauucagacagc

SEQ ID NO: 1816628 - RNA, 22 nt, Human
uguuugauucagacagcugccu

SEQ ID NO: 1816629 - RNA, 19 nt, Human
uguuuauugucaaaguggu

SEQ ID NO: 1816630 - RNA, 19 nt, Human
uguugcccaggcaggucuu

SEQ ID NO: 1816631 - RNA, 19 nt, Human
uguugccuugcauaauggu

SEQ ID NO: 1816632 - RNA, 21 nt, Human
uguuuuauuuuaauucaguug

SEQ ID NO: 1816633 - RNA, 13 nt, Human
uguuuggagacag

SEQ ID NO: 1816634 - RNA, 20 nt, Human
uguuuuccaugaguccccug

SEQ ID NO: 1816635 - RNA, 14 nt, Human
aguucugguuccua

SEQ ID NO: 1816636 - RNA, 16 nt, Human
aguucuuaguugcugu

SEQ ID NO: 1816637 - RNA, 16 nt, Human
aguucugcagauaaac

SEQ ID NO: 1816638 - RNA, 21 nt, Human
aguucugcagauaaacaguag

SEQ ID NO: 1816639 - RNA, 14 nt, Human
auaaauaacuuuuu

SEQ ID NO: 1816640 - RNA, 18 nt, Human
auaaacacucuugaaaaa

SEQ ID NO: 1816641 - RNA, 19 nt, Human
auaacuagaacugaauuuu

SEQ ID NO: 1816642 - RNA, 13 nt, Human
uuacagcugccug

SEQ ID NO: 1816643 - RNA, 14 nt, Human
uuacagcugccugc

SEQ ID NO: 1816644 - RNA, 14 nt, Human
uuacaggaaguacu

SEQ ID NO: 1816645 - RNA, 11 nt, Human
uuagacagagu

SEQ ID NO: 1816646 - RNA, 13 nt, Human
uuagaaccuuucu

SEQ ID NO: 1816647 - RNA, 11 nt, Human
uuagaaauaua

SEQ ID NO: 1816648 - RNA, 12 nt, Human
uuagaaauauaa

SEQ ID NO: 1816649 - RNA, 14 nt, Human
uuagaaauauaauu

SEQ ID NO: 1816650 - RNA, 20 nt, Human
uuacauaagauaaaugugcu

SEQ ID NO: 1816651 - RNA, 23 nt, Human
uuacucagaauucucuaguuuga

SEQ ID NO: 1816652 - RNA, 18 nt, Human
uuacucagaauucucuag

SEQ ID NO: 1816653 - RNA, 20 nt, Human
auaaaauuuuuaaucuuuaa

SEQ ID NO: 1816654 - RNA, 22 nt, Human
auaaacaagaccacguuucuaa

SEQ ID NO: 1816655 - RNA, 15 nt, Human
auaaacaagaccacg

SEQ ID NO: 1816656 - RNA, 23 nt, Human
auaaacaagaccacguuucuaaa

SEQ ID NO: 1816657 - RNA, 19 nt, Human
uuaauuuuuuugagacaga

SEQ ID NO: 1816658 - RNA, 16 nt, Human
auaaaauuaaagcuga

SEQ ID NO: 1816659 - RNA, 15 nt, Human
uuaauucuuagcuca

SEQ ID NO: 1816660 - RNA, 20 nt, Human
uuaaguuaguuccacugaga

SEQ ID NO: 1816661 - RNA, 13 nt, Human
uuaauaaacacuc

SEQ ID NO: 1816662 - RNA, 17 nt, Human
uuaauaaacacucuuga

SEQ ID NO: 1816663 - RNA, 14 nt, Human
uuaauaaagacagg

SEQ ID NO: 1816664 - RNA, 13 nt, Human
uuaauaaagacag

SEQ ID NO: 1816665 - RNA, 23 nt, Human
uuaaugaaagacuguacaaagua

SEQ ID NO: 1816666 - RNA, 20 nt, Human
uuaaugaaagacuguacaaa

SEQ ID NO: 1816667 - RNA, 13 nt, Human
uuaagaggcaggg

SEQ ID NO: 1816668 - RNA, 16 nt, Human
uuaagaggcagggucu

SEQ ID NO: 1816669 - RNA, 15 nt, Human
uuaagaggcaggguc

SEQ ID NO: 1816670 - RNA, 18 nt, Human
uuaaguaaggaauuuuau

SEQ ID NO: 1816671 - RNA, 22 nt, Human
uuaagugcugcauuuaaaagau

SEQ ID NO: 1816672 - RNA, 22 nt, Human
uuaaguuacacauuuuucagau

SEQ ID NO: 1816673 - RNA, 17 nt, Human
uuaaguacuauguauca

SEQ ID NO: 1816674 - RNA, 17 nt, Human
uuaagugaaaauauagc

SEQ ID NO: 1816675 - RNA, 21 nt, Human
auaaaaguacauguuaaacuu

SEQ ID NO: 1816676 - RNA, 15 nt, Human
auaaaaguacauguu

SEQ ID NO: 1816677 - RNA, 21 nt, Human
agggucucacucugucgccca

SEQ ID NO: 1816678 - RNA, 16 nt, Human
agggucucacucuguc

SEQ ID NO: 1816679 - RNA, 15 nt, Human
agggucucacucugu

SEQ ID NO: 1816680 - RNA, 14 nt, Human
agggucucacucug

SEQ ID NO: 1816681 - RNA, 15 nt, Human
aggguaaggcugugg

SEQ ID NO: 1816682 - RNA, 20 nt, Human
aggggguggccucccaacuc

SEQ ID NO: 1816683 - RNA, 18 nt, Human
aggggugggacacccugu

SEQ ID NO: 1816684 - RNA, 21 nt, Human
aggggaauguuugccucugcc

SEQ ID NO: 1816685 - RNA, 20 nt, Human
aggggaauguuugccucugc

SEQ ID NO: 1816686 - RNA, 19 nt, Human
aggggaauguuugccucug

SEQ ID NO: 1816687 - RNA, 18 nt, Human
aggggagcaugggaagug

SEQ ID NO: 1816688 - RNA, 16 nt, Human
aggguggugaccucug

SEQ ID NO: 1816689 - RNA, 16 nt, Human
ugggucgcccuggacu

SEQ ID NO: 1816690 - RNA, 18 nt, Human
ugggucgcccuggacugu

SEQ ID NO: 1816691 - RNA, 17 nt, Human
ugguagcuuuucccuuc

SEQ ID NO: 1816692 - RNA, 20 nt, Human
ugguagagugugccugaagu

SEQ ID NO: 1816693 - RNA, 17 nt, Human
uggguggcaccagcagc

SEQ ID NO: 1816694 - RNA, 20 nt, Human
uggguggcaccagcagccug

SEQ ID NO: 1816695 - RNA, 21 nt, Human
uggguggcaccagcagccugg

SEQ ID NO: 1816696 - RNA, 22 nt, Human
uggguggcaccagcagccugga

SEQ ID NO: 1816697 - RNA, 12 nt, Human
uggggcccugcc

SEQ ID NO: 1816698 - RNA, 21 nt, Human
uggggccaguuggucccccuu

SEQ ID NO: 1816699 - RNA, 15 nt, Human
uggggaggggcugug

SEQ ID NO: 1816700 - RNA, 22 nt, Human
uggggcugcaccggcuggccug

SEQ ID NO: 1816701 - RNA, 23 nt, Human
uggggcugcaccggcuggccugg

SEQ ID NO: 1816702 - RNA, 12 nt, Human
agggcuccagac

SEQ ID NO: 1816703 - RNA, 15 nt, Human
agggcuccagacaca

SEQ ID NO: 1816704 - RNA, 14 nt, Human
uggggaccucaggc

SEQ ID NO: 1816705 - RNA, 15 nt, Human
uggggaccucaggcc

SEQ ID NO: 1816706 - RNA, 16 nt, Human
uggggaccucaggccu

SEQ ID NO: 1816707 - RNA, 17 nt, Human
uggggaccucaggccug

SEQ ID NO: 1816708 - RNA, 12 nt, Human
uggggaggacaa

SEQ ID NO: 1816709 - RNA, 20 nt, Human
ugggguacccacugcucugg

SEQ ID NO: 1816710 - RNA, 19 nt, Human
ugggguacccacugcucug

SEQ ID NO: 1816711 - RNA, 13 nt, Human
uggggucacucug

SEQ ID NO: 1816712 - RNA, 14 nt, Human
uggggucacucugg

SEQ ID NO: 1816713 - RNA, 18 nt, Human
ugggguacccacugcucu

SEQ ID NO: 1816714 - RNA, 17 nt, Human
ugggguacccacugcuc

SEQ ID NO: 1816715 - RNA, 16 nt, Human
uggggucacucuggca

SEQ ID NO: 1816716 - RNA, 22 nt, Human
uggggucacucuggcagcucag

SEQ ID NO: 1816717 - RNA, 13 nt, Human
aggggaaaagagg

SEQ ID NO: 1816718 - RNA, 14 nt, Human
aggggaacagacug

SEQ ID NO: 1816719 - RNA, 18 nt, Human
aggggaaaaucagccugc

SEQ ID NO: 1816720 - RNA, 22 nt, Human
aggggaaaaucagccugcucca

SEQ ID NO: 1816721 - RNA, 13 nt, Human
aggggaauguuug

SEQ ID NO: 1816722 - RNA, 21 nt, Human
aggggaauaaacuguugaguc

SEQ ID NO: 1816723 - RNA, 16 nt, Human
agggcacugguggccc

SEQ ID NO: 1816724 - RNA, 14 nt, Human
agggcacugguggc

SEQ ID NO: 1816725 - RNA, 16 nt, Human
agggagggcuccagac

SEQ ID NO: 1816726 - RNA, 14 nt, Human
agggagggcuccag

SEQ ID NO: 1816727 - RNA, 15 nt, Human
agggagggcuccaga

SEQ ID NO: 1816728 - RNA, 23 nt, Human
agggcucagcggggacagcuccu

SEQ ID NO: 1816729 - RNA, 22 nt, Human
agggcucagcggggacagcucc

SEQ ID NO: 1816730 - RNA, 20 nt, Human
agggcucagcggggacagcu

SEQ ID NO: 1816731 - RNA, 19 nt, Human
agggcucagcggggacagc

SEQ ID NO: 1816732 - RNA, 20 nt, Human
ugggccccugccucucugca

SEQ ID NO: 1816733 - RNA, 15 nt, Human
ugggccccugccucu

SEQ ID NO: 1816734 - RNA, 19 nt, Human
ugggccccugccucucugc

SEQ ID NO: 1816735 - RNA, 15 nt, Human
agggagggagggcuc

SEQ ID NO: 1816736 - RNA, 17 nt, Human
agggagggagggcucca

SEQ ID NO: 1816737 - RNA, 18 nt, Human
ugggccccaguuguauuu

SEQ ID NO: 1816738 - RNA, 22 nt, Human
ugggccccaguuguauuuauuu

SEQ ID NO: 1816739 - RNA, 16 nt, Human
ugggcccccaaaugga

SEQ ID NO: 1816740 - RNA, 21 nt, Human
ugggcccccaaauggaaaugg

SEQ ID NO: 1816741 - RNA, 12 nt, Human
ugggcagaagga

SEQ ID NO: 1816742 - RNA, 11 nt, Human
ugggcagagca

SEQ ID NO: 1816743 - RNA, 12 nt, Human
ugggcagagcag

SEQ ID NO: 1816744 - RNA, 18 nt, Human
ugggccaggagccuccug

SEQ ID NO: 1816745 - RNA, 13 nt, Human
ugggcagagcaga

SEQ ID NO: 1816746 - RNA, 20 nt, Human
ugggaggaucucuugagccu

SEQ ID NO: 1816747 - RNA, 21 nt, Human
ugggaggaucucuugagccug

SEQ ID NO: 1816748 - RNA, 22 nt, Human
ugggaggaucucuugagccugg

SEQ ID NO: 1816749 - RNA, 19 nt, Human
ugggaggccaaggugggag

SEQ ID NO: 1816750 - RNA, 20 nt, Human
ugggaggccaaggugggagg

SEQ ID NO: 1816751 - RNA, 13 nt, Human
agggaaggggaca

SEQ ID NO: 1816752 - RNA, 22 nt, Human
agggaaggggacaaggacuagg

SEQ ID NO: 1816753 - RNA, 22 nt, Human
agggaaggauacaaaagcaugu

SEQ ID NO: 1816754 - RNA, 21 nt, Human
agggaauuucuucaacucccu

SEQ ID NO: 1816755 - RNA, 20 nt, Human
aggcccggcuccaggcuccu

SEQ ID NO: 1816756 - RNA, 18 nt, Human
aggcccggcuccaggcuc

SEQ ID NO: 1816757 - RNA, 21 nt, Human
aggcccggcuccaggcuccuu

SEQ ID NO: 1816758 - RNA, 16 nt, Human
ugggacuacaggcacc

SEQ ID NO: 1816759 - RNA, 15 nt, Human
ugggacuacaggcac

SEQ ID NO: 1816760 - RNA, 14 nt, Human
ugggacuacaggca

SEQ ID NO: 1816761 - RNA, 22 nt, Human
agggaggacgcucucuggccuu

SEQ ID NO: 1816762 - RNA, 21 nt, Human
agggaggacgcucucuggccu

SEQ ID NO: 1816763 - RNA, 23 nt, Human
agggaggacgcucucuggccuuc

SEQ ID NO: 1816764 - RNA, 20 nt, Human
ugggacucaaugcacugaca

SEQ ID NO: 1816765 - RNA, 19 nt, Human
ugggagagaagagaaugca

SEQ ID NO: 1816766 - RNA, 21 nt, Human
ugggagagaagagaaugcaca

SEQ ID NO: 1816767 - RNA, 18 nt, Human
ugggagacugcugaguca

SEQ ID NO: 1816768 - RNA, 16 nt, Human
ugggagagccuuccag

SEQ ID NO: 1816769 - RNA, 18 nt, Human
uguagagccagggucuca

SEQ ID NO: 1816770 - RNA, 16 nt, Human
uguagagccagggucu

SEQ ID NO: 1816771 - RNA, 23 nt, Human
uguagaaaagggaacugaacauu

SEQ ID NO: 1816772 - RNA, 14 nt, Human
uguagagcuucugg

SEQ ID NO: 1816773 - RNA, 16 nt, Human
uguagaggagaaacug

SEQ ID NO: 1816774 - RNA, 22 nt, Human
uguacuugcucuugaugccugg

SEQ ID NO: 1816775 - RNA, 23 nt, Human
uguacuugcucuugaugccuggc

SEQ ID NO: 1816776 - RNA, 21 nt, Human
uguagaaaagggaacugaaca

SEQ ID NO: 1816777 - RNA, 20 nt, Human
uguagaaaagggaacugaac

SEQ ID NO: 1816778 - RNA, 19 nt, Human
uguagaaaagggaacugaa

SEQ ID NO: 1816779 - RNA, 18 nt, Human
uguagaaaagggaacuga

SEQ ID NO: 1816780 - RNA, 13 nt, Human
aguaaaauccaca

SEQ ID NO: 1816781 - RNA, 15 nt, Human
aguaauaugcacaca

SEQ ID NO: 1816782 - RNA, 14 nt, Human
aguaauaugcacac

SEQ ID NO: 1816783 - RNA, 17 nt, Human
uguaggcauaaagucag

SEQ ID NO: 1816784 - RNA, 20 nt, Human
uguaggcauaaagucagggg

SEQ ID NO: 1816785 - RNA, 11 nt, Human
aguagagacag

SEQ ID NO: 1816786 - RNA, 14 nt, Human
aguacauguuaaac

SEQ ID NO: 1816787 - RNA, 23 nt, Human
aguaccauuuaauggggaggaca

SEQ ID NO: 1816788 - RNA, 12 nt, Human
aguaccauuuaa

SEQ ID NO: 1816789 - RNA, 21 nt, Human
aguagaagucuuagauguaua

SEQ ID NO: 1816790 - RNA, 19 nt, Human
aguagaagucuuagaugua

SEQ ID NO: 1816791 - RNA, 20 nt, Human
aguagaagucuuagauguau

SEQ ID NO: 1816792 - RNA, 20 nt, Human
uguauucucuccuguaccuc

SEQ ID NO: 1816793 - RNA, 19 nt, Human
uguauucucuccuguaccu

SEQ ID NO: 1816794 - RNA, 22 nt, Human
uguauuacaaauccaaugaaau

SEQ ID NO: 1816795 - RNA, 13 nt, Human
uguauuacaaauc

SEQ ID NO: 1816796 - RNA, 23 nt, Human
uguaucaaauacauuuaaaacau

SEQ ID NO: 1816797 - RNA, 21 nt, Human
uguaucaaauacauuuaaaac

SEQ ID NO: 1816798 - RNA, 14 nt, Human
uguaucaaauacau

SEQ ID NO: 1816799 - RNA, 18 nt, Human
uguaugucucgugguagg

SEQ ID NO: 1816800 - RNA, 17 nt, Human
uguaucaaugaguaaca

SEQ ID NO: 1816801 - RNA, 18 nt, Human
aguauuacuucugcuaca

SEQ ID NO: 1816802 - RNA, 17 nt, Human
aguaugguggcuggguu

SEQ ID NO: 1816803 - RNA, 15 nt, Human
aguauuacuucugcu

SEQ ID NO: 1816804 - RNA, 16 nt, Human
aguaugguggcugggu

SEQ ID NO: 1816805 - RNA, 15 nt, Human
aguaugguggcuggg

SEQ ID NO: 1816806 - RNA, 19 nt, Human
ugucaauuacaggaaguac

SEQ ID NO: 1816807 - RNA, 17 nt, Human
ugucaauuacaggaagu

SEQ ID NO: 1816808 - RNA, 14 nt, Human
ugucaauuacagga

SEQ ID NO: 1816809 - RNA, 15 nt, Human
ugucaauuacaggaa

SEQ ID NO: 1816810 - RNA, 23 nt, Human
agucacacagugagucgaggaca

SEQ ID NO: 1816811 - RNA, 15 nt, Human
agucacacagugagu

SEQ ID NO: 1816812 - RNA, 19 nt, Human
agucaccccggccaccugc

SEQ ID NO: 1816813 - RNA, 23 nt, Human
agucacacaguauuacuucugcu

SEQ ID NO: 1816814 - RNA, 17 nt, Human
uggugcgaucuggguuc

SEQ ID NO: 1816815 - RNA, 16 nt, Human
uggugcgaucuggguu

SEQ ID NO: 1816816 - RNA, 13 nt, Human
uggugcugccaca

SEQ ID NO: 1816817 - RNA, 18 nt, Human
uggugcugccacacuuca

SEQ ID NO: 1816818 - RNA, 12 nt, Human
ugguggcagugg

SEQ ID NO: 1816819 - RNA, 15 nt, Human
ugguggcagcugcgg

SEQ ID NO: 1816820 - RNA, 13 nt, Human
ugguggcagcugc

SEQ ID NO: 1816821 - RNA, 14 nt, Human
ugguggcagcugcg

SEQ ID NO: 1816822 - RNA, 21 nt, Human
ugguggagaggcccggccucu

SEQ ID NO: 1816823 - RNA, 18 nt, Human
ugguuaggcauuguggga

SEQ ID NO: 1816824 - RNA, 20 nt, Human
ugguuaggcauugugggaag

SEQ ID NO: 1816825 - RNA, 23 nt, Human
uggugugaccacugcagaagaca

SEQ ID NO: 1816826 - RNA, 18 nt, Human
aggucagagccugcaguu

SEQ ID NO: 1816827 - RNA, 17 nt, Human
aggucagagccugcagu

SEQ ID NO: 1816828 - RNA, 15 nt, Human
aggucagagccugca

SEQ ID NO: 1816829 - RNA, 14 nt, Human
aggucagagccugc

SEQ ID NO: 1816830 - RNA, 13 nt, Human
aggucagagccug

SEQ ID NO: 1816831 - RNA, 16 nt, Human
uggucagauuugaacu

SEQ ID NO: 1816832 - RNA, 15 nt, Human
uggucagauuugaac

SEQ ID NO: 1816833 - RNA, 16 nt, Human
aggucuugaacuccug

SEQ ID NO: 1816834 - RNA, 19 nt, Human
agguccacaacacacagau

SEQ ID NO: 1816835 - RNA, 15 nt, Human
aggugacagagugag

SEQ ID NO: 1816836 - RNA, 13 nt, Human
aggugacagagug

SEQ ID NO: 1816837 - RNA, 17 nt, Human
aggucuugaacuccugg

SEQ ID NO: 1816838 - RNA, 18 nt, Human
aggucuugaacuccuggc

SEQ ID NO: 1816839 - RNA, 13 nt, Human
aggugaccccagg

SEQ ID NO: 1816840 - RNA, 22 nt, Human
aggugacagagugagacucugu

SEQ ID NO: 1816841 - RNA, 21 nt, Human
aggugagaagcagaggaagga

SEQ ID NO: 1816842 - RNA, 23 nt, Human
aggugagaagcagaggaaggaga

SEQ ID NO: 1816843 - RNA, 16 nt, Human
aggugagaagcagagg

SEQ ID NO: 1816844 - RNA, 19 nt, Human
uguaaauaaagaacuagca

SEQ ID NO: 1816845 - RNA, 21 nt, Human
uguaaauacuguuuuuaacaa

SEQ ID NO: 1816846 - RNA, 16 nt, Human
uguaaauagcucaggu

SEQ ID NO: 1816847 - RNA, 15 nt, Human
uguaaauagcucagg

SEQ ID NO: 1816848 - RNA, 14 nt, Human
ugguuauggagagg

SEQ ID NO: 1816849 - RNA, 14 nt, Human
ugguuuccugcccu

SEQ ID NO: 1816850 - RNA, 15 nt, Human
ugguuuccugcccug

SEQ ID NO: 1816851 - RNA, 20 nt, Human
ugguuuccugcccugggagg

SEQ ID NO: 1816852 - RNA, 17 nt, Human
ugguuaugaauacuuug

SEQ ID NO: 1816853 - RNA, 12 nt, Human
ugguuuccugcc

SEQ ID NO: 1816854 - RNA, 13 nt, Human
ugguuuccugccc

SEQ ID NO: 1816855 - RNA, 15 nt, Human
ugguuuguaaauuaa

SEQ ID NO: 1816856 - RNA, 14 nt, Human
ugguuuucaaaaua

SEQ ID NO: 1816857 - RNA, 15 nt, Human
ugguuuucaaaauaa

SEQ ID NO: 1816858 - RNA, 17 nt, Human
ugguuuucaaaauaaaa

SEQ ID NO: 1816859 - RNA, 20 nt, Human
aggugugcucugaucaucca

SEQ ID NO: 1816860 - RNA, 15 nt, Human
aggugugcucugauc

SEQ ID NO: 1816861 - RNA, 17 nt, Human
aggugugaaccaccaca

SEQ ID NO: 1816862 - RNA, 19 nt, Human
agguggggucacucuggca

SEQ ID NO: 1816863 - RNA, 14 nt, Human
agguuuaagcuguu

SEQ ID NO: 1816864 - RNA, 20 nt, Human
aggugcauauuuauaaaaau

SEQ ID NO: 1816865 - RNA, 20 nt, Human
aggugauccacccaccucag

SEQ ID NO: 1816866 - RNA, 14 nt, Human
aggugauccaccca

SEQ ID NO: 1816867 - RNA, 23 nt, Human
agguggggcagcuugaggguugg

SEQ ID NO: 1816868 - RNA, 18 nt, Human
aggugggauccuccaggu

SEQ ID NO: 1816869 - RNA, 16 nt, Human
aggugggauccuccag

SEQ ID NO: 1816870 - RNA, 17 nt, Human
aggugggauccuccagg

SEQ ID NO: 1816871 - RNA, 15 nt, Human
aggugggauccucca

SEQ ID NO: 1816872 - RNA, 18 nt, Human
aggugccucaagagaagg

SEQ ID NO: 1816873 - RNA, 14 nt, Human
aggaaaagcugcug

SEQ ID NO: 1816874 - RNA, 22 nt, Human
agcuuuccccaugucucgacuc

SEQ ID NO: 1816875 - RNA, 19 nt, Human
agcuuacaagccagcugga

SEQ ID NO: 1816876 - RNA, 17 nt, Human
agcuuacaagccagcug

SEQ ID NO: 1816877 - RNA, 15 nt, Human
agcuuacaagccagc

SEQ ID NO: 1816878 - RNA, 20 nt, Human
agcuugaccgugaggccaga

SEQ ID NO: 1816879 - RNA, 22 nt, Human
agcuugaccgugaggccagaga

SEQ ID NO: 1816880 - RNA, 23 nt, Human
agcuugaccgugaggccagagac

SEQ ID NO: 1816881 - RNA, 20 nt, Human
agcuugcccuggugccucac

SEQ ID NO: 1816882 - RNA, 15 nt, Human
ugcgguccacccagg

SEQ ID NO: 1816883 - RNA, 14 nt, Human
ugcgguccacccag

SEQ ID NO: 1816884 - RNA, 13 nt, Human
agcuguuuaugca

SEQ ID NO: 1816885 - RNA, 13 nt, Human
agcuuaacagugu

SEQ ID NO: 1816886 - RNA, 16 nt, Human
ugcuaauuuugaaaaa

SEQ ID NO: 1816887 - RNA, 18 nt, Human
ugcuaauuuugaaaaacu

SEQ ID NO: 1816888 - RNA, 19 nt, Human
ugcuaauuuugaaaaacug

SEQ ID NO: 1816889 - RNA, 20 nt, Human
ugcuaauuuugaaaaacugc

SEQ ID NO: 1816890 - RNA, 16 nt, Human
ugcucugcugacagac

SEQ ID NO: 1816891 - RNA, 15 nt, Human
ugcucugcugacaga

SEQ ID NO: 1816892 - RNA, 14 nt, Human
ugcucugcugacag

SEQ ID NO: 1816893 - RNA, 20 nt, Human
ugcucuugaacuccugaccu

SEQ ID NO: 1816894 - RNA, 22 nt, Human
ugcucuugaacuccugaccuca

SEQ ID NO: 1816895 - RNA, 15 nt, Human
ugcucuugaacuccu

SEQ ID NO: 1816896 - RNA, 19 nt, Human
ugcucugaucauccacugu

SEQ ID NO: 1816897 - RNA, 21 nt, Human
ugcuccagcuguucagcuggu

SEQ ID NO: 1816898 - RNA, 16 nt, Human
aggaaaagcugcugac

SEQ ID NO: 1816899 - RNA, 23 nt, Human
aggaaaccaguuaggucucaaua

SEQ ID NO: 1816900 - RNA, 13 nt, Human
ugcuaucuccccc

SEQ ID NO: 1816901 - RNA, 14 nt, Human
ugcuaucuccccca

SEQ ID NO: 1816902 - RNA, 17 nt, Human
ugcuaucucccccagcc

SEQ ID NO: 1816903 - RNA, 18 nt, Human
ugcuaucucccccagccc

SEQ ID NO: 1816904 - RNA, 18 nt, Human
aggaagcagcuuucccca

SEQ ID NO: 1816905 - RNA, 13 nt, Human
aggaagccagcag

SEQ ID NO: 1816906 - RNA, 13 nt, Human
aggaagcucaggg

SEQ ID NO: 1816907 - RNA, 14 nt, Human
aggaagcucagggc

SEQ ID NO: 1816908 - RNA, 15 nt, Human
aggaaggcugagagg

SEQ ID NO: 1816909 - RNA, 15 nt, Human
aggaagcucagggcc

SEQ ID NO: 1816910 - RNA, 16 nt, Human
aggaagcucagggccu

SEQ ID NO: 1816911 - RNA, 15 nt, Human
agcuccuucuguccu

SEQ ID NO: 1816912 - RNA, 23 nt, Human
agcucccaggcauuccccaggag

SEQ ID NO: 1816913 - RNA, 16 nt, Human
agcuccaucuccacuc

SEQ ID NO: 1816914 - RNA, 13 nt, Human
agcucccaggcau

SEQ ID NO: 1816915 - RNA, 13 nt, Human
agcuccaucucca

SEQ ID NO: 1816916 - RNA, 15 nt, Human
agcuccaucuccacu

SEQ ID NO: 1816917 - RNA, 21 nt, Human
agcuccuucuguccuacucug

SEQ ID NO: 1816918 - RNA, 16 nt, Human
agcuccuucuguccua

SEQ ID NO: 1816919 - RNA, 12 nt, Human
agcucuggucca

SEQ ID NO: 1816920 - RNA, 17 nt, Human
agcucugguccauagag

SEQ ID NO: 1816921 - RNA, 19 nt, Human
ugcccuuaccugccaggaa

SEQ ID NO: 1816922 - RNA, 18 nt, Human
ugcccuuaccugccagga

SEQ ID NO: 1816923 - RNA, 13 nt, Human
ugccucagccucc

SEQ ID NO: 1816924 - RNA, 12 nt, Human
ugccucagccuc

SEQ ID NO: 1816925 - RNA, 12 nt, Human
ugccgcagcccu

SEQ ID NO: 1816926 - RNA, 14 nt, Human
ugccgcagcccugc

SEQ ID NO: 1816927 - RNA, 23 nt, Human
agcucuguccugggagugagcug

SEQ ID NO: 1816928 - RNA, 21 nt, Human
agcucuguccugggagugagc

SEQ ID NO: 1816929 - RNA, 16 nt, Human
agcucuguccugggag

SEQ ID NO: 1816930 - RNA, 20 nt, Human
agcugccagccgagauagcc

SEQ ID NO: 1816931 - RNA, 19 nt, Human
agcuguuacugucuucagu

SEQ ID NO: 1816932 - RNA, 14 nt, Human
ugccuguucccauu

SEQ ID NO: 1816933 - RNA, 21 nt, Human
ugccuuacccucauguucuua

SEQ ID NO: 1816934 - RNA, 16 nt, Human
ugccuuggggacaaga

SEQ ID NO: 1816935 - RNA, 20 nt, Human
ugccuuacccucauguucuu

SEQ ID NO: 1816936 - RNA, 16 nt, Human
ugccuguugggccagg

SEQ ID NO: 1816937 - RNA, 17 nt, Human
ugccuguugggccagga

SEQ ID NO: 1816938 - RNA, 16 nt, Human
agcugggacuacaggu

SEQ ID NO: 1816939 - RNA, 20 nt, Human
agcugggguggggaccucag

SEQ ID NO: 1816940 - RNA, 23 nt, Human
agcugggacuacaggcacccacc

SEQ ID NO: 1816941 - RNA, 20 nt, Human
agcugggacuacaggcaccc

SEQ ID NO: 1816942 - RNA, 22 nt, Human
agcugggguggggaccucaggc

SEQ ID NO: 1816943 - RNA, 23 nt, Human
agcugggguggggaccucaggcc

SEQ ID NO: 1816944 - RNA, 18 nt, Human
agcugugcucuggacagg

SEQ ID NO: 1816945 - RNA, 17 nt, Human
agcugugcucuggacag

SEQ ID NO: 1816946 - RNA, 19 nt, Human
agcugugcucuggacaggc

SEQ ID NO: 1816947 - RNA, 18 nt, Human
agcuguuacugucuucag

SEQ ID NO: 1816948 - RNA, 16 nt, Human
agcugccuguucagcu

SEQ ID NO: 1816949 - RNA, 14 nt, Human
agcugccuguucag

SEQ ID NO: 1816950 - RNA, 18 nt, Human
agcugccuguucagcucc

SEQ ID NO: 1816951 - RNA, 19 nt, Human
agcugccuguucagcucca

SEQ ID NO: 1816952 - RNA, 16 nt, Human
ugccuggauggggcug

SEQ ID NO: 1816953 - RNA, 17 nt, Human
ugccuggauggggcugc

SEQ ID NO: 1816954 - RNA, 20 nt, Human
ugccuggauggggcugcacc

SEQ ID NO: 1816955 - RNA, 21 nt, Human
ugccuggauggggcugcaccg

SEQ ID NO: 1816956 - RNA, 20 nt, Human
agcugcuugggcuucauccu

SEQ ID NO: 1816957 - RNA, 16 nt, Human
agcugcuugggcuuca

SEQ ID NO: 1816958 - RNA, 18 nt, Human
agcuggccgggagccuga

SEQ ID NO: 1816959 - RNA, 19 nt, Human
agcuggccgggagccugau

SEQ ID NO: 1816960 - RNA, 17 nt, Human
ugccucugccucugaca

SEQ ID NO: 1816961 - RNA, 20 nt, Human
ugccucugccucugacacac

SEQ ID NO: 1816962 - RNA, 18 nt, Human
ugccucugccucugacac

SEQ ID NO: 1816963 - RNA, 14 nt, Human
ugccucagccuccc

SEQ ID NO: 1816964 - RNA, 23 nt, Human
ugccugcccaggccccugccacc

SEQ ID NO: 1816965 - RNA, 22 nt, Human
ugccugcccaggccccugccac

SEQ ID NO: 1816966 - RNA, 20 nt, Human
ugccugcccaggccccugcc

SEQ ID NO: 1816967 - RNA, 12 nt, Human
ugccucugccug

SEQ ID NO: 1816968 - RNA, 24 nt, Human
ugccugcccaggccccugccaccc

SEQ ID NO: 1816969 - RNA, 22 nt, Human
ugccugcuuuuuauggccugug

SEQ ID NO: 1816970 - RNA, 20 nt, Human
ugccugcuuuuuauggccug

SEQ ID NO: 1816971 - RNA, 21 nt, Human
ugccugcuuuuuauggccugu

SEQ ID NO: 1816972 - RNA, 23 nt, Human
uggcacaucagcacgauuucugu

SEQ ID NO: 1816973 - RNA, 13 nt, Human
uggauggaagggg

SEQ ID NO: 1816974 - RNA, 23 nt, Human
uggaugccugguggcagcugcgg

SEQ ID NO: 1816975 - RNA, 21 nt, Human
uggaugccugguggcagcugc

SEQ ID NO: 1816976 - RNA, 14 nt, Human
uggaguugaaaauc

SEQ ID NO: 1816977 - RNA, 14 nt, Human
uggagugcagugag

SEQ ID NO: 1816978 - RNA, 17 nt, Human
uggagugcaaugacaca

SEQ ID NO: 1816979 - RNA, 16 nt, Human
aggcauuugcugaaua

SEQ ID NO: 1816980 - RNA, 20 nt, Human
aggcauuugcugaauacaga

SEQ ID NO: 1816981 - RNA, 13 nt, Human
aggcccggcucca

SEQ ID NO: 1816982 - RNA, 15 nt, Human
aggcccggccucuca

SEQ ID NO: 1816983 - RNA, 13 nt, Human
aggcccggccucu

SEQ ID NO: 1816984 - RNA, 14 nt, Human
aggcccggccucuc

SEQ ID NO: 1816985 - RNA, 14 nt, Human
aggccccgcccagg

SEQ ID NO: 1816986 - RNA, 13 nt, Human
aggcccagagggc

SEQ ID NO: 1816987 - RNA, 20 nt, Human
uggcacccggccccugcugg

SEQ ID NO: 1816988 - RNA, 19 nt, Human
uggcacccggccccugcug

SEQ ID NO: 1816989 - RNA, 18 nt, Human
uggcacccggccccugcu

SEQ ID NO: 1816990 - RNA, 13 nt, Human
uggcagcucagag

SEQ ID NO: 1816991 - RNA, 23 nt, Human
uggcagcucaccucucccuugga

SEQ ID NO: 1816992 - RNA, 21 nt, Human
uggcagcucaccucucccuug

SEQ ID NO: 1816993 - RNA, 22 nt, Human
uggcagcucaccucucccuugg

SEQ ID NO: 1816994 - RNA, 13 nt, Human
aggccagccuuga

SEQ ID NO: 1816995 - RNA, 12 nt, Human
aggccagcugcu

SEQ ID NO: 1816996 - RNA, 15 nt, Human
aggccagccuugacc

SEQ ID NO: 1816997 - RNA, 17 nt, Human
aggcaagcaccuccugc

SEQ ID NO: 1816998 - RNA, 17 nt, Human
uggagccaauggagacu

SEQ ID NO: 1816999 - RNA, 19 nt, Human
aggcaagcaccuccugccu

SEQ ID NO: 1817000 - RNA, 18 nt, Human
aggcaagcaccuccugcc

SEQ ID NO: 1817001 - RNA, 20 nt, Human
aggcaagcaccuccugccuc

SEQ ID NO: 1817002 - RNA, 17 nt, Human
aggcaaggcugucaauu

SEQ ID NO: 1817003 - RNA, 16 nt, Human
aggcaaggcugucaau

SEQ ID NO: 1817004 - RNA, 17 nt, Human
aggauugcuacuguccu

SEQ ID NO: 1817005 - RNA, 15 nt, Human
aggauugcuacuguc

SEQ ID NO: 1817006 - RNA, 18 nt, Human
aggauugcuacuguccua

SEQ ID NO: 1817007 - RNA, 14 nt, Human
uggagaaaauggac

SEQ ID NO: 1817008 - RNA, 22 nt, Human
aggcauaaagucagggguuccc

SEQ ID NO: 1817009 - RNA, 18 nt, Human
aggcauugugggaagggg

SEQ ID NO: 1817010 - RNA, 20 nt, Human
aggcauuuaggccaugggac

SEQ ID NO: 1817011 - RNA, 22 nt, Human
aggcaggucuugaacuccuggc

SEQ ID NO: 1817012 - RNA, 12 nt, Human
aggcagggucuc

SEQ ID NO: 1817013 - RNA, 15 nt, Human
aggcauaaagucagg

SEQ ID NO: 1817014 - RNA, 17 nt, Human
aggcaggugggauggau

SEQ ID NO: 1817015 - RNA, 19 nt, Human
aggacuuuucuuuguggcu

SEQ ID NO: 1817016 - RNA, 17 nt, Human
aggacuuuucuuugugg

SEQ ID NO: 1817017 - RNA, 22 nt, Human
aggacuuuucuuuguggcuucc

SEQ ID NO: 1817018 - RNA, 19 nt, Human
aggagaaacuggaacucuc

SEQ ID NO: 1817019 - RNA, 18 nt, Human
aggagaaacuggaacucu

SEQ ID NO: 1817020 - RNA, 12 nt, Human
aggacucugccu

SEQ ID NO: 1817021 - RNA, 13 nt, Human
aggacucugccuc

SEQ ID NO: 1817022 - RNA, 14 nt, Human
aggacucugccucc

SEQ ID NO: 1817023 - RNA, 16 nt, Human
aggacucugccuccuc

SEQ ID NO: 1817024 - RNA, 17 nt, Human
aggacucugccuccucu

SEQ ID NO: 1817025 - RNA, 18 nt, Human
aggacucugccuccucuu

SEQ ID NO: 1817026 - RNA, 12 nt, Human
aggagcagccac

SEQ ID NO: 1817027 - RNA, 13 nt, Human
aggagcagccaca

SEQ ID NO: 1817028 - RNA, 17 nt, Human
aggagccccgaggccuu

SEQ ID NO: 1817029 - RNA, 23 nt, Human
aggagcccugggaggcucuggag

SEQ ID NO: 1817030 - RNA, 16 nt, Human
aggagccuccugcccu

SEQ ID NO: 1817031 - RNA, 14 nt, Human
aggacgcucucugg

SEQ ID NO: 1817032 - RNA, 13 nt, Human
aggacgcucucug

SEQ ID NO: 1817033 - RNA, 20 nt, Human
aggacgcucucuggccuucg

SEQ ID NO: 1817034 - RNA, 19 nt, Human
aggacgcucucuggccuuc

SEQ ID NO: 1817035 - RNA, 17 nt, Human
aggacgcucucuggccu

SEQ ID NO: 1817036 - RNA, 16 nt, Human
aggacgcucucuggcc

SEQ ID NO: 1817037 - RNA, 19 nt, Human
aggacuaggguccugggga

SEQ ID NO: 1817038 - RNA, 16 nt, Human
aggacuaggguccugg

SEQ ID NO: 1817039 - RNA, 18 nt, Human
aggacuaggguccugggg

SEQ ID NO: 1817040 - RNA, 15 nt, Human
aggacuaggguccug

SEQ ID NO: 1817041 - RNA, 18 nt, Human
ugcuuuuggucuguguga

SEQ ID NO: 1817042 - RNA, 20 nt, Human
ugcuuuugucuaugggacuc

SEQ ID NO: 1817043 - RNA, 23 nt, Human
ugcuuuuuaauauugauaugcuu

SEQ ID NO: 1817044 - RNA, 16 nt, Human
ugcuuugggcugcccu

SEQ ID NO: 1817045 - RNA, 17 nt, Human
ugcuuugggcugcccug

SEQ ID NO: 1817046 - RNA, 22 nt, Human
ugcuuugugauuuuuguaauuu

SEQ ID NO: 1817047 - RNA, 17 nt, Human
ugcuuugugauuuuugu

SEQ ID NO: 1817048 - RNA, 17 nt, Human
aggagccuccugcccuu

SEQ ID NO: 1817049 - RNA, 15 nt, Human
ugcuugagcucagga

SEQ ID NO: 1817050 - RNA, 14 nt, Human
ugcuuugggcugcc

SEQ ID NO: 1817051 - RNA, 15 nt, Human
ugcuuugggcugccc

SEQ ID NO: 1817052 - RNA, 16 nt, Human
uggaagacagcucuua

SEQ ID NO: 1817053 - RNA, 21 nt, Human
uggaaauuuguuauaaugaau

SEQ ID NO: 1817054 - RNA, 23 nt, Human
uggaaauuuguuauaaugaauga

SEQ ID NO: 1817055 - RNA, 16 nt, Human
ugcuuuuuauggccug

SEQ ID NO: 1817056 - RNA, 22 nt, Human
aggaugcacagaguuguuacau

SEQ ID NO: 1817057 - RNA, 22 nt, Human
aggaugaucuaggaagacuuug

SEQ ID NO: 1817058 - RNA, 23 nt, Human
aggaugaucuaggaagacuuugg

SEQ ID NO: 1817059 - RNA, 17 nt, Human
aggauucuuccucccuc

SEQ ID NO: 1817060 - RNA, 19 nt, Human
aggauucuuccucccuccc

SEQ ID NO: 1817061 - RNA, 13 nt, Human
aggaucagucuga

SEQ ID NO: 1817062 - RNA, 21 nt, Human
aggauaucggcauuuguuucu

SEQ ID NO: 1817063 - RNA, 17 nt, Human
aggauaucggcauuugu

SEQ ID NO: 1817064 - RNA, 20 nt, Human
ugcauaccacuuuuguucuu

SEQ ID NO: 1817065 - RNA, 18 nt, Human
ugcauaccacuuuuguuc

SEQ ID NO: 1817066 - RNA, 16 nt, Human
ugcauaccacuuuugu

SEQ ID NO: 1817067 - RNA, 17 nt, Human
ugcauagaauaaaauuu

SEQ ID NO: 1817068 - RNA, 19 nt, Human
ugcauacucauuaggaugg

SEQ ID NO: 1817069 - RNA, 13 nt, Human
ugcauacucauua

SEQ ID NO: 1817070 - RNA, 13 nt, Human
ugcaucucagccc

SEQ ID NO: 1817071 - RNA, 14 nt, Human
ugcaucucagccca

SEQ ID NO: 1817072 - RNA, 15 nt, Human
ugcaucucagcccac

SEQ ID NO: 1817073 - RNA, 18 nt, Human
ugcaugcugucccuuacg

SEQ ID NO: 1817074 - RNA, 19 nt, Human
ugcaugcugucccuuacgu

SEQ ID NO: 1817075 - RNA, 21 nt, Human
ugcaugcugucccuuacguga

SEQ ID NO: 1817076 - RNA, 18 nt, Human
ugcagccucacaguccuu

SEQ ID NO: 1817077 - RNA, 17 nt, Human
ugcagccucacaguccu

SEQ ID NO: 1817078 - RNA, 21 nt, Human
ugcagccucacaguccuuacc

SEQ ID NO: 1817079 - RNA, 11 nt, Human
ugcaggucccu

SEQ ID NO: 1817080 - RNA, 22 nt, Human
ugcaggucccuaauaaagcugu

SEQ ID NO: 1817081 - RNA, 21 nt, Human
ugcagacaggcaagcaccucc

SEQ ID NO: 1817082 - RNA, 13 nt, Human
ugcagacaggcaa

SEQ ID NO: 1817083 - RNA, 12 nt, Human
ugcagacaggca

SEQ ID NO: 1817084 - RNA, 13 nt, Human
agccuccugcccu

SEQ ID NO: 1817085 - RNA, 14 nt, Human
agccuccugcccuu

SEQ ID NO: 1817086 - RNA, 18 nt, Human
agccuccugcccuuaccu

SEQ ID NO: 1817087 - RNA, 13 nt, Human
ugccauaauuacu

SEQ ID NO: 1817088 - RNA, 17 nt, Human
ugccagccgagauagcc

SEQ ID NO: 1817089 - RNA, 22 nt, Human
ugccagccgagauagccaaggc

SEQ ID NO: 1817090 - RNA, 16 nt, Human
ugcauuuaaaagauac

SEQ ID NO: 1817091 - RNA, 18 nt, Human
ugccaaugggagcucaug

SEQ ID NO: 1817092 - RNA, 13 nt, Human
ugccaauggacua

SEQ ID NO: 1817093 - RNA, 14 nt, Human
ugccaaugggagcu

SEQ ID NO: 1817094 - RNA, 20 nt, Human
agccuuagaagucacacagu

SEQ ID NO: 1817095 - RNA, 22 nt, Human
agccuuagaagucacacaguau

SEQ ID NO: 1817096 - RNA, 15 nt, Human
agccuguuuaagaga

SEQ ID NO: 1817097 - RNA, 13 nt, Human
agccuugaacuuu

SEQ ID NO: 1817098 - RNA, 16 nt, Human
agccuugggaccccug

SEQ ID NO: 1817099 - RNA, 18 nt, Human
agccuugaccauucucca

SEQ ID NO: 1817100 - RNA, 19 nt, Human
agccuugaccauucuccac

SEQ ID NO: 1817101 - RNA, 21 nt, Human
agccuugaccauucuccaccu

SEQ ID NO: 1817102 - RNA, 19 nt, Human
agccuugcggaagguucua

SEQ ID NO: 1817103 - RNA, 17 nt, Human
agccugugccucuggga

SEQ ID NO: 1817104 - RNA, 18 nt, Human
agccugugccucugggac

SEQ ID NO: 1817105 - RNA, 19 nt, Human
agccugugccucugggacu

SEQ ID NO: 1817106 - RNA, 23 nt, Human
ugcaaaguucccuacuuccugug

SEQ ID NO: 1817107 - RNA, 20 nt, Human
ugcaaaguaucccuacugua

SEQ ID NO: 1817108 - RNA, 21 nt, Human
ugcaaaggguaucaggugcug

SEQ ID NO: 1817109 - RNA, 14 nt, Human
ugcaaagcccagcu

SEQ ID NO: 1817110 - RNA, 15 nt, Human
ugcaaagcccagcuu

SEQ ID NO: 1817111 - RNA, 17 nt, Human
ugcaaagcccagcuuga

SEQ ID NO: 1817112 - RNA, 18 nt, Human
ugcaaaccaucauugaaa

SEQ ID NO: 1817113 - RNA, 20 nt, Human
ugcaaaccaucauugaaauc

SEQ ID NO: 1817114 - RNA, 18 nt, Human
ugauuuccguuaaaauac

SEQ ID NO: 1817115 - RNA, 12 nt, Human
ugauuuggaaaa

SEQ ID NO: 1817116 - RNA, 12 nt, Human
ugcaaaccauca

SEQ ID NO: 1817117 - RNA, 13 nt, Human
ugcaaaccaucau

SEQ ID NO: 1817118 - RNA, 20 nt, Human
ugauuucagcaccuacagug

SEQ ID NO: 1817119 - RNA, 13 nt, Human
ugauuucauucaa

SEQ ID NO: 1817120 - RNA, 18 nt, Human
agccacggccaggccaga

SEQ ID NO: 1817121 - RNA, 17 nt, Human
agccacggccaggccag

SEQ ID NO: 1817122 - RNA, 13 nt, Human
ugcaacaggcugg

SEQ ID NO: 1817123 - RNA, 15 nt, Human
ugcaaggucauuuuu

SEQ ID NO: 1817124 - RNA, 12 nt, Human
agcccaggccuc

SEQ ID NO: 1817125 - RNA, 22 nt, Human
ugcagaagacaguauggcagcu

SEQ ID NO: 1817126 - RNA, 16 nt, Human
ugcacuccagccuggg

SEQ ID NO: 1817127 - RNA, 15 nt, Human
ugcacuccagccugg

SEQ ID NO: 1817128 - RNA, 17 nt, Human
ugcacuccagccugagc

SEQ ID NO: 1817129 - RNA, 14 nt, Human
ugcaccggcuggcc

SEQ ID NO: 1817130 - RNA, 15 nt, Human
ugcaccggcuggccu

SEQ ID NO: 1817131 - RNA, 16 nt, Human
ugcaccggcuggccug

SEQ ID NO: 1817132 - RNA, 14 nt, Human
ugcacuccagccug

SEQ ID NO: 1817133 - RNA, 15 nt, Human
ugcacuccagccuga

SEQ ID NO: 1817134 - RNA, 13 nt, Human
ugcaccagcccuu

SEQ ID NO: 1817135 - RNA, 21 nt, Human
ugcaccacugcacuccagccu

SEQ ID NO: 1817136 - RNA, 17 nt, Human
agcccugggaggcucug

SEQ ID NO: 1817137 - RNA, 18 nt, Human
agcccugggaggcucugg

SEQ ID NO: 1817138 - RNA, 20 nt, Human
agcccugggaggcucuggag

SEQ ID NO: 1817139 - RNA, 18 nt, Human
agccccgugggguuccuc

SEQ ID NO: 1817140 - RNA, 14 nt, Human
agccccgaggccuu

SEQ ID NO: 1817141 - RNA, 14 nt, Human
agcccaggccuccu

SEQ ID NO: 1817142 - RNA, 19 nt, Human
agcccaggccuccuacagc

SEQ ID NO: 1817143 - RNA, 21 nt, Human
agcccaggccuccuacagcuu

SEQ ID NO: 1817144 - RNA, 16 nt, Human
agcccgggcucugccu

SEQ ID NO: 1817145 - RNA, 14 nt, Human
agcccugcagaggg

SEQ ID NO: 1817146 - RNA, 15 nt, Human
agcccugcagagggc

SEQ ID NO: 1817147 - RNA, 16 nt, Human
agcccugcagagggca

SEQ ID NO: 1817148 - RNA, 19 nt, Human
agcccugcagagggcacag

SEQ ID NO: 1817149 - RNA, 14 nt, Human
agccccuucugacc

SEQ ID NO: 1817150 - RNA, 15 nt, Human
agccccuucugaccc

SEQ ID NO: 1817151 - RNA, 16 nt, Human
agccccuucugaccca

SEQ ID NO: 1817152 - RNA, 19 nt, Human
agccccuucugacccaugc

SEQ ID NO: 1817153 - RNA, 13 nt, Human
agcccgggcucug

SEQ ID NO: 1817154 - RNA, 14 nt, Human
agcccgggcucugc

SEQ ID NO: 1817155 - RNA, 15 nt, Human
agcccgggcucugcc

SEQ ID NO: 1817156 - RNA, 16 nt, Human
agcauuugucaacaaa

SEQ ID NO: 1817157 - RNA, 18 nt, Human
agccaaacauccuacaag

SEQ ID NO: 1817158 - RNA, 15 nt, Human
agcauuuugcuaaau

SEQ ID NO: 1817159 - RNA, 22 nt, Human
agcauuuugcuaaaugugaaug

SEQ ID NO: 1817160 - RNA, 13 nt, Human
agcauuuuguaau

SEQ ID NO: 1817161 - RNA, 22 nt, Human
agcauucucacuccuaccuggu

SEQ ID NO: 1817162 - RNA, 18 nt, Human
agcauucucacuccuacc

SEQ ID NO: 1817163 - RNA, 20 nt, Human
agcauucucacuccuaccug

SEQ ID NO: 1817164 - RNA, 19 nt, Human
agcauggcugccaauggga

SEQ ID NO: 1817165 - RNA, 17 nt, Human
agcauuagauuucucau

SEQ ID NO: 1817166 - RNA, 14 nt, Human
ugaucacggcucac

SEQ ID NO: 1817167 - RNA, 13 nt, Human
ugaucacggcuca

SEQ ID NO: 1817168 - RNA, 15 nt, Human
ugaucacggcucacu

SEQ ID NO: 1817169 - RNA, 18 nt, Human
ugaucacggcucacugca

SEQ ID NO: 1817170 - RNA, 14 nt, Human
ugaucaccugcccu

SEQ ID NO: 1817171 - RNA, 17 nt, Human
agcauauucaggaagcu

SEQ ID NO: 1817172 - RNA, 19 nt, Human
agcauauucaggaagcuca

SEQ ID NO: 1817173 - RNA, 21 nt, Human
agcauauucaggaagcucagg

SEQ ID NO: 1817174 - RNA, 18 nt, Human
ugauacaaugcugugccc

SEQ ID NO: 1817175 - RNA, 13 nt, Human
agcauggcugcca

SEQ ID NO: 1817176 - RNA, 23 nt, Human
agcaucaggccaggcccucugcc

SEQ ID NO: 1817177 - RNA, 22 nt, Human
agcaucaggccaggcccucugc

SEQ ID NO: 1817178 - RNA, 21 nt, Human
agcaucaggccaggcccucug

SEQ ID NO: 1817179 - RNA, 12 nt, Human
agcaucaggcca

SEQ ID NO: 1817180 - RNA, 16 nt, Human
agcauauucaggaagc

SEQ ID NO: 1817181 - RNA, 23 nt, Human
ugauccagaaagaaaacuuguau

SEQ ID NO: 1817182 - RNA, 18 nt, Human
ugauccacucgccuucau

SEQ ID NO: 1817183 - RNA, 14 nt, Human
ugauccacucgccu

SEQ ID NO: 1817184 - RNA, 13 nt, Human
ugauccagaaaga

SEQ ID NO: 1817185 - RNA, 20 nt, Human
ugauccucccaccucagccu

SEQ ID NO: 1817186 - RNA, 19 nt, Human
ugauccucccaccucagcc

SEQ ID NO: 1817187 - RNA, 13 nt, Human
ugaucuaggaaga

SEQ ID NO: 1817188 - RNA, 18 nt, Human
ugauccucccaccucagc

SEQ ID NO: 1817189 - RNA, 13 nt, Human
agccaccacgccc

SEQ ID NO: 1817190 - RNA, 16 nt, Human
agccacggccaggcca

SEQ ID NO: 1817191 - RNA, 16 nt, Human
ugauuaaauucuugca

SEQ ID NO: 1817192 - RNA, 13 nt, Human
ugauuaaauucuu

SEQ ID NO: 1817193 - RNA, 17 nt, Human
ugauuaaauucuugcaa

SEQ ID NO: 1817194 - RNA, 23 nt, Human
ugauguuuuccaugaguccccug

SEQ ID NO: 1817195 - RNA, 19 nt, Human
ugauguuuuccaugagucc

SEQ ID NO: 1817196 - RNA, 21 nt, Human
ugauguuuuaaggaugcuugu

SEQ ID NO: 1817197 - RNA, 17 nt, Human
ugauguuuuccaugagu

SEQ ID NO: 1817198 - RNA, 19 nt, Human
ugauggguuaguggaugga

SEQ ID NO: 1817199 - RNA, 23 nt, Human
ugauggguuaguggauggaaggg

SEQ ID NO: 1817200 - RNA, 22 nt, Human
ugauggggcccugccuccuuug

SEQ ID NO: 1817201 - RNA, 22 nt, Human
ugaugggcaacccccagccugc

SEQ ID NO: 1817202 - RNA, 13 nt, Human
ugauggggcccug

SEQ ID NO: 1817203 - RNA, 21 nt, Human
ugaugggcaacccccagccug

SEQ ID NO: 1817204 - RNA, 17 nt, Human
ugauggcuuaugauagc

SEQ ID NO: 1817205 - RNA, 21 nt, Human
ugaugaucuuugcagacaggc

SEQ ID NO: 1817206 - RNA, 20 nt, Human
ugaugaucuuugcagacagg

SEQ ID NO: 1817207 - RNA, 19 nt, Human
ugaugaucuuugcagacag

SEQ ID NO: 1817208 - RNA, 23 nt, Human
ugaugaaaugaggucagagccug

SEQ ID NO: 1817209 - RNA, 18 nt, Human
ugaugaaauguaaauacu

SEQ ID NO: 1817210 - RNA, 22 nt, Human
ugaugaaaugaggucagagccu

SEQ ID NO: 1817211 - RNA, 14 nt, Human
ugaucuaggaagac

SEQ ID NO: 1817212 - RNA, 15 nt, Human
ugaucuaggaagacu

SEQ ID NO: 1817213 - RNA, 14 nt, Human
agcaguuugcuuug

SEQ ID NO: 1817214 - RNA, 19 nt, Human
agcauaaaaauuagccaag

SEQ ID NO: 1817215 - RNA, 19 nt, Human
ugaguacguugugcauuug

SEQ ID NO: 1817216 - RNA, 18 nt, Human
ugaguacguugugcauuu

SEQ ID NO: 1817217 - RNA, 17 nt, Human
ugaguacguugugcauu

SEQ ID NO: 1817218 - RNA, 16 nt, Human
ugaguacguugugcau

SEQ ID NO: 1817219 - RNA, 23 nt, Human
agcauaaaaauuagccaagugug

SEQ ID NO: 1817220 - RNA, 18 nt, Human
ugaguucauacccuguua

SEQ ID NO: 1817221 - RNA, 21 nt, Human
ugagugggggaucacagccuc

SEQ ID NO: 1817222 - RNA, 23 nt, Human
ugagugggggaucacagccucug

SEQ ID NO: 1817223 - RNA, 15 nt, Human
ugauacaaugcugug

SEQ ID NO: 1817224 - RNA, 14 nt, Human
ugauacaaugcugu

SEQ ID NO: 1817225 - RNA, 16 nt, Human
ugagugccuuacacaa

SEQ ID NO: 1817226 - RNA, 17 nt, Human
ugagugcagcucuggag

SEQ ID NO: 1817227 - RNA, 13 nt, Human
ugagugccuuaca

SEQ ID NO: 1817228 - RNA, 14 nt, Human
ugagugccuuacac

SEQ ID NO: 1817229 - RNA, 13 nt, Human
ugaguccagaagu

SEQ ID NO: 1817230 - RNA, 18 nt, Human
ugagucaccaagcccagu

SEQ ID NO: 1817231 - RNA, 20 nt, Human
ugaguacguugugcauuugg

SEQ ID NO: 1817232 - RNA, 14 nt, Human
ugaguacuacaguc

SEQ ID NO: 1817233 - RNA, 16 nt, Human
agcagcagggagggcu

SEQ ID NO: 1817234 - RNA, 13 nt, Human
agcaggacaugga

SEQ ID NO: 1817235 - RNA, 15 nt, Human
agcagccacauuccu

SEQ ID NO: 1817236 - RNA, 11 nt, Human
agcagccacau

SEQ ID NO: 1817237 - RNA, 20 nt, Human
ugacccaugcugcccuguga

SEQ ID NO: 1817238 - RNA, 17 nt, Human
ugacccaugcugcccug

SEQ ID NO: 1817239 - RNA, 18 nt, Human
ugacccaugcugcccugu

SEQ ID NO: 1817240 - RNA, 19 nt, Human
ugacccaugcugcccugug

SEQ ID NO: 1817241 - RNA, 15 nt, Human
agcagggcucagcgg

SEQ ID NO: 1817242 - RNA, 14 nt, Human
agcagggcucagcg

SEQ ID NO: 1817243 - RNA, 13 nt, Human
agcagggcucagc

SEQ ID NO: 1817244 - RNA, 20 nt, Human
agcagggagggcuucugcca

SEQ ID NO: 1817245 - RNA, 22 nt, Human
agcagggcucagcggggacagc

SEQ ID NO: 1817246 - RNA, 15 nt, Human
agcagggaaacagcu

SEQ ID NO: 1817247 - RNA, 14 nt, Human
agcagggaaacagc

SEQ ID NO: 1817248 - RNA, 13 nt, Human
agcagggaaacag

SEQ ID NO: 1817249 - RNA, 15 nt, Human
agcaggcugugaguu

SEQ ID NO: 1817250 - RNA, 21 nt, Human
agcaggcucucaggccagcug

SEQ ID NO: 1817251 - RNA, 22 nt, Human
agcaggcucucaggccagcugc

SEQ ID NO: 1817252 - RNA, 23 nt, Human
agcaggcucucaggccagcugcu

SEQ ID NO: 1817253 - RNA, 17 nt, Human
agcaggcucgggcuccc

SEQ ID NO: 1817254 - RNA, 13 nt, Human
agcaggcucucag

SEQ ID NO: 1817255 - RNA, 14 nt, Human
agcaggcucucagg

SEQ ID NO: 1817256 - RNA, 15 nt, Human
agcaggcucucaggc

SEQ ID NO: 1817257 - RNA, 16 nt, Human
agcaggcucucaggcc

SEQ ID NO: 1817258 - RNA, 17 nt, Human
agcaggcucucaggcca

SEQ ID NO: 1817259 - RNA, 18 nt, Human
agcaggcucucaggccag

SEQ ID NO: 1817260 - RNA, 19 nt, Human
agcaggcucucaggccagc

SEQ ID NO: 1817261 - RNA, 15 nt, Human
ugaaauuguauuaca

SEQ ID NO: 1817262 - RNA, 18 nt, Human
agagcugccaccugccug

SEQ ID NO: 1817263 - RNA, 23 nt, Human
ugaaauaagccagacaucaacag

SEQ ID NO: 1817264 - RNA, 20 nt, Human
ugaaauaagccagacaucaa

SEQ ID NO: 1817265 - RNA, 18 nt, Human
ugaaauaagccagacauc

SEQ ID NO: 1817266 - RNA, 17 nt, Human
ugaaauaagccagacau

SEQ ID NO: 1817267 - RNA, 17 nt, Human
ucuuuggacccugaggc

SEQ ID NO: 1817268 - RNA, 21 nt, Human
ucuuuggacccugaggcccag

SEQ ID NO: 1817269 - RNA, 12 nt, Human
agagcagagacc

SEQ ID NO: 1817270 - RNA, 11 nt, Human
agagccuugcg

SEQ ID NO: 1817271 - RNA, 21 nt, Human
agagccuugcggaagguucua

SEQ ID NO: 1817272 - RNA, 20 nt, Human
agagcagagaccaucccuga

SEQ ID NO: 1817273 - RNA, 17 nt, Human
agagcagagaccauccc

SEQ ID NO: 1817274 - RNA, 18 nt, Human
agagcagagaccaucccu

SEQ ID NO: 1817275 - RNA, 19 nt, Human
agaggcagccccauucugc

SEQ ID NO: 1817276 - RNA, 13 nt, Human
agaggcagcccca

SEQ ID NO: 1817277 - RNA, 13 nt, Human
agaggcagggucu

SEQ ID NO: 1817278 - RNA, 10 nt, Human
agaggcaggg

SEQ ID NO: 1817279 - RNA, 19 nt, Human
agaggccaugggccuccug

SEQ ID NO: 1817280 - RNA, 18 nt, Human
agaggcucagauuguaau

SEQ ID NO: 1817281 - RNA, 10 nt, Human
agaggcucag

SEQ ID NO: 1817282 - RNA, 17 nt, Human
agaggcuaugugagcac

SEQ ID NO: 1817283 - RNA, 13 nt, Human
agaggcugaggac

SEQ ID NO: 1817284 - RNA, 19 nt, Human
agagguccacaacacacag

SEQ ID NO: 1817285 - RNA, 15 nt, Human
agagguugcagugag

SEQ ID NO: 1817286 - RNA, 15 nt, Human
ugaacuccuggccuc

SEQ ID NO: 1817287 - RNA, 14 nt, Human
ugaacuccuggccu

SEQ ID NO: 1817288 - RNA, 12 nt, Human
ugaacuccuggc

SEQ ID NO: 1817289 - RNA, 21 nt, Human
ugaacuaggauuguaguccca

SEQ ID NO: 1817290 - RNA, 22 nt, Human
ugaaccgaugagaaauaaaguu

SEQ ID NO: 1817291 - RNA, 12 nt, Human
ugaaccugaaua

SEQ ID NO: 1817292 - RNA, 15 nt, Human
ugaaauuuuuauuaa

SEQ ID NO: 1817293 - RNA, 20 nt, Human
ugaacaaauuuacagagaca

SEQ ID NO: 1817294 - RNA, 19 nt, Human
ugaacaaauuuacagagac

SEQ ID NO: 1817295 - RNA, 22 nt, Human
agagcuucuguugcugccucau

SEQ ID NO: 1817296 - RNA, 15 nt, Human
agagcuuaacagugu

SEQ ID NO: 1817297 - RNA, 22 nt, Human
ugaacuuugaccucugcagcaa

SEQ ID NO: 1817298 - RNA, 20 nt, Human
ugaacuuugaccucugcagc

SEQ ID NO: 1817299 - RNA, 19 nt, Human
ugaacuuugaccucugcag

SEQ ID NO: 1817300 - RNA, 18 nt, Human
agaucacgccacugcacu

SEQ ID NO: 1817301 - RNA, 17 nt, Human
agaucacgccacugcac

SEQ ID NO: 1817302 - RNA, 15 nt, Human
ugaauuucuuuugcc

SEQ ID NO: 1817303 - RNA, 16 nt, Human
agaucacgccacugca

SEQ ID NO: 1817304 - RNA, 15 nt, Human
agaucacgccacugc

SEQ ID NO: 1817305 - RNA, 14 nt, Human
agaucacgccacug

SEQ ID NO: 1817306 - RNA, 17 nt, Human
agauaaagguucaugca

SEQ ID NO: 1817307 - RNA, 12 nt, Human
agauaaaugugc

SEQ ID NO: 1817308 - RNA, 22 nt, Human
agaguugauacuacaguuuguu

SEQ ID NO: 1817309 - RNA, 20 nt, Human
agaguugauacuacaguuug

SEQ ID NO: 1817310 - RNA, 17 nt, Human
agaguugauacuacagu

SEQ ID NO: 1817311 - RNA, 20 nt, Human
agaguugaugguuguacaua

SEQ ID NO: 1817312 - RNA, 12 nt, Human
agaguuguuaca

SEQ ID NO: 1817313 - RNA, 16 nt, Human
agaguuguuacauuuu

SEQ ID NO: 1817314 - RNA, 21 nt, Human
agaguuguuacauuuuuaagu

SEQ ID NO: 1817315 - RNA, 19 nt, Human
ugaaugucagugugacuga

SEQ ID NO: 1817316 - RNA, 20 nt, Human
ugaaugguuuucaaaauaaa

SEQ ID NO: 1817317 - RNA, 15 nt, Human
agaugcaccagcccu

SEQ ID NO: 1817318 - RNA, 14 nt, Human
agaugcaccagccc

SEQ ID NO: 1817319 - RNA, 15 nt, Human
agaugcuagaacucc

SEQ ID NO: 1817320 - RNA, 14 nt, Human
agaugcuagaacuc

SEQ ID NO: 1817321 - RNA, 17 nt, Human
ugacccacaagaaauga

SEQ ID NO: 1817322 - RNA, 13 nt, Human
ugacccacugcuu

SEQ ID NO: 1817323 - RNA, 12 nt, Human
ugacccacugcu

SEQ ID NO: 1817324 - RNA, 15 nt, Human
agaugcuucucacug

SEQ ID NO: 1817325 - RNA, 21 nt, Human
ugacauuguuggccaaagcca

SEQ ID NO: 1817326 - RNA, 20 nt, Human
ugacauuguuggccaaagcc

SEQ ID NO: 1817327 - RNA, 22 nt, Human
ugacauuguagagcuucuggca

SEQ ID NO: 1817328 - RNA, 18 nt, Human
ugaccaauauuguacagu

SEQ ID NO: 1817329 - RNA, 17 nt, Human
ugaccaauauuguacag

SEQ ID NO: 1817330 - RNA, 21 nt, Human
ugaccaauauuguacaguuuu

SEQ ID NO: 1817331 - RNA, 19 nt, Human
ugaccaauauuguacaguu

SEQ ID NO: 1817332 - RNA, 18 nt, Human
ugaccaaugauggucacc

SEQ ID NO: 1817333 - RNA, 13 nt, Human
agaucagccuggg

SEQ ID NO: 1817334 - RNA, 15 nt, Human
agaucagccugggca

SEQ ID NO: 1817335 - RNA, 12 nt, Human
agaucauuguga

SEQ ID NO: 1817336 - RNA, 20 nt, Human
ugacagggcacaccgggcac

SEQ ID NO: 1817337 - RNA, 21 nt, Human
ugacagggcacaccgggcacu

SEQ ID NO: 1817338 - RNA, 16 nt, Human
ugacagggcacaccgg

SEQ ID NO: 1817339 - RNA, 11 nt, Human
ugacagggcac

SEQ ID NO: 1817340 - RNA, 14 nt, Human
ugacaggccugucc

SEQ ID NO: 1817341 - RNA, 21 nt, Human
ugacacacagcucuguccugg

SEQ ID NO: 1817342 - RNA, 20 nt, Human
ugacaggcaaugcuggcugu

SEQ ID NO: 1817343 - RNA, 15 nt, Human
agacucauucuucug

SEQ ID NO: 1817344 - RNA, 17 nt, Human
ucuugagccuugaacuu

SEQ ID NO: 1817345 - RNA, 21 nt, Human
agacucaguggggaggggcug

SEQ ID NO: 1817346 - RNA, 19 nt, Human
ucuugagccuugaacuuug

SEQ ID NO: 1817347 - RNA, 18 nt, Human
ucuugagccuugaacuuu

SEQ ID NO: 1817348 - RNA, 20 nt, Human
ucuugagccuugaacuuuga

SEQ ID NO: 1817349 - RNA, 22 nt, Human
agaccugccccuccucucugcc

SEQ ID NO: 1817350 - RNA, 23 nt, Human
agaccugccccuccucucugccc

SEQ ID NO: 1817351 - RNA, 16 nt, Human
agaccugccccuccuc

SEQ ID NO: 1817352 - RNA, 13 nt, Human
agaccugccccuc

SEQ ID NO: 1817353 - RNA, 14 nt, Human
agacccggcugcgu

SEQ ID NO: 1817354 - RNA, 21 nt, Human
agaccccuggcuuuucacugc

SEQ ID NO: 1817355 - RNA, 15 nt, Human
agaccccuggcuuuu

SEQ ID NO: 1817356 - RNA, 14 nt, Human
agaccccuggcuuu

SEQ ID NO: 1817357 - RNA, 23 nt, Human
ucuucuguacgucugacaggcaa

SEQ ID NO: 1817358 - RNA, 23 nt, Human
agacauacuaaccagcagaaaug

SEQ ID NO: 1817359 - RNA, 14 nt, Human
agacauagaauuaa

SEQ ID NO: 1817360 - RNA, 22 nt, Human
ucuucugcuucagccucccgag

SEQ ID NO: 1817361 - RNA, 22 nt, Human
ucuucuguacgucugacaggca

SEQ ID NO: 1817362 - RNA, 21 nt, Human
ucuucuguacgucugacaggc

SEQ ID NO: 1817363 - RNA, 17 nt, Human
ucuuauuuaaugaaaga

SEQ ID NO: 1817364 - RNA, 14 nt, Human
agagaaaaaagcca

SEQ ID NO: 1817365 - RNA, 15 nt, Human
agagacacaagccuu

SEQ ID NO: 1817366 - RNA, 24 nt, Human
agagacagaaagcagaacagugau

SEQ ID NO: 1817367 - RNA, 18 nt, Human
agacuuguaugaaagaug

SEQ ID NO: 1817368 - RNA, 19 nt, Human
agacuuuuuuuaaauagua

SEQ ID NO: 1817369 - RNA, 22 nt, Human
agagaaaaaauauuuuccugcc

SEQ ID NO: 1817370 - RNA, 20 nt, Human
agacucgcgacaaugcaaac

SEQ ID NO: 1817371 - RNA, 15 nt, Human
agacuguacaaagua

SEQ ID NO: 1817372 - RNA, 16 nt, Human
agacuguacaaaguag

SEQ ID NO: 1817373 - RNA, 15 nt, Human
agacuuccagagccu

SEQ ID NO: 1817374 - RNA, 14 nt, Human
agacugucucaaga

SEQ ID NO: 1817375 - RNA, 17 nt, Human
ucuuucuuccucugcug

SEQ ID NO: 1817376 - RNA, 15 nt, Human
ucuuucuuccucugc

SEQ ID NO: 1817377 - RNA, 16 nt, Human
ucuuucuuccucugcu

SEQ ID NO: 1817378 - RNA, 15 nt, Human
agacucgcgacaaug

SEQ ID NO: 1817379 - RNA, 17 nt, Human
agacucgcgacaaugca

SEQ ID NO: 1817380 - RNA, 18 nt, Human
agacucgcgacaaugcaa

SEQ ID NO: 1817381 - RNA, 19 nt, Human
agacucgcgacaaugcaaa

SEQ ID NO: 1817382 - RNA, 19 nt, Human
ucuuucuggcuaugcauuu

SEQ ID NO: 1817383 - RNA, 14 nt, Human
ucuuucuuccucug

SEQ ID NO: 1817384 - RNA, 22 nt, Human
ucuuucugcagaaacagaaagg

SEQ ID NO: 1817385 - RNA, 18 nt, Human
ucuuucuggcuaugcauu

SEQ ID NO: 1817386 - RNA, 20 nt, Human
ucuuuauaauucuacuuuga

SEQ ID NO: 1817387 - RNA, 13 nt, Human
ucuuucugcuuug

SEQ ID NO: 1817388 - RNA, 14 nt, Human
ucuugguuuguaaa

SEQ ID NO: 1817389 - RNA, 20 nt, Human
ucuuuaaugucacaggcagg

SEQ ID NO: 1817390 - RNA, 16 nt, Human
ucuugguuuguaaauu

SEQ ID NO: 1817391 - RNA, 22 nt, Human
ucuuuaaugucacaggcagguc

SEQ ID NO: 1817392 - RNA, 14 nt, Human
ucuuuaauuuuaca

SEQ ID NO: 1817393 - RNA, 15 nt, Human
ucuuuaguuuuugug

SEQ ID NO: 1817394 - RNA, 13 nt, Human
agacagucccugc

SEQ ID NO: 1817395 - RNA, 14 nt, Human
agacagucccugcc

SEQ ID NO: 1817396 - RNA, 15 nt, Human
agacagcugccuggg

SEQ ID NO: 1817397 - RNA, 16 nt, Human
agacagcugccuggga

SEQ ID NO: 1817398 - RNA, 12 nt, Human
agacagucccug

SEQ ID NO: 1817399 - RNA, 19 nt, Human
ucuuacugucuuuuuucua

SEQ ID NO: 1817400 - RNA, 14 nt, Human
ucuuagauguauau

SEQ ID NO: 1817401 - RNA, 12 nt, Human
ucuuagauguau

SEQ ID NO: 1817402 - RNA, 17 nt, Human
agacacaggcccggcuc

SEQ ID NO: 1817403 - RNA, 22 nt, Human
agacacaggcccggcuccaggc

SEQ ID NO: 1817404 - RNA, 21 nt, Human
agacacaggcccggcuccagg

SEQ ID NO: 1817405 - RNA, 20 nt, Human
agacacaggcccggcuccag

SEQ ID NO: 1817406 - RNA, 19 nt, Human
agacacaggcccggcucca

SEQ ID NO: 1817407 - RNA, 14 nt, Human
agacacaagccuuc

SEQ ID NO: 1817408 - RNA, 13 nt, Human
agacacaagccuu

SEQ ID NO: 1817409 - RNA, 19 nt, Human
agaauucucuaguuugauu

SEQ ID NO: 1817410 - RNA, 18 nt, Human
agaauucucuaguuugau

SEQ ID NO: 1817411 - RNA, 17 nt, Human
agaauucucuuauccaa

SEQ ID NO: 1817412 - RNA, 22 nt, Human
agacaccuugacagggcacacc

SEQ ID NO: 1817413 - RNA, 24 nt, Human
agacacauguccaagaagcccagg

SEQ ID NO: 1817414 - RNA, 19 nt, Human
agacaccuugacagggcac

SEQ ID NO: 1817415 - RNA, 23 nt, Human
agacacaggcccggcuccaggcu

SEQ ID NO: 1817416 - RNA, 21 nt, Human
agacacauguccaagaagccc

SEQ ID NO: 1817417 - RNA, 22 nt, Human
agacacauguccaagaagccca

SEQ ID NO: 1817418 - RNA, 13 nt, Human
agacagcugccug

SEQ ID NO: 1817419 - RNA, 14 nt, Human
agacagcugccugg

SEQ ID NO: 1817420 - RNA, 12 nt, Human
agacagaaaaaa

SEQ ID NO: 1817421 - RNA, 18 nt, Human
ucuguacgucugacaggc

SEQ ID NO: 1817422 - RNA, 17 nt, Human
ucuguucugcacacagc

SEQ ID NO: 1817423 - RNA, 18 nt, Human
ucuguucugcacacagca

SEQ ID NO: 1817424 - RNA, 19 nt, Human
ucuguucugcacacagcac

SEQ ID NO: 1817425 - RNA, 19 nt, Human
ucuguuuagauaauacacc

SEQ ID NO: 1817426 - RNA, 16 nt, Human
ucuguuuagauaauac

SEQ ID NO: 1817427 - RNA, 23 nt, Human
ucuguuuagauaauacaccacua

SEQ ID NO: 1817428 - RNA, 20 nt, Human
agaauuauaauuaguuccuc

SEQ ID NO: 1817429 - RNA, 20 nt, Human
agaauucucagaaucucaaa

SEQ ID NO: 1817430 - RNA, 14 nt, Human
agaauucucuaguu

SEQ ID NO: 1817431 - RNA, 23 nt, Human
ucuggguuccuuccucugagccu

SEQ ID NO: 1817432 - RNA, 22 nt, Human
ucuggguuccuuccucugagcc

SEQ ID NO: 1817433 - RNA, 19 nt, Human
agaauuaguggcacuugcu

SEQ ID NO: 1817434 - RNA, 21 nt, Human
agaauguguuuaaacuugguu

SEQ ID NO: 1817435 - RNA, 22 nt, Human
agaaauuuccacucaggucugu

SEQ ID NO: 1817436 - RNA, 16 nt, Human
agaaauuuccacucag

SEQ ID NO: 1817437 - RNA, 23 nt, Human
agaaccccaggguccuguagccc

SEQ ID NO: 1817438 - RNA, 19 nt, Human
ucucagggccuggucguuu

SEQ ID NO: 1817439 - RNA, 14 nt, Human
ucucagggccuggu

SEQ ID NO: 1817440 - RNA, 15 nt, Human
ucucagggccugguc

SEQ ID NO: 1817441 - RNA, 12 nt, Human
ucucagggccug

SEQ ID NO: 1817442 - RNA, 13 nt, Human
ucucagggccugg

SEQ ID NO: 1817443 - RNA, 16 nt, Human
ucuccaggcuguaucc

SEQ ID NO: 1817444 - RNA, 22 nt, Human
ucuccaaaauaaaacuuuuuaa

SEQ ID NO: 1817445 - RNA, 19 nt, Human
ucuccaaaauaaaacuuuu

SEQ ID NO: 1817446 - RNA, 17 nt, Human
ucuccaaaauaaaacuu

SEQ ID NO: 1817447 - RNA, 21 nt, Human
ucuccuccuuuucacaguucu

SEQ ID NO: 1817448 - RNA, 14 nt, Human
acuuugaccucugc

SEQ ID NO: 1817449 - RNA, 17 nt, Human
acuuucuagccagagga

SEQ ID NO: 1817450 - RNA, 16 nt, Human
ucuccauguuugaugu

SEQ ID NO: 1817451 - RNA, 11 nt, Human
acuucagcuga

SEQ ID NO: 1817452 - RNA, 16 nt, Human
acuucagcugacuuuu

SEQ ID NO: 1817453 - RNA, 14 nt, Human
acuucaggcucuuc

SEQ ID NO: 1817454 - RNA, 11 nt, Human
ucucacuccuu

SEQ ID NO: 1817455 - RNA, 14 nt, Human
acuucuccacccug

SEQ ID NO: 1817456 - RNA, 12 nt, Human
ucucacucuguc

SEQ ID NO: 1817457 - RNA, 16 nt, Human
ucucacucugucgccc

SEQ ID NO: 1817458 - RNA, 16 nt, Human
ucucacuauguugccc

SEQ ID NO: 1817459 - RNA, 13 nt, Human
ucucacuccuuga

SEQ ID NO: 1817460 - RNA, 15 nt, Human
acuuccugugacuuc

SEQ ID NO: 1817461 - RNA, 18 nt, Human
acuucuccacccugcucu

SEQ ID NO: 1817462 - RNA, 16 nt, Human
acuucuccacccugcu

SEQ ID NO: 1817463 - RNA, 15 nt, Human
acuucuccacccugc

SEQ ID NO: 1817464 - RNA, 20 nt, Human
acuugaacccgggaggcaga

SEQ ID NO: 1817465 - RNA, 19 nt, Human
acuugaacccgggaggcag

SEQ ID NO: 1817466 - RNA, 21 nt, Human
acuugaacccauauuuguaca

SEQ ID NO: 1817467 - RNA, 19 nt, Human
acuugagcccagagugaac

SEQ ID NO: 1817468 - RNA, 21 nt, Human
acuugaacccgggaggcagag

SEQ ID NO: 1817469 - RNA, 18 nt, Human
acuuguggacacagcucu

SEQ ID NO: 1817470 - RNA, 17 nt, Human
acuuguggacacagcuc

SEQ ID NO: 1817471 - RNA, 16 nt, Human
acuuguggacacagcu

SEQ ID NO: 1817472 - RNA, 14 nt, Human
acuugcucuugaug

SEQ ID NO: 1817473 - RNA, 15 nt, Human
ucugaagucacugca

SEQ ID NO: 1817474 - RNA, 16 nt, Human
ucugaagucacugcac

SEQ ID NO: 1817475 - RNA, 18 nt, Human
ucugaagucacugcacag

SEQ ID NO: 1817476 - RNA, 12 nt, Human
ucugacacacag

SEQ ID NO: 1817477 - RNA, 16 nt, Human
ucugacaacagacuuc

SEQ ID NO: 1817478 - RNA, 15 nt, Human
ucugacaacagacuu

SEQ ID NO: 1817479 - RNA, 18 nt, Human
agaaaugaaaaaauauau

SEQ ID NO: 1817480 - RNA, 23 nt, Human
agaaaugaaaaaauauauaucaa

SEQ ID NO: 1817481 - RNA, 14 nt, Human
agaaaugaaagcag

SEQ ID NO: 1817482 - RNA, 14 nt, Human
agaaagaaaaucag

SEQ ID NO: 1817483 - RNA, 12 nt, Human
agaaaucuaaaa

SEQ ID NO: 1817484 - RNA, 15 nt, Human
agaaaucuaaaaaac

SEQ ID NO: 1817485 - RNA, 17 nt, Human
agaaaugaaaaaauaua

SEQ ID NO: 1817486 - RNA, 14 nt, Human
agaaauauaauuga

SEQ ID NO: 1817487 - RNA, 19 nt, Human
agaaauaucugaaaaugua

SEQ ID NO: 1817488 - RNA, 20 nt, Human
agaaauaucugaaaauguau

SEQ ID NO: 1817489 - RNA, 18 nt, Human
ucugauucccaagcucug

SEQ ID NO: 1817490 - RNA, 18 nt, Human
ucugcacuccccugcugg

SEQ ID NO: 1817491 - RNA, 19 nt, Human
ucugcacuccccugcuggg

SEQ ID NO: 1817492 - RNA, 23 nt, Human
ucugaugcaagcaagaaacacug

SEQ ID NO: 1817493 - RNA, 14 nt, Human
ucugaccuuaaaug

SEQ ID NO: 1817494 - RNA, 23 nt, Human
ucugagacucgcgacaaugcaaa

SEQ ID NO: 1817495 - RNA, 18 nt, Human
ucugcaggucccuaauaa

SEQ ID NO: 1817496 - RNA, 13 nt, Human
agaaauuaugugc

SEQ ID NO: 1817497 - RNA, 21 nt, Human
agaaauuaugugccagauuua

SEQ ID NO: 1817498 - RNA, 22 nt, Human
agaaauuaugugccagauuuau

SEQ ID NO: 1817499 - RNA, 16 nt, Human
agaaauuuauaaacuu

SEQ ID NO: 1817500 - RNA, 17 nt, Human
agaaauuuauaaacuuu

SEQ ID NO: 1817501 - RNA, 15 nt, Human
ucugcaggucccuaa

SEQ ID NO: 1817502 - RNA, 16 nt, Human
ucugcaggucccuaau

SEQ ID NO: 1817503 - RNA, 17 nt, Human
ucugcaggucccuaaua

SEQ ID NO: 1817504 - RNA, 20 nt, Human
ucugcacuccccugcugggu

SEQ ID NO: 1817505 - RNA, 18 nt, Human
ucugcagcaauaaagcag

SEQ ID NO: 1817506 - RNA, 22 nt, Human
ucugcacuccccugcugggugu

SEQ ID NO: 1817507 - RNA, 15 nt, Human
ucucuggaauuugaa

SEQ ID NO: 1817508 - RNA, 19 nt, Human
ucucuggaauuugaaacac

SEQ ID NO: 1817509 - RNA, 12 nt, Human
ucucuggccuuc

SEQ ID NO: 1817510 - RNA, 17 nt, Human
ucucuccuguaccucuu

SEQ ID NO: 1817511 - RNA, 16 nt, Human
ucucuccuguaccucu

SEQ ID NO: 1817512 - RNA, 14 nt, Human
ucucuccuguaccu

SEQ ID NO: 1817513 - RNA, 11 nt, Human
ucucugcccuc

SEQ ID NO: 1817514 - RNA, 15 nt, Human
ucucugcccuccaag

SEQ ID NO: 1817515 - RNA, 16 nt, Human
ucucugcccuccaaga

SEQ ID NO: 1817516 - RNA, 17 nt, Human
ucucugcccuccaagac

SEQ ID NO: 1817517 - RNA, 13 nt, Human
ucucucacuccuu

SEQ ID NO: 1817518 - RNA, 15 nt, Human
ucucucacuccuuga

SEQ ID NO: 1817519 - RNA, 18 nt, Human
acuuugaccucugcagca

SEQ ID NO: 1817520 - RNA, 16 nt, Human
acuuugaccucugcag

SEQ ID NO: 1817521 - RNA, 15 nt, Human
acuuugaccucugca

SEQ ID NO: 1817522 - RNA, 17 nt, Human
ucucuccagccccugga

SEQ ID NO: 1817523 - RNA, 16 nt, Human
ucucuccagccccugg

SEQ ID NO: 1817524 - RNA, 18 nt, Human
ucucuccagccccuggau

SEQ ID NO: 1817525 - RNA, 19 nt, Human
ucucuccagccccuggaug

SEQ ID NO: 1817526 - RNA, 21 nt, Human
ucucuuuaaugucacaggcag

SEQ ID NO: 1817527 - RNA, 20 nt, Human
ucucuuuaaugucacaggca

SEQ ID NO: 1817528 - RNA, 13 nt, Human
agaaaaagaaaaa

SEQ ID NO: 1817529 - RNA, 14 nt, Human
ucucuugauucaua

SEQ ID NO: 1817530 - RNA, 16 nt, Human
ucucuugauucauaau

SEQ ID NO: 1817531 - RNA, 18 nt, Human
ucucuugagccugggagg

SEQ ID NO: 1817532 - RNA, 23 nt, Human
ucucuggccuucggccuccaucc

SEQ ID NO: 1817533 - RNA, 22 nt, Human
ucucuggccuucggccuccauc

SEQ ID NO: 1817534 - RNA, 21 nt, Human
ucucuggccuucggccuccau

SEQ ID NO: 1817535 - RNA, 17 nt, Human
agaaaaaggaugcacag

SEQ ID NO: 1817536 - RNA, 21 nt, Human
agaaaacuuguauuaugugug

SEQ ID NO: 1817537 - RNA, 18 nt, Human
agaaaaaggaugcacaga

SEQ ID NO: 1817538 - RNA, 19 nt, Human
agaaaacuuguauuaugug

SEQ ID NO: 1817539 - RNA, 23 nt, Human
uccuuuagcgcccaguugggugg

SEQ ID NO: 1817540 - RNA, 22 nt, Human
uccuuuagcgcccaguugggug

SEQ ID NO: 1817541 - RNA, 13 nt, Human
ucgaggacaggga

SEQ ID NO: 1817542 - RNA, 16 nt, Human
ucgcgacaaugcaaac

SEQ ID NO: 1817543 - RNA, 19 nt, Human
ucgcgacaaugcaaaccau

SEQ ID NO: 1817544 - RNA, 16 nt, Human
ucgagcaugccuggau

SEQ ID NO: 1817545 - RNA, 18 nt, Human
ucgagcaugccuggaugg

SEQ ID NO: 1817546 - RNA, 18 nt, Human
ucgcuauugucaccaggg

SEQ ID NO: 1817547 - RNA, 23 nt, Human
ucgcuagcauuucccaacacaaa

SEQ ID NO: 1817548 - RNA, 19 nt, Human
uccuuuagcgcccaguugg

SEQ ID NO: 1817549 - RNA, 15 nt, Human
uccuuuagcgcccag

SEQ ID NO: 1817550 - RNA, 21 nt, Human
uccuuuaauuuuuuacuauuu

SEQ ID NO: 1817551 - RNA, 23 nt, Human
uccuuguguuacuaaguuuuuau

SEQ ID NO: 1817552 - RNA, 14 nt, Human
uccuuguguuacua

SEQ ID NO: 1817553 - RNA, 16 nt, Human
uccuucagugccuuau

SEQ ID NO: 1817554 - RNA, 17 nt, Human
uccuucagugccuuaug

SEQ ID NO: 1817555 - RNA, 14 nt, Human
acuggccucugcug

SEQ ID NO: 1817556 - RNA, 16 nt, Human
acuggccucugcugau

SEQ ID NO: 1817557 - RNA, 14 nt, Human
uccuucagugccuu

SEQ ID NO: 1817558 - RNA, 15 nt, Human
uccuucagugccuua

SEQ ID NO: 1817559 - RNA, 14 nt, Human
acugccucuuccuc

SEQ ID NO: 1817560 - RNA, 15 nt, Human
acugccucuuccucc

SEQ ID NO: 1817561 - RNA, 16 nt, Human
acugccuauuuuaaua

SEQ ID NO: 1817562 - RNA, 21 nt, Human
acugccuauuuuaauaaacac

SEQ ID NO: 1817563 - RNA, 21 nt, Human
uccuagaaauuccccacccug

SEQ ID NO: 1817564 - RNA, 22 nt, Human
uccuagaaauuccccacccuga

SEQ ID NO: 1817565 - RNA, 16 nt, Human
acugcauaugaaagga

SEQ ID NO: 1817566 - RNA, 17 nt, Human
acugcauccuccgccuc

SEQ ID NO: 1817567 - RNA, 20 nt, Human
acugcauccuccgccucccg

SEQ ID NO: 1817568 - RNA, 20 nt, Human
acugcaucaagaugugacau

SEQ ID NO: 1817569 - RNA, 22 nt, Human
acugcaucaagaugugacaugu

SEQ ID NO: 1817570 - RNA, 23 nt, Human
acugcauccuccgccucccgggu

SEQ ID NO: 1817571 - RNA, 16 nt, Human
acugcauguuugugau

SEQ ID NO: 1817572 - RNA, 15 nt, Human
acugcauguuuguga

SEQ ID NO: 1817573 - RNA, 14 nt, Human
acugcuuuuggucu

SEQ ID NO: 1817574 - RNA, 17 nt, Human
acugcuuccagugaggc

SEQ ID NO: 1817575 - RNA, 20 nt, Human
acugcuuaacuucacauauu

SEQ ID NO: 1817576 - RNA, 15 nt, Human
acuggauuaaacuua

SEQ ID NO: 1817577 - RNA, 18 nt, Human
acugcuuaacuucacaua

SEQ ID NO: 1817578 - RNA, 14 nt, Human
acugcuggcugccu

SEQ ID NO: 1817579 - RNA, 15 nt, Human
acugcuggcugccuu

SEQ ID NO: 1817580 - RNA, 11 nt, Human
ucgggcaugac

SEQ ID NO: 1817581 - RNA, 12 nt, Human
ucgggcaugaca

SEQ ID NO: 1817582 - RNA, 17 nt, Human
ucgggaggucgaggcag

SEQ ID NO: 1817583 - RNA, 19 nt, Human
ucgggaggucgaggcagga

SEQ ID NO: 1817584 - RNA, 21 nt, Human
ucgggaggucgaggcaggagg

SEQ ID NO: 1817585 - RNA, 18 nt, Human
ucggcucacugcauccuc

SEQ ID NO: 1817586 - RNA, 13 nt, Human
ucguaaaauuaag

SEQ ID NO: 1817587 - RNA, 17 nt, Human
ucguuugaaucacagua

SEQ ID NO: 1817588 - RNA, 22 nt, Human
ucguuuucaaaauuguuacaaa

SEQ ID NO: 1817589 - RNA, 16 nt, Human
ucguaaaauuaagaaa

SEQ ID NO: 1817590 - RNA, 17 nt, Human
acuguccuacccacccu

SEQ ID NO: 1817591 - RNA, 23 nt, Human
acuguccuacccacccuccuuuc

SEQ ID NO: 1817592 - RNA, 18 nt, Human
acuguccuacccacccuc

SEQ ID NO: 1817593 - RNA, 16 nt, Human
acugggagaaaugaaa

SEQ ID NO: 1817594 - RNA, 15 nt, Human
acugugugcucagga

SEQ ID NO: 1817595 - RNA, 19 nt, Human
acugugugcucaggagccc

SEQ ID NO: 1817596 - RNA, 20 nt, Human
acugugugcucaggagcccu

SEQ ID NO: 1817597 - RNA, 21 nt, Human
acugugugcucaggagcccug

SEQ ID NO: 1817598 - RNA, 12 nt, Human
acugugugcuca

SEQ ID NO: 1817599 - RNA, 14 nt, Human
acuucagcucuguu

SEQ ID NO: 1817600 - RNA, 16 nt, Human
acuuagaaauugcauu

SEQ ID NO: 1817601 - RNA, 16 nt, Human
acuuaaucuaaaugga

SEQ ID NO: 1817602 - RNA, 15 nt, Human
acuuaaucuaaaugg

SEQ ID NO: 1817603 - RNA, 13 nt, Human
acuuaaucuaaau

SEQ ID NO: 1817604 - RNA, 18 nt, Human
acuguugcccaggcuggc

SEQ ID NO: 1817605 - RNA, 17 nt, Human
acuguugcccaggcugg

SEQ ID NO: 1817606 - RNA, 14 nt, Human
acuguugcccaggc

SEQ ID NO: 1817607 - RNA, 13 nt, Human
acuguugcccagg

SEQ ID NO: 1817608 - RNA, 12 nt, Human
acuguugcccag

SEQ ID NO: 1817609 - RNA, 15 nt, Human
acuuaaauaauguga

SEQ ID NO: 1817610 - RNA, 16 nt, Human
acuuaaauaaugugaa

SEQ ID NO: 1817611 - RNA, 18 nt, Human
acuuaaauaaugugaaac

SEQ ID NO: 1817612 - RNA, 17 nt, Human
acuuaaauaaugugaaa

SEQ ID NO: 1817613 - RNA, 20 nt, Human
ucuaaagccauuguaguccu

SEQ ID NO: 1817614 - RNA, 13 nt, Human
ucuaaagcugcca

SEQ ID NO: 1817615 - RNA, 14 nt, Human
ucuaaagcugccag

SEQ ID NO: 1817616 - RNA, 16 nt, Human
ucuaaagcugccagcc

SEQ ID NO: 1817617 - RNA, 15 nt, Human
ucuaaagcugccagc

SEQ ID NO: 1817618 - RNA, 21 nt, Human
acuguucucugcccuccaaga

SEQ ID NO: 1817619 - RNA, 15 nt, Human
acuguucucugcccu

SEQ ID NO: 1817620 - RNA, 20 nt, Human
acuguucucugcccuccaag

SEQ ID NO: 1817621 - RNA, 14 nt, Human
acuguucucugccc

SEQ ID NO: 1817622 - RNA, 12 nt, Human
acucaccccagc

SEQ ID NO: 1817623 - RNA, 21 nt, Human
acuacuagggaaaugccuuug

SEQ ID NO: 1817624 - RNA, 17 nt, Human
acuacucccccaggugg

SEQ ID NO: 1817625 - RNA, 17 nt, Human
ucccgaguagcugggac

SEQ ID NO: 1817626 - RNA, 16 nt, Human
ucccgaguagcuggga

SEQ ID NO: 1817627 - RNA, 18 nt, Human
ucccgaguagcugggacu

SEQ ID NO: 1817628 - RNA, 20 nt, Human
ucccgaguagcugagauuau

SEQ ID NO: 1817629 - RNA, 15 nt, Human
ucccgaguagcuggg

SEQ ID NO: 1817630 - RNA, 20 nt, Human
ucccgaauagcugggacuac

SEQ ID NO: 1817631 - RNA, 17 nt, Human
ucccugaaggccccgcc

SEQ ID NO: 1817632 - RNA, 16 nt, Human
ucccugaaggccccgc

SEQ ID NO: 1817633 - RNA, 13 nt, Human
ucccggcugcccu

SEQ ID NO: 1817634 - RNA, 14 nt, Human
ucccggcugcccuu

SEQ ID NO: 1817635 - RNA, 15 nt, Human
ucccggcugcccuuu

SEQ ID NO: 1817636 - RNA, 18 nt, Human
ucccggcugcccuuucug

SEQ ID NO: 1817637 - RNA, 22 nt, Human
ucccggcugcccuuucugggca

SEQ ID NO: 1817638 - RNA, 11 nt, Human
ucccugaaggc

SEQ ID NO: 1817639 - RNA, 15 nt, Human
ucccugaaggccccg

SEQ ID NO: 1817640 - RNA, 21 nt, Human
ucccucuuucccucccuuccu

SEQ ID NO: 1817641 - RNA, 18 nt, Human
ucccucuuucccucccuu

SEQ ID NO: 1817642 - RNA, 20 nt, Human
ucccucuuucccucccuucc

SEQ ID NO: 1817643 - RNA, 14 nt, Human
ucccucuuucccuc

SEQ ID NO: 1817644 - RNA, 14 nt, Human
ucccuuuuccauga

SEQ ID NO: 1817645 - RNA, 12 nt, Human
ucccuuuuccuu

SEQ ID NO: 1817646 - RNA, 17 nt, Human
uccggucccugucccag

SEQ ID NO: 1817647 - RNA, 19 nt, Human
uccuaaauauauuuuaaga

SEQ ID NO: 1817648 - RNA, 14 nt, Human
uccuacuuccccuu

SEQ ID NO: 1817649 - RNA, 16 nt, Human
uccuagaaauucccca

SEQ ID NO: 1817650 - RNA, 15 nt, Human
ucccugguggcagcu

SEQ ID NO: 1817651 - RNA, 12 nt, Human
ucccugucccag

SEQ ID NO: 1817652 - RNA, 21 nt, Human
acuccugcaggcagccaggcc

SEQ ID NO: 1817653 - RNA, 17 nt, Human
ucccuuacgugaguccu

SEQ ID NO: 1817654 - RNA, 15 nt, Human
acucauucuucugua

SEQ ID NO: 1817655 - RNA, 14 nt, Human
acucauugaccuga

SEQ ID NO: 1817656 - RNA, 15 nt, Human
acucauugaccugag

SEQ ID NO: 1817657 - RNA, 15 nt, Human
acuccagaauuuccc

SEQ ID NO: 1817658 - RNA, 17 nt, Human
acuccagaauuucccaa

SEQ ID NO: 1817659 - RNA, 14 nt, Human
acuccucuguccag

SEQ ID NO: 1817660 - RNA, 13 nt, Human
acuccucugucca

SEQ ID NO: 1817661 - RNA, 18 nt, Human
acuccugcaggcagccag

SEQ ID NO: 1817662 - RNA, 19 nt, Human
acuccugcaggcagccagg

SEQ ID NO: 1817663 - RNA, 15 nt, Human
acuccugaccucaag

SEQ ID NO: 1817664 - RNA, 17 nt, Human
acuccugcaggcagcca

SEQ ID NO: 1817665 - RNA, 23 nt, Human
acuccagaauuucccaaagcagu

SEQ ID NO: 1817666 - RNA, 12 nt, Human
acuccagccugg

SEQ ID NO: 1817667 - RNA, 13 nt, Human
acuccagccuggg

SEQ ID NO: 1817668 - RNA, 16 nt, Human
ucccaaagcagugcau

SEQ ID NO: 1817669 - RNA, 18 nt, Human
ucccaaacccuucagugc

SEQ ID NO: 1817670 - RNA, 14 nt, Human
ucccaaagugcugg

SEQ ID NO: 1817671 - RNA, 13 nt, Human
ucccaaagugcug

SEQ ID NO: 1817672 - RNA, 21 nt, Human
ucccaaagcagugcaugcugu

SEQ ID NO: 1817673 - RNA, 17 nt, Human
ucccaaagcagugcaug

SEQ ID NO: 1817674 - RNA, 18 nt, Human
ucccaaagcagugcaugc

SEQ ID NO: 1817675 - RNA, 18 nt, Human
uccaucuaaacugccccc

SEQ ID NO: 1817676 - RNA, 16 nt, Human
uccaucuaaacugccc

SEQ ID NO: 1817677 - RNA, 22 nt, Human
acgccagauucuuuccugaggc

SEQ ID NO: 1817678 - RNA, 23 nt, Human
acgccagauucuuuccugaggcu

SEQ ID NO: 1817679 - RNA, 21 nt, Human
uccauccugaggcuccacuug

SEQ ID NO: 1817680 - RNA, 20 nt, Human
uccauccugaggcuccacuu

SEQ ID NO: 1817681 - RNA, 21 nt, Human
uccaugaagauguagaggaga

SEQ ID NO: 1817682 - RNA, 13 nt, Human
uccaugaagaugu

SEQ ID NO: 1817683 - RNA, 22 nt, Human
acguauaaaagccuguuuaaga

SEQ ID NO: 1817684 - RNA, 15 nt, Human
acgguuuuacugcag

SEQ ID NO: 1817685 - RNA, 17 nt, Human
acgguuuuacugcagcu

SEQ ID NO: 1817686 - RNA, 23 nt, Human
acguggcugcuucaaggauccug

SEQ ID NO: 1817687 - RNA, 16 nt, Human
ucccacaaaggagagc

SEQ ID NO: 1817688 - RNA, 15 nt, Human
ucccaccccacacac

SEQ ID NO: 1817689 - RNA, 20 nt, Human
ucccaccccacacacgccag

SEQ ID NO: 1817690 - RNA, 13 nt, Human
ucccacagcgcug

SEQ ID NO: 1817691 - RNA, 20 nt, Human
acgggaggguaaggcugugg

SEQ ID NO: 1817692 - RNA, 15 nt, Human
ucccaucacccgcua

SEQ ID NO: 1817693 - RNA, 22 nt, Human
ucccauaugccugggcagaagg

SEQ ID NO: 1817694 - RNA, 15 nt, Human
acuacauucuguuaa

SEQ ID NO: 1817695 - RNA, 17 nt, Human
uccccaugucucgacuc

SEQ ID NO: 1817696 - RNA, 22 nt, Human
uccccaccgcagacaggaccag

SEQ ID NO: 1817697 - RNA, 17 nt, Human
uccccaccgcagacagg

SEQ ID NO: 1817698 - RNA, 18 nt, Human
uccccaccgcagacagga

SEQ ID NO: 1817699 - RNA, 21 nt, Human
uccccaccgcagacaggacca

SEQ ID NO: 1817700 - RNA, 17 nt, Human
ucccagcugugcucugg

SEQ ID NO: 1817701 - RNA, 12 nt, Human
ucccagccccaa

SEQ ID NO: 1817702 - RNA, 14 nt, Human
acuacauucuguua

SEQ ID NO: 1817703 - RNA, 13 nt, Human
acuacauucuguu

SEQ ID NO: 1817704 - RNA, 12 nt, Human
acuacauucugu

SEQ ID NO: 1817705 - RNA, 11 nt, Human
acuacauucug

SEQ ID NO: 1817706 - RNA, 15 nt, Human
acuacaguuuguuag

SEQ ID NO: 1817707 - RNA, 12 nt, Human
acuaaccacgcu

SEQ ID NO: 1817708 - RNA, 11 nt, Human
acuacaggcac

SEQ ID NO: 1817709 - RNA, 15 nt, Human
acuacaggcacccac

SEQ ID NO: 1817710 - RNA, 14 nt, Human
acuacaguuuguua

SEQ ID NO: 1817711 - RNA, 13 nt, Human
acuacaguuuguu

SEQ ID NO: 1817712 - RNA, 16 nt, Human
acgagcaggcuucuuc

SEQ ID NO: 1817713 - RNA, 19 nt, Human
acgccagauucuuuccuga

SEQ ID NO: 1817714 - RNA, 17 nt, Human
acgccagauucuuuccu

SEQ ID NO: 1817715 - RNA, 14 nt, Human
acgagaaaacaaua

SEQ ID NO: 1817716 - RNA, 22 nt, Human
accuuuuuuauacauaaacaag

SEQ ID NO: 1817717 - RNA, 21 nt, Human
accuuuuuuauacauaaacaa

SEQ ID NO: 1817718 - RNA, 21 nt, Human
uccaggcuguaucccaugagc

SEQ ID NO: 1817719 - RNA, 20 nt, Human
accuuuuuuauacauaaaca

SEQ ID NO: 1817720 - RNA, 19 nt, Human
accuuuuuuauacauaaac

SEQ ID NO: 1817721 - RNA, 14 nt, Human
uccagccccuggau

SEQ ID NO: 1817722 - RNA, 13 nt, Human
uccagccccugga

SEQ ID NO: 1817723 - RNA, 16 nt, Human
uccagagaguggcucc

SEQ ID NO: 1817724 - RNA, 17 nt, Human
uccagagaguggcuccu

SEQ ID NO: 1817725 - RNA, 15 nt, Human
uccagagaguggcuc

SEQ ID NO: 1817726 - RNA, 12 nt, Human
uccagccccugg

SEQ ID NO: 1817727 - RNA, 14 nt, Human
uccaggcuguaucc

SEQ ID NO: 1817728 - RNA, 14 nt, Human
accuuuugagugcc

SEQ ID NO: 1817729 - RNA, 17 nt, Human
accuuuugagugccuua

SEQ ID NO: 1817730 - RNA, 20 nt, Human
accuuuugagugccuuacac

SEQ ID NO: 1817731 - RNA, 19 nt, Human
uccaccuucccaugcccug

SEQ ID NO: 1817732 - RNA, 16 nt, Human
uccaccuucccaugcc

SEQ ID NO: 1817733 - RNA, 18 nt, Human
uccaccuucccaugcccu

SEQ ID NO: 1817734 - RNA, 17 nt, Human
uccacucaggucuguuu

SEQ ID NO: 1817735 - RNA, 18 nt, Human
uccagacccggcugcgug

SEQ ID NO: 1817736 - RNA, 15 nt, Human
uccagacccggcugc

SEQ ID NO: 1817737 - RNA, 19 nt, Human
uccagacccggcugcgugg

SEQ ID NO: 1817738 - RNA, 14 nt, Human
uccagagacuggga

SEQ ID NO: 1817739 - RNA, 16 nt, Human
uccagaauuucccaaa

SEQ ID NO: 1817740 - RNA, 13 nt, Human
uccacugccuucg

SEQ ID NO: 1817741 - RNA, 15 nt, Human
uccacugccuucgau

SEQ ID NO: 1817742 - RNA, 22 nt, Human
uccacugccuucgauacaccgg

SEQ ID NO: 1817743 - RNA, 20 nt, Human
uccagaauuucccaaagcag

SEQ ID NO: 1817744 - RNA, 22 nt, Human
uccagaauuucccaaagcagug

SEQ ID NO: 1817745 - RNA, 13 nt, Human
uccagacacaugu

SEQ ID NO: 1817746 - RNA, 15 nt, Human
uccacccaggagccc

SEQ ID NO: 1817747 - RNA, 14 nt, Human
uccacccaggagcc

SEQ ID NO: 1817748 - RNA, 12 nt, Human
uccacccaggag

SEQ ID NO: 1817749 - RNA, 19 nt, Human
uccacccaccucagccucc

SEQ ID NO: 1817750 - RNA, 18 nt, Human
uccacccaccucagccuc

SEQ ID NO: 1817751 - RNA, 17 nt, Human
uccacccaccucagccu

SEQ ID NO: 1817752 - RNA, 14 nt, Human
accuggccucugca

SEQ ID NO: 1817753 - RNA, 16 nt, Human
accuggccucugcacu

SEQ ID NO: 1817754 - RNA, 17 nt, Human
accuggccucugcacuc

SEQ ID NO: 1817755 - RNA, 23 nt, Human
accuggccucugcacuccccugc

SEQ ID NO: 1817756 - RNA, 18 nt, Human
accuggccucugcacucc

SEQ ID NO: 1817757 - RNA, 20 nt, Human
accuggccucugcacucccc

SEQ ID NO: 1817758 - RNA, 21 nt, Human
accuggucacaggacucugcc

SEQ ID NO: 1817759 - RNA, 19 nt, Human
accuguuucugcagccacu

SEQ ID NO: 1817760 - RNA, 18 nt, Human
accuuagacagucccugc

SEQ ID NO: 1817761 - RNA, 19 nt, Human
accuuagacagucccugcc

SEQ ID NO: 1817762 - RNA, 20 nt, Human
accuuagacagucccugcca

SEQ ID NO: 1817763 - RNA, 21 nt, Human
uccaagcuggucccacucagu

SEQ ID NO: 1817764 - RNA, 19 nt, Human
uccaaguccacaguggaac

SEQ ID NO: 1817765 - RNA, 18 nt, Human
uccaaucccaccaacccu

SEQ ID NO: 1817766 - RNA, 20 nt, Human
uccaagcuggucccacucag

SEQ ID NO: 1817767 - RNA, 16 nt, Human
uccaagcuggucccac

SEQ ID NO: 1817768 - RNA, 12 nt, Human
uccaagaagccc

SEQ ID NO: 1817769 - RNA, 12 nt, Human
accugccaggaa

SEQ ID NO: 1817770 - RNA, 14 nt, Human
accugccaggaagc

SEQ ID NO: 1817771 - RNA, 15 nt, Human
accugccaggaagcc

SEQ ID NO: 1817772 - RNA, 23 nt, Human
uccaacccucaucaccaacgucu

SEQ ID NO: 1817773 - RNA, 16 nt, Human
uccaacccucaucacc

SEQ ID NO: 1817774 - RNA, 17 nt, Human
uccaacccucaucacca

SEQ ID NO: 1817775 - RNA, 14 nt, Human
uccaacccucauca

SEQ ID NO: 1817776 - RNA, 20 nt, Human
accuacaguguacagucuug

SEQ ID NO: 1817777 - RNA, 18 nt, Human
accuacaguguacagucu

SEQ ID NO: 1817778 - RNA, 17 nt, Human
accuacaguguacaguc

SEQ ID NO: 1817779 - RNA, 16 nt, Human
accuacaguguacagu

SEQ ID NO: 1817780 - RNA, 15 nt, Human
accuacaguguacag

SEQ ID NO: 1817781 - RNA, 16 nt, Human
accuaccaccacgccc

SEQ ID NO: 1817782 - RNA, 20 nt, Human
accuaccaccacgcccggcu

SEQ ID NO: 1817783 - RNA, 12 nt, Human
ucaggaagcuca

SEQ ID NO: 1817784 - RNA, 13 nt, Human
ucaggaagcucag

SEQ ID NO: 1817785 - RNA, 14 nt, Human
ucaggaagcucagg

SEQ ID NO: 1817786 - RNA, 15 nt, Human
ucaggaagcucaggg

SEQ ID NO: 1817787 - RNA, 20 nt, Human
accuaacaacauuguagccu

SEQ ID NO: 1817788 - RNA, 12 nt, Human
accuccugccuc

SEQ ID NO: 1817789 - RNA, 13 nt, Human
accuccugccucg

SEQ ID NO: 1817790 - RNA, 23 nt, Human
accuccugccucgaacuggcugc

SEQ ID NO: 1817791 - RNA, 15 nt, Human
ucauccuaagcuauu

SEQ ID NO: 1817792 - RNA, 14 nt, Human
ucauccuucuggaa

SEQ ID NO: 1817793 - RNA, 18 nt, Human
ucauccucauacccaccc

SEQ ID NO: 1817794 - RNA, 13 nt, Human
ucauccuccucag

SEQ ID NO: 1817795 - RNA, 19 nt, Human
ucauccuccucagaucuuc

SEQ ID NO: 1817796 - RNA, 18 nt, Human
ucaucuagguaaauuaca

SEQ ID NO: 1817797 - RNA, 14 nt, Human
ucaucuaggauuuu

SEQ ID NO: 1817798 - RNA, 22 nt, Human
ucauccuucuggaauaaggaga

SEQ ID NO: 1817799 - RNA, 12 nt, Human
ucauucuucugu

SEQ ID NO: 1817800 - RNA, 12 nt, Human
ucauugaaaucu

SEQ ID NO: 1817801 - RNA, 13 nt, Human
ucauugaaaucuu

SEQ ID NO: 1817802 - RNA, 13 nt, Human
accuccugggcua

SEQ ID NO: 1817803 - RNA, 19 nt, Human
accucggugccuuccucuu

SEQ ID NO: 1817804 - RNA, 19 nt, Human
ucauugaccugaggcccuu

SEQ ID NO: 1817805 - RNA, 22 nt, Human
ucauugaaaucuuuuugcuuug

SEQ ID NO: 1817806 - RNA, 12 nt, Human
ucauugaccuga

SEQ ID NO: 1817807 - RNA, 14 nt, Human
ucauugaccugagg

SEQ ID NO: 1817808 - RNA, 15 nt, Human
ucauugaccugaggc

SEQ ID NO: 1817809 - RNA, 15 nt, Human
accugauugugucuc

SEQ ID NO: 1817810 - RNA, 17 nt, Human
accugauugugucucuu

SEQ ID NO: 1817811 - RNA, 18 nt, Human
accugauugugucucuug

SEQ ID NO: 1817812 - RNA, 22 nt, Human
accugaggcccuucucuccagc

SEQ ID NO: 1817813 - RNA, 15 nt, Human
accugaggcccuucu

SEQ ID NO: 1817814 - RNA, 16 nt, Human
accugaggcccuucuc

SEQ ID NO: 1817815 - RNA, 20 nt, Human
accugaggcccuucucucca

SEQ ID NO: 1817816 - RNA, 21 nt, Human
accugaggcccuucucuccag

SEQ ID NO: 1817817 - RNA, 14 nt, Human
accugaggcccuuc

SEQ ID NO: 1817818 - RNA, 23 nt, Human
uauuuccuauauuguuuucagug

SEQ ID NO: 1817819 - RNA, 22 nt, Human
uauuucccucaccuuucccauc

SEQ ID NO: 1817820 - RNA, 20 nt, Human
acaguugaaaaacagcugag

SEQ ID NO: 1817821 - RNA, 15 nt, Human
acaguugaaaaacag

SEQ ID NO: 1817822 - RNA, 16 nt, Human
acaguugaaaaacagc

SEQ ID NO: 1817823 - RNA, 13 nt, Human
acauacuaaccag

SEQ ID NO: 1817824 - RNA, 13 nt, Human
acauacucccauc

SEQ ID NO: 1817825 - RNA, 22 nt, Human
acauacuaaccagcagaaaugc

SEQ ID NO: 1817826 - RNA, 21 nt, Human
acauacuaaccagcagaaaug

SEQ ID NO: 1817827 - RNA, 17 nt, Human
acauacucccaucugug

SEQ ID NO: 1817828 - RNA, 14 nt, Human
acauacucugcuua

SEQ ID NO: 1817829 - RNA, 20 nt, Human
acaguuuguuaguaugaggc

SEQ ID NO: 1817830 - RNA, 16 nt, Human
acaguuuguuaguaug

SEQ ID NO: 1817831 - RNA, 15 nt, Human
acaguuuuuauugcu

SEQ ID NO: 1817832 - RNA, 16 nt, Human
acauagugaugguucc

SEQ ID NO: 1817833 - RNA, 21 nt, Human
acauagugaugguuccccugu

SEQ ID NO: 1817834 - RNA, 21 nt, Human
acauagcuuacaagccagcug

SEQ ID NO: 1817835 - RNA, 18 nt, Human
acauagaauuaacacaug

SEQ ID NO: 1817836 - RNA, 14 nt, Human
acauagaauuaaca

SEQ ID NO: 1817837 - RNA, 16 nt, Human
acauauugauuuccgu

SEQ ID NO: 1817838 - RNA, 14 nt, Human
acauauugauuucc

SEQ ID NO: 1817839 - RNA, 23 nt, Human
acauauugauuuccguuaaaaua

SEQ ID NO: 1817840 - RNA, 22 nt, Human
acauauugauuuccguuaaaau

SEQ ID NO: 1817841 - RNA, 18 nt, Human
acauauugauuuccguua

SEQ ID NO: 1817842 - RNA, 23 nt, Human
acaucucccuuuuccaugacugu

SEQ ID NO: 1817843 - RNA, 16 nt, Human
acaucaacaucuuggu

SEQ ID NO: 1817844 - RNA, 18 nt, Human
acaucaacaucuugguca

SEQ ID NO: 1817845 - RNA, 13 nt, Human
acaucaacagaua

SEQ ID NO: 1817846 - RNA, 14 nt, Human
acaucuugcucugc

SEQ ID NO: 1817847 - RNA, 13 nt, Human
acaucuugcucug

SEQ ID NO: 1817848 - RNA, 19 nt, Human
acaucuugcucugcugaca

SEQ ID NO: 1817849 - RNA, 18 nt, Human
acaucuugcucugcugac

SEQ ID NO: 1817850 - RNA, 21 nt, Human
acaucuugcucugcugacaga

SEQ ID NO: 1817851 - RNA, 17 nt, Human
acaugaaaacacauuuu

SEQ ID NO: 1817852 - RNA, 19 nt, Human
acaugaaaacacauuuuuc

SEQ ID NO: 1817853 - RNA, 18 nt, Human
acaugaaaacacauuuuu

SEQ ID NO: 1817854 - RNA, 11 nt, Human
ucaaguauuau

SEQ ID NO: 1817855 - RNA, 15 nt, Human
ucaaguauuauaccu

SEQ ID NO: 1817856 - RNA, 21 nt, Human
ucaaguauuauaccuuuuuua

SEQ ID NO: 1817857 - RNA, 16 nt, Human
ucaaguauuauaccuu

SEQ ID NO: 1817858 - RNA, 23 nt, Human
ucaaguauuauaccuuuuuuaga

SEQ ID NO: 1817859 - RNA, 19 nt, Human
ucaagaauagcauuguaaa

SEQ ID NO: 1817860 - RNA, 15 nt, Human
ucaagacuuccagag

SEQ ID NO: 1817861 - RNA, 16 nt, Human
ucaacagguuuuccug

SEQ ID NO: 1817862 - RNA, 17 nt, Human
ucaaauuucuaaaucuc

SEQ ID NO: 1817863 - RNA, 12 nt, Human
acauucuguuaa

SEQ ID NO: 1817864 - RNA, 16 nt, Human
ucaaauuucuaaaucu

SEQ ID NO: 1817865 - RNA, 15 nt, Human
ucaaauuucuaaauc

SEQ ID NO: 1817866 - RNA, 15 nt, Human
acauucuguuaauca

SEQ ID NO: 1817867 - RNA, 21 nt, Human
acauguccaagaagcccagga

SEQ ID NO: 1817868 - RNA, 18 nt, Human
acauuagcaguuugcuuu

SEQ ID NO: 1817869 - RNA, 22 nt, Human
acauuagcaguuugcuuuguau

SEQ ID NO: 1817870 - RNA, 22 nt, Human
ucaaauacauuuaaaacauuaa

SEQ ID NO: 1817871 - RNA, 21 nt, Human
ucaaauacauuuaaaacauua

SEQ ID NO: 1817872 - RNA, 18 nt, Human
ucaaauaacuaaaaggua

SEQ ID NO: 1817873 - RNA, 20 nt, Human
acaugagcaucaggccaggc

SEQ ID NO: 1817874 - RNA, 22 nt, Human
acaugcuacacacugcauguuu

SEQ ID NO: 1817875 - RNA, 15 nt, Human
acaugaucuucuuua

SEQ ID NO: 1817876 - RNA, 17 nt, Human
acaugaucuucuuuaua

SEQ ID NO: 1817877 - RNA, 17 nt, Human
acaugagcaucaggcca

SEQ ID NO: 1817878 - RNA, 18 nt, Human
acaugagcaucaggccag

SEQ ID NO: 1817879 - RNA, 19 nt, Human
acaugagcaucaggccagg

SEQ ID NO: 1817880 - RNA, 19 nt, Human
acaugauccugcaauucca

SEQ ID NO: 1817881 - RNA, 14 nt, Human
ucaaagcugaaaug

SEQ ID NO: 1817882 - RNA, 16 nt, Human
ucaaaauuguuacaaa

SEQ ID NO: 1817883 - RNA, 19 nt, Human
ucaaaauuguuacaaauug

SEQ ID NO: 1817884 - RNA, 14 nt, Human
ucaaaaguuuguuu

SEQ ID NO: 1817885 - RNA, 13 nt, Human
ucaaaaguuuguu

SEQ ID NO: 1817886 - RNA, 18 nt, Human
ucaaaagaaagaaaauca

SEQ ID NO: 1817887 - RNA, 23 nt, Human
accauuucuugagguaaaagcau

SEQ ID NO: 1817888 - RNA, 11 nt, Human
acccacugcuc

SEQ ID NO: 1817889 - RNA, 10 nt, Human
acccacugcu

SEQ ID NO: 1817890 - RNA, 11 nt, Human
acccacugcuu

SEQ ID NO: 1817891 - RNA, 15 nt, Human
acccacugcucuggu

SEQ ID NO: 1817892 - RNA, 14 nt, Human
acccacugcucugg

SEQ ID NO: 1817893 - RNA, 13 nt, Human
acccacugcucug

SEQ ID NO: 1817894 - RNA, 22 nt, Human
accauggucggaaaacaugcua

SEQ ID NO: 1817895 - RNA, 23 nt, Human
ucacucuuauugcccacgcugga

SEQ ID NO: 1817896 - RNA, 21 nt, Human
ucacucuuauugcccacgcug

SEQ ID NO: 1817897 - RNA, 15 nt, Human
ucacuccuaccuggu

SEQ ID NO: 1817898 - RNA, 19 nt, Human
ucagaaguuucucagcucc

SEQ ID NO: 1817899 - RNA, 19 nt, Human
ucagaaguuucugccgcag

SEQ ID NO: 1817900 - RNA, 22 nt, Human
ucagaaguuucugccgcagccc

SEQ ID NO: 1817901 - RNA, 14 nt, Human
ucagaagacacuga

SEQ ID NO: 1817902 - RNA, 18 nt, Human
ucagagccugcaguuauu

SEQ ID NO: 1817903 - RNA, 15 nt, Human
ucagagccugcaguu

SEQ ID NO: 1817904 - RNA, 14 nt, Human
ucagagccugcagu

SEQ ID NO: 1817905 - RNA, 13 nt, Human
ucagagccugcag

SEQ ID NO: 1817906 - RNA, 12 nt, Human
ucagagccugca

SEQ ID NO: 1817907 - RNA, 23 nt, Human
ucagagagggugggagugggccc

SEQ ID NO: 1817908 - RNA, 16 nt, Human
ucagagagggugggag

SEQ ID NO: 1817909 - RNA, 21 nt, Human
ucagagagggugggagugggc

SEQ ID NO: 1817910 - RNA, 17 nt, Human
ucagaaucucucuucuu

SEQ ID NO: 1817911 - RNA, 18 nt, Human
ucagaaucucaaauaacu

SEQ ID NO: 1817912 - RNA, 19 nt, Human
ucagaaucucaaauaacua

SEQ ID NO: 1817913 - RNA, 21 nt, Human
ucagagacuccugcaggcagc

SEQ ID NO: 1817914 - RNA, 17 nt, Human
ucagagacuccugcagg

SEQ ID NO: 1817915 - RNA, 20 nt, Human
ucagagacuccugcaggcag

SEQ ID NO: 1817916 - RNA, 23 nt, Human
accccagcuggggccaggcuggg

SEQ ID NO: 1817917 - RNA, 24 nt, Human
acccagcgagcccugguggcagug

SEQ ID NO: 1817918 - RNA, 22 nt, Human
ucagccaagaauucuuaaauau

SEQ ID NO: 1817919 - RNA, 23 nt, Human
acccagcgagcccugguggcagu

SEQ ID NO: 1817920 - RNA, 19 nt, Human
acccagcgagcccuggugg

SEQ ID NO: 1817921 - RNA, 23 nt, Human
ucagccguguaaccauggaccca

SEQ ID NO: 1817922 - RNA, 14 nt, Human
ucagcggggacagc

SEQ ID NO: 1817923 - RNA, 13 nt, Human
ucagcucacugca

SEQ ID NO: 1817924 - RNA, 16 nt, Human
ucagcucacugcaacc

SEQ ID NO: 1817925 - RNA, 20 nt, Human
ucagcuuguaaauagcucag

SEQ ID NO: 1817926 - RNA, 12 nt, Human
ucagcucaugga

SEQ ID NO: 1817927 - RNA, 15 nt, Human
accccuucgcuccug

SEQ ID NO: 1817928 - RNA, 14 nt, Human
accccuucgcuccu

SEQ ID NO: 1817929 - RNA, 16 nt, Human
accccuucgcuccugu

SEQ ID NO: 1817930 - RNA, 17 nt, Human
accccuguaggccucag

SEQ ID NO: 1817931 - RNA, 16 nt, Human
accccuguaggccuca

SEQ ID NO: 1817932 - RNA, 15 nt, Human
accccuguaggccuc

SEQ ID NO: 1817933 - RNA, 12 nt, Human
acccccacccaa

SEQ ID NO: 1817934 - RNA, 20 nt, Human
ucacuauguugcccaggcag

SEQ ID NO: 1817935 - RNA, 19 nt, Human
ucacuauguugcccaggca

SEQ ID NO: 1817936 - RNA, 18 nt, Human
ucacuauguugcccaggc

SEQ ID NO: 1817937 - RNA, 17 nt, Human
accagagcccaccuugg

SEQ ID NO: 1817938 - RNA, 14 nt, Human
accagccuccaugc

SEQ ID NO: 1817939 - RNA, 19 nt, Human
accagccuccaugcugccu

SEQ ID NO: 1817940 - RNA, 20 nt, Human
accagccuccaugcugccuc

SEQ ID NO: 1817941 - RNA, 21 nt, Human
accagccuccaugcugccucc

SEQ ID NO: 1817942 - RNA, 14 nt, Human
accagggacugagg

SEQ ID NO: 1817943 - RNA, 16 nt, Human
ucaccugaagacucau

SEQ ID NO: 1817944 - RNA, 15 nt, Human
ucaccucucccuugg

SEQ ID NO: 1817945 - RNA, 15 nt, Human
ucaccugccccucaa

SEQ ID NO: 1817946 - RNA, 13 nt, Human
ucaccugccccuc

SEQ ID NO: 1817947 - RNA, 14 nt, Human
accagacaccuuga

SEQ ID NO: 1817948 - RNA, 16 nt, Human
accagagcccaccuug

SEQ ID NO: 1817949 - RNA, 14 nt, Human
accagagcccaccu

SEQ ID NO: 1817950 - RNA, 12 nt, Human
accagagcccac

SEQ ID NO: 1817951 - RNA, 22 nt, Human
accacuuuuguucuugguuugu

SEQ ID NO: 1817952 - RNA, 17 nt, Human
ucaccccggccaccugc

SEQ ID NO: 1817953 - RNA, 18 nt, Human
ucaccccggccaccugcg

SEQ ID NO: 1817954 - RNA, 17 nt, Human
accacugcacuccagcc

SEQ ID NO: 1817955 - RNA, 20 nt, Human
accacugcacuccagccugg

SEQ ID NO: 1817956 - RNA, 15 nt, Human
accacugcucugaug

SEQ ID NO: 1817957 - RNA, 17 nt, Human
accacugcucugaugaa

SEQ ID NO: 1817958 - RNA, 23 nt, Human
accacugcucugaugaagaggag

SEQ ID NO: 1817959 - RNA, 21 nt, Human
accacugcacuccagccuggg

SEQ ID NO: 1817960 - RNA, 22 nt, Human
ucaccccggccaccugcggugc

SEQ ID NO: 1817961 - RNA, 21 nt, Human
accacuuuuguucuugguuug

SEQ ID NO: 1817962 - RNA, 16 nt, Human
accacuuuuguucuug

SEQ ID NO: 1817963 - RNA, 15 nt, Human
accacuuuuguucuu

SEQ ID NO: 1817964 - RNA, 15 nt, Human
ucaauucuugccaaa

SEQ ID NO: 1817965 - RNA, 14 nt, Human
accacacuccagcu

SEQ ID NO: 1817966 - RNA, 15 nt, Human
ucaagugaaaaagga

SEQ ID NO: 1817967 - RNA, 17 nt, Human
ucaagugauucucaugc

SEQ ID NO: 1817968 - RNA, 23 nt, Human
ucaagugaaaaaggaggaagaga

SEQ ID NO: 1817969 - RNA, 20 nt, Human
ucaagugauucucaugccuc

SEQ ID NO: 1817970 - RNA, 19 nt, Human
accaacauacucccaucug

SEQ ID NO: 1817971 - RNA, 21 nt, Human
accaacauacucccaucugug

SEQ ID NO: 1817972 - RNA, 22 nt, Human
accaacauacucccaucuguga

SEQ ID NO: 1817973 - RNA, 17 nt, Human
accaauauuguacaguu

SEQ ID NO: 1817974 - RNA, 16 nt, Human
accaauauuguacagu

SEQ ID NO: 1817975 - RNA, 15 nt, Human
accaauauuguacag

SEQ ID NO: 1817976 - RNA, 19 nt, Human
accaauauuguacaguuuu

SEQ ID NO: 1817977 - RNA, 18 nt, Human
accaauauuguacaguuu

SEQ ID NO: 1817978 - RNA, 15 nt, Human
accaauguucucucu

SEQ ID NO: 1817979 - RNA, 15 nt, Human
ucacaguucucuccu

SEQ ID NO: 1817980 - RNA, 15 nt, Human
ucacauaucugucau

SEQ ID NO: 1817981 - RNA, 12 nt, Human
ucacauaucugu

SEQ ID NO: 1817982 - RNA, 22 nt, Human
ucacacgucuggcuucacagau

SEQ ID NO: 1817983 - RNA, 16 nt, Human
ucacaacaaccugguc

SEQ ID NO: 1817984 - RNA, 15 nt, Human
ucaccccggccaccu

SEQ ID NO: 1817985 - RNA, 13 nt, Human
ucaccccagcccc

SEQ ID NO: 1817986 - RNA, 14 nt, Human
ucaccccagcccca

SEQ ID NO: 1817987 - RNA, 20 nt, Human
ucaccccagccccaaaacuc

SEQ ID NO: 1817988 - RNA, 18 nt, Human
uaguucagguaacaggca

SEQ ID NO: 1817989 - RNA, 10 nt, Human
uaguuuuugu

SEQ ID NO: 1817990 - RNA, 20 nt, Human
uauaaaaauaaaaaacacug

SEQ ID NO: 1817991 - RNA, 21 nt, Human
uauaaaaauaaaaaacacugg

SEQ ID NO: 1817992 - RNA, 14 nt, Human
uauaaaagacugac

SEQ ID NO: 1817993 - RNA, 13 nt, Human
acacccagcccac

SEQ ID NO: 1817994 - RNA, 12 nt, Human
acacccagccca

SEQ ID NO: 1817995 - RNA, 13 nt, Human
acacauuuuauuu

SEQ ID NO: 1817996 - RNA, 21 nt, Human
acacauguccaagaagcccag

SEQ ID NO: 1817997 - RNA, 22 nt, Human
acacauguccaagaagcccagg

SEQ ID NO: 1817998 - RNA, 13 nt, Human
acacauguccaag

SEQ ID NO: 1817999 - RNA, 18 nt, Human
acacauguccaagaagcc

SEQ ID NO: 1818000 - RNA, 19 nt, Human
acacauguccaagaagccc

SEQ ID NO: 1818001 - RNA, 18 nt, Human
acaccucugcacaagcug

SEQ ID NO: 1818002 - RNA, 16 nt, Human
acaccuugacagggca

SEQ ID NO: 1818003 - RNA, 15 nt, Human
acaccuugacagggc

SEQ ID NO: 1818004 - RNA, 14 nt, Human
acaccuugacaggg

SEQ ID NO: 1818005 - RNA, 19 nt, Human
acaccucugcacaagcugc

SEQ ID NO: 1818006 - RNA, 19 nt, Human
acacuaaccacgcuggacc

SEQ ID NO: 1818007 - RNA, 17 nt, Human
acacuaaccacgcugga

SEQ ID NO: 1818008 - RNA, 16 nt, Human
acacuaaccacgcugg

SEQ ID NO: 1818009 - RNA, 19 nt, Human
uauaacuauguugauaaaa

SEQ ID NO: 1818010 - RNA, 22 nt, Human
uauaaccaguguuguggauuua

SEQ ID NO: 1818011 - RNA, 15 nt, Human
acaaugguuuucuug

SEQ ID NO: 1818012 - RNA, 21 nt, Human
acaaugguuuucuuguguguu

SEQ ID NO: 1818013 - RNA, 14 nt, Human
acacacacauacac

SEQ ID NO: 1818014 - RNA, 12 nt, Human
acacacagcucu

SEQ ID NO: 1818015 - RNA, 11 nt, Human
acacacagcuc

SEQ ID NO: 1818016 - RNA, 13 nt, Human
acacagugagucg

SEQ ID NO: 1818017 - RNA, 17 nt, Human
acacagugaccauacua

SEQ ID NO: 1818018 - RNA, 21 nt, Human
uagguuggcaaaaaggcagga

SEQ ID NO: 1818019 - RNA, 11 nt, Human
acacagugagu

SEQ ID NO: 1818020 - RNA, 19 nt, Human
acacagucuuggcucacug

SEQ ID NO: 1818021 - RNA, 13 nt, Human
uaguagagacagg

SEQ ID NO: 1818022 - RNA, 20 nt, Human
acagauguaaaagacuuuuu

SEQ ID NO: 1818023 - RNA, 23 nt, Human
acagaugggugcuuggaggaagg

SEQ ID NO: 1818024 - RNA, 20 nt, Human
acagauacuccuccaagguu

SEQ ID NO: 1818025 - RNA, 20 nt, Human
acagauagauauaugcucug

SEQ ID NO: 1818026 - RNA, 22 nt, Human
acagaguuguuacauuuuuaag

SEQ ID NO: 1818027 - RNA, 21 nt, Human
acagaguuguuacauuuuuaa

SEQ ID NO: 1818028 - RNA, 20 nt, Human
uaugaaagauggcugugccu

SEQ ID NO: 1818029 - RNA, 22 nt, Human
uaugaaagauggcugugccucu

SEQ ID NO: 1818030 - RNA, 23 nt, Human
uaugaaagauggcugugccucug

SEQ ID NO: 1818031 - RNA, 16 nt, Human
acagcaaggagauuua

SEQ ID NO: 1818032 - RNA, 21 nt, Human
acagcccgggcucugccuccc

SEQ ID NO: 1818033 - RNA, 22 nt, Human
acagcccgggcucugccuccca

SEQ ID NO: 1818034 - RNA, 23 nt, Human
acagcccgggcucugccucccau

SEQ ID NO: 1818035 - RNA, 16 nt, Human
acagaguuguuacauu

SEQ ID NO: 1818036 - RNA, 20 nt, Human
acagaguuguuacauuuuua

SEQ ID NO: 1818037 - RNA, 19 nt, Human
acagaguuguuacauuuuu

SEQ ID NO: 1818038 - RNA, 18 nt, Human
acagaguuguuacauuuu

SEQ ID NO: 1818039 - RNA, 17 nt, Human
acagaguuguuacauuu

SEQ ID NO: 1818040 - RNA, 21 nt, Human
acagagcaagugagacccugu

SEQ ID NO: 1818041 - RNA, 14 nt, Human
acagagcccacgcc

SEQ ID NO: 1818042 - RNA, 14 nt, Human
uauccuacuucccc

SEQ ID NO: 1818043 - RNA, 17 nt, Human
uauccuacuuccccuuc

SEQ ID NO: 1818044 - RNA, 13 nt, Human
uaucucagggccu

SEQ ID NO: 1818045 - RNA, 15 nt, Human
uaucucagggccugg

SEQ ID NO: 1818046 - RNA, 16 nt, Human
uaucccggcugcccuu

SEQ ID NO: 1818047 - RNA, 20 nt, Human
uaucccuacuguaauuugug

SEQ ID NO: 1818048 - RNA, 19 nt, Human
uaucccuacuguaauuugu

SEQ ID NO: 1818049 - RNA, 12 nt, Human
uauauuuacaaa

SEQ ID NO: 1818050 - RNA, 17 nt, Human
acagacacaggcccggc

SEQ ID NO: 1818051 - RNA, 19 nt, Human
acagaaagcagaacaguga

SEQ ID NO: 1818052 - RNA, 22 nt, Human
acagacacaggcccggcuccag

SEQ ID NO: 1818053 - RNA, 18 nt, Human
acagacacaggcccggcu

SEQ ID NO: 1818054 - RNA, 22 nt, Human
acagacuggaagcacagcuuca

SEQ ID NO: 1818055 - RNA, 21 nt, Human
acagacuggaagcacagcuuc

SEQ ID NO: 1818056 - RNA, 19 nt, Human
acagacuggaagcacagcu

SEQ ID NO: 1818057 - RNA, 17 nt, Human
acagacuggaagcacag

SEQ ID NO: 1818058 - RNA, 23 nt, Human
acacuguuucaaacuuuacuaug

SEQ ID NO: 1818059 - RNA, 15 nt, Human
acacuguuucaaacu

SEQ ID NO: 1818060 - RNA, 16 nt, Human
acacuguuucaaacuu

SEQ ID NO: 1818061 - RNA, 15 nt, Human
acacuuaaaaauggu

SEQ ID NO: 1818062 - RNA, 13 nt, Human
acacuuaaaaaug

SEQ ID NO: 1818063 - RNA, 20 nt, Human
acacuuguugauuaauggaa

SEQ ID NO: 1818064 - RNA, 23 nt, Human
acacuuguugauuaauggaaaug

SEQ ID NO: 1818065 - RNA, 11 nt, Human
acacucugaga

SEQ ID NO: 1818066 - RNA, 13 nt, Human
acacucugagacu

SEQ ID NO: 1818067 - RNA, 14 nt, Human
acacuccagugaga

SEQ ID NO: 1818068 - RNA, 22 nt, Human
acacuguucucugcccuccaag

SEQ ID NO: 1818069 - RNA, 23 nt, Human
acacuguucucugcccuccaaga

SEQ ID NO: 1818070 - RNA, 16 nt, Human
acacuguucucugccc

SEQ ID NO: 1818071 - RNA, 17 nt, Human
acacuguucucugcccu

SEQ ID NO: 1818072 - RNA, 18 nt, Human
acacuguucucugcccuc

SEQ ID NO: 1818073 - RNA, 20 nt, Human
acacuguucucugcccucca

SEQ ID NO: 1818074 - RNA, 14 nt, Human
acacuguucucugc

SEQ ID NO: 1818075 - RNA, 15 nt, Human
acacuguucucugcc

SEQ ID NO: 1818076 - RNA, 22 nt, Human
aauuuauaaacuuuuuucuuac

SEQ ID NO: 1818077 - RNA, 17 nt, Human
aauuuauuauggcacau

SEQ ID NO: 1818078 - RNA, 14 nt, Human
aauuuauuauggca

SEQ ID NO: 1818079 - RNA, 13 nt, Human
aauuuauuauggc

SEQ ID NO: 1818080 - RNA, 15 nt, Human
aauuuacauacucug

SEQ ID NO: 1818081 - RNA, 17 nt, Human
aauuuaccugaagucuu

SEQ ID NO: 1818082 - RNA, 18 nt, Human
aauuuacagagacagaaa

SEQ ID NO: 1818083 - RNA, 17 nt, Human
aauuuacagagacagaa

SEQ ID NO: 1818084 - RNA, 15 nt, Human
aauuugaaacacuuu

SEQ ID NO: 1818085 - RNA, 18 nt, Human
uacuucuccacccugcuc

SEQ ID NO: 1818086 - RNA, 13 nt, Human
uacuucuccaccc

SEQ ID NO: 1818087 - RNA, 23 nt, Human
uacuuccugugacuucagcucug

SEQ ID NO: 1818088 - RNA, 14 nt, Human
uacuuccccuuccu

SEQ ID NO: 1818089 - RNA, 15 nt, Human
uacuuccccuuccua

SEQ ID NO: 1818090 - RNA, 18 nt, Human
uacuuccccuuccuaauu

SEQ ID NO: 1818091 - RNA, 20 nt, Human
uacuuccccuuccuaauucc

SEQ ID NO: 1818092 - RNA, 15 nt, Human
uacuucugcuacaua

SEQ ID NO: 1818093 - RNA, 20 nt, Human
uacuucuccacccugcucuc

SEQ ID NO: 1818094 - RNA, 16 nt, Human
uacuucuuauacauuu

SEQ ID NO: 1818095 - RNA, 14 nt, Human
uacuucuuauacau

SEQ ID NO: 1818096 - RNA, 15 nt, Human
uacuucuuauacauu

SEQ ID NO: 1818097 - RNA, 23 nt, Human
uacuuugauauuuucaacgcagc

SEQ ID NO: 1818098 - RNA, 15 nt, Human
uacuugaaaauuaac

SEQ ID NO: 1818099 - RNA, 16 nt, Human
uacgucugacaggcaa

SEQ ID NO: 1818100 - RNA, 13 nt, Human
uacgugaguccug

SEQ ID NO: 1818101 - RNA, 14 nt, Human
uacuaaaaauacaa

SEQ ID NO: 1818102 - RNA, 18 nt, Human
uacuaaaaauacaaaaaa

SEQ ID NO: 1818103 - RNA, 18 nt, Human
uacuagggaaaugccuuu

SEQ ID NO: 1818104 - RNA, 22 nt, Human
uacucuacccucuuagaaaaac

SEQ ID NO: 1818105 - RNA, 15 nt, Human
uacgucugacaggca

SEQ ID NO: 1818106 - RNA, 24 nt, Human
uacgcuccaucgcugucaucucag

SEQ ID NO: 1818107 - RNA, 19 nt, Human
uacuguacagacagaaaaa

SEQ ID NO: 1818108 - RNA, 23 nt, Human
uacuguacagacagaaaaaacug

SEQ ID NO: 1818109 - RNA, 18 nt, Human
uacuguacaugaaaacac

SEQ ID NO: 1818110 - RNA, 21 nt, Human
aauugacuuauuuauauaaau

SEQ ID NO: 1818111 - RNA, 15 nt, Human
uacuguaauuuguga

SEQ ID NO: 1818112 - RNA, 17 nt, Human
uacuguaauuugugaua

SEQ ID NO: 1818113 - RNA, 16 nt, Human
uacuguaauuugugau

SEQ ID NO: 1818114 - RNA, 19 nt, Human
uacugagagugaacaaauu

SEQ ID NO: 1818115 - RNA, 17 nt, Human
uacugagagugaacaaa

SEQ ID NO: 1818116 - RNA, 14 nt, Human
acaaaacuuuucua

SEQ ID NO: 1818117 - RNA, 18 nt, Human
acaaagcccuuccauguc

SEQ ID NO: 1818118 - RNA, 21 nt, Human
acaaagcgugguggacaugca

SEQ ID NO: 1818119 - RNA, 22 nt, Human
uagauaggucagugcaaauacu

SEQ ID NO: 1818120 - RNA, 22 nt, Human
aauuuuuaaucuuuaauuuuac

SEQ ID NO: 1818121 - RNA, 22 nt, Human
aauuuuuuuaucgucacugcuu

SEQ ID NO: 1818122 - RNA, 16 nt, Human
aauuuguuauaaugaa

SEQ ID NO: 1818123 - RNA, 13 nt, Human
uacuuuuuccugg

SEQ ID NO: 1818124 - RNA, 18 nt, Human
acaaucucggcucacugc

SEQ ID NO: 1818125 - RNA, 20 nt, Human
acaaucucggcucacugcau

SEQ ID NO: 1818126 - RNA, 18 nt, Human
acaagcgugagccacugc

SEQ ID NO: 1818127 - RNA, 22 nt, Human
acaagcuccaagcucccaggca

SEQ ID NO: 1818128 - RNA, 15 nt, Human
acaagcuccaagcuc

SEQ ID NO: 1818129 - RNA, 16 nt, Human
acaagcuccaagcucc

SEQ ID NO: 1818130 - RNA, 17 nt, Human
acaagcuccaagcuccc

SEQ ID NO: 1818131 - RNA, 19 nt, Human
acaagcuccaagcucccag

SEQ ID NO: 1818132 - RNA, 16 nt, Human
uagcuacuaauuuuaa

SEQ ID NO: 1818133 - RNA, 16 nt, Human
uagcucaggugucccu

SEQ ID NO: 1818134 - RNA, 17 nt, Human
acaagcgugagccacug

SEQ ID NO: 1818135 - RNA, 13 nt, Human
acaagcuccaagc

SEQ ID NO: 1818136 - RNA, 18 nt, Human
acaagaccacguuucuaa

SEQ ID NO: 1818137 - RNA, 17 nt, Human
acaagaccacguuucua

SEQ ID NO: 1818138 - RNA, 14 nt, Human
acaagacacaguga

SEQ ID NO: 1818139 - RNA, 16 nt, Human
acaagaccacguuucu

SEQ ID NO: 1818140 - RNA, 18 nt, Human
acaagagcuuaacagugu

SEQ ID NO: 1818141 - RNA, 19 nt, Human
acaagagcuuaacagugug

SEQ ID NO: 1818142 - RNA, 22 nt, Human
acaagagcccaggccuccuaca

SEQ ID NO: 1818143 - RNA, 21 nt, Human
acaaauucugucucuggauua

SEQ ID NO: 1818144 - RNA, 17 nt, Human
acaaauuuacagagaca

SEQ ID NO: 1818145 - RNA, 13 nt, Human
acaagacacagug

SEQ ID NO: 1818146 - RNA, 17 nt, Human
acaacaucuuuuucuac

SEQ ID NO: 1818147 - RNA, 15 nt, Human
aauaacgauaaaaga

SEQ ID NO: 1818148 - RNA, 21 nt, Human
aauaacaaugaaaguugauaa

SEQ ID NO: 1818149 - RNA, 16 nt, Human
aauaaauugcuccuug

SEQ ID NO: 1818150 - RNA, 20 nt, Human
aauaaauugcuccuugacau

SEQ ID NO: 1818151 - RNA, 18 nt, Human
aauaaaacuuuuuaaaau

SEQ ID NO: 1818152 - RNA, 15 nt, Human
aauaaaacuuuuuaa

SEQ ID NO: 1818153 - RNA, 14 nt, Human
aauaaaacuuuuua

SEQ ID NO: 1818154 - RNA, 12 nt, Human
aauaaaacuuuu

SEQ ID NO: 1818155 - RNA, 16 nt, Human
aauaaaucauaaaacu

SEQ ID NO: 1818156 - RNA, 15 nt, Human
aaguuuuguaaauuu

SEQ ID NO: 1818157 - RNA, 20 nt, Human
aaguuuuuauggcuuuugug

SEQ ID NO: 1818158 - RNA, 22 nt, Human
uaaagguucaugcaaacuuuau

SEQ ID NO: 1818159 - RNA, 19 nt, Human
uaaaguaaaaacaaagaaa

SEQ ID NO: 1818160 - RNA, 21 nt, Human
uaaaguaaaaacaaagaaauu

SEQ ID NO: 1818161 - RNA, 22 nt, Human
uaaaguaaaaacaaagaaauua

SEQ ID NO: 1818162 - RNA, 18 nt, Human
uaaaucuccaaaauaaaa

SEQ ID NO: 1818163 - RNA, 15 nt, Human
uaaaucuccaaaaua

SEQ ID NO: 1818164 - RNA, 14 nt, Human
uaaaucuccaaaau

SEQ ID NO: 1818165 - RNA, 19 nt, Human
uaaaugcaaccauuugaaa

SEQ ID NO: 1818166 - RNA, 23 nt, Human
uaaaugcaccuggaauauauaac

SEQ ID NO: 1818167 - RNA, 15 nt, Human
uaaauguugaaagau

SEQ ID NO: 1818168 - RNA, 20 nt, Human
uaaauguugaaagaucaaaa

SEQ ID NO: 1818169 - RNA, 24 nt, Human
uaaauguuuuuuuuuaaagacuuu

SEQ ID NO: 1818170 - RNA, 14 nt, Human
uaaauuaacuuuua

SEQ ID NO: 1818171 - RNA, 12 nt, Human
uaaauuaacuuu

SEQ ID NO: 1818172 - RNA, 16 nt, Human
uaaauuaacuuuuaua

SEQ ID NO: 1818173 - RNA, 15 nt, Human
uaaauuaacuuuuau

SEQ ID NO: 1818174 - RNA, 17 nt, Human
uaaauuaacuuuuauaa

SEQ ID NO: 1818175 - RNA, 18 nt, Human
uaaauuaacuuuuauaaa

SEQ ID NO: 1818176 - RNA, 12 nt, Human
uaaauaaaguuu

SEQ ID NO: 1818177 - RNA, 21 nt, Human
uaaauaaaguuuguugaaaca

SEQ ID NO: 1818178 - RNA, 19 nt, Human
uaaauaaugugaaacugga

SEQ ID NO: 1818179 - RNA, 15 nt, Human
aauaauuuuguaaug

SEQ ID NO: 1818180 - RNA, 14 nt, Human
aauaauuuuguaau

SEQ ID NO: 1818181 - RNA, 13 nt, Human
aauaauuuuguaa

SEQ ID NO: 1818182 - RNA, 12 nt, Human
aauaacuuuuuu

SEQ ID NO: 1818183 - RNA, 14 nt, Human
aauauuguacaguu

SEQ ID NO: 1818184 - RNA, 13 nt, Human
aauauuguacagu

SEQ ID NO: 1818185 - RNA, 11 nt, Human
aauauugcuga

SEQ ID NO: 1818186 - RNA, 12 nt, Human
aauauugcugau

SEQ ID NO: 1818187 - RNA, 13 nt, Human
aauauugcugaug

SEQ ID NO: 1818188 - RNA, 15 nt, Human
aauauugcugauggu

SEQ ID NO: 1818189 - RNA, 18 nt, Human
aauauugcugauggugca

SEQ ID NO: 1818190 - RNA, 21 nt, Human
aauauugcugauggugcaaug

SEQ ID NO: 1818191 - RNA, 22 nt, Human
aauauugcugauggugcaauga

SEQ ID NO: 1818192 - RNA, 18 nt, Human
aauauugauaugcuuaua

SEQ ID NO: 1818193 - RNA, 15 nt, Human
aauaugcacacauuu

SEQ ID NO: 1818194 - RNA, 16 nt, Human
aauaucugaaaaugua

SEQ ID NO: 1818195 - RNA, 17 nt, Human
aauaucugaaaauguau

SEQ ID NO: 1818196 - RNA, 18 nt, Human
aauaucugaaaauguaug

SEQ ID NO: 1818197 - RNA, 19 nt, Human
aauaucugaaaauguaugu

SEQ ID NO: 1818198 - RNA, 20 nt, Human
aauaucugaaaauguaugug

SEQ ID NO: 1818199 - RNA, 19 nt, Human
aauaucuuuuuuuuaauaa

SEQ ID NO: 1818200 - RNA, 17 nt, Human
uaagacauuuuuggaag

SEQ ID NO: 1818201 - RNA, 19 nt, Human
uaacuuuuauaaacuuuac

SEQ ID NO: 1818202 - RNA, 18 nt, Human
uaacuuuuauaaacuuua

SEQ ID NO: 1818203 - RNA, 17 nt, Human
uaacuuuuauaaacuuu

SEQ ID NO: 1818204 - RNA, 15 nt, Human
uaacuuuuauaaacu

SEQ ID NO: 1818205 - RNA, 20 nt, Human
uaacuaaaauaauuuuguaa

SEQ ID NO: 1818206 - RNA, 21 nt, Human
uaacuaaaauaauuuuguaau

SEQ ID NO: 1818207 - RNA, 18 nt, Human
aauaggcguaacuaauuu

SEQ ID NO: 1818208 - RNA, 19 nt, Human
aauaggaaaaacugauuuu

SEQ ID NO: 1818209 - RNA, 17 nt, Human
aauaggaaaaacugauu

SEQ ID NO: 1818210 - RNA, 18 nt, Human
aauaggaaaaacugauuu

SEQ ID NO: 1818211 - RNA, 16 nt, Human
aauagcuuuaaugaua

SEQ ID NO: 1818212 - RNA, 15 nt, Human
aauagcuuuaaugau

SEQ ID NO: 1818213 - RNA, 15 nt, Human
aauaggaaaaacuga

SEQ ID NO: 1818214 - RNA, 16 nt, Human
aauaggaaaaacugau

SEQ ID NO: 1818215 - RNA, 18 nt, Human
aauagacccacaagaggc

SEQ ID NO: 1818216 - RNA, 16 nt, Human
aauagacagcaugaga

SEQ ID NO: 1818217 - RNA, 23 nt, Human
aauagacaauuuauuauggcaca

SEQ ID NO: 1818218 - RNA, 18 nt, Human
aauagacaauuuauuaug

SEQ ID NO: 1818219 - RNA, 14 nt, Human
aauagcugggacua

SEQ ID NO: 1818220 - RNA, 13 nt, Human
aauagcugggacu

SEQ ID NO: 1818221 - RNA, 20 nt, Human
aauagccugccucuucucua

SEQ ID NO: 1818222 - RNA, 16 nt, Human
aauagaugcugacugu

SEQ ID NO: 1818223 - RNA, 14 nt, Human
uaacuaaaagguau

SEQ ID NO: 1818224 - RNA, 19 nt, Human
uaacuaaaauaauuuugua

SEQ ID NO: 1818225 - RNA, 18 nt, Human
uaacuaaaauaauuuugu

SEQ ID NO: 1818226 - RNA, 12 nt, Human
uaacuaaaauaa

SEQ ID NO: 1818227 - RNA, 15 nt, Human
uaacuaaaagguaug

SEQ ID NO: 1818228 - RNA, 16 nt, Human
uaacauggaaguacua

SEQ ID NO: 1818229 - RNA, 15 nt, Human
uaacauggaaguacu

SEQ ID NO: 1818230 - RNA, 14 nt, Human
uaacauggaaguac

SEQ ID NO: 1818231 - RNA, 14 nt, Human
uaacaugauuuggg

SEQ ID NO: 1818232 - RNA, 15 nt, Human
aaucuaaauggaacc

SEQ ID NO: 1818233 - RNA, 13 nt, Human
aaucuaaauggaa

SEQ ID NO: 1818234 - RNA, 18 nt, Human
aaucuaaauggaaccacu

SEQ ID NO: 1818235 - RNA, 12 nt, Human
aaucuaaaugga

SEQ ID NO: 1818236 - RNA, 14 nt, Human
aaucuuauaauuua

SEQ ID NO: 1818237 - RNA, 16 nt, Human
aaucuuauaauuuaaa

SEQ ID NO: 1818238 - RNA, 14 nt, Human
aaucucaaauuucu

SEQ ID NO: 1818239 - RNA, 12 nt, Human
aaucucaaauuu

SEQ ID NO: 1818240 - RNA, 15 nt, Human
aaucucaaauaacua

SEQ ID NO: 1818241 - RNA, 15 nt, Human
aaucaucaagucuuu

SEQ ID NO: 1818242 - RNA, 17 nt, Human
uaauaaaaguacauguu

SEQ ID NO: 1818243 - RNA, 17 nt, Human
aaucauggugcucagag

SEQ ID NO: 1818244 - RNA, 14 nt, Human
aaucagacuaugaa

SEQ ID NO: 1818245 - RNA, 17 nt, Human
aaucagacuaugaaguu

SEQ ID NO: 1818246 - RNA, 12 nt, Human
aaucagcauucu

SEQ ID NO: 1818247 - RNA, 20 nt, Human
uaaguuuuuauggcuuuugu

SEQ ID NO: 1818248 - RNA, 20 nt, Human
uaaugacaggccuguccaac

SEQ ID NO: 1818249 - RNA, 15 nt, Human
uaaugacaggccugu

SEQ ID NO: 1818250 - RNA, 22 nt, Human
uaaugaaagacuguacaaagua

SEQ ID NO: 1818251 - RNA, 23 nt, Human
uaaugaaagacuguacaaaguag

SEQ ID NO: 1818252 - RNA, 15 nt, Human
uaaugacuuaagcac

SEQ ID NO: 1818253 - RNA, 21 nt, Human
uaaugacuuaagcacacuuga

SEQ ID NO: 1818254 - RNA, 14 nt, Human
uaaugaaagacugu

SEQ ID NO: 1818255 - RNA, 17 nt, Human
uaaugaaagacuguaca

SEQ ID NO: 1818256 - RNA, 18 nt, Human
uaaugaaagacuguacaa

SEQ ID NO: 1818257 - RNA, 19 nt, Human
uaaugaaagacuguacaaa

SEQ ID NO: 1818258 - RNA, 21 nt, Human
uaauagcgucauaacuagaac

SEQ ID NO: 1818259 - RNA, 13 nt, Human
aaucuucugaacu

SEQ ID NO: 1818260 - RNA, 20 nt, Human
aaucuucugaacuuggcgcu

SEQ ID NO: 1818261 - RNA, 13 nt, Human
uaaugaggaaacu

SEQ ID NO: 1818262 - RNA, 15 nt, Human
aaugaaaaccacauu

SEQ ID NO: 1818263 - RNA, 15 nt, Human
aaugacaggccuguc

SEQ ID NO: 1818264 - RNA, 17 nt, Human
aaugacuuacuguacau

SEQ ID NO: 1818265 - RNA, 14 nt, Human
aaugacuuacugua

SEQ ID NO: 1818266 - RNA, 18 nt, Human
aaugacuuacuguacaug

SEQ ID NO: 1818267 - RNA, 15 nt, Human
aaugagccuggcaag

SEQ ID NO: 1818268 - RNA, 19 nt, Human
aauggacuuuuguacauag

SEQ ID NO: 1818269 - RNA, 21 nt, Human
aauggacguguuaugacucca

SEQ ID NO: 1818270 - RNA, 19 nt, Human
uacacauuuuucagauaua

SEQ ID NO: 1818271 - RNA, 21 nt, Human
uacacauuuuucagauauaaa

SEQ ID NO: 1818272 - RNA, 17 nt, Human
uacacauuuuucagaua

SEQ ID NO: 1818273 - RNA, 15 nt, Human
uacacauuuuucaga

SEQ ID NO: 1818274 - RNA, 18 nt, Human
uacaccacuacauucugu

SEQ ID NO: 1818275 - RNA, 17 nt, Human
uacaccacuacauucug

SEQ ID NO: 1818276 - RNA, 16 nt, Human
uacaccacuacauucu

SEQ ID NO: 1818277 - RNA, 15 nt, Human
uacaccacuacauuc

SEQ ID NO: 1818278 - RNA, 20 nt, Human
uacaccacuacauucuguua

SEQ ID NO: 1818279 - RNA, 19 nt, Human
uacaccacuacauucuguu

SEQ ID NO: 1818280 - RNA, 17 nt, Human
uacaggcuccugccacc

SEQ ID NO: 1818281 - RNA, 14 nt, Human
uacaggcuccugcc

SEQ ID NO: 1818282 - RNA, 15 nt, Human
uacaggcuccugcca

SEQ ID NO: 1818283 - RNA, 22 nt, Human
uacaggcgugagccaccgugcc

SEQ ID NO: 1818284 - RNA, 18 nt, Human
uacagaggccaugggccu

SEQ ID NO: 1818285 - RNA, 15 nt, Human
uacaggcauagaguu

SEQ ID NO: 1818286 - RNA, 14 nt, Human
uacacuccagugag

SEQ ID NO: 1818287 - RNA, 11 nt, Human
aaugugauaug

SEQ ID NO: 1818288 - RNA, 14 nt, Human
aauguggcuccugg

SEQ ID NO: 1818289 - RNA, 14 nt, Human
aaugugacucaaga

SEQ ID NO: 1818290 - RNA, 14 nt, Human
aauguacugcauau

SEQ ID NO: 1818291 - RNA, 18 nt, Human
aauguacugcauaugaaa

SEQ ID NO: 1818292 - RNA, 12 nt, Human
aauguaugugua

SEQ ID NO: 1818293 - RNA, 14 nt, Human
aauguauguguaag

SEQ ID NO: 1818294 - RNA, 17 nt, Human
uacauaaugcgugcaua

SEQ ID NO: 1818295 - RNA, 15 nt, Human
uacaguaucucaggg

SEQ ID NO: 1818296 - RNA, 20 nt, Human
uacauaaugcgugcauacca

SEQ ID NO: 1818297 - RNA, 19 nt, Human
uacauaaugcgugcauacc

SEQ ID NO: 1818298 - RNA, 21 nt, Human
uacauaaugcgugcauaccac

SEQ ID NO: 1818299 - RNA, 12 nt, Human
aauguacugcau

SEQ ID NO: 1818300 - RNA, 19 nt, Human
uacauauaagugauugcug

SEQ ID NO: 1818301 - RNA, 14 nt, Human
aaugcccagccccu

SEQ ID NO: 1818302 - RNA, 15 nt, Human
aaugcccagccccuu

SEQ ID NO: 1818303 - RNA, 16 nt, Human
aaugcauaaaauguua

SEQ ID NO: 1818304 - RNA, 13 nt, Human
aaugcauaaaaug

SEQ ID NO: 1818305 - RNA, 14 nt, Human
uacaaggacagccc

SEQ ID NO: 1818306 - RNA, 13 nt, Human
aaugcugugcccu

SEQ ID NO: 1818307 - RNA, 21 nt, Human
aaugcugugcccuaaagugua

SEQ ID NO: 1818308 - RNA, 20 nt, Human
aaugcugugcccuaaagugu

SEQ ID NO: 1818309 - RNA, 20 nt, Human
aaugcccagccccuucugac

SEQ ID NO: 1818310 - RNA, 22 nt, Human
aaugcccagccccuucugaccc

SEQ ID NO: 1818311 - RNA, 23 nt, Human
aaugcccagccccuucugaccca

SEQ ID NO: 1818312 - RNA, 24 nt, Human
aaugcccagccccuucugacccau

SEQ ID NO: 1818313 - RNA, 16 nt, Human
aauggacguguuauga

SEQ ID NO: 1818314 - RNA, 14 nt, Human
uaauuccacagcug

SEQ ID NO: 1818315 - RNA, 17 nt, Human
uaauuccacagcugcuc

SEQ ID NO: 1818316 - RNA, 13 nt, Human
uaauuccacagcu

SEQ ID NO: 1818317 - RNA, 15 nt, Human
uacaaaagcauguga

SEQ ID NO: 1818318 - RNA, 20 nt, Human
uacaaaaagcauaaaaauua

SEQ ID NO: 1818319 - RNA, 15 nt, Human
gugccucaagagaag

SEQ ID NO: 1818320 - RNA, 21 nt, Human
gugaaccaccacacccagccc

SEQ ID NO: 1818321 - RNA, 13 nt, Human
gugccucugccug

SEQ ID NO: 1818322 - RNA, 12 nt, Human
gugccucuggga

SEQ ID NO: 1818323 - RNA, 13 nt, Human
gugccucugggac

SEQ ID NO: 1818324 - RNA, 15 nt, Human
gugccucugccuguc

SEQ ID NO: 1818325 - RNA, 14 nt, Human
gugccucugggacu

SEQ ID NO: 1818326 - RNA, 14 nt, Human
gugccuuauggaac

SEQ ID NO: 1818327 - RNA, 21 nt, Human
gugccuuauggaacacucuga

SEQ ID NO: 1818328 - RNA, 23 nt, Human
gugccuuauggaacacucugaga

SEQ ID NO: 1818329 - RNA, 13 nt, Human
aacuuuaccuuuu

SEQ ID NO: 1818330 - RNA, 12 nt, Human
aacuugggaacu

SEQ ID NO: 1818331 - RNA, 11 nt, Human
gugccuuaugg

SEQ ID NO: 1818332 - RNA, 15 nt, Human
aacuuguauuaugug

SEQ ID NO: 1818333 - RNA, 16 nt, Human
aacuuguauuaugugu

SEQ ID NO: 1818334 - RNA, 22 nt, Human
aacuugucuuuggacccugagg

SEQ ID NO: 1818335 - RNA, 18 nt, Human
aacuugucuuuggacccu

SEQ ID NO: 1818336 - RNA, 23 nt, Human
aagaauagcauuguaaaagcauu

SEQ ID NO: 1818337 - RNA, 18 nt, Human
aagaauagcauuguaaaa

SEQ ID NO: 1818338 - RNA, 17 nt, Human
aagaauagcauuguaaa

SEQ ID NO: 1818339 - RNA, 17 nt, Human
aagaauagcuuuaauga

SEQ ID NO: 1818340 - RNA, 18 nt, Human
gugcuaggaacacuccuu

SEQ ID NO: 1818341 - RNA, 22 nt, Human
gugcuaggaacacuccuucaca

SEQ ID NO: 1818342 - RNA, 21 nt, Human
gugcuaucucccccagcccca

SEQ ID NO: 1818343 - RNA, 22 nt, Human
aagaagugaaaaucuacacucc

SEQ ID NO: 1818344 - RNA, 16 nt, Human
aagaagugaaaaucua

SEQ ID NO: 1818345 - RNA, 13 nt, Human
aagaaauauaccu

SEQ ID NO: 1818346 - RNA, 20 nt, Human
aagaaagacuaucuaaaugu

SEQ ID NO: 1818347 - RNA, 22 nt, Human
aagaaagacuaucuaaauguug

SEQ ID NO: 1818348 - RNA, 13 nt, Human
aagaaagaaaauc

SEQ ID NO: 1818349 - RNA, 18 nt, Human
aagaaaaaggaugcacag

SEQ ID NO: 1818350 - RNA, 17 nt, Human
aagaaaaaggaugcaca

SEQ ID NO: 1818351 - RNA, 15 nt, Human
aagaaaaaggaugca

SEQ ID NO: 1818352 - RNA, 21 nt, Human
guggaugccugguggcagcug

SEQ ID NO: 1818353 - RNA, 21 nt, Human
guggauggaaggggcugacag

SEQ ID NO: 1818354 - RNA, 22 nt, Human
guggacacagcucuucuccagg

SEQ ID NO: 1818355 - RNA, 18 nt, Human
guggacacagcucuucuc

SEQ ID NO: 1818356 - RNA, 23 nt, Human
guggacacagcucuucuccaggc

SEQ ID NO: 1818357 - RNA, 20 nt, Human
gugcugggauuacaggugug

SEQ ID NO: 1818358 - RNA, 19 nt, Human
guggaaguaguggagcccc

SEQ ID NO: 1818359 - RNA, 20 nt, Human
gugcugggauuacaggcgug

SEQ ID NO: 1818360 - RNA, 22 nt, Human
gugcugggauuacaagcgugag

SEQ ID NO: 1818361 - RNA, 21 nt, Human
gugcugggauuacaagcguga

SEQ ID NO: 1818362 - RNA, 15 nt, Human
gugcucaggagcccu

SEQ ID NO: 1818363 - RNA, 12 nt, Human
gugcuauguucu

SEQ ID NO: 1818364 - RNA, 22 nt, Human
gugcuaucucccccagccccau

SEQ ID NO: 1818365 - RNA, 19 nt, Human
guggauuuaacagaaaugu

SEQ ID NO: 1818366 - RNA, 18 nt, Human
guggauuuaacagaaaug

SEQ ID NO: 1818367 - RNA, 20 nt, Human
guggauuuaacagaaaugua

SEQ ID NO: 1818368 - RNA, 19 nt, Human
guggcaccagcagccugga

SEQ ID NO: 1818369 - RNA, 20 nt, Human
guggcagcucaccucucccu

SEQ ID NO: 1818370 - RNA, 14 nt, Human
guggcagcucaccu

SEQ ID NO: 1818371 - RNA, 16 nt, Human
guggcagcucaccucu

SEQ ID NO: 1818372 - RNA, 16 nt, Human
aagaauugaagcagga

SEQ ID NO: 1818373 - RNA, 18 nt, Human
guguguaugcgugugugu

SEQ ID NO: 1818374 - RNA, 23 nt, Human
guguuuccuggcacugcuuccag

SEQ ID NO: 1818375 - RNA, 18 nt, Human
gugucuuuuuucacuaca

SEQ ID NO: 1818376 - RNA, 17 nt, Human
gugugaaaaugugugug

SEQ ID NO: 1818377 - RNA, 17 nt, Human
gugugacuacuccccca

SEQ ID NO: 1818378 - RNA, 18 nt, Human
gugucuugcaauggcagc

SEQ ID NO: 1818379 - RNA, 17 nt, Human
gugucuugcaauggcag

SEQ ID NO: 1818380 - RNA, 18 nt, Human
aagagguuuuaaaaaaau

SEQ ID NO: 1818381 - RNA, 17 nt, Human
gugguuuucuguucuuu

SEQ ID NO: 1818382 - RNA, 20 nt, Human
guggugguuuucuguucuuu

SEQ ID NO: 1818383 - RNA, 12 nt, Human
aagaugcagccg

SEQ ID NO: 1818384 - RNA, 12 nt, Human
aagcaaaggaga

SEQ ID NO: 1818385 - RNA, 13 nt, Human
aagcaaaggagau

SEQ ID NO: 1818386 - RNA, 15 nt, Human
aagcaagauuucaga

SEQ ID NO: 1818387 - RNA, 22 nt, Human
aagcaaagacuuuccucuuagu

SEQ ID NO: 1818388 - RNA, 14 nt, Human
aagaugugacaugu

SEQ ID NO: 1818389 - RNA, 18 nt, Human
aagaugugacauguuuua

SEQ ID NO: 1818390 - RNA, 14 nt, Human
guggguacgggagg

SEQ ID NO: 1818391 - RNA, 20 nt, Human
gugggggaucacagccucug

SEQ ID NO: 1818392 - RNA, 14 nt, Human
guggugguuuucug

SEQ ID NO: 1818393 - RNA, 16 nt, Human
gugguuucagaaaugu

SEQ ID NO: 1818394 - RNA, 13 nt, Human
gugggagugggcc

SEQ ID NO: 1818395 - RNA, 14 nt, Human
gugggagugggccc

SEQ ID NO: 1818396 - RNA, 13 nt, Human
gugggauccucca

SEQ ID NO: 1818397 - RNA, 23 nt, Human
guggcgcagcauauucaggaagc

SEQ ID NO: 1818398 - RNA, 22 nt, Human
gugggacacccugugauggggc

SEQ ID NO: 1818399 - RNA, 16 nt, Human
aagacuaucuaaaugu

SEQ ID NO: 1818400 - RNA, 17 nt, Human
aagacuaucuaaauguu

SEQ ID NO: 1818401 - RNA, 22 nt, Human
aagacccuuguggucccacccc

SEQ ID NO: 1818402 - RNA, 18 nt, Human
aagacccuugugguccca

SEQ ID NO: 1818403 - RNA, 21 nt, Human
aagacccuuguggucccaccc

SEQ ID NO: 1818404 - RNA, 22 nt, Human
aagacugaguacguugugcauu

SEQ ID NO: 1818405 - RNA, 21 nt, Human
aagacugaguacguugugcau

SEQ ID NO: 1818406 - RNA, 17 nt, Human
aagacuguacaaaguag

SEQ ID NO: 1818407 - RNA, 17 nt, Human
aagacugaguacguugu

SEQ ID NO: 1818408 - RNA, 18 nt, Human
aagacuaucuaaauguug

SEQ ID NO: 1818409 - RNA, 18 nt, Human
guggcccgacagccuggc

SEQ ID NO: 1818410 - RNA, 19 nt, Human
guggcccgacagccuggca

SEQ ID NO: 1818411 - RNA, 16 nt, Human
aagagcuuaacagugu

SEQ ID NO: 1818412 - RNA, 16 nt, Human
aaggguaucaggugcu

SEQ ID NO: 1818413 - RNA, 17 nt, Human
aaggguaucaggugcug

SEQ ID NO: 1818414 - RNA, 13 nt, Human
aaguaaaaacaaa

SEQ ID NO: 1818415 - RNA, 20 nt, Human
aaguaaaaacaaagaaauua

SEQ ID NO: 1818416 - RNA, 22 nt, Human
aaguaaaaacaaagaaauuaug

SEQ ID NO: 1818417 - RNA, 12 nt, Human
aaguaauaugca

SEQ ID NO: 1818418 - RNA, 19 nt, Human
guuucuaaaggcuaccuuu

SEQ ID NO: 1818419 - RNA, 16 nt, Human
aaguaauaugcacaca

SEQ ID NO: 1818420 - RNA, 15 nt, Human
aaguaauaugcacac

SEQ ID NO: 1818421 - RNA, 13 nt, Human
aagggccuggccu

SEQ ID NO: 1818422 - RNA, 23 nt, Human
aaggggaauguuugccucugccu

SEQ ID NO: 1818423 - RNA, 22 nt, Human
aaggggaauguuugccucugcc

SEQ ID NO: 1818424 - RNA, 19 nt, Human
aagggccuggccugagcug

SEQ ID NO: 1818425 - RNA, 14 nt, Human
aagggccuggccug

SEQ ID NO: 1818426 - RNA, 17 nt, Human
aagggccuggccugagc

SEQ ID NO: 1818427 - RNA, 16 nt, Human
guuugccucugccucu

SEQ ID NO: 1818428 - RNA, 13 nt, Human
guuugccucugcc

SEQ ID NO: 1818429 - RNA, 22 nt, Human
guuucugucguuaaaaacagau

SEQ ID NO: 1818430 - RNA, 22 nt, Human
guuugauucagacagcugccug

SEQ ID NO: 1818431 - RNA, 23 nt, Human
guuucuaaaggcuaccuuuguau

SEQ ID NO: 1818432 - RNA, 22 nt, Human
guuucuaaaggcuaccuuugua

SEQ ID NO: 1818433 - RNA, 17 nt, Human
guuucugucguuaaaaa

SEQ ID NO: 1818434 - RNA, 18 nt, Human
guuuggggaugagaaagg

SEQ ID NO: 1818435 - RNA, 20 nt, Human
guuugggccccagaggcugg

SEQ ID NO: 1818436 - RNA, 23 nt, Human
guuuuacaauaaaaucuugaaaa

SEQ ID NO: 1818437 - RNA, 15 nt, Human
guuuuacugcagcuu

SEQ ID NO: 1818438 - RNA, 20 nt, Human
guuuucuuaaccagaucauu

SEQ ID NO: 1818439 - RNA, 12 nt, Human
guuuucuguucu

SEQ ID NO: 1818440 - RNA, 11 nt, Human
guuuucuguuc

SEQ ID NO: 1818441 - RNA, 13 nt, Human
guuggguggaugc

SEQ ID NO: 1818442 - RNA, 18 nt, Human
guuggucccccuuccaug

SEQ ID NO: 1818443 - RNA, 12 nt, Human
guuguauucauu

SEQ ID NO: 1818444 - RNA, 18 nt, Human
guuguaccgcaaugugac

SEQ ID NO: 1818445 - RNA, 20 nt, Human
guuuaagacauuuuuggaag

SEQ ID NO: 1818446 - RNA, 21 nt, Human
guugcccaggcuggcgugcag

SEQ ID NO: 1818447 - RNA, 19 nt, Human
guugcccaggcaggucuug

SEQ ID NO: 1818448 - RNA, 18 nt, Human
guugcccaggcaggucuu

SEQ ID NO: 1818449 - RNA, 17 nt, Human
guugcccaggcaggucu

SEQ ID NO: 1818450 - RNA, 14 nt, Human
aaggcuccaggagc

SEQ ID NO: 1818451 - RNA, 18 nt, Human
aaggccaaaggaagcaca

SEQ ID NO: 1818452 - RNA, 19 nt, Human
aaggcuaccuuuguauucu

SEQ ID NO: 1818453 - RNA, 23 nt, Human
guugaugaucuuugcagacaggc

SEQ ID NO: 1818454 - RNA, 21 nt, Human
guugaugccugugaacugaac

SEQ ID NO: 1818455 - RNA, 14 nt, Human
aaggauccugagcc

SEQ ID NO: 1818456 - RNA, 15 nt, Human
aaggauccugagcca

SEQ ID NO: 1818457 - RNA, 17 nt, Human
aaggauccugagccaga

SEQ ID NO: 1818458 - RNA, 18 nt, Human
aaggaugaucuaggaaga

SEQ ID NO: 1818459 - RNA, 23 nt, Human
aaggaugaucuaggaagacuuug

SEQ ID NO: 1818460 - RNA, 19 nt, Human
aaggaugccccgucccccu

SEQ ID NO: 1818461 - RNA, 19 nt, Human
aaggaugcuuguacauaau

SEQ ID NO: 1818462 - RNA, 17 nt, Human
aaggaugcuuguacaua

SEQ ID NO: 1818463 - RNA, 16 nt, Human
aaggaugcuuguacau

SEQ ID NO: 1818464 - RNA, 15 nt, Human
aaggaugcuuguaca

SEQ ID NO: 1818465 - RNA, 18 nt, Human
aaggaugcacagaguugu

SEQ ID NO: 1818466 - RNA, 22 nt, Human
aaggaugcacagaguuguuaca

SEQ ID NO: 1818467 - RNA, 20 nt, Human
guuaguaugaggcauuuguu

SEQ ID NO: 1818468 - RNA, 17 nt, Human
guuaguaugaggcauuu

SEQ ID NO: 1818469 - RNA, 16 nt, Human
guuagauuaagaaaua

SEQ ID NO: 1818470 - RNA, 13 nt, Human
guuagauuaagaa

SEQ ID NO: 1818471 - RNA, 22 nt, Human
guuaaguugauggugaugaaau

SEQ ID NO: 1818472 - RNA, 18 nt, Human
guuaaugauagcuacugu

SEQ ID NO: 1818473 - RNA, 12 nt, Human
guuaauaaaagu

SEQ ID NO: 1818474 - RNA, 18 nt, Human
guguuuuaaaaugagaaa

SEQ ID NO: 1818475 - RNA, 12 nt, Human
guuaagccuuug

SEQ ID NO: 1818476 - RNA, 13 nt, Human
guuaagccuuugg

SEQ ID NO: 1818477 - RNA, 16 nt, Human
guuaagccuuuggaaa

SEQ ID NO: 1818478 - RNA, 17 nt, Human
guucagcuccagcucac

SEQ ID NO: 1818479 - RNA, 16 nt, Human
guucagcuccagcuca

SEQ ID NO: 1818480 - RNA, 18 nt, Human
guucagcuccagcucacc

SEQ ID NO: 1818481 - RNA, 19 nt, Human
guucaggguuggccccugc

SEQ ID NO: 1818482 - RNA, 18 nt, Human
guucaggguuggccccug

SEQ ID NO: 1818483 - RNA, 17 nt, Human
guucaggguuggccccu

SEQ ID NO: 1818484 - RNA, 22 nt, Human
aagcuaggccuggccagaugca

SEQ ID NO: 1818485 - RNA, 18 nt, Human
aagcuaggccuggccaga

SEQ ID NO: 1818486 - RNA, 17 nt, Human
aagcuaggccuggccag

SEQ ID NO: 1818487 - RNA, 19 nt, Human
aagccuccuccagccgcca

SEQ ID NO: 1818488 - RNA, 13 nt, Human
guucucuccuucu

SEQ ID NO: 1818489 - RNA, 20 nt, Human
guucccuuugacgccauccc

SEQ ID NO: 1818490 - RNA, 21 nt, Human
guucccuuugacgccauccca

SEQ ID NO: 1818491 - RNA, 22 nt, Human
guucccuuugacgccaucccag

SEQ ID NO: 1818492 - RNA, 16 nt, Human
guucuacccaggugcu

SEQ ID NO: 1818493 - RNA, 22 nt, Human
guugaugaucuuugcagacagg

SEQ ID NO: 1818494 - RNA, 17 nt, Human
guucuuaguuugcaguu

SEQ ID NO: 1818495 - RNA, 19 nt, Human
guucuuaguugcuguaugu

SEQ ID NO: 1818496 - RNA, 21 nt, Human
guucuugguuuguaaauuaac

SEQ ID NO: 1818497 - RNA, 14 nt, Human
guucuucaucuaag

SEQ ID NO: 1818498 - RNA, 20 nt, Human
guuccauggccucuucagau

SEQ ID NO: 1818499 - RNA, 20 nt, Human
guucccauuugcuccuuucu

SEQ ID NO: 1818500 - RNA, 16 nt, Human
guucccauuugcuccu

SEQ ID NO: 1818501 - RNA, 20 nt, Human
guucccuacuuccugugacu

SEQ ID NO: 1818502 - RNA, 17 nt, Human
aagcuaucguaaaauua

SEQ ID NO: 1818503 - RNA, 22 nt, Human
aagcuauucaguaauaacucua

SEQ ID NO: 1818504 - RNA, 21 nt, Human
aagcucuacugaggugcuaug

SEQ ID NO: 1818505 - RNA, 17 nt, Human
aacauugcaauagaaau

SEQ ID NO: 1818506 - RNA, 16 nt, Human
aacauuguagccucaa

SEQ ID NO: 1818507 - RNA, 20 nt, Human
aacauuuguucuauagcuuu

SEQ ID NO: 1818508 - RNA, 16 nt, Human
aacauugcaauagaaa

SEQ ID NO: 1818509 - RNA, 15 nt, Human
aacauugcaauagaa

SEQ ID NO: 1818510 - RNA, 14 nt, Human
aacauugcaauaga

SEQ ID NO: 1818511 - RNA, 14 nt, Human
aacauacucccauc

SEQ ID NO: 1818512 - RNA, 15 nt, Human
aacauacucccaucu

SEQ ID NO: 1818513 - RNA, 22 nt, Human
aacaguagugauaguuguaccg

SEQ ID NO: 1818514 - RNA, 23 nt, Human
aacaggcugggcuucaguggcag

SEQ ID NO: 1818515 - RNA, 13 nt, Human
aacaggcugggcu

SEQ ID NO: 1818516 - RNA, 22 nt, Human
aacaggcugggcuucaguggca

SEQ ID NO: 1818517 - RNA, 19 nt, Human
aacagacuggaagcacagc

SEQ ID NO: 1818518 - RNA, 21 nt, Human
guccggucccugucccagugc

SEQ ID NO: 1818519 - RNA, 15 nt, Human
gucccaacuuguaaa

SEQ ID NO: 1818520 - RNA, 13 nt, Human
guccgagcuuuga

SEQ ID NO: 1818521 - RNA, 21 nt, Human
aacagaaauguacagcaagga

SEQ ID NO: 1818522 - RNA, 11 nt, Human
aacagaaaugu

SEQ ID NO: 1818523 - RNA, 10 nt, Human
aacagaaaug

SEQ ID NO: 1818524 - RNA, 23 nt, Human
aacaaggcaaggcugucaauuac

SEQ ID NO: 1818525 - RNA, 21 nt, Human
aacaagccuccuuuuaaagua

SEQ ID NO: 1818526 - RNA, 15 nt, Human
aacaaggcaaggcug

SEQ ID NO: 1818527 - RNA, 20 nt, Human
aacaagaccacguuucuaaa

SEQ ID NO: 1818528 - RNA, 19 nt, Human
aacaagaccacguuucuaa

SEQ ID NO: 1818529 - RNA, 17 nt, Human
aacaagaccacguuucu

SEQ ID NO: 1818530 - RNA, 16 nt, Human
aacaagaccacguuuc

SEQ ID NO: 1818531 - RNA, 15 nt, Human
gucacaggcaggucc

SEQ ID NO: 1818532 - RNA, 13 nt, Human
gucacaggcaggu

SEQ ID NO: 1818533 - RNA, 16 nt, Human
gucacaggcaggucca

SEQ ID NO: 1818534 - RNA, 23 nt, Human
aaauuuuuaaucuuuaauuuuac

SEQ ID NO: 1818535 - RNA, 15 nt, Human
aacacuguucucugc

SEQ ID NO: 1818536 - RNA, 20 nt, Human
aacacuguucucugcccucc

SEQ ID NO: 1818537 - RNA, 14 nt, Human
aacacucugagacu

SEQ ID NO: 1818538 - RNA, 12 nt, Human
aacacucugaga

SEQ ID NO: 1818539 - RNA, 13 nt, Human
aacacucugagac

SEQ ID NO: 1818540 - RNA, 12 nt, Human
aacacuccuuca

SEQ ID NO: 1818541 - RNA, 11 nt, Human
aacacucugag

SEQ ID NO: 1818542 - RNA, 21 nt, Human
aacacucauugaccugaggcc

SEQ ID NO: 1818543 - RNA, 15 nt, Human
guccacaacacacag

SEQ ID NO: 1818544 - RNA, 22 nt, Human
gucauuugagcagggcucagcg

SEQ ID NO: 1818545 - RNA, 21 nt, Human
gucauuugagcagggcucagc

SEQ ID NO: 1818546 - RNA, 11 nt, Human
aacacuuccau

SEQ ID NO: 1818547 - RNA, 21 nt, Human
aacacuguucucugcccucca

SEQ ID NO: 1818548 - RNA, 19 nt, Human
gucuuauauauuguagaua

SEQ ID NO: 1818549 - RNA, 15 nt, Human
gucuuagauguauau

SEQ ID NO: 1818550 - RNA, 24 nt, Human
gucuuuucuugcaugaggcuagug

SEQ ID NO: 1818551 - RNA, 14 nt, Human
gucuuuucuugcau

SEQ ID NO: 1818552 - RNA, 19 nt, Human
gucuuuucuugcaugaggc

SEQ ID NO: 1818553 - RNA, 18 nt, Human
gucuuuggacccugaggc

SEQ ID NO: 1818554 - RNA, 17 nt, Human
gucuuuggacccugagg

SEQ ID NO: 1818555 - RNA, 14 nt, Human
gucuuuggacccug

SEQ ID NO: 1818556 - RNA, 15 nt, Human
gucuuuggacccuga

SEQ ID NO: 1818557 - RNA, 15 nt, Human
gucuggcuucacaga

SEQ ID NO: 1818558 - RNA, 11 nt, Human
aaccugcucuc

SEQ ID NO: 1818559 - RNA, 15 nt, Human
aaccugcucuccucu

SEQ ID NO: 1818560 - RNA, 20 nt, Human
aaccugcucuccucuugcca

SEQ ID NO: 1818561 - RNA, 15 nt, Human
aacguggcugcuuca

SEQ ID NO: 1818562 - RNA, 22 nt, Human
aacguggcugcuucaaggaucc

SEQ ID NO: 1818563 - RNA, 16 nt, Human
aacguggcugcuucaa

SEQ ID NO: 1818564 - RNA, 19 nt, Human
aacguggcugcuucaagga

SEQ ID NO: 1818565 - RNA, 13 nt, Human
aacucccugcccc

SEQ ID NO: 1818566 - RNA, 19 nt, Human
aacucccugccccccagcc

SEQ ID NO: 1818567 - RNA, 19 nt, Human
gugaaccaccacacccagc

SEQ ID NO: 1818568 - RNA, 14 nt, Human
aacucccuuucaac

SEQ ID NO: 1818569 - RNA, 13 nt, Human
aacucccuuucaa

SEQ ID NO: 1818570 - RNA, 13 nt, Human
aacccaaauguuc

SEQ ID NO: 1818571 - RNA, 13 nt, Human
aacccagcucugg

SEQ ID NO: 1818572 - RNA, 14 nt, Human
aacccagcucuggu

SEQ ID NO: 1818573 - RNA, 11 nt, Human
aacccagcucu

SEQ ID NO: 1818574 - RNA, 18 nt, Human
aacccaaauguucaucaa

SEQ ID NO: 1818575 - RNA, 20 nt, Human
aacccauauuuguacaccaa

SEQ ID NO: 1818576 - RNA, 17 nt, Human
aacccagcucuggucca

SEQ ID NO: 1818577 - RNA, 15 nt, Human
aacccccagccugcu

SEQ ID NO: 1818578 - RNA, 14 nt, Human
aacccccagccugc

SEQ ID NO: 1818579 - RNA, 13 nt, Human
aacccccagccug

SEQ ID NO: 1818580 - RNA, 14 nt, Human
aaccuccugggcua

SEQ ID NO: 1818581 - RNA, 17 nt, Human
aaccuccgccucuuggg

SEQ ID NO: 1818582 - RNA, 18 nt, Human
aaccacaucuugcucugc

SEQ ID NO: 1818583 - RNA, 22 nt, Human
aaccacaucuugcucugcugac

SEQ ID NO: 1818584 - RNA, 20 nt, Human
aaccacaucuugcucugcug

SEQ ID NO: 1818585 - RNA, 19 nt, Human
aaccaucauugaaaucuuu

SEQ ID NO: 1818586 - RNA, 20 nt, Human
aaccaucauugaaaucuuuu

SEQ ID NO: 1818587 - RNA, 23 nt, Human
aaccaucauugaaaucuuuuugc

SEQ ID NO: 1818588 - RNA, 21 nt, Human
aaccaucauugaaaucuuuuu

SEQ ID NO: 1818589 - RNA, 16 nt, Human
gucucccucccuuggg

SEQ ID NO: 1818590 - RNA, 14 nt, Human
aaaugcauuucuaa

SEQ ID NO: 1818591 - RNA, 13 nt, Human
aaaugcccagccc

SEQ ID NO: 1818592 - RNA, 14 nt, Human
aaaugcccagcccc

SEQ ID NO: 1818593 - RNA, 15 nt, Human
aaaugcccagccccu

SEQ ID NO: 1818594 - RNA, 18 nt, Human
aaaugcccagccccuucu

SEQ ID NO: 1818595 - RNA, 13 nt, Human
aaaugcccagcuu

SEQ ID NO: 1818596 - RNA, 15 nt, Human
aaaugggcagagcag

SEQ ID NO: 1818597 - RNA, 18 nt, Human
aaaugggcagagcagaga

SEQ ID NO: 1818598 - RNA, 20 nt, Human
aaaugggcagagcagagacc

SEQ ID NO: 1818599 - RNA, 23 nt, Human
aaaugccuuacccucauguucuu

SEQ ID NO: 1818600 - RNA, 14 nt, Human
aaaugcaccuggaa

SEQ ID NO: 1818601 - RNA, 22 nt, Human
aaaugcaccuggaauauauaac

SEQ ID NO: 1818602 - RNA, 18 nt, Human
aaaugcaccuggaauaua

SEQ ID NO: 1818603 - RNA, 13 nt, Human
aaaugcauguugc

SEQ ID NO: 1818604 - RNA, 14 nt, Human
aaaugaaagugaga

SEQ ID NO: 1818605 - RNA, 22 nt, Human
aaaugaaagcagggacuugaac

SEQ ID NO: 1818606 - RNA, 21 nt, Human
aaaugaaagcagggacuugaa

SEQ ID NO: 1818607 - RNA, 11 nt, Human
aaaugagaaau

SEQ ID NO: 1818608 - RNA, 19 nt, Human
aaaugaggucagagccugc

SEQ ID NO: 1818609 - RNA, 17 nt, Human
aaaugaggucagagccu

SEQ ID NO: 1818610 - RNA, 16 nt, Human
aaaugagguacucucc

SEQ ID NO: 1818611 - RNA, 23 nt, Human
aaaugagguacucuccuggaaau

SEQ ID NO: 1818612 - RNA, 23 nt, Human
aaaugauccccagcuguuuaugc

SEQ ID NO: 1818613 - RNA, 13 nt, Human
aaaugagaaaucu

SEQ ID NO: 1818614 - RNA, 14 nt, Human
aaaugagaaaucua

SEQ ID NO: 1818615 - RNA, 16 nt, Human
aaaugagaaaucuaaa

SEQ ID NO: 1818616 - RNA, 13 nt, Human
aaaugagccuggc

SEQ ID NO: 1818617 - RNA, 19 nt, Human
aaaugagccuggcaagaau

SEQ ID NO: 1818618 - RNA, 18 nt, Human
guaggaagguuaauguuc

SEQ ID NO: 1818619 - RNA, 15 nt, Human
guaggacuguagaaa

SEQ ID NO: 1818620 - RNA, 15 nt, Human
guaggaagacuuugg

SEQ ID NO: 1818621 - RNA, 21 nt, Human
guagcugggacuacaggcacc

SEQ ID NO: 1818622 - RNA, 18 nt, Human
guagcugggauuacaggc

SEQ ID NO: 1818623 - RNA, 19 nt, Human
guagcugggacuacaggca

SEQ ID NO: 1818624 - RNA, 18 nt, Human
guagcugggacuacaggc

SEQ ID NO: 1818625 - RNA, 12 nt, Human
guagcugggacu

SEQ ID NO: 1818626 - RNA, 17 nt, Human
guagcuggauuacaggc

SEQ ID NO: 1818627 - RNA, 17 nt, Human
aaaggagagcuagcagc

SEQ ID NO: 1818628 - RNA, 13 nt, Human
aaaucgaugcagu

SEQ ID NO: 1818629 - RNA, 15 nt, Human
aaaucccauuuaaaa

SEQ ID NO: 1818630 - RNA, 18 nt, Human
aaaucccuuaccucggug

SEQ ID NO: 1818631 - RNA, 17 nt, Human
aaaugaaaaucgugaca

SEQ ID NO: 1818632 - RNA, 11 nt, Human
aaaugaaaauu

SEQ ID NO: 1818633 - RNA, 19 nt, Human
aaaucucaaauuucuaaau

SEQ ID NO: 1818634 - RNA, 17 nt, Human
aaaucucaaauuucuaa

SEQ ID NO: 1818635 - RNA, 16 nt, Human
aaaucucaaauuucua

SEQ ID NO: 1818636 - RNA, 15 nt, Human
aaaucucaaauuucu

SEQ ID NO: 1818637 - RNA, 19 nt, Human
aaaucuacacuccagugag

SEQ ID NO: 1818638 - RNA, 17 nt, Human
guauaaaagccuguuua

SEQ ID NO: 1818639 - RNA, 16 nt, Human
aaaugggggugcauuu

SEQ ID NO: 1818640 - RNA, 15 nt, Human
aaaugggggugcauu

SEQ ID NO: 1818641 - RNA, 18 nt, Human
aaaugggggugcauuuga

SEQ ID NO: 1818642 - RNA, 17 nt, Human
aaaugggggugcauuug

SEQ ID NO: 1818643 - RNA, 19 nt, Human
aaaugggggugcauuugag

SEQ ID NO: 1818644 - RNA, 22 nt, Human
guauauugauccagaaagaaaa

SEQ ID NO: 1818645 - RNA, 19 nt, Human
guaucaaauacauuuaaaa

SEQ ID NO: 1818646 - RNA, 18 nt, Human
guauaaaagggacugaga

SEQ ID NO: 1818647 - RNA, 18 nt, Human
guauaaaagccuguuuaa

SEQ ID NO: 1818648 - RNA, 21 nt, Human
guauaaaagccuguuuaagag

SEQ ID NO: 1818649 - RNA, 15 nt, Human
guauucuuauuuaau

SEQ ID NO: 1818650 - RNA, 13 nt, Human
guaugguggcugg

SEQ ID NO: 1818651 - RNA, 16 nt, Human
guaugggacuggccuc

SEQ ID NO: 1818652 - RNA, 15 nt, Human
guaugggagagaaga

SEQ ID NO: 1818653 - RNA, 15 nt, Human
guaucccuacuguaa

SEQ ID NO: 1818654 - RNA, 22 nt, Human
guaugaucacggcucacugcag

SEQ ID NO: 1818655 - RNA, 14 nt, Human
guaugggagagaag

SEQ ID NO: 1818656 - RNA, 17 nt, Human
aaauuucagcagcugca

SEQ ID NO: 1818657 - RNA, 18 nt, Human
aaauuucagcagcugcag

SEQ ID NO: 1818658 - RNA, 14 nt, Human
aaauuuccacucag

SEQ ID NO: 1818659 - RNA, 22 nt, Human
aaauuuccacucaggucuguuu

SEQ ID NO: 1818660 - RNA, 15 nt, Human
guauuuuuuuacuaa

SEQ ID NO: 1818661 - RNA, 14 nt, Human
guauuuuuuuacua

SEQ ID NO: 1818662 - RNA, 20 nt, Human
gucacacaguauuacuucug

SEQ ID NO: 1818663 - RNA, 16 nt, Human
gucacacacuuuggcu

SEQ ID NO: 1818664 - RNA, 21 nt, Human
guauuuuuuuacuaauagaca

SEQ ID NO: 1818665 - RNA, 17 nt, Human
guauuuuuuuacuaaua

SEQ ID NO: 1818666 - RNA, 19 nt, Human
gucaaaguggugagaggca

SEQ ID NO: 1818667 - RNA, 18 nt, Human
gucaaaguggugagaggc

SEQ ID NO: 1818668 - RNA, 22 nt, Human
guauuggcuagagguucaaaga

SEQ ID NO: 1818669 - RNA, 16 nt, Human
guauuuaauucauguu

SEQ ID NO: 1818670 - RNA, 23 nt, Human
aaauuaacuuuuauaaacuuuac

SEQ ID NO: 1818671 - RNA, 22 nt, Human
aaauuaacuuuuauaaacuuua

SEQ ID NO: 1818672 - RNA, 20 nt, Human
aaauguuaaguugaugguga

SEQ ID NO: 1818673 - RNA, 21 nt, Human
aaauuaacuuuuauaaacuuu

SEQ ID NO: 1818674 - RNA, 14 nt, Human
aaauucaugcugcu

SEQ ID NO: 1818675 - RNA, 22 nt, Human
cugcaaaggguaucaggugcug

SEQ ID NO: 1818676 - RNA, 21 nt, Human
cugcaaaggguaucaggugcu

SEQ ID NO: 1818677 - RNA, 18 nt, Human
cugcaaagcccagcuuga

SEQ ID NO: 1818678 - RNA, 23 nt, Human
cugaugggcaacccccagccugc

SEQ ID NO: 1818679 - RNA, 22 nt, Human
cugaugggcaacccccagccug

SEQ ID NO: 1818680 - RNA, 24 nt, Human
cugaugggcaacccccagccugcu

SEQ ID NO: 1818681 - RNA, 21 nt, Human
cugaugggcaacccccagccu

SEQ ID NO: 1818682 - RNA, 18 nt, Human
cugaugggcaacccccag

SEQ ID NO: 1818683 - RNA, 18 nt, Human
cugaugcuucuucagaga

SEQ ID NO: 1818684 - RNA, 19 nt, Human
cugaugcuucuucagagac

SEQ ID NO: 1818685 - RNA, 20 nt, Human
cugaugcuucuucagagacu

SEQ ID NO: 1818686 - RNA, 14 nt, Human
cucuuaugggcugg

SEQ ID NO: 1818687 - RNA, 15 nt, Human
cucuuaugggcuggg

SEQ ID NO: 1818688 - RNA, 16 nt, Human
cugaugcuucuucaga

SEQ ID NO: 1818689 - RNA, 17 nt, Human
cugaugcuucuucagag

SEQ ID NO: 1818690 - RNA, 23 nt, Human
cugcaccgggccacagagaaagu

SEQ ID NO: 1818691 - RNA, 12 nt, Human
cugcaagggagu

SEQ ID NO: 1818692 - RNA, 20 nt, Human
cugcaagaauugaagcagga

SEQ ID NO: 1818693 - RNA, 22 nt, Human
cugcaaccuccgccucuugggu

SEQ ID NO: 1818694 - RNA, 14 nt, Human
cugcaaccugauug

SEQ ID NO: 1818695 - RNA, 19 nt, Human
cugcaaccugauugugucu

SEQ ID NO: 1818696 - RNA, 21 nt, Human
cugcaaccugauugugucucu

SEQ ID NO: 1818697 - RNA, 20 nt, Human
cugcaaccuccgccucuugg

SEQ ID NO: 1818698 - RNA, 17 nt, Human
cugcaaccuucgccacc

SEQ ID NO: 1818699 - RNA, 19 nt, Human
cugcaaccuucgccaccug

SEQ ID NO: 1818700 - RNA, 20 nt, Human
cugcaaccuucgccaccugg

SEQ ID NO: 1818701 - RNA, 22 nt, Human
cugcaaccuucgccaccugggu

SEQ ID NO: 1818702 - RNA, 22 nt, Human
cugcaaccugauugugucucuu

SEQ ID NO: 1818703 - RNA, 14 nt, Human
cugcaacuucugcc

SEQ ID NO: 1818704 - RNA, 15 nt, Human
cugcaacuucugccu

SEQ ID NO: 1818705 - RNA, 18 nt, Human
cugcaacuuguaaaugug

SEQ ID NO: 1818706 - RNA, 19 nt, Human
cugcaacuuguaaaugugg

SEQ ID NO: 1818707 - RNA, 18 nt, Human
cugcaagaauugaagcag

SEQ ID NO: 1818708 - RNA, 23 nt, Human
cugcacuauagccuaggugacag

SEQ ID NO: 1818709 - RNA, 22 nt, Human
cugcacuauagccuaggugaca

SEQ ID NO: 1818710 - RNA, 13 nt, Human
cugcacuccagcc

SEQ ID NO: 1818711 - RNA, 15 nt, Human
cugcacuccagccug

SEQ ID NO: 1818712 - RNA, 16 nt, Human
cugcacuccagccuga

SEQ ID NO: 1818713 - RNA, 20 nt, Human
cugcacuccagccugagcga

SEQ ID NO: 1818714 - RNA, 17 nt, Human
cugcacuccagccugag

SEQ ID NO: 1818715 - RNA, 20 nt, Human
cugcacuauagccuagguga

SEQ ID NO: 1818716 - RNA, 18 nt, Human
cugcacuauagccuaggu

SEQ ID NO: 1818717 - RNA, 17 nt, Human
cugcacuauagccuagg

SEQ ID NO: 1818718 - RNA, 16 nt, Human
cugcacuauagccuag

SEQ ID NO: 1818719 - RNA, 23 nt, Human
cugcagccucaaccuccugggcu

SEQ ID NO: 1818720 - RNA, 19 nt, Human
cugcacuccagccugggug

SEQ ID NO: 1818721 - RNA, 24 nt, Human
cugcagccucaaccuccugggcua

SEQ ID NO: 1818722 - RNA, 18 nt, Human
cugcacuccagccugggu

SEQ ID NO: 1818723 - RNA, 16 nt, Human
cugcacuccagccugg

SEQ ID NO: 1818724 - RNA, 17 nt, Human
cugcacuccagccuggg

SEQ ID NO: 1818725 - RNA, 12 nt, Human
cugcagcuuugu

SEQ ID NO: 1818726 - RNA, 13 nt, Human
cugcaggcagcca

SEQ ID NO: 1818727 - RNA, 14 nt, Human
cugcaggcagccag

SEQ ID NO: 1818728 - RNA, 15 nt, Human
cugcaggcagccagg

SEQ ID NO: 1818729 - RNA, 16 nt, Human
cugcaggcagccaggc

SEQ ID NO: 1818730 - RNA, 17 nt, Human
cugcaggcagccaggcc

SEQ ID NO: 1818731 - RNA, 18 nt, Human
cugcaggcagccaggcca

SEQ ID NO: 1818732 - RNA, 19 nt, Human
cugcaggcagccaggccac

SEQ ID NO: 1818733 - RNA, 20 nt, Human
cugcaggcagccaggccaca

SEQ ID NO: 1818734 - RNA, 14 nt, Human
cugcauuuaaaaga

SEQ ID NO: 1818735 - RNA, 13 nt, Human
cugcauuggcuuu

SEQ ID NO: 1818736 - RNA, 23 nt, Human
cugccagggacagaggggguggc

SEQ ID NO: 1818737 - RNA, 18 nt, Human
cugcauuuaaaagauaca

SEQ ID NO: 1818738 - RNA, 17 nt, Human
cugcauuuaaaagauac

SEQ ID NO: 1818739 - RNA, 20 nt, Human
cugccagggacagagggggu

SEQ ID NO: 1818740 - RNA, 22 nt, Human
cugccagggacagagggggugg

SEQ ID NO: 1818741 - RNA, 22 nt, Human
cugccagucccccugccccagg

SEQ ID NO: 1818742 - RNA, 20 nt, Human
cugccagucccccugcccca

SEQ ID NO: 1818743 - RNA, 21 nt, Human
cugccagucccccugccccag

SEQ ID NO: 1818744 - RNA, 17 nt, Human
cugccagucccccugcc

SEQ ID NO: 1818745 - RNA, 13 nt, Human
cugccccccagcc

SEQ ID NO: 1818746 - RNA, 19 nt, Human
cugccauccagguucagcu

SEQ ID NO: 1818747 - RNA, 18 nt, Human
cugccauccagguucagc

SEQ ID NO: 1818748 - RNA, 16 nt, Human
cugccauccagguuca

SEQ ID NO: 1818749 - RNA, 16 nt, Human
cugccauauucuguug

SEQ ID NO: 1818750 - RNA, 19 nt, Human
cugccccuccucucugccc

SEQ ID NO: 1818751 - RNA, 12 nt, Human
cugcccuuaccu

SEQ ID NO: 1818752 - RNA, 16 nt, Human
cugcccuuaccugcca

SEQ ID NO: 1818753 - RNA, 17 nt, Human
cugcccuuaccugccag

SEQ ID NO: 1818754 - RNA, 13 nt, Human
cugccccucccuu

SEQ ID NO: 1818755 - RNA, 14 nt, Human
cugccccucccuuc

SEQ ID NO: 1818756 - RNA, 17 nt, Human
cugccccucccuucaac

SEQ ID NO: 1818757 - RNA, 17 nt, Human
cugccccuccucucugc

SEQ ID NO: 1818758 - RNA, 18 nt, Human
cugccccuccucucugcc

SEQ ID NO: 1818759 - RNA, 19 nt, Human
cugcccugugggcccccaa

SEQ ID NO: 1818760 - RNA, 12 nt, Human
cugcugacagug

SEQ ID NO: 1818761 - RNA, 15 nt, Human
cugcugaaggcucga

SEQ ID NO: 1818762 - RNA, 13 nt, Human
cugcugaaggcuc

SEQ ID NO: 1818763 - RNA, 14 nt, Human
cugcugaaggcucg

SEQ ID NO: 1818764 - RNA, 15 nt, Human
cugcugacaguguug

SEQ ID NO: 1818765 - RNA, 13 nt, Human
cugcugacagugu

SEQ ID NO: 1818766 - RNA, 19 nt, Human
cugcugagucccaggcuga

SEQ ID NO: 1818767 - RNA, 23 nt, Human
cugcugagucccaggcugagccu

SEQ ID NO: 1818768 - RNA, 19 nt, Human
cugcucacauaucugucau

SEQ ID NO: 1818769 - RNA, 16 nt, Human
cugcucacauaucugu

SEQ ID NO: 1818770 - RNA, 12 nt, Human
cugcugaaggcu

SEQ ID NO: 1818771 - RNA, 14 nt, Human
cugcucacauaucu

SEQ ID NO: 1818772 - RNA, 20 nt, Human
cugcuuaacuucacauauug

SEQ ID NO: 1818773 - RNA, 15 nt, Human
cuggaugcagccuca

SEQ ID NO: 1818774 - RNA, 22 nt, Human
cuggaugcagccucacaguccu

SEQ ID NO: 1818775 - RNA, 19 nt, Human
cuggacugugugcucagga

SEQ ID NO: 1818776 - RNA, 22 nt, Human
cuggacugugugcucaggagcc

SEQ ID NO: 1818777 - RNA, 23 nt, Human
cuggacugugugcucaggagccc

SEQ ID NO: 1818778 - RNA, 16 nt, Human
cuggaguucugguucc

SEQ ID NO: 1818779 - RNA, 17 nt, Human
cuggaguucugguuccu

SEQ ID NO: 1818780 - RNA, 15 nt, Human
cuggaguucugguuc

SEQ ID NO: 1818781 - RNA, 16 nt, Human
cugggacuacaggcac

SEQ ID NO: 1818782 - RNA, 15 nt, Human
cugggacuacaggca

SEQ ID NO: 1818783 - RNA, 13 nt, Human
cugggacuacagg

SEQ ID NO: 1818784 - RNA, 16 nt, Human
cugggagaaaugaaaa

SEQ ID NO: 1818785 - RNA, 17 nt, Human
cugggagaaaugaaaaa

SEQ ID NO: 1818786 - RNA, 22 nt, Human
cugggagaaccaaaaagaggcu

SEQ ID NO: 1818787 - RNA, 14 nt, Human
cugggacaugggaa

SEQ ID NO: 1818788 - RNA, 18 nt, Human
cugggacaugggaaaggg

SEQ ID NO: 1818789 - RNA, 22 nt, Human
cugggacaugggaaaggggaag

SEQ ID NO: 1818790 - RNA, 12 nt, Human
cuggcccuuccu

SEQ ID NO: 1818791 - RNA, 14 nt, Human
cuggcuaugcauuu

SEQ ID NO: 1818792 - RNA, 13 nt, Human
cuggcuaugcauu

SEQ ID NO: 1818793 - RNA, 16 nt, Human
cuggcuaugcauuuga

SEQ ID NO: 1818794 - RNA, 15 nt, Human
cuggcuaugcauuug

SEQ ID NO: 1818795 - RNA, 22 nt, Human
cuggcuaugcauuugaaaauuu

SEQ ID NO: 1818796 - RNA, 14 nt, Human
cuggggagaaagua

SEQ ID NO: 1818797 - RNA, 13 nt, Human
cuggggagaaagu

SEQ ID NO: 1818798 - RNA, 18 nt, Human
cuggguggcaccagcagc

SEQ ID NO: 1818799 - RNA, 20 nt, Human
cuggguggcaccagcagccu

SEQ ID NO: 1818800 - RNA, 20 nt, Human
cugggcagguuggugggggc

SEQ ID NO: 1818801 - RNA, 12 nt, Human
cugggcagagga

SEQ ID NO: 1818802 - RNA, 13 nt, Human
cugggcagaggaa

SEQ ID NO: 1818803 - RNA, 16 nt, Human
cugggcagaggaaagc

SEQ ID NO: 1818804 - RNA, 20 nt, Human
cugggcagaggaaagcaaag

SEQ ID NO: 1818805 - RNA, 21 nt, Human
cuggugccucaccccuugcca

SEQ ID NO: 1818806 - RNA, 15 nt, Human
cuggguguggcgcag

SEQ ID NO: 1818807 - RNA, 14 nt, Human
cuggguguggcgca

SEQ ID NO: 1818808 - RNA, 21 nt, Human
cuggguggcaccagcagccug

SEQ ID NO: 1818809 - RNA, 12 nt, Human
cuugacagggca

SEQ ID NO: 1818810 - RNA, 20 nt, Human
cuugccgucuaccugagggg

SEQ ID NO: 1818811 - RNA, 23 nt, Human
cuugccgucuaccugaggggccu

SEQ ID NO: 1818812 - RNA, 23 nt, Human
cuugaaugaugccaugaggaaca

SEQ ID NO: 1818813 - RNA, 12 nt, Human
cuugcucugcug

SEQ ID NO: 1818814 - RNA, 13 nt, Human
cuugcucugcuga

SEQ ID NO: 1818815 - RNA, 20 nt, Human
cuugaaugaugccaugagga

SEQ ID NO: 1818816 - RNA, 20 nt, Human
cuucuucagagacuccugca

SEQ ID NO: 1818817 - RNA, 21 nt, Human
cuucuucagagacuccugcag

SEQ ID NO: 1818818 - RNA, 22 nt, Human
cuucuucagagacuccugcagg

SEQ ID NO: 1818819 - RNA, 16 nt, Human
cuuugagcuuaagaau

SEQ ID NO: 1818820 - RNA, 19 nt, Human
cuuugacgccaucccagcc

SEQ ID NO: 1818821 - RNA, 21 nt, Human
cuuugacgccaucccagcccc

SEQ ID NO: 1818822 - RNA, 22 nt, Human
cuuugacgccaucccagcccca

SEQ ID NO: 1818823 - RNA, 22 nt, Human
cuuucggggagaggcugaggac

SEQ ID NO: 1818824 - RNA, 17 nt, Human
cuuucuaaugugugaau

SEQ ID NO: 1818825 - RNA, 15 nt, Human
cuuuucaaaacauuu

SEQ ID NO: 1818826 - RNA, 15 nt, Human
cuuuggugaacauug

SEQ ID NO: 1818827 - RNA, 20 nt, Human
cuuuggucuacacugugcug

SEQ ID NO: 1818828 - RNA, 16 nt, Human
cuuuggucuacacugu

SEQ ID NO: 1818829 - RNA, 16 nt, Human
cuuuuaggccaaaaaa

SEQ ID NO: 1818830 - RNA, 18 nt, Human
cuuuuaggccaaaaaaau

SEQ ID NO: 1818831 - RNA, 15 nt, Human
cuuuuauaaacuuua

SEQ ID NO: 1818832 - RNA, 18 nt, Human
cuuuuauaaacuuuaccu

SEQ ID NO: 1818833 - RNA, 16 nt, Human
cuuuuauaaacuuuac

SEQ ID NO: 1818834 - RNA, 19 nt, Human
cuuuuauaaacuuuaccuu

SEQ ID NO: 1818835 - RNA, 19 nt, Human
cuuuuauuuagcaccaggg

SEQ ID NO: 1818836 - RNA, 20 nt, Human
cuuucaauaggaaaaacuga

SEQ ID NO: 1818837 - RNA, 21 nt, Human
cuuucaauaggaaaaacugau

SEQ ID NO: 1818838 - RNA, 22 nt, Human
cuuucaauaggaaaaacugauu

SEQ ID NO: 1818839 - RNA, 13 nt, Human
cuuguggacacag

SEQ ID NO: 1818840 - RNA, 15 nt, Human
cuuguggacacagcu

SEQ ID NO: 1818841 - RNA, 14 nt, Human
cuuguggacacagc

SEQ ID NO: 1818842 - RNA, 16 nt, Human
cuuguggacacagcuc

SEQ ID NO: 1818843 - RNA, 14 nt, Human
cugugucuugcaau

SEQ ID NO: 1818844 - RNA, 14 nt, Human
cugugucucccuuc

SEQ ID NO: 1818845 - RNA, 19 nt, Human
cugugucucccuucauccu

SEQ ID NO: 1818846 - RNA, 19 nt, Human
cugugucagguggggcagc

SEQ ID NO: 1818847 - RNA, 20 nt, Human
cugugucagcauagaaguaa

SEQ ID NO: 1818848 - RNA, 21 nt, Human
cugugucagguggggcagcuu

SEQ ID NO: 1818849 - RNA, 11 nt, Human
cugugcugccc

SEQ ID NO: 1818850 - RNA, 20 nt, Human
cugugcugagucugaaggcu

SEQ ID NO: 1818851 - RNA, 22 nt, Human
cugugcugagucugaaggcugg

SEQ ID NO: 1818852 - RNA, 22 nt, Human
cugugacuucagcucuguuuua

SEQ ID NO: 1818853 - RNA, 17 nt, Human
cugugacuucagcucug

SEQ ID NO: 1818854 - RNA, 19 nt, Human
cugugucuugcaauggcag

SEQ ID NO: 1818855 - RNA, 16 nt, Human
cugugucuugcaaugg

SEQ ID NO: 1818856 - RNA, 20 nt, Human
cugugucuugcaauggcagc

SEQ ID NO: 1818857 - RNA, 15 nt, Human
cuguucacucuacuu

SEQ ID NO: 1818858 - RNA, 14 nt, Human
cuguucagcuccag

SEQ ID NO: 1818859 - RNA, 13 nt, Human
cuguucagcucca

SEQ ID NO: 1818860 - RNA, 19 nt, Human
cuuaccucggugccuuccu

SEQ ID NO: 1818861 - RNA, 21 nt, Human
cuuaccucggugccuuccucu

SEQ ID NO: 1818862 - RNA, 13 nt, Human
cuuaccugccagg

SEQ ID NO: 1818863 - RNA, 13 nt, Human
cuuaccucggugc

SEQ ID NO: 1818864 - RNA, 19 nt, Human
cuuacccucauguucuuaa

SEQ ID NO: 1818865 - RNA, 18 nt, Human
cuuacccucauguucuua

SEQ ID NO: 1818866 - RNA, 17 nt, Human
cuuacccucauguucuu

SEQ ID NO: 1818867 - RNA, 13 nt, Human
cuuacacaauggu

SEQ ID NO: 1818868 - RNA, 18 nt, Human
cuuaaaauauuccugcau

SEQ ID NO: 1818869 - RNA, 20 nt, Human
cuuaaaauauuccugcauuu

SEQ ID NO: 1818870 - RNA, 16 nt, Human
cuguugggccaggagc

SEQ ID NO: 1818871 - RNA, 17 nt, Human
cuguugggccaggagcc

SEQ ID NO: 1818872 - RNA, 20 nt, Human
cuguugggccaggagccucc

SEQ ID NO: 1818873 - RNA, 14 nt, Human
cuguugcugccuca

SEQ ID NO: 1818874 - RNA, 15 nt, Human
cuguugcugccucau

SEQ ID NO: 1818875 - RNA, 16 nt, Human
cuguugcugccucaug

SEQ ID NO: 1818876 - RNA, 17 nt, Human
cuguugcugccucaugc

SEQ ID NO: 1818877 - RNA, 21 nt, Human
cuuagcagggaaacagcuaau

SEQ ID NO: 1818878 - RNA, 18 nt, Human
cuuagcagggaaacagcu

SEQ ID NO: 1818879 - RNA, 13 nt, Human
cuuauugcccacg

SEQ ID NO: 1818880 - RNA, 12 nt, Human
cuuauugcccac

SEQ ID NO: 1818881 - RNA, 22 nt, Human
cuuaugggcuggguucuaccca

SEQ ID NO: 1818882 - RNA, 23 nt, Human
cuuaugggcuggguucuacccag

SEQ ID NO: 1818883 - RNA, 14 nt, Human
cuuaugggcugggu

SEQ ID NO: 1818884 - RNA, 21 nt, Human
cuuaugggcuggguucuaccc

SEQ ID NO: 1818885 - RNA, 17 nt, Human
cuucaccuuugucccca

SEQ ID NO: 1818886 - RNA, 20 nt, Human
cuucaccuuuguccccaccg

SEQ ID NO: 1818887 - RNA, 18 nt, Human
cuuauugcccacgcugga

SEQ ID NO: 1818888 - RNA, 14 nt, Human
cuucaccuuugucc

SEQ ID NO: 1818889 - RNA, 16 nt, Human
cuucagagacuccugc

SEQ ID NO: 1818890 - RNA, 21 nt, Human
cuucagagacuccugcaggca

SEQ ID NO: 1818891 - RNA, 22 nt, Human
cuucagagacuccugcaggcag

SEQ ID NO: 1818892 - RNA, 11 nt, Human
cuucagacaua

SEQ ID NO: 1818893 - RNA, 22 nt, Human
cuucaucucccaaagugcuggg

SEQ ID NO: 1818894 - RNA, 16 nt, Human
cuucauccuccucaga

SEQ ID NO: 1818895 - RNA, 18 nt, Human
cuucaguggcagcugcuu

SEQ ID NO: 1818896 - RNA, 17 nt, Human
cuucaguuaagccuuug

SEQ ID NO: 1818897 - RNA, 23 nt, Human
cuucagagacuccugcaggcagc

SEQ ID NO: 1818898 - RNA, 24 nt, Human
cuucagagacuccugcaggcagcc

SEQ ID NO: 1818899 - RNA, 18 nt, Human
cuucaguuaagccuuugg

SEQ ID NO: 1818900 - RNA, 13 nt, Human
cuucaucccucug

SEQ ID NO: 1818901 - RNA, 15 nt, Human
cuucauccuccucag

SEQ ID NO: 1818902 - RNA, 15 nt, Human
cuuccaugucgccuc

SEQ ID NO: 1818903 - RNA, 16 nt, Human
cuuccaugucgccucu

SEQ ID NO: 1818904 - RNA, 16 nt, Human
cuuccauggacuuugu

SEQ ID NO: 1818905 - RNA, 17 nt, Human
cuuccauggacuuuguu

SEQ ID NO: 1818906 - RNA, 18 nt, Human
cuuccagugaggcucugc

SEQ ID NO: 1818907 - RNA, 17 nt, Human
cuuccagugaggcucug

SEQ ID NO: 1818908 - RNA, 19 nt, Human
cuuccagugaggcucugcc

SEQ ID NO: 1818909 - RNA, 20 nt, Human
cuuccagugaggcucugccc

SEQ ID NO: 1818910 - RNA, 17 nt, Human
cuuccaugucgccucug

SEQ ID NO: 1818911 - RNA, 18 nt, Human
cuuccaugucgccucugc

SEQ ID NO: 1818912 - RNA, 19 nt, Human
cuuccaugucgccucugca

SEQ ID NO: 1818913 - RNA, 20 nt, Human
cuuccaugucgccucugcau

SEQ ID NO: 1818914 - RNA, 20 nt, Human
gaccaucccugaaggccccg

SEQ ID NO: 1818915 - RNA, 14 nt, Human
gaccucugcagcaa

SEQ ID NO: 1818916 - RNA, 11 nt, Human
gaccugaggcc

SEQ ID NO: 1818917 - RNA, 13 nt, Human
gaccugaggcccu

SEQ ID NO: 1818918 - RNA, 14 nt, Human
gaccugaggcccuu

SEQ ID NO: 1818919 - RNA, 16 nt, Human
gacgccaucccagccc

SEQ ID NO: 1818920 - RNA, 19 nt, Human
gacgccaucccagccccaa

SEQ ID NO: 1818921 - RNA, 17 nt, Human
gacgccaucccagcccc

SEQ ID NO: 1818922 - RNA, 18 nt, Human
gacgccaucccagcccca

SEQ ID NO: 1818923 - RNA, 16 nt, Human
gacgcuacccgggaag

SEQ ID NO: 1818924 - RNA, 18 nt, Human
gacgcuacccgggaaggg

SEQ ID NO: 1818925 - RNA, 19 nt, Human
gacgcuacccgggaagggg

SEQ ID NO: 1818926 - RNA, 15 nt, Human
gacgcucucuggccu

SEQ ID NO: 1818927 - RNA, 17 nt, Human
gacgcucucuggccuuc

SEQ ID NO: 1818928 - RNA, 16 nt, Human
gacgcucucuggccuu

SEQ ID NO: 1818929 - RNA, 22 nt, Human
gacugugugcucaggagcccug

SEQ ID NO: 1818930 - RNA, 11 nt, Human
gacuguagaaa

SEQ ID NO: 1818931 - RNA, 18 nt, Human
gacuguacuccucccagg

SEQ ID NO: 1818932 - RNA, 23 nt, Human
gacuguacuccucccaggcgccc

SEQ ID NO: 1818933 - RNA, 16 nt, Human
gacugaauuucuuuug

SEQ ID NO: 1818934 - RNA, 14 nt, Human
gacugaauuucuuu

SEQ ID NO: 1818935 - RNA, 19 nt, Human
gacucugucucaaaaaaac

SEQ ID NO: 1818936 - RNA, 12 nt, Human
gacucugccucc

SEQ ID NO: 1818937 - RNA, 16 nt, Human
gacucugccuccucuu

SEQ ID NO: 1818938 - RNA, 15 nt, Human
gacucaccuccccca

SEQ ID NO: 1818939 - RNA, 22 nt, Human
gacucaccucccccaucucuuc

SEQ ID NO: 1818940 - RNA, 12 nt, Human
gacacaggcccg

SEQ ID NO: 1818941 - RNA, 23 nt, Human
gacacagcucuucuccaggcugu

SEQ ID NO: 1818942 - RNA, 22 nt, Human
gacacagcucuucuccaggcug

SEQ ID NO: 1818943 - RNA, 17 nt, Human
gacacagcucuucucca

SEQ ID NO: 1818944 - RNA, 13 nt, Human
gacacagcucuuc

SEQ ID NO: 1818945 - RNA, 16 nt, Human
gacacagcucuucucc

SEQ ID NO: 1818946 - RNA, 14 nt, Human
gacacagcucuucu

SEQ ID NO: 1818947 - RNA, 15 nt, Human
gacagaagcagcucu

SEQ ID NO: 1818948 - RNA, 17 nt, Human
gacagcccgggcucugc

SEQ ID NO: 1818949 - RNA, 21 nt, Human
gacagaaagcagaacagugau

SEQ ID NO: 1818950 - RNA, 15 nt, Human
gacauugcggacagc

SEQ ID NO: 1818951 - RNA, 14 nt, Human
gacauugcggacag

SEQ ID NO: 1818952 - RNA, 21 nt, Human
gacagugagacucugucucag

SEQ ID NO: 1818953 - RNA, 16 nt, Human
gacagaagcagcucuu

SEQ ID NO: 1818954 - RNA, 20 nt, Human
gacagcccgggcucugccuc

SEQ ID NO: 1818955 - RNA, 18 nt, Human
gacagcccgggcucugcc

SEQ ID NO: 1818956 - RNA, 19 nt, Human
gacagcccgggcucugccu

SEQ ID NO: 1818957 - RNA, 19 nt, Human
gacauuguuggccaaagcc

SEQ ID NO: 1818958 - RNA, 18 nt, Human
gaccagggauuuccauga

SEQ ID NO: 1818959 - RNA, 13 nt, Human
gaccauacuaauu

SEQ ID NO: 1818960 - RNA, 20 nt, Human
gaccagggauuuccaugaug

SEQ ID NO: 1818961 - RNA, 12 nt, Human
gaccaucccuga

SEQ ID NO: 1818962 - RNA, 13 nt, Human
gaccaucccugaa

SEQ ID NO: 1818963 - RNA, 18 nt, Human
gaccaucccugaaggccc

SEQ ID NO: 1818964 - RNA, 19 nt, Human
gaccaucccugaaggcccc

SEQ ID NO: 1818965 - RNA, 22 nt, Human
gaaggggagauaaggguaucug

SEQ ID NO: 1818966 - RNA, 18 nt, Human
gaaguuuaauugacuuau

SEQ ID NO: 1818967 - RNA, 14 nt, Human
gaauauugcugaug

SEQ ID NO: 1818968 - RNA, 15 nt, Human
gaauauugcugaugg

SEQ ID NO: 1818969 - RNA, 20 nt, Human
gaauauuagugaccucagcu

SEQ ID NO: 1818970 - RNA, 19 nt, Human
gaauauugcugauggugca

SEQ ID NO: 1818971 - RNA, 20 nt, Human
gaauauugcugauggugcaa

SEQ ID NO: 1818972 - RNA, 15 nt, Human
gaaggcuggguucug

SEQ ID NO: 1818973 - RNA, 19 nt, Human
gaaggcuggguucugaucc

SEQ ID NO: 1818974 - RNA, 21 nt, Human
gaaggcucgagcaugccugga

SEQ ID NO: 1818975 - RNA, 18 nt, Human
gaaggccccgcccaggcu

SEQ ID NO: 1818976 - RNA, 19 nt, Human
gaaggccccgcccaggcuu

SEQ ID NO: 1818977 - RNA, 20 nt, Human
gaaggcuggguucugauccu

SEQ ID NO: 1818978 - RNA, 22 nt, Human
gaaggcuggguucugauccuag

SEQ ID NO: 1818979 - RNA, 21 nt, Human
gaagggcuuggacucaagcaa

SEQ ID NO: 1818980 - RNA, 22 nt, Human
gaagcuccgcuuucuacccagc

SEQ ID NO: 1818981 - RNA, 17 nt, Human
gaaggccccgcccaggc

SEQ ID NO: 1818982 - RNA, 19 nt, Human
gaagcuccgcuuucuaccc

SEQ ID NO: 1818983 - RNA, 20 nt, Human
gaagcuaucguaaaauuaag

SEQ ID NO: 1818984 - RNA, 12 nt, Human
gaacuggcugca

SEQ ID NO: 1818985 - RNA, 11 nt, Human
gaacuggcugc

SEQ ID NO: 1818986 - RNA, 20 nt, Human
gaacucugacaacagacuuc

SEQ ID NO: 1818987 - RNA, 21 nt, Human
gaagcacaugccucucucagg

SEQ ID NO: 1818988 - RNA, 15 nt, Human
gaagcagaggaagga

SEQ ID NO: 1818989 - RNA, 15 nt, Human
gaagcacaugccucu

SEQ ID NO: 1818990 - RNA, 17 nt, Human
gaagcacaugccucucu

SEQ ID NO: 1818991 - RNA, 20 nt, Human
gaagcacaugccucucucag

SEQ ID NO: 1818992 - RNA, 20 nt, Human
gaagcaaugcuucaucccuu

SEQ ID NO: 1818993 - RNA, 23 nt, Human
gaagcaacccaaauguucaucaa

SEQ ID NO: 1818994 - RNA, 22 nt, Human
gaagacaaugacuuacuguaca

SEQ ID NO: 1818995 - RNA, 23 nt, Human
gaagacaaugugaaaagaaaaau

SEQ ID NO: 1818996 - RNA, 16 nt, Human
gaagacaaugacuuac

SEQ ID NO: 1818997 - RNA, 12 nt, Human
gaggggccucuu

SEQ ID NO: 1818998 - RNA, 15 nt, Human
gaggcagggucucac

SEQ ID NO: 1818999 - RNA, 17 nt, Human
gaggccaaggugggagg

SEQ ID NO: 1819000 - RNA, 22 nt, Human
gaggccaaggugggaggauugc

SEQ ID NO: 1819001 - RNA, 14 nt, Human
gaggcagggucuca

SEQ ID NO: 1819002 - RNA, 15 nt, Human
gaggacgcucucugg

SEQ ID NO: 1819003 - RNA, 17 nt, Human
gaggcaucgcaauguaa

SEQ ID NO: 1819004 - RNA, 13 nt, Human
gaggccagagaca

SEQ ID NO: 1819005 - RNA, 14 nt, Human
gaggccagagacac

SEQ ID NO: 1819006 - RNA, 19 nt, Human
gaggccagagacacaagcc

SEQ ID NO: 1819007 - RNA, 22 nt, Human
gaggcuagugugguguuuccug

SEQ ID NO: 1819008 - RNA, 23 nt, Human
gaggcuccacuuggucugugaga

SEQ ID NO: 1819009 - RNA, 12 nt, Human
gaggcuccacuu

SEQ ID NO: 1819010 - RNA, 18 nt, Human
gaggcuacuguaaggcaa

SEQ ID NO: 1819011 - RNA, 14 nt, Human
gaggcucagauugu

SEQ ID NO: 1819012 - RNA, 19 nt, Human
gaggcuccacuuggucugu

SEQ ID NO: 1819013 - RNA, 20 nt, Human
gagccuuccaggggugggac

SEQ ID NO: 1819014 - RNA, 21 nt, Human
gagcgcccacuagacccacug

SEQ ID NO: 1819015 - RNA, 13 nt, Human
gagccuugaacuu

SEQ ID NO: 1819016 - RNA, 23 nt, Human
gagccuuccaggggugggacacc

SEQ ID NO: 1819017 - RNA, 19 nt, Human
gagccuugaacuuugaccu

SEQ ID NO: 1819018 - RNA, 20 nt, Human
gagugacagaggcagcccca

SEQ ID NO: 1819019 - RNA, 19 nt, Human
gagugcaaugacacagucu

SEQ ID NO: 1819020 - RNA, 15 nt, Human
gaguugauucagcuc

SEQ ID NO: 1819021 - RNA, 16 nt, Human
gaguugauucagcucu

SEQ ID NO: 1819022 - RNA, 17 nt, Human
gaguugauucagcucug

SEQ ID NO: 1819023 - RNA, 18 nt, Human
gagugacagaggcagccc

SEQ ID NO: 1819024 - RNA, 13 nt, Human
gagucccaccuug

SEQ ID NO: 1819025 - RNA, 12 nt, Human
gagucccaccuu

SEQ ID NO: 1819026 - RNA, 22 nt, Human
gagucagaaguuucugccgcag

SEQ ID NO: 1819027 - RNA, 16 nt, Human
gagucaccaagcccag

SEQ ID NO: 1819028 - RNA, 17 nt, Human
gagucaccaagcccagu

SEQ ID NO: 1819029 - RNA, 23 nt, Human
gaggugaccccagguuucuaugu

SEQ ID NO: 1819030 - RNA, 15 nt, Human
gaggucgaggcagga

SEQ ID NO: 1819031 - RNA, 16 nt, Human
gaguuuaaauuguaau

SEQ ID NO: 1819032 - RNA, 18 nt, Human
gaguugauucagcucugc

SEQ ID NO: 1819033 - RNA, 22 nt, Human
gaguuguuacauuuuuaagugc

SEQ ID NO: 1819034 - RNA, 18 nt, Human
gauguaaaagacuuuuuu

SEQ ID NO: 1819035 - RNA, 12 nt, Human
gauguaaagaug

SEQ ID NO: 1819036 - RNA, 18 nt, Human
gauguagaggagaaacug

SEQ ID NO: 1819037 - RNA, 17 nt, Human
gauguagaggagaaacu

SEQ ID NO: 1819038 - RNA, 16 nt, Human
gaugagugagcaugcc

SEQ ID NO: 1819039 - RNA, 15 nt, Human
gaugaucuaggaaga

SEQ ID NO: 1819040 - RNA, 21 nt, Human
gaugaucuaggaagacuuugg

SEQ ID NO: 1819041 - RNA, 12 nt, Human
gauuauuggaaa

SEQ ID NO: 1819042 - RNA, 21 nt, Human
gauguauguugaagccuuugu

SEQ ID NO: 1819043 - RNA, 20 nt, Human
gauguauguugaagccuuug

SEQ ID NO: 1819044 - RNA, 14 nt, Human
gauuauauuaugaa

SEQ ID NO: 1819045 - RNA, 20 nt, Human
gauuauaggcaccuaccacc

SEQ ID NO: 1819046 - RNA, 12 nt, Human
gauucuucugcu

SEQ ID NO: 1819047 - RNA, 17 nt, Human
gauucuuccucccuccc

SEQ ID NO: 1819048 - RNA, 18 nt, Human
gauucuuccucccucccu

SEQ ID NO: 1819049 - RNA, 20 nt, Human
gauuuuuuacagcugccugc

SEQ ID NO: 1819050 - RNA, 17 nt, Human
gauucuccugccucagc

SEQ ID NO: 1819051 - RNA, 15 nt, Human
gauucuccugccuca

SEQ ID NO: 1819052 - RNA, 18 nt, Human
gauucuccugccucagcc

SEQ ID NO: 1819053 - RNA, 17 nt, Human
gcacucagaagacacug

SEQ ID NO: 1819054 - RNA, 17 nt, Human
gcacuccccugcugggu

SEQ ID NO: 1819055 - RNA, 16 nt, Human
gcacucagaagacacu

SEQ ID NO: 1819056 - RNA, 13 nt, Human
gcacucagaagac

SEQ ID NO: 1819057 - RNA, 22 nt, Human
gcacuccccugcuggguguggc

SEQ ID NO: 1819058 - RNA, 14 nt, Human
gcaccgggccacag

SEQ ID NO: 1819059 - RNA, 23 nt, Human
gcacaucagcacgauuucuguuu

SEQ ID NO: 1819060 - RNA, 22 nt, Human
gcacaucagcacgauuucuguu

SEQ ID NO: 1819061 - RNA, 23 nt, Human
gcaccgggccacagagaaaguac

SEQ ID NO: 1819062 - RNA, 22 nt, Human
gcaccuaccaccacgcccggcu

SEQ ID NO: 1819063 - RNA, 21 nt, Human
gcaccuaccaccacgcccggc

SEQ ID NO: 1819064 - RNA, 14 nt, Human
gcacaccgggcacu

SEQ ID NO: 1819065 - RNA, 14 nt, Human
gcacacauuuuuua

SEQ ID NO: 1819066 - RNA, 22 nt, Human
gcacaagcugcacccucaggca

SEQ ID NO: 1819067 - RNA, 20 nt, Human
gcacaccgggcacucagaag

SEQ ID NO: 1819068 - RNA, 19 nt, Human
gcacagugcaucucagccc

SEQ ID NO: 1819069 - RNA, 20 nt, Human
gcacagugcaucucagccca

SEQ ID NO: 1819070 - RNA, 21 nt, Human
gcacagugcaucucagcccac

SEQ ID NO: 1819071 - RNA, 18 nt, Human
gcaagucagaauagaaau

SEQ ID NO: 1819072 - RNA, 16 nt, Human
gccgccaugcuccugg

SEQ ID NO: 1819073 - RNA, 16 nt, Human
gcccuuaccugccagg

SEQ ID NO: 1819074 - RNA, 20 nt, Human
gcccuuaccugccaggaagc

SEQ ID NO: 1819075 - RNA, 15 nt, Human
gccgccaugcuccug

SEQ ID NO: 1819076 - RNA, 23 nt, Human
gcccugcugagucccaggcugag

SEQ ID NO: 1819077 - RNA, 21 nt, Human
gcccugcugagucccaggcug

SEQ ID NO: 1819078 - RNA, 22 nt, Human
gcccugcugagucccaggcuga

SEQ ID NO: 1819079 - RNA, 16 nt, Human
gcccugcugaguccca

SEQ ID NO: 1819080 - RNA, 16 nt, Human
gcccugccuccuuugu

SEQ ID NO: 1819081 - RNA, 22 nt, Human
gcccugccuccuuugugaggaa

SEQ ID NO: 1819082 - RNA, 19 nt, Human
gcccacucccugcaaccug

SEQ ID NO: 1819083 - RNA, 14 nt, Human
gcccacucccugca

SEQ ID NO: 1819084 - RNA, 15 nt, Human
gcccacucccugcaa

SEQ ID NO: 1819085 - RNA, 17 nt, Human
gcccacuagacccacug

SEQ ID NO: 1819086 - RNA, 23 nt, Human
gcccacuagacccacuggacuca

SEQ ID NO: 1819087 - RNA, 13 nt, Human
gcccacucccugc

SEQ ID NO: 1819088 - RNA, 18 nt, Human
gccccaaaacucuccucu

SEQ ID NO: 1819089 - RNA, 19 nt, Human
gccccaaaacucuccucug

SEQ ID NO: 1819090 - RNA, 14 nt, Human
gccccugcccggcu

SEQ ID NO: 1819091 - RNA, 13 nt, Human
gccccugcccggc

SEQ ID NO: 1819092 - RNA, 14 nt, Human
gcccccucugcccu

SEQ ID NO: 1819093 - RNA, 15 nt, Human
gccccugcccggcug

SEQ ID NO: 1819094 - RNA, 16 nt, Human
gccccuggaugcagcc

SEQ ID NO: 1819095 - RNA, 18 nt, Human
gccccuggaugcagccuc

SEQ ID NO: 1819096 - RNA, 22 nt, Human
gccccuggaugcagccucacag

SEQ ID NO: 1819097 - RNA, 22 nt, Human
gcccuaaaguguauuuuuuuac

SEQ ID NO: 1819098 - RNA, 20 nt, Human
gccugcccaggccccugcca

SEQ ID NO: 1819099 - RNA, 19 nt, Human
gccugcccaggccccugcc

SEQ ID NO: 1819100 - RNA, 18 nt, Human
gccugcccaggccccugc

SEQ ID NO: 1819101 - RNA, 17 nt, Human
gccugcccaggccccug

SEQ ID NO: 1819102 - RNA, 12 nt, Human
gccucuucucua

SEQ ID NO: 1819103 - RNA, 23 nt, Human
gccucuucucuacucuagggaaa

SEQ ID NO: 1819104 - RNA, 22 nt, Human
gccucuuccucccucauuccac

SEQ ID NO: 1819105 - RNA, 12 nt, Human
gccucuuccucc

SEQ ID NO: 1819106 - RNA, 13 nt, Human
gccuccugugugu

SEQ ID NO: 1819107 - RNA, 14 nt, Human
gccucugggacugg

SEQ ID NO: 1819108 - RNA, 12 nt, Human
gccucugggacu

SEQ ID NO: 1819109 - RNA, 13 nt, Human
gccuccuccagcc

SEQ ID NO: 1819110 - RNA, 17 nt, Human
gccugccuguucccauu

SEQ ID NO: 1819111 - RNA, 16 nt, Human
gccugccucuucucua

SEQ ID NO: 1819112 - RNA, 21 nt, Human
gccugggaggucaaggcugca

SEQ ID NO: 1819113 - RNA, 22 nt, Human
gccugggaggucaaggcugcag

SEQ ID NO: 1819114 - RNA, 14 nt, Human
gccugggaucccuc

SEQ ID NO: 1819115 - RNA, 21 nt, Human
gccugggaucccucauccuca

SEQ ID NO: 1819116 - RNA, 18 nt, Human
gccugggaucccucaucc

SEQ ID NO: 1819117 - RNA, 20 nt, Human
gccuggccccucaggguccc

SEQ ID NO: 1819118 - RNA, 22 nt, Human
gccuggccccucagggucccug

SEQ ID NO: 1819119 - RNA, 10 nt, Human
gccuggccug

SEQ ID NO: 1819120 - RNA, 15 nt, Human
gccuggccccucagg

SEQ ID NO: 1819121 - RNA, 16 nt, Human
gccuggccccucaggg

SEQ ID NO: 1819122 - RNA, 17 nt, Human
gccuggccccucagggu

SEQ ID NO: 1819123 - RNA, 21 nt, Human
gccacuugaugacccccaacc

SEQ ID NO: 1819124 - RNA, 12 nt, Human
gccacugccucu

SEQ ID NO: 1819125 - RNA, 13 nt, Human
gccacugccucuu

SEQ ID NO: 1819126 - RNA, 16 nt, Human
gccacugccucuuccu

SEQ ID NO: 1819127 - RNA, 17 nt, Human
gccacugccucuuccuc

SEQ ID NO: 1819128 - RNA, 18 nt, Human
gccacugugaagagaacc

SEQ ID NO: 1819129 - RNA, 19 nt, Human
gccacugugaagagaacca

SEQ ID NO: 1819130 - RNA, 23 nt, Human
gccacugcaccgggccacagaga

SEQ ID NO: 1819131 - RNA, 19 nt, Human
gccacccuggggagaaagu

SEQ ID NO: 1819132 - RNA, 13 nt, Human
gccacccugggga

SEQ ID NO: 1819133 - RNA, 21 nt, Human
gccacugcacuauagccuagg

SEQ ID NO: 1819134 - RNA, 22 nt, Human
gccaccaacauacucccaucug

SEQ ID NO: 1819135 - RNA, 13 nt, Human
gccaccacgcccg

SEQ ID NO: 1819136 - RNA, 14 nt, Human
gccaccacgcccgg

SEQ ID NO: 1819137 - RNA, 19 nt, Human
gccaccaacauacucccau

SEQ ID NO: 1819138 - RNA, 20 nt, Human
gccaccaacauacucccauc

SEQ ID NO: 1819139 - RNA, 21 nt, Human
gccaccaacauacucccaucu

SEQ ID NO: 1819140 - RNA, 16 nt, Human
gccacauuccugaugc

SEQ ID NO: 1819141 - RNA, 20 nt, Human
gccacauuccugaugcuucu

SEQ ID NO: 1819142 - RNA, 18 nt, Human
gcacuuggagacuuguau

SEQ ID NO: 1819143 - RNA, 24 nt, Human
gccauguuggccaggcuggucuca

SEQ ID NO: 1819144 - RNA, 22 nt, Human
gccauguuggccaggcuggucu

SEQ ID NO: 1819145 - RNA, 20 nt, Human
gccauguuggccaggcuggu

SEQ ID NO: 1819146 - RNA, 19 nt, Human
gccauguuggccaggcugg

SEQ ID NO: 1819147 - RNA, 17 nt, Human
gccauuccccgucucug

SEQ ID NO: 1819148 - RNA, 18 nt, Human
gccauuccccgucucugg

SEQ ID NO: 1819149 - RNA, 17 nt, Human
gcccacgcuggagugca

SEQ ID NO: 1819150 - RNA, 16 nt, Human
gcccacgcuggagugc

SEQ ID NO: 1819151 - RNA, 15 nt, Human
gcccacgcuggagug

SEQ ID NO: 1819152 - RNA, 18 nt, Human
gcccaccuuggcucaagu

SEQ ID NO: 1819153 - RNA, 13 nt, Human
gcccacgccccca

SEQ ID NO: 1819154 - RNA, 14 nt, Human
gcccacgcccccac

SEQ ID NO: 1819155 - RNA, 14 nt, Human
gccauguuggccag

SEQ ID NO: 1819156 - RNA, 18 nt, Human
gccauguuggccaggcug

SEQ ID NO: 1819157 - RNA, 17 nt, Human
gccauguuggccaggcu

SEQ ID NO: 1819158 - RNA, 16 nt, Human
gccauguuggccaggc

SEQ ID NO: 1819159 - RNA, 15 nt, Human
gccauguuggccagg

SEQ ID NO: 1819160 - RNA, 20 nt, Human
gccauauucuguuggccagu

SEQ ID NO: 1819161 - RNA, 19 nt, Human
gccauauucuguuggccag

SEQ ID NO: 1819162 - RNA, 13 nt, Human
gccaggccagagg

SEQ ID NO: 1819163 - RNA, 16 nt, Human
gccaggcccucugccc

SEQ ID NO: 1819164 - RNA, 17 nt, Human
gccaggcccucugccca

SEQ ID NO: 1819165 - RNA, 21 nt, Human
gccaggcccucugcccacucc

SEQ ID NO: 1819166 - RNA, 19 nt, Human
gccaggcccucugcccacu

SEQ ID NO: 1819167 - RNA, 20 nt, Human
gccaggcccucugcccacuc

SEQ ID NO: 1819168 - RNA, 12 nt, Human
gccaggccagag

SEQ ID NO: 1819169 - RNA, 23 nt, Human
gccaggccacaagacccuugugg

SEQ ID NO: 1819170 - RNA, 13 nt, Human
gccagcaggcucu

SEQ ID NO: 1819171 - RNA, 16 nt, Human
gccagcaggcucucag

SEQ ID NO: 1819172 - RNA, 17 nt, Human
gccagcaggcucucagg

SEQ ID NO: 1819173 - RNA, 18 nt, Human
gccagcaggcucucaggc

SEQ ID NO: 1819174 - RNA, 19 nt, Human
gccagcaggcucucaggcc

SEQ ID NO: 1819175 - RNA, 20 nt, Human
gccagcaggcucucaggcca

SEQ ID NO: 1819176 - RNA, 21 nt, Human
gccagcaggcucucaggccag

SEQ ID NO: 1819177 - RNA, 23 nt, Human
gccagcaggcucucaggccagcu

SEQ ID NO: 1819178 - RNA, 15 nt, Human
gccagaauuucaaac

SEQ ID NO: 1819179 - RNA, 22 nt, Human
gccagacaucaacagauaaaua

SEQ ID NO: 1819180 - RNA, 17 nt, Human
gcucagggccuggcuca

SEQ ID NO: 1819181 - RNA, 13 nt, Human
gcucagggccugg

SEQ ID NO: 1819182 - RNA, 16 nt, Human
gcucagggccuggcuc

SEQ ID NO: 1819183 - RNA, 21 nt, Human
gcucaggagcccugggaggcu

SEQ ID NO: 1819184 - RNA, 12 nt, Human
gcucagggccug

SEQ ID NO: 1819185 - RNA, 15 nt, Human
gcucaggagcccugg

SEQ ID NO: 1819186 - RNA, 18 nt, Human
gcucaggagcccugggag

SEQ ID NO: 1819187 - RNA, 14 nt, Human
gcucaggagcccug

SEQ ID NO: 1819188 - RNA, 22 nt, Human
gcucagagagggugggaguggg

SEQ ID NO: 1819189 - RNA, 18 nt, Human
gcucagagagggugggag

SEQ ID NO: 1819190 - RNA, 20 nt, Human
gcucagagagggugggagug

SEQ ID NO: 1819191 - RNA, 15 nt, Human
gcucagagagggugg

SEQ ID NO: 1819192 - RNA, 21 nt, Human
gcucagguggggucacucugg

SEQ ID NO: 1819193 - RNA, 22 nt, Human
gcucagguggggucacucuggc

SEQ ID NO: 1819194 - RNA, 19 nt, Human
gccuguucagcuccagcuc

SEQ ID NO: 1819195 - RNA, 20 nt, Human
gccuguucagcuccagcuca

SEQ ID NO: 1819196 - RNA, 14 nt, Human
gccuguucagcucc

SEQ ID NO: 1819197 - RNA, 15 nt, Human
gcuaggccuggccag

SEQ ID NO: 1819198 - RNA, 14 nt, Human
gcuaggccuggcca

SEQ ID NO: 1819199 - RNA, 16 nt, Human
gcuaguaucaaaagaa

SEQ ID NO: 1819200 - RNA, 16 nt, Human
gcuauugucaccaggg

SEQ ID NO: 1819201 - RNA, 20 nt, Human
gcuauugucaccagggcugg

SEQ ID NO: 1819202 - RNA, 21 nt, Human
gcuauugucaccagggcugga

SEQ ID NO: 1819203 - RNA, 18 nt, Human
gcuaggaacacuccuuca

SEQ ID NO: 1819204 - RNA, 19 nt, Human
gcuaggaacacuccuucac

SEQ ID NO: 1819205 - RNA, 21 nt, Human
gcuaggaacacuccuucacag

SEQ ID NO: 1819206 - RNA, 12 nt, Human
gcucuuccaggc

SEQ ID NO: 1819207 - RNA, 15 nt, Human
gcucuuccaggcugg

SEQ ID NO: 1819208 - RNA, 16 nt, Human
gcucuuccaggcuggg

SEQ ID NO: 1819209 - RNA, 15 nt, Human
gcucuguccugggag

SEQ ID NO: 1819210 - RNA, 17 nt, Human
gcucuggccuccaaguc

SEQ ID NO: 1819211 - RNA, 15 nt, Human
gcucuggccuccaag

SEQ ID NO: 1819212 - RNA, 16 nt, Human
gcucuguccugggagu

SEQ ID NO: 1819213 - RNA, 19 nt, Human
gcucugucgcccaggcugg

SEQ ID NO: 1819214 - RNA, 15 nt, Human
gcugacagacacagg

SEQ ID NO: 1819215 - RNA, 14 nt, Human
gcugacagacacag

SEQ ID NO: 1819216 - RNA, 16 nt, Human
gcugacagacacaggc

SEQ ID NO: 1819217 - RNA, 12 nt, Human
gcugaaggcucg

SEQ ID NO: 1819218 - RNA, 20 nt, Human
gcugaaggcucgagcaugcc

SEQ ID NO: 1819219 - RNA, 17 nt, Human
gcugaaugguuuucaaa

SEQ ID NO: 1819220 - RNA, 22 nt, Human
gcugaauacagaggcaacugca

SEQ ID NO: 1819221 - RNA, 20 nt, Human
gcucugagcaaauguggcuc

SEQ ID NO: 1819222 - RNA, 21 nt, Human
gcucugagcaaauguggcucc

SEQ ID NO: 1819223 - RNA, 23 nt, Human
gcucuggagcccacuguacuugc

SEQ ID NO: 1819224 - RNA, 22 nt, Human
gcuccugccaccacgcccggcu

SEQ ID NO: 1819225 - RNA, 20 nt, Human
gcucccaggcauuccccagg

SEQ ID NO: 1819226 - RNA, 21 nt, Human
gcucccaggcauuccccagga

SEQ ID NO: 1819227 - RNA, 23 nt, Human
gcucccaggcauuccccaggagg

SEQ ID NO: 1819228 - RNA, 22 nt, Human
gcucccaggcauuccccaggag

SEQ ID NO: 1819229 - RNA, 19 nt, Human
gcuccccuaaagccucaaa

SEQ ID NO: 1819230 - RNA, 14 nt, Human
gcuccccagcccca

SEQ ID NO: 1819231 - RNA, 20 nt, Human
gcucuacagcuaaucagcau

SEQ ID NO: 1819232 - RNA, 22 nt, Human
gcucuacagcuaaucagcauuc

SEQ ID NO: 1819233 - RNA, 13 nt, Human
gcucucaggccag

SEQ ID NO: 1819234 - RNA, 14 nt, Human
gcucucaggccagc

SEQ ID NO: 1819235 - RNA, 15 nt, Human
gcucucaggccagcu

SEQ ID NO: 1819236 - RNA, 16 nt, Human
gcucucaggccagcug

SEQ ID NO: 1819237 - RNA, 23 nt, Human
gcugccauccagguucagcuugu

SEQ ID NO: 1819238 - RNA, 21 nt, Human
gcugccauccagguucagcuu

SEQ ID NO: 1819239 - RNA, 19 nt, Human
gcugccagccgagauagcc

SEQ ID NO: 1819240 - RNA, 21 nt, Human
gcugccagccgagauagccaa

SEQ ID NO: 1819241 - RNA, 16 nt, Human
gcugcaccggcuggcc

SEQ ID NO: 1819242 - RNA, 17 nt, Human
gcugcaccggcuggccu

SEQ ID NO: 1819243 - RNA, 18 nt, Human
gcugcaccggcuggccug

SEQ ID NO: 1819244 - RNA, 19 nt, Human
gcugcaccggcuggccugg

SEQ ID NO: 1819245 - RNA, 22 nt, Human
gcugcaccggcuggccuggccc

SEQ ID NO: 1819246 - RNA, 18 nt, Human
gcugagggugagugggug

SEQ ID NO: 1819247 - RNA, 13 nt, Human
gcugccugggauc

SEQ ID NO: 1819248 - RNA, 19 nt, Human
gcugccugggaucccucau

SEQ ID NO: 1819249 - RNA, 16 nt, Human
gcugccugggaucccu

SEQ ID NO: 1819250 - RNA, 18 nt, Human
gcugccugggaucccuca

SEQ ID NO: 1819251 - RNA, 19 nt, Human
gcugggauuacagguguga

SEQ ID NO: 1819252 - RNA, 18 nt, Human
gcugggauuacaggugug

SEQ ID NO: 1819253 - RNA, 17 nt, Human
gcugggauuacagggau

SEQ ID NO: 1819254 - RNA, 17 nt, Human
gcugggauuacaggugu

SEQ ID NO: 1819255 - RNA, 13 nt, Human
gcugggcagagga

SEQ ID NO: 1819256 - RNA, 14 nt, Human
gcugggcagaggaa

SEQ ID NO: 1819257 - RNA, 15 nt, Human
gcugggcagaggaaa

SEQ ID NO: 1819258 - RNA, 16 nt, Human
gcugggauuacaggug

SEQ ID NO: 1819259 - RNA, 22 nt, Human
gcugggauuacaggcuccugcc

SEQ ID NO: 1819260 - RNA, 23 nt, Human
gcugggauuacaggcuccugcca

SEQ ID NO: 1819261 - RNA, 18 nt, Human
gcuggccuggccccucag

SEQ ID NO: 1819262 - RNA, 19 nt, Human
gcuggccuggccccucagg

SEQ ID NO: 1819263 - RNA, 15 nt, Human
gcuggagugcaguga

SEQ ID NO: 1819264 - RNA, 14 nt, Human
gcuggagugcagug

SEQ ID NO: 1819265 - RNA, 16 nt, Human
gcuggccuggccccuc

SEQ ID NO: 1819266 - RNA, 17 nt, Human
gcuggccuggccccuca

SEQ ID NO: 1819267 - RNA, 19 nt, Human
gcugggucgcccuggacug

SEQ ID NO: 1819268 - RNA, 15 nt, Human
gcuggguguggcgca

SEQ ID NO: 1819269 - RNA, 17 nt, Human
gcugggucgcccuggac

SEQ ID NO: 1819270 - RNA, 18 nt, Human
gcugggucgcccuggacu

SEQ ID NO: 1819271 - RNA, 16 nt, Human
gcugggucgcccugga

SEQ ID NO: 1819272 - RNA, 14 nt, Human
gcugggcagguugg

SEQ ID NO: 1819273 - RNA, 16 nt, Human
gcugggcagaggaaag

SEQ ID NO: 1819274 - RNA, 17 nt, Human
gcugggcagaggaaagc

SEQ ID NO: 1819275 - RNA, 19 nt, Human
gcugggcagaggaaagcaa

SEQ ID NO: 1819276 - RNA, 12 nt, Human
gcugggcucccu

SEQ ID NO: 1819277 - RNA, 16 nt, Human
gcugggcucccuuccc

SEQ ID NO: 1819278 - RNA, 17 nt, Human
gcugggcucccuuccca

SEQ ID NO: 1819279 - RNA, 20 nt, Human
gcugggcucccuucccaccu

SEQ ID NO: 1819280 - RNA, 14 nt, Human
gcuggagcucugcc

SEQ ID NO: 1819281 - RNA, 12 nt, Human
gcuggagugcag

SEQ ID NO: 1819282 - RNA, 17 nt, Human
gcuggagcucugcccau

SEQ ID NO: 1819283 - RNA, 23 nt, Human
gcuucccgcucagcccucccugc

SEQ ID NO: 1819284 - RNA, 15 nt, Human
gcuucccgcucagcc

SEQ ID NO: 1819285 - RNA, 16 nt, Human
gcuucccgcucagccc

SEQ ID NO: 1819286 - RNA, 17 nt, Human
gcuucccgcucagcccu

SEQ ID NO: 1819287 - RNA, 18 nt, Human
gcuucccgcucagcccuc

SEQ ID NO: 1819288 - RNA, 19 nt, Human
gcuugaaacccguggcgcu

SEQ ID NO: 1819289 - RNA, 15 nt, Human
gcuugggaauuuuau

SEQ ID NO: 1819290 - RNA, 19 nt, Human
gcuugggcuucauccuccu

SEQ ID NO: 1819291 - RNA, 16 nt, Human
gcuuguacauaaugcg

SEQ ID NO: 1819292 - RNA, 14 nt, Human
gcuuguacauaaug

SEQ ID NO: 1819293 - RNA, 21 nt, Human
gcuggguuggaggguguccca

SEQ ID NO: 1819294 - RNA, 14 nt, Human
gcuggguuggaggg

SEQ ID NO: 1819295 - RNA, 15 nt, Human
gcuggguucuaccca

SEQ ID NO: 1819296 - RNA, 15 nt, Human
gcuggguucugaucc

SEQ ID NO: 1819297 - RNA, 23 nt, Human
gcuguaucccaugagccucagca

SEQ ID NO: 1819298 - RNA, 20 nt, Human
gcuguaucccaugagccuca

SEQ ID NO: 1819299 - RNA, 15 nt, Human
gcugguuuuucaguu

SEQ ID NO: 1819300 - RNA, 14 nt, Human
gcugguuuuucagu

SEQ ID NO: 1819301 - RNA, 21 nt, Human
gcugugcucuggacaggcaug

SEQ ID NO: 1819302 - RNA, 12 nt, Human
gcugugcugccc

SEQ ID NO: 1819303 - RNA, 13 nt, Human
gcugugcugcccu

SEQ ID NO: 1819304 - RNA, 19 nt, Human
gcugugcugcccugcccac

SEQ ID NO: 1819305 - RNA, 22 nt, Human
gcugugcugcccugcccaccug

SEQ ID NO: 1819306 - RNA, 22 nt, Human
gcuguuggcugggggccucagu

SEQ ID NO: 1819307 - RNA, 21 nt, Human
gcuguuggcugggggccucag

SEQ ID NO: 1819308 - RNA, 22 nt, Human
gcuucaaggauccugagccaga

SEQ ID NO: 1819309 - RNA, 14 nt, Human
gcuuaacuucacau

SEQ ID NO: 1819310 - RNA, 20 nt, Human
gcuucacggaagagccuugc

SEQ ID NO: 1819311 - RNA, 19 nt, Human
ggacccugaggcccagagg

SEQ ID NO: 1819312 - RNA, 20 nt, Human
ggacccggaggggccuggca

SEQ ID NO: 1819313 - RNA, 21 nt, Human
ggacccggaggggccuggcag

SEQ ID NO: 1819314 - RNA, 14 nt, Human
ggacccugaggccc

SEQ ID NO: 1819315 - RNA, 15 nt, Human
ggacccugaggccca

SEQ ID NO: 1819316 - RNA, 18 nt, Human
ggacccugaggcccagag

SEQ ID NO: 1819317 - RNA, 21 nt, Human
ggaccccgagccuggcuccaa

SEQ ID NO: 1819318 - RNA, 19 nt, Human
gcuuguacauaaugcgugc

SEQ ID NO: 1819319 - RNA, 17 nt, Human
ggacuuggaagcuccgc

SEQ ID NO: 1819320 - RNA, 15 nt, Human
ggacuuggaagcucc

SEQ ID NO: 1819321 - RNA, 19 nt, Human
ggagaaaauggacguguua

SEQ ID NO: 1819322 - RNA, 18 nt, Human
ggacuuuuauuuccagug

SEQ ID NO: 1819323 - RNA, 18 nt, Human
ggagaaaugaaaaaauau

SEQ ID NO: 1819324 - RNA, 22 nt, Human
ggagaaccaaaaagaggcuaug

SEQ ID NO: 1819325 - RNA, 13 nt, Human
ggagaacuagaga

SEQ ID NO: 1819326 - RNA, 16 nt, Human
ggagacugucucaaga

SEQ ID NO: 1819327 - RNA, 22 nt, Human
ggacucaaugcacugacauugu

SEQ ID NO: 1819328 - RNA, 16 nt, Human
ggacuaggguccuggg

SEQ ID NO: 1819329 - RNA, 20 nt, Human
ggacuacaggugugagucac

SEQ ID NO: 1819330 - RNA, 12 nt, Human
ggaccucaggcc

SEQ ID NO: 1819331 - RNA, 17 nt, Human
ggacuuagcugggagaa

SEQ ID NO: 1819332 - RNA, 22 nt, Human
ggacugugugcucaggagcccu

SEQ ID NO: 1819333 - RNA, 23 nt, Human
ggacugugugcucaggagcccug

SEQ ID NO: 1819334 - RNA, 14 nt, Human
ggagagagacucca

SEQ ID NO: 1819335 - RNA, 13 nt, Human
ggagagccuucca

SEQ ID NO: 1819336 - RNA, 16 nt, Human
ggagagccuuccaggg

SEQ ID NO: 1819337 - RNA, 22 nt, Human
ggagagccuuccagggguggga

SEQ ID NO: 1819338 - RNA, 17 nt, Human
ggagagccuuccagggg

SEQ ID NO: 1819339 - RNA, 18 nt, Human
ggagagccuuccaggggu

SEQ ID NO: 1819340 - RNA, 15 nt, Human
ggagagcuagcagca

SEQ ID NO: 1819341 - RNA, 13 nt, Human
ggagcagccacau

SEQ ID NO: 1819342 - RNA, 21 nt, Human
ggagcagccacauuccugaug

SEQ ID NO: 1819343 - RNA, 15 nt, Human
ggagcccacuguacu

SEQ ID NO: 1819344 - RNA, 12 nt, Human
ggaggaagagaa

SEQ ID NO: 1819345 - RNA, 21 nt, Human
ggaggaaaaccaagccguggc

SEQ ID NO: 1819346 - RNA, 22 nt, Human
ggaggaaaaccaagccguggcu

SEQ ID NO: 1819347 - RNA, 20 nt, Human
ggaggaaaaccaagccgugg

SEQ ID NO: 1819348 - RNA, 21 nt, Human
ggaggcaugugaugagaggaa

SEQ ID NO: 1819349 - RNA, 13 nt, Human
ggaggccagccuu

SEQ ID NO: 1819350 - RNA, 18 nt, Human
ggaggccaaggugggagg

SEQ ID NO: 1819351 - RNA, 20 nt, Human
ggaggccaaggugggaggau

SEQ ID NO: 1819352 - RNA, 17 nt, Human
ggaggcucuggagccca

SEQ ID NO: 1819353 - RNA, 20 nt, Human
ggaggcucuggagcccacug

SEQ ID NO: 1819354 - RNA, 22 nt, Human
ggagcugccuguucagcuccag

SEQ ID NO: 1819355 - RNA, 16 nt, Human
ggagcugaguggggga

SEQ ID NO: 1819356 - RNA, 18 nt, Human
ggagcccacuguacuugc

SEQ ID NO: 1819357 - RNA, 22 nt, Human
ggagcccacuguacuugcucuu

SEQ ID NO: 1819358 - RNA, 18 nt, Human
ggaggucgaggcaggagg

SEQ ID NO: 1819359 - RNA, 15 nt, Human
ggaggucgaggcagg

SEQ ID NO: 1819360 - RNA, 16 nt, Human
ggaggucgaggcagga

SEQ ID NO: 1819361 - RNA, 21 nt, Human
ggaggcucuggagcccacugu

SEQ ID NO: 1819362 - RNA, 19 nt, Human
ggaggcugagaugggagaa

SEQ ID NO: 1819363 - RNA, 15 nt, Human
ggaggcugagauggg

SEQ ID NO: 1819364 - RNA, 20 nt, Human
ggccagaugcaccagcccuu

SEQ ID NO: 1819365 - RNA, 19 nt, Human
ggccagaugcaccagcccu

SEQ ID NO: 1819366 - RNA, 23 nt, Human
ggccagagggagugacagaggca

SEQ ID NO: 1819367 - RNA, 21 nt, Human
ggccaaggaugccccgucccc

SEQ ID NO: 1819368 - RNA, 13 nt, Human
ggccaagguggga

SEQ ID NO: 1819369 - RNA, 15 nt, Human
ggccaaagccaaagc

SEQ ID NO: 1819370 - RNA, 12 nt, Human
ggccaaaggaag

SEQ ID NO: 1819371 - RNA, 13 nt, Human
ggccaaaggaagc

SEQ ID NO: 1819372 - RNA, 21 nt, Human
ggccaaaggaagcacaugccu

SEQ ID NO: 1819373 - RNA, 12 nt, Human
ggcauuguggga

SEQ ID NO: 1819374 - RNA, 19 nt, Human
ggccagguggccacuccag

SEQ ID NO: 1819375 - RNA, 16 nt, Human
ggcccgacagccuggc

SEQ ID NO: 1819376 - RNA, 17 nt, Human
ggcccgacagccuggca

SEQ ID NO: 1819377 - RNA, 23 nt, Human
ggcccuuccucuccacugccuuc

SEQ ID NO: 1819378 - RNA, 19 nt, Human
ggcccuuccucuccacugc

SEQ ID NO: 1819379 - RNA, 22 nt, Human
ggcccuuccucuccacugccuu

SEQ ID NO: 1819380 - RNA, 13 nt, Human
ggccucccaaagu

SEQ ID NO: 1819381 - RNA, 14 nt, Human
ggcccuuccuuuuc

SEQ ID NO: 1819382 - RNA, 13 nt, Human
ggccucccaacuc

SEQ ID NO: 1819383 - RNA, 14 nt, Human
ggccucccaacuca

SEQ ID NO: 1819384 - RNA, 22 nt, Human
ggcagccgugccuucagcucua

SEQ ID NO: 1819385 - RNA, 19 nt, Human
ggcagccgugccuucagcu

SEQ ID NO: 1819386 - RNA, 21 nt, Human
ggcagccgugccuucagcucu

SEQ ID NO: 1819387 - RNA, 18 nt, Human
ggcagccgugccuucagc

SEQ ID NO: 1819388 - RNA, 10 nt, Human
ggcagagcag

SEQ ID NO: 1819389 - RNA, 12 nt, Human
ggcagagcagag

SEQ ID NO: 1819390 - RNA, 15 nt, Human
ggcagccaggccaca

SEQ ID NO: 1819391 - RNA, 17 nt, Human
ggcagccaggccacaag

SEQ ID NO: 1819392 - RNA, 12 nt, Human
ggcagaaggaag

SEQ ID NO: 1819393 - RNA, 23 nt, Human
ggauuaaacuuaaucuaaaugga

SEQ ID NO: 1819394 - RNA, 21 nt, Human
ggauuuugauccaagcugguc

SEQ ID NO: 1819395 - RNA, 13 nt, Human
ggauguucuggga

SEQ ID NO: 1819396 - RNA, 22 nt, Human
ggaugagaaagguugaagcacc

SEQ ID NO: 1819397 - RNA, 12 nt, Human
ggaugagaaagg

SEQ ID NO: 1819398 - RNA, 21 nt, Human
ggaugaauuccaaauucugcu

SEQ ID NO: 1819399 - RNA, 13 nt, Human
aaaggaauuuaaa

SEQ ID NO: 1819400 - RNA, 11 nt, Human
aaaggaaagag

SEQ ID NO: 1819401 - RNA, 17 nt, Human
aaagcagugcaugcugu

SEQ ID NO: 1819402 - RNA, 18 nt, Human
aaagcuaggccuggccag

SEQ ID NO: 1819403 - RNA, 13 nt, Human
aaagcuagaaaug

SEQ ID NO: 1819404 - RNA, 21 nt, Human
aaagcagugcaugcugucccu

SEQ ID NO: 1819405 - RNA, 22 nt, Human
aaagcagugcaugcugucccuu

SEQ ID NO: 1819406 - RNA, 22 nt, Human
ggucuugaacuccuggccucaa

SEQ ID NO: 1819407 - RNA, 21 nt, Human
ggucuugaacuccuggccuca

SEQ ID NO: 1819408 - RNA, 19 nt, Human
ggucuguucuuuccaaagu

SEQ ID NO: 1819409 - RNA, 17 nt, Human
ggucuguucuuuccaaa

SEQ ID NO: 1819410 - RNA, 12 nt, Human
ggucuguucuuu

SEQ ID NO: 1819411 - RNA, 24 nt, Human
ggucugugagaugcuagaacuccc

SEQ ID NO: 1819412 - RNA, 14 nt, Human
ggucugugagaugc

SEQ ID NO: 1819413 - RNA, 16 nt, Human
ggugcacaagcuccaa

SEQ ID NO: 1819414 - RNA, 22 nt, Human
ggugcacaagcuccaagcuccc

SEQ ID NO: 1819415 - RNA, 21 nt, Human
ggugauccacucgccuucauc

SEQ ID NO: 1819416 - RNA, 17 nt, Human
aaagaauggaaggugga

SEQ ID NO: 1819417 - RNA, 15 nt, Human
aaagacuguacaaag

SEQ ID NO: 1819418 - RNA, 19 nt, Human
aaagacuuuuccaacccuc

SEQ ID NO: 1819419 - RNA, 15 nt, Human
aaagaugagugagca

SEQ ID NO: 1819420 - RNA, 13 nt, Human
aaagaggcuaugu

SEQ ID NO: 1819421 - RNA, 18 nt, Human
aaagaggcuaugugagca

SEQ ID NO: 1819422 - RNA, 16 nt, Human
aaagauguucuggaua

SEQ ID NO: 1819423 - RNA, 20 nt, Human
aaagaugagcuuugucuacu

SEQ ID NO: 1819424 - RNA, 22 nt, Human
gguccacccaggagccccgagg

SEQ ID NO: 1819425 - RNA, 20 nt, Human
gguccacccaggagccccga

SEQ ID NO: 1819426 - RNA, 12 nt, Human
ggucccacccca

SEQ ID NO: 1819427 - RNA, 14 nt, Human
aaacuuuaccuuuu

SEQ ID NO: 1819428 - RNA, 23 nt, Human
gguauuggcuagagguucaaaga

SEQ ID NO: 1819429 - RNA, 19 nt, Human
gguccacccaggagccccg

SEQ ID NO: 1819430 - RNA, 18 nt, Human
gguauaaguggugugugu

SEQ ID NO: 1819431 - RNA, 21 nt, Human
aaaauguaggguuauaauaau

SEQ ID NO: 1819432 - RNA, 21 nt, Human
aaaauggacguguuaugacuc

SEQ ID NO: 1819433 - RNA, 16 nt, Human
aaaauuuuuaaucuuu

SEQ ID NO: 1819434 - RNA, 19 nt, Human
aaaauuuuuaaucuuuaau

SEQ ID NO: 1819435 - RNA, 18 nt, Human
aaacaagaccacguuucu

SEQ ID NO: 1819436 - RNA, 13 nt, Human
aaacaaagaaauu

SEQ ID NO: 1819437 - RNA, 22 nt, Human
aaacaugcuacacacugcaugu

SEQ ID NO: 1819438 - RNA, 16 nt, Human
aaacaugcuacacacu

SEQ ID NO: 1819439 - RNA, 13 nt, Human
ggggaccucaggc

SEQ ID NO: 1819440 - RNA, 15 nt, Human
ggggaccucaggccu

SEQ ID NO: 1819441 - RNA, 16 nt, Human
ggggaccucaggccug

SEQ ID NO: 1819442 - RNA, 17 nt, Human
ggggaccucaggccugg

SEQ ID NO: 1819443 - RNA, 13 nt, Human
ggggccaggcugg

SEQ ID NO: 1819444 - RNA, 14 nt, Human
ggggccaggcuggg

SEQ ID NO: 1819445 - RNA, 16 nt, Human
ggggccaggcuggguc

SEQ ID NO: 1819446 - RNA, 17 nt, Human
ggggccaguuggucccc

SEQ ID NO: 1819447 - RNA, 19 nt, Human
ggggccaguuggucccccu

SEQ ID NO: 1819448 - RNA, 16 nt, Human
ggggcccugccuccuu

SEQ ID NO: 1819449 - RNA, 19 nt, Human
ggggcccugccuccuuugu

SEQ ID NO: 1819450 - RNA, 23 nt, Human
ggggcccugccuccuuugugagg

SEQ ID NO: 1819451 - RNA, 23 nt, Human
aaacggccucacuaggcuucugg

SEQ ID NO: 1819452 - RNA, 21 nt, Human
aaaccacauuggagauguuua

SEQ ID NO: 1819453 - RNA, 12 nt, Human
aaacgugaaaau

SEQ ID NO: 1819454 - RNA, 16 nt, Human
aaacguggcugcuuca

SEQ ID NO: 1819455 - RNA, 17 nt, Human
aaacguggcugcuucaa

SEQ ID NO: 1819456 - RNA, 20 nt, Human
aaacguggcugcuucaagga

SEQ ID NO: 1819457 - RNA, 11 nt, Human
aaacuccugac

SEQ ID NO: 1819458 - RNA, 12 nt, Human
aaacugcccccu

SEQ ID NO: 1819459 - RNA, 11 nt, Human
aaacugccccc

SEQ ID NO: 1819460 - RNA, 22 nt, Human
aaacuccagaugccacaaugga

SEQ ID NO: 1819461 - RNA, 15 nt, Human
aaacuccagaugcca

SEQ ID NO: 1819462 - RNA, 13 nt, Human
aaacugcccccuc

SEQ ID NO: 1819463 - RNA, 17 nt, Human
aaacugcccccucugcc

SEQ ID NO: 1819464 - RNA, 19 nt, Human
aaacugcccccucugcccu

SEQ ID NO: 1819465 - RNA, 20 nt, Human
aaacugcccccucugcccug

SEQ ID NO: 1819466 - RNA, 21 nt, Human
aaacugcccccucugcccugc

SEQ ID NO: 1819467 - RNA, 16 nt, Human
aaacuggauuaaacuu

SEQ ID NO: 1819468 - RNA, 23 nt, Human
gggucucacuauguugcccaggc

SEQ ID NO: 1819469 - RNA, 12 nt, Human
gggucucacucu

SEQ ID NO: 1819470 - RNA, 22 nt, Human
gggucucacuauguugcccagg

SEQ ID NO: 1819471 - RNA, 19 nt, Human
aaacauguuucuuuguaau

SEQ ID NO: 1819472 - RNA, 22 nt, Human
aaacauguuucuuuguaaugaa

SEQ ID NO: 1819473 - RNA, 23 nt, Human
aaacauguuucuuuguaaugaaa

SEQ ID NO: 1819474 - RNA, 14 nt, Human
aaaccaagccgugg

SEQ ID NO: 1819475 - RNA, 16 nt, Human
aaaccaagccguggcu

SEQ ID NO: 1819476 - RNA, 14 nt, Human
aaacauuaaaauau

SEQ ID NO: 1819477 - RNA, 20 nt, Human
ggguaucaggugcugccauc

SEQ ID NO: 1819478 - RNA, 22 nt, Human
gggaacagacuggaagcacagc

SEQ ID NO: 1819479 - RNA, 20 nt, Human
aaaaaucucaaauuucuaaa

SEQ ID NO: 1819480 - RNA, 19 nt, Human
aaaaaucucaaauuucuaa

SEQ ID NO: 1819481 - RNA, 14 nt, Human
gggaacagacugga

SEQ ID NO: 1819482 - RNA, 19 nt, Human
aaaacugcucauaugaugu

SEQ ID NO: 1819483 - RNA, 20 nt, Human
aaaacugcugacuguuuucu

SEQ ID NO: 1819484 - RNA, 18 nt, Human
aaaacugauuuuuuuuuc

SEQ ID NO: 1819485 - RNA, 22 nt, Human
aaaacugauuuuuuuuuccuuc

SEQ ID NO: 1819486 - RNA, 19 nt, Human
aaaaccaagccguggcuuc

SEQ ID NO: 1819487 - RNA, 21 nt, Human
aaaacguggcugcuucaagga

SEQ ID NO: 1819488 - RNA, 14 nt, Human
aaaacguggcugcu

SEQ ID NO: 1819489 - RNA, 16 nt, Human
aaaacguggcugcuuc

SEQ ID NO: 1819490 - RNA, 17 nt, Human
aaaacguggcugcuuca

SEQ ID NO: 1819491 - RNA, 18 nt, Human
aaaacguggcugcuucaa

SEQ ID NO: 1819492 - RNA, 15 nt, Human
aaaaccaauguucuc

SEQ ID NO: 1819493 - RNA, 22 nt, Human
aaaagcuccauuuuuagugaaa

SEQ ID NO: 1819494 - RNA, 14 nt, Human
aaaagcugggcagg

SEQ ID NO: 1819495 - RNA, 16 nt, Human
aaaagccuguuuaaga

SEQ ID NO: 1819496 - RNA, 18 nt, Human
aaaagccuguuuaagaga

SEQ ID NO: 1819497 - RNA, 21 nt, Human
aaaacuuuaugcuaagugaaa

SEQ ID NO: 1819498 - RNA, 11 nt, Human
gggaggcagag

SEQ ID NO: 1819499 - RNA, 13 nt, Human
gggagggccuggg

SEQ ID NO: 1819500 - RNA, 11 nt, Human
gggagggcucc

SEQ ID NO: 1819501 - RNA, 13 nt, Human
gggagggcuccag

SEQ ID NO: 1819502 - RNA, 19 nt, Human
gggaggccaaggugggagg

SEQ ID NO: 1819503 - RNA, 20 nt, Human
gggaggcagagguugcagug

SEQ ID NO: 1819504 - RNA, 15 nt, Human
gggauuuccaugaug

SEQ ID NO: 1819505 - RNA, 18 nt, Human
aaaagggaacugaacauu

SEQ ID NO: 1819506 - RNA, 16 nt, Human
aaaagggacugagaaa

SEQ ID NO: 1819507 - RNA, 15 nt, Human
aaaauaccagccagu

SEQ ID NO: 1819508 - RNA, 14 nt, Human
aaaauaccaaggaa

SEQ ID NO: 1819509 - RNA, 14 nt, Human
aaaauaccagccag

SEQ ID NO: 1819510 - RNA, 12 nt, Human
aaaauaaauuau

SEQ ID NO: 1819511 - RNA, 13 nt, Human
aaaauauagcuaa

SEQ ID NO: 1819512 - RNA, 18 nt, Human
aaaauauauaucaaauau

SEQ ID NO: 1819513 - RNA, 18 nt, Human
aaaauaguggugugauuu

SEQ ID NO: 1819514 - RNA, 12 nt, Human
aaaauagccugc

SEQ ID NO: 1819515 - RNA, 23 nt, Human
gggaaaaucagccugcuccagcu

SEQ ID NO: 1819516 - RNA, 13 nt, Human
gggaaaaucagcc

SEQ ID NO: 1819517 - RNA, 16 nt, Human
ggcuucaguggcagcu

SEQ ID NO: 1819518 - RNA, 23 nt, Human
ggcuguaucccaugagccucagc

SEQ ID NO: 1819519 - RNA, 15 nt, Human
ggcugucaauuacag

SEQ ID NO: 1819520 - RNA, 22 nt, Human
ggcuguaucccaugagccucag

SEQ ID NO: 1819521 - RNA, 20 nt, Human
ggcuguaucccaugagccuc

SEQ ID NO: 1819522 - RNA, 15 nt, Human
ggcuucaguggcagc

SEQ ID NO: 1819523 - RNA, 16 nt, Human
ggcuggugucaccuga

SEQ ID NO: 1819524 - RNA, 19 nt, Human
ggcuguaucccaugagccu

SEQ ID NO: 1819525 - RNA, 13 nt, Human
aaaaaaacacaaa

SEQ ID NO: 1819526 - RNA, 20 nt, Human
aaaaagcuccaaaugcagcu

SEQ ID NO: 1819527 - RNA, 20 nt, Human
ggcuggcgugcaguggugcg

SEQ ID NO: 1819528 - RNA, 16 nt, Human
ggcuggcgugcagugg

SEQ ID NO: 1819529 - RNA, 14 nt, Human
ggcuggcgugcagu

SEQ ID NO: 1819530 - RNA, 16 nt, Human
ggcuggcccugcccug

SEQ ID NO: 1819531 - RNA, 13 nt, Human
ggcuggcccugcc

SEQ ID NO: 1819532 - RNA, 14 nt, Human
ggcuggcccugccc

SEQ ID NO: 1819533 - RNA, 15 nt, Human
ggcuggcccugcccu

SEQ ID NO: 1819534 - RNA, 17 nt, Human
ggcuggccuggccccuc

SEQ ID NO: 1819535 - RNA, 22 nt, Human
ggcuggccuggccccucagggu

SEQ ID NO: 1819536 - RNA, 13 nt, Human
ggcugggagagcc

SEQ ID NO: 1819537 - RNA, 17 nt, Human
ggcugcagggaguccga

SEQ ID NO: 1819538 - RNA, 22 nt, Human
ggcugcaugcgggcuuccuccu

SEQ ID NO: 1819539 - RNA, 20 nt, Human
ggcugcaugcgggcuuccuc

SEQ ID NO: 1819540 - RNA, 18 nt, Human
ggcucgagcaugccugga

SEQ ID NO: 1819541 - RNA, 23 nt, Human
ggcucuuccaggcugggagagcc

SEQ ID NO: 1819542 - RNA, 24 nt, Human
ggcucuuccaggcugggagagccu

SEQ ID NO: 1819543 - RNA, 20 nt, Human
ggcucuuccaggcugggaga

SEQ ID NO: 1819544 - RNA, 12 nt, Human
ggcuccugccac

SEQ ID NO: 1819545 - RNA, 13 nt, Human
ggcuccugccacc

SEQ ID NO: 1819546 - RNA, 17 nt, Human
ggcuccucccggugccc

SEQ ID NO: 1819547 - RNA, 20 nt, Human
ggcucccuucccaccucucu

SEQ ID NO: 1819548 - RNA, 22 nt, Human
ggcucccuucccaccucucuca

SEQ ID NO: 1819549 - RNA, 17 nt, Human
ggcucccuucccaccuc

SEQ ID NO: 1819550 - RNA, 18 nt, Human
ggcucccuucccaccucu

SEQ ID NO: 1819551 - RNA, 16 nt, Human
ggcucccuucccaccu

SEQ ID NO: 1819552 - RNA, 21 nt, Human
cauuuggugguuucagaaaug

SEQ ID NO: 1819553 - RNA, 23 nt, Human
cauuuguuucuuucucugaggac

SEQ ID NO: 1819554 - RNA, 23 nt, Human
cauuuuuuuuaagaaaaaggaug

SEQ ID NO: 1819555 - RNA, 22 nt, Human
cauuuguuucuuucucugagga

SEQ ID NO: 1819556 - RNA, 21 nt, Human
cauuuguuucuuucucugagg

SEQ ID NO: 1819557 - RNA, 14 nt, Human
ccaaaaggcagaag

SEQ ID NO: 1819558 - RNA, 18 nt, Human
cauuuaggugaggaagca

SEQ ID NO: 1819559 - RNA, 16 nt, Human
cauuuaggugaggaag

SEQ ID NO: 1819560 - RNA, 16 nt, Human
cauuggagauguuuag

SEQ ID NO: 1819561 - RNA, 21 nt, Human
ccaacucaccccagccccaaa

SEQ ID NO: 1819562 - RNA, 15 nt, Human
ccaagcucugcuccu

SEQ ID NO: 1819563 - RNA, 14 nt, Human
ccaagcucugcucc

SEQ ID NO: 1819564 - RNA, 16 nt, Human
ccaagcucugcuccuc

SEQ ID NO: 1819565 - RNA, 16 nt, Human
ccaaaucauaguggcu

SEQ ID NO: 1819566 - RNA, 23 nt, Human
ccaaaucagcugcuacuacuccu

SEQ ID NO: 1819567 - RNA, 15 nt, Human
ccaaaucagcugcua

SEQ ID NO: 1819568 - RNA, 14 nt, Human
ccaacuauggccug

SEQ ID NO: 1819569 - RNA, 15 nt, Human
ccaacuauggccugu

SEQ ID NO: 1819570 - RNA, 16 nt, Human
ccaacuauggccugug

SEQ ID NO: 1819571 - RNA, 13 nt, Human
ccaacucacccca

SEQ ID NO: 1819572 - RNA, 21 nt, Human
ccaauggagacugucucaaga

SEQ ID NO: 1819573 - RNA, 23 nt, Human
ccaauggacuaacuugucuuugg

SEQ ID NO: 1819574 - RNA, 14 nt, Human
ccaaugggagcuca

SEQ ID NO: 1819575 - RNA, 14 nt, Human
ccaaagugcuggga

SEQ ID NO: 1819576 - RNA, 22 nt, Human
ccaaaguacacuguuucaaacu

SEQ ID NO: 1819577 - RNA, 20 nt, Human
cauucuccuuguguuacuaa

SEQ ID NO: 1819578 - RNA, 17 nt, Human
cauucuccaccugccag

SEQ ID NO: 1819579 - RNA, 18 nt, Human
cauucuccaccugccagg

SEQ ID NO: 1819580 - RNA, 19 nt, Human
cauucuccaccugccaggg

SEQ ID NO: 1819581 - RNA, 21 nt, Human
cauucuccaccugccagggac

SEQ ID NO: 1819582 - RNA, 19 nt, Human
cauguuggccaggcugguc

SEQ ID NO: 1819583 - RNA, 20 nt, Human
cauguuggccaggcugcucu

SEQ ID NO: 1819584 - RNA, 17 nt, Human
cauguuggccaggcugg

SEQ ID NO: 1819585 - RNA, 18 nt, Human
cauguuggccaggcuggu

SEQ ID NO: 1819586 - RNA, 18 nt, Human
cauguucuuaauucuuag

SEQ ID NO: 1819587 - RNA, 21 nt, Human
cauguuacauaagauaaaugu

SEQ ID NO: 1819588 - RNA, 16 nt, Human
cauguucuuaauucuu

SEQ ID NO: 1819589 - RNA, 13 nt, Human
cauguucuuaauu

SEQ ID NO: 1819590 - RNA, 15 nt, Human
cauguccaagaagcc

SEQ ID NO: 1819591 - RNA, 16 nt, Human
cauguccaagaagccc

SEQ ID NO: 1819592 - RNA, 16 nt, Human
cauguuacauaagaua

SEQ ID NO: 1819593 - RNA, 17 nt, Human
cauguuacauaagauaa

SEQ ID NO: 1819594 - RNA, 15 nt, Human
cauggccagguggcc

SEQ ID NO: 1819595 - RNA, 20 nt, Human
caugcuccuggcccacugca

SEQ ID NO: 1819596 - RNA, 17 nt, Human
caugcuccuggcccacu

SEQ ID NO: 1819597 - RNA, 14 nt, Human
caugcuccuggccc

SEQ ID NO: 1819598 - RNA, 16 nt, Human
caugcuccuggcccac

SEQ ID NO: 1819599 - RNA, 22 nt, Human
cauggccucuucagaucucuaa

SEQ ID NO: 1819600 - RNA, 14 nt, Human
cauggccgugaacu

SEQ ID NO: 1819601 - RNA, 21 nt, Human
cauggccucuucagaucucua

SEQ ID NO: 1819602 - RNA, 20 nt, Human
caugggaaaugucaacaagu

SEQ ID NO: 1819603 - RNA, 18 nt, Human
caugggaaaggggaaguu

SEQ ID NO: 1819604 - RNA, 21 nt, Human
caugaauauuuaguguucaua

SEQ ID NO: 1819605 - RNA, 16 nt, Human
caugaauuugugaagg

SEQ ID NO: 1819606 - RNA, 13 nt, Human
caugacaaagacu

SEQ ID NO: 1819607 - RNA, 15 nt, Human
caugcaaggucauuu

SEQ ID NO: 1819608 - RNA, 12 nt, Human
caugcaagguca

SEQ ID NO: 1819609 - RNA, 17 nt, Human
caguuauuauauuuaca

SEQ ID NO: 1819610 - RNA, 21 nt, Human
caguuauuauauuuacaaaug

SEQ ID NO: 1819611 - RNA, 20 nt, Human
caguggugcgaucuggguuc

SEQ ID NO: 1819612 - RNA, 19 nt, Human
caguggugcgaucuggguu

SEQ ID NO: 1819613 - RNA, 21 nt, Human
cagugguaugaucacggcuca

SEQ ID NO: 1819614 - RNA, 20 nt, Human
caguuacucagaauucucua

SEQ ID NO: 1819615 - RNA, 23 nt, Human
cagucugauucccaagcucugcu

SEQ ID NO: 1819616 - RNA, 22 nt, Human
cagugauuaccagggacugagg

SEQ ID NO: 1819617 - RNA, 22 nt, Human
cagugcccacaggaucagucug

SEQ ID NO: 1819618 - RNA, 21 nt, Human
cagugcccacaggaucagucu

SEQ ID NO: 1819619 - RNA, 18 nt, Human
cagugggagcugccuguu

SEQ ID NO: 1819620 - RNA, 17 nt, Human
cagugggagcugccugu

SEQ ID NO: 1819621 - RNA, 16 nt, Human
cagugggagcugccug

SEQ ID NO: 1819622 - RNA, 20 nt, Human
cagugguaugaucacggcuc

SEQ ID NO: 1819623 - RNA, 22 nt, Human
cagucugauucccaagcucugc

SEQ ID NO: 1819624 - RNA, 21 nt, Human
cagucugauucccaagcucug

SEQ ID NO: 1819625 - RNA, 22 nt, Human
caguuauuauauuuacaaaugg

SEQ ID NO: 1819626 - RNA, 19 nt, Human
caucccaaacccuucagug

SEQ ID NO: 1819627 - RNA, 21 nt, Human
caucagcacgauuucuguuua

SEQ ID NO: 1819628 - RNA, 20 nt, Human
caucccaaacccuucagugc

SEQ ID NO: 1819629 - RNA, 11 nt, Human
caucccagccc

SEQ ID NO: 1819630 - RNA, 12 nt, Human
caucccagcccc

SEQ ID NO: 1819631 - RNA, 22 nt, Human
cauccucuguacagagcccacg

SEQ ID NO: 1819632 - RNA, 15 nt, Human
caucuaaacugcccc

SEQ ID NO: 1819633 - RNA, 21 nt, Human
caucuaaacugcccccucugc

SEQ ID NO: 1819634 - RNA, 19 nt, Human
cauccugaggcuccacuug

SEQ ID NO: 1819635 - RNA, 18 nt, Human
cauccugaggcuccacuu

SEQ ID NO: 1819636 - RNA, 16 nt, Human
cauagguuuaauaauu

SEQ ID NO: 1819637 - RNA, 23 nt, Human
cauagcagagaaugaaagggccc

SEQ ID NO: 1819638 - RNA, 19 nt, Human
cauagcagcuuauucacaa

SEQ ID NO: 1819639 - RNA, 20 nt, Human
cauagcagcuuauucacaag

SEQ ID NO: 1819640 - RNA, 21 nt, Human
cauauuauuuuauguugcaua

SEQ ID NO: 1819641 - RNA, 18 nt, Human
cauaauuauuauuuggcc

SEQ ID NO: 1819642 - RNA, 23 nt, Human
cauacaggaagguagaaauaucu

SEQ ID NO: 1819643 - RNA, 16 nt, Human
cauacaguuugcacuu

SEQ ID NO: 1819644 - RNA, 11 nt, Human
caguuuuccuu

SEQ ID NO: 1819645 - RNA, 23 nt, Human
cauaaugcgugcauaccacuuuu

SEQ ID NO: 1819646 - RNA, 23 nt, Human
caguuuguuaguaugaggcauuu

SEQ ID NO: 1819647 - RNA, 21 nt, Human
caguuuguuaguaugaggcau

SEQ ID NO: 1819648 - RNA, 18 nt, Human
caguuguuagugugucuu

SEQ ID NO: 1819649 - RNA, 22 nt, Human
caguuguuagugugucuuagug

SEQ ID NO: 1819650 - RNA, 14 nt, Human
cagauccccaagcc

SEQ ID NO: 1819651 - RNA, 22 nt, Human
cagauauaaaagacugaccaau

SEQ ID NO: 1819652 - RNA, 19 nt, Human
cagauagauauaugcucug

SEQ ID NO: 1819653 - RNA, 14 nt, Human
cagaggggguggcc

SEQ ID NO: 1819654 - RNA, 16 nt, Human
cagaggggguggccuc

SEQ ID NO: 1819655 - RNA, 19 nt, Human
cagauacuuggggggcuga

SEQ ID NO: 1819656 - RNA, 20 nt, Human
cagaggaaagcaaaggagau

SEQ ID NO: 1819657 - RNA, 13 nt, Human
cagaggggguggc

SEQ ID NO: 1819658 - RNA, 17 nt, Human
cagaggaaagcaaagga

SEQ ID NO: 1819659 - RNA, 19 nt, Human
cagaggaaagcaaaggaga

SEQ ID NO: 1819660 - RNA, 23 nt, Human
cagagaggguggugaccucugcc

SEQ ID NO: 1819661 - RNA, 23 nt, Human
cagagagggugggagugggccca

SEQ ID NO: 1819662 - RNA, 20 nt, Human
cagagagguuaaggugggua

SEQ ID NO: 1819663 - RNA, 13 nt, Human
cagagcugccacc

SEQ ID NO: 1819664 - RNA, 22 nt, Human
cagagaggguggugaccucugc

SEQ ID NO: 1819665 - RNA, 20 nt, Human
cagagaggguggugaccucu

SEQ ID NO: 1819666 - RNA, 17 nt, Human
cagagaggguggugacc

SEQ ID NO: 1819667 - RNA, 13 nt, Human
cagagaggguggg

SEQ ID NO: 1819668 - RNA, 12 nt, Human
cagagagggugg

SEQ ID NO: 1819669 - RNA, 18 nt, Human
cagcacgggggccaagga

SEQ ID NO: 1819670 - RNA, 15 nt, Human
cagcacgauuucugu

SEQ ID NO: 1819671 - RNA, 14 nt, Human
cagcacgauuucug

SEQ ID NO: 1819672 - RNA, 18 nt, Human
cagauugcaacaggcugg

SEQ ID NO: 1819673 - RNA, 20 nt, Human
cagauugcaacaggcugggc

SEQ ID NO: 1819674 - RNA, 19 nt, Human
cagauugcaacaggcuggg

SEQ ID NO: 1819675 - RNA, 13 nt, Human
cagauuuaugcau

SEQ ID NO: 1819676 - RNA, 13 nt, Human
cagauuucacucu

SEQ ID NO: 1819677 - RNA, 20 nt, Human
cagauuucacucuccuuggu

SEQ ID NO: 1819678 - RNA, 19 nt, Human
cagauuugaacucuucaau

SEQ ID NO: 1819679 - RNA, 17 nt, Human
cagcaccaucucuccuc

SEQ ID NO: 1819680 - RNA, 19 nt, Human
cagauuucacucuccuugg

SEQ ID NO: 1819681 - RNA, 19 nt, Human
cagcaccaucucuccuccu

SEQ ID NO: 1819682 - RNA, 21 nt, Human
cagacuggaagcacagcuuca

SEQ ID NO: 1819683 - RNA, 20 nt, Human
cagacuggaagcacagcuuc

SEQ ID NO: 1819684 - RNA, 18 nt, Human
cagacuggaagcacagcu

SEQ ID NO: 1819685 - RNA, 17 nt, Human
cagacuggaagcacagc

SEQ ID NO: 1819686 - RNA, 16 nt, Human
cagacuggaagcacag

SEQ ID NO: 1819687 - RNA, 14 nt, Human
cagacuggaagcac

SEQ ID NO: 1819688 - RNA, 13 nt, Human
cagacuggaagca

SEQ ID NO: 1819689 - RNA, 23 nt, Human
cagacaggcaagcaccuccugcc

SEQ ID NO: 1819690 - RNA, 22 nt, Human
cagacaggcaagcaccuccugc

SEQ ID NO: 1819691 - RNA, 17 nt, Human
cagacucuacagaggcc

SEQ ID NO: 1819692 - RNA, 21 nt, Human
cagacucuacagaggccaugg

SEQ ID NO: 1819693 - RNA, 20 nt, Human
cagacucuacagaggccaug

SEQ ID NO: 1819694 - RNA, 19 nt, Human
cagacucuacagaggccau

SEQ ID NO: 1819695 - RNA, 18 nt, Human
cagacucuacagaggcca

SEQ ID NO: 1819696 - RNA, 23 nt, Human
cagacucuacagaggccaugggc

SEQ ID NO: 1819697 - RNA, 21 nt, Human
cagacaggcaagcaccuccug

SEQ ID NO: 1819698 - RNA, 20 nt, Human
cagacaggcaagcaccuccu

SEQ ID NO: 1819699 - RNA, 18 nt, Human
cagacaggcaagcaccuc

SEQ ID NO: 1819700 - RNA, 13 nt, Human
cagacaggcaagc

SEQ ID NO: 1819701 - RNA, 11 nt, Human
cagacaggcaa

SEQ ID NO: 1819702 - RNA, 17 nt, Human
cagacaggaccagggau

SEQ ID NO: 1819703 - RNA, 24 nt, Human
cagacaggaccagggauuuccaug

SEQ ID NO: 1819704 - RNA, 13 nt, Human
cagacaggaccag

SEQ ID NO: 1819705 - RNA, 15 nt, Human
cagacaggaccaggg

SEQ ID NO: 1819706 - RNA, 16 nt, Human
cagacaggaccaggga

SEQ ID NO: 1819707 - RNA, 15 nt, Human
cagacagcugccugg

SEQ ID NO: 1819708 - RNA, 16 nt, Human
cagacagcugccuggg

SEQ ID NO: 1819709 - RNA, 17 nt, Human
cagacagcugccuggga

SEQ ID NO: 1819710 - RNA, 18 nt, Human
cagacagcugccugggau

SEQ ID NO: 1819711 - RNA, 14 nt, Human
cagacagcccucca

SEQ ID NO: 1819712 - RNA, 13 nt, Human
cagacagcugccu

SEQ ID NO: 1819713 - RNA, 14 nt, Human
cagacagcugccug

SEQ ID NO: 1819714 - RNA, 16 nt, Human
cagcugucaaggcuca

SEQ ID NO: 1819715 - RNA, 19 nt, Human
caggaaaggcuccaggagc

SEQ ID NO: 1819716 - RNA, 20 nt, Human
caggaaaggcuccaggagca

SEQ ID NO: 1819717 - RNA, 16 nt, Human
caggaaaggcuccagg

SEQ ID NO: 1819718 - RNA, 17 nt, Human
caggaaaggcuccagga

SEQ ID NO: 1819719 - RNA, 14 nt, Human
cagcugagaggcug

SEQ ID NO: 1819720 - RNA, 21 nt, Human
cagcugacuuuucuguccgag

SEQ ID NO: 1819721 - RNA, 17 nt, Human
cagccugcuccagcugu

SEQ ID NO: 1819722 - RNA, 19 nt, Human
cagccugcuccagcuguuc

SEQ ID NO: 1819723 - RNA, 16 nt, Human
cagccugcuccagcug

SEQ ID NO: 1819724 - RNA, 15 nt, Human
cagcuaacauggaag

SEQ ID NO: 1819725 - RNA, 20 nt, Human
cagcgcuggccgggaccccg

SEQ ID NO: 1819726 - RNA, 22 nt, Human
caggcugggagagccuuccagg

SEQ ID NO: 1819727 - RNA, 23 nt, Human
caggcugggagagccuuccaggg

SEQ ID NO: 1819728 - RNA, 17 nt, Human
caggggaaaaucagccu

SEQ ID NO: 1819729 - RNA, 14 nt, Human
caggggaaaagagg

SEQ ID NO: 1819730 - RNA, 16 nt, Human
caggggaaaagaggag

SEQ ID NO: 1819731 - RNA, 12 nt, Human
caggccuccuac

SEQ ID NO: 1819732 - RNA, 15 nt, Human
caggccuguccaaca

SEQ ID NO: 1819733 - RNA, 14 nt, Human
caggccuccuacag

SEQ ID NO: 1819734 - RNA, 21 nt, Human
caggcgugagccaccgugccu

SEQ ID NO: 1819735 - RNA, 21 nt, Human
caggcugggagagccuuccag

SEQ ID NO: 1819736 - RNA, 22 nt, Human
caggaggccagccuugaccauu

SEQ ID NO: 1819737 - RNA, 18 nt, Human
caggaggccagccuugac

SEQ ID NO: 1819738 - RNA, 19 nt, Human
caggaggccagccuugacc

SEQ ID NO: 1819739 - RNA, 19 nt, Human
caggaggaucacuugaguc

SEQ ID NO: 1819740 - RNA, 17 nt, Human
caggcaaugcuggcugu

SEQ ID NO: 1819741 - RNA, 16 nt, Human
caggcaaugcuggcug

SEQ ID NO: 1819742 - RNA, 15 nt, Human
caggcaaugcuggcu

SEQ ID NO: 1819743 - RNA, 14 nt, Human
caggcaaugcuggc

SEQ ID NO: 1819744 - RNA, 16 nt, Human
caggaccucaggugag

SEQ ID NO: 1819745 - RNA, 23 nt, Human
caggaccucaggugagaagcaga

SEQ ID NO: 1819746 - RNA, 11 nt, Human
caggccaggcc

SEQ ID NO: 1819747 - RNA, 12 nt, Human
caggccaggccc

SEQ ID NO: 1819748 - RNA, 14 nt, Human
auucauauuuacuu

SEQ ID NO: 1819749 - RNA, 13 nt, Human
auuaugugccaga

SEQ ID NO: 1819750 - RNA, 21 nt, Human
auuaugugccagauuuaugca

SEQ ID NO: 1819751 - RNA, 23 nt, Human
auuaugugccagauuuaugcaua

SEQ ID NO: 1819752 - RNA, 20 nt, Human
auucucuaguuugauuaaau

SEQ ID NO: 1819753 - RNA, 23 nt, Human
auucucuaguuugauuaaauucu

SEQ ID NO: 1819754 - RNA, 12 nt, Human
auucucuuaucc

SEQ ID NO: 1819755 - RNA, 14 nt, Human
auucucuuauccaa

SEQ ID NO: 1819756 - RNA, 21 nt, Human
auucgcuacuaugauuuaauu

SEQ ID NO: 1819757 - RNA, 16 nt, Human
auucucuccuguaccu

SEQ ID NO: 1819758 - RNA, 15 nt, Human
auucucuuauccaac

SEQ ID NO: 1819759 - RNA, 15 nt, Human
auuaauggaaauguu

SEQ ID NO: 1819760 - RNA, 17 nt, Human
auuacaggcuccugcca

SEQ ID NO: 1819761 - RNA, 19 nt, Human
auuacaggcuccugccacc

SEQ ID NO: 1819762 - RNA, 13 nt, Human
auuacagguguga

SEQ ID NO: 1819763 - RNA, 15 nt, Human
auuacaggcuccugc

SEQ ID NO: 1819764 - RNA, 16 nt, Human
auuacaggcuccugcc

SEQ ID NO: 1819765 - RNA, 21 nt, Human
auuaacaugaauauuuagugu

SEQ ID NO: 1819766 - RNA, 19 nt, Human
auuuguucuauagcuuuuc

SEQ ID NO: 1819767 - RNA, 14 nt, Human
auuuguuauaauga

SEQ ID NO: 1819768 - RNA, 17 nt, Human
auuuucuauaauuuaaa

SEQ ID NO: 1819769 - RNA, 18 nt, Human
auuuucuauaauuuaaau

SEQ ID NO: 1819770 - RNA, 19 nt, Human
auuuucuauaauuuaaaua

SEQ ID NO: 1819771 - RNA, 13 nt, Human
auuuugaaaaacu

SEQ ID NO: 1819772 - RNA, 15 nt, Human
auuuugaaaaacugc

SEQ ID NO: 1819773 - RNA, 20 nt, Human
caaaagguuaauaaaguaau

SEQ ID NO: 1819774 - RNA, 13 nt, Human
caaaagcauguga

SEQ ID NO: 1819775 - RNA, 19 nt, Human
caaaagcaucuaugugaga

SEQ ID NO: 1819776 - RNA, 21 nt, Human
caaaagguauuuuaaucacca

SEQ ID NO: 1819777 - RNA, 15 nt, Human
auuuuuuuuguuuca

SEQ ID NO: 1819778 - RNA, 16 nt, Human
auuuuuauuaaauuau

SEQ ID NO: 1819779 - RNA, 15 nt, Human
auuuuuuucugaauu

SEQ ID NO: 1819780 - RNA, 13 nt, Human
auuuuuaaagaaa

SEQ ID NO: 1819781 - RNA, 22 nt, Human
auuuuguuuuugucuuaaaaag

SEQ ID NO: 1819782 - RNA, 17 nt, Human
caaaccaucauugaaau

SEQ ID NO: 1819783 - RNA, 14 nt, Human
caaaccaucauuga

SEQ ID NO: 1819784 - RNA, 16 nt, Human
caaaccaucauugaaa

SEQ ID NO: 1819785 - RNA, 15 nt, Human
auuuauauaaauuuu

SEQ ID NO: 1819786 - RNA, 18 nt, Human
auuuaauuugaaauaugg

SEQ ID NO: 1819787 - RNA, 12 nt, Human
auuucacucucc

SEQ ID NO: 1819788 - RNA, 14 nt, Human
auuucacucuccuu

SEQ ID NO: 1819789 - RNA, 21 nt, Human
auuucuguuuagauaauacac

SEQ ID NO: 1819790 - RNA, 19 nt, Human
auuucuguuuagauaauac

SEQ ID NO: 1819791 - RNA, 20 nt, Human
auuucuguuuagauaauaca

SEQ ID NO: 1819792 - RNA, 16 nt, Human
caagaccacguuucua

SEQ ID NO: 1819793 - RNA, 14 nt, Human
caagaccacguuuc

SEQ ID NO: 1819794 - RNA, 18 nt, Human
caagcaagaaacacuggg

SEQ ID NO: 1819795 - RNA, 13 nt, Human
caagcaagaaaca

SEQ ID NO: 1819796 - RNA, 15 nt, Human
caagcaaaugugaau

SEQ ID NO: 1819797 - RNA, 17 nt, Human
caagcaaaugugaauca

SEQ ID NO: 1819798 - RNA, 19 nt, Human
caagcaaaugugaaucauu

SEQ ID NO: 1819799 - RNA, 13 nt, Human
caagcaccuccug

SEQ ID NO: 1819800 - RNA, 14 nt, Human
caagcaccuccugc

SEQ ID NO: 1819801 - RNA, 18 nt, Human
caagcaccuagccucgcu

SEQ ID NO: 1819802 - RNA, 16 nt, Human
caaccccuucgcuccu

SEQ ID NO: 1819803 - RNA, 14 nt, Human
caaccccuucgcuc

SEQ ID NO: 1819804 - RNA, 17 nt, Human
caaccccuucgcuccug

SEQ ID NO: 1819805 - RNA, 13 nt, Human
caacuauggccug

SEQ ID NO: 1819806 - RNA, 14 nt, Human
caacccccagccug

SEQ ID NO: 1819807 - RNA, 14 nt, Human
caacuauggccugu

SEQ ID NO: 1819808 - RNA, 21 nt, Human
caacucccugccccccagccc

SEQ ID NO: 1819809 - RNA, 15 nt, Human
caagaagcccaggaa

SEQ ID NO: 1819810 - RNA, 19 nt, Human
caacucccugccccccagc

SEQ ID NO: 1819811 - RNA, 20 nt, Human
caacucccugccccccagcc

SEQ ID NO: 1819812 - RNA, 19 nt, Human
caagaauagcauuguaaaa

SEQ ID NO: 1819813 - RNA, 18 nt, Human
caagaauagaugcugacu

SEQ ID NO: 1819814 - RNA, 18 nt, Human
caagaagcccaggaaagg

SEQ ID NO: 1819815 - RNA, 17 nt, Human
caagaaggaugauucaa

SEQ ID NO: 1819816 - RNA, 14 nt, Human
caaucaaaucugcu

SEQ ID NO: 1819817 - RNA, 15 nt, Human
caauggcagccuugg

SEQ ID NO: 1819818 - RNA, 14 nt, Human
caauggcagccuug

SEQ ID NO: 1819819 - RNA, 13 nt, Human
caauggcagccuu

SEQ ID NO: 1819820 - RNA, 16 nt, Human
caauggcagccuuggc

SEQ ID NO: 1819821 - RNA, 12 nt, Human
caaugcuggcug

SEQ ID NO: 1819822 - RNA, 20 nt, Human
caauuggauacgacaacuug

SEQ ID NO: 1819823 - RNA, 16 nt, Human
caauauuguacaguuu

SEQ ID NO: 1819824 - RNA, 18 nt, Human
caauauuguacaguuuuu

SEQ ID NO: 1819825 - RNA, 17 nt, Human
caauauuguacaguuuu

SEQ ID NO: 1819826 - RNA, 20 nt, Human
caauuuauuauggcacauca

SEQ ID NO: 1819827 - RNA, 16 nt, Human
caagcucugcuccucu

SEQ ID NO: 1819828 - RNA, 15 nt, Human
caagcucugcuccuc

SEQ ID NO: 1819829 - RNA, 12 nt, Human
caagcucccagg

SEQ ID NO: 1819830 - RNA, 14 nt, Human
caagcucccaggca

SEQ ID NO: 1819831 - RNA, 15 nt, Human
caagcucccaggcau

SEQ ID NO: 1819832 - RNA, 17 nt, Human
caagcucccaggcauuc

SEQ ID NO: 1819833 - RNA, 21 nt, Human
caagcuccaucuccacuccag

SEQ ID NO: 1819834 - RNA, 17 nt, Human
caagcuccaucuccacu

SEQ ID NO: 1819835 - RNA, 19 nt, Human
caagcuccaagcucccagg

SEQ ID NO: 1819836 - RNA, 21 nt, Human
caagcuccaagcucccaggca

SEQ ID NO: 1819837 - RNA, 17 nt, Human
caagcuccaagcuccca

SEQ ID NO: 1819838 - RNA, 18 nt, Human
caagcuccaagcucccag

SEQ ID NO: 1819839 - RNA, 20 nt, Human
caaggauugcuacuguccua

SEQ ID NO: 1819840 - RNA, 14 nt, Human
caaggcaaggcugu

SEQ ID NO: 1819841 - RNA, 22 nt, Human
caaguauuauaccuuuuuuaga

SEQ ID NO: 1819842 - RNA, 17 nt, Human
caaguauuauaccuuuu

SEQ ID NO: 1819843 - RNA, 12 nt, Human
cacccugcucuc

SEQ ID NO: 1819844 - RNA, 12 nt, Human
cacccuccuuuc

SEQ ID NO: 1819845 - RNA, 13 nt, Human
caccugccaggga

SEQ ID NO: 1819846 - RNA, 18 nt, Human
caccugccccucaacucu

SEQ ID NO: 1819847 - RNA, 21 nt, Human
caccugccccucaacucuccu

SEQ ID NO: 1819848 - RNA, 11 nt, Human
caccugccagg

SEQ ID NO: 1819849 - RNA, 12 nt, Human
caccugccaggg

SEQ ID NO: 1819850 - RNA, 16 nt, Human
caccugcggugcuauc

SEQ ID NO: 1819851 - RNA, 17 nt, Human
caccugcggugcuaucu

SEQ ID NO: 1819852 - RNA, 19 nt, Human
caccugcggugcuaucucc

SEQ ID NO: 1819853 - RNA, 20 nt, Human
caccugcggugcuaucuccc

SEQ ID NO: 1819854 - RNA, 14 nt, Human
cacuacauucuguu

SEQ ID NO: 1819855 - RNA, 13 nt, Human
cacuacauucugu

SEQ ID NO: 1819856 - RNA, 16 nt, Human
cacggaagagccuugc

SEQ ID NO: 1819857 - RNA, 22 nt, Human
cacggaagagccuugcggaagg

SEQ ID NO: 1819858 - RNA, 16 nt, Human
cacuagacccacugga

SEQ ID NO: 1819859 - RNA, 15 nt, Human
cacuacauucuguua

SEQ ID NO: 1819860 - RNA, 14 nt, Human
cacuccagaccccu

SEQ ID NO: 1819861 - RNA, 16 nt, Human
cacuccagaccccugg

SEQ ID NO: 1819862 - RNA, 15 nt, Human
cacgcuggagugcag

SEQ ID NO: 1819863 - RNA, 20 nt, Human
cacgcuggagugcagugagc

SEQ ID NO: 1819864 - RNA, 18 nt, Human
cacgcuggagugcaguga

SEQ ID NO: 1819865 - RNA, 17 nt, Human
cacgcuggagugcagug

SEQ ID NO: 1819866 - RNA, 16 nt, Human
cacgcuggagugcagu

SEQ ID NO: 1819867 - RNA, 21 nt, Human
cacgcuggagugcagugagcc

SEQ ID NO: 1819868 - RNA, 17 nt, Human
cacuccagaccccuggc

SEQ ID NO: 1819869 - RNA, 21 nt, Human
cacuccagugagacagcucug

SEQ ID NO: 1819870 - RNA, 16 nt, Human
cacuccagugagacag

SEQ ID NO: 1819871 - RNA, 22 nt, Human
cacaucuugcucugcugacaga

SEQ ID NO: 1819872 - RNA, 21 nt, Human
cacaucuugcucugcugacag

SEQ ID NO: 1819873 - RNA, 20 nt, Human
cacaucuugcucugcugaca

SEQ ID NO: 1819874 - RNA, 15 nt, Human
cacaucuugcucugc

SEQ ID NO: 1819875 - RNA, 14 nt, Human
cacaucuugcucug

SEQ ID NO: 1819876 - RNA, 13 nt, Human
cacaucuugcucu

SEQ ID NO: 1819877 - RNA, 12 nt, Human
cacccagcccac

SEQ ID NO: 1819878 - RNA, 22 nt, Human
caccagccccagugcccacagg

SEQ ID NO: 1819879 - RNA, 21 nt, Human
caccagccccagugcccacag

SEQ ID NO: 1819880 - RNA, 18 nt, Human
caccagccccagugccca

SEQ ID NO: 1819881 - RNA, 19 nt, Human
caccagcccuuagcaggga

SEQ ID NO: 1819882 - RNA, 17 nt, Human
caccagccccagugccc

SEQ ID NO: 1819883 - RNA, 18 nt, Human
cacauuuauucugcucac

SEQ ID NO: 1819884 - RNA, 17 nt, Human
cacauuuauucugcuca

SEQ ID NO: 1819885 - RNA, 23 nt, Human
cacaucuugcucugcugacagac

SEQ ID NO: 1819886 - RNA, 22 nt, Human
ccauuguggucacaggaaguag

SEQ ID NO: 1819887 - RNA, 23 nt, Human
cccaaccugcucuccucuugcca

SEQ ID NO: 1819888 - RNA, 13 nt, Human
cccaaccugcucu

SEQ ID NO: 1819889 - RNA, 14 nt, Human
cccaaccugcucuc

SEQ ID NO: 1819890 - RNA, 21 nt, Human
cccaaccugcucuccucuugc

SEQ ID NO: 1819891 - RNA, 17 nt, Human
cccaagcucugcuccuc

SEQ ID NO: 1819892 - RNA, 20 nt, Human
cccaagaauagaugcugacu

SEQ ID NO: 1819893 - RNA, 21 nt, Human
cccaagaauagaugcugacug

SEQ ID NO: 1819894 - RNA, 16 nt, Human
cccaagccuggcaagg

SEQ ID NO: 1819895 - RNA, 23 nt, Human
cccaagccuacuuuugccauuga

SEQ ID NO: 1819896 - RNA, 18 nt, Human
cccacccaagggccuggc

SEQ ID NO: 1819897 - RNA, 15 nt, Human
cccacccaagggccu

SEQ ID NO: 1819898 - RNA, 18 nt, Human
cccacuguacuugcucuu

SEQ ID NO: 1819899 - RNA, 19 nt, Human
cccacuguacuugcucuug

SEQ ID NO: 1819900 - RNA, 23 nt, Human
cccacuguacuugcucuugaugc

SEQ ID NO: 1819901 - RNA, 15 nt, Human
cccaccgcagacagg

SEQ ID NO: 1819902 - RNA, 18 nt, Human
cccaccgcagacaggacc

SEQ ID NO: 1819903 - RNA, 13 nt, Human
ccaugagccucag

SEQ ID NO: 1819904 - RNA, 16 nt, Human
ccaugaggaacaaggc

SEQ ID NO: 1819905 - RNA, 17 nt, Human
ccaugaggaacaaggca

SEQ ID NO: 1819906 - RNA, 18 nt, Human
ccaugaggaacaaggcaa

SEQ ID NO: 1819907 - RNA, 20 nt, Human
ccaugucucugagcauuaga

SEQ ID NO: 1819908 - RNA, 14 nt, Human
ccaugucucgacuc

SEQ ID NO: 1819909 - RNA, 15 nt, Human
ccaugucucgacuca

SEQ ID NO: 1819910 - RNA, 21 nt, Human
ccccaaaacucuccucugcug

SEQ ID NO: 1819911 - RNA, 20 nt, Human
ccccaaaacucuccucugcu

SEQ ID NO: 1819912 - RNA, 18 nt, Human
ccccaaaacucuccucug

SEQ ID NO: 1819913 - RNA, 21 nt, Human
ccccauucugccugcccaggc

SEQ ID NO: 1819914 - RNA, 14 nt, Human
ccccagccccaucc

SEQ ID NO: 1819915 - RNA, 14 nt, Human
ccccagccccaaaa

SEQ ID NO: 1819916 - RNA, 10 nt, Human
ccccagcccc

SEQ ID NO: 1819917 - RNA, 12 nt, Human
ccccagccccaa

SEQ ID NO: 1819918 - RNA, 14 nt, Human
ccccggccaccugc

SEQ ID NO: 1819919 - RNA, 18 nt, Human
ccccggccaccugcggug

SEQ ID NO: 1819920 - RNA, 13 nt, Human
ccccggccaccug

SEQ ID NO: 1819921 - RNA, 14 nt, Human
ccccgcccaggcuu

SEQ ID NO: 1819922 - RNA, 12 nt, Human
ccccgcccaggc

SEQ ID NO: 1819923 - RNA, 14 nt, Human
cccccuuccaugga

SEQ ID NO: 1819924 - RNA, 15 nt, Human
ccccauuguggucac

SEQ ID NO: 1819925 - RNA, 19 nt, Human
cccagcccacuucugccau

SEQ ID NO: 1819926 - RNA, 21 nt, Human
cccagccccaaaacucuccuc

SEQ ID NO: 1819927 - RNA, 23 nt, Human
cccagccccaaaacucuccucug

SEQ ID NO: 1819928 - RNA, 20 nt, Human
cccagcuggggccaggcugg

SEQ ID NO: 1819929 - RNA, 14 nt, Human
cccauccucuguac

SEQ ID NO: 1819930 - RNA, 20 nt, Human
cccaggcuggcgugcagugg

SEQ ID NO: 1819931 - RNA, 19 nt, Human
cccaggcuggcgugcagug

SEQ ID NO: 1819932 - RNA, 18 nt, Human
cccaggcuggcgugcagu

SEQ ID NO: 1819933 - RNA, 22 nt, Human
cccagcuggggccaggcugggu

SEQ ID NO: 1819934 - RNA, 23 nt, Human
cccagcuggggccaggcuggguc

SEQ ID NO: 1819935 - RNA, 20 nt, Human
cccauccucuguacagagcc

SEQ ID NO: 1819936 - RNA, 15 nt, Human
cccauccucuguaca

SEQ ID NO: 1819937 - RNA, 19 nt, Human
cccauccucuguacagagc

SEQ ID NO: 1819938 - RNA, 19 nt, Human
ccacugcaccgggccacag

SEQ ID NO: 1819939 - RNA, 17 nt, Human
ccacugcaccgggccac

SEQ ID NO: 1819940 - RNA, 14 nt, Human
ccacugcaccgggc

SEQ ID NO: 1819941 - RNA, 13 nt, Human
ccacugcaccggg

SEQ ID NO: 1819942 - RNA, 20 nt, Human
ccacugcacuauagccuagg

SEQ ID NO: 1819943 - RNA, 19 nt, Human
ccacugcacuauagccuag

SEQ ID NO: 1819944 - RNA, 18 nt, Human
ccacugcacuccagccug

SEQ ID NO: 1819945 - RNA, 12 nt, Human
ccacuuggucug

SEQ ID NO: 1819946 - RNA, 17 nt, Human
ccagacccggcugcgug

SEQ ID NO: 1819947 - RNA, 22 nt, Human
ccacuuuuguucuugguuugua

SEQ ID NO: 1819948 - RNA, 21 nt, Human
ccacuuuuguucuugguuugu

SEQ ID NO: 1819949 - RNA, 15 nt, Human
ccacuuuuguucuug

SEQ ID NO: 1819950 - RNA, 14 nt, Human
ccacuuuuguucuu

SEQ ID NO: 1819951 - RNA, 19 nt, Human
ccacuuggucugugagaug

SEQ ID NO: 1819952 - RNA, 17 nt, Human
ccacuuggucugugaga

SEQ ID NO: 1819953 - RNA, 16 nt, Human
ccacuuggucugugag

SEQ ID NO: 1819954 - RNA, 15 nt, Human
ccacuuggucuguga

SEQ ID NO: 1819955 - RNA, 22 nt, Human
ccacuuggucugugagaugcua

SEQ ID NO: 1819956 - RNA, 20 nt, Human
ccacuuggucugugagaugc

SEQ ID NO: 1819957 - RNA, 20 nt, Human
ccacuuucuagccagaggag

SEQ ID NO: 1819958 - RNA, 18 nt, Human
ccacuuucuagccagagg

SEQ ID NO: 1819959 - RNA, 19 nt, Human
ccacuuucuagccagagga

SEQ ID NO: 1819960 - RNA, 13 nt, Human
ccacuuucuagcc

SEQ ID NO: 1819961 - RNA, 14 nt, Human
ccagaugcaccagc

SEQ ID NO: 1819962 - RNA, 13 nt, Human
ccagaugcaccag

SEQ ID NO: 1819963 - RNA, 13 nt, Human
ccagagagggugg

SEQ ID NO: 1819964 - RNA, 16 nt, Human
ccagagacacaagccu

SEQ ID NO: 1819965 - RNA, 18 nt, Human
ccagagacacaagccuuc

SEQ ID NO: 1819966 - RNA, 19 nt, Human
ccagucaccccggccaccu

SEQ ID NO: 1819967 - RNA, 17 nt, Human
ccagucaccccggccac

SEQ ID NO: 1819968 - RNA, 18 nt, Human
ccagucaccccggccacc

SEQ ID NO: 1819969 - RNA, 17 nt, Human
ccaggcugagccucagu

SEQ ID NO: 1819970 - RNA, 19 nt, Human
ccaggcugagccucagucu

SEQ ID NO: 1819971 - RNA, 22 nt, Human
ccaggcugagccucagucuccc

SEQ ID NO: 1819972 - RNA, 14 nt, Human
ccaggcugagccuc

SEQ ID NO: 1819973 - RNA, 16 nt, Human
ccaggcugagccucag

SEQ ID NO: 1819974 - RNA, 13 nt, Human
ccaggcugagccu

SEQ ID NO: 1819975 - RNA, 20 nt, Human
ccaggggugggacacccugu

SEQ ID NO: 1819976 - RNA, 21 nt, Human
ccaggggugggacacccugug

SEQ ID NO: 1819977 - RNA, 22 nt, Human
ccaggggugggacacccuguga

SEQ ID NO: 1819978 - RNA, 23 nt, Human
ccaggggugggacacccugugau

SEQ ID NO: 1819979 - RNA, 19 nt, Human
ccaguaucuugaagacuuu

SEQ ID NO: 1819980 - RNA, 22 nt, Human
ccaguaucuugaagacuuuucu

SEQ ID NO: 1819981 - RNA, 16 nt, Human
ccagucaccccggcca

SEQ ID NO: 1819982 - RNA, 20 nt, Human
ccaggaaaggcuccaggagc

SEQ ID NO: 1819983 - RNA, 17 nt, Human
ccaggaaaggcuccagg

SEQ ID NO: 1819984 - RNA, 18 nt, Human
ccaggaaaggcuccagga

SEQ ID NO: 1819985 - RNA, 19 nt, Human
ccaggaaaggcuccaggag

SEQ ID NO: 1819986 - RNA, 21 nt, Human
ccagcgagcccugguggcagu

SEQ ID NO: 1819987 - RNA, 18 nt, Human
ccagccccuucugaccca

SEQ ID NO: 1819988 - RNA, 18 nt, Human
ccagccccuggaugcagc

SEQ ID NO: 1819989 - RNA, 15 nt, Human
ccagccccuucugac

SEQ ID NO: 1819990 - RNA, 16 nt, Human
ccagccccuucugacc

SEQ ID NO: 1819991 - RNA, 17 nt, Human
ccagccccuucugaccc

SEQ ID NO: 1819992 - RNA, 13 nt, Human
ccagcagccugga

SEQ ID NO: 1819993 - RNA, 23 nt, Human
ccagccccauccucuguacagag

SEQ ID NO: 1819994 - RNA, 13 nt, Human
ccagccccuggau

SEQ ID NO: 1819995 - RNA, 14 nt, Human
ccagccccuggaug

SEQ ID NO: 1819996 - RNA, 15 nt, Human
ccagccccuggaugc

SEQ ID NO: 1819997 - RNA, 22 nt, Human
ccagcagaaaugccuuacccuc

SEQ ID NO: 1819998 - RNA, 17 nt, Human
ccagcagaaaugccuua

SEQ ID NO: 1819999 - RNA, 16 nt, Human
ccagcagaaaugccuu

SEQ ID NO: 1820000 - RNA, 11 nt, Human
ccagcagccug

SEQ ID NO: 1820001 - RNA, 12 nt, Human
ccagcagccugg

SEQ ID NO: 1820002 - RNA, 14 nt, Human
ccuaaucuucugaa

SEQ ID NO: 1820003 - RNA, 20 nt, Human
ccuagccugugccucuggga

SEQ ID NO: 1820004 - RNA, 21 nt, Human
ccuagcauacguacacauuuu

SEQ ID NO: 1820005 - RNA, 17 nt, Human
ccuagcacuuugggagg

SEQ ID NO: 1820006 - RNA, 20 nt, Human
ccuaaugcgcaggcuggccc

SEQ ID NO: 1820007 - RNA, 19 nt, Human
ccuagcauacguacacauu

SEQ ID NO: 1820008 - RNA, 14 nt, Human
ccggcuccaggcuc

SEQ ID NO: 1820009 - RNA, 13 nt, Human
ccggcuccaggcu

SEQ ID NO: 1820010 - RNA, 12 nt, Human
ccggcuccaggc

SEQ ID NO: 1820011 - RNA, 15 nt, Human
ccggcuccaggcucc

SEQ ID NO: 1820012 - RNA, 14 nt, Human
ccgucuaccugagg

SEQ ID NO: 1820013 - RNA, 15 nt, Human
ccgucuaccugaggg

SEQ ID NO: 1820014 - RNA, 17 nt, Human
ccgucuaccugaggggc

SEQ ID NO: 1820015 - RNA, 12 nt, Human
ccgugaggccag

SEQ ID NO: 1820016 - RNA, 13 nt, Human
ccgugaggccaga

SEQ ID NO: 1820017 - RNA, 14 nt, Human
ccgugaggccagag

SEQ ID NO: 1820018 - RNA, 16 nt, Human
ccgugaggccagagac

SEQ ID NO: 1820019 - RNA, 20 nt, Human
ccuaacgaaguauccuucag

SEQ ID NO: 1820020 - RNA, 15 nt, Human
ccggccccugcuggu

SEQ ID NO: 1820021 - RNA, 16 nt, Human
ccggccaccugcggug

SEQ ID NO: 1820022 - RNA, 18 nt, Human
ccggcaggguccuagaaa

SEQ ID NO: 1820023 - RNA, 13 nt, Human
cccugucuaauga

SEQ ID NO: 1820024 - RNA, 23 nt, Human
cccugugauggggcccugccucc

SEQ ID NO: 1820025 - RNA, 21 nt, Human
cccuuccucuccacugccuuc

SEQ ID NO: 1820026 - RNA, 21 nt, Human
cccugugauggggcccugccu

SEQ ID NO: 1820027 - RNA, 22 nt, Human
cccugugauggggcccugccuc

SEQ ID NO: 1820028 - RNA, 12 nt, Human
ccgcccaggcuu

SEQ ID NO: 1820029 - RNA, 16 nt, Human
ccgcagacaggaccag

SEQ ID NO: 1820030 - RNA, 17 nt, Human
ccgcagacaggaccagg

SEQ ID NO: 1820031 - RNA, 15 nt, Human
cccuuccucuuucca

SEQ ID NO: 1820032 - RNA, 19 nt, Human
ccgaaagggacuuggaagc

SEQ ID NO: 1820033 - RNA, 16 nt, Human
ccgaaaacguggcugc

SEQ ID NO: 1820034 - RNA, 17 nt, Human
ccgaaaacguggcugcu

SEQ ID NO: 1820035 - RNA, 17 nt, Human
ccgaccagacaccuuga

SEQ ID NO: 1820036 - RNA, 13 nt, Human
ccgaccagacacc

SEQ ID NO: 1820037 - RNA, 18 nt, Human
ccgaccagacaccuugac

SEQ ID NO: 1820038 - RNA, 15 nt, Human
ccgaccaccugccca

SEQ ID NO: 1820039 - RNA, 17 nt, Human
ccgaauagcugggacua

SEQ ID NO: 1820040 - RNA, 16 nt, Human
ccgaauagcugggacu

SEQ ID NO: 1820041 - RNA, 23 nt, Human
ccgaaggugaggagcuugaaacc

SEQ ID NO: 1820042 - RNA, 20 nt, Human
cccugcccaccuggccucug

SEQ ID NO: 1820043 - RNA, 16 nt, Human
cccugagcuuucugcu

SEQ ID NO: 1820044 - RNA, 17 nt, Human
cccugcccggcugcgga

SEQ ID NO: 1820045 - RNA, 14 nt, Human
cccugcccggcugc

SEQ ID NO: 1820046 - RNA, 18 nt, Human
cccugccccucccuucaa

SEQ ID NO: 1820047 - RNA, 19 nt, Human
cccugccccucccuucaac

SEQ ID NO: 1820048 - RNA, 23 nt, Human
cccugccccucccuucaaccauu

SEQ ID NO: 1820049 - RNA, 17 nt, Human
cccugccccucccuuca

SEQ ID NO: 1820050 - RNA, 22 nt, Human
cccugcccaccuggccucugca

SEQ ID NO: 1820051 - RNA, 20 nt, Human
cccugccccccagcccuccu

SEQ ID NO: 1820052 - RNA, 15 nt, Human
cccugccccccagcc

SEQ ID NO: 1820053 - RNA, 14 nt, Human
cccugccccccagc

SEQ ID NO: 1820054 - RNA, 20 nt, Human
cccuggcucccacaggcccu

SEQ ID NO: 1820055 - RNA, 11 nt, Human
cccugcccugg

SEQ ID NO: 1820056 - RNA, 12 nt, Human
cccugcccuggu

SEQ ID NO: 1820057 - RNA, 22 nt, Human
cccugcccugguuuccugcccu

SEQ ID NO: 1820058 - RNA, 23 nt, Human
cccugcccugguuuccugcccug

SEQ ID NO: 1820059 - RNA, 13 nt, Human
cccuggaugcagc

SEQ ID NO: 1820060 - RNA, 17 nt, Human
cccuggaugcagccuca

SEQ ID NO: 1820061 - RNA, 21 nt, Human
cccuggaugcagccucacagu

SEQ ID NO: 1820062 - RNA, 19 nt, Human
cccuggauccaucaggcca

SEQ ID NO: 1820063 - RNA, 18 nt, Human
cccugaaagcccugagcu

SEQ ID NO: 1820064 - RNA, 11 nt, Human
cccuccuccug

SEQ ID NO: 1820065 - RNA, 16 nt, Human
cccuccuccuggacuc

SEQ ID NO: 1820066 - RNA, 18 nt, Human
cccuccuccuggacuccu

SEQ ID NO: 1820067 - RNA, 22 nt, Human
cccucgaggcggaucuuuggac

SEQ ID NO: 1820068 - RNA, 23 nt, Human
cccucgaggcggaucuuuggaca

SEQ ID NO: 1820069 - RNA, 14 nt, Human
cccuccucucugcc

SEQ ID NO: 1820070 - RNA, 12 nt, Human
cccugaaggccc

SEQ ID NO: 1820071 - RNA, 13 nt, Human
cccugaaggcccc

SEQ ID NO: 1820072 - RNA, 14 nt, Human
cccugaaggccccg

SEQ ID NO: 1820073 - RNA, 16 nt, Human
cccugaaggccccgcc

SEQ ID NO: 1820074 - RNA, 19 nt, Human
cccugaaggccccgcccag

SEQ ID NO: 1820075 - RNA, 14 nt, Human
cccugacaacacuc

SEQ ID NO: 1820076 - RNA, 20 nt, Human
cccugaaggccccgcccagg

SEQ ID NO: 1820077 - RNA, 22 nt, Human
cccugaaggccccgcccaggcu

SEQ ID NO: 1820078 - RNA, 16 nt, Human
cccugacaacacucau

SEQ ID NO: 1820079 - RNA, 22 nt, Human
cccugacaacacucauugaccu

SEQ ID NO: 1820080 - RNA, 20 nt, Human
ccucugccugaagucacaca

SEQ ID NO: 1820081 - RNA, 11 nt, Human
ccucugccuga

SEQ ID NO: 1820082 - RNA, 23 nt, Human
ccucugccucugacacacagcuc

SEQ ID NO: 1820083 - RNA, 21 nt, Human
ccucugccucugacacacagc

SEQ ID NO: 1820084 - RNA, 20 nt, Human
ccucugccucugacacacag

SEQ ID NO: 1820085 - RNA, 11 nt, Human
ccucugcccug

SEQ ID NO: 1820086 - RNA, 12 nt, Human
ccucugcccugc

SEQ ID NO: 1820087 - RNA, 13 nt, Human
ccucugcccugcg

SEQ ID NO: 1820088 - RNA, 14 nt, Human
ccucugcccugcgg

SEQ ID NO: 1820089 - RNA, 16 nt, Human
ccucucugcagguccc

SEQ ID NO: 1820090 - RNA, 17 nt, Human
ccucucugcaggucccu

SEQ ID NO: 1820091 - RNA, 18 nt, Human
ccucucugcaggucccua

SEQ ID NO: 1820092 - RNA, 19 nt, Human
ccucucugcaggucccuaa

SEQ ID NO: 1820093 - RNA, 12 nt, Human
ccucucucacuc

SEQ ID NO: 1820094 - RNA, 13 nt, Human
ccuccgccucccg

SEQ ID NO: 1820095 - RNA, 16 nt, Human
ccuccgccucccgggu

SEQ ID NO: 1820096 - RNA, 15 nt, Human
ccucgaacuggcugc

SEQ ID NO: 1820097 - RNA, 16 nt, Human
ccucgaacuggcugca

SEQ ID NO: 1820098 - RNA, 16 nt, Human
ccucgagguuucucaa

SEQ ID NO: 1820099 - RNA, 18 nt, Human
ccuccuuugugaggaagc

SEQ ID NO: 1820100 - RNA, 19 nt, Human
ccuccuuugugaggaagcc

SEQ ID NO: 1820101 - RNA, 20 nt, Human
ccuccuuugugaggaagccg

SEQ ID NO: 1820102 - RNA, 15 nt, Human
ccucagccuccugag

SEQ ID NO: 1820103 - RNA, 18 nt, Human
ccucagccuccugaguag

SEQ ID NO: 1820104 - RNA, 11 nt, Human
ccucaggcagg

SEQ ID NO: 1820105 - RNA, 17 nt, Human
ccucccaacucacccca

SEQ ID NO: 1820106 - RNA, 20 nt, Human
ccucccaacucaccccagcc

SEQ ID NO: 1820107 - RNA, 21 nt, Human
ccucccaacucaccccagccc

SEQ ID NO: 1820108 - RNA, 23 nt, Human
ccucccaacucaccccagcccca

SEQ ID NO: 1820109 - RNA, 17 nt, Human
ccugaggcugggcuccc

SEQ ID NO: 1820110 - RNA, 19 nt, Human
ccugaggcugggcucccuu

SEQ ID NO: 1820111 - RNA, 21 nt, Human
ccugaggcugggcucccuucc

SEQ ID NO: 1820112 - RNA, 12 nt, Human
ccugaggggccu

SEQ ID NO: 1820113 - RNA, 16 nt, Human
ccugaggggccucuua

SEQ ID NO: 1820114 - RNA, 15 nt, Human
ccugcaggcagccag

SEQ ID NO: 1820115 - RNA, 12 nt, Human
ccugcagagggc

SEQ ID NO: 1820116 - RNA, 16 nt, Human
ccugcaggcagccagg

SEQ ID NO: 1820117 - RNA, 17 nt, Human
ccugcaggcagccaggc

SEQ ID NO: 1820118 - RNA, 14 nt, Human
ccugcagagggcac

SEQ ID NO: 1820119 - RNA, 23 nt, Human
ccugcaggcagccaggccacaag

SEQ ID NO: 1820120 - RNA, 18 nt, Human
ccugcaggcagccaggcc

SEQ ID NO: 1820121 - RNA, 19 nt, Human
ccugcaggcagccaggcca

SEQ ID NO: 1820122 - RNA, 20 nt, Human
ccugcaggcagccaggccac

SEQ ID NO: 1820123 - RNA, 21 nt, Human
ccugcaggcagccaggccaca

SEQ ID NO: 1820124 - RNA, 21 nt, Human
ccucugccugaagucacacag

SEQ ID NO: 1820125 - RNA, 15 nt, Human
ccucugccugucucc

SEQ ID NO: 1820126 - RNA, 19 nt, Human
ccucugccugucuccccca

SEQ ID NO: 1820127 - RNA, 16 nt, Human
ccucuuugagugaagc

SEQ ID NO: 1820128 - RNA, 19 nt, Human
ccucuuuggucuacacugu

SEQ ID NO: 1820129 - RNA, 22 nt, Human
ccugcugcaguugccagucacc

SEQ ID NO: 1820130 - RNA, 11 nt, Human
ccugcugcagu

SEQ ID NO: 1820131 - RNA, 12 nt, Human
ccugcugcaguu

SEQ ID NO: 1820132 - RNA, 16 nt, Human
ccugcugcaguugcca

SEQ ID NO: 1820133 - RNA, 20 nt, Human
ccugccucucugcagguccc

SEQ ID NO: 1820134 - RNA, 21 nt, Human
ccugccucucugcaggucccu

SEQ ID NO: 1820135 - RNA, 15 nt, Human
ccugccucuucucua

SEQ ID NO: 1820136 - RNA, 17 nt, Human
ccugccucucugcaggu

SEQ ID NO: 1820137 - RNA, 23 nt, Human
ccugccuccuuugugaggaagcc

SEQ ID NO: 1820138 - RNA, 21 nt, Human
ccugccuccuuugugaggaag

SEQ ID NO: 1820139 - RNA, 22 nt, Human
ccugccuccuuugugaggaagc

SEQ ID NO: 1820140 - RNA, 13 nt, Human
ccugccuccuuug

SEQ ID NO: 1820141 - RNA, 15 nt, Human
ccugccuccuuugug

SEQ ID NO: 1820142 - RNA, 19 nt, Human
ccugccuccuuugugagga

SEQ ID NO: 1820143 - RNA, 20 nt, Human
ccugccuccuuugugaggaa

SEQ ID NO: 1820144 - RNA, 20 nt, Human
ccuuaggugauccacucgcc

SEQ ID NO: 1820145 - RNA, 13 nt, Human
ccuuaucaaagga

SEQ ID NO: 1820146 - RNA, 12 nt, Human
ccuuauggaaca

SEQ ID NO: 1820147 - RNA, 14 nt, Human
ccuuaucaaaggac

SEQ ID NO: 1820148 - RNA, 18 nt, Human
ccuuaucaaaggacacca

SEQ ID NO: 1820149 - RNA, 22 nt, Human
ccuuauggaacacucugagacu

SEQ ID NO: 1820150 - RNA, 19 nt, Human
ccuuauggaacacucugag

SEQ ID NO: 1820151 - RNA, 20 nt, Human
ccuuauggaacacucugaga

SEQ ID NO: 1820152 - RNA, 14 nt, Human
ccuuauggaacacu

SEQ ID NO: 1820153 - RNA, 16 nt, Human
ccuuauggaacacucu

SEQ ID NO: 1820154 - RNA, 17 nt, Human
ccuuauggaacacucug

SEQ ID NO: 1820155 - RNA, 18 nt, Human
ccuuauggaacacucuga

SEQ ID NO: 1820156 - RNA, 15 nt, Human
ccuucccaugcccug

SEQ ID NO: 1820157 - RNA, 12 nt, Human
ccuucccaccuc

SEQ ID NO: 1820158 - RNA, 14 nt, Human
ccuucccaccucuc

SEQ ID NO: 1820159 - RNA, 19 nt, Human
ccuucccaccucucucacu

SEQ ID NO: 1820160 - RNA, 19 nt, Human
ccuguucagcuccagcuca

SEQ ID NO: 1820161 - RNA, 16 nt, Human
ccuguucagcuccagc

SEQ ID NO: 1820162 - RNA, 15 nt, Human
ccuguucagcuccag

SEQ ID NO: 1820163 - RNA, 14 nt, Human
ccuguucagcucca

SEQ ID NO: 1820164 - RNA, 21 nt, Human
ccuguucagcuccagcucacc

SEQ ID NO: 1820165 - RNA, 20 nt, Human
ccuguucagcuccagcucac

SEQ ID NO: 1820166 - RNA, 23 nt, Human
ccuguucagcuccagcucaccag

SEQ ID NO: 1820167 - RNA, 16 nt, Human
ccuguucugcuuuccu

SEQ ID NO: 1820168 - RNA, 12 nt, Human
ccuguucuggca

SEQ ID NO: 1820169 - RNA, 17 nt, Human
ccuguucuggcagaguu

SEQ ID NO: 1820170 - RNA, 12 nt, Human
ccuguucccauu

SEQ ID NO: 1820171 - RNA, 18 nt, Human
ccuguucccaugagauga

SEQ ID NO: 1820172 - RNA, 16 nt, Human
ccuguugggccaggag

SEQ ID NO: 1820173 - RNA, 17 nt, Human
ccuguugggccaggagc

SEQ ID NO: 1820174 - RNA, 18 nt, Human
ccuguugggccaggagcc

SEQ ID NO: 1820175 - RNA, 19 nt, Human
ccuguugggccaggagccu

SEQ ID NO: 1820176 - RNA, 20 nt, Human
ccuguugggccaggagccuc

SEQ ID NO: 1820177 - RNA, 20 nt, Human
ccuuagcagggaaacagcua

SEQ ID NO: 1820178 - RNA, 19 nt, Human
ccuuagcagggaaacagcu

SEQ ID NO: 1820179 - RNA, 16 nt, Human
ccuuagcaaauucugu

SEQ ID NO: 1820180 - RNA, 13 nt, Human
ccuguucagcucc

SEQ ID NO: 1820181 - RNA, 21 nt, Human
ccuguucacucuacuuagcau

SEQ ID NO: 1820182 - RNA, 21 nt, Human
ccuucuguccuacucuguguc

SEQ ID NO: 1820183 - RNA, 20 nt, Human
ccuucuguccuacucugugu

SEQ ID NO: 1820184 - RNA, 17 nt, Human
ccuucucuucacaguca

SEQ ID NO: 1820185 - RNA, 22 nt, Human
ccuucuguccuacucuguguca

SEQ ID NO: 1820186 - RNA, 16 nt, Human
ccuucucugaaggaca

SEQ ID NO: 1820187 - RNA, 14 nt, Human
ccuucucugaagga

SEQ ID NO: 1820188 - RNA, 20 nt, Human
ccuuccucuccacugccuuc

SEQ ID NO: 1820189 - RNA, 21 nt, Human
ccuucucuccagccccuggau

SEQ ID NO: 1820190 - RNA, 23 nt, Human
ccuucucuccagccccuggaugc

SEQ ID NO: 1820191 - RNA, 14 nt, Human
ccuuccucuccacu

SEQ ID NO: 1820192 - RNA, 15 nt, Human
ccuuccucuccacug

SEQ ID NO: 1820193 - RNA, 16 nt, Human
ccuuccucuccacugc

SEQ ID NO: 1820194 - RNA, 17 nt, Human
ccuuccucuccacugcc

SEQ ID NO: 1820195 - RNA, 20 nt, Human
ccuucucuccagccccugga

SEQ ID NO: 1820196 - RNA, 21 nt, Human
ccuuccuaauuccacagcugc

SEQ ID NO: 1820197 - RNA, 19 nt, Human
ccuuccuaauuccacagcu

SEQ ID NO: 1820198 - RNA, 20 nt, Human
ccuuccuaauuccacagcug

SEQ ID NO: 1820199 - RNA, 18 nt, Human
ccuuccuaauuccacagc

SEQ ID NO: 1820200 - RNA, 19 nt, Human
ccuucccccuccaauccca

SEQ ID NO: 1820201 - RNA, 15 nt, Human
ccuuucaauaggaaa

SEQ ID NO: 1820202 - RNA, 14 nt, Human
ccuuuauucuggca

SEQ ID NO: 1820203 - RNA, 18 nt, Human
ccuuucaauaggaaaaac

SEQ ID NO: 1820204 - RNA, 17 nt, Human
ccuuucaauaggaaaaa

SEQ ID NO: 1820205 - RNA, 14 nt, Human
ccuugcauaauggu

SEQ ID NO: 1820206 - RNA, 19 nt, Human
cuacaaaaagcauaaaaau

SEQ ID NO: 1820207 - RNA, 20 nt, Human
cuaauaaaauuuaaaagucu

SEQ ID NO: 1820208 - RNA, 14 nt, Human
cuaaguuuuuaugg

SEQ ID NO: 1820209 - RNA, 11 nt, Human
cuaaagcugcc

SEQ ID NO: 1820210 - RNA, 16 nt, Human
cgugaggccagagaca

SEQ ID NO: 1820211 - RNA, 19 nt, Human
cgugaguccuggcauggga

SEQ ID NO: 1820212 - RNA, 18 nt, Human
cgugaguccuggcauggg

SEQ ID NO: 1820213 - RNA, 15 nt, Human
cguguuaugacucca

SEQ ID NO: 1820214 - RNA, 19 nt, Human
cguguuaugacuccagaau

SEQ ID NO: 1820215 - RNA, 16 nt, Human
cuaaagccucaaaaca

SEQ ID NO: 1820216 - RNA, 23 nt, Human
cuaaaguaaaaacaaagaaauua

SEQ ID NO: 1820217 - RNA, 19 nt, Human
cuaaaguguauuuuuuuac

SEQ ID NO: 1820218 - RNA, 20 nt, Human
cuaacgaaguauccuucagc

SEQ ID NO: 1820219 - RNA, 22 nt, Human
cuaagaaagcccuuaggaagaa

SEQ ID NO: 1820220 - RNA, 16 nt, Human
cuaacuuuccuucauu

SEQ ID NO: 1820221 - RNA, 14 nt, Human
cuaacuugucuuug

SEQ ID NO: 1820222 - RNA, 22 nt, Human
cuaacuugucuuuggacccuga

SEQ ID NO: 1820223 - RNA, 15 nt, Human
cgugacaacacuugu

SEQ ID NO: 1820224 - RNA, 14 nt, Human
cgugacaacacuug

SEQ ID NO: 1820225 - RNA, 20 nt, Human
cgugagccacugcaccgggc

SEQ ID NO: 1820226 - RNA, 15 nt, Human
cgugagccacugcac

SEQ ID NO: 1820227 - RNA, 14 nt, Human
cgugagccacugca

SEQ ID NO: 1820228 - RNA, 14 nt, Human
cgugaggccagaga

SEQ ID NO: 1820229 - RNA, 22 nt, Human
cgugagccacugcaccgggcca

SEQ ID NO: 1820230 - RNA, 19 nt, Human
cgcugccccuggcagcccc

SEQ ID NO: 1820231 - RNA, 20 nt, Human
cgcugccccuggcagccccu

SEQ ID NO: 1820232 - RNA, 19 nt, Human
cgcucuguugcccaggcug

SEQ ID NO: 1820233 - RNA, 20 nt, Human
cgcucugucgcccaggcugg

SEQ ID NO: 1820234 - RNA, 22 nt, Human
cgcucuguugcccaggcuggag

SEQ ID NO: 1820235 - RNA, 21 nt, Human
cgcucuuggcagguacucagc

SEQ ID NO: 1820236 - RNA, 18 nt, Human
cgcuggagugcagugagc

SEQ ID NO: 1820237 - RNA, 17 nt, Human
cgcuggagugcagugag

SEQ ID NO: 1820238 - RNA, 20 nt, Human
ccuuuucgcaggauucuucc

SEQ ID NO: 1820239 - RNA, 20 nt, Human
cgagucucuucuccacugga

SEQ ID NO: 1820240 - RNA, 21 nt, Human
cgagucucuucuccacuggau

SEQ ID NO: 1820241 - RNA, 21 nt, Human
cgcaggcuggcccugcccugg

SEQ ID NO: 1820242 - RNA, 22 nt, Human
cgcaggcuggcccugcccuggu

SEQ ID NO: 1820243 - RNA, 17 nt, Human
cgagucucuucuccacu

SEQ ID NO: 1820244 - RNA, 18 nt, Human
cgagucucuucuccacug

SEQ ID NO: 1820245 - RNA, 16 nt, Human
cgagucucuucuccac

SEQ ID NO: 1820246 - RNA, 18 nt, Human
cggcuaauuuuuguauuu

SEQ ID NO: 1820247 - RNA, 23 nt, Human
cggagucccaccuuggcugcagg

SEQ ID NO: 1820248 - RNA, 15 nt, Human
cggaggggccuggca

SEQ ID NO: 1820249 - RNA, 22 nt, Human
cggagucccaccuuggcugcag

SEQ ID NO: 1820250 - RNA, 21 nt, Human
cggagucccaccuuggcugca

SEQ ID NO: 1820251 - RNA, 17 nt, Human
cggagacggagucccac

SEQ ID NO: 1820252 - RNA, 20 nt, Human
cggagacggagucccaccuu

SEQ ID NO: 1820253 - RNA, 16 nt, Human
cgggccuggagaacua

SEQ ID NO: 1820254 - RNA, 20 nt, Human
cgggccuggagaacuagaga

SEQ ID NO: 1820255 - RNA, 19 nt, Human
cgggcucagcaaaagaugc

SEQ ID NO: 1820256 - RNA, 16 nt, Human
cgggcugggagcucug

SEQ ID NO: 1820257 - RNA, 20 nt, Human
cgggcugggagcucugcaga

SEQ ID NO: 1820258 - RNA, 12 nt, Human
cgggcucugccu

SEQ ID NO: 1820259 - RNA, 13 nt, Human
cgggcucugccuc

SEQ ID NO: 1820260 - RNA, 22 nt, Human
cguacacauuuuauuuuauuau

SEQ ID NO: 1820261 - RNA, 20 nt, Human
cgguggcucacgccuguaau

SEQ ID NO: 1820262 - RNA, 17 nt, Human
cguaaagcuagaaauga

SEQ ID NO: 1820263 - RNA, 23 nt, Human
cucagaagacacugaugggcaac

SEQ ID NO: 1820264 - RNA, 22 nt, Human
cucagccucccgaauagcuggg

SEQ ID NO: 1820265 - RNA, 21 nt, Human
cucagccucccgaauagcugg

SEQ ID NO: 1820266 - RNA, 19 nt, Human
cucagccucccgaauagcu

SEQ ID NO: 1820267 - RNA, 22 nt, Human
cucagaagacacugaugggcaa

SEQ ID NO: 1820268 - RNA, 20 nt, Human
cucagaagacacugaugggc

SEQ ID NO: 1820269 - RNA, 17 nt, Human
cucagaagacacugaug

SEQ ID NO: 1820270 - RNA, 15 nt, Human
cucagaagacacuga

SEQ ID NO: 1820271 - RNA, 13 nt, Human
cucagaagacacu

SEQ ID NO: 1820272 - RNA, 17 nt, Human
cucaccuuucccaucuu

SEQ ID NO: 1820273 - RNA, 13 nt, Human
cucaggccugggg

SEQ ID NO: 1820274 - RNA, 22 nt, Human
cucaggccugggggcugggcag

SEQ ID NO: 1820275 - RNA, 11 nt, Human
cucaggccugg

SEQ ID NO: 1820276 - RNA, 16 nt, Human
cucaggccagcugcuu

SEQ ID NO: 1820277 - RNA, 17 nt, Human
cucaggccagcugcuug

SEQ ID NO: 1820278 - RNA, 18 nt, Human
cucaggccagcugcuugg

SEQ ID NO: 1820279 - RNA, 20 nt, Human
cucaggccagcugcuugggc

SEQ ID NO: 1820280 - RNA, 21 nt, Human
cucaggccaaacucaccugcc

SEQ ID NO: 1820281 - RNA, 19 nt, Human
cucaggccaaacucaccug

SEQ ID NO: 1820282 - RNA, 20 nt, Human
cucaggccaaacucaccugc

SEQ ID NO: 1820283 - RNA, 17 nt, Human
cucaguccauagcagag

SEQ ID NO: 1820284 - RNA, 15 nt, Human
cucaguccauagcag

SEQ ID NO: 1820285 - RNA, 14 nt, Human
cucagguugucuga

SEQ ID NO: 1820286 - RNA, 16 nt, Human
cucaguccaugaagau

SEQ ID NO: 1820287 - RNA, 20 nt, Human
cucagucuggcccuuccuuu

SEQ ID NO: 1820288 - RNA, 22 nt, Human
cucagucuggcccuuccuuuuc

SEQ ID NO: 1820289 - RNA, 23 nt, Human
cucaggugucccugcacuugcag

SEQ ID NO: 1820290 - RNA, 22 nt, Human
cucagguugucugaagucacug

SEQ ID NO: 1820291 - RNA, 14 nt, Human
cuauguugcccagg

SEQ ID NO: 1820292 - RNA, 18 nt, Human
cuauguucuaagaaguga

SEQ ID NO: 1820293 - RNA, 17 nt, Human
cuaugugagcacaaagg

SEQ ID NO: 1820294 - RNA, 22 nt, Human
cuauguugcccaggcaggucuu

SEQ ID NO: 1820295 - RNA, 21 nt, Human
cuauguugcccaggcaggucu

SEQ ID NO: 1820296 - RNA, 19 nt, Human
cuauguugcccaggcaggu

SEQ ID NO: 1820297 - RNA, 18 nt, Human
cuauguugcccaggcagg

SEQ ID NO: 1820298 - RNA, 14 nt, Human
cuaugugagaccau

SEQ ID NO: 1820299 - RNA, 13 nt, Human
cuaucucccccag

SEQ ID NO: 1820300 - RNA, 14 nt, Human
cuaucucccccagc

SEQ ID NO: 1820301 - RNA, 17 nt, Human
cuauccuacuuccccuu

SEQ ID NO: 1820302 - RNA, 21 nt, Human
cucaagugauucuccugccuc

SEQ ID NO: 1820303 - RNA, 23 nt, Human
cucaauuauuuugcauuuuuucu

SEQ ID NO: 1820304 - RNA, 23 nt, Human
cuccccuaaagccucaaaacaaa

SEQ ID NO: 1820305 - RNA, 16 nt, Human
cuccccuaaagccuca

SEQ ID NO: 1820306 - RNA, 20 nt, Human
cucccugaaguaagcaaaga

SEQ ID NO: 1820307 - RNA, 20 nt, Human
cucccucuuucccucccuuc

SEQ ID NO: 1820308 - RNA, 22 nt, Human
cuccaggcuguaucccaugagc

SEQ ID NO: 1820309 - RNA, 20 nt, Human
cuccaggcuguaucccauga

SEQ ID NO: 1820310 - RNA, 23 nt, Human
cuccaggcuccuuuagcgcccag

SEQ ID NO: 1820311 - RNA, 15 nt, Human
cuccaggcuccuuua

SEQ ID NO: 1820312 - RNA, 23 nt, Human
cuccaggugcacaagcuccaagc

SEQ ID NO: 1820313 - RNA, 15 nt, Human
cucccacaggcccuu

SEQ ID NO: 1820314 - RNA, 14 nt, Human
cucccacaggcccu

SEQ ID NO: 1820315 - RNA, 16 nt, Human
cucccacaggcccuuc

SEQ ID NO: 1820316 - RNA, 20 nt, Human
cucccacaggcccuuccucu

SEQ ID NO: 1820317 - RNA, 21 nt, Human
cucccacaggcccuuccucuc

SEQ ID NO: 1820318 - RNA, 18 nt, Human
cuccugggcuaagugauc

SEQ ID NO: 1820319 - RNA, 19 nt, Human
cuccuggccucaagugauu

SEQ ID NO: 1820320 - RNA, 18 nt, Human
cuccucuugccacugccu

SEQ ID NO: 1820321 - RNA, 19 nt, Human
cuccuggcccacugcaucg

SEQ ID NO: 1820322 - RNA, 12 nt, Human
cuccucuugcca

SEQ ID NO: 1820323 - RNA, 15 nt, Human
cuccucuugccacug

SEQ ID NO: 1820324 - RNA, 16 nt, Human
cuccucuugccacugc

SEQ ID NO: 1820325 - RNA, 12 nt, Human
cuccucugucca

SEQ ID NO: 1820326 - RNA, 15 nt, Human
cuccucuguccaggc

SEQ ID NO: 1820327 - RNA, 15 nt, Human
cuccucugcugcugg

SEQ ID NO: 1820328 - RNA, 13 nt, Human
cuccucugcugcu

SEQ ID NO: 1820329 - RNA, 14 nt, Human
cuccucugcugcug

SEQ ID NO: 1820330 - RNA, 16 nt, Human
cuccuguaccucuuga

SEQ ID NO: 1820331 - RNA, 14 nt, Human
cuccuggggguucu

SEQ ID NO: 1820332 - RNA, 15 nt, Human
cuccuuucaccacau

SEQ ID NO: 1820333 - RNA, 16 nt, Human
cuccuuucacaaccuu

SEQ ID NO: 1820334 - RNA, 17 nt, Human
cuccuuucacaaccuuc

SEQ ID NO: 1820335 - RNA, 13 nt, Human
cuccuuucacaac

SEQ ID NO: 1820336 - RNA, 14 nt, Human
cuccuuguguuacu

SEQ ID NO: 1820337 - RNA, 13 nt, Human
cuccuaccuggua

SEQ ID NO: 1820338 - RNA, 13 nt, Human
cucuguccuggga

SEQ ID NO: 1820339 - RNA, 16 nt, Human
cucuguacagagccca

SEQ ID NO: 1820340 - RNA, 16 nt, Human
cucugcugcuggcugg

SEQ ID NO: 1820341 - RNA, 14 nt, Human
cucugcugcuggcu

SEQ ID NO: 1820342 - RNA, 15 nt, Human
cucugcugcuggcug

SEQ ID NO: 1820343 - RNA, 14 nt, Human
cucuguacagagcc

SEQ ID NO: 1820344 - RNA, 15 nt, Human
cucuguacagagccc

SEQ ID NO: 1820345 - RNA, 13 nt, Human
cucuguacagagc

SEQ ID NO: 1820346 - RNA, 23 nt, Human
cucugcugacagacacaggcccg

SEQ ID NO: 1820347 - RNA, 13 nt, Human
cucugcugcuggc

SEQ ID NO: 1820348 - RNA, 20 nt, Human
cucugcugacagacacaggc

SEQ ID NO: 1820349 - RNA, 22 nt, Human
cucugcugacagacacaggccc

SEQ ID NO: 1820350 - RNA, 21 nt, Human
cucugcugacagacacaggcc

SEQ ID NO: 1820351 - RNA, 21 nt, Human
cucugcuccucuccccagcaa

SEQ ID NO: 1820352 - RNA, 13 nt, Human
cucugcagguccc

SEQ ID NO: 1820353 - RNA, 17 nt, Human
cucugcacuccccugcu

SEQ ID NO: 1820354 - RNA, 18 nt, Human
cucugcacuccccugcug

SEQ ID NO: 1820355 - RNA, 20 nt, Human
cucugcacaagcugcacccu

SEQ ID NO: 1820356 - RNA, 21 nt, Human
cucugcacaagcugcacccuc

SEQ ID NO: 1820357 - RNA, 15 nt, Human
cucugcacuccccug

SEQ ID NO: 1820358 - RNA, 16 nt, Human
cucugcacuccccugc

SEQ ID NO: 1820359 - RNA, 20 nt, Human
cuccuuucacaaccuucugu

SEQ ID NO: 1820360 - RNA, 17 nt, Human
cuccuuugugaggaagc

SEQ ID NO: 1820361 - RNA, 18 nt, Human
cuccuuugugaggaagcc

SEQ ID NO: 1820362 - RNA, 23 nt, Human
cuccuuugugaggaagccgcugg

SEQ ID NO: 1820363 - RNA, 16 nt, Human
cucgguguggagaagc

SEQ ID NO: 1820364 - RNA, 17 nt, Human
cucgguguggagaagcg

SEQ ID NO: 1820365 - RNA, 23 nt, Human
cucgguguggagaagcggcuggc

SEQ ID NO: 1820366 - RNA, 19 nt, Human
cucuauguucuaagaagug

SEQ ID NO: 1820367 - RNA, 13 nt, Human
cucuccuccagag

SEQ ID NO: 1820368 - RNA, 15 nt, Human
cucuccuccagaguc

SEQ ID NO: 1820369 - RNA, 12 nt, Human
cucuccuccaga

SEQ ID NO: 1820370 - RNA, 16 nt, Human
cucuccuccagaguca

SEQ ID NO: 1820371 - RNA, 13 nt, Human
cucucuggccuuc

SEQ ID NO: 1820372 - RNA, 16 nt, Human
cucucuggccuucggc

SEQ ID NO: 1820373 - RNA, 14 nt, Human
cucucuggccuucg

SEQ ID NO: 1820374 - RNA, 13 nt, Human
uuuugaaaaacug

SEQ ID NO: 1820375 - RNA, 20 nt, Human
uuuuuuauacaggaugauga

SEQ ID NO: 1820376 - RNA, 12 nt, Human
uuuuuuacuaau

SEQ ID NO: 1820377 - RNA, 17 nt, Human
uuuuuuccuucagugcc

SEQ ID NO: 1820378 - RNA, 18 nt, Human
uuugccauguuggccagg

SEQ ID NO: 1820379 - RNA, 15 nt, Human
uuugccagugggaac

SEQ ID NO: 1820380 - RNA, 16 nt, Human
uuugccagugggaacu

SEQ ID NO: 1820381 - RNA, 14 nt, Human
uuugcagacaggca

SEQ ID NO: 1820382 - RNA, 19 nt, Human
uuugcauaacguauaaaag

SEQ ID NO: 1820383 - RNA, 23 nt, Human
uuugcauaacguauaaaagccug

SEQ ID NO: 1820384 - RNA, 15 nt, Human
uuugagcagggcuca

SEQ ID NO: 1820385 - RNA, 22 nt, Human
uuucuuacugucuuuuuucuaa

SEQ ID NO: 1820386 - RNA, 14 nt, Human
uuugagcucagccc

SEQ ID NO: 1820387 - RNA, 22 nt, Human
uuugaggucuguucuuuccaaa

SEQ ID NO: 1820388 - RNA, 17 nt, Human
uuugaggucuguucuuu

SEQ ID NO: 1820389 - RNA, 13 nt, Human
uuugagugccuua

SEQ ID NO: 1820390 - RNA, 13 nt, Human
uuuguccccaccg

SEQ ID NO: 1820391 - RNA, 21 nt, Human
uuuguccccaccgcagacagg

SEQ ID NO: 1820392 - RNA, 22 nt, Human
uuuguaaauuaacuuuuauaaa

SEQ ID NO: 1820393 - RNA, 19 nt, Human
uuuggugguuucagaaaug

SEQ ID NO: 1820394 - RNA, 17 nt, Human
uuuguaaauuaacuuuu

SEQ ID NO: 1820395 - RNA, 16 nt, Human
uuuguaaauuaacuuu

SEQ ID NO: 1820396 - RNA, 15 nt, Human
uuuguaaauuaacuu

SEQ ID NO: 1820397 - RNA, 20 nt, Human
uuugguuaugaauacuuugc

SEQ ID NO: 1820398 - RNA, 15 nt, Human
uuuuaaaaugagaaa

SEQ ID NO: 1820399 - RNA, 22 nt, Human
uuuuaaaaugagaaaucuaaaa

SEQ ID NO: 1820400 - RNA, 16 nt, Human
uuuuacagcugccugc

SEQ ID NO: 1820401 - RNA, 16 nt, Human
uuuuaugauacuugaa

SEQ ID NO: 1820402 - RNA, 20 nt, Human
uuuuaugauacuugaaaauu

SEQ ID NO: 1820403 - RNA, 18 nt, Human
uuuuaucgucacugcuua

SEQ ID NO: 1820404 - RNA, 19 nt, Human
uuuuaucgucacugcuuaa

SEQ ID NO: 1820405 - RNA, 14 nt, Human
uuuuacuguacaga

SEQ ID NO: 1820406 - RNA, 20 nt, Human
uuuuauaucaauuuaaaaaa

SEQ ID NO: 1820407 - RNA, 14 nt, Human
uuuucuucucccuc

SEQ ID NO: 1820408 - RNA, 17 nt, Human
uuuucuugcaugaggcu

SEQ ID NO: 1820409 - RNA, 15 nt, Human
uuuuccuucagugcc

SEQ ID NO: 1820410 - RNA, 18 nt, Human
uuuuccaugaguccccug

SEQ ID NO: 1820411 - RNA, 19 nt, Human
uuuuccaugaguccccugu

SEQ ID NO: 1820412 - RNA, 17 nt, Human
uuuucaacgcagcccug

SEQ ID NO: 1820413 - RNA, 21 nt, Human
uuuucaacgcagcccugcuuu

SEQ ID NO: 1820414 - RNA, 22 nt, Human
uuuucaacgcagcccugcuuug

SEQ ID NO: 1820415 - RNA, 15 nt, Human
uuuucacaguucucu

SEQ ID NO: 1820416 - RNA, 19 nt, Human
uuuucacugcuggcugccu

SEQ ID NO: 1820417 - RNA, 20 nt, Human
uuuucacugcuggcugccuu

SEQ ID NO: 1820418 - RNA, 22 nt, Human
uuuccucaaaacuucagacaua

SEQ ID NO: 1820419 - RNA, 23 nt, Human
uuuccugacagaaggacucaggu

SEQ ID NO: 1820420 - RNA, 21 nt, Human
uuuccucuuuggucuacacug

SEQ ID NO: 1820421 - RNA, 18 nt, Human
uuucuaaaggcuaccuuu

SEQ ID NO: 1820422 - RNA, 14 nt, Human
uuucuaaaggcuac

SEQ ID NO: 1820423 - RNA, 14 nt, Human
uuucuaaagcugcc

SEQ ID NO: 1820424 - RNA, 17 nt, Human
uuucuaaagcugccagc

SEQ ID NO: 1820425 - RNA, 15 nt, Human
uuucuaaugugugaa

SEQ ID NO: 1820426 - RNA, 15 nt, Human
uuucuagccagagga

SEQ ID NO: 1820427 - RNA, 20 nt, Human
uuucaauaggaaaaacugau

SEQ ID NO: 1820428 - RNA, 22 nt, Human
uuucaauaggaaaaacugauuu

SEQ ID NO: 1820429 - RNA, 13 nt, Human
uuuauuuccagug

SEQ ID NO: 1820430 - RNA, 15 nt, Human
uuucagcagcugcag

SEQ ID NO: 1820431 - RNA, 15 nt, Human
uuuccaaaguacacu

SEQ ID NO: 1820432 - RNA, 12 nt, Human
uuuccaaaguac

SEQ ID NO: 1820433 - RNA, 13 nt, Human
uuuccaggaaggc

SEQ ID NO: 1820434 - RNA, 15 nt, Human
uuucagccaagaauu

SEQ ID NO: 1820435 - RNA, 16 nt, Human
uuucagccaagaauuc

SEQ ID NO: 1820436 - RNA, 22 nt, Human
uuucauugcugggcuugucugu

SEQ ID NO: 1820437 - RNA, 15 nt, Human
uuguauuuauuuagu

SEQ ID NO: 1820438 - RNA, 20 nt, Human
uuguauuuuacuaauaaaau

SEQ ID NO: 1820439 - RNA, 23 nt, Human
uuguauuuaaaugaaagugagac

SEQ ID NO: 1820440 - RNA, 15 nt, Human
uuuacuuuguguuca

SEQ ID NO: 1820441 - RNA, 13 nt, Human
uuuauugcuuguu

SEQ ID NO: 1820442 - RNA, 14 nt, Human
uuuaugcauauuau

SEQ ID NO: 1820443 - RNA, 14 nt, Human
uuuauugucaaagu

SEQ ID NO: 1820444 - RNA, 16 nt, Human
uuuauugucaaagugg

SEQ ID NO: 1820445 - RNA, 14 nt, Human
uuuauaaacuuuac

SEQ ID NO: 1820446 - RNA, 21 nt, Human
uuuaucgucacugcuuaacuu

SEQ ID NO: 1820447 - RNA, 16 nt, Human
uuuauaaacuuuaccu

SEQ ID NO: 1820448 - RNA, 16 nt, Human
uuuaucgucacugcuu

SEQ ID NO: 1820449 - RNA, 18 nt, Human
uucaauucucauuuguca

SEQ ID NO: 1820450 - RNA, 17 nt, Human
uucaaccauuccccaug

SEQ ID NO: 1820451 - RNA, 20 nt, Human
uucaaccauuccccauggga

SEQ ID NO: 1820452 - RNA, 13 nt, Human
uucaacgcagccc

SEQ ID NO: 1820453 - RNA, 21 nt, Human
uucaacagguuuuccugaaga

SEQ ID NO: 1820454 - RNA, 14 nt, Human
uucaacgcagcccu

SEQ ID NO: 1820455 - RNA, 15 nt, Human
uucaacgcagcccug

SEQ ID NO: 1820456 - RNA, 16 nt, Human
uucaaucccaggaugu

SEQ ID NO: 1820457 - RNA, 23 nt, Human
uucaaauuguaagcaugcacaaa

SEQ ID NO: 1820458 - RNA, 16 nt, Human
uuauuuugauguaaag

SEQ ID NO: 1820459 - RNA, 13 nt, Human
uuauuuugaugua

SEQ ID NO: 1820460 - RNA, 15 nt, Human
uucaaagcaaauguc

SEQ ID NO: 1820461 - RNA, 13 nt, Human
uucaaagauauuu

SEQ ID NO: 1820462 - RNA, 13 nt, Human
uuacgugaguccu

SEQ ID NO: 1820463 - RNA, 14 nt, Human
uuacgugaguccug

SEQ ID NO: 1820464 - RNA, 12 nt, Human
uucagaggcuca

SEQ ID NO: 1820465 - RNA, 22 nt, Human
uucagaggcucagauuguaaua

SEQ ID NO: 1820466 - RNA, 13 nt, Human
uucagaggcucag

SEQ ID NO: 1820467 - RNA, 15 nt, Human
uucagagacuccugc

SEQ ID NO: 1820468 - RNA, 14 nt, Human
uucacucuccuugg

SEQ ID NO: 1820469 - RNA, 23 nt, Human
uucagcuccagcucaccagcccc

SEQ ID NO: 1820470 - RNA, 17 nt, Human
uucagcucugcaagaau

SEQ ID NO: 1820471 - RNA, 24 nt, Human
uucagcucugcaagaauugaagca

SEQ ID NO: 1820472 - RNA, 21 nt, Human
uucagcugguugagguuucaa

SEQ ID NO: 1820473 - RNA, 16 nt, Human
uucaggaagcucaggg

SEQ ID NO: 1820474 - RNA, 18 nt, Human
uucagcugcauacaguuu

SEQ ID NO: 1820475 - RNA, 17 nt, Human
uucagcugacuuuucug

SEQ ID NO: 1820476 - RNA, 15 nt, Human
uucaggcucuucucc

SEQ ID NO: 1820477 - RNA, 20 nt, Human
uucaggaagcucagggccug

SEQ ID NO: 1820478 - RNA, 15 nt, Human
uucaggaagcucagg

SEQ ID NO: 1820479 - RNA, 17 nt, Human
uucaggaagcucagggc

SEQ ID NO: 1820480 - RNA, 19 nt, Human
uucaggaagcucagggccu

SEQ ID NO: 1820481 - RNA, 13 nt, Human
uuccacugagacc

SEQ ID NO: 1820482 - RNA, 21 nt, Human
uuccacuuagaaauugcauuu

SEQ ID NO: 1820483 - RNA, 19 nt, Human
uuccacuuauaggaauuga

SEQ ID NO: 1820484 - RNA, 20 nt, Human
uuccaugucgccucugcauu

SEQ ID NO: 1820485 - RNA, 21 nt, Human
uuccaugucgccucugcauuc

SEQ ID NO: 1820486 - RNA, 14 nt, Human
uuccccaagacauu

SEQ ID NO: 1820487 - RNA, 17 nt, Human
uuccaugucgccucugc

SEQ ID NO: 1820488 - RNA, 18 nt, Human
uuccaugucgccucugca

SEQ ID NO: 1820489 - RNA, 19 nt, Human
uuccaugucgccucugcau

SEQ ID NO: 1820490 - RNA, 17 nt, Human
uuccaugaguccccugu

SEQ ID NO: 1820491 - RNA, 17 nt, Human
uucaucuugaauuguaa

SEQ ID NO: 1820492 - RNA, 12 nt, Human
uucaucuugaau

SEQ ID NO: 1820493 - RNA, 20 nt, Human
uucaucuuccaacucaaacu

SEQ ID NO: 1820494 - RNA, 11 nt, Human
uucaucuugaa

SEQ ID NO: 1820495 - RNA, 19 nt, Human
uucauuuaggugaggaagc

SEQ ID NO: 1820496 - RNA, 13 nt, Human
uucaguggcagcu

SEQ ID NO: 1820497 - RNA, 16 nt, Human
uucaggcucuucuccu

SEQ ID NO: 1820498 - RNA, 19 nt, Human
uucagugccuuauggaaca

SEQ ID NO: 1820499 - RNA, 21 nt, Human
uucagugccuuauggaacacu

SEQ ID NO: 1820500 - RNA, 12 nt, Human
uucaguuuucag

SEQ ID NO: 1820501 - RNA, 15 nt, Human
uucaucuaggauuuu

SEQ ID NO: 1820502 - RNA, 13 nt, Human
uucauaaugacuu

SEQ ID NO: 1820503 - RNA, 23 nt, Human
uucauaaugacuuaagcacacuu

SEQ ID NO: 1820504 - RNA, 23 nt, Human
uuccucauaguaugguggcuggg

SEQ ID NO: 1820505 - RNA, 20 nt, Human
uuccuagguauaauucacau

SEQ ID NO: 1820506 - RNA, 22 nt, Human
uuccucccucccucuuucccuc

SEQ ID NO: 1820507 - RNA, 12 nt, Human
uuccucccuccc

SEQ ID NO: 1820508 - RNA, 19 nt, Human
uuccucccucccucuuucc

SEQ ID NO: 1820509 - RNA, 21 nt, Human
uuccucccucccucuuucccu

SEQ ID NO: 1820510 - RNA, 19 nt, Human
uucccuuugacgccauccc

SEQ ID NO: 1820511 - RNA, 22 nt, Human
uuccccacuugagaauuacccu

SEQ ID NO: 1820512 - RNA, 13 nt, Human
uuccuuccucuga

SEQ ID NO: 1820513 - RNA, 17 nt, Human
uuccuuccucugagccu

SEQ ID NO: 1820514 - RNA, 13 nt, Human
uuccugcccuggg

SEQ ID NO: 1820515 - RNA, 16 nt, Human
uuccugcccugggagg

SEQ ID NO: 1820516 - RNA, 22 nt, Human
uuccugcccugggaggcaguga

SEQ ID NO: 1820517 - RNA, 11 nt, Human
uuccugcccug

SEQ ID NO: 1820518 - RNA, 16 nt, Human
uuccuucagugccuua

SEQ ID NO: 1820519 - RNA, 19 nt, Human
uuccuucagugccuuaugg

SEQ ID NO: 1820520 - RNA, 23 nt, Human
uuccuucagugccuuauggaaca

SEQ ID NO: 1820521 - RNA, 19 nt, Human
uuccuucauucaacccacc

SEQ ID NO: 1820522 - RNA, 13 nt, Human
uucuaaagaugga

SEQ ID NO: 1820523 - RNA, 16 nt, Human
uucuaaaggcuaccuu

SEQ ID NO: 1820524 - RNA, 18 nt, Human
uucuaaaggcuaccuuug

SEQ ID NO: 1820525 - RNA, 17 nt, Human
uucuaaaggcuaccuuu

SEQ ID NO: 1820526 - RNA, 19 nt, Human
uucggccuccauccugagg

SEQ ID NO: 1820527 - RNA, 18 nt, Human
uucggccuccauccugag

SEQ ID NO: 1820528 - RNA, 22 nt, Human
uucggccuccauccugaggcuc

SEQ ID NO: 1820529 - RNA, 17 nt, Human
uucuaugacacaugcaa

SEQ ID NO: 1820530 - RNA, 16 nt, Human
uucuaugacacaugca

SEQ ID NO: 1820531 - RNA, 14 nt, Human
uucuauuguuucuu

SEQ ID NO: 1820532 - RNA, 14 nt, Human
uucucaugccucag

SEQ ID NO: 1820533 - RNA, 21 nt, Human
uucucaugccucagccuccug

SEQ ID NO: 1820534 - RNA, 11 nt, Human
uucucaugccu

SEQ ID NO: 1820535 - RNA, 12 nt, Human
uucucaugccuc

SEQ ID NO: 1820536 - RNA, 20 nt, Human
uucucaaagaaauuuccacu

SEQ ID NO: 1820537 - RNA, 19 nt, Human
uucucaaagaaauuuccac

SEQ ID NO: 1820538 - RNA, 15 nt, Human
uucucaaagaaauuu

SEQ ID NO: 1820539 - RNA, 13 nt, Human
uucucaaagaaau

SEQ ID NO: 1820540 - RNA, 18 nt, Human
uucucuccagccccugga

SEQ ID NO: 1820541 - RNA, 13 nt, Human
uucuccacccugc

SEQ ID NO: 1820542 - RNA, 16 nt, Human
uucuccaagcaggaca

SEQ ID NO: 1820543 - RNA, 11 nt, Human
uucuccaggcu

SEQ ID NO: 1820544 - RNA, 18 nt, Human
uucugacccaugcugccc

SEQ ID NO: 1820545 - RNA, 20 nt, Human
uucugacccaugcugcccug

SEQ ID NO: 1820546 - RNA, 21 nt, Human
uucugacccaugcugcccugu

SEQ ID NO: 1820547 - RNA, 15 nt, Human
uuggaaguuuuaauc

SEQ ID NO: 1820548 - RNA, 20 nt, Human
uuggaagugaaaacuuugua

SEQ ID NO: 1820549 - RNA, 11 nt, Human
uuggaaggaac

SEQ ID NO: 1820550 - RNA, 19 nt, Human
uuggaaggaacguccccug

SEQ ID NO: 1820551 - RNA, 18 nt, Human
uuggauuuuugucuugug

SEQ ID NO: 1820552 - RNA, 14 nt, Human
uuggauuguccccg

SEQ ID NO: 1820553 - RNA, 17 nt, Human
uuggcaaaaaggcagga

SEQ ID NO: 1820554 - RNA, 20 nt, Human
uugcuguagaagauggcacu

SEQ ID NO: 1820555 - RNA, 20 nt, Human
uugcuggggccgaaagaaca

SEQ ID NO: 1820556 - RNA, 11 nt, Human
uugcccaggca

SEQ ID NO: 1820557 - RNA, 23 nt, Human
uugcccacgcuggagugcaguga

SEQ ID NO: 1820558 - RNA, 18 nt, Human
uugccacugccucuuccu

SEQ ID NO: 1820559 - RNA, 18 nt, Human
uugccagucaccccggcc

SEQ ID NO: 1820560 - RNA, 14 nt, Human
uugccucugccucu

SEQ ID NO: 1820561 - RNA, 11 nt, Human
uugccucugcc

SEQ ID NO: 1820562 - RNA, 18 nt, Human
uugccucugccucugaca

SEQ ID NO: 1820563 - RNA, 16 nt, Human
uugccucugccucuga

SEQ ID NO: 1820564 - RNA, 11 nt, Human
uugcugccuca

SEQ ID NO: 1820565 - RNA, 12 nt, Human
uugcugccucau

SEQ ID NO: 1820566 - RNA, 15 nt, Human
uugcugccucaugcu

SEQ ID NO: 1820567 - RNA, 20 nt, Human
uugcugauggugcaaugacc

SEQ ID NO: 1820568 - RNA, 22 nt, Human
uugcugauggugcaaugaccuu

SEQ ID NO: 1820569 - RNA, 14 nt, Human
uuguauuacaaauc

SEQ ID NO: 1820570 - RNA, 14 nt, Human
uuguauucagaguu

SEQ ID NO: 1820571 - RNA, 21 nt, Human
uuguauucucuccuguaccuc

SEQ ID NO: 1820572 - RNA, 15 nt, Human
uuguagagccagggu

SEQ ID NO: 1820573 - RNA, 14 nt, Human
uuguagagccaggg

SEQ ID NO: 1820574 - RNA, 13 nt, Human
uuguacaguuuuu

SEQ ID NO: 1820575 - RNA, 12 nt, Human
uuguacaguuuu

SEQ ID NO: 1820576 - RNA, 16 nt, Human
uuguacaguuuuuauu

SEQ ID NO: 1820577 - RNA, 14 nt, Human
uuguacauaaugcg

SEQ ID NO: 1820578 - RNA, 16 nt, Human
uuguaaaggaauuuaa

SEQ ID NO: 1820579 - RNA, 22 nt, Human
uuggucccccuuccauggacuu

SEQ ID NO: 1820580 - RNA, 16 nt, Human
uuggucccccuuccau

SEQ ID NO: 1820581 - RNA, 12 nt, Human
uugguccugcug

SEQ ID NO: 1820582 - RNA, 13 nt, Human
uugguccugcugc

SEQ ID NO: 1820583 - RNA, 12 nt, Human
uuguacagacaa

SEQ ID NO: 1820584 - RNA, 13 nt, Human
uuguacagacaac

SEQ ID NO: 1820585 - RNA, 16 nt, Human
uuggguggaugccugg

SEQ ID NO: 1820586 - RNA, 12 nt, Human
uugguaaaccuu

SEQ ID NO: 1820587 - RNA, 14 nt, Human
uugguaaaccuuuu

SEQ ID NO: 1820588 - RNA, 16 nt, Human
uugggaggccauuugu

SEQ ID NO: 1820589 - RNA, 12 nt, Human
uugggaggcuga

SEQ ID NO: 1820590 - RNA, 22 nt, Human
uuggcuuuggguugcaggaccu

SEQ ID NO: 1820591 - RNA, 22 nt, Human
uuggcugggggccucagugcca

SEQ ID NO: 1820592 - RNA, 21 nt, Human
uuggcugggggccucagugcc

SEQ ID NO: 1820593 - RNA, 18 nt, Human
uuggcugggggccucagu

SEQ ID NO: 1820594 - RNA, 24 nt, Human
uuggccaaagccaaagcuaggccu

SEQ ID NO: 1820595 - RNA, 14 nt, Human
uuggccaggcuggu

SEQ ID NO: 1820596 - RNA, 13 nt, Human
uuggcauucccca

SEQ ID NO: 1820597 - RNA, 22 nt, Human
uugcagacaggcaagcaccucc

SEQ ID NO: 1820598 - RNA, 16 nt, Human
uugcagacaggcaagc

SEQ ID NO: 1820599 - RNA, 14 nt, Human
uugccacugccucu

SEQ ID NO: 1820600 - RNA, 15 nt, Human
uugccacugccucuu

SEQ ID NO: 1820601 - RNA, 14 nt, Human
uugcauagaauaaa

SEQ ID NO: 1820602 - RNA, 17 nt, Human
uugcaacaggcugggcu

SEQ ID NO: 1820603 - RNA, 14 nt, Human
uugcaacaggcugg

SEQ ID NO: 1820604 - RNA, 18 nt, Human
uugauuuccguuaaaaua

SEQ ID NO: 1820605 - RNA, 21 nt, Human
uugauagcacagacccugccc

SEQ ID NO: 1820606 - RNA, 23 nt, Human
uugauagcacagacccugcccug

SEQ ID NO: 1820607 - RNA, 15 nt, Human
uugacgccaucccag

SEQ ID NO: 1820608 - RNA, 22 nt, Human
uugacgccaucccagccccaau

SEQ ID NO: 1820609 - RNA, 14 nt, Human
uugacgccauccca

SEQ ID NO: 1820610 - RNA, 12 nt, Human
uugaccugaggc

SEQ ID NO: 1820611 - RNA, 19 nt, Human
uugaccugaggcccuucuc

SEQ ID NO: 1820612 - RNA, 22 nt, Human
uugaccugaggcccuucucucc

SEQ ID NO: 1820613 - RNA, 15 nt, Human
uugaccucaggugau

SEQ ID NO: 1820614 - RNA, 20 nt, Human
uugaccgugaggccagagac

SEQ ID NO: 1820615 - RNA, 21 nt, Human
uugaccgugaggccagagaca

SEQ ID NO: 1820616 - RNA, 19 nt, Human
uugauagcacagacccugc

SEQ ID NO: 1820617 - RNA, 20 nt, Human
uugauagcacagacccugcc

SEQ ID NO: 1820618 - RNA, 16 nt, Human
uucuugguuuguaaau

SEQ ID NO: 1820619 - RNA, 13 nt, Human
uucuugguuugua

SEQ ID NO: 1820620 - RNA, 23 nt, Human
uucuugguuuguaaauuaacuuu

SEQ ID NO: 1820621 - RNA, 18 nt, Human
uucuugguuuguaaauua

SEQ ID NO: 1820622 - RNA, 17 nt, Human
uucuugguuuguaaauu

SEQ ID NO: 1820623 - RNA, 11 nt, Human
uucuguucuuu

SEQ ID NO: 1820624 - RNA, 19 nt, Human
uucuuauuuaaugaaagac

SEQ ID NO: 1820625 - RNA, 23 nt, Human
uucuuauuuaaugaaagacugua

SEQ ID NO: 1820626 - RNA, 14 nt, Human
uucuucaacucccu

SEQ ID NO: 1820627 - RNA, 14 nt, Human
uucugagcauuuaa

SEQ ID NO: 1820628 - RNA, 17 nt, Human
uucuguccgagcuuuga

SEQ ID NO: 1820629 - RNA, 21 nt, Human
uucuguccgagcuuugaaaau

SEQ ID NO: 1820630 - RNA, 17 nt, Human
uucuguccuacucugug

SEQ ID NO: 1820631 - RNA, 19 nt, Human
uucuguccuacucuguguc

SEQ ID NO: 1820632 - RNA, 12 nt, Human
uucuguggcuca

SEQ ID NO: 1820633 - RNA, 16 nt, Human
uucuguggcucacaga

SEQ ID NO: 1820634 - RNA, 23 nt, Human
uucuguggguuucuaaagcugcc

SEQ ID NO: 1820635 - RNA, 19 nt, Human
uugaagacuuuucuuucag

SEQ ID NO: 1820636 - RNA, 17 nt, Human
uugaagacagagcuaca

SEQ ID NO: 1820637 - RNA, 19 nt, Human
uugaacucuucaaucucuu

SEQ ID NO: 1820638 - RNA, 16 nt, Human
uugaacugauaaagau

SEQ ID NO: 1820639 - RNA, 22 nt, Human
uugaacuuugaccucugcagca

SEQ ID NO: 1820640 - RNA, 15 nt, Human
uugaaaaaugcaugu

SEQ ID NO: 1820641 - RNA, 19 nt, Human
uugaaaacacuguucucug

SEQ ID NO: 1820642 - RNA, 21 nt, Human
uugaaaacacuguucucugcc

SEQ ID NO: 1820643 - RNA, 18 nt, Human
uucuuuauaauucuacuu

SEQ ID NO: 1820644 - RNA, 22 nt, Human
uugaaaacacuguucucugccc

SEQ ID NO: 1820645 - RNA, 22 nt, Human
ugugcuuauguaugagguacaa

SEQ ID NO: 1820646 - RNA, 15 nt, Human
ugugccucugccugu

SEQ ID NO: 1820647 - RNA, 17 nt, Human
ugugccucugggacugg

SEQ ID NO: 1820648 - RNA, 20 nt, Human
ugugcgugcauguguguuca

SEQ ID NO: 1820649 - RNA, 22 nt, Human
ugugcacaugcacgugugugca

SEQ ID NO: 1820650 - RNA, 16 nt, Human
ugugcacaugcacgug

SEQ ID NO: 1820651 - RNA, 14 nt, Human
ugugccucugccug

SEQ ID NO: 1820652 - RNA, 13 nt, Human
ugugccucuggga

SEQ ID NO: 1820653 - RNA, 15 nt, Human
ugugccucugggacu

SEQ ID NO: 1820654 - RNA, 16 nt, Human
ugugccucugggacug

SEQ ID NO: 1820655 - RNA, 12 nt, Human
ugugggaagggg

SEQ ID NO: 1820656 - RNA, 13 nt, Human
uguggacacagcu

SEQ ID NO: 1820657 - RNA, 14 nt, Human
uguggacacagcuc

SEQ ID NO: 1820658 - RNA, 17 nt, Human
uguggaaaaugaaaauu

SEQ ID NO: 1820659 - RNA, 16 nt, Human
uguggacacagcucuu

SEQ ID NO: 1820660 - RNA, 15 nt, Human
uguggacacagcucu

SEQ ID NO: 1820661 - RNA, 21 nt, Human
uguggcuccuggggguucuuu

SEQ ID NO: 1820662 - RNA, 12 nt, Human
uguggagaagcg

SEQ ID NO: 1820663 - RNA, 21 nt, Human
uguggagaagcggcuggcagc

SEQ ID NO: 1820664 - RNA, 21 nt, Human
ugugacaaggauugcuacugu

SEQ ID NO: 1820665 - RNA, 16 nt, Human
ugugaaucauuuuacc

SEQ ID NO: 1820666 - RNA, 15 nt, Human
ugugacauguuuuau

SEQ ID NO: 1820667 - RNA, 22 nt, Human
ugugaccacugcagaagacagu

SEQ ID NO: 1820668 - RNA, 21 nt, Human
ugugauacaaugcugugcccu

SEQ ID NO: 1820669 - RNA, 13 nt, Human
ugugauauaagug

SEQ ID NO: 1820670 - RNA, 18 nt, Human
ugugaguacuacaguccu

SEQ ID NO: 1820671 - RNA, 19 nt, Human
ugugaguacuacaguccuc

SEQ ID NO: 1820672 - RNA, 20 nt, Human
ugugaguacuacaguccucc

SEQ ID NO: 1820673 - RNA, 23 nt, Human
ugugaguacuacaguccucccau

SEQ ID NO: 1820674 - RNA, 22 nt, Human
ugucucaguccaugaagaugua

SEQ ID NO: 1820675 - RNA, 21 nt, Human
ugucucaguccaugaagaugu

SEQ ID NO: 1820676 - RNA, 13 nt, Human
uguccccaccgca

SEQ ID NO: 1820677 - RNA, 23 nt, Human
ugucucaagagggcacugguggc

SEQ ID NO: 1820678 - RNA, 20 nt, Human
ugucucaagagggcacuggu

SEQ ID NO: 1820679 - RNA, 21 nt, Human
ugucucaagagggcacuggug

SEQ ID NO: 1820680 - RNA, 16 nt, Human
ugucucaggucccugc

SEQ ID NO: 1820681 - RNA, 17 nt, Human
ugucucaggucccugca

SEQ ID NO: 1820682 - RNA, 16 nt, Human
ugucuuuuuucacuac

SEQ ID NO: 1820683 - RNA, 14 nt, Human
ugucuuuuuucuaa

SEQ ID NO: 1820684 - RNA, 19 nt, Human
ugucuuuggacccugaggc

SEQ ID NO: 1820685 - RNA, 22 nt, Human
ugucuuuggacccugaggccca

SEQ ID NO: 1820686 - RNA, 17 nt, Human
ugucuuuggacccugag

SEQ ID NO: 1820687 - RNA, 18 nt, Human
ugucuuuggacccugagg

SEQ ID NO: 1820688 - RNA, 13 nt, Human
ugugaaacauguu

SEQ ID NO: 1820689 - RNA, 13 nt, Human
ugugaaaggaaag

SEQ ID NO: 1820690 - RNA, 14 nt, Human
ugugaaaggaaaga

SEQ ID NO: 1820691 - RNA, 15 nt, Human
uguaacuaaaauaau

SEQ ID NO: 1820692 - RNA, 14 nt, Human
uguaacuaaaauaa

SEQ ID NO: 1820693 - RNA, 23 nt, Human
uguaacuaaaauaauuuuguaau

SEQ ID NO: 1820694 - RNA, 15 nt, Human
uguaaucacagcuac

SEQ ID NO: 1820695 - RNA, 18 nt, Human
ugguaggacuguagaaaa

SEQ ID NO: 1820696 - RNA, 17 nt, Human
ugguaggacuguagaaa

SEQ ID NO: 1820697 - RNA, 17 nt, Human
uguaaauuaacuuuuau

SEQ ID NO: 1820698 - RNA, 16 nt, Human
uguaaauuaacuuuua

SEQ ID NO: 1820699 - RNA, 15 nt, Human
uguaaauuaacuuuu

SEQ ID NO: 1820700 - RNA, 14 nt, Human
uguaaauuaacuuu

SEQ ID NO: 1820701 - RNA, 13 nt, Human
uguaaauuaacuu

SEQ ID NO: 1820702 - RNA, 12 nt, Human
uguaaugacagg

SEQ ID NO: 1820703 - RNA, 23 nt, Human
uguaauguaucaaauacauuuaa

SEQ ID NO: 1820704 - RNA, 17 nt, Human
uguacagucuuguauua

SEQ ID NO: 1820705 - RNA, 15 nt, Human
uguacagucuuguau

SEQ ID NO: 1820706 - RNA, 14 nt, Human
uguacagucuugua

SEQ ID NO: 1820707 - RNA, 12 nt, Human
uguacagucuug

SEQ ID NO: 1820708 - RNA, 23 nt, Human
uguaccucuugagccuugaacuu

SEQ ID NO: 1820709 - RNA, 14 nt, Human
uguaccucuugagc

SEQ ID NO: 1820710 - RNA, 22 nt, Human
uguaccucuugagccuugaacu

SEQ ID NO: 1820711 - RNA, 15 nt, Human
uguaccgcaauguga

SEQ ID NO: 1820712 - RNA, 17 nt, Human
uguagauaauacaguuc

SEQ ID NO: 1820713 - RNA, 16 nt, Human
uguacgucugacaggc

SEQ ID NO: 1820714 - RNA, 17 nt, Human
uguacgucugacaggca

SEQ ID NO: 1820715 - RNA, 12 nt, Human
uguacuccuccc

SEQ ID NO: 1820716 - RNA, 13 nt, Human
uguacuccuccca

SEQ ID NO: 1820717 - RNA, 23 nt, Human
uguaucccaugagccucagcauc

SEQ ID NO: 1820718 - RNA, 19 nt, Human
uguaucccaugagccucag

SEQ ID NO: 1820719 - RNA, 14 nt, Human
uguaugcacuuugu

SEQ ID NO: 1820720 - RNA, 12 nt, Human
ugucagugugac

SEQ ID NO: 1820721 - RNA, 20 nt, Human
ugucagugugacugaucucu

SEQ ID NO: 1820722 - RNA, 23 nt, Human
ugucccaaaaagaaaggagggga

SEQ ID NO: 1820723 - RNA, 23 nt, Human
ugucauucgcuacuaugauuuaa

SEQ ID NO: 1820724 - RNA, 22 nt, Human
uguguuuaggaacuacugagga

SEQ ID NO: 1820725 - RNA, 13 nt, Human
uguguuuauuguc

SEQ ID NO: 1820726 - RNA, 14 nt, Human
uguucagcuccagc

SEQ ID NO: 1820727 - RNA, 18 nt, Human
uguucagcuccagcucac

SEQ ID NO: 1820728 - RNA, 11 nt, Human
uguucagcugg

SEQ ID NO: 1820729 - RNA, 16 nt, Human
uguucagcuccagcuc

SEQ ID NO: 1820730 - RNA, 15 nt, Human
uguucagcuccagcu

SEQ ID NO: 1820731 - RNA, 20 nt, Human
uguuagauuaagaaauagac

SEQ ID NO: 1820732 - RNA, 17 nt, Human
uguuagauuaagaaaua

SEQ ID NO: 1820733 - RNA, 13 nt, Human
uguuacauuuuua

SEQ ID NO: 1820734 - RNA, 22 nt, Human
uguuacauuuuuaagugcugca

SEQ ID NO: 1820735 - RNA, 15 nt, Human
uguuacugucuucag

SEQ ID NO: 1820736 - RNA, 16 nt, Human
uguuacugucuucagu

SEQ ID NO: 1820737 - RNA, 14 nt, Human
uguuggccaggcug

SEQ ID NO: 1820738 - RNA, 13 nt, Human
uguuggccaggcu

SEQ ID NO: 1820739 - RNA, 18 nt, Human
uguuggccaggcugcucu

SEQ ID NO: 1820740 - RNA, 17 nt, Human
uguuuacagauccccaa

SEQ ID NO: 1820741 - RNA, 14 nt, Human
uguugcugccucau

SEQ ID NO: 1820742 - RNA, 11 nt, Human
uguuggccagg

SEQ ID NO: 1820743 - RNA, 20 nt, Human
uguuggauuuuugucuugug

SEQ ID NO: 1820744 - RNA, 17 nt, Human
uguuggauuuuugucuu

SEQ ID NO: 1820745 - RNA, 13 nt, Human
uguugcugccuca

SEQ ID NO: 1820746 - RNA, 19 nt, Human
uguucucugcccuccaaga

SEQ ID NO: 1820747 - RNA, 15 nt, Human
uguucugacccugcu

SEQ ID NO: 1820748 - RNA, 18 nt, Human
uguucugacccugcuuca

SEQ ID NO: 1820749 - RNA, 17 nt, Human
uguucugcacacagcac

SEQ ID NO: 1820750 - RNA, 14 nt, Human
uguucuuucuggcu

SEQ ID NO: 1820751 - RNA, 22 nt, Human
uguucuuucuggcuaugcauuu

SEQ ID NO: 1820752 - RNA, 20 nt, Human
uguucuuucuggcuaugcau

SEQ ID NO: 1820753 - RNA, 11 nt, Human
uguugaaagau

SEQ ID NO: 1820754 - RNA, 18 nt, Human
uguucucugaggacacua

SEQ ID NO: 1820755 - RNA, 12 nt, Human
uguucucugccc

SEQ ID NO: 1820756 - RNA, 16 nt, Human
uguucucugaggacac

SEQ ID NO: 1820757 - RNA, 12 nt, Human
uguucuauagcu

SEQ ID NO: 1820758 - RNA, 13 nt, Human
uguucauaaauaa

SEQ ID NO: 1820759 - RNA, 14 nt, Human
uuacauuuccuaaa

SEQ ID NO: 1820760 - RNA, 23 nt, Human
uuacaauaaaaucuugaaaaugc

SEQ ID NO: 1820761 - RNA, 20 nt, Human
uuacagagacagaaagcaga

SEQ ID NO: 1820762 - RNA, 20 nt, Human
uuacgguuuuccagguuuaa

SEQ ID NO: 1820763 - RNA, 22 nt, Human
uuaccuuuuuuauacauaaaca

SEQ ID NO: 1820764 - RNA, 20 nt, Human
uuaccuuuuuuauacauaaa

SEQ ID NO: 1820765 - RNA, 19 nt, Human
uuaccuuuuuuauacauaa

SEQ ID NO: 1820766 - RNA, 23 nt, Human
uuacauuuuuaagugcugcauuu

SEQ ID NO: 1820767 - RNA, 22 nt, Human
uuacauuuuuaagugcugcauu

SEQ ID NO: 1820768 - RNA, 21 nt, Human
uuacauuuuuaagugcugcau

SEQ ID NO: 1820769 - RNA, 20 nt, Human
uuacauuuuuaagugcugca

SEQ ID NO: 1820770 - RNA, 14 nt, Human
uuaccagcagagca

SEQ ID NO: 1820771 - RNA, 22 nt, Human
uuaaugucaauucuugccaaau

SEQ ID NO: 1820772 - RNA, 17 nt, Human
uuaaugucacaggcagg

SEQ ID NO: 1820773 - RNA, 14 nt, Human
uuaauggaaauguu

SEQ ID NO: 1820774 - RNA, 18 nt, Human
uuaaugucacaggcaggu

SEQ ID NO: 1820775 - RNA, 22 nt, Human
uuaaggaugcuuguacauaaug

SEQ ID NO: 1820776 - RNA, 21 nt, Human
uuaaggaagacaaugugaaaa

SEQ ID NO: 1820777 - RNA, 20 nt, Human
uuaaggaugcuuguacauaa

SEQ ID NO: 1820778 - RNA, 19 nt, Human
uuaaggaugcuuguacaua

SEQ ID NO: 1820779 - RNA, 18 nt, Human
uuaaggaugcuuguacau

SEQ ID NO: 1820780 - RNA, 17 nt, Human
uuaaggaugcuuguaca

SEQ ID NO: 1820781 - RNA, 13 nt, Human
uguuuuugucuua

SEQ ID NO: 1820782 - RNA, 23 nt, Human
uguuuuaaaaugagaaaucuaaa

SEQ ID NO: 1820783 - RNA, 23 nt, Human
uguuuccuggcacugcuuccagu

SEQ ID NO: 1820784 - RNA, 20 nt, Human
uguuuccuggcacugcuucc

SEQ ID NO: 1820785 - RNA, 21 nt, Human
uguuuccuggcacugcuucca

SEQ ID NO: 1820786 - RNA, 22 nt, Human
uguuuccuggcacugcuuccag

SEQ ID NO: 1820787 - RNA, 17 nt, Human
uguuuguugucagcuga

SEQ ID NO: 1820788 - RNA, 16 nt, Human
uguuuguugucagcug

SEQ ID NO: 1820789 - RNA, 18 nt, Human
uguuuuaaaaugagaaau

SEQ ID NO: 1820790 - RNA, 13 nt, Human
uuaaaugcccagc

SEQ ID NO: 1820791 - RNA, 18 nt, Human
uuaaaugcccagccccuu

SEQ ID NO: 1820792 - RNA, 18 nt, Human
uuaaauaguaaaaauaaa

SEQ ID NO: 1820793 - RNA, 18 nt, Human
uuaaaugcaccuggaaua

SEQ ID NO: 1820794 - RNA, 17 nt, Human
uuaaaugcaccuggaau

SEQ ID NO: 1820795 - RNA, 16 nt, Human
uuaaaugcaccuggaa

SEQ ID NO: 1820796 - RNA, 14 nt, Human
uuaaagacuuuuau

SEQ ID NO: 1820797 - RNA, 22 nt, Human
uuaaacuuaaucuaaauggaac

SEQ ID NO: 1820798 - RNA, 20 nt, Human
uuaaacuuaaucuaaaugga

SEQ ID NO: 1820799 - RNA, 18 nt, Human
uuaaacuuaaucuaaaug

SEQ ID NO: 1820800 - RNA, 16 nt, Human
uuaaacuuaaucuaaa

SEQ ID NO: 1820801 - RNA, 15 nt, Human
uuaaaacauuaaaau

SEQ ID NO: 1820802 - RNA, 12 nt, Human
uggcugggggcc

SEQ ID NO: 1820803 - RNA, 16 nt, Human
uggcucuuccaggcug

SEQ ID NO: 1820804 - RNA, 13 nt, Human
uggcucuuccagg

SEQ ID NO: 1820805 - RNA, 15 nt, Human
uggcucuuccaggcu

SEQ ID NO: 1820806 - RNA, 16 nt, Human
uggcuccaaacccucg

SEQ ID NO: 1820807 - RNA, 18 nt, Human
uggcuccaaacccucgag

SEQ ID NO: 1820808 - RNA, 20 nt, Human
uggcuccaaacccucgaggc

SEQ ID NO: 1820809 - RNA, 22 nt, Human
uggcucagguggggucacucug

SEQ ID NO: 1820810 - RNA, 20 nt, Human
uggcucagguggggucacuc

SEQ ID NO: 1820811 - RNA, 15 nt, Human
uggccagaugcacca

SEQ ID NO: 1820812 - RNA, 18 nt, Human
uggccuucggccuccauc

SEQ ID NO: 1820813 - RNA, 17 nt, Human
uggccuucggccuccau

SEQ ID NO: 1820814 - RNA, 20 nt, Human
uggccuucggccuccauccu

SEQ ID NO: 1820815 - RNA, 22 nt, Human
uggcgugcaguggugcgaucug

SEQ ID NO: 1820816 - RNA, 15 nt, Human
uggcgcugccccugg

SEQ ID NO: 1820817 - RNA, 14 nt, Human
uggcgcugccccug

SEQ ID NO: 1820818 - RNA, 15 nt, Human
uggcugggggccuca

SEQ ID NO: 1820819 - RNA, 14 nt, Human
uggcugggggccuc

SEQ ID NO: 1820820 - RNA, 22 nt, Human
uggcugguuagagguucccuuu

SEQ ID NO: 1820821 - RNA, 14 nt, Human
uggcuuuucacugc

SEQ ID NO: 1820822 - RNA, 15 nt, Human
uggcuuuucacugcu

SEQ ID NO: 1820823 - RNA, 22 nt, Human
ugggaaugaaugucagugugac

SEQ ID NO: 1820824 - RNA, 16 nt, Human
ugggacagggcauggc

SEQ ID NO: 1820825 - RNA, 16 nt, Human
ugggacaugggaaagg

SEQ ID NO: 1820826 - RNA, 23 nt, Human
ugggagcugccuguucagcucca

SEQ ID NO: 1820827 - RNA, 21 nt, Human
ugggguggggggggugcuggg

SEQ ID NO: 1820828 - RNA, 22 nt, Human
ugggguggggggggugcugggc

SEQ ID NO: 1820829 - RNA, 19 nt, Human
ugggguggggggggugcug

SEQ ID NO: 1820830 - RNA, 17 nt, Human
ugggguggggaccucag

SEQ ID NO: 1820831 - RNA, 21 nt, Human
uggguuccagcaauucuccug

SEQ ID NO: 1820832 - RNA, 21 nt, Human
uggguuccuuccucugagccu

SEQ ID NO: 1820833 - RNA, 22 nt, Human
uggguuccuuccucugagccuu

SEQ ID NO: 1820834 - RNA, 17 nt, Human
uggguuggaaaacagua

SEQ ID NO: 1820835 - RNA, 16 nt, Human
uggguucacugcaacc

SEQ ID NO: 1820836 - RNA, 23 nt, Human
uggguucaagcgauucuucugcu

SEQ ID NO: 1820837 - RNA, 14 nt, Human
uggguguggcgcag

SEQ ID NO: 1820838 - RNA, 23 nt, Human
ugggugucaagagggucugagga

SEQ ID NO: 1820839 - RNA, 21 nt, Human
ugggugucaagagggucugag

SEQ ID NO: 1820840 - RNA, 16 nt, Human
uggggcagcuugaggg

SEQ ID NO: 1820841 - RNA, 21 nt, Human
ugggcuuggggaccagagcug

SEQ ID NO: 1820842 - RNA, 22 nt, Human
ugggcuuggggaccagagcugc

SEQ ID NO: 1820843 - RNA, 20 nt, Human
ugggcuucaguggcagcugc

SEQ ID NO: 1820844 - RNA, 19 nt, Human
ugggcuuggggaccagagc

SEQ ID NO: 1820845 - RNA, 19 nt, Human
ugggcuucaguggcagcug

SEQ ID NO: 1820846 - RNA, 18 nt, Human
ugggcuucaguggcagcu

SEQ ID NO: 1820847 - RNA, 17 nt, Human
ugggcgugagaccugcc

SEQ ID NO: 1820848 - RNA, 18 nt, Human
ugggcgugagaccugccc

SEQ ID NO: 1820849 - RNA, 19 nt, Human
ugggcgugagaccugcccc

SEQ ID NO: 1820850 - RNA, 24 nt, Human
ugggagcugccuguucagcuccag

SEQ ID NO: 1820851 - RNA, 22 nt, Human
ugggccuccugugugugcgccu

SEQ ID NO: 1820852 - RNA, 16 nt, Human
ugggccuccugugugu

SEQ ID NO: 1820853 - RNA, 18 nt, Human
ugggccuucagggaguga

SEQ ID NO: 1820854 - RNA, 14 nt, Human
ugggccuccugugu

SEQ ID NO: 1820855 - RNA, 20 nt, Human
uggcagugggagcugccugu

SEQ ID NO: 1820856 - RNA, 22 nt, Human
uggccacuccagaccccuggcu

SEQ ID NO: 1820857 - RNA, 19 nt, Human
uggcagugggagcugccug

SEQ ID NO: 1820858 - RNA, 16 nt, Human
uggcagugggagcugc

SEQ ID NO: 1820859 - RNA, 15 nt, Human
uggcagugggagcug

SEQ ID NO: 1820860 - RNA, 14 nt, Human
uggcagugggagcu

SEQ ID NO: 1820861 - RNA, 15 nt, Human
uggaugccugguggc

SEQ ID NO: 1820862 - RNA, 14 nt, Human
uggaugccuggugg

SEQ ID NO: 1820863 - RNA, 14 nt, Human
uggcacugcuucca

SEQ ID NO: 1820864 - RNA, 16 nt, Human
uggcacugcuuccagu

SEQ ID NO: 1820865 - RNA, 18 nt, Human
uggcacugcuuccaguga

SEQ ID NO: 1820866 - RNA, 22 nt, Human
uggcagcugcgguccacccagg

SEQ ID NO: 1820867 - RNA, 21 nt, Human
uggcagcugcgguccacccag

SEQ ID NO: 1820868 - RNA, 23 nt, Human
uggcagcugcgguccacccagga

SEQ ID NO: 1820869 - RNA, 22 nt, Human
uggaggcaugugaugagaggaa

SEQ ID NO: 1820870 - RNA, 15 nt, Human
uggauaccauuauau

SEQ ID NO: 1820871 - RNA, 13 nt, Human
uggauaccauuau

SEQ ID NO: 1820872 - RNA, 19 nt, Human
uggauacgacaacuugcac

SEQ ID NO: 1820873 - RNA, 17 nt, Human
uggacaggcauguucuc

SEQ ID NO: 1820874 - RNA, 17 nt, Human
uggagacugucucaaga

SEQ ID NO: 1820875 - RNA, 16 nt, Human
uggacaggcauguucu

SEQ ID NO: 1820876 - RNA, 12 nt, Human
uggacaggcaug

SEQ ID NO: 1820877 - RNA, 20 nt, Human
uggagaggcccggccucuca

SEQ ID NO: 1820878 - RNA, 13 nt, Human
uggagauguuuag

SEQ ID NO: 1820879 - RNA, 18 nt, Human
ugcuuguuaacugagugc

SEQ ID NO: 1820880 - RNA, 14 nt, Human
ugcuuguuggauuu

SEQ ID NO: 1820881 - RNA, 16 nt, Human
ugcuucuucagagacu

SEQ ID NO: 1820882 - RNA, 12 nt, Human
ugcuucucacug

SEQ ID NO: 1820883 - RNA, 21 nt, Human
ugcuuccagugaggcucugcc

SEQ ID NO: 1820884 - RNA, 19 nt, Human
ugcuuccagugaggcucug

SEQ ID NO: 1820885 - RNA, 20 nt, Human
ugcuuccagugaggcucugc

SEQ ID NO: 1820886 - RNA, 13 nt, Human
ugcugccucaugc

SEQ ID NO: 1820887 - RNA, 14 nt, Human
ugcugccuccagaa

SEQ ID NO: 1820888 - RNA, 18 nt, Human
ugcuuccagugaggcucu

SEQ ID NO: 1820889 - RNA, 14 nt, Human
uggaacucucgagc

SEQ ID NO: 1820890 - RNA, 11 nt, Human
uggaagacagc

SEQ ID NO: 1820891 - RNA, 12 nt, Human
uggaagacagcu

SEQ ID NO: 1820892 - RNA, 15 nt, Human
uggaaaauaaauuau

SEQ ID NO: 1820893 - RNA, 16 nt, Human
uggaaaauaaauuauu

SEQ ID NO: 1820894 - RNA, 20 nt, Human
uggaaaaaccacccccaaau

SEQ ID NO: 1820895 - RNA, 11 nt, Human
uggaaaauaaa

SEQ ID NO: 1820896 - RNA, 15 nt, Human
uggaaaauaaaucaa

SEQ ID NO: 1820897 - RNA, 21 nt, Human
uggaagugugugaucuguggg

SEQ ID NO: 1820898 - RNA, 14 nt, Human
uggaagacagcucu

SEQ ID NO: 1820899 - RNA, 15 nt, Human
uggaagacagcucuu

SEQ ID NO: 1820900 - RNA, 18 nt, Human
ugcacagugcaucucagc

SEQ ID NO: 1820901 - RNA, 19 nt, Human
ugcacagugcaucucagcc

SEQ ID NO: 1820902 - RNA, 20 nt, Human
ugcacagugcaucucagccc

SEQ ID NO: 1820903 - RNA, 18 nt, Human
ugcacagcuaacauggaa

SEQ ID NO: 1820904 - RNA, 20 nt, Human
ugcacagcuaacauggaagu

SEQ ID NO: 1820905 - RNA, 23 nt, Human
ugcacagcuaacauggaaguacu

SEQ ID NO: 1820906 - RNA, 16 nt, Human
ugaaggcuggguucug

SEQ ID NO: 1820907 - RNA, 17 nt, Human
ugaagucuuuguacaga

SEQ ID NO: 1820908 - RNA, 20 nt, Human
ugaagucuuuguacagacaa

SEQ ID NO: 1820909 - RNA, 22 nt, Human
ugaagucuuuguacagacaaca

SEQ ID NO: 1820910 - RNA, 22 nt, Human
ugcacagaguuguuacauuuuu

SEQ ID NO: 1820911 - RNA, 21 nt, Human
ugcacagaguuguuacauuuu

SEQ ID NO: 1820912 - RNA, 23 nt, Human
ugcacagaguuguuacauuuuua

SEQ ID NO: 1820913 - RNA, 17 nt, Human
ugcacagcuaacaugga

SEQ ID NO: 1820914 - RNA, 16 nt, Human
ugcacguacacacaca

SEQ ID NO: 1820915 - RNA, 19 nt, Human
ugcacguacacacacauac

SEQ ID NO: 1820916 - RNA, 16 nt, Human
ugcacuugcagacucu

SEQ ID NO: 1820917 - RNA, 21 nt, Human
ugcacuugcagacucuacaga

SEQ ID NO: 1820918 - RNA, 15 nt, Human
ugcacuuuguucugg

SEQ ID NO: 1820919 - RNA, 18 nt, Human
ugcacuuuguucuggcuc

SEQ ID NO: 1820920 - RNA, 19 nt, Human
ugcacuuuguucuggcucu

SEQ ID NO: 1820921 - RNA, 20 nt, Human
ugcacuuuguucuggcucuu

SEQ ID NO: 1820922 - RNA, 17 nt, Human
ugcagauaaacaguagu

SEQ ID NO: 1820923 - RNA, 16 nt, Human
ugcagauaaacaguag

SEQ ID NO: 1820924 - RNA, 18 nt, Human
ugcaggaccucaggugag

SEQ ID NO: 1820925 - RNA, 15 nt, Human
ugcaggaccucaggu

SEQ ID NO: 1820926 - RNA, 16 nt, Human
ugcaggaccucaggug

SEQ ID NO: 1820927 - RNA, 22 nt, Human
ugcagcuuuaaaaaauuaaucu

SEQ ID NO: 1820928 - RNA, 14 nt, Human
ugcaggaccucagg

SEQ ID NO: 1820929 - RNA, 13 nt, Human
ugcagcuuuaaaa

SEQ ID NO: 1820930 - RNA, 16 nt, Human
ugcagcaauaaagcag

SEQ ID NO: 1820931 - RNA, 15 nt, Human
ugcagcaauaaagca

SEQ ID NO: 1820932 - RNA, 14 nt, Human
ugcagcaauaaagc

SEQ ID NO: 1820933 - RNA, 19 nt, Human
ugcauguuacauaagauaa

SEQ ID NO: 1820934 - RNA, 16 nt, Human
ugcaggcagccaggcc

SEQ ID NO: 1820935 - RNA, 17 nt, Human
ugcaggcagccaggcca

SEQ ID NO: 1820936 - RNA, 18 nt, Human
ugcaggcagccaggccac

SEQ ID NO: 1820937 - RNA, 19 nt, Human
ugcaggcagccaggccaca

SEQ ID NO: 1820938 - RNA, 17 nt, Human
ugcaucguuucaucuuc

SEQ ID NO: 1820939 - RNA, 15 nt, Human
ugcaucguuucaucu

SEQ ID NO: 1820940 - RNA, 18 nt, Human
ugcauccuccgccucccg

SEQ ID NO: 1820941 - RNA, 21 nt, Human
ugcauccuccgccucccgggu

SEQ ID NO: 1820942 - RNA, 24 nt, Human
ugccagguuuuuggucugacccac

SEQ ID NO: 1820943 - RNA, 14 nt, Human
ugccagucaccccg

SEQ ID NO: 1820944 - RNA, 11 nt, Human
ugccagggaca

SEQ ID NO: 1820945 - RNA, 22 nt, Human
ugccagggacagaggggguggc

SEQ ID NO: 1820946 - RNA, 15 nt, Human
ugcccaccuggccuc

SEQ ID NO: 1820947 - RNA, 17 nt, Human
ugcccaccuggccucug

SEQ ID NO: 1820948 - RNA, 18 nt, Human
ugcccaccuggccucugc

SEQ ID NO: 1820949 - RNA, 19 nt, Human
ugcccaccuggccucugca

SEQ ID NO: 1820950 - RNA, 10 nt, Human
ugcccagccc

SEQ ID NO: 1820951 - RNA, 16 nt, Human
ugccuccuuugugagg

SEQ ID NO: 1820952 - RNA, 17 nt, Human
ugccuccuuugugagga

SEQ ID NO: 1820953 - RNA, 18 nt, Human
ugccuccuuugugaggaa

SEQ ID NO: 1820954 - RNA, 14 nt, Human
ugccucugggacug

SEQ ID NO: 1820955 - RNA, 17 nt, Human
ugccugaagucacacag

SEQ ID NO: 1820956 - RNA, 18 nt, Human
ugccugaagucacacagu

SEQ ID NO: 1820957 - RNA, 22 nt, Human
ugccugaagucacacagugagu

SEQ ID NO: 1820958 - RNA, 23 nt, Human
ugcccaggcuggcgugcaguggu

SEQ ID NO: 1820959 - RNA, 11 nt, Human
ugcccagcccc

SEQ ID NO: 1820960 - RNA, 19 nt, Human
ugccuaaggcugaacuugu

SEQ ID NO: 1820961 - RNA, 13 nt, Human
ugcgccuacagga

SEQ ID NO: 1820962 - RNA, 23 nt, Human
ugcggugcuaucucccccagccc

SEQ ID NO: 1820963 - RNA, 13 nt, Human
ugcgcaggcuggc

SEQ ID NO: 1820964 - RNA, 16 nt, Human
ugcgcaggcuggcccu

SEQ ID NO: 1820965 - RNA, 17 nt, Human
ugcgcaggcuggcccug

SEQ ID NO: 1820966 - RNA, 19 nt, Human
ugcgcaggcuggcccugcc

SEQ ID NO: 1820967 - RNA, 13 nt, Human
ugccuucagcucu

SEQ ID NO: 1820968 - RNA, 17 nt, Human
ugccuucagcucuacag

SEQ ID NO: 1820969 - RNA, 18 nt, Human
ugccuucagcucuacagc

SEQ ID NO: 1820970 - RNA, 15 nt, Human
ugccuggcggggugg

SEQ ID NO: 1820971 - RNA, 18 nt, Human
ugccuuauggaacacucu

SEQ ID NO: 1820972 - RNA, 20 nt, Human
ugccuuauggaacacucuga

SEQ ID NO: 1820973 - RNA, 21 nt, Human
ugccuuauggaacacucugag

SEQ ID NO: 1820974 - RNA, 22 nt, Human
ugccuuauggaacacucugaga

SEQ ID NO: 1820975 - RNA, 19 nt, Human
ugcugacagacacaggccc

SEQ ID NO: 1820976 - RNA, 16 nt, Human
ugcugacagacacagg

SEQ ID NO: 1820977 - RNA, 15 nt, Human
ugcugacagacacag

SEQ ID NO: 1820978 - RNA, 15 nt, Human
ugcugcaguugccag

SEQ ID NO: 1820979 - RNA, 16 nt, Human
ugcugcaguugccagu

SEQ ID NO: 1820980 - RNA, 20 nt, Human
ugcugauggugcaaugaccu

SEQ ID NO: 1820981 - RNA, 23 nt, Human
ugcugauggugcaaugaccuuuc

SEQ ID NO: 1820982 - RNA, 17 nt, Human
ugcugaaugguuuucaa

SEQ ID NO: 1820983 - RNA, 18 nt, Human
ugcugaaugguuuucaaa

SEQ ID NO: 1820984 - RNA, 22 nt, Human
ugcugaaugguuuucaaaauaa

SEQ ID NO: 1820985 - RNA, 18 nt, Human
ugcugaauacagaggcaa

SEQ ID NO: 1820986 - RNA, 23 nt, Human
ugcugaauacagaggcaacugca

SEQ ID NO: 1820987 - RNA, 19 nt, Human
ugcuccuggcccacugcau

SEQ ID NO: 1820988 - RNA, 15 nt, Human
ugcgugcauaccacu

SEQ ID NO: 1820989 - RNA, 18 nt, Human
ugcuagaacucccuuuca

SEQ ID NO: 1820990 - RNA, 19 nt, Human
ugcuagaacucccuuucaa

SEQ ID NO: 1820991 - RNA, 16 nt, Human
ugcuaggaacacuccu

SEQ ID NO: 1820992 - RNA, 17 nt, Human
ugcuaggaacacuccuu

SEQ ID NO: 1820993 - RNA, 19 nt, Human
ugcuaggaacacuccuuca

SEQ ID NO: 1820994 - RNA, 21 nt, Human
ugcuagaacucccuuucaaca

SEQ ID NO: 1820995 - RNA, 20 nt, Human
ugcuagaacucccuuucaac

SEQ ID NO: 1820996 - RNA, 19 nt, Human
ugcuccucuccccagcaag

SEQ ID NO: 1820997 - RNA, 14 nt, Human
ugcucaggagcccu

SEQ ID NO: 1820998 - RNA, 20 nt, Human
ugcucagcugucaaggcuca

SEQ ID NO: 1820999 - RNA, 16 nt, Human
ugcucagcugucaagg

SEQ ID NO: 1821000 - RNA, 21 nt, Human
ucuuccacaagagcccaggcc

SEQ ID NO: 1821001 - RNA, 16 nt, Human
ucuucaguaagccgug

SEQ ID NO: 1821002 - RNA, 14 nt, Human
ucuuccaggcuggg

SEQ ID NO: 1821003 - RNA, 19 nt, Human
ucuucuccacuuucuagcc

SEQ ID NO: 1821004 - RNA, 21 nt, Human
ucuucuccacuuucuagccag

SEQ ID NO: 1821005 - RNA, 13 nt, Human
ucuucuccacugg

SEQ ID NO: 1821006 - RNA, 14 nt, Human
ucuuagugugugca

SEQ ID NO: 1821007 - RNA, 16 nt, Human
ucuuaguggauguucu

SEQ ID NO: 1821008 - RNA, 15 nt, Human
ucuuauacauuugau

SEQ ID NO: 1821009 - RNA, 14 nt, Human
ucuuauacauuuga

SEQ ID NO: 1821010 - RNA, 13 nt, Human
ucuuaugggcugg

SEQ ID NO: 1821011 - RNA, 15 nt, Human
ucuucaguaagccgu

SEQ ID NO: 1821012 - RNA, 12 nt, Human
ucuucuccaggc

SEQ ID NO: 1821013 - RNA, 16 nt, Human
ucuucuccacuggaug

SEQ ID NO: 1821014 - RNA, 14 nt, Human
ucuucuccaggcug

SEQ ID NO: 1821015 - RNA, 13 nt, Human
ucuucuccaggcu

SEQ ID NO: 1821016 - RNA, 18 nt, Human
ucuugaacuccuggccuc

SEQ ID NO: 1821017 - RNA, 17 nt, Human
ucuugaacuccuggccu

SEQ ID NO: 1821018 - RNA, 16 nt, Human
ucuugaacuccuggcc

SEQ ID NO: 1821019 - RNA, 15 nt, Human
ucuucuccaggcugu

SEQ ID NO: 1821020 - RNA, 21 nt, Human
ucuugaauuguaaggaaugau

SEQ ID NO: 1821021 - RNA, 11 nt, Human
ucuugcucugc

SEQ ID NO: 1821022 - RNA, 13 nt, Human
ucuugcucugcug

SEQ ID NO: 1821023 - RNA, 12 nt, Human
ucuugcucugcu

SEQ ID NO: 1821024 - RNA, 22 nt, Human
ucuuguauuaaguuguuaauaa

SEQ ID NO: 1821025 - RNA, 18 nt, Human
ucuuguauuaaguuguua

SEQ ID NO: 1821026 - RNA, 16 nt, Human
ucuuguauuaaguugu

SEQ ID NO: 1821027 - RNA, 18 nt, Human
ucuuguuuuuuuuuucca

SEQ ID NO: 1821028 - RNA, 21 nt, Human
ucuuguuuuuuuuuuccacuu

SEQ ID NO: 1821029 - RNA, 22 nt, Human
ucuguggguuucuaaagcugcc

SEQ ID NO: 1821030 - RNA, 19 nt, Human
ucuguccgagcuuugaaaa

SEQ ID NO: 1821031 - RNA, 17 nt, Human
ucuguacgucugacagg

SEQ ID NO: 1821032 - RNA, 23 nt, Human
ucuguggguuucuaaagcugcca

SEQ ID NO: 1821033 - RNA, 18 nt, Human
ucuuaaaaaguggaaaaa

SEQ ID NO: 1821034 - RNA, 19 nt, Human
ucuguuacacuuuuuggaa

SEQ ID NO: 1821035 - RNA, 18 nt, Human
ucuggagguacgaaaaga

SEQ ID NO: 1821036 - RNA, 17 nt, Human
ucuggcuaugcauuuga

SEQ ID NO: 1821037 - RNA, 14 nt, Human
ucuggcuaugcauu

SEQ ID NO: 1821038 - RNA, 23 nt, Human
ucuggagcccacuguacuugcuc

SEQ ID NO: 1821039 - RNA, 23 nt, Human
ucuguacagagcccacgccccca

SEQ ID NO: 1821040 - RNA, 12 nt, Human
ucugggacacag

SEQ ID NO: 1821041 - RNA, 13 nt, Human
ucugggacacagu

SEQ ID NO: 1821042 - RNA, 17 nt, Human
ucuggcucuuccaggcu

SEQ ID NO: 1821043 - RNA, 15 nt, Human
ucuggcucuuccagg

SEQ ID NO: 1821044 - RNA, 16 nt, Human
ucuggcucuuccaggc

SEQ ID NO: 1821045 - RNA, 12 nt, Human
ugaaaggaaaga

SEQ ID NO: 1821046 - RNA, 17 nt, Human
ugaaaggaaagaggcuc

SEQ ID NO: 1821047 - RNA, 23 nt, Human
ugaaagcagggacuugaacccau

SEQ ID NO: 1821048 - RNA, 19 nt, Human
ugaaagcagggacuugaac

SEQ ID NO: 1821049 - RNA, 18 nt, Human
ugaaagcagggacuugaa

SEQ ID NO: 1821050 - RNA, 18 nt, Human
ugaaacccugucucuacu

SEQ ID NO: 1821051 - RNA, 22 nt, Human
ugaaagauggcugugccucugc

SEQ ID NO: 1821052 - RNA, 23 nt, Human
ugaaagauggcugugccucugcc

SEQ ID NO: 1821053 - RNA, 21 nt, Human
ugaaagauggcugugccucug

SEQ ID NO: 1821054 - RNA, 18 nt, Human
ugaaagggcccagagagg

SEQ ID NO: 1821055 - RNA, 17 nt, Human
ugaaagggcccagagag

SEQ ID NO: 1821056 - RNA, 16 nt, Human
ugaaagggcccagaga

SEQ ID NO: 1821057 - RNA, 15 nt, Human
ugaaagggcccagag

SEQ ID NO: 1821058 - RNA, 15 nt, Human
ugaaaucauucauuu

SEQ ID NO: 1821059 - RNA, 17 nt, Human
ugaaaucuuuuugcuuu

SEQ ID NO: 1821060 - RNA, 20 nt, Human
ugaaaugaggucagagccug

SEQ ID NO: 1821061 - RNA, 19 nt, Human
ugaaaugaggucagagccu

SEQ ID NO: 1821062 - RNA, 22 nt, Human
ugaaaugaggucagagccugca

SEQ ID NO: 1821063 - RNA, 21 nt, Human
ugaaaugaggucagagccugc

SEQ ID NO: 1821064 - RNA, 23 nt, Human
ugaaaugaggucagagccugcag

SEQ ID NO: 1821065 - RNA, 17 nt, Human
ucuuucacauuuaaaua

SEQ ID NO: 1821066 - RNA, 20 nt, Human
ucuuuugguuaugaauacuu

SEQ ID NO: 1821067 - RNA, 19 nt, Human
ucuuuugccguuauuaaaa

SEQ ID NO: 1821068 - RNA, 17 nt, Human
ucuuuugccguuauuaa

SEQ ID NO: 1821069 - RNA, 16 nt, Human
ucuuuuugcuuugcuu

SEQ ID NO: 1821070 - RNA, 16 nt, Human
ugaaaacuuuguagua

SEQ ID NO: 1821071 - RNA, 13 nt, Human
ugaaaacuuugua

SEQ ID NO: 1821072 - RNA, 15 nt, Human
ugaaaagaaaaauga

SEQ ID NO: 1821073 - RNA, 19 nt, Human
ugaaaacuuuaugcuaagu

SEQ ID NO: 1821074 - RNA, 23 nt, Human
ugaacuggguacuuguggacaca

SEQ ID NO: 1821075 - RNA, 14 nt, Human
ugaagacuuuucuu

SEQ ID NO: 1821076 - RNA, 17 nt, Human
ugaagacuuuucuuuca

SEQ ID NO: 1821077 - RNA, 22 nt, Human
ugaagacuuuucuuucagccaa

SEQ ID NO: 1821078 - RNA, 22 nt, Human
ugaacuuguaaaggaauuuaaa

SEQ ID NO: 1821079 - RNA, 14 nt, Human
ugaagacagagcua

SEQ ID NO: 1821080 - RNA, 16 nt, Human
ugaagacagagcuaca

SEQ ID NO: 1821081 - RNA, 19 nt, Human
ugaacuggguacuugugga

SEQ ID NO: 1821082 - RNA, 14 nt, Human
ugaacuuggcgcug

SEQ ID NO: 1821083 - RNA, 12 nt, Human
ugaacuugguuc

SEQ ID NO: 1821084 - RNA, 21 nt, Human
ugaaggcucgagcaugccugg

SEQ ID NO: 1821085 - RNA, 20 nt, Human
ugaaggcucgagcaugccug

SEQ ID NO: 1821086 - RNA, 19 nt, Human
ugaaauggacuuuuguaca

SEQ ID NO: 1821087 - RNA, 18 nt, Human
ugaacauugcaauagaaa

SEQ ID NO: 1821088 - RNA, 17 nt, Human
ugaacauugcaauagaa

SEQ ID NO: 1821089 - RNA, 15 nt, Human
ugaacauugcaauag

SEQ ID NO: 1821090 - RNA, 14 nt, Human
ugaacauuccagag

SEQ ID NO: 1821091 - RNA, 13 nt, Human
ugaacauuccaga

SEQ ID NO: 1821092 - RNA, 22 nt, Human
ugaaccacaucuugcucugcug

SEQ ID NO: 1821093 - RNA, 15 nt, Human
ugaacucuucaaucu

SEQ ID NO: 1821094 - RNA, 21 nt, Human
ugaaccacaucuugcucugcu

SEQ ID NO: 1821095 - RNA, 20 nt, Human
ugaaccacaucuugcucugc

SEQ ID NO: 1821096 - RNA, 14 nt, Human
ugaacugaacucug

SEQ ID NO: 1821097 - RNA, 18 nt, Human
ugaacucuucaaucucuu

SEQ ID NO: 1821098 - RNA, 15 nt, Human
ugaacugauaaagau

SEQ ID NO: 1821099 - RNA, 17 nt, Human
ugaacugaacucugaca

SEQ ID NO: 1821100 - RNA, 19 nt, Human
ugaacugaacucugacaac

SEQ ID NO: 1821101 - RNA, 13 nt, Human
ugaacugauaaag

SEQ ID NO: 1821102 - RNA, 19 nt, Human
uccuucuguccuacucugu

SEQ ID NO: 1821103 - RNA, 12 nt, Human
uccuucuguccu

SEQ ID NO: 1821104 - RNA, 16 nt, Human
uccuucaaagcaaaug

SEQ ID NO: 1821105 - RNA, 14 nt, Human
uccuuaccagcaga

SEQ ID NO: 1821106 - RNA, 10 nt, Human
ucccucccuu

SEQ ID NO: 1821107 - RNA, 22 nt, Human
uccuggcaugggaaugaauguc

SEQ ID NO: 1821108 - RNA, 17 nt, Human
uccuggcccacugcauc

SEQ ID NO: 1821109 - RNA, 15 nt, Human
uccugguguggaaga

SEQ ID NO: 1821110 - RNA, 23 nt, Human
ucgagugagacagacuagaaguu

SEQ ID NO: 1821111 - RNA, 14 nt, Human
ucgagugagacaga

SEQ ID NO: 1821112 - RNA, 15 nt, Human
ucgaguuacagacaa

SEQ ID NO: 1821113 - RNA, 17 nt, Human
ucgaguuacagacaaag

SEQ ID NO: 1821114 - RNA, 14 nt, Human
uccuuuuggaguca

SEQ ID NO: 1821115 - RNA, 23 nt, Human
uccuuuuggagucagacagaugu

SEQ ID NO: 1821116 - RNA, 17 nt, Human
ucgcaauguaagacucg

SEQ ID NO: 1821117 - RNA, 19 nt, Human
ucgcccaggcuggagugca

SEQ ID NO: 1821118 - RNA, 12 nt, Human
ucgcccaggcug

SEQ ID NO: 1821119 - RNA, 14 nt, Human
ucgcccaggcugga

SEQ ID NO: 1821120 - RNA, 14 nt, Human
ucucaaacuccuga

SEQ ID NO: 1821121 - RNA, 21 nt, Human
ucucaaacucuugaccucagg

SEQ ID NO: 1821122 - RNA, 13 nt, Human
ucucaaacucuug

SEQ ID NO: 1821123 - RNA, 22 nt, Human
ucucaaacucuugaccucaggu

SEQ ID NO: 1821124 - RNA, 17 nt, Human
ucucaaagaaauuucca

SEQ ID NO: 1821125 - RNA, 19 nt, Human
ucucaaagaaauuuccacu

SEQ ID NO: 1821126 - RNA, 17 nt, Human
ucucacucugucgccca

SEQ ID NO: 1821127 - RNA, 22 nt, Human
ucucacucugucgcccagucug

SEQ ID NO: 1821128 - RNA, 18 nt, Human
ucucacucugucgcccag

SEQ ID NO: 1821129 - RNA, 21 nt, Human
ucucacuguugcccaggcugg

SEQ ID NO: 1821130 - RNA, 20 nt, Human
ucucacuguugcccaggcug

SEQ ID NO: 1821131 - RNA, 19 nt, Human
ucucacuguugcccaggcu

SEQ ID NO: 1821132 - RNA, 18 nt, Human
ucucacuguugcccaggc

SEQ ID NO: 1821133 - RNA, 17 nt, Human
ucucagaaucucaaaua

SEQ ID NO: 1821134 - RNA, 21 nt, Human
ucucagaaucucaaauaacua

SEQ ID NO: 1821135 - RNA, 16 nt, Human
ucuaacuucaccauau

SEQ ID NO: 1821136 - RNA, 15 nt, Human
ucuaacuucaccaua

SEQ ID NO: 1821137 - RNA, 22 nt, Human
ucuaacuucaccauauuaccac

SEQ ID NO: 1821138 - RNA, 22 nt, Human
ucuacugaggugcuauguucuu

SEQ ID NO: 1821139 - RNA, 22 nt, Human
ucuagggaaaaaccagcgugug

SEQ ID NO: 1821140 - RNA, 21 nt, Human
ucuacacugugcugagucuga

SEQ ID NO: 1821141 - RNA, 15 nt, Human
ucuacacugugcuga

SEQ ID NO: 1821142 - RNA, 18 nt, Human
ucuacugaggugcuaugu

SEQ ID NO: 1821143 - RNA, 19 nt, Human
ucuacugaggugcuauguu

SEQ ID NO: 1821144 - RNA, 12 nt, Human
ucuacacugugc

SEQ ID NO: 1821145 - RNA, 14 nt, Human
ucuacacugugcug

SEQ ID NO: 1821146 - RNA, 17 nt, Human
ucuacacuccagugaga

SEQ ID NO: 1821147 - RNA, 13 nt, Human
ucucuucuccacu

SEQ ID NO: 1821148 - RNA, 14 nt, Human
ucucuucuccacug

SEQ ID NO: 1821149 - RNA, 15 nt, Human
ucucuucuccacugg

SEQ ID NO: 1821150 - RNA, 16 nt, Human
ucucuucuccacugga

SEQ ID NO: 1821151 - RNA, 11 nt, Human
ucucuucucca

SEQ ID NO: 1821152 - RNA, 18 nt, Human
ucucuucacagucacauu

SEQ ID NO: 1821153 - RNA, 11 nt, Human
ucucugcaggu

SEQ ID NO: 1821154 - RNA, 16 nt, Human
ucugaaaauguaugug

SEQ ID NO: 1821155 - RNA, 16 nt, Human
ucucuuuucaaaacau

SEQ ID NO: 1821156 - RNA, 15 nt, Human
ucucuuuucaaaaca

SEQ ID NO: 1821157 - RNA, 17 nt, Human
ucucuuuguucuaaaga

SEQ ID NO: 1821158 - RNA, 23 nt, Human
ucugaaaauguauguguaaguau

SEQ ID NO: 1821159 - RNA, 13 nt, Human
ucugaaagggacg

SEQ ID NO: 1821160 - RNA, 23 nt, Human
ucugaggacacuaaccacgcugg

SEQ ID NO: 1821161 - RNA, 20 nt, Human
ucugaggacacuaaccacgc

SEQ ID NO: 1821162 - RNA, 17 nt, Human
ucugaggacaagagaaa

SEQ ID NO: 1821163 - RNA, 14 nt, Human
ucugaggacaagag

SEQ ID NO: 1821164 - RNA, 17 nt, Human
ucugaggaauccagacc

SEQ ID NO: 1821165 - RNA, 16 nt, Human
ucugaggaauccagac

SEQ ID NO: 1821166 - RNA, 22 nt, Human
ucugagcauuagauuucucauu

SEQ ID NO: 1821167 - RNA, 23 nt, Human
ucugauucccaagcucugcuccu

SEQ ID NO: 1821168 - RNA, 18 nt, Human
ucugaggacaagagaaaa

SEQ ID NO: 1821169 - RNA, 19 nt, Human
ucugcacaagcugcacccu

SEQ ID NO: 1821170 - RNA, 14 nt, Human
ucugcacaagcugc

SEQ ID NO: 1821171 - RNA, 20 nt, Human
ucugagcauuagauuucuca

SEQ ID NO: 1821172 - RNA, 15 nt, Human
ucugacccaugcugc

SEQ ID NO: 1821173 - RNA, 16 nt, Human
ucugacccaugcugcc

SEQ ID NO: 1821174 - RNA, 17 nt, Human
ucugacccaugcugccc

SEQ ID NO: 1821175 - RNA, 18 nt, Human
ucugacccaugcugcccu

SEQ ID NO: 1821176 - RNA, 14 nt, Human
ucugacccaugcug

SEQ ID NO: 1821177 - RNA, 21 nt, Human
ucugaacuuggcgcugccccu

SEQ ID NO: 1821178 - RNA, 20 nt, Human
ucugaacuuggcgcugcccc

SEQ ID NO: 1821179 - RNA, 22 nt, Human
ucuccugccucagccucccaaa

SEQ ID NO: 1821180 - RNA, 22 nt, Human
ucucccccagccccauccucug

SEQ ID NO: 1821181 - RNA, 18 nt, Human
ucucccccagccccaucc

SEQ ID NO: 1821182 - RNA, 20 nt, Human
ucucccccagccccauccuc

SEQ ID NO: 1821183 - RNA, 14 nt, Human
ucucccccagcccc

SEQ ID NO: 1821184 - RNA, 15 nt, Human
ucucccccagcccca

SEQ ID NO: 1821185 - RNA, 17 nt, Human
ucucccccagccccauc

SEQ ID NO: 1821186 - RNA, 15 nt, Human
ucucaggucccugca

SEQ ID NO: 1821187 - RNA, 21 nt, Human
ucucagugucaaugcagcccc

SEQ ID NO: 1821188 - RNA, 19 nt, Human
ucucuaguuugauuaaauu

SEQ ID NO: 1821189 - RNA, 18 nt, Human
ucucuaguuugauuaaau

SEQ ID NO: 1821190 - RNA, 21 nt, Human
ucucuacugucucaguuuaca

SEQ ID NO: 1821191 - RNA, 13 nt, Human
ucuccuguaccuc

SEQ ID NO: 1821192 - RNA, 15 nt, Human
ucucuacaaaaagca

SEQ ID NO: 1821193 - RNA, 13 nt, Human
ucucugaggacac

SEQ ID NO: 1821194 - RNA, 14 nt, Human
ucucugaggacacu

SEQ ID NO: 1821195 - RNA, 15 nt, Human
ucucucgugaguaua

SEQ ID NO: 1821196 - RNA, 18 nt, Human
uccccuguuuguuucuga

SEQ ID NO: 1821197 - RNA, 21 nt, Human
uccccuuccuaauuccacagc

SEQ ID NO: 1821198 - RNA, 22 nt, Human
uccccuuccuaauuccacagcu

SEQ ID NO: 1821199 - RNA, 11 nt, Human
ucccuaauaaa

SEQ ID NO: 1821200 - RNA, 12 nt, Human
ucccuaauaaag

SEQ ID NO: 1821201 - RNA, 13 nt, Human
ucccuaauaaagc

SEQ ID NO: 1821202 - RNA, 15 nt, Human
ucccuacuguaauuu

SEQ ID NO: 1821203 - RNA, 17 nt, Human
ucccucccucuuucccu

SEQ ID NO: 1821204 - RNA, 15 nt, Human
ucccuacuuccugug

SEQ ID NO: 1821205 - RNA, 16 nt, Human
ucccuacuuccuguga

SEQ ID NO: 1821206 - RNA, 15 nt, Human
ucccucccucuuucc

SEQ ID NO: 1821207 - RNA, 24 nt, Human
uccccugcuggguguggcgcagca

SEQ ID NO: 1821208 - RNA, 19 nt, Human
uccccuguagagugggagc

SEQ ID NO: 1821209 - RNA, 15 nt, Human
uccccuguucacucu

SEQ ID NO: 1821210 - RNA, 22 nt, Human
uccccuguagagugggagcuga

SEQ ID NO: 1821211 - RNA, 23 nt, Human
uccccuguccccgcacugggcuu

SEQ ID NO: 1821212 - RNA, 14 nt, Human
uccccugcugggug

SEQ ID NO: 1821213 - RNA, 15 nt, Human
uccccugcugggugu

SEQ ID NO: 1821214 - RNA, 20 nt, Human
uccccugcuggguguggcgc

SEQ ID NO: 1821215 - RNA, 21 nt, Human
uccccugcuggguguggcgca

SEQ ID NO: 1821216 - RNA, 20 nt, Human
uccccgcacugggcuugggg

SEQ ID NO: 1821217 - RNA, 21 nt, Human
ucccccuuccauggacuuugu

SEQ ID NO: 1821218 - RNA, 14 nt, Human
uccccagcuguuua

SEQ ID NO: 1821219 - RNA, 15 nt, Human
uccccagcuguuuau

SEQ ID NO: 1821220 - RNA, 13 nt, Human
uccccaggaggcc

SEQ ID NO: 1821221 - RNA, 13 nt, Human
ucccccucuggcu

SEQ ID NO: 1821222 - RNA, 13 nt, Human
ucccccugcccca

SEQ ID NO: 1821223 - RNA, 17 nt, Human
ucccccaucucuucugg

SEQ ID NO: 1821224 - RNA, 23 nt, Human
ucccaucucacacaugagcauca

SEQ ID NO: 1821225 - RNA, 16 nt, Human
ucccaggcugagccuc

SEQ ID NO: 1821226 - RNA, 18 nt, Human
ucccaggcugagccucag

SEQ ID NO: 1821227 - RNA, 20 nt, Human
ucccaucucacacaugagca

SEQ ID NO: 1821228 - RNA, 12 nt, Human
ucccaugcccug

SEQ ID NO: 1821229 - RNA, 21 nt, Human
ucccaucugugaaaggaaaga

SEQ ID NO: 1821230 - RNA, 15 nt, Human
ucccaccucagccuc

SEQ ID NO: 1821231 - RNA, 14 nt, Human
ucccaccucagccu

SEQ ID NO: 1821232 - RNA, 13 nt, Human
ucccaccucagcc

SEQ ID NO: 1821233 - RNA, 22 nt, Human
ucccaaggcucugagcaaaugu

SEQ ID NO: 1821234 - RNA, 20 nt, Human
ucccaggcauuccccaggag

SEQ ID NO: 1821235 - RNA, 21 nt, Human
ucccaggcauuccccaggagg

SEQ ID NO: 1821236 - RNA, 20 nt, Human
ucccaggcgccccuuccccc

SEQ ID NO: 1821237 - RNA, 18 nt, Human
ucccaggcgccccuuccc

SEQ ID NO: 1821238 - RNA, 21 nt, Human
ucccaggcgccccuucccccu

SEQ ID NO: 1821239 - RNA, 15 nt, Human
ucccaggcugagccu

SEQ ID NO: 1821240 - RNA, 23 nt, Human
ucccaggcauuccccaggaggcc

SEQ ID NO: 1821241 - RNA, 22 nt, Human
ucccaggcauuccccaggaggc

SEQ ID NO: 1821242 - RNA, 15 nt, Human
ucccaagcucugcuc

SEQ ID NO: 1821243 - RNA, 14 nt, Human
ucccaagcucugcu

SEQ ID NO: 1821244 - RNA, 13 nt, Human
ucccaagcucugc

SEQ ID NO: 1821245 - RNA, 12 nt, Human
ucccaagcucug

SEQ ID NO: 1821246 - RNA, 17 nt, Human
ucccaagcucugcuccu

SEQ ID NO: 1821247 - RNA, 18 nt, Human
ucccaaggcucugagcaa

SEQ ID NO: 1821248 - RNA, 16 nt, Human
ucccaacucaccccag

SEQ ID NO: 1821249 - RNA, 14 nt, Human
ucccaacucacccc

SEQ ID NO: 1821250 - RNA, 15 nt, Human
ucccaacucacccca

SEQ ID NO: 1821251 - RNA, 13 nt, Human
ucccaacucaccc

SEQ ID NO: 1821252 - RNA, 23 nt, Human
uccagcucaccagccccagugcc

SEQ ID NO: 1821253 - RNA, 16 nt, Human
uccauccaggccauuc

SEQ ID NO: 1821254 - RNA, 14 nt, Human
uccauggacuuugu

SEQ ID NO: 1821255 - RNA, 15 nt, Human
uccauggacuuuguu

SEQ ID NO: 1821256 - RNA, 19 nt, Human
uccaaacuaccuuccaguu

SEQ ID NO: 1821257 - RNA, 17 nt, Human
uccaaaauaaaacuuuu

SEQ ID NO: 1821258 - RNA, 16 nt, Human
uccaaaauaaaacuuu

SEQ ID NO: 1821259 - RNA, 19 nt, Human
uccaagaccuucuccuuca

SEQ ID NO: 1821260 - RNA, 13 nt, Human
uccaagcaaaugu

SEQ ID NO: 1821261 - RNA, 22 nt, Human
uccaagaagcccaggaaaggcu

SEQ ID NO: 1821262 - RNA, 20 nt, Human
uccaagaagcccaggaaagg

SEQ ID NO: 1821263 - RNA, 23 nt, Human
uccagccaaagccuccuccagcc

SEQ ID NO: 1821264 - RNA, 14 nt, Human
uccacuuggucugu

SEQ ID NO: 1821265 - RNA, 13 nt, Human
uccaccugccagg

SEQ ID NO: 1821266 - RNA, 13 nt, Human
uccacuuggucug

SEQ ID NO: 1821267 - RNA, 12 nt, Human
uccacuuggucu

SEQ ID NO: 1821268 - RNA, 14 nt, Human
uccacaacacacag

SEQ ID NO: 1821269 - RNA, 15 nt, Human
uccacaagagcccag

SEQ ID NO: 1821270 - RNA, 14 nt, Human
uccacaagagccca

SEQ ID NO: 1821271 - RNA, 12 nt, Human
uccaccugccag

SEQ ID NO: 1821272 - RNA, 14 nt, Human
uccaccuacaugag

SEQ ID NO: 1821273 - RNA, 22 nt, Human
ucauuaggugugacugaauuuc

SEQ ID NO: 1821274 - RNA, 21 nt, Human
ucauuaggugugacugaauuu

SEQ ID NO: 1821275 - RNA, 18 nt, Human
ucauuaggugugacugaa

SEQ ID NO: 1821276 - RNA, 16 nt, Human
ucauuaggugugacug

SEQ ID NO: 1821277 - RNA, 21 nt, Human
ucauacccacccccacccaag

SEQ ID NO: 1821278 - RNA, 20 nt, Human
ucauacccacccccacccaa

SEQ ID NO: 1821279 - RNA, 14 nt, Human
ucauacccaccccc

SEQ ID NO: 1821280 - RNA, 15 nt, Human
ucauacccaccccca

SEQ ID NO: 1821281 - RNA, 13 nt, Human
ucauacccacccc

SEQ ID NO: 1821282 - RNA, 15 nt, Human
ucauaauuauuauuu

SEQ ID NO: 1821283 - RNA, 17 nt, Human
ucaguuguuaguguguc

SEQ ID NO: 1821284 - RNA, 13 nt, Human
ucauaaugacuua

SEQ ID NO: 1821285 - RNA, 15 nt, Human
ucaguuacucuucag

SEQ ID NO: 1821286 - RNA, 23 nt, Human
ucagugguuggcaauuguuucaa

SEQ ID NO: 1821287 - RNA, 11 nt, Human
ucaguguacau

SEQ ID NO: 1821288 - RNA, 13 nt, Human
ucagugugacuga

SEQ ID NO: 1821289 - RNA, 17 nt, Human
ucagugugacugaucuc

SEQ ID NO: 1821290 - RNA, 24 nt, Human
ucagucugauucccaagcucugcu

SEQ ID NO: 1821291 - RNA, 20 nt, Human
ucaguggggcccauggaugu

SEQ ID NO: 1821292 - RNA, 15 nt, Human
ucagucuggcccuuc

SEQ ID NO: 1821293 - RNA, 12 nt, Human
ucacuuuuauuu

SEQ ID NO: 1821294 - RNA, 22 nt, Human
ucacuuuuauuuagcaccaggg

SEQ ID NO: 1821295 - RNA, 16 nt, Human
ucacucugucgcccag

SEQ ID NO: 1821296 - RNA, 12 nt, Human
ucacucugucgc

SEQ ID NO: 1821297 - RNA, 19 nt, Human
ucacucugucgcccagucu

SEQ ID NO: 1821298 - RNA, 22 nt, Human
ucacucugucgcccagucugga

SEQ ID NO: 1821299 - RNA, 20 nt, Human
ucacugcuuaacuucacaua

SEQ ID NO: 1821300 - RNA, 18 nt, Human
ucacugcuuaacuucaca

SEQ ID NO: 1821301 - RNA, 17 nt, Human
ucacugcuuaacuucac

SEQ ID NO: 1821302 - RNA, 15 nt, Human
ucacugcuuaacuuc

SEQ ID NO: 1821303 - RNA, 21 nt, Human
ucagaggggaauaaacuguug

SEQ ID NO: 1821304 - RNA, 22 nt, Human
ucagaguugaugguuguacaua

SEQ ID NO: 1821305 - RNA, 19 nt, Human
ucagcacgauuucuguuua

SEQ ID NO: 1821306 - RNA, 18 nt, Human
ucagcacgauuucuguuu

SEQ ID NO: 1821307 - RNA, 15 nt, Human
ucagacagcugccug

SEQ ID NO: 1821308 - RNA, 16 nt, Human
ucagacagcugccugg

SEQ ID NO: 1821309 - RNA, 17 nt, Human
ucagacagcugccuggg

SEQ ID NO: 1821310 - RNA, 18 nt, Human
ucagacagcugccuggga

SEQ ID NO: 1821311 - RNA, 19 nt, Human
ucagacagcugccugggau

SEQ ID NO: 1821312 - RNA, 20 nt, Human
ucagacagcugccugggauc

SEQ ID NO: 1821313 - RNA, 19 nt, Human
ucagacauagaauuaacac

SEQ ID NO: 1821314 - RNA, 22 nt, Human
ucagacauagaauuaacacaug

SEQ ID NO: 1821315 - RNA, 18 nt, Human
ucacuccuaccugguaau

SEQ ID NO: 1821316 - RNA, 13 nt, Human
ucacuccuugaaa

SEQ ID NO: 1821317 - RNA, 20 nt, Human
ucacggcucacugcagccuc

SEQ ID NO: 1821318 - RNA, 15 nt, Human
ucacggcucacugca

SEQ ID NO: 1821319 - RNA, 13 nt, Human
ucacggcucacug

SEQ ID NO: 1821320 - RNA, 14 nt, Human
ucacggaagagccu

SEQ ID NO: 1821321 - RNA, 16 nt, Human
ucacggaagagccuug

SEQ ID NO: 1821322 - RNA, 17 nt, Human
ucacggaagagccuugc

SEQ ID NO: 1821323 - RNA, 14 nt, Human
ucacucuggcagcu

SEQ ID NO: 1821324 - RNA, 15 nt, Human
ucacucuggcagcuc

SEQ ID NO: 1821325 - RNA, 16 nt, Human
ucacucuggcagcuca

SEQ ID NO: 1821326 - RNA, 17 nt, Human
ucacucuggcagcucag

SEQ ID NO: 1821327 - RNA, 18 nt, Human
ucacucuggcagcucaga

SEQ ID NO: 1821328 - RNA, 19 nt, Human
ucacucuggcagcucagag

SEQ ID NO: 1821329 - RNA, 20 nt, Human
ucacucuggcagcucagaga

SEQ ID NO: 1821330 - RNA, 22 nt, Human
ucacucuggcagcucagagagg

SEQ ID NO: 1821331 - RNA, 23 nt, Human
ucacucuccuuggugucgggcau

SEQ ID NO: 1821332 - RNA, 12 nt, Human
ucacucuggcag

SEQ ID NO: 1821333 - RNA, 13 nt, Human
ucacucuggcagc

SEQ ID NO: 1821334 - RNA, 12 nt, Human
ucacucuccuug

SEQ ID NO: 1821335 - RNA, 14 nt, Human
ucacucuccuuggu

SEQ ID NO: 1821336 - RNA, 19 nt, Human
ucacucuacuuagcauguc

SEQ ID NO: 1821337 - RNA, 20 nt, Human
ucacucuacuuagcaugucc

SEQ ID NO: 1821338 - RNA, 13 nt, Human
ucaccuuuauucu

SEQ ID NO: 1821339 - RNA, 14 nt, Human
ucaccuuucccauc

SEQ ID NO: 1821340 - RNA, 12 nt, Human
ucaccuuugucc

SEQ ID NO: 1821341 - RNA, 15 nt, Human
ucacaggcaggucca

SEQ ID NO: 1821342 - RNA, 12 nt, Human
ucacaggcaggu

SEQ ID NO: 1821343 - RNA, 22 nt, Human
ucaccuuuguccccaccgcaga

SEQ ID NO: 1821344 - RNA, 14 nt, Human
ucaccuuugucccc

SEQ ID NO: 1821345 - RNA, 15 nt, Human
ucaccuuugucccca

SEQ ID NO: 1821346 - RNA, 17 nt, Human
ucaccuuuguccccacc

SEQ ID NO: 1821347 - RNA, 18 nt, Human
ucaccuuuguccccaccg

SEQ ID NO: 1821348 - RNA, 14 nt, Human
ucacgccacugcac

SEQ ID NO: 1821349 - RNA, 13 nt, Human
ucacgccacugca

SEQ ID NO: 1821350 - RNA, 16 nt, Human
ucacgccacugcacua

SEQ ID NO: 1821351 - RNA, 19 nt, Human
ucacgccuguaauccuagc

SEQ ID NO: 1821352 - RNA, 20 nt, Human
ucacgccuguaauccuagca

SEQ ID NO: 1821353 - RNA, 14 nt, Human
uaucugaaaaugua

SEQ ID NO: 1821354 - RNA, 15 nt, Human
uaucugaaaauguau

SEQ ID NO: 1821355 - RNA, 20 nt, Human
uaucugaaaauguaugugua

SEQ ID NO: 1821356 - RNA, 23 nt, Human
uauuuauuaaaugcccagccccu

SEQ ID NO: 1821357 - RNA, 21 nt, Human
uauuuucaacgcagcccugcu

SEQ ID NO: 1821358 - RNA, 15 nt, Human
uauuuuauguugcau

SEQ ID NO: 1821359 - RNA, 16 nt, Human
uauuuuauguugcaua

SEQ ID NO: 1821360 - RNA, 22 nt, Human
ucaaaacgguuuuacugcagcu

SEQ ID NO: 1821361 - RNA, 23 nt, Human
ucaaacggccucacuaggcuucu

SEQ ID NO: 1821362 - RNA, 15 nt, Human
ucaaacgugaaaaug

SEQ ID NO: 1821363 - RNA, 16 nt, Human
ucaaacgugaaaaugc

SEQ ID NO: 1821364 - RNA, 14 nt, Human
ucaaacucuuaaaa

SEQ ID NO: 1821365 - RNA, 15 nt, Human
ucaaaaacauucuua

SEQ ID NO: 1821366 - RNA, 22 nt, Human
uauuuuuuucugaauuauuuuc

SEQ ID NO: 1821367 - RNA, 15 nt, Human
uauuuuuuuacuaau

SEQ ID NO: 1821368 - RNA, 14 nt, Human
ucaaccuccugggc

SEQ ID NO: 1821369 - RNA, 13 nt, Human
ucaaccuccuggg

SEQ ID NO: 1821370 - RNA, 22 nt, Human
ucaaacucuugaccucagguga

SEQ ID NO: 1821371 - RNA, 13 nt, Human
ucaaacuuuacua

SEQ ID NO: 1821372 - RNA, 15 nt, Human
ucaaacuuuacuaug

SEQ ID NO: 1821373 - RNA, 16 nt, Human
ucaaacuuuacuaugg

SEQ ID NO: 1821374 - RNA, 22 nt, Human
ucaagugauucuccugccucag

SEQ ID NO: 1821375 - RNA, 23 nt, Human
ucaaggauccugagccagauuuc

SEQ ID NO: 1821376 - RNA, 20 nt, Human
ucaaggauccugagccagau

SEQ ID NO: 1821377 - RNA, 18 nt, Human
ucaaggauccugagccag

SEQ ID NO: 1821378 - RNA, 19 nt, Human
ucaaggauccugagccaga

SEQ ID NO: 1821379 - RNA, 17 nt, Human
ucaagcgauucuucugc

SEQ ID NO: 1821380 - RNA, 16 nt, Human
ucaagcgauucuucug

SEQ ID NO: 1821381 - RNA, 11 nt, Human
ucacaggcagg

SEQ ID NO: 1821382 - RNA, 19 nt, Human
ucacaggaaguagaggagg

SEQ ID NO: 1821383 - RNA, 14 nt, Human
ucacaggaaguaga

SEQ ID NO: 1821384 - RNA, 23 nt, Human
ucacacagugagucgaggacagg

SEQ ID NO: 1821385 - RNA, 22 nt, Human
ucacacagugagucgaggacag

SEQ ID NO: 1821386 - RNA, 21 nt, Human
ucacacaugagcaucaggcca

SEQ ID NO: 1821387 - RNA, 13 nt, Human
ucacacagugagu

SEQ ID NO: 1821388 - RNA, 22 nt, Human
ucacacaguauuacuucugcua

SEQ ID NO: 1821389 - RNA, 21 nt, Human
ucacacaguauuacuucugcu

SEQ ID NO: 1821390 - RNA, 19 nt, Human
ucaauuacaggaaguacug

SEQ ID NO: 1821391 - RNA, 20 nt, Human
ucaauuacaggaaguacugg

SEQ ID NO: 1821392 - RNA, 18 nt, Human
ucaaugcacugacauugu

SEQ ID NO: 1821393 - RNA, 17 nt, Human
ucaaugcuauaacuaug

SEQ ID NO: 1821394 - RNA, 13 nt, Human
ucaauuacaggaa

SEQ ID NO: 1821395 - RNA, 18 nt, Human
ucaauuacaggaaguacu

SEQ ID NO: 1821396 - RNA, 14 nt, Human
ucaaugcacugaca

SEQ ID NO: 1821397 - RNA, 17 nt, Human
ucaauaggaaaaacuga

SEQ ID NO: 1821398 - RNA, 14 nt, Human
ucaauaggaaaaac

SEQ ID NO: 1821399 - RNA, 13 nt, Human
ucaauaggaaaaa

SEQ ID NO: 1821400 - RNA, 12 nt, Human
uaaaaaacacug

SEQ ID NO: 1821401 - RNA, 20 nt, Human
uaaaaaacugcugacuguuu

SEQ ID NO: 1821402 - RNA, 23 nt, Human
uaaaaaacugcugacuguuuucu

SEQ ID NO: 1821403 - RNA, 11 nt, Human
uaaaaaacacu

SEQ ID NO: 1821404 - RNA, 14 nt, Human
guuuuucaguuuuc

SEQ ID NO: 1821405 - RNA, 12 nt, Human
guuuuucaguuu

SEQ ID NO: 1821406 - RNA, 12 nt, Human
guuuucucuuga

SEQ ID NO: 1821407 - RNA, 19 nt, Human
guuuucucuugagagggug

SEQ ID NO: 1821408 - RNA, 23 nt, Human
guuuuuauggcuuuugugcauua

SEQ ID NO: 1821409 - RNA, 22 nt, Human
guuuuuauggcuuuugugcauu

SEQ ID NO: 1821410 - RNA, 19 nt, Human
guuuuuauggcuuuugugc

SEQ ID NO: 1821411 - RNA, 17 nt, Human
guuuucaguguacaugg

SEQ ID NO: 1821412 - RNA, 16 nt, Human
guuuucaguguacaug

SEQ ID NO: 1821413 - RNA, 16 nt, Human
guuuguugugaggauu

SEQ ID NO: 1821414 - RNA, 21 nt, Human
gguuggccccugcccggcugc

SEQ ID NO: 1821415 - RNA, 17 nt, Human
guuuagaaagcuugccc

SEQ ID NO: 1821416 - RNA, 13 nt, Human
guuuagaaagcuu

SEQ ID NO: 1821417 - RNA, 16 nt, Human
guuuaguaaucauauu

SEQ ID NO: 1821418 - RNA, 18 nt, Human
guuucagaaauguguuau

SEQ ID NO: 1821419 - RNA, 14 nt, Human
guuucagaaaugug

SEQ ID NO: 1821420 - RNA, 22 nt, Human
guuuccugcccugggaggcagu

SEQ ID NO: 1821421 - RNA, 16 nt, Human
guuuccuuauauuaug

SEQ ID NO: 1821422 - RNA, 21 nt, Human
guuuccuggcacugcuuccag

SEQ ID NO: 1821423 - RNA, 22 nt, Human
guuuccuggcacugcuuccagu

SEQ ID NO: 1821424 - RNA, 13 nt, Human
guuuccugcccug

SEQ ID NO: 1821425 - RNA, 17 nt, Human
guuuccugcccugggag

SEQ ID NO: 1821426 - RNA, 16 nt, Human
guuuccuggcacugcu

SEQ ID NO: 1821427 - RNA, 20 nt, Human
guuuccuggcacugcuucca

SEQ ID NO: 1821428 - RNA, 20 nt, Human
guuucuaaagcugccagccg

SEQ ID NO: 1821429 - RNA, 16 nt, Human
guuucuaaagcugcca

SEQ ID NO: 1821430 - RNA, 14 nt, Human
guuucuaaagcugc

SEQ ID NO: 1821431 - RNA, 15 nt, Human
guuucuaaagcugcc

SEQ ID NO: 1821432 - RNA, 16 nt, Human
guuugaaccaagaacu

SEQ ID NO: 1821433 - RNA, 17 nt, Human
guuucuuuguaaugaaa

SEQ ID NO: 1821434 - RNA, 20 nt, Human
guuucuuucucugaggacaa

SEQ ID NO: 1821435 - RNA, 19 nt, Human
guuucuuucucugaggaca

SEQ ID NO: 1821436 - RNA, 14 nt, Human
guuucuuuguaaug

SEQ ID NO: 1821437 - RNA, 22 nt, Human
guuugauuaaauucuugcaaag

SEQ ID NO: 1821438 - RNA, 19 nt, Human
guuugauuaaauucuugca

SEQ ID NO: 1821439 - RNA, 17 nt, Human
guuugauuaaauucuug

SEQ ID NO: 1821440 - RNA, 20 nt, Human
guuuguaaauuaacuuuuau

SEQ ID NO: 1821441 - RNA, 19 nt, Human
guuuguaaauuaacuuuua

SEQ ID NO: 1821442 - RNA, 17 nt, Human
guuuguaaauuaacuuu

SEQ ID NO: 1821443 - RNA, 18 nt, Human
guuuguuccccaagacau

SEQ ID NO: 1821444 - RNA, 19 nt, Human
guuuguggaaaaugaaaau

SEQ ID NO: 1821445 - RNA, 13 nt, Human
uaaaaugagaaau

SEQ ID NO: 1821446 - RNA, 15 nt, Human
uaaaaugagaaaucu

SEQ ID NO: 1821447 - RNA, 16 nt, Human
uaaaaugagaaaucua

SEQ ID NO: 1821448 - RNA, 15 nt, Human
uaaaaaugguuuaaa

SEQ ID NO: 1821449 - RNA, 18 nt, Human
uaaaagcauuuuguaaua

SEQ ID NO: 1821450 - RNA, 17 nt, Human
uaaaagcauuuuguaau

SEQ ID NO: 1821451 - RNA, 16 nt, Human
uaaaagcauuuuguaa

SEQ ID NO: 1821452 - RNA, 15 nt, Human
uaaaagcauuuugua

SEQ ID NO: 1821453 - RNA, 14 nt, Human
uaaaagcauuuugu

SEQ ID NO: 1821454 - RNA, 17 nt, Human
uaaaagggacugagaaa

SEQ ID NO: 1821455 - RNA, 19 nt, Human
uaaaagggacugagaaauu

SEQ ID NO: 1821456 - RNA, 20 nt, Human
uaaaagggacugagaaauuu

SEQ ID NO: 1821457 - RNA, 21 nt, Human
uaaaagggacugagaaauuua

SEQ ID NO: 1821458 - RNA, 19 nt, Human
uaaacuuaaucuaaaugga

SEQ ID NO: 1821459 - RNA, 18 nt, Human
uaaacuuaaucuaaaugg

SEQ ID NO: 1821460 - RNA, 13 nt, Human
uaaacuuaaucua

SEQ ID NO: 1821461 - RNA, 14 nt, Human
uaaacuuaaucuaa

SEQ ID NO: 1821462 - RNA, 16 nt, Human
uaaacuuuaccuuuuu

SEQ ID NO: 1821463 - RNA, 22 nt, Human
uaaacuuuaccuuuuuuauaca

SEQ ID NO: 1821464 - RNA, 22 nt, Human
uaaacugcccccucugcccugc

SEQ ID NO: 1821465 - RNA, 23 nt, Human
uaaacugcccccucugcccugcg

SEQ ID NO: 1821466 - RNA, 20 nt, Human
uaaacugcccccucugcccu

SEQ ID NO: 1821467 - RNA, 21 nt, Human
uaaacugcccccucugcccug

SEQ ID NO: 1821468 - RNA, 18 nt, Human
uaaacaagaccacguuuc

SEQ ID NO: 1821469 - RNA, 19 nt, Human
uaaacaagaccacguuucu

SEQ ID NO: 1821470 - RNA, 23 nt, Human
uaaacaagaccacguuucuaaag

SEQ ID NO: 1821471 - RNA, 21 nt, Human
uaaacacucuugaaaaaugca

SEQ ID NO: 1821472 - RNA, 14 nt, Human
uaaaggaauuuaaa

SEQ ID NO: 1821473 - RNA, 14 nt, Human
uaaagcuagaaaug

SEQ ID NO: 1821474 - RNA, 15 nt, Human
uaaagcuagaaauga

SEQ ID NO: 1821475 - RNA, 20 nt, Human
uaaacuuuuuucuuacuguc

SEQ ID NO: 1821476 - RNA, 17 nt, Human
uaaauaaaaauaauccu

SEQ ID NO: 1821477 - RNA, 14 nt, Human
uaaaguuuguugaa

SEQ ID NO: 1821478 - RNA, 13 nt, Human
uaaaguuucuguu

SEQ ID NO: 1821479 - RNA, 21 nt, Human
uaaaguguauuuuuuuacuaa

SEQ ID NO: 1821480 - RNA, 23 nt, Human
uaaaguguauuuuuuuacuaaua

SEQ ID NO: 1821481 - RNA, 22 nt, Human
uaaaguguauuuuuuuacuaau

SEQ ID NO: 1821482 - RNA, 18 nt, Human
uaaauauaugcuaagucu

SEQ ID NO: 1821483 - RNA, 16 nt, Human
uaaauauauuuuaaga

SEQ ID NO: 1821484 - RNA, 22 nt, Human
uaaauauauuuuaagacgaaac

SEQ ID NO: 1821485 - RNA, 19 nt, Human
uaaaucaaguuggcuucua

SEQ ID NO: 1821486 - RNA, 20 nt, Human
uaaaucagacuaugaaguuu

SEQ ID NO: 1821487 - RNA, 19 nt, Human
uaaaucagccguguaacca

SEQ ID NO: 1821488 - RNA, 15 nt, Human
uaaauugcuccuuga

SEQ ID NO: 1821489 - RNA, 13 nt, Human
uaacagaaaugua

SEQ ID NO: 1821490 - RNA, 15 nt, Human
uaacagaaauguaca

SEQ ID NO: 1821491 - RNA, 14 nt, Human
uaacagaaauguac

SEQ ID NO: 1821492 - RNA, 19 nt, Human
uaacaggcagauacaggaa

SEQ ID NO: 1821493 - RNA, 19 nt, Human
uaaccagcagaaaugccuu

SEQ ID NO: 1821494 - RNA, 16 nt, Human
uaaccagcagaaaugc

SEQ ID NO: 1821495 - RNA, 14 nt, Human
uaaccagcagaaau

SEQ ID NO: 1821496 - RNA, 16 nt, Human
uaacugagugccuuuu

SEQ ID NO: 1821497 - RNA, 17 nt, Human
uaacugagugccuuuug

SEQ ID NO: 1821498 - RNA, 20 nt, Human
uaacuuuuauaaacuuuacc

SEQ ID NO: 1821499 - RNA, 15 nt, Human
uaagcaugcacaaau

SEQ ID NO: 1821500 - RNA, 13 nt, Human
uaagccagacauc

SEQ ID NO: 1821501 - RNA, 21 nt, Human
uaagccagacaucaacagaua

SEQ ID NO: 1821502 - RNA, 20 nt, Human
uaagccagacaucaacagau

SEQ ID NO: 1821503 - RNA, 14 nt, Human
uaagccuuuggaaa

SEQ ID NO: 1821504 - RNA, 17 nt, Human
uaagccuuuggaaacag

SEQ ID NO: 1821505 - RNA, 21 nt, Human
uaagccuuuggaaacagcucg

SEQ ID NO: 1821506 - RNA, 19 nt, Human
uaaggaugcuuguacauaa

SEQ ID NO: 1821507 - RNA, 15 nt, Human
uaaggcaaucauggu

SEQ ID NO: 1821508 - RNA, 18 nt, Human
uaaggaugcuuguacaua

SEQ ID NO: 1821509 - RNA, 23 nt, Human
uaaggaugcuuguacauaaugcg

SEQ ID NO: 1821510 - RNA, 22 nt, Human
uaaggaugcuuguacauaaugc

SEQ ID NO: 1821511 - RNA, 21 nt, Human
uaaggaugcuuguacauaaug

SEQ ID NO: 1821512 - RNA, 20 nt, Human
uaaggaugcuuguacauaau

SEQ ID NO: 1821513 - RNA, 22 nt, Human
uaagaggcagggucucacucug

SEQ ID NO: 1821514 - RNA, 15 nt, Human
uaagaaauacagacu

SEQ ID NO: 1821515 - RNA, 22 nt, Human
uaagaaccuuuugagugccuua

SEQ ID NO: 1821516 - RNA, 22 nt, Human
uaacuuuuauaaacuuuaccuu

SEQ ID NO: 1821517 - RNA, 21 nt, Human
uaacuuuuauaaacuuuaccu

SEQ ID NO: 1821518 - RNA, 14 nt, Human
uaagauaaaugugc

SEQ ID NO: 1821519 - RNA, 12 nt, Human
uaagagggaggg

SEQ ID NO: 1821520 - RNA, 22 nt, Human
uaagagggagggagggcuccag

SEQ ID NO: 1821521 - RNA, 23 nt, Human
uaagagggagggagggcuccaga

SEQ ID NO: 1821522 - RNA, 18 nt, Human
uaagaucguucucugccu

SEQ ID NO: 1821523 - RNA, 16 nt, Human
uaagauaaaugugcug

SEQ ID NO: 1821524 - RNA, 17 nt, Human
uaagauaaaugugcuga

SEQ ID NO: 1821525 - RNA, 13 nt, Human
uaaucgaccugcc

SEQ ID NO: 1821526 - RNA, 14 nt, Human
uaaucgaccugccu

SEQ ID NO: 1821527 - RNA, 16 nt, Human
uaaucgaccugccucg

SEQ ID NO: 1821528 - RNA, 16 nt, Human
uaaucguguccccuau

SEQ ID NO: 1821529 - RNA, 19 nt, Human
uaaugccacuaaauugaca

SEQ ID NO: 1821530 - RNA, 17 nt, Human
uaaugaugucguuugaa

SEQ ID NO: 1821531 - RNA, 23 nt, Human
uaaugaugucguuugaaucacag

SEQ ID NO: 1821532 - RNA, 15 nt, Human
uaaugauaugcuugu

SEQ ID NO: 1821533 - RNA, 16 nt, Human
uaaugauaugcuugua

SEQ ID NO: 1821534 - RNA, 11 nt, Human
uaaucuaaaug

SEQ ID NO: 1821535 - RNA, 20 nt, Human
uaagugguacuaacuuuccu

SEQ ID NO: 1821536 - RNA, 13 nt, Human
uaauaaagacagg

SEQ ID NO: 1821537 - RNA, 11 nt, Human
uaauaaagcug

SEQ ID NO: 1821538 - RNA, 16 nt, Human
uaauaauaaagaauag

SEQ ID NO: 1821539 - RNA, 21 nt, Human
uaauaguucagguaacaggca

SEQ ID NO: 1821540 - RNA, 14 nt, Human
uaauacaccacuac

SEQ ID NO: 1821541 - RNA, 18 nt, Human
uaauuugugauacaaugc

SEQ ID NO: 1821542 - RNA, 15 nt, Human
uaauuugugauacaa

SEQ ID NO: 1821543 - RNA, 14 nt, Human
uaauuugugauaca

SEQ ID NO: 1821544 - RNA, 22 nt, Human
uaauuugugauacaaugcugug

SEQ ID NO: 1821545 - RNA, 19 nt, Human
uaauuugugauacaaugcu

SEQ ID NO: 1821546 - RNA, 18 nt, Human
uaauucuuagcucauucu

SEQ ID NO: 1821547 - RNA, 22 nt, Human
uaauugacaggauuauuggaaa

SEQ ID NO: 1821548 - RNA, 20 nt, Human
uaauugacaggauuauugga

SEQ ID NO: 1821549 - RNA, 19 nt, Human
uaaugcgcaggcuggcccu

SEQ ID NO: 1821550 - RNA, 22 nt, Human
uaaugcgcaggcuggcccugcc

SEQ ID NO: 1821551 - RNA, 14 nt, Human
uaaugcgugcauac

SEQ ID NO: 1821552 - RNA, 23 nt, Human
uaaugcgcaggcuggcccugccc

SEQ ID NO: 1821553 - RNA, 17 nt, Human
uaauuaaaacacaacau

SEQ ID NO: 1821554 - RNA, 21 nt, Human
uacuguaucaugacaaagacu

SEQ ID NO: 1821555 - RNA, 17 nt, Human
uacugcauaugaaagga

SEQ ID NO: 1821556 - RNA, 21 nt, Human
uacuugcucuugaugccuggc

SEQ ID NO: 1821557 - RNA, 18 nt, Human
uacuuguggacacagcuc

SEQ ID NO: 1821558 - RNA, 15 nt, Human
uacuuguggacacag

SEQ ID NO: 1821559 - RNA, 19 nt, Human
uacuuguggacacagcucu

SEQ ID NO: 1821560 - RNA, 15 nt, Human
uagaaauauaauuga

SEQ ID NO: 1821561 - RNA, 20 nt, Human
uagaaauaucugaaaaugua

SEQ ID NO: 1821562 - RNA, 21 nt, Human
uagaaauaucugaaaauguau

SEQ ID NO: 1821563 - RNA, 23 nt, Human
uagaaauaucugaaaauguaugu

SEQ ID NO: 1821564 - RNA, 15 nt, Human
uagaaagaagaugaa

SEQ ID NO: 1821565 - RNA, 12 nt, Human
uacucccaucug

SEQ ID NO: 1821566 - RNA, 14 nt, Human
uacucccaucugug

SEQ ID NO: 1821567 - RNA, 16 nt, Human
uacucccaucugugaa

SEQ ID NO: 1821568 - RNA, 17 nt, Human
uacucccaucugugaaa

SEQ ID NO: 1821569 - RNA, 15 nt, Human
uacugaggugcuaug

SEQ ID NO: 1821570 - RNA, 22 nt, Human
uacucagaauucucuaguuuga

SEQ ID NO: 1821571 - RNA, 16 nt, Human
uacucagaauucucua

SEQ ID NO: 1821572 - RNA, 14 nt, Human
uacucaccucaccc

SEQ ID NO: 1821573 - RNA, 12 nt, Human
uacucaccucac

SEQ ID NO: 1821574 - RNA, 14 nt, Human
uacuaccuguaaug

SEQ ID NO: 1821575 - RNA, 20 nt, Human
uacuacaguccucccaucuc

SEQ ID NO: 1821576 - RNA, 20 nt, Human
uacuacaguuuguuaguaug

SEQ ID NO: 1821577 - RNA, 22 nt, Human
uacccaucccauaugccugggc

SEQ ID NO: 1821578 - RNA, 19 nt, Human
uaccuuugacaaagguaaa

SEQ ID NO: 1821579 - RNA, 20 nt, Human
uaccuuuguauucucuccug

SEQ ID NO: 1821580 - RNA, 20 nt, Human
uaccuuuuuuauacauaaac

SEQ ID NO: 1821581 - RNA, 19 nt, Human
uaccuuuuuuauacauaaa

SEQ ID NO: 1821582 - RNA, 18 nt, Human
uaccuuuuuuauacauaa

SEQ ID NO: 1821583 - RNA, 15 nt, Human
uacgacaacuugcac

SEQ ID NO: 1821584 - RNA, 14 nt, Human
uacgacaacuugca

SEQ ID NO: 1821585 - RNA, 22 nt, Human
uaccuuuuuuauacauaaacaa

SEQ ID NO: 1821586 - RNA, 18 nt, Human
uacuaaccagcagaaaug

SEQ ID NO: 1821587 - RNA, 17 nt, Human
uacuaaccagcagaaau

SEQ ID NO: 1821588 - RNA, 19 nt, Human
uacuaaccagcagaaaugc

SEQ ID NO: 1821589 - RNA, 17 nt, Human
uacuaauagacaauuua

SEQ ID NO: 1821590 - RNA, 15 nt, Human
uacuaauagacaauu

SEQ ID NO: 1821591 - RNA, 22 nt, Human
uacuaauaaaauuuaaaagucu

SEQ ID NO: 1821592 - RNA, 13 nt, Human
uacuaacuuuccu

SEQ ID NO: 1821593 - RNA, 12 nt, Human
uacuacaguccu

SEQ ID NO: 1821594 - RNA, 17 nt, Human
uacuacaguccucccau

SEQ ID NO: 1821595 - RNA, 21 nt, Human
uacauuuuguauauuuguauu

SEQ ID NO: 1821596 - RNA, 22 nt, Human
uacaugagguacugagagugaa

SEQ ID NO: 1821597 - RNA, 21 nt, Human
uacaugagguacugagaguga

SEQ ID NO: 1821598 - RNA, 22 nt, Human
uacauaagauaaaugugcugaa

SEQ ID NO: 1821599 - RNA, 23 nt, Human
uacaguuacucagaauucucuag

SEQ ID NO: 1821600 - RNA, 19 nt, Human
uacaguuacucagaauucu

SEQ ID NO: 1821601 - RNA, 18 nt, Human
uacaguuccuagguauaa

SEQ ID NO: 1821602 - RNA, 18 nt, Human
uacauaagauaaaugugc

SEQ ID NO: 1821603 - RNA, 19 nt, Human
uacauaagauaaaugugcu

SEQ ID NO: 1821604 - RNA, 23 nt, Human
uaccauuuugggguacccacugc

SEQ ID NO: 1821605 - RNA, 15 nt, Human
uaccaccacgcccgg

SEQ ID NO: 1821606 - RNA, 13 nt, Human
uaccacagacaua

SEQ ID NO: 1821607 - RNA, 18 nt, Human
uacccagcgagcccuggu

SEQ ID NO: 1821608 - RNA, 22 nt, Human
uacccaggugcuaggaacacuc

SEQ ID NO: 1821609 - RNA, 14 nt, Human
uacccacugcucug

SEQ ID NO: 1821610 - RNA, 13 nt, Human
uacccacugcucu

SEQ ID NO: 1821611 - RNA, 12 nt, Human
uacccacugcuc

SEQ ID NO: 1821612 - RNA, 11 nt, Human
uacccacugcu

SEQ ID NO: 1821613 - RNA, 12 nt, Human
uacccaccccca

SEQ ID NO: 1821614 - RNA, 15 nt, Human
uacccacccccaccc

SEQ ID NO: 1821615 - RNA, 23 nt, Human
uacccacccccacccaagggccu

SEQ ID NO: 1821616 - RNA, 17 nt, Human
uacccacccccacccaa

SEQ ID NO: 1821617 - RNA, 19 nt, Human
uacccacccccacccaagg

SEQ ID NO: 1821618 - RNA, 13 nt, Human
uacagaauuuuau

SEQ ID NO: 1821619 - RNA, 24 nt, Human
uacagcaaggagauuuacaacugg

SEQ ID NO: 1821620 - RNA, 13 nt, Human
uacacuuuaugca

SEQ ID NO: 1821621 - RNA, 19 nt, Human
uacacuguuucaaacuuua

SEQ ID NO: 1821622 - RNA, 18 nt, Human
uacacuguuucaaacuuu

SEQ ID NO: 1821623 - RNA, 17 nt, Human
uacacuguuucaaacuu

SEQ ID NO: 1821624 - RNA, 14 nt, Human
uacaggauuugaaa

SEQ ID NO: 1821625 - RNA, 16 nt, Human
uacaggcacccaccau

SEQ ID NO: 1821626 - RNA, 19 nt, Human
uacaggaaaagcugcugac

SEQ ID NO: 1821627 - RNA, 16 nt, Human
uacaguguacagucuu

SEQ ID NO: 1821628 - RNA, 15 nt, Human
uacaguguacagucu

SEQ ID NO: 1821629 - RNA, 22 nt, Human
uacaguguacagucuuguauua

SEQ ID NO: 1821630 - RNA, 13 nt, Human
uacaguguacagu

SEQ ID NO: 1821631 - RNA, 18 nt, Human
uacaggaaaagcugcuga

SEQ ID NO: 1821632 - RNA, 17 nt, Human
uacaggaaaagcugcug

SEQ ID NO: 1821633 - RNA, 23 nt, Human
uacagcuugaccgugaggccaga

SEQ ID NO: 1821634 - RNA, 22 nt, Human
uacagcuugaccgugaggccag

SEQ ID NO: 1821635 - RNA, 15 nt, Human
uacaagacacaguga

SEQ ID NO: 1821636 - RNA, 19 nt, Human
uacaagagcuuaacagugu

SEQ ID NO: 1821637 - RNA, 13 nt, Human
uaauuuugaaaaa

SEQ ID NO: 1821638 - RNA, 17 nt, Human
uaauuuugaaaaacugc

SEQ ID NO: 1821639 - RNA, 19 nt, Human
uaauuuuguaauguaucaa

SEQ ID NO: 1821640 - RNA, 12 nt, Human
uaauuuuguaau

SEQ ID NO: 1821641 - RNA, 22 nt, Human
uacacacugcauguuugugauu

SEQ ID NO: 1821642 - RNA, 14 nt, Human
uacacuguuucaaa

SEQ ID NO: 1821643 - RNA, 16 nt, Human
uacacugugcugaguc

SEQ ID NO: 1821644 - RNA, 15 nt, Human
uacacacacauacac

SEQ ID NO: 1821645 - RNA, 21 nt, Human
uacacacacacgcgugcacac

SEQ ID NO: 1821646 - RNA, 17 nt, Human
uacacacugcauguuug

SEQ ID NO: 1821647 - RNA, 17 nt, Human
uacacaaugguuuucuu

SEQ ID NO: 1821648 - RNA, 21 nt, Human
uacacaaugguuuucuugugu

SEQ ID NO: 1821649 - RNA, 23 nt, Human
uacacaaugguuuucuugugugu

SEQ ID NO: 1821650 - RNA, 20 nt, Human
uagcugggacuacaggcacc

SEQ ID NO: 1821651 - RNA, 12 nt, Human
uagcugggacua

SEQ ID NO: 1821652 - RNA, 18 nt, Human
uagcugggacuacaggug

SEQ ID NO: 1821653 - RNA, 22 nt, Human
uagcugggagaaagagagagcu

SEQ ID NO: 1821654 - RNA, 11 nt, Human
uagcugggacu

SEQ ID NO: 1821655 - RNA, 22 nt, Human
uagcucauucuccuuguguuac

SEQ ID NO: 1821656 - RNA, 17 nt, Human
uagccugccucuucucu

SEQ ID NO: 1821657 - RNA, 21 nt, Human
uagcucuaggagggcuggcaa

SEQ ID NO: 1821658 - RNA, 14 nt, Human
uagcccaaaaccaa

SEQ ID NO: 1821659 - RNA, 18 nt, Human
uagcccucacccuggggc

SEQ ID NO: 1821660 - RNA, 13 nt, Human
uagccccauaauu

SEQ ID NO: 1821661 - RNA, 15 nt, Human
uaggaagguuaaugu

SEQ ID NO: 1821662 - RNA, 14 nt, Human
uaggaauuguguuu

SEQ ID NO: 1821663 - RNA, 20 nt, Human
uaggaauugacccacaagaa

SEQ ID NO: 1821664 - RNA, 23 nt, Human
uaggaauugacccacaagaaaug

SEQ ID NO: 1821665 - RNA, 13 nt, Human
uaggccuggccag

SEQ ID NO: 1821666 - RNA, 14 nt, Human
uaggccuggccaga

SEQ ID NO: 1821667 - RNA, 19 nt, Human
uaggccucaggugaaacuc

SEQ ID NO: 1821668 - RNA, 17 nt, Human
uaggccguuccuucaaa

SEQ ID NO: 1821669 - RNA, 13 nt, Human
uaggccaugggac

SEQ ID NO: 1821670 - RNA, 17 nt, Human
uaggaacacuccuucac

SEQ ID NO: 1821671 - RNA, 21 nt, Human
uaggaacuuaaauaaugugaa

SEQ ID NO: 1821672 - RNA, 13 nt, Human
uaggaacacuccu

SEQ ID NO: 1821673 - RNA, 14 nt, Human
uaggaacacuccuu

SEQ ID NO: 1821674 - RNA, 13 nt, Human
uaggaagacuuug

SEQ ID NO: 1821675 - RNA, 14 nt, Human
uaggaagacuuugg

SEQ ID NO: 1821676 - RNA, 15 nt, Human
uaggaagacuuugga

SEQ ID NO: 1821677 - RNA, 16 nt, Human
uaggaagacuuuggaa

SEQ ID NO: 1821678 - RNA, 17 nt, Human
uaggaagacuuuggaaa

SEQ ID NO: 1821679 - RNA, 21 nt, Human
uagaaccucgagguuucucaa

SEQ ID NO: 1821680 - RNA, 12 nt, Human
uagaaccaggca

SEQ ID NO: 1821681 - RNA, 23 nt, Human
uagaaccaggcaacuugggaacu

SEQ ID NO: 1821682 - RNA, 16 nt, Human
uagagagagaccacuu

SEQ ID NO: 1821683 - RNA, 21 nt, Human
uagagguucaaagauauuuug

SEQ ID NO: 1821684 - RNA, 16 nt, Human
uagagguucaaagaua

SEQ ID NO: 1821685 - RNA, 19 nt, Human
uagagguucaaagauauuu

SEQ ID NO: 1821686 - RNA, 18 nt, Human
uagauaauacaccacuac

SEQ ID NO: 1821687 - RNA, 16 nt, Human
uagauguaauuuugug

SEQ ID NO: 1821688 - RNA, 12 nt, Human
uagauguauaua

SEQ ID NO: 1821689 - RNA, 23 nt, Human
uagcagagaaugaaagggcccag

SEQ ID NO: 1821690 - RNA, 19 nt, Human
uagcagagaaugaaagggc

SEQ ID NO: 1821691 - RNA, 16 nt, Human
uagcacuuugggaggc

SEQ ID NO: 1821692 - RNA, 20 nt, Human
uauaugcucugcauguuaca

SEQ ID NO: 1821693 - RNA, 13 nt, Human
uauauuuuaagac

SEQ ID NO: 1821694 - RNA, 14 nt, Human
uauauuuuaagacg

SEQ ID NO: 1821695 - RNA, 19 nt, Human
uaucgucacugcuuaacuu

SEQ ID NO: 1821696 - RNA, 15 nt, Human
uaucuaaauguugaa

SEQ ID NO: 1821697 - RNA, 21 nt, Human
uaucaugucaaacgugaaaau

SEQ ID NO: 1821698 - RNA, 17 nt, Human
uaucaugugaaaucauu

SEQ ID NO: 1821699 - RNA, 22 nt, Human
uaucaugugaaaucauucauuu

SEQ ID NO: 1821700 - RNA, 22 nt, Human
uauccugcuucugauaugcagu

SEQ ID NO: 1821701 - RNA, 16 nt, Human
uaucaugacaaagacu

SEQ ID NO: 1821702 - RNA, 16 nt, Human
uaucaugucaaacgug

SEQ ID NO: 1821703 - RNA, 17 nt, Human
uaucaugacaaagacug

SEQ ID NO: 1821704 - RNA, 17 nt, Human
uaucaggugcugccauc

SEQ ID NO: 1821705 - RNA, 19 nt, Human
uauauuuuuuguuaaauga

SEQ ID NO: 1821706 - RNA, 18 nt, Human
uaguggauggaaggggcu

SEQ ID NO: 1821707 - RNA, 15 nt, Human
uaguggauggaaggg

SEQ ID NO: 1821708 - RNA, 15 nt, Human
uaguggauguucuga

SEQ ID NO: 1821709 - RNA, 13 nt, Human
uaguuucuccaag

SEQ ID NO: 1821710 - RNA, 23 nt, Human
uaguuugauuaaauucuugcaaa

SEQ ID NO: 1821711 - RNA, 12 nt, Human
uaguuugcaguu

SEQ ID NO: 1821712 - RNA, 21 nt, Human
uaguuguaccgcaaugugacu

SEQ ID NO: 1821713 - RNA, 13 nt, Human
uagugaugguucc

SEQ ID NO: 1821714 - RNA, 14 nt, Human
uagugaugguuccc

SEQ ID NO: 1821715 - RNA, 18 nt, Human
uagugaugguuccccugu

SEQ ID NO: 1821716 - RNA, 20 nt, Human
uauacucuuauagacaacau

SEQ ID NO: 1821717 - RNA, 17 nt, Human
uauacccccugcaaagc

SEQ ID NO: 1821718 - RNA, 14 nt, Human
uauaauguaagcuc

SEQ ID NO: 1821719 - RNA, 19 nt, Human
uauaauguaagcucuacug

SEQ ID NO: 1821720 - RNA, 20 nt, Human
uauaauguaagcucuacuga

SEQ ID NO: 1821721 - RNA, 20 nt, Human
uauaauucacauuguauuca

SEQ ID NO: 1821722 - RNA, 17 nt, Human
uauaauucuacuuugag

SEQ ID NO: 1821723 - RNA, 20 nt, Human
uauaaugaaugaaacauuuu

SEQ ID NO: 1821724 - RNA, 18 nt, Human
uauaaugaaugaaacauu

SEQ ID NO: 1821725 - RNA, 21 nt, Human
uauaaauuuuuuuuguuucau

SEQ ID NO: 1821726 - RNA, 17 nt, Human
uauaaauuuuuuuuguu

SEQ ID NO: 1821727 - RNA, 19 nt, Human
ggcaacccccagccugcua

SEQ ID NO: 1821728 - RNA, 21 nt, Human
ggaucagucugauucccaagc

SEQ ID NO: 1821729 - RNA, 18 nt, Human
ggcaacugcauuggcuuu

SEQ ID NO: 1821730 - RNA, 18 nt, Human
ggcaacuugggaacuaga

SEQ ID NO: 1821731 - RNA, 23 nt, Human
ggcaacuugggaacuagacuccc

SEQ ID NO: 1821732 - RNA, 15 nt, Human
ggcaaggcugucaau

SEQ ID NO: 1821733 - RNA, 19 nt, Human
ggcaacugcauuggcuuug

SEQ ID NO: 1821734 - RNA, 20 nt, Human
ggcagagcagagaccauccc

SEQ ID NO: 1821735 - RNA, 15 nt, Human
ggcagagcagagacc

SEQ ID NO: 1821736 - RNA, 16 nt, Human
ggcagagcagagacca

SEQ ID NO: 1821737 - RNA, 16 nt, Human
ggcacccggccccugc

SEQ ID NO: 1821738 - RNA, 15 nt, Human
ggcacccggccccug

SEQ ID NO: 1821739 - RNA, 17 nt, Human
ggcacccggccccugcu

SEQ ID NO: 1821740 - RNA, 16 nt, Human
ggcaaggcugucaauu

SEQ ID NO: 1821741 - RNA, 23 nt, Human
ggcagauacaggaaaagcugcug

SEQ ID NO: 1821742 - RNA, 23 nt, Human
ggcagaguugaagacagagcuac

SEQ ID NO: 1821743 - RNA, 17 nt, Human
ggcagaggaaagcaaag

SEQ ID NO: 1821744 - RNA, 13 nt, Human
ggcagguccaggg

SEQ ID NO: 1821745 - RNA, 14 nt, Human
ggcaggaaggcuga

SEQ ID NO: 1821746 - RNA, 23 nt, Human
ggcaggucuugaacuccuggccu

SEQ ID NO: 1821747 - RNA, 19 nt, Human
ggcagcugcgguccaccca

SEQ ID NO: 1821748 - RNA, 21 nt, Human
ggcagcuugaggguugggcug

SEQ ID NO: 1821749 - RNA, 22 nt, Human
ggcagcucaccucucccuugga

SEQ ID NO: 1821750 - RNA, 18 nt, Human
ggcagcucaccucucccu

SEQ ID NO: 1821751 - RNA, 21 nt, Human
ggcagcucaccucucccuugg

SEQ ID NO: 1821752 - RNA, 23 nt, Human
ggcauguucucugaggacacuaa

SEQ ID NO: 1821753 - RNA, 15 nt, Human
ggcagguuggugggg

SEQ ID NO: 1821754 - RNA, 16 nt, Human
ggccaccugcggugcu

SEQ ID NO: 1821755 - RNA, 22 nt, Human
ggccaccugcggugcuaucucc

SEQ ID NO: 1821756 - RNA, 12 nt, Human
ggccaaguucuu

SEQ ID NO: 1821757 - RNA, 15 nt, Human
ggcauuccccaggag

SEQ ID NO: 1821758 - RNA, 16 nt, Human
ggccacaagacccuug

SEQ ID NO: 1821759 - RNA, 17 nt, Human
ggccacaagacccuugu

SEQ ID NO: 1821760 - RNA, 11 nt, Human
ggccaggcugg

SEQ ID NO: 1821761 - RNA, 18 nt, Human
ggccaggcugggucgccc

SEQ ID NO: 1821762 - RNA, 22 nt, Human
ggccaggcugggucgcccugga

SEQ ID NO: 1821763 - RNA, 16 nt, Human
ggccaggccagaggga

SEQ ID NO: 1821764 - RNA, 14 nt, Human
ggccaggccagagg

SEQ ID NO: 1821765 - RNA, 16 nt, Human
ggccaggagccuccug

SEQ ID NO: 1821766 - RNA, 16 nt, Human
ggccacugugaagaga

SEQ ID NO: 1821767 - RNA, 14 nt, Human
ggccaggagccucc

SEQ ID NO: 1821768 - RNA, 11 nt, Human
ggccacuguga

SEQ ID NO: 1821769 - RNA, 13 nt, Human
ggccaugggccuc

SEQ ID NO: 1821770 - RNA, 22 nt, Human
ggccaugggacagggaggacgc

SEQ ID NO: 1821771 - RNA, 12 nt, Human
ggccaggcuggu

SEQ ID NO: 1821772 - RNA, 12 nt, Human
ggccccugccac

SEQ ID NO: 1821773 - RNA, 16 nt, Human
ggccccugccacccug

SEQ ID NO: 1821774 - RNA, 13 nt, Human
ggccccugccacc

SEQ ID NO: 1821775 - RNA, 13 nt, Human
ggccccugcccgg

SEQ ID NO: 1821776 - RNA, 18 nt, Human
ggccccugccacccuggg

SEQ ID NO: 1821777 - RNA, 17 nt, Human
ggccccugccacccugg

SEQ ID NO: 1821778 - RNA, 16 nt, Human
ggccccucaggguccc

SEQ ID NO: 1821779 - RNA, 19 nt, Human
ggccccucagggucccugg

SEQ ID NO: 1821780 - RNA, 20 nt, Human
ggccccucagggucccuggu

SEQ ID NO: 1821781 - RNA, 21 nt, Human
ggccccucagggucccuggug

SEQ ID NO: 1821782 - RNA, 15 nt, Human
ggaggauguucuggg

SEQ ID NO: 1821783 - RNA, 23 nt, Human
ggaggaucacuugaguccagaag

SEQ ID NO: 1821784 - RNA, 17 nt, Human
ggaggaucucuugagcc

SEQ ID NO: 1821785 - RNA, 21 nt, Human
ggaggaucucuugagccuggg

SEQ ID NO: 1821786 - RNA, 12 nt, Human
ggagggcuccag

SEQ ID NO: 1821787 - RNA, 13 nt, Human
ggagggcuccaga

SEQ ID NO: 1821788 - RNA, 12 nt, Human
ggagggagggcu

SEQ ID NO: 1821789 - RNA, 19 nt, Human
ggaggacgcucucuggccu

SEQ ID NO: 1821790 - RNA, 21 nt, Human
ggaggacgcucucuggccuuc

SEQ ID NO: 1821791 - RNA, 20 nt, Human
ggaggacgcucucuggccuu

SEQ ID NO: 1821792 - RNA, 14 nt, Human
ggagugagcugguu

SEQ ID NO: 1821793 - RNA, 21 nt, Human
ggagugaguugauagcacaga

SEQ ID NO: 1821794 - RNA, 12 nt, Human
ggagugagcugg

SEQ ID NO: 1821795 - RNA, 21 nt, Human
ggagugacagaggcagcccca

SEQ ID NO: 1821796 - RNA, 19 nt, Human
ggagugacagaggcagccc

SEQ ID NO: 1821797 - RNA, 18 nt, Human
ggagugacagaggcagcc

SEQ ID NO: 1821798 - RNA, 17 nt, Human
ggagugacagaggcagc

SEQ ID NO: 1821799 - RNA, 16 nt, Human
ggaucacagccucuga

SEQ ID NO: 1821800 - RNA, 23 nt, Human
ggagugaguugauagcacagacc

SEQ ID NO: 1821801 - RNA, 17 nt, Human
ggagggcuccagacaca

SEQ ID NO: 1821802 - RNA, 14 nt, Human
ggagggcuccagac

SEQ ID NO: 1821803 - RNA, 15 nt, Human
ggagggcuccagaca

SEQ ID NO: 1821804 - RNA, 21 nt, Human
ggagucccaccuuggcugcag

SEQ ID NO: 1821805 - RNA, 20 nt, Human
ggagucccaccuuggcugca

SEQ ID NO: 1821806 - RNA, 16 nt, Human
ggagugacagaggcag

SEQ ID NO: 1821807 - RNA, 11 nt, Human
ggagugacaga

SEQ ID NO: 1821808 - RNA, 20 nt, Human
ggaagccagcaggcucucag

SEQ ID NO: 1821809 - RNA, 15 nt, Human
ggacuccucugucca

SEQ ID NO: 1821810 - RNA, 14 nt, Human
ggacuccucugucc

SEQ ID NO: 1821811 - RNA, 12 nt, Human
ggacuccucugu

SEQ ID NO: 1821812 - RNA, 13 nt, Human
ggacucuaaaguc

SEQ ID NO: 1821813 - RNA, 11 nt, Human
ggacucugccu

SEQ ID NO: 1821814 - RNA, 17 nt, Human
ggagagcuagcagcagg

SEQ ID NO: 1821815 - RNA, 21 nt, Human
ggagagcuagcagcagggagg

SEQ ID NO: 1821816 - RNA, 21 nt, Human
ggagaccccuuggggagcagg

SEQ ID NO: 1821817 - RNA, 21 nt, Human
ggacugccagucccccugccc

SEQ ID NO: 1821818 - RNA, 15 nt, Human
ggagaggggcacagg

SEQ ID NO: 1821819 - RNA, 20 nt, Human
ggagauuuacaacuggggga

SEQ ID NO: 1821820 - RNA, 13 nt, Human
ggagcccugggag

SEQ ID NO: 1821821 - RNA, 12 nt, Human
ggagcccuggga

SEQ ID NO: 1821822 - RNA, 20 nt, Human
ggagcaaaaucgaugcagug

SEQ ID NO: 1821823 - RNA, 23 nt, Human
ggaacuagacucccaagcuggac

SEQ ID NO: 1821824 - RNA, 20 nt, Human
ggaacagacuggaagcacag

SEQ ID NO: 1821825 - RNA, 19 nt, Human
ggaacagacuggaagcaca

SEQ ID NO: 1821826 - RNA, 15 nt, Human
ggaaaaucagccugc

SEQ ID NO: 1821827 - RNA, 14 nt, Human
ggaaaauaaauuau

SEQ ID NO: 1821828 - RNA, 17 nt, Human
ggaacagacuggaagca

SEQ ID NO: 1821829 - RNA, 17 nt, Human
ggaagcacagcuucauu

SEQ ID NO: 1821830 - RNA, 13 nt, Human
ggaagcacaugcc

SEQ ID NO: 1821831 - RNA, 14 nt, Human
ggaagcacaugccu

SEQ ID NO: 1821832 - RNA, 15 nt, Human
ggaagcacaugccuc

SEQ ID NO: 1821833 - RNA, 17 nt, Human
ggaagcacaugccucuc

SEQ ID NO: 1821834 - RNA, 13 nt, Human
ggaagagccuugc

SEQ ID NO: 1821835 - RNA, 13 nt, Human
ggaagcagcuuuc

SEQ ID NO: 1821836 - RNA, 23 nt, Human
ggaagcacaugccucucucaggc

SEQ ID NO: 1821837 - RNA, 21 nt, Human
ggaagcacaugccucucucag

SEQ ID NO: 1821838 - RNA, 22 nt, Human
ggaagcacaugccucucucagg

SEQ ID NO: 1821839 - RNA, 15 nt, Human
ggaagccagcaggcu

SEQ ID NO: 1821840 - RNA, 16 nt, Human
ggaagccagcaggcuc

SEQ ID NO: 1821841 - RNA, 17 nt, Human
ggaagccagcaggcucu

SEQ ID NO: 1821842 - RNA, 18 nt, Human
ggaagccagcaggcucuc

SEQ ID NO: 1821843 - RNA, 13 nt, Human
ggaagccagcagg

SEQ ID NO: 1821844 - RNA, 14 nt, Human
ggaagccagcaggc

SEQ ID NO: 1821845 - RNA, 20 nt, Human
ggaaaaaauaacaaugaaag

SEQ ID NO: 1821846 - RNA, 14 nt, Human
gcuuuuacuuaaac

SEQ ID NO: 1821847 - RNA, 15 nt, Human
gcuuugggcugcccu

SEQ ID NO: 1821848 - RNA, 16 nt, Human
gcuuugggcugcccug

SEQ ID NO: 1821849 - RNA, 22 nt, Human
ggaaaaccaagccguggcuucc

SEQ ID NO: 1821850 - RNA, 15 nt, Human
ggaaaaauagccugc

SEQ ID NO: 1821851 - RNA, 13 nt, Human
ggaaaaauagccu

SEQ ID NO: 1821852 - RNA, 19 nt, Human
ggaaaaaccacccccaaau

SEQ ID NO: 1821853 - RNA, 14 nt, Human
ggaaaaacugauuu

SEQ ID NO: 1821854 - RNA, 14 nt, Human
gcuuugggcugccc

SEQ ID NO: 1821855 - RNA, 22 nt, Human
gcuugcagagaugaggccgcca

SEQ ID NO: 1821856 - RNA, 16 nt, Human
gcuucuguugcugccu

SEQ ID NO: 1821857 - RNA, 14 nt, Human
gcuuggaggaagga

SEQ ID NO: 1821858 - RNA, 15 nt, Human
gcuuggaggaaggaa

SEQ ID NO: 1821859 - RNA, 13 nt, Human
gcuuggaggaagg

SEQ ID NO: 1821860 - RNA, 19 nt, Human
gcuugcccuggugccucac

SEQ ID NO: 1821861 - RNA, 17 nt, Human
gcuugcccuggugccuc

SEQ ID NO: 1821862 - RNA, 17 nt, Human
gcuucucacugccaugc

SEQ ID NO: 1821863 - RNA, 21 nt, Human
gcuuccagugaggcucugccc

SEQ ID NO: 1821864 - RNA, 19 nt, Human
gcuuccagugaggcucugc

SEQ ID NO: 1821865 - RNA, 20 nt, Human
gcuuccagugaggcucugcc

SEQ ID NO: 1821866 - RNA, 13 nt, Human
gcuguucagcugg

SEQ ID NO: 1821867 - RNA, 20 nt, Human
gcuggucccacucaguccau

SEQ ID NO: 1821868 - RNA, 18 nt, Human
gcuggugucaccugaaga

SEQ ID NO: 1821869 - RNA, 16 nt, Human
gcuggugucaccugaa

SEQ ID NO: 1821870 - RNA, 22 nt, Human
gcugguucaggguuggccccug

SEQ ID NO: 1821871 - RNA, 14 nt, Human
gcugucaaggcuca

SEQ ID NO: 1821872 - RNA, 16 nt, Human
gcugucaauuacagga

SEQ ID NO: 1821873 - RNA, 15 nt, Human
gcugguucaggguug

SEQ ID NO: 1821874 - RNA, 21 nt, Human
gcugguuagagguucccuuug

SEQ ID NO: 1821875 - RNA, 23 nt, Human
gcugucuguuguauucauugugg

SEQ ID NO: 1821876 - RNA, 17 nt, Human
gcugucuccauguuuga

SEQ ID NO: 1821877 - RNA, 19 nt, Human
gcugucccuuacgugaguc

SEQ ID NO: 1821878 - RNA, 22 nt, Human
gcugucccuuacgugaguccug

SEQ ID NO: 1821879 - RNA, 21 nt, Human
gcugucccuuacgugaguccu

SEQ ID NO: 1821880 - RNA, 17 nt, Human
gcugucaauuacaggaa

SEQ ID NO: 1821881 - RNA, 19 nt, Human
gcugucaauuacaggaagu

SEQ ID NO: 1821882 - RNA, 22 nt, Human
gcugucaauuacaggaaguacu

SEQ ID NO: 1821883 - RNA, 23 nt, Human
gcugucaauuacaggaaguacug

SEQ ID NO: 1821884 - RNA, 17 nt, Human
gcugggcuucaguggca

SEQ ID NO: 1821885 - RNA, 21 nt, Human
gcugggauuacaggcuccugc

SEQ ID NO: 1821886 - RNA, 17 nt, Human
gcugggauuacaggcgu

SEQ ID NO: 1821887 - RNA, 18 nt, Human
gcugggauuacaggcgug

SEQ ID NO: 1821888 - RNA, 19 nt, Human
gcugggauuacaggcuccu

SEQ ID NO: 1821889 - RNA, 20 nt, Human
gcugggauuacaggcuccug

SEQ ID NO: 1821890 - RNA, 16 nt, Human
gcugggagcucugcag

SEQ ID NO: 1821891 - RNA, 15 nt, Human
gcugggagcucugca

SEQ ID NO: 1821892 - RNA, 21 nt, Human
gcugggaugauuggagggggg

SEQ ID NO: 1821893 - RNA, 19 nt, Human
gcugggagagccuuccagg

SEQ ID NO: 1821894 - RNA, 22 nt, Human
gcugggagagccuuccaggggu

SEQ ID NO: 1821895 - RNA, 12 nt, Human
gcugggagagcc

SEQ ID NO: 1821896 - RNA, 13 nt, Human
gcugggagagccu

SEQ ID NO: 1821897 - RNA, 17 nt, Human
gcugggagagccuucca

SEQ ID NO: 1821898 - RNA, 18 nt, Human
gcugggagagccuuccag

SEQ ID NO: 1821899 - RNA, 20 nt, Human
gcugggggccucagugccac

SEQ ID NO: 1821900 - RNA, 19 nt, Human
gcugggggccucagugcca

SEQ ID NO: 1821901 - RNA, 19 nt, Human
gcuggucccacucagucca

SEQ ID NO: 1821902 - RNA, 15 nt, Human
gcuggucccacucag

SEQ ID NO: 1821903 - RNA, 13 nt, Human
gcugggggccuca

SEQ ID NO: 1821904 - RNA, 19 nt, Human
gcugggcuucaguggcagc

SEQ ID NO: 1821905 - RNA, 18 nt, Human
gcugggcuucaguggcag

SEQ ID NO: 1821906 - RNA, 16 nt, Human
gcuggggccaggcugg

SEQ ID NO: 1821907 - RNA, 19 nt, Human
gcuggggccaggcuggguc

SEQ ID NO: 1821908 - RNA, 12 nt, Human
gcuggggccagu

SEQ ID NO: 1821909 - RNA, 23 nt, Human
gcugggggaagaagcucucuccu

SEQ ID NO: 1821910 - RNA, 17 nt, Human
gcugcccuuucugggca

SEQ ID NO: 1821911 - RNA, 23 nt, Human
gcugcccuggugcugccacacuu

SEQ ID NO: 1821912 - RNA, 12 nt, Human
gcugcccuguga

SEQ ID NO: 1821913 - RNA, 14 nt, Human
gcugcccugugagu

SEQ ID NO: 1821914 - RNA, 20 nt, Human
gcugcccuggugcugccaca

SEQ ID NO: 1821915 - RNA, 22 nt, Human
gcugcccuggugcugccacacu

SEQ ID NO: 1821916 - RNA, 11 nt, Human
gcugcccugug

SEQ ID NO: 1821917 - RNA, 18 nt, Human
gcugcccuggugcugcca

SEQ ID NO: 1821918 - RNA, 19 nt, Human
gcugcccuggugcugccac

SEQ ID NO: 1821919 - RNA, 22 nt, Human
gcuagcagcagggagggcuucu

SEQ ID NO: 1821920 - RNA, 18 nt, Human
gcugcgguccacccagga

SEQ ID NO: 1821921 - RNA, 17 nt, Human
gcugcgguccacccagg

SEQ ID NO: 1821922 - RNA, 19 nt, Human
gcugcgguccacccaggag

SEQ ID NO: 1821923 - RNA, 13 nt, Human
gcugcuucaagga

SEQ ID NO: 1821924 - RNA, 23 nt, Human
gcugcuucaaggauccugagcca

SEQ ID NO: 1821925 - RNA, 21 nt, Human
gcugcuucaaggauccugagc

SEQ ID NO: 1821926 - RNA, 22 nt, Human
gcugcuucaaggauccugagcc

SEQ ID NO: 1821927 - RNA, 16 nt, Human
gcugcuugggcuucau

SEQ ID NO: 1821928 - RNA, 22 nt, Human
gcuggaccuugaacuggguacu

SEQ ID NO: 1821929 - RNA, 21 nt, Human
gcuggaccuugaacuggguac

SEQ ID NO: 1821930 - RNA, 18 nt, Human
gcuggaccuugaacuggg

SEQ ID NO: 1821931 - RNA, 17 nt, Human
gcugcuugggcuucauc

SEQ ID NO: 1821932 - RNA, 22 nt, Human
gcugcuugggcuucauccuccu

SEQ ID NO: 1821933 - RNA, 16 nt, Human
gcuggauuacaggcau

SEQ ID NO: 1821934 - RNA, 20 nt, Human
gcugggacuacaggcaccca

SEQ ID NO: 1821935 - RNA, 19 nt, Human
gcugggacuacaggcaccc

SEQ ID NO: 1821936 - RNA, 18 nt, Human
gcugggacuacaggcacc

SEQ ID NO: 1821937 - RNA, 13 nt, Human
gcugggacuacag

SEQ ID NO: 1821938 - RNA, 19 nt, Human
gcugggacuacagguguga

SEQ ID NO: 1821939 - RNA, 12 nt, Human
gcuggcccugcc

SEQ ID NO: 1821940 - RNA, 13 nt, Human
gcuggccgggacc

SEQ ID NO: 1821941 - RNA, 13 nt, Human
gcuggcccugccc

SEQ ID NO: 1821942 - RNA, 17 nt, Human
gcuggccgggagccuga

SEQ ID NO: 1821943 - RNA, 20 nt, Human
gcugggacaugggaaagggg

SEQ ID NO: 1821944 - RNA, 16 nt, Human
gggacucaaugcacug

SEQ ID NO: 1821945 - RNA, 17 nt, Human
gggacuacaggcaccca

SEQ ID NO: 1821946 - RNA, 12 nt, Human
gggaccucaggc

SEQ ID NO: 1821947 - RNA, 13 nt, Human
gggaccucaggcc

SEQ ID NO: 1821948 - RNA, 15 nt, Human
gggaccucaggccug

SEQ ID NO: 1821949 - RNA, 23 nt, Human
gggacaaggacuaggguccuggg

SEQ ID NO: 1821950 - RNA, 17 nt, Human
gggaauuucuucaacuc

SEQ ID NO: 1821951 - RNA, 18 nt, Human
gggaccccgagccuggcu

SEQ ID NO: 1821952 - RNA, 20 nt, Human
gggaccccgagccuggcucc

SEQ ID NO: 1821953 - RNA, 14 nt, Human
gggaccccugagcu

SEQ ID NO: 1821954 - RNA, 22 nt, Human
gggaaggcagggagggccuggg

SEQ ID NO: 1821955 - RNA, 23 nt, Human
gggaaggauacaaaagcauguga

SEQ ID NO: 1821956 - RNA, 21 nt, Human
gggaaggauacaaaagcaugu

SEQ ID NO: 1821957 - RNA, 14 nt, Human
ggcuuuugugcauu

SEQ ID NO: 1821958 - RNA, 17 nt, Human
gggaagggggcugggac

SEQ ID NO: 1821959 - RNA, 14 nt, Human
gggaagggggcugg

SEQ ID NO: 1821960 - RNA, 16 nt, Human
gggaagggggcuggga

SEQ ID NO: 1821961 - RNA, 22 nt, Human
ggcuugaguuuaaauuguaaua

SEQ ID NO: 1821962 - RNA, 21 nt, Human
ggcuuggggaccagagcugcc

SEQ ID NO: 1821963 - RNA, 19 nt, Human
ggcuuuucacugcuggcug

SEQ ID NO: 1821964 - RNA, 22 nt, Human
ggcuuuucacugcuggcugccu

SEQ ID NO: 1821965 - RNA, 10 nt, Human
ggcuuuugug

SEQ ID NO: 1821966 - RNA, 14 nt, Human
ggcuuuucacugcu

SEQ ID NO: 1821967 - RNA, 15 nt, Human
ggcuuuucacugcug

SEQ ID NO: 1821968 - RNA, 17 nt, Human
ggcuuuucacugcuggc

SEQ ID NO: 1821969 - RNA, 12 nt, Human
ggcugggcuuca

SEQ ID NO: 1821970 - RNA, 18 nt, Human
ggcugggcucccuuccca

SEQ ID NO: 1821971 - RNA, 17 nt, Human
ggcugggcucccuuccc

SEQ ID NO: 1821972 - RNA, 17 nt, Human
ggcugggcuucaguggc

SEQ ID NO: 1821973 - RNA, 13 nt, Human
ggcugggcuucag

SEQ ID NO: 1821974 - RNA, 18 nt, Human
ggcugggcuucaguggca

SEQ ID NO: 1821975 - RNA, 21 nt, Human
ggcuuagucacugagacagcc

SEQ ID NO: 1821976 - RNA, 18 nt, Human
ggcugcaaaggguaucag

SEQ ID NO: 1821977 - RNA, 23 nt, Human
ggcugcaaaggguaucaggugcu

SEQ ID NO: 1821978 - RNA, 22 nt, Human
ggcugcaaaggguaucaggugc

SEQ ID NO: 1821979 - RNA, 24 nt, Human
ggcugcaaaggguaucaggugcug

SEQ ID NO: 1821980 - RNA, 17 nt, Human
ggcugcaccggcuggcc

SEQ ID NO: 1821981 - RNA, 18 nt, Human
ggcugcaccggcuggccu

SEQ ID NO: 1821982 - RNA, 19 nt, Human
ggcugcaccggcuggccug

SEQ ID NO: 1821983 - RNA, 13 nt, Human
ggcugagguggga

SEQ ID NO: 1821984 - RNA, 15 nt, Human
ggcugaggugggagg

SEQ ID NO: 1821985 - RNA, 17 nt, Human
ggccccugcccggcugc

SEQ ID NO: 1821986 - RNA, 16 nt, Human
ggccccugcccggcug

SEQ ID NO: 1821987 - RNA, 20 nt, Human
ggccccugcccggcugcgga

SEQ ID NO: 1821988 - RNA, 17 nt, Human
ggcucugccucccauca

SEQ ID NO: 1821989 - RNA, 13 nt, Human
ggcucuggagccc

SEQ ID NO: 1821990 - RNA, 14 nt, Human
ggcucuggagccca

SEQ ID NO: 1821991 - RNA, 13 nt, Human
ggcugcagggagu

SEQ ID NO: 1821992 - RNA, 14 nt, Human
ggcugcugaaggcu

SEQ ID NO: 1821993 - RNA, 12 nt, Human
ggcugcagggag

SEQ ID NO: 1821994 - RNA, 18 nt, Human
ggcugcugaaggcucgag

SEQ ID NO: 1821995 - RNA, 15 nt, Human
ggcugcugaaggcuc

SEQ ID NO: 1821996 - RNA, 17 nt, Human
ggcugcugaaggcucga

SEQ ID NO: 1821997 - RNA, 11 nt, Human
ggcugcuucaa

SEQ ID NO: 1821998 - RNA, 12 nt, Human
ggcugcuucaag

SEQ ID NO: 1821999 - RNA, 14 nt, Human
ggcugcuucaagga

SEQ ID NO: 1822000 - RNA, 22 nt, Human
ggcugcuucaaggauccugagc

SEQ ID NO: 1822001 - RNA, 15 nt, Human
ggcugggcagaggaa

SEQ ID NO: 1822002 - RNA, 19 nt, Human
ggcugggcagaggaaagca

SEQ ID NO: 1822003 - RNA, 13 nt, Human
ggcugggcagagg

SEQ ID NO: 1822004 - RNA, 14 nt, Human
ggcugggcagagga

SEQ ID NO: 1822005 - RNA, 20 nt, Human
ggcugggagagccuuccagg

SEQ ID NO: 1822006 - RNA, 23 nt, Human
ggcugggagagccuuccaggggu

SEQ ID NO: 1822007 - RNA, 19 nt, Human
ggcugggagagccuuccag

SEQ ID NO: 1822008 - RNA, 23 nt, Human
ggcugcuucaaggauccugagcc

SEQ ID NO: 1822009 - RNA, 23 nt, Human
gggcacaccgggcacucagaaga

SEQ ID NO: 1822010 - RNA, 18 nt, Human
gggcacagaaaauggaag

SEQ ID NO: 1822011 - RNA, 20 nt, Human
gggcacagaaaauggaagac

SEQ ID NO: 1822012 - RNA, 21 nt, Human
gggcacagaaaauggaagaca

SEQ ID NO: 1822013 - RNA, 19 nt, Human
gggcacucagaagacacug

SEQ ID NO: 1822014 - RNA, 16 nt, Human
gggcacucagaagaca

SEQ ID NO: 1822015 - RNA, 14 nt, Human
gggcaccggggccu

SEQ ID NO: 1822016 - RNA, 13 nt, Human
gggcacagggucu

SEQ ID NO: 1822017 - RNA, 16 nt, Human
gggcacagggucucua

SEQ ID NO: 1822018 - RNA, 20 nt, Human
gggcacucagaagacacuga

SEQ ID NO: 1822019 - RNA, 13 nt, Human
gggcacugguggc

SEQ ID NO: 1822020 - RNA, 16 nt, Human
gggcacugguggcccg

SEQ ID NO: 1822021 - RNA, 14 nt, Human
gggcagaaggaaga

SEQ ID NO: 1822022 - RNA, 18 nt, Human
gggcagaaggaagacuuc

SEQ ID NO: 1822023 - RNA, 11 nt, Human
gggcagagcag

SEQ ID NO: 1822024 - RNA, 12 nt, Human
gggcagagcaga

SEQ ID NO: 1822025 - RNA, 17 nt, Human
gggcagguugguggggg

SEQ ID NO: 1822026 - RNA, 14 nt, Human
gggagugagcuggu

SEQ ID NO: 1822027 - RNA, 11 nt, Human
gggagugagcu

SEQ ID NO: 1822028 - RNA, 18 nt, Human
gggagugacagaggcagc

SEQ ID NO: 1822029 - RNA, 16 nt, Human
gggaggugaccccagg

SEQ ID NO: 1822030 - RNA, 17 nt, Human
gggaggugggauccucc

SEQ ID NO: 1822031 - RNA, 13 nt, Human
gggacugagaaau

SEQ ID NO: 1822032 - RNA, 13 nt, Human
gggauagagagag

SEQ ID NO: 1822033 - RNA, 21 nt, Human
gggauaugauuuaaaucagcc

SEQ ID NO: 1822034 - RNA, 15 nt, Human
gggauccuccaggug

SEQ ID NO: 1822035 - RNA, 16 nt, Human
gggauccuccaggugc

SEQ ID NO: 1822036 - RNA, 23 nt, Human
gggauccuggaguucugguuccu

SEQ ID NO: 1822037 - RNA, 18 nt, Human
gggcaacccuggugacca

SEQ ID NO: 1822038 - RNA, 20 nt, Human
gggcaacccccagccugcua

SEQ ID NO: 1822039 - RNA, 17 nt, Human
gggcccagagagggugg

SEQ ID NO: 1822040 - RNA, 16 nt, Human
gggccacagagaaagu

SEQ ID NO: 1822041 - RNA, 23 nt, Human
gggccacagagaaaguacuucuc

SEQ ID NO: 1822042 - RNA, 12 nt, Human
gggcaugacacg

SEQ ID NO: 1822043 - RNA, 15 nt, Human
gggcauggccaggug

SEQ ID NO: 1822044 - RNA, 17 nt, Human
gggcauggccagguggc

SEQ ID NO: 1822045 - RNA, 20 nt, Human
gggcauggccagguggccac

SEQ ID NO: 1822046 - RNA, 19 nt, Human
gggccuggccugagcuggg

SEQ ID NO: 1822047 - RNA, 14 nt, Human
gggccuggccugag

SEQ ID NO: 1822048 - RNA, 18 nt, Human
gggccuggccugagcugg

SEQ ID NO: 1822049 - RNA, 17 nt, Human
gggccuggcucaggugg

SEQ ID NO: 1822050 - RNA, 13 nt, Human
gggccuggcuccc

SEQ ID NO: 1822051 - RNA, 22 nt, Human
gggccccugccucucugcaggu

SEQ ID NO: 1822052 - RNA, 13 nt, Human
gggcccugccucc

SEQ ID NO: 1822053 - RNA, 13 nt, Human
gggccuggccuga

SEQ ID NO: 1822054 - RNA, 14 nt, Human
gggccccagaggcu

SEQ ID NO: 1822055 - RNA, 13 nt, Human
gggccccugccuc

SEQ ID NO: 1822056 - RNA, 15 nt, Human
gggccccugccucuc

SEQ ID NO: 1822057 - RNA, 17 nt, Human
gggccccugccucucug

SEQ ID NO: 1822058 - RNA, 18 nt, Human
gggccccugccucucugc

SEQ ID NO: 1822059 - RNA, 19 nt, Human
gggccccugccucucugca

SEQ ID NO: 1822060 - RNA, 21 nt, Human
gggccccugccucucugcagg

SEQ ID NO: 1822061 - RNA, 14 nt, Human
gggucucacucugu

SEQ ID NO: 1822062 - RNA, 17 nt, Human
ggguaagugagagaggg

SEQ ID NO: 1822063 - RNA, 21 nt, Human
gggucugaggaauccagaccc

SEQ ID NO: 1822064 - RNA, 12 nt, Human
gggucugaggaa

SEQ ID NO: 1822065 - RNA, 12 nt, Human
gggguggccucc

SEQ ID NO: 1822066 - RNA, 18 nt, Human
ggggugcugggccccugc

SEQ ID NO: 1822067 - RNA, 20 nt, Human
gggguggggggggugcuggg

SEQ ID NO: 1822068 - RNA, 17 nt, Human
gggguggggaccucagg

SEQ ID NO: 1822069 - RNA, 22 nt, Human
gggggaggugggauccuccagg

SEQ ID NO: 1822070 - RNA, 23 nt, Human
ggggcugcaccggcuggccuggc

SEQ ID NO: 1822071 - RNA, 19 nt, Human
ggggcugaggugggaggau

SEQ ID NO: 1822072 - RNA, 12 nt, Human
ggggcugcaccg

SEQ ID NO: 1822073 - RNA, 21 nt, Human
ggggcugcaccggcuggccug

SEQ ID NO: 1822074 - RNA, 22 nt, Human
ggggcugcaccggcuggccugg

SEQ ID NO: 1822075 - RNA, 18 nt, Human
ggggaggggcugugggcg

SEQ ID NO: 1822076 - RNA, 21 nt, Human
ggggaaaaucagccugcucca

SEQ ID NO: 1822077 - RNA, 24 nt, Human
ggggaaaaucagccugcuccagcu

SEQ ID NO: 1822078 - RNA, 11 nt, Human
gggccugggcc

SEQ ID NO: 1822079 - RNA, 16 nt, Human
ggggaaaaucagccug

SEQ ID NO: 1822080 - RNA, 17 nt, Human
ggggaaaaucagccugc

SEQ ID NO: 1822081 - RNA, 19 nt, Human
ggggaaaaucagccugcuc

SEQ ID NO: 1822082 - RNA, 17 nt, Human
ggggcugaggugggagg

SEQ ID NO: 1822083 - RNA, 16 nt, Human
ggggcaacccugguga

SEQ ID NO: 1822084 - RNA, 19 nt, Human
ggguucuuucuuccucugc

SEQ ID NO: 1822085 - RNA, 17 nt, Human
ggguucuuucuuccucu

SEQ ID NO: 1822086 - RNA, 16 nt, Human
ggguucuuucuuccuc

SEQ ID NO: 1822087 - RNA, 20 nt, Human
ggguuccuuccucugagccu

SEQ ID NO: 1822088 - RNA, 21 nt, Human
ggguuccuuccucugagccuu

SEQ ID NO: 1822089 - RNA, 12 nt, Human
ggguucuaccca

SEQ ID NO: 1822090 - RNA, 19 nt, Human
ggguuccuuccucugagcc

SEQ ID NO: 1822091 - RNA, 23 nt, Human
ggguucaagcgauucuucugcuu

SEQ ID NO: 1822092 - RNA, 22 nt, Human
ggguucaagcgauucuucugcu

SEQ ID NO: 1822093 - RNA, 18 nt, Human
gggugcugggccccugcc

SEQ ID NO: 1822094 - RNA, 17 nt, Human
gggugcugggccccugc

SEQ ID NO: 1822095 - RNA, 17 nt, Human
gggugaagugaagacaa

SEQ ID NO: 1822096 - RNA, 19 nt, Human
gggugacagagcaagugag

SEQ ID NO: 1822097 - RNA, 11 nt, Human
ggucagagccu

SEQ ID NO: 1822098 - RNA, 15 nt, Human
ggucccaccccacac

SEQ ID NO: 1822099 - RNA, 16 nt, Human
ggucccaccccacaca

SEQ ID NO: 1822100 - RNA, 16 nt, Human
ggucacaggacucugc

SEQ ID NO: 1822101 - RNA, 18 nt, Human
ggucacaggacucugccu

SEQ ID NO: 1822102 - RNA, 12 nt, Human
ggucacucuggc

SEQ ID NO: 1822103 - RNA, 17 nt, Human
gguacuuguggacacag

SEQ ID NO: 1822104 - RNA, 16 nt, Human
gguacuuguggacaca

SEQ ID NO: 1822105 - RNA, 20 nt, Human
gguacuuguggacacagcuc

SEQ ID NO: 1822106 - RNA, 22 nt, Human
gguagaaauaucugaaaaugua

SEQ ID NO: 1822107 - RNA, 13 nt, Human
gguacccacugcu

SEQ ID NO: 1822108 - RNA, 16 nt, Human
gguacccacugcucug

SEQ ID NO: 1822109 - RNA, 11 nt, Human
gguacccacug

SEQ ID NO: 1822110 - RNA, 23 nt, Human
gguagaaauaucugaaaauguau

SEQ ID NO: 1822111 - RNA, 22 nt, Human
gguagaagcccuucuaccuucc

SEQ ID NO: 1822112 - RNA, 18 nt, Human
gguucuuucauuugcuuu

SEQ ID NO: 1822113 - RNA, 13 nt, Human
gguugagguuuca

SEQ ID NO: 1822114 - RNA, 14 nt, Human
gguucuuucuuccu

SEQ ID NO: 1822115 - RNA, 16 nt, Human
gguucuuucuuccucu

SEQ ID NO: 1822116 - RNA, 21 nt, Human
gguucaaagauauuuugcuuu

SEQ ID NO: 1822117 - RNA, 23 nt, Human
gguuauuuugauguaaagauguu

SEQ ID NO: 1822118 - RNA, 13 nt, Human
gguucaaagauau

SEQ ID NO: 1822119 - RNA, 21 nt, Human
gguuacccaguuagcucucaa

SEQ ID NO: 1822120 - RNA, 17 nt, Human
gguuaggcauuguggga

SEQ ID NO: 1822121 - RNA, 21 nt, Human
gguuaguggauggaaggggcu

SEQ ID NO: 1822122 - RNA, 22 nt, Human
gguuaguggauggaaggggcug

SEQ ID NO: 1822123 - RNA, 13 nt, Human
gguuauggagagg

SEQ ID NO: 1822124 - RNA, 17 nt, Human
ggugucaagagggucug

SEQ ID NO: 1822125 - RNA, 19 nt, Human
ggugucaagagggucugag

SEQ ID NO: 1822126 - RNA, 19 nt, Human
ggugucaccugaagacuca

SEQ ID NO: 1822127 - RNA, 18 nt, Human
ggugguuucagaaaugug

SEQ ID NO: 1822128 - RNA, 17 nt, Human
ggugguuucagaaaugu

SEQ ID NO: 1822129 - RNA, 21 nt, Human
ggugguuauggagaggguguc

SEQ ID NO: 1822130 - RNA, 18 nt, Human
ggugguuuucuguucuuu

SEQ ID NO: 1822131 - RNA, 15 nt, Human
ggugguuuucuguuc

SEQ ID NO: 1822132 - RNA, 15 nt, Human
gguggugaccucugc

SEQ ID NO: 1822133 - RNA, 14 nt, Human
gguggugaccucug

SEQ ID NO: 1822134 - RNA, 16 nt, Human
gguggugaccucugcc

SEQ ID NO: 1822135 - RNA, 16 nt, Human
ggugagaggggaacag

SEQ ID NO: 1822136 - RNA, 15 nt, Human
ggugagaagcagagg

SEQ ID NO: 1822137 - RNA, 15 nt, Human
ggugcgaucuggguu

SEQ ID NO: 1822138 - RNA, 16 nt, Human
ggugcuaucuccccca

SEQ ID NO: 1822139 - RNA, 17 nt, Human
ggugcuaucucccccag

SEQ ID NO: 1822140 - RNA, 19 nt, Human
ggugcuaucucccccagcc

SEQ ID NO: 1822141 - RNA, 20 nt, Human
ggugcuaucucccccagccc

SEQ ID NO: 1822142 - RNA, 22 nt, Human
gguggcagugggagcugccugu

SEQ ID NO: 1822143 - RNA, 19 nt, Human
gguggcagugggagcugcc

SEQ ID NO: 1822144 - RNA, 21 nt, Human
ggugcugccauccagguucag

SEQ ID NO: 1822145 - RNA, 15 nt, Human
ggugcugccauccag

SEQ ID NO: 1822146 - RNA, 21 nt, Human
ggugcuaucucccccagcccc

SEQ ID NO: 1822147 - RNA, 23 nt, Human
gguggccucccaacucaccccag

SEQ ID NO: 1822148 - RNA, 20 nt, Human
gguggccacuccagaccccu

SEQ ID NO: 1822149 - RNA, 21 nt, Human
gguggccacuccagaccccug

SEQ ID NO: 1822150 - RNA, 22 nt, Human
gguggccacuccagaccccugg

SEQ ID NO: 1822151 - RNA, 23 nt, Human
gguggccacuccagaccccuggc

SEQ ID NO: 1822152 - RNA, 22 nt, Human
gguggccucccaacucacccca

SEQ ID NO: 1822153 - RNA, 22 nt, Human
ggugaccagcaccaucucuccu

SEQ ID NO: 1822154 - RNA, 14 nt, Human
ggucugacccacug

SEQ ID NO: 1822155 - RNA, 23 nt, Human
ggucucacucugucgcccagucu

SEQ ID NO: 1822156 - RNA, 22 nt, Human
ggucucacucugucgcccaguc

SEQ ID NO: 1822157 - RNA, 21 nt, Human
ggucucacuauguugcccagg

SEQ ID NO: 1822158 - RNA, 17 nt, Human
ggucucaaacuccugac

SEQ ID NO: 1822159 - RNA, 17 nt, Human
ggucccaccccacacac

SEQ ID NO: 1822160 - RNA, 14 nt, Human
ggucccaccccaca

SEQ ID NO: 1822161 - RNA, 19 nt, Human
gccuucggccuccauccug

SEQ ID NO: 1822162 - RNA, 13 nt, Human
gccuucagcucua

SEQ ID NO: 1822163 - RNA, 16 nt, Human
gccuucagcucuacag

SEQ ID NO: 1822164 - RNA, 18 nt, Human
gccuucggccuccauccu

SEQ ID NO: 1822165 - RNA, 17 nt, Human
gccugguggcagcugcg

SEQ ID NO: 1822166 - RNA, 16 nt, Human
gccugguggcagcugc

SEQ ID NO: 1822167 - RNA, 18 nt, Human
gccuguaaucacagcuac

SEQ ID NO: 1822168 - RNA, 15 nt, Human
gccugguggcagcug

SEQ ID NO: 1822169 - RNA, 21 nt, Human
gccuuauggaacacucugaga

SEQ ID NO: 1822170 - RNA, 22 nt, Human
gccuuauggaacacucugagac

SEQ ID NO: 1822171 - RNA, 23 nt, Human
gccuuauggaacacucugagacu

SEQ ID NO: 1822172 - RNA, 20 nt, Human
gccuuagaagucacacagua

SEQ ID NO: 1822173 - RNA, 17 nt, Human
gccuuagaaccuuucuu

SEQ ID NO: 1822174 - RNA, 16 nt, Human
gccuuagaaccuuucu

SEQ ID NO: 1822175 - RNA, 19 nt, Human
gccuuacccucauguucuu

SEQ ID NO: 1822176 - RNA, 21 nt, Human
gcuagacgagcaggcuucuuc

SEQ ID NO: 1822177 - RNA, 22 nt, Human
gcuagacgagcaggcuucuucc

SEQ ID NO: 1822178 - RNA, 15 nt, Human
gcgugagccacugca

SEQ ID NO: 1822179 - RNA, 16 nt, Human
gcgugagccacugcac

SEQ ID NO: 1822180 - RNA, 16 nt, Human
gcgugagaccugcccc

SEQ ID NO: 1822181 - RNA, 14 nt, Human
gcgugagccacugc

SEQ ID NO: 1822182 - RNA, 17 nt, Human
gcuaacauggaaguacu

SEQ ID NO: 1822183 - RNA, 18 nt, Human
gcuaacauggaaguacua

SEQ ID NO: 1822184 - RNA, 14 nt, Human
gcuaacauggaagu

SEQ ID NO: 1822185 - RNA, 22 nt, Human
gcuacacaggggaaaagaggag

SEQ ID NO: 1822186 - RNA, 23 nt, Human
gcgguccacccaggagccccgag

SEQ ID NO: 1822187 - RNA, 23 nt, Human
gcggggacagcuccuucuguccu

SEQ ID NO: 1822188 - RNA, 19 nt, Human
gcggggacagcuccuucug

SEQ ID NO: 1822189 - RNA, 23 nt, Human
gcggacagccacggccaggccag

SEQ ID NO: 1822190 - RNA, 19 nt, Human
gcggacagccacggccagg

SEQ ID NO: 1822191 - RNA, 16 nt, Human
gcggacagccacggcc

SEQ ID NO: 1822192 - RNA, 19 nt, Human
gcggaaugaaccacaucuu

SEQ ID NO: 1822193 - RNA, 17 nt, Human
gcgcugccccuggcagc

SEQ ID NO: 1822194 - RNA, 19 nt, Human
gcgcuggccgggaccccga

SEQ ID NO: 1822195 - RNA, 14 nt, Human
gcgcugccccuggc

SEQ ID NO: 1822196 - RNA, 21 nt, Human
gcgccuacaggagugagcacu

SEQ ID NO: 1822197 - RNA, 20 nt, Human
gcgccuacaggagugagcac

SEQ ID NO: 1822198 - RNA, 15 nt, Human
gccucugacacacag

SEQ ID NO: 1822199 - RNA, 16 nt, Human
gccucugacacacagc

SEQ ID NO: 1822200 - RNA, 16 nt, Human
gccucugcacuccccu

SEQ ID NO: 1822201 - RNA, 17 nt, Human
gccucugcacuccccug

SEQ ID NO: 1822202 - RNA, 18 nt, Human
gccucugcacuccccugc

SEQ ID NO: 1822203 - RNA, 19 nt, Human
gccucugcacuccccugcu

SEQ ID NO: 1822204 - RNA, 20 nt, Human
gccucugcacuccccugcug

SEQ ID NO: 1822205 - RNA, 15 nt, Human
gccugaagucacaca

SEQ ID NO: 1822206 - RNA, 15 nt, Human
gccucugcauucagg

SEQ ID NO: 1822207 - RNA, 12 nt, Human
gccucugcauuc

SEQ ID NO: 1822208 - RNA, 21 nt, Human
gccucugcacuccccugcugg

SEQ ID NO: 1822209 - RNA, 12 nt, Human
gccugcccaggc

SEQ ID NO: 1822210 - RNA, 11 nt, Human
gccugcccagg

SEQ ID NO: 1822211 - RNA, 14 nt, Human
gccuggacccugug

SEQ ID NO: 1822212 - RNA, 20 nt, Human
gccucccgaauagcugggac

SEQ ID NO: 1822213 - RNA, 23 nt, Human
gccucccgaguagcugggacuac

SEQ ID NO: 1822214 - RNA, 21 nt, Human
gccucccgaguagcugggacu

SEQ ID NO: 1822215 - RNA, 19 nt, Human
gccucccgaauagcuggga

SEQ ID NO: 1822216 - RNA, 18 nt, Human
gccucccgaauagcuggg

SEQ ID NO: 1822217 - RNA, 22 nt, Human
gccucagccucccaaagugcug

SEQ ID NO: 1822218 - RNA, 14 nt, Human
gccucagccuccca

SEQ ID NO: 1822219 - RNA, 12 nt, Human
gccucagccucc

SEQ ID NO: 1822220 - RNA, 10 nt, Human
gccucucugc

SEQ ID NO: 1822221 - RNA, 14 nt, Human
gccucucugcaggu

SEQ ID NO: 1822222 - RNA, 16 nt, Human
gccucucugcaggucc

SEQ ID NO: 1822223 - RNA, 17 nt, Human
gccucucugcagguccc

SEQ ID NO: 1822224 - RNA, 15 nt, Human
gccucucccaucacu

SEQ ID NO: 1822225 - RNA, 11 nt, Human
gccguggcuuc

SEQ ID NO: 1822226 - RNA, 12 nt, Human
gccguggcuucc

SEQ ID NO: 1822227 - RNA, 13 nt, Human
gccguggcuuccc

SEQ ID NO: 1822228 - RNA, 15 nt, Human
gccguggcuucccgc

SEQ ID NO: 1822229 - RNA, 18 nt, Human
gccgucuaccugaggggc

SEQ ID NO: 1822230 - RNA, 20 nt, Human
gccgucuaccugaggggccu

SEQ ID NO: 1822231 - RNA, 22 nt, Human
gccgucuaccugaggggccucu

SEQ ID NO: 1822232 - RNA, 23 nt, Human
gccgucuaccugaggggccucuu

SEQ ID NO: 1822233 - RNA, 17 nt, Human
gccuauuuuaauaaaca

SEQ ID NO: 1822234 - RNA, 14 nt, Human
gccuaaggcugaac

SEQ ID NO: 1822235 - RNA, 21 nt, Human
gccucagcauccuggcacccg

SEQ ID NO: 1822236 - RNA, 18 nt, Human
gccucagcauccuggcac

SEQ ID NO: 1822237 - RNA, 24 nt, Human
gccucaagugauucuccugccuca

SEQ ID NO: 1822238 - RNA, 22 nt, Human
gccucaagugauucuccugccu

SEQ ID NO: 1822239 - RNA, 12 nt, Human
gccgggguggau

SEQ ID NO: 1822240 - RNA, 19 nt, Human
gccgcagcccugcagaggg

SEQ ID NO: 1822241 - RNA, 15 nt, Human
gccgcagcccugcag

SEQ ID NO: 1822242 - RNA, 16 nt, Human
gccgcagcccugcaga

SEQ ID NO: 1822243 - RNA, 17 nt, Human
gccgcagcccugcagag

SEQ ID NO: 1822244 - RNA, 17 nt, Human
gccgagauagccaaggc

SEQ ID NO: 1822245 - RNA, 19 nt, Human
gccgagauagccaaggcca

SEQ ID NO: 1822246 - RNA, 16 nt, Human
gccgagauagccaagg

SEQ ID NO: 1822247 - RNA, 22 nt, Human
gcccuuccucuccacugccuuc

SEQ ID NO: 1822248 - RNA, 13 nt, Human
gcccuucucucca

SEQ ID NO: 1822249 - RNA, 17 nt, Human
gccccgucccccucugg

SEQ ID NO: 1822250 - RNA, 21 nt, Human
gccccgucccccucuggcucc

SEQ ID NO: 1822251 - RNA, 17 nt, Human
gccccgugggguuccuc

SEQ ID NO: 1822252 - RNA, 23 nt, Human
gccccgaggccuucucugaagga

SEQ ID NO: 1822253 - RNA, 23 nt, Human
gccccauucugccugcccaggcc

SEQ ID NO: 1822254 - RNA, 22 nt, Human
gccccauucugccugcccaggc

SEQ ID NO: 1822255 - RNA, 14 nt, Human
gccccgcccaggcu

SEQ ID NO: 1822256 - RNA, 19 nt, Human
gccccucagggucccuggu

SEQ ID NO: 1822257 - RNA, 21 nt, Human
gccccucagggucccuggugg

SEQ ID NO: 1822258 - RNA, 23 nt, Human
gccccucaacucuccuccagagu

SEQ ID NO: 1822259 - RNA, 17 nt, Human
gccccuucccccuccaa

SEQ ID NO: 1822260 - RNA, 18 nt, Human
gccccucccacagcgcug

SEQ ID NO: 1822261 - RNA, 13 nt, Human
gccccugcacaaa

SEQ ID NO: 1822262 - RNA, 23 nt, Human
gccccuggcagccccuguucugg

SEQ ID NO: 1822263 - RNA, 19 nt, Human
gccccugcacuccagccug

SEQ ID NO: 1822264 - RNA, 15 nt, Human
gcccucccugccccu

SEQ ID NO: 1822265 - RNA, 21 nt, Human
gcccgggcucugccucccauc

SEQ ID NO: 1822266 - RNA, 19 nt, Human
gcccgggcucugccuccca

SEQ ID NO: 1822267 - RNA, 20 nt, Human
gcccgggcucugccucccau

SEQ ID NO: 1822268 - RNA, 22 nt, Human
gcccucugcccacucccugcaa

SEQ ID NO: 1822269 - RNA, 15 nt, Human
gcccggcuccaggcu

SEQ ID NO: 1822270 - RNA, 12 nt, Human
gcccgggcucug

SEQ ID NO: 1822271 - RNA, 14 nt, Human
gcccggcuccaggc

SEQ ID NO: 1822272 - RNA, 13 nt, Human
gcccggcuccagg

SEQ ID NO: 1822273 - RNA, 13 nt, Human
gcccgggcucugc

SEQ ID NO: 1822274 - RNA, 14 nt, Human
gcccgggcucugcc

SEQ ID NO: 1822275 - RNA, 15 nt, Human
gcccgggcucugccu

SEQ ID NO: 1822276 - RNA, 18 nt, Human
gcccgggcucugccuccc

SEQ ID NO: 1822277 - RNA, 20 nt, Human
gccccuucugacccaugcug

SEQ ID NO: 1822278 - RNA, 19 nt, Human
gccccuucugacccaugcu

SEQ ID NO: 1822279 - RNA, 12 nt, Human
gcccggcuccag

SEQ ID NO: 1822280 - RNA, 11 nt, Human
gcccaggcugg

SEQ ID NO: 1822281 - RNA, 17 nt, Human
gcccaggccugccuguu

SEQ ID NO: 1822282 - RNA, 12 nt, Human
gcccaggaaagg

SEQ ID NO: 1822283 - RNA, 15 nt, Human
gcccaggaaaggcuc

SEQ ID NO: 1822284 - RNA, 16 nt, Human
gcccaggaaaggcucc

SEQ ID NO: 1822285 - RNA, 18 nt, Human
gcccaggccuccuacagc

SEQ ID NO: 1822286 - RNA, 15 nt, Human
gcccaggcuggcgug

SEQ ID NO: 1822287 - RNA, 14 nt, Human
gcccaggcuggcgu

SEQ ID NO: 1822288 - RNA, 16 nt, Human
gcccaggcuggcgugc

SEQ ID NO: 1822289 - RNA, 22 nt, Human
gcccagucuggaaugcaguggu

SEQ ID NO: 1822290 - RNA, 21 nt, Human
gccccauucugccugcccagg

SEQ ID NO: 1822291 - RNA, 20 nt, Human
gccccauucugccugcccag

SEQ ID NO: 1822292 - RNA, 18 nt, Human
gccccauucugccugccc

SEQ ID NO: 1822293 - RNA, 17 nt, Human
gccccauucugccugcc

SEQ ID NO: 1822294 - RNA, 23 nt, Human
gccccauccucuguacagagccc

SEQ ID NO: 1822295 - RNA, 21 nt, Human
gccccagugcccacaggauca

SEQ ID NO: 1822296 - RNA, 17 nt, Human
gccccagugcccacagg

SEQ ID NO: 1822297 - RNA, 16 nt, Human
gccccagugcccacag

SEQ ID NO: 1822298 - RNA, 22 nt, Human
gcccaucugggggccucuucug

SEQ ID NO: 1822299 - RNA, 19 nt, Human
gcccaaagugguauagaaa

SEQ ID NO: 1822300 - RNA, 16 nt, Human
gccauuuguguuuaua

SEQ ID NO: 1822301 - RNA, 15 nt, Human
gcccaaagaugcagc

SEQ ID NO: 1822302 - RNA, 16 nt, Human
gcccaaagaugcagcc

SEQ ID NO: 1822303 - RNA, 18 nt, Human
gcccacaggaucagucug

SEQ ID NO: 1822304 - RNA, 13 nt, Human
gcccacaggauca

SEQ ID NO: 1822305 - RNA, 19 nt, Human
gcccacaggaucagucuga

SEQ ID NO: 1822306 - RNA, 15 nt, Human
gcccaccccucaaca

SEQ ID NO: 1822307 - RNA, 17 nt, Human
gccauuucuuccacaag

SEQ ID NO: 1822308 - RNA, 20 nt, Human
gccauuucuuccacaagagc

SEQ ID NO: 1822309 - RNA, 22 nt, Human
gccauuucuuccacaagagccc

SEQ ID NO: 1822310 - RNA, 19 nt, Human
gccaugggacagggaggac

SEQ ID NO: 1822311 - RNA, 14 nt, Human
gccaugggacaggg

SEQ ID NO: 1822312 - RNA, 20 nt, Human
gccauccagguucagcuugu

SEQ ID NO: 1822313 - RNA, 19 nt, Human
gccauccagguucagcuug

SEQ ID NO: 1822314 - RNA, 18 nt, Human
gccagguggccacuccag

SEQ ID NO: 1822315 - RNA, 13 nt, Human
gccaucccagccc

SEQ ID NO: 1822316 - RNA, 14 nt, Human
gccaucccagcccc

SEQ ID NO: 1822317 - RNA, 15 nt, Human
gccaucccagcccca

SEQ ID NO: 1822318 - RNA, 16 nt, Human
gccaucccagccccaa

SEQ ID NO: 1822319 - RNA, 17 nt, Human
gccaucccagccccaau

SEQ ID NO: 1822320 - RNA, 17 nt, Human
gccaggggaaaaucagc

SEQ ID NO: 1822321 - RNA, 21 nt, Human
gccaggggaaaaucagccugc

SEQ ID NO: 1822322 - RNA, 22 nt, Human
gccaggggaaaaucagccugcu

SEQ ID NO: 1822323 - RNA, 23 nt, Human
gccaggggaaaaucagccugcuc

SEQ ID NO: 1822324 - RNA, 20 nt, Human
gccaggaagccagcaggcuc

SEQ ID NO: 1822325 - RNA, 19 nt, Human
gccaggaagccagcaggcu

SEQ ID NO: 1822326 - RNA, 11 nt, Human
gccaggaagcc

SEQ ID NO: 1822327 - RNA, 17 nt, Human
gccaggaagccagcagg

SEQ ID NO: 1822328 - RNA, 18 nt, Human
gccaggaagccagcaggc

SEQ ID NO: 1822329 - RNA, 22 nt, Human
gccacguucuuacuaguuuccc

SEQ ID NO: 1822330 - RNA, 16 nt, Human
gccacggccaggccag

SEQ ID NO: 1822331 - RNA, 21 nt, Human
gccacuauuguuagucucuug

SEQ ID NO: 1822332 - RNA, 15 nt, Human
gccacggccaggcca

SEQ ID NO: 1822333 - RNA, 14 nt, Human
gccacggccaggcc

SEQ ID NO: 1822334 - RNA, 18 nt, Human
gccacugcaccgggccac

SEQ ID NO: 1822335 - RNA, 17 nt, Human
gccacugcaccgggcca

SEQ ID NO: 1822336 - RNA, 19 nt, Human
gccacugcaccgggccaca

SEQ ID NO: 1822337 - RNA, 16 nt, Human
gccacuccagaccccu

SEQ ID NO: 1822338 - RNA, 18 nt, Human
gccacuccagaccccugg

SEQ ID NO: 1822339 - RNA, 19 nt, Human
gccacuccagaccccuggc

SEQ ID NO: 1822340 - RNA, 18 nt, Human
gccagagggagugacaga

SEQ ID NO: 1822341 - RNA, 12 nt, Human
gccagagacaca

SEQ ID NO: 1822342 - RNA, 15 nt, Human
gccagagacacaagc

SEQ ID NO: 1822343 - RNA, 14 nt, Human
gccagcugcuuggg

SEQ ID NO: 1822344 - RNA, 16 nt, Human
gccagcugcuugggcu

SEQ ID NO: 1822345 - RNA, 15 nt, Human
gccagcugcuugggc

SEQ ID NO: 1822346 - RNA, 14 nt, Human
gccagccuugacca

SEQ ID NO: 1822347 - RNA, 20 nt, Human
gccagccuugaccauucucc

SEQ ID NO: 1822348 - RNA, 21 nt, Human
gccagccuugaccauucucca

SEQ ID NO: 1822349 - RNA, 22 nt, Human
gccagccuugaccauucuccac

SEQ ID NO: 1822350 - RNA, 20 nt, Human
gccagagggagugacagagg

SEQ ID NO: 1822351 - RNA, 19 nt, Human
gccagagggagugacagag

SEQ ID NO: 1822352 - RNA, 16 nt, Human
gccagauucuuuccug

SEQ ID NO: 1822353 - RNA, 17 nt, Human
gccagauucuuuccuga

SEQ ID NO: 1822354 - RNA, 19 nt, Human
gccagauucuuuccugagg

SEQ ID NO: 1822355 - RNA, 21 nt, Human
gccagccgagauagccaaggc

SEQ ID NO: 1822356 - RNA, 20 nt, Human
gccagccgagauagccaagg

SEQ ID NO: 1822357 - RNA, 12 nt, Human
gccagccuugac

SEQ ID NO: 1822358 - RNA, 12 nt, Human
gcauuuuguaau

SEQ ID NO: 1822359 - RNA, 22 nt, Human
gcauuuugcuaaaugugaauga

SEQ ID NO: 1822360 - RNA, 21 nt, Human
gccaaacucaccugccccuca

SEQ ID NO: 1822361 - RNA, 19 nt, Human
gccaaacucaccugccccu

SEQ ID NO: 1822362 - RNA, 14 nt, Human
gccaaaggaagcac

SEQ ID NO: 1822363 - RNA, 16 nt, Human
gccaaaggaagcacau

SEQ ID NO: 1822364 - RNA, 20 nt, Human
gccaaaggaagcacaugccu

SEQ ID NO: 1822365 - RNA, 18 nt, Human
gcauucucacuccuaccu

SEQ ID NO: 1822366 - RNA, 13 nt, Human
gcauucucacucc

SEQ ID NO: 1822367 - RNA, 15 nt, Human
gcauucucacuccua

SEQ ID NO: 1822368 - RNA, 12 nt, Human
gcauuccccagg

SEQ ID NO: 1822369 - RNA, 12 nt, Human
gcauuccccacu

SEQ ID NO: 1822370 - RNA, 23 nt, Human
gcauuugcugaauacagaggcaa

SEQ ID NO: 1822371 - RNA, 21 nt, Human
gcauuuggugguuucagaaau

SEQ ID NO: 1822372 - RNA, 16 nt, Human
gcauuuuacuguacag

SEQ ID NO: 1822373 - RNA, 17 nt, Human
gcauuuuacuguacaga

SEQ ID NO: 1822374 - RNA, 13 nt, Human
gcaucaggccagg

SEQ ID NO: 1822375 - RNA, 15 nt, Human
gcaucaggccaggcc

SEQ ID NO: 1822376 - RNA, 16 nt, Human
gcaucaggccaggccc

SEQ ID NO: 1822377 - RNA, 17 nt, Human
gcaucaggccaggcccu

SEQ ID NO: 1822378 - RNA, 15 nt, Human
gcaugaauuugugaa

SEQ ID NO: 1822379 - RNA, 20 nt, Human
gcaugacacgaauauugcug

SEQ ID NO: 1822380 - RNA, 17 nt, Human
gcaugaauuugugaagg

SEQ ID NO: 1822381 - RNA, 17 nt, Human
gcaugccuggauggggc

SEQ ID NO: 1822382 - RNA, 22 nt, Human
gcaugccuggauggggcugcac

SEQ ID NO: 1822383 - RNA, 17 nt, Human
gcauguuugugauugac

SEQ ID NO: 1822384 - RNA, 15 nt, Human
gcaugcugucccuua

SEQ ID NO: 1822385 - RNA, 20 nt, Human
gcauuagauuucucauuugc

SEQ ID NO: 1822386 - RNA, 18 nt, Human
gcagugggagcugccugu

SEQ ID NO: 1822387 - RNA, 17 nt, Human
gcagugggagcugccug

SEQ ID NO: 1822388 - RNA, 19 nt, Human
gcauauuuauaaaaauaaa

SEQ ID NO: 1822389 - RNA, 21 nt, Human
gcaucaagaugugacauguuu

SEQ ID NO: 1822390 - RNA, 17 nt, Human
gcauauucaggaagcuc

SEQ ID NO: 1822391 - RNA, 18 nt, Human
gcauauucaggaagcuca

SEQ ID NO: 1822392 - RNA, 20 nt, Human
gcauauucaggaagcucagg

SEQ ID NO: 1822393 - RNA, 18 nt, Human
gcauauuauuuuauguug

SEQ ID NO: 1822394 - RNA, 23 nt, Human
gcauauuauuuuauguugcauag

SEQ ID NO: 1822395 - RNA, 15 nt, Human
gcauauucaggaagc

SEQ ID NO: 1822396 - RNA, 12 nt, Human
gcagggcucagc

SEQ ID NO: 1822397 - RNA, 14 nt, Human
gcagggcucagcgg

SEQ ID NO: 1822398 - RNA, 18 nt, Human
gcagggagggccugggcc

SEQ ID NO: 1822399 - RNA, 22 nt, Human
gcagggagggccugggccccag

SEQ ID NO: 1822400 - RNA, 16 nt, Human
gcagggagggcuucug

SEQ ID NO: 1822401 - RNA, 20 nt, Human
gcaggauucuuccucccucc

SEQ ID NO: 1822402 - RNA, 14 nt, Human
gcagggagggccug

SEQ ID NO: 1822403 - RNA, 17 nt, Human
gcagggagggccugggc

SEQ ID NO: 1822404 - RNA, 16 nt, Human
gcagugggagcugccu

SEQ ID NO: 1822405 - RNA, 23 nt, Human
gcagugcuuccaaggauggacca

SEQ ID NO: 1822406 - RNA, 12 nt, Human
gcaggucccuaa

SEQ ID NO: 1822407 - RNA, 13 nt, Human
gcaggucccuaau

SEQ ID NO: 1822408 - RNA, 10 nt, Human
gcaggucccu

SEQ ID NO: 1822409 - RNA, 11 nt, Human
gcaggucccua

SEQ ID NO: 1822410 - RNA, 18 nt, Human
gcacccggccccugcugg

SEQ ID NO: 1822411 - RNA, 17 nt, Human
gcacuaaggugugcucu

SEQ ID NO: 1822412 - RNA, 18 nt, Human
gcacuaaggugugcucug

SEQ ID NO: 1822413 - RNA, 19 nt, Human
gcacuaaggugugcucuga

SEQ ID NO: 1822414 - RNA, 17 nt, Human
gcacugaggaccagcca

SEQ ID NO: 1822415 - RNA, 22 nt, Human
gcacugggcuuggggaccagag

SEQ ID NO: 1822416 - RNA, 23 nt, Human
gcacugggcuuggggaccagagc

SEQ ID NO: 1822417 - RNA, 12 nt, Human
gcagaaggaaga

SEQ ID NO: 1822418 - RNA, 13 nt, Human
gcagaaggaagac

SEQ ID NO: 1822419 - RNA, 14 nt, Human
gcagaaggaagacu

SEQ ID NO: 1822420 - RNA, 14 nt, Human
gcagaagacaguau

SEQ ID NO: 1822421 - RNA, 16 nt, Human
gcacagcuucauuucc

SEQ ID NO: 1822422 - RNA, 19 nt, Human
gcacagcuaacauggaagu

SEQ ID NO: 1822423 - RNA, 13 nt, Human
gcaaugaccuuuc

SEQ ID NO: 1822424 - RNA, 14 nt, Human
gcaaugaccuuuca

SEQ ID NO: 1822425 - RNA, 19 nt, Human
gcaccacugcacuccagcc

SEQ ID NO: 1822426 - RNA, 15 nt, Human
gcaccuccugccucg

SEQ ID NO: 1822427 - RNA, 14 nt, Human
gcaccuccugccuc

SEQ ID NO: 1822428 - RNA, 17 nt, Human
gcacccggccccugcug

SEQ ID NO: 1822429 - RNA, 15 nt, Human
gcacccggccccugc

SEQ ID NO: 1822430 - RNA, 14 nt, Human
gcacccggccccug

SEQ ID NO: 1822431 - RNA, 15 nt, Human
gcagcacagcugaga

SEQ ID NO: 1822432 - RNA, 12 nt, Human
gcagcaauaaag

SEQ ID NO: 1822433 - RNA, 19 nt, Human
gcagaguugaagacagagc

SEQ ID NO: 1822434 - RNA, 16 nt, Human
gcagaguugaagacag

SEQ ID NO: 1822435 - RNA, 17 nt, Human
gcagaguugaagacaga

SEQ ID NO: 1822436 - RNA, 15 nt, Human
gcagaguugaagaca

SEQ ID NO: 1822437 - RNA, 14 nt, Human
gcagagaccauccc

SEQ ID NO: 1822438 - RNA, 15 nt, Human
gcagagaccaucccu

SEQ ID NO: 1822439 - RNA, 17 nt, Human
gcagagaccaucccuga

SEQ ID NO: 1822440 - RNA, 19 nt, Human
gcagagaccaucccugaag

SEQ ID NO: 1822441 - RNA, 23 nt, Human
gcagagaaugaaagggcccagag

SEQ ID NO: 1822442 - RNA, 22 nt, Human
gcagagaaugaaagggcccaga

SEQ ID NO: 1822443 - RNA, 21 nt, Human
gcagagaauucucuuauccaa

SEQ ID NO: 1822444 - RNA, 21 nt, Human
gcagagaaugaaagggcccag

SEQ ID NO: 1822445 - RNA, 20 nt, Human
gcagagaaugaaagggccca

SEQ ID NO: 1822446 - RNA, 19 nt, Human
gcagagaaugaaagggccc

SEQ ID NO: 1822447 - RNA, 18 nt, Human
gcagaaggaagacuucau

SEQ ID NO: 1822448 - RNA, 20 nt, Human
gcaggaggaucacuugaguc

SEQ ID NO: 1822449 - RNA, 20 nt, Human
gcaggaguuucguuuucaaa

SEQ ID NO: 1822450 - RNA, 21 nt, Human
gcaggaguuucguuuucaaaa

SEQ ID NO: 1822451 - RNA, 22 nt, Human
gcagccucaaccuccugggcua

SEQ ID NO: 1822452 - RNA, 21 nt, Human
gcagccucaaccuccugggcu

SEQ ID NO: 1822453 - RNA, 18 nt, Human
gcagccgugccuucagcu

SEQ ID NO: 1822454 - RNA, 14 nt, Human
gcagccuggacccu

SEQ ID NO: 1822455 - RNA, 20 nt, Human
gcagccucaaccuccugggc

SEQ ID NO: 1822456 - RNA, 19 nt, Human
gcagccucaaccuccuggg

SEQ ID NO: 1822457 - RNA, 15 nt, Human
gcagccgugccuuca

SEQ ID NO: 1822458 - RNA, 17 nt, Human
gcagccgugccuucagc

SEQ ID NO: 1822459 - RNA, 14 nt, Human
gcagccgugccuuc

SEQ ID NO: 1822460 - RNA, 21 nt, Human
gauuucuguuuagauaauaca

SEQ ID NO: 1822461 - RNA, 22 nt, Human
gauuucuguuuagauaauacac

SEQ ID NO: 1822462 - RNA, 16 nt, Human
gauugggaauccgccc

SEQ ID NO: 1822463 - RNA, 16 nt, Human
gauugcaacaggcugg

SEQ ID NO: 1822464 - RNA, 20 nt, Human
gauucuuuccugaggcuggg

SEQ ID NO: 1822465 - RNA, 22 nt, Human
gauucuuuccugaggcugggcu

SEQ ID NO: 1822466 - RNA, 18 nt, Human
gauucccaagcucugcuc

SEQ ID NO: 1822467 - RNA, 19 nt, Human
gauucuuuccugaggcugg

SEQ ID NO: 1822468 - RNA, 17 nt, Human
gauucccaagcucugcu

SEQ ID NO: 1822469 - RNA, 16 nt, Human
gauucccaagcucugc

SEQ ID NO: 1822470 - RNA, 18 nt, Human
gauugcuugagcucagga

SEQ ID NO: 1822471 - RNA, 18 nt, Human
gauugcaacaggcugggc

SEQ ID NO: 1822472 - RNA, 17 nt, Human
gauugcaacaggcuggg

SEQ ID NO: 1822473 - RNA, 20 nt, Human
gaugccugugaacugaacuc

SEQ ID NO: 1822474 - RNA, 17 nt, Human
gaugccugguggcagcu

SEQ ID NO: 1822475 - RNA, 16 nt, Human
gaugcuagaacucccu

SEQ ID NO: 1822476 - RNA, 18 nt, Human
gauguucuagcauggcug

SEQ ID NO: 1822477 - RNA, 14 nt, Human
gauguucugggaca

SEQ ID NO: 1822478 - RNA, 18 nt, Human
gauguucuggauaccauu

SEQ ID NO: 1822479 - RNA, 21 nt, Human
gauguuuuaaggaugcuugua

SEQ ID NO: 1822480 - RNA, 21 nt, Human
gauuacaagcgugagccacug

SEQ ID NO: 1822481 - RNA, 13 nt, Human
gauuacaagcgug

SEQ ID NO: 1822482 - RNA, 13 nt, Human
gauucagacagcu

SEQ ID NO: 1822483 - RNA, 14 nt, Human
gauucagacagcug

SEQ ID NO: 1822484 - RNA, 17 nt, Human
gauucagacagcugccu

SEQ ID NO: 1822485 - RNA, 18 nt, Human
gauucagacagcugccug

SEQ ID NO: 1822486 - RNA, 15 nt, Human
gauucccaagcucug

SEQ ID NO: 1822487 - RNA, 17 nt, Human
gcaauccugcaagaaca

SEQ ID NO: 1822488 - RNA, 21 nt, Human
gcaagggaauuucuucaacuc

SEQ ID NO: 1822489 - RNA, 14 nt, Human
gcaaggcugucaau

SEQ ID NO: 1822490 - RNA, 18 nt, Human
gcaaggcugucaauuaca

SEQ ID NO: 1822491 - RNA, 20 nt, Human
gcaagcaccuccugccucga

SEQ ID NO: 1822492 - RNA, 18 nt, Human
gcaagcaccuccugccuc

SEQ ID NO: 1822493 - RNA, 16 nt, Human
gcaagcaccuccugcc

SEQ ID NO: 1822494 - RNA, 15 nt, Human
gcaagcaccuccugc

SEQ ID NO: 1822495 - RNA, 18 nt, Human
gcaagcaagaaacacugg

SEQ ID NO: 1822496 - RNA, 22 nt, Human
gcaacuuuguauaaaagggacu

SEQ ID NO: 1822497 - RNA, 23 nt, Human
gcaaaguucccuacuuccuguga

SEQ ID NO: 1822498 - RNA, 20 nt, Human
gcaaacuuuauuuuguguuu

SEQ ID NO: 1822499 - RNA, 18 nt, Human
gcaacugcauuggcuuug

SEQ ID NO: 1822500 - RNA, 12 nt, Human
gcaaaugugaau

SEQ ID NO: 1822501 - RNA, 14 nt, Human
gcaaauggccucau

SEQ ID NO: 1822502 - RNA, 18 nt, Human
gcaaacuuuauuuugugu

SEQ ID NO: 1822503 - RNA, 16 nt, Human
gcaaaccaucauugaa

SEQ ID NO: 1822504 - RNA, 17 nt, Human
gcaaaccaucauugaaa

SEQ ID NO: 1822505 - RNA, 19 nt, Human
gcaaaccaucauugaaauc

SEQ ID NO: 1822506 - RNA, 20 nt, Human
gcaaaccaucauugaaaucu

SEQ ID NO: 1822507 - RNA, 21 nt, Human
gcaaaccaucauugaaaucuu

SEQ ID NO: 1822508 - RNA, 16 nt, Human
gaugaaauguaaauac

SEQ ID NO: 1822509 - RNA, 21 nt, Human
gaugaaaugaggucagagccu

SEQ ID NO: 1822510 - RNA, 15 nt, Human
gaugaaaugagguca

SEQ ID NO: 1822511 - RNA, 19 nt, Human
gaucuucuuuauaauucua

SEQ ID NO: 1822512 - RNA, 22 nt, Human
gaucuucuguggguuucuaaag

SEQ ID NO: 1822513 - RNA, 23 nt, Human
gaugcaccagcccuuagcaggga

SEQ ID NO: 1822514 - RNA, 15 nt, Human
gaugcaccagcccuu

SEQ ID NO: 1822515 - RNA, 14 nt, Human
gaugcaccagcccu

SEQ ID NO: 1822516 - RNA, 14 nt, Human
gaugagaggaaauc

SEQ ID NO: 1822517 - RNA, 18 nt, Human
gaugaccuugaaugaugc

SEQ ID NO: 1822518 - RNA, 23 nt, Human
gaugagaaauaaaguuucuguug

SEQ ID NO: 1822519 - RNA, 20 nt, Human
gaugaccuugaaugaugcca

SEQ ID NO: 1822520 - RNA, 16 nt, Human
gaugccugguggcagc

SEQ ID NO: 1822521 - RNA, 15 nt, Human
gaugccugguggcag

SEQ ID NO: 1822522 - RNA, 14 nt, Human
gaugccugguggca

SEQ ID NO: 1822523 - RNA, 14 nt, Human
gaugcagugcuucc

SEQ ID NO: 1822524 - RNA, 16 nt, Human
gaugagaggaaaucac

SEQ ID NO: 1822525 - RNA, 16 nt, Human
gauccucccaggcuuc

SEQ ID NO: 1822526 - RNA, 12 nt, Human
gauccugagcca

SEQ ID NO: 1822527 - RNA, 13 nt, Human
gaucuaggaagac

SEQ ID NO: 1822528 - RNA, 14 nt, Human
gaucuaggaagacu

SEQ ID NO: 1822529 - RNA, 18 nt, Human
gaucuaggaagacuuugg

SEQ ID NO: 1822530 - RNA, 20 nt, Human
gaucuaggaagacuuuggaa

SEQ ID NO: 1822531 - RNA, 16 nt, Human
gaucauccacugugcc

SEQ ID NO: 1822532 - RNA, 13 nt, Human
gaucauccacugu

SEQ ID NO: 1822533 - RNA, 18 nt, Human
gauccucccaccucagcc

SEQ ID NO: 1822534 - RNA, 17 nt, Human
gauccucccaccucagc

SEQ ID NO: 1822535 - RNA, 16 nt, Human
gauccucccaccucag

SEQ ID NO: 1822536 - RNA, 14 nt, Human
gauccuccaggugc

SEQ ID NO: 1822537 - RNA, 23 nt, Human
gauccuaaugaaugcauaaaaug

SEQ ID NO: 1822538 - RNA, 18 nt, Human
gauccuaggcauuugcug

SEQ ID NO: 1822539 - RNA, 17 nt, Human
gauaggucagugcaaau

SEQ ID NO: 1822540 - RNA, 16 nt, Human
gauacaaaagcaugug

SEQ ID NO: 1822541 - RNA, 17 nt, Human
gauacaaaagcauguga

SEQ ID NO: 1822542 - RNA, 18 nt, Human
gauaauucuagcuuugag

SEQ ID NO: 1822543 - RNA, 18 nt, Human
gauauaugcucugcaugu

SEQ ID NO: 1822544 - RNA, 18 nt, Human
gauauaaaagacugacca

SEQ ID NO: 1822545 - RNA, 20 nt, Human
gauagugucccacggugccu

SEQ ID NO: 1822546 - RNA, 20 nt, Human
gaucacggcucacugcagcc

SEQ ID NO: 1822547 - RNA, 23 nt, Human
gaucacggcucacugcagccuca

SEQ ID NO: 1822548 - RNA, 16 nt, Human
gaucacauguggacuu

SEQ ID NO: 1822549 - RNA, 13 nt, Human
gauaaacaguagu

SEQ ID NO: 1822550 - RNA, 13 nt, Human
gaguucugguucc

SEQ ID NO: 1822551 - RNA, 24 nt, Human
gauaauacaccacuacauucuguu

SEQ ID NO: 1822552 - RNA, 23 nt, Human
gauaauacaccacuacauucugu

SEQ ID NO: 1822553 - RNA, 12 nt, Human
gauaauacacca

SEQ ID NO: 1822554 - RNA, 23 nt, Human
gaaugaaccacaucuugcucugc

SEQ ID NO: 1822555 - RNA, 18 nt, Human
gaaugaaccacaucuugc

SEQ ID NO: 1822556 - RNA, 22 nt, Human
gaaugaaccacaucuugcucug

SEQ ID NO: 1822557 - RNA, 11 nt, Human
gaaugcagugg

SEQ ID NO: 1822558 - RNA, 14 nt, Human
gaaugcauaaaaug

SEQ ID NO: 1822559 - RNA, 13 nt, Human
gaaugcuuuagga

SEQ ID NO: 1822560 - RNA, 14 nt, Human
gaaugucaguguga

SEQ ID NO: 1822561 - RNA, 22 nt, Human
gaaugguuuucaaaauaaaaau

SEQ ID NO: 1822562 - RNA, 17 nt, Human
gaauucucuaguuugau

SEQ ID NO: 1822563 - RNA, 17 nt, Human
gaauucucagaaucuca

SEQ ID NO: 1822564 - RNA, 20 nt, Human
gaaugucagugugacugauc

SEQ ID NO: 1822565 - RNA, 21 nt, Human
gaaugucagugugacugaucu

SEQ ID NO: 1822566 - RNA, 19 nt, Human
gaauucucuaguuugauua

SEQ ID NO: 1822567 - RNA, 14 nt, Human
gaauugaaaaacca

SEQ ID NO: 1822568 - RNA, 14 nt, Human
gaauugaagcagga

SEQ ID NO: 1822569 - RNA, 15 nt, Human
gaauuucccaaagca

SEQ ID NO: 1822570 - RNA, 22 nt, Human
gaauuguaaggaaugauuaauu

SEQ ID NO: 1822571 - RNA, 15 nt, Human
gaauuguguuuauaa

SEQ ID NO: 1822572 - RNA, 23 nt, Human
gaauuguguuuauaauuuuaaau

SEQ ID NO: 1822573 - RNA, 22 nt, Human
gaauagcugggacuacaggugu

SEQ ID NO: 1822574 - RNA, 23 nt, Human
gaauagcugggacuacaggugug

SEQ ID NO: 1822575 - RNA, 22 nt, Human
gaauagcuuuaaugauaugcuu

SEQ ID NO: 1822576 - RNA, 13 nt, Human
gaauaccuguccc

SEQ ID NO: 1822577 - RNA, 15 nt, Human
gaauaccuguccccc

SEQ ID NO: 1822578 - RNA, 21 nt, Human
gaauacagaggcaacugcauu

SEQ ID NO: 1822579 - RNA, 17 nt, Human
gaauaauacaguaucuc

SEQ ID NO: 1822580 - RNA, 20 nt, Human
gaaguuugagaucagccugg

SEQ ID NO: 1822581 - RNA, 18 nt, Human
gaauaacauguaauuaag

SEQ ID NO: 1822582 - RNA, 19 nt, Human
gaauaacauguaauuaagu

SEQ ID NO: 1822583 - RNA, 23 nt, Human
gaaguaguggagccccugcucug

SEQ ID NO: 1822584 - RNA, 14 nt, Human
gaaguauccuucag

SEQ ID NO: 1822585 - RNA, 16 nt, Human
gaaguauccuucagcc

SEQ ID NO: 1822586 - RNA, 18 nt, Human
gaagucuuagauguauau

SEQ ID NO: 1822587 - RNA, 21 nt, Human
gaaguuucugccgcagcccug

SEQ ID NO: 1822588 - RNA, 15 nt, Human
gaagucuuagaugua

SEQ ID NO: 1822589 - RNA, 20 nt, Human
gaaguuucugccgcagcccu

SEQ ID NO: 1822590 - RNA, 15 nt, Human
gaaguacuggagaaa

SEQ ID NO: 1822591 - RNA, 18 nt, Human
gaaguacuauaauuuacc

SEQ ID NO: 1822592 - RNA, 22 nt, Human
gaaguaauaugcacacauuuuu

SEQ ID NO: 1822593 - RNA, 16 nt, Human
gaagggggcugggaca

SEQ ID NO: 1822594 - RNA, 19 nt, Human
gaagggggcugggacaugg

SEQ ID NO: 1822595 - RNA, 18 nt, Human
gaagauguagaggagaaa

SEQ ID NO: 1822596 - RNA, 20 nt, Human
gaagauaauauuaaggaaga

SEQ ID NO: 1822597 - RNA, 18 nt, Human
gaagcauuuacuuugugu

SEQ ID NO: 1822598 - RNA, 17 nt, Human
gaagcauuuacuuugug

SEQ ID NO: 1822599 - RNA, 20 nt, Human
gaagccagcaggcucucagg

SEQ ID NO: 1822600 - RNA, 21 nt, Human
gaagccagcaggcucucaggc

SEQ ID NO: 1822601 - RNA, 22 nt, Human
gaagccagcaggcucucaggcc

SEQ ID NO: 1822602 - RNA, 13 nt, Human
gaagcccaggaaa

SEQ ID NO: 1822603 - RNA, 15 nt, Human
gaagcccaggaaagg

SEQ ID NO: 1822604 - RNA, 16 nt, Human
gaagcccaggaaaggc

SEQ ID NO: 1822605 - RNA, 19 nt, Human
gaagcccaggaaaggcucc

SEQ ID NO: 1822606 - RNA, 23 nt, Human
gaagcccuucuaccuuccugcaa

SEQ ID NO: 1822607 - RNA, 14 nt, Human
gaagacuuuggaaa

SEQ ID NO: 1822608 - RNA, 17 nt, Human
gaagacuuuggaaagag

SEQ ID NO: 1822609 - RNA, 20 nt, Human
gaagacuuuucuuucagcca

SEQ ID NO: 1822610 - RNA, 19 nt, Human
gaagagaaugcacaaacag

SEQ ID NO: 1822611 - RNA, 22 nt, Human
gaacucaucuagguaaauuaca

SEQ ID NO: 1822612 - RNA, 20 nt, Human
gaacucaucuagguaaauua

SEQ ID NO: 1822613 - RNA, 21 nt, Human
gaacucaucuagguaaauuac

SEQ ID NO: 1822614 - RNA, 23 nt, Human
gaacuuugaccucugcagcaaua

SEQ ID NO: 1822615 - RNA, 11 nt, Human
gaagacuuugg

SEQ ID NO: 1822616 - RNA, 13 nt, Human
gaagacuuuggaa

SEQ ID NO: 1822617 - RNA, 22 nt, Human
gaaccuuuugagugccuuacac

SEQ ID NO: 1822618 - RNA, 15 nt, Human
gaacguuuuuccugu

SEQ ID NO: 1822619 - RNA, 12 nt, Human
gaacguuuuucc

SEQ ID NO: 1822620 - RNA, 14 nt, Human
gaacuacugaggau

SEQ ID NO: 1822621 - RNA, 18 nt, Human
gaaccuuuugagugccuu

SEQ ID NO: 1822622 - RNA, 19 nt, Human
gaaccuuuugagugccuua

SEQ ID NO: 1822623 - RNA, 21 nt, Human
gaaccuuuugagugccuuaca

SEQ ID NO: 1822624 - RNA, 15 nt, Human
gaacauugguucuuu

SEQ ID NO: 1822625 - RNA, 17 nt, Human
gaacauugcaauagaaa

SEQ ID NO: 1822626 - RNA, 15 nt, Human
gaacauugcaauaga

SEQ ID NO: 1822627 - RNA, 13 nt, Human
gaacauugcaaua

SEQ ID NO: 1822628 - RNA, 14 nt, Human
gaacaucccuccug

SEQ ID NO: 1822629 - RNA, 16 nt, Human
gaaauuguauuacaaa

SEQ ID NO: 1822630 - RNA, 23 nt, Human
gaaaauaaaucaaugcuauaacu

SEQ ID NO: 1822631 - RNA, 18 nt, Human
gaaauuguauuacaaauc

SEQ ID NO: 1822632 - RNA, 16 nt, Human
gaaauuuauaaacuuu

SEQ ID NO: 1822633 - RNA, 17 nt, Human
gaaauuuauaaacuuuu

SEQ ID NO: 1822634 - RNA, 13 nt, Human
gaacacucugaga

SEQ ID NO: 1822635 - RNA, 14 nt, Human
gaacacucugagac

SEQ ID NO: 1822636 - RNA, 15 nt, Human
gaacacucugagacu

SEQ ID NO: 1822637 - RNA, 20 nt, Human
gaacagugauuaccagggac

SEQ ID NO: 1822638 - RNA, 16 nt, Human
gaacagugauuaccag

SEQ ID NO: 1822639 - RNA, 11 nt, Human
gacguguuaug

SEQ ID NO: 1822640 - RNA, 14 nt, Human
gacguguuaugacu

SEQ ID NO: 1822641 - RNA, 15 nt, Human
gacguguuaugacuc

SEQ ID NO: 1822642 - RNA, 16 nt, Human
gacuaacuugucuuug

SEQ ID NO: 1822643 - RNA, 23 nt, Human
gacuaacuugucuuuggacccug

SEQ ID NO: 1822644 - RNA, 13 nt, Human
gacggagucccac

SEQ ID NO: 1822645 - RNA, 21 nt, Human
gacgcugugcugcccugccca

SEQ ID NO: 1822646 - RNA, 22 nt, Human
gacgcugugcugcccugcccac

SEQ ID NO: 1822647 - RNA, 22 nt, Human
gaccuuuaagagaaaugagcug

SEQ ID NO: 1822648 - RNA, 11 nt, Human
gaccuuucaau

SEQ ID NO: 1822649 - RNA, 19 nt, Human
gaccuuucaauaggaaaaa

SEQ ID NO: 1822650 - RNA, 20 nt, Human
gaccuuucaauaggaaaaac

SEQ ID NO: 1822651 - RNA, 17 nt, Human
gacgugauuuugcugua

SEQ ID NO: 1822652 - RNA, 16 nt, Human
gacgugauuuugcugu

SEQ ID NO: 1822653 - RNA, 14 nt, Human
gaccuugaacuggg

SEQ ID NO: 1822654 - RNA, 20 nt, Human
gaccuucuccuucaccuuug

SEQ ID NO: 1822655 - RNA, 21 nt, Human
gaccuucuccuucaccuuugu

SEQ ID NO: 1822656 - RNA, 14 nt, Human
gaccuucuccuuca

SEQ ID NO: 1822657 - RNA, 15 nt, Human
gaccuucuccuucac

SEQ ID NO: 1822658 - RNA, 16 nt, Human
gaccuucuccuucacc

SEQ ID NO: 1822659 - RNA, 14 nt, Human
gaccuuaaaugcaa

SEQ ID NO: 1822660 - RNA, 19 nt, Human
gaccuguggccaaguucuu

SEQ ID NO: 1822661 - RNA, 19 nt, Human
gacccuugccgucuaccug

SEQ ID NO: 1822662 - RNA, 20 nt, Human
gacccuugccgucuaccuga

SEQ ID NO: 1822663 - RNA, 23 nt, Human
gacccuugccgucuaccugaggg

SEQ ID NO: 1822664 - RNA, 15 nt, Human
gacccuugugguccc

SEQ ID NO: 1822665 - RNA, 17 nt, Human
gacuggauguaccacca

SEQ ID NO: 1822666 - RNA, 23 nt, Human
gacuggccaagguuuggggaaga

SEQ ID NO: 1822667 - RNA, 14 nt, Human
gacuucagcucugu

SEQ ID NO: 1822668 - RNA, 12 nt, Human
gacuucaucccu

SEQ ID NO: 1822669 - RNA, 20 nt, Human
gacuucaucccucuggggcu

SEQ ID NO: 1822670 - RNA, 16 nt, Human
gacuuauuuauauaaa

SEQ ID NO: 1822671 - RNA, 15 nt, Human
gacuuagcugggaga

SEQ ID NO: 1822672 - RNA, 23 nt, Human
gacuuacuguacaugaaaacaca

SEQ ID NO: 1822673 - RNA, 18 nt, Human
gacuuacuguacaugaaa

SEQ ID NO: 1822674 - RNA, 12 nt, Human
gacuuacuguac

SEQ ID NO: 1822675 - RNA, 16 nt, Human
gacuuacuguacauga

SEQ ID NO: 1822676 - RNA, 15 nt, Human
gacuuacuguacaug

SEQ ID NO: 1822677 - RNA, 20 nt, Human
gacugccagucccccugccc

SEQ ID NO: 1822678 - RNA, 13 nt, Human
gacugagaaauuu

SEQ ID NO: 1822679 - RNA, 18 nt, Human
gacugaguacguugugca

SEQ ID NO: 1822680 - RNA, 16 nt, Human
gacugaggggagggga

SEQ ID NO: 1822681 - RNA, 15 nt, Human
gacuacaggcaccca

SEQ ID NO: 1822682 - RNA, 13 nt, Human
gacuacaggcacc

SEQ ID NO: 1822683 - RNA, 18 nt, Human
gacuacaggcacccacca

SEQ ID NO: 1822684 - RNA, 18 nt, Human
gacuccugcaggcagcca

SEQ ID NO: 1822685 - RNA, 19 nt, Human
gacuccugcaggcagccag

SEQ ID NO: 1822686 - RNA, 20 nt, Human
gacuccugcaggcagccagg

SEQ ID NO: 1822687 - RNA, 21 nt, Human
gacuccugcaggcagccaggc

SEQ ID NO: 1822688 - RNA, 15 nt, Human
gacucuacagaggcc

SEQ ID NO: 1822689 - RNA, 15 nt, Human
gacucuaaagucugu

SEQ ID NO: 1822690 - RNA, 21 nt, Human
gacucuacagaggccaugggc

SEQ ID NO: 1822691 - RNA, 11 nt, Human
gacugagaaau

SEQ ID NO: 1822692 - RNA, 22 nt, Human
gacugaccaauauuguacaguu

SEQ ID NO: 1822693 - RNA, 21 nt, Human
gacugaccaauauuguacagu

SEQ ID NO: 1822694 - RNA, 19 nt, Human
gacccaaaaggcagaagca

SEQ ID NO: 1822695 - RNA, 18 nt, Human
gacccaaaaggcagaagc

SEQ ID NO: 1822696 - RNA, 19 nt, Human
gacccacuggacucaccuc

SEQ ID NO: 1822697 - RNA, 20 nt, Human
gacccaaaaggcagaagcaa

SEQ ID NO: 1822698 - RNA, 13 nt, Human
gacccaugcugcc

SEQ ID NO: 1822699 - RNA, 18 nt, Human
gacccaugcugcccugug

SEQ ID NO: 1822700 - RNA, 19 nt, Human
gacccaugcugcccuguga

SEQ ID NO: 1822701 - RNA, 20 nt, Human
gacccaugcugcccugugag

SEQ ID NO: 1822702 - RNA, 11 nt, Human
gacccugaggc

SEQ ID NO: 1822703 - RNA, 12 nt, Human
gacccugaggcc

SEQ ID NO: 1822704 - RNA, 16 nt, Human
gacccugaggcccaga

SEQ ID NO: 1822705 - RNA, 18 nt, Human
gacccugaggcccagagg

SEQ ID NO: 1822706 - RNA, 17 nt, Human
gacccugcccugugggc

SEQ ID NO: 1822707 - RNA, 20 nt, Human
gacccugcccugugggcccc

SEQ ID NO: 1822708 - RNA, 22 nt, Human
gacccugcccugugggccccca

SEQ ID NO: 1822709 - RNA, 22 nt, Human
gaccagacaccuugacagggca

SEQ ID NO: 1822710 - RNA, 18 nt, Human
gaccacugcagaagacag

SEQ ID NO: 1822711 - RNA, 16 nt, Human
gaccacugcagaagac

SEQ ID NO: 1822712 - RNA, 24 nt, Human
gaccagacaccuugacagggcaca

SEQ ID NO: 1822713 - RNA, 23 nt, Human
gaccagacaccuugacagggcac

SEQ ID NO: 1822714 - RNA, 21 nt, Human
gaccagagcugccaccugccu

SEQ ID NO: 1822715 - RNA, 20 nt, Human
gaccagcaccaucucuccuc

SEQ ID NO: 1822716 - RNA, 21 nt, Human
gaccagcaccaucucuccucc

SEQ ID NO: 1822717 - RNA, 14 nt, Human
gaccacacuccagc

SEQ ID NO: 1822718 - RNA, 16 nt, Human
gaccacacuccagcug

SEQ ID NO: 1822719 - RNA, 22 nt, Human
gaccacacuccagcugggauca

SEQ ID NO: 1822720 - RNA, 21 nt, Human
gaccaauauuguacaguuuuu

SEQ ID NO: 1822721 - RNA, 19 nt, Human
gaccaauauuguacaguuu

SEQ ID NO: 1822722 - RNA, 18 nt, Human
gaccaauauuguacaguu

SEQ ID NO: 1822723 - RNA, 17 nt, Human
gaccaauauuguacagu

SEQ ID NO: 1822724 - RNA, 18 nt, Human
gaccacaaaacuuuucua

SEQ ID NO: 1822725 - RNA, 18 nt, Human
gacaggcaagcaccuccu

SEQ ID NO: 1822726 - RNA, 17 nt, Human
gacaggcaagcaccucc

SEQ ID NO: 1822727 - RNA, 13 nt, Human
gacaggcaagcac

SEQ ID NO: 1822728 - RNA, 19 nt, Human
gacaggcaaugcuggcugu

SEQ ID NO: 1822729 - RNA, 18 nt, Human
gacaggcaaugcuggcug

SEQ ID NO: 1822730 - RNA, 21 nt, Human
gacaggcaagcaccuccugcc

SEQ ID NO: 1822731 - RNA, 20 nt, Human
gacaggcaagcaccuccugc

SEQ ID NO: 1822732 - RNA, 21 nt, Human
gacaggcauguucucugagga

SEQ ID NO: 1822733 - RNA, 20 nt, Human
gacaggcauguucucugagg

SEQ ID NO: 1822734 - RNA, 23 nt, Human
gacaggcaaugcuggcuguuggc

SEQ ID NO: 1822735 - RNA, 24 nt, Human
gacaggcaaugcuggcuguuggcu

SEQ ID NO: 1822736 - RNA, 22 nt, Human
gacaggcauguucucugaggac

SEQ ID NO: 1822737 - RNA, 14 nt, Human
gacagggcauggcc

SEQ ID NO: 1822738 - RNA, 15 nt, Human
gacagggcauggcca

SEQ ID NO: 1822739 - RNA, 20 nt, Human
gacagggcauggccaggugg

SEQ ID NO: 1822740 - RNA, 22 nt, Human
gacagggcauggccagguggcc

SEQ ID NO: 1822741 - RNA, 23 nt, Human
gacaucaacugcaucaagaugug

SEQ ID NO: 1822742 - RNA, 16 nt, Human
gacaucaacugcauca

SEQ ID NO: 1822743 - RNA, 16 nt, Human
gacagagugagacucu

SEQ ID NO: 1822744 - RNA, 21 nt, Human
gacagagucucacuguugccc

SEQ ID NO: 1822745 - RNA, 19 nt, Human
gacagagugagacucuguc

SEQ ID NO: 1822746 - RNA, 23 nt, Human
gacagaggcagccccauucugcc

SEQ ID NO: 1822747 - RNA, 13 nt, Human
gacagagggggug

SEQ ID NO: 1822748 - RNA, 12 nt, Human
gacagaggcagc

SEQ ID NO: 1822749 - RNA, 20 nt, Human
gacagagcuacacaggggaa

SEQ ID NO: 1822750 - RNA, 16 nt, Human
gacagacagcccucca

SEQ ID NO: 1822751 - RNA, 22 nt, Human
gacagacacaggcccggcucca

SEQ ID NO: 1822752 - RNA, 20 nt, Human
gacagacacaggcccggcuc

SEQ ID NO: 1822753 - RNA, 17 nt, Human
gacagacacaggcccgg

SEQ ID NO: 1822754 - RNA, 16 nt, Human
gacacuagaagauuuu

SEQ ID NO: 1822755 - RNA, 22 nt, Human
gacacgaauauugcugauggug

SEQ ID NO: 1822756 - RNA, 22 nt, Human
gaauuucccaaagcagugcaug

SEQ ID NO: 1822757 - RNA, 16 nt, Human
gaauuucccaaagcag

SEQ ID NO: 1822758 - RNA, 18 nt, Human
gaauuucccaaagcagug

SEQ ID NO: 1822759 - RNA, 20 nt, Human
cuugcuugauuguauggugg

SEQ ID NO: 1822760 - RNA, 14 nt, Human
cuuggaagcuccgc

SEQ ID NO: 1822761 - RNA, 20 nt, Human
cuuggaagcuccgcuuucua

SEQ ID NO: 1822762 - RNA, 22 nt, Human
cuugcucugcugacagacacag

SEQ ID NO: 1822763 - RNA, 19 nt, Human
cuugcucuugaugccuggc

SEQ ID NO: 1822764 - RNA, 17 nt, Human
cuugcucuugaugccug

SEQ ID NO: 1822765 - RNA, 18 nt, Human
cuugcucuugaugccugg

SEQ ID NO: 1822766 - RNA, 17 nt, Human
cuugcaugaggcuagug

SEQ ID NO: 1822767 - RNA, 13 nt, Human
cuugcaugaggcu

SEQ ID NO: 1822768 - RNA, 14 nt, Human
cuugcaugaggcua

SEQ ID NO: 1822769 - RNA, 13 nt, Human
cuugccacugccu

SEQ ID NO: 1822770 - RNA, 18 nt, Human
cuugcccuggugccucac

SEQ ID NO: 1822771 - RNA, 17 nt, Human
cuugaggguugggcugg

SEQ ID NO: 1822772 - RNA, 15 nt, Human
cuugaggguugggcu

SEQ ID NO: 1822773 - RNA, 12 nt, Human
cuugagccuggg

SEQ ID NO: 1822774 - RNA, 15 nt, Human
cuugagccugggagg

SEQ ID NO: 1822775 - RNA, 17 nt, Human
cuucuggcacuuggaga

SEQ ID NO: 1822776 - RNA, 21 nt, Human
cuugcagacucuacagaggcc

SEQ ID NO: 1822777 - RNA, 18 nt, Human
cuugcaauggcagccuug

SEQ ID NO: 1822778 - RNA, 17 nt, Human
cuugcaauggcagccuu

SEQ ID NO: 1822779 - RNA, 16 nt, Human
cuugcaauggcagccu

SEQ ID NO: 1822780 - RNA, 15 nt, Human
cuugcaauggcagcc

SEQ ID NO: 1822781 - RNA, 21 nt, Human
cuugaguugauucagcucugc

SEQ ID NO: 1822782 - RNA, 20 nt, Human
cuugaguugauucagcucug

SEQ ID NO: 1822783 - RNA, 18 nt, Human
cuugaguugauucagcuc

SEQ ID NO: 1822784 - RNA, 19 nt, Human
cuugaguugauucagcucu

SEQ ID NO: 1822785 - RNA, 22 nt, Human
cuuuaaaaaauuaaucugggcc

SEQ ID NO: 1822786 - RNA, 21 nt, Human
cuuuaaaaagcuccaaaugca

SEQ ID NO: 1822787 - RNA, 17 nt, Human
cuuuaccuuuuuuauac

SEQ ID NO: 1822788 - RNA, 20 nt, Human
cuuuaccuuuuuuauacaua

SEQ ID NO: 1822789 - RNA, 19 nt, Human
cuuuaccuuuuuuauacau

SEQ ID NO: 1822790 - RNA, 16 nt, Human
cuuguuaagauaguua

SEQ ID NO: 1822791 - RNA, 16 nt, Human
cuuguggucccacccc

SEQ ID NO: 1822792 - RNA, 19 nt, Human
cuuguggucccaccccaca

SEQ ID NO: 1822793 - RNA, 15 nt, Human
cuuguggucccaccc

SEQ ID NO: 1822794 - RNA, 15 nt, Human
cuuggggccuaugca

SEQ ID NO: 1822795 - RNA, 15 nt, Human
cuugguuuguaaauu

SEQ ID NO: 1822796 - RNA, 14 nt, Human
cuugguuuguaaau

SEQ ID NO: 1822797 - RNA, 20 nt, Human
cuugguuuguaaauuaacuu

SEQ ID NO: 1822798 - RNA, 22 nt, Human
cuuggagccaauggagacuguc

SEQ ID NO: 1822799 - RNA, 20 nt, Human
cuugggccacugugaagaga

SEQ ID NO: 1822800 - RNA, 19 nt, Human
gaaaauaacaauaaaagac

SEQ ID NO: 1822801 - RNA, 22 nt, Human
gaaaagucaaggguaggguggg

SEQ ID NO: 1822802 - RNA, 19 nt, Human
gaaaacaugcuacacacug

SEQ ID NO: 1822803 - RNA, 14 nt, Human
gaaaacguggcugc

SEQ ID NO: 1822804 - RNA, 19 nt, Human
gaaaacacuguucucugcc

SEQ ID NO: 1822805 - RNA, 18 nt, Human
gaaaacaugcuacacacu

SEQ ID NO: 1822806 - RNA, 16 nt, Human
gaaaacaugcuacaca

SEQ ID NO: 1822807 - RNA, 20 nt, Human
gaaaacacuguucucugccc

SEQ ID NO: 1822808 - RNA, 21 nt, Human
gaaaacacuguucucugcccu

SEQ ID NO: 1822809 - RNA, 16 nt, Human
cuuuuuuagaguugau

SEQ ID NO: 1822810 - RNA, 17 nt, Human
cuuuguuuuacugucuu

SEQ ID NO: 1822811 - RNA, 21 nt, Human
cuuuguuuguugucagcugaa

SEQ ID NO: 1822812 - RNA, 15 nt, Human
cuuuucuguuugcua

SEQ ID NO: 1822813 - RNA, 22 nt, Human
cuuuuguucuugguuuguaaau

SEQ ID NO: 1822814 - RNA, 12 nt, Human
cuuuggaaagac

SEQ ID NO: 1822815 - RNA, 23 nt, Human
cuuuggaaagacuuuuccaaccc

SEQ ID NO: 1822816 - RNA, 14 nt, Human
cuuugcuugaaaga

SEQ ID NO: 1822817 - RNA, 19 nt, Human
cuuugacaaagguaaauca

SEQ ID NO: 1822818 - RNA, 13 nt, Human
cuuuguggcuucc

SEQ ID NO: 1822819 - RNA, 12 nt, Human
cuuugugauuuu

SEQ ID NO: 1822820 - RNA, 19 nt, Human
cuuugugaggaagccgcug

SEQ ID NO: 1822821 - RNA, 16 nt, Human
cuuuguucuggcucuu

SEQ ID NO: 1822822 - RNA, 21 nt, Human
cuuuguucuggcucuuccagg

SEQ ID NO: 1822823 - RNA, 23 nt, Human
cuuugggaggccaaggugggagg

SEQ ID NO: 1822824 - RNA, 17 nt, Human
cuuugggccuggcuccc

SEQ ID NO: 1822825 - RNA, 23 nt, Human
cuuugugaggaagccgcuggggc

SEQ ID NO: 1822826 - RNA, 19 nt, Human
cuuuccucaaaacuucaga

SEQ ID NO: 1822827 - RNA, 13 nt, Human
cuuucugaaauaa

SEQ ID NO: 1822828 - RNA, 16 nt, Human
cuuuccucuuuggucu

SEQ ID NO: 1822829 - RNA, 15 nt, Human
cuuucugcagaaaca

SEQ ID NO: 1822830 - RNA, 16 nt, Human
cuuucuuccucugcug

SEQ ID NO: 1822831 - RNA, 19 nt, Human
cuuucuuuuuuuuuuuuga

SEQ ID NO: 1822832 - RNA, 17 nt, Human
cuuugacaaagguaaau

SEQ ID NO: 1822833 - RNA, 13 nt, Human
cuucgcuccugug

SEQ ID NO: 1822834 - RNA, 15 nt, Human
cuucgcuccuguguc

SEQ ID NO: 1822835 - RNA, 14 nt, Human
cuucgcuccugugu

SEQ ID NO: 1822836 - RNA, 16 nt, Human
cuucgcuccugugucu

SEQ ID NO: 1822837 - RNA, 17 nt, Human
cuucggccuccauccug

SEQ ID NO: 1822838 - RNA, 19 nt, Human
cuucggccuccauccugag

SEQ ID NO: 1822839 - RNA, 18 nt, Human
cuucggccuccauccuga

SEQ ID NO: 1822840 - RNA, 20 nt, Human
cuucgggaggucgaggcagg

SEQ ID NO: 1822841 - RNA, 21 nt, Human
cuucgggaggucgaggcagga

SEQ ID NO: 1822842 - RNA, 17 nt, Human
cuucugccauauucugu

SEQ ID NO: 1822843 - RNA, 15 nt, Human
cuucugccauauucu

SEQ ID NO: 1822844 - RNA, 21 nt, Human
cuucugccauauucuguuggc

SEQ ID NO: 1822845 - RNA, 20 nt, Human
cuucugccauuucugagauc

SEQ ID NO: 1822846 - RNA, 17 nt, Human
cuucugcuucagccucc

SEQ ID NO: 1822847 - RNA, 16 nt, Human
cuucugcuucagccuc

SEQ ID NO: 1822848 - RNA, 18 nt, Human
cuucugcuucagccuccc

SEQ ID NO: 1822849 - RNA, 22 nt, Human
cuucuccuucaccuuugucccc

SEQ ID NO: 1822850 - RNA, 20 nt, Human
cuucuccuuucacaaccuuc

SEQ ID NO: 1822851 - RNA, 22 nt, Human
cuucuccuuucacaaccuucug

SEQ ID NO: 1822852 - RNA, 14 nt, Human
cuucuccuuucaca

SEQ ID NO: 1822853 - RNA, 17 nt, Human
cuucuccuuucacaacc

SEQ ID NO: 1822854 - RNA, 15 nt, Human
cuucuccacccugcu

SEQ ID NO: 1822855 - RNA, 14 nt, Human
cuucuccacccugc

SEQ ID NO: 1822856 - RNA, 16 nt, Human
cuucuccacccugcuc

SEQ ID NO: 1822857 - RNA, 17 nt, Human
cuucuccaggcuguauc

SEQ ID NO: 1822858 - RNA, 18 nt, Human
cuucauuuccugugucuu

SEQ ID NO: 1822859 - RNA, 13 nt, Human
cuucagugccuua

SEQ ID NO: 1822860 - RNA, 14 nt, Human
cuucagugccuuau

SEQ ID NO: 1822861 - RNA, 11 nt, Human
cuucagugccu

SEQ ID NO: 1822862 - RNA, 12 nt, Human
cuucagugccuu

SEQ ID NO: 1822863 - RNA, 13 nt, Human
cuucauuuggaga

SEQ ID NO: 1822864 - RNA, 14 nt, Human
cuucauuuggagau

SEQ ID NO: 1822865 - RNA, 23 nt, Human
cuuccacaagagcccaggccucc

SEQ ID NO: 1822866 - RNA, 22 nt, Human
cuuccacaagagcccaggccuc

SEQ ID NO: 1822867 - RNA, 15 nt, Human
cuucaggcucuucuc

SEQ ID NO: 1822868 - RNA, 16 nt, Human
cuucaggcucuucucc

SEQ ID NO: 1822869 - RNA, 17 nt, Human
cuucaggcucuucuccu

SEQ ID NO: 1822870 - RNA, 18 nt, Human
cuucaggcucuucuccuu

SEQ ID NO: 1822871 - RNA, 14 nt, Human
cuucaggcucuucu

SEQ ID NO: 1822872 - RNA, 11 nt, Human
cuucagcugac

SEQ ID NO: 1822873 - RNA, 22 nt, Human
cuuccaggggugggacacccug

SEQ ID NO: 1822874 - RNA, 24 nt, Human
cuuccaggggugggacacccugug

SEQ ID NO: 1822875 - RNA, 14 nt, Human
cuuccagugaggcu

SEQ ID NO: 1822876 - RNA, 15 nt, Human
cuuccagugaggcuc

SEQ ID NO: 1822877 - RNA, 15 nt, Human
cuucccgcucagccc

SEQ ID NO: 1822878 - RNA, 16 nt, Human
cuucccgcucagcccu

SEQ ID NO: 1822879 - RNA, 17 nt, Human
cuucccgcucagcccuc

SEQ ID NO: 1822880 - RNA, 18 nt, Human
cuucccgcucagcccucc

SEQ ID NO: 1822881 - RNA, 16 nt, Human
cuuaucaaaggacacc

SEQ ID NO: 1822882 - RNA, 14 nt, Human
cuuaucaaaggaca

SEQ ID NO: 1822883 - RNA, 23 nt, Human
cuuaugauagcaaauggccucau

SEQ ID NO: 1822884 - RNA, 15 nt, Human
cuuauuuaaugaaag

SEQ ID NO: 1822885 - RNA, 13 nt, Human
cuuauaauuuaaa

SEQ ID NO: 1822886 - RNA, 20 nt, Human
cuuaggugauccacucgccu

SEQ ID NO: 1822887 - RNA, 17 nt, Human
cuuagguuggcaaaaag

SEQ ID NO: 1822888 - RNA, 14 nt, Human
cuuauaauuuaaaa

SEQ ID NO: 1822889 - RNA, 15 nt, Human
cuuauacauuugaua

SEQ ID NO: 1822890 - RNA, 19 nt, Human
cuuauaggaauugacccac

SEQ ID NO: 1822891 - RNA, 15 nt, Human
cuuacgugaguccug

SEQ ID NO: 1822892 - RNA, 19 nt, Human
cuuacuaguuucccuugca

SEQ ID NO: 1822893 - RNA, 16 nt, Human
cuuacuguacaugaaa

SEQ ID NO: 1822894 - RNA, 14 nt, Human
cuuacuuaguguua

SEQ ID NO: 1822895 - RNA, 15 nt, Human
cuuagaagucacaca

SEQ ID NO: 1822896 - RNA, 14 nt, Human
cuuagacagucccu

SEQ ID NO: 1822897 - RNA, 15 nt, Human
cuuagacagucccug

SEQ ID NO: 1822898 - RNA, 16 nt, Human
cuuagacagucccugc

SEQ ID NO: 1822899 - RNA, 17 nt, Human
cuuagaaauugcauuuc

SEQ ID NO: 1822900 - RNA, 15 nt, Human
cuuagaaccuuucuu

SEQ ID NO: 1822901 - RNA, 19 nt, Human
cuuagacagucccugccaa

SEQ ID NO: 1822902 - RNA, 17 nt, Human
cuuagacagucccugcc

SEQ ID NO: 1822903 - RNA, 18 nt, Human
cuuagacagucccugcca

SEQ ID NO: 1822904 - RNA, 12 nt, Human
cuguuuagauaa

SEQ ID NO: 1822905 - RNA, 17 nt, Human
cugguugaugccuguga

SEQ ID NO: 1822906 - RNA, 18 nt, Human
cuguuuguuucugaaagg

SEQ ID NO: 1822907 - RNA, 17 nt, Human
cuguuuucucuugagag

SEQ ID NO: 1822908 - RNA, 14 nt, Human
cuguuuucucuuga

SEQ ID NO: 1822909 - RNA, 21 nt, Human
cuguuuuauuuuaauucaguu

SEQ ID NO: 1822910 - RNA, 21 nt, Human
cuguuuguuucugaaagggac

SEQ ID NO: 1822911 - RNA, 23 nt, Human
cuguuuguuucugaaagggacgc

SEQ ID NO: 1822912 - RNA, 21 nt, Human
cuuaaguuaguuccacugaga

SEQ ID NO: 1822913 - RNA, 19 nt, Human
cuuaaguuaguuccacuga

SEQ ID NO: 1822914 - RNA, 16 nt, Human
cuuaaguuuauacucu

SEQ ID NO: 1822915 - RNA, 16 nt, Human
cuuaaucuaaauggaa

SEQ ID NO: 1822916 - RNA, 14 nt, Human
cuuaaucuaaaugg

SEQ ID NO: 1822917 - RNA, 18 nt, Human
cuuaaugccacuaaauug

SEQ ID NO: 1822918 - RNA, 22 nt, Human
cuuaaaugcaaccauuugaaac

SEQ ID NO: 1822919 - RNA, 22 nt, Human
cuuaacuucacauauugauuuc

SEQ ID NO: 1822920 - RNA, 17 nt, Human
cuuaacuucacauauug

SEQ ID NO: 1822921 - RNA, 16 nt, Human
cuuaacuucacauauu

SEQ ID NO: 1822922 - RNA, 15 nt, Human
cuuaacuucacauau

SEQ ID NO: 1822923 - RNA, 14 nt, Human
cuuaacuucacaua

SEQ ID NO: 1822924 - RNA, 12 nt, Human
cuuaacuucaca

SEQ ID NO: 1822925 - RNA, 21 nt, Human
cugacauuguuggccaaagcc

SEQ ID NO: 1822926 - RNA, 11 nt, Human
cugacccacug

SEQ ID NO: 1822927 - RNA, 19 nt, Human
cugacaggcaaugcuggcu

SEQ ID NO: 1822928 - RNA, 18 nt, Human
cugacaggcaaugcuggc

SEQ ID NO: 1822929 - RNA, 17 nt, Human
cugacaggcaaugcugg

SEQ ID NO: 1822930 - RNA, 16 nt, Human
cugacaggcaaugcug

SEQ ID NO: 1822931 - RNA, 20 nt, Human
cugacaggcaaugcuggcug

SEQ ID NO: 1822932 - RNA, 17 nt, Human
cugacauuguuggccaa

SEQ ID NO: 1822933 - RNA, 21 nt, Human
cugacagacacaggcccggcu

SEQ ID NO: 1822934 - RNA, 17 nt, Human
cugacagacagcccucc

SEQ ID NO: 1822935 - RNA, 19 nt, Human
cugacagacagcccuccau

SEQ ID NO: 1822936 - RNA, 11 nt, Human
cugacaggcaa

SEQ ID NO: 1822937 - RNA, 19 nt, Human
cugacagacacaggcccgg

SEQ ID NO: 1822938 - RNA, 21 nt, Human
cugaauauugccauuaugcuu

SEQ ID NO: 1822939 - RNA, 16 nt, Human
cugaagucacacagug

SEQ ID NO: 1822940 - RNA, 15 nt, Human
cugaagucacacagu

SEQ ID NO: 1822941 - RNA, 14 nt, Human
cugaagucacacag

SEQ ID NO: 1822942 - RNA, 17 nt, Human
cugaagucacugcacag

SEQ ID NO: 1822943 - RNA, 16 nt, Human
cugaagucacugcaca

SEQ ID NO: 1822944 - RNA, 22 nt, Human
cugaagucacugcacagugcau

SEQ ID NO: 1822945 - RNA, 24 nt, Human
cugaagucuuuguacagacaacaa

SEQ ID NO: 1822946 - RNA, 16 nt, Human
cugaauacagaggcaa

SEQ ID NO: 1822947 - RNA, 21 nt, Human
cugaagacucauucuucugua

SEQ ID NO: 1822948 - RNA, 15 nt, Human
cugaacuuggcgcug

SEQ ID NO: 1822949 - RNA, 16 nt, Human
cugaacuuggcgcugc

SEQ ID NO: 1822950 - RNA, 21 nt, Human
cugaacuuggcgcugccccug

SEQ ID NO: 1822951 - RNA, 21 nt, Human
cugaaccuggguaacuaggga

SEQ ID NO: 1822952 - RNA, 18 nt, Human
cucuuugggccuggcucc

SEQ ID NO: 1822953 - RNA, 19 nt, Human
cucuuuggucuacacugug

SEQ ID NO: 1822954 - RNA, 21 nt, Human
cucuuuggucuacacugugcu

SEQ ID NO: 1822955 - RNA, 12 nt, Human
cucuucuccagg

SEQ ID NO: 1822956 - RNA, 19 nt, Human
cucuucuccacuggaugga

SEQ ID NO: 1822957 - RNA, 15 nt, Human
cucuucuccacugga

SEQ ID NO: 1822958 - RNA, 17 nt, Human
cucuucuccacuggaug

SEQ ID NO: 1822959 - RNA, 14 nt, Human
cucuucuccacugg

SEQ ID NO: 1822960 - RNA, 23 nt, Human
cucuuccaggcugggagagccuu

SEQ ID NO: 1822961 - RNA, 22 nt, Human
cucuuccaggcugggagagccu

SEQ ID NO: 1822962 - RNA, 21 nt, Human
cucuuccaggcugggagagcc

SEQ ID NO: 1822963 - RNA, 13 nt, Human
cucuucuccuuuc

SEQ ID NO: 1822964 - RNA, 15 nt, Human
cucuucuccuuucac

SEQ ID NO: 1822965 - RNA, 16 nt, Human
cucuucuccuuucaca

SEQ ID NO: 1822966 - RNA, 15 nt, Human
cucuggagcccacug

SEQ ID NO: 1822967 - RNA, 17 nt, Human
cucuggcagcucagaga

SEQ ID NO: 1822968 - RNA, 18 nt, Human
cucuggcagcucagagag

SEQ ID NO: 1822969 - RNA, 20 nt, Human
cucuguucugcacacagcac

SEQ ID NO: 1822970 - RNA, 21 nt, Human
cucuguucugcacacagcacg

SEQ ID NO: 1822971 - RNA, 19 nt, Human
cucuguucugcacacagca

SEQ ID NO: 1822972 - RNA, 20 nt, Human
cucuggcagcucagagaggg

SEQ ID NO: 1822973 - RNA, 19 nt, Human
cucuggcagcucagagagg

SEQ ID NO: 1822974 - RNA, 13 nt, Human
cucuuaaaaccca

SEQ ID NO: 1822975 - RNA, 24 nt, Human
cucuuaaaacccaagugccuuagc

SEQ ID NO: 1822976 - RNA, 19 nt, Human
cucuucaguuaagccuuug

SEQ ID NO: 1822977 - RNA, 20 nt, Human
cucuucaguuaagccuuugg

SEQ ID NO: 1822978 - RNA, 23 nt, Human
cucuucaguuaagccuuuggaaa

SEQ ID NO: 1822979 - RNA, 15 nt, Human
cucuuuggacacuca

SEQ ID NO: 1822980 - RNA, 18 nt, Human
cucuuuggacacucacac

SEQ ID NO: 1822981 - RNA, 13 nt, Human
cucuuucccuccc

SEQ ID NO: 1822982 - RNA, 17 nt, Human
cucuuuccaucuacccu

SEQ ID NO: 1822983 - RNA, 15 nt, Human
cucuugaccucaggu

SEQ ID NO: 1822984 - RNA, 13 nt, Human
cucuugaccucag

SEQ ID NO: 1822985 - RNA, 16 nt, Human
cucuugaccucaggug

SEQ ID NO: 1822986 - RNA, 18 nt, Human
cucuugaacuccugaccu

SEQ ID NO: 1822987 - RNA, 18 nt, Human
cucuucuggguuccuucc

SEQ ID NO: 1822988 - RNA, 18 nt, Human
cucuugguccugcugcag

SEQ ID NO: 1822989 - RNA, 19 nt, Human
cucuugguccugcugcagu

SEQ ID NO: 1822990 - RNA, 22 nt, Human
cucucaggccagcugcuugggc

SEQ ID NO: 1822991 - RNA, 23 nt, Human
cucucaggccagcugcuugggcu

SEQ ID NO: 1822992 - RNA, 16 nt, Human
cucuccacugccuucg

SEQ ID NO: 1822993 - RNA, 21 nt, Human
cucuccauucccguggaacgu

SEQ ID NO: 1822994 - RNA, 12 nt, Human
cucuccagcccc

SEQ ID NO: 1822995 - RNA, 13 nt, Human
cucuccagccccu

SEQ ID NO: 1822996 - RNA, 13 nt, Human
cucucccaucacu

SEQ ID NO: 1822997 - RNA, 20 nt, Human
cucucccaucacuucccuac

SEQ ID NO: 1822998 - RNA, 14 nt, Human
cucucccaucacuu

SEQ ID NO: 1822999 - RNA, 18 nt, Human
cucucccaucacuucccu

SEQ ID NO: 1823000 - RNA, 13 nt, Human
cucuccccagcaa

SEQ ID NO: 1823001 - RNA, 15 nt, Human
cucuccuguaccucu

SEQ ID NO: 1823002 - RNA, 14 nt, Human
cucuccuguaccuc

SEQ ID NO: 1823003 - RNA, 13 nt, Human
cucuccuguaccu

SEQ ID NO: 1823004 - RNA, 18 nt, Human
cucuccuguaccucuuga

SEQ ID NO: 1823005 - RNA, 17 nt, Human
cucuccuguaccucuug

SEQ ID NO: 1823006 - RNA, 22 nt, Human
cucuccuguaccucuugagccu

SEQ ID NO: 1823007 - RNA, 12 nt, Human
cucucugcaggu

SEQ ID NO: 1823008 - RNA, 13 nt, Human
cucucugcagguc

SEQ ID NO: 1823009 - RNA, 14 nt, Human
cucucugcaggucc

SEQ ID NO: 1823010 - RNA, 16 nt, Human
cucucugcaggucccu

SEQ ID NO: 1823011 - RNA, 17 nt, Human
cucucugcaggucccua

SEQ ID NO: 1823012 - RNA, 19 nt, Human
cucucugcaggucccuaau

SEQ ID NO: 1823013 - RNA, 22 nt, Human
cucucugcaggucccuaauaaa

SEQ ID NO: 1823014 - RNA, 15 nt, Human
cucucucacuccuug

SEQ ID NO: 1823015 - RNA, 16 nt, Human
cucucucacuccuuga

SEQ ID NO: 1823016 - RNA, 12 nt, Human
cucucucaggcc

SEQ ID NO: 1823017 - RNA, 23 nt, Human
cucugcauacucauuaggauggc

SEQ ID NO: 1823018 - RNA, 23 nt, Human
cucugcaggucccuaauaaagcu

SEQ ID NO: 1823019 - RNA, 10 nt, Human
cucugcacaa

SEQ ID NO: 1823020 - RNA, 17 nt, Human
cucugaugaagaggagu

SEQ ID NO: 1823021 - RNA, 22 nt, Human
cucugcaagaauugaagcagga

SEQ ID NO: 1823022 - RNA, 20 nt, Human
cucugagacucgcgacaaug

SEQ ID NO: 1823023 - RNA, 12 nt, Human
cucucugcccua

SEQ ID NO: 1823024 - RNA, 13 nt, Human
cucucugcccuaa

SEQ ID NO: 1823025 - RNA, 21 nt, Human
cucucugcccuaaugcgcagg

SEQ ID NO: 1823026 - RNA, 16 nt, Human
cucugagcaaaugugg

SEQ ID NO: 1823027 - RNA, 15 nt, Human
cucugagccuuggga

SEQ ID NO: 1823028 - RNA, 14 nt, Human
cucugccuccucuu

SEQ ID NO: 1823029 - RNA, 12 nt, Human
cucugcccugcg

SEQ ID NO: 1823030 - RNA, 12 nt, Human
cucugcccuugg

SEQ ID NO: 1823031 - RNA, 23 nt, Human
cucugcccuaaugcgcaggcugg

SEQ ID NO: 1823032 - RNA, 11 nt, Human
cucugcccugc

SEQ ID NO: 1823033 - RNA, 14 nt, Human
cucugcccuccaag

SEQ ID NO: 1823034 - RNA, 15 nt, Human
cucugcccuccaaga

SEQ ID NO: 1823035 - RNA, 16 nt, Human
cucugcccuccaagac

SEQ ID NO: 1823036 - RNA, 23 nt, Human
cucugcccuccaagaccuucucc

SEQ ID NO: 1823037 - RNA, 16 nt, Human
cucugccucugacaca

SEQ ID NO: 1823038 - RNA, 14 nt, Human
cucugccucugaca

SEQ ID NO: 1823039 - RNA, 15 nt, Human
cucugccuccucuuc

SEQ ID NO: 1823040 - RNA, 16 nt, Human
cucugccuccucuuca

SEQ ID NO: 1823041 - RNA, 15 nt, Human
cucugcuuuggaaau

SEQ ID NO: 1823042 - RNA, 14 nt, Human
cucuggaauuugaa

SEQ ID NO: 1823043 - RNA, 14 nt, Human
cucuggacaggcau

SEQ ID NO: 1823044 - RNA, 12 nt, Human
cucuggagccca

SEQ ID NO: 1823045 - RNA, 14 nt, Human
cucauucuucugua

SEQ ID NO: 1823046 - RNA, 13 nt, Human
cucauucuucugu

SEQ ID NO: 1823047 - RNA, 21 nt, Human
cucauuccaccuucccaugcc

SEQ ID NO: 1823048 - RNA, 18 nt, Human
cucauuccaccuucccau

SEQ ID NO: 1823049 - RNA, 23 nt, Human
cucauucuucuguacgucugaca

SEQ ID NO: 1823050 - RNA, 13 nt, Human
cucauugaccuga

SEQ ID NO: 1823051 - RNA, 15 nt, Human
cucauugaccugagg

SEQ ID NO: 1823052 - RNA, 16 nt, Human
cucauugaccugaggc

SEQ ID NO: 1823053 - RNA, 21 nt, Human
cucaucuagguaaauuacagu

SEQ ID NO: 1823054 - RNA, 17 nt, Human
cucaucuccccaucauu

SEQ ID NO: 1823055 - RNA, 21 nt, Human
cucauuagcauuuugcuaaau

SEQ ID NO: 1823056 - RNA, 18 nt, Human
cucauuaggauggcuagu

SEQ ID NO: 1823057 - RNA, 17 nt, Human
cucauuaggauggcuag

SEQ ID NO: 1823058 - RNA, 19 nt, Human
cucauaguaugguggcugg

SEQ ID NO: 1823059 - RNA, 18 nt, Human
cucauaguaugguggcug

SEQ ID NO: 1823060 - RNA, 20 nt, Human
cucauaguaugguggcuggg

SEQ ID NO: 1823061 - RNA, 19 nt, Human
cucaggugucccugcacuu

SEQ ID NO: 1823062 - RNA, 14 nt, Human
cucaggugagaagc

SEQ ID NO: 1823063 - RNA, 18 nt, Human
cucaggugucccugcacu

SEQ ID NO: 1823064 - RNA, 17 nt, Human
cucaggugucccugcac

SEQ ID NO: 1823065 - RNA, 16 nt, Human
cucaggugucccugca

SEQ ID NO: 1823066 - RNA, 15 nt, Human
cucaggugucccugc

SEQ ID NO: 1823067 - RNA, 22 nt, Human
cucagguggggucacucuggca

SEQ ID NO: 1823068 - RNA, 23 nt, Human
cucagguggggucacucuggcag

SEQ ID NO: 1823069 - RNA, 15 nt, Human
cucaggucuguuuuc

SEQ ID NO: 1823070 - RNA, 17 nt, Human
cucaggucccugcaggg

SEQ ID NO: 1823071 - RNA, 18 nt, Human
cucaggucccugcagggc

SEQ ID NO: 1823072 - RNA, 14 nt, Human
cucagggucccugg

SEQ ID NO: 1823073 - RNA, 23 nt, Human
cuaaaagguaugcaaucaaaucu

SEQ ID NO: 1823074 - RNA, 12 nt, Human
cucagggucccu

SEQ ID NO: 1823075 - RNA, 11 nt, Human
cuccaggcucc

SEQ ID NO: 1823076 - RNA, 21 nt, Human
cuccauccugaggcuccacuu

SEQ ID NO: 1823077 - RNA, 18 nt, Human
cuccaucuaaacugcccc

SEQ ID NO: 1823078 - RNA, 13 nt, Human
cuccaucuccacu

SEQ ID NO: 1823079 - RNA, 20 nt, Human
cuccaucgcugucaucucag

SEQ ID NO: 1823080 - RNA, 17 nt, Human
cuccaucuaaacugccc

SEQ ID NO: 1823081 - RNA, 23 nt, Human
cuccauccugaggcuccacuugg

SEQ ID NO: 1823082 - RNA, 18 nt, Human
cuccagcuguucagcugg

SEQ ID NO: 1823083 - RNA, 19 nt, Human
cuccagcuguucagcuggu

SEQ ID NO: 1823084 - RNA, 19 nt, Human
cuccagcuggguuggaaaa

SEQ ID NO: 1823085 - RNA, 13 nt, Human
cuccagcuguuca

SEQ ID NO: 1823086 - RNA, 15 nt, Human
cucccaggcauuccc

SEQ ID NO: 1823087 - RNA, 21 nt, Human
cucccaaggggcccaaauucu

SEQ ID NO: 1823088 - RNA, 22 nt, Human
cucccaaggggcccaaauucuu

SEQ ID NO: 1823089 - RNA, 14 nt, Human
cuccaugugggcua

SEQ ID NO: 1823090 - RNA, 24 nt, Human
cuccauucccguggaacguuuuuc

SEQ ID NO: 1823091 - RNA, 17 nt, Human
cucccaggcauucccca

SEQ ID NO: 1823092 - RNA, 19 nt, Human
cucccaggcauuccccagg

SEQ ID NO: 1823093 - RNA, 20 nt, Human
cucccaggcauuccccagga

SEQ ID NO: 1823094 - RNA, 21 nt, Human
cucccaggcauuccccaggag

SEQ ID NO: 1823095 - RNA, 22 nt, Human
cucccaggcauuccccaggagg

SEQ ID NO: 1823096 - RNA, 14 nt, Human
cucccaggcgcccc

SEQ ID NO: 1823097 - RNA, 12 nt, Human
cuccacccugcu

SEQ ID NO: 1823098 - RNA, 18 nt, Human
cuccaccugccagggaca

SEQ ID NO: 1823099 - RNA, 21 nt, Human
cuccaccugccagggacagag

SEQ ID NO: 1823100 - RNA, 17 nt, Human
cuccaccugccagggac

SEQ ID NO: 1823101 - RNA, 15 nt, Human
cuccaccugccaggg

SEQ ID NO: 1823102 - RNA, 11 nt, Human
cuccacccugc

SEQ ID NO: 1823103 - RNA, 20 nt, Human
cuccacauauuucagugagg

SEQ ID NO: 1823104 - RNA, 20 nt, Human
cuccagcucaccagccccag

SEQ ID NO: 1823105 - RNA, 19 nt, Human
cuccagcucaccagcccca

SEQ ID NO: 1823106 - RNA, 11 nt, Human
cuccacugccu

SEQ ID NO: 1823107 - RNA, 15 nt, Human
cuccagaccccuggc

SEQ ID NO: 1823108 - RNA, 17 nt, Human
cuccagaccccuggcuu

SEQ ID NO: 1823109 - RNA, 18 nt, Human
cuccagaccccuggcuuu

SEQ ID NO: 1823110 - RNA, 19 nt, Human
cuccagaccccuggcuuuu

SEQ ID NO: 1823111 - RNA, 20 nt, Human
cuccagaccccuggcuuuuc

SEQ ID NO: 1823112 - RNA, 20 nt, Human
cucgaguuacagacaaagcg

SEQ ID NO: 1823113 - RNA, 16 nt, Human
cucgaguuacagacaa

SEQ ID NO: 1823114 - RNA, 17 nt, Human
cucgagguuucucaaag

SEQ ID NO: 1823115 - RNA, 13 nt, Human
cucgcgacaaugc

SEQ ID NO: 1823116 - RNA, 19 nt, Human
cucgcuauugucaccaggg

SEQ ID NO: 1823117 - RNA, 15 nt, Human
cucgcgacaaugcaa

SEQ ID NO: 1823118 - RNA, 23 nt, Human
cucggccucccaaagugcuggga

SEQ ID NO: 1823119 - RNA, 22 nt, Human
cucggccucccaaagugcuggg

SEQ ID NO: 1823120 - RNA, 15 nt, Human
cucuaacaguggaca

SEQ ID NO: 1823121 - RNA, 19 nt, Human
cucuaacaguggacaaagu

SEQ ID NO: 1823122 - RNA, 22 nt, Human
cucuaaagucuguugauuaaag

SEQ ID NO: 1823123 - RNA, 22 nt, Human
cucgcuauugucaccagggcug

SEQ ID NO: 1823124 - RNA, 21 nt, Human
cucgcuauugucaccagggcu

SEQ ID NO: 1823125 - RNA, 18 nt, Human
cucggacuuagcugggag

SEQ ID NO: 1823126 - RNA, 19 nt, Human
cucggacuuagcugggaga

SEQ ID NO: 1823127 - RNA, 20 nt, Human
cuccuucuguccuacucugu

SEQ ID NO: 1823128 - RNA, 15 nt, Human
cuccuucuguccuac

SEQ ID NO: 1823129 - RNA, 14 nt, Human
cuccuucuguccua

SEQ ID NO: 1823130 - RNA, 11 nt, Human
cuccuucuucc

SEQ ID NO: 1823131 - RNA, 21 nt, Human
cuccuugaaaacacuguucuc

SEQ ID NO: 1823132 - RNA, 11 nt, Human
cuccugugugu

SEQ ID NO: 1823133 - RNA, 23 nt, Human
cuccugugucuugcaauggcagc

SEQ ID NO: 1823134 - RNA, 15 nt, Human
cuccugugucuugca

SEQ ID NO: 1823135 - RNA, 11 nt, Human
cuccugccacc

SEQ ID NO: 1823136 - RNA, 22 nt, Human
cuccugcaggcagccaggccac

SEQ ID NO: 1823137 - RNA, 15 nt, Human
cuccugcaggcagcc

SEQ ID NO: 1823138 - RNA, 21 nt, Human
cuccugcaggcagccaggcca

SEQ ID NO: 1823139 - RNA, 14 nt, Human
cuccugugugugcg

SEQ ID NO: 1823140 - RNA, 14 nt, Human
cuccuucaccuuug

SEQ ID NO: 1823141 - RNA, 16 nt, Human
cuccuucaccuuuguc

SEQ ID NO: 1823142 - RNA, 19 nt, Human
cuccuucaccuuugucccc

SEQ ID NO: 1823143 - RNA, 21 nt, Human
cuccuucaccuuuguccccac

SEQ ID NO: 1823144 - RNA, 22 nt, Human
cuccuaucagaaguuucucagc

SEQ ID NO: 1823145 - RNA, 12 nt, Human
cuccucagaucu

SEQ ID NO: 1823146 - RNA, 14 nt, Human
cuccucagaucuuc

SEQ ID NO: 1823147 - RNA, 19 nt, Human
cuccucuugccacugccuc

SEQ ID NO: 1823148 - RNA, 14 nt, Human
cuccugaccucagg

SEQ ID NO: 1823149 - RNA, 14 nt, Human
cuccugaccuuagg

SEQ ID NO: 1823150 - RNA, 21 nt, Human
cuccugaguagcuggauuaca

SEQ ID NO: 1823151 - RNA, 17 nt, Human
cuccugaguagcuggga

SEQ ID NO: 1823152 - RNA, 22 nt, Human
cuccugaguagcugggauuaca

SEQ ID NO: 1823153 - RNA, 13 nt, Human
cuccugcaggcag

SEQ ID NO: 1823154 - RNA, 14 nt, Human
cuccugcaggcagc

SEQ ID NO: 1823155 - RNA, 16 nt, Human
cucccuucucuucaca

SEQ ID NO: 1823156 - RNA, 14 nt, Human
cucccuuccucuuu

SEQ ID NO: 1823157 - RNA, 13 nt, Human
cucccuuccucuu

SEQ ID NO: 1823158 - RNA, 17 nt, Human
cucccuuucuucccuac

SEQ ID NO: 1823159 - RNA, 17 nt, Human
cucccuuggauuguccc

SEQ ID NO: 1823160 - RNA, 20 nt, Human
cucccuuggauuguccccga

SEQ ID NO: 1823161 - RNA, 13 nt, Human
cucccuuucaaca

SEQ ID NO: 1823162 - RNA, 12 nt, Human
cucccuucaacc

SEQ ID NO: 1823163 - RNA, 18 nt, Human
cucccuucaaccauuccc

SEQ ID NO: 1823164 - RNA, 19 nt, Human
cucccuucaaccauucccc

SEQ ID NO: 1823165 - RNA, 20 nt, Human
cucccuucaaccauucccca

SEQ ID NO: 1823166 - RNA, 10 nt, Human
cucccuuccu

SEQ ID NO: 1823167 - RNA, 23 nt, Human
cucccuucccaccucucucacuc

SEQ ID NO: 1823168 - RNA, 14 nt, Human
cucccaucacccgc

SEQ ID NO: 1823169 - RNA, 14 nt, Human
cucccaucucacac

SEQ ID NO: 1823170 - RNA, 21 nt, Human
cucccaucucacacaugagca

SEQ ID NO: 1823171 - RNA, 15 nt, Human
cucccaucucacaca

SEQ ID NO: 1823172 - RNA, 18 nt, Human
cucccaucucacacauga

SEQ ID NO: 1823173 - RNA, 23 nt, Human
cuggaauaauccuaaacauauga

SEQ ID NO: 1823174 - RNA, 21 nt, Human
cuggaagugcuaauuuugaaa

SEQ ID NO: 1823175 - RNA, 18 nt, Human
cuggaagcacagcuucau

SEQ ID NO: 1823176 - RNA, 15 nt, Human
cuggaagcacagcuu

SEQ ID NO: 1823177 - RNA, 15 nt, Human
cuggaaugcaguggu

SEQ ID NO: 1823178 - RNA, 14 nt, Human
cuggaaugcagugg

SEQ ID NO: 1823179 - RNA, 21 nt, Human
cugcuuugggcugcccuggug

SEQ ID NO: 1823180 - RNA, 22 nt, Human
cugcuuugggcugcccuggugc

SEQ ID NO: 1823181 - RNA, 23 nt, Human
cugcuuugggcugcccuggugcu

SEQ ID NO: 1823182 - RNA, 19 nt, Human
cugcuuugggcugcccugg

SEQ ID NO: 1823183 - RNA, 20 nt, Human
cugcuuugggcugcccuggu

SEQ ID NO: 1823184 - RNA, 18 nt, Human
cugcuuugggcugcccug

SEQ ID NO: 1823185 - RNA, 12 nt, Human
cugcucugauga

SEQ ID NO: 1823186 - RNA, 21 nt, Human
cuggagcccacuguacuugcu

SEQ ID NO: 1823187 - RNA, 13 nt, Human
cuggagcccacug

SEQ ID NO: 1823188 - RNA, 15 nt, Human
cuggagcccacugua

SEQ ID NO: 1823189 - RNA, 16 nt, Human
cuggagcccacuguac

SEQ ID NO: 1823190 - RNA, 17 nt, Human
cuggagcccacuguacu

SEQ ID NO: 1823191 - RNA, 20 nt, Human
cuggagcccacuguacuugc

SEQ ID NO: 1823192 - RNA, 16 nt, Human
cuggacucaccucccc

SEQ ID NO: 1823193 - RNA, 21 nt, Human
cuggauggaggaaaaccaagc

SEQ ID NO: 1823194 - RNA, 15 nt, Human
cuggauggggcugca

SEQ ID NO: 1823195 - RNA, 15 nt, Human
cuggauguaccacca

SEQ ID NO: 1823196 - RNA, 16 nt, Human
cuggauggggcugcac

SEQ ID NO: 1823197 - RNA, 23 nt, Human
cuggauuaaacuuaaucuaaaug

SEQ ID NO: 1823198 - RNA, 13 nt, Human
cuggauuaaacuu

SEQ ID NO: 1823199 - RNA, 23 nt, Human
cuggauuauucaaaaugauguau

SEQ ID NO: 1823200 - RNA, 17 nt, Human
cuggauuauauuaugaa

SEQ ID NO: 1823201 - RNA, 17 nt, Human
cuggcacagggcagugg

SEQ ID NO: 1823202 - RNA, 13 nt, Human
cuggcacugcuuc

SEQ ID NO: 1823203 - RNA, 14 nt, Human
cuggcacugcuucc

SEQ ID NO: 1823204 - RNA, 23 nt, Human
cuggcacuauaauguaagcucua

SEQ ID NO: 1823205 - RNA, 16 nt, Human
cuggccagaugcacca

SEQ ID NO: 1823206 - RNA, 16 nt, Human
cuggccaacgggguga

SEQ ID NO: 1823207 - RNA, 15 nt, Human
cuggcacugcuucca

SEQ ID NO: 1823208 - RNA, 16 nt, Human
cuggcacugcuuccag

SEQ ID NO: 1823209 - RNA, 17 nt, Human
cuggcacugcuuccagu

SEQ ID NO: 1823210 - RNA, 18 nt, Human
cuggcacugcuuccagug

SEQ ID NO: 1823211 - RNA, 20 nt, Human
cuggccagaugcaccagccc

SEQ ID NO: 1823212 - RNA, 19 nt, Human
cuggccagaugcaccagcc

SEQ ID NO: 1823213 - RNA, 18 nt, Human
cuggccagaugcaccagc

SEQ ID NO: 1823214 - RNA, 17 nt, Human
cuggccagaugcaccag

SEQ ID NO: 1823215 - RNA, 21 nt, Human
cuggccagaugcaccagcccu

SEQ ID NO: 1823216 - RNA, 22 nt, Human
cuggccagaugcaccagcccuu

SEQ ID NO: 1823217 - RNA, 22 nt, Human
cuggccucaagugauucuccug

SEQ ID NO: 1823218 - RNA, 23 nt, Human
cuggccuagcauacguacacauu

SEQ ID NO: 1823219 - RNA, 12 nt, Human
cuggcccacugc

SEQ ID NO: 1823220 - RNA, 13 nt, Human
cuggcccacugca

SEQ ID NO: 1823221 - RNA, 17 nt, Human
cuggccuagcauacgua

SEQ ID NO: 1823222 - RNA, 18 nt, Human
cuggucccacucagucca

SEQ ID NO: 1823223 - RNA, 15 nt, Human
cuggucccacucagu

SEQ ID NO: 1823224 - RNA, 18 nt, Human
cugguccauagagagcaa

SEQ ID NO: 1823225 - RNA, 21 nt, Human
cugguccauagagagcaagac

SEQ ID NO: 1823226 - RNA, 19 nt, Human
cuggguucuacccaggugc

SEQ ID NO: 1823227 - RNA, 13 nt, Human
cuggguuggaggg

SEQ ID NO: 1823228 - RNA, 13 nt, Human
cuggguuggaaaa

SEQ ID NO: 1823229 - RNA, 18 nt, Human
cuggguuggaaaacagua

SEQ ID NO: 1823230 - RNA, 15 nt, Human
cugguccauagagag

SEQ ID NO: 1823231 - RNA, 17 nt, Human
cugguccauagagagca

SEQ ID NO: 1823232 - RNA, 23 nt, Human
cugguggcagugggagcugccug

SEQ ID NO: 1823233 - RNA, 19 nt, Human
cugguggcagugggagcug

SEQ ID NO: 1823234 - RNA, 18 nt, Human
cuggucucaaacuccuga

SEQ ID NO: 1823235 - RNA, 19 nt, Human
cugggcucccuucccaccu

SEQ ID NO: 1823236 - RNA, 21 nt, Human
cugggcuuggggaccagagcu

SEQ ID NO: 1823237 - RNA, 17 nt, Human
cugggcuuggggaccag

SEQ ID NO: 1823238 - RNA, 20 nt, Human
cugggcuuggggaccagagc

SEQ ID NO: 1823239 - RNA, 23 nt, Human
cugggcuucaguggcagcugcuu

SEQ ID NO: 1823240 - RNA, 13 nt, Human
cugggcuugggga

SEQ ID NO: 1823241 - RNA, 22 nt, Human
cugggcuucaguggcagcugcu

SEQ ID NO: 1823242 - RNA, 21 nt, Human
cugggcuucaguggcagcugc

SEQ ID NO: 1823243 - RNA, 20 nt, Human
cugggcuucaguggcagcug

SEQ ID NO: 1823244 - RNA, 19 nt, Human
cugggcuucaguggcagcu

SEQ ID NO: 1823245 - RNA, 17 nt, Human
cugggcuucaguggcag

SEQ ID NO: 1823246 - RNA, 18 nt, Human
cugggcuucaguggcagc

SEQ ID NO: 1823247 - RNA, 18 nt, Human
cugggggccucagugcca

SEQ ID NO: 1823248 - RNA, 17 nt, Human
cugggggccucagugcc

SEQ ID NO: 1823249 - RNA, 13 nt, Human
cugggggccucag

SEQ ID NO: 1823250 - RNA, 17 nt, Human
cugggguggggaccuca

SEQ ID NO: 1823251 - RNA, 18 nt, Human
cugggguggggaccucag

SEQ ID NO: 1823252 - RNA, 19 nt, Human
cugggguggggaccucagg

SEQ ID NO: 1823253 - RNA, 20 nt, Human
cuggguacuuguggacacag

SEQ ID NO: 1823254 - RNA, 23 nt, Human
cugggguggggaccucaggccug

SEQ ID NO: 1823255 - RNA, 21 nt, Human
cugggguggggaccucaggcc

SEQ ID NO: 1823256 - RNA, 22 nt, Human
cugggguggggaccucaggccu

SEQ ID NO: 1823257 - RNA, 23 nt, Human
cuggguacuuguggacacagcuc

SEQ ID NO: 1823258 - RNA, 21 nt, Human
cuggguacuuguggacacagc

SEQ ID NO: 1823259 - RNA, 18 nt, Human
cugggaggucaaggcugc

SEQ ID NO: 1823260 - RNA, 14 nt, Human
cugggaggcaguga

SEQ ID NO: 1823261 - RNA, 16 nt, Human
cugggaggcagugaug

SEQ ID NO: 1823262 - RNA, 15 nt, Human
cugggaggcucugga

SEQ ID NO: 1823263 - RNA, 16 nt, Human
cugggaggcucuggag

SEQ ID NO: 1823264 - RNA, 13 nt, Human
cugggagcucugc

SEQ ID NO: 1823265 - RNA, 14 nt, Human
cugggagcucugca

SEQ ID NO: 1823266 - RNA, 15 nt, Human
cugggagcucugcag

SEQ ID NO: 1823267 - RNA, 13 nt, Human
cugggagugagcu

SEQ ID NO: 1823268 - RNA, 16 nt, Human
cugggagugagcuggu

SEQ ID NO: 1823269 - RNA, 19 nt, Human
cugggauuacaggcuccug

SEQ ID NO: 1823270 - RNA, 20 nt, Human
cugggauuacaggcuccugc

SEQ ID NO: 1823271 - RNA, 21 nt, Human
cugggauuacaggcgugagcc

SEQ ID NO: 1823272 - RNA, 21 nt, Human
cugggauuacaggcuccugcc

SEQ ID NO: 1823273 - RNA, 22 nt, Human
cugggauuacaggcuccugcca

SEQ ID NO: 1823274 - RNA, 23 nt, Human
cugggauuacaggcuccugccac

SEQ ID NO: 1823275 - RNA, 12 nt, Human
cugggccccugc

SEQ ID NO: 1823276 - RNA, 16 nt, Human
cugggccccugccucu

SEQ ID NO: 1823277 - RNA, 17 nt, Human
cugggccccugccucuc

SEQ ID NO: 1823278 - RNA, 10 nt, Human
cugggccccu

SEQ ID NO: 1823279 - RNA, 20 nt, Human
cugggcaaugugauaaaacc

SEQ ID NO: 1823280 - RNA, 15 nt, Human
cuggccugagcuggg

SEQ ID NO: 1823281 - RNA, 17 nt, Human
cuggcucuuccaggcug

SEQ ID NO: 1823282 - RNA, 13 nt, Human
cuggccugagcug

SEQ ID NO: 1823283 - RNA, 20 nt, Human
cuggcucuuccaggcuggga

SEQ ID NO: 1823284 - RNA, 18 nt, Human
cuggcucuuccaggcugg

SEQ ID NO: 1823285 - RNA, 19 nt, Human
cuggcucuuccaggcuggg

SEQ ID NO: 1823286 - RNA, 14 nt, Human
cuggcugccuuaga

SEQ ID NO: 1823287 - RNA, 19 nt, Human
cuggcugccuuagaaccuu

SEQ ID NO: 1823288 - RNA, 19 nt, Human
cuggcuguuggcugggggc

SEQ ID NO: 1823289 - RNA, 22 nt, Human
cuggcuggguggcaccagcagc

SEQ ID NO: 1823290 - RNA, 21 nt, Human
cuggcuggguggcaccagcag

SEQ ID NO: 1823291 - RNA, 20 nt, Human
cuggcuguuggcugggggcc

SEQ ID NO: 1823292 - RNA, 14 nt, Human
cuggcuucacagau

SEQ ID NO: 1823293 - RNA, 15 nt, Human
cuggcuuuucacugc

SEQ ID NO: 1823294 - RNA, 16 nt, Human
cuggcuuuucacugcu

SEQ ID NO: 1823295 - RNA, 19 nt, Human
cugggaacaccauagguca

SEQ ID NO: 1823296 - RNA, 17 nt, Human
cuggcuuuucacugcug

SEQ ID NO: 1823297 - RNA, 19 nt, Human
cuggcuuuucacugcuggc

SEQ ID NO: 1823298 - RNA, 20 nt, Human
cuggcuuuucacugcuggcu

SEQ ID NO: 1823299 - RNA, 22 nt, Human
cuggcuuuucacugcuggcugc

SEQ ID NO: 1823300 - RNA, 15 nt, Human
cugauucccaagcuc

SEQ ID NO: 1823301 - RNA, 18 nt, Human
cugauucccaagcucugc

SEQ ID NO: 1823302 - RNA, 17 nt, Human
cugauucccaagcucug

SEQ ID NO: 1823303 - RNA, 20 nt, Human
cugauucccaagcucugcuc

SEQ ID NO: 1823304 - RNA, 19 nt, Human
cugauucccaagcucugcu

SEQ ID NO: 1823305 - RNA, 22 nt, Human
cugauucccaagcucugcuccu

SEQ ID NO: 1823306 - RNA, 14 nt, Human
cugaucucucguga

SEQ ID NO: 1823307 - RNA, 21 nt, Human
cugauaaagaugagugagcau

SEQ ID NO: 1823308 - RNA, 13 nt, Human
cugauaaagauga

SEQ ID NO: 1823309 - RNA, 22 nt, Human
cugagugggggaucacagccuc

SEQ ID NO: 1823310 - RNA, 15 nt, Human
cugagugccuuuugg

SEQ ID NO: 1823311 - RNA, 16 nt, Human
cugagugccuuuuggu

SEQ ID NO: 1823312 - RNA, 14 nt, Human
cugagugccuuuug

SEQ ID NO: 1823313 - RNA, 17 nt, Human
cugagucugaaggcugg

SEQ ID NO: 1823314 - RNA, 13 nt, Human
cugagucugaagg

SEQ ID NO: 1823315 - RNA, 14 nt, Human
cugagucugaaggc

SEQ ID NO: 1823316 - RNA, 15 nt, Human
cugagucugaaggcu

SEQ ID NO: 1823317 - RNA, 16 nt, Human
cugagucugaaggcug

SEQ ID NO: 1823318 - RNA, 12 nt, Human
cugacccacugc

SEQ ID NO: 1823319 - RNA, 21 nt, Human
cugcacaaagcccuuccaugu

SEQ ID NO: 1823320 - RNA, 18 nt, Human
cugcacaaagcccuucca

SEQ ID NO: 1823321 - RNA, 20 nt, Human
cugcacaaagcccuuccaug

SEQ ID NO: 1823322 - RNA, 13 nt, Human
cugcacaaagccc

SEQ ID NO: 1823323 - RNA, 18 nt, Human
cugcacagugcaucucag

SEQ ID NO: 1823324 - RNA, 18 nt, Human
cugcacaagcugcacccu

SEQ ID NO: 1823325 - RNA, 13 nt, Human
cugcacaagcugc

SEQ ID NO: 1823326 - RNA, 14 nt, Human
cugcacaagcugca

SEQ ID NO: 1823327 - RNA, 15 nt, Human
cugcacaagcugcac

SEQ ID NO: 1823328 - RNA, 16 nt, Human
cugcacaagcugcacc

SEQ ID NO: 1823329 - RNA, 17 nt, Human
cugcacccucaggcagg

SEQ ID NO: 1823330 - RNA, 18 nt, Human
cugcacccucaggcaggu

SEQ ID NO: 1823331 - RNA, 21 nt, Human
cugcacagugcaucucagccc

SEQ ID NO: 1823332 - RNA, 22 nt, Human
cugcacagugcaucucagccca

SEQ ID NO: 1823333 - RNA, 23 nt, Human
cugcagaagacaguauggcagcu

SEQ ID NO: 1823334 - RNA, 13 nt, Human
cugcagaagacag

SEQ ID NO: 1823335 - RNA, 20 nt, Human
cugcagagcaggaaacauga

SEQ ID NO: 1823336 - RNA, 17 nt, Human
cugcacuugcagacucu

SEQ ID NO: 1823337 - RNA, 16 nt, Human
cugcacuugcagacuc

SEQ ID NO: 1823338 - RNA, 14 nt, Human
cugcacuugcagac

SEQ ID NO: 1823339 - RNA, 17 nt, Human
cugcaccggcuggccug

SEQ ID NO: 1823340 - RNA, 18 nt, Human
cugcaccggcuggccugg

SEQ ID NO: 1823341 - RNA, 19 nt, Human
cugcaccggcuggccuggc

SEQ ID NO: 1823342 - RNA, 20 nt, Human
cugcaccggcuggccuggcc

SEQ ID NO: 1823343 - RNA, 11 nt, Human
cugcagccuca

SEQ ID NO: 1823344 - RNA, 20 nt, Human
cugcagccucaaccuccugg

SEQ ID NO: 1823345 - RNA, 19 nt, Human
cugcagccucaaccuccug

SEQ ID NO: 1823346 - RNA, 22 nt, Human
cugcagccucaaccuccugggc

SEQ ID NO: 1823347 - RNA, 22 nt, Human
cugcagggaguccgaaagggac

SEQ ID NO: 1823348 - RNA, 16 nt, Human
cugcagggccaagcac

SEQ ID NO: 1823349 - RNA, 15 nt, Human
cugcagggacugcca

SEQ ID NO: 1823350 - RNA, 17 nt, Human
cugcagggacugccagu

SEQ ID NO: 1823351 - RNA, 13 nt, Human
cugccucagccuc

SEQ ID NO: 1823352 - RNA, 14 nt, Human
cugccucagccucc

SEQ ID NO: 1823353 - RNA, 12 nt, Human
cugcccugggag

SEQ ID NO: 1823354 - RNA, 13 nt, Human
cugcccugggagg

SEQ ID NO: 1823355 - RNA, 11 nt, Human
cugcccuggga

SEQ ID NO: 1823356 - RNA, 15 nt, Human
cugcccugggaggca

SEQ ID NO: 1823357 - RNA, 22 nt, Human
cugcccugggaggcagugaugg

SEQ ID NO: 1823358 - RNA, 13 nt, Human
cugccuauuuuaa

SEQ ID NO: 1823359 - RNA, 15 nt, Human
cugccuaagugcagc

SEQ ID NO: 1823360 - RNA, 15 nt, Human
cugccugcccaggcc

SEQ ID NO: 1823361 - RNA, 14 nt, Human
cugccugcccaggc

SEQ ID NO: 1823362 - RNA, 13 nt, Human
cugccugcccagg

SEQ ID NO: 1823363 - RNA, 12 nt, Human
cugccucucugc

SEQ ID NO: 1823364 - RNA, 13 nt, Human
cugccucucugca

SEQ ID NO: 1823365 - RNA, 14 nt, Human
cugccucucugcag

SEQ ID NO: 1823366 - RNA, 12 nt, Human
cugccucuuccu

SEQ ID NO: 1823367 - RNA, 13 nt, Human
cugccucuucucu

SEQ ID NO: 1823368 - RNA, 14 nt, Human
cugccucuucucua

SEQ ID NO: 1823369 - RNA, 18 nt, Human
cugcuccucuccccagca

SEQ ID NO: 1823370 - RNA, 17 nt, Human
cugcuccucuccccagc

SEQ ID NO: 1823371 - RNA, 16 nt, Human
cugcuccucuccccag

SEQ ID NO: 1823372 - RNA, 19 nt, Human
cugcuccccuaaagccuca

SEQ ID NO: 1823373 - RNA, 15 nt, Human
cugcuccagcuguuc

SEQ ID NO: 1823374 - RNA, 14 nt, Human
cugcuccagcuguu

SEQ ID NO: 1823375 - RNA, 16 nt, Human
cugcgguccacccagg

SEQ ID NO: 1823376 - RNA, 17 nt, Human
cugcgguccacccagga

SEQ ID NO: 1823377 - RNA, 21 nt, Human
cugcggaaugaaccacaucuu

SEQ ID NO: 1823378 - RNA, 15 nt, Human
cugcgguccacccag

SEQ ID NO: 1823379 - RNA, 20 nt, Human
cugcggaaugaaccacaucu

SEQ ID NO: 1823380 - RNA, 20 nt, Human
cugccacccuggggagaaag

SEQ ID NO: 1823381 - RNA, 16 nt, Human
cugccacccuggggag

SEQ ID NO: 1823382 - RNA, 15 nt, Human
cugccacccugggga

SEQ ID NO: 1823383 - RNA, 19 nt, Human
cugccaccacgcccggcua

SEQ ID NO: 1823384 - RNA, 13 nt, Human
cugccacacuuca

SEQ ID NO: 1823385 - RNA, 17 nt, Human
cugccacacuucaggcu

SEQ ID NO: 1823386 - RNA, 22 nt, Human
cugccacacuucaggcucuucu

SEQ ID NO: 1823387 - RNA, 17 nt, Human
cugccaugccagcuuau

SEQ ID NO: 1823388 - RNA, 19 nt, Human
cugccaugccagcuuaucu

SEQ ID NO: 1823389 - RNA, 19 nt, Human
cugccagccgagauagcca

SEQ ID NO: 1823390 - RNA, 15 nt, Human
cugccaggaagccag

SEQ ID NO: 1823391 - RNA, 16 nt, Human
cugccaggaagccagc

SEQ ID NO: 1823392 - RNA, 18 nt, Human
cugccaggaagccagcag

SEQ ID NO: 1823393 - RNA, 19 nt, Human
cugccaggaagccagcagg

SEQ ID NO: 1823394 - RNA, 16 nt, Human
cugccauuucugagau

SEQ ID NO: 1823395 - RNA, 17 nt, Human
cugcccaaccugcucuc

SEQ ID NO: 1823396 - RNA, 13 nt, Human
cugcccaggcccc

SEQ ID NO: 1823397 - RNA, 19 nt, Human
cugcccaaccugcucuccu

SEQ ID NO: 1823398 - RNA, 19 nt, Human
cugcccaggccugccuguu

SEQ ID NO: 1823399 - RNA, 18 nt, Human
cugcccaggccugccugu

SEQ ID NO: 1823400 - RNA, 14 nt, Human
cugccccuggcagc

SEQ ID NO: 1823401 - RNA, 15 nt, Human
cugccccuggcagcc

SEQ ID NO: 1823402 - RNA, 16 nt, Human
cugccccuggcagccc

SEQ ID NO: 1823403 - RNA, 17 nt, Human
cugccccuggcagcccc

SEQ ID NO: 1823404 - RNA, 15 nt, Human
cugcccggcugcgga

SEQ ID NO: 1823405 - RNA, 19 nt, Human
cugcccuccaagaccuucu

SEQ ID NO: 1823406 - RNA, 11 nt, Human
cugcccggcug

SEQ ID NO: 1823407 - RNA, 13 nt, Human
cugcccugcccac

SEQ ID NO: 1823408 - RNA, 14 nt, Human
cugcccugcccacc

SEQ ID NO: 1823409 - RNA, 15 nt, Human
cugcccugcccaccu

SEQ ID NO: 1823410 - RNA, 16 nt, Human
cugcccugcccaccug

SEQ ID NO: 1823411 - RNA, 17 nt, Human
ccucacaguccuuacca

SEQ ID NO: 1823412 - RNA, 17 nt, Human
ccuaucagaaguuucuc

SEQ ID NO: 1823413 - RNA, 15 nt, Human
ccucaccccacugug

SEQ ID NO: 1823414 - RNA, 20 nt, Human
ccucacaguccuuaccagca

SEQ ID NO: 1823415 - RNA, 22 nt, Human
ccucacaguccuuaccagcaga

SEQ ID NO: 1823416 - RNA, 12 nt, Human
ccucaccccacu

SEQ ID NO: 1823417 - RNA, 17 nt, Human
ccucaccuuucccaucu

SEQ ID NO: 1823418 - RNA, 15 nt, Human
ccgggcacucagaag

SEQ ID NO: 1823419 - RNA, 13 nt, Human
ccggcuggccugg

SEQ ID NO: 1823420 - RNA, 22 nt, Human
ccgggaggcagagguugcagug

SEQ ID NO: 1823421 - RNA, 12 nt, Human
ccggcugcccuu

SEQ ID NO: 1823422 - RNA, 12 nt, Human
ccggcuggccug

SEQ ID NO: 1823423 - RNA, 20 nt, Human
ccgggcacucagaagacacu

SEQ ID NO: 1823424 - RNA, 19 nt, Human
ccgggccuggagaacuaga

SEQ ID NO: 1823425 - RNA, 14 nt, Human
ccgugccuucagcu

SEQ ID NO: 1823426 - RNA, 15 nt, Human
ccgugccuucagcuc

SEQ ID NO: 1823427 - RNA, 16 nt, Human
ccgugccuucagcucu

SEQ ID NO: 1823428 - RNA, 17 nt, Human
ccgugccuucagcucua

SEQ ID NO: 1823429 - RNA, 15 nt, Human
ccguggcuucccgcu

SEQ ID NO: 1823430 - RNA, 21 nt, Human
ccguggcuucccgcucagccc

SEQ ID NO: 1823431 - RNA, 23 nt, Human
ccguggcuucccgcucagcccuc

SEQ ID NO: 1823432 - RNA, 12 nt, Human
ccuaaagagaua

SEQ ID NO: 1823433 - RNA, 19 nt, Human
ccuaaagccucaaaacaaa

SEQ ID NO: 1823434 - RNA, 13 nt, Human
ccuaaagccucaa

SEQ ID NO: 1823435 - RNA, 14 nt, Human
ccuaaaguguauuu

SEQ ID NO: 1823436 - RNA, 13 nt, Human
ccuaauuccacag

SEQ ID NO: 1823437 - RNA, 17 nt, Human
ccuaauucuaugccugu

SEQ ID NO: 1823438 - RNA, 14 nt, Human
ccuaauuccacagc

SEQ ID NO: 1823439 - RNA, 15 nt, Human
ccuaauuccacagcu

SEQ ID NO: 1823440 - RNA, 16 nt, Human
ccuaauuccacagcug

SEQ ID NO: 1823441 - RNA, 17 nt, Human
ccuaauuccacagcugc

SEQ ID NO: 1823442 - RNA, 12 nt, Human
ccuaccugguaa

SEQ ID NO: 1823443 - RNA, 13 nt, Human
cccuuccucucca

SEQ ID NO: 1823444 - RNA, 17 nt, Human
cccuuaccacugcucug

SEQ ID NO: 1823445 - RNA, 21 nt, Human
cccuuaccacugcucugauga

SEQ ID NO: 1823446 - RNA, 19 nt, Human
cccuuaccucggugccuuc

SEQ ID NO: 1823447 - RNA, 16 nt, Human
cccuuccucuccacug

SEQ ID NO: 1823448 - RNA, 17 nt, Human
cccuuccucuccacugc

SEQ ID NO: 1823449 - RNA, 20 nt, Human
cccuuccucuccacugccuu

SEQ ID NO: 1823450 - RNA, 22 nt, Human
cccuugccgucuaccugagggg

SEQ ID NO: 1823451 - RNA, 17 nt, Human
cccuugccgucuaccug

SEQ ID NO: 1823452 - RNA, 18 nt, Human
cccuugccgucuaccuga

SEQ ID NO: 1823453 - RNA, 22 nt, Human
cccuuucugggcaccggggccu

SEQ ID NO: 1823454 - RNA, 20 nt, Human
cccuuugacgccaucccagc

SEQ ID NO: 1823455 - RNA, 20 nt, Human
cccuuguggucccaccccac

SEQ ID NO: 1823456 - RNA, 18 nt, Human
cccuuguggucccacccc

SEQ ID NO: 1823457 - RNA, 18 nt, Human
cccuuggggagcaggcuc

SEQ ID NO: 1823458 - RNA, 14 nt, Human
cccuugugguccca

SEQ ID NO: 1823459 - RNA, 16 nt, Human
cccuuguggucccacc

SEQ ID NO: 1823460 - RNA, 18 nt, Human
ccgagaucacgccacugc

SEQ ID NO: 1823461 - RNA, 16 nt, Human
ccgagccuggcuccaa

SEQ ID NO: 1823462 - RNA, 19 nt, Human
ccgagccuggcuccaaacc

SEQ ID NO: 1823463 - RNA, 22 nt, Human
ccgagucucuucuccacuggau

SEQ ID NO: 1823464 - RNA, 19 nt, Human
cccuuuuuuggcugcugaa

SEQ ID NO: 1823465 - RNA, 17 nt, Human
ccgagaaggaagccucc

SEQ ID NO: 1823466 - RNA, 19 nt, Human
ccgagauagccaaggccaa

SEQ ID NO: 1823467 - RNA, 22 nt, Human
ccgagauagccaaggccaaagg

SEQ ID NO: 1823468 - RNA, 17 nt, Human
cccuuuuuuggcugcug

SEQ ID NO: 1823469 - RNA, 18 nt, Human
cccuuuuuuggcugcuga

SEQ ID NO: 1823470 - RNA, 11 nt, Human
cccuuuuccuu

SEQ ID NO: 1823471 - RNA, 13 nt, Human
cccuuuucuguuu

SEQ ID NO: 1823472 - RNA, 13 nt, Human
ccccaggaggcca

SEQ ID NO: 1823473 - RNA, 14 nt, Human
ccccaggaggccag

SEQ ID NO: 1823474 - RNA, 15 nt, Human
ccccaggaggccagc

SEQ ID NO: 1823475 - RNA, 21 nt, Human
ccccaggaggccagccuugac

SEQ ID NO: 1823476 - RNA, 22 nt, Human
ccccaggaggccagccuugacc

SEQ ID NO: 1823477 - RNA, 23 nt, Human
cccccaaccaaguggcucccaca

SEQ ID NO: 1823478 - RNA, 12 nt, Human
ccccacugguga

SEQ ID NO: 1823479 - RNA, 13 nt, Human
ccccacuggugac

SEQ ID NO: 1823480 - RNA, 14 nt, Human
ccccacuggugaca

SEQ ID NO: 1823481 - RNA, 12 nt, Human
cccccagcccca

SEQ ID NO: 1823482 - RNA, 16 nt, Human
cccccaucucuucugg

SEQ ID NO: 1823483 - RNA, 16 nt, Human
ccccgucccccucugg

SEQ ID NO: 1823484 - RNA, 20 nt, Human
ccccgucccccucuggcucc

SEQ ID NO: 1823485 - RNA, 21 nt, Human
ccccgucucugguuccucccc

SEQ ID NO: 1823486 - RNA, 13 nt, Human
cccccucugcccu

SEQ ID NO: 1823487 - RNA, 14 nt, Human
cccccucugcccug

SEQ ID NO: 1823488 - RNA, 16 nt, Human
cccccucugcccugcg

SEQ ID NO: 1823489 - RNA, 21 nt, Human
cccccgcugucagccauuccu

SEQ ID NO: 1823490 - RNA, 16 nt, Human
cccuguuuguuucuga

SEQ ID NO: 1823491 - RNA, 19 nt, Human
cccuguuucagaggcucag

SEQ ID NO: 1823492 - RNA, 16 nt, Human
cccuguuucagaggcu

SEQ ID NO: 1823493 - RNA, 15 nt, Human
cccuguuuguuucug

SEQ ID NO: 1823494 - RNA, 18 nt, Human
cccugugggcccccaaau

SEQ ID NO: 1823495 - RNA, 22 nt, Human
cccugguuuccugcccugggag

SEQ ID NO: 1823496 - RNA, 23 nt, Human
cccugguuuccugcccugggagg

SEQ ID NO: 1823497 - RNA, 21 nt, Human
cccuguagagugggagcugag

SEQ ID NO: 1823498 - RNA, 16 nt, Human
cccugugggcccccaa

SEQ ID NO: 1823499 - RNA, 19 nt, Human
cccugguggcagugggagc

SEQ ID NO: 1823500 - RNA, 16 nt, Human
cccugguggcaguggg

SEQ ID NO: 1823501 - RNA, 21 nt, Human
cccugguggcagugggagcug

SEQ ID NO: 1823502 - RNA, 21 nt, Human
cccugguuuccugcccuggga

SEQ ID NO: 1823503 - RNA, 17 nt, Human
ccccucagggucccugg

SEQ ID NO: 1823504 - RNA, 18 nt, Human
ccccucagggucccuggu

SEQ ID NO: 1823505 - RNA, 20 nt, Human
ccccucagggucccuggugg

SEQ ID NO: 1823506 - RNA, 19 nt, Human
ccccuaaagccucaaaaca

SEQ ID NO: 1823507 - RNA, 19 nt, Human
ccugaagucacacagugag

SEQ ID NO: 1823508 - RNA, 17 nt, Human
ccugaagucacacagug

SEQ ID NO: 1823509 - RNA, 16 nt, Human
ccugaagucacacagu

SEQ ID NO: 1823510 - RNA, 15 nt, Human
ccugaagucacacag

SEQ ID NO: 1823511 - RNA, 13 nt, Human
ccugaaggccccg

SEQ ID NO: 1823512 - RNA, 21 nt, Human
ccugaagacucauucuucugu

SEQ ID NO: 1823513 - RNA, 20 nt, Human
ccugaagcuaucguaaaauu

SEQ ID NO: 1823514 - RNA, 22 nt, Human
ccugaagcuaucguaaaauuaa

SEQ ID NO: 1823515 - RNA, 23 nt, Human
ccugaagcuaucguaaaauuaag

SEQ ID NO: 1823516 - RNA, 18 nt, Human
ccugaaagaggaaugaag

SEQ ID NO: 1823517 - RNA, 23 nt, Human
ccugaaagaggaaugaaguacuc

SEQ ID NO: 1823518 - RNA, 22 nt, Human
ccucuuuggucuacacugugcu

SEQ ID NO: 1823519 - RNA, 15 nt, Human
ccucuuccucccuca

SEQ ID NO: 1823520 - RNA, 16 nt, Human
ccucuuccucccucau

SEQ ID NO: 1823521 - RNA, 19 nt, Human
ccucuuccucccucauucc

SEQ ID NO: 1823522 - RNA, 17 nt, Human
ccucuuaugggcugggu

SEQ ID NO: 1823523 - RNA, 21 nt, Human
ccucuguucugcacacagcac

SEQ ID NO: 1823524 - RNA, 14 nt, Human
ccucuuagaaaaac

SEQ ID NO: 1823525 - RNA, 15 nt, Human
ccucuuaugggcugg

SEQ ID NO: 1823526 - RNA, 16 nt, Human
ccucuuaugggcuggg

SEQ ID NO: 1823527 - RNA, 14 nt, Human
ccucuuaugggcug

SEQ ID NO: 1823528 - RNA, 17 nt, Human
ccucuguccaggcacug

SEQ ID NO: 1823529 - RNA, 14 nt, Human
ccucuguacagagc

SEQ ID NO: 1823530 - RNA, 15 nt, Human
ccucuguacagagcc

SEQ ID NO: 1823531 - RNA, 16 nt, Human
ccucuguacagagccc

SEQ ID NO: 1823532 - RNA, 17 nt, Human
ccucuguacagagccca

SEQ ID NO: 1823533 - RNA, 18 nt, Human
ccucuguacagagcccac

SEQ ID NO: 1823534 - RNA, 23 nt, Human
ccucuguacagagcccacgcccc

SEQ ID NO: 1823535 - RNA, 23 nt, Human
ccugauugugucucuugguccug

SEQ ID NO: 1823536 - RNA, 17 nt, Human
ccugaugcuucuucaga

SEQ ID NO: 1823537 - RNA, 18 nt, Human
ccugaugcuucuucagag

SEQ ID NO: 1823538 - RNA, 14 nt, Human
ccugaugcuucuuc

SEQ ID NO: 1823539 - RNA, 20 nt, Human
ccugaggcuccacuuggucu

SEQ ID NO: 1823540 - RNA, 18 nt, Human
ccugaggcuccacuuggu

SEQ ID NO: 1823541 - RNA, 12 nt, Human
ccugaggcccag

SEQ ID NO: 1823542 - RNA, 13 nt, Human
ccugaggcccaga

SEQ ID NO: 1823543 - RNA, 14 nt, Human
ccugaggcccagag

SEQ ID NO: 1823544 - RNA, 12 nt, Human
ccugacaacacu

SEQ ID NO: 1823545 - RNA, 14 nt, Human
ccugacaacacuca

SEQ ID NO: 1823546 - RNA, 15 nt, Human
ccugacaacacucau

SEQ ID NO: 1823547 - RNA, 16 nt, Human
ccugacaacacucauu

SEQ ID NO: 1823548 - RNA, 23 nt, Human
ccugaggcccuucucuccagccc

SEQ ID NO: 1823549 - RNA, 21 nt, Human
ccugaggcccuucucuccagc

SEQ ID NO: 1823550 - RNA, 22 nt, Human
ccugaggcccuucucuccagcc

SEQ ID NO: 1823551 - RNA, 16 nt, Human
ccugaggcccuucucu

SEQ ID NO: 1823552 - RNA, 17 nt, Human
ccugaggcccuucucuc

SEQ ID NO: 1823553 - RNA, 19 nt, Human
ccugaggcccuucucucca

SEQ ID NO: 1823554 - RNA, 20 nt, Human
ccugaggcccuucucuccag

SEQ ID NO: 1823555 - RNA, 23 nt, Human
ccugacaacacucauugaccuga

SEQ ID NO: 1823556 - RNA, 22 nt, Human
ccucacuaucccggcugcccuu

SEQ ID NO: 1823557 - RNA, 21 nt, Human
ccucacuaggcuucugguuga

SEQ ID NO: 1823558 - RNA, 21 nt, Human
ccucacuaucccggcugcccu

SEQ ID NO: 1823559 - RNA, 14 nt, Human
ccucagcauccugg

SEQ ID NO: 1823560 - RNA, 17 nt, Human
ccucagcauccuggcac

SEQ ID NO: 1823561 - RNA, 16 nt, Human
ccucagcauccuggca

SEQ ID NO: 1823562 - RNA, 23 nt, Human
ccucaggccugggggcugggcag

SEQ ID NO: 1823563 - RNA, 14 nt, Human
ccucagggucccug

SEQ ID NO: 1823564 - RNA, 11 nt, Human
ccucaggccug

SEQ ID NO: 1823565 - RNA, 14 nt, Human
ccucaggccugggg

SEQ ID NO: 1823566 - RNA, 21 nt, Human
ccucaggccugggggcugggc

SEQ ID NO: 1823567 - RNA, 19 nt, Human
ccucaggugauccacccac

SEQ ID NO: 1823568 - RNA, 17 nt, Human
ccucaggugauccaccc

SEQ ID NO: 1823569 - RNA, 22 nt, Human
ccucaggugauccacccaccuc

SEQ ID NO: 1823570 - RNA, 22 nt, Human
ccucagguaaucgaccugccuc

SEQ ID NO: 1823571 - RNA, 23 nt, Human
ccucagguaaucgaccugccucg

SEQ ID NO: 1823572 - RNA, 16 nt, Human
ccucaggugagaagca

SEQ ID NO: 1823573 - RNA, 21 nt, Human
ccucagguaaucgaccugccu

SEQ ID NO: 1823574 - RNA, 15 nt, Human
ccucagggucccugg

SEQ ID NO: 1823575 - RNA, 15 nt, Human
ccucagucuggcccu

SEQ ID NO: 1823576 - RNA, 14 nt, Human
ccucagucucccuc

SEQ ID NO: 1823577 - RNA, 13 nt, Human
ccucccggugccc

SEQ ID NO: 1823578 - RNA, 16 nt, Human
ccucccggugcccaag

SEQ ID NO: 1823579 - RNA, 13 nt, Human
ccucccucccucu

SEQ ID NO: 1823580 - RNA, 15 nt, Human
ccucccucccucuuu

SEQ ID NO: 1823581 - RNA, 13 nt, Human
ccucccugccccu

SEQ ID NO: 1823582 - RNA, 16 nt, Human
ccucccucccucuuuc

SEQ ID NO: 1823583 - RNA, 13 nt, Human
ccuccugccucga

SEQ ID NO: 1823584 - RNA, 14 nt, Human
ccuccuccuggacu

SEQ ID NO: 1823585 - RNA, 22 nt, Human
ccuccugugugugcgccuacag

SEQ ID NO: 1823586 - RNA, 15 nt, Human
ccuccugugugugcg

SEQ ID NO: 1823587 - RNA, 13 nt, Human
ccuccugugugug

SEQ ID NO: 1823588 - RNA, 13 nt, Human
ccuccugggcuaa

SEQ ID NO: 1823589 - RNA, 13 nt, Human
ccuccuggacucc

SEQ ID NO: 1823590 - RNA, 17 nt, Human
ccuccugggaaugaagc

SEQ ID NO: 1823591 - RNA, 13 nt, Human
ccucucugcccua

SEQ ID NO: 1823592 - RNA, 16 nt, Human
ccucugacacacagcu

SEQ ID NO: 1823593 - RNA, 23 nt, Human
ccucugaaaaccaauguucucuc

SEQ ID NO: 1823594 - RNA, 19 nt, Human
ccucuccacugccuucgau

SEQ ID NO: 1823595 - RNA, 12 nt, Human
ccucuccacugc

SEQ ID NO: 1823596 - RNA, 13 nt, Human
ccucuccacugcc

SEQ ID NO: 1823597 - RNA, 14 nt, Human
ccucuccacugccu

SEQ ID NO: 1823598 - RNA, 16 nt, Human
ccucuccacugccuuc

SEQ ID NO: 1823599 - RNA, 12 nt, Human
ccucucccauca

SEQ ID NO: 1823600 - RNA, 23 nt, Human
ccuccugugugugcgccuacagg

SEQ ID NO: 1823601 - RNA, 18 nt, Human
ccuccuuaucaaaggaca

SEQ ID NO: 1823602 - RNA, 20 nt, Human
ccuccuuaucaaaggacacc

SEQ ID NO: 1823603 - RNA, 12 nt, Human
ccucugggacug

SEQ ID NO: 1823604 - RNA, 16 nt, Human
ccucuggcuccagcug

SEQ ID NO: 1823605 - RNA, 17 nt, Human
ccucuggcuccagcugg

SEQ ID NO: 1823606 - RNA, 18 nt, Human
ccucugacacacagcucu

SEQ ID NO: 1823607 - RNA, 17 nt, Human
ccucugacacacagcuc

SEQ ID NO: 1823608 - RNA, 11 nt, Human
ccucugcacaa

SEQ ID NO: 1823609 - RNA, 15 nt, Human
ccucugcacaagcug

SEQ ID NO: 1823610 - RNA, 20 nt, Human
ccucugcacaagcugcaccc

SEQ ID NO: 1823611 - RNA, 17 nt, Human
ccucugcacaagcugca

SEQ ID NO: 1823612 - RNA, 19 nt, Human
ccucugcacaagcugcacc

SEQ ID NO: 1823613 - RNA, 22 nt, Human
ccucugcacuccccugcugggu

SEQ ID NO: 1823614 - RNA, 14 nt, Human
ccucugcacucccc

SEQ ID NO: 1823615 - RNA, 15 nt, Human
ccucugcacuccccu

SEQ ID NO: 1823616 - RNA, 20 nt, Human
ccucugcacuccccugcugg

SEQ ID NO: 1823617 - RNA, 21 nt, Human
ccucugcacuccccugcuggg

SEQ ID NO: 1823618 - RNA, 19 nt, Human
ccugugccucugggacugg

SEQ ID NO: 1823619 - RNA, 15 nt, Human
ccugugccucuggga

SEQ ID NO: 1823620 - RNA, 17 nt, Human
ccugugccucugggacu

SEQ ID NO: 1823621 - RNA, 22 nt, Human
ccugugauggggcccugccucc

SEQ ID NO: 1823622 - RNA, 20 nt, Human
ccugugauggggcccugccu

SEQ ID NO: 1823623 - RNA, 21 nt, Human
ccugugauggggcccugccuc

SEQ ID NO: 1823624 - RNA, 17 nt, Human
ccugugauggggcccug

SEQ ID NO: 1823625 - RNA, 18 nt, Human
ccugugauggggcccugc

SEQ ID NO: 1823626 - RNA, 19 nt, Human
ccugugauggggcccugcc

SEQ ID NO: 1823627 - RNA, 22 nt, Human
ccugugagcuaggaauuguguu

SEQ ID NO: 1823628 - RNA, 20 nt, Human
ccugugaguacuacaguccu

SEQ ID NO: 1823629 - RNA, 17 nt, Human
ccugucccccugacaac

SEQ ID NO: 1823630 - RNA, 18 nt, Human
ccuguccccgcacugggc

SEQ ID NO: 1823631 - RNA, 18 nt, Human
ccuggugcugccacacuu

SEQ ID NO: 1823632 - RNA, 21 nt, Human
ccuggugcugccacacuucag

SEQ ID NO: 1823633 - RNA, 15 nt, Human
ccuggugcugccaca

SEQ ID NO: 1823634 - RNA, 13 nt, Human
ccugguggcagcu

SEQ ID NO: 1823635 - RNA, 12 nt, Human
ccugguggcagc

SEQ ID NO: 1823636 - RNA, 14 nt, Human
ccugguggcagcuc

SEQ ID NO: 1823637 - RNA, 16 nt, Human
ccugguggcagcucac

SEQ ID NO: 1823638 - RNA, 17 nt, Human
ccugguggcagcucacc

SEQ ID NO: 1823639 - RNA, 18 nt, Human
ccugguggcagcucaccu

SEQ ID NO: 1823640 - RNA, 20 nt, Human
ccuguaauccuagcacuuug

SEQ ID NO: 1823641 - RNA, 21 nt, Human
ccuguagagugggagcugagu

SEQ ID NO: 1823642 - RNA, 19 nt, Human
ccuguagagugggagcuga

SEQ ID NO: 1823643 - RNA, 23 nt, Human
ccuguagagugggagcugagugg

SEQ ID NO: 1823644 - RNA, 18 nt, Human
ccuggcaugggaaugaau

SEQ ID NO: 1823645 - RNA, 23 nt, Human
ccuggcaugggaaugaaugucag

SEQ ID NO: 1823646 - RNA, 20 nt, Human
ccuggcuccaaacccucgag

SEQ ID NO: 1823647 - RNA, 12 nt, Human
ccuggcggggug

SEQ ID NO: 1823648 - RNA, 14 nt, Human
ccuggccccucagg

SEQ ID NO: 1823649 - RNA, 16 nt, Human
ccuggccccucagggu

SEQ ID NO: 1823650 - RNA, 12 nt, Human
ccugggcagaag

SEQ ID NO: 1823651 - RNA, 14 nt, Human
ccugggcagaagga

SEQ ID NO: 1823652 - RNA, 15 nt, Human
ccugggcagaaggaa

SEQ ID NO: 1823653 - RNA, 13 nt, Human
ccugggaggcagu

SEQ ID NO: 1823654 - RNA, 13 nt, Human
ccugggaggcucu

SEQ ID NO: 1823655 - RNA, 21 nt, Human
ccugggaggcucuggagccca

SEQ ID NO: 1823656 - RNA, 20 nt, Human
ccugggaggucaaggcugca

SEQ ID NO: 1823657 - RNA, 16 nt, Human
ccugggaucccucauc

SEQ ID NO: 1823658 - RNA, 20 nt, Human
ccugggaucccucauccuca

SEQ ID NO: 1823659 - RNA, 21 nt, Human
ccuggcacugcuuccagugag

SEQ ID NO: 1823660 - RNA, 16 nt, Human
ccuggcagccccuguu

SEQ ID NO: 1823661 - RNA, 12 nt, Human
ccuggcagccgu

SEQ ID NO: 1823662 - RNA, 18 nt, Human
ccuggcagccgugccuuc

SEQ ID NO: 1823663 - RNA, 19 nt, Human
ccuggcagccgugccuuca

SEQ ID NO: 1823664 - RNA, 16 nt, Human
ccuggcaugggaauga

SEQ ID NO: 1823665 - RNA, 17 nt, Human
ccuggcaugggaaugaa

SEQ ID NO: 1823666 - RNA, 20 nt, Human
ccuggcacugcuuccaguga

SEQ ID NO: 1823667 - RNA, 17 nt, Human
ccuggcacugcuuccag

SEQ ID NO: 1823668 - RNA, 14 nt, Human
ccuggacuccugca

SEQ ID NO: 1823669 - RNA, 17 nt, Human
ccuggacugugugcuca

SEQ ID NO: 1823670 - RNA, 20 nt, Human
ccuggacugugugcucagga

SEQ ID NO: 1823671 - RNA, 13 nt, Human
ccuggacccugug

SEQ ID NO: 1823672 - RNA, 14 nt, Human
ccuggacccugugg

SEQ ID NO: 1823673 - RNA, 19 nt, Human
ccugcugguucaggguugg

SEQ ID NO: 1823674 - RNA, 13 nt, Human
ccugcugguucag

SEQ ID NO: 1823675 - RNA, 20 nt, Human
ccugcuuuuuauggccugug

SEQ ID NO: 1823676 - RNA, 18 nt, Human
ccugcuuugggcugcccu

SEQ ID NO: 1823677 - RNA, 17 nt, Human
ccugcuuugggcugccc

SEQ ID NO: 1823678 - RNA, 17 nt, Human
ccugcuaauuccccaga

SEQ ID NO: 1823679 - RNA, 12 nt, Human
ccugcuccagcu

SEQ ID NO: 1823680 - RNA, 13 nt, Human
ccugcuccagcug

SEQ ID NO: 1823681 - RNA, 14 nt, Human
ccugcuccagcugu

SEQ ID NO: 1823682 - RNA, 22 nt, Human
ccugcuccagcuguucagcugg

SEQ ID NO: 1823683 - RNA, 18 nt, Human
ccugcaacaccuuguuuc

SEQ ID NO: 1823684 - RNA, 19 nt, Human
ccugcaaagcccagcuuga

SEQ ID NO: 1823685 - RNA, 19 nt, Human
ccugcaacaccuuguuucc

SEQ ID NO: 1823686 - RNA, 16 nt, Human
ccugcaaccugauugu

SEQ ID NO: 1823687 - RNA, 23 nt, Human
ccugcgucucauacucaccucac

SEQ ID NO: 1823688 - RNA, 16 nt, Human
ccuugaacuggguacu

SEQ ID NO: 1823689 - RNA, 17 nt, Human
ccuugaacuuugaccuc

SEQ ID NO: 1823690 - RNA, 17 nt, Human
ccuugaaugaugccaug

SEQ ID NO: 1823691 - RNA, 19 nt, Human
ccuugaacuuugaccucug

SEQ ID NO: 1823692 - RNA, 14 nt, Human
ccuugaacugggua

SEQ ID NO: 1823693 - RNA, 22 nt, Human
ccuugaaaacacuguucucugc

SEQ ID NO: 1823694 - RNA, 19 nt, Human
ccuugaaaacacuguucuc

SEQ ID NO: 1823695 - RNA, 21 nt, Human
ccuugaaaacacuguucucug

SEQ ID NO: 1823696 - RNA, 18 nt, Human
ccuucgcuccugugucuu

SEQ ID NO: 1823697 - RNA, 15 nt, Human
ccuucgcuccugugu

SEQ ID NO: 1823698 - RNA, 14 nt, Human
ccuucgcuccugug

SEQ ID NO: 1823699 - RNA, 13 nt, Human
ccuucgcuccugu

SEQ ID NO: 1823700 - RNA, 14 nt, Human
ccuucuuuuucuuc

SEQ ID NO: 1823701 - RNA, 16 nt, Human
ccuucuuuuucuucuu

SEQ ID NO: 1823702 - RNA, 15 nt, Human
ccuugaaaacacugu

SEQ ID NO: 1823703 - RNA, 17 nt, Human
ccuugacagggcacacc

SEQ ID NO: 1823704 - RNA, 15 nt, Human
ccuugacagggcaca

SEQ ID NO: 1823705 - RNA, 19 nt, Human
ccuugaccauucuccaccu

SEQ ID NO: 1823706 - RNA, 20 nt, Human
ccuugaccauucuccaccug

SEQ ID NO: 1823707 - RNA, 14 nt, Human
ccuugacagggcac

SEQ ID NO: 1823708 - RNA, 22 nt, Human
ccuugaccauucuccaccugcc

SEQ ID NO: 1823709 - RNA, 21 nt, Human
ccuugaccauucuccaccugc

SEQ ID NO: 1823710 - RNA, 22 nt, Human
ccuugaguugauucagcucugc

SEQ ID NO: 1823711 - RNA, 23 nt, Human
ccuugaguugauucagcucugca

SEQ ID NO: 1823712 - RNA, 13 nt, Human
ccuugacagggca

SEQ ID NO: 1823713 - RNA, 11 nt, Human
ccuuuggcuuc

SEQ ID NO: 1823714 - RNA, 20 nt, Human
ccuguggccaaguucuuagu

SEQ ID NO: 1823715 - RNA, 14 nt, Human
ccuuaccagcagag

SEQ ID NO: 1823716 - RNA, 17 nt, Human
ccuuaccagcagagcac

SEQ ID NO: 1823717 - RNA, 15 nt, Human
ccuuaccagcagagc

SEQ ID NO: 1823718 - RNA, 16 nt, Human
ccuuaccagcagagca

SEQ ID NO: 1823719 - RNA, 20 nt, Human
ccuuaccucggugccuuccu

SEQ ID NO: 1823720 - RNA, 14 nt, Human
ccuuaccugccagg

SEQ ID NO: 1823721 - RNA, 15 nt, Human
ccuucaaagcaaaug

SEQ ID NO: 1823722 - RNA, 19 nt, Human
ccuucaaagcaaaugucuu

SEQ ID NO: 1823723 - RNA, 14 nt, Human
ccuucaaccauucc

SEQ ID NO: 1823724 - RNA, 21 nt, Human
ccuuagacagucccugccaau

SEQ ID NO: 1823725 - RNA, 18 nt, Human
ccuuagacagucccugcc

SEQ ID NO: 1823726 - RNA, 19 nt, Human
ccuuagacagucccugcca

SEQ ID NO: 1823727 - RNA, 14 nt, Human
ccuuagaaccuuuc

SEQ ID NO: 1823728 - RNA, 15 nt, Human
ccuuagaaccuuucu

SEQ ID NO: 1823729 - RNA, 16 nt, Human
ccuuagaaccuuucuu

SEQ ID NO: 1823730 - RNA, 18 nt, Human
ccuuagaaccuuucuuac

SEQ ID NO: 1823731 - RNA, 16 nt, Human
ccuuagacagucccug

SEQ ID NO: 1823732 - RNA, 17 nt, Human
ccuuagacagucccugc

SEQ ID NO: 1823733 - RNA, 14 nt, Human
ccuuccucuuucca

SEQ ID NO: 1823734 - RNA, 15 nt, Human
ccuucgauacaccgg

SEQ ID NO: 1823735 - RNA, 20 nt, Human
ccuucgauacaccgggccug

SEQ ID NO: 1823736 - RNA, 22 nt, Human
ccuucgauacaccgggccugga

SEQ ID NO: 1823737 - RNA, 23 nt, Human
ccuucgauacaccgggccuggag

SEQ ID NO: 1823738 - RNA, 13 nt, Human
ccuucgccaccug

SEQ ID NO: 1823739 - RNA, 15 nt, Human
ccuuccagggguggg

SEQ ID NO: 1823740 - RNA, 16 nt, Human
ccuuccagggguggga

SEQ ID NO: 1823741 - RNA, 19 nt, Human
ccuuccaugucgccucugc

SEQ ID NO: 1823742 - RNA, 20 nt, Human
ccuuccaugucgccucugca

SEQ ID NO: 1823743 - RNA, 21 nt, Human
ccuuccaugucgccucugcau

SEQ ID NO: 1823744 - RNA, 23 nt, Human
ccuuccaugucgccucugcauuc

SEQ ID NO: 1823745 - RNA, 18 nt, Human
ccuuccaggggugggaca

SEQ ID NO: 1823746 - RNA, 22 nt, Human
ccuuccaggggugggacacccu

SEQ ID NO: 1823747 - RNA, 10 nt, Human
ccuucagugc

SEQ ID NO: 1823748 - RNA, 13 nt, Human
ccuucagugccuu

SEQ ID NO: 1823749 - RNA, 14 nt, Human
ccuucagugccuua

SEQ ID NO: 1823750 - RNA, 20 nt, Human
ccuucagugccuuauggaac

SEQ ID NO: 1823751 - RNA, 15 nt, Human
ccuucagugccuuau

SEQ ID NO: 1823752 - RNA, 19 nt, Human
ccuucagugccuuauggaa

SEQ ID NO: 1823753 - RNA, 22 nt, Human
cguuccuucaaagcaaaugucu

SEQ ID NO: 1823754 - RNA, 12 nt, Human
cguucucugccu

SEQ ID NO: 1823755 - RNA, 21 nt, Human
cguuucuaaaggcuaccuuug

SEQ ID NO: 1823756 - RNA, 19 nt, Human
cguuucuaaaggcuaccuu

SEQ ID NO: 1823757 - RNA, 20 nt, Human
cguuucuaugacacaugcaa

SEQ ID NO: 1823758 - RNA, 13 nt, Human
cgugccuucagcu

SEQ ID NO: 1823759 - RNA, 15 nt, Human
cgugccuucagcucu

SEQ ID NO: 1823760 - RNA, 16 nt, Human
cgugccuucagcucua

SEQ ID NO: 1823761 - RNA, 18 nt, Human
cgugccuucagcucuaca

SEQ ID NO: 1823762 - RNA, 12 nt, Human
cgugccuggcca

SEQ ID NO: 1823763 - RNA, 16 nt, Human
cgugccuggccacgcc

SEQ ID NO: 1823764 - RNA, 12 nt, Human
cguggcugcuuc

SEQ ID NO: 1823765 - RNA, 14 nt, Human
cguggcugcuucaa

SEQ ID NO: 1823766 - RNA, 15 nt, Human
cguggcugcuucaag

SEQ ID NO: 1823767 - RNA, 17 nt, Human
cguggcugcuucaagga

SEQ ID NO: 1823768 - RNA, 14 nt, Human
cgucugacaggcaa

SEQ ID NO: 1823769 - RNA, 13 nt, Human
cgucugacaggca

SEQ ID NO: 1823770 - RNA, 14 nt, Human
cgucuaccugaggg

SEQ ID NO: 1823771 - RNA, 22 nt, Human
cgucccccucuggcuccagcug

SEQ ID NO: 1823772 - RNA, 11 nt, Human
cguccccuguc

SEQ ID NO: 1823773 - RNA, 14 nt, Human
cguccccugucccc

SEQ ID NO: 1823774 - RNA, 22 nt, Human
cgugcacacaccagagcccacc

SEQ ID NO: 1823775 - RNA, 18 nt, Human
cgugcauaccacuuuugu

SEQ ID NO: 1823776 - RNA, 14 nt, Human
cgugcauaccacuu

SEQ ID NO: 1823777 - RNA, 19 nt, Human
cgugcauaccacuuuuguu

SEQ ID NO: 1823778 - RNA, 21 nt, Human
cgugcacacaccagagcccac

SEQ ID NO: 1823779 - RNA, 20 nt, Human
cgugcacacaccagagccca

SEQ ID NO: 1823780 - RNA, 12 nt, Human
cgugacaacacu

SEQ ID NO: 1823781 - RNA, 23 nt, Human
cggugcuaucucccccagcccca

SEQ ID NO: 1823782 - RNA, 16 nt, Human
cguauaaaagccuguu

SEQ ID NO: 1823783 - RNA, 17 nt, Human
cguauaaaagccuguuu

SEQ ID NO: 1823784 - RNA, 21 nt, Human
cguauaaaagccuguuuaaga

SEQ ID NO: 1823785 - RNA, 22 nt, Human
cguauaaaagccuguuuaagag

SEQ ID NO: 1823786 - RNA, 22 nt, Human
cguauaugucucaggucccugc

SEQ ID NO: 1823787 - RNA, 14 nt, Human
cgucccccucuggc

SEQ ID NO: 1823788 - RNA, 21 nt, Human
cgucccccucuggcuccagcu

SEQ ID NO: 1823789 - RNA, 17 nt, Human
cgucauaacuagaacug

SEQ ID NO: 1823790 - RNA, 16 nt, Human
cgucauaacuagaacu

SEQ ID NO: 1823791 - RNA, 14 nt, Human
cgucauaacuagaa

SEQ ID NO: 1823792 - RNA, 16 nt, Human
cggaucuuuggacaga

SEQ ID NO: 1823793 - RNA, 19 nt, Human
cggaucuuuggacagaagc

SEQ ID NO: 1823794 - RNA, 20 nt, Human
cggacagccacggccaggcc

SEQ ID NO: 1823795 - RNA, 13 nt, Human
cgcuccugugucu

SEQ ID NO: 1823796 - RNA, 17 nt, Human
cgcuauugucaccaggg

SEQ ID NO: 1823797 - RNA, 18 nt, Human
cggacagccacggccagg

SEQ ID NO: 1823798 - RNA, 16 nt, Human
cggacagccacggcca

SEQ ID NO: 1823799 - RNA, 15 nt, Human
cggacagccacggcc

SEQ ID NO: 1823800 - RNA, 20 nt, Human
cggaaugaaccacaucuugc

SEQ ID NO: 1823801 - RNA, 17 nt, Human
cggccuccauccugagg

SEQ ID NO: 1823802 - RNA, 16 nt, Human
cggccuccauccugag

SEQ ID NO: 1823803 - RNA, 14 nt, Human
cggccucccaaagu

SEQ ID NO: 1823804 - RNA, 15 nt, Human
cggccuuuggcuuca

SEQ ID NO: 1823805 - RNA, 15 nt, Human
cggcuggccuggccc

SEQ ID NO: 1823806 - RNA, 16 nt, Human
cggcuggccuggcccc

SEQ ID NO: 1823807 - RNA, 18 nt, Human
cggcuggccuggccccuc

SEQ ID NO: 1823808 - RNA, 19 nt, Human
cggcuggccuggccccuca

SEQ ID NO: 1823809 - RNA, 20 nt, Human
cgggaggauguucugggaca

SEQ ID NO: 1823810 - RNA, 22 nt, Human
cgggagccugaucaccugcccu

SEQ ID NO: 1823811 - RNA, 21 nt, Human
cgggagccugaucaccugccc

SEQ ID NO: 1823812 - RNA, 21 nt, Human
cgggaggauguucugggacac

SEQ ID NO: 1823813 - RNA, 16 nt, Human
cgggaggucgaggcag

SEQ ID NO: 1823814 - RNA, 17 nt, Human
cgggaggucgaggcagg

SEQ ID NO: 1823815 - RNA, 15 nt, Human
cgggcaugacacgaa

SEQ ID NO: 1823816 - RNA, 12 nt, Human
cgggcaugacac

SEQ ID NO: 1823817 - RNA, 14 nt, Human
ccuuuaagagaaau

SEQ ID NO: 1823818 - RNA, 13 nt, Human
ccuuuaagagaaa

SEQ ID NO: 1823819 - RNA, 14 nt, Human
ccuuggcugcaggg

SEQ ID NO: 1823820 - RNA, 20 nt, Human
ccuuguggucccaccccaca

SEQ ID NO: 1823821 - RNA, 16 nt, Human
ccuuguggucccaccc

SEQ ID NO: 1823822 - RNA, 19 nt, Human
ccuuguggucccaccccac

SEQ ID NO: 1823823 - RNA, 13 nt, Human
ccuuggcugcagg

SEQ ID NO: 1823824 - RNA, 12 nt, Human
ccuuggcugcag

SEQ ID NO: 1823825 - RNA, 16 nt, Human
ccuuugcuugaaagaa

SEQ ID NO: 1823826 - RNA, 14 nt, Human
ccuuugacaaaggu

SEQ ID NO: 1823827 - RNA, 11 nt, Human
cgcaaugugac

SEQ ID NO: 1823828 - RNA, 12 nt, Human
cgauuucuguuu

SEQ ID NO: 1823829 - RNA, 19 nt, Human
cgauucuucugcuucagcc

SEQ ID NO: 1823830 - RNA, 13 nt, Human
cgauucuucugcu

SEQ ID NO: 1823831 - RNA, 21 nt, Human
cgauucuucugcuucagccuc

SEQ ID NO: 1823832 - RNA, 19 nt, Human
cgaucuggguucacugcaa

SEQ ID NO: 1823833 - RNA, 19 nt, Human
cgaggccuucucugaagga

SEQ ID NO: 1823834 - RNA, 18 nt, Human
cgaggccuucucugaagg

SEQ ID NO: 1823835 - RNA, 12 nt, Human
cgaggacaggga

SEQ ID NO: 1823836 - RNA, 13 nt, Human
cgaggacagggag

SEQ ID NO: 1823837 - RNA, 14 nt, Human
cgaggacagggagg

SEQ ID NO: 1823838 - RNA, 20 nt, Human
ccuuuguauucucuccugua

SEQ ID NO: 1823839 - RNA, 18 nt, Human
ccuuuguauucucuccug

SEQ ID NO: 1823840 - RNA, 15 nt, Human
ccuuuguauucucuc

SEQ ID NO: 1823841 - RNA, 20 nt, Human
cgcgugcacacaccagagcc

SEQ ID NO: 1823842 - RNA, 19 nt, Human
cgcgugcacacaccagagc

SEQ ID NO: 1823843 - RNA, 16 nt, Human
cgcgugcacacaccag

SEQ ID NO: 1823844 - RNA, 20 nt, Human
cgcuacuaugauuuaauuug

SEQ ID NO: 1823845 - RNA, 21 nt, Human
cgcuaagagggagggagggcu

SEQ ID NO: 1823846 - RNA, 15 nt, Human
cgcuaagagggaggg

SEQ ID NO: 1823847 - RNA, 16 nt, Human
cgcuaagagggaggga

SEQ ID NO: 1823848 - RNA, 14 nt, Human
cgcuaagagggagg

SEQ ID NO: 1823849 - RNA, 16 nt, Human
cgcgacaaugcaaacc

SEQ ID NO: 1823850 - RNA, 17 nt, Human
cgcgacaaugcaaacca

SEQ ID NO: 1823851 - RNA, 15 nt, Human
cgcccccacugguga

SEQ ID NO: 1823852 - RNA, 12 nt, Human
cgcccaggcugg

SEQ ID NO: 1823853 - RNA, 19 nt, Human
cgcccaggcuggagugcaa

SEQ ID NO: 1823854 - RNA, 20 nt, Human
cgcccaggcuggagugcaau

SEQ ID NO: 1823855 - RNA, 13 nt, Human
cgcagacaggacc

SEQ ID NO: 1823856 - RNA, 14 nt, Human
cgcagacaggacca

SEQ ID NO: 1823857 - RNA, 18 nt, Human
cccaaaaggcagaagcaa

SEQ ID NO: 1823858 - RNA, 13 nt, Human
cccaaaaggcaga

SEQ ID NO: 1823859 - RNA, 20 nt, Human
ccauuuugggguacccacug

SEQ ID NO: 1823860 - RNA, 23 nt, Human
ccauuuuggauucuuauggacaa

SEQ ID NO: 1823861 - RNA, 22 nt, Human
ccauuuugggguacccacugcu

SEQ ID NO: 1823862 - RNA, 16 nt, Human
cccaaagcagugcaug

SEQ ID NO: 1823863 - RNA, 12 nt, Human
cccaaagaugca

SEQ ID NO: 1823864 - RNA, 15 nt, Human
cccaaagaugcagcc

SEQ ID NO: 1823865 - RNA, 18 nt, Human
ccauucugccugcccagg

SEQ ID NO: 1823866 - RNA, 17 nt, Human
ccauucugccugcccag

SEQ ID NO: 1823867 - RNA, 17 nt, Human
ccauucuccaccugcca

SEQ ID NO: 1823868 - RNA, 18 nt, Human
ccauucuccaccugccag

SEQ ID NO: 1823869 - RNA, 20 nt, Human
ccauucugccugcccaggcc

SEQ ID NO: 1823870 - RNA, 19 nt, Human
ccauucugccugcccaggc

SEQ ID NO: 1823871 - RNA, 21 nt, Human
ccauucugccugcccaggccc

SEQ ID NO: 1823872 - RNA, 13 nt, Human
ccauggacuuugu

SEQ ID NO: 1823873 - RNA, 14 nt, Human
ccauggacuuuguu

SEQ ID NO: 1823874 - RNA, 15 nt, Human
ccauucuccaccugc

SEQ ID NO: 1823875 - RNA, 16 nt, Human
ccauucuccaccugcc

SEQ ID NO: 1823876 - RNA, 21 nt, Human
cccacaaaggagagcuagcag

SEQ ID NO: 1823877 - RNA, 14 nt, Human
ccaugaagauguag

SEQ ID NO: 1823878 - RNA, 19 nt, Human
ccaugauuaaccacuucag

SEQ ID NO: 1823879 - RNA, 21 nt, Human
ccaugauuaaccacuucagcu

SEQ ID NO: 1823880 - RNA, 18 nt, Human
ccaugauguuuuccauga

SEQ ID NO: 1823881 - RNA, 14 nt, Human
ccaugcugcccugu

SEQ ID NO: 1823882 - RNA, 13 nt, Human
ccaugcuccuggc

SEQ ID NO: 1823883 - RNA, 11 nt, Human
ccaugcugccc

SEQ ID NO: 1823884 - RNA, 13 nt, Human
ccaugcugcccug

SEQ ID NO: 1823885 - RNA, 22 nt, Human
ccaucauugaaaucuuuuugcu

SEQ ID NO: 1823886 - RNA, 12 nt, Human
ccauccucugua

SEQ ID NO: 1823887 - RNA, 19 nt, Human
ccauccucuguacagagcc

SEQ ID NO: 1823888 - RNA, 13 nt, Human
ccaucaccagaca

SEQ ID NO: 1823889 - RNA, 12 nt, Human
ccauacuaauua

SEQ ID NO: 1823890 - RNA, 13 nt, Human
ccauacuaauuau

SEQ ID NO: 1823891 - RNA, 23 nt, Human
ccauacuaauuauacccccugca

SEQ ID NO: 1823892 - RNA, 20 nt, Human
ccagugaggcucugcccuug

SEQ ID NO: 1823893 - RNA, 18 nt, Human
ccagugaggcucugcccu

SEQ ID NO: 1823894 - RNA, 19 nt, Human
ccagugaggcucugcccuu

SEQ ID NO: 1823895 - RNA, 20 nt, Human
ccauccucuguacagagccc

SEQ ID NO: 1823896 - RNA, 15 nt, Human
ccagguucagcuugu

SEQ ID NO: 1823897 - RNA, 14 nt, Human
ccagguucagcuug

SEQ ID NO: 1823898 - RNA, 21 nt, Human
ccaggugcuaggaacacuccu

SEQ ID NO: 1823899 - RNA, 13 nt, Human
ccaguaucuugaa

SEQ ID NO: 1823900 - RNA, 20 nt, Human
ccagugaaaucaguuacucu

SEQ ID NO: 1823901 - RNA, 19 nt, Human
ccaggugcuaggaacacuc

SEQ ID NO: 1823902 - RNA, 13 nt, Human
ccaggccccugcc

SEQ ID NO: 1823903 - RNA, 19 nt, Human
ccaggcuggucucaaacuc

SEQ ID NO: 1823904 - RNA, 21 nt, Human
ccaggcuggucucgaacuccu

SEQ ID NO: 1823905 - RNA, 20 nt, Human
ccaggcuguaucccaugagc

SEQ ID NO: 1823906 - RNA, 12 nt, Human
ccagggaagggg

SEQ ID NO: 1823907 - RNA, 19 nt, Human
ccaggcuuuuuuaucaugu

SEQ ID NO: 1823908 - RNA, 15 nt, Human
ccaggagccccgagg

SEQ ID NO: 1823909 - RNA, 15 nt, Human
ccaggagcagccaca

SEQ ID NO: 1823910 - RNA, 16 nt, Human
ccaggagcagccacau

SEQ ID NO: 1823911 - RNA, 19 nt, Human
ccaggagccuccugcccuu

SEQ ID NO: 1823912 - RNA, 18 nt, Human
ccaggagccuccugcccu

SEQ ID NO: 1823913 - RNA, 13 nt, Human
ccaggagccuccu

SEQ ID NO: 1823914 - RNA, 14 nt, Human
ccaggagccuccug

SEQ ID NO: 1823915 - RNA, 12 nt, Human
ccaggaggccag

SEQ ID NO: 1823916 - RNA, 14 nt, Human
ccaggaggccagcc

SEQ ID NO: 1823917 - RNA, 13 nt, Human
ccaggaggccagc

SEQ ID NO: 1823918 - RNA, 21 nt, Human
ccaggccacaagacccuugug

SEQ ID NO: 1823919 - RNA, 24 nt, Human
ccaggcauuccccaggaggccagc

SEQ ID NO: 1823920 - RNA, 23 nt, Human
ccaggcauuccccaggaggccag

SEQ ID NO: 1823921 - RNA, 22 nt, Human
ccaggcauuccccaggaggcca

SEQ ID NO: 1823922 - RNA, 13 nt, Human
ccaggcauggugg

SEQ ID NO: 1823923 - RNA, 17 nt, Human
ccaggcauuccccagga

SEQ ID NO: 1823924 - RNA, 14 nt, Human
ccaggcauucccca

SEQ ID NO: 1823925 - RNA, 17 nt, Human
ccagcuggggccaggcu

SEQ ID NO: 1823926 - RNA, 18 nt, Human
ccagcuggggccaggcug

SEQ ID NO: 1823927 - RNA, 19 nt, Human
ccagcuggggccaggcugg

SEQ ID NO: 1823928 - RNA, 20 nt, Human
ccagcuggggccaggcuggg

SEQ ID NO: 1823929 - RNA, 21 nt, Human
ccagcuggggccaggcugggu

SEQ ID NO: 1823930 - RNA, 22 nt, Human
ccagcuggggccaggcuggguc

SEQ ID NO: 1823931 - RNA, 23 nt, Human
ccagcuggggccaggcugggucg

SEQ ID NO: 1823932 - RNA, 22 nt, Human
ccaggaagccagcaggcucuca

SEQ ID NO: 1823933 - RNA, 20 nt, Human
ccaggaagccagcaggcucu

SEQ ID NO: 1823934 - RNA, 16 nt, Human
ccagcgagcccuggug

SEQ ID NO: 1823935 - RNA, 15 nt, Human
ccagcgagcccuggu

SEQ ID NO: 1823936 - RNA, 14 nt, Human
ccagcgagcccugg

SEQ ID NO: 1823937 - RNA, 22 nt, Human
ccagccuugaccauucuccacc

SEQ ID NO: 1823938 - RNA, 11 nt, Human
ccagcucuggu

SEQ ID NO: 1823939 - RNA, 12 nt, Human
ccagcucugguc

SEQ ID NO: 1823940 - RNA, 13 nt, Human
ccagcucuggucc

SEQ ID NO: 1823941 - RNA, 16 nt, Human
ccagagcccaccuugg

SEQ ID NO: 1823942 - RNA, 22 nt, Human
ccagagcccaccuuggcucaag

SEQ ID NO: 1823943 - RNA, 19 nt, Human
ccagccuugaccauucucc

SEQ ID NO: 1823944 - RNA, 20 nt, Human
ccagccuugaccauucucca

SEQ ID NO: 1823945 - RNA, 20 nt, Human
ccagcugcuugggcuucauc

SEQ ID NO: 1823946 - RNA, 23 nt, Human
ccagcugcuugggcuucauccuc

SEQ ID NO: 1823947 - RNA, 24 nt, Human
ccagcuggagaaauaugguacuca

SEQ ID NO: 1823948 - RNA, 14 nt, Human
ccagcucuggucca

SEQ ID NO: 1823949 - RNA, 17 nt, Human
ccagcucugguccauag

SEQ ID NO: 1823950 - RNA, 21 nt, Human
ccagcucugguccauagagag

SEQ ID NO: 1823951 - RNA, 22 nt, Human
ccagcucugguccauagagagc

SEQ ID NO: 1823952 - RNA, 22 nt, Human
cccaggugcuaggaacacuccu

SEQ ID NO: 1823953 - RNA, 23 nt, Human
cccaggugcuaggaacacuccuu

SEQ ID NO: 1823954 - RNA, 20 nt, Human
cccagucuggaaugcagugg

SEQ ID NO: 1823955 - RNA, 13 nt, Human
cccagugcccaca

SEQ ID NO: 1823956 - RNA, 17 nt, Human
cccaggccuccuacagc

SEQ ID NO: 1823957 - RNA, 18 nt, Human
cccaggccuccuacagcu

SEQ ID NO: 1823958 - RNA, 15 nt, Human
cccaggccugccugu

SEQ ID NO: 1823959 - RNA, 16 nt, Human
cccaggccugccuguu

SEQ ID NO: 1823960 - RNA, 18 nt, Human
cccaggcgccccuucccc

SEQ ID NO: 1823961 - RNA, 14 nt, Human
cccaggcugagccu

SEQ ID NO: 1823962 - RNA, 21 nt, Human
cccaggagccccgaggccuuc

SEQ ID NO: 1823963 - RNA, 13 nt, Human
cccaggaggccag

SEQ ID NO: 1823964 - RNA, 22 nt, Human
cccaggaggccagccuugacca

SEQ ID NO: 1823965 - RNA, 13 nt, Human
cccaggcaggucu

SEQ ID NO: 1823966 - RNA, 11 nt, Human
cccaggcaggu

SEQ ID NO: 1823967 - RNA, 22 nt, Human
cccaggccccugccacccuggg

SEQ ID NO: 1823968 - RNA, 21 nt, Human
cccaggccccugccacccugg

SEQ ID NO: 1823969 - RNA, 18 nt, Human
cccaggccccugccaccc

SEQ ID NO: 1823970 - RNA, 16 nt, Human
cccaggccccugccac

SEQ ID NO: 1823971 - RNA, 11 nt, Human
cccaggccccu

SEQ ID NO: 1823972 - RNA, 17 nt, Human
cccaggcaggucuugaa

SEQ ID NO: 1823973 - RNA, 20 nt, Human
cccaggcauuccccaggagg

SEQ ID NO: 1823974 - RNA, 21 nt, Human
cccaggcauuccccaggaggc

SEQ ID NO: 1823975 - RNA, 22 nt, Human
cccaggcauuccccaggaggcc

SEQ ID NO: 1823976 - RNA, 23 nt, Human
cccaggcauuccccaggaggcca

SEQ ID NO: 1823977 - RNA, 15 nt, Human
cccagcgagcccugg

SEQ ID NO: 1823978 - RNA, 18 nt, Human
cccagcgagcccuggugg

SEQ ID NO: 1823979 - RNA, 17 nt, Human
cccagcgagcccuggug

SEQ ID NO: 1823980 - RNA, 23 nt, Human
cccagcgagcccugguggcagug

SEQ ID NO: 1823981 - RNA, 19 nt, Human
cccagcgagcccugguggc

SEQ ID NO: 1823982 - RNA, 11 nt, Human
cccagccccuu

SEQ ID NO: 1823983 - RNA, 23 nt, Human
cccagauugcaacaggcugggcu

SEQ ID NO: 1823984 - RNA, 23 nt, Human
cccagcaagugagagcugggugu

SEQ ID NO: 1823985 - RNA, 22 nt, Human
cccagcaagugagagcugggug

SEQ ID NO: 1823986 - RNA, 21 nt, Human
cccagcaagugagagcugggu

SEQ ID NO: 1823987 - RNA, 20 nt, Human
cccagcaagugagagcuggg

SEQ ID NO: 1823988 - RNA, 19 nt, Human
cccagcaagugagagcugg

SEQ ID NO: 1823989 - RNA, 12 nt, Human
cccagccugcua

SEQ ID NO: 1823990 - RNA, 18 nt, Human
cccagccccuucugaccc

SEQ ID NO: 1823991 - RNA, 18 nt, Human
cccagcaagugagagcug

SEQ ID NO: 1823992 - RNA, 16 nt, Human
cccagcaagugagagc

SEQ ID NO: 1823993 - RNA, 22 nt, Human
cccagauugcaacaggcugggc

SEQ ID NO: 1823994 - RNA, 21 nt, Human
cccagauugcaacaggcuggg

SEQ ID NO: 1823995 - RNA, 20 nt, Human
cccagauugcaacaggcugg

SEQ ID NO: 1823996 - RNA, 20 nt, Human
cccagagggccugcaaggga

SEQ ID NO: 1823997 - RNA, 18 nt, Human
cccagagggccugcaagg

SEQ ID NO: 1823998 - RNA, 23 nt, Human
cccaagggccuggccugagcugg

SEQ ID NO: 1823999 - RNA, 18 nt, Human
cccaagggccuggccuga

SEQ ID NO: 1824000 - RNA, 19 nt, Human
cccaagggccuggccugag

SEQ ID NO: 1824001 - RNA, 13 nt, Human
cccaacacaaaga

SEQ ID NO: 1824002 - RNA, 13 nt, Human
ccccaagccuggc

SEQ ID NO: 1824003 - RNA, 14 nt, Human
ccccaagccuggca

SEQ ID NO: 1824004 - RNA, 14 nt, Human
ccccacccaagggc

SEQ ID NO: 1824005 - RNA, 20 nt, Human
ccccacccaagggccuggcc

SEQ ID NO: 1824006 - RNA, 13 nt, Human
cccauucugccug

SEQ ID NO: 1824007 - RNA, 22 nt, Human
ccccaaauggaaaugggcagag

SEQ ID NO: 1824008 - RNA, 20 nt, Human
cccagugcccacaggaucag

SEQ ID NO: 1824009 - RNA, 15 nt, Human
cccagugcccacagg

SEQ ID NO: 1824010 - RNA, 18 nt, Human
cccagugccgagaaggaa

SEQ ID NO: 1824011 - RNA, 17 nt, Human
cccagugccgagaagga

SEQ ID NO: 1824012 - RNA, 15 nt, Human
cccaugcugcccugu

SEQ ID NO: 1824013 - RNA, 16 nt, Human
cccaugcugcccugug

SEQ ID NO: 1824014 - RNA, 17 nt, Human
cccaugcugcccuguga

SEQ ID NO: 1824015 - RNA, 18 nt, Human
cccaugcugcccugugag

SEQ ID NO: 1824016 - RNA, 17 nt, Human
ccccaggaggccagccu

SEQ ID NO: 1824017 - RNA, 22 nt, Human
ccccucagggucccugguggca

SEQ ID NO: 1824018 - RNA, 16 nt, Human
ccacaggaucagucug

SEQ ID NO: 1824019 - RNA, 15 nt, Human
ccacaggcccuuccu

SEQ ID NO: 1824020 - RNA, 16 nt, Human
ccacaggcccuuccuc

SEQ ID NO: 1824021 - RNA, 17 nt, Human
ccacaggcccuuccucu

SEQ ID NO: 1824022 - RNA, 18 nt, Human
ccacaggcccuuccucuc

SEQ ID NO: 1824023 - RNA, 19 nt, Human
ccacaggcccuuccucucc

SEQ ID NO: 1824024 - RNA, 22 nt, Human
ccacaggcccuuccucuccacu

SEQ ID NO: 1824025 - RNA, 23 nt, Human
ccacaggcccuuccucuccacug

SEQ ID NO: 1824026 - RNA, 12 nt, Human
ccacacuccagc

SEQ ID NO: 1824027 - RNA, 22 nt, Human
ccacacccagcccacuucugcc

SEQ ID NO: 1824028 - RNA, 21 nt, Human
ccacacccagcccacuucugc

SEQ ID NO: 1824029 - RNA, 15 nt, Human
ccacacccagcccac

SEQ ID NO: 1824030 - RNA, 20 nt, Human
ccacacccagcccacuucug

SEQ ID NO: 1824031 - RNA, 15 nt, Human
ccaccaacccucaga

SEQ ID NO: 1824032 - RNA, 21 nt, Human
ccaccaacauacucccaucug

SEQ ID NO: 1824033 - RNA, 16 nt, Human
ccacaugugcacaugc

SEQ ID NO: 1824034 - RNA, 16 nt, Human
ccacauuccugaugcu

SEQ ID NO: 1824035 - RNA, 17 nt, Human
ccacaucuugcucugcu

SEQ ID NO: 1824036 - RNA, 18 nt, Human
ccacaucuugcucugcug

SEQ ID NO: 1824037 - RNA, 19 nt, Human
ccacaucuugcucugcuga

SEQ ID NO: 1824038 - RNA, 20 nt, Human
ccacaucuugcucugcugac

SEQ ID NO: 1824039 - RNA, 20 nt, Human
ccacaguggaaccagcccag

SEQ ID NO: 1824040 - RNA, 16 nt, Human
ccaauauucauagcag

SEQ ID NO: 1824041 - RNA, 23 nt, Human
ccacccaggagccccgaggccuu

SEQ ID NO: 1824042 - RNA, 17 nt, Human
ccacccccacccaaggg

SEQ ID NO: 1824043 - RNA, 19 nt, Human
ccacuuagaaauugcauuu

SEQ ID NO: 1824044 - RNA, 18 nt, Human
ccacugcagaagacagua

SEQ ID NO: 1824045 - RNA, 13 nt, Human
ccacugcagaaga

SEQ ID NO: 1824046 - RNA, 21 nt, Human
ccacuuagaaauugcauuucc

SEQ ID NO: 1824047 - RNA, 13 nt, Human
ccacuucagcuga

SEQ ID NO: 1824048 - RNA, 14 nt, Human
ccacuucagcugac

SEQ ID NO: 1824049 - RNA, 23 nt, Human
ccagaaguuugagaucagccugg

SEQ ID NO: 1824050 - RNA, 22 nt, Human
ccagaaguuugagaucagccug

SEQ ID NO: 1824051 - RNA, 18 nt, Human
ccagaauuucccaaagca

SEQ ID NO: 1824052 - RNA, 21 nt, Human
ccagacaccuugacagggcac

SEQ ID NO: 1824053 - RNA, 21 nt, Human
ccagaauuucccaaagcagug

SEQ ID NO: 1824054 - RNA, 16 nt, Human
ccagaaugcuuuagga

SEQ ID NO: 1824055 - RNA, 23 nt, Human
ccagaauggucuuucuaaugugu

SEQ ID NO: 1824056 - RNA, 13 nt, Human
ccagaauuucaaa

SEQ ID NO: 1824057 - RNA, 12 nt, Human
ccagaauuuccc

SEQ ID NO: 1824058 - RNA, 19 nt, Human
ccagaauuucccaaagcag

SEQ ID NO: 1824059 - RNA, 15 nt, Human
ccagaccccuggcuu

SEQ ID NO: 1824060 - RNA, 16 nt, Human
ccagaccccuggcuuu

SEQ ID NO: 1824061 - RNA, 17 nt, Human
ccagaccccuggcuuuu

SEQ ID NO: 1824062 - RNA, 14 nt, Human
ccagaccccuggcu

SEQ ID NO: 1824063 - RNA, 18 nt, Human
ccacucaguccauagcag

SEQ ID NO: 1824064 - RNA, 20 nt, Human
ccacuccagaccccuggcuu

SEQ ID NO: 1824065 - RNA, 21 nt, Human
ccacuccagaccccuggcuuu

SEQ ID NO: 1824066 - RNA, 22 nt, Human
ccacuccagaccccuggcuuuu

SEQ ID NO: 1824067 - RNA, 16 nt, Human
ccacucaggucuguuu

SEQ ID NO: 1824068 - RNA, 11 nt, Human
ccacucagguc

SEQ ID NO: 1824069 - RNA, 14 nt, Human
ccacuacauucugu

SEQ ID NO: 1824070 - RNA, 15 nt, Human
ccacuacauucuguu

SEQ ID NO: 1824071 - RNA, 11 nt, Human
ccacuacauuc

SEQ ID NO: 1824072 - RNA, 15 nt, Human
ccacuagacccacug

SEQ ID NO: 1824073 - RNA, 17 nt, Human
ccacuagacccacugga

SEQ ID NO: 1824074 - RNA, 17 nt, Human
ccacuacauucuguuaa

SEQ ID NO: 1824075 - RNA, 16 nt, Human
ccacuacauucuguua

SEQ ID NO: 1824076 - RNA, 16 nt, Human
ccacgcuggagugcag

SEQ ID NO: 1824077 - RNA, 15 nt, Human
ccacccccacccaag

SEQ ID NO: 1824078 - RNA, 18 nt, Human
ccacggccaggccagagg

SEQ ID NO: 1824079 - RNA, 16 nt, Human
ccacggccaggccaga

SEQ ID NO: 1824080 - RNA, 19 nt, Human
ccacgcuggagugcaguga

SEQ ID NO: 1824081 - RNA, 18 nt, Human
ccacgcuggagugcagug

SEQ ID NO: 1824082 - RNA, 23 nt, Human
ccacggccaggccagagggagug

SEQ ID NO: 1824083 - RNA, 14 nt, Human
ccacgguguucugu

SEQ ID NO: 1824084 - RNA, 15 nt, Human
ccaccccacacacgc

SEQ ID NO: 1824085 - RNA, 19 nt, Human
ccaaagccaaagcuaggcc

SEQ ID NO: 1824086 - RNA, 23 nt, Human
ccaaagcagugcaugcugucccu

SEQ ID NO: 1824087 - RNA, 19 nt, Human
ccaaagcagugcaugcugu

SEQ ID NO: 1824088 - RNA, 17 nt, Human
ccaaagccuccuccagc

SEQ ID NO: 1824089 - RNA, 22 nt, Human
ccaaagccuccuccagccgcca

SEQ ID NO: 1824090 - RNA, 20 nt, Human
ccaaacucaccugccccuca

SEQ ID NO: 1824091 - RNA, 15 nt, Human
ccaaagcuaggccug

SEQ ID NO: 1824092 - RNA, 17 nt, Human
ccaaagcuaggccuggc

SEQ ID NO: 1824093 - RNA, 16 nt, Human
ccaaagcuaggccugg

SEQ ID NO: 1824094 - RNA, 21 nt, Human
ccaaagcuaggccuggccaga

SEQ ID NO: 1824095 - RNA, 15 nt, Human
ccaaaggaagcacau

SEQ ID NO: 1824096 - RNA, 23 nt, Human
ccaaaggaagcacaugccucucu

SEQ ID NO: 1824097 - RNA, 18 nt, Human
ccaaaguacacuguuuca

SEQ ID NO: 1824098 - RNA, 15 nt, Human
ccaaaguacacuguu

SEQ ID NO: 1824099 - RNA, 17 nt, Human
ccaaauuuucuuuuuau

SEQ ID NO: 1824100 - RNA, 20 nt, Human
ccaaaguacacuguuucaaa

SEQ ID NO: 1824101 - RNA, 20 nt, Human
ccaaccaaguggcucccaca

SEQ ID NO: 1824102 - RNA, 13 nt, Human
ccaacaucaacau

SEQ ID NO: 1824103 - RNA, 21 nt, Human
ccaacauacucccaucuguga

SEQ ID NO: 1824104 - RNA, 22 nt, Human
ccaacauacucccaucugugaa

SEQ ID NO: 1824105 - RNA, 17 nt, Human
ccaacauacucccaucu

SEQ ID NO: 1824106 - RNA, 18 nt, Human
ccaacauacucccaucug

SEQ ID NO: 1824107 - RNA, 19 nt, Human
ccaacauacucccaucugu

SEQ ID NO: 1824108 - RNA, 20 nt, Human
ccaacauacucccaucugug

SEQ ID NO: 1824109 - RNA, 16 nt, Human
ccaacauacucccauc

SEQ ID NO: 1824110 - RNA, 14 nt, Human
ccaacccucagagc

SEQ ID NO: 1824111 - RNA, 15 nt, Human
ccaacccucagagcc

SEQ ID NO: 1824112 - RNA, 15 nt, Human
ccaagaagcccagga

SEQ ID NO: 1824113 - RNA, 12 nt, Human
ccaacccucauc

SEQ ID NO: 1824114 - RNA, 20 nt, Human
ccaagaauagaugcugacug

SEQ ID NO: 1824115 - RNA, 19 nt, Human
ccaagaauagaugcugacu

SEQ ID NO: 1824116 - RNA, 19 nt, Human
ccaagaagcccaggaaagg

SEQ ID NO: 1824117 - RNA, 20 nt, Human
ccaagaagcccaggaaaggc

SEQ ID NO: 1824118 - RNA, 13 nt, Human
ccaagccguggcu

SEQ ID NO: 1824119 - RNA, 22 nt, Human
ccaagccuacuuuugccauuga

SEQ ID NO: 1824120 - RNA, 15 nt, Human
ccaagccuggcaagg

SEQ ID NO: 1824121 - RNA, 14 nt, Human
ccaagcucccaggc

SEQ ID NO: 1824122 - RNA, 15 nt, Human
ccaagcucccaggca

SEQ ID NO: 1824123 - RNA, 16 nt, Human
ccaagcucccaggcau

SEQ ID NO: 1824124 - RNA, 22 nt, Human
ccaagcucccaggcauucccca

SEQ ID NO: 1824125 - RNA, 17 nt, Human
ccaaggccaaaggaagc

SEQ ID NO: 1824126 - RNA, 22 nt, Human
ccaaggggaauguuugccucug

SEQ ID NO: 1824127 - RNA, 19 nt, Human
ccaagggccuggccugagc

SEQ ID NO: 1824128 - RNA, 16 nt, Human
ccaagggccuggccug

SEQ ID NO: 1824129 - RNA, 18 nt, Human
ccaagggccuggccugag

SEQ ID NO: 1824130 - RNA, 15 nt, Human
ccaagggccuggccu

SEQ ID NO: 1824131 - RNA, 18 nt, Human
ccaaggccaaaggaagca

SEQ ID NO: 1824132 - RNA, 21 nt, Human
ccaaggccaaaggaagcacau

SEQ ID NO: 1824133 - RNA, 20 nt, Human
ccaagucaagugaaaaagga

SEQ ID NO: 1824134 - RNA, 18 nt, Human
ccaaggugggaggauugc

SEQ ID NO: 1824135 - RNA, 13 nt, Human
ccaaggugggagg

SEQ ID NO: 1824136 - RNA, 23 nt, Human
ccaagguuuggggaagaacgaag

SEQ ID NO: 1824137 - RNA, 22 nt, Human
ccaauaguuguugauuggcagg

SEQ ID NO: 1824138 - RNA, 17 nt, Human
cauuguuggccaaagcc

SEQ ID NO: 1824139 - RNA, 18 nt, Human
cauuguuggccaaagcca

SEQ ID NO: 1824140 - RNA, 23 nt, Human
cauuguauucagaguugaugguu

SEQ ID NO: 1824141 - RNA, 14 nt, Human
cacccaagggccug

SEQ ID NO: 1824142 - RNA, 15 nt, Human
cacccaagggccugg

SEQ ID NO: 1824143 - RNA, 15 nt, Human
cauuguagagcuucu

SEQ ID NO: 1824144 - RNA, 16 nt, Human
cauuguagagcuucug

SEQ ID NO: 1824145 - RNA, 17 nt, Human
cauuguagagcuucugg

SEQ ID NO: 1824146 - RNA, 19 nt, Human
cauuguagagcuucuggca

SEQ ID NO: 1824147 - RNA, 21 nt, Human
cauuguagagcuucuggcacu

SEQ ID NO: 1824148 - RNA, 13 nt, Human
cauuuccuguguc

SEQ ID NO: 1824149 - RNA, 12 nt, Human
cauuuccugugu

SEQ ID NO: 1824150 - RNA, 16 nt, Human
cauuuaaaagauacag

SEQ ID NO: 1824151 - RNA, 15 nt, Human
cauuuaaaagauaca

SEQ ID NO: 1824152 - RNA, 20 nt, Human
cauuuaaaacauuaaaauau

SEQ ID NO: 1824153 - RNA, 12 nt, Human
cauuuaaaagau

SEQ ID NO: 1824154 - RNA, 21 nt, Human
cauuuaaaacauuaaaauaua

SEQ ID NO: 1824155 - RNA, 15 nt, Human
cauuuccuaaauaua

SEQ ID NO: 1824156 - RNA, 13 nt, Human
cauuuccugacag

SEQ ID NO: 1824157 - RNA, 20 nt, Human
cauuuccugacagaaggacu

SEQ ID NO: 1824158 - RNA, 17 nt, Human
cauuuaggccaugggac

SEQ ID NO: 1824159 - RNA, 22 nt, Human
cauuuaauggggaggacaaaau

SEQ ID NO: 1824160 - RNA, 18 nt, Human
cauuuuucagauauaaaa

SEQ ID NO: 1824161 - RNA, 20 nt, Human
cauuuuucagauauaaaaga

SEQ ID NO: 1824162 - RNA, 23 nt, Human
cauuuuucuuagggaaggauaca

SEQ ID NO: 1824163 - RNA, 19 nt, Human
ccaaacauccuacaagaca

SEQ ID NO: 1824164 - RNA, 20 nt, Human
ccaaacauccuacaagacac

SEQ ID NO: 1824165 - RNA, 17 nt, Human
ccaaacucaccugcccc

SEQ ID NO: 1824166 - RNA, 12 nt, Human
cauuuuguaaua

SEQ ID NO: 1824167 - RNA, 16 nt, Human
cauuuuguaauaauaa

SEQ ID NO: 1824168 - RNA, 13 nt, Human
cauuuuguaauaa

SEQ ID NO: 1824169 - RNA, 18 nt, Human
cauuugagcagggcucag

SEQ ID NO: 1824170 - RNA, 17 nt, Human
cauuugagcagggcuca

SEQ ID NO: 1824171 - RNA, 20 nt, Human
cauuugagcagggcucagcg

SEQ ID NO: 1824172 - RNA, 22 nt, Human
cauuuguuugaacugauaaaga

SEQ ID NO: 1824173 - RNA, 20 nt, Human
cauuuguuugaacugauaaa

SEQ ID NO: 1824174 - RNA, 13 nt, Human
cauuugcugaaua

SEQ ID NO: 1824175 - RNA, 17 nt, Human
cauuuguuugaacugau

SEQ ID NO: 1824176 - RNA, 13 nt, Human
cauuugcuccuuu

SEQ ID NO: 1824177 - RNA, 14 nt, Human
cauuugcuccuuuc

SEQ ID NO: 1824178 - RNA, 21 nt, Human
cauuugaaaccccuguaggcc

SEQ ID NO: 1824179 - RNA, 19 nt, Human
cauuugaaaccccuguagg

SEQ ID NO: 1824180 - RNA, 20 nt, Human
cauuugaaaauuuugauguu

SEQ ID NO: 1824181 - RNA, 22 nt, Human
cauuugaaaauuuugauguuuu

SEQ ID NO: 1824182 - RNA, 13 nt, Human
uuuuuucuuacug

SEQ ID NO: 1824183 - RNA, 23 nt, Human
uguccaagaagcccaggaaaggc

SEQ ID NO: 1824184 - RNA, 13 nt, Human
uucaggcucuucu

SEQ ID NO: 1824185 - RNA, 23 nt, Human
uacaggcuccugccaccacgccc

SEQ ID NO: 1824186 - RNA, 13 nt, Human
uacccgggaaggg

SEQ ID NO: 1824187 - RNA, 18 nt, Human
uaggcauugugggaaggg

SEQ ID NO: 1824188 - RNA, 15 nt, Human
uaagugcagccccgu

SEQ ID NO: 1824189 - RNA, 16 nt, Human
uaaucuggacuccucu

SEQ ID NO: 1824190 - RNA, 14 nt, Human
ugggacuggacaau

SEQ ID NO: 1824191 - RNA, 11 nt, Human
uggccacgccc

SEQ ID NO: 1824192 - RNA, 15 nt, Human
ugcacaaacagaggc

SEQ ID NO: 1824193 - RNA, 18 nt, Human
ugcauccuaacuccaugu

SEQ ID NO: 1824194 - RNA, 19 nt, Human
ugccaggaagccagcaggc

SEQ ID NO: 1824195 - RNA, 15 nt, Human
ucuccacugccuucg

SEQ ID NO: 1824196 - RNA, 13 nt, Human
ucucuaccauccc

SEQ ID NO: 1824197 - RNA, 21 nt, Human
uccgcuuucuacccagcgagc

SEQ ID NO: 1824198 - RNA, 21 nt, Human
uccugcacacgcuccuuccuc

SEQ ID NO: 1824199 - RNA, 12 nt, Human
uaguuaaccacu

SEQ ID NO: 1824200 - RNA, 14 nt, Human
ucaguagccagcau

SEQ ID NO: 1824201 - RNA, 15 nt, Human
ggaggggcugugggc

SEQ ID NO: 1824202 - RNA, 14 nt, Human
ggccccgcccaggc

SEQ ID NO: 1824203 - RNA, 17 nt, Human
gggcaacccuggugacc

SEQ ID NO: 1824204 - RNA, 14 nt, Human
ggcugaaauucaga

SEQ ID NO: 1824205 - RNA, 19 nt, Human
ggccccugccucucugcag

SEQ ID NO: 1824206 - RNA, 13 nt, Human
ggcccggccucuc

SEQ ID NO: 1824207 - RNA, 22 nt, Human
gcuucuucagagacuccugcag

SEQ ID NO: 1824208 - RNA, 20 nt, Human
gcuccagcuggccgggagcc

SEQ ID NO: 1824209 - RNA, 18 nt, Human
ggacgcucucuggccuuc

SEQ ID NO: 1824210 - RNA, 17 nt, Human
gcucucuggccuucggc

SEQ ID NO: 1824211 - RNA, 20 nt, Human
gcucuugaugccuggcgggg

SEQ ID NO: 1824212 - RNA, 17 nt, Human
ggaagcacaugccucuc

SEQ ID NO: 1824213 - RNA, 18 nt, Human
ggucuacacugugcugag

SEQ ID NO: 1824214 - RNA, 17 nt, Human
ggucucaaacuccugac

SEQ ID NO: 1824215 - RNA, 17 nt, Human
ggucucgaacuccugac

SEQ ID NO: 1824216 - RNA, 15 nt, Human
ggcugggucgcccug

SEQ ID NO: 1824217 - RNA, 14 nt, Human
ggcugugggcguga

SEQ ID NO: 1824218 - RNA, 21 nt, Human
ggcuguguguacuaauacaga

SEQ ID NO: 1824219 - RNA, 17 nt, Human
ggccucccaacucaccc

SEQ ID NO: 1824220 - RNA, 16 nt, Human
ggccucugcacucccc

SEQ ID NO: 1824221 - RNA, 18 nt, Human
ggaggguagagcggagaa

SEQ ID NO: 1824222 - RNA, 19 nt, Human
ggagggugacgggggugaa

SEQ ID NO: 1824223 - RNA, 15 nt, Human
ggaugcccaaagaug

SEQ ID NO: 1824224 - RNA, 18 nt, Human
gacccacuggacucaccu

SEQ ID NO: 1824225 - RNA, 17 nt, Human
gaaccaccacacccagc

SEQ ID NO: 1824226 - RNA, 23 nt, Human
gagcugccuguucagcuccagcu

SEQ ID NO: 1824227 - RNA, 20 nt, Human
gagacuuugacucuccagaa

SEQ ID NO: 1824228 - RNA, 13 nt, Human
gagagccuuccag

SEQ ID NO: 1824229 - RNA, 22 nt, Human
gagcccugggaggcucuggagc

SEQ ID NO: 1824230 - RNA, 18 nt, Human
gcacacagcacgggggcc

SEQ ID NO: 1824231 - RNA, 18 nt, Human
gcuaauuuugaaaaacug

SEQ ID NO: 1824232 - RNA, 14 nt, Human
gagcagggcucagc

SEQ ID NO: 1824233 - RNA, 19 nt, Human
gagaaugaaagggcccaga

SEQ ID NO: 1824234 - RNA, 16 nt, Human
cugucgcccaggcugg

SEQ ID NO: 1824235 - RNA, 22 nt, Human
gccccauucugccugcccaggc

SEQ ID NO: 1824236 - RNA, 16 nt, Human
gccucagccuccugag

SEQ ID NO: 1824237 - RNA, 16 nt, Human
gccucccgaguagcug

SEQ ID NO: 1824238 - RNA, 16 nt, Human
gccuccugaguagcug

SEQ ID NO: 1824239 - RNA, 21 nt, Human
gccucucccaucacuucccua

SEQ ID NO: 1824240 - RNA, 22 nt, Human
gcaccccagcuggggccaggcu

SEQ ID NO: 1824241 - RNA, 16 nt, Human
gauucuuuugcccaca

SEQ ID NO: 1824242 - RNA, 17 nt, Human
gcacacugagccagcag

SEQ ID NO: 1824243 - RNA, 12 nt, Human
gccaccaacaua

SEQ ID NO: 1824244 - RNA, 14 nt, Human
gccaccacgcccgg

SEQ ID NO: 1824245 - RNA, 17 nt, Human
gccacggccaggccaga

SEQ ID NO: 1824246 - RNA, 20 nt, Human
gccaggcugggucgcccugg

SEQ ID NO: 1824247 - RNA, 20 nt, Human
agcccuuccaugucgccucu

SEQ ID NO: 1824248 - RNA, 12 nt, Human
agccgggcgugg

SEQ ID NO: 1824249 - RNA, 15 nt, Human
agccaccacgcccgg

SEQ ID NO: 1824250 - RNA, 13 nt, Human
agagcccacgccc

SEQ ID NO: 1824251 - RNA, 18 nt, Human
aggcccagagggccugca

SEQ ID NO: 1824252 - RNA, 22 nt, Human
aggcaccuaccaccacgcccgg

SEQ ID NO: 1824253 - RNA, 23 nt, Human
agggaggacgcucucuggccuuc

SEQ ID NO: 1824254 - RNA, 17 nt, Human
aguuucugccgcagccc

SEQ ID NO: 1824255 - RNA, 19 nt, Human
acggcucacugcagccuca

SEQ ID NO: 1824256 - RNA, 22 nt, Human
acacugaugggcaacccccagc

SEQ ID NO: 1824257 - RNA, 22 nt, Human
cccacagcgcuggccgggaccc

SEQ ID NO: 1824258 - RNA, 16 nt, Human
uuugcugucccuuuuc

SEQ ID NO: 1824259 - RNA, 19 nt, Human
ccugcccugugggccccca

SEQ ID NO: 1824260 - RNA, 17 nt, Human
ggcuggccuggccccuc

SEQ ID NO: 1824261 - RNA, 15 nt, Human
ggccccgcccaggcu

SEQ ID NO: 1824262 - RNA, 15 nt, Human
ggccccugcccggcu

SEQ ID NO: 1824263 - RNA, 16 nt, Human
ggcucuggagcccacu

SEQ ID NO: 1824264 - RNA, 12 nt, Human
ggaagcagcuuu

SEQ ID NO: 1824265 - RNA, 19 nt, Human
uugacagggcacaccgggc

SEQ ID NO: 1824266 - RNA, 13 nt, Human
uugcccacgcugg

SEQ ID NO: 1824267 - RNA, 17 nt, Human
ggccuccauccugaggc

SEQ ID NO: 1824268 - RNA, 14 nt, Human
gggucgcccuggac

SEQ ID NO: 1824269 - RNA, 18 nt, Human
ccuccccuccuccuggac

SEQ ID NO: 1824270 - RNA, 18 nt, Human
ccucuccacugccuucga

SEQ ID NO: 1824271 - RNA, 21 nt, Human
cccaccucucucacuccuuga

SEQ ID NO: 1824272 - RNA, 12 nt, Human
cccacucccugc

SEQ ID NO: 1824273 - RNA, 17 nt, Human
gcucuugaacuccugac

SEQ ID NO: 1824274 - RNA, 20 nt, Human
gcugacuguacuccucccag

SEQ ID NO: 1824275 - RNA, 18 nt, Human
gcugcccuggugcugcca

SEQ ID NO: 1824276 - RNA, 15 nt, Human
gcugggucgcccugg

SEQ ID NO: 1824277 - RNA, 22 nt, Human
gcuaggaccccuccaugugggc

SEQ ID NO: 1824278 - RNA, 17 nt, Human
gcuccaaaugcagcuuu

SEQ ID NO: 1824279 - RNA, 17 nt, Human
gcggccccggccggggu

SEQ ID NO: 1824280 - RNA, 19 nt, Human
cgcgugcacacaccagagc

SEQ ID NO: 1824281 - RNA, 17 nt, Human
cgcugccccuggcagcc

SEQ ID NO: 1824282 - RNA, 19 nt, Human
cgcuggccgggaccccgag

SEQ ID NO: 1824283 - RNA, 15 nt, Human
cgauaguggugguga

SEQ ID NO: 1824284 - RNA, 22 nt, Human
gcgcaugucacggagggugacg

SEQ ID NO: 1824285 - RNA, 14 nt, Human
gcgcuggccgggac

SEQ ID NO: 1824286 - RNA, 13 nt, Human
uuggccaggcugg

SEQ ID NO: 1824287 - RNA, 22 nt, Human
gguagagacuuugacucuccag

SEQ ID NO: 1824288 - RNA, 15 nt, Human
gggugaacuugguuc

SEQ ID NO: 1824289 - RNA, 23 nt, Human
gggugacauguguuggcagccuc

SEQ ID NO: 1824290 - RNA, 22 nt, Human
ggucucacuauguugcccaggc

SEQ ID NO: 1824291 - RNA, 21 nt, Human
ggucucacucugucgcccagu

SEQ ID NO: 1824292 - RNA, 16 nt, Human
gcccaccuggccucug

SEQ ID NO: 1824293 - RNA, 19 nt, Human
gcccugcuuugggcugccc

SEQ ID NO: 1824294 - RNA, 20 nt, Human
gcccuggacugugugcucag

SEQ ID NO: 1824295 - RNA, 18 nt, Human
gcucacagaacccuugga

SEQ ID NO: 1824296 - RNA, 21 nt, Human
gcucagcugucaaggcucagu

SEQ ID NO: 1824297 - RNA, 20 nt, Human
gucuaccugaggggccucuu

SEQ ID NO: 1824298 - RNA, 23 nt, Human
gucacggagggugacggggguga

SEQ ID NO: 1824299 - RNA, 17 nt, Human
guccaagaagcccagga

SEQ ID NO: 1824300 - RNA, 19 nt, Human
ggcuccuuuagcgcccagu

SEQ ID NO: 1824301 - RNA, 23 nt, Human
guacacagaacacauaauucagg

SEQ ID NO: 1824302 - RNA, 15 nt, Human
guacuuguggacaca

SEQ ID NO: 1824303 - RNA, 18 nt, Human
ggcaccagcagccuggac

SEQ ID NO: 1824304 - RNA, 13 nt, Human
ggacuggccucug

SEQ ID NO: 1824305 - RNA, 21 nt, Human
ggauccuggaguucugguucc

SEQ ID NO: 1824306 - RNA, 15 nt, Human
ggcccucugcccacu

SEQ ID NO: 1824307 - RNA, 18 nt, Human
ggaagccagcaggcucuc

SEQ ID NO: 1824308 - RNA, 20 nt, Human
ggggccaggcugggucgccc

SEQ ID NO: 1824309 - RNA, 15 nt, Human
ggggcugacagacag

SEQ ID NO: 1824310 - RNA, 12 nt, Human
ggggugcugggc

SEQ ID NO: 1824311 - RNA, 22 nt, Human
ucacaggagggagggggaaggc

SEQ ID NO: 1824312 - RNA, 20 nt, Human
ucagugucaaugcagccccc

SEQ ID NO: 1824313 - RNA, 16 nt, Human
cuucaaccccaugaga

SEQ ID NO: 1824314 - RNA, 19 nt, Human
cugcgguccacccaggagc

SEQ ID NO: 1824315 - RNA, 22 nt, Human
cuggucccacucaguccauagc

SEQ ID NO: 1824316 - RNA, 22 nt, Human
cucgcucuguugcccaggcugg

SEQ ID NO: 1824317 - RNA, 14 nt, Human
cuaaagcugccagc

SEQ ID NO: 1824318 - RNA, 18 nt, Human
cucccacagcgcuggccg

SEQ ID NO: 1824319 - RNA, 14 nt, Human
cuguucccaugaga

SEQ ID NO: 1824320 - RNA, 17 nt, Human
cuucggccuccauccug

SEQ ID NO: 1824321 - RNA, 14 nt, Human
uccaagcuccaucu

SEQ ID NO: 1824322 - RNA, 21 nt, Human
ucugauccuaguuccaccauc

SEQ ID NO: 1824323 - RNA, 18 nt, Human
gugcugcccugcccaccu

SEQ ID NO: 1824324 - RNA, 22 nt, Human
gugaugaugaaaugaggucaga

SEQ ID NO: 1824325 - RNA, 13 nt, Human
gguccugcugcag

SEQ ID NO: 1824326 - RNA, 20 nt, Human
ggucccggagaggccucgac

SEQ ID NO: 1824327 - RNA, 16 nt, Human
guaugggagagaagag

SEQ ID NO: 1824328 - RNA, 21 nt, Human
uaggcaccuaccaccacgccc

SEQ ID NO: 1824329 - RNA, 21 nt, Human
guucagcuccagcucaccagc

SEQ ID NO: 1824330 - RNA, 14 nt, Human
ugaaggccccgccc

SEQ ID NO: 1824331 - RNA, 15 nt, Human
ugagccaccacgccc

SEQ ID NO: 1824332 - RNA, 20 nt, Human
ugauccacucgccuucaucu

SEQ ID NO: 1824333 - RNA, 15 nt, Human
ugugcucaggagccc

SEQ ID NO: 1824334 - RNA, 23 nt, Human
uuugauguucuuucacccuuuuc

SEQ ID NO: 1824335 - RNA, 18 nt, Human
uugacgccaucccagccc

SEQ ID NO: 1824336 - RNA, 16 nt, Human
gcaguggugcgaucug

SEQ ID NO: 1824337 - RNA, 18 nt, Human
gauccuaguuccaccauc

SEQ ID NO: 1824338 - RNA, 21 nt, Human
gauccuuuuggagucagacag

SEQ ID NO: 1824339 - RNA, 20 nt, Human
gagaccccgggagccgggga

SEQ ID NO: 1824340 - RNA, 16 nt, Human
acccaccucagccucc

SEQ ID NO: 1824341 - RNA, 16 nt, Human
accgcgcccagccuca

SEQ ID NO: 1824342 - RNA, 14 nt, Human
acugaccagccucc

SEQ ID NO: 1824343 - RNA, 21 nt, Human
accuuucaauaggaaaaacug

SEQ ID NO: 1824344 - RNA, 13 nt, Human
ucuucuccaccuc

SEQ ID NO: 1824345 - RNA, 19 nt, Human
ucuucuggguuccuuccuc

SEQ ID NO: 1824346 - RNA, 18 nt, Human
ucuugaugccuggcgggg

SEQ ID NO: 1824347 - RNA, 18 nt, Human
ugagccacugcaccgggc

SEQ ID NO: 1824348 - RNA, 9 nt, Human
ugcccagcc

SEQ ID NO: 1824349 - RNA, 15 nt, Human
uuaaaugcccagccc

SEQ ID NO: 1824350 - RNA, 22 nt, Human
cugcugagucccaggcugagcc

SEQ ID NO: 1824351 - RNA, 14 nt, Human
cucuggagguacga

SEQ ID NO: 1824352 - RNA, 18 nt, Human
cucuggccuucggccucc

SEQ ID NO: 1824353 - RNA, 16 nt, Human
cugcccugcccaccug

SEQ ID NO: 1824354 - RNA, 19 nt, Human
ccugcccuuaccugccagg

SEQ ID NO: 1824355 - RNA, 18 nt, Human
ccuggcgggguggggugg

SEQ ID NO: 1824356 - RNA, 15 nt, Human
ccuggcucucccagc

SEQ ID NO: 1824357 - RNA, 18 nt, Human
cgccccucccacagcgcu

SEQ ID NO: 1824358 - RNA, 21 nt, Human
ccguggcgcuuucugcaguuu

SEQ ID NO: 1824359 - RNA, 13 nt, Human
cuucgccaccugg

SEQ ID NO: 1824360 - RNA, 17 nt, Human
cuucugcuucagccucc

SEQ ID NO: 1824361 - RNA, 17 nt, Human
cuccugccucagccucc

SEQ ID NO: 1824362 - RNA, 19 nt, Human
cucuccuuggugucgggca

SEQ ID NO: 1824363 - RNA, 14 nt, Human
cuaauuccccagau

SEQ ID NO: 1824364 - RNA, 16 nt, Human
cuaccaccacgcccgg

SEQ ID NO: 1824365 - RNA, 18 nt, Human
cggccuccauccugaggc

SEQ ID NO: 1824366 - RNA, 23 nt, Human
cucccacagcgcuggccgggacc

SEQ ID NO: 1824367 - RNA, 16 nt, Human
cuccccuucacuccca

SEQ ID NO: 1824368 - RNA, 14 nt, Human
cucccucauuccac

SEQ ID NO: 1824369 - RNA, 22 nt, Human
cucccuuggggccuaugcagag

SEQ ID NO: 1824370 - RNA, 20 nt, Human
cggagggugacgggggugaa

SEQ ID NO: 1824371 - RNA, 18 nt, Human
cugggaggcucuggagcc

SEQ ID NO: 1824372 - RNA, 15 nt, Human
cugcacuccaugagu

SEQ ID NO: 1824373 - RNA, 16 nt, Human
cugccaccacgcccgg

SEQ ID NO: 1824374 - RNA, 15 nt, Human
cuggggccaggcugg

SEQ ID NO: 1824375 - RNA, 16 nt, Human
cuggucuuauuuguaa

SEQ ID NO: 1824376 - RNA, 17 nt, Human
cugaaauaacauggccu

SEQ ID NO: 1824377 - RNA, 14 nt, Human
cuccucugcugcug

SEQ ID NO: 1824378 - RNA, 17 nt, Human
cuccacucugaguccca

SEQ ID NO: 1824379 - RNA, 17 nt, Human
cucugcaggucccuaau

SEQ ID NO: 1824380 - RNA, 23 nt, Human
cucugcccuaaugcgcaggcugg

SEQ ID NO: 1824381 - RNA, 18 nt, Human
ccaaacauccuacaagac

SEQ ID NO: 1824382 - RNA, 17 nt, Human
ccaaagccuccuccagc

SEQ ID NO: 1824383 - RNA, 14 nt, Human
caggggaggguaga

SEQ ID NO: 1824384 - RNA, 19 nt, Human
caguaauaacucuacccug

SEQ ID NO: 1824385 - RNA, 16 nt, Human
cagcuggccgggagcc

SEQ ID NO: 1824386 - RNA, 18 nt, Human
caggcccuuccucuccac

SEQ ID NO: 1824387 - RNA, 12 nt, Human
cccucgaggcgg

SEQ ID NO: 1824388 - RNA, 22 nt, Human
ccgacccuugccgucuaccuga

SEQ ID NO: 1824389 - RNA, 19 nt, Human
ccuguuucagaggcucaga

SEQ ID NO: 1824390 - RNA, 14 nt, Human
ccaggccacaagac

SEQ ID NO: 1824391 - RNA, 14 nt, Human
cauuugcuggagcu

SEQ ID NO: 1824392 - RNA, 15 nt, Human
ccacugcacuccagc

SEQ ID NO: 1824393 - RNA, 16 nt, Human
cccacagcgcuggccg

SEQ ID NO: 1824394 - RNA, 13 nt, Human
caccagggaaggg

SEQ ID NO: 1824395 - RNA, 15 nt, Human
caccccggccaccug

SEQ ID NO: 1824396 - RNA, 20 nt, Human
ccaauauucauagcagcuua

SEQ ID NO: 1824397 - RNA, 22 nt, Human
ccagcccuccuuaucaaaggac

SEQ ID NO: 1824398 - RNA, 19 nt, Human
ccaggcacugcugcccagc

SEQ ID NO: 1824399 - RNA, 15 nt, Human
cacugccaugccagc

SEQ ID NO: 1824400 - RNA, 14 nt, Human
cagggacugccagu

SEQ ID NO: 1824401 - RNA, 23 nt, Human
caggugugagccaccacgcccgg

SEQ ID NO: 1824402 - RNA, 14 nt, Human
cagguugaacccaa

SEQ ID NO: 1824403 - RNA, 19 nt, Human
ccacagcgcuggccgggac

SEQ ID NO: 1824404 - RNA, 18 nt, Human
caggcgugaccugccagg

SEQ ID NO: 1824405 - RNA, 20 nt, Human
cacuuggucugugagaugcu

SEQ ID NO: 1824406 - RNA, 14 nt, Human
cacagcgcuggccg

SEQ ID NO: 1824407 - RNA, 14 nt, Human
caaaaacauggccu

SEQ ID NO: 1824408 - RNA, 12 nt, Human
caaugccucgac

SEQ ID NO: 1824409 - RNA, 14 nt, Human
cagcagccuggacc

SEQ ID NO: 1824410 - RNA, 17 nt, Human
cagggacccacggagcc

SEQ ID NO: 1824411 - RNA, 17 nt, Human
agauacaggaaaagcug

SEQ ID NO: 1824412 - RNA, 15 nt, Human
agacagaaaaaacug

SEQ ID NO: 1824413 - RNA, 14 nt, Human
agcggcuggcagcc

SEQ ID NO: 1824414 - RNA, 15 nt, Human
agcuccugaaaaaug

SEQ ID NO: 1824415 - RNA, 20 nt, Human
agcaggacauggacaaggau

SEQ ID NO: 1824416 - RNA, 13 nt, Human
caaagugcuggga

SEQ ID NO: 1824417 - RNA, 17 nt, Human
caaaugucuuccuggau

SEQ ID NO: 1824418 - RNA, 20 nt, Human
agccaauuuaaagaaaacug

SEQ ID NO: 1824419 - RNA, 10 nt, Human
aggcggugag

SEQ ID NO: 1824420 - RNA, 19 nt, Human
aggcuggccaacgggguga

SEQ ID NO: 1824421 - RNA, 18 nt, Human
aguuggucccccuuccau

SEQ ID NO: 1824422 - RNA, 14 nt, Human
auccagaaaaacug

SEQ ID NO: 1824423 - RNA, 14 nt, Human
acagcccuccaucu

SEQ ID NO: 1824424 - RNA, 21 nt, Human
ucucugguuccuccccuccuc

SEQ ID NO: 1824425 - RNA, 21 nt, Human
uccuggugguauuuagccacu

SEQ ID NO: 1824426 - RNA, 13 nt, Human
ucggccuccaucc

SEQ ID NO: 1824427 - RNA, 19 nt, Human
gucucacuguugcccaggc

SEQ ID NO: 1824428 - RNA, 15 nt, Human
gucuaaaaauucaga

SEQ ID NO: 1824429 - RNA, 18 nt, Human
auucucauuugucacaca

SEQ ID NO: 1824430 - RNA, 19 nt, Human
auggacuccuguuguugaa

SEQ ID NO: 1824431 - RNA, 22 nt, Human
aggugggaggaucucuugagcc

SEQ ID NO: 1824432 - RNA, 23 nt, Human
auacacacacacgcgugcacaca

SEQ ID NO: 1824433 - RNA, 16 nt, Human
agcuugcccuggugcc

SEQ ID NO: 1824434 - RNA, 20 nt, Human
agcucaucucagcuccugaa

SEQ ID NO: 1824435 - RNA, 23 nt, Human
agcucuguccugggagugagcug

SEQ ID NO: 1824436 - RNA, 15 nt, Human
agcaagugagagcug

SEQ ID NO: 1824437 - RNA, 20 nt, Human
agagguuaagguggguacgg

SEQ ID NO: 1824438 - RNA, 21 nt, Human
agccuggcuccaaacccucga

SEQ ID NO: 1824439 - RNA, 20 nt, Human
agugggggaucacagccucu

SEQ ID NO: 1824440 - RNA, 14 nt, Human
accgcagacaggac

SEQ ID NO: 1824441 - RNA, 24 nt, Human
acgccaggggaaaaucagccugcu

SEQ ID NO: 1824442 - RNA, 23 nt, Human
agaaaaaauauuuuccugccagg

SEQ ID NO: 1824443 - RNA, 17 nt, Human
acugcugcccagccucc

SEQ ID NO: 1824444 - RNA, 23 nt, Human
aucuucugaacuuggcgcugccc

SEQ ID NO: 1824445 - RNA, 13 nt, Human
gcccaggccuccu

SEQ ID NO: 1824446 - RNA, 14 nt, Human
gccaggagccuccu

SEQ ID NO: 1824447 - RNA, 16 nt, Human
gccucggacuuagcug

SEQ ID NO: 1824448 - RNA, 14 nt, Human
gaucuuugcagaca

SEQ ID NO: 1824449 - RNA, 23 nt, Human
gcagaagacaguauggcagcuuu

SEQ ID NO: 1824450 - RNA, 13 nt, Human
gcagugggagcug

SEQ ID NO: 1824451 - RNA, 16 nt, Human
gagccuugggaccccu

SEQ ID NO: 1824452 - RNA, 17 nt, Human
gagggcacugguggccc

SEQ ID NO: 1824453 - RNA, 19 nt, Human
gaaaggacacuagaagauu

SEQ ID NO: 1824454 - RNA, 14 nt, Human
gagccugaucaccu

SEQ ID NO: 1824455 - RNA, 19 nt, Human
gaccccugagcuugcagag

SEQ ID NO: 1824456 - RNA, 17 nt, Human
cucccaccucagccucc

SEQ ID NO: 1824457 - RNA, 22 nt, Human
cugaggacacuaaccacgcugg

SEQ ID NO: 1824458 - RNA, 15 nt, Human
cucuccucuugccac

SEQ ID NO: 1824459 - RNA, 15 nt, Human
cuucccacuggaggc

SEQ ID NO: 1824460 - RNA, 22 nt, Human
cuggggccaggcugggucgccc

SEQ ID NO: 1824461 - RNA, 15 nt, Human
cuguaucccaugagc

SEQ ID NO: 1824462 - RNA, 13 nt, Human
cugugccaugugc

SEQ ID NO: 1824463 - RNA, 21 nt, Human
cugccuguugggccaggagcc

SEQ ID NO: 1824464 - RNA, 19 nt, Human
cugcggugcuaucuccccc

SEQ ID NO: 1824465 - RNA, 12 nt, Human herpesvirus 2
ggccgcuggggg

SEQ ID NO: 1824466 - RNA, 16 nt, Human herpesvirus 2
gggccgacgugccggg

SEQ ID NO: 1824467 - RNA, 21 nt, Human herpesvirus 2
ccucgugcgcaugggccgcca

SEQ ID NO: 1824468 - RNA, 18 nt, Human herpesvirus 2
ccaaccccgucucccugc

SEQ ID NO: 1824469 - RNA, 16 nt, Human herpesvirus 2
guucgcgggcgacgcc

SEQ ID NO: 1824470 - RNA, 15 nt, Human herpesvirus 2
ggcccggacuccgcc

SEQ ID NO: 1824471 - RNA, 19 nt, Human herpesvirus 2
ccgcuacugcgccaccguc

SEQ ID NO: 1824472 - RNA, 20 nt, Human herpesvirus 2
cagcguaacgcacccccgga

SEQ ID NO: 1824473 - RNA, 18 nt, Human herpesvirus 2
caccagcucgggggccag

SEQ ID NO: 1824474 - RNA, 18 nt, Human herpesvirus 2
gccccccgucccgagccc

SEQ ID NO: 1824475 - RNA, 12 nt, Human herpesvirus 2
ccgggcccggcc

SEQ ID NO: 1824476 - RNA, 17 nt, Human herpesvirus 2
gggugugacccccccau

SEQ ID NO: 1824477 - RNA, 19 nt, Human herpesvirus 2
cugaaccgcuggcuggaga

SEQ ID NO: 1824478 - RNA, 23 nt, Human herpesvirus 2
ggacaucacccacgucgcccccc

SEQ ID NO: 1824479 - RNA, 16 nt, Human herpesvirus 2
cgcagaccaccucgcg

SEQ ID NO: 1824480 - RNA, 16 nt, Human herpesvirus 2
cuucgccgacgccuuc

SEQ ID NO: 1824481 - RNA, 12 nt, Human herpesvirus 2
uuguuggaugau

SEQ ID NO: 1824482 - RNA, 17 nt, Human herpesvirus 2
uucuggucauggcccuu

SEQ ID NO: 1824483 - RNA, 17 nt, Human herpesvirus 2
cgacggcgucucccggg

SEQ ID NO: 1824484 - RNA, 13 nt, Human herpesvirus 2
ccccacuccaccc

SEQ ID NO: 1824485 - RNA, 19 nt, Human herpesvirus 2
gccggggagggcagggccg

SEQ ID NO: 1824486 - RNA, 13 nt, Human herpesvirus 2
gaacggucuccgc

SEQ ID NO: 1824487 - RNA, 21 nt, Human herpesvirus 2
ccucucgaucccgaagccauc

SEQ ID NO: 1824488 - RNA, 14 nt, Human herpesvirus 2
cgccaccggccugg

SEQ ID NO: 1824489 - RNA, 22 nt, Human herpesvirus 2
agcccugccccgcccccucucc

SEQ ID NO: 1824490 - RNA, 12 nt, Human herpesvirus 2
acgagacagacg

SEQ ID NO: 1824491 - RNA, 17 nt, Human herpesvirus 2
ugcgacggcgucucccg

SEQ ID NO: 1824492 - RNA, 14 nt, Human herpesvirus 2
cacuucgcugucag

SEQ ID NO: 1824493 - RNA, 14 nt, Human herpesvirus 2
ggacugggagccgc

SEQ ID NO: 1824494 - RNA, 21 nt, Human herpesvirus 2
cuaaccgcgcgccuccucgcg

SEQ ID NO: 1824495 - RNA, 22 nt, Human herpesvirus 2
ccccgggcguuauaagccgccg

SEQ ID NO: 1824496 - RNA, 12 nt, Human herpesvirus 2
uguucuccugga

SEQ ID NO: 1824497 - RNA, 16 nt, Human herpesvirus 2
ccggggagggcagggc

SEQ ID NO: 1824498 - RNA, 19 nt, Human herpesvirus 2
uaggcccggggggggccuc

SEQ ID NO: 1824499 - RNA, 17 nt, Human herpesvirus 2
gcagccgcgccgcugcc

SEQ ID NO: 1824500 - RNA, 20 nt, Human herpesvirus 2
agguggggggggggaaagac

SEQ ID NO: 1824501 - RNA, 22 nt, Human herpesvirus 2
uuugugaugcuuuugacacacu

SEQ ID NO: 1824502 - RNA, 16 nt, Human herpesvirus 2
ggcacgagaagccgcc

SEQ ID NO: 1824503 - RNA, 23 nt, Human herpesvirus 2
ccccugggugucgaccgcugucg

SEQ ID NO: 1824504 - RNA, 16 nt, Human herpesvirus 2
gggggcccgggguucu

SEQ ID NO: 1824505 - RNA, 15 nt, Human herpesvirus 2
cuccccgcuggagcc

SEQ ID NO: 1824506 - RNA, 18 nt, Human herpesvirus 2
gaguucaauagauuuccc

SEQ ID NO: 1824507 - RNA, 14 nt, Human herpesvirus 2
cccaggcgacgcca

SEQ ID NO: 1824508 - RNA, 12 nt, Human herpesvirus 2
ucgggcugcugg

SEQ ID NO: 1824509 - RNA, 15 nt, Human herpesvirus 2
agcucgccgugaaga

SEQ ID NO: 1824510 - RNA, 21 nt, Human herpesvirus 2
gccagagacccugccccccgg

SEQ ID NO: 1824511 - RNA, 15 nt, Human herpesvirus 2
gaggggggcagugca

SEQ ID NO: 1824512 - RNA, 16 nt, Human herpesvirus 2
gccguacgucugcccg

SEQ ID NO: 1824513 - RNA, 14 nt, Human herpesvirus 2
gccccaccccgccc

SEQ ID NO: 1824514 - RNA, 15 nt, Human herpesvirus 2
gggugaggaagaaag

SEQ ID NO: 1824515 - RNA, 15 nt, Human herpesvirus 2
gggcgaaaaggcccg

SEQ ID NO: 1824516 - RNA, 21 nt, Human herpesvirus 2
ucucccucuuucccucccucg

SEQ ID NO: 1824517 - RNA, 16 nt, Human herpesvirus 2
cacccgggcgccgggg

SEQ ID NO: 1824518 - RNA, 21 nt, Human herpesvirus 2
cccggcggccgcauauacugc

SEQ ID NO: 1824519 - RNA, 10 nt, Human herpesvirus 2
cggcugggga

SEQ ID NO: 1824520 - RNA, 22 nt, Human herpesvirus 2
gcgccuaccugguacccacgga

SEQ ID NO: 1824521 - RNA, 16 nt, Human herpesvirus 2
gcuucgggacccgccu

SEQ ID NO: 1824522 - RNA, 16 nt, Human herpesvirus 2
gcgaggccgcucuccg

SEQ ID NO: 1824523 - RNA, 15 nt, Human herpesvirus 2
ggaggcgccucugcc

SEQ ID NO: 1824524 - RNA, 23 nt, Human herpesvirus 2
uagaacgccagauguggggugcg

SEQ ID NO: 1824525 - RNA, 14 nt, Human herpesvirus 2
gcucccugcggcug

SEQ ID NO: 1824526 - RNA, 22 nt, Human herpesvirus 2
uccggcaacccuccucgcugcg

SEQ ID NO: 1824527 - RNA, 13 nt, Human herpesvirus 2
cgguggacaugag

SEQ ID NO: 1824528 - RNA, 13 nt, Human herpesvirus 2
ggcucgcggggcc

SEQ ID NO: 1824529 - RNA, 14 nt, Human herpesvirus 2
ccgggagguucccc

SEQ ID NO: 1824530 - RNA, 15 nt, Human herpesvirus 2
gucaccuggcucgcc

SEQ ID NO: 1824531 - RNA, 19 nt, Human herpesvirus 2
ccuguacgacagcggggac

SEQ ID NO: 1824532 - RNA, 16 nt, Human herpesvirus 2
cggcgcucgguugucc

SEQ ID NO: 1824533 - RNA, 14 nt, Human herpesvirus 2
cgcccgccgcccuc

SEQ ID NO: 1824534 - RNA, 14 nt, Human herpesvirus 2
gcccgaccagcgcc

SEQ ID NO: 1824535 - RNA, 12 nt, Human herpesvirus 2
gagauggggaga

SEQ ID NO: 1824536 - RNA, 15 nt, Human herpesvirus 2
cccggucugugggug

SEQ ID NO: 1824537 - RNA, 14 nt, Human herpesvirus 2
gccuccccgcugga

SEQ ID NO: 1824538 - RNA, 19 nt, Human herpesvirus 2
cggaagagagcgccccgcc

SEQ ID NO: 1824539 - RNA, 12 nt, Human herpesvirus 2
agccccgcaggc

SEQ ID NO: 1824540 - RNA, 20 nt, Human herpesvirus 2
gacgcugucgacgagucuca

SEQ ID NO: 1824541 - RNA, 22 nt, Human herpesvirus 2
ggcccaaggcgcugcgccugcc

SEQ ID NO: 1824542 - RNA, 21 nt, Human herpesvirus 2
gggucccgccucccggccgcc

SEQ ID NO: 1824543 - RNA, 14 nt, Human herpesvirus 2
aaggcggacccaga

SEQ ID NO: 1824544 - RNA, 11 nt, Human herpesvirus 2
gucgcuaacga

SEQ ID NO: 1824545 - RNA, 18 nt, Human herpesvirus 2
gugccucacgguccucac

SEQ ID NO: 1824546 - RNA, 14 nt, Human herpesvirus 2
ggagcggcgaacac

SEQ ID NO: 1824547 - RNA, 13 nt, Human herpesvirus 2
guggcgcgccccc

SEQ ID NO: 1824548 - RNA, 13 nt, Human herpesvirus 2
ggggggggugugu

SEQ ID NO: 1824549 - RNA, 23 nt, Human herpesvirus 2
gcccggcgccgccccgccgcucc

SEQ ID NO: 1824550 - RNA, 23 nt, Human herpesvirus 2
gccccccccccucaccccuccga

SEQ ID NO: 1824551 - RNA, 13 nt, Human herpesvirus 2
gguccuggugggc

SEQ ID NO: 1824552 - RNA, 16 nt, Human herpesvirus 2
caagcuaagcgagaag

SEQ ID NO: 1824553 - RNA, 14 nt, Human herpesvirus 2
ugauggggguccug

SEQ ID NO: 1824554 - RNA, 14 nt, Human herpesvirus 2
aggaggggggccuc

SEQ ID NO: 1824555 - RNA, 14 nt, Human herpesvirus 2
ccuggcggacggcc

SEQ ID NO: 1824556 - RNA, 14 nt, Human herpesvirus 2
gugggugggugugg

SEQ ID NO: 1824557 - RNA, 13 nt, Human herpesvirus 2
cgcgggcgucccc

SEQ ID NO: 1824558 - RNA, 15 nt, Human herpesvirus 2
cccagacccucacag

SEQ ID NO: 1824559 - RNA, 15 nt, Human herpesvirus 2
ggggaaagugggccg

SEQ ID NO: 1824560 - RNA, 23 nt, Human herpesvirus 2
ccuccgcagcguaacgcaccccc

SEQ ID NO: 1824561 - RNA, 23 nt, Human herpesvirus 2
ccaacucauacacgcgcuggccc

SEQ ID NO: 1824562 - RNA, 15 nt, Human herpesvirus 2
caucgcguacagccu

SEQ ID NO: 1824563 - RNA, 21 nt, Human herpesvirus 2
agccccgcgaccaccaaggcc

SEQ ID NO: 1824564 - RNA, 23 nt, Human herpesvirus 2
gacgggugggccuagccgugggc

SEQ ID NO: 1824565 - RNA, 22 nt, Human herpesvirus 2
ccaggaggggggcagugcagua

SEQ ID NO: 1824566 - RNA, 18 nt, Human herpesvirus 2
gcggucgcgcgggccgug

SEQ ID NO: 1824567 - RNA, 16 nt, Human herpesvirus 2
cggacucggagggaag

SEQ ID NO: 1824568 - RNA, 17 nt, Human herpesvirus 2
gaaaggaaaggaaacag

SEQ ID NO: 1824569 - RNA, 11 nt, Human herpesvirus 2
ccgggggcgcu

SEQ ID NO: 1824570 - RNA, 23 nt, Human herpesvirus 2
ggccccagggcuucguggaagag

SEQ ID NO: 1824571 - RNA, 15 nt, Human herpesvirus 2
gccuacgucugggug

SEQ ID NO: 1824572 - RNA, 18 nt, Human herpesvirus 2
gcaccgcgggaggaaggc

SEQ ID NO: 1824573 - RNA, 13 nt, Human herpesvirus 2
gguuacugcacuu

SEQ ID NO: 1824574 - RNA, 19 nt, Human herpesvirus 2
cccacagcugcgccagaaa

SEQ ID NO: 1824575 - RNA, 19 nt, Human herpesvirus 2
cggauaccgacagugacag

SEQ ID NO: 1824576 - RNA, 19 nt, Human herpesvirus 2
gggaccccgacguggcccg

SEQ ID NO: 1824577 - RNA, 16 nt, Human herpesvirus 2
gggagagggggaagga

SEQ ID NO: 1824578 - RNA, 17 nt, Human herpesvirus 2
cagggggcggcgccggc

SEQ ID NO: 1824579 - RNA, 22 nt, Human herpesvirus 2
gguucgcgugcggccagccgcc

SEQ ID NO: 1824580 - RNA, 16 nt, Human herpesvirus 2
ccccucguucugcugc

SEQ ID NO: 1824581 - RNA, 20 nt, Human herpesvirus 2
ccucacgguccucaccgagc

SEQ ID NO: 1824582 - RNA, 20 nt, Human herpesvirus 2
acucuccugcgagcccucac

SEQ ID NO: 1824583 - RNA, 17 nt, Human herpesvirus 2
agcgccccgcggacccc

SEQ ID NO: 1824584 - RNA, 13 nt, Human herpesvirus 2
acccccuccccgu

SEQ ID NO: 1824585 - RNA, 22 nt, Human herpesvirus 2
cgcccaacccgagcgaccuucc

SEQ ID NO: 1824586 - RNA, 20 nt, Human herpesvirus 2
cgcggaccccgcccgcgacc

SEQ ID NO: 1824587 - RNA, 18 nt, Human herpesvirus 2
guuccggguugcgccucc

SEQ ID NO: 1824588 - RNA, 17 nt, Human herpesvirus 2
ccaggcgacgccaggcc

SEQ ID NO: 1824589 - RNA, 12 nt, Human herpesvirus 2
ccuucagccugg

SEQ ID NO: 1824590 - RNA, 17 nt, Human herpesvirus 2
ccuccgcgggucccuuc

SEQ ID NO: 1824591 - RNA, 19 nt, Human herpesvirus 2
gauccgaacggcgcacgcc

SEQ ID NO: 1824592 - RNA, 22 nt, Human herpesvirus 2
cuccgaagagacgaugggagcc

SEQ ID NO: 1824593 - RNA, 16 nt, Human herpesvirus 2
ccgccagcgcccuucc

SEQ ID NO: 1824594 - RNA, 13 nt, Human herpesvirus 2
cacgacccgccuc

SEQ ID NO: 1824595 - RNA, 13 nt, Human herpesvirus 2
gucgggccccggg

SEQ ID NO: 1824596 - RNA, 19 nt, Human herpesvirus 2
cgccccgcgccggcuuccc

SEQ ID NO: 1824597 - RNA, 16 nt, Human herpesvirus 2
guacgaucgagguggc

SEQ ID NO: 1824598 - RNA, 16 nt, Human herpesvirus 2
uccacccgggacgagc

SEQ ID NO: 1824599 - RNA, 22 nt, Human herpesvirus 2
gacccccgaacagccccugggg

SEQ ID NO: 1824600 - RNA, 21 nt, Human herpesvirus 2
ucgccgggugucugcucccca

SEQ ID NO: 1824601 - RNA, 17 nt, Human herpesvirus 2
cuaguacccagaggcug

SEQ ID NO: 1824602 - RNA, 22 nt, Human herpesvirus 2
ccgcggccuuucccguggcccu

SEQ ID NO: 1824603 - RNA, 18 nt, Human herpesvirus 2
acaaacagaccgcggaca

SEQ ID NO: 1824604 - RNA, 18 nt, Human herpesvirus 2
uccuuuccaccccccuuc

SEQ ID NO: 1824605 - RNA, 21 nt, Human herpesvirus 2
cuccugcccgcgaccccccgg

SEQ ID NO: 1824606 - RNA, 19 nt, Human herpesvirus 2
cgcuccgcccgccccaggg

SEQ ID NO: 1824607 - RNA, 16 nt, Human herpesvirus 2
cgcugcagggccuggc

SEQ ID NO: 1824608 - RNA, 20 nt, Human herpesvirus 2
cacuuccuauaaacucuccc

SEQ ID NO: 1824609 - RNA, 21 nt, Human herpesvirus 2
cgcgcccccgacccggggccc

SEQ ID NO: 1824610 - RNA, 24 nt, Human herpesvirus 2
gacgucccccacggucaggaccag

SEQ ID NO: 1824611 - RNA, 19 nt, Human herpesvirus 2
acuccaccccccccucuca

SEQ ID NO: 1824612 - RNA, 23 nt, Human herpesvirus 2
cccccaggaggggggcagugcag

SEQ ID NO: 1824613 - RNA, 18 nt, Human herpesvirus 2
acucgccauggcggccgc

SEQ ID NO: 1824614 - RNA, 22 nt, Human herpesvirus 2
gcgggccguucggcaggcccgc

SEQ ID NO: 1824615 - RNA, 14 nt, Human herpesvirus 2
cucgucguggcccu

SEQ ID NO: 1824616 - RNA, 17 nt, Human herpesvirus 2
ccaagcuaaggcgcccg

SEQ ID NO: 1824617 - RNA, 22 nt, Human herpesvirus 2
cccggccuuugcuuccucgcgg

SEQ ID NO: 1824618 - RNA, 14 nt, Human herpesvirus 2
gggccguggccaga

SEQ ID NO: 1824619 - RNA, 15 nt, Human herpesvirus 2
uggccgcuccugccc

SEQ ID NO: 1824620 - RNA, 19 nt, Human herpesvirus 2
cccgcuggagccccugggg

SEQ ID NO: 1824621 - RNA, 18 nt, Human herpesvirus 2
cgcacccgggccggguga

SEQ ID NO: 1824622 - RNA, 20 nt, Human herpesvirus 2
cgcgguauggcugcccccgc

SEQ ID NO: 1824623 - RNA, 11 nt, Human herpesvirus 2
gacccggggcc

SEQ ID NO: 1824624 - RNA, 15 nt, Human herpesvirus 2
ucgcaaccacagcaa

SEQ ID NO: 1824625 - RNA, 22 nt, Human herpesvirus 2
ggcgagaagcgggaccgucgga

SEQ ID NO: 1824626 - RNA, 22 nt, Human herpesvirus 2
gcugcucucccguaccccgccg

SEQ ID NO: 1824627 - RNA, 13 nt, Human herpesvirus 2
ucuuccccagcuu

SEQ ID NO: 1824628 - RNA, 20 nt, Human herpesvirus 2
gagaggucaauagauuuccc

SEQ ID NO: 1824629 - RNA, 22 nt, Human herpesvirus 2
cacgaaguggguauacuuuugu

SEQ ID NO: 1824630 - RNA, 23 nt, Human herpesvirus 2
ccaggggugcguuaucgcacccc

SEQ ID NO: 1824631 - RNA, 9 nt, Human herpesvirus 2
gccagcgcc

SEQ ID NO: 1824632 - RNA, 22 nt, Human herpesvirus 2
cccgggauccuccgccagcucg

SEQ ID NO: 1824633 - RNA, 12 nt, Human herpesvirus 2
ugcagggccugg

SEQ ID NO: 1824634 - RNA, 15 nt, Human herpesvirus 2
acguccaccuuggcc

SEQ ID NO: 1824635 - RNA, 15 nt, Human herpesvirus 2
aggugcugccgccgc

SEQ ID NO: 1824636 - RNA, 15 nt, Human herpesvirus 2
cgcuggcgggagcca

SEQ ID NO: 1824637 - RNA, 23 nt, Human herpesvirus 2
acacacccccaucgggcugcugg

SEQ ID NO: 1824638 - RNA, 22 nt, Human herpesvirus 2
guacccucucaacgcccaggcc

SEQ ID NO: 1824639 - RNA, 19 nt, Human herpesvirus 2
cgcaacaacggcgggcccc

SEQ ID NO: 1824640 - RNA, 21 nt, Human herpesvirus 2
gaggccuggcguuugggggcg

SEQ ID NO: 1824641 - RNA, 13 nt, Human herpesvirus 2
caccccccugacu

SEQ ID NO: 1824642 - RNA, 19 nt, Human herpesvirus 2
cucaccgagccgcugugcc

SEQ ID NO: 1824643 - RNA, 15 nt, Human herpesvirus 2
ugugggacugggggc

SEQ ID NO: 1824644 - RNA, 19 nt, Human herpesvirus 2
ucgggaaucucgggucgcc

SEQ ID NO: 1824645 - RNA, 22 nt, Human herpesvirus 2
acagugggugcucggggacaga

SEQ ID NO: 1824646 - RNA, 21 nt, Human herpesvirus 2
gccgguagugcaggugggccg

SEQ ID NO: 1824647 - RNA, 14 nt, Human herpesvirus 2
aguucaauagauuu

SEQ ID NO: 1824648 - RNA, 21 nt, Human herpesvirus 2
gggagccagggucggacagga

SEQ ID NO: 1824649 - RNA, 13 nt, Human herpesvirus 2
agccacccugggu

SEQ ID NO: 1824650 - RNA, 13 nt, Human herpesvirus 2
gaccuuccccucc

SEQ ID NO: 1824651 - RNA, 14 nt, Human herpesvirus 2
gcggccaccccgcc

SEQ ID NO: 1824652 - RNA, 21 nt, Human herpesvirus 2
cgacgcgcgcgcccccgaccc

SEQ ID NO: 1824653 - RNA, 12 nt, Human herpesvirus 2
gcagggccuggc

SEQ ID NO: 1824654 - RNA, 17 nt, Human herpesvirus 2
cuccagguacugcugca

SEQ ID NO: 1824655 - RNA, 17 nt, Human herpesvirus 2
uggaggggggugcugug

SEQ ID NO: 1824656 - RNA, 21 nt, Human herpesvirus 2
cagaacccccguaaacaccag

SEQ ID NO: 1824657 - RNA, 17 nt, Human herpesvirus 2
gggcgucgcgguggcaa

SEQ ID NO: 1824658 - RNA, 15 nt, Human herpesvirus 2
augcuaauuaaauac

SEQ ID NO: 1824659 - RNA, 15 nt, Human herpesvirus 2
gcccguggguggcca

SEQ ID NO: 1824660 - RNA, 14 nt, Human herpesvirus 2
uguauucccuugcc

SEQ ID NO: 1824661 - RNA, 21 nt, Human herpesvirus 2
gaugcagcucccccgcgcagg

SEQ ID NO: 1824662 - RNA, 13 nt, Human herpesvirus 2
cggccaccccgcc

SEQ ID NO: 1824663 - RNA, 12 nt, Human herpesvirus 2
gccgggggccau

SEQ ID NO: 1824664 - RNA, 16 nt, Human herpesvirus 2
ggccgccauucccgcu

SEQ ID NO: 1824665 - RNA, 15 nt, Human herpesvirus 2
cgccaccguccaccu

SEQ ID NO: 1824666 - RNA, 14 nt, Human herpesvirus 2
cgugccccuggacu

SEQ ID NO: 1824667 - RNA, 22 nt, Human herpesvirus 2
uucccuccgaguccguaugcaa

SEQ ID NO: 1824668 - RNA, 15 nt, Human herpesvirus 2
uguuguuuucccggg

SEQ ID NO: 1824669 - RNA, 22 nt, Human herpesvirus 2
gcgcggucuagaugccagugga

SEQ ID NO: 1824670 - RNA, 17 nt, Human herpesvirus 2
gucguugggcggccccc

SEQ ID NO: 1824671 - RNA, 18 nt, Human herpesvirus 2
uguggcggucggccagca

SEQ ID NO: 1824672 - RNA, 21 nt, Human herpesvirus 2
cguccguauguuaauugcaau

SEQ ID NO: 1824673 - RNA, 11 nt, Human herpesvirus 2
agcuggcccug

SEQ ID NO: 1824674 - RNA, 17 nt, Human herpesvirus 2
ugguccccgagcagcac

SEQ ID NO: 1824675 - RNA, 20 nt, Human herpesvirus 2
cugggucgggagcaggacag

SEQ ID NO: 1824676 - RNA, 22 nt, Human herpesvirus 2
cacgcggggacccgccagagac

SEQ ID NO: 1824677 - RNA, 17 nt, Human herpesvirus 2
uccgacuuccgcauaca

SEQ ID NO: 1824678 - RNA, 23 nt, Human herpesvirus 2
cccgaauccggggcgugcugugc

SEQ ID NO: 1824679 - RNA, 14 nt, Human herpesvirus 2
aggcgcugcgccug

SEQ ID NO: 1824680 - RNA, 16 nt, Human herpesvirus 2
ccccauccccucccga

SEQ ID NO: 1824681 - RNA, 17 nt, Human herpesvirus 2
ccuccacgcccugcugu

SEQ ID NO: 1824682 - RNA, 17 nt, Human herpesvirus 2
cuguuguuucugggccc

SEQ ID NO: 1824683 - RNA, 22 nt, Human herpesvirus 2
gaaaacggucggcgaacacaac

SEQ ID NO: 1824684 - RNA, 19 nt, Human herpesvirus 2
gcggccccuguuggagccg

SEQ ID NO: 1824685 - RNA, 15 nt, Human herpesvirus 2
gugcugcgcgagccg

SEQ ID NO: 1824686 - RNA, 18 nt, Human herpesvirus 2
agagcggcgagugcucgc

SEQ ID NO: 1824687 - RNA, 18 nt, Human herpesvirus 2
auccaggauuaccgaccc

SEQ ID NO: 1824688 - RNA, 14 nt, Human herpesvirus 2
gggaggagacagga

SEQ ID NO: 1824689 - RNA, 15 nt, Human herpesvirus 2
ccuuuaagacagacg

SEQ ID NO: 1824690 - RNA, 15 nt, Human herpesvirus 2
accgcgcggaccggc

SEQ ID NO: 1824691 - RNA, 22 nt, Human herpesvirus 2
aaacaggcaccgcgggaggaag

SEQ ID NO: 1824692 - RNA, 17 nt, Human herpesvirus 2
agagccgaacgcagguc

SEQ ID NO: 1824693 - RNA, 14 nt, Human herpesvirus 2
gagccucuuugggc

SEQ ID NO: 1824694 - RNA, 20 nt, Human herpesvirus 2
gcgcagcgcaucgccgccga

SEQ ID NO: 1824695 - RNA, 14 nt, Human herpesvirus 2
gacggggaggagac

SEQ ID NO: 1824696 - RNA, 17 nt, Human herpesvirus 2
guccagguacccggcgg

SEQ ID NO: 1824697 - RNA, 21 nt, Human herpesvirus 2
ggcgaugcgacgccgccccug

SEQ ID NO: 1824698 - RNA, 21 nt, Human herpesvirus 2
cacucgaagaaguuggugugu

SEQ ID NO: 1824699 - RNA, 14 nt, Human herpesvirus 2
uugguccgggggcg

SEQ ID NO: 1824700 - RNA, 16 nt, Human herpesvirus 2
gccccgccgggucacc

SEQ ID NO: 1824701 - RNA, 14 nt, Human herpesvirus 2
gggcaagugcagua

SEQ ID NO: 1824702 - RNA, 12 nt, Human herpesvirus 2
ggccagcggggg

SEQ ID NO: 1824703 - RNA, 22 nt, Human herpesvirus 2
aacaugacaacgacgccccucu

SEQ ID NO: 1824704 - RNA, 14 nt, Human herpesvirus 2
cgaccaccaaggcc

SEQ ID NO: 1824705 - RNA, 12 nt, Human herpesvirus 2
uacauuucccca

SEQ ID NO: 1824706 - RNA, 18 nt, Human herpesvirus 2
ccccaggcgacgccaggc

SEQ ID NO: 1824707 - RNA, 14 nt, Human herpesvirus 2
cgggagccgcggcc

SEQ ID NO: 1824708 - RNA, 17 nt, Human herpesvirus 2
acggcgccuaccuggua

SEQ ID NO: 1824709 - RNA, 15 nt, Human herpesvirus 2
ccccgcaggcaggcg

SEQ ID NO: 1824710 - RNA, 20 nt, Human herpesvirus 2
gucgcuuuccacacccccuc

SEQ ID NO: 1824711 - RNA, 22 nt, Human herpesvirus 2
caaccccuaccugcgcgugcag

SEQ ID NO: 1824712 - RNA, 14 nt, Human herpesvirus 2
acgcgcccgcgucc

SEQ ID NO: 1824713 - RNA, 13 nt, Human herpesvirus 2
agagagauuuccc

SEQ ID NO: 1824714 - RNA, 16 nt, Human herpesvirus 2
ugguccccgagcagca

SEQ ID NO: 1824715 - RNA, 13 nt, Human herpesvirus 2
cugcgcgagccgu

SEQ ID NO: 1824716 - RNA, 18 nt, Human herpesvirus 2
gccuagccgugggccugu

SEQ ID NO: 1824717 - RNA, 20 nt, Human herpesvirus 2
uaguguguccccccccccuc

SEQ ID NO: 1824718 - RNA, 16 nt, Human herpesvirus 2
cacaggcccaccacca

SEQ ID NO: 1824719 - RNA, 23 nt, Human herpesvirus 2
cauggcauccgggguuuccccgg

SEQ ID NO: 1824720 - RNA, 22 nt, Human herpesvirus 2
cagccuggaccagaccguggcc

SEQ ID NO: 1824721 - RNA, 14 nt, Human herpesvirus 2
cggccuggucgucc

SEQ ID NO: 1824722 - RNA, 18 nt, Human herpesvirus 2
ugagcggaacgccccggg

SEQ ID NO: 1824723 - RNA, 13 nt, Human herpesvirus 2
guaucggccagga

SEQ ID NO: 1824724 - RNA, 18 nt, Human herpesvirus 2
ggcaccgcgcggaccggc

SEQ ID NO: 1824725 - RNA, 21 nt, Human herpesvirus 2
ggcaggcguguugggaaggga

SEQ ID NO: 1824726 - RNA, 14 nt, Human herpesvirus 2
ccagcuuucccucc

SEQ ID NO: 1824727 - RNA, 16 nt, Human herpesvirus 2
uccgggggccuggugg

SEQ ID NO: 1824728 - RNA, 17 nt, Human herpesvirus 2
gagcagcacggcggcca

SEQ ID NO: 1824729 - RNA, 16 nt, Human herpesvirus 2
ucugugcggcccucuc

SEQ ID NO: 1824730 - RNA, 14 nt, Human herpesvirus 2
ccuagaggcugucc

SEQ ID NO: 1824731 - RNA, 12 nt, Human herpesvirus 2
gcccgaccuguu

SEQ ID NO: 1824732 - RNA, 20 nt, Human herpesvirus 2
ccccgcugcugugcacccua

SEQ ID NO: 1824733 - RNA, 13 nt, Human herpesvirus 2
acccccccccauc

SEQ ID NO: 1824734 - RNA, 15 nt, Human herpesvirus 2
cucaccccaccccau

SEQ ID NO: 1824735 - RNA, 21 nt, Human herpesvirus 2
gacagcgcgaugaggggcacc

SEQ ID NO: 1824736 - RNA, 15 nt, Human herpesvirus 2
ggcgauccugggccu

SEQ ID NO: 1824737 - RNA, 19 nt, Human herpesvirus 2
cuggcggaagugccgcacg

SEQ ID NO: 1824738 - RNA, 19 nt, Human herpesvirus 2
ccgcaguuucaccgcccca

SEQ ID NO: 1824739 - RNA, 18 nt, Human herpesvirus 2
cuugccccucccccggcc

SEQ ID NO: 1824740 - RNA, 17 nt, Human herpesvirus 2
gguuucgguuccacucu

SEQ ID NO: 1824741 - RNA, 17 nt, Human herpesvirus 2
acugccugacccucucg

SEQ ID NO: 1824742 - RNA, 12 nt, Human herpesvirus 2
cgggagcaggac

SEQ ID NO: 1824743 - RNA, 19 nt, Human herpesvirus 2
cggccgcgcuaccucaccc

SEQ ID NO: 1824744 - RNA, 14 nt, Human herpesvirus 2
caaccuggcacagc

SEQ ID NO: 1824745 - RNA, 16 nt, Human herpesvirus 2
uccacgcccugcugua

SEQ ID NO: 1824746 - RNA, 12 nt, Human herpesvirus 2
ccggggcacgcg

SEQ ID NO: 1824747 - RNA, 17 nt, Human herpesvirus 2
gcgagggcccggcgccg

SEQ ID NO: 1824748 - RNA, 18 nt, Human herpesvirus 2
gaccaccgcgaccacccc

SEQ ID NO: 1824749 - RNA, 15 nt, Human herpesvirus 2
cgcccccgugccugu

SEQ ID NO: 1824750 - RNA, 17 nt, Human herpesvirus 2
cugggucgggagcagga

SEQ ID NO: 1824751 - RNA, 16 nt, Human herpesvirus 2
uuucagguuccggggg

SEQ ID NO: 1824752 - RNA, 15 nt, Human herpesvirus 2
ucgcucccucagcau

SEQ ID NO: 1824753 - RNA, 13 nt, Human herpesvirus 2
gugccgcacggcc

SEQ ID NO: 1824754 - RNA, 18 nt, Human herpesvirus 2
cccggcgucaugcacgcc

SEQ ID NO: 1824755 - RNA, 14 nt, Human herpesvirus 2
acaccgggcugggg

SEQ ID NO: 1824756 - RNA, 14 nt, Human herpesvirus 2
ccugggccuguggg

SEQ ID NO: 1824757 - RNA, 14 nt, Human herpesvirus 2
ggguaggccagagc

SEQ ID NO: 1824758 - RNA, 20 nt, Human herpesvirus 2
aucgugugcacgaaaaagag

SEQ ID NO: 1824759 - RNA, 15 nt, Human herpesvirus 2
ggaggguucggggca

SEQ ID NO: 1824760 - RNA, 13 nt, Human herpesvirus 2
ggcauggaagccc

SEQ ID NO: 1824761 - RNA, 13 nt, Human herpesvirus 2
gggaggguggcug

SEQ ID NO: 1824762 - RNA, 15 nt, Human herpesvirus 2
agucucuuggggaaa

SEQ ID NO: 1824763 - RNA, 21 nt, Human herpesvirus 2
ccaccgcccccgcuggcggga

SEQ ID NO: 1824764 - RNA, 14 nt, Human herpesvirus 2
cgaccccccggguu

SEQ ID NO: 1824765 - RNA, 21 nt, Human herpesvirus 2
ggggacuccccucuaccccca

SEQ ID NO: 1824766 - RNA, 15 nt, Human herpesvirus 2
agccagggcugggag

SEQ ID NO: 1824767 - RNA, 20 nt, Human herpesvirus 2
cgggggggggcaagugcagu

SEQ ID NO: 1824768 - RNA, 14 nt, Human herpesvirus 2
cggggccagggcug

SEQ ID NO: 1824769 - RNA, 17 nt, Human herpesvirus 2
agaaggggggugugugu

SEQ ID NO: 1824770 - RNA, 20 nt, Human herpesvirus 2
cgcuuauaagagcgggcccg

SEQ ID NO: 1824771 - RNA, 14 nt, Human herpesvirus 2
ucuuccuguaccug

SEQ ID NO: 1824772 - RNA, 13 nt, Human herpesvirus 2
ggugacugggacc

SEQ ID NO: 1824773 - RNA, 20 nt, Human herpesvirus 2
ggacggguauaaaggccagg

SEQ ID NO: 1824774 - RNA, 21 nt, Human herpesvirus 2
gggagguggggggggggaaag

SEQ ID NO: 1824775 - RNA, 12 nt, Human herpesvirus 2
uugaacucuccc

SEQ ID NO: 1824776 - RNA, 21 nt, Human herpesvirus 2
cgguuggacgaucccgggccc

SEQ ID NO: 1824777 - RNA, 13 nt, Human herpesvirus 2
gaggcccccggcc

SEQ ID NO: 1824778 - RNA, 16 nt, Human herpesvirus 2
cagaauaaaaggcauu

SEQ ID NO: 1824779 - RNA, 17 nt, Human herpesvirus 2
uauugaaacagacauac

SEQ ID NO: 1824780 - RNA, 21 nt, Human herpesvirus 2
gggcccuucgcagcuucaccg

SEQ ID NO: 1824781 - RNA, 19 nt, Human herpesvirus 2
ccgucgccgccggccacgc

SEQ ID NO: 1824782 - RNA, 14 nt, Human herpesvirus 2
acgcucucugccuc

SEQ ID NO: 1824783 - RNA, 21 nt, Human herpesvirus 2
uggccggggagggcagggccg

SEQ ID NO: 1824784 - RNA, 19 nt, Human herpesvirus 2
ucgcacgcgcgcaggcugg

SEQ ID NO: 1824785 - RNA, 16 nt, Human herpesvirus 2
cggguauaagggcagc

SEQ ID NO: 1824786 - RNA, 13 nt, Human herpesvirus 2
ugacauucacccc

SEQ ID NO: 1824787 - RNA, 21 nt, Human herpesvirus 2
cacgcugcgcgcgcaccugcg

SEQ ID NO: 1824788 - RNA, 20 nt, Human herpesvirus 2
cgcgcaucggaccccccauc

SEQ ID NO: 1824789 - RNA, 20 nt, Human herpesvirus 2
gccccgccucaccuccgucu

SEQ ID NO: 1824790 - RNA, 13 nt, Human herpesvirus 2
caccaccaaccug

SEQ ID NO: 1824791 - RNA, 17 nt, Human herpesvirus 2
aaaagggacgcgcagcg

SEQ ID NO: 1824792 - RNA, 21 nt, Human herpesvirus 2
accccuaccugcgcgugcaga

SEQ ID NO: 1824793 - RNA, 15 nt, Human herpesvirus 2
ccgugucccucccgg

SEQ ID NO: 1824794 - RNA, 14 nt, Human herpesvirus 2
gggcccguguggga

SEQ ID NO: 1824795 - RNA, 15 nt, Human herpesvirus 2
gugcuggugguggaa

SEQ ID NO: 1824796 - RNA, 19 nt, Human herpesvirus 2
cgggcugguuaucgccugu

SEQ ID NO: 1824797 - RNA, 16 nt, Human herpesvirus 2
cggccgcggacgaccu

SEQ ID NO: 1824798 - RNA, 19 nt, Human herpesvirus 2
gucugcgucguccagggug

SEQ ID NO: 1824799 - RNA, 22 nt, Human herpesvirus 2
agccgacccgucuagcggccgg

SEQ ID NO: 1824800 - RNA, 12 nt, Human herpesvirus 2
gggaugguggug

SEQ ID NO: 1824801 - RNA, 21 nt, Human herpesvirus 2
accgccucuguuccuuucccu

SEQ ID NO: 1824802 - RNA, 12 nt, Human herpesvirus 2
gccgggagaguu

SEQ ID NO: 1824803 - RNA, 16 nt, Human herpesvirus 2
gagccccugggggacc

SEQ ID NO: 1824804 - RNA, 20 nt, Human herpesvirus 2
accggucgcuuuccacaccc

SEQ ID NO: 1824805 - RNA, 23 nt, Human herpesvirus 2
ggggagguggggggggggaaaga

SEQ ID NO: 1824806 - RNA, 18 nt, Human herpesvirus 2
cgcccccucucccacacg

SEQ ID NO: 1824807 - RNA, 23 nt, Human herpesvirus 2
ggaaaucuauugaacucucccgg

SEQ ID NO: 1824808 - RNA, 14 nt, Human herpesvirus 2
augggggggaaggg

SEQ ID NO: 1824809 - RNA, 17 nt, Human herpesvirus 2
gaggagagcgucagcgc

SEQ ID NO: 1824810 - RNA, 13 nt, Human herpesvirus 2
caucucuguuuca

SEQ ID NO: 1824811 - RNA, 16 nt, Human herpesvirus 2
cguucggaccuggggg

SEQ ID NO: 1824812 - RNA, 16 nt, Human herpesvirus 2
gccgucaaccccgccc

SEQ ID NO: 1824813 - RNA, 19 nt, Human herpesvirus 2
cccgaauccggggcgugcu

SEQ ID NO: 1824814 - RNA, 18 nt, Human herpesvirus 2
gaggauguguucuccugg

SEQ ID NO: 1824815 - RNA, 23 nt, Human herpesvirus 2
ggcgcacacgccaucgacccgga

SEQ ID NO: 1824816 - RNA, 15 nt, Human herpesvirus 2
gucgcuccccuucag

SEQ ID NO: 1824817 - RNA, 13 nt, Human herpesvirus 2
aaccacacacacg

SEQ ID NO: 1824818 - RNA, 18 nt, Human herpesvirus 2
gagggcccggcgccgccc

SEQ ID NO: 1824819 - RNA, 14 nt, Human herpesvirus 2
gggggccaugacac

SEQ ID NO: 1824820 - RNA, 15 nt, Human herpesvirus 2
cccgcaacccgcagg

SEQ ID NO: 1824821 - RNA, 21 nt, Human herpesvirus 2
gccguggggccccagggcuuc

SEQ ID NO: 1824822 - RNA, 14 nt, Human herpesvirus 2
gggccggugggccc

SEQ ID NO: 1824823 - RNA, 14 nt, Human herpesvirus 2
cucguucugcugca

SEQ ID NO: 1824824 - RNA, 11 nt, Human herpesvirus 2
gcugcggggac

SEQ ID NO: 1824825 - RNA, 19 nt, Human herpesvirus 2
uugguuguguuuuguggga

SEQ ID NO: 1824826 - RNA, 13 nt, Human herpesvirus 2
uuauugaccaaau

SEQ ID NO: 1824827 - RNA, 21 nt, Human herpesvirus 2
ucccuaacacggaggagccgg

SEQ ID NO: 1824828 - RNA, 22 nt, Human herpesvirus 2
cggccgccuccccgcuggagcc

SEQ ID NO: 1824829 - RNA, 16 nt, Human herpesvirus 2
aucgcuguauucccuu

SEQ ID NO: 1824830 - RNA, 17 nt, Human herpesvirus 2
gcgcccaccgguccuuc

SEQ ID NO: 1824831 - RNA, 19 nt, Human herpesvirus 2
cgcagucuggucgaggugg

SEQ ID NO: 1824832 - RNA, 19 nt, Human herpesvirus 2
cgcaauaaacgccuucccg

SEQ ID NO: 1824833 - RNA, 14 nt, Human herpesvirus 2
ggacgcccccuccc

SEQ ID NO: 1824834 - RNA, 13 nt, Human herpesvirus 2
cccucgaacaugg

SEQ ID NO: 1824835 - RNA, 18 nt, Human herpesvirus 2
guacccaccacaccccac

SEQ ID NO: 1824836 - RNA, 12 nt, Human herpesvirus 2
gccacccugggu

SEQ ID NO: 1824837 - RNA, 18 nt, Human herpesvirus 2
gucaccgggggccccggg

SEQ ID NO: 1824838 - RNA, 22 nt, Human herpesvirus 2
caccggggcgccccccccgacg

SEQ ID NO: 1824839 - RNA, 23 nt, Human herpesvirus 2
cccgcacgaagugaaccaacugc

SEQ ID NO: 1824840 - RNA, 17 nt, Human herpesvirus 2
cccucggcagcccggac

SEQ ID NO: 1824841 - RNA, 15 nt, Human herpesvirus 2
cacaccgggcugggg

SEQ ID NO: 1824842 - RNA, 11 nt, Human herpesvirus 2
aucugggaaga

SEQ ID NO: 1824843 - RNA, 16 nt, Human herpesvirus 2
cuuccgugccccugga

SEQ ID NO: 1824844 - RNA, 16 nt, Human herpesvirus 2
acagccccuggggcug

SEQ ID NO: 1824845 - RNA, 22 nt, Human herpesvirus 2
ggucggccagcacgaccaggga

SEQ ID NO: 1824846 - RNA, 14 nt, Human herpesvirus 2
cugcagccccgguc

SEQ ID NO: 1824847 - RNA, 14 nt, Human herpesvirus 2
ggcggaagugccgc

SEQ ID NO: 1824848 - RNA, 17 nt, Human herpesvirus 2
ggacagccagggcuggg

SEQ ID NO: 1824849 - RNA, 14 nt, Human herpesvirus 2
gaccgacgggcccc

SEQ ID NO: 1824850 - RNA, 17 nt, Human herpesvirus 2
gcacguacguucugccc

SEQ ID NO: 1824851 - RNA, 21 nt, Human herpesvirus 2
gggcacucuggcguccccagg

SEQ ID NO: 1824852 - RNA, 12 nt, Human herpesvirus 2
uguuccaccgcu

SEQ ID NO: 1824853 - RNA, 15 nt, Human herpesvirus 2
gcucgucccccgagg

SEQ ID NO: 1824854 - RNA, 18 nt, Human herpesvirus 2
gagcugggcuuguguaua

SEQ ID NO: 1824855 - RNA, 12 nt, Human herpesvirus 2
caccgcccccau

SEQ ID NO: 1824856 - RNA, 20 nt, Human herpesvirus 2
ggcaaacacgaucgugcugc

SEQ ID NO: 1824857 - RNA, 24 nt, Human herpesvirus 2
ggccagagcguucggcggagcugg

SEQ ID NO: 1824858 - RNA, 15 nt, Human herpesvirus 2
ugccacacgugggcg

SEQ ID NO: 1824859 - RNA, 19 nt, Human herpesvirus 2
ccucggccggcggagcccc

SEQ ID NO: 1824860 - RNA, 13 nt, Human herpesvirus 2
cauggggaacccc

SEQ ID NO: 1824861 - RNA, 15 nt, Human herpesvirus 2
cccggcggccccggc

SEQ ID NO: 1824862 - RNA, 17 nt, Human herpesvirus 2
ccaggucuuuccguggc

SEQ ID NO: 1824863 - RNA, 19 nt, Human herpesvirus 2
cccgcguauauauccgcga

SEQ ID NO: 1824864 - RNA, 22 nt, Human herpesvirus 2
gccaggucagcgaucgccagcc

SEQ ID NO: 1824865 - RNA, 23 nt, Human herpesvirus 2
gccgccgagcgucaggcccgccg

SEQ ID NO: 1824866 - RNA, 19 nt, Human herpesvirus 2
guuuggggcggcacugggg

SEQ ID NO: 1824867 - RNA, 19 nt, Human herpesvirus 2
ccgugcccccccucguucu

SEQ ID NO: 1824868 - RNA, 15 nt, Human herpesvirus 2
ccgaccccgccgccg

SEQ ID NO: 1824869 - RNA, 19 nt, Human herpesvirus 2
caccucgcggcggcucccc

SEQ ID NO: 1824870 - RNA, 15 nt, Human herpesvirus 2
uggaagcccccggca

SEQ ID NO: 1824871 - RNA, 20 nt, Human herpesvirus 2
cgagagcgccgucgggcccc

SEQ ID NO: 1824872 - RNA, 16 nt, Human herpesvirus 2
gagggcccggcgccgc

SEQ ID NO: 1824873 - RNA, 20 nt, Human herpesvirus 2
ccuagccgugggccuguggg

SEQ ID NO: 1824874 - RNA, 15 nt, Human herpesvirus 2
gugaccacgcgcacg

SEQ ID NO: 1824875 - RNA, 13 nt, Human herpesvirus 2
cgugguccacccg

SEQ ID NO: 1824876 - RNA, 18 nt, Human herpesvirus 2
cgaaccgauggcccccac

SEQ ID NO: 1824877 - RNA, 15 nt, Human herpesvirus 2
cccagcacaggcagg

SEQ ID NO: 1824878 - RNA, 17 nt, Human herpesvirus 2
cuagucacacgcccccc

SEQ ID NO: 1824879 - RNA, 20 nt, Human herpesvirus 2
cgccagacgggccggugggc

SEQ ID NO: 1824880 - RNA, 13 nt, Human herpesvirus 2
ggagcgucccgac

SEQ ID NO: 1824881 - RNA, 13 nt, Human herpesvirus 2
aguaacccaguuc

SEQ ID NO: 1824882 - RNA, 20 nt, Human herpesvirus 2
gacugcagccccgguccccc

SEQ ID NO: 1824883 - RNA, 18 nt, Human herpesvirus 2
uaaaacgcgggcgggggc

SEQ ID NO: 1824884 - RNA, 15 nt, Human herpesvirus 2
gguguguuuggcgug

SEQ ID NO: 1824885 - RNA, 19 nt, Human herpesvirus 2
aacaacacguucgccccgc

SEQ ID NO: 1824886 - RNA, 19 nt, Human herpesvirus 2
acgccuuuccuccccucgc

SEQ ID NO: 1824887 - RNA, 16 nt, Human herpesvirus 2
cggccgcucgcugcag

SEQ ID NO: 1824888 - RNA, 18 nt, Human herpesvirus 2
cccggcgcgggcggcgcc

SEQ ID NO: 1824889 - RNA, 16 nt, Human herpesvirus 2
uuccuccccucgccug

SEQ ID NO: 1824890 - RNA, 17 nt, Human herpesvirus 2
aacaucgggaaaacgga

SEQ ID NO: 1824891 - RNA, 15 nt, Human herpesvirus 2
ggggucgaaggaaag

SEQ ID NO: 1824892 - RNA, 13 nt, Human herpesvirus 2
gccugcugugggu

SEQ ID NO: 1824893 - RNA, 13 nt, Human herpesvirus 2
ugaggaagaaaga

SEQ ID NO: 1824894 - RNA, 22 nt, Human herpesvirus 2
cgugcgcaugggccgccagcag

SEQ ID NO: 1824895 - RNA, 23 nt, Human herpesvirus 2
gcccgaaccccgcggcccugagc

SEQ ID NO: 1824896 - RNA, 20 nt, Human herpesvirus 2
caucgucccccgucugccag

SEQ ID NO: 1824897 - RNA, 19 nt, Human herpesvirus 2
gucgcgcuuuuccgccgcc

SEQ ID NO: 1824898 - RNA, 15 nt, Human herpesvirus 2
gcccaggcccuggcg

SEQ ID NO: 1824899 - RNA, 13 nt, Human herpesvirus 2
guguucuccugga

SEQ ID NO: 1824900 - RNA, 22 nt, Human herpesvirus 2
cgcuugagcuuauagagcgaag

SEQ ID NO: 1824901 - RNA, 23 nt, Human herpesvirus 2
gcuucucgccucucuucuucccc

SEQ ID NO: 1824902 - RNA, 21 nt, Human herpesvirus 2
ccgugcugggcgcgagccagg

SEQ ID NO: 1824903 - RNA, 21 nt, Human herpesvirus 2
ggaacaaagaaauagaagaaa

SEQ ID NO: 1824904 - RNA, 20 nt, Human herpesvirus 2
uccgccccggcgaccgcccc

SEQ ID NO: 1824905 - RNA, 13 nt, Human herpesvirus 2
gacgcucucugcc

SEQ ID NO: 1824906 - RNA, 9 nt, Human herpesvirus 2
cggggagga

SEQ ID NO: 1824907 - RNA, 14 nt, Human herpesvirus 2
auaggccacacagu

SEQ ID NO: 1824908 - RNA, 12 nt, Human herpesvirus 2
gggaggaggcgg

SEQ ID NO: 1824909 - RNA, 18 nt, Human herpesvirus 2
cgcgagggcccggcgccg

SEQ ID NO: 1824910 - RNA, 23 nt, Human herpesvirus 2
gggcuuggacugggagccgcgau

SEQ ID NO: 1824911 - RNA, 20 nt, Human herpesvirus 2
auaugcggaucgcgagcucc

SEQ ID NO: 1824912 - RNA, 18 nt, Human herpesvirus 2
uccuuggaauuccagcag

SEQ ID NO: 1824913 - RNA, 18 nt, Human herpesvirus 2
ccuggcgauccugggccu

SEQ ID NO: 1824914 - RNA, 12 nt, Human herpesvirus 2
cgcgcaccgcug

SEQ ID NO: 1824915 - RNA, 11 nt, Human herpesvirus 2
uggggagaggg

SEQ ID NO: 1824916 - RNA, 17 nt, Human herpesvirus 2
cuacgugccccccgacg

SEQ ID NO: 1824917 - RNA, 18 nt, Human herpesvirus 2
gcgcggggguucggggcc

SEQ ID NO: 1824918 - RNA, 14 nt, Human herpesvirus 2
gggggcugcugccc

SEQ ID NO: 1824919 - RNA, 21 nt, Human herpesvirus 2
ccgcgagacuagaggcccgga

SEQ ID NO: 1824920 - RNA, 19 nt, Human herpesvirus 2
ggucaauagauuuccccaa

SEQ ID NO: 1824921 - RNA, 16 nt, Human herpesvirus 2
gccgaucgcagcgucc

SEQ ID NO: 1824922 - RNA, 22 nt, Human herpesvirus 2
gugcuguggcggucggccagca

SEQ ID NO: 1824923 - RNA, 15 nt, Human herpesvirus 2
gcgucgggcacaggc

SEQ ID NO: 1824924 - RNA, 21 nt, Human herpesvirus 2
caggcccucgcugcucucccg

SEQ ID NO: 1824925 - RNA, 23 nt, Human herpesvirus 2
cgcccgcgugccgcagaccaccu

SEQ ID NO: 1824926 - RNA, 12 nt, Human herpesvirus 2
cuggcgggagcc

SEQ ID NO: 1824927 - RNA, 22 nt, Human herpesvirus 2
ccaacgcgcuguggcgcgcccc

SEQ ID NO: 1824928 - RNA, 16 nt, Human herpesvirus 2
cagcgcgucggugccg

SEQ ID NO: 1824929 - RNA, 13 nt, Human herpesvirus 2
cucacucuuuauu

SEQ ID NO: 1824930 - RNA, 14 nt, Human herpesvirus 2
ccggggggggccuc

SEQ ID NO: 1824931 - RNA, 20 nt, Human herpesvirus 2
auccggcggcggggaaacgu

SEQ ID NO: 1824932 - RNA, 16 nt, Human herpesvirus 2
cgaggccgcucuccga

SEQ ID NO: 1824933 - RNA, 13 nt, Human herpesvirus 2
uggcgccucugcg

SEQ ID NO: 1824934 - RNA, 15 nt, Human herpesvirus 2
gcgauccugggccug

SEQ ID NO: 1824935 - RNA, 21 nt, Human herpesvirus 2
ccgagccgcugugccaggugg

SEQ ID NO: 1824936 - RNA, 20 nt, Human herpesvirus 2
cgggcgggggucgggcgggc

SEQ ID NO: 1824937 - RNA, 19 nt, Human herpesvirus 2
ccguggggccccagggcuu

SEQ ID NO: 1824938 - RNA, 16 nt, Human herpesvirus 2
uccgacgacgcggacg

SEQ ID NO: 1824939 - RNA, 17 nt, Human herpesvirus 2
gcgggaaaucaaggucg

SEQ ID NO: 1824940 - RNA, 21 nt, Human herpesvirus 2
aucgcacccauccaucuggga

SEQ ID NO: 1824941 - RNA, 15 nt, Human herpesvirus 2
cgggggucccgccuc

SEQ ID NO: 1824942 - RNA, 14 nt, Human herpesvirus 2
aacaccguccccga

SEQ ID NO: 1824943 - RNA, 15 nt, Human herpesvirus 2
cuccggucccuuccc

SEQ ID NO: 1824944 - RNA, 20 nt, Human herpesvirus 2
auugaccggggccccaucug

SEQ ID NO: 1824945 - RNA, 18 nt, Human herpesvirus 2
cagcgcccuuccgcgucc

SEQ ID NO: 1824946 - RNA, 13 nt, Human herpesvirus 2
gggggggaaggga

SEQ ID NO: 1824947 - RNA, 16 nt, Human herpesvirus 2
gggguguagggcccaa

SEQ ID NO: 1824948 - RNA, 15 nt, Human herpesvirus 2
aggcuucccccccgc

SEQ ID NO: 1824949 - RNA, 16 nt, Human herpesvirus 2
gggcggacguccaggg

SEQ ID NO: 1824950 - RNA, 22 nt, Human herpesvirus 2
ggccgcucgcugcagggccugg

SEQ ID NO: 1824951 - RNA, 13 nt, Human herpesvirus 2
ggggcagugcagu

SEQ ID NO: 1824952 - RNA, 12 nt, Human herpesvirus 2
ggccgcucuccg

SEQ ID NO: 1824953 - RNA, 17 nt, Human herpesvirus 2
cucuggcuccaggccgc

SEQ ID NO: 1824954 - RNA, 14 nt, Human herpesvirus 2
ugcgucguccaggg

SEQ ID NO: 1824955 - RNA, 15 nt, Human herpesvirus 2
gaacgggggucccgc

SEQ ID NO: 1824956 - RNA, 15 nt, Human herpesvirus 2
ucccguggcccucca

SEQ ID NO: 1824957 - RNA, 15 nt, Human herpesvirus 2
cucuggcguccccag

SEQ ID NO: 1824958 - RNA, 21 nt, Human herpesvirus 2
cauaggccgggagcguggggc

SEQ ID NO: 1824959 - RNA, 12 nt, Human herpesvirus 2
cgaccugcagga

SEQ ID NO: 1824960 - RNA, 17 nt, Human herpesvirus 2
cgcgcuggcggaagugc

SEQ ID NO: 1824961 - RNA, 19 nt, Human herpesvirus 2
cccucguucugcugcaccg

SEQ ID NO: 1824962 - RNA, 12 nt, Human herpesvirus 2
accccccccucu

SEQ ID NO: 1824963 - RNA, 23 nt, Human herpesvirus 2
ccccgggaggaggcggcgccugc

SEQ ID NO: 1824964 - RNA, 20 nt, Human herpesvirus 2
guuugagcagccgcgccgcu

SEQ ID NO: 1824965 - RNA, 15 nt, Human herpesvirus 2
auuuucuggaagagc

SEQ ID NO: 1824966 - RNA, 12 nt, Human herpesvirus 2
aauagauuuccc

SEQ ID NO: 1824967 - RNA, 14 nt, Human herpesvirus 2
ggcgcugcgccugc

SEQ ID NO: 1824968 - RNA, 22 nt, Human herpesvirus 2
ggcgguucgcgugcggccagcc

SEQ ID NO: 1824969 - RNA, 22 nt, Human herpesvirus 2
ccagggcgucgcuaacgagcgc

SEQ ID NO: 1824970 - RNA, 22 nt, Human herpesvirus 2
ugccugacccucucgggcaugg

SEQ ID NO: 1824971 - RNA, 16 nt, Human herpesvirus 2
ggggaggggggaagga

SEQ ID NO: 1824972 - RNA, 12 nt, Human herpesvirus 2
ugccgcagacca

SEQ ID NO: 1824973 - RNA, 14 nt, Human herpesvirus 2
cugcccgcggacca

SEQ ID NO: 1824974 - RNA, 15 nt, Human herpesvirus 2
ggccagauggggccc

SEQ ID NO: 1824975 - RNA, 13 nt, Human herpesvirus 2
gccccucugcuuu

SEQ ID NO: 1824976 - RNA, 12 nt, Human herpesvirus 2
ccccccccucca

SEQ ID NO: 1824977 - RNA, 14 nt, Human herpesvirus 2
cgccgcgcgggccc

SEQ ID NO: 1824978 - RNA, 21 nt, Human herpesvirus 2
cggcaucguuuggguggagga

SEQ ID NO: 1824979 - RNA, 17 nt, Human herpesvirus 2
caauaaacgccuucccg

SEQ ID NO: 1824980 - RNA, 18 nt, Human herpesvirus 2
accuguuuuuacgggccc

SEQ ID NO: 1824981 - RNA, 12 nt, Human herpesvirus 2
cugcacgagguc

SEQ ID NO: 1824982 - RNA, 17 nt, Human herpesvirus 2
ccacgugcacagccugg

SEQ ID NO: 1824983 - RNA, 14 nt, Human herpesvirus 2
ccgacaucaaccac

SEQ ID NO: 1824984 - RNA, 21 nt, Human herpesvirus 2
caugugcuaacgggaaaacca

SEQ ID NO: 1824985 - RNA, 21 nt, Human herpesvirus 2
cccuguccccgccccccccag

SEQ ID NO: 1824986 - RNA, 23 nt, Human herpesvirus 2
ucccacacggucggugcccccca

SEQ ID NO: 1824987 - RNA, 15 nt, Human herpesvirus 2
ucgcccuagaggcug

SEQ ID NO: 1824988 - RNA, 20 nt, Human herpesvirus 2
gcccccggccuuugcuuccu

SEQ ID NO: 1824989 - RNA, 14 nt, Human herpesvirus 2
guaccucugggccc

SEQ ID NO: 1824990 - RNA, 12 nt, Human herpesvirus 2
ccgaugcccagu

SEQ ID NO: 1824991 - RNA, 16 nt, Human herpesvirus 2
ggucaauagauuuccc

SEQ ID NO: 1824992 - RNA, 14 nt, Human herpesvirus 2
ugauacuuaaaugc

SEQ ID NO: 1824993 - RNA, 15 nt, Human herpesvirus 2
cucguaggcccgggg

SEQ ID NO: 1824994 - RNA, 16 nt, Human herpesvirus 2
accggggccccaucug

SEQ ID NO: 1824995 - RNA, 14 nt, Human herpesvirus 2
aggaaacgcaaaaa

SEQ ID NO: 1824996 - RNA, 16 nt, Human herpesvirus 2
ugggguuuuggcggcc

SEQ ID NO: 1824997 - RNA, 13 nt, Human herpesvirus 2
gcgcgcacucccg

SEQ ID NO: 1824998 - RNA, 16 nt, Human herpesvirus 2
agcggcgaacacugcc

SEQ ID NO: 1824999 - RNA, 22 nt, Human herpesvirus 2
gacacacuuuguuguuggccuu

SEQ ID NO: 1825000 - RNA, 18 nt, Human herpesvirus 2
aggcuggagcucugccug

SEQ ID NO: 1825001 - RNA, 14 nt, Human herpesvirus 2
cgugggugacuggg

SEQ ID NO: 1825002 - RNA, 20 nt, Human herpesvirus 2
aggggcuccucagcgcggcc

SEQ ID NO: 1825003 - RNA, 22 nt, Human herpesvirus 2
acugggccgaugugcccugcaa

SEQ ID NO: 1825004 - RNA, 20 nt, Human herpesvirus 2
uggggccucucgacggagag

SEQ ID NO: 1825005 - RNA, 23 nt, Human herpesvirus 2
gaguuucggaaagccggccccgg

SEQ ID NO: 1825006 - RNA, 21 nt, Human herpesvirus 2
cgcauaucgccauggaucccg

SEQ ID NO: 1825007 - RNA, 19 nt, Human herpesvirus 2
uugugcuuuuacccucacc

SEQ ID NO: 1825008 - RNA, 21 nt, Human herpesvirus 2
cccgucuuuuuuuuuccuguu

SEQ ID NO: 1825009 - RNA, 13 nt, Human herpesvirus 2
accccaaaccaac

SEQ ID NO: 1825010 - RNA, 20 nt, Human herpesvirus 2
gaagucucuuggggaaaucu

SEQ ID NO: 1825011 - RNA, 21 nt, Human herpesvirus 2
ggcagcgcgccgacgaccugc

SEQ ID NO: 1825012 - RNA, 22 nt, Human herpesvirus 2
gcggcauaccuccgaccggcgg

SEQ ID NO: 1825013 - RNA, 19 nt, Human herpesvirus 2
gccgcacggccgugucgcu

SEQ ID NO: 1825014 - RNA, 14 nt, Human herpesvirus 2
cccgagcgugcccu

SEQ ID NO: 1825015 - RNA, 18 nt, Human herpesvirus 2
uuuugcuggcgccgccgg

SEQ ID NO: 1825016 - RNA, 16 nt, Human herpesvirus 2
cgaaucccccaaggaa

SEQ ID NO: 1825017 - RNA, 14 nt, Human herpesvirus 2
caauuagcuguuua

SEQ ID NO: 1825018 - RNA, 22 nt, Human herpesvirus 2
uccggugugccccacccccgag

SEQ ID NO: 1825019 - RNA, 14 nt, Human herpesvirus 2
ggcggggggugugg

SEQ ID NO: 1825020 - RNA, 15 nt, Human herpesvirus 2
cucgcugcucucccg

SEQ ID NO: 1825021 - RNA, 23 nt, Human herpesvirus 2
caggggcagcucgcccccgugcc

SEQ ID NO: 1825022 - RNA, 12 nt, Human herpesvirus 2
ucgaaggucggg

SEQ ID NO: 1825023 - RNA, 16 nt, Human herpesvirus 2
ccgacuuccgugcccc

SEQ ID NO: 1825024 - RNA, 14 nt, Human herpesvirus 2
cccgcaccagcucg

SEQ ID NO: 1825025 - RNA, 20 nt, Human herpesvirus 2
acaccagacggcgggacccc

SEQ ID NO: 1825026 - RNA, 13 nt, Human herpesvirus 2
agugccgcacggc

SEQ ID NO: 1825027 - RNA, 23 nt, Human herpesvirus 2
ucuuucggccaccaccccccucc

SEQ ID NO: 1825028 - RNA, 18 nt, Human herpesvirus 2
ucgccgacuccaggagcu

SEQ ID NO: 1825029 - RNA, 14 nt, Human herpesvirus 2
ccggucccuucccc

SEQ ID NO: 1825030 - RNA, 20 nt, Human herpesvirus 2
uucgccgacgccuucccugu

SEQ ID NO: 1825031 - RNA, 20 nt, Human herpesvirus 2
aggaguuucggaaagccggc

SEQ ID NO: 1825032 - RNA, 18 nt, Human herpesvirus 2
gccaaaccagccccgcag

SEQ ID NO: 1825033 - RNA, 12 nt, Human herpesvirus 2
gcgagcgacagc

SEQ ID NO: 1825034 - RNA, 19 nt, Human herpesvirus 2
gguaauuagaaacuuuuaa

SEQ ID NO: 1825035 - RNA, 15 nt, Human herpesvirus 2
gccucuuugggccgu

SEQ ID NO: 1825036 - RNA, 13 nt, Human herpesvirus 2
gcugcugccccgc

SEQ ID NO: 1825037 - RNA, 21 nt, Human herpesvirus 2
gcggccgccgcaacacccggc

SEQ ID NO: 1825038 - RNA, 14 nt, Human herpesvirus 2
accccccccucuca

SEQ ID NO: 1825039 - RNA, 19 nt, Human herpesvirus 2
cccguguaccucugggccc

SEQ ID NO: 1825040 - RNA, 22 nt, Human herpesvirus 2
gggacgcccggcccauaaacag

SEQ ID NO: 1825041 - RNA, 16 nt, Human herpesvirus 2
gcggccccgacccaac

SEQ ID NO: 1825042 - RNA, 17 nt, Human herpesvirus 2
cggacagccagggcugg

SEQ ID NO: 1825043 - RNA, 20 nt, Human herpesvirus 2
agccagggucggacaggagg

SEQ ID NO: 1825044 - RNA, 14 nt, Human herpesvirus 2
gacacacacacccc

SEQ ID NO: 1825045 - RNA, 15 nt, Human herpesvirus 2
caggccgcccccagc

SEQ ID NO: 1825046 - RNA, 22 nt, Human herpesvirus 2
ggauguguucuccuggacgcgg

SEQ ID NO: 1825047 - RNA, 14 nt, Human herpesvirus 2
ggcgagcuggcccu

SEQ ID NO: 1825048 - RNA, 15 nt, Human herpesvirus 2
gccgacuccaggagc

SEQ ID NO: 1825049 - RNA, 17 nt, Human herpesvirus 2
acacaccgggcuggggg

SEQ ID NO: 1825050 - RNA, 13 nt, Human herpesvirus 2
agcucgggggcca

SEQ ID NO: 1825051 - RNA, 21 nt, Human herpesvirus 2
uguacaaacacggggacggcc

SEQ ID NO: 1825052 - RNA, 18 nt, Human herpesvirus 2
ggucccggccgccauccc

SEQ ID NO: 1825053 - RNA, 17 nt, Human herpesvirus 2
gcccgaaggaagccgcc

SEQ ID NO: 1825054 - RNA, 21 nt, Human herpesvirus 2
gcagggccgcugggggggcgg

SEQ ID NO: 1825055 - RNA, 19 nt, Human herpesvirus 2
gguaauuagcaacuuuuaa

SEQ ID NO: 1825056 - RNA, 18 nt, Human herpesvirus 2
ggccccgacuccgcgaau

SEQ ID NO: 1825057 - RNA, 14 nt, Human herpesvirus 2
agggacgcgcagcg

SEQ ID NO: 1825058 - RNA, 20 nt, Human herpesvirus 2
cggacaggaggcgcagcugg

SEQ ID NO: 1825059 - RNA, 15 nt, Human herpesvirus 2
gcccggaacgagguu

SEQ ID NO: 1825060 - RNA, 21 nt, Human herpesvirus 2
gcaggcccucgcugcucuccc

SEQ ID NO: 1825061 - RNA, 14 nt, Human herpesvirus 2
agaaacggcaagaa

SEQ ID NO: 1825062 - RNA, 21 nt, Human herpesvirus 2
gcccgggugaccacgcgcacg

SEQ ID NO: 1825063 - RNA, 21 nt, Human herpesvirus 2
cgccucgauguauggcgccuu

SEQ ID NO: 1825064 - RNA, 14 nt, Human herpesvirus 2
ugccaguggagcca

SEQ ID NO: 1825065 - RNA, 21 nt, Human herpesvirus 2
ccaacucauacacgcgcuggc

SEQ ID NO: 1825066 - RNA, 23 nt, Human herpesvirus 2
ccgacggggagggacaaggagga

SEQ ID NO: 1825067 - RNA, 13 nt, Human herpesvirus 2
ggaaggaaauggg

SEQ ID NO: 1825068 - RNA, 22 nt, Human herpesvirus 2
ucccacacucgcgucuggcugu

SEQ ID NO: 1825069 - RNA, 21 nt, Human herpesvirus 2
gccagguggcccuuccggacc

SEQ ID NO: 1825070 - RNA, 23 nt, Human herpesvirus 2
aagccacccugggucgggagcag

SEQ ID NO: 1825071 - RNA, 20 nt, Human herpesvirus 2
cgucccagaauuuagccagg

SEQ ID NO: 1825072 - RNA, 23 nt, Human herpesvirus 2
cgcucggggguucgcgcaucucu

SEQ ID NO: 1825073 - RNA, 18 nt, Human herpesvirus 2
uagaaguuacccucuucu

SEQ ID NO: 1825074 - RNA, 23 nt, Human herpesvirus 2
ggagcgggggaggggggagaugg

SEQ ID NO: 1825075 - RNA, 13 nt, Human herpesvirus 2
gauggggguccug

SEQ ID NO: 1825076 - RNA, 20 nt, Human herpesvirus 2
ggaggagggcgaugacccac

SEQ ID NO: 1825077 - RNA, 21 nt, Human herpesvirus 2
uccccaggcgacgccaggccc

SEQ ID NO: 1825078 - RNA, 23 nt, Human herpesvirus 2
cgggaggaaggacacgccucccu

SEQ ID NO: 1825079 - RNA, 14 nt, Human herpesvirus 2
gacgaggccuuccc

SEQ ID NO: 1825080 - RNA, 16 nt, Human herpesvirus 2
cgugcgcucgcucucc

SEQ ID NO: 1825081 - RNA, 19 nt, Human herpesvirus 2
cugggcgaagucccgcacg

SEQ ID NO: 1825082 - RNA, 21 nt, Human herpesvirus 2
cgcggacgagcccguggccca

SEQ ID NO: 1825083 - RNA, 19 nt, Human herpesvirus 2
ucugcgucguccagggugg

SEQ ID NO: 1825084 - RNA, 20 nt, Human herpesvirus 2
acggacacccccccccaucu

SEQ ID NO: 1825085 - RNA, 17 nt, Human herpesvirus 2
aaccggcgagggcggcc

SEQ ID NO: 1825086 - RNA, 16 nt, Human herpesvirus 2
cgcucgcugcagggcc

SEQ ID NO: 1825087 - RNA, 15 nt, Human herpesvirus 2
ccgaacggaaggccu

SEQ ID NO: 1825088 - RNA, 14 nt, Human herpesvirus 2
uuccgugccccugg

SEQ ID NO: 1825089 - RNA, 18 nt, Human herpesvirus 2
ccgucacgagccccuggg

SEQ ID NO: 1825090 - RNA, 21 nt, Human herpesvirus 2
gacugauucucaccuggggcu

SEQ ID NO: 1825091 - RNA, 17 nt, Human herpesvirus 2
cgggcgagcuggcccug

SEQ ID NO: 1825092 - RNA, 16 nt, Human herpesvirus 2
cgcaucuucgccgggu

SEQ ID NO: 1825093 - RNA, 14 nt, Human herpesvirus 2
ggcgccggccaacc

SEQ ID NO: 1825094 - RNA, 16 nt, Human herpesvirus 2
cggacgucggcgauga

SEQ ID NO: 1825095 - RNA, 16 nt, Human herpesvirus 2
ugucggagaggcccgc

SEQ ID NO: 1825096 - RNA, 13 nt, Human herpesvirus 2
ggcugcgggcgug

SEQ ID NO: 1825097 - RNA, 14 nt, Human herpesvirus 2
gggcggcgaaccgg

SEQ ID NO: 1825098 - RNA, 15 nt, Human herpesvirus 2
gacccgccgggggcg

SEQ ID NO: 1825099 - RNA, 22 nt, Human herpesvirus 2
cccagggcuucguggaagagga

SEQ ID NO: 1825100 - RNA, 14 nt, Human herpesvirus 2
uuauaagccgccgc

SEQ ID NO: 1825101 - RNA, 14 nt, Human herpesvirus 2
ggcggcccccggcc

SEQ ID NO: 1825102 - RNA, 16 nt, Human herpesvirus 2
gcccgggguucugggg

SEQ ID NO: 1825103 - RNA, 15 nt, Human herpesvirus 2
cgugcgcgugggagg

SEQ ID NO: 1825104 - RNA, 23 nt, Human herpesvirus 2
gccgccccgcaguuucaccgccc

SEQ ID NO: 1825105 - RNA, 19 nt, Human herpesvirus 2
cgcauauacugcugggcca

SEQ ID NO: 1825106 - RNA, 21 nt, Human herpesvirus 2
cgcgcuuuuccgccgccggga

SEQ ID NO: 1825107 - RNA, 14 nt, Human herpesvirus 2
agaaauaaagaacg

SEQ ID NO: 1825108 - RNA, 17 nt, Human herpesvirus 2
gucuuuuuuuuuccugu

SEQ ID NO: 1825109 - RNA, 14 nt, Human herpesvirus 2
cuccgccagcgccc

SEQ ID NO: 1825110 - RNA, 11 nt, Human herpesvirus 2
accaccaaggc

SEQ ID NO: 1825111 - RNA, 22 nt, Human herpesvirus 2
caguucgcgaccgaucuggagc

SEQ ID NO: 1825112 - RNA, 14 nt, Human herpesvirus 2
acacagacuggccg

SEQ ID NO: 1825113 - RNA, 14 nt, Human herpesvirus 2
cgggggcugcugcc

SEQ ID NO: 1825114 - RNA, 16 nt, Human herpesvirus 2
gcguccgacacccggg

SEQ ID NO: 1825115 - RNA, 22 nt, Human herpesvirus 2
cgcccucgagaugugccuucca

SEQ ID NO: 1825116 - RNA, 13 nt, Human herpesvirus 2
cacgucgcaugca

SEQ ID NO: 1825117 - RNA, 13 nt, Human herpesvirus 2
ccgcgggaggaag

SEQ ID NO: 1825118 - RNA, 18 nt, Human herpesvirus 2
cucgucgccaacggccag

SEQ ID NO: 1825119 - RNA, 16 nt, Human herpesvirus 2
uuccccccccccuccc

SEQ ID NO: 1825120 - RNA, 16 nt, Human herpesvirus 2
cucuucgggcaccccg

SEQ ID NO: 1825121 - RNA, 22 nt, Human herpesvirus 2
ccagcauguguguuaacgcaac

SEQ ID NO: 1825122 - RNA, 13 nt, Human herpesvirus 2
gcgugcugugccc

SEQ ID NO: 1825123 - RNA, 14 nt, Human herpesvirus 2
aguaacccaguucc

SEQ ID NO: 1825124 - RNA, 16 nt, Human herpesvirus 2
gccgcuuuaccccgcg

SEQ ID NO: 1825125 - RNA, 14 nt, Human herpesvirus 2
acccggguccccga

SEQ ID NO: 1825126 - RNA, 21 nt, Human herpesvirus 2
uucuggccaagcauccucacc

SEQ ID NO: 1825127 - RNA, 23 nt, Human herpesvirus 2
cacguccguauguuaauugcaau

SEQ ID NO: 1825128 - RNA, 18 nt, Human herpesvirus 2
cacggcaaccccaccuuc

SEQ ID NO: 1825129 - RNA, 19 nt, Human herpesvirus 2
cuauggggggggaaaggaa

SEQ ID NO: 1825130 - RNA, 13 nt, Human herpesvirus 2
accgaagaggugc

SEQ ID NO: 1825131 - RNA, 13 nt, Human herpesvirus 2
cuuggccuucccg

SEQ ID NO: 1825132 - RNA, 15 nt, Human herpesvirus 2
gggggugguggugcu

SEQ ID NO: 1825133 - RNA, 13 nt, Human herpesvirus 2
aguguuugggaaa

SEQ ID NO: 1825134 - RNA, 22 nt, Human herpesvirus 2
ugccucuguuucuccaggcgcu

SEQ ID NO: 1825135 - RNA, 22 nt, Human herpesvirus 2
cuccgcaauaaacgccuucccg

SEQ ID NO: 1825136 - RNA, 15 nt, Human herpesvirus 2
cauauacugcugggc

SEQ ID NO: 1825137 - RNA, 19 nt, Human herpesvirus 2
ggccucccgcaagagccug

SEQ ID NO: 1825138 - RNA, 14 nt, Human herpesvirus 2
ggcuccaggccgcc

SEQ ID NO: 1825139 - RNA, 13 nt, Human herpesvirus 2
cagauaugugagu

SEQ ID NO: 1825140 - RNA, 14 nt, Human herpesvirus 2
gccugcccccgccu

SEQ ID NO: 1825141 - RNA, 18 nt, Human herpesvirus 2
cgcguccagguacccggc

SEQ ID NO: 1825142 - RNA, 18 nt, Human herpesvirus 2
uaaccgcgcgccuccucg

SEQ ID NO: 1825143 - RNA, 23 nt, Human herpesvirus 2
cggaggccugucccugcgucgcc

SEQ ID NO: 1825144 - RNA, 22 nt, Human herpesvirus 2
ucgaccggggacuccccucuac

SEQ ID NO: 1825145 - RNA, 16 nt, Human herpesvirus 2
ccgggugaccacgcgc

SEQ ID NO: 1825146 - RNA, 15 nt, Human herpesvirus 2
gcgccgccgucagcu

SEQ ID NO: 1825147 - RNA, 16 nt, Human herpesvirus 2
cugugccagguggccc

SEQ ID NO: 1825148 - RNA, 20 nt, Human herpesvirus 2
caccaaccuggcacagcggg

SEQ ID NO: 1825149 - RNA, 15 nt, Human herpesvirus 2
gcagcacggcggcca

SEQ ID NO: 1825150 - RNA, 21 nt, Human herpesvirus 2
cacccuaaggaugcccgccag

SEQ ID NO: 1825151 - RNA, 20 nt, Human herpesvirus 2
ugagagggggggguggagug

SEQ ID NO: 1825152 - RNA, 21 nt, Human herpesvirus 2
cgccgcuguggcccuggcgga

SEQ ID NO: 1825153 - RNA, 18 nt, Human herpesvirus 2
acggccccggccgccucc

SEQ ID NO: 1825154 - RNA, 19 nt, Human herpesvirus 2
gcccaggcccuggcgcacc

SEQ ID NO: 1825155 - RNA, 16 nt, Human herpesvirus 2
uucccuuuugguccuu

SEQ ID NO: 1825156 - RNA, 19 nt, Human herpesvirus 2
ggccguguggucgccccca

SEQ ID NO: 1825157 - RNA, 16 nt, Human herpesvirus 2
ggcggcgccugcgccc

SEQ ID NO: 1825158 - RNA, 23 nt, Human herpesvirus 2
gugcacguguuugagucagggac

SEQ ID NO: 1825159 - RNA, 22 nt, Human herpesvirus 2
gaccggucgcuuuccacacccc

SEQ ID NO: 1825160 - RNA, 17 nt, Human herpesvirus 2
cugccucccccccggag

SEQ ID NO: 1825161 - RNA, 23 nt, Human herpesvirus 2
gggccucggucgacgaggccugg

SEQ ID NO: 1825162 - RNA, 20 nt, Human herpesvirus 2
ccacggucaggaccagggac

SEQ ID NO: 1825163 - RNA, 18 nt, Human herpesvirus 2
ggggcaccaaaaaccagg

SEQ ID NO: 1825164 - RNA, 17 nt, Human herpesvirus 2
auggccgcuccugcccg

SEQ ID NO: 1825165 - RNA, 12 nt, Human herpesvirus 2
cgccgaccagaa

SEQ ID NO: 1825166 - RNA, 15 nt, Human herpesvirus 2
gcgccaccggccugg

SEQ ID NO: 1825167 - RNA, 15 nt, Human herpesvirus 2
acuuggacuccgcau

SEQ ID NO: 1825168 - RNA, 18 nt, Human herpesvirus 2
ggaacugggguacugcac

SEQ ID NO: 1825169 - RNA, 16 nt, Human herpesvirus 2
gcgggagccagggucg

SEQ ID NO: 1825170 - RNA, 18 nt, Human herpesvirus 2
gugucggagaggcccgcc

SEQ ID NO: 1825171 - RNA, 12 nt, Human herpesvirus 2
guucggcaggcc

SEQ ID NO: 1825172 - RNA, 21 nt, Human herpesvirus 2
gccauccccggcgccaugagc

SEQ ID NO: 1825173 - RNA, 14 nt, Human herpesvirus 2
gcccgccccugcgc

SEQ ID NO: 1825174 - RNA, 23 nt, Human herpesvirus 2
ccuacgccccccucggcagcccg

SEQ ID NO: 1825175 - RNA, 17 nt, Human herpesvirus 2
gccucauccggcccgcc

SEQ ID NO: 1825176 - RNA, 16 nt, Human herpesvirus 2
ccgacgucucggcccc

SEQ ID NO: 1825177 - RNA, 19 nt, Human herpesvirus 2
aagcgaagacgaggccgcc

SEQ ID NO: 1825178 - RNA, 19 nt, Human herpesvirus 2
ggccggggagggcagggcc

SEQ ID NO: 1825179 - RNA, 18 nt, Human herpesvirus 2
gaguugcgccggcaccag

SEQ ID NO: 1825180 - RNA, 19 nt, Human herpesvirus 2
ccaccuggaagcugccucc

SEQ ID NO: 1825181 - RNA, 21 nt, Human herpesvirus 2
ccuggcggccccuguuggagc

SEQ ID NO: 1825182 - RNA, 17 nt, Human herpesvirus 2
cugccgccgcgggagga

SEQ ID NO: 1825183 - RNA, 21 nt, Human herpesvirus 2
aguuccuccgugcuggggaaa

SEQ ID NO: 1825184 - RNA, 15 nt, Human herpesvirus 2
cugcagggccuggcg

SEQ ID NO: 1825185 - RNA, 15 nt, Human herpesvirus 2
gcggaggcgugguga

SEQ ID NO: 1825186 - RNA, 17 nt, Human herpesvirus 2
ugcccauggcgucggcg

SEQ ID NO: 1825187 - RNA, 19 nt, Human herpesvirus 2
cacucuggcguccccaggc

SEQ ID NO: 1825188 - RNA, 18 nt, Human herpesvirus 2
gcguugcguuggggcacg

SEQ ID NO: 1825189 - RNA, 14 nt, Human herpesvirus 2
gcucguccccuggg

SEQ ID NO: 1825190 - RNA, 18 nt, Human herpesvirus 2
uuaggucggaggggugag

SEQ ID NO: 1825191 - RNA, 22 nt, Human herpesvirus 2
gacuccccucuacccccaccca

SEQ ID NO: 1825192 - RNA, 20 nt, Human herpesvirus 2
gccgcccccgccggcccgcg

SEQ ID NO: 1825193 - RNA, 19 nt, Human herpesvirus 2
agcuggcccuggacccaga

SEQ ID NO: 1825194 - RNA, 22 nt, Human herpesvirus 2
gacgcuguuguuucugggcccg

SEQ ID NO: 1825195 - RNA, 16 nt, Human herpesvirus 2
accgcacccgggccgg

SEQ ID NO: 1825196 - RNA, 14 nt, Human herpesvirus 2
aaaccugggcggcc

SEQ ID NO: 1825197 - RNA, 14 nt, Human herpesvirus 2
ccaauucuucccgg

SEQ ID NO: 1825198 - RNA, 17 nt, Human herpesvirus 2
ucccuucuccauuccug

SEQ ID NO: 1825199 - RNA, 17 nt, Human herpesvirus 2
cgaagcggccccgaccc

SEQ ID NO: 1825200 - RNA, 13 nt, Human herpesvirus 2
auacucuguuuau

SEQ ID NO: 1825201 - RNA, 21 nt, Human herpesvirus 2
gggcaugggcuacuaccuggg

SEQ ID NO: 1825202 - RNA, 21 nt, Human herpesvirus 2
cgccgcgcgggacccacgagg

SEQ ID NO: 1825203 - RNA, 21 nt, Human herpesvirus 2
ggacgcagcggcguccacgcc

SEQ ID NO: 1825204 - RNA, 21 nt, Human herpesvirus 2
gcgcggggguucggggccagg

SEQ ID NO: 1825205 - RNA, 15 nt, Human herpesvirus 2
gcaagccacccuggg

SEQ ID NO: 1825206 - RNA, 17 nt, Human herpesvirus 2
cccgcgccucgggcggc

SEQ ID NO: 1825207 - RNA, 21 nt, Human herpesvirus 2
acuuccgugccccuggacugg

SEQ ID NO: 1825208 - RNA, 21 nt, Human herpesvirus 2
aacgcacccccggaccccgcu

SEQ ID NO: 1825209 - RNA, 17 nt, Human herpesvirus 2
cccgcgcaucacggccc

SEQ ID NO: 1825210 - RNA, 12 nt, Human herpesvirus 2
ccacacaguccg

SEQ ID NO: 1825211 - RNA, 17 nt, Human herpesvirus 2
gaggugcgccaggucag

SEQ ID NO: 1825212 - RNA, 11 nt, Human herpesvirus 2
cugguggugga

SEQ ID NO: 1825213 - RNA, 19 nt, Human herpesvirus 2
accacggucugguggcgcu

SEQ ID NO: 1825214 - RNA, 14 nt, Human herpesvirus 2
ggccauccugccca

SEQ ID NO: 1825215 - RNA, 22 nt, Human herpesvirus 2
gggggucgggcgggcggggguc

SEQ ID NO: 1825216 - RNA, 15 nt, Human herpesvirus 2
cguccaccuuggccc

SEQ ID NO: 1825217 - RNA, 15 nt, Human herpesvirus 2
gccgucgggccccgg

SEQ ID NO: 1825218 - RNA, 16 nt, Human herpesvirus 2
ccgucccggcagaagc

SEQ ID NO: 1825219 - RNA, 24 nt, Human herpesvirus 2
ggaguuccgacgacgcguacgugg

SEQ ID NO: 1825220 - RNA, 14 nt, Human herpesvirus 2
cuuugacuccuggg

SEQ ID NO: 1825221 - RNA, 21 nt, Human herpesvirus 2
gcaccacguguccccagggag

SEQ ID NO: 1825222 - RNA, 21 nt, Human herpesvirus 2
gugguggccgaaagaaaagga

SEQ ID NO: 1825223 - RNA, 17 nt, Human herpesvirus 2
cggacgcggcacaggug

SEQ ID NO: 1825224 - RNA, 14 nt, Human herpesvirus 2
gcacccucgcacgu

SEQ ID NO: 1825225 - RNA, 13 nt, Human herpesvirus 2
cgucgaccgggga

SEQ ID NO: 1825226 - RNA, 20 nt, Human herpesvirus 2
ccgagcagcacggcggccag

SEQ ID NO: 1825227 - RNA, 19 nt, Human herpesvirus 2
cugcgcgcgcaccugcggg

SEQ ID NO: 1825228 - RNA, 22 nt, Human herpesvirus 2
agagucgauugcggggaccgca

SEQ ID NO: 1825229 - RNA, 22 nt, Human herpesvirus 2
uaacuaaaccacagcacggccg

SEQ ID NO: 1825230 - RNA, 15 nt, Human herpesvirus 2
ggcgacgggcggcug

SEQ ID NO: 1825231 - RNA, 23 nt, Human herpesvirus 2
cuggccgagcguaucggccagga

SEQ ID NO: 1825232 - RNA, 18 nt, Human herpesvirus 2
aggacgccggccgguccu

SEQ ID NO: 1825233 - RNA, 20 nt, Human herpesvirus 2
agcggccgggucggcugucc

SEQ ID NO: 1825234 - RNA, 12 nt, Human herpesvirus 2
gcuugcggggcu

SEQ ID NO: 1825235 - RNA, 20 nt, Human herpesvirus 2
gcggggacccgccagagacc

SEQ ID NO: 1825236 - RNA, 19 nt, Human herpesvirus 2
ccccucaccccuccgaccu

SEQ ID NO: 1825237 - RNA, 14 nt, Human herpesvirus 2
ggcggcuggccacc

SEQ ID NO: 1825238 - RNA, 17 nt, Human herpesvirus 2
gcaggcgcgcggguccc

SEQ ID NO: 1825239 - RNA, 13 nt, Human herpesvirus 2
cgcaaccuccggg

SEQ ID NO: 1825240 - RNA, 19 nt, Human herpesvirus 2
cgcuccgaucggggucagg

SEQ ID NO: 1825241 - RNA, 17 nt, Human herpesvirus 2
cggacuccgccccggcg

SEQ ID NO: 1825242 - RNA, 15 nt, Human herpesvirus 2
cgcaccccaccccug

SEQ ID NO: 1825243 - RNA, 15 nt, Human herpesvirus 2
cucccuuuuuucccc

SEQ ID NO: 1825244 - RNA, 13 nt, Human herpesvirus 2
aacagagcucuuu

SEQ ID NO: 1825245 - RNA, 21 nt, Human herpesvirus 2
uggugacggaaaaccugggcg

SEQ ID NO: 1825246 - RNA, 12 nt, Human herpesvirus 2
gggggaaacaca

SEQ ID NO: 1825247 - RNA, 14 nt, Human herpesvirus 2
cgggagcaggacag

SEQ ID NO: 1825248 - RNA, 17 nt, Human herpesvirus 2
gggcaccaaaaaccagg

SEQ ID NO: 1825249 - RNA, 15 nt, Human herpesvirus 2
acggccaggaugggu

SEQ ID NO: 1825250 - RNA, 13 nt, Human herpesvirus 2
cuuucuuuccccc

SEQ ID NO: 1825251 - RNA, 18 nt, Human herpesvirus 2
agauccccggggcccgca

SEQ ID NO: 1825252 - RNA, 20 nt, Human herpesvirus 2
gcuagucuccgaucugcccc

SEQ ID NO: 1825253 - RNA, 16 nt, Human herpesvirus 2
gccgacgaccugcagc

SEQ ID NO: 1825254 - RNA, 22 nt, Human herpesvirus 2
cccccggaccccgcugcugugc

SEQ ID NO: 1825255 - RNA, 20 nt, Human herpesvirus 2
gacacgcaacaacggcgggc

SEQ ID NO: 1825256 - RNA, 14 nt, Human herpesvirus 2
cccauccccucccg

SEQ ID NO: 1825257 - RNA, 20 nt, Human herpesvirus 2
gcaggggggccggggauggg

SEQ ID NO: 1825258 - RNA, 18 nt, Human herpesvirus 2
gcccccgacccggggccc

SEQ ID NO: 1825259 - RNA, 12 nt, Human herpesvirus 2
gggggggaaaga

SEQ ID NO: 1825260 - RNA, 13 nt, Human herpesvirus 2
cggggagggacaa

SEQ ID NO: 1825261 - RNA, 15 nt, Human herpesvirus 2
gacacgcggcggguc

SEQ ID NO: 1825262 - RNA, 15 nt, Human herpesvirus 2
gaugcagcucccccg

SEQ ID NO: 1825263 - RNA, 12 nt, Human herpesvirus 2
ggcuucgugggu

SEQ ID NO: 1825264 - RNA, 17 nt, Human herpesvirus 2
ggcucccccgcggccuu

SEQ ID NO: 1825265 - RNA, 16 nt, Human herpesvirus 2
agagacccugcccccc

SEQ ID NO: 1825266 - RNA, 19 nt, Human herpesvirus 2
aucgucccgguugcguugc

SEQ ID NO: 1825267 - RNA, 15 nt, Human herpesvirus 2
ggcggcguggccgcg

SEQ ID NO: 1825268 - RNA, 21 nt, Human herpesvirus 2
ucgcgugcggccagccgcccc

SEQ ID NO: 1825269 - RNA, 16 nt, Human herpesvirus 2
gaggcccucugggaca

SEQ ID NO: 1825270 - RNA, 20 nt, Human herpesvirus 2
cgguuggaggcgccucugcc

SEQ ID NO: 1825271 - RNA, 15 nt, Human herpesvirus 2
uggacgcgccucccg

SEQ ID NO: 1825272 - RNA, 14 nt, Human herpesvirus 2
ggguccgggggccu

SEQ ID NO: 1825273 - RNA, 16 nt, Human herpesvirus 2
gccccucgcccccgcg

SEQ ID NO: 1825274 - RNA, 19 nt, Human herpesvirus 2
cgcgguggcgucggcggcc

SEQ ID NO: 1825275 - RNA, 22 nt, Human herpesvirus 2
cuuccggaccccgaccccgagc

SEQ ID NO: 1825276 - RNA, 19 nt, Human herpesvirus 2
ccgcgcaucacggcccacc

SEQ ID NO: 1825277 - RNA, 14 nt, Human herpesvirus 2
ccuguuuccuuucc

SEQ ID NO: 1825278 - RNA, 21 nt, Human herpesvirus 2
ugcccgcgggucugcgugggg

SEQ ID NO: 1825279 - RNA, 12 nt, Human herpesvirus 2
ggggggggcuug

SEQ ID NO: 1825280 - RNA, 19 nt, Human herpesvirus 2
gcggacccagaccugccgu

SEQ ID NO: 1825281 - RNA, 21 nt, Human herpesvirus 2
ugaggggcaccaaaaaccagg

SEQ ID NO: 1825282 - RNA, 13 nt, Human herpesvirus 2
ccggggggggccu

SEQ ID NO: 1825283 - RNA, 16 nt, Human herpesvirus 2
cgaguccugggugggu

SEQ ID NO: 1825284 - RNA, 13 nt, Human herpesvirus 2
gacccccagcgcg

SEQ ID NO: 1825285 - RNA, 20 nt, Human herpesvirus 2
ggccggcguucccgcucgcg

SEQ ID NO: 1825286 - RNA, 13 nt, Human herpesvirus 2
cacacacaggccc

SEQ ID NO: 1825287 - RNA, 17 nt, Human herpesvirus 2
cucgaacacgagccgca

SEQ ID NO: 1825288 - RNA, 19 nt, Human herpesvirus 2
gcccccccuccgcgcagga

SEQ ID NO: 1825289 - RNA, 16 nt, Human herpesvirus 2
gaucgacgacgccugg

SEQ ID NO: 1825290 - RNA, 20 nt, Human herpesvirus 2
cuucccgggaaaccacacac

SEQ ID NO: 1825291 - RNA, 18 nt, Human herpesvirus 2
uugggggggggggaagag

SEQ ID NO: 1825292 - RNA, 13 nt, Human herpesvirus 2
cgcggcggcuccc

SEQ ID NO: 1825293 - RNA, 15 nt, Human herpesvirus 2
ccccuguuggagccg

SEQ ID NO: 1825294 - RNA, 21 nt, Human herpesvirus 2
cgucgcucucggucccgcaua

SEQ ID NO: 1825295 - RNA, 23 nt, Human herpesvirus 2
gcuaccgcggcuucuucgccgcc

SEQ ID NO: 1825296 - RNA, 21 nt, Human herpesvirus 2
cccggggcggguaggccagag

SEQ ID NO: 1825297 - RNA, 13 nt, Human herpesvirus 2
ccuguugggcaca

SEQ ID NO: 1825298 - RNA, 15 nt, Human herpesvirus 2
gugggucucggggcc

SEQ ID NO: 1825299 - RNA, 16 nt, Human herpesvirus 2
aggaccaaaagggaaa

SEQ ID NO: 1825300 - RNA, 16 nt, Human herpesvirus 2
ccaggaacucacggca

SEQ ID NO: 1825301 - RNA, 21 nt, Human herpesvirus 2
uuucggaaagccggccccggu

SEQ ID NO: 1825302 - RNA, 15 nt, Human herpesvirus 2
guggggugggucgcc

SEQ ID NO: 1825303 - RNA, 15 nt, Human herpesvirus 2
ccagcguccugcgcg

SEQ ID NO: 1825304 - RNA, 17 nt, Human herpesvirus 2
ccgcgaugaccucccgg

SEQ ID NO: 1825305 - RNA, 19 nt, Human herpesvirus 2
gcucgcugcagggccuggc

SEQ ID NO: 1825306 - RNA, 12 nt, Human herpesvirus 2
guaggccagagc

SEQ ID NO: 1825307 - RNA, 21 nt, Human herpesvirus 2
accguggccgacaacugccug

SEQ ID NO: 1825308 - RNA, 15 nt, Human herpesvirus 2
cgacagcggggaccc

SEQ ID NO: 1825309 - RNA, 21 nt, Human herpesvirus 2
uggcacaaaaagcgacacucc

SEQ ID NO: 1825310 - RNA, 20 nt, Human herpesvirus 2
gggagugggggggggggacg

SEQ ID NO: 1825311 - RNA, 14 nt, Human herpesvirus 2
gaaacuuccgggag

SEQ ID NO: 1825312 - RNA, 21 nt, Human herpesvirus 2
gagacggccaugaccucgccc

SEQ ID NO: 1825313 - RNA, 20 nt, Human herpesvirus 2
cgacccccgugucgcucccc

SEQ ID NO: 1825314 - RNA, 12 nt, Human herpesvirus 2
gccucguggggc

SEQ ID NO: 1825315 - RNA, 23 nt, Human herpesvirus 2
uagaggguucgcaaccacagcaa

SEQ ID NO: 1825316 - RNA, 19 nt, Human herpesvirus 2
gccgcagaccaccucgcgg

SEQ ID NO: 1825317 - RNA, 23 nt, Human herpesvirus 2
ccgaaucuuuucaucgaaagggu

SEQ ID NO: 1825318 - RNA, 18 nt, Human herpesvirus 2
acacgccugcccccgccu

SEQ ID NO: 1825319 - RNA, 15 nt, Human herpesvirus 2
ggagggcggccagcc

SEQ ID NO: 1825320 - RNA, 20 nt, Human herpesvirus 2
ggcgacccgccgggggcgga

SEQ ID NO: 1825321 - RNA, 20 nt, Human herpesvirus 2
acggcaacaaagggccuccg

SEQ ID NO: 1825322 - RNA, 13 nt, Human herpesvirus 2
gcacggaggaacu

SEQ ID NO: 1825323 - RNA, 20 nt, Human herpesvirus 2
cgagccgcugugccaggugg

SEQ ID NO: 1825324 - RNA, 14 nt, Human herpesvirus 2
ccugcggcagcgcg

SEQ ID NO: 1825325 - RNA, 13 nt, Human herpesvirus 2
ggcggcguggccg

SEQ ID NO: 1825326 - RNA, 13 nt, Human herpesvirus 2
cgaugggagcccc

SEQ ID NO: 1825327 - RNA, 18 nt, Human herpesvirus 2
gcaucccagacgcccgcg

SEQ ID NO: 1825328 - RNA, 12 nt, Human herpesvirus 2
uuucucuucccc

SEQ ID NO: 1825329 - RNA, 14 nt, Human herpesvirus 2
gacuuucuggccuu

SEQ ID NO: 1825330 - RNA, 12 nt, Human herpesvirus 2
ucugaggccuca

SEQ ID NO: 1825331 - RNA, 20 nt, Human herpesvirus 2
gacgcccggcccauaaacag

SEQ ID NO: 1825332 - RNA, 11 nt, Human herpesvirus 2
gauuuccccag

SEQ ID NO: 1825333 - RNA, 16 nt, Human herpesvirus 2
ggccagcacgaccagg

SEQ ID NO: 1825334 - RNA, 21 nt, Human herpesvirus 2
cgaccaucaagaauucccagg

SEQ ID NO: 1825335 - RNA, 15 nt, Human herpesvirus 2
ccggcccgcgucccc

SEQ ID NO: 1825336 - RNA, 17 nt, Human herpesvirus 2
ggguuccccgagagccc

SEQ ID NO: 1825337 - RNA, 20 nt, Human herpesvirus 2
ugcuuggaggcccucuggga

SEQ ID NO: 1825338 - RNA, 16 nt, Human herpesvirus 2
gagcccugccccgccc

SEQ ID NO: 1825339 - RNA, 13 nt, Human herpesvirus 2
cgacgccaggccc

SEQ ID NO: 1825340 - RNA, 17 nt, Human herpesvirus 2
cguacgucugcccgugg

SEQ ID NO: 1825341 - RNA, 15 nt, Human herpesvirus 2
gagagccggaccggg

SEQ ID NO: 1825342 - RNA, 20 nt, Human herpesvirus 2
gaguucaauagauuucccaa

SEQ ID NO: 1825343 - RNA, 14 nt, Human herpesvirus 2
cccacagccaccuc

SEQ ID NO: 1825344 - RNA, 18 nt, Human herpesvirus 2
gagaagccgcccccaccc

SEQ ID NO: 1825345 - RNA, 19 nt, Human herpesvirus 2
cgagcucccugcggcuggc

SEQ ID NO: 1825346 - RNA, 21 nt, Human herpesvirus 2
ugcaguaacccaguuccucag

SEQ ID NO: 1825347 - RNA, 16 nt, Human herpesvirus 2
gcgcacccuggccguc

SEQ ID NO: 1825348 - RNA, 21 nt, Human herpesvirus 2
cagcuuucccuccacccgccc

SEQ ID NO: 1825349 - RNA, 13 nt, Human herpesvirus 2
ccgggcccuuggg

SEQ ID NO: 1825350 - RNA, 12 nt, Human herpesvirus 2
cgcgacggcccc

SEQ ID NO: 1825351 - RNA, 20 nt, Human herpesvirus 2
gucgcccuagaggcuguccg

SEQ ID NO: 1825352 - RNA, 22 nt, Human herpesvirus 2
cuagcucgcggagggcggccag

SEQ ID NO: 1825353 - RNA, 11 nt, Human herpesvirus 2
guaaaaaagaa

SEQ ID NO: 1825354 - RNA, 23 nt, Human herpesvirus 2
cggugccgcuuuaccccgcggcc

SEQ ID NO: 1825355 - RNA, 15 nt, Human herpesvirus 2
gacgccagcugcugg

SEQ ID NO: 1825356 - RNA, 16 nt, Human herpesvirus 2
ugacgacggccccggc

SEQ ID NO: 1825357 - RNA, 16 nt, Human herpesvirus 2
cgcacccaccggcccc

SEQ ID NO: 1825358 - RNA, 21 nt, Human herpesvirus 2
cucuguuccuuucccuucucc

SEQ ID NO: 1825359 - RNA, 16 nt, Human herpesvirus 2
augcuaauuaaauaca

SEQ ID NO: 1825360 - RNA, 16 nt, Human herpesvirus 2
aaggccaggggggcag

SEQ ID NO: 1825361 - RNA, 14 nt, Human herpesvirus 2
gacaucaaccaccu

SEQ ID NO: 1825362 - RNA, 14 nt, Human herpesvirus 2
cguugcccccccgg

SEQ ID NO: 1825363 - RNA, 21 nt, Human herpesvirus 2
cccagggcuucguggaagagg

SEQ ID NO: 1825364 - RNA, 15 nt, Human herpesvirus 2
ugccgggggccauga

SEQ ID NO: 1825365 - RNA, 13 nt, Human herpesvirus 2
ccgcgcgccgccg

SEQ ID NO: 1825366 - RNA, 12 nt, Human herpesvirus 2
ccucuaccccca

SEQ ID NO: 1825367 - RNA, 13 nt, Human herpesvirus 2
uggcggaagugcc

SEQ ID NO: 1825368 - RNA, 12 nt, Human herpesvirus 2
cgcgccucccgg

SEQ ID NO: 1825369 - RNA, 12 nt, Human herpesvirus 2
caccccccugac

SEQ ID NO: 1825370 - RNA, 14 nt, Human herpesvirus 2
ccgcccccgcuggc

SEQ ID NO: 1825371 - RNA, 19 nt, Human herpesvirus 2
uuuacgccuuuccuccccu

SEQ ID NO: 1825372 - RNA, 18 nt, Human herpesvirus 2
guuguccguucugucguc

SEQ ID NO: 1825373 - RNA, 20 nt, Human herpesvirus 2
ccuggaagcugccucccccc

SEQ ID NO: 1825374 - RNA, 18 nt, Human herpesvirus 2
cauggcggggggggggcu

SEQ ID NO: 1825375 - RNA, 13 nt, Human herpesvirus 2
gacggggaggaga

SEQ ID NO: 1825376 - RNA, 16 nt, Human herpesvirus 2
gucucaauaaagccag

SEQ ID NO: 1825377 - RNA, 16 nt, Human herpesvirus 2
uuccacacccccuccc

SEQ ID NO: 1825378 - RNA, 20 nt, Human herpesvirus 2
gcgcugcugcgcauggccug

SEQ ID NO: 1825379 - RNA, 20 nt, Human herpesvirus 2
ccuccgccagcgcccuuccg

SEQ ID NO: 1825380 - RNA, 17 nt, Human herpesvirus 2
ccccucguucugcugca

SEQ ID NO: 1825381 - RNA, 19 nt, Human herpesvirus 2
acccucaccccaccccauc

SEQ ID NO: 1825382 - RNA, 14 nt, Human herpesvirus 2
agccccuggggcug

SEQ ID NO: 1825383 - RNA, 17 nt, Human herpesvirus 2
gacagacaauaaagcau

SEQ ID NO: 1825384 - RNA, 18 nt, Human herpesvirus 2
cguccggcuggcggcgcg

SEQ ID NO: 1825385 - RNA, 15 nt, Human herpesvirus 2
caacggcgggccccg

SEQ ID NO: 1825386 - RNA, 20 nt, Human herpesvirus 2
cucuuuauugaccggggccc

SEQ ID NO: 1825387 - RNA, 13 nt, Human herpesvirus 2
cgagaagccgccc

SEQ ID NO: 1825388 - RNA, 15 nt, Human herpesvirus 2
gcucugccugcacga

SEQ ID NO: 1825389 - RNA, 23 nt, Human herpesvirus 2
ucgcggacgagcccguggcccac

SEQ ID NO: 1825390 - RNA, 12 nt, Human herpesvirus 2
uccacacccccu

SEQ ID NO: 1825391 - RNA, 14 nt, Human herpesvirus 2
cggcccuggagcgc

SEQ ID NO: 1825392 - RNA, 15 nt, Human herpesvirus 2
cgcgucggugccgcu

SEQ ID NO: 1825393 - RNA, 16 nt, Human herpesvirus 2
ggguccgggggccugg

SEQ ID NO: 1825394 - RNA, 13 nt, Human herpesvirus 2
uucccucccucgc

SEQ ID NO: 1825395 - RNA, 14 nt, Human herpesvirus 2
uccccgcuggagcc

SEQ ID NO: 1825396 - RNA, 13 nt, Human herpesvirus 2
cgcguccccggcc

SEQ ID NO: 1825397 - RNA, 21 nt, Human herpesvirus 2
gugcugcgcgagccguccggg

SEQ ID NO: 1825398 - RNA, 19 nt, Human herpesvirus 2
ggcuccaaacgccuccgga

SEQ ID NO: 1825399 - RNA, 15 nt, Human herpesvirus 2
auuuccaaacagggc

SEQ ID NO: 1825400 - RNA, 15 nt, Human herpesvirus 2
cggccauccccggcg

SEQ ID NO: 1825401 - RNA, 15 nt, Human herpesvirus 2
uaaggcaggggcagc

SEQ ID NO: 1825402 - RNA, 20 nt, Human herpesvirus 2
cauuguugucguguggugug

SEQ ID NO: 1825403 - RNA, 22 nt, Human herpesvirus 2
cuuuuguuccaccgcucaccca

SEQ ID NO: 1825404 - RNA, 19 nt, Human herpesvirus 2
cccagcgcggacgcggcca

SEQ ID NO: 1825405 - RNA, 12 nt, Human herpesvirus 2
acccccccgccg

SEQ ID NO: 1825406 - RNA, 17 nt, Human herpesvirus 2
cacaccagacggcggga

SEQ ID NO: 1825407 - RNA, 16 nt, Human herpesvirus 2
cggacuccgccccggc

SEQ ID NO: 1825408 - RNA, 22 nt, Human herpesvirus 2
uccgcggcuuuaucaccccgcu

SEQ ID NO: 1825409 - RNA, 17 nt, Human herpesvirus 2
ucgauguauggcgccuu

SEQ ID NO: 1825410 - RNA, 18 nt, Human herpesvirus 2
gggugugcugcuguuggg

SEQ ID NO: 1825411 - RNA, 11 nt, Human herpesvirus 2
gcgugccaacu

SEQ ID NO: 1825412 - RNA, 14 nt, Human herpesvirus 2
augaacugauugcc

SEQ ID NO: 1825413 - RNA, 16 nt, Human herpesvirus 2
cuuccuguaccugacg

SEQ ID NO: 1825414 - RNA, 21 nt, Human herpesvirus 2
cauuguugucguguggugugu

SEQ ID NO: 1825415 - RNA, 22 nt, Human herpesvirus 2
accaggucuuuccguggcgccu

SEQ ID NO: 1825416 - RNA, 19 nt, Human herpesvirus 2
uuagggggacgaacaggcg

SEQ ID NO: 1825417 - RNA, 17 nt, Human herpesvirus 2
ccgcggccauccugccc

SEQ ID NO: 1825418 - RNA, 21 nt, Human herpesvirus 2
ggaugccccgagccagcaggu

SEQ ID NO: 1825419 - RNA, 16 nt, Human herpesvirus 2
gacccaccgcccccgc

SEQ ID NO: 1825420 - RNA, 23 nt, Human herpesvirus 2
ccuguuuuuacgggccccggaca

SEQ ID NO: 1825421 - RNA, 13 nt, Human herpesvirus 2
agucucgaaggag

SEQ ID NO: 1825422 - RNA, 19 nt, Human herpesvirus 2
ccucuguuucuccaggcgc

SEQ ID NO: 1825423 - RNA, 23 nt, Human herpesvirus 2
ccucucaacgcccaggcccuggc

SEQ ID NO: 1825424 - RNA, 12 nt, Human herpesvirus 2
gacgaaaacgua

SEQ ID NO: 1825425 - RNA, 12 nt, Human herpesvirus 2
ugcgaaacagag

SEQ ID NO: 1825426 - RNA, 19 nt, Human herpesvirus 2
cacgaccagggaggccaga

SEQ ID NO: 1825427 - RNA, 16 nt, Human herpesvirus 2
uacauaaaacccaccc

SEQ ID NO: 1825428 - RNA, 12 nt, Human herpesvirus 2
accccccggguu

SEQ ID NO: 1825429 - RNA, 17 nt, Human herpesvirus 2
gcgucguccaggguggg

SEQ ID NO: 1825430 - RNA, 14 nt, Human herpesvirus 2
ugcccgccagggcc

SEQ ID NO: 1825431 - RNA, 13 nt, Human herpesvirus 2
ccgcccccacccc

SEQ ID NO: 1825432 - RNA, 20 nt, Human herpesvirus 2
ggaccacgugcacagccugg

SEQ ID NO: 1825433 - RNA, 12 nt, Human herpesvirus 2
cacacacccccu

SEQ ID NO: 1825434 - RNA, 15 nt, Human herpesvirus 2
gauggcggggauggg

SEQ ID NO: 1825435 - RNA, 19 nt, Human herpesvirus 2
gucgccgacuccaggagcu

SEQ ID NO: 1825436 - RNA, 14 nt, Human herpesvirus 2
gucugucugcccgg

SEQ ID NO: 1825437 - RNA, 13 nt, Human herpesvirus 2
cuuucccccccuc

SEQ ID NO: 1825438 - RNA, 16 nt, Human herpesvirus 2
cugggggauuguggga

SEQ ID NO: 1825439 - RNA, 16 nt, Human herpesvirus 2
gucuuugggccccgcc

SEQ ID NO: 1825440 - RNA, 21 nt, Human herpesvirus 2
cggccccgccgggucaccggg

SEQ ID NO: 1825441 - RNA, 14 nt, Human herpesvirus 2
cagccccuggggcu

SEQ ID NO: 1825442 - RNA, 17 nt, Human herpesvirus 2
gccgcgacggccccggc

SEQ ID NO: 1825443 - RNA, 16 nt, Human herpesvirus 2
cccuagccuucggcca

SEQ ID NO: 1825444 - RNA, 16 nt, Human herpesvirus 2
gggcacgcggggugcg

SEQ ID NO: 1825445 - RNA, 23 nt, Human herpesvirus 2
cgucucccgggggcgcuuggccg

SEQ ID NO: 1825446 - RNA, 22 nt, Human herpesvirus 2
gcacguacguucugccccgcgu

SEQ ID NO: 1825447 - RNA, 12 nt, Human herpesvirus 2
cgggccucccgc

SEQ ID NO: 1825448 - RNA, 23 nt, Human herpesvirus 2
cggcggccaccccgccgcagcuc

SEQ ID NO: 1825449 - RNA, 15 nt, Human herpesvirus 2
ggccccucgcucccc

SEQ ID NO: 1825450 - RNA, 14 nt, Human herpesvirus 2
cgcugcggggacca

SEQ ID NO: 1825451 - RNA, 15 nt, Human herpesvirus 2
ucugcuugccccucc

SEQ ID NO: 1825452 - RNA, 11 nt, Human herpesvirus 2
accaaccuggc

SEQ ID NO: 1825453 - RNA, 15 nt, Human herpesvirus 2
caucccacaaugggg

SEQ ID NO: 1825454 - RNA, 23 nt, Human herpesvirus 2
agggggcaauuaauaaagacugu

SEQ ID NO: 1825455 - RNA, 13 nt, Human herpesvirus 2
ucccguggcccuc

SEQ ID NO: 1825456 - RNA, 17 nt, Human herpesvirus 2
guucuggcggcccugga

SEQ ID NO: 1825457 - RNA, 19 nt, Human herpesvirus 2
gaacucucccggcuccucc

SEQ ID NO: 1825458 - RNA, 18 nt, Human herpesvirus 2
gccccgacaucaaccacc

SEQ ID NO: 1825459 - RNA, 14 nt, Human herpesvirus 2
acccacacacaccc

SEQ ID NO: 1825460 - RNA, 21 nt, Human herpesvirus 2
gccuuucccguggcccuccac

SEQ ID NO: 1825461 - RNA, 17 nt, Human herpesvirus 2
gccagccgcccccgccg

SEQ ID NO: 1825462 - RNA, 20 nt, Human herpesvirus 2
guggcggaggccugucccug

SEQ ID NO: 1825463 - RNA, 13 nt, Human herpesvirus 2
accccccacgccc

SEQ ID NO: 1825464 - RNA, 20 nt, Human herpesvirus 2
cgcuccagguacugcugcac

SEQ ID NO: 1825465 - RNA, 16 nt, Human herpesvirus 2
acgccaggccccccgg

SEQ ID NO: 1825466 - RNA, 19 nt, Human herpesvirus 2
cgccguggcggaggccugu

SEQ ID NO: 1825467 - RNA, 16 nt, Human herpesvirus 2
cugcugggccauggau

SEQ ID NO: 1825468 - RNA, 15 nt, Human herpesvirus 2
ucgauugcggggacc

SEQ ID NO: 1825469 - RNA, 15 nt, Human herpesvirus 2
gaaaccgcaggcgcg

SEQ ID NO: 1825470 - RNA, 17 nt, Human herpesvirus 2
cgaccagcgccgggugg

SEQ ID NO: 1825471 - RNA, 19 nt, Human herpesvirus 2
ccuguccccgcccccccca

SEQ ID NO: 1825472 - RNA, 19 nt, Human herpesvirus 2
uccgaggugcggagccucu

SEQ ID NO: 1825473 - RNA, 16 nt, Human herpesvirus 2
agaaggaggggggccu

SEQ ID NO: 1825474 - RNA, 15 nt, Human herpesvirus 2
gcgugcggcccugcc

SEQ ID NO: 1825475 - RNA, 16 nt, Human herpesvirus 2
cgacgaggccuucccg

SEQ ID NO: 1825476 - RNA, 21 nt, Human herpesvirus 2
caggcgcuccagguacugcug

SEQ ID NO: 1825477 - RNA, 15 nt, Human herpesvirus 2
ggcuggagcucugcc

SEQ ID NO: 1825478 - RNA, 18 nt, Human herpesvirus 2
ccaccccccccccccuuc

SEQ ID NO: 1825479 - RNA, 12 nt, Human herpesvirus 2
cccgccauggcg

SEQ ID NO: 1825480 - RNA, 17 nt, Human herpesvirus 2
caggcguguugggaagg

SEQ ID NO: 1825481 - RNA, 13 nt, Human herpesvirus 2
gccgcacccacga

SEQ ID NO: 1825482 - RNA, 15 nt, Human herpesvirus 2
ggcuggcggcgcggc

SEQ ID NO: 1825483 - RNA, 23 nt, Human herpesvirus 2
gggaaacacaguuccgggaaggc

SEQ ID NO: 1825484 - RNA, 21 nt, Human herpesvirus 2
gugucgcuccccuucagccug

SEQ ID NO: 1825485 - RNA, 14 nt, Human herpesvirus 2
ggcggcucccccgc

SEQ ID NO: 1825486 - RNA, 18 nt, Human herpesvirus 2
agacaauaaagcaucacg

SEQ ID NO: 1825487 - RNA, 15 nt, Human herpesvirus 2
ccccggguuccccga

SEQ ID NO: 1825488 - RNA, 21 nt, Human herpesvirus 2
ucgggggcucggggggguacg

SEQ ID NO: 1825489 - RNA, 16 nt, Human herpesvirus 2
gcaugguaauuagcaa

SEQ ID NO: 1825490 - RNA, 12 nt, Human herpesvirus 2
ucucggggaggg

SEQ ID NO: 1825491 - RNA, 21 nt, Human herpesvirus 2
cagcuuggccguguggucgcc

SEQ ID NO: 1825492 - RNA, 16 nt, Human herpesvirus 2
agaaauaaagaacgag

SEQ ID NO: 1825493 - RNA, 16 nt, Human herpesvirus 2
gccgcgggggaggcgc

SEQ ID NO: 1825494 - RNA, 16 nt, Human herpesvirus 2
gauguguucuccugga

SEQ ID NO: 1825495 - RNA, 11 nt, Human herpesvirus 2
agaauaaaagg

SEQ ID NO: 1825496 - RNA, 17 nt, Human herpesvirus 2
ggacuggcagccgggac

SEQ ID NO: 1825497 - RNA, 23 nt, Human herpesvirus 2
guggugauggggguccugguggg

SEQ ID NO: 1825498 - RNA, 15 nt, Human herpesvirus 2
gaccacgugcacagc

SEQ ID NO: 1825499 - RNA, 13 nt, Human herpesvirus 2
uguaccucugggc

SEQ ID NO: 1825500 - RNA, 13 nt, Human herpesvirus 2
gccagcgcccuuc

SEQ ID NO: 1825501 - RNA, 15 nt, Human herpesvirus 2
auggggggggaaagg

SEQ ID NO: 1825502 - RNA, 16 nt, Human herpesvirus 2
ugucugucugcccggc

SEQ ID NO: 1825503 - RNA, 18 nt, Human herpesvirus 2
ccugcucgaccagcggcc

SEQ ID NO: 1825504 - RNA, 12 nt, Human herpesvirus 2
agcguggggcgc

SEQ ID NO: 1825505 - RNA, 22 nt, Human herpesvirus 2
gacgcgguuauccugcggcagg

SEQ ID NO: 1825506 - RNA, 18 nt, Human herpesvirus 2
cgcagcguccggcuggcg

SEQ ID NO: 1825507 - RNA, 21 nt, Human herpesvirus 2
gcccccggccuuugcuuccuc

SEQ ID NO: 1825508 - RNA, 13 nt, Human herpesvirus 2
uccagcuuggccg

SEQ ID NO: 1825509 - RNA, 22 nt, Human herpesvirus 2
gaaggaaucgggcgucugugcg

SEQ ID NO: 1825510 - RNA, 14 nt, Human herpesvirus 2
agcgcgccaggacc

SEQ ID NO: 1825511 - RNA, 17 nt, Human herpesvirus 2
ucggggccagggcuggc

SEQ ID NO: 1825512 - RNA, 16 nt, Human herpesvirus 2
aacuaggacaguucau

SEQ ID NO: 1825513 - RNA, 21 nt, Human herpesvirus 2
cgccgcucgucccccgaggcc

SEQ ID NO: 1825514 - RNA, 14 nt, Human herpesvirus 2
gggggcgggggugc

SEQ ID NO: 1825515 - RNA, 14 nt, Human herpesvirus 2
agauggggagaggg

SEQ ID NO: 1825516 - RNA, 13 nt, Human herpesvirus 2
acggcaagaaaga

SEQ ID NO: 1825517 - RNA, 18 nt, Human herpesvirus 2
aacacgagccgcaggaac

SEQ ID NO: 1825518 - RNA, 19 nt, Human herpesvirus 2
guuugugcgggugcccaug

SEQ ID NO: 1825519 - RNA, 14 nt, Human herpesvirus 2
aacacugaggaacu

SEQ ID NO: 1825520 - RNA, 18 nt, Human herpesvirus 2
gaacccgguaaauaccac

SEQ ID NO: 1825521 - RNA, 14 nt, Human herpesvirus 2
cucgccgcuguggc

SEQ ID NO: 1825522 - RNA, 15 nt, Human herpesvirus 2
ugcccgaccuguuaa

SEQ ID NO: 1825523 - RNA, 19 nt, Human herpesvirus 2
gacgcuguuguuucugggc

SEQ ID NO: 1825524 - RNA, 13 nt, Human herpesvirus 2
uaccacggggagg

SEQ ID NO: 1825525 - RNA, 15 nt, Human herpesvirus 2
gcaaacgugggauga

SEQ ID NO: 1825526 - RNA, 12 nt, Human herpesvirus 2
gaggauuacuuu

SEQ ID NO: 1825527 - RNA, 18 nt, Human herpesvirus 2
gcuuagggugugaccccc

SEQ ID NO: 1825528 - RNA, 14 nt, Human herpesvirus 2
gugccaguccgcuc

SEQ ID NO: 1825529 - RNA, 22 nt, Human herpesvirus 2
cugccccgcggaggcgugguga

SEQ ID NO: 1825530 - RNA, 14 nt, Human herpesvirus 2
gggcguccccgagc

SEQ ID NO: 1825531 - RNA, 14 nt, Human herpesvirus 2
cacacccccugucc

SEQ ID NO: 1825532 - RNA, 16 nt, Human herpesvirus 2
gacccggggcccgaag

SEQ ID NO: 1825533 - RNA, 14 nt, Human herpesvirus 2
cagcugcgccagaa

SEQ ID NO: 1825534 - RNA, 12 nt, Human herpesvirus 2
cggcccugccuc

SEQ ID NO: 1825535 - RNA, 14 nt, Human herpesvirus 2
gccaguggagccaa

SEQ ID NO: 1825536 - RNA, 22 nt, Human herpesvirus 2
cgcgagcucccugcggcuggcg

SEQ ID NO: 1825537 - RNA, 22 nt, Human herpesvirus 2
cgggaccacggucugguggcgc

SEQ ID NO: 1825538 - RNA, 19 nt, Human herpesvirus 2
uaccccuuugacuccuggg

SEQ ID NO: 1825539 - RNA, 13 nt, Human herpesvirus 2
guucggggggacg

SEQ ID NO: 1825540 - RNA, 11 nt, Human herpesvirus 2
ccaccgggccu

SEQ ID NO: 1825541 - RNA, 14 nt, Human herpesvirus 2
cgggcugcugguga

SEQ ID NO: 1825542 - RNA, 16 nt, Human herpesvirus 2
cagccccgcaggcagg

SEQ ID NO: 1825543 - RNA, 15 nt, Human herpesvirus 2
cuguuccuuucccuu

SEQ ID NO: 1825544 - RNA, 23 nt, Human herpesvirus 2
aacgguaagcagcgcguccaggu

SEQ ID NO: 1825545 - RNA, 19 nt, Human herpesvirus 2
ugguguguuuggcgugugu

SEQ ID NO: 1825546 - RNA, 14 nt, Human herpesvirus 2
gggcgugcugugcc

SEQ ID NO: 1825547 - RNA, 16 nt, Human herpesvirus 2
accacguguccccagg

SEQ ID NO: 1825548 - RNA, 12 nt, Human herpesvirus 2
gcccccaccccc

SEQ ID NO: 1825549 - RNA, 17 nt, Human herpesvirus 2
gacagcggggacccggg

SEQ ID NO: 1825550 - RNA, 12 nt, Human herpesvirus 2
ccucccacuucc

SEQ ID NO: 1825551 - RNA, 20 nt, Human herpesvirus 2
ggcgcgcggcgcgagcuccc

SEQ ID NO: 1825552 - RNA, 20 nt, Human herpesvirus 2
ggaccccucaucgccgcgcc

SEQ ID NO: 1825553 - RNA, 15 nt, Human herpesvirus 2
cucguggugcugggg

SEQ ID NO: 1825554 - RNA, 19 nt, Human herpesvirus 2
cucggggacagaggacgcc

SEQ ID NO: 1825555 - RNA, 16 nt, Human herpesvirus 2
agagcgggcccggggc

SEQ ID NO: 1825556 - RNA, 12 nt, Human herpesvirus 2
ccgugccccugg

SEQ ID NO: 1825557 - RNA, 17 nt, Human herpesvirus 2
ccuucgcgagggccccg

SEQ ID NO: 1825558 - RNA, 15 nt, Human herpesvirus 2
cucuuggggaaaucu

SEQ ID NO: 1825559 - RNA, 14 nt, Human herpesvirus 2
cacgacaggugggg

SEQ ID NO: 1825560 - RNA, 17 nt, Human herpesvirus 2
accccgcccgcuugcau

SEQ ID NO: 1825561 - RNA, 15 nt, Human herpesvirus 2
cggucaggaccaggg

SEQ ID NO: 1825562 - RNA, 19 nt, Human herpesvirus 2
agagggggggaaagaaaga

SEQ ID NO: 1825563 - RNA, 14 nt, Human herpesvirus 2
ucguguucgugggg

SEQ ID NO: 1825564 - RNA, 19 nt, Human herpesvirus 2
gcgaccgucuuugggcccc

SEQ ID NO: 1825565 - RNA, 23 nt, Human herpesvirus 2
gaacucgcccgccguuggggaua

SEQ ID NO: 1825566 - RNA, 18 nt, Human herpesvirus 2
cggcgcgggcggcgccgc

SEQ ID NO: 1825567 - RNA, 15 nt, Human herpesvirus 2
gccgucuuggccgug

SEQ ID NO: 1825568 - RNA, 14 nt, Human herpesvirus 2
ucuggaagagcucc

SEQ ID NO: 1825569 - RNA, 17 nt, Human herpesvirus 2
gcucgcggagggcggcc

SEQ ID NO: 1825570 - RNA, 19 nt, Human herpesvirus 2
cugcagaugcugcccgcgg

SEQ ID NO: 1825571 - RNA, 19 nt, Human herpesvirus 2
ugcugggcgcgagccaggc

SEQ ID NO: 1825572 - RNA, 16 nt, Human herpesvirus 2
gccccgacggcccaca

SEQ ID NO: 1825573 - RNA, 15 nt, Human herpesvirus 2
cgggccgccauuccc

SEQ ID NO: 1825574 - RNA, 14 nt, Human herpesvirus 2
aauugaaaucgcuu

SEQ ID NO: 1825575 - RNA, 14 nt, Human herpesvirus 2
gcaagagccugccg

SEQ ID NO: 1825576 - RNA, 23 nt, Human herpesvirus 2
uuccuccgugcuggggaaaucuc

SEQ ID NO: 1825577 - RNA, 24 nt, Human herpesvirus 2
aucgccaacucugucuucgugugg

SEQ ID NO: 1825578 - RNA, 19 nt, Human herpesvirus 2
caacgccgggcgcgcggcg

SEQ ID NO: 1825579 - RNA, 22 nt, Human herpesvirus 2
cggcgguucgcgugcggccagc

SEQ ID NO: 1825580 - RNA, 16 nt, Human herpesvirus 2
ggacgcguucgagggu

SEQ ID NO: 1825581 - RNA, 17 nt, Human herpesvirus 2
gcguugccgggggccau

SEQ ID NO: 1825582 - RNA, 15 nt, Human herpesvirus 2
cccuugcccgcuucc

SEQ ID NO: 1825583 - RNA, 20 nt, Human herpesvirus 2
ccgaaggaggaaaguggggg

SEQ ID NO: 1825584 - RNA, 14 nt, Human herpesvirus 2
guccgcgcggggcg

SEQ ID NO: 1825585 - RNA, 21 nt, Human herpesvirus 2
ucuggcggcccuggagcgcca

SEQ ID NO: 1825586 - RNA, 23 nt, Human herpesvirus 2
gggacccgccagagacccugccc

SEQ ID NO: 1825587 - RNA, 24 nt, Human herpesvirus 2
gcgccgcuacugcgccaccgucca

SEQ ID NO: 1825588 - RNA, 17 nt, Human herpesvirus 2
gcgugcguucuggcggc

SEQ ID NO: 1825589 - RNA, 16 nt, Human herpesvirus 2
ggcgggggugccgugg

SEQ ID NO: 1825590 - RNA, 21 nt, Human herpesvirus 2
uccccggauggcaugggaggc

SEQ ID NO: 1825591 - RNA, 16 nt, Human herpesvirus 2
uuuccgccgccgggaa

SEQ ID NO: 1825592 - RNA, 13 nt, Human herpesvirus 2
ccgggagcguggg

SEQ ID NO: 1825593 - RNA, 15 nt, Human herpesvirus 2
aacgacccccagcgc

SEQ ID NO: 1825594 - RNA, 21 nt, Human herpesvirus 2
ccagcgccggguggcgccucu

SEQ ID NO: 1825595 - RNA, 20 nt, Human herpesvirus 2
gggcgaagucccgcacgaag

SEQ ID NO: 1825596 - RNA, 15 nt, Human herpesvirus 2
gucgccggcgugggu

SEQ ID NO: 1825597 - RNA, 15 nt, Human herpesvirus 2
ccacggucagucugg

SEQ ID NO: 1825598 - RNA, 15 nt, Human herpesvirus 2
accaccgccccgccu

SEQ ID NO: 1825599 - RNA, 16 nt, Human herpesvirus 2
gcgcagcgcaucgccg

SEQ ID NO: 1825600 - RNA, 14 nt, Human herpesvirus 2
ucgcugcucucccg

SEQ ID NO: 1825601 - RNA, 14 nt, Human herpesvirus 2
uggggaaagggaag

SEQ ID NO: 1825602 - RNA, 13 nt, Human herpesvirus 2
uuagcaacuuuua

SEQ ID NO: 1825603 - RNA, 13 nt, Human herpesvirus 2
cgccccccccagg

SEQ ID NO: 1825604 - RNA, 11 nt, Human herpesvirus 2
gcaccccaccg

SEQ ID NO: 1825605 - RNA, 20 nt, Human herpesvirus 2
aagcgggccguucggcaggc

SEQ ID NO: 1825606 - RNA, 15 nt, Human herpesvirus 2
cggcgcgagcucccu

SEQ ID NO: 1825607 - RNA, 15 nt, Human herpesvirus 2
cugcccgaccgggcg

SEQ ID NO: 1825608 - RNA, 11 nt, Human herpesvirus 2
gaccugcagga

SEQ ID NO: 1825609 - RNA, 19 nt, Human herpesvirus 2
agccaccgucccgcccgcc

SEQ ID NO: 1825610 - RNA, 20 nt, Human herpesvirus 2
gguucggggccagggcuggc

SEQ ID NO: 1825611 - RNA, 17 nt, Human herpesvirus 2
ccuugugugguuuauuc

SEQ ID NO: 1825612 - RNA, 16 nt, Human herpesvirus 2
cucuggcguccccagg

SEQ ID NO: 1825613 - RNA, 18 nt, Human herpesvirus 2
ccgccaacgcgcuguggc

SEQ ID NO: 1825614 - RNA, 15 nt, Human herpesvirus 2
ugccccucccccggc

SEQ ID NO: 1825615 - RNA, 12 nt, Human herpesvirus 2
ccaccaaccugg

SEQ ID NO: 1825616 - RNA, 10 nt, Human herpesvirus 2
cggcccgugg

SEQ ID NO: 1825617 - RNA, 15 nt, Human herpesvirus 2
cgaaggucgggccgu

SEQ ID NO: 1825618 - RNA, 12 nt, Human herpesvirus 2
cguucugcugca

SEQ ID NO: 1825619 - RNA, 23 nt, Human herpesvirus 2
cacacccccaucgggcugcuggu

SEQ ID NO: 1825620 - RNA, 12 nt, Human herpesvirus 2
guggcuggaggc

SEQ ID NO: 1825621 - RNA, 14 nt, Human herpesvirus 2
ccgagcagcacggc

SEQ ID NO: 1825622 - RNA, 17 nt, Human herpesvirus 2
cgcgcaggcuggagcuc

SEQ ID NO: 1825623 - RNA, 16 nt, Human herpesvirus 2
ggccgcgacaagaccc

SEQ ID NO: 1825624 - RNA, 18 nt, Human herpesvirus 2
cugcccguggguggccac

SEQ ID NO: 1825625 - RNA, 12 nt, Human herpesvirus 2
guucugccccgc

SEQ ID NO: 1825626 - RNA, 21 nt, Human herpesvirus 2
ugcgcgcggcgacggcaccgc

SEQ ID NO: 1825627 - RNA, 17 nt, Human herpesvirus 2
caggccaucgccgggga

SEQ ID NO: 1825628 - RNA, 22 nt, Human herpesvirus 2
cuucgaucgacgaacuggggcg

SEQ ID NO: 1825629 - RNA, 14 nt, Human herpesvirus 2
gcagcucccccgcg

SEQ ID NO: 1825630 - RNA, 18 nt, Human herpesvirus 2
agcucgcggagggcggcc

SEQ ID NO: 1825631 - RNA, 16 nt, Human herpesvirus 2
gucaauagauuucccc

SEQ ID NO: 1825632 - RNA, 17 nt, Human herpesvirus 2
uccggaguuagcaaaac

SEQ ID NO: 1825633 - RNA, 15 nt, Human herpesvirus 2
ggcggccaccccgcc

SEQ ID NO: 1825634 - RNA, 20 nt, Human herpesvirus 2
gugcgugcugcugagcccug

SEQ ID NO: 1825635 - RNA, 18 nt, Human herpesvirus 2
cagggggcggcgccggcc

SEQ ID NO: 1825636 - RNA, 17 nt, Human herpesvirus 2
uccccagggagccccgg

SEQ ID NO: 1825637 - RNA, 23 nt, Human herpesvirus 2
cggccaccaccccccuccucccc

SEQ ID NO: 1825638 - RNA, 14 nt, Human herpesvirus 2
acgccagcugcugg

SEQ ID NO: 1825639 - RNA, 14 nt, Human herpesvirus 2
agcgucaggcccgc

SEQ ID NO: 1825640 - RNA, 14 nt, Human herpesvirus 2
ggggcugguuuugc

SEQ ID NO: 1825641 - RNA, 17 nt, Human herpesvirus 2
ucggucgacgaggccug

SEQ ID NO: 1825642 - RNA, 17 nt, Human herpesvirus 2
cagccgcccccgccggc

SEQ ID NO: 1825643 - RNA, 14 nt, Human herpesvirus 2
gcgccgucgggccc

SEQ ID NO: 1825644 - RNA, 20 nt, Human herpesvirus 2
cuggagauccccggggcccg

SEQ ID NO: 1825645 - RNA, 23 nt, Human herpesvirus 2
ugcaagcgggcgggguggggagg

SEQ ID NO: 1825646 - RNA, 14 nt, Human herpesvirus 2
gcacgcggugcguc

SEQ ID NO: 1825647 - RNA, 22 nt, Human herpesvirus 2
cgcauuuaaggagucgccgccc

SEQ ID NO: 1825648 - RNA, 16 nt, Human herpesvirus 2
acccccgaacagcccc

SEQ ID NO: 1825649 - RNA, 14 nt, Human herpesvirus 2
ccggaaccccucug

SEQ ID NO: 1825650 - RNA, 18 nt, Human herpesvirus 2
gcucgcgguaauuagcag

SEQ ID NO: 1825651 - RNA, 12 nt, Human herpesvirus 2
guaucggccagg

SEQ ID NO: 1825652 - RNA, 22 nt, Human herpesvirus 2
gggcuucguggaagaggaccug

SEQ ID NO: 1825653 - RNA, 16 nt, Human herpesvirus 2
accccgagcgugcccu

SEQ ID NO: 1825654 - RNA, 13 nt, Human herpesvirus 2
cggaccuggggga

SEQ ID NO: 1825655 - RNA, 21 nt, Human herpesvirus 2
acgccgcggccauccugccca

SEQ ID NO: 1825656 - RNA, 15 nt, Human herpesvirus 2
caugcaacgccgggc

SEQ ID NO: 1825657 - RNA, 13 nt, Human herpesvirus 2
ggcgcgcccaccg

SEQ ID NO: 1825658 - RNA, 15 nt, Human herpesvirus 2
aagcaagaaaacggu

SEQ ID NO: 1825659 - RNA, 17 nt, Human herpesvirus 2
caccgguccuucgcggg

SEQ ID NO: 1825660 - RNA, 16 nt, Human herpesvirus 2
cgaccccgccccccga

SEQ ID NO: 1825661 - RNA, 19 nt, Human herpesvirus 2
ggcggcgaaccgguagccg

SEQ ID NO: 1825662 - RNA, 16 nt, Human herpesvirus 2
gcuugcugcccgaagg

SEQ ID NO: 1825663 - RNA, 19 nt, Human herpesvirus 2
ugugcaccgaaggaggaaa

SEQ ID NO: 1825664 - RNA, 16 nt, Human herpesvirus 2
gcuggagcucugccug

SEQ ID NO: 1825665 - RNA, 15 nt, Human herpesvirus 2
cccucccgcaccccc

SEQ ID NO: 1825666 - RNA, 20 nt, Human herpesvirus 2
ccgggcgaaaaggcccggcc

SEQ ID NO: 1825667 - RNA, 13 nt, Human herpesvirus 2
ccgccggcgguga

SEQ ID NO: 1825668 - RNA, 20 nt, Human herpesvirus 2
cgugcgugcugcugagcccu

SEQ ID NO: 1825669 - RNA, 20 nt, Human herpesvirus 2
ggguccgacgaggccuuccc

SEQ ID NO: 1825670 - RNA, 15 nt, Human herpesvirus 2
accucgcggcggcuc

SEQ ID NO: 1825671 - RNA, 14 nt, Human herpesvirus 2
ccccgagcagcacg

SEQ ID NO: 1825672 - RNA, 17 nt, Human herpesvirus 2
cguggggccccagggcu

SEQ ID NO: 1825673 - RNA, 15 nt, Human herpesvirus 2
caugucuuuccacca

SEQ ID NO: 1825674 - RNA, 18 nt, Human herpesvirus 2
acgacagcggggacccgg

SEQ ID NO: 1825675 - RNA, 15 nt, Human herpesvirus 2
gcgguucguucugga

SEQ ID NO: 1825676 - RNA, 17 nt, Human herpesvirus 2
ccucuguuucuccaggc

SEQ ID NO: 1825677 - RNA, 15 nt, Human herpesvirus 2
accgcgcgccgccgc

SEQ ID NO: 1825678 - RNA, 14 nt, Human herpesvirus 2
uccaaacagggccu

SEQ ID NO: 1825679 - RNA, 17 nt, Human herpesvirus 2
cuucgcggcggccgcac

SEQ ID NO: 1825680 - RNA, 19 nt, Human herpesvirus 2
ugcgcacgacagaccuccc

SEQ ID NO: 1825681 - RNA, 17 nt, Human herpesvirus 2
cccacccuuguuggagc

SEQ ID NO: 1825682 - RNA, 11 nt, Human herpesvirus 2
gggcuccucag

SEQ ID NO: 1825683 - RNA, 23 nt, Human herpesvirus 2
cugacccucucgggcaugggcua

SEQ ID NO: 1825684 - RNA, 18 nt, Human herpesvirus 2
gugcucgcagcagucgug

SEQ ID NO: 1825685 - RNA, 20 nt, Human herpesvirus 2
accuuccccucccacuuccc

SEQ ID NO: 1825686 - RNA, 15 nt, Human herpesvirus 2
accgcgcccacagcc

SEQ ID NO: 1825687 - RNA, 18 nt, Human herpesvirus 2
agcuccucuucgggcacc

SEQ ID NO: 1825688 - RNA, 12 nt, Human herpesvirus 2
agagauuucccc

SEQ ID NO: 1825689 - RNA, 19 nt, Human herpesvirus 2
agcgcgggggacgggccgc

SEQ ID NO: 1825690 - RNA, 20 nt, Human herpesvirus 2
gaaauaaagaacgagacaga

SEQ ID NO: 1825691 - RNA, 17 nt, Human herpesvirus 2
acggucgccacucuccu

SEQ ID NO: 1825692 - RNA, 13 nt, Human herpesvirus 2
ggcgccgccccgc

SEQ ID NO: 1825693 - RNA, 16 nt, Human herpesvirus 2
uaggcauauccuccuu

SEQ ID NO: 1825694 - RNA, 12 nt, Human herpesvirus 2
ccaccgcacccg

SEQ ID NO: 1825695 - RNA, 12 nt, Human herpesvirus 2
acaacugccuga

SEQ ID NO: 1825696 - RNA, 17 nt, Human herpesvirus 2
gccucguggucgggggc

SEQ ID NO: 1825697 - RNA, 21 nt, Human herpesvirus 2
ucuggaggguucggggcacuu

SEQ ID NO: 1825698 - RNA, 16 nt, Human herpesvirus 2
cacgcgcuggccccuc

SEQ ID NO: 1825699 - RNA, 20 nt, Human herpesvirus 2
ugcacugccccccuccuggg

SEQ ID NO: 1825700 - RNA, 23 nt, Human herpesvirus 2
ccccuugacgugguccacccggg

SEQ ID NO: 1825701 - RNA, 20 nt, Human herpesvirus 2
cgccagcucggacaccagca

SEQ ID NO: 1825702 - RNA, 21 nt, Human herpesvirus 2
ggcggcgaaccgguagccggg

SEQ ID NO: 1825703 - RNA, 21 nt, Human herpesvirus 2
ucgacacacacaccccccuuc

SEQ ID NO: 1825704 - RNA, 17 nt, Human herpesvirus 2
uccccuucagccuggac

SEQ ID NO: 1825705 - RNA, 15 nt, Human herpesvirus 2
ccuguggggccugcu

SEQ ID NO: 1825706 - RNA, 14 nt, Human herpesvirus 2
cgcaucggaccccc

SEQ ID NO: 1825707 - RNA, 22 nt, Human herpesvirus 2
agcuuggccguguggucgcccc

SEQ ID NO: 1825708 - RNA, 16 nt, Human herpesvirus 2
cccaccgcccccgcug

SEQ ID NO: 1825709 - RNA, 14 nt, Human herpesvirus 2
uccccccggggggc

SEQ ID NO: 1825710 - RNA, 16 nt, Human herpesvirus 2
cggcggggccccgggc

SEQ ID NO: 1825711 - RNA, 14 nt, Human herpesvirus 2
cgagggccccggcc

SEQ ID NO: 1825712 - RNA, 17 nt, Human herpesvirus 2
gccggcggagccccgga

SEQ ID NO: 1825713 - RNA, 15 nt, Human herpesvirus 2
ucccgcacccccgcg

SEQ ID NO: 1825714 - RNA, 16 nt, Human herpesvirus 2
ccaccgcgcccacagc

SEQ ID NO: 1825715 - RNA, 13 nt, Human herpesvirus 2
ccccgggcagccg

SEQ ID NO: 1825716 - RNA, 20 nt, Human herpesvirus 2
gcuuggccguguggucgccc

SEQ ID NO: 1825717 - RNA, 14 nt, Human herpesvirus 2
guccucacggccaa

SEQ ID NO: 1825718 - RNA, 14 nt, Human herpesvirus 2
ucauccggcccgcc

SEQ ID NO: 1825719 - RNA, 19 nt, Human herpesvirus 2
cucgugcucgcgugguaca

SEQ ID NO: 1825720 - RNA, 14 nt, Human herpesvirus 2
gacgcggccagaaa

SEQ ID NO: 1825721 - RNA, 19 nt, Human herpesvirus 2
ucucaaacaaaaacacaag

SEQ ID NO: 1825722 - RNA, 21 nt, Human herpesvirus 2
cggccccuguuggagccggag

SEQ ID NO: 1825723 - RNA, 15 nt, Human herpesvirus 2
ucgcgucgggccaga

SEQ ID NO: 1825724 - RNA, 15 nt, Human herpesvirus 2
gcucgaccagcggcc

SEQ ID NO: 1825725 - RNA, 11 nt, Human herpesvirus 2
guucuccugga

SEQ ID NO: 1825726 - RNA, 14 nt, Human herpesvirus 2
gagcaggacagccg

SEQ ID NO: 1825727 - RNA, 23 nt, Human herpesvirus 2
ccuggcgauccugggccuguggg

SEQ ID NO: 1825728 - RNA, 13 nt, Human herpesvirus 2
gccaacagggagu

SEQ ID NO: 1825729 - RNA, 17 nt, Human herpesvirus 2
ugggggcgcugguggcc

SEQ ID NO: 1825730 - RNA, 9 nt, Human herpesvirus 2
gggacggcg

SEQ ID NO: 1825731 - RNA, 17 nt, Human herpesvirus 2
acgucgcaugcaaauua

SEQ ID NO: 1825732 - RNA, 14 nt, Human herpesvirus 2
aggcggucccggcc

SEQ ID NO: 1825733 - RNA, 20 nt, Human herpesvirus 2
gcgaccgggcggcgcgcccc

SEQ ID NO: 1825734 - RNA, 21 nt, Human herpesvirus 2
gagccgguagugcaggugggc

SEQ ID NO: 1825735 - RNA, 17 nt, Human herpesvirus 2
ggcgagcuggcccugga

SEQ ID NO: 1825736 - RNA, 20 nt, Human herpesvirus 2
uuuuuggcaccuugccgccc

SEQ ID NO: 1825737 - RNA, 14 nt, Human herpesvirus 2
ggccgccccgcagu

SEQ ID NO: 1825738 - RNA, 14 nt, Human herpesvirus 2
gugcucgcagcagu

SEQ ID NO: 1825739 - RNA, 16 nt, Human herpesvirus 2
gcggguaggccagagc

SEQ ID NO: 1825740 - RNA, 16 nt, Human herpesvirus 2
gggcccgaagccgacc

SEQ ID NO: 1825741 - RNA, 17 nt, Human herpesvirus 2
gauuccggugugcccca

SEQ ID NO: 1825742 - RNA, 22 nt, Human herpesvirus 2
cggcguuucugaccggcgccga

SEQ ID NO: 1825743 - RNA, 14 nt, Human herpesvirus 2
gucaggcccgccga

SEQ ID NO: 1825744 - RNA, 19 nt, Human herpesvirus 2
cgcgguaauuagcagcuuu

SEQ ID NO: 1825745 - RNA, 17 nt, Human herpesvirus 2
agccggggcacgcgguc

SEQ ID NO: 1825746 - RNA, 22 nt, Human herpesvirus 2
cgacgagguccgucguuugggg

SEQ ID NO: 1825747 - RNA, 13 nt, Human herpesvirus 2
gauccaggggagg

SEQ ID NO: 1825748 - RNA, 13 nt, Human herpesvirus 2
aguuugagcagcc

SEQ ID NO: 1825749 - RNA, 13 nt, Human herpesvirus 2
agcucugccugca

SEQ ID NO: 1825750 - RNA, 13 nt, Human herpesvirus 2
gcuggccccucug

SEQ ID NO: 1825751 - RNA, 19 nt, Human herpesvirus 2
ccuuucccguggcccucca

SEQ ID NO: 1825752 - RNA, 18 nt, Human herpesvirus 2
cggccaacgaggaccacg

SEQ ID NO: 1825753 - RNA, 16 nt, Human herpesvirus 2
ccgcgaugaccucccg

SEQ ID NO: 1825754 - RNA, 17 nt, Human herpesvirus 2
aacgcgggcguccccga

SEQ ID NO: 1825755 - RNA, 20 nt, Human herpesvirus 2
accuucgccuccgcccuccg

SEQ ID NO: 1825756 - RNA, 16 nt, Human herpesvirus 2
acuagaaaaacaaaug

SEQ ID NO: 1825757 - RNA, 21 nt, Human herpesvirus 2
aacaguccguuucgaccccuu

SEQ ID NO: 1825758 - RNA, 22 nt, Human herpesvirus 2
ugcguuaacacacaugcugguu

SEQ ID NO: 1825759 - RNA, 21 nt, Human herpesvirus 2
gccuccgcccuccgccagcgc

SEQ ID NO: 1825760 - RNA, 16 nt, Human herpesvirus 2
ggcgccaagcgccccg

SEQ ID NO: 1825761 - RNA, 19 nt, Human herpesvirus 2
ccuuuccaccccccuuccc

SEQ ID NO: 1825762 - RNA, 14 nt, Human herpesvirus 2
gaccccgcugcugu

SEQ ID NO: 1825763 - RNA, 21 nt, Human herpesvirus 2
ccugccgacuuccgugccccu

SEQ ID NO: 1825764 - RNA, 16 nt, Human herpesvirus 2
cugcggcaggcgaccc

SEQ ID NO: 1825765 - RNA, 21 nt, Human herpesvirus 2
ccaacucgcggcaccgcgcgg

SEQ ID NO: 1825766 - RNA, 20 nt, Human herpesvirus 2
ccaacagggaguccucgccg

SEQ ID NO: 1825767 - RNA, 15 nt, Human herpesvirus 2
ccuggucacaaaagg

SEQ ID NO: 1825768 - RNA, 19 nt, Human herpesvirus 2
cgcuguggcgcgcccccgc

SEQ ID NO: 1825769 - RNA, 20 nt, Human herpesvirus 2
gcugcacgucggacgccagc

SEQ ID NO: 1825770 - RNA, 20 nt, Human herpesvirus 2
uggcaaacacaccgggcugg

SEQ ID NO: 1825771 - RNA, 12 nt, Human herpesvirus 2
gggccgggugac

SEQ ID NO: 1825772 - RNA, 18 nt, Human herpesvirus 2
cagcuuuuaacgggccgc

SEQ ID NO: 1825773 - RNA, 14 nt, Human herpesvirus 2
gcccaccggcucca

SEQ ID NO: 1825774 - RNA, 15 nt, Human herpesvirus 2
ccccaaccacccaac

SEQ ID NO: 1825775 - RNA, 13 nt, Human herpesvirus 2
cagacgacagaca

SEQ ID NO: 1825776 - RNA, 18 nt, Human herpesvirus 2
ggcccucgcugcucuccc

SEQ ID NO: 1825777 - RNA, 16 nt, Human herpesvirus 2
cuuuccccccccccuc

SEQ ID NO: 1825778 - RNA, 17 nt, Human herpesvirus 2
ggucggguguccccgga

SEQ ID NO: 1825779 - RNA, 22 nt, Human herpesvirus 2
gccgccgagcgucaggcccgcc

SEQ ID NO: 1825780 - RNA, 12 nt, Human herpesvirus 2
cccagcuuuccc

SEQ ID NO: 1825781 - RNA, 20 nt, Human herpesvirus 2
gcgagcucccugcggcuggc

SEQ ID NO: 1825782 - RNA, 14 nt, Human herpesvirus 2
ccaucgcucccagg

SEQ ID NO: 1825783 - RNA, 13 nt, Human herpesvirus 2
ucgcggggacagc

SEQ ID NO: 1825784 - RNA, 18 nt, Human herpesvirus 2
gcgcgccaccgcccgcac

SEQ ID NO: 1825785 - RNA, 16 nt, Human herpesvirus 2
agagggggggaaagaa

SEQ ID NO: 1825786 - RNA, 18 nt, Human herpesvirus 2
gcguccgacacccgggcc

SEQ ID NO: 1825787 - RNA, 14 nt, Human herpesvirus 2
ggcaggcgacccgc

SEQ ID NO: 1825788 - RNA, 17 nt, Human herpesvirus 2
cgugcucugccacacgu

SEQ ID NO: 1825789 - RNA, 14 nt, Human herpesvirus 2
uuggggggggugug

SEQ ID NO: 1825790 - RNA, 17 nt, Human herpesvirus 2
acugcacuugccccccc

SEQ ID NO: 1825791 - RNA, 16 nt, Human herpesvirus 2
uggacgaucccgggcc

SEQ ID NO: 1825792 - RNA, 17 nt, Human herpesvirus 2
caggcuggagcucugcc

SEQ ID NO: 1825793 - RNA, 20 nt, Human herpesvirus 2
acacacaggcccaccaccau

SEQ ID NO: 1825794 - RNA, 13 nt, Human herpesvirus 2
cgagcuggcccug

SEQ ID NO: 1825795 - RNA, 21 nt, Human herpesvirus 2
gauuccggugugccccacccc

SEQ ID NO: 1825796 - RNA, 15 nt, Human herpesvirus 2
guggcccacgagcuc

SEQ ID NO: 1825797 - RNA, 14 nt, Human herpesvirus 2
ggagcggugcaggg

SEQ ID NO: 1825798 - RNA, 13 nt, Human herpesvirus 2
gccaccggccugg

SEQ ID NO: 1825799 - RNA, 17 nt, Human herpesvirus 2
cuucgccuccgcccucc

SEQ ID NO: 1825800 - RNA, 21 nt, Human herpesvirus 2
caacgcacguacguucugccc

SEQ ID NO: 1825801 - RNA, 15 nt, Human herpesvirus 2
guauaguacggggga

SEQ ID NO: 1825802 - RNA, 15 nt, Human herpesvirus 2
ccgcccccucuccca

SEQ ID NO: 1825803 - RNA, 20 nt, Human herpesvirus 2
agcucgcggagggcggccag

SEQ ID NO: 1825804 - RNA, 23 nt, Human herpesvirus 2
ggcgaccgucuuugggccccgcc

SEQ ID NO: 1825805 - RNA, 14 nt, Human herpesvirus 2
caaucgcccgaggc

SEQ ID NO: 1825806 - RNA, 18 nt, Human herpesvirus 2
ggaagccgccccccaccg

SEQ ID NO: 1825807 - RNA, 19 nt, Human herpesvirus 2
aggggggcuuggacuggga

SEQ ID NO: 1825808 - RNA, 15 nt, Human herpesvirus 2
ccagauggggccccg

SEQ ID NO: 1825809 - RNA, 17 nt, Human herpesvirus 2
ugccugacccucucggg

SEQ ID NO: 1825810 - RNA, 13 nt, Human herpesvirus 2
agccgcugugcca

SEQ ID NO: 1825811 - RNA, 21 nt, Human herpesvirus 2
cgcacucccgaaaccgcaggc

SEQ ID NO: 1825812 - RNA, 18 nt, Human herpesvirus 2
gaccagggaggccagaaa

SEQ ID NO: 1825813 - RNA, 21 nt, Human herpesvirus 2
gccgcucgcugcagggccugg

SEQ ID NO: 1825814 - RNA, 22 nt, Human herpesvirus 2
cgcaggcccucgcugcucuccc

SEQ ID NO: 1825815 - RNA, 23 nt, Human herpesvirus 2
ugcguucuggcggcccuggagcg

SEQ ID NO: 1825816 - RNA, 17 nt, Human herpesvirus 2
accgucgccgccggcca

SEQ ID NO: 1825817 - RNA, 20 nt, Human herpesvirus 2
accugggggauugugggaau

SEQ ID NO: 1825818 - RNA, 17 nt, Human herpesvirus 2
gcauacaccccacccua

SEQ ID NO: 1825819 - RNA, 13 nt, Human herpesvirus 2
ccgccaacaccag

SEQ ID NO: 1825820 - RNA, 14 nt, Human herpesvirus 2
gcgagcuggcccug

SEQ ID NO: 1825821 - RNA, 16 nt, Human herpesvirus 2
ucucaauaaagccagg

SEQ ID NO: 1825822 - RNA, 22 nt, Human herpesvirus 2
uccuauaaacucucccccgcaa

SEQ ID NO: 1825823 - RNA, 21 nt, Human herpesvirus 2
ugucgcggggacagccccggg

SEQ ID NO: 1825824 - RNA, 17 nt, Human herpesvirus 2
ccucgggccuacgcacc

SEQ ID NO: 1825825 - RNA, 23 nt, Human herpesvirus 2
cccggcguggagcgccgggccuc

SEQ ID NO: 1825826 - RNA, 12 nt, Human herpesvirus 2
gagaugugccuu

SEQ ID NO: 1825827 - RNA, 20 nt, Human herpesvirus 2
cugcacugccccccuccugg

SEQ ID NO: 1825828 - RNA, 23 nt, Human herpesvirus 2
gggcguccugcggcagcgcgccg

SEQ ID NO: 1825829 - RNA, 22 nt, Human herpesvirus 2
cccccgggcgucguggcaugga

SEQ ID NO: 1825830 - RNA, 15 nt, Human herpesvirus 2
cgagagcccagggaa

SEQ ID NO: 1825831 - RNA, 20 nt, Human herpesvirus 2
gccacguccaccuuggcccg

SEQ ID NO: 1825832 - RNA, 15 nt, Human herpesvirus 2
gcucggacaccagca

SEQ ID NO: 1825833 - RNA, 16 nt, Human herpesvirus 2
gcgggucccuucccaa

SEQ ID NO: 1825834 - RNA, 18 nt, Human herpesvirus 2
ccgggcgagcuggcccug

SEQ ID NO: 1825835 - RNA, 17 nt, Human herpesvirus 2
ccccucaaagaacgugg

SEQ ID NO: 1825836 - RNA, 14 nt, Human herpesvirus 2
guucggaccugggg

SEQ ID NO: 1825837 - RNA, 15 nt, Human herpesvirus 2
gcugguuucucugcg

SEQ ID NO: 1825838 - RNA, 11 nt, Human herpesvirus 2
uguugggaagg

SEQ ID NO: 1825839 - RNA, 14 nt, Human herpesvirus 2
gguacuggggcccc

SEQ ID NO: 1825840 - RNA, 12 nt, Human herpesvirus 2
guguuucccccc

SEQ ID NO: 1825841 - RNA, 19 nt, Human herpesvirus 2
gccuggcguuugggggcgg

SEQ ID NO: 1825842 - RNA, 11 nt, Human herpesvirus 2
ugcggggaccg

SEQ ID NO: 1825843 - RNA, 13 nt, Human herpesvirus 2
ccgcugcugugca

SEQ ID NO: 1825844 - RNA, 13 nt, Human herpesvirus 2
uuagaaacuuuua

SEQ ID NO: 1825845 - RNA, 14 nt, Human herpesvirus 2
acgacgaugcaugu

SEQ ID NO: 1825846 - RNA, 17 nt, Human herpesvirus 2
gggccggcguucccgcu

SEQ ID NO: 1825847 - RNA, 14 nt, Human herpesvirus 2
cuuucuuucccccc

SEQ ID NO: 1825848 - RNA, 15 nt, Human herpesvirus 2
aauuagcaacuuuua

SEQ ID NO: 1825849 - RNA, 18 nt, Human herpesvirus 2
cucaccgagccgcugugc

SEQ ID NO: 1825850 - RNA, 16 nt, Human herpesvirus 2
aggccucauccggccc

SEQ ID NO: 1825851 - RNA, 22 nt, Human herpesvirus 2
gaccucgcccccgucgcccccc

SEQ ID NO: 1825852 - RNA, 21 nt, Human herpesvirus 2
ucgucuggagcccguacccgg

SEQ ID NO: 1825853 - RNA, 17 nt, Human herpesvirus 2
cguggagcgccgggccu

SEQ ID NO: 1825854 - RNA, 20 nt, Human herpesvirus 2
agagaaaaagaaaaaaggag

SEQ ID NO: 1825855 - RNA, 15 nt, Human herpesvirus 2
cguccgcggccccac

SEQ ID NO: 1825856 - RNA, 18 nt, Human herpesvirus 2
aggacgcgagcgacagcg

SEQ ID NO: 1825857 - RNA, 17 nt, Human herpesvirus 2
ccgggcgagcuggcccu

SEQ ID NO: 1825858 - RNA, 15 nt, Human herpesvirus 2
cccggcccggcccgc

SEQ ID NO: 1825859 - RNA, 16 nt, Human herpesvirus 2
cgcgcaggggggccgg

SEQ ID NO: 1825860 - RNA, 17 nt, Human herpesvirus 2
agccgauccggccucgg

SEQ ID NO: 1825861 - RNA, 18 nt, Human herpesvirus 2
gagcggacacgcuugaag

SEQ ID NO: 1825862 - RNA, 15 nt, Human herpesvirus 2
ggcgcgagccaggca

SEQ ID NO: 1825863 - RNA, 11 nt, Human herpesvirus 2
cuccgcccucg

SEQ ID NO: 1825864 - RNA, 21 nt, Human herpesvirus 2
aggcccgccccaccgccccca

SEQ ID NO: 1825865 - RNA, 13 nt, Human herpesvirus 2
ggcggcggggaag

SEQ ID NO: 1825866 - RNA, 22 nt, Human herpesvirus 2
ggcucucgccuccuuguggugg

SEQ ID NO: 1825867 - RNA, 21 nt, Human herpesvirus 2
cagacgcccuccgaggagauc

SEQ ID NO: 1825868 - RNA, 18 nt, Human herpesvirus 2
cucacaccgcgucuguuu

SEQ ID NO: 1825869 - RNA, 12 nt, Human herpesvirus 2
gggggggcuggu

SEQ ID NO: 1825870 - RNA, 13 nt, Human herpesvirus 2
uccacacccccuc

SEQ ID NO: 1825871 - RNA, 18 nt, Human herpesvirus 2
gagagaugacacgacagg

SEQ ID NO: 1825872 - RNA, 14 nt, Human herpesvirus 2
ccugugucagcucc

SEQ ID NO: 1825873 - RNA, 17 nt, Human herpesvirus 2
ggagccgcggccccgcc

SEQ ID NO: 1825874 - RNA, 14 nt, Human herpesvirus 2
cguaucggccagga

SEQ ID NO: 1825875 - RNA, 20 nt, Human herpesvirus 2
gcgugugugagaaauaaaga

SEQ ID NO: 1825876 - RNA, 22 nt, Human herpesvirus 2
gccaggaacuccagcuuggccg

SEQ ID NO: 1825877 - RNA, 23 nt, Human herpesvirus 2
cucauacacgcgcuggccccucu

SEQ ID NO: 1825878 - RNA, 18 nt, Human herpesvirus 2
uaacagcuacccgcaucc

SEQ ID NO: 1825879 - RNA, 12 nt, Human herpesvirus 2
gcggacuggcag

SEQ ID NO: 1825880 - RNA, 13 nt, Human herpesvirus 2
caauauggcccag

SEQ ID NO: 1825881 - RNA, 11 nt, Human herpesvirus 2
aaaccacacac

SEQ ID NO: 1825882 - RNA, 14 nt, Human herpesvirus 2
ccacgcccugcugu

SEQ ID NO: 1825883 - RNA, 16 nt, Human herpesvirus 2
cccgccucccggccgc

SEQ ID NO: 1825884 - RNA, 14 nt, Human herpesvirus 2
ggcgcugguggccg

SEQ ID NO: 1825885 - RNA, 23 nt, Human herpesvirus 2
gacugccuccacgcccugcugua

SEQ ID NO: 1825886 - RNA, 13 nt, Human herpesvirus 2
agggaauaugcaa

SEQ ID NO: 1825887 - RNA, 20 nt, Human herpesvirus 2
cgaggaccacgugcacagcc

SEQ ID NO: 1825888 - RNA, 11 nt, Human herpesvirus 2
ggcgggagcca

SEQ ID NO: 1825889 - RNA, 15 nt, Human herpesvirus 2
gcccgcgagccgcac

SEQ ID NO: 1825890 - RNA, 21 nt, Human herpesvirus 2
gccgcccgcgcaucacggccc

SEQ ID NO: 1825891 - RNA, 17 nt, Human herpesvirus 2
agagugggggcgugagc

SEQ ID NO: 1825892 - RNA, 19 nt, Human herpesvirus 2
gcacuggggugauacuuaa

SEQ ID NO: 1825893 - RNA, 13 nt, Human herpesvirus 2
ggaggggcgggag

SEQ ID NO: 1825894 - RNA, 22 nt, Human herpesvirus 2
gacgccucgauguauggcgccu

SEQ ID NO: 1825895 - RNA, 18 nt, Human herpesvirus 2
uuccgggagcgggggagg

SEQ ID NO: 1825896 - RNA, 20 nt, Human herpesvirus 2
ggggaaauguauggguccuu

SEQ ID NO: 1825897 - RNA, 21 nt, Human herpesvirus 2
cugguacucccuuugugcuuu

SEQ ID NO: 1825898 - RNA, 17 nt, Human herpesvirus 2
gacgaacuggggcgccg

SEQ ID NO: 1825899 - RNA, 22 nt, Human herpesvirus 2
gcggagccucuuugggccgugg

SEQ ID NO: 1825900 - RNA, 22 nt, Human herpesvirus 2
aagagugguuugccguggagcu

SEQ ID NO: 1825901 - RNA, 19 nt, Human herpesvirus 2
cggacgccagcugcuggcc

SEQ ID NO: 1825902 - RNA, 15 nt, Human herpesvirus 2
cuucccccccccuac

SEQ ID NO: 1825903 - RNA, 17 nt, Human herpesvirus 2
ccgaguccguaugcaac

SEQ ID NO: 1825904 - RNA, 17 nt, Human herpesvirus 2
cccagcgcacccuggcc

SEQ ID NO: 1825905 - RNA, 22 nt, Human herpesvirus 2
cggcccaaggcgcugcgccugc

SEQ ID NO: 1825906 - RNA, 16 nt, Human herpesvirus 2
ucaccccaccccaucc

SEQ ID NO: 1825907 - RNA, 17 nt, Human herpesvirus 2
accuccccggcggccgc

SEQ ID NO: 1825908 - RNA, 15 nt, Human herpesvirus 2
cgggggcgggcgggc

SEQ ID NO: 1825909 - RNA, 21 nt, Human herpesvirus 2
agccuaucuugaucccccgga

SEQ ID NO: 1825910 - RNA, 16 nt, Human herpesvirus 2
gugucggagaggcccg

SEQ ID NO: 1825911 - RNA, 14 nt, Human herpesvirus 2
cgccuuuccucccc

SEQ ID NO: 1825912 - RNA, 16 nt, Human herpesvirus 2
ccaugagccgccgggu

SEQ ID NO: 1825913 - RNA, 14 nt, Human herpesvirus 2
gcgggcggcgccgc

SEQ ID NO: 1825914 - RNA, 21 nt, Human herpesvirus 2
uacacgcgcuggccccucugc

SEQ ID NO: 1825915 - RNA, 13 nt, Human herpesvirus 2
uuguuguuggccu

SEQ ID NO: 1825916 - RNA, 19 nt, Human herpesvirus 2
aggcccucugggacaccca

SEQ ID NO: 1825917 - RNA, 15 nt, Human herpesvirus 2
gggcucguccccugg

SEQ ID NO: 1825918 - RNA, 23 nt, Human herpesvirus 2
ggacgcacgcggggacccgccag

SEQ ID NO: 1825919 - RNA, 14 nt, Human herpesvirus 2
cgaguccugggugg

SEQ ID NO: 1825920 - RNA, 15 nt, Human herpesvirus 2
caugagccgccgggu

SEQ ID NO: 1825921 - RNA, 12 nt, Human herpesvirus 2
cccccccaucug

SEQ ID NO: 1825922 - RNA, 21 nt, Human herpesvirus 2
cugaggccucauccggcccgc

SEQ ID NO: 1825923 - RNA, 16 nt, Human herpesvirus 2
cucgaccagcggcccc

SEQ ID NO: 1825924 - RNA, 16 nt, Human herpesvirus 2
ggcgaccgccccgcgc

SEQ ID NO: 1825925 - RNA, 15 nt, Human herpesvirus 2
gucaccgggggcccc

SEQ ID NO: 1825926 - RNA, 15 nt, Human herpesvirus 2
gguccgcugcagcug

SEQ ID NO: 1825927 - RNA, 15 nt, Human herpesvirus 2
ggcuucgggccaaca

SEQ ID NO: 1825928 - RNA, 15 nt, Human herpesvirus 2
cuuggugcgccgccg

SEQ ID NO: 1825929 - RNA, 14 nt, Human herpesvirus 2
acgcccauauguac

SEQ ID NO: 1825930 - RNA, 22 nt, Human herpesvirus 2
gcucccguguaccucugggccc

SEQ ID NO: 1825931 - RNA, 22 nt, Human herpesvirus 2
ccgucgcggccgcccgcgccgc

SEQ ID NO: 1825932 - RNA, 18 nt, Human herpesvirus 2
acaacagccccugggugu

SEQ ID NO: 1825933 - RNA, 21 nt, Human herpesvirus 2
auucccgcuuaugguaauuaa

SEQ ID NO: 1825934 - RNA, 16 nt, Human herpesvirus 2
cggguggcgccucugc

SEQ ID NO: 1825935 - RNA, 15 nt, Human herpesvirus 2
cacgcgcuggccccu

SEQ ID NO: 1825936 - RNA, 18 nt, Human herpesvirus 2
ucacccacccccccccca

SEQ ID NO: 1825937 - RNA, 20 nt, Human herpesvirus 2
cucccuuuuuucccccccuc

SEQ ID NO: 1825938 - RNA, 23 nt, Human herpesvirus 2
agacccugccccccggcgcgggc

SEQ ID NO: 1825939 - RNA, 13 nt, Human herpesvirus 2
cauuggcaagcaa

SEQ ID NO: 1825940 - RNA, 19 nt, Human herpesvirus 2
acgguccucaccgagccgc

SEQ ID NO: 1825941 - RNA, 13 nt, Human herpesvirus 2
ggcguuuggccaa

SEQ ID NO: 1825942 - RNA, 18 nt, Human herpesvirus 2
gcgaacacaagcucgccg

SEQ ID NO: 1825943 - RNA, 15 nt, Human herpesvirus 2
gauccccggggggag

SEQ ID NO: 1825944 - RNA, 15 nt, Human herpesvirus 2
ccuggcggccccugu

SEQ ID NO: 1825945 - RNA, 19 nt, Human herpesvirus 2
gcuccagguacugcugcac

SEQ ID NO: 1825946 - RNA, 20 nt, Human herpesvirus 2
ugcgcuuuccggcccucccg

SEQ ID NO: 1825947 - RNA, 13 nt, Human herpesvirus 2
cggcccugcggcc

SEQ ID NO: 1825948 - RNA, 17 nt, Human herpesvirus 2
ucgcccuaccgcuccga

SEQ ID NO: 1825949 - RNA, 20 nt, Human herpesvirus 2
ggcacgagaagccgccccca

SEQ ID NO: 1825950 - RNA, 13 nt, Human herpesvirus 2
ggcccaccugcac

SEQ ID NO: 1825951 - RNA, 13 nt, Human herpesvirus 2
ugccccccaucuc

SEQ ID NO: 1825952 - RNA, 21 nt, Human herpesvirus 2
cagcgugucaaaggccagcag

SEQ ID NO: 1825953 - RNA, 17 nt, Human herpesvirus 2
ccaggauuaccgacccc

SEQ ID NO: 1825954 - RNA, 14 nt, Human herpesvirus 2
auggagaagggaaa

SEQ ID NO: 1825955 - RNA, 13 nt, Human herpesvirus 2
gccgccgaacagc

SEQ ID NO: 1825956 - RNA, 18 nt, Human herpesvirus 2
gggccaacagggaguccu

SEQ ID NO: 1825957 - RNA, 16 nt, Human herpesvirus 2
cgaacagccccugggg

SEQ ID NO: 1825958 - RNA, 14 nt, Human herpesvirus 2
ugacuccuggguca

SEQ ID NO: 1825959 - RNA, 14 nt, Human herpesvirus 2
ggacggccgggcag

SEQ ID NO: 1825960 - RNA, 13 nt, Human herpesvirus 2
cccacaacccauc

SEQ ID NO: 1825961 - RNA, 23 nt, Human herpesvirus 2
ccuggguccgggggccugguggc

SEQ ID NO: 1825962 - RNA, 19 nt, Human herpesvirus 2
aaaagacaccgauguucaa

SEQ ID NO: 1825963 - RNA, 12 nt, Human herpesvirus 2
cccgggcacgcg

SEQ ID NO: 1825964 - RNA, 22 nt, Human herpesvirus 2
cgggccuuuuuucggacgguga

SEQ ID NO: 1825965 - RNA, 18 nt, Human herpesvirus 2
gcuccccuucagccugga

SEQ ID NO: 1825966 - RNA, 18 nt, Human herpesvirus 2
gcggggguucggggccag

SEQ ID NO: 1825967 - RNA, 15 nt, Human herpesvirus 2
ucgggcugcugguga

SEQ ID NO: 1825968 - RNA, 10 nt, Human herpesvirus 2
ggcaccccau

SEQ ID NO: 1825969 - RNA, 18 nt, Human herpesvirus 2
gggcaggcgggcccauca

SEQ ID NO: 1825970 - RNA, 20 nt, Human herpesvirus 2
auuuacgcggugcgccccgc

SEQ ID NO: 1825971 - RNA, 16 nt, Human herpesvirus 2
cacguucgccccgcag

SEQ ID NO: 1825972 - RNA, 15 nt, Human herpesvirus 2
aaggagucgccgccc

SEQ ID NO: 1825973 - RNA, 23 nt, Human herpesvirus 2
ucagcaccccaccgaaaaacgga

SEQ ID NO: 1825974 - RNA, 15 nt, Human herpesvirus 2
uccccggcccucucu

SEQ ID NO: 1825975 - RNA, 21 nt, Human herpesvirus 2
gcagcgugucaaaggccagca

SEQ ID NO: 1825976 - RNA, 15 nt, Human herpesvirus 2
ccucccagugccccg

SEQ ID NO: 1825977 - RNA, 22 nt, Human herpesvirus 2
uaaagaacgagacagacgaaaa

SEQ ID NO: 1825978 - RNA, 15 nt, Human herpesvirus 2
cgcgggaggcggugg

SEQ ID NO: 1825979 - RNA, 19 nt, Human herpesvirus 2
guuauaggccacacagucc

SEQ ID NO: 1825980 - RNA, 22 nt, Human herpesvirus 2
ggccgccuccccgcuggagccc

SEQ ID NO: 1825981 - RNA, 21 nt, Human herpesvirus 2
gaaagaaacacaaggccccga

SEQ ID NO: 1825982 - RNA, 17 nt, Human herpesvirus 2
cauucacccccaccccc

SEQ ID NO: 1825983 - RNA, 22 nt, Human herpesvirus 2
agauggggagagggggaaggaa

SEQ ID NO: 1825984 - RNA, 15 nt, Human herpesvirus 2
cacacacacaggccc

SEQ ID NO: 1825985 - RNA, 16 nt, Human herpesvirus 2
agcguaucggccagga

SEQ ID NO: 1825986 - RNA, 13 nt, Human herpesvirus 2
cgcccccgcuggc

SEQ ID NO: 1825987 - RNA, 16 nt, Human herpesvirus 2
cccgugucgcuccccu

SEQ ID NO: 1825988 - RNA, 12 nt, Human herpesvirus 2
cauaugcccugg

SEQ ID NO: 1825989 - RNA, 15 nt, Human herpesvirus 2
cagugccccgacauc

SEQ ID NO: 1825990 - RNA, 12 nt, Human herpesvirus 2
ugcggcaggcga

SEQ ID NO: 1825991 - RNA, 17 nt, Human herpesvirus 2
cagcgcgucggugccgc

SEQ ID NO: 1825992 - RNA, 20 nt, Human herpesvirus 2
agaguucaauagauuuccca

SEQ ID NO: 1825993 - RNA, 15 nt, Human herpesvirus 2
gugggccuagccgug

SEQ ID NO: 1825994 - RNA, 16 nt, Human herpesvirus 2
gaagggaaaggaacag

SEQ ID NO: 1825995 - RNA, 22 nt, Human herpesvirus 2
cagugggugcucggggacagag

SEQ ID NO: 1825996 - RNA, 15 nt, Human herpesvirus 2
gcugcugagcccugc

SEQ ID NO: 1825997 - RNA, 22 nt, Human herpesvirus 2
gcuccgcgugguccccgagcag

SEQ ID NO: 1825998 - RNA, 14 nt, Human herpesvirus 2
gccccgcgugcagc

SEQ ID NO: 1825999 - RNA, 12 nt, Human herpesvirus 2
ggucggacagga

SEQ ID NO: 1826000 - RNA, 14 nt, Human herpesvirus 2
cgggggccuggugg

SEQ ID NO: 1826001 - RNA, 14 nt, Human herpesvirus 2
ucaucgucccgguu

SEQ ID NO: 1826002 - RNA, 21 nt, Human herpesvirus 2
cucacgucuucgcccaccgau

SEQ ID NO: 1826003 - RNA, 17 nt, Human herpesvirus 2
gacgucaaucgcccgag

SEQ ID NO: 1826004 - RNA, 22 nt, Human herpesvirus 2
gccaacucgcggcaccgcgcgg

SEQ ID NO: 1826005 - RNA, 13 nt, Human herpesvirus 2
gcuccaggccgcc

SEQ ID NO: 1826006 - RNA, 24 nt, Human herpesvirus 2
ugguggcaccuccccggcggccgc

SEQ ID NO: 1826007 - RNA, 20 nt, Human herpesvirus 2
aaaccccgguuggggcgggc

SEQ ID NO: 1826008 - RNA, 14 nt, Human herpesvirus 2
ggccgagaagagcg

SEQ ID NO: 1826009 - RNA, 18 nt, Human herpesvirus 2
cgguucgcgugcggccag

SEQ ID NO: 1826010 - RNA, 14 nt, Human herpesvirus 2
cuucuucgccgccc

SEQ ID NO: 1826011 - RNA, 21 nt, Human herpesvirus 2
accgcgcgccgccgcgcgggc

SEQ ID NO: 1826012 - RNA, 22 nt, Human herpesvirus 2
acaggccaucgccggggaccgc

SEQ ID NO: 1826013 - RNA, 13 nt, Human herpesvirus 2
ucagcaccccacc

SEQ ID NO: 1826014 - RNA, 12 nt, Human herpesvirus 2
ccccccaucugc

SEQ ID NO: 1826015 - RNA, 22 nt, Human herpesvirus 2
uccacgccguggacgcccccuc

SEQ ID NO: 1826016 - RNA, 10 nt, Human herpesvirus 2
aacgcccccu

SEQ ID NO: 1826017 - RNA, 16 nt, Human herpesvirus 2
cgccaggccccccggg

SEQ ID NO: 1826018 - RNA, 19 nt, Human herpesvirus 2
ccggggacacgcggcgggu

SEQ ID NO: 1826019 - RNA, 16 nt, Human herpesvirus 2
gcgcaggcuggagcuc

SEQ ID NO: 1826020 - RNA, 21 nt, Human herpesvirus 2
uauucaccacacagaaacaca

SEQ ID NO: 1826021 - RNA, 13 nt, Human herpesvirus 2
acugcacuugccc

SEQ ID NO: 1826022 - RNA, 16 nt, Human herpesvirus 2
cuccgaccggcggggc

SEQ ID NO: 1826023 - RNA, 15 nt, Human herpesvirus 2
ccucugcgcgcggcg

SEQ ID NO: 1826024 - RNA, 17 nt, Human herpesvirus 2
cggccagcacgaccagg

SEQ ID NO: 1826025 - RNA, 22 nt, Human herpesvirus 2
gggcgguugcgguucguucugg

SEQ ID NO: 1826026 - RNA, 19 nt, Human herpesvirus 2
gaugauaacgacgaccacc

SEQ ID NO: 1826027 - RNA, 16 nt, Human herpesvirus 2
auggggggggaaagga

SEQ ID NO: 1826028 - RNA, 12 nt, Human herpesvirus 2
gggggguggugg

SEQ ID NO: 1826029 - RNA, 19 nt, Human herpesvirus 2
accgcacccgggccgggug

SEQ ID NO: 1826030 - RNA, 14 nt, Human herpesvirus 2
cccagggagccccg

SEQ ID NO: 1826031 - RNA, 20 nt, Human herpesvirus 2
cggccaagcuaaggcgcccg

SEQ ID NO: 1826032 - RNA, 12 nt, Human herpesvirus 2
guccccuggggc

SEQ ID NO: 1826033 - RNA, 21 nt, Human herpesvirus 2
cggacgcacgcggggacccgc

SEQ ID NO: 1826034 - RNA, 16 nt, Human herpesvirus 2
accaggcgcugcugcg

SEQ ID NO: 1826035 - RNA, 20 nt, Human herpesvirus 2
cuccgcccucgccgucuugg

SEQ ID NO: 1826036 - RNA, 19 nt, Human herpesvirus 2
cccucucaacgcccaggcc

SEQ ID NO: 1826037 - RNA, 12 nt, Human herpesvirus 2
cugcugagcccu

SEQ ID NO: 1826038 - RNA, 10 nt, Human herpesvirus 2
ccuuccuguc

SEQ ID NO: 1826039 - RNA, 19 nt, Human herpesvirus 2
cuccgugcuggggaaaucu

SEQ ID NO: 1826040 - RNA, 15 nt, Human herpesvirus 2
cggccgaauggcugc

SEQ ID NO: 1826041 - RNA, 16 nt, Human herpesvirus 2
ccuuaaaaggcacccc

SEQ ID NO: 1826042 - RNA, 24 nt, Human herpesvirus 2
ggugcgccccgccggggcgcacaa

SEQ ID NO: 1826043 - RNA, 22 nt, Human herpesvirus 2
cggacggccccucgcuccccgc

SEQ ID NO: 1826044 - RNA, 17 nt, Human herpesvirus 2
cauggggaacccccaga

SEQ ID NO: 1826045 - RNA, 17 nt, Human herpesvirus 2
acgccuggcggccccug

SEQ ID NO: 1826046 - RNA, 21 nt, Human herpesvirus 2
ccccgauuccggugugcccca

SEQ ID NO: 1826047 - RNA, 13 nt, Human herpesvirus 2
ccgggcccggccg

SEQ ID NO: 1826048 - RNA, 15 nt, Human herpesvirus 2
ggcgagugcucgcag

SEQ ID NO: 1826049 - RNA, 22 nt, Human herpesvirus 2
acacggucggugccccccaucu

SEQ ID NO: 1826050 - RNA, 13 nt, Human herpesvirus 2
ccgcgucugcuac

SEQ ID NO: 1826051 - RNA, 18 nt, Human herpesvirus 2
gugguuugccguggagcu

SEQ ID NO: 1826052 - RNA, 19 nt, Human herpesvirus 2
cgcugcucucccguacccc

SEQ ID NO: 1826053 - RNA, 21 nt, Human herpesvirus 2
cuuucccccccacuccacccc

SEQ ID NO: 1826054 - RNA, 12 nt, Human herpesvirus 2
cggccucuccgg

SEQ ID NO: 1826055 - RNA, 14 nt, Human herpesvirus 2
cacggacacggccc

SEQ ID NO: 1826056 - RNA, 17 nt, Human herpesvirus 2
ggaugcccgccagggcc

SEQ ID NO: 1826057 - RNA, 14 nt, Human herpesvirus 2
agcgccgaccagaa

SEQ ID NO: 1826058 - RNA, 19 nt, Human herpesvirus 2
cgggccaacagggaguccu

SEQ ID NO: 1826059 - RNA, 13 nt, Human herpesvirus 2
gccgccauccuca

SEQ ID NO: 1826060 - RNA, 21 nt, Human herpesvirus 2
cgcggccauccugcccaccgg

SEQ ID NO: 1826061 - RNA, 18 nt, Human herpesvirus 2
ggaggggggcagugcagu

SEQ ID NO: 1826062 - RNA, 23 nt, Human herpesvirus 2
cgcacccccgcgccgccucgggg

SEQ ID NO: 1826063 - RNA, 14 nt, Human herpesvirus 2
gaggagccgggaga

SEQ ID NO: 1826064 - RNA, 15 nt, Human herpesvirus 2
gucccgauggccgcc

SEQ ID NO: 1826065 - RNA, 18 nt, Human herpesvirus 2
cugacgccggccaaccuc

SEQ ID NO: 1826066 - RNA, 17 nt, Human herpesvirus 2
ccgcgggucccuuccca

SEQ ID NO: 1826067 - RNA, 20 nt, Human herpesvirus 2
ccgggacgagccaaaccagc

SEQ ID NO: 1826068 - RNA, 12 nt, Human herpesvirus 2
gagcccagggaa

SEQ ID NO: 1826069 - RNA, 16 nt, Human herpesvirus 2
ccgcggccccacgguc

SEQ ID NO: 1826070 - RNA, 18 nt, Human herpesvirus 2
aggacccauacauuuccc

SEQ ID NO: 1826071 - RNA, 18 nt, Human herpesvirus 2
guucaauagauuucccaa

SEQ ID NO: 1826072 - RNA, 18 nt, Human herpesvirus 2
acuaggacaguucauagg

SEQ ID NO: 1826073 - RNA, 13 nt, Human herpesvirus 2
cuuugacuccugg

SEQ ID NO: 1826074 - RNA, 12 nt, Human herpesvirus 2
ucuggaagagcu

SEQ ID NO: 1826075 - RNA, 21 nt, Human herpesvirus 2
accacccccccacuuuccucc

SEQ ID NO: 1826076 - RNA, 15 nt, Human herpesvirus 2
gauguauggcgccuu

SEQ ID NO: 1826077 - RNA, 15 nt, Human herpesvirus 2
ccacgcugcgcggcg

SEQ ID NO: 1826078 - RNA, 19 nt, Human herpesvirus 2
cguggccgacaacugccug

SEQ ID NO: 1826079 - RNA, 23 nt, Human herpesvirus 2
cggcgggucggguguccccggac

SEQ ID NO: 1826080 - RNA, 22 nt, Human herpesvirus 2
gacucgccuuugguuaaacaau

SEQ ID NO: 1826081 - RNA, 20 nt, Human herpesvirus 2
cccuccucgcugcgccgggc

SEQ ID NO: 1826082 - RNA, 18 nt, Human herpesvirus 2
ggagaguucaauagauuu

SEQ ID NO: 1826083 - RNA, 12 nt, Human herpesvirus 2
ugcagccccggu

SEQ ID NO: 1826084 - RNA, 15 nt, Human herpesvirus 2
ccgcgcgggcccgga

SEQ ID NO: 1826085 - RNA, 15 nt, Human herpesvirus 2
guccgaccugcagga

SEQ ID NO: 1826086 - RNA, 15 nt, Human herpesvirus 2
gcugcugccccgcgu

SEQ ID NO: 1826087 - RNA, 21 nt, Human herpesvirus 2
gguccgcguauaaaggcaggc

SEQ ID NO: 1826088 - RNA, 13 nt, Human herpesvirus 2
accgcgcgccucc

SEQ ID NO: 1826089 - RNA, 17 nt, Human herpesvirus 2
ggcagccgggcccgcca

SEQ ID NO: 1826090 - RNA, 12 nt, Human herpesvirus 2
uccccugcguaa

SEQ ID NO: 1826091 - RNA, 21 nt, Human herpesvirus 2
gugcuguggcggucggccagc

SEQ ID NO: 1826092 - RNA, 19 nt, Human herpesvirus 2
acacggugcgugcggcccu

SEQ ID NO: 1826093 - RNA, 12 nt, Human herpesvirus 2
uuccccaagaga

SEQ ID NO: 1826094 - RNA, 13 nt, Human herpesvirus 2
augcaagcgggcg

SEQ ID NO: 1826095 - RNA, 14 nt, Human herpesvirus 2
ggcgcuuggccggg

SEQ ID NO: 1826096 - RNA, 13 nt, Human herpesvirus 2
cggcggccccggc

SEQ ID NO: 1826097 - RNA, 18 nt, Human herpesvirus 2
ggccgggucggcugucca

SEQ ID NO: 1826098 - RNA, 23 nt, Human herpesvirus 2
cucguuuuguuuucucuucuuuc

SEQ ID NO: 1826099 - RNA, 16 nt, Human herpesvirus 2
gccggggcggccccga

SEQ ID NO: 1826100 - RNA, 15 nt, Human herpesvirus 2
gcgcgcaucggaccc

SEQ ID NO: 1826101 - RNA, 19 nt, Human herpesvirus 2
uaaaacccagacccgagcu

SEQ ID NO: 1826102 - RNA, 20 nt, Human herpesvirus 2
ggugccucacgguccucacc

SEQ ID NO: 1826103 - RNA, 12 nt, Human herpesvirus 2
cguggcccucca

SEQ ID NO: 1826104 - RNA, 18 nt, Human herpesvirus 2
ccguguaccucugggccc

SEQ ID NO: 1826105 - RNA, 17 nt, Human herpesvirus 2
cgcggugccugacgccg

SEQ ID NO: 1826106 - RNA, 16 nt, Human herpesvirus 2
acgcccuacaagaaag

SEQ ID NO: 1826107 - RNA, 12 nt, Human herpesvirus 2
agggggcggcgc

SEQ ID NO: 1826108 - RNA, 12 nt, Human herpesvirus 2
ggguccuggugg

SEQ ID NO: 1826109 - RNA, 19 nt, Human herpesvirus 2
ugagcagccgcgccgcugc

SEQ ID NO: 1826110 - RNA, 12 nt, Human herpesvirus 2
ccggcaccaggc

SEQ ID NO: 1826111 - RNA, 21 nt, Human herpesvirus 2
gagagagggggggaaagaaag

SEQ ID NO: 1826112 - RNA, 14 nt, Human herpesvirus 2
gcuucaucaccccc

SEQ ID NO: 1826113 - RNA, 13 nt, Human herpesvirus 2
gccgcggccccgc

SEQ ID NO: 1826114 - RNA, 15 nt, Human herpesvirus 2
caccguccaccuccg

SEQ ID NO: 1826115 - RNA, 21 nt, Human herpesvirus 2
ggcuucuucuuccccagcuuu

SEQ ID NO: 1826116 - RNA, 12 nt, Human herpesvirus 2
cgcgauuccgag

SEQ ID NO: 1826117 - RNA, 18 nt, Human herpesvirus 2
ccgacgacgugcgcgugg

SEQ ID NO: 1826118 - RNA, 15 nt, Human herpesvirus 2
acugccuccacgccc

SEQ ID NO: 1826119 - RNA, 13 nt, Human herpesvirus 2
uccgcgagggccc

SEQ ID NO: 1826120 - RNA, 19 nt, Human herpesvirus 2
gggucugcgucguccaggg

SEQ ID NO: 1826121 - RNA, 20 nt, Human herpesvirus 2
cguccccuuucuuuuccccc

SEQ ID NO: 1826122 - RNA, 22 nt, Human herpesvirus 2
cggcgccgccccgccgcuccgc

SEQ ID NO: 1826123 - RNA, 14 nt, Human herpesvirus 2
cgcaccccaccccu

SEQ ID NO: 1826124 - RNA, 14 nt, Human herpesvirus 2
cagacucucgguga

SEQ ID NO: 1826125 - RNA, 23 nt, Human herpesvirus 2
gaccggcgccgaucgcagcgucc

SEQ ID NO: 1826126 - RNA, 16 nt, Human herpesvirus 2
gcgccgcgcccgcgug

SEQ ID NO: 1826127 - RNA, 20 nt, Human herpesvirus 2
cccgaacagccccuggggcu

SEQ ID NO: 1826128 - RNA, 12 nt, Human herpesvirus 2
aggcacggcgcc

SEQ ID NO: 1826129 - RNA, 16 nt, Human herpesvirus 2
ggugcaguuugagcag

SEQ ID NO: 1826130 - RNA, 21 nt, Human herpesvirus 2
cgccggccaaccgcgcgccgc

SEQ ID NO: 1826131 - RNA, 18 nt, Human herpesvirus 2
gggcguuauaagccgccg

SEQ ID NO: 1826132 - RNA, 14 nt, Human herpesvirus 2
ccgggagccgcggc

SEQ ID NO: 1826133 - RNA, 18 nt, Human herpesvirus 2
ccgggggggggcaagugc

SEQ ID NO: 1826134 - RNA, 14 nt, Human herpesvirus 2
gcgcgggcggcgcc

SEQ ID NO: 1826135 - RNA, 22 nt, Human herpesvirus 2
ggacaguucauaggccgggagc

SEQ ID NO: 1826136 - RNA, 21 nt, Human herpesvirus 2
ugcaguaccccaguuccuccg

SEQ ID NO: 1826137 - RNA, 17 nt, Human herpesvirus 2
cuucuuuaaccgcgagc

SEQ ID NO: 1826138 - RNA, 14 nt, Human herpesvirus 2
ggggcaagugcagu

SEQ ID NO: 1826139 - RNA, 15 nt, Human herpesvirus 2
gaaaucucucugccg

SEQ ID NO: 1826140 - RNA, 22 nt, Human herpesvirus 2
acacucgcgucuggcuguguuu

SEQ ID NO: 1826141 - RNA, 14 nt, Human herpesvirus 2
cuguccgccgggcg

SEQ ID NO: 1826142 - RNA, 19 nt, Human herpesvirus 2
agcgccgcuacugcgccac

SEQ ID NO: 1826143 - RNA, 11 nt, Human herpesvirus 2
aagaagguuuc

SEQ ID NO: 1826144 - RNA, 22 nt, Human herpesvirus 2
ccggacugcagccccggucccc

SEQ ID NO: 1826145 - RNA, 15 nt, Human herpesvirus 2
acagccccuggggcu

SEQ ID NO: 1826146 - RNA, 19 nt, Human herpesvirus 2
cccgcguccgacacccggg

SEQ ID NO: 1826147 - RNA, 23 nt, Human herpesvirus 2
ccccaggaggggggcagugcagu

SEQ ID NO: 1826148 - RNA, 20 nt, Human herpesvirus 2
cccccugaguugcgccggca

SEQ ID NO: 1826149 - RNA, 18 nt, Human herpesvirus 2
uucuggcggcccuggagc

SEQ ID NO: 1826150 - RNA, 16 nt, Human herpesvirus 2
ggcgugcugugcccug

SEQ ID NO: 1826151 - RNA, 18 nt, Human herpesvirus 2
auagauuuccccaagaga

SEQ ID NO: 1826152 - RNA, 14 nt, Human herpesvirus 2
ccggcccaccccca

SEQ ID NO: 1826153 - RNA, 16 nt, Human herpesvirus 2
ggcggucccggccgcc

SEQ ID NO: 1826154 - RNA, 21 nt, Human herpesvirus 2
ggcucccccgcggaccuuggc

SEQ ID NO: 1826155 - RNA, 14 nt, Human herpesvirus 2
guccucaccgagcc

SEQ ID NO: 1826156 - RNA, 22 nt, Human herpesvirus 2
gcucguaaaaauggcggccgcc

SEQ ID NO: 1826157 - RNA, 21 nt, Human herpesvirus 2
cucggccggcggagccccgga

SEQ ID NO: 1826158 - RNA, 13 nt, Human herpesvirus 2
ccccuuccguccc

SEQ ID NO: 1826159 - RNA, 19 nt, Human herpesvirus 2
ucgguggacaugaggcuga

SEQ ID NO: 1826160 - RNA, 17 nt, Human herpesvirus 2
ggaagaggcggacccag

SEQ ID NO: 1826161 - RNA, 20 nt, Human herpesvirus 2
agccugcgaaucccccaagg

SEQ ID NO: 1826162 - RNA, 22 nt, Human herpesvirus 2
gcccgccccagggggcggcgcc

SEQ ID NO: 1826163 - RNA, 15 nt, Human herpesvirus 2
cagagcucuuuauug

SEQ ID NO: 1826164 - RNA, 15 nt, Human herpesvirus 2
aucggccaggagguc

SEQ ID NO: 1826165 - RNA, 13 nt, Human herpesvirus 2
acgagacagacga

SEQ ID NO: 1826166 - RNA, 16 nt, Human herpesvirus 2
acagcacggccgggug

SEQ ID NO: 1826167 - RNA, 17 nt, Human herpesvirus 2
uccgcacccccgccuac

SEQ ID NO: 1826168 - RNA, 23 nt, Human herpesvirus 2
ugcccccccucguucugcugcac

SEQ ID NO: 1826169 - RNA, 16 nt, Human herpesvirus 2
gggcacggcguccucc

SEQ ID NO: 1826170 - RNA, 13 nt, Human herpesvirus 2
cggacacggcccc

SEQ ID NO: 1826171 - RNA, 13 nt, Human herpesvirus 2
ucagccuggacca

SEQ ID NO: 1826172 - RNA, 16 nt, Human herpesvirus 2
cccgcccccucuccca

SEQ ID NO: 1826173 - RNA, 18 nt, Human herpesvirus 2
cucuggcuccaggccgcc

SEQ ID NO: 1826174 - RNA, 17 nt, Human herpesvirus 2
ugggcgcgagccaggca

SEQ ID NO: 1826175 - RNA, 18 nt, Human herpesvirus 2
ccgggucaccggggcgcc

SEQ ID NO: 1826176 - RNA, 10 nt, Human herpesvirus 2
cgucgcuguu

SEQ ID NO: 1826177 - RNA, 17 nt, Human herpesvirus 2
ggcgccacgguggugca

SEQ ID NO: 1826178 - RNA, 22 nt, Human herpesvirus 2
ggggacccgggcgagcuggccc

SEQ ID NO: 1826179 - RNA, 21 nt, Human herpesvirus 2
gcccgacggggagggacaagg

SEQ ID NO: 1826180 - RNA, 21 nt, Human herpesvirus 2
agaguucaauagauuucccaa

SEQ ID NO: 1826181 - RNA, 15 nt, Human herpesvirus 2
guuucugggcccgcc

SEQ ID NO: 1826182 - RNA, 20 nt, Human herpesvirus 2
cucccccgcgagcaccgacc

SEQ ID NO: 1826183 - RNA, 17 nt, Human herpesvirus 2
cgacggcuccugccacc

SEQ ID NO: 1826184 - RNA, 13 nt, Human herpesvirus 2
cgcggccccacgg

SEQ ID NO: 1826185 - RNA, 23 nt, Human herpesvirus 2
cgccucgauguauggcgccuucu

SEQ ID NO: 1826186 - RNA, 17 nt, Human herpesvirus 2
accggcccccggagucc

SEQ ID NO: 1826187 - RNA, 14 nt, Human herpesvirus 2
ccucuguuucucca

SEQ ID NO: 1826188 - RNA, 14 nt, Human herpesvirus 2
gucaccgggggccc

SEQ ID NO: 1826189 - RNA, 13 nt, Human herpesvirus 2
gcgauccccaagc

SEQ ID NO: 1826190 - RNA, 23 nt, Human herpesvirus 2
gacgcgcuaguacccagaggcug

SEQ ID NO: 1826191 - RNA, 16 nt, Human herpesvirus 2
augucaguccucgggg

SEQ ID NO: 1826192 - RNA, 18 nt, Human herpesvirus 2
cccgcccccgacgggcgc

SEQ ID NO: 1826193 - RNA, 14 nt, Human herpesvirus 2
agcccguggcccac

SEQ ID NO: 1826194 - RNA, 21 nt, Human herpesvirus 2
ggcugguuggauguuuuugca

SEQ ID NO: 1826195 - RNA, 19 nt, Human herpesvirus 2
gggccccgccccgccccac

SEQ ID NO: 1826196 - RNA, 12 nt, Human herpesvirus 2
ccacacacaccc

SEQ ID NO: 1826197 - RNA, 13 nt, Human herpesvirus 2
guucuccuggacg

SEQ ID NO: 1826198 - RNA, 18 nt, Human herpesvirus 2
gcgcacacgccaucgacc

SEQ ID NO: 1826199 - RNA, 14 nt, Human herpesvirus 2
gccgggggcggacg

SEQ ID NO: 1826200 - RNA, 20 nt, Human herpesvirus 2
cacgagcacaaacgugcucu

SEQ ID NO: 1826201 - RNA, 20 nt, Human herpesvirus 2
cgucguggcauggaagcccc

SEQ ID NO: 1826202 - RNA, 19 nt, Human herpesvirus 2
cgcgccaccgcccgcacca

SEQ ID NO: 1826203 - RNA, 13 nt, Human herpesvirus 2
agacacaaaagcu

SEQ ID NO: 1826204 - RNA, 14 nt, Human herpesvirus 2
ggggaugguggugg

SEQ ID NO: 1826205 - RNA, 15 nt, Human herpesvirus 2
accggggacuccccu

SEQ ID NO: 1826206 - RNA, 13 nt, Human herpesvirus 2
ccuguuuggggca

SEQ ID NO: 1826207 - RNA, 14 nt, Human herpesvirus 2
gcggugcagggccu

SEQ ID NO: 1826208 - RNA, 14 nt, Human herpesvirus 2
gggguugggucugc

SEQ ID NO: 1826209 - RNA, 18 nt, Human herpesvirus 2
gcacgcgcgcaggcugga

SEQ ID NO: 1826210 - RNA, 11 nt, Human herpesvirus 2
ugugccaggug

SEQ ID NO: 1826211 - RNA, 13 nt, Human herpesvirus 2
cggaccccgaccc

SEQ ID NO: 1826212 - RNA, 17 nt, Human herpesvirus 2
ccacacacacccccugu

SEQ ID NO: 1826213 - RNA, 20 nt, Human herpesvirus 2
gcgggcacucuggcgucccc

SEQ ID NO: 1826214 - RNA, 13 nt, Human herpesvirus 2
ggcccuccacgcc

SEQ ID NO: 1826215 - RNA, 20 nt, Human herpesvirus 2
uccccaagagacuucccuaa

SEQ ID NO: 1826216 - RNA, 13 nt, Human herpesvirus 2
caauaauaaagcu

SEQ ID NO: 1826217 - RNA, 15 nt, Human herpesvirus 2
ucggacaccagcagc

SEQ ID NO: 1826218 - RNA, 17 nt, Human herpesvirus 2
gagccccccacgugggc

SEQ ID NO: 1826219 - RNA, 15 nt, Human herpesvirus 2
ccuagaggcuguccg

SEQ ID NO: 1826220 - RNA, 14 nt, Human herpesvirus 2
gccccgccgcuccg

SEQ ID NO: 1826221 - RNA, 16 nt, Human herpesvirus 2
auggagaagggaaagg

SEQ ID NO: 1826222 - RNA, 23 nt, Human herpesvirus 2
ccggccgcucgcugcagggccug

SEQ ID NO: 1826223 - RNA, 19 nt, Human herpesvirus 2
acaacaguacucaucggga

SEQ ID NO: 1826224 - RNA, 14 nt, Human herpesvirus 2
gggggcuaggagcc

SEQ ID NO: 1826225 - RNA, 16 nt, Human herpesvirus 2
uggcuucgggccaaca

SEQ ID NO: 1826226 - RNA, 14 nt, Human herpesvirus 2
uguuguuucugggc

SEQ ID NO: 1826227 - RNA, 21 nt, Human herpesvirus 2
cgaagagacgaugggagcccc

SEQ ID NO: 1826228 - RNA, 18 nt, Human herpesvirus 2
gcagugcaguaccccagu

SEQ ID NO: 1826229 - RNA, 16 nt, Human herpesvirus 2
gguagcggacgcacgg

SEQ ID NO: 1826230 - RNA, 18 nt, Human herpesvirus 2
agucaaacgucccaaacu

SEQ ID NO: 1826231 - RNA, 14 nt, Human herpesvirus 2
gaggcgaccccgcc

SEQ ID NO: 1826232 - RNA, 17 nt, Human herpesvirus 2
cucgggggccaggaacu

SEQ ID NO: 1826233 - RNA, 19 nt, Human herpesvirus 2
agaccaccucgcggcggcu

SEQ ID NO: 1826234 - RNA, 13 nt, Human herpesvirus 2
ucgugcacagagc

SEQ ID NO: 1826235 - RNA, 22 nt, Human herpesvirus 2
ggcgcucgguuguccguucugu

SEQ ID NO: 1826236 - RNA, 13 nt, Human herpesvirus 2
guuucgccccacg

SEQ ID NO: 1826237 - RNA, 19 nt, Human herpesvirus 2
ccggcguggagcgccgggc

SEQ ID NO: 1826238 - RNA, 16 nt, Human herpesvirus 2
cggggcgugcugugcc

SEQ ID NO: 1826239 - RNA, 18 nt, Human herpesvirus 2
ugcgcggcguuggcgcgc

SEQ ID NO: 1826240 - RNA, 15 nt, Human herpesvirus 2
acagacaauaaagca

SEQ ID NO: 1826241 - RNA, 19 nt, Human herpesvirus 2
cggcgauuaacaacaccaa

SEQ ID NO: 1826242 - RNA, 12 nt, Human herpesvirus 2
augagccgccgg

SEQ ID NO: 1826243 - RNA, 13 nt, Human herpesvirus 2
aacuccgcccucg

SEQ ID NO: 1826244 - RNA, 19 nt, Human herpesvirus 2
cgcgcggcgcgagcucccu

SEQ ID NO: 1826245 - RNA, 15 nt, Human herpesvirus 2
aggggggcagugcag

SEQ ID NO: 1826246 - RNA, 16 nt, Human herpesvirus 2
cggucggccagcacga

SEQ ID NO: 1826247 - RNA, 12 nt, Human herpesvirus 2
ggcgccgaucgc

SEQ ID NO: 1826248 - RNA, 12 nt, Human herpesvirus 2
gccaacaccagg

SEQ ID NO: 1826249 - RNA, 22 nt, Human herpesvirus 2
gauggggagagggggaaggaau

SEQ ID NO: 1826250 - RNA, 21 nt, Human herpesvirus 2
gccgacuuccgugccccugga

SEQ ID NO: 1826251 - RNA, 14 nt, Human herpesvirus 2
cccucgcugcucuc

SEQ ID NO: 1826252 - RNA, 21 nt, Human herpesvirus 2
caccgagccgcugugccaggu

SEQ ID NO: 1826253 - RNA, 19 nt, Human herpesvirus 2
aggccgcccccagcaggug

SEQ ID NO: 1826254 - RNA, 17 nt, Human herpesvirus 2
cccccgggacuucugga

SEQ ID NO: 1826255 - RNA, 15 nt, Human herpesvirus 2
cccgccagagacccu

SEQ ID NO: 1826256 - RNA, 20 nt, Human herpesvirus 2
uuccucaguguuugggaaau

SEQ ID NO: 1826257 - RNA, 19 nt, Human herpesvirus 2
cggggccguggggccccag

SEQ ID NO: 1826258 - RNA, 16 nt, Human herpesvirus 2
ggggaugggggggaag

SEQ ID NO: 1826259 - RNA, 21 nt, Human herpesvirus 2
gaaggaacgcccgaaaccaga

SEQ ID NO: 1826260 - RNA, 20 nt, Human herpesvirus 2
ggcgaccgucuuugggcccc

SEQ ID NO: 1826261 - RNA, 15 nt, Human herpesvirus 2
ccccacgucaccggg

SEQ ID NO: 1826262 - RNA, 20 nt, Human herpesvirus 2
gcagcagucguggagcgucc

SEQ ID NO: 1826263 - RNA, 17 nt, Human herpesvirus 2
ggauguguucuccugga

SEQ ID NO: 1826264 - RNA, 15 nt, Human herpesvirus 2
uccccuucagccugg

SEQ ID NO: 1826265 - RNA, 14 nt, Human herpesvirus 2
caccgaaggaggaa

SEQ ID NO: 1826266 - RNA, 16 nt, Human herpesvirus 2
ccgcuguggcccuggc

SEQ ID NO: 1826267 - RNA, 17 nt, Human herpesvirus 2
ccuaaggaugcccgcca

SEQ ID NO: 1826268 - RNA, 14 nt, Human herpesvirus 2
cgucgcuaucacau

SEQ ID NO: 1826269 - RNA, 15 nt, Human herpesvirus 2
uggggggggugugug

SEQ ID NO: 1826270 - RNA, 18 nt, Human herpesvirus 2
ccggguuauaggccacac

SEQ ID NO: 1826271 - RNA, 20 nt, Human herpesvirus 2
guuuccccggcccaccccca

SEQ ID NO: 1826272 - RNA, 15 nt, Human herpesvirus 2
cccggcuccuccgug

SEQ ID NO: 1826273 - RNA, 16 nt, Human herpesvirus 2
gggggccggggcucuu

SEQ ID NO: 1826274 - RNA, 16 nt, Human herpesvirus 2
cgggacgagccaaacc

SEQ ID NO: 1826275 - RNA, 15 nt, Human herpesvirus 2
gaaugacacaaaaau

SEQ ID NO: 1826276 - RNA, 16 nt, Human herpesvirus 2
gaacacgagccgcagg

SEQ ID NO: 1826277 - RNA, 19 nt, Human herpesvirus 2
cgggacgcccggcccauaa

SEQ ID NO: 1826278 - RNA, 14 nt, Human herpesvirus 2
ggggagggcggcac

SEQ ID NO: 1826279 - RNA, 22 nt, Human herpesvirus 2
accugccguaugcuaauuaaau

SEQ ID NO: 1826280 - RNA, 19 nt, Human herpesvirus 2
gcucugucccccgggcagc

SEQ ID NO: 1826281 - RNA, 21 nt, Human herpesvirus 2
ggcgugauguuuuccgcaucu

SEQ ID NO: 1826282 - RNA, 20 nt, Human herpesvirus 2
gucugcgccaccggccuggu

SEQ ID NO: 1826283 - RNA, 13 nt, Human herpesvirus 2
cccgccggggcgc

SEQ ID NO: 1826284 - RNA, 18 nt, Human herpesvirus 2
ucguggugcuggccaaug

SEQ ID NO: 1826285 - RNA, 20 nt, Human herpesvirus 2
ugcaucccagacgcccgcga

SEQ ID NO: 1826286 - RNA, 20 nt, Human herpesvirus 2
ccuccgcccuccgccagcgc

SEQ ID NO: 1826287 - RNA, 17 nt, Human herpesvirus 2
aagugcaguaacccagu

SEQ ID NO: 1826288 - RNA, 18 nt, Human herpesvirus 2
agccgccaccccccuccc

SEQ ID NO: 1826289 - RNA, 14 nt, Human herpesvirus 2
gaagucacccgggu

SEQ ID NO: 1826290 - RNA, 24 nt, Human herpesvirus 2
cggcgccuaccugguacccacgga

SEQ ID NO: 1826291 - RNA, 14 nt, Human herpesvirus 2
ugaggaacuggguu

SEQ ID NO: 1826292 - RNA, 18 nt, Human herpesvirus 2
cacguguccccagggagc

SEQ ID NO: 1826293 - RNA, 13 nt, Human herpesvirus 2
gggacgcgagccu

SEQ ID NO: 1826294 - RNA, 19 nt, Human herpesvirus 2
gcccgcagcuucgggggcu

SEQ ID NO: 1826295 - RNA, 15 nt, Human herpesvirus 2
agcucaucgcacggc

SEQ ID NO: 1826296 - RNA, 21 nt, Human herpesvirus 2
cgggcggacguccaggggugc

SEQ ID NO: 1826297 - RNA, 16 nt, Human herpesvirus 2
gcgccaccgcccgcac

SEQ ID NO: 1826298 - RNA, 18 nt, Human herpesvirus 2
ccuggguccgggggccug

SEQ ID NO: 1826299 - RNA, 23 nt, Human herpesvirus 2
ccgccagagacccugccccccgg

SEQ ID NO: 1826300 - RNA, 21 nt, Human herpesvirus 2
gcggagagagggggggaaaga

SEQ ID NO: 1826301 - RNA, 21 nt, Human herpesvirus 2
gaccgcugucgcccccgucug

SEQ ID NO: 1826302 - RNA, 23 nt, Human herpesvirus 2
ccacgagcacaaacgugcucugc

SEQ ID NO: 1826303 - RNA, 22 nt, Human herpesvirus 2
gccuagccgugggccugugggg

SEQ ID NO: 1826304 - RNA, 13 nt, Human herpesvirus 2
uccaccuuggccc

SEQ ID NO: 1826305 - RNA, 12 nt, Human herpesvirus 2
cuacccccaccc

SEQ ID NO: 1826306 - RNA, 13 nt, Human herpesvirus 2
ggcgugcugugcc

SEQ ID NO: 1826307 - RNA, 15 nt, Human herpesvirus 2
gcccccggcccugcg

SEQ ID NO: 1826308 - RNA, 16 nt, Human herpesvirus 2
ugucgccggcgugggu

SEQ ID NO: 1826309 - RNA, 16 nt, Human herpesvirus 2
ugugucgcggggacag

SEQ ID NO: 1826310 - RNA, 18 nt, Human herpesvirus 2
gucguccgcggccccacg

SEQ ID NO: 1826311 - RNA, 20 nt, Human herpesvirus 2
uuucugggcccgccgaccgc

SEQ ID NO: 1826312 - RNA, 16 nt, Human herpesvirus 2
uguuguguuugcuggg

SEQ ID NO: 1826313 - RNA, 17 nt, Human herpesvirus 2
cacggucugguggcgcu

SEQ ID NO: 1826314 - RNA, 23 nt, Human herpesvirus 2
uggaagaggaccugcguguuuuc

SEQ ID NO: 1826315 - RNA, 20 nt, Human herpesvirus 2
caagugcaguaacccaguuc

SEQ ID NO: 1826316 - RNA, 16 nt, Human herpesvirus 2
agcgccgggccucccg

SEQ ID NO: 1826317 - RNA, 21 nt, Human herpesvirus 2
auggcgccuucuucgccccca

SEQ ID NO: 1826318 - RNA, 15 nt, Human herpesvirus 2
gggagggcagggccg

SEQ ID NO: 1826319 - RNA, 13 nt, Human herpesvirus 2
ccagguggcccuu

SEQ ID NO: 1826320 - RNA, 14 nt, Human herpesvirus 2
ugcccccccccggg

SEQ ID NO: 1826321 - RNA, 23 nt, Human herpesvirus 2
cgggcggugcccaucuacguggc

SEQ ID NO: 1826322 - RNA, 14 nt, Human herpesvirus 2
uaugcuaauuaaau

SEQ ID NO: 1826323 - RNA, 13 nt, Human herpesvirus 2
agagcccagggaa

SEQ ID NO: 1826324 - RNA, 13 nt, Human herpesvirus 2
cgcacgcggugcg

SEQ ID NO: 1826325 - RNA, 21 nt, Human herpesvirus 2
cccccucucaaacaaaaacac

SEQ ID NO: 1826326 - RNA, 19 nt, Human herpesvirus 2
gcgccugcgccccgacggc

SEQ ID NO: 1826327 - RNA, 12 nt, Human herpesvirus 2
agggggaaggaa

SEQ ID NO: 1826328 - RNA, 23 nt, Human herpesvirus 2
cgggcgggguggggaggaaagaa

SEQ ID NO: 1826329 - RNA, 18 nt, Human herpesvirus 2
gacuggccgugcugggcg

SEQ ID NO: 1826330 - RNA, 16 nt, Human herpesvirus 2
ggugcguuccagcgcg

SEQ ID NO: 1826331 - RNA, 18 nt, Human herpesvirus 2
cgcgaugaccucccggcc

SEQ ID NO: 1826332 - RNA, 15 nt, Human herpesvirus 2
gggacuccccucuac

SEQ ID NO: 1826333 - RNA, 19 nt, Human herpesvirus 2
ucacggcccaccugcacga

SEQ ID NO: 1826334 - RNA, 16 nt, Human herpesvirus 2
ugggaaaucuauugaa

SEQ ID NO: 1826335 - RNA, 20 nt, Human herpesvirus 2
cgacgauuagccaccgcgcc

SEQ ID NO: 1826336 - RNA, 22 nt, Human herpesvirus 2
cagaugcugcccgcggaccacc

SEQ ID NO: 1826337 - RNA, 20 nt, Human herpesvirus 2
cuuccgaccgacgggccccc

SEQ ID NO: 1826338 - RNA, 14 nt, Human herpesvirus 2
agccagggcuggga

SEQ ID NO: 1826339 - RNA, 17 nt, Human herpesvirus 2
ugauucucaccuggggc

SEQ ID NO: 1826340 - RNA, 16 nt, Human herpesvirus 2
cucgaacauggacccg

SEQ ID NO: 1826341 - RNA, 17 nt, Human herpesvirus 2
cgcccauacaaauuaaa

SEQ ID NO: 1826342 - RNA, 19 nt, Human herpesvirus 2
cuggguuacugcacuugcc

SEQ ID NO: 1826343 - RNA, 14 nt, Human herpesvirus 2
gacaggaggcgcag

SEQ ID NO: 1826344 - RNA, 18 nt, Human herpesvirus 2
cguguacaaacacgggga

SEQ ID NO: 1826345 - RNA, 22 nt, Human herpesvirus 2
uucccuucgcgagggccccggc

SEQ ID NO: 1826346 - RNA, 17 nt, Human herpesvirus 2
ccgcauauacugcuggg

SEQ ID NO: 1826347 - RNA, 13 nt, Human herpesvirus 2
gguuguguuuugu

SEQ ID NO: 1826348 - RNA, 16 nt, Human herpesvirus 2
cccgaccccgccgccg

SEQ ID NO: 1826349 - RNA, 20 nt, Human herpesvirus 2
cgcgaccgucgccgccggcc

SEQ ID NO: 1826350 - RNA, 17 nt, Human herpesvirus 2
cccggcgaccgccccgc

SEQ ID NO: 1826351 - RNA, 13 nt, Human herpesvirus 2
ggcccacgagcuc

SEQ ID NO: 1826352 - RNA, 22 nt, Human herpesvirus 2
ccccgggcgaaaaggcccggcc

SEQ ID NO: 1826353 - RNA, 18 nt, Human herpesvirus 2
gccguucggaccuggggg

SEQ ID NO: 1826354 - RNA, 23 nt, Human herpesvirus 2
aguaacaaacagagaaaaaaaac

SEQ ID NO: 1826355 - RNA, 19 nt, Human herpesvirus 2
gcgccaagcgccccgcgga

SEQ ID NO: 1826356 - RNA, 20 nt, Human herpesvirus 2
uggcggcuggggaaagggaa

SEQ ID NO: 1826357 - RNA, 23 nt, Human herpesvirus 2
aacuggguuacugcacuugcccc

SEQ ID NO: 1826358 - RNA, 12 nt, Human herpesvirus 2
cacccgcccguc

SEQ ID NO: 1826359 - RNA, 20 nt, Human herpesvirus 2
ugugauagcgacgacagaac

SEQ ID NO: 1826360 - RNA, 14 nt, Human herpesvirus 2
guuccguagacagc

SEQ ID NO: 1826361 - RNA, 15 nt, Human herpesvirus 2
aauaaaacccagacc

SEQ ID NO: 1826362 - RNA, 17 nt, Human herpesvirus 2
gcgcucauggccggaga

SEQ ID NO: 1826363 - RNA, 14 nt, Human herpesvirus 2
gccgaacgccucac

SEQ ID NO: 1826364 - RNA, 21 nt, Human herpesvirus 2
ucuccgcaauaaacgccuucc

SEQ ID NO: 1826365 - RNA, 16 nt, Human herpesvirus 2
guggcccuuccggacc

SEQ ID NO: 1826366 - RNA, 19 nt, Human herpesvirus 2
ucccgcucgcgguaauuag

SEQ ID NO: 1826367 - RNA, 14 nt, Human herpesvirus 2
ggggugaggaagaa

SEQ ID NO: 1826368 - RNA, 17 nt, Human herpesvirus 2
ggcguuccuucccuuuc

SEQ ID NO: 1826369 - RNA, 14 nt, Human herpesvirus 2
cggucaggaccagg

SEQ ID NO: 1826370 - RNA, 18 nt, Human herpesvirus 2
cacccccaaaccccgguu

SEQ ID NO: 1826371 - RNA, 16 nt, Human herpesvirus 2
ugccgcagaccaccuc

SEQ ID NO: 1826372 - RNA, 13 nt, Human herpesvirus 2
gcgccgggcagac

SEQ ID NO: 1826373 - RNA, 22 nt, Human herpesvirus 2
caggcgcuccagguacugcugc

SEQ ID NO: 1826374 - RNA, 17 nt, Human herpesvirus 2
ggcggacguccaggggu

SEQ ID NO: 1826375 - RNA, 22 nt, Human herpesvirus 2
gagccgcccauccgaggaccgc

SEQ ID NO: 1826376 - RNA, 15 nt, Human herpesvirus 2
ucguccucacggcca

SEQ ID NO: 1826377 - RNA, 16 nt, Human herpesvirus 2
cugcgcgcgcaccugc

SEQ ID NO: 1826378 - RNA, 19 nt, Human herpesvirus 2
cgcaucacggcccaccugc

SEQ ID NO: 1826379 - RNA, 19 nt, Human herpesvirus 2
gucgggccagauggggccc

SEQ ID NO: 1826380 - RNA, 13 nt, Human herpesvirus 2
uuuaagcgcugcg

SEQ ID NO: 1826381 - RNA, 22 nt, Human herpesvirus 2
gaaacuuccgggagcgggggag

SEQ ID NO: 1826382 - RNA, 22 nt, Human herpesvirus 2
ccgugcugggcgcgagccaggc

SEQ ID NO: 1826383 - RNA, 19 nt, Human herpesvirus 2
gaugagccgguagugcagg

SEQ ID NO: 1826384 - RNA, 19 nt, Human herpesvirus 2
aggucugcgcgaggccgcu

SEQ ID NO: 1826385 - RNA, 14 nt, Human herpesvirus 2
ggcggcccuggagc

SEQ ID NO: 1826386 - RNA, 17 nt, Human herpesvirus 2
accccccggccccccgc

SEQ ID NO: 1826387 - RNA, 13 nt, Human herpesvirus 2
gacggcgggaccc

SEQ ID NO: 1826388 - RNA, 13 nt, Human herpesvirus 2
gaccggcggggcc

SEQ ID NO: 1826389 - RNA, 13 nt, Human herpesvirus 2
gguauggcugccc

SEQ ID NO: 1826390 - RNA, 18 nt, Human herpesvirus 2
cccaggaggggggcagug

SEQ ID NO: 1826391 - RNA, 14 nt, Human herpesvirus 2
gcgcgcccccgccg

SEQ ID NO: 1826392 - RNA, 17 nt, Human herpesvirus 2
ucgcaagccacccuggg

SEQ ID NO: 1826393 - RNA, 20 nt, Human herpesvirus 2
gucgcccccaaagucacgcc

SEQ ID NO: 1826394 - RNA, 23 nt, Human herpesvirus 2
aaggcauuguugucguguggugu

SEQ ID NO: 1826395 - RNA, 23 nt, Human herpesvirus 2
agcggcuuaagauuuuucggugc

SEQ ID NO: 1826396 - RNA, 11 nt, Human herpesvirus 2
cgagacagacg

SEQ ID NO: 1826397 - RNA, 14 nt, Human herpesvirus 2
gcacgcggucagca

SEQ ID NO: 1826398 - RNA, 21 nt, Human herpesvirus 2
cagaccgaagaggugcugccg

SEQ ID NO: 1826399 - RNA, 18 nt, Human herpesvirus 2
ucgggccgugucccuccc

SEQ ID NO: 1826400 - RNA, 21 nt, Human herpesvirus 2
gccucuguuucuccaggcgcu

SEQ ID NO: 1826401 - RNA, 14 nt, Human herpesvirus 2
gccugugucagcuc

SEQ ID NO: 1826402 - RNA, 17 nt, Human herpesvirus 2
gucugaccacgagcaca

SEQ ID NO: 1826403 - RNA, 12 nt, Human herpesvirus 2
caccccacccua

SEQ ID NO: 1826404 - RNA, 13 nt, Human herpesvirus 2
cugcacuuuauug

SEQ ID NO: 1826405 - RNA, 16 nt, Human herpesvirus 2
uucaauagauuuccca

SEQ ID NO: 1826406 - RNA, 17 nt, Human herpesvirus 2
uggagaagggaaaggaa

SEQ ID NO: 1826407 - RNA, 14 nt, Human herpesvirus 2
gggaagucucuugg

SEQ ID NO: 1826408 - RNA, 19 nt, Human herpesvirus 2
cauccgaucgaugagccgg

SEQ ID NO: 1826409 - RNA, 13 nt, Human herpesvirus 2
ucguggcccuccu

SEQ ID NO: 1826410 - RNA, 17 nt, Human herpesvirus 2
gcccgggguucuggggg

SEQ ID NO: 1826411 - RNA, 23 nt, Human herpesvirus 2
cggggcgugucuguccguugccc

SEQ ID NO: 1826412 - RNA, 18 nt, Human herpesvirus 2
ucgccucucuucuucccc

SEQ ID NO: 1826413 - RNA, 20 nt, Human herpesvirus 2
cagacccgagcuccggggga

SEQ ID NO: 1826414 - RNA, 12 nt, Human herpesvirus 2
gucccgcccgcc

SEQ ID NO: 1826415 - RNA, 17 nt, Human herpesvirus 2
gugagucacggcaaccc

SEQ ID NO: 1826416 - RNA, 17 nt, Human herpesvirus 2
auccucaaacaggccau

SEQ ID NO: 1826417 - RNA, 19 nt, Human herpesvirus 2
ucaccuggggcuccugcgc

SEQ ID NO: 1826418 - RNA, 13 nt, Human herpesvirus 2
gccgcugugccag

SEQ ID NO: 1826419 - RNA, 20 nt, Human herpesvirus 2
cgugcugggcgcgagccagg

SEQ ID NO: 1826420 - RNA, 16 nt, Human herpesvirus 2
gacaacugccugaccc

SEQ ID NO: 1826421 - RNA, 19 nt, Human herpesvirus 2
accggcgccgaucgcagcg

SEQ ID NO: 1826422 - RNA, 17 nt, Human herpesvirus 2
cgggggaggggggagau

SEQ ID NO: 1826423 - RNA, 14 nt, Human herpesvirus 2
gacagcggggaccc

SEQ ID NO: 1826424 - RNA, 20 nt, Human herpesvirus 2
uccuuggaauuccagcagcu

SEQ ID NO: 1826425 - RNA, 17 nt, Human herpesvirus 2
gcaaccaaaucaccccc

SEQ ID NO: 1826426 - RNA, 17 nt, Human herpesvirus 2
cgggggucgggcgggcg

SEQ ID NO: 1826427 - RNA, 20 nt, Human herpesvirus 2
uugaccgccgccggggggcg

SEQ ID NO: 1826428 - RNA, 23 nt, Human herpesvirus 2
gcggaggggaucagcaaccaggc

SEQ ID NO: 1826429 - RNA, 14 nt, Human herpesvirus 2
ugcccgcgggucug

SEQ ID NO: 1826430 - RNA, 18 nt, Human herpesvirus 2
cccggcggccccccgcgc

SEQ ID NO: 1826431 - RNA, 18 nt, Human herpesvirus 2
gccgcuguggcccuggcg

SEQ ID NO: 1826432 - RNA, 14 nt, Human herpesvirus 2
ccucaaacaggcca

SEQ ID NO: 1826433 - RNA, 16 nt, Human herpesvirus 2
cgacccuguggcgggc

SEQ ID NO: 1826434 - RNA, 15 nt, Human herpesvirus 2
acgagcgcgcugccg

SEQ ID NO: 1826435 - RNA, 20 nt, Human herpesvirus 2
ucgccccacacgccuuccag

SEQ ID NO: 1826436 - RNA, 15 nt, Human herpesvirus 2
gccgacaacugccug

SEQ ID NO: 1826437 - RNA, 23 nt, Human herpesvirus 2
cgaccgguuucgguuccacucua

SEQ ID NO: 1826438 - RNA, 13 nt, Human herpesvirus 2
gaccgaucuggag

SEQ ID NO: 1826439 - RNA, 23 nt, Human herpesvirus 2
ccucuaucaugucuuuccaccac

SEQ ID NO: 1826440 - RNA, 17 nt, Human herpesvirus 2
ccggccgccauccccgc

SEQ ID NO: 1826441 - RNA, 21 nt, Human herpesvirus 2
caccagagccgaacgcagguc

SEQ ID NO: 1826442 - RNA, 16 nt, Human herpesvirus 2
auucucaccuggggcu

SEQ ID NO: 1826443 - RNA, 21 nt, Human herpesvirus 2
acgcgcuguggcgcgcccccg

SEQ ID NO: 1826444 - RNA, 19 nt, Human herpesvirus 2
cagcaccaccaccccccca

SEQ ID NO: 1826445 - RNA, 21 nt, Human herpesvirus 2
cguuauuuccaaacagggccu

SEQ ID NO: 1826446 - RNA, 19 nt, Human herpesvirus 2
gucugcguggggacgaggc

SEQ ID NO: 1826447 - RNA, 23 nt, Human herpesvirus 2
uccgggguuuccccggcccaccc

SEQ ID NO: 1826448 - RNA, 22 nt, Human herpesvirus 2
ccguguuagggaagucucuugg

SEQ ID NO: 1826449 - RNA, 19 nt, Human herpesvirus 2
accacguguccccagggag

SEQ ID NO: 1826450 - RNA, 20 nt, Human herpesvirus 2
ggucuuuccguggcgccugg

SEQ ID NO: 1826451 - RNA, 15 nt, Human herpesvirus 2
cgacaucaaccaccu

SEQ ID NO: 1826452 - RNA, 16 nt, Human herpesvirus 2
ccgcgggaggcggugg

SEQ ID NO: 1826453 - RNA, 17 nt, Human herpesvirus 2
ugggggcccaggucccc

SEQ ID NO: 1826454 - RNA, 16 nt, Human herpesvirus 2
acccuagccuucggcc

SEQ ID NO: 1826455 - RNA, 15 nt, Human herpesvirus 2
ggcguugcugcgcug

SEQ ID NO: 1826456 - RNA, 18 nt, Human herpesvirus 2
guacccggcagagagauu

SEQ ID NO: 1826457 - RNA, 13 nt, Human herpesvirus 2
aggcgccucugcc

SEQ ID NO: 1826458 - RNA, 17 nt, Human herpesvirus 2
caaagaaauagaagaaa

SEQ ID NO: 1826459 - RNA, 13 nt, Human herpesvirus 2
cacgggcgucccc

SEQ ID NO: 1826460 - RNA, 21 nt, Human herpesvirus 2
gcccacgaauuugacgucgug

SEQ ID NO: 1826461 - RNA, 22 nt, Human herpesvirus 2
caaaaauacacaugacuucugg

SEQ ID NO: 1826462 - RNA, 19 nt, Human herpesvirus 2
cugcccgcggaccaccggg

SEQ ID NO: 1826463 - RNA, 20 nt, Human herpesvirus 2
gucgccaacggccagcgggg

SEQ ID NO: 1826464 - RNA, 13 nt, Human herpesvirus 2
augggcucggcgu

SEQ ID NO: 1826465 - RNA, 19 nt, Human herpesvirus 2
gggggaugguggugggccu

SEQ ID NO: 1826466 - RNA, 15 nt, Human herpesvirus 2
cuuuccaccccccuu

SEQ ID NO: 1826467 - RNA, 15 nt, Human herpesvirus 2
cuguuguuguuucug

SEQ ID NO: 1826468 - RNA, 19 nt, Human herpesvirus 2
gccaaaccagccccgcagg

SEQ ID NO: 1826469 - RNA, 23 nt, Human herpesvirus 2
gcgggcucguguuggccaccaac

SEQ ID NO: 1826470 - RNA, 20 nt, Human herpesvirus 2
accgcacccgggccggguga

SEQ ID NO: 1826471 - RNA, 13 nt, Human herpesvirus 2
gaggcggacccag

SEQ ID NO: 1826472 - RNA, 20 nt, Human herpesvirus 2
gugcccuggguccgggggcc

SEQ ID NO: 1826473 - RNA, 21 nt, Human herpesvirus 2
gacgggcgccacgguggugca

SEQ ID NO: 1826474 - RNA, 20 nt, Human herpesvirus 2
acuauggggggggaaaggaa

SEQ ID NO: 1826475 - RNA, 14 nt, Human herpesvirus 2
acccacccucggug

SEQ ID NO: 1826476 - RNA, 20 nt, Human herpesvirus 2
uggccggguuuuuggcccug

SEQ ID NO: 1826477 - RNA, 18 nt, Human herpesvirus 2
gcaucgcaagccacccug

SEQ ID NO: 1826478 - RNA, 23 nt, Human herpesvirus 2
ccgcgacggccccggccgccucc

SEQ ID NO: 1826479 - RNA, 14 nt, Human herpesvirus 2
cgcucgcucuccgu

SEQ ID NO: 1826480 - RNA, 10 nt, Human herpesvirus 2
cccccucucu

SEQ ID NO: 1826481 - RNA, 17 nt, Human herpesvirus 2
aggcuucccccccgcca

SEQ ID NO: 1826482 - RNA, 13 nt, Human herpesvirus 2
ccugcggcaggcg

SEQ ID NO: 1826483 - RNA, 16 nt, Human herpesvirus 2
cgggaggggcuuggcc

SEQ ID NO: 1826484 - RNA, 21 nt, Human herpesvirus 2
gcuggcaccguaucagcaccc

SEQ ID NO: 1826485 - RNA, 14 nt, Human herpesvirus 2
ggagauggggagag

SEQ ID NO: 1826486 - RNA, 14 nt, Human herpesvirus 2
gcccgcguccccgg

SEQ ID NO: 1826487 - RNA, 10 nt, Human herpesvirus 2
uaaggcaggg

SEQ ID NO: 1826488 - RNA, 16 nt, Human herpesvirus 2
cucgaacacgagccgc

SEQ ID NO: 1826489 - RNA, 14 nt, Human herpesvirus 2
cgcgcgcgcgcuuc

SEQ ID NO: 1826490 - RNA, 14 nt, Human herpesvirus 2
gcggcgcgagcucc

SEQ ID NO: 1826491 - RNA, 23 nt, Human herpesvirus 2
gguggcccuuccggaccccgacc

SEQ ID NO: 1826492 - RNA, 22 nt, Human herpesvirus 2
cgguagugcaggugggccgacg

SEQ ID NO: 1826493 - RNA, 13 nt, Human herpesvirus 2
ggccacacagaga

SEQ ID NO: 1826494 - RNA, 18 nt, Human herpesvirus 2
uccgggagcgggggaggg

SEQ ID NO: 1826495 - RNA, 15 nt, Human herpesvirus 2
caccacccccccacu

SEQ ID NO: 1826496 - RNA, 19 nt, Human herpesvirus 2
aagucucuuggggaaaucu

SEQ ID NO: 1826497 - RNA, 14 nt, Human herpesvirus 2
gcgcucgcucuccg

SEQ ID NO: 1826498 - RNA, 13 nt, Human herpesvirus 2
gcuccccuucagc

SEQ ID NO: 1826499 - RNA, 19 nt, Human herpesvirus 2
ugccuccacgcccugcugu

SEQ ID NO: 1826500 - RNA, 13 nt, Human herpesvirus 2
cugcugggccaug

SEQ ID NO: 1826501 - RNA, 16 nt, Human herpesvirus 2
guccccggugucuccg

SEQ ID NO: 1826502 - RNA, 12 nt, Human herpesvirus 2
ccgccgcccgcg

SEQ ID NO: 1826503 - RNA, 20 nt, Human herpesvirus 2
gcgaugaccucccggcccgc

SEQ ID NO: 1826504 - RNA, 19 nt, Human herpesvirus 2
cagccuacaucaccccagg

SEQ ID NO: 1826505 - RNA, 22 nt, Human herpesvirus 2
gcggggucgagcgcgccaggac

SEQ ID NO: 1826506 - RNA, 17 nt, Human herpesvirus 2
cacguguccccagggag

SEQ ID NO: 1826507 - RNA, 20 nt, Human herpesvirus 2
cucauacacgcgcuggcccc

SEQ ID NO: 1826508 - RNA, 16 nt, Human herpesvirus 2
guucggcaggcccgcc

SEQ ID NO: 1826509 - RNA, 16 nt, Human herpesvirus 2
uuacgcaggcccucgc

SEQ ID NO: 1826510 - RNA, 19 nt, Human herpesvirus 2
gucgccggcgacacccacc

SEQ ID NO: 1826511 - RNA, 17 nt, Human herpesvirus 2
cugguuuuucugggggu

SEQ ID NO: 1826512 - RNA, 15 nt, Human herpesvirus 2
cgggguucugggggu

SEQ ID NO: 1826513 - RNA, 13 nt, Human herpesvirus 2
caccgcaccacca

SEQ ID NO: 1826514 - RNA, 18 nt, Human herpesvirus 2
aaccagccccgcaggcag

SEQ ID NO: 1826515 - RNA, 12 nt, Human herpesvirus 2
aaacaggcaccg

SEQ ID NO: 1826516 - RNA, 15 nt, Human herpesvirus 2
cagcacggcggccag

SEQ ID NO: 1826517 - RNA, 21 nt, Human herpesvirus 2
guccccuacgccccccucggc

SEQ ID NO: 1826518 - RNA, 15 nt, Human herpesvirus 2
cuggccccucugcuu

SEQ ID NO: 1826519 - RNA, 13 nt, Human herpesvirus 2
uggcccagcgcac

SEQ ID NO: 1826520 - RNA, 14 nt, Human herpesvirus 2
acacacaccccccu

SEQ ID NO: 1826521 - RNA, 16 nt, Human herpesvirus 2
gggggcccaggucccc

SEQ ID NO: 1826522 - RNA, 15 nt, Human herpesvirus 2
cacaugacuucuggu

SEQ ID NO: 1826523 - RNA, 18 nt, Human herpesvirus 2
cucccguguaccucuggg

SEQ ID NO: 1826524 - RNA, 21 nt, Human herpesvirus 2
ugacgcggcccaaggcgcugc

SEQ ID NO: 1826525 - RNA, 17 nt, Human herpesvirus 2
uguuggaucccuuugug

SEQ ID NO: 1826526 - RNA, 23 nt, Human herpesvirus 2
gucuucccgggaaaccacacaca

SEQ ID NO: 1826527 - RNA, 19 nt, Human herpesvirus 2
ugauggggacgacgggcgc

SEQ ID NO: 1826528 - RNA, 14 nt, Human herpesvirus 2
cugggucagcucau

SEQ ID NO: 1826529 - RNA, 16 nt, Human herpesvirus 2
gccaagcgccccgcgg

SEQ ID NO: 1826530 - RNA, 17 nt, Human herpesvirus 2
cgcccccgcuggcggga

SEQ ID NO: 1826531 - RNA, 20 nt, Human herpesvirus 2
ggggcaccaaaaaccagguc

SEQ ID NO: 1826532 - RNA, 12 nt, Human herpesvirus 2
cgcgggggccgg

SEQ ID NO: 1826533 - RNA, 19 nt, Human herpesvirus 2
cuccucgcggaguaugacc

SEQ ID NO: 1826534 - RNA, 21 nt, Human herpesvirus 2
cggcgaccgccccgcgccggc

SEQ ID NO: 1826535 - RNA, 17 nt, Human herpesvirus 2
ccugaguugcgccggca

SEQ ID NO: 1826536 - RNA, 16 nt, Human herpesvirus 2
ccuccgcccuccgcca

SEQ ID NO: 1826537 - RNA, 23 nt, Human herpesvirus 2
cuagcggccgggucggcugucca

SEQ ID NO: 1826538 - RNA, 13 nt, Human herpesvirus 2
acacacuuuguug

SEQ ID NO: 1826539 - RNA, 14 nt, Human herpesvirus 2
cgacgugccgggga

SEQ ID NO: 1826540 - RNA, 18 nt, Human herpesvirus 2
ggucacaaaaggcacggc

SEQ ID NO: 1826541 - RNA, 20 nt, Human herpesvirus 2
acgcgucgggggccggggcg

SEQ ID NO: 1826542 - RNA, 21 nt, Human herpesvirus 2
ggccggggagggcagggccgc

SEQ ID NO: 1826543 - RNA, 15 nt, Human herpesvirus 2
caaaaaaaagaaaca

SEQ ID NO: 1826544 - RNA, 21 nt, Human herpesvirus 2
agcccgaacggaaggccuccc

SEQ ID NO: 1826545 - RNA, 15 nt, Human herpesvirus 2
ccgguaugcccggcc

SEQ ID NO: 1826546 - RNA, 10 nt, Human herpesvirus 2
cacagccacc

SEQ ID NO: 1826547 - RNA, 17 nt, Human herpesvirus 2
acgagaagccgccccca

SEQ ID NO: 1826548 - RNA, 18 nt, Human herpesvirus 2
ucguggcauggaagcccc

SEQ ID NO: 1826549 - RNA, 21 nt, Human herpesvirus 2
cagcguaacgcacccccggac

SEQ ID NO: 1826550 - RNA, 14 nt, Human herpesvirus 2
acaucaagcccaca

SEQ ID NO: 1826551 - RNA, 19 nt, Human herpesvirus 2
ccgugaugucgggcguggg

SEQ ID NO: 1826552 - RNA, 18 nt, Human herpesvirus 2
aucuuggcguuauuucca

SEQ ID NO: 1826553 - RNA, 14 nt, Human herpesvirus 2
gccagugcauccca

SEQ ID NO: 1826554 - RNA, 17 nt, Human herpesvirus 2
cauccgacggcaugcag

SEQ ID NO: 1826555 - RNA, 15 nt, Human herpesvirus 2
gucugucgcgacgcc

SEQ ID NO: 1826556 - RNA, 20 nt, Human herpesvirus 2
cggggcgcgccucugaccca

SEQ ID NO: 1826557 - RNA, 20 nt, Human herpesvirus 2
gccgggucaccggggcgccc

SEQ ID NO: 1826558 - RNA, 22 nt, Human herpesvirus 2
acggacaaccgagcgccgggca

SEQ ID NO: 1826559 - RNA, 17 nt, Human herpesvirus 2
cggucccuuccccacca

SEQ ID NO: 1826560 - RNA, 23 nt, Human herpesvirus 2
cgcccaggcccuggcgcaccugc

SEQ ID NO: 1826561 - RNA, 17 nt, Human herpesvirus 2
gccguggacgcccccuc

SEQ ID NO: 1826562 - RNA, 11 nt, Human herpesvirus 2
cgagcucccug

SEQ ID NO: 1826563 - RNA, 12 nt, Human herpesvirus 2
cgcagaccaccu

SEQ ID NO: 1826564 - RNA, 20 nt, Human herpesvirus 2
cugugccagguggcccuucc

SEQ ID NO: 1826565 - RNA, 22 nt, Human herpesvirus 2
gggcuuguguauaaauaaaaag

SEQ ID NO: 1826566 - RNA, 13 nt, Human herpesvirus 2
ccccgcgcacgcg

SEQ ID NO: 1826567 - RNA, 19 nt, Human herpesvirus 2
acguucggacggccccucg

SEQ ID NO: 1826568 - RNA, 17 nt, Human herpesvirus 2
ccgacggcggggccccg

SEQ ID NO: 1826569 - RNA, 12 nt, Human herpesvirus 2
ccggucucccuc

SEQ ID NO: 1826570 - RNA, 9 nt, Human herpesvirus 2
ggccgccgg

SEQ ID NO: 1826571 - RNA, 22 nt, Human herpesvirus 2
uucuucgcgggcaggccgcggc

SEQ ID NO: 1826572 - RNA, 19 nt, Human herpesvirus 2
gcguuccuucccuuucccc

SEQ ID NO: 1826573 - RNA, 18 nt, Human herpesvirus 2
ccuuuccaccccccuucc

SEQ ID NO: 1826574 - RNA, 19 nt, Human herpesvirus 2
acuuccgugccccuggacu

SEQ ID NO: 1826575 - RNA, 20 nt, Human herpesvirus 2
agaggucaauagauuucccc

SEQ ID NO: 1826576 - RNA, 19 nt, Human herpesvirus 2
guggaugccggggccgugg

SEQ ID NO: 1826577 - RNA, 18 nt, Human herpesvirus 2
ggaggaggcggcgccugc

SEQ ID NO: 1826578 - RNA, 22 nt, Human herpesvirus 2
uuuugccucccaacgcccccuu

SEQ ID NO: 1826579 - RNA, 15 nt, Human herpesvirus 2
cggguauaagggcag

SEQ ID NO: 1826580 - RNA, 22 nt, Human herpesvirus 2
cccgggggggggcaagugcagu

SEQ ID NO: 1826581 - RNA, 16 nt, Human herpesvirus 2
gaggcuggagcgcugg

SEQ ID NO: 1826582 - RNA, 23 nt, Human herpesvirus 2
ucucuucuuuccccccccccucc

SEQ ID NO: 1826583 - RNA, 16 nt, Human herpesvirus 2
gccuccgcccuccgcc

SEQ ID NO: 1826584 - RNA, 21 nt, Human herpesvirus 2
ccgcaauaaacgccuucccgg

SEQ ID NO: 1826585 - RNA, 14 nt, Human herpesvirus 2
ccuggggcuccugc

SEQ ID NO: 1826586 - RNA, 17 nt, Human herpesvirus 2
cugcccgcggaccaccg

SEQ ID NO: 1826587 - RNA, 19 nt, Human herpesvirus 2
ggccucgcccgucccggca

SEQ ID NO: 1826588 - RNA, 23 nt, Human herpesvirus 2
cggcaauaaaagaacagaauaaa

SEQ ID NO: 1826589 - RNA, 14 nt, Human herpesvirus 2
uacaccccacccua

SEQ ID NO: 1826590 - RNA, 18 nt, Human herpesvirus 2
cuccgccagcgcccuucc

SEQ ID NO: 1826591 - RNA, 15 nt, Human herpesvirus 2
gaacugauugccauc

SEQ ID NO: 1826592 - RNA, 15 nt, Human herpesvirus 2
ggcggcgccgcgccc

SEQ ID NO: 1826593 - RNA, 17 nt, Human herpesvirus 2
cggccacgucguccggg

SEQ ID NO: 1826594 - RNA, 22 nt, Human herpesvirus 2
gcacgcgcgcaggcuggagcuc

SEQ ID NO: 1826595 - RNA, 22 nt, Human herpesvirus 2
ucgccccacggaccuccgggac

SEQ ID NO: 1826596 - RNA, 13 nt, Human herpesvirus 2
gugccgcagacca

SEQ ID NO: 1826597 - RNA, 18 nt, Human herpesvirus 2
ccgccccagggggcggcg

SEQ ID NO: 1826598 - RNA, 20 nt, Human herpesvirus 2
gagccaaaccagccccgcag

SEQ ID NO: 1826599 - RNA, 16 nt, Human herpesvirus 2
cgcacccccggacccc

SEQ ID NO: 1826600 - RNA, 13 nt, Human herpesvirus 2
ccgucgcuccggc

SEQ ID NO: 1826601 - RNA, 13 nt, Human herpesvirus 2
acgacgccuggcg

SEQ ID NO: 1826602 - RNA, 13 nt, Human herpesvirus 2
gggcagugcagua

SEQ ID NO: 1826603 - RNA, 17 nt, Human herpesvirus 2
cagacccgagcuccggg

SEQ ID NO: 1826604 - RNA, 15 nt, Human herpesvirus 2
acgagccaaaccagc

SEQ ID NO: 1826605 - RNA, 18 nt, Human herpesvirus 2
augcgacgccgccccugc

SEQ ID NO: 1826606 - RNA, 19 nt, Human herpesvirus 2
cgccuuccgacgcucucug

SEQ ID NO: 1826607 - RNA, 14 nt, Human herpesvirus 2
cgcgggccguggcc

SEQ ID NO: 1826608 - RNA, 21 nt, Human herpesvirus 2
caccacguguccccagggagc

SEQ ID NO: 1826609 - RNA, 14 nt, Human herpesvirus 2
gggcggcguggccg

SEQ ID NO: 1826610 - RNA, 16 nt, Human herpesvirus 2
cagcacggccggguga

SEQ ID NO: 1826611 - RNA, 17 nt, Human herpesvirus 2
gcaugcgacggcgucuc

SEQ ID NO: 1826612 - RNA, 14 nt, Human herpesvirus 2
aauacaccagagcc

SEQ ID NO: 1826613 - RNA, 17 nt, Human herpesvirus 2
uguggcggucggccagc

SEQ ID NO: 1826614 - RNA, 14 nt, Human herpesvirus 2
cgaucgugcugcgc

SEQ ID NO: 1826615 - RNA, 21 nt, Human herpesvirus 2
ugcagcgcgggcgacgggcgg

SEQ ID NO: 1826616 - RNA, 16 nt, Human herpesvirus 2
uccucaccgagccgcu

SEQ ID NO: 1826617 - RNA, 14 nt, Human herpesvirus 2
ccccgcgcaggggg

SEQ ID NO: 1826618 - RNA, 15 nt, Human herpesvirus 2
cccuguuggagccgg

SEQ ID NO: 1826619 - RNA, 21 nt, Human herpesvirus 2
ccgggguuuccccggcccacc

SEQ ID NO: 1826620 - RNA, 17 nt, Human herpesvirus 2
cggacacccccccccau

SEQ ID NO: 1826621 - RNA, 18 nt, Human herpesvirus 2
gccgagcgucaggcccgc

SEQ ID NO: 1826622 - RNA, 23 nt, Human herpesvirus 2
gcgaccgucuuugggccccgccc

SEQ ID NO: 1826623 - RNA, 21 nt, Human herpesvirus 2
aggauggguccgacgaggccu

SEQ ID NO: 1826624 - RNA, 17 nt, Human herpesvirus 2
caucgccaacucugucu

SEQ ID NO: 1826625 - RNA, 13 nt, Human herpesvirus 2
gcccagcacaggc

SEQ ID NO: 1826626 - RNA, 23 nt, Human herpesvirus 2
caacgcgaccgucgccgccggcc

SEQ ID NO: 1826627 - RNA, 14 nt, Human herpesvirus 2
uguggggccccggc

SEQ ID NO: 1826628 - RNA, 13 nt, Human herpesvirus 2
ggucccccggacc

SEQ ID NO: 1826629 - RNA, 19 nt, Human herpesvirus 2
gaagugccgcacggccgug

SEQ ID NO: 1826630 - RNA, 19 nt, Human herpesvirus 2
ccagcugcuggccaaacau

SEQ ID NO: 1826631 - RNA, 15 nt, Human herpesvirus 2
ccgggcagccgggcc

SEQ ID NO: 1826632 - RNA, 12 nt, Human herpesvirus 2
ccccccccuucc

SEQ ID NO: 1826633 - RNA, 20 nt, Human herpesvirus 2
cggguuccccgagagcccag

SEQ ID NO: 1826634 - RNA, 21 nt, Human herpesvirus 2
cggggaagaugacguacagca

SEQ ID NO: 1826635 - RNA, 22 nt, Human herpesvirus 2
cccacggucagucuggucucag

SEQ ID NO: 1826636 - RNA, 13 nt, Human herpesvirus 2
ucgccggggaccg

SEQ ID NO: 1826637 - RNA, 16 nt, Human herpesvirus 2
ugucucgcggcccggc

SEQ ID NO: 1826638 - RNA, 14 nt, Human herpesvirus 2
gccgcggccauccu

SEQ ID NO: 1826639 - RNA, 12 nt, Human herpesvirus 2
ccgccgccggga

SEQ ID NO: 1826640 - RNA, 14 nt, Human herpesvirus 2
ggaugggcggggcc

SEQ ID NO: 1826641 - RNA, 16 nt, Human herpesvirus 2
ccgcccgaccagcgcc

SEQ ID NO: 1826642 - RNA, 15 nt, Human herpesvirus 2
ugugcguaugugaua

SEQ ID NO: 1826643 - RNA, 14 nt, Human herpesvirus 2
ugccagguggcccu

SEQ ID NO: 1826644 - RNA, 17 nt, Human herpesvirus 2
cgguggggccggcgguc

SEQ ID NO: 1826645 - RNA, 21 nt, Human herpesvirus 2
accucgucgcgcgcaucgcca

SEQ ID NO: 1826646 - RNA, 14 nt, Human herpesvirus 2
ccccagggcuucgu

SEQ ID NO: 1826647 - RNA, 17 nt, Human herpesvirus 2
gcgacccgccgggggcg

SEQ ID NO: 1826648 - RNA, 20 nt, Human herpesvirus 2
gugucgaccgcugucgcccc

SEQ ID NO: 1826649 - RNA, 19 nt, Human herpesvirus 2
uggcgucggcggccccggc

SEQ ID NO: 1826650 - RNA, 14 nt, Human herpesvirus 2
gacgauuagccacc

SEQ ID NO: 1826651 - RNA, 23 nt, Human herpesvirus 2
uccgccagcgcccuuccgcgucc

SEQ ID NO: 1826652 - RNA, 20 nt, Human herpesvirus 2
cagcucccccgcgcaggggg

SEQ ID NO: 1826653 - RNA, 17 nt, Human herpesvirus 2
cgggggauggugguggg

SEQ ID NO: 1826654 - RNA, 14 nt, Human herpesvirus 2
cacgacccgccucg

SEQ ID NO: 1826655 - RNA, 23 nt, Human herpesvirus 2
auaacuuugguugucgccacacg

SEQ ID NO: 1826656 - RNA, 16 nt, Human herpesvirus 2
cucaccgcgcccgggc

SEQ ID NO: 1826657 - RNA, 21 nt, Human herpesvirus 2
cugggggcggggggugggagg

SEQ ID NO: 1826658 - RNA, 15 nt, Human herpesvirus 2
ccccagcuuucccuc

SEQ ID NO: 1826659 - RNA, 22 nt, Human herpesvirus 2
aaacgcgcgcccccauccccuc

SEQ ID NO: 1826660 - RNA, 22 nt, Human herpesvirus 2
gcccgccauuuaggauggcugc

SEQ ID NO: 1826661 - RNA, 19 nt, Human herpesvirus 2
ccauauguacgcguacccc

SEQ ID NO: 1826662 - RNA, 18 nt, Human herpesvirus 2
cgguccucaccgagccgc

SEQ ID NO: 1826663 - RNA, 22 nt, Human herpesvirus 2
cuacugcgccaccguccaccuc

SEQ ID NO: 1826664 - RNA, 15 nt, Human herpesvirus 2
ccgcacccgggccgg

SEQ ID NO: 1826665 - RNA, 13 nt, Human herpesvirus 2
ccaguuccucagu

SEQ ID NO: 1826666 - RNA, 19 nt, Human herpesvirus 2
uccccaggcgacgccaggc

SEQ ID NO: 1826667 - RNA, 15 nt, Human herpesvirus 2
cuuuuucucuucccc

SEQ ID NO: 1826668 - RNA, 17 nt, Human herpesvirus 2
ucuccauuccuguuucc

SEQ ID NO: 1826669 - RNA, 20 nt, Human herpesvirus 2
gcggccagccgcccccgccg

SEQ ID NO: 1826670 - RNA, 17 nt, Human herpesvirus 2
cccuccgccagcgcccu

SEQ ID NO: 1826671 - RNA, 22 nt, Human herpesvirus 2
ccgucgcuccggcucccggccc

SEQ ID NO: 1826672 - RNA, 21 nt, Human herpesvirus 2
ggacgacgggcgcccccgccu

SEQ ID NO: 1826673 - RNA, 21 nt, Human herpesvirus 2
cagcaaccaggcgcugcugcg

SEQ ID NO: 1826674 - RNA, 21 nt, Human herpesvirus 2
cccgccgggucaccggggcgc

SEQ ID NO: 1826675 - RNA, 13 nt, Human herpesvirus 2
ccgacucccuccg

SEQ ID NO: 1826676 - RNA, 14 nt, Human herpesvirus 2
ccccgauuccggug

SEQ ID NO: 1826677 - RNA, 16 nt, Human herpesvirus 2
ccgggcccggccgccg

SEQ ID NO: 1826678 - RNA, 14 nt, Human herpesvirus 2
guggcggaggccug

SEQ ID NO: 1826679 - RNA, 12 nt, Human herpesvirus 2
cugcgcaggucc

SEQ ID NO: 1826680 - RNA, 14 nt, Human herpesvirus 2
cgcuguggcgcgcc

SEQ ID NO: 1826681 - RNA, 17 nt, Human herpesvirus 2
gcacgugcgucuuccca

SEQ ID NO: 1826682 - RNA, 22 nt, Human herpesvirus 2
ccccggcggggcauggaccccc

SEQ ID NO: 1826683 - RNA, 15 nt, Human herpesvirus 2
accgcucacccaccc

SEQ ID NO: 1826684 - RNA, 21 nt, Human herpesvirus 2
ggccgagcguaucggccagga

SEQ ID NO: 1826685 - RNA, 20 nt, Human herpesvirus 2
ccucuguuccuuucccuucu

SEQ ID NO: 1826686 - RNA, 19 nt, Human herpesvirus 2
gccgcaucaguccgcgcgg

SEQ ID NO: 1826687 - RNA, 22 nt, Human herpesvirus 2
uuguaaaacgcgggcgggggcg

SEQ ID NO: 1826688 - RNA, 22 nt, Human herpesvirus 2
ccgugucgcuccccuucagccu

SEQ ID NO: 1826689 - RNA, 24 nt, Human herpesvirus 2
cucgucgcgcgcaucgccaacucu

SEQ ID NO: 1826690 - RNA, 19 nt, Human herpesvirus 2
uggagcucugccugcacga

SEQ ID NO: 1826691 - RNA, 18 nt, Human herpesvirus 2
gugcacagccuggccgug

SEQ ID NO: 1826692 - RNA, 17 nt, Human herpesvirus 2
gguccggguaaaaaaga

SEQ ID NO: 1826693 - RNA, 20 nt, Human herpesvirus 2
gaaacuuccgggagcggggg

SEQ ID NO: 1826694 - RNA, 11 nt, Human herpesvirus 2
uguuucaucau

SEQ ID NO: 1826695 - RNA, 20 nt, Human herpesvirus 2
gcguacagccuacaucaccc

SEQ ID NO: 1826696 - RNA, 22 nt, Human herpesvirus 2
ggccaucgccggggaccgcagu

SEQ ID NO: 1826697 - RNA, 14 nt, Human herpesvirus 2
cggggggggccucg

SEQ ID NO: 1826698 - RNA, 18 nt, Human herpesvirus 2
gccgcccaagcggcccga

SEQ ID NO: 1826699 - RNA, 12 nt, Human herpesvirus 2
uacaccccaccc

SEQ ID NO: 1826700 - RNA, 13 nt, Human herpesvirus 2
ucccagggcacca

SEQ ID NO: 1826701 - RNA, 15 nt, Human herpesvirus 2
cggcaugcagcccag

SEQ ID NO: 1826702 - RNA, 16 nt, Human herpesvirus 2
ccguccuuuccacccc

SEQ ID NO: 1826703 - RNA, 18 nt, Human herpesvirus 2
cauccgacggcaugcagc

SEQ ID NO: 1826704 - RNA, 15 nt, Human herpesvirus 2
cgugcgucuucccag

SEQ ID NO: 1826705 - RNA, 12 nt, Human herpesvirus 2
uggggggggucg

SEQ ID NO: 1826706 - RNA, 19 nt, Human herpesvirus 2
ggcuuugguguuuuuggca

SEQ ID NO: 1826707 - RNA, 13 nt, Human herpesvirus 2
gagccgcaggaac

SEQ ID NO: 1826708 - RNA, 23 nt, Human herpesvirus 2
acuugacggucgccacucuccug

SEQ ID NO: 1826709 - RNA, 21 nt, Human herpesvirus 2
gguguuuuuggcaccuugccg

SEQ ID NO: 1826710 - RNA, 18 nt, Human herpesvirus 2
ggggaugggggggaaggg

SEQ ID NO: 1826711 - RNA, 20 nt, Human herpesvirus 2
agcguaacgcacccccggac

SEQ ID NO: 1826712 - RNA, 20 nt, Human herpesvirus 2
acugggguacugcacugccc

SEQ ID NO: 1826713 - RNA, 20 nt, Human herpesvirus 2
cucauaaaaaucgugaguca

SEQ ID NO: 1826714 - RNA, 14 nt, Human herpesvirus 2
ggcccggcgccgcc

SEQ ID NO: 1826715 - RNA, 15 nt, Human herpesvirus 2
gacuuccgugccccu

SEQ ID NO: 1826716 - RNA, 17 nt, Human herpesvirus 2
ccggggggucggcaugc

SEQ ID NO: 1826717 - RNA, 21 nt, Human herpesvirus 2
cgaggugucccgccugugugc

SEQ ID NO: 1826718 - RNA, 17 nt, Human herpesvirus 2
cagugcaguaccccagu

SEQ ID NO: 1826719 - RNA, 10 nt, Human herpesvirus 2
ucgggccccu

SEQ ID NO: 1826720 - RNA, 16 nt, Human herpesvirus 2
gcggcgacggcaccgc

SEQ ID NO: 1826721 - RNA, 21 nt, Human herpesvirus 2
acgacagcggggacccgggcg

SEQ ID NO: 1826722 - RNA, 19 nt, Human herpesvirus 2
gggccuuuuuucggacggu

SEQ ID NO: 1826723 - RNA, 20 nt, Human herpesvirus 2
cuuuucccccuacccuuccc

SEQ ID NO: 1826724 - RNA, 14 nt, Human herpesvirus 2
ggucuguggguggu

SEQ ID NO: 1826725 - RNA, 20 nt, Human herpesvirus 2
gaucccgaagccaucugaag

SEQ ID NO: 1826726 - RNA, 14 nt, Human herpesvirus 2
ccuccgaggagauc

SEQ ID NO: 1826727 - RNA, 13 nt, Human herpesvirus 2
guucggggccagg

SEQ ID NO: 1826728 - RNA, 23 nt, Human herpesvirus 2
augucuguuucaauaaaaaguaa

SEQ ID NO: 1826729 - RNA, 14 nt, Human herpesvirus 2
uugggggggggugg

SEQ ID NO: 1826730 - RNA, 14 nt, Human herpesvirus 2
aguaccccaguucc

SEQ ID NO: 1826731 - RNA, 20 nt, Human herpesvirus 2
cgacgacgccuggcggcccc

SEQ ID NO: 1826732 - RNA, 14 nt, Human herpesvirus 2
cugggguacugcac

SEQ ID NO: 1826733 - RNA, 20 nt, Human herpesvirus 2
cuggcugcggggggcggugg

SEQ ID NO: 1826734 - RNA, 24 nt, Human herpesvirus 2
cagcucucgcgaauugacaagcgg

SEQ ID NO: 1826735 - RNA, 17 nt, Human herpesvirus 2
cccguguaccucugggc

SEQ ID NO: 1826736 - RNA, 14 nt, Human herpesvirus 2
cgacagcggggacc

SEQ ID NO: 1826737 - RNA, 16 nt, Human herpesvirus 2
cgcgacggccccggcc

SEQ ID NO: 1826738 - RNA, 13 nt, Human herpesvirus 2
guccccuggggcg

SEQ ID NO: 1826739 - RNA, 13 nt, Human herpesvirus 2
uuggggaaaucua

SEQ ID NO: 1826740 - RNA, 13 nt, Human herpesvirus 2
cucucgaucccga

SEQ ID NO: 1826741 - RNA, 16 nt, Human herpesvirus 2
ccgccggucucccucu

SEQ ID NO: 1826742 - RNA, 15 nt, Human herpesvirus 2
gcccgaaccccgcgg

SEQ ID NO: 1826743 - RNA, 16 nt, Human herpesvirus 2
caccgcccccgcuggc

SEQ ID NO: 1826744 - RNA, 18 nt, Human herpesvirus 2
cgcgcgguucugacgcgg

SEQ ID NO: 1826745 - RNA, 11 nt, Human herpesvirus 2
uuuuggcccug

SEQ ID NO: 1826746 - RNA, 19 nt, Human herpesvirus 2
gcgcuuauaagagcgggcc

SEQ ID NO: 1826747 - RNA, 16 nt, Human herpesvirus 2
uuucuggucuuccggg

SEQ ID NO: 1826748 - RNA, 17 nt, Human herpesvirus 2
uucuucgccgcccucgc

SEQ ID NO: 1826749 - RNA, 12 nt, Human herpesvirus 2
gaagagcuccaa

SEQ ID NO: 1826750 - RNA, 15 nt, Human herpesvirus 2
gucccgccugugugc

SEQ ID NO: 1826751 - RNA, 19 nt, Human herpesvirus 2
guucagcgcaucaggcuca

SEQ ID NO: 1826752 - RNA, 21 nt, Human herpesvirus 2
ccaggaggggggcagugcagu

SEQ ID NO: 1826753 - RNA, 20 nt, Human herpesvirus 2
aggucugcgcgaggccgcuc

SEQ ID NO: 1826754 - RNA, 18 nt, Human herpesvirus 2
cuucgcugucagcacgcg

SEQ ID NO: 1826755 - RNA, 19 nt, Human herpesvirus 2
gccgccaccccccuccccu

SEQ ID NO: 1826756 - RNA, 15 nt, Human herpesvirus 2
gcccuccgcuacacg

SEQ ID NO: 1826757 - RNA, 15 nt, Human herpesvirus 2
ucuuuccguggcgcc

SEQ ID NO: 1826758 - RNA, 19 nt, Human herpesvirus 2
ccggggcacgcggucagca

SEQ ID NO: 1826759 - RNA, 16 nt, Human herpesvirus 2
ggcccuggcggacggc

SEQ ID NO: 1826760 - RNA, 17 nt, Human herpesvirus 2
ccgagcgccgggcagac

SEQ ID NO: 1826761 - RNA, 21 nt, Human herpesvirus 2
ucgggugacuuggugcgccgc

SEQ ID NO: 1826762 - RNA, 15 nt, Human herpesvirus 2
cgggcgagcuggccc

SEQ ID NO: 1826763 - RNA, 20 nt, Human herpesvirus 2
aguuccuccgugcuggggaa

SEQ ID NO: 1826764 - RNA, 23 nt, Human herpesvirus 2
ggaaagcgucauccgcccgacca

SEQ ID NO: 1826765 - RNA, 21 nt, Human herpesvirus 2
cggcgacccgccgggggcgga

SEQ ID NO: 1826766 - RNA, 20 nt, Human herpesvirus 2
ggcgccuaccugguacccac

SEQ ID NO: 1826767 - RNA, 14 nt, Human herpesvirus 2
uguuucccccccua

SEQ ID NO: 1826768 - RNA, 12 nt, Human herpesvirus 2
ccaucgccgggg

SEQ ID NO: 1826769 - RNA, 12 nt, Human herpesvirus 2
acggucagucug

SEQ ID NO: 1826770 - RNA, 23 nt, Human herpesvirus 2
gaccaccgcggacagccagggcu

SEQ ID NO: 1826771 - RNA, 16 nt, Human herpesvirus 2
ccccgcgugcagcgcg

SEQ ID NO: 1826772 - RNA, 21 nt, Human herpesvirus 2
cccuggguccgggggccuggu

SEQ ID NO: 1826773 - RNA, 23 nt, Human herpesvirus 2
guagccuaucuugaucccccgga

SEQ ID NO: 1826774 - RNA, 12 nt, Human herpesvirus 2
guuacugcacuu

SEQ ID NO: 1826775 - RNA, 12 nt, Human herpesvirus 2
gccaacucuguc

SEQ ID NO: 1826776 - RNA, 12 nt, Human herpesvirus 2
ugcugggguccg

SEQ ID NO: 1826777 - RNA, 23 nt, Human herpesvirus 2
cgccaagcgccccgcggaccccg

SEQ ID NO: 1826778 - RNA, 18 nt, Human herpesvirus 2
gaucgcagcguccggcug

SEQ ID NO: 1826779 - RNA, 14 nt, Human herpesvirus 2
gcccagcacaggca

SEQ ID NO: 1826780 - RNA, 19 nt, Human herpesvirus 2
cgggaggggcgggaggaag

SEQ ID NO: 1826781 - RNA, 19 nt, Human herpesvirus 2
cuuggccguguggucgccc

SEQ ID NO: 1826782 - RNA, 18 nt, Human herpesvirus 2
gugacccccccauggcau

SEQ ID NO: 1826783 - RNA, 19 nt, Human herpesvirus 2
gcuuggaggcccucuggga

SEQ ID NO: 1826784 - RNA, 18 nt, Human herpesvirus 2
ccgcagaccaccucgcgg

SEQ ID NO: 1826785 - RNA, 19 nt, Human herpesvirus 2
cgggcgaaaaggcccggcc

SEQ ID NO: 1826786 - RNA, 18 nt, Human herpesvirus 2
acgugcacagccuggccg

SEQ ID NO: 1826787 - RNA, 19 nt, Human herpesvirus 2
augccguucggaccugggg

SEQ ID NO: 1826788 - RNA, 14 nt, Human herpesvirus 2
cgaaucugggaaga

SEQ ID NO: 1826789 - RNA, 15 nt, Human herpesvirus 2
gaccggcggggcccc

SEQ ID NO: 1826790 - RNA, 12 nt, Human herpesvirus 2
agggcagggccg

SEQ ID NO: 1826791 - RNA, 21 nt, Human herpesvirus 2
uggacggguauaaaggccagg

SEQ ID NO: 1826792 - RNA, 17 nt, Human herpesvirus 2
ccccuuugacuccuggg

SEQ ID NO: 1826793 - RNA, 14 nt, Human herpesvirus 2
cgcgcgagcggccg

SEQ ID NO: 1826794 - RNA, 21 nt, Human herpesvirus 2
ccugcgccccgacggcccaca

SEQ ID NO: 1826795 - RNA, 23 nt, Human herpesvirus 2
ccgcaguuucaccgccccagcac

SEQ ID NO: 1826796 - RNA, 14 nt, Human herpesvirus 2
cagcgccggguggc

SEQ ID NO: 1826797 - RNA, 15 nt, Human herpesvirus 2
cggccgcacccacga

SEQ ID NO: 1826798 - RNA, 24 nt, Human herpesvirus 2
cggccaauucuucccggagcgccg

SEQ ID NO: 1826799 - RNA, 17 nt, Human herpesvirus 2
uaagcgcugcggggacc

SEQ ID NO: 1826800 - RNA, 22 nt, Human herpesvirus 2
gcaccggacgcgcacguggggc

SEQ ID NO: 1826801 - RNA, 22 nt, Human herpesvirus 2
cgcaugacgacacgucccgcca

SEQ ID NO: 1826802 - RNA, 23 nt, Human herpesvirus 2
agcuucauuuugugggggcccag

SEQ ID NO: 1826803 - RNA, 15 nt, Human herpesvirus 2
ccgagccgcugugcc

SEQ ID NO: 1826804 - RNA, 13 nt, Human herpesvirus 2
cgacgccuggcgg

SEQ ID NO: 1826805 - RNA, 23 nt, Human herpesvirus 2
cgaguucccccgggacuucugga

SEQ ID NO: 1826806 - RNA, 18 nt, Human herpesvirus 2
cacccagaugcgccuggu

SEQ ID NO: 1826807 - RNA, 21 nt, Human herpesvirus 2
gccgccgagcgucaggcccgc

SEQ ID NO: 1826808 - RNA, 18 nt, Human herpesvirus 2
gaggucaauagauuuccc

SEQ ID NO: 1826809 - RNA, 14 nt, Human herpesvirus 2
ucccccggaccccg

SEQ ID NO: 1826810 - RNA, 20 nt, Human herpesvirus 2
ggccagccgcccccgccggc

SEQ ID NO: 1826811 - RNA, 15 nt, Human herpesvirus 2
accaaccccgucucc

SEQ ID NO: 1826812 - RNA, 12 nt, Human herpesvirus 2
cccguggcccac

SEQ ID NO: 1826813 - RNA, 21 nt, Human herpesvirus 2
ccgcgaccaccaaggcccgga

SEQ ID NO: 1826814 - RNA, 18 nt, Human herpesvirus 2
guuagguugggagguggc

SEQ ID NO: 1826815 - RNA, 13 nt, Human herpesvirus 2
gaucccccggaag

SEQ ID NO: 1826816 - RNA, 23 nt, Human herpesvirus 2
uggcccguuucuucggggggccc

SEQ ID NO: 1826817 - RNA, 12 nt, Human herpesvirus 2
ggaggggcuccu

SEQ ID NO: 1826818 - RNA, 17 nt, Human herpesvirus 2
cccgaacagccccuggg

SEQ ID NO: 1826819 - RNA, 14 nt, Human herpesvirus 2
cuacuaccugggga

SEQ ID NO: 1826820 - RNA, 23 nt, Human herpesvirus 2
cgcgcgcccccgacccggggccc

SEQ ID NO: 1826821 - RNA, 14 nt, Human herpesvirus 2
gugccccuggacug

SEQ ID NO: 1826822 - RNA, 14 nt, Human herpesvirus 2
uccggcggccaccc

SEQ ID NO: 1826823 - RNA, 20 nt, Human herpesvirus 2
uugcgcuuuccggcccuccc

SEQ ID NO: 1826824 - RNA, 18 nt, Human herpesvirus 2
caggccaucgccggggac

SEQ ID NO: 1826825 - RNA, 20 nt, Human herpesvirus 2
guccuccggcgcgcacuccc

SEQ ID NO: 1826826 - RNA, 15 nt, Human herpesvirus 2
cccgaacggaaggcc

SEQ ID NO: 1826827 - RNA, 19 nt, Human herpesvirus 2
cgagcguggccggcgaccc

SEQ ID NO: 1826828 - RNA, 22 nt, Human herpesvirus 2
acuggagguggucggcggccaa

SEQ ID NO: 1826829 - RNA, 21 nt, Human herpesvirus 2
gcuuccaccccccccccccuu

SEQ ID NO: 1826830 - RNA, 16 nt, Human herpesvirus 2
ggacaaacccgccggg

SEQ ID NO: 1826831 - RNA, 19 nt, Human herpesvirus 2
gucgcuaaacagggggauc

SEQ ID NO: 1826832 - RNA, 19 nt, Human herpesvirus 2
cgguccuaaggcgccgacg

SEQ ID NO: 1826833 - RNA, 14 nt, Human herpesvirus 2
cccuuucccccuuc

SEQ ID NO: 1826834 - RNA, 12 nt, Human herpesvirus 2
cgguggacauga

SEQ ID NO: 1826835 - RNA, 19 nt, Human herpesvirus 2
cacgaggccguaaacugcu

SEQ ID NO: 1826836 - RNA, 23 nt, Human herpesvirus 2
guccucgccgcuguggcccuggc

SEQ ID NO: 1826837 - RNA, 23 nt, Human herpesvirus 2
agggccuggcgauccugggccug

SEQ ID NO: 1826838 - RNA, 12 nt, Human herpesvirus 2
ggcggacccaga

SEQ ID NO: 1826839 - RNA, 16 nt, Human herpesvirus 2
ggaagaagagaggcga

SEQ ID NO: 1826840 - RNA, 12 nt, Human herpesvirus 2
cuguaucugguc

SEQ ID NO: 1826841 - RNA, 20 nt, Human herpesvirus 2
auaccggucgaucucggcgu

SEQ ID NO: 1826842 - RNA, 12 nt, Human herpesvirus 2
gggcagugcagu

SEQ ID NO: 1826843 - RNA, 13 nt, Human herpesvirus 2
guccggggggacg

SEQ ID NO: 1826844 - RNA, 11 nt, Human herpesvirus 2
uuacccacaca

SEQ ID NO: 1826845 - RNA, 18 nt, Human herpesvirus 2
ggccauccccggcgccau

SEQ ID NO: 1826846 - RNA, 18 nt, Human herpesvirus 2
cucgacggagagccggac

SEQ ID NO: 1826847 - RNA, 15 nt, Human herpesvirus 2
uucucguacccccuc

SEQ ID NO: 1826848 - RNA, 13 nt, Human herpesvirus 2
aguaccccaguuc

SEQ ID NO: 1826849 - RNA, 12 nt, Human herpesvirus 2
ccguccaccucc

SEQ ID NO: 1826850 - RNA, 14 nt, Human herpesvirus 2
cggccauccugccc

SEQ ID NO: 1826851 - RNA, 22 nt, Human herpesvirus 2
cacgcccaacccaaccgacucc

SEQ ID NO: 1826852 - RNA, 14 nt, Human herpesvirus 2
gaaggcggacccag

SEQ ID NO: 1826853 - RNA, 14 nt, Human herpesvirus 2
ucgggggccaggaa

SEQ ID NO: 1826854 - RNA, 15 nt, Human herpesvirus 2
ccggcgcgggcggcg

SEQ ID NO: 1826855 - RNA, 18 nt, Human herpesvirus 2
acguucggacggccccuc

SEQ ID NO: 1826856 - RNA, 23 nt, Human herpesvirus 2
agggugggggugguggugguggg

SEQ ID NO: 1826857 - RNA, 21 nt, Human herpesvirus 2
ggcaccguaucagcaccccac

SEQ ID NO: 1826858 - RNA, 17 nt, Human herpesvirus 2
agcucgucgcgacccug

SEQ ID NO: 1826859 - RNA, 12 nt, Human herpesvirus 2
acgaccugcagc

SEQ ID NO: 1826860 - RNA, 20 nt, Human herpesvirus 2
uuagucccggguccggggcg

SEQ ID NO: 1826861 - RNA, 21 nt, Human herpesvirus 2
cagccccucgcccccgcggcc

SEQ ID NO: 1826862 - RNA, 20 nt, Human herpesvirus 2
cagccuacaucaccccaggg

SEQ ID NO: 1826863 - RNA, 16 nt, Human herpesvirus 2
accuccccgugcgugc

SEQ ID NO: 1826864 - RNA, 19 nt, Human herpesvirus 2
gcuguuuauuacgggacca

SEQ ID NO: 1826865 - RNA, 15 nt, Human herpesvirus 2
acgcgcuggccccuc

SEQ ID NO: 1826866 - RNA, 20 nt, Human herpesvirus 2
ccggugucucgcggcccggc

SEQ ID NO: 1826867 - RNA, 18 nt, Human herpesvirus 2
gccucgcgucgggccaga

SEQ ID NO: 1826868 - RNA, 19 nt, Human herpesvirus 2
gaggaccacgugcacagcc

SEQ ID NO: 1826869 - RNA, 13 nt, Human herpesvirus 2
cguacgaggugcu

SEQ ID NO: 1826870 - RNA, 16 nt, Human herpesvirus 2
ggugcgccccgccggg

SEQ ID NO: 1826871 - RNA, 14 nt, Human herpesvirus 2
accgucgccgccgg

SEQ ID NO: 1826872 - RNA, 23 nt, Human herpesvirus 2
gugccgcuuuaccccgcggccuc

SEQ ID NO: 1826873 - RNA, 17 nt, Human herpesvirus 2
ccaggcuauuaaacagc

SEQ ID NO: 1826874 - RNA, 22 nt, Human herpesvirus 2
uguucgcgggcgacgccgcggc

SEQ ID NO: 1826875 - RNA, 21 nt, Human herpesvirus 2
gucccccgggcagccgggccc

SEQ ID NO: 1826876 - RNA, 17 nt, Human herpesvirus 2
ccugcggcagcgcgccg

SEQ ID NO: 1826877 - RNA, 22 nt, Human herpesvirus 2
gacuugacggucgccacucucc

SEQ ID NO: 1826878 - RNA, 18 nt, Human herpesvirus 2
gagccaccgucccgcccg

SEQ ID NO: 1826879 - RNA, 14 nt, Human herpesvirus 2
ggucgcucuguccc

SEQ ID NO: 1826880 - RNA, 18 nt, Human herpesvirus 2
ggcccucugggacaccca

SEQ ID NO: 1826881 - RNA, 23 nt, Human herpesvirus 2
cccgggggggggcaagugcagua

SEQ ID NO: 1826882 - RNA, 18 nt, Human herpesvirus 2
cguggagcgccgggccuc

SEQ ID NO: 1826883 - RNA, 15 nt, Human herpesvirus 2
acacguucuuugcca

SEQ ID NO: 1826884 - RNA, 20 nt, Human herpesvirus 2
uccgacguugcuuuuaccca

SEQ ID NO: 1826885 - RNA, 20 nt, Human herpesvirus 2
cccgcggucgcgcgggccgu

SEQ ID NO: 1826886 - RNA, 17 nt, Human herpesvirus 2
gaccccgauaguccccc

SEQ ID NO: 1826887 - RNA, 18 nt, Human herpesvirus 2
gcccccggagucccccgg

SEQ ID NO: 1826888 - RNA, 21 nt, Human herpesvirus 2
gagccucuuugggccgugggu

SEQ ID NO: 1826889 - RNA, 12 nt, Human herpesvirus 2
uaaaggcaggcg

SEQ ID NO: 1826890 - RNA, 15 nt, Human herpesvirus 2
ggcccugccuccgga

SEQ ID NO: 1826891 - RNA, 17 nt, Human herpesvirus 2
gcgcgacggccgagaag

SEQ ID NO: 1826892 - RNA, 22 nt, Human herpesvirus 2
gccgccauccucaaacaggcca

SEQ ID NO: 1826893 - RNA, 17 nt, Human herpesvirus 2
accgucggugccagacc

SEQ ID NO: 1826894 - RNA, 13 nt, Human herpesvirus 2
accgcgcgccgcc

SEQ ID NO: 1826895 - RNA, 17 nt, Human herpesvirus 2
gcccccggcccugcggc

SEQ ID NO: 1826896 - RNA, 14 nt, Human herpesvirus 2
gggacgcgagccug

SEQ ID NO: 1826897 - RNA, 21 nt, Human herpesvirus 2
cgccucucccuuuuuuccccc

SEQ ID NO: 1826898 - RNA, 20 nt, Human herpesvirus 2
acccucaccccaccccaucc

SEQ ID NO: 1826899 - RNA, 19 nt, Human herpesvirus 2
ccggcgugggugacuggga

SEQ ID NO: 1826900 - RNA, 15 nt, Human herpesvirus 2
gcgcgcuggcggaag

SEQ ID NO: 1826901 - RNA, 18 nt, Human herpesvirus 2
ugcugcugagcccugccc

SEQ ID NO: 1826902 - RNA, 13 nt, Human herpesvirus 2
ucaaacgcggaca

SEQ ID NO: 1826903 - RNA, 19 nt, Human herpesvirus 2
cggugccucacgguccuca

SEQ ID NO: 1826904 - RNA, 15 nt, Human herpesvirus 2
gccccgcaggcaggc

SEQ ID NO: 1826905 - RNA, 15 nt, Human herpesvirus 2
uuuccguggcgccug

SEQ ID NO: 1826906 - RNA, 13 nt, Human herpesvirus 2
ucgcggcggcucc

SEQ ID NO: 1826907 - RNA, 16 nt, Human herpesvirus 2
cccuggcgcaccugca

SEQ ID NO: 1826908 - RNA, 13 nt, Human herpesvirus 2
gugcccgcccccg

SEQ ID NO: 1826909 - RNA, 20 nt, Human herpesvirus 2
ccuggccguccggggggacg

SEQ ID NO: 1826910 - RNA, 21 nt, Human herpesvirus 2
acacacaccagcauuuuguua

SEQ ID NO: 1826911 - RNA, 19 nt, Human herpesvirus 2
ccagacgcuguuguuucug

SEQ ID NO: 1826912 - RNA, 22 nt, Human herpesvirus 2
acucccuccguguccgcggucu

SEQ ID NO: 1826913 - RNA, 22 nt, Human herpesvirus 2
ggggcugguuggauguuuuugc

SEQ ID NO: 1826914 - RNA, 13 nt, Human herpesvirus 2
cuggcgggagcca

SEQ ID NO: 1826915 - RNA, 14 nt, Human herpesvirus 2
ccgcccgcagcugc

SEQ ID NO: 1826916 - RNA, 15 nt, Human herpesvirus 2
uccccccccccucca

SEQ ID NO: 1826917 - RNA, 21 nt, Human herpesvirus 2
gccauccucaaacaggccauc

SEQ ID NO: 1826918 - RNA, 13 nt, Human herpesvirus 2
gggggggaagaga

SEQ ID NO: 1826919 - RNA, 12 nt, Human herpesvirus 2
gcggcccucucg

SEQ ID NO: 1826920 - RNA, 20 nt, Human herpesvirus 2
gccgucguuggucggugggu

SEQ ID NO: 1826921 - RNA, 19 nt, Human herpesvirus 2
gcagccccggucccccgga

SEQ ID NO: 1826922 - RNA, 16 nt, Human herpesvirus 2
cggggcgugucugucc

SEQ ID NO: 1826923 - RNA, 18 nt, Human herpesvirus 2
cgccacgguggugcaguu

SEQ ID NO: 1826924 - RNA, 15 nt, Human herpesvirus 2
uugcgcucgucgccg

SEQ ID NO: 1826925 - RNA, 20 nt, Human herpesvirus 2
cuguuuccuuuccuuucccc

SEQ ID NO: 1826926 - RNA, 14 nt, Human herpesvirus 2
uggcugucgugugu

SEQ ID NO: 1826927 - RNA, 19 nt, Human herpesvirus 2
cgcuuuccacacccccucc

SEQ ID NO: 1826928 - RNA, 16 nt, Human herpesvirus 2
ccuggcgauccugggc

SEQ ID NO: 1826929 - RNA, 12 nt, Human herpesvirus 2
cccccggaagga

SEQ ID NO: 1826930 - RNA, 18 nt, Human herpesvirus 2
ccagcagcuugcggggcu

SEQ ID NO: 1826931 - RNA, 20 nt, Human herpesvirus 2
ggaagggugggggugguggu

SEQ ID NO: 1826932 - RNA, 14 nt, Human herpesvirus 2
gcggucggccagca

SEQ ID NO: 1826933 - RNA, 17 nt, Human herpesvirus 2
gugggccgacgugccgg

SEQ ID NO: 1826934 - RNA, 18 nt, Human herpesvirus 2
gcacgcguuuguggcgag

SEQ ID NO: 1826935 - RNA, 14 nt, Human herpesvirus 2
aacuguguuucccc

SEQ ID NO: 1826936 - RNA, 16 nt, Human herpesvirus 2
cuguggguggugaugg

SEQ ID NO: 1826937 - RNA, 13 nt, Human herpesvirus 2
ugacccucucggg

SEQ ID NO: 1826938 - RNA, 17 nt, Human herpesvirus 2
gaacucucccggcuccu

SEQ ID NO: 1826939 - RNA, 20 nt, Human herpesvirus 2
cguucagcgcaucaggcuca

SEQ ID NO: 1826940 - RNA, 16 nt, Human herpesvirus 2
acacgacccgccucgg

SEQ ID NO: 1826941 - RNA, 22 nt, Human herpesvirus 2
gccccgccgggucaccggggcg

SEQ ID NO: 1826942 - RNA, 15 nt, Human herpesvirus 2
ugaucgacgacgccu

SEQ ID NO: 1826943 - RNA, 15 nt, Human herpesvirus 2
caggcgacgccaggc

SEQ ID NO: 1826944 - RNA, 21 nt, Human herpesvirus 2
cagaggcuggagcgcuggugg

SEQ ID NO: 1826945 - RNA, 12 nt, Human herpesvirus 2
gagggggggcgg

SEQ ID NO: 1826946 - RNA, 22 nt, Human herpesvirus 2
aaggggguagugucggagaggc

SEQ ID NO: 1826947 - RNA, 14 nt, Human herpesvirus 2
ugggaaaucuauug

SEQ ID NO: 1826948 - RNA, 12 nt, Human herpesvirus 2
caaaaacacaag

SEQ ID NO: 1826949 - RNA, 21 nt, Human herpesvirus 2
gguccaauauggcccagcgca

SEQ ID NO: 1826950 - RNA, 18 nt, Human herpesvirus 2
ccucccucgccgccuucc

SEQ ID NO: 1826951 - RNA, 18 nt, Human herpesvirus 2
uguuccggccguggccug

SEQ ID NO: 1826952 - RNA, 14 nt, Human herpesvirus 2
cugcgcgaggccgc

SEQ ID NO: 1826953 - RNA, 16 nt, Human herpesvirus 2
cgcgaccaccaaggcc

SEQ ID NO: 1826954 - RNA, 21 nt, Human herpesvirus 2
gggccauggaugaugaccugg

SEQ ID NO: 1826955 - RNA, 15 nt, Human herpesvirus 2
guuuacuauccuugc

SEQ ID NO: 1826956 - RNA, 11 nt, Human herpesvirus 2
agaggcugucc

SEQ ID NO: 1826957 - RNA, 23 nt, Human herpesvirus 2
gccccggguuccccgagagccca

SEQ ID NO: 1826958 - RNA, 21 nt, Human herpesvirus 2
gaccggcccccggaguccccc

SEQ ID NO: 1826959 - RNA, 22 nt, Human herpesvirus 2
gcagcgugucaaaggccagcag

SEQ ID NO: 1826960 - RNA, 15 nt, Human herpesvirus 2
cugguacccacggac

SEQ ID NO: 1826961 - RNA, 18 nt, Human herpesvirus 2
cgcucuccgugccccugg

SEQ ID NO: 1826962 - RNA, 22 nt, Human herpesvirus 2
cgccacucuccugcgagcccuc

SEQ ID NO: 1826963 - RNA, 21 nt, Human herpesvirus 2
gcaccggacgcgcacgugggg

SEQ ID NO: 1826964 - RNA, 16 nt, Human herpesvirus 2
cccgcggaccaccggg

SEQ ID NO: 1826965 - RNA, 12 nt, Human herpesvirus 2
aggggggagaug

SEQ ID NO: 1826966 - RNA, 15 nt, Human herpesvirus 2
aggcccaccaccauc

SEQ ID NO: 1826967 - RNA, 23 nt, Human herpesvirus 2
cacacggucggugccccccaucu

SEQ ID NO: 1826968 - RNA, 23 nt, Human herpesvirus 2
ccccgcucguggcgggcgcggca

SEQ ID NO: 1826969 - RNA, 21 nt, Human herpesvirus 2
cacgauaccguuuaucgugua

SEQ ID NO: 1826970 - RNA, 14 nt, Human herpesvirus 2
gcccaccugcacga

SEQ ID NO: 1826971 - RNA, 14 nt, Human herpesvirus 2
uguuuuucuguugu

SEQ ID NO: 1826972 - RNA, 15 nt, Human herpesvirus 2
ggcugcuauccagga

SEQ ID NO: 1826973 - RNA, 15 nt, Human herpesvirus 2
acgcgccucccgggg

SEQ ID NO: 1826974 - RNA, 13 nt, Human herpesvirus 2
cggcccuggagcg

SEQ ID NO: 1826975 - RNA, 17 nt, Human herpesvirus 2
guugccgggggccauga

SEQ ID NO: 1826976 - RNA, 22 nt, Human herpesvirus 2
cuccgcagcguaacgcaccccc

SEQ ID NO: 1826977 - RNA, 16 nt, Human herpesvirus 2
cggaggaacuggggua

SEQ ID NO: 1826978 - RNA, 10 nt, Human herpesvirus 2
ugauccuggc

SEQ ID NO: 1826979 - RNA, 21 nt, Human herpesvirus 2
ggcuggagcgcuggugggacg

SEQ ID NO: 1826980 - RNA, 15 nt, Human herpesvirus 2
ucggaauuucacccc

SEQ ID NO: 1826981 - RNA, 14 nt, Human herpesvirus 2
cuuuuccgccgccg

SEQ ID NO: 1826982 - RNA, 18 nt, Human herpesvirus 2
ccgugcugggcgcgagcc

SEQ ID NO: 1826983 - RNA, 22 nt, Human herpesvirus 2
cccgccauggcggggggggggc

SEQ ID NO: 1826984 - RNA, 17 nt, Human herpesvirus 2
aggucccgauggccgcc

SEQ ID NO: 1826985 - RNA, 12 nt, Human herpesvirus 2
uauacugcuggg

SEQ ID NO: 1826986 - RNA, 13 nt, Human herpesvirus 2
cccacccccgagg

SEQ ID NO: 1826987 - RNA, 14 nt, Human herpesvirus 2
gcgauccugggccu

SEQ ID NO: 1826988 - RNA, 18 nt, Human herpesvirus 2
gguccaauauggcccagc

SEQ ID NO: 1826989 - RNA, 14 nt, Human herpesvirus 2
uccgcucccgccuc

SEQ ID NO: 1826990 - RNA, 16 nt, Human herpesvirus 2
gccccggucugugggu

SEQ ID NO: 1826991 - RNA, 13 nt, Human herpesvirus 2
ccuucgucuggag

SEQ ID NO: 1826992 - RNA, 17 nt, Human herpesvirus 2
cccgccgggucaccggg

SEQ ID NO: 1826993 - RNA, 18 nt, Human herpesvirus 2
ccgaaggaagccgccccc

SEQ ID NO: 1826994 - RNA, 23 nt, Human herpesvirus 2
gcgcaucuucgccgggugucugc

SEQ ID NO: 1826995 - RNA, 23 nt, Human herpesvirus 2
ccugccacccgaacauggcucgc

SEQ ID NO: 1826996 - RNA, 14 nt, Human herpesvirus 2
ccuggccgcgcgga

SEQ ID NO: 1826997 - RNA, 13 nt, Human herpesvirus 2
acagccccugggg

SEQ ID NO: 1826998 - RNA, 21 nt, Human herpesvirus 2
gacccgggcgagcuggcccug

SEQ ID NO: 1826999 - RNA, 20 nt, Human herpesvirus 2
cgcaguuucaccgccccagc

SEQ ID NO: 1827000 - RNA, 16 nt, Human herpesvirus 2
ccgacgcgcgcgcccc

SEQ ID NO: 1827001 - RNA, 14 nt, Human herpesvirus 2
gccaggggggcagg

SEQ ID NO: 1827002 - RNA, 19 nt, Human herpesvirus 2
gacggcaauaaaagaacag

SEQ ID NO: 1827003 - RNA, 15 nt, Human herpesvirus 2
acacaccgggcuggg

SEQ ID NO: 1827004 - RNA, 15 nt, Human herpesvirus 2
cucccccgcuucugg

SEQ ID NO: 1827005 - RNA, 18 nt, Human herpesvirus 2
gggcuucguggaagagga

SEQ ID NO: 1827006 - RNA, 16 nt, Human herpesvirus 2
acccccaucgggcugc

SEQ ID NO: 1827007 - RNA, 22 nt, Human herpesvirus 2
uccgucguuuggggcuccccga

SEQ ID NO: 1827008 - RNA, 17 nt, Human herpesvirus 2
gacaugauagagggaac

SEQ ID NO: 1827009 - RNA, 20 nt, Human herpesvirus 2
uaugcaagcgggcggggugg

SEQ ID NO: 1827010 - RNA, 20 nt, Human herpesvirus 2
uggcgaguccugggugggug

SEQ ID NO: 1827011 - RNA, 15 nt, Human herpesvirus 2
ccgaacagccccugg

SEQ ID NO: 1827012 - RNA, 18 nt, Human herpesvirus 2
gcacgggcccggggcgaa

SEQ ID NO: 1827013 - RNA, 22 nt, Human herpesvirus 2
gaaagcgaagacgaggccgcca

SEQ ID NO: 1827014 - RNA, 22 nt, Human herpesvirus 2
ggacacggcccccgaauccggg

SEQ ID NO: 1827015 - RNA, 20 nt, Human herpesvirus 2
ccaggaggggggcagugcag

SEQ ID NO: 1827016 - RNA, 23 nt, Human herpesvirus 2
gacgcggggucgagcgcgccagg

SEQ ID NO: 1827017 - RNA, 15 nt, Human herpesvirus 2
uguggcuggaggcaa

SEQ ID NO: 1827018 - RNA, 20 nt, Human herpesvirus 2
cgccgcgggggaggcgcgcg

SEQ ID NO: 1827019 - RNA, 16 nt, Human herpesvirus 2
cugggagcccuccucg

SEQ ID NO: 1827020 - RNA, 17 nt, Human herpesvirus 2
acugcacugccccccuc

SEQ ID NO: 1827021 - RNA, 20 nt, Human herpesvirus 2
gggcguagagcucggccucg

SEQ ID NO: 1827022 - RNA, 23 nt, Human herpesvirus 2
uggugcgucuccggucccuuccc

SEQ ID NO: 1827023 - RNA, 20 nt, Human herpesvirus 2
gcaaccaggcgcugcugcgc

SEQ ID NO: 1827024 - RNA, 23 nt, Human herpesvirus 2
ucacgcaggccgcccccagcagg

SEQ ID NO: 1827025 - RNA, 18 nt, Human herpesvirus 2
gacacacacaccccccuu

SEQ ID NO: 1827026 - RNA, 22 nt, Human herpesvirus 2
ggacgcagcggcguccacgccc

SEQ ID NO: 1827027 - RNA, 20 nt, Human herpesvirus 2
agcggcgagugcucgcagca

SEQ ID NO: 1827028 - RNA, 13 nt, Human herpesvirus 2
ccgaagaggugcu

SEQ ID NO: 1827029 - RNA, 23 nt, Human herpesvirus 2
cucgaacacgagccgcaggaacg

SEQ ID NO: 1827030 - RNA, 14 nt, Human herpesvirus 2
cccggcguggagcg

SEQ ID NO: 1827031 - RNA, 18 nt, Human herpesvirus 2
gaccaaaacggaccccgc

SEQ ID NO: 1827032 - RNA, 14 nt, Human herpesvirus 2
ccuggcgcaccugc

SEQ ID NO: 1827033 - RNA, 23 nt, Human herpesvirus 2
cgcggugcgccccgccggggcgc

SEQ ID NO: 1827034 - RNA, 14 nt, Human herpesvirus 2
ccagauggggcccc

SEQ ID NO: 1827035 - RNA, 17 nt, Human herpesvirus 2
gacgucacgcccgucag

SEQ ID NO: 1827036 - RNA, 22 nt, Human herpesvirus 2
gccccgaacagcaacacacacc

SEQ ID NO: 1827037 - RNA, 20 nt, Human herpesvirus 2
guccugcggcagcgcgccga

SEQ ID NO: 1827038 - RNA, 23 nt, Human herpesvirus 2
cgcuuauaagagcgggcccgggg

SEQ ID NO: 1827039 - RNA, 17 nt, Human herpesvirus 2
cagccccgcaggcaggc

SEQ ID NO: 1827040 - RNA, 16 nt, Human herpesvirus 2
gaaccgguagccgggg

SEQ ID NO: 1827041 - RNA, 16 nt, Human herpesvirus 2
cggccacgccacgcug

SEQ ID NO: 1827042 - RNA, 15 nt, Human herpesvirus 2
cgaaggcggacccag

SEQ ID NO: 1827043 - RNA, 14 nt, Human herpesvirus 2
cggggcauggaccc

SEQ ID NO: 1827044 - RNA, 16 nt, Human herpesvirus 2
accggggaaacaggca

SEQ ID NO: 1827045 - RNA, 12 nt, Human herpesvirus 2
cgaacacugccu

SEQ ID NO: 1827046 - RNA, 15 nt, Human herpesvirus 2
ccgagagcccaggga

SEQ ID NO: 1827047 - RNA, 20 nt, Human herpesvirus 2
gcccccgacccggggcccga

SEQ ID NO: 1827048 - RNA, 19 nt, Human herpesvirus 2
cguauucaccgaccccccc

SEQ ID NO: 1827049 - RNA, 15 nt, Human herpesvirus 2
aggcaccccauccga

SEQ ID NO: 1827050 - RNA, 15 nt, Human herpesvirus 2
ucccguaccccgccg

SEQ ID NO: 1827051 - RNA, 13 nt, Human herpesvirus 2
agaugccagugga

SEQ ID NO: 1827052 - RNA, 14 nt, Human herpesvirus 2
gccgguagugcagg

SEQ ID NO: 1827053 - RNA, 19 nt, Human herpesvirus 2
cucaccuggggcuccugcg

SEQ ID NO: 1827054 - RNA, 21 nt, Human herpesvirus 2
ucugcuuuuggugcgucuccg

SEQ ID NO: 1827055 - RNA, 19 nt, Human herpesvirus 2
ggggcgcgcaccgcugucc

SEQ ID NO: 1827056 - RNA, 15 nt, Human herpesvirus 2
uggaccccccacgcc

SEQ ID NO: 1827057 - RNA, 15 nt, Human herpesvirus 2
cgcccccgacccggg

SEQ ID NO: 1827058 - RNA, 21 nt, Human herpesvirus 2
ugcaucgcaagccacccuggg

SEQ ID NO: 1827059 - RNA, 13 nt, Human herpesvirus 2
gggaggagacagg

SEQ ID NO: 1827060 - RNA, 19 nt, Human herpesvirus 2
cgaccgggcggugcccauc

SEQ ID NO: 1827061 - RNA, 20 nt, Human herpesvirus 2
caauauggcccagcgcaccc

SEQ ID NO: 1827062 - RNA, 19 nt, Human herpesvirus 2
cucucggugaucuuggcgu

SEQ ID NO: 1827063 - RNA, 14 nt, Human herpesvirus 2
caccgcgcccacag

SEQ ID NO: 1827064 - RNA, 23 nt, Human herpesvirus 2
ccccgaauaccaccggcguguga

SEQ ID NO: 1827065 - RNA, 12 nt, Human herpesvirus 2
ggaccacgugca

SEQ ID NO: 1827066 - RNA, 14 nt, Human herpesvirus 2
ccggggagggcagg

SEQ ID NO: 1827067 - RNA, 12 nt, Human herpesvirus 2
cuucuuuccccc

SEQ ID NO: 1827068 - RNA, 21 nt, Human herpesvirus 2
gcgugcggcccugccuccgga

SEQ ID NO: 1827069 - RNA, 22 nt, Human herpesvirus 2
guacagccuacaucaccccagg

SEQ ID NO: 1827070 - RNA, 13 nt, Human herpesvirus 2
gcauaaagggagu

SEQ ID NO: 1827071 - RNA, 22 nt, Human herpesvirus 2
acgaaguggguauacuuuuguc

SEQ ID NO: 1827072 - RNA, 18 nt, Human herpesvirus 2
aaacacaaaccacacgcu

SEQ ID NO: 1827073 - RNA, 17 nt, Human herpesvirus 2
cgcgggggacgggccgc

SEQ ID NO: 1827074 - RNA, 17 nt, Human herpesvirus 2
cgcgggcgacgggcggc

SEQ ID NO: 1827075 - RNA, 12 nt, Human herpesvirus 2
gccucccaacgc

SEQ ID NO: 1827076 - RNA, 13 nt, Human herpesvirus 2
cacgcccccacuc

SEQ ID NO: 1827077 - RNA, 16 nt, Human herpesvirus 2
ccgacauuccccucuc

SEQ ID NO: 1827078 - RNA, 21 nt, Human herpesvirus 2
agucacgcccccugaguugcg

SEQ ID NO: 1827079 - RNA, 22 nt, Human herpesvirus 2
uuggccggggagggcagggccg

SEQ ID NO: 1827080 - RNA, 13 nt, Human herpesvirus 2
gcggggccccggg

SEQ ID NO: 1827081 - RNA, 19 nt, Human herpesvirus 2
gcccauaaacaggccccgc

SEQ ID NO: 1827082 - RNA, 21 nt, Human herpesvirus 2
gugcugggcgcgagccaggca

SEQ ID NO: 1827083 - RNA, 17 nt, Human herpesvirus 2
gccaacgcgggcguccc

SEQ ID NO: 1827084 - RNA, 20 nt, Human herpesvirus 2
cuuucggccaccaccccccu

SEQ ID NO: 1827085 - RNA, 13 nt, Human herpesvirus 2
uggcggccgccgc

SEQ ID NO: 1827086 - RNA, 20 nt, Human herpesvirus 2
ugaacugauugccaucgcgg

SEQ ID NO: 1827087 - RNA, 12 nt, Human herpesvirus 2
ucgccggggacc

SEQ ID NO: 1827088 - RNA, 14 nt, Human herpesvirus 2
gagcugccccgcgg

SEQ ID NO: 1827089 - RNA, 17 nt, Human herpesvirus 2
ccgccccccccaggggg

SEQ ID NO: 1827090 - RNA, 19 nt, Human herpesvirus 2
cggcgugcgcgugggagga

SEQ ID NO: 1827091 - RNA, 15 nt, Human herpesvirus 2
auguguucuccugga

SEQ ID NO: 1827092 - RNA, 19 nt, Human herpesvirus 2
gcauggaccccccacgccc

SEQ ID NO: 1827093 - RNA, 12 nt, Human herpesvirus 2
ucgcggacgagc

SEQ ID NO: 1827094 - RNA, 17 nt, Human herpesvirus 2
cgccgagcgucaggccc

SEQ ID NO: 1827095 - RNA, 16 nt, Human herpesvirus 2
caccaaccuggcacag

SEQ ID NO: 1827096 - RNA, 13 nt, Human herpesvirus 2
ggucaccggggcg

SEQ ID NO: 1827097 - RNA, 17 nt, Human herpesvirus 2
aggaaacgcgcgccccc

SEQ ID NO: 1827098 - RNA, 19 nt, Human herpesvirus 2
ucgcgcaucucuggcucca

SEQ ID NO: 1827099 - RNA, 14 nt, Human herpesvirus 2
acauuccccucucg

SEQ ID NO: 1827100 - RNA, 22 nt, Human herpesvirus 2
gcccgccagugcaucccagacg

SEQ ID NO: 1827101 - RNA, 19 nt, Human herpesvirus 2
guuugggaacacaggcgcu

SEQ ID NO: 1827102 - RNA, 19 nt, Human herpesvirus 2
gaaagacggggaggagaca

SEQ ID NO: 1827103 - RNA, 13 nt, Human herpesvirus 2
ggggagggcggca

SEQ ID NO: 1827104 - RNA, 20 nt, Human herpesvirus 2
gccgcgacaagacccggcgg

SEQ ID NO: 1827105 - RNA, 21 nt, Human herpesvirus 2
auccugggccugugggucugc

SEQ ID NO: 1827106 - RNA, 18 nt, Human herpesvirus 2
ccguuucuucggggggcc

SEQ ID NO: 1827107 - RNA, 16 nt, Human herpesvirus 2
gacuuggugcgccgcc

SEQ ID NO: 1827108 - RNA, 22 nt, Human herpesvirus 2
gcgaccgggcggcgcgcccccc

SEQ ID NO: 1827109 - RNA, 14 nt, Human herpesvirus 2
ggaacgacaaaaaa

SEQ ID NO: 1827110 - RNA, 16 nt, Human herpesvirus 2
cucgggcggcguggcc

SEQ ID NO: 1827111 - RNA, 12 nt, Human herpesvirus 2
ggccccgccggg

SEQ ID NO: 1827112 - RNA, 15 nt, Human herpesvirus 2
caggcccucgcugcu

SEQ ID NO: 1827113 - RNA, 20 nt, Human herpesvirus 2
ugaucuuggcguuauuucca

SEQ ID NO: 1827114 - RNA, 16 nt, Human herpesvirus 2
auugccaucgcggacg

SEQ ID NO: 1827115 - RNA, 18 nt, Human herpesvirus 2
caggggggcaggcgggcc

SEQ ID NO: 1827116 - RNA, 21 nt, Human herpesvirus 2
ggaaagggaacagcgaccaaa

SEQ ID NO: 1827117 - RNA, 18 nt, Human herpesvirus 2
uggcuggaggcaaacacg

SEQ ID NO: 1827118 - RNA, 20 nt, Human herpesvirus 2
ccgggcguuauaagccgccg

SEQ ID NO: 1827119 - RNA, 20 nt, Human herpesvirus 2
gaccgccugccccgcggagg

SEQ ID NO: 1827120 - RNA, 22 nt, Human herpesvirus 2
ggaagcugccucccccccggag

SEQ ID NO: 1827121 - RNA, 23 nt, Human herpesvirus 2
auuaauaaagagugagaaccaac

SEQ ID NO: 1827122 - RNA, 12 nt, Human herpesvirus 2
acacccccuccc

SEQ ID NO: 1827123 - RNA, 22 nt, Human herpesvirus 2
accgcgaccagcguccugcgcg

SEQ ID NO: 1827124 - RNA, 14 nt, Human herpesvirus 2
gucccugcgucgcc

SEQ ID NO: 1827125 - RNA, 20 nt, Human herpesvirus 2
cgagcggcgcaucuucgccg

SEQ ID NO: 1827126 - RNA, 14 nt, Human herpesvirus 2
ccuucagccuggac

SEQ ID NO: 1827127 - RNA, 20 nt, Human herpesvirus 2
gaagcugccucccccccgga

SEQ ID NO: 1827128 - RNA, 20 nt, Human herpesvirus 2
acugcacugccccccuccug

SEQ ID NO: 1827129 - RNA, 13 nt, Human herpesvirus 2
cggggagcuucau

SEQ ID NO: 1827130 - RNA, 21 nt, Human herpesvirus 2
ggugcccaucuacguggccgg

SEQ ID NO: 1827131 - RNA, 17 nt, Human herpesvirus 2
gucgggagcaggacagc

SEQ ID NO: 1827132 - RNA, 11 nt, Human herpesvirus 2
uuuccuccccu

SEQ ID NO: 1827133 - RNA, 19 nt, Human herpesvirus 2
uggagaagggaaaggaaca

SEQ ID NO: 1827134 - RNA, 13 nt, Human herpesvirus 2
cggggggcggugg

SEQ ID NO: 1827135 - RNA, 19 nt, Human herpesvirus 2
ggaacuguguuuccccccc

SEQ ID NO: 1827136 - RNA, 18 nt, Human herpesvirus 2
ucacccccgaguuccccc

SEQ ID NO: 1827137 - RNA, 18 nt, Human herpesvirus 2
cacguucgccccgcagcc

SEQ ID NO: 1827138 - RNA, 16 nt, Human herpesvirus 2
aggcgcgccaccgccc

SEQ ID NO: 1827139 - RNA, 21 nt, Human herpesvirus 2
caggagggcgggccacgucgg

SEQ ID NO: 1827140 - RNA, 22 nt, Human herpesvirus 2
gugcgggaugugucgcggggac

SEQ ID NO: 1827141 - RNA, 17 nt, Human herpesvirus 2
cgagcccguggcccacg

SEQ ID NO: 1827142 - RNA, 19 nt, Human herpesvirus 2
gacccggacugcagccccg

SEQ ID NO: 1827143 - RNA, 17 nt, Human herpesvirus 2
cacgcgcgacugccucc

SEQ ID NO: 1827144 - RNA, 10 nt, Human herpesvirus 2
auaaagagcu

SEQ ID NO: 1827145 - RNA, 17 nt, Human herpesvirus 2
cguggcgccuggggacu

SEQ ID NO: 1827146 - RNA, 15 nt, Human herpesvirus 2
ggcggucggccagca

SEQ ID NO: 1827147 - RNA, 15 nt, Human herpesvirus 2
ccccgcguuccggug

SEQ ID NO: 1827148 - RNA, 11 nt, Human herpesvirus 2
ugacuccuggg

SEQ ID NO: 1827149 - RNA, 14 nt, Human herpesvirus 2
cccgagagcccagg

SEQ ID NO: 1827150 - RNA, 12 nt, Human herpesvirus 2
gugggggcccag

SEQ ID NO: 1827151 - RNA, 16 nt, Human herpesvirus 2
gacaucaaccaccuuc

SEQ ID NO: 1827152 - RNA, 16 nt, Human herpesvirus 2
caggcgucgcucucgg

SEQ ID NO: 1827153 - RNA, 16 nt, Human herpesvirus 2
ccggaaccccucuggg

SEQ ID NO: 1827154 - RNA, 17 nt, Human herpesvirus 2
ccuguggggccugcugu

SEQ ID NO: 1827155 - RNA, 20 nt, Human herpesvirus 2
ucggccagcacgaccaggga

SEQ ID NO: 1827156 - RNA, 20 nt, Human herpesvirus 2
cuuucccuucuccauuccug

SEQ ID NO: 1827157 - RNA, 11 nt, Human herpesvirus 2
cacgacagacc

SEQ ID NO: 1827158 - RNA, 12 nt, Human herpesvirus 2
ggcaagugcagu

SEQ ID NO: 1827159 - RNA, 15 nt, Human herpesvirus 2
ccgagggcagguccc

SEQ ID NO: 1827160 - RNA, 13 nt, Human herpesvirus 2
gagagcccaggga

SEQ ID NO: 1827161 - RNA, 17 nt, Human herpesvirus 2
uggcaccguaucagcac

SEQ ID NO: 1827162 - RNA, 20 nt, Human herpesvirus 2
caccagcucgggggccagga

SEQ ID NO: 1827163 - RNA, 13 nt, Human herpesvirus 2
ccgggggccuggu

SEQ ID NO: 1827164 - RNA, 14 nt, Human herpesvirus 2
aggggcaccaaaaa

SEQ ID NO: 1827165 - RNA, 15 nt, Human herpesvirus 2
ucucugccuccuucg

SEQ ID NO: 1827166 - RNA, 16 nt, Human herpesvirus 2
gcgccgucgucgcccg

SEQ ID NO: 1827167 - RNA, 17 nt, Human herpesvirus 2
gggccggguugguguuu

SEQ ID NO: 1827168 - RNA, 21 nt, Human herpesvirus 2
gguggugauggggguccuggu

SEQ ID NO: 1827169 - RNA, 16 nt, Human herpesvirus 2
gucgggcacaggcccg

SEQ ID NO: 1827170 - RNA, 21 nt, Human herpesvirus 2
ccugcgaggugcgccagguca

SEQ ID NO: 1827171 - RNA, 15 nt, Human herpesvirus 2
cacccccgcgccgcc

SEQ ID NO: 1827172 - RNA, 15 nt, Human herpesvirus 2
aaauaaaaagacacc

SEQ ID NO: 1827173 - RNA, 14 nt, Human herpesvirus 2
gguccccgaacaaa

SEQ ID NO: 1827174 - RNA, 14 nt, Human herpesvirus 2
ggcgaccgccccgc

SEQ ID NO: 1827175 - RNA, 22 nt, Human herpesvirus 2
cgcgucguccgucacgagcccc

SEQ ID NO: 1827176 - RNA, 20 nt, Human herpesvirus 2
gggccucccgcaagagccug

SEQ ID NO: 1827177 - RNA, 13 nt, Human herpesvirus 2
cgcacccuugccc

SEQ ID NO: 1827178 - RNA, 21 nt, Human herpesvirus 2
cgcucuccgugccccugguga

SEQ ID NO: 1827179 - RNA, 21 nt, Human herpesvirus 2
cccagggggcggcgccggcca

SEQ ID NO: 1827180 - RNA, 16 nt, Human herpesvirus 2
cgggcguuccuucccu

SEQ ID NO: 1827181 - RNA, 15 nt, Human herpesvirus 2
gcuguaucuggucug

SEQ ID NO: 1827182 - RNA, 19 nt, Human herpesvirus 2
gggcugggagcccuccucg

SEQ ID NO: 1827183 - RNA, 15 nt, Human herpesvirus 2
aguuugagcagccgc

SEQ ID NO: 1827184 - RNA, 21 nt, Human herpesvirus 2
cuucccgguaugguaauuaga

SEQ ID NO: 1827185 - RNA, 13 nt, Human herpesvirus 2
cgcgagggcccgg

SEQ ID NO: 1827186 - RNA, 20 nt, Human herpesvirus 2
ucggugccccccaucucugu

SEQ ID NO: 1827187 - RNA, 22 nt, Human herpesvirus 2
gaccaccgcggacagccagggc

SEQ ID NO: 1827188 - RNA, 14 nt, Human herpesvirus 2
cucuguuccuuucc

SEQ ID NO: 1827189 - RNA, 22 nt, Human herpesvirus 2
uugcacaaaaagacgcggcccu

SEQ ID NO: 1827190 - RNA, 20 nt, Human herpesvirus 2
guccggcggccaccccgccg

SEQ ID NO: 1827191 - RNA, 20 nt, Human herpesvirus 2
caacgagcugccccgcgguc

SEQ ID NO: 1827192 - RNA, 15 nt, Human herpesvirus 2
caccgccccagcacc

SEQ ID NO: 1827193 - RNA, 14 nt, Human herpesvirus 2
caggcgcugcugcg

SEQ ID NO: 1827194 - RNA, 19 nt, Human herpesvirus 2
cagccuggaccagaccgug

SEQ ID NO: 1827195 - RNA, 15 nt, Human herpesvirus 2
cagcacgaccaggga

SEQ ID NO: 1827196 - RNA, 19 nt, Human herpesvirus 2
ccgcagggauaggggcagg

SEQ ID NO: 1827197 - RNA, 19 nt, Human herpesvirus 2
gggcguccugcggcagcgc

SEQ ID NO: 1827198 - RNA, 15 nt, Human herpesvirus 2
cgcuggccccucugc

SEQ ID NO: 1827199 - RNA, 19 nt, Human herpesvirus 2
ccgcuguggcccuggcgga

SEQ ID NO: 1827200 - RNA, 19 nt, Human herpesvirus 2
gaccugggggauuguggga

SEQ ID NO: 1827201 - RNA, 15 nt, Human herpesvirus 2
gugcgccuuuaagac

SEQ ID NO: 1827202 - RNA, 17 nt, Human herpesvirus 2
ccagcucgggggccagg

SEQ ID NO: 1827203 - RNA, 22 nt, Human herpesvirus 2
cgacggcaugcagcccagagga

SEQ ID NO: 1827204 - RNA, 21 nt, Human herpesvirus 2
cgugcugggcgcgagccaggc

SEQ ID NO: 1827205 - RNA, 11 nt, Human herpesvirus 2
gcgcugguggc

SEQ ID NO: 1827206 - RNA, 12 nt, Human herpesvirus 2
cccgccgcagcu

SEQ ID NO: 1827207 - RNA, 14 nt, Human herpesvirus 2
cagcgcggacgcgg

SEQ ID NO: 1827208 - RNA, 18 nt, Human herpesvirus 2
gaccaccccaaaaaccgc

SEQ ID NO: 1827209 - RNA, 20 nt, Human herpesvirus 2
gcagcguaacgcacccccgg

SEQ ID NO: 1827210 - RNA, 14 nt, Human herpesvirus 2
cccggcccgggccc

SEQ ID NO: 1827211 - RNA, 15 nt, Human herpesvirus 2
gacccaacagccuag

SEQ ID NO: 1827212 - RNA, 21 nt, Human herpesvirus 2
cccaccggauaaauguggggc

SEQ ID NO: 1827213 - RNA, 15 nt, Human herpesvirus 2
cggccccacggucag

SEQ ID NO: 1827214 - RNA, 12 nt, Human herpesvirus 2
accgguagccgg

SEQ ID NO: 1827215 - RNA, 20 nt, Human herpesvirus 2
aacacguucgccccgcagcc

SEQ ID NO: 1827216 - RNA, 17 nt, Human herpesvirus 2
aacgcgaccgucgccgc

SEQ ID NO: 1827217 - RNA, 20 nt, Human herpesvirus 2
ugggccgacgugccggggaa

SEQ ID NO: 1827218 - RNA, 22 nt, Human herpesvirus 2
cugaaccgcuggcuggagaccg

SEQ ID NO: 1827219 - RNA, 21 nt, Human herpesvirus 2
cgcgccgccgcgcgggcccgg

SEQ ID NO: 1827220 - RNA, 17 nt, Human herpesvirus 2
auccguggguuagaaaa

SEQ ID NO: 1827221 - RNA, 12 nt, Human herpesvirus 2
cccccgggggug

SEQ ID NO: 1827222 - RNA, 14 nt, Human herpesvirus 2
caucgggcugcugg

SEQ ID NO: 1827223 - RNA, 13 nt, Human herpesvirus 2
uccccgccccccc

SEQ ID NO: 1827224 - RNA, 14 nt, Human herpesvirus 2
agucucuuggggaa

SEQ ID NO: 1827225 - RNA, 23 nt, Human herpesvirus 2
agggcggccucggccggcggagc

SEQ ID NO: 1827226 - RNA, 19 nt, Human herpesvirus 2
cggcaauaaaagaacagaa

SEQ ID NO: 1827227 - RNA, 17 nt, Human herpesvirus 2
ccgcaccggggcggcga

SEQ ID NO: 1827228 - RNA, 17 nt, Human herpesvirus 2
ccgagcuccgggggacu

SEQ ID NO: 1827229 - RNA, 19 nt, Human herpesvirus 2
cgucugcccguggguggcc

SEQ ID NO: 1827230 - RNA, 22 nt, Human herpesvirus 2
gagccccgcgaccaccaaggcc

SEQ ID NO: 1827231 - RNA, 20 nt, Human herpesvirus 2
gccuguuugcaacgagcugc

SEQ ID NO: 1827232 - RNA, 13 nt, Human herpesvirus 2
ugcgccggcacca

SEQ ID NO: 1827233 - RNA, 20 nt, Human herpesvirus 2
ugcacgccaucgcucccagg

SEQ ID NO: 1827234 - RNA, 15 nt, Human herpesvirus 2
cgcccgaaaccagag

SEQ ID NO: 1827235 - RNA, 21 nt, Human herpesvirus 2
cccucugcuuuuggugcgucu

SEQ ID NO: 1827236 - RNA, 15 nt, Human herpesvirus 2
uggggaaaucuauug

SEQ ID NO: 1827237 - RNA, 22 nt, Human herpesvirus 2
gucaggcgcgcgguaugcgugg

SEQ ID NO: 1827238 - RNA, 14 nt, Human herpesvirus 2
ggccugcugugggu

SEQ ID NO: 1827239 - RNA, 22 nt, Human herpesvirus 2
gaacagcucgcggacgagcccg

SEQ ID NO: 1827240 - RNA, 16 nt, Human herpesvirus 2
cugggcgcgagccagg

SEQ ID NO: 1827241 - RNA, 17 nt, Human herpesvirus 2
uggacgcgccucccggg

SEQ ID NO: 1827242 - RNA, 15 nt, Human herpesvirus 2
cgcggaccggccccc

SEQ ID NO: 1827243 - RNA, 14 nt, Human herpesvirus 2
ggaugauggggacg

SEQ ID NO: 1827244 - RNA, 21 nt, Human herpesvirus 2
cgccgaccgccccccccggcg

SEQ ID NO: 1827245 - RNA, 14 nt, Human herpesvirus 2
ccgaguucccccgg

SEQ ID NO: 1827246 - RNA, 15 nt, Human herpesvirus 2
accccuuugacuccu

SEQ ID NO: 1827247 - RNA, 20 nt, Human herpesvirus 2
gcgaugacggcaauaaaaga

SEQ ID NO: 1827248 - RNA, 20 nt, Human herpesvirus 2
ccgcugugccagguggcccu

SEQ ID NO: 1827249 - RNA, 16 nt, Human herpesvirus 2
gcugcggggaccagcc

SEQ ID NO: 1827250 - RNA, 20 nt, Human herpesvirus 2
cuuggaggcccucugggaca

SEQ ID NO: 1827251 - RNA, 23 nt, Human herpesvirus 2
gccgucgcacgcgcgcaggcugg

SEQ ID NO: 1827252 - RNA, 20 nt, Human herpesvirus 2
agacauggggaacccccaga

SEQ ID NO: 1827253 - RNA, 10 nt, Human herpesvirus 2
ggacugggcc

SEQ ID NO: 1827254 - RNA, 14 nt, Human herpesvirus 2
gcucgccagcgacc

SEQ ID NO: 1827255 - RNA, 14 nt, Human herpesvirus 2
agcacgaccaggga

SEQ ID NO: 1827256 - RNA, 17 nt, Human herpesvirus 2
gggcccggacuccgccc

SEQ ID NO: 1827257 - RNA, 16 nt, Human herpesvirus 2
ggagugcgcucuucgc

SEQ ID NO: 1827258 - RNA, 18 nt, Human herpesvirus 2
acaccucccagugccccg

SEQ ID NO: 1827259 - RNA, 13 nt, Human herpesvirus 2
aggcgaccccgcc

SEQ ID NO: 1827260 - RNA, 21 nt, Human herpesvirus 2
gggcccacagcugcgccagaa

SEQ ID NO: 1827261 - RNA, 18 nt, Human herpesvirus 2
ucccgguaugguaauuag

SEQ ID NO: 1827262 - RNA, 19 nt, Human herpesvirus 2
caccggaaaauccucggcc

SEQ ID NO: 1827263 - RNA, 21 nt, Human herpesvirus 2
uaacagcuacccgcauccgca

SEQ ID NO: 1827264 - RNA, 18 nt, Human herpesvirus 2
gggggcgggggugccgug

SEQ ID NO: 1827265 - RNA, 17 nt, Human herpesvirus 2
cgcgggcaggccgcggc

SEQ ID NO: 1827266 - RNA, 14 nt, Human herpesvirus 2
cuuuccuuuccccc

SEQ ID NO: 1827267 - RNA, 16 nt, Human herpesvirus 2
ggaucgggggcugcug

SEQ ID NO: 1827268 - RNA, 17 nt, Human herpesvirus 2
cuccgcgggucccuucc

SEQ ID NO: 1827269 - RNA, 18 nt, Human herpesvirus 2
gggcggcaagaccugccc

SEQ ID NO: 1827270 - RNA, 21 nt, Human herpesvirus 2
cggcgauggccgcgcgcgugu

SEQ ID NO: 1827271 - RNA, 23 nt, Human herpesvirus 2
cgggcacucuggcguccccaggc

SEQ ID NO: 1827272 - RNA, 20 nt, Human herpesvirus 2
cgccauccucaaacaggcca

SEQ ID NO: 1827273 - RNA, 15 nt, Human herpesvirus 2
gacccggcggcgguc

SEQ ID NO: 1827274 - RNA, 12 nt, Human herpesvirus 2
gggggcgggcac

SEQ ID NO: 1827275 - RNA, 13 nt, Human herpesvirus 2
caaaaaccagguc

SEQ ID NO: 1827276 - RNA, 14 nt, Human herpesvirus 2
cggaacgccccggg

SEQ ID NO: 1827277 - RNA, 11 nt, Human herpesvirus 2
gcacacaugau

SEQ ID NO: 1827278 - RNA, 14 nt, Human herpesvirus 2
uccggucccuuccc

SEQ ID NO: 1827279 - RNA, 14 nt, Human herpesvirus 2
ggccccggccgccu

SEQ ID NO: 1827280 - RNA, 13 nt, Human herpesvirus 2
gggccgcccggag

SEQ ID NO: 1827281 - RNA, 18 nt, Human herpesvirus 2
uccgugcuggggaaaucu

SEQ ID NO: 1827282 - RNA, 17 nt, Human herpesvirus 2
cgagccgcugugccagg

SEQ ID NO: 1827283 - RNA, 20 nt, Human herpesvirus 2
gugucguugggcggcccccg

SEQ ID NO: 1827284 - RNA, 15 nt, Human herpesvirus 2
cgcugccggacgcgg

SEQ ID NO: 1827285 - RNA, 16 nt, Human herpesvirus 2
acgaggcccacccccc

SEQ ID NO: 1827286 - RNA, 11 nt, Human herpesvirus 2
cguuuggccaa

SEQ ID NO: 1827287 - RNA, 14 nt, Human herpesvirus 2
gcgugcggcccugc

SEQ ID NO: 1827288 - RNA, 11 nt, Human herpesvirus 2
accagccgccu

SEQ ID NO: 1827289 - RNA, 13 nt, Human herpesvirus 2
cguucggacggcc

SEQ ID NO: 1827290 - RNA, 16 nt, Human herpesvirus 2
cccguacuacccuuuc

SEQ ID NO: 1827291 - RNA, 16 nt, Human herpesvirus 2
acacugaggaacuggg

SEQ ID NO: 1827292 - RNA, 14 nt, Human herpesvirus 2
cccuguuggagccg

SEQ ID NO: 1827293 - RNA, 12 nt, Human herpesvirus 2
ggccgaggcgcc

SEQ ID NO: 1827294 - RNA, 16 nt, Human herpesvirus 2
gguccgcggggggcac

SEQ ID NO: 1827295 - RNA, 20 nt, Human herpesvirus 2
uaggcguugcguuggggcac

SEQ ID NO: 1827296 - RNA, 15 nt, Human herpesvirus 2
agcgcggccgugggc

SEQ ID NO: 1827297 - RNA, 13 nt, Human herpesvirus 2
ccuggggcugucg

SEQ ID NO: 1827298 - RNA, 20 nt, Human herpesvirus 2
cuggccguccggggggacgc

SEQ ID NO: 1827299 - RNA, 21 nt, Human herpesvirus 2
aagcccgaacggaaggccucc

SEQ ID NO: 1827300 - RNA, 15 nt, Human herpesvirus 2
cguaugucuguuuca

SEQ ID NO: 1827301 - RNA, 19 nt, Human herpesvirus 2
ggcacagugggugcucggg

SEQ ID NO: 1827302 - RNA, 21 nt, Human herpesvirus 2
cacccaccccccccccaacuc

SEQ ID NO: 1827303 - RNA, 23 nt, Human herpesvirus 2
cguuuccuccgcgggucccuucc

SEQ ID NO: 1827304 - RNA, 12 nt, Human herpesvirus 2
ccuacgcacccu

SEQ ID NO: 1827305 - RNA, 13 nt, Human herpesvirus 2
gcccgccccaggg

SEQ ID NO: 1827306 - RNA, 22 nt, Human herpesvirus 2
guccucaccgagccgcugugcc

SEQ ID NO: 1827307 - RNA, 19 nt, Human herpesvirus 2
ggaugugucgcggggacag

SEQ ID NO: 1827308 - RNA, 15 nt, Human herpesvirus 2
cgaccccgccccccg

SEQ ID NO: 1827309 - RNA, 16 nt, Human herpesvirus 2
cgggcugggggucccg

SEQ ID NO: 1827310 - RNA, 16 nt, Human herpesvirus 2
gcaucucuggcuccag

SEQ ID NO: 1827311 - RNA, 16 nt, Human herpesvirus 2
gccgccgcgcgggccc

SEQ ID NO: 1827312 - RNA, 19 nt, Human herpesvirus 2
uuggacgaucccgggcccu

SEQ ID NO: 1827313 - RNA, 20 nt, Human herpesvirus 2
aggaggggggcagugcagua

SEQ ID NO: 1827314 - RNA, 16 nt, Human herpesvirus 2
gcuccucagcgcggcc

SEQ ID NO: 1827315 - RNA, 15 nt, Human herpesvirus 2
aucccccggaaggac

SEQ ID NO: 1827316 - RNA, 22 nt, Human herpesvirus 2
cuagucuccgaucugccccgac

SEQ ID NO: 1827317 - RNA, 16 nt, Human herpesvirus 2
ccagacggcgggaccc

SEQ ID NO: 1827318 - RNA, 20 nt, Human herpesvirus 2
cgcaugggccgccagcaguc

SEQ ID NO: 1827319 - RNA, 19 nt, Human herpesvirus 2
ugcgacggcgucucccggg

SEQ ID NO: 1827320 - RNA, 14 nt, Human herpesvirus 2
acgagcugccccgc

SEQ ID NO: 1827321 - RNA, 15 nt, Human herpesvirus 2
augcggggcgggguu

SEQ ID NO: 1827322 - RNA, 16 nt, Human herpesvirus 2
accaccccccuccucc

SEQ ID NO: 1827323 - RNA, 20 nt, Human herpesvirus 2
ucgcuuuccacacccccucc

SEQ ID NO: 1827324 - RNA, 19 nt, Human herpesvirus 2
aggcgacgccaggcccccc

SEQ ID NO: 1827325 - RNA, 17 nt, Human herpesvirus 2
ggaugauggauugauug

SEQ ID NO: 1827326 - RNA, 16 nt, Human herpesvirus 2
ccguaucagcacccca

SEQ ID NO: 1827327 - RNA, 13 nt, Human herpesvirus 2
uccaccaccagca

SEQ ID NO: 1827328 - RNA, 21 nt, Human herpesvirus 2
gacgcuguuguuucugggccc

SEQ ID NO: 1827329 - RNA, 17 nt, Human herpesvirus 2
caauaaaccugugacgu

SEQ ID NO: 1827330 - RNA, 14 nt, Human herpesvirus 2
acuagaaaaacaaa

SEQ ID NO: 1827331 - RNA, 22 nt, Human herpesvirus 2
gcggucgucguccucacggcca

SEQ ID NO: 1827332 - RNA, 16 nt, Human herpesvirus 2
aggugcaguugauucg

SEQ ID NO: 1827333 - RNA, 13 nt, Human herpesvirus 2
ggcguggacgccg

SEQ ID NO: 1827334 - RNA, 15 nt, Human herpesvirus 2
cacacaggcccacca

SEQ ID NO: 1827335 - RNA, 14 nt, Human herpesvirus 2
caagccacccuggg

SEQ ID NO: 1827336 - RNA, 19 nt, Human herpesvirus 2
ggcaccgcgggaggaaggc

SEQ ID NO: 1827337 - RNA, 19 nt, Human herpesvirus 2
gacgacgaccaugggcccc

SEQ ID NO: 1827338 - RNA, 11 nt, Human herpesvirus 2
aaucacggcac

SEQ ID NO: 1827339 - RNA, 13 nt, Human herpesvirus 2
gcaggcaggcguc

SEQ ID NO: 1827340 - RNA, 21 nt, Human herpesvirus 2
gcccucucgaucccgaagcca

SEQ ID NO: 1827341 - RNA, 20 nt, Human herpesvirus 2
cccuuucuuuucccccuacc

SEQ ID NO: 1827342 - RNA, 22 nt, Human herpesvirus 2
gccucccgcaagagccugccgu

SEQ ID NO: 1827343 - RNA, 18 nt, Human herpesvirus 2
gauucucaccuggggcuc

SEQ ID NO: 1827344 - RNA, 17 nt, Human herpesvirus 2
acgggggucccgccucc

SEQ ID NO: 1827345 - RNA, 18 nt, Human herpesvirus 2
ccaacucgcggcaccgcg

SEQ ID NO: 1827346 - RNA, 19 nt, Human herpesvirus 2
cuggccuugcccccacccc

SEQ ID NO: 1827347 - RNA, 14 nt, Human herpesvirus 2
ggggccccagggcu

SEQ ID NO: 1827348 - RNA, 15 nt, Human herpesvirus 2
ggcguuauuuccaaa

SEQ ID NO: 1827349 - RNA, 17 nt, Human herpesvirus 2
aggcgaccccgcccccc

SEQ ID NO: 1827350 - RNA, 20 nt, Human herpesvirus 2
uaccccgccggucucccucu

SEQ ID NO: 1827351 - RNA, 19 nt, Human herpesvirus 2
ccucagcauccugaaccgc

SEQ ID NO: 1827352 - RNA, 16 nt, Human herpesvirus 2
gcaccggacgcgcacg

SEQ ID NO: 1827353 - RNA, 16 nt, Human herpesvirus 2
agcggcguccacgccc

SEQ ID NO: 1827354 - RNA, 14 nt, Human herpesvirus 2
gccgcugugccagg

SEQ ID NO: 1827355 - RNA, 18 nt, Human herpesvirus 2
ccuccgcgggucccuucc

SEQ ID NO: 1827356 - RNA, 23 nt, Human herpesvirus 2
cagcugguucauacccaauggcu

SEQ ID NO: 1827357 - RNA, 15 nt, Human herpesvirus 2
ccgagcgcgggggac

SEQ ID NO: 1827358 - RNA, 22 nt, Human herpesvirus 2
gcgcuucaucgucgccgacucc

SEQ ID NO: 1827359 - RNA, 15 nt, Human herpesvirus 2
ccagcgcacccuggc

SEQ ID NO: 1827360 - RNA, 22 nt, Human herpesvirus 2
cccccuuuacgccuuuccuccc

SEQ ID NO: 1827361 - RNA, 15 nt, Human herpesvirus 2
gccgccuccccgcug

SEQ ID NO: 1827362 - RNA, 18 nt, Human herpesvirus 2
agcugaugucccgcaucu

SEQ ID NO: 1827363 - RNA, 13 nt, Human herpesvirus 2
aaggcgcugcgcc

SEQ ID NO: 1827364 - RNA, 21 nt, Human herpesvirus 2
augcgacggcgucucccgggg

SEQ ID NO: 1827365 - RNA, 22 nt, Human herpesvirus 2
gaggaggcggcgccugcgcccc

SEQ ID NO: 1827366 - RNA, 15 nt, Human herpesvirus 2
accccaccuucgccu

SEQ ID NO: 1827367 - RNA, 19 nt, Human herpesvirus 2
cuguuuuuacgggccccgg

SEQ ID NO: 1827368 - RNA, 14 nt, Human herpesvirus 2
cuggcggccccugu

SEQ ID NO: 1827369 - RNA, 14 nt, Human herpesvirus 2
cgagcgguuggagg

SEQ ID NO: 1827370 - RNA, 13 nt, Human herpesvirus 2
accccgcugcugu

SEQ ID NO: 1827371 - RNA, 15 nt, Human herpesvirus 2
auaacgcgcccgcgu

SEQ ID NO: 1827372 - RNA, 21 nt, Human herpesvirus 2
gguggguguggucguggugcu

SEQ ID NO: 1827373 - RNA, 18 nt, Human herpesvirus 2
ucggccggcggagccccg

SEQ ID NO: 1827374 - RNA, 23 nt, Human herpesvirus 2
cgaauccggggcgugcugugccc

SEQ ID NO: 1827375 - RNA, 14 nt, Human herpesvirus 2
gccaggccccccgg

SEQ ID NO: 1827376 - RNA, 14 nt, Human herpesvirus 2
gccccccccccacc

SEQ ID NO: 1827377 - RNA, 22 nt, Human herpesvirus 2
cgcucugucccccgggcagccg

SEQ ID NO: 1827378 - RNA, 21 nt, Human herpesvirus 2
ucgcaccccaccccugugugc

SEQ ID NO: 1827379 - RNA, 19 nt, Human herpesvirus 2
acgcgcgcaggcuggagcu

SEQ ID NO: 1827380 - RNA, 14 nt, Human herpesvirus 2
gucccccggacccc

SEQ ID NO: 1827381 - RNA, 17 nt, Human herpesvirus 2
ccgagccgcugugccag

SEQ ID NO: 1827382 - RNA, 14 nt, Human herpesvirus 2
auccggccucgggu

SEQ ID NO: 1827383 - RNA, 17 nt, Human herpesvirus 2
cuccggucccuucccca

SEQ ID NO: 1827384 - RNA, 15 nt, Human herpesvirus 2
acgcgcgcgcccccg

SEQ ID NO: 1827385 - RNA, 13 nt, Human herpesvirus 2
uucagggaaacag

SEQ ID NO: 1827386 - RNA, 19 nt, Human herpesvirus 2
cccagcuuucccuccaccc

SEQ ID NO: 1827387 - RNA, 16 nt, Human herpesvirus 2
aaggaagccgcccccc

SEQ ID NO: 1827388 - RNA, 23 nt, Human herpesvirus 2
ccagacgaagucacccggguccc

SEQ ID NO: 1827389 - RNA, 19 nt, Human herpesvirus 2
cacgaccaaaacggacccc

SEQ ID NO: 1827390 - RNA, 23 nt, Human herpesvirus 2
ggcguuauuuccaaacagggccu

SEQ ID NO: 1827391 - RNA, 13 nt, Human herpesvirus 2
gguggggggcgag

SEQ ID NO: 1827392 - RNA, 21 nt, Human herpesvirus 2
ucgggaggggaugggggcgcg

SEQ ID NO: 1827393 - RNA, 22 nt, Human herpesvirus 2
ccccgguuggggcgggcagccg

SEQ ID NO: 1827394 - RNA, 18 nt, Human herpesvirus 2
guccugcggcagcgcgcc

SEQ ID NO: 1827395 - RNA, 21 nt, Human herpesvirus 2
gcuccagguacugcugcacgu

SEQ ID NO: 1827396 - RNA, 16 nt, Human herpesvirus 2
ccgcggacagccaggg

SEQ ID NO: 1827397 - RNA, 19 nt, Human herpesvirus 2
cuuggggaaaucuauugac

SEQ ID NO: 1827398 - RNA, 19 nt, Human herpesvirus 2
ccgcaggcgcgccaccgcc

SEQ ID NO: 1827399 - RNA, 14 nt, Human herpesvirus 2
ucggaggggugagg

SEQ ID NO: 1827400 - RNA, 12 nt, Human herpesvirus 2
ccagccccgcag

SEQ ID NO: 1827401 - RNA, 20 nt, Human herpesvirus 2
gcucccguguaccucugggc

SEQ ID NO: 1827402 - RNA, 19 nt, Human herpesvirus 2
gucgcgggcgggagcggcg

SEQ ID NO: 1827403 - RNA, 14 nt, Human herpesvirus 2
cucguggggcugga

SEQ ID NO: 1827404 - RNA, 24 nt, Human herpesvirus 2
gcccacuuucccccccacuccacc

SEQ ID NO: 1827405 - RNA, 15 nt, Human herpesvirus 2
cucgcgucgggccag

SEQ ID NO: 1827406 - RNA, 15 nt, Human herpesvirus 2
gcguugcgcuuuccg

SEQ ID NO: 1827407 - RNA, 13 nt, Human herpesvirus 2
ugcgagaucuucc

SEQ ID NO: 1827408 - RNA, 15 nt, Human herpesvirus 2
cagaggacgccggcc

SEQ ID NO: 1827409 - RNA, 16 nt, Human herpesvirus 2
ccgaccagcgccgggu

SEQ ID NO: 1827410 - RNA, 20 nt, Human herpesvirus 2
agugggggggggggacggac

SEQ ID NO: 1827411 - RNA, 18 nt, Human herpesvirus 2
cgcgcuguggcgcgcccc

SEQ ID NO: 1827412 - RNA, 11 nt, Human herpesvirus 2
ggccugguggc

SEQ ID NO: 1827413 - RNA, 20 nt, Human herpesvirus 2
gggggacccgacccuguggc

SEQ ID NO: 1827414 - RNA, 16 nt, Human herpesvirus 2
ugggcggcccccggcc

SEQ ID NO: 1827415 - RNA, 18 nt, Human herpesvirus 2
cgccucgggggcaggggg

SEQ ID NO: 1827416 - RNA, 14 nt, Human herpesvirus 2
gucccuuccccacc

SEQ ID NO: 1827417 - RNA, 19 nt, Human herpesvirus 2
ucgcggccgcccgcgccgc

SEQ ID NO: 1827418 - RNA, 22 nt, Human herpesvirus 2
cccccggccuuugcuuccucgc

SEQ ID NO: 1827419 - RNA, 21 nt, Human herpesvirus 2
ggaacuguguuucccccccua

SEQ ID NO: 1827420 - RNA, 15 nt, Human herpesvirus 2
acgacccgccucggg

SEQ ID NO: 1827421 - RNA, 21 nt, Human herpesvirus 2
cacggugcgugcggcccugcc

SEQ ID NO: 1827422 - RNA, 13 nt, Human herpesvirus 2
caguaacggggga

SEQ ID NO: 1827423 - RNA, 15 nt, Human herpesvirus 2
ccuuucccccuuccc

SEQ ID NO: 1827424 - RNA, 18 nt, Human herpesvirus 2
ccaggaggggggcagugc

SEQ ID NO: 1827425 - RNA, 15 nt, Human herpesvirus 2
ucgugggggagugcg

SEQ ID NO: 1827426 - RNA, 11 nt, Human herpesvirus 2
cgcgcagcgca

SEQ ID NO: 1827427 - RNA, 17 nt, Human herpesvirus 2
cccugccccgcccccuc

SEQ ID NO: 1827428 - RNA, 16 nt, Human herpesvirus 2
gugcugcugagcccug

SEQ ID NO: 1827429 - RNA, 18 nt, Human herpesvirus 2
ccuucgccgacgccuucc

SEQ ID NO: 1827430 - RNA, 11 nt, Human herpesvirus 2
cccagggcacc

SEQ ID NO: 1827431 - RNA, 19 nt, Human herpesvirus 2
cgccgucgcuaccgcggcu

SEQ ID NO: 1827432 - RNA, 23 nt, Human herpesvirus 2
uuuccuccgcgggucccuuccca

SEQ ID NO: 1827433 - RNA, 13 nt, Human herpesvirus 2
ggaggggggagau

SEQ ID NO: 1827434 - RNA, 17 nt, Human herpesvirus 2
cgagcguaucggccagg

SEQ ID NO: 1827435 - RNA, 23 nt, Human herpesvirus 2
ccggggggacgcgagccuguguc

SEQ ID NO: 1827436 - RNA, 14 nt, Human herpesvirus 2
cuguacgacagcgg

SEQ ID NO: 1827437 - RNA, 18 nt, Human herpesvirus 2
accgcggcuucuucgccg

SEQ ID NO: 1827438 - RNA, 15 nt, Human herpesvirus 2
cuggccgugcugggc

SEQ ID NO: 1827439 - RNA, 17 nt, Human herpesvirus 2
cuccccgaaagccacca

SEQ ID NO: 1827440 - RNA, 19 nt, Human herpesvirus 2
ccgugcugggcgcgagcca

SEQ ID NO: 1827441 - RNA, 16 nt, Human herpesvirus 2
ccuaccugcgcgugca

SEQ ID NO: 1827442 - RNA, 22 nt, Human herpesvirus 2
guaugucuguuucaauaaaaag

SEQ ID NO: 1827443 - RNA, 14 nt, Human herpesvirus 2
ggccgggacggcgc

SEQ ID NO: 1827444 - RNA, 13 nt, Human herpesvirus 2
cucuggcuccagg

SEQ ID NO: 1827445 - RNA, 23 nt, Human herpesvirus 2
uuccccgcucccguguaccucug

SEQ ID NO: 1827446 - RNA, 13 nt, Human herpesvirus 2
ccgcucccgccuc

SEQ ID NO: 1827447 - RNA, 20 nt, Human herpesvirus 2
caucgucgccgacuccagga

SEQ ID NO: 1827448 - RNA, 19 nt, Human herpesvirus 2
cccggucccccggaccccg

SEQ ID NO: 1827449 - RNA, 17 nt, Human herpesvirus 2
agcugccucccccccgg

SEQ ID NO: 1827450 - RNA, 13 nt, Human herpesvirus 2
cgccccccucggc

SEQ ID NO: 1827451 - RNA, 17 nt, Human herpesvirus 2
cguccggcuggcggcgc

SEQ ID NO: 1827452 - RNA, 17 nt, Human herpesvirus 2
gccgcuguggcccuggc

SEQ ID NO: 1827453 - RNA, 12 nt, Human herpesvirus 2
guugucugucug

SEQ ID NO: 1827454 - RNA, 22 nt, Human herpesvirus 2
ggcgagcuggcccuggacccag

SEQ ID NO: 1827455 - RNA, 14 nt, Human herpesvirus 2
cggcgagggcggcc

SEQ ID NO: 1827456 - RNA, 15 nt, Human herpesvirus 2
ggcgcgcccccgccg

SEQ ID NO: 1827457 - RNA, 12 nt, Human herpesvirus 2
gucccggccgcc

SEQ ID NO: 1827458 - RNA, 12 nt, Human herpesvirus 2
ccacagccaccu

SEQ ID NO: 1827459 - RNA, 20 nt, Human herpesvirus 2
ccucgggggcagggggaggu

SEQ ID NO: 1827460 - RNA, 18 nt, Human herpesvirus 2
guuccaccgcucacccac

SEQ ID NO: 1827461 - RNA, 20 nt, Human herpesvirus 2
gagaguucaauagauuuccc

SEQ ID NO: 1827462 - RNA, 15 nt, Human herpesvirus 2
cccucgccgccuucc

SEQ ID NO: 1827463 - RNA, 17 nt, Human herpesvirus 2
uggggugggggaagaag

SEQ ID NO: 1827464 - RNA, 19 nt, Human herpesvirus 2
ucuguuuugguugguucuc

SEQ ID NO: 1827465 - RNA, 12 nt, Human herpesvirus 2
ggccccucugcu

SEQ ID NO: 1827466 - RNA, 12 nt, Human herpesvirus 2
cgccgccuuccg

SEQ ID NO: 1827467 - RNA, 21 nt, Human herpesvirus 2
uugggggggguguguguuuuc

SEQ ID NO: 1827468 - RNA, 20 nt, Human herpesvirus 2
ccgcggcccugagccgcgcg

SEQ ID NO: 1827469 - RNA, 15 nt, Human herpesvirus 2
ggcgcgcuggcggaa

SEQ ID NO: 1827470 - RNA, 17 nt, Human herpesvirus 2
agcggcgaacacugccu

SEQ ID NO: 1827471 - RNA, 18 nt, Human herpesvirus 2
ugcccaucuacguggccg

SEQ ID NO: 1827472 - RNA, 13 nt, Human herpesvirus 2
ggcccucugggac

SEQ ID NO: 1827473 - RNA, 23 nt, Human herpesvirus 2
gcucugccugcacgagcgccguc

SEQ ID NO: 1827474 - RNA, 13 nt, Human herpesvirus 2
gccgccccgcagu

SEQ ID NO: 1827475 - RNA, 18 nt, Human herpesvirus 2
gccgcgcgacggccgaga

SEQ ID NO: 1827476 - RNA, 17 nt, Human herpesvirus 2
acgccagcugcuggcca

SEQ ID NO: 1827477 - RNA, 23 nt, Human herpesvirus 2
ccccggaggggcuccucagcgcg

SEQ ID NO: 1827478 - RNA, 18 nt, Human herpesvirus 2
ccggggaccgcagucugg

SEQ ID NO: 1827479 - RNA, 18 nt, Human herpesvirus 2
gaugacggcaauaaaaga

SEQ ID NO: 1827480 - RNA, 14 nt, Human herpesvirus 2
ccccaccccggagg

SEQ ID NO: 1827481 - RNA, 19 nt, Human herpesvirus 2
gcagcuuuuaacgggccgc

SEQ ID NO: 1827482 - RNA, 12 nt, Human herpesvirus 2
ccaacucugucu

SEQ ID NO: 1827483 - RNA, 19 nt, Human herpesvirus 2
ggacagccagggcugggag

SEQ ID NO: 1827484 - RNA, 19 nt, Human herpesvirus 2
cacgugggcggcgaaccgg

SEQ ID NO: 1827485 - RNA, 12 nt, Human herpesvirus 2
uuacccacacac

SEQ ID NO: 1827486 - RNA, 16 nt, Human herpesvirus 2
acggucgauuuaacca

SEQ ID NO: 1827487 - RNA, 21 nt, Human herpesvirus 2
aggaacccaauggccgcuccu

SEQ ID NO: 1827488 - RNA, 23 nt, Human herpesvirus 2
caccagacggcgggaccccgacg

SEQ ID NO: 1827489 - RNA, 20 nt, Human herpesvirus 2
ugcacuugcccccccccggg

SEQ ID NO: 1827490 - RNA, 21 nt, Human herpesvirus 2
gucgcuccccuucagccugga

SEQ ID NO: 1827491 - RNA, 15 nt, Human herpesvirus 2
ggugugaccccccca

SEQ ID NO: 1827492 - RNA, 15 nt, Human herpesvirus 2
agcuaaggcgcccgc

SEQ ID NO: 1827493 - RNA, 23 nt, Human herpesvirus 2
ccgcgagcgccgcuacugcgcca

SEQ ID NO: 1827494 - RNA, 22 nt, Human herpesvirus 2
cggggaccgcaccggacgcgca

SEQ ID NO: 1827495 - RNA, 22 nt, Human herpesvirus 2
uccguguccgcggucuguuugu

SEQ ID NO: 1827496 - RNA, 19 nt, Human herpesvirus 2
gucgcccauacaaauuaaa

SEQ ID NO: 1827497 - RNA, 20 nt, Human herpesvirus 2
agccccccccccucaccccu

SEQ ID NO: 1827498 - RNA, 21 nt, Human herpesvirus 2
gcuuagggugugaccccccca

SEQ ID NO: 1827499 - RNA, 19 nt, Human herpesvirus 2
ucaugucuuuccaccacca

SEQ ID NO: 1827500 - RNA, 13 nt, Human herpesvirus 2
acccagaggcugg

SEQ ID NO: 1827501 - RNA, 21 nt, Human herpesvirus 2
ggaucgugugcacgaaaaaga

SEQ ID NO: 1827502 - RNA, 13 nt, Human herpesvirus 2
ucaggaccaggga

SEQ ID NO: 1827503 - RNA, 17 nt, Human herpesvirus 2
ccucccuuccgagcgcg

SEQ ID NO: 1827504 - RNA, 22 nt, Human herpesvirus 2
gugaucuuggcguuauuuccaa

SEQ ID NO: 1827505 - RNA, 23 nt, Human herpesvirus 2
acugcacuugcccccccccgggg

SEQ ID NO: 1827506 - RNA, 16 nt, Human herpesvirus 2
gcgucggcggccccgg

SEQ ID NO: 1827507 - RNA, 18 nt, Human herpesvirus 2
ccaccggccgaggcgccu

SEQ ID NO: 1827508 - RNA, 14 nt, Human herpesvirus 2
ccuuccccaccacc

SEQ ID NO: 1827509 - RNA, 13 nt, Human herpesvirus 2
caggcuggagcuc

SEQ ID NO: 1827510 - RNA, 13 nt, Human herpesvirus 2
gcgcgcauccaca

SEQ ID NO: 1827511 - RNA, 16 nt, Human herpesvirus 2
gcuuuuacccucaccc

SEQ ID NO: 1827512 - RNA, 19 nt, Human herpesvirus 2
agacgcccgcgagccgcac

SEQ ID NO: 1827513 - RNA, 23 nt, Human herpesvirus 2
gccucggccggcggagccccgga

SEQ ID NO: 1827514 - RNA, 16 nt, Human herpesvirus 2
uggcgugugucucuga

SEQ ID NO: 1827515 - RNA, 14 nt, Human herpesvirus 2
cgcaccgcuguccc

SEQ ID NO: 1827516 - RNA, 12 nt, Human herpesvirus 2
gcccggcgccgc

SEQ ID NO: 1827517 - RNA, 15 nt, Human herpesvirus 2
aacccccgaccccgc

SEQ ID NO: 1827518 - RNA, 24 nt, Human herpesvirus 2
acccccgaacagccccuggggcug

SEQ ID NO: 1827519 - RNA, 14 nt, Human herpesvirus 2
cucggucgacgagg

SEQ ID NO: 1827520 - RNA, 19 nt, Human herpesvirus 2
guugcguuggggcacggcg

SEQ ID NO: 1827521 - RNA, 11 nt, Human herpesvirus 2
ccacacagaaa

SEQ ID NO: 1827522 - RNA, 23 nt, Human herpesvirus 2
gcuggcugcggggggcggugggu

SEQ ID NO: 1827523 - RNA, 19 nt, Human herpesvirus 2
caugucuuuccaccaccag

SEQ ID NO: 1827524 - RNA, 12 nt, Human herpesvirus 2
accaccaaggcc

SEQ ID NO: 1827525 - RNA, 21 nt, Human herpesvirus 2
ggaggggcuccucagcgcggc

SEQ ID NO: 1827526 - RNA, 20 nt, Human herpesvirus 2
agccaccgucccgcccgcca

SEQ ID NO: 1827527 - RNA, 23 nt, Human herpesvirus 2
aacgcgcuguggcgcgcccccgc

SEQ ID NO: 1827528 - RNA, 17 nt, Human herpesvirus 2
ccauacaaauuaaauac

SEQ ID NO: 1827529 - RNA, 15 nt, Human herpesvirus 2
gaggcgccucugccc

SEQ ID NO: 1827530 - RNA, 19 nt, Human herpesvirus 2
gccgugucgcuaaacaggg

SEQ ID NO: 1827531 - RNA, 15 nt, Human herpesvirus 2
gugcgugcggcccug

SEQ ID NO: 1827532 - RNA, 23 nt, Human herpesvirus 2
cgguuuuuuuuuguugucugucu

SEQ ID NO: 1827533 - RNA, 22 nt, Human herpesvirus 2
gaggugcgccaggucagcgauc

SEQ ID NO: 1827534 - RNA, 20 nt, Human herpesvirus 2
gucagcgaucgccagccgcg

SEQ ID NO: 1827535 - RNA, 16 nt, Human herpesvirus 2
gcgaacccccuaaccg

SEQ ID NO: 1827536 - RNA, 20 nt, Human herpesvirus 2
gggcaccacguguccccagg

SEQ ID NO: 1827537 - RNA, 15 nt, Human herpesvirus 2
uccuugaugguuccg

SEQ ID NO: 1827538 - RNA, 18 nt, Human herpesvirus 2
cuugcuugggggggcguc

SEQ ID NO: 1827539 - RNA, 24 nt, Human herpesvirus 2
acgaggccgccaacgacuuccucg

SEQ ID NO: 1827540 - RNA, 22 nt, Human herpesvirus 2
gcaacgggugguggccgaacgc

SEQ ID NO: 1827541 - RNA, 15 nt, Human herpesvirus 2
cugcgucguccaggg

SEQ ID NO: 1827542 - RNA, 12 nt, Human herpesvirus 2
aaagguuggugu

SEQ ID NO: 1827543 - RNA, 21 nt, Human herpesvirus 2
gagcccucacgucuucgccca

SEQ ID NO: 1827544 - RNA, 22 nt, Human herpesvirus 2
gggaggaggggggugguggccg

SEQ ID NO: 1827545 - RNA, 15 nt, Human herpesvirus 2
gaagggacccgcgga

SEQ ID NO: 1827546 - RNA, 14 nt, Human herpesvirus 2
acgggggggcuggu

SEQ ID NO: 1827547 - RNA, 21 nt, Human herpesvirus 2
gaguucaauagauuucccaaa

SEQ ID NO: 1827548 - RNA, 17 nt, Human herpesvirus 2
ugccaucgcucgggggu

SEQ ID NO: 1827549 - RNA, 19 nt, Human herpesvirus 2
uuuccggcaacccuccucg

SEQ ID NO: 1827550 - RNA, 21 nt, Human herpesvirus 2
aggggcaccaaaaaccagguc

SEQ ID NO: 1827551 - RNA, 13 nt, Human herpesvirus 2
caucaccccaggg

SEQ ID NO: 1827552 - RNA, 21 nt, Human herpesvirus 2
ggcggccgcacccacgacauc

SEQ ID NO: 1827553 - RNA, 20 nt, Human herpesvirus 2
gccagcacgaccagggaggc

SEQ ID NO: 1827554 - RNA, 13 nt, Human herpesvirus 2
ggguguggucgug

SEQ ID NO: 1827555 - RNA, 16 nt, Human herpesvirus 2
cggucaauaaagagcu

SEQ ID NO: 1827556 - RNA, 21 nt, Human herpesvirus 2
ccccuaaccgcgcgccuccuc

SEQ ID NO: 1827557 - RNA, 15 nt, Human herpesvirus 2
agggcgagcucggcu

SEQ ID NO: 1827558 - RNA, 17 nt, Human herpesvirus 2
ggcacagguggugcacg

SEQ ID NO: 1827559 - RNA, 18 nt, Human herpesvirus 2
ggcgaacgggggaucugu

SEQ ID NO: 1827560 - RNA, 19 nt, Human herpesvirus 2
gcgcgccgacgaccugcag

SEQ ID NO: 1827561 - RNA, 17 nt, Human herpesvirus 2
cgcuacacgacccugga

SEQ ID NO: 1827562 - RNA, 21 nt, Human herpesvirus 2
cgagagcgccgucgggccccg

SEQ ID NO: 1827563 - RNA, 21 nt, Human herpesvirus 2
gugaaauuccgagaauuucuu

SEQ ID NO: 1827564 - RNA, 20 nt, Human herpesvirus 2
ucugcgcgaggccgcucucc

SEQ ID NO: 1827565 - RNA, 21 nt, Human herpesvirus 2
aucggccaggagguccuggag

SEQ ID NO: 1827566 - RNA, 18 nt, Human herpesvirus 2
ugcugggcgcgagccagg

SEQ ID NO: 1827567 - RNA, 13 nt, Human herpesvirus 2
gccaacucugucu

SEQ ID NO: 1827568 - RNA, 18 nt, Human herpesvirus 2
ggaugggcggggcccggg

SEQ ID NO: 1827569 - RNA, 13 nt, Human herpesvirus 2
ggcaagugcagua

SEQ ID NO: 1827570 - RNA, 18 nt, Human herpesvirus 2
cucucaaacaaaaacaca

SEQ ID NO: 1827571 - RNA, 12 nt, Human herpesvirus 2
gcggggccccgg

SEQ ID NO: 1827572 - RNA, 16 nt, Human herpesvirus 2
gcgccguccucgugga

SEQ ID NO: 1827573 - RNA, 12 nt, Human herpesvirus 2
cggcccccggcc

SEQ ID NO: 1827574 - RNA, 21 nt, Human herpesvirus 2
aggaacugggguacugcacug

SEQ ID NO: 1827575 - RNA, 14 nt, Human herpesvirus 2
ccgagaauuucuua

SEQ ID NO: 1827576 - RNA, 23 nt, Human herpesvirus 2
aagacucggugcguuccagcgcg

SEQ ID NO: 1827577 - RNA, 18 nt, Human herpesvirus 2
ggaagcugccuccccccc

SEQ ID NO: 1827578 - RNA, 14 nt, Human herpesvirus 2
ccccagcuuucccu

SEQ ID NO: 1827579 - RNA, 24 nt, Human herpesvirus 2
ccacagcaauaaacauuggcaagc

SEQ ID NO: 1827580 - RNA, 19 nt, Human herpesvirus 2
ugcgccuccguccuuucca

SEQ ID NO: 1827581 - RNA, 12 nt, Human herpesvirus 2
cguaaacaccaa

SEQ ID NO: 1827582 - RNA, 15 nt, Human herpesvirus 2
gcagccccggucccc

SEQ ID NO: 1827583 - RNA, 22 nt, Human herpesvirus 2
ccgagcgccgggcagacagaca

SEQ ID NO: 1827584 - RNA, 11 nt, Human herpesvirus 2
gaccgcccccc

SEQ ID NO: 1827585 - RNA, 20 nt, Human herpesvirus 2
ccuagccuucggccaccugg

SEQ ID NO: 1827586 - RNA, 22 nt, Human herpesvirus 2
augaggggcaccaaaaaccagg

SEQ ID NO: 1827587 - RNA, 21 nt, Human herpesvirus 2
cgcucgcugcagggccuggcg

SEQ ID NO: 1827588 - RNA, 12 nt, Human herpesvirus 2
ggaaagaaagaa

SEQ ID NO: 1827589 - RNA, 18 nt, Human herpesvirus 2
gaggggcuuggccuuccc

SEQ ID NO: 1827590 - RNA, 21 nt, Human herpesvirus 2
ggggacccgccagagacccug

SEQ ID NO: 1827591 - RNA, 13 nt, Human herpesvirus 2
ucucgaaggaggg

SEQ ID NO: 1827592 - RNA, 19 nt, Human herpesvirus 2
gcgcgccccccccccacca

SEQ ID NO: 1827593 - RNA, 15 nt, Human herpesvirus 2
caccccccuucuccu

SEQ ID NO: 1827594 - RNA, 17 nt, Human herpesvirus 2
ccuagccccccccccuc

SEQ ID NO: 1827595 - RNA, 16 nt, Human herpesvirus 2
cgugugggaggguggc

SEQ ID NO: 1827596 - RNA, 15 nt, Human herpesvirus 2
cguucgucgggccgu

SEQ ID NO: 1827597 - RNA, 19 nt, Human herpesvirus 2
ggauccuccgccagcucgg

SEQ ID NO: 1827598 - RNA, 14 nt, Human herpesvirus 2
uuacgugacgucaa

SEQ ID NO: 1827599 - RNA, 17 nt, Human herpesvirus 2
acagcgggcacucuggc

SEQ ID NO: 1827600 - RNA, 16 nt, Human herpesvirus 2
acaugaggcugagggg

SEQ ID NO: 1827601 - RNA, 14 nt, Human herpesvirus 2
ccccgcuggcggga

SEQ ID NO: 1827602 - RNA, 19 nt, Human herpesvirus 2
cccgggcgagcuggcccug

SEQ ID NO: 1827603 - RNA, 15 nt, Human herpesvirus 2
acggccccgaacagc

SEQ ID NO: 1827604 - RNA, 16 nt, Human herpesvirus 2
auuaccgaccccccgg

SEQ ID NO: 1827605 - RNA, 18 nt, Human herpesvirus 2
aaccccgcggcccugagc

SEQ ID NO: 1827606 - RNA, 18 nt, Human herpesvirus 2
agggcuucguggaagagg

SEQ ID NO: 1827607 - RNA, 17 nt, Human herpesvirus 2
gacgggccggugggccc

SEQ ID NO: 1827608 - RNA, 19 nt, Human herpesvirus 2
ggggacggccgggcagagc

SEQ ID NO: 1827609 - RNA, 14 nt, Human herpesvirus 2
cgagcggugucgcg

SEQ ID NO: 1827610 - RNA, 22 nt, Human herpesvirus 2
cgccaggccccccgggagccgc

SEQ ID NO: 1827611 - RNA, 11 nt, Human herpesvirus 2
gauugauuuua

SEQ ID NO: 1827612 - RNA, 15 nt, Human herpesvirus 2
cagccagggcuggga

SEQ ID NO: 1827613 - RNA, 22 nt, Human herpesvirus 2
gcacucgggcguagagcucggc

SEQ ID NO: 1827614 - RNA, 19 nt, Human herpesvirus 2
gacgugcgaugacgugggu

SEQ ID NO: 1827615 - RNA, 19 nt, Human herpesvirus 2
gcgcgugugugagaaauaa

SEQ ID NO: 1827616 - RNA, 23 nt, Human herpesvirus 2
ccgcggggggcacgggcccgggg

SEQ ID NO: 1827617 - RNA, 21 nt, Human herpesvirus 2
accaggucuuuccguggcgcc

SEQ ID NO: 1827618 - RNA, 14 nt, Human herpesvirus 2
ggcgcggugccuga

SEQ ID NO: 1827619 - RNA, 15 nt, Human herpesvirus 2
cugggcgcgagccag

SEQ ID NO: 1827620 - RNA, 17 nt, Human herpesvirus 2
acggcccaccugcacga

SEQ ID NO: 1827621 - RNA, 16 nt, Human herpesvirus 2
cccguguaccucuggg

SEQ ID NO: 1827622 - RNA, 17 nt, Human herpesvirus 2
ccugcgucgccccgugc

SEQ ID NO: 1827623 - RNA, 21 nt, Human herpesvirus 2
ugucugagugucugguuuuuc

SEQ ID NO: 1827624 - RNA, 15 nt, Human herpesvirus 2
caccggggaaacagg

SEQ ID NO: 1827625 - RNA, 14 nt, Human herpesvirus 2
agagccgauccggc

SEQ ID NO: 1827626 - RNA, 22 nt, Human herpesvirus 2
agccacccugggucgggagcag

SEQ ID NO: 1827627 - RNA, 20 nt, Human herpesvirus 2
gcgcggccacgucguccggg

SEQ ID NO: 1827628 - RNA, 13 nt, Human herpesvirus 2
uauaaaggccagg

SEQ ID NO: 1827629 - RNA, 13 nt, Human herpesvirus 2
gcucggucgccuu

SEQ ID NO: 1827630 - RNA, 17 nt, Human herpesvirus 2
cggcagcccggaccccu

SEQ ID NO: 1827631 - RNA, 16 nt, Human herpesvirus 2
cggacgcggccagaaa

SEQ ID NO: 1827632 - RNA, 14 nt, Human herpesvirus 2
ggagucccccggcu

SEQ ID NO: 1827633 - RNA, 12 nt, Human herpesvirus 2
caccccccccuc

SEQ ID NO: 1827634 - RNA, 23 nt, Human herpesvirus 2
gcuugccccucccccggcccagc

SEQ ID NO: 1827635 - RNA, 17 nt, Human herpesvirus 2
caguguuugggaaaucu

SEQ ID NO: 1827636 - RNA, 17 nt, Human herpesvirus 2
gaggcccucugggacac

SEQ ID NO: 1827637 - RNA, 18 nt, Human herpesvirus 2
caaaagaaacggcaagaa

SEQ ID NO: 1827638 - RNA, 16 nt, Human herpesvirus 2
ccacaagcuaugcauc

SEQ ID NO: 1827639 - RNA, 16 nt, Human herpesvirus 2
accccgccgcagcuca

SEQ ID NO: 1827640 - RNA, 19 nt, Human herpesvirus 2
ccuguuuuuacgggccccg

SEQ ID NO: 1827641 - RNA, 23 nt, Human herpesvirus 2
aggcgcauaaagguccggcggcc

SEQ ID NO: 1827642 - RNA, 17 nt, Human herpesvirus 2
cuuggaggcccucuggg

SEQ ID NO: 1827643 - RNA, 15 nt, Human herpesvirus 2
ggcccgugugggagg

SEQ ID NO: 1827644 - RNA, 20 nt, Human herpesvirus 2
cacaagacacacacacaggc

SEQ ID NO: 1827645 - RNA, 13 nt, Human herpesvirus 2
uaacgggccgcca

SEQ ID NO: 1827646 - RNA, 20 nt, Human herpesvirus 2
ccucgcccagacgcccuccg

SEQ ID NO: 1827647 - RNA, 17 nt, Human herpesvirus 2
acacaggcccaccacca

SEQ ID NO: 1827648 - RNA, 22 nt, Human herpesvirus 2
uguuguggcuggaggcaaacac

SEQ ID NO: 1827649 - RNA, 19 nt, Human herpesvirus 2
gugggcguugccgggggcc

SEQ ID NO: 1827650 - RNA, 18 nt, Human herpesvirus 2
cgucccccacggucagga

SEQ ID NO: 1827651 - RNA, 19 nt, Human herpesvirus 2
cauuuugugggggcccagg

SEQ ID NO: 1827652 - RNA, 20 nt, Human herpesvirus 2
gcacaagacacacacacagg

SEQ ID NO: 1827653 - RNA, 22 nt, Human herpesvirus 2
aaggucccgauggccgccccgc

SEQ ID NO: 1827654 - RNA, 15 nt, Human herpesvirus 2
gcggccauccugccc

SEQ ID NO: 1827655 - RNA, 20 nt, Human herpesvirus 2
ggggcgugugacuagaaaaa

SEQ ID NO: 1827656 - RNA, 17 nt, Human herpesvirus 2
ggcacgggcccggggcg

SEQ ID NO: 1827657 - RNA, 16 nt, Human herpesvirus 2
ggcgcccagacccuca

SEQ ID NO: 1827658 - RNA, 20 nt, Human herpesvirus 2
agacgcccgcgagccgcaca

SEQ ID NO: 1827659 - RNA, 19 nt, Human herpesvirus 2
cgccgccgggaaccccggc

SEQ ID NO: 1827660 - RNA, 23 nt, Human herpesvirus 2
acgacccccgaacagccccuggg

SEQ ID NO: 1827661 - RNA, 15 nt, Human herpesvirus 2
ccggcgugggugacu

SEQ ID NO: 1827662 - RNA, 23 nt, Human herpesvirus 2
gcuuccaccccccccccccuucc

SEQ ID NO: 1827663 - RNA, 12 nt, Human herpesvirus 2
cagcaccccacc

SEQ ID NO: 1827664 - RNA, 21 nt, Human herpesvirus 2
auagucccccguauaggcaua

SEQ ID NO: 1827665 - RNA, 13 nt, Human herpesvirus 2
auggggagagggg

SEQ ID NO: 1827666 - RNA, 21 nt, Human herpesvirus 2
gggagauggggagagggggaa

SEQ ID NO: 1827667 - RNA, 22 nt, Human herpesvirus 2
aagagacgaugggagccccgcg

SEQ ID NO: 1827668 - RNA, 18 nt, Human herpesvirus 2
gcuacacgacccuggaga

SEQ ID NO: 1827669 - RNA, 22 nt, Human herpesvirus 2
uugugcgggaggggcuuggccu

SEQ ID NO: 1827670 - RNA, 15 nt, Human herpesvirus 2
cgagaagccgccccc

SEQ ID NO: 1827671 - RNA, 15 nt, Human herpesvirus 2
acagccagggcuggg

SEQ ID NO: 1827672 - RNA, 17 nt, Human herpesvirus 2
ugggugcucggggacag

SEQ ID NO: 1827673 - RNA, 23 nt, Human herpesvirus 2
ccaggcaaacgguaagcagcgcg

SEQ ID NO: 1827674 - RNA, 23 nt, Human herpesvirus 2
cuacgcguguacgcgaaggcgga

SEQ ID NO: 1827675 - RNA, 22 nt, Human herpesvirus 2
cgcuccagguacugcugcacgu

SEQ ID NO: 1827676 - RNA, 17 nt, Human herpesvirus 2
acgucacgcaggccgcc

SEQ ID NO: 1827677 - RNA, 18 nt, Human herpesvirus 2
gaggcgccucgggggcag

SEQ ID NO: 1827678 - RNA, 13 nt, Human herpesvirus 2
caccgcacccggg

SEQ ID NO: 1827679 - RNA, 14 nt, Human herpesvirus 2
cacggucugguggc

SEQ ID NO: 1827680 - RNA, 13 nt, Human herpesvirus 2
ggggacagccccg

SEQ ID NO: 1827681 - RNA, 21 nt, Human herpesvirus 2
cccccggggggcguggagggg

SEQ ID NO: 1827682 - RNA, 17 nt, Human herpesvirus 2
auuuuccccccaccccu

SEQ ID NO: 1827683 - RNA, 17 nt, Human herpesvirus 2
ccguggcggaggccugu

SEQ ID NO: 1827684 - RNA, 19 nt, Human herpesvirus 2
cgugcuuuuguuccaccgc

SEQ ID NO: 1827685 - RNA, 14 nt, Human herpesvirus 2
ggggccugcugugg

SEQ ID NO: 1827686 - RNA, 20 nt, Human herpesvirus 2
uuggucaauaaaccggggcc

SEQ ID NO: 1827687 - RNA, 17 nt, Human herpesvirus 2
ccaggcgcugcugcgca

SEQ ID NO: 1827688 - RNA, 22 nt, Human herpesvirus 2
ccgcaucaguccgcgcggggcg

SEQ ID NO: 1827689 - RNA, 18 nt, Human herpesvirus 2
ucgggagcaggacagccg

SEQ ID NO: 1827690 - RNA, 21 nt, Human herpesvirus 2
cgcacguacguucugccccgc

SEQ ID NO: 1827691 - RNA, 14 nt, Human herpesvirus 2
gcaugcaaauuaaa

SEQ ID NO: 1827692 - RNA, 22 nt, Human herpesvirus 2
gcugggcuuguguauaaauaaa

SEQ ID NO: 1827693 - RNA, 11 nt, Human herpesvirus 2
ugcagggccug

SEQ ID NO: 1827694 - RNA, 17 nt, Human herpesvirus 2
cguacguucugccccgc

SEQ ID NO: 1827695 - RNA, 18 nt, Human herpesvirus 2
acccccggcgauucccuu

SEQ ID NO: 1827696 - RNA, 18 nt, Human herpesvirus 2
gguuccuauaacccacaa

SEQ ID NO: 1827697 - RNA, 17 nt, Human herpesvirus 2
aucucuggcuccaggcc

SEQ ID NO: 1827698 - RNA, 21 nt, Human herpesvirus 2
aggucugcgcgaggccgcucu

SEQ ID NO: 1827699 - RNA, 21 nt, Human herpesvirus 2
cuucauuuugugggggcccag

SEQ ID NO: 1827700 - RNA, 19 nt, Human herpesvirus 2
gcguccggaaccccucugg

SEQ ID NO: 1827701 - RNA, 22 nt, Human herpesvirus 2
gggccucucgacggagagccgg

SEQ ID NO: 1827702 - RNA, 18 nt, Human herpesvirus 2
uccgccagcgcccuuccg

SEQ ID NO: 1827703 - RNA, 21 nt, Human herpesvirus 2
ccaccccccccccccuucccg

SEQ ID NO: 1827704 - RNA, 15 nt, Human herpesvirus 2
cccacccccccgccg

SEQ ID NO: 1827705 - RNA, 15 nt, Human herpesvirus 2
cagguggcccuuccg

SEQ ID NO: 1827706 - RNA, 21 nt, Human herpesvirus 2
cggcgcgcguuucugaucgac

SEQ ID NO: 1827707 - RNA, 16 nt, Human herpesvirus 2
accagcggccccaucc

SEQ ID NO: 1827708 - RNA, 22 nt, Human herpesvirus 2
cacgcaggccgcccccagcagg

SEQ ID NO: 1827709 - RNA, 18 nt, Human herpesvirus 2
cgacgaccaccgcgacca

SEQ ID NO: 1827710 - RNA, 22 nt, Human herpesvirus 2
cgcgcaggcuggagcucugccu

SEQ ID NO: 1827711 - RNA, 13 nt, Human herpesvirus 2
gagcagcacggcg

SEQ ID NO: 1827712 - RNA, 18 nt, Human herpesvirus 2
acggucggcgaacacaac

SEQ ID NO: 1827713 - RNA, 15 nt, Human herpesvirus 2
gcccacccccccacc

SEQ ID NO: 1827714 - RNA, 17 nt, Human herpesvirus 2
cccggccgccccccguc

SEQ ID NO: 1827715 - RNA, 20 nt, Human herpesvirus 2
cggcgggucccuccgcggcc

SEQ ID NO: 1827716 - RNA, 12 nt, Human herpesvirus 2
gccgggcagaca

SEQ ID NO: 1827717 - RNA, 22 nt, Human herpesvirus 2
agaggucaauagauuuccccaa

SEQ ID NO: 1827718 - RNA, 23 nt, Human herpesvirus 2
gcccaacccaaccgacucccucc

SEQ ID NO: 1827719 - RNA, 12 nt, Human herpesvirus 2
cguuauuuccaa

SEQ ID NO: 1827720 - RNA, 15 nt, Human herpesvirus 2
ggggcaagugcagua

SEQ ID NO: 1827721 - RNA, 19 nt, Human herpesvirus 2
cccggcccugcggccaagc

SEQ ID NO: 1827722 - RNA, 19 nt, Human herpesvirus 2
cgccggccaaccgcgcgcc

SEQ ID NO: 1827723 - RNA, 18 nt, Human herpesvirus 2
gcggccauccugcccacc

SEQ ID NO: 1827724 - RNA, 17 nt, Human herpesvirus 2
cauggaagcccccggca

SEQ ID NO: 1827725 - RNA, 15 nt, Human herpesvirus 2
gcacggcggacacaa

SEQ ID NO: 1827726 - RNA, 15 nt, Human herpesvirus 2
ccgacggcggggccc

SEQ ID NO: 1827727 - RNA, 20 nt, Human herpesvirus 2
cacguguccccagggagccc

SEQ ID NO: 1827728 - RNA, 12 nt, Human herpesvirus 2
accggggcggcg

SEQ ID NO: 1827729 - RNA, 13 nt, Human herpesvirus 2
agaacgagacaga

SEQ ID NO: 1827730 - RNA, 16 nt, Human herpesvirus 2
cgcgagggccccggcc

SEQ ID NO: 1827731 - RNA, 20 nt, Human herpesvirus 2
caccagacggcgggaccccg

SEQ ID NO: 1827732 - RNA, 16 nt, Human herpesvirus 2
aaacguucggacggcc

SEQ ID NO: 1827733 - RNA, 17 nt, Human herpesvirus 2
gagcccguggcccacga

SEQ ID NO: 1827734 - RNA, 17 nt, Human herpesvirus 2
uugugggacugggggcg

SEQ ID NO: 1827735 - RNA, 16 nt, Human herpesvirus 2
caucaucgucccgguu

SEQ ID NO: 1827736 - RNA, 14 nt, Human herpesvirus 2
gcagagagauuucc

SEQ ID NO: 1827737 - RNA, 14 nt, Human herpesvirus 2
ggcggccaccccgc

SEQ ID NO: 1827738 - RNA, 13 nt, Human herpesvirus 2
ccuuuaagacaga

SEQ ID NO: 1827739 - RNA, 16 nt, Human herpesvirus 2
gaacuguguuuccccc

SEQ ID NO: 1827740 - RNA, 19 nt, Human herpesvirus 2
cacggcaaccccagggcgu

SEQ ID NO: 1827741 - RNA, 20 nt, Human herpesvirus 2
ccaaccuggcacagcgggca

SEQ ID NO: 1827742 - RNA, 23 nt, Human herpesvirus 2
uccagaacccccguaaacaccag

SEQ ID NO: 1827743 - RNA, 20 nt, Human herpesvirus 2
ggccgcucgcugcagggccu

SEQ ID NO: 1827744 - RNA, 19 nt, Human herpesvirus 2
cgaggcccccggcccugcg

SEQ ID NO: 1827745 - RNA, 19 nt, Human herpesvirus 2
cucgcuguuuuuuuucucu

SEQ ID NO: 1827746 - RNA, 12 nt, Human herpesvirus 2
cagaugcugccc

SEQ ID NO: 1827747 - RNA, 16 nt, Human herpesvirus 2
gaccagaccguggccg

SEQ ID NO: 1827748 - RNA, 22 nt, Human herpesvirus 2
ccgcggucgcgcgggccguggc

SEQ ID NO: 1827749 - RNA, 20 nt, Human herpesvirus 2
cgcggggguucggggccagg

SEQ ID NO: 1827750 - RNA, 19 nt, Human herpesvirus 2
cuaaccgcgcgccuccucg

SEQ ID NO: 1827751 - RNA, 13 nt, Human herpesvirus 2
cgcgccucccggg

SEQ ID NO: 1827752 - RNA, 14 nt, Human herpesvirus 2
cggcgaccaccgcg

SEQ ID NO: 1827753 - RNA, 17 nt, Human herpesvirus 2
ccacaucgauuccgcca

SEQ ID NO: 1827754 - RNA, 14 nt, Human herpesvirus 2
cgaucccgggcccu

SEQ ID NO: 1827755 - RNA, 20 nt, Human herpesvirus 2
gaaacacgguggcgcgcugg

SEQ ID NO: 1827756 - RNA, 15 nt, Human herpesvirus 2
gccaacagggagucc

SEQ ID NO: 1827757 - RNA, 14 nt, Human herpesvirus 2
gcggcggggguggg

SEQ ID NO: 1827758 - RNA, 23 nt, Human herpesvirus 2
aaggcaggggcagcucgcccccg

SEQ ID NO: 1827759 - RNA, 19 nt, Human herpesvirus 2
uggggaggggggggugagg

SEQ ID NO: 1827760 - RNA, 13 nt, Human herpesvirus 2
ccgucgggccccg

SEQ ID NO: 1827761 - RNA, 13 nt, Human herpesvirus 2
ugggggaagagag

SEQ ID NO: 1827762 - RNA, 21 nt, Human herpesvirus 2
ccucguuuuguuuucucuucu

SEQ ID NO: 1827763 - RNA, 14 nt, Human herpesvirus 2
ucgccaacucuguc

SEQ ID NO: 1827764 - RNA, 19 nt, Human herpesvirus 2
gagggcucaucgggaaucu

SEQ ID NO: 1827765 - RNA, 14 nt, Human herpesvirus 2
gcaggcggcgggga

SEQ ID NO: 1827766 - RNA, 19 nt, Human herpesvirus 2
cuuuccaccccccuucccc

SEQ ID NO: 1827767 - RNA, 19 nt, Human herpesvirus 2
ggucaauaaagagcucugu

SEQ ID NO: 1827768 - RNA, 21 nt, Human herpesvirus 2
ucccgaaaccgcaggcgcgcc

SEQ ID NO: 1827769 - RNA, 21 nt, Human herpesvirus 2
cgaggcgccucgggggcaggg

SEQ ID NO: 1827770 - RNA, 12 nt, Human herpesvirus 2
gcgcauaaaggu

SEQ ID NO: 1827771 - RNA, 15 nt, Human herpesvirus 2
ucccaauucgucacc

SEQ ID NO: 1827772 - RNA, 23 nt, Human herpesvirus 2
cgccuuccgacgcucucugccuc

SEQ ID NO: 1827773 - RNA, 13 nt, Human herpesvirus 2
ccccuucuccuua

SEQ ID NO: 1827774 - RNA, 18 nt, Human herpesvirus 2
cugcuuaagcggaacccg

SEQ ID NO: 1827775 - RNA, 18 nt, Human herpesvirus 2
cagcacggaggaacuggg

SEQ ID NO: 1827776 - RNA, 12 nt, Human herpesvirus 2
uggcguccccag

SEQ ID NO: 1827777 - RNA, 20 nt, Human herpesvirus 2
cggcaggcgacccgccgccc

SEQ ID NO: 1827778 - RNA, 21 nt, Human herpesvirus 2
aucacaguuccguuggggaac

SEQ ID NO: 1827779 - RNA, 17 nt, Human herpesvirus 2
agcgccggguggcgccu

SEQ ID NO: 1827780 - RNA, 20 nt, Human herpesvirus 2
ccuuggguuccgcggacgcc

SEQ ID NO: 1827781 - RNA, 20 nt, Human herpesvirus 2
caggcuggagcucugccugc

SEQ ID NO: 1827782 - RNA, 15 nt, Human herpesvirus 2
ccgucccgcccgcca

SEQ ID NO: 1827783 - RNA, 17 nt, Human herpesvirus 2
guguuuauuuucccccc

SEQ ID NO: 1827784 - RNA, 15 nt, Human herpesvirus 2
gggggcuaggagccg

SEQ ID NO: 1827785 - RNA, 11 nt, Human herpesvirus 2
ggacgcgcagc

SEQ ID NO: 1827786 - RNA, 13 nt, Human herpesvirus 2
ggacugggggcgg

SEQ ID NO: 1827787 - RNA, 14 nt, Human herpesvirus 2
ggggcagugcagua

SEQ ID NO: 1827788 - RNA, 17 nt, Human herpesvirus 2
uuggggauacgggggcg

SEQ ID NO: 1827789 - RNA, 16 nt, Human herpesvirus 2
cagccgcgccgcugcc

SEQ ID NO: 1827790 - RNA, 16 nt, Human herpesvirus 2
cgcgggcgggggcgcg

SEQ ID NO: 1827791 - RNA, 14 nt, Human herpesvirus 2
agccaaaccagccc

SEQ ID NO: 1827792 - RNA, 20 nt, Human herpesvirus 2
acgagccaaaccagccccgc

SEQ ID NO: 1827793 - RNA, 15 nt, Human herpesvirus 2
gaaaacuugaggaaa

SEQ ID NO: 1827794 - RNA, 11 nt, Human herpesvirus 2
ucuucuucccc

SEQ ID NO: 1827795 - RNA, 22 nt, Human herpesvirus 2
aacagcucgcggacgagcccgu

SEQ ID NO: 1827796 - RNA, 13 nt, Human herpesvirus 2
cccggggggagga

SEQ ID NO: 1827797 - RNA, 20 nt, Human herpesvirus 2
gcaugguaauuagcaacuuu

SEQ ID NO: 1827798 - RNA, 23 nt, Human herpesvirus 2
gcgagaugucaguccucggggac

SEQ ID NO: 1827799 - RNA, 15 nt, Human herpesvirus 2
ucaauagauuuccca

SEQ ID NO: 1827800 - RNA, 14 nt, Human herpesvirus 2
gucugcgcgaggcc

SEQ ID NO: 1827801 - RNA, 17 nt, Human herpesvirus 2
ggcugcgggcgugucgu

SEQ ID NO: 1827802 - RNA, 17 nt, Human herpesvirus 2
cgagggcggccucggcc

SEQ ID NO: 1827803 - RNA, 22 nt, Human herpesvirus 2
gccccgcggucgcgcgggccgu

SEQ ID NO: 1827804 - RNA, 14 nt, Human herpesvirus 2
ucccauuggcccca

SEQ ID NO: 1827805 - RNA, 13 nt, Human herpesvirus 2
ggucaauagauuu

SEQ ID NO: 1827806 - RNA, 18 nt, Human herpesvirus 2
ucuggcguccccaggcga

SEQ ID NO: 1827807 - RNA, 15 nt, Human herpesvirus 2
gccgccauccccgcg

SEQ ID NO: 1827808 - RNA, 15 nt, Human herpesvirus 2
ugcccgcuuccaccc

SEQ ID NO: 1827809 - RNA, 18 nt, Human herpesvirus 2
aggacagccgacccgucu

SEQ ID NO: 1827810 - RNA, 13 nt, Human herpesvirus 2
gacgggcucgcca

SEQ ID NO: 1827811 - RNA, 15 nt, Human herpesvirus 2
uacccggcagagaga

SEQ ID NO: 1827812 - RNA, 21 nt, Human herpesvirus 2
gccccuggugaagacgacccc

SEQ ID NO: 1827813 - RNA, 19 nt, Human herpesvirus 2
ggaggggggcagugcagua

SEQ ID NO: 1827814 - RNA, 16 nt, Human herpesvirus 2
gacccaccgcaccacc

SEQ ID NO: 1827815 - RNA, 14 nt, Human herpesvirus 2
gaggggggggugag

SEQ ID NO: 1827816 - RNA, 12 nt, Human herpesvirus 2
ugggcacagugg

SEQ ID NO: 1827817 - RNA, 14 nt, Human herpesvirus 2
ccccgacgcgcgcg

SEQ ID NO: 1827818 - RNA, 17 nt, Human herpesvirus 2
gaggggaugggggcgcg

SEQ ID NO: 1827819 - RNA, 21 nt, Human herpesvirus 2
aacaugacaacgacgccccuc

SEQ ID NO: 1827820 - RNA, 17 nt, Human herpesvirus 2
cucgccagcgacccgca

SEQ ID NO: 1827821 - RNA, 14 nt, Human herpesvirus 2
cguccccuggggcg

SEQ ID NO: 1827822 - RNA, 18 nt, Human herpesvirus 2
aaccggcgagggcggccu

SEQ ID NO: 1827823 - RNA, 13 nt, Human herpesvirus 2
gccagggcuggga

SEQ ID NO: 1827824 - RNA, 20 nt, Human herpesvirus 2
ggacgcggccagaaacccgg

SEQ ID NO: 1827825 - RNA, 15 nt, Human herpesvirus 2
aauuagaaacuuuua

SEQ ID NO: 1827826 - RNA, 13 nt, Human herpesvirus 2
cccuagaggcugu

SEQ ID NO: 1827827 - RNA, 19 nt, Human herpesvirus 2
ggguacggcgaggugcagu

SEQ ID NO: 1827828 - RNA, 23 nt, Human herpesvirus 2
gccccagagccccccacgugggc

SEQ ID NO: 1827829 - RNA, 15 nt, Human herpesvirus 2
gcaucacggcccacc

SEQ ID NO: 1827830 - RNA, 13 nt, Human herpesvirus 2
ccggggcucuucu

SEQ ID NO: 1827831 - RNA, 17 nt, Human herpesvirus 2
gugaggcguugugcggg

SEQ ID NO: 1827832 - RNA, 17 nt, Human herpesvirus 2
cacagguggugcacgug

SEQ ID NO: 1827833 - RNA, 24 nt, Human herpesvirus 2
ccucgugcgcaugggccgccagca

SEQ ID NO: 1827834 - RNA, 14 nt, Human herpesvirus 2
cucgcggcaccgcg

SEQ ID NO: 1827835 - RNA, 12 nt, Human herpesvirus 2
cucaccccaccc

SEQ ID NO: 1827836 - RNA, 15 nt, Human herpesvirus 2
cgagaacgagauggu

SEQ ID NO: 1827837 - RNA, 15 nt, Human herpesvirus 2
ucgcccccgugccug

SEQ ID NO: 1827838 - RNA, 19 nt, Human herpesvirus 2
caguuucaccgccccagca

SEQ ID NO: 1827839 - RNA, 12 nt, Human herpesvirus 2
aauaaacacaaa

SEQ ID NO: 1827840 - RNA, 16 nt, Human herpesvirus 2
gcccccgcggccuccc

SEQ ID NO: 1827841 - RNA, 15 nt, Human herpesvirus 2
cggacgagcccgugg

SEQ ID NO: 1827842 - RNA, 17 nt, Human herpesvirus 2
ccggacgcgcacguggg

SEQ ID NO: 1827843 - RNA, 13 nt, Human herpesvirus 2
cggcggccccccg

SEQ ID NO: 1827844 - RNA, 11 nt, Human herpesvirus 2
gcaucgcugua

SEQ ID NO: 1827845 - RNA, 18 nt, Human herpesvirus 2
agggugugacccccccau

SEQ ID NO: 1827846 - RNA, 13 nt, Human herpesvirus 2
ggggcgccccccc

SEQ ID NO: 1827847 - RNA, 19 nt, Human herpesvirus 2
auugaccggggccccaucu

SEQ ID NO: 1827848 - RNA, 12 nt, Human herpesvirus 2
cgcuggccccuc

SEQ ID NO: 1827849 - RNA, 17 nt, Human herpesvirus 2
aacaacaguacucaucg

SEQ ID NO: 1827850 - RNA, 22 nt, Human herpesvirus 2
gcgcaggaucgugugcacgaaa

SEQ ID NO: 1827851 - RNA, 12 nt, Human herpesvirus 2
cacaggcccacc

SEQ ID NO: 1827852 - RNA, 19 nt, Human herpesvirus 2
gccccacgucaccgggggc

SEQ ID NO: 1827853 - RNA, 15 nt, Human herpesvirus 2
gugcucggggacaga

SEQ ID NO: 1827854 - RNA, 19 nt, Human herpesvirus 2
ugcgcuuuccggcccuccc

SEQ ID NO: 1827855 - RNA, 12 nt, Human herpesvirus 2
ucggggccaggg

SEQ ID NO: 1827856 - RNA, 14 nt, Human herpesvirus 2
cagggaaacagaaa

SEQ ID NO: 1827857 - RNA, 14 nt, Human herpesvirus 2
cgcccccgccucgc

SEQ ID NO: 1827858 - RNA, 14 nt, Human herpesvirus 2
cggcccgccaaccc

SEQ ID NO: 1827859 - RNA, 11 nt, Human herpesvirus 2
ucucccacacg

SEQ ID NO: 1827860 - RNA, 23 nt, Human herpesvirus 2
gauggccgcgcgcgugugugaga

SEQ ID NO: 1827861 - RNA, 17 nt, Human herpesvirus 2
gaaccaacugccgaaag

SEQ ID NO: 1827862 - RNA, 17 nt, Human herpesvirus 2
cucaaacaaaaacacaa

SEQ ID NO: 1827863 - RNA, 14 nt, Human herpesvirus 2
cugcggggaccagc

SEQ ID NO: 1827864 - RNA, 18 nt, Human herpesvirus 2
agaaaagcgacgaggucc

SEQ ID NO: 1827865 - RNA, 22 nt, Human herpesvirus 2
gccgcauauacugcugggccau

SEQ ID NO: 1827866 - RNA, 15 nt, Human herpesvirus 2
uccucacgggggggc

SEQ ID NO: 1827867 - RNA, 11 nt, Human herpesvirus 2
cgacccgccuc

SEQ ID NO: 1827868 - RNA, 18 nt, Human herpesvirus 2
cugcaucgcaagccaccc

SEQ ID NO: 1827869 - RNA, 17 nt, Human herpesvirus 2
acacaccccccuucucc

SEQ ID NO: 1827870 - RNA, 22 nt, Human herpesvirus 2
ccccgcucccguguaccucugg

SEQ ID NO: 1827871 - RNA, 14 nt, Human herpesvirus 2
ccaggcgcugcugc

SEQ ID NO: 1827872 - RNA, 19 nt, Human herpesvirus 2
cucaucgggacgcccggcc

SEQ ID NO: 1827873 - RNA, 16 nt, Human herpesvirus 2
aagugccgcacggccg

SEQ ID NO: 1827874 - RNA, 14 nt, Human herpesvirus 2
ggagcguggggcgc

SEQ ID NO: 1827875 - RNA, 14 nt, Human herpesvirus 2
cggcccugagccgc

SEQ ID NO: 1827876 - RNA, 18 nt, Human herpesvirus 2
gagcuuugcacgcggggu

SEQ ID NO: 1827877 - RNA, 22 nt, Human herpesvirus 2
ucgucgggccgucguuggccag

SEQ ID NO: 1827878 - RNA, 16 nt, Human herpesvirus 2
ccccauggcauccggg

SEQ ID NO: 1827879 - RNA, 21 nt, Human herpesvirus 2
cggcucccccgacgucucggc

SEQ ID NO: 1827880 - RNA, 11 nt, Human herpesvirus 2
ggggcgccccc

SEQ ID NO: 1827881 - RNA, 15 nt, Human herpesvirus 2
gcgggucccuuccca

SEQ ID NO: 1827882 - RNA, 17 nt, Human herpesvirus 2
cucuuccccccccccca

SEQ ID NO: 1827883 - RNA, 17 nt, Human herpesvirus 2
aacucgcggcaccgcgc

SEQ ID NO: 1827884 - RNA, 15 nt, Human herpesvirus 2
ccgcccgccccaggg

SEQ ID NO: 1827885 - RNA, 23 nt, Human herpesvirus 2
agaccuccccgugcgugcugcug

SEQ ID NO: 1827886 - RNA, 15 nt, Human herpesvirus 2
ucgggggccggggcg

SEQ ID NO: 1827887 - RNA, 13 nt, Human herpesvirus 2
augacacaaaaau

SEQ ID NO: 1827888 - RNA, 14 nt, Human herpesvirus 2
gcuccuagcccccc

SEQ ID NO: 1827889 - RNA, 13 nt, Human herpesvirus 2
cucccggcuccuc

SEQ ID NO: 1827890 - RNA, 21 nt, Human herpesvirus 2
ggaacacaggcgcuucaucgu

SEQ ID NO: 1827891 - RNA, 12 nt, Human herpesvirus 2
acgcccgcgucu

SEQ ID NO: 1827892 - RNA, 14 nt, Human herpesvirus 2
gggcguugccgggg

SEQ ID NO: 1827893 - RNA, 16 nt, Human herpesvirus 2
cagaccgcggacacgg

SEQ ID NO: 1827894 - RNA, 23 nt, Human herpesvirus 2
uggcgaccgucuuugggccccgc

SEQ ID NO: 1827895 - RNA, 15 nt, Human herpesvirus 2
uggccggggagggca

SEQ ID NO: 1827896 - RNA, 13 nt, Human herpesvirus 2
ccgcaccggggcg

SEQ ID NO: 1827897 - RNA, 19 nt, Human herpesvirus 2
caccggcguuucggugcug

SEQ ID NO: 1827898 - RNA, 14 nt, Human herpesvirus 2
cagcccagaggagc

SEQ ID NO: 1827899 - RNA, 23 nt, Human herpesvirus 2
gcccgaccagcgccggguggcgc

SEQ ID NO: 1827900 - RNA, 14 nt, Human herpesvirus 2
uccgcuaccgccuc

SEQ ID NO: 1827901 - RNA, 15 nt, Human herpesvirus 2
auaaagacuguugau

SEQ ID NO: 1827902 - RNA, 20 nt, Human herpesvirus 2
ggccgagaagagcggcgagu

SEQ ID NO: 1827903 - RNA, 15 nt, Human herpesvirus 2
gaaacggcaagaaag

SEQ ID NO: 1827904 - RNA, 13 nt, Human herpesvirus 2
cuggcgcaccugc

SEQ ID NO: 1827905 - RNA, 19 nt, Human herpesvirus 2
uggauaacagcuacccgca

SEQ ID NO: 1827906 - RNA, 12 nt, Human herpesvirus 2
aggcccccggcc

SEQ ID NO: 1827907 - RNA, 15 nt, Human herpesvirus 2
ccaccccgccgcagc

SEQ ID NO: 1827908 - RNA, 20 nt, Human herpesvirus 2
ugauuucgcccuaccgcucc

SEQ ID NO: 1827909 - RNA, 16 nt, Human herpesvirus 2
ccauaaacaggccccg

SEQ ID NO: 1827910 - RNA, 14 nt, Human herpesvirus 2
gcugcugagcccug

SEQ ID NO: 1827911 - RNA, 20 nt, Human herpesvirus 2
cccggaccccgcugcugugc

SEQ ID NO: 1827912 - RNA, 22 nt, Human herpesvirus 2
cgccgucaaccccgcccuccgc

SEQ ID NO: 1827913 - RNA, 19 nt, Human herpesvirus 2
gcgucgcucucggucccgc

SEQ ID NO: 1827914 - RNA, 14 nt, Human herpesvirus 2
acggucuccgccau

SEQ ID NO: 1827915 - RNA, 17 nt, Human herpesvirus 2
guccucgccgcuguggc

SEQ ID NO: 1827916 - RNA, 13 nt, Human herpesvirus 2
gcuggggaaaucu

SEQ ID NO: 1827917 - RNA, 18 nt, Human herpesvirus 2
gauccugggccugugggu

SEQ ID NO: 1827918 - RNA, 23 nt, Human herpesvirus 2
gccccccgucccgagccccgcga

SEQ ID NO: 1827919 - RNA, 20 nt, Human herpesvirus 2
aucaucgaaggucgggccgu

SEQ ID NO: 1827920 - RNA, 13 nt, Human herpesvirus 2
uggugguggggug

SEQ ID NO: 1827921 - RNA, 15 nt, Human herpesvirus 2
gagaugugccuucca

SEQ ID NO: 1827922 - RNA, 19 nt, Human herpesvirus 2
gaagcccgaacggaaggcc

SEQ ID NO: 1827923 - RNA, 16 nt, Human herpesvirus 2
ucgcaagccacccugg

SEQ ID NO: 1827924 - RNA, 20 nt, Human herpesvirus 2
ugugccagguggcccuuccg

SEQ ID NO: 1827925 - RNA, 13 nt, Human herpesvirus 2
ccgggggccccgg

SEQ ID NO: 1827926 - RNA, 23 nt, Human herpesvirus 2
caggcaggcgucgaucucaucaa

SEQ ID NO: 1827927 - RNA, 20 nt, Human herpesvirus 2
cgccauuucaaauaaaaggc

SEQ ID NO: 1827928 - RNA, 21 nt, Human herpesvirus 2
ccggauaaauguggggccccg

SEQ ID NO: 1827929 - RNA, 19 nt, Human herpesvirus 2
agacacggugcgugcggcc

SEQ ID NO: 1827930 - RNA, 23 nt, Human herpesvirus 2
acgcgucgggggccggggcggcc

SEQ ID NO: 1827931 - RNA, 16 nt, Human herpesvirus 2
gccgggccucccgcaa

SEQ ID NO: 1827932 - RNA, 23 nt, Human herpesvirus 2
auccgcgagggcccggcgccgcc

SEQ ID NO: 1827933 - RNA, 20 nt, Human herpesvirus 2
gucgggggggauccagggga

SEQ ID NO: 1827934 - RNA, 18 nt, Human herpesvirus 2
cuuggccggggagggcag

SEQ ID NO: 1827935 - RNA, 22 nt, Human herpesvirus 2
gccagcacgaccagggaggcca

SEQ ID NO: 1827936 - RNA, 14 nt, Human herpesvirus 2
guaguguguccccc

SEQ ID NO: 1827937 - RNA, 16 nt, Human herpesvirus 2
ccggguuuuuggcccu

SEQ ID NO: 1827938 - RNA, 15 nt, Human herpesvirus 2
cggcuggcgcggugc

SEQ ID NO: 1827939 - RNA, 15 nt, Human herpesvirus 2
acccccuguccccgc

SEQ ID NO: 1827940 - RNA, 18 nt, Human herpesvirus 2
cgggugucugcuccccac

SEQ ID NO: 1827941 - RNA, 12 nt, Human herpesvirus 2
cccagacacggu

SEQ ID NO: 1827942 - RNA, 13 nt, Human herpesvirus 2
gccccgccccacc

SEQ ID NO: 1827943 - RNA, 20 nt, Human herpesvirus 2
agcgaccggucgcagggaga

SEQ ID NO: 1827944 - RNA, 21 nt, Human herpesvirus 2
cgccucccggccgccccccgu

SEQ ID NO: 1827945 - RNA, 15 nt, Human herpesvirus 2
ggcgacccgccgccc

SEQ ID NO: 1827946 - RNA, 23 nt, Human herpesvirus 2
cccccggcgcgggcggcgccgcg

SEQ ID NO: 1827947 - RNA, 19 nt, Human herpesvirus 2
ggcgggccccguggguggg

SEQ ID NO: 1827948 - RNA, 20 nt, Human herpesvirus 2
gacgcggcacagguggugca

SEQ ID NO: 1827949 - RNA, 13 nt, Human herpesvirus 2
gacgcccgcgagc

SEQ ID NO: 1827950 - RNA, 11 nt, Human herpesvirus 2
gcgagccaggc

SEQ ID NO: 1827951 - RNA, 20 nt, Human herpesvirus 2
gcccgaacggaaggccuccc

SEQ ID NO: 1827952 - RNA, 19 nt, Human herpesvirus 2
cacucguggaugccggggc

SEQ ID NO: 1827953 - RNA, 18 nt, Human herpesvirus 2
cugccguaugcuaauuaa

SEQ ID NO: 1827954 - RNA, 14 nt, Human herpesvirus 2
cuccagcuuggccg

SEQ ID NO: 1827955 - RNA, 14 nt, Human herpesvirus 2
cgaacagccccugg

SEQ ID NO: 1827956 - RNA, 16 nt, Human herpesvirus 2
uaagcgcugcggggac

SEQ ID NO: 1827957 - RNA, 16 nt, Human herpesvirus 2
gccgcgacggccccgg

SEQ ID NO: 1827958 - RNA, 14 nt, Human herpesvirus 2
cgcccaacccgagc

SEQ ID NO: 1827959 - RNA, 16 nt, Human herpesvirus 2
uggccgcuccugcccg

SEQ ID NO: 1827960 - RNA, 19 nt, Human herpesvirus 2
uguuuuuacgggccccgga

SEQ ID NO: 1827961 - RNA, 20 nt, Human herpesvirus 2
ggccggggagggcagggccg

SEQ ID NO: 1827962 - RNA, 17 nt, Human herpesvirus 2
agggcuucguggaagag

SEQ ID NO: 1827963 - RNA, 15 nt, Human herpesvirus 2
acgccccccucggca

SEQ ID NO: 1827964 - RNA, 19 nt, Human herpesvirus 2
gccaggagguccuggaggg

SEQ ID NO: 1827965 - RNA, 21 nt, Human herpesvirus 2
ucgagguggcggaggggauca

SEQ ID NO: 1827966 - RNA, 23 nt, Human herpesvirus 2
acucacucguggaugccggggcc

SEQ ID NO: 1827967 - RNA, 22 nt, Human herpesvirus 2
cgccggcccgaaccccgcggcc

SEQ ID NO: 1827968 - RNA, 20 nt, Human herpesvirus 2
acgaugggagccccgcguau

SEQ ID NO: 1827969 - RNA, 16 nt, Human herpesvirus 2
gucaccggggcgcccc

SEQ ID NO: 1827970 - RNA, 17 nt, Human herpesvirus 2
agccgcccaagcggccc

SEQ ID NO: 1827971 - RNA, 17 nt, Human herpesvirus 2
cccggggcccgcagcuu

SEQ ID NO: 1827972 - RNA, 18 nt, Human herpesvirus 2
ccugcagaugcugcccgc

SEQ ID NO: 1827973 - RNA, 19 nt, Human herpesvirus 2
ggcccaccugcacgagguc

SEQ ID NO: 1827974 - RNA, 17 nt, Human herpesvirus 2
ccuggguccgggggccu

SEQ ID NO: 1827975 - RNA, 23 nt, Human herpesvirus 2
ccguggguuacgcaggcccucgc

SEQ ID NO: 1827976 - RNA, 17 nt, Human herpesvirus 2
ugcgccccgccggggcg

SEQ ID NO: 1827977 - RNA, 19 nt, Human herpesvirus 2
ccacguccaccuuggcccg

SEQ ID NO: 1827978 - RNA, 16 nt, Human herpesvirus 2
gccaugagccgccggg

SEQ ID NO: 1827979 - RNA, 23 nt, Human herpesvirus 2
ccgccccccaccggaccaccggc

SEQ ID NO: 1827980 - RNA, 14 nt, Human herpesvirus 2
cggcggccccccgc

SEQ ID NO: 1827981 - RNA, 17 nt, Human herpesvirus 2
gacagccagggcuggga

SEQ ID NO: 1827982 - RNA, 12 nt, Human herpesvirus 2
gccgcgcccgcg

SEQ ID NO: 1827983 - RNA, 22 nt, Human herpesvirus 2
ccgcaguuucaccgccccagca

SEQ ID NO: 1827984 - RNA, 19 nt, Human herpesvirus 2
cgcggggggcacgggcccg

SEQ ID NO: 1827985 - RNA, 20 nt, Human herpesvirus 2
ccugcgaaucccccaaggaa

SEQ ID NO: 1827986 - RNA, 22 nt, Human herpesvirus 2
gaucuggcgaccgucuuugggc

SEQ ID NO: 1827987 - RNA, 12 nt, Human herpesvirus 2
gggacgaacagg

SEQ ID NO: 1827988 - RNA, 15 nt, Human herpesvirus 2
auagagggaacaaag

SEQ ID NO: 1827989 - RNA, 15 nt, Human herpesvirus 2
ggcacagguggugca

SEQ ID NO: 1827990 - RNA, 18 nt, Human herpesvirus 2
ugcuggugguggaaagac

SEQ ID NO: 1827991 - RNA, 16 nt, Human herpesvirus 2
cuucggcggggcaccg

SEQ ID NO: 1827992 - RNA, 18 nt, Human herpesvirus 2
aggauguguucuccugga

SEQ ID NO: 1827993 - RNA, 12 nt, Human herpesvirus 2
cggcggccaccc

SEQ ID NO: 1827994 - RNA, 16 nt, Human herpesvirus 2
cccagggggcggcgcc

SEQ ID NO: 1827995 - RNA, 14 nt, Human herpesvirus 2
ggugcgccccgccg

SEQ ID NO: 1827996 - RNA, 21 nt, Human herpesvirus 2
ccgcauauacugcugggccau

SEQ ID NO: 1827997 - RNA, 13 nt, Human herpesvirus 2
gcccgccagggcc

SEQ ID NO: 1827998 - RNA, 13 nt, Human herpesvirus 2
gcgggcgggauga

SEQ ID NO: 1827999 - RNA, 21 nt, Human herpesvirus 2
cuuuccgugcuucgggacccg

SEQ ID NO: 1828000 - RNA, 18 nt, Human herpesvirus 2
gcuuucccuccacccgcc

SEQ ID NO: 1828001 - RNA, 23 nt, Human herpesvirus 2
ucgggcggacguccaggggugcg

SEQ ID NO: 1828002 - RNA, 13 nt, Human herpesvirus 2
cccaggcccuggc

SEQ ID NO: 1828003 - RNA, 15 nt, Human herpesvirus 2
ggaauuuccgcgucc

SEQ ID NO: 1828004 - RNA, 12 nt, Human herpesvirus 2
caccccccuucu

SEQ ID NO: 1828005 - RNA, 18 nt, Human herpesvirus 2
cucccgaaaccgcaggcg

SEQ ID NO: 1828006 - RNA, 13 nt, Human herpesvirus 2
ggggcauggaccc

SEQ ID NO: 1828007 - RNA, 20 nt, Human herpesvirus 2
gucggacgccagcugcuggc

SEQ ID NO: 1828008 - RNA, 19 nt, Human herpesvirus 2
ggaccacgugcacagccug

SEQ ID NO: 1828009 - RNA, 20 nt, Human herpesvirus 2
ccccgaguucccccgggacu

SEQ ID NO: 1828010 - RNA, 21 nt, Human herpesvirus 2
acggcccaccugcacgagguc

SEQ ID NO: 1828011 - RNA, 16 nt, Human herpesvirus 2
gcacccccgcgccgcc

SEQ ID NO: 1828012 - RNA, 22 nt, Human herpesvirus 2
gccggccaauucuucccggagc

SEQ ID NO: 1828013 - RNA, 23 nt, Human herpesvirus 2
caggaauggagaagggaaaggaa

SEQ ID NO: 1828014 - RNA, 22 nt, Human herpesvirus 2
cccaggaggggggcagugcagu

SEQ ID NO: 1828015 - RNA, 19 nt, Human herpesvirus 2
gucgcucugucccccgggc

SEQ ID NO: 1828016 - RNA, 21 nt, Human herpesvirus 2
agccgcgccgcugcccgacgc

SEQ ID NO: 1828017 - RNA, 13 nt, Human herpesvirus 2
ugacuccuggguc

SEQ ID NO: 1828018 - RNA, 20 nt, Human herpesvirus 2
ccccugaguugcgccggcac

SEQ ID NO: 1828019 - RNA, 17 nt, Human herpesvirus 2
cgucaccgggggccccg

SEQ ID NO: 1828020 - RNA, 21 nt, Human herpesvirus 2
ggaagggacccgcggaggaaa

SEQ ID NO: 1828021 - RNA, 16 nt, Human herpesvirus 2
cggcguggccgcgacc

SEQ ID NO: 1828022 - RNA, 15 nt, Human herpesvirus 2
acacacccccugucc

SEQ ID NO: 1828023 - RNA, 23 nt, Human herpesvirus 2
cccgagcgugcccuuuucugcga

SEQ ID NO: 1828024 - RNA, 17 nt, Human herpesvirus 2
ugucgaaucugggaaga

SEQ ID NO: 1828025 - RNA, 18 nt, Human herpesvirus 2
gcuccgcgugguccccga

SEQ ID NO: 1828026 - RNA, 13 nt, Human herpesvirus 2
ucucugccuccuu

SEQ ID NO: 1828027 - RNA, 21 nt, Human herpesvirus 2
cgcaggcuggagcucugccug

SEQ ID NO: 1828028 - RNA, 21 nt, Human herpesvirus 2
gccaccgucccgcccgccagu

SEQ ID NO: 1828029 - RNA, 22 nt, Human herpesvirus 2
cugucccgacgauuagccaccg

SEQ ID NO: 1828030 - RNA, 18 nt, Human herpesvirus 2
uccgacgaggccuucccg

SEQ ID NO: 1828031 - RNA, 19 nt, Human herpesvirus 2
aaacuuuauauuuauaaaa

SEQ ID NO: 1828032 - RNA, 12 nt, Human herpesvirus 2
ggcggggcaugg

SEQ ID NO: 1828033 - RNA, 22 nt, Human herpesvirus 2
cccgaacagccccuggggcugu

SEQ ID NO: 1828034 - RNA, 19 nt, Human herpesvirus 2
gggcucgccagcgacccgc

SEQ ID NO: 1828035 - RNA, 20 nt, Human herpesvirus 2
agcaaccgccgcgcgacggc

SEQ ID NO: 1828036 - RNA, 14 nt, Human herpesvirus 2
ggagccacucccgc

SEQ ID NO: 1828037 - RNA, 22 nt, Human herpesvirus 2
ccuccggggcuugugcccucgu

SEQ ID NO: 1828038 - RNA, 23 nt, Human herpesvirus 2
caccagagccgaacgcagguccu

SEQ ID NO: 1828039 - RNA, 19 nt, Human herpesvirus 2
cgggauccuccgccagcuc

SEQ ID NO: 1828040 - RNA, 23 nt, Human herpesvirus 2
cccugggccgcucguuccucacg

SEQ ID NO: 1828041 - RNA, 17 nt, Human herpesvirus 2
ccggcgguucgcgugcg

SEQ ID NO: 1828042 - RNA, 20 nt, Human herpesvirus 2
gcaggcgggcccaucacugu

SEQ ID NO: 1828043 - RNA, 18 nt, Human herpesvirus 2
cggggccguggggcccca

SEQ ID NO: 1828044 - RNA, 14 nt, Human herpesvirus 2
ccuuccuccacccc

SEQ ID NO: 1828045 - RNA, 11 nt, Human herpesvirus 2
ccccgccgggu

SEQ ID NO: 1828046 - RNA, 20 nt, Human herpesvirus 2
cgcggggggcacgggcccgg

SEQ ID NO: 1828047 - RNA, 20 nt, Human herpesvirus 2
cguugccgggggccaugaca

SEQ ID NO: 1828048 - RNA, 15 nt, Human herpesvirus 2
gggcgcugguggccg

SEQ ID NO: 1828049 - RNA, 17 nt, Human herpesvirus 2
cccugcgucgccccgug

SEQ ID NO: 1828050 - RNA, 18 nt, Human herpesvirus 2
ccgucuuugggccccgcc

SEQ ID NO: 1828051 - RNA, 21 nt, Human herpesvirus 2
aggcccuggcgcaccugcaga

SEQ ID NO: 1828052 - RNA, 15 nt, Human herpesvirus 2
guccgacacccgggc

SEQ ID NO: 1828053 - RNA, 21 nt, Human herpesvirus 2
gggggaacgcgcacccuugcc

SEQ ID NO: 1828054 - RNA, 14 nt, Human herpesvirus 2
gggccguggggccc

SEQ ID NO: 1828055 - RNA, 17 nt, Human herpesvirus 2
caucgcaagccacccug

SEQ ID NO: 1828056 - RNA, 21 nt, Human herpesvirus 2
ccggaggaaacccccgacccc

SEQ ID NO: 1828057 - RNA, 14 nt, Human herpesvirus 2
gccuggcggcagca

SEQ ID NO: 1828058 - RNA, 22 nt, Human herpesvirus 2
auccgcgagggcccggcgccgc

SEQ ID NO: 1828059 - RNA, 22 nt, Human herpesvirus 2
ccggauaaauguggggccccgg

SEQ ID NO: 1828060 - RNA, 13 nt, Human herpesvirus 2
aacgacugcacuu

SEQ ID NO: 1828061 - RNA, 15 nt, Human herpesvirus 2
cggggacuccccucu

SEQ ID NO: 1828062 - RNA, 21 nt, Human herpesvirus 2
cgguaagcagcgcguccaggu

SEQ ID NO: 1828063 - RNA, 19 nt, Human herpesvirus 2
aggagggaaacuaggacag

SEQ ID NO: 1828064 - RNA, 22 nt, Human herpesvirus 2
ggucccgcgcucauggccggag

SEQ ID NO: 1828065 - RNA, 21 nt, Human herpesvirus 2
caaggaacccaauggccgcuc

SEQ ID NO: 1828066 - RNA, 16 nt, Human herpesvirus 2
guaacccaguuccuca

SEQ ID NO: 1828067 - RNA, 14 nt, Human herpesvirus 2
ccagauguggggug

SEQ ID NO: 1828068 - RNA, 17 nt, Human herpesvirus 2
gugcaccgaaggaggaa

SEQ ID NO: 1828069 - RNA, 16 nt, Human herpesvirus 2
cauacaccccacccua

SEQ ID NO: 1828070 - RNA, 22 nt, Human herpesvirus 2
caccagagccgaacgcaggucc

SEQ ID NO: 1828071 - RNA, 16 nt, Human herpesvirus 2
ccgcgugcuuccgcac

SEQ ID NO: 1828072 - RNA, 12 nt, Human herpesvirus 2
ggcggccagaaa

SEQ ID NO: 1828073 - RNA, 13 nt, Human herpesvirus 2
accaaaagggaaa

SEQ ID NO: 1828074 - RNA, 21 nt, Human herpesvirus 2
cggcaugcgacggcgucuccc

SEQ ID NO: 1828075 - RNA, 13 nt, Human herpesvirus 2
gccgcgcccccgg

SEQ ID NO: 1828076 - RNA, 19 nt, Human herpesvirus 2
gcgcaugggccgccagcag

SEQ ID NO: 1828077 - RNA, 18 nt, Human herpesvirus 2
ccggcccucccgcacccc

SEQ ID NO: 1828078 - RNA, 23 nt, Human herpesvirus 2
gcaccugcagaugcugcccgcgg

SEQ ID NO: 1828079 - RNA, 17 nt, Human herpesvirus 2
guucgcgcaucucuggc

SEQ ID NO: 1828080 - RNA, 18 nt, Human herpesvirus 2
ucgcucucggucccgcau

SEQ ID NO: 1828081 - RNA, 12 nt, Human herpesvirus 2
cccuacccuucc

SEQ ID NO: 1828082 - RNA, 18 nt, Human herpesvirus 2
cgcgcuaguacccagagg

SEQ ID NO: 1828083 - RNA, 23 nt, Human herpesvirus 2
cuguccccgccccccccaggggg

SEQ ID NO: 1828084 - RNA, 17 nt, Human herpesvirus 2
accccuuccuuuucuuu

SEQ ID NO: 1828085 - RNA, 12 nt, Human herpesvirus 2
cgccccccccga

SEQ ID NO: 1828086 - RNA, 21 nt, Human herpesvirus 2
gaugcgcgccgguacuggggc

SEQ ID NO: 1828087 - RNA, 14 nt, Human herpesvirus 2
ccacguccaccuug

SEQ ID NO: 1828088 - RNA, 20 nt, Human herpesvirus 2
aggcggucccggccgccauc

SEQ ID NO: 1828089 - RNA, 18 nt, Human herpesvirus 2
gcgcgaggccgcucuccg

SEQ ID NO: 1828090 - RNA, 20 nt, Human herpesvirus 2
caggaggggggcagugcagu

SEQ ID NO: 1828091 - RNA, 11 nt, Human herpesvirus 2
ggagccucuuu

SEQ ID NO: 1828092 - RNA, 19 nt, Human herpesvirus 2
cgccggguggcgccucugc

SEQ ID NO: 1828093 - RNA, 20 nt, Human herpesvirus 2
gcuguuguuucugggcccgc

SEQ ID NO: 1828094 - RNA, 20 nt, Human herpesvirus 2
aggacgcgcuaguacccaga

SEQ ID NO: 1828095 - RNA, 23 nt, Human herpesvirus 2
agcacggaggaacugggguacug

SEQ ID NO: 1828096 - RNA, 22 nt, Human herpesvirus 2
ccgcgcacgcgcgacugccucc

SEQ ID NO: 1828097 - RNA, 20 nt, Human herpesvirus 2
caagcgggcgggguggggag

SEQ ID NO: 1828098 - RNA, 18 nt, Human herpesvirus 2
ggcauaccuccgaccggc

SEQ ID NO: 1828099 - RNA, 16 nt, Human herpesvirus 2
ccauacauuuccccau

SEQ ID NO: 1828100 - RNA, 17 nt, Human herpesvirus 2
gaaaccgggggucgcac

SEQ ID NO: 1828101 - RNA, 15 nt, Human herpesvirus 2
ccaucucuguuucau

SEQ ID NO: 1828102 - RNA, 14 nt, Human herpesvirus 2
ggaccgcagucugg

SEQ ID NO: 1828103 - RNA, 15 nt, Human herpesvirus 2
ugggugacugggacc

SEQ ID NO: 1828104 - RNA, 15 nt, Human herpesvirus 2
ggcaccuccccggcg

SEQ ID NO: 1828105 - RNA, 19 nt, Human herpesvirus 2
gcaggcguguugggaaggg

SEQ ID NO: 1828106 - RNA, 21 nt, Human herpesvirus 2
gaguaugaccgucggugccag

SEQ ID NO: 1828107 - RNA, 20 nt, Human herpesvirus 2
accucggggugacccacgcc

SEQ ID NO: 1828108 - RNA, 21 nt, Human herpesvirus 2
acuacccuuucgacgcgcugg

SEQ ID NO: 1828109 - RNA, 12 nt, Human herpesvirus 2
uaaacucucccc

SEQ ID NO: 1828110 - RNA, 12 nt, Human herpesvirus 2
ggcguccccagg

SEQ ID NO: 1828111 - RNA, 18 nt, Human herpesvirus 2
gcgagcgguuggaggcgc

SEQ ID NO: 1828112 - RNA, 16 nt, Human herpesvirus 2
gaucgccagccgcggu

SEQ ID NO: 1828113 - RNA, 21 nt, Human herpesvirus 2
cgugguccccgagcagcacgg

SEQ ID NO: 1828114 - RNA, 18 nt, Human herpesvirus 2
gcgacgccgccccugccg

SEQ ID NO: 1828115 - RNA, 14 nt, Human herpesvirus 2
uaaaacccacccuc

SEQ ID NO: 1828116 - RNA, 22 nt, Human herpesvirus 2
gucacgagccccugggccgcuc

SEQ ID NO: 1828117 - RNA, 20 nt, Human herpesvirus 2
cacgguccucaccgagccgc

SEQ ID NO: 1828118 - RNA, 19 nt, Human herpesvirus 2
ccccgcccccucucccaca

SEQ ID NO: 1828119 - RNA, 15 nt, Human herpesvirus 2
ccccgugcuccaacu

SEQ ID NO: 1828120 - RNA, 13 nt, Human herpesvirus 2
cgcuaccucaccc

SEQ ID NO: 1828121 - RNA, 17 nt, Human herpesvirus 2
cccgcgugccuggccgc

SEQ ID NO: 1828122 - RNA, 15 nt, Human herpesvirus 2
ggggagggggugugg

SEQ ID NO: 1828123 - RNA, 15 nt, Human herpesvirus 2
cuggacgggaguucc

SEQ ID NO: 1828124 - RNA, 12 nt, Human herpesvirus 2
ccaugggccccg

SEQ ID NO: 1828125 - RNA, 19 nt, Human herpesvirus 2
guuggacgcguuucccuuu

SEQ ID NO: 1828126 - RNA, 15 nt, Human herpesvirus 2
cgccgacgccuuccc

SEQ ID NO: 1828127 - RNA, 18 nt, Human herpesvirus 2
aaaugucacgauaagaac

SEQ ID NO: 1828128 - RNA, 12 nt, Human herpesvirus 2
ggcgccgccggu

SEQ ID NO: 1828129 - RNA, 21 nt, Human herpesvirus 2
acccgacccuguggcgggcgc

SEQ ID NO: 1828130 - RNA, 15 nt, Human herpesvirus 2
cgcgugcggccagcc

SEQ ID NO: 1828131 - RNA, 19 nt, Human herpesvirus 2
ggcacgggcccggggcgaa

SEQ ID NO: 1828132 - RNA, 20 nt, Human herpesvirus 2
ccccgugguagucuuccggg

SEQ ID NO: 1828133 - RNA, 21 nt, Human herpesvirus 2
ugcugcugagcccugccccgc

SEQ ID NO: 1828134 - RNA, 20 nt, Human herpesvirus 2
gccaccgucccgcccgccag

SEQ ID NO: 1828135 - RNA, 20 nt, Human herpesvirus 2
gcgcucgcucuccgugcccc

SEQ ID NO: 1828136 - RNA, 18 nt, Human herpesvirus 2
ggggccgucgcggccgcc

SEQ ID NO: 1828137 - RNA, 21 nt, Human herpesvirus 2
gcccuggguccgggggccugg

SEQ ID NO: 1828138 - RNA, 16 nt, Human herpesvirus 2
ccgagcgucaggcccg

SEQ ID NO: 1828139 - RNA, 23 nt, Human herpesvirus 2
cgcccucgagaugugccuuccag

SEQ ID NO: 1828140 - RNA, 21 nt, Human herpesvirus 2
ccuccuucgccgacgccuucc

SEQ ID NO: 1828141 - RNA, 13 nt, Human herpesvirus 2
aggaacagaggcg

SEQ ID NO: 1828142 - RNA, 17 nt, Human herpesvirus 2
agcugcuggccaaacau

SEQ ID NO: 1828143 - RNA, 13 nt, Human herpesvirus 2
gcugccccgcggu

SEQ ID NO: 1828144 - RNA, 21 nt, Human herpesvirus 2
gugcuuuuacccucaccccac

SEQ ID NO: 1828145 - RNA, 15 nt, Human herpesvirus 2
agcacgaccagggag

SEQ ID NO: 1828146 - RNA, 22 nt, Human herpesvirus 2
ggguucgcgcaucucuggcucc

SEQ ID NO: 1828147 - RNA, 11 nt, Human herpesvirus 2
ccagagccuca

SEQ ID NO: 1828148 - RNA, 13 nt, Human herpesvirus 2
cgccccgccgggg

SEQ ID NO: 1828149 - RNA, 21 nt, Human herpesvirus 2
acaccagcagcuugcggggcu

SEQ ID NO: 1828150 - RNA, 17 nt, Human herpesvirus 2
cccacggaccuccggga

SEQ ID NO: 1828151 - RNA, 22 nt, Human herpesvirus 2
ggcggccucggccggcggagcc

SEQ ID NO: 1828152 - RNA, 23 nt, Human herpesvirus 2
ucggccaccuggaagcugccucc

SEQ ID NO: 1828153 - RNA, 19 nt, Human herpesvirus 2
cggcguggagcgccgggcc

SEQ ID NO: 1828154 - RNA, 17 nt, Human herpesvirus 2
ucgcuccggcucccggc

SEQ ID NO: 1828155 - RNA, 16 nt, Human herpesvirus 2
cggaaaauccucggcc

SEQ ID NO: 1828156 - RNA, 14 nt, Human herpesvirus 2
gcggcaccggggaa

SEQ ID NO: 1828157 - RNA, 15 nt, Human herpesvirus 2
cccaguuccucagug

SEQ ID NO: 1828158 - RNA, 23 nt, Human herpesvirus 2
cuccggucccuuccccaccacca

SEQ ID NO: 1828159 - RNA, 13 nt, Human herpesvirus 2
gccgcgacccacg

SEQ ID NO: 1828160 - RNA, 22 nt, Human herpesvirus 2
ccgggggggggcaagugcagua

SEQ ID NO: 1828161 - RNA, 18 nt, Human herpesvirus 2
acgugggaugacggaggc

SEQ ID NO: 1828162 - RNA, 12 nt, Human herpesvirus 2
cggcggagcccc

SEQ ID NO: 1828163 - RNA, 17 nt, Human herpesvirus 2
ccguggggccccagggc

SEQ ID NO: 1828164 - RNA, 21 nt, Human herpesvirus 2
guccgcuaccgccucuguucc

SEQ ID NO: 1828165 - RNA, 22 nt, Human herpesvirus 2
cugccgacuuccgugccccugg

SEQ ID NO: 1828166 - RNA, 18 nt, Human herpesvirus 2
ccaccgucccgcccgcca

SEQ ID NO: 1828167 - RNA, 18 nt, Human herpesvirus 2
cugggccgcucguuccuc

SEQ ID NO: 1828168 - RNA, 15 nt, Human herpesvirus 2
aggcccccggcccug

SEQ ID NO: 1828169 - RNA, 13 nt, Human herpesvirus 2
uacuugcgcggcu

SEQ ID NO: 1828170 - RNA, 11 nt, Human herpesvirus 2
ggccgcccccc

SEQ ID NO: 1828171 - RNA, 22 nt, Human herpesvirus 2
ugcucguaaaaauggcggccgc

SEQ ID NO: 1828172 - RNA, 12 nt, Human herpesvirus 2
ccuggcucgccg

SEQ ID NO: 1828173 - RNA, 22 nt, Human herpesvirus 2
gguugucuucuuuuccaccccu

SEQ ID NO: 1828174 - RNA, 15 nt, Human herpesvirus 2
gccggguggcgccuc

SEQ ID NO: 1828175 - RNA, 16 nt, Human herpesvirus 2
ggaggggggagauggg

SEQ ID NO: 1828176 - RNA, 22 nt, Human herpesvirus 2
ccacuuccuauaaacucucccc

SEQ ID NO: 1828177 - RNA, 16 nt, Human herpesvirus 2
gacuugacggucgcca

SEQ ID NO: 1828178 - RNA, 19 nt, Human herpesvirus 2
uccugcgcacgacagaccu

SEQ ID NO: 1828179 - RNA, 11 nt, Human herpesvirus 2
aauuaaauaca

SEQ ID NO: 1828180 - RNA, 14 nt, Human herpesvirus 2
gccgccauccccgc

SEQ ID NO: 1828181 - RNA, 16 nt, Human herpesvirus 2
ggaggcgccucugccc

SEQ ID NO: 1828182 - RNA, 18 nt, Human herpesvirus 2
cagcgcgaugaggggcac

SEQ ID NO: 1828183 - RNA, 23 nt, Human herpesvirus 2
cauggauaacagcuacccgcauc

SEQ ID NO: 1828184 - RNA, 19 nt, Human herpesvirus 2
ucgccccccgucgcuccgg

SEQ ID NO: 1828185 - RNA, 15 nt, Human herpesvirus 2
cgcccaggcccuggc

SEQ ID NO: 1828186 - RNA, 22 nt, Human herpesvirus 2
ggcuccagacgaaggacccaua

SEQ ID NO: 1828187 - RNA, 14 nt, Human herpesvirus 2
ggacgggugggccu

SEQ ID NO: 1828188 - RNA, 17 nt, Human herpesvirus 2
ugggggggggggaagag

SEQ ID NO: 1828189 - RNA, 14 nt, Human herpesvirus 2
ccgcgugccgcaga

SEQ ID NO: 1828190 - RNA, 17 nt, Human herpesvirus 2
gaauugacaagcggggg

SEQ ID NO: 1828191 - RNA, 19 nt, Human herpesvirus 2
aaggaacgcccgaaaccag

SEQ ID NO: 1828192 - RNA, 21 nt, Human herpesvirus 2
gcguucuggcggcccuggagc

SEQ ID NO: 1828193 - RNA, 14 nt, Human herpesvirus 2
cggccgggcagagc

SEQ ID NO: 1828194 - RNA, 14 nt, Human herpesvirus 2
uccugcggcucaug

SEQ ID NO: 1828195 - RNA, 13 nt, Human herpesvirus 2
ggcagcccggacc

SEQ ID NO: 1828196 - RNA, 14 nt, Human herpesvirus 2
uguuuugguugguu

SEQ ID NO: 1828197 - RNA, 18 nt, Human herpesvirus 2
gucgguugguuucuguau

SEQ ID NO: 1828198 - RNA, 14 nt, Human herpesvirus 2
cagcugcuggccaa

SEQ ID NO: 1828199 - RNA, 19 nt, Human herpesvirus 2
acuacucggaaagcgaaga

SEQ ID NO: 1828200 - RNA, 21 nt, Human herpesvirus 2
gcguugguucucguacccccu

SEQ ID NO: 1828201 - RNA, 13 nt, Human herpesvirus 2
cgaccggcggggc

SEQ ID NO: 1828202 - RNA, 19 nt, Human herpesvirus 2
aucaguccgcgcggggcgc

SEQ ID NO: 1828203 - RNA, 20 nt, Human herpesvirus 2
gcacucccgaaaccgcaggc

SEQ ID NO: 1828204 - RNA, 14 nt, Human herpesvirus 2
ggccgcccccagca

SEQ ID NO: 1828205 - RNA, 21 nt, Human herpesvirus 2
acuuucuggccuuguugaaaa

SEQ ID NO: 1828206 - RNA, 12 nt, Human herpesvirus 2
cguccggcuggc

SEQ ID NO: 1828207 - RNA, 17 nt, Human herpesvirus 2
ggaaaggaaaggaaaca

SEQ ID NO: 1828208 - RNA, 16 nt, Human herpesvirus 2
gcugcugcgcauggcc

SEQ ID NO: 1828209 - RNA, 18 nt, Human herpesvirus 2
ggagccccggagcuccga

SEQ ID NO: 1828210 - RNA, 19 nt, Human herpesvirus 2
uggccggguuuuuggcccu

SEQ ID NO: 1828211 - RNA, 22 nt, Human herpesvirus 2
cgccuuuccuccccucgccugu

SEQ ID NO: 1828212 - RNA, 12 nt, Human herpesvirus 2
cggucaggacca

SEQ ID NO: 1828213 - RNA, 12 nt, Human herpesvirus 2
gggaucagcaac

SEQ ID NO: 1828214 - RNA, 22 nt, Human herpesvirus 2
ccuggagcgccagacgggccgg

SEQ ID NO: 1828215 - RNA, 17 nt, Human herpesvirus 2
cucccucuuucccuccc

SEQ ID NO: 1828216 - RNA, 13 nt, Human herpesvirus 2
cgaguccugggug

SEQ ID NO: 1828217 - RNA, 13 nt, Human herpesvirus 2
guccugcggcuca

SEQ ID NO: 1828218 - RNA, 17 nt, Human herpesvirus 2
ggggcacgcggucagca

SEQ ID NO: 1828219 - RNA, 14 nt, Human herpesvirus 2
caucaggcucauug

SEQ ID NO: 1828220 - RNA, 16 nt, Human herpesvirus 2
cccggcgccgccccgc

SEQ ID NO: 1828221 - RNA, 21 nt, Human herpesvirus 2
cgggggucccgccucccggcc

SEQ ID NO: 1828222 - RNA, 15 nt, Human herpesvirus 2
accuaauuuuugugu

SEQ ID NO: 1828223 - RNA, 13 nt, Human herpesvirus 2
ggugggggaagaa

SEQ ID NO: 1828224 - RNA, 13 nt, Human herpesvirus 2
cgcccgccccugc

SEQ ID NO: 1828225 - RNA, 13 nt, Human herpesvirus 2
augcaaauuaaaa

SEQ ID NO: 1828226 - RNA, 19 nt, Human herpesvirus 2
cgccuccccgcuggagccc

SEQ ID NO: 1828227 - RNA, 13 nt, Human herpesvirus 2
gaugcgacgccgc

SEQ ID NO: 1828228 - RNA, 21 nt, Human herpesvirus 2
gccuccggaagagagcgcccc

SEQ ID NO: 1828229 - RNA, 20 nt, Human herpesvirus 2
cagagacccugccccccggc

SEQ ID NO: 1828230 - RNA, 22 nt, Human herpesvirus 2
cccuauacgcgguauggcugcc

SEQ ID NO: 1828231 - RNA, 19 nt, Human herpesvirus 2
cccacuuucccccccacuc

SEQ ID NO: 1828232 - RNA, 19 nt, Human herpesvirus 2
gacauguuacaccccccug

SEQ ID NO: 1828233 - RNA, 14 nt, Human herpesvirus 2
ugcacugccccccu

SEQ ID NO: 1828234 - RNA, 14 nt, Human herpesvirus 2
ccuccccgugcgug

SEQ ID NO: 1828235 - RNA, 12 nt, Human herpesvirus 2
agccgcccaagc

SEQ ID NO: 1828236 - RNA, 12 nt, Human herpesvirus 2
gcccagcacagg

SEQ ID NO: 1828237 - RNA, 15 nt, Human herpesvirus 2
gcgggcgggggcgcg

SEQ ID NO: 1828238 - RNA, 18 nt, Human herpesvirus 2
ggagauggggagaggggg

SEQ ID NO: 1828239 - RNA, 16 nt, Human herpesvirus 2
acggcaccgccgggcg

SEQ ID NO: 1828240 - RNA, 12 nt, Human herpesvirus 2
cggccgcaccca

SEQ ID NO: 1828241 - RNA, 15 nt, Human herpesvirus 2
gcuaguacccagagg

SEQ ID NO: 1828242 - RNA, 12 nt, Human herpesvirus 2
cggggcccgcag

SEQ ID NO: 1828243 - RNA, 20 nt, Human herpesvirus 2
caggugggccgacgugccgg

SEQ ID NO: 1828244 - RNA, 22 nt, Human herpesvirus 2
gauguugucgggggggauccag

SEQ ID NO: 1828245 - RNA, 18 nt, Human herpesvirus 2
cacggucggugcccccca

SEQ ID NO: 1828246 - RNA, 21 nt, Human herpesvirus 2
gcagacgcguauucaccgacc

SEQ ID NO: 1828247 - RNA, 15 nt, Human herpesvirus 2
ggggccccagggcuu

SEQ ID NO: 1828248 - RNA, 14 nt, Human herpesvirus 2
aaaucuauugaacu

SEQ ID NO: 1828249 - RNA, 14 nt, Human herpesvirus 2
caaacaaaaacaca

SEQ ID NO: 1828250 - RNA, 18 nt, Human herpesvirus 2
gcccccgccguggcggag

SEQ ID NO: 1828251 - RNA, 11 nt, Human herpesvirus 2
ccaaaaaccag

SEQ ID NO: 1828252 - RNA, 19 nt, Human herpesvirus 2
gcaggcuggagcucugccu

SEQ ID NO: 1828253 - RNA, 18 nt, Human herpesvirus 2
cucguccccuggggcggc

SEQ ID NO: 1828254 - RNA, 22 nt, Human herpesvirus 2
gcucuccgagggcgagcucggc

SEQ ID NO: 1828255 - RNA, 18 nt, Human herpesvirus 2
ucuuucggccaccacccc

SEQ ID NO: 1828256 - RNA, 17 nt, Human herpesvirus 2
uggaggggggggcuggu

SEQ ID NO: 1828257 - RNA, 22 nt, Human herpesvirus 2
guugguucguccgaccugcagg

SEQ ID NO: 1828258 - RNA, 20 nt, Human herpesvirus 2
cacgagcucgacggcgccua

SEQ ID NO: 1828259 - RNA, 15 nt, Human herpesvirus 2
ggcccggccgccggu

SEQ ID NO: 1828260 - RNA, 14 nt, Human herpesvirus 2
gacgcggcacaggu

SEQ ID NO: 1828261 - RNA, 16 nt, Human herpesvirus 2
gccacgucgggguccc

SEQ ID NO: 1828262 - RNA, 14 nt, Human herpesvirus 2
aaaaucguuauuau

SEQ ID NO: 1828263 - RNA, 16 nt, Human herpesvirus 2
gacggccccggccgcc

SEQ ID NO: 1828264 - RNA, 21 nt, Human herpesvirus 2
ggacaguucauaggccgggag

SEQ ID NO: 1828265 - RNA, 16 nt, Human herpesvirus 2
ccgccuaccagccccu

SEQ ID NO: 1828266 - RNA, 13 nt, Human herpesvirus 2
ugaucccccggaa

SEQ ID NO: 1828267 - RNA, 14 nt, Human herpesvirus 2
uguguuuuguggga

SEQ ID NO: 1828268 - RNA, 21 nt, Human herpesvirus 2
ccucggggacgcacggcaccc

SEQ ID NO: 1828269 - RNA, 13 nt, Human herpesvirus 2
cuuaugguaauua

SEQ ID NO: 1828270 - RNA, 21 nt, Human herpesvirus 2
acgucguccggggggugccac

SEQ ID NO: 1828271 - RNA, 20 nt, Human herpesvirus 2
cugaucgacgacgccuggcg

SEQ ID NO: 1828272 - RNA, 23 nt, Human herpesvirus 2
ccugccguaugcuaauuaaauac

SEQ ID NO: 1828273 - RNA, 13 nt, Human herpesvirus 2
auauaaggcaggg

SEQ ID NO: 1828274 - RNA, 18 nt, Human herpesvirus 2
gcgguaauuagcagcuuu

SEQ ID NO: 1828275 - RNA, 17 nt, Human herpesvirus 2
guccucaccgagccgcu

SEQ ID NO: 1828276 - RNA, 20 nt, Human herpesvirus 2
ggccgccuccccgcuggagc

SEQ ID NO: 1828277 - RNA, 16 nt, Human herpesvirus 2
ccguguggucgccccc

SEQ ID NO: 1828278 - RNA, 18 nt, Human herpesvirus 2
accgccaacaccagggca

SEQ ID NO: 1828279 - RNA, 19 nt, Human herpesvirus 2
cacgucggacgccagcugc

SEQ ID NO: 1828280 - RNA, 15 nt, Human herpesvirus 2
cugcgaggugcgcca

SEQ ID NO: 1828281 - RNA, 12 nt, Human herpesvirus 2
cccuucagccug

SEQ ID NO: 1828282 - RNA, 13 nt, Human herpesvirus 2
ggaggccuguccc

SEQ ID NO: 1828283 - RNA, 18 nt, Human herpesvirus 2
cggacacggccccgaaca

SEQ ID NO: 1828284 - RNA, 19 nt, Human herpesvirus 2
aggucuguuguguuugcug

SEQ ID NO: 1828285 - RNA, 22 nt, Human herpesvirus 2
caggugggugcuucggggacuu

SEQ ID NO: 1828286 - RNA, 20 nt, Human herpesvirus 2
ucccgacgauuagccaccgc

SEQ ID NO: 1828287 - RNA, 19 nt, Human herpesvirus 2
ggucgaucucggggagggc

SEQ ID NO: 1828288 - RNA, 17 nt, Human herpesvirus 2
gcgccgggccucccgca

SEQ ID NO: 1828289 - RNA, 20 nt, Human herpesvirus 2
ucccgauggccgccccgcag

SEQ ID NO: 1828290 - RNA, 21 nt, Human herpesvirus 2
guucgggcggcggaaacaaca

SEQ ID NO: 1828291 - RNA, 20 nt, Human herpesvirus 2
cguggaugccggggccgugg

SEQ ID NO: 1828292 - RNA, 18 nt, Human herpesvirus 2
cguguuugagucagggac

SEQ ID NO: 1828293 - RNA, 17 nt, Human herpesvirus 2
ccagggcugggagcccu

SEQ ID NO: 1828294 - RNA, 23 nt, Human herpesvirus 2
gccccggccgccuccccgcugga

SEQ ID NO: 1828295 - RNA, 14 nt, Human herpesvirus 2
cggcaauaaaagaa

SEQ ID NO: 1828296 - RNA, 20 nt, Human herpesvirus 2
cgggaggggcgggaggggcg

SEQ ID NO: 1828297 - RNA, 21 nt, Human herpesvirus 2
uccuagccccccccccucacc

SEQ ID NO: 1828298 - RNA, 12 nt, Human herpesvirus 2
uaccagccccuc

SEQ ID NO: 1828299 - RNA, 20 nt, Human herpesvirus 2
agcauccugaaccgcuggcu

SEQ ID NO: 1828300 - RNA, 13 nt, Human herpesvirus 2
gggcgugugacua

SEQ ID NO: 1828301 - RNA, 12 nt, Human herpesvirus 2
cccagggcacca

SEQ ID NO: 1828302 - RNA, 13 nt, Human herpesvirus 2
ucugccaggaggg

SEQ ID NO: 1828303 - RNA, 15 nt, Human herpesvirus 2
cuggcguccccaggc

SEQ ID NO: 1828304 - RNA, 13 nt, Human herpesvirus 2
ccacguccaccuu

SEQ ID NO: 1828305 - RNA, 21 nt, Human herpesvirus 2
gcuaacgagcgcgcugccgga

SEQ ID NO: 1828306 - RNA, 17 nt, Human herpesvirus 2
gccauccucaaacaggc

SEQ ID NO: 1828307 - RNA, 19 nt, Human herpesvirus 2
ggagagggggaaggaaucg

SEQ ID NO: 1828308 - RNA, 20 nt, Human herpesvirus 2
gccacccgaacauggcucgc

SEQ ID NO: 1828309 - RNA, 20 nt, Human herpesvirus 2
cggcggccaccccgccgcag

SEQ ID NO: 1828310 - RNA, 20 nt, Human herpesvirus 2
gacugggccgaugugcccug

SEQ ID NO: 1828311 - RNA, 20 nt, Human herpesvirus 2
cgaugcgacgccgccccugc

SEQ ID NO: 1828312 - RNA, 20 nt, Human herpesvirus 2
guaucagugggugacagagu

SEQ ID NO: 1828313 - RNA, 17 nt, Human herpesvirus 2
gccccucgcuccccgcg

SEQ ID NO: 1828314 - RNA, 16 nt, Human herpesvirus 2
ggucugugggugguga

SEQ ID NO: 1828315 - RNA, 23 nt, Human herpesvirus 2
gccgcuuuaccccgcggccucgc

SEQ ID NO: 1828316 - RNA, 20 nt, Human herpesvirus 2
cagggcuucguggaagagga

SEQ ID NO: 1828317 - RNA, 12 nt, Human herpesvirus 2
aggaagaaagaa

SEQ ID NO: 1828318 - RNA, 22 nt, Human herpesvirus 2
ggucccuuccccaccaccaacc

SEQ ID NO: 1828319 - RNA, 16 nt, Human herpesvirus 2
ccucguggggcuggac

SEQ ID NO: 1828320 - RNA, 13 nt, Human herpesvirus 2
accguccaccucc

SEQ ID NO: 1828321 - RNA, 21 nt, Human herpesvirus 2
ccgccgucucccccgcgagca

SEQ ID NO: 1828322 - RNA, 16 nt, Human herpesvirus 2
cucuggugucggccgc

SEQ ID NO: 1828323 - RNA, 22 nt, Human herpesvirus 2
uaauaggcggucccggccgcca

SEQ ID NO: 1828324 - RNA, 16 nt, Human herpesvirus 2
agaagggaaaggaaca

SEQ ID NO: 1828325 - RNA, 14 nt, Human herpesvirus 2
aggcuggagcucug

SEQ ID NO: 1828326 - RNA, 15 nt, Human herpesvirus 2
cgcuggagccccugg

SEQ ID NO: 1828327 - RNA, 19 nt, Human herpesvirus 2
caucaagaauucccagggc

SEQ ID NO: 1828328 - RNA, 16 nt, Human herpesvirus 2
gcagccccgguccccc

SEQ ID NO: 1828329 - RNA, 19 nt, Human herpesvirus 2
auugugggaauccucgggu

SEQ ID NO: 1828330 - RNA, 13 nt, Human herpesvirus 2
ggccaccccgccg

SEQ ID NO: 1828331 - RNA, 12 nt, Human herpesvirus 2
ucccccccucaa

SEQ ID NO: 1828332 - RNA, 15 nt, Human herpesvirus 2
cugguggcaccuccc

SEQ ID NO: 1828333 - RNA, 11 nt, Human herpesvirus 2
gggaugugucu

SEQ ID NO: 1828334 - RNA, 15 nt, Human herpesvirus 2
cuucagccuggacca

SEQ ID NO: 1828335 - RNA, 15 nt, Human herpesvirus 2
uccacgccguggacg

SEQ ID NO: 1828336 - RNA, 14 nt, Human herpesvirus 2
guucggcaggcccg

SEQ ID NO: 1828337 - RNA, 14 nt, Human herpesvirus 2
cgaggcccccggcc

SEQ ID NO: 1828338 - RNA, 18 nt, Human herpesvirus 2
ugccagguggcccuuccg

SEQ ID NO: 1828339 - RNA, 19 nt, Human herpesvirus 2
cggaggaaacccccgaccc

SEQ ID NO: 1828340 - RNA, 12 nt, Human herpesvirus 2
ggcugcuccgcu

SEQ ID NO: 1828341 - RNA, 23 nt, Human herpesvirus 2
ggggccucggucgacgaggccug

SEQ ID NO: 1828342 - RNA, 21 nt, Human herpesvirus 2
cuucgaucgacgaacuggggc

SEQ ID NO: 1828343 - RNA, 20 nt, Human herpesvirus 2
gccguuggggauacgggggc

SEQ ID NO: 1828344 - RNA, 22 nt, Human herpesvirus 2
gccccgauauucaagcccgcgg

SEQ ID NO: 1828345 - RNA, 19 nt, Human herpesvirus 2
cgcuggcggaagugccgca

SEQ ID NO: 1828346 - RNA, 19 nt, Human herpesvirus 2
gaccgucuuugggccccgc

SEQ ID NO: 1828347 - RNA, 17 nt, Human herpesvirus 2
auuucuuuguucccucu

SEQ ID NO: 1828348 - RNA, 21 nt, Human herpesvirus 2
ggcaucguuuggguggaggag

SEQ ID NO: 1828349 - RNA, 15 nt, Human herpesvirus 2
gggccgugucccucc

SEQ ID NO: 1828350 - RNA, 21 nt, Human herpesvirus 2
cacggcacaccggcggggcgg

SEQ ID NO: 1828351 - RNA, 15 nt, Human herpesvirus 2
ggcgagcuggcccug

SEQ ID NO: 1828352 - RNA, 20 nt, Human herpesvirus 2
cccucccgcacccccgcguu

SEQ ID NO: 1828353 - RNA, 19 nt, Human herpesvirus 2
aucuuggcguuauuuccaa

SEQ ID NO: 1828354 - RNA, 19 nt, Human herpesvirus 2
agacuggccgugcugggcg

SEQ ID NO: 1828355 - RNA, 20 nt, Human herpesvirus 2
cgaggcccacccccccaccc

SEQ ID NO: 1828356 - RNA, 13 nt, Human herpesvirus 2
ggagcuucaucac

SEQ ID NO: 1828357 - RNA, 14 nt, Human herpesvirus 2
ccgcgggaggaugu

SEQ ID NO: 1828358 - RNA, 16 nt, Human herpesvirus 2
acccccagcgcggacg

SEQ ID NO: 1828359 - RNA, 17 nt, Human herpesvirus 2
cccaaggcgcugcgccu

SEQ ID NO: 1828360 - RNA, 14 nt, Human herpesvirus 2
gucgcgacccugcu

SEQ ID NO: 1828361 - RNA, 15 nt, Human herpesvirus 2
auucgucaccuggcu

SEQ ID NO: 1828362 - RNA, 16 nt, Human herpesvirus 2
gugcugugcccugggu

SEQ ID NO: 1828363 - RNA, 17 nt, Human herpesvirus 2
gcagcgugucaaaggcc

SEQ ID NO: 1828364 - RNA, 13 nt, Human herpesvirus 2
ggcccggccgccg

SEQ ID NO: 1828365 - RNA, 15 nt, Human herpesvirus 2
ggacgacgggcgccc

SEQ ID NO: 1828366 - RNA, 12 nt, Human herpesvirus 2
accaaaagggaa

SEQ ID NO: 1828367 - RNA, 19 nt, Human herpesvirus 2
acgcccaggcccuggcgca

SEQ ID NO: 1828368 - RNA, 20 nt, Human herpesvirus 2
gcuaguacccagaggcugga

SEQ ID NO: 1828369 - RNA, 21 nt, Human herpesvirus 2
gaaacacgguggcgcgcuggc

SEQ ID NO: 1828370 - RNA, 22 nt, Human herpesvirus 2
gggcagugcaguaccccaguuc

SEQ ID NO: 1828371 - RNA, 21 nt, Human herpesvirus 2
ugugcgggaggggcuuggccu

SEQ ID NO: 1828372 - RNA, 17 nt, Human herpesvirus 2
cgccucugcccgaccgg

SEQ ID NO: 1828373 - RNA, 20 nt, Human herpesvirus 2
gcgccgucgucgcccgcccg

SEQ ID NO: 1828374 - RNA, 14 nt, Human herpesvirus 2
ccgaccccgccgcc

SEQ ID NO: 1828375 - RNA, 16 nt, Human herpesvirus 2
guccccaggcgacgcc

SEQ ID NO: 1828376 - RNA, 11 nt, Human herpesvirus 2
auaaaagccaa

SEQ ID NO: 1828377 - RNA, 22 nt, Human herpesvirus 2
agccaggcaaacgguaagcagc

SEQ ID NO: 1828378 - RNA, 15 nt, Human herpesvirus 2
gggcgcccccgccuc

SEQ ID NO: 1828379 - RNA, 15 nt, Human herpesvirus 2
ggccucguggucggg

SEQ ID NO: 1828380 - RNA, 16 nt, Human herpesvirus 2
cggccaacgaggacca

SEQ ID NO: 1828381 - RNA, 18 nt, Human herpesvirus 2
acgagaacgagaugguuu

SEQ ID NO: 1828382 - RNA, 19 nt, Human herpesvirus 2
cuccgcgggucccuuccca

SEQ ID NO: 1828383 - RNA, 14 nt, Human herpesvirus 2
cguccugcggcuca

SEQ ID NO: 1828384 - RNA, 15 nt, Human herpesvirus 2
cgcacgcggggaccc

SEQ ID NO: 1828385 - RNA, 15 nt, Human herpesvirus 2
ggcuggcgcggugcc

SEQ ID NO: 1828386 - RNA, 14 nt, Human herpesvirus 2
ccacgucaccgggg

SEQ ID NO: 1828387 - RNA, 15 nt, Human herpesvirus 2
ucuucuuccccagcu

SEQ ID NO: 1828388 - RNA, 23 nt, Human herpesvirus 2
ggccccgccccgccccaccccgc

SEQ ID NO: 1828389 - RNA, 11 nt, Human herpesvirus 2
gagccccgcgu

SEQ ID NO: 1828390 - RNA, 11 nt, Human herpesvirus 2
cggggaaacag

SEQ ID NO: 1828391 - RNA, 20 nt, Human herpesvirus 2
uugaugggcggggggguucg

SEQ ID NO: 1828392 - RNA, 14 nt, Human herpesvirus 2
cgcgcgcagaggga

SEQ ID NO: 1828393 - RNA, 22 nt, Human herpesvirus 2
ggugggccuagccgugggccug

SEQ ID NO: 1828394 - RNA, 18 nt, Human herpesvirus 2
uccggggguugggucugc

SEQ ID NO: 1828395 - RNA, 16 nt, Human herpesvirus 2
gagccgcugugccagg

SEQ ID NO: 1828396 - RNA, 19 nt, Human herpesvirus 2
ggaagagagcgccccgccc

SEQ ID NO: 1828397 - RNA, 23 nt, Human herpesvirus 2
gcagcgcgggcgacgggcggcug

SEQ ID NO: 1828398 - RNA, 15 nt, Human herpesvirus 2
cagccuacaucaccc

SEQ ID NO: 1828399 - RNA, 17 nt, Human herpesvirus 2
accaucgcguacagccu

SEQ ID NO: 1828400 - RNA, 20 nt, Human herpesvirus 2
acacgcgcuggccccucugc

SEQ ID NO: 1828401 - RNA, 14 nt, Human herpesvirus 2
gucugcggccgaca

SEQ ID NO: 1828402 - RNA, 14 nt, Human herpesvirus 2
gucgcccuucacca

SEQ ID NO: 1828403 - RNA, 14 nt, Human herpesvirus 2
gaccugcagccggc

SEQ ID NO: 1828404 - RNA, 21 nt, Human herpesvirus 2
ccgggggggggcaagugcagu

SEQ ID NO: 1828405 - RNA, 15 nt, Human herpesvirus 2
cccaccgcaccacca

SEQ ID NO: 1828406 - RNA, 16 nt, Human herpesvirus 2
gcuuggacugggagcc

SEQ ID NO: 1828407 - RNA, 19 nt, Human herpesvirus 2
uccuccgugcuggggaaau

SEQ ID NO: 1828408 - RNA, 14 nt, Human herpesvirus 2
ggcgcgagccaggc

SEQ ID NO: 1828409 - RNA, 15 nt, Human herpesvirus 2
ugcacuugccccccc

SEQ ID NO: 1828410 - RNA, 15 nt, Human herpesvirus 2
accccgucucccugc

SEQ ID NO: 1828411 - RNA, 22 nt, Human herpesvirus 2
uguuacaccccccugacucagg

SEQ ID NO: 1828412 - RNA, 15 nt, Human herpesvirus 2
ucaauagauuucccc

SEQ ID NO: 1828413 - RNA, 17 nt, Human herpesvirus 2
cagcauccugaaccgcu

SEQ ID NO: 1828414 - RNA, 23 nt, Human herpesvirus 2
ugggcccgugugggaggguggcu

SEQ ID NO: 1828415 - RNA, 21 nt, Human herpesvirus 2
ugucaucguauaccagccgcc

SEQ ID NO: 1828416 - RNA, 19 nt, Human herpesvirus 2
gucccgccucccggccgcc

SEQ ID NO: 1828417 - RNA, 18 nt, Human herpesvirus 2
ccagaccgaagaggugcu

SEQ ID NO: 1828418 - RNA, 18 nt, Human herpesvirus 2
cugcgucguccagggugg

SEQ ID NO: 1828419 - RNA, 18 nt, Human herpesvirus 2
agccccccccccucaccc

SEQ ID NO: 1828420 - RNA, 18 nt, Human herpesvirus 2
acgcucucugccuccuuc

SEQ ID NO: 1828421 - RNA, 16 nt, Human herpesvirus 2
ccgcugguuucucugc

SEQ ID NO: 1828422 - RNA, 19 nt, Human herpesvirus 2
ccggaccccgcugcugugc

SEQ ID NO: 1828423 - RNA, 17 nt, Human herpesvirus 2
gucgccggaugcgggcg

SEQ ID NO: 1828424 - RNA, 14 nt, Human herpesvirus 2
cccgacccuguggc

SEQ ID NO: 1828425 - RNA, 20 nt, Human herpesvirus 2
ccacgucaccgggggccccg

SEQ ID NO: 1828426 - RNA, 16 nt, Human herpesvirus 2
ccagaggcuggagcgc

SEQ ID NO: 1828427 - RNA, 15 nt, Human herpesvirus 2
gccaucgccggggac

SEQ ID NO: 1828428 - RNA, 14 nt, Human herpesvirus 2
caggcccgccgacg

SEQ ID NO: 1828429 - RNA, 15 nt, Human herpesvirus 2
acuuccgggagcggg

SEQ ID NO: 1828430 - RNA, 10 nt, Human herpesvirus 2
cccgucccga

SEQ ID NO: 1828431 - RNA, 14 nt, Human herpesvirus 2
gccuccgcccuccg

SEQ ID NO: 1828432 - RNA, 15 nt, Human herpesvirus 2
aagagagcgccccgc

SEQ ID NO: 1828433 - RNA, 15 nt, Human herpesvirus 2
cggaacgccccgggc

SEQ ID NO: 1828434 - RNA, 12 nt, Human herpesvirus 2
gcaauaaaagaa

SEQ ID NO: 1828435 - RNA, 16 nt, Human herpesvirus 2
cacaccggagacccaa

SEQ ID NO: 1828436 - RNA, 13 nt, Human herpesvirus 2
agccccuggggcu

SEQ ID NO: 1828437 - RNA, 11 nt, Human herpesvirus 2
cuuugacuccu

SEQ ID NO: 1828438 - RNA, 21 nt, Human herpesvirus 2
gccucccgcaagagccugccg

SEQ ID NO: 1828439 - RNA, 18 nt, Human herpesvirus 2
acccaaccgacucccucc

SEQ ID NO: 1828440 - RNA, 17 nt, Human herpesvirus 2
cgcgugccgcagaccac

SEQ ID NO: 1828441 - RNA, 22 nt, Human herpesvirus 2
cgcgcgcccccgacccggggcc

SEQ ID NO: 1828442 - RNA, 15 nt, Human herpesvirus 2
cugacggaccucggg

SEQ ID NO: 1828443 - RNA, 23 nt, Human herpesvirus 2
cccggcggccgcauauacugcug

SEQ ID NO: 1828444 - RNA, 12 nt, Human herpesvirus 2
gcuccauccuga

SEQ ID NO: 1828445 - RNA, 14 nt, Human herpesvirus 2
gagcccugccccgc

SEQ ID NO: 1828446 - RNA, 17 nt, Human herpesvirus 2
ccucgcugcucucccgu

SEQ ID NO: 1828447 - RNA, 12 nt, Human herpesvirus 2
gcuggcccugga

SEQ ID NO: 1828448 - RNA, 22 nt, Human herpesvirus 2
cguggccggguuuuuggcccug

SEQ ID NO: 1828449 - RNA, 22 nt, Human herpesvirus 2
cgguggcgucggcggccccggc

SEQ ID NO: 1828450 - RNA, 12 nt, Human herpesvirus 2
ccuucuucgccc

SEQ ID NO: 1828451 - RNA, 17 nt, Human herpesvirus 2
agaggcccggaacgagg

SEQ ID NO: 1828452 - RNA, 14 nt, Human herpesvirus 2
gcucugccugcacg

SEQ ID NO: 1828453 - RNA, 20 nt, Human herpesvirus 2
ggucuagaugccaguggagc

SEQ ID NO: 1828454 - RNA, 16 nt, Human herpesvirus 2
cccucaccccacccca

SEQ ID NO: 1828455 - RNA, 22 nt, Human herpesvirus 2
guuucgggcguuccuucccuuu

SEQ ID NO: 1828456 - RNA, 14 nt, Human herpesvirus 2
cuggguuacugcac

SEQ ID NO: 1828457 - RNA, 21 nt, Human herpesvirus 2
cacacaggcccaccaccaucc

SEQ ID NO: 1828458 - RNA, 11 nt, Human herpesvirus 2
gagagcccagg

SEQ ID NO: 1828459 - RNA, 19 nt, Human herpesvirus 2
uucaccgaccccccccucg

SEQ ID NO: 1828460 - RNA, 17 nt, Human herpesvirus 2
caccuccccggcggccg

SEQ ID NO: 1828461 - RNA, 18 nt, Human herpesvirus 2
cgcgggcgacgccgcggc

SEQ ID NO: 1828462 - RNA, 18 nt, Human herpesvirus 2
caccggggaaacaggcac

SEQ ID NO: 1828463 - RNA, 15 nt, Human herpesvirus 2
cgacgccuucccugu

SEQ ID NO: 1828464 - RNA, 17 nt, Human herpesvirus 2
uccccgcuggagccccu

SEQ ID NO: 1828465 - RNA, 19 nt, Human herpesvirus 2
acgcgcacguggggccucu

SEQ ID NO: 1828466 - RNA, 16 nt, Human herpesvirus 2
ccuugcccccacccca

SEQ ID NO: 1828467 - RNA, 18 nt, Human herpesvirus 2
cucucccuuuuuuccccc

SEQ ID NO: 1828468 - RNA, 22 nt, Human herpesvirus 2
cugggcccgccgaccgcccccc

SEQ ID NO: 1828469 - RNA, 16 nt, Human herpesvirus 2
ccggcggagccccgga

SEQ ID NO: 1828470 - RNA, 15 nt, Human herpesvirus 2
ccgcacccccgccua

SEQ ID NO: 1828471 - RNA, 20 nt, Human herpesvirus 2
cccgcgugccgcagaccacc

SEQ ID NO: 1828472 - RNA, 20 nt, Human herpesvirus 2
ggcgacggcaccgccgggcg

SEQ ID NO: 1828473 - RNA, 18 nt, Human herpesvirus 2
gcaggcgcgccaccgccc

SEQ ID NO: 1828474 - RNA, 19 nt, Human herpesvirus 2
ccagagccccccacguggg

SEQ ID NO: 1828475 - RNA, 16 nt, Human herpesvirus 2
uccccgaaagccacca

SEQ ID NO: 1828476 - RNA, 17 nt, Human herpesvirus 2
ucaauaaaaaacaccaa

SEQ ID NO: 1828477 - RNA, 22 nt, Human herpesvirus 2
accugcgcggcguuggcgcgcu

SEQ ID NO: 1828478 - RNA, 19 nt, Human herpesvirus 2
ccccaggaggggggcagug

SEQ ID NO: 1828479 - RNA, 16 nt, Human herpesvirus 2
cguggccagagccuca

SEQ ID NO: 1828480 - RNA, 22 nt, Human herpesvirus 2
aggaggcggcgccugcgccccg

SEQ ID NO: 1828481 - RNA, 13 nt, Human herpesvirus 2
acgcguuucccuu

SEQ ID NO: 1828482 - RNA, 14 nt, Human herpesvirus 2
cccgccccccccag

SEQ ID NO: 1828483 - RNA, 16 nt, Human herpesvirus 2
cuuggcgcgcgcggcg

SEQ ID NO: 1828484 - RNA, 22 nt, Human herpesvirus 2
ccuuuccuuaaaaggcacccca

SEQ ID NO: 1828485 - RNA, 13 nt, Human herpesvirus 2
cccucaccccucc

SEQ ID NO: 1828486 - RNA, 18 nt, Human herpesvirus 2
gguccuggaggggggugc

SEQ ID NO: 1828487 - RNA, 14 nt, Human herpesvirus 2
cucaucgcacggcg

SEQ ID NO: 1828488 - RNA, 12 nt, Human herpesvirus 2
gcaggggagggg

SEQ ID NO: 1828489 - RNA, 16 nt, Human herpesvirus 2
gggcgcgagccaggca

SEQ ID NO: 1828490 - RNA, 22 nt, Human herpesvirus 2
gaaggcguuuauugcggagaga

SEQ ID NO: 1828491 - RNA, 17 nt, Human herpesvirus 2
cccacccccgcacccca

SEQ ID NO: 1828492 - RNA, 13 nt, Human herpesvirus 2
cagggaggccaga

SEQ ID NO: 1828493 - RNA, 16 nt, Human herpesvirus 2
gccugcgccccgacgg

SEQ ID NO: 1828494 - RNA, 12 nt, Human herpesvirus 2
cucgaaggaggg

SEQ ID NO: 1828495 - RNA, 20 nt, Human herpesvirus 2
ggccuggcguuugggggcgg

SEQ ID NO: 1828496 - RNA, 22 nt, Human herpesvirus 2
uggcgcgucguucggggggacg

SEQ ID NO: 1828497 - RNA, 14 nt, Human herpesvirus 2
accucgcggcggcu

SEQ ID NO: 1828498 - RNA, 13 nt, Human herpesvirus 2
caccccgccgcag

SEQ ID NO: 1828499 - RNA, 19 nt, Human herpesvirus 2
uauuuccaaacagggccuu

SEQ ID NO: 1828500 - RNA, 18 nt, Human herpesvirus 2
guucguguuguggcugga

SEQ ID NO: 1828501 - RNA, 14 nt, Human herpesvirus 2
uccgaccugcagga

SEQ ID NO: 1828502 - RNA, 22 nt, Human herpesvirus 2
gcaagcgggcgggguggggagg

SEQ ID NO: 1828503 - RNA, 13 nt, Human herpesvirus 2
ccaccggccuggu

SEQ ID NO: 1828504 - RNA, 13 nt, Human herpesvirus 2
cucgcgguaauua

SEQ ID NO: 1828505 - RNA, 18 nt, Human herpesvirus 2
cuugauuuacgagggggc

SEQ ID NO: 1828506 - RNA, 21 nt, Human herpesvirus 2
ggccgcgcccccggccgcggu

SEQ ID NO: 1828507 - RNA, 18 nt, Human herpesvirus 2
acccccgggggggggcaa

SEQ ID NO: 1828508 - RNA, 20 nt, Human herpesvirus 2
cugcgccaccggccuggucg

SEQ ID NO: 1828509 - RNA, 18 nt, Human herpesvirus 2
ccggggcgaacgggggau

SEQ ID NO: 1828510 - RNA, 12 nt, Human herpesvirus 2
cgggcggugccc

SEQ ID NO: 1828511 - RNA, 21 nt, Human herpesvirus 2
gugugggaggguggcuggggu

SEQ ID NO: 1828512 - RNA, 20 nt, Human herpesvirus 2
ccaccuucgcucccucagca

SEQ ID NO: 1828513 - RNA, 19 nt, Human herpesvirus 2
uccgcacgggcguccccgg

SEQ ID NO: 1828514 - RNA, 14 nt, Human herpesvirus 2
ccgccuaccagccc

SEQ ID NO: 1828515 - RNA, 15 nt, Human herpesvirus 2
ccagacgcccuccga

SEQ ID NO: 1828516 - RNA, 23 nt, Human herpesvirus 2
gugcccccccucguucugcugca

SEQ ID NO: 1828517 - RNA, 19 nt, Human herpesvirus 2
gcccggcgccgccccgccg

SEQ ID NO: 1828518 - RNA, 22 nt, Human herpesvirus 2
ccccggcgaccgccccgcgccg

SEQ ID NO: 1828519 - RNA, 16 nt, Human herpesvirus 2
cguguccccagggagc

SEQ ID NO: 1828520 - RNA, 18 nt, Human herpesvirus 2
ugggauaucucacacaga

SEQ ID NO: 1828521 - RNA, 20 nt, Human herpesvirus 2
ggcgacgccaggccccccgg

SEQ ID NO: 1828522 - RNA, 22 nt, Human herpesvirus 2
acuauccuugccucguggggcu

SEQ ID NO: 1828523 - RNA, 14 nt, Human herpesvirus 2
ggggaaagugggcc

SEQ ID NO: 1828524 - RNA, 18 nt, Human herpesvirus 2
gcaccugcagaugcugcc

SEQ ID NO: 1828525 - RNA, 20 nt, Human herpesvirus 2
ucgcggagggcggccagccg

SEQ ID NO: 1828526 - RNA, 16 nt, Human herpesvirus 2
caccaacuccgcccuc

SEQ ID NO: 1828527 - RNA, 18 nt, Human herpesvirus 2
gguauuugggugggacuu

SEQ ID NO: 1828528 - RNA, 20 nt, Human herpesvirus 2
ccgggacuucgagcucgucu

SEQ ID NO: 1828529 - RNA, 23 nt, Human herpesvirus 2
caggcgucgaucucaucaaacac

SEQ ID NO: 1828530 - RNA, 16 nt, Human herpesvirus 2
agauggggagaggggg

SEQ ID NO: 1828531 - RNA, 21 nt, Human herpesvirus 2
ggacccgccagagacccugcc

SEQ ID NO: 1828532 - RNA, 16 nt, Human herpesvirus 2
aagaggcggacccagu

SEQ ID NO: 1828533 - RNA, 17 nt, Human herpesvirus 2
uugagaggggggggugg

SEQ ID NO: 1828534 - RNA, 18 nt, Human herpesvirus 2
gacggccaugaccucgcc

SEQ ID NO: 1828535 - RNA, 13 nt, Human herpesvirus 2
cggccgccccccg

SEQ ID NO: 1828536 - RNA, 13 nt, Human herpesvirus 2
acgguccucaccg

SEQ ID NO: 1828537 - RNA, 13 nt, Human herpesvirus 2
acacacacacagg

SEQ ID NO: 1828538 - RNA, 17 nt, Human herpesvirus 2
cucgcugcagggccugg

SEQ ID NO: 1828539 - RNA, 13 nt, Human herpesvirus 2
gaggggcuccuca

SEQ ID NO: 1828540 - RNA, 16 nt, Human herpesvirus 2
accgagccgcugugcc

SEQ ID NO: 1828541 - RNA, 12 nt, Human herpesvirus 2
gcagccgggccc

SEQ ID NO: 1828542 - RNA, 18 nt, Human herpesvirus 2
gccgguagugcagguggg

SEQ ID NO: 1828543 - RNA, 18 nt, Human herpesvirus 2
agucgcccauacaaauua

SEQ ID NO: 1828544 - RNA, 16 nt, Human herpesvirus 2
gcuucccccgcccacc

SEQ ID NO: 1828545 - RNA, 15 nt, Human herpesvirus 2
cgccugcgccccgac

SEQ ID NO: 1828546 - RNA, 17 nt, Human herpesvirus 2
cgcgggucccuucccaa

SEQ ID NO: 1828547 - RNA, 23 nt, Human herpesvirus 2
cugcgcauggccugcgaggugcg

SEQ ID NO: 1828548 - RNA, 22 nt, Human herpesvirus 2
gcggcaccauaacaccgucccc

SEQ ID NO: 1828549 - RNA, 16 nt, Human herpesvirus 2
gaugugucgcggggac

SEQ ID NO: 1828550 - RNA, 11 nt, Human herpesvirus 2
ggcaggccgcg

SEQ ID NO: 1828551 - RNA, 21 nt, Human herpesvirus 2
gggcuuggacgcgccucccgg

SEQ ID NO: 1828552 - RNA, 16 nt, Human herpesvirus 2
gacacacacacaggcc

SEQ ID NO: 1828553 - RNA, 17 nt, Human herpesvirus 2
gcgccggcaccaggcua

SEQ ID NO: 1828554 - RNA, 14 nt, Human herpesvirus 2
gacaccagcagcuu

SEQ ID NO: 1828555 - RNA, 11 nt, Human herpesvirus 2
gacuggccgug

SEQ ID NO: 1828556 - RNA, 20 nt, Human herpesvirus 2
ccaccaauacaccagagccg

SEQ ID NO: 1828557 - RNA, 17 nt, Human herpesvirus 2
cgggauccuccgccagc

SEQ ID NO: 1828558 - RNA, 22 nt, Human herpesvirus 2
cguggugauacaacacaccccc

SEQ ID NO: 1828559 - RNA, 18 nt, Human herpesvirus 2
ggaacuggguuacugcac

SEQ ID NO: 1828560 - RNA, 23 nt, Human herpesvirus 2
ucgcacgcgcgcaggcuggagcu

SEQ ID NO: 1828561 - RNA, 14 nt, Human herpesvirus 2
guacucaucgggac

SEQ ID NO: 1828562 - RNA, 17 nt, Human herpesvirus 2
ucaccgagagcgccguc

SEQ ID NO: 1828563 - RNA, 22 nt, Human herpesvirus 2
cgcccucgcccagacgcccucc

SEQ ID NO: 1828564 - RNA, 12 nt, Human herpesvirus 2
gcggggaugggg

SEQ ID NO: 1828565 - RNA, 20 nt, Human herpesvirus 2
guggagcgccgggccucccg

SEQ ID NO: 1828566 - RNA, 19 nt, Human herpesvirus 2
ccgcgauuccgagggcagg

SEQ ID NO: 1828567 - RNA, 14 nt, Human herpesvirus 2
ccccgcggaccccg

SEQ ID NO: 1828568 - RNA, 17 nt, Human herpesvirus 2
gcucauggccggagaaa

SEQ ID NO: 1828569 - RNA, 21 nt, Human herpesvirus 2
guggccggguuuuuggcccug

SEQ ID NO: 1828570 - RNA, 14 nt, Human herpesvirus 2
ccggggcccgcagc

SEQ ID NO: 1828571 - RNA, 21 nt, Human herpesvirus 2
ccuccggaagagagcgccccg

SEQ ID NO: 1828572 - RNA, 23 nt, Human herpesvirus 2
ugcguccgucucaauaaagccag

SEQ ID NO: 1828573 - RNA, 20 nt, Human herpesvirus 2
gggccguggggccccagggc

SEQ ID NO: 1828574 - RNA, 17 nt, Human herpesvirus 2
cauuuaggauggcugcu

SEQ ID NO: 1828575 - RNA, 15 nt, Human herpesvirus 2
cggcccugcggccaa

SEQ ID NO: 1828576 - RNA, 12 nt, Human herpesvirus 2
acuuuauuggga

SEQ ID NO: 1828577 - RNA, 14 nt, Human herpesvirus 2
gcgccagggggauc

SEQ ID NO: 1828578 - RNA, 14 nt, Human herpesvirus 2
cgcaucuacgaccc

SEQ ID NO: 1828579 - RNA, 13 nt, Human herpesvirus 2
agcggcgagugcu

SEQ ID NO: 1828580 - RNA, 22 nt, Human herpesvirus 2
gaccaccucgcggcggcucccc

SEQ ID NO: 1828581 - RNA, 12 nt, Human herpesvirus 2
gccguggccaga

SEQ ID NO: 1828582 - RNA, 12 nt, Human herpesvirus 2
cgugcucugcca

SEQ ID NO: 1828583 - RNA, 17 nt, Human herpesvirus 2
cucccccgacgucucgg

SEQ ID NO: 1828584 - RNA, 18 nt, Human herpesvirus 2
cgcuuacggcaacaaagg

SEQ ID NO: 1828585 - RNA, 19 nt, Human herpesvirus 2
uacgacccccgaacagccc

SEQ ID NO: 1828586 - RNA, 11 nt, Human herpesvirus 2
gauagcaaacg

SEQ ID NO: 1828587 - RNA, 15 nt, Human herpesvirus 2
cgcgucgggggccgg

SEQ ID NO: 1828588 - RNA, 20 nt, Human herpesvirus 2
gugccggggauaaaagccaa

SEQ ID NO: 1828589 - RNA, 23 nt, Human herpesvirus 2
cgcgaggccgcucuccgaagaga

SEQ ID NO: 1828590 - RNA, 11 nt, Human herpesvirus 2
agggcaggucc

SEQ ID NO: 1828591 - RNA, 22 nt, Human herpesvirus 2
uggagaagggaaaggaacagag

SEQ ID NO: 1828592 - RNA, 21 nt, Human herpesvirus 2
guccuggaggggggugcugug

SEQ ID NO: 1828593 - RNA, 11 nt, Human herpesvirus 2
cgcggcgccaa

SEQ ID NO: 1828594 - RNA, 23 nt, Human herpesvirus 2
acuuccuauaaacucucccccgc

SEQ ID NO: 1828595 - RNA, 14 nt, Human herpesvirus 2
ucgacgaggccugg

SEQ ID NO: 1828596 - RNA, 19 nt, Human herpesvirus 2
ccggggcgugcugugcccu

SEQ ID NO: 1828597 - RNA, 18 nt, Human herpesvirus 2
uccagcagcuucccauga

SEQ ID NO: 1828598 - RNA, 22 nt, Human herpesvirus 2
cuggccgagcguaucggccagg

SEQ ID NO: 1828599 - RNA, 21 nt, Human herpesvirus 2
ucgaugagccgguagugcagg

SEQ ID NO: 1828600 - RNA, 22 nt, Human herpesvirus 2
gguaguguguccccccccccuc

SEQ ID NO: 1828601 - RNA, 17 nt, Human herpesvirus 2
auggagaagggaaagga

SEQ ID NO: 1828602 - RNA, 18 nt, Human herpesvirus 2
gugucgaaucugggaaga

SEQ ID NO: 1828603 - RNA, 23 nt, Human herpesvirus 2
cacggcacccccggcgauucccu

SEQ ID NO: 1828604 - RNA, 13 nt, Human herpesvirus 2
accucucgccgcu

SEQ ID NO: 1828605 - RNA, 22 nt, Human herpesvirus 2
gauagucccccgaagcggcccc

SEQ ID NO: 1828606 - RNA, 21 nt, Human herpesvirus 2
cgccgggggcggacggccccu

SEQ ID NO: 1828607 - RNA, 14 nt, Human herpesvirus 2
gggggcggcgccgg

SEQ ID NO: 1828608 - RNA, 20 nt, Human herpesvirus 2
cgccuguuguuggucggguu

SEQ ID NO: 1828609 - RNA, 12 nt, Human herpesvirus 2
ugaagggcacuc

SEQ ID NO: 1828610 - RNA, 12 nt, Human herpesvirus 2
gcaagugcagua

SEQ ID NO: 1828611 - RNA, 19 nt, Human herpesvirus 2
cgggaggggcuuggccuuc

SEQ ID NO: 1828612 - RNA, 13 nt, Human herpesvirus 2
cccgugugggagg

SEQ ID NO: 1828613 - RNA, 15 nt, Human herpesvirus 2
cguccgaccugcagg

SEQ ID NO: 1828614 - RNA, 21 nt, Human herpesvirus 2
ggggacgaggcccaccccccc

SEQ ID NO: 1828615 - RNA, 22 nt, Human herpesvirus 2
uuccccagcacggaggaacugg

SEQ ID NO: 1828616 - RNA, 17 nt, Human herpesvirus 2
gagcguaucggccagga

SEQ ID NO: 1828617 - RNA, 18 nt, Human herpesvirus 2
ggcggacguccaggggug

SEQ ID NO: 1828618 - RNA, 17 nt, Human herpesvirus 2
gguuggggcgggcagcc

SEQ ID NO: 1828619 - RNA, 20 nt, Human herpesvirus 2
uggagaacggauaccgacag

SEQ ID NO: 1828620 - RNA, 18 nt, Human herpesvirus 2
uccguuucgaccccuuua

SEQ ID NO: 1828621 - RNA, 14 nt, Human herpesvirus 2
ggcaggggcagcuc

SEQ ID NO: 1828622 - RNA, 19 nt, Human herpesvirus 2
cggaaagccggccccgguc

SEQ ID NO: 1828623 - RNA, 16 nt, Human herpesvirus 2
uccgacacccgggccc

SEQ ID NO: 1828624 - RNA, 22 nt, Human herpesvirus 2
acggggaggagacaggaagugg

SEQ ID NO: 1828625 - RNA, 18 nt, Human herpesvirus 2
gcgugguccccgagcagc

SEQ ID NO: 1828626 - RNA, 15 nt, Human herpesvirus 2
uuggugcgccgccgu

SEQ ID NO: 1828627 - RNA, 12 nt, Human herpesvirus 2
cuguuggagccg

SEQ ID NO: 1828628 - RNA, 20 nt, Human herpesvirus 2
cuacgccccccucggcagcc

SEQ ID NO: 1828629 - RNA, 20 nt, Human herpesvirus 2
uguguuuugugggacugggg

SEQ ID NO: 1828630 - RNA, 13 nt, Human herpesvirus 2
cgcaugguaauua

SEQ ID NO: 1828631 - RNA, 24 nt, Human herpesvirus 2
gcccccggggccgucgcggccgcc

SEQ ID NO: 1828632 - RNA, 18 nt, Human herpesvirus 2
uuggaggcgccucugccc

SEQ ID NO: 1828633 - RNA, 21 nt, Human herpesvirus 2
ggacuccgccccggcgaccgc

SEQ ID NO: 1828634 - RNA, 15 nt, Human herpesvirus 2
ugccccccuccuggg

SEQ ID NO: 1828635 - RNA, 20 nt, Human herpesvirus 2
ggagccugcgaaucccccaa

SEQ ID NO: 1828636 - RNA, 17 nt, Human herpesvirus 2
gcucgucgcgacccugc

SEQ ID NO: 1828637 - RNA, 21 nt, Human herpesvirus 2
cgccgaccaagacucggugcg

SEQ ID NO: 1828638 - RNA, 14 nt, Human herpesvirus 2
cacaaacacacggg

SEQ ID NO: 1828639 - RNA, 23 nt, Human herpesvirus 2
gcucucaacacccacgacccacc

SEQ ID NO: 1828640 - RNA, 22 nt, Human herpesvirus 2
uccgcgugguccccgagcagca

SEQ ID NO: 1828641 - RNA, 17 nt, Human herpesvirus 2
gccgcacauccccuccg

SEQ ID NO: 1828642 - RNA, 18 nt, Human herpesvirus 2
ucaccggggcgccccccc

SEQ ID NO: 1828643 - RNA, 16 nt, Human herpesvirus 2
accugccccggcgcgu

SEQ ID NO: 1828644 - RNA, 23 nt, Human herpesvirus 2
gacgacagacaauaaagcaucac

SEQ ID NO: 1828645 - RNA, 14 nt, Human herpesvirus 2
aggguggcuggggu

SEQ ID NO: 1828646 - RNA, 21 nt, Human herpesvirus 2
cccggccgcucgcugcagggc

SEQ ID NO: 1828647 - RNA, 15 nt, Human herpesvirus 2
ccccggggcccgcag

SEQ ID NO: 1828648 - RNA, 13 nt, Human herpesvirus 2
gcguuucccuuuu

SEQ ID NO: 1828649 - RNA, 11 nt, Human herpesvirus 2
caguggagcca

SEQ ID NO: 1828650 - RNA, 19 nt, Human herpesvirus 2
ucgccgccccgacucugug

SEQ ID NO: 1828651 - RNA, 18 nt, Human herpesvirus 2
gggaugggggggaaggga

SEQ ID NO: 1828652 - RNA, 23 nt, Human herpesvirus 2
gcauccgaucgaugagccgguag

SEQ ID NO: 1828653 - RNA, 22 nt, Human herpesvirus 2
gcggggguucggggccagggcu

SEQ ID NO: 1828654 - RNA, 16 nt, Human herpesvirus 2
cacccccccacuuucc

SEQ ID NO: 1828655 - RNA, 19 nt, Human herpesvirus 2
gguaauuagcagcuuuuaa

SEQ ID NO: 1828656 - RNA, 13 nt, Human herpesvirus 2
cccggcgccgccc

SEQ ID NO: 1828657 - RNA, 22 nt, Human herpesvirus 2
cuccacgcccugcuguaucugg

SEQ ID NO: 1828658 - RNA, 13 nt, Human herpesvirus 2
gcgccaggucagc

SEQ ID NO: 1828659 - RNA, 14 nt, Human herpesvirus 2
cggccagccgcgcg

SEQ ID NO: 1828660 - RNA, 18 nt, Human herpesvirus 2
caauucgucaccuggcuc

SEQ ID NO: 1828661 - RNA, 22 nt, Human herpesvirus 2
ccgcauauacugcugggccaug

SEQ ID NO: 1828662 - RNA, 23 nt, Human herpesvirus 2
uggacauguuacaccccccugac

SEQ ID NO: 1828663 - RNA, 20 nt, Human herpesvirus 2
ggggaaagaaagagaaacaa

SEQ ID NO: 1828664 - RNA, 13 nt, Human herpesvirus 2
ccagguacugcug

SEQ ID NO: 1828665 - RNA, 14 nt, Human herpesvirus 2
aacauuggcaagca

SEQ ID NO: 1828666 - RNA, 21 nt, Human herpesvirus 2
cucggcuugauggagccugcg

SEQ ID NO: 1828667 - RNA, 17 nt, Human herpesvirus 2
uggcgcuugggcgucgc

SEQ ID NO: 1828668 - RNA, 19 nt, Human herpesvirus 2
uccucguuuuguuuucucu

SEQ ID NO: 1828669 - RNA, 16 nt, Human herpesvirus 2
cccuggacugggccgc

SEQ ID NO: 1828670 - RNA, 13 nt, Human herpesvirus 2
caccgggcugggg

SEQ ID NO: 1828671 - RNA, 14 nt, Human herpesvirus 2
caggcccaccacca

SEQ ID NO: 1828672 - RNA, 15 nt, Human herpesvirus 2
uacacgacccgccuc

SEQ ID NO: 1828673 - RNA, 15 nt, Human herpesvirus 2
uagccccccccccuc

SEQ ID NO: 1828674 - RNA, 13 nt, Human herpesvirus 2
gcgggaggggcgg

SEQ ID NO: 1828675 - RNA, 19 nt, Human herpesvirus 2
auggggggggaaaggaaag

SEQ ID NO: 1828676 - RNA, 18 nt, Human herpesvirus 2
auacuugcgcggcuugcg

SEQ ID NO: 1828677 - RNA, 11 nt, Human herpesvirus 2
gaggggggcag

SEQ ID NO: 1828678 - RNA, 16 nt, Human herpesvirus 2
agaagccuacuacucg

SEQ ID NO: 1828679 - RNA, 18 nt, Human herpesvirus 2
ccaaagucacgcccccug

SEQ ID NO: 1828680 - RNA, 15 nt, Human herpesvirus 2
cggcgcgggcggcgc

SEQ ID NO: 1828681 - RNA, 17 nt, Human herpesvirus 2
ucggagaggcccgccgc

SEQ ID NO: 1828682 - RNA, 12 nt, Human herpesvirus 2
gggcgggagggg

SEQ ID NO: 1828683 - RNA, 15 nt, Human herpesvirus 2
acguguccccaggga

SEQ ID NO: 1828684 - RNA, 22 nt, Human herpesvirus 2
cugcacgucggacgccagcugc

SEQ ID NO: 1828685 - RNA, 17 nt, Human herpesvirus 2
cgcaggccgcccccagc

SEQ ID NO: 1828686 - RNA, 16 nt, Human herpesvirus 2
auggccgcuccugccc

SEQ ID NO: 1828687 - RNA, 16 nt, Human herpesvirus 2
cacgucggacgccagc

SEQ ID NO: 1828688 - RNA, 22 nt, Human herpesvirus 2
cucuccgcaauaaacgccuucc

SEQ ID NO: 1828689 - RNA, 16 nt, Human herpesvirus 2
ccuugcggaugugggc

SEQ ID NO: 1828690 - RNA, 13 nt, Human herpesvirus 2
accaccaaggccc

SEQ ID NO: 1828691 - RNA, 17 nt, Human herpesvirus 2
gcccucgcugcucuccc

SEQ ID NO: 1828692 - RNA, 13 nt, Human herpesvirus 2
agggucggacagg

SEQ ID NO: 1828693 - RNA, 21 nt, Human herpesvirus 2
uccccggcgccaugagccgcc

SEQ ID NO: 1828694 - RNA, 21 nt, Human herpesvirus 2
cugugccagguggcccuuccg

SEQ ID NO: 1828695 - RNA, 21 nt, Human herpesvirus 2
gagcucggcuugauggagccu

SEQ ID NO: 1828696 - RNA, 15 nt, Human herpesvirus 2
cagcaaccaggcgcu

SEQ ID NO: 1828697 - RNA, 21 nt, Human herpesvirus 2
ugcgcuuauaagagcgggccc

SEQ ID NO: 1828698 - RNA, 18 nt, Human herpesvirus 2
agaauucccagggcacca

SEQ ID NO: 1828699 - RNA, 18 nt, Human herpesvirus 2
ugcgcgcuggucgugggg

SEQ ID NO: 1828700 - RNA, 18 nt, Human herpesvirus 2
cgcccagacccucacaga

SEQ ID NO: 1828701 - RNA, 15 nt, Human herpesvirus 2
cggcgccgccccgcc

SEQ ID NO: 1828702 - RNA, 17 nt, Human herpesvirus 2
gcacccccggaccccgc

SEQ ID NO: 1828703 - RNA, 16 nt, Human herpesvirus 2
caucgccaacucuguc

SEQ ID NO: 1828704 - RNA, 18 nt, Human herpesvirus 2
ugcgacggcgucucccgg

SEQ ID NO: 1828705 - RNA, 21 nt, Human herpesvirus 2
acugggggcggggggugggag

SEQ ID NO: 1828706 - RNA, 20 nt, Human herpesvirus 2
cggggagggcagggccgcug

SEQ ID NO: 1828707 - RNA, 16 nt, Human herpesvirus 2
cgcgacaagacccggc

SEQ ID NO: 1828708 - RNA, 16 nt, Human herpesvirus 2
cgggggucgggcgggc

SEQ ID NO: 1828709 - RNA, 17 nt, Human herpesvirus 2
gugcgcaugggccgcca

SEQ ID NO: 1828710 - RNA, 16 nt, Human herpesvirus 2
gaaagaaagagaaaca

SEQ ID NO: 1828711 - RNA, 16 nt, Human herpesvirus 2
ccacguccaccuuggc

SEQ ID NO: 1828712 - RNA, 16 nt, Human herpesvirus 2
cgagcaccgacccccu

SEQ ID NO: 1828713 - RNA, 14 nt, Human herpesvirus 2
gggccgccauuccc

SEQ ID NO: 1828714 - RNA, 15 nt, Human herpesvirus 2
gcgacgccaggcccc

SEQ ID NO: 1828715 - RNA, 16 nt, Human herpesvirus 2
gcccccauccccuccc

SEQ ID NO: 1828716 - RNA, 23 nt, Human herpesvirus 2
ggaggcccucugggacacccaga

SEQ ID NO: 1828717 - RNA, 12 nt, Human herpesvirus 2
uaagacagacgc

SEQ ID NO: 1828718 - RNA, 21 nt, Human herpesvirus 2
cuccccgaaagccaccaauac

SEQ ID NO: 1828719 - RNA, 19 nt, Human herpesvirus 2
uaugcguguguuggauccc

SEQ ID NO: 1828720 - RNA, 15 nt, Human herpesvirus 2
caugcaaaugggauu

SEQ ID NO: 1828721 - RNA, 20 nt, Human herpesvirus 2
ccuccggagaacccccugcc

SEQ ID NO: 1828722 - RNA, 21 nt, Human herpesvirus 2
cacccuagccuucggccaccu

SEQ ID NO: 1828723 - RNA, 20 nt, Human herpesvirus 2
gcugcugagcccugccccgc

SEQ ID NO: 1828724 - RNA, 12 nt, Human herpesvirus 2
cguccgacaccc

SEQ ID NO: 1828725 - RNA, 23 nt, Human herpesvirus 2
caccggccuggucguccgcggcc

SEQ ID NO: 1828726 - RNA, 15 nt, Human herpesvirus 2
gagccgcggccccgc

SEQ ID NO: 1828727 - RNA, 22 nt, Human herpesvirus 2
gccugccccgcggaggcguggu

SEQ ID NO: 1828728 - RNA, 12 nt, Human herpesvirus 2
uccgcccgcccc

SEQ ID NO: 1828729 - RNA, 17 nt, Human herpesvirus 2
ccaccuggaagcugccu

SEQ ID NO: 1828730 - RNA, 17 nt, Human herpesvirus 2
cccgccgacgccucguc

SEQ ID NO: 1828731 - RNA, 19 nt, Human herpesvirus 2
ccggccgcgacaagacccg

SEQ ID NO: 1828732 - RNA, 17 nt, Human herpesvirus 2
cggcggccccggcggcc

SEQ ID NO: 1828733 - RNA, 23 nt, Human herpesvirus 2
cuuuccuuaaaaggcaccccauc

SEQ ID NO: 1828734 - RNA, 16 nt, Human herpesvirus 2
gcgcuccgaucggggu

SEQ ID NO: 1828735 - RNA, 15 nt, Human herpesvirus 2
cgcgcaucacggccc

SEQ ID NO: 1828736 - RNA, 23 nt, Human herpesvirus 2
ccugggggacccgacccuguggc

SEQ ID NO: 1828737 - RNA, 21 nt, Human herpesvirus 2
cgaaccuguuuuuacgggccc

SEQ ID NO: 1828738 - RNA, 15 nt, Human herpesvirus 2
gccgccggccacgcc

SEQ ID NO: 1828739 - RNA, 23 nt, Human herpesvirus 2
gggagcuucauuuugugggggcc

SEQ ID NO: 1828740 - RNA, 13 nt, Human herpesvirus 2
ucaauagauuucc

SEQ ID NO: 1828741 - RNA, 17 nt, Human herpesvirus 2
gaccgccugccccgcgg

SEQ ID NO: 1828742 - RNA, 18 nt, Human herpesvirus 2
aaccacccaaccaacgga

SEQ ID NO: 1828743 - RNA, 17 nt, Human herpesvirus 2
gacgucggcggacacgc

SEQ ID NO: 1828744 - RNA, 17 nt, Human herpesvirus 2
cgccgcgggggaggcgc

SEQ ID NO: 1828745 - RNA, 13 nt, Human herpesvirus 2
cagccgcgccgcu

SEQ ID NO: 1828746 - RNA, 13 nt, Human herpesvirus 2
gccacucccgcgg

SEQ ID NO: 1828747 - RNA, 18 nt, Human herpesvirus 2
gccguggggccccagggc

SEQ ID NO: 1828748 - RNA, 18 nt, Human herpesvirus 2
agcgccgcuacugcgcca

SEQ ID NO: 1828749 - RNA, 20 nt, Human herpesvirus 2
cuagccccccccccucaccc

SEQ ID NO: 1828750 - RNA, 21 nt, Human herpesvirus 2
gugucuucccgggaaaccaca

SEQ ID NO: 1828751 - RNA, 22 nt, Human herpesvirus 2
acggugcgugcggcccugccuc

SEQ ID NO: 1828752 - RNA, 22 nt, Human herpesvirus 2
gccaggaccgccugccccgcgg

SEQ ID NO: 1828753 - RNA, 22 nt, Human herpesvirus 2
uacgagucugugcggcccucuc

SEQ ID NO: 1828754 - RNA, 21 nt, Human herpesvirus 2
cggcucccccgcggccuuucc

SEQ ID NO: 1828755 - RNA, 13 nt, Human herpesvirus 2
ccguggggcccca

SEQ ID NO: 1828756 - RNA, 20 nt, Human herpesvirus 2
uuggaggcccucugggacac

SEQ ID NO: 1828757 - RNA, 15 nt, Human herpesvirus 2
ggucccgauggccgc

SEQ ID NO: 1828758 - RNA, 22 nt, Human herpesvirus 2
uccgggggccugguggcaccuc

SEQ ID NO: 1828759 - RNA, 14 nt, Human herpesvirus 2
ccgaagcggccccg

SEQ ID NO: 1828760 - RNA, 16 nt, Human herpesvirus 2
cugccucccccccgga

SEQ ID NO: 1828761 - RNA, 18 nt, Human herpesvirus 2
ggggcaccggcaccggga

SEQ ID NO: 1828762 - RNA, 12 nt, Human herpesvirus 2
ucccgcaagagc

SEQ ID NO: 1828763 - RNA, 14 nt, Human herpesvirus 2
cggaggggcuccuc

SEQ ID NO: 1828764 - RNA, 14 nt, Human herpesvirus 2
cucccgccuccggc

SEQ ID NO: 1828765 - RNA, 14 nt, Human herpesvirus 2
cggcacccccggcg

SEQ ID NO: 1828766 - RNA, 23 nt, Human herpesvirus 2
uggguguggucguggugcuggcc

SEQ ID NO: 1828767 - RNA, 17 nt, Human herpesvirus 2
ucaccgagccgcugugc

SEQ ID NO: 1828768 - RNA, 16 nt, Human herpesvirus 2
gcggggcauggacccc

SEQ ID NO: 1828769 - RNA, 13 nt, Human herpesvirus 2
ucgcgucacagaa

SEQ ID NO: 1828770 - RNA, 18 nt, Human herpesvirus 2
gcggacgcacgcggggac

SEQ ID NO: 1828771 - RNA, 21 nt, Human herpesvirus 2
gaugggggggaagggaggagg

SEQ ID NO: 1828772 - RNA, 22 nt, Human herpesvirus 2
cuggugacggaaaaccugggcg

SEQ ID NO: 1828773 - RNA, 16 nt, Human herpesvirus 2
cgucacccccaggggg

SEQ ID NO: 1828774 - RNA, 22 nt, Human herpesvirus 2
cggccaccccgccgcagcucau

SEQ ID NO: 1828775 - RNA, 13 nt, Human herpesvirus 2
ccaguuccuccgu

SEQ ID NO: 1828776 - RNA, 19 nt, Human herpesvirus 2
gcccggcccauaaacaggc

SEQ ID NO: 1828777 - RNA, 13 nt, Human herpesvirus 2
gucccgacgcccg

SEQ ID NO: 1828778 - RNA, 21 nt, Human herpesvirus 2
ggcuccuagccccccccccuc

SEQ ID NO: 1828779 - RNA, 18 nt, Human herpesvirus 2
cgucuccggucccuuccc

SEQ ID NO: 1828780 - RNA, 20 nt, Human herpesvirus 2
ccaggcgacgccaggccccc

SEQ ID NO: 1828781 - RNA, 18 nt, Human herpesvirus 2
cacugccccccuccuggg

SEQ ID NO: 1828782 - RNA, 12 nt, Human herpesvirus 2
ucuuuuugccuc

SEQ ID NO: 1828783 - RNA, 19 nt, Human herpesvirus 2
gaggauguguucuccugga

SEQ ID NO: 1828784 - RNA, 12 nt, Human herpesvirus 2
caucgccgggga

SEQ ID NO: 1828785 - RNA, 22 nt, Human herpesvirus 2
acacccccuguccccgcccccc

SEQ ID NO: 1828786 - RNA, 21 nt, Human herpesvirus 2
ccccgcgcacgcgcgacugcc

SEQ ID NO: 1828787 - RNA, 23 nt, Human herpesvirus 2
cccaggaggggggcagugcagua

SEQ ID NO: 1828788 - RNA, 21 nt, Human herpesvirus 2
gugcgcucgcucuccgugccc

SEQ ID NO: 1828789 - RNA, 22 nt, Human herpesvirus 2
ugggccugugggucugcgccac

SEQ ID NO: 1828790 - RNA, 19 nt, Human herpesvirus 2
gcgguauggcugcccccgc

SEQ ID NO: 1828791 - RNA, 22 nt, Human herpesvirus 2
uguacccucucaacgcccaggc

SEQ ID NO: 1828792 - RNA, 14 nt, Human herpesvirus 2
gcuugaagggcacu

SEQ ID NO: 1828793 - RNA, 17 nt, Human herpesvirus 2
ugcaguaccccaguucc

SEQ ID NO: 1828794 - RNA, 15 nt, Human herpesvirus 2
cgcuggugggacgcc

SEQ ID NO: 1828795 - RNA, 17 nt, Human herpesvirus 2
cagcgccggguggcgcc

SEQ ID NO: 1828796 - RNA, 12 nt, Human herpesvirus 2
aggagggcgggc

SEQ ID NO: 1828797 - RNA, 20 nt, Human herpesvirus 2
cugcacuugcccccccccgg

SEQ ID NO: 1828798 - RNA, 20 nt, Human herpesvirus 2
ggaaacgcaaaaaaaacaag

SEQ ID NO: 1828799 - RNA, 12 nt, Human herpesvirus 2
ccgaccagaacc

SEQ ID NO: 1828800 - RNA, 21 nt, Human herpesvirus 2
aagcgccgcgcgggacccacg

SEQ ID NO: 1828801 - RNA, 17 nt, Human herpesvirus 2
ccccagggagccccggg

SEQ ID NO: 1828802 - RNA, 14 nt, Human herpesvirus 2
cuggaggcaaacac

SEQ ID NO: 1828803 - RNA, 17 nt, Human herpesvirus 2
ggacgagccaaaccagc

SEQ ID NO: 1828804 - RNA, 12 nt, Human herpesvirus 2
aucauuucuguc

SEQ ID NO: 1828805 - RNA, 16 nt, Human herpesvirus 2
ccgucuuugggccccg

SEQ ID NO: 1828806 - RNA, 16 nt, Human herpesvirus 2
ggucgugggggcgcug

SEQ ID NO: 1828807 - RNA, 15 nt, Human herpesvirus 2
gcuggcccuggaccc

SEQ ID NO: 1828808 - RNA, 11 nt, Human herpesvirus 2
gcgggccccgu

SEQ ID NO: 1828809 - RNA, 14 nt, Human herpesvirus 2
ccgcaggcgcgcca

SEQ ID NO: 1828810 - RNA, 22 nt, Human herpesvirus 2
agacggccaugaccucgccccc

SEQ ID NO: 1828811 - RNA, 23 nt, Human herpesvirus 2
ucgagguggcggaggggaucagc

SEQ ID NO: 1828812 - RNA, 20 nt, Human herpesvirus 2
gaaagacaugauagagggaa

SEQ ID NO: 1828813 - RNA, 22 nt, Human herpesvirus 2
cugcgcagguccgagacggcca

SEQ ID NO: 1828814 - RNA, 22 nt, Human herpesvirus 2
ccgugcuggggaaaucucucug

SEQ ID NO: 1828815 - RNA, 21 nt, Human herpesvirus 2
cacgaggucgucgugggccgg

SEQ ID NO: 1828816 - RNA, 22 nt, Human herpesvirus 2
cgucacgcccgucaggcgcgcg

SEQ ID NO: 1828817 - RNA, 15 nt, Human herpesvirus 2
cccgcgcaggggggc

SEQ ID NO: 1828818 - RNA, 19 nt, Human herpesvirus 2
gcgaggggcgggaggggcg

SEQ ID NO: 1828819 - RNA, 16 nt, Human herpesvirus 2
cgagugcucgcagcag

SEQ ID NO: 1828820 - RNA, 19 nt, Human herpesvirus 2
gcggaccccgcccgcgacc

SEQ ID NO: 1828821 - RNA, 14 nt, Human herpesvirus 2
gcuaccucacccca

SEQ ID NO: 1828822 - RNA, 22 nt, Human herpesvirus 2
gccgacuuccgugccccuggac

SEQ ID NO: 1828823 - RNA, 13 nt, Human herpesvirus 2
uccgaccugcagg

SEQ ID NO: 1828824 - RNA, 19 nt, Human herpesvirus 2
ggagguggucggcggccaa

SEQ ID NO: 1828825 - RNA, 14 nt, Human herpesvirus 2
gagccgcugugcca

SEQ ID NO: 1828826 - RNA, 17 nt, Human herpesvirus 2
ccgaaggaggaaagugg

SEQ ID NO: 1828827 - RNA, 22 nt, Human herpesvirus 2
gauggggacgacgggcgccccc

SEQ ID NO: 1828828 - RNA, 16 nt, Human herpesvirus 2
gccauggcggccgcgc

SEQ ID NO: 1828829 - RNA, 14 nt, Human herpesvirus 2
gggggcaggcgggc

SEQ ID NO: 1828830 - RNA, 17 nt, Human herpesvirus 2
gcugcccgcggaccacc

SEQ ID NO: 1828831 - RNA, 23 nt, Human herpesvirus 2
aacaccguccccgagagccugau

SEQ ID NO: 1828832 - RNA, 20 nt, Human herpesvirus 2
ggcgauguccggggcgguga

SEQ ID NO: 1828833 - RNA, 14 nt, Human herpesvirus 2
aaagaacguggugu

SEQ ID NO: 1828834 - RNA, 21 nt, Human herpesvirus 2
acgucgguuuauuaaaacgaa

SEQ ID NO: 1828835 - RNA, 17 nt, Human herpesvirus 2
caagaccugccccggcg

SEQ ID NO: 1828836 - RNA, 22 nt, Human herpesvirus 2
cacggccgugucgcuaaacagg

SEQ ID NO: 1828837 - RNA, 20 nt, Human herpesvirus 2
gccgagcguaucggccagga

SEQ ID NO: 1828838 - RNA, 16 nt, Human herpesvirus 2
cccgccccgccccacc

SEQ ID NO: 1828839 - RNA, 16 nt, Human herpesvirus 2
ucgcgucuccacaaaa

SEQ ID NO: 1828840 - RNA, 23 nt, Human herpesvirus 2
ggggagcuucauuuugugggggc

SEQ ID NO: 1828841 - RNA, 16 nt, Human herpesvirus 2
cgccgcuacugcgcca

SEQ ID NO: 1828842 - RNA, 19 nt, Human herpesvirus 2
cccggguuaccgguacgcc

SEQ ID NO: 1828843 - RNA, 22 nt, Human herpesvirus 2
cggccagcgggggcccgggguu

SEQ ID NO: 1828844 - RNA, 15 nt, Human herpesvirus 2
gcagcgcgggcgacg

SEQ ID NO: 1828845 - RNA, 15 nt, Human herpesvirus 2
agagcgccgucgggc

SEQ ID NO: 1828846 - RNA, 20 nt, Human herpesvirus 2
gugucugguuuuucuggggg

SEQ ID NO: 1828847 - RNA, 12 nt, Human herpesvirus 2
gcgcgcuugcac

SEQ ID NO: 1828848 - RNA, 20 nt, Human herpesvirus 2
ccgaggcgccucgggggcag

SEQ ID NO: 1828849 - RNA, 20 nt, Human herpesvirus 2
gcgcacccuggccguccggg

SEQ ID NO: 1828850 - RNA, 17 nt, Human herpesvirus 2
gggggcaagugcaguaa

SEQ ID NO: 1828851 - RNA, 21 nt, Human herpesvirus 2
gcaagagccugccgucgcacg

SEQ ID NO: 1828852 - RNA, 17 nt, Human herpesvirus 2
agcgccagacgggccgg

SEQ ID NO: 1828853 - RNA, 16 nt, Human herpesvirus 2
auugggauaucucaca

SEQ ID NO: 1828854 - RNA, 15 nt, Human herpesvirus 2
gcgcgccaccgcccg

SEQ ID NO: 1828855 - RNA, 13 nt, Human herpesvirus 2
ccgacccuguggc

SEQ ID NO: 1828856 - RNA, 16 nt, Human herpesvirus 2
ugcgccguccucgugg

SEQ ID NO: 1828857 - RNA, 14 nt, Human herpesvirus 2
ugccugacccucuc

SEQ ID NO: 1828858 - RNA, 15 nt, Human herpesvirus 2
ugcgcucgcucuccg

SEQ ID NO: 1828859 - RNA, 16 nt, Human herpesvirus 2
ucgcccuagaggcugu

SEQ ID NO: 1828860 - RNA, 15 nt, Human herpesvirus 2
cgcggaguaugaccg

SEQ ID NO: 1828861 - RNA, 17 nt, Human herpesvirus 2
aucccgaagccaucuga

SEQ ID NO: 1828862 - RNA, 23 nt, Human herpesvirus 2
gggcaagugcaguaacccaguuc

SEQ ID NO: 1828863 - RNA, 14 nt, Human herpesvirus 2
auggcggccgccgc

SEQ ID NO: 1828864 - RNA, 14 nt, Human herpesvirus 2
cgccaggccccccg

SEQ ID NO: 1828865 - RNA, 16 nt, Human herpesvirus 2
caggcgacccgccgcc

SEQ ID NO: 1828866 - RNA, 13 nt, Human herpesvirus 2
ccggcggcgggga

SEQ ID NO: 1828867 - RNA, 17 nt, Human herpesvirus 2
ccacagcacggccgggu

SEQ ID NO: 1828868 - RNA, 23 nt, Human herpesvirus 2
accgccucuguuccuuucccuuc

SEQ ID NO: 1828869 - RNA, 18 nt, Human herpesvirus 2
cccggcgaccgccccgcg

SEQ ID NO: 1828870 - RNA, 16 nt, Human herpesvirus 2
cucccccgcuucuggc

SEQ ID NO: 1828871 - RNA, 22 nt, Human herpesvirus 2
cgcaggaacguguugaccugcu

SEQ ID NO: 1828872 - RNA, 16 nt, Human herpesvirus 2
cgcgugcggccagccg

SEQ ID NO: 1828873 - RNA, 14 nt, Human herpesvirus 2
cgaccgggcggugc

SEQ ID NO: 1828874 - RNA, 17 nt, Human herpesvirus 2
cggccaccccgccgcag

SEQ ID NO: 1828875 - RNA, 14 nt, Human herpesvirus 2
cucuucuuccccca

SEQ ID NO: 1828876 - RNA, 19 nt, Human herpesvirus 2
cacccuagccuucggccac

SEQ ID NO: 1828877 - RNA, 15 nt, Human herpesvirus 2
auuccagcagcuucc

SEQ ID NO: 1828878 - RNA, 12 nt, Human herpesvirus 2
aggguggggcug

SEQ ID NO: 1828879 - RNA, 14 nt, Human herpesvirus 2
aggucaauagauuu

SEQ ID NO: 1828880 - RNA, 20 nt, Human herpesvirus 2
cuccuuuuuucuuuuucucu

SEQ ID NO: 1828881 - RNA, 11 nt, Human herpesvirus 2
gggcccggacu

SEQ ID NO: 1828882 - RNA, 18 nt, Human herpesvirus 2
gcuguauucccuugcccg

SEQ ID NO: 1828883 - RNA, 21 nt, Human herpesvirus 2
ggggcugcgggcgugucgucc

SEQ ID NO: 1828884 - RNA, 12 nt, Human herpesvirus 2
gguacugcacug

SEQ ID NO: 1828885 - RNA, 18 nt, Human herpesvirus 2
aggggcgggaggaaggac

SEQ ID NO: 1828886 - RNA, 20 nt, Human herpesvirus 2
ggccgagcguaucggccagg

SEQ ID NO: 1828887 - RNA, 16 nt, Human herpesvirus 2
ggcucgcggggccggg

SEQ ID NO: 1828888 - RNA, 18 nt, Human herpesvirus 2
cgggcgucugugcgccuu

SEQ ID NO: 1828889 - RNA, 22 nt, Human herpesvirus 2
gcgggaccccgacguggcccgc

SEQ ID NO: 1828890 - RNA, 16 nt, Human herpesvirus 2
gcgcgccgccgcgcgg

SEQ ID NO: 1828891 - RNA, 16 nt, Human herpesvirus 2
cgcccgccgcccucga

SEQ ID NO: 1828892 - RNA, 22 nt, Human herpesvirus 2
gaccggcggggcccccgaccga

SEQ ID NO: 1828893 - RNA, 17 nt, Human herpesvirus 2
gagacccugccccccgg

SEQ ID NO: 1828894 - RNA, 11 nt, Human herpesvirus 2
guuuggggcau

SEQ ID NO: 1828895 - RNA, 16 nt, Human herpesvirus 2
ccgguacgccgcggcc

SEQ ID NO: 1828896 - RNA, 21 nt, Human herpesvirus 2
cggggcuuggacgcgccuccc

SEQ ID NO: 1828897 - RNA, 12 nt, Human herpesvirus 2
acaccagggcau

SEQ ID NO: 1828898 - RNA, 16 nt, Human herpesvirus 2
ccucugggacacccag

SEQ ID NO: 1828899 - RNA, 20 nt, Human herpesvirus 2
ccgaacggaaggccucccgg

SEQ ID NO: 1828900 - RNA, 14 nt, Human herpesvirus 2
cguggacgcccccu

SEQ ID NO: 1828901 - RNA, 19 nt, Human herpesvirus 2
cuuuccacacccccucccc

SEQ ID NO: 1828902 - RNA, 18 nt, Human herpesvirus 2
gcaggagggcgggccacg

SEQ ID NO: 1828903 - RNA, 14 nt, Human herpesvirus 2
ugcacgaaaaagag

SEQ ID NO: 1828904 - RNA, 17 nt, Human herpesvirus 2
gugcugcugagcccugc

SEQ ID NO: 1828905 - RNA, 16 nt, Human herpesvirus 2
ucgccaucgugcgcuc

SEQ ID NO: 1828906 - RNA, 17 nt, Human herpesvirus 2
ugcaguaacccaguucc

SEQ ID NO: 1828907 - RNA, 13 nt, Human herpesvirus 2
acagcaacacaca

SEQ ID NO: 1828908 - RNA, 18 nt, Human herpesvirus 2
aucgaguccgaagaagag

SEQ ID NO: 1828909 - RNA, 13 nt, Human herpesvirus 2
cuguggcgggcgc

SEQ ID NO: 1828910 - RNA, 14 nt, Human herpesvirus 2
aauuuuugugucau

SEQ ID NO: 1828911 - RNA, 18 nt, Human herpesvirus 2
gucgggcgugggggaaga

SEQ ID NO: 1828912 - RNA, 14 nt, Human herpesvirus 2
cucuggcuccaggc

SEQ ID NO: 1828913 - RNA, 15 nt, Human herpesvirus 2
ccgaagcggccccga

SEQ ID NO: 1828914 - RNA, 16 nt, Human herpesvirus 2
cgccgagcgucaggcc

SEQ ID NO: 1828915 - RNA, 22 nt, Human herpesvirus 2
acguacguucugccccgcgucg

SEQ ID NO: 1828916 - RNA, 23 nt, Human herpesvirus 2
cccccgaacagccccuggggcug

SEQ ID NO: 1828917 - RNA, 18 nt, Human herpesvirus 2
ugggcgcgagccaggcaa

SEQ ID NO: 1828918 - RNA, 18 nt, Human herpesvirus 2
aauguggggccccggccc

SEQ ID NO: 1828919 - RNA, 20 nt, Human herpesvirus 2
gcaaccaaaucacccccaga

SEQ ID NO: 1828920 - RNA, 15 nt, Human herpesvirus 2
cggcgaacacugccu

SEQ ID NO: 1828921 - RNA, 13 nt, Human herpesvirus 2
cgguggggccggc

SEQ ID NO: 1828922 - RNA, 17 nt, Human herpesvirus 2
cagcucgggggccagga

SEQ ID NO: 1828923 - RNA, 15 nt, Human herpesvirus 2
uacgugugcccgccc

SEQ ID NO: 1828924 - RNA, 22 nt, Human herpesvirus 2
cggcccugagccgcgcggccac

SEQ ID NO: 1828925 - RNA, 13 nt, Human herpesvirus 2
uguugucugucug

SEQ ID NO: 1828926 - RNA, 18 nt, Human herpesvirus 2
cggggcacgcggucagca

SEQ ID NO: 1828927 - RNA, 12 nt, Human herpesvirus 2
gaccaccgggcc

SEQ ID NO: 1828928 - RNA, 15 nt, Human herpesvirus 2
agcgcguccagguac

SEQ ID NO: 1828929 - RNA, 14 nt, Human herpesvirus 2
caccccccuccccu

SEQ ID NO: 1828930 - RNA, 22 nt, Human herpesvirus 2
ggugcccaucuacguggccggg

SEQ ID NO: 1828931 - RNA, 16 nt, Human herpesvirus 2
ccggggaaacaggcac

SEQ ID NO: 1828932 - RNA, 15 nt, Human herpesvirus 2
acggccccucgcucc

SEQ ID NO: 1828933 - RNA, 22 nt, Human herpesvirus 2
uaaggagucgccgccccgacuc

SEQ ID NO: 1828934 - RNA, 19 nt, Human herpesvirus 2
ucgagcguggccggcgacc

SEQ ID NO: 1828935 - RNA, 20 nt, Human herpesvirus 2
ccgggggccugguggcaccu

SEQ ID NO: 1828936 - RNA, 20 nt, Human herpesvirus 2
gccuugcggaugugggccgu

SEQ ID NO: 1828937 - RNA, 21 nt, Human herpesvirus 2
cguccggcuggcggcgcggca

SEQ ID NO: 1828938 - RNA, 19 nt, Human herpesvirus 2
gcgguucgcgugcggccag

SEQ ID NO: 1828939 - RNA, 15 nt, Human herpesvirus 2
ccgaccgggcggugc

SEQ ID NO: 1828940 - RNA, 21 nt, Human herpesvirus 2
cacccccgaguucccccggga

SEQ ID NO: 1828941 - RNA, 18 nt, Human herpesvirus 2
caauggccgcuccugccc

SEQ ID NO: 1828942 - RNA, 23 nt, Human herpesvirus 2
cugcgcacgacagaccuccccgu

SEQ ID NO: 1828943 - RNA, 21 nt, Human herpesvirus 2
cgccgcuacugcgccaccguc

SEQ ID NO: 1828944 - RNA, 10 nt, Human herpesvirus 2
cggagaccca

SEQ ID NO: 1828945 - RNA, 12 nt, Human herpesvirus 2
caauaaagccag

SEQ ID NO: 1828946 - RNA, 18 nt, Human herpesvirus 2
cgucugucgccucucccu

SEQ ID NO: 1828947 - RNA, 19 nt, Human herpesvirus 2
auaaccgcccgcagcugcu

SEQ ID NO: 1828948 - RNA, 18 nt, Human herpesvirus 2
cggcacaccggcggggcg

SEQ ID NO: 1828949 - RNA, 17 nt, Human herpesvirus 2
gcuguauucccuugccc

SEQ ID NO: 1828950 - RNA, 14 nt, Human herpesvirus 2
cgccggucucccuc

SEQ ID NO: 1828951 - RNA, 16 nt, Human herpesvirus 2
gccccgcggaccccgc

SEQ ID NO: 1828952 - RNA, 22 nt, Human herpesvirus 2
cgggaggggcuuggccuucccg

SEQ ID NO: 1828953 - RNA, 13 nt, Human herpesvirus 2
gggggaggcgcgc

SEQ ID NO: 1828954 - RNA, 24 nt, Human herpesvirus 2
ugaggaacuggguuacugcacuug

SEQ ID NO: 1828955 - RNA, 14 nt, Human herpesvirus 2
ggcccacccccaaa

SEQ ID NO: 1828956 - RNA, 13 nt, Human herpesvirus 2
gggugucgaccgc

SEQ ID NO: 1828957 - RNA, 19 nt, Human herpesvirus 2
uucgugugcuuguguuuuu

SEQ ID NO: 1828958 - RNA, 18 nt, Human herpesvirus 2
caaccaggcgcugcugcg

SEQ ID NO: 1828959 - RNA, 22 nt, Human herpesvirus 2
ucaccgguguucggaaccaguu

SEQ ID NO: 1828960 - RNA, 21 nt, Human herpesvirus 2
gugcgcuuauaagagcgggcc

SEQ ID NO: 1828961 - RNA, 17 nt, Human herpesvirus 2
gucugguuuuucugggg

SEQ ID NO: 1828962 - RNA, 13 nt, Human herpesvirus 2
gcgcgucggugcc

SEQ ID NO: 1828963 - RNA, 17 nt, Human herpesvirus 2
ucaucgucgccgacucc

SEQ ID NO: 1828964 - RNA, 13 nt, Human herpesvirus 2
cccccaccccauc

SEQ ID NO: 1828965 - RNA, 13 nt, Human herpesvirus 2
cccucaccccacc

SEQ ID NO: 1828966 - RNA, 14 nt, Human herpesvirus 2
cgguaugcguggcc

SEQ ID NO: 1828967 - RNA, 20 nt, Human herpesvirus 2
gccucccgcaagagccugcc

SEQ ID NO: 1828968 - RNA, 19 nt, Human herpesvirus 2
cggcggcucccccgcggcc

SEQ ID NO: 1828969 - RNA, 15 nt, Human herpesvirus 2
ucgggcgucugugcg

SEQ ID NO: 1828970 - RNA, 11 nt, Human herpesvirus 2
auaaacaggcc

SEQ ID NO: 1828971 - RNA, 15 nt, Human herpesvirus 2
gacggcaauaaaaga

SEQ ID NO: 1828972 - RNA, 16 nt, Human herpesvirus 2
gugcccuggguccggg

SEQ ID NO: 1828973 - RNA, 13 nt, Human herpesvirus 2
gagcgcgccagga

SEQ ID NO: 1828974 - RNA, 19 nt, Human herpesvirus 2
accgcgcgccuccucgcgg

SEQ ID NO: 1828975 - RNA, 14 nt, Human herpesvirus 2
uggagcgcuggugg

SEQ ID NO: 1828976 - RNA, 16 nt, Human herpesvirus 2
uacacgcgcuggcccc

SEQ ID NO: 1828977 - RNA, 20 nt, Human herpesvirus 2
gagccccggguuccccgaga

SEQ ID NO: 1828978 - RNA, 19 nt, Human herpesvirus 2
gagggggggaaagaaagag

SEQ ID NO: 1828979 - RNA, 13 nt, Human herpesvirus 2
ggggaaagaaaga

SEQ ID NO: 1828980 - RNA, 12 nt, Human herpesvirus 2
ccuccgcggccg

SEQ ID NO: 1828981 - RNA, 17 nt, Human herpesvirus 2
ugaggggaaagcuggcg

SEQ ID NO: 1828982 - RNA, 11 nt, Human herpesvirus 2
ccucccggccg

SEQ ID NO: 1828983 - RNA, 15 nt, Human herpesvirus 2
cgccgcaacacccgg

SEQ ID NO: 1828984 - RNA, 13 nt, Human herpesvirus 2
gccacaccacccu

SEQ ID NO: 1828985 - RNA, 20 nt, Human herpesvirus 2
gacggccccucgcuccccgc

SEQ ID NO: 1828986 - RNA, 20 nt, Human herpesvirus 2
cuggagccccugggggaccc

SEQ ID NO: 1828987 - RNA, 14 nt, Human herpesvirus 2
ccggggaaacaggc

SEQ ID NO: 1828988 - RNA, 19 nt, Human herpesvirus 2
cggggaugggggggaaggg

SEQ ID NO: 1828989 - RNA, 14 nt, Human herpesvirus 2
gauacaacacaccc

SEQ ID NO: 1828990 - RNA, 22 nt, Human herpesvirus 2
guccgcgggaagcgccgcgcgg

SEQ ID NO: 1828991 - RNA, 19 nt, Human herpesvirus 2
gucugcgccaccggccugg

SEQ ID NO: 1828992 - RNA, 16 nt, Human herpesvirus 2
gcccagcgcacccugg

SEQ ID NO: 1828993 - RNA, 18 nt, Human herpesvirus 2
ccccaggaggggggcagu

SEQ ID NO: 1828994 - RNA, 18 nt, Human herpesvirus 2
gacggcaugcagcccaga

SEQ ID NO: 1828995 - RNA, 17 nt, Human herpesvirus 2
acuuucccccccacucc

SEQ ID NO: 1828996 - RNA, 12 nt, Human herpesvirus 2
uacaaauuaaau

SEQ ID NO: 1828997 - RNA, 23 nt, Human herpesvirus 2
ccgaagagacgaugggagccccg

SEQ ID NO: 1828998 - RNA, 19 nt, Human herpesvirus 2
ucugcccguggguggccac

SEQ ID NO: 1828999 - RNA, 22 nt, Human herpesvirus 2
uuggcaaacacaccgggcuggg

SEQ ID NO: 1829000 - RNA, 15 nt, Human herpesvirus 2
cagcgcacccuggcc

SEQ ID NO: 1829001 - RNA, 16 nt, Human herpesvirus 2
gaccccccgggaggag

SEQ ID NO: 1829002 - RNA, 17 nt, Human herpesvirus 2
cgcugguuucucugcgu

SEQ ID NO: 1829003 - RNA, 13 nt, Human herpesvirus 2
cagaauaaaaggc

SEQ ID NO: 1829004 - RNA, 16 nt, Human herpesvirus 2
gggugcucggggacag

SEQ ID NO: 1829005 - RNA, 23 nt, Human herpesvirus 2
gccaacucugucuucguguggcg

SEQ ID NO: 1829006 - RNA, 16 nt, Human herpesvirus 2
ugaacucucccggcuc

SEQ ID NO: 1829007 - RNA, 18 nt, Human herpesvirus 2
cgcugcgcgcgcaccugc

SEQ ID NO: 1829008 - RNA, 14 nt, Human herpesvirus 2
cgccagcugcuggc

SEQ ID NO: 1829009 - RNA, 19 nt, Human herpesvirus 2
ccguggcgccuggggacua

SEQ ID NO: 1829010 - RNA, 23 nt, Human herpesvirus 2
gccggcgugggugacugggaccg

SEQ ID NO: 1829011 - RNA, 23 nt, Human herpesvirus 2
ggaagccgccccccaccggacca

SEQ ID NO: 1829012 - RNA, 23 nt, Human herpesvirus 2
caguggagccaaaccccccggcc

SEQ ID NO: 1829013 - RNA, 22 nt, Human herpesvirus 2
ggcagcucgcccccgugccugu

SEQ ID NO: 1829014 - RNA, 14 nt, Human herpesvirus 2
gugguuagggggac

SEQ ID NO: 1829015 - RNA, 17 nt, Human herpesvirus 2
cugugcgccuuuaagac

SEQ ID NO: 1829016 - RNA, 15 nt, Human herpesvirus 2
cuauaaacucucccc

SEQ ID NO: 1829017 - RNA, 21 nt, Human herpesvirus 2
uauuuuccccccaccccuucc

SEQ ID NO: 1829018 - RNA, 19 nt, Human herpesvirus 2
gacacaauaacaaacagac

SEQ ID NO: 1829019 - RNA, 13 nt, Human herpesvirus 2
ccucugggcccgu

SEQ ID NO: 1829020 - RNA, 19 nt, Human herpesvirus 2
cacgccguggacgcccccu

SEQ ID NO: 1829021 - RNA, 23 nt, Human herpesvirus 2
uacguggccggguuuuuggcccu

SEQ ID NO: 1829022 - RNA, 16 nt, Human herpesvirus 2
ggcucuucuggucaug

SEQ ID NO: 1829023 - RNA, 14 nt, Human herpesvirus 2
guccgaccugcagg

SEQ ID NO: 1829024 - RNA, 17 nt, Human herpesvirus 2
ucugaucgacgacgccu

SEQ ID NO: 1829025 - RNA, 18 nt, Human herpesvirus 2
gucaccggggcgcccccc

SEQ ID NO: 1829026 - RNA, 16 nt, Human herpesvirus 2
gucgcuccggcucccg

SEQ ID NO: 1829027 - RNA, 16 nt, Human herpesvirus 2
ccgggggucgcacgcc

SEQ ID NO: 1829028 - RNA, 12 nt, Human herpesvirus 2
agagaaaaagaa

SEQ ID NO: 1829029 - RNA, 16 nt, Human herpesvirus 2
cccgugugggagggug

SEQ ID NO: 1829030 - RNA, 19 nt, Human herpesvirus 2
acccgggcgagcuggcccu

SEQ ID NO: 1829031 - RNA, 14 nt, Human herpesvirus 2
ccggccgccauccc

SEQ ID NO: 1829032 - RNA, 19 nt, Human herpesvirus 2
ccucacgguccucaccgag

SEQ ID NO: 1829033 - RNA, 20 nt, Human herpesvirus 2
cacgcaggccgcccccagca

SEQ ID NO: 1829034 - RNA, 18 nt, Human herpesvirus 2
gcacgccgcgugggcucc

SEQ ID NO: 1829035 - RNA, 17 nt, Human herpesvirus 2
cgacgaccaugggcccc

SEQ ID NO: 1829036 - RNA, 18 nt, Human herpesvirus 2
ccgaccucgucgcgcgca

SEQ ID NO: 1829037 - RNA, 17 nt, Human herpesvirus 2
cggccgccgcaacaccc

SEQ ID NO: 1829038 - RNA, 19 nt, Human herpesvirus 2
gaaccgguagccggggcac

SEQ ID NO: 1829039 - RNA, 20 nt, Human herpesvirus 2
gcgguuggaggcgccucugc

SEQ ID NO: 1829040 - RNA, 20 nt, Human herpesvirus 2
gccgucgcacgcgcgcaggc

SEQ ID NO: 1829041 - RNA, 19 nt, Human herpesvirus 2
uccuccguguuagggaagu

SEQ ID NO: 1829042 - RNA, 20 nt, Human herpesvirus 2
cggagcucgacgcacagcgg

SEQ ID NO: 1829043 - RNA, 13 nt, Human herpesvirus 2
cgcaucgccgccg

SEQ ID NO: 1829044 - RNA, 21 nt, Human herpesvirus 2
gcguggucacccgggcgccgg

SEQ ID NO: 1829045 - RNA, 15 nt, Human herpesvirus 2
ccgggucggcugucc

SEQ ID NO: 1829046 - RNA, 15 nt, Human herpesvirus 2
gcaccacgugucccc

SEQ ID NO: 1829047 - RNA, 21 nt, Human herpesvirus 2
ggggcgugccuguuguuuugg

SEQ ID NO: 1829048 - RNA, 18 nt, Human herpesvirus 2
cugggguacugcacugcc

SEQ ID NO: 1829049 - RNA, 13 nt, Human herpesvirus 2
gcaucgggagggg

SEQ ID NO: 1829050 - RNA, 17 nt, Human herpesvirus 2
cggucgcuuuccacacc

SEQ ID NO: 1829051 - RNA, 22 nt, Human herpesvirus 2
caaaagaaacggcaagaaagac

SEQ ID NO: 1829052 - RNA, 19 nt, Human herpesvirus 2
ggccggcguucccgcucgc

SEQ ID NO: 1829053 - RNA, 13 nt, Human herpesvirus 2
ccccgagcagcac

SEQ ID NO: 1829054 - RNA, 23 nt, Human herpesvirus 2
ucgcuccggcucccggcccgggc

SEQ ID NO: 1829055 - RNA, 20 nt, Human herpesvirus 2
cggcgagggcggccucggcc

SEQ ID NO: 1829056 - RNA, 16 nt, Human herpesvirus 2
cagcguaacgcacccc

SEQ ID NO: 1829057 - RNA, 12 nt, Human herpesvirus 2
gccugcacgagc

SEQ ID NO: 1829058 - RNA, 13 nt, Human herpesvirus 2
ucaaacaggccau

SEQ ID NO: 1829059 - RNA, 20 nt, Human herpesvirus 2
ccgugggccuguggggccug

SEQ ID NO: 1829060 - RNA, 21 nt, Human herpesvirus 2
ccagggcaccacgugucccca

SEQ ID NO: 1829061 - RNA, 18 nt, Human herpesvirus 2
gcaagcgggcgggguggg

SEQ ID NO: 1829062 - RNA, 15 nt, Human herpesvirus 2
cguccucacggccaa

SEQ ID NO: 1829063 - RNA, 17 nt, Human herpesvirus 2
ggcaccggggaaacagg

SEQ ID NO: 1829064 - RNA, 22 nt, Human herpesvirus 2
cguguccgcgggaagcgccgcg

SEQ ID NO: 1829065 - RNA, 14 nt, Human herpesvirus 2
gauccugggccugu

SEQ ID NO: 1829066 - RNA, 23 nt, Human herpesvirus 2
gcggcgaaccgguagccggggca

SEQ ID NO: 1829067 - RNA, 16 nt, Human herpesvirus 2
augaugaccugggguc

SEQ ID NO: 1829068 - RNA, 17 nt, Human herpesvirus 2
ggggccaggaacuccag

SEQ ID NO: 1829069 - RNA, 15 nt, Human herpesvirus 2
gcagggggagguggg

SEQ ID NO: 1829070 - RNA, 16 nt, Human herpesvirus 2
cccaggucccccauac

SEQ ID NO: 1829071 - RNA, 17 nt, Human herpesvirus 2
cuuuuaaugggccggcg

SEQ ID NO: 1829072 - RNA, 21 nt, Human herpesvirus 2
ggaagagaaaaagaaaaaagg

SEQ ID NO: 1829073 - RNA, 19 nt, Human herpesvirus 2
auuuuaaauaaacaaacaa

SEQ ID NO: 1829074 - RNA, 18 nt, Human herpesvirus 2
ucaguguuugggaaaucu

SEQ ID NO: 1829075 - RNA, 12 nt, Human herpesvirus 2
gggugggacuug

SEQ ID NO: 1829076 - RNA, 15 nt, Human herpesvirus 2
gucuuugggccccgc

SEQ ID NO: 1829077 - RNA, 19 nt, Human herpesvirus 2
ccccagggagccccggguu

SEQ ID NO: 1829078 - RNA, 14 nt, Human herpesvirus 2
cuucccccccccua

SEQ ID NO: 1829079 - RNA, 23 nt, Human herpesvirus 2
cagggaguccucgccgcuguggc

SEQ ID NO: 1829080 - RNA, 14 nt, Human herpesvirus 2
gcggugcgccccgc

SEQ ID NO: 1829081 - RNA, 19 nt, Human herpesvirus 2
gcacaaacgugcucugcca

SEQ ID NO: 1829082 - RNA, 21 nt, Human herpesvirus 2
ucagcuccucuucgggcaccc

SEQ ID NO: 1829083 - RNA, 17 nt, Human herpesvirus 2
gccucuuugggccgugg

SEQ ID NO: 1829084 - RNA, 21 nt, Human herpesvirus 2
cgggaggauguguucuccugg

SEQ ID NO: 1829085 - RNA, 17 nt, Human herpesvirus 2
cacaggcccaccaccau

SEQ ID NO: 1829086 - RNA, 16 nt, Human herpesvirus 2
cggcgcgagcucccug

SEQ ID NO: 1829087 - RNA, 21 nt, Human herpesvirus 2
cagggagccacucccgcggcc

SEQ ID NO: 1829088 - RNA, 21 nt, Human herpesvirus 2
uggucgggcggacguccaggg

SEQ ID NO: 1829089 - RNA, 15 nt, Human herpesvirus 2
gcgccgucgggcccc

SEQ ID NO: 1829090 - RNA, 15 nt, Human herpesvirus 2
cgcgcaucggacccc

SEQ ID NO: 1829091 - RNA, 22 nt, Human herpesvirus 2
ccggccaaccucauccgcggcg

SEQ ID NO: 1829092 - RNA, 19 nt, Human herpesvirus 2
auuccgagggcagguccca

SEQ ID NO: 1829093 - RNA, 21 nt, Human herpesvirus 2
acaccagacggcgggaccccg

SEQ ID NO: 1829094 - RNA, 19 nt, Human herpesvirus 2
acacagagaaaggccccca

SEQ ID NO: 1829095 - RNA, 23 nt, Human herpesvirus 2
gcgccgucgucgcccgcccgccg

SEQ ID NO: 1829096 - RNA, 21 nt, Human herpesvirus 2
cgcggggucgagcgcgccagg

SEQ ID NO: 1829097 - RNA, 14 nt, Human herpesvirus 2
ccguggggccccag

SEQ ID NO: 1829098 - RNA, 14 nt, Human herpesvirus 2
ccaccgucagccgc

SEQ ID NO: 1829099 - RNA, 16 nt, Human herpesvirus 2
guggcggucggccagc

SEQ ID NO: 1829100 - RNA, 11 nt, Human herpesvirus 2
guuuuucuguu

SEQ ID NO: 1829101 - RNA, 19 nt, Human herpesvirus 2
gcgcuuagggugugacccc

SEQ ID NO: 1829102 - RNA, 18 nt, Human herpesvirus 2
gcacgugcgucuucccag

SEQ ID NO: 1829103 - RNA, 22 nt, Human herpesvirus 2
ccgcucgucccccgaggccccc

SEQ ID NO: 1829104 - RNA, 19 nt, Human herpesvirus 2
gcucgccagcgacccgcac

SEQ ID NO: 1829105 - RNA, 13 nt, Human herpesvirus 2
caccugcgcggcg

SEQ ID NO: 1829106 - RNA, 11 nt, Human herpesvirus 2
ggacgcccccu

SEQ ID NO: 1829107 - RNA, 15 nt, Human herpesvirus 2
ccaccgcucacccac

SEQ ID NO: 1829108 - RNA, 19 nt, Human herpesvirus 2
cgcccaggcccuggcgcac

SEQ ID NO: 1829109 - RNA, 23 nt, Human herpesvirus 2
cagggacgucacgcccgucaggc

SEQ ID NO: 1829110 - RNA, 17 nt, Human herpesvirus 2
gcacccaccggccccgc

SEQ ID NO: 1829111 - RNA, 15 nt, Human herpesvirus 2
cugggucgggagcag

SEQ ID NO: 1829112 - RNA, 15 nt, Human herpesvirus 2
aaagguccggcggcc

SEQ ID NO: 1829113 - RNA, 20 nt, Human herpesvirus 2
uggggacgacgggcgccccc

SEQ ID NO: 1829114 - RNA, 20 nt, Human herpesvirus 2
guuucgggcguuccuucccu

SEQ ID NO: 1829115 - RNA, 19 nt, Human herpesvirus 2
gcagucuggucgagguggc

SEQ ID NO: 1829116 - RNA, 19 nt, Human herpesvirus 2
gcacccauccaucugggag

SEQ ID NO: 1829117 - RNA, 21 nt, Human herpesvirus 2
cguggaugccggggccguggg

SEQ ID NO: 1829118 - RNA, 19 nt, Human herpesvirus 2
ggagggcagggccgcuggg

SEQ ID NO: 1829119 - RNA, 18 nt, Human herpesvirus 2
accccccuucccccuccu

SEQ ID NO: 1829120 - RNA, 17 nt, Human herpesvirus 2
cuggaggggggugcugu

SEQ ID NO: 1829121 - RNA, 19 nt, Human herpesvirus 2
cccccucccccgcuucugg

SEQ ID NO: 1829122 - RNA, 18 nt, Human herpesvirus 2
gcgcuucaucgucgccga

SEQ ID NO: 1829123 - RNA, 17 nt, Human herpesvirus 2
ccacggaccuccgggac

SEQ ID NO: 1829124 - RNA, 14 nt, Human herpesvirus 2
cacccccagagggg

SEQ ID NO: 1829125 - RNA, 14 nt, Human herpesvirus 2
caagcccacaaccc

SEQ ID NO: 1829126 - RNA, 18 nt, Human herpesvirus 2
cuccugcgagcccucacg

SEQ ID NO: 1829127 - RNA, 16 nt, Human herpesvirus 2
ccagggggcggcgccg

SEQ ID NO: 1829128 - RNA, 13 nt, Human herpesvirus 2
ggacagccagggc

SEQ ID NO: 1829129 - RNA, 23 nt, Human herpesvirus 2
gccaggagguccuggaggggggu

SEQ ID NO: 1829130 - RNA, 15 nt, Human herpesvirus 2
cccuggacugggccg

SEQ ID NO: 1829131 - RNA, 16 nt, Human herpesvirus 2
cgcuuuauaggacgcg

SEQ ID NO: 1829132 - RNA, 16 nt, Human herpesvirus 2
ccccucccccgcuucu

SEQ ID NO: 1829133 - RNA, 15 nt, Human herpesvirus 2
gacuagaaaaacaaa

SEQ ID NO: 1829134 - RNA, 17 nt, Human herpesvirus 2
gccccccgacgugcgcg

SEQ ID NO: 1829135 - RNA, 15 nt, Human herpesvirus 2
auacaaauuaaauac

SEQ ID NO: 1829136 - RNA, 18 nt, Human herpesvirus 2
gccagauggggccccggu

SEQ ID NO: 1829137 - RNA, 16 nt, Human herpesvirus 2
cgagccgcugugccag

SEQ ID NO: 1829138 - RNA, 23 nt, Human herpesvirus 2
agcucgcggacgagcccguggcc

SEQ ID NO: 1829139 - RNA, 16 nt, Human herpesvirus 2
ucaccgccccagcacc

SEQ ID NO: 1829140 - RNA, 19 nt, Human herpesvirus 2
cgggccgucguuggccagc

SEQ ID NO: 1829141 - RNA, 15 nt, Human herpesvirus 2
gagccgcugugccag

SEQ ID NO: 1829142 - RNA, 16 nt, Human herpesvirus 2
gggggcaagugcagua

SEQ ID NO: 1829143 - RNA, 16 nt, Human herpesvirus 2
uaguccgcgccuccug

SEQ ID NO: 1829144 - RNA, 16 nt, Human herpesvirus 2
gggcauggacccccca

SEQ ID NO: 1829145 - RNA, 20 nt, Human herpesvirus 2
acagcugcgccagaaaccgg

SEQ ID NO: 1829146 - RNA, 15 nt, Human herpesvirus 2
ugcgaugacgugggu

SEQ ID NO: 1829147 - RNA, 21 nt, Human herpesvirus 2
gacuccgccccggcgaccgcc

SEQ ID NO: 1829148 - RNA, 16 nt, Human herpesvirus 2
ugcgcagguccgagac

SEQ ID NO: 1829149 - RNA, 17 nt, Human herpesvirus 2
gcccagcacaggcaggc

SEQ ID NO: 1829150 - RNA, 12 nt, Human herpesvirus 2
ggggcccccgac

SEQ ID NO: 1829151 - RNA, 17 nt, Human herpesvirus 2
auuuaaggagucgccgc

SEQ ID NO: 1829152 - RNA, 19 nt, Human herpesvirus 2
cuccggagaacccccugcc

SEQ ID NO: 1829153 - RNA, 14 nt, Human herpesvirus 2
ggcgccccccccga

SEQ ID NO: 1829154 - RNA, 20 nt, Human herpesvirus 2
ccguggguacggacaccccc

SEQ ID NO: 1829155 - RNA, 20 nt, Human herpesvirus 2
cccacgacauccgcggcuuu

SEQ ID NO: 1829156 - RNA, 23 nt, Human herpesvirus 2
ccccagcuuucccuccacccgcc

SEQ ID NO: 1829157 - RNA, 20 nt, Human herpesvirus 2
ggacgacgaccaugggcccc

SEQ ID NO: 1829158 - RNA, 20 nt, Human herpesvirus 2
ggguuccccgagagcccagg

SEQ ID NO: 1829159 - RNA, 15 nt, Human herpesvirus 2
cgccccgcgccggcu

SEQ ID NO: 1829160 - RNA, 13 nt, Human herpesvirus 2
guuauccugcggc

SEQ ID NO: 1829161 - RNA, 13 nt, Human herpesvirus 2
gcugcccccgcgc

SEQ ID NO: 1829162 - RNA, 16 nt, Human herpesvirus 2
cuccacccgcccgucu

SEQ ID NO: 1829163 - RNA, 18 nt, Human herpesvirus 2
gaggggggcagugcagua

SEQ ID NO: 1829164 - RNA, 13 nt, Human herpesvirus 2
caccccgcccgcu

SEQ ID NO: 1829165 - RNA, 13 nt, Human herpesvirus 2
ccucagcgcggcc

SEQ ID NO: 1829166 - RNA, 19 nt, Human herpesvirus 2
cugcucgcgcaccugcgcg

SEQ ID NO: 1829167 - RNA, 19 nt, Human herpesvirus 2
gccuaucuugaucccccgg

SEQ ID NO: 1829168 - RNA, 14 nt, Human herpesvirus 2
ggaaacgcaaaaaa

SEQ ID NO: 1829169 - RNA, 19 nt, Human herpesvirus 2
gccccagggggcggcgccg

SEQ ID NO: 1829170 - RNA, 18 nt, Human herpesvirus 2
ucggcgauguccggggcg

SEQ ID NO: 1829171 - RNA, 13 nt, Human herpesvirus 2
gcggaccccgccc

SEQ ID NO: 1829172 - RNA, 20 nt, Human herpesvirus 2
gaugauggggacgacgggcg

SEQ ID NO: 1829173 - RNA, 18 nt, Human herpesvirus 2
ggcgccccgaaacgcggg

SEQ ID NO: 1829174 - RNA, 16 nt, Human herpesvirus 2
gaugaccucccggccc

SEQ ID NO: 1829175 - RNA, 20 nt, Human herpesvirus 2
ucccccgggcagccgggccc

SEQ ID NO: 1829176 - RNA, 14 nt, Human herpesvirus 2
ucuuugggccccgc

SEQ ID NO: 1829177 - RNA, 19 nt, Human herpesvirus 2
gagcagcacggcggccaga

SEQ ID NO: 1829178 - RNA, 15 nt, Human herpesvirus 2
ccguguaccucuggg

SEQ ID NO: 1829179 - RNA, 16 nt, Human herpesvirus 2
ccgcagaccaccucgc

SEQ ID NO: 1829180 - RNA, 23 nt, Human herpesvirus 2
cagcggggacccgggcgagcugg

SEQ ID NO: 1829181 - RNA, 16 nt, Human herpesvirus 2
cgugcuuccgcacccc

SEQ ID NO: 1829182 - RNA, 19 nt, Human herpesvirus 2
gaacuccagcuuggccgug

SEQ ID NO: 1829183 - RNA, 18 nt, Human herpesvirus 2
cggugcgugcggcccugc

SEQ ID NO: 1829184 - RNA, 15 nt, Human herpesvirus 2
gcaaccuccggggcu

SEQ ID NO: 1829185 - RNA, 13 nt, Human herpesvirus 2
ugccccgcccccu

SEQ ID NO: 1829186 - RNA, 13 nt, Human herpesvirus 2
cggguggggcgga

SEQ ID NO: 1829187 - RNA, 21 nt, Human herpesvirus 2
gcgcuccgaucggggucaggc

SEQ ID NO: 1829188 - RNA, 15 nt, Human herpesvirus 2
cgacacccgggcccc

SEQ ID NO: 1829189 - RNA, 21 nt, Human herpesvirus 2
cugcacuugcccccccccggg

SEQ ID NO: 1829190 - RNA, 21 nt, Human herpesvirus 2
cccagcgcggacgcggccaga

SEQ ID NO: 1829191 - RNA, 20 nt, Human herpesvirus 2
agcagcuuuuaacgggccgc

SEQ ID NO: 1829192 - RNA, 13 nt, Human herpesvirus 2
ccagccccgcagg

SEQ ID NO: 1829193 - RNA, 18 nt, Human herpesvirus 2
uggcggucgcguccggaa

SEQ ID NO: 1829194 - RNA, 13 nt, Human herpesvirus 2
cucccgcaccccc

SEQ ID NO: 1829195 - RNA, 20 nt, Human herpesvirus 2
cgcccgcguccgacacccgg

SEQ ID NO: 1829196 - RNA, 12 nt, Human herpesvirus 2
ccacccuggguc

SEQ ID NO: 1829197 - RNA, 20 nt, Human herpesvirus 2
cagcuuuuaacgggccgcca

SEQ ID NO: 1829198 - RNA, 22 nt, Human herpesvirus 2
uucccaaacacugaggaacugg

SEQ ID NO: 1829199 - RNA, 23 nt, Human herpesvirus 2
gagcccugccccgcccccucucc

SEQ ID NO: 1829200 - RNA, 12 nt, Human herpesvirus 2
gucguuggccag

SEQ ID NO: 1829201 - RNA, 13 nt, Human herpesvirus 2
gucguagaucggg

SEQ ID NO: 1829202 - RNA, 17 nt, Human herpesvirus 2
cucgucguggcccuccu

SEQ ID NO: 1829203 - RNA, 10 nt, Human herpesvirus 2
gauggggaga

SEQ ID NO: 1829204 - RNA, 14 nt, Human herpesvirus 2
cgcacgcggggacc

SEQ ID NO: 1829205 - RNA, 14 nt, Human herpesvirus 2
gaccggggacuccc

SEQ ID NO: 1829206 - RNA, 19 nt, Human herpesvirus 2
gcgaccccgauaguccccc

SEQ ID NO: 1829207 - RNA, 15 nt, Human herpesvirus 2
ugccagguggcccuu

SEQ ID NO: 1829208 - RNA, 20 nt, Human herpesvirus 2
cucaccgagccgcugugcca

SEQ ID NO: 1829209 - RNA, 18 nt, Human herpesvirus 2
ugccguucggaccugggg

SEQ ID NO: 1829210 - RNA, 17 nt, Human herpesvirus 2
uaaccgcgagcgccgcu

SEQ ID NO: 1829211 - RNA, 16 nt, Human herpesvirus 2
ccaugaccucgccccc

SEQ ID NO: 1829212 - RNA, 13 nt, Human herpesvirus 2
gugcagggccuga

SEQ ID NO: 1829213 - RNA, 14 nt, Human herpesvirus 2
cguuacugaugugu

SEQ ID NO: 1829214 - RNA, 18 nt, Human herpesvirus 2
ggcgcuucaucgucgccg

SEQ ID NO: 1829215 - RNA, 11 nt, Human herpesvirus 2
aucggaccccc

SEQ ID NO: 1829216 - RNA, 17 nt, Human herpesvirus 2
gggccgacgugccgggg

SEQ ID NO: 1829217 - RNA, 16 nt, Human herpesvirus 2
gggggaucucgaacac

SEQ ID NO: 1829218 - RNA, 18 nt, Human herpesvirus 2
ugccccgcccccucuccc

SEQ ID NO: 1829219 - RNA, 19 nt, Human herpesvirus 2
ugcgcgagccguccgggaa

SEQ ID NO: 1829220 - RNA, 16 nt, Human herpesvirus 2
gcgugccuggccgcgc

SEQ ID NO: 1829221 - RNA, 22 nt, Human herpesvirus 2
ccggcggccgcauauacugcug

SEQ ID NO: 1829222 - RNA, 15 nt, Human herpesvirus 2
gaggaggaggagggg

SEQ ID NO: 1829223 - RNA, 16 nt, Human herpesvirus 2
guacuucuacaccucc

SEQ ID NO: 1829224 - RNA, 22 nt, Human herpesvirus 2
cagcauccgaucgaugagccgg

SEQ ID NO: 1829225 - RNA, 18 nt, Human herpesvirus 2
cuggguccgggggccugg

SEQ ID NO: 1829226 - RNA, 15 nt, Human herpesvirus 2
gcccgcccccgacgg

SEQ ID NO: 1829227 - RNA, 22 nt, Human herpesvirus 2
cgugcuuccgcacccccgccua

SEQ ID NO: 1829228 - RNA, 19 nt, Human herpesvirus 2
cggcaagaccugccccggc

SEQ ID NO: 1829229 - RNA, 21 nt, Human herpesvirus 2
cgugugugagaaauaaagaac

SEQ ID NO: 1829230 - RNA, 19 nt, Human herpesvirus 2
gucccccggaccccgaccc

SEQ ID NO: 1829231 - RNA, 13 nt, Human herpesvirus 2
cgacaacagcccc

SEQ ID NO: 1829232 - RNA, 21 nt, Human herpesvirus 2
ggugccguacgucugcccgug

SEQ ID NO: 1829233 - RNA, 23 nt, Human herpesvirus 2
ggcagcgcgccgacgaccugcag

SEQ ID NO: 1829234 - RNA, 15 nt, Human herpesvirus 2
cugcccgcgaccccc

SEQ ID NO: 1829235 - RNA, 22 nt, Human herpesvirus 2
cugucaucguauaccagccgcc

SEQ ID NO: 1829236 - RNA, 15 nt, Human herpesvirus 2
cgacccccgaacagc

SEQ ID NO: 1829237 - RNA, 17 nt, Human herpesvirus 2
aggcggucccggccgcc

SEQ ID NO: 1829238 - RNA, 12 nt, Human herpesvirus 2
ccacacccccuc

SEQ ID NO: 1829239 - RNA, 15 nt, Human herpesvirus 2
acgugcgucuuccca

SEQ ID NO: 1829240 - RNA, 16 nt, Human herpesvirus 2
cggccccucgcucccc

SEQ ID NO: 1829241 - RNA, 18 nt, Human herpesvirus 2
ggucgcguuuucucuguu

SEQ ID NO: 1829242 - RNA, 20 nt, Human herpesvirus 2
gcaccagcucgggggccagg

SEQ ID NO: 1829243 - RNA, 13 nt, Human herpesvirus 2
cggcaacccuccu

SEQ ID NO: 1829244 - RNA, 21 nt, Human herpesvirus 2
ggagaguucaauagauuuccc

SEQ ID NO: 1829245 - RNA, 17 nt, Human herpesvirus 2
cccucuuucccucccuc

SEQ ID NO: 1829246 - RNA, 17 nt, Human herpesvirus 2
gauuuacgagggggcaa

SEQ ID NO: 1829247 - RNA, 20 nt, Human herpesvirus 2
ucuuacccuuuucugcauuu

SEQ ID NO: 1829248 - RNA, 16 nt, Human herpesvirus 2
ccaugcaacgccgggc

SEQ ID NO: 1829249 - RNA, 15 nt, Human herpesvirus 2
aacgagcgugugguu

SEQ ID NO: 1829250 - RNA, 22 nt, Human herpesvirus 2
cgcggaguaugaccgucggugc

SEQ ID NO: 1829251 - RNA, 22 nt, Human herpesvirus 2
guaccggcgcgcaucggacccc

SEQ ID NO: 1829252 - RNA, 18 nt, Human herpesvirus 2
gguggcaaaauccaaaaa

SEQ ID NO: 1829253 - RNA, 18 nt, Human herpesvirus 2
cuuucuuuuugccuccca

SEQ ID NO: 1829254 - RNA, 15 nt, Human herpesvirus 2
uccucaaacaggcca

SEQ ID NO: 1829255 - RNA, 21 nt, Human herpesvirus 2
ggacgucuccaagcucuccga

SEQ ID NO: 1829256 - RNA, 11 nt, Human herpesvirus 2
uucucuucccc

SEQ ID NO: 1829257 - RNA, 14 nt, Human herpesvirus 2
aggggggggcuggu

SEQ ID NO: 1829258 - RNA, 16 nt, Human herpesvirus 2
ugugggggcccagguc

SEQ ID NO: 1829259 - RNA, 14 nt, Human herpesvirus 2
uagaagaaaaccac

SEQ ID NO: 1829260 - RNA, 16 nt, Human herpesvirus 2
cgggcgcccccgccuc

SEQ ID NO: 1829261 - RNA, 15 nt, Human herpesvirus 2
cgaaggaagccgccc

SEQ ID NO: 1829262 - RNA, 16 nt, Human herpesvirus 2
ccagcuuucccuccac

SEQ ID NO: 1829263 - RNA, 13 nt, Human herpesvirus 2
aucgacccggacu

SEQ ID NO: 1829264 - RNA, 16 nt, Human herpesvirus 2
cucccggcccgggccc

SEQ ID NO: 1829265 - RNA, 21 nt, Human herpesvirus 2
cuggcggaagugccgcacggc

SEQ ID NO: 1829266 - RNA, 18 nt, Human herpesvirus 2
acugccccccuccugggg

SEQ ID NO: 1829267 - RNA, 15 nt, Human herpesvirus 2
guggcccuccacgcc

SEQ ID NO: 1829268 - RNA, 14 nt, Human herpesvirus 2
cgcacccuugcccg

SEQ ID NO: 1829269 - RNA, 23 nt, Human herpesvirus 2
gcucuguuucgcauaugcccugg

SEQ ID NO: 1829270 - RNA, 22 nt, Human herpesvirus 2
ggcgccggccaaccgcgcgccg

SEQ ID NO: 1829271 - RNA, 22 nt, Human herpesvirus 2
ucaccgagccgcugugccaggu

SEQ ID NO: 1829272 - RNA, 14 nt, Human herpesvirus 2
uuucagguuccggg

SEQ ID NO: 1829273 - RNA, 18 nt, Human herpesvirus 2
ggaagaggcggacccagu

SEQ ID NO: 1829274 - RNA, 18 nt, Human herpesvirus 2
gagcguaucggccaggag

SEQ ID NO: 1829275 - RNA, 13 nt, Human herpesvirus 2
aaaggccagcaga

SEQ ID NO: 1829276 - RNA, 14 nt, Human herpesvirus 2
ccgaucuggagccg

SEQ ID NO: 1829277 - RNA, 16 nt, Human herpesvirus 2
cgcgggggacgggccg

SEQ ID NO: 1829278 - RNA, 18 nt, Human herpesvirus 2
cggagcggugcagggccu

SEQ ID NO: 1829279 - RNA, 19 nt, Human herpesvirus 2
ccucagcgcggccgugggc

SEQ ID NO: 1829280 - RNA, 14 nt, Human herpesvirus 2
uuuuguuuguuugu

SEQ ID NO: 1829281 - RNA, 16 nt, Human herpesvirus 2
cugcgccaccggccug

SEQ ID NO: 1829282 - RNA, 20 nt, Human herpesvirus 2
ccgcucgcugcagggccugg

SEQ ID NO: 1829283 - RNA, 20 nt, Human herpesvirus 2
gugcugggcgcgagccaggc

SEQ ID NO: 1829284 - RNA, 15 nt, Human herpesvirus 2
cgcccgcguccgaca

SEQ ID NO: 1829285 - RNA, 16 nt, Human herpesvirus 2
gaacagccccuggggc

SEQ ID NO: 1829286 - RNA, 11 nt, Human herpesvirus 2
gcagggccuga

SEQ ID NO: 1829287 - RNA, 11 nt, Human herpesvirus 2
ggggggccucg

SEQ ID NO: 1829288 - RNA, 15 nt, Human herpesvirus 2
gcuuuccacaccccc

SEQ ID NO: 1829289 - RNA, 23 nt, Human herpesvirus 2
aggcguggugauacaacacaccc

SEQ ID NO: 1829290 - RNA, 16 nt, Human herpesvirus 2
uggacgcgccucccgg

SEQ ID NO: 1829291 - RNA, 20 nt, Human herpesvirus 2
ccgggggggggcaagugcag

SEQ ID NO: 1829292 - RNA, 23 nt, Human herpesvirus 2
gacgcgcgcgcccccgacccggg

SEQ ID NO: 1829293 - RNA, 18 nt, Human herpesvirus 2
guaucgugccuggcggca

SEQ ID NO: 1829294 - RNA, 19 nt, Human herpesvirus 2
cucaguguuugggaaaucu

SEQ ID NO: 1829295 - RNA, 17 nt, Human herpesvirus 2
gggcugucgggcgaugc

SEQ ID NO: 1829296 - RNA, 18 nt, Human herpesvirus 2
ggccaaccgcgcgccgcc

SEQ ID NO: 1829297 - RNA, 24 nt, Human herpesvirus 2
cggggacuugacggucgccacucu

SEQ ID NO: 1829298 - RNA, 22 nt, Human herpesvirus 2
ugguggccgaaagaaaaggaag

SEQ ID NO: 1829299 - RNA, 13 nt, Human herpesvirus 2
ggggcacgcgguc

SEQ ID NO: 1829300 - RNA, 20 nt, Human herpesvirus 2
ccggggccguggggccccag

SEQ ID NO: 1829301 - RNA, 17 nt, Human herpesvirus 2
uccaccaccagcaccac

SEQ ID NO: 1829302 - RNA, 21 nt, Human herpesvirus 2
uuguuauggacuuucuggccu

SEQ ID NO: 1829303 - RNA, 18 nt, Human herpesvirus 2
acgagccaaaccagcccc

SEQ ID NO: 1829304 - RNA, 23 nt, Human herpesvirus 2
ccccgggggggggcaagugcagu

SEQ ID NO: 1829305 - RNA, 23 nt, Human herpesvirus 2
cugcccaccggcuccauccugag

SEQ ID NO: 1829306 - RNA, 13 nt, Human herpesvirus 2
acgucgccccccc

SEQ ID NO: 1829307 - RNA, 14 nt, Human herpesvirus 2
gaugcgccuggugg

SEQ ID NO: 1829308 - RNA, 14 nt, Human herpesvirus 2
guucgccccgcagc

SEQ ID NO: 1829309 - RNA, 19 nt, Human herpesvirus 2
acagccccuggggcugucg

SEQ ID NO: 1829310 - RNA, 20 nt, Human herpesvirus 2
cuggcuguguuugucugucg

SEQ ID NO: 1829311 - RNA, 20 nt, Human herpesvirus 2
augcacguaaaacacgggcg

SEQ ID NO: 1829312 - RNA, 22 nt, Human herpesvirus 2
cugggguauuugggugggacuu

SEQ ID NO: 1829313 - RNA, 17 nt, Human herpesvirus 2
cuucucgccucucuucu

SEQ ID NO: 1829314 - RNA, 18 nt, Human herpesvirus 2
gaggcccggaacgagguu

SEQ ID NO: 1829315 - RNA, 22 nt, Human herpesvirus 2
ccuuuuuucuuuuucucuuccc

SEQ ID NO: 1829316 - RNA, 10 nt, Human herpesvirus 2
gccccacgga

SEQ ID NO: 1829317 - RNA, 21 nt, Human herpesvirus 2
cacgccguggacgcccccucc

SEQ ID NO: 1829318 - RNA, 22 nt, Human herpesvirus 2
ccguaaacugcuuggaggcccu

SEQ ID NO: 1829319 - RNA, 17 nt, Human herpesvirus 2
aagagacgaugggagcc

SEQ ID NO: 1829320 - RNA, 20 nt, Human herpesvirus 2
aguccucggggacgcacggc

SEQ ID NO: 1829321 - RNA, 22 nt, Human herpesvirus 2
gaccuccccgugcgugcugcug

SEQ ID NO: 1829322 - RNA, 22 nt, Human herpesvirus 2
auccgacggcaugcagcccaga

SEQ ID NO: 1829323 - RNA, 18 nt, Human herpesvirus 2
cguggccggcgacccgcc

SEQ ID NO: 1829324 - RNA, 21 nt, Human herpesvirus 2
ggcguuucugaccggcgccga

SEQ ID NO: 1829325 - RNA, 16 nt, Human herpesvirus 2
ggauguguucuccugg

SEQ ID NO: 1829326 - RNA, 22 nt, Human herpesvirus 2
gcacgcggggacccgccagaga

SEQ ID NO: 1829327 - RNA, 15 nt, Human herpesvirus 2
ggcggccccccgcgc

SEQ ID NO: 1829328 - RNA, 18 nt, Human herpesvirus 2
gaggagacaggaaguggg

SEQ ID NO: 1829329 - RNA, 22 nt, Human herpesvirus 2
ccggcguuucugaccggcgccg

SEQ ID NO: 1829330 - RNA, 23 nt, Human herpesvirus 2
gaggccugucccugcgucgcccc

SEQ ID NO: 1829331 - RNA, 16 nt, Human herpesvirus 2
cggguuuuuggcccug

SEQ ID NO: 1829332 - RNA, 19 nt, Human herpesvirus 2
acacccccuguccccgccc

SEQ ID NO: 1829333 - RNA, 16 nt, Human herpesvirus 2
cuggcgauccugggcc

SEQ ID NO: 1829334 - RNA, 15 nt, Human herpesvirus 2
gcccguggcccacga

SEQ ID NO: 1829335 - RNA, 15 nt, Human herpesvirus 2
gcccggccgcgacaa

SEQ ID NO: 1829336 - RNA, 19 nt, Human herpesvirus 2
gccgccgagcgucaggccc

SEQ ID NO: 1829337 - RNA, 15 nt, Human herpesvirus 2
ucccggcccgggccc

SEQ ID NO: 1829338 - RNA, 12 nt, Human herpesvirus 2
cagguggcccuu

SEQ ID NO: 1829339 - RNA, 13 nt, Human herpesvirus 2
aauuccagcagcu

SEQ ID NO: 1829340 - RNA, 10 nt, Human herpesvirus 2
cccagguccc

SEQ ID NO: 1829341 - RNA, 19 nt, Human herpesvirus 2
cgcggacgagcccguggcc

SEQ ID NO: 1829342 - RNA, 21 nt, Human herpesvirus 2
aggaacuggguuacugcacuu

SEQ ID NO: 1829343 - RNA, 18 nt, Human herpesvirus 2
ggggcgcugguggccgcg

SEQ ID NO: 1829344 - RNA, 17 nt, Human herpesvirus 2
cgugucccucccggcca

SEQ ID NO: 1829345 - RNA, 13 nt, Human herpesvirus 2
cccugcgucgccc

SEQ ID NO: 1829346 - RNA, 16 nt, Human herpesvirus 2
auuuuccccccacccc

SEQ ID NO: 1829347 - RNA, 20 nt, Human herpesvirus 2
ggcccguagucuccgcgaga

SEQ ID NO: 1829348 - RNA, 12 nt, Human herpesvirus 2
cgccggggaccg

SEQ ID NO: 1829349 - RNA, 18 nt, Human herpesvirus 2
gacgucaaauucgugggc

SEQ ID NO: 1829350 - RNA, 18 nt, Human herpesvirus 2
auugaccucucgcccccc

SEQ ID NO: 1829351 - RNA, 17 nt, Human herpesvirus 2
ggcacaccggcggggcg

SEQ ID NO: 1829352 - RNA, 18 nt, Human herpesvirus 2
agcguaucggccaggagg

SEQ ID NO: 1829353 - RNA, 22 nt, Human herpesvirus 2
ggucaccgguguucggaaccag

SEQ ID NO: 1829354 - RNA, 16 nt, Human herpesvirus 2
gccgggagcguggggc

SEQ ID NO: 1829355 - RNA, 13 nt, Human herpesvirus 2
aacacaccgggcu

SEQ ID NO: 1829356 - RNA, 13 nt, Human herpesvirus 2
gcgcgggcggcgc

SEQ ID NO: 1829357 - RNA, 15 nt, Human herpesvirus 2
aucucaucaaacacg

SEQ ID NO: 1829358 - RNA, 20 nt, Human herpesvirus 2
ucuuuccaccaccagcacca

SEQ ID NO: 1829359 - RNA, 23 nt, Human herpesvirus 2
aucccgaagccaucugaagccgu

SEQ ID NO: 1829360 - RNA, 13 nt, Human herpesvirus 2
ccucgcugcgccg

SEQ ID NO: 1829361 - RNA, 18 nt, Human herpesvirus 2
accagccccucgcccccg

SEQ ID NO: 1829362 - RNA, 22 nt, Human herpesvirus 2
cgccgcgcauuuaaggagucgc

SEQ ID NO: 1829363 - RNA, 15 nt, Human herpesvirus 2
cucccugcggcuggc

SEQ ID NO: 1829364 - RNA, 13 nt, Human herpesvirus 2
ccucgccgccuuc

SEQ ID NO: 1829365 - RNA, 19 nt, Human herpesvirus 2
ucccgccgucucccccgcg

SEQ ID NO: 1829366 - RNA, 19 nt, Human herpesvirus 2
cugaauuucccgcagaacc

SEQ ID NO: 1829367 - RNA, 19 nt, Human herpesvirus 2
agaggcccggaacgagguu

SEQ ID NO: 1829368 - RNA, 15 nt, Human herpesvirus 2
gaugcggggcggggu

SEQ ID NO: 1829369 - RNA, 16 nt, Human herpesvirus 2
ccagccccgcaggcag

SEQ ID NO: 1829370 - RNA, 17 nt, Human herpesvirus 2
gcggaccggcccccgga

SEQ ID NO: 1829371 - RNA, 19 nt, Human herpesvirus 2
acccccaucgggcugcugg

SEQ ID NO: 1829372 - RNA, 18 nt, Human herpesvirus 2
uuucggcacccguccucg

SEQ ID NO: 1829373 - RNA, 18 nt, Human herpesvirus 2
ccacuccaccccccccuc

SEQ ID NO: 1829374 - RNA, 22 nt, Human herpesvirus 2
agggccuggcgauccugggccu

SEQ ID NO: 1829375 - RNA, 17 nt, Human herpesvirus 2
cccgcggcccugagccg

SEQ ID NO: 1829376 - RNA, 16 nt, Human herpesvirus 2
cggggauaaaagccaa

SEQ ID NO: 1829377 - RNA, 17 nt, Human herpesvirus 2
uggccagagccucaucg

SEQ ID NO: 1829378 - RNA, 14 nt, Human herpesvirus 2
cugugcggcccucu

SEQ ID NO: 1829379 - RNA, 19 nt, Human herpesvirus 2
ggccgccgcaacacccggc

SEQ ID NO: 1829380 - RNA, 23 nt, Human herpesvirus 2
caacgcccccuuuacgccuuucc

SEQ ID NO: 1829381 - RNA, 22 nt, Human herpesvirus 2
ccagguggcccuuccggacccc

SEQ ID NO: 1829382 - RNA, 19 nt, Human herpesvirus 2
aagugggggggugguggug

SEQ ID NO: 1829383 - RNA, 21 nt, Human herpesvirus 2
cacucccgaaaccgcaggcgc

SEQ ID NO: 1829384 - RNA, 13 nt, Human herpesvirus 2
uggcggcugggga

SEQ ID NO: 1829385 - RNA, 18 nt, Human herpesvirus 2
gcuggagcgcugguggga

SEQ ID NO: 1829386 - RNA, 15 nt, Human herpesvirus 2
ccucaccccacccca

SEQ ID NO: 1829387 - RNA, 13 nt, Human herpesvirus 2
ggcggaggccugu

SEQ ID NO: 1829388 - RNA, 21 nt, Human herpesvirus 2
cugaucgacgacgccuggcgg

SEQ ID NO: 1829389 - RNA, 17 nt, Human herpesvirus 2
aaacaggaauggagaag

SEQ ID NO: 1829390 - RNA, 14 nt, Human herpesvirus 2
cgcuacugcgccac

SEQ ID NO: 1829391 - RNA, 23 nt, Human herpesvirus 2
ccagcucgggggccaggaacucc

SEQ ID NO: 1829392 - RNA, 23 nt, Human herpesvirus 2
agccuccgaggugcggagccucu

SEQ ID NO: 1829393 - RNA, 13 nt, Human herpesvirus 2
acucggagggaag

SEQ ID NO: 1829394 - RNA, 15 nt, Human herpesvirus 2
aacgcgggcgggggc

SEQ ID NO: 1829395 - RNA, 18 nt, Human herpesvirus 2
ucuggcggcccuggagcg

SEQ ID NO: 1829396 - RNA, 19 nt, Human herpesvirus 2
ggcccccgaauccggggcg

SEQ ID NO: 1829397 - RNA, 13 nt, Human herpesvirus 2
aggcgcugcugcg

SEQ ID NO: 1829398 - RNA, 23 nt, Human herpesvirus 2
uuccucaguguuugggaaaucua

SEQ ID NO: 1829399 - RNA, 16 nt, Human herpesvirus 2
ggaggggggugcugug

SEQ ID NO: 1829400 - RNA, 16 nt, Human herpesvirus 2
gcagagagauuucccc

SEQ ID NO: 1829401 - RNA, 16 nt, Human herpesvirus 2
guggggacgaggccca

SEQ ID NO: 1829402 - RNA, 16 nt, Human herpesvirus 2
cauaaaacccacccuc

SEQ ID NO: 1829403 - RNA, 15 nt, Human herpesvirus 2
gaaacgaugaaggac

SEQ ID NO: 1829404 - RNA, 13 nt, Human herpesvirus 2
uguguuaacgcaa

SEQ ID NO: 1829405 - RNA, 18 nt, Human herpesvirus 2
ggacgcggcauaccuccg

SEQ ID NO: 1829406 - RNA, 17 nt, Human herpesvirus 2
gagugggggggggggac

SEQ ID NO: 1829407 - RNA, 15 nt, Human herpesvirus 2
ccuggcucgccgugc

SEQ ID NO: 1829408 - RNA, 18 nt, Human herpesvirus 2
ugccccccggcgcgggcg

SEQ ID NO: 1829409 - RNA, 15 nt, Human herpesvirus 2
uaccccaguuccucc

SEQ ID NO: 1829410 - RNA, 16 nt, Human herpesvirus 2
gugauggggguccugg

SEQ ID NO: 1829411 - RNA, 17 nt, Human herpesvirus 2
ccacguguccccaggga

SEQ ID NO: 1829412 - RNA, 20 nt, Human herpesvirus 2
uggagccaaaccccccggcc

SEQ ID NO: 1829413 - RNA, 22 nt, Human herpesvirus 2
caagcgccccgcggaccccgcc

SEQ ID NO: 1829414 - RNA, 21 nt, Human herpesvirus 2
ugcgcacgacagaccuccccg

SEQ ID NO: 1829415 - RNA, 15 nt, Human herpesvirus 2
uaaauaaacaaacaa

SEQ ID NO: 1829416 - RNA, 17 nt, Human herpesvirus 2
ccgguguucggaaccag

SEQ ID NO: 1829417 - RNA, 19 nt, Human herpesvirus 2
gagcccugccccgcccccu

SEQ ID NO: 1829418 - RNA, 22 nt, Human herpesvirus 2
cgccgcuguggcccuggcggac

SEQ ID NO: 1829419 - RNA, 19 nt, Human herpesvirus 2
ccgcgcccgcgugccgcag

SEQ ID NO: 1829420 - RNA, 16 nt, Human herpesvirus 2
ccacccaaccagcgcg

SEQ ID NO: 1829421 - RNA, 15 nt, Human herpesvirus 2
auguucaaaaauaca

SEQ ID NO: 1829422 - RNA, 15 nt, Human herpesvirus 2
gcuccggcucccggc

SEQ ID NO: 1829423 - RNA, 20 nt, Human herpesvirus 2
ugacggucgccacucuccug

SEQ ID NO: 1829424 - RNA, 15 nt, Human herpesvirus 2
guggugcuggccaau

SEQ ID NO: 1829425 - RNA, 22 nt, Human herpesvirus 2
ccugacccucucgggcaugggc

SEQ ID NO: 1829426 - RNA, 15 nt, Human herpesvirus 2
accgaaggaggaaag

SEQ ID NO: 1829427 - RNA, 15 nt, Human herpesvirus 2
gaaccccucuggggu

SEQ ID NO: 1829428 - RNA, 16 nt, Human herpesvirus 2
ccucaaacaggccauc

SEQ ID NO: 1829429 - RNA, 22 nt, Human herpesvirus 2
gccggcggagccccggagcucc

SEQ ID NO: 1829430 - RNA, 20 nt, Human herpesvirus 2
gucgccgccggccacgccac

SEQ ID NO: 1829431 - RNA, 23 nt, Human herpesvirus 2
cgaacgggggucccgccucccgg

SEQ ID NO: 1829432 - RNA, 15 nt, Human herpesvirus 2
ccgguaugguaauua

SEQ ID NO: 1829433 - RNA, 16 nt, Human herpesvirus 2
ugggggggggggggcg

SEQ ID NO: 1829434 - RNA, 17 nt, Human herpesvirus 2
aaaucgugcacagagcc

SEQ ID NO: 1829435 - RNA, 17 nt, Human herpesvirus 2
gggcgugcugugcccug

SEQ ID NO: 1829436 - RNA, 17 nt, Human herpesvirus 2
cucgcggcggcuccccc

SEQ ID NO: 1829437 - RNA, 16 nt, Human herpesvirus 2
gcggacgaccugguga

SEQ ID NO: 1829438 - RNA, 19 nt, Human herpesvirus 2
ggccggguuuuuggcccug

SEQ ID NO: 1829439 - RNA, 18 nt, Human herpesvirus 2
ccugggcggccucuccgg

SEQ ID NO: 1829440 - RNA, 21 nt, Human herpesvirus 2
cgccucgcgucgggccagaug

SEQ ID NO: 1829441 - RNA, 23 nt, Human herpesvirus 2
uguaauggggccgcaguguuuuu

SEQ ID NO: 1829442 - RNA, 14 nt, Human herpesvirus 2
ucggggggacgagc

SEQ ID NO: 1829443 - RNA, 21 nt, Human herpesvirus 2
aagugcaguaacccaguuccu

SEQ ID NO: 1829444 - RNA, 15 nt, Human herpesvirus 2
aggggcgggaggggc

SEQ ID NO: 1829445 - RNA, 20 nt, Human herpesvirus 2
cuccccuucagccuggacca

SEQ ID NO: 1829446 - RNA, 15 nt, Human herpesvirus 2
cccaguuccuccgug

SEQ ID NO: 1829447 - RNA, 20 nt, Human herpesvirus 2
uccgacgacgcguacguggc

SEQ ID NO: 1829448 - RNA, 14 nt, Human herpesvirus 2
cggccuccccggcg

SEQ ID NO: 1829449 - RNA, 14 nt, Human herpesvirus 2
gacuccgccccggc

SEQ ID NO: 1829450 - RNA, 21 nt, Human herpesvirus 2
ccccaaaccccgguuggggcg

SEQ ID NO: 1829451 - RNA, 18 nt, Human herpesvirus 2
cgccgcuguggcccuggc

SEQ ID NO: 1829452 - RNA, 14 nt, Human herpesvirus 2
caggccccccggga

SEQ ID NO: 1829453 - RNA, 17 nt, Human herpesvirus 2
ccacacccccuccccgu

SEQ ID NO: 1829454 - RNA, 20 nt, Human herpesvirus 2
gcaacccgacggcggggccc

SEQ ID NO: 1829455 - RNA, 14 nt, Human herpesvirus 2
ugcaacgagcugcc

SEQ ID NO: 1829456 - RNA, 15 nt, Human herpesvirus 2
guuggaagaggcgga

SEQ ID NO: 1829457 - RNA, 14 nt, Human herpesvirus 2
uguguucuccugga

SEQ ID NO: 1829458 - RNA, 23 nt, Human herpesvirus 2
cggaguaugaccgucggugccag

SEQ ID NO: 1829459 - RNA, 13 nt, Human herpesvirus 2
gggaaacuaggac

SEQ ID NO: 1829460 - RNA, 16 nt, Human herpesvirus 2
uccggguaaaaaagaa

SEQ ID NO: 1829461 - RNA, 17 nt, Human herpesvirus 2
ugcucucccguaccccg

SEQ ID NO: 1829462 - RNA, 13 nt, Human herpesvirus 2
cggacccaccgca

SEQ ID NO: 1829463 - RNA, 11 nt, Human herpesvirus 2
ugggggaagaa

SEQ ID NO: 1829464 - RNA, 21 nt, Human herpesvirus 2
gccgccccgacucugugucuu

SEQ ID NO: 1829465 - RNA, 20 nt, Human herpesvirus 2
gcgaagguguuguagggccg

SEQ ID NO: 1829466 - RNA, 19 nt, Human herpesvirus 2
uggcguccccaggcgacgc

SEQ ID NO: 1829467 - RNA, 13 nt, Human herpesvirus 2
agccccccccccu

SEQ ID NO: 1829468 - RNA, 14 nt, Human herpesvirus 2
cagccgcgccgcug

SEQ ID NO: 1829469 - RNA, 19 nt, Human herpesvirus 2
ggcggaggccugucccugc

SEQ ID NO: 1829470 - RNA, 14 nt, Human herpesvirus 2
agccuucggccacc

SEQ ID NO: 1829471 - RNA, 15 nt, Human herpesvirus 2
ugggggauuguggga

SEQ ID NO: 1829472 - RNA, 17 nt, Human herpesvirus 2
cgcggacgccgggcggc

SEQ ID NO: 1829473 - RNA, 16 nt, Human herpesvirus 2
uagcucgcggagggcg

SEQ ID NO: 1829474 - RNA, 15 nt, Human herpesvirus 2
ccacggaccuccggg

SEQ ID NO: 1829475 - RNA, 21 nt, Human herpesvirus 2
gaggucaauagauuuccccaa

SEQ ID NO: 1829476 - RNA, 13 nt, Human herpesvirus 2
uuuucggacggug

SEQ ID NO: 1829477 - RNA, 18 nt, Human herpesvirus 2
cgcgggcggcgccgcgcc

SEQ ID NO: 1829478 - RNA, 21 nt, Human herpesvirus 2
agucgcccauacaaauuaaau

SEQ ID NO: 1829479 - RNA, 16 nt, Human herpesvirus 2
gcccuccgccagcgcc

SEQ ID NO: 1829480 - RNA, 14 nt, Human herpesvirus 2
ccccgacgcgcgcg

SEQ ID NO: 1829481 - RNA, 15 nt, Human herpesvirus 2
ccccgcgcacgcgcg

SEQ ID NO: 1829482 - RNA, 12 nt, Human herpesvirus 2
ccccgcgccgcc

SEQ ID NO: 1829483 - RNA, 14 nt, Human herpesvirus 2
ccccgcgugcagcg

SEQ ID NO: 1829484 - RNA, 16 nt, Human herpesvirus 2
ccccagggagccccgg

SEQ ID NO: 1829485 - RNA, 18 nt, Human herpesvirus 2
ccccgaagcggccccgac

SEQ ID NO: 1829486 - RNA, 19 nt, Human herpesvirus 2
ccccgaauaccaccggcgu

SEQ ID NO: 1829487 - RNA, 20 nt, Human herpesvirus 2
ccccaacucauacacgcgcu

SEQ ID NO: 1829488 - RNA, 22 nt, Human herpesvirus 2
ccaggaacucacggcagacgcg

SEQ ID NO: 1829489 - RNA, 19 nt, Human herpesvirus 2
ccagcgcguugguccgggg

SEQ ID NO: 1829490 - RNA, 15 nt, Human herpesvirus 2
ccauaacgcgcccgc

SEQ ID NO: 1829491 - RNA, 17 nt, Human herpesvirus 2
ccaucgacccggacugc

SEQ ID NO: 1829492 - RNA, 16 nt, Human herpesvirus 2
cccaguaccggcgcgc

SEQ ID NO: 1829493 - RNA, 15 nt, Human herpesvirus 2
cccaguuccuccgug

SEQ ID NO: 1829494 - RNA, 12 nt, Human herpesvirus 2
ccagggcgucgc

SEQ ID NO: 1829495 - RNA, 13 nt, Human herpesvirus 2
ccagggcuucgug

SEQ ID NO: 1829496 - RNA, 14 nt, Human herpesvirus 2
ccaacgacggcguu

SEQ ID NO: 1829497 - RNA, 18 nt, Human herpesvirus 2
ccaacgcgggcggucugg

SEQ ID NO: 1829498 - RNA, 19 nt, Human herpesvirus 2
cauuugcccgcgggucugc

SEQ ID NO: 1829499 - RNA, 14 nt, Human herpesvirus 2
caggggcccgccgc

SEQ ID NO: 1829500 - RNA, 17 nt, Human herpesvirus 2
cagggaguccucgccgc

SEQ ID NO: 1829501 - RNA, 20 nt, Human herpesvirus 2
cagggagccacucccgcggc

SEQ ID NO: 1829502 - RNA, 22 nt, Human herpesvirus 2
cagggccuggcgauccugggcc

SEQ ID NO: 1829503 - RNA, 17 nt, Human herpesvirus 2
cagggggcggcgccggc

SEQ ID NO: 1829504 - RNA, 23 nt, Human herpesvirus 2
caggggggcuuggacugggagcc

SEQ ID NO: 1829505 - RNA, 14 nt, Human herpesvirus 2
cauguucggcgucg

SEQ ID NO: 1829506 - RNA, 14 nt, Human herpesvirus 2
augcgacgccgccc

SEQ ID NO: 1829507 - RNA, 14 nt, Human herpesvirus 2
auggccgccccgca

SEQ ID NO: 1829508 - RNA, 14 nt, Human herpesvirus 2
auggcggccgccgc

SEQ ID NO: 1829509 - RNA, 15 nt, Human herpesvirus 2
auggcggccgcgccc

SEQ ID NO: 1829510 - RNA, 23 nt, Human herpesvirus 2
auggcggccgcgcccccggccgc

SEQ ID NO: 1829511 - RNA, 14 nt, Human herpesvirus 2
auggcguacccggg

SEQ ID NO: 1829512 - RNA, 16 nt, Human herpesvirus 2
augcgccugguggucg

SEQ ID NO: 1829513 - RNA, 22 nt, Human herpesvirus 2
augggccggcguucccgcucgc

SEQ ID NO: 1829514 - RNA, 19 nt, Human herpesvirus 2
augucaggggcccgccgcc

SEQ ID NO: 1829515 - RNA, 20 nt, Human herpesvirus 2
caaaccccgguuggggcggg

SEQ ID NO: 1829516 - RNA, 17 nt, Human herpesvirus 2
caggcccgccccaccgc

SEQ ID NO: 1829517 - RNA, 22 nt, Human herpesvirus 2
cgcugcggggaccagccgacgu

SEQ ID NO: 1829518 - RNA, 12 nt, Human herpesvirus 2
cgcugcgccggg

SEQ ID NO: 1829519 - RNA, 23 nt, Human herpesvirus 2
cgcguugguccgggggcgggcgg

SEQ ID NO: 1829520 - RNA, 16 nt, Human herpesvirus 2
cgcccuucaccaacga

SEQ ID NO: 1829521 - RNA, 16 nt, Human herpesvirus 2
cgccgacaacguccgg

SEQ ID NO: 1829522 - RNA, 17 nt, Human herpesvirus 2
cgcguucagacgacaga

SEQ ID NO: 1829523 - RNA, 18 nt, Human herpesvirus 2
cgcccuuccgcguccgcg

SEQ ID NO: 1829524 - RNA, 20 nt, Human herpesvirus 2
cgcccgggugaccacgcgca

SEQ ID NO: 1829525 - RNA, 18 nt, Human herpesvirus 2
cgcccggagcggugggga

SEQ ID NO: 1829526 - RNA, 20 nt, Human herpesvirus 2
cgcaccgcugucccgacgau

SEQ ID NO: 1829527 - RNA, 12 nt, Human herpesvirus 2
cgcccgccccag

SEQ ID NO: 1829528 - RNA, 13 nt, Human herpesvirus 2
cgcccgcgugccg

SEQ ID NO: 1829529 - RNA, 13 nt, Human herpesvirus 2
cgccccgcggacc

SEQ ID NO: 1829530 - RNA, 23 nt, Human herpesvirus 2
cgccccgccccaccccgccccac

SEQ ID NO: 1829531 - RNA, 16 nt, Human herpesvirus 2
cgcccccgcggccucc

SEQ ID NO: 1829532 - RNA, 16 nt, Human herpesvirus 2
cgccaagcgccccgcg

SEQ ID NO: 1829533 - RNA, 15 nt, Human herpesvirus 2
cgcauaaagguccgg

SEQ ID NO: 1829534 - RNA, 13 nt, Human herpesvirus 2
cgcagcggcgucc

SEQ ID NO: 1829535 - RNA, 12 nt, Human herpesvirus 2
cgcagcguccgg

SEQ ID NO: 1829536 - RNA, 18 nt, Human herpesvirus 2
cgcaacaacggcgggccc

SEQ ID NO: 1829537 - RNA, 18 nt, Human herpesvirus 2
cgagccccgcgaccacca

SEQ ID NO: 1829538 - RNA, 20 nt, Human herpesvirus 2
cgagccccgcgaccaccaag

SEQ ID NO: 1829539 - RNA, 17 nt, Human herpesvirus 2
cgagccaccgucccgcc

SEQ ID NO: 1829540 - RNA, 16 nt, Human herpesvirus 2
ccgauagccuccgagg

SEQ ID NO: 1829541 - RNA, 16 nt, Human herpesvirus 2
cgagcaccgacccccu

SEQ ID NO: 1829542 - RNA, 15 nt, Human herpesvirus 2
ccgacguggcccgcc

SEQ ID NO: 1829543 - RNA, 15 nt, Human herpesvirus 2
ccgacgcgaggcgcg

SEQ ID NO: 1829544 - RNA, 14 nt, Human herpesvirus 2
cccggcggcggucg

SEQ ID NO: 1829545 - RNA, 20 nt, Human herpesvirus 2
cccggggcccucgagaugcg

SEQ ID NO: 1829546 - RNA, 15 nt, Human herpesvirus 2
cccggggggggccuc

SEQ ID NO: 1829547 - RNA, 13 nt, Human herpesvirus 2
cccggguccgggg

SEQ ID NO: 1829548 - RNA, 17 nt, Human herpesvirus 2
ccgacccuguggcgggc

SEQ ID NO: 1829549 - RNA, 20 nt, Human herpesvirus 2
ccgacgauuagccaccgcgc

SEQ ID NO: 1829550 - RNA, 17 nt, Human herpesvirus 2
cccgcgugccuggccgc

SEQ ID NO: 1829551 - RNA, 20 nt, Human herpesvirus 2
cccgcguccgacacccgggc

SEQ ID NO: 1829552 - RNA, 17 nt, Human herpesvirus 2
cccgcggaccaccgggc

SEQ ID NO: 1829553 - RNA, 21 nt, Human herpesvirus 2
cccggcgaccgccccgcgccg

SEQ ID NO: 1829554 - RNA, 20 nt, Human herpesvirus 2
cccgcguauauauccgcgag

SEQ ID NO: 1829555 - RNA, 20 nt, Human herpesvirus 2
aaacccgccggggcuucgug

SEQ ID NO: 1829556 - RNA, 17 nt, Human herpesvirus 2
aacacaagcucgccgug

SEQ ID NO: 1829557 - RNA, 13 nt, Human herpesvirus 2
aacacccggcgcc

SEQ ID NO: 1829558 - RNA, 19 nt, Human herpesvirus 2
aacaacacguucgccccgc

SEQ ID NO: 1829559 - RNA, 18 nt, Human herpesvirus 2
ucgcgcuuuuccgccgcc

SEQ ID NO: 1829560 - RNA, 20 nt, Human herpesvirus 2
ucgcggacgcacgcggggac

SEQ ID NO: 1829561 - RNA, 16 nt, Human herpesvirus 2
ucgcggcccggcgcca

SEQ ID NO: 1829562 - RNA, 18 nt, Human herpesvirus 2
ucgcggccgcccgcgccg

SEQ ID NO: 1829563 - RNA, 19 nt, Human herpesvirus 2
uccagcgcgucggugccgc

SEQ ID NO: 1829564 - RNA, 17 nt, Human herpesvirus 2
ucaucgggaaucucggg

SEQ ID NO: 1829565 - RNA, 18 nt, Human herpesvirus 2
ucaucaaacacgggcucg

SEQ ID NO: 1829566 - RNA, 19 nt, Human herpesvirus 2
gggggcuugauuugcgcgc

SEQ ID NO: 1829567 - RNA, 11 nt, Human herpesvirus 2
ggggggccucg

SEQ ID NO: 1829568 - RNA, 12 nt, Human herpesvirus 2
ggggguggcggc

SEQ ID NO: 1829569 - RNA, 14 nt, Human herpesvirus 2
ucaguccgcgcggg

SEQ ID NO: 1829570 - RNA, 17 nt, Human herpesvirus 2
ggcgucuagcucgcgga

SEQ ID NO: 1829571 - RNA, 23 nt, Human herpesvirus 2
ggccgccgcaacacccggcgcca

SEQ ID NO: 1829572 - RNA, 14 nt, Human herpesvirus 2
ggcggcguggccgc

SEQ ID NO: 1829573 - RNA, 23 nt, Human herpesvirus 2
ggcgggaccccgacguggcccgc

SEQ ID NO: 1829574 - RNA, 15 nt, Human herpesvirus 2
ggcggggccccgggc

SEQ ID NO: 1829575 - RNA, 12 nt, Human herpesvirus 2
ggcuccugcgca

SEQ ID NO: 1829576 - RNA, 15 nt, Human herpesvirus 2
gggcguugccggggg

SEQ ID NO: 1829577 - RNA, 19 nt, Human herpesvirus 2
gggcggccagccgcgcgac

SEQ ID NO: 1829578 - RNA, 19 nt, Human herpesvirus 2
gggcggcguggccgcgacc

SEQ ID NO: 1829579 - RNA, 12 nt, Human herpesvirus 2
gggcgggagggg

SEQ ID NO: 1829580 - RNA, 13 nt, Human herpesvirus 2
gggcgggcgggcg

SEQ ID NO: 1829581 - RNA, 12 nt, Human herpesvirus 2
gggcgggcgggg

SEQ ID NO: 1829582 - RNA, 19 nt, Human herpesvirus 2
gggcgggggugccguggac

SEQ ID NO: 1829583 - RNA, 14 nt, Human herpesvirus 2
gggcguccugcggc

SEQ ID NO: 1829584 - RNA, 22 nt, Human herpesvirus 2
gggcguccugcggcagcgcgcc

SEQ ID NO: 1829585 - RNA, 22 nt, Human herpesvirus 2
gggcgugauguuuuccgcaucu

SEQ ID NO: 1829586 - RNA, 14 nt, Human herpesvirus 2
gggcgcugagggcg

SEQ ID NO: 1829587 - RNA, 12 nt, Human herpesvirus 2
ggcuggcggcgc

SEQ ID NO: 1829588 - RNA, 14 nt, Human herpesvirus 2
gggcgagcuggccc

SEQ ID NO: 1829589 - RNA, 13 nt, Human herpesvirus 2
ggcugcggggggc

SEQ ID NO: 1829590 - RNA, 13 nt, Human herpesvirus 2
ggcucgcggggcc

SEQ ID NO: 1829591 - RNA, 18 nt, Human herpesvirus 2
gggggcgcugguggccgc

SEQ ID NO: 1829592 - RNA, 17 nt, Human herpesvirus 2
gggcgcgcggcgcgagc

SEQ ID NO: 1829593 - RNA, 13 nt, Human herpesvirus 2
gggggaggcgcgc

SEQ ID NO: 1829594 - RNA, 21 nt, Human herpesvirus 2
ggggcuccucagcgcggccgu

SEQ ID NO: 1829595 - RNA, 19 nt, Human herpesvirus 2
ggggcuugugcccucguag

SEQ ID NO: 1829596 - RNA, 17 nt, Human herpesvirus 2
ggggcgcugguggccgc

SEQ ID NO: 1829597 - RNA, 19 nt, Human herpesvirus 2
ggggacuugacggucgcca

SEQ ID NO: 1829598 - RNA, 21 nt, Human herpesvirus 2
ggggccccaguaccggcgcgc

SEQ ID NO: 1829599 - RNA, 14 nt, Human herpesvirus 2
ggggccccggcccg

SEQ ID NO: 1829600 - RNA, 15 nt, Human herpesvirus 2
ggggcccgccgccgc

SEQ ID NO: 1829601 - RNA, 18 nt, Human herpesvirus 2
ggggccggggcggccccg

SEQ ID NO: 1829602 - RNA, 17 nt, Human herpesvirus 2
ggggccgucgcggccgc

SEQ ID NO: 1829603 - RNA, 19 nt, Human herpesvirus 2
gggcuuuagucccggcccg

SEQ ID NO: 1829604 - RNA, 18 nt, Human herpesvirus 2
ggggaaagcuggcgucgg

SEQ ID NO: 1829605 - RNA, 20 nt, Human herpesvirus 2
ggggaagcccuacggcggcc

SEQ ID NO: 1829606 - RNA, 21 nt, Human herpesvirus 2
ggggaaggaaucgggcgucug

SEQ ID NO: 1829607 - RNA, 20 nt, Human herpesvirus 2
ggggacacgcggcgggucgg

SEQ ID NO: 1829608 - RNA, 23 nt, Human herpesvirus 2
ggggacccgacccuguggcgggc

SEQ ID NO: 1829609 - RNA, 13 nt, Human herpesvirus 2
ggggagggcgugg

SEQ ID NO: 1829610 - RNA, 21 nt, Human herpesvirus 2
ggggaucugucgccggcgugg

SEQ ID NO: 1829611 - RNA, 16 nt, Human herpesvirus 2
ggggaugguggugggc

SEQ ID NO: 1829612 - RNA, 15 nt, Human herpesvirus 2
ggggcaccggcaccg

SEQ ID NO: 1829613 - RNA, 21 nt, Human herpesvirus 2
ggccgcccaacccgagcgacc

SEQ ID NO: 1829614 - RNA, 23 nt, Human herpesvirus 2
ggccgcacccacgacauccgcgg

SEQ ID NO: 1829615 - RNA, 22 nt, Human herpesvirus 2
ggccgcagggauaggggcaggc

SEQ ID NO: 1829616 - RNA, 23 nt, Human herpesvirus 2
ggcccggggcccuucgcagcuuc

SEQ ID NO: 1829617 - RNA, 19 nt, Human herpesvirus 2
ggcccuccacgccguggac

SEQ ID NO: 1829618 - RNA, 17 nt, Human herpesvirus 2
ggccgacgugccgggga

SEQ ID NO: 1829619 - RNA, 15 nt, Human herpesvirus 2
ggcccuggacccaga

SEQ ID NO: 1829620 - RNA, 19 nt, Human herpesvirus 2
ggcccuuggacgggugggc

SEQ ID NO: 1829621 - RNA, 22 nt, Human herpesvirus 2
ggccgaacgccucaccgcgccc

SEQ ID NO: 1829622 - RNA, 14 nt, Human herpesvirus 2
ggcccggggggggc

SEQ ID NO: 1829623 - RNA, 14 nt, Human herpesvirus 2
ggcccggccgcgac

SEQ ID NO: 1829624 - RNA, 21 nt, Human herpesvirus 2
ggcccgcuucauagcgcgucc

SEQ ID NO: 1829625 - RNA, 14 nt, Human herpesvirus 2
ggcccgaggcgacc

SEQ ID NO: 1829626 - RNA, 13 nt, Human herpesvirus 2
ggcccgcagcuuc

SEQ ID NO: 1829627 - RNA, 13 nt, Human herpesvirus 2
gcgcggacgcggc

SEQ ID NO: 1829628 - RNA, 22 nt, Human herpesvirus 2
ggccccccgcgccucgggcggc

SEQ ID NO: 1829629 - RNA, 20 nt, Human herpesvirus 2
ggcccccgcaccggggcggc

SEQ ID NO: 1829630 - RNA, 17 nt, Human herpesvirus 2
ggccccgccccgcccca

SEQ ID NO: 1829631 - RNA, 19 nt, Human herpesvirus 2
ggccccgcucguggcgggc

SEQ ID NO: 1829632 - RNA, 16 nt, Human herpesvirus 2
ggccccggcggccccg

SEQ ID NO: 1829633 - RNA, 12 nt, Human herpesvirus 2
ggccaggggggc

SEQ ID NO: 1829634 - RNA, 22 nt, Human herpesvirus 2
ggccaggggggcaggcgggccc

SEQ ID NO: 1829635 - RNA, 15 nt, Human herpesvirus 2
ggccacucgucgcca

SEQ ID NO: 1829636 - RNA, 14 nt, Human herpesvirus 2
ggccagcgggggcc

SEQ ID NO: 1829637 - RNA, 13 nt, Human herpesvirus 2
gcgcgcuucgcgg

SEQ ID NO: 1829638 - RNA, 17 nt, Human herpesvirus 2
gcgcccccggccgcggu

SEQ ID NO: 1829639 - RNA, 15 nt, Human herpesvirus 2
gcgccccgccggggc

SEQ ID NO: 1829640 - RNA, 21 nt, Human herpesvirus 2
gcgccauuacccuauacgcgg

SEQ ID NO: 1829641 - RNA, 19 nt, Human herpesvirus 2
gcgcccccgacccggggcc

SEQ ID NO: 1829642 - RNA, 13 nt, Human herpesvirus 2
gcgcgcguccgua

SEQ ID NO: 1829643 - RNA, 17 nt, Human herpesvirus 2
cucgaccagcggcccca

SEQ ID NO: 1829644 - RNA, 22 nt, Human herpesvirus 2
cuccgccaugcaacgccgggcg

SEQ ID NO: 1829645 - RNA, 18 nt, Human herpesvirus 2
cuccgcaauaaacgccuu

SEQ ID NO: 1829646 - RNA, 17 nt, Human herpesvirus 2
gcgccaacgcgggcguc

SEQ ID NO: 1829647 - RNA, 15 nt, Human herpesvirus 2
gcgccaagcgccccg

SEQ ID NO: 1829648 - RNA, 16 nt, Human herpesvirus 2
gcgcaucgccaacucu

SEQ ID NO: 1829649 - RNA, 17 nt, Human herpesvirus 2
ccgaucgaugagccggu

SEQ ID NO: 1829650 - RNA, 11 nt, Human herpesvirus 2
ccgccauccuc

SEQ ID NO: 1829651 - RNA, 22 nt, Human herpesvirus 2
ccgcgguggcgucggcggcccc

SEQ ID NO: 1829652 - RNA, 14 nt, Human herpesvirus 2
ccgccagcagucgg

SEQ ID NO: 1829653 - RNA, 22 nt, Human herpesvirus 2
ccgcagccuauguucgcgggcg

SEQ ID NO: 1829654 - RNA, 18 nt, Human herpesvirus 2
cguguuguggcuggaggc

SEQ ID NO: 1829655 - RNA, 13 nt, Human herpesvirus 2
cucccucgccgcc

SEQ ID NO: 1829656 - RNA, 21 nt, Human herpesvirus 2
cucccggccauccccggcgcc

SEQ ID NO: 1829657 - RNA, 16 nt, Human herpesvirus 2
cucccggcccgccgac

SEQ ID NO: 1829658 - RNA, 18 nt, Human herpesvirus 2
cucccggcccgccgacca

SEQ ID NO: 1829659 - RNA, 15 nt, Human herpesvirus 2
cuaaggcgccgacgg

SEQ ID NO: 1829660 - RNA, 14 nt, Human herpesvirus 2
cguucccaccgcac

SEQ ID NO: 1829661 - RNA, 18 nt, Human herpesvirus 2
cguuugggggcggacgug

SEQ ID NO: 1829662 - RNA, 23 nt, Human herpesvirus 2
cguuggccagcgcguugguccgg

SEQ ID NO: 1829663 - RNA, 16 nt, Human herpesvirus 2
cguucggcaggcccgc

SEQ ID NO: 1829664 - RNA, 15 nt, Human herpesvirus 2
cguucguucgcccgg

SEQ ID NO: 1829665 - RNA, 12 nt, Human herpesvirus 2
ccgcuggcggga

SEQ ID NO: 1829666 - RNA, 12 nt, Human herpesvirus 2
ccguggguacgg

SEQ ID NO: 1829667 - RNA, 17 nt, Human herpesvirus 2
ccguguaccucugggcc

SEQ ID NO: 1829668 - RNA, 16 nt, Human herpesvirus 2
ccucagcgcggccgug

SEQ ID NO: 1829669 - RNA, 19 nt, Human herpesvirus 2
ccuauaaacucucccccgc

SEQ ID NO: 1829670 - RNA, 14 nt, Human herpesvirus 2
ccuaucuugauccc

SEQ ID NO: 1829671 - RNA, 13 nt, Human herpesvirus 2
cagccccuggggc

SEQ ID NO: 1829672 - RNA, 22 nt, Human herpesvirus 2
cagccccuggggcugucgggcg

SEQ ID NO: 1829673 - RNA, 14 nt, Human herpesvirus 2
cagcccggaccccu

SEQ ID NO: 1829674 - RNA, 15 nt, Human herpesvirus 2
cacguucgccccgca

SEQ ID NO: 1829675 - RNA, 21 nt, Human herpesvirus 2
cacgcaggccgcccccagcag

SEQ ID NO: 1829676 - RNA, 19 nt, Human herpesvirus 2
cacgacccaccgcccccgc

SEQ ID NO: 1829677 - RNA, 20 nt, Human herpesvirus 2
cacgcaacaacggcgggccc

SEQ ID NO: 1829678 - RNA, 23 nt, Human herpesvirus 2
caccgggcugggggucccgcgcu

SEQ ID NO: 1829679 - RNA, 13 nt, Human herpesvirus 2
caccgggggcccc

SEQ ID NO: 1829680 - RNA, 18 nt, Human herpesvirus 2
cacgaaaaagagcucggg

SEQ ID NO: 1829681 - RNA, 20 nt, Human herpesvirus 2
caccuggcucgccgugcgcu

SEQ ID NO: 1829682 - RNA, 16 nt, Human herpesvirus 2
acguccugcggcucau

SEQ ID NO: 1829683 - RNA, 13 nt, Human herpesvirus 2
acgugugcccgcc

SEQ ID NO: 1829684 - RNA, 13 nt, Human herpesvirus 2
agaccuccccgug

SEQ ID NO: 1829685 - RNA, 14 nt, Human herpesvirus 2
agacgaggccgcca

SEQ ID NO: 1829686 - RNA, 23 nt, Human herpesvirus 2
agaacggacaaccgagcgccggg

SEQ ID NO: 1829687 - RNA, 19 nt, Human herpesvirus 2
agagacgaugggagccccg

SEQ ID NO: 1829688 - RNA, 12 nt, Human herpesvirus 2
agagauuucccc

SEQ ID NO: 1829689 - RNA, 15 nt, Human herpesvirus 2
agagccgauccggcc

SEQ ID NO: 1829690 - RNA, 12 nt, Human herpesvirus 2
cacccgcccguc

SEQ ID NO: 1829691 - RNA, 15 nt, Human herpesvirus 2
caccgccccagcacc

SEQ ID NO: 1829692 - RNA, 15 nt, Human herpesvirus 2
cacccugggucggga

SEQ ID NO: 1829693 - RNA, 15 nt, Human herpesvirus 2
acggccagcgggggc

SEQ ID NO: 1829694 - RNA, 16 nt, Human herpesvirus 2
acggugaucgaggugu

SEQ ID NO: 1829695 - RNA, 15 nt, Human herpesvirus 2
acggcgucucccggg

SEQ ID NO: 1829696 - RNA, 23 nt, Human herpesvirus 2
acggccccggccgccuccccgcu

SEQ ID NO: 1829697 - RNA, 22 nt, Human herpesvirus 2
acgcgggcguccccgagcggcg

SEQ ID NO: 1829698 - RNA, 15 nt, Human herpesvirus 2
acggccucgugcucg

SEQ ID NO: 1829699 - RNA, 20 nt, Human herpesvirus 2
acgcgguauggcugcccccg

SEQ ID NO: 1829700 - RNA, 19 nt, Human herpesvirus 2
acgcgguauuguacccccg

SEQ ID NO: 1829701 - RNA, 21 nt, Human herpesvirus 2
acgcgcgacugccuccacgcc

SEQ ID NO: 1829702 - RNA, 17 nt, Human herpesvirus 2
acgcgaccgucgccgcc

SEQ ID NO: 1829703 - RNA, 13 nt, Human herpesvirus 2
acgccgaugccca

SEQ ID NO: 1829704 - RNA, 24 nt, Human herpesvirus 2
acgccuccggaagagagcgccccg

SEQ ID NO: 1829705 - RNA, 16 nt, Human herpesvirus 2
acgccaauaucaucga

SEQ ID NO: 1829706 - RNA, 16 nt, Human herpesvirus 2
gcguacguggcgucgg

SEQ ID NO: 1829707 - RNA, 14 nt, Human herpesvirus 2
gcguaccccuuuga

SEQ ID NO: 1829708 - RNA, 23 nt, Human herpesvirus 2
gcggugcgagaguuucuucgcgg

SEQ ID NO: 1829709 - RNA, 14 nt, Human herpesvirus 2
ggacgcccggccca

SEQ ID NO: 1829710 - RNA, 15 nt, Human herpesvirus 2
ggacgcagcggcguc

SEQ ID NO: 1829711 - RNA, 19 nt, Human herpesvirus 2
gcuccccuucagccuggac

SEQ ID NO: 1829712 - RNA, 14 nt, Human herpesvirus 2
ggacgacgggcgcc

SEQ ID NO: 1829713 - RNA, 22 nt, Human herpesvirus 2
ggacgagccaaaccagccccgc

SEQ ID NO: 1829714 - RNA, 21 nt, Human herpesvirus 2
gcguauaaaggcaggcgcgcg

SEQ ID NO: 1829715 - RNA, 17 nt, Human herpesvirus 2
gcucccggcccgggccc

SEQ ID NO: 1829716 - RNA, 12 nt, Human herpesvirus 2
guacccucucaa

SEQ ID NO: 1829717 - RNA, 16 nt, Human herpesvirus 2
guacagcauguggccc

SEQ ID NO: 1829718 - RNA, 13 nt, Human herpesvirus 2
gguuggggcgggc

SEQ ID NO: 1829719 - RNA, 19 nt, Human herpesvirus 2
gguuccccgagagcccagg

SEQ ID NO: 1829720 - RNA, 15 nt, Human herpesvirus 2
gguucccauuggccc

SEQ ID NO: 1829721 - RNA, 15 nt, Human herpesvirus 2
gguugaugggcgggg

SEQ ID NO: 1829722 - RNA, 14 nt, Human herpesvirus 2
gguuuccggccccu

SEQ ID NO: 1829723 - RNA, 13 nt, Human herpesvirus 2
guccgcggggggc

SEQ ID NO: 1829724 - RNA, 16 nt, Human herpesvirus 2
guccucgggccuacgu

SEQ ID NO: 1829725 - RNA, 16 nt, Human herpesvirus 2
guccugcggcagcgcg

SEQ ID NO: 1829726 - RNA, 20 nt, Human herpesvirus 2
guccuaaggcgccgacggcg

SEQ ID NO: 1829727 - RNA, 23 nt, Human herpesvirus 2
guccuaaggcgccgacggcggcg

SEQ ID NO: 1829728 - RNA, 23 nt, Human herpesvirus 2
guccggcggccaccccgccgcag

SEQ ID NO: 1829729 - RNA, 14 nt, Human herpesvirus 2
guccgggggcgggc

SEQ ID NO: 1829730 - RNA, 20 nt, Human herpesvirus 2
guccuucgcgggggccgggg

SEQ ID NO: 1829731 - RNA, 20 nt, Human herpesvirus 2
gucgcccccgucugucgccu

SEQ ID NO: 1829732 - RNA, 15 nt, Human herpesvirus 2
gcccgcgaccccccg

SEQ ID NO: 1829733 - RNA, 18 nt, Human herpesvirus 2
gcccgcgccgcgacggcc

SEQ ID NO: 1829734 - RNA, 20 nt, Human herpesvirus 2
gcccgcgccgcgacggcccc

SEQ ID NO: 1829735 - RNA, 22 nt, Human herpesvirus 2
gccgcgcggccacgucguccgg

SEQ ID NO: 1829736 - RNA, 15 nt, Human herpesvirus 2
gccgcgccgcugccc

SEQ ID NO: 1829737 - RNA, 17 nt, Human herpesvirus 2
gccgcgccgcugcccga

SEQ ID NO: 1829738 - RNA, 18 nt, Human herpesvirus 2
gccgcgcgagcggccgug

SEQ ID NO: 1829739 - RNA, 19 nt, Human herpesvirus 2
gccgcgaccgucgcggcga

SEQ ID NO: 1829740 - RNA, 15 nt, Human herpesvirus 2
gccgcgacggccccg

SEQ ID NO: 1829741 - RNA, 22 nt, Human herpesvirus 2
gccgcgacaagacccggcggcg

SEQ ID NO: 1829742 - RNA, 14 nt, Human herpesvirus 2
gccgccgcgcgggc

SEQ ID NO: 1829743 - RNA, 19 nt, Human herpesvirus 2
gccgcgacccacguccgua

SEQ ID NO: 1829744 - RNA, 20 nt, Human herpesvirus 2
gccggggagggcagggccgc

SEQ ID NO: 1829745 - RNA, 19 nt, Human herpesvirus 2
gccgggaaccccggcgugg

SEQ ID NO: 1829746 - RNA, 23 nt, Human herpesvirus 2
gccgggacgacgaccaugggccc

SEQ ID NO: 1829747 - RNA, 19 nt, Human herpesvirus 2
gcccgcguccccggcccuc

SEQ ID NO: 1829748 - RNA, 21 nt, Human herpesvirus 2
gcccgcgugccgcagaccacc

SEQ ID NO: 1829749 - RNA, 13 nt, Human herpesvirus 2
gcccgcggaccac

SEQ ID NO: 1829750 - RNA, 13 nt, Human herpesvirus 2
gcccggcgccgcc

SEQ ID NO: 1829751 - RNA, 23 nt, Human herpesvirus 2
gcccggaccccucaucgccgcgc

SEQ ID NO: 1829752 - RNA, 18 nt, Human herpesvirus 2
gcccggacuccgccccgg

SEQ ID NO: 1829753 - RNA, 14 nt, Human herpesvirus 2
gcccuacggcggcc

SEQ ID NO: 1829754 - RNA, 17 nt, Human herpesvirus 2
gccgccccccgucccga

SEQ ID NO: 1829755 - RNA, 17 nt, Human herpesvirus 2
gccgcccgcgccgcgac

SEQ ID NO: 1829756 - RNA, 13 nt, Human herpesvirus 2
gccgccggggggc

SEQ ID NO: 1829757 - RNA, 12 nt, Human herpesvirus 2
gccgccggccac

SEQ ID NO: 1829758 - RNA, 16 nt, Human herpesvirus 2
gccgcccaagcggccc

SEQ ID NO: 1829759 - RNA, 21 nt, Human herpesvirus 2
gcccuggacccagacacggug

SEQ ID NO: 1829760 - RNA, 20 nt, Human herpesvirus 2
gcccucacgucuucgcccac

SEQ ID NO: 1829761 - RNA, 22 nt, Human herpesvirus 2
gcgaccccgccccccgacgcca

SEQ ID NO: 1829762 - RNA, 17 nt, Human herpesvirus 2
gccuguucggggcgugu

SEQ ID NO: 1829763 - RNA, 16 nt, Human herpesvirus 2
gcgaccgucgccgccg

SEQ ID NO: 1829764 - RNA, 22 nt, Human herpesvirus 2
gcgacacgcgcccggggcgggu

SEQ ID NO: 1829765 - RNA, 13 nt, Human herpesvirus 2
gcgacgccgcggc

SEQ ID NO: 1829766 - RNA, 22 nt, Human herpesvirus 2
gcgagaaggaggggggccucgg

SEQ ID NO: 1829767 - RNA, 20 nt, Human herpesvirus 2
gcgagaaguaauaguccgug

SEQ ID NO: 1829768 - RNA, 19 nt, Human herpesvirus 2
gcgaaccgguagccggggc

SEQ ID NO: 1829769 - RNA, 20 nt, Human herpesvirus 2
gccuugaacgucacgcaggc

SEQ ID NO: 1829770 - RNA, 16 nt, Human herpesvirus 2
gccugugggucugcgc

SEQ ID NO: 1829771 - RNA, 20 nt, Human herpesvirus 2
gccugugggucugcgccacc

SEQ ID NO: 1829772 - RNA, 15 nt, Human herpesvirus 2
gccgugcgcggcccc

SEQ ID NO: 1829773 - RNA, 16 nt, Human herpesvirus 2
gccugguggucgucgg

SEQ ID NO: 1829774 - RNA, 17 nt, Human herpesvirus 2
gccgucgcacgcgcgca

SEQ ID NO: 1829775 - RNA, 17 nt, Human herpesvirus 2
gccggggcggccccgau

SEQ ID NO: 1829776 - RNA, 20 nt, Human herpesvirus 2
gcgacugccuccacgcccug

SEQ ID NO: 1829777 - RNA, 19 nt, Human herpesvirus 2
gcgcguugguccgggggcg

SEQ ID NO: 1829778 - RNA, 12 nt, Human herpesvirus 2
gcggaugugggc

SEQ ID NO: 1829779 - RNA, 13 nt, Human herpesvirus 2
gcgcugcggggac

SEQ ID NO: 1829780 - RNA, 17 nt, Human herpesvirus 2
gcgcucggcaugcgcgg

SEQ ID NO: 1829781 - RNA, 14 nt, Human herpesvirus 2
gcgcuggccccucu

SEQ ID NO: 1829782 - RNA, 18 nt, Human herpesvirus 2
gcgcuggugggacgccca

SEQ ID NO: 1829783 - RNA, 22 nt, Human herpesvirus 2
gcggcacucgaagaaguuggug

SEQ ID NO: 1829784 - RNA, 22 nt, Human herpesvirus 2
gcggcccugagccgcgcggcca

SEQ ID NO: 1829785 - RNA, 14 nt, Human herpesvirus 2
gcggcccuggagcg

SEQ ID NO: 1829786 - RNA, 16 nt, Human herpesvirus 2
gcggccccggcggccc

SEQ ID NO: 1829787 - RNA, 23 nt, Human herpesvirus 2
gcggccccuguuggagccggagc

SEQ ID NO: 1829788 - RNA, 13 nt, Human herpesvirus 2
gcaugcgacggcg

SEQ ID NO: 1829789 - RNA, 15 nt, Human herpesvirus 2
gcaguugauucgcga

SEQ ID NO: 1829790 - RNA, 12 nt, Human herpesvirus 2
gcagcgcgccga

SEQ ID NO: 1829791 - RNA, 20 nt, Human herpesvirus 2
cucguccccuggggcggcgg

SEQ ID NO: 1829792 - RNA, 17 nt, Human herpesvirus 2
cucugccugcacgagcg

SEQ ID NO: 1829793 - RNA, 20 nt, Human herpesvirus 2
cucucgggggaugguggugg

SEQ ID NO: 1829794 - RNA, 15 nt, Human herpesvirus 2
cucugccacacgugg

SEQ ID NO: 1829795 - RNA, 17 nt, Human herpesvirus 2
cucugcccgaccgggcg

SEQ ID NO: 1829796 - RNA, 16 nt, Human herpesvirus 2
cucguuccucacgggg

SEQ ID NO: 1829797 - RNA, 17 nt, Human herpesvirus 2
cugccccccggcgcggg

SEQ ID NO: 1829798 - RNA, 16 nt, Human herpesvirus 2
cugccggacgcggcac

SEQ ID NO: 1829799 - RNA, 11 nt, Human herpesvirus 2
cugcgaggugc

SEQ ID NO: 1829800 - RNA, 19 nt, Human herpesvirus 2
cugcgcauggccugcgagg

SEQ ID NO: 1829801 - RNA, 13 nt, Human herpesvirus 2
cugucggccgcgg

SEQ ID NO: 1829802 - RNA, 19 nt, Human herpesvirus 2
cuguccagcgucgucgccc

SEQ ID NO: 1829803 - RNA, 11 nt, Human herpesvirus 2
cuguccccgcc

SEQ ID NO: 1829804 - RNA, 21 nt, Human herpesvirus 2
cuggucacaaaaggcacggcg

SEQ ID NO: 1829805 - RNA, 13 nt, Human herpesvirus 2
cugggugucgacc

SEQ ID NO: 1829806 - RNA, 17 nt, Human herpesvirus 2
cuggggcggcggcgucu

SEQ ID NO: 1829807 - RNA, 22 nt, Human herpesvirus 2
cuggggcuuccguugcgcgaca

SEQ ID NO: 1829808 - RNA, 13 nt, Human herpesvirus 2
cugggcccgccga

SEQ ID NO: 1829809 - RNA, 16 nt, Human herpesvirus 2
cugggaacucgcccgc

SEQ ID NO: 1829810 - RNA, 21 nt, Human herpesvirus 2
cugggacacccagaugcgccu

SEQ ID NO: 1829811 - RNA, 20 nt, Human herpesvirus 2
cugcggcagcgcgccgacga

SEQ ID NO: 1829812 - RNA, 22 nt, Human herpesvirus 2
cuggcuggagaccgagcucgug

SEQ ID NO: 1829813 - RNA, 16 nt, Human herpesvirus 2
cugcggacuggcagcc

SEQ ID NO: 1829814 - RNA, 20 nt, Human herpesvirus 2
cugcggggaccagccgacgu

SEQ ID NO: 1829815 - RNA, 12 nt, Human herpesvirus 2
cugcggccgaca

SEQ ID NO: 1829816 - RNA, 19 nt, Human herpesvirus 2
cugcggccgacacggucgg

SEQ ID NO: 1829817 - RNA, 17 nt, Human herpesvirus 2
gcagccuauguucgcgg

SEQ ID NO: 1829818 - RNA, 13 nt, Human herpesvirus 2
gcagccgcgccgc

SEQ ID NO: 1829819 - RNA, 20 nt, Human herpesvirus 2
gcacgcgcgacugccuccac

SEQ ID NO: 1829820 - RNA, 20 nt, Human herpesvirus 2
gcacguaaaacacgggcgcu

SEQ ID NO: 1829821 - RNA, 12 nt, Human herpesvirus 2
gacgcagcggcg

SEQ ID NO: 1829822 - RNA, 16 nt, Human herpesvirus 2
gcacgcggggacccgc

SEQ ID NO: 1829823 - RNA, 18 nt, Human herpesvirus 2
gacgccaacgcgaccguc

SEQ ID NO: 1829824 - RNA, 22 nt, Human herpesvirus 2
gacgaugcauguucggcgucgu

SEQ ID NO: 1829825 - RNA, 15 nt, Human herpesvirus 2
gaccugcagccggcg

SEQ ID NO: 1829826 - RNA, 18 nt, Human herpesvirus 2
gaccugccccggcgcguc

SEQ ID NO: 1829827 - RNA, 15 nt, Human herpesvirus 2
gaccgucgccgccgg

SEQ ID NO: 1829828 - RNA, 17 nt, Human herpesvirus 2
gaccgucgccgccggcc

SEQ ID NO: 1829829 - RNA, 17 nt, Human herpesvirus 2
cuucgcggcggccgcac

SEQ ID NO: 1829830 - RNA, 14 nt, Human herpesvirus 2
cuucccccgcccac

SEQ ID NO: 1829831 - RNA, 13 nt, Human herpesvirus 2
cuguggcggucgg

SEQ ID NO: 1829832 - RNA, 20 nt, Human herpesvirus 2
cggcacacaugauuccggcc

SEQ ID NO: 1829833 - RNA, 18 nt, Human herpesvirus 2
cggcaacaaagggccucc

SEQ ID NO: 1829834 - RNA, 14 nt, Human herpesvirus 2
cggcacugggguga

SEQ ID NO: 1829835 - RNA, 15 nt, Human herpesvirus 2
cgcucggcaugcgcg

SEQ ID NO: 1829836 - RNA, 18 nt, Human herpesvirus 2
cgccuccccgcuggagcc

SEQ ID NO: 1829837 - RNA, 15 nt, Human herpesvirus 2
cgccucccggccgcc

SEQ ID NO: 1829838 - RNA, 18 nt, Human herpesvirus 2
cgccucccggggggucgg

SEQ ID NO: 1829839 - RNA, 14 nt, Human herpesvirus 2
cggagaggcccgcc

SEQ ID NO: 1829840 - RNA, 16 nt, Human herpesvirus 2
cggagaggcccgccgc

SEQ ID NO: 1829841 - RNA, 16 nt, Human herpesvirus 2
cggacugcagccccgg

SEQ ID NO: 1829842 - RNA, 17 nt, Human herpesvirus 2
cggcaaccccaccuucg

SEQ ID NO: 1829843 - RNA, 17 nt, Human herpesvirus 2
cggcaaccccagggcgu

SEQ ID NO: 1829844 - RNA, 23 nt, Human herpesvirus 2
cggagucccccggcuccgaguug

SEQ ID NO: 1829845 - RNA, 19 nt, Human herpesvirus 2
cggagcgccgucgucgccc

SEQ ID NO: 1829846 - RNA, 19 nt, Human herpesvirus 2
cggagcucgacgcacagcg

SEQ ID NO: 1829847 - RNA, 14 nt, Human herpesvirus 2
cgaucugccccgac

SEQ ID NO: 1829848 - RNA, 17 nt, Human herpesvirus 2
cgaugacguggguccgg

SEQ ID NO: 1829849 - RNA, 17 nt, Human herpesvirus 2
cgauagccuccgaggug

SEQ ID NO: 1829850 - RNA, 19 nt, Human herpesvirus 2
cgccgggaaccccggcgug

SEQ ID NO: 1829851 - RNA, 16 nt, Human herpesvirus 2
cgccguggacgccccc

SEQ ID NO: 1829852 - RNA, 20 nt, Human herpesvirus 2
cgccgggcgcgcccaccggu

SEQ ID NO: 1829853 - RNA, 18 nt, Human herpesvirus 2
cgccgggcgcgcggcgcg

SEQ ID NO: 1829854 - RNA, 17 nt, Human herpesvirus 2
cgcccaagcggcccgag

SEQ ID NO: 1829855 - RNA, 23 nt, Human herpesvirus 2
cgccggccgguccucgggccuac

SEQ ID NO: 1829856 - RNA, 14 nt, Human herpesvirus 2
cgccaucgugcgcu

SEQ ID NO: 1829857 - RNA, 22 nt, Human herpesvirus 2
cgcccaacccaaccgacucccu

SEQ ID NO: 1829858 - RNA, 16 nt, Human herpesvirus 2
cgccccccgucccgag

SEQ ID NO: 1829859 - RNA, 16 nt, Human herpesvirus 2
cgcccccacccccgag

SEQ ID NO: 1829860 - RNA, 22 nt, Human herpesvirus 2
cgccggccaaccgcgcgccgcc

SEQ ID NO: 1829861 - RNA, 21 nt, Human herpesvirus 2
cgccaugcaacgccgggcgcg

SEQ ID NO: 1829862 - RNA, 14 nt, Human herpesvirus 2
cgacugucgugccg

SEQ ID NO: 1829863 - RNA, 17 nt, Human herpesvirus 2
cgacuuccucgugcgca

SEQ ID NO: 1829864 - RNA, 23 nt, Human herpesvirus 2
cgagacauggggaacccccagac

SEQ ID NO: 1829865 - RNA, 18 nt, Human herpesvirus 2
cgagaagcgggaccgucg

SEQ ID NO: 1829866 - RNA, 21 nt, Human herpesvirus 2
cgaccccgccccccgacgcca

SEQ ID NO: 1829867 - RNA, 15 nt, Human herpesvirus 2
cgagggcgagcucgg

SEQ ID NO: 1829868 - RNA, 13 nt, Human herpesvirus 2
cgacagcggggac

SEQ ID NO: 1829869 - RNA, 20 nt, Human herpesvirus 2
cgacagcggggacccgggcg

SEQ ID NO: 1829870 - RNA, 15 nt, Human herpesvirus 2
cgacaucaaccaccu

SEQ ID NO: 1829871 - RNA, 21 nt, Human herpesvirus 2
cgaccaaaacggaccccgcgu

SEQ ID NO: 1829872 - RNA, 15 nt, Human herpesvirus 2
cgacaacguccgggc

SEQ ID NO: 1829873 - RNA, 14 nt, Human herpesvirus 2
cgacacccgggccc

SEQ ID NO: 1829874 - RNA, 13 nt, Human herpesvirus 2
cgaaggucugcgc

SEQ ID NO: 1829875 - RNA, 15 nt, Human herpesvirus 2
cgaccgacgggcccc

SEQ ID NO: 1829876 - RNA, 18 nt, Human herpesvirus 2
cgaccgccccgcgccggc

SEQ ID NO: 1829877 - RNA, 14 nt, Human herpesvirus 2
cgaccaugggcccc

SEQ ID NO: 1829878 - RNA, 13 nt, Human herpesvirus 2
cgaccagcggccc

SEQ ID NO: 1829879 - RNA, 18 nt, Human herpesvirus 2
cgaccagcguccugcgcg

SEQ ID NO: 1829880 - RNA, 22 nt, Human herpesvirus 2
ccacucgucgccaacggccagc

SEQ ID NO: 1829881 - RNA, 12 nt, Human herpesvirus 2
ccagacgcccgc

SEQ ID NO: 1829882 - RNA, 18 nt, Human herpesvirus 2
ccugcagaugcugcccgc

SEQ ID NO: 1829883 - RNA, 14 nt, Human herpesvirus 2
ccuggcucgccgug

SEQ ID NO: 1829884 - RNA, 16 nt, Human herpesvirus 2
cauacgauauucgcgu

SEQ ID NO: 1829885 - RNA, 15 nt, Human herpesvirus 2
caugacaacgacgcc

SEQ ID NO: 1829886 - RNA, 16 nt, Human herpesvirus 2
caugaccucucgccgc

SEQ ID NO: 1829887 - RNA, 21 nt, Human herpesvirus 2
caugacgacacgucccgccac

SEQ ID NO: 1829888 - RNA, 15 nt, Human herpesvirus 2
caugcgacggcgucu

SEQ ID NO: 1829889 - RNA, 20 nt, Human herpesvirus 2
augaccucccggcccgccga

SEQ ID NO: 1829890 - RNA, 15 nt, Human herpesvirus 2
augcaacgccgggcg

SEQ ID NO: 1829891 - RNA, 21 nt, Human herpesvirus 2
cagcguccggcuggcggcgcg

SEQ ID NO: 1829892 - RNA, 12 nt, Human herpesvirus 2
agccgcgcgacc

SEQ ID NO: 1829893 - RNA, 14 nt, Human herpesvirus 2
agcccccggcaucg

SEQ ID NO: 1829894 - RNA, 18 nt, Human herpesvirus 2
agccgcccaagcggcccg

SEQ ID NO: 1829895 - RNA, 18 nt, Human herpesvirus 2
agcguccggcuggcggcg

SEQ ID NO: 1829896 - RNA, 17 nt, Human herpesvirus 2
agcguggggcgcgcacc

SEQ ID NO: 1829897 - RNA, 13 nt, Human herpesvirus 2
agcucccugcggc

SEQ ID NO: 1829898 - RNA, 14 nt, Human herpesvirus 2
aggggugggcgugu

SEQ ID NO: 1829899 - RNA, 21 nt, Human herpesvirus 2
agggcgucgcuaacgagcgcg

SEQ ID NO: 1829900 - RNA, 15 nt, Human herpesvirus 2
agcugcucgcgcacc

SEQ ID NO: 1829901 - RNA, 13 nt, Human herpesvirus 2
aggguggggcuga

SEQ ID NO: 1829902 - RNA, 12 nt, Human herpesvirus 2
aggugcggagcc

SEQ ID NO: 1829903 - RNA, 18 nt, Human herpesvirus 2
uuuugucguuccuuccuc

SEQ ID NO: 1829904 - RNA, 14 nt, Human herpesvirus 2
uccccuggggcggc

SEQ ID NO: 1829905 - RNA, 16 nt, Human herpesvirus 2
ucgaaucugggaagac

SEQ ID NO: 1829906 - RNA, 13 nt, Human herpesvirus 2
ucccgagccccgc

SEQ ID NO: 1829907 - RNA, 20 nt, Human herpesvirus 2
ucccgauggccgccccgcag

SEQ ID NO: 1829908 - RNA, 22 nt, Human herpesvirus 2
ucccgauguuguguucgccgac

SEQ ID NO: 1829909 - RNA, 19 nt, Human herpesvirus 2
ucccgcaagagccugccgu

SEQ ID NO: 1829910 - RNA, 15 nt, Human herpesvirus 2
ucccgcagaaccucg

SEQ ID NO: 1829911 - RNA, 20 nt, Human herpesvirus 2
ucccggccgccauccccgcg

SEQ ID NO: 1829912 - RNA, 23 nt, Human herpesvirus 2
ucccggccgccauccccgcgcau

SEQ ID NO: 1829913 - RNA, 13 nt, Human herpesvirus 2
ucccgcccgccag

SEQ ID NO: 1829914 - RNA, 19 nt, Human herpesvirus 2
ucccggucggggccgccag

SEQ ID NO: 1829915 - RNA, 18 nt, Human herpesvirus 2
ucccugcggcuggcgcgg

SEQ ID NO: 1829916 - RNA, 19 nt, Human herpesvirus 2
ucccugcggcuggcgcggu

SEQ ID NO: 1829917 - RNA, 20 nt, Human herpesvirus 2
ucggugccgcuuuaccccgc

SEQ ID NO: 1829918 - RNA, 18 nt, Human herpesvirus 2
ucggggggguacggcgag

SEQ ID NO: 1829919 - RNA, 22 nt, Human herpesvirus 2
ucgggggguggcggucgcgucc

SEQ ID NO: 1829920 - RNA, 14 nt, Human herpesvirus 2
ucgggcggacgucc

SEQ ID NO: 1829921 - RNA, 17 nt, Human herpesvirus 2
uuucggcacccguccuc

SEQ ID NO: 1829922 - RNA, 22 nt, Human herpesvirus 2
ucgugggggagugcgcucuucg

SEQ ID NO: 1829923 - RNA, 12 nt, Human herpesvirus 2
uuuccgccgccg

SEQ ID NO: 1829924 - RNA, 15 nt, Human herpesvirus 2
gcacacgccaucgac

SEQ ID NO: 1829925 - RNA, 13 nt, Human herpesvirus 2
gaugggcgggggg

SEQ ID NO: 1829926 - RNA, 18 nt, Human herpesvirus 2
gcaacuuuuaaugggccg

SEQ ID NO: 1829927 - RNA, 20 nt, Human herpesvirus 2
cgcgcaucucuggcuccagg

SEQ ID NO: 1829928 - RNA, 20 nt, Human herpesvirus 2
cgucgcuccggcucccggcc

SEQ ID NO: 1829929 - RNA, 23 nt, Human herpesvirus 2
cgcgccuacgagcccgcggucgu

SEQ ID NO: 1829930 - RNA, 22 nt, Human herpesvirus 2
cgugcacagagccgauccggcc

SEQ ID NO: 1829931 - RNA, 16 nt, Human herpesvirus 2
cgucucgucgccgcuc

SEQ ID NO: 1829932 - RNA, 18 nt, Human herpesvirus 2
cgugccaacucgcggcac

SEQ ID NO: 1829933 - RNA, 17 nt, Human herpesvirus 2
cgugccgcagaccaccu

SEQ ID NO: 1829934 - RNA, 21 nt, Human herpesvirus 2
cgugcgcucgcucuccgugcc

SEQ ID NO: 1829935 - RNA, 22 nt, Human herpesvirus 2
cuaccgcggcuucuucgccgcc

SEQ ID NO: 1829936 - RNA, 21 nt, Human herpesvirus 2
gaggccucauccggcccgcca

SEQ ID NO: 1829937 - RNA, 17 nt, Human herpesvirus 2
gcaaacgguaagcagcg

SEQ ID NO: 1829938 - RNA, 15 nt, Human herpesvirus 2
gcaacacccggcgcc

SEQ ID NO: 1829939 - RNA, 22 nt, Human herpesvirus 2
gcaaccccaccuucgccuccgc

SEQ ID NO: 1829940 - RNA, 16 nt, Human herpesvirus 2
gaggaggaggaggggg

SEQ ID NO: 1829941 - RNA, 12 nt, Human herpesvirus 2
cacgcgcuggcc

SEQ ID NO: 1829942 - RNA, 12 nt, Human herpesvirus 2
cacggccccgaa

SEQ ID NO: 1829943 - RNA, 13 nt, Human herpesvirus 2
cacggacccgccc

SEQ ID NO: 1829944 - RNA, 17 nt, Human herpesvirus 2
cacgccguggacgcccc

SEQ ID NO: 1829945 - RNA, 19 nt, Human herpesvirus 2
cagacuggccgugcugggc

SEQ ID NO: 1829946 - RNA, 22 nt, Human herpesvirus 2
cagagacccugccccccggcgc

SEQ ID NO: 1829947 - RNA, 17 nt, Human herpesvirus 2
cacggugcgugcggccc

SEQ ID NO: 1829948 - RNA, 17 nt, Human herpesvirus 2
acuggcagccgggacga

SEQ ID NO: 1829949 - RNA, 17 nt, Human herpesvirus 2
cacaguuccgggaaggc

SEQ ID NO: 1829950 - RNA, 21 nt, Human herpesvirus 2
uugucgccggcgacacccacc

SEQ ID NO: 1829951 - RNA, 18 nt, Human herpesvirus 2
uuggcaaacacaccgggc

SEQ ID NO: 1829952 - RNA, 16 nt, Human herpesvirus 2
uugggcggcccccggc

SEQ ID NO: 1829953 - RNA, 17 nt, Human herpesvirus 2
uugggucugcgucgucc

SEQ ID NO: 1829954 - RNA, 17 nt, Human herpesvirus 2
uuagccaccgcgcccac

SEQ ID NO: 1829955 - RNA, 15 nt, Human herpesvirus 2
uguuugugcgggugc

SEQ ID NO: 1829956 - RNA, 19 nt, Human herpesvirus 2
uuaagcggaacccgcgggc

SEQ ID NO: 1829957 - RNA, 21 nt, Human herpesvirus 2
uucccaacacgccugcccccg

SEQ ID NO: 1829958 - RNA, 13 nt, Human herpesvirus 2
uucaucacccccg

SEQ ID NO: 1829959 - RNA, 11 nt, Human herpesvirus 2
uucccccggga

SEQ ID NO: 1829960 - RNA, 17 nt, Human herpesvirus 2
uuccgcggacgccgggc

SEQ ID NO: 1829961 - RNA, 15 nt, Human herpesvirus 2
uuccgcguccgcugg

SEQ ID NO: 1829962 - RNA, 21 nt, Human herpesvirus 2
uucgcggcggccgcacccacg

SEQ ID NO: 1829963 - RNA, 20 nt, Human herpesvirus 2
uugagcggaacgccccgggc

SEQ ID NO: 1829964 - RNA, 14 nt, Human herpesvirus 2
uugcccccccgggg

SEQ ID NO: 1829965 - RNA, 22 nt, Human herpesvirus 2
uugcgcgacacgcgcccggggc

SEQ ID NO: 1829966 - RNA, 12 nt, Human herpesvirus 2
ugggagccccgc

SEQ ID NO: 1829967 - RNA, 11 nt, Human herpesvirus 2
uggcgucggag

SEQ ID NO: 1829968 - RNA, 16 nt, Human herpesvirus 2
uggcgucggcggcccc

SEQ ID NO: 1829969 - RNA, 22 nt, Human herpesvirus 2
uggcggccgccgcaacacccgg

SEQ ID NO: 1829970 - RNA, 14 nt, Human herpesvirus 2
uggcgaggggcggg

SEQ ID NO: 1829971 - RNA, 23 nt, Human herpesvirus 2
uggcgaccgucuuugggccccgc

SEQ ID NO: 1829972 - RNA, 15 nt, Human herpesvirus 2
uggccgugcgcggcc

SEQ ID NO: 1829973 - RNA, 14 nt, Human herpesvirus 2
uggccgcgaccguc

SEQ ID NO: 1829974 - RNA, 23 nt, Human herpesvirus 2
ugcggccgacacggucggaauuu

SEQ ID NO: 1829975 - RNA, 21 nt, Human herpesvirus 2
ugcgggaugugucgcggggac

SEQ ID NO: 1829976 - RNA, 19 nt, Human herpesvirus 2
ugcggggaccgcaccggac

SEQ ID NO: 1829977 - RNA, 20 nt, Human herpesvirus 2
ugggcggggggguucgggcg

SEQ ID NO: 1829978 - RNA, 22 nt, Human herpesvirus 2
ugggccugugggucugcgccac

SEQ ID NO: 1829979 - RNA, 23 nt, Human herpesvirus 2
ugggccugugggucugcgccacc

SEQ ID NO: 1829980 - RNA, 16 nt, Human herpesvirus 2
ugggcccgccgaccgc

SEQ ID NO: 1829981 - RNA, 11 nt, Human herpesvirus 2
ugggccgacgu

SEQ ID NO: 1829982 - RNA, 22 nt, Human herpesvirus 2
ugggcgugucguugggcggccc

SEQ ID NO: 1829983 - RNA, 14 nt, Human herpesvirus 2
ugggcucggcgucg

SEQ ID NO: 1829984 - RNA, 19 nt, Human herpesvirus 2
uggggacgacgggcgcccc

SEQ ID NO: 1829985 - RNA, 16 nt, Human herpesvirus 2
uggggagucgggcccc

SEQ ID NO: 1829986 - RNA, 23 nt, Human herpesvirus 2
uggugcaguuugagcagccgcgc

SEQ ID NO: 1829987 - RNA, 13 nt, Human herpesvirus 2
uggugcgccgccg

SEQ ID NO: 1829988 - RNA, 14 nt, Human herpesvirus 2
uggugguggggugu

SEQ ID NO: 1829989 - RNA, 16 nt, Human herpesvirus 2
uggucgugggggcgcu

SEQ ID NO: 1829990 - RNA, 16 nt, Human herpesvirus 2
ugggggaacgcgcacc

SEQ ID NO: 1829991 - RNA, 17 nt, Human herpesvirus 2
uguaaaacgcgggcggg

SEQ ID NO: 1829992 - RNA, 16 nt, Human herpesvirus 2
ugguccacccgggacg

SEQ ID NO: 1829993 - RNA, 21 nt, Human herpesvirus 2
uguacgacagcggggacccgg

SEQ ID NO: 1829994 - RNA, 13 nt, Human herpesvirus 2
ugccuccacgccc

SEQ ID NO: 1829995 - RNA, 14 nt, Human herpesvirus 2
ugcgcaugggccgc

SEQ ID NO: 1829996 - RNA, 20 nt, Human herpesvirus 2
ucugccccgcgucgggaucc

SEQ ID NO: 1829997 - RNA, 21 nt, Human herpesvirus 2
ucuucgcgggcaggccgcggc

SEQ ID NO: 1829998 - RNA, 14 nt, Human herpesvirus 2
ucuuguagggcguu

SEQ ID NO: 1829999 - RNA, 14 nt, Human herpesvirus 2
ugcaagcgggcggg

SEQ ID NO: 1830000 - RNA, 16 nt, Human herpesvirus 2
ucucugguuucgggcg

SEQ ID NO: 1830001 - RNA, 15 nt, Human herpesvirus 2
ucucccgggggcgcu

SEQ ID NO: 1830002 - RNA, 14 nt, Human herpesvirus 2
uaggccagagcguu

SEQ ID NO: 1830003 - RNA, 22 nt, Human herpesvirus 2
uagugucggagaggcccgccgc

SEQ ID NO: 1830004 - RNA, 23 nt, Human herpesvirus 2
uaguccgcgccuccugcucgacc

SEQ ID NO: 1830005 - RNA, 15 nt, Human herpesvirus 2
uaccugacgcggccc

SEQ ID NO: 1830006 - RNA, 12 nt, Human herpesvirus 2
uacgggggcggg

SEQ ID NO: 1830007 - RNA, 15 nt, Human herpesvirus 2
gugucucgcggcccg

SEQ ID NO: 1830008 - RNA, 22 nt, Human herpesvirus 2
guggugcaguuugagcagccgc

SEQ ID NO: 1830009 - RNA, 19 nt, Human herpesvirus 2
guggucguggugcuggcca

SEQ ID NO: 1830010 - RNA, 23 nt, Human herpesvirus 2
guggucguggugcuggccaaugc

SEQ ID NO: 1830011 - RNA, 15 nt, Human herpesvirus 2
guggggggguggugg

SEQ ID NO: 1830012 - RNA, 22 nt, Human herpesvirus 2
gugggucugcgccaccggccug

SEQ ID NO: 1830013 - RNA, 15 nt, Human herpesvirus 2
gugugcccgcccccg

SEQ ID NO: 1830014 - RNA, 15 nt, Human herpesvirus 2
guggacgcagcggcg

SEQ ID NO: 1830015 - RNA, 15 nt, Human herpesvirus 2
cgggcgacgccgcgg

SEQ ID NO: 1830016 - RNA, 17 nt, Human herpesvirus 2
cgggcgaaaaggcccgg

SEQ ID NO: 1830017 - RNA, 14 nt, Human herpesvirus 2
cgggcgggggcgcg

SEQ ID NO: 1830018 - RNA, 14 nt, Human herpesvirus 2
cgggcgggggucgg

SEQ ID NO: 1830019 - RNA, 17 nt, Human herpesvirus 2
cgggcgggggucgggcg

SEQ ID NO: 1830020 - RNA, 13 nt, Human herpesvirus 2
cggggacgcacgg

SEQ ID NO: 1830021 - RNA, 22 nt, Human herpesvirus 2
cgggcguuauaagccgccgcac

SEQ ID NO: 1830022 - RNA, 11 nt, Human herpesvirus 2
cgggguggugg

SEQ ID NO: 1830023 - RNA, 19 nt, Human herpesvirus 2
cggggugguggacgcgaga

SEQ ID NO: 1830024 - RNA, 22 nt, Human herpesvirus 2
cgguauggcugcccccgcgcac

SEQ ID NO: 1830025 - RNA, 18 nt, Human herpesvirus 2
cgggggcggugacgcccg

SEQ ID NO: 1830026 - RNA, 10 nt, Human herpesvirus 2
cgggggucgg

SEQ ID NO: 1830027 - RNA, 18 nt, Human herpesvirus 2
cggggccguggggcccca

SEQ ID NO: 1830028 - RNA, 19 nt, Human herpesvirus 2
cgggggacgggccgcccgg

SEQ ID NO: 1830029 - RNA, 22 nt, Human herpesvirus 2
cgggggaucugucgccggcgug

SEQ ID NO: 1830030 - RNA, 18 nt, Human herpesvirus 2
cggucggccagcacgacc

SEQ ID NO: 1830031 - RNA, 18 nt, Human herpesvirus 2
cguccggcuggcggcgcg

SEQ ID NO: 1830032 - RNA, 22 nt, Human herpesvirus 2
cguccggcuggcggcgcggcac

SEQ ID NO: 1830033 - RNA, 13 nt, Human herpesvirus 2
cgucccgccacac

SEQ ID NO: 1830034 - RNA, 15 nt, Human herpesvirus 2
cgucacgcaggccgc

SEQ ID NO: 1830035 - RNA, 14 nt, Human herpesvirus 2
cggugaucgaggug

SEQ ID NO: 1830036 - RNA, 22 nt, Human herpesvirus 2
cgucacgagccccugggccgcu

SEQ ID NO: 1830037 - RNA, 15 nt, Human herpesvirus 2
cgucgcccuagaggc

SEQ ID NO: 1830038 - RNA, 22 nt, Human herpesvirus 2
cguccucacggccaacgaggac

SEQ ID NO: 1830039 - RNA, 22 nt, Human herpesvirus 2
cguccugcggcagcgcgccgac

SEQ ID NO: 1830040 - RNA, 17 nt, Human herpesvirus 2
cgucgaccggggacucc

SEQ ID NO: 1830041 - RNA, 21 nt, Human herpesvirus 2
cgucgccgaauacgacgccca

SEQ ID NO: 1830042 - RNA, 22 nt, Human herpesvirus 2
gaagcccgaacggaaggccucc

SEQ ID NO: 1830043 - RNA, 15 nt, Human herpesvirus 2
gaacggucuccgcca

SEQ ID NO: 1830044 - RNA, 20 nt, Human herpesvirus 2
gaacggucuccgccaugcaa

SEQ ID NO: 1830045 - RNA, 24 nt, Human herpesvirus 2
gaacgugguguugggcgccggcca

SEQ ID NO: 1830046 - RNA, 21 nt, Human herpesvirus 2
gaccgccccccccggcggggc

SEQ ID NO: 1830047 - RNA, 16 nt, Human herpesvirus 2
gaccgccccgcgccgg

SEQ ID NO: 1830048 - RNA, 14 nt, Human herpesvirus 2
gaccgccggcccca

SEQ ID NO: 1830049 - RNA, 13 nt, Human herpesvirus 2
gacccugcccccc

SEQ ID NO: 1830050 - RNA, 19 nt, Human herpesvirus 2
gacccugccccccggcgcg

SEQ ID NO: 1830051 - RNA, 18 nt, Human herpesvirus 2
gacccuguggcgggcgcu

SEQ ID NO: 1830052 - RNA, 16 nt, Human herpesvirus 2
gaccccgaccccgagc

SEQ ID NO: 1830053 - RNA, 12 nt, Human herpesvirus 2
gaccccgcgugc

SEQ ID NO: 1830054 - RNA, 19 nt, Human herpesvirus 2
gacccaccgcaccaccaua

SEQ ID NO: 1830055 - RNA, 20 nt, Human herpesvirus 2
gaccacccuaaggaugcccg

SEQ ID NO: 1830056 - RNA, 16 nt, Human herpesvirus 2
gaccaccggccgaggc

SEQ ID NO: 1830057 - RNA, 21 nt, Human herpesvirus 2
gaccacgcgcacgucgggggg

SEQ ID NO: 1830058 - RNA, 22 nt, Human herpesvirus 2
gaccacgcgcacgucggggggc

SEQ ID NO: 1830059 - RNA, 21 nt, Human herpesvirus 2
cuucggggacuugacggucgc

SEQ ID NO: 1830060 - RNA, 13 nt, Human herpesvirus 2
cuggcggcgcggc

SEQ ID NO: 1830061 - RNA, 20 nt, Human herpesvirus 2
cuucgucguagaucgggucc

SEQ ID NO: 1830062 - RNA, 14 nt, Human herpesvirus 2
cuggcgauccuggg

SEQ ID NO: 1830063 - RNA, 15 nt, Human herpesvirus 2
cuugggggggcgucc

SEQ ID NO: 1830064 - RNA, 15 nt, Human herpesvirus 2
cugcagaugcugccc

SEQ ID NO: 1830065 - RNA, 20 nt, Human herpesvirus 2
cuggacccagacacggugcg

SEQ ID NO: 1830066 - RNA, 20 nt, Human herpesvirus 2
gccccacgucaccgggggcc

SEQ ID NO: 1830067 - RNA, 15 nt, Human herpesvirus 2
gccccagagcccccc

SEQ ID NO: 1830068 - RNA, 18 nt, Human herpesvirus 2
gccagugcaucccagacg

SEQ ID NO: 1830069 - RNA, 14 nt, Human herpesvirus 2
gacccagucgccca

SEQ ID NO: 1830070 - RNA, 21 nt, Human herpesvirus 2
gacgggaguuccgacgacgcg

SEQ ID NO: 1830071 - RNA, 23 nt, Human herpesvirus 2
gacgggugggccuagccgugggc

SEQ ID NO: 1830072 - RNA, 23 nt, Human herpesvirus 2
gacucacucguggaugccggggc

SEQ ID NO: 1830073 - RNA, 16 nt, Human herpesvirus 2
gccagggcuggcaccg

SEQ ID NO: 1830074 - RNA, 17 nt, Human herpesvirus 2
gugccccacccccgagc

SEQ ID NO: 1830075 - RNA, 19 nt, Human herpesvirus 2
gugccaacucgcggcaccg

SEQ ID NO: 1830076 - RNA, 12 nt, Human herpesvirus 2
gucucggccccc

SEQ ID NO: 1830077 - RNA, 16 nt, Human herpesvirus 2
gucguuggccagcgcg

SEQ ID NO: 1830078 - RNA, 19 nt, Human herpesvirus 2
gucugucgcgacgccgcgg

SEQ ID NO: 1830079 - RNA, 15 nt, Human herpesvirus 2
gucugcgccaccggc

SEQ ID NO: 1830080 - RNA, 21 nt, Human herpesvirus 2
gucuggugugacgcgaugggg

SEQ ID NO: 1830081 - RNA, 15 nt, Human herpesvirus 2
gucugugggugguga

SEQ ID NO: 1830082 - RNA, 23 nt, Human herpesvirus 2
gucuuccggggacacgcggcggg

SEQ ID NO: 1830083 - RNA, 19 nt, Human herpesvirus 2
gucuugauuuacgaggggg

SEQ ID NO: 1830084 - RNA, 21 nt, Human herpesvirus 2
gugacucgccauggcggccgc

SEQ ID NO: 1830085 - RNA, 19 nt, Human herpesvirus 2
gugacuuggugcgccgccg

SEQ ID NO: 1830086 - RNA, 21 nt, Human herpesvirus 2
ggacacgcaacaacggcgggc

SEQ ID NO: 1830087 - RNA, 16 nt, Human herpesvirus 2
ggacacgcggcggguc

SEQ ID NO: 1830088 - RNA, 12 nt, Human herpesvirus 2
ggaccggccccc

SEQ ID NO: 1830089 - RNA, 14 nt, Human herpesvirus 2
guaggcccgggggg

SEQ ID NO: 1830090 - RNA, 16 nt, Human herpesvirus 2
guaggguccgcggggg

SEQ ID NO: 1830091 - RNA, 20 nt, Human herpesvirus 2
guagacgggcucgccagcga

SEQ ID NO: 1830092 - RNA, 13 nt, Human herpesvirus 2
gucggugccagac

SEQ ID NO: 1830093 - RNA, 14 nt, Human herpesvirus 2
gucgggcguggggg

SEQ ID NO: 1830094 - RNA, 15 nt, Human herpesvirus 2
gucggagaggcccgc

SEQ ID NO: 1830095 - RNA, 20 nt, Human herpesvirus 2
gucggcggccccggcggccc

SEQ ID NO: 1830096 - RNA, 19 nt, Human herpesvirus 2
gucgcgcuuuuccgccgcc

SEQ ID NO: 1830097 - RNA, 21 nt, Human herpesvirus 2
gucgcgcuuuuccgccgccgg

SEQ ID NO: 1830098 - RNA, 20 nt, Human herpesvirus 2
gucgcggggacagccccggg

SEQ ID NO: 1830099 - RNA, 18 nt, Human herpesvirus 2
gucgcuaacgagcgcgcu

SEQ ID NO: 1830100 - RNA, 15 nt, Human herpesvirus 2
guauucccccgcggg

SEQ ID NO: 1830101 - RNA, 18 nt, Human herpesvirus 2
ggaacuguguuucccccc

SEQ ID NO: 1830102 - RNA, 15 nt, Human herpesvirus 2
gucaaaggccagcag

SEQ ID NO: 1830103 - RNA, 19 nt, Human herpesvirus 2
gucacgcaggccgccccca

SEQ ID NO: 1830104 - RNA, 14 nt, Human herpesvirus 2
gcgggggccggggc

SEQ ID NO: 1830105 - RNA, 20 nt, Human herpesvirus 2
gcggggggggggcugcgggc

SEQ ID NO: 1830106 - RNA, 20 nt, Human herpesvirus 2
gcgggugcccauggcgucgg

SEQ ID NO: 1830107 - RNA, 19 nt, Human herpesvirus 2
gcgguagcggacgcacggc

SEQ ID NO: 1830108 - RNA, 22 nt, Human herpesvirus 2
gcgugcguucuggcggcccugg

SEQ ID NO: 1830109 - RNA, 15 nt, Human herpesvirus 2
gcgggcgcggcacac

SEQ ID NO: 1830110 - RNA, 14 nt, Human herpesvirus 2
gcggggcaccggca

SEQ ID NO: 1830111 - RNA, 21 nt, Human herpesvirus 2
gcgggcgggaugaugcggggc

SEQ ID NO: 1830112 - RNA, 15 nt, Human herpesvirus 2
gcgggcgggggucgg

SEQ ID NO: 1830113 - RNA, 21 nt, Human herpesvirus 2
gcgggcguccccgagcggcgc

SEQ ID NO: 1830114 - RNA, 21 nt, Human herpesvirus 2
gcgugucguugggcggccccc

SEQ ID NO: 1830115 - RNA, 17 nt, Human herpesvirus 2
gcguucuggcggcccug

SEQ ID NO: 1830116 - RNA, 16 nt, Human herpesvirus 2
gcguugccgggggcca

SEQ ID NO: 1830117 - RNA, 14 nt, Human herpesvirus 2
gcguggccgcgacc

SEQ ID NO: 1830118 - RNA, 15 nt, Human herpesvirus 2
gcgugcugcugagcc

SEQ ID NO: 1830119 - RNA, 23 nt, Human herpesvirus 2
gcgugcugcugagcccugccccg

SEQ ID NO: 1830120 - RNA, 17 nt, Human herpesvirus 2
gccucugcccgaccggg

SEQ ID NO: 1830121 - RNA, 13 nt, Human herpesvirus 2
gccugcacgagcg

SEQ ID NO: 1830122 - RNA, 15 nt, Human herpesvirus 2
gccucgggcggcgug

SEQ ID NO: 1830123 - RNA, 24 nt, Human herpesvirus 2
gccucgggcggcguggccgcgacc

SEQ ID NO: 1830124 - RNA, 14 nt, Human herpesvirus 2
gcgggaggggcggg

SEQ ID NO: 1830125 - RNA, 21 nt, Human herpesvirus 2
gcgggaugugucgcggggaca

SEQ ID NO: 1830126 - RNA, 17 nt, Human herpesvirus 2
gccuggaucggcgucgg

SEQ ID NO: 1830127 - RNA, 18 nt, Human herpesvirus 2
gcggcuucuucgccgccc

SEQ ID NO: 1830128 - RNA, 15 nt, Human herpesvirus 2
gcggcuugcgcgacc

SEQ ID NO: 1830129 - RNA, 19 nt, Human herpesvirus 2
gccugccgucgcacgcgcg

SEQ ID NO: 1830130 - RNA, 14 nt, Human herpesvirus 2
gcgggaagcgccgc

SEQ ID NO: 1830131 - RNA, 15 nt, Human herpesvirus 2
gcgggcccggggccc

SEQ ID NO: 1830132 - RNA, 16 nt, Human herpesvirus 2
gcgggcaggccgcggc

SEQ ID NO: 1830133 - RNA, 18 nt, Human herpesvirus 2
gcgggcaggccgcggcgc

SEQ ID NO: 1830134 - RNA, 15 nt, Human herpesvirus 2
gcuacccgcauccgc

SEQ ID NO: 1830135 - RNA, 18 nt, Human herpesvirus 2
gcuacccgcauccgcacg

SEQ ID NO: 1830136 - RNA, 15 nt, Human herpesvirus 2
gcucgaccagcggcc

SEQ ID NO: 1830137 - RNA, 18 nt, Human herpesvirus 2
gcucgcggagggcggcca

SEQ ID NO: 1830138 - RNA, 14 nt, Human herpesvirus 2
gcugccgccgcggg

SEQ ID NO: 1830139 - RNA, 13 nt, Human herpesvirus 2
gcucgcggggccg

SEQ ID NO: 1830140 - RNA, 22 nt, Human herpesvirus 2
gcuugugcccucguaggcccgg

SEQ ID NO: 1830141 - RNA, 21 nt, Human herpesvirus 2
gccgacccgucuagcggccgg

SEQ ID NO: 1830142 - RNA, 16 nt, Human herpesvirus 2
gccgcgguggcgucgg

SEQ ID NO: 1830143 - RNA, 21 nt, Human herpesvirus 2
gccgcgguggcgucggcggcc

SEQ ID NO: 1830144 - RNA, 22 nt, Human herpesvirus 2
gccgcgguggcgucggcggccc

SEQ ID NO: 1830145 - RNA, 16 nt, Human herpesvirus 2
gccgacggcggcgcac

SEQ ID NO: 1830146 - RNA, 16 nt, Human herpesvirus 2
gccgacgugccgggga

SEQ ID NO: 1830147 - RNA, 13 nt, Human herpesvirus 2
gccgacuuccgug

SEQ ID NO: 1830148 - RNA, 22 nt, Human herpesvirus 2
gccgugggccuguggggccugc

SEQ ID NO: 1830149 - RNA, 19 nt, Human herpesvirus 2
gccggaaaccgagacggug

SEQ ID NO: 1830150 - RNA, 13 nt, Human herpesvirus 2
gccggaccgggau

SEQ ID NO: 1830151 - RNA, 17 nt, Human herpesvirus 2
gccgcugggggggcggg

SEQ ID NO: 1830152 - RNA, 19 nt, Human herpesvirus 2
gccgcuuuaccccgcggcc

SEQ ID NO: 1830153 - RNA, 20 nt, Human herpesvirus 2
gccgcugugccagguggccc

SEQ ID NO: 1830154 - RNA, 13 nt, Human herpesvirus 2
gccgcuguggccc

SEQ ID NO: 1830155 - RNA, 18 nt, Human herpesvirus 2
gccgcugcccgacgcgcc

SEQ ID NO: 1830156 - RNA, 20 nt, Human herpesvirus 2
auccgaucgaugagccggua

SEQ ID NO: 1830157 - RNA, 20 nt, Human herpesvirus 2
caacaugacaacgacgcccc

SEQ ID NO: 1830158 - RNA, 13 nt, Human herpesvirus 2
caacguccgggcg

SEQ ID NO: 1830159 - RNA, 17 nt, Human herpesvirus 2
caacccaucccacaaug

SEQ ID NO: 1830160 - RNA, 14 nt, Human herpesvirus 2
aggcccggcccgcg

SEQ ID NO: 1830161 - RNA, 19 nt, Human herpesvirus 2
aggccucauccggcccgcc

SEQ ID NO: 1830162 - RNA, 15 nt, Human herpesvirus 2
aggcgcccgccccug

SEQ ID NO: 1830163 - RNA, 23 nt, Human herpesvirus 2
aggccgggagcguggggcgcgca

SEQ ID NO: 1830164 - RNA, 20 nt, Human herpesvirus 2
aggcuguccgccgggcguga

SEQ ID NO: 1830165 - RNA, 17 nt, Human herpesvirus 2
agggcccggcgccgccc

SEQ ID NO: 1830166 - RNA, 20 nt, Human herpesvirus 2
acagagaaaggcccccagac

SEQ ID NO: 1830167 - RNA, 22 nt, Human herpesvirus 2
acagaggcgguagcggacgcac

SEQ ID NO: 1830168 - RNA, 23 nt, Human herpesvirus 2
acagcggggacccgggcgagcug

SEQ ID NO: 1830169 - RNA, 16 nt, Human herpesvirus 2
accgcugucgcccccg

SEQ ID NO: 1830170 - RNA, 20 nt, Human herpesvirus 2
accgcgccucgcgucgggcc

SEQ ID NO: 1830171 - RNA, 14 nt, Human herpesvirus 2
accgcgcgccgccg

SEQ ID NO: 1830172 - RNA, 20 nt, Human herpesvirus 2
accgcggcuucuucgccgcc

SEQ ID NO: 1830173 - RNA, 21 nt, Human herpesvirus 2
accgcagucuggucgaggugg

SEQ ID NO: 1830174 - RNA, 18 nt, Human herpesvirus 2
accgcaccggacgcgcac

SEQ ID NO: 1830175 - RNA, 23 nt, Human herpesvirus 2
accacgugcacagccuggccgug

SEQ ID NO: 1830176 - RNA, 11 nt, Human herpesvirus 2
accgagagcgc

SEQ ID NO: 1830177 - RNA, 12 nt, Human herpesvirus 2
cggaccuccggg

SEQ ID NO: 1830178 - RNA, 12 nt, Human herpesvirus 2
cggaccccgccc

SEQ ID NO: 1830179 - RNA, 16 nt, Human herpesvirus 2
cggacaucacccacgu

SEQ ID NO: 1830180 - RNA, 13 nt, Human herpesvirus 2
cggaaagccggcc

SEQ ID NO: 1830181 - RNA, 22 nt, Human herpesvirus 2
cgcgguucugacgcggggucga

SEQ ID NO: 1830182 - RNA, 17 nt, Human herpesvirus 2
cgcguacguggcgucgg

SEQ ID NO: 1830183 - RNA, 23 nt, Human herpesvirus 2
cgcgggcucguguuccggccgug

SEQ ID NO: 1830184 - RNA, 17 nt, Human herpesvirus 2
cgcgugcagcgcgggcg

SEQ ID NO: 1830185 - RNA, 15 nt, Human herpesvirus 2
cgccgcgugggcucc

SEQ ID NO: 1830186 - RNA, 13 nt, Human herpesvirus 2
cgcggcggccgca

SEQ ID NO: 1830187 - RNA, 18 nt, Human herpesvirus 2
cgccgcgggggaggcgcg

SEQ ID NO: 1830188 - RNA, 22 nt, Human herpesvirus 2
cgccgcgggggaggcgcgcgcg

SEQ ID NO: 1830189 - RNA, 13 nt, Human herpesvirus 2
cgcgggcggcgcc

SEQ ID NO: 1830190 - RNA, 23 nt, Human herpesvirus 2
cgcgggggaggcgcgcgcgcgcu

SEQ ID NO: 1830191 - RNA, 23 nt, Human herpesvirus 2
cgcggggacccgccagagacccu

SEQ ID NO: 1830192 - RNA, 12 nt, Human herpesvirus 2
cgccgccccgac

SEQ ID NO: 1830193 - RNA, 14 nt, Human herpesvirus 2
cgcagaccaccucg

SEQ ID NO: 1830194 - RNA, 22 nt, Human herpesvirus 2
cgcacguacguucugccccgcg

SEQ ID NO: 1830195 - RNA, 17 nt, Human herpesvirus 2
cgccgacggcggcgcac

SEQ ID NO: 1830196 - RNA, 16 nt, Human herpesvirus 2
cgacgcguacguggcg

SEQ ID NO: 1830197 - RNA, 18 nt, Human herpesvirus 2
cgacgcaaccuccggggc

SEQ ID NO: 1830198 - RNA, 15 nt, Human herpesvirus 2
cgacggcggggcccc

SEQ ID NO: 1830199 - RNA, 18 nt, Human herpesvirus 2
cgaccgucgccgccggcc

SEQ ID NO: 1830200 - RNA, 17 nt, Human herpesvirus 2
cgaccgucuuugggccc

SEQ ID NO: 1830201 - RNA, 18 nt, Human herpesvirus 2
cgaccgucuuugggcccc

SEQ ID NO: 1830202 - RNA, 14 nt, Human herpesvirus 2
cgacgaccaccgcg

SEQ ID NO: 1830203 - RNA, 17 nt, Human herpesvirus 2
cgacgaccaugggcccc

SEQ ID NO: 1830204 - RNA, 14 nt, Human herpesvirus 2
cgacgacgugcgcg

SEQ ID NO: 1830205 - RNA, 13 nt, Human herpesvirus 2
cgaccucgucgcg

SEQ ID NO: 1830206 - RNA, 18 nt, Human herpesvirus 2
ccuccgcccuccgccagc

SEQ ID NO: 1830207 - RNA, 19 nt, Human herpesvirus 2
ccucgagcucuucggcugc

SEQ ID NO: 1830208 - RNA, 13 nt, Human herpesvirus 2
ccucgacccgucc

SEQ ID NO: 1830209 - RNA, 23 nt, Human herpesvirus 2
ccucgugcgcaugggccgccagc

SEQ ID NO: 1830210 - RNA, 18 nt, Human herpesvirus 2
ccucugcccgaccgggcg

SEQ ID NO: 1830211 - RNA, 18 nt, Human herpesvirus 2
ccuuguuggagcggucgc

SEQ ID NO: 1830212 - RNA, 17 nt, Human herpesvirus 2
ccuuguuuucggucugg

SEQ ID NO: 1830213 - RNA, 17 nt, Human herpesvirus 2
cgaacgggggucccgcc

SEQ ID NO: 1830214 - RNA, 16 nt, Human herpesvirus 2
cgaccggcggggcccc

SEQ ID NO: 1830215 - RNA, 21 nt, Human herpesvirus 2
cgaccgccggccccaccgucu

SEQ ID NO: 1830216 - RNA, 17 nt, Human herpesvirus 2
ccaucgccggggaccgc

SEQ ID NO: 1830217 - RNA, 17 nt, Human herpesvirus 2
ccaugaccucucgccgc

SEQ ID NO: 1830218 - RNA, 17 nt, Human herpesvirus 2
ccaugcaacgccgggcg

SEQ ID NO: 1830219 - RNA, 18 nt, Human herpesvirus 2
ccaugggccccggucugu

SEQ ID NO: 1830220 - RNA, 13 nt, Human herpesvirus 2
cccacggaugccg

SEQ ID NO: 1830221 - RNA, 13 nt, Human herpesvirus 2
cccgucccggcag

SEQ ID NO: 1830222 - RNA, 13 nt, Human herpesvirus 2
cccgucugccagg

SEQ ID NO: 1830223 - RNA, 15 nt, Human herpesvirus 2
ccgaauacgacgccc

SEQ ID NO: 1830224 - RNA, 16 nt, Human herpesvirus 2
ccccggggccgucgcg

SEQ ID NO: 1830225 - RNA, 15 nt, Human herpesvirus 2
cccgacguggcccgc

SEQ ID NO: 1830226 - RNA, 13 nt, Human herpesvirus 2
cccgagcuccggg

SEQ ID NO: 1830227 - RNA, 17 nt, Human herpesvirus 2
ccccgucugucgccucu

SEQ ID NO: 1830228 - RNA, 15 nt, Human herpesvirus 2
ccccggcggccccgg

SEQ ID NO: 1830229 - RNA, 13 nt, Human herpesvirus 2
ccccggcuccgag

SEQ ID NO: 1830230 - RNA, 16 nt, Human herpesvirus 2
ucgccgucaaccccgc

SEQ ID NO: 1830231 - RNA, 11 nt, Human herpesvirus 2
uccggggcggu

SEQ ID NO: 1830232 - RNA, 13 nt, Human herpesvirus 2
uccggcuggcggc

SEQ ID NO: 1830233 - RNA, 23 nt, Human herpesvirus 2
uccgugugauguucuuggcgcgc

SEQ ID NO: 1830234 - RNA, 16 nt, Human herpesvirus 2
uccucacgggggggcu

SEQ ID NO: 1830235 - RNA, 17 nt, Human herpesvirus 2
gcgcgugcagaacaccg

SEQ ID NO: 1830236 - RNA, 18 nt, Human herpesvirus 2
ggcgcccgccccugcgca

SEQ ID NO: 1830237 - RNA, 12 nt, Human herpesvirus 2
ggcggcggcguc

SEQ ID NO: 1830238 - RNA, 16 nt, Human herpesvirus 2
ggcggcccuggagcgc

SEQ ID NO: 1830239 - RNA, 12 nt, Human herpesvirus 2
ggcgcgggcggc

SEQ ID NO: 1830240 - RNA, 23 nt, Human herpesvirus 2
ggcgcggugccugacgccggcca

SEQ ID NO: 1830241 - RNA, 15 nt, Human herpesvirus 2
ggcgcugagggcggc

SEQ ID NO: 1830242 - RNA, 22 nt, Human herpesvirus 2
uccggcggccaccccgccgcag

SEQ ID NO: 1830243 - RNA, 18 nt, Human herpesvirus 2
uccgcgggucccuuccca

SEQ ID NO: 1830244 - RNA, 21 nt, Human herpesvirus 2
uccgcggcuuuaucaccccgc

SEQ ID NO: 1830245 - RNA, 17 nt, Human herpesvirus 2
uccgcgggaagcgccgc

SEQ ID NO: 1830246 - RNA, 22 nt, Human herpesvirus 2
uccgcaauaaacgccuucccgg

SEQ ID NO: 1830247 - RNA, 16 nt, Human herpesvirus 2
gcgcgggcgacgggcg

SEQ ID NO: 1830248 - RNA, 23 nt, Human herpesvirus 2
gcgcgacugccuccacgcccugc

SEQ ID NO: 1830249 - RNA, 17 nt, Human herpesvirus 2
gcgccgcgacggccccg

SEQ ID NO: 1830250 - RNA, 23 nt, Human herpesvirus 2
gcgccgcgacggccccggccgcc

SEQ ID NO: 1830251 - RNA, 18 nt, Human herpesvirus 2
gcgccgccgcgcgggccc

SEQ ID NO: 1830252 - RNA, 12 nt, Human herpesvirus 2
gcgccgggcgcg

SEQ ID NO: 1830253 - RNA, 17 nt, Human herpesvirus 2
gcgccgcgcccgcgugc

SEQ ID NO: 1830254 - RNA, 14 nt, Human herpesvirus 2
gcgccucgggcggc

SEQ ID NO: 1830255 - RNA, 14 nt, Human herpesvirus 2
gcgccgucgggccc

SEQ ID NO: 1830256 - RNA, 18 nt, Human herpesvirus 2
gcgcccuuccgcguccgc

SEQ ID NO: 1830257 - RNA, 17 nt, Human herpesvirus 2
ccgcccaagcggcccga

SEQ ID NO: 1830258 - RNA, 15 nt, Human herpesvirus 2
ccgccuccggcccga

SEQ ID NO: 1830259 - RNA, 22 nt, Human herpesvirus 2
ccgcgaugaccucccggcccgc

SEQ ID NO: 1830260 - RNA, 14 nt, Human herpesvirus 2
ccgcgauuccgagg

SEQ ID NO: 1830261 - RNA, 18 nt, Human herpesvirus 2
cgcgaccgaucuggagcc

SEQ ID NO: 1830262 - RNA, 20 nt, Human herpesvirus 2
cgcgaccaccaaggcccgga

SEQ ID NO: 1830263 - RNA, 13 nt, Human herpesvirus 2
cgcgacacgcgcc

SEQ ID NO: 1830264 - RNA, 13 nt, Human herpesvirus 2
ccggggggcgugg

SEQ ID NO: 1830265 - RNA, 16 nt, Human herpesvirus 2
ccggggggggccucgg

SEQ ID NO: 1830266 - RNA, 12 nt, Human herpesvirus 2
ccggggcccgca

SEQ ID NO: 1830267 - RNA, 16 nt, Human herpesvirus 2
ccggggacacgcggcg

SEQ ID NO: 1830268 - RNA, 17 nt, Human herpesvirus 2
ccggggcacgcggucag

SEQ ID NO: 1830269 - RNA, 15 nt, Human herpesvirus 2
ccgggcccggccgcg

SEQ ID NO: 1830270 - RNA, 18 nt, Human herpesvirus 2
ccgggcgccggggcccca

SEQ ID NO: 1830271 - RNA, 20 nt, Human herpesvirus 2
ccgggauccuccgccagcuc

SEQ ID NO: 1830272 - RNA, 13 nt, Human herpesvirus 2
ccggcgcgggcgg

SEQ ID NO: 1830273 - RNA, 20 nt, Human herpesvirus 2
cucccaauucgucaccuggc

SEQ ID NO: 1830274 - RNA, 15 nt, Human herpesvirus 2
cucagcgcggccgug

SEQ ID NO: 1830275 - RNA, 17 nt, Human herpesvirus 2
cgcgacccaaggucccg

SEQ ID NO: 1830276 - RNA, 14 nt, Human herpesvirus 2
gagccgcgcggcca

SEQ ID NO: 1830277 - RNA, 16 nt, Human herpesvirus 2
cucccagugccccgac

SEQ ID NO: 1830278 - RNA, 14 nt, Human herpesvirus 2
cuccccgcuggagc

SEQ ID NO: 1830279 - RNA, 15 nt, Human herpesvirus 2
gagccccgcgaccac

SEQ ID NO: 1830280 - RNA, 14 nt, Human herpesvirus 2
cucacggccaacga

SEQ ID NO: 1830281 - RNA, 17 nt, Human herpesvirus 2
gaugcgacgccgccccu

SEQ ID NO: 1830282 - RNA, 24 nt, Human herpesvirus 2
gaugaccucccggcccgccgacca

SEQ ID NO: 1830283 - RNA, 17 nt, Human herpesvirus 2
gaucguugacgacggcc

SEQ ID NO: 1830284 - RNA, 24 nt, Human herpesvirus 2
gaugcagcucccccgcgcaggggg

SEQ ID NO: 1830285 - RNA, 15 nt, Human herpesvirus 2
gagcgggcccggggc

SEQ ID NO: 1830286 - RNA, 21 nt, Human herpesvirus 2
gagcgccgucgggccccgggu

SEQ ID NO: 1830287 - RNA, 22 nt, Human herpesvirus 2
gaucucggggagggcggcaccg

SEQ ID NO: 1830288 - RNA, 17 nt, Human herpesvirus 2
gaugaagcgccaggggg

SEQ ID NO: 1830289 - RNA, 15 nt, Human herpesvirus 2
uggcccuccacgccg

SEQ ID NO: 1830290 - RNA, 21 nt, Human herpesvirus 2
uggaggcgccucugcccgacc

SEQ ID NO: 1830291 - RNA, 15 nt, Human herpesvirus 2
uggacugggagccgc

SEQ ID NO: 1830292 - RNA, 13 nt, Human herpesvirus 2
uggacugggccgc

SEQ ID NO: 1830293 - RNA, 11 nt, Human herpesvirus 2
ccacgcccugc

SEQ ID NO: 1830294 - RNA, 14 nt, Human herpesvirus 2
ccaccucgcggcgg

SEQ ID NO: 1830295 - RNA, 13 nt, Human herpesvirus 2
ccaaggaacccaa

SEQ ID NO: 1830296 - RNA, 12 nt, Human herpesvirus 2
caucaggcucau

SEQ ID NO: 1830297 - RNA, 14 nt, Human herpesvirus 2
cauccuuuggcccg

SEQ ID NO: 1830298 - RNA, 16 nt, Human herpesvirus 2
cauccggucgacgucc

SEQ ID NO: 1830299 - RNA, 23 nt, Human herpesvirus 2
auuuacgcggugcgccccgccgg

SEQ ID NO: 1830300 - RNA, 13 nt, Human herpesvirus 2
cauacgcggcgug

SEQ ID NO: 1830301 - RNA, 19 nt, Human herpesvirus 2
auuuaaggagucgccgccc

SEQ ID NO: 1830302 - RNA, 22 nt, Human herpesvirus 2
auuucccaaacacugaggaacu

SEQ ID NO: 1830303 - RNA, 22 nt, Human herpesvirus 2
auuuccccagcacggaggaacu

SEQ ID NO: 1830304 - RNA, 16 nt, Human herpesvirus 2
auucgggggucgggcg

SEQ ID NO: 1830305 - RNA, 16 nt, Human herpesvirus 2
auguguucuccuggac

SEQ ID NO: 1830306 - RNA, 18 nt, Human herpesvirus 2
auguuguguucgccgacc

SEQ ID NO: 1830307 - RNA, 20 nt, Human herpesvirus 2
auuagcaacuuuuaaugggc

SEQ ID NO: 1830308 - RNA, 20 nt, Human herpesvirus 2
auuagcagcuuuuaacgggc

SEQ ID NO: 1830309 - RNA, 17 nt, Human herpesvirus 2
acccguccgaucccggu

SEQ ID NO: 1830310 - RNA, 18 nt, Human herpesvirus 2
acccggacugcagccccg

SEQ ID NO: 1830311 - RNA, 18 nt, Human herpesvirus 2
acccccgaacagccccug

SEQ ID NO: 1830312 - RNA, 20 nt, Human herpesvirus 2
acccgccuaccagccccucg

SEQ ID NO: 1830313 - RNA, 17 nt, Human herpesvirus 2
acccgacaacagccccu

SEQ ID NO: 1830314 - RNA, 18 nt, Human herpesvirus 2
acccgacaacagccccug

SEQ ID NO: 1830315 - RNA, 17 nt, Human herpesvirus 2
accccgauagucccccg

SEQ ID NO: 1830316 - RNA, 17 nt, Human herpesvirus 2
acaaaaaugggacgcac

SEQ ID NO: 1830317 - RNA, 17 nt, Human herpesvirus 2
agcguccggcuggcggc

SEQ ID NO: 1830318 - RNA, 21 nt, Human herpesvirus 2
agcgggggaggggggagaugg

SEQ ID NO: 1830319 - RNA, 17 nt, Human herpesvirus 2
agcugguaucggcgacc

SEQ ID NO: 1830320 - RNA, 14 nt, Human herpesvirus 2
agcggccccgaccc

SEQ ID NO: 1830321 - RNA, 17 nt, Human herpesvirus 2
agcggcccgaggcgacc

SEQ ID NO: 1830322 - RNA, 23 nt, Human herpesvirus 2
aggacaguucauaggccgggagc

SEQ ID NO: 1830323 - RNA, 20 nt, Human herpesvirus 2
aggaccgccugccccgcgga

SEQ ID NO: 1830324 - RNA, 15 nt, Human herpesvirus 2
auaaagguccggcgg

SEQ ID NO: 1830325 - RNA, 22 nt, Human herpesvirus 2
aggcaggggcagcucgcccccg

SEQ ID NO: 1830326 - RNA, 18 nt, Human herpesvirus 2
acgaccaucgcguacagc

SEQ ID NO: 1830327 - RNA, 17 nt, Human herpesvirus 2
acgacccgccucgggcc

SEQ ID NO: 1830328 - RNA, 20 nt, Human herpesvirus 2
agaggucaauagauuucccc

SEQ ID NO: 1830329 - RNA, 20 nt, Human herpesvirus 2
agaguucaauagauuuccca

SEQ ID NO: 1830330 - RNA, 24 nt, Human herpesvirus 2
agcgcccuuccgcguccgcgauga

SEQ ID NO: 1830331 - RNA, 23 nt, Human herpesvirus 2
agcgccccgcggaccccgcccgc

SEQ ID NO: 1830332 - RNA, 19 nt, Human herpesvirus 2
agcaacccuauaucccggg

SEQ ID NO: 1830333 - RNA, 18 nt, Human herpesvirus 2
agccaccgucccgcccgc

SEQ ID NO: 1830334 - RNA, 21 nt, Human herpesvirus 2
aacccaagugguuccguguga

SEQ ID NO: 1830335 - RNA, 20 nt, Human herpesvirus 2
gcggacaaacccgccggggc

SEQ ID NO: 1830336 - RNA, 15 nt, Human herpesvirus 2
gcggacagccagggc

SEQ ID NO: 1830337 - RNA, 17 nt, Human herpesvirus 2
gcggaacccgcgggcgc

SEQ ID NO: 1830338 - RNA, 15 nt, Human herpesvirus 2
gcgcuuggccgggga

SEQ ID NO: 1830339 - RNA, 21 nt, Human herpesvirus 2
gcgcuuuccggcccucccgca

SEQ ID NO: 1830340 - RNA, 19 nt, Human herpesvirus 2
gcggacuggcagccgggac

SEQ ID NO: 1830341 - RNA, 19 nt, Human herpesvirus 2
gcggagccucuuugggccg

SEQ ID NO: 1830342 - RNA, 16 nt, Human herpesvirus 2
gcggagggcggccagc

SEQ ID NO: 1830343 - RNA, 20 nt, Human herpesvirus 2
gcggaguaugaccgucggug

SEQ ID NO: 1830344 - RNA, 15 nt, Human herpesvirus 2
gcgucggcggccccg

SEQ ID NO: 1830345 - RNA, 16 nt, Human herpesvirus 2
gcgucgggggccgggg

SEQ ID NO: 1830346 - RNA, 21 nt, Human herpesvirus 2
gcgucuagcucgcggagggcg

SEQ ID NO: 1830347 - RNA, 23 nt, Human herpesvirus 2
gcgucguggcauggaagcccccg

SEQ ID NO: 1830348 - RNA, 16 nt, Human herpesvirus 2
gcgucucccgggggcg

SEQ ID NO: 1830349 - RNA, 18 nt, Human herpesvirus 2
gcgucgcucucggucccg

SEQ ID NO: 1830350 - RNA, 21 nt, Human herpesvirus 2
gcgugccaacucgcggcaccg

SEQ ID NO: 1830351 - RNA, 13 nt, Human herpesvirus 2
gcucguggcgggc

SEQ ID NO: 1830352 - RNA, 12 nt, Human herpesvirus 2
gcggaggcgugg

SEQ ID NO: 1830353 - RNA, 16 nt, Human herpesvirus 2
gcggcggcaugcgcgg

SEQ ID NO: 1830354 - RNA, 14 nt, Human herpesvirus 2
ggucggugcccccc

SEQ ID NO: 1830355 - RNA, 20 nt, Human herpesvirus 2
ggcacaccggcggggcgggc

SEQ ID NO: 1830356 - RNA, 20 nt, Human herpesvirus 2
ggucgaucucggggagggcg

SEQ ID NO: 1830357 - RNA, 23 nt, Human herpesvirus 2
ggucgggggccacuucgucguag

SEQ ID NO: 1830358 - RNA, 21 nt, Human herpesvirus 2
ggucgcgcuuuuccgccgccg

SEQ ID NO: 1830359 - RNA, 22 nt, Human herpesvirus 2
ggugacggaaaaccugggcggc

SEQ ID NO: 1830360 - RNA, 16 nt, Human herpesvirus 2
ggugcgugcggcccug

SEQ ID NO: 1830361 - RNA, 13 nt, Human herpesvirus 2
gguggugcaguuu

SEQ ID NO: 1830362 - RNA, 16 nt, Human herpesvirus 2
gguguggucgggcgga

SEQ ID NO: 1830363 - RNA, 19 nt, Human herpesvirus 2
gguuacugcacuugccccc

SEQ ID NO: 1830364 - RNA, 23 nt, Human herpesvirus 2
gucccgacgauuagccaccgcgc

SEQ ID NO: 1830365 - RNA, 17 nt, Human herpesvirus 2
guccgcgcggggcgcgc

SEQ ID NO: 1830366 - RNA, 10 nt, Human herpesvirus 2
guccccuuuc

SEQ ID NO: 1830367 - RNA, 12 nt, Human herpesvirus 2
gucccucgcgcg

SEQ ID NO: 1830368 - RNA, 19 nt, Human herpesvirus 2
gucccucgcgcgcauccac

SEQ ID NO: 1830369 - RNA, 13 nt, Human herpesvirus 2
guccgacgaggcc

SEQ ID NO: 1830370 - RNA, 20 nt, Human herpesvirus 2
guccgacgaggccuucccga

SEQ ID NO: 1830371 - RNA, 21 nt, Human herpesvirus 2
gucccgccugugugcucucaa

SEQ ID NO: 1830372 - RNA, 21 nt, Human herpesvirus 2
gucccccgaagcggccccgac

SEQ ID NO: 1830373 - RNA, 14 nt, Human herpesvirus 2
guccccgagcggcg

SEQ ID NO: 1830374 - RNA, 17 nt, Human herpesvirus 2
ggcaacaaagggccucc

SEQ ID NO: 1830375 - RNA, 17 nt, Human herpesvirus 2
ggcaacccccgggcguc

SEQ ID NO: 1830376 - RNA, 20 nt, Human herpesvirus 2
ggcaacccgacggcggggcc

SEQ ID NO: 1830377 - RNA, 13 nt, Human herpesvirus 2
ggagucgccgccc

SEQ ID NO: 1830378 - RNA, 16 nt, Human herpesvirus 2
ggauacgggggcgggg

SEQ ID NO: 1830379 - RNA, 17 nt, Human herpesvirus 2
ggauccaggggagggcg

SEQ ID NO: 1830380 - RNA, 19 nt, Human herpesvirus 2
ggaggggaugggggcgcgc

SEQ ID NO: 1830381 - RNA, 18 nt, Human herpesvirus 2
ggaggaaacgcgcgcccc

SEQ ID NO: 1830382 - RNA, 17 nt, Human herpesvirus 2
gcuucgucaacagggcg

SEQ ID NO: 1830383 - RNA, 15 nt, Human herpesvirus 2
gcuucuucgccgccc

SEQ ID NO: 1830384 - RNA, 21 nt, Human herpesvirus 2
gcuugccccucccccggccca

SEQ ID NO: 1830385 - RNA, 14 nt, Human herpesvirus 2
gcuggcgccgccgg

SEQ ID NO: 1830386 - RNA, 20 nt, Human herpesvirus 2
gcugagggcggcgacguucg

SEQ ID NO: 1830387 - RNA, 13 nt, Human herpesvirus 2
gcucgggcuggcc

SEQ ID NO: 1830388 - RNA, 22 nt, Human herpesvirus 2
gcugccccgcgugcagcgcggg

SEQ ID NO: 1830389 - RNA, 16 nt, Human herpesvirus 2
gcuguucugccgcgcg

SEQ ID NO: 1830390 - RNA, 18 nt, Human herpesvirus 2
gcuuagucccggguccgg

SEQ ID NO: 1830391 - RNA, 23 nt, Human herpesvirus 2
gcuucaccgagagcgccgucggg

SEQ ID NO: 1830392 - RNA, 18 nt, Human herpesvirus 2
gcuguggcccuggcggac

SEQ ID NO: 1830393 - RNA, 15 nt, Human herpesvirus 2
gcugguggccgcggu

SEQ ID NO: 1830394 - RNA, 15 nt, Human herpesvirus 2
gugccgucgccgcgc

SEQ ID NO: 1830395 - RNA, 23 nt, Human herpesvirus 2
gugccucacgguccucaccgagc

SEQ ID NO: 1830396 - RNA, 17 nt, Human herpesvirus 2
gugcgaccgggcggcgc

SEQ ID NO: 1830397 - RNA, 20 nt, Human herpesvirus 2
gugcgaccgggcggcgcgcc

SEQ ID NO: 1830398 - RNA, 17 nt, Human herpesvirus 2
gugcgcaugggccgcca

SEQ ID NO: 1830399 - RNA, 17 nt, Human herpesvirus 2
gugcgcucgcucuccgu

SEQ ID NO: 1830400 - RNA, 22 nt, Human herpesvirus 2
gugcgcucuucgcggcggccgc

SEQ ID NO: 1830401 - RNA, 20 nt, Human herpesvirus 2
guccgcgggaagcgccgcgc

SEQ ID NO: 1830402 - RNA, 19 nt, Human herpesvirus 2
guucuuggcgcgcgcggcg

SEQ ID NO: 1830403 - RNA, 23 nt, Human herpesvirus 2
guugaaccggcgagggcggccuc

SEQ ID NO: 1830404 - RNA, 16 nt, Human herpesvirus 2
guugacgacggccccg

SEQ ID NO: 1830405 - RNA, 13 nt, Human herpesvirus 2
guugcgccuccgu

SEQ ID NO: 1830406 - RNA, 18 nt, Human herpesvirus 2
guugcgcuuuccggcccu

SEQ ID NO: 1830407 - RNA, 14 nt, Human herpesvirus 2
guuggagcggucgc

SEQ ID NO: 1830408 - RNA, 15 nt, Human herpesvirus 2
guuguagggccgcgg

SEQ ID NO: 1830409 - RNA, 18 nt, Human herpesvirus 2
guuguaguuguccgcggg

SEQ ID NO: 1830410 - RNA, 20 nt, Human herpesvirus 2
guuucucuuucuuucccccc

SEQ ID NO: 1830411 - RNA, 16 nt, Human herpesvirus 2
guuucugaccggcgcc

SEQ ID NO: 1830412 - RNA, 23 nt, Human herpesvirus 2
ucaaacaggccaucgccggggac

SEQ ID NO: 1830413 - RNA, 14 nt, Human herpesvirus 2
uauuagcaucgggg

SEQ ID NO: 1830414 - RNA, 16 nt, Human herpesvirus 2
uaagcgcugcggggac

SEQ ID NO: 1830415 - RNA, 21 nt, Human herpesvirus 2
uaaagguccggcggccacccc

SEQ ID NO: 1830416 - RNA, 19 nt, Human herpesvirus 2
uacacggcaacccccgggc

SEQ ID NO: 1830417 - RNA, 12 nt, Human herpesvirus 2
ugccccgaccga

SEQ ID NO: 1830418 - RNA, 19 nt, Human herpesvirus 2
ugcucgaccagcggcccca

SEQ ID NO: 1830419 - RNA, 14 nt, Human herpesvirus 2
ugcuucccccgccc

SEQ ID NO: 1830420 - RNA, 16 nt, Human herpesvirus 2
uggaccccccacgccc

SEQ ID NO: 1830421 - RNA, 15 nt, Human herpesvirus 2
uggacgaucccgggc

SEQ ID NO: 1830422 - RNA, 23 nt, Human herpesvirus 2
uggacgcagcggcguccacgccc

SEQ ID NO: 1830423 - RNA, 18 nt, Human herpesvirus 2
ucaccgggggccccgggu

SEQ ID NO: 1830424 - RNA, 18 nt, Human herpesvirus 2
ugaagccguccgaccauc

SEQ ID NO: 1830425 - RNA, 18 nt, Human herpesvirus 2
ucacgagguuuggggcgg

SEQ ID NO: 1830426 - RNA, 20 nt, Human herpesvirus 2
ucacggcaaccccagggcgu

SEQ ID NO: 1830427 - RNA, 20 nt, Human herpesvirus 2
ucacggucgauuuaaccacu

SEQ ID NO: 1830428 - RNA, 14 nt, Human herpesvirus 2
ugagccgcgcggcc

SEQ ID NO: 1830429 - RNA, 13 nt, Human herpesvirus 2
ugacgacggcccc

SEQ ID NO: 1830430 - RNA, 14 nt, Human herpesvirus 2
ugaccggcgccgau

SEQ ID NO: 1830431 - RNA, 15 nt, Human herpesvirus 2
gcccgcccgccgccc

SEQ ID NO: 1830432 - RNA, 19 nt, Human herpesvirus 2
gcccccgcuggcgggagcc

SEQ ID NO: 1830433 - RNA, 12 nt, Human herpesvirus 2
gcccccggggcc

SEQ ID NO: 1830434 - RNA, 14 nt, Human herpesvirus 2
gccccccgggagcc

SEQ ID NO: 1830435 - RNA, 16 nt, Human herpesvirus 2
gccccccgggagccgc

SEQ ID NO: 1830436 - RNA, 15 nt, Human herpesvirus 2
gcccccgacgggcgc

SEQ ID NO: 1830437 - RNA, 20 nt, Human herpesvirus 2
gccagcucggacaccagcag

SEQ ID NO: 1830438 - RNA, 18 nt, Human herpesvirus 2
gccccagggggcggcgcc

SEQ ID NO: 1830439 - RNA, 13 nt, Human herpesvirus 2
gcccccagcaggu

SEQ ID NO: 1830440 - RNA, 18 nt, Human herpesvirus 2
gccccggucccccggacc

SEQ ID NO: 1830441 - RNA, 14 nt, Human herpesvirus 2
gccccggcggcccc

SEQ ID NO: 1830442 - RNA, 17 nt, Human herpesvirus 2
gccccgcgugcagcgcg

SEQ ID NO: 1830443 - RNA, 23 nt, Human herpesvirus 2
gccccgcgugcagcgcgggcgac

SEQ ID NO: 1830444 - RNA, 17 nt, Human herpesvirus 2
gcccgaccgggcggugc

SEQ ID NO: 1830445 - RNA, 17 nt, Human herpesvirus 2
gccccuguuggagccgg

SEQ ID NO: 1830446 - RNA, 17 nt, Human herpesvirus 2
gcccgaaccccgcggcc

SEQ ID NO: 1830447 - RNA, 21 nt, Human herpesvirus 2
gagacccugccccccggcgcg

SEQ ID NO: 1830448 - RNA, 15 nt, Human herpesvirus 2
gcagcucgcccccgu

SEQ ID NO: 1830449 - RNA, 15 nt, Human herpesvirus 2
gcagcuucaccgaga

SEQ ID NO: 1830450 - RNA, 17 nt, Human herpesvirus 2
gagaggcccgccgcgca

SEQ ID NO: 1830451 - RNA, 14 nt, Human herpesvirus 2
gagagggggaagga

SEQ ID NO: 1830452 - RNA, 15 nt, Human herpesvirus 2
gccacacaguccgug

SEQ ID NO: 1830453 - RNA, 16 nt, Human herpesvirus 2
gccaaccgcgcgccgc

SEQ ID NO: 1830454 - RNA, 16 nt, Human herpesvirus 2
gccaacgcgaccgucg

SEQ ID NO: 1830455 - RNA, 13 nt, Human herpesvirus 2
gcaggugaugggc

SEQ ID NO: 1830456 - RNA, 19 nt, Human herpesvirus 2
gcaggcguguugggaaggg

SEQ ID NO: 1830457 - RNA, 15 nt, Human herpesvirus 2
cgucaacagggcgcu

SEQ ID NO: 1830458 - RNA, 13 nt, Human herpesvirus 2
cguaccccgccgg

SEQ ID NO: 1830459 - RNA, 21 nt, Human herpesvirus 2
cgggauccuccgccagcucgg

SEQ ID NO: 1830460 - RNA, 19 nt, Human herpesvirus 2
cgguggggccggcggucgc

SEQ ID NO: 1830461 - RNA, 15 nt, Human herpesvirus 2
cgguuuugcggucgu

SEQ ID NO: 1830462 - RNA, 19 nt, Human herpesvirus 2
gaacccccagacgaccauc

SEQ ID NO: 1830463 - RNA, 23 nt, Human herpesvirus 2
gaaccgcuggcuggagaccgagc

SEQ ID NO: 1830464 - RNA, 16 nt, Human herpesvirus 2
gaacgccucaccgcgc

SEQ ID NO: 1830465 - RNA, 14 nt, Human herpesvirus 2
gaaaugggggcggg

SEQ ID NO: 1830466 - RNA, 16 nt, Human herpesvirus 2
gaaaaggcccggcccg

SEQ ID NO: 1830467 - RNA, 22 nt, Human herpesvirus 2
gaaagcuggcgucgggggcggg

SEQ ID NO: 1830468 - RNA, 14 nt, Human herpesvirus 2
gacgcccggcccau

SEQ ID NO: 1830469 - RNA, 13 nt, Human herpesvirus 2
gacgcggccagaa

SEQ ID NO: 1830470 - RNA, 18 nt, Human herpesvirus 2
gacgcggggucgagcgcg

SEQ ID NO: 1830471 - RNA, 14 nt, Human herpesvirus 2
gacgcgaggcgcgg

SEQ ID NO: 1830472 - RNA, 21 nt, Human herpesvirus 2
gacucggugcguuccagcgcg

SEQ ID NO: 1830473 - RNA, 16 nt, Human herpesvirus 2
gacgcggcgauggccg

SEQ ID NO: 1830474 - RNA, 16 nt, Human herpesvirus 2
gacggcaccgccgggc

SEQ ID NO: 1830475 - RNA, 16 nt, Human herpesvirus 2
gacacgcgcccggggc

SEQ ID NO: 1830476 - RNA, 14 nt, Human herpesvirus 2
gacagacgcggcga

SEQ ID NO: 1830477 - RNA, 21 nt, Human herpesvirus 2
gacaccagcagcuugcggggc

SEQ ID NO: 1830478 - RNA, 21 nt, Human herpesvirus 2
gccccgauauucaagcccgcg

SEQ ID NO: 1830479 - RNA, 15 nt, Human herpesvirus 2
gcccgccaacccccg

SEQ ID NO: 1830480 - RNA, 14 nt, Human herpesvirus 2
gcccgccagggccg

SEQ ID NO: 1830481 - RNA, 22 nt, Human herpesvirus 2
gcccgccaugcgcggggggggc

SEQ ID NO: 1830482 - RNA, 19 nt, Human herpesvirus 2
gcccgccccagggggcggc

SEQ ID NO: 1830483 - RNA, 17 nt, Human herpesvirus 2
gcccgcccccgacgggc

SEQ ID NO: 1830484 - RNA, 18 nt, Human herpesvirus 2
gcccgcccccgacgggcg

SEQ ID NO: 1830485 - RNA, 22 nt, Human herpesvirus 2
cggcccgauccgaacggcgcac

SEQ ID NO: 1830486 - RNA, 21 nt, Human herpesvirus 2
cggcccgauucuuacggcgcg

SEQ ID NO: 1830487 - RNA, 17 nt, Human herpesvirus 2
cggcaugcagcccagag

SEQ ID NO: 1830488 - RNA, 20 nt, Human herpesvirus 2
cggcgcacgcggugcgucgg

SEQ ID NO: 1830489 - RNA, 18 nt, Human herpesvirus 2
cggcgccaagcgccccgc

SEQ ID NO: 1830490 - RNA, 15 nt, Human herpesvirus 2
cggcgaccgccccgc

SEQ ID NO: 1830491 - RNA, 16 nt, Human herpesvirus 2
cggccgcggacgaccu

SEQ ID NO: 1830492 - RNA, 16 nt, Human herpesvirus 2
cggccuuucccguggc

SEQ ID NO: 1830493 - RNA, 21 nt, Human herpesvirus 2
cggcgaacacugccucggagg

SEQ ID NO: 1830494 - RNA, 16 nt, Human herpesvirus 2
cggccgccauccccgc

SEQ ID NO: 1830495 - RNA, 12 nt, Human herpesvirus 2
cggccgccgcaa

SEQ ID NO: 1830496 - RNA, 15 nt, Human herpesvirus 2
cggccaccccgccgc

SEQ ID NO: 1830497 - RNA, 12 nt, Human herpesvirus 2
cggcccuggagc

SEQ ID NO: 1830498 - RNA, 18 nt, Human herpesvirus 2
cggccggcggagccccgg

SEQ ID NO: 1830499 - RNA, 20 nt, Human herpesvirus 2
cggcgcgggcggcgccgcgc

SEQ ID NO: 1830500 - RNA, 14 nt, Human herpesvirus 2
cggcgccgccccgc

SEQ ID NO: 1830501 - RNA, 17 nt, Human herpesvirus 2
cggcgccgccccgccgc

SEQ ID NO: 1830502 - RNA, 19 nt, Human herpesvirus 2
cggcguggagcgccgggcc

SEQ ID NO: 1830503 - RNA, 16 nt, Human herpesvirus 2
cggcgucuagcucgcg

SEQ ID NO: 1830504 - RNA, 15 nt, Human herpesvirus 2
cggcggccaccccgc

SEQ ID NO: 1830505 - RNA, 13 nt, Human herpesvirus 2
cggcggcuccccc

SEQ ID NO: 1830506 - RNA, 21 nt, Human herpesvirus 2
cgggagcaggacagccgaccc

SEQ ID NO: 1830507 - RNA, 12 nt, Human herpesvirus 2
cgggacgcccgg

SEQ ID NO: 1830508 - RNA, 14 nt, Human herpesvirus 2
cgggacgcccggcc

SEQ ID NO: 1830509 - RNA, 22 nt, Human herpesvirus 2
cgggccguucggcaggcccgcc

SEQ ID NO: 1830510 - RNA, 18 nt, Human herpesvirus 2
cgggccagauggggcccc

SEQ ID NO: 1830511 - RNA, 16 nt, Human herpesvirus 2
cgggaguuccgacgac

SEQ ID NO: 1830512 - RNA, 12 nt, Human herpesvirus 2
ucgcuccccgcg

SEQ ID NO: 1830513 - RNA, 14 nt, Human herpesvirus 2
gguccccgucggaa

SEQ ID NO: 1830514 - RNA, 18 nt, Human herpesvirus 2
gguacugcacugcccccc

SEQ ID NO: 1830515 - RNA, 21 nt, Human herpesvirus 2
ggucacaaaaggcacggcgcc

SEQ ID NO: 1830516 - RNA, 15 nt, Human herpesvirus 2
ggucaccggggcgcc

SEQ ID NO: 1830517 - RNA, 21 nt, Human herpesvirus 2
gguaacuucuacgugcccccc

SEQ ID NO: 1830518 - RNA, 15 nt, Human herpesvirus 2
ggguccgacgaggcc

SEQ ID NO: 1830519 - RNA, 12 nt, Human herpesvirus 2
gggucgagcgcg

SEQ ID NO: 1830520 - RNA, 12 nt, Human herpesvirus 2
gggucgcacgcc

SEQ ID NO: 1830521 - RNA, 12 nt, Human herpesvirus 2
gggucggcaugc

SEQ ID NO: 1830522 - RNA, 20 nt, Human herpesvirus 2
gggcgaaaaggcccggcccg

SEQ ID NO: 1830523 - RNA, 13 nt, Human herpesvirus 2
gggucgggcgggc

SEQ ID NO: 1830524 - RNA, 14 nt, Human herpesvirus 2
gggucgggcgggcg

SEQ ID NO: 1830525 - RNA, 17 nt, Human herpesvirus 2
ggguguguggggagggg

SEQ ID NO: 1830526 - RNA, 13 nt, Human herpesvirus 2
ggguucggggcca

SEQ ID NO: 1830527 - RNA, 16 nt, Human herpesvirus 2
ggguuuuggcggcccg

SEQ ID NO: 1830528 - RNA, 20 nt, Human herpesvirus 2
ggguuuuuuaaccggcccca

SEQ ID NO: 1830529 - RNA, 15 nt, Human herpesvirus 2
ucggacaccagcagc

SEQ ID NO: 1830530 - RNA, 14 nt, Human herpesvirus 2
ucggacggugaucg

SEQ ID NO: 1830531 - RNA, 22 nt, Human herpesvirus 2
ucgcugcucucccguaccccgc

SEQ ID NO: 1830532 - RNA, 16 nt, Human herpesvirus 2
ucggaaagccggcccc

SEQ ID NO: 1830533 - RNA, 20 nt, Human herpesvirus 2
ucgcggggacagccccgggg

SEQ ID NO: 1830534 - RNA, 19 nt, Human herpesvirus 2
ucggccggcggagccccgg

SEQ ID NO: 1830535 - RNA, 13 nt, Human herpesvirus 2
ucggcaggcccgc

SEQ ID NO: 1830536 - RNA, 13 nt, Human herpesvirus 2
ucggcccccgggg

SEQ ID NO: 1830537 - RNA, 14 nt, Human herpesvirus 2
ucggagaggcccgc

SEQ ID NO: 1830538 - RNA, 21 nt, Human herpesvirus 2
ucgggaggggaugggggcgcg

SEQ ID NO: 1830539 - RNA, 20 nt, Human herpesvirus 2
ucgggauccauaacgcgccc

SEQ ID NO: 1830540 - RNA, 20 nt, Human herpesvirus 2
ucggcgauguccggggcggu

SEQ ID NO: 1830541 - RNA, 19 nt, Human herpesvirus 2
ucggcggaaaugcgcgagc

SEQ ID NO: 1830542 - RNA, 15 nt, Human herpesvirus 2
ggcagcucgcccccg

SEQ ID NO: 1830543 - RNA, 16 nt, Human herpesvirus 2
ggcaggcgcgcggguc

SEQ ID NO: 1830544 - RNA, 15 nt, Human herpesvirus 2
ggcaggagggcgggc

SEQ ID NO: 1830545 - RNA, 16 nt, Human herpesvirus 2
ggcaugcgacggcguc

SEQ ID NO: 1830546 - RNA, 14 nt, Human herpesvirus 2
ggcagcgcgccgac

SEQ ID NO: 1830547 - RNA, 21 nt, Human herpesvirus 2
ggccaaccucauccgcggcgc

SEQ ID NO: 1830548 - RNA, 11 nt, Human herpesvirus 2
gcgcgcgcccc

SEQ ID NO: 1830549 - RNA, 18 nt, Human herpesvirus 2
gcgcaggggggccgggga

SEQ ID NO: 1830550 - RNA, 13 nt, Human herpesvirus 2
ggccgugggcguc

SEQ ID NO: 1830551 - RNA, 13 nt, Human herpesvirus 2
ggccgugcccccc

SEQ ID NO: 1830552 - RNA, 16 nt, Human herpesvirus 2
ggccucauccggcccg

SEQ ID NO: 1830553 - RNA, 15 nt, Human herpesvirus 2
ggccgcgguggcguc

SEQ ID NO: 1830554 - RNA, 22 nt, Human herpesvirus 2
ggccaauucuucccggagcgcc

SEQ ID NO: 1830555 - RNA, 24 nt, Human herpesvirus 2
ggccgggagcguggggcgcgcacc

SEQ ID NO: 1830556 - RNA, 12 nt, Human herpesvirus 2
ggccggggcggc

SEQ ID NO: 1830557 - RNA, 19 nt, Human herpesvirus 2
ggccgcugggggggcgggc

SEQ ID NO: 1830558 - RNA, 16 nt, Human herpesvirus 2
ggccggcggagccccg

SEQ ID NO: 1830559 - RNA, 11 nt, Human herpesvirus 2
ggccuucccga

SEQ ID NO: 1830560 - RNA, 22 nt, Human herpesvirus 2
ggccuggcguuugggggcggac

SEQ ID NO: 1830561 - RNA, 14 nt, Human herpesvirus 2
ggcgaccccgcccc

SEQ ID NO: 1830562 - RNA, 17 nt, Human herpesvirus 2
ggcgacgccgcggccga

SEQ ID NO: 1830563 - RNA, 12 nt, Human herpesvirus 2
ggcgagggcggc

SEQ ID NO: 1830564 - RNA, 14 nt, Human herpesvirus 2
ggcgaggggcggga

SEQ ID NO: 1830565 - RNA, 21 nt, Human herpesvirus 2
ggcgaugguggcgaugggcag

SEQ ID NO: 1830566 - RNA, 23 nt, Human herpesvirus 2
ggcuucuucgccgcccucgccca

SEQ ID NO: 1830567 - RNA, 21 nt, Human herpesvirus 2
gggaaggaaaugggggcgggg

SEQ ID NO: 1830568 - RNA, 22 nt, Human herpesvirus 2
gggaauaugcaagcgggcgggg

SEQ ID NO: 1830569 - RNA, 18 nt, Human herpesvirus 2
gggaaucucgggucgccc

SEQ ID NO: 1830570 - RNA, 13 nt, Human herpesvirus 2
gggacggccgggc

SEQ ID NO: 1830571 - RNA, 18 nt, Human herpesvirus 2
gggacucauuugucgccg

SEQ ID NO: 1830572 - RNA, 16 nt, Human herpesvirus 2
gggacugggggcgggg

SEQ ID NO: 1830573 - RNA, 22 nt, Human herpesvirus 2
gggagccacucccgcggccccc

SEQ ID NO: 1830574 - RNA, 16 nt, Human herpesvirus 2
gggagccgcggccccg

SEQ ID NO: 1830575 - RNA, 13 nt, Human herpesvirus 2
gggaggggcggga

SEQ ID NO: 1830576 - RNA, 18 nt, Human herpesvirus 2
gggagguucccccguggc

SEQ ID NO: 1830577 - RNA, 23 nt, Human herpesvirus 2
gggagucgggccccuacucgcca

SEQ ID NO: 1830578 - RNA, 15 nt, Human herpesvirus 2
gggacccgggcgagc

SEQ ID NO: 1830579 - RNA, 20 nt, Human herpesvirus 2
gggcaccaaaaaccaggucu

SEQ ID NO: 1830580 - RNA, 17 nt, Human herpesvirus 2
gggccgcugggggggcg

SEQ ID NO: 1830581 - RNA, 21 nt, Human herpesvirus 2
gggcccuuggguuccgcggac

SEQ ID NO: 1830582 - RNA, 12 nt, Human herpesvirus 2
gggcccaggucc

SEQ ID NO: 1830583 - RNA, 13 nt, Human herpesvirus 2
gggccccagggcu

SEQ ID NO: 1830584 - RNA, 21 nt, Human herpesvirus 2
ggggucccgccucccggccgc

SEQ ID NO: 1830585 - RNA, 14 nt, Human herpesvirus 2
ggggugggucgccg

SEQ ID NO: 1830586 - RNA, 21 nt, Human herpesvirus 2
ggguaauggaugggcggggcc

SEQ ID NO: 1830587 - RNA, 22 nt, Human herpesvirus 2
ggguaauggaugggcggggccc

SEQ ID NO: 1830588 - RNA, 17 nt, Human herpesvirus 2
gggccguucggcaggcc

SEQ ID NO: 1830589 - RNA, 15 nt, Human herpesvirus 2
ccggagacguccuug

SEQ ID NO: 1830590 - RNA, 19 nt, Human herpesvirus 2
ccgcuuuauaggacgcgcu

SEQ ID NO: 1830591 - RNA, 16 nt, Human herpesvirus 2
gagucccccggcuccg

SEQ ID NO: 1830592 - RNA, 17 nt, Human herpesvirus 2
gcacccacgacauccgc

SEQ ID NO: 1830593 - RNA, 17 nt, Human herpesvirus 2
gcacccgggccggguga

SEQ ID NO: 1830594 - RNA, 16 nt, Human herpesvirus 2
gagggcccggcgccgc

SEQ ID NO: 1830595 - RNA, 18 nt, Human herpesvirus 2
gagggcccggcgccgccc

SEQ ID NO: 1830596 - RNA, 17 nt, Human herpesvirus 2
gaggcuguccgccgggc

SEQ ID NO: 1830597 - RNA, 16 nt, Human herpesvirus 2
gagaugugccuuccag

SEQ ID NO: 1830598 - RNA, 19 nt, Human herpesvirus 2
gcaccugcagaugcugccc

SEQ ID NO: 1830599 - RNA, 13 nt, Human herpesvirus 2
gcaccgcuguccc

SEQ ID NO: 1830600 - RNA, 20 nt, Human herpesvirus 2
gcaccgcgcggaccggcccc

SEQ ID NO: 1830601 - RNA, 13 nt, Human herpesvirus 2
gcaccggggcggc

SEQ ID NO: 1830602 - RNA, 19 nt, Human herpesvirus 2
cguggcccuccacgccgug

SEQ ID NO: 1830603 - RNA, 20 nt, Human herpesvirus 2
cgugucggagcucgacgcac

SEQ ID NO: 1830604 - RNA, 19 nt, Human herpesvirus 2
cguggaugccggggccgug

SEQ ID NO: 1830605 - RNA, 14 nt, Human herpesvirus 2
cucgcggcggcucc

SEQ ID NO: 1830606 - RNA, 20 nt, Human herpesvirus 2
gagaguuucuucgcgggcag

SEQ ID NO: 1830607 - RNA, 20 nt, Human herpesvirus 2
cucgcugcgccgggcgcgcc

SEQ ID NO: 1830608 - RNA, 22 nt, Human herpesvirus 2
ccggccaaccucauccgcggcg

SEQ ID NO: 1830609 - RNA, 15 nt, Human herpesvirus 2
cgcggacgccgggcg

SEQ ID NO: 1830610 - RNA, 12 nt, Human herpesvirus 2
cgcggaccaccg

SEQ ID NO: 1830611 - RNA, 17 nt, Human herpesvirus 2
cgcggccgugggcgucc

SEQ ID NO: 1830612 - RNA, 19 nt, Human herpesvirus 2
cgcggcgccaacgcgggcg

SEQ ID NO: 1830613 - RNA, 22 nt, Human herpesvirus 2
cgcggcgccaacgcgggcgucc

SEQ ID NO: 1830614 - RNA, 22 nt, Human herpesvirus 2
ccggccuggucguccgcggccc

SEQ ID NO: 1830615 - RNA, 15 nt, Human herpesvirus 2
ccggcccggcccgcu

SEQ ID NO: 1830616 - RNA, 14 nt, Human herpesvirus 2
ccggcgccaugagc

SEQ ID NO: 1830617 - RNA, 14 nt, Human
aaaaacacaaaagu

SEQ ID NO: 1830618 - RNA, 12 nt, Human
aaaaagaggcua

SEQ ID NO: 1830619 - RNA, 13 nt, Human
aaaaacugauuuu

SEQ ID NO: 1830620 - RNA, 14 nt, Human
aaaaacauggccuu

SEQ ID NO: 1830621 - RNA, 15 nt, Human
aaaaacugauuuuuu

SEQ ID NO: 1830622 - RNA, 12 nt, Human
aaaacacauuuu

SEQ ID NO: 1830623 - RNA, 18 nt, Human
aauuaguggcacuugcuu

SEQ ID NO: 1830624 - RNA, 18 nt, Human
aauuaaaacacaacaucu

SEQ ID NO: 1830625 - RNA, 18 nt, Human
aauguuugccucugccuc

SEQ ID NO: 1830626 - RNA, 19 nt, Human
aauguuugccucugccucu

SEQ ID NO: 1830627 - RNA, 13 nt, Human
aaugggcagagca

SEQ ID NO: 1830628 - RNA, 15 nt, Human
aaugggcagagcaga

SEQ ID NO: 1830629 - RNA, 13 nt, Human
aaugucaguguga

SEQ ID NO: 1830630 - RNA, 16 nt, Human
aaugucagugugacug

SEQ ID NO: 1830631 - RNA, 15 nt, Human
aaugucagugugacu

SEQ ID NO: 1830632 - RNA, 22 nt, Human
aauggucuuucuaaugugugaa

SEQ ID NO: 1830633 - RNA, 21 nt, Human
aaugucagugugacugaucuc

SEQ ID NO: 1830634 - RNA, 17 nt, Human
aaugucagugugacuga

SEQ ID NO: 1830635 - RNA, 22 nt, Human
aaugucuaguuguaacaccaug

SEQ ID NO: 1830636 - RNA, 20 nt, Human
aaugucucuuuaaugucaca

SEQ ID NO: 1830637 - RNA, 20 nt, Human
aauauaggaacuuaaauaau

SEQ ID NO: 1830638 - RNA, 21 nt, Human
aauauaggaacuuaaauaaug

SEQ ID NO: 1830639 - RNA, 18 nt, Human
aauauaggaacuuaaaua

SEQ ID NO: 1830640 - RNA, 19 nt, Human
aaugaugccaugaggaaca

SEQ ID NO: 1830641 - RNA, 13 nt, Human
aaucuccaaaaua

SEQ ID NO: 1830642 - RNA, 14 nt, Human
aaucuccaaaauaa

SEQ ID NO: 1830643 - RNA, 18 nt, Human
aaucuccaaaauaaaacu

SEQ ID NO: 1830644 - RNA, 18 nt, Human
aauccaggguggugguga

SEQ ID NO: 1830645 - RNA, 16 nt, Human
aaugaaccacaucuug

SEQ ID NO: 1830646 - RNA, 17 nt, Human
aaugaaccacaucuugc

SEQ ID NO: 1830647 - RNA, 23 nt, Human
aaugaaccacaucuugcucugcu

SEQ ID NO: 1830648 - RNA, 22 nt, Human
aaucugcuuuuuaaagaaugcu

SEQ ID NO: 1830649 - RNA, 21 nt, Human
aaugaugauccuaggcauuug

SEQ ID NO: 1830650 - RNA, 16 nt, Human
aagucuuagauguaua

SEQ ID NO: 1830651 - RNA, 19 nt, Human
aagucucuggaauuugaaa

SEQ ID NO: 1830652 - RNA, 11 nt, Human
aaggugggagg

SEQ ID NO: 1830653 - RNA, 16 nt, Human
aagguuaauaaaguaa

SEQ ID NO: 1830654 - RNA, 15 nt, Human
aagguuaauaaagua

SEQ ID NO: 1830655 - RNA, 20 nt, Human
aagguuaauguucaucaucc

SEQ ID NO: 1830656 - RNA, 16 nt, Human
aaguaucccuacugua

SEQ ID NO: 1830657 - RNA, 23 nt, Human
aaguccaggcuuuuuuaucaugu

SEQ ID NO: 1830658 - RNA, 15 nt, Human
aaguacuuuuggcau

SEQ ID NO: 1830659 - RNA, 14 nt, Human
aaguacuuuuggca

SEQ ID NO: 1830660 - RNA, 11 nt, Human
aaguacuucuu

SEQ ID NO: 1830661 - RNA, 23 nt, Human
aauaaaauuaaagcugaaaacug

SEQ ID NO: 1830662 - RNA, 19 nt, Human
aauaaacuauuuguaaagu

SEQ ID NO: 1830663 - RNA, 15 nt, Human
aaguuguuaauaaaa

SEQ ID NO: 1830664 - RNA, 13 nt, Human
aagugguauagaa

SEQ ID NO: 1830665 - RNA, 17 nt, Human
aagugguauagaaaugc

SEQ ID NO: 1830666 - RNA, 16 nt, Human
aauaaugugaaacugg

SEQ ID NO: 1830667 - RNA, 19 nt, Human
aauaauguaagacaaauau

SEQ ID NO: 1830668 - RNA, 12 nt, Human
aauaauguaaga

SEQ ID NO: 1830669 - RNA, 21 nt, Human
aauaauccuaaacauaugaau

SEQ ID NO: 1830670 - RNA, 22 nt, Human
aagugcugggauuacaggugug

SEQ ID NO: 1830671 - RNA, 18 nt, Human
aagccauaauuguucuua

SEQ ID NO: 1830672 - RNA, 14 nt, Human
aagcagaggaagga

SEQ ID NO: 1830673 - RNA, 21 nt, Human
aagcagaggaaggagaggaga

SEQ ID NO: 1830674 - RNA, 11 nt, Human
aagcagcucuu

SEQ ID NO: 1830675 - RNA, 22 nt, Human
aagaaauuaugugccagauuua

SEQ ID NO: 1830676 - RNA, 13 nt, Human
aagaaauuaugug

SEQ ID NO: 1830677 - RNA, 21 nt, Human
aagaaauuuccacucaggucu

SEQ ID NO: 1830678 - RNA, 18 nt, Human
aaggcaaggcugucaauu

SEQ ID NO: 1830679 - RNA, 17 nt, Human
aaggcaaggcugucaau

SEQ ID NO: 1830680 - RNA, 12 nt, Human
aagcguggugga

SEQ ID NO: 1830681 - RNA, 20 nt, Human
aagcugcacccucaggcagg

SEQ ID NO: 1830682 - RNA, 21 nt, Human
aagcugcacccucaggcaggu

SEQ ID NO: 1830683 - RNA, 22 nt, Human
aagcugcacccucaggcaggug

SEQ ID NO: 1830684 - RNA, 20 nt, Human
aaggacuaggguccugggga

SEQ ID NO: 1830685 - RNA, 18 nt, Human
aaggacuaggguccuggg

SEQ ID NO: 1830686 - RNA, 21 nt, Human
aaggacccggaggggccuggc

SEQ ID NO: 1830687 - RNA, 15 nt, Human
aaggacuaggguccu

SEQ ID NO: 1830688 - RNA, 18 nt, Human
aaggacccggaggggccu

SEQ ID NO: 1830689 - RNA, 13 nt, Human
aagcugggcaggu

SEQ ID NO: 1830690 - RNA, 15 nt, Human
aagcugggcagguug

SEQ ID NO: 1830691 - RNA, 18 nt, Human
aaggacauugcggacagc

SEQ ID NO: 1830692 - RNA, 11 nt, Human
aagcugggcag

SEQ ID NO: 1830693 - RNA, 16 nt, Human
aaauaguaaaaauaaa

SEQ ID NO: 1830694 - RNA, 13 nt, Human
aaauaguaaaaau

SEQ ID NO: 1830695 - RNA, 14 nt, Human
aaauauaauugaca

SEQ ID NO: 1830696 - RNA, 22 nt, Human
aaauacuguuuuuaacaacuau

SEQ ID NO: 1830697 - RNA, 22 nt, Human
aaauggacguguuaugacucca

SEQ ID NO: 1830698 - RNA, 21 nt, Human
aaauggacguguuaugacucc

SEQ ID NO: 1830699 - RNA, 20 nt, Human
aaauggacguguuaugacuc

SEQ ID NO: 1830700 - RNA, 18 nt, Human
aaauggaagacagcucuu

SEQ ID NO: 1830701 - RNA, 16 nt, Human
aaauggaaaugggcag

SEQ ID NO: 1830702 - RNA, 16 nt, Human
aaagggaacugaacau

SEQ ID NO: 1830703 - RNA, 21 nt, Human
aaagggaacugaacauuccag

SEQ ID NO: 1830704 - RNA, 16 nt, Human
aaagggacugagaaau

SEQ ID NO: 1830705 - RNA, 19 nt, Human
aaagucucuggaauuugaa

SEQ ID NO: 1830706 - RNA, 22 nt, Human
aaagucucuggaauuugaaaca

SEQ ID NO: 1830707 - RNA, 20 nt, Human
aaagucucuggaauuugaaa

SEQ ID NO: 1830708 - RNA, 23 nt, Human
aaagugagacuuugaggguguau

SEQ ID NO: 1830709 - RNA, 11 nt, Human
aaagugcuggg

SEQ ID NO: 1830710 - RNA, 12 nt, Human
aaagugcuggga

SEQ ID NO: 1830711 - RNA, 14 nt, Human
aaagugcugggauu

SEQ ID NO: 1830712 - RNA, 22 nt, Human
aaauaaaauuaaagcugaaaac

SEQ ID NO: 1830713 - RNA, 12 nt, Human
aaauaacaauga

SEQ ID NO: 1830714 - RNA, 20 nt, Human
aaagaaaacuuguauuaugu

SEQ ID NO: 1830715 - RNA, 12 nt, Human
aaagaaaacuug

SEQ ID NO: 1830716 - RNA, 13 nt, Human
aaagaaauuaugu

SEQ ID NO: 1830717 - RNA, 15 nt, Human
aaagaaauuaugugc

SEQ ID NO: 1830718 - RNA, 11 nt, Human
aaagaacaucc

SEQ ID NO: 1830719 - RNA, 12 nt, Human
aaagaguacucu

SEQ ID NO: 1830720 - RNA, 17 nt, Human
aaagaguacucuuguuu

SEQ ID NO: 1830721 - RNA, 13 nt, Human
aaaacacauuuuu

SEQ ID NO: 1830722 - RNA, 15 nt, Human
aaaacacauuuuucu

SEQ ID NO: 1830723 - RNA, 13 nt, Human
aaaauucagugga

SEQ ID NO: 1830724 - RNA, 18 nt, Human
aaacacuguucucugccc

SEQ ID NO: 1830725 - RNA, 17 nt, Human
aaacacucuugaaaaau

SEQ ID NO: 1830726 - RNA, 14 nt, Human
aaacacucuugaaa

SEQ ID NO: 1830727 - RNA, 13 nt, Human
aaacacucuugaa

SEQ ID NO: 1830728 - RNA, 22 nt, Human
aaacacuguucucugcccucca

SEQ ID NO: 1830729 - RNA, 19 nt, Human
aaacacuguucucugcccu

SEQ ID NO: 1830730 - RNA, 13 nt, Human
aacuuugaccucu

SEQ ID NO: 1830731 - RNA, 14 nt, Human
aacuuugaccucug

SEQ ID NO: 1830732 - RNA, 17 nt, Human
aacuuugaccucugcag

SEQ ID NO: 1830733 - RNA, 12 nt, Human
aacuuuuauaaa

SEQ ID NO: 1830734 - RNA, 15 nt, Human
aacuuuuauaaacuu

SEQ ID NO: 1830735 - RNA, 19 nt, Human
aacuuugaccucugcagca

SEQ ID NO: 1830736 - RNA, 20 nt, Human
aacuuugaccucugcagcaa

SEQ ID NO: 1830737 - RNA, 16 nt, Human
aacuuuuauaaacuuu

SEQ ID NO: 1830738 - RNA, 19 nt, Human
aacuuuuauaaacuuuacc

SEQ ID NO: 1830739 - RNA, 20 nt, Human
aacuuuuuuuuaaguuacac

SEQ ID NO: 1830740 - RNA, 14 nt, Human
aacuuuuuuuuaag

SEQ ID NO: 1830741 - RNA, 13 nt, Human
aacuucacauauu

SEQ ID NO: 1830742 - RNA, 16 nt, Human
aacucaccugccccuc

SEQ ID NO: 1830743 - RNA, 15 nt, Human
aacucaccugccccu

SEQ ID NO: 1830744 - RNA, 15 nt, Human
aacucaccccagccc

SEQ ID NO: 1830745 - RNA, 12 nt, Human
aacucaccccag

SEQ ID NO: 1830746 - RNA, 16 nt, Human
aacugaacucugacaa

SEQ ID NO: 1830747 - RNA, 20 nt, Human
aacugaacucugacaacaga

SEQ ID NO: 1830748 - RNA, 19 nt, Human
aacugaacucugacaacag

SEQ ID NO: 1830749 - RNA, 14 nt, Human
aacugaauuuuguc

SEQ ID NO: 1830750 - RNA, 23 nt, Human
aacugaacucugacaacagacuu

SEQ ID NO: 1830751 - RNA, 17 nt, Human
aacuuaaauaaugugaa

SEQ ID NO: 1830752 - RNA, 19 nt, Human
aacuuaaauaaugugaaac

SEQ ID NO: 1830753 - RNA, 15 nt, Human
aacugaauuuugucu

SEQ ID NO: 1830754 - RNA, 19 nt, Human
aacugaccagccuccaugc

SEQ ID NO: 1830755 - RNA, 14 nt, Human
aacugaccagccuc

SEQ ID NO: 1830756 - RNA, 17 nt, Human
aacugauuuuuuuuucc

SEQ ID NO: 1830757 - RNA, 19 nt, Human
aacugauuuuuuuuuccuu

SEQ ID NO: 1830758 - RNA, 17 nt, Human
aacaaagaaauuaugug

SEQ ID NO: 1830759 - RNA, 15 nt, Human
aacaaagaaauuaug

SEQ ID NO: 1830760 - RNA, 18 nt, Human
aaauugcauuuccugaca

SEQ ID NO: 1830761 - RNA, 19 nt, Human
aacacauuuuucuuaggga

SEQ ID NO: 1830762 - RNA, 14 nt, Human
aacccuggugacca

SEQ ID NO: 1830763 - RNA, 12 nt, Human
aaccagaucauu

SEQ ID NO: 1830764 - RNA, 14 nt, Human
aaccagaucauugu

SEQ ID NO: 1830765 - RNA, 21 nt, Human
aacauguaauuaaguacuaug

SEQ ID NO: 1830766 - RNA, 14 nt, Human
aacauguaauuaag

SEQ ID NO: 1830767 - RNA, 23 nt, Human
aacauguaauuaaguacuaugua

SEQ ID NO: 1830768 - RNA, 22 nt, Human
aaccacucuaucaaguauuaua

SEQ ID NO: 1830769 - RNA, 17 nt, Human
aaccaguguuguggauu

SEQ ID NO: 1830770 - RNA, 13 nt, Human
aacagcucgacuu

SEQ ID NO: 1830771 - RNA, 13 nt, Human
aacaugauuuggg

SEQ ID NO: 1830772 - RNA, 21 nt, Human
accugcccaaccugcucuccu

SEQ ID NO: 1830773 - RNA, 13 nt, Human
accugcccaaccu

SEQ ID NO: 1830774 - RNA, 23 nt, Human
accugccccucaacucuccucca

SEQ ID NO: 1830775 - RNA, 18 nt, Human
accugccccuccucucug

SEQ ID NO: 1830776 - RNA, 14 nt, Human
accugccccuccuc

SEQ ID NO: 1830777 - RNA, 18 nt, Human
accucugcacaagcugca

SEQ ID NO: 1830778 - RNA, 16 nt, Human
accucugcacaagcug

SEQ ID NO: 1830779 - RNA, 21 nt, Human
accucugcacaagcugcaccc

SEQ ID NO: 1830780 - RNA, 23 nt, Human
accuuucaauaggaaaaacugau

SEQ ID NO: 1830781 - RNA, 21 nt, Human
accuuucaauaggaaaaacug

SEQ ID NO: 1830782 - RNA, 17 nt, Human
accuuucaauaggaaaa

SEQ ID NO: 1830783 - RNA, 22 nt, Human
accugccccuccucucugcccu

SEQ ID NO: 1830784 - RNA, 20 nt, Human
accugccccuccucucugcc

SEQ ID NO: 1830785 - RNA, 14 nt, Human
accuuggcucaagu

SEQ ID NO: 1830786 - RNA, 12 nt, Human
accuuggcugca

SEQ ID NO: 1830787 - RNA, 12 nt, Human
accuuggcucaa

SEQ ID NO: 1830788 - RNA, 16 nt, Human
accuuucaauaggaaa

SEQ ID NO: 1830789 - RNA, 13 nt, Human
accuuuauucugg

SEQ ID NO: 1830790 - RNA, 12 nt, Human
accuuuauucug

SEQ ID NO: 1830791 - RNA, 14 nt, Human
accuuggcugcagg

SEQ ID NO: 1830792 - RNA, 12 nt, Human
acgauuucuguu

SEQ ID NO: 1830793 - RNA, 13 nt, Human
acgauuucuguuu

SEQ ID NO: 1830794 - RNA, 14 nt, Human
acgauuucuguuua

SEQ ID NO: 1830795 - RNA, 17 nt, Human
acgauuucuguuuagau

SEQ ID NO: 1830796 - RNA, 18 nt, Human
acgccacugcacuauagc

SEQ ID NO: 1830797 - RNA, 15 nt, Human
acuaaguuuuuaugg

SEQ ID NO: 1830798 - RNA, 22 nt, Human
acuaaguuuuuauggcuuuugu

SEQ ID NO: 1830799 - RNA, 19 nt, Human
acgugauuuugcuguagaa

SEQ ID NO: 1830800 - RNA, 18 nt, Human
acgcugugcugcccugcc

SEQ ID NO: 1830801 - RNA, 17 nt, Human
acgcugugcugcccugc

SEQ ID NO: 1830802 - RNA, 16 nt, Human
acgcugugcugcccug

SEQ ID NO: 1830803 - RNA, 15 nt, Human
acgcugugcugcccu

SEQ ID NO: 1830804 - RNA, 15 nt, Human
acguggcugcuucaa

SEQ ID NO: 1830805 - RNA, 14 nt, Human
acguggcugcuuca

SEQ ID NO: 1830806 - RNA, 13 nt, Human
acguggcugcuuc

SEQ ID NO: 1830807 - RNA, 17 nt, Human
acguggcugcuucaagg

SEQ ID NO: 1830808 - RNA, 18 nt, Human
acucuacccucuuagaaa

SEQ ID NO: 1830809 - RNA, 13 nt, Human
acucuacccucuu

SEQ ID NO: 1830810 - RNA, 21 nt, Human
acucuacccucuuagaaaaac

SEQ ID NO: 1830811 - RNA, 18 nt, Human
acucuuaaaacccaagug

SEQ ID NO: 1830812 - RNA, 11 nt, Human
acucuuaaaac

SEQ ID NO: 1830813 - RNA, 16 nt, Human
acucugugucaggugg

SEQ ID NO: 1830814 - RNA, 16 nt, Human
acucuaucaaguauua

SEQ ID NO: 1830815 - RNA, 21 nt, Human
acucuaucaaguauuauaccu

SEQ ID NO: 1830816 - RNA, 14 nt, Human
acucuaucaaguau

SEQ ID NO: 1830817 - RNA, 12 nt, Human
acucccuuucaa

SEQ ID NO: 1830818 - RNA, 13 nt, Human
acucccuuucaac

SEQ ID NO: 1830819 - RNA, 16 nt, Human
acucaaacucuuaaaa

SEQ ID NO: 1830820 - RNA, 17 nt, Human
acucaaacucuuaaaac

SEQ ID NO: 1830821 - RNA, 11 nt, Human
acuauaaugua

SEQ ID NO: 1830822 - RNA, 14 nt, Human
acucccccaggugg

SEQ ID NO: 1830823 - RNA, 17 nt, Human
acuccccugcugggugu

SEQ ID NO: 1830824 - RNA, 13 nt, Human
acuccccugcugg

SEQ ID NO: 1830825 - RNA, 12 nt, Human
acuccccuccuu

SEQ ID NO: 1830826 - RNA, 14 nt, Human
acucaguggggagg

SEQ ID NO: 1830827 - RNA, 16 nt, Human
acuaggguccugggga

SEQ ID NO: 1830828 - RNA, 15 nt, Human
acuaggguccugggg

SEQ ID NO: 1830829 - RNA, 14 nt, Human
acuagcuauggugu

SEQ ID NO: 1830830 - RNA, 21 nt, Human
acuuggucugugagaugcuag

SEQ ID NO: 1830831 - RNA, 18 nt, Human
acuuguaaaugugguaaa

SEQ ID NO: 1830832 - RNA, 20 nt, Human
acuuguaaaugugguaaaga

SEQ ID NO: 1830833 - RNA, 23 nt, Human
acuucacauauugauuuccguua

SEQ ID NO: 1830834 - RNA, 22 nt, Human
acuucugccagcauaauacuug

SEQ ID NO: 1830835 - RNA, 18 nt, Human
acuucugccauauucugu

SEQ ID NO: 1830836 - RNA, 19 nt, Human
acuucugccauauucuguu

SEQ ID NO: 1830837 - RNA, 14 nt, Human
acuuggucugugag

SEQ ID NO: 1830838 - RNA, 15 nt, Human
acuuggucugugaga

SEQ ID NO: 1830839 - RNA, 18 nt, Human
acuuguaaaggaauuuaa

SEQ ID NO: 1830840 - RNA, 20 nt, Human
acuuguaaaggaauuuaaaa

SEQ ID NO: 1830841 - RNA, 19 nt, Human
acuuguaaaggaauuuaaa

SEQ ID NO: 1830842 - RNA, 19 nt, Human
acuucacauauugauuucc

SEQ ID NO: 1830843 - RNA, 15 nt, Human
acuuauuuauauaaa

SEQ ID NO: 1830844 - RNA, 13 nt, Human
acuguuucaaacu

SEQ ID NO: 1830845 - RNA, 20 nt, Human
acugguggcccgacagccug

SEQ ID NO: 1830846 - RNA, 22 nt, Human
acugguggcccgacagccuggc

SEQ ID NO: 1830847 - RNA, 21 nt, Human
acugguggcccgacagccugg

SEQ ID NO: 1830848 - RNA, 23 nt, Human
acugguggcccgacagccuggca

SEQ ID NO: 1830849 - RNA, 12 nt, Human
acugucuucagu

SEQ ID NO: 1830850 - RNA, 16 nt, Human
acugugccaugugcca

SEQ ID NO: 1830851 - RNA, 20 nt, Human
acugcccccucugcccugcg

SEQ ID NO: 1830852 - RNA, 18 nt, Human
acugcccccucugcccug

SEQ ID NO: 1830853 - RNA, 19 nt, Human
acugcccccucugcccugc

SEQ ID NO: 1830854 - RNA, 16 nt, Human
acuggaagcacagcuu

SEQ ID NO: 1830855 - RNA, 15 nt, Human
acuggaagcacagcu

SEQ ID NO: 1830856 - RNA, 14 nt, Human
acuggaagcacagc

SEQ ID NO: 1830857 - RNA, 14 nt, Human
acuggagaaaaugg

SEQ ID NO: 1830858 - RNA, 18 nt, Human
agaaauaaaguuucuguu

SEQ ID NO: 1830859 - RNA, 15 nt, Human
agaaauaaaguuucu

SEQ ID NO: 1830860 - RNA, 20 nt, Human
agaaaggaggggauagagag

SEQ ID NO: 1830861 - RNA, 23 nt, Human
agaaaggaggggauagagagaga

SEQ ID NO: 1830862 - RNA, 23 nt, Human
acuuuagggaaguacuuuuggca

SEQ ID NO: 1830863 - RNA, 23 nt, Human
acuuuccuucauucaacccaccu

SEQ ID NO: 1830864 - RNA, 23 nt, Human
acuuuguucuggcucuuccaggc

SEQ ID NO: 1830865 - RNA, 15 nt, Human
acuuuuauaaacuuu

SEQ ID NO: 1830866 - RNA, 19 nt, Human
acuuuuauaaacuuuaccu

SEQ ID NO: 1830867 - RNA, 22 nt, Human
acuuuuauaaacuuuaccuuuu

SEQ ID NO: 1830868 - RNA, 20 nt, Human
agaaaagggaacugaacauu

SEQ ID NO: 1830869 - RNA, 23 nt, Human
agaaaauggacguguuaugacuc

SEQ ID NO: 1830870 - RNA, 22 nt, Human
agaaaauggacguguuaugacu

SEQ ID NO: 1830871 - RNA, 20 nt, Human
agaaaauggacguguuauga

SEQ ID NO: 1830872 - RNA, 15 nt, Human
agaaaauggacgugu

SEQ ID NO: 1830873 - RNA, 23 nt, Human
agaaaauggaagacagcucuuau

SEQ ID NO: 1830874 - RNA, 14 nt, Human
agaaaauaacaaua

SEQ ID NO: 1830875 - RNA, 18 nt, Human
acacaaacgggcucagca

SEQ ID NO: 1830876 - RNA, 16 nt, Human
acaauuuauuauggca

SEQ ID NO: 1830877 - RNA, 15 nt, Human
acaauuuauuauggc

SEQ ID NO: 1830878 - RNA, 15 nt, Human
acacggacacucaaa

SEQ ID NO: 1830879 - RNA, 14 nt, Human
acacuaaccacgcu

SEQ ID NO: 1830880 - RNA, 15 nt, Human
acacuaaccacgcug

SEQ ID NO: 1830881 - RNA, 14 nt, Human
acacagcucugucc

SEQ ID NO: 1830882 - RNA, 11 nt, Human
acacagcucug

SEQ ID NO: 1830883 - RNA, 12 nt, Human
acacagcucugu

SEQ ID NO: 1830884 - RNA, 14 nt, Human
acaccacuacauuc

SEQ ID NO: 1830885 - RNA, 19 nt, Human
acacgcuccuuccucugag

SEQ ID NO: 1830886 - RNA, 17 nt, Human
acacgcuccuuccucug

SEQ ID NO: 1830887 - RNA, 12 nt, Human
acaccagagccc

SEQ ID NO: 1830888 - RNA, 23 nt, Human
acaaguaugaauaaagacaccua

SEQ ID NO: 1830889 - RNA, 21 nt, Human
acaaguaugaauaaagacacc

SEQ ID NO: 1830890 - RNA, 24 nt, Human
acaacuugcacguauuuuaauagc

SEQ ID NO: 1830891 - RNA, 13 nt, Human
aauuuugaaaaac

SEQ ID NO: 1830892 - RNA, 20 nt, Human
acaaaauguaggguuauaau

SEQ ID NO: 1830893 - RNA, 15 nt, Human
acaaacgggcucagc

SEQ ID NO: 1830894 - RNA, 21 nt, Human
acaaaccuguuucugcagcca

SEQ ID NO: 1830895 - RNA, 18 nt, Human
acaacuaugauuuggaaa

SEQ ID NO: 1830896 - RNA, 13 nt, Human
acaaagacugagu

SEQ ID NO: 1830897 - RNA, 12 nt, Human
acagcuccuucu

SEQ ID NO: 1830898 - RNA, 13 nt, Human
acagcuccuucug

SEQ ID NO: 1830899 - RNA, 14 nt, Human
acagcuccuucugu

SEQ ID NO: 1830900 - RNA, 23 nt, Human
acagcugccugggaucccucauc

SEQ ID NO: 1830901 - RNA, 14 nt, Human
acagcugccuggga

SEQ ID NO: 1830902 - RNA, 13 nt, Human
acagcucuguccu

SEQ ID NO: 1830903 - RNA, 20 nt, Human
acagcucugcauacucauua

SEQ ID NO: 1830904 - RNA, 15 nt, Human
acagcuccuucuguc

SEQ ID NO: 1830905 - RNA, 21 nt, Human
acaggugugagccaccacgcc

SEQ ID NO: 1830906 - RNA, 22 nt, Human
acaggugugagccaccacgccc

SEQ ID NO: 1830907 - RNA, 20 nt, Human
acaggugugaaccaccacac

SEQ ID NO: 1830908 - RNA, 23 nt, Human
acaggugugaaccaccacaccca

SEQ ID NO: 1830909 - RNA, 21 nt, Human
acagcugcucaauaaaguaca

SEQ ID NO: 1830910 - RNA, 19 nt, Human
acaggcaagcaccuccugc

SEQ ID NO: 1830911 - RNA, 18 nt, Human
acaggcaagcaccuccug

SEQ ID NO: 1830912 - RNA, 15 nt, Human
acaggcaagcaccuc

SEQ ID NO: 1830913 - RNA, 16 nt, Human
acaggcaagcaccucc

SEQ ID NO: 1830914 - RNA, 21 nt, Human
acagaacacauaauucaggaa

SEQ ID NO: 1830915 - RNA, 15 nt, Human
acagaagcagcucuu

SEQ ID NO: 1830916 - RNA, 14 nt, Human
acagaagcagcucu

SEQ ID NO: 1830917 - RNA, 13 nt, Human
acagaagcagcuc

SEQ ID NO: 1830918 - RNA, 12 nt, Human
acagaagcagcu

SEQ ID NO: 1830919 - RNA, 15 nt, Human
acagccaugauucuu

SEQ ID NO: 1830920 - RNA, 19 nt, Human
acagccacggccaggccag

SEQ ID NO: 1830921 - RNA, 22 nt, Human
acagaggggguggccucccaac

SEQ ID NO: 1830922 - RNA, 12 nt, Human
acagagucucac

SEQ ID NO: 1830923 - RNA, 14 nt, Human
acagagucucacug

SEQ ID NO: 1830924 - RNA, 17 nt, Human
acagagucucacuguug

SEQ ID NO: 1830925 - RNA, 19 nt, Human
acagagucucacuguugcc

SEQ ID NO: 1830926 - RNA, 17 nt, Human
accagcagccuggaccc

SEQ ID NO: 1830927 - RNA, 14 nt, Human
accagcagccugga

SEQ ID NO: 1830928 - RNA, 13 nt, Human
accagcagccugg

SEQ ID NO: 1830929 - RNA, 15 nt, Human
accacguuucuaaag

SEQ ID NO: 1830930 - RNA, 19 nt, Human
accacguuucuaaaggcua

SEQ ID NO: 1830931 - RNA, 14 nt, Human
accacuacauucug

SEQ ID NO: 1830932 - RNA, 14 nt, Human
accacgcccggcua

SEQ ID NO: 1830933 - RNA, 20 nt, Human
accacgcccggcuaauuuuu

SEQ ID NO: 1830934 - RNA, 13 nt, Human
acauguuacaaca

SEQ ID NO: 1830935 - RNA, 21 nt, Human
acauguuuuucuucucccuca

SEQ ID NO: 1830936 - RNA, 23 nt, Human
acaugcacagcuaacauggaagu

SEQ ID NO: 1830937 - RNA, 20 nt, Human
acaugcacagcuaacaugga

SEQ ID NO: 1830938 - RNA, 19 nt, Human
acaugcaaggucauuuuuu

SEQ ID NO: 1830939 - RNA, 23 nt, Human
acauaaacaagaccacguuucua

SEQ ID NO: 1830940 - RNA, 20 nt, Human
acaucagcacgauuucuguu

SEQ ID NO: 1830941 - RNA, 21 nt, Human
acaucagcacgauuucuguuu

SEQ ID NO: 1830942 - RNA, 22 nt, Human
acaucagcacgauuucuguuua

SEQ ID NO: 1830943 - RNA, 20 nt, Human
accccucaacaccucugcac

SEQ ID NO: 1830944 - RNA, 14 nt, Human
accaucaugucugg

SEQ ID NO: 1830945 - RNA, 22 nt, Human
accaucccugaaggccccgccc

SEQ ID NO: 1830946 - RNA, 21 nt, Human
accaucccugaaggccccgcc

SEQ ID NO: 1830947 - RNA, 18 nt, Human
accaucccugaaggcccc

SEQ ID NO: 1830948 - RNA, 16 nt, Human
accaucaugucuggcu

SEQ ID NO: 1830949 - RNA, 17 nt, Human
accaucaugucuggcua

SEQ ID NO: 1830950 - RNA, 19 nt, Human
acccaugcugcccugugag

SEQ ID NO: 1830951 - RNA, 18 nt, Human
acccaugcugcccuguga

SEQ ID NO: 1830952 - RNA, 17 nt, Human
acccaugcugcccugug

SEQ ID NO: 1830953 - RNA, 15 nt, Human
acccacaagaaauga

SEQ ID NO: 1830954 - RNA, 16 nt, Human
acccaagggccuggcc

SEQ ID NO: 1830955 - RNA, 13 nt, Human
acccaagggccug

SEQ ID NO: 1830956 - RNA, 18 nt, Human
accccgaccaccugccca

SEQ ID NO: 1830957 - RNA, 15 nt, Human
accccggccaccugc

SEQ ID NO: 1830958 - RNA, 22 nt, Human
accccuaaagagauacuuugau

SEQ ID NO: 1830959 - RNA, 16 nt, Human
aguccacaguggaacc

SEQ ID NO: 1830960 - RNA, 13 nt, Human
agugauccuccca

SEQ ID NO: 1830961 - RNA, 20 nt, Human
agucaagugaaaaaggagga

SEQ ID NO: 1830962 - RNA, 16 nt, Human
agucaagugaaaaagg

SEQ ID NO: 1830963 - RNA, 18 nt, Human
agucaaggguaggguggg

SEQ ID NO: 1830964 - RNA, 18 nt, Human
aguuguaccgcaauguga

SEQ ID NO: 1830965 - RNA, 19 nt, Human
aguuguaccgcaaugugac

SEQ ID NO: 1830966 - RNA, 18 nt, Human
aguuacagacaaagcgug

SEQ ID NO: 1830967 - RNA, 16 nt, Human
aguuguuacauuuuua

SEQ ID NO: 1830968 - RNA, 23 nt, Human
aguuguuaauaaaaguacauguu

SEQ ID NO: 1830969 - RNA, 13 nt, Human
aguuguuacauuu

SEQ ID NO: 1830970 - RNA, 15 nt, Human
aguuguuacauuuuu

SEQ ID NO: 1830971 - RNA, 23 nt, Human
agugugacaaggauugcuacugu

SEQ ID NO: 1830972 - RNA, 18 nt, Human
agugauuaccagggacug

SEQ ID NO: 1830973 - RNA, 15 nt, Human
agugauuaccaggga

SEQ ID NO: 1830974 - RNA, 19 nt, Human
agugauucucaugccucag

SEQ ID NO: 1830975 - RNA, 18 nt, Human
agugauucucaugccuca

SEQ ID NO: 1830976 - RNA, 16 nt, Human
auauuuauaaaaauaa

SEQ ID NO: 1830977 - RNA, 18 nt, Human
auauuuaguguucauaaa

SEQ ID NO: 1830978 - RNA, 13 nt, Human
auauucaggaagc

SEQ ID NO: 1830979 - RNA, 16 nt, Human
auauucaggaagcuca

SEQ ID NO: 1830980 - RNA, 14 nt, Human
auauucaggaagcu

SEQ ID NO: 1830981 - RNA, 17 nt, Human
auauucaggaagcucag

SEQ ID NO: 1830982 - RNA, 19 nt, Human
auaugcuuauacacuuaca

SEQ ID NO: 1830983 - RNA, 16 nt, Human
auaugcuuauacacuu

SEQ ID NO: 1830984 - RNA, 14 nt, Human
auaugcuuauacac

SEQ ID NO: 1830985 - RNA, 22 nt, Human
auaugccugggcagaaggaaga

SEQ ID NO: 1830986 - RNA, 17 nt, Human
auaugcaguuuuccuua

SEQ ID NO: 1830987 - RNA, 15 nt, Human
auauaaguguguguu

SEQ ID NO: 1830988 - RNA, 15 nt, Human
auauaagugauugcu

SEQ ID NO: 1830989 - RNA, 16 nt, Human
auaguaugguggcugg

SEQ ID NO: 1830990 - RNA, 16 nt, Human
auacuugaaaauuaac

SEQ ID NO: 1830991 - RNA, 15 nt, Human
auacuugaaaauuaa

SEQ ID NO: 1830992 - RNA, 15 nt, Human
auaguaugguggcug

SEQ ID NO: 1830993 - RNA, 16 nt, Human
auauaggaacuuaaau

SEQ ID NO: 1830994 - RNA, 12 nt, Human
auaccugucccc

SEQ ID NO: 1830995 - RNA, 13 nt, Human
auaccuguccccc

SEQ ID NO: 1830996 - RNA, 14 nt, Human
auaauuacuauguc

SEQ ID NO: 1830997 - RNA, 22 nt, Human
auacccccugcaaagcccagcu

SEQ ID NO: 1830998 - RNA, 15 nt, Human
auaaguggugugugu

SEQ ID NO: 1830999 - RNA, 19 nt, Human
auaaguauuuaauucaugu

SEQ ID NO: 1831000 - RNA, 19 nt, Human
auaaugugaaacuggauua

SEQ ID NO: 1831001 - RNA, 21 nt, Human
auaaugugaaacuggauuaaa

SEQ ID NO: 1831002 - RNA, 22 nt, Human
auaaguguguguuuuucauaaa

SEQ ID NO: 1831003 - RNA, 19 nt, Human
auaaguguguguuuuucau

SEQ ID NO: 1831004 - RNA, 18 nt, Human
auaaugugaaacuggauu

SEQ ID NO: 1831005 - RNA, 20 nt, Human
auggaaaugggcagagcaga

SEQ ID NO: 1831006 - RNA, 19 nt, Human
auggaaaugggcagagcag

SEQ ID NO: 1831007 - RNA, 13 nt, Human
auggaaauguuua

SEQ ID NO: 1831008 - RNA, 15 nt, Human
augggaaugaauguc

SEQ ID NO: 1831009 - RNA, 21 nt, Human
augggaaugaaugucagugug

SEQ ID NO: 1831010 - RNA, 23 nt, Human
auggcugccaaugggagcucaug

SEQ ID NO: 1831011 - RNA, 21 nt, Human
augccuuuguacuuuagggaa

SEQ ID NO: 1831012 - RNA, 23 nt, Human
augauguauguugaagccuuugu

SEQ ID NO: 1831013 - RNA, 16 nt, Human
augaugugugaaaacu

SEQ ID NO: 1831014 - RNA, 17 nt, Human
augcacacauuuuuuaa

SEQ ID NO: 1831015 - RNA, 19 nt, Human
augcacacauuuuuuaaau

SEQ ID NO: 1831016 - RNA, 22 nt, Human
augcacacauuuuuuaaaugca

SEQ ID NO: 1831017 - RNA, 14 nt, Human
augcacagcuaaca

SEQ ID NO: 1831018 - RNA, 23 nt, Human
augcacacauuuuuuaaaugcac

SEQ ID NO: 1831019 - RNA, 21 nt, Human
augcacagcuaacauggaagu

SEQ ID NO: 1831020 - RNA, 10 nt, Human
augcauuuga

SEQ ID NO: 1831021 - RNA, 12 nt, Human
augcauuugaaa

SEQ ID NO: 1831022 - RNA, 18 nt, Human
augcauuugaaaauuuug

SEQ ID NO: 1831023 - RNA, 23 nt, Human
augcaugaaguaauaugcacaca

SEQ ID NO: 1831024 - RNA, 20 nt, Human
augcaugaaguaauaugcac

SEQ ID NO: 1831025 - RNA, 17 nt, Human
augccugggcagaagga

SEQ ID NO: 1831026 - RNA, 23 nt, Human
augccuggauggggcugcaccgg

SEQ ID NO: 1831027 - RNA, 21 nt, Human
augccuggauggggcugcacc

SEQ ID NO: 1831028 - RNA, 15 nt, Human
augccugguggcagc

SEQ ID NO: 1831029 - RNA, 16 nt, Human
augccugguggcagcu

SEQ ID NO: 1831030 - RNA, 17 nt, Human
augccugguggcagcug

SEQ ID NO: 1831031 - RNA, 17 nt, Human
auguaagcucuacugag

SEQ ID NO: 1831032 - RNA, 15 nt, Human
augucacaggcaggu

SEQ ID NO: 1831033 - RNA, 14 nt, Human
augucacaggcagg

SEQ ID NO: 1831034 - RNA, 16 nt, Human
augucacaggcagguc

SEQ ID NO: 1831035 - RNA, 17 nt, Human
augucacaggcaggucc

SEQ ID NO: 1831036 - RNA, 17 nt, Human
auguacauguacugauu

SEQ ID NO: 1831037 - RNA, 14 nt, Human
auguguaaguauuc

SEQ ID NO: 1831038 - RNA, 22 nt, Human
auguucugacccugcuucaaau

SEQ ID NO: 1831039 - RNA, 20 nt, Human
auguucuuaguggauguucu

SEQ ID NO: 1831040 - RNA, 15 nt, Human
auguucuuaauucuu

SEQ ID NO: 1831041 - RNA, 20 nt, Human
auguucuuucacccuuuucu

SEQ ID NO: 1831042 - RNA, 18 nt, Human
auguuucuuuguaaugaa

SEQ ID NO: 1831043 - RNA, 18 nt, Human
auguucucugaggacacu

SEQ ID NO: 1831044 - RNA, 13 nt, Human
auuaaauucuugc

SEQ ID NO: 1831045 - RNA, 16 nt, Human
auuaaaugcccagccc

SEQ ID NO: 1831046 - RNA, 15 nt, Human
auuaaaugcccagcc

SEQ ID NO: 1831047 - RNA, 14 nt, Human
auuaaaugcccagc

SEQ ID NO: 1831048 - RNA, 16 nt, Human
auguuuuaagaggcag

SEQ ID NO: 1831049 - RNA, 18 nt, Human
auguuuuaagaggcaggg

SEQ ID NO: 1831050 - RNA, 17 nt, Human
aucuucuuuauaauucu

SEQ ID NO: 1831051 - RNA, 17 nt, Human
aucuugaagacuuuucu

SEQ ID NO: 1831052 - RNA, 22 nt, Human
aucucucgugauugauaagaac

SEQ ID NO: 1831053 - RNA, 15 nt, Human
aucucucuucuuuuc

SEQ ID NO: 1831054 - RNA, 19 nt, Human
aucuuccaacucaaacucu

SEQ ID NO: 1831055 - RNA, 15 nt, Human
aucugggccagaauu

SEQ ID NO: 1831056 - RNA, 17 nt, Human
aucugggccagaauuuc

SEQ ID NO: 1831057 - RNA, 22 nt, Human
aucuuauaauuuaaaauaugcu

SEQ ID NO: 1831058 - RNA, 14 nt, Human
augagccuggcaag

SEQ ID NO: 1831059 - RNA, 13 nt, Human
augagccuggcaa

SEQ ID NO: 1831060 - RNA, 12 nt, Human
augacccagugg

SEQ ID NO: 1831061 - RNA, 21 nt, Human
augaagcuuuuaugugaaaca

SEQ ID NO: 1831062 - RNA, 20 nt, Human
augaagcuuuuaugugaaac

SEQ ID NO: 1831063 - RNA, 19 nt, Human
augaagcuuuuaugugaaa

SEQ ID NO: 1831064 - RNA, 18 nt, Human
augaagcuuuuaugugaa

SEQ ID NO: 1831065 - RNA, 16 nt, Human
augacuccagaauuuc

SEQ ID NO: 1831066 - RNA, 12 nt, Human
augacuccagaa

SEQ ID NO: 1831067 - RNA, 17 nt, Human
augacuccagaauuucc

SEQ ID NO: 1831068 - RNA, 17 nt, Human
augaaaaaauauauauc

SEQ ID NO: 1831069 - RNA, 14 nt, Human
augaaaaaauauau

SEQ ID NO: 1831070 - RNA, 22 nt, Human
augaaaaaauauauaucaaaua

SEQ ID NO: 1831071 - RNA, 23 nt, Human
augaaaaaauauauaucaaauau

SEQ ID NO: 1831072 - RNA, 23 nt, Human
aucagcugcuacuacuccuguag

SEQ ID NO: 1831073 - RNA, 13 nt, Human
aucagcugcuacu

SEQ ID NO: 1831074 - RNA, 12 nt, Human
aucagcugcuac

SEQ ID NO: 1831075 - RNA, 21 nt, Human
aucagccugggcaaugugaua

SEQ ID NO: 1831076 - RNA, 20 nt, Human
aucagccugggcaaugugau

SEQ ID NO: 1831077 - RNA, 11 nt, Human
aucagccuggg

SEQ ID NO: 1831078 - RNA, 13 nt, Human
aucaccugcccug

SEQ ID NO: 1831079 - RNA, 12 nt, Human
aucaccugcccu

SEQ ID NO: 1831080 - RNA, 22 nt, Human
auccucauacccacccccaccc

SEQ ID NO: 1831081 - RNA, 19 nt, Human
auccucauacccaccccca

SEQ ID NO: 1831082 - RNA, 18 nt, Human
auccucauacccaccccc

SEQ ID NO: 1831083 - RNA, 15 nt, Human
aucccuacuguaauu

SEQ ID NO: 1831084 - RNA, 14 nt, Human
aucccggcugcccu

SEQ ID NO: 1831085 - RNA, 18 nt, Human
auccacccaccucagccu

SEQ ID NO: 1831086 - RNA, 20 nt, Human
auccacccaccucagccucc

SEQ ID NO: 1831087 - RNA, 22 nt, Human
auccuccaggugcacaagcucc

SEQ ID NO: 1831088 - RNA, 19 nt, Human
auccuccaggugcacaagc

SEQ ID NO: 1831089 - RNA, 14 nt, Human
auccuccaggugca

SEQ ID NO: 1831090 - RNA, 13 nt, Human
auccuccaggugc

SEQ ID NO: 1831091 - RNA, 11 nt, Human
auccuccucag

SEQ ID NO: 1831092 - RNA, 23 nt, Human
auccucauacccacccccaccca

SEQ ID NO: 1831093 - RNA, 12 nt, Human
auccucccaggc

SEQ ID NO: 1831094 - RNA, 13 nt, Human
aucgaugcagugc

SEQ ID NO: 1831095 - RNA, 14 nt, Human
auccuccucagauc

SEQ ID NO: 1831096 - RNA, 13 nt, Human
agacaaugacuua

SEQ ID NO: 1831097 - RNA, 17 nt, Human
agacaaugacuuacugu

SEQ ID NO: 1831098 - RNA, 19 nt, Human
agacaaugacuuacuguac

SEQ ID NO: 1831099 - RNA, 15 nt, Human
agacaauuuauuaug

SEQ ID NO: 1831100 - RNA, 21 nt, Human
agacaauuuauuauggcacau

SEQ ID NO: 1831101 - RNA, 18 nt, Human
agacgggggcagagaggg

SEQ ID NO: 1831102 - RNA, 19 nt, Human
agacggagucccaccuugg

SEQ ID NO: 1831103 - RNA, 17 nt, Human
agacagcccgggcucug

SEQ ID NO: 1831104 - RNA, 20 nt, Human
agacagcccgggcucugccu

SEQ ID NO: 1831105 - RNA, 18 nt, Human
agacagcccgggcucugc

SEQ ID NO: 1831106 - RNA, 21 nt, Human
agaccaucccugaaggccccg

SEQ ID NO: 1831107 - RNA, 18 nt, Human
agaccaucccugaaggcc

SEQ ID NO: 1831108 - RNA, 17 nt, Human
agaccaucccugaaggc

SEQ ID NO: 1831109 - RNA, 14 nt, Human
agaccaucccugaa

SEQ ID NO: 1831110 - RNA, 13 nt, Human
agaccaucccuga

SEQ ID NO: 1831111 - RNA, 23 nt, Human
agacugaguacguugugcauuug

SEQ ID NO: 1831112 - RNA, 16 nt, Human
agagaguggcuccucc

SEQ ID NO: 1831113 - RNA, 14 nt, Human
agagaguggcuccu

SEQ ID NO: 1831114 - RNA, 23 nt, Human
agagaggguggugaccucugccu

SEQ ID NO: 1831115 - RNA, 16 nt, Human
agagagcuucuguugc

SEQ ID NO: 1831116 - RNA, 23 nt, Human
agagagcuucuguugcugccuca

SEQ ID NO: 1831117 - RNA, 20 nt, Human
agagagcuucuguugcugcc

SEQ ID NO: 1831118 - RNA, 21 nt, Human
agagaagagauugugguuuca

SEQ ID NO: 1831119 - RNA, 10 nt, Human
agagaagaga

SEQ ID NO: 1831120 - RNA, 18 nt, Human
agagaaaguacuucucca

SEQ ID NO: 1831121 - RNA, 13 nt, Human
agaggagaggggc

SEQ ID NO: 1831122 - RNA, 16 nt, Human
agaggggaagagacuu

SEQ ID NO: 1831123 - RNA, 22 nt, Human
agaggggaacagacuggaagca

SEQ ID NO: 1831124 - RNA, 22 nt, Human
agauacuuggggggcugaggug

SEQ ID NO: 1831125 - RNA, 13 nt, Human
agauagccaaggc

SEQ ID NO: 1831126 - RNA, 23 nt, Human
agauggcugugccucugccuguc

SEQ ID NO: 1831127 - RNA, 16 nt, Human
agauagccaaggccaa

SEQ ID NO: 1831128 - RNA, 15 nt, Human
agauagccaaggcca

SEQ ID NO: 1831129 - RNA, 21 nt, Human
agauaggucagugcaaauacu

SEQ ID NO: 1831130 - RNA, 20 nt, Human
agcccaaagugguauagaaa

SEQ ID NO: 1831131 - RNA, 23 nt, Human
agcccaaagugguauagaaaugc

SEQ ID NO: 1831132 - RNA, 11 nt, Human
agccccauccu

SEQ ID NO: 1831133 - RNA, 20 nt, Human
agccccaucccaaacccuuc

SEQ ID NO: 1831134 - RNA, 23 nt, Human
agccccauaauuuuuuuuuuccu

SEQ ID NO: 1831135 - RNA, 16 nt, Human
agccccagugcccaca

SEQ ID NO: 1831136 - RNA, 15 nt, Human
agcccugagcuuucu

SEQ ID NO: 1831137 - RNA, 19 nt, Human
agccgagaucacgccacug

SEQ ID NO: 1831138 - RNA, 20 nt, Human
agccgagaucacgccacugc

SEQ ID NO: 1831139 - RNA, 19 nt, Human
agccuccugaguagcugga

SEQ ID NO: 1831140 - RNA, 18 nt, Human
agccucccaaagugcugg

SEQ ID NO: 1831141 - RNA, 19 nt, Human
agccucccaaagugcuggg

SEQ ID NO: 1831142 - RNA, 22 nt, Human
agccgcuggggccaguuggucc

SEQ ID NO: 1831143 - RNA, 14 nt, Human
agccgcuggggcca

SEQ ID NO: 1831144 - RNA, 20 nt, Human
agccgagauugcaccacugc

SEQ ID NO: 1831145 - RNA, 19 nt, Human
agccgagauugcaccacug

SEQ ID NO: 1831146 - RNA, 21 nt, Human
agccgagaucacgccacugca

SEQ ID NO: 1831147 - RNA, 20 nt, Human
agccucccaaagugcuggga

SEQ ID NO: 1831148 - RNA, 18 nt, Human
agccucccgaauagcugg

SEQ ID NO: 1831149 - RNA, 19 nt, Human
agccucccgaauagcuggg

SEQ ID NO: 1831150 - RNA, 20 nt, Human
agccucccgaauagcuggga

SEQ ID NO: 1831151 - RNA, 22 nt, Human
agccucccgaauagcugggacu

SEQ ID NO: 1831152 - RNA, 17 nt, Human
agccucccgaguagcug

SEQ ID NO: 1831153 - RNA, 11 nt, Human
agccuccugag

SEQ ID NO: 1831154 - RNA, 22 nt, Human
agccucccgaguagcugggacu

SEQ ID NO: 1831155 - RNA, 23 nt, Human
agccaaggccaaaggaagcacau

SEQ ID NO: 1831156 - RNA, 22 nt, Human
agccaaggccaaaggaagcaca

SEQ ID NO: 1831157 - RNA, 20 nt, Human
agccagaggagagaggaccc

SEQ ID NO: 1831158 - RNA, 12 nt, Human
agcaugccugga

SEQ ID NO: 1831159 - RNA, 14 nt, Human
agcaugcacaaauu

SEQ ID NO: 1831160 - RNA, 19 nt, Human
agccaaagcuaggccuggc

SEQ ID NO: 1831161 - RNA, 20 nt, Human
agccaaagcuaggccuggcc

SEQ ID NO: 1831162 - RNA, 23 nt, Human
agccaaagcuaggccuggccaga

SEQ ID NO: 1831163 - RNA, 21 nt, Human
agaugggagaaucacuugaac

SEQ ID NO: 1831164 - RNA, 14 nt, Human
agauguagaggaga

SEQ ID NO: 1831165 - RNA, 21 nt, Human
agcagccacauuccugaugcu

SEQ ID NO: 1831166 - RNA, 20 nt, Human
agcacuaaggugugcucuga

SEQ ID NO: 1831167 - RNA, 19 nt, Human
agcacuaaggugugcucug

SEQ ID NO: 1831168 - RNA, 17 nt, Human
agguaaggaauaccugu

SEQ ID NO: 1831169 - RNA, 17 nt, Human
agguaaucgaccugccu

SEQ ID NO: 1831170 - RNA, 18 nt, Human
agguaaucgaccugccuc

SEQ ID NO: 1831171 - RNA, 20 nt, Human
aggucccuaauaaagcugug

SEQ ID NO: 1831172 - RNA, 19 nt, Human
aggucccuaauaaagcugu

SEQ ID NO: 1831173 - RNA, 18 nt, Human
aggucccuaauaaagcug

SEQ ID NO: 1831174 - RNA, 17 nt, Human
aggucccuaauaaagcu

SEQ ID NO: 1831175 - RNA, 15 nt, Human
agguggaaauaaacu

SEQ ID NO: 1831176 - RNA, 14 nt, Human
aggucgaggcagga

SEQ ID NO: 1831177 - RNA, 16 nt, Human
aggugcugccauccag

SEQ ID NO: 1831178 - RNA, 17 nt, Human
aggugcugccauccagg

SEQ ID NO: 1831179 - RNA, 15 nt, Human
agguuaauaaaguaa

SEQ ID NO: 1831180 - RNA, 14 nt, Human
agguuaauguucau

SEQ ID NO: 1831181 - RNA, 17 nt, Human
agguucaaagauauuuu

SEQ ID NO: 1831182 - RNA, 17 nt, Human
agguucaugcaaacuuu

SEQ ID NO: 1831183 - RNA, 13 nt, Human
agguucagcuugu

SEQ ID NO: 1831184 - RNA, 15 nt, Human
aggggcacagggucu

SEQ ID NO: 1831185 - RNA, 21 nt, Human
aggggauagagagagaccacu

SEQ ID NO: 1831186 - RNA, 18 nt, Human
agggccuggccugagcug

SEQ ID NO: 1831187 - RNA, 19 nt, Human
agggcgggaggauguucug

SEQ ID NO: 1831188 - RNA, 17 nt, Human
agggcacaccgggcacu

SEQ ID NO: 1831189 - RNA, 17 nt, Human
agggccuggccugagcu

SEQ ID NO: 1831190 - RNA, 16 nt, Human
agggccuggccugagc

SEQ ID NO: 1831191 - RNA, 15 nt, Human
agggccuggccugag

SEQ ID NO: 1831192 - RNA, 22 nt, Human
agggcacagaaaauggaagaca

SEQ ID NO: 1831193 - RNA, 20 nt, Human
agggcacaccgggcacucag

SEQ ID NO: 1831194 - RNA, 21 nt, Human
agggcacaccgggcacucaga

SEQ ID NO: 1831195 - RNA, 14 nt, Human
aggcucuucuccuu

SEQ ID NO: 1831196 - RNA, 21 nt, Human
aggcugaacuuguuuucuggg

SEQ ID NO: 1831197 - RNA, 20 nt, Human
aggcugaacuuguuuucugg

SEQ ID NO: 1831198 - RNA, 23 nt, Human
aggcuagugugguguuuccuggc

SEQ ID NO: 1831199 - RNA, 20 nt, Human
agggacagaggggguggccu

SEQ ID NO: 1831200 - RNA, 13 nt, Human
agggacagagggg

SEQ ID NO: 1831201 - RNA, 12 nt, Human
agggacagaggg

SEQ ID NO: 1831202 - RNA, 21 nt, Human
agggacgcuacccgggaaggg

SEQ ID NO: 1831203 - RNA, 20 nt, Human
agggacucaucauuuccauu

SEQ ID NO: 1831204 - RNA, 18 nt, Human
aggcugccucucccauca

SEQ ID NO: 1831205 - RNA, 15 nt, Human
aggaacuacugagga

SEQ ID NO: 1831206 - RNA, 20 nt, Human
aggaccccuccaugugggcu

SEQ ID NO: 1831207 - RNA, 18 nt, Human
aggagaggggcacagggu

SEQ ID NO: 1831208 - RNA, 16 nt, Human
aggagaggggcacagg

SEQ ID NO: 1831209 - RNA, 14 nt, Human
aggagaggggcaca

SEQ ID NO: 1831210 - RNA, 15 nt, Human
aggagagcuagcagc

SEQ ID NO: 1831211 - RNA, 20 nt, Human
aggaccucaggugagaagca

SEQ ID NO: 1831212 - RNA, 14 nt, Human
aggaccucagguga

SEQ ID NO: 1831213 - RNA, 17 nt, Human
aggacccggaggggccu

SEQ ID NO: 1831214 - RNA, 22 nt, Human
aggcacugcugcccagccucca

SEQ ID NO: 1831215 - RNA, 16 nt, Human
aggcacugcugcccag

SEQ ID NO: 1831216 - RNA, 14 nt, Human
aggcacugcugccc

SEQ ID NO: 1831217 - RNA, 12 nt, Human
aggauucuuccu

SEQ ID NO: 1831218 - RNA, 16 nt, Human
aggauucuuccucccu

SEQ ID NO: 1831219 - RNA, 17 nt, Human
aggaggggauagagaga

SEQ ID NO: 1831220 - RNA, 17 nt, Human
aggauguugaaaaaguu

SEQ ID NO: 1831221 - RNA, 14 nt, Human
aggauguugaaaaa

SEQ ID NO: 1831222 - RNA, 20 nt, Human
aggauguucugggacacagu

SEQ ID NO: 1831223 - RNA, 15 nt, Human
aggaaaaacugauuu

SEQ ID NO: 1831224 - RNA, 13 nt, Human
aggaaaaacugau

SEQ ID NO: 1831225 - RNA, 15 nt, Human
agcuuuucccuuuuu

SEQ ID NO: 1831226 - RNA, 16 nt, Human
agcuuuucccuucuuu

SEQ ID NO: 1831227 - RNA, 21 nt, Human
agcuuuuaugugaaacauguu

SEQ ID NO: 1831228 - RNA, 13 nt, Human
agcuuuucccuuc

SEQ ID NO: 1831229 - RNA, 23 nt, Human
agcuucuguugcugccucaugcu

SEQ ID NO: 1831230 - RNA, 22 nt, Human
aggaacguaaucguguccccua

SEQ ID NO: 1831231 - RNA, 17 nt, Human
aggaaauccaggguggu

SEQ ID NO: 1831232 - RNA, 15 nt, Human
aggaaauccagggug

SEQ ID NO: 1831233 - RNA, 22 nt, Human
agcuucuguugcugccucaugc

SEQ ID NO: 1831234 - RNA, 21 nt, Human
agcuucuguugcugccucaug

SEQ ID NO: 1831235 - RNA, 20 nt, Human
agcuucuguugcugccucau

SEQ ID NO: 1831236 - RNA, 17 nt, Human
agcugggugucaagagg

SEQ ID NO: 1831237 - RNA, 22 nt, Human
agcugggugucaagagggucug

SEQ ID NO: 1831238 - RNA, 21 nt, Human
agcuggucccacucaguccau

SEQ ID NO: 1831239 - RNA, 20 nt, Human
cucuucaacugaccagccuc

SEQ ID NO: 1831240 - RNA, 17 nt, Human
cucuucaacugaccagc

SEQ ID NO: 1831241 - RNA, 16 nt, Human
cucuucaacugaccag

SEQ ID NO: 1831242 - RNA, 18 nt, Human
cucuucagaucucuaacu

SEQ ID NO: 1831243 - RNA, 19 nt, Human
cucuucagaucucuaacuu

SEQ ID NO: 1831244 - RNA, 14 nt, Human
cucuucaaucucuu

SEQ ID NO: 1831245 - RNA, 14 nt, Human
cucuuauugcccac

SEQ ID NO: 1831246 - RNA, 15 nt, Human
cucuuauugcccacg

SEQ ID NO: 1831247 - RNA, 19 nt, Human
cucuuauugcccacgcugg

SEQ ID NO: 1831248 - RNA, 20 nt, Human
cucuuauugcccacgcugga

SEQ ID NO: 1831249 - RNA, 13 nt, Human
cucuuauugccca

SEQ ID NO: 1831250 - RNA, 20 nt, Human
cucugcacuccccugcuggg

SEQ ID NO: 1831251 - RNA, 18 nt, Human
cucugcacuccccugcug

SEQ ID NO: 1831252 - RNA, 21 nt, Human
cucugcacuccccugcugggu

SEQ ID NO: 1831253 - RNA, 13 nt, Human
cucugcagcaaua

SEQ ID NO: 1831254 - RNA, 17 nt, Human
cucugcaggucccuaau

SEQ ID NO: 1831255 - RNA, 16 nt, Human
cucugcaggucccuaa

SEQ ID NO: 1831256 - RNA, 15 nt, Human
cucugcaggucccua

SEQ ID NO: 1831257 - RNA, 14 nt, Human
cucugcaggucccu

SEQ ID NO: 1831258 - RNA, 13 nt, Human
cucugcuccucuc

SEQ ID NO: 1831259 - RNA, 18 nt, Human
cucugcuccucuccccag

SEQ ID NO: 1831260 - RNA, 20 nt, Human
cucugcuccucuccccagca

SEQ ID NO: 1831261 - RNA, 14 nt, Human
cucugguccauaga

SEQ ID NO: 1831262 - RNA, 13 nt, Human
cucugcugacaga

SEQ ID NO: 1831263 - RNA, 14 nt, Human
cucugcugacagac

SEQ ID NO: 1831264 - RNA, 16 nt, Human
cucugcugacagacac

SEQ ID NO: 1831265 - RNA, 12 nt, Human
cucuguccaggc

SEQ ID NO: 1831266 - RNA, 15 nt, Human
cucugguuaucuaau

SEQ ID NO: 1831267 - RNA, 21 nt, Human
cucuugaugccuggcggggug

SEQ ID NO: 1831268 - RNA, 16 nt, Human
cucuugaugccuggcg

SEQ ID NO: 1831269 - RNA, 15 nt, Human
cucuugaugccuggc

SEQ ID NO: 1831270 - RNA, 13 nt, Human
cucuugaugccug

SEQ ID NO: 1831271 - RNA, 22 nt, Human
cugaaaauugaugggauuuggu

SEQ ID NO: 1831272 - RNA, 22 nt, Human
cugaagcuaucguaaaauuaag

SEQ ID NO: 1831273 - RNA, 21 nt, Human
cugaagcuaucguaaaauuaa

SEQ ID NO: 1831274 - RNA, 23 nt, Human
cugaaggacauugcggacagcca

SEQ ID NO: 1831275 - RNA, 21 nt, Human
cugaaggccccgcccaggcuu

SEQ ID NO: 1831276 - RNA, 17 nt, Human
cugaaggcuggguucug

SEQ ID NO: 1831277 - RNA, 19 nt, Human
cugaaggccccgcccaggc

SEQ ID NO: 1831278 - RNA, 23 nt, Human
cugacaacacucauugaccugag

SEQ ID NO: 1831279 - RNA, 22 nt, Human
cugacaacacucauugaccuga

SEQ ID NO: 1831280 - RNA, 23 nt, Human
cucuugagccuugaacuuugacc

SEQ ID NO: 1831281 - RNA, 18 nt, Human
cucuugagccuugaacuu

SEQ ID NO: 1831282 - RNA, 16 nt, Human
cucuugagccuugaac

SEQ ID NO: 1831283 - RNA, 17 nt, Human
cucuugagccuugaacu

SEQ ID NO: 1831284 - RNA, 20 nt, Human
cugaguagcugggauuacag

SEQ ID NO: 1831285 - RNA, 15 nt, Human
cugaguagcugggau

SEQ ID NO: 1831286 - RNA, 14 nt, Human
cugaguagcuggga

SEQ ID NO: 1831287 - RNA, 20 nt, Human
cugaguagcuggauuacagg

SEQ ID NO: 1831288 - RNA, 14 nt, Human
cugaggaccagcca

SEQ ID NO: 1831289 - RNA, 22 nt, Human
cugaggacuuaaaauauuccug

SEQ ID NO: 1831290 - RNA, 18 nt, Human
cugaguacguugugcauu

SEQ ID NO: 1831291 - RNA, 17 nt, Human
cugaguacguugugcau

SEQ ID NO: 1831292 - RNA, 19 nt, Human
cugaguacguugugcauuu

SEQ ID NO: 1831293 - RNA, 20 nt, Human
cugaguacguugugcauuug

SEQ ID NO: 1831294 - RNA, 12 nt, Human
cugaggugggag

SEQ ID NO: 1831295 - RNA, 21 nt, Human
cugaguacguugugcauuugg

SEQ ID NO: 1831296 - RNA, 19 nt, Human
cugaguagcuggauuacag

SEQ ID NO: 1831297 - RNA, 15 nt, Human
cugagcuuucugcua

SEQ ID NO: 1831298 - RNA, 14 nt, Human
cugagcuuucugcu

SEQ ID NO: 1831299 - RNA, 21 nt, Human
cugagaucaaaacgguuuuac

SEQ ID NO: 1831300 - RNA, 23 nt, Human
cugaggacacuaaccacgcugga

SEQ ID NO: 1831301 - RNA, 21 nt, Human
cugaggaauccagacccggcu

SEQ ID NO: 1831302 - RNA, 20 nt, Human
cugaggacacuaaccacgcu

SEQ ID NO: 1831303 - RNA, 17 nt, Human
cugaggaauccagaccc

SEQ ID NO: 1831304 - RNA, 20 nt, Human
cugaggaauccagacccggc

SEQ ID NO: 1831305 - RNA, 22 nt, Human
cugagacucgcgacaaugcaaa

SEQ ID NO: 1831306 - RNA, 17 nt, Human
cugagaguagagucacu

SEQ ID NO: 1831307 - RNA, 21 nt, Human
cugagaggacuuuucuuugug

SEQ ID NO: 1831308 - RNA, 22 nt, Human
cugagaggacuuuucuuugugg

SEQ ID NO: 1831309 - RNA, 22 nt, Human
cugacccaugcugcccugugag

SEQ ID NO: 1831310 - RNA, 21 nt, Human
cugacccaugcugcccuguga

SEQ ID NO: 1831311 - RNA, 21 nt, Human
cugagacucgcgacaaugcaa

SEQ ID NO: 1831312 - RNA, 23 nt, Human
cugagacagcccgggcucugccu

SEQ ID NO: 1831313 - RNA, 19 nt, Human
cugacaacagacuucugaa

SEQ ID NO: 1831314 - RNA, 18 nt, Human
cugacaacagacuucuga

SEQ ID NO: 1831315 - RNA, 15 nt, Human
cugacaacagacuuc

SEQ ID NO: 1831316 - RNA, 15 nt, Human
cuccucucugcccua

SEQ ID NO: 1831317 - RNA, 14 nt, Human
cuccucucugcccu

SEQ ID NO: 1831318 - RNA, 13 nt, Human
cuccucucugccc

SEQ ID NO: 1831319 - RNA, 18 nt, Human
cuccucugcugcuggcug

SEQ ID NO: 1831320 - RNA, 16 nt, Human
cuccucugcugcuggc

SEQ ID NO: 1831321 - RNA, 19 nt, Human
cuccucucugcccuaaugc

SEQ ID NO: 1831322 - RNA, 18 nt, Human
cuccuggcccacugcauc

SEQ ID NO: 1831323 - RNA, 16 nt, Human
cuccuggcccacugca

SEQ ID NO: 1831324 - RNA, 15 nt, Human
cuccuggacuccugc

SEQ ID NO: 1831325 - RNA, 23 nt, Human
cuccucuucaacugaccagccuc

SEQ ID NO: 1831326 - RNA, 18 nt, Human
cuccucuucaacugacca

SEQ ID NO: 1831327 - RNA, 20 nt, Human
cucccccagccccauccucu

SEQ ID NO: 1831328 - RNA, 15 nt, Human
cucccccagccccau

SEQ ID NO: 1831329 - RNA, 22 nt, Human
cucccccagccccauccucugu

SEQ ID NO: 1831330 - RNA, 13 nt, Human
cucccccaucucu

SEQ ID NO: 1831331 - RNA, 22 nt, Human
cuccuggggguucuuucuuccu

SEQ ID NO: 1831332 - RNA, 20 nt, Human
cuccuggggguucuuucuuc

SEQ ID NO: 1831333 - RNA, 18 nt, Human
cuccuggggguucuuucu

SEQ ID NO: 1831334 - RNA, 23 nt, Human
cuccuggggguucuuucuuccuc

SEQ ID NO: 1831335 - RNA, 13 nt, Human
cucgaacuggcug

SEQ ID NO: 1831336 - RNA, 14 nt, Human
cucgaacuggcugc

SEQ ID NO: 1831337 - RNA, 15 nt, Human
cucgaacuggcugca

SEQ ID NO: 1831338 - RNA, 21 nt, Human
cucgugguaggacuguagaaa

SEQ ID NO: 1831339 - RNA, 15 nt, Human
cucuaucaccaagga

SEQ ID NO: 1831340 - RNA, 13 nt, Human
cucagucucccuc

SEQ ID NO: 1831341 - RNA, 17 nt, Human
cucagucucccucccuu

SEQ ID NO: 1831342 - RNA, 16 nt, Human
cucagucucccucccu

SEQ ID NO: 1831343 - RNA, 15 nt, Human
cucagucucccuccc

SEQ ID NO: 1831344 - RNA, 13 nt, Human
cuccacuuggucu

SEQ ID NO: 1831345 - RNA, 15 nt, Human
cuccacuuggucugu

SEQ ID NO: 1831346 - RNA, 17 nt, Human
cuccaagcucccaggca

SEQ ID NO: 1831347 - RNA, 16 nt, Human
cuccacuggauggagg

SEQ ID NO: 1831348 - RNA, 16 nt, Human
cuccacuuggucugug

SEQ ID NO: 1831349 - RNA, 17 nt, Human
cuccacuuggucuguga

SEQ ID NO: 1831350 - RNA, 21 nt, Human
cuccacuuggucugugagaug

SEQ ID NO: 1831351 - RNA, 22 nt, Human
cuccacuuggucugugagaugc

SEQ ID NO: 1831352 - RNA, 16 nt, Human
cuccaagcucccaggc

SEQ ID NO: 1831353 - RNA, 15 nt, Human
cuccaagcucccagg

SEQ ID NO: 1831354 - RNA, 14 nt, Human
cuccaagcucccag

SEQ ID NO: 1831355 - RNA, 13 nt, Human
cuccaagcuccca

SEQ ID NO: 1831356 - RNA, 14 nt, Human
cuccaagcuccauc

SEQ ID NO: 1831357 - RNA, 19 nt, Human
cuccaagcuccaucuccac

SEQ ID NO: 1831358 - RNA, 18 nt, Human
cuccaagcuccaucucca

SEQ ID NO: 1831359 - RNA, 24 nt, Human
cuccaagcaggacauggacaagga

SEQ ID NO: 1831360 - RNA, 22 nt, Human
cuccaagcaggacauggacaag

SEQ ID NO: 1831361 - RNA, 14 nt, Human
cuccaagcaggaca

SEQ ID NO: 1831362 - RNA, 13 nt, Human
cuccaagcaggac

SEQ ID NO: 1831363 - RNA, 22 nt, Human
cuccaagaccuucuccuucacc

SEQ ID NO: 1831364 - RNA, 15 nt, Human
cuccaagaccuucuc

SEQ ID NO: 1831365 - RNA, 12 nt, Human
cucaugccucag

SEQ ID NO: 1831366 - RNA, 16 nt, Human
cucaugccucagccuc

SEQ ID NO: 1831367 - RNA, 23 nt, Human
cuccacuuggucugugagaugcu

SEQ ID NO: 1831368 - RNA, 19 nt, Human
cuccacuuucuagccagag

SEQ ID NO: 1831369 - RNA, 16 nt, Human
cuccacuuucuagcca

SEQ ID NO: 1831370 - RNA, 20 nt, Human
cuccacuuucuagccagagg

SEQ ID NO: 1831371 - RNA, 16 nt, Human
cggagucccaccuugg

SEQ ID NO: 1831372 - RNA, 14 nt, Human
cggggacagcuccu

SEQ ID NO: 1831373 - RNA, 17 nt, Human
cgggcucugccucccau

SEQ ID NO: 1831374 - RNA, 18 nt, Human
cgguguggagaagcggcu

SEQ ID NO: 1831375 - RNA, 15 nt, Human
cggggacagcuccuu

SEQ ID NO: 1831376 - RNA, 16 nt, Human
cgggcucugccuccca

SEQ ID NO: 1831377 - RNA, 14 nt, Human
cgggcucugccucc

SEQ ID NO: 1831378 - RNA, 15 nt, Human
cgggcucagcaaaag

SEQ ID NO: 1831379 - RNA, 11 nt, Human
cgggcucagca

SEQ ID NO: 1831380 - RNA, 17 nt, Human
cgggccacagagaaagu

SEQ ID NO: 1831381 - RNA, 12 nt, Human
cgggccacagag

SEQ ID NO: 1831382 - RNA, 14 nt, Human
cgggccacagagaa

SEQ ID NO: 1831383 - RNA, 13 nt, Human
cggcuccaggcuc

SEQ ID NO: 1831384 - RNA, 14 nt, Human
cggcuccaggcucc

SEQ ID NO: 1831385 - RNA, 15 nt, Human
cggcuccaggcuccu

SEQ ID NO: 1831386 - RNA, 16 nt, Human
cggcuccaggcuccuu

SEQ ID NO: 1831387 - RNA, 18 nt, Human
cggagucccaccuuggcu

SEQ ID NO: 1831388 - RNA, 20 nt, Human
cggagucccaccuuggcugc

SEQ ID NO: 1831389 - RNA, 15 nt, Human
cggcucacugcagcc

SEQ ID NO: 1831390 - RNA, 14 nt, Human
cggcucacugcagc

SEQ ID NO: 1831391 - RNA, 16 nt, Human
cggcucacugcagccu

SEQ ID NO: 1831392 - RNA, 17 nt, Human
cggcucacugcagccuc

SEQ ID NO: 1831393 - RNA, 12 nt, Human
cggcuccaggcu

SEQ ID NO: 1831394 - RNA, 16 nt, Human
cgguuuuacugcagcu

SEQ ID NO: 1831395 - RNA, 23 nt, Human
cgguguuuaagacauuuuuggaa

SEQ ID NO: 1831396 - RNA, 14 nt, Human
cguaaaauuaagaa

SEQ ID NO: 1831397 - RNA, 16 nt, Human
cguaaagcuagaaaug

SEQ ID NO: 1831398 - RNA, 16 nt, Human
cgugaguccuggcaug

SEQ ID NO: 1831399 - RNA, 17 nt, Human
cgugaggccagagacac

SEQ ID NO: 1831400 - RNA, 17 nt, Human
cgugaguccuggcaugg

SEQ ID NO: 1831401 - RNA, 20 nt, Human
cguguaaccauggacccaau

SEQ ID NO: 1831402 - RNA, 18 nt, Human
cgugauuuugcuguagaa

SEQ ID NO: 1831403 - RNA, 14 nt, Human
cgugcacacaccag

SEQ ID NO: 1831404 - RNA, 14 nt, Human
cgauagugguggug

SEQ ID NO: 1831405 - RNA, 13 nt, Human
cgcaggcuggccc

SEQ ID NO: 1831406 - RNA, 22 nt, Human
cgcaggauucuuccucccuccc

SEQ ID NO: 1831407 - RNA, 13 nt, Human
cgccucugcauuc

SEQ ID NO: 1831408 - RNA, 17 nt, Human
cgccagauucuuuccug

SEQ ID NO: 1831409 - RNA, 17 nt, Human
cgacugcccggcagggu

SEQ ID NO: 1831410 - RNA, 17 nt, Human
cgacugccaucuuggac

SEQ ID NO: 1831411 - RNA, 20 nt, Human
cgacccuugccgucuaccug

SEQ ID NO: 1831412 - RNA, 19 nt, Human
cgacccuugccgucuaccu

SEQ ID NO: 1831413 - RNA, 12 nt, Human
cgacaaugcaaa

SEQ ID NO: 1831414 - RNA, 13 nt, Human
cgacaaugcaaac

SEQ ID NO: 1831415 - RNA, 14 nt, Human
cgacagccuggcac

SEQ ID NO: 1831416 - RNA, 13 nt, Human
cgacagccuggca

SEQ ID NO: 1831417 - RNA, 12 nt, Human
cgacagccuggc

SEQ ID NO: 1831418 - RNA, 21 nt, Human
ccuuuuuuagaguugauacua

SEQ ID NO: 1831419 - RNA, 16 nt, Human
ccuugccgucuaccug

SEQ ID NO: 1831420 - RNA, 17 nt, Human
ccuuuugagugccuuac

SEQ ID NO: 1831421 - RNA, 15 nt, Human
ccuuuugagugccuu

SEQ ID NO: 1831422 - RNA, 15 nt, Human
ccuuucacaaccuuc

SEQ ID NO: 1831423 - RNA, 21 nt, Human
ccuuucaauaggaaaaacuga

SEQ ID NO: 1831424 - RNA, 15 nt, Human
cuagccagaggagag

SEQ ID NO: 1831425 - RNA, 13 nt, Human
cuagccagaggag

SEQ ID NO: 1831426 - RNA, 12 nt, Human
cuagccagagga

SEQ ID NO: 1831427 - RNA, 23 nt, Human
cuaguuguuugauucagacagcu

SEQ ID NO: 1831428 - RNA, 22 nt, Human
cuaguuguuugauucagacagc

SEQ ID NO: 1831429 - RNA, 13 nt, Human
cuaguuugauuaa

SEQ ID NO: 1831430 - RNA, 15 nt, Human
cuaguuugauuaaau

SEQ ID NO: 1831431 - RNA, 22 nt, Human
cuaguuugauuaaauucuugca

SEQ ID NO: 1831432 - RNA, 21 nt, Human
cuaguuugauuaaauucuugc

SEQ ID NO: 1831433 - RNA, 18 nt, Human
cuaucaugucaaacguga

SEQ ID NO: 1831434 - RNA, 15 nt, Human
cuaucucccccagcc

SEQ ID NO: 1831435 - RNA, 14 nt, Human
cuaucuaaauguug

SEQ ID NO: 1831436 - RNA, 17 nt, Human
cuaucguaaaauuaaga

SEQ ID NO: 1831437 - RNA, 18 nt, Human
cuaucguaaaauuaagaa

SEQ ID NO: 1831438 - RNA, 17 nt, Human
cucaaaaaaagaaaaag

SEQ ID NO: 1831439 - RNA, 18 nt, Human
cucaaaagcugggcaggu

SEQ ID NO: 1831440 - RNA, 17 nt, Human
cuaucucccccagcccc

SEQ ID NO: 1831441 - RNA, 16 nt, Human
cuaucucccccagccc

SEQ ID NO: 1831442 - RNA, 18 nt, Human
cuaucucccccagcccca

SEQ ID NO: 1831443 - RNA, 11 nt, Human
cucacaaaaga

SEQ ID NO: 1831444 - RNA, 13 nt, Human
cucaaugcacuga

SEQ ID NO: 1831445 - RNA, 15 nt, Human
cucaaugcacugaca

SEQ ID NO: 1831446 - RNA, 14 nt, Human
cucaauaaaguaca

SEQ ID NO: 1831447 - RNA, 14 nt, Human
cucaaacuccugac

SEQ ID NO: 1831448 - RNA, 13 nt, Human
cucaaacuccuga

SEQ ID NO: 1831449 - RNA, 20 nt, Human
cucaaacucuugaccucagg

SEQ ID NO: 1831450 - RNA, 11 nt, Human
cgugugugugu

SEQ ID NO: 1831451 - RNA, 23 nt, Human
cuaaguuuuuauggcuuuugugc

SEQ ID NO: 1831452 - RNA, 21 nt, Human
cuaagugguacuaacuuuccu

SEQ ID NO: 1831453 - RNA, 20 nt, Human
cuaaguuuuuauggcuuuug

SEQ ID NO: 1831454 - RNA, 23 nt, Human
cuaagugauccucccaccucagc

SEQ ID NO: 1831455 - RNA, 19 nt, Human
cuacaguccucccaucuca

SEQ ID NO: 1831456 - RNA, 22 nt, Human
cuacaguugaaaaacagcugag

SEQ ID NO: 1831457 - RNA, 13 nt, Human
cuacaguguacag

SEQ ID NO: 1831458 - RNA, 14 nt, Human
cuacaguguacagu

SEQ ID NO: 1831459 - RNA, 21 nt, Human
cuacaguugaaaaacagcuga

SEQ ID NO: 1831460 - RNA, 19 nt, Human
cuacaguugaaaaacagcu

SEQ ID NO: 1831461 - RNA, 20 nt, Human
cuacaguccucccaucucac

SEQ ID NO: 1831462 - RNA, 20 nt, Human
cuacaugagguacugagagu

SEQ ID NO: 1831463 - RNA, 18 nt, Human
cuacaugagguacugaga

SEQ ID NO: 1831464 - RNA, 17 nt, Human
cuacguuaccaggcagg

SEQ ID NO: 1831465 - RNA, 17 nt, Human
cuaccuuuguauucucu

SEQ ID NO: 1831466 - RNA, 12 nt, Human
cuagaacucccu

SEQ ID NO: 1831467 - RNA, 13 nt, Human
cuagaacucccuu

SEQ ID NO: 1831468 - RNA, 22 nt, Human
cuagaagauuuugaaauuuuua

SEQ ID NO: 1831469 - RNA, 21 nt, Human
cuagcauacguacacauuuua

SEQ ID NO: 1831470 - RNA, 23 nt, Human
cuagcauacguacacauuuuauu

SEQ ID NO: 1831471 - RNA, 11 nt, Human
ccucuuucccu

SEQ ID NO: 1831472 - RNA, 19 nt, Human
ccugccucgaacuggcugc

SEQ ID NO: 1831473 - RNA, 19 nt, Human
ccugcugcaguugccaguc

SEQ ID NO: 1831474 - RNA, 17 nt, Human
ccugcugcaguugccag

SEQ ID NO: 1831475 - RNA, 21 nt, Human
ccugccucgaacuggcugcaa

SEQ ID NO: 1831476 - RNA, 23 nt, Human
ccugccucgaacuggcugcaaag

SEQ ID NO: 1831477 - RNA, 20 nt, Human
ccugcugcaguugccaguca

SEQ ID NO: 1831478 - RNA, 21 nt, Human
ccugcugcaguugccagucac

SEQ ID NO: 1831479 - RNA, 20 nt, Human
ccugcccaccuggccucugc

SEQ ID NO: 1831480 - RNA, 14 nt, Human
ccugcccaccuggc

SEQ ID NO: 1831481 - RNA, 13 nt, Human
ccugcccaccugg

SEQ ID NO: 1831482 - RNA, 12 nt, Human
ccugcccaccug

SEQ ID NO: 1831483 - RNA, 13 nt, Human
ccugcccaggccc

SEQ ID NO: 1831484 - RNA, 17 nt, Human
ccugccccagggcuccc

SEQ ID NO: 1831485 - RNA, 13 nt, Human
ccucuuucccucc

SEQ ID NO: 1831486 - RNA, 16 nt, Human
ccucuuucccucccuu

SEQ ID NO: 1831487 - RNA, 21 nt, Human
ccugaguagcugggauuacag

SEQ ID NO: 1831488 - RNA, 16 nt, Human
ccugcacuugcagacu

SEQ ID NO: 1831489 - RNA, 17 nt, Human
ccugcacuugcagacuc

SEQ ID NO: 1831490 - RNA, 18 nt, Human
ccugcacuugcagacucu

SEQ ID NO: 1831491 - RNA, 19 nt, Human
ccugcacuugcagacucua

SEQ ID NO: 1831492 - RNA, 21 nt, Human
ccuggccucugcacuccccug

SEQ ID NO: 1831493 - RNA, 20 nt, Human
ccuggccucugcacuccccu

SEQ ID NO: 1831494 - RNA, 22 nt, Human
ccuggccuagcauacguacaca

SEQ ID NO: 1831495 - RNA, 22 nt, Human
ccuggccucugcacuccccugc

SEQ ID NO: 1831496 - RNA, 20 nt, Human
ccugggccccaguuguauuu

SEQ ID NO: 1831497 - RNA, 15 nt, Human
ccuguaaucacagcu

SEQ ID NO: 1831498 - RNA, 17 nt, Human
ccuguccugccuaaggc

SEQ ID NO: 1831499 - RNA, 19 nt, Human
ccuguccugccuaaggcug

SEQ ID NO: 1831500 - RNA, 15 nt, Human
ccugguuuccugccc

SEQ ID NO: 1831501 - RNA, 14 nt, Human
ccugguuuccugcc

SEQ ID NO: 1831502 - RNA, 13 nt, Human
ccugguuuccugc

SEQ ID NO: 1831503 - RNA, 18 nt, Human
ccugggggcugggcagag

SEQ ID NO: 1831504 - RNA, 21 nt, Human
ccugguggcagugggagcugc

SEQ ID NO: 1831505 - RNA, 18 nt, Human
ccugugacuucagcucug

SEQ ID NO: 1831506 - RNA, 17 nt, Human
ccugugaacugaacucu

SEQ ID NO: 1831507 - RNA, 16 nt, Human
ccugugaacugaacuc

SEQ ID NO: 1831508 - RNA, 22 nt, Human
ccugucuaaugaaaccuguguc

SEQ ID NO: 1831509 - RNA, 15 nt, Human
ccugucuaaugaaac

SEQ ID NO: 1831510 - RNA, 23 nt, Human
cccugucucaaaaaaagaaaaag

SEQ ID NO: 1831511 - RNA, 20 nt, Human
cccugucucaaaaaaagaaa

SEQ ID NO: 1831512 - RNA, 16 nt, Human
cccugucuaaugaaac

SEQ ID NO: 1831513 - RNA, 17 nt, Human
cccugugauggggcccu

SEQ ID NO: 1831514 - RNA, 19 nt, Human
cccugugauggggcccugc

SEQ ID NO: 1831515 - RNA, 18 nt, Human
cccugugauggggcccug

SEQ ID NO: 1831516 - RNA, 20 nt, Human
cccugugauggggcccugcc

SEQ ID NO: 1831517 - RNA, 13 nt, Human
cccuucgcuccug

SEQ ID NO: 1831518 - RNA, 13 nt, Human
ccggccccugcug

SEQ ID NO: 1831519 - RNA, 23 nt, Human
ccgcaggauuugggcucuuggaa

SEQ ID NO: 1831520 - RNA, 22 nt, Human
cccuucucuccagccccuggau

SEQ ID NO: 1831521 - RNA, 21 nt, Human
cccuucucuccagccccugga

SEQ ID NO: 1831522 - RNA, 14 nt, Human
cccuucgcuccugu

SEQ ID NO: 1831523 - RNA, 15 nt, Human
cccuucgcuccugug

SEQ ID NO: 1831524 - RNA, 14 nt, Human
ccggccccugcugg

SEQ ID NO: 1831525 - RNA, 13 nt, Human
ccucccaucucac

SEQ ID NO: 1831526 - RNA, 16 nt, Human
ccucccaucucacaca

SEQ ID NO: 1831527 - RNA, 23 nt, Human
ccucauuuuugaauacaggcaua

SEQ ID NO: 1831528 - RNA, 15 nt, Human
ccucccaccucagcc

SEQ ID NO: 1831529 - RNA, 17 nt, Human
ccucccaccucagccuc

SEQ ID NO: 1831530 - RNA, 13 nt, Human
cccucagagccac

SEQ ID NO: 1831531 - RNA, 17 nt, Human
ccccuucugacccaugc

SEQ ID NO: 1831532 - RNA, 22 nt, Human
cccuauccuacuuccccuuccu

SEQ ID NO: 1831533 - RNA, 12 nt, Human
cccgggaagggg

SEQ ID NO: 1831534 - RNA, 13 nt, Human
cccggcugcccuu

SEQ ID NO: 1831535 - RNA, 12 nt, Human
cccggcugcccu

SEQ ID NO: 1831536 - RNA, 12 nt, Human
cccggcugcgga

SEQ ID NO: 1831537 - RNA, 15 nt, Human
ccccauucugccugc

SEQ ID NO: 1831538 - RNA, 13 nt, Human
ccccauucugccu

SEQ ID NO: 1831539 - RNA, 14 nt, Human
ccccauucugccug

SEQ ID NO: 1831540 - RNA, 18 nt, Human
ccccugcacuccagccug

SEQ ID NO: 1831541 - RNA, 17 nt, Human
ccccugcaaagcccagc

SEQ ID NO: 1831542 - RNA, 16 nt, Human
ccccugcaaagcccag

SEQ ID NO: 1831543 - RNA, 15 nt, Human
ccccugcaaagccca

SEQ ID NO: 1831544 - RNA, 19 nt, Human
ccccuucgcuccugugucu

SEQ ID NO: 1831545 - RNA, 14 nt, Human
ccccuucgcuccug

SEQ ID NO: 1831546 - RNA, 15 nt, Human
ccccuucgcuccugu

SEQ ID NO: 1831547 - RNA, 17 nt, Human
ccccuucgcuccugugu

SEQ ID NO: 1831548 - RNA, 13 nt, Human
cccaguuguauuu

SEQ ID NO: 1831549 - RNA, 23 nt, Human
cccauaauuuuuuuuuuccuuuu

SEQ ID NO: 1831550 - RNA, 22 nt, Human
cccauaauuuuuuuuuuccuuu

SEQ ID NO: 1831551 - RNA, 23 nt, Human
cccauucugccugcccaggcccc

SEQ ID NO: 1831552 - RNA, 21 nt, Human
ccccagauugcaacaggcugg

SEQ ID NO: 1831553 - RNA, 22 nt, Human
ccccagauugcaacaggcuggg

SEQ ID NO: 1831554 - RNA, 23 nt, Human
ccccagauugcaacaggcugggc

SEQ ID NO: 1831555 - RNA, 17 nt, Human
ccccagcaagugagagc

SEQ ID NO: 1831556 - RNA, 21 nt, Human
ccccauccucuguacagagcc

SEQ ID NO: 1831557 - RNA, 19 nt, Human
ccccauccucuguacagag

SEQ ID NO: 1831558 - RNA, 22 nt, Human
ccccauccucuguacagagccc

SEQ ID NO: 1831559 - RNA, 19 nt, Human
ccccagcaagugagagcug

SEQ ID NO: 1831560 - RNA, 20 nt, Human
ccccagcaagugagagcugg

SEQ ID NO: 1831561 - RNA, 17 nt, Human
ccccauccucuguacag

SEQ ID NO: 1831562 - RNA, 21 nt, Human
ccccagcaagugagagcuggg

SEQ ID NO: 1831563 - RNA, 20 nt, Human
cccauucugccugcccaggc

SEQ ID NO: 1831564 - RNA, 21 nt, Human
cccauucugccugcccaggcc

SEQ ID NO: 1831565 - RNA, 22 nt, Human
cccauucugccugcccaggccc

SEQ ID NO: 1831566 - RNA, 17 nt, Human
cccagcccacuucugcc

SEQ ID NO: 1831567 - RNA, 14 nt, Human
cccagcccacuucu

SEQ ID NO: 1831568 - RNA, 21 nt, Human
cccaggcuggcgugcaguggu

SEQ ID NO: 1831569 - RNA, 20 nt, Human
cccaggcuuagucacugaga

SEQ ID NO: 1831570 - RNA, 15 nt, Human
cccaggcuuagucac

SEQ ID NO: 1831571 - RNA, 22 nt, Human
cccaggaaaggcuccaggagca

SEQ ID NO: 1831572 - RNA, 21 nt, Human
cccaggaaaggcuccaggagc

SEQ ID NO: 1831573 - RNA, 23 nt, Human
cccaggaaaggcuccaggagcag

SEQ ID NO: 1831574 - RNA, 19 nt, Human
cccaggaaaggcuccagga

SEQ ID NO: 1831575 - RNA, 22 nt, Human
cccagcuuaaaggggcuagagu

SEQ ID NO: 1831576 - RNA, 11 nt, Human
cccagcuguuu

SEQ ID NO: 1831577 - RNA, 21 nt, Human
cccagcugugcucuggacagg

SEQ ID NO: 1831578 - RNA, 23 nt, Human
cccagcugugcucuggacaggca

SEQ ID NO: 1831579 - RNA, 19 nt, Human
ccagcagagcaccuuagac

SEQ ID NO: 1831580 - RNA, 23 nt, Human
ccagcagagcaccuuagacaguc

SEQ ID NO: 1831581 - RNA, 21 nt, Human
ccagccccuggaugcagccuc

SEQ ID NO: 1831582 - RNA, 10 nt, Human
ccagccccuu

SEQ ID NO: 1831583 - RNA, 14 nt, Human
ccagcagccuggac

SEQ ID NO: 1831584 - RNA, 15 nt, Human
ccagcagccuggacc

SEQ ID NO: 1831585 - RNA, 20 nt, Human
ccagcagccuggacccugug

SEQ ID NO: 1831586 - RNA, 19 nt, Human
ccagcagccuggacccugu

SEQ ID NO: 1831587 - RNA, 23 nt, Human
ccaggaaaggcuccaggagcagc

SEQ ID NO: 1831588 - RNA, 22 nt, Human
ccaggaaaggcuccaggagcag

SEQ ID NO: 1831589 - RNA, 21 nt, Human
ccaggaaaggcuccaggagca

SEQ ID NO: 1831590 - RNA, 18 nt, Human
ccagcuugaaaccuucac

SEQ ID NO: 1831591 - RNA, 22 nt, Human
ccaggcugggagagccuuccag

SEQ ID NO: 1831592 - RNA, 21 nt, Human
ccaggcugggagagccuucca

SEQ ID NO: 1831593 - RNA, 18 nt, Human
ccaggcugggagagccuu

SEQ ID NO: 1831594 - RNA, 17 nt, Human
ccaggcugggagagccu

SEQ ID NO: 1831595 - RNA, 15 nt, Human
ccaggcugggagagc

SEQ ID NO: 1831596 - RNA, 22 nt, Human
ccaggauguacaaggacagccc

SEQ ID NO: 1831597 - RNA, 14 nt, Human
ccaggcugggagag

SEQ ID NO: 1831598 - RNA, 13 nt, Human
ccaggcugggaga

SEQ ID NO: 1831599 - RNA, 17 nt, Human
ccaggcaacuugggaac

SEQ ID NO: 1831600 - RNA, 14 nt, Human
ccagucccccugcc

SEQ ID NO: 1831601 - RNA, 21 nt, Human
ccagucaccccggccaccugc

SEQ ID NO: 1831602 - RNA, 20 nt, Human
ccagucaccccggccaccug

SEQ ID NO: 1831603 - RNA, 13 nt, Human
ccagucaccccgg

SEQ ID NO: 1831604 - RNA, 12 nt, Human
ccagucaccccg

SEQ ID NO: 1831605 - RNA, 17 nt, Human
ccaugggccuccugugu

SEQ ID NO: 1831606 - RNA, 14 nt, Human
ccaugggccuccug

SEQ ID NO: 1831607 - RNA, 15 nt, Human
ccaugggccuccugu

SEQ ID NO: 1831608 - RNA, 22 nt, Human
ccauccccuguagagugggagc

SEQ ID NO: 1831609 - RNA, 16 nt, Human
ccauccccuguagagu

SEQ ID NO: 1831610 - RNA, 14 nt, Human
ccaugagccucagc

SEQ ID NO: 1831611 - RNA, 18 nt, Human
ccaugagccucagcaucc

SEQ ID NO: 1831612 - RNA, 13 nt, Human
ccaugaguccccu

SEQ ID NO: 1831613 - RNA, 19 nt, Human
ccaugagccucagcauccu

SEQ ID NO: 1831614 - RNA, 15 nt, Human
ccaugaguccccugu

SEQ ID NO: 1831615 - RNA, 14 nt, Human
ccaugaguccccug

SEQ ID NO: 1831616 - RNA, 16 nt, Human
ccaugaguccccuguu

SEQ ID NO: 1831617 - RNA, 13 nt, Human
ccaugggccuccu

SEQ ID NO: 1831618 - RNA, 12 nt, Human
ccaucccagccc

SEQ ID NO: 1831619 - RNA, 23 nt, Human
ccaucccaaacccuucagugcca

SEQ ID NO: 1831620 - RNA, 20 nt, Human
ccauaauuuuuuuuuuccuu

SEQ ID NO: 1831621 - RNA, 12 nt, Human
auuucuguuuag

SEQ ID NO: 1831622 - RNA, 14 nt, Human
auuucuguuuagau

SEQ ID NO: 1831623 - RNA, 16 nt, Human
auuucuguuuagauaa

SEQ ID NO: 1831624 - RNA, 14 nt, Human
auuuaaugaaagac

SEQ ID NO: 1831625 - RNA, 15 nt, Human
auuucagauuuguga

SEQ ID NO: 1831626 - RNA, 16 nt, Human
auuucagcagcugcag

SEQ ID NO: 1831627 - RNA, 13 nt, Human
auuguacaguuuu

SEQ ID NO: 1831628 - RNA, 19 nt, Human
auuguucuuaguuugcagu

SEQ ID NO: 1831629 - RNA, 18 nt, Human
auugaugggauuugguca

SEQ ID NO: 1831630 - RNA, 13 nt, Human
auuguaaaauggu

SEQ ID NO: 1831631 - RNA, 22 nt, Human
auugauccagaaagaaaacuug

SEQ ID NO: 1831632 - RNA, 19 nt, Human
auugauccagaaagaaaac

SEQ ID NO: 1831633 - RNA, 18 nt, Human
auugauccagaaagaaaa

SEQ ID NO: 1831634 - RNA, 15 nt, Human
auuguaaggaaugau

SEQ ID NO: 1831635 - RNA, 18 nt, Human
auuguaagcaugcacaaa

SEQ ID NO: 1831636 - RNA, 16 nt, Human
auuguaaggaaugauu

SEQ ID NO: 1831637 - RNA, 17 nt, Human
auugauccagaaagaaa

SEQ ID NO: 1831638 - RNA, 16 nt, Human
auugauccagaaagaa

SEQ ID NO: 1831639 - RNA, 22 nt, Human
auucuuuccugaggcugggcuc

SEQ ID NO: 1831640 - RNA, 17 nt, Human
auucuuuccugaggcug

SEQ ID NO: 1831641 - RNA, 21 nt, Human
auuccugaugcuucuucagag

SEQ ID NO: 1831642 - RNA, 19 nt, Human
auucucuccuguaccucuu

SEQ ID NO: 1831643 - RNA, 21 nt, Human
auucucuccuguaccucuuga

SEQ ID NO: 1831644 - RNA, 17 nt, Human
auucuugccaaauauaa

SEQ ID NO: 1831645 - RNA, 19 nt, Human
auucauauuuacuucuuau

SEQ ID NO: 1831646 - RNA, 18 nt, Human
auucauauuuacuucuua

SEQ ID NO: 1831647 - RNA, 20 nt, Human
auucauauuuacuucuuaua

SEQ ID NO: 1831648 - RNA, 15 nt, Human
auuauguguguuuua

SEQ ID NO: 1831649 - RNA, 21 nt, Human
auuauguguguuuuaaaauga

SEQ ID NO: 1831650 - RNA, 20 nt, Human
auuauguguguuuuaaaaug

SEQ ID NO: 1831651 - RNA, 20 nt, Human
auuaaauucuugcaaaguau

SEQ ID NO: 1831652 - RNA, 14 nt, Human
auuaaauucuugca

SEQ ID NO: 1831653 - RNA, 18 nt, Human
auuaaauucuugcaaagu

SEQ ID NO: 1831654 - RNA, 18 nt, Human
auucacaagacccaaaag

SEQ ID NO: 1831655 - RNA, 20 nt, Human
caacaccuuguuucccucuc

SEQ ID NO: 1831656 - RNA, 22 nt, Human
caacaccucugcacaagcugca

SEQ ID NO: 1831657 - RNA, 21 nt, Human
caaaguacacuguuucaaacu

SEQ ID NO: 1831658 - RNA, 16 nt, Human
caaaguacacuguuuc

SEQ ID NO: 1831659 - RNA, 20 nt, Human
caaaguacacuguuucaaac

SEQ ID NO: 1831660 - RNA, 14 nt, Human
caaagaugcagccg

SEQ ID NO: 1831661 - RNA, 13 nt, Human
caaagaugcagcc

SEQ ID NO: 1831662 - RNA, 17 nt, Human
caaaucagcugcuacua

SEQ ID NO: 1831663 - RNA, 22 nt, Human
caaauccagccugcugccugcu

SEQ ID NO: 1831664 - RNA, 21 nt, Human
caaaucugcuuuuuaaagaau

SEQ ID NO: 1831665 - RNA, 13 nt, Human
caaaugcagcuuu

SEQ ID NO: 1831666 - RNA, 23 nt, Human
caacaaaccuguuucugcagcca

SEQ ID NO: 1831667 - RNA, 18 nt, Human
caaccacugcgaccacaa

SEQ ID NO: 1831668 - RNA, 13 nt, Human
caagacacaguga

SEQ ID NO: 1831669 - RNA, 19 nt, Human
caagacccuugugguccca

SEQ ID NO: 1831670 - RNA, 18 nt, Human
caagacccuugugguccc

SEQ ID NO: 1831671 - RNA, 22 nt, Human
caagacccuuguggucccaccc

SEQ ID NO: 1831672 - RNA, 15 nt, Human
caacucaccccagcc

SEQ ID NO: 1831673 - RNA, 13 nt, Human
caacucaccccag

SEQ ID NO: 1831674 - RNA, 16 nt, Human
caacucaccccagccc

SEQ ID NO: 1831675 - RNA, 17 nt, Human
caacucaccccagcccc

SEQ ID NO: 1831676 - RNA, 19 nt, Human
caacccaaauguucaucaa

SEQ ID NO: 1831677 - RNA, 14 nt, Human
caaccauuccccau

SEQ ID NO: 1831678 - RNA, 17 nt, Human
caacuaugauuuggaaa

SEQ ID NO: 1831679 - RNA, 22 nt, Human
caacuaugauuuggaaaauaaa

SEQ ID NO: 1831680 - RNA, 19 nt, Human
caacuaugauuuggaaaau

SEQ ID NO: 1831681 - RNA, 18 nt, Human
caacuaugauuuggaaaa

SEQ ID NO: 1831682 - RNA, 15 nt, Human
caacccccagccugc

SEQ ID NO: 1831683 - RNA, 16 nt, Human
caacccccagccugcu

SEQ ID NO: 1831684 - RNA, 17 nt, Human
caacccccagccugcua

SEQ ID NO: 1831685 - RNA, 15 nt, Human
caaaagcugggcagg

SEQ ID NO: 1831686 - RNA, 19 nt, Human
caaaagcugggcagguugg

SEQ ID NO: 1831687 - RNA, 13 nt, Human
auuuuuaagugcu

SEQ ID NO: 1831688 - RNA, 16 nt, Human
auuuuuuuuuccuuca

SEQ ID NO: 1831689 - RNA, 13 nt, Human
auuuuuuuuuccu

SEQ ID NO: 1831690 - RNA, 12 nt, Human
auuuuuuuuucc

SEQ ID NO: 1831691 - RNA, 17 nt, Human
auuuuuuuuuccuucag

SEQ ID NO: 1831692 - RNA, 20 nt, Human
auuuuuaaagaaaaguuuug

SEQ ID NO: 1831693 - RNA, 13 nt, Human
auuuuuaaagaaa

SEQ ID NO: 1831694 - RNA, 13 nt, Human
auuuguuugaacu

SEQ ID NO: 1831695 - RNA, 20 nt, Human
auuuguuugaacugauaaag

SEQ ID NO: 1831696 - RNA, 14 nt, Human
auuuguuugaacug

SEQ ID NO: 1831697 - RNA, 16 nt, Human
auuuguuugaacugau

SEQ ID NO: 1831698 - RNA, 18 nt, Human
auuuugauccaagcuggu

SEQ ID NO: 1831699 - RNA, 16 nt, Human
cacagcuaacauggaa

SEQ ID NO: 1831700 - RNA, 15 nt, Human
cacagcuaacaugga

SEQ ID NO: 1831701 - RNA, 22 nt, Human
cacagacccugcccugugggcc

SEQ ID NO: 1831702 - RNA, 18 nt, Human
cacagacauacuaaccag

SEQ ID NO: 1831703 - RNA, 21 nt, Human
cacagacccugcccugugggc

SEQ ID NO: 1831704 - RNA, 20 nt, Human
cacagacccugcccuguggg

SEQ ID NO: 1831705 - RNA, 19 nt, Human
cacagacccugcccugugg

SEQ ID NO: 1831706 - RNA, 22 nt, Human
cacagcuaacauggaaguacua

SEQ ID NO: 1831707 - RNA, 20 nt, Human
cacagcucuguccugggagu

SEQ ID NO: 1831708 - RNA, 23 nt, Human
cacagcucuguccugggagugag

SEQ ID NO: 1831709 - RNA, 10 nt, Human
cacagcucuu

SEQ ID NO: 1831710 - RNA, 16 nt, Human
cacaguauuacuucug

SEQ ID NO: 1831711 - RNA, 18 nt, Human
cacaguauuacuucugcu

SEQ ID NO: 1831712 - RNA, 19 nt, Human
cacaguauuacuucugcua

SEQ ID NO: 1831713 - RNA, 16 nt, Human
cacccagcccacuucu

SEQ ID NO: 1831714 - RNA, 17 nt, Human
cacccagcccacuucug

SEQ ID NO: 1831715 - RNA, 12 nt, Human
caccagcagccu

SEQ ID NO: 1831716 - RNA, 14 nt, Human
caccagcagccugg

SEQ ID NO: 1831717 - RNA, 23 nt, Human
caccaacauacucccaucuguga

SEQ ID NO: 1831718 - RNA, 15 nt, Human
caccagcagccugga

SEQ ID NO: 1831719 - RNA, 21 nt, Human
caccagcccuuagcagggaaa

SEQ ID NO: 1831720 - RNA, 24 nt, Human
cacccaggagccccgaggccuucu

SEQ ID NO: 1831721 - RNA, 19 nt, Human
cacccagcccacuucugcc

SEQ ID NO: 1831722 - RNA, 20 nt, Human
cacccaggagccccgaggcc

SEQ ID NO: 1831723 - RNA, 23 nt, Human
cacccaggagccccgaggccuuc

SEQ ID NO: 1831724 - RNA, 21 nt, Human
caccaacauacucccaucugu

SEQ ID NO: 1831725 - RNA, 20 nt, Human
caccaacauacucccaucug

SEQ ID NO: 1831726 - RNA, 18 nt, Human
cacauuuuucagauauaa

SEQ ID NO: 1831727 - RNA, 13 nt, Human
cacauuuuucuua

SEQ ID NO: 1831728 - RNA, 14 nt, Human
cacauuuuucuuag

SEQ ID NO: 1831729 - RNA, 17 nt, Human
cacauuuuuuaaaugca

SEQ ID NO: 1831730 - RNA, 21 nt, Human
cacauuuuuuaaaugcaccug

SEQ ID NO: 1831731 - RNA, 15 nt, Human
cacauuuuauuuuau

SEQ ID NO: 1831732 - RNA, 14 nt, Human
cacauuuuucagau

SEQ ID NO: 1831733 - RNA, 19 nt, Human
cacaucuugcucugcugac

SEQ ID NO: 1831734 - RNA, 18 nt, Human
cacaucuugcucugcuga

SEQ ID NO: 1831735 - RNA, 20 nt, Human
cacaucagcacgauuucugu

SEQ ID NO: 1831736 - RNA, 21 nt, Human
cacaucagcacgauuucuguu

SEQ ID NO: 1831737 - RNA, 22 nt, Human
cacaucagcacgauuucuguuu

SEQ ID NO: 1831738 - RNA, 16 nt, Human
cacaucuugcucugcu

SEQ ID NO: 1831739 - RNA, 17 nt, Human
cacaucuugcucugcug

SEQ ID NO: 1831740 - RNA, 22 nt, Human
caaugcugugcccuaaagugua

SEQ ID NO: 1831741 - RNA, 17 nt, Human
caauucuccugccucag

SEQ ID NO: 1831742 - RNA, 19 nt, Human
caauucuccugccucagcc

SEQ ID NO: 1831743 - RNA, 22 nt, Human
caaugcuggcuguuggcugggg

SEQ ID NO: 1831744 - RNA, 23 nt, Human
caaugcuggcuguuggcuggggg

SEQ ID NO: 1831745 - RNA, 14 nt, Human
cacaagccuucggc

SEQ ID NO: 1831746 - RNA, 16 nt, Human
cacaagacccuugugg

SEQ ID NO: 1831747 - RNA, 14 nt, Human
cacaagacccuugu

SEQ ID NO: 1831748 - RNA, 12 nt, Human
caauuuaaaaaa

SEQ ID NO: 1831749 - RNA, 22 nt, Human
caaguaauccaccugccucggc

SEQ ID NO: 1831750 - RNA, 13 nt, Human
caaguauuauacc

SEQ ID NO: 1831751 - RNA, 15 nt, Human
caccuuuguccccac

SEQ ID NO: 1831752 - RNA, 14 nt, Human
caccuuugucccca

SEQ ID NO: 1831753 - RNA, 17 nt, Human
caccuuuguccccaccg

SEQ ID NO: 1831754 - RNA, 14 nt, Human
caccuuugaagaag

SEQ ID NO: 1831755 - RNA, 14 nt, Human
caccuuuauucugg

SEQ ID NO: 1831756 - RNA, 17 nt, Human
caccugccagggacaga

SEQ ID NO: 1831757 - RNA, 19 nt, Human
caccuugacagggcacacc

SEQ ID NO: 1831758 - RNA, 14 nt, Human
caccuuggcucaag

SEQ ID NO: 1831759 - RNA, 13 nt, Human
caccuuggcucaa

SEQ ID NO: 1831760 - RNA, 20 nt, Human
caccuaccaccacgcccggc

SEQ ID NO: 1831761 - RNA, 16 nt, Human
caccugccagggacag

SEQ ID NO: 1831762 - RNA, 14 nt, Human
caccugccagggac

SEQ ID NO: 1831763 - RNA, 21 nt, Human
caccuacaugagguacugaga

SEQ ID NO: 1831764 - RNA, 17 nt, Human
cacucuugaaaaaugca

SEQ ID NO: 1831765 - RNA, 17 nt, Human
cacucuuauugcccacg

SEQ ID NO: 1831766 - RNA, 18 nt, Human
cacucuuauugcccacgc

SEQ ID NO: 1831767 - RNA, 19 nt, Human
cacucuuauugcccacgcu

SEQ ID NO: 1831768 - RNA, 14 nt, Human
cacggccaggccag

SEQ ID NO: 1831769 - RNA, 15 nt, Human
cacggccaggccaga

SEQ ID NO: 1831770 - RNA, 16 nt, Human
cacggccaggccagag

SEQ ID NO: 1831771 - RNA, 20 nt, Human
cacggagggugacgggggug

SEQ ID NO: 1831772 - RNA, 23 nt, Human
cacuacggaauaguuggcuagga

SEQ ID NO: 1831773 - RNA, 15 nt, Human
cagaacacauaauuc

SEQ ID NO: 1831774 - RNA, 17 nt, Human
cagaaauguguuaucac

SEQ ID NO: 1831775 - RNA, 22 nt, Human
cagaauauuagugaccucagcu

SEQ ID NO: 1831776 - RNA, 21 nt, Human
cagaaguuucugccgcagccc

SEQ ID NO: 1831777 - RNA, 20 nt, Human
cagaaguuucugccgcagcc

SEQ ID NO: 1831778 - RNA, 22 nt, Human
cagaaguuucugccgcagcccu

SEQ ID NO: 1831779 - RNA, 22 nt, Human
cacugggcuuggggaccagagc

SEQ ID NO: 1831780 - RNA, 23 nt, Human
cacugggcuuggggaccagagcu

SEQ ID NO: 1831781 - RNA, 17 nt, Human
cacuggugacaugucuu

SEQ ID NO: 1831782 - RNA, 22 nt, Human
cacugguggcccgacagccugg

SEQ ID NO: 1831783 - RNA, 21 nt, Human
cacugguggcccgacagccug

SEQ ID NO: 1831784 - RNA, 13 nt, Human
cacugguggcccg

SEQ ID NO: 1831785 - RNA, 15 nt, Human
cacuguugcccaggc

SEQ ID NO: 1831786 - RNA, 16 nt, Human
cacuguugcccaggcu

SEQ ID NO: 1831787 - RNA, 17 nt, Human
cacuuggucugugagau

SEQ ID NO: 1831788 - RNA, 20 nt, Human
cacuuggucugugagaugcu

SEQ ID NO: 1831789 - RNA, 20 nt, Human
cacuuagaaauugcauuucc

SEQ ID NO: 1831790 - RNA, 19 nt, Human
cacuuagaaauugcauuuc

SEQ ID NO: 1831791 - RNA, 17 nt, Human
cacuuagaaauugcauu

SEQ ID NO: 1831792 - RNA, 19 nt, Human
cacuguuucaaacuuuacu

SEQ ID NO: 1831793 - RNA, 17 nt, Human
cacuguugcccaggcug

SEQ ID NO: 1831794 - RNA, 15 nt, Human
caggccacuugauga

SEQ ID NO: 1831795 - RNA, 18 nt, Human
caggcagauacaggaaaa

SEQ ID NO: 1831796 - RNA, 13 nt, Human
caggccagaggga

SEQ ID NO: 1831797 - RNA, 15 nt, Human
caggccagagggagu

SEQ ID NO: 1831798 - RNA, 23 nt, Human
caggccagcugcuugggcuucau

SEQ ID NO: 1831799 - RNA, 21 nt, Human
caggccagcugcuugggcuuc

SEQ ID NO: 1831800 - RNA, 19 nt, Human
caggccagcugcuugggcu

SEQ ID NO: 1831801 - RNA, 17 nt, Human
caggccagcugcuuggg

SEQ ID NO: 1831802 - RNA, 18 nt, Human
caggccaggcccucugcc

SEQ ID NO: 1831803 - RNA, 17 nt, Human
caggccaggcccucugc

SEQ ID NO: 1831804 - RNA, 19 nt, Human
caggccaggcccucugccc

SEQ ID NO: 1831805 - RNA, 20 nt, Human
caggccaggcccucugccca

SEQ ID NO: 1831806 - RNA, 16 nt, Human
caggccagagggagug

SEQ ID NO: 1831807 - RNA, 19 nt, Human
caggggaaaaucagccugc

SEQ ID NO: 1831808 - RNA, 20 nt, Human
caggggaaaaucagccugcu

SEQ ID NO: 1831809 - RNA, 21 nt, Human
cagggcucagcggggacagcu

SEQ ID NO: 1831810 - RNA, 23 nt, Human
cagggcucagcggggacagcucc

SEQ ID NO: 1831811 - RNA, 21 nt, Human
caggcugggcuucaguggcag

SEQ ID NO: 1831812 - RNA, 22 nt, Human
caggcugggcuucaguggcagc

SEQ ID NO: 1831813 - RNA, 14 nt, Human
caggcugggagagc

SEQ ID NO: 1831814 - RNA, 12 nt, Human
caggcugggaga

SEQ ID NO: 1831815 - RNA, 15 nt, Human
caggcugggagagcc

SEQ ID NO: 1831816 - RNA, 20 nt, Human
caggcugggcuucaguggca

SEQ ID NO: 1831817 - RNA, 20 nt, Human
caguggggaggggcuguggg

SEQ ID NO: 1831818 - RNA, 18 nt, Human
caguggugguuuucuguu

SEQ ID NO: 1831819 - RNA, 21 nt, Human
caguggugcgaucuggguuca

SEQ ID NO: 1831820 - RNA, 17 nt, Human
cagugcaugcugucccu

SEQ ID NO: 1831821 - RNA, 16 nt, Human
cagugcaugcuguccc

SEQ ID NO: 1831822 - RNA, 13 nt, Human
cagugcccacagg

SEQ ID NO: 1831823 - RNA, 15 nt, Human
cagugcccacaggau

SEQ ID NO: 1831824 - RNA, 17 nt, Human
cagugcccacaggauca

SEQ ID NO: 1831825 - RNA, 20 nt, Human
cagugggagcugccuguuca

SEQ ID NO: 1831826 - RNA, 23 nt, Human
cagugggagcugccuguucagcu

SEQ ID NO: 1831827 - RNA, 18 nt, Human
cagugcccacaggaucag

SEQ ID NO: 1831828 - RNA, 14 nt, Human
cagugcaugcuguc

SEQ ID NO: 1831829 - RNA, 13 nt, Human
cagugcaugcugu

SEQ ID NO: 1831830 - RNA, 18 nt, Human
cagugcaucucagcccac

SEQ ID NO: 1831831 - RNA, 17 nt, Human
cagugcaucucagccca

SEQ ID NO: 1831832 - RNA, 16 nt, Human
cagugcaucucagccc

SEQ ID NO: 1831833 - RNA, 15 nt, Human
cagugcaucucagcc

SEQ ID NO: 1831834 - RNA, 15 nt, Human
cagucuggaaugcag

SEQ ID NO: 1831835 - RNA, 17 nt, Human
cagucuggaaugcagug

SEQ ID NO: 1831836 - RNA, 12 nt, Human
cagugcaucuca

SEQ ID NO: 1831837 - RNA, 15 nt, Human
cagucacauuccaag

SEQ ID NO: 1831838 - RNA, 21 nt, Human
caggugauccacccaccucag

SEQ ID NO: 1831839 - RNA, 20 nt, Human
caggugcacaagcuccaagc

SEQ ID NO: 1831840 - RNA, 19 nt, Human
caggugcacaagcuccaag

SEQ ID NO: 1831841 - RNA, 18 nt, Human
caggugcacaagcuccaa

SEQ ID NO: 1831842 - RNA, 17 nt, Human
caggugcacaagcucca

SEQ ID NO: 1831843 - RNA, 15 nt, Human
caggugcacaagcuc

SEQ ID NO: 1831844 - RNA, 22 nt, Human
caggugauccacccaccucagc

SEQ ID NO: 1831845 - RNA, 23 nt, Human
caggugauccacccaccucagcc

SEQ ID NO: 1831846 - RNA, 16 nt, Human
cagguuuuccugaaga

SEQ ID NO: 1831847 - RNA, 12 nt, Human
cagguuuuccug

SEQ ID NO: 1831848 - RNA, 14 nt, Human
cagguuuaagcugu

SEQ ID NO: 1831849 - RNA, 23 nt, Human
caguaaagaacaucccuccuggg

SEQ ID NO: 1831850 - RNA, 23 nt, Human
cagguugucugaagucacugcac

SEQ ID NO: 1831851 - RNA, 22 nt, Human
cagguugucugaagucacugca

SEQ ID NO: 1831852 - RNA, 21 nt, Human
cagguuggugggggccucggu

SEQ ID NO: 1831853 - RNA, 21 nt, Human
caggugcacaagcuccaagcu

SEQ ID NO: 1831854 - RNA, 22 nt, Human
caggugcacaagcuccaagcuc

SEQ ID NO: 1831855 - RNA, 20 nt, Human
cagccgagauagccaaggcc

SEQ ID NO: 1831856 - RNA, 19 nt, Human
cagccgagauagccaaggc

SEQ ID NO: 1831857 - RNA, 17 nt, Human
cagccucugaaaaccaa

SEQ ID NO: 1831858 - RNA, 19 nt, Human
cagccugcuaauuccccag

SEQ ID NO: 1831859 - RNA, 15 nt, Human
cagccugcuccagcu

SEQ ID NO: 1831860 - RNA, 12 nt, Human
cagccugcucca

SEQ ID NO: 1831861 - RNA, 18 nt, Human
cagcggggacagcuccuu

SEQ ID NO: 1831862 - RNA, 19 nt, Human
cagcggggacagcuccuuc

SEQ ID NO: 1831863 - RNA, 21 nt, Human
cagcggggacagcuccuucug

SEQ ID NO: 1831864 - RNA, 18 nt, Human
caggaaaagcugcugaca

SEQ ID NO: 1831865 - RNA, 15 nt, Human
caggaaaagcugcug

SEQ ID NO: 1831866 - RNA, 16 nt, Human
caggaaaagcugcuga

SEQ ID NO: 1831867 - RNA, 14 nt, Human
cagcugccugggau

SEQ ID NO: 1831868 - RNA, 13 nt, Human
cagcugccuggga

SEQ ID NO: 1831869 - RNA, 12 nt, Human
cagcugccugca

SEQ ID NO: 1831870 - RNA, 12 nt, Human
cagcugccuggg

SEQ ID NO: 1831871 - RNA, 19 nt, Human
cagcugagggugagugggu

SEQ ID NO: 1831872 - RNA, 21 nt, Human
cagcuguuuaugcauagauaa

SEQ ID NO: 1831873 - RNA, 24 nt, Human
cagcugugcucuggacaggcaugu

SEQ ID NO: 1831874 - RNA, 20 nt, Human
cagcugugcucuggacaggc

SEQ ID NO: 1831875 - RNA, 13 nt, Human
cagccaguaaaug

SEQ ID NO: 1831876 - RNA, 20 nt, Human
cagcaucauggagguuugaa

SEQ ID NO: 1831877 - RNA, 16 nt, Human
cagcacgauuucuguu

SEQ ID NO: 1831878 - RNA, 18 nt, Human
cagcacgauuucuguuua

SEQ ID NO: 1831879 - RNA, 19 nt, Human
cagcacgauuucuguuuag

SEQ ID NO: 1831880 - RNA, 20 nt, Human
cagcacgauuucuguuuaga

SEQ ID NO: 1831881 - RNA, 22 nt, Human
cagauucuuuccugaggcuggg

SEQ ID NO: 1831882 - RNA, 20 nt, Human
cagauucuuuccugaggcug

SEQ ID NO: 1831883 - RNA, 17 nt, Human
cagauugcaacaggcug

SEQ ID NO: 1831884 - RNA, 17 nt, Human
cagcauagaaguaacuu

SEQ ID NO: 1831885 - RNA, 13 nt, Human
cagcauaauacuu

SEQ ID NO: 1831886 - RNA, 19 nt, Human
cagauucuuuccugaggcu

SEQ ID NO: 1831887 - RNA, 18 nt, Human
cagauucuuuccugaggc

SEQ ID NO: 1831888 - RNA, 17 nt, Human
cagauucuuuccugagg

SEQ ID NO: 1831889 - RNA, 15 nt, Human
cagauucuuuccuga

SEQ ID NO: 1831890 - RNA, 17 nt, Human
cagagguugcagugagc

SEQ ID NO: 1831891 - RNA, 16 nt, Human
cagagguugcagugag

SEQ ID NO: 1831892 - RNA, 20 nt, Human
cagagguccacaacacacag

SEQ ID NO: 1831893 - RNA, 15 nt, Human
cagagguccacaaca

SEQ ID NO: 1831894 - RNA, 21 nt, Human
cagaguaauccaagcaaaugu

SEQ ID NO: 1831895 - RNA, 23 nt, Human
cagaggggguggccucccaacuc

SEQ ID NO: 1831896 - RNA, 22 nt, Human
cagaggggguggccucccaacu

SEQ ID NO: 1831897 - RNA, 15 nt, Human
cagauccccaagccu

SEQ ID NO: 1831898 - RNA, 19 nt, Human
cagauccccaagccuggca

SEQ ID NO: 1831899 - RNA, 16 nt, Human
cauguuggccaggcug

SEQ ID NO: 1831900 - RNA, 14 nt, Human
cauguuggccaggc

SEQ ID NO: 1831901 - RNA, 15 nt, Human
cauguuggccaggcu

SEQ ID NO: 1831902 - RNA, 23 nt, Human
caugucccuaccgagucucuucu

SEQ ID NO: 1831903 - RNA, 19 nt, Human
caugucaaacgugaaaaug

SEQ ID NO: 1831904 - RNA, 14 nt, Human
caugucaaacguga

SEQ ID NO: 1831905 - RNA, 22 nt, Human
caugucccuaccgagucucuuc

SEQ ID NO: 1831906 - RNA, 16 nt, Human
caugucccuaccgagu

SEQ ID NO: 1831907 - RNA, 16 nt, Human
cauucuccaccugcca

SEQ ID NO: 1831908 - RNA, 14 nt, Human
cauucuccaccugc

SEQ ID NO: 1831909 - RNA, 13 nt, Human
cauucuccaccug

SEQ ID NO: 1831910 - RNA, 17 nt, Human
caugggaaugaauguca

SEQ ID NO: 1831911 - RNA, 16 nt, Human
caugggaaugaauguc

SEQ ID NO: 1831912 - RNA, 15 nt, Human
caugggaaugaaugu

SEQ ID NO: 1831913 - RNA, 14 nt, Human
caugggaaugaaug

SEQ ID NO: 1831914 - RNA, 17 nt, Human
cauggcugccaauggga

SEQ ID NO: 1831915 - RNA, 14 nt, Human
caugcuacacacug

SEQ ID NO: 1831916 - RNA, 20 nt, Human
caugcuacacacugcauguu

SEQ ID NO: 1831917 - RNA, 23 nt, Human
caugcuacacacugcauguuugu

SEQ ID NO: 1831918 - RNA, 13 nt, Human
caugauguuuucc

SEQ ID NO: 1831919 - RNA, 23 nt, Human
cauccuggcacccggccccugcu

SEQ ID NO: 1831920 - RNA, 22 nt, Human
cauccuggcacccggccccugc

SEQ ID NO: 1831921 - RNA, 14 nt, Human
caucacuucccuac

SEQ ID NO: 1831922 - RNA, 12 nt, Human
caucacuucccu

SEQ ID NO: 1831923 - RNA, 15 nt, Human
cauccuggcacccgg

SEQ ID NO: 1831924 - RNA, 19 nt, Human
caguggugguuuucuguuc

SEQ ID NO: 1831925 - RNA, 20 nt, Human
caguggugguuuucuguucu

SEQ ID NO: 1831926 - RNA, 21 nt, Human
caguggugguuuucuguucuu

SEQ ID NO: 1831927 - RNA, 22 nt, Human
caguggugguuuucuguucuuu

SEQ ID NO: 1831928 - RNA, 16 nt, Human
cauauuaccacagaca

SEQ ID NO: 1831929 - RNA, 17 nt, Human
cauauucuguuggccag

SEQ ID NO: 1831930 - RNA, 18 nt, Human
cauauucuguuggccagu

SEQ ID NO: 1831931 - RNA, 17 nt, Human
ccacucccugcaaccug

SEQ ID NO: 1831932 - RNA, 14 nt, Human
ccaccaucaagcca

SEQ ID NO: 1831933 - RNA, 13 nt, Human
ccaccaucaagcc

SEQ ID NO: 1831934 - RNA, 14 nt, Human
ccacagcugcucaa

SEQ ID NO: 1831935 - RNA, 17 nt, Human
ccaccacacccagccca

SEQ ID NO: 1831936 - RNA, 15 nt, Human
ccaccaucaagccac

SEQ ID NO: 1831937 - RNA, 23 nt, Human
ccacagcgcuggccgggaccccg

SEQ ID NO: 1831938 - RNA, 19 nt, Human
ccacgcccccacuggugac

SEQ ID NO: 1831939 - RNA, 18 nt, Human
ccacgcccccacugguga

SEQ ID NO: 1831940 - RNA, 13 nt, Human
ccacgcccggcua

SEQ ID NO: 1831941 - RNA, 17 nt, Human
ccacgcccccacuggug

SEQ ID NO: 1831942 - RNA, 16 nt, Human
ccacgcccccacuggu

SEQ ID NO: 1831943 - RNA, 22 nt, Human
ccaccgcagacaggaccaggga

SEQ ID NO: 1831944 - RNA, 13 nt, Human
ccaccgcagacag

SEQ ID NO: 1831945 - RNA, 21 nt, Human
ccaccuuugaagaaguaagga

SEQ ID NO: 1831946 - RNA, 21 nt, Human
ccaaaacucuccucugcugcu

SEQ ID NO: 1831947 - RNA, 20 nt, Human
ccaaaacucuccucugcugc

SEQ ID NO: 1831948 - RNA, 22 nt, Human
cauuuuuuuuaagaaaaaggau

SEQ ID NO: 1831949 - RNA, 17 nt, Human
ccaaugggagcucaugg

SEQ ID NO: 1831950 - RNA, 17 nt, Human
ccaauauuuaccagacc

SEQ ID NO: 1831951 - RNA, 15 nt, Human
ccaaugauggucacc

SEQ ID NO: 1831952 - RNA, 14 nt, Human
ccaaugcacuuugu

SEQ ID NO: 1831953 - RNA, 18 nt, Human
ccaagcucugcuccucuc

SEQ ID NO: 1831954 - RNA, 12 nt, Human
ccaagcucugcu

SEQ ID NO: 1831955 - RNA, 17 nt, Human
ccaagcucugcuccucu

SEQ ID NO: 1831956 - RNA, 13 nt, Human
ccaagcucugcuc

SEQ ID NO: 1831957 - RNA, 17 nt, Human
ccaaauguucaucaaug

SEQ ID NO: 1831958 - RNA, 14 nt, Human
ccaacucaccccag

SEQ ID NO: 1831959 - RNA, 23 nt, Human
ccaaauggaaaugggcagagcag

SEQ ID NO: 1831960 - RNA, 18 nt, Human
ccaaauguucaucaauga

SEQ ID NO: 1831961 - RNA, 18 nt, Human
ccaacucaccccagcccc

SEQ ID NO: 1831962 - RNA, 17 nt, Human
ccaacucaccccagccc

SEQ ID NO: 1831963 - RNA, 16 nt, Human
ccaacucaccccagcc

SEQ ID NO: 1831964 - RNA, 24 nt, Human
cugcccugugaguacuacaguccu

SEQ ID NO: 1831965 - RNA, 21 nt, Human
cugcccugguuuccugcccug

SEQ ID NO: 1831966 - RNA, 19 nt, Human
cugcccugguuuccugccc

SEQ ID NO: 1831967 - RNA, 18 nt, Human
cugcccugguuuccugcc

SEQ ID NO: 1831968 - RNA, 17 nt, Human
cugcccugguuuccugc

SEQ ID NO: 1831969 - RNA, 23 nt, Human
cugcccuggugcugccacacuuc

SEQ ID NO: 1831970 - RNA, 15 nt, Human
cugcccuggugcugc

SEQ ID NO: 1831971 - RNA, 14 nt, Human
cugcccuggugcug

SEQ ID NO: 1831972 - RNA, 13 nt, Human
cugcccuggugcu

SEQ ID NO: 1831973 - RNA, 12 nt, Human
cugcccuggugc

SEQ ID NO: 1831974 - RNA, 23 nt, Human
cugcccuuaccugccaggaagcc

SEQ ID NO: 1831975 - RNA, 22 nt, Human
cugcccuuaccugccaggaagc

SEQ ID NO: 1831976 - RNA, 19 nt, Human
cugcccuuaccugccagga

SEQ ID NO: 1831977 - RNA, 14 nt, Human
cugcccugugggcc

SEQ ID NO: 1831978 - RNA, 20 nt, Human
cugcccugguuuccugcccu

SEQ ID NO: 1831979 - RNA, 12 nt, Human
cugcccuguggg

SEQ ID NO: 1831980 - RNA, 11 nt, Human
cugcccugugg

SEQ ID NO: 1831981 - RNA, 20 nt, Human
cugccucgaacuggcugcaa

SEQ ID NO: 1831982 - RNA, 21 nt, Human
cugccuccuuugugaggaagc

SEQ ID NO: 1831983 - RNA, 17 nt, Human
cugccuccuuugugagg

SEQ ID NO: 1831984 - RNA, 23 nt, Human
cugccuccuuugugaggaagccg

SEQ ID NO: 1831985 - RNA, 14 nt, Human
cugccucgaacugg

SEQ ID NO: 1831986 - RNA, 14 nt, Human
cugccuccuuugug

SEQ ID NO: 1831987 - RNA, 19 nt, Human
cugccuguucccauucuug

SEQ ID NO: 1831988 - RNA, 15 nt, Human
cugccuguucccauu

SEQ ID NO: 1831989 - RNA, 20 nt, Human
cugccuguucagcuccagcu

SEQ ID NO: 1831990 - RNA, 23 nt, Human
cugccuguucagcuccagcucac

SEQ ID NO: 1831991 - RNA, 18 nt, Human
cugcugaaggcucgagca

SEQ ID NO: 1831992 - RNA, 23 nt, Human
cugcugaaggcucgagcaugccu

SEQ ID NO: 1831993 - RNA, 24 nt, Human
cugcugaaggcucgagcaugccug

SEQ ID NO: 1831994 - RNA, 17 nt, Human
cugcuaucaaagagguu

SEQ ID NO: 1831995 - RNA, 15 nt, Human
cuggcucuuccaggc

SEQ ID NO: 1831996 - RNA, 14 nt, Human
cuggcucuuccagg

SEQ ID NO: 1831997 - RNA, 13 nt, Human
cuggcucuuccag

SEQ ID NO: 1831998 - RNA, 17 nt, Human
cugggacuacaggcacc

SEQ ID NO: 1831999 - RNA, 21 nt, Human
cugggacuacaggcacccacc

SEQ ID NO: 1832000 - RNA, 17 nt, Human
cugggacuacaggugug

SEQ ID NO: 1832001 - RNA, 22 nt, Human
cuggcucccacaggcccuuccu

SEQ ID NO: 1832002 - RNA, 18 nt, Human
cuggcucccacaggcccu

SEQ ID NO: 1832003 - RNA, 19 nt, Human
cuggcucccacaggcccuu

SEQ ID NO: 1832004 - RNA, 19 nt, Human
cuggcagcucagagagggu

SEQ ID NO: 1832005 - RNA, 17 nt, Human
cuggcagcucagagagg

SEQ ID NO: 1832006 - RNA, 16 nt, Human
cuggcagcucagagag

SEQ ID NO: 1832007 - RNA, 18 nt, Human
cuggcagccgugccuuca

SEQ ID NO: 1832008 - RNA, 17 nt, Human
cuggcagccgugccuuc

SEQ ID NO: 1832009 - RNA, 22 nt, Human
cuggcagaguugaagacagagc

SEQ ID NO: 1832010 - RNA, 23 nt, Human
cuggcagccccuguucuggcaga

SEQ ID NO: 1832011 - RNA, 13 nt, Human
cuggcagccgugc

SEQ ID NO: 1832012 - RNA, 21 nt, Human
cuggcagaguugaagacagag

SEQ ID NO: 1832013 - RNA, 20 nt, Human
cuggcagaguugaagacaga

SEQ ID NO: 1832014 - RNA, 20 nt, Human
cugcuucaaggauccugagc

SEQ ID NO: 1832015 - RNA, 19 nt, Human
cugcuucaaggauccugag

SEQ ID NO: 1832016 - RNA, 16 nt, Human
cugcuucaaggauccu

SEQ ID NO: 1832017 - RNA, 14 nt, Human
cugcuucaaggauc

SEQ ID NO: 1832018 - RNA, 14 nt, Human
cugcuuccagugag

SEQ ID NO: 1832019 - RNA, 23 nt, Human
cugcuucagccucccgaguagcu

SEQ ID NO: 1832020 - RNA, 23 nt, Human
cuggacuccucuguccaggcacu

SEQ ID NO: 1832021 - RNA, 22 nt, Human
cuggacuccucuguccaggcac

SEQ ID NO: 1832022 - RNA, 21 nt, Human
cuggagaaaauggacguguua

SEQ ID NO: 1832023 - RNA, 20 nt, Human
cuggacuccucuguccaggc

SEQ ID NO: 1832024 - RNA, 17 nt, Human
cuggauccaucaggcca

SEQ ID NO: 1832025 - RNA, 15 nt, Human
cuggagaacuagaga

SEQ ID NO: 1832026 - RNA, 14 nt, Human
cuggagaacuagag

SEQ ID NO: 1832027 - RNA, 17 nt, Human
cuggaugcagccucaca

SEQ ID NO: 1832028 - RNA, 16 nt, Human
cuggaugcagccucac

SEQ ID NO: 1832029 - RNA, 20 nt, Human
cuggaucuccauucucucag

SEQ ID NO: 1832030 - RNA, 19 nt, Human
cuggauccaucaggccacu

SEQ ID NO: 1832031 - RNA, 18 nt, Human
cuggaugcagccucacag

SEQ ID NO: 1832032 - RNA, 12 nt, Human
cuggugccucac

SEQ ID NO: 1832033 - RNA, 18 nt, Human
cuggucuuauuuguaaag

SEQ ID NO: 1832034 - RNA, 21 nt, Human
cuggucucgaacuccugaccu

SEQ ID NO: 1832035 - RNA, 14 nt, Human
cugguuuuucaguu

SEQ ID NO: 1832036 - RNA, 15 nt, Human
cugguuuuucaguuu

SEQ ID NO: 1832037 - RNA, 16 nt, Human
cugguuuuucaguuuu

SEQ ID NO: 1832038 - RNA, 15 nt, Human
cuguagagugggagc

SEQ ID NO: 1832039 - RNA, 21 nt, Human
cuguacuugcucuugaugccu

SEQ ID NO: 1832040 - RNA, 20 nt, Human
cuguacuugcucuugaugcc

SEQ ID NO: 1832041 - RNA, 19 nt, Human
cuguacuugcucuugaugc

SEQ ID NO: 1832042 - RNA, 16 nt, Human
cuguacuugcucuuga

SEQ ID NO: 1832043 - RNA, 22 nt, Human
cugucuaaugaaaccugugucu

SEQ ID NO: 1832044 - RNA, 14 nt, Human
cugucauuugagca

SEQ ID NO: 1832045 - RNA, 13 nt, Human
cuguccugggagu

SEQ ID NO: 1832046 - RNA, 14 nt, Human
cuguccugggagug

SEQ ID NO: 1832047 - RNA, 20 nt, Human
cuguccugggagugagcugg

SEQ ID NO: 1832048 - RNA, 18 nt, Human
cuguaggaagguuaaugu

SEQ ID NO: 1832049 - RNA, 18 nt, Human
cuguucagcugguugagg

SEQ ID NO: 1832050 - RNA, 12 nt, Human
cuguucagcugg

SEQ ID NO: 1832051 - RNA, 16 nt, Human
cuguucagcuccagcu

SEQ ID NO: 1832052 - RNA, 18 nt, Human
cuguucagcuccagcuca

SEQ ID NO: 1832053 - RNA, 19 nt, Human
cuguucagcuccagcucac

SEQ ID NO: 1832054 - RNA, 22 nt, Human
cuguucagcuccagcucaccag

SEQ ID NO: 1832055 - RNA, 13 nt, Human
cuguucacucuac

SEQ ID NO: 1832056 - RNA, 15 nt, Human
cuguucagcuccagc

SEQ ID NO: 1832057 - RNA, 17 nt, Human
cuguuacugucuucagu

SEQ ID NO: 1832058 - RNA, 22 nt, Human
cugugucagguggggcagcuug

SEQ ID NO: 1832059 - RNA, 18 nt, Human
cugugcucuggacaggca

SEQ ID NO: 1832060 - RNA, 19 nt, Human
cugugcucuggacaggcau

SEQ ID NO: 1832061 - RNA, 16 nt, Human
cugugaacugaacucu

SEQ ID NO: 1832062 - RNA, 15 nt, Human
cugugaacugaacuc

SEQ ID NO: 1832063 - RNA, 13 nt, Human
cugugaacugaac

SEQ ID NO: 1832064 - RNA, 23 nt, Human
cugugagaugcuagaacucccuu

SEQ ID NO: 1832065 - RNA, 17 nt, Human
cugugcucuggacaggc

SEQ ID NO: 1832066 - RNA, 12 nt, Human
cuguuggccagu

SEQ ID NO: 1832067 - RNA, 15 nt, Human
cuguuggccagugug

SEQ ID NO: 1832068 - RNA, 13 nt, Human
cuuaaauaaugug

SEQ ID NO: 1832069 - RNA, 14 nt, Human
cuuaaauaauguga

SEQ ID NO: 1832070 - RNA, 16 nt, Human
cuuaaauaaugugaaa

SEQ ID NO: 1832071 - RNA, 19 nt, Human
cuuaaauaaugugaaacug

SEQ ID NO: 1832072 - RNA, 13 nt, Human
cuuaaaaaugguu

SEQ ID NO: 1832073 - RNA, 20 nt, Human
cuuaaaaaugguuuaaaugg

SEQ ID NO: 1832074 - RNA, 14 nt, Human
gaaaauuuuaaaaa

SEQ ID NO: 1832075 - RNA, 18 nt, Human
gaaaauuuugauguuuua

SEQ ID NO: 1832076 - RNA, 18 nt, Human
gaaaacuuguauuaugug

SEQ ID NO: 1832077 - RNA, 19 nt, Human
gaaaacugcaacuuguaaa

SEQ ID NO: 1832078 - RNA, 22 nt, Human
gaaaauuaggauuucaugauuu

SEQ ID NO: 1832079 - RNA, 18 nt, Human
gaaaauuaggauuucaug

SEQ ID NO: 1832080 - RNA, 14 nt, Human
gaaaauuaacauga

SEQ ID NO: 1832081 - RNA, 18 nt, Human
cuuuugccguuauuaaaa

SEQ ID NO: 1832082 - RNA, 15 nt, Human
cuuuuggucugugug

SEQ ID NO: 1832083 - RNA, 16 nt, Human
cuuuuggucuguguga

SEQ ID NO: 1832084 - RNA, 17 nt, Human
cuuuugucuaugggacu

SEQ ID NO: 1832085 - RNA, 21 nt, Human
cuuuuuuuuuuuuuuugacaa

SEQ ID NO: 1832086 - RNA, 19 nt, Human
gaaaaaauauuuuccugcc

SEQ ID NO: 1832087 - RNA, 14 nt, Human
gaaaaaauauauau

SEQ ID NO: 1832088 - RNA, 14 nt, Human
cuuuuuuuuaaguu

SEQ ID NO: 1832089 - RNA, 14 nt, Human
cuuuugugcauuau

SEQ ID NO: 1832090 - RNA, 18 nt, Human
cuuuugugcauuaucuag

SEQ ID NO: 1832091 - RNA, 19 nt, Human
cuuuuaugugaaacauguu

SEQ ID NO: 1832092 - RNA, 18 nt, Human
gaaagaaguggggacaga

SEQ ID NO: 1832093 - RNA, 18 nt, Human
gaaagacuaucuaaaugu

SEQ ID NO: 1832094 - RNA, 18 nt, Human
gaaaggcuccaggagcag

SEQ ID NO: 1832095 - RNA, 17 nt, Human
gaaaggcuccaggagca

SEQ ID NO: 1832096 - RNA, 19 nt, Human
gaaaggcuccaggagcagc

SEQ ID NO: 1832097 - RNA, 22 nt, Human
gaaaguacuucuccacccugcu

SEQ ID NO: 1832098 - RNA, 21 nt, Human
gaaaguacuucuccacccugc

SEQ ID NO: 1832099 - RNA, 18 nt, Human
gaaaugaaagcagggacu

SEQ ID NO: 1832100 - RNA, 18 nt, Human
gaaauuuuuauuaaauua

SEQ ID NO: 1832101 - RNA, 17 nt, Human
gaaaucaccgaaaacgu

SEQ ID NO: 1832102 - RNA, 17 nt, Human
gaacaaauuuacagaga

SEQ ID NO: 1832103 - RNA, 18 nt, Human
gaacaaauuuacagagac

SEQ ID NO: 1832104 - RNA, 19 nt, Human
gaaauuuuuauuaaauuau

SEQ ID NO: 1832105 - RNA, 23 nt, Human
gaacaaauuuacagagacagaaa

SEQ ID NO: 1832106 - RNA, 18 nt, Human
gaacaaggcaaggcuguc

SEQ ID NO: 1832107 - RNA, 17 nt, Human
gaacaaggcaaggcugu

SEQ ID NO: 1832108 - RNA, 15 nt, Human
gaacaaggcaaggcu

SEQ ID NO: 1832109 - RNA, 14 nt, Human
gaacaaggcaaggc

SEQ ID NO: 1832110 - RNA, 21 nt, Human
gaacaaggcaaggcugucaau

SEQ ID NO: 1832111 - RNA, 15 nt, Human
cuugauguguuaucu

SEQ ID NO: 1832112 - RNA, 18 nt, Human
cuugccgucuaccugagg

SEQ ID NO: 1832113 - RNA, 19 nt, Human
cuugccgucuaccugaggg

SEQ ID NO: 1832114 - RNA, 19 nt, Human
cuugauucauaaugacuua

SEQ ID NO: 1832115 - RNA, 15 nt, Human
cuuggauuguccccg

SEQ ID NO: 1832116 - RNA, 20 nt, Human
cuuggauuguccccgacccu

SEQ ID NO: 1832117 - RNA, 18 nt, Human
cuuggauuguccccgacc

SEQ ID NO: 1832118 - RNA, 22 nt, Human
cuuggauuguccccgacccuug

SEQ ID NO: 1832119 - RNA, 23 nt, Human
cuuggcgcugccccuggcagccc

SEQ ID NO: 1832120 - RNA, 22 nt, Human
cuuggcgcugccccuggcagcc

SEQ ID NO: 1832121 - RNA, 21 nt, Human
cuuggcgcugccccuggcagc

SEQ ID NO: 1832122 - RNA, 18 nt, Human
cuuucaauaggaaaaacu

SEQ ID NO: 1832123 - RNA, 17 nt, Human
cuuucaauaggaaaaac

SEQ ID NO: 1832124 - RNA, 22 nt, Human
cuugucuuuggacccugaggcc

SEQ ID NO: 1832125 - RNA, 21 nt, Human
cuugucuuuggacccugaggc

SEQ ID NO: 1832126 - RNA, 15 nt, Human
cuuucaauaggaaaa

SEQ ID NO: 1832127 - RNA, 14 nt, Human
cuuucaauaggaaa

SEQ ID NO: 1832128 - RNA, 22 nt, Human
cuuuaaugucacaggcaggucc

SEQ ID NO: 1832129 - RNA, 17 nt, Human
cuuuaaugucacaggca

SEQ ID NO: 1832130 - RNA, 18 nt, Human
cuuuaaugucacaggcag

SEQ ID NO: 1832131 - RNA, 19 nt, Human
cuuuaaugucacaggcagg

SEQ ID NO: 1832132 - RNA, 20 nt, Human
cuuuaaugucacaggcaggu

SEQ ID NO: 1832133 - RNA, 20 nt, Human
cuugguccugcugcaguugc

SEQ ID NO: 1832134 - RNA, 18 nt, Human
cuugguccugcugcaguu

SEQ ID NO: 1832135 - RNA, 17 nt, Human
cuugguccugcugcagu

SEQ ID NO: 1832136 - RNA, 16 nt, Human
cuugguccugcugcag

SEQ ID NO: 1832137 - RNA, 15 nt, Human
cuugguccugcugca

SEQ ID NO: 1832138 - RNA, 16 nt, Human
cuugguucccauuugc

SEQ ID NO: 1832139 - RNA, 20 nt, Human
cuugguucccauuugcuccu

SEQ ID NO: 1832140 - RNA, 23 nt, Human
cuuggucucagugucaaugcagc

SEQ ID NO: 1832141 - RNA, 22 nt, Human
cuugguccugcugcaguugcca

SEQ ID NO: 1832142 - RNA, 20 nt, Human
cuugucuuuggacccugagg

SEQ ID NO: 1832143 - RNA, 13 nt, Human
cuugucuguagau

SEQ ID NO: 1832144 - RNA, 20 nt, Human
cuuacauuagcaguuugcuu

SEQ ID NO: 1832145 - RNA, 16 nt, Human
cuucuuauacauuuga

SEQ ID NO: 1832146 - RNA, 13 nt, Human
cuucuuauacauu

SEQ ID NO: 1832147 - RNA, 17 nt, Human
cuucugacccaugcugc

SEQ ID NO: 1832148 - RNA, 16 nt, Human
cuucugacccaugcug

SEQ ID NO: 1832149 - RNA, 18 nt, Human
cuucugacccaugcugcc

SEQ ID NO: 1832150 - RNA, 23 nt, Human
cuucugaacuuggcgcugccccu

SEQ ID NO: 1832151 - RNA, 18 nt, Human
cuuccucccucccucuuu

SEQ ID NO: 1832152 - RNA, 14 nt, Human
cuuccucccucccu

SEQ ID NO: 1832153 - RNA, 13 nt, Human
cuuccucccuccc

SEQ ID NO: 1832154 - RNA, 12 nt, Human
cuuccucccucc

SEQ ID NO: 1832155 - RNA, 13 nt, Human
cuuccucugcuga

SEQ ID NO: 1832156 - RNA, 12 nt, Human
cuuccucugcug

SEQ ID NO: 1832157 - RNA, 11 nt, Human
cuuccucugcu

SEQ ID NO: 1832158 - RNA, 21 nt, Human
cuuccucuccacugccuucga

SEQ ID NO: 1832159 - RNA, 19 nt, Human
cuuccucuccacugccuuc

SEQ ID NO: 1832160 - RNA, 17 nt, Human
cuuccucuccacugccu

SEQ ID NO: 1832161 - RNA, 16 nt, Human
cuuccucuccacugcc

SEQ ID NO: 1832162 - RNA, 22 nt, Human
cuucugaacuuggcgcugcccc

SEQ ID NO: 1832163 - RNA, 15 nt, Human
cuucugacccaugcu

SEQ ID NO: 1832164 - RNA, 19 nt, Human
cuucugaacuuggcgcugc

SEQ ID NO: 1832165 - RNA, 17 nt, Human
gauacuguaucaugaca

SEQ ID NO: 1832166 - RNA, 21 nt, Human
gauacuguaucaugacaaaga

SEQ ID NO: 1832167 - RNA, 16 nt, Human
gauacaguuacucaga

SEQ ID NO: 1832168 - RNA, 19 nt, Human
gauacaguuacucagaauu

SEQ ID NO: 1832169 - RNA, 23 nt, Human
gauacaguuacucagaauucucu

SEQ ID NO: 1832170 - RNA, 22 nt, Human
gaucaaaccccgaccaccugcc

SEQ ID NO: 1832171 - RNA, 23 nt, Human
gaucaaaagguuaauaaaguaau

SEQ ID NO: 1832172 - RNA, 20 nt, Human
gaucaaaagguuaauaaagu

SEQ ID NO: 1832173 - RNA, 17 nt, Human
gauauuuuuuucuuuuc

SEQ ID NO: 1832174 - RNA, 15 nt, Human
gauauuuugcuuugu

SEQ ID NO: 1832175 - RNA, 23 nt, Human
gauauuuucaacgcagcccugcu

SEQ ID NO: 1832176 - RNA, 22 nt, Human
gauauuuucaacgcagcccugc

SEQ ID NO: 1832177 - RNA, 21 nt, Human
gauauuuucaacgcagcccug

SEQ ID NO: 1832178 - RNA, 19 nt, Human
gauauuuucaacgcagccc

SEQ ID NO: 1832179 - RNA, 18 nt, Human
gauacuuugauauuuuca

SEQ ID NO: 1832180 - RNA, 22 nt, Human
gauccacccaccucagccuccc

SEQ ID NO: 1832181 - RNA, 20 nt, Human
gauccacccaccucagccuc

SEQ ID NO: 1832182 - RNA, 21 nt, Human
gauccacccaccucagccucc

SEQ ID NO: 1832183 - RNA, 21 nt, Human
gauccaagcuggucccacuca

SEQ ID NO: 1832184 - RNA, 18 nt, Human
gauccacccaccucagcc

SEQ ID NO: 1832185 - RNA, 19 nt, Human
gauccacccaccucagccu

SEQ ID NO: 1832186 - RNA, 12 nt, Human
gauccaagcugg

SEQ ID NO: 1832187 - RNA, 16 nt, Human
gauccaagcugguccc

SEQ ID NO: 1832188 - RNA, 17 nt, Human
gauccaagcugguccca

SEQ ID NO: 1832189 - RNA, 19 nt, Human
gauccaagcuggucccacu

SEQ ID NO: 1832190 - RNA, 17 nt, Human
gaucugaugcaagcaag

SEQ ID NO: 1832191 - RNA, 19 nt, Human
gaucucuugagccugggag

SEQ ID NO: 1832192 - RNA, 18 nt, Human
gaucucuugagccuggga

SEQ ID NO: 1832193 - RNA, 14 nt, Human
gaugauccuaggca

SEQ ID NO: 1832194 - RNA, 13 nt, Human
gaugauccuaggc

SEQ ID NO: 1832195 - RNA, 22 nt, Human
gaugauuggaggggggaggugg

SEQ ID NO: 1832196 - RNA, 20 nt, Human
gaugcuucuucagagacucc

SEQ ID NO: 1832197 - RNA, 17 nt, Human
gaugcuucuucagagac

SEQ ID NO: 1832198 - RNA, 21 nt, Human
gaugcuucuucagagacuccu

SEQ ID NO: 1832199 - RNA, 13 nt, Human
gauucuucugcuu

SEQ ID NO: 1832200 - RNA, 15 nt, Human
gauucuucugcuuca

SEQ ID NO: 1832201 - RNA, 12 nt, Human
gauucuucugcu

SEQ ID NO: 1832202 - RNA, 19 nt, Human
gauuuaacagaaauguaca

SEQ ID NO: 1832203 - RNA, 17 nt, Human
gauuuaacagaaaugua

SEQ ID NO: 1832204 - RNA, 18 nt, Human
gauuuaacagaaauguac

SEQ ID NO: 1832205 - RNA, 16 nt, Human
gauuuaacagaaaugu

SEQ ID NO: 1832206 - RNA, 20 nt, Human
gauucuucugcuucagccuc

SEQ ID NO: 1832207 - RNA, 21 nt, Human
gauuuuuuuuuccuucagugc

SEQ ID NO: 1832208 - RNA, 14 nt, Human
gcaaaaaggcagga

SEQ ID NO: 1832209 - RNA, 22 nt, Human
gcaaaagaugcuucucacugcc

SEQ ID NO: 1832210 - RNA, 17 nt, Human
gcaaaagaugcuucuca

SEQ ID NO: 1832211 - RNA, 18 nt, Human
gauuuuuuuuuccuucag

SEQ ID NO: 1832212 - RNA, 17 nt, Human
gauuuuuuuuuccuuca

SEQ ID NO: 1832213 - RNA, 12 nt, Human
gauuucacucuc

SEQ ID NO: 1832214 - RNA, 16 nt, Human
gauuuuuuuuuccuuc

SEQ ID NO: 1832215 - RNA, 11 nt, Human
gauuucacucu

SEQ ID NO: 1832216 - RNA, 16 nt, Human
gcaagugagagcuggg

SEQ ID NO: 1832217 - RNA, 15 nt, Human
gcaagugagagcugg

SEQ ID NO: 1832218 - RNA, 20 nt, Human
gcaaccuucgccaccugggu

SEQ ID NO: 1832219 - RNA, 20 nt, Human
gcaaccuccgccucuugggu

SEQ ID NO: 1832220 - RNA, 14 nt, Human
gcaacccccagccu

SEQ ID NO: 1832221 - RNA, 15 nt, Human
gcaacccccagccug

SEQ ID NO: 1832222 - RNA, 16 nt, Human
gcaacccccagccugc

SEQ ID NO: 1832223 - RNA, 19 nt, Human
gcaaccuccgccucuuggg

SEQ ID NO: 1832224 - RNA, 18 nt, Human
gcaaccaccaccaaccac

SEQ ID NO: 1832225 - RNA, 16 nt, Human
gcaaccaccaccaacc

SEQ ID NO: 1832226 - RNA, 13 nt, Human
gcaaccaccacca

SEQ ID NO: 1832227 - RNA, 16 nt, Human
gcaacaggcugggcuu

SEQ ID NO: 1832228 - RNA, 19 nt, Human
gcaacaggcugggcuucag

SEQ ID NO: 1832229 - RNA, 14 nt, Human
gcaacaggcugggc

SEQ ID NO: 1832230 - RNA, 15 nt, Human
gcaacaggcugggcu

SEQ ID NO: 1832231 - RNA, 13 nt, Human
gcaacaggcuggg

SEQ ID NO: 1832232 - RNA, 18 nt, Human
gcagcccaccccucaaca

SEQ ID NO: 1832233 - RNA, 15 nt, Human
gcagccacauuccug

SEQ ID NO: 1832234 - RNA, 20 nt, Human
gcacucagaagacacugaug

SEQ ID NO: 1832235 - RNA, 18 nt, Human
gcaagugagagcugggug

SEQ ID NO: 1832236 - RNA, 19 nt, Human
gcaagugagagcugggugu

SEQ ID NO: 1832237 - RNA, 15 nt, Human
gcacuccagccuggg

SEQ ID NO: 1832238 - RNA, 14 nt, Human
gcacuccagccugg

SEQ ID NO: 1832239 - RNA, 14 nt, Human
gcacuccccugcug

SEQ ID NO: 1832240 - RNA, 13 nt, Human
gcacuccccugcu

SEQ ID NO: 1832241 - RNA, 19 nt, Human
gcacuuuguucuggcucuu

SEQ ID NO: 1832242 - RNA, 18 nt, Human
gcacuuuguucuggcucu

SEQ ID NO: 1832243 - RNA, 16 nt, Human
gcacuccccugcuggg

SEQ ID NO: 1832244 - RNA, 15 nt, Human
gcacuccccugcugg

SEQ ID NO: 1832245 - RNA, 22 nt, Human
gcacuuuguucuggcucuucca

SEQ ID NO: 1832246 - RNA, 12 nt, Human
gcagaacaguga

SEQ ID NO: 1832247 - RNA, 13 nt, Human
gcagaacagugau

SEQ ID NO: 1832248 - RNA, 14 nt, Human
gcagagggcacaga

SEQ ID NO: 1832249 - RNA, 23 nt, Human
gcagcauauucaggaagcucagg

SEQ ID NO: 1832250 - RNA, 19 nt, Human
gcagcauauucaggaagcu

SEQ ID NO: 1832251 - RNA, 18 nt, Human
gcagcauauucaggaagc

SEQ ID NO: 1832252 - RNA, 17 nt, Human
gcagcauauucaggaag

SEQ ID NO: 1832253 - RNA, 20 nt, Human
gcagaggaaagcaaaggaga

SEQ ID NO: 1832254 - RNA, 18 nt, Human
gcagaggaaagcaaagga

SEQ ID NO: 1832255 - RNA, 14 nt, Human
gcagaggaaagcaa

SEQ ID NO: 1832256 - RNA, 13 nt, Human
gcagaggaaagca

SEQ ID NO: 1832257 - RNA, 21 nt, Human
gcagaggaaagcaaaggagau

SEQ ID NO: 1832258 - RNA, 18 nt, Human
gcagaacagugauuacca

SEQ ID NO: 1832259 - RNA, 22 nt, Human
gcagaacagugauuaccaggga

SEQ ID NO: 1832260 - RNA, 18 nt, Human
gcauacguacacauuuua

SEQ ID NO: 1832261 - RNA, 15 nt, Human
gcauacguacacauu

SEQ ID NO: 1832262 - RNA, 16 nt, Human
gcauacguacacauuu

SEQ ID NO: 1832263 - RNA, 17 nt, Human
gcauacguacacauuuu

SEQ ID NO: 1832264 - RNA, 17 nt, Human
gcauccaguaucuugaa

SEQ ID NO: 1832265 - RNA, 14 nt, Human
gcauccaguaucuu

SEQ ID NO: 1832266 - RNA, 18 nt, Human
gcauccaguaucuugaag

SEQ ID NO: 1832267 - RNA, 15 nt, Human
gcauugugggaaggg

SEQ ID NO: 1832268 - RNA, 13 nt, Human
gcauugugggaag

SEQ ID NO: 1832269 - RNA, 21 nt, Human
gcaugugaugagaggaaauca

SEQ ID NO: 1832270 - RNA, 18 nt, Human
gcaugugaugagaggaaa

SEQ ID NO: 1832271 - RNA, 19 nt, Human
gcaugugaugagaggaaau

SEQ ID NO: 1832272 - RNA, 18 nt, Human
gcauugugggaaggggag

SEQ ID NO: 1832273 - RNA, 16 nt, Human
gcauugugggaagggg

SEQ ID NO: 1832274 - RNA, 16 nt, Human
gcauuuaaaagauaca

SEQ ID NO: 1832275 - RNA, 17 nt, Human
gcauuuaaaagauacag

SEQ ID NO: 1832276 - RNA, 18 nt, Human
gcauuuaaaagauacagu

SEQ ID NO: 1832277 - RNA, 22 nt, Human
gcauuuaaaagauacaguuacu

SEQ ID NO: 1832278 - RNA, 15 nt, Human
gcauuuacuuugugu

SEQ ID NO: 1832279 - RNA, 21 nt, Human
gcauggcugccaaugggagcu

SEQ ID NO: 1832280 - RNA, 14 nt, Human
gcauccuggcaccc

SEQ ID NO: 1832281 - RNA, 17 nt, Human
gcauccuccgccucccg

SEQ ID NO: 1832282 - RNA, 13 nt, Human
gcauccuggcacc

SEQ ID NO: 1832283 - RNA, 20 nt, Human
gcaucuagcaugucgucaaa

SEQ ID NO: 1832284 - RNA, 19 nt, Human
gacauuguagagcuucugg

SEQ ID NO: 1832285 - RNA, 17 nt, Human
gacauugcggacagcca

SEQ ID NO: 1832286 - RNA, 23 nt, Human
gacauugcggacagccacggcca

SEQ ID NO: 1832287 - RNA, 14 nt, Human
gacagcccgggcuc

SEQ ID NO: 1832288 - RNA, 16 nt, Human
gacagcccgggcucug

SEQ ID NO: 1832289 - RNA, 16 nt, Human
gacagcuccuucuguc

SEQ ID NO: 1832290 - RNA, 17 nt, Human
gacagcuccuucugucc

SEQ ID NO: 1832291 - RNA, 18 nt, Human
gacagcuccuucuguccu

SEQ ID NO: 1832292 - RNA, 20 nt, Human
gacagucccugccaauggac

SEQ ID NO: 1832293 - RNA, 16 nt, Human
gacagucccugccaau

SEQ ID NO: 1832294 - RNA, 15 nt, Human
gacagucccugccaa

SEQ ID NO: 1832295 - RNA, 14 nt, Human
gacagucccugcca

SEQ ID NO: 1832296 - RNA, 11 nt, Human
gacagcucuua

SEQ ID NO: 1832297 - RNA, 12 nt, Human
gacagucccugc

SEQ ID NO: 1832298 - RNA, 10 nt, Human
gacagcucuu

SEQ ID NO: 1832299 - RNA, 12 nt, Human
gacagcucugca

SEQ ID NO: 1832300 - RNA, 19 nt, Human
gacagcuccuucuguccua

SEQ ID NO: 1832301 - RNA, 17 nt, Human
gacccggaggggccugg

SEQ ID NO: 1832302 - RNA, 16 nt, Human
gaccccugagcuugca

SEQ ID NO: 1832303 - RNA, 20 nt, Human
gacccggaggggccuggcag

SEQ ID NO: 1832304 - RNA, 19 nt, Human
gacccggaggggccuggca

SEQ ID NO: 1832305 - RNA, 18 nt, Human
gacccggaggggccuggc

SEQ ID NO: 1832306 - RNA, 14 nt, Human
gaccucaggccugg

SEQ ID NO: 1832307 - RNA, 10 nt, Human
gacccugagg

SEQ ID NO: 1832308 - RNA, 19 nt, Human
gaccucaggugagaagcag

SEQ ID NO: 1832309 - RNA, 18 nt, Human
gaccucaggugagaagca

SEQ ID NO: 1832310 - RNA, 19 nt, Human
gaccucaggccugggggcu

SEQ ID NO: 1832311 - RNA, 23 nt, Human
gaccucagguaaucgaccugccu

SEQ ID NO: 1832312 - RNA, 22 nt, Human
gaccucagguaaucgaccugcc

SEQ ID NO: 1832313 - RNA, 21 nt, Human
gaccucaggugagaagcagag

SEQ ID NO: 1832314 - RNA, 19 nt, Human
gaccucaggugauccaccc

SEQ ID NO: 1832315 - RNA, 20 nt, Human
gaccucaggugauccaccca

SEQ ID NO: 1832316 - RNA, 21 nt, Human
gaccucaggugauccacccac

SEQ ID NO: 1832317 - RNA, 14 nt, Human
gacgcucucuggcc

SEQ ID NO: 1832318 - RNA, 23 nt, Human
gacgcuacccgggaagggggcug

SEQ ID NO: 1832319 - RNA, 22 nt, Human
gacgcuacccgggaagggggcu

SEQ ID NO: 1832320 - RNA, 17 nt, Human
gacgcugugcugcccug

SEQ ID NO: 1832321 - RNA, 16 nt, Human
gacgcugugcugcccu

SEQ ID NO: 1832322 - RNA, 18 nt, Human
gacgcugugcugcccugc

SEQ ID NO: 1832323 - RNA, 16 nt, Human
gaccucugcagcaaua

SEQ ID NO: 1832324 - RNA, 18 nt, Human
gaccucugcagcaauaaa

SEQ ID NO: 1832325 - RNA, 22 nt, Human
gaccucugcagcaauaaagcag

SEQ ID NO: 1832326 - RNA, 21 nt, Human
gacgccaucccagccccaaug

SEQ ID NO: 1832327 - RNA, 15 nt, Human
gacgccaucccagcc

SEQ ID NO: 1832328 - RNA, 13 nt, Human
gacgccaucccag

SEQ ID NO: 1832329 - RNA, 12 nt, Human
gacgccauccca

SEQ ID NO: 1832330 - RNA, 13 nt, Human
gaccucugccuga

SEQ ID NO: 1832331 - RNA, 15 nt, Human
gaauauauaaccagu

SEQ ID NO: 1832332 - RNA, 13 nt, Human
gaauauugcugau

SEQ ID NO: 1832333 - RNA, 12 nt, Human
gaauauugcuga

SEQ ID NO: 1832334 - RNA, 11 nt, Human
gaauauugcug

SEQ ID NO: 1832335 - RNA, 24 nt, Human
gaauauugcugauggugcaaugac

SEQ ID NO: 1832336 - RNA, 23 nt, Human
gaauauugcugauggugcaauga

SEQ ID NO: 1832337 - RNA, 22 nt, Human
gaauauugcugauggugcaaug

SEQ ID NO: 1832338 - RNA, 14 nt, Human
gaaugaauggcuaa

SEQ ID NO: 1832339 - RNA, 15 nt, Human
gaaugaauggcuaag

SEQ ID NO: 1832340 - RNA, 20 nt, Human
gaaugaauggcuaagcaaaa

SEQ ID NO: 1832341 - RNA, 14 nt, Human
gaaugauuaauuaa

SEQ ID NO: 1832342 - RNA, 14 nt, Human
gaaugaugccauga

SEQ ID NO: 1832343 - RNA, 20 nt, Human
gaaugaugauccuaggcauu

SEQ ID NO: 1832344 - RNA, 19 nt, Human
gaaugcacaaacagaggcc

SEQ ID NO: 1832345 - RNA, 16 nt, Human
gaauguuugccucugc

SEQ ID NO: 1832346 - RNA, 17 nt, Human
gaauguuugccucugcc

SEQ ID NO: 1832347 - RNA, 18 nt, Human
gaaugcacaaacagaggc

SEQ ID NO: 1832348 - RNA, 14 nt, Human
gaauuaacacauga

SEQ ID NO: 1832349 - RNA, 15 nt, Human
gaauuaacacaugau

SEQ ID NO: 1832350 - RNA, 18 nt, Human
gaauguuugccucugccu

SEQ ID NO: 1832351 - RNA, 19 nt, Human
gaauguuugccucugccuc

SEQ ID NO: 1832352 - RNA, 21 nt, Human
gacacagcucuucuccaggcu

SEQ ID NO: 1832353 - RNA, 12 nt, Human
gacacagcucuu

SEQ ID NO: 1832354 - RNA, 19 nt, Human
gacacagcucuucuccagg

SEQ ID NO: 1832355 - RNA, 20 nt, Human
gacacagcucuucuccaggc

SEQ ID NO: 1832356 - RNA, 21 nt, Human
gagggccugcaagggagugag

SEQ ID NO: 1832357 - RNA, 17 nt, Human
gagggccugcaagggag

SEQ ID NO: 1832358 - RNA, 14 nt, Human
gagggccugcaagg

SEQ ID NO: 1832359 - RNA, 12 nt, Human
gagggccugggc

SEQ ID NO: 1832360 - RNA, 18 nt, Human
gaggcugagaugggagaa

SEQ ID NO: 1832361 - RNA, 20 nt, Human
gaggcucuggagcccacugu

SEQ ID NO: 1832362 - RNA, 17 nt, Human
gaggcuccacuuggucu

SEQ ID NO: 1832363 - RNA, 15 nt, Human
gaggcuccacuuggu

SEQ ID NO: 1832364 - RNA, 21 nt, Human
gaggcauuuguuugaacugau

SEQ ID NO: 1832365 - RNA, 21 nt, Human
gaggcaugugaugagaggaaa

SEQ ID NO: 1832366 - RNA, 20 nt, Human
gaggcaugugaugagaggaa

SEQ ID NO: 1832367 - RNA, 22 nt, Human
gaggcaugugaugagaggaaau

SEQ ID NO: 1832368 - RNA, 19 nt, Human
gaggcauuuguuugaacug

SEQ ID NO: 1832369 - RNA, 22 nt, Human
gaggcagggucucacucugucg

SEQ ID NO: 1832370 - RNA, 19 nt, Human
gaggcagggucucacucug

SEQ ID NO: 1832371 - RNA, 20 nt, Human
gaggcagggucucacucugu

SEQ ID NO: 1832372 - RNA, 18 nt, Human
gaggcagggucucacucu

SEQ ID NO: 1832373 - RNA, 15 nt, Human
gaggagagaggaccc

SEQ ID NO: 1832374 - RNA, 14 nt, Human
gaggagagaggacc

SEQ ID NO: 1832375 - RNA, 12 nt, Human
gaggagagagga

SEQ ID NO: 1832376 - RNA, 12 nt, Human
gaggagaaacug

SEQ ID NO: 1832377 - RNA, 14 nt, Human
gaggagaaacugga

SEQ ID NO: 1832378 - RNA, 21 nt, Human
gaggacgcucucuggccuucg

SEQ ID NO: 1832379 - RNA, 20 nt, Human
gaggacgcucucuggccuuc

SEQ ID NO: 1832380 - RNA, 16 nt, Human
gaggacuuuucuuugu

SEQ ID NO: 1832381 - RNA, 20 nt, Human
gaggacuuuucuuuguggcu

SEQ ID NO: 1832382 - RNA, 23 nt, Human
gaggacuuuucuuuguggcuucc

SEQ ID NO: 1832383 - RNA, 13 nt, Human
gagcccugguggc

SEQ ID NO: 1832384 - RNA, 14 nt, Human
gagcccugguggca

SEQ ID NO: 1832385 - RNA, 14 nt, Human
gagcaucaggccag

SEQ ID NO: 1832386 - RNA, 16 nt, Human
gagcaucaggccaggc

SEQ ID NO: 1832387 - RNA, 15 nt, Human
gagcaucaggccagg

SEQ ID NO: 1832388 - RNA, 13 nt, Human
gagcaugccugga

SEQ ID NO: 1832389 - RNA, 21 nt, Human
gagcaugccuggauggggcug

SEQ ID NO: 1832390 - RNA, 20 nt, Human
gagcccugggaggcucugga

SEQ ID NO: 1832391 - RNA, 19 nt, Human
gagcccugggaggcucugg

SEQ ID NO: 1832392 - RNA, 18 nt, Human
gagcccugggaggcucug

SEQ ID NO: 1832393 - RNA, 16 nt, Human
gagcccugggaggcuc

SEQ ID NO: 1832394 - RNA, 12 nt, Human
gagcccugggag

SEQ ID NO: 1832395 - RNA, 13 nt, Human
gagccccgaggcc

SEQ ID NO: 1832396 - RNA, 14 nt, Human
gagccccgaggccu

SEQ ID NO: 1832397 - RNA, 17 nt, Human
gagccccgaggccuucu

SEQ ID NO: 1832398 - RNA, 21 nt, Human
gagauugugccccugcacucc

SEQ ID NO: 1832399 - RNA, 14 nt, Human
gagauuggaaggaa

SEQ ID NO: 1832400 - RNA, 20 nt, Human
gagaugcuagaacucccuuu

SEQ ID NO: 1832401 - RNA, 16 nt, Human
gagaugcuagaacucc

SEQ ID NO: 1832402 - RNA, 15 nt, Human
gagauuauguucuuu

SEQ ID NO: 1832403 - RNA, 16 nt, Human
gagagccuuccagggg

SEQ ID NO: 1832404 - RNA, 15 nt, Human
gagagccuuccaggg

SEQ ID NO: 1832405 - RNA, 14 nt, Human
gagacuccugcagg

SEQ ID NO: 1832406 - RNA, 13 nt, Human
gagacuccugcag

SEQ ID NO: 1832407 - RNA, 20 nt, Human
gagagccuuccagggguggg

SEQ ID NO: 1832408 - RNA, 18 nt, Human
gagagccuuccaggggug

SEQ ID NO: 1832409 - RNA, 21 nt, Human
gagagcuagcagcagggaggg

SEQ ID NO: 1832410 - RNA, 15 nt, Human
gagagcuagcagcag

SEQ ID NO: 1832411 - RNA, 13 nt, Human
gagagcugggugu

SEQ ID NO: 1832412 - RNA, 15 nt, Human
gagaggacccccuga

SEQ ID NO: 1832413 - RNA, 12 nt, Human
gagaggaaauca

SEQ ID NO: 1832414 - RNA, 22 nt, Human
gagagcuucuguugcugccuca

SEQ ID NO: 1832415 - RNA, 20 nt, Human
gagagcugggugucaagagg

SEQ ID NO: 1832416 - RNA, 18 nt, Human
gagacgggggcagagagg

SEQ ID NO: 1832417 - RNA, 16 nt, Human
gagacggagucccacc

SEQ ID NO: 1832418 - RNA, 19 nt, Human
gagacggagucccaccuug

SEQ ID NO: 1832419 - RNA, 14 nt, Human
gagacggaguccca

SEQ ID NO: 1832420 - RNA, 15 nt, Human
gagaaugaaagggcc

SEQ ID NO: 1832421 - RNA, 23 nt, Human
gagaaugaaagggcccagagagg

SEQ ID NO: 1832422 - RNA, 20 nt, Human
gacuuuuccaacccucauca

SEQ ID NO: 1832423 - RNA, 19 nt, Human
gacuuuuccaacccucauc

SEQ ID NO: 1832424 - RNA, 14 nt, Human
gacuuuuccaaccc

SEQ ID NO: 1832425 - RNA, 18 nt, Human
gacuuuuauuuccaguga

SEQ ID NO: 1832426 - RNA, 17 nt, Human
gccccuggcagccccug

SEQ ID NO: 1832427 - RNA, 16 nt, Human
gccccuggcagccccu

SEQ ID NO: 1832428 - RNA, 21 nt, Human
gccccugcugguucaggguug

SEQ ID NO: 1832429 - RNA, 21 nt, Human
gcccuuccaugucgccucugc

SEQ ID NO: 1832430 - RNA, 12 nt, Human
gcccuuccaugu

SEQ ID NO: 1832431 - RNA, 12 nt, Human
gcccuuccucuc

SEQ ID NO: 1832432 - RNA, 22 nt, Human
gcccuuccaugucgccucugca

SEQ ID NO: 1832433 - RNA, 15 nt, Human
gcccuuccucuccac

SEQ ID NO: 1832434 - RNA, 14 nt, Human
gcccuuccucucca

SEQ ID NO: 1832435 - RNA, 16 nt, Human
gccuacaggagugagc

SEQ ID NO: 1832436 - RNA, 15 nt, Human
gcccugcccaccugg

SEQ ID NO: 1832437 - RNA, 14 nt, Human
gcccugcccaccug

SEQ ID NO: 1832438 - RNA, 20 nt, Human
gcccugcgggucacaggagg

SEQ ID NO: 1832439 - RNA, 13 nt, Human
gcccugugcucca

SEQ ID NO: 1832440 - RNA, 22 nt, Human
gcccuuaccugccaggaagcca

SEQ ID NO: 1832441 - RNA, 21 nt, Human
gcccuuaccugccaggaagcc

SEQ ID NO: 1832442 - RNA, 17 nt, Human
gcccugugggcccccaa

SEQ ID NO: 1832443 - RNA, 16 nt, Human
gcccugugggccccca

SEQ ID NO: 1832444 - RNA, 19 nt, Human
gcccuuagcagggaaacag

SEQ ID NO: 1832445 - RNA, 23 nt, Human
gcccuuaccugccaggaagccag

SEQ ID NO: 1832446 - RNA, 21 nt, Human
gcccugugggcccccaaaugg

SEQ ID NO: 1832447 - RNA, 12 nt, Human
gccuagcauacg

SEQ ID NO: 1832448 - RNA, 19 nt, Human
gccuagcauacguacacau

SEQ ID NO: 1832449 - RNA, 17 nt, Human
gccuacaggagugagca

SEQ ID NO: 1832450 - RNA, 19 nt, Human
gccucaugcuaagacucag

SEQ ID NO: 1832451 - RNA, 22 nt, Human
gccucauguccacugguucuuc

SEQ ID NO: 1832452 - RNA, 13 nt, Human
gccuccauccuga

SEQ ID NO: 1832453 - RNA, 14 nt, Human
gccuccauccugag

SEQ ID NO: 1832454 - RNA, 15 nt, Human
gccuccauccugagg

SEQ ID NO: 1832455 - RNA, 18 nt, Human
gccuccugcccuuaccug

SEQ ID NO: 1832456 - RNA, 19 nt, Human
gccuccugaguagcuggga

SEQ ID NO: 1832457 - RNA, 16 nt, Human
gccucgaacuggcugc

SEQ ID NO: 1832458 - RNA, 22 nt, Human
gccuccuuugugaggaagccgc

SEQ ID NO: 1832459 - RNA, 13 nt, Human
gccucgaacuggc

SEQ ID NO: 1832460 - RNA, 20 nt, Human
gccccaaaacucuccucugc

SEQ ID NO: 1832461 - RNA, 11 nt, Human
gccccaaaagg

SEQ ID NO: 1832462 - RNA, 21 nt, Human
gccccaaaacucuccucugcu

SEQ ID NO: 1832463 - RNA, 16 nt, Human
gcccccucugcccugc

SEQ ID NO: 1832464 - RNA, 15 nt, Human
gcccccucugcccug

SEQ ID NO: 1832465 - RNA, 17 nt, Human
gcccccucugcccugcg

SEQ ID NO: 1832466 - RNA, 12 nt, Human
gccccugcuggu

SEQ ID NO: 1832467 - RNA, 15 nt, Human
gccccuggcagcccc

SEQ ID NO: 1832468 - RNA, 12 nt, Human
gccccuggcagc

SEQ ID NO: 1832469 - RNA, 15 nt, Human
gccccugcugguuca

SEQ ID NO: 1832470 - RNA, 16 nt, Human
gccccugcugguucag

SEQ ID NO: 1832471 - RNA, 11 nt, Human
gcccaggcagg

SEQ ID NO: 1832472 - RNA, 11 nt, Human
gcccaggcccc

SEQ ID NO: 1832473 - RNA, 12 nt, Human
gcccaggccccu

SEQ ID NO: 1832474 - RNA, 20 nt, Human
gcccaggccccugccacccu

SEQ ID NO: 1832475 - RNA, 21 nt, Human
gcccaggccccugccacccug

SEQ ID NO: 1832476 - RNA, 22 nt, Human
gcccaggccccugccacccugg

SEQ ID NO: 1832477 - RNA, 22 nt, Human
gcccacuguacuugcucuugau

SEQ ID NO: 1832478 - RNA, 20 nt, Human
gcccacuguacuugcucuug

SEQ ID NO: 1832479 - RNA, 15 nt, Human
gcccacuguacuugc

SEQ ID NO: 1832480 - RNA, 23 nt, Human
gcccacgcuggagugcagugagc

SEQ ID NO: 1832481 - RNA, 19 nt, Human
gcccacgcuggagugcagu

SEQ ID NO: 1832482 - RNA, 21 nt, Human
gcccacgcuggagugcaguga

SEQ ID NO: 1832483 - RNA, 23 nt, Human
gcccaggaaaggcuccaggagca

SEQ ID NO: 1832484 - RNA, 22 nt, Human
gcccaggaaaggcuccaggagc

SEQ ID NO: 1832485 - RNA, 24 nt, Human
gcccaggaaaggcuccaggagcag

SEQ ID NO: 1832486 - RNA, 13 nt, Human
gcccacuucugcc

SEQ ID NO: 1832487 - RNA, 21 nt, Human
gcccacgcccccacuggugac

SEQ ID NO: 1832488 - RNA, 17 nt, Human
gcccacgcccccacugg

SEQ ID NO: 1832489 - RNA, 16 nt, Human
gcccacgcccccacug

SEQ ID NO: 1832490 - RNA, 15 nt, Human
gcccacgcccccacu

SEQ ID NO: 1832491 - RNA, 17 nt, Human
gccauugacuucuuccc

SEQ ID NO: 1832492 - RNA, 19 nt, Human
gcauuuaggccaugggaca

SEQ ID NO: 1832493 - RNA, 18 nt, Human
gcauuuacuuuguguuca

SEQ ID NO: 1832494 - RNA, 16 nt, Human
gcgcaggcuggcccug

SEQ ID NO: 1832495 - RNA, 15 nt, Human
gcgcaggcuggcccu

SEQ ID NO: 1832496 - RNA, 21 nt, Human
gcgcagcauauucaggaagcu

SEQ ID NO: 1832497 - RNA, 14 nt, Human
gcgcaggcuggccc

SEQ ID NO: 1832498 - RNA, 23 nt, Human
gcgauucuucugcuucagccucc

SEQ ID NO: 1832499 - RNA, 22 nt, Human
gccuugaccauucuccaccugc

SEQ ID NO: 1832500 - RNA, 16 nt, Human
gccuugaccauucucc

SEQ ID NO: 1832501 - RNA, 23 nt, Human
gccuugaacuuugaccucugcag

SEQ ID NO: 1832502 - RNA, 23 nt, Human
gccuugaccauucuccaccugcc

SEQ ID NO: 1832503 - RNA, 22 nt, Human
gcgauucuucugcuucagccuc

SEQ ID NO: 1832504 - RNA, 14 nt, Human
gccuugaacuuuga

SEQ ID NO: 1832505 - RNA, 21 nt, Human
gccuucuuuucucccuuuuaa

SEQ ID NO: 1832506 - RNA, 15 nt, Human
gccuucucugaagga

SEQ ID NO: 1832507 - RNA, 16 nt, Human
gccuucucugaaggac

SEQ ID NO: 1832508 - RNA, 15 nt, Human
gccuguucagcucca

SEQ ID NO: 1832509 - RNA, 16 nt, Human
gccuguucagcuccag

SEQ ID NO: 1832510 - RNA, 17 nt, Human
gccuguucagcuccagc

SEQ ID NO: 1832511 - RNA, 19 nt, Human
gccugugccucugggacug

SEQ ID NO: 1832512 - RNA, 11 nt, Human
gccugggcaga

SEQ ID NO: 1832513 - RNA, 23 nt, Human
gccugggaucccucauccucaua

SEQ ID NO: 1832514 - RNA, 16 nt, Human
gcggccuuuggcuuca

SEQ ID NO: 1832515 - RNA, 15 nt, Human
gcggcuggcagccca

SEQ ID NO: 1832516 - RNA, 18 nt, Human
gcuaagugauccucccac

SEQ ID NO: 1832517 - RNA, 22 nt, Human
gcuaagugauccucccaccuca

SEQ ID NO: 1832518 - RNA, 21 nt, Human
gcuaggaauuguguuuauaau

SEQ ID NO: 1832519 - RNA, 22 nt, Human
gcuaggaccccuccaugugggc

SEQ ID NO: 1832520 - RNA, 20 nt, Human
gcuaggaccccuccaugugg

SEQ ID NO: 1832521 - RNA, 18 nt, Human
gcuauucaguaauaacuc

SEQ ID NO: 1832522 - RNA, 14 nt, Human
gcuaguugggcuuc

SEQ ID NO: 1832523 - RNA, 16 nt, Human
gcuaguugggcuuccu

SEQ ID NO: 1832524 - RNA, 20 nt, Human
gcucagggccuggcucaggu

SEQ ID NO: 1832525 - RNA, 19 nt, Human
gcucagggccuggcucagg

SEQ ID NO: 1832526 - RNA, 18 nt, Human
gcucagggccuggcucag

SEQ ID NO: 1832527 - RNA, 13 nt, Human
gcucaggaguuug

SEQ ID NO: 1832528 - RNA, 23 nt, Human
gcucaggagcccugggaggcucu

SEQ ID NO: 1832529 - RNA, 22 nt, Human
gcucaggagcccugggaggcuc

SEQ ID NO: 1832530 - RNA, 16 nt, Human
gcucagagcaguguuu

SEQ ID NO: 1832531 - RNA, 21 nt, Human
ggaagccagcaggcucucagg

SEQ ID NO: 1832532 - RNA, 23 nt, Human
ggaagccagcaggcucucaggcc

SEQ ID NO: 1832533 - RNA, 22 nt, Human
ggaagccagcaggcucucaggc

SEQ ID NO: 1832534 - RNA, 18 nt, Human
ggaagccgcuggggccag

SEQ ID NO: 1832535 - RNA, 23 nt, Human
ggaaaucaccgaaaacguggcug

SEQ ID NO: 1832536 - RNA, 16 nt, Human
ggaaauccaggguggu

SEQ ID NO: 1832537 - RNA, 14 nt, Human
ggacauggacaagg

SEQ ID NO: 1832538 - RNA, 13 nt, Human
ggacauggacaag

SEQ ID NO: 1832539 - RNA, 15 nt, Human
ggacagggcauggcc

SEQ ID NO: 1832540 - RNA, 22 nt, Human
ggacagggcauggccagguggc

SEQ ID NO: 1832541 - RNA, 23 nt, Human
ggacacccugugauggggcccug

SEQ ID NO: 1832542 - RNA, 13 nt, Human
ggacacccuguga

SEQ ID NO: 1832543 - RNA, 17 nt, Human
ggacagggaggugaccc

SEQ ID NO: 1832544 - RNA, 12 nt, Human
ggacacccugug

SEQ ID NO: 1832545 - RNA, 14 nt, Human
ggacacagcucuuc

SEQ ID NO: 1832546 - RNA, 13 nt, Human
ggacacagcucuu

SEQ ID NO: 1832547 - RNA, 19 nt, Human
ggaaugaaugucaguguga

SEQ ID NO: 1832548 - RNA, 18 nt, Human
ggaaugaagcaaugcuuc

SEQ ID NO: 1832549 - RNA, 12 nt, Human
ggacacagcucu

SEQ ID NO: 1832550 - RNA, 17 nt, Human
ggaagcucagggccugg

SEQ ID NO: 1832551 - RNA, 16 nt, Human
ggaagcucagggccug

SEQ ID NO: 1832552 - RNA, 15 nt, Human
ggaauaccugucccc

SEQ ID NO: 1832553 - RNA, 21 nt, Human
ggaagcucagggccuggcuca

SEQ ID NO: 1832554 - RNA, 22 nt, Human
ggaagcucagggccuggcucag

SEQ ID NO: 1832555 - RNA, 19 nt, Human
ggaauaccugucccccuga

SEQ ID NO: 1832556 - RNA, 16 nt, Human
ggaauaccuguccccc

SEQ ID NO: 1832557 - RNA, 16 nt, Human
ggaauauauaaccagu

SEQ ID NO: 1832558 - RNA, 21 nt, Human
gcuuggggaccagagcugcca

SEQ ID NO: 1832559 - RNA, 20 nt, Human
gcuuggggaccagagcugcc

SEQ ID NO: 1832560 - RNA, 18 nt, Human
gcuuggggaccagagcug

SEQ ID NO: 1832561 - RNA, 17 nt, Human
gcuuggggaccagagcu

SEQ ID NO: 1832562 - RNA, 22 nt, Human
gcuuggggaccagagcugccac

SEQ ID NO: 1832563 - RNA, 13 nt, Human
gcuuucuacccag

SEQ ID NO: 1832564 - RNA, 19 nt, Human
gcuuucuacccagcgagcc

SEQ ID NO: 1832565 - RNA, 22 nt, Human
gcuuucuacccagcgagcccug

SEQ ID NO: 1832566 - RNA, 23 nt, Human
gcuuucuacccagcgagcccugg

SEQ ID NO: 1832567 - RNA, 16 nt, Human
gcuuggggaccagagc

SEQ ID NO: 1832568 - RNA, 23 nt, Human
gcuugggcuucauccuccucaga

SEQ ID NO: 1832569 - RNA, 19 nt, Human
gcuugaccgugaggccaga

SEQ ID NO: 1832570 - RNA, 18 nt, Human
gcuugaccgugaggccag

SEQ ID NO: 1832571 - RNA, 17 nt, Human
gcuugaccgugaggcca

SEQ ID NO: 1832572 - RNA, 23 nt, Human
gcuucuucagagacuccugcagg

SEQ ID NO: 1832573 - RNA, 21 nt, Human
gcuucuucagagacuccugca

SEQ ID NO: 1832574 - RNA, 19 nt, Human
gcuucuucagagacuccug

SEQ ID NO: 1832575 - RNA, 17 nt, Human
gcuuaacuucacauauu

SEQ ID NO: 1832576 - RNA, 16 nt, Human
gcuucuucagagacuc

SEQ ID NO: 1832577 - RNA, 16 nt, Human
gcuuaacuucacauau

SEQ ID NO: 1832578 - RNA, 21 nt, Human
gcuuuucccuuuuuuuaagua

SEQ ID NO: 1832579 - RNA, 20 nt, Human
gcuuuucccuuuuuuuaagu

SEQ ID NO: 1832580 - RNA, 14 nt, Human
ggaaagaggcucug

SEQ ID NO: 1832581 - RNA, 20 nt, Human
ggaaagacuuuuccaacccu

SEQ ID NO: 1832582 - RNA, 17 nt, Human
ggaaagaguaggaagac
